United States Patent Application Publication US 2006/0134663 A1 - sequence listing, part 106

SEQ ID NO: 324450 - DNA, 1401 bp, Homo Sapiens
  misc_feature (71)..(71): n is a, c, g, or t
  misc_feature (120)..(120): n is a, c, g, or t
  misc_feature (125)..(126): n is a, c, g, or t
  misc_feature (881)..(881): n is a, c, g, or t
  misc_feature (1035)..(1035): n is a, c, g, or t
  misc_feature (1317)..(1317): n is a, c, g, or t
agagcccaccaggtacgacgaccaggttaccagaaacccaccaggcacacggggcagaaagccagcgtccnatgccccagcagccccctcctgcctgttcctggctccccgagtcccgcncctcnncagggcccccacctccacggcccacttcattttctgttctcattttgcagagttgcacaaggagagaactcagcatggggggttggttctttgggttctgtttgtttatttgtttaatttaatgatttgtaaagtgatgttcctcttccttttttacacttttcagctcatatttaacctctgtttggaaaatgcttcttgtaactgtacatttttttgcttcctaataacaatgacggcggaaagagaaagaacaacaatcaaagaaaacctggcggccccctcggccatcgaaaagctccctacaccatctcgttcggcgcgcgggcccacccggaaagcgaacatgctccctacctggcttccgaggaacgatcctgtgtcatagaccaggcgcctggggattctccactacctaaccaaacccctcgggccggcaaaccggaatcggtttccgccacccaccctcccagcatcggcacgttccttataggggctcatctacctggggaccctcagctaccctcctggcaagactcttaccggccgacgccctttcgtaattatccacaaattcgaacgcgtcgcgccggccgcccttgtatccacccgttcattcccggccgcagcggtaatgttgggcccgggatattatacgcccccttatttgtcgattagccgcaattttggctcacgtgacccccgctaaaatacaggcgtcgggcgcaataaaaaggccccccccggtcgcctanaccgaatttgagctcctgtgtcccgcccgctgtacactgcagaaaaagcgccctctgtgcacagaaaaatgtcgcgccccactatgcgccctcagccacgaacttataagagagatcatactgacacctgttgcgcctctccgcgtgcactctncttggacgccaggtcgaagtttagacgactcattcttcttcgtgcgccgcccaccctttatgccccgcctcgcgcatactaaactcgcggtggcggggaccggccgcggcatgactggaagaacacgattgcgggcgacaccacactaattactcgcctgaggtgtccacccccgcgcctcctgttataaaaccgttatccaacaaagatagctttggaggcgcatgctaatgatcttgcgcagcttaccatgcgcctgtgtgagcggccgccgccttggcngcgctcgcggggccatgatgaacagtctcttgtgggacccaccaataaagtgagcccctcattctcaatgtggtggcacaaccc

SEQ ID NO: 324451 - DNA, 1561 bp, Homo Sapiens
  misc_feature (80)..(132): n is a, c, g, or t
  misc_feature (592)..(669): n is a, c, g, or t
ggcgaaagaatgaacgttcaccaggtggacgggttgcaccaggagccaggggtcgggcgtcagaggactgtggaaaattnnnnnnnnnnnnnnnnnnnnnnnnnnnnnnnnnnnnnnnnnnnnnnnnnnnnntctgaagcgcagtgccaccaagagtggttttaggtggtgtattagtaccggagggcgaggctgggatttacttaatagtggtagggggtagccatgggacatttgtatagggaaaggaaaagggggcaaggtggaggatagggcgtggataaagttgggaaacgcggaggtggtattgtgtaatgggaaagggcgtttatgggcggttatacggagtggggggggcgttgggtgctattgagagtgtttgtaagtgccggaggtgtgtcaagcgaaggggaccaggggaggtcgtgcaaacgtaatagccggggcagccgagggggcgataggtagtaggtaggaggcgcgggcgggggtaaaaggagaaggtccgggggccgttgtaccggaggcgtagggggggcaagctgtgtataggaacatgtgggctttagcgttttgtgcggtgtgagtgagnnnnnnnnnnnnnnnnnnnnnnnnnnnnnnnnnnnnnnnnnnnnnnnnnnnnnnnnnnnnnnnnnnnnnnnnnnnnnnccactcagctaagaggtatttattcagttgctggcacctctcccagtgtaaatctggacttggctccagagaaggtgtttcatcacagcgggggcttagtttgcttcctgtagttagtggcgtttcatggttttctttatccagtgtacaaagcttgagactttggtgcaggctcgtggaggcatgccattgtttcgtccataggagacaatgccctgggccaccttgttacacacaagagggcctccagagtcccccttaaaggaagtctttttaatctctgggtcccccacgcacaactcaatggtactgtcgtaataatggcgtaagtcagattcgcactttcgatcttcctgcactgtcatcttccacctcttgtagtgtgtgtgagtgttttcccaggggggccgtctgcccccagccggccacactgcatgtctgccctggcttcacctgggccttgttgctaggtagcctgaggggctgcacagctctggtccgcttggcctttctctccagctgcagtagcatgatgtcattggagaagttcttaggattataggctggatgggggatggctcttttcacagggataaactgctgggtcggctcctgttccttgatattgtgggcccccaaggtgacatttatggagcttccccaacagtgagcagctgtcagcacgaagtcgtctcgtatcaggaagccaccgcacctcttcagagacttctgatcccagatcataagataagccatgtaggggcgggagtggggcttggcctcatgtcccccgatgatctcccctgcatctgccctgggcagcaggaggaaggccagcagaagcaggattggttgcatcttctcaggaaggctgccctggttggagctcccc

SEQ ID NO: 324452 - DNA, 552 bp, Homo Sapiens; identical to SEQ ID NO: 150647

SEQ ID NO: 324453 - DNA, 241 bp, Homo Sapiens
aagcttctcaaaacactttttaattctccatttttcccatcaagaccaaagttgtacaaacaggtacaaaatcccccaccttcagggtgtgaggcatcactgtgtgtggtcaaagtcccatctcctcccctttccctttccacgagttttcaagatgtggcccagtcagtgcattgctgccttctatgacctatgaaccatggggcagcaagaggactggtgaccgggggacatggtgacc

SEQ ID NO: 324454 - DNA, 314 bp, Homo Sapiens
cgtgatgaaacttactattcaaatgctaaatgttttcaagctttaataaggtatatatcaattccaagtaccaagcataatataaaaattcaaattcatgggtttactcttaataagcatcaaaagcaaattttgcgcactgaatcctatcttactcttgattggcacaatgcattcagagatgagttataattaggaaaaaagagtgtccactgaatgcatcatgtgtaaaaatgcaattaacatttcaaaaccacattaaaagggaaaatacctaaaaagttaactcttaataaaattatttgaaacaatat

SEQ ID NO: 324455 - DNA, 1398 bp, Homo Sapiens; identical to SEQ ID NO: 97838
  misc_feature (41)..(41): n is a, c, g, or t
  misc_feature (92)..(92): n is a, c, g, or t
  misc_feature (97)..(97): n is a, c, g, or t
  misc_feature (138)..(138): n is a, c, g, or t
  misc_feature (152)..(152): n is a, c, g, or t
  misc_feature (240)..(240): n is a, c, g, or t
  misc_feature (367)..(367): n is a, c, g, or t
  misc_feature (390)..(390): n is a, c, g, or t
  misc_feature (417)..(417): n is a, c, g, or t
  misc_feature (434)..(434): n is a, c, g, or t
  misc_feature (436)..(437): n is a, c, g, or t
  misc_feature (446)..(446): n is a, c, g, or t
  misc_feature (577)..(577): n is a, c, g, or t
  misc_feature (716)..(716): n is a, c, g, or t
  misc_feature (721)..(721): n is a, c, g, or t
  misc_feature (843)..(843): n is a, c, g, or t
  misc_feature (996)..(1004): n is a, c, g, or t
  misc_feature (1193)..(1291): n is a, c, g, or t

SEQ ID NO: 324456 - DNA, 215 bp, Homo Sapiens
ccattttcttcatgtccttttctgggccgctgtcgagctttggcagcctccttctttttggctgccttcttcttggccaggtcggagggcatgatgatgacccacaggggtaggttactgttgtttcagggagctgggcctcgctgctcggcctatgtcgcaacagagctgctccttaggatcctccgcgtgcggccggctcaccagccaatccc

SEQ ID NO: 324457 - DNA, 1339 bp, Homo Sapiens
  misc_feature (201)..(201): n is a, c, g, or t
  misc_feature (251)..(251): n is a, c, g, or t
  misc_feature (374)..(374): n is a, c, g, or t
  misc_feature (429)..(437): n is a, c, g, or t
  misc_feature (503)..(512): n is a, c, g, or t
  misc_feature (868)..(884): n is a, c, g, or t
gtgctggtccccccctactgtctgtgttcccccgcccacaccataggggcgggcgacaataaagttgtttattttggtacgagcgcttaacagtcggggggagtttcaaccaccaagaaggggtgtttgttagaggacacacccccccgcgtcctccccgtcgtcacggcatcattacccccgcgcggcgggcaccacccnccctcgcttataggcgcccacccggcgtttgtgcttcttaaggaagaaangggcgcgtatttatttagtataaaaaatggctggagttcgcgggttacgttagaactacagcggttctggtccgcgcacgtgcagccgaagcgacatttttttgtacaaagagaaccccgganaagacatttttccagttgccccgcgatagcgctgacgcacgccccttcactcgannnnnnnnnggggggcgccccatcggccgggttggagtagagaaaaaaatattttaaggggtgcgcctcttggtnnnnnnnnnnccccggcgggcctctgtttgagtaaccaccccccactgtctgcgcacttacggaggcgcgccgcggggtgagtttgtgtgtggtgccaaggggaagtgttggttttttgcgggcgatgtgcgtcccgagaccacccccccgcggggtttggccccgccccggggggcgtctcttttttgttttgggggggaaaagttccagccgcccttcagcccagaggcgtgcggggtttctcccggcgggaaaacccgctttacgcccccatttcccgctctccttttcgggggccggtgggccgcccacagcaacggttttgcaaaattcttttggggggccccgggggccgccggcaaggnnnnnnnnnnnnnnnnngcgcgcgttttgcgccgccgagcaacgtcgggggtggggaggagcccttgggggtttgttcttggcttgtttcggtttcttgtgtcaggttcaaaaacagttttatttcattattatccaagtacctttgaaaagataattaattgtacaagtgtcatcgcatgaaaaacagactcgggcagcccctgctggcctagcctgagaaatgtacatatttacacgggccctcagaaaggaggacccaggactgcacagccggcggctggaggcaggtgcagtgctccgtcgccgattcacacagtggcaggcaagagacaagctgtgttgaaggcacttggtggcgcgtacaattgacagaggccctgcaggcctctgcatccgggcctgggccccagccagacctgggtacgtgggcaaatcccagagggaaagtagatcccagcacacgtgcccaa

SEQ ID NO: 324458 - DNA, 254 bp, Homo Sapiens
aactagtttggaagcagttttaatgaagatggaaatgtttatcaactcaacacaggtacccccaaaatacaaatcaaaatatcatcttcagctgcatagcaaatatgatttaagaatttaacatcattatttgatcacaagcgtaaatatgtcaccataaataaatgtaaattcattgtacaaaaattccccaacatctcttaatacaaatatgggtacatttgacagtttctggaaaccggattatttttaaa

SEQ ID NO: 324459 - DNA, 453 bp, Homo Sapiens
gggttggggtgcccaagcccctggtaaatttcccccaggtttatttcagggagggacttgaagggagggggggacttcgccttgaaacccccggtgggccgagggtgtgggtgagccaagaattgtgccatggtactccagctggggcaacaagaacaaaactccgtcttgtccgagtccgggtcggggtcggcctggctcaagaggtacaggaaggatttcgggtcctgacacagcgtcgtctgcccagtggtgaggaagtaggtgccgccgctgtagagccggacccacttggacctgctgctggggcgctgggccaggacgctgagccccgcgctttaagggaggcacaagaagccaccccaaccccgccccgagcctgccacgggccagcggcaggagctcgcagtgattccccgccatgatcccagcaagccccaccacacctccccc

SEQ ID NO: 324460 - DNA, 394 bp, Homo Sapiens
  misc_feature (353)..(353): n is a, c, g, or t
  misc_feature (375)..(375): n is a, c, g, or t
acaggctccaagcacatccacccatggtggctttattcagtcacgtccccacgcccacggctccctccaccaggcagacagaggggaggccaccccactgcaaagggtcccagccagtgggcaccaacctcaggaagacgtggtccccacctggagcttccctcggctgccctggcccttgagcccgtcctgaggatttgtgctttgactctgacagggagcagcaggaagctgccagcccactgcctccatgcgggtccttggagggcagacggtggagcggcgcttcctcagctcccgcggtcaggccccatcagggatggttcacagtccagccacaggggcgattttgncccattcagtccccctgggggnaagcgaccagattcctggg

SEQ ID NO: 324461 - DNA, 950 bp, Homo Sapiens
  misc_feature (131)..(162): n is a, c, g, or t
  misc_feature (276)..(291): n is a, c, g, or t
  misc_feature (323)..(340): n is a, c, g, or t
  misc_feature (393)..(413): n is a, c, g, or t
  misc_feature (455)..(466): n is a, c, g, or t
  misc_feature (924)..(925): n is a, c, g, or t
atttggaggcccccctcttgggccctcccccgtgggtgttgggtcccccgcaaaatgggccccccacgagaacctccccttctggggggttgtttgttccacaaaagcctctcgggtgtttcccccgcccnnnnnnnnnnnnnnnnnnnnnnnnnnnnnnnnagaggccccccaaagcccccttttgtgtcccttctgcccccggggtttttctcctctgtggagaacccgcctcttagggccccccggtttccccctttcacctcccaggggggnnnnnnnnnnnnnnnnaacggaaattggttttgagaaaagttttttcnnnnnnnnnnnnnnnnnnccgcccccgagcacccttctttcttatgcagtttttgttcccgggcgcctcgnnnnnnnnnnnnnnnnnnnnncccttcggtgccgcccccggcggtggggtttttggggtgtgnnnnnnnnnnnncatggtctgatttattggtggtgaatacacaggggcaggcccaggacaagcagcttggctactccccctctgctggctgcccgaccggcagagggggctccatgtggcaggagctaggctccaacgcccactgttcttgccaccctctgggctcccaggctgggctccgctaggctcctgtctcccctgccagttagttaggcaagttcaggtgtggaggccgcagggatagatccaggtggctctgggctgggccctcttctcttcccagcggggaaggtgctgttggcctggctgggctggcctgaatctgtttcaagttctcccttcctgcccagctcagttcaccagtgctggatccaggttcaaatgacagggacttgggtttttacaacagcgtgggcaagtggtctgtctcctgggcagccatatcccagaccactgggttgaaggttctnnggggtggagggaccccaaggtgttc

SEQ ID NO: 324462 - DNA, 420 bp, Homo Sapiens
  misc_feature (239)..(239): n is a, c, g, or t
  misc_feature (388)..(388): n is a, c, g, or t
ctggtggaattaattactcttttattagcacaaaataacagcaacctagcagccgcacggcccgagaataagttaaggcacagagcaggcgacgggcggctttcccagggccaggcctgcatgccccgaacttcctgagcaaactccctaggggctggggtttcgagggtcctggagggcctcttcccttgagatgaggggaacggaacagggcaagaggggcgcccccatggagaagnggggttccacgttgcgccgcgatcacttctcgaagtagggcaggtagaagaactggaagccccggtggcccttgaccgcgcagtagatgaagatcacgtgatagattccaggcaccaacaacaggaagcccggcacgaagaagatggcnttggagacacctgggagagggtttcgtttcca

SEQ ID NO: 324463 - DNA, 304 bp, Homo Sapiens
taggggaaaaatgcatgacagagtctttacttttaaatgattatcgatacaccaagtaatacatgtaacaagttcttgaattctatcatctagtaattttgattaagagaaactaaaagcagcccaaacaattccactagtattcactgttctaaccattagcaagaatggactactttaaggctggctgctgcttcacacaggttacaaagaactatttactactttttcatagataaagcccctgaccttcaagaaagtgttagggaaaaaaaattatttaatcccttcctttcttcaaacc

SEQ ID NO: 324464 - DNA, 1177 bp, Homo Sapiens
  misc_feature (48)..(72): n is a, c, g, or t
  misc_feature (119)..(130): n is a, c, g, or t
  misc_feature (231)..(239): n is a, c, g, or t
  misc_feature (373)..(487): n is a, c, g, or t
ttgtatatgcccgggggcggaattagggtgtcactcacaccccttttnnnnnnnnnnnnnnnnnnnnnnnnnaaaatgtgttaagggaattccaccccttctttccaataattggccannnnnnnnnnnnaaatttaaattgagcttgccttggaccccctgggtaaaacccagaaaggcccccgaaacccctttgggattttttaaaacccttcggttccccccgggggnnnnnnnnnggggggaatccaaccctatgccatgcccggggtttcctttggaaccaggttggcccagtttcctttacctctggggcccccgccccaaaaaaagggtttgaaaagtttttgagggccgaggggggccgcaaagnnnnnnnnnnnnnnnnnnnnnnnnnnnnnnnnnnnnnnnnnnnnnnnnnnnnnnnnnnnnnnnnnnnnnnnnnnnnnnnnnnnnnnnnnnnnnnnnnnnnnnnnnnnnnnnnnnncaacacaagtgatctttaattgctttgacagaacaagggtgtaaacagcgttagtctacaggcctaccctttccctttcctcctctgcagctgaggaaatgggcagtcccatcgctagaaccctgttcttagaaattacctggtctcttgctctgacagatgctgagctaatgctgggtcacatatttaacagctagcctaaagccatagggtggaacagagttggcaagagcctggctcaggtgtagcgaggagtagagagggaagacaaagggagtatcagacccctcacacgggcctctcctccccaaagatggttccacctgggtgtgttcaggagtcactaccttcacgctccctcctcccccaccccagctcttccagggtatacctaaggggtccagagcaaggaaggggggttgagctgggcccgaggaggtgaggttggctggaatttagggtggctggcagaggagagctggggaggctgcagcctttacagcagacagcaggcacggaatatcagcaggtccttcggctcagtaagcttcagtgagacactctcattggccccaatgaagagcacgccaccacgttgcagagggattggtgtctgggttgtgggtgtgctggctattactgtcccctgtaccatcaggaggatgctggcagagtccagtgccaagaccc

SEQ ID NO: 324465 - DNA, 441 bp, Homo Sapiens
  misc_feature (27)..(27): n is a, c, g, or t
cgacaagaattgtttttttggttatangatggtgtttggtgtaaatgtgagtttattgacgaagacacaaggtcaagcttcccccaacccccaccctcccgaaaaacaggacccaataagaacagaggaatgagaagcattcttagggcaacatttcccctgccccccctccccatttctttccagagtctcaagcttcacaacacagacacagagcaggcttgggtgaggacagacactcagggaatctctgaccagcaaaagagttctgggtgtttgcttctcctgctctttgtatgatgccagctgacattacaaagacacactcaggcagaggaggggggatgcagggcaacctccatcccacttccccaatttggccaagcttggaatgagccaagagggaagccgtggtggaggcaacaggttttgcctctcacc

SEQ ID NO: 324466 - DNA, 406 bp, Homo Sapiens
  misc_feature (367)..(367): n is a, c, g, or t
  misc_feature (375)..(375): n is a, c, g, or t
gggttctatgagccagaggaattcccaattcactttgaaattaccatacctatcttgccatatcaaacatttcaattctgttaactaaatgaactacataatatccttaaaaatcagccagagaagagaaaaacaaatctcgtcttcattattgactttgaaccaaaacttattctttcaaaggagtagtttaacctactaaatatgtctattataagatcttctttcttaggaaagtaggtattccttctttttcattcctggaaatgggtatttcttacacttaaacaagttatgggacaattgttaggctaggtatcaggttatggataaattgcctaaaattaaattatctggtttagggggnccatatancacattcctatggcctttaaacctggtattt

SEQ ID NO: 324467 - DNA, 392 bp, Homo Sapiens
  misc_feature (347)..(347): n is a, c, g, or t
ttcctttttggtctagaatcatagtttttgtttgagtcatctccaccatgccttccatgctgcctgtcttctcggagggggtttttggttgtaattcctttcattttgctctgctcaaatgtccttcctatttggtcaggagcccttggccccctctccacccttgggctggggccaagccctcttgccagtcccttctctcttcaggaaataaacatggacaaactcagaggtagggtaagggcagggagtcgttcagcggagatgcttacattccggtgaggttgggtagacgaggtgccagggccccatcgtgccggggtgggaggggcggctactttcaccantgcccggacaaggcacccagaggcccctgcaattggccgagtctc

SEQ ID NO: 324468 - DNA, 1163 bp, Homo Sapiens
  misc_feature (605)..(605): n is a, c, g, or t
  misc_feature (771)..(779): n is a, c, g, or t
  misc_feature (843)..(991): n is a, c, g, or t
  misc_feature (993)..(1012): n is a, c, g, or t
  misc_feature (1054)..(1065): n is a, c, g, or t
ggagctggctctgcagcttttatcacaaattccttaatgaatcctatatggatggttaaaacccgaatgcagctagaacagaaagtgaggggctctaagcagatgaatacactccagtgtgataattacgtttaccagaccgaaggcattcgtggcttctatagaggattaactgcctcgtatgctggaatttccgaaactataatctgctttgctattttatgaaagtttaaagaagtatctgaaagaagctccattagcctcttctgcaaatgggactgagaaaaattccacaagtttttttggacttatggcagctgctgctctttctaagggctgtgctcctgcattgcttatccacacgaagtcataaggacgaggctccgggaagagggcaccaagtacaagtcttttgtccagacggcgcgcctgggtgttccgggaagaaggctaccttgccttttatagaggactgtttgcccagcttatccggcagatcccaaatactgccattgtgttgtctacttatgagttaattgtgtacctgtttagaagaccgtactcagtaacaggccggaaaattgtgctctagaagaataaaactngaaaactctagagaattttttttccccattgatgtttagaaagtttgagactgaaacagggaaggccataaaatatctggttcatatcacctgttgggacttttccttttggattcatgctttctggaaggtttaaattcattaacgttaatagttaattataacnnnnnnnnnaacttaagaggattcagggttaagcaccaactaaattaaatcatgctatttaatttaagtatannnnnnnnnnnnnnnnnnnnnnnnnnnnnnnnnnnnnnnnnnnnnnnnnnnnnnnnnnnnnnnnnnnnnnnnnnnnnnnnnnnnnnnnnnnnnnnnnnnnnnnnnnnnnnnnnnnnnnnnnnnnnnnnnnnnnnnnnnnnnnnnnnnnnannnnnnnnnnnnnnnnnnnncgccccccccgccccaagaaaaatttttctcacccttttttnnnnnnnnnnnncgccccaacccggggggaagaaacaacggggatatacaatgtttccccacaaaaaacacccgcgggtaaaaaaaccagggttgggtttccccccccac

SEQ ID NO: 324469 - DNA, 464 bp, Homo Sapiens
catttcttttggggattgtgggctttgattcaagccaaatactccactattgagtttgatttccttggtatgtcaatttcgttttaaccagtactttaaaatgaagcctgaggttactgcattaaaagtgcctgagtaaagaagagatttaattattctccagtagctgagcaatgcttgtgaatcttttcttaagaaatcccaaaaagccaatattagttaaaattctgttgtttaatttggttatcttgctttataaattatgcctctaaacaatcaaatctatttttgaaatagactgaatgatgtcaagaaatatacctactgctatccgtatgtggtggattagaaatgtgttaaatctgcaaaaggtataaagatgtcagtttaatttctttgataatttaacctatgttgtatgtgaattatttattataaacttagcacgattctgtgactgttaa

SEQ ID NO: 324470 - DNA, 506 bp, Homo Sapiens
  misc_feature (305)..(305): n is a, c, g, or t
gtttcagccattttaatacattcaagaatatttactagaacaacatttaaacgtatcgtcggtccgcagaagcctgggatcgagagaaatagaaacgcgactggcccttttgcagtaaagcttgtgcttgaagggagaagaggcaaagtggcttcttggagacttcgtgccagatgccacaggactgagagcatctccaaatgtcactttaaacacgtgtgagcatctatagtcattcctaaagcccacagtgtcctaaggatcctattagacgaggccaaaagggcaatgcttctgggaccctnttcccttgcagctctgcacgcaaaccttccccaaggaggggcccgaggcaagcctctagataggcggggcaagccatccccgtaaccaccctctttccctgttgctgacctcaggcctgatgctggacccatgagactcccagaggtaaaacacagatacagcccatccatccatggccaccttcctccagaagatcctgg

SEQ ID NO: 324471 - DNA, 736 bp, Homo Sapiens
  misc_feature (297)..(297): n is a, c, g, or t
  misc_feature (714)..(714): n is a, c, g, or t
gttattaggaaaggggctgtgcttgtgggtgcagctggcggcacacctgggtcaccagatggccagaagctgcccatcagccctgcccagatgtcagcctgggagctcaggctgctgccgcttggctggatgccctttagtgaaatgcctgttttcagctaagaaaggagaggccaggcaagcaaagtcatgccacaaagcatatcagagacccccgcagactcctggccccgtcccgccccccgtctgagttgtgtttttgttgctgttcctctgttgatggccagctctgctgtntggcatgagccactgatgttcatgtgagaattactgtttttaagtgtctctccacttaggtgtcctcagttcccacttttgctctcatttgccttcacagaggccactccacctgtccggatccagctgtctggtcatggtttggtttatttattttgtccttcaggggctgttttgccctaagaatgagggggcttccctgggtctgcagttcccaactttatcccttgctgggccatgcgagcccagccctggttgcctcatgggatggaggggtaaggggtccccaggatcttctggaggaaggtggccatggatggatgggctgtatctgtgttttccctctgggagtctcatgggtccagcatcaggcctgaggtcagcaacagggaaagagggtgggcacgggggagggcnttggccccgcctatctagaggc

SEQ ID NO: 324472 - DNA, 1553 bp, Homo Sapiens
  misc_feature (447)..(455): n is a, c, g, or t
  misc_feature (543)..(543): n is a, c, g, or t
  misc_feature (634)..(677): n is a, c, g, or t
  misc_feature (789)..(828): n is a, c, g, or t
  misc_feature (865)..(896): n is a, c, g, or t
  misc_feature (947)..(976): n is a, c, g, or t
  misc_feature (1003)..(1026): n is a, c, g, or t
tatcgggcgcaaaagaggacgcgcgtgcatgtacaagaacaaacatttaccgggtgtgtacaaacgcgcaagtcgcggggttggtgggggggacactggcgtgtctcttatgtcgactggtcttagtggttgtctcgtgagggcggacattccgtgggtaaggaaagcagaggtgtgcggcggcgcagaatgtgcggggtgtgcggggaattcgtcgtgagaagtggacaaaagtgcagggggtgacccaagaggcagaggtgaatagttgggtgaccgcctgtaaatagaggcattggcataaggggtaaggttgagggggacgagggtagaatatgggggaataataccacataactttagtgggccggggggcctataatcaaatataataggtcgatgaaagggcgcgaccggtacgggggaattaatggcgataagcagaannnnnnnnncattatgtattggcgcggtgactgttcgcttttagggcgcggagcgcgcgcgggccatacatcaagagtagtcgagcggaattatggnggtggacaatagtaaagagccgctgcgaaaattgggaattattaatgcggcaagatggcgtgaatcaaaaggcgagaggtagatggcaagnnnnnnnnnnnnnnnnnnnnnnnnnnnnnnnnnnnnnnnnnnnnataaattatacgggagggggtgtcgaagggggcgtatatgggggatctggggagggacgggcattcgctgggttttttgttgggtttattagggaggctttaaatggagtcnnnnnnnnnnnnnnnnnnnnnnnnnnnnnnnnnnnnnnnnagtctgaaggcggtcgcgcgagttggtcttaggtaannnnnnnnnnnnnnnnnnnnnnnnnnnnnnnnaaagggtatgggaaactagggaattaaaagcgcgggcgtaatgagaaagannnnnnnnnnnnnnnnnnnnnnnnnnnnnnagaaacagagcggggtatgaaaaggcnnnnnnnnnnnnnnnnnnnnnnnnagtaggagagtgtatttcttttttagaggttcgcggggaatatggtaatcgtgaggagagggggggtgttttttgttttgtttgtaggcagagttcttaggatgtatttttgttcacctgaaaaataaaactttttaaaaatatacaggactttttgagtacaggtatatcttaaatggctgaattataaataatgtctctggtcatgttcacagctagggctggagcaaatgtcccaattccagtgaaggctttggagagtcaggaggccagcagctggacctatgagtggcctctctagactctctgatccatcccaaagaggatttaaacagtccagaaagcagggatcaggaagaggacagggaagtggactcccagatgttctacaagttcaaaggattcttggaataagagatcaatttacaaattattaaaatataggactaaaaattcacacagtaaatataaattacaggctattattgaagttgtaaagtggcattttatgtttcttccccatctca

SEQ ID NO: 324473 - DNA, 431 bp, Homo Sapiens
gttttcctccaaggcatttattaactcctgagtgtcacggggccaggggaaggctggagccaaaaccaagtctctgggggcgggggtcctctctggatccccactactcagctccccgggctccccatgcagccctagagacgggagaagtccagtgtgccgttccacctccctccaagtcccaagaaagtgggaggcagtgttccactccagtgtcgtccagacgaacaagtccaaccagtctggaaccctaggccggcgtggtcaggtcgggggcgggagggccgggcctggctctgtctctgtctgtgtccaggtcacacataaactgcccgccgtgagatgagggagccgtccagctgggactccatgtcatcctcgagtgctgggggtggaggcaacatgaggcctttctctgccttctcttcccc

SEQ ID NO: 324474 - DNA, 472 bp, Homo Sapiens
ttttagatcagtattttttattggatggagggtaacaatgtagagaggctatcttaacatagtagaaacaacaattattagatagcttaaaacacagaattgaagttacttaagtaaaaatgatacgtatttgaggaaaaagggttgaaaaagtatatgaactctgatggctacttctattcttatgcgaagagggaacagtcctcaaaattcatgctatcccatgattgcgccactgcactccaggctgtgctacagatactcttgaaatgcttagtttttggagatctctgctcttcagattgtcttcctgatatggatccgtttgtttggctttctgtagttctattttgagatcgctacattctttcctcatcagttccagctcttgttccaaaccatagatcttcaggtcacagctcaacttttccacctcccagtttgatgaaggtggatttaaattcctcatccc

SEQ ID NO: 324475 - DNA, 376 bp, Homo Sapiens
  misc_feature (228)..(250): n is a, c, g, or t
  misc_feature (319)..(319): n is a, c, g, or t
  misc_feature (325)..(325): n is a, c, g, or t
  misc_feature (349)..(349): n is a, c, g, or t
tatcacaaagtttttattgaacaaaaataatatgacagtaaaaatgatacataaagtgaagatttgcagtcatagaaaagatgtgtacaaagagaccaacattcaggttatatagttctataaaacttttcccatagcagtttaacactgattaagcagacataaaagggaaaagaaagtcattaatgttctttgaaacctattttctgagtaaaatacctctgctannnnnnnnnnnnnnnnnnnnnnnggaatgagggcagagctatatgaggtgaggttattcttcagttccctccagttctctggtttgtggttncagggnggtattttcatcccatccaaaaanttgtggggaatttttggccatttccta

SEQ ID NO: 324476 - DNA, 354 bp, Homo Sapiens
  misc_feature (144)..(144): n is a, c, g, or t
  misc_feature (172)..(173): n is a, c, g, or t
  misc_feature (202)..(203): n is a, c, g, or t
  misc_feature (231)..(231): n is a, c, g, or t
  misc_feature (288)..(297): n is a, c, g, or t
aaaattttatttaaaaaaccttcggtgcaatattaaaaagcaatacagccagctggagcgacaatcaacagaaagaaaagagggaggagagaaaaggcccgaggaaccccaacccagctagtcccctagggctggaggcagggnagactgagaaggggggcatgggtggtannggagggaggaaagaccacccaccaaaatnnacaggcagatccaaacatttatacaggnaacatctggctgaacggaagaggatcttggggagatgagaagccccccacatttcannnnnnnnnncctaaaatgtcctggactgggtggggaggggtcagcccacctgggggtttaagggag

SEQ ID NO: 324477 - DNA, 327 bp, Homo Sapiens
  misc_feature (118)..(152): n is a, c, g, or t
ccacacagcagatgtatccaaacacataaaaatctctacagtctggggtcgctacagtttatatttcaggaaacagagacacagtggccgagtcctcactgtaaacaagggccacctnnnnnnnnnnnnnnnnnnnnnnnnnnnnnnnnnnnagaagcagctgtttctggagagagaaggggtcatggtggccccccagttaccctccaggcattccctgccttctttggcccccaaggaacaacctccccctctccccgaggtaaggactcccagccagtgagccactctgaacatcaaaaggtaaaacacgcatgagaggtaaga

SEQ ID NO: 324478 - DNA, 456 bp, Homo Sapiens
  misc_feature (384)..(384): n is a, c, g, or t
  misc_feature (432)..(432): n is a, c, g, or t
ggcagttagaacatagtttattctttaagtgtaggagtgcatgacataacacttgcctggcatgaccttagatcttacgaataatttgttattgccacaaagggtctattctgtcagccttatgatctttattttgacattaatgctggtcagttgctgtgtctaaaccataaaagagacggagatataatgaagcgtgtctgacctcccatcccgtcatggccaggaactcagttttaaggtttttctggggtcactttggtcaagaggggttccattcagtcaattagggggcttaggattttagtttacaacttacttcaccatctctagggtgttggtctttatttaatgtggtccaggaatggtctacatggtgggccnactaaaaatttgatgaccattaagaaaagggaaaagttggcctttaanggacgacccccaggtatctgggca

SEQ ID NO: 324479 - DNA, 898 bp, Homo Sapiens
  misc_feature (163)..(172): n is a, c, g, or t
  misc_feature (273)..(281): n is a, c, g, or t
  misc_feature (392)..(404): n is a, c, g, or t
  misc_feature (416)..(529): n is a, c, g, or t
ccccccccgtttttaccccttgggggaaaattttttcccaagggggcaaagtgggttgtatcccctgggggagttcgggttttacccagcccctttgggaggggttccccacttggggcggaagggttaaaaaaattccaacatttttttgaataatggcccnnnnnnnnnntaatttaaaatgaaggcccttgggacccctttgaataagaccggaaaaagccccaaaaacccttttgggttttttaaaaaccttgggtttcccccgggggnnnnnnnnnggggggagtccaaccctttgttttggaccgggtttttttgggaaaaagcaaagccccggttcctttccctttggggcccgccgcccaaaaaaagggtttaaaaaatttttnnnnnnnnnnnnnggccgcaaaggnnnnnnnnnnnnnnnnnnnnnnnnnnnnnnnnnnnnnnnnnnnnnnnnnnnnnnnnnnnnnnnnnnnnnnnnnnnnnnnnnnnnnnnnnnnnnnnnnnnnnnnnnnnnnnnnnncttaatttataaggaatccacttcctttattgcagtaacctctgtacaaagcagcaactgcaatactcaaggttaaaacattagaaaagcatttgtgtgacaggtatattacagtattatcaaaatattacattttcagacttacttagcagataatcatccaccagagcttaaatctttaaattatttccatagtcttaaaaaatatgtaatgtcagaatgcatataaaaagaatgtaaaaggaaacctaaaatacaaatggaataatgtaacaaataaatatttgatttcagtaactgttaataatcagctcaacaccaccattctctctaaactcaatttaattcttataggaataatgaactgcc

SEQ ID NO: 324480 - DNA, 446 bp, Homo Sapiens
  misc_feature (68)..(68): n is a, c, g, or t
  misc_feature (80)..(100): n is a, c, g, or t
  misc_feature (373)..(373): n is a, c, g, or t
cataaatatgatttattgtacactttcacattgtattttcacattgtaagttaaattattttccaccntttcattaaagnnnnnnnnnnnnnnnnnnnnnattgtggtaaaaatacatataaattttccattttaaagtgtacagttcagtggcattaagtacagtcacaatattgtgcagtcactagcattgtccatttctggagctttaccaaggcgatgaaaacttttagaaaggttaatagttacaagtaagtagggctgggacttcactgatgatgagctagggatctgaaattaaatgacagaaaattcaacttgacacagtcccagaaggccaaggctcatttccctcactctaacttccgggggnctaaggatggggcatttaaaggttaaaggggttcagggggctctctcccaaggcataggttcaggttaatagg

SEQ ID NO: 324481 - DNA, 858 bp, Homo Sapiens; identical to SEQ ID NO: 150654
  misc_feature (34)..(34): n is a, c, g, or t
  misc_feature (154)..(154): n is a, c, g, or t

SEQ ID NO: 324482 - DNA, 837 bp, Homo Sapiens
  misc_feature (382)..(382): n is a, c, g, or t
  misc_feature (492)..(492): n is a, c, g, or t
  misc_feature (514)..(514): n is a, c, g, or t
tctacttgacatcaaatttatattttgcagcaccttgggactaatttttgaatttgggattagctgtgacacccacccctcacctccgattaattgtatactcagagccatcgcaacttaaggcacaagggagagggtgtgggaagaaactcccagccccagagctcagggtgtgatactcaggctgaccagtgacagactgctggaaccagaccccaatctcacagctgcagcaaaagagccagggagacgcagctgaaatctggccaaagactctcaggctccaggggaaattaacctacccaatatggcaaacagatgaaccagctcaggggttcctgagctttttccaaccctcctggggttcccaacaccagggggnaaggaaagtctattttctgggcaaataattctgggggctggaattcaatggcattgcgaattaaggacaaaaatactaagggtctatttttgaaaggggcttccattctngatcaccccaacaccatgactngtacaaaccagttttattagggaactgccccaggtgcacctctggttcatgctcttgtcacacctgtttctcagatcagcccaggctcagaggcaagttactagctaagcaaagaggaaaactgttctgcaaaatagcaactgtcagcttaaggcattactaacattgcagaaggaagcaagatttactagggacatctggatagcccaggacaatgacttctgggaacaggaagctccctagggccagatcgtgctgccatccaacttgggagatgacattatcgtgctgggatggtgggtaactccttcaaaccaatcccc

SEQ ID NO: 324483 - DNA, 326 bp, Homo Sapiens
  misc_feature (95)..(95): n is a, c, g, or t
  misc_feature (115)..(115): n is a, c, g, or t
  misc_feature (199)..(199): n is a, c, g, or t
tggatcacccccaaacacccatgaactgttacaaaacccagtttttattaagggaaactgccccccaggtgcacctctggttcatgcttcttgtncacacctgtttcctcagatncagccccaggctcagaggcaagttactagctaagcaaagaggaaaactgttctgcaaaatagcaactgtcagcttaaggcattngctagcattgcagaaggaagcaagatttactagggacctctggatagcccaggacaatgacttctgggaacaggaagctccctagggccagatcgtgctgccatccaacttgggagatgacattatc

SEQ ID NO: 324484 - DNA, 417 bp, Homo Sapiens
  misc_feature (35)..(37): n is a, c, g, or t
  misc_feature (44)..(44): n is a, c, g, or t
  misc_feature (49)..(49): n is a, c, g, or t
  misc_feature (52)..(52): n is a, c, g, or t
tcttcctttttatatatcccatttattcccttagnnnttccttnttgtnttntttgggaaaccagctcatgtttaattgtgacattttaaaattgtacaggtattttgacatctgccccccacatttagtctctcaaaatgacaggaaaacaaccaatcacaggtttaatacattgaccccttcagttcctatatgcagcacccaatattcctttgaaatatgaaatagacctggcagtggccaacagtaaatttctgcccgctgcctcccaccaccaacggagttgaaaagttcaggtttagtgttgttgtagtggcacttgtccagaattggtacctccccatagttgggggactttaaatgtaccaatgaaaatagctttttccccttcaaggggaagaaagaaaatcactccc

SEQ ID NO: 324485 - DNA, 636 bp, Homo Sapiens
  misc_feature (425)..(433): n is a, c, g, or t
tggtaactttttattataccaaggtgttctaatgccatcatatgaagacagatgcttcaaacaacctgcattaaattatatttttaataaaattaaaatctatttttaacctatttgtagtcacaaaccgaaaacgtgtcgtctttaccttagagctaaaggcttactttatgcatacggtatatttaatagtctacaaatcaaagatttaaacagtcccttaaaaattccatatattctcataccaactcatctacatagaaatgaaaatctctattgttctcacaaaccattaccatgagttcactataacaactggatcaatatggcttgctttcaaagttaaagaatcagaaaggggcctgtaagaagtcatttagcccaattccctcaccctgtgtgttttccctcaaagccagtgcaannnnnnnnnaaccaaaaaactggacatgtttaatacatacagtttgacaaatttggatttcactctttgttttgatgtagtaactcttttataaaagggaacagattcagacaagctcagtggcccaactgaagacattcagcaattaatgggcaggacttcagtaatcagtgggcaggactacaacatacatctcttcatgctagggggaa

SEQ ID NO: 324486 - DNA, 365 bp, Homo Sapiens
acaaggatttagaaaattttttagggggcgggtcctttcttcttatttttattgctcccaaatgtccactcatcgtcactgtcagacgtctccgagtctgacgaggctgcaggctgactcacaggcggctccttctcctcagagtcactgcgctttcgctttgccagggacaagagctcctgatccaggttctcgtcgctgccgctgtcctctgtgtccgagtcgatcacgacgcggcctttccgcttctttaccatggtggtcccccggctcccacgccggccgccgcccggactcccctcttgcccgcctgccagtgggaccggcacaacccccgccaccgctcgttgctagaaccacacccc

SEQ ID NO: 324487 - DNA, 612 bp, Homo Sapiens
gtgtactagatgctatttattaaactgtagacaggagataaatactttatttcaaaagtgcaaagaagggaagacaaatcacatttctttttatcatgtaaacttgtaccaaagacttatgaatagatttatgaattggagtagaaaacatagacatttctaccttgaggatatagaagggaacttaggaagtgagaagtcagattaccctagtcctctagggtgcttaaagctaactagtcccgtgaatgagaatctaacctatgtgaaaatctccagcctgtacctgtacagcatcagccctgggacaacacagtcaggggcaggctgtagtcacatctcttagcctaagagtacacagctgtcagggaaagtcctgatggccacagtgaaaaaggtcatgggtggagagaagcaaagtaggaaggatcatttgaagcacaaacaaatggggaaactgaacagacaatctcagtatcaccacatctgcttcaaaaatagcacaccaactcccttccaaagtgcatcgttacactgcaccatcgtggaagaaatggaagagcaggatggatttggctggctggagtcacatcttggggaagctggccaggt

SEQ ID NO: 324488 - DNA, 422 bp, Homo Sapiens
ggagcttacactgagaatttattggagggctttgagacagctcatgtaatggaaagctcttaagaactaggtttagaaggtgcagagaccagggcaacttcagggatccaggtagcaggaaggaatcggtagcctctttggtatggccactgtggtggtagacactgtctaccttgtttgctgagtcttctggctttcttccactcttcctgctcttggacatcagactccaggttcttcagcctttggaatctaggacttgcaccagtgggttggttgccaggggctctttggcctttggccacagactgaaggctggctgcactgtcagcttccccagttttgaggtttttgaactcaggctgagccactactggcttctctctaacccagcttgcagacggcctattgtgcgacttcgc

SEQ ID NO: 324489 - DNA, 347 bp, Homo Sapiens
  misc_feature (223)..(224): n is a, c, g, or t
  misc_feature (255)..(255): n is a, c, g, or t
  misc_feature (273)..(273): n is a, c, g, or t
  misc_feature (281)..(281): n is a, c, g, or t
  misc_feature (294)..(294): n is a, c, g, or t
  misc_feature (300)..(300): n is a, c, g, or t
  misc_feature (314)..(314): n is a, c, g, or t
  misc_feature (324)..(324): n is a, c, g, or t
  misc_feature (337)..(337): n is a, c, g, or t
cgcagtcacaaatgtttatttggaggacctgacagccaggtctcaattgctaaagttttgccacaagaaggaagtattaggcttgtcctgtgtggttcctgagggcaaggccaggtttgatgggcaagggtgacaagaaacccattttagctcaaggtgaaggaggattttcaggttgaagctgcccaggagaggaacaggattgctgataaagaagtttccnntccctgcatgggttccagcagaggccaggtntgcagggacgggcactgntcaagtgntttccctccctgnttgtgnttaaagtctgattntagggaagantttgggggctggntcctcctggg

SEQ ID NO: 324490 - DNA, 348 bp, Homo Sapiens
gttattttttcttgtccacttgatttgcatgcaacacccacaaaaaggaaacacaccccctcctgctctggccaccccagcaggctccggggggcacctggcctgggtccccggtgcactcacccggtccttcccagtcctggacctcaacgtggactgggccaggtgtgggtgagtggagggacggccaggggcacgatgggagtgaccgcctcgcacccccaccctcagcccggcccccacccctgctggagcttgtcacacgtcctcaaacccccacatccactccctctgccctccatccctgactccctccggacccctcccttggccccgctccgtcacccc

SEQ ID NO: 324491 - DNA, 457 bp, Homo Sapiens
  misc_feature (64)..(66): n is a, c, g, or t
  misc_feature (73)..(252): n is a, c, g, or t
tcttgggggggccgccgccccctaaaaaaagttgtttaaaaattttttttgggggccgaggggnnnaaaaaannnnnnnnnnnnnnnnnnnnnnnnnnnnnnnnnnnnnnnnnnnnnnnnnnnnnnnnnnnnnnnnnnnnnnnnnnnnnnnnnnnnnnnnnnnnnnnnnnnnnnnnnnnnnnnnnnnnnnnnnnnnnnnnnnnnnnnnnnnnnnnnnnnnnnnnnnnnnnnnnnnnnnnnnnnnnnnnnnnngagaaaaaaataaaaactttattggactttgttacatttattttacagtttagtattgtttgtattttgaattacattaaggcggaggatggggcactgtaatgtttttgaagtttaggacctttaaagctcttaagctgactccgctactgtaaagaaaagcagggtatctgcttcacactggcaaaataaggggctacattcc

SEQ ID NO: 324492 - DNA, 1062 bp, Homo Sapiens
  misc_feature (180)..(180): n is a, c, g, or t
  misc_feature (185)..(249): n is a, c, g, or t
  misc_feature (251)..(251): n is a, c, g, or t
  misc_feature (253)..(253): n is a, c, g, or t
  misc_feature (255)..(255): n is a, c, g, or t
aatttcccaaggcccctttagttcccttgggcccacggggagttttcccttgcgggaaaccccgtttttgggccccccagtttccccttttcccttaacggggggccccgccgcgccccaaaaggaaatggttttttgaaaagtttttttgagggcggagggcgggccgaccaaggaaancgtannnnnnnnnnnnnnnnnnnnnnnnnnnnnnnnnnnnnnnnnnnnnnnnnnnnnnnnnnnnnnnnntncncngtagagccatagttccatttattatccagcaaacactgggaggaccaggggaggggcccagcctggacaccctcctattattgccatgggttccagtttgcttccccaacctagagggcctagaggtgctcagcctagggaaagagtggacccggcccctgacccttggcccttgggatggagcatagtccagatggccctggctctagcaccaactcataagcccccaccccaggcccatctccttagggccactgagctcctattggagccaagctggctagactctgggccgctgggtccagctccaagcaggcggactcttgagttctggaccccaggctggctgaactctgggatcctaattccaggctctaggtgaggtggacttaggtcctgggctcccaggcttagccaggggccttcagggctgcagcaggtagctgccttcatggctgggcttctggggtggtggggccttctcaggacaggggccagggctggagttgggactggattcagagagagagtcaacgtcggcagagcgagaatggcaggcccagcagaggatgacccagagcagcagcagcaagaagcccacgagaccgttgcagacgatggcgatgagggccccctgggagatggctgcccccatgacaggcagcaccctcagaccagcacagacagtggagctgcctcaatggtgaggcccatgccgaggcaggactctggtatggccggccttcagaggaggctgtgctgtctgcacgctcagtgattcctgggcagtggagatgtctacctgca

SEQ ID NO: 324493 - DNA, 154 bp, Homo Sapiens
taccacttccccaaatcccctcctgcccgtggcaatcatttgccactgcaatattattaggcctgtgttgaagacttaagtcaggagaaaactgacatatttacattgagtcttctcaccaaggaacaaactattttcttaattaatagctccc

SEQ ID NO: 324494 - DNA, 348 bp, Homo Sapiens
ctgccaaccccaagaccgcctctaacgctgtgtaaaatgtgccacaaataaaaccccgtcctcacccccggcggctgtgaagtccttcctttcctggaccccagactgcgctgtggcacgagggttcaggtgatctggacacaggaaggcgaggccttgtccgtatgttcaaaatagtttttaatcataagctttatatacaaattgctgtacagtcatcttaataaagtgaaatagtgagtgaaaagtacaaaacacaaagcccccacgttccccttggtgaagtatcaaaggatcactcacagcccagaagccccaaattagtgacaaggtaagtggacaagtccc

SEQ ID NO: 324495 - DNA, 436 bp, Homo Sapiens
  misc_feature (149)..(149): n is a, c, g, or t
tcttattcgtgtatttcttttgacactttacccctctatgaagcctcagaggtgttttaaaattgtgttaggaaacacacagagataagaaaaggcaaatggtcctgatctagtgtctcagggaagagtctggaaaggaaacgcggcgnaagtggggtgggagagggggcctgtggttttgcttctgtccggggctaaagactgagtaaggtagggcccctccttctgcggatgggtttctctctcattccaccctccacccacctccggttccgcgtgcacgcgcgagatagtccagtgggcccacagataacgaccatcagagattaaagaaggaaagtcagcgagcttgaacacaggcgtcccgtgttggaaatgtccaaggagaccgccagaagttcgcaagccggagtcggctagagtttccttctcaccc

SEQ ID NO: 324496 - DNA, 788 bp, Homo Sapiens
  misc_feature (85)..(95): n is a, c, g, or t
  misc_feature (336)..(407): n is a, c, g, or t
aatatatctccccccctcctttggggcttagtatatatatctctccctctgatgagtaatagtttggtcgccaccctttgttgtnnnnnnnnnnngcgccgtatgtgggtgtctctctcccccaccactgttttccccgtgcggccagtgatgttttcgccacctctgccaccccgtggtttttataccgcgcgccccctccgccctcggtttttatatcgcgccccccctttggggcgcccctttgttctccaatgttcgtggttggcccgtttattgtggccctccctccgggggaggattctttttgtgccgcgcgccgccccctctctttgnnnnnnnnnnnnnnnnnnnnnnnnnnnnnnnnnnnnnnnnnnnnnnnnnnnnnnnnnnnnnnnnnnnnnnnnggcacataaaaacatcatttattgttagaaatcatgacatgatacaaagtcaaaatccacttgtgtcttgctaaagactacagaaagccatgctcagcagcttcttctccaatgctggccagcagcgtacctttccaagtcacaaagcagttcatcccgccctcaaggagccgacagggcagcccagagcctcccactgacaagtgtggtcacccactcaagatactgggaaagatccctgttctagcatcacattttaatcagatttgtcaaaatcaggttgcttggggcaaaggctctttcaccgaggatgctagtcctggaagacttctccttcggcgagccgccagctcaatcttctgaaccaggctcacatccccc

SEQ ID NO: 324497 - DNA, 401 bp, Homo Sapiens
ttacttttttactttttggtgagtatatttttgagatttggtggttatcatttacatcattgactcttcagtggaatattcatagtagtgtaaatagattctttgaaaataaggcacaagtatatgttgttctctgattgtctcccacgagagtgcaccaaacgagcgatcccaagaaatggacttgaggcacattttgcagaggtgtctttttcagtttgctggtttcccacagatggctaaagcaggggtatgggaacatgctgtcatatttcattcataacacacatgtactatagctctaggcaacagatggacaatcgcttgtttgaactacaaatgtgaaatactaaggtagaatagcaatatttctagaaatgtatatgaaaaaataaagcccc

SEQ ID NO: 324498 - DNA, 242 bp, Homo Sapiens
  misc_feature (153)..(163): n is a, c, g, or t
atattatagtaaatttattttgtataaatacatattaacattatttacaatgctaatttttttatttataaagtatctttatatggacaaaaagatacaaactgttatcattttaagtacaaagtatttctagaaatacattataagccattnnnnnnnnnnncgatatttcaagattggttcttacatgctatgaccaactcatatgaaagagcaagttgctcccccttccccgttccccc

SEQ ID NO: 324499 - DNA, 457 bp, Homo Sapiens
tcagcaccagctgcagagacatggctgcatttattgttcccagcccggcgagaaggtgttcccagaaaggttccttgggtcacctgcccacccagccttggctctgggctgccatgtccccacggggtcatgagagaggcacaagtcacagtcaggcaagggagcctcagcgtcctgggcggtggctgttggggtccctccagtcttcacctgggaccctcggccaggctgggacacatccaggaggcgaggctgcatggtccagcggtgggtgcaggtggcaacaggtcggcgggctgtgcaggttccaaaaggagctctcgggttggcactgggtgagaccagccccggggccagcaggggaatgagcggtggagcagggggttgctgggcactggggtgggcccatctcctgtccttccctcatggctgctggaagggccgcctccctggctca

SEQ ID NO: 324500 - DNA, 366 bp, Homo Sapiens
gctttgtacttgagtttatttcacaaaaccacggagaaagatactgaaatggagctcttgccagcctccaagcaaggaggccccagcagccagtctccagccccttgagccctttttgttaggcccacacccaaaagaggagaaccagtgtgtgcgcgaaggtacatggcaaggcacttttgaaaacatcccagtttaccgtggtgaaattgaacttactctgaaacagatgaaaagggacatgcaaatttgctgagcacatggaggtgtttgttagtaggtgaaaatcatgtcctgggtataacccagcttctccaggttagggtgagccgccgtctggatcagtggtggcgggccacacacccc

SEQ ID NO: 324501 - DNA, 466 bp, Homo Sapiens
aaaaaaaatttcgctgacagatggatgcatgtctttatttaattcgttcattccaggttcatcccacatcttcacatctcaccctcccaccgtcaaaacaggtcccatgtaacaacagggggccaaaaacaacaggcttgccacagtctccatcaccccctaccccacggaacactgtggggacaacggtaccttgcttgaaagccacaggtttcaaacacttttaggggcacaactctcttcaaactggaaaccacgagccactacgtagaacaggctgtcagggagtttcaacctgggcaacatttggggtacgtccctggagccccaagttccctcagagcaggtgaaaactgcttcagagcccttctttctatccaatcacttgaaacgttccatagaaagaagaaagaaaaaagaactcccttcttgaaatgcgaataccaagatttcgcacgaccaacac

SEQ ID NO: 324502 - DNA, 761 bp, Homo Sapiens; identical to SEQ ID NO: 150661

SEQ ID NO: 324503 - DNA, 603 bp, Homo Sapiens; identical to SEQ ID NO: 150662
  misc_feature (15)..(15): n is a, c, g, or t
  misc_feature (46)..(46): n is a, c, g, or t
  misc_feature (48)..(48): n is a, c, g, or t
  misc_feature (52)..(53): n is a, c, g, or t
  misc_feature (55)..(55): n is a, c, g, or t
  misc_feature (60)..(61): n is a, c, g, or t
  misc_feature (64)..(64): n is a, c, g, or t

SEQ ID NO: 324504 - DNA, 283 bp, Homo Sapiens
agtgaggggtgctggaggactggcagccaggccacgaggggaacgggacctggaaatccccaagcctgggtatgagaaggcagccgagtgtgcggcggcagggcaaggttggacctgggcgcccagaggtcttcagacccaggggcgaagctggccacgacccagccccgcggtgaagccgcgcttagccttggtgctccctgggggaagtgcagggccacggctggcccgtttcccagtttcctcccccagcccttcgttccccaactcgagagccaaattt

SEQ ID NO: 324505 - DNA, 452 bp, Homo Sapiens
ttttttcagccagaggtagaaaggatttactcttcagccatctggtagagccccaagaacaagttacatgtggacaaagggagggagaggtatcatggtgattaataaattcaaacaaagctgaatgataagaccccaggatggaatacagtctgagaaaggcctgggcaaagggaggcagagggactgaaggaagcaggtcaaggaagatacacccatggtagcctaggaaattggcagtagtgttggtgggtggggaaaaggagggtttggctgtatgcctagctttcacaaggtaggggatgaggaagatgatcatgatattgcacagaggacccaacactgaattgtgggagctagaggttgcttgaggcaaagtaaaaaggcttcggacactttcaaaaggaggcttgccaaaggcgtgattagggactccagtaatggacatacta

SEQ ID NO: 324506 - DNA, 724 bp, Homo Sapiens
ttaagactggaggtaacattttattaccaccccagcacttacactaaaagctacaacttggaagccttaccaaatcctgaggaattgtcatataaaaatgtttaaaaggatgtaaacattatcttccatatgatggcaacaatgacaaaagcctaattgtcatctgttaagttacagagccactagcagggatacttctcccaaagttccattttcaaataagtgcaggcgcccagtggtgctgccttttgaagtgccacatgtgggaagactcccagctaacatgacatctgtaacccattctcaggaacttcttcagagctgaggcacacacaagagaagcagaagccatatatcagcaacactgggatttgttctctgctctcaaggtctcttgatctagcttaattttgtccacatcgttttcttcattaggaaagctttggtggtttacaagaatcttctccactaggaaccgggcagcttcctctatgtttatgttatcctttgcagaggtttcaaaccatccgcaaagccatgttctttgcagaattggtccacctgggaaggactctggctactgtccttgttctggtcacatttgttagccaagaggacagcagggatagggctgccatttggaagatgaactttactatccagatcacttttccattttaagactgcctcaaatgtggaacttcttgatatatcaaagactttc

SEQ ID NO: 324507 - DNA, 351 bp, Homo Sapiens
cttccttttggagcctcttgcactggttcctgagcaggggctggggctggaacttcttctggcatttgctgttcattcacaactgccatattaggagcttgagccatcagttgttgaaatggaaacgtataaaaagcttgagcttgctgaagggaatagctgcccgcgttctccgcttccattccccgaggccgctgatgcgggcggctccacctgccgggcacacgggcagccggtctctgtagtaccgcgtggtactcactgcggtaagacaaccccagagacctgggcccgatggctggcagtacccagacagtggctggactcaagctcctcctccaggcttctccc

SEQ ID NO: 324508 - DNA, 307 bp, Homo Sapiens
gcatgggaataactaaaacctttattagatatgattttccattaacaataatgtgaaaattagaattatgaattcaaaaagcagtgaagtctgaaaatttaaaaagtagactaggtattaggggattaaaggtaaaggaagacgagaatgtttctttaatactattcattatttcccctctgtacacaatgttgcatatatacaactacttcatttttattgactttatataatagtgaaatccctttaagcaacctagggtatacagttggtgtccaactttcaggggattttcgggggggagtcc

SEQ ID NO: 324509 - DNA, 659 bp, Homo Sapiens
  misc_feature (227)..(227): n is a, c, g, or t
  misc_feature (231)..(233): n is a, c, g, or t
caagaacccgcccggggtttcccgccccggggcggttttttaattggggggggaatcccaaagccctttgttcaatggccccgggtttttccttgggaaaccagttttgggcccaggttcattttacttactgggggcccgggccgccaaacggaatggttttagaaaagctttttgagggggccgaaggcgggccgaccatggtgttttcgggtgggcgggggaangggnnngcattgtaacactcgtttttatataaatattcgcaagtcatgttacagaagaagccccaccagggaaaaaagtcaacgttagggttttgttagattgacccctgccttctaggttgggccccagcctggaggcgcctgctgctttgggaaggctggggttgctgccgtgacgtgccgaagaagctgcctgtgtcgcccacccctgggccgacccccttctttggtgtgtggtacatggtgaccttctctggccacccttagcctgggccaggcctccacccaggaaggccaaatagcctctggaggctgctaggaactggtggtagtggcaagtctgttccttcagtttagctgagatccatcaaagactgggctctagggggctgagcttggagaaaaagcagagtggagcagctgaccccaaga

SEQ ID NO: 324510 - DNA, 1091 bp, Homo Sapiens
tttcgataatttagaaatttattacaaaacttttaataaaaaatacaatgatattacaaatttggttttccaaagctttcaaatttttcttaacattatctttcgttttaagaacacttttgaagtcggcagttatttaaaatccttactagaaaaaaaccaaagcccaaggattttgcatttagtcatcatctaggtatacagcgtgttttccgaaagcatcctttaagagtttggagatttgatgaaattgctcatgtaataagcagttagtgaatactattgaatcctaaacccagataagtcatcttgggctggctgtgtttttcatgtgaagaaactcatttatagcacaggcaccccaggccaatagagatgattacagatctctggtttcagaagttctgaccccttattcagctaccaaatacttaattgctaaaggaattactcccagcaggcacaaaacggtttctgaatatgacagaaaaggtacacaaagaatcatttaagacatcctggttacaacatactttatctttaaaagggtgtgagagtagttggggaacttagaaattctgtgacttaggtgtgggtggatcttatttaggaagactaaagctatggacacaacacgtgaaagaaccactcagaagcagccctaggaagcccaggtgcccacatcgaaagcactcccaggtgaaagcagccaggcaggcgtgggcattgtacaaccagcctcaggcctcagttcttgattgtggttgacggggcgtcaccatgaaggagcccatttagtataaagcttccaaccttttctcttaatcgtttctttaatcttttaaaccatcttcaagtgcataggggagtttccgatgccagaggatgaaagcaagtgctttctccaccctctcctcccagagtgaaaacaaatccttttgctgatacttgtttcaaaagcatccattgtaaagcttctcagtgacacaaaatactgagaggtaactttttatcaatcaaaccacataccccaatttaacacctttcagtgctctgaattcaactgacagactaaagggtgtttcctgtaa

SEQ ID NO: 324511 - DNA, 453 bp, Homo Sapiens
  misc_feature (360)..(360): n is a, c, g, or t
  misc_feature (378)..(378): n is a, c, g, or t
  misc_feature (387)..(387): n is a, c, g, or t
  misc_feature (401)..(401): n is a, c, g, or t
  misc_feature (416)..(416): n is a, c, g, or t
  misc_feature (433)..(433): n is a, c, g, or t
atttattacaaaacttttaataaaaaatacaatgatattacaaatttggttttccaaagctttcaaatttttcttaacattatctttcgttttaagaacacttttgaagtcggcagttatttaaaatccttactagaaaaaaaccaaagcccaaggattttgcatttagtcatcatctaggtatacagcgtgttttcccgaaagcatcctttaagagtttggagatttgatgaaattgctccatgtaataaggcagttaggtgaatactattgaatcctaaccccaggataggtccatctttggggctggcctggtgtttttccatgtggaaggaaactcattttataggcacagggcanccccggggcccaatgggnggatgattnccggatctctgggntttccagaaggttcntgacccccttttttcangctacccaaatactttaatt

SEQ ID NO: 324512 - DNA, 832 bp, Homo Sapiens; identical to SEQ ID NO: 150664

SEQ ID NO: 324513 - DNA, 655 bp, Homo Sapiens
  misc_feature (46)..(59): n is a, c, g, or t
  misc_feature (69)..(256): n is a, c, g, or t
cccttgggggccccgccccccaaaaaatgttttaaaaaatttttcnnnnnnnnnnnnnncccccaaatnnnnnnnnnnnnnnnnnnnnnnnnnnnnnnnnnnnnnnnnnnnnnnnnnnnnnnnnnnnnnnnnnnnnnnnnnnnnnnnnnnnnnnnnnnnnnnnnnnnnnnnnnnnnnnnnnnnnnnnnnnnnnnnnnnnnnnnnnnnnnnnnnnnnnnnnnnnnnnnnnnnnnnnnnnnnnnnnnnnnnnnnnnnnactttgtgtgttgtgttttattaacaccaaaatgtgccacatcatggtttagaagaggtggagggtggaggcaggaggctccgaaggcccaggcagggccgccagcctctggcctctccatggactccagctggagagcctgtccgctcagcaacaccccaggcagcaccaagaataacatgcccacaagaacatcatggccaagagacgcacaggcgcatcccgcttccaggcacctttcccacctggccagaagtccctgctgtcatcccgacttgcacggtggttttggtaaccagtgggctgtgcaggagtgaaagtggggtcactttccttcctttcccagctgctggagtcggaactgctgcctttgtttggcggccttgtttcttaaatcag

SEQ ID NO: 324514 - DNA, 527 bp, Homo Sapiens
  misc_feature (290)..(290): n is a, c, g, or t
  misc_feature (487)..(487): n is a, c, g, or t
ttttactttgtgtgttgtgttttattaacaccaaaatgtgccacatcatggttttaggataagaatgcaatttgcccagtctcatttaaggttacagggaaaaacacaaagcatatgtttaagtttagataatacttcaatagttaccacagagtctattagacttcccagagaaaaagacctctccactctgacatggatcagcatagactatggtcagataggtctatggcaagcttggcaaacagaaggtgcacatagcactttctcccatctccagtgcccatggnaggaccataccctaatcaatcgtgggcactctacagagcccatctcaggcccacagtcctttccaaacaggcactctagggtaggagccactttcatatccctcaacaaagttggggtaggttcaccaaccaaaacctctttcgggtgtggtaattcctatgtggggttcaggctcttatttctgttttctagggantaaattaccatcccttttacgggttcttcaaaccaaacag

SEQ ID NO: 324515 - DNA, 389 bp, Homo Sapiens
cttagttggtgccgagctacctggaatggattttgtgtttatcttctttagggaaagatgtattaaccaaagcacaatccagcccaatttctcggctgaggatttcacgatatcaatccaaacatcacactatttaattccccaataaaacattggaaaaaggactatcagtgctaacacatttacatataaaatttccacctaataggtaatagaagcctatgtaccaatttctaaaacagttataagatatatacacaatttggggtatattaacaaaacagaatattacaaaatattaaaggcaatcctcctggtccacggacccttgttgccgcttacttgaagttggcataatctgagaatgcatcaatatactcctgcacccc

SEQ ID NO: 324516 - DNA, 435 bp, Homo Sapiens
  misc_feature (361)..(361): n is a, c, g, or t
  misc_feature (383)..(383): n is a, c, g, or t
taagaggttgtgaacatacatatttatttataatacaaaatgaagattggagggaaaagtgctttaaaaagtagcatgtaagtgtataaatgaaattgttgcttcttctccgatacaattttgattgggtgagcattatttgcttttacaataatgctttattttgttttttgcattgcattgcactaacctgtccattaatacaaacagaaaaagaaggtggaggacgtgcccagccgcgtggtcagcgtgccgaacctcgcctcctatgcaaagaactttctgagtggcgatctgagttccaggattaatgcccctccaataactacatcacccagcttggacccaagccccagctgtnggcctggaccctacaaacccanaccagtctacagattgcaaaaactgccacaaggttttggggggaatgtttgg

SEQ ID NO: 324517 - DNA, 230 bp, Homo Sapiens
ttttttttgattgtataaataatttatttctgttcacagcatcatatatgcattataaaaggctatggaaacaaaagagaaggatgatgagacagagaattacagcagtagaaaggaaaacagaaaccagggcacacagttccaacaccagaacagagattttggggaagataattgctctgaaacagaactggcctccctgtgtctattagaaaacatttccaaagccc

SEQ ID NO: 324518 - DNA, 865 bp, Homo Sapiens
  misc_feature (634)..(695): n is a, c, g, or t
  misc_feature (721)..(783): n is a, c, g, or t
tgcggccttcaaaagtgctggggttacaggcgtgcgcccggtgcccagcccatccacactttttttgtgagttttacctccagggccttgaccaagatcccacagtgaatattggagaaaaatccccatgtgcttctggcaagggggccagaagggaaccattttgaaatacatcagtcagggcattctgttcttgacaaggccctaccctcagtagaaagtgaccagagcctgactgacctgatggaagggaaagaaccaactctagccagccctggccttccacatgggaagtaagggaaatacccaactccaatacactctaggccatcttgtcctgtgcaagggggttaggggggcctgagaagcatgtgtgaagttcacagttcagtggtacaagctcactaaaagattgagaccccctcctaggactatagaacccttcctctccctccatattttatcaccacattactaaaggcctgtttgcagcagttcctcttaacttgtgtgtcatgtccagttatcaagaaaaaaattacaagacatattaaaggcaagaaaaaacagtttgacgagaaagagcaagtatcagaaccagagtcagatatggcagggatgttagaattatacnnnnnnnnnnnnnnnnnnnnnnnnnnnnnnnnnnnnnnnnnnnnnnnnnnnnnnnnnnnnnnggtagtccatcatcacatcagcaggnnnnnnnnnnnnnnnnnnnnnnnnnnnnnnnnnnnnnnnnnnnnnnnnnnnnnnnnnnnnnnncccacttatgatctcagcaaactaggaagagaggggaacatcctcaacttgataaagaatatctacaaaaacacctatagct

SEQ ID NO: 324519 - DNA, 912 bp, Homo Sapiens
  misc_feature (636)..(804): n is a, c, g, or t
  misc_feature (815)..(829): n is a, c, g, or t
gggggacacccctgccaccttgggatctgcctccaagctggtgcagggtatcgagagtggattccagatggaggtcctggtcccagcacgcagcagtcctggtagctctgcagaggagacaggaacccgagaagtagctgaagcagaagccagcctcagtccccttgccacatagaggcgggcttctcccagccatggtgtcccctctgcctcccctcccccgaccctcctgccttccgcgtggagggtggtggtcctgtagtgtcagcaccagcaccatgggcttggaccccctccctggacacaggcaggtgtcctagggctgggggtgcagcccgagggaatggagaccacactcatggctcaggtctgccggggccggcagggggttggggaagaagagggctcaggcccagcaggggtggaagcccctgccactgccactacccgctccagagctttaaggaaaatgaagtgagacccctccccttaggcctggggagccatagggctggcttctctgtgggtgcgtggacgtggggttgggagctgggaatctattttttgtattatgttttgagctactgtagttttggcgtggcacttattgtaatggaaataaaatacttgtacggnnnnnnnnnnnnnnnnnnnnnnnnnnnnnnnnnnnnnnnnnnnnnnnnnnnnnnnnnnnnnnnnnnnnnnnnnnnnnnnnnnnnnnnnnnnnnnnnnnnnnnnnnnnnnnnnnnnnnnnnnnnnnnnnnnnnnnnnnnnnnnnnnnnnnnnnnnnnnnnnnnnnnnnnnttttgggccgnnnnnnnnnnnnnnnaaaaaatttttttaaaaccttttttgtgggggccgccggcccccaaaagaaaaaagagaaagggggcaaaagccggtttctcc

SEQ ID NO: 324520 - DNA, 605 bp, Homo Sapiens
  misc_feature (508)..(508): n is a, c, g, or t
  misc_feature (536)..(536): n is a, c, g, or t
  misc_feature (553)..(553): n is a, c, g, or t
  misc_feature (567)..(567): n is a, c, g, or t
ggaaacagttatgttccatgttctttttctttttgggcccgacttaataatgtaatttatttgaaatacttccagaaaagtttaaggccattatacaaaaacattcatttcatcaaaacattcattgaccaccttcccataggccaacacttgacaaacctcttttcccaacacactggctgatggcttctaaaagtggctgatggcgcctacaaagaatcattcattcttttcttcaccaataaaggctgttcttggctttcctctgcttctgtctgcagcaggttcacttgctgtatcaataacaacttgagaaagcagttttaaataaacttgtaatagaaaaaattcatcatgtttaagacctataaatacagaaatatgttttacagggtaaaattgatcacaatatccttgttttcaaaaaataataaagtatataccttgggttttaatattggatatatcctggtcacacagcttggaatggcacatggatatatggacntaataaatgggcatccatggcatttacnggctttcctttccgggnaacctggaaagacnggttaaaaaaacttttggggcaataatttggaataatt

SEQ ID NO: 324521 - DNA, 716 bp, Homo Sapiens
  misc_feature (80)..(104): n is a, c, g, or t
  misc_feature (231)..(354): n is a, c, g, or t
  misc_feature (393)..(408): n is a, c, g, or t
  misc_feature (415)..(556): n is a, c, g, or t
  misc_feature (574)..(591): n is a, c, g, or t
atattttttctccaagggcggacaagggggtgttgtacccacgcggcggggttttaaggtttttcaaaccagcccgtgtnnnnnnnnnnnnnnnnnnnnnnnnnaaaaggttttagagaatttcccccccactcttcaaaaatttccccccggggggcgggaattttaaaaaagaaagcccccctggggcccccttggggagggaccccgaaaagcccctcaaggtccccnnnnnnnnnnnnnnnnnnnnnnnnnnnnnnnnnnnnnnnnnnnnnnnnnnnnnnnnnnnnnnnnnnnnnnnnnnnnnnnnnnnnnnnnnnnnnnnnnnnnnnnnnnnnnnnnnnnnnnnnnnnngggggcccccccccaaaaaaggtttttaaaaattttttnnnnnnnnnnnnnnnncccaaannnnnnnnnnnnnnnnnnnnnnnnnnnnnnnnnnnnnnnnnnnnnnnnnnnnnnnnnnnnnnnnnnnnnnnnnnnnnnnnnnnnnnnnnnnnnnnnnnnnnnnnnnnnnnnnnnnnnnnnnnnnnnnnnnnnnnnnnnnnnncgtataggatatctgagnnnnnnnnnnnnnnnnnnaatctgaacagaaaataagtatacaagttcgctaaacagaagtggtaaaaattgaatgttatgtattatggaattcagtacatcagtttacttcggtagccagtgattgttatagttaattctgc

SEQ ID NO: 324522 - DNA, 226 bp, Homo Sapiens
attatactttaggaaacaatatacaaagttgcgctttcctgctatttccagataacagcaggaagctccaattacacaaatttagcgttttgtgatggctaagaacagcagtcagcaccagacttgaacagttagctacaacacaaacatccttccaaatgaaatgtcataatagcaagacaggtaaaccagggtttaacaaatgacaaccacttgggaagtgacc

SEQ ID NO: 324523 - DNA, 289 bp, Homo Sapiens
agcagtttaatttggtcctgagaatgttgcagtctttattaccccttttgcattaatccacttttctaaccaccttttaagctttaatttttaacactatacaccaagtctttgaaatcagtgatctgttatttaactctaaagcatttgacacttcttgccttaacagttttaaaaaccacacacaaaaaaactctgtaagtaatacagtaggccaaaagtttcatcctatctatcttgcagtttacctatctgatctgatctctgtaattatagttctgtcatttcc

SEQ ID NO: 324524 - DNA, 208 bp, Homo Sapiens
tcagaattaaatcattttatttttgccacaagaagctctaagaactaatatcaggccatggttaatgaaaagtagaacttaaagtcatgacagggaagattgtacaagtgtgaacattacagtactcggaggaatgaacaaggtttcatatagttgaccagccagaaagccagtgctgttaagttagcatttaattctttagaatacc

SEQ ID NO: 324525 - DNA, 190 bp, Homo Sapiens; identical to SEQ ID NO: 245679

SEQ ID NO: 324526 - DNA, 467 bp, Homo Sapiens
  misc_feature (434)..(434): n is a, c, g, or t
ttgagggtgagcaaagagctttttattcaaagaaagaggcaaattgcacccaatctctctccctgtaagatctcatctggttttgacatcagttgcaatgctttcagtttgaggctaagcagaatgttatgctgtgaatggtcaccacagagagaccactgtgttgctggtgtggggaggcgaggctcagggttggacaggttaattacctacataaccctggctgtggcccagtccagcacctcccagaacagggactgacatggctgaggtctaccttggagatggggtcagtgaagaggggaggcagggtcagcctctgtgcaagtaaaatgccccctcaccccagccttcctttccagaggcaaccaatttgaaaacagatttgcctttggggctggtgttgtacctctgctttcaggccaagatggatntcctagaagaggagtttgaagccaatgtgcagg

SEQ ID NO: 324527 - DNA, 1254 bp, Homo Sapiens
  misc_feature (515)..(543): n is a, c, g, or t
  misc_feature (796)..(796): n is a, c, g, or t
  misc_feature (1117)..(1176): n is a, c, g, or t
  misc_feature (1187)..(1187): n is a, c, g, or t
  misc_feature (1214)..(1214): n is a, c, g, or t
  misc_feature (1230)..(1230): n is a, c, g, or t
  misc_feature (1239)..(1239): n is a, c, g, or t
ttcggtggggaaaaagaagacgagttttattagttggtgtttagaaccccaaatatggcccgggggggaggaggttttcaccccacccactattgagagttttacaaagcggggggcgcccaaacagtgggggaaaaatttttctttttgcgcgccccgcgttttctacccccacgggggcggaaatattttattatgctccaaaaggggtcaccaaagggggttgtggttgccaccgttggggagtattccaagggtttcattacaaatgcccatttttggggagaggggttctcccatttttgcgggcagaaaagagttctataaggagatttttccaccacggttttttgtaaaaaagacagggccaagggggcccgggggtgtaaaaatttgaattttcaaggcctcgcgcggtgacgccccccgtttggaagagattcccagtgagagggccctgcggagaactccccatttggggattggtttcagaaacgccttcgggtgtccccccnnnnnnnnnnnnnnnnnnnnnnnnnnnnnaattccaaagcccttaggctaattgccccaggtttttcctttgggaacaaacttaaggcccatgtttcggttttcccttagggggcccgcggcggccaaaaggaatgggtttaagaagaaattttctggagggccgaggtgggcccggcaattatttattattaacagttttttaattgctagggtaggggttagttcttatctcgtattgattttattgggggagtgtcgtagtggttttttctcagtattncgaggatttgtttccgttttatttttcgtcaatatttttcactgcatttttcacatcaacagagttgggtttagggttccccaggagagcaagggagatggatgggtccctcccaggggtgcgaggaagagggctacgtccagcatgtggggagtgagggacaagggcacagggcacacactcatacactgggcactggagaaggcagtcttttgagcacagacaccaaagagttaaacagtcaccacctggtacagtgttacaaaatggggagagtgaccacagggttggggcactggacgcagcatgacgaaggtgaannnnnnnnnnnnnnnnnnnnnnnnnnnnnnnnnnnnnnnnnnnnnnnnnnnnnnnnnnnnacaaacatctnaaaacttcaacacagtcacagctacantggggtgaggggaggnaccaaaganagcagcacacagagt

SEQ ID NO: 324528 - DNA, 478 bp, Homo Sapiens
ttaaaatagctaaataaatctttaatatttctaattgcaaatgtacagaaattgcacagccacacagagtcttagaacaccaacagcttcctctgtacattattacatagttaaaagtcgcagctggagggaggagctccagcccaaactccaacgtttgcattttttccttttcacatacttacaaaagaggggagctgggacgcggtgtgggagctggggggctttgtggctgagtgtgtagaaaagagagaggctgtttccctggacagtctgggctcccgcagtcgtgcgggcgcagggggaggtgtacctggggcagatgctctgggggaccggggcgtgtggagctgtagcctcggtcctccacccccactttctgggcagtcggaaagagtcctcactgacaggaggtttggcagtttccatcacccagaacatggaagttaagcaaaaaagtcagtcaggcctctgtgct

SEQ ID NO: 324529 - DNA, 451 bp, Homo Sapiens
  misc_feature (73)..(73): n is a, c, g, or t
  misc_feature (95)..(95): n is a, c, g, or t
  misc_feature (100)..(100): n is a, c, g, or t
  misc_feature (108)..(108): n is a, c, g, or t
  misc_feature (169)..(169): n is a, c, g, or t
agaagaaaacatccagccaggaacttggcctgaaaatgtgtttgggtttgttacattcgttttattttacctncagcagatacacagggaagtgnctcgnctgtgtgncttggcactgtggtcaaggaactgagtatgcaacaaagaagagaacacatacagtccttgnctctgtgccactcacagtttggcacaggtccggagaggaagaggagggctccaaggtgtgctcaaggttccactgggacagtggtgtcctccccaaaccaatgaccaattagtgaggggtgcagtcattcccgtgggccttcaacagcattttactgatcagagccgctctgccggcccgagggagctgagaaggggcttgggaatggggtcttgaggaggggctggccggaatgtgcagcactagcccagctggagcgggcggcgcgggcgcgcctgtccc

SEQ ID NO: 324530 - DNA, 249 bp, Homo Sapiens
gaaagaaacaacaatgcagtatttattttatacagctgacctgggcacattgtgaagtaagctataaaaattccaaataattatctctaaagcaaatcctttgttagttacatggctttacatattaattactctggaaagtttttgaactctgtttagtagcagatctcctttcttgatagtttcttggtactgccagttcttgctatcaggtctgttggtttctactatttcattcactttatctcc

SEQ ID NO: 324531 - DNA, 529 bp, Homo Sapiens
  misc_feature (509)..(509): n is a, c, g, or t
tttgcgaaaatactctgtttattaaagaccaggcggagggaggtaaggttgtgggttctgtatgggaaactgagtcccagccccagggagggagaaggaggacggaccagctggcagccttcgagaggtcacaggtcagtggccggaccccagtcatagccgtcttcatcggaggactccgcatcatgtactcgcgtaaactttttcttcagggcttcccgttcataggttcgcatgctgtcctgtcgccactgtccctgggggtggcggctgtccacctgggccccctgatgagccgagattctcccacgatccctcgggctctgggactcatctgcctgcacgggctccgaggaccgggccagggctggagccgggggctcatcatccacatccgtgtagggccccccctcgccgtctgtgtagccctcgccatccgtgtaccgcgccgccttcgccgtccgtctcgtagtcgctgttaacgcggctgtcgcagctgaggtcagccngactgtcggccacggccggg

SEQ ID NO: 324532 - DNA, 445 bp, Homo Sapiens
ttatataaaaaggttttttattaatgaaacatttcattgcattaagggtagaaataaacatgtcaagaaccgcatgaagtgaaccaactgtataagctacatgaagagcattctggtcagtattcttgttaacaggcacaagcaatttagtgataatgtccagagggccaaggatgcggaccaccttttgcagaactcatatctcgagcagtttaaattaaaaattagcctcccttaagttaaaaaccccaatagggttaggtcgtgtagtgcttgttccacttgaccattagtgatctttctagaacatgaggaaatcaagtctggttagaaaagcctggagctaaaagtggcaaagcccatttcctgtcctgtgctcaactcctaattttccctgagagaagtgagttaagctctctggtcctgggttcttcctctctaagtt

SEQ ID NO: 324533 - DNA, 243 bp, Homo Sapiens
ttttggtccaattgggtcctctgtgaggattggagaaaaaaaatctgtgattgtgaggatgaacaaacaagctctagaaagatctaagacttggtgcgttacagaaaatataaaatactgctaaaatgtaagacgtgacaaaacgctagagtgggggtgggtctttcctgtgctgttctcatgatagtgaatgagtttcatgagatctgatcgttttaaaaacaggagtttctctgcacaagc

SEQ ID NO: 324534 - DNA, 554 bp, Homo Sapiens
caccaggagagtctgcaggtttccttttaatcaaggctctactgaaggtgttttgtggggctaaaagcccccaaaacatgaaatggacatgtaacaccacctggatcccccatagcaggccagaccactctggcgagcactgctggtctgcccaaatctgggtaatcagactgggtattcattggctgcatttcaaagcacagcactgctttcagccaggatgaagtgggagtgaacccagctgctagcagagctgccactccaggctgagagccaagtaccagccactgccagtgaagactggcccctttactgaagggagttgttcagagtccagccaccggccctggggagggagagaagtcagggtattttgctcggggatggtcagggctccgcagctccatcgccagcatactttggaaagccgcctctggcggagacagccgggcgccggcggcccagctgccgtaacatctcctcgcaggctgcgatggtgtccaggagctgccgctgccgctgctccaccgcgtccagcagctgctgggcgcccc

SEQ ID NO: 324535 - DNA, 449 bp, Homo Sapiens
  misc_feature (214)..(214): n is a, c, g, or t
  misc_feature (298)..(298): n is a, c, g, or t
  misc_feature (384)..(384): n is a, c, g, or t
  misc_feature (411)..(411): n is a, c, g, or t
  misc_feature (416)..(416): n is a, c, g, or t
ctcgcttgtaaaataaaaggttcttgtattctcactgcttttgaggcttttttgttgccagcaagggcttttgcattgagggaaaaggaagcacagaacggattcatccagggtcctggagaggagggtgtggaggcaagaggtgggaaggacaagtcctcctctcggcacgcctgggtctccaggactgctgaagcacaagacccgaggggtnggcctggtccttccctcctggcctgtgtggactctgatggggctgttggacgcggtggccttcaacctggggcccgttggcagnagctcggcctctcagagaccgctgcaggccctgcttcacctcatgttcctcctgggccctgcacctccagccatccactgcggctntcacagcttcagtacggtcggaatttncgctnggcccgcagcagcttcgatcctcttgcttgtcc

SEQ ID NO: 324536 - DNA, 1005 bp, Homo Sapiens
  misc_feature (433)..(489): n is a, c, g, or t
cgtcggcggtgtagtgggcgggttcttttaggggctctgccagatagggctcgcgcggtaatgtggcgcacgggacggcgggaaaaggtcggcggacaagagccgacgggtgagggagctccggggttgaggtagaattcccgggtaatgaggaacttggggggcgcacccattcgcggcggtgtttatcgggggaggcgggaatacggggggcacaccgcccggggcgattttgtggctggtgaagatagggggagttggccacagtcgccctattaattcgggcggcgccacggggtagttaccctttaggcgcgggaccaaagcgggcggggggcgaaagtggtggcgctttcgtaccctggtgctgtgggggaccacacggccgaggccgaaaacggaaagtggttttcttaggaaaaagcctttttcnnnnnnnnnnnnnnnnnnnnnnnnnnnnnnnnnnnnnnnnnnnnnnnnnnnnnnnnnagcgccgggttcacggggccatgtttaaaggaataaggagttgttaaataagggtgggttttagtgcggcgagggagggtaggggtttaatggaacgaggaatgccagattatggcagcagaaagcaattttgttagttttccacacagaaaggttctaagtgaaaaagagccataaagttatattcgcaaatatagtactctgtctcaaaacatttcacatgattattcccaatactaatacaattagatcagtcagtcaggttaaaatataacagtaatgaaaaaaatgcaaaatctaacataaattacattaaaacccttgttacatcgaaccaaaactgcaaatttcttactaaatccagaaaaatggtagcatatatagtaatttaaaatattacattaatgatacagaataagaaagtggtaaactccaaaaatctataggcatatctgcaaacttcagattcaaagtagaatctgaccacccaaacattaatgtagcatttgtctaacc

SEQ ID NO: 324537 - DNA, 1224 bp, Homo Sapiens
  misc_feature (189)..(189): n is a, c, g, or t
  misc_feature (318)..(318): n is a, c, g, or t
  misc_feature (443)..(451): n is a, c, g, or t
  misc_feature (519)..(554): n is a, c, g, or t
  misc_feature (744)..(754): n is a, c, g, or t
  misc_feature (931)..(932): n is a, c, g, or t
  misc_feature (937)..(938): n is a, c, g, or t
cgcgggctcgcggggcgtggggagtgggggtgtttttctcggccacaccggtggttgtggaagatattttataagagagagggtgggcgcgcgcacgataatattgtgagaggaggcacaaatgtgtgtttggttttgcgtgcgccgccccgcgccgtgtgttatatgtaccgcgcgcacagagggggngggaaaatagattattctgtttatatcgggccgcaccagaggcaggggaggacaatagagggagggtggtgagagatgacgacagccgctagtggaggcgcaaatgtgtttatgaggggtgtgtctcgncggtgaatgacggcgctcccgggattggtgggggaagagaagggggagtatttgcgcccacaaggtgtgtgggccgcgcaccagagaaaataggcgcgtttaatatagggggggggaaattgttnnnnnnnnngacccctttgtttattctcgcgaatgacagttagagagatgtgtgtgaccaccaagtgcgcgcgcgtnnnnnnnnnnnnnnnnnnnnnnnnnnnnnnnnnnnnaaataatttgaggagagacgcttgcgcgcgtatgtgaggaagaccctccctcgtgggtgggggataggaagagattcccccgaagtatagaggggcgacctcttgcgagagagaacttctcccaattcggggagaattttgtgtttcggaaggaatacggctgcgggtggttccgccgcgcgggggcggnnnnnnnnnnngtggtgggaaggaaattcccaaggccatttaggttcaaggggcccagggtattttcttttggggaaacgagcttatggcccatggttcccgtttcccttgctggggccccgcgcggcccaaacgaaatggtgctagaaaggctttttgaaggggcgggggcggcgcggacaggtttnntggtnngtgagatggagtgttttttttcgagaaaataaaccatttattcggtttttaaacaattaaaaaatcttgtctgggcaggccctttgctcaggcctgtgtgtcctgctcagccactctgtcgaccacactgacccaggggctgccccggacatagaagcggaggggtttccgggcccactcccctgcatggccgacgcccacccgggctgctgccactacagccggctcactgggctccaggggaccacgctccagccatacagcttcatcctgtgccaggtccccc

SEQ ID NO: 324538 - DNA, 378 bp, Homo Sapiens
ttcacactgaacaagcattttattccagggattcccaacatgtgagcagggtggaagcctctgacaaggtgggccagaacctttggatttggtttgggggccaaaatcaactaaggctcagagaacatacaaagcctgcgtgaaggtggtgagctgctcccaccttcacaggtctgggggtcctaaacccctggagccatggtcagtcctgtgcccaagcctcttcttttgcaggccctgaaactttcactacagctcagacactgctgcacgggccggggagggagggggtgcttccggcaactgttcacagcccctcactcagcctccctggtgaccaggcacagactagccagggaacggagcaaagccagctgg

SEQ ID NO: 324539 - DNA, 699 bp, Homo Sapiens
  misc_feature (434)..(518): n is a, c, g, or t
  misc_feature (535)..(536): n is a, c, g, or t
  misc_feature (539)..(539): n is a, c, g, or t
  misc_feature (541)..(543): n is a, c, g, or t
  misc_feature (545)..(545): n is a, c, g, or t
  misc_feature (547)..(549): n is a, c, g, or t
  misc_feature (601)..(617): n is a, c, g, or t
ttggggtggtgtaggggtttgttttgagtgcagagcctttccaggacttctgttgtcagagaaccctggagttggtctgtccctggctggtccaaggatttgtagctgttgtgaaggtgtgagaccatcagataggcaaaagaccccgttcgttttctgatgaaatgttctctctttcagaagagagagagcggtgcatttagaaaatatgcaataaattgaagtgagtgttcaaagtattgtagaaggaatattgtactcagtctttaggattagattaagtggctgttggtaacaaagattagtggagaagctgtataatcgtacactggttttcacttttgaaaggaatccctgtcaaatggtttagtgcttaatgctgttatgtcatattgccctaatctctatttttgataaaattggataaggagtgnnnnnnnnnnnnnnnnnnnnnnnnnnnnnnnnnnnnnnnnnnnnnnnnnnnnnnnnnnnnnnnnnnnnnnnnnnnnnnnnnnnnnctccaaaacaccaaacnnttnannncncnnncccccgtgggggcgcccctccggccccaaaaaaattttcttaaagacatttnnnnnnnnnnnnnnnnncccccgaggaggaaaggggaaccgggtggctttccggttgtttccaagggaaaccccgggaccaaagactaggggcgtgggg

SEQ ID NO: 324540 - DNA, 489 bp, Homo Sapiens
  misc_feature (350)..(350): n is a, c, g, or t
  misc_feature (457)..(457): n is a, c, g, or t
  misc_feature (468)..(468): n is a, c, g, or t
aacagggtgagacaatcatttatttattggacagggcaaggtcatttaaagattggaaacatatcccaaaaacacgtgtttagtttggtgttacaggcattgatgctcacaacaaacaacattattcaatacatcatgtaaacaggccacatacaaccaggaagatgctgtcaagccactgagaagccacaatgcttagaaaacaatcattagggagttacagagaataatcacctccaactcattgatatgcatattctgcggctgcacagtatttggctggttccctggttattaagttgagtcgttccgtattttaaagaagccttgattgggtacacacttctgantatcactggaaatcagtcaaggcaaaggcttaactaggctcaccatccatatttttggaactaccctagggcaataattgactgtctcacagtactgtaggataaanttctgtacttnggcatatttagcagtgttaca

SEQ ID NO: 324541 - DNA, 307 bp, Homo Sapiens
  misc_feature (53)..(70): n is a, c, g, or t
aggtgtaacacttaaagcaattttctcccattgtgcgaacattttattttttnnnnnnnnnnnnnnnnnntatttttccccctaaaataggagagagccaaaactgaccaaggctattcagcagtgaaccagtgaccaaagaattaattaccctccgtttcccacatccccactctctaggggattagcttgtgcgtgtcaaaagaaggaacagctcgttctgcttcctgctgagtcggtgaattctttgctttctaaactcttccagaaaggactgtgagcaagatgaatttacttttcttaaaac

SEQ ID NO: 324542 - DNA, 476 bp, Homo Sapiens
  misc_feature (211)..(211): n is a, c, g, or t
  misc_feature (455)..(455): n is a, c, g, or t
gactactggtgctgccatagtctgttggtttacagtcttaactgcaggctctacctgaacagtactcacaggttccagaggcttctcagtatcctgagatggtttttgagccaaagttgcagtttctgttgaaggaaatttctctgcttctggttgaattggtggtggaactgactgtggctgaattggtgctggtggctgaggtggtggnttggggaggaggaagatccttcttttccgtcttttcaggctttacaactactttttcagtgaccttttcggccttttctccttctttctccttcctctgttcccgttcctctttcatatctctaagtacaggttttttaatgggacctgatcttctcacaggtctatcattaacttcttcccttctgttagagcttggtcgtgggccccaacgagtttctgatttagatttatatactttttcnaggttttggtccttcagaacc

SEQ ID NO: 324543 - DNA, 421 bp, Homo Sapiens
  misc_feature (323)..(323): n is a, c, g, or t
  misc_feature (359)..(359): n is a, c, g, or t
aaaacacaaattttacttgtttttatttaaaaagtccggatccagcagtgagaaggagccacccccaccagggtccctcggctggaggagagcaggatgggcaaagcgggcccccacccatctggggtacaggcatgcgggggacaccccagtgtaagtccccacaaggcagcttcctgtgtggcctatggcacagccccccgtagtgagtaatttggggggtcctgccgtgtgctgggggtgggtttcgtctgccctgtgtcctgggggtggcccggagagccagtgtagcgcgtggctgtcctccgaggaggggcacctcnggctgtgaggttcttctgggtgtatcgcgcagtagnctttattccgggttcagggggctggggagattgaaagctaaagggatgctgcagaaatttaa

SEQ ID NO: 324544 - DNA, 642 bp, Homo Sapiens
  misc_feature (80)..(80): n is a, c, g, or t
  misc_feature (160)..(169): n is a, c, g, or t
  misc_feature (174)..(174): n is a, c, g, or t
  misc_feature (185)..(185): n is a, c, g, or t
  misc_feature (209)..(260): n is a, c, g, or t
  misc_feature (296)..(296): n is a, c, g, or t
  misc_feature (298)..(299): n is a, c, g, or t
  misc_feature (301)..(301): n is a, c, g, or t
  misc_feature (304)..(307): n is a, c, g, or t
  misc_feature (310)..(314): n is a, c, g, or t
  misc_feature (316)..(318): n is a, c, g, or t
  misc_feature (455)..(463): n is a, c, g, or t
accaaccccccttttttcttgtccccggggtttcttcttgggaacaaccactttttggccccggttgccctcctccccgnggggggccgcgggcccccccacaaagaagggttttagaaagaatttttttaaagggcccgaggggcgggccccccaaaannnnnnnnnngtgtntggggggtgtnttggggtcgccgggtgttttggtnnnnnnnnnnnnnnnnnnnnnnnnnnnnnnnnnnnnnnnnnnnnnnnnnnnntgtgtttttggggtgttgtgtgtttttggtggtttntnntntgnnnngtnnnnntnnnttgcttgtaaattgtgctttaatttctgcaatcagatatgatgcagtgagatacaagtataaactttcattgtgcatccagaaaataaaaagcacaagtatacaggtttagctcaacagcttattcccttataaagnnnnnnnnngttttgaattaaagctagtttatcttcagtgtaaaaacttggaggtataaacaaactcaagatattatatacagtaaattaatttacatttccaaacttgcacagtacagcattttaaacaaagtaaatggtctcatttcagctctcactgttaagcataatccacatcccaatctccc

SEQ ID NO: 324545 - DNA, 1703 bp, Homo Sapiens
ccccaatatttgattttttaaaaatatacacataggtgctgcatttatatctgctggtttaaattctgtcatatttcacttctagccttttagtatggcaaatcatattttacttttacttaagcatttgtaatttggagtatctggtactagctaagaaataattctataattgagttttgtactcaccatatatggatcattcctcatgtataatgtgccccaaatgcagcttcattttccagataccttgacgcagaataaattttttcatcatttaggtgcagcttgttgtgtagtatgttttatttttgggttttcaattgaatggggaatgttctgaattttttttcaaactctacgcagatttctgttataccatgtccagccatggtacttaatgtgaaccttgataatactcttgcatatgaactaagaactagagcgttcagagtttttcctaacaaacactttgtttactttcttgtgttactggagtattctggaagggttacagaagtcctcctagaagaatattatcacctcaaagtataaaaataagaccagtgggctatgttttatattattttttaaaatttttgccattcccattaaacaaacagggttaagattttacatttaagcctaaattaaattaataaaaatctgagcagagaagtcaagcacaggagccagtgctaactcccaggaaattctgatgacatttcccaggataaaggcagcgtgtcataagttttgggtagaatgtactgatttttggttgcaggtatagctcacttatcgacagtctctgcatgccagttagcaggagtgcccatgaggtacacaagccttgtcctaagagcagcctaaccaaggagacggactttaggagctgtattttccaataagtgactcaatccaaatctgaaatgactaacgcagtgcataaaatattttattcacattttaactccactggagtcacagatgaagtatcatcttctattccaaggaatgaagtcttcaggtactgtctcaggtgctatctgagctaactggtcatcataagaacgtagggtccataatttctctaattcatagatttctctggtttctggaagcatcaaatgaatcaccatgctgccaaaatccacgcacagccagtcatcagtgtccttcccttctatcttaacatgagggtcacgtttacatttcaggtgtttgtacattttcacaacgtagaaggccatggcatgtaagtgtcgggtagaagttccactaacaatcacaaagtaatctgtatatctcatttctggaggaacctggatcacacaaatgtctcttgcattttcttgcctcagaagtgaaaccatcatatcgatgtcaaacttgggaccagtatgatctgccgcgtccgattctgggcgtccctcgttgaccgtcccctccgcccgctcctccagcccaggctcgctgtgcaggccgcggacaaagtttggggtctggcaagcccggcagaacgctgctcctacgggaagccgctgcacggccagcagccgaagcccgggctcggctccaaccgcggaccccgccaccgaggaaaccgccctgcgccacattagtggggcgagcagccgcgccacacggccgcccggccccatagcagcagccttgcgtcggcgtcgcgggtgggtggtccc

SEQ ID NO: 324546 - DNA, 1276 bp, Homo Sapiens
  misc_feature (383)..(437): n is a, c, g, or t
  misc_feature (757)..(757): n is a, c, g, or t
  misc_feature (823)..(823): n is a, c, g, or t
  misc_feature (923)..(923): n is a, c, g, or t
  misc_feature (948)..(948): n is a, c, g, or t
  misc_feature (1001)..(1001): n is a, c, g, or t
  misc_feature (1004)..(1004): n is a, c, g, or t
  misc_feature (1031)..(1031): n is a, c, g, or t
  misc_feature (1086)..(1086): n is a, c, g, or t
  misc_feature (1254)..(1254): n is a, c, g, or t
ggagagggcccagcatctgcaaagctcccggcaccgccgagccctggacaccaactattgcttcagctccacggagaagaactgctgcgtgcggcagctgtacattgacttccgcaaggacctcggctggaagtggatccacgagcccaagggctaccatgccaacttctgcctcgggccctgcccctacatttggagcctggacacgcagtacagcaaggtcctggccctgtacaaccagcataacccgggcgcctcggcggcgccgtgctgcgtgccgcaggcgctggagccgctgcccatcgtgtactacgtgggccgcaagcccaaggtggagcagctgtccaacatgatcgtgcgctcctgcaagtgcagctgaggtnnnnnnnnnnnnnnnnnnnnnnnnnnnnnnnnnnnnnnnnnnnnnnnnnnnnnnnatgccctgaccttgggggctgtcatttaaggacacccgcgccccacgcccacctgagcgcccctcaaacatgcagagcgggccgcgaccgcccaccgcgacgccgcgccccgcgggccgcctcgggcctcgacaagctttctacacccctccgtttggggggcggccccggcaggtagcgcgcccctggggccacgccggcctcctacggacgtcaccgcgcctcgagtctgtgctcggcagttccccccaaccaaaacccccgccccggaagcgccaacctgcgttcccgccgtgacccggacatcccccgacgccagngcttttcgacaggccgcattgacctgggcgtccttacccggcccaggagaagtcgcctccacctcntaactctccgccagcggcccgcgatatttcccggccgcccgcgggcctcatggactcttctgtcccttctccgcaagtagcgctgccacccgaccccttncacgtcccacgccccccgtttacgnccacaccatcgcgcgaatgctcattccgacccaggaacgcgaccgcgtatggnagnaccggacaagctgcgccacagcggggngacttcgtgcaacccccgttgctccgaactttagcgccgaccccaccacacaatnccccacgcggcgaccaccccccgccgtcacccaaatacaccccacgccgccgatattcggcctaccggcggcgaaacgtacaaaagtgggcgggcgcggccccgcgtcccagggcccctccgactcggacaccacacccacaccatcgccttatcagaccccgccttntggccacgcgccggacgccccg

SEQ ID NO: 324547 - DNA, 1008 bp, Homo Sapiens
  misc_feature (687)..(687): n is a, c, g, or t
ggtttttgtttcgcagaataataataattattataataacagtatcatacatcaaggacaaacccagctgccccaagcctactgcaaaatctgtatgtacagtatagtctatgtgggtggggtacagggctgcctgcctgcaccctcaaggccttactcataccagcttcctgaggaggggccggccctcctctttgcccctgttgaagcttggcacaggctggggaggctggcactgcaacgccatccctccatgttgggcaagcctgttccaaggggctggactcacctcccccattgtggcctggctgcaagggattgggggtgagcttgttgagggacaaggcggtggcagctgtggggtgtgtctcatctgagtcccctttccacccctaccggctcttcctgcgggcctgcccatggcaggaaggggccagggacactcatggcacagacagggcatgcagagcggacccatggcatgctcggcccgccgggtgccatgcagctgtcctggactgttgggtagctgtcagagggctgagtcggtggtggagttcaaggatcccccgatgggctgggctgctgatttggtctgtggtggggtctcctcggagctgggcccttgggcgggcagctgcagaaattctggaagtaccaggtcctctttcctcagaaggcccctcntggtcgtgggccccgctgctcttcacccggttcagcagctccaccaggccttcgatgtcacaggtctgccgctttccagtggcactactgggcaccttcaccagagaactgggggacgctggagggggatgggtggccttatcctgagttctaggtgggcagccctggctgcggcagggagatttgtcacgggctttggagatcttcacacctggaagagtgtccaaaaccagtctctgggccgccaccgagctcactagcttccccagatccagaggctgtttcgtcgcctggctgtggggagaggtcagcagcccgcgg

SEQ ID NO: 324548 - DNA, 812 bp, Homo Sapiens
gtatgtaacatttattgacgtctacccactgcaagtatagatgaataagacacagtcacaccataaaggagtttatccttaaaaggagtgaaagacattcaaaaaccaactgcaataaaaaagggtgacataattgctaaatggagtggaagaacagtgcttatcaattctgattgtgcaacaatgatatacaatccaatgaatgaatgaatggatgttctgcctgaagtttctatttctttcttgaattacttctctttccatatagtttctgaatgcctttaatatcatcctgggaaagtttaaaattttggggatctccatttccataggttggatacatcactgcattaggatcagaggaatgtcccatacccaaagaatggccaagttcatgagttgcagcatacaggaagttaatccctacaaccgaagaagtgacaaacagtaatgataaaaatagctacatacattatgtaatattatatatatgatatcataatttaaaaaaactaaagaaaaatacccaagttttagcccacggtagcttacttatttgtttctaggctttcaaaagtggaaaggggttagaaggttaatcagaataggagtgctttaatctcatcactacttctgcttattaaaaatgtgtaattttttttatttgcttctttcattcaggcagcaatactctgcagtggaaagcaaaggttttaaaagcactaagacctaggtttgaaatgtagctccactacttactagctggacaactctggacagattaattgatgttgctgagtctcagtttctcc

SEQ ID NO: 324549 - DNA, 855 bp, Homo Sapiens
  misc_feature (164)..(218): n is a, c, g, or t
  misc_feature (222)..(225): n is a, c, g, or t
  misc_feature (228)..(235): n is a, c, g, or t
gtgggggggaaatccccaagccccttttttcctgggccccgggttttctccttgggaaacccagttttagggccattttccccttttccttattggggccccccgccccaaaaagaaatggttttgaaaaattttttggagggccgagggcggccccacaaggnnnnnnnnnnnnnnnnnnnnnnnnnnnnnnnnnnnnnnnnnnnnnnnnnnnnnnnattnnnnttnnnnnnnngatgattatcaacagaaactttatttctcatcggttcaggaacaatcggagggtagatggaaagaggaagggagggaaagagggagggaggaagaatcctgcgaaaaggaagggccagactgagggagaagaaaaacatgttcggggcaaaagggtaattctcaagtggggaatgccaaatgaaggggtgcttacatgggggcacaaaattccaaatcagccacagtggggtgaggtgagtatgagacgcaggtgggttgaatgaaggaaagttagtaccacttagggctacaggaccctggggttcttctgtcagaggattggggttcaggtttcaggctttagggtgtaacatgggggggcccagtaggggctatgctggttgcatggggaagccccaggcccctccccaagggcccctccttttgggggaatctcactgacgaggcagagtcgttcactgtagtctggctgcagactctcagccagtcccttagacacaccacttccaggcctaaagacagatatgtccaggtcaggggtcaattaggggcaggaagtaaaagaccgagctctgtgccaaaggagtactcatgatgtctgcaaccactgtaattgat

SEQ ID NO: 324550 - DNA, 484 bp, Homo Sapiens
  misc_feature (226)..(226): n is a, c, g, or t
gagtttccaaaattagaatttatttcagtttctaaggaatgaatccccgagtgtggcaggaaggacacagccggctcctgacgcacacctgatttgattcaacaccgagtcggcacagacacaaccagagatggcctgggtcccaggctggggctgcacgggctgtgtccctggacagcccaggagggaggccccgcacacagacggccgccgggcagggggcctngagcgggacaggcctgggcacagcccatgtccttggccttccacataggtgcacacattttcttcccagagagggccaagatgccccagggaccccttcgttccgggggttcaggacacaggttcccagctgaggccacgcctggacccagagctgatgtttggctgcacgcgagcccactcgggacagacccaagaacacgaattctctccctttggatttaaggctggtgttttttgacatttacttcagtttttc

SEQ ID NO: 324551 - DNA, 845 bp, Homo Sapiens
  misc_feature (84)..(99): n is a, c, g, or t
  misc_feature (111)..(111): n is a, c, g, or t
  misc_feature (113)..(114): n is a, c, g, or t
  misc_feature (117)..(117): n is a, c, g, or t
  misc_feature (123)..(218): n is a, c, g, or t
  misc_feature (231)..(242): n is a, c, g, or t
  misc_feature (245)..(245): n is a, c, g, or t
  misc_feature (247)..(249): n is a, c, g, or t
  misc_feature (252)..(252): n is a, c, g, or t
  misc_feature (255)..(256): n is a, c, g, or t
gggggaacaaagtatagcccccttttcctttttccttgtggggggccgccgcccccaaaagaaggttttttaaaaacttttttnnnnnnnnnnnnnnnnccccccattttngnnttnttgttnnnnnnnnnnnnnnnnnnnnnnnnnnnnnnnnnnnnnnnnnnnnnnnnnnnnnnnnnnnnnnnnnnnnnnnnnnnnnnnnnnnnnnnnnnnnnnnntgttttgtgtggnnnnnnnnnnnngtngnnngtnttnnttttccaacacagcactattttgggtttttattttgttgatgttggttaaatcttatctctttttttatacacaatacttcatgtacctatgaaataaaacaggtagggaatatgtccagtgcaaacagaggactcacacctgtgcatagacagcaccatccactgattgtcgctgcagtccacggcgttactaagcctgcgccacccacgtgctgccccaggaggcgctaccaggctcttcgggccacaggcctctcctccactgcatgtggcggcagggcgggtaggtcgcagggctccatgattgtggggcagcttcaagggcacatggggcagaggccctcgaaggtcccctcctcagtaggggatgtcattctgatagtactggatcatgtcgtaggtccggctcctgttgctgaggaagcagctctggatgaccttcatgatgaaatttgcagcctcgcgctcagtcatgttggggctaaacctgtgcttcaagagcttgattgtctggccgcgaaaacagggcaggcccgtgtccaacatgagagtgaccagggagacgaccgcgtccatgtagggccgcac

SEQ ID NO: 324552 - DNA, 420 bp, Homo Sapiens
  misc_feature (263)..(263): n is a, c, g, or t
agtctgtactttcatttattaaatgcagctttcgctggtcacattgcaactcaatacaaacagcccagcagagggtagggcattaactcttgttctcatcaatgtaaacacaatattaatattgaagattaaagaaaatgggtaaaaagtccagtgtctcctcaatctgtgtgaaggtgaaggtggttgcctacccttggacaggtcccaaagggagacctgaggttgtcacctcttcccatccacagtgaagcaggcaaganccagagggaacccaatcactttcttcctgtagggtctccaggatgggatacggtgaatcttcaggaactggggctttccatggaattatggaaaggttcttccggaaagggcctgaggagggtttcgtacccttgtgttgtggcactgaaggtagtt

SEQ ID NO: 324553 - DNA, 378 bp, Homo Sapiens
tttttcagagttaacataatatatttattttaagtgccattcatgcatatcagttctggcagcaacaatcctaatgacacttggaatatttctttacagcactaaacagttacaaataatggttgccgttcatcatagaggcaaaatatgaaatcgtgcaatagcaaaactgtagaaacattaaaacactgactgtccaacagcagtacagagagcaggttgtatctgcacaaaaagccaatgcattttcatcacatatatacaatatagatatgtacacatcaccctccgaatgaactatatcaaaatactctattccatttgaaattatccccggattgattccctcccacttcaaaggacatctgagcgacaccc

SEQ ID NO: 324554 - DNA, 385 bp, Homo Sapiens
aggcaaaaggcacatatatttaaaaaagtcctttacatatgtacatcagaacttgctataaatacatagaaaccgcaggcgccaccctgccagctccgcgcctggggcctgggagaggtgagcgggcaataacttaggggtcagggaagggctgggggagggagaattgcatatattagcaggggtctgccccacggagcccccgagacgcggggccctgagcacctggggtttcctgagtttctagctcttgggaccacccggtttcacggatttcaagggtttgggcccactgagcccttgtgggtgcccagtcccagagcagccacccggagccccttcctacttggggaggagagggcacagagagggccctgccacgccc

SEQ ID NO: 324555 - DNA, 589 bp, Homo Sapiens
ggagaaattcattaaatacactttatttaaatagcatttatctcagttggctctatgccagttggtcttggtattggggtaagggggtattgcaggtaaaaagaggtgaagcagattctggctttcagtttcttagctcagaaattccagcaatccctgtagttctttgcatcccctcaccacctctggaatagagagcagggtcttataaatatgctgaacaatgtcatctagtttttctaactccttgtcagagcgccgaaggttctcctctaggatatttctatggctctggaacttgatcatgagtttttccttctcatttttcatctcccaggaacatcactctcagtttgtccacctcctgagagagccacactttctcctggatccaattggtggccataggctggcagttggagtccagctggcctgccagggcctcctggagcactttggtctctgtctccgcacgccgaagtgagcgggtaaggtgggtcacctcctctctaaggcttatgagctcgccactcttgtctatctgttctaggatcttctcattctgctgctgtatcacttcctggagctc

SEQ ID NO: 324556 - DNA, 421 bp, Homo Sapiens
gcactaaatgtttgcccttgttgctattatatggtcaaggcatttatcagcactattgtaatgaactcatgtaagtggcatgggtcagggaaaattatttcctacttttctgcctaattaaatttctgttttccagtattacattaatttatttttggcttccatttctgtataaccaaaatagttactgtatttgtgtggcattcctattattttgttgctaaaaatattgtagtttttatttaaaataatctgtaccttaattttttaaaatgtaaccaattcaagcactttaagcaataatgtcaatcttgtgaaattttaatcagtttaataccctgcctctaaaattgtttgcaaaaaataaataaatgaataaaatgggaattctctttctagagaattatatccgggtaatgct

SEQ ID NO: 324557 - DNA, 873 bp, Homo Sapiens
  misc_feature (270)..(327): n is a, c, g, or t
cgggcgtggctggtcacgcagatgggggagagacggggggggatgggagctccacggcgtggtaccggccccattttggactggattgggtgtgcgcgggcagtggttagaaaagaaggtgggtcaacaacatgtcttcctgtgcgtggcccgggaggcattcagcgcagaaagccaagaggggaggggtgctgggatcggagggggggcgccacagcgagaagggtgggcgggtgaggtgggcgggcctacaaggaggggtcgggcaannnnnnnnnnnnnnnnnnnnnnnnnnnnnnnnnnnnnnnnnnnnnnnnnnnnnnnnnncgtgttcctataaactgaagttttattacaagcaggaacaaagaatactggcttaaataaaaggtaggtgggagccccctcctctagccagcttcttcctcacctcccagggccactgcagtgatggcccagggccctgaggctggggtgaagctgtttctcccagaggggaccctctgtggctgccattcccagctgtctgtgaccactagcctctggagtgagaagggcaagatctggggacttcctatgtcactttccaagggcttcagcccacttgaagggccaaggagggggatggtggaacaatatctattttgataagaaactacagctcccagcagaggagaaacatcctctgagtttccggcccagactcaggccaaccttcacttgcctcttggcccaccctgcaccttcttccttttctctggatggaggtccccgtttggcagaaacaccttgtcttccagctcctggcactgggtcccatattcagagctcagaggagggggtgtggcttgtaggatggcagccgctcccccc

SEQ ID NO: 324558 - DNA, 721 bp, Homo Sapiens
gattttctcaatcatcgtttttaattggctttataagctaaagtgcatagtaaagacaaaaaaaggaaatgcatacataggaaagggacacttagaaaggacctgagatacctaaatgtctgttctaaggaacactggaaggagggaatgcagatgcaggcagcaggcctgggtctggcttctggcctgggtttggagcctgcagaagctgctggcatgctagctctacccagggaacagctccaagagggagtgttgggatgaaggatcacacttgggataggtgctgctggtaccaaatgtgattttagctccattcagggcccaggggtaaccagcagtgccaccaaacctgtcagcaggtaaagaaacttctaccatcccaaagtgcaggttacaggaaaggggtcactccttaatgacgacctgggcctgctgcataaggcccatcttatgcagcatgtgggctgtcccatcttccccactctcagtgactatgtaactgtgtcagggtgagttggtgcagtcttttgtcttatcacgtgcctccatctcctggaggcagggtgcccaaggagggcagggaggggttcttgtgctcctttaagggataagcagttcataaacaactatgggcctctgtttattatgagagttagtctgcaaattcggacgcgtgggtcgacgatatcccagggattccggaccggaccagcctgct

SEQ ID NO: 324559 - DNA, 463 bp, Homo Sapiens
agttcataaggaggtgagaagtaatttttttaaaggagaaaaatttttggctcttagatttaaagtaaattgaaatgttttaaagaaaaaagtattcacagatttaatacctattaataatataagagctgaaatgtaagtcatttcttcagtccttctcctctgtcggaatcttttttgttttaccataaattcacctgacgagggcactctgagatagcactgctctggggtcatctgatcaccatcgggagcaaatctctgacctccttgcctgcagcttttacttaaccctgtagtttctggacgtttgtgcagtattgaaaagacaggagaaaagaaaacagaaacctggttataaccctgacgctaaaactaaaaacgaggaaatgtaccctctttcttcagaattaaaactaaaatcttaaataacacagaaaatttgatgatgacctctttaaat

SEQ ID NO: 324560 - DNA, 581 bp, Homo Sapiens
  misc_feature (99)..(99): n is a, c, g, or t
  misc_feature (270)..(270): n is a, c, g, or t
  misc_feature (311)..(311): n is a, c, g, or t
  misc_feature (474)..(474): n is a, c, g, or t
  misc_feature (486)..(486): n is a, c, g, or t
  misc_feature (509)..(509): n is a, c, g, or t
  misc_feature (521)..(521): n is a, c, g, or t
  misc_feature (528)..(528): n is a, c, g, or t
  misc_feature (535)..(535): n is a, c, g, or t
  misc_feature (540)..(540): n is a, c, g, or t
  misc_feature (546)..(546): n is a, c, g, or t
  misc_feature (558)..(558): n is a, c, g, or t
  misc_feature (565)..(565): n is a, c, g, or t
atcatcaagttttctgttttatttaagattttagttttaattctgaagaaagaggtacatttccttgtttttagttttagcgtcaggttataaccaggnttctgttttcttttctcctgtcttttcaatactgcacaaacgtccagaaactacagggttaagtaaaagctgcaggcaaggaggtcagagatttgctcccgatgggtgatcagatgggccccagagcagtgctatctcagaggtgccctcgtcagggtgaatttatggggnaaaaccaaaaaaggattcccgacagagggaggagggacttnaggggaatgactttaccatttcagcctccttatattattaataggggggatttaaatctggtggaatacctttttttccttttaaaccatttccaatttaccttttaaatcttagggccccaaaaattttttccccccctttaaaaaattaccttctcacccncccttgggaccnctttggggcatcggggcccggtncctcctccgggnggatttngtccttncccancacctnccccatccatcntttggcntatggccccacagggc

SEQ ID NO: 324561 - DNA, 764 bp, Homo Sapiens
ggtgtatcaaactcttgggttttatttctgtaaaagctccagctctaccttcccctgaccccaagtctagggctaccggaagtagagaagctctgggtggcagtgcaggaggcatagggcacaccccgggagcgaatctgtagggtatggaaggtgaggggtgggttggggcctgaggagcctgggttcagggactcagtgtgaggctccatgacagtcacagggactgcataggacagcacctggggccggtcgtcatggcgtctcagcgtgcccttgcccaggaggtgtaggatgcaggagaggacgtcagtgctgctgcatgcagaccccttaccaaggctgctgaccaaacccctgggaggacacgggcccttctgccaagcctccagcaccagacagacaagctggtcaatgtgcagcccctcatctccatgggccttgaggattcggacgatgaggcagttcagaagattccgtctcttctccaagttctggccgtcttcaccctcagcttgcaggtacgtctgaggtgggatgagccgcacaatgtcccatctcgacctgggttccttgctgccatctcgaatcttgaggacccctcctggtatatccttttgctcgtgaaggtccagggggcctcttgaagaggtgaggggcccaatcgcctgattgagcatgtctgcggagagccctgagaacgccagcagactctccacagagaccgccttcaggtcgttgagatacagcagtagccacatctg

SEQ ID NO: 324562 - DNA, 650 bp, Homo Sapiens
  misc_feature (156)..(156): n is a, c, g, or t
attggggaggaaatcccaggccctagttcattggcccgggttttcctaggaaaccgcttatgaccctgttcaccttaccttactggggccgcgccgccaaacgaaatggtttagaaagctttcgaggggccgaggcggccgaccatgttttacttngttcttttgtttcgttttttgccacttgcatgagactgctctgagggcactgtctcggtgtcatctccatccgtcttgctctctgtgtttccacgctgaccccttcctttgttccctggtgccacagcgtctgtgagcgcacagccagacctctccccgttcaccacagggtcatcctcaagatcgtcaatgtttatcagctcgaagcggttgttgactcggacggccctccttccctgcgcccccgggacgccggacaccaagctcccgcttgggcccttcttcttccgcgtcatcgtcatcacggagatcgaaatgcaaggcgccgggcccgaggggctgctggccgcgctgttcccccctcagcctccggagggcccggcgcgacataggaccgaacgaccacgacgtctggagagagggagaaggaagcgcagaaaactcggctgtcggcgcgcctgcgcactcttcgcgcggggtcgggggcggggccc

SEQ ID NO: 324563 - DNA, 1199 bp, Homo Sapiens
  misc_feature (16)..(16): n is a, c, g, or t
  misc_feature (112)..(112): n is a, c, g, or t
  misc_feature (191)..(253): n is a, c, g, or t
  misc_feature (337)..(349): n is a, c, g, or t
  misc_feature (592)..(636): n is a, c, g, or t
  misc_feature (964)..(964): n is a, c, g, or t
  misc_feature (1001)..(1001): n is a, c, g, or t
  misc_feature (1050)..(1050): n is a, c, g, or t
  misc_feature (1080)..(1080): n is a, c, g, or t
  misc_feature (1124)..(1124): n is a, c, g, or t
  misc_feature (1151)..(1151): n is a, c, g, or t
  misc_feature (1160)..(1160): n is a, c, g, or t
  misc_feature (1176)..(1176): n is a, c, g, or t
  misc_feature (1183)..(1183): n is a, c, g, or t
accgttagataatgtntgaaggggtggcgcggcggcgtatggaggaagaagggtttttctaagtggtcggcggttgttattcaccaggggcgggaaatatatatattaccgncgcgtaagcggagagcaaaagggtggtgtaaattttaggcgcgtgggcgatatagcgcggcgtgtttcacacgatagcnnnnnnnnnnnnnnnnnnnnnnnnnnnnnnnnnnnnnnnnnnnnnnnnnnnnnnnnnnnnnnnaacgcccggttctaataaaaatattctgccggcgggcggcaggtttaatttttaatattcggaacgcgtctgtgggacttcccnnnnnnnnnnnnntcccagtaaggggcgcgccggaggatcccctttttgggggttgtttaggataaccctcgggtggccggaccggggggttgtttttgttgtgtgggaaacccgaggccgctgatttgtaggtgccggggttttttcttggagagaaaaggttggggcccagtttcgcctttcctgttttgggcggcgcgccgccaagaaaagggtttgtggaaaattttttgcgggggcggaggggtcccaaannnnnnnnnnnnnnnnnnnnnnnnnnnnnnnnnnnnnnnnnnnnnggtttgttttgtattattgtgatgtttgtagtgggttagtgttttggcgttgtgtgttgtcttttttatagaaaattttttgtaatatggaagttgtaaagctgtgttttaataggattaccttaggaataagaggactgctttttaaagatacgagatcccgctgccttggcaattctgttatcagaaagatagtgattttgatacaaaacagtaagaaactgtaagaattgcaggacccataatcctcacaaggaagatttaagaagagtgctgtgtgtcaatcactcatcagcacctcacagatattatctcaattcgtcctggnaaccatcactgcccctacttagcagtctcagagaggngactcaactcacacaggggccaagagctggaccacggccaaccaggggntccccacccccaccccagccatgccttttncccaccacaacagcaccccgcctgaccctagtgtccaggggttntcccggtgggcttcaagggaatggggncaaaacatncttttttgccaacttnagggggnagcaggacggcacagt

SEQ ID NO: 324564 - DNA, 1004 bp, Homo Sapiens
  misc_feature (20)..(20): n is a, c, g, or t
  misc_feature (49)..(49): n is a, c, g, or t
  misc_feature (68)..(68): n is a, c, g, or t
  misc_feature (82)..(82): n is a, c, g, or t
  misc_feature (97)..(97): n is a, c, g, or t
  misc_feature (466)..(480): n is a, c, g, or t
caggagatccagtgctgcangcgaatacctacccacgtcccacgcggcnacctcaccctctccgcaanacctctggctgccnttttgtactttttgntcccagagctgcttctgtcctggtttatttaggttttatccttccttttctttgagagttcgtgaagagggaagcccaggattggggacctgatggagagtgagagcatgtgaggggtagtgggatggtggggtaccagccactggaggggtcatccttgcccatcgggaccagaaacctgggagagacttggatgaggagtggttgggctgtgcctgggcctagcacggacatggtctgtcctgacagcactcctcggcaggcatggctggtgcctgaagaccccagatgtgagggcaccaccaagaatttgtggcctaccttgtgagggagagaactgagcatctccagcattctcagccacaaccnnnnnnnnnnnnnnngggcagcctccttaccactgtggaagtctgagggcaacagagggaaaacgaagacgcatgaacaaggaacgaaagcaagagggaacagcgagaagaagcaaccagacgaacaagcacagaacggaacaacataccaacccagagacatcaatcgccaagccaacatacaaaggcagacacagaggcaccatacacagaacaacaacacgcaacaaaggaacacgcactcagcaaccgacggagacaacacacaccgtcaagaccacagatgcagcggcaccacagaacggaccgactacggtcggaaccaagagccagagcgcacaaaacgctggcacggacacctcggcgacggacgagcgcgagagcagcaggacacgaaagacagagaataacgcgacgacggcgagacaagcgacgacgccagacgaaccacgcagcagcaaggcagacacacgccccacagcccgagacggcacgcaaggcgccaagccggagcccaagagaggcaggagagcaccaga

SEQ ID NO: 324565 - DNA, 418 bp, Homo Sapiens
cattcgctgtctcccttggtcacatctgtgctttcattgctggtgttttcctctcgttttctctcttcttcctcctgttccagttccttaatgctttcttccagaacattgggccagaaatcaccctcgaaataaggcaattcctttgcacttgttaatctatcttcagtagcttgtttaaaaatatcctgtgaaaacatgcatgtacatataggaatttctatgttcttttaaagcattgattatacagaataatcatgggctgacaaggaaacatggaaagcttaaaatgtcttggaaaggtgggcagaggacttttattacctaaggccgtaagccgggggagttatttaggaaaaattaaatagtggaaaaggccggggttaaagttcaattattttccggttttctattttct

SEQ ID NO: 324566 - DNA, 784 bp, Homo Sapiens
  misc_feature (169)..(190): n is a, c, g, or t
  misc_feature (213)..(222): n is a, c, g, or t
cccggttttggcccgaaagcggctgggggggaattgacccactcatcggttttcggggaatgtcgccaggtggcgggggcgcacatcgtgcgtaaccaaggccccggggaaaacccgggggttgttgggtcgcaggaaacgagctcgaggaacggccgtgcggaaatannnnnnnnnnnnnnnnnnnnnnccttgccgggcgtgttttttatnnnnnnnnnnatcccaggcggttagtgcagggccccgggatctccctagggaagccaggcgatgacccagttgccggtttgcctatctgggacccgccaccccaaaacgaaagggtctagaaaagtttctcgcagggcccgaggcggccgggcaagttgtgtggccggtttcttgccgcccgtgttgggggctccagggtggtaagtttcccggcattttgttgttaaacagcaggattgcgaagaaggagattcttgggcatttgggggctggtcgacatttgggggcaagggttccactggaaaatcccccaaattcacgctgaggtttcaggtcatggttgctgaggtggaagatgaggtcagggctcttggagattttccaacccaccctagagcttgtttctaaatggctggggaagaggtcagtataggtccccccgttactgcagatgaaggcagaagtcattctctcccccacccctcagcttcttcagagatgtggagataggaggcttcgatctgtaattgcctacgatctcttaaaaatataaaacacgtgcagttgaccc

SEQ ID NO: 324567 - DNA, 459 bp, Homo Sapiens; identical to SEQ ID NO: 145453

SEQ ID NO: 324568 - DNA, 421 bp, Homo Sapiens
  misc_feature (50)..(50): n is a, c, g, or t
  misc_feature (78)..(78): n is a, c, g, or t
gttaattttaaggaatttccacacatttagccccaacctttcctagatgncccctgaagggtaaggatcatttaatanctttgatatgcttacgagtaagtgaatccctgattatttcccagaccccaccacccagagtggatcttattttcaaagcagtatagacaattatgagtttgccctctttcccctaccaagttcaaaatatatctaagaaagattgtaaatccgaaaacttccattgtagtggcctgtgcttttcagatagtatactctcctgtttggagacagaggaagaacccaggtcagtctgtctctttttcagctcaattgtatctgacccttctttaagttatgtgtgtggggagaaatagaatggtgctcttatctttcttgactttaaaaaaattattagaaaccc

SEQ ID NO: 324569 - DNA, 342 bp, Homo Sapiens
gaaggacccaaaggcatttaattattgaacacataaaaggaagtatatttaaaaaaaattggtcaaactgtcctgttagttatcattttaaaggaatttacagggctgttatagatgattcttttggaatatttcagtttatagcaaatgcctaaactggtttcttcattgcacagtattttctcttaaaatgggtgctttaaaacaattacatacagattaaaaatcatttctttgcttaattaaaacgttaatactcttagacaacacagatctgaaatggtgaaaccagcaattccccccaccccaccttacaacaaattaaattgagacaaaattacc

SEQ ID NO: 324570 - DNA, 1031 bp, Homo Sapiens
  misc_feature (91)..(91): n is a, c, g, or t
  misc_feature (101)..(109): n is a, c, g, or t
  misc_feature (194)..(194): n is a, c, g, or t
  misc_feature (240)..(318): n is a, c, g, or t
ccgttccatggggccacaccccaggggaataagaattaaaatgctattatgactaagttgtaaacctatgcacatcccttgcattttgggncaactttatnnnnnnnnngaaactgatttttattaataataatcatgtagtgaaatgtgtttgtaattttgtctcaatttaatttgttgtaaggtggggtggnggggaattgctggtttcaccatttcagatttgtgttgtttttaagnnnnnnnnnnnnnnnnnnnnnnnnnnnnnnnnnnnnnnnnnnnnnnnnnnnnnnnnnnnnnnnnnnnnnnnnnnnnnnnggaaagaataaaattgggggaattgaagaaaaacgatgtttacgggatttggcctacaaagctgggaatattttcccccacagaaaccttctatctacccgcccctgtggcaatttttcttttcaaagtggacgtatctaaccccccaccccgcccgcgcaaaaaattctcttccaaaaaacaagtctctcccgtctatcagggggtgcccccatcccttccccaaccgccatatcatctcacccgcgcccttctttttggtttaccggcactgtcccgccatttcgccttgctgcccccccttccccttacccttgccgcaaacccctccatgtcttcttttgtgctccccccatgtcgcccctcggagtcgatcccatctgtacttcccctttcactgctatctcactccgccgatccctatttattccagtatcccgcgttcgcccaccgcttgccctctctggtctgcgtcggcccacgccttttctcccctcgctccgccaccccatcactatgagcaccaccacgtttaccgttcaccggcgctggtcgctctgccggacgcattcccgtgttctcccgccgccctctcacccgcctctctcttgttgctcacacgccgcgacctgtgtcctacacacgttcctccacgttagtaattcatccccgcccgcgcatttaatcactactcgcgctccagcttgtattct

SEQ ID NO: 324571 - DNA, 513 bp, Homo Sapiens
ttgttatcaagttctgctttattattaaagttgtaatcccttgatatttacagagcaggcacctcggtgccaaggaccaggccatgcccgttctggtctgggaggcagaacctggggttgggtgagccacggggtctgcaggttgcatccgagacccccaggtcctattcttccaccccgtaacaaaaccagaaacctccccaaggcagaacgccaaaggccaggtgtcacccacaccccagcagttccccttagcgccagatggggctccctgagccttgtggctgaagtggggaacacggccatggggcttgtgtggactgaattctcatgtggctgcagccctttctgtagtacagactggggttgttaacatagttcatggtgcctgcagccccttcatggtgggggtgcctggtttgtcctcccagggagaagcagatgggtaacactgcttggacctgggcttggaaggagcctgtctaatttttgtattttttagtagagacttct

SEQ ID NO: 324572 - DNA, 1736 bp, Homo Sapiens
  misc_feature (43)..(105): n is a, c, g, or t
  misc_feature (823)..(867): n is a, c, g, or t
actgcttttgcgcggctgcttcgtgtccgctgtctagtgttgnnnnnnnnnnnnnnnnnnnnnnnnnnnnnnnnnnnnnnnnnnnnnnnnnnnnnnnnnnnnnnnccctgtcctggtctcctactcctctttgttgtctgctcccctgttgtttcgtggtctctttgttttcgtcttccgattcgcgtctcctgcgtctcggctttcgtttctgctgtactgccccctgggctgctttttattatcccacttctcaccggtagactttgttgaatgcgactcttggcccctggtcctcgtgcctgtgccctctctctttcttgggtttctccgtcttgtccttgccttggactgtgttcccgtccggtgtcctcgttttctttgcgtgctcctgggtacttcttgtatctggtgccgtcttgcatgcttgcctcccagtgtcttctgcctcactcggtacgcagtggcacactcctcttcttccctccgtctgctcaggtgatttgggctctcctccgaggggtccgtggatcgggacctttgacgttttaccacggttctccctcttatagagctcgcgggagtctaatctgttgtgtggtcgaggctgccctgataacttccttggctcggctttccgctgtctactgacgctgctgctctgatcagggctccgcgcgcagcgtccctggggaggtctgtgactctcgaccgccgcactgtccgataggcactgggaagagaatgctttgcttttgagtgtgatctagacctggacttggatgacgaatggtacttgggagaacgtgatcttgttcgagannnnnnnnnnnnnnnnnnnnnnnnnnnnnnnnnnnnnnnnnnnnncggtggatctttgcttttgctcgaaggcctatcgggtggtttaacttctaaagtaggcagaggcctgctccagtcagtagagggcagggcgtagtgctggattcctcgacactgaaaggactctcctcaattttcccagcttctgcttccggcagaggatttttgagggtctgtaaaaataacgccgctttccttttacgttctgcttgaagctgtttctcttttgactccttagacgcctgggccagcttttcccgggcagcagctgcgaggcgatcttccagcttttgctttgcttgctttgcttctagctcctcctgggtaagttgaggcttcttctcctcaacaactacacagggtggggcaactgctgggttagtgtttgcagcactactagaactttcttggccttctttgctttcttcatcatcatcactgtcatcatctagcttaacacggatttttttccagggggagcagatcattttctttgggcttgattgcaaagcttattggagcaaaggaagctttcaccagcttcccgtccgggacggtcttactggacgatgcctccttcttcccgcctgagcctgcccgtgctcccacctcggctgcgtcttcaggcgcgccatcctccccagcatcacttggcttctcgggagcagagtctgtgggagcctcttctggtgcagacacagcctgcatgctatcgcccccttctttctggaggaagaactgcttcttaaactcataataagcattatactggtgccacggctgcaggaactcaaatctttgatcattcttggcacgaacactggtctcgaacttcaggccgttcctggcgacatactcggccagcttgtccc

SEQ ID NO: 324573 - DNA, 836 bp, Homo Sapiens
  misc_feature (818)..(818): n is a, c, g, or t
ggtactttggagtgtgtgttcgcaggacactgccacttcctttaatacagcggtgcctccacgccccgcatccgatgcagtgttacacgtgtgtgtcgctcaaacatccatcctactgcacatactcagtttcggccagcaggcggggagcccgaggtagctcccgctcccttgagccaggcccctgccagacctgagctccctcccaagcctggcttccccaaccggtggccttcatgggccagaagccattccttcacggccagtcctccggagtagttgcccacggctccgctgctgcagaccactctgtggcacgggatgaggatggggacaggattgcctctcattgctcctcccactgctcgcgcggctttggggttgcctgccagggctgctaattgctggtaagaaatcacttctccgaatttcacaaccttcagcagcttccataacacctgtctggtgaacgactcttgctggaaaacgggatggtgaaaagccggcacggggaactcttcgatagcctcgggctggtggaaataggcattcagccaggctgtgcactgcatcaggggctccggacctccaagaaccgcagcgggggctgggacctccacggcatcagctgcagacgtccccttgcccaggagctttatttcgtgcagaccctgctcacaaccagacagctccagcttccccaaagggctgtccagtgtggtgcgtttcatttcacaatccttgtccatttttccaagtaccaagtcgcaaacggtgcgcaccgcgaggacctgcgggcgtcgggacgcaaagcgttnctaggggcgcgggctgtc

SEQ ID NO: 324574 - DNA, 415 bp, Homo Sapiens
ttgttattaaatgacaaaacatatttagaggctttatttaaaaatctctcactgttcattatcaaagttacaagattgcataccaatagacagactgtaaacataggaaattttcgttaaggaaagatgggtttactgtaattcaatcttttacaaaaaattacttgcaagttattgataacagaatttctcttttactttcttaattctcttgaaaattaaaccaatgtttccactttcatgagctaaagttcaaccatggtcaccttaggaaatacccctgttttatttgttaatcagaaatacaaatcgagtggcacatacttccattttcttcttaggccaaaggtttcagcttcattatattttacagaagaccttcagtggtccggtaagtctttcatgtcacagctga

SEQ ID NO: 324575 - DNA, 1080 bp, Homo Sapiens; identical to SEQ ID NO: 150680
  misc_feature (609)..(617): n is a, c, g, or t

SEQ ID NO: 324576 - DNA, 1404 bp, Homo Sapiens
  misc_feature (32)..(32): n is a, c, g, or t
  misc_feature (577)..(652): n is a, c, g, or t
  misc_feature (1193)..(1252): n is a, c, g, or t
  misc_feature (1366)..(1366): n is a, c, g, or t
ggacacaggctcatgtgtgggtcttcattccnctgaccgggcagatcttcctctaacaccttgggcaaaagtctatgcggaaagatgggtttctttagctctccatttgccatgattttcctcccaattcatcatgagggagtttctcaaaccaggagtttatatttattttttagaaaatacacacttttcaggagaaacctgagcatgattttggattctccacctccccccagtctctgcacctgggattcagctcaaggattcagtgtcttcatttttacaaaagttcccccaagaaatcagcaaccagcctctgtttcatctgggagcccctcccttggccccctgggtttgggggtgctgccctactgggaacagcgggggtctgtcacccgtctgagccgcacccccctgtgtggatttcaggaagagcctccctttctttgcgtctccctttctttaattaacattttcaaaagtaataaattcttactgacgacttgtaacttagtcatattttatacttgtagcctttaataaagccatttaacaaaatgctacaacaacaacaacnnnnnnnnnnnnnnnnnnnnnnnnnnnnnnnnnnnnnnnnnnnnnnnnnnnnnnnnnnnnnnnnnnnnnnnnnnnncgttggtcgccccgttcggcccccgcaaaagctttgagagaacctttcttttggccccgggcctccccccaaggaagagggaaccctgggccgtagccctggttaccacgagaaaaccgccggcccgctggagatagccgcggtggccttccgcccccaaagaaaacaccactctccgggggcgcccccccgggagcgctttcttcaaaacacatttccctgatgaccgcgcgtccccggccggtccgcccaccgcgccccaatcacaccccggataggttgctttcccaccactaccccctgtctgcacgcgctgaatccggcccggggcgtggggtggtggggcgcccgccgtccgcgcttagcccacgtggtatgtaaagatcgccgccagaacgcaacgtgtgctcccgccgccgcggttggcgtagcggccgtcgagagcgacgaggcgcccggcgagccgacgtcctgccgacccctctgttgagccggggaacagcattgacccgcgcagccgttctttcatcgccctcctgannnnnnnnnnnnnnnnnnnnnnnnnnnnnnnnnnnnnnnnnnnnnnnnnnnnnnnnnnnnatccaccagtcttttgcggagcacctcccgccgcgtccgcgtgattgtgagaggggcagggcgcgcgcccccacgcgatgctctacctcctacctccgccacccgcggcgccangcgccccgcggggcgcgagcgtcgcccgcgcctcggtg

SEQ ID NO: 324577 - DNA, 862 bp, Homo Sapiens
  misc_feature (56)..(220): n is a, c, g, or t
  misc_feature (483)..(483): n is a, c, g, or t
ggggggacaggagcgcggaaggcggcgggggagaggaacaccccggcgaaaaaaannnnnnnnnnnnnnnnnnnnnnnnnnnnnnnnnnnnnnnnnnnnnnnnnnnnnnnnnnnnnnnnnnnnnnnnnnnnnnnnnnnnnnnnnnnnnnnnnnnnnnnnnnnnnnnnnnnnnnnnnnnnnnnnnnnnnnnnnnnnnnnnnnnnnnnnnnnnnnnnnnnnngctcccagatgaaacagaggctggttgctgatttcttgggggaacttttgtaaaaatgaagacactgaatccttgagctgaatcccaggtgcagagactggggggaggtggagaatccaaaatcatgctcaggtttctcctgaaaagtgtgtattttctaaaaaataaatataaactcctggtttgagaaactccctcatgatgaatgggaggaaaatcatggcaaatggagagctaagaaaccatcttcgcatagaactttngcccaaggtgtagaggaagatctgccggtcaggcaggatgaagacccacacatgagcctgtgtcctccaggtcgtcccttcttccaaaagcacagcaaagcaatacaacttgaggactccctccaagatttcctaatttttgattttacatttaatctcaggaggctataccattaagaaacattattagagttattgctgggtgctgggccccagacgatactaagtgaggcagaagctttcaataattcctacagccctcagcaccaagaagaacttggagggaatattgggcttgttgagagggtgggaaagaaattagagtttctcccaatagaagagggagatcaccttggcctactctctaggacacaggtcc

SEQ ID NO: 324578 - DNA, 1318 bp, Homo Sapiens
  misc_feature (488)..(496): n is a, c, g, or t
  misc_feature (664)..(674): n is a, c, g, or t
  misc_feature (876)..(931): n is a, c, g, or t
  misc_feature (1286)..(1286): n is a, c, g, or t
gacactcttagccgggctaatatcatagctcgccgagtgcgctcgatcattcgatgaacagtataatcatcagtgttcatcatcttcgacttcatatatatcctgcgggtgttatcattacgtgcgaaagaaaatgcatatatgtcgtgctggactaccggacacaacagtacacatgtctgtaggcgagtctttatccacaagtctgtacccttttgcgagacgtgctccgctcctccacacatatgtcgaacacacatcttctcggtactccccacgatgtagtgcatgccacgcgtgggggcagaataaaattattttctcatcaatagttgttatcgtaagagactcgtattctgataccttcctatctttgcgaattattaagagggcgaccaaacactatctccgctttggtgaacacaggttcattcccagaatgtaggagagaagagcgttcatatctagatatttttccaccaccgtgnnnnnnnnnggaggtgtcaccagagtgccgcaggctgtcaaaattcaaaatactaagaagactcccacatgggcccaccccacgttgggaagcagcacaaagaaaaaggccctcctcaaaacatcccatcttggggaacgttttcaacacaccccagtcgggtccccccgcggggcnnnnnnnnnnncattgtgggaatctccagcacctcatttttatgtgcccagattttcatttgggaacgaggtaaatgcccccatttcctttactattggggggccccgcccccaacgaaatggtttagaaaatttttaacaaggccgaggggggcaaaaaagaaaatattgggtattattttggggtttggtgttctcttttaaatttattannnnnnnnnnnnnnnnnnnnnnnnnnnnnnnnnnnnnnnnnnnnnnnnnnnnnnnngtaaaaagaatccatttattgggttttaaactagttacacaactgaaatcagtttggcactactttatacagggattccgcctgtgtatgccgacacttaaatactgtaccaggagcactgctgtctttaggtctgtattcagtcattcagcatgtagatactaaaaatatactgtagtgttcctttaaggaagactgtacagggtgtgttgcaaggatgacattcacccaatttgtgaattatttcaacccaggaggataccctttcactctatgaaacttgtcataggggcaaacatgtggggtgttaggcattgaggaggatgccccaccaaaaatggttaccataaaaggnccaggaccattcctaatggataggggggacct

SEQ ID NO: 324579 - DNA, 320 bp, Homo Sapiens
gcaattgtaaatgcccagaaacttccattgtattaatcaggagttagcgcagtacaggcaccacgtggttgtctccaggagcttgaggggcctgagcagactggggggatatccctccccagggctgggccactggcacccttctgcccaggggtgaccctcgggccccatccccagcagcccaaaggctgtgttgaagaggttgatgggagtggagccatcggtgatgagggttgatttcaggcccagggactggagcagttttacctgcatctcaggcccagccacagcaaggtccctgatggtgctggggcctatgc

SEQ ID NO: 324580 - DNA, 414 bp, Homo Sapiens
tttcagtctggattcgtgtttattgaagccagtaattagagacatctttttttcccaggactagaaagcaaggttccacatgactgcatactgcacccggacagagccacacccctggactaaggctggtgggggataatctgcagtcttacttttaagttagaaacaccaataaatttagtatacagacgacagtgaactttcacttacagcattaacattgttaaggtcatgatgtacagagcagtcactttcaactttgttaaattaataaaacatgacaatgtcttcagtttaaataccgattttaaaatgccaatcaaaaaaagtgcaaacaaaataacaatctagcagcattatctgttgcatttttaggaaagaccaattcttggctgttatcttcagccacgtatt

SEQ ID NO: 324581 - DNA, 1402 bp, Homo Sapiens
  misc_feature (190)..(221): n is a, c, g, or t
  misc_feature (279)..(296): n is a, c, g, or t
  misc_feature (434)..(442): n is a, c, g, or t
  misc_feature (701)..(711): n is a, c, g, or t
ggcagttatataaccagggtgggccccaatatttggcgcgaacagtgagttttttccgcccccgtattatatctcacccacggggcgccccaaataaatatcccccgcaagggggggctatctccggctcggtgatattgccctgctagaggggttttcccgggatttactcgcacaccgcttttttgtnnnnnnnnnnnnnnnnnnnnnnnnnnnnnnnnagaaagtgtttatataagaattaacgcccccacactggtgtgggaagaaggctccccnnnnnnnnnnnnnnnnnnatttcatttcaatttccgggcttgggcggtggggtcttcccatgttggacaagaaccccgcctaaggggcccctacgcaacccctttctttggaatttttttaggaaaagccttgggggtttacacccggcggggggnnnnnnnnnctgggggagtacaccgccggccttatttccaatagacgcggggtttttttaggcgagaaggggattggtccccaggtgcgcttgcgttgcacggggcgcgggtggcgccaaggggaggggtttgaaaactttcgttgagggcccagggttggcctaaaaaatcaatcattatccatgtttattttccttaggggcgcccgcgctctaaaattaatttttgagaaaagcttatttgagggccgaggcggcccgacaagannnnnnnnnnncgtttgttgggcggacgtaggacatagttgtgattcatgaaagaccaaaaacatgctttaatgccaggcaagagctacacagtcaactgatttacgggccactccataggctatgatttataaattatatattattaaatccaccgtgggcatacagatgggatgggacagcacccccagctccctcccactctgaatgatgtatgaacagttgagcactctgtagaatccttcaggtcgtaagccactttattccagtcccttgaacatcacaggctggttttatttgggacagaacaggttttatttccaaaggtccctgaacacagcaatgacaatgaacagcccagcagaggagtgacataaaccttgaggcatgcagtcttctgggtgctgtggagtcccttggccaaacttgagtgcactggattcgacatacaaagaccttcctgggaaggagaaggagaaaaacaacctccgagaaaatacagacagggtcagtggcaggccaggacagggactatttctatacattcttggaagtgtcggcattcatcagcctgcatgtggctcacttttctttctggaatagccggagacctctactcctcactccagctctaggttccaaggaacagagtgggtctggctcagcgagatgtcatgactaagggcagagcagtgcaggttt

SEQ ID NO: 324582 - DNA, 371 bp, Homo Sapiens
  misc_feature (34)..(34): n is a, c, g, or t
accctgtcaaccttttattgggagtggaacacantgaggttcagctcgtgccgggccctgtacattcactgaagcagctcaaggggctcagccccgacactgacgccacactgagcaggatgcacggcccggggctcacactgtccatggaggaggtggggtcagcccgaggtgggcggatggtggcccgagacaccgagagcttggttctgggactgtggctcagctgacccgtggcacagctgcacctaagacatggccctggctaggcgggaacggctcacagtagcgatacattcacaggacacagttggtgtccagaaaagggggctcagaacacaagtttctacacaagcacttggcacccacac

SEQ ID NO: 324583 - DNA, 400 bp, Homo Sapiens
  misc_feature (22)..(22): n is a, c, g, or t
tggaaaccccccgggttggggncctaatttgggggttcccgcccgccccttcttgggaaattggtgggtttcctttgcccctgcccaaaagttgtcccctggaatggtgaaaggccatcgaacgcctcaatggaacatggtcttggcggggatctgggtgaaagcgcttgcggtcccgagttgtacttgtagatgccttcccaccatggcgggcgtgaacggtccggggcccataccctgccagaccgcgacagctcctctgtctcccccgacagcgtgtagagcgcccggaactggcagctcgagtcgcgaaagaggatcaggaagtggttggccttgcttttctcaatttcctgggcaggagtgctccagaatgcgattcttctgcggttcgttcacc

SEQ ID NO: 324584 - DNA, 564 bp, Homo Sapiens
  misc_feature (550)..(550): n is a, c, g, or t
tctctttaaattattttattcaagaagtgggggaggacagacaaggggactgaactcaaagtcagagggtggagactccagccccacccagacacggttggggacagacaggacccaggaataccgactgactgtcctccaggggatggcggccgcagcacacagggcccggccgttggaccgcccgggtggggctatttgggggtgccgccgcccttcttgggagtggtgggtttcttgccctgccagaggtgtccctggatggtgaaggcatcgacgctcatggacatggtcttggcggggatctgggtgaagcgcttgcgttccgagttgtacttgtagatgccttccaccatggcgggcgtgacggtccggggcccataccctgccagccgcgacagctcctctgtctcccccgacagcgtgtagagcgcccggaactggcagctcgagtcgcgaaagaggatcaggaagtggttggccttgcttttctcaatttcctgggcaggagtgctccagaatgcgattcttctgcggttcgttcaccttnccgccaggcagcaa

SEQ ID NO: 324585 - DNA, 456 bp, Homo Sapiens
  misc_feature (266)..(266): n is a, c, g, or t
  misc_feature (360)..(360): n is a, c, g, or t
  misc_feature (418)..(418): n is a, c, g, or t
cctataaaaaaagtctgaaacattttacttcatattacacatacttttcttttaaaaaaggcagaaacattgaaggaaacaacactcaacatgaaagaaccttgtgccggagttctagaaggaccttgaaaatcagttttaaaaggccttgctgtcacatagtctttttcatggctgcttgagtcatgctgaagagataggcttcataggattatatttaaggaggttgtcatcattctgaatgaggtacagcagtgcctcctggngctggagcttggtgagtgggctgctggtgatcacggagggctccgggctctgtatgggcaggaggaggctggtggcagcagcaggtggctcctngcctcccacaggcaagaggccgctctccctttcctttggcgggacggaggtggggttntgcgaacaccatgggggacataaagcagagacggagct

SEQ ID NO: 324586 - DNA, 877 bp, Homo Sapiens
agtgtcaaatctcttttattacagagggttgtgtaaaagatcctgggcatccactggttatctcggagtggcaggggcactcagtccctccgcaggttcttaagccgttcctccaggtctgcatcagcatcagctagggctgaggctgcggcctctgcttttttcccaccagcagccacactaagcgagcccccagttgaggggaggttcgacagctcatctgttaggctaagtcccagctcatccagaacctgggacaccacagcatcactctcctcttcatcttcctcatcacccatggcatcatcaatggcatcattcatcatctcctccttcatatccatgatctctgcctgccgctcaaactccatcatgatcttctggatctggggcaacttcagctgtctgttcatggtgcccatggccttggtgacacccttcatggcttgtgccatcgagttgttggacttgagtgtctggatcttgagggacacagcctggatgttggcccgcatcaatacaaacttgcgcacatagcgccgggtgcgcaccaagtcttttgccatgatgcgaacagcatccatctggccttgcttggccatcttcttaatgtctgcaatgattttcttctcctgggtctctagtttctgtcgctcgcggtccagctcccgcatggcacggttcagggccctctggttctgccgcagtagctcctctggcgtcttccggcgcccgaacaataggtccatgatggtagaagctcactggcaggccggagctgggacggacacccgtttccgcttccgggtcacgcttctctttctgggatccccgacttgcccaccaactaaggcccctcggtcctgtcgccgccccc

SEQ ID NO: 324587 - DNA, 373 bp, Homo Sapiens
ttctatctgttgatttgatgtcgaggtaggtgggatagtgctggttactggtgttatgcttggctccaaaatttctgactctaagccaagtcttttcaaatcctcttggtatgctttcagggcagctgcctccattgcagcaaactcctttgatgccttttcttcttcctttgccttatccaggcttttctgtttaatctcactgatcctttttgccacattttccttatgattctttcctctttcatgaaattcaacactaggcctattgtctgctatccagcacttgcagtaatcacagaatttctttggctgtgacttccagtagtccgccatgactgcgccagcgctctgcaagtcgtccagggttcca

SEQ ID NO: 324588 - DNA, 177 bp, Homo Sapiens
aactgtagaaaagaatattttattgaaacagtttctcaattaacaatggagcaaagtacaatttgactcaaacctgtccaaccagcatcaacagctactgaaagaattcaaacatacagaagaggtgggggtggggtgaggggtgggacccttaggtcccatctctgccaatgtggc

SEQ ID NO: 324589 - DNA, 323 bp, Homo Sapiens
  misc_feature (42)..(42): n is a, c, g, or t
  misc_feature (187)..(187): n is a, c, g, or t
cctttaaaaccatttacttacaaactttaattcagcaaaggntccgtgtggggagactggggtggggtcgggggaatagtccccttggagtggatgtggacccccagagtcaagggagggaagctggtggcccagttggctgggggcaaggcccagggtcacctcaggtcgacaggtcctgctggtnggcgggcccagagtttatcttcatggagtgctggtttctggcactgggctggaaggaggccagctccagggatcttgcccggggttggcaggcagatttcaaagatttcatcttcaaccaagcgaatttacaacca

SEQ ID NO: 324590 - DNA, 432 bp, Homo Sapiens
ttaaatctgatttgccatgctaggccaagcttattttattacatacattctgcattctaagaactaataacttcatattgtaaacattaagcatacagagttaaaattcaaggccacattatatcgattgtctcttttgtcgtgtgtctttggctggccgagatcaactcgtagtgtataaatgcataagttatataattattatataaaaagggggaaaaacattgacttgtatacttcattctgacaaacgcacagcgttcgcgacctcaaagggaaaactgggaggccgcctacccaaaatgcctgcgtggatttctggattgtgggccgccaaggaaggcccatctcttacctggaccctgtgggagaacaaagcccccacataatgatgaggtcctgaatgtttctcttaaatatcagacaattccc

SEQ ID NO: 324591 - DNA, 536 bp, Homo Sapiens
tttttggtttgtccactctttattaaagccaggccctcctgctgacagctgcaggacagctgctggggcccaggagggacggagacagcagatcctggccatacagggctagagctgagattcccagagccccccaagcccaccttgcccttggccctttctgaggctcctgtcccgcagggagaggagaaacccagggccgaggtcattacccagcaccccaatgcctccctgggacccctgctctcctcaccaccccgccccgcaacctcaccaacctcacccagccaggctaactgaccgccaccacccaggccctcttcccacccaccaactaccgtgcctcctacccgcccccagccctggcagcctggctgctgcgctcagcccccaaggccatgtctacactaacgtggagggaactaggtctattagggaatgcagctgcaccaaaaatccgtttcctggccccattcacagtggccccaaaagcgtgaggggaatggggcttcacatgaactacaccccagctgccc

SEQ ID NO: 324592 - DNA, 1608 bp, Homo Sapiens
  misc_feature (34)..(34): n is a, c, g, or t
  misc_feature (36)..(36): n is a, c, g, or t
  misc_feature (67)..(67): n is a, c, g, or t
  misc_feature (88)..(88): n is a, c, g, or t
  misc_feature (222)..(222): n is a, c, g, or t
  misc_feature (620)..(620): n is a, c, g, or t
  misc_feature (1340)..(1373): n is a, c, g, or t
  misc_feature (1386)..(1445): n is a, c, g, or t
  misc_feature (1447)..(1502): n is a, c, g, or t
cccgtggcgtcgctgtgtaataaaatagaggggngnctcgtcattcttgtggtatgggtaataacgntggagcaacagcgtgggtgtntagcatcagagacccgtgggcaaatacgagtacgtctgtctaggactatagtgaaacgtcatatcaccatgggcgtggtggggcgcggaccgggtgacgacacacccatcccgctgtcagtcacctagtaagtnaggccgcgtcgaccttgcgtcacatgggtacgagcgatgcgtaccgtgcgcctactactcctcataaattgccggtctactgccgcgcgggggtgctgactcactacggatgtgattgttataactcaggcgcggcggtgtgtggcgggaaagcaagcaccgagcggcggggagaaaaaaaatatgaaagcaacggcgggcgggcgtggagggccgctctttatccccagatatgagatggaggagtgctggcacagtgcccgcgcacgtggggtgtggtgatctaggtgtcgcggggctgtacgcggcctccccctccgctcataatctcgtggaagccgcagacaacgcctgttgtgagagagcggggggggaggcgacacgacgaccgctacacncgtcgtgtggtgggatgaatagaagtccgggcggcgcgaggcggccgcgcgaccaatggggggcggcgtggtttatttatgaggcgggggtgggagccgggcaaaacaccgtggtgtggtgtgtggggatgcgccagttatctcttttaggccacggcccggccgtgtcgccgcggggtgtttcttcaccgacgcggaaccagatgcccgcgaggcggggcgagcataggttatgcgcggaaaacgcgtttatccgcgggcgtaacgccagggccgcgggcacgcggtacgggctggcgggtatccgccgatggtggaaagtcggcgtctccgctcactccacgcgcgcgcaacggcggggtggggtaaatcatcgtgaagagggggggcgaggggaaacgcgggttatttattgatcttctcgctcgttttgtccccgcccgttaagaagaaaaggctgtaattttattttcaaatttttggaagtttttcagaaaaaaataaaatgacaagaacacatacaaatattgaaattattcattgaactataaacacttagcagaggaagggacttttgatgtatttgaatccgcctccttctgaaagcaggaatcacttctaaatgtctctcatatctttcttcaaggagtggttttccaggaggttcccagcctcctcaaatctttcccaagtttgatgcacttcacctcataaaaatannnnnnnnnnnnnnnnnnnnnnnnnnnnnnnnnngagacagggtccnnnnnnnnnnnnnnnnnnnnnnnnnnnnnnnnnnnnnnnnnnnnnnnnnnnnnnnnnnnnannnnnnnnnnnnnnnnnnnnnnnnnnnnnnnnnnnnnnnnnnnnnnnnnnnnnnnncacatcaccacactcgggtaattttttttactctctgtagagatgcagtcttgctatgctgtgcatgctggcctcaaacttgtaggctcaagtaatcctcctgcct

SEQ ID NO: 324593 - DNA, 455 bp, Homo Sapiens
  misc_feature (373)..(373): n is a, c, g, or t
  misc_feature (392)..(392): n is a, c, g, or t
aatctgcgtgattgctttattgtacaaaaagtttccagtaacagtaaattggttttaaaaaaggacaaaaaagtcattttggatagaagtgcttcactaattgctttatttaagcatacaagaaaaaaagttttatctgaccaattacgttggaagggttttattacctttaagaagccattagctaggataaaacactgaaagcacttgtgtcaaaacaaataaataatgtaaataacgctctctcaattagcagagaaaacagtgaatccgttaaatcagagacacacatcacttcacaagcatggcccagccggcaccaccaccccccaaaacggaccaaaacaagaggacaggccgttttcaggttacnaatcttgggggaaggttcnggggggctttgggggaaacgcgtggggtaaacatggtctggtttctccttctaccctccactt

SEQ ID NO: 324594 - DNA, 763 bp, Homo Sapiens
  misc_feature (88)..(105): n is a, c, g, or t
  misc_feature (114)..(165): n is a, c, g, or t
  misc_feature (172)..(192): n is a, c, g, or t
  misc_feature (219)..(219): n is a, c, g, or t
  misc_feature (222)..(222): n is a, c, g, or t
  misc_feature (250)..(250): n is a, c, g, or t
  misc_feature (260)..(267): n is a, c, g, or t
  misc_feature (275)..(275): n is a, c, g, or t
  misc_feature (279)..(280): n is a, c, g, or t
  misc_feature (284)..(284): n is a, c, g, or t
  misc_feature (286)..(418): n is a, c, g, or t
  misc_feature (659)..(659): n is a, c, g, or t
  misc_feature (714)..(714): n is a, c, g, or t
aaacccagacgggaagtccggcgccccgcgcggcgatattttcgtagggggggagggtggaacaaaagacaaaaaagatggcatattnnnnnnnnnnnnnnnnnnaaaagggannnnnnnnnnnnnnnnnnnnnnnnnnnnnnnnnnnnnnnnnnnnnnnnnnnnttatggnnnnnnnnnnnnnnnnnnnnntggggagcgccgccccgcaccgcgcgnttnggggtttgtgttttggtttttggggttntggggttttnnnnnnnntttttttntttnntttntnnnnnnnnnnnnnnnnnnnnnnnnnnnnnnnnnnnnnnnnnnnnnnnnnnnnnnnnnnnnnnnnnnnnnnnnnnnnnnnnnnnnnnnnnnnnnnnnnnnnnnnnnnnnnnnnnnnnnnnnnnnnnnnnnnnnncaaagtacaacaacttttaatacaccattaatactaatgattaaaaattattgcatagtcttatgcatttaccctaaaacattttctgaaagcaaacgaattatataaaagacaaataaccctttaaaatgtggatggcctttactacctcgatcttctatccttttttgtcttttcagtacttttgtccattgttttctcattatctcccctgcactttgggcaataccatttccccttngggtttatagggtaaggtgaaacacatggaaaaggtggaaaccattcaattgggncactgttcattggtcacatcctatcatctccccatagggacacttgggg

SEQ ID NO: 324595 - DNA, 295 bp, Homo Sapiens
  misc_feature (273)..(273): n is a, c, g, or t
tttgctaaaaaggaagaaatgtttaataactcctggagagataaaatgccaacgtttaggtatatttatgaattagaagcttccaaattgatatggagtaaagcagtgtcagatttttaaagtaagggttgaaacttggtttgccaaagctttcagggtgaaatcaaggaccatcaagtactttaagtccaccacatccatacctaaaacatgctggcctgacccaagcttgaggtcctcagactgaacaggtgcaccgctgggatgctttcnagctcctggacggaaccgccta

SEQ ID NO: 324596 - DNA, 482 bp, Homo Sapiens
tggattcattttgaaatttaataattctaatagtaataagaaacatagtttatgcttttttttaaatgaaaacaaacaagtaattttgtaaaagtcagaaaacaccagtatccttctgatctcatcctggatttttctgtcagctggaggatgcatttctgaccccatcccagacacgtgaaagcagaaggcatgatgcatctataataatgaaagcacaatctaaagagtattatcacaccgtgaacagcttcttcctgacccagagcaaatattaagagaaagacaatatatttacaaacaagatttaataatgctcacaagaatagagtttgcccccaaatggaaaattacacattattttgtttcaaaaagttataaatttagtgcttgaaaaatccagcaggtaagtagaaggactaacagggtctgtttctgggaactgtccgccagcaaatgagcatgctctgtcctggaagcca

SEQ ID NO: 324597 - DNA, 1232 bp, Homo Sapiens
  misc_feature (101)..(109): n is a, c, g, or t
  misc_feature (312)..(312): n is a, c, g, or t
  misc_feature (636)..(720): n is a, c, g, or t
aagggttttcacgcaccgcggcgttgatattggtagggggggccggcaacgaaaaaagaggatagttggtttttttgaggctcccctggttttgctcgccnnnnnnnnncgaaaaattattttattttccacactgcggcccacaaaggggcttgttaatccccctctttcgcggattttcacggttctcactccccaccccccgtgttgggggaagggttctctccccactgttccgagcccggaaaagggtttttaaaatgaaagttttcgcaccacgtgtttctttctgaataagaagtgccccaaggnccggaggggcgtcaaaattttggtgttattggaggtgctcgccattggggcgcccccccttgtaaatagagtcccccgtttaagaaccctctcaaaacacccaccttggggtatttttttcaaaacaccctttctttgttccccaccgcgggggttttgttatttgggggggagaatcccagcgccctttttcatttgcccggagttttccttggggaacccactttgaaccctgtttcattttcccttctggggccgccccggcccaaacgaatggtttttgaaaacttttttgaggggcgaggccgggcccaccaaaataannnnnnnnnnnnnnnnnnnnnnnnnnnnnnnnnnnnnnnnnnnnnnnnnnnnnnnnnnnnnnnnnnnnnnnnnnnnnnnnnnnnngaaaatcatgggcaaactttattggcataaatcacaggaattgaaatgggaaaagccagcttggaagtttacagagaaaaaataaaatcaaaatcaaattttcaaataaccactgactcagagaatggaccccagaaaccccagtccctcttggggaagatctagggtgggtcactataaacagagcggtaaggcctgcgggtgaaagtggagacatcagacctttggaggggctgggctgaccttcccccaaaaaggagggaccctcttcggagaccccagcacactcggcttctgccaggaaggccagtggagtggtttggactgtcaccattagaccccggtggtgccccctttctcctcatcaggagcccaaggcctgggtcctctttcatccttggtaaagagctctggggggtttcccagaggagcctgtccctctgccccaaatcctatcatgctcccttatgaccttctttccagacccctgagtgccgattccacctgtgaaa

SEQ ID NO: 324598 - DNA, 1274 bp, Homo Sapiens
  misc_feature (328)..(360): n is a, c, g, or t
  misc_feature (469)..(480): n is a, c, g, or t
  misc_feature (546)..(679): n is a, c, g, or t
  misc_feature (763)..(773): n is a, c, g, or t
cgccgacaaaccgcccctgtgtggtttctaacacccgcctgcccgcggagagcgagtagttccacccacaactccgccggtatgaagaaagatgggccacacattgatgggggcgcaggtgttctaatgagaccatcgctgtgtcgcacccccagggcggcggaagatatctaacagctctcgcggggggcgaaaaaagaaaagttgatatagaacccccctttccggcggggcgccgggttggccatcaaaacccccgtgggcgggtacggcggtaacaatccaccgggcggggaagtggtgtaaaaaaaggtggggggcgattacnnnnnnnnnnnnnnnnnnnnnnnnnnnnnnnnncacgccgatatttcagcccccctggggctctccgggggaaacatatcaataaatgccctcacgtctcccctgtcgggcgcggctccgagcggtttggggtgaaaacggnnnnnnnnnnnngggggggagcccaagcaccgctttctggtccggtgctctttgggaaacagttattggccattgtannnnnnnnnnnnnnnnnnnnnnnnnnnnnnnnnnnnnnnnnnnnnnnnnnnnnnnnnnnnnnnnnnnnnnnnnnnnnnnnnnnnnnnnnnnnnnnnnnnnnnnnnnnnnnnnnnnnnnnnnnnnnnnnnnnnnncaagttgcacattttaatttacaatttttaccaataaaaaggattagtttacaaaaagggaagtcctttatacaaaataaggannnnnnnnnnnccatttgtaaagagaatccactgtcatgttttgccttgtcaagtcaaaactcaaatagcttgttttggtaaaattattccagaaacataatccagacaaaatcaataacgtcatcagcttcctaaccatgtttaagaggaataacttcatgaacattttgccctgaactgaagagttctaaatacttgtaaacctttaggaaaaaatgactgctcgcaggcagctgactggtaagagggtacaccagagactccgggtcactcactgtcagaatattcttatacatacaatgagtctccacgcctgtacaatgagtgtacgtgcaacataattggagtaatggcctctaaaattttacaagtaaactttattgtggccacagatgaacaacaaaacatgacagttaaggttcagactctccccacctattttatcatataaattaaatatggagaggtacacacaaactctattcaaaatgagaagttgtttgccaacatc

SEQ ID NO: 324599 - DNA, 1347 bp, Homo Sapiens
  misc_feature (11)..(11): n is a, c, g, or t
  misc_feature (28)..(28): n is a, c, g, or t
  misc_feature (36)..(36): n is a, c, g, or t
  misc_feature (59)..(59): n is a, c, g, or t
  misc_feature (100)..(100): n is a, c, g, or t
  misc_feature (108)..(108): n is a, c, g, or t
  misc_feature (147)..(147): n is a, c, g, or t
  misc_feature (155)..(155): n is a, c, g, or t
  misc_feature (164)..(164): n is a, c, g, or t
  misc_feature (176)..(176): n is a, c, g, or t
  misc_feature (184)..(184): n is a, c, g, or t
  misc_feature (195)..(195): n is a, c, g, or t
  misc_feature (197)..(197): n is a, c, g, or t
  misc_feature (199)..(310): n is a, c, g, or t
  misc_feature (313)..(313): n is a, c, g, or t
  misc_feature (423)..(530): n is a, c, g, or t
  misc_feature (898)..(907): n is a, c, g, or t
ttttgaaaaangggaacctcactctgtncaaccccnggctgaaagtcccaatcccccanaatcatggcctcactgcagcccacccacctccctgaagctnaaagtganccctccccatctaagccccccaagtaagcctaggactanaggagcanaccacccanaccctggctaanttttgtantttttgtggananannnnnnnnnnnnnnnnnnnnnnnnnnnnnnnnnnnnnnnnnnnnnnnnnnnnnnnnnnnnnnnnnnnnnnnnnnnnnnnnnnnnnnnnnnnnnnnnnnnnnnnnnnnnnnnngantcatcatttcaaagttactttctatatgcggccggaacagggtggttgacatcagttttcttcaggttactttttaataatgattaaaacggggaacttcattatcatgnnnnnnnnnnnnnnnnnnnnnnnnnnnnnnnnnnnnnnnnnnnnnnnnnnnnnnnnnnnnnnnnnnnnnnnnnnnnnnnnnnnnnnnnnnnnnnnnnnnnnnnnnnnncaattaaaattgatccgtgggcccggccgggcaaagaaacttgacaaaaaattgttttcaaaggatacccctggaagtggggagcgctgggattcacacgaattaaaaacgcccggggtcaccaaagggggttggacctttcccaatggtgttctgcggggtctttaaagaattttccgggaggaatcccaagggggctcaagatgaatttaagtccaggttcctccccagtcgttaccaaaaaatggtggaaattattttaaacttttttccccagattcggaccccccgccgaaaacctgtcaaaattgaaccctggaattcgccccacaaaaaaataaagccccctttgaacgccggttgggggnnnnnnnnnntttacaccacatgggtgggaaaccaagggggcggcacaaatagggagcgcttcggaacaaaaaaatttgggccccaaacctctgggaaaacataaaaatctaggggggggaaaaactcaattccgaaagcgcataccggcagggagagacgcggcaataaaccaacagtctcccggttaaataccccccctcagggggaattttggggcccaaacatctgtccaccgtttttttataccgcaaaaaacgctgtttaacgtaataaggggaatttacagttgtgcatgaaaacaccgccggaagaaatttccgcccccaaaaccctctctaaaaaccttttccaagaatgctctccgggggaactccttgcaaaaaaggggggtaaaaaacggtccccgtttaaccccttgttcaccgggtttcctatggggcaaaaagaa

SEQ ID NO: 324600 - DNA, 1176 bp, Homo Sapiens
  misc_feature (43)..(69): n is a, c, g, or t
  misc_feature (117)..(125): n is a, c, g, or t
  misc_feature (195)..(256): n is a, c, g, or t
  misc_feature (317)..(326): n is a, c, g, or t
  misc_feature (352)..(363): n is a, c, g, or t
  misc_feature (376)..(520): n is a, c, g, or t
ttaatccccccgggggcgttcgagtgttctccccccccgtgtnnnnnnnnnnnnnnnnnnnnnnnnnnnaggtgtttaaaatgattcccccccattttttcaaaaaatacgcccacnnnnnnnnnaaattttatttttgggggcgcggcggggccacccctggaaaaagaccccggaagccccccgggccccccnnnnnnnnnnnnnnnnnnnnnnnnnnnnnnnnnnnnnnnnnnnnnnnnnnnnnnnnnnnnnncttttcatgcccggagtttttttggaaaaaagtaagccccctttcccttacctttgggggnnnnnnnnnnacaaaaagtttttaaaaattttttannnnnnnnnnnncccccccacagcnnnnnnnnnnnnnnnnnnnnnnnnnnnnnnnnnnnnnnnnnnnnnnnnnnnnnnnnnnnnnnnnnnnnnnnnnnnnnnnnnnnnnnnnnnnnnnnnnnnnnnnnnnnnnnnnnnnnnnnnnnnnnnnnnnnnnnnnnnnnnnnnnagctatcataactttattaaacaagaaaagccctgacgcgtaaataaaaaacacctgagttctgatgccccgccccgcccagtcccgcccgccgaggtccgtgtccaagtcccgcgctctcaggagctatgtttctgccgcttccaaaagcgcttgacgtcgctgtgcccggccggggtcaccaccatgagccgcttggccgagttctcgaacacgagcacgcccagctcccgcgcgtgggccagcaagcagctcaaagtccacttgcgacaggaactggttatacaggacaccctcagtgaaccggagtctgtccctttccagctcccagagccggatctggtcggtgatggtggggggcagcacaggtgtctgtttgagcatcactgggtgggctcttgtccttaggaaatggattatctgctgggctgtgatgccactggcgattgcctgctgcacactctcccgggtcacctgcgccaccaccatgttggggaaccgatagagcatctcagagaagagggcaatgagggcaatctgcagctccgactctgagccagggatagaaagaggaagaggaggccacccccacacccagactccctcaagcccttctttcaagtgtcatgagaaatgtcagagagctctgtagactg

SEQ ID NO: 324601 - DNA, 512 bp, Homo Sapiens
agcttttattttgaacttaatatgtctgtaactctgagattaaacaacaagttcgtggctcttaatgttttcctcatagaatgtgactgttgaagaacatgcatcgaaagttgctttcgaaagtacaacgctttattgaatcttaataaattgcaatttttttcttggctgttcaaagtaatgtgtttttcatttttcaaaagacactatggatgtctactttgcacgctgcgattgggagagctgtcctgctgcatgcgttccctctgtaatttcctcagagctcacatacgtacctctctcacgagtgaactcagattttccattgttttgctttattctatcatttgctttgtggttttgctgtaaatattgaaatcttaatcatcatcgagaggcacagccaagctttccagctctccacccccgtggcccatccaagtctgttcatctggtaacttctgttgtctgggacggcagcaagaagatgccggggcttgcctggagtcctg

SEQ ID NO: 324602 - DNA, 519 bp, Homo Sapiens
aaaaagacatttcctggccaatttttttgcttgaagatgattgtctggttatacaagacatcaatctgaaggtaacaacttattttaacttaactactggcataaccattgccagcagtgaacttgcactagtccaagccaactcaaaaacacacattataaacatttgaatgtcatttttaaaagcgatgtcacagtttgtttcctaagaaatttaaaagcttttatttgaaaacgtatcttcagtttaaccctcagagttaagaaatattttttagatcattaaattcaattgtggttgacgtgctttaactaccgttctctaagttgtgtgctatacctagcctgtgggactccatagcttctctgagtcctaaagtggaggattctgttccaatgcttgtgagcaagaaggatcctcgaatgtctaggtttcaatattcaacactgctttactgggcagtgctgtgtatggaagttttgttttgttttcaaaggacaagtaacttgacaccatat

SEQ ID NO: 324603 - DNA, 506 bp, Homo Sapiens
aaattcaggtttcaaccgttttattgggaggttttgttttctgtgaaatacactagagggtggggaaggggacacattcactttgcaagataagggtttcccaccactaaaggaaaggcatggggcagggcacactggggtttgggtccgttttcccacctccttctgcttggctcacttttcttttctctcagcaagtaccacagaacacaaagacaagaaacaaaacagcaaatcaacctccaacggggccatgccaaagccttccccactcccccaggctgggcaagggctgggaggggctggggcagctcactcgacagccctcaggccacacgggaaggctgcaggctcagaaagggtgggtcaaagttaataaattagaataaattaggggggaggaatgcaactttgtgctgggagggcccttctctctaacacgcaagagagttgttgggggaaggtaggaggcatcgcaaaggccactatggtgggggtaagagcag

SEQ ID NO: 324604 - DNA, 1012 bp, Homo Sapiens
  misc_feature (175)..(185): n is a, c, g, or t
  misc_feature (211)..(332): n is a, c, g, or t
  misc_feature (370)..(379): n is a, c, g, or t
  misc_feature (404)..(420): n is a, c, g, or t
  misc_feature (428)..(582): n is a, c, g, or t
  misc_feature (668)..(668): n is a, c, g, or t
  misc_feature (676)..(676): n is a, c, g, or t
  misc_feature (695)..(696): n is a, c, g, or t
  misc_feature (699)..(699): n is a, c, g, or t
  misc_feature (776)..(776): n is a, c, g, or t
  misc_feature (842)..(842): n is a, c, g, or t
  misc_feature (932)..(932): n is a, c, g, or t
  misc_feature (984)..(984): n is a, c, g, or t
  misc_feature (989)..(989): n is a, c, g, or t
ctccccccctttttttcccccggggggggaaatattatttccccaaggggggccacagggggttgtaatcccccccggggaaaaacaggttttacactcccccgtttggggagggttcccaccgggcgggggagtttttattaaatttccccccccttctccaaagaagggcccnnnnnnnnnnnaaatataaaaaaaaacccccgggggnnnnnnnnnnnnnnnnnnnnnnnnnnnnnnnnnnnnnnnnnnnnnnnnnnnnnnnnnnnnnnnnnnnnnnnnnnnnnnnnnnnnnnnnnnnnnnnnnnnnnnnnnnnnnnnnnnnnnnnnnngggaaaaaattttgcccatttccttttcctttgggggnnnnnnnnnnaaaaaaaggttttaaaaaatttttnnnnnnnnnnnnnnnnnccaaagannnnnnnnnnnnnnnnnnnnnnnnnnnnnnnnnnnnnnnnnnnnnnnnnnnnnnnnnnnnnnnnnnnnnnnnnnnnnnnnnnnnnnnnnnnnnnnnnnnnnnnnnnnnnnnnnnnnnnnnnnnnnnnnnnnnnnnnnnnnnnnnnnnnnnnnnnncagatgtgcaggtctttattttcctctccctcactctgctccaacacccagcataaggcactacccccagatgggagggagggagngcggacanctgaactcagtgtgagggnntcngcggcagcagacggagttgcttccatgtcactctcctctcaagagaagctgctatttcagggtaaatgggagtctgntctcatccatgggttaaaagtgggattgagacgctctacagagaattccatcttctttttaagggnacacatcccgaacgacttcaggaaggggaaatttttgatattttaaaaatcagtgtcttcttcactttcccacttccatccggccacctncctttcttaggctcaggggcacagcgcttcctcgggtccagcaggggggatnttttnccggaaggggggttttaggagtt

SEQ ID NO: 324605 - DNA, 828 bp, Homo Sapiens
  misc_feature (80)..(88): n is a, c, g, or t
  misc_feature (267)..(348): n is a, c, g, or t
  misc_feature (386)..(402): n is a, c, g, or t
  misc_feature (410)..(579): n is a, c, g, or t
  misc_feature (744)..(744): n is a, c, g, or t
  misc_feature (746)..(746): n is a, c, g, or t
  misc_feature (778)..(778): n is a, c, g, or t
atattattttttgccccccgcgcacccgggggtgtttgttccccgcgggggtgaaaaattatttacaccaccactgtgtnnnnnnnnntgcccctcggcgggagaggggtttttttaatattcccccccactctctcctaatatctcaccgcggggggggcataaataaaaaaaaggatccggggggaccctcttttgtgaaaacacaaaaaagcaccggacgcacccctttgttgttttatacacccccctttttcacccgggggnnnnnnnnnnnnnnnnnnnnnnnnnnnnnnnnnnnnnnnnnnnnnnnnnnnnnnnnnnnnnnnnnnnnnnnnnnnnnnnnnnggggccccgccccccaaaaaagttttaaaaaatttttnnnnnnnnnnnnnnnnncgccaggnnnnnnnnnnnnnnnnnnnnnnnnnnnnnnnnnnnnnnnnnnnnnnnnnnnnnnnnnnnnnnnnnnnnnnnnnnnnnnnnnnnnnnnnnnnnnnnnnnnnnnnnnnnnnnnnnnnnnnnnnnnnnnnnnnnnnnnnnnnnnnnnnnnnnnnnnnnnnnnnnnnnnnnnnngattaaatgttctttatttgatgcttttgtgtgcacaacactataaggagttgcccaattcaccaagtcagcccgttcacacccttagttaaggtggccattaaggggccagggggtggcaatcagtaagctgcctcctgcctaactctctttctccaaccattntntataggctccagcgtagttgcgagccccagtntatccaagattccgggccagctgcgtggcctggaggccccgtttgcccat

SEQ ID NO: 324606 - DNA, 361 bp, Homo Sapiens
  misc_feature (35)..(35): n is a, c, g, or t
acaagtatttttatataatttcagttccattcagngtataaacaaaattgcccaggtttatttgccacctccgcctcctccctgcctgctgctgtgtgcccttccacatgcagtcaggggagggcttctctggcctcctcagctgtaatctcctgggagtagaggtcagtgaagagagctggcagccagtagtgggcctcccctggggcctgtaagtccagccacgccaacccttcctttagcaggtgttccagcacttgccgcgctcgctcggtctcccatttaagactggctttgatctcactgacagtcacgtagccattctcctctgccagctgcagcaccacggtgtgatccatcc

SEQ ID NO: 324607 - DNA, 356 bp, Homo Sapiens
gtagctcaagaagggaaaaggatttattagatcatttccaggacagggacccaggggcagtggctgggttcagtgttctcacgctcagaggaagaaaaggcagtggtgaacacccgcctgactgccttaccctgatctaaacgacaccatcttctcccccaaggaagacacagccctggatgtgaacctaggagggtgggaatggcttatgtcactcggtctttgaggcagagcttgggctggggttgcaggggcatcagctaatctgctctcaaggagcaaaacttgggcgtaaaaggaacgggcagtggggctagccggctgtctggaggtctgggtgacctggcagcacggct

SEQ ID NO: 324608 - DNA, 561 bp, Homo Sapiens
gtatttgtacttgagcttggagaggctggtggtgacagaggagggagacaggcaggcaggtgagggaagcagcggtctctgacgccggctttattataagcatgaggtggcacgaggcaggagttggcgatgcacctgggggtcacattgagtctggagcttccttcagcccaagcgctggcagtgacggggacaaaggtctaaagcccagggaagaaggggaggcgccagagcagggccatgcttggcttcccagctggccccagtgcagtgggtggcaccgccgaggctgctgttacggctcatcttcattgatttgcctgcgcttcttattgcccccacagcggaatcttctgctgaggaggatgaggagccccacgatgaaggccagtccagcgaagatcaggcccccattgcgaacggtctcatagtcatagtagaacgggtccacgtccccctttgggctgccgccaccgtccatcgacaacccagtcatttccccaggtgaatgggctgcctccactcccctcttcctgctgtctctgctttttggagagtccc

SEQ ID NO: 324609 - DNA, 463 bp, Homo Sapiens
tctctctagggcaaccccgtggaactgataacaaaagctcgtctttttctgctgcagttaatacctcggtgcccgaaaaagagcttctcacacgtggcagaggtaacgtcaagatgcccaccttgggccacgtgggggacatgagaattgacagctgcctgggccatgtgcctgcctggctggcaatacaactcgactatttctgccagagcccctcccctgtggtctgaggcctagtgggcggcatgggctgaggacctgctcctctctcacagctgctggctgatcgtggggactgcgacccagaggtgagcgccgccctccagagcagacagcaggctgcccctgacgctgacctgtcccaggagcctcatctcttctgacgggacctgccactgcacaccagcccagctcccgtgtaaataatttattacaagcataacatggagctcttgttgcacta

SEQ ID NO: 324610 - DNA, 473 bp, Homo Sapiens
tgtaatccactttttagtgcaacaagagctccatgttatgcttgtaataaattatttacacgggagctgggctggtgtgcagtggcaggtcccgtcagaagagatgaggctcctgggacaggtcagcgtcaggggcagcctgctgtctgctctggagggcggcgctcacctctgggtcgcagtccccacgatcagccagcagctctgccacgtgtgagaagctctttttcgggcaccgaggtattaactgcagcagaaaaaagacgagcttttgttatcagttccacggggttgccctgacccttgagctccaggctcctgccagctggaggtgaaactgtgcttgtatccccagccacgaagagctggaccagcttcaagtacatgtccacagcaacatgcaggaaggcctcttccctgatggccgcgtcttcatggaagtaggagagaagactgtaaaaagccaaaggcag

SEQ ID NO: 324611 - DNA, 560 bp, Homo Sapiens; identical to SEQ ID NO: 126671
  misc_feature (175)..(175): n is a, c, g, or t
  misc_feature (183)..(207): n is a, c, g, or t

SEQ ID NO: 324612 - DNA, 1528 bp, Homo Sapiens
  misc_feature (1437)..(1483): n is a, c, g, or t
cagggcgagaaagtgtcaaacatatctggccataatagtcatcgaaggcacgaggcagggggagggtcccacccgagacagcggagaaagtgggatacaaaggggggagcgtagagggcagtagggggggaggactgcaatagaatacagacacggaggtgtagggaggagaggacacggcgtagtggggggccacggcgcgccgagggaatgaattagtgttaagtgtcgccgataatcagccgcgcggcgaccgaggtgtgtgagttgtaatgggcggcccggagcggcgccatagaacagggatgtggctacagtcggactaagtgaaggaggagaaaatagcagcggcggggtctatcgctcgttagcggggcgcgcgagcggagcgctcgccgacgtaagccggggcagtagcgcacgccagggactgggatgcgcggaagcgggagagagcactagagtgtagtaggggcgcgagtggcagccatatagtcgccggcaagagggggaaagcagacgggggctccccggcggcgcgggtgcagcgggcccaaggctacgcggggaggacccagggacgtcgtcgtgggggggaagcagcgacaaacgaggggtagcttgcgccgcccgggtgccgggttttgtgtttggtgggggagccggccccaccgtacgttgtgagcaagtatgtggaggaggggcggaggaaggtgggaaagggatgcgcataagacgacagggtgcgggcggggtgtggggtgggcatttgggaagacattgtgggggtagaggcgggggcaggcggaacctcttttctctttgtgccagcgtacccaaggaaatacgcatgtgcggtcacgagggcttcccgttgaaagcacatattgcggcgtatggtggggggttttgtgatagtggtgtgcactgtttgtgtttatggtttgttggacttgtattgtggtggtgttttgtgtttgagtcagacgatcttcctttaatacaaagtcgatatatctacatacacgggggtgggaaaaccacccggctgcttccgctggaataaacagtgttgaaagtaaccgcagacctgcccttgtacaaagaggaacaactcgcttgctcagggtaggcgggtagaggggggcctgtccttctggttttgctcccaaactgccccatagtcccagggggaaagggtccctgatgtggggcagcacagccatacagccactgtccccgaagaagtaggatcctctctgtctccttgggggcgggagacggggagacagctcaggctctcagaggaggaccactgtcatctctctcctcttacagcagcgtccccctcaaccgcacccaacgccactgggtccgagctcccccatgaccttaccctcagaactgtatttgatatgtctgaaaatttaatttatnnnnnnnnnnnnnnnnnnnnnnnnnnnnnnnnnnnnnnnnnnnnnnngacataccattattctgtgagcaaagcacactttctgatggtagg

SEQ ID NO: 324613 - DNA, 856 bp, Homo Sapiens
  misc_feature (85)..(94): n is a, c, g, or t
  misc_feature (110)..(160): n is a, c, g, or t
  misc_feature (164)..(256): n is a, c, g, or t
  misc_feature (279)..(289): n is a, c, g, or t
  misc_feature (314)..(330): n is a, c, g, or t
  misc_feature (337)..(447): n is a, c, g, or t
  misc_feature (779)..(779): n is a, c, g, or t
  misc_feature (790)..(790): n is a, c, g, or t
  misc_feature (798)..(798): n is a, c, g, or t
  misc_feature (803)..(803): n is a, c, g, or t
  misc_feature (842)..(842): n is a, c, g, or t
gattaaggtttcacaacccgtttgggaggggttccccttgggcgaaaattttaaagaaaaccacccatttttcaaaaaggggccnnnnnnnnnntaaattaaaatagaannnnnnnnnnnnnnnnnnnnnnnnnnnnnnnnnnnnnnnnnnnnnnnnnnnggannnnnnnnnnnnnnnnnnnnnnnnnnnnnnnnnnnnnnnnnnnnnnnnnnnnnnnnnnnnnnnnnnnnnnnnnnnnnnnnnnnnnnnnnnnnncccatttccttttcctttggggnnnnnnnnnnnaaaaaaaggttttaaaaaatttttnnnnnnnnnnnnnnnnnccaaagnnnnnnnnnnnnnnnnnnnnnnnnnnnnnnnnnnnnnnnnnnnnnnnnnnnnnnnnnnnnnnnnnnnnnnnnnnnnnnnnnnnnnnnnnnnnnnnnnnnnnnnnnnnnnnncaatttagtcactatttattatattgacatatttacaaaataatacaaagtgaaataccactctaattcaccatattacacaagggctgcatacaggcaagacaaagtatatggaaaacatttacttctgtctttggtattagaactctacacaaatctgcagcatttaaattttccaaaacaaagtattaaacgtgggacaaaggatgtaattgggtaatgtcacaaaagggggctccaatatcctctgctagggaaacccccgggcccatggaaatgcaacagggaaggactaaacaccatttatagggggaggggtctattgactaaantaaacaataantgctacantaccntccacgggggtgtttctgcttgtgtgagggctgctcccnccctaacaagttcg

SEQ ID NO: 324614 - DNA, 684 bp, Homo Sapiens
cggtcggttgtctctaatatttatttgtctggttataaaattaatatgtgaggagcattggatttggtgagaacgttttgaaccctagctgtcacgtgccacctgcgggatctagaccagtgacttctcagaactgccatttcctcatctggtagacaggatggtaagccctgtcttgctcactccacgtatggcagtgcagatgaaatgagatcacagaggggaagcaattggcaggctggaaagtgctgacaaatggaaggggttgtgtcaccaccctcagctgaggtagtaccaaggtccaagctcctgcccctccccctccccagcccctaaatacacacacgaatggagggccacttgcagccttggtctgatggaattgggggcaaggccacacatcttcctcaagcttggccagatggggcctcactggggcccttccagaatcgggcatcggctgtggcgagctgtgtgaggatctcctccaactcgggtccatcctctgggaaacgctcagagaaggatcggatgaggccagcactgacgcctcgtattccagaagctgcacgtctgagccttcaaggcgagtgttgggctgaacaatgagcttccgagattccttacgcagcagcaccgtgtccctgagggtgaggaagcactcggggggcgcatcagtgactg

SEQ ID NO: 324615 - DNA, 484 bp, Homo Sapiens
  misc_feature (52)..(98): n is a, c, g, or t
acacaagaaatattttatgaaatgaaacaatatgtgtgatataatctgatannnnnnnnnnnnnnnnnnnnnnnnnnnnnnnnnnnnnnnnnnnnnnnatgctggttgtgattcatcaatttcacttcatgacccaccaatgggttgcgacagttttcaaagtcttgaatcaaggttaatgttttcattttccagcttgaagaaccaggccttcctccttgatggtgtagacaaatgaggtgaagggagccagaggggacttggcaataagaatctgtcttctctctgaatcaaggtactggaggatcagccgggtattcacactgtgactccaggtatttcctagtgcggctatcacacagctggatccagaagtgccttcagacagggacaaatcatcagctggagacaccaggtctgcctgagaaccagggctccactcagatgggttgtaatctgattcgtcaagataactgggattgat

SEQ ID NO: 324616 - DNA, 483 bp, Homo Sapiens
  misc_feature (380)..(380): n is a, c, g, or t
cagaagcttctcagtttttgtagcatctgatatgagagaatatgctagttattcataaacttagggccaggcaatgtggggcccctggaatgctactgggcactctctaacctagtcctagaaatttcagttccaataatgttttcttcttcttttctagataagaaactatatgtatctcgtggatctgcctgtaccagccttccaaatgaaactctttcagagttagagacacctgggaaatactcacttacaccaccaaaccactggggccacccacatcgatacctgcagcatctttagtcaagttgggaggagaaagacaacacttggtcttaaggacacggcagcaagacatccctgcatattgttccagatanaaatgaaagctgctcacacccacttgcctccccaatctgttaaaacagcttcgtgtctagtatgagctcagtactttgccctgtgaaaatccccagaagccat

SEQ ID NO: 324617 - DNA, 585 bp, Homo Sapiens
ttagcaccatccaaaaaagtacagttttattattattcatcatctgagctgttacacaggagcaagcagggtgtggatggggaacattgacagcgggggcttctgggattttcacagggcaagtactgagctcatactagacacgaagctgtttaacagattggggaggcaagtgggtgtgagcagctttcatttttatctggaacaatatgcagggatgtcttgctgccgtgtcttagaccaagtgttgtctttctcctccaacttgactaaagatgctgcaggtatcgatgtgggtggccccagtggtttggtggtgtaagtgagtatttcccaggtgtctctaactctgaaagagtttcatttggaaggctggtactggcagatccacgagatacatatagtttcttatagtgaactgagccgggacagggttgaagagcaaccctgtgcttccagctatctggccagggttgccattctcctggcggcagattcctgaggacgggctaggcatctgtcttgctggaggagacttaggagaggctcacgtttcccatcaggctgtggctctggaaccagatg

SEQ ID NO: 324618 - DNA, 1893 bp, Homo Sapiens
tctctgccccgccttcggtgccgtaactcgccgggcgtctgggggctcaaggcccccagcgcgcgcgtatccaaacccagtctccagacgccccgagagagggtggaccacgcgggcgacacctatagtacaaacgtatgccagccgccacggtatggggacctgcggcctgcttcgcatgggcgcgggacgcggcggagagtggcgcggcccgcgcctccgacggagacacccgtgcctcatgtgaggggggggagcacctagtaacggacacaggccgagtatgctttttcccgcgcggactcgcgggcggcggtagccgtccgtactagtccccgcgttgcggcggcgagcgtacgtgtcagaatggggcgccacgcggttaggagccgggccgcggtggaaaaaaggcggcgaggagactcgggcgagggggacggggcgtagggaggatgggataaggggggcgaagagtgtgcgaccttcgccccgcgcccgtccgtcggacggcccacaaacaccgtcgcacggtggggggcgagcccgcactcgggcgccgagaggttaaagcctggtgactaagagacagattccacacctcgcccccctcacgcgtggtagcggtgcatcctttcggggcggcgggtttccggcgcctgcacaccccaggccggcgccggcgcgctgggcgccgtgcgtcgcgggggcgggtgttcccgtcctgcgaaggcttccccacgggagccctccccgcgggcgccttcttctccttcgccggtcccgcgggcgcgcataaacaaatcccactgagcgctcgtcgttaaaaaatcacgttgtcggccatcgaagggggttgagagcaaatagtagcgctctatccttccgattcgtaggccagattaccccaggtcgcgtgtaccgcaaatgaatctgacccgtgagcttgccgccctatagtgcatcggcattcagattcctcatacaatcttcctttaacatcttttaacctaccgtcatactcaataatctatgcagaattttggggtacaataccaagaaggccccaacagtacaaagcagatacaaagcagtttcagaactttcttgagtgctctacacggataaacagcgcaagaaaaggcaacaagctttaggtaaacctggtgcaaccctggaggacttgctctggatttccatttgtttctgacccatcatgtcaaggtggatgacgtaagagaaaccacatattcactgttatagcttctcatctgcaccacaggagtatcatgtttcaaacaccagcataacaattttaaagcacaaatgctttaaaaatgtataagcaaaaggattgctcagattttcaaaaccattacatttacaaaatatttcccttaaacttgggattgctccaaacattgatttacaaatataaaagtattatggaaggaccccaaagcatgtgtgccatatgtatgtgtgtattaaacatactgttacccatactatataaaagttacccaatttaaaaaaccatattaacatataagcaaataaagagaaaacagtttcctctgaatggctgaaaatattacgtggcatgtggttgggtagtttacctttgtgattccttagagaaaaccactggtgagctacatgtagcttctcaaagctactggttacctctacacccactgcctgtgcccaagagcagaaggaatgagtgtgcacacaccacacaactggcactgcacacacaatacagtattcttctacccagatgccacaatgtctgcgtatctctgctagctttgaggacctgtgtcagacagagtcctcatgattagttctttcaattccatcccactggcttgttcagtatttcttttatac

SEQ ID NO: 324619 - DNA, 825 bp, Homo Sapiens
  misc_feature (74)..(108): n is a, c, g, or t
  misc_feature (152)..(160): n is a, c, g, or t
  misc_feature (274)..(368): n is a, c, g, or t
  misc_feature (375)..(393): n is a, c, g, or t
  misc_feature (399)..(410): n is a, c, g, or t
  misc_feature (423)..(563): n is a, c, g, or t
aaatattttatttcgcccagcggcggacaggggtggggactcccccgggtgggagataaaggtttacaccactnnnnnnnnnnnnnnnnnnnnnnnnnnnnnnnnnnnaattttaaattaaaaccccccccttcttttattaaaacagggcnnnnnnnnnaaaggtaattataaatttgggttccgactgggactttgtttgggtaaaagacaggagaatccgccccgacccccctttttggttttttaaaagaagttttctttccgcgggggnnnnnnnnnnnnnnnnnnnnnnnnnnnnnnnnnnnnnnnnnnnnnnnnnnnnnnnnnnnnnnnnnnnnnnnnnnnnnnnnnnnnnnnnnnnnnnnccgcccnnnnnnnnnnnnnnnnnnntttttnnnnnnnnnnnncgggcgccgcaannnnnnnnnnnnnnnnnnnnnnnnnnnnnnnnnnnnnnnnnnnnnnnnnnnnnnnnnnnnnnnnnnnnnnnnnnnnnnnnnnnnnnnnnnnnnnnnnnnnnnnnnnnnnnnnnnnnnnnnnnnnnnnnnnnnnnnnnnnnngaaaagcaaagtatcccttttattataatttctttttgcataaccttttcaacctatattcaggtaactacctgtctctcccatgaaaggagaagggtcctgcacattacaacaggcaaaaaaggcttttaagaaataaaatattttaaattgatccattacatttgttcaattttcttgagtccattggaaagtgggaaaaacacaaaaggagaaaaaaatggtatttcaaacaaccagactataataatcttagttagcc

SEQ ID NO: 324620 - DNA, 1400 bp, Homo Sapiens
  misc_feature (119)..(128): n is a, c, g, or t
  misc_feature (280)..(350): n is a, c, g, or t
  misc_feature (464)..(478): n is a, c, g, or t
ggcccccgctgtttttcccccgcggggggagaatatatttattattcccaaggggggccaaagagggctgggattcccccctggggacgttccagggtttcctccactcccgccttttnnnnnnnnnntttccccaggtgggccgagaaagaaggtttaaagagagtttccacccccctctcctcccaaaaaaagtgccccggggcgcgggggtttaaattttaattttggagggtcgcgcctggggcccccccttggaaaagtaccccgcgaaaagggnnnnnnnnnnnnnnnnnnnnnnnnnnnnnnnnnnnnnnnnnnnnnnnnnnnnnnnnnnnnnnnnnnnnnnngggggaattccaaaccccattgccttgcccgggttttctttgggaacaaattttggcccagttccctttccctttggggccccccgcccaaacaaaagttttgaaaaatttttnnnnnnnnnnnnnnnccgacatggaaggttttattagaaaaaatattcaagggggggtgtacaatcattggtctattaagaatgattttctagaacattgagtcaatataataaaattttcggtttcatactttctttttcttttaatgctgtgatacttaaatgttaaatcagcattttcatgtgatctgaagtatttcaattacatatgagcattcattgttttttgcaaaaactcagtattagttaatagttacatactactacgttcacattcctctgctgtacaaattaaaccatttaaaagaaatgagcattctaagaattatatacaaaagaaacccttgaagcagtgttgaaatgaaatgcaaggtgtcattgctagctctactgttttaaagtatctttgaaaagtaaaattaacaatacccttcaacatatccaggtttacaagtctcaagaaaatcaaatgtcaaaaattctagaaagctgtgaaaagcatatatacattttccttatgatcttatgaggcttctttacacttttaagaagttgctaagtttcagtatcaatttattcgcatgtcaactttagctgcccccaactcccattttggatagctcccctctgatttcagataaagctctgcgtcatcttccttcagcgaaggtgcgcgacctgaaggtgcgcgatctgacgcagggatgccaggtgtgcacttgccacactgcactcagatcgccaacaaagatgggtgcaaacacataggtctaatctgatatcagtgccctctttcctaaaccacactctcatccatacatttgccttcatgaacccagccatgttcagaacctcccgtagcacagtctttgaattctgaaatgacacaaagatccgacgcgtgggtcgacgatatcctaacattccggccgtacca

SEQ ID NO: 324621 - DNA, 332 bp, Homo Sapiens
gaactttatttcaacagtcattaggttccaccacacaacagggacaccatgggattgttttttcatttaataaatacaaatgaataaaaatactttattttgtcaagagactgcctctcctccctctcccgatctcacagaagcctccaggcaattgtgtgcccctccagggcttgcacccacagaccccgtctacttgcacaaatgactcttctttacagagagggctccatctcatttgcctgcaaatacaacatagggtataatacccgctcctttcccccatctcctttcccaaatacggagttctttgccctccgttccattttttt

SEQ ID NO: 324622 - DNA, 1570 bp, Homo Sapiens
  misc_feature (169)..(170): n is a, c, g, or t
  misc_feature (173)..(173): n is a, c, g, or t
  misc_feature (203)..(203): n is a, c, g, or t
  misc_feature (208)..(208): n is a, c, g, or t
  misc_feature (325)..(333): n is a, c, g, or t
  misc_feature (335)..(335): n is a, c, g, or t
  misc_feature (397)..(397): n is a, c, g, or t
  misc_feature (451)..(462): n is a, c, g, or t
  misc_feature (739)..(747): n is a, c, g, or t
  misc_feature (768)..(768): n is a, c, g, or t
  misc_feature (1271)..(1318): n is a, c, g, or t
cccagggatgatttgcttgcgggcaaatacataggtattgaggatgatgtgcttaggcggcggcgcgtaggtaaacgaaagcgcgtcgtgcggctccattgtgattggtcccgccctgagaagcaagcaggaggtagtctgttatattgttgggcggcggaaaccaganntcngcgtgtgtgggtgggggggatgatgctcanccagncgacggcgcaggtgtatcgccgcccggagggggcgtggggggcgattgtgttgtttccagcagcgcacagcaccgggtgttgagggcacgttatcgtatacgcgccagcatgcggtnnnnnnnnncncaccgcataattataagggggggaagaagaccatggacacgtgagtgtgatgtggtgaggantatacacgagaggcggggggtgggttgggtgttggtcacatctcatcatgatannnnnnnnnnnncggaacatatcgaaccacgggtggggtcccctcgtggtgcgagaggaggagggggggagggaacatactataaacgacattggggccgaatcgtgttgatttgttccccgcgtcccccggggggtacggggcccaaataagtttttagtgagggggtggggatttatcccccgtggggctaacaaaaaacgccaagcggcccgtgtattttttcaacaggtgggtgaaaaaagtggggggcgtttttattctaaacattataatgttgtatttcccnnnnnnnnnccagaaagagaaagacagggngctcggcgtcaggaggaggtgagacaaaatgtgttatctcacgcgcggccgacgtattctcccttggtctctcagactgtgtgcgaggttatgtgccatgaagagtatcccgcgccggggccgtgtgaaataccctgacagtataaccgcggagggactctccggcggggtaagaagaattagcacctggtgtgggagtgaggaggatgggccccaggaaagattgactcccttctaagggaggggggccgcgtgtagggtgattgtcggtatgcagaggggggcgttcggggtttagacggccgcggggccggttgttgtttagttaggtggaagaaaatccccaagcgcgccttggttcagtggacgccgggggatttttcgttaggaggaagcagcgtaatgagccactgtgtcacctttacggtgcaggggcgccggggcggccaaacggaatgggtttaggaaaggttctttgagggaccgaggcggccggacaaggnnnnnnnnnnnnnnnnnnnnnnnnnnnnnnnnnnnnnnnnnnnnnnnnaccaaattgccttttatttacatacgagaaaatctcaccgtgtgtccagctggccccgtcacggccgctgaaggcagcactgctgggcaaggagaaacaaggccacacctgcaacctgggctgcagggtgaggtggctccctccgcacaggccccaggacacccaccatggcacaggccaggctgctgcccccacacggcctccacgaggtcacgggtccatctccacaaccccaaggcagtaagcagtgcc

SEQ ID NO: 324623 - DNA, 251 bp, Homo Sapiens
  misc_feature (145)..(145): n is a, c, g, or t
  misc_feature (164)..(164): n is a, c, g, or t
  misc_feature (166)..(166): n is a, c, g, or t
taaggtaactcaaaacttgaataatattttctttatttacaagttagaatcaacaaagacagtccaggggaccaaatggggagatgactgaaacccccagggccccaaatggagcggaaggaaaaagggaaaacagagtagaaanaaaaaaatcaacgtcaaanangagctcccccttcttccctccccatggaggctgaggggaccacggccccaccctccccccagccttacctggcttaaaataattt

SEQ ID NO: 324624 - DNA, 247 bp, Homo Sapiens
acagggttgttggtgttttgtgaatgcgggcgggcgtaagaggaaacactttattacatcagtcagaaaattctagaaaatggaaagtattatacagcagagtaaatcaatggttgtctgcatagagaaaaactttataaaggctccaggtgaatacaaaggtgatagattagataaattcattattgtgactctgatgatggtttcatgggattataagaaaattcaagccaggagcagtggctca

SEQ ID NO: 324625 - DNA, 1103 bp, Homo Sapiens
  misc_feature (229)..(237): n is a, c, g, or t
  misc_feature (986)..(1033): n is a, c, g, or t
ggggggcgctgaaacacgtcgtcgcgcaatatttatcgagaggacgcgcgctctccttaggggagcctccgcccacgtggttggggatagagaacgcccccgggtcaaataagggccctcccgagagagaaaacttcccacgttttggggggagttttgttttactgagaaaaagccgcccttgggcgttttcgccccccgcgggggggcgtgttctttttttatgttnnnnnnnnnaaaatctcccgaagccccctctatttcattggtgcccacaagggtttttccctttggggaaaaacaaatttataggtgcccccttttgtcccactcttcccccctccgggggggcccgcgggcgccccaaaagggaaatggggtttagaaaaaattttttcgagggggccgagggccggccccaccaaaaatctgtctcaccgcggtgcacagtcagttctgcgggggctacgccttgtctttttcgtggacacttgacgccgcggttttcgcgggggggtaataatattcaggtttattctcccttttgcatctgtgggatacccagagttagagagaggggaaacgtctgctattttcttcagcagttgtgttttatgggaagggcttggtgtaaataaatgcgttgccgattttgagcacagcttgagtgcagttacttcgagtgaatgaaaactggaaagggctggactcaaaggttagaaggaaaaggcgccaaaggctgtccttttgaaaccctctaagaaatggctgtggctcctgaggatgagggtggggtggaccagggaggactagtgactgggatacaggagaccaaggggacagctgtgctgatcggtggttacccagccatggtggttgcaaatacctcagggaaactaacagcaaccagaactggaacaggggagctggtgggaaagagtagcagatgggccccctgaccatgtcacacctctggcaaagatgtnnnnnnnnnnnnnnnnnnnnnnnnnnnnnnnnnnnnnnnnnnnnnnnntgcaggatgcatctgcgagccacatgactgttggcttcttgaccagcggccagacatcaccctcagattc

SEQ ID NO: 324626 - DNA, 1518 bp, Homo Sapiens
  misc_feature (948)..(978): n is a, c, g, or t
  misc_feature (1008)..(1019): n is a, c, g, or t
  misc_feature (1150)..(1150): n is a, c, g, or t
  misc_feature (1242)..(1242): n is a, c, g, or t
  misc_feature (1431)..(1431): n is a, c, g, or t
ggtgaggtgtctcgttcatctctcagaagcaccttggggcctcgccagggccgtggtcttcaccgaggcgtgggtgggcagccgttccccaggctgtgtggggtcctgctttcttctgctgagacagtgacgctttccagtttccaccctaatcagccactgctggtcacagccccacagccatgggtatttctgtggtctcctcgcttcattgaagcaaagcatgagccttcctagacaagggcagctggggaggggaagggaccggaagtttgtgaagttgaacagtccatccatctgcactgagaggctggatcctgagtcccggggcagcaggatcccaggaaccttcctcctccagggcagcacaggactcagccgtgtctggaccggccctgctgaggctacagtcactctggaagctctgcgcttcatcaggaggcaggactgtggcgggaggggtccttgaagatgggtgtggggagcagtgggtcaggaagtgggagccagaggtttgactcactttgctttatttttcaggctacaatacaggtcagagacaatggcttataacggcttaactgcggtcctcagggattgtgcacaggcaagtccaaccctgaccctttctggcacacttcccagaaaaaactttccccaggacgcgagctccttcttcgcgccctcctaaccccgggaccaacggctgctgggacacaggttaatcaacgatttaacaaaggaatggggggcggattcttggcgtcctggctcttaaccaaagacagagatatgcccttacaccccacctaccccttgcacaccccctcttgggtgtcgcgggcctcgaccggcttccgccgtccccagtaccgcaggagaagcagagctctgctgttgtctatacgaggcgctctctctctctccgacgcctcggggagggccggnnnnnnnnnnnnnnnnnnnnnnnnnnnnnnntactttcactacaaccgcgcgatacaaatnnnnnnnnnnnncgaagccctttactgggtggggaccaccccagtcgagagggtcttggcgggatatggtgccctccctcgaggggcgcgaaagagaacgctccccctgggggggcgttacgcctgtctcggtccgctctaangagacggcccatcgggggggagctgtcttcgactcgaccagccgccgcatgagatacagtaattctctccccccgcccgctgggtctgggcngtatacgcatcccctccccagagtgcggggctctgacggtgggaacacagaaacaaccccccagcggacaagcggaggagacgttctcctctaggagagagcgtgtctctatacacgctcgcgcggaattagcccctatgctcgacctatcgacgcgcgagtatcccccgcgcgcccacgcggtcgttntgcggcttctatgtgcgggatcatgtcgagcgtcccctcgcaccgcttcgtggcgtaccgcgttgtgtggagatgcacgccgacata

SEQ ID NO: 324627 - DNA, 438 bp, Homo Sapiens
  misc_feature (340)..(340): n is a, c, g, or t
  misc_feature (419)..(419): n is a, c, g, or t
tttttcttgttcagtgatagtttattggtccttagcatgacatctcgattaccaaggtaaattcacatacacaactgcaggtaaaaacatgtaaaataatataaaaataaattgaaggctacttttatatatttactgaattaagtagtgtaataaatactatgataagcaaaaagcttcaatcgcacaattcagtttcactgaagttacagtagtgtttgtaaatacgagttttaaaatttaagttacaaatattaaagcactgaaaaactagtataaaagtgaattttggcacgtaagtgaggctcttatgtcattagtatttgacatcctgggggcnaatgagggaagcccagttctcaccctacttttttgaggggaccaacctatcccacctaggatccgccacccggctgggnatacttcgtaggtttacca

SEQ ID NO: 324628 - DNA, 931 bp, Homo Sapiens
  misc_feature (455)..(551): n is a, c, g, or t
ggtcaggaaaaatatctggatctgattcctccccagcttgcttcccctacactttaataagcccttcaactaacccctgtatgtattaactgcaattgcctagcccggcatttacactctcaaaagatttaacgcaattacgatcaaaaaacacttgtcatatataacactttttcacatggaaataaattggtggtttaaggtttacaattcctttgaataaaatttcagttattagttacaaaatgctaagacagattgaggtctcaaagaaagaacttgagaaaattatgttttaaaggacttcacaaatatgaagcataattgttagaatcctgatacaaagtaacttttcctaggtttaaggttcaagtctgaattcttgaattgtccagcatcaacgagacctcatttatattctttttattttatcattactttcagattcagggtcnnnnnnnnnnnnnnnnnnnnnnnnnnnnnnnnnnnnnnnnnnnnnnnnnnnnnnnnnnnnnnnnnnnnnnnnnnnnnnnnnnnnnnnnnnnnnnnnntgctacagattttttttaaaaaagctcggaaacacaatgggcttgcatcgtgttggcagcaggtgcctcttagctggtgctggacagaaggggcttgcagtatttgcactgaatccaaacccggtacattgtcagttgctttcctcggttcacctgcagtcggcggtccaccaggttctgaactttttccagtccagcagtggtgaaaagcgtgtccagttcctcttgtgtgaagaagtaaactctggttccatcacctctcacgtagaaatttccagatagacactgaccttttttaaaccgaagctgagccatgtcatagcggccgtaatctcgcagaagcatcatcccgccaggtttcagaagcctgctcagcctcc

SEQ ID NO: 324629 - DNA, 422 bp, Homo Sapiens
gatagcaaaagagttttaatcagtagagatcttaaactcaatacaaggcaagaggaaaggacataaaaatcgagcgtgggcttgctaaattcaagatttaaatatattgcctttctttcactacaatcacaactcagttaggtagatactttaattcacattttacagatgagaagattcagagtttaagcttcccaaggacagaaaggtaagtcagtgggaaattccatgtacattccattactaaatgccacataactgtttggataacataagaagagtgggtcattatatgataccaattagaagatattagggatggtggaggcagtaatttctgggataagaactataatttacagaataaccagacatcatctgatctggtgaaactgtgcattccacaattaggcttttcacac

SEQ ID NO: 324630 - DNA, 713 bp, Homo Sapiens
  misc_feature (46)..(76): n is a, c, g, or t
  misc_feature (107)..(127): n is a, c, g, or t
  misc_feature (142)..(308): n is a, c, g, or t
  misc_feature (312)..(322): n is a, c, g, or t
  misc_feature (347)..(362): n is a, c, g, or t
  misc_feature (368)..(529): n is a, c, g, or t
ccccggcggcccaagggggttatcccccggggggaataggtttctnnnnnnnnnnnnnnnnnnnnnnnnnnnnnnngaaatttttataaatttcccccccccccccnnnnnnnnnnnnnnnnnnnnnaaatttaataaagannnnnnnnnnnnnnnnnnnnnnnnnnnnnnnnnnnnnnnnnnnnnnnnnnnnnnnnnnnnnnnnnnnnnnnnnnnnnnnnnnnnnnnnnnnnnnnnnnnnnnnnnnnnnnnnnnnnnnnnnnnnnnnnnnnnnnnnnnnnnnnnnnnnnnnnnnnnnnnnnnnnnnngggnnnnnnnnnnnaaaaaaggttttaaaaaattttttnnnnnnnnnnnnnnnncccaannnnnnnnnnnnnnnnnnnnnnnnnnnnnnnnnnnnnnnnnnnnnnnnnnnnnnnnnnnnnnnnnnnnnnnnnnnnnnnnnnnnnnnnnnnnnnnnnnnnnnnnnnnnnnnnnnnnnnnnnnnnnnnnnnnnnnnnnnnnnnnnnnnnnnnnnnnnnnnnnncagattcaatattttaataaaaaatgtttttattaatggccattgacttctactgatgcttcctgaatctccagctcgtgtggttctcttcctttttgaactttagatatccatccagcaccttctgcgacattttgtagtatttcccttaagatacaaattcagaacagcattcattctcccc

SEQ ID NO: 324631 - DNA, 477 bp, Homo Sapiens
ggggagatcgcacactttattttgaaaaccaggccagggacagctccagtttggggggaggggaagagattataacttttaaatctactacgaaaatacaaaaagaggaatgtgacagggttccttcctgtgttatgtcaccgtctgtaatcagatcccacagtccagcccagaatcataattcacataacagcgaaactcatttgccaagttccgggtgtgtcttgggaacaaacgtgcacatcttcactccaagggagttctgctgcctgttcttccatgatggcacctgtgcacagcagaatcttgccccgcgtcaggtacttgacggtttccgatgtttttctgagacattcctccgaaagatagggaggatctgctattacgatgtcaaaactatgtgcagcaattctttcgggtaagtccaatggattattgtaatcatagaaaataaactcctctccatacatggcaaat

SEQ ID NO: 324632 - DNA, 1201 bp, Homo Sapiens
  misc_feature (452)..(491): n is a, c, g, or t
  misc_feature (502)..(511): n is a, c, g, or t
  misc_feature (582)..(590): n is a, c, g, or t
  misc_feature (630)..(641): n is a, c, g, or t
  misc_feature (754)..(809): n is a, c, g, or t
ggcaagaaaggcgggtatattggttcgcagaaaacaaacgggcgggcgggagggtgtggccggcgcacttcggggttgatatattaatgcggcgggaaaagtggagggggaatgttatcggtgagggggcgccgtgttttttacccaccggcggtggaggaaaatttaattaacgcggggtggcctccccacaatatggaaaaaccgcgcgttcccgcggccctggtgcggttctctgcgcccccgcgcgtataggaaggggcgcgccatacccggggccgcgtggggggcatttggatgggggacgcgccacacctctcttcccctgcgggcgcaagcggggaaaggccgggcgggggcgcggaaatgagaaggggtaagcggcccggcggaaacgggccccccgcgtgaagaggggggcgacaaagaggaacgggtccgggaacccctcnnnnnnnnnnnnnnnnnnnnnnnnnnnnnnnnnnnnnnnnaggtttttgtnnnnnnnnnnaaactaaggaccttgttctcgtggtacggggtggggggggaaggaaaggtatccccatttgtctggttctnnnnnnnnnccgggcgcccaaaaaagaaggttcggggaaattttcttannnnnnnnnnnnccccacacaaaaacgcggcgcccagatcgggggggttggaaaaggggtctttcggggtccgtatattatcggtgtttgggcgttggcgtttgtgggattttttgtgcgggtcnnnnnnnnnnnnnnnnnnnnnnnnnnnnnnnnnnnnnnnnnnnnnnnnnnnnnnnnatgaggggaaaggcattttattaaaaaagctttggccaagcccccgccgggaggagcccatcctggggcaccggccgaggggggagcagccctgctgggggcctataaatacatctcctcaggccactaaagtcgcccctggaggtccggcggcgtgtggggcagtgggaggccatcaaaaccagctgacagctgaggggcctgggcccggggcgccagggaagggaaggggtgggacggactaagcccctgaggagcggagaccagccctcctccccaggctggggtcaaccaaatgcccgggagcctggccagtggaagtagccccgggctctattgggacggccaagggagggagcctccagccagaggcaccaggccctaacggggga

SEQ ID NO: 324633 - DNA, 864 bp, Homo Sapiens
  misc_feature (179)..(180): n is a, c, g, or t
actcgggtgcccgcgcgggcgttgtttattgggggagggatttccaggccctaggtcacggcccgggttcctcgtagggaaccagctatggcccatgttcccttccttttgggggccgcgcgcccaaaggaaatgttctaggaaagtttttgaggggcggaaggcggccgaacaaggtnnaattttgtttggtgagtgtgcgttggggggattttaactgtaccttttaatttgctcctggggctaagaggaaggaatggtactagagcagtgtctgagaatagaagaatttaagaaagtgagattaagtcaagtggttgggtcaggggaggcagccacctgccctggaggatcagcctcgaagtatcgatccagcagggcctccacctctccctcctcatagtcccacacctggaaccgagagccatctgctgctccccggatcatggccgaaagcacgcggccagactgcgggcggaacaggcacaggatccgcttgttaaaggccacggcccggcccagctcatagcctacacccaaggatggctgtgtcacttctgccacgaccacgtccgcctgctgcagccactccaggtcctgctcatggatgagcctgtcacccccagcagcctcttccccgcgcgcgcccagctcggcggccgccacgtgctcggtgagcactgtcccgaatcgccgcagccgagacacgatccgctcgtacagcgtcctgtcctcgcgtccgccgcgaatgctcccgcagaagtacagggccgggcggccaggctccccgcgctcccagctctcgctgcgccccggcaccatggcagcagccattccccagccgcccgcgctctccggcccccg

SEQ ID NO: 324634 - DNA, 574 bp, Homo Sapiens
  misc_feature (512)..(512): n is a, c, g, or t
  misc_feature (521)..(521): n is a, c, g, or t
tcactcaggagtggaaactcagatgtgtcactcagactcaacttgctgggacactgacaggcgttcctgaggttttcagccacttaggctcgttgcggtttaaagatccctctaggtcactgagaaatgccacagaatgtgcaggaagcctgggaggcttctgtgaggaatgtgaggcacattattggggaaattgaggagacagcctagacactggctggcctgatgttttgttgacagtgaacccacagtgggagagagttttttccagtctgatctggttcttacacactcacacacataactcaaaagttttgtgaacaagtactttccttttttacatgttacatgtcctcatgttttctgttttctgtttcataacacaaggctggttgtggcctacaaacctaatttcatgacccagtggtttgcagtccagcgtggcctacacggatatggggagccactgagggatgttttccccccttgcttgtgccttaaaggcaggagangcgaggcgnatgcctgggaagcacccagcatcacacccaggtttgtgcggggccagggtcgg

SEQ ID NO: 324635 - DNA, 554 bp, Homo Sapiens; identical to SEQ ID NO: 64106

SEQ ID NO: 324636 - DNA, 506 bp, Homo Sapiens
  misc_feature (392)..(392): n is a, c, g, or t
  misc_feature (418)..(418): n is a, c, g, or t
  misc_feature (437)..(437): n is a, c, g, or t
  misc_feature (459)..(459): n is a, c, g, or t
tttacctttaacttttttattttagttgcagctaaagcatttattggtataacaaacacaaggactgccacccctgctaacactgctggacccagctcttgccaaaggagatatacggccattaggatttgaaaaggggcagaccagaggagattgaggtttgctgtcaagtccatgagttgctgacatcaagttaataatttccccagtggaaaacttttgtcgagaaacatttgataaaagtaaggcctttttgtagatcaagtccatttacagctgtcttaacttttgctgaggtgagcatgttaaaacgttgatattgctgaagaatcagagtttgcaataagactacaacaagaagttgccactgcataagccatagccattccagnccaaaatctgagctgtgttcccaggnaaatggtaatttggcctcnctatgagtggggcagtgaaggncaaaatatcagcaacaccttgaataagggcacttggatcaggatggg

SEQ ID NO: 324637 - DNA, 597 bp, Homo Sapiens
  misc_feature (71)..(71): n is a, c, g, or t
  misc_feature (75)..(75): n is a, c, g, or t
  misc_feature (92)..(92): n is a, c, g, or t
tgttttacaagttggagtcactcttatgctgtacccagtttctaaactggagactgtgtgtgccctctgcnactngagtacccctgctttgngcttgggcctaggctgcattgaaaagagctgaaggttgtggcctttgcgctcctggcccagcctttgttccccactggagcagaaggggagatggacgacacggtgggggcatctggcctggccagtgccctgatcccagagagcccgaggaggtgtctcaggctgcctgagtcgtgacctgctaggccagagcccactccatctggtagaagggaaagcccatatgctaccaccagctgtgtccaaaaccgccagctctgttcttcctcagccagcctcgcccatccccttgaggtctcagcccctttcccttgtagctcctcccctggagggggaatggcagcaggggttggggaaacagcatctccaagcagcttagagttggccatatttacctcagcctgggcgctggtcctttcttccggcccctcccctccaaaatgtgcctattgctagagctcctccctctcaacacccagtttccttgggagttgtcattaaagg

SEQ ID NO: 324638 - DNA, 1446 bp, Homo Sapiens
  misc_feature (252)..(252): n is a, c, g, or t
  misc_feature (255)..(255): n is a, c, g, or t
  misc_feature (425)..(425): n is a, c, g, or t
  misc_feature (451)..(451): n is a, c, g, or t
  misc_feature (610)..(610): n is a, c, g, or t
  misc_feature (726)..(726): n is a, c, g, or t
  misc_feature (728)..(728): n is a, c, g, or t
cggacggcttgtgttatgtacgcccaggtgttgtgcccgctaacgttgtcttgctgactgtccgcgctgtcgggggggagcagtgcgcagaggctgttgaagtcaagatgaggggaggatcgaggtgggggggaaatgatgagaggcaccacccgacatgagccgccgtccaagagcatcactctctcgagccgcgcctttaccctcttttcagctagaccggcagtggacttctatcttgtgggatgtaanaangaccgggcgacgggaagagcggcgaagggcgtgccccccatacagacattgtgtgcatgaaggtgtatgaagagtccgttgtggaggtggcggatagagcctgtctcccccgaggcggcggggcagtaactgggaatgatcttccacggcacgtgtataatttggaaccntattagtgggggggagagccagattnccaacaccttttccgtggggggaacccttcttactgttttcttcgcagcgagcgtacatgagaggcgtgtgacgggttttttaggtctccgcaccaggccgaggggacggaggtacagtgctggtcactacagcggacgagagcactattccgtcaaangccgcgcgattagtgtgtaatgggggccccagagaggttgtctctctctagggggaaatcccagcggtatggggcaccaaaggtgggaaatttaaccttgagttagggacccgtgncnctccaaaacggaagcacgtcttaataaacaccttctacagtggcccggagcgccgggccgaccaagcgctttattaatcatcagaggtgcggggcgcgcgggtttggaagaatgacatgtttttattgctatgtctgcagtggctttttagcacagtagaatgtccccgcagcccgccaccctcacccagccccagccctgcagcctctgtctgggtgtcggggaagcctttcttggggtcactcagccgtctcgggactggacgtgacagacaaacgtgggttaaagctgctacacagaagactggaggtgcgggaagtgcatccaccttaagcctggacgtgggagccgtgtccagggtcccttcctgggggtgtgcccgcacagggtgggaagcctgagcaggccaggttagcagcccagacacccaggacggaatattgcagcctcttgccccacagacttgtggcaaagggacagcgtggggacagccccgaggcccccaccatgcacttttccaatccagtctggggctggggaccacacacgcacatccacacaacagactcacacacgcaacagctcgaagcttttgttttgcctatgaaagttagatctataaattcacactccttggctaggggcagaggggtaaggtagggctcacagggatgggagtggtaaggagaggatggtttgggctccttcctctttttag

SEQ ID NO: 324639 - DNA, 1274 bp, Homo Sapiens
ttttaacgtctctgccattttagtgtcatgttactgaactttcccttccccagtggctcagttcagagccttctgtgtgaagtctttaaacaacggtgtttcagggtcctcaacagcaataagatgggacacctctcagggttctgcttgctcctatttcagtctcttctcactcaggagagtccatgcttcctactggttggcagtttcaggctgacccaacatgggtaaaacaagagcacctgccattttcaagagaggcaaacaggcttcacccaggatacctggggctttgggggtcttccaagaagccctgtccacctggaaagctcttccttccagactggctctcttccacttgcagtccctcctcctcggctcaggactgtactggctggccccaggctctggccacagcagtccctagggcaccagaagagcacatagcctgggcccaaactgcagcagttatggctccggcttccagatggagaggtggagccctgaggatcccagaccctgcctggcttcagtcggtacacagcagcagtttccctgagatcttcaggtcatcaaagggcaaaagacaagggattcctcagtcaggtcctggggcgtctcatcctccacattccgcagcagggagtcagcacccgcccttgcacagagtggatgagatgcccatgagaccccggccagctgccaggtgcaggggtgtgcacccgttcagcatgcgggcatctacctgggcaccagctgggagcaggaactgtaccaggccccgctcttggtttccacagccaggtgcagcgctgtcttaccactggtgccctcctgcacatcaatgtcagctccattccgaagcagcaattccatgagtggttggttcttctgaagggtggcaatgtggagacaagccagaccttgccagttttgctgctggaggtccagagagtgagatgttcctctgcctggctctggccgcccttccagcaggcagcgggcacaggccaagtgctggcgctggcaggccacatgaagggctgtgtcaccatgccggtcctgtagtgcccggctggcccccttcagcaccagtgcccgaactgcgcccggttggtccagatgtacagccagatggagtgctgtctggtaaaggttattttgaatgtccaggacctcctggggcagcaaagccaggcaacagagcagcaccgctggggcctcatgaatcactgccaggtggaccagcgtgtctccgtcctcggagatgtccc

SEQ ID NO: 324640 - DNA, 780 bp, Homo Sapiens
  misc_feature (26)..(26): n is a, c, g, or t
aactgagcaatcaagttttatttttntcagataacaaggcatcaaaaaggcagttccagaattggcctagtagctgagtcttctcaggctctgggtcagcttctctgaggtccacttttttctcttcttggttccaagacagctgcagcagcttcaggcatcatgttcttatataaaaatgtttaaaagcaggaagtgagagaggaggaagtcttcatgataaacctgtctcttctgaatgaggaaaatctttcccagaagccccggcagattccactgagcaacactgggagatactggccatactgtgctgcacaggagactgggaaaattagcatctagatattctcagagtccaaggcaagacacagatgctgcccaataacaaggggaattgggtatggctgcctgggatgacaaccaatggttgtctgtgccagtcacataaaacaatgtaacaatgtggaaattaagaaatattctcctaaatttagattatttctggatcagaaagaaacaaaaactgagattattgtaagatggtctctttatttcatcattttctgttactttcttctttcactgcctggatgtttggtagacttgaatagcatgtttagtgcatatgagtttatctttcagattttcatgtatatgcatgcattcaaaggctataaaaattcctccagtgtagctttggctttccccttaccctcacatctctttggccacatttcacatctcttggcatgttaaactctcaattcattcttttcatcc

SEQ ID NO: 324641 - DNA, 386 bp, Homo Sapiens
  misc_feature (202)..(227): n is a, c, g, or t
gacttcgcacgttccttgcggcggcggtcacgggaccttgatcgggaacggggcccttctcgaactttgtcccgatcccattcacgctctgatcgagtccgctcccgccgctccatttcccgttcccgttctgcccactgttcccgcactgcccgttcctgctcccgctgctctgcccgggggtgctgtggtggctggaccnnnnnnnnnnnnnnnnnnnnnnnnnnccgtggtattccctgctcctctgtcttagtttcagagggacggtccaccaagaggcctcggtgataatccagctgtggggagaggagggacaaggacagttaggatagaggtgatatcactcccactcaaggagccaggatggccgggcgcgtgtgtca

SEQ ID NO: 324642 - DNA, 779 bp, Homo Sapiens
  misc_feature (106)..(106): n is a, c, g, or t
  misc_feature (108)..(133): n is a, c, g, or t
aggagccgcgcttggagatcccgggttgatgtaagccacgggtaagtgcctccgagaaacccctcttttggaattttgttttaaaaacactctcggttttgccccncnnnnnnnnnnnnnnnnnnnnnnnnnnatcccgagcccctagtccagggtcccggagtttttttgggaagcacacttgtggcccaggtttccgttaccataatgggcgccgcgggccccaaaagaaaatggttttgaaaaagtttttggaggggccgggaggggcccaccaaatttatttgggcttggtcgcgcgttgtgtgcttgtgtggggcgggctcgcggtgggcggcttttgtgggggaagtaaaattacttttattttcataaataaaaagacaacccattatacacttttagttgaagtaacatgttagttgtcactgcctagtatgaaatccatgtaatagttaacaaacagttacacctctctatacccttcatgcaacttctatacatttgataattccccaaaatttccaacatttcaaaaaccattatatataatgggatactttagtcacaaagtgtcacctttgctgagtcaacaaaatatttatatgctcatgtcaaagatgcctactgatgtaaagtaataccagtattgctgcattttacagaagcactgagcatattacattttccatttcgtatatggtagtatcatccccaaaaatgtcaatgtgaaaatttagtaagtagattaataagcacaagtacctaaaagaaacacc

SEQ ID NO: 324643 - DNA, 455 bp, Homo Sapiens
caagttttagagaactaaatttgcatttgttaaaatcaaaaagtaggaaagatgttctttacaaataattttgatcaagtatgtgttcaaagaaagcaggataaaaaggctttttctctaacattctgtgttgtactgtattgttgttcaataggaattagcttctgtcatttgctaaaagaatgagtagtggggaacaggatatgttggaaatttcataacgggtaacagaaccattctcttgggtaaaccataggcaggggcagctgtgctgttaacccatatgggtgttcccatagcctgggagctatgtagccagggagcagctgtcgcccccaaccaaaagctcccctttgttaggagttccctcttccctctgcccccgaaccagcttgggactgctgccaggacacagctggtattcacaacgcccttttgcctgagggggataatcc

SEQ ID NO: 324644 - DNA, 402 bp, Homo Sapiens
  misc_feature (322)..(322): n is a, c, g, or t
  misc_feature (338)..(338): n is a, c, g, or t
  misc_feature (379)..(379): n is a, c, g, or t
ctttttattttataggtatgtgattttacagaaaacatacatagagttacagcagacgtgcttgtaggatcttctagaactaagtgcctaggatcaaggtttattttgaaactaattccagttctgccttgaagctaaggttggaaatgaccagctcaacctctccattcctgtttaaggagggtcctcattcacatccaggggatgcttttctgaatgagtccaggggtgaacatttctgggccagggggggaaagctgggaatcctgaggaacaaggaggggccaagaggcaatgggttaaatattccgggggcccagcnaccccacaaaggaggnctttcagtaacctggggggggcactttttccaggaaattgnaaaaaattgaaacttttttcact

SEQ ID NO: 324645 - DNA, 469 bp, Homo Sapiens
  misc_feature (131)..(209): n is a, c, g, or t
  misc_feature (401)..(401): n is a, c, g, or t
  misc_feature (437)..(437): n is a, c, g, or t
tataggctgatcttttaataagaacatctgcctgttctttgggacttgtccagcaaataacaggaaacattttctaagaaataagtataaactccgatgagccatggcaaaagcagtttttttaagcttannnnnnnnnnnnnnnnnnnnnnnnnnnnnnnnnnnnnnnnnnnnnnnnnnnnnnnnnnnnnnnnnnnnnnnnnnnnnnngtacccgctgagctgggctttgggcaaggtgagcagcacagaggcttccctcctcgtccctccccacaccccaccaatcgccacagctccctccgccgccggtggggcacccagatggggaggaagctgaggaggccactgttcacccaaactggttggtcttcgggcaatgctgggaatagggtgggtgcnttgcaagcccaggaggaggagggcctggctgagttncaggaacatctcacaccacaagggaggatcta

SEQ ID NO: 324646 - DNA, 781 bp, Homo Sapiens
tttccttgggctgcgttgcgccttaatatggcggaaaaaactggggggtttggcgtggggccaaacaaaggacttatcaaagcccgggggagtttttcctccgtagggcaggggatgattcggggctttgtcccttggtaggacattgccggaatgggcatttgctggtcccttgtcagctgagtatgccagttaggatttcgtcagccagaacctgttttcccttcatgggggctcaagggcttcttgtccagtgcccgccggccatagtcctcccagcctggccggcgcccacagatccatggtctggcaagaggcattctttcgacaatgaagaggccccagcttgggccgaggtccctctatggctccggttggtgacaatgctaggcgtatgccggtggacagagccggatgacccccgacagtgctggaactctgaatggatttaagtttctgaataaaatgtcccctcaggggcgcaggagttagtcgctcaggcggctcaaaggtcttgacggtggagaacaccatccccagggattcccgacgcggtgatgccatcaaagcgttaattctgagatgggcctgcccgggtgcggactctgccgcagcaagagaagggttaactgccccgggccttcgccgtgggggcggggcctcggggagggtcacagcccgggactgagacccgaggttaaccgcccggggtgggctccacgggggcggggcatgctctccgcggctgctgccggtatagagcggtaactgcccaggaccc

SEQ ID NO: 324647 - DNA, 954 bp, Homo Sapiens
  misc_feature (494)..(494): n is a, c, g, or t
  misc_feature (506)..(506): n is a, c, g, or t
  misc_feature (633)..(633): n is a, c, g, or t
atgggatctcactatgttgccagggcttgtctcaaactcctgggctcaagcgatctatctgccttggctcccaaagcattgggcaggcccattacgccatgagccaccacacctgctggtttttgttttttaaatggaattgaaaggaactagccttggctagttgcagaattcacacatatggggctatggcaacagcagattctggagtctcagggtcttttctttctagataagttacagggcaattgcttttcagagtacttttacatttctattccattcttgtcagtaaagacaaggatcccataagctgatggagaaactgaggcctctagaaactaaacgctgggaatggcacccagggtgctgaattccagggtctcctcttttctgccacaggcacacatgccccagcagcccctttggagagccccctctctatagggtactagccgggggctcagactctggagtcagacggcttccgaggnatgaggcctcanacaagtaactcagctttgaaatgttttcagtggggagagaaatagccccctcccagggctgtgctccgggaactgactgagggctaactattatgggcccgccccattgttggaatgtcttcagccncatgggggaatgggtggaagagcccgggatgtgtcctgccagctagagcagcgaagaaatcccagcggggccccccaggaagtcccaagcccatggggttccaggtgctcctctctggctattccttcagacccgcagctgctggacacaggcccacagagctggtgcctcccgcgccatcactgcagtgcagcctgggtggatggaggaagccaaggggaacggcctgggctcagagtaaggagaccttgccccgggggacaaacggtgtgctgaagtgcaggcgtgaagcggtctccagtcctcaggggcctggaaatc

SEQ ID NO: 324648 - DNA, 451 bp, Homo Sapiens
ccaatgtaaattttactattttatttgtgaaaaaactacaagcagaattcataaatagacatttctatttaaagcaggaaaatgataaagtggcttctaataacatagtcgtgcacatgccagtaacaggaatatattaacatcttttatttgctagacaaagagcagtgtccaatataaatttcccccaaaacatttaagacctgtgaatttttgaccagttcacaaaaccaccaactgacactttagcatgaagaaaaaaacaaacctaacagactgtcagctctaaagacattacagagcagaaacttccaaaagcgttatacaagctgtctttctgggcaaatgaaaaatatagctcgtataatacattaacaaaaattcacaagataagattgttttgacatacttaacaagcattctctatttgtctccaacaaacaaagctaag

SEQ ID NO: 324649 - DNA, 483 bp, Homo Sapiens; identical to SEQ ID NO: 147837

SEQ ID NO: 324650 - DNA, 520 bp, Homo Sapiens
  misc_feature (456)..(456): n is a, c, g, or t
ttcctgaaatgtaaattgtttttaatatatttaagagcacacagaagtcttgatttataaaaaaataaatatataacatgacaaatttactgatgatcctggagctctgaggtcaaactctttaaatgatcagtgaaaacataaaacatccatgatctgttaacacacacaggagcatattccagttgtaaaaaacaaattccttgaaggctcagaacgaacaaaaatcagtctttatggcagaaagcacatccaaagctaggcaatgaagttcagcctgggccacgtgaacctttcaccagccagcctataacctatggagccaggacaggaaagcatgatccttcagctcatgacgccacccaggcttccagacaactgcagaatgaaagagtccctcagaggctccccagcccctgctgcccttcataaaggcacgggagggatttttttgtnccttagcgggtttgtcctaaatttgagagcaggagactgagaaggttatgctcattaaatattg

SEQ ID NO: 324651 - DNA, 483 bp, Homo Sapiens
  misc_feature (396)..(396): n is a, c, g, or t
  misc_feature (406)..(406): n is a, c, g, or t
  misc_feature (420)..(420): n is a, c, g, or t
  misc_feature (435)..(435): n is a, c, g, or t
ctgaaatgtaaattgtttttaatatatttaagagcacacagaagtcttgatttataaaaaaataaatatataacatgacaaatttactgatgatcctggagctctgaggtcaaactctttaaatgatcagtgaaaacataaaacatccatgatctgttaacacacacaggagcatattccagttgtaaaaaacaaattccttgaaggctcagaacgaacaaaaatcagtctttatgggcagaaagcacatccaaagctagggcaatgaagttcagccggggccacgtggaacctttcaccagccagcctttaacctatgggagccgggggcagggaaaggcatgatccttcaggctcatggacggccacccggggtttccaggacaactgcaggantgaaaggagntccctcaggggggnttccccaggcccctngttggccattcattaaggccggggagggggtttgtttttgtccttagg

SEQ ID NO: 324652 - DNA, 584 bp, Homo Sapiens
  misc_feature (233)..(233): n is a, c, g, or t
gcatccactattacagaacctatgaaattttcttcaacacctctatgtagcatttagaatgtaagctcctgatccaccagaatctgcaagaatggagtcaggagcctcagaaaaggagccacggccacagggagcagctcggggacaacgctggctccacagggcagctcctgggccaggcacccgctggcgactacacggagcttgtcttgtggaaacaaacgcgctttcanaaacacagcagtcctgcgacatgaggcgggatgaaactttgaaagggtattttaaagtctagccttgtaacaaaacctcaggacactctgtccccagccttcgtgccccacggggagcttctagaggctgaaggtgacaagtgtgagcctctgctgtgccaccacccaccctgttacatgacagtggcaagctgagctttcacgggatggctggtgtttcacagaccgcccctccatcccgtagcctagttggctggcatggaggtggcgctgctgagcgtcagcctttggaatcactgatcacctcggcgtctgttttcctcgtgccgaattcgccacccaggcctcgct

SEQ ID NO: 324653 - DNA, 1125 bp, Homo Sapiens
  misc_feature (294)..(422): n is a, c, g, or t
  misc_feature (530)..(556): n is a, c, g, or t
  misc_feature (637)..(658): n is a, c, g, or t
  misc_feature (745)..(745): n is a, c, g, or t
  misc_feature (1017)..(1017): n is a, c, g, or t
ctttctcccccccaccacctcccgggggggattgtctcccccatgttttgaatttaaaacgcgggccacaaaatgggcaaaaatttttttgccccccccggtgtcctccccggggcgaaagaattttttaccgccaagggccccaaggtggggtggaagccccggcggcgggtttccggttttccccacccccggttgggaggggtgtccccctcccggcgcgaaggctttaatggaatcccaacccccacccccaaaaaatgccacgggcgggggggaaattttatatcgggnnnnnnnnnnnnnnnnnnnnnnnnnnnnnnnnnnnnnnnnnnnnnnnnnnnnnnnnnnnnnnnnnnnnnnnnnnnnnnnnnnnnnnnnnnnnnnnnnnnnnnnnnnnnnnnnnnnnnnnnnnnnnnnnngggttcccctgggaacaaagaaggccccggctcccttccttggggggccgcggcccccaaagaaagtgttttaaaaattttttggggccgggggggcccccaaaggcnnnnnnnnnnnnnnnnnnnnnnnnnnnccctctttccctttggtttcgtcgctcctttggtggcgctttcttcgtcttgcgctttttgtcctgtcctctttctcctgnnnnnnnnnnnnnnnnnnnnnnaccgttaaaagatttattgcagtaatacaataaaagtttagaaaacatttgtatgactcaaactggtttggaagttgcagagcaatnggggaattcctgcaacatgatactgtgaggagattctcggacactagtcctctaacagcatgccactgaatgctcttccccaaattgagtccttacatgagtcccgtccactctacccaatgggtgatatactgtttttcccccttacagatgtgcaaaacttttcttaggttatattccataaccaaaaaatgtctttaacagaccattttaaggcagcctgtttgggtgcctgtgggggtttttattaggggattactttggtttcaggnaaatccattttaaaaggggggaaacatggacccagggtctagggggctttttttggttttaaaccaaaataccccggctttcaatttttttaaaaggctggtttacaa

SEQ ID NO: 324654 - DNA, 732 bp, Homo Sapiens
  misc_feature (31)..(31): n is a, c, g, or t
catgtttgatcttgtcacatacttgcttttntacaagatgaactctttgtatttatgatttggggggcaatgaaaggtgcaatgcaggaactctgctgccgagctcgctggtcacatgggggtgccaggcgggattctggaaaaccagtgcacttaaactgatcctgaagagagctgtcccagcactctggccaccaggagggccagattccccagaaactaccttttgcccaaagaacatgctcagtatttggggcatttcctcccacaaaccctgactgcttctgttacctcagggccttggtacctggatactgccacagaattggggcgggtgggggaggggcctatttttaaataaaataactgttcaaagttgggggttttttaaaaaattaagaaaaaggaaagctattctgtattgcaccttttcacaatttaatacattttcttacattttcctgtgattttcgaaactaaaccattgtgtgtcctgtagtgtcctggttttactgccgctcagcagcttcctcggggggatttggaacacctgtgtctgtcgccgtactgcctgtgggagggtccagagggctgctgggactggcgtctgtacacacttgtttggccttttctgtagttgatgctgtaaactctatggctttttaaaaacgatttcatgtttttatttagtattggaaatccaatacacttttttaatccaatcaaaaaaaa

SEQ ID NO: 324655 - DNA, 484 bp, Homo Sapiens
  misc_feature (266)..(266): n is a, c, g, or t
  misc_feature (278)..(278): n is a, c, g, or t
  misc_feature (300)..(300): n is a, c, g, or t
  misc_feature (327)..(327): n is a, c, g, or t
  misc_feature (346)..(346): n is a, c, g, or t
  misc_feature (368)..(368): n is a, c, g, or t
  misc_feature (385)..(385): n is a, c, g, or t
  misc_feature (391)..(391): n is a, c, g, or t
  misc_feature (409)..(409): n is a, c, g, or t
  misc_feature (416)..(416): n is a, c, g, or t
  misc_feature (425)..(425): n is a, c, g, or t
  misc_feature (454)..(454): n is a, c, g, or t
gcaaatactatattttttaaatatctttacagtttatttaaatgtatttacagaactattcctgcataagttataattcagacatccaaattcaggtaattgcctcttgggtaataagacaaataatgatagtctcaacagaaaaaaagcagctcattagtatacacacagattctaatttgcttcattatttagccatctttgccacaaactacctgctaacagttaaaattctgacatggacacgttttagttgagaagttcanttttgcaaagantttaattttaaataaataggantccaaatatgtcctgcttcatgttttntttcataaggcaggatttngggttttttggatactgtaaantttttaaaatgcaaaantgtggntacaggtttccaggggtnacctggnatgcctggngggttcttcccaaagggtaggctgggggnattagggggggccccaaaggtccccatggg

SEQ ID NO: 324656 - DNA, 817 bp, Homo Sapiens
  misc_feature (73)..(86): n is a, c, g, or t
  misc_feature (112)..(129): n is a, c, g, or t
  misc_feature (251)..(251): n is a, c, g, or t
ccccccggggggtttctttttttgtgaaaaaaaccctttttccccctggttttcttttttccctttgtggggnnnnnnnnnnnnnnaaagaaggggtttaaaaaattttttnnnnnnnnnnnnnnnnnnccccaaacaacctttttattagtgtcttgcgccttgccagtgggcggtcgcggctgctctggcatattggctttgataaatgcgccacgtcctccggataccgggcgcgccttgccgtccgnaattctaaaataaagaacatttattatcacaagttggataaaaacacacagcttttacaaaaatgatttttgatagaaaaatatgtttgaatacactgtgatatttgtaggaacaccacactattgctgtatctccagctaaagcttcaaggaaactctatttcttataatcaaaatatccactatttaccacaacccgtctttggaaagaagttcatagtgtattctgaacaaaccaaagcatttactcgggagttacattccccatggcctgggcagtcacttggtgtatggtttaattacagttacacatggatgtaattacagaatgggcggcgctgggaagggaccttggtagatcatttagttgggcaccctaattttacagagggggaactaagggccagagttgagagatgtcctcaggatacctgagtcccattccagtgttcgttcagtaattcataaggaagtcatcataaaggtttaaaaagaaaacgttaatgactcgctccctttattcttctgtgctgagagtatcattctggtttattcagattaagacc

SEQ ID NO: 324657 - DNA, 1042 bp, Homo Sapiens
  misc_feature (170)..(219): n is a, c, g, or t
  misc_feature (243)..(298): n is a, c, g, or t
  misc_feature (331)..(401): n is a, c, g, or t
  misc_feature (413)..(548): n is a, c, g, or t
  misc_feature (551)..(553): n is a, c, g, or t
  misc_feature (826)..(826): n is a, c, g, or t
  misc_feature (845)..(845): n is a, c, g, or t
  misc_feature (854)..(854): n is a, c, g, or t
  misc_feature (856)..(856): n is a, c, g, or t
gcggcgggattcaaggggtgttccaccacccccggttgtggagggagggctcccaccccggcggggggggagttgtttttttagaatatttccccccccgcctctctccaaaaaaagcccacacggggcgggggggctaatttttttaataaaaaggccccccgttgggnnnnnnnnnnnnnnnnnnnnnnnnnnnnnnnnnnnnnnnnnnnnnnnnnncgggttttgttttaaaaaccttcnnnnnnnnnnnnnnnnnnnnnnnnnnnnnnnnnnnnnnnnnnnnnnnnnnnnnnnnccgggtgtttctttgggaaaaattattgccccnnnnnnnnnnnnnnnnnnnnnnnnnnnnnnnnnnnnnnnnnnnnnnnnnnnnnnnnnnnnnnnnnnnnnnnccccaatttttnnnnnnnnnnnnnnnnnnnnnnnnnnnnnnnnnnnnnnnnnnnnnnnnnnnnnnnnnnnnnnnnnnnnnnnnnnnnnnnnnnnnnnnnnnnnnnnnnnnnnnnnnnnnnnnnnnnnnnnnnnnnnnnnnnnnnnnnttnnnttactagtgcaacaggattttttatttatatggcaatagttacagaccgcatacacacactcaggaaggcccactaactgggcccaccaagagacaattacccccaccctcaatgcagagtcctttgggcttccagggaacaggccttttcttacatggctctggtccgaggtccagtactcagcatgcgaagagccatatcacggaggggataagtggaggagtgtcttttcaattacttgggtgtgaccctgaagactcggatgtggatgngctgagttggtttggggcnggggggggnanaaaattccgagtcagtggctcccgtgtgtcggtctctggctccagctcatcaacaagctccacggtggaggtattggcagccacctgcaaggacccgaagctgcccgcctgcagctgcagcgcgatgttgatggcgcggttgatggccaggcccaagccgtgaatgtagatctcagagcacgcgtt

SEQ ID NO: 324658 - DNA, 909 bp, Homo Sapiens
  misc_feature (694)..(694): n is a, c, g, or t
ttttactagtgcaacaggattttttatttatatggcaatagttacagaccgcatacacacactcaggaaggcccactaactgggcccaccaagagacaattacccccaccctcaatgcagagtcctttgggcttccagggaacaggccttttcttacatggctctggtccgaggtccagtactcagcatgcgaagagccatatcacggaggggataagtggaggagtgtcttttcaattacttgggtgtgaccctgaagactcggatgtggatggctgagttgttgcggatccgagtcagtggctcccgtgtgtcggtctctggctccagctcatcaacaagctccacggtggaggtattggcagccacctgcaaggacccgaagctgcccgcctgcagctgcagcgcgatgttgatggcgcggttgatggccaggcccaagccgtgaatgtagatctcagagcacgcgttctgaccccgggcccctccgtccagcagcttctggcagcgggccagctgggccttaaagtccgtcttcatgttgacataaatgtcattgggtctccggggcaggcggctgggaagccttttcctaagggtgtattccactggatccagttcaagcctccacagcaccgcggggctctcggttttctgccatgctgtgtgcctctcttcgttccacagggccctnccaggcgcgcgaaggcccgctccccgccaggccactcaagggttcgccggccagcccaagtaaccgcgaccccaggtcccagagaaagaaggatgtgggtgcaagcagccagccagctcgttggcgccctgcccgcgccggggtcctgaacgggctgcggagtgcgcacgcgcgcccgtaccccgcgagctatgaatcgccttcccggcttccgt

SEQ ID NO: 324659 - DNA, 885 bp, Homo Sapiens
  misc_feature (442)..(442): n is a, c, g, or t
  misc_feature (560)..(576): n is a, c, g, or t
agttctcatttttttctaagaaaaaagcaacaagaaaataattcagagtttatacaaaacatctttacattattttttttccaaaaagactagtatttacacaaatggcaacagaaacaaaaacaaaaacccttccgactgccacctggaaggggctggctgttctgctccctctcccacctggcactggggtgggcagctggccaggaggcagtgtggaggtggatggtgtgagggccagctccttccatggctgctctgggagtgcctgcaagggcaactcaagtggcagtctgttagcagccgtgctggcaaggaactggggtcaaagtgcacagcgggctgggcccagccccagggcaagcctctttcctctttccaggccccagcccaagactgggacagcagcaggagctgggttgggtgggggttacccacctgntgctagggcccagaaaaggagcaggccacctggtctttatacccgtcttagtactcaccctggggcctctgttttccccaccaggccaaaggattgccaaaggtaaggagagaaacannnnnnnnnnnnnnnnntgaaattcccagctctgcaaggcaaaatagccaatcgggcacttcactttcttcaaccccccataggtcatctgctcgaaaagtttctctgttcccaggcaaaagccatttaagcctttaattaacgctaaatttagggaaggcggagattcccaaaattcctcaaggaagggatttttgtgtgtaagagtgtgattgattctatgtttttgcaaggttgcatgactaccctttgccaggataaggcctctaggggttcctgtagtaagttgggcactttgcccagtgaactttcctttccccaagggg

SEQ ID NO: 324660 - DNA, 409 bp, Homo Sapiens
  misc_feature (363)..(363): n is a, c, g, or t
  misc_feature (395)..(395): n is a, c, g, or t
gagaattgttttaagttttatacattaggtcagtattccatcttcccacccccagccttatgaggacagctctctacccatcctgattaaactgcagctatagctgaaaaaaattattgtaagaaaaatacacagcaaaacagagctggaaggtggtaagtgtaaaagatatggaaagatgtaatcaccaaaggagctgcccaaatggcttcctgctatggaggagagtgatttggcccttacctcacctgccttcctgattcaaagaaacttgccactaggcaggactgggcccagggagccccatttgccaatctcttctcttcttggggagtctggggaaaggttgtatagttctcaggnttttaaaggtgtaggaagacagtatgggagantaaggaggaaggga

SEQ ID NO: 324661 - DNA, 1104 bp, Homo Sapiens
  misc_feature (356)..(362): n is a, c, g, or t
  misc_feature (365)..(365): n is a, c, g, or t
  misc_feature (388)..(440): n is a, c, g, or t
  misc_feature (481)..(481): n is a, c, g, or t
  misc_feature (486)..(501): n is a, c, g, or t
  misc_feature (503)..(503): n is a, c, g, or t
  misc_feature (517)..(530): n is a, c, g, or t
  misc_feature (659)..(679): n is a, c, g, or t
  misc_feature (771)..(779): n is a, c, g, or t
  misc_feature (969)..(969): n is a, c, g, or t
  misc_feature (998)..(1013): n is a, c, g, or t
tattcccactggcagatcatggatgggaacctgacaggaaacatccgggagttcctgcccattgttgggcatgtgcaggtggcacaggtcccaggccgaggggagcccagcagccccggagagctgaatttcccctatctgtttcaactgctggaagatgaaggctacaaaggcttcgtgggctgtgagtatcagcctcgaggagacacagtagagggcttgagttggctacgttcatactgggataggcggggccacccagaggctggccagtgagggcccgcacaccacccacgtgcctccagacagcgagtgacatcccatctcctcctctgcattaaagatgacctgctgannnnnnnacnaaaaaccgcaaccaaacaacccnnnnnnnnnnnnnnnnnnnnnnnnnnnnnnnnnnnnnnnnnnnnnnnnnnnnnccaccccagacaccaacaaaaacacacaaaacactttcacnaaccnnnnnnnnnnnnnnnnanccccttggcgccgnnnnnnnnnnnnnnaaaaaaccttttctaacccttttttgtgggcgcggggggccccccaaggggaaaggcgccaacggggccaaattttgttttccccaagaaaaaacccgcggggcacgagaaaaagggggttggggcctnnnnnnnnnnnnnnnnnnnnnccgcccccgggggggggaaaaccggaggggtgtgtttgaagaacaaaaaacctacgaagagggggcgctcccgggggagggttccctctccnnnnnnnnncgttttacaacagcgggaggggggagctccctccagggcgggagcccctcccgagaataataacacaaataaactcaccgcccccccgccggcccggcgggcgcaaatatatctttgtgtaagagaagaagagagggggtgtgggtaaatattctctcttataaaactcctccctcctccgccgccccgnaggggggggaagacacccctccccacaannnnnnnnnnnnnnnncggaacaccccgtgactcgccccccccgcggggttattattacgcgccccctcggttgggccccgccttggagagagaaaaacaatctttg

SEQ ID NO: 324662 - DNA, 439 bp, Homo Sapiens
aatgccactccacagggtttatgggggctgggcaatccccaagacctgccagctgtcaaagcaagaaagagctgattgaaaagcccagtagacttgaagaccccacaaagagctgatgtctcccattcaagttttgccacatggcacagtatctgtgtcacagacgcactcttcccaaggacaggtcccaggcctgtgtcagtcactgcttcatcccagcacctagcacagggcctgactcatggtgagctggccccgagggtggggacagatccccgaggcgaggcgtcgatggctgcggtctgaggtctctagcggggggccgatgaagctgcttctgcgaagttgggaacccgcgcaccagttttagcagccgcggaaggaagtgctcttgccggggcgaagcagcagagttcggaagacacgcgaccagggcccc

SEQ ID NO: 324663 - DNA, 925 bp, Homo Sapiens
agatttcacgggagaaaaatagactttatttacaagtaataacatttagaaaagatccatccccggcccttaaaaaccttcccatcactccaaatcccaccccagtgcaagtctggggaaggtagggtgtgagctgctgctgaaggctgtcccccaaccccactcctgagacacagggcccatccgtcctgggaaagagcatcctctggcaggtgctcccaccaggtcagacccagtcctggacttcaagagtgagggcccctgctgggccaggccaccaggacagcaggaaccagggcctactcctcttatggtcccttctagatccagaggctaagaggaagactggccaggcccaaggacccagccatcaaaaccagcctcaaatctggttgtgatggagaagtgactttgctttaagaaaaaaggaggcagggtagggagatcgcccacactgtccatgctccaggccccctggagacttcggaaaaggcggcaagtgaagaacaaggaaccaggcaagggtgggggcaagacatcactgtctctaggaggttaggctactgtttggcctgggaagctgagagaagggcactgtaaagggaaagataggcgtaagaaacaggttaacggacaacattcggggacatcagttgtgggccaactcatttgtgtaactgggccctattagtgcctttgccttgcccccttggttcgcagagggttggacaacaatgtccgtgcacgtatgaacggacgctaggttaatggttggttgacaattgcacgggagaaaccgacgggtttaccattgcccaattggttgggggaaaacaccttagaaaagaggcccttcctttgaagggctcccccgccggaagaaagacttgtttcacctaagcttactgtgggtttgtgtttgaga

SEQ ID NO: 324664 - DNA, 556 bp, Homo Sapiens
  misc_feature (112)..(152): n is a, c, g, or t
ttcatgtttccaactggaatcgtttaatgtgtctacttcttccacgcataattataaaagaataagaatcgacaaaaatattttctttccataatatgtagaggtggtttgnnnnnnnnnnnnnnnnnnnnnnnnnnnnnnnnnnnnnnnnngcccgcccctggcagagctcttggcggggagggaaggggagagggaaatataaccctgaggtggggatggttcagctcccaaccccggaacccctggtgtgtacgggtcaggcagacacatgtggctgggcggctgggctggggaggggacagccgccactgaccagcagagcgtggaagttcggtgcgtttcagtgcctgcctgaaagcttggggacaggagggctgtccacaggtggtgccccccgggggccctggccgcttctcctgtggggcccgcatgaccctctgctcgggcttgggaagaaatggagcctaccaggtgctgggttgcaaccccgctgcccggtgtggaccccaagtctagatttaggcaccccttgctttctgtcttttatttttta

SEQ ID NO: 324665 - DNA, 679 bp, Homo Sapiens
cacaaaaatttcttttaatgaataaataatttcgatgaaatcaaaaatatttacaatataaacacatggaaaagctctgggtccgtgaatctgatcgttgagttttgcattttgtgaactgagtcctcccccaagcttttcccttggaaacaatacaaatctgacagaaacgacgactcatacaacatatctttgttcattacacatttatctgttagtcctggaaagctacataagcatatattatgcaacatgttaaagtacaaatattacctaaaataatatattaccataatgccagatagcattctccacagaacaaaaacatacactcagctgtaacaataacgagggtcacgggccacaaaataataccccaaaggtacaaattccttcataagaatatagttgtgctcttcagtttaccagctgtctacgctgctctaggaagccggtgcgacaggagtacgggatttggcaactgtggctgtgtgtgtgtttctgtcagggagcagcattactcggggttgggcagtgcaaacaaaattagagacactttcttggtgtcttaaaaagagcgacaattgcaaacaaataagcataatgagaagcttcctctctcttgtcacaaacacgggactcttgtgttcttgtataaaggatgattgcgacggtttac

SEQ ID NO: 324666 - DNA, 419 bp, Homo Sapiens
  misc_feature (181)..(209): n is a, c, g, or t
  misc_feature (363)..(363): n is a, c, g, or t
  misc_feature (375)..(375): n is a, c, g, or t
  misc_feature (384)..(384): n is a, c, g, or t
attggggggaaaaaatttcccaaagccccttaggttccctgggcccccggggattccccctaggggaaaaccaggtttttggccccatgtttccactttacccttcctgggggccggggcggcccaaaaggaatggttcttagaaagctttctcaaggggccgaaggcggccgaccaaggnnnnnnnnnnnnnnnnnnnnnnnnnnnnncagttaattgacaattatatcaaatgtttattttaaaaaataataaaacattcacataatgttgtcacaattttgggtgggaaaaaagcatgtgtatctctatatctctgtgtactagaaaacaacaaaggggtataaaattaaataataaccngtatttaaaagntaacttggnaatcctcgttgataattcagcagcatgcttctggg

SEQ ID NO: 324667 - DNA, 901 bp, Homo Sapiens
  misc_feature (279)..(288): n is a, c, g, or t
  misc_feature (420)..(540): n is a, c, g, or t
  misc_feature (765)..(765): n is a, c, g, or t
  misc_feature (831)..(831): n is a, c, g, or t
  misc_feature (846)..(846): n is a, c, g, or t
gccccccttttttcccccggggcaaaaattttttcccacaggggggcaacgggtgttttaaccgctggcgggatttcaaggttctcacaaacccggttgggaagggctccccagcgcgcaaggagggcttaaagaatttccaccccttttcccaatagaatgcacgggccgggggggaaatttaatttgaagcccgcctgggactccccgtgaaaaaatcccgtaagccccccaaaacccccttgggattttttcaaaacatccgtttccccccggggnnnnnnnnnnggggggaacccaacccttgtctttgcccgggttttctttggaaaaagtttggcccagttcctcttccttttggggccccggcgccaaagaaagggtttaaaaaatttttggggggcgaggggggccccaaannnnnnnnnnnnnnnnnnnnnnnnnnnnnnnnnnnnnnnnnnnnnnnnnnnnnnnnnnnnnnnnnnnnnnnnnnnnnnnnnnnnnnnnnnnnnnnnnnnnnnnnnnnnnnnnnnnnnnnnngcggtttgatttcagtagtttattttggagacaaagcagtgcaagaggccagccacgctttcctgttccccagggctcagggtcagaactaggaaaggtgacgtacagacattaatcggggttcaaaactcaagtcgtgtaaacgtggttagttgttgggtcctcagtttccaaaaaagccgggcagttctgatggcctctgcccctcgcccaagccctgtgccntccctcctcaaagtggggcatcctgcagcccagcttagccagggccgagggccttcccatgcactngcttcgggggctctntcggggacactcagcacttttctcttagcgtcctccatctcaattggggcagagg

SEQ ID NO: 324668 - DNA, 679 bp, Homo Sapiens
ttcttctattagatcagtacagtatttcacaacttggagaatgtcttcttccattggatctaggaagggggaaaaacttcaaatgaggaccagtctttttgaaggagaaagtcagagatctgcatggataaaggaaaactgcatttctacaactatgtcactaacagctatcaaaggaatgggctttgttacttttcaaagcaagtcccagaatttaaaagatttgggggtagctgctttaagcttatcagagttagagaaatgggttaaatctgcatagtttagtctgtttatgttctcaaatcatgagacgactacatctcagccttgggccatcttaacacaggccaagccaacctgaaattgtagttatccattctctgagcaaggtcttcacatcattgaattcaacagctccagctagattgggtgctggaggtctcacacagccagctgggtcagactgcaaactagaaaggcctggcacacctgaagtagaagcagagagttcttccaggggtttctctgcaggaggtccttcatgttttagaaacccatcaattaacttctggggactgccacaggcccctggcagagtttttgcaggactgttaagcagcttgttattcaaaggactctgaatcctttttggtgaaccaatggtttttttcttcttgtt

SEQ ID NO: 324669 - DNA, 1271 bp, Homo Sapiens
  misc_feature (468)..(479): n is a, c, g, or t
cgccacggaacgagtatagattgtgagcacgtattttctttcgcaccgaatcttttttgcgcggatacaatgggcgagaaggtgtttatgccgggcgaaaaacactctgcggcgcattgtgggcctcccagaaaggggggtttctcggaagggacagacgacgcagctaggccggctcgcggcccgaaacctcacggggggagggggatgtgctgcccgccatcttctggtgttcttgcaccggtggcgcacaaaaatcaggcccgagctggtttgtctcgcccccccgcgtctggcggccgcccgcgcggtgccctaagtactctcatgctcgcagcatgggcggcaacgggggtgcgccgggggtggcgccgtcggttggctgtaagcggttcgcttccctcccccgcctctgtgggtagggcatcctcacgcgcgcgggcgaacagcaggttgtaatggggcttnnnnnnnnnnnntccctcctctatatggggccaccggccggcggggcgctaaatttcggttcttgagcccggccggtggggcacccctcgctgcgtagtagcgccccgcgtaagggccgcccggggccccgcccctctgcgcagtgttgttgtaaaacgccctccgcggtgtccccccccggggggttgtttttcttggtgggagaattcccacgcacgtatgcctaagcggcggatatttcccctagagaaaccggtctaggcccccgcttcgcctttaacctcagggggcccgccggcccccaagagaagggttcggaaaaactttctttgagggggccggggcgcgcccacaagggcgcgcgcttgtctcttgggggggtctgctcgcaaacaggtgttttttactgttttcggtgttgtcggtgtccgtcgggctggcgtggctgcggcggcatgttcttcctcgtctttctaaaagtgtttatttttggcaataaagagcacaacataatctccttcatgcgtcatcgtgccacttagctgagccagccagctctgcctccctccccaaagacctttggaccccagttcccctctacaggctagctcatccctctgggtggtcattccccgggtcacgttgagagcgaggctgactgcaccacctccctagctcaagggctcctttgggaggggccgcgtgctttatcatcctcctgccacaactcaaatagtgggttatttacaagaaggtctgttcccacaaatcagggaccctaaagtatttaaaaaacaaaaccc

SEQ ID NO: 324670 - DNA, 1132 bp, Homo Sapiens
  misc_feature (21)..(21): n is a, c, g, or t
  misc_feature (28)..(28): n is a, c, g, or t
  misc_feature (34)..(34): n is a, c, g, or t
  misc_feature (347)..(394): n is a, c, g, or t
  misc_feature (551)..(560): n is a, c, g, or t
  misc_feature (949)..(949): n is a, c, g, or t
  misc_feature (1097)..(1097): n is a, c, g, or t
  misc_feature (1111)..(1111): n is a, c, g, or t
ccccaaatgtaacaaagaaantagatgntttttntttttgtgattgtacaaaaacaacaaaaacgaagtgctctcagtcaggtttttccctccatatttttggtcacttttgataagtttgcatgaaaccattttggtgcatttttagttgggaatggtacatttttgtaaatccacccagtgaacatgaaattgtacattgtgtataattgttcattagaaaggacagttttacatgaatattcatatatttattttgttttaatttgaattgcctgttcagggttccttatgcagagaaataaagcagattcaggaacaaccaaacaaccaaaccacaaccaggnnnnnnnnnnnnnnnnnnnnnnnnnnnnnnnnnnnnnnnnnnnnnnnngccttggtcggccgcctccgccccctcaaaacatttttctaaacacctttctgttggggcggcggggcgccccaaaaggaaaagggaaacttgggccataagctggttccctaaaagaaatcctgggccatgaaaaaagggcttgggatttcccccnnnnnnnnnncccccccgggggaaacccaagcttttttgaaacaaattcccgatgggagtttcggagggtcattaccgggattttatcaaacgggggtgcccaaggggaggcttcgaatataaaaatttaagcccccccggccgttggcccattcatatgggaaatagaggtggtgtaaatattaaataaaagcgattttctgcccggaacgtgggaagacgcccccccaccaaacgcgggtttggaataaacctttgaaattcgcccggggggaggaatataagaacaccatttgtgtcgcccttggcggacaaataaacatatatttcgccccacgtgcgagagaaacaaaccggcggggcgccgtacacacagacattcgttctccgactttattntgggcccacacacctctattataatactatacacacgacgtgtgctgtgaagagatacactcccaccacccgaggggagtatcgcgccctgtggcaaacacacacaaacacactactatattctctctacacataagatcaccccttnttatatagagagangaaacatatggagccgcgccg

SEQ ID NO: 324671 - DNA, 537 bp, Homo Sapiens
attgatcaaagagagaatttatttacagagattttcaaatacaaacaaaatagcacttttaaattttttacaaaatgaatatagaaataaatgtggtacagcacagtacaataatggacaaaagaaaacacgatccaatgactggaaaatgtctctcattactctcatatcttcggctgaattctctcctatagtggacagaaagttgccccttttcttcataagaatatcatagcagaagctactcagagaaatattgcatattgtggaataacatggaaatacaaaggcttaactctaaaggtctgcataaacactgaaaatatgttgaggaactaaattagagtttatgcaggatatacaaaatactgatagtttggcttattggtccatttattaggcttaatgtatgttttataaagtgataatactgtattttaaatgtatattaaaaagaaaacagaggagaaatgcaccactaaacctcccagtctgtgcgataatccacgtttgtgcataggcgtgtgtgggggatgc

SEQ ID NO: 324672 - DNA, 775 bp, Homo Sapiens
  misc_feature (25)..(25): n is a, c, g, or t
  misc_feature (27)..(27): n is a, c, g, or t
  misc_feature (187)..(187): n is a, c, g, or t
  misc_feature (210)..(210): n is a, c, g, or t
  misc_feature (225)..(225): n is a, c, g, or t
  misc_feature (231)..(231): n is a, c, g, or t
  misc_feature (245)..(245): n is a, c, g, or t
  misc_feature (247)..(247): n is a, c, g, or t
aaatctgggatttttttattacttntntttttttcgaactacacttgggctcctttttttgtgctcgacttttccaccctttttccctccctcctgtgctgctgctttttgatctcttcgactaaaatttttttatccggagtgtatttaatcggttctgttctgtcctctccacctcccccacccncctccctccggtgtgtgtgccgntgccgctgttgccgncgccgntgctgctgctgctngncccgtcgttacaccaacccgaggctctttgtttcccctcttggatctgttgagtttctttgttgaagaagccagcatgggtgcccagttctccaagcccgcagcgaagggagaagccgccgcggagaggcctggggaggcggctgtggcctcgtcgccttccaaagcgaacggacaggagaatggccacgtgaaggtaaacggcgacgcttcgcccgcggccgccgagtcgggcgccaaggaggagctgcaggccaacggcagcgccccggccgccgacaaggaggagcccgcggccgccgggagcggggcggcgtcgccctccgcggccgagaaaggtgagccggccgccgccgctgcccccgaggccggggccagcccggtagagaaggaggcccccgcggaaggcgaggctgccgagcccggctcgcccacggccgcggagggagaggccgcgtcggccgcctcctcgacttcttcgcccaaggccgaggacggggccacgccctcgcccagcaacgagaccccg

SEQ ID NO: 324673 - DNA, 342 bp, Homo Sapiens
acaggttcgtttttgcgccgtttattttcgtgggtaaagtagatgattttattctagtaactggctacaagagaaacaggggaattgatgccattcctgggcagcgccaaacagcctgggctggaaatgcagctgaggacagaatgatattcacaaacacgggcaggaggctgggaaagctcacagccccacaggacggcggggcagacctggagccaccaggcattactgcacatggatctggcatgtcttccaggtgcttgggaaacacgagcattagtttgtgtacaaattagtcataggcatgtgaagacatctgtgatcatctgagtccatctgatc

SEQ ID NO: 324674 - DNA, 646 bp, Homo Sapiens
  misc_feature (124)..(136): n is a, c, g, or t
  misc_feature (146)..(230): n is a, c, g, or t
  misc_feature (241)..(260): n is a, c, g, or t
  misc_feature (262)..(262): n is a, c, g, or t
  misc_feature (264)..(264): n is a, c, g, or t
gggggggaaatccacccccttttttctggcccagggttttcttgggaaacacgttattgcccccgttccctttcctcttgggggccccccgccccaaaaaaaggtgtttaaaaaattttttgannnnnnnnnnnnncgccccaagnnnnnnnnnnnnnnnnnnnnnnnnnnnnnnnnnnnnnnnnnnnnnnnnnnnnnnnnnnnnnnnnnnnnnnnnnnnnnnnnnnnnntgttgttttgnnnnnnnnnnnnnnnnnnnntntngtatttctgtatttgattttatttggtatatgccactatgaccttattttagtagaaatccattacaggatttttaaattatcattagtcaactccacaaagacaataatactgctgtggaagaccgaaggggaaaaaaactgatatatttatttacaattccctatattgtaaacatttaatctatatattgttactaacttataatgagacaaggaaatgatgccctgtatttctattcatattcagcaatagcatattataatagaacatcagattttcttttccattagcattatgctttctttaaataattatctaaactttcaaaagaactaaatatgtaagtgctatacaactaaatctacttaagccaaatacc

SEQ ID NO: 324675 - DNA, 1510 bp, Homo Sapiens
  misc_feature (49)..(49): n is a, c, g, or t
  misc_feature (61)..(61): n is a, c, g, or t
  misc_feature (71)..(71): n is a, c, g, or t
  misc_feature (81)..(81): n is a, c, g, or t
  misc_feature (88)..(88): n is a, c, g, or t
  misc_feature (121)..(122): n is a, c, g, or t
  misc_feature (165)..(165): n is a, c, g, or t
  misc_feature (343)..(343): n is a, c, g, or t
  misc_feature (363)..(363): n is a, c, g, or t
  misc_feature (376)..(376): n is a, c, g, or t
  misc_feature (432)..(432): n is a, c, g, or t
  misc_feature (547)..(547): n is a, c, g, or t
  misc_feature (740)..(740): n is a, c, g, or t
  misc_feature (841)..(841): n is a, c, g, or t
  misc_feature (1368)..(1368): n is a, c, g, or t
  misc_feature (1474)..(1474): n is a, c, g, or t
  misc_feature (1490)..(1490): n is a, c, g, or t
ggaatgcgacaggcacgcacttatcaatcatctcgccttatcgacggtnacgttcaggccngacgcggtgngcggcggcgngctagcnaacccaccagcacagaaagacgcatggattgtnntgtaatccgccacaagcccgcgctgcgcgctgcctcagcgcgntccctgccgacacgatgcggcgcaagcgcacagcgagtccgccggggtctataaacacgcaggttaccaaatatactcccgcgccctcgtctcgcggctgaccgcactacgccattatcactacccacccaatccgcgtattgtccccgccccgtaggcgcctgacggctgcgccggnctccgtcaccccgatacccnacgcctgccgccnaggcgccggaacgcgcgacacccccgcgcgttgacgcgcccgggccggtcgtccgnagacttcccaacccgcgctctcacgaccaagcaggcgcggggcgggtggcgggaccataataaatgccgtcggctgcacgggtcttatgcgcaagcggcccggtgcgttcgtatnagggggcgcgcgggggagggcgcattacggcaccgcattctcgttgggccgagggtcggcgctccgtcccttccgccggcagagggcagtggagtgtcgaccctagtctgtgcctcaggcagagccagcatcctctccctcgccgccggcggagtccatattcctgccttccgccgtcgcacaccgcacttgntcggcgcgtttgtatcgccccctcgacggagcggagatattctcctgcgtcactttggcggggagggggtccacccgcaggacgcgggcctatgccgtccncgtgcggcacgcgcgggctttcctccgcggagcaaaaccaccggctccaggccccccgggcttgtgccgttgcggattctccgtggcccccccacccgcgcgccgaccccaacactctgcttagggggagcggttttgcgggggggcccccaagcgggcccgccccgcggcgcgtttccaccctccctgcgacggctggaccgtgcgccgtacgcgcacggatgggcccccgggggggtgcgcgggggtgggcaggcgcggtcgcgcctgacccaagggcaatttatttcagcaaaagacataaattccaagaacgttattctgtattctctttcagaacttcaaaaatgcaattctacagacctagaaaagtgaaagagcccagtggctgagcagaaagcagcttactacaaggagtaccagatcagggcagagacttcccagctgggtaaggcatgctttgagggaagactccaccagccctggcagggaagggcagcaggcgcagtgcccctatggggcccacnatggctggtaccagcagcaggacacctcttccaaagctgtccaccagccccactagggttccctactcatggcaaaaaagacttacatgagcccacaactgtcaanttaacacagtgcccancttcttccaaagcaaacaca

SEQ ID NO: 324676 - DNA, 363 bp, Homo Sapiens
  misc_feature (265)..(265): n is a, c, g, or t
  misc_feature (284)..(284): n is a, c, g, or t
  misc_feature (295)..(295): n is a, c, g, or t
  misc_feature (303)..(303): n is a, c, g, or t
  misc_feature (306)..(306): n is a, c, g, or t
  misc_feature (327)..(327): n is a, c, g, or t
  misc_feature (351)..(351): n is a, c, g, or t
cgcaagactagatggagaattaatgaagaagaaatagaaatgaggcttatttaaggtacaaaattcttgtatttgtaataacctagatttatagatataaaacaagtcttttaaagacttccctaaaatactcaatataaaacaggagttacttatcctagatcatccttagttaggtacacatgattctctgtgcaactagctggtggacatgaataaaagctgctgggcctataatgtactaaaacatttttctcccttcagncaagacaggtagggttganggctaaatgcntcagaggngtnttttcttgggcttttgggacnatctttttgcagtagggttccctngggttttcccca

SEQ ID NO: 324677 - DNA, 410 bp, Homo Sapiens
  misc_feature (269)..(269): n is a, c, g, or t
  misc_feature (317)..(317): n is a, c, g, or t
  misc_feature (375)..(375): n is a, c, g, or t
tggaaggagtaaaactctttattcatagaacacatgactgttgatgtaatttacaaaaacaccatgagaactcacagtttagcaaggctgaaggatacaagttcaacatcaattgtatttctatttactagcaacaagtggttagaatttgaaattttaaaataccatttagcatcaaaactatgaaatgctgacatggtagacctgtacactgaaaactacaaaagattattaagagaaatagaagacaaaacattaatacctagggnagacagaccttgtttatagggccagaaggacttcaatattattaaggntggtcaattctcccaacagttttattataaattccaatggcaattctcaattcagggngccccacgggggttttttggtggtggtggttgtag

SEQ ID NO: 324678 - DNA, 965 bp, Homo Sapiens
  misc_feature (89)..(99): n is a, c, g, or t
  misc_feature (200)..(280): n is a, c, g, or t
  misc_feature (294)..(312): n is a, c, g, or t
  misc_feature (319)..(335): n is a, c, g, or t
  misc_feature (341)..(464): n is a, c, g, or t
  misc_feature (692)..(724): n is a, c, g, or t
ggtataaagtctcacaaaccccgttggggaggggtccccacttgggcggaaaattttaaaaaattccacccactctcccaaaagggcannnnnnnnnnntaatttaaattagaacccgcttgggccccctttaaaaaatcccaaaaagccccccaaaccccctttggatttttttaaaaccctcggtttcccccgggggnnnnnnnnnnnnnnnnnnnnnnnnnnnnnnnnnnnnnnnnnnnnnnnnnnnnnnnnnnnnnnnnnnnnnnnnnnnnnnnnngggcccggggcccnnnnnnnnnnnnnnnnnnnttttttnnnnnnnnnnnnnnnnnccaaannnnnnnnnnnnnnnnnnnnnnnnnnnnnnnnnnnnnnnnnnnnnnnnnnnnnnnnnnnnnnnnnnnnnnnnnnnnnnnnnnnnnnnnnnnnnnnnnnnnnnnnnnnnnnnnnnnnnnnnnnnncctggaatttttccttcttattattttgcttttttaaaggttgttatattcaggtataggcataagacattataaaagataaggggtatcatgtgagggaggaaatccgacaatccaaaaaatcttccatagaaattaaaaatcagaacttgggggcaaggtaggaggcaacacattctttctacagagctgtgacacatagcccaactgtcctcaaaagcaggaatnnnnnnnnnnnnnnnnnnnnnnnnnnnnnnnnngacctcagctgcataatgaagctggggtcttggcctgatagcttttaatgtccttaaaacggggctgggcatcaagcatcttttccggaataggccaaggaagacaagtccagtttggtttttaaggctttagtgagctctgcggccagcagctcatggagggacacgccgtcgtgggagtacacccagtttttccccggacgcgtgggtcgacgatatcccgaggattccggaccgtacc

SEQ ID NO: 324679 - DNA, 525 bp, Homo Sapiens
gcataatgaagctggggtcttggcctgatagcttttaatgtccttaaaacggggctgggcatcaagcatcttttccggaataggccaaggaagacaagtccagtttggtttttaaggctttagtgagctctgcggccagcagctcatggagggacacgccgtcgtgggagtacacccagtttttcccagtccagtcataacgcttcaggtccactggatggagaagatagccagatttgcttgtttggcgtctgcttgttgatcacataggttcctagatctcccacccagtttgacagttaagacaccactcccaaaggagacatcatagtcctcaaacgtgtatggcttgtctgcaaggtcttcaaaaaactctgctaaagagtccagcgtttcctctgctagtctttcataggtggtctcatctagagagcctgggtggcccaaagttccagatttcctcaaattcatcaaatagacactctgctttttgacattccaaatctggttgaggccacgttggtt

SEQ ID NO: 324680 - DNA, 381 bp, Homo Sapiens
  misc_feature (59)..(59): n is a, c, g, or t
  misc_feature (70)..(70): n is a, c, g, or t
  misc_feature (94)..(94): n is a, c, g, or t
  misc_feature (121)..(121): n is a, c, g, or t
  misc_feature (157)..(157): n is a, c, g, or t
atgtggccttagtacattgatttaccttcaatttgttacccacaacttgctgaaatacnccattattatntgttgtatgcaatactggatttantttgataacgtattgtttagattttgngtctcatctatgttaatgaaagaaattggcctgtanttttacattcttgtaatatctttgcccgggttctataaaatgcaataataagcaaataaattactttgtttttgtataagtatgtataggattgagctctaaaaccaaaccattataatgataatttgggtagcttcaaactcaaattgaagagagtcttcactacaatcttcactacaacctttggccttcctctctacatttaagagtagcaatagaacaat

SEQ ID NO: 324681 - DNA, 1234 bp, Homo Sapiens
  misc_feature (195)..(203): n is a, c, g, or t
  misc_feature (419)..(427): n is a, c, g, or t
  misc_feature (437)..(449): n is a, c, g, or t
  misc_feature (634)..(635): n is a, c, g, or t
  misc_feature (638)..(640): n is a, c, g, or t
  misc_feature (642)..(649): n is a, c, g, or t
  misc_feature (651)..(652): n is a, c, g, or t
gtccgccccgtgtttctcccccccggggggaaaaatatttatttccgcaccaggggcgcgccacaaggggggttaaattgcccgcgggggcggggattcacggggtttctctctccaatccccccggttggtggagagggggtgttttcaccaatgttcgggcgaagaaaaattgtctttaatggaggaatattnnnnnnnnnagttttcttttcaaaatgaaaaggtggcccaggggcggcgggggggccgttaaaattttgatatattatgagggaggctcctgccgctttggggaacctctcccccggttgtggggattgggaatttccccaggtataaaagggcgcccctccaagggaacatcccccaattcctggggaatttgtggtttcaaggaaacccccttcggggtttgnnnnnnnnnggggcgcggnnnnnnnnnnnnnggggtggggggaattccccaaggccctcttagttccatggccccaggggttcttccctagggaaaaccaggcttatgaacccatgtttccactttaccctacgtgggggcccggcgcggccaaacggaatgggtttaggaaggcttcctcgaggggccgagggcggccgaccatgtttttggtgnnggnnngnnnnnnnngnntttgccaggcctcatccccaggcgggttcacaagcccttggtctggaaaaaaaggggctgctggcatggacaagttgaagattagccctcccggccctcctgcagccctgcacccactgcctgccttcctgatcatttccagggctgctgcggcctattcctcctgactcctccaccccttctacctctccctgccttcctccttccacacagaccagcgcacccgggctcgctcagctatgcaagagcggcgccctcccagaggtcaagttccccctccaccaggcagtagggacagcctggcctggagcgtggctgttctgcctgggggaccctgcggatattttccatgcagcctgccccactgtggtccccctagacctagtctccttgccaagcttccttctcgcacccccagcccgccccctagtctcatctaactcagtcatctctccctgtctgtcccctgaagccctgagctagccacttcctcccccacaactacacccaggcgcgcatccctcctgtcgcggacgcgtggtcgacgatatcccgagattccggaccgttaccagcctgctc

SEQ ID NO: 324682 - DNA, 400 bp, Homo Sapiens
  misc_feature (1)..(1): n is a, c, g, or t
  misc_feature (5)..(5): n is a, c, g, or t
  misc_feature (253)..(253): n is a, c, g, or t
  misc_feature (290)..(290): n is a, c, g, or t
  misc_feature (345)..(345): n is a, c, g, or t
  misc_feature (361)..(361): n is a, c, g, or t
ntaangataataaacaagacatttatttttcatactcttttgggggaaaggaaaaaaatcagtttgccctacccaatgatggtctttctgaaagattctccattcattccatagaactggataggttgcttcatctcagaggattttgtactcttaattcataaagagaacttctcttcagggaaagtgggtcaaagggtgagcctctgtgagcagcttcgctggtgcacagccagactccctctctgggggngaagctttttccacactgggcccgcacagaagggggngtctctcctgtgtggggaattttgccatgcagggaatacaattccccctgggggnttgggggaaactcttnccctgcactgggggtacagggcataggggggcttcaggg

SEQ ID NO: 324683 - DNA, 1086 bp, Homo Sapiens
  misc_feature (194)..(205): n is a, c, g, or t
  misc_feature (954)..(954): n is a, c, g, or t
  misc_feature (976)..(976): n is a, c, g, or t
  misc_feature (1025)..(1025): n is a, c, g, or t
ggatattcacctagcaacatatctctgccgtctctcctgctctcataatgaagacatagccgattctctgcccgggccccttgctgatgctcctccgggtctgcgtcgggcgtgggtctctggggaccctccagaggtggaggtgggctgatggcctggctgcctggtggttgatggttttgctccccctgccnnnnnnnnnnnngagtttattctgattgattttttttcttggtttctggataaaccaccctctggggacaggataataaaacatgtaatatttttaagaaggattcctgcagcatcatctttttttatttctcctgtgtctgtcctccaccttctaggagagccagggcagagctagcactgtcttaagctgtcaacgtggactagctcgtgtcatctgctcgagaagggctgtcgctgttcttgtttctgagtgaggagtacgcaggccagagtggtcacccggccgtgagcagtgagggccagagactagccccagacaggtggatgccagagagagtggcacccatgccaggcaaggcctagggaggtggtcttgctcagcaaccctgccctgagcagcaggtgcgcccatccggagatcctaggagaaggtggccacctccatccactgtctgtgggtcaggcagatgaccccctcacccccatccaggtgctggctgcagtggcagaagatgcaggtgaggtgggccacacaggacacgaaccgctcgaagtccacacgcagacggctatcccggtagcggctggtgagggtctgggtcagctggttgttcaggtggaagcctgctgcattcagtgccagcctcagctcgtaggagttcatggttccagaggtgtcctcatcgaacttgttgaatatggcctgccactccaggaggtagccccagagctgctggaagtggtgtaaggccagctttncccatgcccgaaacactgcagnagctgctcacaggtcctgagcccgatctctctgggggtggaggtatggncctggcaggctccagggcaatgcttagtaaggcctggagctgagaggcattgagttcttcg

SEQ ID NO: 324684 - DNA, 1350 bp, Homo Sapiens
  misc_feature (930)..(938): n is a, c, g, or t
  misc_feature (1130)..(1152): n is a, c, g, or t
  misc_feature (1162)..(1295): n is a, c, g, or t
ggttgtttgtccaactaatgaaaatgcgcttaataaaaaattctgaccttgggtaagaattcgctttttaccgcattgccgctttcatgtacatacatgagtgcatgcacctatcaatgtgttttcttcccaacacttattaaatataaaacaacctgattttgtgctcgtttctcatttttcttgaggccctgaagcttccaagataaatataagactaaaatttgcttgttccttcacacctgatttctcctagaaccataaatacctcctatggggaactaagaaatcatgaatactgggattttcttattggattttttacttttgttttgtggggataacgagacagaagtgaaaggaaaactggtgccggtattactgttgaaattaatgtacagtgaatgtttttaaagtattaattttaaaaaaccatgttctctagaaacaagttttaaaaatctatatgaaagttttaaaatgttccagctaactaatggataagcataccagtaaagccaaagtaaaggttagtgcctttaaaactaacctgtgttagagttacatgaatctggctctaaagtatctattttgcatccatttatatatagatcttaaacagaaatactctaggttgccacaccacagttttaagaagttatgctgctgctgttactctcttctaggattctggtggtaaagtagagaaactcggacactatattaaccttactgaaacatgctttaaatcgtgtctaaaatctgatttgagcaagtcactgccgagcttctgagtctggcattgacactgctactggactcacctctccttccctgggaataaggcttcagcttccctatgctgtgaagacaccatttgtaagcactttgaacataagcactgtgtgacagcgctggatatcatgcttnnnnnnnnncctctccctgactcccatccccataataatgagttttgtttggaattgtaataagtaatgaactgcatggtttagaaaattataaatatttgatcagctgtcctctctgaaaaaaattgcacccctttttcttttttaaaattttgttgcatcttcgtagtaatgtaattgtattttatgcctgcttttttnnnnnnnnnnnnnnnnnnnnnnntggagacatnnnnnnnnnnnnnnnnnnnnnnnnnnnnnnnnnnnnnnnnnnnnnnnnnnnnnnnnnnnnnnnnnnnnnnnnnnnnnnnnnnnnnnnnnnnnnnnnnnnnnnnnnnnnnnnnnnnnnnnnnnnnnnnnnnnnnntttgggcgcccccccccccccaaaaaattttttcaaacctttttttggggcgggg

SEQ ID NO: 324685 - DNA, 1059 bp, Homo Sapiens
  misc_feature (23)..(23): n is a, c, g, or t
  misc_feature (54)..(54): n is a, c, g, or t
aatgaagtttaaaatgcctgttnggaaaacctttatttaacagtttagaaggcntgatagaaagagtgcattagtcctgaagagtatacattggataggaaagaatttccttcttttgtttctccaaatctttccgccttatttagcttgagatctttgcgagcttggttcatggattctagccttgcccgttgcgcagtatatactgatccagatgataaaccagtgaactatgtcaaaagcactctcaatattacatttgacaaaaagttttgtacttttcacatagcttgttgccccgtaaaagggttaacagcacaattttttaaaaataaattaagaagtatttataggattaaagtgacttcatttgtatacatttggaatctaaaccagcttaaaaacagtttcctcaatgacttagatacacagtataactgatgctcttctggaataccacatgagacatggtcagaaacagtgcttggaaggacattacacaagaaattcagagtaatgctttgaagatttccccccttttgttttattcctgaaggaacatcagtacccgatcttgaagaaattcaagattcaaaaagaattttaaatacaccaacatgagacatcagtagtcagttggttttcagtaaagcttgttccaagttgttctcaacttaggaagtaatcttggtgtgatctagcaaaagagtaggaatcagcgatacaaaccactttggaagtttatagtatattgaaatttttgaaagaattccggcagctttcagaacatactttaactgtgcatataaactcatagtcatttttctttaatggcgccttatattttgggctataggggacatccattttcagacaatattttgtccagcgtttcgaattgcctatgggacccctctaaaggggggggaagatatttccccccccgcttattagaagagactcctggaaacctttttggagtaccttaaaaacaacgggtgatggcgtgtttcaccgggagaaaaaaacttaccctttcaaaggagccgacgatgagac

SEQ ID NO: 324686 - DNA, 336 bp, Homo Sapiens
tttcggataactcaggatcatgtttaattatgtaaaaaagctctaaagtcaggtaatgtttttcatgtgcttctcttgagcagtctgaggaaagaatagaaacagaaaccccttgggacctgagtagacgcagctggccatgcacaggcagaggctctgggtcagtgcaggaagcagagtcacagccagcgccttggggtggggatgaaaggagatgacctggtggctgcgtgacagccactgtaggactctgatctcagggggacaggctgacacagacagctgggaattctgggcagggacaagcaggcgttacagaaaagtgataaccaatcc

SEQ ID NO: 324687 - DNA, 413 bp, Homo Sapiens
ccctcccccagggttccggccacccaacgtcctcctgcctgtgttgccgcaagtgccagtggggtgccaagggcctttgtttcctgccctgccctgaaagagagggcctctggggatggagatgagaaacaacacgctctccttcagacaatgaggcattctgtcctcctgctgcccattcttcatctccactgagagccagagctggtaggagccgaagtccacaggcattctgcattgctctactcttaggtttgtgtgtgtgatccttcccctccctgtcgcccactcctccctcctctggctatcctaccctgtctgtgggctcttttactaaccagcctatgctgtgggactgtcatggcatttagttcagagtggaggggctttggcctgaaataaaatgcaagtat

SEQ ID NO: 324688 - DNA, 955 bp, Homo Sapiens
aaaccccctccaactctgaactaaatgcccatgaacaattccccacaaccataggctggttaattaaaagagccccacagaacagggttaggaatagccagaggagggaggagtgggcgaacagggaggggaaggatcacacacacaaacctaagagtagagcaatgcagaaatcctgtggcactcggctcctaccagctctggctctcagtggagatgaagaatggcagcaggaggacagaatgcctcattgtctgaaggagagcgtgttgtttctcatctccatccccagagccctctctttcaggcaggcagaaacaaagcccttgcaccccactgcactgcgcaacacagcagagacgctggtggcggaagccctggaggcagggagctgctaccaaaggagaagaaaaggattccaaaaagaaaggagcccactctaaccctgcggaaaagatggccacatgtctgctttataaccagaagagacagtaacagccccggacagcctttcccaaaataaaggcccctgggctgttactgttccctctggctgtggccagccacttctctctcatgcatgaccatgagctgttgtgcaggtctcaggctccactcagccaggctaaggtctcgggacataaatccccagcagcaggagtcacagcaccagttccattcagtggtatcagtgaaagaaaaagcaaggaggtgggaaagtaaatattcatccccctgtccatgcaaggaggtaggcaagaggccagcctcccacaaacaaagtgctctagggctacagcaaaaactgaagccagccaagatggggatacaacataaccactcccagtgggatgatgttcaatatggcagcttagaatttgccacatacgggtccccaaaactggtcacctgaggagatactcctggtcctacatacaaatgacctgcagaaact

SEQ ID NO: 324689 - DNA, 467 bp, Homo Sapiens
  misc_feature (379)..(379): n is a, c, g, or t
  misc_feature (426)..(426): n is a, c, g, or t
  misc_feature (453)..(453): n is a, c, g, or t
tgttaaatacttgcattttatttcaggccaaagcccctccactctgaactaaatgccatgacagtcccacagcataggctggtagtaaaagagcccacagacagggtaggatagccagaggagggaggagtgggcgacagggaggggaaggatcacacacacaaacctaagagtagagcaatgcagaatgcctgtggcactcggctcctaccagctctggctctcagtggagatgaagaatggcagcaggaggacagaatgcctcattgtctgaaggagagcgtgttgtttctcatctccatccccagagccctctctttcaggcaggcagaaacaaagcccttgcaccccactgcactgcgcaacacagcagagacgntggtggcggaacctgggaggcagggagcttcttaccaaaggagaagnaaaggttcccaaaaggaaggagcccanttctaaccctgcgt

SEQ ID NO: 324690 - DNA, 402 bp, Homo Sapiens
  misc_feature (205)..(205): n is a, c, g, or t
aaaacaacaaacatttattatttcacacagtggttgttggtcaggtatctgggttctaagttgctgggttttctggctcagagtctctcatgaggtttcaatcaagatgtctttcggggccattgaaggtttgattgagcctgctcttctttcccgactcgtctttaatacccaccaggagccagtcgccgcgggcctggctctngtggtggcaagttgcatgggttctcccatcaggacctcccgatgagcctacgaggtcggttctattactgtcgccacttcagagggaggaaacaggcccgcaggtttggggaacttcccgaggtcactgaactggtgtcaggcccagattggaatccaaacacatcccagcccatgcccggctccccagcgccggct

SEQ ID NO: 324691 - DNA, 447 bp, Homo Sapiens
  misc_feature (402)..(402): n is a, c, g, or t
ttgcattgccatgattttattattagtgtccaaaatgggactcccaagtaataaatgatttattccagccacagccaaaaaagactttgcctggctaaaagagtctctctctaagtatgtaatatacaagaaatacaattcaaagagatgttcctataagtacattttttacacggcatatatttaaaaaggaggccccttttaatataaaattccggttatataccaatatggttaattagcatttacactatagtttgaacgtattttaaatagcatgatgtgtatacaatgtctcccgcgcccattggcaaccagggtcgtgggaagcttggtgaggagttaaccaggtcctgtggtttaagcagtggagcaccgggattcctgccccctttctgctcnacaattgcactcattcttccgcttcttgtttctccaaacactgat

SEQ ID NO: 324692 - DNA, 417 bp, Homo Sapiens
  misc_feature (379)..(379): n is a, c, g, or t
  misc_feature (386)..(386): n is a, c, g, or t
cactttacaaatagtttatttccaccttcacaaattcatgcgcctctgaccattatgcaaggcaacatgaattaaatacttatgtcagaacatatttgtcttacattattcaagataaagtggattttaaaagcaagtgggtaccaatgatggggagatgaggagaatagggcaggcagcaacagggcaacatgcatttttcaagagtgtttattaaaataggcagtaatcagtacatgtacatcatatgagcagtttttcaaaattaggcacttccagggagaggggctacatctcagttttttctgtctgtacagtaaaatgccaaaagtacttccctaaaggtacaaagggcatttccctagtagtcttggtaccngtaacantatggttactaaacttctccatgtggttttc

SEQ ID NO: 324693 - DNA, 919 bp, Homo Sapiens
  misc_feature (150)..(158): n is a, c, g, or t
  misc_feature (175)..(237): n is a, c, g, or t
  misc_feature (242)..(365): n is a, c, g, or t
  misc_feature (379)..(392): n is a, c, g, or t
  misc_feature (401)..(551): n is a, c, g, or t
  misc_feature (635)..(635): n is a, c, g, or t
ccccccttttttccccggggggaaatttttttcccaaggggcccaaggtgtgaattccctgggggattaaggttatcaacccccctttggaagggtttccatttggggggaatttttattgattttccccctttcttcaaaaaaggcccnnnnnnnnntaaattttatttaaaannnnnnnnnnnnnnnnnnnnnnnnnnnnnnnnnnnnnnnnnnnnnnnnnnnnnnnnnnnnnnnaaccnnnnnnnnnnnnnnnnnnnnnnnnnnnnnnnnnnnnnnnnnnnnnnnnnnnnnnnnnnnnnnnnnnnnnnnnnnnnnnnnnnnnnnnnnnnnnnnnnnnnnnnnnnnnnnnnnnnnnnnnnnnnttaaaaattttttnnnnnnnnnnnnnnccccaaaannnnnnnnnnnnnnnnnnnnnnnnnnnnnnnnnnnnnnnnnnnnnnnnnnnnnnnnnnnnnnnnnnnnnnnnnnnnnnnnnnnnnnnnnnnnnnnnnnnnnnnnnnnnnnnnnnnnnnnnnnnnnnnnnnnnnnnnnnnnnnnnnnnnnnngcccggtagaaagggtttatttatgcgcaacggttcacacaagccttcctgaaattccactttacagtaaataaagctgtgcgnttccccttcccatgcacaactgcgtatcaatctacaactgtcatttaactgtgaaaaaatagagcgtctccccttttgtcatcgttctggtaacatttggagtagcatctgacagaacggagctgctcactcctgggaccggttatttggttaaaacccaaaatgttaggtcgaaagaatcaatcgtcacccaatacaaataaatattgcgttatgaaagagacgggcagagtcccacgggtatccctttttaaagcggcatttccagcacagcagcgtgggcg

SEQ ID NO: 324694 - DNA, 484 bp, Homo Sapiens
  misc_feature (412)..(412): n is a, c, g, or t
  misc_feature (425)..(425): n is a, c, g, or t
  misc_feature (431)..(431): n is a, c, g, or t
  misc_feature (465)..(465): n is a, c, g, or t
gttttgctttgctgatatatttatttacatatttccccatttcagatgatggtgacaaaaagtagatggagaccccaccctatccaccccccaacaaattacagacacagatttcacttagcatatagaagcattggggcatgtccaaattcattccactgggttactacagccaggagagatttgatcttgggggcagtctgagcacctcaggcccagaaattgagctaaagagaggtcgccattctgggccttgccactggtgtgccagcagaggtgacagaagagaatcatggtgaactgagctgtctagccctatcatgtggtctagaaggtgacagtgggctcttggatagcttccagtgagatccacagtcccacagaaatctgttgactcagggtttttcatctngcaaaatgggggntaaggnttcctgccctaaagatttcacaaggctttcatgnaggttcccattcaggcaca

SEQ ID NO: 324695 - DNA, 909 bp, Homo Sapiens
  misc_feature (74)..(91): n is a, c, g, or t
  misc_feature (614)..(664): n is a, c, g, or t
  misc_feature (667)..(667): n is a, c, g, or t
  misc_feature (673)..(807): n is a, c, g, or t
tttattggtgtttaacggcgccgccccatatgtgcggggaaatattttctcgtgtagagaggagatttattttnnnnnnnnnnnnnnnnnnagctttttttgggccgggccttcgccgcgaagaggggggaccccaaaattgtgtgttgaaaagggggggaacatgtgttgggggttcttcgtttgcgccccaaggtgggggaaataaatagcggcgagaggggatataaactaacgggtccccgcattgttggtcttggggggggagtacacactcctcttgttagaagggggttctcgtggagggggccccaacttgttgttggggaaaacctgcgcaattgttccggaaaaaagaaaagccaggaaggggggccggaccccggggacccgtgtttgggtttttggacccccccctagaaggcaccccgcggaaaggtgtctctatatatgccgtcagggagtgctctttggggtgggtggggaacagccctcgggggattctaaagggggggtttgtttttttcgcggaaaccgggggccgggccccccccaaggaattctttgtaggggagtttcgggtcccttgtgggggccacccggccgctaacgtnnnnnnnnnnnnnnnnnnnnnnnnnnnnnnnnnnnnnnnnnnnnnnnnnnnggngggggnnnnnnnnnnnnnnnnnnnnnnnnnnnnnnnnnnnnnnnnnnnnnnnnnnnnnnnnnnnnnnnnnnnnnnnnnnnnnnnnnnnnnnnnnnnnnnnnnnnnnnnnnnnnnnnnnnnnnnnnnnnnnnnnnnnnnnnaaatataaatttccatatgatttattgttgttccttgtacataagaaacagtaatatacaacttacactgctttagaatgtaaaatggataaaaatgtgtac

SEQ ID NO: 324696 - DNA, 392 bp, Homo Sapiens
gttgatgtttcaaaaattatttttattgttacattccaaagaggaagaaaaaagccagttatccaataatggttagacctttcagaagaggcacccacaaccccagccctagttcaaagctgcacacattggagctcaaacagctgcctctcaccacgaccggaaatgctgacaaatgtgtatatattatcaatccaggggaggcttggggtttaaaataaaatttctttattgcaagtgtcccaagtccttaggatttgtccttaaaggtactagaagatgagtaagaccacacacaccaagactatgtttagtctttagagtaaactagcaaatggccagtttgttctaggatgcattgcatcagacatcacagtacatgaagaaaatct

SEQ ID NO: 324697 - DNA, 444 bp, Homo Sapiens
  misc_feature (23)..(23): n is a, c, g, or t
  misc_feature (28)..(28): n is a, c, g, or t
  misc_feature (36)..(36): n is a, c, g, or t
  misc_feature (66)..(66): n is a, c, g, or t
  misc_feature (88)..(88): n is a, c, g, or t
tgaggtgccaccaccccccccanagcantcctgccnaaacacacgggaacgggggccacctgtacntgtaaacagtacactttccacngaatcccaaaattaggagccaaaaatacaaaggttccacattggtccttaggtagatacaggcgaaaaaggattgagctgtttagcctcagaaacaacaaaaacaaagtttcctaaagcaccactaaattatataaaaatcagaccatggacggattgaaactggtattctggtgaaatactttactattttgtaaaaagttttacaaaaaattacaaattaaaagtatcaaccctctgagttcaaagcagcattttgaaaatgaactggtagttaatcctgtaaccacccttagagttgtaagtggcccttgggaatagggatggatgggttccacctgtttgaaatcctcgaaa

SEQ ID NO: 324698 - DNA, 410 bp, Homo Sapiens
acaagccaccacatccaacctccctcatatttgactaagaagtctcataaatctgagaacacctagcaaggaattaaggcgagggtgtggcactgttgtggcttcagtctatcaccaggcagagtccacgcattcttcccagggagaaagaagcagtgacagctcttgggctttgagggaaatgattcagcgggagaaagaaggtggagaggggctgatatgcagataccattgctgcaggtggctctgcccctaagcactgaggagggcactggtccctctggccccacccagccttcaccccaaggtgaagtacgctttctcaggtccccaaggatgggtggccaggtcccccactgggagtggaggtctcactcccttccttgggttctgacctccacattatctcc

SEQ ID NO: 324699 - DNA, 1478 bp, Homo Sapiens
  misc_feature (1031)..(1323): n is a, c, g, or t
tagtaagaaaaataactttgttattaatcatatacaatcataacaaaagtacatcatagtatcacatccataattgcttgaatgctaacttgactgttacatggacctgttacaaataatgaacaacagagctactccagtatatgactagtcactgtgaaataaaaacagacccatggcacacatgaaattcctaaggggacttgctttgatccctggggaataagagggtccttttctatgatttccctagagcagtaacgtttgttgagggagcatgtgaagttcatgattatatgccttaacattacagtcatggtgtgttttgttttccaaatggaaaattatttttgacttgttgtgagatataaatattgactatgccaggaaaaaattcatctatttccctgaactcattattaataactttagatggctctattctacttgttgtttggcctggattcctccaataactttccttttcaggaaggttatttgacagatgttaagtctgcagaatgaggctgctgtggttgtttctgggcacaggctgagaagtggggagagatagtggggaatgacacccaaaatatgatgggggagttgctacctgaaaacctacagaaatgtctggcctggagaagccctccgttgcatacctgggaacagggctcaccaggcccacagcaattatgaaccttggaaagatggccaaagccagggtgctcttcgctggtatttggtggggtcaatactcacctgttccttcgcttccgaaaccaatgaacatttattatttacttgttgggctatgatactcctgagtttatacagtagaaatgacttcctttggtcaatgaatccaatggcagatgtcgggcattaactcagaaggtgagaaaaggcaccattctctctgcagccccactcacttttggcacagtatagcttataatttctccctctggaactgggaagggaggggggtttcctaaactaaaatgcatgccctccatgtactattttcnnnnnnnnnnnnnnnnnnnnnnnnnnnnnnnnnnnnnnnnnnnnnnnnnnnnnnnnnnnnnnnnnnnnnnnnnnnnnnnnnnnnnnnnnnnnnnnnnnnnnnnnnnnnnnnnnnnnnnnnnnnnnnnnnnnnnnnnnnnnnnnnnnnnnnnnnnnnnnnnnnnnnnnnnnnnnnnnnnnnnnnnnnnnnnnnnnnnnnnnnnnnnnnnnnnnnnnnnnnnnnnnnnnnnnnnnnnnnnnnnnnnnnnnnnnnnnnnnnnnnnnnnnnnnnnnnnnnnnnnnnnnnnnnnnnnncccatgcactattttcaacagcatatttttattcccattgctttccaagaacagaggcaacttatgaggtcctgtgaagagggtgcaaaaaatcgaagtcaacatttctactaacaggttgaggaggtgtacaaagatctttttccctataaaac

SEQ ID NO: 324700 - DNA, 640 bp, Homo Sapiens
  misc_feature (45)..(45): n is a, c, g, or t
  misc_feature (388)..(388): n is a, c, g, or t
  misc_feature (401)..(401): n is a, c, g, or t
  misc_feature (417)..(532): n is a, c, g, or t
  misc_feature (541)..(555): n is a, c, g, or t
gcctcctcctcccctattccccacattacccacatccacattccngcctgtcaaataaagccccccaatggagtgataaaaccttaaagcctagtagatacctgcacccctgtcttgtggtggtgttttccctaatgaaatggaagctgtacctccctgtttgtttttaaatacttttgaaacagacagttcatgtaccccatcatttagagatgcagtttgaatttccatggaaaaaggtgccaattttggattgggaaaggagctgaagccccagtcaagactttgccatttggggtaatgcagcagattcctgtgtctgtatctttccagtgtgtgtgttaatccatagtgttctgagcaccagaagggtcatgtaaatctgaangttgttattaaanggtttttctatagtgnnnnnnnnnnnnnnnnnnnnnnnnnnnnnnnnnnnnnnnnnnnnnnnnnnnnnnnnnnnnnnnnnnnnnnnnnnnnnnnnnnnnnnnnnnnnnnnnnnnnnnnnnnnnnnnnnnnntttttgggnnnnnnnnnnnnnnnaaaaaattttttaaacaatcttttggggggcgggccccccaaggaaagaaaaaagggccaaatttttttccaaaaaaaccccggg

SEQ ID NO: 324701 - DNA, 1167 bp, Homo Sapiens
  misc_feature (368)..(368): n is a, c, g, or t
  misc_feature (962)..(997): n is a, c, g, or t
ttccattttgtatttaatattatcgaaggctttattaatgccttaaaaaacacaaaaagttctgaacacacatttattatctggaggaataaatgcactccaaatgcttatcatcagaactctggaaaaagacatataaattctctccagtattttaaaaattggtatctaaataatttcattttgaactaggttagcaacctaagttgtcttcattcagcttttaaaattgaaaaaaaattgtttcaaatataataaagacttaagtacacattcaaaatttattttctgttacagttttcttgccaaaaggagttgaagaatttttttgcttatcttacttaggacaaatgttgtcagattaaaanaaaaaataacagaatagtagttgtaaagactaactctatatgaatggttttaatcatagcgcagttaaaacaacatttaatgtagattcatttcgctggatgatgtcactatttaaaatatcagtatttctcatatcatttctggatggtcttgacacattcttacatcttcttcaacatgacttcttcacttttcttctctagagttttcttgagttaaaataatggcttgaagaagatcatatgagatctagtggctctgtgatatttcttaaatggtgggcaaggctgggctggctgataatgtaactcattaacatgagccgtattttcagtgccccaggctggccaggcagtctgatagaaggccttagttcctcttgcagataaagatagagtccattctttcactagtccagggcagtggccaaaaaagtccaggaaaggcattacatagaatgccatcgtttagaagagatttggatttaacggcattgttataggtaaagtatctcctgagaaaaatctcattgactcagtgtttgggggaacgttaaattttatcatcacagttgcctttctctgtggaaaagnnnnnnnnnnnnnnnnnnnnnnnnnnnnnnnnnnnngttctgggaggaaaagacttctttaatttgctatgatcacttcctctcaatttctttttcttacagtcatgcatactctgtaatctaaatttcttaagtttatttaaaaatcagcggacgcgtgggtcgacgatatcccggcaattccggccggtaccagcctgcctttt

SEQ ID NO: 324702 - DNA, 890 bp, Homo Sapiens
  misc_feature (26)..(26): n is a, c, g, or t
  misc_feature (38)..(38): n is a, c, g, or t
  misc_feature (44)..(44): n is a, c, g, or t
  misc_feature (52)..(52): n is a, c, g, or t
  misc_feature (57)..(57): n is a, c, g, or t
  misc_feature (61)..(61): n is a, c, g, or t
  misc_feature (68)..(68): n is a, c, g, or t
  misc_feature (78)..(78): n is a, c, g, or t
  misc_feature (83)..(83): n is a, c, g, or t
  misc_feature (221)..(394): n is a, c, g, or t
  misc_feature (410)..(423): n is a, c, g, or t
  misc_feature (458)..(471): n is a, c, g, or t
  misc_feature (557)..(567): n is a, c, g, or t
  misc_feature (650)..(662): n is a, c, g, or t
  misc_feature (711)..(731): n is a, c, g, or t
actgtgagttagcaacatgcctgacntcctgatagcantactgntttctagntttgnttantgtatantatgtgtggntttanttggtatttatttgtgttttgaggtcttgcaatttttttgtgtttctgatgctaataactaaagtttgtaagactgtagaatgcaaaactcggagatgctaaactgtcttattagaggaaaataaatctgattatggnnnnnnnnnnnnnnnnnnnnnnnnnnnnnnnnnnnnnnnnnnnnnnnnnnnnnnnnnnnnnnnnnnnnnnnnnnnnnnnnnnnnnnnnnnnnnnnnnnnnnnnnnnnnnnnnnnnnnnnnnnnnnnnnnnnnnnnnnnnnnnnnnnnnnnnnnnnnnnnnnnnnnnnnnnnnnncaacacacccgtgcgnnnnnnnnnnnnnnacaaaaaaattttctctaacactttttgttggggnnnnnnnnnnnnnnaaaaggggtagatcacgaggcaatcttgtttctccacaaaaaacaaaccgtggcactaaacaaagtagtgtctcttctcccccacnnnnnnnnnnngacccgggcgggaagaaacaccacaccttttttctcacaacacacccccatcgggggtttttccaaggccattcttcttctcnnnnnnnnnnnnnagaggggtgtcatatcccggggcggcctaataattataaagattcttcnnnnnnnnnnnnnnnnnnnnntactatcttagaaaggattgtgtgtggtttaaaatttactaacccccctttctccctgacaaggggggggaagccaccctaaaacaaaggagggggatgaaaaacacattcactttcccggcggcgcgaaccacataccccccgatcccccgcatgggg

SEQ ID NO: 324703 - DNA, 1210 bp, Homo Sapiens
  misc_feature (287)..(296): n is a, c, g, or t
  misc_feature (543)..(635): n is a, c, g, or t
  misc_feature (1127)..(1127): n is a, c, g, or t
  misc_feature (1139)..(1139): n is a, c, g, or t
  misc_feature (1172)..(1172): n is a, c, g, or t
  misc_feature (1192)..(1192): n is a, c, g, or t
cgccagaaaaaggggttgtgccctagggtaaccataaaatggtggtgtaaaaagacaaattcccctgggggagtgtttccccccccatcttgggggttgagattttggcccaattttggactcactttttgggccccctttgttcaccctgttgcgcaatatattttccccacaggggcaaatttttttatcccagggggcaattcgatttatcctacgcctttttgagggttttcatgtcggccgagatggttttcaattccaccaaatttttgatgaattacaannnnnnnnnnaaaaggggatgggtgttgcgtaaattcctatcgagattgcccggaatccccttgaaagatccagtagattccttcgaaccccttgggtatcggcggggggcttttagttgcgggaggcaagtctttatttgtgggcaggctcgccctagtaacaactcaggatctctttggattccatttttgggccacgttcgcctaacttaatggttttggaagcttttttggaggttttgggggagcttcttgnnnnnnnnnnnnnnnnnnnnnnnnnnnnnnnnnnnnnnnnnnnnnnnnnnnnnnnnnnnnnnnnnnnnnnnnnnnnnnnnnnnnnnnnnnnnncatatactttatgctttacttcttacttcaaacatacatccttgattaaagaacaaaaacaactcactgaagggtgataaaataatcaaaatgtatttgcccctgaaagtggaattactacctcaaaaagaatacaactctttcattttccccaaaataatcatgtgagttcatgggcatgctcatcactcgctgtctgtgtggaagagaagatcgaagagggatttactggactgaactggcctaggaagcctttgctggcatctctcagactggactgcagcccagatccttttactcagatgcatgcacttagaacatgaaaacagtaagataaacgctggtggtattattaccttatattgaggaacattttatgacttcctaactctgttttcaatagaaacatccccacttaatgaaattgtcaataaatgctggctcaaaccaccctccccaaatactggaaaaacaggtacatccggtttctcnggtacccctggncaagttgtctggcaatggcttggcgatttttcnactgaggttagacaacttgngatttttttccccttctt

SEQ ID NO: 324704 - DNA, 948 bp, Homo Sapiens
  misc_feature (68)..(76): n is a, c, g, or t
  misc_feature (134)..(143): n is a, c, g, or t
  misc_feature (249)..(258): n is a, c, g, or t
  misc_feature (316)..(328): n is a, c, g, or t
  misc_feature (369)..(383): n is a, c, g, or t
  misc_feature (432)..(447): n is a, c, g, or t
  misc_feature (457)..(563): n is a, c, g, or t
  misc_feature (878)..(878): n is a, c, g, or t
  misc_feature (910)..(910): n is a, c, g, or t
cccagcgggggccccggggggtggagaaccccccgcgggggtttaaaggttttatctaacgccttgtnnnnnnnnntcctcttgtgcgggaggatgtttatatttattcccccctcctcccccgaagggccccnnnnnnnnnnagaaaatatataagagccccctggggatcccccgtggaggcaacccaatagtaccccccaggtcccccttgggttgttttaaaatcccggggttttccccgggggnnnnnnnnnngggggttcaccaacctcctttattcccggtgttttttgggaaaacagatgtatccccnnnnnnnnnnnnngggggggcccccgcccccgaaaaggttttaaaagagtttcnnnnnnnnnnnnnnncggaacacaccactttttgtttagcttgctgttgtttgttcacatcaannnnnnnnnnnnnnnnggtcatcaannnnnnnnnnnnnnnnnnnnnnnnnnnnnnnnnnnnnnnnnnnnnnnnnnnnnnnnnnnnnnnnnnnnnnnnnnnnnnnnnnnnnnnnnnnnnnnnnnnnnnnnnnnatataaaaataagtgtttattaacaaatgggctcagagtagaaaatgcagacagatgggttcactttaccatattttgggatcatcatcttattgcgtacagacctgtaggcaagtaaacgaaaccaaaggctggctcccctggccgaggctgggacttgatgcaagacagccagccagtcacctccgcctcccatgaacctcttggaaaacttctcctgtcccacttctgccaccctccagctccttgagagagccagagttgagaagaaaatgagcctgaagttgaaagggaaagttcttgcctgaaacagtnctgggaataagtccagaccatttccctcaagnagccacctctttcactccttaaagccagaggacaccac

SEQ ID NO: 324705 - DNA, 542 bp, Homo Sapiens
ggaggggcccgaggggggggcccaccaagggttattatttattagggcgcggtcggggtggttcggggggaagaaaacaagcttaatacctttttatttgggtgaggaaaccattttccttaaaattaaggttttccacttcattctttactgaaacagctcttccttgacctgtcgaaactgtgctggctgtgttcaacataactagaggtatctttggcattttcttccgttagcttcataacttgtagaatatcttgtacaaaaaactgtagatttagagaaaaatatgcatataaatcacttattaatcccaaaatgtagtaaataactagcaaaaactttatcaaatccatttcatacacaaactggacagatcagttgcacataacctctacatctgcagcgttttataaattggtgctttgacattgaaaaggaggtttacaaaaagacccctctcgtaatatcagtgactctaaattatcccgctgccattgcttctcaaattccattgaatttatactaatcactccaatacc

SEQ ID NO: 324706 - DNA, 252 bp, Homo Sapiens
  misc_feature (42)..(42): n is a, c, g, or t
agcgagtaggttttaattcaagatcaggcccacgcgttgatntcgtagaaggaaactcagtggactgacaagctcaagtcatgtatgaggcacgtcctgggacccccacccctcctgccataggaaggacagctttgggcagagggaaggaggtttgagatcagggttgggcccatacagattgtgtgaggtggtctcaagtacaaatacttatctgaggctcctgaacaggccagaaattggtgagtctcc

SEQ ID NO: 324707 - DNA, 190 bp, Homo Sapiens
ctgccgtcatctctttatttgctgccagcagagtccaccaagcctgccgggcagccctgctgcccaccacggtggggtccaggcccagcccaccaccccgtggctgtctcctccaggctccagccgtcctgagggggccctggcagtgtctggagacccccaggctggaggtgaggggtgaactggaccc

SEQ ID NO: 324708 - DNA, 563 bp, Homo Sapiens
  misc_feature (73)..(83): n is a, c, g, or t
  misc_feature (131)..(145): n is a, c, g, or t
  misc_feature (156)..(324): n is a, c, g, or t
ggtggggaaaaccccacccccttgttttttgggcccccgggtttcttttgtgaggaaaagggtttgtccccgnnnnnnnnnnnctttgggggggcccgccccccaaacaaaagtttttaaaaatttttttnnnnnnnnnnnnnnncccgcaagggnnnnnnnnnnnnnnnnnnnnnnnnnnnnnnnnnnnnnnnnnnnnnnnnnnnnnnnnnnnnnnnnnnnnnnnnnnnnnnnnnnnnnnnnnnnnnnnnnnnnnnnnnnnnnnnnnnnnnnnnnnnnnnnnnnnnnnnnnnnnnnnnnnnnnnnnnnnnnnnnnnnnnnnnntaaacgcagcccgtttaatgatggggcccagactgcagtggctcaagacaggacactgcggaaagccgccatgtgccgccgcacacttgtctgagatctgctcagccgatctgctccggccgtagtaatccgtgaagaggccgtcagggttgagcaggtagatggcaatggagtggtccacgatgtagtcctggtcctcatccttggggccggcattgtagtacacgcggtaactgtcc

SEQ ID NO: 324709 - DNA, 855 bp, Homo Sapiens; identical to SEQ ID NO: 150740

SEQ ID NO: 324710 - DNA, 936 bp, Homo Sapiens
attttttatttcattactgggtaacaatctacttctcagcttagaatgctatagaaagcctccacatttaatttaatcaaatctgaaacccaataagcttaaacaaagtgaatgtttttcaaagtgcataatttccaactcatccacttgcaatatttatccaattccagttcatcagcaagaaaataaaatgtacttggctataaaaatactgaggaatgttatcgaaaaggaaaggctatttggtagaagtaactacaaaaataattagtttaaatctttgtaaagctttaatgtaagaacatcagtacactttctttacataaaccttaaagcatgatcaataccaagatttcaaattttcaactttcaagtacttgaaaaagggttgcaacaaagtgtctcttcccaaaaaagcaagaacagtgatcatgcaggtgttaatctgcagacatctgaggacactggtatctgtgttgggctgtcatttctggctccactggcagagagtgtaggcaaggcattactttgaaatgcagatgtaggacaaggagtcatgacaacattttcgtcttcaccaacgtctgaatctggtgttgtaacttcactgccttgaagcccaaggatctcacagactgcttgtggcaattcctggatatgaaaaatcaaactcaaaaccatatttcactacagaggaaaaataaccacaaagtaacacttctgtttaagactacattgattccagaatctgagcatttgtcctaacagtgtaaatgtcatgtacccttctcacaacatttttctcagctccaaatgaaatgctaaccacctttcgccctaagtggttcttggatatcttccaaattagtcactctccatcccacctccacattcccacaaacatagcatgtcctaatatttggcatttatctctta

SEQ ID NO: 324711 - DNA, 866 bp, Homo Sapiens; identical to SEQ ID NO: 150742
  misc_feature (55)..(95): n is a, c, g, or t
  misc_feature (131)..(141): n is a, c, g, or t
  misc_feature (198)..(236): n is a, c, g, or t

SEQ ID NO: 324712 - DNA, 810 bp, Homo Sapiens; identical to SEQ ID NO: 150745
  misc_feature (190)..(205): n is a, c, g, or t
  misc_feature (587)..(619): n is a, c, g, or t

SEQ ID NO: 324713 - DNA, 760 bp, Homo Sapiens; identical to SEQ ID NO: 140435

SEQ ID NO: 324714 - DNA, 836 bp, Homo Sapiens; identical to SEQ ID NO: 150746
  misc_feature (117)..(260): n is a, c, g, or t
  misc_feature (267)..(276): n is a, c, g, or t
  misc_feature (366)..(416): n is a, c, g, or t

SEQ ID NO: 324715 - DNA, 715 bp, Homo Sapiens; identical to SEQ ID NO: 150747

SEQ ID NO: 324716 - DNA, 972 bp, Homo Sapiens; identical to SEQ ID NO: 150748
  misc_feature (644)..(667): n is a, c, g, or t
  misc_feature (932)..(932): n is a, c, g, or t

SEQ ID NO: 324717 - DNA, 590 bp, Homo Sapiens; identical to SEQ ID NO: 150749

SEQ ID NO: 324718 - DNA, 787 bp, Homo Sapiens; identical to SEQ ID NO: 150750
  misc_feature (111)..(111): n is a, c, g, or t

SEQ ID NO: 324719 - DNA, 1071 bp, Homo Sapiens; identical to SEQ ID NO: 150751

SEQ ID NO: 324720 - DNA, 552 bp, Homo Sapiens; identical to SEQ ID NO: 150752

SEQ ID NO: 324721 - DNA, 1143 bp, Homo Sapiens
ttgcagacaaaaagtggtttatttagcacccactatgtaccaggcacttgggaggtattttctcacactttcgctttccatcctcacaatatcccttatgaggtagggactaccctcatttttacaggtgagggaactgaggcttagatgttgacagacccatccaaggtgacccagctggtaatggtagacttcatcctgctacacagtatttaaggggcctaaaccataaacaatttttaaaaatttgggaaagtcacacataaaggagatgtttcaataccttctctctccaggtatgaacagtattgagcaagacccacagggcagcaataatcatttatcctggatgaaaggttcctctgtgaaaggtaagggggttgggggagacctaaagccttctgcagacccacatttaaatgagctgacagtcccagcaggactacagaggaaccagctaggggaagctgcccaggatcttagacgtgaaattaaaaggagatcatgcttcttacccaggaagtggggaattcagttgacccttgaaaaaactgaataaattaacatggggaaaggctaattaccatgcccagtgctggggtggagaaacagagtggccaaggttgtagcagcctgggcacctgctgaggccccattcagcgggagagccaccagttgggagtgtggacatgtatggccctaccagctctaagcaggagctggtaagggacttcccaaatgcaaacccttggtgaatattcttagcagtgagaggaggtgagcaccagaccaactggacaagagaggtcagagtcatacatagcaatctggacaggaaatggcatgaggagctgtgagtaatctgggggctatggctagaaaaacagggcacgagctggggctgagaagaggtgagcatccatcaagctgaaaggtgggactcaagccccctcagcactgtgaccccgttcctgtacaccaagctctagttggtgaatggagtcccctggaccaagaggaagagaaaggcccagatgctttctcactgtctctgctatagcctaaaaacctgaacttttctatagttcccttcttgagccttggtgggttttatttttccttactgcctccagaagaagcttg

SEQ ID NO: 324722 - DNA, 542 bp, Homo Sapiens
  misc_feature (17)..(17): n is a, c, g, or t
  misc_feature (39)..(39): n is a, c, g, or t
  misc_feature (66)..(66): n is a, c, g, or t
  misc_feature (162)..(162): n is a, c, g, or t
aggggaagctcctgggnaggccccagagtccaagagtanggacccttcagtgatttaaccgccatntataaaggcattccagttccaaaaaccttacatctttgcacaatactttattttttgcaatttttagtaaaaatttcccaaagtgaacaaaaaaangatactgtataaaacacagtggacattaaaactggacagtagtattagatctcatttgtcttggatccttttatattaccacatcttgattcgcagtggaaagagttcagtgcatgtatctcttttcagaaaacatttaacttagactcaaaataaaatagggcagtgtgtgtacctgccaaaatcctaccacaggataacattacaagcaaaaaatttacatgttccaaagtctaccacactcaagaagttactaagaactcttgcagaataaaagtcaccattttagaaatgcaaacccacttccaacctttgcacagtccaaaaacaaaggcatttaaatgatttaaaagcaattacatacatatctacctacttgt

SEQ ID NO: 324723 - DNA, 855 bp, Homo Sapiens; identical to SEQ ID NO: 150754
  misc_feature (95)..(96): n is a, c, g, or t
  misc_feature (129)..(129): n is a, c, g, or t
  misc_feature (137)..(137): n is a, c, g, or t
  misc_feature (309)..(309): n is a, c, g, or t
  misc_feature (316)..(317): n is a, c, g, or t
  misc_feature (319)..(322): n is a, c, g, or t

SEQ ID NO: 324724 - DNA, 388 bp, Homo Sapiens
  misc_feature (343)..(343): n is a, c, g, or t
  misc_feature (352)..(352): n is a, c, g, or t
  misc_feature (361)..(361): n is a, c, g, or t
  misc_feature (373)..(373): n is a, c, g, or t
gcatcaagaattaataaatacagtgtatcattattttaaagacatgtttagggaaaaaaccagcttctcttccccttaaagttattggtggtgggagggcaagagaggaagagatggcagctttttaagtgaaattttaatcttatctatcttttgttcattttgagtccccaaataaaatatttctgtactttaatttcttaatcactattgtcagcttggttgctacacatttaattacaatataaagttgacattgaggatgaagaaacttaattatacttttccttatttctatttaaccaataaggattttaataggcaaattaggaccaaggatttntaccccccntaaataacnaatggggtaggntaaaggtgggaattt

SEQ ID NO: 324725 - DNA, 470 bp, Homo Sapiens
  misc_feature (360)..(360): n is a, c, g, or t
  misc_feature (389)..(389): n is a, c, g, or t
  misc_feature (413)..(413): n is a, c, g, or t
  misc_feature (430)..(430): n is a, c, g, or t
  misc_feature (437)..(437): n is a, c, g, or t
  misc_feature (449)..(449): n is a, c, g, or t
ctggttgtcattcataaaatttattttggaaaaatattttaaaaaggaatttcttcattaacaaaacagtaaaaaactcaaataacatttgcacaatattccataaatacatttatatacaaaaaaatatagtcacatagacccgaagtgcctttgtacatatttaccaaaatttaaattataaaaaacgaacatcacaaaatactcaagctttacagatatcatgaaaaatatttttacaaatccaaaaaataacacacatcttttccatctagaaaaagcacatcttcgtatcaaaaaggacaataaaggcagtgtttgtgtttctaattcaagaaaagactggctcataagaatccnaaatatacactcaggcagtgcatgcttcnttatggcggaattcagttcacccnttttaaatatatattcncctaagnggccactggtcnaaaggtgcaacgggggacgtc

SEQ ID NO: 324726 - DNA, 360 bp, Homo Sapiens
  misc_feature (34)..(35): n is a, c, g, or t
tgtgattactgtgacaagttgtttatgcggaggnnggccctcaagcagcacgtgctcttccacactcaagaacgccagatcaagtgtcccaagtgtgataagctgttcttgagaacaaatcacttaaagaagcatctcaattctcatgaaggaaaacgggattatgtctgtgaaaaatgtacaaaggcttatctaaccaaataccatctcacccgccacctgaaaacctgcaaagggcccacctccagttcgtcagcaccagaggaggaagaagaggatgactcagaagaggaagatctagcagactctgtggggacagaagactgtaggattaacaagtgctgtgtattcagcggatga

SEQ ID NO: 324727 - DNA, 399 bp, Homo Sapiens
aggcatttattgctataaagtcccctcttagaactgcttttgctgcatcccatacatttggcatgttgtttccgctttctgttgtcccaagatatttttcaattccttttcatttcttcttgactctttgttcaggagcatgttgtttaatttctacatatttgtgaattctccaatttttcttgttattgatttctagattcataccgttatggttactgagattcctggggcaggcctgggatcctgaattctgctgggactgtcagggggtgggcctcaagcttgggggtctatggcatgccaacctggggtgctgggagtgaggactgggagggctagggtccacaaggtgttgggcctgggagtctggggggctgaaggagggcagaccagggg

SEQ ID NO: 324728 - DNA, 413 bp, Homo Sapiens
  misc_feature (34)..(34): n is a, c, g, or t
gcaagtacgtatttatgtcctttggtgccttgcnacgtaaggcactgttaatgacgtaacagaatagaggaaatgcccacagcaaatagttctagtgacaatttactagacaagttacagtttaataatggtggtggtgattgtttctttcattttattattattatttttttacaataagggtgtagcctttatactccacacacacaaaataaaacaagtgcttattacgaaaagagtccctgcccccaccccctagaacatcctgaacatagcaattcaacagaacagaaaattcaagacgtttgatttcaaaatttcaataaaaaagcaaaagtatgtaatggcaacagctgttcaacttccaactctaaaataggcaccattaaacaaaaaaccccagtattttaaat

SEQ ID NO: 324729 - DNA, 974 bp, Homo Sapiens
ttctcttaactcagcttttgctactttggcaaaaactagcgaggggtagcagaaacctgcaccaaggattgtccctatgtcttggcccctcctagagcgtgtgcagactgatgattttatatgtaaatcaagactcacatccctttcctagtcccccacatccaaagcccctcagcctgccttgcagaccaatgggctccatgttctgtagccccctcccctacgcctcacccctcctccctctcacaggttctgggcggccagtgagagaaacgcagtgggggaggcagggagtctggtgcctgcagagattctctgcttctttcctggggggaggtggggaggtcttagcaggagcgggccctgtacccacctgctgacctgctgtttggtagagaaataaaggttgtgtggactggggggaactcgcactgtccccttccaaacaacacttccctgtgtggcccgctttccgccccccggagaaacctctcctgagacccatccccctccgcgccccgggggctccctgtacgccaatcggaacctggcgccccccgcttggttccctccgggaccaccccccgcgacctgggacccagccgcccagggagtcgtccctacaccacacaccgaaacccacgtgctgcccgatcttaccccctaactctcccctcgcaaccaaaacgcaccgcgccatggcgcacatcccaacacggcaccgcctcacaacgtgtcgtgcgcgcaccgaagccttacgaccccgacgggcggtggggacacctatcaggaaacaaaaaacggcggcaccgctgctaggccccgcaaggagagaaacaacacgaacagcgagtgatgccccactaaatggctcgcttttaatgacggaacaagccgtctgcgccccagaaccgcgagtgctcaccggaatagaatccgcaccagcgctaggtcgcacagccctttccgccgcg

SEQ ID NO: 324730 - DNA, 194 bp, Homo Sapiens
tcttaattgttgcaatttatttagaattaaacattaattaggctctgaagaaccttgctgattgttaactggatgattgtttcattacctattctttgattttatcaccactggcccgttatccaccctgctggttgccaactcagaggtatgtctttgttgagtgcaaaacagttgaggaattaatcttagat

SEQ ID NO: 324731 - DNA, 415 bp, Homo Sapiens
tttggtaaagagcaaggttttattcaccaattcaacagggaagcaggaaatacagcaggaacataatctgtgtctgcatcagcgatatttctggtgggccagccagaaatcacagtaatggagtaacagagatttgagctcaggatttacatccagatgggggcatcaacagggtgccattcagcaccttccctgggtggggacaatctaagccacgctgttgtgtctgccccattattggtgtcatttctgcagtatttgtaccagcagcctcctgtactggatttggggtgcggggcggctgaggctcacgcccagagccttctttagcaggaggattccgagcagatcatgactcagctgcagtcgctggtccctcagggaggtgtggggagctgtcccaaatggggatgcc

SEQ ID NO: 324732 - DNA, 415 bp, Homo Sapiens
ctttttttaagatttcaaactgggttacacactggaaaaggctgggttaagggccgaaatttaataaatctgtactgataactaaaggctacagagatttcatatattttttttaacttttagaaatcagagtgcttataaaatggctggctcatggctctgtcacccagcacctctgacgccgcctcctagccttcgttggtgagataaccaggaatagtgattccatgcgtaaacaacaagaatactaaaccaataaaactagcttatcatgcaaatattaaggcatctagaaagtcagttaaaatatattgtcatagagacagaacatctatttcccagcggacttcatgtaacaaaggctacgttgcaggggctgcgatctaccatcagtgaaatatcatcgacccttttt

SEQ ID NO: 324733 - DNA, 631 bp, Homo Sapiens
  misc_feature (567)..(567): n is a, c, g, or t
ttctgattacatgaatttttattgtaccatttcttatggtggcaaataagcaaactgtgagtaaacgagggcagctgaataaatttacagtatacaatattagagaatattatgttgcaattgctcatcttactctgaccatcataatcattctttttgctgggtccaggaccatggctaactcatggcacaaaaagctagtcctggtttggtctgaatttgagtcctagttattctggtgacttcaaggctacccaagcacatgggcaaaacacttaaaaaatatgaaggattatttaagtaaagcaaaatggggaccagaagaggccagtttagattcatgtacacatacatatattttatttgggtatattacctcagaaaatcaacaactgtcattttcaatcttatctcaagaccaaccttcagaaatgctagtaagtgctacagtaatattaacattatattgagtttaaaagaaattaatatatttaaaatcagtctaaggttttaatgctgtatacccattttcataatcattcaaaaacatcaggccgggcaacgcgngcacgcctgtaatcccaggttttggtatttcaagtcacccataacttcatttgctattggcagc

SEQ ID NO: 324734 - DNA, 399 bp, Homo Sapiens
ttatgaatttttattgtaccatttcttatggtggcaaataagcaaactgtgagtaaacgagggcagctgaataaatttacagtatacaatattagagaatattatgttgcaattgctcatcttactctgaccatcataatcattctttttgctgggtccaggaccatggctaactcatggcacaaaaagctagtcctgggtttggtctgaatttgagtcctagttattctgggtgacttcaaggctacccaagcacatgggggcaaaacactttaaaaaatatggaaaggattatttaaggtaaagccaaaatgaggggaaccaggaaggaaggacaggtttagggattccatggtaccaccataccatatatttttaatttggggggtattatttccc

SEQ ID NO: 324735 - DNA, 1634 bp, Homo Sapiens
  misc_feature (49)..(49): n is a, c, g, or t
  misc_feature (261)..(261): n is a, c, g, or t
  misc_feature (270)..(270): n is a, c, g, or t
  misc_feature (305)..(351): n is a, c, g, or t
  misc_feature (358)..(495): n is a, c, g, or t
  misc_feature (500)..(500): n is a, c, g, or t
  misc_feature (502)..(505): n is a, c, g, or t
  misc_feature (507)..(510): n is a, c, g, or t
  misc_feature (512)..(530): n is a, c, g, or t
  misc_feature (578)..(654): n is a, c, g, or t
  misc_feature (1280)..(1288): n is a, c, g, or t
atgagtgtgacaaagaggccgaaggatggataatatattgggtgagagntcatgagtgatgtcgcagtggggattgcggtgcttgggagtattatcgtatgcgggtgacagatagcgcggttagtatacgggtggggaatatcgtttgtgggggtatcacaagggggggctcgctaatggtcgatttaccatgggcgtggtatcaacaatggggcgcggggtggagataagtaagtaaggggggagaatgtgggtggggcnttggggtgnttgcccccggcgtctctatcggtgtttcgtgcgcnnnnnnnnnnnnnnnnnnnnnnnnnnnnnnnnnnnnnnnnnnnnnnnattcggnnnnnnnnnnnnnnnnnnnnnnnnnnnnnnnnnnnnnnnnnnnnnnnnnnnnnnnnnnnnnnnnnnnnnnnnnnnnnnnnnnnnnnnnnnnnnnnnnnnnnnnnnnnnnnnnnnnnnnnnnnnnnnnnnnnnnnnnnnggggngnnnngnnnngnnnnnnnnnnnnnnnnnnnttactcattctgcgcagatgttgaagtttgagcgaggcggcgacaagnnnnnnnnnnnnnnnnnnnnnnnnnnnnnnnnnnnnnnnnnnnnnnnnnnnnnnnnnnnnnnnnnnnnnnnnnnnnnagttcaacataaaatgagaaagaaaaaaatatttctgacattttcaaagaacagaaataggaaagtatgttcatatacattcaacgtatactgcacatattggttactacaatacaaagcaatgagttttttttaaagtgtagtttgcaagatggcacggttagtaggctcactggctttcatctgttgttgctggagggtgcagtctgctctcccatacatacagtaccatgtaaacacatcaggctgagcgcgtggtggtggtagggcaggttgggggcataagagttgggaacaagcgcagataagtcaacagctttttagggctttcttgggtaagcccccttctgggtgagtagttgggtgaccccaccaagtggaggggagacctggggaccatggaaacatgggacagctcccacgaagggctcttgcactgcagaattccactcaagggatcttgggtccaggagccgagctgccagtatcagtggagaaggacaaggtgcatggggatcccgccagcaacatcaggatggccatgccgggcacccgctttcctctgtgcaaattcaggatgaaagactaggaggggactcgggacctcttgctctcctttccccagnnnnnnnnngggtggaagagtcagtgtattcaaggtctctctcttgttttgaagatcagaaggagataacccagaccctctctcagccccagccagcagagaagactttggtttctaacaatgaagagaaataaagataacacaaataatagctactgcgtatgcactgcttcaactggggaaaggagaccactgcatctgtcactggcacaagtaagagctgttcacaattacaatgcctaaaggaaatactttgaacaaaaggtgcaagtcacaattcaaatagaacagaatctggttaaacatttctcatttaaacaaaaattccttttctctttatttattaataatgata

SEQ ID NO: 324736 - DNA, 373 bp, Homo Sapiens
  misc_feature (331)..(331): n is a, c, g, or t
ccattcacgttttttactaaagcacccacacaagtttctgtgcaatgtacaaacacaagccggccctggggctcctgcctcctctctcagacagggaggcgggaaccagacttactgatccaagccccacctgcctcccatgcaaaggccaaccccaagatcccaggcagcgacacagcatcccctctggtcccctcctggggcttgctcctcagcagggggcgcaccaaagcttgccccctacaatgttgaatgaaaaaggtttcccctcccctgggagcaagggggttcccaagagcttgagaattccccctgggaagagacactggcnccctaagacataacctcccacccttccaggccctaggggact

SEQ ID NO: 324737 - DNA, 350 bp, Homo Sapiens
cttcaagttcttatctttaaatggagtttcagtgtctcccaaaggctggatgagttttacagttataaccactggattgtgagaccataggacatttgaacaatcttttcttctacccatctagaaaagcatcttttttatataccaaatttttacacatatatccacatctgtttttgaaatctagagcagaggtactcaaagtttggttcatggactagtgccagttcacaaattgttaatgttttataatgagataagtacggaagttgagagtaaccatttagaaactgtgtaggaatttaaaaagtaatatctgacaaatttaataataaaaatggaggcttgta

SEQ ID NO: 324738 - DNA, 843 bp, Homo Sapiens; identical to SEQ ID NO: 150766
  misc_feature (137)..(137): n is a, c, g, or t
  misc_feature (686)..(709): n is a, c, g, or t

SEQ ID NO: 324739 - DNA, 467 bp, Homo Sapiens
  misc_feature (293)..(304): n is a, c, g, or t
tttgaattaattttgacctacactttggcttgggagaggaattattttaaatagacattggtactttttgaacttgatagctaaagattctaaaatgcatgttttatactaagttttaaccagtcaggaaaattttatgtaactagtgatagtttatttttttgtatgaattttgtttaggctgcaatgtttagcttttgttaactcctcactcttgctgtcttaagttcattactatgtttaatggcctacttgccaagatatttagcatgtaaaaagcagggttttgattnnnnnnnnnnnncggcttcatattgaagctgagacttacaataacaagttgagtgcaagcctggtatgctgtgtcttattgccagaatcttagtaaatgtaatgttttaaaagtttgttgtctttgtatattaataacaaattatgacaagttaagtttaaataagagttacatt

SEQ ID NO: 324740 - DNA, 462 bp, Homo Sapiens
  misc_feature (230)..(230): n is a, c, g, or t
tttttttctgtgcaaactacttttatttataaggaaagtttctctattttgtttataaacattaaaccagtgctgtgtgaaggcacttaattggggagaggtggggcagggatcctggtagagaccaatgtttcccacccagaccccaagactgctgggagagatggtgtcagcagtgactcccaggaatatccagtggtgtggtggcccatcccaggcccggctggcanggtggctggcttgctgggggatgtgatgatggtggtaggcatgggaggcactttggacgggatctgatttggcaaaaggaagtggtttcctgtccccagtgatttccagcccttcccagacctcccaaggctaaggcagattactaaatttaaggctggggcctccttcttccctggacttccacaaaaacggagaaccagcagtcctcggggctgctttgtctatggagta

SEQ ID NO: 324741 - DNA, 336 bp, Homo Sapiens
ctgcctgagtcacccgcccggccttaacagccataatttaaactagacagtatgggaacagctggagttagaaatcctagaaatcctgcttctgtaactgaccggtttacctctgacttgacttcaaacaggaagccctgaagattgaccttttcaagtacaacacttaaacaaagaactttccctctggaaggatttgtcggctacccttccaaaaacagacaggtgcggcctgacttcaagtgcaggccccgccctcctccggtgagtggccctagccctggggagcagcttcatcagcctcagcatccccttccggagcccgcacgctcagcc

SEQ ID NO: 324742 - DNA, 356 bp, Homo Sapiens
  misc_feature (340)..(340): n is a, c, g, or t
tacagttaccaatgaagatttttattcaagcttaaagtaaaaagtaattttagttaagaaaaatgaagtaccagataaactgtaacatatattttaacttagaagtatcaaaacaggaattttttgattctctaagtggtggtctctgcaaaatggagcttgaagaaatcttttacataccaatttgataagagtctgctgaccacgatctgtcattttctttactatgggcttctgggagaatgaatgctattttaaggccaaatgtgtttttctttcttctcccctttccctgacttttccctttctcccatccccgaccacctaccccacaatgggnaggaatttttgacatc

SEQ ID NO: 324743 - DNA, 455 bp, Homo Sapiens
taagcacatagctacatatttattaaacaggaaaacatatatagagaaatttaccctcaataatcagaaaatatacattcttttcaagtacaactggaagcattcactaaattaactatgtactaggccacaaagatgcaacaatatactccaaaaagttaatatcatgcaaatcatgttctctgacaataatccaatatagaaagaaagcaatgatacaattttaaaagaatataccagcaaactaaatatctaagaaaaccttcagttaaaaggaaatcatgaaagaagttaaaaaacacaaaattaaataacaatgaaaacagtaccagtcaaaacttatgagaaaagtctaataaagcatttagggaaaaaattatatctttaaatatcttattacagaataaacatcgaaagcaaatcaagcatttaagatgttgcttattttatagcaa

SEQ ID NO: 324744 - DNA, 534 bp, Homo Sapiens
gtctgtccttatatcagtttttattggtgggtttgtagctcctgtgggccgggcctggctgcttaggccagtctcttgctcacgcgctcataggtcacgcctccgatggtggagacctccaccagcttgtcacccacgatctctgaggtctggtgatagttggggaaattcaccaccagcttcccgccctccatctgcacagtggccttgaacatcttgccccccattgtctgtatgttgctttccttgccaacagtgaacttgttggtcatggtgtggcccccggagtagtgctgggaccaagtgaagtcctgcccatcctgctgcacctccgtgacgatcttgaagttgcgggccttttcgattacatcgctggagatcccaaggagcttcatgaactcatcataattcttctcactctccatctcgaacttgccggtgaaagccatgctgctgggaggctttcctttatgtgtctgtttcattctctgcaggtctcctttccggctcacccatgtgcacgcagacaacccc

SEQ ID NO: 324745 - DNA, 463 bp, Homo Sapiens
  misc_feature (310)..(310): n is a, c, g, or t
  misc_feature (333)..(392): n is a, c, g, or t
  misc_feature (446)..(446): n is a, c, g, or t
cagacttctttgtcgttgttttatttaaaatgttattgtctctgattagaaaatacagtcatgagggctaaaaactgaaatgatgtgaaaaggcatccattaagcagtgttgccccaccaccctttccatcagtcttgtctcatggggatggggaaaatgaagacagaacgctttgccttgctttgcaatccctcctttgaaggccttctgtcccagggaagccaatgttcatttgatgtggaagagggacctgtgtttaaccagaagctgtcctccctcatccctttcccatgggcttaacacggcagnaaggggagagggagatggaccannnnnnnnnnnnnnnnnnnnnnnnnnnnnnnnnnnnnnnnnnnnnnnnnnnnnnnnnnnngagggaatgctttaaaattttaccagtggaatttttgagttagggtttctctanctccaaagatttcttct

SEQ ID NO: 324746 - DNA, 159 bp, Homo Sapiens
atgagccgccatatctggcctatttattttttaatttttcaaatgagaaggttgggttaggtaatttttaaaaaatcgcttcaagtttcttaactccacaattattttcctgagactcttgcaagcaactgatctttataggtcatgcctcaaattccc

SEQ ID NO: 324747 - DNA, 235 bp, Homo Sapiens
aagagagttttcacctttaaaatttattacataagctatacacacaaaatgaaatcctagttataaaagatgcatctagaagaataatttataataaaccaacaaaaatgagaatgtgtatctccaggaatataaatatatttaaatgttctcagtgactggcattgctttatgcattacataagatagtatgtactaattaaggtattgaattcactgggttttagaaggcttt

SEQ ID NO: 324748 - DNA, 225 bp, Homo Sapiens
gttattttaaattttacacatttttatttttaataataggagtaaataccttcccacaacaatataatgaacattacaggaaaattaaggcaacttattatttacagaatgcctttctgtgcaaaacaggacactatactcttcctacacattaaagcattaaagattaaaataactctaaaaggtacttattatcagtgtctttactgaggcaattaccagtgt

SEQ ID NO: 324749 - DNA, 772 bp, Homo Sapiens
  misc_feature (148)..(156): n is a, c, g, or t
  misc_feature (479)..(519): n is a, c, g, or t
  misc_feature (533)..(663): n is a, c, g, or t
cggcacgagattaataaaaatttctaacctttgaagtagaattgaaatttaattttatttactccatgtgcacattttcctcgtttagtcagttacttagattcattgaggagagatgtatttgataatgtctctcacgttaaacatnnnnnnnnngtaaatttgaaatctagcttatagatttggactttattaactcagtcaaaacataaaatgaattgctggaattcacatggtgggaaaagtatcttagaaataagatagtaggcatttgggagcgagataaagaaatattaaaattttcatgtagatttggctcatgttggcctttaatgataaatgccaatttccttctatttgagtcagcaaattttagaacattttatgaatattaaggttcttcacatatcaggcactataggaataaatggatagttaaaatatgtgtctgagttaatacagaattgtttctcctgccnnnnnnnnnnnnnnnnnnnnnnnnnnnnnnnnnnnnnnnnnaaagacagagtctnnnnnnnnnnnnnnnnnnnnnnnnnnnnnnnnnnnnnnnnnnnnnnnnnnnnnnnnnnnnnnnnnnnnnnnnnnnnnnnnnnnnnnnnnnnnnnnnnnnnnnnnnnnnnnnnnnnnnnnnnnnnnnnnnnnctacacaaaaattcttaattttgagaaagtccagttcatcctgtttttttctttcattgcttatgcttttggtgtcatatgaaataaattattgcaaaatgccaaataa

SEQ ID NO: 324750 - DNA, 1295 bp, Homo Sapiens
  misc_feature (147)..(147): n is a, c, g, or t
  misc_feature (409)..(409): n is a, c, g, or t
  misc_feature (476)..(486): n is a, c, g, or t
  misc_feature (867)..(887): n is a, c, g, or t
  misc_feature (1218)..(1218): n is a, c, g, or t
  misc_feature (1268)..(1268): n is a, c, g, or t
ctccgcgagtgaacgcgagggaaggaaagggtgggatgttgtcgccgcgctggcggggagtttgctattggttttagtgggttcccgcgtactttgtgaaaatggttcttggaagatgggtgggcggcggtgggctttgttaatagncaagtggtggcggcacgtttcttttccatgataatgccaccacccagagggcaggggctcttatttattttctataattagtctcggctgcaataggacgcccatttgctcgataggaatttttggttggattagtccgcttgaaaccatcgcccctaatgaggaagtgtctgtttagaaagaaccacgtaggtgcgttgtcacgcgaggggtttcttttttgtttgggtgggaggagttaccacgccctggggtgcattgntgccggggcttttttggtagggataccagtgtaggtccggcgttgttggagttcgtcaatggggggnnnnnnnnnnngcaaccaaatggtttttgtagaaatattttcttgggggcaccggtagggggccccaccaagagttccaatggggccatgttggacatttttgcgcgcgggggcggctgttaccttcacacaacaaggttgggtgagagggattgtccttgttcgatgtagcaggacctctcttattcagcacatgttatatccggtatcaaacccattccatgggattaaaaaatttccagtctccatgttgccattatgtgatttcttgcttgccatgttcatttttatttaaagactcagaaacacaggcatcatggtttgtcatcactgacaagtcttccaaaatcacacgctgacatttgtgtctaacaaaaacacttgggataggnnnnnnnnnnnnnnnnnnnnnaactggtgcaaagtacaaaggatctcccagtcggctgagcctgttttgaagtgcccggcctggcatcaccccatgacggatcgccaggatgagcacccgttggccgccatcctctctgcctccctctgggcagaggcccctggtggcctgcagtcctgtcccctcggtgtccactggacttgcagccattggctgttgggacttctaccatgctcctcaaaggaaatctctgtggccccccaaggccactacatggctaagatgtgtacatcatgggggccaggatgaaacataagggttagtttcatcttaaccggccaaacatgtgtancctttgaaggcaagatggcctgaagaaaagggctaaattctgctcctggntcttctctgcaagctacatcatcatga

SEQ ID NO: 324751 - DNA, 435 bp, Homo Sapiens
  misc_feature (353)..(366): n is a, c, g, or t
aatttggttcttgaatatgtattttttactgaaaaaatcattcataaattaacatacaaaaatgtacaaacacatgagtaaataatgtaatgacaaaggactatttttgtgaaaagtgttttttaaaacatctttagatttcagtgcaaaaatgtacccctggcacctcttaaaacgtaagagcaagctcaaaaacacgtagtattggaaataagctagctacgctcaatgccatcgtcaatggtgagtggatacaatcaatccatgtggctcctgctcagctattaatgtctgtggtagaggatctctgacaagaggacctattatgtcaaaatgagtattcttgcaaatannnnnnnnnnnnnnaaaacagcatgaacaaacggggacactttctctgcacacagcaatcaaagacaagattaaggggccacc

SEQ ID NO: 324752 - DNA, 535 bp, Homo Sapiens
  misc_feature (477)..(477): n is a, c, g, or t
  misc_feature (479)..(479): n is a, c, g, or t
  misc_feature (481)..(481): n is a, c, g, or t
  misc_feature (484)..(484): n is a, c, g, or t
ttttgcaagttaaattacatttattatataaagagatcctataacttgatacgaaaaacaaagcaactccaacagataacagaagggcaaaaggacaggaacatctgatcaaagaaacacagctaccgatagcacacaaatattcaacctcattaataatcaaaggattaggatgcacttcttgcttattcaataaagttaataatttctaatttttctacttttcaaatgtactcaaatgtgctatttttagtaataaaaaactgagtaattaaaaaaacatagaaagtatgaaaatttctgccaatgcagaaatcataaacagcattaaaatgaatcaacacttgtatgggcagtaaggttcagacccctagaagccaattcattttgccttggttcctgagttttattatgggattgtcaataaggagaaagttgttcctgatttacatgctgacaatcttccaggtatagggngngnttntttgtgtattacacacacacacaatgtatatataaattttttttcttcagg

SEQ ID NO: 324753 - DNA, 1417 bp, Homo Sapiens
  misc_feature (292)..(292): n is a, c, g, or t
  misc_feature (620)..(621): n is a, c, g, or t
  misc_feature (625)..(626): n is a, c, g, or t
  misc_feature (631)..(632): n is a, c, g, or t
  misc_feature (638)..(638): n is a, c, g, or t
  misc_feature (718)..(736): n is a, c, g, or t
  misc_feature (1163)..(1163): n is a, c, g, or t
  misc_feature (1385)..(1385): n is a, c, g, or t
ggggagtaagaggcccctccatcaaggtctgaccccgatggtggagactcacccctgcctgcttctggaggcccactgacctgtaaggtctgtggcaagagctgcgacagccctctaaacctcaagacccacttccgcacgcatggcatggcgttcatcagggctcggcagggggctgttggggacaacaactagtctccaaggcctgggactgaccagccccttcctcttggagcctggttttccctactgctgcctgatccctcggctggggagttttcattaacattantattttgttaattcctgtctctccaacctgaagaagaagagcatttgaggattattctagttatttgcaacctccctttgggtttggccctggagtcctagtagagtggaccctccattcctcctttctgagcccaacactaattaattttatgctcctgctgcagaacccccagtgtgggcctaggggtaggaggatgggacttaggtatgcctgctagacaggttcagggaaggactgatgggtttgtcatggatggacacacctctccacaatttcttcaggtgtggactggaactttcctcctctaggccgggcctgcctagtnnccanncccgnncccgcncccgcccaaccccaactcactggcactcaagccccctacccctgcagtgcctttcacttctttttttccccagaaatccnnnnnnnnnnnnnnnnnnnttggtagggatgagtcctgtcaagggggccacaggagaggaggggacaggctctcaggaatcctttattcttgtagtaataataatactaacaaacagttggggaactagggagaaaaccagaccattaaaactgtttgtggtcgaatctccattcaggcctctctttttctgtgacttggacaatgtggagttgaagcgggtgagagaacatggaaggcccgcccttctcagggaagaggtggtagtgaccaagacaggcagggaaaaagcaaacttctatgtggtgccttttgtatcttggacactgaggcatccgttcatacctcatcacccatctccccctgcactcccccagaaaacctgggaaatgacacaagtgggctaactaagggactttatttcaaacaaaaattaaaattaaaaanttgaggagctcttttccctgggtttggggaaggagtcagggtagggaattccacatggctaggcagtaccctcagtacactggagggctgtgggaattcccttccttgcccatgatggggaacctcagcaagtgcagggcccacgcagcgcccgccagcaaggggagcttgggccaggggtcggtccctgggaggggtaggtccctgggaggggtagagctngggcagcagcatggccagtgcaaacccacagg

SEQ ID NO: 324754 - DNA, 1399 bp, Homo Sapiens
  misc_feature (75)..(192): n is a, c, g, or t
gtactggccggaatttcgggatatcgtcgacccacgcgtcgcccacgcgtcggtcgtgcgccgctgtaggaggannnnnnnnnnnnnnnnnnnnnnnnnnnnnnnnnnnnnnnnnnnnnnnnnnnnnnnnnnnnnnnnnnnnnnnnnnnnnnnnnnnnnnnnnnnnnnnnnnnnnnnnnnnnnnnnnnnnnntcgcatccatatttttgaaaatctgtctatggttatgagttacctggcaatgaacggctgacctcgcgagaacgaatttgatcgtcaactacctccctcagaagcatgacccaggatgagttaccaagcctgttcagcagcattcggtgaacgttgaatctgcaaaacttattcgggataaagtagcaggacacagcttgggctatggctttgtgaactacgtgaccgcgaaggatgcagagagagcgatcaacacgctgaacggcttgaggctccagtcaaaaaccattaaggtgtcgtatgctcgcccgagctcagaggtgatcaaagacgccaacttgtacatcagcgggctccccggaccatgacccagaaggacgtagaagacatgttctctcggtttgggcggatcatcaactcgcgggtcctcgtggatcagactacaggtttgtccagaggggttgcgtttatccggtttgacaaacggtcggaggcagaagaggcaattaccagtttcaatggtcataaacccccaggttcctctgagcccatcacagtgaagtttgcagccaaccccaaccagaacaaaaacgtggcactcctctcgcagctgtaccactcgccagcgcgacggttcggaggccccgttcaccaccaggcgcagagattcaggttctcccccatgggcgtcgatcacatgagcgggctctctggcgtcaacgtgccaggaaacgcctcctccggctggtgcattttcatctacaacctggggcaggatgccgacgaggggatcctctggcagatgtttgggccgtttggctgccgtcaccaatgtgaaagtgatccgcgacttcaacaccaacaagtgcaaagggtttggctttgtgaccatgacaaactatgaagaagccgcgatggccatagccagcctgaacggctaccgcctgggggacaaacatcttacaggtttccttcaaaaccaacaagtccccccaataactcgctcatgctttcctctcgtacggaatagataattaagagctcacaggcacgcttgcacaactctctcctcgtttagctgtacaactcattttgcgccaattttccacaaagtgttcgctcttcgtctgcactgacgaagtgagaacggtctacatactctggcatgcaaccgacatgtcaaatgtcgaaatccacacagtagacc

SEQ ID NO: 324755 - DNA, 548 bp, Homo Sapiens
aaaaaacaatccccaatacatgcagttcagggttaagtatcacatttgtagcacattgttgagtctcaaaacaaaaatatgcatcacctgtataatcccatcacatctttttccagcctctacaatacctagttgggggtgttttcatttatacatccacatagctcagaagcatgttattaacggttgatctggcccgatgcttctccgccacctcccctgccctggtctccacctcggggttatttttttctaaaggcaggatgttactcagtcttaatttattaagatcactgacaaactttggcttcttgtgtgctcatgtggtccctgcttttgctttcggaagggtttatattgaaacgactgtgactctgatcggttattatcccctcattttttgtaggaaataagtttgcttgtttctgtgggtgctcacacagtaacacaggttcctaaagtaaccatttaatctgaactggtattaaaggaaactgttaaccaggctctcttagatctatttcagttcatataaaaaaactcttccc

SEQ ID NO: 324756 - DNA, 823 bp, Homo Sapiens
  misc_feature (252)..(252): n is a, c, g, or t
tttccaaggtttaacgtttttggacccttgttccacaggcacctgctcccaagggcctccctccctgagttcaaacgcccaagacagagttgatctgattggctagttccggcccaagccttacctgattggacagagcttggtgcacaaacccccctcataggctgctggtcagagcctgtgggggcagtgtggtcaggtgcccaatcaagctgtgagcaaggcctgtaagtgcaggtgcctgagggctcncaggtcagagttagctggggactggggtcactgtcctgctggggtggaatgttgtttgagccattgcaacgtgatctgcctaggaaagatacgtggaggggtcggggtagggggttgagccccttgcaggagggggcatgccagacctaatgggcacgggactctgcctctctgtgtgaatgtcaggcgcagggagcccagacgaggtggtgccaggtaattaattcgttcatccagggtatacgacggggtgttgggcactgtgtctggggcagtgaaaaataatgaggccctgccctgtggagctgcccttctggaggccagtgtgccagtccctgagctgcagaggagacccctccagtggagggggcagtgggaggtcccaggcctggcagcatcagggcccaccactaggcggggctgctgcctgggcctcggactccagggtttactccccatcagcttctcttgtgggtctgtgaagccactgtgggaagatgcagcaggcatccactttgtggggggatctgtgcccttacttgggccccagcattaaagatacagcagcccc

SEQ ID NO: 324757 - DNA, 1137 bp, Homo Sapiens
  misc_feature (464)..(464): n is a, c, g, or t
agggtcacgagggtgaggttggcggatgtgctagtaggggtcgagcgtcccacctccgcggcgtgaacacccaggcgagtacaggcaggcgcgagcgagggtcgtcgtcgcgtcagcggccgtgggggcggagtacgcggccgcggcgtggcgccggcgacaccctgggcggggggggcaccgggcgccgcgcaccacgcgtaaactcacgaggccgagacgccgcgcacaaatgcgcgggcagggaaataggctggggcggggaggtagtgggtgcgaataacgcgggagccagcgacaagcggcgccgacgggcgaagtggcgcggcagtagatctccggcgcacagtcgggggggacctgttcagtacgggacccggctcttcctctggcgctcgcgctgcgctgctctgtccttgtgcccaggggtggggggcccaaaggtaagcgctgatctgctacgnggggcatcacgggccgcctgcgcggcagcgcaacacagggggggagaaaatgtttgagcttggggaactcctccaactggcggcttcgccgaaccaagtgttgtgttaccgattttagaccatgggagttcaattagtacgattatgttttaagatccctttcagctatgtttgggggtggattttttgtgtccatgaacgacccagtttaagggccgataaatgttggtgcgcggtaaaacccccaaaatatcccccaccttgtaaggccacaggaacaattatattcatgcccgagtttaccgcacataaatggtgctctatatatcccaggttgtatacatatcagatgactccgttgtctacaaggtttaggatttacttgagcaacagtgaaatagggtaatatttatatacaactattttaataaaaaataaagcaattgtaaaatgtaaacttaattgtcaaaatattctttaaccactttagccaatatccacacaaattactgttcctttcaaaagaagaccaccacaaacgccatcgttttctagaagacggcatttccagaatctggtaggtggtgatgaggaacaggtttccagtacgtgttatagtaccgccagcttacccaaaactgctaatgccgacagtttcgccattgaaaaggcc

SEQ ID NO: 324758 - DNA, 1127 bp, Homo Sapiens
  misc_feature (60)..(60): n is a, c, g, or t
  misc_feature (99)..(99): n is a, c, g, or t
  misc_feature (248)..(248): n is a, c, g, or t
  misc_feature (269)..(269): n is a, c, g, or t
  misc_feature (300)..(382): n is a, c, g, or t
  misc_feature (385)..(385): n is a, c, g, or t
  misc_feature (390)..(390): n is a, c, g, or t
  misc_feature (392)..(392): n is a, c, g, or t
  misc_feature (396)..(396): n is a, c, g, or t
  misc_feature (403)..(405): n is a, c, g, or t
  misc_feature (410)..(414): n is a, c, g, or t
  misc_feature (416)..(417): n is a, c, g, or t
  misc_feature (420)..(421): n is a, c, g, or t
  misc_feature (425)..(443): n is a, c, g, or t
  misc_feature (445)..(448): n is a, c, g, or t
  misc_feature (453)..(464): n is a, c, g, or t
  misc_feature (469)..(471): n is a, c, g, or t
  misc_feature (473)..(474): n is a, c, g, or t
  misc_feature (476)..(587): n is a, c, g, or t
ctcgcgcgccgggctgcctctcccgggccgttgcgggtggcggcgggcggccgcctgtcncggccccgccgcctgttccccgcgcggggttcgtccgtncgtccggcgcttttggcgcccgccgcgcgcgcgtttcgtgcggtgggtgcgtgcgtggcgcgctctgcggtgcgcgggctgcgtctctggcggccttcgtctcgcggcggcgttcgcgcgccgtgtgctgcgtcggtctttctgcgtgnggcgccggccgtcgggggggnggcggttgtgtttggttgtcttgctggtgtnnnnnnnnnnnnnnnnnnnnnnnnnnnnnnnnnnnnnnnnnnnnnnnnnnnnnnnnnnnnnnnnnnnnnnnnnnnnnnnnnnnttnttttntngggntgtggtnnnttttnnnnntnnttnngggnnnnnnnnnnnnnnnnnnntnnnnttttnnnnnnnnnnnnttttnnntnntnnnnnnnnnnnnnnnnnnnnnnnnnnnnnnnnnnnnnnnnnnnnnnnnnnnnnnnnnnnnnnnnnnnnnnnnnnnnnnnnnnnnnnnnnnnnnnnnnnnnnnnnnnnnnnnngactcgcacacaaggacggtttattggctagagagcaaacgcaggcagaagtaaaaacaccagataaaaagtgagtgtggagaggtgaagactgcggccgctggacttggcttgagctgtgaggggtgggaggggaggatagcaccggaagatgctgctccgggcccaacaccagccctggccaggctctcccctcccaggggcagcgcccagtccccaggggctgccagagccctgtgtgccttgccgcattcccctgatgcagcttttggcaactgaaaggcagggctctcgctgagtgcacctggggcttcctgagcccatctgcggcggccccaccctggcctaggtgctgagtgcagctgctgcagacagcccctccctccttagtggagcctggagggtggggtgctcggggatgcaggcaggggcaggggctccagaggcacaggtcagaagcagggctgggggaggggtggagccattcagcctcaggcaccctcacagctaggtgactaggggcagggacagaatggggcc

SEQ ID NO: 324759 - DNA, 893 bp, Homo Sapiens
ggtctgtggggaccggggggccttggtcccgggcccagggggaattggaggagggtcccccagggaggccccacagggcgggaaaggccaggcccgcgttcctttggagtttttctttttgggccttttcccagtgcccactccagggggggtggccttccttccttccccagaaaggccggggaagaagaagggggcttggccccgaggacccaccatttcttctgttcttgggcaacccaagaaaggcaggcggaccataaaaaccccaagaggcgttttaaaaaaaggattaaaagggccttcggggccggtgaaaggcagcgggcttcttcgggggctgggccagcgctgggcggggacaaaggtgcctcactggggcccgcgggccactcagtccctcccgcctggttccccgcggaggctgcagccacttgtgctgtgatgtggcggctcccggtgggcaggctcagaggtattcctgtagaaagtgcagcaacgtgacttcatagtgctcgcccgactcggggcagcgaatactgtgtctctcgttggggtagatctggagctggtaaggtttccctgctcggatcagttgggagacgaggaagtttgtgtggaaaaagtgcacgttttcgtccaggaagccgtggaggataagcaagcggttgggctcattgggcagcttctccacgtgcagggccacggaacccgcctcatagccgtgctggttgttctcagggacgtccatgtagcgctcagtgtaccctgtgtcgtaggccatccagacggtgaccggggcacccgcgatggccaccttgaacacctggggcttgtggattagccccatgagcgagaggaagcccccgtaggaccagccatggatggcaacc

SEQ ID NO: 324760 - DNA, 712 bp, Homo Sapiens
  misc_feature (505)..(505): n is a, c, g, or t
ttctggtacccattaaaggcccacaccccaaaaggcaagagaagctccagggagggggcccccagggtttgggaattgccccccgggaaggccggggccggggaaggccccgcgaagcgggtgagccagccaattcccaggggcatttcctgagacgggccaaggccattgctcccagagggatgaagtcagctgctccatcccccacgggacccaggtccatttcattcatcctgtgatgcatcggctgggggccaaatatcagagaaaggagcgctcgggtggtggggaacaggcatcaggggtttggcgttccagggtcacgtgctacccaccatcttgctcacaaccgctgcaccgacgcggccactcgtccccggggtcgcccggggccgcccaacttctcccgagggccggtggccgtgcaccccgccacgggttggggcatctcggggaacacctggggccttccgtccagaagcttcgggaagggggctgcccaacnctggcagctgcgcttggggcgcacgcgcctgccccactgctttgttcctcatccgggcagagttcgcctcggggccctgcccgtccgctcggccccctcaccccgggggccgctgccctaacgtttcccgtcccgcccggcccttcccggcccgcggcctcctctgggccgcaccctctgcggcgcgtttccggatcctcagccccc

SEQ ID NO: 324761 - DNA, 888 bp, Homo Sapiens
  misc_feature (164)..(164): n is a, c, g, or t
  misc_feature (208)..(208): n is a, c, g, or t
  misc_feature (257)..(261): n is a, c, g, or t
  misc_feature (264)..(266): n is a, c, g, or t
  misc_feature (272)..(274): n is a, c, g, or t
  misc_feature (286)..(292): n is a, c, g, or t
  misc_feature (295)..(295): n is a, c, g, or t
  misc_feature (297)..(300): n is a, c, g, or t
  misc_feature (302)..(310): n is a, c, g, or t
gggggggaatataccaacccctttggtatagtccccggggtttctcctggagaaccagcaaatgacccacggcttccataacccctcggggcgccccccccgcccaacggaatgtttttttaagaaatattttcgcgggggccagggggcgcggcccccccaanaaaaccgctttggccccgttttcttccccctaaggggggtcggnggggcaaagggatggtttaggaaagtttttttgttggggggtggcgggnnnnnaannntttttnnnttgtgttttttnnnnnnnttntnnnntnnnnnnnnntataaaactctaaatttattcaaaatgttaaaagattttgttctccctccaaaatattttacaattaaaaaaatcaaaactatatcctattttctcagccactgtacaagttgctgtttccatctcaggactagtctctggccctccaacactctgtccctccctcaatcccccacctcctttcaatattgctgttaagtttgtttataaaaccctccaccctctctccccaccccataccctgctctgctctgcccagagtggtgtctctttgcgattccaggccgttgggtgcaggtgaaagccgaatggatgggtacggatgttacacaagcaacacctgaggggcaagagtatgctttgtgcttcctgggagaatcacttttttcttggtcaagtggaggatcgttcttttttgtcccatggacacctgttctgagccaaatatttggcttatagttgcccacagccatgtagctctgcttttttctgcacgttcctctgggcgtgggtccgtgacagatggctcttatgactgtaccatttgtttgcctgtggactgttagggacaggaaagg

SEQ ID NO: 324762 - DNA, 881 bp, Homo Sapiens
  misc_feature (484)..(484): n is a, c, g, or t
  misc_feature (507)..(507): n is a, c, g, or t
  misc_feature (866)..(866): n is a, c, g, or t
cttttgaagactgctttcactgtccttttcctttacacaaaagactctgcttcctttctccttttccaagttagttttctctaaaagtttatttcctttcttcttatgctttccttgactgaggatttggtcatcttcatcagcagaaatgtcctccgcaaaactgagttgagatatactgcttccttcagaaaggtcttggaatttcttgatgagtttggagaggcgcttcctgttgaagtggggcgtgttcttcctgctggtcatttccagggagtcgatcagcaacagcccttatagtcaaactgggagaagggggccctgtgtccctcaaaggtttcacagtcatctcttcctctttcatcactgagtccatcttttctggaatggtttttgcccagtgctgtcttctttttactgacagctcttctcaaggatacctcattttcaggtatctcctcagcagagaggtcaccatcacccnacttttgtccttctgttcctccnatcgtctccttcgggcaacaaaaggagactgaatctacgatagcttcgaagacaccccgagctatggtctgtaccagggtgtggtccttcgtctttgcagcaattttgcagaatggatcgataaacttgagattctgatctgctaaaagctccttccccccgactttggagagttcatccaggtaaatatcaatgaagtggaatctcactccattaggagactgactctcaggacacaggacctccttcatcaggacatccaagaaaaccttgattcggctttcttcccagccatttcgcttcaagacttcaaaggactgcctcaggaccagacgaatcagcatatagtattttgctcngcgtagcctgtctat

SEQ ID NO: 324763 - DNA, 747 bp, Homo Sapiens
  misc_feature (613)..(613): n is a, c, g, or t
  misc_feature (677)..(677): n is a, c, g, or t
  misc_feature (682)..(682): n is a, c, g, or t
  misc_feature (725)..(725): n is a, c, g, or t
  misc_feature (733)..(733): n is a, c, g, or t
agcccagccccactcccaaaccctcataatgcacagaggagcctggccaagccttgcttccagagttggtaaatgtagaggcagcaggaagaacagggtagcagtctaactttcaaagacagaaaccactggattatactcctacttggaaaggagctgaagactcatccttcaacagtttgtgcctggattttggtcctcatttcctccctatactgagtaaccctaggacttcaatttaaagtccctggggttatgcttcctgggcctggcaagaacccctttgcaggtctcaccttcagcgatggaagggataagggtcatgaacagcaaacagagcagcagcagcatgaaggggaaggcagcagaagctcaagcactcagagggaacaagaaaccgtgcaaggaaactgtttatttcgaaaggattttgcaataaacatagtgaataggctccaggcagctgctttattcttctccctcatcctcgtcctcataggagtcgatgcccacctcctcataatccttctccagggcagccatatcctcacgggcctcggagaactcaccctcctccatgccctcacccacataccagtgcacaaacgccctnttgggcatacatcaggtcgaacttgtgggtccagggcgggcccagggcttcggcgatgggcggntcgtnttgctcagcatgcacacgggcaaggttgcaccttgggccaggntaaccccngggaccacagttgg

SEQ ID NO: 324764 - DNA, 1180 bp, Homo Sapiens
  misc_feature (364)..(364): n is a, c, g, or t
  misc_feature (985)..(986): n is a, c, g, or t
tcttcaggcaacccaccattacgagtcattgttaaagacgccctcttctgttcttgtttatcagacatccttcgcttcatttattcaggtgcttttcagtgggaagaattggaagaagatatcaggaagaagttgaaagattctggggatgtttcaaatgtaatcgagaaagttaaatgcattttaaaaacaccaggaaagattaattgcctaaggaattgcaaaacctatcaagccagaaaacctttgtggttttataacacttccctcaagtttttccttaataagccgatgcttgccgatgttgtcttcgaaattcaaggtacgacagtgccagcccacagggccttcctggtggcccgtntgtgaagtgatggcagccatgtttaatggtaattacatggaagcaaagagtgtcctgattcccgtttatggtgtttccaaagagactttcttgtcatttttagaatacctgtacacagactcctgctgcccagctggcatattccaggccatgtgtctcctgatctgtgccgagatgtaccaagtgtccagactgcagcacatctgtgagctgttcatcattacccagctgcagagcatgccaagcagggaactggcatccatgaaccttgatatagttgacctgcttaaaaaggccaagtttcaccactctgattgcctttcaacctggctacttcatttcattgctactaactacctcatcttcagtcaaaagcctggaatttcaggatctttcagtggaagaacgcagttttgttgaaaagcacagatggccgtcgaatatgtacttgaagcagcttgcggaatacaggaagtatattcactcccggaaatgtcgttgcttagtaatgtaacctggagcttttatacactacatttcttttttattattatgaagaatgggatacctccaggttccagtaaaattcttctgacccccgcggggagagcttgcgggagnnttccctttgtggccgccttcggccctcgaagagctttctaaaccattcgttttgccgccggggccccgtaagtaaatgaaacatggccataacctgtttcccaaggaaatcctgggccatgaactagtggctgggaattcccacccaataaaaaaccccccgggggggaaacccgaagggtttttaaacaaatc

SEQ ID NO: 324765 - DNA, 609 bp, Homo Sapiens
  misc_feature (551)..(551): n is a, c, g, or t
gggagtggagtaagatgccctcccacttttatcagtttagtagtagtactgagaaaaatcccttcagctctaagaacactgaaaaatccaccgattttttgggtaagcttcttggcaataccctgtggatctgaaacagctaaaaaaatgaatttgaattgcaccagataggtcaataccaagcttctgattcctcctcacatatgaaaagtgaaagttgtgagttgttttcctcttatttaaacattggcctattataatctgtgttggttatttttctcctgtaagcatcctgatttttctgtaggaacttttctttggcagaccaagtgaagactcaggaatggtgtgcattataaatgacacacattgccacttgtgtagatatttttaagttctttggctaagtcctctcctaactgcctgtcctctggttagggcccctccctctccactagtgggtggaatgcatgtgtctgtctgatcagcatcactgcacacggaggtctaggtgagcctcttgctaagtgtcacacacactcttcccaagncggtgatgaggtaaaggtgtattctggaaatcatgaggcagagcctgtgccagaccct

SEQ ID NO: 324766 - DNA, 849 bp, Homo Sapiens
  misc_feature (159)..(159): n is a, c, g, or t
  misc_feature (167)..(167): n is a, c, g, or t
  misc_feature (171)..(171): n is a, c, g, or t
  misc_feature (176)..(176): n is a, c, g, or t
  misc_feature (470)..(470): n is a, c, g, or t
gggggggaactccaaagccccttttcacttgcccgcggtttttcctttggaaaccagttattgagccctttttccctttccttaatggggccccggccccccaaaggaagggttttgaaaagtttttccaggggccgagggcggcccgccaagaatctntcttctcnttcncattntgtggtgtgccaaaatcagaaccttacagtttattgtgaataaaccactcaactttgagcagatgacattgcctcaattaactttttcgttgaagagaaacaaagatatatggtaaattcatgaaaatactgtgtcctttctcttcccaccctttgtagggcagaaaaattctgcctgacctttcccatcttcctgatgatgttaacaaacgacagccactgagggcacaggaggggggctctacacaggccaagagctacaggctacagtctgaggcacaggaaaaccctccnagctccagcatccagggccacagctggacacaagtacagaacctggcagccctgcagcccagacaatgcccagggtgtgatttagggtgcagagctgcaactcagatcctgtgccatggcagtatcacaggaaggacttgacggagaggtgaaggctccagacgccaggatatttattccctgtgccaatacagcattcacacctgacctccaggtcctgcagcaggtactctcctcattcacagttagctccccactgttccattctgggttcatttgctatactcctaatctgttctcccaatccaccccacagtctctcccttgctggggacaacacaggaagagacaaaacctgaggaaggaaaaagggaacccc

SEQ ID NO: 324767 - DNA, 766 bp, Homo Sapiens
acaaggctttgtttgttttatattgcaaattagatatatgatttgttggaaagaatataaaattaaatatgaaggtatgtcacatacgcaatgccatatataaaccatactcctttacctttaactcttcagtatataatctttcagacttttttatttgcacatatgaagtatatacattcgtaaagtttttaatttaaaaattgggtcttaacagcatttttgaatagtgaatgtcttcaaaaatatgttgtaaacaatgaggaagtttaaaatgtctaatcacagtcacccactgtttagttggtggatattgtcaacctaatggtgttccatttccttttgcatacaggtatgtgaggaagctcgatgtcccaatattggagagtgttggggaggtggagaatatgccaccgccacagccacgatcatggtagggccagcctcaacctctatggctttagtctagaaactgaaagggactattttgtgtcttcctcctaaaaatgtgcattatgaatctctggtcagatttttcattacatttgcatttatgaaaaatattaagaaaaaacctgatggaataatccaacctgttgtaatctcacccttctctgaataaatctattattggttctttcatttatgtgatagttaatcacgtgctgccttgagatacctctcctatcaatgtttggaaacattattcatgattgcttagctttttatgtgttttctggttaacatattcaacaagaaggagctg

SEQ ID NO: 324768 - DNA, 1022 bp, Homo Sapiens
  misc_feature (558)..(674): n is a, c, g, or t
  misc_feature (740)..(802): n is a, c, g, or t
  misc_feature (819)..(830): n is a, c, g, or t
  misc_feature (974)..(974): n is a, c, g, or t
ggtgtggggtgagagaaagtccccaaaagcccctttgtgtccctatggccccggggggtctctcctgaggggaaccacaagcttatagggcccaatgttgcacacttgagcgttaaggggggggcccgtggggcgcccaaaaggaaagtggtttctaagagaaagcgttttcttcagggggcccgagggcccggcccaaacaagggaagggtaatccctctccgcggcgaggttttgtccgcgccatagtttaaggggcttttttaatgaaccaggtatttcctaaagggcaacttcatccgatgggtgaagttcccattccagtagtgttagtgtttcatgcctccaggtcttaataaatcttaataaaacccagaagactaggatgctatgttcggaatgtgccccctcccacccaattgatacattgaacccatcactgatgtagtattaagaggtggggtctttggcaggtgattaagtcatgagagaatatccctcatgaaggggattaatgcccttataaaagaggctgcgggctgggtgcagtgactcatnnnnnnnnnnnnnnnnnnnnnnnnnnnnnnnnnnnnnnnnnnnnnnnnnnnnnnnnnnnnnnnnnnnnnnnnnnnnnnnnnnnnnnnnnnnnnnnnnnnnnnnnnnnnnnnnnnnnncatggtagctcgtgcctgtggtcccagctatccaagaggctgaggtgggatgatcgctggagagcnnnnnnnnnnnnnnnnnnnnnnnnnnnnnnnnnnnnnnnnnnnnnnnnnnnnnnnnnnnnnnnagatcctgctgtatccnnnnnnnnnnnngcctggtccttccatcccttctaccataaggagtgttcattccctatggaagatgcagaaaaaaaggcaccatcttggaccagaaagccgcccttgccagacactgaacgtaccagcacctggatcttgcatttgccagcctcnaaaactgtgagaaataaattcctattatttataggttacccagtctaa

SEQ ID NO: 324769 - DNA, 762 bp, Homo Sapiens
  misc_feature (297)..(413): n is a, c, g, or t
  misc_feature (479)..(541): n is a, c, g, or t
  misc_feature (558)..(569): n is a, c, g, or t
tgcatatttacgtgctttttattaacagtattactaaggcaactcatcgatgctgaagtcccatccagtatgctatttttcatgcctcaggtctaataaatcttaataaaaccagaatgactagatgctatggtctgaatgtgccccctcccacccaattgatacattgaacccatcactgatgtagtattaagaggtggggtctttggcaggtgattaagtcatgagagaatatccctcatgaaggggattaatgcccttataaaagaggctgcgggctgggtgcagtgactcatnnnnnnnnnnnnnnnnnnnnnnnnnnnnnnnnnnnnnnnnnnnnnnnnnnnnnnnnnnnnnnnnnnnnnnnnnnnnnnnnnnnnnnnnnnnnnnnnnnnnnnnnnnnnnnnnnnnnncatggtagctcgtgcctgtggtcccagctatccaagaggctgaggtgggatgatcgctggagagcnnnnnnnnnnnnnnnnnnnnnnnnnnnnnnnnnnnnnnnnnnnnnnnnnnnnnnnnnnnnnnnagatcctgctgtatccnnnnnnnnnnnngcctggtccttccatcccttctaccataaggagtgttcattccctatggaagatgcagaaaaaaaggcaccatcttggaccagaaagccgcccttgccagacactgaacgtaccagcacctggatcttgcatttgccagcctccaaaactgtgagaaataaattcctattatttataggttacccagtctaag

SEQ ID NO: 324770 - DNA, 1238 bp, Homo Sapiens
  misc_feature (108)..(122): n is a, c, g, or t
  misc_feature (435)..(465): n is a, c, g, or t
agcacaccccgttttcgaacaccctcttcaccagaggagaccccacccctcttggccgggcgccctttagaggaaaaaagaaatttccccctgggaaatccacacctnnnnnnnnnnnnnnncttccccccccttatatatttcccgccccccttggggggaggtttaaggcgcgggcccaaatccatggaggtccaggagtgtttcacggacccagccctggacccagccaggggggaaacccctatttttcttctataaaaatcccaaaaaatccagggggggcctggggtggcaatgcaccctgtaattcccaagtttcttcaggaaggttgagggcaggaggaatcgcctgaagcccgaaggttgcaagtgaaccggagaaggcgcccattgcattcctggctggggcaccagagcaaggactccgtctcnnnnnnnnnnnnnnnnnnnnnnnnnnnnnnnttcacctgggatcaaagcagcagggacagcctgcgctggagccgccagaacaggcaggcgggcagctccgcaagaccgagcaactccaggacgggagacgagaactggcagctgacatgaccctgtgaccaggacattccaaaagactgggggcccttcccaggcctcttctttccgcctattattttaacaaagtccatgctgccagaaggcaagcctacctcgaaacacctggcacattcacaagctaccaaagggaggagggtgaacaggctctgatacttggagtagaggcccaagcttcctctcccacggttttccaccgggaacgaagacaaagccaagccctgtgcagccacaggaagtcccaggaagcacctgtgagaccccgcacacccacttcggagggtcccagggctgggaaagccctcctctcaggggctctcagctcatctgggacaagacagagcccctgctccccggagggcaagctgggaccagagaagccaagcacccatatcagtcacctttccaagtgtcctcgataaagaagagagtgtcccgtgtgtcccaggctttcctggcatgcgccagcccccagaggaatccatggcgccacctgggaaggagcgcacagcagaggttacccagggcacttcctgcgttgccccagcacaactcagatgaacaaagaccaaactaaaacctgaagacccagacacagggaggggaggtcaggtccggtcagtccctaggggagctgcttgggctcc

SEQ ID NO: 324771 - DNA, 1042 bp, Homo Sapiens
  misc_feature (22)..(22): n is a, c, g, or t
gttcccagcatgtctcgtcacngaaccacaagccccaccagaggcgctggttccccgtctacctactgttctcccatcagcgactcagaaaaatccaggttaaacactcaggcagtctttcacatttaatccacaaatatttaccgagaatttgacgtgccaccaggcgcggggctaggttcacaagatacagtagtgagttaggcacgattcctactaccagaagcttagagcatagggaagactaaaagtaagccaccgtctacaatagtaggataagtggagagtttctaggtccgtggagtttgttgttgaatatctgctccaggccttagaagccggcagcaattcactaaaagatcccggacttgtttctgctctgtatcccagccaaggagctccgtccccaaggtgttttgttagagtcagagacctctccttgggtgattccattcgtcagccccacaagtccccgtctctggcctttttcagggtctccggcagctctctgacagttccccttctgtctcaggtcgacacttattccaaggaccagggattactcacaactatccgccagagtttgctccgccctttctttttcctgtttaaaatccgcgggctcttagtgttctcggttcctagatttcctgttctgattctcgcgacagttgcgaggcctcgcgtgaagttcccttctagtccctatttcgaatttgagaccgggagagagtgtctgcccttgcccacctcctcagaacccctctggccagggatggcgcctacgtggctcgggagcccctgaatgaatgggcttggcccaacttaggggcgcattccgacgggagagtcctggctgtattccgaggctccagtgcgcatgcggagtcgatcccgcgcaggcgggcggggacggcagccgggtcttgtgggcggagcctgactaagtgccgcccccttgccggctgcagattgctatttctgccccccaccctcgcccatccccccgcgagctggactgcgccaaggcttctgtgagccc

SEQ ID NO: 324772 - DNA, 1405 bp, Homo Sapiens
  misc_feature (101)..(102): n is a, c, g, or t
  misc_feature (116)..(116): n is a, c, g, or t
ccggttcctagtgatccccccaacattttggccccaaaccaaaagtcaaccaatactttgaaaatttcgggggtggaaactgcagacgcccgcgtcccganncttcagaagggtcnccgtcagcaccacagcagcttttgattgagcgcgatgacgtcactgacgaagccgtctgcgccgatgaagtcccccgcgatgatgttggtgcaccgtgaacccggccccgggcactgctctcggacccacgcgctcagccgcggaaggttgggcagcgtcatcttctccagggactcggacgggtgcgccagaacgtactgcaggttctccgtgaggttgatgccggccacgaacaaccctcctgggcggccgcagctcttcatggtctccaggtatcggatgagggcctcggtcttcaccctgtttccccaccagtaggggactcctggccacagctcgtggtgccggcgcaaggagctctcgtcttcataggagacgatgacctgttggccccgggaccacagctgccgcagtgtcggcacctccccacgaggacacagcatgtccccgaagatgttcttgatacaggcgaccaggtactcgtgcaggtcctcgctcagcccctcgaagtttctgcaggccaggatgaccacctcgcgtggatgccgctccagccactccgagatttccgtgagtgtgtcttccaccaggcgccgttgtgtacaccatatggacaaagtgcaggttcttctccgagccctcccagcatgtgggctatccgcaggtccaggtaccgcaccccggcatccagctgctctgtgacgtccagtgcctgggtgacggaccatttcagcacgacagggcgcgtgatgcagggcaaggccttgttcagcagctgcagcagccgggactcctcgtgcgaaatgggggacttcttgttcaggcagtacgtcatcgtgtcgtggctccctgggatggagaggtggtggaggggcacatcccagagccggggacacagtgccgacatccagtcctcgttggcatttctgcagtgcagcctcgagaagctgttggaagcgctcacctgcccgcccatcagaggtgagccctgggcaaccttgagtcccacacgcagggggagttcggaattcgaattgttggtctcgagcccagaatgaaaggcctggtctccctgggccgcaagaaaggacgagatcctctcggtctgcagctcctggcggctgcccgcgttggcttcacaaggttctgtaataatcctgctgccttctcttccacactgaggccaggcttcccaggtggctgcagattttgttcttatttacatcttcccaaaagccttcctcccagaccctaagccaacaccagctacatgaactcagatcttccc

SEQ ID NO: 324773 - DNA, 535 bp, Homo Sapiens
cttctcttggttttattgtttggtagaaaaacaggctctttaacactgaataaacatctcacgaactgtcgctcctagattacaaaaagtcaaaaccaatttcctttgacgccgggcccttgaatctgacattcaagtcaccgtaatagaaaccagagctgctgaaccttacattctggaaggtgcttgaacaaaggcatgttaaggaccgtttaaaacttctagcatgtaagaagatccatctttccttccaacgcctttggataataacagcagaatcccggagatctgctgctgagtttgagaaggccaagtttaaggattccaaactccagccttcaatatttctgcagaaacttagagaagtaacctccccgtcctctccgctggcttccccaagtacagatgcaggatgcaggtctttcttcctgctacccaggcaccgaggactcaaaccatctcaccgtctcatcactgggcttcttcaatgggctcttggaggaagaagcttttcgtttttgccaatcttcagtcc

SEQ ID NO: 324774 - DNA, 901 bp, Homo Sapiens
  misc_feature (515)..(764): n is a, c, g, or t
  misc_feature (830)..(831): n is a, c, g, or t
tcacaatcttacggtgtgaccagttcaacagctcggcgaatattgcagtctttagagaagatgtcaagccctttagcggatcaaaaagaattccatccattgtttcttctcctctgaattctcctcttgataggagtgggatagatatcacagattttcaggccaaaagagaaaaggtggattctcaatatcctcctgttcagagacttatgaccccaaagccagtttccataggcaacaaatcgaagtgtttattttaaaccatctctgactccttctgggtgaattcaggaagactaatcaaagaatagataacaagtgcagtactggatatgaaaaaaatatgacacccggacaaaatagagaacaacgagaaagtggcttttcatatccaaatttcagtttgcctgcagccaatggtttatcttctggagtaggtggtggaggtggcaagatgagacgagaaagaacacgctttgttgcttctaaacctctggaggaggagatacagtctnnnnnnnnnnnnnnnnnnnnnnnnnnnnnnnnnnnnnnnnnnnnnnnnnnnnnnnnnnnnnnnnnnnnnnnnnnnnnnnnnnnnnnnnnnnnnnnnnnnnnnnnnnnnnnnnnnnnnnnnnnnnnnnnnnnnnnnnnnnnnnnnnnnnnnnnnnnnnnnnnnnnnnnnnnnnnnnnnnnnnnnnnnnnnnnnnnnnnnnnnnnnnnnnnnnnnnnnnnnnnnnnnnnnnnnnnnnnnnnnnnnnnnnnnnagagccaccgtggccctgcctgtcttccttcttggcttgcctggtttctcccttttttttgatggnntggattggggaaaggttaaactggtaaagttttttttaaatttcccacctggcctaataataaattaatc

SEQ ID NO: 324775 - DNA, 686 bp, Homo Sapiens
ccaagaataccttgttttattaccatgatttgtgaaaagcaacagggtagacagttcaaggaaggacacagacagtgccctgttttaggttccaaatttcttctttttaatgggtggtgggagctgagcaatgatgtcatccagaggccgttctactgccacgagtgttctttcatccaaaagatccatgaagagtagaggcttatatatcttagaaattttaaaagcatgagctgtgcgcctccggatgacatctgattcattcgtgggaggaaatggattgtagagtaaggttttgtcatttggaaggggcaatgacttgtcaatgatgcagaacatgtaggcatcatggagaaggatgtgcatcggtctcttgggatgaaaactgatgtgtgtgataggagtatccctttggagccaaaggtggtgaaagccctgcttctggacagtccggctccaatctgtatactgtttgtctgggatgctgtactcaaatacctgctggtccgaatgagcgatgacaaggttgttggtattgggggcaatagccatagcagtcactgggaaattgtaagcaggcaccgtgcagtgaagctttagctgttttacgttgtagacatggactccagcactggtacctgatgcagctagccaattcccatctggactgactgccaaaagacaca

SEQ ID NO: 324776 - DNA, 428 bp, Homo Sapiens
  misc_feature (53)..(53): n is a, c, g, or t
  misc_feature (383)..(383): n is a, c, g, or t
  misc_feature (399)..(399): n is a, c, g, or t
  misc_feature (414)..(414): n is a, c, g, or t
gccattgtgtcttttggcagtcagtccagatgggaattggctagctgcatcanggtaccagtgctggagtccatgtctacaacgtaaaacagctaaagcttcactgcacggtgcctgcttacaatttcccagtgactgctatggctattgcccccaataccaacaaccttgtcatcgctcattcggaccagcaggtatttgagtacagcatcccagacaaacagtatacagattggagccggactgtccagaaggcagggcttttcaccacctttgggcttccaaagggataattcctattcacacacattcagtttttcattcccaaggaggaccgatggcacatcctttttccatggatggcctaacatgtttttggcatncatttggaacaagttnatttggccccctttnccaaatggacaaaa

SEQ ID NO: 324777 - DNA, 1039 bp, Homo Sapiens
  misc_feature (741)..(741): n is a, c, g, or t
  misc_feature (807)..(807): n is a, c, g, or t
  misc_feature (849)..(849): n is a, c, g, or t
gggcgcccggggtgatgcagttgccccccgcgctgtgcgcccgcctcgctgcggggcccggggcggcggagccgttgcctgtagagcgggatcccggggctggggccgcgctctttcgcttcgttgcgcgccccgtgctcttcccgcgggagcaccagttcttcgaggatggggacgtgcagcgccacctctacctccaggacgtgatcatgcaggtggccgacgtgcctgagaagcccagggtgcccgcgtttgcctgccaggtggccggctgctgccaggtgttcgatgccctggacgactacgagcaccactaccacacgctgcacggaaatgtttgctccttttgcaagcgggccttcccttccggacacctgctggacgcccacatcctggagtggcacgattcgctcttccagatcctgtctgagaggcaggacatgtatcagtgcttggtagaaggctgcacagagaagttcaagacccgcagagaccggaaggatcacatggtgaggatgcacctgtaccccgcggacttccggtttgataagcccaagaaaagcagaagcccggcctcagcagaagccccaggggacagtggagagcggtcagaaggggaggccatggaaatctgctctgagcctgtggcagcctcccctgcaccggcaggtgagaggtggatctacagacatagaataccctctaccatctgctttggtcagggtgccgctcgaggatttnaaaagcaacaagaagaaaaccaaacaatgctgatagactcagaaaaggagtggggggcagtcaccnactgcctgggcgtggcatccgccttgggcctttctcccgacnttctggtgtggccgcctggggccagccctcgccatcctccccatccttgttcctcagcaaatggcattagcagctgtcatcagaagctgtgagggacccacagattttggaaacgccctggacacactattgggaaggagatgtggacggcctgtctcctcctgcagggcccaccctaagaatgtatttt

SEQ ID NO: 324778 - DNA, 539 bp, Homo Sapiens
ttttaataaatatgagcatttatttggcacccgatggcaatacaaaatcctggcagtgggagtggaaaggttctctctctcaaatacttccatactatgtcgacccaaaggcaggacttggcagcaaggctcacaaaccacccaaacaaatatttattgagcaccttgactactacaggcctagcattttgctagggaccatgggagatgtgaaggaagttatctcacacatgatatgtcttcaaggagctaaaaatgccagtggataaaagcaaaacacatggaaaaacaaagtacaaataataatccgtgtatattgtcaaaaggaacattttatcaaaaggtaggattgtagctaaggttggcttgccttcttccctcttttattcaacaaacatttaatgaaggcccactatgtgccaagcacttggtacgtgatggtgaataaaacaaacaaggtttctgccctcatttacagcctggtaggggagacagaaatgaacaagtaaaagtagcatatatataaactgcaataaatg

SEQ ID NO: 324779 - DNA, 1158 bp, Homo Sapiens
  misc_feature (25)..(25): n is a, c, g, or t
  misc_feature (522)..(531): n is a, c, g, or t
  misc_feature (1128)..(1128): n is a, c, g, or t
gggaagcccgcgataaggttaacgnctttttttcccacaaacacggtataagattctctccggggtataattctccagtggcgtgcccctctgctctctcccaaataaagggggccctctgggtaaataggcgtagacacaagggtgtggtgtcaatctccagagaagggaagggggtgtgtttatgggttaggggccaaaagggggttttttgtgggtctccccttctttgggtgcctctgcccctttggaaattcctcccccttccctgtgaagggggcacacgtgaaccccccccgggggccaactaatcttattggggcaaaccgggttcgcaggtcgccgcttttttccccttaaggcattcccccggccacatgtgggaagagaagtttttaattccttaccctcttcgggggaaagggggaaaatctcccttccccctatttcaagtcctattagccccattcggaaaccgggccttcccccgggtggatttccacggaaaccccccatttcggnnnnnnnnnngggaccaaaaggccacccattttttctattggcagaccccatgggggcccctggaacatgtgtttttcattccctggttatgtgcaccaccctcggcaatccacacggaagtcatatatggtttctttccccctggcaaaacaaggagggtgtgggattgggaggactgcacaaagcagtctttaattcctgtggggcagaggggtattcccctgggtgtctggagggagttaggggtttggaggaaagtgaagggggtgggacggcctccgtcctttagtcctgatcaaggtgaggagatgcaagtccattaaaaaaacatttgcttccaaccagactcctttctcagtggtgccggtcccgttctctatcccggtgtctcctcatgctcccggttcctttcttggaaataatcatcatgccgatcttcattatgaagcagatcccggtgcctcctgctgctctcccgggaccggctaggtgacctttcccgggagcgatgtcttttcctggaagagctcccactggcacccacactgtaggacttggcttcaatgccatgaagacagtccttaagagaggagatgaggacacggnaacgttcatcatttggcaacccgggtattt

SEQ ID NO: 324780 - DNA, 661 bp, Homo Sapiens
aatttatcttgcattatcatcttaccctctgtctcaatatacatgttaagaaggtctttccctaactgccagaccaagttggcttcaataggcagctcaacattcaccacctttattttgggctttttagcttctggaggctggtcaacttttttttcatttgctttgtcagcatctgggattttgttttcttctgaggtaagttcaggtgaagggggagactgtgaggtttgttgagcatcagtttgtacctggggctgtgttccagcttcactgttgtcttgctggacatttttatcagtgtctgggttttctggtggtctctgattcagacactccatgtcagcttcagaagacatttcattctcctcagttgggactttctccaccatagatgccgtagagatggtgaaaatgccatgggtgttgactcgcactttgacttttactctagatttttctccatctttctgtgcagaaacattctgaactacaaagcggcctatttttgcttctggatatggaactccttggggatcagaatagaaagcttctagctcaaaaggcccccttctcagaaaggtgagaactttggagaaaggagcagcatggtttcgactaaagacttcatgaacaccttcagtatcttcctgtgccgaat

SEQ ID NO: 324781 - DNA, 655 bp, Homo Sapiens
  misc_feature (370)..(370): n is a, c, g, or t
  misc_feature (430)..(430): n is a, c, g, or t
  misc_feature (551)..(551): n is a, c, g, or t
  misc_feature (564)..(564): n is a, c, g, or t
  misc_feature (577)..(577): n is a, c, g, or t
  misc_feature (620)..(620): n is a, c, g, or t
catgaggtttgttcctggcaaagcgtgtcaggctgaatacaagttccgctaaacagaagcatttccgagggcagtcctttaaatacaactttaaaatgagcctggaagtacaaaggaacaggcaaggatgggagagaaggctttgtggacagagctgccatagcccagcctttactccttaatctctagggaaattattgggggtgtaggtggggaaaggacaaagataactgcaagatattttatttataaaaagggtaactaagctgcttttcaaagaaaacaaaaagatggcaaacccagcacccagctctgaaagatctatttaaaccagcaagacaaactgacttcagctgtggcacccacaganactaattcctgggccagaagagacagtggagaactggtgggtttgggagaagcaagcccnttccccctatactgtgtctatctgcctccagcctgagtccagtccagtagtatgggtaaaggagagtatggcctgagggagaggggaagacagcaaacctaggcaggggagctacccagtntccgtttccgggntacatgccccaantccactctggggggagacctgctggggccgcagggtttctttngtccctgcttaccccgcacgtgcgtgggcttaaaa

SEQ ID NO: 324782 - DNA, 1236 bp, Homo Sapiens
agtacagaacgaagtacaaaggtcttgggggtgggaaggtccctcctgcaggctggagtagctggtgacctgacatcagggactgcgtctgagctcacttctgctgtgaacgtgtcaggcgaaacggcatcacttgatcctttgcccactacacagtcagcaacctttagtgcatttgaagtctctgtgagctctgaaaggggaagagactcttcaactaaaaatccagactgtgttgaaccaagtttagatgatatctcagaaagatctacagaagtttcaactgcacatgctctgtctgtatcaatattgaatatctggagaccaattacttttccttcagcatccgtcagattttcatcagagtctctctgataggatattctccgacgtttggaggacaacactgcagggaacccagactgctggcaagcgctgagaccttcctttctggtcaagtctgtcatctcggactcttttcctgcctctgagaattccagacagccggtcattttctcgttttcctttatggagtgaaaagctgactggaaggctgatattcgttctcttaaagtgttaacatttcgatacagtgcagggctgccctgggaaggagaatcttgtgccaaaggagatttcctagcattctttatattttgctgccgagcaatgaaacgaatcagatggtttgtttcaggagagccccgagcaccgactgcagaacgtcgtctacattttctaaggtaggatgatgactttcctgcagagttcctaacaaagctttcaggtgtaattcccaattgctctacggttactgtggaaaagttcaaaggtgatttaaaagtatctggtgtgcaaggattaggaggtaattcggcatgcttctgaggagtcacaatcttcccagttcccaaaatgaaagaggcatttccagcattattcattgcagactccttggtttcagggggcttgtcttttgaattggcatccatctctcacgccgcacctgaaggcccgccaggcagacaggcttactcccagagccccgtggcaggcgagcgtcgcgtcggccgctccttccagaccccggctcctctgtccggaagggctctcctggcaaagcacccgcagccgggagccgctcttcgaacccggagcccgaggtcccgacggctgacctggactcacagcccgcgctgatcctggcctgcgctctgcccggcagcctcctccccc

SEQ ID NO: 324783 - DNA, 851 bp, Homo Sapiens
  misc_feature (77)..(87): n is a, c, g, or t
cccaagtttttcccccggggtgctagcgccccccaagaaggtagtggcccttttgttagggggggtgaggacgttannnnnnnnnnnagaggcccattccgtggtgggttggaattaagttggtctccccttggggtgcagcttggaaaccgtaggccccccgggggacccacggggcggcaagccaggggttgcccggaaagccctggggataccccatttttttgggagcctgaggagaggcaccatgggaaggggttattgggagggagaagagcttggccctcatgggccatgtagagtggggaggaaggtggccttgggagagtaggctttcccagagaagacccccctgggagtagatgaagtatatgccattggtggggaccaggagagaattgttgctcaaggagaaaccatcctggagtaaggcacggtccgtgtttgctctccagagcagtgagttctgcttgctggggtctccaatgaggtgagcagcaggtttgagggtgctgtgggcaagatgcatcttggggtgctgacgggcagtctgggcagctgaaggtgtgaggccaacaccagggagcccctgggccccaggcagcagaaccagcagcagccccagaaggaggaggtgtagggtggtgccacgcacccttgggaggaagagacgttcaggtggtgtcatggggagaaccaaggcccaggcccaggcaggccggggatccaggcagcaggtgcaggagggaccgaggcccaggcagagggcaggacactgcggggcggtagtccaaagcacgaagcacgggcagcccaaggagatggggcaggagagcctcacctgctgtccc

SEQ ID NO: 324784 - DNA, 926 bp, Homo Sapiens
  misc_feature (72)..(72): n is a, c, g, or t
  misc_feature (74)..(74): n is a, c, g, or t
  misc_feature (205)..(205): n is a, c, g, or t
cgtccctcgttgaggagcaacagtggcacttctggatttcggtgtccactaaaatgacagtccaaccaccancncgaggcatcaatatccagagggttcttttcagaagtcagtgatgacaggttgtccacctggcctccagccaagatgatattcatatccctgaaagtgctgactacttgctgcagataattactggctcccnaccttccagcaattataaccaaagacaaggaccacacgaagttcaggggttatctaaaagacctacttcagtgagttgatgtctttctaatgttaaattctttggatccttaataaaatgaaagggttgtatttttattccttcaatttgagggaataataaagcaaaaccagattctccaatttctatttcctgaggtcgattgctacctgatcccattggagtcactacaattcctggggtcacaatcccaaggacttggcattgtttggggaatagcttctcaagggcaagtgctgtttccatactagttcttttccttgctctcttatggccacgacactcttccagactaatgaaagtttctgaatcagccatgtaaagaactgtatgtggtaagatgcgaacattctcaagctcctctgctaccacgcgaaccaagcaatgcccctccaggtggccggcctccgccaggcctgcggagatccaggttacgctccgatgggtccgcaatactctgcgcacacactccctccataagcggcacacgcaggccacccgcagcaacgccttggcgggcaggaaggtgagcacacgctccaccacctccgccaggttactcaacacgaaggtgctccgcgggtctacggaggagccgcggcactcgccgcagcagcctaccggctccattcctcaccagcccgccggaaccagtcctccc

SEQ ID NO: 324785 - DNA, 734 bp, Homo Sapiens
  misc_feature (115)..(152): n is a, c, g, or t
aattttctgcctttagttttatttcagaaaatatttgatcatttgttccaaaatgtacatttaaaaaatccatacaaaactgtaatttgttttaaaaccagacagaaacagtggnnnnnnnnnnnnnnnnnnnnnnnnnnnnnnnnnnnnnngacacccctccccccaacccttttttacatgaaagcataaatacggcaggtacaaattttccttgagttccttgttgaaatttggtccatatgaacaggctggagtagaaaacagacactttgtccacatttgcattatcagttgctcagggcaccagcagccttagttcatccttcagatgtttttttaaacagaggaaccgaaaaatgaggtttacagtctcatcacatgaacactcaaatctgtacccaaggaaacagcggtattatatttactgtcacagctagaccctatcaggtgaacagggctctccacctgcggctgttgcttcgcaaaatatccttcctctccacgtgaacaagtagctctagagtgcttttaggcagagtgacggtgatgtcatgggcaccacgccaatcttattcctggacaatgacttaagccccatcgtgagaatggttttttcctcttcaacacattttttaaaaatagacctctaagatgatgctacatgttctaaaagagtgccacagaaacccacccaggatcacaagaatgacaacaaaaggaaagtggctacc

SEQ ID NO: 324786 - DNA, 913 bp, Homo Sapiens
  misc_feature (147)..(210): n is a, c, g, or t
  misc_feature (220)..(332): n is a, c, g, or t
caataaagtggggggcaggggggcgaccatatattacggaaaagcggatatgtgggggaaaagaagcgtttgggggagatatggggggagggggttaattttggagatagcagggattgtgcggcgtagggcgggatgaagggaggnnnnnnnnnnnnnnnnnnnnnnnnnnnnnnnnnnnnnnnnnnnnnnnnnnnnnnnnnnnnnnnngcgatgagcnnnnnnnnnnnnnnnnnnnnnnnnnnnnnnnnnnnnnnnnnnnnnnnnnnnnnnnnnnnnnnnnnnnnnnnnnnnnnnnnnnnnnnnnnnnnnnnnnnnnnnnnnnnnnnnnnaccaggtgcttgtgtggagggaggggctttttgtggcagggagtcctgctttagcgggagagggaagcaacccgtcccctttacgggaggccacgggtctggggggttgtgagaaagaaggcagggggagggggcacggtgcaccagcaatcaggggtccattatgcgcacggatgctgtcgcggggcagctgctcttgcgctagtcctcccagcctcagcagacggagggcctcagggatgaggctgccaggatagcgccagagaagcagctcagagcaagggctcctgagtgggggcagggctggggagatggtcattgtgcaggctgagttgagagaagtgggtggccatgttctcctcagacagaaatatttgcgcagaggctcctgctcctcctccaggcggccgcttggtgctcatgggcacagctcctcggagaggggagctggcgtccaggccccaagtcacccccaaggcggcccgcgggaggcgctgggcccctccctgggggcctcgctgcaagggctgctgcaggatcattgggttttggggtcctgcgggtgggatctgggcgacccc

SEQ ID NO: 324787 - DNA, 853 bp, Homo Sapiens
ccggggggtcccgcaccaccaaagagggagccctggggtgtacagaaactcttccgttcccagggaaaagtttgtgggggttggggggtggccctgtgagagggagaaaaaagggggacccccatcttttcaagggccagctggggatctaggggacccagaagtaggaaacctctcctctgggagggttccccaggggctaatctgggggcccagcccttccctttggagggtaggaccatcgggggaggggaacccgaggaagtaagctccccatggtgggcagtgggttccctcaagtggtactgtgtgatagctgggggtagcctgggggccggggtgccatccttagggggcagctggctggggtcctccaggaatgggggcgcatttcggaactgctgggctgtgtagcgagtgaggaggatgccaacgccctcaatgagggccaacaggatgccccccatcattgctgagcccaccatggccagtgggccactgcgggcagccagcacagccccggtcaatgctccactggtgatagagttccagggatcctccttgccccgaagccgcaccaggccacagtcgatggtggagaacaggcccccccacactgcgaagctacctccaatctggggggctcggatcctcacagcattggcactacctctcaaccggtgccgaattccaacaggggcattgcggaaacccttgatggcctggaagactccgccaccgatgacacccatagtgaaggctccaccgcaatcatccacaattcgccatgggcagggctcccgagcgtactcctccatggcgctggcgtctggccgcgcagtcaggccacccc

SEQ ID NO: 324788 - DNA, 1432 bp, Homo Sapiens
  misc_feature (28)..(28): n is a, c, g, or t
  misc_feature (413)..(413): n is a, c, g, or t
ggcacaagagaagaaaatgtgttttttnatgtcccgtagaggggcttgtttcccagggaagccttggggggagccgcggtgttttcctttcccagcccccaaagaggccaaggcgcacgcccttattctggatcccccccctttcaaagggggggtttccccctcctggcagggggcccctggaaggaggggttaggggtggggcctttagggcgccccaggaagggagggcccttgggggccagaggggaggttcccctccctgtttaaagctgggagacccggggaggggccccagccctccccttttgggacaaccccagcaagtccagagggctggggtgttgccagggggctcagcttgtcacctctgggggtgtggtttcttcccgggacccgccaccagaggcccntggaggcccaggggagggaccacgggagggcaggtgtaaccccctggcctggagcacagctctcagagccctgagcctcccggggacagaaacaagtaacaaagtgagaccacgagagaaaaagaatccacagtttctacaaaaagccccaccctccccaagcaccctggtcagctggggaccgccttggccttcacccttttggggggtctgtggggggcagggctggtgggccgctcccgtttggggctggcgggctctgagccgttgtgctgggcgcagggctcctgcttggggccggcggggatagagccgttgatccgggtgggagattcctccttgggctccagcttgggggtgggcgggcggggcaggggttgcagcgccctctccagcacacgggggccgtccccggcggggatctccagccccaggtgcttcatgagccgggtcatgacctcgtcaacgtagccatggatgcggaggtcagcatggcggtcgtgcttggtgggctgcaggttgacgatgaccaggcggcctccccggcgcttggtagccagcggcaggttcccgctgggccggatctgcagcgatgtacccagcgtgatggacaggtcggcgttcctgctggcctcatcggcgagtgccaggtcccggtcgggcagggagtcctcccagtctaggatggtgtccctcagctctcccctgcaggctcgcagcccccttgccttagccacggtgcagagccggcccgtggccttcaggcccatggtgcccacgactgtgtctcggacgtactgcgtcttacacttggcacattcttccacaaacatgttcccgtggagctctgccagtttgtccctggggaagcctgagcgcacatggagcccgtccacgttctggctgaccaggaagcggaggaggcccacgcgctccagctgcaccagcgccatgtgggtctgcgtgggccgcgcgctctcaaaggtggtgtcgaacttgggggccagacctcgctcctc

SEQ ID NO: 324789 - DNA, 465 bp, Homo Sapiens
  misc_feature (398)..(398): n is a, c, g, or t
  misc_feature (409)..(409): n is a, c, g, or t
  misc_feature (438)..(438): n is a, c, g, or t
tttttaagacatcaacttggaccaccaagttttatttcttcaggccaaagaacacatttatggcccacagtgtcctataatggacataccatgttgcatattgtcttcatctcctagggctgccataacaaagtgccacaaaccatatggctgacttacaaaacaaaatgcactgtctcacagttctggagactagaagtctgagatcaagttcttggcagggctggttccttctgagggctgtgaggaagaatctaatccacacttctctcctagcttctggtggtttgctggcaatctttggcatccctgggcttgtagaattctgccttcatcttcatatggcatatcccctgttgttatctctgtgcacaaatttcccgaggaggcgtcttttnccgtggcaggnaggctctcccgggggaccccagggatttntctccagcggcagaggaaaacggggca

SEQ ID NO: 324790 - DNA, 376 bp, Homo Sapiens
tcagagtttacaaaaaaatttatttgtgtctgagagccacgattgagaacattaaaaaggtcctcctgggaatgtaacttgggggaaatgtggcgagagggcaggactcggcagcccatgggcatgccacaagatgcgcccaggcgctctggggtgaactctgctgtgacttcaggccagaggtgtctgcccccgcagtgccctgacagctgagtggtcggaaggccccggctgggaaggattcatttggaatctttcttcttcttctttttcactagcgtttcttctagtgtagcgtcctctgctatctctactggtttttgcagctttttcttccctctcctctttttgggcttcagggtgaagtcccggccct

SEQ ID NO: 324791 - DNA, 764 bp, Homo Sapiens
aggaaatggtggggtgcattcccccttctgcattccacccaccaccactggattttagctccctaacattaattctgctatgttggaaaaaggcaccataagggaagacatcaccccatctattctcctaataacccaaggagccagagctgaaagcccacagagataggaagaaaaaggctgcactatttcaagagccctggaaccaagagggcccaccctccctggcagccaggctggagagcacggctttcgggagcaacagcaaagactcttctaccagcacgatggaatacatgttggggggcttggccttaactgtggctggtgaatggctgcccaacctcgaggagggcaacagggaaacctggcacaggccttggcatctctagccccaagctgaggccagatctctccactggagaataggagctgatttcctgctccttccaaccaaagaactgagaagcccaggtagatccctgctctcagcctagccatgccggaacccgcgggactttagctaaagcagcttgtgtcactgaagctggacagaacaggcttcttgtaccctaaacaagctacccagactcttcagctccttaaggccgagcccttgtctcactccaggagggcactgggcttcttaatgctttcacccctccgaacacacaccgttttaaactggtgggtttgggcacgtggttttaggtggctagagcctcagctctcgaggtcatcctgatatgacgaatgttcgtacc

SEQ ID NO: 324792 - DNA, 753 bp, Homo Sapiens
  misc_feature (335)..(335): n is a, c, g, or t
  misc_feature (350)..(387): n is a, c, g, or t
cccttaattaacaatttcatagaatgggtccacttcaggcccactcaagagtacccagtgaacactcccccaacaaaacacaccctgccccaagacatttagcacagaggaacagatccatggccactgcctctgcagtatcaaagagaattagtctttccacaaaacaaattttaagagccaatctctggatttctgtagtggctttagtcaggcatatttatcatcatattagggagtgttcagttccctgccccaacatctttattttaatccccaatttcaatgcttatggatgctcagctcatgttttaatgttgccaggccccatcttnggcccatcttaattnnnnnnnnnnnnnnnnnnnnnnnnnnnnnnnnnnnnnnggtacctgcctggttcatggatccctagccatccagggaccaaattccaaattaggatgacaaagagtttcccttagttcaaaatgacatgtgtttccagtcctaatcccagatgttaatctagccatagtgtcacctgagccttagtccatgtgtatatcacatacttcctctagctttagaatgacttcacaagctgagaaaggcaaaacaaccataacccagacttgcatgtaagtatctggcctcaactattaaataatacttaaaagggaaccttatgagccttagctctttctggaaattcatctgaacaggggtgagggtgggtaggtgggtgcaaatggtgggctccctccagctccc

SEQ ID NO: 324793 - DNA, 859 bp, Homo Sapiens
  misc_feature (23)..(23): n is a, c, g, or t
  misc_feature (82)..(82): n is a, c, g, or t
  misc_feature (85)..(85): n is a, c, g, or t
  misc_feature (186)..(186): n is a, c, g, or t
  misc_feature (188)..(188): n is a, c, g, or t
  misc_feature (261)..(261): n is a, c, g, or t
  misc_feature (291)..(291): n is a, c, g, or t
  misc_feature (335)..(335): n is a, c, g, or t
  misc_feature (574)..(574): n is a, c, g, or t
  misc_feature (753)..(753): n is a, c, g, or t
  misc_feature (805)..(805): n is a, c, g, or t
  misc_feature (844)..(844): n is a, c, g, or t
ggtcaacaccacttttccttccntgccacgttacttcaccgagcgagtaccggcaaaccgtgaaaactggattgtggcggcnatnttttgtgttcagagccgctatagctgccggcggtgtgcgactgagtcggtggcgaagaggggaacgcgacgatggcggagactctgcccgggtcgggcgancntcgggccctggcacggcttctctcggcccgggcgttgcggagactgggacgaggcggctcagcgagctgcggngttgatcgatcttgcgggcggatctgaagnaagcgggaacctgggacacgggcggcaacaagagcgtcctgatnggagcggcttcaagaaggcggttaaagaagaggggcaagatcctgatgaaattggcatcgagttagaagccaccagcaagaagtcagccaagagatgtgttaaaggactgaagatggaggaggaaggcacagaagataatggcctggaagacgattccagagacgggcaggaggacatggaagcaagtctggagaacctgcagaatatgggcatgatggacatgagtgtgctagacganactgaagtggcgaatagcagtgctccagattttggggaggatggcacggacggccttctcgattccttttgtgatagtaaagaatacgtggctgcacagctgagacagctcccggctcagcccccagagcatgctgtgggatggggaaggattttagaacactttggaaacttcatcgntgaacttcaaagtaactccggacattgaagaaatcccttttggagccagaanaatgagaaatactcgacatttttggggggaaacttgtanatctgagccccagta

SEQ ID NO: 324794 - DNA, 892 bp, Homo Sapiens
  misc_feature (71)..(81): n is a, c, g, or t
accctgggccccatccttttttctgaaatcctcctttccgcccactggggcccccggccaccccccccacnnnnnnnnnnntccaagcaccacgggcccctttgaagaacgtttgggggcacctgctggggagggccttcaccccccttttccaggttggggcccagtttcccggtgttcccctccctggtccccgggcctcgggtcttccggggtctcccaggtggaccagggggccttttgcggggatgggcgcagcttttgcccccagtctgtggttcccccctcccggaggctctgctttcccccgcatcggaagctcagggttggaaagcggggggagctgacatgaggttggtggaatgcgtgggcgctgtacacccccctcggggggggagggcgtgctggcggccagcaccgagcacagggggctcgtggctgttcagcaccgacgtgaagtacttccagttcctctgtgagctgcttgatctccttgcgtagagccgcgttctgtttctccaggtcttcgctctccaggtgcagggtgtcggccttctgtgtctgcctctgtcggctcttctgggcggcaatacgatttttctccctcctctgaactcttctcacatcatcagatgagtcctgtttgccagggggaggagagcggctgaagctggagtcactgctgtcggagctgtgaggcatggctgaaatcttccgggctctcacactcagccccaggcacctctgggctctcttgtcaccagctgggctcccttcctgacttctcctgggccaccagcccaccaccccctacaggtgcctcctctgcctgccctgtagccacctctgacccctgcgtcctcctcactctggggtgcagagggactgcccc

SEQ ID NO: 324795 - DNA, 911 bp, Homo Sapiens
ccattatgtctcccgggcccagcggatctctctccgatgggaagcggcagccatcgtcccgcgggtgtccgctttaccctcggggcggggtcgggtggcacgccaaaacggaagggtttcttcagtaaaagcatctccccggcggccaccaccggctcgcccgaccaggccgcccagcactagcaatgctccgtcgctagccttttgaaacggcccacttgtcgttctgcccgcattctgctccctcgcgaacattgcattcgttccaaaattttaatcttgggcgaaaaaagggaatttgtgcaccattaaaaatgcccaaatcgtgggtagcccccgggttgttttcaagaacacccccgggggacagacttgttttccatttcccaccgggaagcgacaggcgttttggataaaagggccaagggtgccctcgtgtggccaacggagggaaatgccgcgggcttcagcagaaaggaggggctccaggagctggtcgtgaagtccatcagctcccttgtttcaaaaggcctcggattttcccacaggtttttccatcttttccactcccttgcagtttttgttattcctgtcaccaacttagaagttggagtgctcacatggtaagctttgatttccatcgagaggaaaggctttatgttttataaaaaatatatactaaagtaatctacacgaagcttaggatgagttgaaagggtactgccaaaacgcggccctgcccaggacacacagcagaggtctggagtggggacagtgcggccagcatgtgtggggaaggaagcaggctgacggaggcaaagcagattccgaagaacaaaagcagctttagtttgcctgggcaacaggctcaacttctgtctccacttcagttatcaggagaccagaagccc

SEQ ID NO: 324796 - DNA, 861 bp, Homo Sapiens
  misc_feature (172)..(172): n is a, c, g, or t
  misc_feature (626)..(626): n is a, c, g, or t
gtcacgcgggccattctctttatgatccatggtggcaaacccagcccaaaagaggacgctctgtgataacacgtagtcatagtcatccttcagaacgttcaaactgcttgggatgggtagacttcgagttttggtaaaatgtcccaacccatagggccacaacccgaaacangtgggacgtccagacccgaggggagttgtgtagatacctcgcattcgagaaactgtctggttatagttgatgaatcgctctgcgtgtatctgtacatctggagaatacgggattaagttctcctctctgctttgttctgttgggatctcggggcggcggggatccagcaaagccttaggaagggaaagaattgctccagaaggtagtccaatcagcaggtgtcggctggtgatgccccgttcggtgatggtggcctccatggcactgatggaggacgggaagatataggactgctggaggacctggggcagctgggggcggtccagggagctgaaggcggtggcgttgtattgctcagtgccctcatagagctccagtacggtaaactcgttgcgccgagccttggtgttccagtactggtacaccacccagttctctgaatgcacgatatggntcagggcctttggctttcttctgcacagaggagtgaatgatacgcccagtgacgccatcaatgaggaagatgccaataaaggtgcgctcatggtgcgcgtctgtgctctctgtcaccacggccagcaggttggggttcaggctcttgtagagcacactgcggtcccccatcacacggccctgggaatgcggacgcgtgggtcgacgatatcccgaacttccggacctgtaccagc

SEQ ID NO: 324797 - DNA, 626 bp, Homo Sapiens
cacgtgatccttatttgaaatagaggtggtttaaatcagccaagcttggtgatctggaggtctccatttatctttatggtgtcaattgcagataacgtttgaatgcgatggtaaaaatcaaaaagttggtgtccatccacaaacactcgggaaacggtgggtgctcacaaagaatttccaccctgaatggcttggtctggaatgaatggaaagtaagggattgctgactgttcttcacccctctccccagatatacaagaatttctgagtagctgccgatctgtgaacacagctttgagttcgattgccacatcggcaggagggtcttctgagtccccacaggtcaagctgattgcaaagctctctgggttgaggtctacgatgcccatcactaacaccttcttgcctggtctcatgccacctttaatgtgcccacaaaatggaactatcagtcgtgggaagtacacgtccgcttgaactggagagctcaaagagttgtttaaatggccatcatctagtttcaccacggcatcgctgtcggccactgatcccgccatcttcttgcccggcgcggcggggtacgtgggacgcggcgcgcgggcggggatcccggggctgtcctgccc

SEQ ID NO: 324798 - DNA, 842 bp, Homo Sapiens
  misc_feature (654)..(654): n is a, c, g, or t
  misc_feature (802)..(802): n is a, c, g, or t
ccaggctggtaccggcccggaattccgggatatcgtcgaacccacgcgctcgcccttctgcagcacctggatcgcttttccgagcttctggcggtctcaagcactacctacgtcagcacctgggaccccgccaccgtgcgccgggccttgcagtgggcgcgctacctgcgccacatccatcggcgctttggtcggcatggccccattcgcacggctctggagcggcggctgcacaaccagtggaggcaagagggcggctttgggcggggtccagttccgggattagcgaacttccaggccctcggtcactgtgacgtcctgctctctctgcgcctgctggagaaccgggccctcggggatgcagctcgttaccacctggtgcagcaactctttcccggcccgggcgtccgggacgccgatgaggagacactccaagagagcctggcccgccttgcccgccggcggtctgcggtgcacatgctgcgcttcaatggctatagagagaacccaaatctccaggaggactctctgatgaagacccaggcggagctgctgctggagcgtctgcaggaggtggggaagggcgaagcggagcgtcccgccaggtttctcagcagcctgtgggagcgcttgcctcagaacaacttcctgaangtgatagcggtggcgctgttgcagccgcctttgtctcgtcggccccaagaagagttggacccggcatccacaatcacctggagaggggagccaagtgctagtccactggcttctgggggaatcggaagtctttgctgcctttgtcgcngcctcccagcggggcttttgactttagtgactagccgccc

SEQ ID NO: 324799 - DNA, 1146 bp, Homo Sapiens
gtgtgctccctcgcccacccaagtgtatcttcggccctcttttgtgcgagttcccgtgtggtgatgtcccaccaggggggggcgaagtccgccccatctttcgcccccctgcctcggtgttgtccgcctgagggggtgatgctgggattgtgagttattcatcaacggcacaaacttttgtgggcgtataggcgccttttgtcttctgcccgagagggccccacaggttaggtgatcataattttgtttcgtgcacaaagttgccgcgggggtccgggttgcgactgtctgtcgtgagtatggaggggccgtttcattacacgtggaggccctcactggaaagacgcccaaaaactcatatctttgcctccttttttcccaggagatggaaagggtttgtgtgtcaccggaagtaagcggggcgagatggctagaaatttttcgcaggctaacgagaaaaggctggagccgttcacaaggagtctcgcaatgtagtttgagttcccggcaaaaaggttccaatgccacttggatttgggttaagccaaagaatgcctttccaagcttaaaaactacggggagggattccaaagttgcgaatttcggtttgtaaaaccagggtgtggaaactttcccttttttactttccccggggtgtttccaactcctgtccaaataaaaatcctcccaagctccacttttagggaaatagccctatgtgccccagtgctcccagggttgtgattagcatcttcaagttttcagcctccatgacctttacctttgaattttgccttatcaaatacatgccttaaggctggaagtcctctctctgaaattaatctctgagcatcccagcttgggtatatttcttttaactgttctctttggaggtacaggaacaggtgctccatttcctgactcttcatcaggctcagttccttcaccatcttgtctctctggagaggctggaggtggggaaaggaggaaaagttttcatcttctacatgctcataatctggtaggtcaatcacgccattctcctgtggttctagcatcttttcctctcacgcagaaaacacgggacacagcgcggacctcggcgtgcagactaagcgcgcttctcgcgatactcgggaactcccc

SEQ ID NO: 324800 - DNA, 1079 bp, Homo Sapiens
gggactgagagtcttcagttactagggcagaggactgctgtttgctgacacaatcttggtgcgttggaagtgaaagggaagaggcactggtggctgtgctttgggcccgagcagccagaagccagttgccatcacctatgacgaggagacagcgcctggggcagagcccagtatggggcctagccagggctgggttctcacccacctgtgccgccctgccttgttacctggaagcacagccttggggactgagcaggccctcactgtcactttaagaagggaatcagccactttgtgctcaccacctctggggaaggtgtgacgaggagagaaggaagtggctgtttggctgctgacaacatgaagacttcctgcgatgagaacagaggcacaggtgccggcccctgcagcccccagaacctggactggagggggccatggggcgccggaccctggtcctgccctgggtgctgctgaccttgtgtgtcactgcggggaccccggaggtgtgggttcaagttcggatggaggccaccgagctctcgtccttcaccatccgttgtgggttcctggggtctggctccattctccctggtgactgtggagctgggggggccccgactggtgctgggggggaccacgctgggctgtgttgcaccggaacttggcatccagcaatgggcctgctcgccaggcccgtgggaaacccagagcagcgtctctcttgcctggaagtctctggggcagcagccctgacaacacaaccttcttgtggcaagttagcgtccttccctgagggtcctggaggcctctgggaaggctaccgcccagtcacgaaccagggctctctggccgcgggctggccccaatttgggggagactgggcgggatctgcgggccaggagcccctttagactgggacccctcattgttgcgagaagcgctgcataggcagaaaccacagttagcagagccagattgcaaccgccgtgtccatgcttgataaaaggccttgaaaccaggcggtaacgaaaaagaggacgtgttgacaaacccaatctcactctgctgcatagggt

SEQ ID NO: 324801 - DNA, 575 bp, Homo Sapiens
ttttgacctattaacttctttataggcacacggggagttacaggctgaggacaaatggggacttcacactacattatcttcctctgttcagatagcttttcagggggagtgagtgcactctatatgatggaggaagaggacattggtgcctgtgggtacttcagcaccaggcttggtaaagcacatactctctgtagcacagccccgcatagcaaatctgggtttgaaaataccagcctgcacgtgtccagataagggagacgcagtggttttcctttccagtacagtgggtcatgggccccatgcatttgtccctgaagctcgcagtgcaggcggggcacatcaggccattctcagtaagattggtcaagggaacagacaaaaaggcactgttgcagccgtcgctctggcagcagaaggagctggttaccatgtggtccttggggcccatggtggtggatataacgccggagtagcagtcctgggacctgatgcagcccttgtaggtgtgcaccaactccttgcccttctatttcaggccgcctatggccacccccatgccttcgtgaaatccc

SEQ ID NO: 324802 - DNA, 632 bp, Homo Sapiens
gcttctgcaagatctgtgggccgctctaaggatatgatcatccggggtggtgagaacatctaccccgcagagctcgaggacttctttcacacacacccgaagtgcaaggaagtgcaggtggtgggagtgaaggacgatcggatgggggaagagatttgtgcctgcattcggctgaaggacggggaggagaccacggtgggaggagataaaagctttctgcaaagggaagatctctcacttcaagattccgaagtacatcgtgtttgtcacaaactaccccctcaccatttcaggaaagatcccagaaattcaaacttcgagagcagatggaacgacatctaaatctgtgaataaagcagcaggcctgtcctggccggttggcttgactctctcctgtcagaatgcaacctggctttatgcacctagatgtccccagcacccagttctgagccaggcacatcaaatgtcaaggaattgactgaacgaactaagagctcctggatgggtccgggaactcgccttggacaaggtccaaaaggcaggcagcctgcccaggccctccctcctgtccatcccccacattcccctctctgtccttgtgatttggcataaagagcttctgttttctttgg

SEQ ID NO: 324803 - DNA, 866 bp, Homo Sapiens
  misc_feature (544)..(640): n is a, c, g, or t
taggaatcctctgaaattctcagagatctgacagtctagcagtgcgctcacagtagggcttgaaccctgctagtaaaacaaaagcccatattccttccttagatctagtatttagccagaaaaacaagtgatgcccataagaaccaacccagagaccagtatctgggtactagagtttgaaatcacaagggacagcctataacagtatagtattgatgaagaatgtttctacccaattgaggagtcagctaaggtaggaaccagaccaaaagggcaagggaaggaacagccaggcaagccgcttcatacctgcccaacagcaagggtgggataggagatgtacgttagcatggtaatgacaggaatgaaaaggaaagaatctaaaacgtagtgaagggaggaaatggtagctgcagcgtgcctgggtgcaagagagagaaaagccagaagtccaagcttctgccacacctgtaagtccctggggcaggtgtgttatactgacctagaaatactgtggttttaagagctgggtgtggtggttcannnnnnnnnnnnnnnnnnnnnnnnnnnnnnnnnnnnnnnnnnnnnnnnnnnnnnnnnnnnnnnnnnnnnnnnnnnnnnnnnnnnnnnnnnnnnnnnnatgtgcgtcttcacgtgcactgcccagcatgccgccatcaaccagggccaggtatggacagctgaaagcccaggtccctgaaggcaaggtgaccatttccccaacacaggagagactaaggaatttcaggtaaaaatcagatggctccaatcctccgatactaagagcccatcgccccagttcccaggagttccgccagttagactttttcccccatggcctcccc

SEQ ID NO: 324804 - DNA, 925 bp, Homo Sapiens
  misc_feature (787)..(787): n is a, c, g, or t
aaattaggaaaacagctcccctcccctccagccatgtaagtcctcctattctgtatcacatgagacaccaaaaactggaaatgtagtcacacccagtacagtaccatttttatgaatttaaaaatagtcttataattttaattgtttgtgggtatttttctactggtataaatagcttctaattaataaatcgatcaaaggttgttactcagtatacatgaaattttttgcaggaaaagaaaccagaaatacagaataattcatagaaatcatggttctcaagtatttgttcaattagctttggggaagaaatgccaaatccactttgaggatgagtcttacgacacagatccacccacatgttgctcttatctggaatttgggacaaagcaatgcacaggccctcattcctgatgtggcgccctccagacatggctgcccaggaaggacggccactttagaagtgggacgtatcaccagtaagcttgaatgattaggatcgcaggtggctactgcattctgccgttcgtgaccgtgttctagcctgtagaccacccagctaccttcattcaccagtttttatccttcaccttttccagtatcgtgttagccactagttcttgagttttttggctatgatgtgtacgtttatgtatgtcattcatggactttcaactagaaaaggtaatgataaggttttctgaagaccatttgtaaattgtccatttaaccatttttcagcttgctttgaaacaaaagtcacacctactatttttctatgaattanggaatgaaggggagatcattcagttttacttttctttttggtgaaattttgtaccccggatgcagttggcacttttcctaaaacagaatgttttcccacttaggtgtcagaatgtaccttttgacttccctaagaagc

SEQ ID NO: 324805 - DNA, 845 bp, Homo Sapiens
  misc_feature (30)..(30): n is a, c, g, or t
  misc_feature (150)..(150): n is a, c, g, or t
accatttctaaacatcgggaatcaggaaancctgtaaaactgtgcaagcatcttccatggggccagccatactttttccacaagtacatccaaggaggctcccaggggttcaagcttggtgatgtgtcgcagtttctccttttctggtgnaaaaactccgttggagtatttccccaacatagcgtattttcgagggactttccccagcagttcaatgatcaatgctatgtgatcttcgtctctggaatagtcttccccagaaatgtggttcaaaacaaataatctcccgttgccagctcaaatgccatacacgccgtgctccagatgtccgcaggggtgctgtaccccgctcctatttaaacctctatggagcggtactgacgcgtctggatgtcttccgtgaagtgtttatgcacccaacaagcatttcccaggtcagcaatttttactctaattttatctgcattccgcggatccaggggattcaccaacaagtcagctgcccgggtttttgcttttggcaaatccccagtactggaggctgaaaccgttctgcttctgtcatgggatggactgctctcctcttgctcagtaagtggtgatccctcagaaagcacagagccgcaggccacaggttctaaggatccagagaacaacgaggtggaaaactctgggaactgtgactcgggaattttatgtcgtccatttggcaattcaccattgaattgttcataggagctgctatatgtgtaatcactttctgcatttggctcatcaagattatattcctcaggatttgggcagtcttcttcatcatcatcttcatcgtccagttgctgctcccc

SEQ ID NO: 324806 - DNA, 496 bp, Homo Sapiens
ttttggtctcccaaggctttaattcaggaaaggtttgccatctgtttgacaggcactgtgcaggggtttgtaacagttcagttttctccaaggtcccatggggagaggggtgcagaacaggaagagagccctctcggcaggcggggggggtcctctcctccagaacaaaaggcactgacgaggtgaccaccccagagccaggggctgggttatatacacatggggtggacagatgcagagaaactcaaagctaaatacaactgaaggatgaaagagtccatcttacagggccagggctgcttctgggctctttctaccaagtgggaaaggaagttcaaaacaaaggcaaagctttcaaggagaaacaagagtccagcctttcggtcttagtgttctgtgcaattttaaaacccaacaaaataaatataacttaaaaatgtcttacatgacactaaaggcaagcctgggaaaagcaagcagttgaagaaaccttccc

SEQ ID NO: 324807 - DNA, 1479 bp, Homo Sapiens
  misc_feature (41)..(41): n is a, c, g, or t
  misc_feature (110)..(110): n is a, c, g, or t
  misc_feature (457)..(457): n is a, c, g, or t
  misc_feature (461)..(461): n is a, c, g, or t
  misc_feature (464)..(464): n is a, c, g, or t
  misc_feature (471)..(471): n is a, c, g, or t
  misc_feature (475)..(475): n is a, c, g, or t
ggaaaaccacttaacttttaattttcctccaacaactgatnctggtacacagtataccttaatgcctgcatccacggcctcacgtcatgctgtttacatgaacgtaaaantcgccgaagagtggaataagacagtcctctgttgaaagtctgttagaaactgtggtctccaaagcagacgagcaatacagctgcaaggtacttagaactggcaaagactgtgaaactgttaaagtagaaagtctcagaggtccaatagcgatgcgggatgtttgcttcaagtactttaccacattttcagttatagactgccacttctgatcttgttctatcgggttttaaagcagttgccaaacaaacagaacttcttaacaatggaacttcaatggatttctgaggttcccttggatctggacttcacatgttacgaagcagttttttcatgtctattttttccntttnaancctccancaantaggattgatattttcgtcctggtaacaattctaattgctcgggtacattcgacaaattttccagactcaaagctgcttaatgattttatatagttgaagtcagctttcaggttgagggaagtgctactggtactctttttcaagtcatggatagcgttctgccattcctgcacagcagcccaatcggcagttgagatgtagcactcacatgctttgtttcctaaataatttataacttcagggggaagagtcagtcggtttggacagcacactttttctgggattcacccattcagacaatgtttcaggctggcactcttacaccccagcactggctaaggtgagcaccgatttgtcaaagctggagatgcagcaatcaacacctgtcatggcacacaggtgttccctggtactccacagaggccttttcaaacctcccttcagcctgttgagccactgagttaatccacagaagatgttttccaacaatagatgatgaccagacagcaattccctgtatagcttcaggacaatgaagttcacatagtgcttctaccaccatcataatgcttacttccaattcattcccctgagataggctggttgttttcatctctgtaagcaagtcaaagccatgtctcactgtcactgcaggctggcctgccaacaatcctaccctcatgatggagagtcgaatccgcgttagccagtcctgacaagtttggcgattggtatacaaaaaagttctaatgaccttgggaggtgaagttaaggcattagcacatccctcgtatgcattatacattaatttctccagattttccagatactgcagaagaagaacaagtctaagttggttgttaccatggccttcatcactgtctgcagttgtccactgactaacatcctgatcagggtttaatgtgtgacctgcgagacttcgaatgataccttcaattgtctggaaggtgtcttgagctctgcccagtggggttctcagccc

SEQ ID NO: 324808 - DNA, 469 bp, Homo Sapiens
  misc_feature (383)..(383): n is a, c, g, or t
  misc_feature (403)..(403): n is a, c, g, or t
  misc_feature (413)..(413): n is a, c, g, or t
  misc_feature (422)..(422): n is a, c, g, or t
  misc_feature (436)..(436): n is a, c, g, or t
  misc_feature (446)..(446): n is a, c, g, or t
ttcaaattataatattttattatagaaaaagcatcccaaatacaggatttcgtaaacactggtaggtgaacaagtgcaattttaaaagtaaatacaaagtagaggcaaaacctacaagcattttgccttcagaagaaaatgtaatgttctcctgcactagtgatcccacccagaacacaaatgtgtctccatctcccatgaaagcatcatatttgctttctgagctcagtattcccatttcaataattgcaaagtgatggcaagaagtggcactgaatacattacctacaaaccccttgactttaaatattgagacaggggcttggcctggtcatccaggctggagtgcagtagcggtcatcatgggctcactgggaggcccnatcctcctggggctccaagncaatcatccnggtctcagnctcttgagtggctngggaccacanggtatggcactaccatggtccat

SEQ ID NO: 324809 - DNA, 752 bp, Homo Sapiens
  misc_feature (705)..(705): n is a, c, g, or t
ggaatatatgtagatagtagtgtcctcgaaaaggtagaggtgttgttaaattgttttgtccagtccgtatccgcacacccgtccatatgcattgtattggaggtaatcgagcttgtgagcgcagatgggtcctctgcataacactatgtgtcccgcagtatctgtgaactttgcaatgtgtctgcaagggtggaggtggagtgtggtgatttggtgtagttatttgttacctatggacacagtgaccgtagtttacgatctttaaatgaaacttagatttttgtggggaaatgttcatatacagttttgtgaactgtaaatcaaaatacctttttgtacagtttatcttttattttctgcaaatttaggaacatatttactcgttttcacattgaatcttaagtttaagctcttcatttggtatttaggcaatatatgagaaaaaaattttttttgttcatttgtaattttaacaagttgaacattttaccatgattgaacatgtttttattacagtatttaacattcccccaaagaataccctgcaaagtgtaaacctttgtcccatactgtgatattactgttctgctacaataaatgtcaaacctaagcactttgcagttcactacttttggggaaaatgttctagggaactgtatcacagggtgaaactgttacccataaagtgtagctctctgaactggngtgatccgtgtctctgctgaatgggtggtggggatagccggctccac

SEQ ID NO: 324810 - DNA, 744 bp, Homo Sapiens
ggttttttggggggccaagggcggcccacaaggaagcttgtccctggcgcacttccccccccggggcttccccctccttgttttttgttatgaagatgcccaagggtgaaagcagccagccgtgggtgagggtagggggtgtctttattgcacagtaccaatgtcaggttggggagttaccacctgaaaagctcctgttttcaaagagaacttgaccctgtcactcagatccaccaaaggggccaggatccacccctgggcggccccgggtccatgctctaggctgatggcccctgccaggacatctaacttctgccagggaagaccagcaaactgttcaacggcatctggttcatgctgtggcatccacagccaccttagcaccagggcccatgggaggggtgactaaggcaggaagagtagtcaccagccttccagggggctttcttcaccacttcccaaggccacaaagggcttcttgcacagatccccaggttgtgctagctcctgagctctggggcccccagggtcttggtcaggagcctccctctttcgcttgtgcaaggaagggctctcctcacccagccgaccctcagggaggccctggctccgcagacagacgatggctgcagcctgctccgccagtttcttggacttgtcccacaaggtagactgatacttttgttcagcaacggtgacaatagaggagaacaggcgatctagagggcgttgaaccgtttcacc

SEQ ID NO: 324811 - DNA, 753 bp, Homo Sapiens
ggggccttttacagaatgtagtttgttttccttactaatgactttaaaccatagtgattttcttctataaatatacattattccatagtgcagggattcctgtcctttttgtcagatcccgggttctgggtccagcccatgctgaagtccgaggggcgtgggtggatgagcagaaagaacacctggggggctgtaggcaggtgaaagatagttttattcagcagcagctcaaattaacagctttcttacactagctctcttatgaacagcttttcttacactgtccacctttatctcggcggtttgctccggctgtgtggctcccgcgacccccatgcctgcggcttcccagaaggctctcccctgccttcagggtcagcagcttaaccctttatcctgggcatgcgcaagccgagctgtgtcctggctccctcctgtccagacggaccagctttggctgtctctctttctctgggcacccagtgcctgcacaagagccatgttgaagcccgggtgggccccaagagcgcctgtacaacggtagcagggcaattataccttttacagacaacagtggctcagagccaaggatgtacttacacaaacaggttatataacaagtgggggtgtgcgcctgcacgccaaactcgctgagtcatgcaggcctggatatccaccttggcctacctccatgtaccttttcatgtgattacacacttagaaaattatttactggccaggtgcggtggctta

SEQ ID NO: 324812 - DNA, 540 bp, Homo Sapiens
tttccataaaaacagtaaaatgtttattttcttagaaaaaaagtgaggaagagggattcaaaatgattgtgatcacacttccatctgcatctgagcaaagccaatgttgcaagcttaattcttgattaagatacctattaaatcaaacaacctgccactcactcctacgtcacttccaggagtcacatcacagcatgcttttaattgataatagcttctctacttcttctgagcagagaaacaaggcttggcatagcaaccatcccatctccaaagctcaacactgccagtgagaagcaaggctcagtccatctctagactgcgtgcgagagatggggaggaaggagagagggcaggagatgcttgtcttagaagcagaaccagtttagaagagaagtttgttatctgagttcaccactacctcatcttatagaaaataggttggagagcatctgtaaaaccaacagtatctttaaggtgaaattgcagaattttgctgcatacctggacacaagagaagtgaaaagttgcaacaagccc

SEQ ID NO: 324813 - DNA, 836 bp, Homo Sapiens
tttttttgaggtcactgggttttatttgagtccagaggggaaggcgttgactcccacccaggccccgagtgccttgaggctggaggagggaggcaggatggcagcacagagcaagggcttcctgccctcctggctgcctgcagacgggagtggagaccttcagagcaagccccagcttctttcagaggagggtagagtccaggactagagctcttctcttgtggctgacaccttctctgagcaggccccctggggtcccccacatagcaatgcctccagagcccctcggccttgttggtgggcttcatagatctggtcttctccaaactcccccaagtagtgcaaacatgtcctggagagcctggtaggccaggggccccctgtgaccatcacgctgatgcttggctctggcccctcgctaagtcctgggcctgtgagacgtttcacttggtccacttctcgaactccgtagtcctgccagttccgggagcagctccggtccaggacatccgtgtagaccaactcgctcagctcccgccgccccccagagtttgaggtatgaagtttggtctctgcctttgccagattttgccacatctggtaagccacagctctgcaggcatcacagcgcaggtgagcgggcatgtgggctgagtacatctcctcatcatccagttgtggggctgtggctgtgagtggcgccctgtccccgaggccccctgggatggcccaggctcccagcagcagcagcagcagtggcagtgacagcctcatggccccaggagccagttcagcaagtgtagtctgtggttgaggtgcagatgtgtgtgtgctcc

SEQ ID NO: 324814 - DNA, 854 bp, Homo Sapiens
tgatgtgggggaagttttatttgttttatgtttttgctactacgggtgcttttattgcaacagtgacttctttcctgtggactctgagatcttatcaagtctgaacagcagggttgagaagagtcctgaatgccgcctgttgcttacccaagtccccgtgatgccaatcagtgtcatctgctgaggatggagatggggccgaaggagctattcaggggtgaggcaggccgctccctgaccgaggggcctcctccacagcctgctgcctgccgcctgccgcctccagcctggctgagcacattggacagtctgctgactcaaggagatggggaggggagctggtggtctacactgaaaaggggccggctaagtcagcttcagtggagagaggaacaaaccaggaaagccatggaggaggcagctcaggctggctgcccatgtgcagagaatggcacactggctccgcagacagcaagtgcacagagaggctgtggggtgttattattcaggcttggactcttcctgcctccaattcatttcttgctgatgacccggcagctacatgcacgggttccaacagtcagtccctcagcccaagcactctgtggtgctgagcagccatcagggtaagcagagtccggggctcagagtccgttggtgtcgatagctgtcacagaagcaggtgttgaggaacgcgatgtggttgccgaggtcttgtcgagggctgggctgggcacgctgcagtcggcggacctggcagaggagcccctgcctacaggaagcagcggccggccctggccgtgggggctctggccatgcaggttctgaccacagaggcggtggtgccgctccca

SEQ ID NO: 324815 - DNA, 776 bp, Homo Sapiens
agaaaagcaaactggccaagtgatttatttgcaatgggcacagtgatgcaaaaacaagatattaagactataaaatatgtgactacaaagaaccagcgaaataaatacatagatattagatagtccaataacttaaggcgcccgtgcaacggagcgaggatccgcgcgcacgggaagttcttctgctgcagggctggagagcgccggccacgtcctagcctcggtccgactcgtccagcgtatggcccgcggcgggttcatggcgtgcggggtttgggctgcggggatggcctggagggtccgagggctcggagggtgcggcggccgcggcagccacggcgtcctcggcgggtgcggcgggtgcggtgcgttcctggcggctgcgaaagtcctgcagggcgcggcggttctggaaatcgcatgagcgccagcgcgatggccgcgttccagcagctcttcgtccgcgcagcggaagtcgatctccttgtggtcggtggtgacgatggtgaagtacacgtacttgcccgtgcgctccacgcagtccaccttgaggatggagtggaagcgcagctccttggggcgcgcgcgggggctggcggggaacaggctcaggcggtcggaggtgagcaccccgcgcttcttcttccatagctggaagaggctgtcgctgcgcttctccaactcgccctcgcgtagcacctcgtcgggggatttcatgtcgtgccgagcgcgggactgggagcggcaatgcgggcggtgacggcgccggctctccc

SEQ ID NO: 324816 - DNA, 1111 bp, Homo Sapiens
  misc_feature (966)..(966): n is a, c, g, or t
  misc_feature (1085)..(1085): n is a, c, g, or t
gatgagcaagttttctacattcaatacttgaagtccatggcattttcagtgtactgccagtgcaggcgaccactgcctacacagatccacattaaatccctcacgggatttgggcctgcagccagcattgagatgaccctcaagaaccctgagcggcccagcccaatccagctttactcccctccctttatattggccccaatcaaagacaagcagacagagctgggagagacgtttggtgaggcgagccagaaatacaatgtgctcttcgtgggctattgtctgtctcacgaccagcgctggcttttggcttcctgcactgacctccatggggaattattagagacctgcgttgtaaatattgctttaccaaacaggtcacggaggagtaaagtatctgcacgtaaaattggactacagaagttatgggagtggtgcatagggattgtccaaatgacatctctaccctggagagttgtaatcgggcgacttgggcgtcttggccatggggagcttaaagattggagtatcctccttggagaatgttcactacagacaatcagcaaaaagctcaaggatgtgtgccggatgtgtggaatctctgccgcagactctccttctatccttagtgcctgcctggttgccatggagccccaggggtcctttgtagtgatgccagatgctgtcacaatgggctctgtttttggccgaagtactgcactgaacatgcagtcatctcagctcaacacccctcaagatgcttcttgtacacacatcttggtgttcccaacatcatcaaccatccaggtggctccagccaactaccccaatgaagatgggtttagccccaacaatgatgatatgtttgttgaccttcattcccagatgatatggacaatgatattggcatattaatgactggggaccctcattcctctcccaactctttcccagtacccctccccnggctctcctttctggaattggtgtgggctctcacttccagcatagtcggagccaggggtgagcgtcttcctttctagagaagccaccagaggagctaaagcagcagccccctgggcccntgggtattttgtatcaactgccaaag

SEQ ID NO: 324817 - DNA, 845 bp, Homo Sapiens
ggctttgagttactttttaattggtccatgtctcttccctgcaatatggttttgaagaaagctgttgacagtctactttgctcaatgtgtcacgtacacccaaactatttttctttgctcatgggctggatgggaattacccctcctccagtgcaatgtcatcatagactgtccatgacagatgatagcaaaaagcaggatcttagttcatctttaacagatgactctaaaaatgcacaagcacctctcgcattaactgaatcacatttggctacccttgcttcctcttctcaatctcctgaagctattaaacaattactagactcaggtttgccttctcttcttgtgaggagtctggctagtttctgctttagccacatttctagctcagaaagcattgcccagtcaatagatatttcccaggacaaactcaggcgccatcatgtcccacaacaatgtaataagatgcctatcacagccgacctagttgctcctattcttaggtttttgacagaagttggcaatagccatattatgaaagattggcttggtggttctgaagtcaatccactatggacagcacttctgtttttattgtgtcactctgggtccacttctggaaggcataatttaggtgcacaacagaccagtgcaagatcagcttctctttcttcagctgctacaacaggactgactactcaacagcgcacagcaattgagaatgcaactgttgcgttctttctacagtggatttcatgccatccctaataatccaaagctgatggcacaggttcctttgtggaactattttccgaaatcttcctcaagaagggaacccttccaac

SEQ ID NO: 324818 - DNA, 854 bp, Homo Sapiens
gttggggaaaaccccgttgggggttttgggaactttccccaaatccaaatctcccaaatgagggccccaattaaaatgcccattgccaaggcaaggttggggttgggtcccctcctcgcctcccaaggtggggttccgggtgttcaatccccatctttggcaggttaaggtgtcggaggccccataggggaggattcttgagggagacccagtgaaggaaaaggcttttccccctcaaagaaggatcaggctggagtgacaaatctggctgggagtctgaaacagtctttagggaaaggagtttcttgtctaagccacgagcaagttccaccatccattgcccatggcacggctgaatcaggtggctcctacaaacactctgttgttccagtggggaaaaatacttggagtcatagtggcaggcgaggaccaaatgtcgtttagcagtgggattgagggtgctgatgatatttgagaaagaccggtacccatagggtgtctgactcaagaaggtgtctatttccaagacccagtcagcctgaagcctctgaattcgctgcatgatgtgctgacgagcagcatagcttccaggggatcccgggtatcgctctatcagcaatggctgtaagtcattttgccacatttcagagatactggtgccttctgcaatttgccgaagagccgatgaattcaaaatggctggctggtggtaattcttctcctctggccaggctgaggcactcggactgacccccctggatgcccagggcagggcggccaccagcagcagcaggtggagggtgcccacgacgcgccggtgtcttccgcctgccatctctccgagtctgtctccc

SEQ ID NO: 324819 - DNA, 820 bp, Homo Sapiens
ttcctaaaccctaccaggttccccctcaaaggaccatggaggagtctccatacggttgttataagtggtccacaacctaccaacgttttcgtggggcatcacaagatccctatagggtagtattaacccatttttcaagaaggaaactatgtctggaaattgtagaatgcacattaaaaactctttctgacgagcgtttctaccggatccgatgttacccaaagtacaaaattaaagaggggaagtcaatcacaagatttcattgaatcttcagtatcaggcaactggcttctattttatggccgcaaataactatatattgggccccttttctcacctgtaaaataggaacgaaaagaccttctccacaaataagatgaaataagaacaaaggctgagggtgaacctaccacgtcgtagggcctcaaataaattccttctccttcttgcccttgacagagataggcacgagatatcactaccattcccacttcacacgtggaggaaatccaaacgcgagaacgctcggatttccccttctttacttgcaacaactccgtaacccgcaaatcggctacggacaactgcgatgtccactatgttagttctcgtagcgtggattctctctcctcaagatgccatctggggggctagaggccactaataattgccctcacgatcgaagaaactcgatcctaatcctcgacggcacttcaggaacaaagctgctctcccatcgtccctaacctcactaccgtaaaggtcgcagcagagcccctgctccaaccgctagcgccatcttggccgctacgtgtgtccc

SEQ ID NO: 324820 - DNA, 1383 bp, Homo Sapiens
  misc_feature (903)..(913): n is a, c, g, or t
atcagcgaattcacactggagagaaacccttacagtgcaacgagtgtggaaaagccttttttgaccgttcatcccttactcgacaccagagaattcacactggagaaagtccttcatgaatgtcatcagtgtgggaaagcctttaccagaacaagtattcttactcggccatcagctaatccacactggcaggaagccttatgagtgtaacgagtgcgggaaagctttctatggtgtctcgtctctgaatagacatcagaaagctcatgctggggacccgtcgctatcagggtaacgagtgtggcaaagctttctttgaccgcgtcatcccttacacagcatcagaagatccacactggagacaagccatatgaatgcagcgaatgcgggaaagcctttagccagcggtgccggctcacgcggcatcagcgtgtccacacgggacgatgaagccctttggaatgcactgtgtgtgggaacagtttacagtgcaaaatcttctgtgattcaacatcaacggcgttacgccaaacagggaatagactgagttgggcaaaagcttgggtaggacaagaacttccatacaaatttgagatagatctcgcctgtcttaaagctgccatttgctcattctacccactctggctgccgttgtcctgtcctgcttctgcgccagagtgtttaataagcactcccttcctgctgtgttacagaactgtaggggaggccatggaaatgactctaaagatacaaaattttgaagaggtttgtcagacaataggatagatgttaggaggagacacacctcttgtctgagaacctaggccccaggtatcactgcactttaagaaactggaggctgcaacaggagggaaaggcagaatgatatcacagcagtactannnnnnnnnnncagaacatttgttttgatggctgttagtccccctctcttggagcattttggggcactaatcttgttctcttgtgtcccagcttttagacctcttacttccactgctagtagctagcacttactgagcacctgcaatgaggtaaagactcagctaagggttttacaggaagtagattaattgatcccggcaccaaccatatggaggaaggcactgttaccatctgcatctccagatgagccccctggaggtttaaagagattaaatccccttgccccaaggggaaaccgccttggtaaagggtgatggccaggtcctttaaagacagggcccaccctttcaaaatccatttccccttttaccatttaaggcctccgaaggggctttggtttgggttttaataaattttaatgggaaaagggcaatttatcccccccctccacaacataaaaattggtaaaaccccccctgt

SEQ ID NO: 324821 - DNA, 1240 bp, Homo Sapiens
ggggtaattggtaaggccgtacttgtggtgcgtttagtcgccggaaaggaaaaattatgggcggggtttgctatttgggataaaccaaaactgggttgtggtttaaacacttttcccatgtttttttaaaaggaaatgttagtttaggggagggcccccagctaagtaaatttcccctcaagtagtggtttcggggtggtcccataactataaaaatcgtttcggcccaggatattccggaaccagaacccttccccgctgggttcttcagccttggatgtcaggtgggcccctcaaaggggtccctacactgggaagctatttccactcatcagtctcgagctgggcgcatgtggagttgatgtggagttgtagctgactggctggtggggtcagcctggcctcccagtgtggagcatgggcaccagcctcactgcgtggtcaccctagggcatatgctgcgggctgttgtggcattcctgtggccagcccagaggcaggcaggggctgtctggggtttgccatgtgcaccatcacctgggcttggggtgagctggaggagccactgaggcttagagctctggggatcccagggtccttgtccacgctgcgggtcacactggccagcttgctggtgctctcaccatggtctgtggtgaagctgtggttgtcgtgcgcctggctgggccccgctcccgggtttgttgaagtgcttgaggccaaggtatgcggcctgcaccgtctccaagtcctcatctttcagctgggaccacagctgggctgacctgttggagcgccgccgcttgctcttcttcacgcacttgaggaggcagcaggtgaggaaggccatggacatgagcaggatgatggcacagctcacaatggaggcgatcacggccaccttgaagccaaaggtctcgtgtggtggcaccagtttgcacactggggaccctgaagaccactcagcgatgctccccttccaggtgcaggtgaggagcccagaccccaccatctggtggttggaggggcagcggaacatgagcacggtccccacggaagcaccattgccacgaaggacttggaaggttgcttgcgggggtagccgcagcttagcgcacgtgcctgtgcggttccctggggcaggcgtggtgaccccggcccgcccccggggcctcgccttgccacggagggtggcggccgcccagcgcatcctgcgcgctccgaggcgcttggcgggccc

SEQ ID NO: 324822 - DNA, 1657 bp, Homo Sapiens
  misc_feature (800)..(848): n is a, c, g, or t
  misc_feature (866)..(874): n is a, c, g, or t
  misc_feature (1298)..(1298): n is a, c, g, or t
  misc_feature (1308)..(1323): n is a, c, g, or t
  misc_feature (1438)..(1438): n is a, c, g, or t
  misc_feature (1529)..(1529): n is a, c, g, or t
cacatatagtgagatatagaaagttgttaaaaagcaggctggtacgagtcggaattcccgggatatcgtcgacccacgcgtcggtctgctgcatgtacagcgcagagaagccgggcgaaaagtggccccgaggcagctctctactcccaccccttgccggagtcctgccttggggagcacgaggtaccctgtgcccagctactacctgcgccagcccgagctactccgcgctggacaagacgccccactgttctggggccaacgacttcgaagcccctttcgagcagcgggccagtctcaacccgcgcgccgaacatctggaatcgcctcagctggggggcaaagtgagtttccctgagacccccaagtccgacagccagacccccagccccaatgaaatcaagacggagcagagcctggcgggccctaaagggagcccctcggagagcgaaaaggagagggccaaagctgcgactccagcccagacacctcggataacgaagcgaaagaggagataaaggcagaaaacaccacaggaaattggctgacagcaaaagagcggaaggaagaagaggtgcccctatactaaacaccagacgctggaattggacgacacgacttctctgttcaatatgtatttgacgcgagagcgccgcctggagattaggcaagaccattaaccttacagacagacaagtcaaaatctggtttcaaaatcacagaatgaaactcaagaaaatgaaccgagagaatcggatccgggaactgacctccaattttaatttcacctgagagcgcgnnnnnnnnnnnnnnnnnnnnnnnnnnnnnnnnnnnnnnnnnnnnnnnnnttgtgcctggtgatatannnnnnnnnccctccctgagtataaatgccaatgcgactgcaaaaaagggaaagacctcagactctcccttcccaagggacctgggggttcgtgctgcgaagaatgcttccactttatagcatgaagaaaattgggcgtgcccgcgatgctgggggtgtgggcggtgtggccccccccattatattggcggggtcggacaatgtgggggcttgggcggtgttgggtgtcaaaaaaccctgcccgtccacgcgccagaggagccttcgacaacagccagtgcctttttactgcgtttcctcccccatgtggcttaaaaagggttgtaacacgaagtcccgaaagatcgcccaacccccacagcccttttggtcacgcggggggctaaaacacagagagaggggcggaaacaaaagcgagttctgaacccccccncaagggagannnnnnnnnnnnnnnnagaactctgtttcggggaggaagggccaactggggcgcgcaaaaaatcgcgctgtctcctttttcccttggcgcgtgcccatttttttccgtcgccctttacgccaccttcatcngcgcccgggcctttctggggaaagagtttcggggcccatagtgcgggccgcgagtggggctctataagccactaaaccagcgccagagaantccctcgcagggatagacccgtcttcccaggtgcggatttttccgttacccaggagcccgctccgaaagaaagctctctcgtctaagcggcccggcaaattctgcataccgggcgataaccggactat

SEQ ID NO: 324823 - DNA, 637 bp, Homo Sapiens
cttcttgtgatctgaatcagatggtgtttctggggggacaggatcctgggtacggctctgtttgtgcttgtgcttattcttcttcttgggaggctgaatatgcatcagacgacactgctccggcaacggccagtgtggaggcggaacgactcagcatggtccctgtgataggattgaaagagctactgagaatagggggcttctcaatgagagagcggaggctgctgttatcatgggaaccagggcagatcaatcatccctggcaggtcaggcaggaagttacttagcttctccttcaccttcttcccacagaatttattataggcttgttccaagttgtagtgtgtgatcagattcgtgctgcctgtcagctctgtgctacctggcagttccctcatgaggtaaaaagggccacagccagctcctgacttgtccgcgccaggaggagccgtggccgcggtgggaggcggggccgtgccgggtcccccgcccgcaggaggcggtggcgggggtggaggctttcctggtccgaagccgagtgcggttgggggcggtggtgggtcagcctgagccccaaacagtgccgtgaaattctccatcgtaccctccgccccggcgctgtctccgtgtctgcccc

SEQ ID NO: 324824 - DNA, 467 bp, Homo Sapiens
cgggtttccatgtattttattccattccactcataccaagagacaattctttttgaggtgtgtttagctctctagacttaattactgctgtgtttgtcacattggctgcagtgagatcgtgacattaggattcctgggagcctgcgctgggcggaatttaagatggctcctccatgatcttcactctctgggtgaaaactgtcggtcagcccatgcccaggattgttgatcagtgctgaaggtcctgaggctgtttttagcatagtcgcgagggtccgtggcttcattcttgaagtcagtgagaccaagaacccaccaattccggacacattgggaacttagagcagtgcttgggacatggttatcagcgtcagatatttccttaaactagcgtgaagtcgactttaaccttccagcagtgtgagtgagggccctgaccctagaatcaacgcccaaagagctgtccc

SEQ ID NO: 324825 - DNA, 805 bp, Homo Sapiens
  misc_feature (50)..(83): n is a, c, g, or t
  misc_feature (578)..(683): n is a, c, g, or t
caccaattgacactctgtatctagctactctggtcgggaagtcgagaacnnnnnnnnnnnnnnnnnnnnnnnnnnnnnnnnnngtggggccagataagagaataaaagcaggctgccccagccagcagtggcaacccactcgggtccccttccacactgtggaagctttgttcttttgctctttgcaataaatcttgctgctgctcactctttgggtccacactgcctttatgagctgtaacactcactgtgaaggtctgcagcttcacttctgaagccagcgagaccacgagcccaccagcccacctggaggaatgaacaactccagatgtgccaccttaagagctgtaacactcaccgcgaacgtctgcagcttcactcctgagccagcgagaccacgagcccaccagagggaagaaactctgaacacatccgaatgtcagaaggaacaaactccagacatgccacctttaagaactgtaacactcattgcgagggtccgtggcttcattcttgaagtcagtgagaccaagaacccaccaattccggacacagtatgattccatttatgtgacatnnnnnnnnnnnnnnnnnnnnnnnnnnnnnnnnnnnnnnnnnnnnnnnnnnnnnnnnnnnnnnnnnnnnnnnnnnnnnnnnnnnnnnnnnnnnnnnnnnnnnnnnnnccttcagctgctacgatcaacttcagtattttcatataatcacttttttctttccttagttcttgaattattaattccttgagaagagtccaatcagaggtagtctttcttcagtattttcg

SEQ ID NO: 324826 - DNA, 773 bp, Homo Sapiens
  misc_feature (29)..(29): n is a, c, g, or t
  misc_feature (39)..(39): n is a, c, g, or t
  misc_feature (151)..(256): n is a, c, g, or t
  misc_feature (741)..(741): n is a, c, g, or t
tccgaaacatccagaaggaacaaactccnagacgcgccnaccttaagagctgtaacactcactgcgagggtcccatggcgtcattcttgaagtcagtgagaccaagaacccaccaattccggacacagtatgattccatttatgtgacatnnnnnnnnnnnnnnnnnnnnnnnnnnnnnnnnnnnnnnnnnnnnnnnnnnnnnnnnnnnnnnnnnnnnnnnnnnnnnnnnnnnnnnnnnnnnnnnnnnnnnnnnnnccttcagctgctacgatcaacttcagtattttcatataatcacttttttctttccttagttcttgaattattaattccttgagaagagtccaatcagaggtagtctttcttcagtattttcggtaatcctaatttctgtgcaaaaaaatttctgttccattttaaccgtgcagaactttctgttatctaaaacacagtttctctatgagagttcagtgaaaattccccttcccaaactgattctatgaatgactgttagataagcttcaccactgcatgtagagggtgtaccagggaacccaagttagtagctctcctcaaagacccaacttttggagggggtcatcgtctggttcctgggtatgcctccacaggtagggtccgcctcaggaagtcagcggcgaggagcacagaagaggctgccttcaccaacggacagcagttttcatcgtgaggggccgttcggaaaccgtttgggtgtgttnaaaggggcctttgggaaccggccttttggagg

SEQ ID NO: 324827 - DNA, 919 bp, Homo Sapiens
  misc_feature (210)..(218): n is a, c, g, or t
  misc_feature (255)..(265): n is a, c, g, or t
tcttaaagaagttgccattttggagaggttgtttcaaaaacccctccgtgtttccccgccgggggggtgtttttattgtgggggggagacccccaggcctttttgtcctggtcccgaggtttttccttaggggaaacaaggctattgggcccatgttctccctttacctttagtgggggcggcggggcacccaaaaaaggaaggggtttnnnnnnnnngcgtgctcggagggggcccgagggcgggcccgacaannnnnnnnnnntaaaatattatattcaccgccgtgggagggaaggggaggtaaaaactggcttttgtttacaaggtagatttgttaaaatagttttaaaaccagtttgcagttgtcccttgcccaagaatgtgaaggtttttgagaaagtatgtggccactgccatgtagaacatactgggtgctaaaattatcagcagccgttcttgttgtaattaaaccttcagctatacaacaaattgaccccaaggcttctccacgaaaaccggtaagttgtcaaattttcaagatcttcatgactatttatttttgaggtgtagtacttcattgccattacaggtgcatcaacagccttgataccctccccgttatctcgcacctcaattttatcaaatccatagttctccagtttaacatctacgcttgtggcaccagcatccaaggagttttcaataagctcttttacaacactgaccaccgaagtgatgatctgagaacttgaaaggagtcgaactgttgccgcaggcaattgtttcattttcgcttttaacagagcagcttcctgctagcgcgaggcaggcaattaccatccactagccgcaagcagccagcgtctcacccgatgcgcaggcccaaccccgcacccgcacccgcacccagcacccc

SEQ ID NO: 324828 - DNA, 1567 bp, Homo Sapiens
taatgaacacctggttaaaaagcaggctggtaccggtccgcgaattctcgggaatatcgtcgacccacgcgtccgcaaaacatggatgcatacacctgaagctttatcaaaacatttcattccctataatgcaaagtttcttggcagtacagaagtggaacagccaaaaggaacagaagttgtgagagatgctgtaaggaaactaaagtttgcaagacatatcaagaaatctgaaggccagaaaattcctaaagtggagttgcaaatatcaatttatggagtaaaaattctagaacccaaaacaaaggaagttcaacacaattgccagcttcatagaatatctttttgtgcagatgataaaactgacaagaggatattcactttcatatgcaaagattctgagtcaaataaacatttgtgctatgtatttgacagcgaaaagtgtgctgaagagatcactttaacaattggccaagcatttgacctggcatacaggaaatttctagaatcaggaggaaacagatgttgaaacaagaaaacagatcgcagggttacaaaaaagaatccaagacttagaaacagaaaatatggaaacttaaaaataaagtacaagatttggaaaaccaactgagaataactcaagtatcagcacctccagcaggcagtatgacacctaagtcgccctccactgacatctttgatatgattccattttctccaatatcacaccagtcttcgatgcctactcgcattgggcacacagccacctccagtacttaagtagatctactggagattaaaccgggacctgtttgggaagccagaaccttttgacccattttaactgtggagcagcagaatttccctccagatattcaatcaaaattagatgagatgcaggaggggttcaaaatgggactaactcttgaaggcacagtattttgtctcgacccgttagacagtaggtgctgacatcaagaacaagaaatcctgattcatgttaaatgtgtttgtatacacatgtcatttattattattactttaagataggtattattcatgtgtcaatgtttttgaatattttaatattttgaaaattttctcagttaaatttcctcaccttcactattgatctgtaatttttattttaaaaacagcttactgtaaagtagatcatacttttatgttcctttctgtttctactgtagatgaatttgtaattgaaagacatattatacaaatacctgccttgtgtctgagttctatttagttagcatcttgaaatttgtattccttttccagagggctagtttattaatgatttcccaaaagccataccttaaagataacttttttaaatccgaagagacatgcccatgtcaaacttaaacaggtttctggtttttaaaccaaccaacatgtttactatttcactgggacagaatatcaattttttaggaaaaaaatactggtcccccatcactgggcgaagaatgccaaaccttttaacacataattggcccacaaggggccaccttaaattttcctcaaccgagggaaaaaaata

SEQ ID NO: 324829 - DNA, 882 bp, Homo Sapiens
  misc_feature (354)..(354): n is a, c, g, or t
acccttgagttagaaaggtagagggttgcggggggatatcctaccacgagggtggtaagtccgctccaagaaaccaagaggaaattttcctttaggccccgctccacccagtgccgtggggacataaaaaaggggcctgggataaaattatgtgtggagtaaaattgtcatcttttgcgtggcgtaggggaccagtaaactgttcccaccccaggaaggaagtggagagggaattagtaggtgttcctgaggaccgctggaaagtcagggctgaaccctctgaggggcaactctagcagagagaaggccgaggggccccggtgttttcagtttccatccttcctcctctctggntacattcgtctccaggtgggtggagctgaggaggaatgtgtttgcttttctctgtcttccccgactgccctcccggggcaggtggatcatgagagcgcctagcctcagccagtcctcgtctgggatgcctgggatagggggataggcctcccagattaaggcctcatcccccctcctcaaggcgtactctcagctggcccactgcacattccagggggaacagggcaagaaatatcatggaactgggtaggtaaggccccaaggctgaccacaccctacataagacaagtccttctctctgccccttaccccaggatggcgaggcagacaccaggcgcagacctactaacagccatctcccaggcagtcgctactcaacccccttcacccagatccccacaccaagcatctccactgaggctgcatgtgctccactggtgggtcctcctagggatgaggtgggaggagcagaggagacagtctggcactgcactgggcactaacctaaggctccaccgggggaaaccc

SEQ ID NO: 324830 - DNA, 907 bp, Homo Sapiens; identical to SEQ ID NO: 150821
  misc_feature (588)..(656): n is a, c, g, or t

SEQ ID NO: 324831 - DNA, 872 bp, Homo Sapiens
atttttgggggagaaaaacctcccaaggggtttcggggggcccaggaagagggaaaccctggtgggccaattaagggtcgggggggtccagaggtacccggttaaggtttcctgaaggggcgtccaccccaagaggaagaaacccaaggtcggggttccagtggctggaggggaggccaaggaggggcgggtataagggaactagaagttcctggccaaagcccagataggaattcaggaaggtggcctggaacctggtggaattttacaccaaagtttggtgcagtcacactaaggagtatagagccctctgttttgagggtcattgcagaaatccaggaagcagtatttagagaatatccagaagccaggacacgggagaagttccgggtatttgaacaatcactcatctgctccttacttcggcagtcactcaccatgacgtcagaaccgctgctgttctttttgtggagagtgatgcagctgctgccagctggggtgaggcagatgtcagatcccagaaggcaccctaactccttggtctccaagaggcatcggtagcagcgcaggtatttggggaatggaagtggttgagggggttcccaattgacaggaacaaacttacctcatcctttttcctgccccgcctgtgctcagctgcggctcagtgggcctgaactccggagcccacagaatctggcgctgggcgtccgctctccgcgcctgaccgcacctcagaactccggtaggacgggggggtggccccccgctcaagctctgttccctggggaagaaacctggaaagtgcgaaccgcgcgtcgggacccaagcgtcgggccccagcggacatccggagcccgaagcggctcccc

SEQ ID NO: 324832 - DNA, 1198 bp, Homo Sapiens
  misc_feature (633)..(633): n is a, c, g, or t
ggacagtagagaagatttgtataaaagaaataggaacaaagcaaagcttctctttgactatgtctattgagatgccgtatgtgattgaattcattttcagtgatacacatgaactgaaacaaaagcgcacagactgcaaagctgtcattagcaccatggaaggcagctccttagacagcagtggattttctctccacatcggtttgtctgctgcctatctcccaagaatgtgggttgaaaaacatccagaaaaagaaagcgaggcttgcatgcttgtctttcaacccgatctcgatgtcgacctccctgacctagccagtgagagcgaagtgattatttgtcttgactgctccagttccatggagggtgtgacattcttgcaagccaagcaaatcaccttgcatgcgctgtccttggtgggtgagaagcagaaagtaaatattatccagttcggcacaggttacaaggagctattttcgtatcctaagcatatcacaagcaataccacggcagcagagttcatcatgtctgccacacctaccatggggaacacagacttctggaaaacactccgatatcttagcttattgtaccctgctcgagggtcacggaacatcctcctggtgtctgatngggcacctccaggatgagagcctgacattacagctcgtgaagaggagccgcccgcacaccaggttattcgcctgcggtatcggttctacagcaaatcgtcacgtcttaaggattttgtcccagtgtggtgccggagtatttgaaatattttaatgcaaaatccaagcatagttggaagaaaacagatagaagaccaaatgaccaggctatgttctccgagttgccactctgtctccgtcaaatggcagcaactcaatccagatgcgcccgaggccctgcaggccccagcccaggtgccatccttgtttcgcaatgatcgactccttgtctatggattcattcctcactgcacacaggcaactctgtgtgcactaattcaagagaaagaattttgtacaatggtgtcgactactgagcttcagaagacaactggaactatgatccacaagctggcagcccgagctctaatcagagattatgaagatggcattcttcacgaaaatgaaaccagtcatgagatgaaaaaacaaaccttgaaatctctgattattaaactcagtaaaga

SEQ ID NO: 324833 - DNA, 549 bp, Homo Sapiens
tcatgcatggccccttacagtatttcttacatgtttggggctatcattccctagcatgggatttgtttaggacattgtgctagataatagagatccaaggagggtctgtagcccaggttgctgcccacaagaggcttgtgggaacatagtttggttaaatcttacaaggacattggaagccttactctttttaagtggggatcatcccacacgccttaaatgctgccttgtcccggttatccctcttgccccaggagtgaggaaggagtgaattgggtggtggggtaaagatggccaccctggttcacacccccttcctctgctatatctttgcagtatgacttctctttggaaaagaaaaccattgagtgggctgaagagattaagaaaatcgaagaagccgagcgggaagcagagtgcaaaattgcggaagcagaagctaaagtgaattctaagaagtgcgagagggcgatagcaaaatgagcttctccaagactcacagtacagccacaatgccacctcctattaaccccatccacgccgagccct

SEQ ID NO: 324834 - DNA, 909 bp, Homo Sapiens
tggattcacaggcggtaaccctttctgttgtctggtggtcttcttcactgggccgtggacaatcctccaaggtggcatccggcactgtggccctgggtccagaagctttcgcacctcccttgttggctgaagtcttcattccaggcgccttgggtgccgtgggttgccgcccccgtgctgatccccgtcaccgttcactgggtgttcggtgttcttccgcctcgggctgtcaccaatcgtgctgctgtgagccactgcgtgcaggtctcatcagcgtcgcaggcgggtcggccacagcaggaggctacagagacacagggcagcggccacgcccacgccgcccgtcacagccaccatcgcccagtggtaaaagctcacgcaggccctgcagcagagctctgaggggcaagggtgcaggctctggatggccatgactgccagcccattggccaccttatccaagaagctcatggagccgtacacgaacgctccgctgttcgtgtggggaccgatgaggtcggccgtcatggccagcgaggtgacgaggatggtggcacagccagcacccagcagcacagccgctgcgtacacggccacacccagtccctccgccagcgccacccaggcggcaaaggccaggatcaccaggaggcctgagaagtaggtcatgttcctcccaatgcacttgttgatgggcttcatgaggaaggaggacaagaagccgctgaggtacatcaccaggggaatggtcgcgatgaacttcttgggcaggtggagcgagtaggtgaggtacatggccatgtaggtctgggacaggttcacgatgagcctggtggtcatgtacagtatgcccacctggtagaaagccggctcccggagccagtgcttccagagcagcaggggctgggc

SEQ ID NO: 324835 - DNA, 1256 bp, Homo Sapiens
ttcgctctaaaaactttctccttttttcatcaggatcttcgttagctgctcttctccgacgaccacttgtactttgggtctgtggagttgtgtgagctggagaagccggagtttctgtagtggatgtggctggctgttgtaatgactgcggtcgagattcctctgactgagtcctaaccaatccgctaccatgacctttgacagtatcaccattggtaactggaggatgttgctgggtcaaagcagcttttaatctcatttttgcttctgactgtactggttggggagaggaaggacctgggattcctggaacactaggcaccatggtgactggtcgaacgagtgggactgcagctagaacatgcacattagaacttgtaattgatgcaggaatagcaacaggcatggtttgtccattaggaagatgtaacagaagaggaaatgggcctggtacagggacaattggcctgttagaggatggtgcctgggtgattacagtacttgaggttggtgaaggtactgcctgctgaataattacacttgagtcagaacttgtaagcagcacattgggaacctgtaatgatgctggacgaacaatagctgatgtgggctgtgcagtttgtgccaatggtacttctttctcatcactggtagtagactctgggtgaggtaaaggactatcctggtgagttgtttctacaacagaaggctcctcaattttgcttcttatgataggtgttgcaagaggggataaatctagaggcatttttttaatgtcatcttcctgaagctttcttgaattcattctccaaatggactccgccaactcattaaacgaacccacttcttcacagtttcttcaagaatcttgttggtgttggggtctgatctggccacatccaggcgcagtacatagaaagggtttgtcatcactcatattccacaggtccttgtattgcctggcagaattcacatgtaacttgaatttcataagttgaataacttatcacattctttttctcatggcaagaatactttctagctggtgggccatgagctttatttactctgcttccaggaataccttagctgttatcaataagcagtcctttctcaagtttccatctagtaccctttccaggtcactagttcatgatcctttcggtcacccgcgagccctgagcacagccgtgtttacaaagcacccctggaggaaaaggctgaacggcactttaaaggccacgggctcccacccc

SEQ ID NO: 324836 - DNA, 411 bp, Homo Sapiens
  misc_feature (46)..(46): n is a, c, g, or t
  misc_feature (60)..(60): n is a, c, g, or t
  misc_feature (112)..(112): n is a, c, g, or t
  misc_feature (338)..(338): n is a, c, g, or t
aaacctccaattttgcccttcctgaactgtaactggttgggggaanaggaaaggaccccngggaatcccccggaaacactaggccacccctggtgaactggtccgaaacgantgggaactgccagcctagaacatgccacattagaacttgtaattgatgccaggaatagcaacaggcatggtttgtcccattaggaagatgtaacagaagaggaaatgggccctggtacagggacaattggcctgttagaggatggtgcctgggtgattacagtacttgaggttggtgaaggtactgcctgctgaataattacacttgagtcagaacttgtaagcangttcattgggaacctgtaatgatgctggacgaacaatagctgatgtgggctgtgcagtttgtgccaatggtac

SEQ ID NO: 324837 - DNA, 529 bp, Homo Sapiens
  misc_feature (17)..(17): n is a, c, g, or t
  misc_feature (22)..(22): n is a, c, g, or t
  misc_feature (46)..(46): n is a, c, g, or t
  misc_feature (66)..(66): n is a, c, g, or t
  misc_feature (71)..(71): n is a, c, g, or t
  misc_feature (91)..(91): n is a, c, g, or t
  misc_feature (155)..(155): n is a, c, g, or t
  misc_feature (161)..(161): n is a, c, g, or t
aaaaattgtcccctgtncccangcccatttccctcttctgttaaanctcccctaatgggaaaaccnatgcntgttggctattccctgcatncaattacaagttcctaatggtgcatggttcctaggctgaaagtccccaactccgtttcggaccnaggtcncccatgggtgcccctagtgttccccaggaatcccccaggtcccttccctctcccccaacccagtacagtcagaagcaaaaatgagattaaaagctgctttgaccccagcaacatccctccagttacccaatggtgatactgtcaaaggtcatggtagcggattggttaggactcagtcagaggaatctcgaccgcagtcattacaacagccagccacatccactacagaaactccggcttctccagctcacacaactccacagacccaaagtacaagtggtcgtcggagaagagcagctaacgaagatcctgatgaaaaaaggagaaagtttttagagcgaaatagagcagcagcttcaagatgccga

SEQ ID NO: 324838 - DNA, 666 bp, Homo Sapiens
tttttaactgtttatactggtttaatccatgtcaaatgtagtttacaaagggaaaggacaagtacctttgtatagaatatacagacacagcatcacaccacagggcccacgggagggtcggggagacgacactttttccctgggaaaggcagctctaatcccaggaatggttctcagcagaggctgggtggccaggagcactgtcctctagccccctaactcagcctctgcttcagctcggttcccatttcctgcctctaccccccaactccttataaagagccccatgagctaagactaaggagaggatcatgtcccttggggcgtgtgccccatgtctgggagaagaaatatacaccactgaacaccgagcacatgggagagggaagggacaccacaggagagagagaggcaggtaccccaagaggtggatgggccgagctcccagccaaccctgaaggaggcgcttctttcaggggttcttaaaaaagaagaaaatcatacaaccaaagggggaggggacaggtagagggcgaggagttgtcccatttatacacaacattgtaaacatacacggtctatattacatgtgcttcagtctggtgtttgcatgtctgtctgtccgtctgtcagtatgggggctggatcttaggagccgtgcccccc

SEQ ID NO: 324839 - DNA, 1147 bp, Homo Sapiens
ggagggctgctggcacccttactcaaggacattctgaaagcttcccttgcacatgtggctggctgtgagctgtgtcaaggaaagggctttatttgtgaattttgccagaatacgactgtcatcttcccatttcagacagcaacatgtagaagatgttcagcgtgcagggcttgctttcacaaacagtgcttccagtcctccgagtgcccccggtgtgcgaggatcacagcgaggagaaaacttctggaaagtgtggcctctgcagcaacatgatgcccctgagtactgtgaaaaagactgttcaacatgccttatgataacaccgatttgtgtctattattggtgacattgttttagatattgggtattgtatattaaggaaaaagatggtctatattctctttattgcatatacttaatgtttcaaaagaatgcagattctgtgtttaagcacagggctgatagttgtggttttgtttacaaatgttctgttttggctgctattggttttttaaagaggttttttatacttttgtatttgaatagttatgtttcactgatgctgagccagtttgtatgtgtgtgtatatatgtgaactgtaactgacaagatgaattactcagtttctctttctctaaagcttgtttgatgaaactggttggtcctttcagtgaacaaaaatatgaccccaaatctgtttgctctggcttttatttcttcaggaagcagacttccacttaaatgccattttgtgattgtgtcaatcatacacattttatttacttcagagtttgaatagagagtacacatttcttctgcagatttatttcatgatgagtttgagttgcttagcagggcgtgtgggtcccgttgaagtgcagtttgaagcaactgcttctagatggcactctttcaggtggcacaaatttgaacctgtatttgtcatctctgttccacacactgcaatgtcaagggatgcagaagtgagtagaattccatccctgcccttgaggatcttgctttaacagatgtaaaactgaacataaagtatttgcagatttaacgaactgggggaaataatgacagtgtggatctagtaatacattaaaatcatagacattgactattaagggttaatggatcccc

SEQ ID NO: 324840 - DNA, 839 bp, Homo Sapiens
gcaggctttaagggccaaggggttttggcagggttcccccaggggctttttcccgctgggggaattcaataattcccttccttgaaggagggaacaggggccccgggccaggggtgaaaccaagggaccattcccgaggaagatcccaaggatgcggattaaatcggaagtgccacgggatctttggggtggcccagtgggtagagagagtccgggcagcaagctgcctgaagtcagccagagtttgcatgtgcccagctgtcctggcctccagcatctcactgacataaggtaagtgggggggctgagggtgggggctcagggcctgagacgaccgagcggtcagcgaagggttggaagaggatcacactcggtgcactccttgtccctgcactgccagccattgcgacaggcacactcagcattggcagtgatggtgcagttgcgaacgagaagaccagagtttacagtgccgacagctctcacagtggggccgggtgtggtggtcaggagagaaggagacccccggtatgcaaggatcacactgagcagcctttctatgctggtcacagtccttcacgaggaatgttcctggctcacacatctggcagcacagctttccctgagcccagtagtgcctctctgggcagctcttgggggctggagtagctgagagccccaccagggtccccagaacgcacagccaccagggatgtggccgtgccatggtccctgcccaggcggctcctttctgtgcccagttgctgatgctggcctctggagttagcacctccaagctgggcactgctgtctcttctttgcaccccctgggcagtccc

SEQ ID NO: 324841 - DNA, 778 bp, Homo Sapiens
caggtttggcacataaattttatttaactttcacattgacacaatcaggaaaccattctgagaaaaggtagaggccgccttgaagcgaacctgggctccctcctccaccccgggctcggcggcaccatgcaggctcaggctggcactcatcccaggaaactgtcccagttctcagcggtcctggctgtggacggtatctgaaatggtcgctgcggcttgccctgcaccagggcctaccttgttgccaggaagccgcactgctggaggctacctgggcgctgggttttattgctggtgaacttggttacccaccttccagtcacatggtccaggatggtggtgtgatcagaaatggctctggcagtgcccattttgctgagatgaaaggaatcgaaatgtataaactacactgaattctgtgatgctggcaggttgcccctgctcgtcttcagccccaacatgggagctccctggagaagacaggtggagattcactgctgtccacccaggtaaggcaagtcagaactgatgcgccgggatccacagcagcctgagctccaagcccaaccagcgcccccattcctgggccatggtccttttaaggccctcaaagacactccccttctcaggtagaaaaagcctcccctcccctcaccttctaaaatcgtatgtcttgtgctgaatgaaataggcgcttggcagacacaggttcagaagcatggaccagcattacacaggcatggattctggaaagatggatccctggacaccacaccac

SEQ ID NO: 324842 - DNA, 986 bp, Homo Sapiens
  misc_feature (359)..(403): n is a, c, g, or t
tcccccagaacaatgggcatgcggcccccccgtgtttttatgagtgttctccccacgggaaaaaggatcggggctggggtgttccccggtgggggggtcagaaagtgtccacttatctttctggcggaacggcagtcggtttccccttcaacgcgcggtaggtttgaaactttgcccccacctttctcccaaggggtcaaacaaggagggaagcctctgaccctggggaattttcagcggtggttccccgcgggaaaagggtgcccggggccccagggggggcccccaagatttgcccttcgcttggaccagggggaggggaggggtcaaaagcccccaggagaggtgttcccttggcnnnnnnnnnnnnnnnnnnnnnnnnnnnnnnnnnnnnnnnnnnnnnataaaatgattaggggcgggctggcatgccccccagaaaacggtccagggcacagggccccaagtaacccccccgagtaacaaagggtctcaggaaaggaagtgctgttctcccaggagtcctgcccctccccttccagtatccagcacagccatcaaaccatctgtgggggtgcagagtaacctgagggaggctggggactctgggatatgggggtctcagcactgtccatccaagaagcctgcttgccagggctgcagtgggccacttcattcttggcgtcagcctgggttagtgcccctctgctccagatggctcacatctgtccaatcattcttctagggtcactgaagggtgcaagagctacgaacagattccgacagtccctctttgtccagggtgtcagcttcccagcgagattccctcatctgctccttcaagtattcagctcgggccatgaggttctgaacctcagtgtgaagcagctcccgcctccggcccgggggctccgctgccagcaacagcagtagctcccccaggctgtgctggtacaggtccagggcatcctgctccccgccggccc

SEQ ID NO: 324843 - DNA, 767 bp, Homo Sapiens
tgggttcaagcgattcttgtgcctcagctgacatgctttgaaaaatctttcctcatgtgatactcctccccagtactaagataccaattatagaaaatcaactggttaggattacattttgcatttgataaaataggaattgagatgaagaaaatagttcatacgtctctcctcagtatttccttcaattcttcactcttgtatataaatcaaaattataagtgacataattttagcaaaccaaaataaccagtaaaccaaagaataattttacttaaagtacagacaacctcctaacaaagagttgaccaagttaacacctgaaatttaaaaacctttcatcagactgctttcagcatatttaggatacatacatttcttcttttgaaatctctaccatcgagagactaaacacagtacgatacttgcagagatttccattaacaacttcttttcaaatagtgacatttgcaatggaaacagctggtctctattctcatctctaacaacagaggtaggcaggcataaagggtaaagagagttgcctctcagtttgactctctagccagaaccctctgcagagaaggcacttagaagaagcaccccacgtggacatgctggccagagtcctgagtggaaacaagcctgtcagagaactgcagtctatgccagtaagtgaacgagagaagatataaccacacggacaccgtctttacatttattcacacagagggataagaatcagtaccaataataaacagtgcttt

SEQ ID NO: 324844 - DNA, 800 bp, Homo Sapiens
accctttcattgtttaggccccaaagagaccggagtggtttgggtggtttcccaggggggcaggtagaaggcagcccagtttaggaatttggagtgtagcaggtcagccttgggcaccggtgtcagccactgttcacagggactgagactgggaaatgacaccttgcatattgtctctataggaggtcgaatgggaaaaagttacctggagtatgatttttctttaacccaatagggagcttaaatgtgactgttgatacaggttttaaaatgtaatacaaacatatttacgaacctggggcttgactagaggctggaggaccccaaaaaggagcgccactcactcactgtgtccttgcatcctcaactgcccgcatgtctccagaggctgcttagtgcccacacgcctgggaccaactgtgactccaggctgctgcttgtcaccttgccttagtttctggctgatcacctaatcactctggagctgagaatatccttctccccacatcttaacccgtgggcaggaattctgtgagcgttttccctgcctttagggactgatgacactcggtgtgtgggtggaggtgggggagtcgtcagtcttatgatgagtcccttctgctggagactttggtccacgagagagggtagggggcaggggagaggccgatactcctacagggggggtccccccttgctccccatcaaaatgcagagcaccccattactccagcaccagagttgggaagggacacaagaggcaagggctggcttcagtcttgggctcctgtctgtccccc

SEQ ID NO: 324845 - DNA, 830 bp, Homo Sapiens
tagtgtggataaaaagtagttcgttgggggttcaaaagggggaacttttaaccccaaaaaggccatagggctgtcccggggtcagaaaaatttcacctttaaattccctgcagggggtttcaagattgggttcatcatatccctggataaattcatcaggcatttccacatttttgaaagatggtaaaccagaactctggaaatcctttgggatctggctcttcagccgttgccgctgctttttctgtgacgactactttacttttcatgtctccagccaatttctcttcctcttcattttcactgtgccattcggattccgcatctgttggttcaacatcgccggtgataaattctcttctctggtcaaagagaggctggtatagcgctgcatattttctttccaagtcatgtacttcttcatagaacttggcttctatgtgagcgcatctcacctgaatttgtttcaatgcattaattcttctttttactgctttaggtaaagtttcgatgtagctggaaggggtgtgagggacattgtcaagtcgctcctgtaaagctgccagaactcgaggattctgcatcacctgatctgtgagcttttctgtgttacttgcatttttagcagcttccacggaatctgaaggaaccccatctgaaaaactgtgatctgccatctgaatgtttttatcccctcacgcctcctgcggcagtggcggcgaccctagcttcgctcgctttggggctgcgccgccgtggcctccaacaacgccggctcccattggccgaggctcctagctcctctctccgcgagcaagacaggctgcccc

SEQ ID NO: 324846 - DNA, 978 bp, Homo Sapiens
tagattttgatgtctctaaggagtcagtttttattttttaagaggagacctgttacacccaagcatggattcaaaagagatacaactaaaagaagcttgcaatggaacggatcattaaggaccttctcagaaatagatgaaatggatgtgggcttagcagttgttgttgtggatgattcggcacttcaggagcttgagataattgtcgattttatgtgaatccctgcgtaggcagtggagcaggttataataagcagaaaggcgagactcttcatcagccatctgcagggatggaagtcccgaccagacagggtagatctcattttctttggtttcaggatgaacctggctgactatcagctccatgccctctagaagccgtttggtttgctcctcaatctctacagctttggataggatagcctccggggcttcttgcataccacgtacttccgtgaccagatgatacagaggctcattccaggatcgcaatatgctgactatcaggctcagaaagtctttttgattcatctgttgggcttgctccttgtcttcgggggtggcaagggaagaagtgtggcagctgttgatggccttggtaatgaacccccggccatgggtataccgtttatcgaattcgctgaacatttctgaggagaggttatggatgtagtgggacaggacgacggcgcggtcaaacaggtctcgaagggtcacctggcatcgggcagccccgccgggacagatgggcaagggggccacgctctggcacaggagcaggtttgacaccagcagcagcaggagggaccctttccatggcgatcctttgatgttcatgttcgtgatcgttgcaggaaacacacttcaccagagaagatctggaagtctcacggttttctctttcccagatattggctttataaacctttgatatcaaagcctgtatgttccgattcttcttggtgtctctgtctttga

SEQ ID NO: 324847 - DNA, 845 bp, Homo Sapiens
gaggaaaggcctccctttccgaagccttggaggtgcttcccttcccattagtaaggaaatgtatgttgggttttaagttacaaaccaatggttccagtcccagttttttccgtcggtgggcccttttttcatcatgtaaccctggttttaccccatctaatataagttcattaaaggctccattattgcccatagacacagtctgccggtccatgcctttggtaggctgtccatttccaataagctcaataagttcccatgcagaaaagcccatttttactgtcatcaaagttgattttataatgttcaaattgttcttgctgccatcctcctcccatagcttctgtaagcttcttaagcaggtattcaatctcttgtgacacaataattaatggatacttgtcctcagataaaaagttgaaaataacccatattttaaatgcatcttcttctgtaatgagcaggggattctttgtgaggttttttttgacacagagggtccaacacatcctattgaattcaatcttgtcaaagttgtcttggacctcttccaaaatgaacctgtttaaataaggcatgtagccctggttggacactggaccctcatcatcatccgtgaagtgctcttcaagggcaactgggtcatgaggagccttcagctccgtgcacaggttatgggaaaggaccttgagctgggacttggagaccttgccgctgtggtcctggtcgagtgcggtgaaggcgtgccagatggctttgagcagctcctccttcaagctccccatggccgcggccctgctgccccgccaacccctcctgcccagccagcccctccgcgcctcccc

SEQ ID NO: 324848 - DNA, 796 bp, Homo Sapiens
  misc_feature (174)..(228): n is a, c, g, or t
ccttgtggaaagcccgaggttgggttgatccactgaaagcccaggaatttgaggacccaggcctgggccaaactaggcaaaaaccttgtttgtgagtacaaattatgccccaggggctaaggtggggtgggaccacacccgtaatcccagctacccaggagaatcggctaaacnnnnnnnnnnnnnnnnnnnnnnnnnnnnnnnnnnnnnnnnnnnnnnnnnnnnnnntgacagggcaagactcaaaaaataaaaagggaacattactaggggttagaaactaacttcattctttttagaattcaacagttttcctaggtcaccaattccacctttttgttcttattaagggcgcaaaggtcacaggacccccttcctgggagtcactgtcattaaatctattgccgtcagctcagcccagggtaggcaaggttcaagaatggggaagtgcttttgtctggggaaacacgcaggtaatgtgatgctaggaaggaggatgtgcaggtgggtgagagcccaggagggagcagctggtgcctgacagggtgagccatcagggctgggcctgggtacagccccaggagaaggagcctgtgcagaagtagcagttcagtggattccacctcctatgtcacaatccagcaggtggccaggactcagcctgggttttaagtgagtaatgccttccctgtctcagagattagctctaacagtgtcactagaggaagccctggcgagggtgggggggcgtagtgtggggacaaggaggccagatagaaagtgctggaatgttccc

SEQ ID NO: 324849 - DNA, 1165 bp, Homo Sapiens; identical to SEQ ID NO: 150833

SEQ ID NO: 324850 - DNA, 1666 bp, Homo Sapiens
  misc_feature (723)..(736): n is a, c, g, or t
aggcgctggcgagacaccccacaacacgccggtacccgacgggtgggtaagagaccctggcccaatacaacacacaatggcacggggcttctctcgaatggggcagccacaaaattgggggggagccccccacatggcgaccaagagggcgcgtctggacccttgctagaggaccacccggaatgcgcgagaagaatatggagactggagcacaaagggcccccatcgggtgaaagtgagcacacgatgccgcgaagaacattcttgggggccgctagttgtgaccaaacaacatgtgggaccaaccccgtggacccccgtttgccgcgggtgtcacactagtcgaaccgcccttggacctctctaaaagttgtccaagccccactgtgttgggcgggccccactggggggccacattcgcgcagttggaaaccatgggccccactgtgattatcctcacgggggtttccccctttctcagaggatgtgtcccacaaatgttgctcagggtccccgtatggtgtgttctaatcaccgcgccctcttgctcacagccgccactcactctgggtctggggaccccagccccccccggggtgaattgggctttatgcccgcccgtggttttaggccccccggtcgttccaagctggtccctggaatcctggccgggcgcaacccttacccttccctggtgttttttcccccctggattttttttcnnnnnnnnnnnnnnttccttccttccttccttctatccctccttcctgaaatgagactttctgccaccttcccttcctctcacaggtccattccttcccctctgtcggcctttgctccacatagctcctctaccttccagcaactccaccaccacccctgcttcacaggaaaggggtagggtgaggaccctgtccgtctaaatggtctggccacttccactccacccgagtggagctgagccagccagtgcctgcctcttcctgtacactgacccgcagtcatcccatctgagaagatatattggataagaaggcatttaagtccccgctgtaggtccaggtccaggtccaggtccagcccttctccagtttcggtcttggtgggcttcaaacccccttcttccccaggctcactttctccggtcctttggcttcctctcctgccgccgggcctgctggtcggccatcgtgcgggggatgaggaggacactgccgtccccggcgtactggagcgcatactgactgggcgagtagggtcgtccgttctcatctcgcagccgcccaaacacctcctggtacaggctctggaccttctgcttcatctgtcgcagggagcgcaggaactccactttctcccgcagcagccgggctttgtcacgctgcaggtcctccacatcacgctccagattcaggatggtgtccagcttgcgcttgcggcagttctgcgccgccatcttgttcttgccccggcgccggatgtctcggatgaggctcagctgggcttcactcaactggtatttggacagcagttcattgaactcctccacaggcaggttgatgattttgcgacgcgtggtcgacgatatcccgaaattccggaccgtaccagccgctgctttttaaaaatcccaagcggttgttctatatttcacatatatggcatc

SEQ ID NO: 324851 - DNA, 915 bp, Homo Sapiens
  misc_feature (572)..(572): n is a, c, g, or t
tgcaggagaaatgtcagaatttcaggaaagggggaaagacagaggggaggcatacatatccacctatgaaagcacactaatggcaatgaggaaacaaatacagtgaaataagaaatcagggtgacatccctgctggatgtgctgtacaagctgagactcccaagatctgagcctgccattaagggagtcagcacttacttcaggtctatcctgcagatgtgagtcagtcttgacttgccagagccacacggttctatcaagtactgcgagtccatcaccactgctcgcacaccacccaggagctgggcttcctcattgctccacggagagggacaccagggtacacattcctttgggcaaatcagttttccaggtcctgtagcaaaacaatccgcacatcagagtcatgactgagggaggaagaagaacctgaacacagagctaaggtttgtgtttatattttcctgccaacaacctgggctcagattccaatgctagtgacttggattaagctaatggctttcataagcttgtgtaaagtttatacagagaattttcaaagccaaggatcntcagctctgggactgtgaggccagaaatggtcttgcagctttcagatctgcatttggaatccccagctctgcttagctgcagaggctcctgcccattctcgaagaggtggttttacagtttattattagaactcactcattcgattcattcagcagacatcaattaagcagatagacatgccagtctctgagaagccaccaaggacataaagatatacacagcccaggaggaaaaatactgacactctaaacagaattctaaaagcactgaggtaaatgcactggtaagattatgcacagagggctctgggatcacatagagggggctgcgggaggaaatatg

SEQ ID NO: 324852 - DNA, 536 bp, Homo Sapiens
  misc_feature (388)..(388): n is a, c, g, or t
  misc_feature (459)..(459): n is a, c, g, or t
  misc_feature (489)..(489): n is a, c, g, or t
  misc_feature (504)..(504): n is a, c, g, or t
  misc_feature (512)..(512): n is a, c, g, or t
  misc_feature (521)..(521): n is a, c, g, or t
caacatgtatagcttttatttacctacccaagttccttttacatgtgagttatctgcattccaccttgccccctctcccaggatgaatcctcttggcacagaggaaggggtgccccttcaactagggccagagcctagatgacctggtggatcccccaccatgaaaaaagcaggaagggaatggagaagaaaagtgttgatcacacctagccctcaccacaggagggggaatgaagaggtctgggggactgcccccattgctatgccccagtccttaaatacaaagcaaggagaatgaaaaggaccctccctctgaaatacagcaccgacctcagcatgggagggcaaaaggacagtggggcaagaccacgttccctccgaagggagnaggggcttgaagggagagcacattaccgtttaggttggcttgcggcaccccttcccttaccggggttcttnattgcagccttcagcaccggggagttgggngagagggggagggangaaggggntgacagcanttttgccatccactt

SEQ ID NO: 324853 - DNA, 777 bp, Homo Sapiens
ttgtttttcgtttttttgtgtctcttcctcctccacttcctcctctctctgctctttcttctgggctaggatctcctcttcactctcctgttcactttccttcaggcttttagttcctttatttccctccaccttctttgctgtcctctgaacgggttctgcctcgctttcctcactttcttccctggcctgcttcctactgactgagggctttgctggttgcctgcttctttacccacaggtttcttcttagtcttccccttgtaccccttttcctcctccctcactgctctcctctccccctctgtgcgggcaggtccctctgccgttcgtcatcactgctctcctcaactgcctttgaggctcgccttggattctcctctttggctgggctgacttctgctgccaccccattctttgctgggggtccaaagtagtctgggctggagggcttcagagccggactccgactctgaattgaagcggaacctttttctctccgggtcgctacaaggggtgggaggcctcttgcccttcttggtaaggtccagtttgtcttccctggaagcggcttcatccacctgcatcttcagcagctcctcctccaccagccgcttcagtgcctgcttctcctcgggctccaggtggctgcggcccgagtgagctaagtacctccgccgcacgatggaatgcgtaagcgtgctgaggtccgggcggcctcggaagaagctacgggtgaactcctgcatctccttctcccgcgccattttgctcccc

SEQ ID NO: 324854 - DNA, 961 bp, Homo Sapiens
atccccagtgttttggagacctttttcaaccctgttcatcaggggaagagatcacgtcgttttgagagcttctggaggtcaatcgaagggggtttccagggttgtttggtggtccacattcaggatcacgacatcatccagggccatgttttctgactttctccattaaacttaaatggattcctatgaggtagggcatgggagcacagcagtagtccagcagatgcggcggcagcacggggatgtacacgtgctgccagtacatggggtagagcatcgccgcagacccgtggatgcaggcagtcagagtgctgagtttggctgcaaatgatgagtatccggcgttcgtacagcatactggcgtacagatgcaacatgttgttaacatccacagccacaaaatattctgtcagatttctattctcaggtatgctgggaagttctctggtatcaggcacagtaaaataagaatgcacgctgagatggacagacactcctgggtcagggatgggaagtttgtgcagagtttcaagaagctcattccactgattttcctgtctttttgtcgtgtaatctgccaggatgttaagcagcttataaaatacctcgaaccaggggagatagcttaagatacagaagcagctcttcgctcctgaagataagcggcagaacccgaatctctgtttgctgtcaatgtcagtgagcacgaatgtgaagttctggccaacttggctaactgtgaggctgtccacatagaaggggaaacaaaacttggtcaaagtctgtagaacttcctggtcactgtagtcctccgggaattgcctctgcacctcaggatctgaaagagtgccacctgtcctgggataggccacttcaacatatacttcaaatgtggtctctggattctgcttgatcctggagcccatggtccccaggcctcctcatgggcccgcgggccccc

SEQ ID NO: 324855 - DNA, 820 bp, Homo Sapiens
ggcactgtttgcattgtacataggaaggaaggaagttcttccagcctcaccagcacctggcagcgagtcagagcctgtgagggcatccgaagcagtgatgcagtgtcaacctcccagctggtgccactctgccctcgggggctccaagcattgtaactcagtcatgggagctgcctctttggaagtgcagatttattcctgtaataatcctgcctgcttttacctctcgtccactgaccagcaagtgtgagtcccggtgtcagtcggcacagtccagtgtccatctgcatttgctcatgcagagggggtgagttgggcactccctgttgttggttttccttttgcagcacactgggcagtctccctataaaacaaaaaccccaccttctgtgccttctgctttagagcagagctccccctcccatttcctcagtcttccctgcaaaatctgtccaccggggaaggcagcaggaaccctgggcagcgggtgttctgggaaggctagtgacagcagatgtcatccaggaacagccacacacggttctccaggccgccgtcagcagctcaaggtggggtatgagtgagaagctgaggatctcgcagcttgttgctgagcaaggtgcaaccggggctcatgctgtcatcagcacaagacgggatggcaagggctttcagacgcatttccaagagtccagcaagccaggggggaagatgatcccttttgccgaagtgtaccctctagcccacttttgggagcggctctgttttcaagccgctggggatgtgccctgtcctctgggtgacccacgaacggggaagg

SEQ ID NO: 324856 - DNA, 1001 bp, Homo Sapiens
gtatatacataacgacagccatgcgtctcttcatccacgcggtttcacattctcctctttatttaccgtcccctttttcaggagcactcgttaccccttcaaccaaaacctgttattttgagaaaatcttcagtgttaaatccccccccaacaatatcttctaacccccccgcctctatcttgggcgcccccgttctaccccactccggcaactgcattccaaggatacccataagttcgaaaaagaaatgtgttcatactccaacaatagtcacatcaaccaacccacacactgactttatccctgaactttcacgattggcacttttgctcgaatcagctgagttctctgcaatgtagcccgaaagtctagtacagaagtgtttatggactaaggtgagtatatgccgtgcttcagtctctgatttactggttcttccttaactactaggcataaatcaccatcactgctccgggtaccaaatccatttaaagaggacccaaccggggagagtctgctttgtggaagataacagctgaagtgttctgtctgcagctgtgttcgacagagttctttcgtgtgctttaaatcacttatttgctgctgacatgtttcaaataactccagtatctgcgtgactcaacttatctttggcctcaggcagtgtgatttctctaggttctaaaaatgcaatttctcgaaaaggtggaacacatctgactatatctggtacataatgtgtatgaaacaatggtggcattgagtatcttcgttcacctgataaaggcactatctggttaactacagttggctcttggtggggtgaatggaaacgttgccgtttaccgtcaagaggaaggtttttttcatcgcttaatctcttccttcctcgaaataatggggaacgctgaggtctgtattggactgacatttccatatgtcagctcgggacgcgtgggtcgacgatatcccggaattccggaccggtaccgcctgcttt

SEQ ID NO: 324857 - DNA, 861 bp, Homo Sapiens
  misc_feature (90)..(90): n is a, c, g, or t
  misc_feature (97)..(97): n is a, c, g, or t
  misc_feature (189)..(189): n is a, c, g, or t
tttgggatgggagtctttcttctgttcgccaggctgggaggtgcagtggtgggattctcagcttcaaaggtaatcttctaaatggtccantatactngtagtataacaatgttttttcagtccagtatttatgagggtcactcggctgcagcaacaaaatatttcaactctagggaagagtgtagcctngtagcattagcccctttgacaattttcttacaagatttttactttagaaacctccgacaccatgtagtttcttcagatacagtatatccaaactttttatagaaaccaacattttgtggtagacattcaagggtaatcttgtaacagttcagtttcttgcttagcaaagtaaggggttgataataacaatttgccaagctgctttcctctgcattcatcactaacaacaacatcttctactcttcctctcttagcacaggaatggatgaatttatgttctataatcagagttgccgtagcaacaatctgtcctagagtcacatcttctacaactgtaacataataatccccagatttcttcatatgctcaaaagatttcataaattgttcagggctgacaactccagtctctgttagctgacccaataccttaaaaaaacctctatttaagtcagcagtacaaagaggcctcaaaaccaagccttctccaggatgtgttggggaaatggctggagaaaatgtagctgtattctgactccagtccacttctttgagtagacttgggtcaaacataggagtttcatcaggtttcatttttctagtaaggtccgtagaggccctgcggtcggcgctcctagccaggcgcgtcggactctcccccaccagtgtccc

SEQ ID NO: 324858 - DNA, 863 bp, Homo Sapiens
  misc_feature (70)..(78): n is a, c, g, or t
  misc_feature (381)..(405): n is a, c, g, or t
  misc_feature (694)..(714): n is a, c, g, or t
atattcattgccaggttggtgcttgatgggggtccgctgaaagtttaagggaccggttcccggacccggnnnnnnnnnccaggcggcgaagggggacagcagccccagtggaccctgggttaagatgtgtggtgagactgggatctggaaaggaggccagagccctggtatgcatgatctgcccggaatgttcccagaagaccccaggagcggacttgctgagagcccctgaggggcagggaggactcccggcccagaatgtctgggccggaggactgggctttgtgcagaggtggtgaagagcagacagaggcaggccagtcatgctgggggtgggagctggctcggaggtgggagtcccagggactggggtgcctgcgnnnnnnnnnnnnnnnnnnnnnnnnnattcctctttcagctgcacctctgtgtagtagaaatcctcctcccgcttgaactgatcagagtccactgtgtcccccagatggagggctttgacgtgtcgtttgatgcccacaatggagcgcagaactttgccacagtttggccacaggcacttgtacatcaccttcacagagttctttctttttcgtggagctggttcgtccagcaggaaagggtcaggatcggtctcaaagccatgatcagtttggggagaaccaaaagcatcccccaaatacttggggctggcctnnnnnnnnnnnnnnnnnnnnntggagacaccactgctcccactccagtgaccgctggtagtgctgctgccgctgtccgagatgtcaccactctccttccatgggtcgcaggccgcacgggaagcagagaagttggcctcggtcccgggaggactctgtacaacagggccc

SEQ ID NO: 324859 - DNA, 625 bp, Homo Sapiens
  misc_feature (181)..(228): n is a, c, g, or t
gacgttggcagtgacatttatttttctggggggggggagttatatacagcagtgacccggagcccctcacccccaccaggcttaggtggggacaggaggcgttggcagaaggcacacagtggcagtagcccagaagaggccaggaagtaagggtgggtatgtgatgtgtcctgggagaccnnnnnnnnnnnnnnnnnnnnnnnnnnnnnnnnnnnnnnnnnnnnnnnngtgcgaaggcagctagtcccgagagcttgtggtggttgcttctctcttgcctgggctacaggaggacgcaggggcagcccccgcccttcttcctgggggcactgggagggctcggtgggagctcttgttcctggtatttccggacagcccgcaccagctgctcaaaagcctcgtccacgttgagacgcagtttggccgaggcctcaaagtaggccacgtggtgggaggcgccgaaggcagaggcttctgatcgggggacctggcgctgtgactccagatctgccttgttcccgaccaacacaacggggaagtcgtcgcggtccttgacccgcagaatctgcgtgaagagcttgcccacctcgttgaaactctgccggtcattaatggcgaacacccc

SEQ ID NO: 324860 - DNA, 1225 bp, Homo Sapiens
  misc_feature (1073)..(1073): n is a, c, g, or t
aatatttttaacattgtgtcttttaaaagaaatgttttacacagttcatccaaagagcagagaactgaacttctcactattgccttggccctgacagctgttaccagcacccttttcccaagaaaagtcaattcccaggtgcttattggacatccttcgagggggaagaggagggaagcggccagctcacccttccgggaccctagtgtggggcgaatctcacggacctgacctcagaggtgcaccagtgccgcccaggtagataagagctgcagcattgactgtgcttccgttcttccctcggggattgctcatggcatgggcctcttacgtgctgtcagcttgatgtgaagatcaagttcagtgctgtgggatttttaggaacaaaaaactgtgacgtctggatttggggttgatttttgtgctggggtgggattatgggtcaatgttgaagaatttttaagtctgtattatgtttaaaacatgaatgatttgaaagtttaaatttttaatttttatatgtggaaattcttcctgttggctaaaggggaagctcaagtggtgtcgtcttttgtgctgttaaatatatattctattctttggaagaaggcagagagaggagtcttattatttttaaatgctcctagttgtatagtctgtctgttgtacatagagttcagcttgttttttggctccagtaggaaaaaaaatccatccatctgagatggggtcctgttgtttattatcactctagaagttatacattgatatttattctttctgtccccacgttgtggcacctgtagacatcttcaaaattggcagaaaagataatagttataaaaattttagttcatttatttttaaactcctttcagattattttaccattaggaggaggtagattgtttcgtcttcctgtctgatttttgttttgtagtatttaattttgtattcctctgcagttttaagaaacagtgtttttcttcggtttgctggaacatgggcgttagagatggtaataaaccgtggtcctttttgcgatgtcacgactcttcacctgcctgggctgntgtgcacacagtgcagcctggatcctgtcgatctttacttgtggcggagctaatggtcacattgatagttgattacactgtggcacgaatttatgcagaacactgttattaataaaggaagtaaagggctgcaagatttgagagctgccacc

SEQ ID NO: 324861 - DNA, 786 bp, Homo Sapiens
  misc_feature (58)..(58): n is a, c, g, or t
aacggaaagtgtttagaaaagctttttgaggggccgaggcggccgaccatgtaacagntgattgcgtgcgaggttcgccgggccgatttaaaccaattatatagccatatgattcaacgatgtcaacagctttcagtctatgaatcttgtccaggtcacttggggtcacttggttctttcatcagaacatgttcaagatttgctgacattcctttttccggaactttcgattttggtgcatttggattttcttgtttgtagaaggtctttaacatttccactgcttcctcagcccgatatccagggatacactgaaatggtctcccagtgtttggtaggtcagcagaggcaatatttagaacagagccacaaccaccaaatcgttcattctgacagccatatacaaccagcgggattttcatcaggcggagagcagctgcacacataatgcacggctccacagtgacatacaacacagtgtgttcaaatacttcagagggactcttgccactttgacgacaccaatcgaggacctgatcgatggccaccatttctgcatgtcgagtagcatttttggtttggttaacttcatttctccccttccctacaacttcattgttgtagaccataagacagccaacaggaacttcagtattttcgagggcttctttggccatgtgcatcgcctcctccatccacttttcggtctcctctgccgacaccgagcacgcgccgcttgcagctggcttgggtgccgccttcgcctccatacccagccaccacccc

SEQ ID NO: 324862 - DNA, 791 bp, Homo Sapiens
ttcagagcaaagtcatttttattgttaatgaaattttaaaagggcagttccattagttacacatatccacacccgacttaataaactgttagtcatagagaacattcaagaaatacaaatgatttatccccagcacagttcacatccataagaagaaagagaaatggttaagtacttaaactgtcccactgacacctgcttatgaaatcttttcctttctttctttttttaaaggaaactgagattgttagatgaagcaagccgtcctgctcccgcacagcctgtgaaacctccattttgccactttcaaggtcagtggcccacagaccctggcctgttgttgaccataacactagctttggccacaaaagccagggacacctacgcttggaaatgtgcctgcaccactgtgtggtgcctccttaagttgccccagactccagatggtcaaagaaaaggtgaatgtccaggtggctcatggctccttagtatggggtgtttggtggggaatgaccccggcaggttaggagacagcgacttaggccaagcccatattttctggtaatataaaggacacttctattctgacttgttattcctagagctgttccggtcactggcttcttcctgtttatgtggtaggtcagaaccgtgacggagcaaggtgagcgttcacattctcgcatagcttatgggctgcctaaagtgctgccgggagtggggagaccaccattcattccctgggactggtttctttctcggctaaagctagaaggacactgatgtttgcc

SEQ ID NO: 324863 - DNA, 1311 bp, Homo Sapiens
  misc_feature (17)..(17): n is a, c, g, or t
ggccaggggaaaaatanaggaaattcaataaaagttatttcaaaatctcaggaccttaaaaaatgttaaggagccaaaaccctttaaaggtccattgtgctcctttgggcaattgggtactgaaagataaaaaaccctatcttccagagcgggaatttaccaaaagggaaaatgtgactttaaaaagtgatctcaggtccaatagcttttcggttctttccaaatttgtagatcagagtgctaaaaaaatataagtgcatttgaaaaaacacagctagtcccggataaacatcagtattttgggtaacatatgcaccaaaaagaatccacatggaagcaataagtgaccaaaccatcaacatgaaaccaatgaaaagccaaactcgagcacctgttcttcctaaacagccgctttcatagctatcacctctcacctgagcattggatacagcatttatcatgaagaaagccaatgtggaaaatacaccacatgtgtgaaaggcatggttcaactgttctggcttaggatacaccacagctgcatcaatcattatccaccagcctgtaaaaaacaatatacctgcgacaacagacgccacaacatttcttctctcactcgtcaatacattcacattctggccattgaaaattatctaggaagactgccattttctacttcttaagcataaatttttcattaaatgctgtatccccacttcctcaaacacccacgcggacttcaggcatgtgcacaaggaagactgctgctccgcagtctgggccggcatcctccagctccacctcagccttgggagcccacaatgttctatttttatttgatcccatctgcttccagcaatcactgaaaagaaacaagcctttaccaaacactccaaaatgtctttgtggtgacgtcattaaggaactcataactgtccccaggaattccgcagtgggaacaaaggttttcaggaatattctcagctcaccaagcttgcacattatcaatattggtgaattgacaaattgcagttttttgcaaagctgctatctcagaatcacaaacttacatctcacaatcagctggctccctccccccaagacattggtacagtcatcccacattagctgctgttttgctttccatgatttcaattaccagtggcaactgtggcccaaaaacattaaatggaatattcccaaaataaataactcggaaattttaaactgtacactgttctcactaatgtgatgaaatttcacattgttccacccaggacataaatcatccctttatacggtgtagccaca

SEQ ID NO: 324864 - DNA, 344 bp, Homo Sapiens
  misc_feature (148)..(254): n is a, c, g, or t
ttgttagggggttttgctatgtcacccaggctgagtgcagtggttattcacaggtaagatcttagcacactgcagcgtcaaaaagtggtcctcccacctcagcctccagactacctgagactacaggtacatgctattgtgtctagcnnnnnnnnnnnnnnnnnnnnnnnnnnnnnnnnnnnnnnnnnnnnnnnnnnnnnnnnnnnnnnnnnnnnnnnnnnnnnnnnnnnnnnnnnnnnnnnnnnnnnnnnnnntctaacaacgcttaactgaggatgactactagggtgactgaggagagggggtagggttattctgtgtgggctacacccgtattaaagggg

SEQ ID NO: 324865 - DNA, 1205 bp, Homo Sapiens
  misc_feature (580)..(588): n is a, c, g, or t
  misc_feature (728)..(749): n is a, c, g, or t
  misc_feature (755)..(850): n is a, c, g, or t
  misc_feature (852)..(863): n is a, c, g, or t
aattaaccttgttttttaaagggtctaaaatctgaggaaagatggttaaggccccacaaggaggatgggctttattaataagtttgtgtgctgttcttagaattatctataaggtataagagggttaattttccaccactcccactgaatgtcatagagtttcagtggaaaatgaattttattttattttataacttcaacctaaacctattataatctagacatccaacaacatctgattgtctgctggagactttcattgcatgcccattaatcttaaatggagacttaattgcatgcccattaatcttaaatgattgacattaatatctagttgttcttcattcatactctcactggaatttagtcaatagtttagagattattttccttgtgtccagtcctaaaaagactagattttcatacttcagaagcagaaagggtgagatttgatcattaaggcctcttccaacattaaaatatccataattgactgccttcctaaaatctgactgatgtatcattccattaagtcgtttattgggacaaatcttttacagaacaccagctataagactgnnnnnnnnnccacataggcccattaattctagaggttaatatataaaaggtgagctcaatgtttacacagatgtgacttaacagatacaaagaataggaaatagagcttgtcaatataacagaggtagtgatttgtgagtaccaacttnnnnnnnnnnnnnnnnnnnnnnctttgnnnnnnnnnnnnnnnnnnnnnnnnnnnnnnnnnnnnnnnnnnnnnnnnnnnnnnnnnnnnnnnnnnnnnnnnnnnnnnnnnnnnnnnnnnnnnnnngnnnnnnnnnnnnttgccaagaggagagaatacttatgttaagtgttcttatcgcaaaaagtaacataaatagagccagaggaaacttaaaaaaaattcagcattaactattaataaatgaaatgagaaatcatgggaacctaacacttttgtcctgatcaccacctcccatcatttaataaaggattataaggtaaaattgacaaaagggcagaggagtaaaggctggtggaataagttgtaggtaaattacccaaatagagccatctgggtcattagctgttagtgttgcctcagtttgcctgaaatgattatatgacaaggaggctgaaaataatttgaagagcaaagaccc

SEQ ID NO: 324866 - DNA, 828 bp, Homo Sapiens
gataccattttctctgggggcagtctttagtttgctttcttttcagttccacgtcagaggttttcctggaagcagtctcttttggtgtggttttctatctgtgttataaagttctcaggttttgcatctggtttcctatgacaactggaaaagacttcttggtgaatcctctggaggtggataacaggctgcatcctgagaacttgggaaaatccctctccttgttcaattaatgcaggcaaggacttcatggcttcactgatctcctttgctactgtttcccctctgcatttcaaattttccatatgaggggctggatcagggtggtattttaggtccagtggatgtacaacagggtggtactgcttcagaatttcttgttttgcttttatggttttgatgacacattccaggatctttctgggatactgcttacgttttgtggctatatctactatgatttcatcaaactgatcttcaagtactttgatgtcagaatccataaaacaattatctgaagcttcctgccatgcttgcccattaatgctgatattctcttgcacagctgattcaaaagtccactgcgcatctcgcagagcgggctcccgaatctcctccggcagagcgtccccgagcttttgcacgaagcggccgcacagttgtagcatttcggtcacagcccgcttcgaatgcagcgcacccgaaagtcttctcggggagtggcggagaccaaggcctggctctctgtgccagccgcgagctccttgtcccatggagggtcaaggaccaccaactcaggagaccccgccatttttcgtcggaactccc

SEQ ID NO: 324867 - DNA, 542 bp, Homo Sapiens
  misc_feature (390)..(398): n is a, c, g, or t
taataattgctttttctgtgtattttgtattgggctgggggatagcatcaaaggttgaactttttgagctttctatgaaaaaccccaggaccttctttctttggccatttctatggaaatgcgatgtcagatggatggtaatggtgccctccagtggctgtgagacctcattgcgcattgtctactggagctttagtcttctgagacggaggaaaactgctgaatactctggattcatctatgtctacaatgttgcatttatgaaaaactacactgtgctaggcgcattctaggacatgaatatgaccacaccctctttcaccgggtgtttctgtagcaagttttcatattcttttcaaacaatggtttctctgcgttaattattgaggnnnnnnnnngatggggtaagaaaactacccatgcatgatgtagagagctgttgatttgtttctgtttttttaaaggaaaactatttgtaagatgttgcactaaaacattttatatacacttcagagacctgtagtaaattatgttgaaaataa

SEQ ID NO: 324868 - DNA, 791 bp, Homo Sapiens
  misc_feature (295)..(556): n is a, c, g, or t
tttttttggggttccaacaaattttattttatggactcttaaatttccatataattttcacttgtcacatataaaatttcacctgtcattgtcacagaatattattttgatttttttaatcaattaaaaaaagtaaaaaccactctcacagcccttacattaaaaagggaggtgggccagatttggctgcaggtgggagtttgcagaccccagttctagaggggtaaactaatggtttaatgaccacagctgctgctcacacatcaagacagacagacatgggccgggcgtagtnnnnnnnnnnnnnnnnnnnnnnnnnnnnnnnnnnnnnnnnnnnnnnnnnnnnnnnnnnnnnnnnnnnnnnnnnnnnnnnnnnnnnnnnnnnnnnnnnnnnnnnnnnnnnnnnnnnnnnnnnnnnnnnnnnnnnnnnnnnnnnnnnnnnnnnnnnnnnnnnnnnnnnnnnnnnnnnnnnnnnnnnnnnnnnnnnnnnnnnnnnnnnnnnnnnnnnnnnnnnnnnnnnnnnnnnnnnnnnnnnnnnnnnnnnnnnnnnnnnnnntccaactcaaaaaaaccccaaaaagacaggcagggtcagaagtgtgagtcctggattccaaggtggcaggtgtaatcagggagctaagaattcattatttttctcattcttggtccagttacctacagaaatggctcctgtaattacaagaccaggaggtagggccaggccctggggagaggagaaggggctggcagtgcaggagtgagagtcccagggaatggcccactccccc

SEQ ID NO: 324869 - DNA, 1392 bp, Homo Sapiens
gttctataactttcattttcaatcagttcttggtccttattagcagctctgtccttagccaaaactgtagcatcttcctctacacatgtgtcagcaggtgaatttttatttccatcaactgtcatagtcccagaaaatggagatcggctagatttcagtagagagggatgaaccattctataacctaaagtagaagttacacctgggccatttggtaaagccaacttctttccaccagcagcataaggcctattaaatccataccccaaatgttcattcccattgagtacttctggctgccgggaatttcttgttagcatacttgaccgtagaggcactctaatggatagctgttggttctgataaggctttgtaagatccacagctctattaaaggaatgtgatctggttatagatgaaggtggaaggaatgaattctgaatggaatgtgaaaaactttgtgaccttaccattttttcacaattaatagatttactactgtctggggattgagctaagctttctccagaactgcttctggtggcacaggagttcgctctaggccttttgcatgctaccagctgatcggtttccataaaatcccattcaactgtgattttggagtattgatcgaaagaatatgaagtccttcctaataatgtgcctttggtgaaatttacccaaattagatggtccagaaaaagacttttggtttaacctcctctgtagatgacaccaaacatagtggatggctttgctaactttgatgtgaataaagaaacacttttcaaacctccctttatcccatttttatcaaacattccttgagtaggaacacgtttttcaggatcaattattttatcatgtgaattttgagtattgttaggctcttcgacaccttgtgcacaaagctgatatttatttgctttcctccaattaaatgaatgagatgatggacaatcagagccattatttttgatgtaacttttgacattactattcttggaagttcctaataaattaacaggtgtcccatttggcattggctgcaatgtacttcttacagattttgttccatactttggcaacttggaacccaaaaatgtcttgatttgtgttttttcttccatgagctataaggtgcatttgttcttaaaagttgaaagaatcgtgcggaggtcgcgctgcctcctcggccgcggcccagctgcaggccgccctgcgacctgcgggcccgaggacggaaggtgagacgaagggccgcccgtcacatccccgccagccccgccgcccgagccgcagcaaccagcatcgcgtccgcggcttgagggagcgccggactccaaagccgccgcgccccctccctcggccggcgcacgcccggactccccc

SEQ ID NO: 324870 - DNA, 815 bp, Homo Sapiens
ggggcatttcctggcccttgcctcaacttgtccaggttcgagaccactatcttccttaagcattcggcttaaggttgctgtgtttttcacaagccgggccataccaccttcccgcagggctggtagggtccaactgtccagccccaggggctagttgttggtcccccaggagagaaggcccaggcctggctcactgatggatcccacaagccgtgtacggagcctccttcttttggcagctcctcactggaaagtggtggcatctgctgagctggggccctgtgggggacgtgtcaacaaagctctcgtccaccacccggaaggcggatctcctcgccggtgtccatgtagaggtcgtgtgctccttcctccgtctcgtactcccacacccacaccttctccgcttcgtcgaacttggctggctgctgcagtgactctggggggatgagaatgtcatcgaagaagcctagagagacgtgcactccttctgggctgcagcctttgatcttcccaatgagaatctcatctaggaatggatgaaacaccacgcagcgaaaatggactttggtgtgtgatgcgccatccccagggaatacataggcatcctccagtttggtgatatcaaacagacaaatgcagagtcccacgttgtacacgaccttgttggccaacttcttgttcagctcctcggcaatggagtcgttgagcttcctctcaaactgccaaggggggatccggacggtgtccaccatttccaccaggacgaacatcccggcctgcgctgggggctcacgcaccacgcaccgcgcacaccc

SEQ ID NO: 324871 - DNA, 1105 bp, Homo Sapiens
  misc_feature (41)..(55): n is a, c, g, or t
  misc_feature (856)..(876): n is a, c, g, or t
gctccttcttcatttaccatgttgataatccggtggtgacnnnnnnnnnnnnnnngtaaattgtattagataccccacaggaatgtgacaataataggatagctttgggggctggtgatttgaaacagggactattaagtagattttcccccatcctctaggttcctgtagtctgtgctcagaacttggtttttggcccctattgtttttgcctattttgattttcagagatgatcacatggggacagttaacttttcttctgctgtgttgccttaatgctactagattgtgttgtgttgttggagttttctgacttcttccctataaaaagatactgagagctccataatgaaagaagttgttatactttctcagaatattctggaccactgaatgcacttctaatagagctttaatctaaagaagttagttcagtggttattaactgattttattacaggagaaaaaaactttaacaaaaaggcagggagaaaagtgtgaagggcatcaagcaaaatgacaggggcttcaaaaaacaaccaaagacaaaaccctatcttctgaagaccaaaggccaactttacttactggctggcacagctttctgaactccttgagtttagaatagagctcctagaataataaggcggccaaatttaaagatcagtcaatacagtagggacctgctattgatctctcaggcactgagtcttcacatccagtgtcaagcccagcccagcatatggggtgatatgagcagaaaacacacatcggtgtgtccttgatttctcgcagctgtgtaatgtggcatgaggaagtatgttttggtgccacatatttctcaatctgatgccnnnnnnnnnnnnnnnnnnnnngccatttgcatcctatttcatagtgccaaaatgaatttttgtatcttgtcttgtctttgtccattataaactggaggatcacagttaagccttccatgaattcatagtttggaatcatttaccttaccattattttggatttttttcttattacagtgtcactacactgtattcatgtgggggaacaaacatgtaggtgcttgaacatgccccacagacacagttgtag

SEQ ID NO: 324872 - DNA, 613 bp, Homo Sapiens
  misc_feature (362)..(362): n is a, c, g, or t
  misc_feature (538)..(538): n is a, c, g, or t
  misc_feature (553)..(553): n is a, c, g, or t
  misc_feature (564)..(564): n is a, c, g, or t
  misc_feature (581)..(581): n is a, c, g, or t
  misc_feature (603)..(603): n is a, c, g, or t
ctttcctataaaattttatttattacataaaaaattctatacatttgttagactaaaatacagttttcattataattctggcaactgagtcagtacacagagaaaacttagcattagatcagcacttttctttctagttcgtatttctgcacaagaaaaacatttcaaagctccgtttcatataggctgattgttctctgaagccagatggaattccatccaattcagagctcttggaagttaatttcccagcaagatttgataactccaactccagaaagttaattgcttaatatacatatttttaaagtcctctgagagcataatgctccatctgtaaagtctgcactgtgtcaataatngaccgtcacaaatactagggctacaactgtgtctgtggggcatgttcaagcacctacatgtttgttcccccacatgaatacagtgtagtgacactgtaaataagaaaaaaatccaaaataatggtaaggtaaatgattcccaactatgaattcatggaaggcttaactgtgatccnccagtttataatggncaaagaccagncagataccaaaatccantttgggcactatggaaatgggntgcaatgggg

SEQ ID NO: 324873 - DNA, 497 bp, Homo Sapiens
acaaaaatccaatgtaagaccattgtgctcgtgacgaaaaggggtggggtggatggacgtggcatggatatcaaagcttccccccacaaactaggagctccccactctgtccggcgcagctcccagaaagatcccatccttccggacaggaccccagctggtgagccctggcctgaggcacagtccacacggaggagcactgcccagggagccagcgctcacagtggcctgcagagccctgggacggtgttatggtaagacagcccaaaccggagcagcaagccggccacccagagaacgaggcgctcctgcaccctgcgagccaggacaaggtggccaggggcggcccacagacagccaaggagacccggggtctgtggcgccgctttcccatctcaagcgagtcacaggtcggcggctttcccgtggtgagaagcactgaccagtgacactgtggccacttgctgctctcgctgaggagggcgtgcctcagagcc

SEQ ID NO: 324874 - DNA, 833 bp, Homo Sapiens
  misc_feature (610)..(644): n is a, c, g, or t
atttaaaaattctaaaatatttaataattaatattgatgggaagactgatatacaatggcaattatttattttacaaggaggattctatccatcagggaaggcatcttgaagtacaatacaccaggctttcatttcttctttacattatgattgtgagtttccatataagttggtacttacatggaaagggaacacaaaatccatttttatatacataaaaacaaaacacccaaagagacttgacccccaaaatgtcttgtttcacttgaaaataacatgaatgagatgaaagatgaaccagattacttggtgacgcacagaaggcgaacaagtagctcaggaaatcaaatcctgtttcaagcttggcacattaagggtaagaaaggtagtgaaagaagggttcgaaaatatcatctcaagccacaaaaaatctggcagaagacagcctccaaatcaataagatagaatggttagaagtcaagttagagttattgtgtggctaccttatatccagacctctaatagactgagtggaattgtcacttctcttccctcagttatcccaattgttagtaaacttcaaggaggctgggcatgatgactcacacnnnnnnnnnnnnnnnnnnnnnnnnnnnnnnnnnnnagattccttgagccccggtgttcaagacgagcctgggcaatatggcaaaacctcatctctaacaaaacacaaaaattagctggcctggtgcacgtgcctgtagtcccagctactcagactgaagtgggaggattgcttgacctgggaggcagaggttgctctgagccaagattgtgcctgtgcccgaaa

SEQ ID NO: 324875 - DNA, 1035 bp, Homo Sapiens
ttgtccccccttttgtctatcttgtctccctttcctcttccctccaaggggggttctttcaaccgttcacatgtcttccaagtacccgtgtccagttgtggttccccttgtcacgtcacagcctttgccctagggcggttgttactccccggtcccgccatctcttctttggaccggatcatacgttctttctgaataactagtgtgtaagttaactgctctcacccctgagagcctgatcctcaggaggccttaagctggaggaccaccagcacccatgagctgagtgggaaataatctaagttcatgtggattctgttgtttctggaagctcccctcatcaggaaggccagctcctggtgctgagggtgtagctgtcacccagggtcctttcagagctgtggggagacctgctgcctgtctacactctggggaagagagtagaaccgttagctgctaggacagtaatcctggaactagggaagagtgagtgtggaggcaccattaacctctcaaaaccatccaagctccaggcttcataggaacaactttccaagtcctcaaaacaaacagactatctatctatctcactggctctccacatggcataaataactagtttccaccagtgcagaaagggcagttctcttctggctcctcctgctgccaactcaggcttcaccacctgtggaactgctggggcccctcaagcactggccttgcagctcccagccacatgcgacagctagtccagcagtgacgtgcaggcgagaggcaggccaacaactacctttccctttgtcctcagagactgaacccaaggttgaggtcccctaaatcaagaataactggttctattttctttctctcgcttcttggctcacagttttgccctcatctttgagttcctatggagcttgtagtatgattttatgctctaatttttcttcacaaaaggtaccgtagtgtggttaaactgcccacgcgtccgcgacgcgtgggtcgacgatatcccttactccctgaccgggaccc

SEQ ID NO: 324876 - DNA, 719 bp, Homo Sapiens
  misc_feature (625)..(625): n is a, c, g, or t
  misc_feature (628)..(628): n is a, c, g, or t
gttttcccaattagatcaaggtttatttcccaagcccccaccccggacatgttctaccccttcaagatccctgagaccccaggctgtgggcttggaaaatgaaggcacagtgtcaagagcgccccctgttggcatatgaagacccaggagtgctgaccttcagggatctgcctgcactgcccatggggcttggcacagcaggaggcactcctgtttctgtcccttctgtctctggtcttcagagcaaggtttctgctgagatgctaaggaagctgagtcctttgtcagccctgactctgactgagaggcagacaggagccaaggccccattgaagctccaggttgacgatggccctcaggggaacagacgcaaaaccaggcacgggcctgccttccagctggaatcctacctgtcaggccccagaacttctgtgccagttggagtgggctccccagaaggaaaaacaatacagctgagtctagtgctaggggacagagaactgggggctcaagaaagcaccccaaaacgggctgcccaggttaaggatccatggggctgaagagaagtttgccccagagcccaaagcccagtctgcagtcagtgggtggagatgagaggcagccntgngcctgcagggctgggccctgaatcctgaggccaccgtcacctcaacatcacttcctacagcagaaaaaggtcactcttctttccaaaggtg

SEQ ID NO: 324877 - DNA, 1009 bp, Homo Sapiens
gtgattttgaggaacagttcaagaccaagtcccaaggccccagcctggacctcagcgctctcaagagtaaggcagcccagaaggcccccagcaaggcgacactcattgaggccaaccgggccaagaacttggccatcaccctgcggaagggcaacctgggggccgagcgcatctgccaagccattgaggcgtacgacctgcaggctctgggcctggacttcctggagctgctgatgcgcttcctgcccacagagtatgagcgcagcctcatcacccgctttgagcgggagcagcggccaatggaggagctgtcagaggaggaccgcttcatgctatgcttcagccgcatcccgcgcctgccggagcgcatgaccacactcaccttcctgggcaacttcccggacacagcccagctgctcatgccgcaactgaatgccatcattgcagcctcaatgtccatcaagtcctctgacaaactccgccagatcctggagattgtcctggcctttggcaactacatgaacagtagcaagcgtggggcagcctatggcttccggctccagagcctggatgcgctgttggagatgaagtcgactgatcgcaagcagacgctgctgcactacctggtgaaggtcattgctgagaagtacccgcaactcacaggcttccacagcgacctgcacttcctggacaaggcgggctcagtgtccctggacagtgtcctggcggacgtgcgctccctgcagcgaggcctatagttgacacacagagagtttgtgcggcaggatgactgcatggtgctcaaggagttcctgaggggcaactcgcccaccatggacaagctgctggcagacagcaagacggctcaagaggcctttgagtctgaggtaggagtacttcggagagaacccccaagaccacatccccaggccctgttcttctccctctttagcccgcttcattaaagggcctacaaagaaagcttgagcacggagggtggaaacagtgg

SEQ ID NO: 324878 - DNA, 718 bp, Homo Sapiens
  misc_feature (79)..(79): n is a, c, g, or t
  misc_feature (477)..(477): n is a, c, g, or t
  misc_feature (666)..(666): n is a, c, g, or t
cataccttgtaaggctttccattatctcccattggggtgattcgacttcataaacatgctgctttggaaataattcccntggtatcatatctggactccaatactggacacaggcctccagacaccactctctccaccatccagggctctttgccttgctctaggaaggagatcacatcaggtttggaaacggcaagacccagtgagaccaggttgctgtaggtctccaacatcacgtctctgtacaaatccctctgagcaggtgccaaccactgccattcttcttgggagaagactatggccacatccctgaacaattctgacccaagggacatgacttttagaatttcaagggctgataggtcctccttctggttcctctcttggggaagggcagagtcctgcgacggtagagctaaggggtccatgcacctgggctatgaggctggaagcagaaagggggcgccagaaaagcgncacgccgcgagggccggcgggaaatgtagtctcacgccggtaaagccacagagcgacgatgaggcgagacgtctgcgttcttctcaggcctgagacccaaccggcccgggcaccagctactgctggaccccagagcgcctggaaagctccggaacctctcacctgccgcctcctcgggtccaagtgccnaccgcggccgtgcccccggcagcccagggcgcgcttccaccacggtaccggt

SEQ ID NO: 324879 - DNA, 849 bp, Homo Sapiens
  misc_feature (797)..(808): n is a, c, g, or t
ttttttttacacacttaaaagattttaaatttattaatttaagtaagcatactgcatctcctttatggataaatcatgtgccccacagagccccaaagcttgatgacattctgtaaagttacacaaatgtatctgaagaagttatctgttcttgtcctaattttgattctaaataaaaatccaatttcaaaatcaattaagattttaatctagggaaatcttgggattgttacacatgtaaaaaaccttatctctgagagccttttctattcttcttaccacaggtccactcacaaatcgcagctggtatggactggtactgccccaaataagaggaacctaagagcttggctccaagaccccccaccatcccggtgggtttgcttggcctttaggacgtgtgactacagcttttgggtaggtacagggcaatcaagattgaggaagaacacttcagcaaagcaaccattatttgtccacaaaaaacagtgaaaaacagtgatataaaattaacaaaccaaatataaatctaacgcccttctgcatttccagaactttttttatatttgtgcagtgttcttggtcaaccactcaccaattttctgcgtctatctgaagtacttttaaagttattaaaactgctcttttgaccataagtcacatagaattgtgattaggaaatcaatttacttattactctttgcagggcacttgctagggtggtgagtgtaaaggaactaaaaatggaagtctctcacttctaaactggacacaggagttctcaaattaaaataatnnnnnnnnnnnngggagagaggtgcttactggcaacattaatactagacaccc

SEQ ID NO: 324880 - DNA, 420 bp, Homo Sapiens
taagatggagtctcaatctgtcgctcaggttggagtgcagtccttccactggaggggctttcttcctatttctccaataggtctaaaatgtcaggttacagtcagatttggcaatgtgtattacttcaaatgattgagctggaggaaactacattcctttggaatgatgacagaatctatcagaaacttcacacatccactcagctctcctggatccctgtccacaccatgaagcctgaagttgttatgatggcctttatgaacctgaaagaagccgctggcttccaccacaccacagtgtcacccaagaaatccaatccttgtaagaaaggatagggcttatcttctcatgacttagaatttttcagaaatgagaatattcacaaaagagggaaaggcaattcccttacctatgcgcta

SEQ ID NO: 324881 - DNA, 854 bp, Homo Sapiens
  misc_feature (36)..(36): n is a, c, g, or t
ggttaacatgaaaatcccctataaaaactcagaacnttcagttgtttaaaaagtatttcaatcctgcacttcagcaatattattttaaataccaccactattttatctgaacttattttacctataacaacttttaatttgttgtgtttaatattaaaagggtccataggaatttatagattcaagtttcagtattcttcttcaggtactgaaccaaaaaaatgtacatttaacattaatccaaagtctaagcctggatatattattatttggtggcagggttcctaaaagatggtctcttgctccttcagtgacagccacgttgacagaccacagaggtgcaaacacatgcacactaaagatttcacagctactcacaagtgacgagactgaccacatcgaagcacagttgtccctaagaacatacagctcaaaaatgttcatgttctctttaagaatactgaagtataaccatcctcatgaagattacagctccttcttacacttgtaggcactgacttactctgcaaggctgtgaagagaagaatctcagctccagtgtagaaaaataatacagaatacgtgagcacttccacgggtgagcctgcctcagaccacttccctccagacagcataaagcagatgcaggctgctctgtcagaaatagaaccattccttgcctccttgccgttgcaaacccattaaccataaatctgacagggataagaacagattttttcctattaaagcaactctttggtcatggacaaactgaaaagatttgaaattttttttcattagggtcccggaacaagatttctttgtttttaatctttaaaaaaattaagaagacc

SEQ ID NO: 324882 - DNA, 324 bp, Homo Sapiens
  misc_feature (170)..(178): n is a, c, g, or t
cgttacttcaacataaagtaccctttaatacacgaagtacatcctttaaacagccaagagaaaggaggttgtacaatagagacgtcatgtttgctttctaaacatttgtttgactcctgacacaatggttttgctttggggtaacatgaaggttgccaaacttcaaagtnnnnnnnnngatattttctgacaaagcaaatgttcagttcagagttgcctgatgctgtcagcattccaagcaaactcaataggaagaggtgaagtcttcttcactgtataaccatcggcgtggctgcggtctactgcttcacatcccattctccc

SEQ ID NO: 324883 - DNA, 846 bp, Homo Sapiens
  misc_feature (737)..(737): n is a, c, g, or t
tagaaaataatccaatttattctctctagggaacaggccacccttcccggttccagggtgccatccatccttaaataaacagtcagaagggccgccagctcactcggcaggcgggggacattcaggagctgtaggggaggtctctgccagtgcgggctggccctcagccccgtcgcgagggcggaagaccagctccccagcctgcagcacctgcccggcagcccacgtgccacctggcccatactgctgatagaagtccgcgtctgtctggaacatgaccagtgcctgggctgtgtggattcgcacatgctgagccaggctgttggcatccagaaacttgtccccacaggagtcacaggcgtagaggatgtgagtgttggggtcttcttcctgcacttgcttcacagctttgctgatctcggccttcaggacttccgtctcatcggctgtcactgcagctcccaccggcaccactgtgagctgagtgacggctgtcgctgccagtgcctcggtagccagcgtgaccatgtcatccacagtgaccacgctgacctcactgccctcctcgggctccaggatcttgatgcctgccttgccctggtgcacggtcttcacgtgggagcgcaggttgtctacccggttgaagccacgcccacacttatcacacaggtaaggcttctctccagtgtgaatgatgatgtgcttggacaggtcccccacgttcacgaaggccttgnctgcacacggtgcacttgtgtgggcggatgttgtcgtggtggcgaatatgattggccaactggctggactggacgaatctgtggggccacaggaagggactcgcatgga

SEQ ID NO: 324884 - DNA, 930 bp, Homo Sapiens
  misc_feature (124)..(132): n is a, c, g, or t
tagggcgcacccccccggctggaccgacggcggcccgacccggcccgtcccccgaattggaccaccggcactcggctccagccgtcaggggccaccagccaccaaagagccccaggggccaagnnnnnnnnnatgactcaaccagacccacaatactgggccccaaccaggctgcctgattagatccgggcatcacaagatcatcaccgctcccacatagtgttccgaaatcacctgtttcatgcgcacgaaggcaggcagaagcgcagcacgttccctaccaggctcatgagctgcgggtagtagcgcgaggctgtcaccctccggaaaggcatccacccgatgttgctgctttctcgcaaaccacattcttcccaatacctagagccttcacggatatctgccgggtgagtggaggggggatgctgatgcacaccagatccacatcttgatgcagcaagatgtcatcagtccggctggtgtagaaggcgatgttcatctcctcagcaagctgcttcgcctcctcctcagtcttcccccacagggcctcaacagtgaacccttctgccctcagcagtgggaccagaactcgggcggagctgccagtcccaaacacgcccactcctggcagcatcttcatcccagcctctctctttaccaactcatctcctcacaagagcctctggcatggatatgatcttccaaacgtcctggtcagacatggctcctggcacgctggcatcgcccactccgcgctgcactggaaaccatgggtccgacggggtctcgggggccacccatccgccttaaggaaggctggcggggatgcgcgggcccgggagtccagggcgccgccaccgggaacgcgccgcctggtttctaaggaaccgacgcgtggtcgacgatatcccgtaaattccggccggtacc

SEQ ID NO: 324885 - DNA, 704 bp, Homo Sapiens
  misc_feature (56)..(56): n is a, c, g, or t
  misc_feature (88)..(88): n is a, c, g, or t
  misc_feature (102)..(110): n is a, c, g, or t
  misc_feature (303)..(303): n is a, c, g, or t
  misc_feature (444)..(471): n is a, c, g, or t
ttgggagggccccgaggtggggagggattgccttgaggcctccatgagttccaagncccagccccgggcaaccatagccgagactccntcctcctataaatnnnnnnnnnggaaatgcattaaatagaaggttgatagtttatcataaacctgcggggaagaaactcagactttctatttttgatattttgtgcattaatacattacaaacatgaagatgtttgtaaagttttgttttagtcattttctttgcagtcacatcattgtaccaccttcattattgtatagagctgcttcaattcntgagtcctctggacttcccctgcctatctgtttgttgttgttgttgaagacagtaaaataagtgttttcaaatctatatgtctcctttttgttggataatgtttcttctttttaatggtaaatattcttgttcttcaacannnnnnnnnnnnnnnnnnnnnnnnnnnnaggaaaaacaaaacaacagacttcatccttaggttttctcaagatttaagtgaacacatttacacatatcaattttcttaaagaacacaaaatgtttccctccctagcaaaactatttaacgaggcaaattaaactatgaaataggttataaaaatattttttaatattttaaaggccttgaaattataatttcaagggaaaatctaaatgggggggaagttgtatatgccca

SEQ ID NO: 324886 - DNA, 873 bp, Homo Sapiens
cacccctggaggggggcttgttttcctagaacctttccagccccccccggaaataccaaaaaagatttttttatttcccccagaaaatttaggggcccattttcccatagtttatgggggaagggacgttgtgagccgggatggggagtgcttccagctgactgttcctcttccagaaaggctccttttgagctgaagcaggagacccccagggcccacagccgaacccccaacctagacacggtctgagctccaaccttgggctggctatacttcaagggcgggtagggccggcatggggctgggagggagtcagcccactattgcagattccacacaaagaaggaggggggcttgggtggtagcactggacatccatcccatgtgcctgggagtcttggggttggagccacagagaaggttacatcggggtgctgcggaccttgccttcctcctcgggcacattctcataggcattctcatgctcactggacctgaaactggccgccatcgaagagtaccttccatctgttcccaccaggactccatctgccttgtttccgacggtcaggatcatgtgtgcaggctccggctcctcctggcaccagaagtggttgactgcaaaggcgattgcaacgaggaccaggaacacggccaccgcgataaggccctgcatccagggctgaaggttccccaggccttgctgacagctggcaggtggcactgccgtgagcaggcccagaatgaggaggctgagggccgacatggctgcagcagctcctagccttgcttctggccgccggtgtctgggctcctggagctgctgtggagtctattggtgtccgcctgaaatcaacctgggctcagtctccc

SEQ ID NO: 324887 - DNA, 1075 bp, Homo Sapiens
ttgtaaaaacttgtttttaattttgtataaaataaaggtggtccatgcccacgggggctgtaggaaatccaagcagaccagctggggtggggggatgtagcctacctcgggggactgtctgtcctcaaaacgggctgagaaggcccgtcagggcccaggtcccacagagaggcctgggatactcccccaacccgaggggcagactgggcagtggggagcccccatcgtgccccagaggtggccacaggctgaaggaggggcctgaggcaccgcagcctgcaacccccagggctgcagtccactaactttttacagaataaaaggaacatggggatggggaaaaaagcaccaggtcaggcagggcccgagggccccagatcccaggagggccaggactcaggatgccagcaccaccctagcagctcccacagctcctggcacaggaggctgccacggattggcacaggccgctgctggccatcacgccacatttggagaacttgtcccgacagaggtcagctcggaggagctcctcatgggcacacactgtacgaacacagatctccttgttaatgacgtacacacggcggaggctgtagaagcagacctcgttgagacactgtttgcaaggcctgtgtatggagtagaggcgggtgcacgggtactgttcctcacggcagtcaagaggcccaggctctgtgggctccagctctgcatttcctggttctggggttggggctgggatgacttcctgttggacttgctgctgggactggaactggaactgttcctcggagggccgaggagtcacctcttgataatcatagtagtctgggttgtcgatctggtcgctatagtgggtgtactggacgtggtcagggaacggcggcagcgggtccaggtcatactggccctgagccagcaagcctgcaggcaggaatagcaggaagaggtaggcagctctcatggcaacaaagaggcaggccggggtggtgtcagagaggacagctgtccgggtcactccgccgcccgctccgagtccgcccgccggagccgccccttggcccgctccccc

SEQ ID NO: 324888 - DNA, 978 bp, Homo Sapiens
aacaaaaacctgttttatttattattcataacctgcattaaagaatgttaatatccacactgggtgtacgataccatggatccagagaccgttctgagctttgagagaagagagcactgctccttaaacccttgtggtctgaaattctcacttgtgctatggcagcctgtggtcatgaacattattcaaataagcccagaaccacacaaaacattttctttgcagcttttcttctgatttaggaggcatgactggaaagtcaaggagatgcaaaagggctataaagggcacaaccatttcaatatcaggtagttttccaaggttctttctgtcattcagagtcttgcttttaaatgaatacttgacacatctattttgaaagtgtgttaaatcagcaggcagggctgctttacacatagccatctccaatccattatccctcctgttctcacagcgaagtgttatctggcctttctaagacaagattttctcttgctgactcagttttgagaaggtgaaaatcacaaccacgagtggaaatgaaatgaatcatcttaataagcagcagtcacccccaacctcctccttatacaactgactcaacacctccttctccaaactacccctggctactctcacgaagtgggccccaggcctcccctagctctcctcccaggaagacagcatcttgacaccataggctgcctccactcctccgcagtgccgcagcacgtgggttcagagcaagctgagcaacacaaaatgagcacgagagaacttgccttttccatctgttgctgatgcttcttgtaaatgtctgattgaccacaccactgggaagaggatggcaccacaacacaacaggtcgaccagaaatagagagtccttccacaagccatattcagtcgtgccctcctcggtggactctatgatgatgtaggctacatttgccaggacctggagtggaatgacaatccc

SEQ ID NO: 324889 - DNA, 1143 bp, Homo Sapiens
ggagaggagaacggctgtgagtgcaccaaggccgtgaactttgccatgcatgaacttcagctcatccgggtggagaagcagtaccttcaccacaacctcgaccacctggtcgaggagctcttccttggtgacattcacactgatgccacccagaggatgttctaccggccctccagttaccagccccctctgcagaatgccaagaaccacgaccatgcctgcatcgcctgtcggatcatctatcggtcagacgagcaccaccctcccatcctgcccccaaaggcagacctgaccatcggcctgcacggggagtgggtgagccagcgctgtgaggtgcgccccgaagtcctcttcctcacccgccacttcatcttccatgacaacaacaacacctgggagggccactactaccactactcagacccggtgtgcaagcaccccaccttctccatctacgcccggggccgctacagccgcggggtcctctcgtccagggtcatgggaggcaccgagttcgtgttcaaagtgaatcacatgaaggtcacccccatggatgcggccacagcctcactgctcaacgtcttcaacgggaatgagtgcggggccgagggctcctggcaggtggggcatccagcaggatgtgacccacaccaatggctgcgtggccctgggcatcaaactacctcacacggagtacgagatcttcaaaatggaacaggatgcccgggggcgctatctgctgttcaacggtcagaggcccagcgacgggtccagcccagacaggccagagaagagagccacgtcctaccagatgcccttggtccagtgtgcctcctcttcgccgagggcagaggacctcgcagaagacagtggaagcagcctgtatggccgggcccctgggaggcacacctggtccctgctgctggctgcacttgcctgccttgtccctctgctgcattggaacatccgcagatagaagttttagaaagttctatttttccaaaccaggattccttactattgacagatttgctttaccaaaagaaaagacatttattcttttgatgcacttgaatgccagagaactgtccttctttttctcctcttccctcccttcccagccccctgagtcatgaacagcaa

SEQ ID NO: 324890 - DNA, 816 bp, Homo Sapiens
  misc_feature (778)..(778): n is a, c, g, or t
ctcctctgtttcctgtgcagtagctcccgttgcggcggcacccgtggcagccctggcggacgcaggagcgatggcagcgaccgatatagctcgccaggtgggtgaaggttgccgaactgtccccctggctggacatgtggggtttgacagcttgcctgaccagctggtgaataagtccgtcagccagggcttctgcttcaacatcctgtgcgtgggagagacaggtttgggcaagtccaccctcatggacaccctgttcaacaccaaattcgaaggggagccagccacccacacacagccgggtgtccagctccagtctaatacctatgacctccaagagagcaacgtgaggctaaagctcacgatcgttagcacagttggctttggggaccagatcaacaaagaggacagctacaagcctatcgtggaattcatcgatgcacaattcgaggcctacctgcaggaagagctaaagatccgaagagtgctacacacctaccatgactcccgaatccatgtctgcttgtatttcattgcccccacgggtcattccctgaagtctctggacctagtgactatgaagaagctggacagtaaggtgaacatcatccccatcattgccaaagcagatgccatttcgaagagtgagctaacaaagttcaaaatcaaaatcaccagcgagcttgtcagcaaccggagtccagatctatcagtttcctacagatgatgagtcggtgggcagagatccatgggacccatgaacgccccacctgcccgnttgcctggtcattgggcacgcacagaaagacctggaaa

SEQ ID NO: 324891 - DNA, 1080 bp, Homo Sapiens
  misc_feature (819)..(875): n is a, c, g, or t
  misc_feature (913)..(921): n is a, c, g, or t
caaaaacatacttcatatttcctcttttattatataaatatcagtttaaccttttactgtaagaatataaacgttttaagaggatctttgttattatttatacaaattcacaaacagtacaattaattgataaaggtctctgggtttctttaactccatggtcttgcatgttgctgtggagggttctaaagaaataacaacaaaaatccaacgaaaatatacatcctactcagaagtgatttctttaaagccacaagtcccaacccccaccaaaagaaagaaagtcatctattcctccatttagaaacggaattttttaaaacccacaaactcccattttgttaatagaacagagataagatatgagcttcatcacagccccaggggctctgcaggccagctctgctcctgtttcccacaggaagccgcactgtgtgacctttttggggggaaacttggaagagggtgagggtagggcagaatttgcatatataatcatcattttcaagacacaatctgcatctccaacaaaaacaacggttcaactctcattgctcccacatatttgtgctataaattaagatttagaaataggtcctcaaatcccaatgaacaaggagaaaaaggaaattatagccagaatgtggaagtggggcacactggacggatggaggctgggaagaagccaacacaaaaagacggacaaacccaagggcatctttccagtctaggcacaaacatgtttcagtctcaaaatatctctcttgtagaattccagggcttcagaaaaaaagtaaactaaaacgaggtagccagacnnnnnnnnnnnnnnnnnnnnnnnnnnnnnnnnnnnnnnnnnnnnnnnnnnnnnnnnntcagcagaaaaaaggaccatgatttcaaattttttccnnnnnnnnntttttaaacaggaaagaagattaagaacatgaaatgagcatgaatagcagagtactgtaagaggaggagtgatgagaagagactgggattagttacaaagtggaagggtgaaaaggcctttgtagctgggtttgctttttatacatttcaaaataaaaa

SEQ ID NO: 324892 - DNA, 612 bp, Homo Sapiens
gagcgtttaggacaacacggcacatgggaaacgcctagcaagtaggagtcactccgagcgtgccgactatgcccacctcggccccatcacacagggtgcagctctagcccgaggggagtctccctgagcccctctctccgcctggcaggaatgcttcacgccattcgtgaacggcagcttcttcgagcacgacgggcagccctactgtgaggtgcactaccacgagcggcgggctcgctgtgttctggctgcccagaagcccattcaccggccgctgcatcaccgccatggccaagaagttccaccccgagcacttcgtctgtgccttctgcctcaagcagctcaacaagggcacagttgaggatgggtctctactgcctcctcgtcgtcatgtccggatttgcgtgcttcctctttgctccggtcagatccagagctccagtcctaggccctctgattgtaaaggtgtccaggtcttgtgcttatgatgtgctcacatcagtgccggaaacgatgaagacaaagagacttttagtttgctgagctcgccaggtggcacagggaaccgggactccgaattcgcagctccagctccagctccagcccagcccc

SEQ ID NO: 324893 - DNA, 1354 bp, Homo Sapiens
  misc_feature (74)..(89): n is a, c, g, or t
  misc_feature (103)..(109): n is a, c, g, or t
  misc_feature (111)..(116): n is a, c, g, or t
  misc_feature (118)..(121): n is a, c, g, or t
  misc_feature (123)..(123): n is a, c, g, or t
  misc_feature (128)..(206): n is a, c, g, or t
  misc_feature (209)..(270): n is a, c, g, or t
  misc_feature (991)..(991): n is a, c, g, or t
  misc_feature (1339)..(1339): n is a, c, g, or t
gggaaccaatatttgccctgtgtcctttccttttgggggccccggccccaaaagaaagttttgaaaaacttttnnnnnnnnnnnnnnnncgccccaatttttnnnnnnntnnnnnntnnnntnttccnnnnnnnnnnnnnnnnnnnnnnnnnnnnnnnnnnnnnnnnnnnnnnnnnnnnnnnnnnnnnnnnnnnnnnnnnnnnnnntcnnnnnnnnnnnnnnnnnnnnnnnnnnnnnnnnnnnnnnnnnnnnnnnnnnnnnnnnnnnnnnctacatatagttacaaagcatggtagagcttgaaaaagcctcttgtaattttgaacagatgaacatgatgtctccatgatgttctaacaatatggaaaagttaaaaccaaaagacttctaacccttggtaagaccagagggattaaaagaccccactatggacatattcactttagtcaaccacttttatggaatgaacacttgtgagagactgggtgtgagctgatctggttccaagtgatctggaagctgaggtactactttcaggatgaatggtccggggatattttgctgcagttgcttgaggaatggtttgcactgtgactggatgatgtttttccacaacaactgagctcatgggaggagaaactcccattatagctaaactgctgctaattctattttttgaagcaaaatcacatcttcctgtgatccgggctgtaatagttcttcctgctttctgttgtgcagaggttacaactcttggcacatacatttcttctgatgcagcagtagcctgcagatcctgcaccaagagcagaaacaggaacgtgaacagaagatgcggaagcagcccctggtagaagtcatcgaagcagctgagggaacggcagtcgcgctggctcctccgacggcggctggtggggatggcagcagtggtgatgtaactggtaagggcatcggaggagctgaaggatccaaatgagcagaatgttctttntccttgaacaccaggaccatactcttcctttttattatttgtggagtctatccctgcatcatttctgttttgaaatatagtcatggcttcaagatttaatgcacatacacccctcatgaaagcttttttcatggaatcttcaaagtgctctttttcatgttgcattctttgaatctcagcttttgcattttccaaagctccagataacatagcaactttggcttcataatcattggaaatctggatacaaacttcttcagctcttgcttgacaagctctttctaccacatctttccactgcttttgcactacggaacgccagactttccagactttcttcagtaaagntctctggtagtactg

SEQ ID NO: 324894 - DNA, 720 bp, Homo Sapiens
  misc_feature (220)..(271): n is a, c, g, or t
tcggggatccactgaggtatggttctctccggtctgtaaatgtttggcaaagaaactgtcaggaacaggggtcagcttctcatagcgtgggttccgctgacgtttatttctggcatcgccaacctcggggatgctcagccactcttcttctgtgacttctgccaacttcctcttgaggtctgagaactgctgttggattttggggcgttccatacgatannnnnnnnnnnnnnnnnnnnnnnnnnnnnnnnnnnnnnnnnnnnnnnnnnnntccatccttttatccagggctgcatagatagcatctgcttcctcatcatctttctcgtagggtccacttgagaagaggctcccagcatagccattaaactcatcgtaattggtgtcatttagatcctcgtcgtcatcgtcagcagcctgatttttcttcatctggtccccaacggttctcttgcctgggggtgcatggcgatcatccacagggtcatttgcatcacgggcgggcccaatgtctgaccgcgtggtgaagccagtggcgccccggcccagccccggcacgtagccgaggggcgcgggcatccctaggaacggtttcttcttcttgttcatggtggcggcgacgaccaaggctaggaaggaaaggaatgaggcagcggaagagggaaagacgcagagactctaggcttcgacgtccgatgcactccgtagcaaagtgtcccc

SEQ ID NO: 324895 - DNA, 671 bp, Homo Sapiens
  misc_feature (143)..(257): n is a, c, g, or t
  misc_feature (614)..(614): n is a, c, g, or t
  misc_feature (629)..(629): n is a, c, g, or t
  misc_feature (639)..(639): n is a, c, g, or t
  misc_feature (648)..(648): n is a, c, g, or t
ggggggaacccaagccccttgtcaagtccccggtttttcttgggaaccaacgttaggccacatttccctttccttttgggggcccgccccccaaaggaaaggttttaaaaaaatttttgaaggggcgaaggggggccggcaannnnnnnnnnnnnnnnnnnnnnnnnnnnnnnnnnnnnnnnnnnnnnnnnnnnnnnnnnnnnnnnnnnnnnnnnnnnnnnnnnnnnnnnnnnnnnnnnnnnnnnnnnnnnnnnnnntatttcaaagtgtagtacacactttattttcatttgttattttctttcatagcagattacagagaaagaaagaaacctctggtttaatgttctccctggaaatattagcattgatacccattttatcctccaacttatgggggaagggaaagtaaaagtgagggagggaagagccagaacctttgggtgagggcaactttgggtcagactgccaggctacagagttaagggaagctggccccagaacagtcctgtggcgattctgttctacttcctgcattccagcagacttgacactgggctcccagacgatccagggcacaatgcctcactgttatgcacacgtatcagctgctntggtaggctttgacnaagggtttgnttttaaatngaagggttttgctaattttggga

SEQ ID NO: 324896 - DNA, 714 bp, Homo Sapiens
tgcaacacaatatacatcacagtgaaatgtgtaatccttgcaaattgcaagttgaaagaattaaattcagaggaggggagagaaagagtactcagtagggactgagcactaaatgcttattttaaaagaaatgtaaagagcagaaagcaattcaggctaccctgccttttgtgctggctagtactccggtcggtgtcagcagcacgtggcattgaacattgcaatgtggagcccaaaccacagaaaatggggtgaaattggccaactttctattaacttatgttggcaattttgccaccaacagtaagctggcccttctaataaaagaaaattgaaaggtttctcactaaacggaattaagtagtggagtcaagagactcccaggcctcagcgtacctcattagtaattgttttgttgtttcatttttttctaatgtctcccctctaccagctcacctgagataacagaatgaaaatggaaggacagccagatttctcctttgctctctgctcattctctctgaagtctaggttacccattttggggacccattataggcaataaacacagttcccaaagcatttggacagtttcttgttgtgttttagaatggttttcctttttcttagccttttcctgcaaaaggctcactcagtcccttgcttgctcagtggactgggctccccagggcctaggctgccttcttttccacc

SEQ ID NO: 324897 - DNA, 1618 bp, Homo Sapiens
  misc_feature (88)..(106): n is a, c, g, or t
  misc_feature (108)..(108): n is a, c, g, or t
  misc_feature (110)..(111): n is a, c, g, or t
  misc_feature (115)..(116): n is a, c, g, or t
  misc_feature (118)..(118): n is a, c, g, or t
  misc_feature (124)..(124): n is a, c, g, or t
  misc_feature (126)..(126): n is a, c, g, or t
  misc_feature (212)..(212): n is a, c, g, or t
aacgatgtgtcaggccaatctttattgatttaccctaatgttatgcataaagtttatctcttccccccaatcgttctcatcctccctnnnnnnnnnnnnnnnnnnntntnnggcnncncatacncncacataaagaagcaaagtcaccagctgagagcgaagtttggggtggaagttttgaggtttgagaaaaaagaagtctgaaagtctancctctttttgaaatgtgcctgtgatgaagagtgacaatcggcaaagcaaatctaataggatctctaaagagccttttcctgttgtttacaattgtggctaaagccctgcactagaaaacaacaaatgctaagatcctccctgcatcccctacccccgaccccctggggcacacacaaccctcctccaccacgttctaaaaagactggaaggacttggaaaaacattcctatgggatgaactagaaggtggcaggactgctatcatcagacctcatttacccaccgcttccagctgaaaaccagggatttcacaaaggaaaaatcatgagagtcatagttctgtggttttctcaaaaggagaaggaagggacgctcttccttcccacccctgagaacaggccaaatgagagcaagcccactggctggactgagggtgaccaaatgaatgtgacgatggcatctcatttcccaggtggacatgtgctgggcagcatgtgcctaggactgacccagaagacacacagcaccacacaacaggattgatgtgatgacaaggccaagacagaaggctgtgggaggagtgaggagaaggtggccaagtgcctgaacaatcaaagcaggtttcactcaggaagctctatctatctgagttgggtcttgaaggacaagtaagaatttattatcaggtagacaaggattgggaagagcatcaagaaatgaagaaaggtgatgtattcattggaacatgattagtttagcatggtcaatttgttattcgtaaacataactctggagggtaatgagggaagcacgagctaggaggctagttcataacactcaatagatactgattaatgcctattggctgcccaagcactgtgctaggttctgtttagaaataatgcaaacaagcaaacagacaataacaaaattggtaatgtgttaacgtgccatgatgaggagagtactgagagcagctcagagcagcatctcccagacttgagtagcttggattgcagaaatccagctgaaaaatcctcagtgcaagaaggcaatagagggtgatagattccagagtatatttaggaggtagaccagcctagcagatattgttaggaccccacatatgtccctcactgttcccatgccctttacagcttgcccctgcaagtatctctgagtctttacctgaagacactaaggtttggtttgtacaaagggtaagcccaagaattaccagggagttagcatccctggcagtggtcctcaaccagtgtcagatggaagtcagtggataaataccccaggtttgcttgcccttcaaatgggacagttctgaggaatgctttaggcagaggactcagatggcagagtgccaaccgcccacagtggaaacctgctcatta

SEQ ID NO: 324898 - DNA, 955 bp, Homo Sapiens
tttaaaatagagaactttattgtcagggtcaagggcatgtgggacccagccccagaagcctagtggtgaggaagaggttaatgcacaatacacacagaaggcacaatgggaaggtgccctcccctggcagactccccactcagttatccacaggaccccaggtctccctgtttccctcctagagaagcacctaggtctggtctgacatagagacctaggtttggagtagacttcttacccatttccctccccacttacgctcacctgcctaccacccccaacccataaggcccagtagctggtccagggtccagggacttggcaaatcacaggtctctccccagtggggagagggcagggaggagaccacagagcacaccctcccttaatcttcactcagcctaatccgtgtgcccggtgaggcactaaggccccacctcccactgctggctcaggctggcccccaacacgggcaggcacagtaaacctgctccatcactcccacacctcggtccagatggctccgtggtaggggtggggtaggggctggggtgtgctgagctgaaagggctggcctacctgcttgctggggtatttgggggggttggtgcggtagctgtagtcggagtactgctcagagcccgtggacgtggtgtccccggtgcccacgaatgtgtttgcaggtggcaggtcctgtaccacctggtgcttcttggaggctgagggtgaactggggctgcagctggaatggaaggcagtggggagttagagcgaatagtggcggccccaggtcagggctgcctggtgggtagttgaggggcaggtggatgcggggactgtccccaggggcatcgctcatcaggttgaacttgagggacttctgcagcccggcctcatcctcgtcctccactggcttcacgggctttggggacttgctcttcttgcctttgctttt

SEQ ID NO: 324899 - DNA, 1420 bp, Homo Sapiens
  misc_feature (227)..(235): n is a, c, g, or t
  misc_feature (1389)..(1389): n is a, c, g, or t
ttttcagttcaagaggtttatattcaaaaattttcttaagaatacacatgattttacaagatcattcatcatagcaccaagcctaatattccttaatagaaaacagtcaaataacaaatactccagttaattcccacaggtataaattattcaaatagccatttatatcttaatttacagtaatcaataaataagacggcacattcatatattgtttataaagatcnnnnnnnnnacaaagctacagctatgtatatcctaaatagacaaaaataatccttgtactacaaaataacatttcattttcctcaatagttttcttagagctctcagtaaaaactttcagacatagtcaattaagccctgcacaataaggaaacattcaatctgctcaatagaccagactcccccaaaataaaacaatgatcaccacccactacaatatggtctgaacaatctcctgtctccaagtttagttaagtctgtcctgaggatgtacagtagggaacgaccatttttccgtgttcacaatttgtctttggcggatagtatcagcaccactgtgagtgacataggcagcatcttatggtgcaatttcaagggcagaggggcaggtgtcccctgcaccacattccctccccacagctaccgccccctaccccaggggacattctacaccaacacaccagcatttggcttaagggatccttgttggaatgcaaacggctccgattctgagtagaatttcagaagcctttttgagtcgttactcggggaaggggaaaagatgagggatgggaagatctagtcctgtacagctatttattcctgcagttgaacttttgaatttaaaagaaattcccttaggaaactgcctcagatgctgacgtaatttaaggagaccaatttccttctaacagccctaggaagcagatttcccaggttctacttcaaacattcatctgaaacctttaagattcagactaccttctgtctgacccaaactcttcccaaaggcacctttctcagatactaaagccaagaagcactgccctaagctttgggcttgatatacagaggtacacttgctttaagcaaataggccacttattgagataaataaaaacttaccttcgtaacctttggatttttaaacttagaaaggacttttaaaagaagtcttcccacttccaacccagagaggtaaattcaaggcatctgcaggtgagccacagctaggacgtgggttctccatacccataccagtgttggcctgctttggacaatgtcaactctccagacaacaggcactcccagagtttcctttaaaaaagtgtctaaatccttgcatgacatttagcaatactggcattctggcacagcatgggncttgtagagaatacacacctattgatttttg

SEQ ID NO: 324900 - DNA, 807 bp, Homo Sapiens; identical to SEQ ID NO: 150876
  misc_feature (28)..(29): n is a, c, g, or t

SEQ ID NO: 324901 - DNA, 790 bp, Homo Sapiens
  misc_feature (86)..(127): n is a, c, g, or t
cctcaaatagatagatatatatttttcccttaaatgagatgaaatgagtggcgtcctggggtggagggaggcgctggctggagtcnnnnnnnnnnnnnnnnnnnnnnnnnnnnnnnnnnnnnnnnnnacgcatcactcaacgttgctgctgtggaaggtgtggcactgaaagtccccgtcaacgtactccatgcctggcagcttcatcccgtacttgtccacgcaccagcagatgccacgcttgcggccacgggaaggtttgcactgctttctcttgtagaatcctttgcggtcacaattgggcaggtacacagcacggggcaccatgcgtgggctggcttttgagctcctgcagggaaagcctccatgtgtctggcggcagggggccctgctcaagactccctgtctcatctgcaggtgcagagatgatcacgggggtgggcagtgttctcggctcccccgacaaacttggactgggtcagcttctttctgcggtccttcttcactgcttcagccttcagctcggagatgcgggtgtgtttgggccggaagatcttgggggagtaggtctcctcggccatctcagaggtggtgggctcctcgtgctcacgggagtctctctcgatcttgacttgctcgcggtagctcttttcgttgaggcaaaccccgcggccgtgcagcagggcgtgcagcggcttctcctcgtcctgccgggggaggcagcgcagcccctgggcgcagcgctcggtgtagacgccgcacgactgcccctcggccagggcgcaggtcc

SEQ ID NO: 324902 - DNA, 743 bp, Homo Sapiens
tgcaaaaataatgtattgtaaatgtttttaaatcattctccattaaaatttttcattattttctacaaaatacaaatacactaaggttcacatttaacatgcaaaaaataaagaggaagaagagaaatccactagtttcactagtttaaggaacaatcactaaaatgagacaatgatctatagtacatgtatcttctagttaaataggaaagcaaattcacattatccagagtcctgggtcataaagaactcaagtcaaatctagtctgaggcagacactctggctcgtgcccgcacacagctgcccttcacactgactttaacccagggctcatttaactgagaggcgagatctctcacaatacagcacaaaactctttctcctggtaaatttcttttcccaacaaaacaatcagttccctcacaacaggcaattctgtatctgtagacaaccaatacagttgctaatattcctcctaccccccaaatagctggcaaaagcttccaagagtttattttcaaagaagagtggttcttcttgtatcacaaccatctgtaacaggatacacaatcattgcctgaagacactgagtcccacaggaaggtttgtagcactaggcaacaaaaagccaatgcgtaatatccagagcagatattaaacagccttaatgattctctaatggaagtttataaaaatataaatggagtgactatccaaagtgatagtagtgtgctcaaaaccc

SEQ ID NO: 324903 - DNA, 524 bp, Homo Sapiens; identical to SEQ ID NO: 130638

SEQ ID NO: 324904 - DNA, 1246 bp, Homo Sapiens
  misc_feature (950)..(950): n is a, c, g, or t
tttttctaacaggactcatctatttattgatattactattaagccacttcccagcagtgtgactgccgtaacaagaacaggactcagtttctaaaggcaataaaataacaaggacatcatggacaaagcattgggaacactcctcgtagggaactggcttttcctctccagccagagcacccaggtgccaggggccactcccgagcacactctttgcgcatctcagccctcatgccggatgctcttctccccaccctaatctgaccttctcagttcatctgggataaacctgctgtgcttcctgtccgtgaagcgaggcgctccccaaagcggggagccaaagtctgggtgatggaaacagctgggcaccaaagagctggttctgcctcctcctcaccaagtaaacacgtactttattttttaaggaaagaaaagtcttaaaaatatatggcactagagtgtaaaactatacaactgcatccaatgaaaattccctgcagcttgcagcctgtggcacaccatgtccctcagatgtagagctgatgggaggccagggtgtccatgaacggccgcaccaggttgtccgtggagaagtaaaagatgagcccgaacgtgatggagatggggagggcgggcagcgccttcttgaacacagcaagcagcaggagggtcagacacaagccaatgaggatggccacgaagcaggccagcgtggtattccagtccccgctgcccgtggcagccgccttgcccaccagcacactgtagaagatgaagtccccgaggccgagcttcacgcccctttcctcctcttcctccagctcctcccctgggtagccagtcaagggaggctcaaagacttcggggtatgaaggctccccaaaactgtcataggagtcttccatctccgggtcgtaggggagctggagggcaccctgagaggaggggtnccagcttcgccatgccaaccgtccacaccatggcagatgagtatatcagggcagggaatatgggctcatttctctcctgggcagtttctaccagcattctcagaggccctttgggacacagcacagccacgagatcatacacagagatggcgcccaggatgacccacgcggaccactctgggaggtacttgatgaacactagggccatgagcgcactgatcatgatgaggtaggcctgctgcagcaccagagggcccttccagtggatgcacaccatgcccactgccccgaagttc

SEQ ID NO: 324905 - DNA, 543 bp, Homo Sapiens
agtagtcagcaaagttctttattgggtgttaagcccagcaaaccccagatgagccaagcttggacagcacccgcaatgcatctgcccgccctagctgggcgaggtgtgtgccaagctggcccagggaggcagagggctcccttgccaccaccatctcaatcagagcccgcagcggcgtgcgaactcggcctcagcgaataggcaaaggtggaccaggcagcaggcagcccatatcttgcggccaggtgtcgagtagtgccatgggccatacccccacctggcccaggctcagggtccagcagtacaatcagctcttccagcacctccagctcatccaggaggcgagacaggggttgtgacgccagactggacagttctctctgcagcgccacggggttctgcccccgcccgcggcgggagtaggggtcacggctccgccgccgcaggggctacatagctccgcgccgtcggggttgcactgcccagaagaacactttcggaacgggggcgttacgaaatcgccgtggtcattgagtccgcccc

SEQ ID NO: 324906 - DNA, 917 bp, Homo Sapiens; identical to SEQ ID NO: 150880
  misc_feature (385)..(393): n is a, c, g, or t

SEQ ID NO: 324907 - DNA, 872 bp, Homo Sapiens
  misc_feature (518)..(518): n is a, c, g, or t
gacttgggttcttaataaaataccactctctgtgatggctacatctaagcctttgaaggtgagctgtggacataccacatgtggacagcatgaaatgcttcttctgacactgagagtcacttgaaaaacttgaattcaaagtcaagcaggccaaatctcacacctcatgaatcccaggaggtacacaatgaagaagagcttctgccttaaaggaacaaggctgtctgggaggcctgagagtccattaaaagacaccgcattaactacaacaaaaagaagagcagcaccacccaccagtggtgccccagacacacctctcctccaagctctgggctgctcctcttggagtctacacttagaccctgggggtgggggtgggcacacaaatggacagagtggtctaaatgcaggtctcctggggttctgcgaaatgtagccagaagcatctccatctcggtgtccatttcgatccaactaagcttccagtaaagacactgcagcaatgtaaacatgcaacntaagctagcatgaggttctagatagtaagcctgaactaggaataaggcaactgaactgtgactttcgggccagggtcatcccagctgcaattaatcccggcttggccctggcttctcctagggattcattctggcctgaacttccctggtaatcatgacatgaacttctggcttctgaattttaagtaaatactttgaatatataaatttgggaggtgaaacaggtttacccttttcaagtctccatgacttgggcacttaagtttactttcacactaaggaagccttatcatagatgctctttactgtctatcatatccattcctagcattaaaggtgaaaattagtatgacc

SEQ ID NO: 324908 - DNA, 986 bp, Homo Sapiens
gatgaggaagcttctgtaatataaaaaagtccatggggctcatatatttgaataatacccatcaccggttttcaaagtctctgggagcatatctggcataagtcttgttatgtgggatcttccaaaaagtttcatgtccatgaaaacaagattcaaaaacttcatcaacagcctttttagctacttctttgctgatattcctaacagcccaggatagaaagagtgggctctgtctcgcacccaagtctggtggtgttgttttattccaaaaatgtaacctgaatatttcattgacaagtgagcagtctccactaaagtttagcagctcgaacctctgagcacgccaaatgtctgatgttggtgaaccagtcgacatgggcacgacaatgatcaaatgcatgaataagctcgtgtgtgaccactctgttcatatgggcctgattatggatattattctggcacaaaactatctgagatgttgaagcatcaaaacctctactgacatttccattacagtcttcgcaagaaaagtgtctatctttgttaacagcacaacctgagtgtttcatagcatcaagcagaagtttgacatatggatttgtctccagcgtcttcaggagcctaagctggcacttctggttgctggtgaagaagctggagaagaacccttgctggggattcccctgggccagacgctcggggaagacctggcaagagacgtgttgctgctgcagctgctcccctgccgcggggccccgccggcgctcgtccggagctcccgccatgcctcccgcagacctcgccgctgcttcctcctggctcaggcggccagagcgagactgggaaaggtaacctccctcccgccaacgcgaccgcccaggccctccctccgcagggaagaagggcagcctggctgggctgaagacgttaggcgggagggggctttgaacctgacggggagcgcgggaggcggggcgagaggcccc

SEQ ID NO: 324909 - DNA, 451 bp, Homo Sapiens
ttttttataaattaaaatatttattttgtaacattcaaaaaccaaaaaccaccctgacatactgggtggcaagaaaagtcaagatcagattaaacatttgttttgcactaatcacaaaactaataatccaagtcactatcatcaactccagttgatctcagctctgattatgcatcagaacaccctgtgagtctattaagttcctataccaaatcccaaacactcttgaatcagtctacaaagttgggacctaggtatctgtacattttttaaagttcctcaaaaaattctgcttctaggcaaatgtaatagatattgtgcgttgctcatgtttttcctatcagaaccatggattttaaaaaaactatcctttctgtccccatatatccctcatgtgggcctccacttctactctcagctccagtggacctggactggcctaaagggtatc

SEQ ID NO: 324910 - DNA, 664 bp, Homo Sapiens
gcaggtgcaaaacagaagcctcgtttgacattttcagaacaattgcggctcactctcttcttccgtcatgatgggaaaaacacagttcaggaacagatgctggctggtatgacccatgggagtccacagggactctactgctctttattttctttcgctgtctcttcgcagttatcttgctcatcctcctgggaccaggaactcctcagggggccaccggagctccccgctctccacctccccttctgtgggttccaccactatggggggcagacggtccttcagtttgcagcagcggtcaaaatctgacgggtctgggaagatctggtaggaaaggccatccttgcgggggctgaggccgatctcctccatgggctgggtgttcatcatcacctcagtcatcttggccgatctcagatagtcggggcagtgaatggggaaatatatagacatgaagtcctagggcaggctgacacacgcccctgtgatttaaaaacggtccctgcgtcccgagtgaggatgacacgggcgcagacgggcacggcaggcggccgagtgcggacaccgggcgctcgccgtccgccttcccaggacagccccacggctagcgacgtcggcaaggtggacacaactccccgctctccactgagcactcagccccccc

SEQ ID NO: 324911 - DNA, 872 bp, Homo Sapiens
tcgcaggttaaaactgctttattattatttttttaacatagaagaagcttggtagtggacatgtggccatttgatgtttttatgactaagagagttcaggctcaatctcttacagaatgtaaatgtacccctatgcatgcatatgtaattcttatcaaaattaagcttaatcactaaaagaagattcgctatctgaactttcttctacagttttctcactttcgccatcaggactggagcatctggcctctcaagaagatctgggtctagtccttctgatatcattttgtttcttattgccatcactggtacacccacttgaaccattttgagatatctggcatatcttggatccttggctacagttaagatattttctgctgatacttcactttcctgtagtccaggagtcttgtgtactgttctgctgtggttgctctgaagtggcttcaggatgtgctccatttgtgacactggtgacatttaaaggagatacttcaactgtgacatcatctaggcctgggatagatgacaactttgcatctaaaatattgagagttgtttcaatttgttggatacgaagtgaaaggtctgccagtttctcctcacaaactgtagaaaagcggttgaggaactgtacagtgtgcaccacaaattggtttagaaaagccaccgttcttttctgttgaatagctggcacctttgtcaggtctatgcctgaccccatgagaggaagcccgtcctcatccatctcctcagcgggcggtggaccccgagttcacccacaaacccctcccagatggggcccgcccaacccggtaatcacgtctcaactttccccccaagtgcccgcctccggggcccttcccccc

SEQ ID NO: 324912 - DNA, 635 bp, Homo Sapiens
  misc_feature (417)..(417): n is a, c, g, or t
  misc_feature (509)..(509): n is a, c, g, or t
  misc_feature (524)..(524): n is a, c, g, or t
  misc_feature (532)..(532): n is a, c, g, or t
  misc_feature (538)..(538): n is a, c, g, or t
  misc_feature (547)..(547): n is a, c, g, or t
  misc_feature (571)..(571): n is a, c, g, or t
  misc_feature (581)..(581): n is a, c, g, or t
  misc_feature (587)..(587): n is a, c, g, or t
  misc_feature (619)..(619): n is a, c, g, or t
ggggctgcgcagcggggttttggccaaattgggcgagggcacaaaataaccacttaccccttctcaccgaggaagagcgggagaaagggtatggcacagtcacaagggtgggtgaaaagatacatcaaggccttttgtaaaggcttctttgtggcggtgctgttggagttgactttcttggatcgggtcgcctgtgtggcaagagtagaaggagcatcgatgcagccttctttgaatcctggggggagccagtcatctgatgtggtgcttttgaaccactggaaagtgaggaattttgaagtacaccgtggtgacattgtatcattggtgtctcctaaaaacccagaacagaagatcattaagagagtgattgctcttgtaaggagatattgtcagaaccataggacacaaaaaccnggtatgtcaaagtcccccgtgggtcacatctgggttttgaaggtgatcattcatgggacacagtttttgacaggtaattctttttggggccngttttccctaggganttctggcntgcccntgccacacntttcccttggcccccagagcgttnggcagaattnggattngttcttcccccagagcgtttaccatacagagnggagagggatgactgc

SEQ ID NO: 324913 - DNA, 820 bp, Homo Sapiens
tggaaaataaagtaggaatatttggtttttcctaagtaccaaataaatgaaaaagttaatttaaaaaagccgcccccccacctcccaaggtgggaagagctggggaaaagtagaagagggggaaaaaagggccccagaaaaagtggaaaggagtggagaggccttggctggaagaaggggagaggggtccctgggctcaaagttaagggggggcacgggagccgccgttgacagtcatcttgcgcccccctgctggtggaggatggtgtctgcaggcagttcaagctacccccgttggcagctgtggtggccccactggctgtcgaagggggagtgggggaggtagggtgggtggctggaggcccatgggaactgggagagccatgggatggggtggctgggctgggcagggaggaggaggtggctggcagggtggcagggctgggagccttgtcgctgactgactcacactcggacgccccgctggtgttggtgccctcggagggggtgggcaccgtggctagggtgagccgcttgcaggctggctggacacggtacttgagggggagaggcccgttccgccgccaggggtagatgtaggcgatgtccatgagggtgtagtattccttcagtggctcgtcctcgtacagaacctccaccttgtacttgctgggcacatccatcttgttgcggagaaacttggcaagatgcatgacggtcatggctgctgggcatcgcaggaagcgcacccctgttttctctttgtccccatccccattctccagggggcccttcttctcgtcccggtccctggcacccc

SEQ ID NO: 324914 - DNA, 830 bp, Homo Sapiens
  misc_feature (72)..(72): n is a, c, g, or t
  misc_feature (462)..(462): n is a, c, g, or t
ccacggttccaaccccattttcttccatactgggtccatcatcattcctgatgcagcctgagagattcgttncttgggctggggccacttgtgggggctggggcacttgggttgtctttttacatccaaaagcaccatccttttactccttcatatgtgggcttttcacacagagtgtggatttggttggctacacctgagaaaggtgttgattacagggttggaactgctgtaaaactatccagagataaggcatccagcagaggtgtgtaccagcacgtatgtttcaaggtcaggggtgtctgatgtattcttgcttcttgaccaccatatagtttgtggcaacactgcttcaatttttcttgaagaggttgttgaattgcatctgcgcaggacagggaatcatagtgaggaaattcctcatctaaaaagctctgaaacagcaagccatggtgttccccnttcaatgaactccttttgaagtgactcaattgttgtcttcagtttccttgtcttctgctgaagtgcctggcaagtgttcgataattcagtatttatagtttgaaggttccgttgttccgaaattgcttcctctaatttatgcagtaaagacgtagctttttcactggcagtgtgggcttctcgatctcgatccttaccctggacatggatagttagtgctggattgtagcagtgtggccaggaaagaaagcaatggagtgctcactcttatgatgcaggcaaaactgaaaatgtgtttttcttctcagggaagtgataagcctctcctgaacttctgcaattctgtgtttgcatgggcttggtatccc

SEQ ID NO: 324915 - DNA, 966 bp, Homo Sapiens
  misc_feature (843)..(843): n is a, c, g, or t
  misc_feature (895)..(895): n is a, c, g, or t
tcggacaaggccttcagccagagctcctacctcatccagcaccagcgcttccacatcggcgtgaagctttcgagtgcagcgagtgcggcaaggccttcagcaagaactcctcgctcacgcagcaccagcgcatccacaccggcgagaagccctacgagtgctacatctgcaagaagcacttcacggggcgctcgtccctcatcgtgcaccagatcgtgcacaccggggagaagccctacgtgtgcggcgagtgcggcaaggcctttcagccagagcgcctacctcatcgagcaccagcggatccacaccgggcgagaagccgtaacaggtgcggccagtgcgggaagtccttcatcaagaactcctccctcactgtgcaccagcggatccacacgggcgagaagccctaccgatgcggcgagtgcgggaagaccttcagccgcaacacgaacctgacgcgccacctgcggattcacacctgagcgcctctgtgcagggctctcactggcggtgcccaggacggacgccagatggctgcgcgctttgtcagcagtgctgtgagaagttctcccctggggtggggactcggggtcaggggagctcaggaatgtggtgttgtggaggggctggctgatcacacatgccccctccttactgagcctcagaaagcaagcccctcggtgtctgacgtatctggggacacttcaaggttcactgtagctgagccatggccgctggtaacagacatcagggttccagactagccctcttgagtaactgtcctagagctgggacaggtcacgcctgcctccacatctctgtttcttcagcgggaaagtgganctggtgaaggggagggaagaaacatctccctctttgtcagatacatcctggnagtccagatgcagcttgtcaccatctgcatttttctcccgtgggtttgggaaacgtgaggggcctttccct

SEQ ID NO: 324916 - DNA, 339 bp, Homo Sapiens
  misc_feature (293)..(293): n is a, c, g, or t
  misc_feature (316)..(316): n is a, c, g, or t
ttttagcagcaaataaaaatagaaaaagtctacttttatttattggtaaacataagacaaccaagtctgagcatctggtgcagttcccagtgacggcacttgccctgcacacgctcttgaagcaccaggaaaaacacacaacacagtaagaaggcaaagtggctgggagtaaggtatctgcagattcaaactttgggattgaagtagctggtaaacagaaaggcaccgaatcagggtctggagagaccgggcttgctgggggaaggaatcttgggcctgcccaaggcagacangggacaagacatccctccatttnttcccaacaagcttccttggaag

SEQ ID NO: 324917 - DNA, 850 bp, Homo Sapiens
  misc_feature (18)..(18): n is a, c, g, or t
  misc_feature (26)..(26): n is a, c, g, or t
  misc_feature (83)..(91): n is a, c, g, or t
aaattttatccctcccanctgccttntacttccagggtcatccccagggacctatgcctgtgagctaaaatgcccaagatggnnnnnnnnntggatgggtgccttttttctagtgtattttgtgtaaagactcccccaagagctcaagagggagttgctgctctgcaaatgacaaaagggtgtgtagctgcaagccaatcaggcagaacatttaacatcgtcctggccattaatgactaagcctgcgccagcgtcaaaagcggtcggaaacagacgtcagactatgggacagctaaaacattgattctcagggatgtcgtccaagaggaggtctctgaagctgggtgtcatcctttagggtggcccagaataaaatggtgacacattatgcctcctggcgagttcataaacactttgaacggcaaagacaccaagtcccggggacttccaacgaagatcttggggcaagaagagatgtccaccagcactttctgttctgtgacctgacatgtgatgcacttccctgtagtggcagtggaggaggagattgctgtacaaggatgacaaacaaatctgcagcttgaatggaccaccctggtgacttgatgcacgatgctctgtaaagtgtaaatggatctggggttgcgtggggaagggggggcagagggagagaaacaatgtcttgcggctgctgttgctctggctgctgctccacggggcttgttttggatccccctgcagtgaaacaggtcctgtacggctccgccactgtagtagaaatgatgtctgcggtataccgacccgcgtgggtcgacgatatcccgaggaattcgggaccggtaccagcctg

SEQ ID NO: 324918 - DNA, 429 bp, Homo Sapiens
  misc_feature (11)..(11): n is a, c, g, or t
  misc_feature (30)..(30): n is a, c, g, or t
  misc_feature (39)..(39): n is a, c, g, or t
  misc_feature (60)..(60): n is a, c, g, or t
  misc_feature (106)..(106): n is a, c, g, or t
  misc_feature (183)..(183): n is a, c, g, or t
  misc_feature (203)..(203): n is a, c, g, or t
acgtctgtttnccggacccgcttttggaantggcgcagnccttagtcattaaatgccccnggacgatgtaaaatgttcctgccctgattggcttgcagcctacacncccttttgtcatttgcagagcagcaactcccctcttgagctcttggggagtcctttacacaaatacactagaaaaanggcacccatccatttttttnccatcttggcattagctcacaggcatagctcctgggatgcccctggagtagaggcagtggaggataaattcatcttgcacagacttgtttgtgctagttctagcctgtctctcgccacagatctagcttttaaatactcaagtgattggttttgtgtaggaatgtgtggattgttggattggaagaattttctccctggatttctagtgtttacataagcagatac

SEQ ID NO: 324919 - DNA, 570 bp, Homo Sapiens
  misc_feature (258)..(263): n is a, c, g, or t
  misc_feature (270)..(270): n is a, c, g, or t
tctagtgtatttgtgtaaagactccccaagagctcaagagggagttgctgctctgcaaatgacaaaaggtgtgtagctgcaagccaatcaggcagaacatttaacatcgtcctggccattaatgactaagcctgcgccagctcaaaagcggtcggaaacagacgtcagactatgggacagctaaaacattgattctcagggatgtcgtccaagaggaggtctctgaagctgggtgtcatcctttagggtggcccaggnnnnnnaaagggnaaaaattaaaattgggtgacacattatgcctcctggcgagttcataaacactttgaacggcaaagacaccaagtcccggggacttccaacgaagatcttggggcaagaagagatgtccaccagcactttctgttctgtgactgtaaagtgtaaatggatctggggttgcgtggggaagggggggcagagggagagaaacaatgtcttgcggctgctgttgctctggctgctgctccacggggcttgttttggatccccctgcagtgaaacaggtcctgtacggctccgccactgtagtag

SEQ ID NO: 324920 - DNA, 497 bp, Homo Sapiens
agtggcggcgatacaggacctgtttcactgcagggggatccaaaacaagccccgtggagcagcagccagagcaacagcagccgcaagacattgtttctctccctctgcccccccttccccacgcaaccccagatccatttacactttacagtcacagaacagaaagtgctggtggacatctcttcttgccccaagatcttcgttggaagtccccgggacttggtgtctttgccgttcaaagtgtttatgaactcgccaggaggcataatgtgtcaccattttattctgggccaccctaaaggatgacacccagcttcagagacctcctcttggacgacatccctgagaatcaatgttttagctgtcccatagtctgacgtctgtttccgaccgcttttgagctggcgcaggcttagtcattaatggccaggacgatgttaaatgttctgcctgattggcttgcagctacacaccttttgtcatttgcagagcagcaa

SEQ ID NO: 324921 - DNA, 988 bp, Homo Sapiens
  misc_feature (187)..(198): n is a, c, g, or t
tatttaacatgagaagctggatgtaaatatctaaagagtgagttcctaaaaagcctatttttaactttacatacacacctgttacctggaatgcctggacacatctttgacctgttccaattaggactgagaaaaaaggaaaaaatactttgttgaatcaactgtcctagccccactgcaaagaggnnnnnnnnnnnntcggtcagtggcatatttcccactgaaattatgtccccaagtagccatgctagaatttcttccagccaggtacaccacacaaatggtgacacagcttaatgtgtggtcagtgtgtgccacgttttctgcactatacccaggtttgatggcttgatgttaacttctgaaaatgtagctacagtgttcttcattataaacagaaacagaaaagaattactcctaataattcctgtatcaaactgtaactttatgaatataaatttagaaatgaacagatggcaagcatgaatattttcccgaagcgttctagtgcaaaatgcattagcactactgacattttcttcctatgccctgctcccagattaaaaacttaacacttacatgctcaccactagcagaaagggatttccagggaccagaatctcagagaaaaggagggttcattcaaacataactggtgctgaatccttgcagctgaaaattatcttgcaagtatatatgctggcccttcctttaaaatgaacttgcagtttattaaaagcgatcaaagagctctggaatcttattttcaagaaccagaatatggcacacattttaaatttggacagacttctagcggacagttacttctcaagaattttctatacaaaagctgtgccaggcatatattttctcaccaggacacatggggcagcggacccctggtgtcagtaagaacacacccagaatgatataaccagatatttttcagtttctaaattaaggcatattcaaaaaattccatgtaccc

SEQ ID NO: 324922 - DNA, 944 bp, Homo Sapiens
  misc_feature (724)..(782): n is a, c, g, or t
catgagaagccaaaagctccagatttttatgtgaaattttttgatttttaaatactggcaactaattttttaaatgtttaaaacactctatgggccaaataaaacatatgcgcaggctgcatccagccagtagcctccaggccatagccttggcaagcagacctttagccacgacccagaccatccttcctgggacctgctggagagccaagtccctgactctcagggtatgctggtgggcccagaagaggctgcccctggtgctgaggactcacccgcttctgcaggggctcctcggccctccttgggggtgcagcagccattttccactgctcttgaggcttcaggcagggtctcagctgcaccctctccctctgctggggccccgcccttctgccccccagcagggctcccctcctctggctggggctcactccgcttctccaagtccccattgggtaatagctctgaggcgcctgagtcctgggccatggatggggacttggagatcaccgcagggtcctttggcgtgccaccgctttccaccggggggtgcttgcgcttcctcccaggccgccccaccttccgtgccgtggtgctgggctcttggcgctcctccttgccacgcggctcctcctgctcctctccgtcctttcggtcctcctcccgctccgcagcagagctgctggtgtccccagggccgctggagggcatggcgggcatnnnnnnnnnnnnnnnnnnnnnnnnnnnnnnnnnnnnnnnnnnnnnnnnnnnnnnnnnnnaaggaattatcgtggtctttggaggcgagagttaaaacttaaacatagatcccggtgttgagccctctggtgaacggtgcctctgtcagcctgtgggtgggggcttcgatggctccaccgtatggccggtggggtcgggacggcccggctgcgcgccctgcc

SEQ ID NO: 324923 - DNA, 933 bp, Homo Sapiens
tttgtgctcgattatagtcgccattcgcacatcggtggtccatacctagtctatgccggcgtacttctgtggtggtcgcattgctcacccgcggtggctgcctccctgattcccggggtccttttcccatgacacggttgttacggcggcccgctctctgttgttattcgccccatctttgggggccccttgtccgaaaaaaagtggttggcgttaagcttgggcccccatggggtatctctttggcgcccccccctctttttgtctgttgtagatgctcgtgtcgtcgtctttgtttttttccagcttactttattgtaaaaactacagcatagaatacatataacatacgtaatatgtttaattgactgtttgatgttattggtaagacttcaggttgacagcaggctattgtagtgaagtttttggcgagtcaaagttatatgtcgattttcaactgcacagggggttggtgccccaagcccccacattgttcaagagtcaactatttttccacgttcagcatcccggcttaaggaggttccttagtaatatgtcgttgaataaatgaatacatgagtgaatgaagagaggactgaagaagccacacatgagcctctgcccggccgctaccccgtctgggaagtgaggagcgtctctgcctggccgcccatcgtctgggatgtgaggagcccctctgcctggctgcccagtctggaaagtgaggagtgtctctgcccggccgccatcccatctaggaagtgaggagcgtctctgcccggccgcccatcgtctgagatgggagcgcctctgccccgccgccccgtctgggagatcattaagcagcttcgagtctggaaaatttgttgaatgtactgagcaattagaattgttaccaggagaaaatatcaatctacttgctggaggatcaaa

SEQ ID NO: 324924 - DNA, 1284 bp, Homo Sapiens
  misc_feature (310)..(388): n is a, c, g, or t
  misc_feature (419)..(532): n is a, c, g, or t
  misc_feature (537)..(588): n is a, c, g, or t
cccccgtcgtctgttggtgtcggagtgtcttgctgtctcttatggctctgtcccgctggtttcggttattccttgttttttcctcccgttgtttctcttcgctctgttccgtgctttctgctccacgcctggtgtttctcgccgcgctgtggtgctcgccggcttttccctcttcttgtgtccgtggtctcctctcttgcggggtgtgcgcgtgcgaacgtagtctgccctgcccgccgttgttgtgtgttggtcgcccccttagttgtgtttttctcttgctcttctttggttgtttttttcgcgagcnnnnnnnnnnnnnnnnnnnnnnnnnnnnnnnnnnnnnnnnnnnnnnnnnnnnnnnnnnnnnnnnnnnnnnnnnnnnnnnatgttggtgggcctccctttgtttcgtcggnnnnnnnnnnnnnnnnnnnnnnnnnnnnnnnnnnnnnnnnnnnnnnnnnnnnnnnnnnnnnnnnnnnnnnnnnnnnnnnnnnnnnnnnnnnnnnnnnnnnnnnnnnnnnnnnnntttcnnnnnnnnnnnnnnnnnnnnnnnnnnnnnnnnnnnnnnnnnnnnnnnnnnnnaaggcaggagggaatttagtggagcgtggggaaggaagaaagtggggttgggagaacctccccaaccccatccctgctggcccggggacgggcatcgtctctcagcaagagaagtattcccgggatgctgagcgcttcattctgtctccaggactcaggcaggtaggtcccagctccgccgcgcccccggacctacaggtcagcgtggtccgaagtttcctctgggggcttcgcgggcgcccacacgtactcggggggcacctgcgcgtcgggcgccgccttgcggtagaagccgagctcctgcactagcgcattgatctcttcgcgggtcatttcactgagtgggatgcgctctagttcctcgtagcggcggcccagcagcacgagctcagggtcggccccagggaggtgtttcatcaccaggttgtgatagaatggaatgtcctgcgtgacgaaagccttcacctcctttaggcggttcagctgtcatcccccgcaggtctctacccgggcgcgggttaggccgctcagacggttccagtccggccggtaggcagtggcggctgtggctggggccacaagcgccgcgagaagcagcagcagcgccagcggaggcaacaggaggctcatcgggacccggccgcagatgatgcgcaagctggaggcgaacctccgagtcgctgcgccacgtctccc

SEQ ID NO: 324925 - DNA, 781 bp, Homo Sapiens
  misc_feature (741)..(741): n is a, c, g, or t
  misc_feature (771)..(771): n is a, c, g, or t
tgttcttcttggcatccttcttatgctacttctcccatcgctcaaaggggttgcctatggctgggtgtgccctgcccgtaaatgcagcaccactttcaagcttagtaggaccattccaagaaaaccaggtttcttctccccataccacgttgtgcctgaagaacaagccttcccgtccttgcctgcatgtgagtcacttcttggctgtgcagcaggtccccccctccccgcgatatgctggagggtaggattctgcagcctgtgttgctctctacctggcagcagactgtgcaggagccccaacctcgtcctccaattccagcattcacagctgatgagcagttgcaggagcagggcgagaggaacagagccaatgatgtgtgggttacactgaggagccaaggacagggcctcaggtctcccccttacaaggcgtggctcatggcctgcattccagagaccaacatgatagcttttaattcagctgcatgacctgtgccttttaagccataaagatacctcaagcctagcacctcttgaaatccagatgttcatattagactcgaaaaaataggctccaggcctaggtgcccaggctatgatgagtctgcttttgaaggaggtagggaatgacatcttccttggacccaaagcttaaaagtaatgtatgctttgctgaccactgtttgttaggccttaaacaacattcactgtgggtggtatcaggcacacgtgctatgntgcatcaattaatttttttgggctttccanaacagaaatc

SEQ ID NO: 324926 - DNA, 566 bp, Homo Sapiens
ggagaatacggaggagagagctggaggtggaggaactaaggaccttctttgccaggtggggacttaaagtttcagttacccattgttggggctcagaaaccaataccccgaaatatagtggtgtgacattctgaactgaagaagccttaaggtctctccgaccagactcccacaggccccccaaccctttgtctcttccaaagcatacagtgaagttgttctctgaagttcctcatctgccttaagtctggacccaccaaagaagaaaacaatgaccactggtcccttcccggagttttctctgactgaactgctgtcacaggaagaaagactgaagcctgctcacatacctggacagattttgcaaaccgttgtctgctctgtgagcccaacagactttgtcccaggccactgtatgttcttcaagcccactgaattcccctgaaaatcatttactagccccctgaaattacccacacttccccattgctcatctgtaccccatttcgtggtggggcagtcactctgatttccccttgcatgctaatgaatgtgtattccatttc

SEQ ID NO: 324927 - DNA, 1002 bp, Homo Sapiens
  misc_feature (42)..(42): n is a, c, g, or t
  misc_feature (81)..(81): n is a, c, g, or t
  misc_feature (873)..(873): n is a, c, g, or t
ggatcctccacaggtaggcgcagtcagctgggagcgtcgcgncggtccgcgttcggtggagggcgtgtcctgcggcgcgantggccgtagtgttgccggcggttgtggaggagctcctgagcgacgatggcggcggcggtgcaggagagcgcgcgaattcctgatgaatatctgttatcgctgaagtttctctttggctcatcagccacccaggccttggacctagttgatcgacagtccatcaccttaatctcatcacccagtggaaggcgtgtttaccaggtccttggaagttccagtaaaacatacacatgtttggcttcttgtcattactgttcatgtcctgcatttgcattctcagtgctacggaagaagtgacagcatcctgtgcaagcatctcttggcagtttacctgagtcaggttatgaggacctgtcagcagctaagtgtctctgacaagcagttgactgacatattattgatggagaagaaacaagaagcataaaagggcaattgaaggaacagactaaaaatcgtgtcctggaaggaaactacaggtactaccagggattttcagtctgaagaagaaaagacaaaatagatgacagaaggagtattagaagggagagcgatgagactcagttggacaccgagagagcaaagaagcaataatacgtgaagatgaaaatgaaatcaatttcagcataagaagacaagaacttatggtaaagctgcccacagccagaagaggatcctagaaggacaggaaattccctgtctgcagcatttcataagcatgtaatattgttgcagggatactgcagaaggagtttgagcagtggacagacagatgatataggtggattttacagncctaagaaagccctgtgcttgtggccccaaaacatgaggtgctagtgaatgaatgctgggggaaagcccagggcctaggtgttgcaatgttctgtggttggcagatgctttttgttttgttaaaaagtg

SEQ ID NO: 324928 - DNA, 467 bp, Homo Sapiens
  misc_feature (425)..(425): n is a, c, g, or t
  misc_feature (427)..(427): n is a, c, g, or t
cttggagaattcgagggttttgccatttcctctaccagagcctagggggttgaatggaagcaaaagagaccttctgcccaccccccactaggctggccccagtccctggaagcggaagccagtcactttgcgatcttcccacactgtgttgctgggtgaggcctgggcggtcaggatgaagttctggttgaagtcccgttgtttgttcccctcaaacttcactgatccacagatgacaacaaggaccgtggtctggcttggtgtggcttcatcatgaacaggctggcagtctaccacgctgatttggaactcgctggaaggcaacatttcaaaaaactcactcaaggattcttgtcctgaaacagcattgccattccagaccagggtccttgttgtcatctgtggatcagtgcagtttgaggggnanaaacaacgggacttcaaccagaacttcatcctgaccgccc

SEQ ID NO: 324929 - DNA, 611 bp, Homo Sapiens
  misc_feature (588)..(588): n is a, c, g, or t
aagaagcaacatgtgtattattaaattatttgtcagaatttccagaatcagagtctctactgggcaagtagaaaaatagaaaagtttactactttgaaaaggaaactatgacaaacaagtatatattcaggaaagggactcctagaacttgagcaacaaaaaagagttcaacctcggcacagtggagtctgcagtgtctccgcaacaacagaaatgaacttgtgttcctcacatccttgagagtcgaggtttgcatttctctacagagctagggctgaatgaagcaaagagacctctgccacccccactagctggcccagtcctggaagcggaacgagtcacttgcgatcttccacactgtgttgctgggtgaggcctgggcggtcaggatgaagttctggttgaagtcccgttgtttgttcccctcaaacttcactgatccacagatgacaacaaggaccgtggtctggcttggtgtggcttcatcatgaacaggctggcagtctaccacgctgatttgaaatgttgccttccagcgagttccaaatcagcgtgggtagactggcagcctgaattggggactcgctnctcgtggccgaatttctttgggc

SEQ ID NO: 324930 - DNA, 566 bp, Homo Sapiens
  misc_feature (71)..(71): n is a, c, g, or t
  misc_feature (100)..(157): n is a, c, g, or t
  misc_feature (159)..(159): n is a, c, g, or t
gagatggcaggggtctcatatgttccccagactagagtgcagtggctattcacaggcgccgtctagcgacntacaaccttaaactcctgggctcaagcannnnnnnnnnnnnnnnnnnnnnnnnnnnnnnnnnnnnnnnnnnnnnnnnnnnnnnnnngnctgccaatactttctatcagtctgtcatgtttactgtcttttcctccatacagaagtttttccttctcagttgggtcaagtccattgacctttctgttacagcttgagttttgtgtcttacgtaggaaaaggtgcccctgctctcactttctgcacagctatcaggtccagctcatagcagttcttctatttatccatccactgccccaggagctgcctgggcattcactgccccgcacccctctccagccccaaggtagagctcgggccctgggagtcccaggaccatcccggactggggagctgcttggtgtccagccccgggctcaagctcttctccagctctgcagctacctgaggggtagcagcccggatagcatcctggatgttggttaggtcccactgcc

SEQ ID NO: 324931 - DNA, 884 bp, Homo Sapiens
cgtggtttcgtctatttattaaaaaatatttgagaacaaaacctctgcctctttgagtcttgctctggcatccccagcatctctgattctccctggtgcccccagctcaggaagaaggtggtagtggggagagagggtcaggggggcttggcagggatgcaggcaccatgacttttgtgaccagttcctagagacgcatgggtgtagcctcaggaggaaagcgagaggagctttaccatgggaacgaaggaaagggacaacattgggaggcaaacgttgggagactagtccagaaacttgcagttgaggatacaacagggtcctagtgtttcctccctgggtcagcgtagaagtagagctttttcactgtcgaaggcgggattgaagttagagattgccctggcagaggttggggagagagggactaggaggtggtacatgaatgtcttctctcattctgctaggtccctctcagtggaagatagataggctggtgggtggcttgttctaattggaggctggggaaagagcaaatgagtgccttggagcttgggaaagattatttgacagcctttcccatgatgtggggcccaacaggtagccacttcaagggagggggctgtcgttccatttggatttcggagaactgggcgttctcaagatccttccaggtctctctggtgaggcagcagccatccccaatgtgtttccaggtgggctcgaaaacttgctgccacatgaaggcccagcttccatatggttctgccacatgctcccagaaaaagagcacacctcccggtctcagtactctccggacctcctgcaggaccttccttgggctctgcacagagcacagcaccagagtgcagaccaccacatccacc

SEQ ID NO: 324932 - DNA, 1047 bp, Homo Sapiens
  misc_feature (871)..(879): n is a, c, g, or t
  misc_feature (926)..(961): n is a, c, g, or t
  misc_feature (964)..(1002): n is a, c, g, or t
agagtcccattccattatgtcaaaggccttaaatgcccctttgacccagtgcctgttaaccatgggttattttcaaaattgagccccctttgccatcttctaactactgtctcttctgttatcatagtccatggctccattcatcatgattccggtctttcatagaagaaatcatctctctttccctctgtaatgatggtcagacccatgatcagtgtaacgctgttcccggctataatgtctatctgctaggtagggataagaattcattctgactttacggctgtgatgatggtgtaccttggcgccactgggagcttgaagactgattgaaactatgactgtgtgattgaactgatggtgaaaatcctgattgatccagaggtgaagaaccaaattttccaccatatgacatttgtctcaaagcactgttcatcactgcttgtctctgaaaattttctggagaagagaaagatctctgaattatctgtgctgatgaagtcatgttatccatagtcctttcgtacctgctgctaggagatgtggaggtagggcttgaatttccgacatgatgttggggatatgacaaactgacatcttgtggggcatgactacttcctgatctaaattgaattttgataggccttccataaagtttgattccattaagtagattcattgcataaggaacagacacttcatgtttgaaattcacaaacgcaaactgctttggtttaccatccttatcttttggaattttcacctttattactggcccagcctggtggaaaagctcgaaaaggagctcctcggtcactttcgtttcaaggttgcccacaaagagagtgcgatccgcttccgccgccgccgnnnnnnnnnggccgtaatggccgaattcccgggcatatgtccggtaccgtcgactnnnnnnnnnnnnnnnnnnnnnnnnnnnnnnnnnnnncgnnnnnnnnnnnnnnnnnnnnnnnnnnnnnnnnnnnnnnncttggcaagcacgcttgagccgccccttattagtgagtctattca

SEQ ID NO: 324933 - DNA, 516 bp, Homo Sapiens
  misc_feature (58)..(58): n is a, c, g, or t
  misc_feature (73)..(117): n is a, c, g, or t
tcttgccaacattgccccggctggtcctcaaaactccctgacctcaaaacgatcccgncctgccttggtctcnnnnnnnnnnnnnnnnnnnnnnnnnnnnnnnnnnnnnnnnnnnnnctattgtcatggtttttcatattttttcagtgaaatgaaaagttttgagtggttacttaaaaggaccaaaaaggaaagattcattataataagacaatagttgagggggcataacttcccctaagaggtaacatttggatccagaagtagaaaattccttctgacctcctggctgtgactagcattaacaagtaactaactgttagcctctgaatctggtaactggtccgtaaggaggacagcaaaaaaggagagaaagccaaggtggttaaacaaaaaagttaaatgacatggagctgaaagagctcaaatcccttcatgggatccccacggagccccttcctgtggacacacacctctcttcccttgctggaggtttctttctgcaaagaaaccccc

SEQ ID NO: 324934 - DNA, 861 bp, Homo Sapiens
  misc_feature (191)..(191): n is a, c, g, or t
  misc_feature (546)..(546): n is a, c, g, or t
  misc_feature (565)..(565): n is a, c, g, or t
  misc_feature (825)..(825): n is a, c, g, or t
aagggtactattatttgggagttgggtgacagtgacgcaatggaacagccaaaaacatgcaccttcccccaccacgtgcacacggtgcgcacgcacacaaattcaagttcaagcaattttgtttctgggcttctcctttggactcctaagtccaaagtgagagaatacatttcttggccacaggccatgangagagtacacaggggacttgggggcaaacttgaggccttggtgcatgtagctcagctacacgtggagcttccctgtgggctcatctgcagaagggtctaaggcagagaacacagattcttagaactctcggcaggaaagaatgttcatggcatgtaaagaccatggcatagttggatatcagccagtcatatagaaaagcccatcctgaattttcaatttgaggccccaggaaatgtggttgggtgagtcatggtcctcaaattatcttcacaaggaatctggtagctcagaatgcagggcagggcacttgctgggttcttccccgtgcctggcccctcagagccttgagtgtcntggggcgttccaggcgcantggatggaattaccaggcaaggccagggtttaggtgagcagggtgggttttctcagcaagaggaagagttcatttgctctctggcacaagatcttgactttgattctttgtactgttgtgacctccaggttttcagccaggttgtgctcaggaaggacagcaggaaggtatccccatcaggcctcctcttccgcctctcttgcacccacggcgcccctgcttgcctctgtccgggtctcggaggcgcgaacaccatcccngagcctgcgaccgcgcggcatcacccccgccctccc

SEQ ID NO: 324935 - DNA, 859 bp, Homo Sapiens
aaacacatttttttcctggcttcggacctcagactgctgcagccctaaccttcccagggctcagctctttggagctgcccattcctccggctgcgagaaaggacgcgcgccctgcgtcgggcgaagaaaagaagcaaaacttgtcgggagggtttcgtcatcaacctccttcccgcaaacctaaacctcctgccggggccatccctagacagaggaaagttcctgcagagccgaccagccctagtggatctggggcaggcagcggcgctggctgtggaattagatctgttttgaacccagtggagcgcatcgctggggctcggaagtcaccgtccgcgggcaccgggttggcgctgcccgagtggaaccgacagtttgcgagcctcggctgcaagtggcctctcctccccgcggttgttgttcagtgtcgggtgagggctgcgagtgtggcaagttgcaaagagagcctcacaggtccgaagagcgctgcgctcctactcacgttcgcttcctcctcttctcggttccctactgtgaaatcgccccgacatttacaaaggcctccgggtcctaccgagaccgatccgcagcgtttggccccggtcgcgcctattgcatcgggagccccccgagccccggccaaagactggcgggtggggtaaggaaggcggctacccataacgcgaaaaacgttccggccggccagacctctacggacccgctaatggacgagcccgaatctggcgatcgccccccctaataaaacgccccgtttttttcccgccgcgcccgcatcccctccggccgtgcttgtacgctacacaccactttccaaacccagtccttccctcgcgttccc

SEQ ID NO: 324936 - DNA, 930 bp, Homo Sapiens
  misc_feature (156)..(156): n is a, c, g, or t
gtcattgcccagggttccccttaggaaaccaggcttatgccccaggttccatcttgcctgcgggggcccgccgggccaaaacagaaggttttagaaagatttctggagggccgggggcggcccaccaagggggattgtgtggtgggtgttgtgggnattagtcaagcttttaatgaaaagatcataaaataacagtttcttatcgctgtacatttaagactgcacacttctgaatggagagatcagtcgttgatgaattgcttttctatgacactgggcagctgtgtagctgcagctctgacctgaatttatacaaactctcaagggacatgaactcaatgtgacaggtgacagcggcggtggccagtacaggagtgcggatccccggtgtccctccccccttctgggaagggcataaaacaaaacatgatccctcttccagttccaattaaacaaaacagctataaccccatccctcccccctccccttcgggggtatttgcggggaaatgagccaggtgcccaacctgggtcccccccggggtgggagagggcagagggaagctagtgatgggtggggtagagaggcatccccatcaagcacctggctgcacggggcccgccaagtggagggtgggagcccatggggatcctccctgccccagtgaggtctgttatgcagcatttttgaggtcaataaattacagcaataaatagcaaggtgaggtagggggagggggtcctggtagaaagttaaagtggggtgactgaagccggggcatcctaggaagggggtcctgggcagcctcagttcccaccgctcatgcccacccccaccccggcgtggaatgtcagactgaggctccagttaggtccctccccagccctcactcctggcgtctgattcacaggttcagtaacatctgtgcc

SEQ ID NO: 324937 - DNA, 1157 bp, Homo Sapiens
tattttcatattttagtagttttatttcccctatgagaatctcccctgccctagccccttcttcctgcactctggaacagagcctctggaatctgtccaagctctgtctctaagggccaccttcccctcttctgtctttagtatccccaaagggtttctctgggctgtgctcctttccttggttcacatgggagggggcttccctgtttcagaagtcccttatgggagaaatagagatccaagtttcacttcacctttttcaggcagttctgtttcctgtcctggggctggagtgggagagaggcctcacccctcagcattgctccttctccactagctgtttgggggtgggctggtctcagagtcaaaagcactcttgggaaggaatgaagcctgaagattgaaaagtgttagtgccaggtgagcagggttaggaagcccattatctgtgttttctcagtcaaccattttgtcaaggtgtaatgtgctaggctcagggctctcagagcttcccttcgtctagcagcttcctgagtccgtcacagatcttgccaaggtgctgagtgaagtcaggcccatagagggccgtgagcagacctgggtcagagaagtgatcaaacacgtggcggatgcggccatgtgacttgggcgtgaggtggtgttccgccagctctagcagcacatccggggcgctcggtcagcaggggcaggcagaacagcagcctcgaaggtgaagtctacctcaccaaaagctaagtgccgttcatggcaccctgccgcagcttctggcgaaagcgggttagccagggccaagctcactggggccaaaaggagccattgcggtgcagcacagccaccttgatggccactttgatcaggtccttgatcacgcgctggcctggggccggctgtgcgtgtactccttggacacacggtagagctcatctagcacctcactgcttgtctcatctatgaagagatgagccacagagcgacccgccatcttactcagtagcttcttctctgcttgcagtgccaggctctttgagctgaaggactccatgggtcctggagagtggggtatgtggtcagtcactgctgtgctgggtgccagtcttgccttggatgttcccggaaagcttacagaatggagaccc

SEQ ID NO: 324938 - DNA, 890 bp, Homo Sapiens
ggggagaatggcggcgcccgggctgcggctgggagcgggaagactctttgaaatgcctgcggtgctagagcgactgagccgctataatagcacgtcccaagcttttgctgaggtgctgctattgtcgaagcagcagctgaggaagctgctgtacccgctgcaggaagtagagcggttcctcgccccctacgggaggcaagaccttcacctgcgtatctttgacccaagcccggaggacatagccagggcggacaacatcttcacggccactgaacggaaccgcatcgactacgtcagctccgccgtccgtatcgaccacgccccggaccttccgcggccagaggtgtgttttataggcagaagcaatgttggaaaatcatctctaatcaaggctttattttcactggcccctgaggttgaagtcagagtctccaaaaaaccaggacacacaaagaaaatgaattttttcaaagttggaaaacattttacagtggtggacatgccaggttatggctttagagcacctgaagattttgttgacatggtagagacctatcttaaagaacgaaggaacttgaagagaacatttttattagtggatagcgttgttggaattcaaaaaacagaccatattgccctagaaatgtgtgaagaaatttgcattaccttatgtgattgtattaaccaaaattgacaattcttccaggggacatctttttaaacaagtgcttcagatccagaaaatttgttaacttgaaacctcaaggatgttttcctcagttgtttcctgtaggtgctgtgaccttttctggaatccacctgttgagatgctttatagccagtgtaacaggaagtcttgactaatggttcccggtttagctgaagattca

SEQ ID NO: 324939 - DNA, 864 bp, Homo Sapiens
ggaaggccccccggagggcttccttaaaattttcttccggagaggtgagacacctgtgcccctgggaaggccgcttgttttttcctcccccatcagccagaagggcagatccccaccttcagagcccccctacaggaccccagatggggatccaaagtgcagaaaaaggaacccccgcttccctcattagtcatttaggaagataagatagcatgggacagggagaaccaaccatgttctgaatggagactttttcaggttcccaaacttgggacagagtgtgaccccacatcctgtggtttctgcctgaccccttctaagccagaggtgagaaaacaactcccagagaccacgactctcaccctcggaggtacctgttcccctgcaggtgtggctctctgacaacccctaggcaggggtgggctccagcttttggaagcaaccctacctagctggccccccaagcattaagaagcttccctgatggggccatgttttggtctccttttaagccctcagtcacaatgtaccttctgagcttgtcctactattcagatgattttctctctgagttgcaatactgctcaatttaggtggctacctgtgttcattcaagctctggaagtgtggaagggaacttaatcattgagtttctgtgaagtattttgccatcctaaaatccctgagagtgaaactgttgaatcatgctcactttcttcacatacatactcttggattaaaattaccaagtctgttgaattcatctatttagaaatcctactagcctacaggaaaagctttttaatggggatgatttgcttggacttaagtatttgcttaaatactacctattctgcccccacc

SEQ ID NO: 324940 - DNA, 883 bp, Homo Sapiens
  misc_feature (125)..(206): n is a, c, g, or t
  misc_feature (214)..(276): n is a, c, g, or t
  misc_feature (862)..(862): n is a, c, g, or t
  misc_feature (873)..(873): n is a, c, g, or t
ccaggtgattttgttggtgaggagtggtcgcgcgccgagtaacagggaatagttggagagggctccctccccacgagggaaagggcgggaaagaagtttgatggaggagcgggggacgcgcaggnnnnnnnnnnnnnnnnnnnnnnnnnnnnnnnnnnnnnnnnnnnnnnnnnnnnnnnnnnnnnnnnnnnnnnnnnnnnnnnnnnccgcggcnnnnnnnnnnnnnnnnnnnnnnnnnnnnnnnnnnnnnnnnnnnnnnnnnnnnnnnnnnnnnnngcatcgtagtactcaaacaactttatttcactagccatgagcaaaaagttgaccgggctccaggggattttccatcctgccctctccctgctggtggctcccatgatttggaaataacctcatgttccacttggcagtgctggctttgtgcacccacatggttttggcctgggtcccagtgaaaatggtcctcacctggctggggaacatggttctgagaggccccttgatctgccctgggggacatgtgtggccatgctaagggccctgcccaccttcacgtgactggccacctctgccaggggtgcaggcagctcctagcatgggagacatccttcatgggaagtgagctttcccacccacctccatacccacatttcttcaggaaacagagttaacaggggaaccaagagtcaagaagccacagggctgggtaacgtgcctacagccaaatttgttgaccatttaccttgaagaggcagggacaacaaaagtaattcagggaaggagaagattttggggttggaatgagataggggcaagagaagacagattaaaggcagggaaattcaggaacaccagaggngcacagtagcntttaagggga

SEQ ID NO: 324941 - DNA, 555 bp, Homo Sapiens
  misc_feature (36)..(36): n is a, c, g, or t
  misc_feature (46)..(46): n is a, c, g, or t
gtgggcttttccccaccccacctcccattccccacnttttcttcanaaacagagtttaacagggaacccaagagtcaaagaagcccacagggctggtaacgtgcctacagcccaaatctgtgacccattacctgaagaggcaggacaacaaaagtaatcaggaaaggagaagatgtgggctggaatgagataggacaagagaagacagaataaaggcaggaaaatcagaaacaccagagagcacagtagcattaaagggacacacccaacaccctgggctcttgcacacaggggagtcctaagggttccctgactccctgcacctacacctgaggagagaatcccgagttatacgaggacagcatggcaaaagggccgacagggtagtaggtgtagaggcgaggcaggaggctacgtgaagggctgccaacagaaactggaaaggtaggaggccacatcgtcttttcccaaatctccatctacgagttgcctcaactgtccccgtgatactatataggtgcttgcccaaccacctttagagaagcctcagcaagc

SEQ ID NO: 324942 - DNA, 1039 bp, Homo Sapiens
ctcattctgtagtgtttatttttccatttttaaaaaagaaagagggggaaacaaagaaggaaaatacaaagaaagaaggtagacaacgctcttgcatagcccgaagcccagagagaaagagttggctggcttgtgagaagacatgaggagttgggaaaaggaatgccagagttccctgaaccaatacaaatctctatgcaactcaaggctgccttatagagccagctccaggactctgccaccagctttcagctctgctgaaacctaatccattcccaggcctggatacaagttggtagcctgttggtttgcagagacatcttttaataatcttgggtttggcccatccagaagggcctcttttctgctcagggttttctgcagtgtctttttggtgacttgttagcagccagtggctggaatgttatcatgggctcatgtccttcaccagaagggcaatctgctcccgcagctgccgctccccttcctgcactttgctctggcttcgacacctcagcaactcagtcttgtggtcctgatgatgcatagggcagtagctctgtggttcacacagttccatatattctggaaagaagtctctgtagccgcctttaaggatatatagctctgggtagtacaatgcaggatactggttcagagacctgtcctcttcacgcagacagcggcacattcgggggcccctctctgaggagaattcacagtggaacacgatgattattctcttctgggtgtccaaagggacgatgggcttcttcagaaagaagttaaacagttcttcctgactatataagtttaaggctccctggatgtgtcctcccagatactcatatggatagcgacaatcaatgacataacttctcaatcagaccctggaacttccccgacagtaaggcagccactgtttctgggttgacatacttcagatcttggtgtttccctgacacggttggcagcgcacataccttggaaaaatcaccaatcaggtgcccctggttagaatcttcctccagcatctgag

SEQ ID NO: 324943 - DNA, 933 bp, Homo Sapiens
  misc_feature (64)..(64): n is a, c, g, or t
  misc_feature (923)..(923): n is a, c, g, or t
gaatatcgacgccgcggcgcgggcgcccgtgattttgtatgttcggcggcgctcggctgtggantctcccttgtggaaaggaagcgcgggtaaaagagcgcgcggggggggcgccacttgtggggacgtttttcagaacccgctcgcgggtttcccgcccggggggtttttttgttggtggggaattcccacgcccttgtctattgccccggatttttcttagggacgcacgctatggccccatgttcccgttccctaggggggcgcccgcgccccaaaaagaatgggtttaagaagctttttcggggggccgaggccggccgcacaagaagagggtagttcatatgtcccccgcggcggcggttgggtgggggttggcaaagcacaagtggggggggaggctttaaagagtccttttaatacagcatgaagaggctatatttctataggcgagccgtatacagattctccaggaataaggcacacaacggaatgccatcccaagggctgcacttcggagacgtcggagccttctccacgcaccttccgagctgggcccacgggttctgttttgtctttttagctggactcacacgtatggacagacacagacacggacggggtcaccgcatgggggcggaggaggtcggacggcaaggttggcaacagagaaggataagtccgctgccacagcccccaggggaccgcttggccatctcgctgaaggctggaacacccccatttcagggttagtcgttggactgagctacaatgtagtgaggttggattaaatattcgtttagagtagattcaagtctattagatgctggagggctggtgtaagggctccggttgacatttccaagttcaaggagcatggcctggaggaggcgtggctcagattggcaaagctcccgagcggngaagccaagg

SEQ ID NO: 324944 - DNA, 1065 bp, Homo Sapiens
  misc_feature (1038)..(1038): n is a, c, g, or t
tttcctttctaatgggatttggccaattttggtaatgaagttaggatggtaatgtctgcatctgctaaaggtaattttcttttgagaattgctttctttagtgttaagacctactcatattttgaagaaatcttgagttaagtgagttctgaggctgctgggggaaccagatcaattcaaagctaaatacttctttcagaaaggggccactgtggaaagtgctggtggggtttgcccttgatcaagtgcctccattgtgctgcaagggctgtagacagcagggtgggacagtcagtcctccgagcagcaggaatcatcccgtcacctgcagccttcccatgcttccgcctttattcagaactttctgtgccactgtagatagctcaggcaaaactattacctgggtatttatccactaatgagtcacaagaaaaggagtggatttggtaagaatagagatttgttttatttaaaccacttcccattactgaccattaaaagctcaccactagagttcctgaaacaggtgaaacctgtgtgacagcccttccactttggggagccacgcttttgatgtgacagtaccgcagagtgattcccccactgaggatgtcatcatcaaactcttctttggtgtgtgaattattagtggaaaagacccagctgtaattacaccctccactgtgtacttagctggaagaacatgttaattctgcaatatgtttcttggttaaacattgcacagttcttacctcatttctgtaaataaagttttgggaatccgggtttgaattgggaccaattcataagacacaattgctattcttgccctgaaaccactttcccactggcgagcctccccctggacaagtcccccctccgactattttctgcgtggggcacgcgcggcaccgtttcccgctccgccacgccctgggcgccacccccctcgaagaaaatcccgccgggtcggctcgagaagtcccaagccgcgccgtatacacgccgccggcgccttcggtgttacgcgcagagcancgcccccccgcgcccccgcctattcac

SEQ ID NO: 324945 - DNA, 915 bp, Homo Sapiens
cggagcactcacagcgcgcgcgctgcgccgccgggcacaccgggcggtgcgtgtgagggcgcaggagggaggagcgcgcggtccgcccgctcgaactagaggggggagcgcgcagagggatgggcggcgacggtgagaaggagcgcgggagacgagtacagggggcgggcgaggatgcaagaggggggcggggccaccgcggttctcgtggggcccggagatggccttcccgaggggcgttttcggtagttgccagggccaaggcgcccattgtccagaggccttccgggtaaatggaaaggatgggtccgcaatccgcccccttttccttggttgtggttcagagaaatttaaccacttcattcagcccagtgtagctgttcttgggtgagtcctccattaaactggacaaactggggctcagaaagtcctggagggctattcagttccgtatttggattgtgctccctcaatatcttcatacactgctcgtattttggagaagactgatcccacgccccaagacactcaagtcatatgcatcaagtaaaatgaaccggaatttagggaatggtacaaaatgataagcataataatcttctgaaggcatggtctcaggatgatgtacaatctgatcttctagaaacttagtgttaagtttagagtgtgttaaatactctctactgaagttatagaattcatggtttccccatgtatgatgaactggaactttaagcctcttgaacatgtccataacaagttctagggactttttggatgcattatactgtgcattatatccatcgatgatatctccaagctgaaggacacaacagggcatgctgctttcattattccagtcttcaatggcaccctgtaagtgaagaagactatgtctgtagtatcgccgcctcc

SEQ ID NO: 324946 - DNA, 980 bp, Homo Sapiens
cacgctgcctcccagcgcttctggtgtcccaaatcccggagactgcacccgtgggcaccgtgctgaatactctcacttgcgaagatccggattctgttggtgccaccctggactacaagctgtggttccgcatctcttccaaccctgccagcctctgcctttatgacagagtccttgaggtgaatgccacactggactgtgacactcctggagcctgcttccagcatgcagcctccatcctggtgctcgatggtggccagccccagatgaccactgaggtgccggtactggtgatggtgacacccatcaacgagttctccccagcctgtgcccctcgcacgttccgggttcaggaggatgcggcgccccacactctactgggctccgtggtgggcacggatatggattaccctcatgacaacattgagtactacacctctggtggtcctaccacctttgctgtggaccgtctcagcggggaagttcacctcctgggacctttggactatgagcagcagaggctgtacaggctcactgtccttgtgattgaccatggccaagaccagaaccccaaccatcacctctcaggctcctgtaccattaccatcgaggttgaggatgtgaatgaccatgcccccgagtgtgagcccccatttcaggaactcaccatctatgctcctctgggccgtagcgtggaggtgaccaagatgtcatgccagatccctcaggagccacagcgcctgatctactcctatagcatcgtgggagggaatagccagaaccgattcatcctgcaaggggccatggtggtgcacagtgaccttgtgttggggccgttctggccagagcagccccgtacctatgagctactgatctgtgtggccgatgcaggcccctccaccccccacctcagcaccacagcgaccattattgtgcatctattccccggagggccagcacagggccaccagcacccacag

SEQ ID NO: 324947 - DNA, 685 bp, Homo Sapiens
tgccgtccacggctgcatccagcttggagtgacaggtggtccccacagagcaccagagtgtgtggcagacattcttcctccccagaccacgtggtggtgtggggcgcccggggctgcactgctcagagtggtcctcagctgtccacacctctcccggcccagcgcctcctctggaaacactcatccatgtcctcgcagaaggcagagtaggccccatactggaggtggcactggtggctcacatcatagaggaccccaggcagcactgatgggaagtcaatgatgtccttggcaggcagggtcatccaggcacaggctccacccatggtcaaggaacctggtgatgtactggcagctgcagcaggaccaggtgaggggagcggcgtcgtacgggagttgtgctcaagactgttcttgaggccagtgtgcttgcaggggccatcacagtgaaggtcagcggcaggcccatgtcctccttgatgttgcagctccggtgcagctggcacatgcccaccacatggggcaagcccagggtctcacagggccagttcatggctgcgcacaggtccttcctgatgagcaggatggcagtgtcaaggtgcagggggtgggcgtctcccttcatgttgatgcttttaaaatggacttgcagaagctcttcagggtgttgtctgcatggtgcatg

SEQ ID NO: 324948 - DNA, 758 bp, Homo Sapiens
gtgtgcaggtaactgtgcaaaattctgcagtttctcttgcatttcctgtgcagtctggtcacatagaacatggacgtcatagcccaaaagcttgaagagggtgactagagtactgtggtccacatcccctccagagcgaaattccagttctttctctccagtgaagtgcacattgctcaacaccagtgctaggccacgaggccgagactgcaacctatatgccagctggaagtgtgtttgataaaattcaggagtgcaaggcttcacctgaaggcagacaggaccatctttattgtctagggagtgttccacagtatctgtcgacaggcggagcttcttgtaaaggggacaggactcacacaccggaaaagggagactcaagtcgtagtcacagctcaacggtgggagtacatgctgaagcccagaaagggtggtgagcaacatatcctccaggtggccttgcttggtctccctcagtgcttcacagaaggcatcaaaagcttggggacccctcttaggcagcaagttgaggagttccacattctggctgaaactgcccactttggcctggatgagctccctcatttccaaggtgatgatgtccttctccagaagatgttctaacaattcgctcaacaacagctgtttggctagcaccactcggttcttttttagagtttcctgatgatgaggatgcatgccacacactcccaatatcctgcgtcccctgtcagcggccatcagctccttgtgctgga

SEQ ID NO: 324949 - DNA, 693 bp, Homo Sapiens
cccttcacccacagccccgtggacggctacatcctggagctgtacgacggtgccgggggacagttccgggaagtgtacgtcggtaaggagactttgtgtaccatcgacggtcttcacttcaacagcacctacaacgcccgagtcaaagctttcaactcttctggtgtcgggccttacagtaaaactgtcgtcctgcagacatccgatgtggcctggttcacatttgaccccaactctgggcatcgggacatcattttatccaatgacaaccagacagccacctgcagcagctatgacgaccgggtggtgctgggcacagctgcgttctccaagggcgtgcactactgggagctgcacgtggaccggtacgacaaccacccagaccccgccttcggggtggccagggccagcgtggtcaaggacatgatgctgggcaaggatgacaaggcctgggccatgtatgtggacaacaaccgcagctggttcatgcactgcaactcccacaccaacaggacggaaggtggcgtgtgcaagggggccaccgtgggcgtgctgctggacctgaataagcacactctcaccttcttcatcaacgggcagcagcagggccccacagccttcagccacgtggacggggtcttcatgccagccctcagcctcaaccgcaacgtgcaggtcaccctgcacacagga

SEQ ID NO: 324950 - DNA, 524 bp, Homo Sapiens
aaaaaggtgtcagtttgtcttcttaaaaaagtggggagctcttcgatctaaatagtgtcttctggatcctccccttcctggcactgcaaggagatacagctgcataatatgaattctggaaaacagttttatgtacctgttcaacgatggttggcacgagatcaagaggatggggaaatctgtcgagaatttcctcttttaagtaaaggacaacctgtccttccagtgacaatatatgaagtgaatgtggcaacgggtgagctatggaatgctggaacagtagcaaacgtctacatttctatccatggggaaaagggagatacaggatccagacaactatttagatcgaagagctccttcaattttttaagaggacaaactgacacctttttcctggaggctgtgcaccttggagatttgtgtaagattgtgataggccatgatggacttggcccaggaaatggttggtttcttgatgatgttgttatcaaggatcccacaacaaattacgaatatgccttcag

SEQ ID NO: 324951 - DNA, 884 bp, Homo Sapiens
tctgtatttcgtggatgagggcatttgtgtagggcatcttgacccggtcatccaccctttggagccggtgttggtccaatcacttggttaatctcttcatggatcttagcttccacttcaggatgcttcattaacagcaagaatggggtgtttgtccacaagtcgcaccagcgagcatagagagaagttgagaaaggtggaggtgaagtagagaaagagttccatggcgggccatggcgtcgcccaagcagatgcgctttccagaggaaaaaggcacaaaggcttcattgttcttgaagcgggcctgctcatccagaaagtgttggggatagaaggcatctgggtagcggaagtatttggggtctttgaggacagagccaagcaggggaaatacgtctgtgcccttgggcagaaggtaacctcgaaactgagtgtcctggatgatgttgtgggggacacccatgggcacgatgtctaccagtctctgtatttcatggataacgacatctgtgtagggcatcttgacccggtcatccacccttgggagccggtgtggtccaatcacctggttaatctcttcgtgaatcttagcttggtgttctggaactcctccagtaggtagctggcctcctcctgaattcgctccttaatgctctgctttcccatcccgaagtcttgaaggatggacagggagaagcgtcggagaatcctccatcgttctccattggccagagctacacctgccaagatctcagtctcaggtttctgcctccctccccttgctgtgttcaactctgtgcttaggcagtgatgggcaaagattatgaaagctctagactctgctgtccaggaagccatcctcaaccttcaagactcaatcaaga

SEQ ID NO: 324952 - DNA, 308 bp, Homo Sapiens
tttgacccccaaaaccctcgggttttgaccccccaaaaccctcgggacttcattgactgctttctcatcaagatgcaccaggataaaaataatcctcgtacagaattcaacctcaagaacttggtcctctccactctgaacctcttctttgctggcacggagacggtgagctctacactgcgctatggattcttgctgttaatgaagcatcctgaagtggaagctaagatccatgaagagattaaccaagtgattggaccacaccggctcccaagggtggacgaaaccggctcccaagggtggatgaa

SEQ ID NO: 324953 - DNA, 686 bp, Homo Sapiens
cagcatcagccgcaagatctatgagaagcccaacagcattgaggagctggctgagctgcgagagtggatgaagggcatcccggagaggctggtttgcctggaggagcggattgtgaaggtcatggatgactaccaggtcatggatgaattcctctacaacctcagctcagatgacttcaatgacaaatggattgccagcaactggccttctaagatccttgggcagatagagctggtgcagcagcagcatgtggaggatgaggagaagttccgcaaaatccagatcatggatcagaacaacttccaagagaagctggaagggctgcagctggtagtagctggcttctccatccatgtggagatttcacgtgcacacgagatcgccaacgaggtgcggcgtgtcaagaagcagctgaaggactgccagcagctggccatgctctacaacaaccgcgagcgcatcttcagcttgcccatcaccaattatgacaagctctccaggatggtgaaggagttccaaccctacctggacctttggaccacagcgtctgactggctgcgctggtcggagagctggatgaatgaccccctctctgccatcgatgctgagcagctggagaagaacgtggttgaagccttcaagaccatgcacaagtgcgtgaagcagtttaaggacatgccagcct

SEQ ID NO: 324954 - DNA, 333 bp, Homo Sapiens
cttgcaggtcaaagagagcctgggactgaacggtgacttcagtgttctcaacactttactaaattttactgataacttcgacgaactttcgccgtgaaacactggaccagatcaaccaggagctcatccaggccaaaaagctgctccaggacatcagcgaggcccggtgcaaggggctgcaggctctgtccctgagaaaggagttcatctgctgggtccgggaggctcttggaggcatcaatgagctgaaggtgtttgtggacctggcctccatctcagcgggggagaatgacattgatgtggaccgggtggcctgcttccatgacgctgtga

SEQ ID NO: 324955 - DNA, 332 bp, Homo Sapiens
agggagccagcccactcagagctcttggatgctgcctcctcatcctcttcttcctcctgcccaccttgctccccagagcctagggagagaggctccggggcctgagccagcggcagctgccgtgggaagcagcatgagtggggaaggcaggagtgagaaggggcacctctactgccccacgtgtaaggtgacagtgaactcggcctcccagcttcaggctcacaacacaggagccaagcaccggtggatgatggaaggtcagcgaggggctccccggaggagccggggccgcccggtgtccaggggaggtgccggacacaaagccaagagag

SEQ ID NO: 324956 - DNA, 641 bp, Homo Sapiens
tctgacaggatttttgatatttcctggggatccatatcagccaaacagagtgtttagctgtggagtaaaacacataaagttttggacactgtgtggaaatgccctgactgcaaaaagagggatatttggcaaaacaggggatcttcagaccatcctttgcgttgcatgtgccaaagaagacatcacctactctggtgctttaaatggtgacatctatgtctggaaagggctcaatttagtccgcaccattcaaggagcacatagtgctggaatctttagcatgtatgcttgtgaagaaggctttgccactggtgggcgagatgggtgtatacgactgtgggacactgatttcaaaccaataaccaaaattgatctcagggagacagaacaaggatacaaaggcctctctatccggagcgtgtgctggaaagcagaccgccttctagcagggacccaggacagtgagatatttgaagtgattgtgcgagagcgagacaagccgatgttgatcctacagggccactgcgagggtgagctctgggttactgggcctgcaccccaagaagcctctggctgtgacaggcagcgatgaccgctctgtcaggctgtggagcctggctgatcatgccttgatcgcccgc

SEQ ID NO: 324957 - DNA, 1076 bp, Homo Sapiens
  misc_feature (1043)..(1043): n is a, c, g, or t
cgcccggagctgctgaaggaatgggtgctgaacatcgcgccggggcaactccatgcccaagcagcacacggtcatctgctccgagcacttccggttagagtgcttcagcgcctttggaaaccgcaagaacctaaagcacaatgccgtgcccacggtgttcgcctttcaggaccccacacagcaggtgagggagaacacagaccctgccagtgagagaggaaatgccagctcttgtcagaaagaaaaggtcctccctgaggcgggggccggagaggacagtcctgggagaaacatggacactgcacttgaagaccatcagtgaccccaaaatagcggtgtccatgtataacaggcaatgttgtttaatgtagaaaatggaaccccagcttcacgtgaagccttgtggttgagtgaggagtgaaggatggggaggaggcctctggggaaggggttccctccctcctgaagatgaacacacaatacacggaagagcgccagcctctgctttcaggaaaggtttattgtggtgagtgccttctgtacagtcgactgcaaatgaaacgcagaggatgggtgcccagaagcacctgcggcagaggcgcacgggaagcccggggcccaggctcatgcaacacgacgctcaccgcggctcgggcgtggggcgttcagagaaacctttttaaaaaatggagatgaatgttacagaattggacaacccgaactgcttttcaaaaccagaggaaggaggttcttagccgttactcagataccagtgctggggaggttggcctgacttcagcaacagctgtgggtgggctggaggccggcgcagcttggggccccccgcgccagctgtctcagccaccacctgtgcggcgcttgctccgaggggtcagcaagagcaactgatggctgccacttccaggccccgagagacaggcctcacgtaactttacttgcagccgaaggtccaggccgttgaagggggtcctagctccgctgcaattctgcatccccaagtgggcaccttgaaggaagggttntgaaggaagctcccggagcaaaaggccctggtg

SEQ ID NO: 324958 - DNA, 652 bp, Homo Sapiens
gaaggtgcctccaagccactgaggcgcgtatctatgggggtcacaaactagctcccacaggaggcaaacttgaggctgtggtggcggttgtattttttcatgagagccttaaactgctcattccgacgagtgtgaaggaacacgatatcactcgttctcaggcccgccaatatccattcttcaccggggtcgtgggtaatgctgaggatctcattctgtaagttgtgttggtgcagcctctggtagctcctcaggtcccattaatacaggatggtgtcttcacctcctgtccagaatatattgccggtgatgtccacatatcgggtctcgtatacaggaacttcgtgcttcctgatcaagatttggttctgcaaatcccaaatctcaacacatccgtggaaacaagccaaacagatatggtgcatcagaggagacagccagagaatagcacgtggggcccgtcagaggtcagctgtgccctgacctggggggtgggtgccaagtcccagagattctcggcctgggacgcaccccctgtgatcaggctccgctcatcagggaacagcttgcaggtaacaacacggtcctaggggatgctgcaagtccagctgggcccgaggtgccttctcccccgcatgcagcgcactctcat

SEQ ID NO: 324959 - DNA, 671 bp, Homo Sapiens
gtccctccttcatacctcaggccctgcaccagcaatacctcctgcagcagcagctcctggaagcccagcaccgcaggctggtctcttaccccaggcggagtcaggagcgtgtatctgtccaccccctccgcctccatcccagcttcgacttcggccaactgcagacacctcagcccaggtatttggctgagggcactgactgggatctcagtgtggatgctggcttgagtcctgctcagttccaggtgcggcccatccctcagcactatcagcattacctagccactcctcgaatgcaccactttcccagaaactcctcctccacacagatggtcgtccatgaaatccgaaactacccttaccctcagcttcacttccttgctctccagggactaaatcccagcagacacacctccgccgtacgggagagctatgaggagctgctgcagctcgaggacaggttgggtaatgtgactcggggagctgtacagaacaccattgagaggttcaccttcccccacaagtataagaagcgaagaccccaggatggcaagggcaagaaggatgagggggaggagtcagacacagatgagaaatgcacaatttgtctgtgtatgctggaagatggagaagatgtgagacgcctaccctgtatgcatctctttcaccaa

SEQ ID NO: 324960 - DNA, 1193 bp, Homo Sapiens
cggtgctggcgacgctgaaagtcaccggggagattttccccatgagggcgtacgccgtgatgctctgaaggtggaacaggactcctttctgtcagaagcagcagcaccacgtcctggttgtagctgattctcttcccgctcctcccgatcactgggacgtccgtaaagaaaacccgggccgggacgagcatggccaccgcagcggcgctggtgtagaactgcagctccggggccgagaacctgtatttgtccccgctgagcagcttttttgaaaaaacattttgcaaacagtccatgatgttggtggacagtgcggccgagaaccccaggacattgaagctgatctcagtggccgtgcacagcgccagcccgcccatgactgggatgagggagaggttgaccagcagccctgtgtactcccccagaatcatccgagacatgatcaccgtgaagatgggggcggagctcttcaccgtctcagcaaacgaaaccgccacatttttcaggctgaccaaacccaaaaccacagttgcaaacctcatcagacccacaaacagcatcgtcataaggaagttgggtgggtaggaaagccgggccttgtgctgatataaacagcaaggaacgagggttttcacacacccgataaccgtggtggacagcatctgcaccgcacctagcatgctgggctcgcctcccagcagggacaggatgtacttgttgaggaagagcgtgcagaagctgaagaagaaccacagcgtgaggtagagcagcgctcgcgagctccacacacccaagtctgactcgatgaccgtggtctccgtgatggtgacggtcagtacgttctcatctgtgccgccgtcgctcttggcaaaaacaatcttctcacttcggtgaccaaacagagagccccagctgagaggcgacctgcctttcggcttctcttcggagccaggaaccagctcttccagtgctggggttttcaccgaggacgacatgctgaagccacagccacgaacgattttacctccaggctgggcagcatgggtcaccgtgaccgcccgggggtggggccgcagcagggactccgggcgccaggaacgaggccaccagggcctctcccaggcaaagcgcagaagcagacgcgagagcctgatgcagtctccgccgcaggcatagcgctaggccccggcgcc

SEQ ID NO: 324961 - DNA, 627 bp, Homo Sapiens
gagggtggcacagcggtgtgccccggacgccagctcctggagctcaacgcagacctgatctccgctccatacttgggccttccccagccctgagcagaccacctctgcgtccagccgcaggtcgcagcctctgcggaagttgttgtccagtctgcagctgcggatggtgggctcggtacccctgcaggccaggtacttcctgacgacgcccacgtcccggcggggggcctggagcacagggccgcaccccagctcccggcagaacaccatggcctcctccacatgcaggacacagaggcggtccaccccattcacgtttctgatctcggggagtcccgcgcagggactgcggcccttcaccagccggagctcccggaaagtgccgttggagcacagcgcgaccaccacccatgcgtgggggcacgggctctggcaccatgagccaaggctgcactcccagagacaggctcggtacccctgcaggccaggaacttcctgacgactcccacgtcccggcggggggcctggagcacagggccgcaccccagctcccggaagaacaccatggcctcctccacatgcaggacacagaggcggtccaccccattcacgtttctgatctcgggg

SEQ ID NO: 324962 - DNA, 639 bp, Homo Sapiens
ctgatgcaggctgcctctcttcttttgttacctctccactctgtaactttagtttgtggagtgcttcggccactcgaaggtacttggtcttctcggtggtgaggcccttgtggggtgtgtagccagcatctctcagccctgcctgtcgctcaaaatgctgaatgctttcctgggtctgttttgtgatcagagaattcatgatgacatgggtagctttagccttcaccactgggaccttgtccacactgtcaatggctgatgacagggtcatggcaggggagggtagactggcctctccttcctccaccttggcgaggtgctgatacttgcgctctggaatcactggcttccaagggacgctgcccatgtccgatggaggaggagtcatgggcgcagggtcctcgagggtatcatcatagcttactgcccggcggtatatcccgatgggcagggacatcttgcctagaggcgcactagcctcaagagcaggcacttctggttgtcttgaagccattgaaagactgggatccaggtgctttttctatacagaattccgagctgagtccctgccaccacagtgaaatgatgtgatgactaagcggacagacagatgttaatgaggaacatggtccagctgct

SEQ ID NO: 324963 - DNA, 562 bp, Homo Sapiens
acaagagagtgcccagcccagaagacaagctctatgaggagacacttgccgattctcacaagagagtgcgcagcccagaagacaagctctatgaggagtgcatcccctggaaggacaatgcctgctgcaccctcacgacaagctgggaagcccatctgtatgtatccccactctacaacttcagcctgtttcactgtgtactggtgatgcctggctgtcggaagcacttcatccaggctatctgcttctatgagtgctccccaaacctggggccctggatccagccagtgggaagcctggggtgggaggtggccccgagtgggcagggagagcgagttgtgaatgtgccgctgtgccaggaggactgtgaggagtggtgggaagactgtcgcatgtcttacacatgcaaatccaactggcgtggtggctgggactggagtcaggggaagaaccgctgccccaaaggggcccagtgcctccctttctcccattatttccccaccccagctgacctgtgtgagaagacttggagcaattccttcaaagccagccctgagcgacg

SEQ ID NO: 324964 - DNA, 395 bp, Homo Sapiens
aaacagaacggtgggagctgatggctccgagtttggggcgaggtagaaactctccagtgccacttccgactttaagccttcctgttgccgtccactgtggcgggtttcttcctggggaacacgttttcgctcagtcgctcggcagcccgagcctgcggcagcggccaggcgcctgccccctgcgccgagctttcccctgcagaggcgctccactcccagaagcgccgcggctgcaccagagcgcctgagagcccccgcgcgtacccatccaggagcaaaactatgtcaggaatggaggtttggtaacccagaaaattcgaaggaacacattaaactggtggatgcagcagatgtaagcgctgtgcaaacatctcaagccagttcagatgttgctg

SEQ ID NO: 324965 - DNA, 327 bp, Homo Sapiens
ttttcctccatgggctttcccgccatctaatttgatatagacttcatctcccggctccaaatgaagaaccacactgttactggcatagtcgtaattctgatcagcatcatgggcaattgcactagcacgcacctggttgtttttgcagagatcagcccacatgctggtgccgtcccctccgcgcatcaggacgtggtaggtgaagaagtagatgcccgggatggagcaggtgaacttgccggtggtggggtcgtattggtttccgaggttggtgaccacgtcttcgaacttgagcacctcttagccttcatgctgccgcttgaggcc

SEQ ID NO: 324966 - DNA, 294 bp, Homo Sapiens
cgagtgcgtcccggtgcccagctccgagcacgtcgccgagatcgtgggtcgccagggctgcaagatcaaggccctgcgggccaagacaaccatctacatcaagaccccagtgcggggcgaggagccggtcttcatcgtgaccggccggaaggaggacgtggagatggccaagcgtgagatcctgtcggcggccgaacacttctccatcatccgcgccacgcgcagcaaggccgggggtctgcccggcgccgcccagggcccgcccaaccttcccggacagaccaccatccaggt

SEQ ID NO: 324967 - DNA, 322 bp, Homo Sapiens
gaaggctggcatcatccgctacgctatcggggtgggacacgctttccagggacccactgccaggcaggagctgaataccatcagctcagcgcctccgttggaccacgtgttcaaggtggacaactttgcagcccttggtagcatccagaagcagctgcaggagaagatctatgcagttgagggaacccagtccagggcaagcagctccttccagcacgagatgtcccaagaaggcttcagcacagccctcacaatggatggcctcttcctgggggctgtggggagctttagagcctcttcctgggggctgtggggagcttta

SEQ ID NO: 324968 - DNA, 718 bp, Homo Sapiens
cacgccaagaaccccgggaatttccatttgctgttggggggagtcctggatacaacaaagaaggcttcctggccatacagtatgctttggataaagccatcatgtggtaccatgctcacaatgcaatgaccaacatgtttgagaatctcaatgtacttgtgaagagattcccatatggaccctatatcgaggacaggttcttcctagtccttcagaatgagttttctgtgttcttcatactcagcttcatgtacattgagctcatcatcatcagttccattgtactggagaaagagaaaagactgaaggattacctgtgcgtgatgggactggaaagctggttacactgggttgcttggttcatcacgttcttcatttctgtcttcattgctgtttctttcatgaccattctcttctgcacagaggtcttattccccctacaagtggatgtgcatatgtcaatggatatgaaatttcacaagagatatttcacattaggaagagcctgggctggtgccccaacatgatgtcttatctgataagttaacagtagcagaacatctttctttctatggtcagctgaagggcctgtcacgtcagaagtgccctgaagtcaagcaggtgctgcacatcataggcctggaggacaagtggaactcacggagccgcttcctgagcgggggcatgagccgcaagctctccatcggcatcgccctca

SEQ ID NO: 324969 - DNA, 272 bp, Homo Sapiens
ctgctcggcagtcctggcttcaagcctcccacaggcagattccttttaatgctccaaatcccttccacggccactgcagctggatttttaatgtggcattcatctctcttaatatgacgttcttcttccagtacttccttaattctcttatgtggctcacaatataaaaatttgttccactgctggccgtgctctagggggccgcggccgggtttccccgcgcgccccgcaccccagccctgctggcggaggaggctgctcctcttcgcgac

SEQ ID NO: 324970 - DNA, 698 bp, Homo Sapiens
ctagggatccctccagatcatacacctgctgctccagcttgaccctagactcggacaggctgtggacctcgtcttcctcaacctgaaggtcatccagggcctgctgatgggcctctcgtagagctttcttctccttggtcagcttagagatgacttcatccagcccagccatctcctctgctaggttcttcaccttgttctgtgctgcatgcctctccttctccgcctcggccagtgtcagctccaggtcatcaatgtccgtctcgagctctgagcagtcgtcttccagcttgcgcttcctggcagctgagctccgcgttcctctcctcctcatcctccagcctctcttgccgctgcgtcaccacgtgtttgccgcagcttctccacctgcaggtacagagacttggctttcacctggcggatcttttctaccttccacagcagctcacactcgcgttcctccagggctttcttatgcctcgcagtcacggctttgatctccgactgcacaaccttcgccttcatctccacctgttccgccaccgtctgggcctgctcgatgctcagctggattgcctgtcgtccctgctgggcatctggcagcagctggatggtgagtgcccgtgagtcctgcagtgcctcctggaggtagatgaagctgtggcccccatgccggcccattgtgcactcacgacaga

SEQ ID NO: 324971 - DNA, 542 bp, Homo Sapiens
cgtcctgcaaccatgggtgggccaggcagtcctgcagggagggccggctccagggatgtacagagagaacctttcgcaagaagagggtggcgctctgggatgtattggggtacagctggaaggcatcaaagcggccccccacaatccgagcctccgtttcctgggggtctggctcatagaacggggagcgtccactgagcataatgtaagtgagcacacccgctccccagatgtccgtggcagagccgatgggttctcccttcaccatctccggagccatgaactccagcgtgcccgtgcggtggccaaggggcctaagggcctgggggttgtagggctgggcactgccaaagtccacaatcttgagggcattgtcaggggccagcagcaggttgtctggcttgatgtctaggtggagcacgtggtggccgtggaggtagtccaggccttgtagcagctgcaccatgtaagtggccacgtcatcctcagaataccggaacctgtcactgagcccacagaggagtcccggttgccacagctct

SEQ ID NO: 324972 - DNA, 708 bp, Homo Sapiens
aggcatgtagtcggctttgtcgtggacacattctggtcggtgtggccggatgttggcctgggaggcagcatacgcgacggggtcgttgctgacccaagccgtcaggtagatgtagaaagcgctgggattaatgatgccatctgcatccaccagacgctgtttagtcaactggctgatgtcgatgggcttatcgcggctgccggtttgcaccaggagtttgtaggcaaggactccatcgtctgatccattcttgtaattgtttggcatgattttcccggtttcccagtcactgtcaaatgcatcctgaagtccctgaagccagtctctgaagtagtgcagccacattttgggaagctgtttgttttcttccaacatgacatacttcacgttactgaaactcctgtgtaggtcgtaaagtaagtgctggatattcgggtagtctgctttctgggtgactatatacatgttgtagaaagaaaagtatttgaattgtgcagcaataaagtcatattctctggtttcccgaggtacaatgtccgtaaggtccagcccgtctctcactcgggtggtgccataaaggctgacccccagcaagcccagaaaaaggaagatcaccacaaccttggcttttggtttcaagaggaaaggagcatagtgctactgagcaaaagatgagagtgtccacttcgtacaggggggctcgaggca

SEQ ID NO: 324973 - DNA, 905 bp, Homo Sapiens
  misc_feature (838)..(838): n is a, c, g, or t
  misc_feature (873)..(873): n is a, c, g, or t
  misc_feature (876)..(876): n is a, c, g, or t
aacagtcacatacgccatcaagaaaacgtcgtcgcggatccacacaggtactggaggcgaagcgatgtcccaggcccggaagccggacaagcagaggcggacgtcaccctgagcaaactggatgacgtaatcctgggccgtgagattaaaccagacccccccaatgaggagtgagactgcggggagctttgggatttctgagcaccggatgatgtactccccagccagcaaggggattcccccaatggctgcatgcagggcccggatctcctcagtgggtcctacgatgacaggtgtgcctgtatccaggatggcagcacagccctgggcacagagagtcagccgtgagcccaccttcacacgctccatgtggatctgccagtaggcggggactgtgactggcacgaaggtgaggggtgggatgtagtgtgccgggtctgagccccccaggaccagctctcctccatcagccacttcagggtccctgttgaagtaaaaggagaagacaggcttatccaatagcccctgctccaccagtacatccagcgggggccgaactccttccacagacagaatgggaaaaccgaggcccaatatcccatcggggcgggaaacagtgaagaccaggctggattcccacagagcttccccgaaaatcacggatgcacccttgattccaccaatagtcagcttgtcctcactcaggattccatctacccgcccagttccatactgaatggcaaacttggtcccactgggcttgaaggagctggaggcattgggattgaagcggtggtggaaccagcagggcacactgaagaagtggcatctcctggangggacccagagattggaggagccagtgtcaaaggnaanagtgaagttttgtggaggcgttcccagcc

SEQ ID NO: 324974 - DNA, 656 bp, Homo Sapiens
ccagccccggcatgccgcaggcttcagcgttccactgctcatcgttattctagtgtttttggctctagcagcaagcttcctgctcatcttgccggggatccgtggccactcgcgctggttttggttggtgagagttcttctcagtctgttcataggcgcagaaattgtggctgtgcacttcagtgcagaatggttcgtgggtacagtgaacaccaacacatcctacaaagccttcagcgcagcgcgcgttacagcccgtgtcggtctgctcgtgggcctggagggcattaatattacactcacagggaccccagtgcatcagctgaacgagaccattgactacaacgagcagttcacctggcgtctgaaagagaattacgccgcggagtacgcgaacgcactggagaaggggctgccggacccagtgctctacctggcggagaagttcacaccgagtagcccttgcggcctgtaccaccagtaccacctggcgggacactacgcctcggccacgctatgggtggcgttctgcttctggctcctctccaacgtgctgctctccacgccggccccgctctacggaggcctggcactgctgaccaccggagccttcgcgctcttcggggtcttcgccttggcctccatctctagcgtgc

SEQ ID NO: 324975 - DNA, 453 bp, Homo Sapiens
tcggccggatgggtccttcatcctggaatcgatagcaggtcaatgaagctgcagagagctgcaatttcttctatttggtttgtacaatcagaataccagtgattttgagaaaacgggattttctgaagaagtactagatgatgtaattatattgattaaatcggatagcgtccatctgtactgtaatcctgtaaactttcgctatctcttaccttatgtggcacattggagaaatctgcatttccactgcatgaccgaaaatgagtatgaagatgaagaagccgcagaagaatttaaaattaccagctttgtggacatggttcgagactgtagtagaattggcattccttacagctcccaaggtcacttgcagatatttgatatgtttgtggtggagaaatggccaattgtacaggcctttgcacttgagggcattggaggggatggattaat

SEQ ID NO: 324976 - DNA, 748 bp, Homo Sapiens
taccacctgacagtgcctgagaacaaggccccggggaccctggtaggccagatctccgcggctgacctggactcccctgccagcccaatcagatactccatcctcccccactcagatccggagcgttgcttctctatccagcccgaggaaggcaccatccatacagcagcacccctggatcgcgaggctcgcgcctggcacaacctcactgtgctggctacagagctcgacagttctgcacaggcctcgcgcgtgcaagtggccatccagaccctggatgagaatgacaatgctccccagctggctgagccctacgatacttttgtgtgtgactctgcagctcctggccagctgattcaggtcatccgggccctggacagagatgaagttggcaacagtagccatgtctcctttcaaggtcctctgggccctgatgccaactttactgtccaggacaaccgagatggctccgccagcctgctgctgccctcccgccctgctccaccccgccatgccccctacttggttcccatagaactgtgggactgggggcagccggcgctgagcagcactgccacagtgactgttagtgtgtgccgctgccagcctgacggctctgtggcatcctgctggcctgaggctcacctctcagctgctgggctcagcaccggcgccctgcttgccatcatcacctgtgtgggtgccctgcttgccctggtggtgctcttcgtggccctgcggcggcaga

SEQ ID NO: 324977 - DNA, 531 bp, Homo Sapiens
aaactgggcttggatttgtttggagaaagagtactacattgtggatgaagattccacattcttagaagtgacccttacacgcagagtataccttggagaaacatcatttatcagcattggtaccaaagatgaaactgcaaaaaaagacaaagatttcaaatggaagaccaataaacagatccagttcaatcctggacagactacagccacatggagggtgagaattatacctgacaatgaatatgagacttcagagaccttccagatcattctgtctgaacctctcatggctgtactggagtttccagaaatggcaacggttgaaattgtagaccctggagatgaatcaacagtttatattccagaggcggaatacaaaatagaagaggacattggggaacttttgattccagtaagacgatctggagatgcaagccaggaactaatggtcatttgctccacacgtcaaggttctgccacaggcacgatttcttccacagtgttattctctgattacatctcacgtccaga

SEQ ID NO: 324978 - DNA, 604 bp, Homo Sapiens
tccttgccgactgcaaaccactcgcggcctgtgcaccctactctagcagcgggcagccggcagcccctgagcctgggggccgccttgcttttaaggccgcggaggactttagagacaagctggacaaaagtggcagcaacgcctcatcggactctgagtataaagtgaaggaggagggcgaccgcgagatctccagctccagggacagtcccccggtgcgcctgaaaaagccacgcaaggcgcgcacggccttcaccgaccatcagctggcgcagctggagcgcagcttcgagcggcagaagtacctgagcgtgcaggaccgcatggagctcgccgcctcgctcaacctcaccgacacgcaggtcaagacctggtaccagagccgcaggactaaatggaagcgacagacggccgtcgggttggagctgctggcggaggcaggcaattactcagcgctccagcggatgttcccgtcgccttatttctacccgcagagtctggtttccaacctggaggccggcgcggcgctctacctgtaccgcggccccagcgcgccgccgcctgctctccagagacctctggtgccccgcatcctcatccacgg

SEQ ID NO: 324979 - DNA, 596 bp, Homo Sapiens
ccgtcctgtacaaggtgttcgtggtgggagtcctacccgtggtccagaggcctcatctctgctacacccagctccccacaagacaacgtccttgattctcgacacacctcaggccgccgatctcgatgagttcctcatgaagtactcactgagccctggtataggctacatgatccaggacgctgaggaccataaagtggccagcatggattccattgggaacctgatggtgtccccacctgtcaaggttcaagggaaagagtacccgctgggcagagtcctcattggcagcagcttttaccccagcgcagaggggcgggccatgagtaagaccctccgagacttcctcttatgcccagcaggtccaagcgccggtggagctctactcaaattgactaatgactggccacgtggatgagttcatgtgcttcatccccacagatgacaagaatgaggacaaaaagggcttcctgctgctcctggccagccccagtgcctgctataaactgttccgagagaaacagaaggaaggctatggcgacgctcaaccattcatttgcaaaaccagagtggctcatggcaccaactctcacgag

SEQ ID NO: 324980 - DNA, 618 bp, Homo Sapiens
tgctggggggcgactcaggccgcttcttgtgcttctgcttaaggcgttctttgtcctttcgactcttcttctggcccctctcgtggtgggtggggtgcttctcctgctgcgtggatggtgaggctgaccggcttctcctcccagagatgaaaccactgccacctccccccatgctgccacctcctcctccagcgcctcctccgcctcccccgctgctgtgccgggatgtcttcatcttgctgaagtggtatttgcagtagccgcagtacttgacgttgtccacctccagcacttcttcctcacacagcaagcctgccatttgggcacaggtgacgtggaaagcttgtcgacatccatggcggttacaggtcatgcaggctcccgaggccgccttgctctcccggccctgctcctcgcagatgtaacaggtcttgttgaagcgatcatgaggcacgtactgcagcacgatgggctccatggtgagcacgttggcaaattgcacctcggggatgtagagggcacacaccacgtgtgcccagcctccattatcagtcctcttcaatgccccgtctttgtgtgggcacagctcacacctcaccctggctgctcgctcctgag

SEQ ID NO: 324981 - DNA, 592 bp, Homo Sapiens
gggaccctggccctggtcctggtcctggtcctggtcctggccctggccctgtccatgccacggggtctccttgaacacaaaccaacagttcccggcccacaggaagaagttgataaagccaaagagcacggagatgttggccaggcccatagagggcgtggccccggcactgcacactgcttcctctccatggcacactgacatggctgctgtcaagctggatggtcgtgtggcccccttgacatcggtcaggcccttgccccaggcagctgcagctaccagccagaagaaggtgaaggagacagtcacacagaagtccaccagcgggaagcgtttgttctctgtgtagaggttgtggaagcgcaggtagataactagggcagccatggtatagaagaaggaaaagatgccaagggtcacgaagaactcggcgggtgcagagaagtcccccatgaggtgcatggtcttggagctggactcttcatcgcagaggggcatctcatattggatccggtgcaacctgaagggatagccaaatgcaacgatgatggagctcacgtccttggcttcgttgttgcagcgaaccattgct

SEQ ID NO: 324982 - DNA, 392 bp, Homo Sapiens
  misc_feature (269)..(327): n is a, c, g, or t
ccctgctgcacttccgttccctcactgaactccagaaggacaacttcctcctgggcccggcactccgcagcctctccatctgctggcactcccgcttcgtgcaggtgtgcagcattgaggactggctcaagagtgccttccagagaagcatctgcagccggcacgagagcctggtcaatgatttcctcctccgggtgtgcgacaggtgccccaacctggcgtccgtcacgctctcgggctgcggccacgttaccgacgactgcctggcnnnnnnnnnnnnnnnnnnnnnnnnnnnnnnnnnnnnnnnnnnnnnnnnnnnnnnnnnnntcaccaaccgcacgttggctgccgtggcggcggacgggcgcgcgctgcagacattgcacgtggac

SEQ ID NO: 324983 - DNA, 1067 bp, Homo Sapiens
acaacctctttatcctccaagggaatggtagtgtgggaagttggtcccaagtcgttgaggaattaacaaccggaacttgttgtgtgcttcagagacaaccttggccccactggattggaatggctgtttatcaatcaatgcgcagtaatccttgatgtcccagatcttgatgtatcctttacaatcccccgtgatgaggatccagtcatttttatcagtggccatggcacccacgacaacatccccattgtctaggtccacagggaacttccccagcaggcctccattctcatggagggaccaggcgtagatgtagccgtccatgcagctgctcagcagggcagccgtgtgcggcaggcgaggcctggtctgcaggaagattatcttctccaccgaggcactggattgaaccaacatattcttctgccattctccttttctcgtttcatcctctttgtaaatggactgtttgctgtggatcttgcttgactgcctggatgtgccagaagcactggaaggtttctgctggggcacaggcctgtctggctccttgtctctcgggcaccgcatcactgggggagccgacaccaggctccgcctcaggttggtattggccacagactcggggctgagactggagagcttcctggaggtcttgtatgtccacttctcccgctccacatagggtctgctgggcctgtggctctcagccaggcagttgttcacatcttgcaccctcttgggctgcaagggcaaggggctcctagaggcattgaagttgaagatgggcttgagtgtgccggtgttccagaagaggatgtccccactgtaggaggaggtcccaaggaactggttccggtacttggccatgctcaggatgtcctccgtgtggtaggtctgccagtggtagcacaagagcactggcttggtcttgtggaacaggaaatgagtgattctcttactccatcctgtcacatagaacacattgttcatatggataatcccactaatctccagctgttccgaacgtgggaaaggtcaacaggcatttgccaatgttgtagttc

SEQ ID NO: 324984 - DNA, 385 bp, Homo Sapiens
gtgcccaaaccaactccagcttgttcaaaataaaaagctgactccattacatttggaagagcgttttctgctatttcatcttccaattcttggtcaactcctttcaaatgtccctggagaaaaagagccttttgcttttctgctatttcatatgttggaagcaactcattctcattttgtagtgcatcaaattttttactaaaatgtgccatcttcacatcttggctaatattttcaaagatgtcaacagcattttcaggacgctcatttaatatcttggtcaagcatattagaaagatgatcatatagattaaagcccgaattgctgctagtcttcagcaggtaagccttagcattctgaatggtgatctcaagcatgctggga

SEQ ID NO: 324985 - DNA, 382 bp, Homo Sapiens
caaagcacggttgctgccaggcgctgacaggaagaggagccgcctcagcaggacaaggcaggacccgtgggaagaaagaagctggagcaaccagagatggagcagagctacccctggccctcgagggacccgggctgggggcctggctcttggcaggagcgaggccagtcctgagaatgccgcgcgggagcggagccgggtcaggacgctgcgccaggccttcttggccttgcaggctgctctgcctgccgtgccgcccgacaccaagctctccaagttggacgtgctggtgctcgccgccagctacatagcccacctcacccgcacactcggccacgagttgcctggccctgcctggccgcccttcctgcgtggactccgc

SEQ ID NO: 324986 - DNA, 665 bp, Homo Sapiens
  misc_feature (52)..(60): n is a, c, g, or t
actcaaaaaataccaatgtttattttttaataaagcaataattcaaaacaannnnnnnnnctactcattcaaaaggtcataactcaggagtgctgtttataccagatgaatctacaaagccaagaacagtaatcaccgtatctccttcagtagacctgatactgtgagtcttctcttttctgttgacatatttgtgcaacatgctgtagtactggcccttcggattgaaagtatacagtgatgaaatttgctgccactctttcatgcttggagtgttatattcttttggatgcgagccctcaaagaaacatttaatattctcttttgccaattcagttgcatgctctgtggctttacttttaaggatctgctgctcctgttccaaatagattttccagaatttcagctgcagaaaactaactggagataggcatcgggtgacagatgtaaaaatcagaagaatgatgataacaactgctatcaagatccagcccaacacctgcgactgagccttcagatccttcaggaggtcctgcacgtccgacgccttggcctggttgcacggcaccagcggcagctccgcggcgcagctgcggttgcggccgaggcacaggcgctgcgcgaaggccgcgctcccggtggccgcgcactcgtaaaaggcgccc

SEQ ID NO: 324987 - DNA, 677 bp, Homo Sapiens
  misc_feature (186)..(186): n is a, c, g, or t
gtatccacaatatgacaaaccatccattagaaaagatataaaacagaagagatttaaaaaagaatacgagtataagtgaacattactggtatatcaattgatgaaaatcaaacaggtagagatagaggaagatgatcataaactcaaatatgataaatttgaataatcacacatctattcctaatntgtgctgcctgtgtccatgacagcaccgtgcacagccgggtctttcagatcttataccggaatgaagaggtacccataaatgatgctgtggtcttccgagttcctttactcttgggtggtgaaaggatggaagacgcactgagtgaagtagattttcaactcaaggtggatctgcactttacggacagtgaacagcagttgagggatgtggctggggcaccgatggtcagcagccgaacgcttggcctgcacttccacccccggaatggtctgcaccaccaggtcccggtcatgttcgactatttccacctgtctgtgatctcggtgaccgtccatgctgccctggtggctctgcagcagccattgatcagttttactcgtccaggaagaggctcctggcttggtaaaggtggcccagacaccggacaagaacagtctatcatttctctggaaaacttggtctttggagctgggtactgcaagccgacaac

SEQ ID NO: 324988 - DNA, 627 bp, Homo Sapiens
tgttgcctgaggtgttggcggtgccgtagtattgccaacgcgtctcgttcaccaactcgctcttctccatcattgacactttgttggggtgcacagccagccaggtgcccgcacgagggaaggagtggccgttgtccagtgactcagtgaaggggatgcggccgctctcatagagcagaggtgacacacagtgcacttgcccggaggagtccacatggccgagggtctggatgctgtccttaaacctgcagatcacactggcgtctgtggggctggacatcttgaagtgccgcaccacaaagtccttgccgcccatcatggatcctgagtagggcaatatctccaggcagaagtcccggaaatccaagcagcaggtgccaaggccagagcacgtcgggtggcaggaacatggcccgtccagggcgccacagcgcatggagcagctctcttgggcatctggaggagaggatgctgagggcctaaaagagagccagggcacggacgggccaagtctcgttgtgcatagattagcgctggggaaagtccccgtgggggcaggctgtgggcagggaggagggctcaccagccagccaggtgcccgcacgaggaaaggagtggccttttgtc

SEQ ID NO: 324989 - DNA, 458 bp, Homo Sapiens
gtctcctcatcctggaacgccgcttcgctcctgcagctgctgttggctgcgctgctggcggcgggggcgagggccagcggcgagtactgccactgctggctggacgcgcagggcgtctggcgcatcggcttccagtgtcccgagcgcttcgacggcggcgacgccaccatctgctgcggcagctgcgcgttgcgctactgctgctccagcgccgaggcgcgcctggaccagggcggctgcgacaatgaccgccagcagggcgctggcgagcctggccgggcggacaaagacggccccgacggctcggcagtgcccatctacgtgccgttcctcattgttggctccgtgtttgtcgcctttatcatcttggggtccctggtggcagcctgttgctgcagatgtctccggcctaagcaggatccccagcagagccgagccccagggggtaaccgcttgat

SEQ ID NO: 324990 - DNA, 502 bp, Homo Sapiens
tgtccatgtgtgagcagcaaattccatttgtgtcaatgaactttttcgaggcgtatccgactgccggaacgtgtgggttgtgctgggccttgacaatcgttccagggtggctgttctttctcgaagacgcgatcgttctgtaccgtcaggcatggcactcaacacacggttttgtagatgccttcctctgtaagaaacaaggcggcatccaggaactgctgtattctgccccctggtctccgtgactagcggggggaacctgctccgtgacgtttgaaccagtggggaagccatgtggtccacgccagtcggcagttttgttccccgaagaacttcgtcactatagatgttgggagtttttagtctctgtgaatctgaagcaagagaaggcagcctccagggcactggtgttttctttgcagaaggtgataatccatgagtgtctgaggcccgtcccagtctgtgcggtgcggaggagagagcacctgcccctccacccgat

SEQ ID NO: 324991 - DNA, 833 bp, Homo Sapiens
tctacttcattagttaaacgatacttgactttttgaagcttgactttttgttggtgatgtttctcattatagtttctcacatggacattaagcagcttcaataatcgcaaatattcttcacgtagagcttccttctcttgctgtagcttagatagcttctctgacaattcctggttgcttttgacatgctcatcatattttcttttttcattttccagttgtttaagtagggcctcttgttgctgaattctggattgttgctgagaacaggtcatttccagtagattttctttatcttgtaaggttctcacttgcctgtgtaactcatctacgttctgatatagaagtttcctcttctgttgttcttcttgatattgttgctttactttagcttcattttgtgttgcttcttttatcttttcctctagctgctgcttctctgaaatacaagtgtctgtgagacagactttatgagcatgttctaatttccgctgcaggtccaaaatcttttcctctgcatcagcaactttagatttctcctgaaccagcttttcctgtaggttgttctgtgatttaatgctctgagtgtgtttaagtacttccaactccagttccttgattttctgctgacagtgcttgtactctgccgtgagtgaagagcacatctttgtgctgtctaataacttctgttgggcatgctttagttcaatctttatcttaatgttttcttcctgaagtaagctattatgttgctttaagtccaagttctgccctcgttcatatcgaagctcattttcagctgagttgcatagaatctggagccggtgcaaatt

SEQ ID NO: 324992 - DNA, 511 bp, Homo Sapiens
cacgcaactgctgctttggaagaacaacttaaggtattgggagatcgatgggcaaacatctgtagatggacagaagaccgctgggttcttttacaagacatccttctcaaatggcaacgtcttactgaagaacagtgcctttttagtgcatggctttcagaaaaagaagatgcagtgaacaagattcacacaactggctttaaagatcaaaatgaaatgttatcaagtcttcaaaaactggccgttttaaaagcggatctagaaaagaaaaagcaatccatgggcaaactgtattcactcaaacaagatcttctttcaacactgaagaataagtcagtgacccagaagacggaagcatggctggataactttgcccggtgttgggataatttagtccaaaaacttgaaaagagtacagcacagatttcacaggctgtcaccaccactcagccatcactaacacagacaactgtaatggaaacagtaactacggtgaccacaagggaacaga

SEQ ID NO: 324993 - DNA, 372 bp, Homo Sapiens
ttttctctcctgccctgttggcttcttggctgccttcctgcttgtcgatgacgcccactgcactggcatcccggatgtacagatgcccgttgttaaagacgccgaacatgcctgcatcaatgtgggtgaagtagaagaaatagttcaaatcgttgctcctcaaagactccaggacacccaggagctggtaggcaaggtcggctgcctgatctgggggtgcatcatagaattcctgcagcggtctggtgctggtgctgacgaggaatctgccacaggagcccaggtacttgggcagcgtgcatccctcagccccagggaagatctgtaggaggatggggtgcgagttgacagccagcgtgtagagcaggcgca

SEQ ID NO: 324994 - DNA, 444 bp, Homo Sapiens
ggctaggaagagggcccggcgggaggtggtgctggccaggcggaagtcccctttggagatggccttgctggtcccctgggagaagtagaaggcagcaatgcccagtggccagaagcagcagagcatggagaagagagtaagtcccaggtggtccctgggaggcagcgtgaggaagttgtcttcactttcactctccgttgaagtggcatcgctctcctcttcctcctggtcatcctcctggtcccgcagctcctcttgtaccccataggacacagtctggatggtgacattctctgcagcttggccaggtcctgtgggctgctctggaggcccctcctggggctccctgtcctctgtgaagctggtctcacagctgcctgccctgggctccttgaccttgtctctccccaggaggcagctgggccggtaccaggcctccacggc

SEQ ID NO: 324995 - DNA, 949 bp, Homo Sapiens
  misc_feature (124)..(141): n is a, c, g, or t
  misc_feature (182)..(182): n is a, c, g, or t
ccaaaatgccaagaatccaacagtattcatttaggagtcatgttaccaaccataatacttcaaaaacctctatttcaacaagcatccaagcactttccttgtcaaagctacaggatataatgcnnnnnnnnnnnnnnnnnnttctgtatttatcctttaaacgattccttattgcccattantttttcctggtgattgtcccaatgctgttggtaaaagctatgaagtttgtgaagatggaatacagcactgtaacaaaattattggaacctactttgagaaatgttttaaggttgctgctctatccaatgactacaaaatgatctgctttgatgaatactgccaaactagagacaaaacatctacatgtgacacttattcagaactgtcccgcctctgtgcctcagatggtcctggcacctttgaatcctggcgaagcgactccgatgtggtttgtgaaacacaaagatgtccagaacaacatatctacaaagaatgtggaccctccaaccctgcaacttgttctaatgtggctccttttcaagacagtgaatgtgtgagcggctgcacctgcccagaaggttatctgttggatgacattggagagaaaggaaaatgtgtattataagctgaatttcggtgtgaatccagtggaacagtgtatcagccaggagaagtccgagaaggtccttgtggttctcagtgcacatgccaagatgcaaagtggtcttgcaccgaaaaaatgatctgcattgatgaatactgccaaactagagacaaaacatctacatgtgacacttattcagaactgtcccgcctctgtgcctcagatggtcctggcacctttgaatcctggcgaagcgactccgatgtggtttgtgaaacacaaagatgtccagaacaacatatctacaaagaatgtggaccctccaaccctgcacttgttcta

SEQ ID NO: 324996 - DNA, 464 bp, Homo Sapiens
agaaagtgtactgccaggaggacttcctgtactccgggttccagcagacggccgacaaatgcagcgtgtgtggacatctcatcatggaaatgatcctgcaggccctgggcaagtcctaccacccaggctgcttccggtgctccgtgtgcaatgagtgcctggacggggttcccttcaccgtggacgtggagaacaacatctactgcgtgcgagactatcacacggtttttgcaccaaaatgcgcctcctgtgcccgtcctatcctccctgcacagggctgcgagacaaccatccgtgtggtgtccatggacagagactaccacgtggcatgttaccactgtgaggactgcgggctgcagctgagcggggaggagggacgccgttgctatcccctggcgggccacctactgtgtcgtcgttgccacctgcggcgcctccaacctgggcctcttccctcacccact

SEQ ID NO: 324997 - DNA, 329 bp, Homo Sapiens
tgaaatctcccatgagagactccctcgagcccacttatcagcagcttcagaaaatgaaactggacaagagtccctttgtggtcgtgtctgtggttgggcaggaactcctgacagctggccatcatggggcctctgtggttgtcttagaagccgcactgaagattggcacctgcagcctcaaactgagaggttctgttttctctgccctgagcagtgcttactggtctcttggaaatacagagaagagcaccggatatatgcagcaggacttggatgtagccaagaccttaggtgaccagacaggagaatgccgagctcatgggaatctg

SEQ ID NO: 324998 - DNA, 349 bp, Homo Sapiens
ggcagagtgtgcagatggaaggctacctgggccgcaagcatgacctggaggggcccaacaagaaggcttccaacaggtcctggaacaacctgtactgtgtgctcaggaacagtgagctaaccttctacaaggatgccaagaacctggccctggggatgccctaccatggggaggaacccctggccctgagacatgccatctgtgagattgctgccaactacaagaagaagaagcacgtctttaagctgaggctgagtaatggcagcgagtggctcttccatggcaaggatgaggaggagatgctgtcctggctgcagggcgtgagcaccgccatcaacgagtcccagaa

SEQ ID NO: 324999 - DNA, 941 bp, Homo Sapiens
tccaaagcgggcggagtggtccctgccttcctggtggagctggtctcgttggtcttcctgatcggtgggctggtcatcctgggctatgctgctgctgtcagtggccaggccacctaccagggtgtggtcagggggctgtgtggccctgccattgggaagctgtgtgaggcctgcttcctcctcaacctgctcatgatctccgtggccttcctcagggtgatcggggaccagctggagaagctgtgtgactccctcctgtctggcaccccgcccgccccgcagccgtggtacgcagaccagcgcttcaccctgcccctgctctccgtgctggtcatcctgcccctgtctgccccgcgggagatcgccttccagaaatacacaagcatcctaggcactctggctgcctgttacctggccctggtcatcaccgtgcagtactacctctggccccagggcctcgtgcgtgagtcccatccttcactgagccctgcctcctggacctctgtgttcagtgtcttccccaccatctgcttcgggtttcagtgtcacgaagctgccgtctccatctactgcagcatgcgcaaacggagcctctcccactgggccctggtgtctgtgctgtccttgctggcctgctgcctcatgtattcactgacgggggtttatggcttcctgacttttgggacagaagtttctgctgacgtcttgatgtcctacccaggcaatgatatggtcatcattgtggcccgggtcctttttgctgtctccatcgtaactgtctaccccatcgtgctcttcctggggaggtcagtgatgcaggacttctggaggaggagctgcttggggggatgggggcccagcgccctggccgacccctcagggctgtgggtccggatgccgctgaccatcctgtgggtcaccgtgacgctcgccatggcgct

SEQ ID NO: 325000 - DNA, 1140 bp, Homo Sapiens
  misc_feature (1117)..(1117): n is a, c, g, or t
ctccagagcctgatgaatagcaacagcaatttccgggaggtcttggagaagctggagagcgaccccgtctgccagcgcctttccctcaagtcctttctgattctgcccttccaacgcatcacccgcctcaatactgctgctccagaacattctgaagagaacacagcctggctcctcggaggaggcagaggccacgaaggcacaccacgccctggagcagctgatccgggactgcaataacaatgtccagagtatgcgacggacagaggagctaatctacctgagccagaagattgagtttgagtgcaaaatattcccgctcatttctcagtcacgctggctggtgaaaagtggggagctgacagccttggagttcagtgcttccccagggctacgaaggaagctgaacacgcgtccagtccacctgcacctcttcaatgactgtctgctgctgtctcggccccgagagggtagccgattcctggtatttgaccatgctcccttctcctccattcggggggaaaagtgtgaaatgaagctacatggacctcacaaaaacctgttccgactctttctgcggcagaacactcagggcgcccaggccgagttcctcttccgcacggagactcaaagtgaaaagcttcggtggatctcagccttggccatgccaagagaggagttggaccttctggagtgttacaggatatgggggacaatataacatccatcacagagttcctcctactgggatttcccgttggcccaaggattcagatgctcctctttgggctcttctccctgttctatgtcttcaccctgctggggaatgggaccatcctggggctcatctcactggactccagactgcacgcccccatgtacttcttcctctcacacctgggcggtcgtcgacatcgcctatgcctgcaacacggtgccccggatgctggtgaacctcctgcatccagccaagcccatctcctttgcgggccgatgatgcagacctttctgttttccacttttgctgtcacagaatgtctcctccgggtggtgatgtcctatgatctgtacgtgggccatcttgccacccctttcgatatttgggccatcatggacnggggagagtctggcattcaaact

SEQ ID NO: 325001 - DNA, 424 bp, Homo Sapiens
tttccatcctcctgccttcagccgttccaactcagaagcctccgtagacagcgcctccatggaggatttctggcgggaaatagaaagtattaaagacagcagcatgggagggcaagaagagccaccgccagctgaggtcacacctgtggatgaaggagaacttgaagcagaatggctgcaagatgtgggtttatcaactctgatctcaggtgatgaagaggaagatggcaaagccttgctctccacattgactcgaacccaagcagctgccgtgcaaaagagataccatacctatacccaaaccatgaggaaaaaggataagcaatctatcagggatgtcagagacatttttggagtcagtgaatctcctcctcgtgatacctgtggcaaccacactaatcagctggatggcaccaaggaagag

SEQ ID NO: 325002 - DNA, 594 bp, Homo Sapiens
gccagagtccagccaattcgtgcccacagatccagaagctgtggtccatcggccgatgggtgcccctaggtccagccgaggatgacctttattctctccccatctatggacccctgcaggagctggtccgaaaggggctgttagagatctcccaacagctgaccctgcgcctggaacagctggtcctcatgtacgctttctttgggttcgtggacctggaggagatgaacccccttagcatctcctgtttcttttgcgggaggttctccatcagcctgtcccatgaggtctccatcttcagatactgtgccccaaccgcctacactgccagccgcttcccccgctacctctataagaagatgcgctggcacctggaagccaccccagaggcccctggtcggggacaagattcccttgtggattactactttctgtgctatcgagatacttgggaagacacaggccagagtccagccaattcgtgcccacagatccaggagctgtggtccatcggccgatgggtgcccctaggaccagccgaggatgacctttattcatggattttgtgcccgcagccgcttggggactaccagc

SEQ ID NO: 325003 - DNA, 430 bp, Homo Sapiens
cctccccgcctatccctggacactttgttcagccccatcacccaacagctgcgctacctactgaagaaggtagatgatttccagagctacttgctctacagcagagaccaagtacagaaggagcagctggccaaggccatgcccaccttcttacagatgtgtgagccctacttcctgtacctggaggcagccgcgagaagcataccccccatctatggcctcctgcaggagctggtccgaaaggggctgttagagatctcccaacagctgaccctgcgcctggaacagctggtcctcatgtacgcttcctttgggttcgtggacctggaggagatgaacccccttagcatctcctgtttcttttgcgggaggttctccatcagcctgtcccatgaggtctccatcttcagatactgtgccccaaccgact

SEQ ID NO: 325004 - DNA, 618 bp, Homo Sapiens
ttcggtgtgttcattcttacagtttattcaacagatctttactgggtcttctaggggcctggcacggtgctaggtcattctcgaaaatgacttaatttggtcattacttcctccttgaacagatgaatgacatgctcaacaatctctcggtttcgattctggcccagggcatacaggtatttctccagaagaggaacatttttcagattccagatgaagttctcccgatgaagactacttaactttgggtgatggaatctctgcagtgtcttatccaatttggcagctagttttccaatttcatacaatagctgggggctgacgggaagctcagcgatgggtcttcctgggaggtaagtcagcagcctcaccaagtagcttttgatttcagagccactatctacagacacgagagaagctgtgttgtctcctttagtgtgacacacagaggctgttggaaatccagcggctttcagaaacatgatgatgtgattctgcacttcaatcaggtctggatttttgctagccttggtgttgcttattttgaggacatattcagttgggccatctttggtttttgaaacgtagacatgaaagttttggtcatcatagctagga

SEQ ID NO: 325005 - DNA, 601 bp, Homo Sapiens
ggagtggtgcttctgagttgtaaactgttcctgaagatcctcagtgttttctgagaatacactatcactttcctctgagttggcttctactggttcaggttcaggttccctttccttagataattcagggtttttttccatatcctgtaaagttttttctacagctttctcagaatctgtagctgcagaattgtacagttccaaaaaccctaaaagttcttctacattataattatgaaaatcatctcttcctccatcaaaacaaacaaaatccgtctcatctgttggaacttgtagctcttctttggtatattcatgaactacctggattaaatcttttggaaaatatccaaaagtgcgtccaacacttccagcccaaacttcaggccatcctcttgccagtttatagtaaacatatacaggatcaccttttttaaaattcacaaaacgacaatccgggcctgtgaaatcttcaagagcctcaccgcggtacattaacatgctgcattcgtcgtccgggcagagtttgtgctccgagaaccgccggccagtgctggggtccagctggcccggcacccgccagggcagccggagcacgagc

SEQ ID NO: 325006 - DNA, 702 bp, Homo Sapiens
ctcctggcggaagtggacaaggtggccagactgtcagatggcagccactgccccatcatcttgtgcggggacctaaattctgtcccttattcacctctctacaacttcatcagggatggagagctccatgtaccatgggatgccagcctggaaggtatctggacaggaagacttctcccatcagctttaccagaggaagctgcaggccccactgtggcccagctccctgggcatcactgattgctgtcagtatgtcacctcctgtcaccccaagagatcagagagacgcaagtatggccgagacttcctgctacgtttccgcttctgcagcatcgcttgtcagcgaccagtaggactggtccttatggaaggagtgacagatactaagccagagcgacctgcgggttgggctgagtctgtccttgaggaagatgcatcggagcttgagcctgccttctccaggactgtaggtaccatccagcactgcctccacctgacgtcagtatatacccacttcctgccccagcgtggccgcccagaggtcactacaatgccattgggtcttggaatgacagtagattacatcttcttctcagctgagtcctgtgagaatgggaacagagctgatcacaggctgtatcgagatggaactctcaagctcctgggtcgtctctcccttctctctgaagagatactctgggc

SEQ ID NO: 325007 - DNA, 750 bp, Homo Sapiens
cttggctctgggtactaccaagttgccccttgacaagggtggtgatcaagcgcagaaaggcaatagtaaccccatactcgccctgaggctgttcactgttcatcaagaggtttccgtaccctccagcattcatcccttccgcactaatcatctgactcaggctggagacaggatgggccacaaatggtaaaaaacctgtgtgacgaagatcagtccagacctttgctggattgcgggcagccaaaacagttaagcagttgacacaagaagcaatgacatccacaggtggggagatcactgtcgttaaccgctgcagcagcatgtagatgcgagatgtgatgggcaggagacagtctgctatcgacaggtctgtactgatgaccttatggacgagatcaatgatgggtttgactcgctggcagtgctgaatcacatctgcagttgaaacaacatgaagcaacatttcaatctcgcaggtaaagagggtccagctgctataggagtattcccagcgtaccaggtatgccctatcatccaacattacttggcccacagtgccttgaggtatgcgaaggttggtttgacccccaaggggataaaggagtttgggtgtttgtctccgccaaagagttccatcttcatgggagatcacatcatgaggcttgtgtttataaagttcattgtagaaagacatcttatccaagaagctatacacctttttggctgtggacttccctgataccagggctc

SEQ ID NO: 325008 - DNA, 1127 bp, Homo Sapiens
gttcttgcagaggaaggagaagtccacgtggcattatgtagaggacaaggtggaactcctgcggataagccccagagagaatggcacaacagttggcaagtggttgccatggcagccctgggggggctcattttaagcgacgtgtatccattcagctgtaaggctgtggcagggtacaagtgcactggatataggagtcaagataagtcctttcatgtagaaggtgctttgaaccatatcttcaccaggagcttaccttttgaaggttctcaacccagaatcttcaggatcaaactgggtaaccagtggttttcctttccagaaccagaagcacttgtaggaaagttgaacaggggtttcctggaagcaccttcatgtcatcctatcaaaaccataaatgagaaactcattgctgaattaggcaaagttttcccgctaaaaaggctgaagtgttccttccctttgctgccacaggaaggtaccagtgttcttcctttttggaattgtgactttctgtcagctgctttttggattagtctccatgaagataactcaaattctgagtccctgactggtgggacatcacaagatgtggaagactttctagtgtcattttcagaacttagccttctcaagaatcctggaagagatggtaaagaagaagcttgtgaaggaacctgtggccaggccaagatctgccttagaccttctctcctagtgcatgttcaggatgtcatcgaagtaccagacttcctctcaggttctctgcacatcctcagtggacctgtctttcagaagtgccacattttgcctttcacaatgccagcatttcatgaaactatatttatccttggggttaatcaaaatctgaaggatggctgtcttcaatcactgctggatcatctgaagggcattctagatagcctgctgacccagacattgccggagagctctaagctgagcagtttagtcaaatttgtccttcagtcaaatggaaaggattatatgattcgtgtgaagactcataattttagcccagattgtactgaggatctaattattgggtctgttatcacatctgccactagtgttatacataaagaccagtgttttgtgtttgtgtctaa

SEQ ID NO: 325009 - DNA, 706 bp, Homo Sapiens
  misc_feature (468)..(511): n is a, c, g, or t
cagaaaggaagaacactggtaccttcctgtggcagcaaagggtaggaacacttcagcttttttagcgggaaaactttgcctaactcagcaatgagtttctcatttatggttttgataggatgacatgaaggtggctccaggaaacccctgttcaactttcctacaagtgcttctggttctggaaaggaaaaccactggttacccagtttgatcctgaagattctgggttgagaaccttcaaaaggtaagctcctggtgaagatatggttcaaagcaccttctacatgaaaggacttatcttgactcctatatccagtgcacttgtaccctgccacagccttacagctgaatggatacacgtcgcttaaaatgagcccccccagggctgccatggcaaccacttgccaactgttgtgccattctctctggggcttatccgcaggagttccaccttgtcctcttcataannnnnnnnnnnnnnnnnnnnnnnnnnnnnnnnnnnnnnnnnnnntttggaaaaatttggcaagcagttccctgttcttagctacgccagctttgcgtccacaatgcgggaagttgaaataaatttgatcaaattctctctcgtgcagttcaaagacatctgccagctgggtgcagttcacaccgaaacaatggatggatacctcgctcgcgcaggcactgcagatctcccaggccagtg

SEQ ID NO: 325010 - DNA, 410 bp, Homo Sapiens
ccccacgagtacatgctgtcaatctacaggacttactccatcgctgagaagctgggcatcaatgccagctttttccagtcttccaagtcggctcctatgatcaccagctttgtagacaggggactagacgatctctcgcacactcctctccggagacagaagtatttgtttgatgtgtccatgctctcagacaaagaagagctggtgggcgcggagctgcggctctttcgccaggcgccctcagcgccctgggggccaccagccgggccgctccacgtgcagctcttcccttgcctttcgcccctcctgctgaggggcgcggaccctggacccgcagggggcgccgccggccggctgggaagtcttcgacgtgtggcagggcctgcgccaccagccctggaagcagctgt

SEQ ID NO: 325011 - DNA, 730 bp, Homo Sapiens
gtttgggctgtcaacttcgatatcaacttttgccgagaattcttctgctgagtccagaatatctgaagagctgatctgtttctttggactatggaaaagaacccaaatcatcagaaattctggatcctgtccatcataactagcaggcatcatgtggttgaccacagaagggcctgctagccgagtgaccacatcagcgcaaggagcaacttccacaggagctcggacgggttccttggaaaacgtgaaacagcgccaggctacagcgttagcattaataatcagtctaattggcacagtggcatgcgttcggtttatcaattttagtgggagggctttccagcctccataagtcaagtcaccaaaatcaagaacgtctttcttttctgtttctacctcaataacaggactctcggcaatggcagtgagagtgacggtgctggccaaagcttctgcctgtacgatggtctcagcatctgtcgaacatggccaagaagcaacactgaatgtgcatctgaaaaccccaggactggatggtataaaaagcacttttatctcttctgtggcatgaggtcttatgatggctttattcttgaaaactaaacaacgatatgttgaaagatccaccttttcaccattaacactaatgctgaggaccccaatgctgacttgcagccagcggtcagttggattaagcacactgaggagggtctgggaagcgatcccgaca

SEQ ID NO: 325012 - DNA, 607 bp, Homo Sapiens
aatgctgctttcagtggtgcgacataaacatctctcacaatttccagtatctgcacgtattttctctcactctgtaagagttctctgacaactctagctcgcttttctgctgagtccttctaaattaatgctgccttcagtggcgcgacataaacatctctcacaatttccagtatctgcacgtattttctctcactctgtaagagttctctgacaactctagctcgcttttctcgctgagtccttctggagtattctctccagattaatcagtgcttcaaaatttaaatcatttttgctgagcctggactttgtgtcccaagaattgtcttctacaacatttctttcagaatcttcttttgacaactccatcaatccatctgccagagcttgcgcagtatcttggttgtttagaatgttggtcatacccatggtgtcaaacataaactgccctatcatcctgccactgatgctcttctgcagtaataacaactccatcaatccatctgccagagcttgcgcagtatcttggttgtttagaatgttggtcatacccatggtgtcaaacataaactgccctatcatcctgccactgatgctcttctgc

SEQ ID NO: 325013 - DNA, 400 bp, Homo Sapiens
ttgatctttctgccacatttcttcagcagaaaatacgacaaaaattccagaggtttgtcagaatcttcttttgacaactccatcaatccatctgccagagcttgcgcagtatcttggttgtttagaatgttggtcatacccatggtgtcaaacataaactgccctatcatcctgccactgatgctcttctgcagttccttgaagaaaggatacagctgcttccttactgttttcaaggtttcttctaggaagtctgtgaagctggaccacgtctgtagcttcgattcgcagaagtagatggaagagggggcctttccccattgggatcccagccaatcactaagaatgtgctggtaagagccagttgcaatcccagtgggggccgtaaaaaacgtgccaa

SEQ ID NO: 325014 - DNA, 856 bp, Homo Sapiens
tgtgacttttccaactgagtgcctcgttccagccttcagagaatacggagctcacaatgctctggaacggacgtgtcctgtctggctggttgtcagaaactccgctatcagactgattggagtggtttgactgagactctgggatgctggaagaactggatcccgatttaatgctggagctggataaggaagtccaatcataggctgactctgtcctcttcaaggcttcttggtagttcatatagagctgcttcccatactttgcaatgcggatcccattgacccactgatgcagtgtcctcacatcatcacaacaaaggtatttgatatattgagatttcttctggatttgtggatgcttcagcaccagacaatagtctgtaggtgctttgtatttgttccgatagtcctggccataataaacgttgacatgatccagctggagaaagcacaccagatcccgagagacctttgcttttcctttgggaacatagtagataccagatgctcgcaagagaaaataacgctttttccaggacttcttgccatcatccttcaaccaaaggactccttcaatttctggtacagttacagaacttccacaaaaacattcctccaagaggacttctttgtttctatctgccatctcagctgtttcttttttccccaaaagataattctgtgggtttttgaaaagtgcatatttttctatacgctccataaatataagcttgttttggctatctcttgtccaattaagaagattttcaaccaagttttcatggtcttcaaagattctctccatttgtaattcagaaacggtttctaccagtgaccagtctaaactataaccgca

SEQ ID NO: 325015 - DNA, 707 bp, Homo Sapiens
ttcttcagttcttgtaccaggcactgtatttcctcaacaacagccactttaaggcctttaagagagagaatgcacttgttcatgtgccttttatttccatggaccaaaagaatctaggtgtcctagttccttttttttcttggcagcatttattctcatgtgctcaggtatcttgtagtctggggctgtcttcagattgaaatctcccatatacacctgggcttctttgatggcttgaagatctttgggatcttcatagtcatcaccaggtttactcttgtatagttcctcccattctttttttcgctgttgaatctttagttgtgccctttcagcttttaatataagttttctcgttttctcaatttgattttccacgatgatttcacttaggtttttaggccgaaatttcttccctttttctattattgattcttcttgtatggtaacactcccacctgcatctctctggctgtcctttcttccaggtccctctttttcaaacctgtccaatttgcttggttttctctctgattgactagctcgtttgaatttggagtacttagagggctgcaccagcctgtaagaggatatcttgtggtcactcagtatggcatgaaccacaatagtatcactttccagtggatctcgaaatcgattctttagcttggttaggccgagttcatgtttctctttttcccaagcta

SEQ ID NO: 325016 - DNA, 562 bp, Homo Sapiens
tgtggaggggggacctgtggagggggctgcctcgagtacggcccactatagacatcgaaatcctcaaaggtgagaagggtgaggccggcgtccgaggtcgggccggcaggagcgggaaagaggggccgccaggcgcccggggcctgcagggccgcagaggccagaaggggcaggtggggccgccgggcgccgcgtgccgacgtgcctacgccgccttctccgtgggccggcgcgagggcctgcacagctccgaccacttccaggcggtgcccttcgacacggagctggtgaacctggacggcgccttcgacctggccgcgggccgcttcctctgcacggtgcccggcgtctacttcctcagcctcaacgtgcacacctggaactacaaggagacctacctgcacatcatgctgaaccggcggcccgcggccgtgctctacgcgcagcccagcgagcgcagcgtcatgcaggccaagagcctgatgctgctgctggcggcgggcgacgccgtctgggtgcgcatgtcccagcgcgaccgggacaacgccatctacggcgagca

SEQ ID NO: 325017 - DNA, 764 bp, Homo Sapiens
tcagcacattttcccaaacatgacacagatcatcaaggatgtaaccaagtatattgagggagccgtcgatgctgatatgcaagttcacttccccatatcctgtcagaaagattcactcgctgacctcgtgttcctggtggatgagtcacttgggaccggaggaaatttaaggcatcttcagaccttccttgagaacattaccagctccatggatgtgaaggaaaattgcatgcgacttggactgatgagttacagcaatagtgccaagactatttcttttcttaaatcaagcacaacccaatctgaatttcagcagcaaatcaagaatctttctatccaagttgggaaatccaatacaggggctgccattgatcagatgagaagagacggcttctcagagtcatatggcagcagaagagcacaaggagtgcctcagattgcagttctggtcacccacagaccatcagatgatgaggtgcatgatgctgcgctgaaccttcgactggaggatgtaaacgtgtttgccttgagcatccaaggggctaacaatacccagttagaagaaatagtgtcttatcctccagaacagacaatttccacgctgaagtcctatgcagacttagaaacttacagtacaaagttcctgaaaaagctccagaatgaaatatggtcccaaatttctacttatgctgaacaaaggaatcttgataaaactggctgtgtggatacaaaagaggctgatatccacttcctcattgatggct

SEQ ID NO: 325018 - DNA, 733 bp, Homo Sapiens
ttttgaagatcatcactgccatcttcattgtggcctctcgaaaatatcttcgcgattcttcctgggattttgaggaactcattaattccagttgccttaactcatcaattttagccaaagcacgccgagcaaatgcctctccgtgaatcccggcatggcagtcatagcagcactggcaaacagctgtgtagagagtagcgcgccatgtcaagtacctgagtgacaggagcgggaccaaggactccatacacatgctggcccacaggagatactctaaggccttggaagactgacctatgaccatcagttttctgcaaatggtgtaaatataaatggtaccattgaagataatccagcaaagatgctcttgtggcagagccacttgcatgatgagccttaaggaggacaagatatgcagacactggaccacagattctttattcttcaggttttcatcactgtcgcagaccagctggtagttgcacatatttttgccactcaaagcatgaaatgtaagtccagcagttttatctttaaagccttttgggaaaaaggtagctttgaattgagttacatccactttattctcatcaaaattggtattgaactgctgaagatatcttccatagcattgtaaaagggccagtttgtattctttcatttgacaaaggctatctccaaccttcagaagcttttcgttgtaatagtctgctggcagcctgggggcgtattt

SEQ ID NO: 325019 - DNA, 373 bp, Homo Sapiens
gtatataatgctggagccgggagccaccaacctgcagttttcagaatggccgtgttggacactgatttggatcacattcttccatcttctgttcttcctccattctgggctaagttagtagtgggatcggttgccattgtgtgttttgcacgcagctatgatggagactttgtctttgatgactcagaagctattgttaacaataaggacctccaagcagaaacgcccctgggggacctgtggcatcctgacttctggggcagtagactgagcagcaacaccagccacaagtcctaccggcctctcaccgtcctgactttcaggattaactactacctctcgggaggcttccaccccgtgggctttcacgtgg

SEQ ID NO: 325020 - DNA, 724 bp, Homo Sapiens
cagcgatgttcagagacggcaaagagcctcagccaagtgcagaagctgctgctgccccttctcttgccaacatctcctgcttcacttagaagctggtggagaagctgtacagtgggatgttctcggcagaccccaggcatatcctcctcttcatcctggagcacatcatggtggtcattgagactgcctcttctcaaagggacactgtcctcagcactttatacagcagtttaaataaagtcattctttattgcctatccaagccccagcagtccctctccgaatgcctcggccttctcagcatcctgggctttctgcaggagcactgggatgttgtctttgccacctacaattccaacatcagcttcctcctgtgtctcatgcattgccttttgctactcaatgagagaagttacccagaaggatttggattggagcccaagcctagaatgtctacttatcatcaagtcttcctttccccaaatgaagacgtgaaagaaaaaagagaagacttaccaagtttgagtgatgtccaacacaacatccagaagacagtgcagactctctggcagcagctggtggcacagaggcagcagaccctggaggatgccttcaagatcgatctctctgtgaaacctggagagagggaagtgaagattgagagaggtcacaccgctctgggaggagacgatgctcaaggcctggcagcattacttagcatctg

SEQ ID NO: 325021 - DNA, 306 bp, Homo Sapiens
ttttctcagccagtgtgcaggcatcctcgaacaggacgtgccgcttttcccagaggtcacatttatttccaatcagcataatgaccacatttgcagctccatatttctctatctcatgaatccagtgagggatggactcgaacgtggaccgccgggtgaggtcataggcgatgatggctgcgtgggcactgcggtagtagctttgggtgatggtgcggaagcgctcctggccagctgtgtcccacacctgcatcttcacttttttgccgtcaatatcaagggaacgcacggtaaagtccactccaa

SEQ ID NO: 325022 - DNA, 620 bp, Homo Sapiens
gtagctcggaggtggactggtgcgaggacaactacaccatcgtgcctgctatcgccgagttctacaacacgatcagcaatgtcttatcttttcattttaccgcccatctgcatgtgcttgtttcgtcagtatgcaacatgcttcaacagtggcatctacttaatctggactcttttggttgtagtgggaattggatccgtctacttccatgcaacccttagtttcttgggtcagatgcttgatgaacttgcagtcctttgggttctgatgtgtgctttggccatttggttccccagaaggtatctaccaaagatctttcggaattaccggggtaggttcaaggtggtggtcagtgtcctgtgtgcggttacgacgtgcctggcatttgtcaagcctgccatcaacaacatctctctgatgaccctgggagttccttgcgctgcactgctcattgcagagctaaagaggtgtgacaacatgcgtgtgtttaagctgggcctcttctcgggcctctggtggaccctggccctgttctgctggatcagtgaccgagctttctgcgagctgctgtcatccttcaacttcccctacctgcactgcatgtggcacatcctcatctg

SEQ ID NO: 325023 - DNA, 466 bp, Homo Sapiens
tttttctggagcagttggagacatggttaactctgagatgctttcattttgtactgtgcaggcactgtgtatctccacggaataccaaggctgcctctgaacttggatgaagcctgcaatatgcatggccaggctgagaagaatgttgaaaatcacagagagtagcagaggtggagagatcagccgtcctgcaggtctgaaaggcaccagcttagggtaggcaccattcagattcattgttacaccaataagagttgtaatggccagatcctggaacagaaactggtaatttgaaaggctgtttgtctcccagtagagcagcagaacaccaacatactgaatcatgctgtacagagccatgtacttaaacatgcaaaaggaggtaacgagagctgcacgtccttccttgataaggtgaggtacgcactcaatgtttggagttttggaagtgaaaggtgaggccaca

SEQ ID NO: 325024 - DNA, 650 bp, Homo Sapiens
tgactgatgtctcccagcttcagtgctgcctgcttcttgtagcccttgactttttcctctaactttcccaggcgaatgttgctttttatgactttattaagcactccatccttctcactttctaaacattttgccaaacacataagactgtcacgttcctgggttatattttctgccaggccaacaaggtttgccaggtactgatgagcagacatttcgttccccatggctttttccacctgctttttgaggacctcaattttcttttgagatttcctattgattttctgtgctcgttcaagttcggcttccagtgctttgttttgctctgtcaaactgttcttctctaacagcaggctcttcttctgcgcttgcaggactgtcagcttctccatcaactcctccatctcagccctttctttctcttcttccttctgtaattggctttttaattcattcacaattgatttatgaacttccactgcgattttgccatccgagtgtgttttgagttcttggcatttggcacgtaaaatctccagctgttccctgttctccgccagctccttttcctggccgtgggtttttgcctccaggagcattagttgtttagtcagcttagaaacttcttggaggcgctcctggtggct

SEQ ID NO: 325025 - DNA, 463 bp, Homo Sapiens
cctagatccgtctgtttctgtaatagatggactgtgtggacgaaagttttcaatgatcccctggcacaagccaaagccaccagggcagcagcagcattttctttttgcttatgtgggatgtgtcggcctgtgtcagaagtctcctctagccaagagcacagcaaagtttcaattccattgagacagtcagcaggctccttggtcaagctcaaaggctggcagtcacgaaggcagttcaatagcacctcagcagttatgttacagagagaggggtctgttctactctgggactgaataagggggaagaccagcaggagccccatcctcgatgtgaagggcgcttgctcaggttgctgcaacaagccctggcgtttgagcagggccaaagtttcctcatcacctgaactttccctttcatgctgttcttctaaggccagctggcgctgggcattccacagtcctc

SEQ ID NO: 325026 - DNA, 536 bp, Homo Sapiens
ttactagcatagtttcataaaactgtatcacctttctaaccatacacatcttaggctgaagattttgtctattcatgacatccacaattgttgattgtaaaataccataatcatgttctggaatttggactccaggaaaaaggtcagatatgattccactgaacagaagagcatcatctgttagaaattttggcaaattggagtcttgtaaagctcttatcaacaccacatcttcatttaggtctgggttttctctttttaaagatccagccatgaccaggacagacttcacagctctcatgccaaagtcgtagtgatcctgctgagacagctgctcactgcaaagcttatacatctgagtcatttttcttgctaatattttactggattcaaatccttcagaatatagaattacctctgcaatcaaggcataatttggaaccatcatcgcaaatggtctaaacagggctttcaaattatctggcaattcagttctccctgcatagccaggattcattgtgatgaaggctgcacaa

SEQ ID NO: 325027 - DNA, 737 bp, Homo Sapiens
accaatatcaatgagtacaagatgcgcaaggaagtggcctccaagtacaccaaggtagagcagctgaccctccgggagcggctgtcccgcatcaacacacacaccctctccaagaagaccacccggctgagccagctgctgaagcaggaggcggggctgatccccaggacagaagacaaggaatttgatgatttagaagagaggttccagtgggtgtctctgtgtgtgactgagctgaagaacaacgtggctgcttacctggacaatctgcaggctttcctctacttcaggccgcacgaatacaatctggacatccccgaggggcctgcagtgcagtattgcaatttggcaagagaccttcaccttgaggccttcctgaaatttaagcaacggctagaaggcctggtgtggcagccactgtgcagcctggccaaagccctgcttggccctcagaacctgatcaagaagcgtctggacaagctactggactttgagcgggtggaagagaagctgctggaggtgggcagtgtgacctaccaggaggaggccgcccggcacacataccaggcactcaactcgctgctagtggctgagctcccacagtttaaccagctggtcatgcagtggctgggccagatcatgtgcacattcgtggccctccagcagggaccttgcaaagcaagtgctgcagagggcagagggaagcatggcccagctgccccaccaccacgtcccag

SEQ ID NO: 325028 - DNA, 558 bp, Homo Sapiens
tgctggccgccacggccgacaggttccaggccaggaactgcaggcagctctcgcgcagggcctcgtccccggtgcccaccgcgtagtggtaccagcccaccgccgggcccgcgcctcccgccaggtgcgcgcgcatgtagtcggccacgccgcgctgcagggaggacacgccgtacttggtggccagtctgtgcagggggatggcctgggtcagcagcacggtcagctccccgcagtacaggtacctgatgaacttgtcgaagacagcggcgcagtcctgtggctcctgcagcaccgcctcgctctggttacttagcagctccaggaacagctcactgtgcagtcccagcagcaggcggtgggcgtggaatacccggacctcatcggtgcccgcagcctgcacccgcagaaccacatcgctggcgttgccctgccgcagcagctcctgcaagcgctggagcaccgcctgggagtggttgatggaggtgccagctgcctccccgccaacatcggctctctgtgctgcatgggtgaccaggcccaccaaggtcagcatgg

SEQ ID NO: 325029 - DNA, 691 bp, Homo Sapiens
atcgcggtgcagcagtttgggagcccggtaggcagtgccctgagcacgaagttcgggcccaggcccgtggtgatgactggaggccttttggctgcgctggggatgctgctcgcctcttttgctacttccttgacccacctatacctgagtattgggttgctgtcaggctctggctgggctttgaccttcgctccgaccctggcctgcctgtcctgttatttctctcgccgacgatccctggccaccgggctggcactgacaggcgtgggcctctcctccttcacatttgccccctttttccagtggctgctcagccactacgcctggagggggtccctgctgctggtgtctgccctctccctccacctagtggcctgtggtgctctcctccgcccaccctccctggctgaggaccctgctgtgggtggtcccagggcccaactcacctctctcctccatcatggccccttcctccgttacactgttgccctcaccctgatcaacactggctacttcattccctacctccacctggtggcccatctccaggacctggattgggacccactacctgctgccttcctactctcagttgttgctatttctgacctcgtggggcgtgtggtctccggatggctgggagatgcagtcccagggcctgtgacacgactcctgatgctctggaccacct

SEQ ID NO: 325030 - DNA, 725 bp, Homo Sapiens
gaggaccagcttcagcttggccgtgttgatctggttgtagtcctctatgtactcctctatcacctgcatcatcttactctcactggtgatgagctcgtaggacttgacatcggagcctggtgacatgaagtccccgtaaagaatgggctggaaggggcagaccttgttgaaggtcacctcccactgctccatgcagcgcttgaggagctggtcgaaccagctgcggtcctcctcattcaccagtcggtcccggaacacgcggcagttctcgtgataccacagtcgcagcagctgcacttggtcctcgaccttggccgggtcagccatgagcatgccttggaagaccttggagaggtccctcaggttgaaggtgtagtgggacttggctggagtgggcagcagctgggatgtgatggttgcatacaccatgatggtggcttccacaaggggctccgtgaagtgggcaatgtggggggccccaggcacacgctcccggtagcttttttctccaaggagtccatccaaccagttgcccaggatggtggagaagatgcgtttcttgctgacctcgtccatctcagcgaaagacaggtagttgaagtgacgcatcagccgcggggtgacggtgttcctgcctccacccggggggcccatggcacagacaaagttgattaccactaggttcttgaaggcaccaatgatcttgcggtcgtaccagccgccgt

SEQ ID NO: 325031 - DNA, 499 bp, Homo Sapiens
ccatggtggcccatgagtgcctgggtctcttttgcaatgcttgtgacctgtgcactgacctagcagaagagatcagcgctaactttgaggccctgcctttcgccatggcatctgacagtgacaatgatgctgggtccagtattgcatcagacccaggcactcatgggccaccatgccggattgctgccgtggccaccgctcagcaacaatatgatagtgacacctcctgtcattataaagtcgagctcagctatgagaatttcatcacctctggcccagaccctcacccgcctcccattgcagatgatgaaagcgatgatgatgacgatgatgacatccctcaggaggaccactacgccctgctggtgaaagcatgggagaccaaggtttttcctaccatccgaagacgcttccgcaatgaagcagagcggaaatcgggcctggaccagataaagggggccttacaactaggtatggtggatattgcccgacagacggt

SEQ ID NO: 325032 - DNA, 578 bp, Homo Sapiens
cagagctggatcggaggatagttgccctgcgcaagaagaaccaggccttgctccgcaggtaccaggagatccaggaggaccgtcggcaggccttgcagggggggatggctgtgaccacaccagcactcctccagcctgatggcctcaccgttaccatcagccaggttcccggtgaaaagcgggtggttagcaggaactgggcaaggggtacctgtggacccagagtgaccaacgagatgcttgaggatgaggatgctgaggaccacgggggtactttctgcttaggggagctggtggagctggctgtgaccatggagaacaaagcagagggcaaacggattgtaagtgaaaagcctaccagagcaaggaaccaaggcatagaggggtcacctggagggcgtgtgacccgaagcccccccacgcaggtggccatcagctcagattctgcacggaagggttcttgggagccctggagccggccggtgggggagcccccggaggcgggctgggactatgcccagtggaagcaggagcgggagcagatcgacctagcccgcctcgcccggcacagagacgca

SEQ ID NO: 325033 - DNA, 746 bp, Homo Sapiens
ttgatggaagtaatgtggcaatgagccatgggaataaagaagaattctcctgcagaggaatacaacttgctgtggattggtttctatataaaggccataaagatattactgtatttgtgcctgcatggagaaaggagcaatcccgccctgatgcaccaattacagatcaagatattctacgaaaactggagaaggaaaagattcttgtcttcacaccatcccgaagagtccaaggcaggagggttgtctgctatgatgaccggttcatagtcaaactggcttttgattctgatggcatcattgtgtccaatgataactaccgagaccttcaagttgaaaagccagaatggaagaagtttatagaggagcggttgctgatgtattcttttgtgaatgacaaatttatgcctccagatgatccattaggacgccacggcccaagccttgaaaatttcttaagaaagagacccattgttcctgagcataagaagcaaccatgtccttatggcaaaaaatgcacctacggccacaagtgcaaatactaccatccggagcgggccaaccaaccccagcgttcggtggctgatgagctccgcatcagtgccaaactgtccacagtgaaaactatgagtgaaggcaccctggccaagtgtggcacgggggatgtctagtgccaaaggtgagataacctcagaggtcaaacgtgtggcccccaagcgccaatcagatcccagcatccggtctgt

SEQ ID NO: 325034 - DNA, 561 bp, Homo Sapiens
  misc_feature (35)..(35): n is a, c, g, or t
aaaatcccctggttgggaagccgcaaaggccctgncagcacccagctgtggaaatcccccaataatgtgaactgcacagctccgtccctcaaaacatttgccaggtgaatcaccactgaagggggcacatagctgtaagtgggcgttcctggggcccggtacgtgggcacagtgaccgggtggggggcgacaggagttggggagtgagcagtcagcagggtacctgctgacatggccatggtggtcccagccaccatgcccatggtgaccccgttgcctctaggaggggggatgggagcagggtacaccgttgcaggcatgccgttgggctgcaccaccgtggtgtggtggatgacgtgaggaggtgctgcatacagcggctgtgtgtagtacgtgccttgctgtgcatacgggctctgctgggggtaggcacttcgcacagggtacacggcagtctggtaggggttcggggaggaggagtacggtggcacagccccgctggtgggggaacaggacactttgtaaggtgtgccaggagtgtaacctgtttggaaggtagga

SEQ ID NO: 325035 - DNA, 728 bp, Homo Sapiens
cccagagctggacagaagactgctgttcactgcccaagagatgcaccacctttgtagcaaacatgtacttgtcccgaagctgaaaatctctcacttcctcaaggatcacttcctggttttcccgggactggaagaaatctgtacttcggaagacagtggagtagccagagggttcatgtcgttcaatgtagatggtatttggtttgtcatagggatcaattccccaagaaaaggacttgacatgttcctgaatcatgatccaggtctggccaaagtcatctgacttccacagctgcttgttggggtgggacctgtcaaagcccaagagaaggttggaggccttactgtgtaggaggagatcagctgcccgaaatgggatggaaaagccttgaagagtgttgcagaagtcaaacgtgatccagaggtactgggcataagcgtctgcaaagatgtaccgcttgttgtccgcagggctgtggtagaactgggcgataacagcttcactcctatttcccaagccaaagtttaacttgtctgaaattttcttgaatgattttccatagtcgtaagacacgtacacatcactgctcttgggcctcgccaatgccaggctatctcgggccaaggccacgatcacgttgcttttctctccagcccagtgcaccaccatctgattgtgggaatcattcagactaacctgtccgtacaccttgatggggtcgggatgg

SEQ ID NO: 325036 - DNA, 460 bp, Homo Sapiens
ctgttctccttttaggatcccttcagcgccagctccagctccagcttgtcctgatctgcaaccacagcggtgctccctgtgctgtccagatgcacatccaggtatgacagctctcgggccacaatgactttgttggtgatgaggttttctgggcgatctgacgtttcttccatcaggaactcctcatccagctcctcctctccctggggactctgggagaaggttttccggagcagcttgccagggaggacttctgagatgtcatagagaaccttgaagcagatgtaatcctccgtgactgagtcctcatcatagatgctaagctccagaacattcttgacctgactttggataaggaaacggaaggcctcattccacacaaagtagcgcacctctgttgagcccttacttgatgtctagagtcagagacaatcattatgccactttttttctgcgcttc

SEQ ID NO: 325037 - DNA, 438 bp, Homo Sapiens
ctggattcagaggacgagacctctcgcctcctggcggctgatgccctgtaccgcctgggccgcctggaggagacccacaaggccctgctggtggccctatcccggaggccccaggcagcccctgtgctggcacgactggccctgctgcagctgaggaggggcttcttctatgacgccaaccagttggtgaagaagctggtccagtctggtgacaccgcctgcctccagcccaccctggacgtcttctgccacgaggaccggcagctgcttcaaggccactgccacgccagggccctggccatcctgcgggcacggccagtcggggccgccggctgggttcacaccaaggaggccatcgcttacctgtctctggccatctttgccgcaggaagccaggcaagtgagtccctccttgcccgagcccgctgctatgggttc

SEQ ID NO: 325038 - DNA, 550 bp, Homo Sapiens
tttctgcttgtgtgagctcaaggcttctctatctcttggtgttcgacactcagaactcaggtgtctttatctatcaaggcaagcttctcgatgtctgcccttttctggaatccctgctgaaataattactaaagaacttctcttatattgttgtggttgatggtcccattcttgattgttggacgtgtcttctcatgactaacaggtgcttcttctgagaatattgtggagacgaggatccaagaaaggctgagaatcgagagattgctctatttctcatattgctggcaacagctgtaatactgggaagtgctgtgttactattccatttttgcatctttcatcagaggaaaatgaaggcaatacgaaggtcgctaaaggaaacgactgtgatgctgggttgtgctgcgttactattccattattgcctctttttttgtacgaaaatgtaggctatacgaaggtcgttaaaggacttgaggtttcagcccattttttcccatctcctttgctctatatggccctatctctcccacctgttaccctggga

SEQ ID NO: 325039 - DNA, 324 bp, Homo Sapiens
catcgctcaacaggctgggcggcgcaggcgaggacggcaagaggccgcagcctctctggcatgtcgggtcgccttttgctcttggtgccaacaaggactcactctcggccttcgagtacccggggcccaagcggaagctctacagtgccgtgcccgggaggctcttcgtcgctgtcaagccataccaaccccaagtggacggcgagatcccccttcaccgcggtgacagggtcaaagttctgagcatcggtgaagggggcttctgggaaggcagcgcccgcggccacatcggatggtttccggcggagtgcgtggaggaggtcc

SEQ ID NO: 325040 - DNA, 604 bp, Homo Sapiens
cctgcagaccaggtccccgactgggatgaccgcatgcacacagtcaagtggggtggacgtacccagaaacatgcctggggactttcactcctaaacgaaaagtgatagagacggatccggaacctgctcacttagtactagaagaaaactaccaagaactgcagcttcaaatcagtgccaatgtggatttcgcttcattccattgccaagcaagagatgtgcgctttaaggaaaccttggtttaccagacccgagtgtttgagttcgatgtgattaattcaggacgtgtccagctggaattcagctgggtctcagaagatacctcaaaggcagtcagctttgcaaaaccagatcaccaaggttcagctcaaaaagatcagcttagtcagggcacgatgtatacaggcagcaccctggacagcaccatggaccactgggccgagggttccccacagcccttctctgtggagccctcttcgggaatcgtgccggtggggaagattcagaagttcaaagtaaaattctccccgttggacattggagacttcgagagcaaccttttctgccagattcccaacctgccacctggagagcaaggtccggt

SEQ ID NO: 325041 - DNA, 367 bp, Homo Sapiens
ggtttttgggcagcaacagctggatggggatcccgccagtcaatggacaagcggtgataccaaaggtgctgactctccagaatgtgagctgacttgacacttttatcaaaacgatgcacttcacatccgttgttgggcatgctaacctcaaaatgggtatcatcacttcctagccctaaggagtagaggcggcactgcttgttgcggatttgattagttaagttgaacctgtcgtcaagacacactgaccagggcttgtgtgtaggactagagtcagtagccaggctgtctgtattcatgtgattgcatgcaatctgggtggtgctgatatatctcaggaacctccaggcttcttcatccagggaaa

SEQ ID NO: 325042 - DNA, 749 bp, Homo Sapiens
aacaggttcctctggaaaaggtggggaaggcggccctggtgcagcagcacagccaggaccatccctgtcagagggcttagccagtacacctgcacgtactccagtaaggtgtgtccctttgtggcaaaggtcacagaggcggccagggcagggttgaagaatgtttatgtgatgggtccggccgtgttgtccgtggcggtgaccaacagagccacagcgggtccgctgtaggctgtaggactgtgccgcaggtgccggagggtcagatggaaacaaaaggcgcaggcggcctccacaagcgccccgtggggcacggatgtgcgcagggccgagctgcagctctgggccatgaggctctgcagcatgtgcaggtcactgagctcccaggcccagcagaggcgcgtcagggtgcaggctgtctgcatgcccagcccctgtgccgccagcttcagcagcgtgccaggctgagactcctcggccatgaggaactcctgcagggacacggtggggttggccgaggccccgtccaaggtgaccccgtgcgcctggaagagcaggaagagcagggtgagcagcaggtcaggcccaaagtccccagcccagggcccgagctcgaccagcgtcctcatctccaggaagcaggccccgagctgcaccgcgcccaccgcctcccgggcgaagacttcataggcgcccactgggagcagggccttggaggcccgcctggctgcctcacagagggcgaaggt

SEQ ID NO: 325043 - DNA, 1231 bp, Homo Sapiens
cagaacccatgccagagctcaccctgactggggaggctgcccagacggaccccctcgtactcctgccttcccactcccagcccttggaggggggctgcacactttggggacctgtctccccactcggccctccctggcacaatccctgcagagttgcaggggcactaggtgcagactcaggcaagtctaggctccaacttcagccctgtcctgcctgtgggactcagggtaaagccaaaggggttgttccccaactcgtgcgtcccagcagttcggcgtaaaccaggccaggagggagtagccccaggggccgtcagagaagccaggcataggaaccagaacgtgcctttctatctgggtcaggtgggcacccttcccagggcagggggtgccccagggggctgcttgtgccatgaggcaagccctaagccccctcccataagctgcagcacgtcactggaggcgctgaagagcctgctgtccaccacggggcactggcatgactttgcccacctggagctgcagggatcctgggagctgttcaccaccatccacacctacccgaagggcgtgggcctccttgccagggccatggtgcagaaccactgcaggcagatcccagcggtgctgcgtcagctgctgcccagcctgcagagcccacaggagggtgagaggaaggtggccatcctcatcctcaccaagttcctctacagccctgtcctgctggaggtgcttcccaaacaagctgccttgaccgtgctggcacaaggcctccacgaccccagccctgaggtccgcgtgttgagtctgcagggcctaagcaacatcctcttccacccagataagggaagcctgctccagggacagctgcggcccttgctcgacggcttcttccagagcagcgaccaggtgatcgtgtgcatcatgggcaccgtgtcagacacgctgcaccgcctgggcgcgcagggcacagggagtcagagcctcggcgttgccatcagcacacgctccttctttaatgacgagcgggacgggattcgggcggcagccatggcactgttcggggacctggtggcggccatggcagacagggagctgagcggcctgcggacccaggtgcaccagagcatggtgcccctgctcctacacctgaaggaccaatgcccagctgtcgccacgcaggccaagttcaccttctaccgctgtgctgtgctgctccgctggcggctac

SEQ ID NO: 325044 - DNA, 267 bp, Homo Sapiens
tgtccctgagcatgggctgcgtgatgtttgaggtgcatgagttgaatgtcctggctccatttgatttcaaaacaaatccctcatggctcaacataaactcttaagttcttttagtttcaacagaggtcacctactttgtttgtggattgctttttgttccagttgtggaagaatgggtttgggattatgctatttcagtcactattcttcatgttgccatcacttcaactgttatgttggaagtccccttgacatcacattggtggg

SEQ ID NO: 325045 - DNA, 437 bp, Homo Sapiens
cttgacatgcggaagaccctggcctcggtgataatcatggagaaggccaccactgagccttctgtagtgataaacactctcatccgctgcctgcaggtgttagaggtttccacccagcgcaaggtcaacatttacaaccttttccaggacatcatccagcaggagggggagctggaggagcagtgcgtgcagaggctggtggccattgcctccaaggagatgagggagatcccagagatggagggctatatgaaggcagaggtggccagcgacacactggtggctctgtcccgaaaccacttgagcttggtcatgtacgagctgcagcaccacctcaatcccctcaacctcactgatgaatttgtcatcatcacactggccaagctggccaacggcaatgtgtttgagttcatgccatacatgggcatcaccctggc

SEQ ID NO: 325046 - DNA, 760 bp, Homo Sapiens
gcaaaggcacctatgggaaggttgacctggtggtctacaagggcacaggcacaaaaatggcactgaagtttgtgaacaagagttaaaccaagctgaagaacttcctacgggaggtgagcatcatcaacagcctctcctccagccccttcatcatcaaggtctttgacgtggtctttgagacagaggactgctacgtctttgcccaggagtacgcacctgctggggacctgtttgacatcatccctccccaggtggggctccctgaggacacggtgaagcgctgtgtgcagcagctgggcctggcgctggacttcatgcacgggcggcagctggtgcaccgcgacatcaagcccgagaacgtgctgctgttcgaccgcgagtgccgccgcgtaaagctggccgacttcggcatgacgcgccgcgtgggctgccgcgtcaagcgcgtgagcggcaccatcccttacacggcgcctgaggtgtgccaggcgggccgcgccgacgggctggcggtggacacgggcgtggacgtgtgggccttcggcgtgctcatcttctgcgtgctcaccggcaacttcccgtgggaggcggcgtcgggcgccgacgccttcttcgaggagttcgtgcgctggcagcggggccgcctgccggggctgccttcgcagtggcgccgcttcgccgagcccgcgctgcgcatgttccagcgcttactggccctggagcccgagcgccgcggcccagccaaggaggtgttccgcttctc

SEQ ID NO: 325047 - DNA, 407 bp, Homo Sapiens
  misc_feature (87)..(87): n is a, c, g, or t
agtcttcatatccccatcttacatacccagaaagtgtggtttgtccaggatcacaaaactagtagtgacagcaccgggattcgaagnagtttagggacacggcctttcacggcttcctgatacccaagggcaccgatgtcatcaccctccttaacaccgtccactacgaccccagccagttcctgacgccccttgagttcaaccccgagcattttttggatgccaatcagtccttcaagaagagtccagccttcatgcccttctcagctgggcaccgtctgtgcctgggagagtcgctggcgcgcatggagctctttctgtacctcaccgccatcctgcagagcttttcgctgcagccgctgggtgcgcccgaggacatcgacctgaccccgctcagctcaggtctt

SEQ ID NO: 325048 - DNA, 608 bp, Homo Sapiens
ggacgactggctgatcatctacttgaagtatttactctttgtcttcaacttcttcttctgggtcgggggagcagccgtcctggctgtgggcatctggaccctggtggagaagagtggctacctcagcgtcctggcctccagcacctttgccgcctccgcctacatcctcatctttgcgggcgtacttgtcatggtgaccggcttcctgggcttcggtgccatcctctgggagcggaagggctgcctctccacgtatttctgcctgttgctcgtcatcttcctggttgagctggtggcgggagtcctggcccatgtgtattaccagaggctgagtgatgaactgaagcagcacttgaaccggactctggctgagaactacgggcagcccggagccacgcagatcaccgcctcagtggaccgactccagcaggatttcaagtgctgcggaagcaacagctcagccgactggcagcacagcacgtacatcctgttgcgggaggccgagggccgccaggtgcacgacagctgctgcaagacagtggtggcgcgctgcggccagcgggcccacccctccaacatctataaggtggagggaggctgcctcacca

SEQ ID NO: 325049 - DNA, 746 bp, Homo Sapiens
tgccggtgactacccccaagtcatgaaggactacattggaagaaagagtgcagagcaaggcctggagatgtcgaggttaccggtgttctcactccaggagaagagctacattaaaggcacatccgatttcttgggattaggtcattttactactcggtacatcacggatatgagtttcgcctgccgccaggggcccagctaccagagcgatcgtgacttgatagagctggttgttctatcctggccggatctggggtctaaatggctatgttctgtgccatggggatttaggaggctccttaagtttgctcagactcaatacggtgatcctcccatatatgtgatggaaaatggagcatctcaaaagttccactgtactcaattatgtgatgagtggagaattcaataccttaaaggatgcataaatgaaatgctaaaagctataaaggatggtggtaatataaaggggtatacttcctggtctctgttggatgagtttgaatgggagaaaggattctcagatagatatggattctactatgttgggtttatcgacagaaataagcctcgctatccaaaggcttcagttcaatattacaagaagattatcattgcgaatgggtttcccaattcaagagaggtggaaagttggtacgtgaaagctttggaaacttgctctatcaacaatcagatgcttgctgcagagcccttgctaagtcacatgcaaatggttacggagatcgtgg

SEQ ID NO: 325050 - DNA, 619 bp, Homo Sapiens
taaccatttttctgcatttaaaagttagaagatttgaagcattctggattttcagcttcttttaagatatgagaaagtatctaacagcaggcctgtatggctggttcctgccgggccctaatcctcaatgatgtctgagttttggcacgtggggctcctgttcattgttctcccttcacatggggcctggcagccccagttccaaacagagaaaggctagtgtgtccctacttgggacatggccaggggagggcggtacctgctgtgccatctgggggggcgatcttcatggggtacgggggcacatgggcagtgtcgggacccccatctttgcaggggcaggtgaacgggatgcgctcctggttgcaggcaaacttgatgaacttgcacagctcctcctgggtgaacatctccagggccccccagaagaactcgatgtgctggtccgtctccatcagccccacttggtacatggtgtgggccttgaggaactcgaggttgatgtaggggaggccgcaggtgcgcagctccatctccagtgggctgagcatggtcagcagctgcagggggatgatggagcccaggccggcccgcacggccgtcacgcactccacattca

SEQ ID NO: 325051 - DNA, 510 bp, Homo Sapiens
ggttgtcacaaagccacccaccctttacacagtgcccattctcttggcacagggcctctccctctgctcagggaggcacaagctcctcagagtggccaccgtcacccccacaatgccattgaccttcctggcacgggcagctcccgcagtccttttgcagcacagacccgggcgggaaggagttgtggccccactcacaggggcaggaagctggctccaagcaggctcctccacgcagcacatgcccctcggggcagaagcagccctccacacaggccaccatctggcagtgccacccgggctcatgatgctgctcatggcaggtggggggacacgtgggtccacaggcttcatatacctgttccccttcacactgcagggctgggtggagaggagagatccttggatcagtgaggcacaagggcaaaaggatgcaaccacaccaggctggctggccaaggtgaccaccatggagggcacagggtgtctggtataaactttgggcaagac

SEQ ID NO: 325052 - DNA, 737 bp, Homo Sapiens
ttctgcagtgaggttaagtagaaccttcgtttggtttgtgactgacacctgcattaaggtgagtgccccaatgccatttccatacatgtgataatgaaaaataatcttgcagtttttgcttctcttacttataactggacttgaaattctggcagctctcatgggctgctgaggaaacaaactatttataaagatgtaatgaccagatgaatttcccaaagtgtgatctgctgctggctctgtgcctgctgcagggatgctgctagctttcaggttccagtcaaagtcctcatctttctcctgcttccaggaacaaagatcaaattcgaaatcacagcgcccactggaggtacggcaaatgaaagtagtctcatctgaattatcagcacaatcattcacaaaatcacacagcttgtctttggcaacgcagtgcttattagcacacatgaattcatgagcagtacactttctctctgggctaagcaaaggggagcaatcttggaaggaaatatcatccactgctacatctcctatgtaactgataccacgtttggctctgaagacaatctgtgtatgtgaacgaatgcctaaaaacacttctgctctcttccactgtgcaccttgctgtccagtttgagcccacaatttagaagtaacgttatctttcttgatgagcacctggagagaaccaacgatggccccattcatatgtgtccagaacacccaaggtacatttg

SEQ ID NO: 325053 - DNA, 656 bp, Homo Sapiens
ggactcttggatggttctcagcttcttatccaggatccttgtggtccaaggtaggaagagccttgctgttgtttggtgtcaagaagttttctggtctctcagaggaaagcagctggaaggagagagccactgtgggggcctcatcattgatagttttcaggctggtgtccatgatggggagccgctccacgtgaagcccgtccaagcctttccctgtcagcatcttctggtacaaacggctctttagcggcaacacagagatgcccaggggctggttgagggtccacggctggctgcctttcattgaagttgaggagtagtactccagcaccagggctgtgtcttctgagaagctggtagctccatctcggccttggaagaggaaggactgattccacaggggctgctctgggggtcccccaggcttggacagctgagggcatccgttctggctgacgcgaggcacgtcaaagttcatcatggacgggatagggaaggacagtggggtgatgggcagccccacagaggccaggtccctgttagcctggctgaccttaaattccttgtagttgggaacgacccgggcagtcaccactatggggttggggttgttggcgcaggggctcgttgactccccggagaaagatctccagagc

SEQ ID NO: 325054 - DNA, 551 bp, Homo Sapiens
ccgacgtcccctcccatgaagtgccccacctcgattccctggagcttgtctttgcagatgacagtagcaattgctttgttggtgtagacgccgacgtcccctcccatgaagtgccccacctcgattccctggagcttgtctttgcagatgacagtagcaacggccacctccccaaaactttggctgaatactttcacaaatttcacacataaggaattcctgtggctttttccttgttctgttttttggcattctcgatcagacatcacgggggcctccaggttctgccgcaagtcagggtgtcggccactgttttcttggctccagtccaaacctgagagtagacagacagtgcctggcctgacattggtggtggcgaggggaaggggctggactttgggattgagcatggcaggcttagccagcttgatgagcatgaggtcatcctgtggggcgctatgactgtagttccagtagcggacgatctgaatggggttaattgtctgttcagtacggtctctgactctgctcttgaaatttcccagcatcac

SEQ ID NO: 325055 - DNA, 765 bp, Homo Sapiens
cgagaacgtgaagagcgggaaggtgctgctgagcctgagtgacgaggacctgcagctgggccttggggtgtgcagctccctgcaccggtgcaagctgcgcctggccatcgaggactaccgtgatgccgaggcaggccgcagcctgtccaaagctgccgagctggaccatcactgggtggccaaggcctggctgaatgacattggcctgtcccagtactcccaggcctttcagaaccacctggttgatgggcggatgctgaattccctgatgaagcgagacctggagaagcacctgaacgtgtccaagaagttccaccaggtcagcatcctgctggggatcgagctgctgtaccaagtgaacttcagcagggaggccctccaggagcgccgggcccgctgcgagacgcagaacattgaccccgtggtgtggaccaaccagcgggtgctcaagtgggttcgagacatcgacctgaaggagtacgcagacaacctgaccaacagcggcgtccatggtgctgtgctggtgctggagcccacattcaatgccgaggccatggccactgccctgggcatccccagtgggaagcacatcctccggagacacctggcagaggagatgagcgccgtcttccacccagccaactccacaggcatccgggaggctgagcgttttggaacgccccctggcagggcctccagcgtcacgcgggcaggaaaggaggagaacagcagcggtctcaagtacaaggctggccggctgcccct

SEQ ID NO: 325056 - DNA, 376 bp, Homo Sapiens
gtcattgcctgacgtgtgccagctctttaaatgctacgacgtccagctgtacaagttttgtcattgcctgacgtgtgccagctctttaaatgctacgacgtccagctgtacaagggaattgaggatgttctccttcatgacttcttggaagatgtttctattcagtacctgaaatctgtgcagttatttagtaagaaatttaagctgtggctccttaatgctttggaaggtgttccagccctcttgcagatctccaaactcaaagactatgcgaatggtattgaaaagtaagaggcgtgtcagcgttttgaagtcaaaactaagactatgcgaatggtattgaaaagtaagaggcgtgtcagcgttttgaagtcaa

SEQ ID NO: 325057 - DNA, 530 bp, Homo Sapiens
cgcccagtatcccctcaagcagtaccgggaatcccaggccttctccttctgcacagcagggcgctgggcagccggcgagccagtggcaagagactgcgcagggctgcaggcggcctggcggaggcagatcaggcttttcagtcgggtcagcccagccgtggctgatgcagttgtcacagccttcccctccccccgccttctgcagcaggcgctggaggcctgcagcacggagcgggagcgcatgggcctcctggccgaccttcctgtgccgcccagtgaaggcgggcgtccccgcagggtggggcctgacctctcccgccgcatctgcctcttcctgaaaagacctccaggtgctgaagccccggccccacgcgccctctcatgcctttgcctgctcctaggcgctggaggcgtgcagcagagatcttttttcgcatgtgcctcctggtcaaccttcctgtgccgcccagtgaaggcgggcctccccttagggtggggcctgacctctcccgccgcatctgcctcttcct

SEQ ID NO: 325058 - DNA, 727 bp, Homo Sapiens
  misc_feature (615)..(676): n is a, c, g, or t
ttttaggcatgtgccactgcgcttggcgaagaatctttctccattgacagttacgtaacagcaaattttcttggccgtggcctgccactctaagtctccctcgtgcgcacacaccctggtgccgtagccaggagctgcaggaaggatgcctccaccggggagctggactggatgagctgtcgggtctcctcggagttgactgctctctgagctgctgatactcaagaaacccaacacaggatggaactgagggactgagcccaagtaaggcctgacaagcaaaaggaggcagctgagcttaaagatgccgttccccagtcagagagaagggggccacggccaaggaacccatgtgggcctgcactggttcctcagggaagggaaacatggctgatgaaatttccacaaaggcagaggcttgtgacaacactaaaaattatgacccctcagtcatctgcaggaaagaaacagttttttcataaaagggcatttaaatttcatgcagccatttttcataatgcattactgagtctgtcagtatgtctagtgggataacctagagtacaaacttctcactatccttgataagcccaggaggaggtttttcataactcnnnnnnnnnnnnnnnnnnnnnnnnnnnnnnnnnnnnnnnnnnnnnnnnnnnnnnnnnnnnnnaaacaggtgagaccctttaaggactccaggcgcttgagctgctgcagctgc

SEQ ID NO: 325059 - DNA, 897 bp, Homo Sapiens
  misc_feature (751)..(751): n is a, c, g, or t
gtcttcctggcatagctgacacaactgtggcttttcagagagcagcagctgatcctgttcatccatagggtggggttgcagcctgtggctttcttccaggggcttttttagtttaacattttcctcttgcattttgtgcttcccatccatcttggattctgacttctgggaaccccttcctgggatgctcctgtcgttttgtaatcttctttctttttcctgttttagttctaactcaagctggttccgctgcctggtgagctcctcgacttccagctgcagactgttgatcttgtctccaaagtcctgtttgaagagccggttgtccaactcagcagattggcggcttcgctcagcctggcgcaatctggatgtgagccacatgaacttgtgataaaaaacaaaagccatggtggggaagaagaccaagttcacaacacaaaataaaataacccaaggaagaatgcacagagagacagagagaggaaaaaaactttgcaggacacaggtgaagaaattatgggggggaaaagatggagaagaaacaaattctaaagaaaagtaagatgaaggtgaaccaggcagaggaaaagctgattttccattttttttattctagtactacagtttacagccattagatgataaacaataaaacatcactttttagaaaatccatatccaaagccaaccgtcaagtacacagtaatttaagttaaatccactttttaaaaaaatttcctaataggtntggtacttaatttttctgttttacacgacataactggaacttgtaaatgggcaactaccttcttatatgtggaattatagttttttcttgtcctttcccccaaaccacatatattaaatcatgggacattatatatcaaccctcac

SEQ ID NO: 325060 - DNA, 448 bp, Homo Sapiens
  misc_feature (54)..(54): n is a, c, g, or t
  misc_feature (123)..(123): n is a, c, g, or t
  misc_feature (167)..(167): n is a, c, g, or t
ataattccttcaacctgtgtccctgccaaagtttttttccctctcctctgtctnctctgtgcattcttcccttgggtttattttattttgtgttgtgaaacttggtccttccttcccccaccnatggcttttgttttttatcacaagttccatgtggctcacatccnagattgcgcccaggctgaacgaagcccgcccaatctgctgagttggacaaccggctcttcaaacaggactttggagacaagatcaacagtctgcagctggaagtcgaggagctcaccaggcagcggtgaagagggggtagcttgagctgacagggtggtcatgggtaattcttagggtagacagcaagaaaaggggtctcatgacttccagccaggttggctctgtctttgcaatgtcctttctctggaattggaattcagaaagcttcctagtgccgaat

SEQ ID NO: 325061 - DNA, 433 bp, Homo Sapiens
gccattggcatctcggagcccgtcaaggtgccgtactccaagtttctgatgcacccggaggagctgtttgtggtgggactgcctgaaggcatctccctccgcaggcccaactgcttcgggatcgccaagctctggaacccctgcagacatggcgaccgcaccttccgcctcctgaggctctgccctggaggagaagacgcctccaggccactgtttctctccatggattctgaggccctcctggacccctcgccaacctctgaggaaatgacagactcgatgcctgggcacctgccatctgaggattctgattgtgggatggagatgctgacacacagtcaaggtgacttgatccggcccctgtggaagcaggtggagctgctcttcaacacacgatacgccaaggccattggcatctcggagcccgtcaagg

SEQ ID NO: 325062 - DNA, 373 bp, Homo Sapiens
ccagctgccgccacttctgcttttggtgctggtggtgctgctgaaagctggtgtgaattacaatactccctttacagttccgaatccctgaccccgcactggagccccacttcccacagccccggaacggagcccttgacctccactgaccagaccttggagccccctggcccagctccaggtgacactgggccccgtgagttacacaggaacccgagtgtggtggtggtcgtgtgtttgctggtgtctcttttgctcatcgggtctgtggtcatggctgtgagattctgtcacctggaatgagtcctaagtttgagaacctggacgaggtgtccatgggatccgtgaatgacagattgtcctttgcccacca

SEQ ID NO: 325063 - DNA, 339 bp, Homo Sapiens
tcacctcccgggctctgaccgggcagttccttctcactgtaatgcagcccaggcagagctgaggacttgcacaaggtttggagccatctcggtctgggagccgacccccagaaaggactggctctgtcccatccagctcagggctcagctgcagaatcccaaagcgatcagtgctgctgtagattccaacaggctttaggccccgtgtctgctggcagcccagctcggtgtccctgtacgttctcatacttcaaaatgatgtcctctcactcctgcaaagtatccacatcctctaccatgtccatcctgccccagcatgttgaatggagtccacctgaa

SEQ ID NO: 325064 - DNA, 545 bp, Homo Sapiens
accacgtgtgctccaagattttgaccatgtgtgctccaagaataggtggatgctatagcttgcaccagataccatgatgtcactctggtaacttcagcctcattgctggagtagggctaactgcttgaacatgcaggccccagttctgttgaagccatagtcctgcttggccatgtggctcaccagcataatcctccctgtgggatgctggaacatcacctgccatagcttgtaagtggttcctgagcctgacagacaggagcggggttgacggtgcaatcaaggagatctccatgtagttcccttcagagaatcttcctcgaggcccatgtgaaatagggacaggacatggtatagttgtaggtggtttcttccccagcttccatgaacccagacacctcgatgttcactctggttgaccacatgacaggccagtacagaggccctgaaggtttccccaggcgtcttcagacaacacgtagccacagcgtggggccacgggaggtgcggcagctgggcatccaggggtctgggcggagcgagag

SEQ ID NO: 325065 - DNA, 336 bp, Homo Sapiens
cgcccacatagccttggccccggcttcggttctgccggttacgcttgtttcggttgtttcggcgatttgtccgcttctcggaggggggcagaagcttccttgcctcctccttgtacttagtgacaatgggctgagcttcctccttctccagctccccatatgtcacctcatccatatagtcgcatttttcaggcaaagagaagttggctttcatctccagcattatagattcaggcacatcatctccctctacttccttcctcaactccagcctcttcttccaatcttcctcattagggacaaccaccaccactttccgagagaaggtcttgaaca

SEQ ID NO: 325066 - DNA, 715 bp, Homo Sapiens
gaattgatgatcagggatatggccgaggctctcacccagtggaggcagctgaactctcctcagggagatgtgcctgagatgcctaggaatctggtcttgctggggcttccaatttccacacctgatgtaatctctcagttggagcctgaggaagagctggagatataagtctcaaaggcagccagtctaaagcactgggaaacaataccagaaagcaaggagctaactccagagaaggatatttctgaagaagaatcggctcctggggtgttaattgtaagattttcaaaggaaagttctagtgaatgtgaggattctttagagagtcggcaggaaaaccatgagaaacatttaatacaagaggctgtcactgagaaatcttctagggagagaagctaccaatctgatgaatttagaagaaattgcactcagaggtccttacttgttcagcagcagggagagagactacatcattgtgattcatttaaaaataacttaaaacaaaattcagatatgattaggcatgagataatttgtgcaggagagaaaccttggaaatgcaatgaatgcgagacagccttcagttactactcagcttttgtcttgcatcagagaattcacacaggagacaaaccctatgaatgtcacgaatgtggtaaagcctttagccagagcatacaccttactctgcaccagagaattcatactggggaga

SEQ ID NO: 325067 - DNA, 400 bp, Homo Sapiens
cgctgggaagggctctggtgttggccgttggtcagttttccaggtatctgggtcccccgctggtgaaagctgggcccgacaggcagccgtggcagagcgagacatggaagcgctcccaggcacagcctcagacagtcccgcttccaggtcctggctacacgacggcctgtgtgaagaggcatcgcctgccatgctagatgtgcacaaggtggggtcgctggtggagcgggacacatgcccgggacctggctgcacctgtgagcccatgccaggatcctctggagacacgcggccagggggaagggcaggttcggagggtgctggggcgcccacagggccatcgggggatgggctggaacctggcgtagcagtgccctcggaacctgcccttccccctggc

SEQ ID NO: 325068 - DNA, 630 bp, Homo Sapiens
gtctgccaaggaactttgttaaggtcttttgcatacgtgcctggtggagattgggcagtaagtccactatatccttctctgtcacatccttagatatgggcgggggcttctgcatggtgcatgggccattagggatccaggagtaccagtccagctggcccaggtggttagaagcatgctgacctgtgcatgtgaagatgcacatggtgacaaagtggcagagctgagcccgggactctaaggagatgaggaacccctggtcttgggccctctgcagtccagtctcagtcatctctctgcaccaggcctgcagctctagatcatccttcatggcttggtcactattgtagaaaagcccaaccatcccctccacgtacctattcccggctgatgattccccacagcctgatggcatcttagccataaaaagaagatttcacatccaggagcccacggtcagccaggtcatcaggaggacagagggaatgataggtcaaacaagccatggctctctgaagaatgtccacgtggcttccactaccagtgctcaccaccaggtcaaaaattccccattcggagacaagactactctgggccagcgtgttgatcgccatggtgtagcggaagtgg

SEQ ID NO: 325069 - DNA, 593 bp, Homo Sapiens
ttgtcctgggaatatggtaggttggtgatggtgaaattcaggtagaagtgctgggtgctggagctgcttgttggttgataaactgatgactccatttctgtcacataggatgtccaccaactggtaggtggagcccagccaatggaatgaggcattcagggtcttatctagaaagacttgctccaccaggctggggtccaaattggaggagaacaatgccttgacagtgaccaacacggagtccatcgtcaagttggtgaccaggcagaagcggaatgtgtcatgtagttgactgcctttgtagagtgtggtgaccttgtcctggatgtccctcagcagggtgatgtactctgaggatgtggggtctggattactgaggttccagttgacaatgtggaaatttatctggtactcgccccggattgataaattctggggtgcatagccattgatgaagaggctatccctgtccaggacatagaagcccagttgggtgacaccatgggtcagctgactcagctcccagtaaagctgctgtatgtccagcccggggcccacagggtcagggtggtaggtgcaggtggtgtccacac

SEQ ID NO: 325070 - DNA, 734 bp, Homo Sapiens
aaggctcctgaggacagcttgaaactccagttcatacacggttatagaggctacgactgtagaaacaatctgttctacactcaagctggagaagtagtctaccacattgctgcagttgctgtcgtgtataatcggcagcagcactcccagaggctgtacctggggcacgatgacgacattctcagcctgaccatccatccagtgaaggactatgtggctactgggcaggttggaagagatgctgctattcatgtgtgggacacacaaactctaaaatgtttgtcgctgttgaaaggacaacatcagagaggagtgtgtgcacttgatttttcagccgatggaaaatgtctggtgtcggttggtttagacgattttcacagtattgtattttgggactggaaaaagggagaaaagatagccacaacaagaggacataaagataagatatttgtggtaaagtgtaacccacaccatgttgacaaactggttacagttgggataaaacacatcaaattctggcaacaagcaggtgggggcttcacttctaaaagaggaacttttggaagcgttggaaaattggaaacaatgatgtgtgtttcttacggacgaatggaagatctagtgttctcaggagcagctactggagatatttttatttggaaagacattctactactgaagacagtgaaagctcatgatggggctgtgtttgctatgtatgcactggataaggg

SEQ ID NO: 325071 - DNA, 419 bp, Homo Sapiens
gcagaggggcactccaccggggcgatcatggcggccggcatcagggcccccactacggcatctctggcatacatgatttgcaatgctgtaagaatatgcgataaggcctgctgtttggccaggtttccatccaatgacaagagaatcttggcaagagaagggtgatatggcttagaattacttgcaccacttattttattactggcagcagaagaattgacatctgaaggcacgcctaaataggaagcacctaaagggtcccttgcagtctggaagaggacgggctcgtggacagagggcgtggccacatccatagttgtccacgccacactgtgggacgacccacaagccacgcatgtgatcttctgaccttctaagccttgcacgagcgtgggcttcctgttaaccgtggtcgtgcc

SEQ ID NO: 325072 - DNA, 677 bp, Homo Sapiens
gcctgggggtggtggtggcctcagatgaggtagtggcaggcagatcatcagcccacgttggctctggagccttatcatcttcatcctggtctctggtgacactcaatgactcagaaatttctttttgaggctctggagtagattcactgagttcttcccctgacatcccaaatccaggttgaggtgacgatgaaccaaaaatttgaacgagataggaatcaaaatcctcacaaattttttgaaacaatttttgcttcagggtgtcttgcagggtaaagaaatcatcaaactggtaaacatgctctgggtcagtagcaattagattcatttctttgtggaatatttcaaagttgggatcatttttcttcaccacccctatcacaaatatctccacattggtgtcactggcattcttcaccacctctgtcagtttctctttatcacgagaatctgtctgtccatcagtgatgaccaaggccactttttttacacctggccttgcatcttcaaacatgtcgttggctgcttgcagagcagtggctgtgtatgtgccttcccccagatactgcatgttgtccacagccaacttgaagtcatccttgctggagaactgcttcaaattagccaccttctccaccttatggctatagttgattatgcctatgcgggccgtggca

SEQ ID NO: 325073 - DNA, 377 bp, Homo Sapiens
  misc_feature (189)..(280): n is a, c, g, or t
aggtaataattgggaaaagtcctgattccagttaccgatccagtgtaatggaatccacaagaagatccccataagaaacaaggtgcctggatttcctcggttgtgttccgccttctttcccaatgcccatcaaccgcctcaaagacactggttgtgagtagatacgagtgcttttccaattaaaaaacnnnnnnnnnnnnnnnnnnnnnnnnnnnnnnnnnnnnnnnnnnnnnnnnnnnnnnnnnnnnnnnnnnnnnnnnnnnnnnnnnnnnnnnnnnnnatatttgagtatgttggtagggcttcaaacacaacttcttgtgcatgtcttaaacattggtaaaaattcctgatctaaatttattttgtagacttaa

SEQ ID NO: 325074 - DNA, 668 bp, Homo Sapiens
tctgagaatgcagcgctttacttcccccaaagtgactctgtggctgggggccagaagatggagtgaacccagcagtcagaagtccctgagggaccccaaccctgaacatgaacctgaacccactctggacacagtggatacaatagcactgtccctctgtggtggactggctgacagccgggacatctccctagagaaattcaaccagcacagcgtctcttaccagggcctcaccaaaaaccccggacttttggatgacccaaacctagtggtgaaaatcaatggaaagcattataactgggctgtggctgcccccatgatcctctccctgcaagccttccagaaaaacttgcccaagagcaccatggacaagctggagagggagaagatgccccggaagggtgggcgatggtggttttcctggcgacgcagggacttcctggccgaggagcgcagtgcccagaaggagaagactgcagccaaggagcagcagggggagaagacagaagtcctgagcagtgatgacgatgccccagacagccctgtgatcctggagatcccctccttgccaccctccactccaccctccactcctacctacaagaagtccctccgcctctccaccgatcagatccggcgcctgaacctgcaagaaggtgccaatgatg

SEQ ID NO: 325075 - DNA, 692 bp, Homo Sapiens
catcagccgagggctgctctcccagagcctggagttcaactctcctgccgacaactacacagtgtgtgaaggtgacaacgccaccctcagctgcttcatcgacgagcacgtgacccgcgtggcctggctgaaccgctccaacatcctgtatgccggcaatgaccgctggaccagcgacccgcgggtgcggctgctcatcaacacccccgaggagttctccatcctcatcaccgaggtggggctcggcgacgagggcctctacacctgctccttccagacccgccaccagccgtacaccactcaggtctacctcattgtccacgtccctgcccgcattgtgaacatctcgtcgcctgtgacggtgaatgaggggggcaatgtgaacctgctttgcctggccgtggggcggccagagcccacggtcacctggagacagctccgagacggcttcacctcggagggagagatcctggagatctctgacatccagcggggccaggccggggagtatgagtgcgtgactcacaacggggttaactcggcgcccgacagccgccgcgtgctggtcacagtcaactatcctccgaccatcacggacgtgaccagcgcccgcaccgcgctgggccgggccgccgtcctgcgctgcgaagccatggcggttccccccgcggattccagtggtacaaggatga

SEQ ID NO: 325076 - DNA, 261 bp, Homo Sapiens
cggccagggctggcggctgcggcattttgtcagctggttgtggtatgaacgggaggtgaccctgctggagcgatggatccaggacctgtgctcaagagtggtgctgaggattggcagtgcccacttctatgccatggtggtatcccaagggttactttgtccagaacacagactttgacttcttcagctacgcaggactgctgtgttctctgcttctatacacgacaccccccacctacatcgatgacgtcaccgtcacca

SEQ ID NO: 325077 - DNA, 861 bp, Homo Sapiens
tgatagcatgaactgacttttccttgacgtagttgcttcgtaggataccttttttgttagaggaatgcagacctagagtccatggctcctttctctgttccaaccgggttatcttgttagatgtagacactgcacttcccagggagaccacgttcccaacattctccttcctgaaatcccggtagaggtccctttgggcaggaatctgatgcacactctttctgtaggaaaagcctctggccacgtggacatctttcactggttcctgggacccagcaggaagccgtgtggttgtcacttcctgatctagggtattccattcatcagcaagggcaggaacccagggagaaggccgagcattcttgggtaagggccgacgttctcgctttcggttcagctgttcctggtgtcctgagtggaggcttccaggttcctcccgagacaccgccctgggttgggtctccacctgctctggctggaagtctgccacctcccacgctgctccaagtggggagtgcttctcccggtgcacgggactgctgacctgctgtcttagtcttccagtctctttctccaaatgcactaccagggccaccgcttcctctccactttgcggacactgcttctgtgcccaagcctgaatcttctcgggtaaaatggtgagaaactgctcaatcaccagcagctcaagtatttgctccttggaacgcatttctggcttcagccaccggcagcaaagttcccagagtttactgaaagcttcatggggtccagtcacatcctcataacagaattgcctgaagcatttgcggaaggtctcaaagggatccgatccttccagaatgggctctgatgcccact

SEQ ID NO: 325078 - DNA, 671 bp, Homo Sapiens
cgtggtcacagcgggccagggtccactctgagctctcagcagcgtccctgctggggtcatgcaggcgcagcagcagcggcacgattctctgcatcaccagcttccgcagggggccgcggagccccagccggagcccgctccggccccgtcgcaccagagtcccaaggagcccgacggccgaggcgcggattgagtcccgtgtgtcgtccagtagcggagggaggcgcggtcccagctccgcgctcaggagccgcacaggcgcccggggccgcagcaggagcctcctcagggcgcccagcgctgcacccacgagccgcgcgtcgccttcgcccagtgcgcccaggagcgccggcagcagcgtgctcacgtgccgcaccttcctgcgattcagcgcgaggtggcccaggcccagcaggcccaaccagcgcacagtgggttcggggtctccctgccaggtgaggagtcgctccaggatgacctcctcccgcaggagccgtgcggtgggccggctctgcaacagccctgtgaagaaggccatagccgtgagacgctgcgggtcgtccgcgctgcgaagccgagggagcaagtctgcgaagaggcctcgcaggtggtggtcggcatgtgccaccatagcactggccagcagcaggacgccctccaggtgggtgtgg

SEQ ID NO: 325079 - DNA, 618 bp, Homo Sapiens
cttcaaggtgcccaaggagatgttcacagtgggctgctgtgtctttgcattcctcgtggggctgttgttcttccagcgctccggaaactactttgtcaccatgttcgatgactactcagccaccctgccactcactctcatcgtcatccttgagaacatcgctgtggcctggatttatggaaccaagaagttcatgcaggagctgacggagatgctgggcttccgcccctaccgcttctatttctacatgtggaagttcgtgtctccactatgcatggctgtgctcaccacagccagcatcatccagctgggggtcacgcccccgggctacagcgcctggatcaaggaggaggctgccgagcgctacctgtatttccccaactgggccatggcactcctgatcaccctcatcgtcgtggcgacgctgcccatccctgtggtgttcgtcctgcggcacttccacctgctctctgatggctccaacaccctctccgtgtcctacaagaagggccgcatgatgaaggacatctccaacctggaggagaacgatgagacccgcttcatcctcagcaaggtgcccagtgaggcaccttcccccatgcccactcaccgttccta

SEQ ID NO: 325080 - DNA, 538 bp, Homo Sapiens
ttttccgggctgagagagactgccttagtggcaagcatttctgttcaggtagagaattagagaagtttctctcttcttcttctccaagagccatctggctggatagcttttggtggatatttcatgagaggtaccagccaaacaaggagctccagaataatctgtttgaccggatagcccagcactatgccttacttttgtttcgtgtacccaagtcccactctgaagaggcgctcttaaaaaggctgccatcacttctcagcaaagccgtgtacaccagcttctgttgctgctttccacagtcctggttcgacacgcacgaattcaagtctgacatctgtaacacaatgagcctgtggatttcaggcacctatcctagcccacagagctatgacagctgggactactcggaactagacccagagcgattccgcagagaagaattaatgttgtacagaagaagactgacaaaggggagagagttttctttgtttgctggtaagagagccttctcccagaagccagcccaagagcaaaa

SEQ ID NO: 325081 - DNA, 570 bp, Homo Sapiens
agggcagggggagatgctgagaccacctggggctggggttcaatgaagcgtggctccaggttggtggccacaaagtcctgcatggcgttggtaaccttgtccccacgcaggcagcggaggactagcagcttctggaactggtctaggtactggtcccagatgccaggcaaaggctcccggtggggctcaaggctgtcgaagatgacccggaattctgagaggtgcttcacgaagtcggaagagaaggaggaaaaggttggcaggttcgagagtgctaggatgtctcgccaagcccggtctgacagccagtccggtgccggattctcagtcatgatcgagatggagcccccagacaggaggtatcgccactcactctggttgattttgccctcgttcatcatgatgcgaacacacagcaggaaggcaaacatcagcttgtgcttctcaaagaggctgcggcagacgttgctgtagaggctgtaggtcaggtagcggttgatgttggagatgcgcttcttcaggtggtctgctctctctgagttggcgatgcccgagaggaagatgttgaga

SEQ ID NO: 325082 - DNA, 483 bp, Homo Sapiens
gctgcgcagagcgaggccgggaggacatcgcagacaggcttatcagcgcctcactcttcctgcgcttcctctgcccagcgattatgtcgcccagtctctttgggcttatgcaggagtacccagatgagcagacctcacgaaccctcaccctcattgccaaggtcatccagaacctggccaacttttccaagtttacctcaaaggaggactttctgggcttcatgaatgagtttctggagctggaatggggttccatgcagcagtttttgtatgagatctccaatctggacacgctaaccaacagcagtagctttgagggttacatcgacttgggccgagagctctccacactgcatgccctactctgggaggtgctgccccagctcagcaaggaagggctcctgaagctgggtccactgccccggctcctcaacgacatcagcacagctctgaggaaccccaacatccaaaggcagccaagcc

SEQ ID NO: 325083 - DNA, 665 bp, Homo Sapiens
tttttaaaggggtggtggtagccacggaggcggaagttttttcggccactaccccgggttaatcgggggtctccacaaccaaggagggagccacggtggtttcaggtggagtaacgggattcccggaaatttccttttcgggtctttccagggaggattcttccaaaaccactgttcttggacttcttcccccgccggtccctgtttccccggggttcaaggaaattttggaaacgggggtgcaaccgggttccccttgggttccaccgggggtcccaccaggaccccaggtttcccacccggaaaccccggtggtggcacccggggaggtggaaccggaaattaaaccggaagttttaccttcctttcccccagttccggtttgtcacggtccattgggagaagagaaatctcctggagacatatggactgccaattgccacagaggtacctgtactgatgcaaagactatagactgtaaacctgaggagtgcccttctccacccacatgcaaaaccggcgagaagcttgtgaagttccaatctaatgacacctgctgtgaaatcggatactgtgaaccaagaacatgtttatttaacaatactgactatgagattggtgcttcattcgatgaccccagcaacccctgtgttctcctactcctg

SEQ ID NO: 325084 - DNA, 548 bp, Homo Sapiens
ccaacctggagctggtggaagtgaggctagacattctgttttattttcggtttctacttctctggttgccacgacagtggtttctggctgggatacttgtggtcttgttggcactccagctgtaaccaaggtggagcctgtttgcactccagtttcagaagtttctttgactcctgtggaagcagtgactgctgtggtaggaggtccaggagcagtggttttgtcagatgcttccttggaaggacctgagatggaagtttctgggattccagtgattccacttgattccacagtggttccttcttggatgctggtgactcccgttgatcctggggtattgcctgatgaaatttctgcttcagtggttccaacatcacctttaaaagttgtggcatctgttctgaaacctccaggtaaggctgttgttccagagcctgttacagtgtagcctgttttacttccagtaggttggcatctccctgaaattatgttggtgatcccagcttccattccaactccagtggcaactccaacgtcagtagaagtgg

SEQ ID NO: 325085 - DNA, 727 bp, Homo Sapiens
gcagcctcggcattgggttcaccctctgcggaaggtattggctggacttgaagtcctcagatatcatatggaatatgtctgacacgggctgggtcaaggccgccattggcagtgtgttttcttcctggctgtgtggagcctgtgtttttgtgcatcgaatggcacagtttgacactgacaccttcctagacacacttactacttatcccatcacgaccctgtgcagtcctcccactgtgtaccggatgctcgtgcaaaaagaccttaagagatataaattcatttgtcactgtctgggtcaaggccgccattggcagtgtgttttcttcctggctgtgtggagcctgtgtttttgtgcatcgaatggcacagtttgacactgaccccttcctagacggaatgatttgtgccaatctgacgggcctagacattacaccaggttcgatggggaaaggcatgctgccctatcttaagagatataaattcaagagtctgcggcactgcttgaccggaggggagccactcaacccagaagtgctggagcagtggagggtgcaaactgggctggagctatatgagggctatggacagacggaagtgggaatgatttgtgccaatcagaaaggccaagaaattaaaccaggttcaatggggaaaggaatgctgccctatgatgtccagattatagatgaaaatggcaatgttctaccacctggcaaagaagggg

SEQ ID NO: 325086 - DNA, 372 bp, Homo Sapiens
gcatggcagagaggtcctgcatgaacagcttcacgtgctctagctgtccctccgtgtcctcgatgtccagggtgggaggctgcccctgatgctggcacactagctggaacaggttgagcacagccatcctgctgcgtcccaggagcagagtcttctccgctgctgtgttctgaatctgaatccacttggattccccgggcagcagctccagcgcttgctccagcaggcgcgcgcagggctccaggcgcttaagccggcgctgcagccgcgcgtgttcccgccgtagctcctggagctgggtccacagacgcagcgcctccacctcccgacggcccgcctggtgcctctcctccgccgccctccgcagcgcgc

SEQ ID NO: 325087 - DNA, 564 bp, Homo Sapiens
  misc_feature (91)..(91): n is a, c, g, or t
ggcgtgccggaggctttgggaagatgcggagggagtaggtgcctggttccagttgcatctggggaggcaagacgatgagaaagtccccacnccaggcgtttttgacccttgagagataattttgggagggagggcgatgacattcagaggtcagagaagggcacttggatgacacaggcttaagcaagtggctgctgcagtgctggggcaatccacagggggaacagtggggcggcgagaggccagggccccggggaaggcgaacagggacctgtggacagatcctctgaaccccaccatggtgggggcgccggtcccgagtccaagcccagtggaatggctcctttgccatgacctcctcacagcactggcggctcacaacagacccggaaacccatccgtgcccaaagcttatccctctggtgcaggaatttccccactcgtaaacaccaatcttttcccagggcccatggaaaaatctcacatttggggccctccaggtcctcctccatgtcgtttgcaaggtacagggccaagaacaggctgctgtgggtatcttcagtg

SEQ ID NO: 325088 - DNA, 624 bp, Homo Sapiens
tgagcgggagctcaaggctgaggtgaaggtccgcatggacctggagaggcgtctccgggaggcagaaggggccttgcgaagcctggaacaggggctgaattccaaggtgcggaataaggagaaggaggagaggatgcgggctgatgtgagccatctgaaaaggttctttgaggagtgcatccggaatgccgagctggaggccaagatgcctgtgatcatgaagaactccgtgtacatccataaggcagccactcgccgcatcaagagctgccgcttccaccgacgccggtccagcacctcctggaatgacatgaagccgtcccagtccttcatgacctcccagctggatgccaacaacatggaggagctaaaggaggtggccaagcggctaagcagggacaaagctctgttctcagcagacgtgccctgagatggctgcagattgaggtttgaaaggcaaagaaagtccccttcagcaggtggctctggaatctcgagggacggggccgagagtttcccactcaatctcaccaggatccttgggaagggaggaactggctgggggaaaggatgcagtcggaaccgcatccttcctggccctgccgccacagggttctttgagga

SEQ ID NO: 325089 - DNA, 665 bp, Homo Sapiens
aggagctggcctttaggaaagccaagatcaggaacacgcattccccgatgacatgagacacctgccccgtgggctgcgtgtgagcttggagctcagtgactggtggtggaaaaacccaacctttacctttagggaactggccgtcatctctgctaggcgggaaggcagtggctgctgtcacgtttcacttcaaagatgaccgtgtttcgaagagggcaaaagatatttggagtcaagtggcgggaaagtactggattcttcgaaggggaggaaaaaaaacagtgtcatcatgaccgtctggggactgctgacctaatgatgcgtccccagggctacagcctgagtttctgcgtcatatgcaccggggagaacattccattgagccacgctaacacctccagcaaagtctgaagtggtaaagggagatcagtgaccttccttggaaacgaggaggagctggcctttaggaaagccaagatcagacaccccttggccacctttttccacctgtttttccgagtgagtgccatcgtcacctacgtttgctgcgactggttcagcaagagctttgtgggctgttttgtcatggtgctgctcctcgctgtccctggacttctggtctgtgaagagtgtgaccggaagactcctggtgggccttcgatggt

SEQ ID NO: 325090 - DNA, 244 bp, Homo Sapiens
ttggcctgttgcaggaagcgcatctgttggggcagctgctggctctggctgagcctcaatgaaggtcacagatcgtttctgatccgcagacggcttcgtttttggttgaatgctcctgcgagtggttgacagccgagccccttggcgatttctgggttcagtctgagttttctgacgtgatagtagaggacgtcttagctgcctcaggcccctcttcctccccagcggctgctgaacaaggagg

SEQ ID NO: 325091 - DNA, 436 bp, Homo Sapiens
caaatgcagaaacaaatcctctggacaagtagtagctgttaaaaaatttgtggaatctgaagatgatcctgttgttaagaaaatagcactaagagaaatacgtttgttgaagcaattaaaatatccaaatcttgtgaacctcatcgaggtgttcaggagaaaaaggaaaatgcatttagtttttgaatactgtgattatacacttttaaatgagctggaaagaagcccaaatggagttgctgatggagtgatcaaaagcgtattatggcaaacacttcaagctcttaatttctgtcatatacatatctgtattcacagagatataaaccctgaaaatattctaataactaagcaaggaataatcaagatttgtgtcttcgggtttgcacaaattaagattccaggagatgcctacaccgattatgtagctacgaga

SEQ ID NO: 325092 - DNA, 629 bp, Homo Sapiens
tccagacactaagattttcccatctggggtgaaggcacaggtgtgggccacatctaggactccctgcttcaggttctgaaggtactttcctgtgttgccgtcccagactttgaccatgcggtaatagccggtgctggccagccacagctcgtcgggagagaaggttatgctcttcaccgaggtgacatggcccttcagttggataagcaggctgctggttgtggtcttccagatgtggatggtcttgtcccaggagccggatgccaggaggccggatgctgaatagcacaggcagctgatgttgccactgtgttcctctagcgcctggtgggatactgctggggtcaccatccgcaggtcccagatgcgtacggtggagtcccaggagccggtggccaggcagttcaccgtgggtgagaagtcgctgctctggatggagtcacggtgcccaactaagaggcgcagcatctggccggactgcacatcccagagcatcacccgcttgtcccagccacctgatgccagctgtctcgagtcagggctgaagctgaccgtctccaccctacgttggtgaaacttcaggacccgcagtcacttcgctcttgccacatcccacaggcggacagtgc

SEQ ID NO: 325093 - DNA, 834 bp, Homo Sapiens
gcgtggtctggagaagcctccaggagcaactccaggggcagccactgcttggggctggaggctccaagcaggagctccctcaagaggagctgcgtgaactccctcagcttcctccgggcgggatgtgccttggtgggagcctggagaccctccactgtgctgtcgccttcagctgcggcctcaggactgctggtgttccgggtggactcagccccaacccccttttgggctcccagggggaaggcggctatggccaaggtctggaggaactccggggctcgccacgctgggtcctgggggtaggtgcggtggacgaggctgaggaactgcagcacgctggccgggaaggtctgtgcccaggcaccatcctcagaacctgccaggggctggctcatggtggccttcagcatttccaggaggagcaaggcaccttctgtgcacagcccagcctggaggacttcttcctggtggtgcctctgcaggagccactgaagcatggcatcaaggctgtctttgggcccgtccatcagctctgtgagtggtgtctgcaggaagaaggtggttccgatgaggtagacctctggaatgtggacgtggtgcgccagaaagtcattcaagacacggaacccaggaagcaggcatgggctttgctcaggcagtggtgactggctcttcaggttgtccattacaatatccacgccctcagtgctgcgttccacccaggatcctgcacacaggccatctctaaaccgtgtgcggagggaggggcttgccagaaagtacagcagcagcttcaatgccagcacagtggtgctggcatgcaggtggccctgc

SEQ ID NO: 325094 - DNA, 428 bp, Homo Sapiens
tgctgcctcctcagccaggacatcgatcaggacactgagcctatcatacattaagtcacttttcaaaatcacagacactattgcagtgttgttctgttttatctgaccccaggcctttacaatatcaaccacaaaatcttccacagctgaacacaagaatctggttgcgatgatcactctctgctggggtacttgagtcttcaggattttgttctactcggtggctgcagattctaagtgttggatggcagcagcctcaaatcgtgttacatccatttcaacctgtccttttagcagcggggtttgtctgggagtctcacgaatcatcacactccatctgtctaggatcctcacactagcctgctccactctgttgaggatgtccagaggtgacttgcttttgttccagaatgcaccccagcccagaa

SEQ ID NO: 325095 - DNA, 601 bp, Homo Sapiens
agatcttaaaatccacgatcagatgactgtgattgacaagggaaagaaaagaactttggaagaatgttttcgcaggtgtcaaatattcatccgcttattagtagccctgaagatattctaatggtcacaaaagatgtcataaaagaatttgcagatgtcggcgtcaagttcctggaactaaggagcacgcccagaagagaaaattctcctggaatgtctaaaaagacttatgtggaatctatgcttgaaggtataaaacagtccagccaagaaagacttggacattgatgttaggtattttatagcagttgacagaagaggtggccctttagtagccaaggagtctgtacaacttgccgaggagttcttcctttctgtctgagggtacagttcttggccttgacctcagtggagtccctactgtaggacaagcaaaagacttcttggtacctctctttagaacgctcatacagccggtctgaagttagcattgcttctttcatagattccgaaccaaaaaaaggaaacacaaatactcctggatctgcttcctgacagaatcgggcatggaacatttctcaactccggtgagggaggatcc

SEQ ID NO: 325096 - DNA, 755 bp, Homo Sapiens
  misc_feature (451)..(473): n is a, c, g, or t
aagcttccagatgtcatcaacaggtctcagaaagaggacatcggtgtccacgtacgagaagtgagtccacttcctttaaaatcaccggaagaaagagtctctgggcagcacagggtttgaacaatttcttccactcctgagggtttccaacagaaaatgtgatggggtagattctgtgctcaaacttctttgtatatgagtcaggccactggcgtaactgcttatcaaactcgggcttcagagagtcttcagtgaagatgtggaattggatcttcctgtggctaaaaagcacagctgatttgagcatgaccagcgtctcctccagccgattgccacaggccaccacagccaggtggatccagagctcgggtggcagcacagcttggaaactcctgggttctccaggcctcctagaaagagggaaaacaagtgaaagctattactaaactcnnnnnnnnnnnnnnnnnnnnnnnccggcgagtgaatggttagaacatttcaaaacatgatcaggcacaatctgttatattttataaagtgataagcattttgacaattcttcctgcttagagaaaaataccatttattcccatatttatcctggcaatagcaggatgagtcactgtttggactgctataggtgtctgaggctttttctgccagcactcagctttctggtgcctgctggctgcctactggcccatgtttggaaatagtattgctaaacttcgacagctgacacaagggctgtggag

SEQ ID NO: 325097 - DNA, 649 bp, Homo Sapiens
cacggagaaggagcgcctggagagggagaaggcggagcgggagcgcctggagaagctgcgagccctggaggagcggagcgactgggtgggggaaggggaggaggaccacgaagggaagaaggagaaggacctgggcgtacccttcctagacatccagacaccagactttgaaggcttgagctggaagcaggccctagagagtgtcaagcttcccaaaggagagcagatcctagacatcttgggtctgggtgcctccggaccacccatcccgcctcccgccttattctcaatcgtctcctacccggtgaagcggccacctttgaccatgacagacgacctggagcattttgtatttgtgatcccaccatccgaagatatatctctggatgaaaaaaaagaaatggaaatagaatcagactttttggccaccacaaacactacaaaggctcaagaggagcagaccagctcatctaaggggggcaaacagaaaatgaaagaaaagatagaccaagtcttcgagattcagaaagacaagcgtcacatggccttaaacaggaaggtcctttctggggaacctgctggaaccatatcccagctgtcagatacagacctggacaacttcaacgggcagcactccccaggagaaatc

SEQ ID NO: 325098 - DNA, 660 bp, Homo Sapiens
  misc_feature (21)..(21): n is a, c, g, or t
  misc_feature (57)..(57): n is a, c, g, or t
  misc_feature (257)..(257): n is a, c, g, or t
aagaatctgacaacctggggnatctgtccattgggctgggtggtgcaatttataggnccttttaatttgtccttttgacacaaagcttgactcatggaaggtctgcagttgttagagaatcagatagattaagctctgacgttgatttctcggctccttagaaaggatccctccaaggatggccgcctctccacacccgggctgtttctccttcaagtgaattgctgcccagcccacaccagaaggtcttccgctcnctctccctttgggtgtcttctggtgtccaatgtgctgctgtcaggactctcactggctacccaaattgactgggcagcctccaaagcggtggagtcctgtgctactgccacctccgccttgtaggatcacagagctgcaggacggcttcacccactacaccctgagctggctccgcttgtggctggtattgggggacagcgtgttctgggcgcctctgctcctgtatatcgcgtcgtgtgtctttgctgtctgtacgctgatagacatgagagccacaggctggacctgcagaacccttgtgccggccatgattggggctggctttggtgcacatgcaagagttcagtgtggcccccatggcacacccctgctcttctcgggcagcttgggccattagctaaa

SEQ ID NO: 325099 - DNA, 614 bp, Homo Sapiens
acctcttgtttcagggccttagaaaccacttcggaggtaatgcactgatccctgttcaccttggccagggggctctcagtggttttagtggggaaaagtgccttcccatccttcaggcatggttcttggggatgcagtctgctggcatgctccatcttttggatcattgcatcctgggtgatgtcatccttccagaacagaccttggggtataatctgctggagcacaacctgtaaatgctggaagactggggtggcaaatccttggaggggccaaagctgccccactcctacttggtcctgaccatctaccttgttccagatcagtggtgttagggctggacctggccagagccttccacatcccagttgaagagaagcagcttccttgtactgtcactcctggacccctgacctctgttcccactaccaggccgctttgtccacttcaagtcttctttaatttttcccttcctccatcaccacttgccatattcttcaacccctgggcctcattcactcttggtaccaacttacagataaccagatttacaaagagcagcctgtagaagttcagatgcgcagaggctcagaaagctgagcacatgggaatag

SEQ ID NO: 325100 - DNA, 609 bp, Homo Sapiens
gaatggggcatttagagacatctgcatgaagggcttcatggcaccatgctcgataggggtgaactttgtttgcctcgtggggccgcgcaccctgcttcagggcccattcagtgagttcaatgtacccacaaaaagcagcaatgtacagggctacccttttctgatacttgagtactggtccttcttttgataagtagcgttgttttttcagtttttgtccaaggagacaacccatcagaaattccttccatccatcccagacatccaagcgaagtgttgtgccaatatcagtctggtagtccttgagggtgttgcaatcatacatctccaggccccttggggttcggagacagtagacactcacggggaggccacatctcagagttagccagtgttctcatatcagacactgttttatcaagaagggaaatgctctccattactggcattgtgtcttgagttacagcattgaacacgtatagagtaggcttgtgttcttccttaacaaagcatttgagagttgaacagaaagatattccaacatcagcaagactccaactgtcctttagagcagctccagcatacattaactccagataccgcctgcct

SEQ ID NO: 325101 - DNA, 1025 bp, Homo Sapiens
tttgaggagtaataatttaatcagaatatattcctttttgacagtttagcaataaacatatgacccttccttctttaaaaatgaagaacaaaccgagagcccagcgccaagcctacagagcggcaagctcagccaggcgcgccatcctgcggagctggctcccgtgcacggggctgtagcgcccaggactgcccaggcctggctttgcggggttgcttccagccacgctgtttctccccggactgtagctgtgagggccactgagatctggcagctgagacttgaaccttcctttcaccgcgggactgggccaactctgtctgtccgagggtgagtagcacaggacagcactcttccatctgtgcacggccgggaactgatgggggtcgacgtctgcacattcaagagcggccaaaacatcctgatcgcgttttgatggctcctctccaaaaaggaagagccgcctggccggttccctggtgacctcgagctgatcctcgtgcctggggctgctgggactcaaggacattttagcgatcctggctgacatttcactttctgtcctcctgtggccattcccgagttggtctgcgggagaaggctctaacaagtctctttctactgcattgattcttgaagtcaggatctgatctttagtttttgtactttcatctggtgtcttggaaacgctacgtcctatattttgcaaattcagtttatcaaactcaacagtcaaatccgagacaggtggcagatgggcttcctccccacggggggcctttggtctcttgcccgccagggtcctgctgtgattcagaggatggcagagcccatttctgctgctgtgtggacctcccggctcggcggcttctatgaggtctgcctcctgctccaaggggaaggcgctgcacctcgtatgtccaaaagcaccgactgtgggcgggctgttatttcgagctgcattttgccgatttattatttcttccaagctcatgtcatcttcatctagaaacgccctcacggaa

SEQ ID NO: 325102 - DNA, 503 bp, Homo Sapiens
ctcctggtgagatccccctgcgttaccccaggtcctacaggcttgctgatgaggaggaaatggaagacttgctgcaggctctggtggtggtctccctgtcctccagatctcttctgagtgaccagatgggctgtgaatttttcaacttgctcataatggagcagagccagttgctttctgagagtcttcagaagacacgtgaattattcatctactgctttccaggagtcaggaagacagccctagccataaagatcatggagaaaattaaggacttgtttcactgcaaaccaaaagagatcctctatgtttgtgaaagcgactccctaaaggattttgtgacccaacaaaccacctgccaagctgtgaccaggaaaactttcatgcaaggggagtttctaaagattaaacacatagtgatggatgagactgagaatttctgcagcaaatatggcaattggtacatgaaggctaagaacatcacccatccaaaggcgaagggg

SEQ ID NO: 325103 - DNA, 647 bp, Homo Sapiens
tccggctccggttccttctccatagggatgcccttgaggctcacactgtgtgacatgaggtacagctcctggaactgccggtcaaacatctccaccacctggccatacagcacagagatcacattccggtccgtccgcgcggccgaccacgtgaagctgtaggagccgcacacagcccggtctccatccacaaacatgaacttctgggccagggcacccttgaacttggttgccgaccgcgtgaagaactcagttcccccgctgctccgcactctgagattcttgaggtgccccaggtgcatgcaggcccgctcacacatgtgcaggaagtacttgacgttactctcatccacgatgatgtacacggccactttcctcttgaagccggcgtccagcaggtccttgaagatgtccacgtcggtgaacatgtccatgaccacagctatcaccttctgtgcctggctgatcatcttccgcaccacctctttgatgtgggcctgcccgtctatggggggctgcatgtagacgctagcccgggtcacgccgcggtaggcgatggtgtcgggagaacggctctcagagtgaccccccataggcttgcgaaagcacggcctggccaccaccccacctccaggccggggacatct

SEQ ID NO: 325104 - DNA, 524 bp, Homo Sapiens
gccccacagagtatctggaaagaagatgtacgagagcgaccacatcaggcagtataaagcagacagagacaatgggggagaaaaacagcatgatgacacctcctatataaaccaattttttccagttctcagactccaggattttgtcatatggatagtagctctggtccatcatgaagagaatcatgagtgaggccatgcagcagaggatgaacctgttgcctttggtcagaagggaggtggaagccaagatgcaggaagcataggggcagggtagacccttgtatgtggaggggactccaggtgaataaaagcacaagtggaaagaagcagctgacacatagatgatggccaggatcccactcagaagtccatccacgcctaggagcagagcggaggccaagccgaaggtggtgaagacggcaaagtcattcagctcggctcccaatttggagcatatgttgatgtggctggtcattgccctgactgccatgtctaacaggaagctgaccaggagcatccgg

SEQ ID NO: 325105 - DNA, 824 bp, Homo Sapiens
tagtaatgtcagaatggggctgcactgaccagacagtcctcttcatcctaaactgtgggcaatttggtctgggaagtctcttcttattggaagggtaaaaccatgttaccattgtgaagttcgtctcccacaattcctataattaggttagtccagttcttgctcatagctagagacctcgttgtggctctgcctccttggttcttctataaggccataggtggcctcaaggtcaagacatctggcagaatagaaagcttcacgctgagccatataagcccaggttccgggcagcttgggagatcctgggtgttttcctctggggaaatggatagtaagctggtttgccagacctgtgtgggttctttatggaaagaggacattgagtgctgaattttaagccagattccactgcctttgtttgggtattgcccacctggcatggaagctgggcagcctctgggattccggttccttgctgagtcatctgattggtttcaaacaagtgtgtgtctccttcaggagggagcctttggtcagatcccacaagcttgcccctatgatgtacttgatgactggtgtcctggggggaggtttggaccaaacaatgcatctccaggtgcgtgtgccatggagacttgggggcctgaaggcagccctgggcagcctcctccagcctcccctccacctcagaatctgcctcttccagggacagtgagcttcttctctccttgttaatccaaacagcattgaccatcgattctgcaggagcaggtgtgtttcctccttttggaagcaccaggaggtgggcctgggtcctctgc

SEQ ID NO: 325106 - DNA, 708 bp, Homo Sapiens
cagctcagggaacagcttgctccggatcagagaccagagcacggtggggtcgctgctctgccggctcaggtggtaggacagtgccacctggaggccacagaagactgagaagaggacagggacgtgctgctctggccacggagtcttgatggccccaaggcagaaaccgtagagcagggcagcagccagcaggctgcgggagaggctgaagactgccgtgagcgggctggtggcagctgtgcccccgaagccgtgcatatctatttgctccagcaggtacatgaggcaggtgttgacctggggcaggaggcccaggaggaagacgaaggggaagcacagggtgaacacagtggccacgtctcgggcacagaagaagaaggaggcagagaagagcgtgaggccgtagagggagacaggtgggaagggctgagctgagcccagggcgtccagcagccagatgagcagacagcagatgcagaagtagacaggacggctgtacgcgatcacccagttgtggccgtgcatgggggacgccgcatcaggctgcacgctcttcagcaaggagtactggcaggaggcgatgaccaggcagaactggaagacccagatgtcagtgaagaagcccttgagcagcagcaggtagcccaggaaggccacaaggctgctcaggcccacgccgaagatgttctccagcactccccgcgtccg

SEQ ID NO: 325107 - DNA, 376 bp, Homo Sapiens
gtcatggcttgtcctttgatttgcagaccatttcttacccacatattgctgtggatttctgcaagacttgcttgaatttggagtgggtgaatcattagtttcattaacatttcctgatctggtaaaacagaatccaaatctagttcttgacatttcacagccttactcaaaaacatagcatagtaacgatgtagtggcagatgaaaagtgacttggttaggtgctggctcgtctacgaagttaatagcatcaaaccagtcttgaagagcttcaaggcaatatctaacaacatttcgggtatactcttgagtttccctaactttacaatgtgataaaagcccccacattggctgtgcacaggcctcaagttcagcag

SEQ ID NO: 325108 - DNA, 698 bp, Homo Sapiens
gtctcctcctttcctggatgccaggagggacggctccgacctggatggctcatttcactctctgccaccttctatggactcaagccagacctcagcccagaagtcagggggcaggtgcagatggacgtagatctccagagtgtggacatcaatcagtgtgccagtggcccaggctggtactctaacacacacctgtgtgatctcaacagcacccagtgtgttcccctggagagtcagggctttgttcttggccgctacctctgccgctgccgacctggattctacggggcaagcccctctggggggttagaggagagtgacttccagactactgggcaattcgggttgccagaaggcagatctgggagactgctgcagtgtctgccatgtcctgagggctgcaccagctgcatggatgccacaccgtgcctggtggaagaggaccgcggtgctgcgggccgctgtgcgtggcctgccaggcctgctgcatgctggccatcttcctgagcatgctggtctcctaccgctgccgccggaacaagaggatctgggcatctggagtggtcctgctggaaactgtcctttttggattcctgctgctttactttcctgtcttcatcctatacttcaagccacagtgtattccgctgcatcgctcttcgctggtagcggctgctgggttttgccatggtgtacgg

SEQ ID NO: 325109 - DNA, 819 bp, Homo Sapiens
agaagaagatacacttcttgcccaaggtcattccggatgtcgaggatgaaggcgcccgggtcaatgatgatacatgtgccaaagtcaaagaaaatcaagaaatggctttggagaagacagacaacatccacgacgtgatgtctaggttggtaaaaaatgagatgccgtacctcctctggaccatcaagagggacatcattgactatcacagcctgacctacgaccagatgctgaaccactacgcaaagacagcctccttcaccaccaagatcgggctgtgcgtgaacatgcggagcctgccctggtacgtcccggccaaccccgactccttcttcccacgctgctacagcctctgcaccgagagtgagcagcaggagttcctggaagacttccggcgcaccatggcatccagcatcctcaagtgggtggtcagccaccagagctgcagcaggagcagcagaagcaagcccagggaccagagggaggaggccgggagcagcgacctgagcagcaggcaagatgctgaaaatgctgaggcaaagctcaggggcctcccggggcagcttgtggacatcgcgtgcaaggtgtgccaggcctacctggggcagctggagcatgaggacatcgacacgtcagcagatgccgtgtaggacctcactgaggccgagtgggaggacctgacccagcagtactactccctcgttcatggcgatgctttcatctccgattcaagaaattacttttcgcagtgccaggctctgctgaatagaatcacgtctgagaaccctcagacggacattgacgggctccggaacatct

SEQ ID NO: 325110 - DNA, 1153 bp, Homo Sapiens
tcgatgacgttccacgcaacagcgtgcgcgcccgcccgatgtgtctcgttcgtccctccctctatgagtggccctgtcctttctagtggcccatctttggtattgggacacgttatacacgcacgtcagccgaatgttcaagagcccggccccctgcgcgcgccctgctcatgtacccctctgtcgcctctcaacaggcttttcggggtaagcacttgtcatcaaaggcattctgatgtctttgggcgcgcacgccagtccacgggagctactggccttgagcgtcgaccagtgagcactcgcaagcggtggcccagaagctccgggctgtactgagctcgatgagtgacccggacttgcagatgaggttcacccgggacacccagacgctggtcattcagtgccatgcacaccaaggccttcaattctgagtctgcacttgcgcttaaacggttcatgctctgtcagcaccatgtggatggctgtcagtaggctctgtttgggggtgacaacagtgcctcccgtaacaggaagggcgaaggactgggagagcttccgggctggggattccacataagcacggccgttcttagcatggtagtactttacaaagagctcccacgggtgcatggcctctggggccgaggagaaggctggcagcaaacaagcaataggagccataacaaggctcatccctggggaggaggcatacagtccatgggccagcaggtccctcacagccaccgttagctccttccgcacagccatagtcagctcatccttgcctcccagagagaggtcctggaggttggcagaggtgatgacatggtcatgtggctgctgcctcaaggctagctgcttcactctgtccactgacacctccagcctcttcagcaagggagagtagtctctgtcagcctggaccctctgccacagggttggagggatctggcctgtggcacaaccaaactggctaacagcaaagatctggagcacggccagcgctcgccgcatcaggtgcagccccgtctcccggactttcttcacatcctctgcctttgttttgctgtttcctggaggcgttctgctgctgcctgttctgctgcagcgacgcgtgggtcgacgatatcccgaggattccggaccggtacca

SEQ ID NO: 325111 - DNA, 612 bp, Homo Sapiens
  misc_feature (253)..(262): n is a, c, g, or t
ttcctcttctgttgtcttttctgatttcctttctccttctagttcttgtaattttggcctttcctgaaatctcctccttatagctccttcgctgaagtgcttggtcgtttcagacgtaaccttaatgttacatgccagagctttcccatcatttcctttaagcatcagtttcattcttcaaagggactccatggcttttacaaagtcagttgcctcttgttactgtaagaatgcctcaaatgtctgtaagccnnnnnnnnnncccccaaagctcctgtcagtcatcacttctctgtaggggccaagcataaggatatccacattcttgatcttccccccactttcaaagactacccaaaggatctcttcatatggcttctctttgctagaacatttaggtgcaaaccatttacaggtcaactcttcaaaacatatggaatctgggctcttctcctgctcttcagccccatcactcatcgagggctctttttccttggggaagtgctcccattctcccttggttgttgtagcctctacttttaagtggtttttaaaaccacttagcttgataatcttcccatgaagattcgccttaagggtctgaaccaaacg

SEQ ID NO: 325112 - DNA, 223 bp, Homo Sapiens
ttgcatcctggtgaggtcatactggtgcaggaacttgcagtgatcatcctttagcatgatcctccggagccagtgcttgcataccaccatcttctcccctcggtcatgtcggaaggggcagagtttccctttctcacagagccctttagtgaagaagttgcacacagctgaggccgacttgtacatgccctggataggcaggagcccagtgcccttctgcatc

SEQ ID NO: 325113 - DNA, 170 bp, Homo Sapiens
gcagtacgtggcagggctgctcttcctcatgggaggaaccttctgcctcttttcactgtgcacctgtgtggccgggatcaactattgagctattacgctacccacgctacctgaacggactccctgatgaagtcagccatggctagtgctggtccatgttctgtgcatgg

SEQ ID NO: 325114 - DNA, 304 bp, Homo Sapiens
cagcagttttgccaccactgacaaaatctcactataaacagcataatggagagccgtgttgccatacacatctacgagatttatatcggcactagaatctatcagaatatttgcacaagcctcctgatggcattgtagagccttcatcagaggtgtcctgtgttcgccatcaaggacgtcaagctggcactttctgtctaccagaaatgttactacttcctcatggccattgacacaggcccagtgtagagcagtcctcttctgggcgtcttgtatattaaggtcgatggtcttcctcatggtt

SEQ ID NO: 325115 - DNA, 517 bp, Homo Sapiens
agcagggccaggaagtagtacatgggccggtgcagggcctcctcatggctgatgaggcagatgagcccacagttccccacgacagcaatgatgtacataaagcagaatggcagggagatccagatgtgtgtggcttccagcccaggaacgccattcaagataaagaatcctggggtcaggctggagctgttgtccccagacatgatggctgacaggaggagagcattttatactctttagcagccattgctttctgcctgtattgttattttgttccattttctttatctctgcacatgtggcccatctgaaatgattgaccaagtggttctggagattccaggcagcaggatgtcagagataaatgagctggccaagatgtttttctctgaagttatacaagtttcacataaatatagactttctttctaaaaaacaatttgatcactccttcacggatctgcttggtcttcactccatagacaattggatttaaggtgggaggcagcatcaggta

SEQ ID NO: 325116 - DNA, 762 bp, Homo Sapiens
ctcttcttttgaggacaggaacaatgagactttgagcaggtctgacattggctttcttctactcgataagggttaaaactcttttggcatttacaacagagttgtttgaaataaaccttgttcgttccagaaatgcaccacacgtaagcactctcccacctggtcttacaatctttacagtggaaatagccatattttggttccaaaaactggaagttgggcctccggagcggctcggaggcggcgtctccaggcacctgcttgctcttcgtctcctgagggcacggggcgtctttctcccccgattcctccagctgcccgggctcctcctgcctgtcagctcctgacctccgtgatggtggctgcggctggctggcctccgcagggcccgggagcgccttgctctccgcttcgtccccatctctccgcaggcggatcaagcccctgcggccggaggcgggcgaagtgaccccacaggctggcaggggctcctgggggtctctgccgtcccagggggagcagctgctgagggtgcgaggccccagagagcactgcacagccttgtccacccgcgggctcacctgcacgcccacctccattggtgttgggcttgcacagccgcgggctcaggctggggttcatctgggaaaaaatggccttaaactgcgccctcttgtaagggtcaatgcagtagtcaggggggggatgaggctggtcgaggactaagaagagggaagagaggatcttcctggaagttgggcc

SEQ ID NO: 325117 - DNA, 792 bp, Homo Sapiens
  misc_feature (778)..(778): n is a, c, g, or t
ggatataccacattaaaatatattccatatttattcagaatatcataatcaatgcaaacacagaactctcttctcacctgtaaaagttaagtacaatactatgggctagatacataatatttcagtcgagtcttcagtattagcttgtaaaaacaaaatctacaattatagatatccatcatacaaaatatatatacaaaagcataattgtagtgtagaaagataaagttaacaaaatacaacttatgtaatttactttacacaaaaatgtattctagttaattttttccaagagcttcaccaattagtcgaatagcaatactcttgccttcatctgtttgaatgaccaagcaaagcttccaaatttgcctgcggacttcggtttgaactgcacgggcatgttgatgtaatgctgggctctcaaagagtacttggaatgtttgacatagaatggctctctgggactcaaaaacttcagtgagtgtgtaataaaagaattatttcgcagattgactttaagtgtccgtgattcccccacactagtcggcaggaacctgtacacatcctctggggcataaactccacgagcagtcacatcaagctgcctcaggtatgcgagcagaagcctctgacacagcttgtcttcggggcttaactaaatgatctattttaatgagggaatccgtggaaaggcatgcgttttcaggctcattttctgcttcgatgctttgtccagagagttggaatctcaacgtgtcttcatgtgaggctccttaanagggtgacattcaa

SEQ ID NO: 325118 - DNA, 939 bp, Homo Sapiens
atccttacaccccacactcagggtttcttaacctccctcttcagatgtttgaacttgttcatttttgcagctacagagagaaatttattagtctgtattgccgcctttctgctgttgtggagctggattctctgaacacccaacagtccctcagggaagcaatctcagacagcgaggttgcagctgccaaacaaagacaccagcaagttttagatttcattcagcaaatagatgaagtctggcgtgaaatgagatggatcatggatgctctacagtatgcaagatacaaacaaccagtttctggcttgcccatcactaagctgatagacccctcagatgagcagagcctaaagaagatcaattctacatcatcatcacatatagactgtcttccatccccacccccatccccagagatgcacagaagaaagacagtgagtgattcacagccctgctctgatgaagaagcctgctcagaagtcttcctccccaccaacagtgactacgactccagcgatgccctgagccccagagacctggacctggtctacctatcatctcacgacattgcgcagcagacccttagcggcctaagcggcagcgcccccgacgtcctgcaagtgcacgacgtgaaaacccctctggggccgggccaggatccccagggcgagggcccaaatcccgatcactcatgtgccgagtttctccatagcctgaccctcacggggttcacacccaagaaccacgccaagactgtgtccggtgggcggcccccgctaggcttcctgggaaagcggaagccaggcaagcacccccactatggcggcttcagccgccatcatcgctggttgcgcatccacagcgagacccagtcgctatcgatcgctgagggcatttatacacagcacctgtcccaggcctgtgtctgcccaggagccc

SEQ ID NO: 325119 - DNA, 389 bp, Homo Sapiens
cttgccccagaccaaagggtggggaacttctctgagaaaagtggctgccctccatagcggtctttgctcacttgaaaatgcagatccgaggtatacgtgtccaggttcacaagagtttgatcctcctcctcatcttttgcctcttcttcaggaggcagtggagactttgagcggctgtggtaagcctcctctcggaattcatagtaagctcggccatgttcatccttctcatcccgctgtctctttaccccccgccgctcaccatctgagcctgctggttttgacttttcactatcctggtcatctccctgttcctcggcggccttgtcacccggcacctcggatcccggcgtctcgtccccgctccgctcctcgggttcgtcttcctc

SEQ ID NO: 325120 - DNA, 715 bp, Homo Sapiens
tgaagggccggaagcagctgcgactggtggcagccaaggccttcacggagagcgccaggttcggaggcatcgcgggcagcagcgccctgttgatgctggccgcgcggcattactggaacgcctggctcccactgctgtcctcagccgtctacaggaagaaggccaagggtgccctgaagaggctcatcggcatcatcaacaagacagaggccagaaagcaggagaaaggaaagacgctgcttctgcaccagtggcccacggccgacttccagggtggcgggacgaccgaaggatattttcttccaggggctgaggacgacctggcgctccgtgctgcgctctacggcctgctcttccacagccatgccgaccaggacgactgggagggcggcctcaaggtgctggacgaggctgtgcaggtgctgccaaggacggcccaccgcctcttgatcttcaagcacatggtcatcgtgaaggccaagctcgggcagaatttttcgatggaaatacagaaattcaaggccgagagtgaggactacttggcgcgcatgtggcaccgcctggccctgaactcgccgagcgtgtctggagagctggcctgctacaacaacgccatccaggccttgcagaagcctgagatggagtggcagaaggtggagtacctcatggagttcggccagtggctccatcacagacactttcctctcgaggacgt

SEQ ID NO: 325121 - DNA, 962 bp, Homo Sapiens
ctgtgatgagcgccagcagtagcagagcccccacagagctgcccatgatgatgggaatggcattgtagacctcgtcttcttctagcaccatctccatctgagctctcataaatgcctcctgtcctggaagctgggagtacacggatgtgtcgaacgtaatttcagccacactcacgaccaacaccttcttctgcaatgtctcgcggacccagccgaaactgagattgcccttcagggtgaaatccagctcctcctggacgctgaaggaggggacgtcacagcggaactgcaggcagtcagcaatggagcagtccagcatgggacttcttgaaatctgggtcaggaagtcagaatgctggggaggttttctctctgaaacacaggggagactctgagatggggcctccatgaccacatcccacacagccaccccgttcagcaggacaggaacccagaagttaatgctgatggccagatctcgctggctgaggttattcacacggtatcgatgctcagcctctttcattttcttctcatcggaggttgcaaagttgaagtacttggtggattcttcctgcctgctgatcatggtgtagactgcatacttcaccgggagctccagctggaaggtggccttgctgcttgaagccttattgttctcactgcttgcactggccctcataagcatcctgtctcccagggtggccttgtaggagacatcgaatgtgactatgaaggtgccgttagagccctcatggaagatggggtggttgacactgcagcggctgcttcttaggccctcatcctcagtgggcactgtctcacatgccaggcgcagggcactctgatggggctgcttctgggctcctgacacccgtcggtgcgacagccctgctggatagtagaggctgaccacggttccgtaggaatcctcacctgcgttccacacagtcacaatcacg

SEQ ID NO: 325122 - DNA, 814 bp, Homo Sapiens
catcccttgaggagtttattaggcgaccttggtctacactctcaggagaggagtgcaccagaaataaagccggtgcctggagtccacctggagccaggcgcggggcgctgcacttaggttggcagcagcccgttagcgcgcagctccagcagcggggacagcgtgtagcgcaggcggcgcagcgtcgtctccgaggtgaggctccagagccacgcggagacggcgccggggtccaacagcaccgtccagagcagcgacagccccaggaagaggacggcagcgtcagcagcgcctgatggccagcgcgcgaggaccgccgaacagccgcgtctctcggtccgcctggccatctcctccatgagcgactcggtgctgtactgcactctgcgaagctgcccgtcacacctgcaggactacggtctgctcctggaatatggcccaggcctccgctgtctgcagcgcgtcctgctgcagcttctcctcctgcaaggcgcatttggtctccgccagctccagttcattctgcagcgtcaccaattgggctgcgagttgctgctccgtgctcttctggctctgcagttcccctccgtagtagaagagctgactcgacagctcctcccactgctcctgcagctgcctgctgtgctgctccaagtcctccttgtggcgctccgcctcctccagtcttctgcgcacccgctccgcgcgctcccgcgccgcctcgcgggcctccccttgcagaggctgcgctgcctggcttcgcctccgcagcaggcaccgctcccgctcgctcaggtcctgcaggcgctggttg

SEQ ID NO: 325123 - DNA, 344 bp, Homo Sapiens
caggtaagacatcagcggacccattaatgctcttttgaacattttgctaatttttctcaggtaagacatcagcggacccattaatgctcttttgaacctcagtcactgctatggaaaaggtgaggcagggcagtgtggtgaggaccacacacatcatcagaacaggtctccatcctttaatttttctgtaaatataacgtttcttgtgcaggataacttttacaggaacccagatcagtagagtcactaacgcaacataggcaatagaacaggagatgatcagccagtattgtgtgttgtcagatctagcccttgttccttggtaggcggtggcaaactgttct

SEQ ID NO: 325124 - DNA, 743 bp, Homo Sapiens
agttcagagacaaacagaggtactggggaacctcaggatgagcagggcatgcactaggggactccaaactcatgaggaggcagtgtgggcagagttggctggtgtctcctgcatcagaggtccatctggtgggcagagagagagatatttctgatggggaccttggattcagcgtaactggtggcattaacaccagtgtgccatatggtggtatctatgtgaaatccattgttcctggaggaccagctgccaaggaagggcagatcctacagggtgaccgactcctgcaggtggatggagtgattctgtgcggcctcacccacaagcaggctgtgcagtgcctgaagggtcctgggcaggttgcaagactggtcttagagagaagagtccccaggagtacacagcagtgtccttctgctaatgacagcatgggagatgaacgcacggctgtttccttggtaacagccttgcctggcaggccttcgagctgtgtctcggtgacagatggtcctaagtttgaagtcaaactaaaaaagaatgccaatggtttgggattcagtttcgtgcagatggagaaagagagctgcagccatctcaaaagtgatcttgtgaggattaagaggctctttccggggcagccagctgaggagaatggggccattgcatctggtgacattatcctggccgtgaatggaaggtccactgaacgcctcatcttccaggaggtgctgcatttactgaga

SEQ ID NO: 325125 - DNA, 309 bp, Homo Sapiens
cacctcctctgacactgccgagtccgatcggagaggggtcaccgcctccttcagcgaggaggaggggggcggagcccgactcaggatcatggattttcctggtcactttgaacaaatcttccagcagctgaactaccatagacttcatggccagctctgtgattgtgtcattgtagtggggaatagacactttaaagcccaccgctccgtgctggcagcatgcagcacgcatttccgagccctgttctcagtggcagaaggagatcagaccatgaacatgatccagctggatagcgaggtggtgacagc

SEQ ID NO: 325126 - DNA, 766 bp, Homo Sapiens
aggcagcctgagggtctggggtcttctcacccgctccaggaaaaccctttatctcctccacctgccaggacacccggcccctggcggctttcaggcgccccctggtcacctgcagctgcccccgcacctcctccagccgcccagccaggtcacgcttggcctcctgcagctgctggttctctgaggcagcctcctgatgtgtgctcctgaggtgggagagctgggcctccagctccctctggccctcagctagtcgctgcacctcgcgctccttggcctctaggacgtcctgcatctgggaggtgagggccaggccccgagagtcactctcagcctgcagctgctgcttctcctggcggatctgctgctccatctcctcatagagctgctggacctcgcggtggtggtcagagtcacgcttcctcagggtcagctccagggcctccttgtccgcctgggcctcctgcaggcggctggtcatcttggccagaaagcctgccaggttgcctgccagctggggctcctcctgccgcagctgcccccacagttgccagatttccatctgcttgggaagtaagtgtccagtccccagctgctccatgaaggcaaggaacgcctccttctcctcagcatccgcctcctccagagctgggaagctggtggtagcagatacccgcttagagggcagtggcttccttctgcggagcctgtgggggctctggctggagcccaagatgtttttgagtccagaagctgaattcttcaa

SEQ ID NO: 325127 - DNA, 746 bp, Homo Sapiens
ccaccagccccaccgtctcggtgacagaggctggaaccgatgggctgctggccctgcgtgcttgttcaggaccccccacggcaggcgttgcggggggtccggtggctgtagagccagaagtcccaccggtgcccttgccgacggcctcctctctgccccggaagctgctgccctgggaggagggcccgggcccaccgccaccacctctgcccgggcccttggcccagcctcaggcctcagccttggccacagtaaaagccagcatcatcagtgaactcagctccaagcttcagcagtttgggggctcctcggcagctggcggcgctctgccctgggcccgaggaggcagtgggggaggcggagacagccaccacgggggagccagctatgtccccgagaggacctcctccctgcagcggcagatactctccgacgactcccagtcctcactcctctccaagcctgtcagcagcctgtttcagaactggcccaaaccacctctgccgccactccccaccggaacaggggtctcccctacagccgctgcggccccaggggccacctcaccctcagcctcctcctcctccacgtccacccgccacctccagggcgtggagttcgagatgcggccccctctgctccgccgggcccccagcccctcgctgctgcccgcctcggagcacaaggtcagccctgcgcccaggccctcgtccctgcccatcctgccttccggacccctctaccca

SEQ ID NO: 325128 - DNA, 693 bp, Homo Sapiens
ttttccagatgccggataccaggggctgggtgcctgcacactggcatcctgtggtccgagatgcgctccgcctgatggggccccaggaggtgtgtcttggggtgggagagcccttgcccggtgacctcgaaggatcgggacctccgcttccttctctttgcctccagcgactcctcccttttcttgcccaggcttttcttctggccacgcagccagggcctggggccgtccccatgatgtccgactgcccgggacggggcctcgcccgtgctgctggacaggttgtcctcactggcagcatgctgtagtgtggggctgggcggccgcttgcaggccagtgggcctggtggccgcgcatcgtcgccctcgctcagtgagtgcagggacaggctgctgtgctctgtcgcgggtgccagcaggtgtcgcccctcggttcccagggcccgcgagcgccgccgggcggccttcacccagatgcacttggtgccagtcaggatctccttcctctctttgtgggacaaggggatctccgacaggttctcactgctgtcaggggaagagttgatccagctgcccaggctgtcctgagccggggcctcctgcgtcaccaggctgccgagctggatgggaggtggggtgggcacagaggaccttaaagggtgccaggccccagtaccagccttgaacacgtgg

SEQ ID NO: 325129 - DNA, 463 bp, Homo Sapiens
ttgtcacggcacacagtcctgctcggtcacattggagctggcagaggcccctcggtttgagtccatcatggaggacgtggaggtgggggctggggaaactgctcgctttgcggtggtggtcgagggaaaaccactgccggacatcatgtggtacaaggacgaggtgctgctgaccgagagcagccatgtgagcttcgtgtacgaggagaatgagtgctccctggtggtgctcagcacgggggcccaggatggaggcgtctacacctgcaccgcccagaacctggcgggtgaggtctcctgcaaagcagagttggctgtgcattcagctcagacagctatggaggtcgagggggtcggggaggatgaggaccatcgaggaaggagactcagcgacttttatgacatccaccaggagatcggcaggggtgctttctcctacttgcggcgcatagtggaagcgtag

SEQ ID NO: 325130 - DNA, 715 bp, Homo Sapiens
gaagatctgcatgtatgcccggctctaccaggactctgtgctcgtgcacacgcggtctgttagctgccctgcgcctgaagttcgaggtgtgcaaggagctgagggcccacctggagctcctgcccaagacaggctatatccaggcacagtcgtcctactccgtgcagctcaagttcctgccgcgacactccctcccggaggacgcagggaggtattttgacaaggagacccgagtcctggaggccccgatgaccatatgggttgccgaccagaacaagccagtgggattcaccgtgcatgccattgtcaccacctcggacctggagctcagtccctcggaggtggattttggctactgcaccatctatgaggccatcaggacggaaatcagcctccacaaccactcgctcctgccccaggagttcgggttcgtcaggcttcccaagtttgtggacgtccaacccaacgatgggtttgggacgatcctgcccctggaaacgctgcagttctgtgtgatcttccagcccaccaaggccgaggaacacagattccaactgacctgcaagtctgagatcaaccggtgcttcaagctgtcttgccgggctgtaggcgtccacccacccctggagctgtcccactaccagatcaagtttgccgccacggccctatacaacacctccgtggctacagtgtacgtcatcaactctcacctgag

SEQ ID NO: 325131 - DNA, 364 bp, Homo Sapiens
atccgcttccagttccgcttcttcctggtctacagcctgacccccgcgcccccggcgctcaacacctcctccccggccccggccgacccgtgcgccccttgctcctacctgcagttctacgagggcccgccgggggcgcctcggcccctggggtccccactgtgcggcctgaccatcccggtgcctgtggcatcctccggaccctttctaggcctgcgcctggtcacgagaggccgccagccccgcgtggacttcgtgggcgaagtcacgtctttccgtctgggaccttgtggtgcctacttccgctgccagaatggcaggtgcatcccctcaagcctcgtgtgtgacccctggggcatggaca

SEQ ID NO: 325132 - DNA, 1334 bp, Homo Sapiens
agtatggagccttaacaaaagacagtcctcccatagagcctggacttctcacagctgaaacgtttttcttggaaatctctgagaccaggcagtcttgttctgaagattcacacatatgctaccaaggctacagtggttcgtctgcctgttgggagacacatgctactcttcaacgcatactccccagtaggacactccatacacatctgcagcatggtgtcatttgtcattggggatgaacacgttgtactgcccaactttgaaccagagagctgccgatttacggaacagtctctgttgattatgaaagctattggaaatgtgattgctaatttcaaagataagggtaaactctctgcagctttgaaggatctgcaaacagctcactaccctgtccccttccatgataaagaacttactgcacagcacttcagggtttttcatctttccttatggcgtttaatgaaaaaagttcaaataacaaaacctcctccaaacttcaaatttgcattccgggctatggttttggacttggagttactcaattcctccttggaagaggtttctttagtggaatggctggacgttaaatattgtatgcccacaagtgataaagagtattctgctgaggaagtagcagcagcaattaaaattcaagccatgtggagaggaacttacgttagattgcttatgaaagccagaataccagacacaaaagaaaatatcagtgttgcagatactcttcaaaaagtttgggctgtattggaaatgaatttagaacagtatgcagtttctctcttaagactaatgtttaaaagcaagtgcaagtctttggaatcttatccatgctatcaagatgaagaaactaagattgcttttgcagattatactgtgacttatcaagaacagccaccaaattcttggtttatagtattcagagaaacatttttggttcatcaagacatgattttggttcccaaagtatatactacacttccaatctgtatcctacacattgttaataatgacacaatggagcaagtgccaaaggtgttccaaaaagtggtgccttatctttataccaagaataagaagggatacacttttgtggcggaagcatttacaggcgacacatatgtagcagcctcacgatggaaactgcgtctcatcggttcttctgctccactgccatgcctctctcgagactctccatgcaattcctttgccataaaggaaatccgagattactacatacccaatgataagaaaattttattcaggtattcggttaaagttctaacaccacaacctgctacaatacaggtacgcacatc

SEQ ID NO: 325133 - DNA, 728 bp, Homo Sapiens
gtcaggggctcatgtcagaggagtgcgggcggactacagcgctggcggccgggaggactcgcaaaggcgccggggaagagggactggtgagccccgagggagcgggggacgaggactcgtgctcctcctcggccccgctgtccccgtcgtcctcgccccggtccatggcctcgggctccggctgccctcctggcaagtgtgtgtgcaacatttgcggcctggagatcgtggacaaataccttctcaaggtgaatgacctatgctggcatgtccggtgtctctcctgcagtgtttgcagaacctccctaggaaggcacaccagctgttatattaaagacaaagacattttctgcaaacttgattatttcagaaggtatggaactcgctgctctcgatgtgggagacacatccattctactgactgggtccggagagccaaggggaatgtctatcacttggcatgctttgcctgcttttcctgcaaaaggcaactttccacaggagaggagtttgctttggtggaagagaaagtcctctgcagagtacattatgactgcatgctggataatttaaaaagagaagtagaaaatgggaatgggattagtgtggaaggtgccctcctcacagagcaagatgttaaccatccaaaaccagcaaaaagagctcggaccagctttacagcagatcagcttcaggttatgcaagcacaatttgctcaggacaacaac

SEQ ID NO: 325134 - DNA, 847 bp, Homo Sapiens
  misc_feature (56)..(70): n is a, c, g, or t
gtgtgagccactgcacctggcctatctttcatactcttaacctttcctccacttcnnnnnnnnnnnnnnnctatccttcacaagcaattgtctttgcataagttgacttaagacacttacaatttgctttcagaaagggttaacttctccttaagtagctggatttctgtatccttctcgtgggaggttaagtgagaatgaaattctttatctctgtttgtagccaacaatgattcgaggtttttaactgtatgtctctcatttgaaagttgttttttcagtaggtctgactctgactttacattttctaattccaccacaaccctctcaaactcaaggtttttcgaattcaattgctgggtcataatatctttgcctgaatcaagtttaatgcaaagttctctaagagatgacaagtcatttaatactgttgctttctcatcttcttgatgtctcagctcttcttctaatcgagacatggcttttgccattgatgagatctgagattcataagcatgatgggcatttatgtgctcttgaatttctttttctaatagctccactctttctcgaagatgtctcctctcagtgtcaatagaaagaagttccagtcgaactgagctgctttctccctcagcttgatgggctttgacctcccagtcttcagcacggttatgaagcatctgaaatctatctaacaaatcttgattttctttttccttggcagccattaagctctcccatcgtgacacctctgttatgtatttatgaactctgctcttcatttcttctttttcttgcactgctgcttccaattccaatgagatttcttgattttctcttgcca

SEQ ID NO: 325135 - DNA, 314 bp, Homo Sapiens
ggaaccagagctgcgtgaccttcagttccctggaggatattcctgactttgcctggaaggtctcagctgtgatgctcctcggaggctggctcctgttggccttcaatgcaattttcctcctgtcttgggctgtggcccccaaagggctgtgcccaaggagaagcagtgttccaatgccaggggtgcaggcagtggcagctactgccatgattgtgggtctgctgattttcccaatcggccttgcctccccattcatcaaggaagtgtgcgaagcctcctccatgtattatggtgggaagtgccggctgggttgg

SEQ ID NO: 325136 - DNA, 485 bp, Homo Sapiens
  misc_feature (384)..(385): n is a, c, g, or t
ggcatgagcgactacacctggccgcttcctgtactctgagaagtcaggtttcttgcccttgtgtcgccacctccagtgccagttgccagctgacggtcctggaagggaagtcgggactctacttctcctctctggactcaagcattgacatcctgcagaagagagcccaggagctgatcgaaaacatcaacaagagccggcaaaaggaccatgcactcatgaccaacttcaggaacagcctgaagaccaaggtttcggatctgacagagaaattagaggagaggatctatcagatttataatgaccacaacaagatcatccaggaaaagctccaagagttcacccagaaaatggcaaagatcagccatattggagaataatatnnctgaccaacttcaggaacagcctgaagaccaaggtttcggatctgacagagaaattagaggagaggatctatcagatttataatgaccacaacaagatca

SEQ ID NO: 325137 - DNA, 603 bp, Homo Sapiens
aaaagagccacatcacaatttgttgggcaaatagaatcatcaaaaacctcatcttctgattcagactcatcttcatcactctccaagctagattcttcttcacttgattcctcactctcctcatcttcatcagcatctccttcaacttcttttttctttacccgtttaatcttcttctttaggaccttcatgaggaagtttgcaaatttattgttttctccaatggctgcttgaaaaccagcatagagtgccttttcttgctcctggagtttggtgatttcattctttttctcttccatctctttaagagtttcatttattttccattgcatgtactgttcctctttgtctaaggaattaacacgttcttgaagtatgttctcctgtttttcaaaattcttcaggagaagtatttcttgaaataaggtgacatggtgcaggtcagataatttcatctgagtatctagttttagtttctgatgtctaaggagacggagttctgcatcgaaagtgacaaccagttctttgatcctgttgaccaaatactgttgcatgtacacgtgtttaatctcgtctctcttcataatttccagctccacatcc

SEQ ID NO: 325138 - DNA, 755 bp, Homo Sapiens
cctgggccccagctcatcctcacttctccagacgaagtcgccaaacttttcatagtgagagttgtagtggtgctggtctcggaacagcatcgaggctgagacctccatcagtgtgttgtaggccatctgctgctcctttccacttgtgtacccattgtacagattgtagatcttgtcagctatttcttctgccttgttgtcatctaccagtggacaggccgtcctcagggtcaccgtgcttagctctgagtgcctccctcgtgtatccacagcatacagagtgaacttgtagagaccgtcgggctccagacacttgaagatgactgagtagatactgacttcagggacctctccatggcttcgaccagctgctacacaagatgtgcccaggccagagagtaagtcatcagcaaaactcaggaattctcctgtgtacaggtcagtgtctgtgtattcatccactttcttatgctgcagaatatagtcggagaccttggtcccaatagctggctgaacatccacccactccaaggagaccacagtactggagggctccactgttggggacagccgcagcaccggctgcagaagggggctgcagttggggagcccattggcatcaaaggcgctgaggtcacacctgcaccagtcatcgatcacatcccctttccgtgagcaccagtaggaactcatcagtgcactcttgaaggcctcctttgtgccattgtcttggatgagggtataaagtggcacac

SEQ ID NO: 325139 - DNA, 405 bp, Homo Sapiens
gttcctgccggctgtattcgggccttggactggactgagaagctacggtggagaccatccatggaaaagaacccccctgatgatacgggccccgtgcacgtgcctttggggcatattgtggccaatgagaaatggcgcgggtcacagctggcgcaggagatgcaagggaaaattaagctcattttcgaggatggcttgacaccagacttttatctgtcgaacagatgctgcattctttatgtcaccgaagctgatttggtggcaggaaatggctacagaaagaggcttgttcgggttagaaattccaataatcttaaaggaattgtagtcgttgaaaaaacccggatgagtgaacaatacttcccagccctacagaagtttactgtgctggaccttggaatggtg

SEQ ID NO: 325140 - DNA, 732 bp, Homo Sapiens
ggtgaacctgcagcagggcttgttggggctgtcagggctctccgtggccaggtgctgggaggcgatctcagcgcacagggtctccagctcggtctcatcattgatgctctcaaacttcttgacgtaattgtaggtgaggatatccgcttcctgcaggtcttgctcagggtccaagggctcgcccaccagcgtcttccagaaggagggcaggaggtccaggggcagcgggacgtctgcccgaattgcaatccccagcagctgccccaggaagtgcagcagctgctcctccccgtaggtgatggggctcggggtcaggatatacttgcccttgttcttattgacagctgagctggggcacagcagcagcagcgacagcgaggaactctgcagctccttacacacctgccacaggaagtggcggaaagagccgctggtgccatggacctcctcgccagtgaagcggatgttgaaggcatatgtggggtcaccgccactggccagcttgacgcagagctgagacgacggcactgaggccagctgcctggcagcctgacagaagtaggagttttcagaagctctgatttcccctcccacaatttccagtgggtccaaggtgatctcaggggccgcgtggtccgctgtcctctgcgcagtggcattcagcactcgattcatcacggtcaccttcgtgtcatagaagatcagccctttggcctccttcagcagggcggc

SEQ ID NO: 325141 - DNA, 366 bp, Homo Sapiens
tgtatgaggaaggaagactgtagttaagagggaatctttaaccagtttcagtgtagtagtgaaaaagtgcttccatctgacactctccgcagtgctctggcaaagactttccaggatgaacaacgtttccagctgggaattatggatgatgctgcagagtgctttgaaaacctcctgatgagaattcacttccacattgctgatgataccaaggaggatatatgtactgcccaacactgcatttcccatcagaaatttgcaatgacattgtttgagctgtagtgtatgtactagctgtggtgccacttctgatccgctgcctttatccagatggacattatatctccaccacttccctttgcaatc

SEQ ID NO: 325142 - DNA, 372 bp, Homo Sapiens
ggctgttgctgcctcctcctatgtgcccagctggctgtggctggtaaaggagctcgaggctttgggaggggagccctgatccgcctgaatatctggccggcggtccaaggggcctgcaaacagctggaggtctgtgagctctgcgtggagggagacagagcgcgcaatctctccagctgcatgtgggagcagtgccggccagaggagccaggacactgtgtggcccaatctgaggtggtcaaggaaggttgctccatctacaaccgctcagaggcatgtccagctgctcaccaccaccccacctatgaaccgaagacagtcacaacagggagccccccagtccctgaggcccacagccctggatttgacaca

SEQ ID NO: 325143 - DNA, 442 bp, Homo Sapiens
tcacctctgctgcgtctaggtccctttggagttcttcaccttgttttccgcatccttctctttttcttgttctttctcttcctcgcctgcagcatcttgggcctcttcatcccacttttcgggctgagatttagtgacttcctctggggccgtggcctcctgtgcggtcggttcttctgtggccggttcctctgcgtctggttcctctgtggcctcctctgagagcttctcctctgcggcctcctccgcgggctccctggccatctcggccaggtcagctggcactgcaggctctgggaccgatgcggcctcctggatcaggcccgggccctcgcccgcccgggctgcggcccctggacccagcctctggggcagcagcagcggggggaggtgccccgagaggttgcgcgcagcagcgtgtggccccaccatcaggcggctg

SEQ ID NO: 325144 - DNA, 282 bp, Homo Sapiens
gcttccgacacagcgcccatgctgccccggggacctcccgaccaccaggcctcagccctgacgtgcccagggtggtcggggcccccgctgctgcctggccggctgctggccgggctcctgctgcacctcctgctgcccgccgcagccttcctgctggtgctcctgcccgcggccgccgtcgtctacctgggattcctgtgccactcgagggtccaccccgctccgggtccccggtgccgcgcgctgttctcagaccgcggctccgcggcgctcatcgtgttc

SEQ ID NO: 325145 - DNA, 733 bp, Homo Sapiens
cggcggcggacgcgactctcgacggcctccgaggagacggtgcagaaccgggtgtcactcgagaaggtgcttggcatcacagcccagaacagcagtggcctaacctgtgaccccggcacaggccatgtggcctacctggcaggctgtgtggtggtgattttggaccccaaggagaacaagcagcagcacatctttaacaccgccaggaagtctctcagtgctctggccttctcccctgatgggaagtacatagtgacaggggagaatgggcataggcctgctgtgcgcatctgggatgtggaggagaagaatcaggtggcggagatgctaggccacaagtatggtgtggcgtgtgtggccttctcacccaatatgaagcacatcgtgtccatgggctaccaacatgacatggtggtcaacgtctgggactggaagaaagacatcgtagtggcctccaacaaggtatcttgtagagtcattgccctctccttctcagaggacagcagctattttgtcactgttgggaaccgccatgtgaggttctggttcttggaagtctccactgagacaaaggtgacgagcacagtgccccttgtagggcgctcgggcatcctgggcgagctgcacaacaacatcttctgtggtgtggcctgcggtcggggccggatggcgggcagtaccttatgtgtgtcctactcgggcctcctctgccagttcaatgagaagagggtgc

SEQ ID NO: 325146 - DNA, 815 bp, Homo Sapiens
gtgtggtctcattgcctgtggatttttccatgaggatgccaagctcagcttcgatctctcggtgcatggagtcattggtaacggtcagaacccacagcagcaggtttgtggccagggtcagcatcatgccacacctagtgaagttggtctggacccgaacacagtctttgcagtgtttccagagcacccaggtctggacgccgatgaagaccatctcgatgacagggaagacaaggtccagctgtgacttgcagcggatgtggctcacatcgtagcccactcggaagatgttgaggcagaaggtgcagctgccgaagagcactagggaaccccgcacccagaggggccccgcgtggggatcttggtagagcacggcgtgtggttggcgggtggtgcttgccacatagtagagaagccaaagcagggagaggaccttcagcgtggccagcaggatccacacgtcacccagagtgacggccaccttgttgaagatcatgctgcagatgaaggcgccacccaggaacaccacattcagggccaggagccccgagaagagttgtccagccttctgggcctgccggtcccgccgcagcagcagagagaaatgcctcaccagccaggacttctgctggggccgggtggcggccgctctctcctcggcccccacatccactcggttctccttctccggggctgcttcagtctcctgtgcttctgaagaaggcatgggtgtagcctcagcaggggctgaggccgggagaggcatcgccgtgggctaaccaccgactgcgggcgctgagcggatcgtccgtcag

SEQ ID NO: 325147 - DNA, 763 bp, Homo Sapiens
tctcaggcacgggggtcttggaagtccccttcttggccaggacagagcgaaaatcgacctgctgggggctgtgcaccttcctctcttcctcagacacagtctttggcttcacttgccgctgcaggttggcacggaaatccatctgctcggctgggatctccttcaggtcgtcttccgatagggtctttgtactcaccttcttccccaggaggtctcggaagtccagctgctccacctcctgctggcggatcgcctcctcagtgtgctgcctcgtctccacgcgcctcttcagcacccctcgcacgtcctcgccgtcttcctcctctagccaaccctgccctcttgctggccagccaggcctcagggacccatagcggtcactaccaccaccatcagcaccaactcctccaccacagaggtcctcgcagctggcaggctccctcccccgtggaagggctctggcagagctgttctgtagcatcagtgacacctggcaactgcattcgccaacccggttcttgagcaggatctcatactggccggcatgccagggctgcaccttctttagaaccagggtgaacacgtcctcattctgaagcacctcgaagtggccagtgtctttgcagagggctttgccatctctgagccagtgcacggtaggaaaggggtcaccagctatggcgcaggagatgaggacactctggcccggggaggctgtcactgagcgaggcttactgatgaaccagggctgggtgccatcgtg

SEQ ID NO: 325148 - DNA, 410 bp, Homo Sapiens
tcactctgggtgctgggttcctgggagccactacggaagtgtttcacatagccagccaatatagcaagatctacagttccaacatatccagcactgtttggggtcagccagacatcagggctcccgcccacatatgcgtgcttttgtgaacgagtgtggctattcactccatggattttgatgacacgtggcaccctgccacccacccttctggggctgtccttcctgtcctcacagctttagcagaagccctgccaaggagtccaaagttttctggccttgacctgctgctggctttcaatgttggtattgaagtgcaaggccgattactgcatttcgccaaggaggccaatgacatccgaaagagattccatcccccttccgtggtaggaacgttgggtagtgctgct

SEQ ID NO: 325149 - DNA, 501 bp, Homo Sapiens
gttgatggaagctctgggagaattcagaggaactatctggaacttatattctgttccaaggatagctgaacctgtatggcttactatgatgtccggcactttggaaaaaaaccagctctgccagcgctttctcaaggagtttacacttctgatagaacagataaataaaaaccagttttttgctgccttactgactgcggtgttaacctaccacctggcctgggtcccaactgtcatgcctgtggatcaccctcccatcaaagccttctcagagaaacgtacctcccagtcagtgaacatgctggccaaaacacatccgtataatcctctttgggcacagctgggtgatctttacggagccataggctctccagtgagactgactcgcaccgtagtggtagggaagcagaaggacttagtccagcgaatactttatgtcctgacctactttctccgttgctctgagctacaagagaaccagctgacctggagtggcaatca

SEQ ID NO: 325150 - DNA, 735 bp, Homo Sapiens
ggccctggaggcttatcagcgagagaagcagcagcggctgaatgaactgctagttgtgattccgctcaagctccaccagatagagtatttggtatttggagaaatacctagcgatctttctggtactttggtcttctctaaccatgccttgagacggctgcaagaacgaatccgtgagctccaggaggaaaattccaagcagcaaaaacttaacaaagaatggagagagagacgtaaacagctcatccgagaaaagagagaaatgacaaaaaccatacacaaaatggaggaaacagtccggcagctcatgatcagcaagtttggccgtgtggtaaatctagaagcccttcaaacgctttctgttaatacaacacttgaagaactgaagatcagaaaacttcgaaaggagctagcaaatgcgaaagagatgaagatgtgggaggaaaagattgctcaaatgcgatgggaactgatgatgaagacaaaagaacacaccagaaagctttatcagatgaatgatttgtgtattgaaaagaagaaacttgattctcggttgaatacactacaggatcagcagggcaatgccttccagggccctcgggaagcagatgttgtggcaagagaggaggtcactgaattgatccaactccaggcggaagggatttcgaacgacttccataaccctcgggaagcatatgttgtggcaagagaggaggtcactgaattgatccaact

SEQ ID NO: 325151 - DNA, 1002 bp, Homo Sapiens
  misc_feature (26)..(26): n is a, c, g, or t
  misc_feature (53)..(53): n is a, c, g, or t
  misc_feature (64)..(64): n is a, c, g, or t
  misc_feature (74)..(74): n is a, c, g, or t
  misc_feature (103)..(103): n is a, c, g, or t
  misc_feature (172)..(172): n is a, c, g, or t
gctaaaagcaggctcctaaacccaanctaaggagaattttaaaaaagctggtnagtgaactgantcctcagagnatctccaaaccaaatcccaacacagtttntccacgtgcctactcaccaatgtctgtttccttgtggttcttgatgtattctgccagctcaaagttgcntgctattatggccacctgaaatggagtctggctgttgtagttttttaactccttatttccgcctcgaaacagaagcactcttgcacagctgtcctggttgtagagggcgcagatgtgcaaggccgtgttccccgaggcattctgggcactcatgtctgccccgtagaacagcaggtgctccaggtgctgcacgtgcccgtacctgcaggcctggtggatctcgtgccagccgttctcatctttgcagcacacagtggcgtgttcgtgcaggagaagctcgcagcagtagggatcacctccgacgatggctgtgtgatacagcggggtgaggccgtaactgtctttataatctggggatgcaccaagctctaaaagggtcttcagggcaacttggttcctcgctcgggcagctttgtgtagggcggtcatcccatctttggcacggaagtccaggtgagctccaccatttttgagagctttgatgacctccacagagtcgtccagctgagcggctaaggtcaggggggtctctccggtctccgggtcgtggaaattgggatccaggcctcggtccagcatcttggtgatcttctccaccaagcgatgctgaatgtgatccatgcatttcttcagattggtcttcgtgtggagcttggccaactgtttctcatcgagactggcttgtttatacacccgcttcttgtatcgaaactccagggaaggaacgccctcacccacgggctgtgggtactcgcgcaggagccgctcctcatccaggaacttgccgtcacgcccattgctggccggctggaacaggccgtagttcagga

SEQ ID NO: 325152 - DNA, 570 bp, Homo Sapiens
gcggtggtcagtaggaaggcgcaggccaggaaggcgagggcacggagcaggatgacctggaccggggacttcacggcggaggagaagttctgtgcgtgggtctggtcggcctcccggcgcttgaactggtggctgagcaacagggcgcgcagctggcggttctggtgcttgatgtagtactccacagccgcttggcacggccggcacagcttgtacatctgctccaggtgatgccggtacacctcgacctcctcgtcatacctgccctcctcgcggggagcgaaggcggccagctgcttgatcttggtggtctggtggtggttgcacctcttgcacagcaggacttggctgctcacccactgctgcggctgcgaagggtcgcgcaggctgggcgcgctgctcaccacgtggttcaggtgctccaagtactgggcggggatcggcttgttgtagtcgccgttctcctggaagccgttgtactgctcgcagtggggacagtcccagcagttgcggaaaggatagggcaccagcgtatcctggttgcagaaccagcaagttgaccatcgtgtg

SEQ ID NO: 325153 - DNA, 763 bp, Homo Sapiens
actgctgggagctgtccagggtttcagccggcctcagctgatgaccctgaaggagaaagcaatacaggtttgggacatgccatcttactggagagaacaccatatcgtctccctggggcgcattgctctggctcttaatgagagtgagctggagcagctggacctcagctccatagacactgtggcttccctaagctggcaaacagaatggaccccgggacaggctgaatccattttgcaagggtacctggatgattcaggatacagtatccaggacctgaagagctttcatttggtaggacttggtgcaaccctgtgtgctataaacatcactgaaatcccacttataaagatctcagaattcagggtggtagtggccagaattgggaccctgctctgcagcacacatgtcttagccgagtttaagaggaaggctgaagttgtgtttggggatcccactgagtggaccagttctgtcttgcaggagcttgggaccattgcagctggattaactaaggcagagctccggatgcttgacaaggatttgatgccatatttccagccatcagcaataaaatgccttcctgatgagatattcaaagagctgtccgcggagcagatcgcctccctgggtccggagaacgccgcggcggtgacccacgcccagcgccggcggctcagtccactgcagctgcagagcctccagcaggcgctagatggcgccaagactcactcctggcaggacgcgcccgctagcgccggt

SEQ ID NO: 325154 - DNA, 665 bp, Homo Sapiens
gtcttctctcaggtggcacgatatcttcccatgctccttttctggaagctccccttttggaggcaagtccctgctcttagtctgtttttcatcacttaagaagaccaggctgccatggttctcctgcttttcatctctacagagattcccctgagatgaatcctgctgtgtccattcaggggtgagggtcagggccacatcttcctctttcaacatcccctgggactctggagtaagcctagaagctaccactttattttctctgcagcatcgtccatgggcaagctcggggacctggagaactctatcttgtaaaggctgggatcccacagattcatgcttgagcagagccttccttagctgaaattggctactttgtgaccctggggctggtgtcaatagtgccatcttgcaacagagcagttcttgcccgtggtcaacacctgaaacctgcggcggcggctcatccagctgcctctccaaatactgcaatagcaccaccacctcctccctgttctctggatgctgctcccgcacccagctctgcagattccccggcaggatgaaagggaactgctccagcaccagcagctccaggatctgctcaaagggtgcatctcaggctgcagccactgtcggcagagctctcggagccgactcagcgc

SEQ ID NO: 325155 - DNA, 771 bp, Homo Sapiens
cgtccctgatggttttgatgcagagggagaccaagacatcattgttttgtagtttctgaaagtgttgggaggcaaaaattcaggtgtctgggggagaaatggaaggccacaaggcagaagaagaggtgctagatgttctccgactgaacgtgggtggctgtatttacacagcccggcgggagtccttgtgccgcttcaaggactccatgttggcatctatgttcagtggtcgctttcctctaaaaacagatgagtcaggggcttgtgttattgaccgtgatggacgtctatttaaataccttttggattaccttcatggagaagttcagattcccacagatgagcaaacccgcatcgccctacaggaagaggctgattactttggcatcccttatccatacagcctgtctgaccatttggccaatgaaatggagacatattctttaaggtcaaatatagaacttaaaaaggctttaacagacttctgtgattcatatggcttagtctgcaataaaccaacagtttgggttctccactatcttaacacatctggtgcaagctgtgagagtagaattattggtgtatatgccacaaaaactgatggaacagacgctattgaaaagcagctgggaggaagaattcacagcaaaggcatttttaaaagagaggcgggaaataatgttcagtacatttggagctattattcagtagcagagttgaagaaaatgatggatgcctttgatgcttgggaaggaaaaggtgttagctact

SEQ ID NO: 325156 - DNA, 782 bp, Homo Sapiens
gatgaatctaatcccatatattacaataaactgcatttgcctccctttattgccaggctcactgaaggagtgtctgcctgcaggtcatttaggcccctctcagtggctacacgcagctcggccaggtctgtctccagcaccacggcctgtctccacaggaggaggaggtcccggggctgccgcaggccccctgaccgggtctgtctctggggccagcgcctcagcttcagctcgtcctgcaggcgctgcacgctgcccgtcatcccggccagctcccggcccagcgcgtcattggccttcttcatatgttccagctgctcccgcaggagcgcgttcacctgccagaggccggtgctcctcttctcggcagcgtccagacggtcaagggcctcctccagatccacgctgtgctccagctctgacctccgcagctgagcctcggtggtctccagccgggcctgcagctgctcgctgaccacacggcacctgctggccagctcatctcgctcggcgctggcctgggccagcaggtcccccagccgggtcagctcctcctgcaggagctcgttctcctcttgcactcgggccatagtggctgtcgtctcctgtacccctgcttggggtggctcctcactcaggctgccggccacgatctcacggatgcgggtgggcacgggggtgggcgaggccaagcgaccttccccacgctcctatctccccagccttgtccaacgcaatccccaggcagcccactctgccctcacatagatgaatctaatccc

SEQ ID NO: 325157 - DNA, 656 bp, Homo Sapiens
ggagacgggaccctctgctttgtcctcatgctgtgctgttgtcaagaaactgagctccggccgagaaccgtgattccaggttcacctattgaaataccattcagttcaaaacaggaggatatgtctgaattattagatgaaattctggtccaggagattttggatctgaataaaacaactcctagcgcaatgccaagtacagcatcaacattatcaacatgcgttacatgctggtattgatgagaattatcaagctggtggttctgagaattaccatgaattattagagaatttacaattctctcctggcattgaggacaaaatttccaatgatgaagccaatgctaatgcaaatctccatggcgatccttctgagaattatcgtgggccacaggtgtctcctgggagtgagaatagtgtttccagtaaagaaaagaattcaaagaacactcagtatgaaaatctatccattctggaccaaatccttcaaaatattggaagatcttcaggaaacattttccataaagagcagcagaggaccagcgcacagaggaggagccgaggcagtcagtgaggccgcagccccagaccccctgcggaggagaggagcctgctagaacccccacccaccagcctccggaacagggcacttgtgt

SEQ ID NO: 325158 - DNA, 453 bp, Homo Sapiens
gccactctcgcagaatctgtacgagtttattgaaatagagttctccgtccaggacaggtattacctctgtgtgtcagtgaccaaaaaggaagaagtaaaaatagtcatggtgaaacactacagaataggtttagatgaaaaatatgaagtaacaaaaaagtggtctttgaacgatctgcagatgattgatggaaaagaagcagatactgacaatccattttttgatctgcacttcaagaaagtgtacagtttggaagcatatagctgtgcttctaaatatgcctttgctcgaactgtaaataagctgaatcatgcatatcttaaaaaggacttacagatcgtgaactttgattctacatacattaacgatgattccatttggtcctccaacaataaggattgtttggtccttatgagaatatgcttttacgctttctatcttgtgtgcttgtc

SEQ ID NO: 325159 - DNA, 692 bp, Homo Sapiens
tggagagcctggcccgcggctgggagctcatgaccatctgcctggcctttttcccgcccacccccaagttccactcctacctggaaggttacatctaccggcacatggaccccgtcaatgacactaaagtggtggcgataagcacgtatgccaagtactgttaccacaagctacagaaggcagccctgaccggggccaagatggggctgaagaagcccaacgtggaggagatccggcatgccaagaacgccgtgttcagcccgtccatgttcggcagcgcactgcaggaggtcatgggcatgcagagagagcgctaccccgagcgccagctgccctgggtgcagacacggctctctgaggaggtgctggcgctcaacggtgaccagacagagggcatcttcagggtccctggggacattgacgaggttaatgccctgaagctgcaggtggaccagtggaaggtgcccacaggcctggaagacccccacgtccctgcgtccctgctgacgctgtggtaccgggagctggaggagcccctgatcccgcacgagttctacgagcagtgcatcgcgcactacgatagccccgaggcgtcggtggccgtggtgcacgcgctgccccgcatcaaccgcatggtgctgtgctacctcatccgcttcctgcaggtcttcgtgcagccggccaacgtcgcg

SEQ ID NO: 325160 - DNA, 660 bp, Homo Sapiens
catgttcccccgggtggacccctgtaacatcaatcaacaaaacattgggtatgcagcacactcgtgatgtcatccaccaggagctctttgctccttgccacctttatattagccctgggctgtactatcagctatgccgccacgatgcatgcaagtgtggaagctcctgcctgtgcaatgctcttgcccactatgcctacctctgcggccagcacggtgttcccattgatttcagaactcagatttctttctgtgctgtggtgtgccagaagggcatgctgtaccatcactgttcctcgttctgcctccattcctgcatttctctctcttccccggagcagtgcagtgatgactgtgctgaaggctgtaattgtccggaaggcaaattctatgaagacactcttaacttttgtgtacccatattccactgccgttgtcattataggggcagtgtttatcaacctggagagctcatccccacaccctcgggcttatgccagtgttcaaatgggactgtgaaatgtgatgaattagcaacgccctctgctgttcacatctgcccagagggaaaagggtatttcgactgcaggtttcctgaccctgaattaccagctggtggtgttaattgtgagactacatgtgcaaacctagccatgaact

SEQ ID NO: 325161 - DNA, 740 bp, Homo Sapiens
gtccccatcatccagaccttcagcgagggaggggactatgcggaccaagttgtcttcaaagtgcacctgcttcttcttggccagggtttcggctggctccaggctcagctccatcagggtgttggggggctggagggcactgggcttcttagtccccttcaggatactcttcatgtggatgaaaagggagctgggcccctccttgagggccccatggaaagtgtaggtttgctctgtgtccccagagccggtggtgctcacagcgctgctagaggggtctgtgtactgctctggggaggccagcacctcgggggcagctttcctcttcttccgcttgctcagaaggaagtaggccaggccggtgatgatgagcatggagcctgggatggtcacgtgccagaccaggaccgggtggaggaagcaggccaccgacagcagcaggtaggccaggaacttctggaagcagcccagccagtgggctttctcccttactctgtctgccagggaccctggttgacactggaagcagatggccagcagctgagccacaaagtaggccccttcacatatggagacagcggctcctgtaaacctgcaggtggagacaggtgagggaggctggcgcctctgtcttcctttgctttcctgagggctgtcttctcacacgtggcctcctgacatcacatctacagccaatggactcacctggattcccccagacaacattcaccacgggctgt

SEQ ID NO: 325162 - DNA, 612 bp, Homo Sapiens
gaagttgttcctccgcaaggaggtgttctacccacgggagaacttcagccatccctactacgtgaggctcctctgtgagcagatcctacgggacaccttctccgagtcctgtatccggatttcccagaatgagcggcggggggtgaaagacctccccccaggcttggaggtggaccttctcttctcctacaccggcacgccctggaagttgttcctacgcaaggaggtgttctacccacgggagaacttcagccatccctactacctgaggctcctctgttagcagatcctacgggacaccttctccgagtcctgtatccggatttcccagaatgagcggcggaaaatgaaagacctgctgggaggcttggaggtggacctggattctctcaccaccaccgaagacagcgtcaagaagcgcatcgtggtggccgctcgggacaactgggccaattacttctcccgcttctttcctgtctcgggcgagagtggcagcgacgtgcagctgttagccgtgtcccaccgtgggctgcgactgctcaaggtgacccaaggccccggcctccgccccgaccagctgaagattctctgctcatacagctttgcggaggt

SEQ ID NO: 325163 - DNA, 699 bp, Homo Sapiens
gttgaaacgtccaactgtacccttcaatccagcgtttgagaaccaattcccagagctcctgaatagagacagcctccaagtactccttcatacactgaaactcattgtggttgattctatattctttcaattcattggctaggattgtgagttttaaaggactcaggtctggttttttcctcaacgcctgtgtgctctgttcgaaggggtccatcatgggaatggagagatgctttctaaagatgtttaattttgtttcttcatctcctgtgctaatgagttccactgtcctcacatccgggcgggcacacaacgacttgtaggacaggctggaagagacagtgctcatgataaatttgcaatgaggggagagtgagtgtggcagccaggaaaaatctttcaccttctgacctgaaatcccataaatgccaatcagttcttcaattccatctagtacaagtatgcatggctttaaactgatggaagcaatgaatacttccacaagaaatgagaagaccaagccatctgagtcttcgttgagaatatctgtttcaagtctgagtaccgtagtttctgtactgtaattctgtgatgaagtaatggatcacagacatgatgtagctgctttcacaggtgctgcccacaaaatgaggaatcaacaacatgctcggatgtctctttttgaagtattaacccagt

SEQ ID NO: 325164 - DNA, 361 bp, Homo Sapiens
cgccgcgggtgtgctgggaccggtggaggaggacagcgaggattagacgccgggaagcacttccccaacatcgcgagagaacccatcatcgcgtgcactctcatcccaggagggagagaggagctgccgagtagaaagcagactggctgcagggacagaagacaccaagggcaccctcccccacagctgcgcctggacctcctgcgagaagaggaagccttaggggtctttattgtaccctcaagaccccagagagaaacagaagtgctgaggggtcgcaggcaggtctcttaccctctctgggcctcgaatatttatccataggaggctgacggtaactgcctcgcaactcattcatgag

SEQ ID NO: 325165 - DNA, 547 bp, Homo Sapiens
gacgtagaaggcacggtttttctgtgaggagcaaagattctttacctacgcattttacaagaaatgtgcagaaagccattgataaatatacctgcttatccttgtcatccttttcctccagcggaagccgtacacccacgggagcccacacctcttggtctgggtcggccacacagagctctaccaccggctcatccacggagaggggctccgtttattcctggagagatgacgaatttgacgaagccagttcacagtcagtgcagcggttactctgggaggtggaggaaatgttatttgaagggaaagtgaaccctcagacccagagtctgctggccgaatgcggggagtggacaagaagatccctccatttgagagtattaggaagacagctgatcctgcccactgacgaaggcgtccagcatttccagggcagcactcctgcctccgcagtccacagacccccgctcagtgcctgcggacacagcagcaacatcagagagttgtgcatttctggatcttatatagacccagcagcattctcagc

SEQ ID NO: 325166 - DNA, 283 bp, Homo Sapiens
ttgagacaactggaaccggcccatctgcagtgccccagggcctctgtttgatgtgatggagagggtatcggacgactataactggacgtttaggtttactggaagagtcatcaaagatgtcatcaacatgggctcctataacttccttggtcttgcagccaagtatgatgagtctatgaggacaataaaggatgttttagaggtgtatggcacaggcgtggccagcaccaggcatgaaatgggcaccttggataagcacaaggagttggaggaccttgtggca

SEQ ID NO: 325167 - DNA, 488 bp, Homo Sapiens
tgacaaaatgagaccctggacaagaaatgcttccgggtccctttgtgttcctttcattcctaggagagtagaaaaaatcactttgatgttgaagtcttctcccacttccacagcaagtcctttttgcttttcagcaacaataaaagcattgagaagtctagaatactctttgattttcctataggagaatttatataagggagttaaactatataaagtccactgtttatgcagaaggaatgcaaccttttgagggtcaacatcttcctgcaactgcgaacactggggaattttccttcgaggtggagtcaggatatatgctctctgcttcctgaccgattctaatcgtttctgcagaggagtggcacctataaagtaatcttcaggtcttgagtatgtactaggaggtgactctggtgcactgtaagaatccatggactgtcaataaaatgttttgatgacccccccacccattccggattcacgaa

SEQ ID NO: 325168 - DNA, 636 bp, Homo Sapiens
tcagagagccttgctgatgattttacaatccaattgtcagatgggaaacataagatacttaaaaccatttcagtagaggtcatccctgttaatgatgaaaaaccaatgctgagcaagaaggctgaaattgcaatgaatatgggtgaaactcgtattatttccagtgctattctttcagccatagatgaagactcacccagggagaagatttactatgtatttgaaaggcttccccaaaatgggcaacttcagcttaagatagggagggactgggttcctctctcccctggcatgaaatgcactcaggaggaagtggatctgaacttgctgagatacacacacaccggggcaatggattcccagaatcaagatagcttcaccttctacctttgggatggcaacaacaggtcccctgctcttgactgtcaaatcaccatcaaggacatggagaaaggtgatattgtcatccttacaaaaccactcgtggtgtctaaaggtgatagaggtttcttaacaaccaccacgctcctggctgtggaccggaacagaaagtaaaaagagataatgtcatccttacaaaaccactcggggtgtctaaaggagatagaagtttcttaacaaccaccacgctcctgg

SEQ ID NO: 325169 - DNA, 414 bp, Homo Sapiens
cgggtctcgttactcggcggtcaggagcgggccctcccttaggtgcgccccccgccaggttctgcgttagacctgcatcttagcaatgtgaatattgcatccctagagaaggacctggaagagcaagacggccacgacctgggagcagcaggtcccaggtcgctggccggctctgcacctgtcgccatccccggctccctgcccagagcaccatcgctacactcgccatcctctgcgtccacctcgccgctcggttcgctgtcccagcccctccagagggccggtgggctcctcagccatgacgcctccccagcagccgccacccctgcgttcagagccgggcacactgggctctgcagcctcatcctacagccccctaggtttgaacggtgtccccgggagcatctgggactt

SEQ ID NO: 325170 - DNA, 666 bp, Homo Sapiens
acatacagcaacttagcgaagctgccggtgaagatgatcactttttaattcgggcctctgcagcattagaaaaattgaaactcctgtgtgtagaagagaaagaatgttcaaatccatcaaatcttctagaactttacacacaggctattttggacatgacatattttgaggagaacaagctagtagatgaagattttcctgaagactcttcttcacagaaagtaaaagagctgattagttttctttcagaaccagaaattttagtaaaggaaaataatatgcatccaaaacactgcaatttgcttggggatgagctactggaatgtctctcttggagacgaggagccctgctgtatatgtattgtcattctcttaccaaaagaagagagtggctcttaagaaaatccagtttgcttaaaaagtaccttcttgatggaatcagttacttgctacagatgctaaattatcgatgtcctatccagttaaatgaaggagtttctttccaagatctagacacagctaaattactgagtgcaggaatatttagtgacattcatctgctggctatgatgtacagtggagaaatgtgttactggggatcgaagtattgtgctgatcagcaaccagaaaatcatgaagtggatactagtgtgtctggagcgggct

SEQ ID NO: 325171 - DNA, 663 bp, Homo Sapiens
atgtggaatgctccttattaagtgttatatatatttcttcatgctctgtagcctcaagactgtctatacttgagagggtttccgagtttggttatctgattaacttcatcacaaaatttttgcaaattgcttagatgttgatcttcgaggagtttctgagtttcctccagtttaagctggaacacatttttgctagtagccaaggttgccctcatgttttcattcatttctttctcacaattgattttggataagagttgtttctgatgcttgtgatcattttttgataatgcggaaggcaaggcagaatctatagctctttagtttattgttggtctacgtgaaaagggaaggtttacttctgattttatgttggattcctgaatttgtttgaggttctcttctaatggaggaactggttttcgggaaactgctttcctccgctgtgaaagaggaacatgggcacgctggaatttttcagtaacttcttcaaacttctgttttctttgttgagagtatttgttctctaatttggtgttctttttcttcctgttcttttcgtttctcctcaaaagctttttttctccgatttgactccacaaaatatttacgtgctcgatttcgacatattttttgttgctgcagtaatatctggcgctcttc

SEQ ID NO: 325172 - DNA, 711 bp, Homo Sapiens
ttagcttttctgcagcttcatcaccagcagcagagtgatgtgttctgtgatgtccttctgcaggcagaaggtgaggcagttccagctcactgctgcatcctgctcagcttgtagcccacttcttcacagtagcgcctggagcgggagaggccagctcagggtgggaaggtggtgctagagctgggtggcctgaagatcagcacacttaggaagctggtggacttcttgtatacctcagaaatggaagtatctcaagaagaagcccaggatgtgctatctgctgcccgtcagctccgtgtgtctgagctggaatcccttcagcttgagggtggaaagttggtgaaggccccacagggccgaaggctgaaccgagagtgcttacaaccaacaagtgctgcaccaatctctgccagagtggtgacacccagccaccaccctcacaccccactgcccactaatcaaactccttgtcctcttggggcaataagattgaagtccttggggaaggaagaggggccccaggaaaacaaccgacagaatgcagacaatttgtctggcactcttctgctcaagaggaaggccagagcctgcccaactccacaagaaaaaaactcttcaccatcaagccatagtcaagagcctagagagaacaagaatgacactgccaaggatcctacagtgctctccccacccagcttgtacccctctgtg

SEQ ID NO: 325173 - DNA, 758 bp, Homo Sapiens
gtcaggttgactgtggcagaacgggaagaaaggaggcaggagagaagagaagggtcccctccaggttggctcccaggctgccagacactgattggaaggtgacatcagaataggacgagtgtttccacatttctgggtggaactcctggctgaggatgtcctcggggagggtgtcccggagggcccgtttcagggggtcgtgcgtctccagcagctgcaggatgtgactccacacaaaagaacccacctgggtggagagctcgcctgcctgggtgcgccgcacctgggcaaacacctcctcactggggcatctcatcagggccaggtaggcattgatacggatctcagcatcctcctccagggattggtatagacgggagagcacctatctgtctgcagagcaggggacccttcggaaggcctggatggcccccagccggatctcgggtgtgctgcttctcagagatgcacaggcactcaacgtaggggtgagagccatggctgccaagcccgcgttgccgactgccttcagcacaagctggagcttgtcatcatccgagggctcctggatggtacagttctcacccaaggcgtctcccaggatcctcactagggagccgactccaggcagctggccgcagggcccgtccagagaagcacagaggttgtgcaccagggctgagatgcccaggaaggcgccagggctggccctcggggtctggagcagtggcagcagcatgtggaccatagcatctgtg

SEQ ID NO: 325174 - DNA, 795 bp, Homo Sapiens
gtacagaaacgtggtggccaccagccagatagggacaacaccttccatccacatatgggacgccatgaccaaacacaccctctccatgctgcggtgcttccactccaagggggtgaattacatcaacttcagtgcaactggaaagctcctggtgtcggtgggagtggaccctgagcacaccatcactgtctggcgatggcaggaaggtgccaaggttgccagccgagggggtcacctggagcgcatatttgtggtggaatttcgccccgactcagacacgcagtttgtatctgtcggggtcaaacatatgaagttctggaccctggcaggcagcgccttgctttacaagaaaggggtcatcgggtccctgggagctgccaaaatgcagacgatgctctccgtggccttcggtgctaacaatctcactttcacgggtgccatcaatggagatgtctacgtctggaaggaccacttcctcatccggctggtggccaaggctcacacaggccccgtgttcacaatgtacacaacccttcgggatggactcatagtgaccggcggaaaagagcggccgaccaaagaaggaggtgctgtaaaattgtgggaccaggagatgaagcgctgccgggcctttcttctggagaccttgcagctggtggagtgtgtgcgctccgtgtgccgtggaaaaggaaaaatcttagtgggaaccaaagaaggagaaataattgaagttggtgaaaaaaatgctgcttctaacatcctgattgatggtcacatggaaggggagatctgggg

SEQ ID NO: 325175 - DNA, 544 bp, Homo Sapiens
ccctgtttttcctcttggccccagccctgagtgggaaatcattcaaccacccatcttttggtccatctgtccatccactatgtcagcaggtccagcccccagcgcctggtcacatgactgtctcccactcttcctgtagcagggcaggtggccgctcaggcccaaaggcctcctcgtccaggcctgagcaggagccgttgaggaacccatcgtccttgggatgcaagccatggcaaggtggtgtggtctcgaagggtctcccagggctggggtcccctggctttgcatgggccaggcaagctgagggtggccgttggtggtggcagtgggcagtaggcgggggctgaggggcaggccgagtcccacacggggggccgacattggtcacacttgtgtggggacaccatggggccgtagctatagcttgctgtcccgctgcgtgcctttcgcttgaagtccagtgccagtgtccagcggctccaagatttcttgatctcagcttgtacctcgccgttgcagaaacagtatatgattgcaaaaaaat

SEQ ID NO: 325176 - DNA, 337 bp, Homo Sapiens
tgcggccaccccgtttattcctgctgtcctcccacatgggctggatgccatccttgaagagggcgtagtcacagccagaggagagcttgctggccagctggatgtgactgtatagcgcccagaagtcctccacagtgtccaccttggtgaccaggtgcaggttgtcctgccaggcccggctgcggtcattcttgaagaaccacagagcccacctgttctgcaaggggtgcagctccagcttgacttccatggggccccccgtccgggccttccctctcagagacagcaaagtcctgggagagtttggagacttttctcctgtgggcatcctctctgc

SEQ ID NO: 325177 - DNA, 902 bp, Homo Sapiens
aggctctggctgtcaaccagggccagcccccttttgagggccaggctcatggtggaggggcctgcccaggcctggctacgacccctgcctccaggggcgtcaaggtggagttagacccggccaaagtggctgtgctgactactgtgtactgcatggcaaaggaggatgtgcccaatgaccgctgctctgccctgctcgagctgcagaggttcaacctgtgccaggcactgctgggcacagagcatggcgattactacagtcccaggagggtgagggacatgcaggtggccattgccagtgtcttgcacacagaggcctgccagcgcctgaaggcatccccatatgtggggctggtgttggacgagaccagagactggccggagtcacacagcctggccctgtttgccacttcagtgtccccctgtgatggccagcccgccaccaccttcctgggcagtgtggagctacaggagggcgaggccactgctggccagctcttggacatcctgcaggctttcggcgtatctgcacccaagctggcctggctcagctcaagcctccccagtgagcgcctggggagtgtgggcccacagctccgggccacttgcccactgctggcagagctgcattgtctccctggccggacagatcctgagcccccggcctacttgggtcaatatgagagcatattggatgccctattccgcctccatggtggccctagtttccacttggtccctgagctccgggcagcactggaccttgcagctattgacttggcagggcctcggccagtgccctgggcctccctgctgcctgtagtggaagcagtggccgaggcctggcctggcctggtgcccaccctggaagcggcagcccttgcctcacctgtggcggggtca

SEQ ID NO: 325178 - DNA, 580 bp, Homo Sapiens
caggatggcatttctggccccatcccacttccctggtcccatcagtcgaaactggtatgggctgcaagggccaaagtacacctccagggcctgtcgggttggcatttctggccccctcccacttccctggtcccatcagtcgaaactggtatgggctgcaagggccagaagtacacctccagggccaggcggggatcacttgagttttttccccattttctcatcagtgtcatccatcatttcattcgtggttggcagggtacatgagtttcgcgaatactttagcagcccaccaggcttgcaggtctgctgtggggatggcagctccaagggactgaaccaagccaatcacagccaaggttggcttctccattagtaggggggaagatgcctttaaacaaggtaacctcattgtttctgcttttcatgatggtctcatcaaggaaaggggtaggaataatcatagcctgttgcaaagatgacagagtcgatagcctcaaacatggtcccatcctcaaacacagctgaggtttccgtgaactccttcacactgggcttgatggacagagtgccacacagg

SEQ ID NO: 325179 - DNA, 275 bp, Homo Sapiens
acggtggttttggcactcgggctctgccttttccagaaatgccacacaggctttctgtccatagatctgtgcaatcctcttcggtgtgtctccaaagaagtcatgggcgtcgatggcagcgtgcaatgcatggagagttttgagtatattcagatggcctgcttctgctgcaaaatgagctggggtccagcccacactagtaaccaggcagggcctggctccatattctatcaggagccgtatcacctccatttgccctttgattgcagcccaga

SEQ ID NO: 325180 - DNA, 528 bp, Homo Sapiens
ttccctgcagtttatctatggtcacagcacttttatctgatgcatgaatatctatatttcctttaactgttcccagacagatcactttgcctccttttgtttttacatgcaatttttgacccttaacagactgcaagatgctagtcccatgctctgtttcaattttgcaattatcaccctcaatactttgaacttctacacagccagaccctgatgacttgatatctaaacctgcattgacggctgcgttcgaatccagggagacctggcggtcgacaggaccagagactctgatcatctcctccggatgctcgccctacttctcctgcgggccgcctaggccccgcacgccgccctccgcccagcgccatgcgaccagcacagggtcgccatccgggtaggtgaggggccacacgcccaacacgcccaggggggacgggagccgcgcccgcgcacgacccaatgggctcaactgcggtgtccactccttgacagatcggcccgacgcgccaagccgagcgacctcac

SEQ ID NO: 325181 - DNA, 423 bp, Homo Sapiens
aaaagtgcacgtcgaccacatttattaagttcactgtgcgttccctgggacccaaacccgttttcacttcacttcacttgccaaacttcaggggcgcgttcacctccacggacgcctgggggtggatagtatcagacacaatggccatctcctccagatccttgtcgtacttgacctgcaggccgtccaggcgccgcccgccgccctccacgccgcacaccgcgaccagcacgcggtcgccatgctgggtaggtgatgggggtccaggggcctcacggccaggtggcacgggagccgcgcccgcagccgaccgaacgggctcacctgcagtgtccactccttcagagttcggcgcgccgggccaggcggagggacctcagtctccgatccgggccagcgctcgctcccacctgagctgtacgg

SEQ ID NO: 325182 - DNA, 759 bp, Homo Sapiens
tgcacatctctgactccataagacacaggttggtcttaattattcagagttactgtttagtaaataaaataataactctctcaataccaccaccaggctgtgaagccaatttgagtgagcacattttgatggcagcattcaccccgccatcgcgcaccagctacctaacagcatccttcaggctgccctgagtgtagttcacgtctggactgcgcacccctgtgcatcgcctgcttgcacttctcgtcacttccagcagcagctatattacccggggtgggtaggggcccggtgctctagagcataaaatcgccgtgccgtaagttatagggaggactgcagcttcttattgggagcccttttctggaacctgcgacaggcccttgtgggcagggacgctctcctctgccctgggacttctgctgctcggcccaataactctatctacctctttaactgtcctgacatctgtgcctgtctccaatactgtcccagaaaagtccattccaggtgtgaagggaagatggggcctttcctgatatagatcacggcagatcaaaatatcaccaaagttaactccacagaaatggacatcaactctgacctcgtgaggcccgacggggcgggggccacctcttcaatggacaggggcttcttcagctctgcgcaaagagtaagggaaaggttgatttgaattagaagcccactcttaatttcacaagagaatcaaattctctgtcctcttggttaaagactgag

SEQ ID NO: 325183 - DNA, 1030 bp, Homo Sapiens
aatgatacattttcatgcactctcattgcaacttcatagtttctaacatttattcttctggggtccgctttggttctctcatttgacgtcatcttttttggcttcatccagctgattcacattggtagaaatacttttctatgttacttgtagtcatgtgaaacctaatctcacccttggcaatctggactgcatgttttatagaatctatattgtgatttttcatgtgtatattcctgtcatgtttgtttggctaaccaaaacaagagcaaagcaacccaaaggcctaatggggtaacaatttcaagggcaagcacgaagatttcagctggatacaaacactgcatgattgatggtaggctgtgtcatatttacctgtagtcaattatgtgttccttttgctttgtagtgtctcctgagcaaccgcctttattcacgaatcttctgagcgacctcctttatccacgcttactctgaaagaggcagatcccagttcaaaagcagccatgagaaggaaggattcaccacctccaggaaaagtgtcttctcagaaacaaccagctgagaaggctgcaagtgacgagaaagattctgtttcgaatatagccacagaaataaaggagggaccaatatctgggacagtgtcttctcagaaacaaccagctgagaaggctgcaagtgacgagaaagattctgtttcaaatatagccacagaaataaaggatggacaacaatctgggagacataattttgcaaagcacatttaatgtcatgttcagccaagatagacaagaacttctcttccccgaataaatcagcgggggactctttgaagctgcacattctgattcagcaggcctgagattctacatttgtatgtcttctcagaaacaatcggcctggaaggttatatttaaaaagataagtttctcttttgaatattgccacaagaataatgggtggtcagaaatctggaacagagtatcctgagaatctgcccaccatgaaaaaacaaattcagtactataga

SEQ ID NO: 325184 - DNA, 348 bp, Homo Sapiens
ccccggtcctcgtagatggagatctcaataaccctcatcccacgctccacagggtctgtaagtaggaggcctcgaggtgcaaagatcttctcattctgctcctggatgtagcgggaaatcttcttgagaaccttctcatagtgggtctccatgcagaggaagatgaagtaggccgtggcgcaggccaggcagccctcgaggtaggagctgcccccaatcttctcagcctctgcgtaaaatccgttgagggtcttcacagtctcttcaaagagctgccgctcgatccggctgtccagctctggggggaatttggtctggaactgacagatggtcccatcgctgtagtct

SEQ ID NO: 325185 - DNA, 813 bp, Homo Sapiens
attcacttgctaattgaaaattatataactcggaaaaggagatgtatttaccttggatactgcagaaaatctctgtcattattttaagaaattgatgatacttagtactgaataccgacatgcacacgaacgaggggatgtaactatcaccaagaaagatgaatcagaagcccagaaaaatcatttggcccctacatacagtgacagcactctgcaaaatggagtcttctactcttgtgcacgtgaaggtgagccagactcaccagatattcctgagaaatggatggactctgtctccagccactccccattaagcaaatccgccacatgtgaaaatatggaaggaagacatcaggaaatattagtatgtcagaagagagaagacagcaaggcaagcagtattcccaccataagaatcccatttaaggaagtagtaatgacaaattctttgctgaggaatcaccaaaatattgagcctagtgaaaaaattatggcagctgtggtaatccagtcatactggcgtggttacctcatgcgcagacagactcatttctccacaaggctacatactgctgcaacagaaggcctgccaaattcttccatcaagaatcagactattttaaagaaaggaaaaagagaaaatattgtgaatatccgaaaacagagggagaaggctgctattcttattcaggcagtttggaagggctttattttgcgaaagaaactgacaacagctctagaggctattaagaatgaagaatccgatgaagaatacagagaaatagatttagaggattttatatttgatgaagc

SEQ ID NO: 325186 - DNA, 618 bp, Homo Sapiens
aagtccccaccgcccgcccctgtcgggcgtgaccgaaagcgtcgctgaactctttgtttatttgctcttccgagggcatccaccaatcggggttggaggtacaatgcatcctaatgaattcttttccttttcccaaggccgcatgagtacttaagctcatcggttgtgaaaacaaatctgatgaggtatcgaaggagccgtctcccatctttctttgaagaatttacagcctcatcccactgtttgctcgttatgtagacaggatagttgttcaacagctgcttgcttccctctgtcggctggtcagctggctgtggtatcaggagttggttgtggtgctgcagaaccatcttcaagtaatctaaaacggtctggcaggggactgggatgctctctaatttccttctgagctcttcattttcttgttgcagtgaaataacctcctgctccagctcttggcatcgaggacaatagccttcctcgtcctcctcctcctcctcttctggcagtgtagatgaagatgggtgggcatgggattcggacgttgctgggaggactcctcctcctcctcttctggcagtgtagatgaagatgggtggccatgggattcggacgttg

SEQ ID NO: 325187 - DNA, 763 bp, Homo Sapiens
ataggtaccaccaatgagtcttgagctgttattttacttccatcagctgatgctgaaataacttcaggttgaagaatgtatacaccatttaaattgtcagctaccattttgagtaaataaaaacaagctaaaagtttctctgagaataactgacccttttgttgctgagtcagcaaaagttttacagtatttgaggtcagctttatcaaatgccccacatcttgtttgtatcttatatcccaataatggattgataaacactgatgaaaaagttgaaagatacaaagtatccatgcattatgtcttgagcttttgcttaaaacaagatcaagtttaggaaaaggacattttataaattgaagaatgtaaaaaaaatgagtgatacaaactactatgtaatttaacattaaatttttttctgtcacagtttttgaaattcctatagtccacgctgcaagtagacttttctggatagaatgcagttctgtaatggttctatctgtctcctcactatcatcctttgcatgtatcgtatcaaacatagatgcaaattccaatcttccttccttcatactactacacagcacatcatctcttttgttccaaaaaggacataagttgtctggaaagtgtctgccttcgttagtttcttctgcttcaaaatcctgaaaatctgctgcattttcatttattgtttcttctgcctgcaagaatttggggacagtgaaatcggctgaactttcatttccttggtgttctaaca

SEQ ID NO: 325188 - DNA, 820 bp, Homo Sapiens
gaaaagagagagtatttgaacccttaccctgcttctgtgtttgggaatggcttcttccgatgctttactcattgcttggttttctgccttgtgaaggccaataatggtgctcagaaggccctcatgaagtaaaaaggatatcttccaactccagcttctcagaagtcaccctggcgggtttagccagtaaagaaaacttcagcaacgtcagcctgcggagcgtcaacctgaaggaacagaactctaacaacagcgccgtgcccttcaagaggctgatgctgttgcagattaaaggaagaagacacgtgcagaccaggctggtggaacctcgagctttcggcgctcaatagtgggaactgcttcctcctgctctctccccactgctgcttcctgtgggtaggagagtttgcaaacgcccatagaaaaggcgaagctgctggagacccaaaagaagatgaactctatgaagcagccataatagaaactaactgcatttactgtctcatggatgacaaacttgttcctgatgacgactactgggggaaaattccaaagtgctctcttctgcaacccaaagaggtactggtgtttgattttggtagtgaagtttacgtatggcatgggaaagaagtcacgttagcacaacgaaaaatagaatttcagctggcaaagcacttatggaatggaacctttgactatgagaactgtgacattaatcccctggatcctggagaatgcaatccgcttatccccagaaaaggacaggggcggcccgactgggcgataaaggggagtctttctgttcacaatgagacgattg

SEQ ID NO: 325189 - DNA, 302 bp, Homo Sapiens
atacccgatggtcctgtcgatttgctgaatcatcaacttcctgttctctgcctctggcccaaatcgatgtcccacgttatctggctctctgtagcacagagtcacaaagtcaaagtcttcctaggtgaaccagttcatgacagtatcgatgttcccctccgctctgtctcgttgctgtttgggtgaatgtaggactccaccagggaccgcttgacagcctcacccttgtatttagcacctcccctggaataatggaatgatgccgctttgttcccctgctggacggtggagatgctcgtggg

SEQ ID NO: 325190 - DNA, 612 bp, Homo Sapiens
agcatccacctttttacgaaactctttctgtaattttaccttcattgcaacatcagaaagatctttgttttccagctcctgtagctgctctttgtgtttcagttagttcgacttttgcctgttctgcatcatgctctagctttgttactttcaaagtatactgcttgcttacagacttggcatcgttacctgtttttattaattctttaatcagatcttccttcatcttgatgttaactgtaagttctctcattttttgtttggcttcagtaagtatgcgttctgaattctttaatttttgcaaattcaattcttgactctcctggagacaatcaatctttaaatcttcattctccgaatctgacttttgtgtttcatcctgagtatcactcaattcaacaagggaacagagtctggcttctgaatccatgaacgacttctacatctagttccagatttctcttggccttctgattcttcatcatcactgttatcagaaaattggcagtggaggacctcatctggttcttctacgtgatccaacagcatctgactttgtgttcgaaatccagcaaatattcgatccagagagtacataggcggacttgtgtg

SEQ ID NO: 325191 - DNA, 603 bp, Homo Sapiens
agggtggccggcctcaaaaagaacctcacaggccatgctttccatgcccccagccccatggcctgggggtggaggtgcgtggagtccaccctcctctctgtggtttctatactgctttgtcttgcacgacggactccgtctccatcttttgaacaattctgctgttcttctctaatcttgcacgacggcctctgtctcctcgggggtcattgtgtcggtcacgcagtccttgagtttagaggatgtgtttctttccggctccgtgaggtggtatctgttgacagtgtccatgtaggtgtccttgtccttggtcagaaactggttaatgaccgtcataagctgcgggcagagtttcctgggctctgcgagcagcggcagcagcaggagacccagcagcgccagggctcgggcggacgccacgcggttcggggtcggggccggtaggtatgcgggtcacaatgggaaagaatccgacttctttttgaagagaaacatagactccaatgcgggccacactgctacagtaaggagtggaaaggaatgctgtggtttcttttgaggtgggcatgacacgtgctaagtgagagcaaagagttgcttggc

SEQ ID NO: 325192 - DNA, 729 bp, Homo Sapiens
ctttgcatgccacccttcgtctctgtctgaggctcacccgggaccacaaatatgccatgatgtttgtagaactgaagagtagccgcatgatcttgaatttgacccagagctcaggcttcaatgggtttactcccctggtcacccttctcttaagacacatcattgaggacccctgtacccttcgtcatcccatggaaaaggttgttcgctcagcagctacaagtggagctggtagcactacctctggtgttgtgtcttgcagcctcggctctcgggagatcatctacatccttcgtgtccttgggccagccgcatgccgcaatccagacatattcacagaagtggccaactgctgtatccgcatcgtccttcctgcccctcgaggctcaggaactgcttcagatgatgaatttgagaatcttagaattaaaggccctaatgctgtacagctggtgaagaccacccctttgaagccctcacctcttcctgtcatccctgatactatcaaggaagtgatctatgatatgctgaatgctctggctgcatcccatgctccagaggaagcagattaatctgatcctaaacctggggttatgacccaagaggttggccagctcctgcaagacatgggtgatgatgtataccagcagtaccggtcacttacgcgtcagagcagtgactttgatacgcagtcaggtttttccattaatagtcaggtcttgctgcaga

SEQ ID NO: 325193 - DNA, 725 bp, Homo Sapiens
  misc_feature (595)..(595): n is a, c, g, or t
  misc_feature (609)..(609): n is a, c, g, or t
  misc_feature (630)..(630): n is a, c, g, or t
  misc_feature (633)..(633): n is a, c, g, or t
  misc_feature (677)..(677): n is a, c, g, or t
  misc_feature (679)..(679): n is a, c, g, or t
  misc_feature (682)..(682): n is a, c, g, or t
aggatgtttttcattgtgagcatgtagtttgtgaaataacagataatggaaaataatacaattgagttattttcttcgtgctttcatggatttttccattattaacaagcaattttatgagaagagcagaagcatagctatatgtaagccctgtgttatcaaggcaaacaatatataaatagttcagtatctccagtggctatcattatctcagactgatggttgactttgaggcataaagaaaatatttaattgtgttcctgtacactaagtggattacagtgttacatgtttttgaaccattctggtttaaaattgtgacagcatttggagaggctcaggagctgacattttaatgtggaagttatgtggggtttatagtcttgacacatctcccagtttctataaagatcacatgcagtctggtctaataattgatagttttgagacatgctgcaacttttttataagccaggttttttgaatccagaagggatgggacgggacttaaaaataaaatgtcattctcccccaaaatccaaagcttttagtcttggtaactcttgactgcagttgtatttttagaaagtagtgnttaatcgacagtgnttctttctctctttactaggntgntcgctcagcagctacaagtggagctggtagcactacctctgggngntgngtctggcagccctcggctctcgggagatcaactacatccttcg

SEQ ID NO: 325194 - DNA, 522 bp, Homo Sapiens
ccaccgtggagcccatataagcatacatggctttatccataatgatttgtattttcagagttcttttcgatagcatggcacctgaatttatgtctgatttgacaagaatcctgtaggactgatctatatattgagccacaggataattttcttgaaaggaggaatgaccaatagcatcatttttaattcgataaactacatgcttatatgtaggtgaagattccaatggttcaataccataactgatattatctaactgcagtaatcctctgagtccagaacaggtgcgtagtgccacaactgattttggaatgtctgcagcatatccttggtaaaagcaatgaccctttgaaaatgaagaatctgcatacaatgttcctgatttgttgtataaatacaccaggaaatgtgggtgtaaaaatgactgtttttcaagcaggaagtgtatggtttcccctcaattttgatggaataagtggcgtgggcccgcggaggtcagccggcccaggcctgagaggatca

SEQ ID NO: 325195 - DNA, 426 bp, Homo Sapiens
gggaggtcaggcagtacgtcagtgaccggcgcctggggccctaccttgtagctgccatagtggccaccctgggatgggcagcagaagttctgctggtaggtggtcctggtatgggaaggctggacctgcacaaagtggatgaggtgctgggggaggccactgagtcctgggcctggcctgaaatcagcttggtaagaagattccaggggcccctgctggcgcaactctatctcacagggtgcccagcgcaggaaggtgtgccgctgccacaggcgctccgaggtccttcctccttccagattccctgcagcaggcaatagggacctttgtcaaaggaagtacggttgtcgtgcttggagaagaagtgtcgctgcgccggctcctgacatcgctgcaggaacactgctggaggctggggcttggctg

SEQ ID NO: 325196 - DNA, 368 bp, Homo Sapiens
ccaggtgtcctgtcagcagggtccagctgcctgaagataaaacatttgtgaagattaaatgagtgtgctgaaggtctttttctgtggccactgctgtgtaaactctatgggatctttcacttgtgcctgccaaactggctttgagctgggagctgatagaaaacaatgttacagtaattggcaacagtcacagcccagggattgaattggaaattgtcaatagctgtgaaaagaacaatagtgtttgttcccatcaccgtgaacatgaaattggtgctccccgttgttcctgtaaccatggacaccagcttgattctgatgagaaaacatgcatagatcttgacgaatgtgagaatggagaagcctgc

SEQ ID NO: 325197 - DNA, 845 bp, Homo Sapiens
caccccaccccactcatcaggtgcaccccctttcactcaaaaattcacattactttggtaaagattaggtttgtttgtgagtgatgcaaaacttcaaataacagtgatttaagcaagatagatgttgatttctctctcatgtaacagtctacacaggcaggctagagctggtacagcagttctgccttcctcaggcacccaggtgctttttatctgattttccccccgcctcacgggacatagtttccacctcatgatctgaaatggctgcttgtgctccagccatcgttgacattccacccaacagaaaggatgaggggacgacaaggggcacgcccctgccctttaaggcagctttcttgaagtgtcacatgctgctttaccttacatctgattggccagatgttggtcacatgaccatatctagttgtaagggaaggtgggaaatgtagtcttttgtttgggtggccatgtgcccagttactatcccaatgagaccatctcagctgctcgcatatatggtttgaccatctctgtctccctttccccctccttctgccctggtcttgtgggcagtgggcactggtcctggggggcaactgcccaggctgtatcatctgctcagaggagaacggctgttccacctgccagcagaggctcttcctgttcatccgccgggaaggcatccgccagtacggcaagtgcctgcacgactgtccccctgggtccttcggcatccgcggaaaggaggtcaacaggtgcaaaaaatgtggggccacttgtgaaaggggcttcagccaggacttctgcatccggtgcaagaggcagttttactgtacaaggga

SEQ ID NO: 325198 - DNA, 397 bp, Homo Sapiens
ttcattttgggagagaagatatctcgtggtatttctgatatagcgccttgaattctgccagtctctattgcaattgcccatcgcggccctgccaaggtggattgctggaatgaatatttttccaagagcttaaacagagaaacaaggaaccgcgagctagtgagaatcaccatggaaaaccagggcattctgaagaggcttgttgatcgcaaaccccactatgaccgcagggcatctgagatagactggcagaattcaaggcgctatatcagaaataccacgagatatcttctctcccaaaatgaataggttactcaccatggaaaagatacaagagaaggccctaggatttcttggctgctcaggatctcaagacactcccgactggctgaatgct

SEQ ID NO: 325199 - DNA, 1178 bp, Homo Sapiens
  misc_feature (350)..(350): n is a, c, g, or t
aacctgtttataaagcggctggtacggtccggaatctcgggatatcgtcgaccacgcgtcgctggctcgcactcagcagggagccacagcagtggctggagcgtggcatcacccagagcattgtttgccccttctgagtgtgtaccagctgagcaccaacggcacagcacagacacctagtgcctctcggaagtccctggatgccccctcttggccaggagtctaccgcctgtccatgtccctgatggagcagctgctcaaaactctgcgctacaacttcctgcctgaggccctggacttcgtgggtgtccaccaggagcggaccttacagtgcctcaacgcagtgaggnacagtgcagagtctggcctgcctggaggaggcggaccacaccgtgggttttattctgcagctctctaacttcatgaaggagtggcacttccacctgcctcagctcatgcgtgatatccaggtcaacctgggttacttgtgccaggcatgtacctctctcctgcacagtcgaaagatgctgcagcattacttacagaacaaaaatggggatggcctcccctcagctgttgcccagcgagtccagaggccaccgtctgctgcttctgctgccccctcctcctcaaagcagcccgctgctgacacagaggcatcagagcagcaggccttgcacacagtccagtatggccttctcaagatcctcagcaagacgctggcagccctgcgccacttcaccccagatgtctgccagattctgctggatcagtccctggaccttgctgaatacaacttcctgtttgccctgagctttaccactcccacctttgactccgaagtggccccctccttcgggacccttctggccacagtgaatgtggccctcaacatgcttggagagctggacaagaaaaaggagcccctcacccaggcagtggggctcagcacacaggcagaagggaccaggacgttaaagtccctcctgatgtttaccatggaaaactgcttctacctgctcatctctcaggcgatgcggtaccttagggacccggctgtgcacccccgggacaaacagcggatgaagcaggagctcagctctgagttgagcacgctgctgtccagcctctcgcgctacttccgccggggagcccccagctcccctgccactggtgtc

SEQ ID NO: 325200 - DNA, 659 bp, Homo Sapiens
agcgggaccttagccatatccagtgtgctggtcaatttgccagcccagctggggaaatgattcaggtgccagagacagtcacacctggggctcggctgtacactctgctcctcccaggcctagaactccacggagcgcagatgagcattatcagtgcccaggacctgccacacttccctggacctttctccatcaatgagcaaggttggctgcaggcaccatcccagggcctcctaggccaggctcaaaaggtcttccagctgcaaatctcagtgtcctttggacaaaggcaaagctgccaagggatggtgatagtgaaggttttgcctgttccctccagccaggtctccttcctcgagcaggctcagaatatcaccatccctgagaatctggcccccggtagtgaggtggttcaggtccaggcccggggtgtcgacctgcgctatgaaatcctgtctccggtgcccagcccactcttctccattggtcagtgcagacggtgtggtccggaccaccacgcccctagagttagctcgcacctcaggcaccgcggtctccaggctgcaggtgaaggcctttgagcagggccagctgtgggccagtgccaagctcaatctcaccatgaatgtgcagctggtcaacctctggcctccacgctg

SEQ ID NO: 325201 - DNA, 1017 bp, Homo Sapiens
agtacatcctggggactttggctacatcatccttggcgaagtccgaacccacttcatcaagatcatcaacaccagtcactttccagtgtcattccatgcagacaagcgtgtccttcatgagacaggattcagtactgagctagatcgtgtaaagaatctgcctcattgtgaaacggaaatatttgaagtgagatttgacccacagggggccaatcttcctgttggaagcaaagaagtcattctgcccatcaaggtggttggagggccaacagttcacatctgtctccaagccaaggtgaccattccaaccatgactctctctcgtggaaaagtggactttgccacaattcagtgtggacagtgcctggtggaaactattcagctttccaatcatctccaagtcccttgtgaatggttcgtccagagccaaaagcctgttgacaagctggagaaacacatgccgaagtacttaagacagaaactacgcgctgaattaaagccaaagacacggatcttcgaaatccagcccatttctggagtcttggatcctggtgagaagtccaacgtgcaagtgaaattcatgccaaaagaagagaaattctacagccaaaccctggtgtttcagattgcccagagtgctcaaaagcttaccctcctggcacgtgggcaaggtctagagccacgcctggaatttagtccttcagtcctggatctggggccactgctactttgtgcacctggagacgaggccgaggtgatagtgaagaatccctgcaacttccccattgagttttattccttagaatttgatcagcagtatctcatagaagaaaagatcttgcggaagctgaagggctatgattcctacaacaccctgctgctgcctccccgcaaccctggggagaagctgcccccagaactgtacgagtacttcaaagagataaagaagtcaaaagaggagcagatgagggagagatatctggagaatctggcacaggagaatgaagaggaagatat

SEQ ID NO: 325202 - DNA, 381 bp, Homo Sapiens
ttctcccttcctctgagagctctgtggggagtgtgaaaccggagcgctgatggaactggcctcctggagacactcatctccaggaagcagggcaggccaacctaattccctagagggccgaagagggaaaggaggcgtcctatgcttggaaaggctcctcgcagctcggttccactttgtcctcgtaagctgagaaggtgagctccctgggcaagaactggcaccgcttctgcctgaaatgtgagcgctgccacagcatcctgtcccctggcgggcatgcagagcttaatgtgaggccatactgccacaagccatgctatggggctctctttggacccaggggggtgaacattggtggtgtaggctccttacttgtacaat

SEQ ID NO: 325203 - DNA, 1050 bp, Homo Sapiens
  misc_feature (138)..(194): n is a, c, g, or t
gctggcaatgctgtttcactggaggacacggctaagaaggaagtccaccagcctgccaagatgaattgccttgaagggccaggtaagacctgtggccccttggcttctgaggaggagctggtgtctgcctgccagttnnnnnnnnnnnnnnnnnnnnnnnnnnnnnnnnnnnnnnnnnnnnnnnnnnnnnnnnntctggacccatatctggacccagacctagaggaggaagagaatgatcttggggatccagctgtacttggtgctgtccacaacacccagagagctctgcttagctcccctggagtcaaggcccctggtgtgctgggaatgtcacttgcctccttgcattttctgtggcagaccttggactacctgtcgcccatccctttctggcctacatttcccagcaccagctctccagcacagcactttggacctcggctgccctcaccagacccaactctcttctgcagcctgctgacctcgtggccccctaggttcagtcatctgacccagctccaccctcggcaccaacgaatcttgcagcagcagcagcatagtcaaacaccaagtcccccagccaagaagccttggtctcagcagccagacccctatgctaacctcatgaccagaaaagagaaggactgggtgataaaagtgcagatggtgcagctgcagagtgcaaaaccccgcctggatgactactattaccaggaatattaccagaagctagagaagaagcaggcagacgaagagctacttggacgaagaaaccgggttgagtccctcaagctggtaacgccttacattccgaaggcagaggcttatgagtccgtggtccgaatcgagggttccctgggccaggtagctgtgtcgacatgcttcagccctcgccgagctattgatgcggtaccccatggaactcaagagcaggatatagaagctgcaagcagtcagaggcttcgggtattataccggattgtgaagatgttccttcagttactagaaatagaggaaggctggaagtataggcctccccgcccctgc

SEQ ID NO: 325204 - DNA, 304 bp, Homo Sapiens
cgacccctgcagcaaagcgggcctcacgcagctcatccgggaggcagcagtaatgctcgtcctcagctggggacagctcccagcctgcccgctgggcactccagcccttccactcgatgaggtgggccacgcggcctcgggccatggccgtgggctttgtgatgtggtccttgatgctctgcaccacccccactaagggacgaggtggccagggctgccacgttgtagttgccggggaggaacctggagtcggacaggtagccgttggtggtctggaagcacctctggaggaagtggcaggagg

SEQ ID NO: 325205 - DNA, 528 bp, Homo Sapiens
tttttctgggatcagatgcgagggcactgtagttagctgatgaggtgtcatcgatagtgtcacggtcttttaacccaagtgtttgaaggacccagggatccaccggtggcccagcttgttcttcacagttagcatattcactagagaggtttcttttggcatttttgggatggggaatctcagcaggagagtatctttgctctttggattttctcttgcccttcctgaattttccatatgctttggagaactcatcagatgagagcaatttcttggccttttcttcaagacatttaaccaaagcagaattcaggtattgtctgaggtgattattctcttcgtgtaacctggcgagttcttcttccttctgcaccagggtatcttgcagctgcttatttctgtagagctgagaggaaagctgagcctcttcccatgagcacaagtccggaagaggaaaatttgagtcactgaatgattcctgtgcctgtggtgcttgttggagctctctgttgtccaggagaccagcag

SEQ ID NO: 325206 - DNA, 627 bp, Homo Sapiens
tggcaggatggtgctgtattccccaagtgtggtaaccaggggcgccgtcaggcccccgaggcgggcgtggacagaggcaaagcccatccccatctgcctgatctccgtggggtacagctcgccggtaaacaggtacacacagatgaaggagctggccaggcagcctttgcccagcgctgcctgggctgtgcacaggatctgcgtgctttctggcacaaacatgttggcgatcaccatgagccgggccaggatgaggaaggaggtcaccgtggcgcggcggcccacgtaaatcatggtggcggtggccatcagcatggccgggatgttgatgattccaaacagggcctgcaccaggtataggctgagcccacccttctgcaggtccatggccaggccatagtaagccacagagttggagaacctaatcaccatgagacagcatgtgaccttgcggatggccggggttcggacgaggtccaagattgagttggaggtgcagacacttgcaaactctctttggatgtaggagctcatcacctccttggtcagcctttccccttcctgcttcctcccgttcattgcagccaccttctgcagattctgtacagctaactgggacttgccatg

SEQ ID NO: 325207 - DNA, 440 bp, Homo Sapiens
  misc_feature (412)..(412): n is a, c, g, or t
ttgggccaaagtggcttatactgcaatacagcgtcggtatatgagatttgtcacagtttggaagcagtctattccatcaactagccaaaaatgcaaacaccctgaggattcagagaacaatttctttgaagggtttccttcaagatactggctcccagctttcttctttccacaagcctttcttgctgctgtgcttcaagactatgggaggtcccgaggaatcgctgtggatgccctcaccttcacccaccatgtgatttccaacaccactgacaaggatgagaagttctccgtatttatgccaaagaaacttcaacatagtcagggagagcgtttaaggggctcagctttcctcttcacactggagttttacatttttgggtttatttcatcgagggggggcaagatgggnatcgtggaacaggaaattactgggaagg

SEQ ID NO: 325208 - DNA, 577 bp, Homo Sapiens
tgggctccatgtcagccatacaaagtctgaagtacagttgattaaagtcaaattttgtggaggtgctaacggcactgactcatctgtgtaaaagaaaagaatactggaaggaccaagtccttttctagttcttgcggcagcaaaaaagctatataatcgtaaatcggtgaaagctctttccaatattatgtaattatcagaagtaatgaaagaataattttcatttggtccttgtaaagttaaatcataacttattattgcaccatttggctttactgggggatcccatgataagagaactgaggtagaggaaaggtttttaaaagtgttgattattggtgaagtttctgggacatcttcttcagtcttgatgtatagctgggcagtataggtatcagagaatcccttttctgttgatggagtaatttttaatatataatcagtgtatttttccagattatcaaaatatatgcttctctcatatgtaacaagaggtggtctcacatggcgaggagtctgctgtaagatcagtgaaacatagtagaagactagtccgtttggtagaggcggtgggatc

SEQ ID NO: 325209 - DNA, 583 bp, Homo Sapiens
cagcaaaagggcgtcagccgctcctcacagccagcagatcctgtgatgatgtggacaggccctcgcgggtttgtgtagggcatctctcggctgccgttaaatatttggtagttgtaaattggccacagtcgttcatacgagtgctcttgagcccacagctgcagatccactccatatttgtagaaaagatcctccaacccgtacagcttgccttggaggcctttgcggaccttgctttcatgtcgtgtgcagtcgtccagatctgcgttggagcagtacatgggccggtgccccatagtgatgatccacggccgggctgcccggttcttattggctttctggaggtcgctctccagccagcgaaactgcctctgtaccaagtggcggccataatggagaaagaaatagacctcggtggagaaggagatgatgtgggcgggacccagatcccagctgtaccacaggccctcattatcccccggcatgctgaagcgagccttgtagttagagaagttgtagcgttcttcatgattcccagggcatgtcatgtatggcaggctggcagccacgggttcaatgagcc

SEQ ID NO: 325210 - DNA, 467 bp, Homo Sapiens
tttttttggccacccccactttcagcaccggcagactcctgagcaggagcacctggccccgggcccccacggccaggtccatcagtccatcctgggtgaggtcctgacccccactcagcgcctgcccaaaatactgcagcctgggggagagctgggagctggcaatccgctggctgtgggaggggctgatgccggattctgaggctccgtgaaacaggtagacagcaccccggttctcctgctctcccggggccccaatggccacgtctatcagcttgtcctcattcacatcccccaacactgtcagggctgccccaaagcggccccaggggtggccctgctcaccacggagaacagcgtcacactgccactgcaccctccccctaggcaagggacacacggacacctggccccctcgggtctgctcatagtaatggggggccccaatgaggatcaggtcggtgctg

SEQ ID NO: 325211 - DNA, 409 bp, Homo Sapiens
ctttgcggttctgtgccccgggcccccggggccgagcaggggctgataccctgcgctctggtgccttctccttcttctcccctgaggcagtggactcagggggactctggggcacgtcgctgggtgaagactcactggctgaaggactggtctgtccggaagctacacagtctggacccagcccatctgtgctgaggttgtgcccctccccagtggggctctcaggccactcctctggggagctgggaatcacccctgcccctccctctggctctttttccacgtcctgctcctgctcttcgctgggactgcctggctctgcctcctctgcatcctccgcctcctcttttgcatcagcctcctcttttgcaccatgtttggcctcctctttcccatcgggatccttggg

SEQ ID NO: 325212 - DNA, 939 bp, Homo Sapiens
gccagaaaaacctttatttccaagggggggcccatttggcctcctgcagttacccctcctccgggacattgagcttttccttcaccccacaggccaccacggcgaaaaagaactccgggaagaaggtgcggacgtacacggcggccttggggatggggttggccataaacaccttttgctttttcctccgcacggggcgcatcacctcctccgccacctttactgggtgcacgccgtaggtcagcttcctgaaaaagaatttccaaatggaagcttcccagtttccttgctctggatacacgtggtacgaccggatgaaagtcgggctcacggtgctgatgacaacatcgtattcctccacttcggctcggaggcagtcaaagaagcccagggctgcgtgcttggaggcagcgtaagtcgtacggaacgggattccaaacttcccttggatattattcactaacacgatttggcctgttctccgggagatcatgttgggaagcagggctttcgtcaatgtgatggggccaaagtaattggcatccatgatctttttgtcgagctccagagaaatcttatgggcaggccccttcaccttcacactggcattgttgatgaggatgtccacacagccatagcaatccaggacttcttttgccacatctgggacacagctgatgtctgagaggtccaacaggaccagctttggggtgaatgtcttgctggggtcagccacgctgatcaaggcatcatataggttctctagcctctcccagttctttccacacagcaccagccttgccccacctgtgtggaacacccgagcacactccttgcccagtcctgagatggcatcggtgatcaccaccactttgttctgcacagctgactttgaccacagcctggacacctcttggtaaatgatgaggaggccgctga

SEQ ID NO: 325213 - DNA, 485 bp, Homo Sapiens
ccgcgggaaagtccaggaggttgtacagggtcacataagactgactttctgttgtccgcgggaaagtccaggaggttgtacagggtcacataagactgactttctgatgctagcggaggaagagcctatatagaaggcagagcccagaactggcaccagcagcacatccaggtccagggatctcctcttgggtatgaactcttgctcatattcctctactgctgtgtgctgttcccacggttttttgggtgtccctctatggctccagatagccaagaagtcaaagcagctggtgtccagtaggggaaggaaacaaactggactgagcctgtgggcttctcactcactgcagcctggggtgggaaagggggtcttctcctcctccctaaagggcatctggagcacagtggggtccagtcggtacatgtcttcactcagcaggtcttgcaggcacagcgccaggctctccacgtcctgggccaaat

SEQ ID NO: 325214 - DNA, 443 bp, Homo Sapiens
  misc_feature (192)..(192): n is a, c, g, or t
  misc_feature (234)..(234): n is a, c, g, or t
atctcccagcctaacctctttattgtattgatggggaggctaaggctgaaagaagagatgtgacttggccagggttacctagagggttaaaaacccagcttaactggatgccacaccctctcaaccacacttgctgagtattctaactgcatgggttgggtaatatggcactggaaggccctctttgggggncactttacaagctatggctccagatagccaagaagccaaagncagctggtgtccagcaggggaaggaaacaaactggactgagcatgtgggcttctcactcactgcagcctggggtgggaaagggggtcttcacctcctccctaaagggcatctggagcacagtggggtccagtcggtacatgtcttcactcagcagggcttgcaggcacagcgccaggctctccacgtccctgggccatggggaccagcc

SEQ ID NO: 325215 - DNA, 438 bp, Homo Sapiens
ctggcggctcgagcgatttctgcagaggagaaaggtctctttgttcaagctcagctgactctcagcgtgtggagtgttttcagctagggggtcgcatggaagctctccctggccttccctcatctcaggacaaggtgagtttccgcagtgcctgtgtggacgcagggcctcttcagctgccggacgccgtgttggagtgaacttcactggcttccagcctccctgcctccccgccctgctgggtttcaatctcttctgcccgagcacacgttatccacctgtcagagcggctgctgataatccctgtgacatgggcactattggcctttttaaatgagaggtaaagattatccctgcgtgatgacaggaaagcagcgcaggcccgtcctgctctgtggccaacaccgtgctctgtgcggctggcatcctcaggtccat

SEQ ID NO: 325216 - DNA, 658 bp, Homo Sapiens
cattgcaggcagggctcctcagggcccgataggactccttaaatctagttggccagcatcgagaacttgctgccgtggcacagagagcagttggcactgcccgaccctcggcagtgaaaacagctgtcctcgggaatatccccttcctgtgtataccggttttggggtaatgtgctttctgcctccaccaaaggtctatcgtgctggtccctgcctccatagctttcttctttgttcatcagagactcttcctcagcctcctcttccttctggagaattttcctcacaaaatctctcttgtccattggggttcgaatgattttcaggttattagtgtagatgattatctttccaaaatctataataggtaggggcttatggtcattcgccttgtaatcgttgaaccgaggctggccgcctgccaaggtgtaggcattaccctctctaaacacactgatcctctgagcagtcagcttaggggagcacatctggggcctggggacttccccagacccataaacaccatccattgtttcaagagactcttgcagaaaactgtgagggtattcctcctttggtgactgtaattcctgcccatcctcaaagacctgcttcaatactcgaccgctgtaggaggaggagattttaaatcgtactt

SEQ ID NO: 325217 - DNA, 542 bp, Homo Sapiens
aggcctctctcactgtgcagcatgattcagaaagcgtaggcgtcgatgagccggcgcagaggctggagggtgtaggggtgggtctcggatgacgatctcccgggtcaccgggttcacccggtgttactggtagtatctgcgcactgaagccaccacagtcagagcgatcaccttgaacttcccccgggggctgaagtgccgcacttcctccgtcacgtactgcaggaagaatgggtgtgccaagtcctgttccgctgtgcagcagctctggggttgcaccaacagtaatggggagacttagtcagctgccctttattcttgttgttctcaactccattgtcagtcacagctgacagttttctgcttccatagttctcgcagtggacattgaaggtgccagaagggcggggagccagccagcagcatgtacatgatgacgcccgtgctccacatgtcccctccttttatagcccggatgaacctcattcatggagcactccatgatctcagggccaggtaactgggagttctgcagaccttta

SEQ ID NO: 325218 - DNA, 312 bp, Homo Sapiens
tgaccacatgttgtagcctgggccgcagttgtcacctccacagcttcatgcgtcgaggtgggctagtgttagccctgcaggtccaggtgttggacactccaggttagccacacagcaggctgagcaagaagtatgtgaaacaggaagtcaaagaggctctggcacatcacttcgggcaagggggtctccaccttgcactcctggttcagagagcagatgtgcctttctgtgggcaggaagtaactgacccagtccagatgatccaggaacttcttggacatgcttggatgaattacacagccattcttttta

SEQ ID NO: 325219 - DNA, 305 bp, Homo Sapiens
aagtcaggctgctgagtcggcatcagatcactgaagtgcaggctttggtagacctgaggcgagatctgatgcttcatccagccatatggcaccctggtggacaggaacctggtattctgcaagcgttccttgggcttattcgccgctcccacagactttgctcacctgcttgtccctggactcccacttgttccagctgtcctgaatgtcttccagggggcgctctccggcccacggggacatcagggccatcttctgcagcttggcccaagtgtctgcctccttatctgccttcccatgcagag

SEQ ID NO: 325220 - DNA, 856 bp, Homo Sapiens
gtggtgatgcccaggcccacacgggcaggggcagcatccatgttgatccagaaggagacccaggacaggatgacgatgagtaggctggggatgttcatctgaatcagatagtagcccatctgccgttccaggtgatactttacctcgatgcaggtgaatttccctgtgttgtagtgcttggtacaacagcctagatccttctcatcccgcaagataaactggggcagagtcagcccctcagccacttggacagcaggagcatcttccagccactcaaacacgaggtctttcatggtgtagccaaagctctcaagctgcatcgtgcaggtctggatgtccatggggaagttcttgaggtccatcaggcaggacaaaatgagggtcagcctgatgctgtacagcacattcccattcttgaagatgcgcagtaacttgttgtccgtggtcacctcatggaagttggcccctttctcattagcaaagaagaggtctggcttccagatagagtccagcatggagggatcgaggtccagagagtcatcaggatattctcggtaggacaggcgtgggtcattccactgttgccgcaagaagacattcacccggtagtccattgtggtcttggtgacggagctgaaactgttgatgaagatgttgcaggtcacgttcacgggtgggcctttaaaattgggccgaatcctggcatcatatccagatgttcgccccataagtttgtctaggaaatcagagggggacatgggctgggaccccttggatccagatttgacttcctctattgccaaggccaccctgaggaggacctgccctggcagggtccagagaagaaggaaggaga

SEQ ID NO: 325221 - DNA, 280 bp, Homo Sapiens
ggtcgctgggatctgccctctggagctctggagggatggggattcttttgtagtacatttcccagtcgaaggctcctcgcatggcatccccagcttgtgcctcatacccgaagtgattgtggtcaatgacatcgatcatgggacacacgatggttttgtggtttagtgcaatttggttgaggagtgggggcagccagttcacattgacctcgcagtgggagtccaggaatgtcaggacttctcctctggccgtggatgcccccgggagacgggtccggat

SEQ ID NO: 325222 - DNA, 701 bp, Homo Sapiens
aagagcagaagatctttgtttttatgaatatactcttttagtgattctggctcttagggagatgcatgcttcatttcaatgagtttagacagatgatccctttctctgtcagagatgggctgctcttccagcaggatagcacttatgctttggtcaagtttactgtccctggaaactgctgccattctcagtgtgatagggaatgcttccctgaaataggcctccaggcccttgtaaaatgaccccagaaaggcagggctggagtcctggtggggttccccagcagtgatgtgggccaggcagcggatcagcagcagaacaaagcttcccacagaggccaaacattctctcccaatgaacagtgtgttttcagcactggtagaagaaggcaccttggaaggcactgccttgggcttccatggcaggaagatgagaagaaatcttcagggtgatttctggagcatgaagctgggggataaggaggtgcaggatggagaggccatactggtaaaccacaaactccctggcagaaaggtcagtgggttgcacagttatcaactcttccttctgcagtgtctgaggttttagaagatcctgcagagagctctttctgtaaaatttgtgatacacttatttttgcaattcagcttcttccttgtgggcttgggaccagatatcagggttcttcaggatggagaaga

SEQ ID NO: 325223 - DNA, 465 bp, Homo Sapiens
ccttccctcgcgttccgggggctgcactgggggttgcggcggctgcccacgccggaatcggccgctcgggaccgcttgcagtggtggaacctgtgcgtctccctggcgcacagcctgctctcggggaccggggcgctgctcggcctgtcactgtaccctcagatggccgccgaccccatccatggccacccgcgctgggctctggtgctggtggctgtgtctgtgggttacttcctggcagacggagctgacctgctgtggaaccagaccttgggcaagacctgggatcttctctgtcatcatttggtggtggtgagctgcctcagcaccgctgttctgtctggccactacgtgggcttctccatggtgtctctgctcctggaactgaactgcgcctgcttgcacctgcggaagctgctgttgctttctcgccaggcccatccctggcttcagcgtgaccagctg

SEQ ID NO: 325224 - DNA, 496 bp, Homo Sapiens
gcgtcgggatgtttgatttctgcctgggatttaaggccaggacccagggcaagcgcctgcatggcaggctggagagcaccatgggaggacatgtcaggcctgttggctggcagcctggcactgagagtgggggtctggtgggagctcttcagaacagggagcagggaggcagtaacgtccctgccatgtcctttggtgggtccacaggtgctcagttgaggtgaatcgttgtgacccgaagggcagagtaatctcatctcgggtttgttgacaggcggtggacctgtggacacagggcccaggacagatctcttcttggtggtgtggacaggcagtggcatggtaggatgcctcaggaacaaacaatcttctgctggctccttccaggcttcctgcattttctcttggggagttctgggaaatgtctgcgtcggagcttcgctctgctgctgctggggacttggacttaactccttttctctgtcattcgtcgtaa

SEQ ID NO: 325225 - DNA, 693 bp, Homo Sapiens
  misc_feature (15)..(15): n is a, c, g, or t
  misc_feature (21)..(21): n is a, c, g, or t
  misc_feature (47)..(47): n is a, c, g, or t
  misc_feature (54)..(54): n is a, c, g, or t
  misc_feature (57)..(57): n is a, c, g, or t
  misc_feature (156)..(156): n is a, c, g, or t
tgtgcctaacaggangccaangtcgtgttgttctgccagtccacatncaagggncangggctgaaatgaaaaggaaaactgctgtttggcttctcctgtgtgggccatccccaaattattgttgttttgtctacaccagcactcaaaatgtaattnccctttcggttccatttcaaggcaaagatggggcctttatgttggcctgaggtgctggccaggttaccattttctgtccatattcttgcgaaaccatcatatgaacccatagccaatagtgttccatcactgttccagtccagtgaggtgacatctttattacttgggacgtcgtgccccccttctcgtatacaatgtctcaacacgagctgggtggagcccccgttgctattctcattcaggttccatatccttgcagttgagtctccagatccagaggctagcaaatcactgacagggttccaggcacaaatgaacacctcagactcgtggccccgaaggactgtggctttgttgggtggaatctcaacatccccatctatttccattggctttgagtgattattgatttcatgtgctccattctcttccccgttcactgtggcctctcggttctttggaggattttgctgggaaatagcagctggggtcatggttgccgcctttgccattgctgatgcctctgcggctgctgca

SEQ ID NO: 325226 - DNA, 659 bp, Homo Sapiens
ggcagctgggggccatcccaccccccggggcctcctgatctcgcctctttggatcctgtgagttcaactggagaatcactggagaattctctctgagtccccccgtgaggatgtgtgggactcctgctgcgaaacactgagccctgcctggtgtcaggtgtgacccgggacactaagaagagatgtccgtgaaccctgcggtgtggatgggcagtgccgatttctaggtttcttgctgtggcccaagttaagaaaagaagtagagctggtgtttgtggaaaaggggaggtgagagtctgtcgttctccgtgcgggcctgactgtgggtgtgaaccttttctagtggtctcgtgactctagggtcctcaaaaccaacaggggtggcatgaggtgcctgtgctaagaatgtcattgggggtgaagccggtgctgcccgcgtgttccccgagcccacgcctgcaccctcgcccacgcccgcccctgcctgcccacgtaccagcctgcggatctcccgctcgcactccttcttgatgcgggtgatctcctcctggtgcaggtggtacacgctgcggatctctgcggccttgatcttgtccgcttggatcaccagcgtcagcgcctcctccacctgccttttggcgcccttgagctcggagatc

SEQ ID NO: 325227 - DNA, 537 bp, Homo Sapiens
  misc_feature (368)..(368): n is a, c, g, or t
gttttttattattgctggtgatgtagccacctttctttaatctcttcaaaatatctttgcgcttatagtatgcttttaaatgtggatcatggaggcttttatattggttttccaaaagtcgacaatagggatcagtcaggttaaaaccataagaaggtcgaaaaagcttttcaccgaaattcgtagtatagaatacagcattgcttcctgggatcacaggcagcttgaccccgagaggtaggtccagtagctgagccggtccaacccctgcaaagtgggttttgtgcacgccgtctctgcactgctgggtgtccgcggccaggacgctggcgaccgtcttggtgacggcgactttggcaggattgaangcaaccaaagactccgaagaattatacaatcagggttcggggcatcctgaagtcctcccgttttccctggtcaccagctctcctgttttcccgcgcctgccagttgcggccggtacagtgcgagccaccgccaccgcccccgggcgccgcaagagggcagcctcctgac

SEQ ID NO: 325228 - DNA, 618 bp, Homo Sapiens
gtagagcagggcgcctcgggtcgcaatggggagatagtttttacgtattgcttggatttcactttcagctttttttgttgcttcgatgcgctttgaaatttcgtttgatgtcattttggattttcttaaggtatctacaattttgtcatcatctaatatggatcctagtgctttctgcagtaaatttaatgttttttcctctagttcttcaagagttatggcatcaagggaaatactctccagtaacttggaacgttgatcttctaaatgaggaacttcatgagttaccacagtagacaagagttgatcttgcaaaccttggaatgttacagtgaagttgatcatagtaacaaagttataaactgatggaagaaaatgggggttgtctatttctgtagataagtataacctaaaatttgaattgtattcgaactcagcatcaccaacccttatgaaatagtgtccttttttctgatagatatcctttttcagaattgcctttaagcctggagctaatgtctcaaggagattctgcaggaggacactccctcctgtcttcatagcattttcaatttttttggtataattgctgtcttcaatggagagcttctgcagccg

SEQ ID NO: 325229 - DNA, 516 bp, Homo Sapiens
catcagggtggaatgatgtccacagtcagtggaggggcgtgtgctgcgctattcacaggctaccagccaaaagtccccgggaggactgccagttgcaggaggtggatgaggtcccagaggactgacagctgcaggttgatgaggtctgagaggactgacagctgcaggtggatgaggtctgagaggactgacagctgcaggagctggatgaggccctggagaacaatcgagtggaggaggtggttaagttttcaggggactctccagtgcaagaggtgcttgagttcccagaggacactccagtggaggagtttgttgaggtcccagaaaaccttcagatggagggagtgtttgagttcccagacaacacccggtagaggaggcggctggcagcccatcgaatggtcctgaagggccagcccatgagatcgggcgaagtagggccattctgagaaaggatgagcttccctgcagccacattgacctgtgctgcttgcaggcagccttcctctctgc

SEQ ID NO: 325230 - DNA, 275 bp, Homo Sapiens
gagcaatgggcacaagggctggaactggacttcagggtttaacaagtgccaggtgggagctgcctggctacctttccatctctactttctcccacccactgctctgtgcagtgaaatctggactcactcctacagggtcagcaactacaaccgagggagcggccgctgcatcctgatgtggttcgacccggcccagggcaaccccaatgaggaggtggcaaggttctatgctgcagctctgagtggggcctgggccctgggcagcctggcctctc

SEQ ID NO: 325231 - DNA, 665 bp, Homo Sapiens
gccagtactgaatccaaccagcatttcttttgaagctgtgtcttatggaagacgagatgttcaagcacgttattcaactgaggattgttattctgaacacaagaccaagcagcaacacagtgccagagcaggtggttaatttcatatcctcccatatcagaatctgtgttctcatatcttttcttatcttccacaggtctaaaaatggattcagaacggagttctcttttacctataatttccgaggctttcaggatgaattgcacatttgaaaagatgtttggatacttgtgatatgatgctccagagaaagaaagtgcgtataaatatggttgaagcctaagtaaatgttgtttaaaactttctagatgaccatgcaggaaaaatataaaaagtcgtaagaagaccaaatagccaatctttgctagctttatttcaactgaatataaatatgttttgagggatgcatcacaacacagtctgtataaaaccgattccgcaacaaaaaataaggcaggcagatgatcataatcaaaggaagcatggtccagagatgcataaagcatatttaaagattcatcttggatttcccctttgcattgagccagatatatttacttcagtccatgcagcaggaagatgcacatgccttccagagcccaggg

SEQ ID NO: 325232 - DNA, 903 bp, Homo Sapiens
gtccaaatctcttgtaatacattttacatcatcatctgctgtttggtttgatgttcccataacccagactgtcaggtattctacaatcttattcctaaatttcatctcttggcaaaataagaggtcatctctccttgccatcgttacttcaaccaattgacacagtttggttttatttgagttgcatggcccatattcccaagcacacgaacatacctgaccagatataacatcattggttcaatgctagcttgccctagatgttcagagctgccttcagtatgattatctagcaagttcttcattatagctatggtttgttctacaaattgagtgttggtatccgtcaataaaacctgtccttgggagtcaaaaaacttgctgatggtattcttcaatttgttaaatagcattggatacagagcaggactcaattctagacccaccagatccttaacattggtccgtatttgaagtcccactttctcatggttacacaccattaaggacaacagccgatccataaatttgctgacaggtgtatctgcgtttccctctgaagacatcactgaaatcatagaacccttacgttcactgactggacccatgggtgggctataggttgccaaaatacctaatttaaataatctgaaagaaaaaggcttatttcaaacaagtcactctattcatagagaaaggtgaaaaataagagaacactttacctgtccttgggagtcaaaaaacttgctgatggtattcttcaatttgttaaatagcattggatacagagcaggactcaattctagacccaccagatccttaacattgggccgtatttgaaagcccactttctcatggctacacaccattaaggacaacccccgatccataaatttgctgaca

SEQ ID NO: 325233 - DNA, 382 bp, Homo Sapiens
caggatccccagccaagcctgaagccccatagaagcagcgctccccagccccaccggaagagctggtgaccccaggctccaccggcccgaagtcagatctcactaggagagcagcagtccaagtcaccagtccctggtgtgaagcaggaggcaggagctgccaaggtccagctgacccccgtggaagaggcccaccagcggctggagaggatcttcacagcttctctggactctgaggccgcctctcatgcccacagccaggcgaaaacagaagaacagattgcagcagaagaggcctggaatgagacggagaaggtgtggctggtccatagggacggcttctcactggccagtcaactcaaatctgaggagctcaacttgc

SEQ ID NO: 325234 - DNA, 449 bp, Homo Sapiens
ccttccttggctcaggctttcaacccatatcaacatttggaaattttaaagccttaccattggaaatattccagataattttaaaatatttgtcagtgaaggatatcagcatgctaagcatggtgtccaaaaccgtcagccaacacattattaattatatctcaacctcatcaggaagcaaaagacttttactacaggactttcataaccttgagctgcctgaccggagacaagactctgctatactggagcactacagatctctaggtctactgtttaaaagatgcacattgctgctacccaccaaggaaaggctatttccctttcacaagaaagacacagaagtttcctgctttaaattcaatggctgtgcagctcctatgcagtgtttaggattaacatgttatggcatgtttttacagaccttaacagcaggttgggatgaactt

SEQ ID NO: 325235 - DNA, 522 bp, Homo Sapiens
gtacatctcgttttggctgcccagggcaaagctctcatccccaatgcaccgggcgcaggtcacacacgtgaagcaggaggggtggaaggcctggcccagggccctgatgatgtggtcccggaccacctcgccacacttgccgcacctctccagtgtgtcctggtagcagggttcgcagaggggtcgcccatccttctggtagaagctctgcccagccagctggcggcggcaggtgcggcacgtgaagcactgggcatggtactgcctcttcatggcctccacagccagctctcggggggacacggtcttgtggcagaaggcacagatgtctccattgaagagctgcataggtgcagccggcactgtggctgcagctctgccaggggttgtccaggggctgggcctccccgccaagccagcctcgggtgtcttcatgggggcaggagcctcccaggggcggccacgccgggcatcacaaactgcctgcctcacttcctccgccacggccacatcgcggcgcgg

SEQ ID NO: 325236 - DNA, 360 bp, Homo Sapiens
ctgggctccccggtcccctggccgctgctactctgcgggtcccccacaggcgcagcccatgtgagggagtcaacaccatcttcgtggtggagcgagtgaaggagaccggcgtgactctggtggggcgaccacgtggcgcagcaggcggggtcctctgcctgttcttcgcggggaccgcgctgctgatcggcatctttgtgctgctgtggtgtctttaccgccgggcagctagacagcggcccttcgcacatcaccggcttccggacgacggagatgaaccggttctgcatttggacgccccgaaagacccctacgacctctacttttatgctccggatacctgggtcccttcccacatcg

SEQ ID NO: 325237 - DNA, 509 bp, Homo Sapiens
tgtcgccacaccagggcttgcatagaaaagcttcggttatgtgatctggtggatgactgtggtgatcgtactgatgaagtcaactgtgcacctgagctgcagtgtaactttgaaactggaatctgtaactgggaacaagatgcaaaagatgactttgattggaccaggaaccagggtccaactccaacacttaacacagggccaatgaaagataacactctgggcacagctaaaggacactatctctacatagaatcttcagagccacaggcttttcaagacagtgctgccttactcagcccaatccttaatgccactgatacaaaaggctgcaccttccgcttctattaccacatgtttggaaagcgcatttataggttggcaatctaccaacgaatctggagtggctcaaggggacagctgctgtgtcagatatttgggaatcaaggcaacagatggattaggaaacacctcaacatttccagcaggcagccctttcaggtatggag

SEQ ID NO: 325238 - DNA, 393 bp, Homo Sapiens
gttctgtgctactgccggctccagtactactgctgcaagaaggacgagtcggaggaggacgaggaggaaccagacttcgccgttcactcgcacctgcccccgctgcactccaaccgcaacctggtgctgaccaacgggccggcgctctaccccaccgcctccacctccttcagccagaagtccccgcaggcccgcgccctctgccgcagctgctcccactgcgagccccccaccttcttcctgcaggagccgccggaggaggaagaggacgtgctgaacggcggggagcgcgtgctctacaagagcgtgagccaggaggacgtggagctgcccccggggggcttcgggggcctgcaggcgctcaaccccaaccgcctctcagccatgcgggag

SEQ ID NO: 325239 - DNA, 354 bp, Homo Sapiens
gaagtgtggggagagtgctcttagagcagggttcagcccagctgcttgaacggagaaggggcagccactgtgttgacgagaagcagacgctgttggcattgctgatcttggtgctgtacttgagcacagagatatggggaagcagttgggaggtgtcagaaaggatcagagaatgtaactactaccagaatcttgcagttccccaggggcttgaatatcagaccaacgagccctcagaagaaccgataaagaccatcaggaactggctgaaggagaagttgcatgtcttctcggagaagttagaggaagaggtgcagcagctggagcagctagcgtgggacctggaactgtggc

SEQ ID NO: 325240 - DNA, 409 bp, Homo Sapiens
tttcccacgggcatttttaccaggttttttctacttccaaattccataatcaaggctgtttttggtaccaaagttctcttgttcgaagataagaaaacgaagatatcttctaccaaaatctgcaacaataagatactctggttgatatgtagcgaatttatgtccttatgggctggatccaacaagaaaaatatgaatcagagtcgaatggatgtgtatatctcacatgctcccactggttcatcagtacacaacattctgcatataaatcagctttaccactctgatgaattccgagctgatgactggggacatgacgctgattatatgagagaaacaatcagagtcatccccctatatatgacctgactgccatgaaagtgcctactgctatttgggctggtggaaa

SEQ ID NO: 325241 - DNA, 484 bp, Homo Sapiens
tccctttgcacttctcttcaattatctctgcatcatggattcattctccactcgtgccaggtacctctttctcctggctggaggaggtgccctggccgtggctgccatgggttcctacgccgtgctcgtcttcacccctgctgtctgcgctgtggctctcctctgttccctggcccctcagcaagtccacaggtggaccttctgctttcagatgagctggcagaccttgtgtcacctaggtctgcactacactgagtattatctgcatgagcctccttctgtgaggttctgcgtcactctttcttctctgatgctcttgacccagaggtgtcacgtccctctctctggacatttgtgaggggaaagtgaaggcagcatctggaggcttcaggagcaggagctctttgtctgagcatgtgtgtaaggcactgacctatttcagctacttgctctttttccctgctctcctgggaggctctctgtg

SEQ ID NO: 325242 - DNA, 1114 bp, Homo Sapiens
cctttaaaacattgctctgacagagactactacttgtccattccatggaaaagtcagaggtggttaaaatgtcagaggtacacttattaacaccttgctgccttttgtgtagcttcctctcagtacttcaccagttgggattgacacacctctccagctgggttcaggagccagacaggagcacacagaacagggaatccaaagccatctccttgattttctatagcctctgacccaagtggtttggaattggaaagcagcgtcactcgacttgaagccatcttggcatcaatggtggagtaggtggagatgagactctggaccagctcatgggtgagccccaccttgtcctggcatgtgaatttggcttttatctttgaagtgtgctcctcttaaataaccataaagtgacacctgccggtcacatttgatgtttgtttggatatcctccgggtttgtcaaatcttccatcctgtctgccaggatataagggtgaaaagtttgccatgagaggcctaaacttcataactgtaataaaatggcccagattgtggatttcttggttttgatattctccatgcaccattccagaaaggtagaacagtttggcaacctggtaaacttctgtccagaacctgtgttttaatcgcttctttgtcttcttcagttgcttattatgcttgaaggagtcgaggtgggtgagaactcccataattttaggaaagccatgtgcttgacagatgtttagaaactcaaacgtttccatttcaaacccaaagctggcatctataagcatcagtaccagatctgctactttagccagatcaatcatcatgttaatgtcacacccacattcaataatggtgagtcggagctttttacctgacacgatcgtcacagggcctctgatctcggtcaacttctgccgggtgaagttccgaatgaggcattgtatcaaagtgctctttccaactttggaggccccatcaccactaccactattggtgggggctctagtggagttcgatcaaccactggaatatgatgcttttttgtcttcaaatcctgagtcctgtgaaaggatcgagccatccacacagcagactgaaatgca

SEQ ID NO: 325243 - DNA, 866 bp, Homo Sapiens
acataaacaatagctgctgtgtttctttctggtgccctcacacttacactagtagcacttaagtccaccggatgaatgtcttgagtagtttgttctttgggcaaagataaatcccaagtatcagacatactagcccttgaaaagttttccaatgcactttcatatctactaacttctgtttttttaaggtatttctccatatcaagtgcattggatccattacttttttctaaatcattaggtaagaaatgacgcacatgagaatagtccttttgtttctcatcttcctgaaaagtcttgtctctggttttatttgaaagtgccttgatcattgcagcaagttgggaaggatcagtattaactgatgcctctgcaatggctgaagcaatggtgctgatcctaagcatagaatcaccactatctggtagcttgtctttgtatctttggggtttgttgctcatgaagaaagtgtcctctgttttgcctttatcagccgttaacgtcacatcattttcatccacttgtgaagtactctctactgcttcaacctgaagtgtaattgatccttcacttagctgtgcctgggactgttcatttaaatctcctgaatatagatcatggttaagatgagccatttctttttccaaattacctcttgatacatcagattttcttattaaggcaataggttctctcttctctggtgatctaataaaatagccaaatgatggtcttttcacattgttaccaccaccaaggcaaccaagagcttcagatctttgagcaaagaactctcctaaagacagacgtaagtaactggcatcatctttatccaaatctgatgtgctacgtgattcctcaacaga

SEQ ID NO: 325244 - DNA, 333 bp, Homo Sapiens
tctggtagggcacatagatgttgttgaggccacagaggaaggcggtcaggatgatcatgaggatgaacataaaccctccaaattttgcctgtcgtttcagggggtcagaggtgtttggagcgcacgtctcggatcatgtcttcaatcatcttgccaattttaatctgcagagtgcccagcgtctcgtgggccggcagaatgtaggccaggcgggtgaagctgagcatgctggtggcagtgaagagcacctcagccaagaactggggatcctcggtgtgccacacgcttcattcagccatggtgaaatagtggcaggcagccgcttgggaggcg

SEQ ID NO: 325245 - DNA, 412 bp, Homo Sapiens
  misc_feature (34)..(34): n is a, c, g, or t
  misc_feature (68)..(68): n is a, c, g, or t
aaatgaaccatgaatgaatggttaaagatgccantagagggcccggcctgcaaaactcgggcaaccanaaaactgaggcaacgttccaaccaagctgtgctcttcccaataccgaaacatggtccagaacagaaactgaaaacgtctcattgaaaacggatcatgtcttcaatcatcttgccaatggaaatctgcagagtgcccagcgactcgtgggccggcagaatgtaggccaggcgggtgaagctgagcatgctggtggcagtgaagagcacctcagccaagaactggggatcctcggtgtgccactcgcttcattcagccatggtgaaatagtggcaggcagccgcttgggaggcgtcccggcagtgcactgggcaagcccagccaggaggaggccagtgcgaaggct

SEQ ID NO: 325246 - DNA, 719 bp, Homo Sapiens
ttattgtattcaacagcggtggttttgtcacaggatgttccatattcattaagattagagcattttccccttttgtcagttttcatgtggttaaataaagtggttttatcaaagtttttttctaaattcatcatccttacaggacttttctcctgttagaaaactctgaggtgtaatacaaattgtcttatcatataaaccttgtccagatccatcacattcaaaagattcctccaaagtttgaaatttccaatgctgacctttcttataactgaaagctttagcattttcaccatgttcataagatttctcttcagcatgagctttctcatgcttaatatcaagctgcagtttctcacacacattcatgtattcagtcttctttcttgaatattttctttcacttataattaattgagaagcaactggcaaattcattctgtgtgagtcacatttacaggatattttttctgaaagctctggagctatttccagattaaatagtttttctaaaactttctgtccttctttactcaatgttttgtcagcatcactgatgaatatttcttgccacagaggtttttcttgtttttcccggatccctttgatgtgatcaactttaaaatatcctgggtacctctggttcaggaattaatgttctaaagaccatggctcttctcctttctccaacttggagattcaccttgggtttagtaatg

SEQ ID NO: 325247 - DNA, 556 bp, Homo Sapiens
gctccccttccacgtgcgttttggcaagctgggcgtcctgcggtcgcgggagtttgtggtagacattgagctcaatggggagcctgtggacttgcacatgaagcttggggacagcggggaggccttctttgttcaggagctggagagcgatgatgaacatgtgcctcccggcctgtgcacctcacccatcccttgggggggtctgtctggcttcccctcggactcccagctgggcactgccagtgagcctgagggcctcgtcatggcaggcacggcctccactgggcggaggaagaggcgtcgcaggaggaaacccaagcagaaagaggatgcagtggcaactgattctagtccagaggaactggaggcaggcgctgagagtgagctatccctgccggaaaagctgaggccagagcccccaggcggtgtccaggtggagaagacttcttcgctgcccaccgaagacatctaccactactctgatgaggagcggcccccccagggcagcctctcaggaggtgagataacatctcctaacaacgactcgcagctggag

SEQ ID NO: 325248 - DNA, 205 bp, Homo Sapiens
agccagctgggccttccaagcaagcagacagttcagcccacagagagcaggtggctgtagttctccagcatcacatcctggtacagggtcctctgctccaggtccagctgctgccactctttccgggtgaagcccacagccacgtccccgaatgacagtgacccctgggccatggttcttccttgctgttgtgggaaagcaggta

SEQ ID NO: 325249 - DNA, 792 bp, Homo Sapiens
ggagctgaacgaggtggtaaatgatggtgttggatctggagcgaggtacagggtaggcattgcaggtgacaggaaggaaataaggaagccaagcagtgtagtggtgagaaggaagcacaggttcacccatgtgtgtggaccgctgcttcttcatacgcaggaacccagccagtcctggagatgcacagatgtgcatcccatggccggacactcactcccatgttgcttagcgttgtttcgttccccatgaagatacttttgtgaaatcaaagtgatgccctgtggaatcaggctgcttggggtttggattggggtttggttcgggcgggttcagtggtgctgagctcggtgatgtcatgtgtcgtgtaagggatctgttattccaaattcctcgtcaatgaatccaggctgctcagggttcgcatttggcttcagcttgggtgaattaagaggtgctgggtcgttatttcctccatcacgaaaggcatctgctaagtcaaagtcagcccctgaaatctcctcttctcagatgacacggacatcactgccaggtaaacaacatagagaccaccccgtagggttagaggctcttatcagtgaaaccaggtcagttgggatttggatctggctttggtttggggggattaggtggtgctgggtcaccagtgaaaccaggtcggttggggtttggatctggctttggtttgggggcattaggtggtgctgggacaccagtgaaaccaggtcggttggggtttgtatctggctttggtttgggggcattaggtggtg

SEQ ID NO: 325250 - DNA, 567 bp, Homo Sapiens
ttgtggcagcaggagcttggccctctccagtttcctttttagctcctttacgttgagctggatctcagacttttcagattctacaagttgaagtttttcttgttttttggcatttttctccttcagctcctcatcagttatggtgttcctgtacagttccagactcagggcgtccctctcctttgttaactcctcaatgtacctatccgccttcttcttctgtgtagcgacagcagagagagcctgctctaactctcctgcaaacttccatgaatcatgcaggcggctgatcagatccctggcctctccttccaactgcttgacagcatgctggctgtagtagagtgccatctgaagctcagttttctgacatgtaaggattcgtatggtatgaacctgggcctctagctccctccttagggcttcctgatgttggtggcttgccttctgttcatcctcaggcgagtggcaaccaccagaagtggttgtctcagggttagtgccattatttattttcttctttttggtggcgcttgctgcgtgtgccgacactagggttggtctggg

SEQ ID NO: 325251 - DNA, 286 bp, Homo Sapiens
tttcggagcagactcgtgccgtggtagaagggggagccatccagcccttgattgagctcctgtcttcctccaacgtggctgtgtgtgaacaggcagtgtgggctcttggtaatatagccggtgatggcccagagttcagagataacgtcatcacaagcaatgccatcccacatctcctagccttgatttcacccaccctgccgatcacatttctgcggctcatggggtggaccttgtcgaatctgtgccgaaacaagaacccatacccttgcgacactgcggtgaa

SEQ ID NO: 325252 - DNA, 255 bp, Homo Sapiens
ggtcttttctacacaggtataaaggacatcgtccagtgcttttcctgtggacgttgtttagagaaatggcaggaaggtgatgacccattagacgatcacaccagatgttttcccaattgtccatttctcctacatatgcagtcgtctggggaagtgactcctgaccttcagagccgtggtgaactttgtgaattactggaaaccacaagtgaaagcaatcttgaagattcaatagcagttggtcctatagtgcca

SEQ ID NO: 325253 - DNA, 588 bp, Homo Sapiens
catgcccctcatggtgcccacaaggggcgacaccaactcttgcagctccagcagcttcaccttcatctcctcctccttctgggccagcctgatgacatcctctatctcctggtgccgcgtgtttggcactgccccctggctttcatatacggtgaaggactctctcatgccgtctgtcactccagaaggctggacgaatccaagctctcgtctctccacctgctccgtcccgtccgccttctccttcgggaggtccataaagctgctcgtggcctcccggctctccaggtcctctgggatgtttggcgtgggccgaggcgcctcctcctcctcactgtccagatgttgtcctccatctccttctccagggagagccacgaggcttagctgggtctctagctgttggttctggtggctggcagcttctaggtgctcctaaggggacgggaaacagagtgagaaggcacggaggttgccaggtcatccccctcggggccccgtcctcagcaactccctcccctgggtctcctgcaacttttggccggccaatctcagccaccgctttgccccaagcttcctgctgctgca

SEQ ID NO: 325254 - DNA, 592 bp, Homo Sapiens
gagtgcgggagcaggagagactgtgtgaacaaaacgagaggcttcgggagcagcagaagacgctacaggagcagggtgagaggctgcgattgcaggagcagaggctacgcaaacaggaggagaggctgcgaaaggaggaggagaggctgcaaaagcaggaaaagaggctgtgggaccaggaggagaggctgtggaagaaggaggagaggctacaaaagcaggaggagaggctcgcgctctcccagaaccacaagctcgacaagcagctggccgagccacagtgcagcttcgaggatctgaacaacgagaaaaagagcgcactgcagttggagcagcaagtaaaggagctgcaggagaagctagacgaggagcacctagaagctgccagccaccagaaccaacagctagagacccagctaagcctcgtggctctccctggagaaggagatggaggacaacatctggacagtgaggaggaggaggcgcctcggcccacgccaaacatcccagaggacctggagagccgggaggccacgagcagctttatggacctcccgaaggagaaggcggacgggacggagcaggtggagaa

SEQ ID NO: 325255 - DNA, 384 bp, Homo Sapiens
catccaagaagggctgggaggaaccagctgccagccaccagaaccaacagctagagacccagttaagcctcgtggctctccctggagaaggagatggaggacaacatctggacagtgaggaggaggaggcgcctcggcccacgccaaacatcccagaggacctggagagccgggaggccacggagagtacatcactgaatatgagagccagggggcagtgccaaactcgcggcaccaggagaaggaagacatcatcagggtggcccagaaggaggaggagatgaaggtgaagctgctggagctgcaggagctggtgttgccccttgtgggcgaccacgaggggcatggcaaattcctcaccgctgcccagaaccctgccgatga

SEQ ID NO: 325256 - DNA, 605 bp, Homo Sapiens
aaaagaacgggcaagaaaacaggataacatgaaacttttccaaaagtcttatttgtgttaaatccttttggcatacttttagcctattttgctatgacttctgtatcttgggccgacttttttgtaaagctctgggctgtgcggaaatgtgagatcctcagagacagcaccttcagagactgccacaacaaggttgaccccagtgcttaccatgatgcgtgcattgaagaagcctgtgcatgtgacatggaggggaagtacctgggattctgcactgccgtggctatgtacgcagaggcgtgtagtgcagttggagtctgtgtctcatggagaaaaccaaatctgtgtcctgtctactgtgattactacaatgcgcctggggaatgcagatggcattatgaaccttgtggcacagtgactgcaaaaacatgcaaagatcagctcgttggccagaaattttcttcacttttagaaggttgttatgctaagtgcccagatagtgctccttacctggatgagaacaccatgaaatgtgtcagtttatctgagtgcagctgtttctataatgatgtcatacgagcagggggagtgattgaagataattg

SEQ ID NO: 325257 - DNA, 342 bp, Homo Sapiens
gtcctgcctgcgtggtggccccttgggcctcacatatttgtcccttctgctcatcctgtgtcctgcctgcgtggtggcgcccttgggcctcacatatcttgtcccttctgctcttccctgctgcagctggaacctactgtgaatgcagccttggcctcagccgcgaggccctcatcgccctccttgtggtgctggcgggcatcagtgccagctgcttctgtgccctcgtcatcgtggcaattggtgtcttgcgggccaagggtgaaacatgcccgtgacaagtggacaacaggttggtggagaattttggggtccaggaagatctcatggacctgcacccgg

SEQ ID NO: 325258 - DNA, 583 bp, Homo Sapiens
cttcaaagtttttcaggggaacacagtttattgcagaattgggtgggggccccagctcatcacacagaactttttttacataaggttccataacttcgtgcattgcgtcaatgggaattttcatttggctgggtccagtcagcaaacccttgatggcatgaaagtcaaagatggttcgaaggaggttaagatagatattcactgggttcactatcttccctttgaatggtttgaatttgttttttaggtcaaatttttgttcttcctagtcgagataggttgatttggagatcaggacatatagcatattcctccattgtttttctgatttggtaggttttgtttgagacaacattgggtgcagggccttcatttgcaacatttaacttcacttcaaacttttcccctggttcttcagggcagtggctggctgttagaatgattccaccagctgccttgatcttcctgataatgcaggagaccgcaggtgtcgacaagatgccattctgtccaataatcagtcgtccaatatatcaacgatgtctttcttctttaatcataaacctgctcactaagaagctgc

SEQ ID NO: 325259 - DNA, 657 bp, Homo Sapiens
acaacacacatacgtgtacccacacacacgtgtgtgcacatgcccacagcggtgctgattctacgccgagcgtgtgcagggaaacttgcggagcagccctgagcagaggtgagcggcgccctcagggacgacggggtagccccacaccgactgcgggtggggtccacacaggtctggctaacacctcctacgaccagcgccaggcctccagagggtgaaggactctccacagacagccccggacaaaggccagtgctccacgtggggggctggtcacttctccaccttcgaccaccacgtgtacgacttctcggggacgtgcaactacatcttcgcggccacctgcaaggacgccttccccaccttcagtgtccagctgcggcgaggcccagacgggagcatctcgcggatcatcgtggagctgggggcctccgtcgtcactgtgagcgaagccatcatctcagtcaaggacatcggggtcatcagcctgccctataccagcaatggactccagatcacacccttcggccagagcgtgcggctggtggccaagcagctggagctggagctggaagtcgtgtggggtcctgacagccacctcatggttctggtggagcggaagtacatgggtcagatgtgcgggctctgcgggaactt

SEQ ID NO: 325260 - DNA, 440 bp, Homo Sapiens
caaggccctttgggaatgttgtgattaagtaagttaactcggatatgggtcccttctttgagtgaaatatcagtcatgctgagaggtttgtcatagtagtcagaaaaaagatcatccaagtaaagctgtgaacgagaaatgacatccatcactcttctatttctttcaaataggatatttctcaacctgtacagcagtgcaaatgttgccgtttcttccctttcaaatcctccttttgacactgaagtgacacaaaggtcaaaggcaccatccaggtatatgaagagttcaaaaacactgaaagctatggttgtatgtgctgggaaaacaatagctttgtcccttccgttgggattctgttcatccataaagtgaaaccgcattgcttcccctcgaattccagcatgcacagacagtgagcactgtcgtgtggttcggat

SEQ ID NO: 325261 - DNA, 967 bp, Homo Sapiens
  misc_feature (135)..(144): n is a, c, g, or t
tcaattcaactcactcaatttttattcttaaaacaacacttaaatagtaacttgagggactccagtatgcacgtaatttcacaaggattactgtttttgcattatattacacatgtttagaatcccaagatttgnnnnnnnnnncatattctagaacagacattgctgtgcaaatcctatacaactgcagctctttcatcagaacatttcacaaaatacacaagcctgactagaaattcaatacttaaaaaaattcccatggcaacactttagttagtaagagaacccaccaagtgtggtttacccgcattgcttcccctcgaattccagcatgcacagacagtgagcactgtcgtgtggttcggatgctctccatgaccacacacaatactgcctttctgctgctccttgactgacgtatcaagctgtggtcaaagttaatttttcgtgtagtaatttctttgagtaatgttgatacttccacttcatgtttggttactataccaaatgaagctttcactgcaatggaatctgatccagcaacgttaatcccaacgtcatttacaatatggttacctcgccttccatagagtgaaacatctgattcatcttcataattcagtaattgataagatgaaataccagctgaaatttctctgtctcctaggagaatatctttcagtgtaaaaggtgttgaagtaaatttatatctaggaaacagaaagcatcgcttcttttttaccaccagacttagaggttgatatttgtcagcttcactgaggcttggaacaggaactaatctccctccatctccaacttgcttgacaaagctcttggtagcagcagcaaacatattaaaatcaaaacgtcatcaactgcaacccccagataaatccatttttaaagaggaaaatcaggcacaaaattaagcattgcttgtttttaaatataattatacatcttaaaa

SEQ ID NO: 325262 - DNA, 618 bp, Homo Sapiens
  misc_feature (66)..(126): n is a, c, g, or t
actgttgctgtgctcgtttcacagatgtgcatataggacatgggtatttttagctcatggctggcnnnnnnnnnnnnnnnnnnnnnnnnnnnnnnnnnnnnnnnnnnnnnnnnnnnnnnnnnnnnngggcactttttctgtgctcgtttcacagatgtgcatataggacatgggtatttttagctcatggctggccacctgtagcattttgggtgtgaataccttgttccagttcattgcttccatgtgtgaccaacacagacccatctgtgtagatatgaaccagtgcagctgcctgatggtagcttgttgcagcaaagtcaactgaaaacttcatgggaataatagcaatgcctttcttcttccaataattcttcttattgaactcttcgacttgcattcttctgcttttctggtggaaggccacatttggctgccacagctgtgatgcaagattctgttactagggctccttgagggaagacaaatcttcttccaacaattcatcttatagaactcttcgacttgcattcttctgcttttctggtggaaggccacatttggctgccattcctgtaatgtaagattctgttactaggcctccttgtgggaagccaa

SEQ ID NO: 325263 - DNA, 717 bp, Homo Sapiens
tgatgtatttgccttctttatatttctggctgctttcaaaagcatgttcgtatttccagcccagagtggttttgcagttttcacagtaaatgtctgcgactgcatgcagtcctgttagcaacactcgctcttctgcaggcccacagcccacattaactctatgtcgaggcacaagaagagagagtgggtagttagtgacacgcacatcaggcattcaagctgagcttccagcaaaaattaactgggaaaggctgtcccaaggggagccaaccctgagctgagcagatctaaaccaatccccaaaaggtggccacagggaaatatctcagctggaaggaaattcagatctgcaagttctagtggagtgggtctactgaaataatctttatggttgagagtttgcttaaaattttaatttttctaacaaatactttaaatctgtgacttagggggacaagctgacagccacactgtgaagtccacagccatgggcacaggtcctcacagcttactgaggactgattgaagctgaagatgccacacatgatagcacagtgtggtcctgatacaggaatgagtgatccctgggtgctgaataggctctactcctttacagggtgcccagctcaagccacaggccagattttcatttttacagtttatcaggcttatgtaggcttcaccttcccttcccagggaagaggtgataaacctggt

SEQ ID NO: 325264 - DNA, 406 bp, Homo Sapiens
ttcccatttttgttccatctgctgcttttcatactgcatctgacccaccttgattttcatgctagaaagtttggccattaaagatttggttgatttaagctttttttcatactgaagtctctcactgtccatttcactaacttttaacctcaaatcattgatctcctgaatcagcccctctgtgtctctgaacttatcttcataatccaatctgtccttctctacagctgtcagtttctaacttcaagttagatatttcagccatcagatccaacttctgagtttctaaggatgtcctacttagaagctcctgctgcagcatttcttctgtggcattcaacttctctctgtgctcttcaagacaaaactccaaatctcgaatcttctctccctcatcctccacctg

SEQ ID NO: 325265 - DNA, 282 bp, Homo Sapiens
agccagccaatcatgtattgccagcctcattctggaattctgattggtacttggtcacaggctcctctcttacctgcacccctgggcccgcacgtggtgattggccaccccggccttggcctgccgaccccgggagtgccagtttgacatgtatgcgcccaagctggacagcccctacttgcgacattccagacgtgagtttcttcccgtccttcgctcctgccgtcccgggactgcccatcctgctcccacaccccggccccttcgggtccctgcagggcg

SEQ ID NO: 325266 - DNA, 426 bp, Homo Sapiens
tgtgtgtccagcgcctccgagtatttatctcacactacaccctgctgtttcaatgcaatgaagatttgcttattcagaaacggaaaaagctcaagaagtcctttatggcgaagctgtacaaaggggtggcttcccagtgtgccaatgctgggcaagatgcttcccccactgcaggtcctgaggctgtccgtgacactgggatccactcagaagagttgctgcaaccctacccttctgctcccagttctggccctgccatcacacatctgatgcccccagtgaagaaaagccaacagcagcaaagcctgatggagagcatgcagcccgggaagcccagtgactgggagctggagggcaggaagcacgagcggcccgagagccttctggcaccgacgcagttctgcgcggccgagcaggacgtgaagg

SEQ ID NO: 325267 - DNA, 689 bp, Homo Sapiens
gggcctgctcaatggcagtgtggtttatagttataacctggggtctggcatagcaagcatcaggagcgaccccctcaatctgagccttggagttcacaatgtttatctgggcaagttattccaagagggctggctgaaggtatctcttcctggctgtgggcctgctcaatggcagtgtggtttatagttataacgtggggtctggcatagcaagcatcaggagcgagcccctcaatctgagccttggagtccacactgttcatctgggcaagttcttccaagagggctggctgaaggtagatgatcataaaaataaatccattatcgccccaggaagactggttggtctcaatgtcttcagtcagttttatgtaggtggctacagtgaatacactccagatctcttaccaaatggagcagattttaaaaatggttttcaaggctgtattttcactcttcaagttcgcactgagaaggatggccatttcagaggactgggaaatcctgaaggccacccaaatgctggacgcagtgttggccaatagaaacattaagattgcacactcctggaagtatgtcaactgccacagtctttagctgtattttcactcttcaagttcgcactgagaaggatggccatttcagaggactgggaaatcctgagggccacccaaatgctggacgcagtg

SEQ ID NO: 325268 - DNA, 409 bp, Homo Sapiens
ccctccttttatcacccaagggtctttctcttgctccagtaaggagatcacatctggtttagaaatgcaaagacccactgaaactaggttcctgtagttttctaacatcaccttcttgtacaaacttctctgagcaagattcagccactcccattcatcttgggaaaagtctatggccacatctgtgaaagtcactgaacccagggacatggctttacaaagtttaattcctgccacctctacctcttcctggctcttcatttggagaagagctttactctgggattgtagagctgaggcagtagttgaggaaactacatgacagccagtgactctggagtcagcctgttctggatctgaatcccggttcttccacttgctagtgattactttcctctctatgcttctg

SEQ ID NO: 325269 - DNA, 645 bp, Homo Sapiens
agcctggtaccctcaacttcaaaggaaaaaaggttatatttgggaatttaaatatctttttgttcagtgcaattacacactagaaaacctagaattgcatacaacgccttggtcatcctgtgagtgcttgtttgatgatgatataagggcaattacatttaaagcaaaatttcaaaaaagtgcaccctcctttgtgaagatatcagacttagcaacccacctagaggataagtgttcaggagtggttctgattaaagcccagatttcagagctggcatttcctattacagcatctcagaagatagcgctaaatgctcacagttctctgaagagtattttttcttctcttcccaacatcgtatatactggctgtgcaaaatgtggattggaactagaaacagatgagaacaggatctacaaacaatgttttagctgcttgccatttactatgaagaaaatatattataggccagcgttaatgactgccattgatggaagacatgatgtttgtatccgtgtagaatcaaagctgatagagaagattcttctcaacatttctgcagactgcctcaacagagtgatagttccttcctcagagatcacctatgggatggtcgtggcagacctgttccactccttgttggc

SEQ ID NO: 325270 - DNA, 506 bp, Homo Sapiens
gactcccacgccatgaggcacttctcataatactggatgttcttgtcagccatccccatgagtagctgccggaagtcctgcctcttgttgttctgccaccttttcatgtcagctttcaggtcagcattgaaacactccatccgatcctgacatttctcgacgtccgccggtaccttggggcggtcttccttccgcagagccacagcttccagtttggcttcatactctgcttgaacttggtccctcttcttcaatacactcttcatggagtcagagtataaaatatattccctgagcacaggtaggaagtcttctgtcatgtcatctgtcagctcttctaaggctgtagagcagttcccaatgcaagctgacacaccctccaggggttcggccagctcaccctccaaggcgctccatgaggagtacgcaggcccgtattctctcctctcctccaggtagtctatttcttctttgatgatccgctgggctattcgatcaatggttcc

SEQ ID NO: 325271 - DNA, 496 bp, Homo Sapiens
tttttgcagtccgtggtcagccgccgcccgcccgtcacgtagagtttgtttcccatcactgtggccccatggtgcatcctccggtctttcatgtccgcacatttgacaaatttgttggattgagggtcataagcaagaatcctccttgtgtaacctcccacaatgacaatccgctccccaagcaccactgcaggggcacacacgttcttgatcattcttgtctccattttgaaccacgagtttctggaaatgtgataaacctggataaggcgcacagggttctgcatgatgtcctctcctccaaagagatagagtctttggtctttcacagcgactgcggggtggagcacccccacgggcatgctggccatactctcccagacattgcagatgctgtcatacctttccatggagcccatgagctcctgcccttctccaatccccccgatggagaagatgaagttcttatgggcagtgcttctgtgggagtagcggg

SEQ ID NO: 325272 - DNA, 824 bp, Homo Sapiens
gactttccagatgccattggcacttgtccaagtgattgcaatatgatgccatctgccatctttcaccgagggacagtttgttatcttttccctgccattcatataaagaacccagccgttataatcagtcaggagcaaggtattgtcgctgccgttatcaactgcataggagattggtgttccatagttcatgtcgtcagaggatttcatccagaaggtacaggttagagcatggagagatgggagcatgccatctagcatgacatatccatagatgccagaaacttcaaaatccaggttaaagcctgtagactgttctgtttcacaccttttgcctgaaaatcctggctgacatttacaactgtatgaatttaattcatccacacaggtggcctgatttctacatggattagactgacattcattgatgttcaattcacagtgtgatcctgtgaagccagctgcacacaggcatctgaagctattggcaccgtctttacaggtagctccatttttgcatggctgactgagacactcatcgacgttctttccacatcgggtacccaaaaatccaggtgggcatttgcacaagaatcccccaacctggtcttcacagactgcattatttaagcatgggtttgactggcattcattgacttctgtttcacaatgcaggcctacaaatcctttcacacatgtgcaacgatagccagccacaccatcaacacagattcctttatttaaacaaggactggagctacactcatttatattttcttcacaccgctgacctgtgtaacctgatgggcactcacaaatgaatt

SEQ ID NO: 325273 - DNA, 637 bp, Homo Sapiens
tgtgggtttagtagaagaaatactattttgtagatcttcaccatatgtatttggggagagagcaccgctcatcagaccataaataccacacggaggaaagaagttgataatggtgcgtcgttggtgctacacgattttgtatcatatcctgttcttatcaacgaagaattgtttttaagaattctgccatcaacaacaagacaattttctcttcttccttctccttatcctactcctcatcatgacggtaataaggatgacgtcttttatttataattgacttccacttaataaataaggttacttggtacactggtcgacaaaaccttgaaatgttgatgtttaagggctgttgattgctggcagcaaagaagtccaactgtgctggtacccgagatagcgtctccacattttcttccaggatcatcacctttgttctaaatagctcccacatagtgtttctagaagtcatatgttttagattttctgccttggcacccaggaaaccagtatgattgagttaacatattgaacttcctctgcatttccagcctgaacagatgttgagtacaagctgatccacctacgttcaacctgagagagtccacatccacagactgtttcatttcccttttca

SEQ ID NO: 325274 - DNA, 537 bp, Homo Sapiens
tggacctgccaagctgcctgtgcactggccctgcggggcccagccctgcctcagctggtacatgtcttcctggagggagtgctccaaggcctgtgccgttggtgagcagcagcgtctggtgacctgcccagagccagacctctgcgaggaggcactgagacccaacaccacccggccctgcaacacccacccctgcacacagtgggtggtggggccctggggccagtgctcaggcccctgtggtggtggcatccagtggtcacacactggtcaagtgtgtcaacacccagacggggctacccgaggaagacagtgaccagtgtggccacgaggcctgggcttgtgagctcccggctgtgtggcaccgaggattgtgagcccgtcgagcctccccgctgtgagcgggaccgcctgtccttcgggttctgtgagacactgcgcctactgggccgctgccagctgcccaccgtccgcaccccagtgctgccgctcgtgctctccgcccagccacggctccccctaccaaggccatcagcg

SEQ ID NO: 325275 - DNA, 732 bp, Homo Sapiens
ccatcacacatacttctggttttcggtaatggagattggtaaagacttttagacccatgttcctgacaatattatatatatctccatccccatagttgcttacaggtgtgtaatataatgcattgtaggacatatccgtctgaggaatgcaagggtcttctttgctatcatctagattgaggccatggtggaaataaccatccggctctatacttggaaccatgttatacacactttcaggtgacagctgttgttcagatttcagtcgtaggacattcccatcctcagccgtgagggcacagaataagacaggtgccgcttgaagacagcgactagcattggacccaggtaatccctgctcgttagagaactttatgttaactttgtgtttaaagcacttgtcaacctgtaatgtgacactgtcatccacactttccccactgggctgaagggggcagacaaacaggacggctgcaggagccagatcagcactgatgatgattgggaacgagaagtttccattccagcctttgtttctgatttccttttgtccactgagtaagatagctccttttaccatcatcaaatagaagaactttacattggaatcatcctcatatgcttcactgtttagggagtaatgcacagtaacaaccttctgttgattacattcaagctactttggttctggaacaatcttcaggaagctgttggttcgggagtaaaagcgtg

SEQ ID NO: 325276 - DNA, 765 bp, Homo Sapiens
cccccatgagagcccccctgatcagggtgaggacgaggggccaggagccctgctgtttctcagttacacatatgcaggaagaggatttttttgaggaggagtagccagcccccatgagtgcccccctgatcagggtgaggacgaggggccaggagccctgctgtttctcagttacacatatgcaggaagaggagcttctctgcacagaaaggatgaaggacaggtgctgggagccctgcggatgctgaacccggcaggtgaattcccctccctctctagctcctatgttaggcagctccagggtcccagacattgaggtctgggaaggattgagggcttttccctcccggaaccagctcagtgaggcaggggggttgctgtcaactgtgcaggcgaggaacagggactggccctcctggatgggcaccgacatgccattgctcaggatccgcagggctgtgcctgtgccatttctgaagaagatgctgatggcgaggttctgtggagcataggagacattgagctggacagttctctccgtggtcacctgagctccttggcgtttcacctgacaggtgaggttggtgccatggtcctcgggcctgggggtgagggtgagctccgaggagcgggtggtctcggggtccagggggctgagggcattccccgtccaggagaatgtgagaggtggtcccgcttcacaggatcctggaaggctgcagctcagcctttggtgggacagatctcggggtccagggggctgag

SEQ ID NO: 325277 - DNA, 909 bp, Homo Sapiens
aggcagcatagtaggtctgagactcaaattccacatgctcgtttagttctcgcttgtttaagttcataccttgaaagaaagatacaaagttcatccatgtaactaacaaaccgtgatcctccaaaaatctcttggccacactttgatgagaaagaatattaataaaatcactaacaagaggccagtaagtgttattcttcagtaatgcttctccacagttcactaccacatgtaaactattttcttcatcttgtagctcacttttaataaggcaactttccatcatgtataatagcacagtgaccataatatccagcagctgacattcttctgttacctgtctggctagctcctcattgctgaacaactgaacactaatatgcacaattctgttagacattgtgtctgattcatgacttttcttcagtgttttcataatgaaagcataatgctgaacaaaagtttttgtaaaagcaaccttatactcttgatctggaagcatgttgagtaagaaagttaccatcttttgagggaattcatattttatagtccaaaataatagttcttctaggaagcttttatgcttcaaaacatccattatggattgatctttggtgccactgcttagttttaccctttttctcttgcccagaccttgactaccatcctgatcatcctcatctgaagaatccacttgtcccaaagttcctgttgcgcctatgaaaccttgaacagccagagaactagtaccagcagatggctcctgcacaccatatacaagcttatcctcaggatatgtaagtccagagctctttaaagctataaggtacttttcatgacttttctttacgcaagcattttctccaagaccagaagtcagatctttgtagttttgttggttgtcaaaac

SEQ ID NO: 325278 - DNA, 1002 bp, Homo Sapiens
gatggcaggatgacctcagccgaagtaggagcagcagctggtggtgctcttgcggctgggccccccgagtggccccctggcagccctcaggccctccggcagcctggccgggcccgagtggccatggcagcactggtgtggctgctggcgggagccagcatgtcaagcctcaacaagtggatcttcacagtgcacggctttgggcggcccctgctgctgtcggccctgcacatgctggtggcagccctggcatgccaccggggggcacggcgccccatgccaggcggcactcgctgccgagtcctactgctcagtctcacctttggcacgtccatggcctgcggcaacgtgggcctaagggctgtgcccctggacctggcacaactggttactaccaccacacctctgttcaccctggccctgtcggcgctgctgctgggccgccgccaccacccgcttcagttggccgccatgggtccgctctgcctgggggccgcctgcagcctggctggagagttccggacaccccctaccggctgtggcttcctgctcgcagccacctgcctccgcggactcaagtcggttcagcaaagtgccctgctgcaggaggagaggctggacgcggtgaccctgctttacgccacctcgctgcccagcttctgcctgctggcgggtgcagccctggtgctggaggctggcgttgccccaccgcccactgctggcgactctcgcctctgggcctgcatcctgctcagctgcctcctgtctgttctctataacctggccagcttctccctgctggccctcacctctgccctcaccgtccacgtcctgggcaacctcaccgtggtgggcaacctcatcctgtcccggctgttgtttggcagccgcctcagtgccctcagctacgtgggcatcgcactcactctttcaggaatgttcctttacacagaactgcgagttcgtggcctcctgggctgcccgtcgggggctgggcggagg

SEQ ID NO: 325279 - DNA, 641 bp, Homo Sapiens
  misc_feature (416)..(416): n is a, c, g, or t
tggggtgtctactgcagatatttcatcaaataaggatgatgaagaaaactctatgcacaatacagttgtgttgttttctagcagtgacaagttcactttgaatcaggatatgtgtgtagtttgtggcagttttggccaaggagcagaaggaagattacttgcctgttctcagtgtggtcagtgttaccatccatactgtgtcagtattaagatcactaaagtggttcttagcaaaggttggaggtgtcttgagtgcactgtgtgtgaggcctgtgggaaggcaactgacccaggaagactcctgctgtgtgatgactgtgacataagttatcacacctactgcctagaccctccattgcagacagttcccaaaggaggctggaagtgcaaatggtgtgtttggtgcagacactgtnggagcaacatctgcaggtctaagatgtgaatggcagaacaattacacacagtgcgctccttgtgcaagcttatcttcctgtccagtctgctatcgaaactatagagaagaagatcttattctgcaatgtagacaatgtgatagatggatgcatgcagtttgtcagaacttaaatgctgaggaagaagtggaaaatgtagcagacattggttttgattgtagcatg

SEQ ID NO: 325280 - DNA, 154 bp, Homo Sapiens
ccctgaggccagcggagtcaaagagaagggcctggacctaccggggagcattccgggtcctcacgagttgagacccggtggtcaggaggcgcagatctcctggcaatacctgcactgcaatgatgagaagatgcagaagtccctgggcgccatc

SEQ ID NO: 325281 - DNA, 608 bp, Homo Sapiens
gacaccagcatctggtactctaacaaggaggtgcagctgctgccttctgtttcggccacgtgaactgccaatgacttgacataccctgatcagtaggcaaagcgtttctcgatggaaaatttcttcagtgtatcctttaatgactggtctaatgaaccctttactacatagtatatctccaagcaaattatcttcatgattagggcacaggtttccaggatgctgggctctgatgtttcagagggaggagaaagggttccaaacagcggactggttaaattttcccaaaacttgggtttggttcggaggaccagcatggcactgtccctccgatcctgccacagagcatgcaaaaaggcaatggcggcacgatgcagcaggggtgggcaccagtatcgatcttgctgttgggaatcaatcagctccagcactgcatggagacagctccacatcccaaggctgaattcctttgagccatcactgccatccttaacttccaggttcagaaacagttcgatgaggcctggctgggtctctactgcaacaaagaggaactctagaatcatgactttgatgcgcatgtcctcaatttgctctgcaatcggtca

SEQ ID NO: 325282 - DNA, 720 bp, Homo Sapiens
cttattaatggctgctagcagtatggatgacattctggctatcactggattcaatacatgcttgagcatagtcttttctctcaggtggtatacttaataacgccatagcctctataaggaacgtatgtattagtctgctggcaggaattgttttgggattttttgttcgatattttccaagtgaagaccagaaaaaacttacattgaagagaggattccttgttttgactatgtgtgtttctgccgtcttaggcagccaacgtattggtttacatggatctggaggattatgcacactagtgttgagtttcattgcagggacaaaatggtcccaagaaaagatgaaagtccaaaagattattacgactgtatgggatatttttcaaccacttctttttggtttagttggagcagaagtatctgtttcatcgcttgaatcaaatattgttggcatatctgttgccactctaagtttggcattatgtgttcgaattttaaccacatatctattgatgtgctttgctggttttagttttaaggagaaaatatttattgctttagcatggatgcccaaagctacagtacaggctgtgttaggtcctctggctctagaaacagcaagagtctccgcaccccacattggaaccatatgcgaaggatgtgatgacagtagcatttttagccatcttgatcacagctccaaatggagctctacttatg

SEQ ID NO: 325283 - DNA, 533 bp, Homo Sapiens
  misc_feature (82)..(93): n is a, c, g, or t
catggcatctgattttgagaatgcacttaaggtcggggggtggtaagttatcccccgaaattcaagtagctttcttgagatnnnnnnnnnnnncaatgtatgatgaaaataaaatgcatttgaaaggaattgtttatcttccactgagttgttaatgtgatatacattttaaaaataactggcggtagacgttacaatcatttatgactatgtaagttactctccctaatttgtagatagtgaagttttacaaacattggtgtatgttcctcttgccgacaagcgcagaccaaactagaagtggccctgtacatgtttctgtggaaccctgacactgaagctgttctggttgccatgtcctggtttccgccaccttctgtgaggaagcagatatccggtgtggggtggatgaagtgtcagtgcataacctcttgcccgaactataacacattcatggagtttgcctctgtcagcaatatgatgtcaacaggaagagcagcacttcagaaaagagtgatggcactgctgaggcg

SEQ ID NO: 325284 - DNA, 511 bp, Homo Sapiens
cccatgacggccccaagtggatcatccttgacggagacatagaccccatgtggatcgagtctctcaacacagtcatggatgacaacaaggtcctcaccctggccagcaacgagcggatccccctgaaccgcaccatgaggctggtgttcgaaatcagccacctgaggacggccaccccagccaccgtttccagagccggcatcctctacatcaacccagccgacctgggatggaacccggtggtgagcagctggatcgagaggcgcaaggtgcagtcggagaaggccaacctgatgatcctctttgacaagtacctgcccacgtgcctggacaagttgcgctttgggttcaagaagatcacgccagtgccggagatcacggtgatccaaacgatcctgtacctgctggagtgcctgctcacggagaagaccgtgccccccgactcccccagggagctgtacgagctgtacttcgtgttcacctgcttctgggccttcggtggcgccatgtt

SEQ ID NO: 325285 - DNA, 746 bp, Homo Sapiens
gatgctcccatgggcctgatcatcatgccgggcatgatcagccgcgcattgttcccatgtaggacgggctccgggcactgaacccaggctgcagggcacccagggttctgggaccttgtcctgtgcctccttgtctgtggagcgctggggctgcatcctcttcgacgcatctgcttcttctcttccccgactctgggcccatggggagccaccctggggtccaacaaaggtccctcgggttatatggggggcactcagctgccggcgcggtggtggggttggcccgttggccacttgctctgagtggcgcctccggagagggactgagtgctctctcacctcgaattactcctctgacacagaggacgccactgagggccgtctggggccatggccacggccggagctgcctgagtgtctgtcctggtcactgagggttacgtagtcgtcatcatcttcttcttccaccccatccagcccattggggagccccaccccgaggctctcggggtcatcctgggtcacagatagctgccgctggagtggggcgtggcctgggcctgccatcctgggtagcctatggtctgtcccattctggggagcttcctctttggggagctccaggacccagccaatatcactgctgtcccgggctagtacatctgccacagggactgtccggggaaagggcacggggggcaatggctcagggtccccctgggggaggccgttctcagctgggacac

SEQ ID NO: 325286 - DNA, 571 bp, Homo Sapiens
cgtttacttgtgggttttggcttgaggatctcagcataaaagcagctctctatctctttgacaggcaaaaactcaactaagaggaacaatgacatacagagagaactataaaactaaacacaaaggaaagctctatcaatttcaagtggctacacgttttgctgaggctcaactctggttttgccgggccaggtctcaggacctcagcatcacctcctgcctcagcctggttgttaccctttcttctgggaggcttctgcttcctagaccttgagaaggtctggcagacacagcttaggaaactgccaaagcagagtggtggtgatgccaaggatgtcactgcaggagaagagggcctgggcttctgagccaccgagagctcacaggactggatctgacattcctgatgcatcacaccggaaccctcttcctgcagatactgtaatctgtcctcatggagaaggtcaggagtatcttcctgggcactgagtagagttggctttttgtctacagcctcatcttcttcactttgtggtggtgttgaaggtgttggaggaacaggggagcactg

SEQ ID NO: 325287 - DNA, 223 bp, Homo Sapiens
ctccaggcttgccggaggaagactatgggaaggcattagaacctcttttccagagctgttgctggattgttcctggagctgagaagccttttctttctccaacacctctcctgaagatggagtagtcggcaagggaagtacacacttctctcagggagttttggggcaggggttgaagccgactcattcaggtaatggagctcagggtcctgctgcgtctccg

SEQ ID NO: 325288 - DNA, 342 bp, Homo Sapiens
ccagcgggacctgtgtgctggggaggactttgtggtcagcttctagcaggctgtcaaggggcacaccaaagaggcgagtttctgccgctttccacttccccgccttgctcctcttcaggtccaagccgaggatgtcacagagcgcggtcagctctatgagggccagagaaggtaccttcctcatatcctgcagggacaagtctcctatcctcgtcacgccaagtctgcctttggggacggtaaacttcggcagggaacacttgccccaggcagaggtgcctccccgggatggcctgctcctctgaatctgcttccagctccagagcactttgtgcttggaga

SEQ ID NO: 325289 - DNA, 266 bp, Homo Sapiens
gtagatagaaaacgccaggttgacgtccttgatggtgaaaacaggacacctctgatgaaggctctgcaatgccagagggaggcttgtgcaaatattctcatagattctggtgctgatccgaaatattgtagatgtgtatggcaacacagctgtcccattatgctgtttatagtgagaacttgtcagtggtggcaaaattgctgtcctaaggtgcagacatcgaagtgatgaacaagcacagccctcatgcttgccatatgccatga

SEQ ID NO: 325290 - DNA, 609 bp, Homo Sapiens
ttgccgactgccagactcctcagtcaaatagttggtcctgataaactccagggcgctccctgtgtttgtgcctcctgtgcggtatggcagattctggatctgctccaagatcatgctcttcagagggtgctggttcagctggaaggctgggtagatgttgtcattatactgggcaagtcccactcggacacggtcactgctgatgtcaagccccaagatgacggagtaaaggaagttcttgactttctggaagttttggggtccgatgctagttgaactgtctactagaaacacaatgtctgccagggctgcttctctgcaagctggagagacgtggtcaacatgtggagctgcctttgtcaacgtatcacagagttcctgccgcagcttctgggcgagattgctcagaccagagaagttaggaacaaaggaggtaaaattctcctgaggactactggcaatttccctgagctctgcccaaactgcatctctgacgccaatagcataaagcaggatgcctgccttcctcaatgccttcgcaggtccatggacatggtcctcaactggcccactgctgatcaccacggcgatctgaggtacctcttggct

SEQ ID NO: 325291 - DNA, 778 bp, Homo Sapiens
tctaccttctctacttttgcttccaggctaatgaaaaaagaaacacatgtcttttcagaagcagatgctgaacaagataatcagagggctcatgatgttgatgtttcttcaaacctaaaaaagacactctctcaaatgtctttatcatctgacaatagtcatgctacacaaaacatatcacccaagaaagatgactttaaaaatggtgatataaatgcagactttagtcaactgaaacttggtgataaagactgcagacattaccaagagacaagcgaagactggtctgatgctaaagagagcctgacaggagttgacgtctcagggacacagggaaatcaagtagaacaagacacatggaatttggatcttacaggagaaatgaagaatgttgaaccctcacaaagagataaaggttatttgatacatgttggtggcctctgcccttcagtatctgaggccgatttaaggtctcatttccaaaaataccaagtttctgaaatttcaatttatgattctactaattacagatatgcatctcttgcttttacaaaaaacagcgatgcaaagatagctgtgaaagaaatgaatgggatagaaataaatggaaagtcagtaaatgtgtggcctgttaaaattcttggagaatatacatcaccactttcctccaaaaatgggaatagaattagttcgaataatttagagaaaagcaccaacaaacaaatccactcagaattctccatttctagattgcccagaactaggccacggcagctgg

SEQ ID NO: 325292 - DNA, 501 bp, Homo Sapiens
ccggttttggtgccacctcccccctgctggatgttatcaatggctaccttcagctctgtcacactgggatactggctgaggataaatttacttttaattttgtctgagtactgaatgattccaaactgtactctgttgggcccgatctggaacatctttatcacttcattcatgaacaccttcatctcaagaaaatcttctggatagatgctgccagacccatcaataaggaagtaaatatctgccttttcgatgtgcacacaaccttcttgtaggggatagctcgtcccactaatggaaactttactgtccaccatctcagagcagagctggtgtgtaagcttgcttcctactatggagagctgcaaaaaggattccagggggactgaattcttccaaggaggatatgatgctatcttctccaggtccttactctctgagacattgtgggtgcccactgcatagatggtgacgcctgcccttcggaggtgggaagcgggt

SEQ ID NO: 325293 - DNA, 725 bp, Homo Sapiens
cttccccttcaggctgggttggaaagagcagaagcttttaaaggccttactccgatcattgttgtagaagacaagaaacttggaatatccattgtggaagaagatctccagggcgatgtcctgcaggaggaagcgagcctgccgtagctcccgcatgtcagcgtagctgtggcactggcacgagtaatggtcagtggacctgtctttgctgcacaggttgaaaatgaacggatcgctgatgttggataagcagtgacgggtacagtagacatcacccgtgggagacagtgtgaagttctcgcagatgtagaagtgttggtggccaaaaagcaggaccccttctgacaccaggtggccctgcacaatcaccagggagaacttctgcgtcaccttttctttatcaagaagctcttgtaaaataacttgtctttcccgacacagttccaagaagtcttctgagtgcagactttcgtgtaaggctgggaagaaggtcagctgggtgcagtccacccccacctcgtccggctcgccctcagcctccctcagtgtcagttcatcttggttttcagcatttgtttgagaaatatgatcatttttgtcttggctttccttgtgccttcctgagctcagggcctccaaaggagaaaagcgtttgatgcgtttcctcattcgagctggtccttctctccagtcgagttcccatggggaacagggcttggtttctt

SEQ ID NO: 325294 - DNA, 613 bp, Homo Sapiens
cagccggaccttgtgcctgctggagatctctgggtagtctatgaagtagtcgtggatggtgtccatcaccagcttgggggagccatgagccatgttcttgatcttcttgatgatgtacttcaagtggaaggggtcagcactgttcatgtcctgcagcatcttgaagcaggtggctgcactgtaggcttcccccatgaacatcctgtgctcctgtggtatcattgtggcctggctgctctgcgacttgtgaggcaggatggtggtggggtgtgaccatctgtccctgcgggtggagtcctggtgtaccttcatgccagatgagtccttcatggatgtggagacaggtggggagattctgaaatggaggaggggccctgggtgttggcatctgagtgcgtgtatatttctgcgttagtacagggggtgctgagcgcagcattgacttccatcgggctcagctgcatccttccatgtgtttgtccttccattcaatggactggctgggccctgggaggagggcaggggtctcgaggcctcaaggacactgttgagtaggaaggatcacctgtaggcctggtggggcctggcctccgtgcaagtgtcaggttctgag

SEQ ID NO: 325295 - DNA, 589 bp, Homo Sapiens
cccccatacaagaaaacattcagattttccagtgatatcgggatcatcttgagggtcacatccaacattcatgcttctcaaatctccatacaggaagatatgactattggctctttcaggctgcagagtaaaatcaactctgaatccactgaggctgtccagcagtccagtgatgggccctgcactgagctctggattcacaggctcagacacttgcagcagcagagactcatacctgtgtaatatgtctccaaaagcctggagtagctccacatctgctttatggcacatttgcttcagatcctcatacattcctcttaaaagctccctggaatgttccattctggctttgctttcattgagttgctgaaaaatgtcctcgccctcctttcgcagcctttccaagtgatgttgctcttcttcatggagaaatgcaggcatcttctgatattcagctctgattgcttctatccttaaactcacataatccttccagcatctggttcttgtggtttccatgttcagatttctgagattttcacaagctttttcccataaagactgcattttttttaggagctcctcccgg

SEQ ID NO: 325296 - DNA, 252 bp, Homo Sapiens
tctctgccatattcttttgaactttttcttgggtgcagctaatttactctgtccagtttcttctgccattgtggggtggggagggaggcggggctggggccacgtcagccaaatcccagcgagcgctgatcaacacgtccagtcacccttaaagaatcagaaataaataggctgggcatggtggctcatgactgtaatctcagcactttcgggagaccaaagtgggcggatctcctgagatcattagttaca

SEQ ID NO: 325297 - DNA, 452 bp, Homo Sapiens
gcccaggagccgccaggggtagagaacatacccagacagattctgctgcctgcaggcttcacgcccgacaccccgcaccctccgtgttcaccaggcaggaagggagactccagagacttgggacacccagtatacggggaagaggcctggaagagcgccactcctgtttgcgaggcccccaggcggcaccagctgtaccactgccagagggatgagtacccaccccccgcccgccgccagcaggagacgctagatgtgggcagcttccagcggctgccgcagctggaccaccctaacctaatccaacgcaaggccatctcaggctatgctggcttcattccccgtttcacctgggtaatggggttgagttaccgagacggcgtcatgcaagccatggacgaattcgacaagagccagttcctgtttagaaacccccactgtgacctgggcga

SEQ ID NO: 325298 - DNA, 864 bp, Homo Sapiens
atgtcctctgcatgtgggatatgcagaaaaccagctgtcacccaggccaccaagtctttccctgcaatggtctcattgttgatgaagtcagtgaagtccacagtgggtgtccaagggtcattcaaattgtagatgctggtgctactaggttcctcctccttccgctgggttaccaccagctggtacctcccccagctgaagcctctctccacggagctgttctggggcagtggctccccagaaaagctgcgcacctggatgcggtagccccgggggtgaccccacttgttgctgtggttgctggccaggtacaggtagcgaggggtggcgcctcccatggggaaggtggcttgctcctctgtctccagcagcttccgggtcacctgcagcctctgcatctggtgctcagggctccagggcacagccatggggacaaaggccatatcctcggcccagacccagttctccagtcctgctacatccaggtccaccttgaagtgggcgctgtgggtgtggaccgtgcccagggtgtgctctgaaactttgtttccatacctctgggcagcaccaaaggggaatgctgagctgatgtagccggtggtgtggagtctgatttctatggccccattagggtggaagaccatatcccacacatagtcatagttgagcatagtagacacagatctgatgaccagcaccgtttccgcaaggcccccaaagtagtgggagtagagatctgagtggtgtcgccgcagggggaggccctggttctgttcaaatatacaaaaggcatcgcgtattgtcttggcggcctgggactcaaaaaggaagtgccagtccacgtaggtggccaggtaggggcat

SEQ ID NO: 325299 - DNA, 986 bp, Homo Sapiens
ctgttctcatcctttgtgggctgagacaagaattggaaatggaaaatccactattcataatgacatccgtgtgcacaccagaaggcggcagtgctgccttagggttgggctctggaaaaccaaggccttctgcgccctctgctggccactctgggttctcctccgcccatgcacagtaacaagaacctacaggaccagggctgttggcatccaggaagccatgagaagggaggtggccagcccagtacatgccaagcactggtgcaggatcctgcctcaggccaaggccctgtgccctgccccatccaccccttgttaccaggaacatcaccactatctccccaaaacctcagtggggccagcagggaaagtcactagagccggggcctcctgatatcaggccagaccttggcccccgtctgctcgtgtctgccaggacacctctccaggggccaacttctgaagctgccccttccgccctccaccagtagcaccttccctgcccttcctcctcttctacctttcccaggcatctcggaagctcgggggcctcttgactctcctgctggggacacaacatcccagggcagcagggattccaggatccattcctgccttgtcttgaaatgcagccgatggctttggaggagtatatagcacgctagcagcatgctctacagctgccgagcccttcctggggcactgtccgccaggcggagcaagagcgaggggctcagaggaacatggcctggcccccaggggctgccgggcgccccccggaacaggggcttacgtgctggatcagtgtctccacgatcttgtagcggtcaggcatgtgggtcaccatgtctgtcatgttgtcctcagacgtcctcaccagtgtcggcccaaagaccagggccaggatccggggttgcatcttgtttttctcagagtggtcagcgatggtcttgagatggcccacaaggaatttgagcgtttcatag

SEQ ID NO: 325300 - DNA, 624 bp, Homo Sapiens
tcgagcgatgatctgtttgacggcaacttccactttattgccattgagcgtgtactgaaaaattcagtcgacgtgtgaactaattagggatctaagcgccggcttccgaggagggcctgcatgtcacttcgtgtggtgtcgccggccctcccgctgtgagatggaaatggctcgcctgctctgtgcccccctacgcttcatgcaggggtccatgtgcagctcgtgggcacgaataacgccaccttccacctgcgcgatgcccttggtttccaggatgaggctgggcacatgccgcacagacaagcccacgcggatggcgtcacagatcctcttcaccaagtcaggctggaaggcgtgcccagaggctgtcttcaggaagacgatcaccctctcttccccgtacttgttatactgggggacatacaggctgtcctccacctcctcaaaggagtccactatgttacaggtttccaggctgccgaaccgcggggttgagcgtgccgtcactccagccgagcatgatgacgcccccggtcttcgggttgatgctgcagcagtcgccatgagccctgatacgctcagcccttgatcatccacactgaggggaactggctggccatcaaa

SEQ ID NO: 325301 - DNA, 625 bp, Homo Sapiens
  misc_feature (11)..(11): n is a, c, g, or t
  misc_feature (125)..(133): n is a, c, g, or t
actcgagaggntgacgttggaggatcactttgagcccaggaggtggaggctgcaagtgagcagtcatcactgtactccaagcctggtgacagagcgagaccctatcactgccccccgccccaccnnnnnnnnnctgagtagacaggtgtcctcttggcatgataggtcttaagtcccctcccagatctgtgacatttgacaggtgtcttttcctctggagcctcggtgtccccatctgagtgagaaaaggcagtggggaggtggatcttccagtcgaagcggtatagaagcccgtgtgaaaagccatactccaaggggctccaagtccagcgcacagtcgcagaagggcccagcaaggcagccagggcggcacaggcaccaggtcccaaccttcttccctgtttgcccactctcagaccccggagttcatcatctcggagccgctggccaatatgtactcatgtgggaaccagaacacactgatggaggagttggcagagcaggcacagcagcatgacgagatgctgcacatgcaccacgctgctgaaggaggcgactcagcatcatcggtgacatcaacacgacgcgtgggtcgacgatatccctaagttccgggccggtacca

SEQ ID NO: 325302 - DNA, 330 bp, Homo Sapiens
tctttatagccacaatcacactgctctgtaggttccaaaattccattgccacaagttgaagattttcggtaagtcatttttgaaactgttttatcctgaaaacatttaagttcaggctgcagaactatccgtttaaatccatccatgctgcattttttaaaaaacttcataccatgggatcatatcgcatcaggattcattatgcatgtagttcctggtcagtggcaattgtagatatcatcatatgtcaatcccagattaattccaagcaactgtgccataacaactgaaaaggcctctgcagtgattttcttggatacagagcaatcc

SEQ ID NO: 325303 - DNA, 156 bp, Homo Sapiens
tcgctacgtggaggtttggtgtttggataagaggcactgatctttcccaaccatcatccatcgccgtgcgctccagaaagtcagagcaggagtcagcagaagctggaacagattatgttggtatcagccgaaacctggactttgctccaggcgtgc

SEQ ID NO: 325304 - DNA, 447 bp, Homo Sapiens
tctgcatagaattcaaagtgtagtgtagttgcactgggtggatatttcatcatatgcaagtctctgcaacattctgcaagtccaaatccattctcctttccaccccagctctctgccaaatgttgtagccgagttagcagcggggtcctcttgtcagatcccagacgagtgatgtagtttgatcttttgctaaatacatataggagattgaggactgccagcaccacttgcatatcagaggaagccaataaagttgtcaaatgctctatggaactgtacagatgccgggaaaagctgtactcaatgagcaaggctgtgaagttcaacacagccaagagaagcattttcagttgctctctttctggcctatcacatacgagcatccatgacatattctccactgtctgtccagcatctgccagtattccatcgaagcggtccaacagg

SEQ ID NO: 325305 - DNA, 598 bp, Homo Sapiens
gagcggccagacccctctgccccagcctcaggcccaggcttgagtttcctggctgggctgagctcactacccggcacccaccctacctgaagctggtgatctccttcctgttcatctctgctgctgttcaggtggagcagagctacttggtcctgttctgtacacatgcctcccagctacaggtccccgtccaggtcctggtactaactgtcctggtctcagccgtgctgagcaccccgctgtgggagtgggttctccagcgcttggggaagaagacgtcagcctttgggatctttgcgatggtgccctttgcgatcttgctggctgctgtgccctcagcacctgtggcatatgtcgtggcctttgtatctggcgtgagcattgctgtgtccttgctgctaccctggtccatgctgccagacgtggtggatgactttcagctgcagcaccgtcacgggccaggcctggagaccatcttctactcctcctacgtcttcttcaccaagctgtctggcgcatgtgccctgggcatctccaccctcagtctggagttctcggggtataaggcaggggtctgcaagcaagcagaggaggtggt

SEQ ID NO: 325306 - DNA, 441 bp, Homo Sapiens
ctgctcagtcctttgccaggagtgtggtgctttagcgaactgtcttttgtaaaagaaccacaggatgtaactgtcacaagaaaggacccagtcgttttagattgccaggctcacggagaagttcctattaaggtcacatggttgaaaaatggagcaaaaatgtctgaaaataaacggatcgaggttctttctaacggctctttatacatcagtgaggtggaaggcaggcgaggagagcagtccgatgaaggattttatcagtgcttggcaatgaacaaatatggagccattcttagtcaaaaagctcatcttgccttatcaaggatagggagtacatagtggaggtggccagataggccatgagaagatgaagcatttgtcatgaccacacattgtttccaggacctcctgagaagcctgatagaatcctagggcttccaa

SEQ ID NO: 325307 - DNA, 1079 bp, Homo Sapiens
tcgttttttgaattgtggtagttgtgagcacataaaacctgttaatgattctttttctcctgagttaaatgaagattcatggtgccttttctgtcctaaactttttccagctctttggtagaaataaaggctgttgaattctttttgatttgcattagaatcagaagcacgaaataaatccaaactggggacagatggtaattctctccagaaagtctcatcttttgaactttcacatgtgaggccttcagactcatctgatagacatttttgctgatcagtgaataaattacctttctgagagtacaatttgttacatgcagtctgctgtgcaccatattgtaagttgaacgggtgattctcttgttcccatatatttttcttaaagttccaatgaagaggagattgagtgccctctagtgaaaagatagggtccgatacatctttatttatgaaaccttttgcttcatgtgttctccttttctgagaatttataaaacgggggacaactgacactctcttctgagtgtcagttggtgattttatagtttcacagttcatttgtgttagacccaaagaaaagacatctgactctgaatcactgtggtttagaaaggagttataagccggtctccttgattctatattaattagaaaaggagtattctgccctatattagatttacagctggagtctttccagtagctggtctgattgtatgaagtcacaggtggtaaaaaacttgagattccttttagttccataatggaagagttgtcattcaaagtggtggttttgtcttcctgcactgtctctcctaatcctaaatactgataatattcattatgttcttgaatgacagagtctaaatcagaagctgaactttgagaagacaaggtactaatctgattcctattttcctgaggtgacgaaatttgcggtgattttgttatggaagaagaaccaatcttgaatagggaagtgatgctacaaaaatgctttaacactttttctgggacttcaggtaggagttcctgaagttgacacagagttgctaataatatccaatgcagtgaag

SEQ ID NO: 325308 - DNA, 561 bp, Homo Sapiens
ctggcgggagtaccgagacttgcgggggagagccaccgggctcatctcggcggagggtgaacagtggctcaagatgagaagcgtattgtgacaaagaattctgaaaccgaaagatgtggccatttattctggagaagtcaaccaagttattgctgacttaattaaaagaatctacctcctcaggagccaggcagtagatggagaaaccgtgaccaatgtcaatgatcttttcttcaaatattcaatggaaggagtggccaccatcctttatgagagtcgtttgggctgcctggaaaacagcatcccacagctgactgtggaatacatcgaggccctggagctcatgtttagcatgttcaagacctccatgtatgcaggcgccatccccagatggcttcgccccttcatcccaaagccctggcgggaattctgcaggtcctgggatggactcttcaaattcagccaaattcatgttggcaacaagttgagggacatacagtaccaaatggaccgaggccggagggtgagcgggggacttctcacatacctcttccttagcca

SEQ ID NO: 325309 - DNA, 691 bp, Homo Sapiens
agtcgggtattgtagagggggctgttctctccagtgtagccctcccaggagccatggaggtcataggtcatgacatggatgtagtccgggtactgtgacagttgggggatctcatagccagactggatgttggagatgccagcagctactgcagcagtgaccatcagcctgggcttattaatgtgcttggcctcctgctcaaaagcttcacgcatttcctgcaccaggacagtgaagagatgcttgtcctgaggagggctcacacgagagccggggtactcccagtcaaagtccagcccgtcaaactcatactggtgcaggaatttgatgactgagttgatgaaagtctgatggttctcaggagtggaaaccatggcagtgaaaggagcagtgccaaagttccagccaccaatagccaagagagttttcagttgactatttctgcttgttggcctgtttggaatttcagcctgaagtctgctgtggaagatcttgtttaaactgtccttaaaggttaaaagatttgaaactcaggttttccgtcatttacttgtttttcaggccattgaaagcttggtagagagtcatgtcatcccattcgatggtggtgatctcattgttctgcattccagcaaaggcgtagatcaagtgggtacagaggcaggggtcaatgtcatcaggcttgaagcac

SEQ ID NO: 325310 - DNA, 327 bp, Homo Sapiens
cgcagtcagaggaccctaaggcagctgacggccaatactggccacaccattcatgttcactaccctgggaatcgccagcccaaccctcctcttatactgcagaggttgcttggtccctcagctgctgctgacatccttcagctgagcagcagccttcccctacaaagccggggtcgggcccgcctcctggtaggcaacgatgacgtccacatcatcgcccgttctgatgatgagctgctggatgactttttccatgatcagaggcacagctaccagccaagcaggaaccctgtccagcatccccacagccctgacccgctggacaga

SEQ ID NO: 325311 - DNA, 724 bp, Homo Sapiens
  misc_feature (310)..(537): n is a, c, g, or t
tcaataggttcaggaatactgttcttcttttttattatcttccaacaatggcaaaactttcttccaataatgaaccacttctccctatgtattctcgttgatcataaaaagaatttaaggcccgctggcccttaaaaaggaaagtttaaagcaccacaacctttaaggaacacgcatgattagatctaaagttcatttacaagttgtaagaactggctaaaatttcaagtcaaaaccaaatggtacctcaatagtcatttgttcaacttccaaatactgtaataactaaaccaccttaataccagtgaannnnnnnnnnnnnnnnnnnnnnnnnnnnnnnnnnnnnnnnnnnnnnnnnnnnnnnnnnnnnnnnnnnnnnnnnnnnnnnnnnnnnnnnnnnnnnnnnnnnnnnnnnnnnnnnnnnnnnnnnnnnnnnnnnnnnnnnnnnnnnnnnnnnnnnnnnnnnnnnnnnnnnnnnnnnnnnnnnnnnnnnnnnnnnnnnnnnnnnnnnnnnnnnnnnnnnnnnnnnnnnnnnnngtgtgagccaccgcacccggcctctacactcaacttttaaatgcttctaatgataccaccctaacgtagcaatcccaactgctttttaacagttgccatttttagatagctgaaacctgcctcttctgtagtgtcagtttgttcaaaaggctgaccatctacacctaatggtgacacaaaacacacc

SEQ ID NO: 325312 - DNA, 1611 bp, Homo Sapiens
  misc_feature (563)..(587): n is a, c, g, or t
  misc_feature (630)..(630): n is a, c, g, or t
  misc_feature (639)..(639): n is a, c, g, or t
gccaaactgaaatccttctcctgaagttgattttgcaacatctgcaaatgtaaaagtgctacttgtttggccaaaaatcacaccacggcccttcttccggccactaatatcctgagcctggaagccagtatcattttcaagaggcttttcccttttcttttcttgatttcctggttccgaaatgccaaatttaaatccatcagcagacacagcgatggaaaatccttctttggttgacttaaattctgtattagaagaaccctttgtgggagtaacattagctgctggtctgagaagatactgggaattatatgctggtgactgactataatatactgaagggccagtagttgcaactgttagtggagccccatgaaatgtctgtgacccctgatatccatcaggcaccgagtctggtccataattctctgtgggccaacgatgacgggatgctgacttactgctatttagtttcgtaatggcctttacttctttggcaaatcattttcccgtaaagaattctgatcttctgcccatcgaggtggtgttttgggagaatactnnnnnnnnnnnnnnnnnnnnnnnnngagcatttaaaacacttagaaacaatttcacaatgaaatgatnccattcttncctgtttaccttgtaacttttacttggtgatagtgaatatttggtaggagactggtgtagaatgttttatttcatgaatctgcatttcggcaaagaaccattttttatagagaggacctcctttcactattagtcttcgagttcctgcatgactgacttaagcatctgttttacagactccaggggcacaggcaatttcttgaccactgaaagatttgaatcaccgtcatctataatctttattaggtagtccctggtctttgtcagataatttctgcattcttcttgttcttcaggagaaagggcatcattttcaatgtcttctgccttcctgtgaaaaatcagtgcaagattccaataagaaacaacactttttatagattcaaaagcagtcatagcatcttctatatttccatttactgcatccaatatagcaaaagttacgtgtgcgtcttcttcatattcaacaatttctgatgcctgaatgtctacactatgaaaatgtttaaacagaggatcaataggttcagggaatactgttcttcttttttattatcttcaacaatggcaaaactttcttccaataatgaacacttctccctatgtattctcgttgatcataaaaagaattaagaccgctgcccattttctgaaggcattttgcccaatgtacaagcagagcaggttgaaggccatgtttttcctgggctcttagagtgtttatttcatgctgaactagaagtctcaattttgctgagtttccaggtactgcttttctgtgaatcagagtacaaaccgcatcccaccaagatttttgtctttctgtacaaagctgtttacacacaggaaggggcaggcataacggctgataggagctgtggtgagaattacatttctcctttaattgtaagtggctggtatatactactccaaggagaaatacctgttttatttaaggaaaagttaagttag

SEQ ID NO: 325313 - DNA, 338 bp, Homo Sapiens
cgccctaggagcacacttcatcgcacgggacccctatgacctgatgggggctgctctgatccctgcatccccagaggcctgggccccctaccctttgtacaccacagagctgaccccagccatctcccatgctgcgttcacctacccaactgccactgccgctgccgccgccctccacgctcaggtgcgctggtacccttcctctgacaccacccagcaatgatggaagtaccgtcagttctgttagtttttcagtctggtcaccggggaggtggttctggtaatctgtggtggtgccgggacaggcgccccgagttcccactgcccccgggcggcct

SEQ ID NO: 325314 - DNA, 538 bp, Homo Sapiens
tagacagtaaactttattgttactttaaataggtttcaaagaagaacacacttttttttactttaatgaggaagctgaaaaggctgcggaggcacttgaggctgctgcggctagggagccgctggtgcccaccttccccacacaaggtgtagaggaatcagccgaaacaggagcatcctctggatagggctgtacacaccccaggttccagccacaccatcagtattagtagaccgggaggtctgaagtacggcgccgtgtctccacatggagtttcctcttcaacttcaccaactcttgtggtttttattcttctaattccactgtttggtaaattacatatatgatgtttttgcctgaaattctgtgaacttcgttttgcagccaccacacttccatgtggattttgtttgtctattagctctcctgtccatttttcagggacacgctccagtaaaagaggccaatatttttgttgccaaaagcacactcagtcaaacaccccatcctttaccaatcagaatatctctgagaacaa

SEQ ID NO: 325315 - DNA, 662 bp, Homo Sapiens
gctgggtcaactggttggatctttaactgcaccagcactggagagttaaaaactcctggagggtaatttaaggatattcgggaatccatgcttgacttaagagcgaggcctttctttgttactgtgaacgactctttctttaaacaagacacaacagaaaagatacccaatttgtaatcttttactgaagcacaggtccccttataacctcccttcattccttctagtgaatttgggtttaggtaacttgattgaaggtttatgtcacacactttcaccatgatatctctgtaatttcctctgtaacgtgcagtaaatggaattgcaatgcctattggaaatggaactctcttttccttatctgagcattcaatagttatgacgttgctaactaactcttcattatcacccactattaaagaactcatgtgatttattatccggcattctagttgttgtagaacatatgatggtgctgtaatataacaagacacttgggggccagtatcatcactcagcacatcaagatactccttttccattatgttattcttgtgctttatattctctgaatcattgggaagagtactatttatatatttcttggagatatcaaatattattgaggatgtggtcatctcttctcttgggctttctgaagt

SEQ ID NO: 325316 - DNA, 466 bp, Homo Sapiens
accccaaaggccagtacgacccccaggagtccgtgtctgtgaacattgccctcggcagcccactcttaagtcgatttgacctgatccttgttttgcttgataccaagaatgaagactgggatcgtatcatttcctcctttatcttagaaaataaaggttacccaagcaaatcagagaagctctggagcatggaaaagatgaaaacctatttctgcctcataaggaatctgcagcccacactgtctgatgtgggcaatcaggttcttctccggtactaccagatgcaaaggcagagtgattcccggaacgctgcccggaccaccattcggctgttggaaagcttgatacgattagcagaagctcatgctcgcctgatgtttcgtgatactgtaactctggaagacgctattacggtggtgtcagtcatggagtcctcaatgcagggaggtgcactgctaggaggtgt

SEQ ID NO: 325317 - DNA, 778 bp, Homo Sapiens
atccacaacagaggttgaatatttaacagccgggacgactacagctcctcctccagaacaccatgaggtgttcaccttcagacaagggtcaggctcagctttcacacatgactgaagccacagttcaacctctggacctggagcttagcatatctacagagcgtactacagaggttaaaccatctccaaccacggaggaaacctcagctcagcctctagacccggggcttgccataactccagaacatactacagagattggacattccacagccctggagaagactagagctcctcatccagaccaggttcagactctgcatcgaagcctgactgaagtcacaggtccacctacaaagttagaatcttcgcaggattcattggtgcagtctgaaactgcaccagaggaacagaaggcctccacaagcaccaacatatgtgagctctgcacctgcggagatgagactctgtcatgtgttgatctcagcccaaagcagaggctccgccaagtgcctgtgccagagccctacacctactatggcatcttcaccatcttaaatttccaaggaaactatatttcttacattgatggaaatgtatggaaagcatacagttggaccgagaaactaattctcagtgaaaattatttgactgaattacataaggattcatttgaaggcctgctatccctccagtatttagatttatcctgcaataaaatacagtctattgaaagacatacatttgaatcactaccatttttgaagtttataaatct

SEQ ID NO: 325318 - DNA, 346 bp, Homo Sapiens
cgtggaccgcagctgtgacatcggcaacttcgagctcctgtggaggcagccggtggttgagccgcccccattcagcgggtccgacctctgcgtggcgggcgtcagtgtgaggagagccaggaggcaggtgctgcccgtctgcaacctcaaggcctcggcctcgctgttggacgcgcagccgctgaaggcacggggcccctcggccatgccagaccctgcccagggacccccatcaccagctctccagcgggacttgggactgaaggaagagaaggggctccccctggccttgctggcacccttaaggggggcagccgagagcggtggagccgcacagcccacccgc

SEQ ID NO: 325319 - DNA, 442 bp, Homo Sapiens
tgcttcctcaccgccatcaactacctgctcagcaggcacatggcccacaagagtgaacagatactgaaagcggccagtctccaggttcccaggcccagctctggccaccatcatccacctgctgtcaaagagatgaaggagactcagacagagagagacatcccaatgtctgattccctttacaggcatgacagcgacacaccctcagatagcttggatagctcctgcagttcgcctcctgcctgccaggccacagaggatgtggattacacacaagtcgtcttttctgaccctggagaactaaaaaatgactccccgctggactatgagaacataaaggaagtcacagattatgtcaatgtcaatccagaaagacacaagcccagtttctggtattttgtcaaccctgctctgtctgagccagcggaatatgatcaagtgg

SEQ ID NO: 325320 - DNA, 713 bp, Homo Sapiens
catccttcttgggcctgagcaaggtcagtctgcagccagagtacagagtgccaacactggtgttcttgaacacaggcctgagcagaccctgaaggactctctccgtggtgttaaactttctggagccagggtgatgcatgttctcctcataccgcaggttagtgatggtgaagttgattgtgaatagcaccaggagagggctggcggtcgtgggtccagacagggaggctggagttctcgaggttgccaggtgcattgtggaggtctcaggagttctggtggtcgtcacagagctctgatgggtgaaaccattgacatagagactgtgcctgtccagggtgtaggggcccagctcagtgatgccgtgggtcagctggctcagcttccagtacagccgctctctgtccagtccatggcttttggggtcagggcggtgggtgcagatagcatccactctggtggctgccccatccttttcaggcctgagcaaggtcagtctgcaaccagagtacagagagctgacactggtgttcttgaacaagggcctctgcagaccctgaaggaccctctccgtggtgttgaacttcctggagccagggcgatgcatgtcctcctcatactgcagaagggtgatggtaaaattgagggtgaatggcagcaggacagacgcagtggctgtggggccagggagggatgagggagtctcagaggtt

SEQ ID NO: 325321 - DNA, 421 bp, Homo Sapiens
atcagaacactagtagagacggggttttgtgcagagctcctgacaggccagccactgtggcctggaaaatcagatgtggaccaactttatctgataatcagaacactaggaaaattaatcccaagacatcaatcaatctttaaaagtaacgggtttttccatggcatcagtatacctgagccagaagacatggaaactcttgaggaaaagttctcagatgttcatcctgtggctctgaacttcatgaaggggtgtctgaagatgaatccagatgacagattaacctgttcccaactcctggagagctcctactttgattcttttcaagaggcccaaattaaaagaaaagcacgtaatgaaggaagaaacagaagacgccaacagaatcaactgttgcctctcataccaggaagccacaaaa

SEQ ID NO: 325322 - DNA, 755 bp, Homo Sapiens
tagtccttcttcttccgcactggaatctaggctgaagtcttgactttgtaatattttctctacaatgtcatctgcatccaccctggtgtcatcaactcgcttcagctgagattctacagaatcttgtttcactgggcatctgctgagtttttctgaagctgtatcttctttatcagctgtatcaagatttggctcagcgattttctgctcaatttcatcacatggctctagaatactttcaactcctgttgatgtgcttcccactgaggtatttctcctgtggcagagctcagagaaactagatgaccgggagtgacacgtgctataccctgatacttttgactgctgacttgcatagcttgatgttctagaatgtccacaggcaccaagttcgtctggaacagaggcactctttgctgaaagatctgctattccaagatgcactttgagagtctctccaccttttctatcttcttgcaaagattcagattcaccagcaattggtatagacattgaagtggagggaggcgttttaaaacatgggtcaccagacatcagttgcatactgatcaaaactttaagaatggaattatcctgtcttgtatttttggtatcatagccttccagtaaacagcggcgagtggtatttcctgatccagcaaactctgccaggtttagatctgcaaagcccagctttgcataagcttttccaccttttaattccttcctcacggatactctgtagatacaaggat

SEQ ID NO: 325323 - DNA, 970 bp, Homo Sapiens
  misc_feature (14)..(14): n is a, c, g, or t
  misc_feature (21)..(21): n is a, c, g, or t
  misc_feature (34)..(34): n is a, c, g, or t
  misc_feature (51)..(51): n is a, c, g, or t
  misc_feature (236)..(236): n is a, c, g, or t
gaaacccactaccncagctcntattgtcaagagncggtgactgcacttgcncctttggcctgcccattaaggccccaaacgaacacaggacttacttttcagacacctgattctggagggtgtgtggcagtcaggcatgcaggccaacactgcgccgtcccatgctggaaatggcccattgttgccccagtggaaggtgagaccacagcgcctgagaacaatatcccagtttggantatccgcaaatactgggattagcaattagaacagcggggaaaggagaagcctggtggccacctcctggtgaccagccaccatgcacaaatagcaaaggagattaaacttggctcaggaggtccccgagctcttctcactggagtcgatctgcgagcacacttgttacaaaaagtcattccaatcttggtctttcagaaattataacttatccactgaaaatgctggtagatgcaatatttttggatcaaatttaaccgatggtggttgtttcattatcaattctttcttgttgaggtgtaatagaaggtgttctgttaggtttaaatttatttagtgctccactaagaaaatctcctacacgttgtcttctctttctcttatattcaccaggagtttcatattcaccttcttcaaagccttccagtgatggagtagcacagagaccatcaatacccaacatggctggtatcttttccaggataaagtctggtacacgcccttcttttctgcgttagaagacatcttttcatgtccttcacttgtctgaagaagatttggtgcaaatattactgcaagattgctgctatccatcttattctcactggatctaagagaaacattcctgagaaagttaaagaagtatcttaatacatgaactgtgtggtcagccagaagacaggagagcaacagtatagctttattcttttcctctgtgcctaactgtgagcttcaa

SEQ ID NO: 325324 - DNA, 687 bp, Homo Sapiens
ctgtggccaggtcccgctggtgctgagctgtcaggtcctggagccgctgggtgtgggcgtgctccatctgtgtcatctgggcctgcagctgctgagtttgcctcagggctccgtccacctcctggtgcaggctgttcagagactgttgttgcctctgtggccaggtcccgcaggtgctgagcattctggtcccggagccgctgggtgtgggcctgctccatgtgtgtcgtgtgggcctgcaggtgctgattttgcctcagggctccgtccgcctcctggtgcaggctgtttttagactggtccagcttctccttctcagcctccagcctctccacatcctcgtccctcttcagtgtctcttggtccatctgtggcaggggctcgagcgatacctcagccttctggcacctgtgctccaagttggtgagctgttcttccagcagcttcccctgcttggccagaccttggctgtgcctcctgctctcttcaagagcctggcgcagcgtttccagttgctcctgcagccgccgcttctcctggcctgccgcacgcacgctcgccaggtgctccaaggccagcctgaggagcgcctccttctgcagggcacgtgctgcccgggcgttaatgagcgcgccctccacccggcgctggccttcttccgcctcagcccagggctttctgcagctg

SEQ ID NO: 325325 - DNA, 601 bp, Homo Sapiens
atccagaccagcacgtcggggaggggtggctggggctcctcagccagaaagcgcagttttgccaggagcttcttggccagtgccaccttcttttgcacattgcgccgtctcaggctgcgtagaagtcgcagtccttgcttagccaaaaggttcaggctgtgcaccaggagtttccctcggcatcgatccagggcattgggccgggtcatcgtcctgcgctcggcaccgtggcaaaactgtctgctcccagccaccagcacttccagtgcctgcttgagctgtgcacaggcgccaggccccggcttgcgctgcagtctctcaacctcctgcagcccctggtccagcctctcggccactttgcgcacgcagttgctgctctgcaggcgccaggtgtggtcctcccagcaactccacacatgcatgcatggcttgcagtgacagaggggcaagcagaagtatggcccgctgccgtccatgggctcaggccgctgagcaggggtccccagttcttcctcctctttctcctcctctggcctggctcccagcagaggctgagcctccacggctgcaccctcagttccctccccagccctggaccctc

SEQ ID NO: 325326 - DNA, 554 bp, Homo Sapiens
cacagcgctcctccttcgggggtgagggtccagcagcccccgcagaagcgcgtcggccgcggcggccaggccgaaccagggctgagggcggtcccggggctggcccgacgcctgccagatgaggaagtcctcgtagaaggggtcggcctcggccaggggccggtcccaggggaagtagcccgtgaggaggcagaagagcaggacgcccagcgcccaggcgtccagggcgggctgaatgggcaggccctcggggagcggcgggggcgcgcagagctcgggggccgtgtaggggatgggcggcccggccaggcgcagcagcgtcccgcgaggcctcgtgtggccgaagtcggtcagcttgaagcgccggcaggccgggtcgcacaccaggacgttctccggcttcaggtcccggtacaccaggccgcgggcgtggatgtactccagggcggaggccagctgggcggcgcagcggtgcaccgcgggctgcgggaggcccaccttgggctggatgaaggccatgaggtccccgtgcaggacgggctccgtcaggaagc

SEQ ID NO: 325327 - DNA, 676 bp, Homo Sapiens
actggccagagggttggggtagaaatgcggggggtagagagagggaggcagcttgtgggaaggggcccgtgaggtacgggttaccgtttcaggggtactcagggaaggcgcggccataaggacccagcatgccagggggcttggaatagctggtggcaccagagcccaggaatgggaaagggctgtccagacgcaatttatctgtctcggaggtgaacaggtgtgtccgggcccctggctctcccaggcgtggggcagagaacagggtttgcagggtctcaggggtgaggggaggagcttctggccctggggcccccccaaagggactgggggtcagcaagagtggggagccagtggcagctgccgccatgtccagcagcgggtaattgacaagcacgactttgctgaagttgaacttgtaggtgaacctcttccctttggtcttgtggagaatccgcttgttgtagtagtaacgcagggcccggctcagcttgtcgtaattcatgtggggcttgcatttgcgaataccccacagccgggccacctcatcggggtctttgatgacgaattccccgtagtccccctgccaggctatgacgccctggtactcaacgttctgcagcagctccaggataaagtgccacagctggatatggctcgagccaggggatgactc

SEQ ID NO: 325328 - DNA, 576 bp, Homo Sapiens
  misc_feature (148)..(148): n is a, c, g, or t
  misc_feature (496)..(497): n is a, c, g, or t
  misc_feature (519)..(519): n is a, c, g, or t
  misc_feature (523)..(523): n is a, c, g, or t
  misc_feature (527)..(527): n is a, c, g, or t
gagactgcatagggctcggcgtggggatcctctcccagcggttcctccagctctgacgtgccatcactacagtcactgactgagcctcggcccaggcggcgggccaccacagccgagaagagggaagatgaagatgaagagcaggctnggtcggtgagcgggggtcctcggtgggggacagcacctcggagggcgttgagggagggaagcggaagtggctaccacccgacggcactggcggggcactctggggcactgcacccccagccaaccccacatcaatgaatgggtaattgaccagcaccagtttgttgaaattgaacttgtaggttgaaccgtttccccttggtcttgtgcagaatgcgctttgttatagtaatagcgcagggcccggctcagcttgtcgtaattcatctggggcttgcacttgcgaacgccccacagccgggccacctcatcagggtctttgatgacgaattccccgtagtccccctgnnaggcaatgacgccctggtactnctcnttcngcagcagctccaggataaagtgccacagctggatctgccttgagccagg

SEQ ID NO: 325329 - DNA, 389 bp, Homo Sapiens
cctgcagcccctgggaccccacatgggtgggtgttgggaggaagctgcctgcagaccttggagaccccacatgggttgaaggggtgccagtccccttaggtgattctgaggaaagacgggaagatgccggtgtttgtttacgcctgtggatacgcggcgggcccgaggggaggacaggagggagtgaaaggggtgaaggccttccacgtgctttccactgactacagctactggttggtctacctccgcctggggggtgccacccaaaactacaagagcctgctgctgttccataggcagaatgtttcgagcttccagagtctgaaggaattcatggacgcttgtgacattctggggctctccaaggccgccgtcatcctcccgaaaga

SEQ ID NO: 325330 - DNA, 888 bp, Homo Sapiens
gtgcactcctggcagtccatgccgacggtgtggcccaccttcaccggctctccgtggggccccagacacctggggcagcccgtgggcacgcagacttgggcactggtgctgaagagggtcatgccctccggacagaagcagccttcggtgatggggccggcctccggcagagccccgaggctggcgctgtcattcccgtagcagtaggaggggttgctcgggccgcagggctggtacaccttgtcggctgggcaggtgaatgggcacatgtggccggtccggcctctccaatcgatgcagatgtcgtgggacgcacagagtgccgcgtacagctccaggctggagcacaccacatccaggtccgtcatgtggcaccggtcaaagacgcagccctcatagaacagcagtggggggatcacagtgtggcacggctcaaagaccttgctcagaatcaggtggcagatgggtgatggcaggcacggagcaggcggtgtggtgggcccgacggtggtagacccaactgtggtgggcccgaccgtggtagacccaactgtggtgggcccgaccgtggtgggcgtcgggtgaggccggtggcaggctggctggtcagggatgctcacgttccagaggccggacatctcggagcaggaagcgaccaccgtccccctaggcgtgcggcactcatccttcctgtcgttggtgcaagtgccgcactggccctcggtgttgttggcaaacttgctgaagggcacctccacggagaagatgaggccggagaacatgacctggactcccagctccgggatggtcgcgtacatcttgacgccgatacgggagaccacgatgccgtttttccggaagccggggctgaccaccttgttgtgaaga

SEQ ID NO: 325331 - DNA, 710 bp, Homo Sapiens
cagccaggacaacctgactatgtacatggatttagtggacggcatctttttgaaccaaattatgctgcaaatagatcccaggcccacaaattaacgcatcaataagcacgtcaacaatgatgtgaaccttcgcattcagaatttgaccatcttggtgagaaacattaagacctactaccaggtaagggcagttctgctgtcgggaattctgatgtgtgtccatcagtatcgtcactgtcacggttttcccacaggaggccgggaggaaacggtgcttatgtttaggcctctacttgttgacagttggtctgctttcatgtgaaccctttgttggggcatgtgtgaggatgagatggtgcgttgatttcctttgtttggtgaatgttctttgagctgtgtgtagcatcgtgctatatgctgtgaaggtcccagagaggagcctcagtttgcagcctctgccccgagaatgcagttgagtggggactggctggaatgggcttcctgaaggtgaccctgaggtggttgtccgcagcccctggctcagtggctctttatacaggagccattcaagggttgagggagaggaggaaccactggagggttatgaagatgggaccaagaatgtgattaacccacctctagctgcaagcaggagcactgggcttagggagcgtctgtctttcaagtgtttaccgcatctgatctgtgtg

SEQ ID NO: 325332 - DNA, 228 bp, Homo Sapiens
ttgaggtccttgatctcccgttcagcaatattctggatgacattgctttttaggtccagcctggttaaggtccctgggagccttaggggtatggacaacagcagattctgctccagcgcctggttggagagaacattttggggcaacagtaactgagcagcattgccttttcgtgcagctctgtctcttctcaagcttaggggtatgggcgacagcagattctgctcc

SEQ ID NO: 325333 - DNA, 748 bp, Homo Sapiens
gtgatgctggagaactatagccatttggtgtcactgggattttccttctccaagcctcacctgatctcccaattggaacgaggggaaggaccctgggtagcagacatccccagaacctgggccaccgcagtgattgcacataggtgacagaacacagagcaagacgtcgacttcaacgcagaagcattctggacgaccactccccggggccgatccagaaggtggcaaggaggggcaggcggcgaggtcgtctgtgctccatagaggtgcccagggcttggggcagagttcggctgcggggccgccgggccccaaaggcgcggagaagcggtacctgtgccagcagtgtgggaaggccttcagccgcagctccaacctcatcaagcaccgcatcatccacagtggcgagaagccttacgcgtgccccgagtgcggcaagctgtttcgccgcagcttcgcgctcctggagcaccagcgcatccacagcggctagaagccctacgcctgccccgagtgcagcaagaccttcacgcgcagctccaacctcatcaagcaccaggtcatccacagcggcgagcggcccttcgcctgcggcgactgcggcaaactgttccgccgcagcttcgcgctcctggagcacgcgcgcgtgcacagcggcgagcggccctacgcgtgcccagagtgcggcaaggccctcagccaaaggtccaacctcatcgatcaccagcgcacgcaccgcggcgagaag

SEQ ID NO: 325334 - DNA, 378 bp, Homo Sapiens
gctgcccacactcttgctggaacatctgtgcaaaatattctacactggagccaggcagtgaattctggtgaactccgggcatttgactgggggagtgagaccaaaaatctggaaaaatgcaatcagccaactcctgtaaggtacagagtcagagatatgacggtccctacagcaatgtggacaggaggtcaggactggctttcaaatccagaagacgtgaaaatgctgctctctgaggtgaccaacctcatctaccataagaatattcctgaatgggctcacgtggatttcatctggggtttggatgctcctcaccgtatgtacaatgaaatcatccatctgatgcagcaggaggagaccaacctttcccagggacgg

SEQ ID NO: 325335 - DNA, 650 bp, Homo Sapiens
tgaatctttgttttggtctgtgcattttctgagctgcacataagagaagatgcagtgagccaggcccaaggacgccccggccaccctgacgcaccccccaacatctacgaggggggcctggggtccccgcagccgcagtgccccagtgcccagggaagcaagcccaagaacttccggctgcgccacctccggggcctgggcctctacctggagagccaccctccacccactggccagtgtgagagccactggctgggccggcttatggctgggggctgcctgccacagcctgagggcacagcctgggccctggacctgccacagggcactctgggcccacgtaacagcctctgttcagcccttctggaagcccgattgcccagggacagcctgggaagcagtgcttccagttccagcatggacccagacaagggtgccctcccccagcctagcccttctgggctcaggcccaagaggtcctggagtacctggcaagagcacaactgctgtggggggctgaccaccaccctcccgctgtctcctctgcagatgcagtgagccaggcccaaggacgccccggccaccctgacgcaccccccaacatctacgaggggggcctggggtccccgcagccgcagtgccccagtgcc

SEQ ID NO: 325336 - DNA, 356 bp, Homo Sapiens
taggagcacaggtccccggccagttgtgtatatgcagcatgccctgtttgcagacaatgcctactggcttgagaattatgccaatggaagccttggattccttctagcagatgcaggttatgatgtatgcattggagacagtcggggaaacacttggtcaagaagacacaaaacactctcagagacagatgagaaattctgggcctttagttttgatgaaatggccaaatatgatctcccaggagtaatagacttcattgtaaataaaactggtcaggagaaattgtatttcattggacattcacttggcactacaatagggtttgtagccttttccaccaagccagaactggcaa

SEQ ID NO: 325337 - DNA, 225 bp, Homo Sapiens
cccgtaccgggcagtcagcggtcctgggggcatcagcctatggaatgtcctggcaggctgcgtcgtggcgttagccatcgccagcttcgtggctgcggtgaaatttcacgacctgacggaacgaatcgccaactttcaggagaagctcttcccagtttgtggtggtggaagaacagtatgaagagtcgttttggatctgcgtggccagcgcttcggcccatgctg

SEQ ID NO: 325338 - DNA, 729 bp, Homo Sapiens
tggccgcatgttcaccagggagttgcggagggtgcgggcagccgggctacttccacccctgaccccagatctgttgcaccagctgatggtagaggctgatgttccaggccaagagagacggagggagcctgaccgggcactggtagtgattggcggggatgggctcagaccagacatggccctaagacaaccatcccgagcagtgtggtgggcccgggccttccgctgtggcgtgggactggtacgaactgttgagtgggggcagcttcctgccctgcctgcccccggacgcttccggcatggggctgcaagcctggcaggaagtgaactctatgtgtgtgggggacaagatttctacagtcactccaacaccctggcttcaactctcaggtgggagcccagtcaagaggactgggaggagatggctcctttgtcccaggctcgaagccttttctccttggtggcactggatggaaaactttatgccctgggtggaagacacaatgatgttgccctggactctgtggagacctacaaccctgagctcaatgtctggaggccagcacctgcacttccagcaccatgttttgcccacgcagctgcgattttggagggccagttgtacgtgagcggtggctgtggtgggactggccaatacctggcctcagctgatgcactatgaccccagaacttgagaagccagggacgtttctgagccctatgggggta

SEQ ID NO: 325339 - DNA, 252 bp, Homo Sapiens
cgtgcccacacagaaatcctacagctccagtgagactctgaaggcctatgaccatgacagcaggatgcactatggaaaccgagtcacagacctcatccaccgggagtcagatgagtttcctagacaaggaaccaacttcacccttgccgaactgggcatctgtgagccctccccacaccgaagcggctactgctccgacatggggatccttcaccagggctactcccttagcacagggtctgacgccgactc

SEQ ID NO: 325340 - DNA, 894 bp, Homo Sapiens
gcacagataaacttttatgcaaagtcaaatgtcaaaagacaggaaaacaaattgaattcgtatcacaaaggctcacatttttttaatatgtaaagaactcccaaatcaataggaaaagccccagtagtatcagtcttgacagatagtgacaaaaagctctaaaatctcaatggcttaaacaacacatgcctttctcaagagtgcttttcatccctcatgggtgagttggggctgttttccatgttgctttccttgcaggacttatgcccagaagcagcggtctcctgacccattcttgataactgtggcagagggaaagaggctctgcaggatcttgtgctgccaattaaatgcaggacttaaagtgatactgatcaattcctcttgcaaatcattggccagaacctgtgtcacggccctgcccaagccccaaaggaccagactgtgccgtattctatgtgcatggtttctccattgaaggtctagtcaaagaaagacgatggcagatttcattacattccacatgctggttattaaagaagtaaaaaattcctctctttccaaaattggtagtgaaaactttctgatcaacggagtgaatctggggatctgtgaggtagatgagtccttttccattaccggttacccaaccttgtaaatcgaccacaacatctctatgattagaaaactcataagaaaaatggccataggccaagccatattctgtggctttgtattctgttttcaccactttcgtgttatttgacaattttacaaattctcccagtatgtaaggctcaacactgatacatccctttattgtcttgtcctctaaactcaaagggattgtggatgggatgtagaatatctgggtgggaatgtttgttcatagag

SEQ ID NO: 325341 - DNA, 622 bp, Homo Sapiens
cgtgcgaggcctgcagtgagcgcagagaattttcggcagaggcggcccgggaacctcagcagctccataactactggtcagatgtgcgctacgcggtgcgctgcatccctcgccaggcaggaaccccggtggcagatgcccaggaccagtctgtggtgcctgacaaggagggagtgaaggagctcgtggataggctctgcgagagggacccctaccagctgtaccagcgtctggaacagcaagctcgagagtatgtgctggagatgaaggtccgcctgctccggcagctgtcggctgcggccaaggtgaaggcaccatctggcctgcagggcccgccgcaagcgcaccagttcatctccctcctgcttgaggagtacggcgccctctgccaggccgcacgctccatcagcaccttccttggcactctggaaaatgaacacttgaaaaagttccaagtgacgtgggaactgcataataaacacctgtttgaaaatctggtcttttcggagccacttcttcagagcaacttgccctcactggtgtcacagatcaggctaggaaccaccacacacgacacctgcagtgaggacacatacagtaccttgctgcagaagtaccagcg

SEQ ID NO: 325342 - DNA, 563 bp, Homo Sapiens
tcttgaggaccctgatccagagcatcgctccctccatggccgacatgtgggagctggagattgcgctactggtccggtacctggaaggtgaggttcctggggagcccatcccaagccaaccctgcaatccgtgtatgtgctggggttctaatcacatgactcgaataacaagagcttattcttcgtggctggtaagtgcaggcaagtggacctgcctgcacctcagaagctgctggcccgtctcctggtgctgatgtcatcaccttacaagggggagggtcgtgggatagccatgctcaacctcttgaggaccctgagccagagcatcgcaccctccatggccgacatgtgggagctggagattgcgctactggtccggtacctggaagaacatactgagttcacttgggatcagaaagcctgggaagacaagctgattcagtttctgcgaaactccctcaagaagacccgggggtctagctggagcctgcgcttgagtaaagagctgaacaaccacgattgcgagctttgacagcccctctctggagaagggctttctgtac

SEQ ID NO: 325343 - DNA, 608 bp, Homo Sapiens
gacctagagtaccacgacacctgcagcttcgactttctggagatctacaatggggcctcaccagacaagggcaacctgctggggaggttctgcggcaaggtgcccccgccgcccttcacctcctcctggcatgtcatgtctgtcatcttccactcggacaagcatgtggccagccatggcttttctgcgggctaccagaaagatgtgtgtggcggcgtcaagactggcctgtcaggggtcctcaccagtcctgagtaccccaacaactacccgaacagcatggagtgccactgggtgatccgggccgctggccctgcccacgtcaagctggtgttcgtggacttccaggtggagggcaatgaagagtgcacctatgactacctggctgtgcttggggggcctggccccacccgtgggcaccactactgtggcagcaccagggaccccacaatcgtgtctctgggccacgaactgtaggtggtcttcaagtccgacttcaacatcagaggccgtggcttcaagacctactacttctcaggagaatgccaggaggtatacatggccatgcggggcaacttctccagcccacagtaccgaagctcctaccc

SEQ ID NO: 325344 - DNA, 724 bp, Homo Sapiens
ctgcagtccacggagcatgttctcggtgtgcagctcatcctgactttctctctatcgattacacaggatggcgaccctcgtgatgcagaacatggcgtttctccagtcctcctttcctgtcccgggatcccaattatacgtgaacggagacctgaggctgcagcagaagcagccgctgagctgtggtggcctagattcctgcagtcctctgagcacgttctcggtgtgcagctcatcctgactttctcctatcgattacacaggatggcgaccctcgtgatgcagagcatggcgtttcttcagtcctcctttcctgtcccgggatcccagttatacgtgaacggagacctgaggctgcagcagaagcagccgctgagctgtggtggcctagatgcccgatacaacatatccgtgatcaacgggaccagcccctttgcctatgactacgacctcaccctatattgttgctgcctaccaggagaggaacggtgagtcacaggtagagcccattcagcagctgctcaggaaggtgggcagaagggtagaaggaaaagaggaggagtctcccaggtgctcacaccacatcctcctcccgtgtcccaagtatctgtgaccaacgggaccagcccctttgcctatgactacgacctcacccatattgttgctgcctaccaggagaggaacggtgggtcacaggtagagcccattcagccgctgctcagga

SEQ ID NO: 325345 - DNA, 610 bp, Homo Sapiens
  misc_feature (97)..(97): n is a, c, g, or t
ggtgattgatgaggtctgattttcatcctgtacctccctgctgtattggtcacctggctgaacttctgtgaccttctctccaaggaggaaacccagnagtatttctccgctgggtgtatgctgaggtctgattttcatcctgtacttccatgctgtattggtcacctggctgaacttctgtgactttctctccacaggaggaaaccctgacgtgtcttgagtgtgtttgcttcctcatttacagatggaggggggccaagctcctgttcagcatcaccagttaacttcttcacaggctggagccgaacactgatagactgatgtgtgagtcagggggaggatggaagagatcgagacatgccctccataatccgaatgtgctgcataccttctctctctggaagtggcgggatagcatagtctggctcaaaagcacagtcgctttctgtggagatgccaccttgcccagagcggctttggcgagagtctacacttgactgtcttcgatcaggaggttcctcgctagtataatctgaatcaaaagcacagtcgctttctgtggagatgccaccttgcccagagcggctttggcgagagtctacacttgact

SEQ ID NO: 325346 - DNA, 291 bp, Homo Sapiens
  misc_feature (196)..(226): n is a, c, g, or t
ggaggagcccagcatcgccaagcgactgaggggcaccccagagcggatcgagctggagaactaccgcctgtccctgaggcaggctgaggcactgcaggaggtttcggaggagactcaggccgagcacaacctgagcagcgtgctggacacgggcgccgaggaggacgtcgccagcagtagttccgagtctgagatnnnnnnnnnnnnnnnnnnnnnnnnnnnnnnncctcgcctgcccccatctgacctgggtggtgttccgtggaaggaggccgtgcggatccatgccct

SEQ ID NO: 325347 - DNA, 750 bp, Homo Sapiens
taagggggaagtcatatcctcttttgttcccaatatcttcaatgactatctcgggacaggaaccaacctgcagagccccccttattgttgtggccaacatttatcttcatcagctgccccaaatccggggcatccaggatgaacctgtcttcagctcccttttcaaagttgtccttttcattttctagcctacgctcccctgtgtctccatactctccaaaaatattgatgaagtcattagcatctgtcccttcaccaattacatcaccagtgtataccttgacttcatacttattacctctgggcatgtccatggggttgaagctggccagcaggtcacggcaccactggcggtcaccttccaccttgctcagccagttgttgcagttgaagtagtaacgtagatgaggcctcttcatgtcggtcacaatcacatggtccaggtaccagctggcattcaagcccgtgttgtcatgctcaatcctgactttatagatgagtcccacattgttggttctcacccggaacacatcgacgttgcccttctcaaaggcagacttgctcttgctggtgagctggagcttgggagagagcccattctctccaaaaagcgtgatgaagacattggcatccgtccctgcaccgcgaacatcccccgtggctgtgaccacttcatacactctggccttgtagtactcgtgttccagctccccctcgtcgtcctccgaggcgaagttcagcagctccgct

SEQ ID NO: 325348 - DNA, 788 bp, Homo Sapiens
tttgcaaaacgagactgttaataaaacctaccccagggtaggacggactgttcgggccaggcacattgagcattggtcctgtgcctgacgctatgctagatgctggggttgcagccacgagcatagacacgacagacacggtcctcgccatcttctgttgagtactggtcggaacaagaggatcgtctgtagacaggatatgatcatcgtggcgcatgtattactcatccttttgggggccactgagatactgcaagctgacttacttcctgatgaaaagatttcacttctcccacctgtcaatttcaccattaaagttactggtttggctcaagttcttttacaatggaaaccaaatcctgatcaagagcaaaggaatgttaatctagaatatcaagtgaaaataaacgctccaaaagaagatgactatgaaaccagaatcactgaaagcaaatgtgtaaccatcctccacaaaggcttttcagcaagtgtgcggaccatcctgcagaacgaccactcactactggccagcagctgggcttctgctgaacttcatgccccaccagggtctcctggaacctcaattgtgaatttaacttgcaccacaaacactacagaagacaattattcacgtttaaggtcataccaagtttcccttcactgcacctggcttgttggcacagatgcccctgaggacacgcagtattttctctactataggtatggctcttggatagaggaatgccaagaatacagcaaagacacactggggagaaatatcgcatgct

SEQ ID NO: 325349 - DNA, 662 bp, Homo Sapiens
gctctctcttccaatgtcatactccacgtgacagttctgctgagattcaacttcgcctgggaagcctcctgacccatcccgttcagtgtagatggtcctgccatgtgtattgtcagcacctgcactgggcagccacgtccctgaatatactcaaaggaatcgcagatcaagagagaaaaaatagaaggaaattgtaattacaggattgctgagctgggctttctccaataataacatgatcaaaataaaataaaagaagtccttttggcctctgacatcacatcctggagtggatgatttaccagttggtcatctgctgtgctgcaggaatgaatgtagctactgtggtatgaagcaaaattctaacgttcctagaaagtgttagacctgtcaacctccaggaaggatgagatctgcttccacactgcacagtgtccagaagatcaggaccatgtgtcacttggttcaaagatgacttctaagtggtacctggagatactgaaagtgcctagaaagatgacaactcaagcaccgacgtttacgcagccgttacaaagcgttgtggtactggagggtagtaccgcaacctttgaggctcacattagtggttttccagttcctgaggtgagctggtttagggatggccaggtgatttccacttc

SEQ ID NO: 325350 - DNA, 671 bp, Homo Sapiens
agctggggcagtgtgtgtattgggattccagggtggagctgcggtcgtatgtcagtgagcctgagctggcgaccctcagcggggacatggcccagccctccctaggacttgtgggccctgagagcaggtaccagacgctgccaggcagagggctctcagggtccacgtcaaggctccagcagtcgtccaccattgctccctacgtcacactccggaggggtctcaatgccgaaagcagcaaggcgaccttccctagacctaagagtgccttggagcgcctgtactcaggggatcaccagcgaggcaagatgagtgcagaggagcagctggagcgcatgaagcgacaccagaaggccctggtccgagagcgcaagaggacactgggccaaggggagaggacgggcctgccctcatctcgctacctcagccggccgctccctggagatcttggctcatggaagcgtgagcaggactttgacctgcagttgctggaacgggtcgtgcaaggggaaaaaaaggacaaggaggagaatggctggttgaaagtgcaggccatgcctgtcactgagttggacctggagcctcaagactatgacttggacatcagcagagagctgtccaaaccagagaaggtgtcaatccctgagcgctacgtggagctagatcccgaa

SEQ ID NO: 325351 - DNA, 790 bp, Homo Sapiens
gtttcattaccatcacattgttcttaagcctttccaggtatttggaagacagcgatacaggaatcacctgagaaaagttaaagaccggttgtgttgtgccccatgcgatgacagatctggtgacttcctctgtgctgaagagtttacaatttaaataaacattgcatggtgattgtttctcagattctccactaataaaatctttcccatctggcaccatcaacagcacatgcaacagcaaagcactctcttttgttgtcccatttgtctgattgactaaattatgggaggctggcgtagctacgaaggttgaaggatgtggtgctacagggcttggtgactttcggttggggagcaccaagttctgtgctttctttgcagtttcctcatgaatttggtttaagttttgtggatttttggtacaggtcatatcttggttaagttctggtagtgccttatttggacttgtaggagcacaaagtggggtataatgggtgttgccacttaacttagtattgataccagtgaaatctttgttatctgtaataagctccatggttaccttgagggggccaaatggagactgaccattttcttgttgcactggaagctgatcactgaaagaaagcagctctgattgaatgacagctcgcaaagaaagtgacacagatccaatgacttctggctttttctgtggagttttctttacataagtttggaaagtgaggttggaattccaccagatgctctatcattgggccacccaaactgtactggaaacacaaatcgc

SEQ ID NO: 325352 - DNA, 1328 bp, Homo Sapiens
gctggacgtggagagcgaggccaaggaggccgaggccgcgctcgggggcttggtgtacgccgtcttcctcctggccccctgtccgcactcgcagagggagctgctgcagttcgtgtctgggtgcgaggcccaggcccagcgcctgccgcccacccctaagcaggtgatggagaagttgttgcccaagagagtccgggaagtcatggtcgcccgaaaaatcaccttctactgggtggataccaccgaatggtctaagttgtgggaatccccagaccaccttggatactggactgtttgtgaactgctccaccacggaggtggcactgtcttgccatctgaatctttcagctgggattttgctcaagctggggaaatgctgctcaggagtggaataaagctgtcaagtgaacctcatctttctccgtggatttcaatgctgccaactgatgccactttaaactgtttgctctacaattctcctgagtatgaggcctcgtttccacgaatggaaggaatgttatttctccctgttgaagcaggcaaagagattcaagaaacatggacagtcaccctagagcccttggccatgcatcagagacattttcagacaccagtcagaatttttctaaaaggctcagtggcccagtggtctctcccaacgagcagtactttgggcactgacagctggatgctaggaagtccagaggagagcacagcaactcaaaggctgttatttcagcagttggtaagcaggctgactgctgaagagttacacctggttgctgatgtggaccctggtgaaggccggccccccatcactggagttatttccccactctctgccagtgctatgatcctcactgtgtgccgcaccaaggaggctgaatttcaacgacatgttctccaaacagctgtggctgacagcccccgggacacagcttcccttttctcagatgttgtggatagtatattgaatcagactcatgattcgcttgcagatactgcttctgctgcttctcctgttccagagtgggcccagcaggagcttggccacaccactccctggagtccagctgttgtggaaaagtggtttcctttctgtaacatcagtggtgccagttccgatttgatggagtcatttgggttactacaggctgcctcagctaataaggaagagtcttccaaaactgaaggcgaattaatacattgccttgccgagctctaccagagaaaatctcgtgaagaatccactatagctcatcaagaagacagcaaaaagaaacgaggggtccctcgtactccagtgagacagaagatgaataccatgt

SEQ ID NO: 325353 - DNA, 806 bp, Homo Sapiens
tttcagacagaagatcatacttctgatgaatatacagagtttatagaaaattttctcagtcttgcctcagaaataatgcttttgcctcagtggattcattcccctatggtgcgtttggattgtgaagatttgaagacaggcctgacaaataaagcaaaagcctttgcaaacatattattaaatgacatagcttcaaaatatagaaaagaaaatgaatgtatttgcagtgaatttgaagcaattaaagaacatgcattaaaagtccctgaaacaacagaagagatgatggatctgatatcttatgtagaaaaagcccggactgtaggaatcgaagagttgattttaaggatccaggaatctaaacgccaaatgagttactttttagatgttttcctatttcctcaagaagacttagctttaaatgcaactgtcctcatgtggcctaggaaaattaatcccatctttgatgaaaatgatgagctaattgagaatgctaaacataaaaaagaaaatgaactaatggccaagagagagaaacttattttggaaatagaaaaagaatcacgccgcatggaggagtttacagaatttgcagagctggagcgcatgcaacagtatgtgacagatgtaagacaactacaaaaacgtattcaggaatctgaagaagcagtgcagtttattaataaagaagaggaacttttcaagtgggaattgacaaaatatcctgaactggataaattaaaagttaacattgagccctgtcgagaagttttttaattttgttttgaagtggcagcgatcagaaa

SEQ ID NO: 325354 - DNA, 700 bp, Homo Sapiens
ggggcaagggacccctcagatccatacctctcctagaaagagtacattggaagggcagctatggccagagaccctgaagaattctccattcccatgcaacccaaataaattaggagtgaatatgccttctaaatcagttcactctctgaatccttctgatattaaatttgtggcagccattggcaatctggaaattgctccagacccagggacgggcgatctggagaagcaagactggactgaaaggccacagcaggtgtgcatgggagtgatgacagtcctttcagacatcatcagatatttcagtccttctgttccaatgcctgtgtgccacactggaaagagagtcataccccacgatggtgctgaagacttgtggattcaggctcaagaactggtgagaaacatgaaagagaacctgcaacttgactttcaatttgactggaagttcatcaatgtgttcttcagtaatgcaagccagtgttacctgtgcccctctgctcaacagaatgggcttgcggcgggcggcgtggatgagctgatgggggtgctggactacctgcagcaggaggtccccagagcatttgtaaacctggtggacctctctgaggttgcagaggtctctcgtcagtatcacggcacttggctcagccctgcaccagagccctgtaattgctcagaggagaccacccggctggcc

SEQ ID NO: 325355 - DNA, 412 bp, Homo Sapiens
tgccgcagaacagcacaactccctggccttcacgcacagacactgtactcctcattttggttttaaaattttcaagataggcaaactgaagtttggcttctctgctgacaattgttccaagtgaatttgttgcaaaacattggtaagttcctgtatcccaatttctgttgggattaataaccacaagatttcctccattcaacttataacgatgttccatactcatatcaatatcacttccattcagctgccatctgtaatgaggtgatggattgcctcttgcttcacaatgcaaagttatttttttatgttctgaaccaacagggaaaatgctgttgctgggttctttgataaatacagggccttgtaagagaagctcacctcctaagcagccaatgaatgaaagcaggaa

SEQ ID NO: 325356 - DNA, 482 bp, Homo Sapiens
  misc_feature (196)..(196): n is a, c, g, or t
ccatgggctgtccagcatctctacaccagaaaatgctccactgctggcagaagtagtgaaatcacagaccaaaatttactgacattgtcagcttccttgacaaagtgatccgaaatcccagtgcccttcacaccctggtggaggacatccttgggtcaaatcatgaatcattttgatgttaattaaaatgaaacantttccagctcccatgggctgtccagcatctctacaccagctgatgctccactgctggcagaaggagagaaatcacagaccaaaatttactgacattgtcagcttccttgtcaaactgatccgaaatcccagtgcccttcacaccctggtggaggacatccttgtaatgccagagtcccctggtgaagttccggaatatcctttgtttgtcacagttggtgactggctagattctataaagatggggcaatacaagaataacttcgtggcagcagggtttacaacaa

SEQ ID NO: 325357 - DNA, 668 bp, Homo Sapiens
aaggaatggagcagcaaaagctaaactggaaagtcactgtggtccaaagcttcttagtagagcctgaaggtattgaaaaggacagtacccagagtttccttatctgtacagaaggtgccaaagcctccaagcagggagttttggacttgccaaacgatgtagtagaagggtcagccagaggctttttcactgttgtgggggatattctaggacttgccttgcagaatctggttgttctccaaatgccctatggaagtggagagcagaatgctgccctactagcatctgatacttatgttctggactatctgaaatctactgagcaactgacagaggaagttcaatctaaggctttctttctcttatctcatggttatcaaaggcaattatctttcaaaaactctgatggttcctatagtgtgttttggcagcagagtcagaaaggaagcatatgactcagtgctcttacttttaagacattggagagaatgaaaaaatatgtattcattgatgaaaatgttcaaaaacagaccttaatctggctttcaagccaacagaaaacaagcggctgctttaagaatgatggccagcttttcacccacgcctgggagggtggagatgaagaggacatttcactcactgctttcctgctctacgaaacgcactct

SEQ ID NO: 325358 - DNA, 513 bp, Homo Sapiens
accgtcccgccgaccaccgaagggggcatcagagaccctcggagaaaccaagcccagggaggagcttggaaggcaaggagaagggattcctggtcacctcccttgctcttttcttcctggatgaaacaagaagataatcagggtgtctgtgcacaccaggactcagaagacaaagggatgggttctgattttgaggactctgaggacagggaaggggacccagaagaaagagaaatgggctctaatccacattacacaaacaagagagaaggccatccggagccggagatgggctccaacccacaggactcaaggcacagggaagcagtgcccgacatctgcacagaggggcagctgagtgaggaagaaggcgtttctgtccgtggggaagaggatgaccaatccggtgtagctgacatgtcgatgttcccaggactgtctgagtctgacagcatatcccggagcctccgggaggacgacgacgagagtgctggggagaaccggctggaggaa

SEQ ID NO: 325359 - DNA, 429 bp, Homo Sapiens
ctccagccccatccagaggtcagcttttcttactgctttttgaaccaggaaatgctgacatactgtacgcattgctcttaaatcagaagtactctgacagactaagagaaatcatttttaagattatggaacaaatgttgaaatgcacgaacgtttatgagcgtagtaaacaacatattcgactcagagaagttggctactcgggactgggactccttcttaatgaagcacttgttaatacttctcttattaaaaacctcacccatcaaatcataaatacagatcctgttattaatttcaaagatctactatctgtggtatatatatctcacagagcacatataaatgttagagtggccatctgcagaaaggttttgcaaattttgcagttccagccagatgcagcacatcaaatatcacagcaagtgg

SEQ ID NO: 325360 - DNA, 499 bp, Homo Sapiens
ttttttcttgtctcgacacaaaccgctcagtgcacccctttacatacgggactctgtttttatcttcatgaacagccaagttggtcttggatacatcaagtaagtcccttattttgtccaagtagatctcaaaataggaaacctttatgtgaaactccaggttctcatccatggagtagatatggtcaaagatatcatgggcaattcgtgggatgatccccatgagctgggggtcatgcagcttcccctccatggtgtgggtttttcctgatgaagtctgcccatacgcaaaaatcgtcccgttataaccttcaaggacatctttgacaatttgcttcgcacatgcattgtaaacctgctcttgggtcgtgttgggaggtagcggtctgttgaaggcatatggcttcccttgcccgatcaccacggtctcatcgcctttaaatttggggatgaatttgtccccgcggaggatctccgcttcgttgaggggccggaaaaa

SEQ ID NO: 325361 - DNA, 594 bp, Homo Sapiens
ccttttgggtagaaaatctgaactctgtgctagatgatactagaacattgtgcctagcaaacagtgtgagaatagctttaactaataaattaagagtgatttttgaagtggacaatctctctcaggccagtcctgctactgtcagccgatgtgccatggtctatatggatcctgttgatctgggatgggaaccttatgttaagtcatggcttctgaaaacttctaaaattataagtcaatcaggagtggattgtcttgaattcatgattaaaaatagtgtcacagacggactacaatttataaggaatcgtcagaaatttcagccatatcctatggaggacataacagtcgtcataaccctctgcagaattcttgatgctttctttgacttcatgggtaaaaatggaggatttgaacaaagtgatgatttgaatgacacgtcatctaaggaggcaaattcccaaagagagtctgtcacattcaaggatatagaaaagagggatgaaaatacatggtatccagagaaaaatcctgataaattaacaaaaattattcaaaagctttttgtgtttgcctttacttgggcatttggag

SEQ ID NO: 325362 - DNA, 794 bp, Homo Sapiens
ccagagaactcatacaggagagaaaccctatgaatgcactgaatgtgacaaattattccgctggaaatcacagctcaatgcacatcagaaagctcacacaggagagaagtcatatatatgccgtgattgtggaaaaggcttcattcagaagggaaatctcattgtacatcagcgaattcatactggagaaaaaccctatatatgcaatgaatgtggaaaaggcttcatccaaaagggcaacctccttattcatcgacgtactcacactggagagaaaccctatgtatgcaatgaatgtgggaaaggcttcagccagaagacatgtttaatatcccatcagagatttcacacaggaaagacaccctttgtatgtactgagtgtggaaaatcctgctcacacaagtcaggtctcattaaccaccagagaattcacacaggagagaaaccctatacatgcagtgactgtgggaaagctttcagagataaatcatgtctcaacagacatcggagaactcatacaggggagagaccgtatggatgctctgattgtgggaaagctttctcccacttgtcatgccttgtttatcataagggaatgctgcatgcaagagagaaatgtgtaaccacacactgtatgcagttgcacgtgggcattggtcctcatagagatcgctcccgtatttggcctcaagacaattctcggctagactagccttgcccattcttttctgcatccgttgaaggagattcagaacatccacaaatttggtccactctgtgaccgctgtccccta

SEQ ID NO: 325363 - DNA, 656 bp, Homo Sapiens
ccagccgctctcgcagctccactatggacatctctccttccaggccgtagccggggatctgggtcaggtccacgagcttgcccttgcgcttgggctgtgtctcgagtgcgcgcagctgggagatgagttcacaacggcgccgctgctcctcttgggctgcgtgcgccctgcgctgcagcagccccctgctctcctcgatcgcctcgtgaactgtctgctgtcggcccttcgcgagcttcgtctgggccgccttggcgttcttctgcccctctatcacctgctccaccagctccttcctggacctgtcctcccggagccgtctctctgcacgctgcagcatcagcttggccatctgctccttctgctgctccaccctctgcttgttctcctgcatgaggctctgccgggctaggacggcctcctcatggctaatcttcccttgcaaccgccggcactcgcttgcagccagctgctcctcccggtccttcgcctgcatcttcttctgccactcgaagaactcagagaagtccccagccccatccacgagcttatcaaccctctgcagctcctgctccacctgccgctggtacaaggccccttctcgcaggatggctgtggtgttcagcttgaccgaggatgttgtcaggcctatagaa

SEQ ID NO: 325364 - DNA, 423 bp, Homo Sapiens
cccgctgtgaggagccgggcgagcgtaaacgcctggggtaccgctacattgaggagcctctggaggaagccatgccctgctggctctatctgggagaggtgctggtgtggtctagccgcttgcggcctgagctgcaggtggaagcctgccacgtccagtgcaccaataacacacagttaagggtggattacgtcatttttgacaacttcaggctcgatgagaagacagaatttgtgtggctcgactgtcccttaggatccatgtacaggcccgtcaactggcgtgccaacgacacccccctgacgtgggagagccagctctccggccaggacttcaccacctttctggacccctccaccggcggcaggcagctgcaggttttccagccggccgtctacaagtgcttcgtgcagcaggagctcg

SEQ ID NO: 325365 - DNA, 730 bp, Homo Sapiens
gttatggctggaggtctctttgctgtggatcggaaatggttttgggaattgggtggctatgatccaggtttagaaatctggggaggagaacagtatgaaatctcttttaaggtttgtatgtgtggaggagaaatgtttgatgttccatgttctagagttggtcatatctacaggaagtacgttccatacaaagttccatctgggacaagcctggcaagaaacctgaagcgggtagctgagacctggatggatgaatttgccgagtacatttaccagcggcggccggagtacaggcatctctccacgggggacatctctgcccagaaggagctgcgcaagcagctcaagtgcaaggacttcaaatggttcatggctgctgtggcctgggacgtgcctaaatactaccctccagtggagcccccgcctgctgcctggggggagatccgaaatgtggcagcaaatctctgtgtggacagcaagcatggagccaccggaacagagctgaggctggacatctgtgtcaaggatggttctgaaagaacatggtctcatgaacagctttttacctttggatggagagaagatattcgacccggtgagccactgcatacccggaaattctgctttgatgcgatctcacacaacagccccgttacactctatgactgtcatggcatgaaggggaaccagctctggggataccggaaggacagaacattattccatctgt

SEQ ID NO: 325366 - DNA, 275 bp, Homo Sapiens
gacccccgggacaggttaacgaagcccttgtcatttgctgattgtgttggggatgagctgccgtggggatgggaagcagggtttgaccctcagattgttgtctactacatcgatcacatcaacaaaaccacgcagatagaagatccaagaaaacaatggaggggggaacaggagaggatgctcaaggactacctctctgtggcacaggatgccctccggacacagaaggaactgtaccatgtgaaggagcagaggctggcgctggccctggatga

SEQ ID NO: 325367 - DNA, 402 bp, Homo Sapiens
agggtcgtcatggtcagcaccgtggtgaccccaaaaactgtcctggcttggactgattcccggttcagccaaaaggacacctgtgataagatcacggtcattatgcagggaaggtaggtctggatgacaatgtagccaatcttccttttcaggtggaagtgagctgtcatgattgtgtattcgcctgtgctggtgctgatgttctcagtgcccaccgtctgccccatcaggtggtactggttcagtctggagccatcttccgccaccaccaccgacttggtggagccgttggtccagacgtaaacgacttcagaagtagggtacgcatagctgccaaatttcagagggcaagtttaaggatccatcgggaagtcctcaagctgcatggggcactctgcagag

SEQ ID NO: 325368 - DNA, 642 bp, Homo Sapiens
cctatgcaaggccaactttaagttccctggccgccagaatatccacttctcagagaagtgggactttaccaagttcagtgtggatgtttttgaagacatgatggctgagaagcagcttatcccaataactgtggggtcaagtatacccccaatcgtgaccctccggacaagcggtggtccctgcactcatgagggcttctactgtgctgccccctcctaatgcccaccaataaatcctacttcctgtccaccttaaaaaaatgacaaagtgtagtcacctcttgagagtaagaatagggctggtgtggaagtgagtttttacttctcactggacatattccatgttggaaaactgttctgaagtgggtatcatttttataacatttaaatttcaaaaaatatttcactgtgtgcctagtctgtgcaaggggagaatgcagaggagggaggcattagaaccacacgtgaggatttctggagtccagtgtgtttttctgcagaaagccattacttatcatgtttggctaataaatactgtgtgaagattacttctgatgtgtaatctcttaattacagatacacaaaaaaggccagtcatgaatcacgccaaatgggaagcaaccaagatgtccctcagcgtgt

SEQ ID NO: 325369 - DNA, 308 bp, Homo Sapiens
cttttagccaaccaagctggtctagatgcttttcgaatatttctaaaatcagagtttagtgaagaaaatgttgagttctggcttgcctgttatgagattaagaaaacgaaaaatgcagacaaaattgcttccaaagccaagatgatttattctgaattcattgaagctgatgcacctaaagagattaacattgacttcggtaccagagacctcatctcaaagaatattgctgaaccaacactcaaatgctttgatgaggctcagaaattaatctattgtctcatggccaaggattctttccctcgatt

SEQ ID NO: 325370 - DNA, 854 bp, Homo Sapiens
  misc_feature (655)..(767): n is a, c, g, or t
ccacatcaacagaactaccagacatctcagtattctcccaaacagcagatttctcagtcagcttaccagtcaccacctaggtctcaatgttcttcacccttcagctttcctcatcatcaagtacagccttcccagttgggccacccaagtagtcacatctttgtgtcacctaatcaggacctcctggctgtcagaaacagtgaaatcattcagtagcatatatccaatacacaacatctagcttgcacagaggattcatgaaaaagacagaaattatggtttaaccttctcaaagacctggaacagtaattaatagctgtccttcacccatcagtaatcaactttccccatgtaattggcgttctctctatgcaggcactgtaacaccttgaagttcttcaaggggaatgtatagtcaatcaaagccttcaatgaatgtgaatcccatgcatattacatatacacaacgaagtggaccttcatgtgccctatcacagtctcctcagataataccacatctatctgcagttttaaaaattactgtaggtggagcaacaactgaaaatcttttaaatttcatggaccaagatgaatagttggcagcgccagaacccgttcagccaattttagtgactccaggtcctggaggaaaaannnnnnnnnnnnnnnnnnnnnnnnnnnnnnnnnnnnnnnnnnnnnnnnnnnnnnnnnnnnnnnnnnnnnnnnnnnnnnnnnnnnnnnnnnnnnnnnnnnnnnnnnnnnnnnnnttggagttagaaagagaccagtatgaatttgaaagatgtattagccataaaaaagttttaatgcttctgaattttatttaatgcaac

SEQ ID NO: 325371 - DNA, 716 bp, Homo Sapiens
gctaaatatgaccttccagccacaatcaattttatcatagagaaaactggacagaagccattttactacgtgggccactcacaaggcaccaccatagcttttatagcattttctacaaacccagaactggctaaaaagattaagatattttttgcactggctccagttgtcatagttaaataccccctaagtcctatgaaaaaactaacaaccctttccaggcgagtagttaaggtgttgtttggtgacaaaatgttccaccctcatacattgtttgaccaattcattgccaccaaagtgtgcaatcgaaagctattccgtcgtatttgcagcaacttcctatttactctgagtggatttgatccggaaaacttaaatatgagtcgcttggatgtttatttgtcacacaatcctgcgggaacatctgttcagaatatgctgcactgggctcaggctgttaattttggtcagctccaagcttttgattggggaatctctgatcagaacatgatgcacttccatcagcttacacctcctttatacaacattactaagatggaagttccaacagcaatatggaatggtggacaggacattgtggctgatcccaaggatgttgaaaatttacttcctcaaattgctaaccttatttattacaagctgattccacactacaatcatgttggatttttaccttggagaggatgcacctcagg

SEQ ID NO: 325372 - DNA, 537 bp, Homo Sapiens
cgtgcgctgcaccggccacgagaacgcgctggagcgctgcacccacgtcgggctgggcccggcacaactgccagcaccgcgaggatgcgggcgtggtgtgcgcaggtctggctgactctcttgtacctaaggacaattgtaaagtcttccctctagcgtctgaggctaaggatgctgatgggggagctgagagaacagccaagcaggggagaaagaacaggctgtgatggggacccgcttctgtgtttacactgagatctctggatttccacccactcgctgggttttaggagcccagctatcctgcttgcctcacctcttccaagccgtcattgaccgaggctatctccggaggctgggctactcctcctgggacatccacttaaatgatgagctatgtcgccccaaagtcatgggacgctgcctgatcttcaacattccctatggccactgtggcactatccagcaggagcaccttggctccctcagctactctaactccatcagaggccggaaacggggccaccctggccgagt

SEQ ID NO: 325373 - DNA, 649 bp, Homo Sapiens
ttgcacctgcacacctgctggcacgccctgcccggagccaggtgagctctctgtatctggagaagccctgggcttgcatgggcaggctgcaggggtggaggggggggcgaccctcacaccatggcaccttgggatgaccaagagcctccctttcctcccagggccagatcctgagccagttccacaggcaccagcaggtcccaggacctgcagcttggagcagaggatgggctgccccccagattccatcgtggactccagcctgcacactgttcgcctgagattccgattcagcaggttgcacctgcacacctgctggccactttccctctgggccagctggaccccaaatctggcccttcagggaacccacagaggcctctgctgtgtctaccgggttcccggctcctccagcaaattgtgcctcctcgtccggggtgtggggggatgtaagttcagccgcatcaagggccctgaggagggagcctcgtgctgggagagccaccggagctcagagacagcttccctgaagtcccgagttgggccgtggggatgagctggagctcacctgctgctgcagggagatgggggtcctggcagaggaggtgcgggggcaatggccctgtgtccgtcagcgggtgcaaaggta

SEQ ID NO: 325374 - DNA, 481 bp, Homo Sapiens
catcaactggcatggacccagtagccagacgcctgctctggaacatggtgacaaagacacgtgaaagtggaaaagccatcgttatgacctcccacagtatggaggaatgtgacgccctctgtaccagtctagccatcatggtgcaagggaagttcacttgcttgggcagccctcagcatctcaagagcaagtttggcaacatttacatcctgaaggtcaaggtcaagactgaagataaattagaggattttaaatgttatgttgcaacaacatttccaggtgtttggcattttggaggaagctaaagagcaattcgatttagaagactattctgtcagtcagatcacactggaacaggtcttcctgacctttgctaacccagagaaagcatccagtgatagatgagaatctgaagccagagacaagaaatcagtttcaaataaataccccacatcaaagcatcagcccagagaaagcatcc

SEQ ID NO: 325375 - DNA, 441 bp, Homo Sapiens
cccagctatgcagaaaaacctgccaccgggtacccacccctggcacacctctttgcttctcagcaacttgtctgccccaccccaaacccacacctcccagccatggcctggagccctggccacacagacctgagaccatgcatctttttgacatatccttcacggttcctagggcgtcattactcaggcagcaactgtctcagaacctcagcgtgtgatcccggcccctgcagcagcccctctcccacccatgaggggcttccagatgctctgttcagatatttgggttctgggtctggatcctggtagccaccaccccggtcgcaaacccattgctgcaaggatgggtgatgtatgtctcactcaccttgtttctcatctccctggtgttcctgttgtcttccttgtttggatttgaatcctggagagttctgttcttcg

SEQ ID NO: 325376 - DNA, 1018 bp, Homo Sapiens
  misc_feature (917)..(953): n is a, c, g, or t
cgttttccgaaagaggtgtgattggccgcccagtttggaatttgcgtctactgcgggcccccccctttagatcggccggataggataggtgtgggagagccttgtacaccgccgctgttcgagacccaaaattaagttttgtcttggggaatatttgtgaaataagccaggccaccaagggccctcccatgtgaaacttgccctgaacgttccaaccagtgaccagtgtttatgtggttcgcataatctcttcaccaaaacttaatgttgattcccaacacgcagggctcaaaaatttgggcctttggaaattttacaggaaatccactggaatgtcaaatccaggaaaaggtctggcttctgacggatgatgaagtggctgaagatgtgtggtagtctgaggtgttatttatgttatttaattcagctggatatgtttccatttaaaactccattctgaaacttgtttaaaaatgcctgttggcctggcagtactggattgtactgcatctgacccacgtgggtgtgctgaggttctggctggcactgatacatcgacacggccccagcataacatgtctgaggagttattatggctgactgtggatttaatccatgcttttggttttcaggaagttgtaaacaagtgacaaaatcttctaaactagaagtagtggggtatggggatggttcaaaactccccatagggtagtccagctctgtacatttggaatgttgtggtaatacaggctgattacaggaaataaagttctgtgtataaggcatagaatccatttcagatttgtaggggaactcttgactgatcccatgtaagtctccgtaaagacattatattgttgtgggtccccggaccgtaatggccgaattcccgggcatatgtccgctaccgtcgactnnnnnnnnnnnnnnnnnnnnnnnnnnnnnnnnnnnnnccgcttcctctgctcactaactcctggcgctcgtcgttcgcttctacggctagcccctatatatg

SEQ ID NO: 325377 - DNA, 381 bp, Homo Sapiens
tgatattccacggaggtgagatttctatagttttccaacatcacatctctgtacagacttctttgagcagaatccagcatcatccactcctcctgagtgaactccacagctacatctttgaaagtcattggttcctgtaaccaggttgtcagaaatacagcaatcatcctttcctcttcagcatttctcagatggaaacaggcagagtcctgtttagttaaagcccatggggaggataggtccataactgccattttatgagtacataagcctgcacagtagagtagagagatcaggatgtttctgttcttgtgtctccaatccagtcacaggagggatgcatttcacccgaagttctccccgtcctcagtgcctgcctcc

SEQ ID NO: 325378 - DNA, 949 bp, Homo Sapiens
  misc_feature (200)..(445): n is a, c, g, or t
  misc_feature (646)..(657): n is a, c, g, or t
  misc_feature (660)..(793): n is a, c, g, or t
  misc_feature (831)..(866): n is a, c, g, or t
cgatgttccaacccggtgtccccgcgttttttgggggaacccaccgtgtgcgcaggttcccggccgcctatcccgtgccgttcgtggcgcgccgcaaacattggtgtgtaaaacttctctgaggccgggcgccgcacaagtgttgttgttgctgtttcgtgacatggattctccctcttgtcacccaggttggaggccannnnnnnnnnnnnnnnnnnnnnnnnnnnnnnnnnnnnnnnnnnnnnnnnnnnnnnnnnnnnnnnnnnnnnnnnnnnnnnnnnnnnnnnnnnnnnnnnnnnnnnnnnnnnnnnnnnnnnnnnnnnnnnnnnnnnnnnnnnnnnnnnnnnnnnnnnnnnnnnnnnnnnnnnnnnnnnnnnnnnnnnnnnnnnnnnnnnnnnnnnnnnnnnnnnnnnnnnnnnnnnnnnnnnnnnnnnnnnnnnnnnnnctatcataaattgtgacatgtaagattggaagatacagagagctgtatacaatcatacccgtagggtataattagcccacggtagtttaggaataaaattgggttgtatccgagtgccctaacttgacattctttgattgtccagccaagaacataggttacctaggttactaaccttgccttctcaacttgggataaacnnnnnnnnnnnnctnnnnnnnnnnnnnnnnnnnnnnnnnnnnnnnnnnnnnnnnnnnnnnnnnnnnnnnnnnnnnnnnnnnnnnnnnnnnnnnnnnnnnnnnnnnnnnnnnnnnnnnnnnnnnnnnnnnnnnnnnnnnnnnnnnnnnnggccgaattcccgggcatatgtccggtaccgtcgactnnnnnnnnnnnnnnnnnnnnnnnnnnnnnnnnnnnncggccgcttcctcgctcactagaccttcgctgcgctcggtcgttcgctgcggcgagctagcgccctatatgacataatatctt

SEQ ID NO: 325379 - DNA, 1013 bp, Homo Sapiens
  misc_feature (293)..(293): n is a, c, g, or t
  misc_feature (443)..(501): n is a, c, g, or t
  misc_feature (541)..(541): n is a, c, g, or t
  misc_feature (717)..(717): n is a, c, g, or t
  misc_feature (750)..(750): n is a, c, g, or t
  misc_feature (770)..(770): n is a, c, g, or t
  misc_feature (812)..(847): n is a, c, g, or t
  misc_feature (897)..(932): n is a, c, g, or t
  misc_feature (975)..(975): n is a, c, g, or t
tcttgactcgtagatccgagtgactcctgcaccttgcctcccaaagtgctgaattaccagtgcgagcccccacgcctggcccaaaatgcctgtttctgaatggtgatttgagaatgatttctttttccttccttgttttgttcctagatttttcgtataatgataaagtcaacctaaatttttaaaaatttactttatattgcataatcttttatattttgaattgtattaggtacatgtattaactattaaaataatagaaaaaatgttaagggtaaaattaaaagttaggnaatatatttacaacatatttgataagcaatggtaaaaattcctcactatataaggatctttcaggaatatgcaccaaatttgtaacagtggttaaagtgggattataggagagttattttgtgtcacagatttctatatcattaattctnnnnnnnnnnnnnnnnnnnnnnnnnnnnnnnnnnnnnnnnnnnnnnnnnnnnnnnnnnnttgctcttataaattaaccagaaataggttaaactcccanacagaataacaggctaaagaataagcaattcaaaagagaaaagatactttttatcatgtaactttcaaacttgctaataaccaaagtgaaaaactaaaatggcatatcagtaattgtctaagaacctggcaatgacaggagaaaaaaagaatctagtgctggtgaggggatggcancacaggcaccttcgttcactactgatagatacnaaaacaggtctaaagaacanaatgtgtcaggaggctgaggaaggagaatggcatgaacccannnnnnnnnnnnnnnnnnnnnnnnnnnnnnnnnnnncccggccgtaatggccgaattcccgggcatatgtccggtaccgtcgactnnnnnnnnnnnnnnnnnnnnnnnnnnnnnnnnnnnncgccgcttcctcgctcactacttcgctgcgctcggtcgttcgnctattaacgcgggagcccctatatgatctatcatcttg

SEQ ID NO: 325380 - DNA, 1014 bp, Homo Sapiens
  misc_feature (119)..(236): n is a, c, g, or t
  misc_feature (579)..(579): n is a, c, g, or t
  misc_feature (718)..(965): n is a, c, g, or t
ccccggttgtgtccgtccatttggctcagcactccctcctggttcaaccatttcttcctctcctcctgtactggcttcagcggccccccatcccgctaattttggatttagtacagacnnnnnnnnnnnnnnnnnnnnnnnnnnnnnnnnnnnnnnnnnnnnnnnnnnnnnnnnnnnnnnnnnnnnnnnnnnnnnnnnnnnnnnnnnnnnnnnnnnnnnnnnnnnnnnnnnnnnnnacagttcttcctaagactcggaaatggggatggggttcagagagttaaccatgtattgaagcaattcaccaaatcagagcccaaagagaactccccattgcccttgccaacgatgaaagtcagtgctccaactgaaggtgggagacgtatgcaagcatggggactttggatgatgaggacacaggttcagcctgaaagggatcgatggctgggcttgagtaaccttaccctccgcttatgcaagtgatggagctactgacgtgatggtaatttagcctgagaggaaggaaaagccctttgatgtaccccgggccttgatcccgtatcagctgttcggcctccntggtggctgttttccctatcatgggggcttccccacctctaaaacctcaggcaacgaaagcagggaagtagctcctattcactcaggagagcccacggtcaattctccaggaagtttgtgggccagtttttattattannnnnnnnnnnnnnnnnnnnnnnnnnnnnnnnnnnnnnnnnnnnnnnnnnnnnnnnnnnnnnnnnnnnnnnnnnnnnnnnnnnnnnnnnnnnnnnnnnnnnnnnnnnnnnnnnnnnnnnnnnnnnnnnnnnnnnnnnnnnnnnnnnnnnnnnnnnnnnnnnnnnnnnnnnnnnnnnnnnnnnnnnnnnnnnnnnnnnnnnnnnnnnnnnnnnnnnnnnnnnnnnnnnnnnnnnnnnnnnnnnnnnnnncccggccgtaatggccgaattcccgggcatatgtccggtaccgtcgact

SEQ ID NO: 325381 - DNA, 846 bp, Homo Sapiens
  misc_feature (122)..(122): n is a, c, g, or t
  misc_feature (720)..(797): n is a, c, g, or t
ctcttctttttcttttgattaaccttgtattttaacctacgtttacaataacacgcaaagcaagtgatcattacctcaaataccatagctgtcaagtttaaatgaggttcttattacacaangcaggaacactatatcctataattacatctttacttttatatacaagacctgtgtgcaaagtgcttttcaaactataaaataggactttggaacaggatagaaatggttatccctaggagttagttatcccagactgcttgtaatgattcacaactgcttacactcttaatttgcattttatttatttatatactaagagaaaagacactttttactgataccaaattgatatctcatttttgaaaataatctttgatccacaggtctaaatgttatttttacatataaattcagttgcttgcttcactttttcctaaataaatagggaacacttttttaaaagcaaatagtagtagatccctttggacagacatattttaatcagtatggggattaaataattaaaggttatttggaaggaaaaaataaggaaaaagagtttgggaaaagtaaattgtattcttatacttttcaggcaaacaaagaaccatcctgtatactaaagacagattatttcttatttaaaacactgtgaacatatgatgttaaacccaacatcatacatcttgagaatgcttaaaaattatttgctacagnnnnnnnnnnnnnnnnnnnnnnnnnnnnnnnnnnnnnnnnnnnnnnnnnnnnnnnnnnnnnnnnnnnnnnnnnnnnnncccggccgtaatggccgaattcccgggcatatgtccggtaccgtcgact

SEQ ID NO: 325382 - DNA, 1408 bp, Homo Sapiens
  misc_feature (87)..(122): n is a, c, g, or t
  misc_feature (1280)..(1320): n is a, c, g, or t
aaaggggggaaaacgtatatacctcatatggcccatcctttgcagcgaacgacgagcgcagcgagtattgagcgaggaagcggccgnnnnnnnnnnnnnnnnnnnnnnnnnnnnnnnnnnnnagtcgacggtaccggacatatgcccgggaattcggcacatatacaggccgggactagaactgccgattctgtctccagtgttctcttcacttgatccggagccgccaggcacggtgtagcacgcgtatattgggtgcgcgcctacgtccattctcgtgcgctagatcgcttgtaccctcgctgggctatggtgcatgatctatatactcatttcacttttttctgtctaccgtcatttcatggttctctagttatgtttcctttgttcttacctgtattgtctccagtattccactttgcacagactctcctggtctctctctctctacaaactcccacttgtcatgtgacagtgtaagactatcttgtgtgaatttattcttcttcctagccctctcacatttatgaagcaagccccacttattccccattcttcctagttttctcctcccaggaactgggccaactcacctgagtcaccctacctgtgcctgaccctacttcttttgctcttagctgtctgctcagacagaacccctacatgaaacagaaacaaaaacactaaaaataaaaatggccatttgctttttcaccagatttgctaatttatcctgaaatttcagattcccagagcaaaataattttaaacaaaggttgagatgtaaaaggtgttaaattgatgttgctggactgtcatagaaattacacccaaagaggtatttatctttacttttaaacagtgaggcctgaattttgttgctgttttgatttgtactgaaaaatgggtaattgttgctaatcttcttatggcaatttccttttttgttattattacttatttttggacagtgttggaaatgttcagagggttgctctagattgagagaagagacaaacacctcccaggagacagttcaagaaagcttcaaactgcatgattcatgccaattagcaattgactgtcactgttccttgtcactggtagaccaaaataaaaccagctctactggtcttgtggaattgggagcttgggaatggatcctggaggatgcccaattagggcctagccttaatcaggtcctcagagaatttctaccatttcagagaggccttttggaatgtggcccctgaacaagaattggaagctgccctgcccannnnnnnnnnnnnnnnnnnnnnnnnnnnnnnnnnnnnnnnntccagttcatggagaatctatattttaacaagatctggcagggggtgtgtctgcttcagttaatttgagggacaaccatttccagact

SEQ ID NO: 325383 - DNA, 1068 bp, Homo Sapiens
  misc_feature (68)..(203): n is a, c, g, or t
  misc_feature (792)..(792): n is a, c, g, or t
  misc_feature (901)..(901): n is a, c, g, or t
  misc_feature (919)..(919): n is a, c, g, or t
  misc_feature (933)..(933): n is a, c, g, or t
  misc_feature (942)..(942): n is a, c, g, or t
  misc_feature (964)..(964): n is a, c, g, or t
  misc_feature (967)..(967): n is a, c, g, or t
  misc_feature (1001)..(1001): n is a, c, g, or t
  misc_feature (1009)..(1009): n is a, c, g, or t
  misc_feature (1016)..(1016): n is a, c, g, or t
agtcttccttccttgaaattgcttttttcactttttcaaaatcagctgagcaatatgtatatgggttnnnnnnnnnnnnnnnnnnnnnnnnnnnnnnnnnnnnnnnnnnnnnnnnnnnnnnnnnnnnnnnnnnnnnnnnnnnnnnnnnnnnnnnnnnnnnnnnnnnnnnnnnnnnnnnnnnnnnnnnnnnnnnnnnnnnnnnnttgaaattgatttagcttaagtaactttacactggatattgttcatctgttccccattttgtctcctgatttattctagagaagaaagttcttgcataagctcttcctgtttcttgttgtaattcctgcaaatgctgttggttttgctccagtctgtcctccaaccactgtaggagaggcccgctgactgccgacatctgactgcacagattcttggtaaacactgagccattatggatcttggttactgagtccagatgtgtaaggctgtggatcctcctatacgcatcctgctcctcctggcacaggatcttgggcagctctactgctgattcaaggcacactttcccgatagtgacatgaggtacaatatggaattgggatttcgattctctcatactctgaactcttgttgggcctgtatggatcggaaagcaacgtgtatagaagtagagccggccaggtcattgtgttcattagtcttactaatgaaagcacggataagaaactacacgtccgtaccaaacgacctctgagtccatgcagtcgtgcgtatcatgggcattgatagtcgcgcaagcaattcaancattcggtgataaggcactcacccagtgcactgatacaatggtctcagaactgtcccgcagcggctaatactgtgacacagtgatagcccgctcgagcatgtactagancctattctgatagtatantgtgagtggcctantacaccganatgttagattgcggtcccgacnttnccatctgcctacagctagcacatcagtctagcgncatccgtncgtttcntgtcagcacgcgaagtagcccgccctcatatgtgaaagtctatacaaaatgg

SEQ ID NO: 325384 - DNA, 742 bp, Homo Sapiens
  misc_feature (81)..(116): n is a, c, g, or t
  misc_feature (164)..(255): n is a, c, g, or t
aaaagacctttttatatcactatgggcctactcgctgaaccgaacgacgagcgcgcgagtcagtgagcgaggaagcggcgnnnnnnnnnnnnnnnnnnnnnnnnnnnnnnnnnnnnagtcgacggtaccggacatatgcccgggaattcggccattacggccgnnnnnnnnnnnnnnnnnnnnnnnnnnnnnnnnnnnnnnnnnnnnnnnnnnnnnnnnnnnnnnnnnnnnnnnnnnnnnnnnnnnnnnnnnnnntgacccactgtgcctggccagttttgaattttttaacttaaaaaaattgcaacttttataatattttatgttttataatgaaaaaatgtaatcctattgaatgttcctctgagcatagctttagctatattacttaaattttgatgagtaatatttttatgtttatatatttaaaaacccctgcagttgcagtttttattttttcaacaagtatttaagcacctgctccatctagacattctgccaagtgctgaggacacaactatgtacaagacaaggtctcttgccttcatccagttacagtctgtcaatatagacaaaccaacgaataaagaattttcagatttcgacaagtgtctaggaagtaaataaataatagaaggtgctaattggatgatctgagactgtctctctgaggatgtcatgtttaagttgattggtggtaccaaggtgtgtatgggagtttctttagctttcccaatctatc

SEQ ID NO: 325385 - DNA, 1021 bp, Homo Sapiens
  misc_feature (624)..(624): n is a, c, g, or t
  misc_feature (706)..(869): n is a, c, g, or t
  misc_feature (907)..(942): n is a, c, g, or t
aaagtgtttatttttttctataatacatttcattcaaatcataaaagtctgatacatttttttctcaagaacaacttacactcatttgagatgctttttctttcctttaatcttataggatggacaaagatacactttaatggacaaaaaacaccagagttcattacaaatacagcttcccaggccccacctccagcacttctgactgagcgtctgggacgcatcctaggatcgcaaaactgtaaaattcccccagtcaactccacggcaggcaggcctggaaccacccttagtggaacactgcttaggacttgtctgttatctaccagaagcaatttcagaaaatcaggagtaattacgtatacagaaatagctcttctataaaatttccatatagaaaataatggtatttatttacaaagtctgagatactacacaatgatatatcatattaggttgtgtacttccatctaatagaggaaagtctacattgggcacagtcagatgtggtggttgcattttcctcttatctctcttgtttaaattgcttaaagcatgtggcaaccccgatgtatccttcatgcagaaaaaaggagaactatattttctggaaataaaacccantagcacatagtcagagtaaagcattttcagatgaaaaggtgaaccacctaagtggtttgggctcatggccctttacccaccnnnnnnnnnnnnnnnnnnnnnnnnnnnnnnnnnnnnnnnnnnnnnnnnnnnnnnnnnnnnnnnnnnnnnnnnnnnnnnnnnnnnnnnnnnnnnnnnnnnnnnnnnnnnnnnnnnnnnnnnnnnnnnnnnnnnnnnnnnnnnnnnnnnnnnnnnnnnnnnnnnnnggccgaattcccgggcatatgtccggtaccgtcgactnnnnnnnnnnnnnnnnnnnnnnnnnnnnnnnnnnnncggccgcttcctcgctccactacttcgctgcgctcgtcgttcgtctgtaccgagctagcccctatagtgatctatcagt

SEQ ID NO: 325386 - DNA, 433 bp, Homo Sapiens
  misc_feature (205)..(229): n is a, c, g, or t
  misc_feature (251)..(360): n is a, c, g, or t
  misc_feature (384)..(384): n is a, c, g, or t
  misc_feature (390)..(390): n is a, c, g, or t
  misc_feature (408)..(408): n is a, c, g, or t
  misc_feature (421)..(421): n is a, c, g, or t
ggcagttatttatttgttcaacaaatatttattgttcatcaaagacgagccagattttatgggcatttgtgatggaggctggccttagctttaggagaaggaactccaagagcagtagtgatctctgagatcaccttgttcaccctcctcggggcagatttagtcaaatccatcccaagctcttcaaatataccagcaaagaggnnnnnnnnnnnnnnnnnnnnnnnnngagacagagtctcactcttttnnnnnnnnnnnnnnnnnnnnnnnnnnnnnnnnnnnnnnnnnnnnnnnnnnnnnnnnnnnnnnnnnnnnnnnnnnnnnnnnnnnnnnnnnnnnnnnnnnnnnnnnnnnnnngcatgcggccaccacacccaggcnaatttngtatttttagtgggaganaggggttcaccangttgggccaggg

SEQ ID NO: 325387 - DNA, 570 bp, Homo Sapiens
atgattactagtagatctttaagaagattttattatgaaatatgcaaacatttaagcattttttaattaaaaaaattcgacctccaaagataaatcattagatgtggtttactctgtttctggattggtaaggtttccacgctttagaggtttttaaatttttaagccacatagaccactctttaccagtagttcattagttgcttagtattcattgtggtgagttctctctttttaccacgtttatagttgttggattgggaagtgcagtgtgactcttactttgtagtttgttaaatcttaacaagtttatagttgtatgagctaaaagtttaaacctctgccccattttcttggggcagtgttctgtgaccagttacatttttggacttaggttatctctgaagtgctgtgttgctgtataaatgtcatatggaggataacctacaaaatactcttcggatctcccaacagctttgcggttctgaaacagccttcagtagtccagtggggggaacggggaattaactggttttttgtttcttttaagagatagggtctagtcagcgc

SEQ ID NO: 325388 - DNA, 708 bp, Homo Sapiens
  misc_feature (333)..(374): n is a, c, g, or t
aaacagaaacactaaagcaagaggggaacttttataaagcaatgtaaatatttaacctcatggctgtcattatgtaagacatgagattttaataaataactacattctcacgacatctgttgaatttactaggaacactacagtgactgtatagacagttgaaagcattcttgaaaatcctgctctctccttttaaaagttaacaatctcttttatcagatgtcaagggcaagggtaatgcagtttctgtaaatttatgaaatttctttttctatgtacatgaagacatttagtaagtaacacccccccttcccatgcgcacatgtgcgcatnnnnnnnnnnnnnnnnnnnnnnnnnnnnnnnnnnnnnnnnnntgtcataaagctaatgatttggggactttaaaaaataggatgtcctccaggaacaatcataaatttatgaaagaaagagtagtttacagactcccctgaaagaagcagtgtatatgtgaagacagtgcaaaaatctctttgccatgtatattatagcgtattcattggtgtgaatagtacaaatgtttccttctggtacaaactctgtgtttgcaaatttacaagaagcattgttttcaaaaagctccccttaaaaaatgtaactggtttatatgagtaagcagttaccgtattgcacttaaatgttatgttgaaggaaatgcagttttgtttt

SEQ ID NO: 325389 - DNA, 628 bp, Homo Sapiens
  misc_feature (445)..(455): n is a, c, g, or t
  misc_feature (457)..(509): n is a, c, g, or t
  misc_feature (553)..(588): n is a, c, g, or t
ggtttgttgtttgtttttttagagataaccagtttattttggggagcaaagagaaagggtccctaaccccagactgcctgcgaaagaggtgaaaatggaattgaatgggattatggtcatccaaggcttcctagtggaagctgctacctgaactgagttttaagaggggtaggaaagaaaaaatgtagtgggtcataatggcattccagatacaggggacacaaacagctctgtgtttatgaactacaaccagttgttgacttttgtttcaagtggctccccttccccagtgctgtgtggacgatggactgaagaggagaaggctgggagcaagggaccagtaagctgttgcagcagtgcaggtgagatatgaggcctcaactctgcagtgttgacaaccatagagagcagagagcagaattcatcaatatttatcggcaccaannnnnnnnnnnannnnnnnnnnnnnnnnnnnnnnnnnnnnnnnnnnnnnnnnnnnnnnnnnnnnncgtaatggccgaattcccgggcatatgtccggtaccgtcgactnnnnnnnnnnnnnnnnnnnnnnnnnnnnnnnnnnnncggccgcttcctcgctcatctactcggctgcgctcggtca

SEQ ID NO: 325390 - DNA, 908 bp, Homo Sapiens
gtagcaagtgatcttcacaggttacactctgtaacacaggggctggatatagggccctacgggctccgggggtgaaatcgcttttataagggcgaaaagtgcaaagaaatggctttgacttctgtccctctgttggacaaggccggttagagtatccagtcgcccaagggtcctccaagcttctccttgtcctccaggtcctggtacaaagcctttgggaacgaggtccaggccgtacagcaacctcgtacaggcagcactgcaataggtgcccgtggccgcgctctcccctccagtgtaacatggcccaggtgacacagctcagtccagctgtttcactgctgcaaggagggcgtcataggctatcatgggggcatcgtggcctcgtcattccccctcgaccttccgagctccacgttcctgtaggtctatgttgccctctcttctgcatcataattgtcggggaagatggctttattttctgagtctttactgattttcctctcctccaaataaaattgccatttagcttcaaagtaaaaccagtgctcctggtattctgccgtgtgccggatggtcttcctgcagtactcttctgccagaggcaccgcccgcagcatgtctctcccccactggaccaggggctttccttgtgcggcgaacgacacaaacagggccgtgcacagggagcccaggaagcctgtgggatggttgtgggtcatccggccgcactccacgctgacctcgatgagggtctccagccgctcaggcttccagtaccgcaggccgatgcacatggccttggtggccgctccaaaccctgagcctttttcattgaacggtgtgtgccaggcgagaaggtagttattgggctttagctgagcacagccttcaatggtagctcggaa

SEQ ID NO: 325391 - DNA, 1108 bp, Homo Sapiens
tcggcggggggggttgtcgctgtgtgtcgttcttctcgccgtgccttgctgtttcgtgttgtgcttgctcttgtctgtgtcgcgatctgtgcgctctgcaccttgctgtgctcgcggctcttgcttgctttgcgtgtgcccgaggctgttggccccttgttgttgcggctttcttctggttgcgttcttgttttgcgcctttcccgcccgtttattcctcccatcgctctgctcctgtctgctttcctcagggcgccgcgcttatttcccttcgctctctcgttgttgcccccgccttggcgggatcgtgtattcttcccggcgttttccgagatctcttgttgtccgtcttctggtagttcttcgggagccatcctctatcccccaccttaagagcagccacagcgatccaccaccatgccagggatcttgccgtagataatctgctgcttgtcaattgaagtagagcatgttgattggggacatcttggtgggggtacaacagggcccagcagagcctcttggattggcctgctgcaccaaatgggtatgcggatatttttgcatgaacatgtactcgcactggccggagcagtagttggccttgtagcgcttaggtgcgatgatccagtcccagccgaaagcctcaaagtccactgtgaggggatatcggcagcagcgggactcgcttgagtgctcgtcgcagtccagacccaggttccgccgggaacgttttgtgttctctaggactcgaagctccatgaatggatgcagcccctcggctcccggccccagggaggtgacagccaggtctgtgccactgggatcaaaggcgttgatctcgatgccccagttgctctgtggctggcggaaccagctgtgtagcacttgcttgaagtcgatgctctgccaatggcctgagcgtgagtgcagctcaatcttcagtgagcggatacggatgtgacgccggcctccgccccctccccctgcggtcccttccccagttaggggttttagtcgcaagatctgcaggtagactgtggctgggcggggtacaggccgtaggtacacccacagctgggccttcagtacctttgtgaacatcacc

SEQ ID NO: 325392 - DNA, 441 bp, Homo Sapiens
  misc_feature (26)..(26): n is a, c, g, or t
  misc_feature (69)..(69): n is a, c, g, or t
  misc_feature (91)..(91): n is a, c, g, or t
  misc_feature (179)..(179): n is a, c, g, or t
tcctatccccccccaacccttaaaanaagcaagcccaaaaaacgaatcccacccaaccaatccccccangaatcttgccccgtaaaataantctgcctgccttgtcaattgaaaagtaagaaccatgttgaattggggaacatccttggtggggggtaacaaacagggccccagcagangcctccttggattggcctgctgcacccaaatgggtatgcggatatttttgccatgaacatgtactcgcactggccggagcagtagttggccttgtagcgcttaggtgcgatgatccagtcccagccgaaagcctcaaagtccactgtgaggggatatcggcagcagcgggactcgcttgagtctcgtcgcagtccagaccccaggttccgccgggaacgttttgtgttctctaggactcgaagctccatgctcatgccgaat

SEQ ID NO: 325393 - DNA, 749 bp, Homo Sapiens
gaaaaagaaaaagcagaaagagaagtgattgtgagagaatttcaagaagaactggtcgatcaccttaaaacattttcaatatcagagtctccactggaaggtacatcacattgtcatattactttgaatgagacatggacttcaaagaagaaattatttcaagtagaaattcaacctgaagaaaaacatgaagaattcagaaaactttttgaattaatatcattactgaactgtactgcggaccaaataagaaagaaaaatcgtgaattagaagaagaggcaactggatataagaaatgcctagaaatgacaataaatatgttaaatgcatttgcaaatgaggacttcagttgccatggagacttaaatacagaccaactgaaaatggatattctgtttaagaagctaaaacagaagtttaatgatcttgtggccgagaaggaagctgtgtcttcagaatgtgtcaatttggccaaagacaatgaagttcttcatcaggagttattatctatgagaaatgtacaagagaaatgtgaaaaacttgagaaggataaaaagatgttggaacgaagaagtattaaatcttaagacacatatggaaaaagatatggtagaacttggtaaactacaagaatataaatcggagctggcatgacagggcagtgcaggaaatagaaacaattagaagaaatccatttacagaaaccagcagaatatgacacacgattagagcagttaaccaaggataa

SEQ ID NO: 325394 - DNA, 789 bp, Homo Sapiens
catatgaggcttttccagaggtggcttccagtatgcttctggagggggtcttccaagaagggtggcacttaagggtcatgaatggccatgacccatgcccagctgttccagaggacatggggagacagagctgtctggcaaagggccaggtgcagagtcagtctgggggccatggatggcatggatagtcaggtcaggatccttcatgccaatctgtggcttcttgctgtccccacctctcctcctgctctcaccaactcccacacccccgagtcccacactgcccaccgagcacaccctgggagaaggccctaatgtaaatggagggaggtgaggtaagagctgagggaagctccatggagaaccctgattagcattgctttgcacaaagtcggtctccaataaacatatttgttgatgaatgacctccttcgttggcttctgtctctcaacatctatcacgtagcagctgtgtctctcaacccaggcacccacctctctggaggcagtgagaagaggctgaagaaaatgggaatggtatgagcatgtctgaaaccaggaaagccaacctgactggctgttttgtgggccgcagcttgccatccagcttggtgacagtggacatccactctgcttcatcacttgctttgctgacatctcttctgcctctctactcctcggaatacgggctgaagtccagacagggaagtgcatgtgaagccacctcatctgctgccagggagatgtgggaggttcttcccattactctgagatgagggggctcgtgcc

SEQ ID NO: 325395 - DNA, 914 bp, Homo Sapiens
  misc_feature (24)..(24): n is a, c, g, or t
  misc_feature (37)..(37): n is a, c, g, or t
tgcacccaaaagcccttttgacancacattgaagggncctccgcaacttggccctcgggaacgctcactcgaacgcacacccggtgccatcacactggccaccctaaagacaggccgctgcagcctaaaaggagcacgtgtggccacaggagagcaatcagctgtcccgcgtttctaaaggcagggaccgaggctgtggaggggcgagcagggcaggccggcggaggctacttgagcagcttggccacgttcaggctgggcaccacaatgtccttgaagagggggcacgtagctggggctggcctgtgctgggccctgctccagggtctccatgatggtctgcttcatgtcacggctggcgtccccacgcacagccagcagcgcaccgatgtggtcatccctgatgtctggatacttgctgaccagagtggagacctccaggtagagcagagaagggtctgtcagcttgatcacttcggccacagccacgatggtgtcgcagtatccgtccacgtcttccccgaaaccggacgccagcttccggaacaggaagcgcagctgctctgcctccctaaccatcttctcggcaccctccttgcgctcctccgggctccggaaggaaatgcgcttctgcatgaccgcccgcaggtactccaccaccacgcgccggtgcgcctcggccgtcatcctcttcttatacggctttttaattttggcaaaatcgttgaaatagtcttccacggtgacacagataatgtctacagcgtttgaccctaatagccacttcttcgtcatcaattcattcagatgttgctccaggtccaggaagacctcctccagcaaaccgctgcagccctccttcgcgatggcgtctaaaatcccgtccatgctgggctggctcggagacacaccct

SEQ ID NO: 325396 - DNA, 735 bp, Homo Sapiens
caggggctcggcatgctgcctcctcctattcccgggcacggctctcctctgccagcttcccggctaaggaaggaagctccggcctggggggttgcgaggaggacaagcagccagggcctcagaacctgctggtgctttctcccgcggcaggagagagccagcgtgggtgccaggcagggtggcagaggcggattcacagacagccctggcacaaggccacctggcccttgcggaagtcgcggcaggggcagagccggcggtacttggtgttggagccggcgcagctgaagagcagaggctccttctgcaggtagcactcctggccaggctgggcgaacgccgggtacaggtggttcatctccgactcggtgctgtcacagggcacctgcagcttgaggaaggcgtcctggctgttcaggaaggggaagaaggagggctcacagattagcccgtggtccaggcaggtgtcggtgcaggccctcccaggcacggccagccaggcccgcagggcgtgcgcggggggccaggccccaggagccaagctggtgttccgagcccactcgaggtgggtggcattgggggccaggacaaaggggctctgcggggcgtgggcctctggtagggcagggtctggagctctgcagaagtcctggtgctggatgtaggcgtggatccgctccagcatcccctcgcaggtgtactcgtagggtaggtaggggtctacctgagttctca

SEQ ID NO: 325397 - DNA, 808 bp, Homo Sapiens
  misc_feature (11)..(11): n is a, c, g, or t
  misc_feature (710)..(741): n is a, c, g, or t
  misc_feature (759)..(759): n is a, c, g, or t
accatggtggnagatcctgtgcttgatgctggaatacaacatcatcgacaacaacgacacccaactgcagatcatctcaaccctggagagcacagacgtggggaagcgcatgtacgagcagctgtgtgaccggcagcgggagctgaaggagctgcaaaggaaaggcgggcccaccaggctaacactgccctccaagtccacagacgctgacttggctcgtttgctgagctccggctccttcggaaacctggagaacctcagtttggccttcaccaatgtaaccagtgcctgcgccgagcacctcatcaaactgccttcgctcaagcagctgaacctgtggtccactcagtttggagacgctggccttcggctcctgtcggaacacctcaccatgctccaggtgctgaacctgtgcgagaccccggtcacagacgctggcctgctggccctgagctccatgaagagtctctgcagtttaaacatgaacagcaccaagctctcagctgacacctacgaagatctgaaggccaagcttcccaatttgaaggaagtggacgtccgctacaccgaagcctggtgaagctcccagctcaaggcaggaagacgtttgcaaccgcgacaaaataactcttgactaacagccgcagagcagccggtcctggggtcccaccctggtgccctggctgtgagatagatggggagtctttctnnnnnnnnnnnnnnnnnnnnnnnnnnnnnnnncccacaagcacgcccagnccccgccgaattcttttagcttcgtaattggaacctttgacctgatcta

SEQ ID NO: 325398 - DNA, 730 bp, Homo Sapiens
tccctgtagttggctttcatttcttcctgatactcgagctggtcttctttaatcagacgttcgtttaccgctaaggcttgaccgcaagcttccacaattgcctgaaaacttccttaagcagcttcactttattgtcaggatatcgctttgtgtttgtatcatctaagaaagctcgcgcatatgctagtgggccagcattgacctgaacactcacgctgcctggagtttgagctgcagtttgatcatgtccacctcggccgaggagcacagctgccggagctccgccaccttcttactcatctcgtcaatggccacctcgatggggttcaggtcagtgtggtgctggtacatgacagggatgcgcttcttcacataagggaagcagtgtatggctgtcaggatggtgcgccgtttgcactgctcttccaccccgccctgcctcttcccggtctgcgtaaatggcatctcaaacatgaagcggcggatgttgtgggatctctcaaactctgttttcctttcttgcaactctttttcgtcaaagaaggggatgacgtgagtcacctggatgtatgcatacttagaatccagatccttagggttgaccttgccagaatcctgtatcattttgacattttcagaaccaaatttatccgagtacagtttaaggagtctctgagaaatttccgacagcggtgtgagtttgggttccttgtaaatatactcctttgcg

SEQ ID NO: 325399 - DNA, 782 bp, Homo Sapiens
ccttcttaaggctacccttcgacactgttccccaagtaccccagcattgttccttaaagccacatacactttgagtcaggagatcttagcaccacccttcccatctgaggtccctaccccactgcttaccccaagtccagaacactggacttcctgacccaattggtcaccgatcctatatttaccgcttttcacaatatcccagaatgaagaagtaaaaatatactggagtgaaattacaagtccaggagaaaaaacaagccactcactgcccagggcagcagtgggttcagggtggtagaagtacgtgtaggaggccagggtgttgtctgatggctgagtcccctatcatcttccatcatggaggccactctccaccccactgaagccaccccaaggaggggagggatacaaactgataggtaccttatacacaaacatacgccatcacctaggagcagagcacttatgccagcacagcctgagcctcaggctgcagccctggccctggctggtgggtcacgccgtggatggctgggagcagctcctctggctggagctgcgatggctcaggacaaaggaggacgagttgctctttttgctggcactcgtctctcccaggcgtctgcccttcaggtagctggcggagcagcacaggaagcgctgcacgagttcgtggaagaggtggcccgtgaacagcatgtagatccggggttcgacgcgtggtcgacgatatcccgagattgcgaccgtaccagcctgctttatcatcaggttcatcc

SEQ ID NO: 325400 - DNA, 822 bp, Homo Sapiens
cagttttatgatgacacctgtgttgtcccagaaaaattcgatggagacatcaaacaagagccaggaatgtatcgggaaggacccacataccaacggcgaggatcacttcagctctggcagtttttggtagctcttctggatgacccttcaaattctcattttattgcctggactggtcgaggcatggaatttaaactgattgagcctgaagaggtggcccgacgttggggcattcagaaaaacaggccagctatgaactatgataaacttagccgttcactccgctattactatgagaaaggaattatgcaaaaggtggctggagagagatatgtctacaagtttgtgtgtgatccagaagcccttttctccatggcctttccagataatcagcgtccactgctgaagacagacatggaacgtcacatcaacgaggaggacacagtgcctctttctcactttgatgagagcatggcctacatgccggaagggggctgctgcaacccccacccctacaacgaaggctacgtgtattaacacaagtgacagtcaagcagggcgtattgcgcttttcccttttttctgcaagatacagagaattgctgaatcttgtgaatttctgtagtggtattgtagttttctcgaaagtaagtaagttacgagcaagaaagcgcaaacacaactgaccccacaacatagcaaaacgaccacaacagtccgaaacaacgagaagcacgaagacgaagtagaaccacagcccagcgacacggcgcgggacgacaagactaacgctccgagacccatcaggtaacgagaacacga

SEQ ID NO: 325401 - DNA, 607 bp, Homo Sapiens
  misc_feature (553)..(565): n is a, c, g, or t
gagactgcatagggctcggcgtggctggtgttctttcttctccctgccctcagtgtcatgaatcccaagatctttcgtgtagccaagagtagtgctcctttgtattcttattcttatttttattcttaagagcacttggtagtttatatcttagttttctttagaaaaatataaaaggacaaaaaggaaattgtcttaaggaaaccaggtgttcccgcacaggtgatggccgtggacgcagcatccatttcgggcggactttggaacgctgcactccagcgtgtgctcacactgcctccaaatggaaagcgctcctctcctcgccagcgcacagataccacgtggcgctgctgccatcggcacagcctactcacaggaacacaaaggagaagcaaaaccaccggctgaaccaagttgtttctcaacagccggctcaacagtacacatggtggggtactgcctctattccatttttacaaaatgaagtccactggcaatgcgcacatactgggcaacatttgtgtaccaggttatcccatctttcttatatgannnnnnnnnnnnncgacgcgtggtcgacgatatcccgtaacttccggaccgtaca

SEQ ID NO: 325402 - DNA, 1008 bp, Homo Sapiens
ccgaggagttagcgagggagggaatatgctgtttcgtttgtgttcttctcttatcttcctcttagttgtcctctctctgttggtcttttgttttttgccttcccagttccgttccagtggaaacacgtttcctgcttcaaaggtgcccaccaccctgttggctctagtcctcttcgaggcattgagtttttatgcgtacttgtggtacttgttcagcactctagaatgaataccacggcacccgcatttccttccataggaccaagagtaatgtcctctcaccaactctgtccccctctaaagccagccaaccaccctcctttctcttagctcttggacagggctcataccctgagtagagaattgtccaccttgtactggggcctgagcaagatgtggctgatgtagtgtatgtagggctgtcttcaggagccgtggttttccagggaacacagtttcgagcccaagaggacgcccaagagttggcactgctggtcccattcttgcttcatccatatccccaaaaagggaaaacgcctgcccccaggttaaaggagatcctggcctctgcgaggtacggcgtgtcgctcttggagcgcactctccggatggtccgccggtctatatcatcctccgaggatgccgccattaatgtgggaggcaggagcagggtcgcccggcgagcttgagctccttgactgtagaagaatctttgagctgactcaacatccaagagtctgtgagcagactctacatccagaaaataatccattttgggataatccatccttgatgttccaaacacagagttttgagagaaaacactggaacaccagcctttccttgctttatattctctggaacatatactgttaaattcacatgctatcagttttcaaaaggtctatttgataaatagcgtcattaagtgtcagccgttgtgagtgttgatcctcagcttcatccggacgcgtgggtcgacgatatcccgtaattccggccggtacc

SEQ ID NO: 325403 - DNA, 1050 bp, Homo Sapiens
cattgacccccatacagaggcgtcctttttacacatgtcaccttgtctgccctcgcttaactgttgcggagcaatttactcccgttttttccatcccaggagaatcccccaagggcgctggccctatttgcgccccattcaaagcgggcctcgagacaccctgtatgcgaagggccatgcaatgtttccggcttccgcgaggaccaagattctttaagtcggcctatctttaatcctagattatacttgactgtagtaaacctgaaatccaaaacctagagggattacagctataaggaaattgattggtttcgtagtgtataaaacagctttctgatgcccttgaagaactgtagatctgtgtttgtttaaggacaggtacaaatggctcacattgtcttttgcagaaattgttctcttatgtatagttatgttaacctcttcagtatttgaagggccaatgtctcgggaccatttttattttcaacctcagttgtggatgcctcgttatgcttaacattttcctctgtggtagcttgcacagatatgcaatcattagacatgtcaagaactgtggatttatttcctaacaactcaaaactgttaccactaacaggtatgtcttcattaataacaacactctctagtggtatttgatctgctaatgggactgaattttgacaattatctgcatcagaagataactgaagttgaaacttgcaaaatgaaggtaataataatgcatctttttcactagagacttcttttatctcttgagtttgaacagtttctttgtctctgcacattgcctctggtggatgaaaagagttagttttctcctcagaactcaaaagcacatctgttggtgaagatagttgaagatgacaagcactggggacaaatctactttttctgctaaatccttttcccactgaggcatcatcactgtattcagagaaggctgcagctgaggactctagcttcacggacgctttctttggaaatgcggacgcgtgggtcgacgatatcccgagcattccggaccgtacc

SEQ ID NO: 325404 - DNA, 831 bp, Homo Sapiens
  misc_feature (780)..(780): n is a, c, g, or t
  misc_feature (789)..(790): n is a, c, g, or t
  misc_feature (792)..(792): n is a, c, g, or t
catcggtttttcctccagtgtggaagtgtcatagtgtcgtcataaggaatgacttgatgaaaaaaaggctctcccacattcggggcatttatgggttttctctccaggcaatgactcttgtgtgaaccggaattttggagcgttggcagagttgccccagtgtgacaatccttcttgttcgtctctgcggaatacaactgcatctgcatggcgtgaattgagttatttctggaggtgttctcgcactgagtaaaatcagtacattttctctcgaccatgagtgttgtgtgccctaagggatccgtcttcacggaaagcttttccaaatggattccgctggtgcctgttggcccccgtatcaattgtcatcacgtatatgatgcacagtgttctgactgccagtccatgtgcttgatttcagctctgtttttctcccacacggaacccactgaatgttccaccccaagactccatcgtcttcgttgttttcatgtgttttttgactatcgtttaagacaggattatacttgaaaatacttgagtcacgtgttaggatacattgtcttatggaatctccctgtgaaggcacaagcctaaggtaggtttagagtggttcctcatttcatgatcttcacaaatgctaacaggagattcatctttctcaggggcaactgcaggtggcttcacattattcaccccctgcctgtgtggttcctctgttttggggcatctcccgacgcgtggtcgacgatatcccggaattccgggccgtacagctcntgcgttttnntngaacccaaggggggttctatagtcaataattggtcctcc

SEQ ID NO: 325405 - DNA, 840 bp, Homo Sapiens
tgattctgctctcaagaccttgttctgatgcgatggtcatctgtcccacgtgagaccacgggtcctcagctgtggtcccggtcaatcaggggcccaagagtgtcaatgcttgtccacagtttgtccctctttggtagagcagaaatattgctccatcagtttcctttttgggcgctcattgatctcaatttgccacgaagtgttcttgtaacagtccttgggggaggctccaggccaacacaggcctcagaggaggagtcagcctcccttcccacgatgacccgcagccttccttccccattctctgtggggagaagtggggtggcagcccctgcccagggtgccacactcatggaggaggaggcatcaaggctggaacttgtcaacgtcgtctgtttcctctggggtgttggaagaagagcctgtaccctcagaaagcccactccaagggagcaacgtctcccgacctcggagccgctcttccacagcagccacagagccacacacctcctgcaggctggtgttacgcctccgcaggcacaggcaggcagccgtggccagggcctcggcgcagtcctccggaagcctccctgcgcccttctccaggtacttctggcagatctcctttgccatcacgttctccacgcccgtcttcctggagacagaccgaggcggtgctgcttggaatttcactgaggagtaagtccttcaggtaaaccgggcttcggtatgttatccattgcagggatgcccgtgaggacctcggccaacactattccacagcctgaagatgtccctgacgcgtgggtcgacgatatcccatacttcctgaccggtacc

SEQ ID NO: 325406 - DNA, 1300 bp, Homo Sapiens
  misc_feature (212)..(212): n is a, c, g, or t
  misc_feature (229)..(229): n is a, c, g, or t
  misc_feature (791)..(1081): n is a, c, g, or t
  misc_feature (1126)..(1159): n is a, c, g, or t
  misc_feature (1203)..(1251): n is a, c, g, or t
ctaggtttttaaaatgtaggcaaggaggtcagcatttacacaaaagcagggtttgatcttaggaagcttaataaagagaggggtctaatcaaggtttcctgtaggatctgggctttaagttaggccttaaagaacgaagaatgtttgtgggtgtaagtaaagcaatgaacttggagcagagccctcctaagccattgggctcaccctcaacnaggcaggcgcccactgnaccctaaggggggtgtaggcagctggaggaagtactgtgtgtcccccattccagcgatggtggcccctctcagagtcaatacccttccttccaagagactgaacatacaactggacaatggccaggccacatgtgacaatagactctggccagaaacccataaccagcctgggaagccaaggaagccaaaccacagcctcagcagcaatcggacccagaacagtctgaacttagtggctgccagcttcttcccaatccccagccaccacaccccctcttccaactccagaccaaccagagaagccaaatatacccccccaaccaaaccaaagatgcccctgcagttagtccgctctgtccccatgccaacaatctccaatcacagcacacccagagccttccctttttttccactataacatttcacagtccctgcctgcctttgacccctgccaaatacaagcaatcatggctgactccttttgcaaactttgaccaaatggcctctctgctcttgtttaggtggtttttatttccacatctccaacagggagtctggaannnnnnnnnnnnnnnnnnnnnnnnnnnnnnnnnnnnnnnnnnnnnnnnnnnnnnnnnnnnnnnnnnnnnnnnnnnnnnnnnnnnnnnnnnnnnnnnnnnnnnnnnnnnnnnnnnnnnnnnnnnnnnnnnnnnnnnnnnnnnnnnnnnnnnnnnnnnnnnnnnnnnnnnnnnnnnnnnnnnnnnnnnnnnnnnnnnnnnnnnnnnnnnnnnnnnnnnnnnnnnnnnnnnnnnnnnnnnnnnnnnnnnnnnnnnnnnnnnnnnnnnnnnnnnnnnnnnnnnnnnnnnnnnnnngacttcactgtagcttcaactgtggatggacatttgggttggtgnnnnnnnnnnnnnnnnnnnnnnnnnnnnnnnnnncagtcagcgtgtggttagaaacattcttgccaatgtctcggtgnnnnnnnnnnnnnnnnnnnnnnnnnnnnnnnnnnnnnnnnnnnnnnnnngttcgacgcgtgggtcgacgatatcccgaaattccggcctgttaccagc

SEQ ID NO: 325407 - DNA, 1004 bp, Homo Sapiens
catttatcttcaattgctggttcgtttattaccctatgtattcctgcgtcatttctgttgtttcctgtgccccgcgtgtggttccttccacaaccacgtcttggtctctctctctcgttttatactcgcctgcctgtttttatatatctgctccctctagtggcccacttttgtacacaaaaccgtgtaaactgatagctcggtctctgcgcgggttatcatgtcggcgcccgcccttgtttttctgttgtgttttcgtgttttgggatagacttaccattatacggtccaaaagattaaataaattaaattcaagaagacagggattccaagattgtagctgaccaagctgtcttgttttgcgtacatcaacactatgctgctttccgatattcctagccattccacaggtaatgatttttcaacaatcaagagaaagtcattcttgtactgtgaacatcttcctcttccccatcggggttgaatctattgaaatgtatactgaaatcagcctcagattcagcattctcaaattcagctgcggctgaaacagcagcaggatgaagagccctagcttctggttggccaagtgttggtgtctgacccgggctgtggtggttattcacagggctggacttctgtttcggtggagatggcaacatagcactgggaaatcccatgttgttcagagcctccaaagttccatcaggatcaatcatagcattgattgcttgcagctgcttttctactcttttcagttcctgtaagatagaagaaatctccatgcttgaggttttcacaatagggacttcactttcggctcttaatttgctttctatgtcatcccgattccgatctttgtctttaaataatattctgatctttccagctgtcttatctatagattgtcttatcttcttagagaactgaaagacggatgacagcagcagattatctcggacgcgtgggtcgacgatatcccggaattccggccggaccagcct

SEQ ID NO: 325408 - DNA, 970 bp, Homo Sapiens
  misc_feature (606)..(615): n is a, c, g, or t
  misc_feature (955)..(955): n is a, c, g, or t
aactcacttaatattatcttttataacccttagagattttaatcttttgttataagccacacactttactcccagccaacttcagttattgccaatacccttacccatttttacgtaccggcaaaaactgccaacacatcaaaatttcctctaaagataccacaacaaggttgacttagtaatgacgctcagatcattcgccattcgatgatagtacaatgaggtaccatgccaatatccaagactatattaatccacacttcgtctcaactggaaaagagagatcttgtgtctcactggagggtgcaccaagcttcaggcaagaaactgtgagctggctgtcaacagaatatggttcttatcaaggttcttattaatgctgtgcaaacaagggtctcgtcatttcagtaactatttgtacatttataaaagcaatacagtcatgggaaaaaccaacaagcacagcttggtagaataacctgccatgaaatatcatcggctttataataatttactacaactgttctttttattcacactggataggaaatgcttccatctaacacatggaatacgaatatatacaacacaaatttggctttaatnnnnnnnnnncagttcaaaaggacaataacacgggggctgaaaacaataattttgtgcagtttcctgatcataatcacatgtctcctgccttttacagggaatgacacaagtattgatggattttgtaaaccagttaaaacattttcctgcctgtaatagcccactatgaagatatcaccttgttcatacagtcttatagaagtttctccttcttaactgtaattctaaataaccggggatgacacactgagtcggtttaagaacaaatcctgctgagccttttcaaaatccgacgcgtggtcgacgatatcccggaattccggccgtaccagcctgcattttttcaganccaagcggttgttca

SEQ ID NO: 325409 - DNA, 461 bp, Homo Sapiens
atcagttaacaaatttttattaaacaagtgttccagggcattgtcttaccaacggtaatttgcttgtacatcacctgggaaagttgtaaggtgtagattctgattcattgagtttggggagtgcccctgcaagctcctgggtggtgcacatgtgatcatcctgcttccccccatccccctacatgcacatacatcagagacatacatcagaggctcagcttccagagggatgggtctgtaccccatgtttctgggaatgccaccaaatatcaggtataccagaggagctcaggaaattggtactggggaaatgaagaatcaaacaggggattctgacaggcaggggaggctctgccatgggccataggtgacttgggagcagctgaccacagaacagggcattactgagcaacaggtcaatatgatgacttctctgcagccaggagcagctgaaggcagga

SEQ ID NO: 325410 - DNA, 1016 bp, Homo Sapiens
  misc_feature (28)..(28): n is a, c, g, or t
  misc_feature (80)..(80): n is a, c, g, or t
aaccccccctggggccttcctggtaganccacaaaagtggaaaagaaacctccttgggctgggggtaaccagttccattnaaaaataataacaacctacaattccccaacctctggggttcccccatcctgtaactggaagagtgccaggtccacgggatggctgttatttaaggtttgggtgtgtggatcccatgaggttttctcctggcagccggtgtcaggattagcgcagctccagccccaggagcaacagcctaatgaataccaactttgaaacagtgctgtcggcacgttatttaagcttgtacatgcccacaattacacacaacacacacatgggccttggtcactggcaatggtcatgagaaaatatgagaaaggtttgcaaggaaaaccaataaggcaccaagaaaaattatttccagtcaattttaccatttcaaaatgtgagaaggaaaatcatagaaattaaaaagatttcctaaaatctggtcagctaattcactgagaggtcccattagttcctttagacaacctacctgaatggaatccttaccccctaagctatgaagtgaggcattgcttaaaatcaaactgaaagggacagccctgaagctgtacacataagagactccaatgggccctaagtcctccccagctccacaaagctggctgtgaagaagttgctgaactactccataaccttttattttacagttgctttcatgagcatgacttgtttccataatcacatgcaaattgggggaagtaagtatatggatggaaacagggggtggctgtaagtagatccagtttctctccctggggtggctgatctcagtaagacttagggatgcaggtgggcttttatctttgtctctcttaggggatgagggaagagagggacagcagaggtgagaacagagacaaagaagtgcttctgaaagttggtctggaattagacccccgacgcgtgggtcgacgatatcccgagattccggaccggtaccagcc

SEQ ID NO: 325411 - DNA, 968 bp, Homo Sapiens
  misc_feature (22)..(22): n is a, c, g, or t
  misc_feature (464)..(475): n is a, c, g, or t
aaagtgaaaaactgtctggacncccaatccaccttgaaaactcccatggcaagtgcattagcctatgatttccatcacttacaggtagagaagccttactgtcctactggtgtggacactcttgcctattttctttataccttaatttgcagtggcagaatggtgaagtaaaggggtctaatttcactgtgaaaaaatgaaagacaatggcagagagggccatgagtaattatttcaccatttgttagagacaaatgctaggaaaaccacagaagtcaccatttctaaaatgcatttagcactgctaacatagttatgactaactggaatcatgacaggatcatttgatttccttgtggttatagaacatgctgtattattttggttctattgatccattttagaaggtatctttctccccctacccaatcccactggaccaacaagcctgtaactattaattnnnnnnnnnnnngtatttctgcatatgactgagagtactgcatatataaatagctaaaggaaaaaggaattgaatgccgtgaacttttgttttggtgaaatggtggctgccttctgtgataagactctgccactccagaggagttccttatgtcagaggggaataggattgattgtatctgtgaggctggcaaccccacacacatggttccatgtgagaacagactcggcagtgacatccactccaaatggatcaggtaagcccagattacatttccacatgtgtacaactctccagggcacaatacgtttacagctgcctttccttcacatacttttctaattcagaactactcacattctaagcaattcccattcacgaagtctgtccataatgcgaccttctctttttttaacatatacatcttaaaaaacaatatataaaaaattccgaacgcgtgggtcgacgatatcccgggaattccggaccgtaccgccgcttttta

SEQ ID NO: 325412 - DNA, 731 bp, Homo Sapiens
  misc_feature (139)..(165): n is a, c, g, or t
ttgatgttactaatgttttatatccctagaaacatcataagttgggctaatgagaagttgtcagacacacaacaaagaccacacacaaatgggcaacagctgccacaaggaggaggcttgctttttgtacaaagttttnnnnnnnnnnnnnnnnnnnnnnnnnnnttatgtacacagacacaagggtataaaatccagtgagaagggctcacacatgcccaggtaagggatgggagtagctataattgccagggttgaggccacagtagaggcacacaggaagtggtagagtagcagcctccctccatcctcctacctcgggccaaagggaggaaatgggaggaaggacaagtatacaaaggaagatggaagatactggaaaggcatactccaccttttactaaattcctgaaagcccctaaatgcctcacaggacagatcactctcacacctcctggcaggacagatcactctgaggcctcctggcaggatagatcacttccatgcctcctagcaagatgctgaggctaccgtaggtctggcctcaagctgcatcaagctaaggtctgaggctggcttctcaatgcacgtccatgctatctcgcagggtccttgtagcagaaagagcaccttcagggtcaccacaaactcagttctcttgattcagagggtctaagggttattcttgacagactaaaggttaaaggtacaggagaaggggagaggtcggt

SEQ ID NO: 325413 - DNA, 1021 bp, Homo Sapiens
ttttttaaaaggacatggcaggatgggaaattccaacatgagctaatatgagtgtgagaacgatcatttgcaggagagtgaaaatctcccgcaaaggtagataaagagccactttgtgtgtccagtgagaaagtggactgtgagtaacctataagctgctcattggaaacaagagggccctcaacaacgttacaaaggagcagatcatccttctggtctcttgctcctggtgcttctgaatccacagcaaaccttggcaggaacatgcttccctttgccacccagaggtgctctgagaaaacactctaactcactaggaggtggagatatagacctttttctgaactgcttctcacatgcaggggaaaataaatcaaagagaaggcctaaaagaactggaacttggactaaattaaagaaaattaagaaaaaatgagaataggaaggaagtttttgcaaacaaggaaaaccactatgtttttttctccccatccaagataactttcaatagtgtattactctcaatatgttggtggcaagcttggttggctccagacaaaaacttgtaatacccaaggagaaaaaatttacctaccgctgctgatggcattagtgaggtcagcccaagccagcaacctccttgcagacttcagccccactgtatattggttcagcctggatcatggcacctaatggtaccttctgggcacctgctcagaaccaggaattctgcacctctctctaagctcagccagtttattgaacaataatctatatttataggagcagactccactgttgattaaacagctgttaaaatattccctagcaaacgagagcccattgttttaatgtgaatccaggcatttcactttgtttttttgaaaagagagtttaatcttcttccctaaataggatacttaccagactaagcatggccatgaaaccttaagcaccgtatttgaattttagaatgtgccgacgcgtggtcgacgatatcccgagcttccggccgtaccat

SEQ ID NO: 325414 - DNA, 1555 bp, Homo Sapiens
gtgatgagtgatattttcctttgggggtctgccatgaagctggttccgcccttgtggtgatgtctcgtgtggggacacccaatgttcgagtcgtgtgccttgaccaatccttccccagaaacccgtcttgtggcgacaggaatgggatgtgccccatgacgcctgccccaaggcctaatatcccgaggatttagggaagaaggccaaagtgcagaggtggttccctttctgggccaaaaaaagggcctgccaagtcagcttaatcagcagttgtgttcccggggactcccccaacccgtgaggattgggagacataaacacggtgcggcattcccctcgcatagtaagatgggcctggggagcaagtagggcccacaatagtaggggacactcaagtcaagatcaatgtaacggggggctcaaaactggcctggtgggctgtgtacctgtttgaagaatcctgataagcctctgaccagatcgagccttggccgtggcccttggcctcaaaacatggttgaccccggggagcctccgggctgacgccgatctaggcctgcttcatactggcaggattcaccagctcacgcttctggactgtgctcacttaacaagttgacagcacctgcaaccactggagaagcaacactggtccctgagagggcccggcacccccctttcacgccagaaccccgcacgccagcaccataggtgacaatgtcaggtttcatgcgaccgtagcctcctggtagctcccaggtagtcattccccttgaagaaaagcgggcgatgttatcttcaaagtcaatgccgcgtactccaatcacaatccatttgatcagcagggttattcagagtgccataaagaggtccgtcattgccaatagcagaaaccatgattacattgttagctgttaattcccacaccttgtcaacaaacggatgatccatgaagtccgggccgccgatgctgaggtttaacacgtcgatcttctttaaaatggcatagttgaaggcgtccaaaaaccaagatgtgtaagatacctgattattggtaaagaccctgaaaatgtgaagttctgcatctggagcaaatccttggcactccctcatgctggctatcacacctgccacgaatgtgccatggcccaacccatcgtccagcgttcgctcgttggtccagttggttctctccttcacatttttgaagtggggatgcttctcgctcagcccagtgtcaaaaacagcaactcttacattagcacctgtatatcccatctgccagagcacatctgcctgcagtgtctgggcaacctggcgcgggatggctctcagcagccgtctgctcgaatgccttcccgtagcatgccagaagccagagcccagggagaggctggctcttcgcaggggacgtgatgattgccacttctggctccaccgggtttcattgcagggtactgtggggtcagattcagcatacttgagggaacgaaagacttttcgttggggcgtgacccgtttgatgtttggatgatcttcaagtgttagcagcccc

SEQ ID NO: 325415 - DNA, 759 bp, Homo Sapiens
  misc_feature (624)..(636): n is a, c, g, or t
ttattttcgtataaatccgtgtcattaaccatgctccgaacttttgtgaggtattaattgctcatgaagtgcattatgaatatttaatagtacctatatatgacccaggtttcccgaatgtttccagaaaagaatcaaggtttttttgtcttctcattgctaagctcacttagaaaagttgggcaccatttaaaagagttggagaacagaccagggtggcttcttgggcacagctggatggtgctggaagccaggcctgggatttggagagaagagtttccgacatataaacccacggaggtcaccagccctccccgcatctactctcctaacagctcaggacagccccgtcacactactgccagccctggtgactcactttgttggcaatttttaaagccctcttcattatgtacttcctactcttcagaacctctgtgataagcaatacccctgccatacagaacgctggatctcggtttactcagcctctccctgtagcgtcacaggctgtgcactcacttaggtgagcccctaagagcagggtttgcttctgcttcacctaacgccacgtcttccctcaaatgtgtggtcaccaaatgtttgcaaaaagggtctctagcnnnnnnnnnnnnnggcacattaagccctttaaaatacttctgacctatctttatactcagatctcacctcgtctcaaaaagttttatggggtaatgcgacgcgtgggtcgacgatatcccggcattccggaccgga

SEQ ID NO: 325416 - DNA, 938 bp, Homo Sapiens
  misc_feature (627)..(627): n is a, c, g, or t
tgaatcacaaacaactcagggcatcaggcccagcagctgcatttagaacccatctgggatctgtgaggggactggagagggaggggggagaagacccgctctccctagcttttcactatatagagtaaaaacatcagaaatcaccccaagagaaaggacataccaaatgcccaccagaagggccagggactgcaagccaccctgagcgcaggagggtttggtgaagggtggtattgccccgaaatttgtgtgtgtcccccactccccctgcaaattcacattggaattctcacccccaaggtgacagtattaggaggtggggcctttggagctgattggtcatggggcggagccctcatgaacagggttggagtccttataaaagaggcaggaaggagcttgcttgtttgtgcttctaccattgaggatacagcgagaaggcaccatctatggatcgggaaacagccctcagcggagtccgaatctgctggcctcttgatcttggacgtcccagccccccaggactgtgagcaatacgtttctgttgtttgtaagccacccggcctacggcattttgatataggagctcgctggacttaacagtggggcccaagcaggctctgtcangccacaacctcagggaagaatgtaaaggttggtgtcttaccatcacaaggcaagcggctcagaaccagctgtaacacctcccttgcagagatctaggggcgcccagacacagctggggtggaaggctcctagtctggacccttgctccatcagccccacctggggaggaaggcttctggggaggtagaactgggagaagagagaagcagctccttggctctgctttcagaaggctgttacctgggccaggtgctgggagaccagagggacaggtgccactcagggccagaggagccacgcaggacaatgtg

SEQ ID NO: 325417 - DNA, 1072 bp, Homo Sapiens
  misc_feature (48)..(103): n is a, c, g, or t
tgctcgaggtgggagacgtgatcgtggtaccagtgtgggtgttcggannnnnnnnnnnnnnnnnnnnnnnnnnnnnnnnnnnnnnnnnnnnnnnnnnnnnnnntgttccggcgtctctgtgtgtggtgcgtttgcttcccggctttcgccgacacccccggtcggggttacagggtatgtcacggcacgtaaccgtgggggtcttcatgccttgatccatggggggtttgattgcgttgccgtggctgtttgtttgtggccccccctcatgccccggcattgcctgtccccgggggcttatttgtgggatacacgttttgcagcctttggccgcaaggaacgcgctccctgcaccgcggaaagtccgggtggcctcggttcccctcaccgcccggtccagcataacccgctaagttggggggaggccgttccgtcttgggcctccagggcgacaaaaccccctgcctggccggcacgaaagccagtctctgttggggcctctcggagagctccgggcagcttggcgcgctctgcagacggcggacagcaaggaaaatggcggcggcctcagctgaggcgggcaactaaggagggactgactcttcaaaagacggtccccgatctcagacaccgtcgtcaatatagcccggctgttggtcttgcagggatttcctcttcttgtcgggcccctacggggccgacgaggtcccgtttcgatctcggatggaggcggatgaacacgaaaagtggtttagggagccgccgcctccatctttgaaatcctcttgagggcggagtagagggggtggacagactccgaggattgggcggggcccgaaaaaggggagctccaggggcttctagggggtctgtactgcccgctgggaccagtcataggccgggacgaaggccatttccaagcggatggaggtggattgtaatggcggccccggacgactcgaaggctctgtatcggtaggcagaatcctccagctcgttctagaggctgctccactccagcacgaaacgacgcgtggtcgacgatatccagggattccggaccgtaccagcc

SEQ ID NO: 325418 - DNA, 646 bp, Homo Sapiens
aggggggccccaggaggggcactggcccagttcggggcaagtggggcccatgggctgcaggggaggaacccgggggtgggttcagagcagcacaggtcaccagtgcttctgagcagaaagaggagacctcaaggctatcttctcgctggccgagggagaaggcttgcagggcacaggcaagaggaggtgggcagcgaggagacggggccagcagcagcgccagcagcaggcagtagagttcacggcggcagcgggagctcgtgtacggggagctgcctaggacctcaccctgctgtacacccatgaccagggggaggaccaggtcatgcagtctcctgtgagtctcctccttgatgagaggcccacacatgaggatggtccggctgaggcctctgagtgcagccgcacacacgtcgctgttggcattgctatcccctttccggtggcttggcggggccatagcttcccccacatccagctttagcttcttgggggcgctaggcttcccagtctgcaaactcccatcagggctcccccgcgggctacgcagcttaagggcatcagctggcggggagatgtcgctgagcaggtgggtgagcagggcggacgcgtgggtcgacgatatcccgggaattccggaccgtac

SEQ ID NO: 325419 - DNA, 949 bp, Homo Sapiens
  misc_feature (825)..(825): n is a, c, g, or t
gttcgcagagggctcatgtaataattattaggaaaagtttaaatggttcccaatgaggtcatcaggtaatccaagctgcacatgagttaggccccacttgtccttgggtttttcgatcgggataataaggtcagcaaaaagtggacaatttgatcttgactaagaccatttcccccattaaggcccctaactgaacaagataccaaccacccctaggatttctcttcagtgcaaagtaatctgggagtccacagcaatgtttagagacaagctagtgcaatctagtaattttcatagtcgcagaaactgaggcctagaagtgatttgtacatgtgagcagctagaaccaggacaagaactccagaacctgggaccacgtgagagtaaaaagaaagggcaccgagtacaggaacaacaactgacacatttcaggtggaaaaaacaagtcacataactgaaaaccaaatcacagttacataactattttatattagcttcctacatataaagtataaaaactcagctatacatgttatgaaattgtacaaacttacacttgtttatggcctaaaatttgtataaggacacacttatacagatttcataaacaatggccatttttagaaaaagttatatttgtccctgaacataatattcataatttgctttcaaaacaaactcgaagtaaggattgggactttaagcttccaagctgatccgcttgtaggcagggtctttcacctccgggtaaggtactcactgaggctggaatgcccatcttttaaaaggtttctgtaggatccttcaccaaatatactgtctttnggatacttcaattggggtccatctttgcccatcaggactggggcccggttatccctctggagggggctttgcaaggggtttcccggtttgggatcctttatattttatatcctcttcccccatc

SEQ ID NO: 325420 - DNA, 883 bp, Homo Sapiens
tgctgctgttgctggttttgagggagatgtgaactctgggatggttgtgtttgtgctgcctgtttatgaggcttatgttgcaaaaggtgtgagtttgaaaatggctcagtctctgaagcctgttgattcaagtgctgtttcaacactggggacataagtttttcagtttgggaatctgctctttgttgaaaatgaaatctagtgccacacagtgactgcacatgagcttttggtaaatggtctgttttggagaagtgcacctggtgtgagggtttttggaactggagatgttggtccactgtaccttgggactgcccttgattcatttcaacttggtacatttgtgacttgtgctccagctgtgttgttttctgggtgtaagcttgccttgggagccccccaggcatgttggaatttccagtgtattgtttggaggtcatttgattggagagattgggttgatactgaagaattgatggcagtgatgcctcattacgttttagatgggattccgcttggtgaaaacgaggggccttcaattcaatccatcctggtttcagatagtgctgtgttgggggcacaagatctcgtgtttgctccttgtctcgacccttcagaatctcttgctctttgtttctcatcaactgctggcagttgtcctgtagctctccactgctaccaaaaattggtgggttatgcttgaggtgttctgacattggtcttgttttctcagaacacaatggaacagtcattgtccctgcagtctgtatgtcattcctgttcacacaattattctgaggcctttcagaaagcatcggagaagggctgcatacatgtgtagatggattaggactctgggaaggtggtgcctcaggtttaccct

SEQ ID NO: 325421 - DNA, 942 bp, Homo Sapiens
cggttcttttgtggttttgtaaccccgcttttggggcccacggtacaacagcggggaccaccatgcccgccctgtgtgatggctcccattgccgccgtatatctaaagccgtcagttgacaggtaaatgcatggagtgtccacgatgattcgggtcctcatcttggcctgcatgtagtacacgcggtactgtgactagctggcgcaacctgttggtggaccgttcagacccacagtcttgggtggaagtcctggacgtagcgggccatggcttcaaacgttcgtcccgctcgggggtgcacagtgatgaagacaggctgcactggaggcaaaacccaggctctgtttccagctgccgcaccacctgcaccagcttctccaagctcgtctgggcagattgtcagggcagtgagtgaagccaaagtacatcagcaccccactggcccccggaagtcagccttgcagcgagcccggcctctgtgatccagcaggtggaagtcgccctggcccacagctgcctggcgcagggcttctgttcgcttttgctgctgcagcctctccttcttcagccttcagggccagccaggccccaccgagtccagccccgaacaggcctgtgatcagcagccgggttcgaagcccagggcctggggctggccctgcccacctgtctctgcagggccctgccttgacaaaagccaggacctcagatgcagggcctggcctcccagggtcccagggaggacccgaggcttgagctgagagagcctgtgccaagctgtggggctccgagtcagcagcagcatggatctgatgctcctcgcggcggggccgcgcgtcagtggaccaagcacgagaggaagcgtcgacctccagctccccgacgcgtggtcgacgatatcccgagattccgtaccgtccacctgcttatactcagtgttaa

SEQ ID NO: 325422 - DNA, 1259 bp, Homo Sapiens
  misc_feature (94)..(94): n is a, c, g, or t
gcggggggagggtaagaatgacagaaagatatagatggaaaaagacggaaagagaggagtagtgctccgtgttgcgtgagtgatgtagctgtgnctagcttaaggtgcggtagcactcgatctatgcatgtgggtgcgaggctgggtggtttggctccgacgtgtgtggtggtgacggggctgttcgtgtggagatgtgagtgtctgcattgggactagtgtgtttgggagctatcttgtgtcgggtgtgccaggggtgaatgaggaggtgcgggtcagtcggctagttggaatgtgtcgccgtgcgcgcgctgtgcgggtcgcggtgtcgttggtattgggtgtttgtgtttggcgctttccggccacgtgacgcttgccggtggcgctgtaagggagtccgccatttgtgggatgggtgtttcgtctaatgtcgggccgacgacacggttctgaaaggcgtgtccttttgtctgttggcttggttttactaataacacgtagttttgaaccagtaattacttaacagctaggcatgggggagacagaattggactgagcaccaatcattgttctaccttcagtgagctgtgcagccataggcaactcccagcttctgctgtgcacctgtcttgagctggaaacaggtggcgggaagcattctcaaaggccccttctagcactaactttgtatgttcagtaaatatcagttccctggaccagctccttttattctggtacagaattattcttagcctatgggtgtgggctggggggacagtagtgtctattatttgtgaattttggaaccagtgtcattactttacagtcaaggaggcatgttagagtgtttggatttttatcccttgataagggcccacatccccacatacagagatgctcaattccaattgaaaaacctcagaatttctaagtgtcaaagcaatagtctagatttttttctgaaaattcaagaaatgtgttttctcaaatctctttttttatcctttctcataatcctgccacttaatgcccagtttggatcagttatttagtcacatttcaagttagtttttatcatcacttatagttaaggattgtaattaatcttgaatttaaagcttggtgcttttcagttttcttgtattagaactttccttcttcatgtacaggtgtggtacctttggactggtgcctgctgattttctgatggaacagaaaatatgtctgtattatcactgctccaaattacattacac

SEQ ID NO: 325423 - DNA, 732 bp, Homo Sapiens
tgcagcgatgctgctgggtaacaggctcagcatctagagctatggagccatcacagatactagacagaggactctggatttctttaataagtgttcttccaggccttccattctgactactggtattaactgtcagcaacagccctttgttttggtgacaaaatctggggaaagactttcaattaacttttttctatttgctttatttaacggagcactgaaagtagagtaggtagtctggctttcacctgatgttattgaaggttcttcttccgacattatttctctaacaatcaagctaatggcatactgatcagactttgaagaaggaagaaatgttgtatcagtgagtttttgttttcctaccaaaattaggtaataggttgggtctgtcaagaaacatatcccttttgggtctttcaggtgttctctaatcgaatttgctgggatgtttgggactgaagatggaatgacagagtagatcaaaattatattacaagtgttggaagccactgccactacgtgggctttaagattaaatgctatcagatcaggaaccagaatgcctggaatagtgacttttctcgtcatggtaactgccttcttaaaggtcacaaggaccaaatgtgaagaatcttggccagttcctgtcaagtagtccttttttcttagacaataagagaattaccggacgcgtggtcgacgatatcccgacattccggaccggtacca

SEQ ID NO: 325424 - DNA, 1642 bp, Homo Sapiens
ttcggctaaagtttatagaaattctttattattagacaaaaatagactctcttttttcccctattcatgtgatcctactctgaatctctgctcagaggaggcagtgactcgctccccacccctctcccatccctgccgtgctggcacctgcagctgggtggaactggcaggggctgatcccctggagggctgacgttctcctgcaggtggggctgcctgatctccttcggggctcaactgctgatgcctcctcacccctcacacacccatctctgccatctgctcacatgcaaggtcatcttgtgggcctgtccacttaacttagcaggctgggggcggggaaggagagcagtgtcccaggcctgatgcccactcctcattcctaagggagggtgctttctcctgggtcttcctgggtccaggccaggggatgtgagggctgtggggtgctgggaggggggcagtgttgatgtgggctctgagcttgtggccttccttcattttctctggcccagtagaactttggtgatgaaggtgacaatggcgccagcaggctgatctgggtcaagctctgcaaagaggtgacacacattctcccaggggcttcccggcttcttggccacgaaaccaaagatcttggaggtggtcccgtctgggttggtccatctccggtcttgagggtcagtgctggagaaggtgatgctgttcactggataatggcggcgaaagaagagcttcctttggttgtccgtcagtgtaatgccctgggctgacaccttgaagtggacaacagctggtgtcgggcgggggctacagctcagagctgcagagctggcccgggccacagcttgggggcccgtcagtgactctgtctccactgaggtcaagtagagcacgctgcaggcagcaccctgacgcaggaggtctgccgctgtgctcatgttggtgggcactggagcctctggggtctcttccagaggatctttgctgggaatgcgcaggcagcagggcagggagatgggggagatggagtgctgggagaccaaggcggacaggctgccaaagtagggctcactggggcagcccttgatcttcacccctttgggcccagtctcgatgaggaaatggcggaccagctgttccacggggtcccctttccagggctgggcactgggtggcggtgtggccaccttgagggccagcccataagctccttggaatgaatgactgtccctgatcaggaaggccccagggtccttgtccttcagcagggcaatggcttggtcacgggacaggtgtggcttgtaccagaacttggatgtatcctggacaaacttgacattgctttggctctcttgtgtaggaggctctggggtttgggggacattatctgagagcagaggtgcgaaggtgacatggtgactgatgcctctggctggcgatgatgcctgctctgggccccagggtcctggctgttgccccggcccgggcaggtggcgtttctcaggaagtgggggctggctaaggccattggtgtcataggaggcagccagggggaaagcaggtgtaggtgagctctgaggcggctctgggctggcccgacgcgtgggtcgacgatatcccaaattccggaccgtaccac

SEQ ID NO: 325425 - DNA, 444 bp, Homo Sapiens
  misc_feature (395)..(395): n is a, c, g, or t
  misc_feature (411)..(411): n is a, c, g, or t
gaagctcttctttcgccgccattatccagtgaacagcatcaccttctccagcactgaccctcaagaccggagatggaccaacccagacgggaccacctccaagatctttggtttcgtggccaagaagccgggaagcccctgggagaatgtgtgtcacctctttgcagagcttgacccagatcagcctgctggcgccattgtcaccttcatcaccaaagttctactgggccagagaaaatgaaggaaggccacaagctcagagcccacatcaacactgcccccctcccagcaccccacagccctcacatccctgggcctgggacccagggagacccagggagaaagcaccctcccttagggattgagggattggggcttcaggcttgggacaatgnttttctttcccccggntccccaggcttgttaaagtttaagtgggaacaa

SEQ ID NO: 325426 - DNA, 1408 bp, Homo Sapiens
  misc_feature (259)..(259): n is a, c, g, or t
gtcgtctcttcctcttcctcccctccggtgggttccgcctctttgcgcgtcccggcgttttcccgcggtccgcctccctcctgctctgttccctcgtttcttccgccgtgtatacggtccgttcccatgttgatccttccgggtcttctacctctctgcttcgacgtcagggctcccctcccggctcgggttcatcctgagatgtgttaccgtgttggtcacgtgggagtgcagacgagagaactggtgaatacggagntcctggactttggggttccagacagggaacgcagagcctgcaggcgccacctccctctgccttctgggtcttgccacctcatctcgtggatgtgtgatcagcctgaggccggaagccggtggccccctccaggagcaggaactccaccttgctctgcagctctgagtccagctgctcaaaggggtcatagtagaggtcagtgaagctggctgaagtggaggagtccaggctggatgcaaccagggagccccggctggacgtgagggatccggggctgctgcctgaggacagggactgcatgctgcttgagagacttttcagctgggagtgcagagttgccacctgccgggtggcttcctccagttctctcacaagctggttcctcttactgtttaactttaacctctccgtcagcgccttgctctgggtgtcccgggctgcctgcaggtccttttccagccgcttccgggccatctccagctgctccacctccccctgggtccacttgcgggggctgatgaagcgcatctccttcagcagctcctccttctcgttgataaggatcagccggtccctctctgagtccagcaccccaggccaggcctcactgtcaagcttggccagctggatcttcaggttggcgatccatctaagacaggcattcctgcaggatggaacagatccaaggcttcagagtggtcctcttcagagagcacaagaagtggctgtccaaatacagatgtcttgctgttttgctggacgcctgggggagctggtagtgtgtaagctccgaattgctgggagttgcctggccacattgacaggaaagtcttctcttagcctcttcatatcgaaggcgcaatctgaccttctctgccaactgattgttgctgttgatgccgaagcttcccgagatgtctgtctgggagctcacatccaggtactgtttcggtagcgggaaactcgaactctccagagagctgctgctggaccacaggtctgagtgagaccccctgtcagtgcggaagccgtccttcaacatggcaaggctcttaatgagatcttgcttttccttttccccacaggtaatagcctttttgatggcttcgacgcgtggtcgacgatatccctacattccggaccggtacc

SEQ ID NO: 325427 - DNA, 1143 bp, Homo Sapiens
  misc_feature (51)..(51): n is a, c, g, or t
gcaaagatcatttgtaaattgtgatcaaaattatattaaatctgtcaccancttttatttgcaccttatgaaatcatgttgattttgtagtattgaatgcccttataaaagaattgaaatgatgcagtgctaatggttagcacaaggccacgcacagggtgagcgctcaatattactaattaatttaaagtgaaaatcttttaatgtattatttctgcaccttaacatgcaattcaatgtagtagttattaacccaaaaatatccaaaaacattttaaacatgaaaatacattttagtaacaatcataggaatgtttacaagtggttattttccagtcttagttttatcaaaatagaattaaatttcagattccttttaaaaataggcctatgaaagctgatttcataatagctgctatatgtgatgtggatggcagattcagtgccttctcacaagttcaacctattgacacctcctgaaccaattactttagattacaacataccccttaaaacagagtttcccctgaagactgaatccgtgcatctgaggattgggtccaagaatgtggatttttaaacaagtagctctcctctgcttcctggtaaattattatgatcaggtagatttgggaaacagtgctttaaagcaaccaaaataattttatcatacttgaacattacttgatatgaatggcatatctaatgaaaaatcaaatgtatcaagctttttaataatctgcatagcttatcatcatgcctatttcttacctaaaagtcacaaggttttgttctaattctcttgatagcccacaagagctaataaaagttatcacctttttaaaaactgctggtgattgggcttctacagttttagcattgcatataccttttcttatcaggaagcagaagagtcatatagcagttgtattaaaaaactaaacaatgtgtaatttattcaaataatcatactacttacgaagtagtctttaaatagctataccaacatctgttagtagagttacttgccaagctggttatcaaatgcctatttcctttaaaaaattcaatttacaaagtattatgtcaactccatgcggacgcgtgggtcgacgatatcccgagaattccggaccggtacca

SEQ ID NO: 325428 - DNA, 446 bp, Homo Sapiens
cacatttagcaaagctattttatggcaacattgttacaacacaaaatagacattgcagtttacaattaacaattacacagtgatttcataacaatactacttactccaattaacaaaatatttctttataaaaaatatgttcaaaaggaggtttacattcacttcttcgtttaatatcaaggttgttaacaatggtcttaggagatgcaaagacgaaaaactacttaccttaaaaatctgtattcttgaagatatatactccacttgaataagatactgctcaaggtttaggcttcctggagaactcagaggattttgtagttgtacttaatatactcaatagccaaatttcctaaactttcataattttgctaaccaagggcccttaacaaagttaaaagacaccacagggttcaaaagtgaacaaatatgttgtttttgtttta

SEQ ID NO: 325429 - DNA, 1331 bp, Homo Sapiens
  misc_feature (951)..(951): n is a, c, g, or t
gaagcagggggtagcggtccggaattctcgggatatcgtcgacccagcgtccgcatatgggcacatcgtggtgctgagaaagaaacaagacacattaccattggtgtcaagaaatattactatatagcagagaaatggcaatacatgtactcagatagttacatccctatataaaaagtatgtttacatttgaaaaaattagtagataacttcctttctttcaagtgcacaatttcattttgacttgagtcaactttgttttggaacaaattaagtaagggagctgcccaatcctgtctgatatttcttgaggctgccctctatcattttatctttcccatgggcagagatgttgtaagtgggattcttaatatcaccattcttgggactggtatacataaggcagccgtgaaactggaaagtcattttgatgactgatgtgatacatccagaggtaaaatgcatttaaacatattaaagtatttgccaaagatacaattttcttgctgacataaaaatcacacaaacaagtcccccccaaaccacaactgtctctcaaatagcttaaaaaaattgaaaaacattttaggatttttcaagttttctagattttaaaaagatgttcagctattagaggaatgttaaaaattttatattatctagaacacaggaacatcatcctgggttattcaggaatcagtcacacatgtgtgtgtgtctgagatatagtctaaattagcaaagcacatagtattacatacttgaggggttggtgaacaaaggaaaaatatactttctgcaaaaccaaggactgtgctgcgtaatgagacagctgtgatttcatttgaaactgtgaaaccatgtgccataatagaattttgagaattttggcttttacctaaattcaagaaaatgaaattacactttttaagttagtggtgcttaagcatnaatttttcctatattaaccagtatttaaaatctcaagtaaggttttccagtgccagaacatgttaggtgggattttaaaagtgcctcggcatcctgtattacatgtcatagaattgtaaagtcaacatcaattactagtaatcattctgcactcactgggtgcatagcatggttagaggggctagagatggacagtcatcaactggcggatatagcggtacatatgatccttagccaccagggcacaagcttaccagtagacaatacagacagagcttttgttgagctgtaactagctatggaatagcttctttgatgtacctctttgccttaaattgctttttagttctaagattgtagaatgatcctttcaaattgta

SEQ ID NO: 325430 - DNA, 1002 bp, Homo Sapiens
  misc_feature (442)..(442): n is a, c, g, or t
  misc_feature (468)..(468): n is a, c, g, or t
  misc_feature (510)..(510): n is a, c, g, or t
gcccaggcgaggtcgtaatctgtgcgtcttctttttttgtgttgtctctttttcctcttttgtcgttccctctgctctggttttccgcgtgtctcgtgctttctgtcgtcttgattcgtgtttgtctcgctggaggccgtctttcacgtcctgtcaattagagggtgtggtactgatggccagctcttttcggtgtctgcctcggctgcagtcctgttgagccctgggtcgtgatcccgcaccattgaaatgaaggggcccccgatccgagctgtccacccaccaagcttgggcggtgctgaagatgccccaaggagaggttgctgcccgatgtgcccactccaggcgcaggggtgttctgaccaagttggggttgcggtgcctcctacacaggtttgctctcagttgtgctgcccacgttgaaggcaacgttgtgctctgnccggtggttgccccgggcgttctgancctaagccccctgtgaagggggtggaggtggctgtgctcccnactctgtcctgctcccaaagctgaaagctccggtggtggcgctggagcctggggtggccacgttgatcccaaagctcccactgccagcgggggctgccgaacccccaaacgtgaagggtgatggtgttgtgctgccaaacaccgagctgctgcttccgctgctggcggtctgggtggtggctccaaagccggagctggtggctgcaccgaaggagaagacagcagtggagccgccaaaggcgggctgtgagctggcgggagcgccgaaggcggaagccgtggctttcaatccaacgccgagtgcgtggcaccgccaaaggtaggctggatgggcgtaggcacgtgcgcaggcacgatcttgatcgtggacgcaggtgcaggtgtgggtgcagtagccggggccggggctgcagagtttccaaaagtgaaagagctccctaagtgctggcggacgcgtgggtcgacgatatcccagcattccggaccgtacca

SEQ ID NO: 325431 - DNA, 1000 bp, Homo Sapiens
tgttcccgattgtgtctttccctccttcttggccctgtttgcctttgcggggtgtttgcggtttgatgggtctgtcccaggctcggtcctccaggcccctcaggagcgtccatcgtggagactagaccttgttcgacggggggccttagggggggtccccccgccctgcagagccgacctggcttgcctcctggctggtcctggtccgggggtcccgggcagctcaccagccggggtagcagcacttcggccgactcggccacaaagcgcccaggcaggtcgcaagccaggcctcccagagcccgcacatcagcctcgctcagcagagacccccgcacaccccagcaggccagagccgcaggcagcagccgcatgtcgctcgggagccccccctcgggagcaggtccacattggccttcgtgatgcgggagaagaaaacgggtgcaaggcctggggccccgagaacgcatctggtttgaggaatagcagcaggtccaatgggagggcgtccaggtcctcggggggctcagagagccggtgagccagacagcgcagctgctctgttgagagcttgacattcttctgtgccaaggccacagccagctcccggacacgctccgtgctcaggccggacacctccgcacacgggaagccaaggagttggcgaggggagaggctggaaatgttaggtgggttggccaggactccgtccaggggcgcagcctcctgccctgtctctccagccagggtcctcgagggctgcacccatccgaggctgaagagcaggaacaggaggctgccgagggcgggggtcccacaggaccccaacaggggtcgagccgttggcaaggccatggtctgtgtagatcccagggagggaggcaccgtgggtccaccggtagctctctgtccgcgcgtcacagcagacgggagtggccggccaggcagaaagaggagtgcgtggcgctggcagcgcccatgaggaacaggacagcccctt

SEQ ID NO: 325432 - DNA, 835 bp, Homo Sapiens
  misc_feature (237)..(237): n is a, c, g, or t
  misc_feature (534)..(560): n is a, c, g, or t
ctgcaatgaccgcgttagtagtccacaagcaggggtcacgcagttcacagctcggcagccagccactgatccacgaagatcccccttaaaattttacgcctcccagctcagacttggtgtctgtcaccacctacaagcaccagcaatctgtaagcgctagcggtatcaggatccgtcgaaggacgcttctgtgccctagctaaccacgctgaatcatacatgtcgtgcctatgaganagcacgcatgactcatcacactattaaagcagtgacagcaccaagggacctactcatgttatgaagccaggtctaccatgacaaagtctaaaacacgggcaaaggtgatgagatcctgaatactgctatcataaaaataatcaatttctatctttctgtcttccttctgctgcatgaggaaccaaagaagtcaaacagatgattgttctgtctgagccaaccatgaaatctttaagaacagacaggtataatccctattattctttcagggcattattttatacgtttttttttttnnnnnnnnnnnnnnnnnnnnnnnnnnntaagagttatttagccttgtgaaatattttgaagtaaagtttcttgaatttccgtgatgaactcttcaagcaattcaacttctcagagtcatcactcaaaagttcctttgacatgggacctatcccacggtgacaaagcggcttccccctttgttgtatgtgagagtggctctttgttccttcaggatcccaaaccgctcattcaacgtcatccctgtctgttttccgacactgtttatgtcaaactgcaggggaacacctttaggaactttctt

SEQ ID NO: 325433 - DNA, 1318 bp, Homo Sapiens
  misc_feature (1088)..(1126): n is a, c, g, or t
tctctgagagtggtactctttttgtttctattactgcccggttggatttttgtatatgttttctcatatttttcggttctctcttcattgtcaggtctttgttgtgacttttgaaacttccaagcctcaactttctttcatggattccgtgctaacttactcatcctctctgttacattcatactacggtctactctttgctgggatccacattacaagacttggatcataccaattttgagaagccgtgaatcactatttgactcctgatgaattatcccagtttgaagcagttggatcaccttgcgtaaattggaggagcaccctgctgaatagatctgtaaaggttggaaccctggtgtagagggctggctcactgcaaatagtatgtttgtctttccagaccaatatttgcaatctgactgcaggtaggtacatgcagacactgtggtgccggtagcctggccatacaggctggtacagatgccccttcagttgtgtctgggactgctttggctgcactggcagctggataccctgtggctgagtccacaggaatcactgttgttgtcctgctcctactcctgcagaactggctgtccggaggacattgctgtttgaagaattggctgcatgttgtacatacttctgaagcaggattttgagtcatctgatttgaacatggcctggggccatctgtgtagaaaccattggttgcttttgtccatactgtaactgttgggttggtggtgcccctggaaggggagtttgcactggaggagccgcctgagtatatggtagctggggttgagccaaactggaaatggaaggcgtgctgaccttaagctgaacgttactacctaccacatttacaggcgatggcttgataccagttgcagcactcatagtggcttgcagaggtactggctgaagaccttgcttttgctgatagctcagttcttgagactgtaattgtacttgtgagatctgtgactgagaaatactctgtggtatactaactgctggaatactctgtggaccagtgctaccaaatccatctgttggagggtcacaccttggagagctgnnnnnnnnnnnnnnnnnnnnnnnnnnnnnnnnnnnnnnngcaccaccacagtaggggctcccatctctccacttcccacactctctgtatagtgactcagtgtgctgacactactgctcactgaactcccactagtgctctccctttcagaagtcacttctatcgggattttgctcgacgcgtggcgacgcgtgggtcgacgatatcccgggaattccggaaccgtaccag

SEQ ID NO: 325434 - DNA, 1023 bp, Homo Sapiens
tggtaccggtccggaatgctttgggatatcgtcgacccacgcgtcgcaaaatcttcagtaactaggaaggaaaccaggtctcatggtttaaaagactttgaagcaggaatgttgcatttgacgcctttaaaactacctttttgctgttgggaggagtcgggggcgagccttagcagctgcaccgccatccccatgctggttggtgctgccctgcctctcgtgccgggtgttgcttcagcccagagccagagggctgggtcccgggtcctccacaggtgaccccggtggacacacgcgttcccatcctggcctccgtctctgcttttccacttctacctgcgtgtgggtttgccgccttgtcatcggttgtgtgagtgtcgcagacctttccagagctccggttcactttttccaaacaggcctccctgtcggtggcactgcactcctagaaccttcagtttctacgatggtttgtttggtccttttgaaccaccccaaagaactcaacatggcaaagcaaatggtaaaagcttcccgactgttctactttgggtccgcgcgaagcccactcacgtgtgatttgtgttgcccctctcggtggtcccagggcgatccagccatgcccccctgcccctctgcccagatgcttcagggggccggcttttcaggcttgccttcaccagcggcgtcagcgacactcagggatgtagttacacatccgcagtgcttcagtagaagagctgaagctgcctgggaggcccggcgaccgaaaaggctctcaatctgaaagagaactgcccagatgaatttaccctagctgttcgacgttgtccaaatcaattagggggcccacccgagtaggaaagctgttgaagatcccccccctttcggtgggccaggcgcccccaaatgggtagaacgtgttgcggccccaacgaacatgaaggtagagagcccgcaccccccaagtgagcactgccaccacaacattggacatcgaggacacgcatgtgaacgtatgat

SEQ ID NO: 325435 - DNA, 942 bp, Homo Sapiens
  misc_feature (290)..(359): n is a, c, g, or t
  misc_feature (754)..(767): n is a, c, g, or t
ccttactgccgaaagtgcttgccggcgccctttgtgaagtgaaaccccccgtgggtgtagaaatgtgttggccaagaggaatttgagagcaggctccaaaaaggttacgccgctcccgttcccagcctataccccactggggccccttggtaggcagtcctgggcccagagtaaagccccggggaacagggtaacccgatctcaacagagatcaaaatacccggtgtgttggtggcacctgtagtcccagctactcaagagactgagaccaggaggatcactttagccannnnnnnnnnnnnnnnnnnnnnnnnnnnnnnnnnnnnnnnnnnnnnnnnnnnnnnnnnnnnnnnnnnnnntcttaagagaagaaaaaagacaaaaatggtttatgcataatgaaatactgtgcagctattaaaactaacgtcaaaaaaataaacataaaatatgcttgaaggatagtactttgggaaaggtgccaaatcatatattctcatttatattaatatatcatatacatgtgtagtatagttagttacaggaaaacaaactgacgtagaaggctcaatgccaaaatgtaaacaattctgttgcattctttgggatgaaaggatcagctcctctggagagaactttctctatttggctgtctctaaaactcccaatagtgtagttaggaaaaaggaagttctccattaagccctttccttttccaagtttctctgtcctgtgttcagaaaaataaaagtannnnnnnnnnnnnnctactgcctccatatttgcaggaaaaaaaattaattaattattggacaccaactatgtatacagtattattctaggtttggtatataaaaaattaataagataattgtaagatacaattccacactaaggaaattgcgacgcgtgggtcgacgatatccctacttccgaccgtac

SEQ ID NO: 325436 - DNA, 1015 bp, Homo Sapiens
ttttcactgcccctaatctattcttagtgggtagtttatgttgacaaacatggccatattgtatttttagggcccctcgcatgaaggtttgtccttcatttgtaaacccacatgtagtgatatctaatatactgggctctcgttctagagtgacttcctcttaataacagtgtggtactttgacggtgctccgtgatatttcgatgaacagaaaatatgtgcggatgagtcctgcgcccaaggcacatgacacaacggatttactggagtgttccaagtataatcagtcagttccacgatgatgaggttcctgtagaatttttcatctgtcagatttccttcattctcccctaactttagtaatacataaagcagtgtatcctctctcagtttccacaagcaaggcctttagtacctccactctctatttgtattacagcaagtttttgatccatcaaaaattgtgaacacctacctataactgatgtagatacctagtgtttaaaatggtttcttttgttgtttgggttcatcaccacctctgtgagcttcttctaagagcattagatttgtttaaatgttaaattatagttccaggggaaccccaacttacttatactgacacagtaaatatatcagatggtcgggattccctatggaaaactgagaaaaccagggctaattttttgaaataagtatatgctaacctaggagatattcttggtcctggtaatagcatgaacttgatgtagctttgtccatctcagatttttgtctgggaggcatctaaaagataagatactgtacaacagctaaggaggctagcctttcaaggtccattcttttgaaaatgtactttagaacattttatcaatgtttattgtctaaatatggcttagtttattataaaaacattacttggacatttactgaatttcagttccaagaggttctaaggcatgtcttatacaatgcgacgcgtggtcgacgatatcccgacatccggaccgtacca

SEQ ID NO: 325437 - DNA, 336 bp, Homo Sapiens
ttttaaaaaacactcaagacacagacccaagccgggttttattgaaatgccaggagcaggcacatgtcaaagtagccaaggaaggggggacagtggtacaggctgtgtaagttggcagggatgggcaagcctcatgtccatggtcctggcatcccctctgccaggggataagtaggcacaactaccctcccctcaaaatggcatgctcaggccagtggggcccctacccctggaccatgaaggcctccaagaagggctggaagcactaagttttctctctcctgagcgacgcgtggtcgacgatatcccgagaattccggaccgtaccagccctgg

SEQ ID NO: 325438 - DNA, 712 bp, Homo Sapiens
  misc_feature (209)..(249): n is a, c, g, or t
ctctccccttctttgctttctggttctctcctgcccccttttgttcgtttgtctctgcctgtgttgtcttctgcttttgtctttctttgcttccttttgtgcccttcctctttggctcgttcttggtttcttgtgttctgtgttttcttctcttgtcccggcctattccccaaagggccctttttgtcaacaaccctaagaggctctcnnnnnnnnnnnnnnnnnnnnnnnnnnnnnnnnnnnnnnnnntagcagcccccggccacgaagtcgaagtccaggaaggctgcctgctccgcggctgtgaggggccgcgcgtcagcgggccgggctcagtgtgggggcctccacggtgaactcctcgtcgaagttgctgatgtcggtgcggccggacagcgtgggcacaaagggcggtggcaggcgccgggccaacagggcttcccagcccagagtcctgaagaagggctgtttcttcacatcttctgcatctctctcgctagatcccagcctccgctctgggttcctccgaagcagccttctcatgatgccgatggcttcggccgacaggaagcgggggtagcgaacctcgtcgttgacgatgctgtcgaagacctcctcctcatcatccctgggaatggggactcgccaaccagcatctcgtagagcagcacgacgcgtggtcgacgatatcccaacattccggaccggtaca

SEQ ID NO: 325439 - DNA, 910 bp, Homo Sapiens
ccactgcccagtttgagttaaagtgccctcctcctttgctgccaaaataccctgtcattcttatttcattctacattgtaatactttttttctggtctcttccgcagaagaccatgaacatcatgagagcaggaatgcctttcttctctgtatacccagctcctagcagagtgcttggcataagatgtgttccatacacatctaatgaatgaaggggcatttctaaaagccaagactgttaaggcagcttttgctaacagtcaaaagaaatgtttaccaaggtgttgaaaacagtctatcactaacattaacatctcagaacacatatccccctcgcttaggaatcagttgtgccttggtacagaaaggataataccttcttattgccacaggtttgcaagatctgcaaaatttcattgacttttctcttgctctgggtcactctcaagaacaaaactaggttgttataagaggatgtcacagaaaccggctatctcctttcaatcatgtacgcacagagaagggatgagcccattcacagttgcctggtagagaaacagcccaccaggacaaacaagtcaataaagaggtctcatcagacactggcccatggcccagtggcccacagcttatgcatatgtacatgccctccaacagttcagtttgtaaaaagaggcagcagaggtattgattgggaacagacactctttaacatcagacttgaatctgaatcttgactgacacttaatagatatgtgactcgagcaagtttgtctgtaactgtaagtgtatttcattgttttaaaatggagataaaagtacctacctttagagttgttgaataagtgagatgttgccggacgcgtgggtcgacgatatcccgaagattccggaccggtaccagcctgct

SEQ ID NO: 325440 - DNA, 821 bp, Homo Sapiens
  misc_feature (42)..(42): n is a, c, g, or t
  misc_feature (71)..(71): n is a, c, g, or t
  misc_feature (166)..(166): n is a, c, g, or t
caaaattttggtggcctgtgggcctccatgttttgaaaaatnccgccacagggtccatcccccctctgttncaggaaccaacaacagcttcctcggaagaagatcttgacattggcgtgtttgctcagggcagcccatgatgacattctggtcagcagctggcagntgcaggttgagagccagaagcaggttcacgcagaggtccggcagctgctctgtggtgtccaagggcagcccatcctcgacgatgttcagtaggaactgggcgaaaggcgtgcccaggtgctcatagtgtgcatagggcactgcctctcccatggagaagaccatggccaggatgagggcagagtaacagagtttctggtggtcctgcgtgtctgtctgcatgtccctcgccagctctacaggcagcacggatgacacaagcgtggagatgatggctgcatccaggctgcacatggcgccaaagcacttgaggagcagcagccgcagtgatgctcggtgttccatttggtaataggccaccaaggccaggacagactcgaactcgtttctcttgcacattttcttgcaaacttcagggtctgcatcagtcagaatatgcagcagctcctctaggtagcagcggatgacaccctcatcctcatatagtgcccaactgcgctgctgggcgtcgtccttccggcgagccaggtctgcaaagatcacctccagcctctgctggtcgtggcagacctgtcctgagggcaggcggacgcgtgggtcgacgatatcccgaggattccggaccgtacagcctgcttttaactacgaggtttata

SEQ ID NO: 325441 - DNA, 1123 bp, Homo Sapiens
tattaagacaaacttcttcatactttttgtacttttaaaatgatttactatgtacatggattacttccataatcaagaaaaaaagtaaaaacttttaaaatgctgtgaacgtggtttccatttttattttctctgatgggtgactgcacatcagcatcttgagttatgctaactacttaggctggtcacgacacacacacacatacagagaagtcacacaggctgtaccgggctggctgttgcaaatgtacatgaattacacgggttgaagttgtttggcagctagttaacatatgccacccaatgacgggacacaatctgggtcacacgctgcctctcctgcctgttgctgttctttacaaaggtccgtgtgtcgggctgggcaaagtgggcatcctgctggcatctctgtgggtggccccggaatggtggagtgcccaggtcagcatctactctgggtcccattctcaactgctctggccttgacatcagagcttccggttccctgctggctcttctgcacactggatccatgccagtccaggccccctccaggcacacacctgaggcagactgagagcacaatggacgctgtcctgatgtgaactgtgcccagacacaggatggggggaagcgggagatgtgaccacgacaccacacacaagctcgatctttacagatgggccctctgggactgctatatgggtggtgcccgagagacacgggggccatgtggagccctccagggcacagttgctgggagaggacagacgggaggggaacctgtgcccatgtgccctagctctgagagcagagctaggagggtggatggggaacgtgtccgacatggtgctagattgttgagaagtcacgactacacacagctggggagcatgcccctctcccagttcattcacacggtgggttagatacagctagagagaagtggagatatgcttttttgagggaggacctttcctggtgtttggataaacagtgagacagactcctgggttcggcatgctctggggaggaccatgcgacggtgagagactccctactgctacactctgtacagggttgccagcccgcctgccgtcccatggcctctggtgacagtcac

SEQ ID NO: 325442 - DNA, 1030 bp, Homo Sapiens
cgtgtcctcttatgtctgtttcccccttggtgtgtccctcttttggcactgtttccgaatatggattggctttccccatcgggtcacgcatgtcttatgcccgctctctctctcgttttgtgttcgtgggttctcttgtctgtgtgcttttgttgtcttgtgtgtaggtcagcccgagaccctcaagggcttatctggaaagaggttggcaggaaaggaatgcgtcttcaaggacttggcagtgttttgtccagagctctgaggaaggacagcaagtacatggtcctcaggcctgcagacttcattgcacagagcatggcagacaagtagatcttggctgcgttgttctgcctactttgaagggaggcatagaacttctggctctttgaaattttcaaaaaagagaccaagttcttttctgtctactagagatcattcatttgcattgtcctactctcagcccacaaaagaaaagcaacctctcccctatgtgggtcacgatgtgtgggtggacacgggccccactgagattacacaggaagaagtcacagtagacagagcagccagatgccgtgcgtagaccatgggacagtgattagtgacacatgccctgtggggccactgtcagtgccttgctccaccttgacccaaatgttctgaattgcaatactctgggagatgtgggtgggggctgaggtggagagtagaggggttggcagtgtgcgggtttggcaaagcatcacgaccatctttggggttcaagttcattgacatgtgatctactaggcattatcaataatggtttcacacatcaatattctatagcctaaacagctgtgcaacctgagggaagtccttctcctcccccaggtttcactttgctcctttactaatgagaggactcgactagatgacaccaaaggtcagaaacactccttatctcaggattctacgggtctggccgagggaccctgccatgccgtatgacccgacgcgtggtcgacgatatcccaacattcggaccggtacc

SEQ ID NO: 325443 - DNA, 1028 bp, Homo Sapiens
  misc_feature (508)..(508): n is a, c, g, or t
  misc_feature (524)..(524): n is a, c, g, or t
  misc_feature (942)..(950): n is a, c, g, or t
ctttggtgtgatattttggcgcgccccccttgttttgtgggtggttattttgtttgtgtgaggcccagtgattgtccggatgttgatagtctcgtgcccgtggggggacacacgcccccggcccgtgtgtgaagaaccacatgtgtaggtcctctctgttgcttccgtcagtaacacacattgggcgccaggactttaagctcggtttcaacgcatttaataaaatgggcgttttcaaagaatgttgaatagcttgcatggaattccagggctcaagggatcctctcacctcagcttccagagtagcggggaccaacatgcccatcccaccatgtccagcttcttcatttatttttgtgtctctacatggctactttttaaataccaaccattaattttatttaaaaaatgaaggaaagaagtgtttttccctattatcccagtggagcataattgtgagaagagagataacaaaaataaaatgtcaatgctggctgtttcatagaancttaaaaattcaattnctcattattctattgcaatataaccaaccctgtttattttaataataataaacactgtcagtcttttaaaaaccatgataacaattaaaaactttgaacagcatgacaaagctaatggcaacctcttgaaccccgttttaaagctagttctacttccaaataaaactttaaagcggtttagccagcatcagcttagggaatattttcttcaatgttctaaggtataatgtttgggcatcaaaaagtatgggtaagcagttctgatttgtgactaaagaaaaaataatcaagtactaaaataccagtgggctcttgtgacaggggtaaatatccccattcaaggtaatgttccccccacaattttaggtaatgtttcatttctccctctggggatgtattaagaaaaaccaaccataannnnnnnnnagttgaggtgaaaaaactgcttcataagttccggacgcgtgggtcgacgatatcccgcgacttcggggaccggtacca

SEQ ID NO: 325444 - DNA, 686 bp, Homo Sapiens
  misc_feature (232)..(240): n is a, c, g, or t
  misc_feature (374)..(498): n is a, c, g, or t
acattttaaaacattttcttaatataaaggataacaattcaaatcatattttacatttctacgtcttcatattgcactaaaattattttacatggaagaactagttgatgcatcataataccttagaaacattttttgatattcacatctatattaataaatatttcacagtctacttaaatattctactatagagcaaatcatctaacaaaaacaaatctatagtgttacnnnnnnnnnaagagcaaagatattcagtatttttatttctgcctctgggaaacacactgacattttaaaacacatgtaagtcactcatagtacctcataataacatttgagcaagacttagtcgttcattcatttattaagtnnnnnnnnnnnnnnnnnnnnnnnnnnnnnnnnnnnnnnnnnnnnnnnnnnnnnnnnnnnnnnnnnnnnnnnnnnnnnnnnnnnnnnnnnnnnnnnnnnnnnnnnnnnnnnnnnnnnnnnnnnnnntgtgtctctacatggctactttttaaatacaacattaattttatttaaaaaatgaaggaaagaagtgtttttcctattatccagtggagcataattgtgagaagagagataacaaaaataaaatgtcaatgctggctgtttcatagaacttaaaaattcaattctcattattctattgcaatataacc

SEQ ID NO: 325445 - DNA, 276 bp, Homo Sapiens
caacatgcacacaaaacacaaaacactaccagagaaaacgtgtgattaccttgcaggccagctgcttttcaaaccttggagaaacaaacgaccacggacccatgttctgaggttcctcctgactccaaatatgatctttaacatgtttgtatttgctcatctcttgctgtaaagaatccaacgggaaggggcagagttcctctactcggatgatggcaaagtcatgcttcttggcccccagagattctctttgtttcacccagggagtagaaatgt

SEQ ID NO: 325446 - DNA, 427 bp, Homo Sapiens
  misc_feature (22)..(22): n is a, c, g, or t
  misc_feature (46)..(46): n is a, c, g, or t
  misc_feature (88)..(88): n is a, c, g, or t
  misc_feature (109)..(109): n is a, c, g, or t
gggaccatatattttttaaaantaagtctgatttaaattggggcanctatttattttacaaatgttttgctcaatagattgctcaaancaggttttcttttaggaatcnaatccatgtcagtctgcttagaaataacagaagaaaatagaattgacattgaaatctaggaaaattattctataatttccatttacttaagacttaatgagactttaaaagcattttttaacctcctaagtatcaagtatagaaaatcttcatggaattcacaaagtaatttggaaattaggttgaaacatatctcttatcttacgaaaaaatggtagcattttaaacaaaatagaaagttgcctggcctatgtagctatactgtttaaggctacaagaaggctgcttgacatatatttagttttgttgctaagtgaa

SEQ ID NO: 325447 - DNA, 1155 bp, Homo Sapiens
ggagacaccagcaagcgtgctggagttggtgatctgcttcttctccatctggtccattctgggcctctcagggtttcacacgtacctcgtcgcctccaacctgactactaatgaagacatcaaaggctcgtggtccagcaagaggggcggtgaggcctctgtcaacccctacagccataaaagtattatcaccaactgctgtgctgtgctctgtggccccctacctcccagcctaattgaccggaggggatttgtgcagtccgacaccgtgttgccctcacccatcagaagcgatgagccagcctgcagagccaagcctgatgccagcatggtaggaggccacccctgaccacggctcagtacttgccacctgctggcctgtctgaccctccgcactcacctgccgggaccctccctattccatccaagggaagcagaactgccaaagactcaagtcttttcatatttatttcccatcctgcgtggctttccctgaactgttccgtggctgtgccctctgctccccaaacccaggttcccacagccttgggccctaggtaccccagctgatcagtgccaggagagaccagagcctctggaggctacccagggaccacaccaagtccttgcctgtgtcccgggcgagccctgtgtgagtgaggctgtgaactgagcgtgaggcctcccaggtgggggaactgcttgggccttgctgagccaggtcctcagggtgaagccggactgaggagtggccagctctggatagctggctgtggagaggaagcctccatgggctgctttggtctgtgggctccttcattcccttggtgataatttccctttattctgtgggattttggtggggttttccccccttttttatggagttggccaataggattgagttggggctccagtagagaaggcagggttggtggtgggtgggggcagcctgtatcagacaaaggtaaatcagccagccaggcacccacagcctcagctcctgtgcagttcctgggcagcacagtggaagtgggagcctggtccttcccctgcccatggagagctctttaagggatcccagctgcccctccattctctcccaagccaggtcccggcatgggtgggttatgctcatgctggcaatacttgaaa

SEQ ID NO: 325448 - DNA, 425 bp, Homo Sapiens
  misc_feature (335)..(335): n is a, c, g, or t
  misc_feature (359)..(359): n is a, c, g, or t
  misc_feature (387)..(387): n is a, c, g, or t
  misc_feature (394)..(394): n is a, c, g, or t
ttttaaaaggattgaacacatttttaattattagaaatacatacatgcatataattaacctttaatttatttttaaaaataaattatggtcatgaaaaacaatagtgcttaaaattgaaatttcatagacatgtaattttattccctaaaaatgaaataagatgaaccttatgggtaataatgggatttttaatacttattgaggttatagacagtcttttttatgtctcaatgcataccatgtgagtacttggcatatattagggccttcaaatgatgatggatggatagacagataaaaggcccaatgaatgattgtaaatgtgtcttctccnatgtatccatgatggatattgccnagtttttaatacaagcttaggattccantaaaatngataggtcccgaaatcccgtaggtgccagtc

SEQ ID NO: 325449 - DNA, 882 bp, Homo Sapiens
cgggctagagagttgcatccatcaaggcccttaggagccgcatcttaagaccagaaatgagtcatcagttaccaagcttctctccagctgcaggcttacctttaaagccaaacagcacttgcctaaagtgacaatgaacagtgtggccctaggcctcaaaggagagggtgcttaaccttggcaaatggctgaaatcggtgtcacctccctggccatctgttagaagcagcagatctgtgccattaagggctggcagccaaaatgactaaaaccatgataaaggaagggtcactcctcaagccctcactgccccactctaagggttgagggccatattctaggcccacagaaatggtgctgggtcaacagggaaacaccaatttattctgctatcaggtctttataaaaaggcaacacctgtggaggaagggcatggggcaaaagctcacctcagaagtggaagtgttctgctgaggaaagcatgaaggaatgagtatatactaatgaacaaggctacaccccaggggaaggatcccaagggacgggctggcagccggacacatggacaaactgatggacccaggactgatcagacaaagctctcattagcagaatgtgggcacctgcacccagggcccataccacgtccctgtgagcaaaaaagcttaaagttctccctccaggcccagggccaagagcgcctcacaaagggctgctgccttgaacttggcctggggaaatgagaccctgagcggaccacagcccttgagccctgggaggagcagcccatccagcagcagcacagctgccgaaacttgaggaagaagactcccacccatagcacaagaactgcaaatactgtctgggccagagccaccagag

SEQ ID NO: 325450 - DNA, 970 bp, Homo Sapiens
ggttttatgaataaaatatttaatcaacttatctgtacaaaatattaaaatggttaatgaagagtatacaagcatgttcaacaaatatatactgctatataatagttaagaaaaatagagattgctgttttacatgtcatttacatttcactatgtacaatctatttaaatttgagaatatatatacacataggtttctaccagccctgggagggcccctgctagctggcctgggcatcggcaacacctcacaatgtcagcttgcattgcccaaataaacacccaggccaggcagcaaggagacagcccagcctgcaagcctcggagttctgctgtggctacaccagcaggaagactgctgatgaaggagatttcagtttgccttaaatgagtttctaatgtccccccacactccaatctccttactcccaagccaagctaagaaaaagtgggtgtcactgcaaagcgaaaggatttctatcccctcaccaaaataattctttttgtctttaagctgctgaggaaatggcatgttactgagccttgatggcattactggcactttgagttttaccgtttccttaaaatcacagtactggaatcaggtgaaatttgctttctaagctgcagccactcgtcatgtgcagaattctgctgcccacccaagtcctgcttaaacagccgcattttataagctggtacgggagctctgcaacaaccttcacagagaaaggatctgctgctttatttgtatacaaaaagaaaaagacagtcccaaacttttcagaatcccttattgtcatctgctgaaagggcaagttgtagttagcatgttaatccttgtaaaaaatgcattaacttttcatttagggtgaaattcttccagctaaaagacctaaagtgactcaattatgattcttcgtcaaagaaaacataaaagctgtttgcattacagtgtaaagtgaaatac

SEQ ID NO: 325451 - DNA, 502 bp, Homo Sapiens
gagtcatttattttccttagctttttccactcaaattaagggcaagcgaaaaagtaataatttggcattctttaagcctacagaatgtgattctttcacttgtttattacactggctcgtggacagaacaatttgaaaagtgaaagaattattttggtaaaagattttgctttacttttcgaagcattatttttttaaagagtgttttactccaacgattgaaacattttcctatttaaatttcatcgttagaatcacaggaggcaaaaaatggaacggttgaatgaaattttactctttctgtgaaagaaaatccacagagttgttgcctccgttgtagttggtgggccccgttagcattggatgcctttgccaaatggttcatgtggacacacaaaggcaaacagatctgccatcgatcgcagatttctgtagaaacacggatgtgcatgtgcagattcccttttgcaggtattaaaaataattaaaaatagtcctgcct

SEQ ID NO: 325452 - DNA, 1045 bp, Homo Sapiens
  misc_feature (53)..(53): n is a, c, g, or t
ttggacacgacctcagatcaaagacttcaaagagaagattcagcaggatgcangatttccgtgattacagtgggccgaggagaagtggtcactgttcgagtacccacccatgaagaaggatcatatctcttttgggaatttgccacagacaattatgacattgggtttggggtgtattttgaatggacagactctccaaacactgctgtcagcgtgcatgtcagtgagtccagcgatgacgacgaggaggaagaagaaaacatcggttgtgaagagaaagccaaaaagaatgccaacaagcctttgctggatgagattgtgcctgtgtaccgacgggactgtcatgaggaggtgtatgctggcagccatcaatatccagggagaggagtctatctcctcaagtttgacaactcctactctttgtggcggtcaaaatcagtctactacagagtctattatactagataaaaatgttgttacaaagtctggagtctagggttgggcagaagatgacatttaatttggaaatttctttttacttttgtggagcattagagtcacagtttaccttattgatattggtctgatggtttgtgaactcttgctgggaatcaaaatttccttgagactctttagcattcatactttggggttaaaggagattcctcagactcatccagcccttgggtgctgaccagcagagtcactagtggatgctgaagttacatgagctacatgttaaatatttaaagtctccagaataaaaccaccccaacgtagaacttaaccggtgatggtatagccctcgactgccatgcaccaagatgtcatatgagaggcccgtaggataaagtgtgctccctagctccgacaaatccaataagcctacacaaagctctactcatcagggatcaacctatctaatacaaacataaaaacgcacaatcatgataaaccactataaaaacaccaaaaccctacacagataaatacaaactaaaaaaacttacaactccaatctaaccctcacacacacaactgcacc

SEQ ID NO: 325453 - DNA, 783 bp, Homo Sapiens
cttctgcagtgggttggattgcttttttgacctttaaaatattatatgtttaaggtagggggatgaagggggaatgcctttttatttttcttccatttaaaaatatgtgttttctagcatcaaatatagaggctgtgactagaaggctaagccccatatgcaagttcactgcccttccctaagctgtcggcatcaggacagggaaggtggggccagccgaccctcactttcctgggcaggaagggaaagtcacggggcccagcggccaggtagggcagggtctcttagcggagggacaaagggcggcaggagaggaggcacacagcagcacaaaggaacccaggggcaactggcagccctgtcgctcgttgcctaggcctcagagccaccaccacaggctggccacaaaagtggaggccctccaggcattggaagctgaggcctggctctcctgattgctctcccaccctggcttgcctggttagaggtgatggtagagggggtgggtgagagttggaggtcatcactgctgaccaaggtcaggaggaaagaagggtgagaagtggatgggagctggataccatgcaggtggggctgagatgcagcccagtccagggctcctgacagggataacctgctcagccccaggttcctgtcggcagcagggaaaggacactgcgctggggtttgggagtgcagaccctcccccaacctcaggtgcatacctatatttcaaaggcccatcttcagtcagagctcgcctcgtgccgctcgtgccgaatt

SEQ ID NO: 325454 - DNA, 554 bp, Homo Sapiens
aaaaaaaaccatgaatcatttattctttggttgtctacacagacacttaagtactgtatcgctgttatgcagcggcctgtggaggcccctgggggtggctgggcctgtgtcctgagccctcagccagatccagggggtgcggtgtctggtcatgtccactccaagagcagtagcaccatgtagaaggctgtgagcagggtcccctcggctgagtggcagatgtaggctcactgctctgcagccccgaggggctggccagctcagagtgcagaagagttcctctccatgggtctagtcacccatccgtctgacctggacgctgtcatagctcatccttgggcttcgattcactgcctgagagagactcttgtgcaggttcgggggggccctgctgggcatccaggggctgctcctgggagaggtccatctcttctgggctgaagagcatcttcaccaggtcatctgcctgcagcctgtcccgctcgagctgctctcacccgctcgctgtgtcgagggtccagggtgaaccacagggcgatggcacagccgctgcc

SEQ ID NO: 325455 - DNA, 879 bp, Homo Sapiens
ctcatgaaacatgatgttaacttgtgagtctaggttggggctgtgtgagctggaaggacataagctaagggcccagagagggcatacctgaggctgcgtcctgggtgggagaggcgtggctgtgtcaggatgtcatcagttggcctttgaagggaagttccttccaagaaactgctgtgaccatgtgttctctgtgggcagaggccgggcggtattctgggacatcaagaaccgcttgccacggtcagtgactacagttcagtggggagaacagcttcgtgtcctgtgtacagttaaggacaaccccaacctgctgttcaacatgtgtggcttcgagtgccgcatcctgcctaagtgccgcaccagctatgaggagttcacccacaaggacggggtctggaacctgcagaatgaggttactaaggagcgcacagctcagtgtttcctgcgtgtggacgatgagtcaatgcagcgcttccacaaccgcgtgcgtcagattctcatggcctctgggtccaccaccttcaccaagattgtgaataagtggaatacagctctcattggccttatgacatactttcgggaggctgtggtgaacacccaagagctcttggacttactggtgaagtgtgagaacaaaatccagacacgtatcaagattggactcaactccaagatgccaagtcggttccccccggttgtgtactacacccctaagggagttgggtggactcggcatgctctcaatgggccatgtgctcatcccccaatccgacctcaggtggtccaaacagacagatgtaggtatcacacactttcgttcaggaatgagccatgaagcaagaccagctcattcccaacttgtacccgtacatacag

SEQ ID NO: 325456 - DNA, 1019 bp, Homo Sapiens
  misc_feature (125)..(125): n is a, c, g, or t
aagaaatttaggaaagcacctggttcctttctccccatgcctgccttctgctccctccccagctggtttgggctcaaattgtccctggagactagggtttatgttagggtattgatagattagangcaggtggttgaagagatcttctctggtcagacttggaagaatttccaaaactgaagttagccccaagacttccctagggttgatgtactttatgatccagatgctaaacttcttagaatgaaaatatgcttcaacacttaagtagcatacactgccctacaaacctcagagagcacttttccccaagttcttgtttttatttttgaaagtactcacacagcacttactatgctccaaacactcctctaagcactttacacatattagctcattcagtccccagacagacgggatgaagtaggtattgttactgttcccattttacaggtgagagatttgaagcctggggaggctagtaactcaccccaaggtcacacggctcatacatggtgggactgagactcagatgcaggcagtctggcacctcagtctggattctaaccatttcactaagctatttttgtcttgtactactttgacccacccctgaataaacctcaattgctggagtggggtgtagttattaaagggatgctttttaccttttgctgtctgctgtggcagattccccagataaccaaggaaaaggggccacccatacctggaaataggccatagggcccctactactgccaacaagccatggcctaccttgacaattgtttgatcttaaaattgtgtcttggtaacaaaagatttggacaggcatatctgtagctttccaagttaattaattgcaatatttttgtcttcaggattttagctgctgaacaacttttagtttggagctaaaagagacctgtctcatggtctgcccttccctggggcaatagctagggtctttcctgatttgcatggaaatttagggggatattttgaacttggggtctcaa

SEQ ID NO: 325457 - DNA, 690 bp, Homo Sapiens
cggaagcccccagtgactccagacgaagggcagccgcaaaggcgcctccaagcagttggaaacctccctgctagagggcagaaaaggaggcctggccctgtaagagccaagctaatggcagctggctgaggggcctaagtatacagcttaaggttttgtccccgtttccttcagagtcccccgaccctgaaggagtttgcgcagagataccctaaagttttcccaggaggtggggaggtcagccccagaccccccaaagagctgagccttccagcaagggatagtggctgggagggtccagacggggaggacagacccgagggcacttgtaggggaggtggaaagggtctcagactccgcactggaaactggtgtgggcagaagggtgcccagagagggggaagggtttgtccaaggtctcagggcagagccaagacctggatgccagcctcccacctctgggacctccccaccgcccccacaacctccacaaccccacaaattctctggccgggcctccagacagcttctacccccacacaatctctctttctggtgctggaaattgagggggcaacaccaagttcccagctccttgggacaggaccccattatcccagcagagtggggagtgattggggggtccattcctggggctctgaaccaaggcctcatgggaaaggacatgtc

SEQ ID NO: 325458 - DNA, 832 bp, Homo Sapiens
tgttgtgccgctgctggtttgtgttcttggtttggtctcgtgcctgctggtgggtgtgctctctcatgcttcactcttcttttggcttccccgctcaggctgttccttctggggtcacatgcttttccgctgattcaggctgactcagacgccttgcgttggacagaggatgcaggaggtggaagtcctctcctttggctcacagacctgcagttgtggcactggtggagttgctacctcctgaccagaagagggatctttggtttcagtataggctggtgctgctgtccctggagactccagggctcagagattttctgctgttgcttgatgctgaacgagtacgtgcacgtgaccttgatctggactctgatgttgatctggagcccatcttgggtctaccacgagggttggcatgagtacgtgcctgggctacatctctctgcttggatctgagcggtgaatgagaccgagaacctgaactgtcaggagagcgagatcttgatctagaactggaggaggaagatgaggaggaccggctagaggatgaatcagctgactgtttcaatctgtggcttgggagaagggtatgagaagctcttctgccttccttctgttccaaagatggctgtttcagacattcttcagtgattcctttggccagtgctaattcctccatttttagagggaggggctgagcagatctgtctgactcaggttcaagatccttctgggctgagtagtcagccagtgtgcttttctgaaccagaggcaggacactctcctctggcactttctctgctggagattctgctgttggtgtctgaaggac

SEQ ID NO: 325459 - DNA, 827 bp, Homo Sapiens
  misc_feature (33)..(33): n is a, c, g, or t
  misc_feature (200)..(200): n is a, c, g, or t
ctaggggcaccaccgtggtggccccaagaaacnctgtgggggatactccgtataccttttggcgcccccccttccgaagggggatatacctcttaaggcccgttccccgcgccctctttttgttgttgttattgtttgtggagatttcgttgaaaaaaggccaaatgttgtaaatctccaagtaagtccaagtgagccanttcgatccaattaaaagggaaagaaaactaaattttcttggaagaaaagaccaaatcttatgggaattggtttaccaggaaagtgaagaattgagatgggccccaactaaacccaatttggaatcattaactacaaattgtccaaactaactgcaaagaccaagtgtccaaaatgggatgtttaagcagttttgctatggttatacatcttttagttgttatttgtcaaaattatatgtataagttatataagtcatagtaatagctaaaaatgccaatctatggaagcagtgattttcaatataaagttctattttgatatttttccatcttcaagtcagttactgtcatctggagtactcagttaagttgtggtttgaccttcctcaacttgacaagaaaagctgtatgaccaggttgccagtgtactggtctagcaacatagggaaatgatccatatggaaaatcagaatgcgattcttcatggtcatcctcttgaaacagctcacctttaactccaattttctcttgagaatctagttgtacatctgtgttgattttagattctactttttgagctaaaattccatttttctgttttgcaaggcaaaccaaccaatctctgac

SEQ ID NO: 325460 - DNA, 685 bp, Homo Sapiens
ggaccgtgggtcagaatcatttcgttgtgctcctaatgggtcgctgaggctggtctctcagtgatgaagccccaggcgtggaagcatccactctctcctgaggcgagccaccttgggttgctggagctcaccagtcttgagggaggtgcaggggaaactgtgttttttatcttcatacatgacggtgggcagagaggcctgtcttaaagtttccatggaattgttttataaaatatcttaagagatgaataccttatcagctgttgcttgaaacctgttaaaaatgttcataacattggatagtctagtctctaaatgatggctaagtagtggggttggctttgaaaacaatgttttatgcaacaaggaacgaatggtagcagccagctttgcggggcgtatgtgtggccagctcttaaccattccagtctattacttgggtgagtccttgtggacaaccacacacacgtgcccacatggtactagctgccgttcgtttctcgttgcctaagatgttttggcaactctagagccacaggcctaagagtcattaaaaaattctccctttgtaacctcagtgctggggactgaggcgagccccctcaggtcgctggagtgcaccagtcttggggaagaggtgcaggagaagctgtgttttatctccacacgcagtatgaagataaca

SEQ ID NO: 325461 - DNA, 752 bp, Homo Sapiens
tttcatagttattttaataaccaggtttacattaacagtcacgtgatgaactttttttctttaatgtcagctaaactcaaaacacagttttgttcacggttcaaaccaaacagctcttcacgttccagagctgcctcacagctagcacagatcacaggagattactgtctgtccatacccaccagacacagaactgaacacccacacaccagttttcaaagagggaacttacaatgaatgctggctgcccagggccccattgaggtgtatctgggactcaagctggagttttccaggggagaaagcctggggaagcttgtgggcaaggaagttggggaattgcccaccctactgggaaaggggcttctcaggggatgagtgaaaatccgggctcaggtttcagccctttgtggaaacatggacactctcagtatagacagtcgtgaagaacaaggctgagggattttgaagtaaacccattttcaggatgactacaatccttccacttctagaaaacttagaagtacaagaaatagctctactacgggtaactgatttaacaatttcccaaacaccctttccactacccaagcccgtggccctcagagagaaccgggatggattgccatctgggttcagaggcaatatgaggaggttggggggatggcaggggcatcctcagggttggggggcaggccaagggatgagatggcaaaggacagctttggaatcagatagacgatccagcgtgc

SEQ ID NO: 325462 - DNA, 858 bp, Homo Sapiens
  misc_feature (353)..(438): n is a, c, g, or t
  misc_feature (491)..(621): n is a, c, g, or t
  misc_feature (641)..(655): n is a, c, g, or t
  misc_feature (659)..(801): n is a, c, g, or t
ttgacccctgataagctaacgtttattgagagcttatgtgttttagaaaacttacaacgttttatgatctttacgcataaaaactcagactaggttagggtgtggcactcacctctggtacagaatttaagaaggttcaaaaactttggtaatagtaaacaatattttcaagacttaaaaaatattttaatatccaaaataatcaaattgttaaactacatcctgcagaccggcagcataattttgtaaataaagttttagtgggaccagggtgttgaggtcagtaagctcaaggcacgagtgcggggttctagcctcttcaaaattttatttaggccggcacggtggctcannnnnnnnnnnnnnnnnnnnnnnnnnnnnnnnnnnnnnnnnnnnnnnnnnnnnnnnnnnnnnnnnnnnnnnnnnnnnnnnnnnnnntctcccaataaaaataccaaaattagccaggcatagtgccaggctcctgtaannnnnnnnnnnnnnnnnnnnnnnnnnnnnnnnnnnnnnnnnnnnnnnnnnnnnnnnnnnnnnnnnnnnnnnnnnnnnnnnnnnnnnnnnnnnnnnnnnnnnnnnnnnnnnnnnnnnnnnnnnnnnnnnnnnttgttttgttcatcatggannnnnnnnnnnnnnnaaannnnnnnnnnnnnnnnnnnnnnnnnnnnnnnnnnnnnnnnnnnnnnnnnnnnnnnnnnnnnnnnnnnnnnnnnnnnnnnnnnnnnnnnnnnnnnnnnnnnnnnnnnnnnnnnnnnnnnnnnnnnnnnnnnnnnnnnnnnnnnncattgtttttaaatttttgtttgtagagacaagctcttcctatgttacccaactggt

SEQ ID NO: 325463 - DNA, 1383 bp, Homo Sapiens
gatggtcttttcactgcgaagtctgtggatagtggttctcttcgtaatggggcgcaatacgtgcggtaagccagtgaggtggttgctatgtgcgccttggtttaagtcgtcctccagtggttgcccggcacgaaccgtgtagggaagtgttgcattgatagacaccgtgtgaagggtgttgctgggaccctggccttggcggcacattgtatggactatccgctagcgagaaagggggtcatgtgtgatcttgctacgtcagtgtcctacgcgaacatggagctgctcaagcgcaaggggaaggggcgcaggcggcccacatgccaaggacactaggtgtgctgctttgtgcggagaccgtgtgttagtgtgccctcgtgcgatgggaacggtcagccggtgccagtgatgggcagagggtagtgtggtgcgtatgtgattgttgctcgtatgggtaaatgccaccaggtggctctaggtacagggtctggggccacactagtaagtgtgccgctatgcgcatatcttgaatgaactgacggatggaatggatgccctgcttgtgtccaggtggtggtgtgctggatgtgtcctaatgtgtaacgtgaggtctggacggtgtgaatgggcaggacagagtaaagcctttgtcctctcaccagtggtccgcctctataatgctgcccacacggggtgttctggcaggtatgtgaggatggggagaccacaccgtgtccttacaagctgggcagggagggcaggtcagggcgtgtgtgagccggagacaggggtgtgcgtgcatgccgactggagtctggggagccacagcaggtgccatgtggagaggcgtggcaccggctcactctggcaggagcccttgtggcgtcgcttggagggtggcaccaggcgatcggggcaggttggcgggcagcccgtggccttccagcttggcctcgatgaggtggctggccagcgcgaactcctcatcatccagcatgccgtcgcggtccacatcgctgagcttccagatgcgccccagcacctgaattggggaacttggtcccccaccatccaaggtctttggccttggagccgctcagcttgccgtcggcaggcgccaggttgtagaagatctcgtcgtatttggacttgtctttggtcaccacccactcggcctcgtcgtccgagccctcctcgccgtcctccatggcctcgtcaggtccccgctccacaaacgggcccatgtgggtgccctcaaaagcgcccccctgcacgcccacctcggtgctctccagctcctcctgccgcagcaggggcatgagcttggcgatgtcgtgcgtcagcatctcgtccagtgcctctagcagcttcggcttcagcgag

SEQ ID NO: 325464 - DNA, 831 bp, Homo Sapiens
gtcctcaagtcaagagaatcttttagatgaagtaatgaaaagtttgtctgtctcttctgactttttgggaaaagacaaaccagttagctgtggtctggccaggtcagtaagtggaaaaaccccaggggacttctatgatagacggacaactaagcctgagtttttgagacctggtcctcgaaaaactgaagatacctacttcattagttctgcgggaaaacctacaccaggcactcaaggaaaaataaaattagtaaaagaatcttctctgtcacgacaatcaaaagatagtaacccttatgcaactttacctcgtgcaagcagcgtgatctcaactgccgaaggaactacacgaaggacaagcatccatgattttttgaccaaggacagtagactgcctatatcagttgattcaccaccagctgctgctgacagcaacaccactgcagcatctaatgtggacaaagtacaagaaagcagaaattcaaaaagcaggtctagggagcaacaaagctcctaattctattacccactacatgacatgtgggccaagtgctacacttagtcctgagatgtattttttctttaagtcttgaatgaatacaaaaggagcccattttataatataaaccttgatgtacatgttgagatatttggacaagtgaaaatgccttaaaaggaatgcatatggattaagttgcacttataacacccttcaacaaaatctaattttacattgtcttttacttttctattaagggtttctttttcaggtctacatggacttattactgtataaataccaaatccaatatttataacacagacaaa

SEQ ID NO: 325465 - DNA, 597 bp, Homo Sapiens
ttaacagttaaacttttatatttacaatattctcttcatcttttgccaggtttaaaaatgtgtacagagccgcaaagggttggggtagggataagggattgtcgggattgttttggggagaggagctgggcattggagtccgtggctgaatcatggggtcccccagcccccctcccatgccccaattctgagggcatctgtctacagggttcagggcccaggtctctagcatttggagggcatggctgtttggagaggagctagaccaggcaggggaaaggatcagaaaataactaattttccatggatggaggtaggaagagaagggacagtcaagaggcaaagttctggggactcaagaccagggattctggatttgggtgtcagtggaagacagcaccccagcccctattcaagtttggcactaacaccccacaaaatgccagcagatgaggactctcccctcgtccactgtgtcccttaagcccttccagacatcattcttttcccaaatgcccaagcccaaggccctccggggagtcacctcacacatttcaaattattcctgctggtgtctgcccaagccctgtccccact

SEQ ID NO: 325466 - DNA, 679 bp, Homo Sapiens
aagaattggtccgatgcatccagtttgataacaagaggatggtcagccgggcctatgatgggaaaattaaagtttaggacttgcaagccgctcttgaccctcgagccccagcaagcacattgtgtttgcgcacattggtggaacattctggacatgtgttttgcctacagtttgatgagtttcaaatcgtcagcagctcccatgatgacactattttgatttgtgatttcttaaatgtgcctcccagtgcccagaatgagacccattccccctccagaacatacacttacatctctagataacagtctgcactttcactcgtttccgggttttctagtcttgaactactggctacgtggctaccaatgcctaagggagttcgttcacagctgagttatgaagctggaattggttctagacgctgggtagatgcaaagcagcctaactcttcaagtcccgacatttctcacctctgattccagctctactttgagaaggagaccttagcttcactgacttgaaagtagcacagaagcccgtttccttccctcattagtgaaaaaatctaatgtttcaaatgtaaactgttcatagaaaaggaacatagaatctgttttacagaagtaaatcgaccgtcaagagaagtcttggcctctaatttatattgctttgcactttg

SEQ ID NO: 325467 - DNA, 509 bp, Homo Sapiens
  misc_feature (247)..(255): n is a, c, g, or t
aactaatcatttgtttttctaaatcagtctataaaagaacaaaacttttaaaatcttgcagaggctgtttcatcagtaaactctcctagggagctactactgctgtctaaacctctgtgaaatggtaggcaaaaaaagccatcaaaggatcacaggagataaaacaccaatcagtgtaagctgttaaagatgactgtgattaaataaccaaatatcaaatatccataaggtaattaaatttagattnnnnnnnnnctaagcaccagctgtacatacattattaaatgttctaatctctttcctgattcatagccatattctacatgatgatcaagactgtccactgtgctacctaccatcattttaaacactgcctgatctgtatgatggtggaattatggctatggacatggcagataagagaagggcacactgagaaaatgtgagtgagagagaatgtggaaataggttaaatatggaaagggcaagggaaacccattaaaatgttc

SEQ ID NO: 325468 - DNA, 998 bp, Homo Sapiens
cccacgcgttcgctcctggaagaacaacaagttctccaacccatggtgctatgagaactttatccaggctcgttccctgcgccgggcccaggacattcgcaagcagatgttaggcataatggacagacacaagctggatgttgtttcctgtggcaagtccacagtccgagtgcagaaggccatctgcagtgggttcttccgtaatgctgccaagaaagacccgcaggagggttaccggacactgatcgaccagcaggtggtctatatccatccttccagtgccctcttcaacagacagccagaatgggtggtgtaccatgagctggtgctcaccaccaaggaatacatgcgtgaagttaccaccatcgaccctcggtggcttgtggagtttgccccagccttcttcaaggtctcagacccaactaagctaagcaaacagaagaagcaacagcgtcttgaaccccttgtacaaccgctatgaggaacccaatgcctggagaatatctcgagctttccgacggcgctgaaaggcaagaatggtccctttggcctctccagcagcagtagccagggcttggacttatcgatgacaggctggtcctgaggatacagctgtcccgtgactgactgtcttaactgagcattttctcaactcgactctcatttcttccctgctggtaaaatagaaacagggatttaaacctggctttggcaagagcctgcagcctccatcaccccaagtccttgggcccagttgggagctcatatctaacacagagacacattgcatcaacttcaagaaagggacaatttgtgcagctccaggatgggaaggtggagtgggtgagcatcttgtgcagggacatggtgagtgccctgatgtcccagctagcaggagctactgtgctcatctaaagtgtttgccccacttcccaccccgtctccagcccctgtactttggcttgacctcgtggaaatatttattttcttaaggaaac

SEQ ID NO: 325469 - DNA, 642 bp, Homo Sapiens
  misc_feature (606)..(606): n is a, c, g, or t
catcttcttccccatctcctcccatgcctggcacgctgggcccgctcaggtcatttgtatgttggatcagtaagtcggatcataggccgatcaccaagtcaatggtggccccagtatcttgccctttttcatttagcagggagatcagcttgtacgtgcagggatctgtctctggtcaccagtcaggtccttcagggctacagtcgccgtgccaattaagtttatttttgtccagttgtctcaaaatctttcaccataatcccaagggaagatgaaaagtccagtggtatacccctcaagtcaaactccaaaatctcattccagacagggttcaattcattatcaactttctttgttttctttttctcatccttaaaaatgacagaaacagtaggatccggcttgccaaatttcgttttagggatattgctggcagattccacaatcactcgcagcatggttcttagctggtagaaagcaagtttcagcaaacgaagtggagactcgggcgctggagctccgggtcgcaccgccctgggagagaagttctctcccagtgaagggaggatttctcccagggcgctggagctccgggtcgcaccgccntgggagagaagttctctcccagtgaagggaggattt

SEQ ID NO: 325470 - DNA, 1241 bp, Homo Sapiens
  misc_feature (151)..(165): n is a, c, g, or t
  misc_feature (172)..(259): n is a, c, g, or t
  misc_feature (810)..(810): n is a, c, g, or t
cagaaatggagtcttctcctttttggaaggactaacagcttcactatgtgccaaggtgccttcacaccctatggttatcttacttcctatagttattttaattcctgcacctctttctctaaattgttagcaaagactccccctgccctannnnnnnnnnnnnnngagaagnnnnnnnnnnnnnnnnnnnnnnnnnnnnnnnnnnnnnnnnnnnnnnnnnnnnnnnnnnnnnnnnnnnnnnnnnnnnnnnnnnnnnnnngtgtgaggagccaccacgcccagcttcagacttcctttttaaaggaaacatcaaataacattatttcttcatatattcagaggacaattaccctagaaaaataacttctgtatctgaccttcagatataagacatgttcatattttaaattcatagaaacaaaaacactaaaaaattttacatgaacaatttaatttgcagatagcaggactgtgggcaaattttatcctttaatttgatttctgcttatgtttttagaaagttatctgtataaaacatacaactgctgccaggcgcagtggcacaccacagtagtcccatatacttgggagactgaagtgggaagattgcatgagccctgtagtttgaggttgcagggagctatcatcatgccactatactgggtgacaataaaaccctgtctcttaagaaaaagacaatgcaaacgctaatatacactcaatttcaagattacaggtcacaagggggaaacaaaaccaaaagatattctttgggaccagacccattttaaacaattgattgaaaacctnttagcctatagttttgaacccttgtggtaggattcatttaactgggtcattccagggtatcctcggggtaaccaagcttgttaatcttggacaattccacgtatttaggcttgaaaaaccaaggttcccctggtaggcgattcaggaaaccctttttaaaagcacacaggacacattatcgaattgcaaggggtgcaacttgtggcacattttcttagggattgagtcaagcaacagaactcctgggtaaaacaatatttcttcaacttggtggtcttgagaacccccaatacccagagttccctgtgcatgttgtcgacaacggtgtccaccccacaaaggggcgtttgcgatggtcctcaaaagaagatattcccttgtgaccccccacaataacttacttgggaggccaaattcctctaagaaaaacc

SEQ ID NO: 325471 - DNA, 704 bp, Homo Sapiens
  misc_feature (615)..(615): n is a, c, g, or t
  misc_feature (631)..(631): n is a, c, g, or t
  misc_feature (663)..(663): n is a, c, g, or t
  misc_feature (668)..(668): n is a, c, g, or t
catccctttacttacttgttatcagtggattctcggggttggacttaatgtgagctaagaagcattaagtctttgaactgaatgtatttgcatccctggtttggacgacagtaaacgtaggagcactgttgaagtcctggaagggagatcgaaggaggaagatgacttggttctttcttagtcctatatctgtagcatagatgacttggaataaaagctgtatgcatgggcattacccctcaggtcctaagaaataagtcctgaatgcatgtcgttccaaactaacactctgtaatttttcttttatgtcttatttttccaagagtcctccattttttgcaccccctcaccgccaactctgttattcagtagagagaagtgtacggctttctgattggtgagtgaaaaagtaacttgagacacgacctaagttgaagagtttagacttgctgagttttagaagtgatggaaattaagagagcatttcaataaaatgtgacttggctgtctttggaagagaagtgcaaggctttcctttgaagaattttaaattagtccggtaggttgttcaggtgagactgtgtatgccaaaattgaatgggcacaggttgatgnccggggcctctttgcnttggggtctgatgttctttggcacaggggttnagttnaagggttaatttcccgtatggagagggtttgacttt

SEQ ID NO: 325472 - DNA, 411 bp, Homo Sapiens
ccccttcttttttcacggagatttgtgttagtgggggacccatcagcagcttcctcccctggtgctaaaccgtgaagcaaggtaggcagacacttaagtgttaattttaaactagattattttcaaggaacagatttagtacactgataaacatgaatctgatttattgacagagctcttggcatgagtgaaagcttattcaagaggctggagcagaataagagtgctgttgtacagttaaccgtgcagtacagaatgaacaggtatttgtaacagtgttagctaggagtggttttcatgtttgtttccatctaccaaaactaaagttatcttttgtaattcccttagtaaaattatgtccttaagtaataagctgacctatgagggcaagctggagtgcagtggtgcaat

SEQ ID NO: 325473 - DNA, 547 bp, Homo Sapiens
ctgagaggatttctttatttcgcgttcagacccaacacactcggacaccttggggccctgtgagggctaagcagggtggtggcgtcagctcccggggaggccccacatccctggggaggaaatacacggcagggggccgcacccagccccccacggagggacccgtgttgctctaacagggacactgaagttgcctctgccgccccgtgaggggcctgtggcggccccagacccagcccagccaggccagaggagcctcccaggggcccatcaggtggtgaggtgggggcttcccggccccggtgcccaccggcccttctagctgcctgtgctgggccaggtgtcctctgaggccggcaggagtctggcccccgctgcacctgcgcttggtggctggcaggggcaaggtagggaggtcaccctcgaggccggggtccccatgtgctaggggaagacctgccttcccagccagtgtccacagggcagcaattccacgctctgaggctcagggaccaaggcagggctgggcatggggctcagggccttg

SEQ ID NO: 325474 - DNA, 356 bp, Homo Sapiens
  misc_feature (196)..(196): n is a, c, g, or t
catttgacacctccctcattaggaagacaaggactatccttgaggcaaaacaagcgaagaacccagcaagtccctataaccttgcatataagtataattttgaatattcccgtggttttcaacatggtactttggataatgatcgccttggccttggctgtgattatcacctcttacaatatttggaacatggatncctggatatgatagcatcatttataggatgacaaaccagaagattcgaatggattgaatgttacctgtgccagaattagaaaagggggttggaaattggctgttttgttaaaatatatcttttagtgtgctttaaagtagatagtatactttacatttat

SEQ ID NO: 325475 - DNA, 876 bp, Homo Sapiens
  misc_feature (292)..(292): n is a, c, g, or t
  misc_feature (620)..(620): n is a, c, g, or t
  misc_feature (822)..(822): n is a, c, g, or t
  misc_feature (824)..(824): n is a, c, g, or t
  misc_feature (829)..(829): n is a, c, g, or t
aaaaagtgggagagaaaaaagtgacagcgctcctttagaccaaggacttagaagagaaacctccacccttccggagcacgttagtcccttcccctctctcactgctcaacctccctgggcttccagagcaagaaaaggctacgtcccctgtcgaaggagagtggacggtgaaggtgcctgggaaacggccagagaaaagacctaggcggtcgatgttgcggtggaggacactttgcagcacagccagatggggtccaccctcacctccaccctccctgggagaagtcccganttgaagcgaccccgctctgattggaagatgaacttctgaggcaagggcccatgctcccggagaaaaccccagacactgagcagcagcagacgcacctcgaaaggtgccagttggctaaatacttcatgcatattacccagggccggaggcaggaggcttccctcagccatgacagccactaaggtgcaggatgcctccaggtgccagggggagtgggtcgtgtcagggtggcgagaggcttcccaatggcccaagagggcggccagcagcccccgaagcagcacggaacagtagcacagggctgggggtgcagctgctaccagctttnaacagctcaaaagagcaggggctgttcgcggaagcgccggccaaatgcggagatcccgctcccacggtggcccgggcgtgttcctcggggggccaggccagctctgcaccagctgcatcgggacacacactctccaccaaggtcactgccactgctttggctgcctctggactcaagatggtgccccccagcattccccacnantctcngccctggggcactgcagcagtgaaccaggaggctgaggaggctctgg

SEQ ID NO: 325476 - DNA, 650 bp, Homo Sapiens
  misc_feature (344)..(356): n is a, c, g, or t
gcctttgtgtcgcgcgttggaggcgtatgttgttgtcggcaataatccgcacaaagtctttttttcaggcagatgatatctcacataatatgatatacatggatcagaaagggagggagtaaaacaaagaccagctacaggtgagggaggaaggagaagggcatgtcaatgtacaaagaattcgggtgtcttccagggcaagacacaaaggtttccgtggggtgatgaggtgagtggggccatgagcaccctcccgggaggggtcaggctccactgtcgggcttgttggtttttgaaagtaaaaacaggactggagccagcacgtctgtttggttgtcggtgtnnnnnnnnnnnnnacagctgctccaaagtctttccatccagtcccaagcatatacagagcaattctgatcagtatcccatctttgagaaaggacgaataaagagaaaaaacaaagaaaaccggaactccagccccccaagccggtgcacacgatgacgctgatgcgaggatctcgggaccagaacgcggaggtcactgtttccatgtcccaggtcatagccatcctgtcagtggcagcctctcccactctgcgccaggccaccacccagctggcaggattctcactgggaagactggggtgggggca

SEQ ID NO: 325477 - DNA, 600 bp, Homo Sapiens
ttgcattttgtaatcagtgtaataaactccaacccacattccccaaacatgtcaggaagggctgcggaaaaaagatgtccctttaataaaacgttatcaacatatatcgtacacaaactacaatgtatcataattacttttttttcctctcttaattcagaaccagactacaaggtaagaaaaaacacagaaacagctacaatgttcccaataatccgcacaaagtcttttttcaggcagatgatatctcacataatatgatatacatgggatcagaaagggagggagtaaaacaaagaccagctacaggcgaggggaggaaggagaagggcatgtcaatgtacaaagaattcgggtgtcttccagggcaagacacaaaggtttccgtggggtgatgaggtgagtggggccatgagcaccctcccgggaggggacaggctccactgtcgggcttgttggtttttgaaagtaaaaacaggactggagccagcacgtctgtttggttgtcggtgtcccccaccccccacagctgctcaaagtctttccatcagtccaagcatatacagagcagtctgatagtatccatctttgagaaggacg

SEQ ID NO: 325478 - DNA, 582 bp, Homo Sapiens
agtaacttgttttaatggaaaaacaagcataaattaatttagtggatataacaggaaaaatgaagcttatagtctaggcaaaaaggtgtgataattgacaacatatattttaattatgcattcaatttattcctcttttacatagagattaaatttaaaaactcaagtttcagactaataggtagtagattagggcaaaagtacatagaataagtcaggggatgttacttattgcatttataacttgaaatccccatgacagcagagttgattatatctgtacatttattttctatttaaatcaggccccatgctgttaaattctaccttttgttttcctaagaaaacaaccaagtaacttcatactaagaaattccctattattcctctttgaatcatccatcttgaaggtaagaagttgttcaggttgaggaaacaagcccaacccctttttataattttggcactaaaaatcaattttatggtgcattttattaagagcgaaaacacagccatcgcttaagcataaaagctcatatttaactcattattttgctaaacatatataagacaaatatggaa

SEQ ID NO: 325479 - DNA, 1193 bp, Homo Sapiens
  misc_feature (1181)..(1181): n is a, c, g, or t
gaaactaaaaatattaacatctattaaaaaattgagcatttttctacgctcgtgtgtcttttacaacataaagaaaaagtaaaaggcagggagggaagtgagagacagattttaaatcatgttcagaactgttgttccagaatttactacggcaatccctccaactggactgaaaaagagaaagttcttggcaaaaaggagctgattctttgaacaaatgttgtagtaatctgtttaagaattatgcttattgtttcaaaatcccaactagggagaacatggtgtatatcttgaaaattgtttgtgttggacaaaactaggaatccaaattttaacattttataccacaacacaagttctatttgggaaattgaacttttattctatagcaaccatttttttcaaatctaaagtaaccatgccttctataataacaaatgttgctattatcatgggacttttaaaattacatttattgcatgggattgtttttatagcatgagaatgttctgttgtggaattatatcatggtcagtctaaatagaaaaagcaaaatttctttgaaaacctaaacattgctatattggtcactatcaaacatacaattttctaataattgtgtagcggtctaagtggaagagattgcattatcttgtgcaggacgaggagaggacatgcagtgggcacagaaagtcaatggaacagatgccactgtggcaccaagactgtaatgactctgtgtggtaggtagttttaaaggactgcatgccttggaaatgattcttcacttggagaacatacttgcctctagatatgtttgtcactctaagcatcctgaatataacaatagagaaagataagtcaaccaacagatttagggatgtgtttcttcagcacattttggtcattttgatgccaagtttgacatactgtttaattcgggcagcacctttgctcctttaccaggtatgtatcactttgttactccaggtgccattcttggtgatgacagaatgtttatcactatcgttgttagcaagaggaacgctttcaatataggaatttaacatcttcccatgagtataaatgaatttaagacatttgaatcaaaacttcagtagagggaggttttagaattcataaaactggtttaaggaaattctttttacttttcccaaggntaatctttttaa

SEQ ID NO: 325480 - DNA, 907 bp, Homo Sapiens
  misc_feature (612)..(612): n is a, c, g, or t
gctgacttattgtgtaacctaacctatcgagatactagaagtattatgctcacatgtttcacctgtgggtacaaggaagcctggtgaagtctggtcctgagagcctggatttgttcacatattcagatgtcgactgggctttataacaggtttccttatgtgcctcatattggctccaggttcactgggtttaaaaggagccaaagcaccataaggttttggcaaagggaagagtggcatctgcttctgggatgtaggcattcggacgctgctctgcagttgtgtaaacaccattgggcagctggcgattatctgcttccaagaactcctgagacttttcagcgatggccaaggcgtgcatttcttcatctcgaaggactttcaaccattctttctcaatttccttattgagtggcagacctttttctatcctggaattgcaagtgaagatgaagtcttctttctccctgacttccttttggagttcaatggttagggcttgtttcatggacagctcagcaaccaagagccatcattttctcagttgcatttttgatccttctttgatagccattcatcttcttggctaaagagcagtgtgtcctgcttgcnagccctgagttttgctgcagagcctgtctgtgagcctggagacctgctcatagatgaaatccttctccagcagcttctcctccttcttggccagttgtagttccagcttgtctaatttttggatcatttctttttcggtcagatctttccctggaaggaagcgagctctattctcaccatcaggctttacgaactgtttctccaggtctttaattctgtctgtacactgtgaaaactgaatttggagcacagctaggtcggcatccagggacctcttggctggcagtaatttctg

SEQ ID NO: 325481 - DNA, 466 bp, Homo Sapiens
ttgaatatatttcccaccttttatttccatcggtatcatccgtttaaaaagaatgacaagaagattcccatcagtccaaactggaccacccacactttgaaaaagttggagcatttcagccggctccgcatgatccatcctgtcttcagtcagtgccttctggaagggagggaaagtcttggatgcacctggcactcaatccactcggcacctggctgctgctgcggtcctggggctggaaggaactcccactgggcacacatctacagaggagtgcgtggcgcagtgaggacggttactgctggagccgacacacagcgaactacatacttttagaaagagcctctgtcacatggctagaacaacaacaacaacaaagaaaacccacaaaaaacctggagaaaatatatctaaatctctgataggtctcttagctagcagtgagttcagtatgacagcacagagt

SEQ ID NO: 325482 - DNA, 961 bp, Homo Sapiens
ttgcaaccatttatatacagtgttacataacagctctggagtacagtacatgcagcagaatatacctgttgaatataaaatactttccttaaaatcttcatcattggaattccttgaagtctaaatcatagaatgcccattactttgagaaaatgggttgaggagtacaaatgtctgcatatgttggccactgaaataatccaaggctaactggaataatattcatagcacaccaggagtgcataaataatttacttacattattaaaatacaacccataaaattcaagttcaagatcttataggattgtctatgtaaatcctttaagtggttgcctggaaatgcattgtttcttctttctcttctcttctttttaaagtcctatataaaatcttcagctgaagtttatttcttcatcaaacaaaaggaccacctttatttgtgtctgctgcctcttctcttcattgcagcagtgcactgtggacagtaccatttgccttttggtgcctctgtcaatccaacgcagccataatggaaccattctatagggcaatcttggttatcacatcccaccatctcaccataagatacctgattacaaatgcagtatcgaggttcatttgggtcgtaagtccaatcaacctgactatttgaatcatattctggcactacagttgtttgttgagagatttcttgtacaacagttgatgatgaagaacacgatgataaggaagaagaggaggaggaagatgatgactgctggcttgaagacttgttgttgtttttgctctttcgaccactccgtgagtcggctgctgatgaactggcattctgtgttaatgttgtcataagtgccgaagatgatgaatagccactgtttcctggccattgaaaattcttttcccaactgaaagtcattattcttaaatgcttcataactggcttttaaacttgatgttct

SEQ ID NO: 325483 - DNA, 609 bp, Homo Sapiens
gtttctcacttggccgactttatttttcaggaaaaacagaaaaacaaatgtacctcttgggttggaaaggacccattgacaacatggcacagacgtgagccataaatacgcacatacattcaagtatgcgggggggcgctacgtcctggagaccctgtgttcgggcacctgtccctgctctcgggtgcggccctgcccctccagaagcaggtcacctcaccaggcccagatctgcctctccatcctagcctgagagtggggcctagaggcaccctcctagatggaactgccagccctgggggctgtggggccatggtagggcccttggcagtcttgggaggtgccaaggctgggtctggacaggaggaggcaacctcaggcccctggggcccatctcaggctccagcaggtcctgccagtcctaggatcccgaacttggtgccctgtgagccccctccccatggagagagcagtgatgtcatctcccccagctggtgggaggaggggggttctcatatggggggtctgcagggttgagctgagtgaagcctccccagcttccactgaccacccccccacttgggtgagggtcacagagcctggtgctac

SEQ ID NO: 325484 - DNA, 679 bp, Homo Sapiens
ttagtgtgtattaaaatgaatttatttacacagtaacatgatgccacggagtacacagcaaagtaccacagcaaaccaaagggtggcaccactgctggcagagaggacctttcaatgatagatttatacaactttacaatatgtaagtagaggggtgaagctccggaaagagcaaaaacaagattttcaaatacagagtgtgggcagggccagagagaattaaagagagattggaatgaggactgtcatgattcaaatcaccaagtagaatgaaatcttgcttctgtatttgcctcatgccaaaatgccctgcatatcctcaacagaaaatcccaacccagtgtgttcatacatcacactctttagttctaactggtaaaggaagggataaccaagtagtatttggagcaagttcctgaaacagtgtggtttaacctttcaaaaatgaaccctactctgtacttctgctaggttaaaaaatgtccgacctcttttgattccctgaaactttcttgatttaaaaaacaaaaccaaaccaaacctaaccatgggggtgaatgggacacgtcaagataaaaagctggaataaacccagagactttctggagtgggaaacaatgggatgttgggaatgcaggcccttgcagcccacctaggtggggaaagccggacgcgtggg

SEQ ID NO: 325485 - DNA, 1161 bp, Homo Sapiens
  misc_feature (47)..(47): n is a, c, g, or t
  misc_feature (168)..(168): n is a, c, g, or t
  misc_feature (907)..(907): n is a, c, g, or t
  misc_feature (1110)..(1110): n is a, c, g, or t
tcagaagtctccccaccaaagctccagctgccctggactctacacanagcacctgaagcctctgctgggaatggggccctgacagagctgcaatgcactctgaggcttctttaacacacgaaggtgagtgtaaaatcccaacgggaagcgttcagctgtgcactcccnaaccaccccagcacgcccctgcagaactgctggtcctgtccgtccttggagtggtcgctccctcattctcatctggaaggtgccacagaaaaggctgacaatgtattatcactaggatagaccctagataatctttctgatatacaagatagacaccacctgttccctcatttgtcaatatggaagaaaccccactttatacattttatacagaaagtggacactgccatacattcatgcatggtcagctctgagccctcaggaatagaagggccttccatttaaaacagcttacacctggagacaacaacaccaagaaacatgcaaacactacagagaatctgtatgtgaagaagtcatattttatattgatgagggtgctgttagaaaatgttgatggatggcttcggtcactcatgctagtctaaccagaggggcctgtgacggtgtctgcttctctttcaggattcccagttgtttctgtgtcaggcactaagcaatctggcggcttttggtccaaatgggtattttagttgtctttttgcaccttttaatccctcttcgaagagtcaagttcaaatgctggaaaccgtgatgtctctggtcccaggacatcagagagaaagtgaatagcgccagccatgccttcaaagagcgaatagggtctgtcaggaatacggcacccgtgtgctccgtaatctagacaccactctgcaaacttgcaagctcggtagaggtnacttcttatcctgcgtgagacggtaaagggacaggaaggaatagccgttgccagcagtcccatggcatatcccgtagcccttccgcagcaaacctcgctgccaaatcacatcgctacactccatggcctctttcaagtacttctcctccttaaagaccttgtacgcctgcatgagcatgtggatgacccccggggcgccgtgnaccagtgcaccagccggtctgtttcattgcttaatgatgatgggtaattcc

SEQ ID NO: 325486 - DNA, 726 bp, Homo Sapiens
  misc_feature (70)..(70): n is a, c, g, or t
  misc_feature (75)..(75): n is a, c, g, or t
  misc_feature (110)..(110): n is a, c, g, or t
  misc_feature (131)..(131): n is a, c, g, or t
  misc_feature (222)..(222): n is a, c, g, or t
  misc_feature (225)..(225): n is a, c, g, or t
  misc_feature (452)..(452): n is a, c, g, or t
  misc_feature (507)..(507): n is a, c, g, or t
aatgtgtgtgtcccagaaatgcctggtggcctgcgggggtctttaaccaaggggatgctggcttgaaccncaggncctacctttcccctaagaagccagccaggagctgnagtgaggcacagggatgcccncatccccttctggccagcgagctgctcctatgatgtcaccctctgtccaccgtgacaaagacagacacatcctgcagaagaatctgggtcncancaggtgacctgcctccagcaggaagcaaaaccaaggcggtggaggcaggagagcacggagacagacgccccgaagctctctccctgttcctccccaaacgctaggcgatgggaaagacggggacaatgcagagtaaatgtgtgccgtgacacccagtatgcgacaccaagcccaaagaatgtctaagttggggatttccacggaggccccacggccaacgccccagncccttggggtcattcccgtctgtccagccggtcaagagccaaggatcaagtctcntggctttgcaccaagggctgctgtccccatcacacgggtgtctgcgctcatcgctgggcaggggtggctgccccacgtccccattctggacaagccaacgccctcccacccagtgctgagagctgcatgcgagtcccatgagcaccctctgtgcacacaccttccagaacttagagccccaacaaaagcgggagtgggggcagcatggtcccaacaatc

SEQ ID NO: 325487 - DNA, 849 bp, Homo Sapiens
tgggggccgttgcagggcaagaagttgctttttgagatctgtcctcgcctgaagcctgaatgcttacatgttcccaagaatccatgtatgggaacaaaagtccctcatattcagtttcactttgaaaatacgataaacacggttacattctgcaattgttattaagttgcttatacaaacttaaagtcaagagcataacttcaggatctgcactttttatgtcaagcgctttcactaagcagtttagggcctcctggatttttccacactcttattagttcttgttccacgctttacaagagtctcatagtcaatttcgtagcctctgccgccttatcctggtgtagatccaaccaagctgttcaccagacaaaggctcaggggcaccaagagaggtctcttgagctagagcactaggcttagacgtcattacaccagctggacttgttgttctgtacagacagtgtttctccaggaaggatcctcttctgtatacttggaggcttcgccactgctttcctccaccccttcttctggataatcgtgtcaggaccctttgcttcgctgctgtcgtcaagtctcttcctccatgtcctccacgtggtctaaataccatacttaataagagacctcctagaacgccagagatcttctagagttcatagacttatttacactactgggtatttgagatgcaaaagaaccttcctggtggactgatgtcatttttcgggagttgaagcatcatattgtttcacagatgagaattgaaagagagatgtgttgaatggatcttatgcgttgaggtatcatttcaaagaatcatcttcatcattcgccatctgaaac

SEQ ID NO: 325488 - DNA, 1455 bp, Homo Sapiens
taacaatttactttttataaaaagacaaatgtacatatttacacacgtccttatgtgttcacacatgacttaatggttagatgacatttccaattttaagtcataccaaggcgctcacacttccctccctgggcctgttgagggctgctggggcttgagggggtggtgggcgccgagcaaggcactgtataaataaatgcaaaggccaagagctcgggggaaatgttagtgtacacctctgatcagaaatgtggcaagatccacacgaaaaagtgccaagtttttttcccaagcccctcagccaaagcagggagcagggtagagctcctctgaggctgagggagcatctgccccgaaggaccccactttccttcacatttcactggctttggaacagtccccagggctcagctgaaaagggggtagttctttgggaacgagattcatttagtgcaatgtttctcttagtgcagagccagcctgggattggtgttatgctttttctggggtcactggtctgttcccctaggagccagccagtgacagcgagaccctctccaggcagctgggctcagaggaaaaagccagacactgactcctgtccaagtccctgacctgatacactggtctcagaacctcatcttcccaggaggcagggccagctttacaccacaagaaaaacccagacactggcctgccaggccctgagaggtcaatgacccaaggagggaggccccatccccacttggcagtggggtcacactttggctgttgaggggcccacagaagtccagcttctctgcaccatatccaccatgatgccaggtcctgcttgcctagaggaataagaggggcccaggggccctgctacggtgcacagggaatggcctggatggagggcaaccggactggggtcagcaggctgtccagccaggtggcatccatgttcttcagatctgtgaagacacgctgtagactcagcccaatatcccccctgggctgtcaatttctggctcctccgttacagctaaagtctccatagacagaggtgggctggactccaggttcattgagtaggtaccccttcccatccacgtttgttggctgccactccgactgctccaagagcttcatgatgtcctcaggtaatttcccttcctcatcctcatctgttgtagcttcagaggtggagggcatgggtgacacctggaagttgtacagatcactggtgctgtccggcacaacttccactgggatgtgccagtcggggagagtgctgctgacagcacatggcgacagtgctggagtcagggcctgctccacctccaagtcctgcatgtagcctggaactgtgtagctgctgtggtcatcaggcagagtggagctgctgagtccatcagagaaggtatcagggctggaatccccacatgacttcctcttggccttgctcttagc

SEQ ID NO: 325489 - DNA, 911 bp, Homo Sapiens
gatagtctatctgtgttagtatttggtgctatctatgtccagccaagttatctaccctcaaattctgactaatcatgtttgtgctttgggtatttaaaattacatacatatatattctttttgccaaaaacaaaagtcttgcttcttgtcaaatgattgctaaagtagatcttacattttttgttattatgtatgtatttatacacatccccaacacacttagtgatttctgttatttcctagggagcacagctttaaggctatgagatacaactaaaaggagcccatctatttggttttccagccaattattgtactcacatttcaggggagaatctgaaattcctgtcatgtttacagcaacaatctatcattcctggctagctctcagccttctctctccttccatagggttagaattatgtcatttttggttacttagtgggccacgtctaatttctgagaaagactggttacatttatgtgggcatctcaggtatcattaaggaaaagccagagcaggggtgagcagaggtcaaaaccacagacgcagcagggccatttgccgcctttggccgggatcacaaccactgcagtctcccagcaggtaggccttgccaatgcctaaggctccccatccaatctagacagaggggcgctcagagcagactttgccgtagcccatgtctggtgagcacaacagggaatgaattgggcactccaatcccccgtctctctggcccagccctgaactaagatgagctgcattacatggagcccattttaaaacctctttccttatgactttgttactcaagtccagaagtctctgtgcacttctgctagataaggagtgtaagccctgaccccagtactggcaagcacgctgggcctccccacacgggaaactg

SEQ ID NO: 325490 - DNA, 1247 bp, Homo Sapiens
  misc_feature (255)..(255): n is a, c, g, or t
aagcaggccgtaccggtccggaattcccgggatatcgtcgacccacgcgtcgagttctcagggccccggggccctcttcgtgcagagccacctggaggacctgaagaagacactgctggactcgctgcggagcacctcctcacccgccaagaggccccgtttgaagtgcctcctacacatcgtgaggaagctctcagctgaacacaaggagttcatcactgccctcatcccagaggtgatcctgtgcaccaaggnaggtgtcggtgggcgcacggaagaacgcttttgcactgctcgtggagatgggccatgctttcctaaggtttggctcgaaccaggaagaggccctgcagtgctacctcgtcctgatctaccctggcctggtgggctgcggtgaccatggtcagctgcagcatcctggccctgacccacctccttttcgagtttaaaggtctgatggggaccagtacagtggagcagctgctggagaatgtgtgcctgcttctggcctcccgcacccgtgacgtggtcaagtctgcactgggcttcatcaaggtggcagtgactgtcatggacgtggcgcaacctggccaaacatgtgcagctggtgatggaagccattgggaagctttcagatgacatgcggcggcacttcctgcatgaagcttcggaacctgttcaccaagttcatccgcaagtttggatttgagctggtgaacaaggctgttgcccgaggagtaccacagagtcctggtcaaacatcctggaaagctgaggcccgggccaagaaggcaccgagccctgagccaggctgccgtggaggacggacgaagaggaggagcgaggaggaggagcccgaccagggccaaaggtgacagcattgacggcgatctagcttgactcagaggaagaaggaggacaatgaggagcgacggaaagcacgcccgaggccaaggagcagcagcaagcctgacccgacagaagcacgccgggccattgcctgatacgcaggtccgatgagtagaaccatagccacccattaaaacattcccttgtatattcccctatggatgtaccacaaatgacaatatcctggcaccaacgtcaatgcctaatgtccaatggcccggtagcctcgtatgaaacgagacgcacaggcttaaaatcgatcgatcatcatgattcatcgatctgtatcataaagggaggcacgtcaagacgaagcactagattgttagtgcacacat

SEQ ID NO: 325491 - DNA, 873 bp, Homo Sapiens
  misc_feature (229)..(229): n is a, c, g, or t
  misc_feature (236)..(276): n is a, c, g, or t
  misc_feature (761)..(769): n is a, c, g, or t
cctctcaagcgtttcagggtaacatgctgcaagtcagagacggtaactagtggattccgtgcttttcggcgatggtataagcttcctcttgttcatctaaactctgtgtcttctttaattttacagtcagcagatctttaactgttatctgcatgggtccatctttttttaatggtccagcctgaagtgctttagcgagactgggttttctgagcaacacaggtgctanctgtgtnnnnnnnnnnnnnnnnnnnnnnnnnnnnnnnnnnnnnnnnnaatggctggctggctgtggcagtgtgggaggaagcacagctttggagtctccaggggtgatcagaacgcaggcaggcacatttgtaagtttaccactcatgtgacatgtttgaccacagcttggacaggaagaactttctgagatggtcttcagtgcttcctggagcttgcataatttactttcccaaatgcaaaactgttgttttacactgtaaagttctcggtggcagatacgagatggaaagatggtgtctttcaatacttctaaactctgggttatgcagttctggcaccagctgtatatagaccatactctatttgtccaaagttttattgcatctctgatgttaggaaaattgaagttccaggatgatgttagccagcttctgctttgagatatatctattgaagaaataccgactctttctggtgagggtggtggaggaggaggtgtaattagcttggactgaaagtgagaggcttcnnnnnnnnngaataatctttcggctttggcttttagctttcgtcttcgttgtttgaacttgggcatgattttagtctaagagccgggggagtcgatggagtccgggctgtggc

SEQ ID NO: 325492 - DNA, 437 bp, Homo Sapiens
  misc_feature (227)..(274): n is a, c, g, or t
  misc_feature (358)..(358): n is a, c, g, or t
cctctcaagcgtttcagggtaacatgctgcaagtcagagacggtaactagtggattccgtgctttcggcgatggtataagcttcctcttttcatctaaactctgtgtcttctttaattttacagtcagcagatctttaactgttatctgcatgggtccatctttttttaatggtccagcctgaagtgctttagcgagactgggttttctgagcaacacaggtgctannnnnnnnnnnnnnnnnnnnnnnnnnnnnnnnnnnnnnnnnnnnnnnnaaatggctggctggctgtggcagtgtgggaggaagcacagctttggagtctccaggggtgatcagaacgcaggcaggcacattntgtaagtttaccacttcatgtgacatgtttgaccacagcttggacaggaagaactttctgagatggtcttcagtgctta

SEQ ID NO: 325493 - DNA, 1037 bp, Homo Sapiens
tcgagcttagatcacgaaggctccttctcacctccggacgtgagaattacaggcttggatctcaaaccgccgcggtgtcctcatgacttctcttgtggaccatgtccgtgatcttttttgcctgcgtggtacgggtaagggatggactgcccctctcagcctctactgatttttaccacacccaagattttttggaatggaggagacggctcaagagtttagccttgcgactggcccagtatccaggtcgaggttctgcagaaggttgtgactttagtatacatttttcttctttcggggacgtggcctgcatggctatctgctcctgccagtgtccagcagccatggccttctgcttcctgggagaccctgtggtgggaattcacagcttcctatgacactacctgcattggcctagcctccaggccatacgcttttcttgagtttgacagcatcattcagaaagtgaagtggcattttaactatgtaagttcctctcagatggagtgcagcttggaaaaaattcaggaggagctcaagttgcagcctccagcggttctcactctgtgaggacacagactgtggcaaatggggtgactgaatggtcacacaccgatgcacttggagcctgctcctaatttccgaactggaaccagtgacagccctgggtatcctctccgctcattctcaacatcatgtgtgctgccctgaatctcattcgaggagttcaccttgcagaacattctttacaggttgcccatgaggaaattggaaacattctggctttttcttgttcctttcgtagcctgcattttccaggatccaaggagctggtactgctggttggaccaaacctcgtgagccaagcaccctgacccaaattgaagggcagaagctcttgattctcccatccggggagcagtgatgtcaaactttctgctgctggggaaattcttcatcaagcagggagcctgtggcaaaagggcattgtccagtgaaatctgggaattggctggattcggaaccattcttggcca

SEQ ID NO: 325494 - DNA, 896 bp, Homo Sapiens
  misc_feature (20)..(20): n is a, c, g, or t
agtgctggggatgaggacanaagcctacgcccagtcccagctctgacactgccttgctgagtcacccatcagccctaacgcttcctggacgaaacaagcagatagggtgcccccagagaggagctgtgtcactaagggccaggacaccccatctctgggtcacacttggccacggcttcatttttggcttcagtttgtttactgaacagaagggagaggggccctgtgagacagaggacactgactcaggtctggtgagtggccctcaactgtatagagtccatggctgggggaccaagtggcactgagactcgcccaaagtcacatcacagagctggggtgccttgctgactccctggccccaatctgcttttccatttgtcgaacgcacactggcacactggctgcagcagctgcgggggtcggggggttccagggctggctgtcacttggcctcctgcagaggtaagctgagggctatgttggacccgccagaagtcaggtgacagctgctttccctttcaggatcgggagggagtcacctgagggtatattctcagtgggctaaacatgacatgcgagagcccagctctccaagcggccccttcctccttctcacaccaaggcactttcagaagccgctggattccgactggggctgtgccacttcatcgccggtgcctctgctgtgccggctctcctcttctgagggtgtggaagcaaacccaggtcaagctgtgaggagtgcctagcacctggccagagccaggtacatgccagctatgatgatgatgagcccaactgcaacaggagacacacttagtgcgacatgcagcggtagcctggcgttgggcacctccccatgctccgagaattctatttggagaagcccttct

SEQ ID NO: 325495 - DNA, 958 bp, Homo Sapiens
  misc_feature (651)..(651): n is a, c, g, or t
  misc_feature (710)..(710): n is a, c, g, or t
gattggagatgattaaagatgagtcctccaaatacctatgactggattaaggtgtggctgtcattaaatatacctacgtgtaatttggatgtcgagaaaagtgtgcctgttggtgtgatattaatactgctggtgactttattggttttttgtttagttgccccgttaattaaccttgagttcggtttatcctgcagtggttgctgaagggctggcaggtctcacagggctggctacacgctttgcactgtaaggacttcctaagtgaaatgtggattttattatcctcagtagttatcacacttgagctattgctgtttgaacgctgaaactgccatgatgactgccggtctggggagactctgaatatcgcatgcttggcactgatttctgttggttctggggagcgtccctgctcaggagagctagctgaaccagtcacagccaaaacctgaataggggacattgtcctttctgggagttagagaaccacaagactctgggggtctgtgctctgggcaaagggttgccatgggtaattgggggacatgccttgttctaaattcatgagggtcttcggtagaggttttgggactttactgggtgttatgggagggcgttttgggagggatgggttatccttttgctttnggcgtgccacaagttcggtatcactgcagtactcgtgtaaggagtgaggactctctgtnggttggacttgtgatttcaagagtggctgtgttttgtacatggtctggagtaacctttatatgaagtggctgcccaggtgtgtggcttaggactagatctccaggttgcacaaagttggcattgggtttagtttgcatttttccattctgaagatggccctccttggatttcatccagggaatccatagctttctgttaacaggacatggagtagactggctgcatttgaaggacagcacagatccct

SEQ ID NO: 325496 - DNA, 1121 bp, Homo Sapiens
aaagggccaagctttattgttctttagttctgtccccctcctgctgccccaggagtagggctggctgaggctctgggcccagatcctgcgtcgccttgcccttcctagcacattctggttttcagcctgggccctatataagtcattgatctcctgtacgtggaagaggtagaatgcacctgcccacagcaccagccctacactgggggtccagagcagtatggcagcttccccggcccctcctccagccgccagacacacagcagtgccaggagaagcagccccaggccaatcacatagctagcgaaggtggcccaccagcgagcctgagccatgcccagacccagctccgtccaggcctcctttagcacacacatcaacggcgacctctctgctggtccgtgggtagagctggggttctgctgtggggggctgtgcctcacaaacagagtagccatcagggcttcatgatcagagaggggggtgccactgtgagggtcaaagcctgtagtggtttcaaactcttacaggagatgtaaaacccagaaactgccttgtaaagcacgtagtcaatgcggacaccaaagggaaatggcttcagctcctgctggctgacgtagcagttcttgggtaccattgtgttgccttcctcagagcccttgaagtcccgagtttcaagataggcatcatgaagccctgtccactccttcagcaggcagcagcccaggtcttctgggtgcatgttgaggtctccacacaacagaaccacgtctgccttcttggatgtgtggtggatgaactgggccaattcccaagcttgggccacacgatgtgctaggtagatgtccttctgtcgattgtattcggcatggagatgggtcacataggcgttgagcaccatgccacttagatggagcaccagcagccccacagccttcccactgaaccagtcaccatgatggatcatgtaggggtagccattgagagtgtagatgtgctgggtaagctcctggattggatgtttggagaagacacagaggccactgccaatgattccgctccggaagtggtgtgcagctgggtaggtaggtgacagcttctgtctcaggtactggaagtcc

SEQ ID NO: 325497 - DNA, 790 bp, Homo Sapiens
aatttattagagatatttcttgtgtttaaccacaaaaaaaagcactctgttaaaatgttttaatatgtattgaatttctttcataaacttttcatttctgttgataaatgggaatcccttaccaacctttgttttttaaaagtctcatagaccaaaaaaaatctgttgcagcatttaattagccacagatacatttggctgcatttaccagttacatttttccattggttttggcttctaataaataacatatctgccattctttaaaaatgattttaaagaagataaatatattgtaatttcacatgctatagctttattctgtaagattaaaaattgtgactagtataattgtagctataatgtgagtggcatgttacaatgtaactctttatgagaaataaaatgtatctctgctttgtctgtccagatctttaggatttttagatgccttgggactgtccttggtgaatgatattcttcatatgatcatatgtaattttgaattcgttggaagtacacgctgctgagcatgtttattcacagtgctttataccgggtgttgcatcagtaatcattttcataagaacatttaaacagcatgaacatcatcatccacttaaatagttaaactttcttttaacaattggaatgcaactgtaggttttaacaatgtttattgtctttaagtggttacttgtttttccttaatactttctgttaaccttaattattactcctgttgccagtgttactgtatgtactcacgaagtgctttccccctaagatc

SEQ ID NO: 325498 - DNA, 859 bp, Homo Sapiens
tggatgaactgagctcaccactgtcctgctatcagtcccaggccccaacttcactgtgatctcagctttgggcccaacccattcccgtggacttctggcaactgccagggacagcaagtgggagttgagcttgaggactatttggacgtgaggcttcctgggactgggctagggcaggcttgggcagaggtggaggtgtagaaacagcagatgggctctggagcaaatcttcagttggtggcacaggcacagccacagggggtgagctccatgcctccttgttcaccagcagaacctcaatgggaccactcacactcttcaggtgaatctggtacttcttctgcccattgagaccctctgggatgggcacctccaggctggtgcctgatggggcccggatggccaagagggtatctccagcaaagcatctgcagatgtcctcatgagtgacgtaggccaaacagctgttctgcacgtcctctgtgacgttccggatgctctgctgcacccacaccttgtgctggtctagttcttgctcccgctgctgcagctcctcgatctctgccttgagctcaatcagtttgtcagcaatctcccgggtattgcagccaggccccacacccttccactggatgctgttcttggactttttctcgattagcccgataccttccaaaacattggtaatgtcgtaaatccgccgcttctggcgtacagctagggtgtcagctgccagcttgaggtcaagcacgccgtccttggcctcctgcagaagggacacgaacttggtggtgagcagtcccaggctcttttcgtgccggcttggagtgcccgggggcggcggcgcctgtggcccggc

SEQ ID NO: 325499 - DNA, 503 bp, Homo Sapiens
  misc_feature (63)..(63): n is a, c, g, or t
  misc_feature (150)..(150): n is a, c, g, or t
  misc_feature (399)..(399): n is a, c, g, or t
ccatggcaaaacagcccgtttatcaagagttgcaggataaaaatagtctttgcagccagacantccctccaggcatgtcttctgacctgagaggggccagtgtcctgtacagtagaagccggggtttccgtgctgcacccgcagcaccangggcacgcaccgtggggaggcagccttgggctttgcccgcgacagggcccctgcatgctgagcaacagcctcacatgagcaggcagcacggcctcctctccacgggagcctcccaccgccggggctgtgagcttgagcaggggtgggtccccgcctgccctgaagccacagtcaggctggggggtcaccgtgtcaccaggcaggccaggctcagctgtctcagggctctcgggcccctcaggtgggggntcgctgcagcttggcagcaggtcgctggcgcttcaggtcagccagggtgtggtgggccttgtcgtggaccagggtgtggggggtggtgctgtccagggggctca

SEQ ID NO: 325500 - DNA, 735 bp, Homo Sapiens
  misc_feature (204)..(232): n is a, c, g, or t
ttttataatattacaaatacaacaattatttattgaactaagagtatataaaattttttgagactagcagtatatttgtataatattacaaatacaacaattatttataaaagctagtcaaattaatggcttagaaagtagctgtaaactttgtgttttgaaattgcttgtttaaactgcagaaattatgagtaagataagtcnnnnnnnnnnnnnnnnnnnnnnnnnnnnnggaagtttattaaagcccttcatatacacatactttttaaaaaaagattcttaataaagaaattattggtttgtctggttaaagtccatatagaatgctgagaaataatttataaaataagaactatagaaatttgttctcagctgaaaagttggcagctgctctgtttctttaaaaaagtacaacatgaaaatttaattacattagccttaatattacttgactgaatttctactatttattcacttgtgtttgagattcacccagctattctaatgatagaaataacaaagtggagaaatgactaaagttgacttaagttaagaattggagtgggaattttgaaatgccatgtcctatatattctggcatatttgttggcacatttgcaagtatgttgatcccagcattgtttatatctgttggaataataactaaggaaaaatcgaaaattgtatatagatgttataaagataatatctgagtaagtatataatagatat

SEQ ID NO: 325501 - DNA, 786 bp, Homo Sapiens
atgccatcatcctgtgtgtgcgccagatctgcgctgttatcctggagtccccacccaaaggagccactatcccctaccatccgagcctctccctaggtactgttcttctctctgccaaccaggcttctctgtccaggtcagtatggggctgtgaccccagctgaggtcaccaagctccagcagctctcaagccatgcggtcccctttgccacacccagcgtggtgccaggactggatcccggcacacagaccagctcacaggagttcttggttcccaacgatttgattggctgtgtgatcgggcgccagtgcagcaagatcagcgagatccggcagatgtcaggtgcacatatcaagatcgggaaccaagcagagggcgctggggagcggcatgtcaccatcactggctctccggtctccatcgccctggcccagtacctcatcactgcctgtctagagacggccaagtctacctctggggggacgcccagctcggcccccgcagacctgcactgcccccttctcgaccacccctgacggacctgcccacaggtcccacacatggacctgctgggcaacaccctatgccatctccctctccaacttcatcggcctcaagcccatgcccattcttggcttatacacactgcttccaccagggaccgcacacacgggcttgagcggccatacacatgaccagagatgggaagcacgctacatgcggaagcaagaaggctgaagccggaagaaaattctaccacctacagaaagaccagactgaaggta

SEQ ID NO: 325502 - DNA, 921 bp, Homo Sapiens
ctgataaccctgtaatgctgtaggtgaaggttcaggcagatgtcagcataccgcagtgagactttctgcagtgaactttatcgatccctgagcagcggctcggatgacgtgacaccagcctggtcttgtgctgtctggacagtgtagctactggggctgcccctgggagctggaggcaagcccagaccactaatttcctctgaaagctgcctacacccatagccgtattggccaggaccagtcccaggggccagaggcggattattgcctccaggagcctggtctgcagcggcgaggtgctcagggaacagggagcttgagagaagtgtttttcttccacaccatccagctctttagcagcaaggcaggccattctgattctccacttctgccatgcacgcttgatgactgtggcagctgcatgcagcctctggatgtgtttccgagttaaccaggaacgaatggctgcctggatgagcatgacggcccgccactgccgctcctgctctcggtgccggtgtcgcctccagccaccctggatgcagcgggcacactgctccagcacccgggcacgcccacattccagaagctccagcatagagtcagtcatgaacaccttggtcctgccacagtgcatgggggctggcatggcctcagccgagtcaccagttatggctgctgcctgagttaggaccggcagagatgtggagaatgtcctggatgagaggttcaagcgtggcttcctcgctgtgtggacaccattcagggagccctttggcaggatatgggctgtcggggccagaggatgtgcaaggatgaagccttcttagtaacttgtatcgttctacaaagtttcggtgagagacccggatggggaagccagcagcactgatatggatggtctccacgaggccacaggcc

SEQ ID NO: 325503 - DNA, 1408 bp, Homo Sapiens
  misc_feature (546)..(656): n is a, c, g, or t
  misc_feature (797)..(844): n is a, c, g, or t
aaagtaagcttgaactcccaattgatgtgaccacactcttcttaattttgttcacagtaaaaacacttttttgagttattaggcttacccctagcttttaacctttgcatttcatatatgttagatgtctcagcaagaatatctggtctcccctaatttttattcccagtgccgatgttcaaaataaactttctccagtctgggaaccttttttacttccccatatttgttattatttagaatggttcatacgtctgctttgtttgcatactggtcttcagattatgagactcgatgataacagtatggtactcgcttctgtgacaaatatcgtgccttaacaatgtgggctgtccttttccactgaagaaggaaagacgttttgatctagaaatagcgttgtgatttccttgctgttggttttacactgccttccacattgcaacagcaagttgatttcttgtgatcccagaattttctaagaggatgagttgaatctatagcagcattgtcagtacagaccagtggttctcaaactttaaaatnnnnnnnnnnnnnnnnnnnnnnnnnnnnnnnnnnnnnnnnnnnnnnnnnnnnnnnnnnnnnnnnnnnnnnnnnnnnnnnnnnnnnnnnnnnnnnnnnnnnnnnnnnnnnnnggtgagctgggggcatacagggaggaacactgccctggactatccattgcatttttgcctctaaacaactacagaattttctagggttttaaattatgtaaaatgtttacttattctgagcttagagagaatggggagggnnnnnnnnnnnnnnnnnnnnnnnnnnnnnnnnnnnnnnnnnnnnnnnnagattataggtattaggttagttttgtttttccacttatcttgagttcactttgatgttaaatctattgctacttcagttgtaaaacccagcccaaaagtttctggatgaaggtcaagtttgaccttttaggagttattgtacataaaggcttcatccacgaaccatccagcgcacagaagcaagtgcaaaaatgacacaagcacaactctccagacgtggctccttctcctttctcagtgcagactctcactgaaagctgctattttcatcctccttgtggttgcttttcttgtttctcttccattgtacatgtgggttatataccatatgttaaatatgcaataaagtgtttacaggatgcccttctgaagggtagtcctttgtaaagctgtacagactttgcagtttaagcacaatgtgcacatgttagttttatatacagcaaaacttgattttttgcagatggaaaggtattttgtttctatacaaagtaaatggattgtttgtgcttaatgtaaagccgctttataaaactgtaaaataaagtttttttcttaaaaag

SEQ ID NO: 325504 - DNA, 943 bp, Homo Sapiens
ggctaaaaggctctccaatggggttagtaccatgttgttccgtggagaaaccggattggtccagatgtttccaacgtgccggaactctgaaccgacggcgcccaccatctccaataattggtttgaagtccattcttggaattgcaattgcacaaacgtcctgcgagatacatcactgctactgctatgatctctggttcccactgcagtgacaaggtggtgcagagactgtcatttacaaatgtccatgccatttgaacccacttttgaattttgtttttatcacctttgagttgctttgcatattttagtaggaactggtatggatgttctacctgtaaatcaaacttgatggtctgcagtaagattctctccagaaccattacttcctcctttgggtcatctccaaactggccaaattgtacatcatttaataaactacgagctgttttgatgatatctttacatttttttggtgtttcttctactttcccagccagaaagaggcaacaggctcctgtcacatatcttgggaattgcttgaaggaatgaaacatatagaagcgatgaaaataaattattccagttgccagggtatcatagtgtagccccaaacgtgtgcccacatcaaagatgaaccgagcgccctctcggcggtaccgggcctcggtggctggatcaagtccttcaagttgtgagggtgtatgagccaagtctttcttatcccagtaccacatggctttgtgtggtccaggtttgctgaagttactgaagggcttgaattttctttattctccttcatttattgaagtaggcttgttctttccacaaggttctctgaaaatgttagaatcccctcgcttcacggcaagcccctcagcgacgtctctccttgccgaccggacgcgtgggtcgacgatatcccggaattccggaccgtacc

SEQ ID NO: 325505 - DNA, 635 bp, Homo Sapiens
tgagccactgcgcctggctgagtacaatattaatgtagacaaaccatgaagtttattatttcatataagaacattacaggtttgttttttcttgcatgtctgtccacctaatgtttaagtagttctggtagctcttcctattctttattctatttgattccatttctgtgattcttttattaccactgatgttttgtgatagttaactatgataaatttaactgatcatgatttatcttctagagtatttaaataatgtatgagtgaccacccaattccaacattaaaagtgtaatctgggcccataatttatagtgaaattgtatcaaaacatagggaaactgtattactgtccattttgaaaatatgaaacttgagtattgaaaatattcaaacatggaatggcagtattctaatttcagttagttggttcatgttaatttcttacctgttagatgtttaaactgcagtgacctttacttgtatctactctgtggtggaaaatgttaaaccatgatagcttttgctaccaactcaaccacttaacttttagagcagtttggggagagttatgcttcatctgagttagaagtaatgtcggaaaatgttaagcatgtctgtattaagaaaatata

SEQ ID NO: 325506 - DNA, 844 bp, Homo Sapiens
gggattgttcttcactcagacatggaaggctagatcctggctcgtgatctttggtatcaagcagctgcacgttgatggtctcctggcttttggtccccataagtatgtcccatccggtcaccaggtggacaatgacagctgcggcaaccattggttgagaaaaatacgcccggagccaaaaagtggtctgagccagcttgggaatatgggtagctgatggtgcaagggtaccaggcatgctgggaaatgccttcactgagatctatcaccttggttcgacacacctgggatgtctgctggctgtccgatgatgacccagcctgggcattgctggtcttgatgagatactgaagcattggatgcccactgatccaggaatccctggggcgtgtagacaccacagtccttaatgctggttttttgttcaaactcctcacataccccatcaccatcatggaaatagcaccggctgggttcatcaatacaattgaaggagacttcttgtcggcagaaaagggagcagccatcaccattgatcttattcatgtcgtcgcattgttcaccttggtctttttgtataatgccatcgccacagtacccacttccatggatgtatgtgacagcaggtgatggctcactctcttcagttcctgaaatagttatgacccaatactggtacacactgccaagatttagatccatgtctacgaatttcctattgagatgtaggatggaggccacatccatctggagaggagggtcccggaccaccttatacttcaggggcttacactgtagacagagtggggtgtctgcagtggaggtcaacatggcagcatcgatc

SEQ ID NO: 325507 - DNA, 1012 bp, Homo Sapiens
  misc_feature (249)..(261): n is a, c, g, or t
  misc_feature (513)..(565): n is a, c, g, or t
  misc_feature (939)..(939): n is a, c, g, or t
caaagtgttgggattgcagatatgagccactggcctggccttcagcagttctttttgtgaagtaaacttgtatgttggaaagagtagattttattggtctacccttttctcactgtagctgctggcagccctgtgccatatctggactctagttgtcagtatctgagttggacactattcctgctccctcttgtttcttacatatcagacttcttacttgaatgaacctgatctttcctaatcctcacnnnnnnnnnnnnnaaaaagcagtttctccactgctaaatgttagtcattgaggtggggccaattttaatcataagccttaataagatttttctaagaaatgtgaaatagaacaattttcatctaattccatttacttttagatgaatggcattgtgaatgccattcttttaatgaatttcaagagaattctctggttttctgtgtaattccagatgagtcactgtaactctagaagattaaccttccagccaacctattttcctnnnnnnnnnnnnnnnnnnnnnnnnnnnnnnnnnnnnnnnnnnnnnnnnnnnnnatctccaaggttaatcaggaaacaatagcttttgaccaggggaaaaaactcaataactagctatttttgacctcctgatcaggaactttagttgaagcgtaaatctaaagaaacattttctctgagaatatattatttaagggcaatggagcataacattaatagtagatgtggttcccagaacatttaatcaaaattcaaagattttttctgtttctgtaactggaactaaatcaaatgattactagtgttaatagtagataacttgtttttattgttggtgcatattagtataactgtggggtaggtcggggagagggtaagggaatagatcactcagatgtattttagataagctatttagcctttgatgngaatcataaatacagtgaatacaatcctttgcattgttaaggaggttttttgtttttaaatggtgggtcaagg

SEQ ID NO: 325508 - DNA, 839 bp, Homo Sapiens
  misc_feature (301)..(356): n is a, c, g, or t
aggcgcgcgggaaacccagacaaaccgtgacagagaacgccacgaggagcacacaaaaggcacacggagaagaagcgaggcaaggacaaaggcacggaagggagaagaggggggagggagcgacgggagaccagaggaggcggcgcagggtacgagaccagggagccgcaggagggggggaggcggggaaaaggacgaggcgacgcgaaggcgaacgggagtagaagtcgaggacgacagagaatggaggccgcgtcggccaggcgaacgctgggaacgcgcagagcgaagggccaccacnnnnnnnnnnnnnnnnnnnnnnnnnnnnnnnnnnnnnnnnnnnnnnnnnnnnnnnnggaagagcactggcgtcgccaacgacacgggccttttatttgctccaggacttggctactgtgtggtctgagggtgccatgctttcgccaaagcccccgagggacactccacccagggggtgccagatctctgtgtgtagccagactgcagtgtccccgccaggctgccgttagtccagaaggccagctgcctgccaccggtgcccgggacgagcatatcccgctgaagctggagaatggtgtccacctttgcatggcagcttctcccaaggcattggctaaaatattgcacttgtaaatcaggaaaactgatgaggctagggtttcctattacaggacgacgtgccaagcatccaacttactattttaaataaataaaactcaaagtgggggtctgagctgcaagctccaatggccctctaggagggcccgagagcccaggcctggacctcctgccccatcagccagttctttaaggaactt

SEQ ID NO: 325509 - DNA, 789 bp, Homo Sapiens
ttagttaaacagattggtcattattgtacacatagctggaagggaggggtggtcccggggtaaggacagggctgcccaatatttggggggaggaagggactcttcttccaaatgggcttgtccgggaaccggggtcccggggagctgggcgcctggtccacatggacccctccacctccccacatacgctgtggaagaagggcaggagtgagaaatgctgggggaggacgaccctttggtctgagatgtggaggtgatcataacagttcccgcccgctggctgttttgttgactttggagaggccttcccggaacccagagtccgtcattacttgctccatcttgaacatcctcctcgtcctcctggggcagctgcaggtacgggttgttccctgtgggctggaacttgtagcccgtgagcacgaagaaggccagggtgagccctccaccaagagctggtacagccactgccactgaaagggcacagccaccatgacatagtaatgccggaacagcttcagcttggccaggttcactgccaccttcccgtctgtgccagacgcatcctggagatgccggatggaccagactacggggaacaggatggcaccacagcagatgaggtccaccaggaacaaatctccttccacagcacgtagtcgctggcgccttcctcgcgggactcgatgatgatgtaggccacgttggccaggacctgcatggggatcacgatcccaagaccttcttctccttatccgacaggacgtacttgatgaaggcccagcctga

SEQ ID NO: 325510 - DNA, 424 bp, Homo Sapiens
  misc_feature (60)..(60): n is a, c, g, or t
ttttagcccaaaccaaattggtccattaattgtaccaccatagcctggaaagggaggggntgggaagtaaagggaaggccctccctttccagtttacctaattcctgcagccgcccttcacaaactcccagcaaatattttgcgatgttgcaaggtgttacgaaaagtgaaaagcaagctgtgattcagctggtacgaagactttgcaaacaaaaaagagtgatctgtttgcagcagactattacttctgccagagcccacagactggaatactaaaagaggaatttctgcaagacattgccatcatacttactggattttcaaaacaaaaccaattttaaattgtttggcctggtaggtttcaccttgtgaacctcagattcctgggagctgtagagtcactgcaagggatctgcaaaccagc

SEQ ID NO: 325511 - DNA, 474 bp, Homo Sapiens
  misc_feature (44)..(44): n is a, c, g, or t
  misc_feature (138)..(138): n is a, c, g, or t
  misc_feature (265)..(265): n is a, c, g, or t
  misc_feature (453)..(453): n is a, c, g, or t
gctggtacaagccactgccactgaaaaggcacagccacctgcancaggatggcgatgatgcgggtgaagtagacgtagcagatgacccatgacatagtaatgccggaacagcttcaagcttggccaggttcactgccnaccattcgccgtctgtgccagacgcatccatggagatgccggatggaccagactacggggaacaggatggcaccacagcagatgaggtccaccaggaacaaaatctccttccacagcacgtagctcntggcgccttcttgcgggactcgatgatgatgtagcctcgttggccaggacctgcatggggatcacgatcccaaagaccttcttctccttatccgacaggacgtacttgatgaagcccagcctgagccaatcagggcgatggtgatgaagaggagggcgcccttcagcaggtgtgcgatgtagtacatngccgcaaggccttctgatggg

SEQ ID NO: 325512 - DNA, 413 bp, Homo Sapiens
tagccaaacagattggtcattattgtacacatagctggaagggaggggtgggagtaaaggaaggcctcctttcagtttactaattctgcagccgcccttcacaaactccagcaaatattttgcgatgttgcaaggtgttacgaaaagtgaaaagcaagctgtgattcagctggtacgaagactttgcaaacaaaaaagagtgatctgtttgcagcagactattacttctgccagagcccacagactggaatactaaaagaggaatttctgcaagacattgccatcatacttactggattttcaaaacaaaaccaattttaaattgtttggcctggtaggtttcaccttgtgaacctcagattcctgggagctgtagagtcactgcaagggatctgcaaaccagcgctcgtgcc

SEQ ID NO: 325513 - DNA, 731 bp, Homo Sapiens
cggtgcccagagagctgtcgaggggagccggcagcctgggacgactgcggggagaccagggcccctcagtgaacctggaagagtccgaagtaggtgaggaagggggcagccttgagatgggcccaggggagggtgcggatccgcagggaggacctggccgcagggccaacagcccagacacctggcagaggcggagctggggcccgagggaactggccgcagtggctgagaattcctccaggcagcgcagggccagcacaccatccaccagcaagtccagcttcaggtagacagccttcccctcatcaaagtgcacctgacagtacaggtagtagagcccagcccgggtgactataaactccccgatctggcggttgtagcgcagagggctggagctgttgattctggcttcctcccagccactcactgtcccgtccacacctgcctgcgctccgtcctgtccaggtcgtggatgaacttcataatgggctgcgatcgctcttcgagcccgtgttttccggcctttaggtgcacttctgcgaggccgaactagtcggttcaggaaaggcgcaggatcctggctttcttctgtctggggattcagttccgacgggtcctggtcctcctctgccaccagctcctcctgggcaggctcctgctgggcggacagcgatgcccggctccccaaactgaccacggccagcaggaggccgaggcaggccagcgccagg

SEQ ID NO: 325514 - DNA, 892 bp, Homo Sapiens
  misc_feature (389)..(389): n is a, c, g, or t
gggattggcaaacaggctaccaggaacacacgtgttcttccctggctcagggccctgggccccctaagcagccagcccaatcctggtgggggcacaggggttctggtgccctttgggctggcctacgctctgaatatcctgggccagcaagccatgcctttccccgcccctggggccctggggagcccttcagctcctgtccccataatgggtcctgggcctaggatgaggggaaggtcccagtttcttgtaggctgttatctgggggtcctggtgtggcttgagctggagggctgtgggggccccaagacccctgtgccattggggtgctccaccctctcaaacaggatgagcatctcacagtgcggggtctgcgggaaacaggtccnactgcccacagccttgaccggccggaagggaatgcccttcacccggttagatggggctctgcagaggtcccacaaagtttgcccatggctgcccgggggttgcatgagacgtacagcagccgcctgaggttcttagctctccggatggccaggatcaccattggaatgcaagccagcacggggtgggtccaggatggccacgaggtgctgggaggccagtctgctcaccagggtgggcaccaggtcctcggccctcccgcagtggaactccacattactcaactcattgtcctgggcgttcacccgggcgtcctccacagcctctgggcatagctcgaccccaatgaccctctttaccttccgggccagggccaggccaatggtgccggtgccacagcacacgtccagcaccatgctccccgcatccaattgggcccagtcctggatgactgtgtagagcacctcggctgcgggtgtgttcacctggaagaaggcgtgtggag

SEQ ID NO: 325515 - DNA, 340 bp, Homo Sapiens
tttgttgagcagttgtttattctggccctcacagccttggctagtccacaaaggccctggggatgggcaacaggctacaggaacccacctgtcttcctggtcagggcccctggcccctagcagcaggccaatcctggtggggcacagggttctgtgccctttggctgcctacctctgaatatcctggccagcaagccatgccttccccgcccctggggccctgggagcccttcagctcctgtccccataatgggtcctgggcctaggatgaggggaaggtcccagtttcttgtagggtgttatctgggggtcctggtgtgggttgagctggtaagcggcc

SEQ ID NO: 325516 - DNA, 1298 bp, Homo Sapiens
  misc_feature (17)..(17): n is a, c, g, or t
  misc_feature (41)..(41): n is a, c, g, or t
  misc_feature (51)..(51): n is a, c, g, or t
  misc_feature (58)..(58): n is a, c, g, or t
  misc_feature (310)..(310): n is a, c, g, or t
gctttcaaggaaggcangggccctgttgaaagaaagcccanccctgggctnaaaactntctgttcatttggtccctgcccctagctccctgcctcccaaacccagggactaagaatggcctggctggcccacccttcctgctgggggtccgctgacccttccaccagtggcacctctggagtacccagcacccacagaggcccctctgacctctcaaggggacctggtcctaaacctgcttcgagcttccttggactgaaatgccagtttaatccattggtcctgttagctcagcccaaagctggctgcnctggctgagccctattatgtagtgggaagggtccagcctagttattggtttatggctggaatctggaggatgttgtcagtcccctgaggacatacagagcctcctccaaggccttgataacttgatgtgtcaagctttgtccatgcccccaccatccacatccacacacttcccttccttatcttaccaccccatactgtcttggaacatgcagtggagtctcttgtttgaggaggaggtgggggaagtcaaggcatgcagtggaaacgtcaaacaatgaaaaacaaaacagaagactggtccccagggcgttgggaagaggcttggtagcaaaatgccctccctaaatccagcaagcatcagtaccatggggatggtgatcatgtcctccaaaacttgagcattgatcttgggctctggaaggaggtgaaggggctggcaccaaaccatgctttgggggaagattgagaatcaaaggagaggccaagaggtcatgatgcccttccaacttttcagaactaggaggcttgtaggttacttggtacttcaacaccccaaccaccttactcgggaaagaggaactgttggagtggggtggggaggagggaggcatgggatggatgggcctgattgatttggaagatggaggagttcagctgtaactaaacggggtgtggcaaatggttcttggtgtctacagtaaccccactacccccatgggtacagcagttgattggatgggggttcccagcggaactgcttttgcatattcaacccctgggggggaaggggtaggtgctgactgggcacttgtttctgtttcccaaggggagcatggccttggcccctaccagtattctgggggttagccctgaaactctgaggcctgggtgcaggtaaggagaagctgggctggttggggagaggccgccctgtggctcttggcctggcctccatgttacttcttctccttcttgcccgacttctt

SEQ ID NO: 325517 - DNA, 964 bp, Homo Sapiens
  misc_feature (31)..(31): n is a, c, g, or t
  misc_feature (62)..(62): n is a, c, g, or t
  misc_feature (586)..(670): n is a, c, g, or t
cctaacgtccgcactttgggtttccacctantaactccctcctgaaaaggtttgcctcaaanggcatcaagacaaacctttaaaacagttcaagaattttcctaaactaatttcctacagagctgccccacactggaggatggtgtgtgatttcccatttttttcccaaatgtaaacttcgaccatcagaataacacatggaacgtcttctatctttcctgtctctgcaactcacaacactgctactttccatgggttttcttcccagatcctcactctggcttttagattctttcgtattgttcaattaagacatctcctaaacaatgacagtctttttgtgaattaggcattaaacgattgcattgcagttttccttctgcagctcctaagaagtcatcctttctgttcacactttatgtttaaatctggtgaaattttaaagaactgacaaaggttttctgcattttgaccaccagcagaaaattcttgaccctgctgcagggtcagagcaggtttgggactatctgatgccacacgttcttcagttacagaagcacaagaaacaggactgtcagttccagcnnnnnnnnnnnnnnnnnnnnnnnnnnnnnnnnnnnnnnnnnnnnnnnnnnnnnnnnnnnnnnnnnnnnnnnnnnnnnnnnnnnnntcttcatcagaagtagcattgccaagcgatgaggaactttttatataagagcagaattcagagacatcatatttatcatagccttgatgcatatgcaaatctgggtcatgacgcaaaagatcctttcttttcactggatttttaggagtcttcacttcttccagtttgccatttgaactgaaataacctgaacccagtcttcggatgctcggaatggaaggtgtcatctcagggacttcaggcagctcgggaataggactgaggaggggcttcttagaagcaatgtctctttcc

SEQ ID NO: 325518 - DNA, 1119 bp, Homo Sapiens
  misc_feature (33)..(33): n is a, c, g, or t
  misc_feature (698)..(754): n is a, c, g, or t
cggcctggtggtggtaaatgaagcagatagtantgtgggtattatttccctgtcggacattctgcaagccctgatcctcacaccagcaggtgccaaacaaaaggagacagaaacggagtgaccgccgtgaatgtagacgccctaggaggagaacttgaacaaagtctctgggtcacgttttgcctcatgaacactggctgcaagtggttaagaatgtatatcagggtttaacgataggtatttcttccagtgatgttgaaattaagcttaaaaaagaaagattttatgtgcttgaagattcaggcttgcattaaaagactgttttcagacctttgtctgaaggattttaaatgctgtatgtcattaaagtgcactgtgtcctgaagttttcattatttttcatttcaaagaattcactggtatggaacaggtgatgtggcataaggtgagtgcacggtatgttcagatcacagtgccttatgtccgaatacagcaatatgtcaccgccgcagccggggcgcacgcgtgtgaaacaacaccgagcttgaatgtggaagtctttgaaccttttaccaaatcagtttgttttctttagatttgtcaaaaagttgtaatttgaatataaataattactttaaaattgtaatgacacttttacacgtaagtgttttgttctgggctaccgtgtcaacgaggcnnnnnnnnnnnnnnnnnnnnnnnnnnnnnnnnnnnnnnnnnnnnnnnnnnnnnnnnnggtggagtaaacttcaccacatccatgaataaactctcagttattttgaaatggcaaatttctcattatttaagtttggatctggaaaggacatgacttctgaaatagccgctgctgggttttaaaagctgaggtctctcaaagtgtggaggagacgttgccgtcaggcgggagccaagtgccgggaagatgtctattttttttcttgtgtattgaaatgtaaaatcatgatgtttgttatgactgctgatgcgattgtttttgtaaattttattgtggcatatacagtattgtcatacagttgaagagaaacaatgtttcctaatgtaagtgctctgaaaaatgttgacactgtatatatatat

SEQ ID NO: 325519 - DNA, 818 bp, Homo Sapiens
  misc_feature (466)..(507): n is a, c, g, or t
ttggttatatcaccacaatgctcccggcggaaaaagatgtttgctcgaaaatacaatagttccgttgagccgaagttttttcagagccggccgaagcaatatatgcgcggcttggtgtttgaacaccacataaaagccgccgtgtagaagtgttattaatttcgccctgcgggcgccggtaaaatctctctgggagagggatgatggttctgccgccatgattgtgcggccacgcccccaccgaaagtataggggttccctctcccgacacaaggatatcccccagacgctacggaccgcggtgtttccccgcttcccggcacgctgttgtttaaaacgacggcgggcccgctgtgcctctgtgcttttattatcgcggctcccccttttgggggccccttttacaaaaaaacggggggcggaatggggccccccggggggaattttttggcggcgcgcccccccnnnnnnnnnnnnnnnnnnnnnnnnnnnnnnnnnnnnnnnnnnacaaaaatcatggactttattatacattaaaaaatcttctaacaacttttttcctgaagccttgtcagtatatacctattgtgacaaaatgaaaaaataagttctccaccccacatgtataccaataccatgatcacataaagtcgagttcttcaaatccaattctaaagtgaaacattgcatgattttgaattgtacactgcatgattttgtaatgtaagtgaattgattcttatttcactgatactattaatcatgcagtgtacaattctaaagtgaaacattgcatgattttgaatcccacgcgtccg

SEQ ID NO: 325520 - DNA, 867 bp, Homo Sapiens
ctcttttgtttatttctcttttgttcttttctgtcaagatggttaagtttatggagcttgcctgtggaaacaattgaaggccatacaactgtcacaggcagggcagtaagtacaaagtctaagctgtaaaaccggtttgaaaatataaactcgttttttggaatacatgtgttcaaaggctgcccatgttaatacctttggtataaaacggtaacgattcccttggacaaacccatccatcacctgacgcacattcacatctcctggtaactactctacctagtctagtctcaaccacccctgtcagtcacgactcactcctgttcctttgcaggtgcagaggagcctgggaggtaggtcactgagaacacccgtcctacataggcgctgcgcccagccgggctccagcaggggccacctgtgccccacaagcacacgtccccacccacagtcacacatatcccttaaacaacatgaacacagacacaaccagacccaaagttatctatctacccgcacatcctcaacctgttcactgctggccactctacactgtgtaaaaatcagaggcaaagacaagggggtctgtgtttatagcagggaagctcctggggctggtggtgtgagggtgtccctgcctggatgccaggctgggaggacaaagggtatgggccacactgaatttctaagcaaatgacttagaaagttagcccagcttcatggggaaggaggctgaagaggagcgggatcccagggaggggtagtttatgagctatgcctgtcacagggtcagatgccttcctggagtggagtcggcgacgcgtggtcgacgatatcccggaattccggaccggtaccagccgcctt

SEQ ID NO: 325521 - DNA, 549 bp, Homo Sapiens
  misc_feature (198)..(198): n is a, c, g, or t
  misc_feature (316)..(316): n is a, c, g, or t
  misc_feature (337)..(337): n is a, c, g, or t
  misc_feature (348)..(348): n is a, c, g, or t
  misc_feature (352)..(352): n is a, c, g, or t
  misc_feature (490)..(490): n is a, c, g, or t
attgaagctgggctaactttctaagtcattttgcttagaaattcagtgtggcccataccctttgtcctcccagcctggcatccaggaggggacaccctcacaccaccagccccagggagcttccctgctataaacacagacccccttgtctttgcctctgatttttacacagtgtaggagtgggccagcagtgaacanggttgagggatgtgcgggtaggataggataactttggggtctgggtttgtgtctgtgtttcatgtttgttttaaggggatatgtgtgactgtgggtggggaccgtgtgcttgtggggnacaaggtggcccttgctgganccccggctcgncaancgcctattgtaggaccgggtgttctcaagtgacctacctcccaggggtcctcttcaccttcaaaggaacaaggagtgagtcgttacttacaaggggttgttgagactagactaaggtagagtagttaccagggagatnttaattttcgtcaagttattgattggtttttcaagggatcgtacccttttatacccaag

SEQ ID NO: 325522 - DNA, 822 bp, Homo Sapiens
cagagggacaaataaccttttatttaaaggtattatatttagagacttgtatatttcaattttgtgtaggagaaaggaaagccattcttctagaaggcactaactggtttaaatgtgtgagtgaattcctaaagaaaacatgtgcaaagtatagtcaagaaggctgcctggttgtgtgttgtattcactactcttcatcacagactatgaattattgctgaacaactatatcagtcaccaggttttcccatcagagcttcagtgtgttcagtccacagtgtcgcagatctcctttactttctggttgaattcttctggttgatctgcatatacataatgtcctgccccaagaatagctattgtcttcacatatgaatgtggtcgtaaggactggatgctggtgccagaattgccatctatgcaggatcgggcgccaaagatcactgaaactggaatgtcagggtgcattttaccaattcgctggagcattggcctttttgcccatccataaggaatagtcatattcttgaaagctgtctcaccacttggagtctgcacattacagtggtagatgtattctgtcacagtatcgtcttcgaacattgaagaatactttcgtttgaaatcaggccttaaacgctgcactagacttaaaccaaagggtcctgcaatccttaggccagctaaagggttaaagggagtcaatgctgctcccaaggctctgatccaaactggaattggtctgtcttgatcagcaaggtctggtcgttcagggaaaccccaaggctccactaaaatgagatgattaacccttgatgggta

SEQ ID NO: 325523 - DNA, 1019 bp, Homo Sapiens
  misc_feature (22)..(22): n is a, c, g, or t
  misc_feature (37)..(37): n is a, c, g, or t
  misc_feature (55)..(55): n is a, c, g, or t
  misc_feature (73)..(73): n is a, c, g, or t
cacggcggacacacccaaaccnccccaagttgtaccnaccctaaatcccccaganggcaatggtgtaaggaanacccaagccaacaacttgaataagaaattgtgaattttccttcttttattttccattctcccaattttaaaaacatcttattgcacatctacccatgtaggaggaatgtgctcacactggagaaccagaaaaaagttttcaatcttcattacctgcccatgaggggcttagtctagctgggaaggaaagaaagaaccaatcaaaaggagtttagtgccacaggagcacagcaaggagagaccaaactgcccaggattcaaggaggatcatccagagatctgtcagggggtttcctctgggtccccttcgtttgtctagaaggccacacaaataaagaaattagatttttaaatacaacacagatcgaccttaggtgtgcccaaaacactactgtatataaacaagaactggtacttactgagtcggagcctgggaggggatgtcttccacggaacgagccagggaagctttctaattcagacatgagttttgcaagcattgctttgttttgctttatatgttaaagcccttttctccaaaaaattcagtccactttcatcttctgaatcggagttggaatcagtcacagaattctctgagggctggcgggactctgcttttttgttggttgctcccctggtactccgcgctggaaacttcatcgccaccctgagaggtccagagtgcctgcactggctgcgggtccctacagccttccccgaactgactgcagcctcgtgtttgcaaaattatcagaagcaaagctgtcacaactgtcatcagaggatgacgaggtttccatggaaatcaacttcacatatctgaatttctttaagttcttctttactctgagatctttctgcggcacgcggcgagcgtccatgctggtggcgggtgcccagatcggcgcttggagcggggagcagcggagcagccgcgcggtcag

SEQ ID NO: 325524 - DNA, 1191 bp, Homo Sapiens
  misc_feature (831)..(858): n is a, c, g, or t
aaggataaaataagtttttatttatagtcttatagtaaagggggaagccttaacttgcaagacaattcttcggcagtatgtacaacatactttttatttccatggaatggaatcaaacacgaactgagactacagagtatacactagaaatcagcaaatgccaggaacggagtaggaaaaagacaaagaaatgaggcctaaacacacaaaacccttcactgggatctgctgaccacagccagaaccagggctggatcacacaatggagacaggttccaggacagtaggaaaggaagtgggatgagggctgggaagggtccgcactggggtggtggtttagtaccaggtaaattgctcttggtatttacatacaaaatcagttggctctatttcttagaaatacacacgggaagaaagaaagatttcatcattactttatgaatctgtcgctttgcaagaccgacatcatcagaaatagggacaattcactcagattcaaatttaagtagcaggaaataaatatcaaaacatcatcactggccctcaatacaaaacctctatgccacccaaaacaccctccctgtcccaaccccaaatggccactccctggtggctgctgcttcactgctgccgtctcccatacataccacgagagtgtcacacggccctccgtgaggctggcgccgcaggcttaaacagctggctgagagaagcaggagtgaaacatgccagcgactctgtgctgcgaaatctgtccccactttctttttataccacaaacttctttaagggatctggtctttcaataggagcgatacatagctttttagnnnnnnnnnnnnnnnnnnnnnnnnnnnnggaggagggttcattctgattactccaaaccggtcatcttctcaaagtagagcagttcagattcacaaagtctatcagaggtgagggcgggccaggaggccacctgggcagggcaggcgtcccccgggcatgtgcccggcagggctggaggagctggtagggtgggcaggacactatgtgctcagaggtccggccggccgtctgtcctccacagaaaaagctgccaagttggggtgttttggtttaaaaattcctgttggggacagggaatccctgaagggaatacattaaaaaatatacagtggaaatggggaaggagaacgagagctgttg

SEQ ID NO: 325525 - DNA, 823 bp, Homo Sapiens
gagggtctgggcgatggtgcatccgggacgagcctccagagaccaagcgggataggtaaacccgccgcgcagctggcgggacgctgggccaacgaggtctggggtcttggcgcggagttcatgggccgccggccaggcttgtgccagtggctttggatccctggccgtgcttcccccaacccagcctccagaccagcgctggcctgctccacacactccgcagcaccgtcccgggaaccgagcgtcggcggggaggccgcctctccgcaataccccatgtttccccatcactcgaggagtctgggcagagactggactacaccgtgggagaatctgcaaaggtgttgctggaacagacatatttctagttgtatgaggtggcctggacattactctcgagctccttacccatacttcagtagtaggcatttttcactaaattggagaccaccctgtttgttagagtctagaactcagttccagtactgtaactggagacctgacaacctgagccagacatctttgattcatctctctagttacgtcatgaacgctgagggagatgagccttcattcaaaacgaagaaaaccaccaaggtgtgatacacagcggaacttgggcaatatatactgtagccatgataaagaacacaacgaagatccctaggagaccaaaaactgttgatcccaaatgtgaagacagtgagaacaagttgacttttcagtgatgtcctataatatactttcacaagatttactggaagatactctcacctttatagacattgccggcggcagtattacactggagtttaggtttcca

SEQ ID NO: 325526 - DNA, 426 bp, Homo Sapiens
  misc_feature (358)..(358): n is a, c, g, or t
  misc_feature (373)..(373): n is a, c, g, or t
  misc_feature (398)..(398): n is a, c, g, or t
  misc_feature (413)..(413): n is a, c, g, or t
tgaccctgcggcccccaagcctggcagccccctacgccccagtgcagagttggcaacaccagccagagaaactcatcttcgagtcctgtggttatgaagccaattatctgggctccatgctgatcaaagatctgcgagggacagaatccacgcaagacgcctgtgccaagatgcggaaatctacggagcacatgaaggaagatccccaccattcatcctgttccattcacattacaaaggtgttcaagtttcattcgatggcctccaacaaggaacgttcatttgcaggagcacggagattccgggaacattttccttgttggcgggcccaggggacccgggaggaccttttgttacnttttgccttacattnaccaagggactttgcaggaccaggncaccattttttttgnccttgttgttttt

SEQ ID NO: 325527 - DNA, 955 bp, Homo Sapiens
  misc_feature (21)..(21): n is a, c, g, or t
ctgaccctgcggcccccaagncctggcagccccctacgccccagtgcagagttggcaacaccagccagagaaactcatcttcgagtcctgtggttatgaagccaattatctgggctccatgctgatcaaagatctgcgagggacagaatccacgcaagacgcctgtgccaagatgcggaaatctacggagcacatgaagaagatccccaccatcatcctgtccatcacatacaaaggtgtcaagttcatcgatgcctccaacaagaacgtcattgcagagcacgagatccggaacatttcctgtgcggcccaggacccggaggacctctgtacctttgcctacatcaccaaggacctgcagaccagccaccactattgccatgtgttcagcaccgtggatgtgaacctgacctacgagatcatcctgacgctggggcaggccttcgaagtggcctatcagttggccctgcaggcccagaagtccagggcgacgggcgcctctgcagctgagatgattgaaacaaaatcttccaaaccggtgcctaagcctcgggtcggcgtgaggaaatccgcactggaaccacctgatatggaccaagatgcccaatcccatgccagtgtctcctgggttgtggaccccaaaccagactctaagcggagcctcagcaccaactgagccactgaggaaccacactgtgctgcggaaacatagacgtgggggcataggctcccactgccaccaccgccatcgcctcacctgcagctctgaagacccaggcctcacctccgcctgcaggacctcctctttgccacttggcctgggccttccaccaccacgtcctgcagaacgagccctgccttggctgtggagaagcactccaggccgctagcagatgggactggcattccagagggtcaagaagtgacttgttcagaacacattgtttttaacaga

SEQ ID NO: 325528 - DNA, 810 bp, Homo Sapiens
cagcccaggaaaacggcacctaccgctgttacttccaagaaggcaggtcctacgatgaggccatcctgcacctcgtagtggcagagcttctggaagctgaggtctactgagaagtcgtcccagaagcagaaagtgaaatccaaaacctgcctgtttgaagttggagtcgacacacccatctcaaagactaggctctaagcccctcatttcaatgaggggccatgaagacgggggcatccggctggagtgcatatctagagggtggtacccaaagcccctcacagtgtggagggacccctacggtggggttgcgcctgccctgaaagaggtctccatgcctgatgcagacggcctcttcatggtcaccacggctgtgatcatcagagacaagtctgtgaggaacatgtcctgctctatcaacaacaccctgctcggccagaagaaagaaagtgtcatttttattccagaatcctttatgcccagtgtgtctccctgtgcagtggccctgcctatcattgtggttattctgatgatacccattgccgtatgcatctattggatcaacaaactccaaaaggaacaaacaagattctgtcaggggaaaaggagtttgaacgggaaacaagagaaattgctctaaaggaactgggagaaagaacgtgtgcaaaagaggaagaacttcaagtaaacagagcacaacttcaagcaagcaattgcgatggcagcaagaaccatctcttacatgctgttgatgtggtcctggatccagacaccggtcatcccgatctcttcctgtcagaggacccgaga

SEQ ID NO: 325529 - DNA, 1226 bp, Homo Sapiens
  misc_feature (299)..(299): n is a, c, g, or t
cgtttttaagcacagcggtcaacattttaggccagtgaggagctcccaaagaatgtttacttagctttccaaatcctcgtatcatccaatcttctccgggtctcctgggaacctgccttgcggcttccgtgaacgggacactgaggaatgcttcaaatatgtgccacgcccattgcaagatacctccctgcagaaccagctcttcctgcagcactcaaccttctgctgagatgcgaaatatattttaaaatgtattttaaaagtcatacaggatctgatctagtaagaatggctacagnatacttcctgggcatttcaaatgaggtcattttggttgaaatgtataaccaacgatttttcgaagtccagaggaagaaaaaagagaaaaatggcaaacccaatgtttaatacaccagatacctttagggtacttagagagtgaacagtcttattacgtgttattttcctgggacttctttttatgtggcagatatttatgttttcatcatggttgaagaagcctgcttgggaaacaggtgagctgcaagtgcatgctactcttgaacttgttcaggagctcttccagtaactttttatctgctccactggaaagctggggcagggcttccaaagcctgcttaaaacttgacttgctttcgggtgtcaggtaaacagccacagtgtccctcaaagcacagatttcaagtctcgcctgtaaagctccatttttgctgaaggatgaaacacactgcatcagtcgactgagctcttcagaaactgcttctatcaccttggatagtacccgagggaccagttctttggaaatggtgaacacctctgcatgcacggcaattatattcaccagtgcttcttttaaatagtttctgacacctgttggaggcaggcagtccttccaatcaaaatatcctgcataaattccaggttctaaggagccaacgatgggatctgctttcaactcgatgtaattttcaaagagtctttgatctagttctttcaatgaggccatgctaacctgtgtgattttttctattccctggaagttgtgcttttcaaaatgttctgcgatatttaggaaggtgtgacgttctagatagcagcaattacttaggactatcaaaaggcgctgttctgaggtcaagctgaagtcatccccacgcgtcacgcgacgcgtgggtcgacgatatcccgaaattccgggccgtacc

SEQ ID NO: 325530 - DNA, 1071 bp, Homo Sapiens
  misc_feature (25)..(25): n is a, c, g, or t
  misc_feature (49)..(49): n is a, c, g, or t
  misc_feature (72)..(72): n is a, c, g, or t
  misc_feature (100)..(100): n is a, c, g, or t
  misc_feature (294)..(294): n is a, c, g, or t
acggcaataggaaaacaaaatacanaggccaaaagggtcaaacagtaanaggtaaagcttgccctgcccctncccagacctcagccagacttctgggtgncagggcccacggtggcacccccagggcctgtccctgccttggggaagggggagcctgagaggacccaggaggtcttgggccttcggtagtagacaccaagccctcgggggaccaccctctagttgaggccttgggggatgaagagggaaggctcagggccccattgcagggccagcctgtagggccgtggggcnacctggatgtgacgtctaaatgctgccggtgctcacagctcgccacaggaccctttaagcccctgccagacgagagctcatctttccctctttctgcttccagttctgtcttccattccaccattgctgaatcccgctcacggcggccctgggctgcagagggcagatgggtgaggctcggcccctgtctccagagagctgaagagggccctcggccccacccacgaggaggacagtcatgaggccgactgtggaggggctctggacagaggtgtccggggatccctgagcctggctgcactctccctcctggttctttccttgcgtgcacacgatcagctatcgtttacaaagagtccttggtgttgcctggttggctgcccaggatgggagctcctgcccccatcggacatgtaaacaaaccaaggtctgtccagttccagctgacagggcctgcacctccgccagggctaggcagaagtagcatcagagcacaggagacccgggaggaaccgagaaccagcgctgctcttaacagctcccagcgtggtgtgcccaaggcttgctgggcactcacaggcaggtcaggccacaggaaaagctaaccaaccttttataagggaaaataggggccgggagggctcctgcgcccccatgctgacgtccaagatgctccggatgcgcttgacctcactgttggataggttccccttgatggccaggatagcgctcaggtggcctttgtctgaagtcagggtagcaggtggcataagtggc

SEQ ID NO: 325531 - DNA, 829 bp, Homo Sapiens
  misc_feature (58)..(92): n is a, c, g, or t
  misc_feature (94)..(184): n is a, c, g, or t
aattcggcacgagcggcacgagggattgaaagcactctgcagataagttactctgtannnnnnnnnnnnnnnnnnnnnnnnnnnnnnnnnnnannnnnnnnnnnnnnnnnnnnnnnnnnnnnnnnnnnnnnnnnnnnnnnnnnnnnnnnnnnnnnnnnnnnnnnnnnnnnnnnnnnnnnnnnnnaacaagtgtaagtcaccacacccagcctctgatttcttttctaaggggatgacctatttctgtttataatccaaaatttatcagccttggccctactgatattttgtactgcgtaattggagggaatgtcctgtgcagtgtagggtgtttggcagtatctctggcctcccactacatgccaatagcaccctcccagaccaaatgtcctctgggggacaaaattgccccttgttaagaaccactgttttaatctatgtgtaacacaaatttcaaaacactttggtgagtacatagcatggattatgattttttaaaaactttgtttctttttaagctgattctattctagtcatggtcatattttttaaatctgtagcttttttcctactgaagagacttttaaaaaacaagaatatgaaagtcttctgtgtccaccatcaggccaaactataatgctttaagagaaaaaaatgcatagaaagataattatttctaccttaaaaagcataacatgttacttaagaagttaggattgggtggtttggacggatgagcacccggcacaacagctacatttaagtaacaaaggttcgtccagagctttctgtaacactctgtttagtggacatttgaactaaggactcc

SEQ ID NO: 325532 - DNA, 417 bp, Homo Sapiens
  misc_feature (155)..(155): n is a, c, g, or t
  misc_feature (248)..(338): n is a, c, g, or t
  misc_feature (340)..(370): n is a, c, g, or t
gggccaattttgtcccccccaaggacatttggtcctgggagggtgcctattggccatgtaagtggggagggcccagagatactgccccaaacaccccctacactgccacaggacattccccctccccattacgcagtacaaaatatccagtaggngccaaggctgataaattttggattataaacagaaataggtcatcccccttagaaaagaaatcagaggctgggtgtggtgacttacacttgttnnnnnnnnnnnnnnnnnnnnnnnnnnnnnnnnnnnnnnnnnnnnnnnnnnnnnnnnnnnnnnnnnnnnnnnnnnnnnnnnnnnnnnnnnnntnnnnnnnnnnnnnnnnnnnnnnnnnnnnnnngaaatacagagtaacttatctgcagagtgctttcaatccctcgtgcc

SEQ ID NO: 325533 - DNA, 1213 bp, Homo Sapiens
  misc_feature (22)..(22): n is a, c, g, or t
  misc_feature (47)..(47): n is a, c, g, or t
ccccaagtaattcggcacgagncggggaacaaagtcctgtgcatggnactggtgcaaagataagaggaggatcgtgagctcgtcacaggatgggaaggtgatcgtgtgggattccttcaccacaaacaaggagcacgcggtcaccatgccctgcacgtgggtgatggcatgtgcttatgccccatcgggatgtgccattgcttgtggtggtttggataataagtgttctgtgtaccccttgacgtttgacaaaaatgaaaacatggctgccaaaaagaagtctgttgctatgcacaccaactacctgtcggcctgcagcttcaccaactctgacatgcagatcctgacagcgagcggcgatggcacatgtgccctgtgggacgtggagagcgggcagctgctgcagagcttccacggacatggggctgacgtcctctgcttggacctggccccctcagaaactggaaacaccttcgtgtctgggggatgtgacaagaaagccatggtgtgggacatgcgctccggccagtgcgtgcaggcctttgaaacacatgaatctgacatcaacagtgtccggtactaccccagtggagatgcctttgcttcagggtcagatgacgctacgtgtcgcctctatgacctgcgggcagatagggaggttgccatctattccaaagaaagcatcatatttggagcatccagcgtggacttctccctcagtggtcgcctgctgtttgctggatacaatgattacactatcaacgtctgggatgttctcaaagggtcccgggtctccatcctgtttggacatgaaaaccgcgttagcactctacgagtttcccccgatgggactgctttctgctctggatcatgggatcataccctcagagtctgggcctaatcatcttctgacagtgcactcatgtatacctgagaatttgaaatcttcacattgtaaatagcatattacttctagaggagcttagagtttattgcagtgtagcttaggggagcaaaccatggctcccaggttccctaagcgtctccaatatgactattaacactgtcacctctggaaaatacactagtgtgagccttcagcactgcgataatactttcaagtacagcatttatctttgggaacacttttacaaatgtatctgggttaacggtattccaaacttatagtagccccaacccatcctgtcactgg

SEQ ID NO: 325534 - DNA, 441 bp, Homo Sapiens
  misc_feature (19)..(19): n is a, c, g, or t
  misc_feature (399)..(399): n is a, c, g, or t
tttttttacacttggtttnttgagtacagtcatgtttattgaaattgctgacatatttggatatgctgtcaaatcctagtgcttccagttcctggcagtgtgactttggtcagttacattctctaagccacttcctcctctataaaacagggatggttgtgtgaggactgagatgtatataaattatttggtagactgggcagcacacacaggctctgagtagattcccttttttctccctcatctcctccccttttagacagacatgggacagatatgtctcaacgacccaaatggggtggaaggatgctcaggagcatcaaggggggatgggaggatcccagttctttgtggacagaggacttgaggcaaggtaggggagggccaaaggaggagggntgcctggatggatttgcctgttgaggtcaggaggaccagttt

SEQ ID NO: 325535 - DNA, 1074 bp, Homo Sapiens
  misc_feature (475)..(568): n is a, c, g, or t
cccctgtagaaattgttcttcgtatatatatgtatcccttcctctgagggcgagcagatgtttgttctctccggcggcggcggcatatatgtaggggtagtggttgtgtgctgaccccagctcagtccccgccgcgtttattttgttatatttagttctccccctacgagagggtgtatgtatatgtcttttttggcgggggtgtgtggtgccccaccagttgtgtccgtcccctccgcgaagatggtaggagtgtgctcttcccaagatgtttatatcacgttagagagcgtcgttttttctccctcagtgacaggcggtttttatataaacgggggcgccgctgcgccttccatgtgatatatataaaactccctccacaataggggcgccccttttgtcgacagaatcgggtgcggctgcgtatgtggcgccccccccggggggattttttgggggcgcgccccctctctcnnnnnnnnnnnnnnnnnnnnnnnnnnnnnnnnnnnnnnnnnnnnnnnnnnnnnnnnnnnnnnnnnnnnnnnnnnnnnnnnnnnnnnnnnnnnnnggtgctttttctgttctcttttcaacctccaggtgaattcctgatgcggagatgagaccatgccctgaggggagtgatgaaggtgctagtacatgcagggctgtgcagggggaggcccactagctgtgccacgcagcccctccccgcttcccaccggctctggctcccctctccctggcgggtggagtgacgtctggcagcctgcaagcctggtccaggtgtgcggtggaaagatggagaggaatgtgcctctgggggaagaccttgccttcgccatgtcggggccagtttgctcctcgtcctctgtgcctgagcttcctctgtgtccggctcctctgctaacctgaatggagctccttcaccagggatgacatggtgttggtgatggagtcagctgccaccagcaggtcattgcggaggtttctcctcgtaccttgtgcgaaggcctcctgcacgtttcccccgactccgctcaaggagtccttcggacagtgggttggggttga

SEQ ID NO: 325536 - DNA, 1238 bp, Homo Sapiens
  misc_feature (162)..(217): n is a, c, g, or t
gagtttcgtgaagctgagggtgagttcctgtgattcttgttcgcttcaacaaaaagtgggagaccaagtttttatagcaaaagaccaaattagctgtagagtcttgaatgcagaaaaaaattaccctagctttcttagcacttagggttttgtgaggattcnnnnnnnnnnnnnnnnnnnnnnnnnnnnnnnnnnnnnnnnnnnnnnnnnnnnnnnnattagtgtttcgtaaaacttgagaaatagagctgagctcattcccttcctgttgattcaaaaataatacctacatgaaaacatgattccaagttgattgaatgttgtaggaattactggtttagagtagcccagttctcggcctaccctgctggttggggatcttactgttatttcttgaatgcactggttttgaaaatatgccagacttcagcccccaaggaaacaagggtgtcaagaatttttggaactccagctgggaaaggttaaggtgacctttggctagccacatactggaccttaccccactgacgtctttcagaacattccaagggttttcctcaaggaacatttttgagctagaaattaaaatgggttctctggcagactgcaccccttgagtcaaagttaacagtattcctttgaatgcaataatagaggcttttctgcgttaagggagaaggaatgaccaattgaacttacacattccccaggcaggtccctttgccggcccctacaggctggggtggcccctcctgtcctcagggatcagactcccagactggttagttctgcatgtttccatcaaattaaaggttattccctggccgcctcctggagaaaaccaacccaccctgccagctgggggcaatggggcagggattttggcctctcagaacagctcctagaggctgctcatgactgaatgttttcccaaatcacctaaatatcggtttgctttttgttagggggagaggatttagcctcttacttccctgatggattcaaagttttatctatctccttatctcctgccctgtcttggcacaactctggatagattgcagggtgtgggaaattgctggagtttgggggacttcctcaaattcctttggattctggtccgcaaatcagcagtctcgtcctgtggatgcagtgactggaattcccatctggaaaagcatctctgtagccagatttgtgggagcctaagagacttccttcaatggcaacctgaacca

SEQ ID NO: 325537 - DNA, 916 bp, Homo Sapiens
gaaaagagcaggagtaacaattgatgagcaatattcagagtgaagtaaatctggaaatggtagactgtgttgggattggggggagggccatgggaggggtacatcgtcaacatagccgatcctgttacatttaagagtagcctcgtaggttgaatttcttctggtagcttcatggtaaatgcatccgaataagccatactggattgcagtgtttgtttctgtagggtgtttaaggacttgacttcctttctcccatgattcctctggactgcacacagcacccacaaccagccccatgcatgctgctgcctctgggcagtcgtagaatctcccacttcagtttctcgttgattgtactcacctttatggaatccaaatacatccaaaagggtaaggcagttttaaaaatgtgaaaacatttaaaaatgataatagcagggaattcttagattatagtaaatgccttttacttaactgtgcccagcaggctggttgccgttaaaaagcccaagtattttgaaaaaactcgaacagatttgacaagggtagccagcttggagtctagcaacttgccaatgtgtttaccaatctgggggcttgtttttcttttcttctttcaaataaatggcagttaactggctttacagtaaacattgaagagaggaggatttgtttattgtcactgggaatctgaccactatactgtccttgttttgtatttctgggtaacatgttttttggaaaagatttgtcttttcctaagtgggaagttaacatttgttatactggccatcccctaaagccaacagagatttgtagatttacagggagtcacatttgaacgaccactagggtctagacagcaagcaagtcccttacaagtcaggtcattaccggcacatttttgccgaacctc

SEQ ID NO: 325538 - DNA, 846 bp, Homo Sapiens
  misc_feature (41)..(41): n is a, c, g, or t
  misc_feature (718)..(762): n is a, c, g, or t
tcggggtccaatgaaggggtttgctttaaggactagatggntttaggaagttccacgatcctgctccatttggagacaaattcaaattgcctaatttgttacaaaatggccacgtcccttttcaaataaggttaatggaatcttacttagccctgaccatttgttctagtttttttctctttttacgcagttaactgcaagtgttaatttctacacatgatacatgagtgttgctacactcaattacaattaaggatgcagtatatcacctaaaaatcccattaaagatgctattgcagtaacagtaaaaatatacagttatattctaccacaatacccatttaaaagttagtttcctacatgctgcctttggcctaaaaagttcaaaacgaattcaaattaatttgttatttacgatttcactaattcaagacttcatttaaaaatattgcttatttagtgtaaaagtctgagataaactgtaaacatatttaataagttacatatggttaacaatcatatttggcacctaaatatacatgtttaattcctaacacatcaagtttatcctgacaaacaaatttacaaaaaacagtaataaagcaaatatctgagagataatactgcatctttaacagtaactgtgtacttctgtttaaatgtagaatgtatagaaaatctgttgtgaatgaagtatgcacagtttatcaattttttnnnnnnnnnnnnnnnnnnnnnnnnnnnnnnnnnnnnnnnnnnnnngctcttgaggtgttttcttttttagctttcatgtcctgcagaaagaaaggaaagaaatgtgaatgtccagaagctgtcactcaa

SEQ ID NO: 325539 - DNA, 1118 bp, Homo Sapiens
  misc_feature (289)..(289): n is a, c, g, or t
  misc_feature (298)..(298): n is a, c, g, or t
  misc_feature (302)..(312): n is a, c, g, or t
ttttttcagtttaaagcactttattaaccacacatacatattttccagtgtctaattctcatcgtgttcttttccattccagacttccctgtctctttcccagagctctgttcctcttctcactgtttctggaaggcagttgcactcaaaagtgaagtcaccagtctgccgacaggtgcctccattgacacaaggcgagggtgcacagggcacatacaggctgtcacagtactggcctgtgaagctctgaaggcactggcactggtaggaaccaggcaggttgagggcnaaggggttngggnnnnnnnnnnnaaccatgctggcagtgtcctggaatgcacactcattgacatcagtctcacacttctgccctgtgaagcctgtgaggcatttgcaggagaactggttggccacagtggtacaggtacttccatttgtacagggatgagacaggcaggcatcggtccattggcaactccttacctgtaaacccgacttgacaggtgcactcataggtatcccggctgagcatatggcatgtgccgccattcaggcaaggtcgagacacaaagcatggatgagatgtcgagtactggcagtcctcttctgtaaaccctgaggcacatcggcacgtggctttccccagcatggcctgggccacacaagtcccaccattcttgcagcggttcttctcacaggggtctcgatgttgacaatattcccccaagaagccttctggacatttgcagtatcctgtgccattgtggtaggtaacacacattccttcatttacacagggttcatagccatctcgacacatgcgcgggggtcgcgcagcacagccagagcgccagcagcgcccacagcagagcggggcgcagggcgggcatcttctcggtcgcctcctccgccgccgccgcctgggcagatccacatggggagggggtcccgatagaggagccccactctctcctcccctcctcctgcttcaaaggctcaggcctggcgctacgctccgaagcccaggcgcaaatgcctcgactccccgcgcccggagtccgccgctcctcggccgccgcctcagccgcccgaagtttggctgaaaccccacgcgtccg

SEQ ID NO: 325540 - DNA, 1005 bp, Homo Sapiens
  misc_feature (778)..(778): n is a, c, g, or t
  misc_feature (780)..(780): n is a, c, g, or t
accaggcctgtaccggtccggaattcccgggatatcgtcgacccacgcgtcggaactcccctacagcccagagatgtggcagggctcagagaagcagccagagctcctggaggaaaggcagtcgggactgaccccctctcttaaaacacattcccgcccgcccacaggcctgaggtctgggacctttccctcccaggagtcccctaggtggctgggggaggcaggctcactggccattttccctagagtccagcacactgcaggaggcgttcggaggaggagttccgccccaccctctacagccttcctcaggcccctgtctctggtccccagcctcagtgcctcttggcccaggccaggcagtcgtggttgcagaaggagcaattaggctgcctgctgtgggctgggagacagggacaatggggaaaagttaaggagcaaaatgggggttggaagcaaaaaatagggccccacctatttaggacgagattgaagactgacccttgaggcacacttgcactggagatgggtttatttcacgctctgtgcttgtgtgctagcggagggagagctcagggtggcttaatccagaggccctgtcatggcccgcccccagccatgggaaagcaaacttcatcctaaggtgtgcagcccaggccctgcccctttacagtctaggccgcctgccatggggtgcagcctctccaggggctgcgttcagacttgcacgctgcccacatccagattcctgcaaagacgaattgggtgcacagcccananccacatacacgaggaagaagatgcggtcagagttctcaggccagcttctctgtgacccctttactcctctggagggctctgtggggagagatacagggaaaggagctgttcttcaaggtccccttcaacatgagcggaagagcgaaccccaggggtcatcagcttttttcgtttctttcttaggtttttcagttgattgaaattttgggtttggccctttttagg

SEQ ID NO: 325541 - DNA, 912 bp, Homo Sapiens
  misc_feature (376)..(376): n is a, c, g, or t
ctgtcataaattaagtttattctctggagaacatggttcttggtattgacgtgaatgggagcagggcatttggggactcaggaataggagatgggggggcttgggtgccaaataccacaggaaagccttaaacggactcccccagagattaccgatagcattagcatctcatggaggaccccccgcccccgaccaccagtccccctttacttcttctttcttcttcttgcgaccccaacagctgggggcctccatcctctcttcggctcctccagggtgggcatggggaggctccagctcatttggggcggcccccccggtctgggaacgttgcccataaggcaccttgttgatgggcacagcagggtccctctgngggacagccacgctggtggctgggacgagacaagacaggtcggctcgggcagccagaacgtgtgcaatggagatgtccgattctggggtcagaacctctcgaattgggatcagcactgccctcatggcctctccttgggcctctgcccggtcactccagtggaaagcagatgtagtgaggtcaaggcgcttgaggaggaggcagcggcggcagcggtactgatctctgaggctttgggacagagactccaacgcttcccatctgggtgcatctagcgagcagctgaggaggggctgcagggaccctgggggcagagaaggctgcagctctgagatcttagcatgcaactcctgcagcagctggctggcgggggtccctggtgcaggtctgggcagccccagggcttggagggtaaggtccagttcttggaccatgccggctccctccactaccccttcaccaaggggtggcctaggactcggatccagcagagagcggaggcacaggaggcgggtggcttggagctctgagcagag

SEQ ID NO: 325542 - DNA, 1065 bp, Homo Sapiens
ttttcaccttctgctccttttcctttttattaaaaaatagatcaagaaaatatacacacttcagtccatccaccatggtggatgctttgaggaggccaaagcaccatggggatgggatggaggcattgggagagccagccctgccctcgtgccaagggtgcagagaaggagggtgccctcagccaaccttgccaagcatggccctggaaggaaagcctgggccatgtcactgagcagtatgagagcaggtgggaaggggaggagggtccccagtgagagcagagatggcaaaggggattgggagccccagggaggtggggcctccagactcatggtgggaaacagggccacacagggctactgcccacagaacgtcccttgacctggtcctcctcccctggggactctgggcctgctggcctcctctctggcctgtcctccacaggccctggcagctgccctcaggcattgatggccttccagcgctcgctgtctgtgctgttgatgctgccagtgtggcagggcatggaagcgatgtcatccaggtaggccaccccgccggcagagtcgaactgcgtgctcgagtagctggcagctgaggccccagcagcccctgcagcctccaggccctcccgccgggccacagcgtagggctggggtaggtgtacatctggctcctctgtctcgtccacttggcatttgtaggagaagaggatcttgggctccgagccgaagaagccccggaggaaagccacgtagatgagcggagcgaagaagctgaagtacaggaaggttgtggcatctacacagcagagcccctcgatgatgtcgaagcacagcagcacactccccagcccctgcagtaggttgagcagtgccaggatgcccgcatacacgtagaagctcctccgagaaggcagggagatgcgctccttcagcggggtcttgggaaggatgaccaccagagagtagaccaggaagaagaagcaggagctgaccagccagaactggcggcccccatggccatagatattaaagtcctcagctgagagatgggcatcaggg

SEQ ID NO: 325543 - DNA, 748 bp, Homo Sapiens
  misc_feature (409)..(418): n is a, c, g, or t
ggaacaaattcattatatttcaccaagactaaaattacaaagtttgggtgtgtaaaggcaagatttaattgttgggaaaatttatccgagccagccaccacgacaaaagccaggctgaccaaatcaaatggattctttacatcctccaagtttcagaagaatcttgaatatggttagccagaagatatggtaaatttgaccccaaacatttgcttgaaggagtaaggtcttctaatgagtgaatgtcaagagatcagcacataagtaatagcttatttatcctttaggtcacatccatctgtgaatcaagcagccttgcagtccacatggtcagcatctctcccatggctcgaggctcaatgatcaaggttgtttagccagtcttagagtatataaaaagcctctccannnnnnnnnnggttgttttagagagagaatacgcaagggaattcttcacaggaggagacgtagtcctaaatcccttctgctttccgttgcattggatgtatcacttgttctctttaataatcattttttccatcctcattcattgtacttggacagttttaacctggggatgatgttcatagactgtagttcctggaagagcagcttgcaggcatacggaatacggagggaagacacgtggcaggatgacttgcagtaatggcacctgaaacgcaagtcagcaagcgttagacagacagcaactcggaaacaaaggcctccacgtaggaagtgagaaatg

SEQ ID NO: 325544 - DNA, 906 bp, Homo Sapiens
tttaacttttgaattccgtattttttaatggtctatggtctacaaacactcatgtgcaaacacatacacgcagaatagggatcacctgcacgaagctatgaactatttcctcatcccttctagccccttcctagaggcgaaccctccgcccccacccccaggcactatctgtcctgcttgcacccacctccacccagggctggccaacgatagcctgtttcctctccattccacccctctcccccaccctcccatcccaccacagaagaggattactggttcctgctttccttaggcgcccctaaatttaaagggtatctgttctatgttgcatgcttcaggagccctgtaggaaacaaccaggcaaatccactgttgatacgcaattacccctcttggatgcatctgcaacaagcactccccagcttcgaaggggcagcaaagaagttcacaattacaagaccatggggtcacgaccacagaagcgatatgaaacaggtcccgggacacagggaggggcagaaagaattctttgagtaagcctggaaggtggaggggctcaccaggccaagagcaggtgctaggccttcagtaggaacagtgcgagccaaggcacagaggccaaggggagcgagctgtagctgtgatggtgggcagctggaaggccgcacgtataatcaacaggggacccacatcaaaggggagatcttagccaaaaccagcacataggggccttcaattccatgaagaatttagatgttatccagtgagccatgggaagccattgaagcgttttatctagggtagttaagtgggcccagattttcattttaagaaatcattctatagaaggaatctcaaacctcacctgactgcttttctccccccagggttctaagctctact

SEQ ID NO: 325545 - DNA, 922 bp, Homo Sapiens
tttgctacaaggagaatttcttcatcatttattctttagttaattgaaacatagtcaggaaaaaatggtgccaattccccccaaacaacacatggatgtttttgcttcttgacccacttagagtcccaaaaggacaaaaattacatggaccaatattagttcacgaaacatgttttaaagaacagagaatgaggtcttcatcccacctcagtaaggcttgggctgatgaagagagggtgtattcagggtcctctcttgtcatatgtacaagctgacgcttgtttcccaagcatgatagtagtgggtagactgcctttattgttagcccctaatagaatcagtcagcacaatgaagaaattccaaagagggcagtgaagtgacaacagcttcagctcgtcatcgatgttatacagaaacacaaaaggaatccccggcctgtgatgaaggagaggccgttgctgtgtgttcaggacacctcagagcaggcacataaagtgctggagggtgacacagcctgtctggatgtcctcgggagggtgtgccatccaggaggcgacaccccccatccagcacacgggcccttccacccgctgtcggtcctgctaaaggtacgaggctaaaaccggcctctccagaaaagaacgctcagtgtgtgctgaccacacttccctttgaatttcccgagtattcaacaggagatacattttaacaagaaaaaatacccctaacaaacaggacagatgactctctcaacaagagagcaactatgaacatgatacaaatttaaataaaaatgtttagttcaacgtgttcgtcatggagtttcaaatcagcagatgccatgacaggaaaggagcacacagctgggcccttgcccgccgtgggtttcccgtgtccgcggcttcttcaaggaggggagag

SEQ ID NO: 325546 - DNA, 1006 bp, Homo Sapiens
ttcggcacaggaagaaaccatctttctccctctactcacggaatttctgtctattaaggtgacagaactgaagggcctggcaaccatgtggttgtgggcagtgtctcctgtgagaccaaggacctgtttgccgccctgccccaggttgtggctgtggatatcaatgaccttggtaccatcaagctcagcctggaagtcacatggagccccttcgacaaggatgaccagccctcagctgcttcttctgtcaacaaggcctccacagtcaccaagcgcttctccacctatagccagagcccaccggacacaccctcacttcgggaacaggctttcttattaacatgctgcgacggcaggaggagctggagaatgggacagcagtggtccctgtcatctgaatcttcagacgactcatccagcccacagctctcaggcactgcccgccactcaccagcccctaggcccctggtgcagcagcccgagccccttcccatccaagttgccttccgcaggcctgagacccccagctctgggcccttggatgaggagggggccgtggccccagtcctggcaaatgggcatgcaccctacagtcggactctgagccacatcagtgaggctagtgtagatgctgccttggctgaggcttcaagtggagcgccgttggcccagaaagcctagcctggggacctaggcccacctacacacccagctcccacccatggagagcaccccagtcctgttcctcctgccctggacactggccacatctgccacaagctctaccctcggatacaacaggctctgtacccacatctacagaccctgccccatctgcacacctagactcagttcatacgtccacagactctggcccttcagaactgccaggcccactcacaccactacaggctctacctatagtgccatttaccatacccacagtgctccaagccccctcactcacactactacaggctccacccacaagccataatctctacca

SEQ ID NO: 325547 - DNA, 985 bp, Homo Sapiens
gccaggtgtgtggggggggtgtggctgtccgtatcgtgtgagtgtgcctctattcggtgatcgtcttattcgacggtgaccgccaagtggggcgacagcgggtcactttgcccgacagttccccacgacatgtcctcgatgtcccaggaacccatctgtgaggctgagctgaaccgccggcacgagcagcgcttacaaccccacaccgcttcagaactcctgccttcacggccaggcacgcgccttgctcggctcgtccacccggcggcggaaacttcttgaggtttcctctgcaggaacacaggttcagaggagccctcagtgggcgacttgacgcggccctcggtccccacatactgctccacgtaccgagccaggtgctggacctccacagggtcctccgtctgggcctcctcggtgtccaggagctcgatggtcatgatcacctgccctttgcgctgcaggaacatcaccttgaagcagttctcgtcggccatgcagcgctcagccttccactggtagctggtctccctagcagcgcggacgcagcgggaggacaggttcccacacagcggcaccccgcttcttctcgttcaggtagagctccaccaccttcaggcagacgtcatcgctcacgaggtggtgcagctgccgcgcaatgttctgcaccagcttgtccatggtgaagcccacgtaggcatggatggtgaacatctcgcgtagggtgtcctcgtactgcgtggggtcgatgctgccctccagcaggctccgcaccatgtccaggaaggccgggtagtactcctccagctccacttcactgggctgcttcagccgcagctccatggcggggtcgctgcccttctccctgcggccctcacacagcagcttctcccgctccttctccggtccgatactccagaagctgcttctgcgcctggcggtagcgacgcgtgggtcgacgaatcccgaattccggccggttacc

SEQ ID NO: 325548 - DNA, 1497 bp, Homo Sapiens
  misc_feature (1149)..(1149): n is a, c, g, or t
gcacagtcttacatattccagtcaaggtctatgaatacagaccctcaacaaacaggaagcagctttaaaaatgtatcaaattgctatagtcaattcctacactccagcttgtagttttctttgtttcaggattagacacagaacccattcttcaaggactggcaaaagttctagaaacaaacaccatggtggtggaagcggttgcgttgcttcagtgatcacctagatttggtgtctttggtttcagtgttctggttactgaaggaatcccggatctttccaacttcagctgcacacaaatgtccaaaagagttttgtgtaccattctggcatgtggccccttaagtcaactctgcacatgtaggtgagtttggattttcctggcccacagggttcaatcaaatacctggacaagagcacattaaccctcacacccaccacaggtgcgcgatcgtgatccacagaggttagtaaaagggcacatgctcctttgggtaaattagtgctccaggttcttaaaacaacgtagtctcgagcaggatgaggtgcccatactgttttggacatactggtaaatttcagtttggctgtccagaatttcgatcacttttgaatccaacaggtctacatcccagaggtgctgttctttaagtaggcgctttaagatttcctctggcacagcagggacttcaatgactgacctccaaagcctcagagggggtccttcgctcaccttcttataggacagctcagcctgctccgaagtggagtagctgaccccgcctttacacttctctttgacttctttaaacaggccatccacacagtcctgggaggaagtgttggtagtcagctgagtcatcattaccccaggtgcccgagtgcttccagagtgaggggcttcagctcttttttggtataggaattacgacatcggctcatttcctcgggaacctggaaaagcttcttgcactcggcgatcatatgggccagcccttgagtgcagctaaggttttcattcaaatctttctgatctggtttgcccaaactttggttttctttggcattaccctgggagaggaattctctctcttcagggtgttgagatggaagagggaaggcgctaagcacacggccagttgtttgggntcatctggttttcttttacggctgctgtgacatcgctcaggaaataaagcagggtctgcagaacctcccggttctcgtcaggcagcagcatgatggcagccttgatggcctgcaggcgctggtcccttgggcacatattggtagatctgtagaaaggtttccgagagtttgttcgtcattagtggctcaggaagatctcgaaaatactgcttcagcatgtctgccacgtcataagcagactgtccttcgtagttgaccacagtctatggcaccttcattcatctggcgcagagcccgacgcgtgggtcgacatatcccgggaattccggaccggtaccagcccttgcc

SEQ ID NO: 325549 - DNA, 416 bp, Homo Sapiens
  misc_feature (60)..(60): n is a, c, g, or t
  misc_feature (66)..(66): n is a, c, g, or t
agatgtttctcattttatttccatgctttctaacttaaataattcatcagcttttctttncttttncctctgataggggccacatgcccagaatggtacacaaaatcttttggacatttgtgtgcagctgaagttgtaaagatccgggattccttcagtaaccagaacactgaaaccaaagacaccaaatctaggtgatcactgaagcaacgcaaccgcttccaccaccatggtgtttgtttctagaacttttgccagtccttgaagaatgggttctgtgtctaatcctgaaacaaagaaaactacaagctggagtgtaggaattgactatagcaatttgatacatttttaaagctgcttcctgtttgttgagggtctgtattcatagaccttgactggaatatgtaagactgtgc

SEQ ID NO: 325550 - DNA, 1082 bp, Homo Sapiens
ggctcccttctagaaaggccactctgatgctgcccccgggggatgcctgcattttgttcctccagtgctggggccacatccccagaagtgacactgactgccctcttcttcccagcatcagccaaggtgctgtgcagtgcctgggggatggccctcacaatggtagtttccaggtgaggtaaaaaatagcttttagtcggtaataagaaatctttttgaaataagaacatgagctgatatttatgttggagaaaatcagatctggattgcaaacctatgcctaaaatgccacagaaactgcccatcttttatttatttcaccagggcacattagcaccaagttaactgttctttgaaaaggcgcaagggaattcagtgctcgggccatactacccatgggctgtttgcccttcactgaatggctaagacggcacttgggctggtcttctaagggcatcttagatccgggccctggtgattcctcttgtatcatcaatagctctctctggaaggctcagggttgagaactgtggtgttgagagagaaagcaggtaacaagatacagatggtcatgactgagagtgcagaaaacattccatgctgattgtccacagcaaacctgggagttgtttagattggcttttggtgtctgagggtctgtcttccttttggaaaaagcctagtcatctgcattagatcatgatatatgtgatgcactgacatgtaatttaagagcaccatgatggaatcaagtcaaacatgctgtttaactgaaagtattaaccttacaaaatagccatttagttttgagttttaggtgttggtgcatgcatggtgtacacctgtgtacaatggggaggcattttggacacaaagcacattcatcaagaacctgctgcaagctacacgtgttcaagtaaaaaatattaatataaacaagtaccctttttcattctaagtcttgctgtcgagtcttttgatgaccaggatgtgaaacttgaagatggggaaaatacgagctagtcattttcggacgcgtggtcgacgatatcccgagaattccggccggtaccagcctgctt

SEQ ID NO: 325551 - DNA, 800 bp, Homo Sapiens
ggtacggcccggaattacgggatatcgtcgacccacgcgtccgagttcaacagaggcagccggctgtagctcaaggcctcggggaggagcaggaggtggaatccctgtgggaagtgctccctgggtgatgggtagagccctcgaaacttgacatggggccagaagggcctgggttgaagtagtaattgggcttccttggagctagtcagaggggtcacctaagctggtcctcacaggggcctttctcaccacctccctgctcctaacccctgccactttctgtttcattaaggcctctactctggctcaggacccagtccaggccttctacgggctaggcccagagacttgggttgctggtcccccttccctagtgggttttcccggggactctataggcagctgctcctgcccgcaaagcaagagcatcattcctattcttcagtggatgccagccttccctgccccaactccctccccagcactgggtcagtggtgtcctggcagtgaggctccgtgagggctggcccttagaggaactggggtgggaggtggggcaggcctcacccttgggctttgctgccctgttgggtcagctacccatagtccatttttttagggcagtgggaacctctgcctccacttcctgctttagccccttccctttgctgccaggtatcgcgggtaatattcctccttttccaaggaccaacgcaagaggctgggccaggcttcagctccaggcctgttgcttaactggggtcaccctgggatcctgctgctcacggggtcctaaacgc

SEQ ID NO: 325552 - DNA, 498 bp, Homo Sapiens
  misc_feature (441)..(441): n is a, c, g, or t
ggagggagtggtaatttacaaaggatgtgaagtttccaggaaatagggggaagggaattacattatcttcttgttctctgtctgccttattagttctgtttcatgcttgctttgcatgagaaggttggcaaaccttattttaactgctgagacttaagcatcactaaatctgaataccacattcttcagcagcacacttggtatccatatcactctccctgctaccaaatgaccagatgtgaccacctggatgggggcttctctttctttccatgcagggaaaatcacagtgaaaattgaacggcggcgacggaacaaagatgacagcctacatcacagaactgtcagatatggtacccacctgtagttgccctgggctcggaaaaccagaccaagctaaccatcttacgcatgggcagtttctcacatgaagtccttgcnggggaacttggcaacacatccactgatgggctcctataagccggctttcctcactga

SEQ ID NO: 325553 - DNA, 407 bp, Homo Sapiens
  misc_feature (49)..(49): n is a, c, g, or t
  misc_feature (234)..(324): n is a, c, g, or t
aggcctgctgcaggggctacctggccaggaaagcatttgccaagcgganaggcagcttaccgccatgaaggtcctccagcggaactgcgctgcctacctgaagctgcggaactggcagtggtggcggctcttcaccaaggtgcgtgctagaagggcctcctgagtagctgggactacgggtgcacaccaccatacatacctgggctaattgtttgtattttttgtagaggtgtnnnnnnnnnnnnnnnnnnnnnnnnnnnnnnnnnnnnnnnnnnnnnnnnnnnnnnnnnnnnnnnnnnnnnnnnnnnnnnnnnnnnnnnnnnnatgagccactgtgcccggccctttttgatttttagtagagacaaggtcttcactatttttgcccaggttgacctttcctgggg

SEQ ID NO: 325554 - DNA, 413 bp, Homo Sapiens
  misc_feature (49)..(49): n is a, c, g, or t
  misc_feature (266)..(266): n is a, c, g, or t
  misc_feature (274)..(274): n is a, c, g, or t
  misc_feature (307)..(307): n is a, c, g, or t
  misc_feature (326)..(326): n is a, c, g, or t
  misc_feature (354)..(354): n is a, c, g, or t
aggcctgctgcaggggctacctggccaggaaagcatttgccaagcgganatgcagcttaccgccatgaaggtcctccagcggaactgcgctgcctacctgaagctgcggaactggcagtggtggcggctcttcaccaaggtgcgtgctagaagggcctcctgagtagctgggactacgggtcgcacaccaccattacattacctgggcttaattgtttgtattttttgtaggaggtgtggtctcaccatgttcgcccaggttagtnacaacctnttgggctccagcaatcctcctacctgcagcctncccaaagtgctggcaattnacaggcatggagccactggtggcccggncctttttgcatttttagtagagcacaaggtgtgcattatttttcacccagggttgcacc

SEQ ID NO: 325555 - DNA, 960 bp, Homo Sapiens
ggctcgttttgtcttccggggcgccgtttcccgtgccagtcagccacatcgcgacgtggccccggcccggtgttgtggcctcaggaagcccgcgctttgtacgggccggaagagcccgttctcaagcccaggataagctggccaaagcttggccagaccattcacagtgctcttcgggcttaaaaccaccctggttccctccccccacatctggttagtcaagctctggtcatcagaggtcagcaacacagggcgcactgaacgtgccatatctaccacatagacaggcggccagtggcgggaagaggcaagcaggtccacatggtcacgggcactctcacctcgcacaagatacttggagccgcagaccacctgatgggggcacaccttgtagattttaccacctgtgaagtgacgtgggggccgtatagctctagctccattctgtacagattcgtagagggccaacaaggagaaggcggagctggtccttggagtcttcttcgccaaaggggattccacactgccttagcaggtgctgcagcttctcttcactgtaggagccaatctcatcaagcttgcaggtgccctcctggagcagcctcaccaaggcactgccactgccaggtactggctgcacatccaggtttttgtctttctcagtgttgacgaccacagctcctctcatgagtggtgggaagaagggggcaataacagacgcatcaaatttggtgatagggatgctggcaggaaatgccacctgctcaatcacctctgtctccatcgtggcccacaaagtcctccacatttacctcattagagcccaggaattcaggccaggtgaactccacgctcttcagtgactagcacattctcttcactcctctgagccatttccactttgggggccacaccacagacgacgcgtgggtcgacgatatcccgtattccggagcgtac

SEQ ID NO: 325556 - DNA, 959 bp, Homo Sapiens
aactaagaacaaaggggtcccgaagaagcgccacaccaccaggaaaggggaccggggaacaccggcacggcccgaggggaacaaccgagcaaagcgccgggtcaaagggacgcgccctgcctggaagagttccggaaggtgcccaagaacacagcaccttggtgtgcccccccggccaaaccagaagacagagggaaaagatatgggaacactaggtggtaacatatgagagtaccaaaatgggacacggtaacacgacacagtagcagtgggcaaccaagtctttcagcagattacttttccatgtgatgaatttcaactgctcatgacattatactgaggtattattagctctgtgggctgacatttaacattagcagaacaccatcttgtcacaccttcaatttgacaaaatcctatgtagcagtgaaactttttcccgatgacagactagtttcttgacctttagaatgtggttttagagaagatacagggccatttggctcagaaatgccttggcatctcacactgttcacagcgaattaaggctggatggttcaaaaaagtacaggcggtacaattccactgagctccctcatcatcttctgtgtcttgagtctttggtgttttgatgatggacctttgatctttgggttttggtggcacaggacctacaaatccaatattgtcataaaagttatgaatagcgctggggttaaaatgtggtcctcgggcttgaaaaagatcaatttctttggttaagcagtcaatgtcaatctggagttgtctattacaacttctcagctgctgcatttcttcaagggaaggtatctgggatatagaatttgatcttttcaggcgccttcgagttagattattttccatttcattaacctcagattttaatttcgaacgcgtgggtcgacgatatcccggaattccggaggcgtaccagcctg

SEQ ID NO: 325557 - DNA, 1068 bp, Homo Sapiens
  misc_feature (945)..(1004): n is a, c, g, or t
tgtactattgttgtgtaagtatacgataatgcacgtgtgattgggcacagcgtatcctcttccgggtgcagaggtgtgcaaataggcgagtgctctactgtgtggcgccatatacgttttatagggatattcgccgctgggcggagcccaaggcttcaaaagttgtgtccagcgtggcgccacaggaatgattttcccctttcgggagaaccttttcacaagaagactcggggggttttttctcatcggatggagctcttaagcactggcttagcgcggtgtccccagatggggccggaggccatcatagctaactggaaactattccaaggatccatcacgatttaaatgaacggccgagactggatccgagtgagctggcaaagtcttgaggcacttccctgttttcacatcccatatcctcacgctttcgtcaaaggatcctgagacaataaggttggactggggattgaagttgcagcaaaagacataattactgtgtcccttcagggttttcagacacttgcccgagctcacgtcccatatcttcaaggttttgtcatctgaggcagaaacaagaaggttagaatctgacgaccaggctacatcggatattcccagcttgtgaccagatatggttttctcaaatttgcccatcatacgcgccccaaattttaataagtttatcagcagatgaacttgccagccactctccattcgggctgaatttcacggaggacactgctttggtgtggccagcaagggtgaactttagagcatagtttggcttcacaggtgtaggcttgctctgagtggcggatgacgaaggggttggctgtgctctggcggcctcggtctcaggcttcttctcctccgtcgccatggctctgacgctggccgcacaggagacaagggtggagggacccggtgacagaggcagtctannnnnnnnnnnnnnnnnnnnnnnnnnnnnnnnnnnnnnnnnnnnnnnnnnnnnnnnnnnngagcgcgactcagctcgaccgacgcgtgggtcgacgatatcccggaaattccggaccggtacca

SEQ ID NO: 325558 - DNA, 1031 bp, Homo Sapiens
  misc_feature (654)..(654): n is a, c, g, or t
gcggcaaggacgaaccgacagaatgtgctcagcttctcggccttctatattctgaggtggcgccgatgacccgccctttttgtgtttcttctctgagcacttttattgtgtgtgtctttttgggacgccaaccgtggctctgtttttatcccagacctcccttgaggacgcgtacagcctcccctggtacttgcgctactcagcaatccagtgcctgcagcccaaccttccctgggacgggcccagctcggcactgctttgtacaactccgggcctgatcccagcttgcactccagagatggccactggactgagaattgatgcactgtgacagcaggagaggactgcctgaggctccccgggcagaggctctggtgccaggttagcagcaggaccgacggcagacccagcagccagagagtgaaaggtaataaaattaaaaggggtttcctcacacttacatttttcctggaaaaaagtcaaatgtcacctctgggcccagcagctcctgaaccctaggagagtctagggagagtggtgtgtgggtggcaggaggctgttggagccactccccagtctcagggccaggccagtctgctgtgcccaagctgctctgtggagacaaggtggtgcttccagatgcttctgcagtgngagggctgggcctgcccagcaaagatgctgctggtgctgtggcccccacctggtgcaaggcctcacagcatgaaacatctgcttcctcagaacccaagcccttcttgctgggcctcatgctgctccagcctggggctcccttctctcagtccaaagtaggaaccggctgccctcagggtctcctggcactctctctcttctcccaacgtgactggtcaagccaaccagaaagataaagatctccttcccttaggaaggggcaaactccatgaatcatcagacactcctgctccatcctggcccgggggtcatctagccagggggctctgcgacgcgtggtcgacgatatcccggaattccgaccgtaccagctgctt

SEQ ID NO: 325559 - DNA, 760 bp, Homo Sapiens
gttttgacctgccggttggctgattctggaagacttcccaggcctgcagtggtctctcctttcctcaggatgagcttctgagctcctggagcagctgttcctctagggacccccgtgcctggggactgctctttgaaggggggcctggagggggctcaggtggcctctcctcctggccaagggtgcttgacttggagagaaagggttgatccaatgacttctggctggtgagggggttctctggcttcactgtccactcccgtgtggtggagaaggaggtagaagtgtcctggatcaactcagggaaggcccctacttcctcatacactggctcctcgtacacaggctcctccagctcctcttgctcctccacagaccctgggatgacttcattggaaagaacatggacagggttctccggttgtgtagtcgccgcagggtctgattggcagagaggagggtggctccactgtcatccccacggataggcagcaaaggcatatgtgccaaacttctgacgggcaaggtcagaggaggaatggcgtcgtaagaccactggctgctggtcatcgtgctgggctttaaggatgctggtggtccatcccacatttcatcctcgtcagtgcaggacaagtagaggtgcatcttctctagtatcaatgtgaagccccacggtgttgggggctttaacttcttgcggattcccaggtagacctgcgacgcgtgggtcgacgatatcccgaacttccggaccggtacc

SEQ ID NO: 325560 - DNA, 947 bp, Homo Sapiens
tttaggagaggtgatttattatcatttacttactacttttaaaaaggctaaggtgttagttaatttcatgatttcaggatcagatactgtacaaatatgaacaaattggggaaaggtgaaccacctaggctggagaacagggaaggctgaccaaggaggcccaaaggaagcctcattcatcagagtccaagtcactgtccccagcaatggagtggaaatcctcactgtcctcctcgtcctctgacaggtggacctggcttagtacgctcggcccagagcgctgctcttcctcctcctcatcttcttcctcctctgatacctcatacccaccgatgctgctgaagcttgtgtcttgggtgttcgacttgggatcaggctcctcatagctcccataactgatgttgctatcctccaaaccatggggaagcctccccaccgtctccctcataggacatcatgctttcttcattttccatgtccatccttgtgttctcctgaagcatgcggggttgtttgggtcttattccaccagatcccacatcagagtcacttcccactttcactcagctggaatagcagagaaaggattgtctccttcttcatcactcccccagcatcttccctcatcatcttctccttcagacataagcaaattcctcatacaggacactggcttgaggctgttgtacagttccttcctcttcatctgcaagatcaccatctccatcttcaccttcctgtgttacctgcttttctggagtggcactgggaatatccaagacagacatattgctctcatcttgaaatacagaggcatctcgagacatactgagggatgtgttggtatcatacaaatcaggaggctgaggcgtgtagggccctggggtcattgggtccaggctttctaattctgcttcctccaaagctgcttctttagcagtacaaaa

SEQ ID NO: 325561 - DNA, 1111 bp, Homo Sapiens
  misc_feature (29)..(29): n is a, c, g, or t
catttaaaaatatttattgagcatgtgcnatgcccaacacataatttatttggaagacgtctacacaactgtactatcccatgcagagtcccatcgcatacatcgccaccttagctcgcacgctgagccagggcagtgttccctacacgccactggacagcctgtgcaatcctacgtcccacacgagtggatgagcgacggcagtaagggcaccactaacacaggaggtggggacagtcactgtcacagggtacacgggctgatatgcgtgcgtcctaggagtgtagacctagacctagcttaggaacatgggagctccgacccagccacgggtcggcactgtgggcaccacgggtgaacacctggaaacacagcctacttctagagggcagacactgggcagcgggggtggccacggcagctcctgccgagcccaagcgtgtttgtctgtgaaggaccctgacgtcacctgccaggctagggaggggtcaatgtggagtgaatgttcaccgactttcgcaggagtgtgcagaagccaggtgcaacttggtttgcttgtgttcatcacccctcaagatatgcacactgctttccaaataaagcatcaactgtcatctccagatggggaagactttttctccaactttttgagatgtggggtcttgtctggaagtgacagcccagctcagagccacagacatgtgccttctccacactgggtttctctgcaacacaactgaacccgtgaccacgtctcctgtatggacagggactgggtcgtccatcatgaacagcgtctgcttccagtgtgtggtggggtggaagggccccgtgctgagcacctgcggcggctgcccctcctgcaggctctggaagtggacgctaaaccaggccgtgaagccgtgcagggtccccgccttcctgatgtcgaagcgcagcttcgcccctcagggtctctagatcagaaatttgcacggttctcatgtccaactgcaatatagtgcacggttcagagagacagtcttctggtttcaaaatgtggttatacttgggctttgaaaaaaaccgacgcgtgggtcgacgatatcccgaaattccggaccggtaaccc

SEQ ID NO: 325562 - DNA, 937 bp, Homo Sapiens
ggcttgtctcgtgtcttctctggctctcttcgggttgtttgggcccctgctcgtacgcctcttcttcttgtgccttggccttccatctttctctttgcccacccgtggcattgcctcctggcctgcttggccatgtgtgcttgcctactatggttagtccatccttgacctgtactagtacctattgcccctagagggtctcacttacgtggcacctggagaccctagtcatagagttgtcttttggttataccccagcctcatcctgtctcagtgggccaaatgaaggatttaactctggtatgcctctttttctcccaggaggcagttaacaggacaaagaatttctgcctagtagatatcacacatggggcaaaataccagactggttctgggaggtgccacagtaccaggtaaatcaccagtatattgtaacacgcctgcaatatatcaaacgcgtactcccaaagactattcagtctccagcttgttcaccctgctccatcttgcatgctggttagtggctgaaggatgcatccaggaagcagaacacagacagggcaaagttgctgtactgctctggtcagccagaagtttcagcataagccagggctcccaaggcacagaagcctgtcacgtgcatttagtgaagctgtaactacacatgttctcaatactcctgaagaggtgacagatctcctagggaacctgacccccagagaacagttcactcctggtggggctctagcccacacctgttaaagacaccctaagcctttcatgaagaaatattctaccaactaaaattattctacgtccctccttcatgttgctgacagaaagcacagaatcactcaaaatagctctcactatgccctttcactgtacctaagcaaaaccaggaagtgttggctaccgacgcgtgggtcgacgatat

SEQ ID NO: 325563 - DNA, 663 bp, Homo Sapiens
  misc_feature (267)..(514): n is a, c, g, or t
gataattaaatgcactttattattatgattattagcttttaatttacactgttaagaaatggaagatggcgaaaactgagttatgtggcatacttgtattaaaactaatcctttggaattaaaattctaaaatattccaaatagttgagggaaataatatgtgttggaaactggagttctcacaccagcaaagatacttttagacatcacttctcaggaagttaacttaagagaagtcttgacaggccaggcactgtggctcactcnnnnnnnnnnnnnnnnnnnnnnnnnnnnnnnnnnnnnnnnnnnnnnnnnnnnnnnnnnnnnnnnnnnnnnnnnnnnnnnnnnnnnnnnnnnnnnnnnnnnnnnnnnnnnnnnnnnnnnnnnnnnnnnnnnnnnnnnnnnnnnnnnnnnnnnnnnnnnnnnnnnnnnnnnnnnnnnnnnnnnnnnnnnnnnnnnnnnnnnnnnnnnnnnnnnnnnnnnnnnnnnnnnnnnnnnnnnnnnnnnnnnnnnncaaaaaaagaaaagtcttgactttatttgtaggggctcaggggaagataagaaacatctgctttaaacatcctatcaatcttgtgatatagaatgtaatgtaaacactcaacccacccccacagccacaaagggcctatccagagactt

SEQ ID NO: 325564 - DNA, 1005 bp, Homo Sapiens
ttctccgcgttgtctctgcgcctgtgtgtctcttctttttgctgtgctgctgtctcttctgtctatttctacctacagtcgtttctgtttttcatttttcctacggctgccttgcgtccttcagtgtcgagtccttcttcctccttgtcgttttcgtcctttactgtctccttctctgccgtgtctgtgtcttttcccgtccttcgtccgcatctctgtgcgtgctcctgattctcgtgtgctcctcctctgctcggcctccggctgtctactattcatgccctcacgccggggatcctcctcggtcgcccggttcgttcccatacgtgttgcacgtggtccccacgtgctcagggtgccttggctttgttctttgtgcgcgctctttcatgataggcttgcccatctttgtttggcaagctgcggtattgagccccagtggttcaccccacattctcccttctggcttcttcgttctaccccgtgccctttccccttctcccttaggggggcattgtgtatgaagatttgggggagctgttctgctggcagggggtgctgcttgaggattcactgcgtagccaaagacccctggtaggaagggaagggcccccgcacccttctcatcaggtaggaccatgttgagagcaaccgggagagcggccaagttactgaagttgtaagggtaggcggcaaggagctgggggccatagacgagcgggtagggctcagggtagaaagtgactttggcagcccctatcccctccatccggtccccctcaccagcccccactggcccttcactcccagattttcccctgccaccgccaggttcccggccgcccccaatcaaggccagtggaaattcctgcacaggtgggtatacatagctgcccccgcttgccactactgggggctcctcaccccctgaaatgatagggttcctggagtgaggcgtctcggaagccgacgcgtggtcgacgatatcccgaattccggccgtac

SEQ ID NO: 325565 - DNA, 673 bp, Homo Sapiens
aaaaaaatagctttattgaggtatactttgacatgccataaaattcacccattgtatgtgtacaattcaattacttcatttatacaactgttcaattatcaccatattccagcttaatggtcaatatttgctttgtcatttgatcttttctctatggtaagcaaaaatctattatttgaaaggttccttcactgaaagctgggtggagttgaactctaaaattacctacaaaattactttctatctagtcatctatgtctaattcttcaatttgacacatgcatgttactagcacaagctgcattttaaaggcagcaggaaggtcttttactatcattagaagttaactttaaggattgagcaggcacgatacagcatagattgtttcgtgtgctatatagtaaggtcaatattcttgctccttctacaaataaaaaaaggttccacagaataacaagtacaggtggagttcccaacggaaatgcaggtactgaatacaaccaactgcaactgtttctctgctcctcaatcctgctggcgtagtacgcgagctgccgacgtcccccaacccaccaggtaagccggccgctcctgtccctaggctgtgaggggttcagaggtaagaccttccggacgcgtgggtcgacgatatcccgtacttccggaccgtaca

SEQ ID NO: 325566 - DNA, 989 bp, Homo Sapiens
ggtaccggccggaattagggatatcgtcgacccacgcggtcgctcttagctaagccccaaaatgaagatttccttcagaagtctgttagcagaattatttatcagtcacagagagaaaaatctgctatttttctaagtaagagtctcgagaagcagagtttttgtcttgtcattgagaggagtcagcagtcttgttctgtaaaggaccagagatggtaaatactgtcccactcagctctgctggcgcagtacagcagcagcagccccagcacagctgtgttcctgcggagtcccctttacaaagccgctgacccctgatgtgaaactttgtagagcagcagagtggctgcgttgaaacgggaggctgggcaggtcctcagataggttctgcagtgttacctgtcacttggaggcagccaacacttctggacattgcatccttattcacacatgtggcagctgaacgaggtgctgttgtgggtgtctcagctctgagggtctttgtgagctcccactgttgtgggtgtctcagctctgagggtctttgtgagctcccactgttgtgggtgtctcagctctgagggtcttgtgagttcccaccaattttaattattcatgcccttgaccatgtggttgcttggagacctggggtcttctgccagactgaagaagacacatttctagattatttgtcctttttatcctctccaaaatttacacactgtaccttcttccagtgggcagaagaaccgttggaaacttttctatatattaggcgtagtatgcagaccttggtcgcctttatacaattgcccctgaactggaccggctggtgttacccttgttagctttgatccttccagtctaaaacaaattgtagtctatgtccatggtggaagatcccgccggaggtcccccaaaaaattttagcaattggcctattcatgaaaaagggaggccccaatggccctttcacgcccagcttcccg

SEQ ID NO: 325567 - DNA, 765 bp, Homo Sapiens
ggctggtacggtcggaattccgggatatcgtcgacccacgcgtcgaacagagttggcagataagaatggccccttcagtcccatttggtccttttggaactatttcaaagcaatacttggttccagggaacaagccaccaatgataatactttggttggtggttatttctacccgagaattgccagctccctcctgtgtgatatgcatctgaaatgattctgcatcatggctgctccatgctaagccgatctccgtcgtgctgaccactgtcactcgggaagtcagaaactgggaacaggggggggtgtgcacttgggagggaagcccggcgtgccctcggatgtcacctagggacagggacacactgtgatgttgtaagaaggtgctggagcggagtccggggatggacagcgcgaggctcactgacgttgagattggaagaatctgtctcccccgccacatgtatcttgtaggtatagttagatgacgactcgttatcgctgactttccagatcagggtcaggctctgtggcactgatgttcacagcggtgacgtcaaaaacctgaatagcatttgtcctgaactctatggcctggggctgtccttctgtgccattcgctgcttgggaataaacggtggcattgtatcgggtgccaggctctaacccgacaagcaggacttccgtgtctcgggactgcctggcggaggatgggtccacaggtcccacgagggactcatcatgcccgggcggtgggctcctgcc

SEQ ID NO: 325568 - DNA, 700 bp, Homo Sapiens
ctagttgtctacaactctttcgtttcataattccttatttattaagctgcaatcagtatgttaaaaaaagacacgctgatgaacttcaagcaaatagagtgtacctcagtgaagtgctactatttgcagtagtttccacaccagtactgatctctgtcatcagctctgagaggggaaagttttctatatcatcatagcgttccacccagactacagaaactcttgtctcaggtccaaggggaggaacagggcgaccctgaggcagcttcctcattctggaactgggactgagcctctgtgaggaattaagattgtctgtatgattggggaaaagctcaagtgtcagggatggctgtttcagaattcctggcataagatccatatttgaatcactatcttggtccgagatgttactttccaatgaatcagttaaggactccacaggagaaggaaccacaaaagcaatttctgtaagggcatcagcataatacagcaccttcttctgtccattgaaaatgctagctccaatatcttcagaggaaatcacttcttgttgagatccttcaccatcatcacaacaattaatagaccaactggtagaaacatgcccagtccaagccagggtgtctgcccacatctactgacccggacgcgtgggtcgacgatatcccgtaattccgggccggtaccagcactggcc

SEQ ID NO: 325569 - DNA, 1130 bp, Homo Sapiens
  misc_feature (153)..(153): n is a, c, g, or t
tgtctatagtcagaaggcacgaacaaaaatagtatagataacagcagcacaagaacagtcgacgccgttatgaacgcgtgtttcaatgatggtctgctgaagatcgcgccctttgtttttacccggttcattggtgcccatcatagtgttgcntggtacaacgatgaaggttccacacggggccacaattttactcaagttaaaacaacgtgtgtataacactataaaaggaacaacgtgtgggtgcttattacccacggggtcgttaacttagatttttgccactttacgctattttcaggaaaccttttaaaatcccattgaagttgaacaaatcaaaatggttccaaccaatatctgggccttaaacgtttaggtgatgctgcgccagcgttgcacaagtgaagtgcgctgaacatagcccacagtgtgctcaaacaccatcacactcatagaacaagaaaggaaggggcagtttcaccagctagcccccataaacccactccctagggtcctcccccagcacctgctaaatttgggaggcctgattccaggaggctggataatgagctggcaaaataaaccgagaagaatcgtaattgcagacaaagataaactcaggttccagcacagatagacagcccataccagtgcttttgatattagctgcagttaagccggcaggaaaggctcccactctatggctggtggtgtggtcagctcaagcgctgccaccttggcgggctccatctcaccatgaccctctcaatcaggctgatggtgtctccttatgccaagtggagggaacttcaatcaaattctgacacgacctgcaaatcctctcgggccctgggctactggttaggccagtagggctgtgtatcaaccgattaaacccattaataactggcagcacagcacggcctccttctcaacaaattacgatgctgatccccggactcggccatccatgcccatggtcttttgttcttacgctttcaaaacgcctcccctgcttcatgctttctagtcttgaggacttggcttaaatatgcttctgaattgccactccctcttgttgacaatcggacgcgtgggtcgacgatatcccgaaattccggaccggtacc

SEQ ID NO: 325570 - DNA, 994 bp, Homo Sapiens
ttgtccgtgttgtttgtcctccgttctctcttttttgtgctcttgcgctccggtctcgtgggcgcgttatgccgcctttcggcgattatgggtttagtgtattgtcttcttgctgtgtgttttggttcgcatcggtggaccgccgtacctgagtcgtccgttgtgcgtcgttgtggtacccagttgcatgttgggaacggacagttcgtattagttatccctgacgttcagcatggcacaataggtagcggttgacccagcccttcagtttctagcccgacagttgtataagtaacttatgtggaatagccctagaggtgacaaaggaagagtttggcagcagcattcaacaacatccgtgaatgaaactttgctcctccattccgatatctgggcgtgcactgatctaccactctcctggtttctgcctctgtcttccctgctttgcattagaatcagtctcagtgattaacagtggtgccctgaaagactatttctcccaagagaactgtataggctctaagggcaacacaccctgccttcttggcagaatcgcccaggctcccctgaacaaataatttgggagagttttagtgtctaatggacatactgcctggagtgggtgttcttagggttgtctttagtgttgttacctggacaaacctttccctcgagtagaaaattaagacacattctgttataggaaagcactctgcttgccaacagtttctataatagttattacactgaggcatattaatgaagggcgttttgtttcttgtcatcaagacatgccatcttatgacaccaaatgccctccatttcattcttgtggccagttacaatatccacataacttggaattgatgaaactattgcttttctaaacacctgtgtgcttttgtaaatgcctttgtttaatggagttactacttatagcatcggacgcgtggtcgacgatatcccggaattccggccgtaccacgctcttggc

SEQ ID NO: 325571 - DNA, 730 bp, Homo Sapiens
  misc_feature (697)..(697): n is a, c, g, or t
ggactccggtccctttattgagactgacaggccagtgggtccacccaaacaaaaataaatttctctcccaaagcctgcctgcaggctggggcacccgagcatgtcctggctggggcccatggctgcccctaaccccaacagcacaggtctggctccctgggaatgagaggatgctggctatccagtatctggagatcctaaatgaagagggaggtgagtcctggtggccccctacccccaggagagctggccgcaaatccatgatctgtgttgggccctcggggctcagtcatcggccagggtgatgacgtcgtactcgatgccctggtgctgcagctgttgaatgtgttcgggcactgtctcgtctgtaccaaacaggccctgggcttgggccatggcagcatcagccactgctgtgacagctgagtgtgctgcagcctcaagttgagcctgtgtgacaagctgctggcctggggacacaggcacatactggatctggaggggagaagctgataagatgctggcctggagaaacctgcctgtgccccaggtctccctgtccccccacggccctacctgggactcctgaaggaacggggctccttgttcatactggatgtgtgtgatctggccctcctgtacctgcagagaggaagccaagctgtgatcctagggagaggtcatgcagcccttcacnacacagcaccctcatcccaggtctggcctacct

SEQ ID NO: 325572 - DNA, 1091 bp, Homo Sapiens
  misc_feature (232)..(232): n is a, c, g, or t
ctagaaaaaattttaaaaatcagccaggtatggtggtgcatacctgtggtggtgtagtcccagctgcttgggaggctggagtaagatcacttgagcccaggcagtgagcttaagctgcagtgagccatgactgttcccactgtactctagcctgggtgacagaatgagaccctctctccaaaacaaataaaaccagtgggccatttaaaaattgcattctcttagtatctcnaaaattctaggtaacaagctgtagccccaagtttaaatgtaatatcaatcagcaaacatgctctaagctactggactgtaagaaagatatttactgaacatttaagacatcttggtaacccaagatcttgagtcaaacccattcttagatgcaaaatattatcagacagacactgggaatattttcatgctttgtcaagtcaattccacagaataaacaaaatggactggtataattgttagcattaatattggggttcttgtgtgctctatggcataccagggagttcccactatgtatgttttgtttatggaactagagaaactcacctgaacactttgggactggattcaatataggacaaaggatttactcaaagtttgcttagtaaaacaaactggaagaagaacactttttctaaaatgtacctggacagtaatcaatcaatcagactgttgtaaattttagtaaaatgcagacttcagagaaaatacacatagcagctttcaaagaatagcactgcagttaaatgacaaatgtaacaagccacaagtcctaagcatttcatttaaagaaagaatcctaggcctttgcagacaaaggagcatgaggcaaaggtggtgactcagcccaaaacagatgcaacttgaagttttaactctggctctccattgtaaggcctggccacattctatgatggaacagagagttaataatagacccaattaattacagtagagatttttgcaagtgtcatagagcaaaataaatgccatcctctgtatgtggtaagaacatatagggcctgttaatccgacgcgtgggtcgacgattatcccggaattccggaccggttacc

SEQ ID NO: 325573 - DNA, 998 bp, Homo Sapiens
  misc_feature (809)..(821): n is a, c, g, or t
atacaacatatatttattcagaaaaaaatttgcaataaattataataaaaaagatgacacgaaatatagaatcccactagcagctttgcttagtgatcaagacgtttttgggaaatataacaaacaattacagaataagaaaacagtgaaagggagactaatgcaatgtcaccacatggatttgaaccatttcttccctaagacagcaggtgcagagtctttccctaccagctgaatccgaaatccttacttcagagcagctacaaattagtaccttagaggacttggcaattacaggttggggtgctggaatagccatggtagggaagcagatttcttctgtctgggtctacatcttgtctcctctacctagagattgtctaaaactctcaactctgtatatgttccagggtgagctgaaaaaaggtcgaggcagtacaccaacttagtgttttgatctgatgtagaaagagataggatactgcatacgtgcagcacagagcctccactaaccacacccttgatcacccaaagatcccaggtcagtgatatgctagaaaacaagcccaggaaaggtatttccctgtggtatgaccctaccccagtatctatcatctgcctctttttgtgatcactttctggcttgcggagatgacaaacctgttctgctctcagtcttccttaactaagttcaacacctagcccctgacctatcatacctccagatctgtggcaccagtaacttgactcctattgctttaactctcaatcaggaaagggtttagccatattgcagaatacgtaccttnnnnnnnnnnnnnaccaagaaacaggagaaatcactggtggtgccttggatatgctagaaatgtcacagagtcaatgcccaggattgtacatacagcctgtacgttatgctccttgcaattaatgtaaacaggcaggtgcgacgcgtgggtcgacgatatcccggaattccggaccgtaccaggcctgct

SEQ ID NO: 325574 - DNA, 469 bp, Homo Sapiens
tctctctcatgcttatttgatgcttacaggttcagggcagacttgcaactttgtttctaaaacatgcagagagcagacttagagcagcatatgctgttttggggcccaacccgcacaaaccctgacaggtgactgaccaaacaccatcaggaaggtgatgagggaaaccacctttgccgagagtcagtgcacagcaaaaactaaggactgttggtgcatgcttgtacagagcttagtgtggcagagtgttaccgaaggacttggtggggaacacacaggcaacctccaatatgctctgacgtccaatccatagtccagagcagtggggctgcagctgggcatggagctaaggcactagggctgcagtgggtgggaggcaccgaccagaggtcccagtgccctgccgttcccggggagaggggaaggagctctgctcacaaagctggctttgtgtaccaaagttgttttc

SEQ ID NO: 325575 - DNA, 653 bp, Homo Sapiens
tctccagaatttgtctccagcaaagatgtatgtcttcttgttttgctccagttaaaggcggcatccactcgctggacatcagcggcagtcccaggctggtcagtggcttggggtaccctcgctccagggtgctggctgagtagatccagtattcattccctgcaaagaacacagccttctcctcctgtggggcctcgtataccgcatcaatcttttccgggagctcaggccagaatgtggccaccagcaggggccccatgggcttgtcacgtggcgtcacagtccgccaaatgaaccggtccttgaagaagaagatctcaccacggatctgagcgatgccatcaaatacaatgtcctgtttgcagatctcaggagtgacagggcccagtgtgggggtggggccggtgccaaggtcaatgtcaggagaggccccatagagctcctgaatgcccttgatgtcatcctgggacagacggaagttcttggtgtaggtgtaaatgggtgccatcagggccccagggtcttgggagtgctccagccccatggcgtggccaaactcgtgggctgccacgaggaacaggctgtacccttggtcagggcagaagcccccgacgcgtgggtcgacgatatcccgtacttccggccggtaccac

SEQ ID NO: 325576 - DNA, 621 bp, Homo Sapiens
tttttgaggattttgtgtggctaatgtgttctagaagcagagactccagggagaaccagaatttatgaagcctcgtgcaacatggtgctttctcaccgaggtcatatgcctggttgctgctgttccactcagctccatgagccacgtttgttattttatgtttcttctgtgcttttgctcatttccacccatgtgtttatagaccttttttcagccctttttctttgttcctttccctcatctttttgcctcaggtagaatccatcagttttcctccccctccaaatgactgtgtacctccagctgctcaggactttggaggtgggggcggggcctggggatctacccttctaaaaaactctccaagtaattctgataccaataaagtgggagacctccatttttgaggcctatttgcaagcatgtctccctccctttccatggctttttcgtttctcgcatgttcccactgctttgcactgtctagacaggaaacctaggaagatgttggtgctaaactgaaaagatttcttacagcaaaacctgcctcaggccagggctacagaattccaactttcaacttgattcctagccgtgaacagactgtcctctgctcagact

SEQ ID NO: 325577 - DNA, 993 bp, Homo Sapiens
cggaatataaagatagaaagagtgagcagaagagaaatgcatgtatcatatattgggctactttagcggattattgtttaacaacctcatttttgctgaggtgtctcgcaaaaacggttttttcccctcttttttggaaagagaacttggaaaagggacgttttaaacacaagcgggccaagaaatttggaaatgtgaaactttcaacccggtttggggcccacagaaaccacccttgaaggggacccgaataatccatcccgtgcaatccacacgaggggaccccccacagcgtcaccagtgtctggaattccaaaatgaaaaagaaatgaaaagtgagctggttctataaaaaaggttagaatatcgaaaattcccatttgtagttatcatttggaaataatttgccatactttggcatctaaatataaatacatatttatcatggtgtcccattcattagagagcacttcatttgcggactgaaaatcccacaacacatttgattgaagaacaaccttggtcatcatgattggagagctgttaggtatgtaagaaaagcagcaaaagggttctggttcttggggctgctaatggacaaaggaaacctcccacactttcatttcacagcaagactcaaaagatattaagaaccctacagacctcagtgctatacatgtcagtttaaccttgaccaaaatgagtgaaaatgcacacatgccttgcctttcctgctcacattttaattccacctattttacatcctcatataaccacaagcagggtggctcagaagctcccctgcaaatctcagtggcttagcttttcacattaacacagaaaacctcaaccaaatggctttgctgctgaagtctgtaaaggcatcattcaacatctcatattaataatgctctcactgcatagagggttcaagattgcctacctgagcgaacgcgtgggtcgacgatatcccggaattccggaccggtacca

SEQ ID NO: 325578 - DNA, 643 bp, Homo Sapiens
attcctcgatctgagccgacaggcgctcgcagtccgcaccgatgccacgtggtcatggtccgtctgcaggcagcggtcagcatctcgcggcacttgttgcgcacggcatcacaggtgacaggcaccggaggaaatgtggtgatcctcggagtcgacggtgcctgggcagctccggcctcttgcggctgggatccggggcctctgaggcatccctcgaggacgtgggcagaggcatgcccctcccccgctccctggctttggcatcggaagcatcccaggagcttcttcccaggacttgatgagagacttggccagtgcaatgacctcctcatccgagctctgcttccgaagggcgttgacagacattccgactcgggtggactggagcaggtgcagcgtgattggcatggcctttcagctcccgcagcaaatccatggctccctccgcgctcttcttggtcaccatcttgtccagcctccgggcgatccgcgcaatctcctcttccttgcccatcatcgcctcaggagcagcgacccccgccgcccgtcgcgcccgcctccgcagccgggcaggaccccggccccggccgtcgccacctccgacgcgtgggtcgacgatatcccgaaaattccggaccgtacc

SEQ ID NO: 325579 - DNA, 1337 bp, Homo Sapiens
ttttgcatgtaacttttttattgaggcacaacaaggcattgtaacttgcctggacttgaggcagtcagtttagtaagctgaacgttaatacagttaaggattaagtgcaaacaatatacattcacagcttgactagcgaggctacatcacaatttataaagtgccagataagtgctaattgtcattcagcttgatttttcacctcaggaaggaaaacaaaaaagtaaggacctcctccctctaggaacaaaaacattttcctaaaccaatcagtcatgagggcaaagactacttttccttcaatcccactaattagaacaccatccttttattgtcaatactgtactgactttcaatcttgataaaggaagatagcctgaaaacgtagattatttccagctacttccataaattgctcccctgtgcagacgtaaccatatctggtctgcctggaagagctgaagaattgcatgattgctagcagtttcatggtctggagcaccatcattggcataggctgataccaagacctcttcattcttcatgaggttgacatacagtggcacattcactgccagctttagcatgtgaaaaatgaaaacgtaagtgccattcactgggcaattaaatctaccaagctgaagatcaaaagtttctcctaagttgttcagaagaagatcaaacacataggttggtctaaagttccaggggccagattagaggttctggctgctgagaaggcaactcgcatctgctgaggcagagggtagacgtgtactggcagtatggtggctgctggatttgtcactggcacatccacaggggtcatgctacgggagtctccttgtccagagtcaccactgttaaaggtttcgttgtctctttctgggctgctcacctgagaagaatcactccaccctgctctcgaatttgctcgtggaccaccagatgtccctccctcgccttataacactgctggaaattaatcctttgggaataaggtgctccagaatactctctagcttggaactgcagctggctataatttccattggaaattgaagggagtcctctataagtatcaaaacctttataaccaccaggggaccgataggaattggttattaatctcccaccacgagtacatcctctaacagatccccggctattgacaaatggctgagtaggtctgggaaatacattcgtctgtgctgggtaaaaggcaaggctaccattgcttacttgaatagttccatcaggatgataatttgctgctcttcatcacttgattagccaagtactcagaatgctcaattcatttgctccgacttcagtta

SEQ ID NO: 325580 - DNA, 1019 bp, Homo Sapiens
tttggcaagataataaagaggttaaagaggctacgtggatctgtcactgctttacttaccattttcaattcagcaccaaagtgtcagaaagacaggctcagatcaggacgacttcttaaagggattcacaggcaatattactggcaaaatgattttccaaagctgagccacgcgccccaccctacagggaggggagtagaatcttatggcccagcattggcattgaggcatcttgctttttttcctcagaattccacaaaggcttaagagtgatctaaatgcctggctggaagctcaagtctaggagagctattttactgcactgttgagatgttctctgcaaggtagtcacagataataagcaatttagtagataattattctatacaagaattaatgttctctgaaacagtgattaatagaatcttcacatctggcctggctgggaggcttgggggcaggaaagggaggttggaaggatgggtagcacatcataaatggtgatgaacctggcaaaacgacaatgctgctgtttttgtatcctttaaagcctatatccagggttttaaatgacgctttttttgtgtgcttcctgataggaagtcatataagttttagtattaagaactggggatataaaccaaaggaaacctagagtcaactgactgctggaggaacagaagcaatgacttctttccaccttctagatagtaatcttacttttgttggctaaaagcactttcttcagcattctgagttaacacgggttccctataagctcccctccccaggtggacagtcttattttctaagacaagctcaaagctcaaactcaccaaattaccactataaacaagcttcagggaagagacataaccttacttcaaaagcttcaggtcagagacagccaaatcatgtgactgctagcctcagctcaagtagtgtgcccaaatcatcacaaatgggattccccggacgcgtgggtcgacgatatcccgggaaatccggaggggtaccag

SEQ ID NO: 325581 - DNA, 891 bp, Homo Sapiens
cttcttcggacacttttgccacatctactgacaccacggtttgatcctcttccacccagtcatgagccctcttcatggccttattgagtttgtcaggtgtggccgccacatgtaattcaaagagaagctctgtaagcatgcgagcaaattcttctcccttttcttctaagccttgttcttcttgattttcttcattctctaattctttggctgcaaagatgtctttaatggaaattaggtcattttttaagagttccagcttctctccatcaagtgatgctaaaaatgactgaaccttgctttcgctttcattggacagaatttccagggcttccaggtgtgacaagccttgatattcatcaaacagcatcccgtagtgcgcggttctctccatcgtgagctgctgtgccagtctctgcttctccttctccttagcttcccttaacatctgagacaaggaaacagttctctccatgagcgtcttggtccgcttaaagcccgggtcactttctgcaaggacattcatggttttcttgccgatgaattccaacgcatcaaggcctccagttaagacacttttacctgtgttttgaaccacattggtgatggcagacagcataccccgagaggctgatgaaggggaagtgggtgggctttctgcagggccctgatctgtggctgcatctgttatttcagggactccgttttcagtatttggttgggctccttcagaagatccagaatttacaccatgaatccgtagagtggctcctgctttttccttgactgccgtcaatccatgacctactgtggcagatgctgacgacagcagagattcggacgcgtgggcgacgcgtgggtcgacgatatcccgtacttccggaccgtacc

SEQ ID NO: 325582 - DNA, 678 bp, Homo Sapiens
gagactgcatagggctcggcttgggggtcaggggatctttgccaacattccgtggaggaagcgggggggcgctggtggtgctgggggctgcaggctgggcgggaggtgggctgccactcaggagggctccgtaagtctcattctgcaagatgctgggcatgaaagccctctgcttctccttggcaaggtttgcagcatctctggccaaagatacagcgttagactgaagctggttggagcccagctggtagaagctgatgggccggtcttcccgccggttgggactgggctgcaatttctcatccatgtcgtcatcactttcatccaggtcttcgtggagtagtcgccattcatattcaacgtgaacgtgagaattaaatcttccagataaggcttgggtcagcagctcctcacagtgctcgtgcttgaggcgcttggcaatgtccagcggagtctctcctgactcgtttgctatctcgatggaggccttcccccgcaggagcaacttgaggcactcggcattgtcggtcaggcagcagtagtgcagggctgtgctgcctttccctgtctgtttatccaggttcccactgttctgaactaaaaagtctacaatgtgaagagaggttcgatccaccggacgcgtgggtcgacgatatcccggaattccgggccgtacca

SEQ ID NO: 325583 - DNA, 1041 bp, Homo Sapiens
cctggtattatgcatgtgcccgtgtgacaggggtgccgccttttttgtttgaacgcagagtgtcccctcacacaccagttggtggcggccctccggtggggagcccccctaggtccgtagtctgagtgacctcgacttgggacaaggttcccctcgcgtgcgaactgtcgacaataggagagtctataatgaaaggtggattcctcttaatggtatgattgattggatagagcatacagaccgcaattcagacgttagtgtacaggctgccttgaatacaagagaattgggttcagaagaaataggaggaaaacaccataatttctccctcatggagtctggtgaagtagacccacttatgcacatccgttcctgtcttagagcctggaactaccagatctcgttggaaaagagttctttcccatggaaatgacaaacacagcgaggtcatttgagtggaggcttaaaattcctcaggatactggatcagggtaaaaagctgctccttagattccagatgagaatgtgtatggtgtgttcagcatagggaacacagcttttctggggaaatgacagtgcttccattgtgagcccttgaagctcactgaaccccaagacggatggcaggtggaagctctgcctaaggagaggcccttccttacgcctctttctggggaacctgagcatgttagtgccttttaggtaatgttacttgtgcagcctaactgaaggatgaagtcctccagcttaccaccctagcccaccctggcttgccccgaactaaagatttatgtcactcattcaatcttctgggtctacaaaaccaggagaatggaagagaaatactaaaatgcagttgtctagcagccgtactccaattattagtcattagacctgcatgtgagatttagttacctcttcagttgttaattaacatcactacttcggggagtgcagagtcagggcttgattttctgcagataaggggaacagatctgcgacgcgtgggtcgacgatatcccgacattccggaccggtacc

SEQ ID NO: 325584 - DNA, 1047 bp, Homo Sapiens
ctcgtggtcctatgaggctctctcggtctgtgtgtggtgttcgttcacgcgctttgcggtctttttgggtttttgtttgttgtttctcctgcctttttctctcttcgtcttgtttgctctctctttgtcgctgtttggtgtttgtctcctcttggaggtgttgtgcgtccgtcttgcaggatgcccgtatctggcacggttgacccgattactgggtgctcctgttgccgtagtgaccattgctggaccttgagtctgaccaccctggcatatgcggcgttcagtcccacccggggtgcctgtgacgccggtgctaaaggcggtctgtttgagaagggcctaacatagagagaaccaacttgagggactgggcgccatcaatggcagagtgctgttaatttgagacagttgagccatatgcagacaatgagtccactacagcattcactaaggcatctcttgcatctgacagacttgatgaagacggaccgatccacagccatgtttgccagaaggcagatggcagcttgtacatccactcgccgcatatacatctgctagtgaacttaccactggcaaacaaagtgtatgtactctaattctccgctcacctttgcttgatgtatataatagggctgtttgaaaacatactaaggaagtatctgttaaactttcttcaattgacaactgcaccgcaatccagcatcaggattgatgttggcaagggataacaaatcagtagaacggacaagaagttaccgtgaaaagtgtgcattgaaagacctttagtacaccttattctcataacagcttcaacccatttttcttgtgagataccgttttaggtctttttgtaacttttctgcttgtgaaggattgtgagtatagtggaatgatggataataatagatgcaccctgcagaatacttggacatgcaagctagagagcagatcagaatactgtgtacttaaaggacaatccctgcagtttgctgtcccgaagccgacgcgtggatcgacgatatcccgaacttccggaccggtaca

SEQ ID NO: 325585 - DNA, 965 bp, Homo Sapiens
  misc_feature (79)..(79): n is a, c, g, or t
tttaagtcttttgggaaagaaattaattcattttacatggaactgccttcccctataggggcctgttttccgtatctgnccaacttcccactgaaacacgcaagatggagaaccctcccagtgctcccgagaagggagacagtcttaacccagaggacagcatcccaccagcctgccaaagcggaccccgtgctggtgtgtgagtgcagcacacactgggctaaccatcaccacagtgagactggggccctctggggtagggtagactcaggaaggtgaaaatcaggatgtctgccaggagctgacaaatccctctgggactctcatacttcagaggctctccagtttggctattgctaaacttggactagcccctactgccgatcttgatacccatgtaccaatcattgctgcatcctatttggaaagcaatggacagacagccacgctgaaagcccttactagagactggtcccacaagatcagatttagctgcccctggtttgagccttgcttcccctggtgtcttttctggcgaacgctgggcccagagagcgttttactaatgtgggctccatggtagtggaagtgttggggacagaagtctggctctatatttggcagaggcctgaatataacatgggatttgagagggctcaagatatcctgacttaatcctctatgtggcatggcacagggccatggccaggcctagatggataggtgggctgtttggggtattgcccagcagggcacgatgtgatcaggtacggggcgtagggccatgggttactgtcctcttaatattccatatatcactcaagttactgactgcggtctccaccaattcaggctgccagtccgatgcactatatccctaactatcatgagcactctgtctaagatgctcacagagacacacggacgctagactgagccctgacgcgtgggtccacgatatctcg

SEQ ID NO: 325586 - DNA, 833 bp, Homo Sapiens
gctggtaccgcccggaattccgggatatcgtcgacccacgcgtccgctctggatccatgaccatccttttccttaatagtctcaatgtcgtgcttttttatttggtccttttccttatgttttttagacttctttttggacttttgtgagacattgaatggttttcttccataggctttggacactttagtagaacggaaccagggggtaaggtttccagagaagtcctagaggtatatttgtcttgctggtcctcatagatactatcgttttgactaaaactgtcaacaggtaggtcttgagtcccccggccttctggaagtgctaggggagttggagttagaatttacaatctgaggaggatgtgagatgggcagataggttgaaggcagcggtggaggggtggggatggcagcagccgcaggggcagcgggaggcctgcagcagatttttcactggtgggattcaaatgaccatttagtgttggtggtactctgttcgtcaggtgagatattcgggcttttttattcattaaaggatcaataaactctgaatccaaaagccgtttctgaggagaagatacagcgtctctactagaacatacaggaagattctgaacggctggtgcctgcagcatttctgagacggatttagtttctagagagcactgactccaaatgaccgtctgtctatgtcactgtatccaggccaagtctctttgaagcttctttaaaaaacattatcctttagggtatattgacgagggtcgttaaaatccagattgggtacctggtggagaattggtccaggagtcctggctctgatggcccatt

SEQ ID NO: 325587 - DNA, 1010 bp, Homo Sapiens
tctatataaacatatttgtgtacaccattctcttccgcccttcatctctctaaatgtctctcgcggtgcccctttttctcttccgcacacagttattgaacgcccgcaactggggttaccgtggaagtgtaaaccgggctcgcaacccatgggggaaaaacacggtcagacgttgaccctcaaactaaattctaaaaatggagattggccacagtttgctattcacagacccgtctggtctccagtaaccaccatcaaaagctgcattaagaacctcattcaggcagcttgctgttgacaaaacttaaatcctggtcgtacgttgcctgggatttccctcaaggtctttttcatttctccgaggaaataatgacttgcttcagtcccgctctgtgtgccgccaccactttgtcttttaattccaccccactggaagaacaagacctctcagtgtaatttctccagtcatggctacatctgaacgtaccagccgcccactaaaaagtgaggcgagacaggttactatggtaactccagcagatggtccatcttttgtgacagctccagctgggaagtgcagatggatgtctgtgttgtcaagaagatcaaaacttccaaaagcattggtcagctggtacttctttgcgttgctgcggagccagctgatagcgaggtgggcggactccttcatcacgtccccgagctggccggtcagagttaactggccctcgccatccattcgactcgcctccacgaacatgatttctccacctaagggagtccaagccaaacctattgctactcctggctgactcaaacgctgagatacctccatttcatacatcgggggcccaaggatgtctttcagagcatggaaatcaatcaaaatcggcatttcaggtggtagagccaagtcagtagtgtcactgatagattcaggtttttcatcttctaagatgtgttctccgcacgcgtgggtcgacgatatcccgtaattccgggccggtacc

SEQ ID NO: 325588 - DNA, 1211 bp, Homo Sapiens
  misc_feature (1140)..(1140): n is a, c, g, or t
  misc_feature (1178)..(1178): n is a, c, g, or t
  misc_feature (1196)..(1196): n is a, c, g, or t
ggcgtgtgctgttgtgttctcccctcccctttttgtgatgtttgctggcttgggtgtgcctcggcccgcctgtgtggtggcgccacagctcccggggccatgtgtgtgcgcgtcttttcctggtgaccccccggcgtttgccctttgggagattccctgtgggtcctttgccgcggggccctgatcgtggagcggtcggcaatggaccttttgggaactccactggctgcggtgccttttgtggccgccccgggatactactgattaattttaggtcagaaggctttccttggtggttcgataacgccgaacactggtatccctgtgtcttctgattgatgctataggagctattataatagagagccatatacttactgggaaccacaactgtaggcacattggagtccaggtgaacgaatccttcacttgggctgcacctgttatctctgtaatctacctggaggtgacccatatctctagggagactggacgatagtcatttattcactacggcgtgggccacaggggaacctccaggtcaaacctctcctcgactggtttgtcttctcaatgggtatacttggttgcttctgggacatacatttctggacacattggacagcaacattccttccacgcatgatgggctccaacacagggcagaggggggcagctgaacgatcaggagcagagggtcatggccctgcaggcagtagcagtggcgtgcagcctgtcaaggtcccaccgctcctcctcggcataggccttcccactgaagtggcacaccaccttctttggaaattgtgtcttctatgcagtagggacaacactggccttttctcaagacaggtctttcacaggatacagaagggcaggactcagagaaacagctaattacgctatcaatgcagatgcagctggtacaaacgtcaggcgttccaggactcagctgccaggaatatatccccttcatcaatttttgcagtaattaggatacgctgttattgcgggacaaggaaggccgaaaaggttgatctggaaaaatgaacatataggtcagcaaagaagatgctgttggccagcaactatgcaacatagtgtgtttcaaagcacacccagtcatgatggctttcggtncctcccttaaatacatgacgcagttaaccaaatccagnaaagtattgattcggggnagggtctttaaattt

SEQ ID NO: 325589 - DNA, 1038 bp, Homo Sapiens
  misc_feature (569)..(570): n is a, c, g, or t
ttatatctgcaattttatttctttaatatcccaaaagatttaaaacaaatatagcaaaatgttaattctgaaatactaggtggtagatatgaatgaatcttttgggtatttttctgtattttacaacctctcaaaatgaaaaatgtattcaaagcatctaatataatttgtgcccatcagggaaacaaagattaagtgacttacttgaaggtggcgagtagcaagctgctgagggggcctaaaaccaaattttctaactctttttcttgccccacagagggcactgcttgtgctgtactacatcaagttattatttcatgtctcatattggaagggtatgttcttacctgtataatgctgtgtaatatcgatccgatattgtctgctgagaattcattacttggaaaagcaacattaaagcctggacactggtattaaaattcacaatatgcaacactttaaacagtgtgtcaatctgctcccttactttgtcatcaccagtctgggaataagggtatgccctattcacacctgttaaaagggcgctaagcatttttgattcaacatcnnttttttttgacacaagtccgaaaaaagcaaaagtaaacagttattaatttgttagccaattcactttcttcatgggacagagccatttggtttaaaaagcaaattgcataatattgagctttggagctgatatttgagcggaagagtagcctttctacttcaccagacacaactcctttcatattgggatgtttacaagtaatgtctctaacagatgggatgcttttgtggcaattctgttctgaggatctcccagtttatttaccacttgcaccagaagagccttttcttcctcaggcttgttacaacgcagctcatgacgccacggtaagggctcgagttttagtggttactaatgtatcatgacttaaagtttctaagacctgcaccattcagccactaagtgtttcagctggtgttcaaataccggacgcgtgggtcgacgatatcccgtaattccgaccgtaa

SEQ ID NO: 325590 - DNA, 669 bp, Homo Sapiens
gagattcagaagtttcatatcttttattcacacaaaaaaagtcacagcatttcagactattcaaacacacaaacaggaacagagggtgcccaccagtgacagcctcgtccctaagtctggatcaaaggccacgctaggagggtggggtgtcctctcgggcctcctctctcagcatcccgtggctccctgctcccagcctcactgacatccccaagagcagttacaactgtgcagaaacaaagtcactttagaggaggctgggccccacctcattgccatggaaaaaggccagattctgaggaaaagacagaatcagtgctactgtgtcatcagttgggggatgctgggcactcctgggcctggctggcatcacctgcgtcccagacctggggcagagaaaaaggcaggaccctccccacttggcagtactgggcagcagagagtgtgggtcactggtcacgtgacagccccaactgccacgcagacctctctgatgtgatcagccagacactcagagggcacacgctttcaagcaagaacaccagcctggttcctaaagggggtgggtgaacacgctcccagaaatcttaagaacccagagtcctggagcggacgcgtggtcgcgacgcgtggtcgacgatatcccgtaattccgaccgtaccagcctg

SEQ ID NO: 325591 - DNA, 1037 bp, Homo Sapiens
ttgttgttgctctcgtcttgtctgtgttcgggttggttttgttgtgtgttgtgctcgttgtgggtcccttgtgcttggacttttttagccccctgttgtgcgttcgtttggcaagtgttacctagtgaacaaccgccgttgagtaccgcctggtcaattgtgtttagttctgcagaatctctttcgctcgttgtcatagataatccgcctgccggcgccccgggctatccccccccgccaagtctttacctcgatttgcttatcgcctgcttcctctgtaacactacccatgctcgtttcatgaagtatcaatctccttctcacctgtatccagagctcaaccaagttcacatctcttactgcctctgctgctagtcccaaatattttttctcctttaagtggaaaaaagctaattttgaaattcctgacaaattcactggttattatattatttgccatgggagggggtatctgtgaggtgagagaggattaatgaaaaagaaaaagaacaaacctaaacctaaaattgcaacatatacagaaatttatttccaaattgaagggggaaaggagggaagaaggtagtggcactaaccaaagtcacaaagcccaggttggaacaacaacaaatcactttggttcctagagccaagcctgaaggggaaacaggcagaagggaagacaaaatgggaagaagtctacagtcaatgggaatctttttctatctcaatgatttagttataaatagagattattagtcttctctctatacatgtaacaaatgccgaacttactaccacgaaatttctaaaactgactttttcacatttggttaaaaaaggtaaaaatcacatacttttcttcccttccttcagctccagttctgaatctaaaatattacatgtaacacacgctggtcctaacttttatacaattgaaactatatagagctcctttgcccacataagggagctacataatttctcggcacgcgtggtcgacgatatcccggaacttccgggccggtaccagcctg

SEQ ID NO: 325592 - DNA, 1026 bp, Homo Sapiens
gatataatagatgaggcctgtgagtgtatgtgtggaaccgtgtatcgcgaggcccgtgtcgtcgagagctgtggtgatttatgtgatgtgagctgtcttcagaccgagcgtcttgctgagcctgcagcgggatagtctatttcatttccttacaccgtgtgaataaattggattaaccgattgtttgcctgacatgacccagggcagatctcaagtacagcatcagactgttcgcctcctgcggccttggttcctgactcccaagacgagacttgggggagcacatggacgggagactgaccgaaaggactgggtgtgctgactcgccttggaaatcgtaacgttaacgtaaggcagcagtaactcgtctggacgaatctgattagataattcttggggctacctgtgatgtcacacatacagatctactctccaggaagcaactcttagcaagttactgccccacttgtaatcactgatctggaaattctcttgttatgaaagaaaagtccttctccccacgataagacctttaaagacttctacgtatttgaaataccagatactaaggtgtttaaaatgatttctatcattggtaacatcaaacaaaaatagctgcatctggttaagttaaaaagcatcaatactccctcttctggccctacagctgtaccaataggaattctcaccactactcaataacagaaataagtgcctacagccatgatgaatttgtaacattttctcaaattaactacgatttttctaatttcaagtgaaaacccaaggtggtacttcaaacacgcacatgcacacacaaactcacgaggacagcgttacaaggaaactaaggaattcctgcattaacaaaggaagacatgttagggggacatcctagccacatatgctttctttgttatatttaggttcattttcattgatactgaaaccacagacatttaatggcactgataaatattccggacgcgtggggttcgacgatatccctagattccgacctgtacc

SEQ ID NO: 325593 - DNA, 1064 bp, Homo Sapiens
gtgttcctttttggtccccctgtgttctctctcgctcttctgtctttcgtttgtattggcgattgccaacttgacttccgtctggttccgtgtgcttggtgtcttggtcccttagtgcgtcatgtggtccttccgtgtcctcccgctgttttgtctcgttgtacttgtacttcgggccattggttcggttcaacttctcatccggtggtgcccccgtcgcctgcccagtcccgggtgtgtgctcgcctgtaggaggccacgtgccgtagtggccgtgcttctccatgatggaatgttctctaagctcctggaattccgtattccccggtcgcacatcgcgccctcttgtcggtaccttcccaggtccctgtttatcttggtagcacatctgctgatcaacacttcgatgcttggcggggctttccaccgtctatgtgcagataggacagtctcttctgtgcgtgtggcatcccttctggtgcaatcctctgcattgtctgacgccacctgggttacttgaaatggcgacacatatcagggccgtggtctgagttagtctggcatttcatcccacgaggtgtccgatcacaagcaagagacccccctttgtacagccaagactttttatacattattcagcaggtaggagcagcctctgtcagccgtgattgttgagcatggggaaggcatagatgatgaagcgtagctccttgtgtgtcaggatgggagtagagttgccatgaatcccagctggccagcaccgtcggccgcgtgcgtccttctgtctaccaagcccagggggatgaagagctgggtctgcagcccaggccgcggggcagggctgagtagaagtaccatagcagcggggaggtcccccagttggagcttttgttcaggacagtgttgtaccaaagcacctttccttccggccaatgtgagctgtccgcctaaaataagagtccacagcaaccgtcagtcctaaacagaggatacctgccgggacggcgtggcgaagagtcgacgcgtggtcgacgatatctcgtaattccggaccgggtaactca

SEQ ID NO: 325594 - DNA, 643 bp, Homo Sapiens
  misc_feature (109)..(127): n is a, c, g, or t
  misc_feature (425)..(471): n is a, c, g, or t
  misc_feature (496)..(512): n is a, c, g, or t
gcaggtgttcttatgtagttggggttgcatggagtgttttgagttttttctgtgtctgtgtgtcggtggcgtagttgtgtcagtgtgcgcagtctgtttggtggtccgnnnnnnnnnnnnnnnnnnnctcagtcagatttccctttatgttgtatcgatgacaatattaactcttcagatttaataaaatgacacaaacttgataattacctgggaaacaatttagttattaactaggttaaccctaaatccatcaagaaaaaccacctaacatattcagtgttaaaaagagacattacgactagccttggccaatatggcaaaaccctgtctctactaaaaatacaaattttagcagggtatagtggtacgtgcctgtaagtcccagctactcaggaggctaaggcaccagaatcgcttgaatnnnnnnnnnnnnnnnnnnnnnnnnnnnnnnnnnnnnnnnnnnnnnnntgggggacacagggagactgtctcnnnnnnnnnnnnnnnnngagagagacaacaatgagacagattggaacatgtatgccctgagaaataaatcaacagctcccattaaaattctcaatacgctagacagatttaaaagtacaatctggtactttctcttttttgagctgga

SEQ ID NO: 325595 - DNA, 488 bp, Homo Sapiens
agtaatctccgatttaggcctgaagggataagcacagttagcacatagactccttatcctctaattgcccattgtccattctaccccgctatactatgtgtcttgaggggctatgttctgtgcacgaattaccagtgcatccttgccttatgacttctggttgggttcagccaattggagggcctcatgagagatcagagggcagaaagatagagagtctgcacacttattacctttgctcctttcctgctgggctgcaaattttagcagctgtcaggagaccctgttggatagtctccttcccgttggttgtaaccaggtctttcccatggctagagtcctcatccaggttccaatgacacttgtcttatgtcttgcggcctcgagatagtaatgttctcctatgttgctagtccattggcacctcatcaaatattattgggtttcctttttagcccctcctgtttctccagaaataggccatttaa

SEQ ID NO: 325596 - DNA, 840 bp, Homo Sapiens
tttctgtcaagctgttctttatttcagggagagggcaggcagggaagaagtggacattcttccacttaatgttaatgactctcctttaatgccgatgtttttcctatcggtttacagagttagtgtctgtaagaatctgtggctgcatctttttatccttcaaatctcaactcacaaattaatagtaacataattacagccaacacttaagtgccctcaccagagaccacatactgttttacatgcttcctattaacccattcaatcctcatatcatccctatgaggagggtcctattatactcccactttactaattagaaattaaggcacagaaagattaagaactttccaaaagtcacacagctgggtaagtggaaggggctagggatttaaactgaagggcagagagaactttaattgaagtgtgcacctcaggactgttaatagggcatgcaccctggtggctgattatttgggggggcaactgtaacatgggacgtagggaaaagcatggaaaattagaagcaggtttttcataaccttatattctttatagacctataaatgccagctactgagtaactgccatgaggaatacaaatggcacaggctggcaagtgagtctgtcataacggggttggcatcttcagcctggagttgacaggcaggagtggtgagcatcacactgccaggcctctgtcctgctttgtcatcagggccatttatcagtgctgcatgcctcataggtcagtgcatgggggaggtggttgtggtggtccccacattcccaggctggctgtctcactgcccctcttcctctccaaaaataattagctcc

SEQ ID NO: 325597 - DNA, 609 bp, Homo Sapiens
ttaataaacagcaatcatttaattgggcatcagtgaatttgtcattgagaatacatatgagaatggatgagatgtccagtccatgattactctactatgtacataatttaactgaagttccatcgtcacaaattacttcacaacagaatggatcaaatctgtgacgtccacttctctttttgcgggaaagtattattttcttcaatgatggctgcccttcagacagtggtttcttcagctctggtgacaaattaggaatgaattctgatgtcgtacctaaggcttgtccatctttgttgttggaggttgacaccatttctttgggacgtccagattccagcagccaccctcctggggtggtggtgaatgtcttctcaggcatggggcaatatgacagcaagtgttttccaaatcggggaccacatcccctcagctctgctgctaggctttctctaaggagttggctcagcagcagccagattgctggcagataggaccggaacaggctggccatcctggacctgaactctcctgttctgggtgttctcagcctttctttagagacttgcctgctgtagcctaccagactgtgctggtgtgtcccttctg

SEQ ID NO: 325598 - DNA, 476 bp, Homo Sapiens
  misc_feature (29)..(29): n is a, c, g, or t
  misc_feature (38)..(38): n is a, c, g, or t
  misc_feature (104)..(104): n is a, c, g, or t
ttacttcaacaaacaagaagggaacaaancctgtgaangtccaacttcctcctttttgcgggaaaaataattaatttccttcaatgaatggctgccccttcaanaacagtggtttccttcagctctggtgacaaaattaggaatgaattctgatgtcgtacctaaggcttgtccatctttgttgttggaggttgacaccatttctttgggacgtccagattccagcgaggcaccctcctggggtggtggtgaatgtcttctcaggcatggggcaatatgacagcaagtgttttccaaatcggggaccacatccccctcactctgctgctaggctttctctaaggagttggctcagcagcagccagattgctggcagataggaccggaacaggctggccatcctggacctgaactctcctgttctgggtgttctcagcctttctttagagacttgctgctgtagcctaccagactgt

SEQ ID NO: 325599 - DNA, 770 bp, Homo Sapiens
  misc_feature (376)..(410): n is a, c, g, or t
aacaatttagtagattatacttttgtaaacagaaatgaagcgtttatctttttttcttgcctgatttttccagaattttgaaatccttactgaatactcttatttccacgatgatatagttgttagcaaaagtccaataagaatctattcaccttataacaggacataattggaaattttggttatattatcaaggtttttactggaatatcatatttaggaagtgtacctaagatcagttatgaccagcaattttaaggaagtaaggttgacttttatggagacaatgcttacaaagcactgtgggaaaactttgagggaaagttcttcctcaaaggattataaagtcacaactacccactatttttatatgtannnnnnnnnnnnnnnnnnnnnnnnnnnnnnnnnnntccaaatcacttgtcctagcttgctccagcatgcctggacagaactagacaagccccagcccatagtgcatgccattccttatttggagatgcttccttaactatccctgggcaacttccttttctttctttcttctattccccttacctaattaagaaagttttaaactaacagccaatcgggtaaagtgtaaaatgggaggtcctattccagccaatggaaactggacacagcagtagggtaaacacgtcaggttataagtaactctgtctcctttgtttggtgtgctcttgtagctggacagctattgagtagcaccctttgtgcagaaaaataaagcctgccttgctaagagaaaa

SEQ ID NO: 325600 - DNA, 184 bp, Homo Sapiens
gcttgtttatttctgcaatcagtgttgtcatccatttaaaataatgggttacgagatagtatttgcaaaccgaatactaattgttgtgttttatgtgtgtccattgtgtgcatgtccaacgtacaatggacacccaaaatataaaaagaaattaaagcgtaacattggagaaaatcatcttcac

SEQ ID NO: 325601 - DNA, 719 bp, Homo Sapiens
ttggtttcatctctttgatccactcagtttccccagtggcatcactccccatttggggtgttcagggtcaccctgctgccacctcttcggagagggcgcccagcccttgccttggggttctcacccaccaggcacctctggccttacatcctgccccttcctgagcagctctacaaccccgggtacgcggagagcaagtcaaaggcaatgtttgcctgccgcctcctctccaaaaacacctctgcccccagctttccatgggcaactcgccttctcagggactgagtgtggccagtccaaccccacaggctccgactcttccgtagtgatctgcctgggagtgcacagaaggcagcccagcgtcctaggacacggagggaggaggggacaggaaaaaagcacacgcccactcctcacttaggacgacactgaagccacaagtcctcccaaaagggggattgggaggggaggcaaggagccttgttgattccttctgacagatttcgcttagggcagatgtgcgtcaattgcagagaacaactgtacaggactttggaagaggactactttgcccatatgaaataaactacatctcctttctatccaaatttgtaaggtggagcaattgcttttttagctcctccacctctctgggattttatatttgtctttctgatgagtagggatgatgggaaaggtggatttttagagcatcactc

SEQ ID NO: 325602 - DNA, 876 bp, Homo Sapiens
  misc_feature (432)..(546): n is a, c, g, or t
acctgatcagttttttgatagttcaggaactgtcatgctgcaaataccaattgttagggaagggagacctcaggtgtatgaatctttgaactaaattaaattgtatttcctactctccataactttaaacgtgatgcaaaaacatcgtatgatgtttaagtgtttctttgtctagcctctttcttcaagcaaatgttgagtcttttaattgaacttatttttagtgttctcatgtggataaatttccctaacagtagtttgtcaaagataggatagcttctcttgtgatgtatactaatgttgagtttttaaaggcttggttgtcccctttatgctttcaaccttggtcaggcttggaaaggtagattcaggattgatttcagctgtttttttcctgcggtatatgagtctaaaggctcatctctaccccannnnnnnnnnnnnnnnnnnnnnnnnnnnnnnnnnnnnnnnnnnnnnnnnnnnnnnnnnnnnnnnnnnnnnnnnnnnnnnnnnnnnnnnnnnnnnnnnnnnnnnnnnnnnnnnnnnggcctagaattttatacagtgccctcctcctctgttctcttaatattggtattgtgaatttctgtgtaactcactcttttctcccctaacagggttgttggtacagaggaacgtattcctattcccctcatggattacatccttaatgtggtaagattcaacacagggcaaactgagtaaagatgtatatgtgcttttctggaaaatgtgtttcgttatcagagtccagtaattaccgtattcattttaattggaatccaattaagaggggaaagatgtgccacccttttgtttttgttctagactggtttgccagaaattagccaacac

SEQ ID NO: 325603 - DNA, 403 bp, Homo Sapiens
  misc_feature (25)..(25): n is a, c, g, or t
cccccggcagggcccataaattccntgggccccctaaggacctggggtggcccccataaccagacctcaggtgatcccccatccagtaaccccacaattccacacctggagtccaagttatcctgattcccccacacccagttggagaactggagattcccttagaacttttaactgtcatgttttcaaagttgacatggaaaattttacatgaagcttaaaaatacaactaatctgtggtgatagagacgagaagagttaagctctaaaattagaagagcagttcgttttgaggcagcactgattgggagggagcatggagtatataattacacatttctatgtaatgtaaaaatgtatagatttaagatttatgcattttatgtaaattttactacaataa

SEQ ID NO: 325604 - DNA, 481 bp, Homo Sapiens
ttatattgcagaatcgctgatttattatttgattcccctcccaactccttggatcattcttctatggtctccccatggatcgaataatcattggcacatagcaaacatttcataaaaacagatacaattggcaacattatattcatacaaacctaatacacgcacacactgggcatgatgatggtgcagtccttgagcagggtttacaggcaggatcctcttcccgatgcttcacccgtgggtatctgatacaaccccacttcattcagagggcggaacaccttccccacggggctcctgtgccccccacccagctctatggccatccctctcctctcactcaccagcccaccttgctttgcacccgctcccccttagggccctttgctggtcaaggtgggctccatgtggtcaaacaggggactctgacccaactacttcatctcaaaataccaccttcacagtaagggcctgcctgccc

SEQ ID NO: 325605 - DNA, 404 bp, Homo Sapiens
  misc_feature (17)..(17): n is a, c, g, or t
gcccttgaaaatccccnggaactccaaaacggatcccatcctgccctcagccctcctccaaagtgcctgggatttataggtatgaagcccacagtgcccggcccttgttatctggaacttaaataattggctccagaattttttgaatggatctgccatttgagaacatacagaaataaaggacttaagttcagaggacatcatttagatattctagtgagagtctggattgcgggagaagaaatggggaggattctggcttccatcagtaacaagcaatatcctctctctcatagacacacccctactagagaaaatgaagggctgggaagaggacgctgggcgagggcggtggggaatgagatggaagccaaatgtcatctatttcactttctctattcttt

SEQ ID NO: 325606 - DNA, 894 bp, Homo Sapiens
cacaatttttgttcctttccctgagttcctgctgctctgaaagataggaacttccactctcttaataattagtggcttacctctccatggctccttctggtggagggaggaggagggatttctctgattggtgagatggcaagagtctggtaccccctgggctctgtgttgggagtgggctgtgtgtaaaaagtcacttgcacatgtggcctctcttgggttctatgagcttgatttgaggggagggagacctctgttctctttgaggctgaatggaaaagtttctgttgtgggatgctaatcaggtctagacctgggaggcaactactgggaagtttgtttcaacctcatatccaagttgctctctctgatttggtgctaccagtaggaagacaagtattttggtacatatgtggcttctgtgtgcatttctcaattggcttggcaccctcaggggtgaggagtgggattaaatggaagcccttctcaaatcctatcagtggaggtggattaatatagtcccctcacaattctaatgactgcaggcttgcttgtgatgttgttggtgtagggtttaggtaagagtggggctcagggttgtccttggggatacaggaccagggaaaggagacagatacagccctcaacaacttatgcagctgaaaccaaactgaaatgaatataaggggcaaatagtagaaaaaaatcattaaaattcaacttgaggagtgtgtaggagagagatgttttgttctgctttgcctaagtcatggtagttgtgcaaaaagtgttggtcttaaacctcaggcttcttttggtacaaggtggttctgtgtcccccagctgctcccctttaccctctcccatcaccgttacctctttattcacaagaga

SEQ ID NO: 325607 - DNA, 490 bp, Homo Sapiens
  misc_feature (458)..(458): n is a, c, g, or t
acgtaaatataaaataagaaatagggtttattgaggaaagttcggcaagcagagaaacagaacagacacacaaccccctgctgttcacagctcaggcctaagatggttgtgttctgtggccaggccccctaaggctctgtgctttcataggaactggagagcaattgtcaacaagggaaactgaaagcatggccttcagaactctggctgacggcagcctgttcttttgttaagctaatttagacctttgttcagctaccaggagagaaaattaggtgtaggagccctggtcccaagctctggtcttaaaacaccatcatcctgctttacctctacaaccatcccacggccctattatatggatgaggttaaagaaacacgtccaaggcgggtcatcccccttcccagtgcttatcacctagtttgagggatcccaacaaggaccaaccttgacaaancctaaggaccagggccagggcccaggcaaggt

SEQ ID NO: 325608 - DNA, 464 bp, Homo Sapiens
tttgaccagatatcaaaacccatggccaataagggtctagaattggcttgatctccacagtatctcttagatgcaaagatgttttaggtatagggctttgagtatcagtgccatcaaatagtacttccagggggaaccccagacaagtctgggtccctaagtgaaaccagaggttttagccagaaataaaccagcatcaggaagggagctggtcaaacactgttccactgcatcagtgggtggcagaggttgctggcaggacagagttagctggcatcagtcatggcagaagatgactcataaggctagttgaatgtgtgtgtatgagtttgtgtgtgtcagagacagagagaaaaaagattcttacttcaaacggcattcttcctgtgtctcccgaggatgtattttttcccctcagatgtttctttttttctacataatagtcaatgttcaagattgtgtaa

SEQ ID NO: 325609 - DNA, 510 bp, Homo Sapiens
  misc_feature (68)..(68): n is a, c, g, or t
  misc_feature (293)..(293): n is a, c, g, or t
  misc_feature (297)..(297): n is a, c, g, or t
  misc_feature (370)..(370): n is a, c, g, or t
  misc_feature (372)..(372): n is a, c, g, or t
  misc_feature (375)..(375): n is a, c, g, or t
  misc_feature (379)..(440): n is a, c, g, or t
gcctttaatgtttccgtcccgctttgacaccaataatttcaacccaccctaacatatctgcagcgatncagacgagatgcctattctctaaagtgtatggaaaatggacaccggtaagtcaatgtcacccaggatccgtacaactgcagtaagagggacggttaattcacagcttccagctcttggcgccagagtccgatgcactcctgcagataacggtcatttccattccgggagaacctcttcgaaaaacaacccggatgagactacctggcaaattgcagcccttgggngctntttcaaatagagcgttgatcaatcaaagaagggggacgttacaggcactgaaagaataacccggccgcgcgcngnatntcannnnnnnnnnnnnnnnnnnnnnnnnnnnnnnnnnnnnnnnnnnnnnnnnnnnnnnnnnnnnnactagcctggtcaagacggtaaaactccgtctctactaaaaatgcaataattagtcgggcacggtgcggg

SEQ ID NO: 325610 - DNA, 498 bp, Homo Sapiens
  misc_feature (16)..(16): n is a, c, g, or t
  misc_feature (63)..(63): n is a, c, g, or t
  misc_feature (65)..(65): n is a, c, g, or t
tatttatttatttatntataaataaataaataaaaatactagggtacatgtgcacaacgcagngntttgttacatatgtatacatgtgctgtgttaatcattgtctcacatccaataaccagcttaccaagcaaagaatccttgccttagaatgtaccctccttataaaaagcaagaaactgtaaagaaaaaaagttatctccactttcacaactactttccagaaactttctcttacaaaaggattgacaaatctgttcacacttcagggaaaaactcatattcaatgttgatcaacctgggcattttgtcaaaggatctaagaagtctctaggatgcataaaagatgagggcggaggagataatatgggaaaaaggaaccaaagtgaaccactcaggtataattaaattgagtgattctcatgggcaatagcatcaaaaagactcaagtttacatctagtcttttgcttgtgttagtcctgggacttgtggcaagg

SEQ ID NO: 325611 - DNA, 667 bp, Homo Sapiens
  misc_feature (178)..(178): n is a, c, g, or t
  misc_feature (187)..(187): n is a, c, g, or t
  misc_feature (573)..(573): n is a, c, g, or t
cgtttcaggggtacacattccccggaaaaatactcaaaaaacccaatcactacctgttactagcatctagcttccagatcatttcaccactgggggagcccagacactggctgcatctctgctcctttaagtgctcaatgaatttggggtaagggaggaaagaaaaaagccaggaagnccgtcggtnatagtcacccacagtggcactggggtgtggggagtagaggccagagtaggggaactgagcctgattttagctctttctcccaccccacctccaaattttatgggggaaggtgtgcagttcatgtgtgtgttaattttaaaagtgccttctttaaaaaattacttaattttaaaaaataaaagtgggggaaacttcctcaggtgactttcaagggcaaaatatttaaacttctcctcattcttctctgctgaggaacattccccccagtgcactctggcagcttctggagccagagaggcaggtgggtgtacactatgagaagagcagaaacccgtacctttaaggggcttcccttacttcaaaaacagcctggtccactccgtctntccacagtgtgggcaaatgggatgctaatctccccagtccccagaacagcaacattgcacaattcaattcattctctacattagtagcgcttaa

SEQ ID NO: 325612 - DNA, 446 bp, Homo Sapiens
tgaagcataagccaccacgcccagcgataaatctcttttctttaaaattatccattatccaatctgtggttacagcaacagaaaatagactaagacaagaggtaaaggaaaggaggcagggaagtaggcaggagggcaggaaagattgaaggaaagggaaacgaagagaggcaggggaaggaaggggtttggacagggaggtgggaaaggaagggaagtgaggaagggaggcaaggaggcaacgaaaacagggaggcaggtaaggacaggcaacctcggtgactgaaaagcttatacaatgtgtataccccacgtgactcccttgtttggcaagaaagacaacttatcagacggcccaagctctttagcaaactaggacccatctgcctcatattctatccatcctgctatacgtcataggtcccactcaacaattccctcgtgcc

SEQ ID NO: 325613 - DNA, 611 bp, Homo Sapiens
  misc_feature (584)..(584): n is a, c, g, or t
  misc_feature (589)..(589): n is a, c, g, or t
ctccttttgatagacccagagtagttattttacccttggctgaaatcacaggttggataggatattctattaggagggctgttcttggtccacttctcattgctttgtcttctctccaaagggtagagcaaagaaccagagagggttaaccatggggctcagctgggatttgcaaagcagagaattctggggcctggaataagggcagtaaccactctcttttggggcttctcttggccctgagggtgctgagagtagagagcagcttcccagcttcatgtgtggctgatgtcagctgtgctatgggtgtggccgtcctctagctcacagctcctccacccaagcccacagctgtggcaagttgtggcacagccacatctgctgcctaagtcctttcccatggaggtgataaaatggaaaagccaggaggtcagaagaccacacagcaacaacatactgggtagaaattccatcccaaattgacttgcttactttctgacagtactgtgggaacggagtacctagacacagaactgatcctttacatctggttccacaggcttctgtctcgtgccgaatttttnggctngagggccaaatttccctataga

SEQ ID NO: 325614 - DNA, 302 bp, Homo Sapiens
  misc_feature (57)..(57): n is a, c, g, or t
  misc_feature (183)..(183): n is a, c, g, or t
  misc_feature (247)..(247): n is a, c, g, or t
gtaacatgaccaactgttctttgattttcatacatgactctaagctacgacaaagangttctgcattttaggctgtatttaggtaagatataaagaagaacttcctaacagctaggaagcttaaatattagaacaggtgaaggtaagcagttgtagaatttctttataggtgttaaaacaganaaaaaattctttcaattatcagaacaaaggactttatttggttgcccttttaacatcctttaantatcagtaattcttagattaaaaattttaagatacacactgaaactgttattgcc

SEQ ID NO: 325615 - DNA, 512 bp, Homo Sapiens
gcatgctatttcttggtatttgcactattttatatgcttggaccaagtttcaaaatcctattaattatttattgcttatgcaaagctacagcttcaaatactgaacatgtaactttatcacttagtgtctcgaattcaaattaaactaatctaatttttattatgttttaaaacacagaatatccaacattgatcttttataattcaattgctaaatcattcagtctcagtttttgcaagtttattctttttatgaagaatggaaatccctgtaacaatgttcactgaactttcagtacaattttttgaaatcttgttgctagagaaactaagaacagttctagatttccctctttctctgatgccagcttccaaccagaacttgggaaacatttccttttgaacaacctgtcatttccctactggtaaacaccaaggctcatattccaaagaagttttcatggtggtgattaggcacaaccttgctaaaaatttgcatgtacatttaatgt

SEQ ID NO: 325616 - DNA, 447 bp, Homo Sapiens
  misc_feature (429)..(429): n is a, c, g, or t
ttttttttctatacaagccatttatttgaaatgccaactatatgtaggataaagtcagtgttacatgcttatcagtaacagtagaaaaatagaagcagtgaaaacctctgtacaactgtaatggtactcaaaagagaaatgtatcgttttacaatgcttcacacagacgaattcaagtttggaggtacctaaataaaaatactatatatttctttaaaaatcactatgtacaattgaagcgtaaacaagttttacaaagtactggttatgcaggttgtaggaaaacacttgcataggacatgaaatcagtttaagaaaaatttctgagcctttagcattgaaggcacttgactttataccagtaacagcacaaccacaagaaacgcagtgttgtagatgatttccacctctctgaagtcagatgtggtncatcacagcaaggagagt

SEQ ID NO: 325617 - DNA, 445 bp, Homo Sapiens
  misc_feature (392)..(392): n is a, c, g, or t
actgaatgagtattcttttaagggtggtggacaagcaaaggtttggtagcatcacatttttaatttcacagggaaaatgggtatgaaacatcttcccaagtacatcttagactgccagctgacagcaagccataatgctccccagctcttgggccctacaccccctctcccccatccccgctttagttctttgtcattgctcatggacagctggtttggggaccaggtgcagatgatgggaggtgtctgaaaaacagcaagtgagaaatgctagttttgttgttttaagttgcactgatgactccagtagttatctgtgctgcttgtgataatttataaggcaatgataaccgaattaaacatacaaaagattattatcttcccacaggggnaaaaaactgccaaacttgtgacacccatttatggtcccacttaggccttgagg

SEQ ID NO: 325618 - DNA, 461 bp, Homo Sapiens
  misc_feature (26)..(26): n is a, c, g, or t
  misc_feature (58)..(58): n is a, c, g, or t
  misc_feature (280)..(308): n is a, c, g, or t
aacccctaaagggatgcaaaaagccncaaaagggggaagcaatttttacacaaaaagnatgggaaagacaagggtaaaagttgccaagaaaacttaccccaaacccatcctaactttaagagctgcatacagaggatcaaggtagttagctggtctctactttgttcctatgtatctataatggggattatttcctgcttaattttgtgttatagctccctctagtggctaagtgattttccctagcacttaccaatggagagcagtacagcatgttgtnnnnnnnnnnnnnnnnnnnnnnnnnnnnnttaagacctatttctacaagttgtttttgttcaaagtgcatttggtggagatgagtatagcatcctagagaagctgtttccactatcttcatgtccacagttctaccaatagttggcacttataagttgtctggtaacagaagtctgatgctt

SEQ ID NO: 325619 - DNA, 512 bp, Homo Sapiens
  misc_feature (123)..(123): n is a, c, g, or t
  misc_feature (133)..(133): n is a, c, g, or t
  misc_feature (198)..(198): n is a, c, g, or t
  misc_feature (353)..(378): n is a, c, g, or t
actttattctgcttaaagaattatttctctcgaaaaagctgcttacatgagcatctgcaaaatagtactgtttgtggctgtactggctcagcaattactttccccaggaagagggtagtttgnggggtagggntgagtaggaataaaaaagaacttttccctccaagtgtaaacaggaagcttcagccgatcttcggnagcactgtgatcacaggttttggctttcctcaaagttcctttttggaaattctggatggagctgagcaaggcccctcggctcatgccattcacagcctgagacgagagctgggcaggtgcctcggtgctcgcaggaggcaagggagctgctggtnnnnnnnnnnnnnnnnnnnnnnnnnntaatgcagatatccctgatgtagagggtggagttggcgatgacggggacgtgagaggtgagctggccccagatcctgctgaattattggagttgctgtacttcgctgaatgctcttcactattttcaagagcaa

SEQ ID NO: 325620 - DNA, 462 bp, Homo Sapiens
  misc_feature (361)..(361): n is a, c, g, or t
  misc_feature (392)..(392): n is a, c, g, or t
  misc_feature (402)..(402): n is a, c, g, or t
gttccagagctctggtgctacagctcccaaccctttgattggcccaggaactgcttgttgagtgggcatccgtgttcatagctctgccccttgcaaccctaaagcagataaaatgcaggaggcagaaattgctggcagacagcatccaattaatccccactacccaattcagtttcttcccctgacctgacacgtccctgcccagctgtgcctcccactgttcaccttttgaggcacaaaacgggctgtttatgctgctgctgcatttagctcaaaacagggcttcagagtcaaggttctggactcaggcacccggattaaatcctgccctatggaattcctagccaggtgacctcagggncttacattaaccttttcttgtaacctcaaanttccttcatnccaggaaaacagggggtggatgcttgtcttaacctcatttgggatgggtttgtgccaggg

SEQ ID NO: 325621 - DNA, 533 bp, Homo Sapiens
  misc_feature (56)..(183): n is a, c, g, or t
acgctgcttccagtcatgacagaaagtgaagggaagacattgtgtgtggagagacnnnnnnnnnnnnnnnnnnnnnnnnnnnnnnnnnnnnnnnnnnnnnnnnnnnnnnnnnnnnnnnnnnnnnnnnnnnnnnnnnnnnnnnnnnnnnnnnnnnnnnnnnnnnnnnnnnnnnnnnnnnnnnnntccaaactgtaagcatgctgcctctctcccagaattgatgtagagaaggttatctcccaagagctcaagcaggtggctcacgaaggctgctggaaattggcaccatggtggatcttcttgtgaatggctcatactttgttgctgacatcgatgtagagaaatttaactttccaagagttcaaccagatggcttaccaaggctcaaactgcaaactatagtgggtctgcttgtcaatggctcataccctgtttctgactttcaccattcatgtagagaagtttgtctttccaagagccaaatcagatgactcaccaaggctgctggaagtgggcacaataatgggcctttt

SEQ ID NO: 325622 - DNA, 459 bp, Homo Sapiens
  misc_feature (431)..(431): n is a, c, g, or t
gatgcatgtgcatgagctcaaggaacatgactactggagtttccattacacattgttgcgtgccttgtaattttccccaaagacggtagggattcttttgttttcttaagtagcccaaagaatctttagttagaattaagaaaagtataaactatataacatctaacgggggaaattatatttttagtgttctccctttcctgggagtatttgcatagggaattatgaaatgaaaatttaatgtaaaatgcatatagtaaaaaatactagtagttactttagttatatttaaggacacatctgtacgatcagctaaaagagaaaaggtgctgaaagagagggccctttattttattctctcgtttccccccaattcttacctggaatttttattcaaaggagggtgacattttgccgttgttttttgttcnttgtgaatggtggtgaagtggccccccc

SEQ ID NO: 325623 - DNA, 542 bp, Homo Sapiens
  misc_feature (265)..(265): n is a, c, g, or t
  misc_feature (377)..(377): n is a, c, g, or t
  misc_feature (439)..(439): n is a, c, g, or t
  misc_feature (497)..(497): n is a, c, g, or t
  misc_feature (509)..(509): n is a, c, g, or t
tttttgggaaacgagaggctacaaccaagacagctgaaggagaatgaaacacacacatccacagaaacagagaggcgtaggtggccctgccgttgaccgcagcctctctggacaggcaaggggagttggcgcaggtgaggactcagacgacgtccaccgtcccaaggctgtcactagtatttctctgaagtgcctgaaggtaggaatgggccggcgattgggaccagctgggccccaccacggccacgccagggcaaagcgccanaggccctgcactccacgctggccaagaaggctttccacgcagaatgacaagactgcaaaaatccgatgtgcttccttccctgggcgcagtcgctccttcgagccgctgcccnccacccaccctgcacccctcggccttcccccaccacagaatcttaagaccttttcagctttngagccagggggacggtgtggattccgaagccaaaagcctttccgtgggacattaaggncccgttgctttnaaaggggtttccaggggcaaaacttaattttcg

SEQ ID NO: 325624 - DNA, 736 bp, Homo Sapiens
  misc_feature (480)..(480): n is a, c, g, or t
tcccctcaaggttttaatttctcaggtctggagagatcgcagaaattctgatgcaggggtctgagaaacatacttagggagataatccaagagaattggacctgcttttcagtctgctgacaagtggataccactttactccagctacccagtgcccacgagcccctgcttggacatctgtcctctttagagtctgtgcctgaaagcctatgccccatatttgagagatgaagctgtagtgtgggaggggagtggggcttgcttaatggttgccttcttggttagccagcttcagagtttccattatggcctgtaaagaggtctttttacctgcagtgtcttccatcgatattctgcctcatatacactctacttctgcctcaaggcccagtatgaatctgaagtcgaagtgacttttgtagcccatacttgggttcctgctcacaacttctctatgaatgatgatggggtcttcctggntttttctttttgccttggtatgggctggtctgattaagcttccaattgggctgattttaatctctgaaattatattgtaagcatcatgaaggttgtggggtctgcatggtgttgggcatacagttatcgatgattatggataacttggttcaccgtgatgtttctggggtggagtgaccactgtttgatacctggtttgacagatatcaaaaccatggcaataagggtctagaattggcttgatctccacagtatc

SEQ ID NO: 325625 - DNA, 355 bp, Homo Sapiens
aatttaaacaaatagagataagctttactttgaaaggttcatgtgaacattaaatgagaaaacatacataaggtaccttacctatagcacaggttgtgagtcatttaaagaaacattgtaaataattaatagtataagtgatatacagagtggtgaaaatcatgaatgtgagacctaaacaaaggctttaaacataaaaccatttaatgagttattataattaaagtattgcataagttgtacaacgctaaaaagaatgtaggctccataagagtaggaactatgtctgatttggtaaccactgcacccttggcataatatctagcatgtagtattaactttttggttttgtttg

SEQ ID NO: 325626 - DNA, 378 bp, Homo Sapiens
cattataagtgaagacgctgtgtgaatcgtgtttggaatctgatttttctcaggtgatctacctataagtgcaatcattggatcaagggtagaaatatcttttagtgatcttgctaaatactgcctaactggcctacagaaaatttgctaatcatagtccctctaattgtatataaaagtgcccactttgttatactcttttaaaaaattcttttcactccgttttaaatcaggaagggctttgtccagttgggtctctgaaacagtgggtctgcacactgtattttacatatgtgtattttccagtatggggataaggttcgggctggatatgggtttgggctgtgtcccctaccccaaatcttcatcttggaattt

SEQ ID NO: 325627 - DNA, 613 bp, Homo Sapiens
tttaagataaatatacattaccacctatacttaaacctgagcagagggatattcttggctgtatagattaagacaccatttaaattcaaagacaggatggtcagactgcaaacactggtccaccttctagtatagtatgtggagatggtatggatggaggtgaattctggaaaaaaaggcttgggcttatatgtagaggaatatatagttacatactcagcattagaaagagaaaaaacaaggctcttaaggagttccaccttctgtttttctttagtttaacaaaacctataaaatatactcccaacctatatattttattgtaagaagctgagtttatattacccaaagatactatattattaggaaagctaactttaaatatgaatattaattccatgtacatgagggacctagagtagatgaattcagagagacagaaagtagagtggtggttgccagaggctggaagagtggggatgaggagctgttgtttagtgggtttagtttcagttttgcaagattaagagttctttacaacaatgtcaagtacttaacaatactgaactatacacttaaaaatggttaacatgggccgggcacagggctcatg

SEQ ID NO: 325628 - DNA, 464 bp, Homo Sapiens
  misc_feature (44)..(44): n is a, c, g, or t
cccaaaccctcaatgggaccctccgttttcagggaacccaatgnagaaataaaacatgtcctcaagtgctttgtctcccgccaagcaagccgttccctggcgggccttagtagtcggtgaagggggtaccgcaggaagatgaaagacgaggatgatgcaggagggtcccagggcagaactggtgatgttgaacagccgggccgtctttgcatcctccacggctccattcaggtcattgagaagcttcttgtctcgcactttgagggagtagccaaggcgatgaagcccaggcagcagaagttgaggtagacgaagttgaagatggaccacaggtaatagtcgttcacctcggtggtgtccgggtagacctcgatgacggtcgtggggttggtcatcgtcttcttctcggctaggtgcttgcaggcaaggggcgcgccggcagcccgcacgctgtcggtcttgct

SEQ ID NO: 325629 - DNA, 476 bp, Homo Sapiens
  misc_feature (15)..(15): n is a, c, g, or t
  misc_feature (53)..(53): n is a, c, g, or t
  misc_feature (71)..(71): n is a, c, g, or t
cacccctgttacctnaaaaaaggcacctcactcccataggcgattcatcaccnaaacaccgcaaaagaacnaaggcaagccgcccgctggtttataaggcccgggtgccccctcagggatgtcaggtcaactgccgcagagcaggcgatgaaggcggtgatgtagagaacggtggcgctgatgttaaagatcattaacacccagtggcccagggaaccatgtacaacttcatgtgcagctgaaacaggtagaggttgaagaggacgattgtcaccagccagaggaagacagcgacgaacatcaccccaccataggccggatacaggtggtacggggtgtccgcaatcagcgcccacaccagcagccccagcacctgtcaggctgttcccacacggcaggatgggcctgaccatcccagcagagcatgggtagtggctaacagcatgaactctggagcccagctgtctggcttcgat

SEQ ID NO: 325630 - DNA, 809 bp, Homo Sapiens
  misc_feature (114)..(128): n is a, c, g, or t
  misc_feature (417)..(431): n is a, c, g, or t
  misc_feature (505)..(559): n is a, c, g, or t
aaagactgtcgaccaggttggattatttatggtgtgctgatgaagaggcaactttccatatgaggaacagcttaacagaggaatagtcaagttaaactaggaagaggtccagtnnnnnnnnnnnnnnncaacaaaagcggacgtgaataaaaatgacaggtaataaaacaatacaaatctaaaaatgctgtaactttcagaaataatttagggccaaaagaagaggaaaaaaatctagttttgctggcgttgggacaattttccaagaagcaaaagacatgaagcaaaatgaatgtgctgaatttaagaccaagtttgcctccatgcctttctagctacaagtttggtttcttctaaggctggtttgattcataaaaagttgttaacttttggcttttattttagctgatgtatccnnnnnnnnnnnnnnncaacaaacatctgctgtgcactattccatgtcagccactggaccctctagggctctgtgctgaacctctgttcnnnnnnnnnnnnnnnnnnnnnnnnnnnnnnnnnnnnnnnnnnnnnnnnnnnnnnngtccaccctcagcttctggacagcaaggtgggtgctatgatgacagctataacaggggcaagggaagggcagagggacaaccgcaggaatgaggtgctgcatgggctgagacctaaggaatacaggccccaaagtgaaacctggcatggaaataatttagtgaatgttgctttctattctgattgaatagacacttaccaaacctccatgcaatccaaaccctagtttttatttaaaaattaaaatgcat

SEQ ID NO: 325631 - DNA, 531 bp, Homo Sapiens
tgagccaccatacctggccttgatgtgcattgttactttaatttttacaacaattctgttaggtatgagccaaaaaacaggtttctacagaactgaggctggggctaaggaactagttctagagttttaagcagcagaggtagaatttgaatccaggtctatctgactccaaagaccatgatctttctaggattctagaaacaaaaagcccaatagttacatttacagggtcatttaggatttgtgaaaggtatggtaaggcattttctcaggttggctaatagacctatgctgtttcttcccttttcactcccagcattatttttccctgcctacactaatatgcctcagactactagacaacaaatattggtggttgataatcataaaaaggcagatggatactctaatgcagtttgttccttggtagagtgaaaatattttgggagatgaaaggacgttggaatgtctttgagcttcaggaagacaagggcctttccatcagtgctcgtgccgaattactgggccgcg

SEQ ID NO: 325632 - DNA, 990 bp, Homo Sapiens
  misc_feature (693)..(767): n is a, c, g, or t
aaagaataaaaacatttattttaaaaataccatttagcatcaattgccccaagtttggcaggcatgaagagtgggcagttcaggttttattagtatataaaattggctttacaggaagcattatggcaaaaaaatgaatacttattatgaaaactgaaaaagagaagtgagtagtaagctactatcagaacgttaaggctaagaaaatgtcactatgcaatgaaaaccatctcctcctctaataagtactaacagaataggaggcttgacttacttgcatgctcctcatagaacgttttggttcatggctatgaagaggtaactgcaaaaagatgtgtgcagatcccggtactggtaggggatatacaagtggggaataagaaaaaagaaattaagcaaaatgtctttactcaaggatctctataaaaatttatttttaagaaagcctgagtaagcatgtatatttttttcctgtgactttaagtgtaatgacagcattaaaaataaattatgctgtcaatatacaaaaaatatcttttcattataagcatatataaagccttctgcaactattacatatcactttatcgaatccaaacttttttgcttgttcccttttgtggtccctagtttttcacatcctcatagaggacaaaagcctttagagatccatcaattcaaccctttcatttnnnnnnnnnnnnnnnnnnnnnnnnnnnnnnnnnnnnnnnnnnnnnnnnnnnnnnnnnnnnnnnnnnnnnnnnnnntctcatgatcccgaagagggcttttctcattacatgacatgacccattctccatcccatccctgatctcaagtggacgatgctccctcaatctcagatgggcagaagggctgtggaggaaagaaacaatcctgtttggggcctctctggcttgttaggagcatggggctctagaataggaggtaataaaatacatctccttctatccaaagtctttataaata

SEQ ID NO: 325633 - DNA, 502 bp, Homo Sapiens
  misc_feature (346)..(365): n is a, c, g, or t
aaaaagcctttaagagacccatcaattcaaccctttcatttcacagataaaggagggtaaatagtttgcccacagttacattcatcctcagtggcagaaattggactagaaccaagtctcatgatcccgaagagggcttttctcattacatgacatgacccattctccaccccatccctgatctcaagtggacgatgctccctcaatctcagatgggcagaagggctgtggaggaaagaaacaatcctgtttggggcctctctggcttgttaggagcatggggctctagaataggaggtaataaaatacatctccttctatccaaagtctttataaataacctatnnnnnnnnnnnnnnnnnnnngtcaggctactttgaagacctaaatgagaaatacttcctgagaagagaattgtgtgtgacggaaacttttaaagcttccataagagaggtttttgatttaaaaagtgaatatctggccactcacacagttatacgcc

SEQ ID NO: 325634 - DNA, 540 bp, Homo Sapiens
  misc_feature (482)..(482): n is a, c, g, or t
  misc_feature (500)..(500): n is a, c, g, or t
ttcattttcaaagtattttatttaaataaatttttcttttgtgtgtgtttgaattttacagaaaaaaatactgacaaatactatacagcttggaccctttatatttttcttggaaaggtggctgccatttttctacctttctccctccctgctccccccaagaaaaagaaacatggaatccattgagcaatggggaaaggagcaatggggaaaggcctcctctggctgccgtccggagcctgggctaaagctgctcagaagtccagggcctaggggatgtctttctcgagcctatgctgggtctagggaagcctcttctttagggaatcatttttttgtcccccgtggaactttaccctccccagatgaggtcaaggcagtctctgggtcctgagggtcccatggggtttgccagtggcagttttcagggggacagagggctgggaagggagttgaaaatgggagagggaataaaggggctnggggctgggtcttgggtncagggcagaagagggggattcaggagaagcattaaaacat

SEQ ID NO: 325635 - DNA, 751 bp, Homo Sapiens
  misc_feature (306)..(507): n is a, c, g, or t
  misc_feature (509)..(540): n is a, c, g, or t
agcttctgggatacagtttgtctctttgagaattgcatactaattaattttagggggtcatctgtacacatctctatattcctgaaacatggtagaaacagccagcagtcagacaacaatctaccatgaccactaaagcatccccaaagtgaaacaccagatgtgacccactaggtttagtggggatggctggctcgagagttgattatatttattattgtcactgtggtgattatggccacaacattgtgatgcgtgctggtcttcttttggtgagttgcagtttggaaggaataaatccattannnnnnnnnnnnnnnnnnnnnnnnnnnnnnnnnnnnnnnnnnnnnnnnnnnnnnnnnnnnnnnnnnnnnnnnnnnnnnnnnnnnnnnnnnnnnnnnnnnnnnnnnnnnnnnnnnnnnnnnnnnnnnnnnnnnnnnnnnnnnnnnnnnnnnnnnnnnnnnnnnnnnnnnnnnnnnnnnnnnnnnnnnnnnnnnnnnnnnnnnncnnnnnnnnnnnnnnnnnnnnnnnnnnnnnnnnattgggtgtggtggaggatgaactgcagactatgttttcaagttgtcctaatactccaccgtgggacacgcaggcttgtgggtcccagagctccagaagcatcttctgaccgcaccatcctgacccagattctactgaaaaatacgtgagtctagcagagccatctctgacacttcccttgcttttgctcgtgccgaattaatggcggcgt

SEQ ID NO: 325636 - DNA, 746 bp, Homo Sapiens
  misc_feature (354)..(354): n is a, c, g, or t
cacacatcactatattttaaacatgattaggcaagtatatttttgttactaaaatagtaaatacattttactaagagtgaagtacattttgttactaaaaaggagaaaagttattcaaaatgataaatatggaattaataagctctcgcattagaagaaaataggaagaaagttagcaaagaaaggggtgaactgaaagcgtcaacatgcattcgtgaaagtctgggtgcagtttattctgatttactctgaggtgagctgaaatcaggaccgcaggctgggcgatgcatctgtgacaaggctgggcagactcatggggtgcctgccccccctcctcctgcagcccctcccccnggggcaggcctcctgtcctgggagccaggctgctggcatgtcacacaaaatcacgtgtgctgggttctgcacagagcaaagccaggtatgcagcacaaggcaggctgtctggctctcgaagaccccgatagagagcccccgcaggctgggcatattctgaccccagaggtggcagcttccctgcagttccctgatctgtcattcctgtcctgtgacttcccagggaggggcagctcctgggagacccaccagctgacacctgggactctgcccttccttcctaggctgctgtgtgagtggggcttgggtctggagaccctgagggctgccccaacaccaacacccctgcctgtgctcctcttgtgacatgggtgcgtcctgtctttactgcc

SEQ ID NO: 325637 - DNA, 545 bp, Homo Sapiens
  misc_feature (233)..(233): n is a, c, g, or t
  misc_feature (347)..(347): n is a, c, g, or t
  misc_feature (369)..(369): n is a, c, g, or t
  misc_feature (412)..(412): n is a, c, g, or t
  misc_feature (439)..(439): n is a, c, g, or t
  misc_feature (456)..(456): n is a, c, g, or t
  misc_feature (470)..(470): n is a, c, g, or t
  misc_feature (476)..(476): n is a, c, g, or t
  misc_feature (496)..(496): n is a, c, g, or t
  misc_feature (502)..(502): n is a, c, g, or t
  misc_feature (516)..(516): n is a, c, g, or t
  misc_feature (523)..(523): n is a, c, g, or t
ggataaaaatggggtatcataaaaaattaatgaagcatattttaattggtcagacccaacactgttggccagagtgactgccctaactacaatattttatgaaaggaaaattgttcaaaccagcaagatacagctgaagacatcaggggaaaatccacacagagatgtgggaaggcagcccgaggactggccagcagggaccgggcactgtgattcctgaggcaaggagcggncctgggtccatccctcaccctctcagagcctctgtttcttctgtcaataacataacagggactgggattaaatgccctctcgggttctctttccagccccaaccctgactccgnctgtccccatggactcagggtntgacacagggcaccaaacccatgatgttctgtcctttcaaagnacatcagaaatgcactttacaaaacanccacaagtgacaacccntttttacttgccanttttanagtggacaggggttgggggnagggtngggtttacttactngcccccnggggattggcgggcagttttta

SEQ ID NO: 325638 - DNA, 480 bp, Homo Sapiens
caggttttggaaaaattttattgcattttgtttccatgtggaagcactgacagaattgaaaagtggcagcatgttccacttacttttctgaaaaatcacatggctagattaactttcgccctacccaggacaggattgaataaaccttaactcctacccccaccccaagcaaaagctaaaaaagggggtttctggcaattgcttaaaaaacaaatcaatgtgtgagaattccccgatggtcaataatcatatttgttatttttgcacttggagggcactccctacctccttcacctctatccaccatcaccacctccttcaaacaagactgacacaggaagtgcctctcaaatgggaaaatctattctgtcccagtgccacaggtttagggtgtgtctgtgggtttctgggccaatggggatgggcactatggtcaaactttggaaggggtgggggactgtgagggtaaccccaggcttc

SEQ ID NO: 325639 - DNA, 550 bp, Homo Sapiens
  misc_feature (385)..(385): n is a, c, g, or t
  misc_feature (427)..(427): n is a, c, g, or t
  misc_feature (459)..(459): n is a, c, g, or t
  misc_feature (478)..(478): n is a, c, g, or t
  misc_feature (496)..(496): n is a, c, g, or t
  misc_feature (501)..(501): n is a, c, g, or t
  misc_feature (513)..(513): n is a, c, g, or t
aatttggaaaaattttattgcattttgtttccatgtggaagcactgacagaattgaaaagtggcagcatgttccacttacttttctgaaaaatcacatggctagattaactttcgccctacccaggacaggattgaataaaccttaactcctacccccaccccaagcaaaagctaaaaaagggggtttctgggcaattgcttaaaaaacaaatcaatgtgtgagaattccccgatgggtcaataatcatatttgttatttttgcacttgggaggggcactccctacctccttcacctctatccaccatcaccacctccttcaaacaagactgacacagggaaggtgccctctcaaatgggggaaatctattctggtccccaggtnccacagggtttaggggtgtgtctgtggggattctggggccantggggatgggccatatggtcaacttttgaaangggtggggggacttttgangggtaacccccagcatcntgggncatcttcctgcngggggcaacagtctcccgggggttaaaatttagggta

SEQ ID NO: 325640 - DNA, 418 bp, Homo Sapiens
  misc_feature (248)..(306): n is a, c, g, or t
  misc_feature (385)..(385): n is a, c, g, or t
atagcttgtgccttttatttacaagaatttgggttggcctggccgaggggcacagcaggtctcatggtctcggtagactgggccagtcaggctatgagtttggtctccatggagacgaggcattccggcactcgaaggttacatccacatggccccaggagtggctgtatctgtgggtgcagccagggttccagggacacacctcacatctgcaattccaaccctctggggagggccaaggcaggaannnnnnnnnnnnnnnnnnnnnnnnnnnnnnnnnnnnnnnnnnnnnnnnnnnnnnnnnnntctgatgaaataggaatgaatcctgaaatgcacctcttgggattcggggaatggtctgtgtgttattcagctgcgactngttcactgcgttttggacaagcctcatggggga

SEQ ID NO: 325641 - DNA, 617 bp, Homo Sapiens
aaacaaggatctgctggtgatgcttcacagtgaaacctccattatcactgagaatgtcacttggaaaacattcttaagaaatgagtctctttctcataggctcaatttcaggattctcaaactcaatgttctgctcagaagtttccatgatgaagcctatttgtctctgaggctggggctctgcctttagacttattctgctccagtcatagggttgtgggttgtctttgttcttgggtcagaacctgcaagtagacttcatgaagtgtactgaggaagctggaatcattctttattagatgtattaatgtatcctggagctgagacttgctgagaataatggaaggctttctctgactttctggcgttcccaatagttagaggagaaggggagctggctttcctctcaaggtccgaagatcttgtaactgtctgctggaaaacacttggggccagcaggactgaagacactgcagtggtcgttgcagtaaccagtggggcgcctgcaaccgggatggcactggataacaccttaggctgcacaaatacttcaggatcctggttctgctgcatagactgaaggggagcaagcaccatgttgctcagggaggctgagg

SEQ ID NO: 325642 - DNA, 406 bp, Homo Sapiens
aattttttaactccacagaagatttcagtttgcttctactgagaaattgcttctactgagaaataggatttgtcatctacctgggaactttctagagtccaagctcaattggcaaaagggcaaatgctaatatgcacatttgcccttttgcatctccaagtgcatactacttactgttcaggtttcaatttaccctttttttgtgcagataagagacagatggtgagtgtgggaaatgaaggttgggtgtcggtaggttcttggtagattttccttacttttttgagctcagcaatgtgataacagttttctgctgggatttattggggcctttccagggatatacagtatttaatatatatatttactgggaaaaaaggatgttccagttttttaaggcttttcc

SEQ ID NO: 325643 - DNA, 577 bp, Homo Sapiens
  misc_feature (365)..(365): n is a, c, g, or t
  misc_feature (394)..(394): n is a, c, g, or t
cagctctagcatctttttagctctttattttcatgtacacctaaataagattctatcttggagagtttgtctatttttgtgtatgttgtttgtttttagcaactctgttaatcttaaaccccctaaagcatctgcttattttttcagttttttcaaaatcagttatccatgtatatgatctaaggaaccaaccagctccacataggcttcccagcttccctttcccatttctgcttccttaggaagtaactaccttcaactctttttagtttattcttttgggtatttacctccatattgccaagtaacatggtcatttttggctattggggtaatttcttactactagatactatctccctgancttccctcctagggaagatgagcttgcanttccctcccctgccccactctatttatgtatatatttcttacctccacttccccatgatcatacacatgctattcagattttacccaagtaatacctaattatattttcttgtctgtatattttgttttctctggagttagtaatttaaaaaatatgcttgatggacaagtgcagtgacttat

SEQ ID NO: 325644 - DNA, 881 bp, Homo Sapiens
  misc_feature (721)..(721): n is a, c, g, or t
  misc_feature (787)..(787): n is a, c, g, or t
atcgctgaattccccttggaagtaggttttattatccccattgtgcaggtgagaagcaggcttagcggggttaaggagcttgtctgagccttcaggtcattgtctctctcactcctaagggctggacacatagcagagtcagcgcttgatgtttgattgaatggggaaggagaggtggagaccacgccctcctcccttgtttagaattgtcttcgtcgtcatgataaacccgttctgtgtccccatcttgccttccattctgggctgaaggtcaggggtgggagtagggaacttccaggagacagaaagctaaggatccgcctccagggggagactctgggcaggccaagcagtagtttgggcttttgaccccagagtagagctgccccatcttctggaagccgggcctgggccccagagccactactgggaagggactggacaggctcttctcgatgtcacagttggattcttctctaagcccttgcttctcctgggcttacacacactagtcacctccaacctactctggtcttcaggtgaaagaagaagctggcggaaagaatgaagggggcaatgaaggctgaagcaaggaagggagtacgaagtcccagacccacttttcctcttccactctggagcagcatcggtgagtttgcgtcagtaagctatttgcccttcggagcaggacctcgctcctgtataggtgagaatcctggcnccgccaggagctcttcctcatcatggcctggctgctgcagaggttcgacctggaggtgccagatgnatgggcagctgccctccctggaaggcatccccaaggtggtctttctgatcgactctttcaaagtgaagatcaaggtgcgccaggcctgtagtct

SEQ ID NO: 325645 - DNA, 806 bp, Homo Sapiens
  misc_feature (187)..(187): n is a, c, g, or t
  misc_feature (190)..(190): n is a, c, g, or t
  misc_feature (192)..(193): n is a, c, g, or t
  misc_feature (200)..(200): n is a, c, g, or t
  misc_feature (204)..(204): n is a, c, g, or t
  misc_feature (326)..(422): n is a, c, g, or t
  misc_feature (544)..(544): n is a, c, g, or t
  misc_feature (547)..(547): n is a, c, g, or t
  misc_feature (560)..(561): n is a, c, g, or t
gcctttttcttctttgatgcccttggaggtttgattgtggtataaagtgggttgactggttttgcttctggaacatgttaggggaccaaagcacacctcagcactcctgggctgtgtactctaactctggggctggtaacaggtccccagctctgttttctgggccccttggtgggttgggaacttnttntnnttggagnagcntgaggagttctcagtctgctgaccacagcacttcagtggatggtgttggccaaagcacttcatcttggcagtgacagcagaacccatgctcacttgtgtgtctcagcagtcacaatggcacnnnnnnnnnnnnnnnnnnnnnnnnnnnnnnnnnnnnnnnnnnnnnnnnnnnnnnnnnnnnnnnnnnnnnnnnnnnnnnnnnnnnnnnnnnnnnnnnnggtcctcaacagtggcatgttggggtgcatgtgcattggctttggtggggcaccaatgggagtggggtggaagcattcttgcacatgattgcagtggtggcatagcaggggtagtttgctgncanagacaaatgtgtnnccagcattcatgccccgtccctggtggcatggtggggtgcctgcatgttagtaggggtgggactgagagttgtgctcccactgacagtggtgagatggcaggatgcatacacacatgtgcactgaagagtaggagaggtgaagtctagaaacagacacttcaagagagaggacaaagaaaataggaatttctgctaaatgggtggtacaaatatacatatttaataagctctgcgtgccgaattc

SEQ ID NO: 325646 - DNA, 379 bp, Homo Sapiens
ttgcccctgtggtgtgccccaaatgttggctggccctctgtcaaccttcccaataacactttaatcttgccttgggtaataacacccattctgttccttgtcccatctggggaatccgttggtcccttcaaagttctggctcacaggttggcccctctgaagcctcttggcatcgccctggaattctgtgagtacttgctgcacttggccgctgtggccgggtgtgctgctgctacgggcttacatgcctgtccccactggccttcactttctgtgcaggccagggactggagctgtttaaatcccagctccaagcaacagtgccctatggcagatgctcagtaaacgctgagctgaagtgaatctgtgtatttcagta

SEQ ID NO: 325647 - DNA, 488 bp, Homo Sapiens
cttactgaaatacacagattcacttcagctcagcgtttactgagcatctgccataggcgcagcctgtcgcattggagctgggatttaaacagctccagtccctggcctgcacagaaagtgaaggccagtggggacaggcatgtaagcccgtagcagcagcacacccggccacagcggccaagtgcagcaagtactcacagaattccaggcgatgccaagaggcttcagaggggccaacctgtgagccagaacttgaaggaccaacggattccccagatggacaagaacagaatggtgtataccaagcaagataaagtgtatggaagtgacagaggccagcaacaatgggcacaccacagggcaaggcccaggacacagcagggctgaactggcaccctgaagggggcttagtgtctgcctgtgaagggcctcaggtcccacaccaaagattttggaatctatcccaaagagatgccaaagagagagtt

SEQ ID NO: 325648 - DNA, 338 bp, Homo Sapiens
  misc_feature (288)..(288): n is a, c, g, or t
aactctctctttggcatctctttgggatagattccaaaatctttggtgtgggacctgaggcccttcacaggcagacactaagcccccttcaggttgccagttcagccctgctgtgtcctgggccttgcctgtggtgtgcccattgttgctggcctctgtcacttccatacactttatcttgcttggtatacaccattctgttcttgtccatctgggggaatccgttgggtccttcaagttctgggcttcacaggttgggcccctctggaaggcctcttgggcattcgnctggggaatttctgtggagtacttgctggcactttggccgctgtgggccc

SEQ ID NO: 325649 - DNA, 493 bp, Homo Sapiens
  misc_feature (407)..(407): n is a, c, g, or t
  misc_feature (425)..(425): n is a, c, g, or t
  misc_feature (474)..(474): n is a, c, g, or t
ttttcttagagagcatatttctttattctatttttatcatgcaggaactgaatcagcaggcaggatactgctcttctccccaacctcccccatctaaaggagatgagattttgggacataggtacaaacatagtggaccataggtacaaacatagtgggacagggaactcagtgggtcttgtgggctacagcattaaccacagcatttgttagttactgccaagaagcctgtatctgtagggtaaaatcctcgctgaagtggggttgccaaaacaatcaatatcacgttgcctaagagcagggaagttctcaggggtccacgtgcagcttgttacagtgcaggtcactcagtgtaggcaaaggtgcctttgaggtcatccgtgaggcataacagctttttccgaagnggattcagcacctttttngccatgtggccttgattttgggggttgcccttttttgcacagtcagagnccagttttccaaatttttt

SEQ ID NO: 325650 - DNA, 733 bp, Homo Sapiens
aaggtgtgcaggacctatgtaccatgctgtggtttgaagtgtctcacagacctcaagaggctctccttagaaaacagataggtctaaggtagtggttcttatgcattggtgattttgctccccagggaacatttgacaatgtgcagatatatttctgatggtcacaactggggaggttactgacatccagtgagtagaggttaggaatgagactaaacattttacagctcacaagacagctgtctactttcccaagaaagagttatcttatctggccccaaatgtcaatagtgctgaggctgagaaatgctgatctaaatggagagaataaatcaacagcaaaagcatgtgatacatgcatacataggcttctacctaagaaatgaaaggggacaatctaaattgtggcagggttgcagcatgggatggtttcctagaaaagctttctggagccagctgaccatgaggtaaattttgacacagagattagttgaagattatggaggggtgaatggaaagaagggaatggaaaaatagtggtcaaggtaaaggaacaatgagggtgatggtgcataggaactaaattacgtaactcattgtgttagagacaagggccaacctggggcaccatggtttgggggcttgagaggtaggcagggggtagttctgctagatgatgagatctctggatgttaaactagagtctaaatcagcaatgtgcaatcaaacttct

SEQ ID NO: 325651 - DNA, 659 bp, Homo Sapiens
  misc_feature (81)..(94): n is a, c, g, or t
aaaacctcaaatattaaagaatttcatgagttcaaatactttaatcatcctttaaatgtattaaactttcaaaaaacaacnnnnnnnnnnnnnnactgagtgtagaactatcagtgtcatttttccggttgtgatagggtctagtcattcaagaagttaccaaatgggagggtttgggtagaggactggggttaagggtataaaggggtgtctctattatttcttgcaactgcatatgaatctataattatctaaaatcagaagtttttaaaaagcaatttacacgtgtttttaaaagttaaacctaaatcaattaaaaatttatgtacctactggtacatgtagtactttcaggtaggcaggacactgatcaaaagggtacattaaggctaacttcaattgtgaagctgctttgaaattactcatcataacgtcttgatgaaagcacacactgcaaattcacttaaaaataagaaagaatactgtactcaaatgaggcatttaagaccatcttagagcagtgaggctgacaggcattcaatgtcagattgtagaaaccagacagttgtacgcaagggattctcgcatccactcaacatccaacacacatctaccaagcacctgctgaacacaactcctgcccttggggtagaattctg

SEQ ID NO: 325652 - DNA, 769 bp, Homo Sapiens
  misc_feature (216)..(229): n is a, c, g, or t
gttattgcaacccaggatttttcagccccagttataaaactctgccctgtgtttcagaccactggtcaaactacgtgacccaatttctgctgtcctcaccctggcttagttaattggaacattgtgctaagtaccaaggtcagagatgagtctctgtggatgctgtaaagccattcgattttacagtcttgcttaaaccatagcttctactttacnnnnnnnnnnnnnncgtcagtaatcactggggaagggaaaccaacacggatgcctcagtcaaggaagaaaagctgccacatcatttcagtactaatatcggctaagcttaaatagagcatttttattaaattaaggaacttaaaacggtattatttttaaaaggactaaaaataaatacagacatagtttctaaaaagatttgcaagttgatttaattcatttaagtagtcctacatgtgtcacaccttcacacactcagagggtcacacacaatttcctggtttgttgcattgactcttctaggagattttgtgaagtaccagtgccaccccgggtacaccttggtggggaccgacattctgacttgcaagctcagttcccagttgcagtttgagggttctctcccaacatgtgaagcacaatgcccagcaaatgaagtccggactggatcatcgggagtcattctcagtccagggtatccgggtaattattttaactcccagacttgctcttggagtattaaagtggaaccaaactacaacattaccatctt

SEQ ID NO: 325653 - DNA, 435 bp, Homo Sapiens
  misc_feature (343)..(343): n is a, c, g, or t
  misc_feature (391)..(391): n is a, c, g, or t
  misc_feature (398)..(398): n is a, c, g, or t
  misc_feature (415)..(415): n is a, c, g, or t
  misc_feature (423)..(423): n is a, c, g, or t
attgctttgggaaaacataagttaactcaagaatatattccagtctttatgttactaaaacattgtaatagtgtttttatcaatgatgccgaggtcactgctctacaaagattaaagaaacttaccatcaaacacttccagtgcatcaaactgcttttcactttgaaatgtgtccacaaagatggtaatgttgtagtttggttccactttaatactccaaggggcaagtctggggagttaaaataattacccgggataccctgggactgaggaatgactcccgatggatccaggtccgggactttcatttgctgggggcattgtgctttcacatgttgggggnggaggaacccttcaaactggcaactggggggaactggggcttgcaagntcaggantggtcggggtcccccancaggggtnttaaccgggggt

SEQ ID NO: 325654 - DNA, 645 bp, Homo Sapiens
acaagaagaagaatgaagtccaggaggagaagggctcattgcaggccacagaaagatttgatgggtgcagcgatgagaattcctggttccaggctttgcatctggagcctttaccggttgactgttgccttccacacaaacagcctctgaaaagcactttctccatacataattctggagaagatgagggatcttgccctccaggagccttccttcctcccccaatgaggaaatcagtcactgcactggtgcaaaggcaagcagattggaatttgtgctcttcaccgattttctcagggaaagacccccttccccttgccagcagaggaacctgtagttttttccatttctttcttcagaaccaaagtatgtatcactcctcatgctcacagggattgacaggagagaattcaccaggatcttagctcaaaagacacagcctcagaatggccagatggattgcacgaaacctgacttggattcaccatcttcctcctgccataaggctgtgctcccacataacctcccagaagctccagggaagctttccaagagcaaaggcttggaaattgaatgttaagaaaattatgacataaattacatgtaaatagtgtatatgattaaatattgtccagttacatttac

SEQ ID NO: 325655 - DNA, 443 bp, Homo Sapiens
tttttaaactcttaaaaattatttaatagaaagtccaatgtcaaaatgtaacaataaacaaaaatacacatgtataaatatgtatatataattagacctgtacactttctcagacccttttcaaaatggaatagaatcatcattacatcttggtggtcaaatcaaaaataatattcaagcgacatgggcccactgctacgtggggggtagtactgctggagcacttcgagggttcaaagaattccaatcaggagagagctggggatattgccagtgtccttttctggagacccagagagggaagatgaacaatcaatcgcatggctctgtccagtgtacctgacttttgcttagcacctgtagccactactgtctagggacagctctcctttagggttttgaattatttacatttatgttgtttgtgagtgagttttcttctc

SEQ ID NO: 325656 - DNA, 582 bp, Homo Sapiens
  misc_feature (59)..(155): n is a, c, g, or t
caggctcaggtgattcttccacctcagcctctcaaatagctgggggtactacaggcaannnnnnnnnnnnnnnnnnnnnnnnnnnnnnnnnnnnnnnnnnnnnnnnnnnnnnnnnnnnnnnnnnnnnnnnnnnnnnnnnnnnnnnnnnnnnnnnntgagccactgtgtcggaccatctttctggaaatactactgataaaccttaaatctgtagctgaatggaattccctagaagaacaacatgttactagctttaagatttatgtccgcagtatctgccactgggctacagtagtatttactaactgcagagaagcgggctgcctctggagtaacagcctccacaagcactgactaagaaaccactcccttcccactgaagcaacactgtttcgaatctggttctaccaggcctattcgtttccttctgtttaagataattttcaatagagtaaaatgaatcatgagggatggaaaagtctgttaggttatctagaccattcccctcaggaccctagaacatggaaaacttttatagagctattaataaactaatggttatgaatatcttagagtctaatc

SEQ ID NO: 325657 - DNA, 309 bp, Homo Sapiens
  misc_feature (272)..(272): n is a, c, g, or t
ggccccaagaaccccaggtggaaggagggctgagtggcagcgcttttatttgtgggggccttcaaggtagggtcgtggggggcagcggggaggaagagccgagaaactgtgtgaccggggcctcaggtggtgggcattgggggctcctcttgcagatgcccattggcatcaccggtgcagccatttgtggcagcgggtaccggtcctttcttgttcaacatagggtaggtggcagccacgggtccaactcgcttgaggctgggccctgggcnctccattttgtgttccaggagcatgtggttctgtggc

SEQ ID NO: 325658 - DNA, 1153 bp, Homo Sapiens
  misc_feature (435)..(548): n is a, c, g, or t
  misc_feature (1135)..(1135): n is a, c, g, or t
ttttaaatagaaggaagggctttattcagctgggagcatcggcaagctacagccttaaaatctgagctcctcaagtgcacaatttctgtcccttttaagggctcacaacactaaagatttcacatgaaagggtcgtgattgattgagcaatctaggggatatgtgacaggggtttcatgcactggtacagaacacaacagggagtttcacaatttttttatacaatgcttggaatctacggataacatcaggttctaagtcgtaagttgatttttaactactaggtttaggccaggcaggcccagggctggtttcaggcctggtgccgggctgcctgtctttgaatttcacttccttgtttttttcttaaaacaggtactgagtataaaacaatataaaacaatatgagaaggtctctctcttccctcaagagtnnnnnnnnnnnnnnnnnnnnnnnnnnnnnnnnnnnnnnnnnnnnnnnnnnnnnnnnnnnnnnnnnnnnnnnnnnnnnnnnnnnnnnnnnnnnnnnnnnnnnnnnnnnnnnnnnntaacaggatttttcagagagaaaaagttttttaattttaatgaaatccaccaatttatctattttttcttttacggcatgtgcttttggtgtaatgtctaaaaactatacctacgcctaggttgtaaagatagtctgttttcagttttatagctttccattttacatttagatatatgatccattttgagttaagtttgtattacatgtaaggttggggttcctttgttttggtctttgacaaatggaagtccacaacatttattgaaactcttcttcctccattggttttaagataaatccgttggcccatacttctgaatgtctatttatggattccctatcttattttattgatgtgtatttttgtctctcctccatggatacatgaaggaaagggccttggacacaaggcagtggggaaaggggctggggggccacacagagaaaggagaagggcactaagatcaggctcagcagcttctggatctgaggcgccggagattatttatgggtcaatctggcagcccctgggcctcaggtaggactgcttagcagtgaaaagggcgtcctgggtgcagccaactnggtttaagctgcaagcca

SEQ ID NO: 325659 - DNA, 463 bp, Homo Sapiens
tttgcagatctagacttattaaatttatttcatgtcattgtggtcacttttacagctgtttagacttattttcaatcacattactcttcacagaattcacagaattcattaactaactagtatgttacatccaagggttcttagtagcacattgaaatagaaaagaggcccacgagttgttgcttgtgtgtggaacctgagtctgattacttagacagatgtctagaacattattgctttattaggcctatttttaaaaataataaattattcctaggaaacccaccctgccaggtgctcattctgcgactgctgtgggttcactcagaacatacctgactggtgggtgctgaatgaacctcccacccatgtatcctgctgctccggacgctctgagggctggagcaatgcccctccatgcgtgtaaacattttctacagcttgccactttcctccctggtct

SEQ ID NO: 325660 - DNA, 673 bp, Homo Sapiens
  misc_feature (40)..(40): n is a, c, g, or t
  misc_feature (60)..(60): n is a, c, g, or t
tgagggctggagcaatgcccctccatgcgtgtaaacattnttctacagcttgcccacttntcctcccctggtcctttgagccaatgggctgcagtcatacatgggtctctatgtaaaacttaaattagacctaaacaacagggttcagcgaatgaggactaatgctcctataaaagccactgcccatgcaagggaatacacctgatgcaacaaaaatatcttgagtctccaactataaggaatgtctcaaagaaaatgtccttgatttaattatggtccaaggtggctgctttgcacaagcttgtcagtgacatgaacttgaagacttcatggtagatttcatggctggggtttcttattttgttccatatgagtttctattttgtgaaaaatatcttggaggttttcgcgtggtccccaaagctctggggaaccgtggataccagggataagggacgggcttcctcagggtcactggcgctccgaccgcatttggggcaggatccctgagagtggtggctgcgtcagacttgggggatgggagcagatgctgtgtgcagaatgcaggctgcagtcggggcctcagtccagcttcttgttgttgtctgtgttgtgcacagaagctaaaaagtcgattatgagcttggctgtcttcctgggtcctgtgccgaat

SEQ ID NO: 325661 - DNA, 299 bp, Homo Sapiens
  misc_feature (24)..(24): n is a, c, g, or t
  misc_feature (30)..(30): n is a, c, g, or t
  misc_feature (47)..(47): n is a, c, g, or t
  misc_feature (52)..(52): n is a, c, g, or t
  misc_feature (74)..(74): n is a, c, g, or t
  misc_feature (108)..(108): n is a, c, g, or t
attatttgggggcccattaatggncccttncccccctataaaaatangtaangacccattaaaaatggtaaagncccgccataatgaaaataccaagtggagaagccngtttgtaggtaaaattcctattaaagtaatgtataaccgtaaatgttccagagcaatactttattatagtgacacaaagaaataattaaaagtatattaaaataaatgagtatattactttactacttgtacttttatgtaataaaatgcagtgcattttaaaactgttagggccgggcttgatggctcat

SEQ ID NO: 325662 - DNA, 476 bp, Homo Sapiens
ttttttcccagtgtcccaaatttgctttgtcctaagaatctccagggtctaggggcacgcagcacaccaaatccatcagaatctctagggcagaatcttagaaactggattttgttatccaggtatactcaagcaagagtaagaaacactggcctcaaaaacactcgagagacaatgggaaagaaaatttcaattcctatgtccatgttgtcttaaacatcacatcttctaactttatgatcaatgcttgtgattctcttcagaatgttttccagaataatctaaggtaaaatgtctgtgggggaaacaaaacagctgccactgaacctcaacatttatctgtatgcattatgtcaaggcgtgggagggggatgtacgtgtgcacagaaattcacacaaacacacagggtcacatgtatctgaaaatgccaatgtctgccctcgagtaccttacaatttgcaggtaaaaagattcc

SEQ ID NO: 325663 - DNA, 423 bp, Homo Sapiens
  misc_feature (355)..(355): n is a, c, g, or t
  misc_feature (413)..(413): n is a, c, g, or t
ttagtaaacactttgctttggttctgtgtctatactggcatctcaggagagtgagatatccagacctgatcttcagaagcactatgagccagtatccatcggcgccactgatgagttccagagtgaggacagtgctcacagctagaactgaccgtccccacacttcatctccctccagggttctcctgctgacaccaggggctcctcaaaattactccttccttcacacatgggtgacaagggttctcaaaaaggaacacctgggcagaggatgcccactacaggcactgcttgtgggtgggcaagaaggcataaaaggaccccaatgtcccaacaccaggggaatgggattaangccagggggttacccatttgtaaacaaaaacaacttccaaaacccaaccggttaaacngggggaggtt

SEQ ID NO: 325664 - DNA, 949 bp, Homo Sapiens
ttttatgtgtatataaatcttgtcttttattttttaagacaaccctgaagttttctgtggaaaccagaaagggcaagaaattggtcttaggttgctcaaggaaactggtactcacttgtaccctgcggctatacattatatacaggaaaaggaggagggatccaaggagggcgtggagctcctgtgcgtggtccattaattcacattttgctctcttcggttcacatcctgcgcggactccacccaaggcaaccgagcgagggggtgggtgggactcacagcctaccaaataacagtcccagaaaccgaaacgaaatcgaggtggaattctgaaaacacggctcaccagaaagaggggtggagaaggagcgcgagaggagacccttcttttggcagaagaggtatccctggccctcgttgcttcctgggctcccccccatcccctcaatcgcaaacagttccctcctttcctacgcatggaagaaggaagacacacacagagcaaggccactcatccttggaacgtgggcggagaacacacaagtattcctcagagaatttcaaaaggaaatcgaggaaaagcaacctgggagaggaggaggaaaggaaactgactgccaagtgggggacccgcgagacggtggaaaggaactaagcagatagcctgctggtgcctgcgccccaggaaagaagggctacctgttgaatggaactgttcctgcggaggcggagagggaagaaggcgagtcaccccagaaagcggagccgttgtccctagagcagcctcgctggggctggtggcgagggatctcagccccagtgcctgcggagccccaccctgagaagccttggctgcagatacggtgatgagagacaccgacagaaacaagggagaggcgcacgactggagccggtctggcctgtcccgcggttagtcactcacatctga

SEQ ID NO: 325665 - DNA, 621 bp, Homo Sapiens
  misc_feature (513)..(513): n is a, c, g, or t
  misc_feature (594)..(594): n is a, c, g, or t
aggtaggattgaaaagacatggtgactggatattggtgaaggagaatgagatgtcaacaagatttctggcttacatgactggctggatggtgaaactaagaggacagacaggagcagattttggccgcggggagatgatgagctcagggttgggtctgaggtaccaacaggacaacaaggtggagacgtacagtagacagctggatagacagatctggtgcttagaaaagaagtgagattgggaccacagagatttagcaaagccagagatgaggcccatgagagtggatgggattgttccagggagcatatgtagaatgagaagatattaagaacagaacactaaagttagatctacagacatatatttgagagtcaatgaatattgctagggattttatagtctcaagagatgacagtagctccttccttccctcttcgcagctcctcaccagaagtggctaggtgcaggtcctccagcaagaagaggagggagggtttagaatcctgggngatgcccagggctgtgggctgggcttgtgtttggccctgggattcctctgctcagcaggagacggaggtggggaggaactnaaggcagggtggatgggggctgtatat

SEQ ID NO: 325666 - DNA, 483 bp, Homo Sapiens
  misc_feature (21)..(21): n is a, c, g, or t
  misc_feature (29)..(29): n is a, c, g, or t
  misc_feature (43)..(43): n is a, c, g, or t
  misc_feature (54)..(54): n is a, c, g, or t
  misc_feature (80)..(80): n is a, c, g, or t
gggccgatcatgaaaaaaccnttcccccnggaaactgagcacnggatgaactgntaagtggtttttaaaaaagcctatanaaatattccaaacaagaccgtaaaagaaaaaattatcctctttggtcccttgcaaagaagaagtcaaaggaacttttgtttcctccctcaaagagccctggacatctctgtctgtcatgactggaaagggcccgttgtgctgaaaccctatcatcatggtggatttgatcttcagtggccaaacacgaattaaagtataaatcttaactgaactggtgggtgggttgagctttagggaagtatatggcggtcattcctggtgcgctatcggtgtgacatgagccctggagtgtgtcgtccctctcagccctgctcctcctgcctcctggggtccagtgactgggaccctactctagaactgtgtaccatccaattcgccatcataaaggaatcttcctgttaa

SEQ ID NO: 325667 - DNA, 564 bp, Homo Sapiens
ctcacccactcctgcgttcctgtccaggcagtaatcattgaccatatagtcatagtaagacacacgagaccaggctttaccatgaaagcgccctgtcacggactcccacttttaatttgcctcttaggttcctatcctctgtagaatggcccccaagattgaagaagaaactgagcagttgaaaaatggctaatctctttgccttagtcagaaaaaaacagaggataattaagatactagtcatgaaaagtgattcattcttttttgtcattccataagcttgctgaatagtgtaccggtaatatattgtatttccaccgtactctgtgaatctaattattattctttaagtgttgatatataatatacataaatatgtaagctaaacatataactatatgttttaagaagaaaacatctacgaaaggtaaaaagagatgatcagttggttgtttacttgctagaaaccattgttttattgcaaacgaaggaaaaatgaagagattataaaagtcagctaatgaagtaagatacgtagtaaagtcaggactattcaagtggtca

SEQ ID NO: 325668 - DNA, 443 bp, Homo Sapiens
  misc_feature (146)..(146): n is a, c, g, or t
  misc_feature (284)..(284): n is a, c, g, or t
  misc_feature (329)..(329): n is a, c, g, or t
  misc_feature (393)..(393): n is a, c, g, or t
  misc_feature (413)..(413): n is a, c, g, or t
  misc_feature (422)..(422): n is a, c, g, or t
tttcagttcgttaaatctttattgatgcgtggacactccttcccctccagccccgccccccagccccagaaatactagagaagctgcaccataaaacgagggcacgagattgttgtcccattcacgacggagctgagggggaggtntgcaggttccagcctagatgttcaggattgagatgtgggtcgtgaaaggaaagtgggttttccgggatgtggggggcttttctcagcactggggtccactgacgctgctgctcccaaggggattgctagggactccgntcaggcaggggtggggggcagggcagggtcgggaagatgccgggntttcaagtccttggggccgaattaagaggggagggcagccgtcagggttttttctttgacttcnagggtcatttagaccccgancttttcccnattttgggaaccgccttggga

SEQ ID NO: 325669 - DNA, 731 bp, Homo Sapiens
gcggatgtccccggggcacagcgagcggttcctggtgacggcccagagccccgggaccccctgtactgttgggcctgcgctgttcttgtaacagcccagaatctgctggtggctgccttcaatcttctcctgctggtgctggtgctagggaccatcttgctacccgctgtcaccatgctgggcttcggcttcctctgccactctcagttcctgcgctcccagggcacccccttgcaccgcgcacctgcgggaccccggtttcacggccctactggtcaccggattcctgctcctcgtgccgctgctcgtgcttgctctggccagctaccgccgcctctgcctgcgcctccgcctagccgattgcctcgtgccctacagccgagccctttatcggcgtcggcgcgccccgcagccgcggcaaatccgggcctcaccagggtcccaggccgttcccacatcaggaaaggtctgggtctaatgaccctcgagtcaagaacaaccctgacggctgccctccctcttattcggcccaaggacttgaagcccggcatcttccgacctgccctgcccccacccctgcctgagcggagtcctagcatccccttgggagcagcagcgtcagtggacccagtgctgagaaaagcccccacatcccggaaaacccactttcctttcacgacccacatctcaatcctgaacatctaggctggaacctgcacacctccccctca

SEQ ID NO: 325670 - DNA, 710 bp, Homo Sapiens
  misc_feature (82)..(82): n is a, c, g, or t
  misc_feature (196)..(210): n is a, c, g, or t
  misc_feature (385)..(385): n is a, c, g, or t
catattttaaatcctatgcttacctatccataggttacatatttgactctcaggaacacaggtaactcattgcctggaaccntagctctgagccccaaaggcatcacaaagtgattctagtctagtgtcttgaagcttatgagctttgctgataagcagcatcacagtaaaagcaatatttgtttttagatttagnnnnnnnnnnnnnnncatttaactaagagccttcaactgtactatcttcttgggtgtttgatatgggcaggacatctatcattgattcctattagagatgataaagcaaacattcaaagagactgtgaaactaaatgttgcacagagatagagccagggttacaactctgatcttctgtgccgaggtgantcttattttgggcacaatttagcaaatttagttttgttgttgttctttgtttttaacgtgtaatggatttgatttattacattagaaagggaaatggacttttaggcacgtggtcaaagcagaaattactgcagctaagagtagaaagggcaactaatcgacatgcagagggctgcacatagacacagggaaacacacacacggagatgcacagaaacacgcagaccccatgcagggacctgctttcccgccacagaggaaagcaatctgatcaaacagacccactgtgcacccagccctccatgcttggggacaacacacctac

SEQ ID NO: 325671 - DNA, 322 bp, Homo Sapiens
  misc_feature (259)..(259): n is a, c, g, or t
  misc_feature (294)..(294): n is a, c, g, or t
accacaaagtggaactttattcagtcacagacactgaccctccaatagcctcagaagcaagagcctagggcccagcgatccatacccagtccttggagttgggcagggtaggacgctggccaagggcattgctgtctcttgcttacagcctgaggactacgggagcagcagctgtggcctggccgctcccaatgctgggggcttggcttggtgccccatccccttcctgactgagctctatgaaggatttttaaaaaantaaaataaattgcaaggcaaagtgctttgaaagangggagggacaccctattcctgttaaggg

SEQ ID NO: 325672 - DNA, 400 bp, Homo Sapiens
  misc_feature (65)..(168): n is a, c, g, or t
tgaacttctcatctcagactcccaaatacctgggactacaggcatgagccactgcagttgcctannnnnnnnnnnnnnnnnnnnnnnnnnnnnnnnnnnnnnnnnnnnnnnnnnnnnnnnnnnnnnnnnnnnnnnnnnnnnnnnnnnnnnnnnnnnnnnnnnnnnnnnagcatgaaccttcacacccagcccctagatattcctggaggccagtttgcattatatccagaggacaaccacaaaattctcatgccatgcccttcccaaacccctaggggatcttattttcctccactacaggatggagtattcctacccaaccagaggatgaggtatttcctacccagccctttgaggggtctttctgtctttgcatttcaaaggtgcttgaggagaggga

SEQ ID NO: 325673 - DNA, 405 bp, Homo Sapiens
  misc_feature (291)..(303): n is a, c, g, or t
  misc_feature (381)..(381): n is a, c, g, or t
ctgggcagatttttatttagttagttgtttggggattgtttgggttttagtggcagaaatatattcttcataagtatcagattctttattaggcagtcatcattttaggtcttacaatgatgggaaatcccatgggcttagggaagattggctaagtatggaaaaattacgtaatagaaaaaattccatctacaaagatgtgtgattgtttcttttcttctccctatgtctaggatgggttaggaggatgactgtattcttgggattgttttattttccaaaattgaaagnnnnnnnnnnnnnaaatgggggattagggctgggcacgggtgtctccatgccccgtaacccccggcacttcagggagggttgaggatgggntaggtccaccccgagggtccgggg

SEQ ID NO: 325674 - DNA, 570 bp, Homo Sapiens
  misc_feature (457)..(457): n is a, c, g, or t
  misc_feature (555)..(555): n is a, c, g, or t
ggccaatcccttttacaggcctacaaccccacagagagaaacggtgacccctggaccaaactttcaagaaaggataaagattaaaactaatggactgggtattggtgtaaatgaatccatacacaatatgggcaatggtctttcagaggaaaggggaaacaacttcaatcacatcagtcccattccgccagtgcctcatccccgatcagtgattcaacaagcagaagagaagcttcacaccccgcaaaaaaggctaatgactccttgggaaggaatcgaatgtcatgcaggacaaagatgcaccctctccaaaggccaaggctgagccccagagagacaatatttgggaaatctgaacaccagaattcttcacccacttgtcaggaggacgagggaagatgtcaggatataatatcgttcattccctgcctccaggacataaatgatacaggaaccnggtgacaatgattttcatggggggtatccggcagggcaggaaggacagtgaaggaaggattaaggaagttttttgacagggttttggatggggattcntcccttgcttgagct

SEQ ID NO: 325675 - DNA, 640 bp, Homo Sapiens
  misc_feature (598)..(598): n is a, c, g, or t
tcacaccccgcaaaaaaggctaatgactccttgggaagaatcgaatgtcatgcaggacaaagatgcaccctctccaaagccaaggctgagccccagagagacaatatttgggaaatctgaacaccagaattcttcacccacttgtcaggaggacgaggaagatgtcagatataatatcgttcattccctgcctccagacataaatgatacagaaccggtgacaatgattttcatggggtatcagcaggcagaagacagtgaagaagataagaagtttctgacaggatatgatgggatcatccatgctgagctggttgtgattgatgatgaggaggaggaggatgaaggagaagcagagaaaccgtcctaccaccccatagctccccatagtcaggtgtaccagccagccaaaccaacaccacttcctaggaaaaagatcagaagctagtccttcatggaaaacacaaatcataaatccccccacaaaaattccatattttctggaaaggggcaaggaggaaagctttgggcagccctgttccaccctttcccctttttgttgcttcaggacaattgggagttgggggctttagggttnccttcctttaacagttttttagggttgaggattgggccagtt

SEQ ID NO: 325676 - DNA, 690 bp, Homo Sapiens
tgatagttagcaggaggatgtacttttattaaggcattattaattcaggatgacatatttatttgtcagagttgaatacttctgtgatgaagggcaatgctttcctatgatctttcaatctttgtatcatcaaaattacaatgccagttaatatactatactcagaatattttaaataactttattcttaaatttaacaagctcttattagaaatgctttggtatcaatagaataaaaaatgctggttttcccccactgaatcgtgtcaagtaactggaaaagttacacatttgttttccccagctttttgggaatttttcacaaataatgactactacttattcacatggcttaatatggtacactgtaatgataattttttggacttcagaaaaaataaacaaaatatccagaagagaaatttgcaaatgcttcttagtttcttcttcaaaggatgtttatataggtggtacaactcttagatcaccttttttcccagctttgccattctcatccttaaagctgttaaggatggatcctcagtcccatctccagttgtctgagcatcaaatggggaatggtggacagggctgcctaagctttcttcttgctctttcagagatatggaatttttgtggggggatttatgatttgtgttttcatgaggactagcttctgatctttttcta

SEQ ID NO: 325677 - DNA, 816 bp, Homo Sapiens
  misc_feature (257)..(272): n is a, c, g, or t
ggagcagctgggaggagagaagggttgtggttttctgggaaactgctccgtcccctttcttccctggccctgtccaccagtgttagcctggagcaaggcctcacttgtctggggcacttgaagctgctacaggttgggagaagtggtaacagcttggagtcctcactcagggcagtgagcacagccagctcttcctgggcccttcccagcaaaaggagccactcccaaaacccctaggtaaccgtgagaggactccnnnnnnnnnnnnnnnntccctcctgattgcaccttgagcagtttgcggtatctatttcaaccctataggaaagggttgttaggacagcaaggagatctatcaaaaagtacccgcccactcctcttctcgtcaagcacactttgtatgtgggaatccatctggagttaccccgtcggtcagcacgtactgctagctaacggatattgggaggtatccagtaagcaagtctgacaaaggaaagtggatgtttggaggggacgagggaagcatcagtaagtcatccccaataaggcttcatcccatggtaagattttagaaatacaaggtgctcccagaagttcattgtaccagcccctgctttagttggggcatggggaggtggtgattagaaagatatccccaaagaaataccatttaacagatgccttgtgaatgaatgggtgtcagcccagtggagagaggtgtcagcccaacagagctctgggtggaaagcccagcaaaggcagtggcccagcacatctttgtgctcatgaatttctaaatcatttcttttcccttgg

SEQ ID NO: 325678 - DNA, 745 bp, Homo Sapiens
  misc_feature (383)..(563): n is a, c, g, or t
ataatttatttcattttagaaaacagtggttgctaactaaagattcagagcgtgtaactcattcagtgctatgagctgcaaactcttgtagttttcaaagcacatccttttcatctcttcattactctatgcccagacccatttgtaaccaattcccctacaattctgttctaatttctctctctgcattcccacagtcacaatcctgggcccaattatcctctccctagggtaattcatctattctctacacacttttatttcctccaggaatctacatcctccatccagccccacagggaaaaaatgaccgtacttacgtgactaggaagtcgtgggaacgaactatatcaaacctgtccatatcaaatataaattgccannnnnnnnnnnnnnnnnnnnnnnnnnnnnnnnnnnnnnnnnnnnnnnnnnnnnnnnnnnnnnnnnnnnnnnnnnnnnnnnnnnnnnnnnnnnnnnnnnnnnnnnnnnnnnnnnnnnnnnnnnnnnnnnnnnnnnnnnnnnnnnnnnnnnnnnnnnnnnnnnnnnnnnnnnnnnnnnnnnnnaagttgaggctctttattaatgagtcccatttcctcatgagggtcatcaccagttgcagcctagctagtgccggggccggggggttccagcagagcaactctctctatctgccacttttcaaacaggaatcacctgttcctccaaaccacttctctatcctgaaacatgccgtttattcaat

SEQ ID NO: 325679 - DNA, 151 bp, Homo Sapiens
gtttttttacagcttgatcctcttatgaaaaggaaagaatttaaagatgaacaattacatttttgtttaaacagcaattaatcctcattacagagaacaaaagatctgtggcacattgtctttggaaagatcttttgcagatttttcttct

SEQ ID NO: 325680 - DNA, 602 bp, Homo Sapiens
tcacgtttattacagatttattgggggaggccccaaggagaagacctatcatcatgtcacgggagctcacgttccataccaggaaaggagtgttcctgtcaccaggtgaagggggaagggtcctgggaccccggcagtgggaggcctcggggaggggtgtcatcagagtcttgaatggacccagacgctctcttcccgccaggacaggatgcgtaggagcagagaggaagcagctttgctggggaaccaccctgggtcgtttactgaaccaaaggctcctggggccagccagagggccagggaggtaacacggtgctcaggcttctctctgggccctctggccttgggcccagatacagtgggctcgctggcaggaagactgcctcagcatctatttccttgcaggggccgtggcatgaagaaaagttccagaaccggctccgtagtcagggaacttgtgggctaagtgctcagacccccttcacagcactttgcctggattcatgaggccttgggggtctagcacggccttgagctgccgcatggtctccacgcccacggcgcccacctcctcctgcagcagctgccgcttgcctcgtgcc

SEQ ID NO: 325681 - DNA, 473 bp, Homo Sapiens
  misc_feature (335)..(335): n is a, c, g, or t
  misc_feature (344)..(344): n is a, c, g, or t
  misc_feature (354)..(354): n is a, c, g, or t
  misc_feature (381)..(381): n is a, c, g, or t
  misc_feature (391)..(391): n is a, c, g, or t
  misc_feature (407)..(407): n is a, c, g, or t
  misc_feature (416)..(416): n is a, c, g, or t
  misc_feature (423)..(423): n is a, c, g, or t
  misc_feature (434)..(434): n is a, c, g, or t
  misc_feature (443)..(443): n is a, c, g, or t
ttttgcgggccacactgaggcatctttatttctctgggtcacacagagcttgggcctgggagctcttctgcatgggggctgcagctgccaagggagcggctgagaccagaacaagcacttgagtgggccccagtgcaggttgggatgtgcccggtggagtaaggtgtgagaacccccagcctcactctctgcctggccctgaagcagacagcagcaggctggcccagctcccctttatgagactatcctagggtttgacagcaagtcccagatgaagggtgacaggcagctggggtccacctgggtctctcctcagcaggggggaacccctgggnggccagctngggaaggcantggccaaaaggtcaagaagatgaactnttgcccaganttctgcttgcctgtgntaatgggtngggacanggctgcctttntggtcacantgggcagcaggcaacttccaggggaccttt

SEQ ID NO: 325682 - DNA, 444 bp, Homo Sapiens
  misc_feature (100)..(117): n is a, c, g, or t
ctccagctcctccccagaagcaagtatcttcagcctctctccatctacttgctcctttcccacaccccagcatatagacaagttctatttcttttgtttnnnnnnnnnnnnnnnnnngacttcttcaatcccaccccgtctctgttgctgcggcctcctgccccaccccaagcccaccaaggtggctgcgaccctggagtctccagctcctcccttcctatggcctttagcctgctgcaaccacatccctccttgatgtgtcactcgaccgccagtgtggcaaaactctctaacctctgcccatgtcgtggtgaagaaaaaggctctgccagtcaagctgcctggatctccttcagctccactgctcaatcactgtattactttggcccgtaacctaacttatctgtgtcttggctaacttgtctgtaaagcctcccacaagat

SEQ ID NO: 325683 - DNA, 394 bp, Homo Sapiens
  misc_feature (354)..(354): n is a, c, g, or t
  misc_feature (380)..(380): n is a, c, g, or t
ttttaacattgtcatatgtctctgtaatggggtggtgggacacatagtgtctaacacttcagtttctctgctgcttccctcccattgagaagccagtgccagggttgctgtgaagatgggagagcttctgaacccacctcattaaaggatgagaaacccagggtctgagagcaaagggacttgacggtggccacaagtgcttcaaaggcagagctggggattgggaacccagggtttcatctcgatggggaatgtcccagcagtgatgtcccaagtgggggaagttgaaggaccccgaaggcttcaaggggacacagggtgggcttgacagtgggttcaaaggcttaggggggncagggttttcaggccggaggagtttnttggggggtttttt

SEQ ID NO: 325684 - DNA, 403 bp, Homo Sapiens
ccctggtagagtctcgggagttcacacagggtggcaaacaacccccctaagagctcctctgcctgaatcctgccccctagcctttgaccactgtcagccacctgtgtcccttgagccttcgggtcttcacttcccacttggacatcactgctggacattcccatcgagatgacaccctgggttccaatcccagctctgcctttgaagcacttgtggccaccgtcaagtccctttgctctcggaccctgggtttctcatcctttaatgaggtgggttcagaagctctcccatcttcacagcaaccctgtcactggcttctcaatgggagggaagcagcagagaaactgaagtgttagacactatgtgtcccaccaccccattacagagacatatgacaatgttc

SEQ ID NO: 325685 - DNA, 346 bp, Homo Sapiens
  misc_feature (271)..(271): n is a, c, g, or t
  misc_feature (276)..(276): n is a, c, g, or t
  misc_feature (318)..(318): n is a, c, g, or t
gaatgagccactgtgcctggtctgggttttgtttttttagagatagggtctcattatgttgtccaggctagactcaagtcctttggctcaagcaatcctctcacctcagcctcccatgtagctgggactaaagcgcacaccaccataggcaacctctattatcatttaaaaaaactattcttttactttgattataaaagggaatatatgatccattgtaaaaagtgtgggaaaatataggaaacattttttaaattgggggggcttgggnccccngttaggctttaccatctggtaatcacaggtgctttagggggnggcctaaggggccaggggtttcttttag

SEQ ID NO: 325686 - DNA, 778 bp, Homo Sapiens
taaacatttatggagcaactgaaatattcaggatagaatgtttaaattagcgctggtctctgccttccttcctgcctgtgtgtttctctgttttgtaccctagcccattccggcaacgactatagagcatcacacttatcagatgatgtcataccgtgcccggatgaaagctagttctcaaggcactcagatcatggcacaaaacaaagaggaaagatgtgtctttaagtcattcatttagcactataactgcattttcagagggaacttctatccatgtttattctcaagattgaaggactcagtgcagctctcgtggtgacagattggctcttcttgtgtgttttttctcttgctgtttagacgtaaggaccccttttctcccacctcaacatggctacatgtttgttatttcatgataatttttaaaaaaatcataagtgaaccttcacactgttagaattatttaattggtaagtgaatatcctaattagaattatttttaccctgcaagactactcttttatgtaacaactgtctaatgacaaaagtggtaattatatactttgctacctacaaatgataggaaaacagagtaagctatttcaggggccctctctgccactcattctgtgaggcctccatcacatcacctgacccctcacatccacagctttcctaatctttaacatgaacaggttgaagttgaggatccctaatttcccttccagatccactgttctgtgattctaggtatgtgtaacccagctatttaaaa

SEQ ID NO: 325687 - DNA, 475 bp, Homo Sapiens
  misc_feature (13)..(13): n is a, c, g, or t
  misc_feature (69)..(69): n is a, c, g, or t
  misc_feature (100)..(100): n is a, c, g, or t
  misc_feature (104)..(104): n is a, c, g, or t
  misc_feature (120)..(120): n is a, c, g, or t
  misc_feature (150)..(150): n is a, c, g, or t
ttttttaaaaaanttatcctgaaaattaccaaacctgttagccccctgttgaaggtggggaagaaaaangggggtcccttaccgtccttaaacagccaangagnaaaaaaccaccacaangaaggagccccaatctgtccaccccacganaagcctgccacctgagtcccttccaatccttgaagaaataaacatggataagaagttcccctctgaaaatgcagttatagtgcctaaatgaatgacttaaagacacatctttccctctttgttttgtgcccatgatctgagtgccttgagaactagctttcatccgggcacggtatgacatcatctgataagtgtgatgctctatagtcgttgccggaatgggctagggtacaaaacagagaaacacacaggcaggaaggaaggcagagaccagcgctaatttaaacattctatcctgaatatttcagttgctccataaatgttt

SEQ ID NO: 325688 - DNA, 421 bp, Homo Sapiens
tggtggctgaaaacaagacaagtttattttcttccagtcctggaagtcagaaatctgaaatggctcactgacaaggggttggcaggaccgcatcccttctggaggctccaggggagaatccattttcttgcttttttcagctcccagagcctgcctgcattccctggctcatgaccgtcttccgtattcaaagccggtgatggctgggttaagtctttcagtcattgcatcactctgcctctgactcagccacctcactattccacagttaaggacccttgtgattacattggggtccacccagataatccaggatcatctccttatcttaaggtcagcccattagcaaccttactgccatctgcaaccttacttctccctggtcatgtaatataacatattcgcaggtttctgtggtgac

SEQ ID NO: 325689 - DNA, 819 bp, Homo Sapiens
  misc_feature (11)..(11): n is a, c, g, or t
ttgcaccccanttcacactcttgcatcaccaccacccaccaccacacgtgggtccctgcatttgcacaggctgtattgcctgcctgggtagatgtttcatcaccttcattgcctggctccattcaacacattctttaagatccagtcatcccactgtgggcaggccttccttaactccagtctccagtctcaaaaaaatgttcctcagttctatgtgtaggaattaggtgcttgcatctgttgtaggctcttacaccctggcactgtaattctctgttcacttgcctgtctctttccctagaggctgaactccttgagggtctttgtgtcccacgtgactagcatgggcttggcactgagtaggcattcaatagatgctcactgagtaaatgaaggcactcatgtttgagtgactctgccttgaaggcactccataacgttaatgaaagatcaagttaggctatttttggaggagtcataagtgggtatgtcaaaaaacatttactggcataatatgtagcatattattttgaagaaaagctagaaaaaataaaatcacaggagagaccacttattcagtacaacccatagaccagccactgtgttaagtgtgtcttatacttgatctctttaattatctcacaacccacagcgtacatacttctctccatttctgatttacagatggggatatggaaaagatgatacatttggattcctacccagctcaacccaggctcagtgcaaaaagatcccaaaccattcatataattttaaatggaagcctagacctcgtgccgctcgtgccgaattctggcc

SEQ ID NO: 325690 - DNA, 683 bp, Homo Sapiens
gagatttttcaatttggctccaggacctgtatgatgttttcaagctttgcagagatgctcaagatatgactggacatttttgaaagttcctgtgtcctcttcaacacatcttctcaccaaacattaattgtagtgtcttttcttccagaaaacttgcataaaatgacttcctctcctgtgaaaacagtgtcctgctctgaatggagctttaaaggagtagcacaaattgtaagatgatgtatcttgaggctggggcttagagatattctgctgcctcccagagctttgtgcagacgggtctgcccagggtgggaaagggaagcctccgttctttttggtaagctagcataaagacaggtaagggagtctattttcaagaaagctggatctgtttcgtactctttctgccccttaatcgctgtggacagctccagcagcacaaagagatgaagggcaaaggcaggatgcagcaggcaaagttaacattgtatttgtgagtacagttgaggataaaaaagggatgaaatccacggtgaggaccatcatggtgggggaatagtttattctaatggattcaagagctttggagaccaaactaacacatttatttttatgtgcagttaaagtcatagaaacctgttttgtgaaacctcagatttctaaagaaaacctgaagcaagacc

SEQ ID NO: 325691 - DNA, 567 bp, Homo Sapiens
  misc_feature (14)..(14): n is a, c, g, or t
  misc_feature (27)..(27): n is a, c, g, or t
  misc_feature (52)..(52): n is a, c, g, or t
  misc_feature (58)..(58): n is a, c, g, or t
  misc_feature (92)..(92): n is a, c, g, or t
  misc_feature (109)..(109): n is a, c, g, or t
  misc_feature (143)..(143): n is a, c, g, or t
  misc_feature (163)..(171): n is a, c, g, or t
ggagccctttaaanggaagttagcccnccaaaattgtaaagatgaattgtancccttnaggccctggggccccttaaaagaataatccctgncctgcccctccccccanagcctttgtgccaaaacggggtccttcccccccnggtggggaaaaggggaaagnnnnnnnnngtccctttttgggtaagccctagccataaaggaccagggtaaaggggaagtccctattttccaaagaaaagcctgggatcctgtttcccgtacctcctttcctgcccccctaatcgctgtggaccagctcccagcagcacaaagagatgaagggcaaaggcaggatgcagcaggcaaagttaacattgtatttgtgagtacagttgaggataaaaaagggatgaaatccacggtgaggaccatcatggtgggggaatagtttattctaatggattcaagagctttggagaccaaactaacacatttatttttatgtgcagttaaagtcatagaaacctgttttgtgaaacctcagatttctaaagaaaaccagaagcaagaccttccttggtttaa

SEQ ID NO: 325692 - DNA, 415 bp, Homo Sapiens
  misc_feature (345)..(345): n is a, c, g, or t
  misc_feature (350)..(350): n is a, c, g, or t
  misc_feature (361)..(361): n is a, c, g, or t
  misc_feature (370)..(370): n is a, c, g, or t
  misc_feature (377)..(377): n is a, c, g, or t
  misc_feature (383)..(383): n is a, c, g, or t
  misc_feature (397)..(397): n is a, c, g, or t
caatttggctccaggacctgtatgatgttttcaagctttgcagagatgctcaagatatgactggacatttttgaaagttcctgtgtcctcttcaacacatcttctcaccaaacattaattgtagtgtcttttcttccagaaaacttggcataaaatgacttcctctcctgtggaaaacagtgtcctgctctggatgggagctttaaagggagtaggcaccaaattgttaaggatggatgtatcttgagggctggggggtttaggaggattttcttgctggccctccccaggggcttttgttgcaggacggggtctgcccgggggttgggggaaagggggaggccntcccntttcttttttngggaaaggntaggccntaaggncagggtaagggggngttcttttttttccagga

SEQ ID NO: 325693 - DNA, 437 bp, Homo Sapiens
  misc_feature (100)..(100): n is a, c, g, or t
  misc_feature (285)..(285): n is a, c, g, or t
aaaccccctactattttaggacccctttaaataagacctgaattggcccctgtaataaaccacaggttattgggtcccccccaaatgccagggtaaggcnccccaaaggggttgagggacctcctcctaagtaggctgaaattttaaagaaccccccaggaagagggtaatgggattgggaattacctgttcccttcccaaatgtacaaggcccatggaataacagattagccccaggtgttgatcatatgtaacccaaaagtaggttatattaactggaaactnccctggatacatatttttaaactacctttattaataaaaaaatagatgaattgaggctgtgtgcagtgcagtggctcactcctataatacaacacttttggcaagaagccaaggtggaaggattgcttgaggccagcagttcaagaccagcc

SEQ ID NO: 325694 - DNA, 923 bp, Homo Sapiens
aattcggcacgagaaaatttaagcagtgataaatttgaggtctctactgttcatttgtatgaagattttcttatgaacttgatgtcagtcctttgattagaaaattgatttttatgactttaaaatggtcataaaatcacagtgatgggatgaaactatgatccagattaatttcttactttataaatggagaaactgagcttccccatttaaagaagttattcaaggtctcacctctcattggtaacaaaagcatgataggaagccagatcctctgactcccagtccattactcttttatgccacatcaattgccaagtgataaattttctctgggaaccccggcttgtccccacccccattcccaaccctctatttatgcatggactttactaacctccctgaatttgttttctacagaattctccctctgaagcacagaatttagatgagaatacaactgagggctgggaaaatcggataagactatggactgaccagtatgaagaagctttcactaatcagtacagtgcagatgtacagaacgcgcttgaacaacacctacattctagcaaggaatttgtgggcaaacctactattttagacactattaataagactgaattggcctgtaataacacagttattggttcccaaatgcaggtaagcaccaaagggttgaggactctctaagtagctgaaattttaagaacccagggaagagggtaatggattggaattactgttccttccaaatgtacaaggccatggaataacagattagccaggtgttgatcatatgtaaccaaaagtaggttatattaactggaaacttcctggatacatatttttaaactacctttattaataaaaaaatagatgaattgaggctgtgtgcagtgcagtggctcactcctataata

SEQ ID NO: 325695 - DNA, 737 bp, Homo Sapiens
  misc_feature (371)..(427): n is a, c, g, or t
catatgctactgaaaaccagcatgattttcctcttatgggaaatgtataaagtatgagttggaaatgatggaaattaatctgtactgacttgggcaaggaatgtgaatgttattcattctgttccaaactacctgaaaatattctctttctgttcctactttccaggagataacatcttaagggacactgaagcttgtgcgtgtgtgagtagaacacgtgctgggggctcttgagctcatgagggaggggctacatgtcggtggggtgataactgtatgctggaaacaatgataggtggtgaccctggagcacttaccatgtgacaggtgttatgctaagcatgttgtatgcattccttcattgaatgacnnnnnnnnnnnnnnnnnnnnnnnnnnnnnnnnnnnnnnnnnnnnnnnnnnnnnnnnngactcagctgctatgggtctgtctgactctggtgttcttcctcctaaaaactggggcactttggaaatgagattcctcggtgatgaacagaaatattgcttagcggctgtatttttgtatctggcagttttcccatatttgagtcttatattcacaatcggtatctttacattacacaaaagtgacacagaattagagtcatttaatccagggttgatatcattaagtcatgactatttattaaatgtttcttacaatatctgagatgatattgcaaaagatgtaagtgattttagaagttctcacttcg

SEQ ID NO: 325696 - DNA, 318 bp, Homo Sapiens
  misc_feature (250)..(250): n is a, c, g, or t
  misc_feature (296)..(296): n is a, c, g, or t
tttttaaggtatattatttattgttagttacatgtggtcaatggtgacatactttcaataattaaaaatcgaataatactgaaataaccacagcagctttcagtataatttgcttaagttgttctagaaaacactgctaattttttgtttctgcagagtcaagtatagaagtgagcagattgggaaatttataaacatcatgggaaagaattatagagaggaactggagccactcgaatgccatttgggnttccgcttgtcaccaaaccactcctcttttttctaggttcttgggnaaaacatctttgtttggggacc

SEQ ID NO: 325697 - DNA, 531 bp, Homo Sapiens
aataattttcaggaaaatgtctatttattccaaaaaataccaagtcgcagctcctctggctgtcctcaccagggaattaattaggggaaggggccagtgttggagagggggtggagagaggaagtgatgaggagggaggcagaagctgttggagggtcttcaggtgtggaactatttatcttctccctgtgaagtgccccctcccatgctcccccaaccagacggggagatgcctgtgtgtgtgtgcttgtgtatgcatgggtttgtgtgcatttgcatttgttggggcatggggaagtctcagatgacgaggtcccagctcaagacatgtggaggggaattgtcagtacacacctgctcccacccctcaagacctctctcctctatggcttatttgagatcaaatcaaggccccagggtcaggcagcctgtgccaactgaatagggacagggctaggggtgggatccctggaatccaggctgggctagagctagggctcgtgccgaaaactggggttttagggccaaaaa

SEQ ID NO: 325698 - DNA, 404 bp, Homo Sapiens
  misc_feature (243)..(243): n is a, c, g, or t
cactagctctagcccagcctggattccagggatcccacccctagccctgtccctattcagttggcacaggctgcctgaccctggggccttgatttgatctcaaataagccatagaggagagaggtcttgaggggtgggagcaggtgtgtactgacaattcccctccacatgtcttgagctgggacctcgtcatcttgagacttccccatgccccaacaaatgcaaatgcacacaaacccatgncattacacaaggcacacacacacagggcattttccccgtctgggttggggggaggcatggggaggggggcactttcacaggggagaaggttaacttagtttcccacaccttgaaggaccctcccaacagttttttgccttcccttccttcattcattttcc

SEQ ID NO: 325699 - DNA, 689 bp, Homo Sapiens
ttttttgatgatttggatattattattacaaagaatttaaatatacaagtttggctatgaaagacccagctaagccacttaggcaaaagtctatctttgatgtcatagtttccaagaagtatcataagagtcaaacagttaaacatttctctgtgcttttttttctattttctagaaatgttgtagagagaagctcatcaacttacttatacaaatcagatatactgaggaggggagataaactgacatttccatattttataatataatgtggaaagattcagaaatgactgagaagatacagtgatatgatatttaaagcaaatattggcatatcttatacaagaaaggcatcttacaataatatttctgttggtacattacaatttttcagctagtaattctaaaatgccagaggtcctatgatgcaatatcaaaaaaaccagggaactgacatacaaagtcaaatataaagatagtaacattcagtcatccacagataaaaggctagtctggacataagcctgaaacaagcaagacgccatccactgcgatttcgccggttttgcccttgccacgttctgcttcaaaaatgatgcttttgatagcatcagttccttgatacaactgaattttccctgtcttccacttttcatcctcactcgtggtcttctcccatgccagggcat

SEQ ID NO: 325700 - DNA, 477 bp, Homo Sapiens
  misc_feature (222)..(222): n is a, c, g, or t
  misc_feature (361)..(361): n is a, c, g, or t
  misc_feature (368)..(368): n is a, c, g, or t
  misc_feature (401)..(401): n is a, c, g, or t
ttacttcttgctacattttattgatattatgtatttattttgaacacagaaaagatacattgttgcttattcattgcctagtccaggaacaagaaaagctattcagctccatctttcaaacactgatgagtaggtaggaatttttatccctttttttcccccagcactctctgggaattgcagaagcaggatgtgtttcttaaaagagtctcattcctgggnctgcattttaaagggctatacaggtacaacaggacaggatattttttgcctaggaaaacaggtacaccactaagggtgggtcaggaactgcttggtaaacaaggtcccctcccccaggatgggagtctggggggcttcnggggggnggctgcacggcggggtggctacaggaacttctnggggtggggattccctttcaggcttccggaccaggagggaatgcctatctcttacagggaaattaaaattccaggg

SEQ ID NO: 325701 - DNA, 430 bp, Homo Sapiens
  misc_feature (35)..(35): n is a, c, g, or t
  misc_feature (105)..(105): n is a, c, g, or t
  misc_feature (149)..(149): n is a, c, g, or t
  misc_feature (195)..(195): n is a, c, g, or t
  misc_feature (352)..(352): n is a, c, g, or t
ccctaaaaaaacaattaacacccactaaggtggtnccaaaactgccttgtaaaaacaaatcccctcccccccagatggagtcctggggctccccggaaggctgcnacgcaggatgcctacagaacttcctgggtggattccctttacantccgcacccagaagaaatgcctatcctcctacagaaaataaaattncaagattgcccatccttgcccactccctctgccttaagaaagagattactaaatagtcttagcccttcattggaggaacagaaatgtggggaagcaggatagggtgctgttttttaacgacgagggacaagaggtgggagggaggcagagtgaatgncgctggcgatgctagcagggacactgctcagagatgcttggctgccaccctctgtgggctgggtcttcaggaatcact

SEQ ID NO: 325702 - DNA, 269 bp, Homo Sapiens
cctttctcccctaatacataaaataagtggaagttttacaatcattggtgtcttaggatcagtgagatacagcatgattttccccgtgtctcaggcctgcttccctgagtcttccaatggcatggaacacgtggtggttctcctcagagctctggctcagcctccagaactgggactgagctaaagagtcactaaatggtcactgagattcaggagcagaacttccctgagagtggcttagctctgggaacctgacctgtccaaattaa

SEQ ID NO: 325703 - DNA, 416 bp, Homo Sapiens
  misc_feature (259)..(259): n is a, c, g, or t
  misc_feature (261)..(261): n is a, c, g, or t
  misc_feature (284)..(284): n is a, c, g, or t
  misc_feature (343)..(343): n is a, c, g, or t
  misc_feature (359)..(359): n is a, c, g, or t
  misc_feature (365)..(365): n is a, c, g, or t
tttttgttccatacaaacatttattctgtccctgcctggaggtgagggggaagggggtccggagagccccgcagaggaggacggggctctagcgggaagacagtgtccggaggccggtgggctccctctagacggcagaccctggggctaacgaggggccagctgggttctcagaggtcacggagtgcaggggtggggcggcgagtggtgggaagccggcgcccccgaagaccaggccagcccctggagcacagaggcngntccagcccacactgcgctgagtntggccctggccccactggggtcatgtcccacccccaccccgcaagagggaaggcagcangccgctcttcccggtnggaaanatgctgttcaagtcatcaagtttaaattaaaaataataaaaataacaatac

SEQ ID NO: 325704 - DNA, 810 bp, Homo Sapiens
  misc_feature (103)..(103): n is a, c, g, or t
  misc_feature (684)..(738): n is a, c, g, or t
tttgtaatttatccagtctacatttttatttatagtagaccacaagaaaaggacagacttgaatccagcagctatttgatttcgagctttgaattcgtttggnacccctcagggaccccgatagcatctatgtagatatcggggtcaaaggacccttgaggggctttcctttttttctgagttagttggtttttgtttggctgatgaaatgccaggggtgaaagggatagacaactggattagagcccaagtgccactccagttgcttggcagcatacccactagagggcctccgcaatactatcaaacatctgctcatgggatagacaaggggcagtctgattgggtgagctctttcaaaaggcttgggttcactgcatcctgttagattcccaaagaatgccaagttttctccctggagtgctgggtccatcctttttcagcccattcagattgctgtttcattcatcaagagtaccagatgaggtcctcctaagctggttcaagctttccctcttccaactcttgatgagaacgtgatccccaggctggtattgatgtaccgggaactcccaggggtggtgtttgtgctaggaagcctttcatcctgagcccagtaagttgaggactgcagtgatccatgatcacgtcactgcattcgagcctagacaatagagtgagacnnnnnnnnnnnnnnnnnnnnnnnnnnnnnnnnnnnnnnnnnnnnnnnnnnnnnnnaaaagctttggaggcagatcccccggggatgcgtcccatccctcatccccgcccttccagcccgaccggcca

SEQ ID NO: 325705 - DNA, 410 bp, Homo Sapiens
  misc_feature (23)..(23): n is a, c, g, or t
aggaaagcctaaaatcctctgtnaagcatcccccatacctcatcacctaaaactgtcaaactctgtgaagggccctgaaattttacccctccttgcaaactaacaaattagcctgcccatagcttcaagatgttgggcagaagatatgagtctccctggatcagagacaaaggactttattactcatggcaacagcagaagccacagtattgacatctgcactgtctccctgagccccaattcctacagagcaatactggcacatgtagtgcattgtggtacaagaaagaatcctgggtttagtgaaactggagtttttataatgggcagtaagtgtgcctgccccttgctcctgagagaggcactagctccatctgccatggctgttggctatgcaaacatcttgtgaa

SEQ ID NO: 325706 - DNA, 270 bp, Homo Sapiens
  misc_feature (17)..(17): n is a, c, g, or t
ggaaacccaacccagcnaggggtaaagaaccagctgtcaggatttgtcccccactagagaagaaaagcccaaattgtggcctcaaaaaggctaaatttatccagaaatgaaagtaacttttaaaaaccacatttactgagtttcaaaactgagatgactatattaactgattttaacctgttattttttcttgggaggccaacgcaggaggatcacttagcccaggagttcaagatcagcctgggcaacatagtgagaccctgtcttcac

SEQ ID NO: 325707 - DNA, 501 bp, Homo Sapiens
  misc_feature (11)..(11): n is a, c, g, or t
  misc_feature (25)..(25): n is a, c, g, or t
  misc_feature (64)..(64): n is a, c, g, or t
  misc_feature (83)..(83): n is a, c, g, or t
  misc_feature (131)..(131): n is a, c, g, or t
  misc_feature (478)..(478): n is a, c, g, or t
gccaccacccncaggggcaatgggnaagcccgccacccaattttccactggtgggaatccaaanggacccattaatgttgggnggtaactctgttccgtccaggtgaagaataatcggggccttttttaantccattaaagggatcaaataaactcctgaaacccaaaagccgtttcctgaggagaagatacagcatctcctactagaacatacaggagattctgaaaggctggtgcctgtagcattctgagacggatttagttttctagagagcactgactccaatgaccgtctgtctatttcactgtatcccaggccagtctctttgaagctctttaaaaacataatcctttaaggtatatgagaggtccttagaattcagattggctacctgttgcagaattgctcccagggagttcttgtctttttgattgacaccatctttctggagtctagcaagtagctccggtttcttgntagccttcagggccagtaagtga

SEQ ID NO: 325708 - DNA, 808 bp, Homo Sapiens
  misc_feature (52)..(52): n is a, c, g, or t
  misc_feature (70)..(70): n is a, c, g, or t
  misc_feature (72)..(72): n is a, c, g, or t
  misc_feature (632)..(633): n is a, c, g, or t
  misc_feature (724)..(724): n is a, c, g, or t
aactagcagtccctttgggccaattgatgtaattattttcagtgtaaatccnaaaggttgcctgttttangntaggagatgatagtaaaaatacctaatgctctgtttttatacctcatactaggtagccaatctgaattctaaggacctctcatataccttaactggattatgtttttaaagagcttcaaagagactggcctggatacagtgaaatagacagacggtcattggagtcatgtgctctctagaaaactaaatccgtctcagaatgctacaggcaccagccgttcagaatctcctgtatgttctagtagagatgctgtatcttctcctcaggtatgtcataaacatagaattatagacctgacatagatattaggggcctctaatcaggtcctctgatgtataagtgaaggaaatgagacccggagaagctggacagcttgcctgcccaaagccatctggttatggctgagcttagcctagaatttaggtcttggcttccagcccagaactttctccactacacagcactgcttgtcagagtacttaatgtctaccttgctttccatttttaaagtttacattttgttgtaagattatctactttccaatttggtcactaaccnngaagacttacccagtcccaaacaattatcagattatatggaaaattgaagatacttaattttgtctgtcaacatgttccagaagaatattnttggggggaaaatggatttacaatcaacaaataaacaaaaatgatggcatggtttccatggttttctttttaattggatcctta

SEQ ID NO: 325709 - DNA, 876 bp, Homo Sapiens
  misc_feature (514)..(514): n is a, c, g, or t
  misc_feature (640)..(721): n is a, c, g, or t
ttctattatctctttaattataccttattatgccatgtcttatttttaggcacatcatttagatttttgaagaaaggatatgaaaaaggggaagggttctccaatatataaaggcataagaaatgtcttcagactctctggatccctgtaaacatagtctatgtagctagtgtctgatgattcaacttcccacatacacgtattccagaacaaacagatcagtaaatccaggcaaactccatcctggcctccagctgctgaaccaattgtttgtccacgtggtgacagaacaggggaagcaggttgctggggaaagctaggggttctgccagagaggctgtaggcatttgggctatctcccaggcaatcagaaccaccatgtctgtcctaggagaggcataaatataaatattaggcaataggtttgcttaaggaacaggctcagggccaaggtttcttatttatctttccgttactacttcccttgtcccccacccccgggtggcaattcagngggtaacatttgcatgtttggtacgtgccaaggaatgcttagtgctttacacatttcccttcctatttaatcttaagaactatgaggggttaataccatcatccctagtttgtagataaagaaacnnnnnnnnnnnnnnnnnnnnnnnnnnnnnnnnnnnnnnnnnnnnnnnnnnnnnnnnnnnnnnnnnnnnnnnnnnnnnnnnnntctttttaaaatctaaagcttgtccccttaggtactatgttatactgcctcctagaagaaaccgaaactctagggcactatagaaaaaaagcagaacagctacaacactgctactactttctctatccaacctcgtgccgaattacttgggccgc

SEQ ID NO: 325710 - DNA, 423 bp, Homo Sapiens
  misc_feature (22)..(22): n is a, c, g, or t
tgcctcaagaaaggcgaaaacnggacccaacaaaaacccccggaataattccaaaatccaaggactccctccctgcccccccaaagtacacttaaattggtttgttactttttttaggctggtaaaacttaacatttttcaataaattgttatttaaaatgcaacaattatactaggacagatgttgctttaaatcatgttttggaaaaaattgataaggtgatatataaaatctgagcacgctaagaaatgtgtttctgtttcccagttgaaaattgtaattccaattttatgacaaaagaaagatgcatttgtaaggtttgtgtttctcaagactccagatacaagctactaagacttctcccgtagccgcagggtggacgcctgcaggtcacgcccacaccggctccggggcggcggcta

SEQ ID NO: 325711 - DNA, 759 bp, Homo Sapiens
tttttaacaagtgaagttctttaattttacatctgtaaaagtttatgaaaatataaaaaattatcaaagtgtatttgtacaaataaattagccagatttttttacttcacacttcagaagtactcgaaaaatacacgacaagcaagagactgtttcacagtgaacagcttcctgtctcatttgcagttcttgagctagtgatcactagttcccgtctcagactttacacaagtcttgttccacgttcaaggacaaacttttacatgtatcgtctgacaaataccagtttggggccgagcgtacttttccccgggatacagaagaactgctcagaaggcgaaactggaccaacaaaactcctggattattcaaatcaaggactcctccctggcccccaaagtacacttaattggtttgttactttttttaggctggtaaaacttaacatttttcaataaattgttatttaaaatgcaacaattatactaggacagatgttgctttaaatcatgttttggaaaaaattgataaggtgatatataaaatctgagcacgctaagaaatgtgtttctgtttcccagttgaaaattgtaattccaattttatgacaaaagaaagatgcatttgtaaggtttgtgtttctcaagactccagatacaagctactaagacttctcccgtagccgcagggtggacgcctgcaggtcacgcccacaccggcctccggggcggcggctaagacctgtaaaagcctcgtgcc

SEQ ID NO: 325712 - DNA, 662 bp, Homo Sapiens
caagtctttaccattttatggtatcaaatttcttaagctcatagtgacaacagtacgaggatggtgcttttgacctacggctcatacctcccttccttcagcatcctcgctagacccagccttgaaccctttgtttggcatgaggtagggcctcagtgcctcagtggcattcataattattttctttccatggtgaggttgggagagagttgagctcttctctagaggaggggcccaggtaaggctgagagggggctccgagaagctccttcctccacagccctctcccagcagccactgctgtcctccacaaaggcacctctggctcctccacttcctgtgatccaaatggtgggggaagagcagcaggcagggctgctcctcaggcccaaaacaacctggtggtgggagttgatggcacagaggagaaagcagtggctaggagtcaggtggagatgatgttttgctccctgagggctcccaggtacagctttgctctaattttgttttcatttgttttcacaatcgtggagggagaactctctggaggcttgggaaggtggaccccagctgcagagaaacacaggccaagacccacacaccacagcccaggtcttgtgggtggacaggagaagtggttctgattcccgtctgggaagtct

SEQ ID NO: 325713 - DNA, 466 bp, Homo Sapiens
  misc_feature (157)..(157): n is a, c, g, or t
  misc_feature (439)..(439): n is a, c, g, or t
gagaagaagctcttcatacatgaatacatcagcggatactacagagtgtcatcttatttccttggaaaactgttatctgatttattacccatgaggatgttaccaagtattatatttacctgtatagtgtacttcatgttaggattgaagccaaagnagcatgccttcttcgttatgatgtttacccttatgatggtggcttattcagccagttccatggcactggccatagcagcaggtcagagtgtggtttctgtagcaacacttctcatgaccatctgttttgtgtttatgatgattttttcaggtctgttggtcaatctcacaaccattgcatcttgggctgtcatgggcttcagtacttcagcattccacggatatgggatttacgggctttgcaggcataaatgaatttttgggggacaaaacttctgccccnggggcttcaatggcaaccaggggaaac

SEQ ID NO: 325714 - DNA, 393 bp, Homo Sapiens
gcctttaaaagctacagataccaaattttcctcgtccaggtctactcggacgaattttcccccttaatctggccttaaactgagactcggcccttgagagccagggcctggccaggcagtagttgctcatagacctgggaagcaggggcctgctggaaggaatcactagattgctgcaaaaactcacataatccacagtttcctctttttctttttaaaataagttatcaaaatgttttaaaaacactttatgagaccatagtactcagtgccttttgtggagacagtggggtcatttaggccttcagcttccctgtttttggatgtaggaggaaagcttctattttccactgggccttcatccccacaagattgtggcggaccttttccccc

SEQ ID NO: 325715 - DNA, 378 bp, Homo Sapiens
  misc_feature (188)..(208): n is a, c, g, or t
ttaagcttccccctggccccgacccctgcattccttctcacggtgccccctccaccttcgagccaggaaaggagtgtcagatctccctgtgatttgaatctctctgattttctctcctgccacctgctggagaaggcgctctgcttccaggaggtgatgtgatgctaattagactgagagagcaccgnnnnnnnnnnnnnnnnnnnnngatgatcccctttcttaaggtctgctgtggtacacgacgacatacttgacgacatactcaagggtgtgggcaccttgttcatattcacaggttttagggcattgggaggggggctagagtgaggaggggatgttcatttttaggaaatttttccccacagtaggaaagga

SEQ ID NO: 325716 - DNA, 538 bp, Homo Sapiens
atgaagacaaaacatacattttgtaccaaccatccaattagcttatgttaactgacaagctccatttaaacagatgtcccatcagatgacaagaaaggctgctgtactgaagtaaaacaaacaatacctgaatgctctgtagccctaaactcccaaacatccctcttccatatggatcccactggctgggacaaactgcacccagttgctgcttcaatttatacctcaattttccactgtgtcccaggtggtactttggctcgttggctagattaaccttctctgtccgagtgtgccacacgagaacctgaaggggaaggaaatagcttgggtagcgcactcttcatggtgacactcgaggtcgggcagcacaagtgtaatgaataccttagtgcagttatttgctttcggttccagttcttcgactgttgttatctgtttgagaaagtcagattcttgcatccctggctgggatccacgacgcttaaatacagcttttggattggacaaaatgacttgaagacttacagcaaatcct

SEQ ID NO: 325717 - DNA, 892 bp, Homo Sapiens
  misc_feature (293)..(293): n is a, c, g, or t
  misc_feature (403)..(438): n is a, c, g, or t
  misc_feature (607)..(607): n is a, c, g, or t
ttgagatcaatttcagctttactttacatttgcatttatgcatttgtttgcaaaaagtatacctgtccttaacattactgcaatgttcagtttagttttaaagtagtacataaaaataaacaatttaagctcctatatattttactgtttccaagcttctacagaacaggtgtgcaaacttaaggtttctcatctcaaacaaatctccatgcacgaactaatcaaaaatgctcaagtcagcaaacacgcaaaatgcattaaagagaaacctcgaataatgtttttaaaaagcnaaactttggaacttttataattaaactaagttgttgcaccctctcctttcatttgccatataccaaagacttccaacaatagatctcgtacttggcacaaggacatttcnnnnnnnnnnnnnnnnnnnnnnnnnnnnnnnnnnnngcaaagaggtttacgctgacttgagtgcaagcttagtccacttcttcgatggtgggtcccccggaggctcctgaaccgccgccgccgctgccgccgccaggaccaccttggtaaagtttgctgatgatggggttgcaaaactctttcgagctctttcctgcttgtgttncatactcatctttctctgcccatctggtttcggtcgagccagttgatcacctcctgacacttgtcgaggatcttgtttttgtcctgctcgctaatcttgcccctcagtttctcgtcttccaccgtctgcttgatgttgtaggtataggactccagggcgtttttggtgtcgactcggtcgcgattcgcctcatcttccgatttgtaaccgctccgcctcctgcaccatccggtcaatgtcgtccttgctcagacgacctttgtcattggtgatggtgattttgtt

SEQ ID NO: 325718 - DNA, 958 bp, Homo Sapiens
  misc_feature (925)..(925): n is a, c, g, or t
  misc_feature (934)..(934): n is a, c, g, or t
tctgtgtctattattgacacagaattaaaggttgaagactcacagcccatcgatttgagtgcatgcactgttgcacttcacattttccagctgaatgaagatggccccagcagtgaaaatctggaggaagagacagaaaacataattgcagcaaatcactgggttctacctgcagctgaattccatgggctttgggacagcttggtatacgatgtggaagtcaaatcccatctcctcgatttatgtgatgacaactttactgttttcagacaagaacgtcaacagcaacctcatcacctggaaccgggtggtgctgctccacggtcctcctggcactggaaaaacatccctgtgtaaagcgttagcccagaaattgacaattagactttcaagcaggtaccgatatggccaattaattgaaataaacagccacagcctcttttctaagtggttttcggaaagtggcaagctggtaaccaagatgtttcagaagattcaggatttgattgatgataaagacgccctggtgttcgtgctgattgatgaggtggagagtctcatagccgcccgaaatgcctgcagggcgggcaccgagccatcagatgccatccgcgtggtcaatgctgtcttgacccaaattgatcagattaaaaggcattccaatgttgtgattctgaccacttctaacatcaccgagaagatcgacgtggccttcgtgggacagggctgacatcaagcagtacattgggccaccctctgcagcagccatcttcaaaatcttacctctcttgtttgggaaggaacttgatggaagtgttcaggatcatattacccttcggccaggcagcttgctggaccctccgaggaggttaggaggatggtttgggctttcatttgaaaacaacgttgttccaaatttgaggcnttctttttngaattggacatttttcaaggggtt

SEQ ID NO: 325719 - DNA, 302 bp, Homo Sapiens
tgtctccttgacaaatcctcatctaacctttgcctaaatatttctagagatagaggcttgctactacatactgagaaagccatgtccttttttcactagctctaattgtcacaaagttttctcgtattgatctgaaaactctagcagatttatcacttgagcaagaacatgaacgctcaactgcagttaacagtagatctaggacctctgcatatttttacattggggttgtaggtaaaaccttttctctctaaaggatcacagtgtttggcaaacagttttactggctggccctgtgatgg

SEQ ID NO: 325720 - DNA, 460 bp, Homo Sapiens
  misc_feature (84)..(84): n is a, c, g, or t
  misc_feature (112)..(112): n is a, c, g, or t
gctggtttaaccctatccgccctgcaagccagctggcgttgaaacctgcaaaaaactgctccccgggcacccatcggaacaggnctttctgctggagcagctgcaaatcccnaagcatgaggggacgggctaggcgtcgcagtggacctcaggtgcctgcatctcccatgagctgctcatccagttttacttgtttctttttcaggccttcattttccaaatgaattgtttctaattcttgttcaagggaattcatctgactgaccttcctgttagcaggagattgttctttctgaaactgatcacactctctctttaagctcaatttttcttgctctgtgggattcatggtacctgatgggtttagatgtttttggtgcttgggaagaagattggattccaattgacggaccttctcccgggagtgcgtgagttcggctttggtgttctgtaccatggt

SEQ ID NO: 325721 - DNA, 384 bp, Homo Sapiens
cccagagtgactgagcagttctacaaaagaatggccagcacgagcgggggactagagggtcctgattttgtgtctgtgcctcttcatctctctggactctgatctccttctcccttcccatctccaggccttctgtctgtcccagataaaggcgctgttctcccatcctccctaccccatcctctccaccaaatcgctcccaattttgagagccaaaggtgggcgcttctgacttcaggagcgaaaggaggaggcctagtttgggccgatgtattttaaagcagagtggacagcagagagtcaatttccctttcgttgggagtggggcagtgggggtgggctaattgtctttcgggccaaccaggggggcctgtttgcccaggg

SEQ ID NO: 325722 - DNA, 387 bp, Homo Sapiens
  misc_feature (356)..(356): n is a, c, g, or t
  misc_feature (368)..(368): n is a, c, g, or t
ttttctaaatacacatcaaatcatgttacttccctacctaaactacccagtagctactgtgtacttagaataaaacccagcgttcttaactggggcccatagggtaatatgtgatctgcccccatctgtctacctgatttcctactcttcctctcttcttaagccccagcatactgggcttatcattatgagcacttaccactctctaatgggcatatttattggtttactctttgtattgtcttgtttctttgcttgaattataggacacatttgcatagcatttttgtcttgttcatcactttatcttcagtgcctagggggaaatgcttgggcacacaattaaaagggggttncaaccttttatnccattggtgggatgggggg

SEQ ID NO: 325723 - DNA, 467 bp, Homo Sapiens
  misc_feature (217)..(384): n is a, c, g, or t
tgttgagtcaggtcccaccgagagccggcaaagagtctgactgtggggaccctgcccttttccagaaggtggaggtgcagaggagctcgtaaggatcacggcttctcaacctggccctgaacccactcacatcagcagctctctgcaaggccaactggacagacagctgtcaccaataaattaaaccttatttcttgcccaggtgcagtggctcatnnnnnnnnnnnnnnnnnnnnnnnnnnnnnnnnnnnnnnnnnnnnnnnnnnnnnnnnnnnnnnnnnnnnnnnnnnnnnnnnnnnnnnnnnnnnnnnnnnnnnnnnnnnnnnnnnnnnnnnnnnnnnnnnnnnnnnnnnnnnnnnnnnnnnnnnnnnnnnnnnnnnnnnnttgttgagcttaggaggttgaggctgcagtgaactattgcaccactgcactccagcctggaggacaaagcaagaccttgtctc

SEQ ID NO: 325724 - DNA, 803 bp, Homo Sapiens
  misc_feature (15)..(15): n is a, c, g, or t
  misc_feature (45)..(45): n is a, c, g, or t
  misc_feature (414)..(512): n is a, c, g, or t
  misc_feature (647)..(707): n is a, c, g, or t
gaggctgcgctgggnttttttcctaggttagaaagttccatctanccagatggaaatttctagaaaattaagtcccaccacctggataacaggagataagagaagagcaaaagagaaagaaagggagcgtaagtacccacatgtagagggcaggtgctgtgtgggcccatccacagctcccatctccccctcctcctgcagtagtcagtgtgagcttcagagccaggtctgcggggtaagcccagctctgtgactttgaacaaatgctaaccacatccttcggctagctccctcatctgtcagatgagggtgataattccacatatcacacagggtggagtgggaatttcagtggagcgtgctgacacatggtgagtgctcagcaagtgtagctcttgctgtttcccgcatttnnnnnnnnnnnnnnnnnnnnnnnnnnnnnnnnnnnnnnnnnnnnnnnnnnnnnnnnnnnnnnnnnnnnnnnnnnnnnnnnnnnnnnnnnnnnnnnnnnncccatagccttggctctgcaccgtgcaggtgcctggctctgagaaagctaatggtttctctgcgatacttccatcccccatcaggtgggccttctttttgttctatcctctccttcattacttccttttcctgcnnnnnnnnnnnnnnnnnnnnnnnnnnnnnnnnnnnnnnnnnnnnnnnnnnnnnnnnnnnnnctttgcagtagtatttacctttgcagtgaacttagaggtaagcaacacttatgtaaaacattttgaaaatgctcttaattctccaggaatatgaag

SEQ ID NO: 325725 - DNA, 587 bp, Homo Sapiens
tttcgtaaaagaactaatatttgcaaagaaaggggacgaggacattttctaataagcattagccaggagcagccacccccaagtacattttattcccaggtatatttattttgggactaatagcaatcaaaacagagtaagcggaaggtcttttttgtaagggtaagatgactgtgttcctgcagcctggacactgactgctgcaatgaaattggatctgttgagcatgtcttccaaggacagatttggatagtaagccaggtagaaggccagagctcccacaaagctgtcaccagcacccgtggtatccacagccttgactttctctgtgggaatgtgctttggctcaggttctgtctgtgacagcaccacacatccttcagcccctaaggttaatgattaccacctggcagccccttttcaagagcactaatgcagcctccccagcatctgcagcgctgcccaccgtgaggccagttaaaatctcagcctcactttcattgcagcagaacacatctgagagggtgtagaactggggatcccaggttagcaatggcaggggctggattgaacaaggttttcactcc

SEQ ID NO: 325726 - DNA, 763 bp, Homo Sapiens
  misc_feature (740)..(740): n is a, c, g, or t
  misc_feature (747)..(747): n is a, c, g, or t
cctatttttatgtttcctaaaggaaattgtttattctacagactcagtaggtagacacaaacataaagatttccctagaagacatagagtgggatttgataacactgtctgttattttctgtacattgtggtaggtccaggaaatatgacattttcccccttgatgtgttattgttgttgttgggtggggtgggcattttgtttatttgtttggtggcaatcagtggtagtagggagtgggagggcttatattggtttttccagctattaaggggacatattgtgtcgttgtgcttttcacgttataaaatgtttatatttaccagtacagcactgggctttataaagactgcactcagaaccacactgcacagtccagttttttaaaaagctgctacatgacagacaggtaatcccactgagtgagttttgagaaacaaatcaaacgaagtaaacaagaaacataaaaaccaaatagcaaatgaataaaagcctgttcttgtaacttattcaacttttgccaaattcctaccaatcacttgctttttaaaagaaatgtataatagccaaaagagaaattatgtccctgttgtacagaagttagaatttttgactccaggcagcagtttgctcagtgatcttgaacaagttatccaattgcctctacatttggcatcaggttttctctaggctgggcaaatggggggtaatactattataccctaccctcacagtggggnggggcanggggattttgaggggg

SEQ ID NO: 325727 - DNA, 428 bp, Homo Sapiens
gaagctcattttataaggccctctccagtgctgtctgtatgtttgtttgtgcggggactattatttaaaaaaagcataaaactatttctagattggggtaaattaatatttttaatttaatgctctggcaacggctattactgggtttcaaccagggaagttggtcattccccaacactgccaatgtttgttgaatatcctacaatcaactagaaatgttaaaagcatttggttaagtatcattaacaggatgatataaaatacccttctcaatccataacagaaacaggatctattctctattctgcaatgtggcttatttgttgttgttgtttttgcctgcagaaacacacagacattatccagagatcacccaagtatcatggagacaacagagaggggtaggctcgtgccgctcgtgccgaatt

SEQ ID NO: 325728 - DNA, 656 bp, Homo Sapiens
  misc_feature (35)..(35): n is a, c, g, or t
  misc_feature (91)..(123): n is a, c, g, or t
  misc_feature (271)..(280): n is a, c, g, or t
  misc_feature (572)..(615): n is a, c, g, or t
tcccttcccaagaggcttcttggacactcaggccnccgccctgcaggtcttgtggggtgaacttctagggttggccgttcattcccgtctnnnnnnnnnnnnnnnnnnnnnnnnnnnnnnnnngtctgatcaacctttcgaggcctctgtgcttgaggggctccagggcacagagaagtaacgcaacaggcaggaccaatggcagcagatgccgggggatggagcacatggggagatggagcactcagtggcaagccccacagacagcatnnnnnnnnnncgtggaaggaacggctactgcagctggcacattccaggtggctcccaaaggcagggatgctgcggttggctctaggagactcctctataaaaggggaacaccttgatttaactggctggactgtgggaagactgaaagggctgtcagttgattcctccccagggcactgcagggagagagagaggctgaggcaaaggctcaggggccacaggacacttatatgggggacagtctgcagtaaactcccttaatgactctgcaaaaccaacaacagaagagaagggcagaggcnnnnnnnnnnnnnnnnnnnnnnnnnnnnnnnnnnnnnnnnnnnnggctgcagggcccttccacacgactccctgcccctcctaag

SEQ ID NO: 325729 - DNA, 414 bp, Homo Sapiens
ttttactgctttttgaacaagggaacttgcatcttcattttgcactgggccccacaaattttgtagctggccctgtgttttatttccatggacttctgacccttcccctcccactctggggacctggggacatccctaggcctctgcagaatgggaagacaccactagggtctaagaccatcccttcccaagaggcttcttgggacactcagcccccgccctgcagggtcttgtggggggtgaacttctaggggttgggccgttcattgccgtcttgtgtgccaggccccgctccaggtgctgaggatgtctgatcaacctttcgaggcctctgtgcttgaggggctccagggcacagagaagtaacgcaacaggcaggaccaatggcagcagatgccgggggatggagcacat

SEQ ID NO: 325730 - DNA, 586 bp, Homo Sapiens
  misc_feature (249)..(249): n is a, c, g, or t
accttctattatcgtcttcggaagttaccagcctgtgagatccaagcccccccacccaggccccctaaaaatcagggcctcagcaagcagaggagacacagcagtgagggaggcgtcaagtcttctcaagtcttaggattgcagcaacacgctcggctgcccaaacccaaggcgaagaccttgccagagttcatcaaggatggctccagtacgtacagcaagattcctgcccacaggaagggccacagnccttaaagccccaaaggcaggatctagatgatgatgaacatgattatgaagaaatacttgaggcaatttcagaaaaccatctaagtgctgggagggaaccacgctttcctaactgctgcttctcagggaatccgacaccagccaaccattttaagcctctaaaagacctcgggcaagtctcacagaaactgagctgcagacggggagtagctttgtggaaacttgatttgatggacactgcaccagcttccttcaggtttcttagattcttggcttacttaggggcgggctgggttttgggacctaaccttttcggcacgtggacttccctgagcct

SEQ ID NO: 325731 - DNA, 709 bp, Homo Sapiens
  misc_feature (19)..(19): n is a, c, g, or t
  misc_feature (40)..(40): n is a, c, g, or t
  misc_feature (125)..(125): n is a, c, g, or t
  misc_feature (439)..(439): n is a, c, g, or t
  misc_feature (508)..(508): n is a, c, g, or t
ttagggaccttgaggagcnaatctttttgaaaaagccatntccaacacacaacttgtaaacatcagccatggaatgctgattgacaggcaccatgggccacgctagccccaactcgctcatctgnctggggtcatcagagggaggcccaacccagaatctcctgtccatgggctggggagcagcaacagtcaggagccgaaggcccaagcccacttcccctaggaggtggagggaagggggctgagtggttgtcaggcgtggtcctccccatctgcgacgtgcggtagccaggagctgggcctgcatccggaagaggacggtgaggagcagcactatgaggaggaagaggatggagccacatacgaccaaggccacaatcacctctgtgtctgcaggaccgcttccagctggcactcctgctgccaatccttgggcacngacgggctctgtgaggcgaaggaagtcctgcagtgggcagcggtgagggcagccaggcaggctgagtgnccagggggccttgtcactcctcgttccgaaagtacatctccactgagaaattcccagaatcttcctggtacagttcaaatatgtggcaggaggcgtagggggcttgttcaccattgtagacatccagtgccatttgcagggcaaccagggtagtgtcgtgcgcagagtaaaccagcagcttggggagctgggaggtggtcg

SEQ ID NO: 325732 - DNA, 474 bp, Homo Sapiens
tctcctgcctaacctggacccacacctcttcatgtccccacccaccacttagagactgagattgttcaagtaacaaggatagaagagggaaaagaaacggaggctccactctcatccagtcttcccaactaggggcctgtgaaaggggctcctgggtctgagtcttctcagcacagattctcccgtttccctcaactttgtgcagatgaaaaaggggaggagtgggtgaacccagcactgccattggtcctaggcataacacatggagtcagactcttccacctggtaggggaagtgggtgggggggtgtcaagaagctgagcaccatcaccttcccaggggggttttgaaagtcctgatagggtagaggtggggagatgtctacttctggctccagtctgatattaggctggctcttttagctctcagcattgtcctgaaccacgagttctgctagggagatccttttccagc

SEQ ID NO: 325733 - DNA, 420 bp, Homo Sapiens
gtattgtttgtcactgagtcaaagagatctgtgggattgtgaggattcttgggtggaggggtgactaatcctgcacgtccctttgtgaagactccagtaagtactcgcacaacgtacatgtgctttctcccattgctgtctggcttggagtaggtatccttgggcagaataactgggcatccacagcaaaataggttccttttccataggatacagctgggaaagagaaagacaaaaaccttcctaaggaatataaaatttacacaatgtgttaggaaccatgcccaatctgacaaaattgttttctaaatgcagttttagccaggtgtgttggctcatgcctgttaatcccaacactttgggagggctggaggcaagagggttggctttaaggccagggagtttcgagaccagcctggg

SEQ ID NO: 325734 - DNA, 426 bp, Homo Sapiens
  misc_feature (232)..(232): n is a, c, g, or t
  misc_feature (346)..(346): n is a, c, g, or t
  misc_feature (390)..(390): n is a, c, g, or t
  misc_feature (410)..(410): n is a, c, g, or t
tatacgtatgcatttctgttgggtgtatacctaggagtgaagttgctggaatacatgtattctgccttattggtgaacaccaaataattttccaaagtagttgtgctagtttacacataacgtgtggttttaatgtgcatttcctacatttattgcattttggctactagaaattaattctctcagtgattgcagcttaatttttaaattaataagagagctgccataaggnttttcctatactgcattttttgctagggaagggggacataggtcaagtgggttgccctggacaactgtaattcttggggacttatttacaaaggggtaccccgacccacagggncctcttggccatggtcaggccaacccaaggctagggtccatctnaaagggggaattttaccttnaccataaatatatttt

SEQ ID NO: 325735 - DNA, 601 bp, Homo Sapiens
ttgccatttaacatatatttattgaaatctacttgatgcaaggcactgtgctagatttggtaggggatcagacatgaaaggccacccctgtcttctaagagctcacaatttaatgggtgggggagggctgaggaggagggggtgaagccaagtccacaaacagctctagtgcaaggctgattatagtgagtgccagaaaacagacaaggtaatgagatgggggaatgagaaaaaagtgccaacaaccaacggaaatacaaactggggtgggacatagctattgttctcagagatacgcaaaatgacattgagggccaagtttaaagagacagtttctgcttttccaaagtaaacatccaaagtgatgcaatgagaactacagaatgtaagtacatgagtaagagagaagttagcaatcccccccatctgatggacatgctggaaatcgtgaaacacttcaaaaataagagaacagggtgcactgtgatttcactcattttatggcccgcatgtggtgggttcagtaaaggaacaatatacgtagacataaaatcacaggttaaattcactgagactagaaggcatcgactttcacccatct

SEQ ID NO: 325736 - DNA, 562 bp, Homo Sapiens
  misc_feature (417)..(417): n is a, c, g, or t
agcaggcacatggaccgggtgctcggcggccgcacctaccgcacgctgctgcagctcaccaggatgtaccccggcctgcaggtgtacaccttcacggagcgcatgatgccctactgcgaccagatcttccaggacgagacgggcaagaaccggagcagtcgggctccttcctcagcaccggctggtttcaccatgatcctcgcgctggagctgtgtgaggagatcgtggtctatggggatggtcagcgacattacttgcagggagaagagccacccctcagtgccttaccactactttgagaagggccggctagatgagtgtcagatgtacctggcacacgagcaggcgccccgaagcgccaccgcttcatcactgagaaggcggtcttctcccgctgggccaagaagaggcccatncgtgttcgcccatccgtcctgggaggacttgagtagcttccgttcgtcctgccagtcgccattgccgttgcgaggccttccgggatgtcccatcccaagccattcacactccattccctgagttaatttcacggcattttggggg

SEQ ID NO: 325737 - DNA, 422 bp, Homo Sapiens
  misc_feature (53)..(53): n is a, c, g, or t
  misc_feature (281)..(281): n is a, c, g, or t
aaatcttcccaggaaggaatgggcgaaaaacgaatgggcctcttctttggccnaacgggaaaaagaccgccttctcaatgaatgaaagcggttggggcttcggggcgcctgctcgtgtgcccaggtacatctgacactcatctagccggcccttctcaaagtagtggtaaggcactgaggggtggctcttcctctgcggggtggggaacagggctggggtgggacagaaccccaactctccggccacaccctgccgcctaccttgaccacccctcgccagnccatgggctcgtgaagacccacgcctgatccctggggaggccaagacacataggggagtagcagatcccgagagccagggttcgagttcactgctctgcctcttgcaagctggatgactctgggccagctgtgccgaaatc

SEQ ID NO: 325738 - DNA, 477 bp, Homo Sapiens
ctggcacacgagtcaggccccgcaagcgcccaccgcttcatcactgagaaggcggtcttcttccgctgggccaagaagagtcccatcgtgttcgcccatccgtcctggaggactgagtagcttccgtcgtcctgccagtcgccatgccgttgcgaggcctccggatgtcccatcccaagccatcacactccactccctgagtaattcacggcatttgggggctcaccccacctccaggtctgtcaagtggcctttgtcccttgggctgatggcccccaactcaccagcatcatgaccttgtgccagtcctggtcctccctccccagccgctcctaccaccttttggtgccacacttctcagctggccgccctggttggggcagccgagagcctggggttcattggtgaaggggccttggagttgtgactgccggggccgtatcaggaacgtacgggtaaacgtgtgttttctggaaa

SEQ ID NO: 325739 - DNA, 381 bp, Homo Sapiens
  misc_feature (55)..(55): n is a, c, g, or t
  misc_feature (87)..(87): n is a, c, g, or t
aaagaatccacatctacatatatcataatcaaacttttgaaaaccaaagacaaanaaagtcttgtgtgcagtgaaaaagatataacncccctaaccttacaggggaagaacaaatgatattggatttttcatcaggaactacagaggcccagaaaatgaaaaggcagcatttttcaagtgctgaaagataagtattgtctaccaagaattccatatcaatcagaaatacccttcaggatgatgggaaaataaagacattctcaagtgaaagaaaactaaaagaatccgttcccagcagaccagtcctaaaagagtagctaaaggatgttcttaccacagaaaggaaataatgaaagagggaatccagaaacatcaggaagg

SEQ ID NO: 325740 - DNA, 915 bp, Homo Sapiens
  misc_feature (343)..(380): n is a, c, g, or t
catgcctgtggcccgtccctcatcttctccaaaatcatcattaagaacaagtgattttggatgatggatttttgatttacaaacggcgcatttcccttggagtggaacagaaaggaaaccatttaatggcgcccttcttttcaagcatgaatacattttaatgaaactattttattgtatttgaggaaatggagagttgaacattccaaccaatcaatagccaattaattgctataaagctaaaaagaaaataaataaatcctgagtctattttaaacactgcaaaaagttcagagcctcagaatctgggccttcccctccataaggtgcacgagcatgtaannnnnnnnnnnnnnnnnnnnnnnnnnnnnnnnnnnnnntcactcactcccctacacctcagacatacttgaaactcagaaacagcactgagtctccccatgccaattcttgcctgctgtcttcgacttgggtcagagaaggtgagcagacccggcagcagcctgtcccggggctcaggaagaggcaggcccatcccctggccccaagcacccagcacaacagagggtggcgggcagtgagggcctggcgttgcctgggccccacttctcagccccagctgctgggcctccaaggttgggctgaggatggagttttggctctgggtttgccctgactcctgctggaagacgctgccctggtttttcaccctctagtggccttggacattgagtatttgtagaaatgcagattacattgcaaatggaaacctttgccaggaagacacatgcattttgcttttaattctttgagacatttgattttgtcttagggactgacctttcagcatcaaagaaatacatatctactgtatccgccaaagtttgtgatgcctgcatagacgcttacttgtaa

SEQ ID NO: 325741 - DNA, 412 bp, Homo Sapiens
  misc_feature (397)..(397): n is a, c, g, or t
ggtttgtttaatttccctttccttttctccccctccctagggggtgtgactgcagagaatgctgggtatgggctgtcttttggctttgcttctatagttctatgcacttctcttagcaggttttatagttagacctacaagccagtagatggtgcttgtaggtaagagctagctagctacagctaatgtggctgcatatatatttcatccttgtttactggtagaaactctctgttctctcaggcaatggactgattcatgcagtgcagagtgctctgaactctgctcagccctaggggttgtgggggacaagatgaatgggggccagactagggcaggtccacctacagatcttccaatgtcagggcacaagcaccagtgccaagtgataaatccngtggggcagccacca

SEQ ID NO: 325742 - DNA, 605 bp, Homo Sapiens
accaccccccggccaatgtctccatttttgagggcgctcaaagaagtaaaaatggtattctctgctctagaggaatttgcagaaggatatgaactgaaaaaaagaaagatgggttccagttctggctctacctccaattcttgtattatttatttaatctccacagaactcaatttctccctccgtaaaatatgaggggctagactaaggtaaacacttaatttcccttcttatacaaattctgtgatcccgttttcctcggatcaagagttgtcgcttgatgaaggagctggggaatgaaggtgaggtgctggatagttaagcatgccttagaagaacaactctcaaattacttcttctttgcccttcttcctcctcctagttcaagttcctcctcctccaagtaaccctacccttactcatctcccttctaatggattcccacagcattcagtcagataagaattgtccagcacacaggctgggctctcttgcattggattcattaagcccatgaccccaccttttcttctctccctctggacttccagaaggctatgaccaaatgtgatatctctctgaatcaaccaatgcctatcatcaag

SEQ ID NO: 325743 - DNA, 687 bp, Homo Sapiens
ttttcccattaaaataacccgtctttatttagaaacgcagaccccacacgtttcaggaatcctgagccccagtctggctttgtcaccccctgactctgtgaggttgagtcagctgacttgtcaggacccctttgtaaaatgtatgaggttttgatccaagtagagttagaagtttaaaagttcgcccatttgtaaaattatggggctcaactacattttttaagcaggcttccaattcttaaaaacaactacagcaataaaactagggtgagtctatgatttcaggcaaattctaattggctgattgtacgttagacctttttcttttgcatctaaaattaaatgaactgataccttcatgtatacacttgatctctgttaagatggtggacgaaaaatttgttagaatagaaaaaaaatacataaagagtgaaataacatgatctcttcagaatggccaaattgtgctgagatggtgatgaggagccgctctatgtcctgaggcatcttctaagaaaattctctggctggtgctttctgagttcatcctcctcggacctcactgctctcacatttttgtttgtatttcttcatcctctgcctggttgacctgtcctggagcgtggggtctgatcgggttcttggactccacgcactccacaagcccatacgccaccatggtcaggc

SEQ ID NO: 325744 - DNA, 477 bp, Homo Sapiens
  misc_feature (23)..(23): n is a, c, g, or t
  misc_feature (29)..(29): n is a, c, g, or t
  misc_feature (104)..(104): n is a, c, g, or t
  misc_feature (151)..(151): n is a, c, g, or t
cccattccctctgaaatcagggnctactngctttatgttttaagtcaacagtgtctcgcattcctgattggatccatgtgaagggaatccatttatgggccccngtcccctaagagaaacagaagagggagtcagaaagaaagatgccctntgttttccctctgtggggccccgtgcactcccctggagagatgctacaatgcaatatacagcgctccatccccactggggaagctgctgtgatgagactagatgagccttcaacacactcagaaaatgcaacagcaatagggggcagacagctcctacctgtgtttctaggagcaaaagagagggaactaattgcccgtgaagacgccagtggaaggatcagcctcattctaagcaaaaacatagtattagtgatactcttactgccttatcttaaccaaggactaataggatacctttccattaaacaccagtgacatattcagg

SEQ ID NO: 325745 - DNA, 320 bp, Homo Sapiens
  misc_feature (73)..(73): n is a, c, g, or t
cccccggtgtctgggctaaattttaaaattttttgtagagacgggtccccccttatgttgcctaggctattcncatactcctaggccccaagtgatccttcagccttggcctccttagaattgttcattttaacttggggatggcaacatgggtgcagtgagtgtttaaagataattatgagggattttgatgagtttaattcaaaacatggaaacattcagatatcttatgtacagggcattgtctatgttatacaaacatttcttccagagtaaaatctttgctcacatttactactatgtgaacaaaataaaaatgc

SEQ ID NO: 325746 - DNA, 494 bp, Homo Sapiens
atccttggtccataaagaagacacatttatttacattctcaatggactaaaagaggctttaaacttccacaattaaaattgtatgcttccaaaaatatcatatgatcaatgcacttaacttaaagcttcaggtattaataacttcatttagacttcttaaaaaaccaacacaaacatactttctagagtgcaaaatgcttcttattaaatacttcagggacacaaaagcaatttgtttttaaacagaggcatccttttctgaaggatcatcaccacaaggacatccattgccggcaatggacgtgaacagaactgccagctcgaataagatgcaacgttaggactctgccttcagtttctttgcctttcccgatgaccccagttatttgtacaaactcattgttggactctgggtacatgcacatatatgcatcacaaagcagtcttcgtgcacagccttgggttctcctgggggtcccaggaatgcaggtctt

SEQ ID NO: 325747 - DNA, 395 bp, Homo Sapiens
  misc_feature (13)..(13): n is a, c, g, or t
aggaaccaaaaanaaaatttgcctaatagcaaagaagatatttaaagagtggtcattccatttcccagctagtaccaagcaggagtcctagctgccaagtgctgcagtagtttgaacagattgtcaggggcacacgcggtgagtagcatccgtggtgcacatggcctctgttttcacaggttttgcactgctgtgtgtgtggctcaagcacgtacacccaacagagtcactacatactgaccctggctgacttgtcatccacggattatgaccccttccctccactggcaaatgtgaagagctctgagccagtccagtatcattcatcagcagaattgggtaacctgctgactgttgaagagggtgagtattctttcaggtattgaagagctctc

SEQ ID NO: 325748 - DNA, 1196 bp, Homo Sapiens
  misc_feature (701)..(701): n is a, c, g, or t
  misc_feature (713)..(713): n is a, c, g, or t
  misc_feature (922)..(994): n is a, c, g, or t
  misc_feature (1070)..(1082): n is a, c, g, or t
  misc_feature (1150)..(1150): n is a, c, g, or t
aatgcagtgacacaatcatagctcgctgcaatctcaaactcctgggcacaagctttctcccacctcagcctcctgaatagctgggactacaagtgtgcgcaactacatccagctgatttctaaaaattttttatagagacaggatctccctttgttgcccaggctaggaaaatactgcttttggtttttagttgatctctttgttaatttttcagcttctcagcccccacctctttaactaaatatcttaattttaccgtgttgggagtcaatgaagtataataaaagttctgggctttaaaaccagatgagcccaagttcaaacctgagttctgttgctgactatagctatgtgattttagacatcattcacacactctgagccaaggagttttcttcagaaaaatggatatagtaatacctaccttacatagaacaggtgaattcttgttctagttacattagggatatgtagcttaagtaattggaagtaattttacatttggaattttgcttcattaggttttttcttcaaggtatctgtccacttcatttttcctcaacaaatagaatgaaaaaagaatttctgtactttttaatttactgtaactccttagaccaagatgaaacaaacaaaacatcatcattatttttttaactacaaaaataaacatacggattgttaaattctttgtattttntcttgccctgtntcctgtgggaaaagctgccattttcaatttgaaattagtccacaaatctataatatagttcttctttaggaaaagcattagaaaattggcatggataagattttgaaaacacctcaaatatgaggtttaatataatactacaaaacttgtgccactttatctgtgtaaaatgatctttttacttttctgttatgtttatgttttaagannnnnnnnnnnnnnnnnnnnnnnnnnnnnnnnnnnnnnnnnnnnnnnnnnnnnnnnnnnnnnnnnnnnnnnnnggctcaagtgatcctcccacctcagccttccaagtagctggggattacagatgcgtaccacaacggttcagcttannnnnnnnnnnnngtaggaggaaggggttctttcctattttggcttagggtgggtcttgaggcaactagggtttcaagggnttcatcttggccttggggcttccccacctaagtgtttgggggttat

SEQ ID NO: 325749 - DNA, 356 bp, Homo Sapiens
  misc_feature (40)..(40): n is a, c, g, or t
  misc_feature (114)..(114): n is a, c, g, or t
  misc_feature (286)..(286): n is a, c, g, or t
  misc_feature (323)..(323): n is a, c, g, or t
taaactgctctcccaacttacaaacgagtaaatttaattnataccagagtatccagctcttcccacctttccccaggaaccccttccgtcttgccgtgggtggcaggcatcttnctgctgtcctaactggcactcttaaacaatttcctacagggatgtcttaatccatttcacactgctgtaaagaactacctgagattgggtaatttatgaagaaagaggtttaagtcactcacagttccgcaggcttaacagggacggcatggctggggaggccttcaggggnactttacaatcataggcggaaaggttgaagggggganacaaggcacatcttccccatgggaagagcaggg

SEQ ID NO: 325750 - DNA, 533 bp, Homo Sapiens
  misc_feature (16)..(16): n is a, c, g, or t
  misc_feature (25)..(25): n is a, c, g, or t
  misc_feature (50)..(50): n is a, c, g, or t
  misc_feature (62)..(62): n is a, c, g, or t
  misc_feature (95)..(95): n is a, c, g, or t
  misc_feature (145)..(145): n is a, c, g, or t
  misc_feature (153)..(153): n is a, c, g, or t
  misc_feature (178)..(178): n is a, c, g, or t
  misc_feature (267)..(267): n is a, c, g, or t
  misc_feature (283)..(283): n is a, c, g, or t
ctctgtgtcccacccnaaatctcancccgaattgtataataatccccatntctgaggggaanaggccttgttggcagatgactgaattcaggggngtggatttccccccttgctgttcccgtgacagtgagttctcaggagatcntggttgtntgaaagtgtgtggcactttcccccntctctcatctctccttgctctgccatgggaagatgtgcttgtttccccttcacctttcgctatgattgtaagtttcctgaggcctcccnagccatgcgtcctgtntaagctgcggaactgtgagtgacttaaacctctttcttcataaattacccaatctcaggtagttctttacagcagtgtgaaatggattaagacatccctgtaggaaattgtttaagagtgccagttaggacagcagcaagatgcctgccacccacggcaagacggaaggggttcctggggaaaggtgggaagagctggatactctggtatcaattaaatttactcgtttgtaagttgggagagcagttta

SEQ ID NO: 325751 - DNA, 217 bp, Homo Sapiens
tgaagaaaaactgaggccatacggacgtcaagactggccactccaatacttaactctacctctaccccaagaggcacttaaatagtgccatagcctagagactaaagaaagtcataattcaaggttgcctatgaggtctaccttgcccaagtgctgaggaagccaagaagcatttcatccctcctttgaaacatttcctgttgattttaaaaggggg

SEQ ID NO: 325752 - DNA, 388 bp, Homo Sapiens
  misc_feature (313)..(313): n is a, c, g, or t
  misc_feature (332)..(332): n is a, c, g, or t
  misc_feature (362)..(362): n is a, c, g, or t
  misc_feature (376)..(376): n is a, c, g, or t
ctacatccgcgccctggtggacggctgtgctaccaagaaaggctaccagaagacggttctggagatcgacacccccaaagtggagcaggtgcccatcgtggacatcatgttcaatgacttcggtgaagcgtcacagaaatttggatttgaagtggggccggcttgcttcatgggctaggagccgccgagcccgggctcccgagagcaacctcgtgacctcagcatgccattcgttcgtgagtgtcccgtgcacgtcctgaccctgggacagtgaaggcttctccctcccctcccacctgacttcatctacggnctcggcaccacggggtgtngggaccccagacccgggagagaacagaggngaagggagccgcgnccccactgggga

SEQ ID NO: 325753 - DNA, 510 bp, Homo Sapiens
  misc_feature (461)..(461): n is a, c, g, or t
tcaaaacctataaagcaacttttatctgaaaataatttcatggatattaccatcattttgtccagagacaatacaactaaatataacagtgagtggtgggttctcaacctgactggaaacagaatatacaatccgaactctcaggccctggaactggtggtcttcaatgacaaagtcagtcccccaagtctggggttcctggctggctatggtattatgggattatatgcttcagttgtccttgtgattgggaaatttgtccgtgaattcttcagtgggatttctcactccatcatgtttgaagagcttccaaatgtggatcgaattttgaagttgtgcacagatatttttttagttcgagagacaggagaactgggagctaggaaggaagatctctatgccaaattaatattcctatatccgcttcaccagagacaatgatccaaatgggactagagganaaaacaatttgaaacctttaggaacacagactggcaattattgtttaac

SEQ ID NO: 325754 - DNA, 453 bp, Homo Sapiens
  misc_feature (355)..(355): n is a, c, g, or t
  misc_feature (401)..(401): n is a, c, g, or t
ctcaggtcacctggcaagttagaggtcatgctgggacctgaacttgtctcccacatattcgtcctttgtccttcccttcatagctgcctgatgtgggttgtaatttaccccctgacttccctttaataagctccctccttccttaaggatcgcacaccccagggcagttggattcattccatgcacactgttttctcagtcgttcatccttgctcaggcccaaacttaacttacagagcagtcagggaaaccaggaactgtctttccactctgtggacctccaatgtgggcggttacctggcaggttccaccatcttgttacgttggggattaaaatgtttttccccccagttantgagttttggttcccggggcgggtgcttttggaaaacatttcaggngatctttcaaatgggaaaggcaggggtttcagagggcaaattaggttggggt

SEQ ID NO: 325755 - DNA, 637 bp, Homo Sapiens
  misc_feature (16)..(16): n is a, c, g, or t
  misc_feature (63)..(63): n is a, c, g, or t
  misc_feature (97)..(97): n is a, c, g, or t
  misc_feature (203)..(203): n is a, c, g, or t
  misc_feature (280)..(280): n is a, c, g, or t
ggattacctttagccntggaaggctgaggctgcaatgaggtatgatcctgtcactgtattccngccctaggtgacagagtgagaccctgtctctatngaaaaaaattatttaaaaattataatttctggttttaggggaaaaccaggattccagaaagagaagctttctttacccaggtaataagggaatttgccctatgacntaattatccaccaatttttaccagaaggaaaaaaccacctggcctggaccttggaattccagggttggccggtaccngctccaacaattaattacattataacacactgcctcaaatttaatacaagactgaaattgtaatgagatgtgattttaattggtaaaaactggtcacagtttttctccagcgttaagcaaaagatattcaagtataagtgataccactgaggataagaattatttaaaaagacaacagtaataactgtatatttacagtttaattttctaatacatactatgttaacttttaaagttttcaatataaactaaaagaagaaacctaagatgttagaagtgtacaacaaccaaagacaaacaaggaaataagaaaagtatcctaagcctctcccaaattgggtcaccagttcctgaatg

SEQ ID NO: 325756 - DNA, 374 bp, Homo Sapiens
  misc_feature (20)..(20): n is a, c, g, or t
  misc_feature (25)..(25): n is a, c, g, or t
  misc_feature (47)..(47): n is a, c, g, or t
  misc_feature (55)..(55): n is a, c, g, or t
  misc_feature (62)..(62): n is a, c, g, or t
  misc_feature (120)..(120): n is a, c, g, or t
  misc_feature (131)..(131): n is a, c, g, or t
gggcctcactgcaaacctcnggccnccccaggttccaagcgaatccncccggccncagcccnccccaagtagcctaggacctacaagcatttaaaagagtttaattaataattaaatccntccttaatttnaccatttctggttttcttcatttcatcttgtgaatttagtttaccatctggtgtccttttcttactcactccaatagagctttgttgccatgcacctcctttctgctgttatcatcatatacattacattctaataagtcatagggcctaaatacaattatacacaaattgctgtatgcatttgcttttaaatgagttgagagaacagtgaagaaatatgtcattatactgtcttttgtaatt

SEQ ID NO: 325757 - DNA, 516 bp, Homo Sapiens
  misc_feature (395)..(395): n is a, c, g, or t
  misc_feature (452)..(452): n is a, c, g, or t
  misc_feature (469)..(469): n is a, c, g, or t
  misc_feature (477)..(477): n is a, c, g, or t
  misc_feature (488)..(488): n is a, c, g, or t
  misc_feature (500)..(500): n is a, c, g, or t
ggggcttacctcagaattcgtgtccttttaccaggtttattcactgttggccccagaatcctttcagaaaccaagaaatgagaatatgtcaagggttaaaggaggctttcacttccagaaatcagaagtaaaataaaggcttttagagcctgaaattagctttttggaaatgataggattataaaatcactggcaaaagggtttagaacttgactgccctattaaagagttcttcctctgtgccataggtggtcagaatggctttcaacattcctcaagtcaccccatgccccaggagtagggagagtactttgaggtgtctctggggagacctgcattccttgggactccagggagaatccaagggctgtgcacgaagactgctttgttgatgncatatatgtgcctgtaccagagtccaacatggagtttgtaccaattaactggggtcntcgggaaagggcaaagnaaactganggcagagttcntaacgttggctncttatttcgggctggg

SEQ ID NO: 325758 - DNA, 459 bp, Homo Sapiens
aatatatatatatggtagaaatgtgttttttatataaaaaaacatttttttaagaaacatgcaggaatacactgtacctcttccttgctgtctctggatattgtcacatgaggacttgacatgcagattgtggcagcctctgtgaccaagagcagaagacaatagcagcatagaaacctcaaatgaaaaacctagcatctcaagctactaatttagccaaccttggcatcagctatctctggtcctagtacatgaggtgataagcccccactgttcaagttgggtggccatcaattgctgcagaatagaagttaatgaggcttcctcctcctggatcccctactagaccctgacatgcccattcagtcacaggcagaaagggcagcagagggtaaggagacctggctgactgtgtcagacgcagatcttacctgtcctgcttagaacactcaattggtt

SEQ ID NO: 325759 - DNA, 391 bp, Homo Sapiens
  misc_feature (125)..(139): n is a, c, g, or t
  misc_feature (318)..(341): n is a, c, g, or t
  misc_feature (365)..(365): n is a, c, g, or t
ctggcccacccatttcgtccaagagcctttgaagaaaggctctttactagggaatggtgtcagaatccaacatctgagttctaagtcctaataatgttttaaggatagattcttaggattataannnnnnnnnnnnnnnggtcacagtatagttttggagattctttatatgtatcaccaaactgcttcctggaaatgtactgatttattctcctacctgcagtgcataagaacgcacttctctttccatgctcactaacattacctttttcctaacttttcaggtagaaaagtatataataatttttgtttcctagnnnnnnnnnnnnnnnnnnnnnnnntattattatttgaggacaggagtntccctctgtcgcccgggctgggagtg

SEQ ID NO: 325760 - DNA, 259 bp, Homo Sapiens
tataattaacactaaaatatttattattgctctataaaaatataccctaagcattacagcaatgggaaaaaaatcacaaaggaaaggatggacagatttgactcaatataaacatcaaatacttgaatgtaaagtaaaagtacaaagaaaatttaaatgtaaataagctagcaaaatcattgtcccaaatataagaacacttcatacagatataaaactgtaagctctgataaaagtaggcacaatatgaacagataac

SEQ ID NO: 325761 - DNA, 981 bp, Homo Sapiens
ttttttcatgacagggaactgaacacaagtatttatattccctctttctcatagttccaatgtaatgaaaggtggggggagatctataatcatgttaaaagtaggtttggggacagcagcaaacccagggttttgacatactttgggaagacagaaagcagagaggattgtattgattgtgcagcatggagggaaccacagcccagattatgcgcagaaggctgggagtggaggtgggagccattgccctgcagtcttggagcacttctggtggtggagatggagtggaagtcgggcaaaatcgggatgactaacaggtgagctgagctactccctggcagctgctcccaggagaatggacctccactcatttcccatccctatccctctgataggggtgtcagctcttggtgggtccttcctccaggatggaacaaaaactttgatgtaggtgtgtcctctgtccctgaaccagtcaacagccagcttgattccccggcaagagaaggtttctttatttccatggctcatcgccacgttgctgccatcaatcactatgggtcgcagagaactggccagggttctgaagtcctcttccagggctgtccccgggccacgctgggcagagtccgggaccccacaggagccccgaggcactagcctgggtgcagccgggtgctccagggcacccgggcgactgcccgtgcggataagctcctgcagcacgtcgttgacccagcgcccttgcccagcttgcccaacacccggagcacatctcccggtcatagcccagcttctggaagaattccatcttgctggggtgctccatgctgtgcccagcggccactggtgcaggtcctgcccaggcttcctcctctcagagccctgcagacatgagctctgccagctccacagaaatccacgaaattacagcctccagaactcagccaccatggtgaggagaaagttgtcttgtcccga

SEQ ID NO: 325762 - DNA, 374 bp, Homo Sapiens
ccagccctcaggcaaggttctccggtgaagccacagcctggccacctgtcttgatctccccaccgagaaggccccgcccctcccgctgcagccccacagcatgcagcccccaggagagccacgtcccactatagtaggtgggaggacggcagcagggacggagttcagcctaggggctgtgtccagcacagaagaggcctcacgctgccgcaggatctcccagaggctgtgcacgggcaagctgggcatcgccatgaaggtgctgggcggcgtggccctcttctggatcatcttcatcctgggctacctcacaggctactatgtgcacaagtgcaaataaatgctgccccgcatgcacgcggggggctggccgc

SEQ ID NO: 325763 - DNA, 1197 bp, Homo Sapiens
  misc_feature (21)..(21): n is a, c, g, or t
  misc_feature (26)..(26): n is a, c, g, or t
  misc_feature (42)..(42): n is a, c, g, or t
  misc_feature (59)..(59): n is a, c, g, or t
  misc_feature (1025)..(1025): n is a, c, g, or t
agcggaaaccccggcaatttncaaangcccctacccacctangaacaacctttcccctncccttaaacacccccaattcacccatcaaaactcatttccccaaggactgtatttcccttaaaaggttgttggcacagaatctgggggtaatgcaaatcctttgggtaggtagttaagattgtggcttggaaaagcttcccctaaatagggcttagaggactgtccacctcatctttcatattttgctgctaacaatctaatacttcagatgcagaaccttcagtgttttagggcctttgagctgctgacacacaatagtgcatcagagctgcctctcagtgctccggtcacctacacagaagatgactgaaggaatgaaatgacgagttaattcccaggaagaaaatgaaactgggaacaaatgcattgcccaaattgagctgaccctcctccactaaggtttgaaaagaccctattaaagataccttccatgtgggcacgaggttggccaccaatcaagtagcctcttttgcctaatatccttggcaaatataaatttgttagcaacaggtctgaatgaaagagactgggtgggtcttgattcagaagagctgaattcactctgtgagtctgaagatacaagtcagcctccaggaatctttgcttagctggatagtgtgaaaatagatgatgatgggagtgaagatagaaagaggataaggactgatttgagggaagctggtaaggttcttctgtggctcctgaaatcacatcattagtaatgtcatctttgggtcttcagagctttttgtattacctatgggtataattaagcaactgggagggttgatactgttacatttcttagcttgtaccttctaaggtagttaacaccacacaggctgataactcagggcaagagagaggcctggagagttgacaagagtgtgaagatactggagaggggttcaaaataggatcaattcttctaatactattcttatttcttgctaataatttgtccntgtaattatagtgaagtaatggtctggatataaatgagatatggttttgtgaggaagaaacatagaggattattcttaacaactgtggcagccttgccaatatggaacccaatttcagagtttgtgaaatggtacaagtctcataaactatctcagcactgcatccgtattt

SEQ ID NO: 325764 - DNA, 564 bp, Homo Sapiens
  misc_feature (13)..(13): n is a, c, g, or t
  misc_feature (26)..(26): n is a, c, g, or t
  misc_feature (35)..(35): n is a, c, g, or t
  misc_feature (476)..(476): n is a, c, g, or t
  misc_feature (482)..(482): n is a, c, g, or t
  misc_feature (504)..(504): n is a, c, g, or t
  misc_feature (511)..(511): n is a, c, g, or t
cggaagtaattanatgtttagcagcnaaaatatgnaaagatgaggtggaacagcccccctaagcccctatttaggggaaagcttttccccaagcccacaatccttaacctaccctaccccaaaggatttgccattacccccccagattcctgtgcccaacaacccttttaaggaaatacagtccctgggaaatgagttttgatggtgaattggggtgttaaggaagggaaagattgtcatagatggtagggctttgaaaatgcagggtatcagctgccactccctggcttcaacacattgagtcactgccctagacggttctcttggtcttattcccatcctggccaatgcttaaatactatttgttgaaaataattctttgagacagatttcagctacctcccttccaggttcgatttaacttggttgtaattgtcaatttgttgttataggtcttacctgtgtgaaagcaaganaaaganagaaagaaagaaagagaaaggnaattatnaggtcaagttaacagttttgaggttttgtgtttttttctggaactacttcaag

SEQ ID NO: 325765 - DNA, 427 bp, Homo Sapiens
  misc_feature (52)..(65): n is a, c, g, or t
  misc_feature (130)..(130): n is a, c, g, or t
  misc_feature (132)..(168): n is a, c, g, or t
  misc_feature (241)..(241): n is a, c, g, or t
  misc_feature (316)..(316): n is a, c, g, or t
  misc_feature (380)..(380): n is a, c, g, or t
  misc_feature (398)..(398): n is a, c, g, or t
  misc_feature (416)..(416): n is a, c, g, or t
cttttaatctctttgtcttctattatctctatctgtacagctttgtcaccannnnnnnnnnnnnnctcacttgaagtagttccagaaaaaaacacaaaacctcaaaactgttaacttgaccttataattncnnnnnnnnnnnnnnnnnnnnnnnnnnnnnnnnnnnnnacacaggtaagacctataacaacaaattgacaattacaaccaagttaaatcgaaccggggaggggagggtagnctgaaatctgtctcaaaggatttattttcaacaaataggtatttaaggcattgggccggggtgggggaataaggncccaaggaggaaccgtttagggcaggtggacttcaatgtgtttgaggccggggggtgggcagcnggataccccggcattttncaaaggccctaccctccntggccatcttt

SEQ ID NO: 325766 - DNA, 538 bp, Homo Sapiens
  misc_feature (63)..(103): n is a, c, g, or t
ctcacttgaagtagttccagaaaaaaacacaaaacctcaaaactgttaacttgaccttataannnnnnnnnnnnnnnnnnnnnnnnnnnnnnnnnnnnnnnnnacacaggtaagacctataacaacaaattgacaattacaaccaagttaaatcgaacctggaagggaggtagctgaaatctgtctcaaagaattattttcaacaaatagtatttaagcattggccaggatgggaataagaccaagagaaccgtctaggcagtgactcaatgtgttgaagccaggagtggcagctgataccctgcattttcaaagccctaccatctatgacaatctttcccttccttaacaccccaattcaccatcaaaactcatttcccaaggactgtatttccttaaaaggttgttggcacagaatctgggggtaatgcaaatcctttgggtaggtagttaagattgtggcttggaaaagcttccctaaatagggcttagaggactgtccacctcatctttcatattttgctgctaacaatctaat

SEQ ID NO: 325767 - DNA, 613 bp, Homo Sapiens
  misc_feature (19)..(19): n is a, c, g, or t
  misc_feature (48)..(48): n is a, c, g, or t
  misc_feature (81)..(81): n is a, c, g, or t
  misc_feature (88)..(88): n is a, c, g, or t
  misc_feature (125)..(125): n is a, c, g, or t
  misc_feature (529)..(529): n is a, c, g, or t
  misc_feature (541)..(541): n is a, c, g, or t
  misc_feature (568)..(568): n is a, c, g, or t
  misc_feature (577)..(577): n is a, c, g, or t
  misc_feature (591)..(591): n is a, c, g, or t
  misc_feature (602)..(602): n is a, c, g, or t
aagcccaggacatcatggnaggtgcagcatcgctaggcatgggctgcnacaaactccggcccaacagtccaagtgctatgntccaganacctggaatttcaacagatcttcctaccaagaacacntctgagatgcaatattaacaacaagcccaacattaatcttttattatgaaatgggctggttctcaaattgtgcaacagcaaattcccattaaaaataactgtcttaaacggtgaaaacaatttgattactttatatgacaaacttggaaaaagccttcatatctactgcatgaatggaatgtactgttttagaaaagctacagagtgtgtgggcttaaagttgaaacagagacagttgtggcccgactgaggtgtctctaacaagtgttaatgggtagataaggtcctttgaaacaaaaggaggaagcaaagtctgcactggcctgttgtcagtcttctgtacatcttgaaagacatagtctgcttggggctcttctgctcttgcactctgcttccctgggggncagcttaatctncacatgggagactgggtttctatattncatctcggnttaggtcacttcanttgaaggatantctcggtccct

SEQ ID NO: 325768 - DNA, 781 bp, Homo Sapiens
  misc_feature (723)..(723): n is a, c, g, or t
ctcgtgaaagtaaataaggtgagagtcagtctggaagcaaggagattgagggtgggggtagagagatctcattcacagagctgcttggtgtatctaagtgtgatgaagaagagagaggaaactaacaagatggagagggtggaggctaggccacgtacctgctttctgggtgagctgggacacagtgggcaacacaggagggtccctggtctgaagaaaatagatcaccagcaaggtcagggcgtagttactgagaagggggccactccctgggtaaataagcaataattccggttagatcagaggtgcttctaatcccctcactggcagttttctcaaccccggtgcccattctgacctcccttctctccctgaatccctgcctttgtcctgagaccaactcagccccaagtctgtcctgatccattctcacctgacagcccccgaccctgaagcccagcagcggagggtgtacacgaggggccggactcgaccatccagctcagagcagagactcaggaaacgggagttatgcagggccagcctgggacaaagcagggacaagggtgttagcgcttggggatgtcagaacctaccacccccagctttcattccagacttgcataactggagccagctggaataaggccagaacagtttccccaaatgttgctcactgatcttgtgagacagtgtgcgaaaggacaaaggagttcgggaaanacttcatcctgtacgcccatcctggacattcacagcacattattataagactgttcat

SEQ ID NO: 325769 - DNA, 323 bp, Homo Sapiens
  misc_feature (73)..(73): n is a, c, g, or t
  misc_feature (102)..(102): n is a, c, g, or t
gggaattaccggggagaagcctaaacggtttaaaataaggtatattatttcctgaattacctataacagacanggactcccatttgaacaagataccttaantcccatcaaaaacttgtcaaaatatacaaatttagtcacaagacactttactacccatctacccaaagctgtagtaaacacacacattttccatctttgaaatgaaataacgtataataatgttttccaaaataacaaagatgtctgcagtgaatagcactccctttgatgtggcaactgggtcaatcgtgttaacaactgtgaattcatctttttaagaa

SEQ ID NO: 325770 - DNA, 157 bp, Homo Sapiens
agaacagaagatcatttcttacatcttcattaagtaaaagaataaatagctcatctctcaagttgaaagaaactgggcttggtattattacaaaagcaaaattaaaatggccatataggttttaggctcattttgccatgcattatgcaaaggacaa

SEQ ID NO: 325771 - DNA, 383 bp, Homo Sapiens
  misc_feature (25)..(25): n is a, c, g, or t
  misc_feature (34)..(34): n is a, c, g, or t
  misc_feature (59)..(59): n is a, c, g, or t
  misc_feature (92)..(92): n is a, c, g, or t
ttccaaagtccccccatttactggncaagttccntgggtttttgggaacttgatccccncaaaattcctacctttgcaaggcctaggaagantctccttaaaatggcctgttaagtagcctagtaatagtgcatggtggaaaatagttggcagtgatgtggcctcacacatatgtggtgcctgcagttccctgtagctgttttgaagagggagggagaggtattaactctgctctaaagcagtttgggtccagaataaaggggtcagtgcctcataccccctactagggtgaaatcctaaaactgcccagggaaggcaaggaagcccttggcagataccaagatcagtggtattggaaataacttacaatcagcagcctaatg

SEQ ID NO: 325772 - DNA, 516 bp, Homo Sapiens
aaagtagcagtagaaaagcagtaaagaacttacttattgaaaagcgaaagcttaaagacctttctggaggaaacttctcagaggccatgttaaggctattggaaagtccaatttaaatgacaaggttactgaccaaaaatcaaataaaatattcaagtcaccattactggcagttctggttttggaactgatcccagaattctaccttgcaggctaggagatctcttaaaatggctgttagtagctagtaatagtgcatggtggaaatagttggcagtgatgtggcctcacacatatgtggtgcctgcagttcctgtagctgttttgaagagggagggagaggtattaactctgctctaaagcagtttgggtccagaataaaggggtcagtgcctcataccccctactagggtgaaatcctaaaactgcccagggaaggcaaggaagcccttggcagataccaagatcagtggtattggaaataacttacaatcagcagcctaatgcccctcacgg

SEQ ID NO: 325773 - DNA, 558 bp, Homo Sapiens
  misc_feature (20)..(20): n is a, c, g, or t
  misc_feature (447)..(447): n is a, c, g, or t
  misc_feature (458)..(458): n is a, c, g, or t
  misc_feature (506)..(506): n is a, c, g, or t
tgtttttgcatttctcaganctgtagtccctcgttgttcaatgatgtttgtctatacagtggggccataactaagacgtatgttgcccaagctggcaagatagctctgaccttctcttgggcccctcatttcccccaaacacaggttgtctgcagtcttgaccaatggctgccagggcatgggactccgctgcaggggccagtgggaggccccagctcaggcaaaagcacaggcagatatttcagggagtctgctagggctggcactgagggccagagacagaggggtctccctgtcctttggagaacctcacgctgcagaaattccagactgaaccttcataccgagtaggggaggagctgtctgcgggtttgagcctgcagcaggaggaaggacgtgaacattttatcagcttctggtatggccttgagctggtagttataatcntttgctggtgnccagggctacagtcatcctagcagtccccgctgaagtggagcaggtanagtcacagctgtggggacagcatgctggccaagggtcttcccctgtgccgga

SEQ ID NO: 325774 - DNA, 574 bp, Homo Sapiens
  misc_feature (528)..(528): n is a, c, g, or t
  misc_feature (554)..(554): n is a, c, g, or t
ttttttgattaagaaataactttatttttcatgtgtcaatcccatgattgaaaagacatgttgctctcaagtagataagaggcataatcttaaacaaaattctttctgaaaatttagcttatgaactcattacactgcaaaccagagaaggagcacaaaaagctgcagcccacattgaaacctggcaaacactctccgccaaaattagtagcaggaatgttaaagctttatcaaaaacatgtcagcaacggaatagcaacaatacagccattaactgttgtgccttcaacttaagaaaagcatttaaagaatcaccccatttcttataaaaatcatttctcagaaaagaattgttaatcaaaagactattagaactggaactctcttctttcacttcagttctagattttctttaatcaacaatatctctagttaatacttggacagaatttgggcttctcagaagagtctttgtcatttaagcacagtgtggaatgggaaaaagtgtatagttaccagggaactagnagggtaccaaaaatagtccctctggnactcgctgagctccagaatc

SEQ ID NO: 325775 - DNA, 509 bp, Homo Sapiens
  misc_feature (380)..(380): n is a, c, g, or t
  misc_feature (385)..(385): n is a, c, g, or t
  misc_feature (408)..(408): n is a, c, g, or t
  misc_feature (423)..(423): n is a, c, g, or t
  misc_feature (433)..(433): n is a, c, g, or t
  misc_feature (441)..(441): n is a, c, g, or t
  misc_feature (486)..(486): n is a, c, g, or t
tttagcttctggaggctgcctgcattcccttggctggctatgcttttcttgaatctctctaacctgttgcttccatcatcacatctcttgttcttctgtaagcaagggttcctcttataaggacacgtgtgattacatttagagcccatccagataattcaggttgatctctccatctcggaatcctcaacttaagcacctctgcaaagttccttttgccacataagacaacatcaacaaagtcctgggaattaggtacatgggatatcttgtgggggcattatccaggcctatcacaaggactctactactcgatactagagggaggcagggaagttgctgggtagagaagggtggggtcccccaggcgaaggctccangctcnggcctgtgccacagacctaagtnagaacagggaatccngttttcgcancccaatgntggacttccaagaacactatggggctggcatggccccattccaanggcctagaaacctgagaccttag

SEQ ID NO: 325776 - DNA, 378 bp, Homo Sapiens
  misc_feature (50)..(50): n is a, c, g, or t
  misc_feature (67)..(67): n is a, c, g, or t
  misc_feature (78)..(78): n is a, c, g, or t
  misc_feature (117)..(117): n is a, c, g, or t
  misc_feature (136)..(136): n is a, c, g, or t
  misc_feature (144)..(144): n is a, c, g, or t
  misc_feature (190)..(190): n is a, c, g, or t
  misc_feature (333)..(333): n is a, c, g, or t
ccaagaagactttgagaaccccctctttggcacccagtgttcctgaaaantgcccacgatgtgtagntctttatttantcattgtgcctctgtgtgtggtgggccctttcagtctgnaaatcccatttccttcagntcctaggnaatttcatctgtatctttgaaaatgtccttccctatatgtttttantctaaaatgactattagttatagtagttctattttggaccccctggatcaattctctgtaatttaagaaaatttcttctatgttttatctttttaaaaatattacatggctaggtgcagtagctcatgcctataatacccacnctttgggaggctgaggcaggtggattgcttgagctgaggagttcg

SEQ ID NO: 325777 - DNA, 467 bp, Homo Sapiens
tttttttgtggaaaagaggtacctttatttgaacagaacaagcaccctggccccagggcaaccacttccccaggtgcacagccagggccctcctgtctgcaggagaattcacagctggtgtgggactcagcccctaggccattcacagctttgtctggctctgtacattcattcagcacggggcaggggggccatgccaccagcctgggggctcaccaggcccctggatgcacacaactcaggcagggcacctgtgggaaggcgcatatcctggcggcagagcacgtggcaccaggtgcagggccagttaggtggatcctggggccccagggagcgcagcttgctgggcagtttcataaaatgcagcccctgcccacacccacctggcttcaggctttggatgtctccaaaccaaaaacctcccactgaaaaatccaggtgtgattgccgggtgtggcggctcatgc

SEQ ID NO: 325778 - DNA, 909 bp, Homo Sapiens
caagtatgaaggtagttttaaatttcttcatcaggctgtcagtgttcactggctaagttcggacgtctatccaggcttttttctaatataatgccattagttacagcctgggaagccaggtaactaaactaattagaattacaggtaaattaataaggacttcctgagtaagcactagaggccctcctataagaaataccatacattgtttgccgtcgattttggctgctgaggatgatttagcttcccactgccttttctctctagtaccccaagatgtttttttcaatgagctaaggccgctctacaactctaagttaactccagacaagtcaggtgttgccatctacagtgatttctagctggatctgactccgccactcattacgtgtaaaaagacactggggaatggaacggttgtcaaaatgcccagttaacgacaacaaatataaacttttcttcgtatacccttcgcagtaaagtagcaacagcaatcgcaaccaaaatttactaagctcggcctgcaggattctcagccctgtgtacaaactcaagtagctcaaatatttcttgctggctctggcacaggagcagatccagactagatgggttctaaagtcatcccaacaggaaaactaagctatgaacattaaatcttatctctgaaagagagaatgagggtagcacaggagttagaaccaacttctgtgcaagcgagcactccccgacgcaccggaagttttgaaatatcctgtgggcttcccacaggcaaagtggttttccctccccgcggctctgcgggccctccccagggttcgaggacctccgagttttctgcgcccggggcccgggccctggcccttccacaggctgggagcgaggccgtcaatcacagcccgcgaatcacaa

SEQ ID NO: 325779 - DNA, 740 bp, Homo Sapiens
ttgtgttccaataaaactttatttacaaaaacagacagtgggcctgatgtggcccacaggctgaaggttgcccacccctcgcctagaagagatagggggacttttgtaaatcactcctttaatatctccaaatcccccctcctaacacaagacctccacctccctgcaatccattcataaaaattcatgtcagaataaccccgtgggtggggtagcaagaaggggtgagccagactggccagtgcatttgcagatttttggagctgggtgatgggctcattccactcttctatttttgtgtatatttgaacagttttccaagacagaaagtttaaacaataaaattttttaaaaagagaggaaaaccttctcagacagaaccacaagctgcaactagtgggaagtgtggggattgtgtgtcctgcccggggccgggccttcaggaagcaatgtgcagtcgcaccaagcccagggcgctgtgcaagagtgtactcacgaccagtagagcaagcatgagcaggaaggggcaagatgatgaagggcctgcagcacctgccaatcccggcacagggcggctagcccaggcatgaggaactggcccgccatggccacgaagctcgccaccatcgtaatcatgaaccgttttccaggggggcacagctctattccaacgactgaaattgttttcatctgctgcccaccacaagtgccctatgtggtgtgccagtgttttacggtct

SEQ ID NO: 325780 - DNA, 537 bp, Homo Sapiens
ttgactcagcaagtttttattatgcacctgtgggtttgtgacgatgccaagggatcagaggaacaaagagagaggatgttgctcagatgggggtctcaacctccagagcaaggtggacacaaagctccagccagctgcccagcccctggggtgggagggaaggatcgaggggtagctgttgtcagataaggccaaaggtatcagtggccaaaagggagacaaagatctcctgggtgcagcctcctccaccactgtggtgaagggtgttgggctggagggttggccgacctctcctgagagcacgttccccctgctgctcctgctgcatggcatcaacctgggtttcagttacattacccaggaggatttccaaatccagaggcaatgtggccttccatttcctgaggtgccttggttggctctggatcagtggtggggactcaagagacagcctccctgtggcttccagcccctcacattccctttgtcgctttctccttcatgatgtggttttacacagaaaaacactctgggtaa

SEQ ID NO: 325781 - DNA, 383 bp, Homo Sapiens
  misc_feature (263)..(263): n is a, c, g, or t
  misc_feature (268)..(268): n is a, c, g, or t
  misc_feature (277)..(277): n is a, c, g, or t
  misc_feature (313)..(313): n is a, c, g, or t
  misc_feature (359)..(359): n is a, c, g, or t
tttttaaccaaggtttttaaaaatatatttacaattatgatacaatagaaaaatgtttacagtgggcagaatcaaagactcttacaatgaaatgctacccagctcccgcaggacgtggcgcacctgagtactggatgcagcatacacgtgtgcaggtgggggcggcacgacctgggggcccggcttggtgggcacagcgcactccacggggtatgcctcccgtgcgcagtgcctcctgctccttgaaggtcctttcccctcantcttnatgttggtntttggtgaaaacatagttacatgtgggtgctgacgnataaccagatgacctaactttactatggaaaaccagggcgttggtngcttgcatgacgttccgtgcagca

SEQ ID NO: 325782 - DNA, 845 bp, Homo Sapiens
agttgcagagatctttccagtagaaattatgtcaggaaggagggggtccacatcttgactggccttcccagcaagagcccctctggtccttgcacggctaattccaaaacacccgtgacttcagagataaggtcagcctgggactgtgcgtctgtgcgtcctcccaacttgaagcttcagttactgtttgactgctcagggcttcttcctgtgtgccattcagacctacagccacttgagtgaaacccttcttcttgcttttgtactgctttgggaggcagctgcctccccacagatggaacagtgtgacctcgcaggccactcggcactgtgagctcctgtgctgctgtcccagccagaatcctgtccttgaaaggagggctccctgtgcctcctgtcaggtgatgggaggctctgtccctggccagagtccccgtggggatggagacctacaaaactcaaatgccctttgtagttactccctcttcttctgttcttgctcagtggcttttatttggttccctttgagttcccagcccctatttctcttcagaggttactgatgagccaagcctcagaacatatcagaaagcagccagaggctgtctcctggtgaggctgcaatgcatttcaccaagcagacatcaccttgggcagcaggcccatttggttgtcatgacaacgtgggtagtttgtgtcgtggagtgtgctgtgccctcattctggcttcccaaggtcccttgccccagctttctttcccagaccctttcaacagactcccggcttcctggcgccacctccacattaactgttgttcaatttggagtagctttgtcttgatcagc

SEQ ID NO: 325783 - DNA, 560 bp, Homo Sapiens
  misc_feature (504)..(504): n is a, c, g, or t
  misc_feature (549)..(549): n is a, c, g, or t
cacttgaggtattattcatacaacagaacaccatatagcattaaaaatgaactccaggacccaacaaggatggattatacaatgctgagtgacaaaaacgacacaaaagcacatacacaggattccatttatctaacactcaaaagcaaacacaactatgtcgtataaggctgcatacaagaatggtaaaattcaaacgaaagcagggaaatgactgacagaagacgatgacctgggatgtgccccaatctcagctgcacatcaaatgtacctgggatgaggtgggtggagctttgaatctaccactatccaggccacacacctagaagctctggtttcattgtttcattgatttcattgttttgattgatgctgaccttaggcagcagagttttcaatgctctccagggtgtttctaaagtgcagacaagtttagggccgtgcttgaggggtgaagggcaggactgtgatgggggaggggcaaatatgggggcccttggggtnccaggcaatggttttccttgacctgaatggggggtctcacaggtntttgcatatac

SEQ ID NO: 325784 - DNA, 321 bp, Homo Sapiens
  misc_feature (264)..(264): n is a, c, g, or t
  misc_feature (295)..(295): n is a, c, g, or t
ggggggagggggcccgtgtgtgtggcagggccaggccagggaagcgcagacactgcagcatgtccactgtgtgcctgctcaggggcaggcaaacaccctcttgctcgggcaggacgtcggaggggcactcatccagaaaggggtcctcagagtctgagggggcaagggccccgcccaccacctccctgagactttagaacagcgtgcaggacacggtcacgggcaggtcgagcccgcctttttcaccagggcccaggggtagcntcacctcccgccgagcaccggggccaagttngtccacggggatggtttaggttatgg

SEQ ID NO: 325785 - DNA, 312 bp, Homo Sapiens
aatgagccaccacacctggcctgattgtttttaaatggcagcaagaacagggttggacagcaagggcaaatcacacagtatgtggcatattcagaattggttgtgagtttccagtagaaagcactgagaatatccatagggcaaaatggaatactaataatcctcatttgcctttgcctttgtactgggaaaccagaccttactttaagcccaccaaaggcaaggtttggggcctgccacagcgggatttcaaaaagacaaagcaatgcaagccacgtgttcaaaatgcccttaagtgggctttttcagggt

SEQ ID NO: 325786 - DNA, 485 bp, Homo Sapiens
  misc_feature (463)..(463): n is a, c, g, or t
ctgagacaactgcatgtggaatttatttcaaactcacccccatctctagccatcttcttacccccatacagtgtcaaggagtcatgcagcaggtcggcgtcaaagaacactagaaacatctttctgagagtcatttatttcttttgtcattgccaaacattccccaggtcttactcaccagaaattaacatagcttcttcatttctcctccctgacaaccctcatctactgaaagggctttaagggcacactgccaatgaaaatgcagagtgcatataccatgtccttaacttgtttcaaaactacctattctggcagtatccaattcaggtttcagtgctcccttgtttgaaagtggtcttcacaaaagcccacattttaaagctatttggaggagcacaaagagttaaagtggtaatagcctttcagaatttgaaaaggtagtacttgtctatatcagggntcattttttatgtgggcatatg

SEQ ID NO: 325787 - DNA, 581 bp, Homo Sapiens
  misc_feature (44)..(91): n is a, c, g, or t
tagtagagacggggtttcaccacgttagccaagccagaatagtnnnnnnnnnnnnnnnnnnnnnnnnnnnnnnnnnnnnnnnnnnnnnnnngtgtgagccaccgcccctggctagaccacctcggaacttttaaagggtgcactccataacacagacagcacggcctgtgtctccctcctgcagcctggtggtctgtgtggtgtcccctggggtgccagcacccactctgggaacccccattttaaattcaccaagaatagaggttgggggcgggttgccacactgtcccctttctgcatgggaggaagggggctcgagaactgagtcagccacacaaaacgaggatggacagaactcctgagtagcgagggtgctgccgggcgcgaggaggagggggaagacgaggaagacgaggaggaggaatagggagcaccacatgacagaggggctgcctcagaccacaaagcgcttcctcatcctttcctcgccctttgaatcgccggcaacgtgactctgcgagcagcgggcagacgccaggtctccctcgcaggcgggaaaggggctccaaggcgggtgctgc

SEQ ID NO: 325788 - DNA, 576 bp, Homo Sapiens
ttttttcacattataaaccagccagtttattattttgtagtaagatttagaacttttaccatgcagactgaaatatctgtgtcagcatgaacagtacattttcttcctagaggcagttacatggaaaaccaggttattatcaggttatttagcaagtatggaatccaaacaagaggagactaatcttaagacctataactcgtccatgaaggcttggggcacacttttctaccaccagaatgccttagcttccagaaagctgtggactcttccctctccgtcttggtctggctgagtaccgctactgctcagtcacttcctgcagccataccgtcagccagcttggcctaaaagctgttatctctggtcactggtttgtgttgttacagccactgctactaacagttaaggttctgaagggggcatgtcaattgctcccaggtaccaactagggagacacaataatcctattagtttgttctcccaaacccactccagtttatcaggtaatatgctctgtaaggttctttccaaccccattagcacatacatagattacctataatttcacctaaa

SEQ ID NO: 325789 - DNA, 952 bp, Homo Sapiens
  misc_feature (516)..(516): n is a, c, g, or t
  misc_feature (690)..(815): n is a, c, g, or t
gaagaagttctacatgttaatatgcaagcacttggcctctttactaatgtacattattttcctggatactgaaagcatctggtattagacaagaaaaaatgtggtcatgccccactccctaaggtccacccacaactaagaagaaagagaaaacaaaggcagaaaaaggaaaggagtaatcaacatggtaaaaggagaagcagaagaggccagtagattggatgccaaggaagggggaagctttatcaactgctgacaagaggtcaaggaggatgaggccagggaagtcaggaggtcatgggagaccatccagtgaggaggctgagagaggtgaagccagagagagatgccagaggcagctgacaaagtgcttcagagtgccttgtttaggagatagtatttaatctcaggcatgaaggactactgaaggcattttaagtaggggaatgatgtgatcagatcggaacaatctagattatttgttttcacattaaatttggtgcatattttgaattngtgtgcataatgaactgagggttaccccaaattttattctttcttacactaaattctctttcaatctgatatccccaggcttgttgagaccttggttattgatttcccatctcattcattcctgttcctgcttgaaccaggaaatagatatatatggttggtgttatctgaccnnnnnnnnnnnnnnnnnnnnnnnnnnnnnnnnnnnnnnnnnnnnnnnnnnnnnnnnnnnnnnnnnnnnnnnnnnnnnnnnnnnnnnnnnnnnnnnnnnnnnnnnnnnnnnnnnnnnnnnnnnnnnnctgcgagttagacattgccaataaaatcaccctccagccaagaatcactgaactacatttgtctgttgcagcatttgggcccaggtgcttaaggccatgtgcagttagtagaccaccctgaaaggtgtctgccctgg

SEQ ID NO: 325790 - DNA, 489 bp, Homo Sapiens
  misc_feature (452)..(452): n is a, c, g, or t
  misc_feature (457)..(457): n is a, c, g, or t
aaggtaaataaaaatgattgaaattcaaaaattaatagttacttaaaagaccttgacattttaatcaacttttttctcctaataactgaataaaaaatagaaatttaagctttagagctgtttttttaatcctgtagatatgctgtagaatgaattatctggtgtgaacttgcccatctagacataacagaagcaaacagattttagggctttcaaaagtagataaaatgcaagtgatgttaatcgggatcatattctaatattagctcccatcctgatagggaaggtctctagtttttatttctctacctggggggctcaggaattcagtctcgtgcctgggggttacccttaggttactcaaggggctgggggtgcccaatgtggatggaaccatcaggagggtttgctgccccgtttccaaatttattaggccttcccttttcgtctanggggnccccaaaggtacccccagggagagctgagtga

SEQ ID NO: 325791 - DNA, 599 bp, Homo Sapiens
  misc_feature (52)..(52): n is a, c, g, or t
tcttcttgcagcaccgagcatttgtttccaacaaaattggtggcccataccngggaaaaccattgtcctccgggaaagggtcttttgatcacctcttgtgaggagacacatcccactgccttgttgcagtggcctcatgagtaaggaatcgagacccacctggtctgatgaataaccccagactctcaacaacgtggggagaaaaagacttgcaacactatggtggccaggtaactctgtgcgcagaccaaggtaagaaatgtcgcaggagtgacaaagtacttccttggtggtcactatattctggtggttgaaagttcgtgaatggtaacaagtgctactgctgtgtggagtgaatgagtccaatctttgggtctatggttacctcatgacggcttagccttctctgaaggatcctgatgttggggtttatatagtcctcccaatgctaagcgggacttaaaatattcctaggaggaaagtggccagagtggatgaagcaaaaggagaagagtgtgaagaacctccaggaggtggggctaaaagataggcaagaaatctctaatacgagggattgagccacagaaagctccagacag

SEQ ID NO: 325792 - DNA, 619 bp, Homo Sapiens
  misc_feature (118)..(138): n is a, c, g, or t
ttgttttcttaggaagccattaaatacacacaatcgcatataagcatagtatcccacactcatttaatatattttggagatggttctacatcagggcacagagttgtaagttgtcccnnnnnnnnnnnnnnnnnnnnnctaagatagggtcttgttctgttgcccaggaacactcaaacgtgacaggcaaaatcagtaagctcagcctttctaatagacaaggcagacttgaaaaagcaagtccagccaggttgacccatctaccggctccttaaagatgtatcactcaggaacaggtgtttactggccactaaactacatttagaacaaccaactgactaaggagagctgacagtgatcgtggagaccgcagttcaaaaccccaggtttaataaatgaggatcctgaggcctgagatgcctaaatgggcaactggcccccaggtctgacctaactgagcagaatcccaggggtgggtggttgtcacctggtcaacctaacacaaattagatttcaagctagactttcctactgcaatttctatcacttaaaaattcattaaatattaggaattactttggaaactgacccttagagaactgttgtgtgctattcaagt

SEQ ID NO: 325793 - DNA, 1259 bp, Homo Sapiens
  misc_feature (557)..(557): n is a, c, g, or t
ttttaatttaggaagattttattttttggatgttgtcagaaattacagcaatatattcataaatacctaattactacattcaacaaataatattacaatacaattaattcaaacaagtacacttagaacaggtttaatttcacagcatctaaactgcccccagagtgaccgaggcaccggtgttcctccctcccacctgcgtatggggtttactgttatagaattaagcacagggtacatacaaaataacaccagttagcatggtcttcctcaggtcaaggcagagttaaggagttttttaggttaaagcactggatggaaaagttggggacaggctactgcaagtagtaagaaagtcaacagcttggttacttgaaagaatatagagattgctaagtggctaatatacactttaaagaggaacagaatcggtttggtgctgaccatctccatcttgtggtggatccctggcattttctacacttgtgtgaaacatgtggctcagggaaaggggtaggatctggtgtgaaattcagcttaacttttgagatttggcnagtattatgagctacttgaggaaaataccattctgctacaaactgcagattccctgtgttagaatccttcactgctgaaggtgtgggctccttttgatgctctctgaatactcttaagggtgcaacctatcagaatgttagtcccaattcagtgcgtttattcctttaagattagaatgtagactaaaatgtggaaagtcccgtcttggtcacttatctgagacaacagattaggaacatgatattttatcatgtcagtctgactctgactatatgaagcaaaaataacttgtttcagtgaggaaccagataatttactattggaaggtatccctctgcagagggacagatggcagctcccttccaggtaatgtaggaagatggtctaaggaccgaaccgagggctttcaggtgcatcctgacacacaggtggccataatcgactccagagcagatttgaggtactcagtgtgaagtagctgaacaaaaaacttaagagattgcatgtcaatttttaagcccaattgaaaacagatttaggtgctactgtgttctttgagaataatctgaaagtaagttttcaaagtatgaaactaatagttggatggggaaaccatgactgggtactgtgtcttgggtggtgtgctttcgtttttgagacagttcttacctttttcttagtttattcgcacgtgccgaaat

SEQ ID NO: 325794 - DNA, 391 bp, Homo Sapiens
  misc_feature (45)..(45): n is a, c, g, or t
aatgcccaggtaaaccccacagtggggactcccactgtataatangaaccatcacatgccataaatgttaagcacagatagccacatatggaaaaatttgaaatgagctaaggttaaagaagatgctaaagagcaggtaccaagaaatctcagaaagcggacctgaagtgttaaaataaagaatgtttgggcttggtaagcaatcctgggcttaaattgaatgcattttatttagtgactggaaatttttgaagttcaaaaattttttaaaaacagttatgttagaatagactctgtatctgaattcttgatactaatgaccttataacaagttgggtttgatcccattcacttgagccagttggttttttgtaagtgaatttctcattaa

SEQ ID NO: 325795 - DNA, 276 bp, Homo Sapiens
aatataagcctttaaagtaaaaaaagagtttttattttgaagacaaacattagaaacataaagagggttgtagtgcctgccttacttgtatcacagatcttattgtacacattttgtatccgaagcagttgctccaaacttcgttcaacatcagggaatttatatcggagaaaaactacaaatgtaatacatttcaaaaatttttcaaaaactacatcttagaaaacaccaggggatgcatactaaactatatttttccacatgcagtaaatataa

SEQ ID NO: 325796 - DNA, 372 bp, Homo Sapiens
  misc_feature (331)..(331): n is a, c, g, or t
  misc_feature (338)..(338): n is a, c, g, or t
gaatgcagaaagaattctcaacagagaagatacaactcatatagaaaaacactttttggtcttgtaaaaatacactaatataaatgacaaaccttgtgttcatctccattcctagacttatcatggtatagtacaattatttggtgtgtgatcattagacaatgatgtacttaaagggaagtcctatctcatttaatatgccacatacccagcgcagactttaggaatataatagggctcctaataattgttaaggtaatgaatgaacaaatcatgtggatattatctattttaatgcccaaaacacagggctggaactggattaaattanataaccncccaatctgttagggcaatggggtcaaatttggg

SEQ ID NO: 325797 - DNA, 387 bp, Homo Sapiens
  misc_feature (308)..(310): n is a, c, g, or t
  misc_feature (314)..(314): n is a, c, g, or t
  misc_feature (317)..(317): n is a, c, g, or t
  misc_feature (324)..(324): n is a, c, g, or t
  misc_feature (337)..(337): n is a, c, g, or t
  misc_feature (342)..(342): n is a, c, g, or t
  misc_feature (346)..(346): n is a, c, g, or t
  misc_feature (359)..(359): n is a, c, g, or t
ttttacaataggccagtagaattcttatgagaacagcttttaagcacttcaatggagtgtcatttttttggtagcttccagaaggtgccaaacaggtttcaacatcatattaattagaaatacccataataattataacaataataaaaaggtataatatggtacataaatatggaagagcagtttgtaatatgaatacattttctctagacgagatcacagttttattttgtaaatattacatttaagtatatatatacacacatatatgtacaactatatatacaggggcatatatatggtaaaannnatanttntatatgnggggccttgtctngggtngggnatcccgccgggcnggggttttggtttttggggggcccccgg

SEQ ID NO: 325798 - DNA, 484 bp, Homo Sapiens
  misc_feature (20)..(20): n is a, c, g, or t
  misc_feature (89)..(89): n is a, c, g, or t
  misc_feature (145)..(238): n is a, c, g, or t
gtcccattaaaggaggatanggccattctgagtgcaaccaaatgggggcttcttaaactacacaccagccagtcagtggggaaaacttngaaccaattattgagttgctttcttgggtctctataatcaataacctgtctgcagnnnnnnnnnnnnnnnnnnnnnnnnnnnnnnnnnnnnnnnnnnnnnnnnnnnnnnnnnnnnnnnnnnnnnnnnnnnnnnnnnnnnnnnnnnnnnncttaaatgtaatatttacaaaataaaactgtgatctcgtctagagaaaatgtattcatattacaaactgctcttccatatttatgtaccatattatacctttttattattgttataattattatgggtatttctaattaatatgatgttgaaacctgtttggcaccttctggaagctaccaaaaaaatgacactccattgaagtgcttaaaagctgttctcataagaattctactggcctattgta

SEQ ID NO: 325799 - DNA, 691 bp, Homo Sapiens
  misc_feature (253)..(346): n is a, c, g, or t
  misc_feature (600)..(600): n is a, c, g, or t
  misc_feature (605)..(605): n is a, c, g, or t
  misc_feature (657)..(657): n is a, c, g, or t
  misc_feature (664)..(664): n is a, c, g, or t
cttttttacaataggccagtagaattcttatgagaacagcttttaagcacttcaatggagtgtcatttttttggtagcttccagaaggtgccaaacaggtttcaacatcatattaattagaaatacccataataattataacaataataaaaaggtataatatggtacataaatatggaagagcagtttgtaatatgaatacattttctctagacgagatcacagttttattttgtaaatattacatttaagnnnnnnnnnnnnnnnnnnnnnnnnnnnnnnnnnnnnnnnnnnnnnnnnnnnnnnnnnnnnnnnnnnnnnnnnnnnnnnnnnnnnnnnnnnnnnnctgcagacaggttattgattatagagacccaagaaagcaactcaataattggttcaaagttttcctcactgactggctggtgtgtagtttaagaagcccccatttgtttggcactcagaatgccttatcttcttttaatggaacacttgatgtgggaattttaagtctgagaagtgaggtgccttctgaaggagaggattttagagactcccttcctctataagttgggaaatgacccgaaggcttaaggtagncgacngttaggctgactttgaccattgtagggccgtaatcagcttttaacccaattntaggacngggtaaggggtaggtccaatttgccca

SEQ ID NO: 325800 - DNA, 445 bp, Homo Sapiens
ttggtgtcctcttcaatttcttgcatcagtgttttatagttttcattatagagacctttcatttatttgggtaattcctaggtgctttattttatgtgtggcttccaaatgggatacttttttatttctttttcacattgttcactgttgacaaatagaaatgctactgattttgggtacgttaattttgtatcctgcaggcttcactggaatttaccagttctaataattttcttgtgggagtctttagggtttttccaaatataaaattacaccatctggtaaacaacggataatttggacttcttcctttccaatctgggataccctttatatccttgtcttggtctgactgctctagctagggacttctaggtactgcattggaataacagtgggtgacagtgggggcatccttggtcatattccaggatcttgggaggca

SEQ ID NO: 325801 - DNA, 327 bp, Homo Sapiens
  misc_feature (192)..(235): n is a, c, g, or t
attttttttgtatatcatagaacctttattatttatcctctaaattcttagaaacttacataacgcccgtgctctagttatgacaccatttatagacatttaaaatgcatcttcatttataaatattttacatttggtccatagaacagataattttactaaataatactggattttttaaaacaggctctnnnnnnnnnnnnnnnnnnnnnnnnnnnnnnnnnnnnnnnnnnnngagatagatttacttggtgttctgagaataaatccttattgcaaaaaagcatatatgataatacaatatctttttccccccgggcaaatact

SEQ ID NO: 325802 - DNA, 442 bp, Homo Sapiens
ttttagagaagctcaggtgtcatttttattctgtggttttaaaatgaaataatcttggttagtcacttacaactttgacgactttaaccacctgatgaaacctaccagtttctgcagcctcaggtctccataagggtcttcttaaattggctcctctcatttcaccaccagcttttggggcccaaggtcctaaggttgtgttcttgaagccaaattcccacattaatccatgttaaccacatgtggttaaacccctgtttaccatatacagatctatcagggcttgggtgctacagagatgaggaagacaggccagggctcccgggggcttagagcttgggggtgagagtgggggtggcagacgttaacaaaatctcccatggcagtgtgatcagcattggcactgcgctgctgtcaccaaggttgatggcctcggattccc

SEQ ID NO: 325803 - DNA, 466 bp, Homo Sapiens
  misc_feature (195)..(195): n is a, c, g, or t
  misc_feature (285)..(411): n is a, c, g, or t
gagatgaggaaggcagatgagactttgaagatgctgggaaaagaaatgtaactaaaggtcaagatccacaaagaggcacgtctaactgttttttggagagatggaatatcaaggtcgtggttaacagtggggtcgtgacacacgcttcaggaggcaacgcagtgacgtgtaatgagtagagccagccggccagcnctgggttcaaatccgtagctctgccacttttagctgtgtgtctttgggcaaattactctcactctctggatttcagtttcatcatctatnnnnnnnnnnnnnnnnnnnnnnnnnnnnnnnnnnnnnnnnnnnnnnnnnnnnnnnnnnnnnnnnnnnnnnnnnnnnnnnnnnnnnnnnnnnnnnnnnnnnnnnnnnnnnnnnnnnnnnnnnnnnnnnactatttggtaaaataaaatatgcataacaatggtgtctgtcttatgaagttttg

SEQ ID NO: 325804 - DNA, 401 bp, Homo Sapiens
  misc_feature (50)..(50): n is a, c, g, or t
  misc_feature (273)..(273): n is a, c, g, or t
tttgccaagaggagacagcattctttaatcatgctggacggcagggcgtnggcggggtcaggcaggggcaggatcaggcagggtggtttatagcacaggtcttcctggcacttggtcagaccctgtttccgtcatctggccatggagccacggctccctcggctgtgagcaccagagatcaccccccggggacacctcagccccacgagtctgcatgagcaccaatgggcggaggcgccttccctctggggagaacgggcaggccacctgggntttgggaggctagggggacaccagggccaccccaccctggaagaagaaacggaaggcctgaggtccctcctttgctctagctccccagacctgctgagggctctaaagcctggggttccgtggccctt

SEQ ID NO: 325805 - DNA, 298 bp, Homo Sapiens
ggtcttaagaggtgctgccacttaggaaggttgcgttgtgcttgcttccctgaatgctagaaaagctcgcctttctgtcatgctgaactgtaacgccaatgaaaacctcagagtgtctgccaatgtttaaatgaccaaattgaaggtatcagggccactttcaggggttcctatgtttcctcctacctaattaggatttgccaggctcccctcttccttcatcctattacttaatacatctgcgccctgctactgtcttgttctgttctaaaggtaaaccctcagtagggcttactca

SEQ ID NO: 325806 - DNA, 427 bp, Homo Sapiens
  misc_feature (130)..(141): n is a, c, g, or t
  misc_feature (350)..(350): n is a, c, g, or t
  misc_feature (364)..(364): n is a, c, g, or t
tttttttatgtgaaaaccccttacaaaaggcagtttattgacaaataaatgctttatacattcaggtttttcccatctctcaatagtgatggtttccaaagaagaaactcagtagtgaagaatacatacnnnnnnnnnnnngcattagtttgatcagttgaaaatcagaaccttcaaagcatcttgtgaatgagagaaatggaactggacctgggcaaggcatggggatggtagagatccatatgaataaatgatttagctgttgatgtggacagcaagagagttggtgggaaatgttacagcagacctgaccacgctacaaagggtctgtgaaggaacacagtacaggntatcaaaacaccanaacaaaactaaactaaaaacaaggaacaaactgcaacttttgcccaaactgttaaacagggtt

SEQ ID NO: 325807 - DNA, 355 bp, Homo Sapiens
ttttttcaatggctcttgatttttattatttttcacatgggcagcagaagatggagttgtcccatccttgctccccttgcattgaatgtgccttgggtcttaaaaccccggagtgtcattggagccccctcctcttgctcctagtgtaggagggacaaggaggaaagcactgtgagtatgtgtgttggaggggaggggtcccagctccctgagccaggctcagcacccctcagcagctccctgaggccctctctctgtgagacttttgacagacagcaggacagaaacatatagcagagaaagacataggcagactaggagacaggctacacacacacacagagaagctggcccc

SEQ ID NO: 325808 - DNA, 735 bp, Homo Sapiens
  misc_feature (479)..(491): n is a, c, g, or t
  misc_feature (691)..(691): n is a, c, g, or t
ccagttacatcactcataatcacattgctgctcccacagaaaggtctctagccagttttagcgggcttttcctgactttgcaaacaccattgattagaattagattgaaaatcaaggccagcagttttctgagaaaaacataaagggcttctttgaaaaagtggggagaagagcttttgttgtcagaaaacttgaggtgtttgggacacatggaaattctttggtttgaaggccctcatcagtgtcacctttgcagattgttcttatcaaagtgattcaggagaaggccaagtatgcatttagattaatgatgcagggtttgttggcttggccacccaagcaaggtctgcaccagaggtgattcatctccccagcttactgttctaaagagaaatacatttctgtgtacacctgaaaaattggcagcccatccttagaagatttcattcataaattctttgcttttcatgtatctgttnnnnnnnnnnnnnttcttttaccaactattcgaaagtaatgcagaattgtgggaaccaaattcagtgtgaatctctgaatttgctataacagtagtaatattgtgatagcagcttccaactatggaccatctagtatgttctaaacacagtataagatgctttcatttcaaaataccagttccaacaaatctttggcaaacatttcagtttanctcaggccaggcgcggtgctcatgcctgtaatccgctcatgcct

SEQ ID NO: 325809 - DNA, 497 bp, Homo Sapiens
  misc_feature (51)..(169): n is a, c, g, or t
  misc_feature (210)..(210): n is a, c, g, or t
  misc_feature (341)..(357): n is a, c, g, or t
  misc_feature (435)..(435): n is a, c, g, or t
  misc_feature (482)..(482): n is a, c, g, or t
ttttcattcaattcgcctcattcatttattcattcattttgaagacaagannnnnnnnnnnnnnnnnnnnnnnnnnnnnnnnnnnnnnnnnnnnnnnnnnnnnnnnnnnnnnnnnnnnnnnnnnnnnnnnnnnnnnnnnnnnnnnnnnnnnnnnnnnnnnnnnnnnnnngtgtgaggtggcaagatcataactctctgcagccttgaacncctgggctcaaatgatcctcctgtctcagcgtcctgagtagttgggactacaggtatgctccaccatgcctggctaacctattttagttttacatatacaaatctctgcacatttcattgtgacagcactnnnnnnnnnnnnnnnnnttcttttgtgtttttctgtattaatgtttaattttacataacctgttgtgcattctcagtttgtgcacctcttttggnactatttgagtctcctgatgtacttgatttatcctgatggggtaatnccaataagtggaatt

SEQ ID NO: 325810 - DNA, 141 bp, Homo Sapiens
aaataaaataagacacaagataacaagtattggtgaggatatggagaaaaaggaaccccctgtacactgttggtgagaatgtcaatcagtacaacccattatggagaacagtatggagtttccctcaaaaagtttaaaata

SEQ ID NO: 325811 - DNA, 292 bp, Homo Sapiens
  misc_feature (135)..(135): n is a, c, g, or t
gaaaaccaatctaaggccctgaacccgttgtgttgcctgtgcggtcacttttcctaggtttttgtaagaggaaagaaatcccctggaattttttgaggactatcctcccctactgaaataagtgtggctgtctgnccctgggatgggcttgtgttcatgcacagagagggtaaaggactgacgtggaggctcatggtggcctctacgcatcctgtctttctcctttggtgaaagcaaatggaaacagctcaggaatcttactagggtcaggtgcggtggctcacaccttgtc

SEQ ID NO: 325812 - DNA, 339 bp, Homo Sapiens
  misc_feature (131)..(253): n is a, c, g, or t
tgtgaggctaccacgcctgggccagggttgcctattttttgttgagtgagctttcaaggaaatctgtccattaaacttaaaagtttactgggcataaaatcgttaatattctattatctattttttagcannnnnnnnnnnnnnnnnnnnnnnnnnnnnnnnnnnnnnnnnnnnnnnnnnnnnnnnnnnnnnnnnnnnnnnnnnnnnnnnnnnnnnnnnnnnnnnnnnnnnnnnnnnnnnnnnnnnnnnnnnntcttttaatgttttctattttaattttctgcttcttcatagttgtgcttttgtctatttccttccttctattactttcattataat

SEQ ID NO: 325813 - DNA, 572 bp, Homo Sapiens
tttttttaattcacattgagtatcactcatcccctgcatggaggcttctacagaggctctatgagatgccagcccgttctggccagcagagatgaagcggtggataaaagaggccaagttcttcccataccagggggcagagagtgcacccgagacctaaggaatgagcgagcaacagctgagcggggcagagagaggaggacagcagctctgggtggggcggggcggggcaggtggggagggacggctgtgttcggggagggacggctgtgctcccggagggccgtggcctgggcctggcgagtccagacgacagagctgtggcaggttctgcttggcttctgcctgaaagtgctcctttttctctccacccccttgcctctgaggaaggcacaacttcatggaaaggacacctaatgactttcaggatcagcctttcacgtcatttttacacagagcaaaggacttgctcagtgacctccctccattccctgcagggctgcgcgtgtggaccgcagtgagagaaagcggggctgtattcgctccacactgctcgggccgagtccagcctg

SEQ ID NO: 325814 - DNA, 585 bp, Homo Sapiens
ataatagtgtgtaactttaataatttctagcagcaaaacacctgaaatagccaataacaaatgttttcattggattgtacattcatttctttgtgagaaataattttaaaaagtactctaaagtattgttcaactgcaggcaaacatgaaagatatcaaagatcttgcttttctccatctttcccaatggaatcaggtgcaactggaaccttattagtttcaacaaaaacagattcaaaggcagcttcctgttcatccaaagaatcagcaaccgtggctcctttagttagtgttgggttggtaaaagattgttgctgcttggaaactttacttgattccaccgttttcctaccttttcttttgccaagaattttgacataattcgcaggtataagtcctgttgtttggccatcaaggctagccagaagccaaccacgcactttgggttgttgttctttgagagctaagttcagcatatcaccagcccggaaagaaatttcttcttcagatacggcagcaaaatcatattctgctctggcaactacatggtcatcctcaccacttgcccagttgatgctgtctgtt

SEQ ID NO: 325815 - DNA, 459 bp, Homo Sapiens
  misc_feature (17)..(17): n is a, c, g, or t
  misc_feature (31)..(31): n is a, c, g, or t
  misc_feature (46)..(46): n is a, c, g, or t
  misc_feature (56)..(56): n is a, c, g, or t
  misc_feature (94)..(94): n is a, c, g, or t
  misc_feature (136)..(136): n is a, c, g, or t
  misc_feature (270)..(270): n is a, c, g, or t
  misc_feature (305)..(305): n is a, c, g, or t
cctacacagaaagcganaaaaggccgaaaanccacagtaaattaanaatgccgtantccatgtagtgaagatttaagtccattaacccaacccnggtctttgtgaatgtgtgaaagcccttccccttcagttatgntccccatttttatgaatgcccaaaagcctggccactgtgtggtattccgaggattattgcaacaaagcccagtagttaaaccaaactacagtctcagcctgtcattctctagaacacatcccaggtgtcggagnctaaggtgttcagctcggctgtgactatacagaanccaggacctggcgttcttccgcaccggtagcagttgtggatgtcagtgtgcataagcaagtatctgacctcagaatgtttgagttattttgtcttagatatctgtttttaaatggataatgtatttgtcctttaaacctcagttttgcaatata

SEQ ID NO: 325816 - DNA, 385 bp, Homo Sapiens
ttttaggttctcaataaatgtttattccttttcctttctgctgcatttcaagaggttttgaaacaatggaaaagagcagaggtagttagcttgatgaaggggagagcatggtggaaaggatgttccaggttaggtgaggtgtctgcttgatggaaggagccagtaacgagggtgacttggagctttcaattccctgagaatgaatgctgtgttgataaggactgtagcagggttgaggaagtacccttggaaagaagaaagaggagcacacctctgccatcagcaaaaaggccagaggaggtgagagctatgtgggaggggagagaaagggaatctggcctgtgcttaactgacgtgagagccagactttgaactccagtggctt

SEQ ID NO: 325817 - DNA, 405 bp, Homo Sapiens
ttaacagaaaaggaaaaagtttattgaaaactatatacagttggtccagctcctaccatgggctgcaatctcagccagtccctcccacaccttaggcagtgtcttggcccctcatggggagggatggggctaggcctagggccagactcccttgggtggcttggcagctggagcccaccgtggatctttgtaaatttacaactctaaatggcctgaaggtagtgggcaggggacagggaatggatccctgcctgatctagtcacagccttgataggggaacactattctgaaacttgggcccaagtagggccgacttaagttgtccggaagtcctgactgctcctctcacaggccttcctagacgtggaggcaaacagcctccctacgaccccaccccatgtagc

SEQ ID NO: 325818 - DNA, 756 bp, Homo Sapiens
  misc_feature (296)..(296): n is a, c, g, or t
  misc_feature (303)..(303): n is a, c, g, or t
tgaacagaaaaggaaaaagtttattgaaaactatatacagttggtccagctcctaccatgggctgcaatctcagccagtccctcccacaccttaggcagtgtcttggcccctcatggggagggatggggctaggcctagggcccagactcccttgggtggcttggcagctggagcccaccgtggatctttgtaaatttacaactctaaatggcctgaaggtagtgggcaggggacagggaatggatccctgcctgatctagtcacagccttgataggggaaaccacctttaaattnttttttncccttttgaaacttgggcccaagtagggcccagctaagttgtccggaagtcctgactgctcctctcacaggccttcctagacgtggaggcaaacagcctccctacgaccccaccccatgtcagcaggccgcatgggcttcatgggcttgactggggacacccaggtacccttcctcccaacattgactcagggtccggagctcctggagaactccccaagcagaggacttggggttgaaggggtgagcgttggggaggtcacagctcccagcccagaactggagcctcctggggtcagggcagccgtggggtcagggtgtcccgctgtaggaatagtctgctttattgtgcatcaccagccggtcatccacgaagtagaagctgtcagactgggtctcatacgggtggcggatcatcttgctgatcagctcctcggagagaggggggaagtcg

SEQ ID NO: 325819 - DNA, 196 bp, Homo Sapiens
taaaatgtataagcatatcattttattttcatttaagccaactatgctgtaagtattttagacaagatgattcacattttatacttaaatacaaatttcagaacataaagtatattttctgtttttcaaatccatattttatctgaaatacatttcctgcaacaaaacattattagaagagttaaattatttattt

SEQ ID NO: 325820 - DNA, 499 bp, Homo Sapiens
  misc_feature (296)..(296): n is a, c, g, or t
  misc_feature (355)..(355): n is a, c, g, or t
  misc_feature (369)..(369): n is a, c, g, or t
  misc_feature (420)..(420): n is a, c, g, or t
tgccttttttaaaatatagaactttattttggttactgaggtttttgttactgttggttcacagaaaagtcatttcttagaaaatagtaacggcagcattttttacagcgactcacattggggccaccaaacaagtgcaaaggacagtgccagggatagaagaggccagtactcttgtgcccagtgttctcagggagaacccagtgctcctggctccctctaccccctcccatcccacccaacagagcagcacctagggccaatagaaccagccacgcagccaagtgcacgacagntgcccccagcaggctgggtgaaggccccacagggaaaggccgagtggggagggggattnttcaggttgagctnggcccttgcatccagccctttttcctcagggcagtgggggttttgaccttnacctggggtttttgggattttgggcatatttcacagtacggtttcagttaaagtccttttgggagcttggctttccttt

SEQ ID NO: 325821 - DNA, 734 bp, Homo Sapiens
  misc_feature (83)..(83): n is a, c, g, or t
  misc_feature (87)..(127): n is a, c, g, or t
  misc_feature (129)..(436): n is a, c, g, or t
  misc_feature (713)..(713): n is a, c, g, or t
aggcacttgagtactttttgcgactttatgtactcatcctgccaccttgtatgcttgtatgttaggcattcagaatctggtanctannnnnnnnnnnnnnnnnnnnnnnnnnnnnnnnnnnnnnnnnannnnnnnnnnnnnnnnnnnnnnnnnnnnnnnnnnnnnnnnnnnnnnnnnnnnnnnnnnnnnnnnnnnnnnnnnnnnnnnnnnnnnnnnnnnnnnnnnnnnnnnnnnnnnnnnnnnnnnnnnnnnnnnnnnnnnnnnnnnnnnnnnnnnnnnnnnnnnnnnnnnnnnnnnnnnnnnnnnnnnnnnnnnnnnnnnnnnnnnnnnnnnnnnnnnnnnnnnnnnnnnnnnnnnnnnnnnnnnnnnnnnnnnnnnnnnnnnnnnnnnnnnnnnnnnnnnnnnnnnnnnnnnnnnnnnnnnnnnnnnnnnnnnncctttcctcaatattttttggaagtcaggttgtcagcccattgtctcctactaggaaagaaaaaagttaagaaaagatcctggtggcaaggaagccagagcaaagaggaggagggatagacagggtgaggaggtggtggtgggacagggaggaggcagggcaaagaggaggagacacagtgccaaaggggcgctggggaaatctggggaatcctgggagagctccaagggtcaagagggcagcgttggggaaagcccacctcctcctgacaggcctnccttggggtgcagagcagaga

SEQ ID NO: 325822 - DNA, 680 bp, Homo Sapiens
  misc_feature (12)..(12): n is a, c, g, or t
  misc_feature (41)..(41): n is a, c, g, or t
  misc_feature (161)..(250): n is a, c, g, or t
ggttgggctcancatgttcaagccttagcactattttcttnctagttttaacccttttctagaaaaataggctcagtctgcctactgagaggtgaagccatctggacttcctgggtcgagtggggacttggagaacttttctgtcttacaagaggattatnnnnnnnnnnnnnnnnnnnnnnnnnnnnnnnnnnnnnnnnnnnnnnnnnnnnnnnnnnnnnnnnnnnnnnnnnnnnnnnnnnnnnnnnnnaaaacacaccaatcactaggatcctaaaagtagctaagggcagggaggattgaaaaaagggcactctgataggacaaaaacagaacatgggaggggacaaataagggaaataaaagctggccaccccagccagcagcaagcaacctgccttgggtccccttcccacgctgtgaaagctttgttcttttgctcttcacaataaaccttgctactgctcactctttgggtccgtgccatctttaagagctgtaccactcactgccaaggtccacggtcttgaagtcagcgagaccatgaacccaccgaaggaaccaactccagacacactactataagccactgtccttcctatcataaaaccactttccctgggcacacagagaatccttgcccttccggtactgtgtcactatgtggagctggtgcttgc

SEQ ID NO: 325823 - DNA, 950 bp, Homo Sapiens
  misc_feature (926)..(926): n is a, c, g, or t
ctgatatttgctaaactactgttttgattgtcctgtactttaaatttccattcaataaattattgctacataatattaatactgtaaagatctaatattaaaatagaattaattggtaaggactcctttaaactactcccttctcctcataccaaatcaggatagctttaaatagccatgagttggcaataatgactttcctttgttccttttattgcaagttaattgagcctgtcagaacatctctgctaaacaaacatacttctggaccagtgattcacagtcttggcttcaaattagaattacctgggaagtttgaagactcccagagctgacacagcacccccagaataattagaatctcaaggtgagacccaggaatcgggatttttcaaaagttctccgggtgatctaaatgtgcaactactactgagaactactggtgtggagtttaagtgtgaaagatgaaagatttttgctttcccatttctgataaataaatctaaggtaaagtttcggcactggctacgggaaatatgtttaagactttatgatattaaaggactagctagaaacgtcctagggcaaaaagcaaaaagttgctgcccatctctttaatattggtcctttcacatcaacatggatggcacgtctgtgttaagaggaagatagaactggtacgatgttggaactttgaaagagagtctccttctgacaccatgtgattcctatgacaagacagactctttcattaataaaatctcctaagatgctgccaaccaaatgactgccttgagattcttctgccagcctaatgattcccgagcctaggaatccctgctatgggtgctggtagttgtgaagctggcactaatgggtctcctaggtattacagaaagcaacagcacctagcagaattgcctagncctcgtgccgaattacttggggcg

SEQ ID NO: 325824 - DNA, 606 bp, Homo Sapiens
ttttttttcccctttattgttttggagacaggggtctcgatacattgcccaggctgacctcacacttccaacttcaatcctcctgcctcaacctcccaagtagctagaagattgatttttaagccacacactgtgcttgtttaatgaaccaactacatctccaggtgagcgtattcaaggtcatggaactggttcctggggccgttatgttataactgatgcacatgagggtttctcttacactcattttgacatttaatgctcataatattgggtgcctctattaaaacacagacggtgcacatcccatttaaacccagttcaataataatcattgtttgccacatgcaagttggaaactaagaggaacagaaaactgaccagaagacctaatgctcgtcttatgaagacgctctttgcttcgcttcttaccttcaccagaaggtcctttgcttccttctccagccaccgtgggtaaaagggattgtccatgcggatggagtggaagagctcctcctcatcctgcccgtggaaaggcgactgaccaatcagcatttcataaaggagaaccccgaaggaccaccagtccacagagtggttgtattt

SEQ ID NO: 325825 - DNA, 359 bp, Homo Sapiens
  misc_feature (259)..(259): n is a, c, g, or t
  misc_feature (295)..(295): n is a, c, g, or t
  misc_feature (322)..(322): n is a, c, g, or t
tgtgctcccgcatccaggcagtctggtttattattcacacagaagtacatctgatattgctgaccagaggagagttgagattccgtatgaagtctatttgttcaattacctgaatcctctgagacgccccagttgcccagtattcacagtggttgtggtcgggctcagcgtttacttcacaatccagactcctggggctttgtctctgacatgtgaatgaatgatctcctctgccatgggcttagggggagccaggggncttgtcagctgggtcttcatcagagcttgaggcttnccctcgagggtgggggttcttgtcttnaatgcatcttgagtttttgctttatttctctgtaact

SEQ ID NO: 325826 - DNA, 566 bp, Homo Sapiens
  misc_feature (129)..(188): n is a, c, g, or t
  misc_feature (482)..(482): n is a, c, g, or t
  misc_feature (506)..(506): n is a, c, g, or t
  misc_feature (516)..(516): n is a, c, g, or t
  misc_feature (528)..(528): n is a, c, g, or t
  misc_feature (541)..(541): n is a, c, g, or t
  misc_feature (547)..(547): n is a, c, g, or t
aaaaaaagtttattttccacactatttgtacagctgtaaactcaaggaatcatccaatacttgtacaaatctgggagaacagttaataagcaccttcagtggtttccacagtttaagaatttaccattnnnnnnnnnnnnnnnnnnnnnnnnnnnnnnnnnnnnnnnnnnnnnnnnnnnnnnnnnnnncatgatgaacatttgatatagagggtttaatatgaaacgataaatacaaaaagtgagactaatttatggatttgggctacgtaaaagacctacatggtcctcgaatcttgtgattcttggggctatatttgcctctcaagacaaactccaattattcaaggaagactttctttcaattcaggttccaatgtactgcagaagcaagtgaggacaaagtcaggagaaggtgggggcagagaggctgagtgtactgggggtttgagggaaaagagggagagactcttttcccccaangaggagtatcagggcaaattcttnccatgttctncaagtataagtnggtcttttgggcnaaattntacccattttctttttggg

SEQ ID NO: 325827 - DNA, 421 bp, Homo Sapiens
  misc_feature (311)..(311): n is a, c, g, or t
aaaaaaagtttattttccacactatttgtacagctgtaaactcaaggaatcatccaatacttgtacaaatctgggagaacagttaataagcaccttcagtggtttccacagtttaagaatttaccattaaaaaattttagaataaatctaataaaatgaataaaatagttataaaaatcatacaaaatcatgatgaacatttgatatacgagggtttaatatgaaacgataaatacaaaaagtgagactaatttatgggatttgggctacggtaaaagacctacatgggtcctcgaatcttgtgattcttnggggctatatttgcctctcaaggacaaactccaattattcaaggaagactttctttcaattcaggttccaatgtactgcagaagcaagtgaggacaaagtcaggagaagg

SEQ ID NO: 325828 - DNA, 479 bp, Homo Sapiens
  misc_feature (111)..(111): n is a, c, g, or t
  misc_feature (133)..(183): n is a, c, g, or t
  misc_feature (191)..(191): n is a, c, g, or t
  misc_feature (298)..(298): n is a, c, g, or t
  misc_feature (306)..(306): n is a, c, g, or t
  misc_feature (408)..(408): n is a, c, g, or t
ttttaaaaaaagtttattttccacactatttgtacagctgtaaactcaaggaatcatccaatacttgtacaaatctgggagaacagttaataagcaccttcagtggtttcncacagtttaagaatttaccatnnnnnnnnnnnnnnnnnnnnnnnnnnnnnnnnnnnnnnnnnnnnnnnnnnncatacaanatcatgatgaacatttgatatagagggtttaatatgaaacgataaatacaaaaagtgagactaatttatggatttgggctaccgtaaaagacctacatggtcctcgnatcttgtngattcttggggctatatttgcctctcaagacaaactccaattattccaaggaagactttctttcaattcaggttccaatgtactgcagaagcaagtgagggncaaagtcaggagaaggtgggggcagagagggctgagtgtactggggggtttgaggaaaagaggagagactg

SEQ ID NO: 325829 - DNA, 583 bp, Homo Sapiens
aattcagattctttttctttcaaggacgcattttatacaattttcaacatttatactttcaaacaaaatgagcaaaaaatacactgagtgctaaaaaaatcaaaacagaagtaatacaattttaatttcaatattttaaaatacagaaattggaaagaatactaaatacaactttaaacaagtcacttgtcctcccctataataatcaatgtaagctacttaaagacttacaaatttaaagtaaaacaggaaacaaattaaatactgtacactttccctgcctgcggccaaaagatggggaaatactgttatgaatcagcaaaggaaatgctcttcaagcttcagcaccccacctcccagccacaccccacggccattgtcacacagtgggcttccggactgaaaggacacacatgtcacacacattgactgcctatacaaacaagacgagacgctattccgcagacacccccaacaagaagaacagtcccctcggaccgtgggcataaaaaccagtaagaaaagtcagtcaggctagcaaaacgttactacaaaactagtaaataccagagccaacaactgt

SEQ ID NO: 325830 - DNA, 465 bp, Homo Sapiens
  misc_feature (73)..(73): n is a, c, g, or t
  misc_feature (384)..(384): n is a, c, g, or t
ttctgaagcatatttcttttgatgattgaggttatccagccaccacttgtatgcagtcatctccgttaggctnaaagggagacctatgcctcagggatgaatcagctctgggtaatgcgccaactcagaaagtacattagaaatgaaatgattagggcaatgtggaacactgtgaaagctcaatcttctacctccctcctacttgggcactggcagaggacccttctacaaaagaccagaagggtgaagggtgggccccagatcccagttaacagagtccttttctcttgtcgggactctcatttctatttctgttacccttctttccacatcctcctccagcctctgcttttcacccacttttccccaatctctggtggtcanttaatttcattaattaaactggatggatttgcatttggaaaagggaaggggaaatccgtattttggtggatccatctatct

SEQ ID NO: 325831 - DNA, 147 bp, Homo Sapiens
tttttaaactatttaattcactcctttattctgggatgtatattacagataacacaactcacaaatataccatcagacattgaaaactaaggccattctgtgagttatttttaaaacttggtgttttgcacataatgatcttaaaaa

SEQ ID NO: 325832 - DNA, 435 bp, Homo Sapiens
tattctcttcaacattaggaaggaaagaaaaagaccacacttgggggcctggtgggaaaacagaaaatgctttttctcatttcacagatgagggctctgtatgtggtggggtgagattggaacccagtctctggttggcgtggctgagtgaaggtgtaaagacatgagcctggcagggaaagggaggggaaccgtctcgttattggttgggcatggccatctgcacaggctcctgtagggcccgggtaaggtggggaatctgatcagggcagggagaagaggagtgagctgtggaagctgccttcagccacagcagacggccacgctgtccacctcggccacggctgcctgggcctctgccatgccaggcccttgaagtcgcccaactcgcctccacgctctgattggagaagaggcaactcctttccaggagtc

SEQ ID NO: 325833 - DNA, 394 bp, Homo Sapiens
  misc_feature (75)..(75): n is a, c, g, or t
gcctcaatctccagggctcaggtgatcctcccactttagcctcccaagtagctgagactacaggcgtgacaatcnatgcccagctaattttttgtcaaggcaaaagggtttcatatgtgacctaggttctgttaggcaaatggccatgtgctttcacgtgcttcaatctttatgggcaggtgcctgggtcctatggacattttaatttcagactctgggcttaaagacttggaggctacacttccaaaagaaaaagtaacataataataggtatggcacccactctgtgtagcactagctcctagaattggagggctagaaattgatctggtgtctatagcaacttatgagggacagtcatgcctaggaaaatgttccctgagtggattaaagt

SEQ ID NO: 325834 - DNA, 863 bp, Homo Sapiens
tttgtaggtgaaaccctgtcagagaggttaggcagcttgcctgcgggctggttagtaggggacttgggcctccagcttcactggaccctggaagcagagggcagcaccagtgaaacatcatggaaactttccccaggatggtgaaatgggggcaagagctgagggaacgggtgaagtggagctcagagaacttgcacccaaggtgaacagaacagcagcagttggtcagccaagcagcaggccagttgtcagccagatccgtcttgatgtggctgaaaggactgcagtttggccttccaggaaagtgggctggatggaagttgagacaaagggagttctggcagcatagcagacagcacacccatgctggcctgggaaagggactggagtagtcccatgtcaggaaggatgcaggggagcatgggatagttgtctccttgtgtgtatcagctttgagaagaagctgaaggaagcagctcacccaatggaaaaggaaagagcgggagcagagggccttggcaaagccaggtcgggaaagtcattggagcctctccctgcccccggtctgcttctctagcagagctgtccaggacagaatcctgccatcccatagtctgctgcctggagtccttcctgagtcagtgaataaaacatggtgatggacctgtcttctccaggtgaagctccacagctgcatcccaggagagatgggaaccctggacaaggttgcctgggcctgggaggggtggacagcatctcctgagctaagccccattcatgagtcaccttaccaggcctcacaataagggcgtgagggagacactgttattctctctctagttgacgaatgagcagcctgaaat

SEQ ID NO: 325835 - DNA, 376 bp, Homo Sapiens
  misc_feature (322)..(322): n is a, c, g, or t
  misc_feature (342)..(342): n is a, c, g, or t
  misc_feature (354)..(354): n is a, c, g, or t
gcacaaggctctactccatccccagagagctcccaaatgcagaaggattcaaaccccatgtgagcgtgcccacaccagccgcccctcctgagcatcagcctgttcagatgagggtacctgggcctctcgttcgcatctgtgttctcatggatgagcgctggtctttactgaccctcccaagcctccccactctgtgccttggctcatgctctttcctcctcccggcatgcccttctcccccatctccgtgtcctcgttcctcaaggtttagccgagacactgccacctccacataggttctccctggccctcttttcccctntggggcttcagtgggctttnttttggttcctnttcaggggtactgaggcacttt

SEQ ID NO: 325836 - DNA, 463 bp, Homo Sapiens
  misc_feature (426)..(426): n is a, c, g, or t
  misc_feature (433)..(433): n is a, c, g, or t
  misc_feature (438)..(438): n is a, c, g, or t
ataccttcatattgaagaatttgttatcaggaaactaccagtcctgctttacaggaagtctgttatcagatatcagatggcaagttccccatgtcttcagatgttcaaacaatattgtggatggtctagaaagagtttaagacatgctgttaaatgtagggctagataattctctgattctttgatgtagtctggaaagaaacaatccattgtccagttaataaatatttagtgttttcatttttaagacactcacaatccacaaatgtccctaggcaatttattatttttaaaggaaaatgactttttattccttgctagtgaaaaatgtacaatttatatggctggcactgaggaaaaataacaggtatactttcttcccttcctttttccatccccaaacatattataaattaatcccttggntgttccntggcntggctatcttttttaaagggttttc

SEQ ID NO: 325837 - DNA, 530 bp, Homo Sapiens
  misc_feature (482)..(482): n is a, c, g, or t
acctagaactatttcttccttttaagattcataagtaaccttttatttttacagagctacgtataacttccacattacagtcagggacctgaggtgtaacttactaagtgaaccccaaggttattttatcttgcaaaagaaacctaaaccaaactaagggccttacagtttatggttagactgaatcaaaagctataacctcaatttttccaaaaacagcttctgactgcaaaagcaagtcatacagttgttaggtatgaaatagcactgatcaggaaatgcatcttcgcagatggtatttccttcagaaaagacttttctacttttaatataaattaagccataacagtttcatgctgtgggaaagagggtgaaaaggttcattttaagagattatataatatggaacttttcacatttactgtgaaatgtctaactttgccagtgcttcagcaagtttttttggggggtgtgatgggggngggggtagtattgggttttaggaggttttccaaatctgtggaactttg

SEQ ID NO: 325838 - DNA, 246 bp, Homo Sapiens
caccctctgtcctacctcttatgctctgtacccccttcattgtgttgcatttctctacaacatttaccattccatatcctttatatattgttgtttctctgtccctagcttgagtgtaagttcagttaatgcaaggaattttccctgctttgtctgtttgctttttgtttctcctaggtgctgtttttccaatactcaggaacaggggcttggatatataatggggaggctcaggtaaatatttat

SEQ ID NO: 325839 - DNA, 454 bp, Homo Sapiens
  misc_feature (430)..(430): n is a, c, g, or t
taaagccggtgttcaagtcttgtttgtggcctaaacatctaaggtgtttagccttgtctgaggctgcggctgttttgacagttggacttcatctggggagctccctgcaattcaagcttccagggctaggctagcaaaggtttaagggtctgtttccgaagtaattactaggtcagacagtgttgacatttgccaacttagagcatacctcaagttgctatgatcactccagcgctctagttcagcatgtttacacaggttctacgcctaggaaccttaaactatggatgcacaatactttgttccgccccagttaccagggttgcgagtgtcttttaaggcgatcccggtcagtggactgcgggaggtgcagtgtcagtatgggttgaagacatttttaagaccgttcgttttaggtgattttcttaanttaatatcccaacatttcaatttt

SEQ ID NO: 325840 - DNA, 703 bp, Homo Sapiens
atgtgttgtcgttggaagttacaagtatgttaaataaactatcatttatttctaggcagacaccttggaatgcaggggcccaacatggtacatgggccgctggtccttcccaccactgctcagcccctctgcaaaattccacagcagggtcttcctagcttccgctgcaaagcaaaagtgcttgtgagcctgtattttacacccaaagttgaaacagggagttaaagttacactgccctgtgaaaagaaggagtggaaattttagaactggtgagttcccgagagaatcatgtagtgttagttcaaatcttggacattttaatagacaaagaaacttaaagatgtagacaagtgtttttccccagagttgcttgattggtgggcccctggtcatctcaagctaattacaattcaccctaaaatgcaaatccaagacttatatgtgtgtatctacagaaagatcctctttcgccttgcttctagtcctttccttccctgccctccagtcaagcaacaccatgaatggttggttctggattgacaaatgttctctgtggctctcccagtccctcccttacactcgagctactcaggtgagatccgaaatctgttttcaatttcaaatcactcacttctggtagaagcccagctttgcagtaacttgtgggttgtagggtacctcgtgccgaattacttgggccgc

SEQ ID NO: 325841 - DNA, 910 bp, Homo Sapiens
aaacaatgagatatataccccatatttatttttcctcctttatagttgtccttgcagtattgtacagtgtctctgaggccaatttttcctttgtaagtagtaagcataacttggaaattaggttctcagaaacagtgttcaaccataagtaaccactgaagacacctgtctgtgccgtcatctctctgtagttaattgggtctcctaactacagccctgtagttagttaggcttgtagttcagctatagggttgtgctgtagctttgttttgatcacatataggcaattatttatttatatatttcaaaacattgctcaattcacccatccagggattcctttttctgactgctctgtacctgtgtttacaggatacttatgtaatttatagcttagctgagcttttcgggtaatttctttgggaatgcaaataaagtactacattttaaaaatgtagtacttgtacatataatagacctggcaatcagtcaacaaatatttattgaacacttgttaataccaatccctggaaatactatattgtcttcaggagatgtcaagaattataccctggactgcggaccctgctttctaccattgagccacattcccctgggaccctaactacatttgtcagcccagctgaatgaagcagatttggaattgtcagtcccagctgttttgttggctttgattcgctacaatagaaatgccagcacctgcaatgtcttcctgacattgcaaagcaggacttcctgagggagggtagggaatggggtgtagtcagtccataggctaaaccatcatagactacttaggagttattttgtgagaaccaatatcttgactaaatggaaccaatcttgttaggtttaaataatctttctttgaattatgcttctactttaa

SEQ ID NO: 325842 - DNA, 476 bp, Homo Sapiens
  misc_feature (405)..(405): n is a, c, g, or t
  misc_feature (427)..(427): n is a, c, g, or t
  misc_feature (463)..(463): n is a, c, g, or t
atagattgtgtgcatgacagtgctttgtatacgcagacagaaggaaaaaagcggctgttattggctcaacttatttgacctttattttcatcatcatcggccactatttgatgtcaatctactatgctgtgagcaaacattaaaattaggaagccaggggtatgggaaccactgattagcatcatatgccagatgtgcttccatccaaagcacatgaacagaatgatattaaattacaagcctatcaggaacagaccagctttctgcctccctttctatgaatacccaagtcccatggaaccttgtattcatgtgggagtttttaaggtgcatgcttgggaaggttatgagggggacagcctgggggatgttcgggggaaaggaaaataaagggtaggggacatnggatgggcttttgggctcagcnattttggggcaaaatgacttttacccttttttgganccccagttttctg

SEQ ID NO: 325843 - DNA, 392 bp, Homo Sapiens
  misc_feature (295)..(295): n is a, c, g, or t
ttttttcagtctttgttaattctttattatttattgtttcggatgacacagcaggaagggaaataggaaaggctctacatcatttgtcgtatgtgctccacaatttgccctcaagtttgaatcctaggtcctaccacccacacaaaactgccattgccagcctgctcaattctacccaatctctagccattttcatactgcaaagttcctatgacctcctcccaaggagcctcaattctggtactttacctcttcctgacctccgtgggaatccaccccgccatcccaaccacantggtaattagggaatctggaattctggcaacttacccttggatggttagggtctctgtaggggggggaggcaggccctgcaggccctccctatgggg

SEQ ID NO: 325844 - DNA, 557 bp, Homo Sapiens
cagtctttgttaattctttattatttattgtttcggatgacacagcaggaagggaaataggaaaggctctacatcatttgtcgtatgtgctccacaatttgccctcaagtttgaatcctaggtcctaccacccacacaaaactgccattgccagcctgctcaattctacccaatctctagccattttcatactgcaaagttcctatgacctcctcccaaggagctcaattctgtactttacctcttcctgacctccctggaatccaccccgcctccaaccacactgtaattagaatctgaattctgcaactaccttgatgttagtctctgtaggggagcagcctgcagcctcctatggactcccattaagacaggatattccttccgtctagggggtgctgattgcaacttttttgctaagatgaaaagctggagtcgaaatgagaagagaggagttgtggcaggtattttgttttgcaatggctccagactgctcttctgtttgataaagtggctgtaactatgtgggtgggaacagtgcagttttttctttattc

SEQ ID NO: 325845 - DNA, 988 bp, Homo Sapiens
taaaaaaagggtcctatgtggaaatgagtgggacaatgataaaaataaacaaataattaaaattccaaatcaaaacataactcctggccctgagatccccagttaatcctctaagaccacaatctccacattgtgaacttgatgctggtgttcttccatctcagccacaactttctcctcagtcctcagctctgtctccaagatgactgctttgccctcagtatcttcagcttctgggtccggggctggatcaatctcaatgatggtctgcccatcctctgaggtgctttcaacagcctgaattgccgaggttaggccggactccatggccaccaattccacagggctaaccatggtggtcatgttgcccagtgtactcccatcctgcatggcagtagagctcagcagcgccaagctagatgaagggtggatggtcactgtgtctggtgagctgctcttggcagaggagaccactgtggcatagcggaagagctgagggccagaaggcagtgtgtggacagtcacaggactggagccctggctgagggtggcccactggaaatattgccccatggaaaaatgactgaacccactggggtgatggtgaatgggtgagatgactgtgaactgaggctgctggacaggaggagaagggctcaagacagtggtggaggctggccgctggagccggggcctttttggaggcttaggagtgctcacaggcatcagtaccacattttgaactgtctgagatttcagcctgtgatcctggccttgcttcttctgctcctccaactggcgttccaagtctgtcagagtatagagaaactgttcttctccctgctctacttggttccttctgttgtctaaaaccttcttgactgtgtccattaggccaaatgtgtgtgctacattgttgagaacagcagcatctgtgacttggaagggagcctggatgagccgctgctgaactcccctgagtagctcc

SEQ ID NO: 325846 - DNA, 178 bp, Homo Sapiens
ttttttttaaattttagaatattttaatgtccatttcttcagtgaatgcattttgaaattattagaattaacaatttaaaaagagcagataaaaggatatatggaaaatgcaaacagtcggttcttgctaattcaatttcagattctaggcatgatgtgattttccaaacaaccaatt

SEQ ID NO: 325847 - DNA, 565 bp, Homo Sapiens
  misc_feature (32)..(32): n is a, c, g, or t
  misc_feature (41)..(41): n is a, c, g, or t
  misc_feature (47)..(47): n is a, c, g, or t
  misc_feature (54)..(54): n is a, c, g, or t
  misc_feature (65)..(65): n is a, c, g, or t
  misc_feature (72)..(72): n is a, c, g, or t
  misc_feature (96)..(96): n is a, c, g, or t
  misc_feature (99)..(99): n is a, c, g, or t
  misc_feature (119)..(119): n is a, c, g, or t
  misc_feature (126)..(126): n is a, c, g, or t
  misc_feature (148)..(148): n is a, c, g, or t
  misc_feature (156)..(158): n is a, c, g, or t
  misc_feature (183)..(183): n is a, c, g, or t
  misc_feature (194)..(194): n is a, c, g, or t
  misc_feature (196)..(196): n is a, c, g, or t
  misc_feature (200)..(200): n is a, c, g, or t
  misc_feature (213)..(213): n is a, c, g, or t
ggggtaaaacccaaaggtggggtggaaaaggntccaaaccnggcccnaaatttnaaacccgaagncctgctnaaaaaagcaatgggggccttgggnaanaagttcccaagaaatgaagnatgtgcngtttcctaagctgctttgcgcnccttcctnnncccccaaaaaatctggctaacccancaattcccacncncggnggcacgccccccnaaagactcccttttggttcccccaggggcgggaccctgagctgtcgggtttccaggagcccttccgtgacttcaaaagtccctgggcactgttgctcatgagtgctgcacaactgtcgccctctaaagccacctccatccctcactgggctggcctcctgagcttcggtgaggaaacggggttccgagttgcccgcctgagagcttaacagtctgactagaaaagggctaattcgctttctgtgcaaatctcttgagctaattatttaatctgaaacatggacaggtaaaggaccattggcgggcgtggggagggaggtgtggaatctttcccacactttttgtcaccttaa

SEQ ID NO: 325848 - DNA, 450 bp, Homo Sapiens
  misc_feature (19)..(19): n is a, c, g, or t
  misc_feature (28)..(28): n is a, c, g, or t
  misc_feature (57)..(57): n is a, c, g, or t
ccttggcatagttccaganatggggatntgcgtttctagctgctttggggccttctncccccaaaaatctggttaccacaattccaccccgggggcacgccccccaagactccttttggtcgccccaggggcgggacctgagctgtcggtttcaggagcccttcgtgacttcaaaagtcctgggcactgttgctcatgagtgctgcacaactgtcgccctctaaagccacctccatccctcactgggctggcctcctgagccttcggtgaggaaacggggttccgagttgcccgcctgagagcttaacagtctgactagaaaagggctaattcgctttctgtgcaaatctcttgagctaattatttaatctgaaacatggacaggtaaaggaccattggcgggcgtggggagggaggtgtggaatctttcccacactttttgtcacctta

SEQ ID NO: 325849 - DNA, 488 bp, Homo Sapiens
  misc_feature (402)..(402): n is a, c, g, or t
  misc_feature (417)..(417): n is a, c, g, or t
  misc_feature (447)..(447): n is a, c, g, or t
  misc_feature (453)..(453): n is a, c, g, or t
  misc_feature (464)..(464): n is a, c, g, or t
  misc_feature (472)..(472): n is a, c, g, or t
tttaatctaagcatttcttaactgagaggggtctaaatatcactaaagcaacaggacatctttaagggaaaacagctgcaaaacagctttgcattctagagtgaaagccttagttttagcctatggtatattttgttcccttttaagaccacagtggtagtttttttccaaagagaactaataaacatattaagctatatgggtaatttttctaacacccacattggtttcggtcagaaggaattttactgggaacctgggaggtatcccattcttcataataataaaaaaggaaatgtaggtgtataaaagctccggggttacattactaaggcaacggacatttccggggggtggaatatacttccctgtattcccgcaagctggcttcaagggaccatnttcggcgggcccttntgtggctttttcaaccaaaactggcggttnttcccnctggaagggtncccggganttcagggctttttgac

SEQ ID NO: 325850 - DNA, 500 bp, Homo Sapiens
ttttttaaaaataaccatgaaatatataatatacatactgaaagtacatttttctccaaaaaacctacttctcattaagtcatagagtgctaacactcatgtaatcccagtgtcttagaatgttcggcttatttggctcacggttttgcaggctgtacaagaagcatggtagcagtatctgcttccagtgagggcttcaggctgctcacggtggaaggcagacaggagatgacatatgcagagatcacatggcgagagaaaggagagaggaggtgccagtctcttaatgaactcactccttacagaatacgaagccactcatgagaaatccactcccacaacccttcccaccaggcctcacctccaacactggggatgaaattttaacatgagacttggtagggtcagacaaaccaaactcaagccatagcaccctacttaggaacagaacatcaacagcactccagaagcacctattacctcccaagcactactctctg

SEQ ID NO: 325851 - DNA, 476 bp, Homo Sapiens
  misc_feature (29)..(29): n is a, c, g, or t
  misc_feature (38)..(38): n is a, c, g, or t
  misc_feature (448)..(448): n is a, c, g, or t
  misc_feature (461)..(461): n is a, c, g, or t
agaagtgaatggttttaaaggctgtaatnctatgttgnaaattggtttgttttgccttttattgaaaaggtaagatcatgtgattggaagaacacaactgttggcttgggaagaggactttgctgctgaagtgttttctaccttctgagtgtgtttaaggcaggatttggagggaaggaccagcttagggagagtgtctgagccacagcgtcaggatgggggaaaccacatgggatccatcaagttccagttgaacaggagcaagatcagaacttaggagggcagtgtcagctcccttgttggctgtcaaggaacaccgatctagtagaaacccacttggttgtgacccaggtagaggtagatgccatacatttgagatatgcgtccttaaggaacctgacaagcagactgaagggatggtaagtgtgacagcctgataagttttctnaaagcccaggatncagagccagtgtttt

SEQ ID NO: 325852 - DNA, 458 bp, Homo Sapiens
gatctttttttacttaattctttggaggtaacaatattttggagtcttaagaatttgattttataccaataagaaataaaaattagggatctttcctgtagtatatagttttactattttaaagagatctctgaattttacaagagaaccaacattccttaatggcagaactttgaaagttgatttgggaggctttttgctgcaggatctcaaaaatagagagagagatgattcctacttaaatgtttttaattttcctaacttcccatcaggttgatacttaagctctattttgtaaagagtaaatcatcctttagtatgctgcataagatgatcagcattcttgcactttctcagtaataagacgtgccgggcaattggctccccaggacgcattgtgtttttaacctaacgagaggactttggggcaggtgattaaatttatataggtttttcaa

SEQ ID NO: 325853 - DNA, 437 bp, Homo Sapiens
  misc_feature (50)..(50): n is a, c, g, or t
  misc_feature (104)..(104): n is a, c, g, or t
  misc_feature (121)..(121): n is a, c, g, or t
  misc_feature (152)..(152): n is a, c, g, or t
  misc_feature (183)..(183): n is a, c, g, or t
cccgtttaaaatccagaagggcttggtcccaagtgggtcccctggaaaanagtggtctgcaacactgtaaatttaaccaaatgtgtaatttcccagtaaggganaaaggttcgggctgaanatgggtttgggctgtgtcccctaccccaaantctcatccttgaattaatagctccccataantccccacattgtgggagggaccccagtgggaggtaattggatcatgggggtgggtttcccccatactgtactcatggtagtgagtctcatgatatctgatggttttataaagggcatttcccctgcacatgttctcttgcctgctgccatgtaagatgtgcttttgctcttcctttgcctttcaccatgattgtgaggcctccctaaccatgtggaactatgagtccattaaacctctttttcttttattaatt

SEQ ID NO: 325854 - DNA, 623 bp, Homo Sapiens
  misc_feature (541)..(541): n is a, c, g, or t
  misc_feature (584)..(584): n is a, c, g, or t
  misc_feature (592)..(592): n is a, c, g, or t
  misc_feature (611)..(611): n is a, c, g, or t
ttttcggtagggatgagtctcactgtgctgcctaggatcgtcttgagcttctggcctcaagcaatcctcccaccacagcctcccaaactgctgggtttacaggaatgacccatggcctccttccttcaatgatgctgatttcttcggttcagaaattatgtatcacaatctacatgggcctgcataacctttatacataaaaatgcttgtgaactgaaaggtaaaaactagaaataaaatctactacaactataatgtagacaacctataaatttcttataatgagacttgctttataactaacttgtcaccttgttttgactaaacaaagatagtggataaatttgctaccatggcctatctctctcaaaaccaaactgacacttccattttaaggagctaagtatctctaaagataattaataaaagcaccgtcaaaaaggttaaataatagtggcctgcttgcttttcagagctaatttcatccaaatgaaggcatttataggattaccaaaggtgaaagaagctgaaatactaatcnactggtatgcattggttggtatggttaaatgtaagaaattttnacttaccngactacttataatggggcncgtgccgattcc

SEQ ID NO: 325855 - DNA, 388 bp, Homo Sapiens
  misc_feature (329)..(329): n is a, c, g, or t
agtctcaccaaagaccagctgactttcttgggtgttttcaaagaatgaattttgggctttgtggatttgttttataaaagagtgacagggatttggtttcccacttgactatcttgggctgccttgatcttttcttttatcctatgaagatataaaacccaatgttcaataattatcaagtacttatttttgaattccctacctgttcatcccctgacctgaggaatttcttacctttttgccaaggatataaatggcaattttattggactatccttcaattgtttctgtggaaaggttaccttccccaggcatcaaggtctggtcanggtttaggggggccacatttttaccccttcaattcaaaacctctttacttccccagggg

SEQ ID NO: 325856 - DNA, 738 bp, Homo Sapiens
  misc_feature (719)..(719): n is a, c, g, or t
aaggtggagttaggaatttccttttctccatgtgaagggctagagttgactggagctgcatttttcccattccccagttaggtttggttctaagagaaataatttctcctgagggcaggccttgttaagaacagaataccttggtgtatttcaaaatgtttcacttctcccttctccagctgacagcgtaagaggatttttctcaaatatttactgtgaggacctggtagagctccaggaagtaaatctcacaaaactacgggggcttccttaggactggctctccctggagcttttaggtctcagacttgtccacactgagcctccagcaactcctcaattacagctcagattttcctacccgggtactggttccctcaggggtttctgatcctcggtttctgcttcagtagttgtgattctctgtatccagctgtctgtctctccagttttggaggatgtggtttgcccctgtgacttcacttatctgaggaatcctaagaagtgttgtctattccttcattttgttcagttatttatttgttgtcaggaccaagtggcaattactgagctccttacatgctacactggaaattggaagtcttcagagattacttcttaatagtttttaagagtgctttgtatatgaagatatatacccaaaaatcagacaaaaaaccctctgtcaggttttacaaattttttcctagtttgtcatnctgtcttttaatcttgttt

SEQ ID NO: 325857 - DNA, 602 bp, Homo Sapiens
  misc_feature (589)..(589): n is a, c, g, or t
cacgaggctggtagttttgaatggatggatggatggatgaccttctaactggatagctgccattgactcccacttggcctccttcttgcctcttcctgggtgtgcctctgctgtacctgggctagtactcagcgagtattcagcatggtgattcctccgaaacatctgtttgccctgacagttccttgcagagaagcacctcatatgactcttgactgccccaccggtcccctttttcaggccttaactgaatgtccttcattttttgactatggccaccatgttgctccctcttttctctgttcttccctctgcagccccctccagacaagaacactatgtccttgtgtggcccaagcatattgtctgtcctggcatttacactttaaaggcatctcttctcagtagactccaagttgtgtgagggcaggagcccgtatcctctcttgttccccttcatgcccccaactttaccttagcacctggcttcataaccatctactgatagatgaatgaagccatttaattgtatgggtagaaccacacaaaatatgttggaagcaagtctcacttctctggaattaaatgnttctttggcacta

SEQ ID NO: 325858 - DNA, 477 bp, Homo Sapiens
gggcccttacaaataatactgccacagatattcttacagctcctgtgaatgtgtgcaggaatttttctagaagatatacttagaaggggaaaaaatgcaaattatagggaatgcaaattcataagaaaatgccaacttgttttccaaaagtggtcataccactatgattatccatttcattctctctgctcatccatttcctcccttgtactgtaaaactttgagtgatcagtttaaaggattgttgcaatacttactttgaaaaccaaatgagttaacatatgtaaggatgcttagcataaggacctgacacatacatgctaaaaagtactagttctttctataataaataccttctcccttccctggcattctcttttgccgtggattcactaatgtttacatgctagttgggcttaggccctgttttcacatgggagtttcaggttaccattggttccatatttttgggggggc

SEQ ID NO: 325859 - DNA, 485 bp, Homo Sapiens
  misc_feature (12)..(12): n is a, c, g, or t
ggtaaattgtgnacagccctgaataagttttcctcaaaagccccaggaataacagagcccagtgttttcctgtaaactggagacctcagttaggcccaacttcgaaattcccagagcaacgtaggaagtctattcaagcagaaactcgaacattgttcagtgtgtaattgctgtgcagggtgcctgccccagggtagtcctagaaatcagtgagaattcccatttgtcctcagagattcaaacccagctcccttagcaactgcagtttcccatccaaccagacgagggcgccgagctgacagtcttgctgctggcaatagtgatagccgctgtgaaagcacagtagatgctcgtccacttgtcgaggagaatgctgaattcttaccacttttgcaccactgtttaatctcttggtccttcagtttccacacctaggaagctggaacagcagcagcatccagcgccaggactggagtcctcgtgcc

SEQ ID NO: 325860 - DNA, 822 bp, Homo Sapiens
  misc_feature (23)..(23): n is a, c, g, or t
  misc_feature (55)..(55): n is a, c, g, or t
gtttaaaaaaaatctaatttaanttctaaatcttcaaagctaaacctattcttancagatatttcttccagtaatgggctgattttacaggaagtttttatgcagaggtcactccccctgcactattcaagggttataaaaatttagttacctggaatttgtgctaactatgccacaaaagatgaaatgctgtttggaggcaatgataatttaggttcaagaagaaatagcaacttgaacattaaaagtatctgcactttccacaagatgggtcagtcattaaacaaaccgacccattgtttagaatctcaaatcatcctattactcttgttacttctgaaagcaataaatgaacatgttcctcaaacaaaatttcttaaacaaattaaatgatttatattttttttaaatgcacaccacatctgcatcaaagagcaaaagaaagacatcttgcagtaaagaactacttgaggaagaataaaaagcagaagtacaaagtgcgtaaaatgagcgtagtttaagattttggaagaaaagacattcctaatatcagagagttttccccacaacccagaaacatctgaagttatcacttggtaccccagtgtttctcattttcccgtgctcgaagctttggcaggtgtcaagatattggcaacatcacttaagggcggtattgagatctctgctcttggatgtactcatagagagggctggagcgcactgggacactggcaaactgatgagtgccgggctccagaagccgcccatggcccttcccttcttgggattttatactccccgagcttggcggtgcctctg

SEQ ID NO: 325861 - DNA, 402 bp, Homo Sapiens
gtgtacactaattttggattggtctgattatgtttaggaatttttctacatgttcaggattgagacaggcctaagcttttcttttcctgtattaacttgtaaagttttgatataaagttatgtgaaccttattaaatatgttgttgagtgattgttccctctcttttatatttccaaattgtgtctgtaagattgaaattatttgctccttgtatatttgccaaaagttaccaatataaatctctgggcttgaaatttgtaggaaaaatttttattactgcctcatttttctcaggttttctttttcatatttagctggctttgctaagttcaatttttcctggcatttggtcatttagtctaaattttcaaatgtgctggcaaagatatctttatatcttt

SEQ ID NO: 325862 - DNA, 450 bp, Homo Sapiens
  misc_feature (23)..(23): n is a, c, g, or t
acagggcccttaaaaattacctnggctttttcccaaatggcttcctatttatagaatccccaaagacctcccacttggcttaagtataccctatcaccttacatttttgtggttttgagaaagtacagcagtagactggggcgtcacctcccaggccgtttctcatactacaggatatttactattactccccaggatcagcagaagattgcgtagctctcaaatgtgtgttcctgcttttcctaatggatattttaaattcattcaacaagcaccctagtaagtgcctgctgtatccctacattacacagttcatcctttatcaagcttagtgagcagtgagcactgaaacattattttttaatgtttaaaaagtttctaatattaaagtcagaatattaatacaattaatattaatattaactacagaaaagacaaacagtagagaac

SEQ ID NO: 325863 - DNA, 474 bp, Homo Sapiens
  misc_feature (336)..(336): n is a, c, g, or t
ttactgacttatgattttaattttgtttgctttaaaaaaaacacatgcataggaaagaatgcttcctttcatttcaattaaaaacaacaaattgcttttttttaagcaaaaattcattgagggggggctcgcattgtacaaagaaaatcagacccaccgggatcggctgtgatcaaagagacagtaacaagggtagggaggtggagatgcgaatccaaacacacaacttgtgcaaaggtcaagtggccacagccgccacggaaaacaggctggcggttcctccgacgttcaacacacagtcgccacgggacacagtggttccacccccagggtgtngcagcaatagacatcacagcccacgtccgcacgcagactcggacacgcgtgctcacagcccacgtccgcacgcagacttcaggcacgcgtgcttcacagcccacgttccgcatgcagactcgggacacgcgttgctca

SEQ ID NO: 325864 - DNA, 668 bp, Homo Sapiens
  misc_feature (402)..(402): n is a, c, g, or t
aggatgtttcctggaatgttaattccagattttactttctgatttttttacgtatttaaaattttgtttctttaaaaatagctttattgatgtataattcaagcaccgtacaattcacccattttgaaatgtacaattcagtggtttttagtatatttgcagagttgtgcaacaattgccacagccaattttagaacattttcatctccctaaaacgacactcgcgccctgtaatcctccagtttccggcctgcagcctctcctggggcggcagacacgggtccccgttctgtcgccggctgtgcctctcttgggcatttcgtgtcagtggaagcgtctggcccatggcctctgtgtgcgtggcctgttggtttggcaccacattgtggatgctgtggtgtnggggccagggttcaggcgtccttcctctccagggctgagcaccgttctgctgttgctccctcagcagccgaggcccacctgccttgtttccactgtctggctgtcatgactgaggctgtgagcacgcatgtctgagtctgcgtgcgaacgtgggctgtgagcacgcgtgtccgagtctgcatgcggacgtgggctgtgagcacgcgtgtccgagtctgcatgcggacgtgggctgtgagcacgcgtgtctgagtctgcgtgcggac

SEQ ID NO: 325865 - DNA, 466 bp, Homo Sapiens
  misc_feature (14)..(14): n is a, c, g, or t
  misc_feature (21)..(21): n is a, c, g, or t
  misc_feature (78)..(78): n is a, c, g, or t
  misc_feature (96)..(96): n is a, c, g, or t
  misc_feature (115)..(115): n is a, c, g, or t
cctggccagttttncaaccancagggttcctaagtgccgcttaccatatgctggattatccaattcccccaatttaanaaagcttaccctttgggnttctatcacctgaaaaccnaggggaagaaaacaaatcaaatctcttgggtaggggcagcccggtacatctacccaggtgtctcaaactcaaggccaaactagtggatatagtcaggagacttaagagccacagggccttttctcattccctaaactgggtaggaattatgaagaaaacggccctcccagtcctcaggagctccatcacgatgccccagaaggcctgcttcatttaacgctcactttaaagatcttcagagccctagatggtgccaagcggggagactgcagcatggagatgagattttcccagatttcctgatgagtctgaggagggagtcctagttcctatagctccagtaacaaaatt

SEQ ID NO: 325866 - DNA, 862 bp, Homo Sapiens
  misc_feature (579)..(579): n is a, c, g, or t
  misc_feature (585)..(585): n is a, c, g, or t
  misc_feature (591)..(591): n is a, c, g, or t
  misc_feature (597)..(597): n is a, c, g, or t
  misc_feature (604)..(604): n is a, c, g, or t
  misc_feature (640)..(640): n is a, c, g, or t
aattttgttactggagctataggaactaggactccctcctcagactcatcaggaaatctgggaaaatctcatctccatgctgcagtctccccgcttggcaccatctagggctctgaagatctttaaagtgagcgttaaatgaagcaggccttctggggcatcgtgatggagctcctgaggactgggagggccgttttcttcataattcctacccagtttagggaatgagaaaaggccctgtggctcttaagtctcctgactatatccactagtttggccttgagtttgagacacctggtagatgtacctggctgccctaccaagagatttgatttgtttcttcccgtggtttcaggtgatagaacccaaaggtaagctttttaattggagaattgaataatcagcatatgtaagcgcactagaaccctgtgttgaaaactgcccaggtgtgggtataagaaaaggccgagagatcaccacctcctcttaccctaccccacacccataaaccagacatgtctcccaggaagcaggtgtccctggagacagaggatgacagggctctacaatctgtgtaantattantattantattantttgtanttatggggcccaagaaaggggccaggagagggtacnaccccagctggggagagcaaagcagatggatccagttttctgtgtgttcttacctctgtacttcctcgtagctctgctgacaaagcaagcaggcctcccgtgtccaagaccccattcctcccacttgtgtacacctaggctggcaaatcttggacctctgggctctgaaaactagacaatgatcattaaacctggcttgagtctctgttctggcacaaaaat

SEQ ID NO: 325867 - DNA, 400 bp, Homo Sapiens
cccaaggatcacgctttgcctgctttaaccatcttgcctaccattgccctgatgaaaataggccactgttttgaattagctaaaagttgagaactcagacttggatttgacaagggccctctgagggcagttaaaccaactctcagccccatgattctatgagtctgtgattcgcaggtggagccaatgacacacctttgggactagcaaggcctcttggtcagcgaattccctcaggggaataatgctccttcacaggagaatggcagatggaaaaaccccaaaaagtgaatatgcccaggactgctcaattgaatttacaatagttccagattattgactagctcatgcctgtcagcagagccagaatggacacatactttgaagagtatgatggcag

SEQ ID NO: 325868 - DNA, 452 bp, Homo Sapiens
  misc_feature (210)..(210): n is a, c, g, or t
  misc_feature (242)..(242): n is a, c, g, or t
  misc_feature (248)..(248): n is a, c, g, or t
  misc_feature (262)..(262): n is a, c, g, or t
  misc_feature (287)..(287): n is a, c, g, or t
ttccacatcatcggaacattttattcctcaggacgctacacgctcactttcctggcggcagggtcagtgcatcgagttctgtttccgtggaaaatgtgcaccttggaaaccgcatgacagccccctcggcagggtccccgcggatccgccgggacgcaggcacagcagcaagttcctccagcacgaagctggcctgcccgggcccaggtntgagggactgttctgctcccagcagcgcccgntgacgnttccctctgcggtntcggcgcaaggtcttgtccctgggncgccctcggagccgtgcccagcctggggatgcatatgcggtggttaaggatacagttaaagggtcaatcacgcgttttcacgacagagacgcacggggcctttacaacgacttcttggttggacagcaattaatgggttgatattatttaaaggctttcgaactt

SEQ ID NO: 325869 - DNA, 483 bp, Homo Sapiens
ccttttctaaatcaatacaatttctcaaatttatttttttcttaaagaagtacttctaatctctgtcaaaagggaggtgaggaaaggtccttcctcccttgtaaacactgaaatacagatctgggaaaccaggatcaacacacacaaaaagtgcattttacaaaatatcaactaaaatatattttacatggattatgcttccattgaaattctaccagctgcattttcaggttcgaaaaaatatttccacatctaagagatttcaaaagcatttaagttcggggcagccaagaccctacctccttgggaggagggccttgatctcctttcctgctaggtgaggctgggctcctttggcagcaagggcccagaatggagcaggctccaaggctgggctcttcagagcccccactggccactctggccaacctcatttactggccccatcctcccagacagacaccttcctccaaacagcttatt

SEQ ID NO: 325870 - DNA, 562 bp, Homo Sapiens
gaagcaacacattttattttgtttcaagtccacacagcaaggaaagtggggctaccgaggtggcgcagattggaacaaagagaaaactgtggtctctgattaagacatggagtctgcaaacaggggccaaaaaccttgccctctctgtaacacgagatcaatctatgctggctggagggatgttaaagtgcttggtggagactggtcccttcagtgtgctaaacatggccctgatagcttctccacacaggtaattcaccagtaaaacccatccctcacagaggagagccttggcccaagtctggaccaatgaccaggtcttcttaagtgcccatctctgggctgtaatcctagacccaggacatggctaaacctctctctccttgcccagggaaatgtgaggctggggcctcccatagagaccagtggtttgtccaggctccagtacagatggctgtaaaacagagtcccagcttcccactcactcaacataaaaccagtgctgggtttccagtgaaaagaagtcccaaagggcagttccttctatcttttgtgacaggat

SEQ ID NO: 325871 - DNA, 1510 bp, Homo Sapiens
  misc_feature (270)..(300): n is a, c, g, or t
  misc_feature (1469)..(1469): n is a, c, g, or t
actttctgagaagtttttattgcctcgaaatgtcagatcttacaaatagaaaacacaaattatgtttttaaaataaagcaataggtttggtaaacattttgttaataccttttgaagggtttatgagtaaacatctttctctttatcaaaaagtaaagcacaccctcacctctcttccacactgactcactacttctgccgaaaacgtggacttctttcttctattacatacagcatgttccttgcatccattgcttgaatctgtacaannnnnnnnnnnnnnnnnnnnnnnnnnnnnnnaacctggctcctctcaggcagtggcccaagcaccacagtattgcagccagcacaggctgccctgatatgctgaggccagggcagtggctggagcaagacagcacagtggtcacgatcacagttgcccaatgcataggaaaaattaccaaaacctcatttttaggagatattaccaaagcccatgagtacagccaaacagcaggctagataggaaagatcagcttgagttggtttaaagggaatccctttaagtttagaatatctgataaagattatcgctcaaagcaggtgaggagaggggttggtggtgcaaatactgtccccagcagaggtgagataagcttttaattctaacaggctcaattcccatttcaaggggcacctttccttctaccccttccctcttatctctcagaagcacctttggattttccagagtagaatgaatcaagattagttttcagcaaaggttagagtaagttgacggggattaccctgccttggaataaaacaagcacttgggctgatggctgagattcccaatgcaacatcaagataaaggcatcagaggtgactgtgacacacagaagtccctggggaagtacttctgtaaaaaagaaccttcccattcccaactcaagctaccagagttcccaaatatgtgctttcacaaatatactcagaaggtagcccccagcatgatcacacctaggtaggtagccctcctgagtcggtatctctgtcatggccacaacaaagtcttttgtcaagtttattatggttggtttgctcagctcttaggaaagagggtttggagacagacccgttaggcaggaaaatttaggcccacaagtcccggtggagctgttctgatggagttgttctaatggtgcttcctctcctgcagaacttgagcaatcagtccgatgacccaggagatgaccccggcagagcagcttgccacttattagaactgggcttcatgagaggctcttaggacactggaaatttcaagttaatatcctgaataggctttcttcctgtgaaaattttgcaggcattgtccacgatggatggaggaaaagagggaaggcaagagaccaagctaggattgactccaatattctctgccaccctgtcccaacaccaactcccataacctaaaaggngggtggaggtgggaatcaaatttgcatttggtgataggtgc

SEQ ID NO: 325872 - DNA, 338 bp, Homo Sapiens
agcgattatatatcctgtgcatctgatgaacctgtctgcccaggggtcccctgagggcaggcagagagctcccctgtctcaatttcattccccttcccttccttggagagttagcccaccttctcaaatagaatcgctcgtattaaaccagaggtgaagaactaggcctttcatagcccttcaaccttcttgctccacctcccagctccttgtctggcctgagtgcagcatgatgttggtcccttatcatagcctagactcctgccagacagctggagaacaaagtgaaggaaagtacatttgaaaaacagtaagcaattgggtgtggtggctcacac

SEQ ID NO: 325873 - DNA, 199 bp, Homo Sapiens
ggttatctgacaaactgggaagtttgcataaagcatatctgctacaaactgaagtatcatggctgtcatgaggaaaagcttgtgtagttatttgaactgcatgaactacaagtggaaccagtcattgttttcatgacaccactcttttttctcttttacgttaggaaacgactacgtgtggttatgtgaacttgactat

SEQ ID NO: 325874 - DNA, 565 bp, Homo Sapiens
  misc_feature (73)..(81): n is a, c, g, or t
ttaattaagaaagcaatggcatactggataccaacagcaaatagcaaagaaatggttgtgtgggtgtgtgtgnnnnnnnnnaagggaaaaaaatgaggataaagggaagagaaagtgatgttactaaccctccatgtaatgataatctccaaatagctcttcccagcagttccatacttaagggtcaggatctccattcagggatctttctgtggtgctctaaaggggcagactgaggactttaagggctatcactttcaggtggctttctaagcagcagaattcgtgggatgaggaggacatgcttgttctttacagattcactgaagtgaatctgggggctgatcgatgataacactgtgttgatcccagagatgacaaaggggctgagtgtgagataatggagttcctgaaacccctacgatgaatatgtcccccccttcccttttcatcagctgctagtccctatctcatccttctcctgtccccaacccccattattcctaaatctgagctcaggcttgccagcacctctaggagtaaatcacaagactgagaccagagc

SEQ ID NO: 325875 - DNA, 302 bp, Homo Sapiens
  misc_feature (104)..(104): n is a, c, g, or t
  misc_feature (135)..(135): n is a, c, g, or t
  misc_feature (231)..(231): n is a, c, g, or t
  misc_feature (242)..(242): n is a, c, g, or t
  misc_feature (248)..(248): n is a, c, g, or t
  misc_feature (254)..(254): n is a, c, g, or t
  misc_feature (264)..(264): n is a, c, g, or t
ttcaatttgttaaatgaaattgtattttgcccacggtgctttctgtttgatccctggggacagaggggagcaagggaggggagtggcagggggaggcccaggtntggggctggagggggtactggcggcacgggnaggcagtaggcttgggcaggggaggattgcgctgccctcaggaggcaaaggtgccccagcctgggcaggccctggaccagcccaagctgagcagcnccgcccctggnttggcntctcanaacttggggntaaacgtggaacccgccacgttcgttttggcacttcaa

SEQ ID NO: 325876 - DNA, 478 bp, Homo Sapiens
  misc_feature (393)..(393): n is a, c, g, or t
accccagaacttaaagtataatttaaaaaaactattttaagacagttttggatttacagaaaagttataaaaacaatacagagaggtcccatatacgctctccctgcttctcctaatgtaaatgtggacagaccacagcatgttcctcagaactgggaagtggacattggtacagcctggacttacttgggtttcaccagctgtcccactaatgtccttttctgtccgaggattctacattgcatttagtcgtcatgtctgctgagtttcctccggccaaagacgatttcccagggtttccttgcctttcaagacctcgacacttttaagtaggagtggtgggctattttgccaaatgtccctggaacttggggattgggctggtcattttcnttgtgattaggactgagggttctggggtttggggggaaggacccaccaagagggaggcagcctgctcatgacgccatatcgaagg

SEQ ID NO: 325877 - DNA, 387 bp, Homo Sapiens
  misc_feature (43)..(98): n is a, c, g, or t
  misc_feature (327)..(327): n is a, c, g, or t
  misc_feature (356)..(356): n is a, c, g, or t
  misc_feature (365)..(365): n is a, c, g, or t
  misc_feature (374)..(374): n is a, c, g, or t
ttgtagagatgagttttttctttgttgcccagggtggtctcannnnnnnnnnnnnnnnnnnnnnnnnnnnnnnnnnnnnnnnnnnnnnnnnnnnnnnngtgcgagccaccgtgtgtagccaaacatcacttttaaaattaaaataaaattaaaattcagtttttcagtcacactagccacatttcaagtgcaccatggccatctgtggctaccctagtggagggcacaattctctgctgtccctaatcatgatacaaatttgggcgtggggctttcggtccagggcataaactaaaaagcaaacaccattcccaagtgtttggggangacacacactgggggaaaatgatgggagnctcttgagngcaggaagnagtttttttgatt

SEQ ID NO: 325878 - DNA, 658 bp, Homo Sapiens
  misc_feature (597)..(614): n is a, c, g, or t
ttcatgacaaaaacttagtaagaatgactttttaaaaagtgtttttaatactctgtcatccctgcatgctgctattaaacctacgggtgccccactttctagcctactgggcaaaagtagctttcaagagaggaccccaagagagatgactgatgttcaaatacaaatgaaacccaagttcatgaaaagcttttggtcccggggcaggctctgagcattcagcaacattccttgcttgaaattgccatcatgccacacgggaacagtcccactttgacgatcccgtttcttctcccacgcccgcctgggtcccataactggaatgtgagtgggtagaaacaagacagtcctcaaaagcttcctatattattttcagacgatgttggggatttaaggacagggccagctatgggaaggcagcaaaccatagttgagttgtttggtaaccagtgggataacctagtatcttagacgtaactagttggaagcagtgttttgcccaccctgcatacaaaggggcacattatggattgcctccctctcatcagaacacatttcccacagcgaacaccaaagaatactgcatttagcaattcnnnnnnnnnnnnnnnnnnaaagacagagtctcgcactgtcacccgggcctggccgtgccgaa

SEQ ID NO: 325879 - DNA, 466 bp, Homo Sapiens
  misc_feature (403)..(403): n is a, c, g, or t
  misc_feature (421)..(421): n is a, c, g, or t
cctagtttagatttctttattcaaatgtcacactcaaaaaattccccaccccactttgccaagacctgacatttgctctcctgtcttccctaactgcaatagtgtggcgtttgctgccagtatgtttcaaaaatgaattttaaatcgcaaagtagcgccttgattttttttccttaaaattataccaagactataaatggcttataaagaagataactatagaggaagggcccccagccaggcagggccacactcaactgctctccttcttcatcctcagcagatgcaagacaggacagaggagactgggtattaagttgctgtgccagggggtttgcacacacatcactggcatcccagcggttaaaacaaccctatggatgggtcatccatcaaccttatncctcatttaattttttanggtttttaaggttaaggaaattaagcctccagggggtttcaggca

SEQ ID NO: 325880 - DNA, 411 bp, Homo Sapiens
gtgtatattggccatgattattattggcttcttggtaatgaaagcatcaaatactaagggcagcttttagtatattatttctgatcttgtgtgatcagaaataccacatttttgagaatgtattattttccaaagaattaaatgactctcagaggggaatggataaacccacagaggttctggaaatggagcagtttcctgtaagtatcatgacttccaattaagcccctttgtctgttttatccctgtcacttgtactcactgtgtagatcatgagctaattttgcttggactctcccctcccgccatctcttagagcccagcagtgctatgcatgcatgggttaaaaatttcaaactgtccaaatgaattgcatttattggcaatttaatgctgaaactcaaagaggga

SEQ ID NO: 325881 - DNA, 575 bp, Homo Sapiens
  misc_feature (50)..(50): n is a, c, g, or t
  misc_feature (55)..(55): n is a, c, g, or t
  misc_feature (62)..(62): n is a, c, g, or t
  misc_feature (90)..(90): n is a, c, g, or t
  misc_feature (340)..(340): n is a, c, g, or t
  misc_feature (445)..(445): n is a, c, g, or t
cagaactcgtgaactgtgataagcaatgaacggaattaactgttgaagangcacntcataancctccccagagaaacgggatggaggganacccagggtgctcttgctctctttgcctgcgctgccatttccttccagcctgggtttctagctctttggggagattccccgttttgtggaatgctttctgtgtttccctacttctggatgcctaaggagtgggccaagtcatactccctggctgaccactgcccaggcaccgtggttttccctcactgaactcaaggagtcaccctctgtggggaggccacactcacagctcccaggcctgccattttanccttggggcttggctgtaaagttgcccaagaggattacaggagctgccagccaagtttaatttggccaccttagagaactgcagcaaggccctatcagcttcccnattagacaaacaactgcatttaaattaaataaagtttgcacctctagggagtgctgacctgaaaataagaaccttctgtctgtgattatagagtacacttgcttttattaattgctgattcttagtttac

SEQ ID NO: 325882 - DNA, 404 bp, Homo Sapiens
  misc_feature (317)..(317): n is a, c, g, or t
  misc_feature (367)..(367): n is a, c, g, or t
  misc_feature (376)..(376): n is a, c, g, or t
gggttatgaatattttaaacgcttttgacatttacttgcccattactttctaagagaattgcacccatttgtaccttttcaggcttccagattgcctttctagactcagatcattgtgccttttatgtagttcataatcttccactcacctttacttcttacatggctcactgtcatattacttactttaacttttgccgatggcttttcaccgtaattgagtacttccaggggactaacatgttgtcaggggtgggttttcaagtttctgttgaaacagagaaaaatgggtctcagttttcctgcacgcagattcnctggaacttgggtaaagtatttgggacaccccgggccagtggctgttttnccttggccnggggttttaaagcgagccggggcagtgc

SEQ ID NO: 325883 - DNA, 450 bp, Homo Sapiens
  misc_feature (144)..(144): n is a, c, g, or t
agggaggagagtaggggttggagcagcctcccctctgcgtgggaacccggcctgtgtaagcagtagcgggacagggtggccggagtgatgcctttggggccttgcggggaggagtggaagaagtggattgggcatggcatggcntgtggcttgcatggcacatggccagcccagccttggcttagaagtctggccggtccttcttcagcttcttatagtcagtggaaactgcaaggaacttgtattggtcattggggctcaggcggttccagggctccgggttgttctttctgtcccagcagacgtcggggctgcgaagggcgagtcgcagcaagtaaagcgcagcgctgcccatgcccaggcagattaagccgatcatcgggatgatccccggatgtcttttgatctgccggtagaagcgggccccaagactgctcctgccatatcgtt

SEQ ID NO: 325884 - DNA, 440 bp, Homo Sapiens
  misc_feature (28)..(28): n is a, c, g, or t
cctttccctggggtaaccaaaattgtcnttgaagacccataggggtgcctaagaggacacactttttccaaagtaccctgtggtttggttttaagaaagagccctgacccatttttaaatagcttggatcctacattccttctttcctattaacaatttccttcatttaaagccctgaaaggaaagaatacccattaatcctgaaactgtggcactacaaatgaaacaaaatgcgagacctttaagagaccaaatttaaagtaaagagatgaatactagtttaatttaaacatcagatatttgatcccctcatcttctccttggttagcccattgactattcaaaataattaaatcagatacctataggcaagctttcctatgcgctggatgagaaaaacttagaattacatcagctttaccaattattggtaccaaacc

SEQ ID NO: 325885 - DNA, 381 bp, Homo Sapiens
  misc_feature (16)..(16): n is a, c, g, or t
  misc_feature (35)..(35): n is a, c, g, or t
aaatgccgtcgccctnctaaggggtggctgcccantgaacccagacaggtgccgtgggttcccacagtggttttctggtaaagaagaaggtaagcatggcatctcccgccatgcccgtgaaagtggtaccactcccccattcacatggttgtcacatagaggaggaccttgagactcatccaactggtggtcagtgttcctcccagggctcattcaggctgatgtaagcagaacaaggatctagggccacgggtgacacggaggtgcctgtgatgaagaggcaggtgagaagcaggaatggaggcatccttctggaccaactgccagaaacactggaaaatcctcttaatactggtgttcctttgtccccttctctttcaa

SEQ ID NO: 325886 - DNA, 362 bp, Homo Sapiens
  misc_feature (14)..(14): n is a, c, g, or t
  misc_feature (22)..(22): n is a, c, g, or t
  misc_feature (352)..(352): n is a, c, g, or t
aaaggggaaaactnaggaaggnatggcaggaaaaagcctctgcctaggcttctcatcaaccccatgcctcccactgcactgcaccaagcaggaaaaagagctttggcttcagaatcaagggggacagacttgaatcctgtctgcactactcattcactgtgtgacctaaagcaagttgctctacctttctgaattgtatcaataattccttatcttcagactgagaatactaaaacctaattcacaggattgtggccaggatcatggaagccttccttttccctgttctgaaccttcctttcttggcctcatattgaagggtctttggtgtctgcattttccagcccccccncctttaacct

SEQ ID NO: 325887 - DNA, 664 bp, Homo Sapiens
gccactggaatcccacagactggggtggacagctattcttatgaaaagtgtggctccatttctggactaaacaggcgtactggcgctgaagataaggatcccaaactccaagtcaggcctatctgcaagcaaagtctcagcctcgctcacctcttcccttcttccatcagtcattagtcctgtgtgagaaagcaggggtgcattgttaccatatgacatggcaaaaagggattacctgctaatgccatttggtttagtgatgccttgttacataaactactctggaggagttcaaatatccctcaggcgaacgcttccatccccaggttggtaacactatagctgagtattgttttatttgccatttttcaaaagagggagaaacatacccaagccattatccagcctaccaataatacatttcaagaaaacaaccgcaactcccaatcctttcttctgagggcaggatgttgtaggggtattgttccttctcaggccactcttcaacctacagaaactggtctgggctacagtcagattacagggggtatcaggaggcctttgagagtcaggaagaaagtcttacagacagaagcccagctctagcaaagagggaaagatcactgcctttgaagctggatacatatgtggcctttaatttgag

SEQ ID NO: 325888 - DNA, 742 bp, Homo Sapiens
tggttttggactgtggtttccagtctgacccaggaggagttggctcggctacttcagttcacaacaggctcctctcagctaccacctggaggctttgcgccctctgtccctcatttcagattattgccgctccgacccatagcacgctgcctactgcacacacatgttttaaccagctgtgcctccctacatatgactcctatgaagaggtgcacaggatgctgcagctggccatcagcgagggttgcgagggctttggcatgctctgaccactctcctgtcatccaagttggctcccatgctctctggagcttctgggcgcaagttacagacatcataaccactgatcctaacacacataaccatcagccagaagatgccgcatgctcccctgtgtctggaggattttgtcacctacaagccttgtctttacctcacctgctccctgcccatatctaccacaggccactttggcatgaaattcaatatagaaaatttggaaataagaaaaagaacaagggaaataggcaggccagagagaatgagtactcaagacacctggcccaaacattcatgaagaagacaccaagtcagaagagacttcctcctttgcatgatcctctctttccatatgctaggagctttagtatttattgtctcattcacaacaaccctgcaagctagcagctgtggatactccgaacagaccagtgaggcagagcagcaaaagcagcctggaact

SEQ ID NO: 325889 - DNA, 1058 bp, Homo Sapiens
  misc_feature (45)..(45): n is a, c, g, or t
  misc_feature (82)..(82): n is a, c, g, or t
  misc_feature (326)..(326): n is a, c, g, or t
  misc_feature (340)..(340): n is a, c, g, or t
atataatttgtcatgaaacaaacagttttcattttgacataattnctgacaactcagtgacataaatatatccatgtgagcncctattttgtttgacatgctcacttacctcacatcagttctgccgatagatttggtaagtggtgcttttagtttccttaatgcacccctcaggatttcatgcaaatgaaattattatgacaaatttttctatagccatttctaacacagggaactcataaagaaatcaaatgtctgcacttcactgtgaaaacactaaactctcaggccataatggggactccacacattatcagaaaccccangggcataccaaaanggacaaggtcaacgggggacagtctttggaaggggaggtcataaatgttgaatctggcaaatcataaatttcttgtcttaacattgccgcatttactatcatctcatttgaaagctgatgtgtttgggttgggtgatggcagaggggtgggagttgggggatgctggctctgaaatgccagagaggcattaagaactctggaaagcatctggctactggtagacattttacacagatagcaatttctgaccaatccatttcaatgatttctaacccatactcaactatccagaggatactgttttaagaacattattgtaaactgatactctctattcatttacaaaattcattcattgcatactttttgtttaatagcttggattcagtgttacagatttgattgacccaagtgaaaaaatactgacactaatcatttttaagtgctatttcagaagaatatgcgcaatgtttctaagttattgtgactttgtgactgtcgtagctttaaattataatactaatatcctactctgagaaatgtgtaagacacaggtctaacaaacaactacattaacctcgggcaacaaccatcatggagctgctgtaacacaggcatggtggtggcgtgcatcggtacttacacacaccaaggatgtgaactgacatcccgcctttccaaaaacaaacatttaactcaactgtttcttgcaataaa

SEQ ID NO: 325890 - DNA, 179 bp, Homo Sapiens
  misc_feature (108)..(108): n is a, c, g, or t
cagaactttctaagggcttgcactagggcagcactttgcttcaatctgctgtggatacccaacatacccatctgtgtcgccagattttgagtcttcacttgcttaatncattcctcagtttcttatttgtgttcaatgtagttttaccttcttggcctgttaggatggtgttgggggac

SEQ ID NO: 325891 - DNA, 696 bp, Homo Sapiens
ggtggagatggggtctcgctctgttgccccagctggaatgcagtgacatgatcacagctcactatagactcaatctccaggggctcaagtcatcctcccacctcagcttctaacttggcctctccagagcctattctatccagcaaccaggctgaaccaactgaaacttcagatcattgcatcggtctgctaaaaactccactaaggctttccatcatgccccagccgagtccatgtccttagtgtggctcctaagggcctatgtgatctggagaccctgctacctccccaaatctaactcttgccaccttggcctcactggtggtccttataagtggcaaacacaatcctgtctcagagcctttgcgctcactgttcccactgcctagaatactcttctctccgataaccatatagctcactcacttcattatatcttttcattttctactgaaatgtattcttatcaacaaagccctctccgaccacattacatgaaactgtaagtcccctgcaccacccaccctgtcactcccaatcccttttacccttatttttttccaaagcacttttcaccatctaaaaagctacatatttatcgcgtctccagcctgtaaaaacagaagctctgtgtgggcagcaatttctttgttcacagctttagccccaggatttagaacactacatagctcatta

SEQ ID NO: 325892 - DNA, 1006 bp, Homo Sapiens
  misc_feature (835)..(844): n is a, c, g, or t
  misc_feature (912)..(912): n is a, c, g, or t
  misc_feature (937)..(937): n is a, c, g, or t
  misc_feature (952)..(952): n is a, c, g, or t
aaacatgacttctttgcttcattagaatgtagaaattagttgtttccctaaaaccttctgaaggaggcagtcagctacttttcccttacagagttaattttcttcagctgctaaactccatgacactcgtgatgagtcctcaaatcttagtaaaattgggtacaaagaatcaggaaatatatatagtaagtaacaattgtaccaaaaattataatgggccatggaattgcttcatattgaaattataaataatctgtaatgctattaatactagaataatggtagcgcttctcatcttcagggtgcctcgtgagattaaccatggtggttatgctggtgacgtgtttacataaaacctgtgctttctgaatgtgtgttgcagtcttaacattcttgaaatctttgcagaccagttctcaagatgggataggaaagctggactctaggttaccaagtgaaatcggcccgactcctcctgtgttgagactagtcatctactgttccttccattgagacagaactgttgcctgtgtttttactagtcctgttgaatgcaatggatggtattttgaattcctgggttaaaaacagaattgaaaatctgaaatgcctttacagagcgggcagctaaagttgctgagcagcaggagagagagcgagcagcacagcaacagcagccgagtgcttctccccgagcaggcacccctgtgggggctctcatggggggtggtgccaccaccaacaccaatggggatgctcaatcagcagttgacacctgttgcaggtaaaaacaggagctaagaccatttttttccactttaagaaattccttcannnnnnnnnnctccaataaggagtagggccacaggtctattgcctttttctcatgacaggattccaaaagttttgaangtcatccatgttgtccctataattngcctttcccattatngggcaatgccttcccttctggccccagaaatgggcccctggggcaaatcccctg

SEQ ID NO: 325893 - DNA, 614 bp, Homo Sapiens
  misc_feature (101)..(101): n is a, c, g, or t
cacatggtgtcatcgcgtgcactgtgcagtaaacagagtagacatttttcacttagtaatcctcatttttttctcataagtagtagccacgtctatgcctntctcatgacagatcacagtttgagtcatccatgtgtcctatattcctttccatatggcaatcctccctctgccccagaaattgccctggcccaaccctggtaattggtagggagcagctcttccctggctgtgggcatggtctggtgatgttcctccaccccagcctgctcttgatagagcactatagcagaaaatatgaaagtagaccctgaattctgttctagagggactcccaagagaaaacacaaaactagtctttaggtggtgttgattttcccatctcattccagtattcagtttgccttgttctgctgcagccatccttaaaagactgaccgtttaaaaggattttttgacaatgaattgtaaatcctttcttggtcaccaatgtgcatgactgctaaatagaatacaaagtccttattcaattcattgtgcccactctgtaatgcttttctatttaattacattaaactgcattttctgttagtatcccagtcacatatttaaga

SEQ ID NO: 325894 - DNA, 141 bp, Homo Sapiens
ggcatgagccaccgtgccgggcctcaaggctacgtttgttacacagctgtcttgactaaactaggatgggcctggggtaggacctaggaaggcctgtatgttgtataactttctcaataggaatgaggacaacatactttt

SEQ ID NO: 325895 - DNA, 209 bp, Homo Sapiens
  misc_feature (19)..(19): n is a, c, g, or t
  misc_feature (36)..(36): n is a, c, g, or t
ccctgtaaaggttcctgcngaagaaacccccgttanccctgatggaagaatccccttaaaaagtgacttgatgtccttcctccttgctgtttttagcattttcctctttgtcttttgcacaattttacccataatgtgcccttggagaagacctttttgagttgtatttatttggtaatctttgagcttcctgcatttggaagcattca

SEQ ID NO: 325896 - DNA, 674 bp, Homo Sapiens
aaattgcatcgtcttttattttccaggcttcctgggatcagatatgacattgcactaatgagaaatgggggtttccagttgctcaggctcagattgcgcaatggcaggaagcatattaggtgctaaaaactccccctccctagccgagctgggcgggtgagaagccgagtgcgaaacgggacttggcgtgtcatgggcgctaaggaaacggagtaaggccgactcacaggcaggaacatcgggacacacacaaagaggcaacacccactgcggacggggaaacagactttggtgtttcatccacctctcagcgcgcttatcagcatcctgtgatggccggtgctgcaccctaacacacacctaatgacagacaccaacgccttcgcttggggagcccggccagcctcctgctccgggatgccctgctggcttcaaagatgagaagagccacatctccatcctatctccatcctatctccatccttctctccccaacagcgtgtggttgtctgtttcagggagcacatcgctcctggggcatgtggggtttatgtttcaggctgagacaccgccagccacagcacaaggacggtgcatcaagagctacgtcgggtattaggcagggtacgtggaaacccttgattccagggctttggccatcagaggaggatgtt

SEQ ID NO: 325897 - DNA, 352 bp, Homo Sapiens
  misc_feature (27)..(27): n is a, c, g, or t
  misc_feature (38)..(38): n is a, c, g, or t
  misc_feature (75)..(75): n is a, c, g, or t
  misc_feature (108)..(108): n is a, c, g, or t
  misc_feature (124)..(124): n is a, c, g, or t
  misc_feature (201)..(201): n is a, c, g, or t
  misc_feature (227)..(227): n is a, c, g, or t
tccccccccaggggatgaccctttggncctaacctaanagctgccttagccttaaaaacccccctagtcaaaaanggcgaccttcatggggacttgaaagccccagantccctagtcttgaggnaggaacaaactttgaggttgtaacttatggtcctgagctccctacaggattaagtcaaggctgggacttttcctgancttgctgttgcctgacaactactgantccctgtcttgcttacctcatttccttaccaatttctcttgggagcactttcttaataaattacttgcatatgaaccttcatttcagggtctgtttcagaggagcctaagacaatccttattgcc

SEQ ID NO: 325898 - DNA, 424 bp, Homo Sapiens
aaatgacagttacaagtgcttttcccttgatgggcaatgacgtaactattttcagttattagtaatgccttaaaaagtaacagcattttgtctaaactgaacttatataattgcacaaaagtcatggaaagcattaagaaatgctggtaaagattgaagttttctcagattcttgcgcaattccaagaagccttgattccagtgggtcctctgattcaaacaataatgatgctcaaactcagtgacacacaggtagagaacagcagcacaaccaggggaccccatgtggtttgtaacagtgaaattctgctctactgttaaggtttaatgatgcattcattcatcttttcattaggagcataaaaaacacctcaaattatattttctcaggcttaaaacttgttttgagctatggattctactt

SEQ ID NO: 325899 - DNA, 603 bp, Homo Sapiens
ttgagatggtgatttaatttctaggttgtgtccagtttgggctattaggaattagcgtttctatatgccttttggcacatgttaacttttaggatgattatatgacagagagaattactgtcatactgaatgttcatattcagcttaatagaacctgccaaaactttgccagagtcctaactccaatttctcctcccacaaacagtgtatgagagtttctcatagacataaggtattgtcagggtgagagcctcatgtttgcccaggccctatgggtggggaaaattctcctgtggcggggagtttgaaaccaagcagatcatgacggtgtaactgcactgatgagacagagatggaaatttgggggctgttaatgcagctgtgatttacctggtagggcactgaagatggaggagctatgcacagaacgaggacagaagtcaatgtgggagttcgaaataggtcattgttaaagggctaggctgcacatgtgcacaagactcatcaaggcccagcagagcatgaatgtgaggttaaatgaagaacaaaaataccagaggtcttacagtgttcaaagactgtggggttctggcctagctagag

SEQ ID NO: 325900 - DNA, 281 bp, Homo Sapiens
tcaccaaaacaatttttatttccagtgtttaattgggtatgcacacaggcatgacacaggtttggattcattaagtcctcatgcagaattatattcttctcgataaagaagccagttccatccaggatccactatctacacacctatgttacaacattatatcaaatctggtatctgaagaaaagatacacatttaatatgttcatttaagttacgtattttacagaaagattaaaaattcaagtcacacaaaactcaaaacctgtattaaaagtttgaat

SEQ ID NO: 325901 - DNA, 416 bp, Homo Sapiens
  misc_feature (331)..(331): n is a, c, g, or t
  misc_feature (381)..(381): n is a, c, g, or t
tattatttttttgtatttttagtagagacagggtttcaccatatttgtcaggatggtctcaatctcctgacctcgtggtcctacctgttttaaactgttacgcaggtcaatcatgtaagtaaacatcaactgtaaagggaaaatcccagtactaagtaaggtgtgattgttattcatgagggtcactagatcagactctcaaatatgagcacttagatccttaatgtcaaaaatcacttttatcagacaattgttcaatatccacagccattgatattgtcttaggaaaacaggaaagggaaagttttgatgggcaggaaagtgatgggantgggaaggggtaagttcccttaaggaccaggaacacaactccatataggnagggtgaaccagaacttgggggtccacaagggggc

SEQ ID NO: 325902 - DNA, 716 bp, Homo Sapiens
gcactgtttcaaacttagctgctgctattgctgctgtttggtaataaattctagtccccttttgacttcgatcaaaatctgatgccctaactcagctagaatgagttttcccattgcccatgtgtctatttttgttaaacggtggaccctaatcaaccgaggaggtgtttgttatagaaaaccaatgactaggaatcaccttctcagatacagaatatgaggccccaaggggtgaggggaggtgtccatggttactagacctgggggtctcctgacttctaggctgcgagggaaaatatcacagagtatgctctgattcctagagggccagaggggctcctttgtgatcccaagttctggttcaccttctatatggagttgtgttctggtcttaagggacttacccttccattccatcactttctgccatcaaaactttcctttctgttttctaagacaatatcaatggctgtggatattgaacaattgtctgataaaagtgatttttgacattaaggatctaagtgctcatatttgagagtctgatctagtgaccctcatgaataacaatcacaccttacttagtactgggattttccctttacagttgatgtttacttacatgattgacctgcgtaacagtttaaaacaggtaggaccacgaggtcaggagattgagaccatcctgacaaatatggtgaaaccctgtctctact

SEQ ID NO: 325903 - DNA, 353 bp, Homo Sapiens
  misc_feature (248)..(306): n is a, c, g, or t
tcaaatgtataaaccttttatttaaaattagacagactcaaatacaaattaaataagtacaatataaaatagtaagccttcataaaacacatcataaccactttaaatcatttactatttctacagcaaaattaaagagaaatctaaatacagtccaaaatcaaattatttttaaactcttattgtcaacattaaaattattacaaaacattcaaaggatatttaattaggaagatgaacaaggccannnnnnnnnnnnnnnnnnnnnnnnnnnnnnnnnnnnnnnnnnnnnnnnnnnnnnnnnnncacgaggtccaagagttttgagaccatcctggggccaactgggtgga

SEQ ID NO: 325904 - DNA, 478 bp, Homo Sapiens
aatgacgactgacatggtcagaattgcccttctgatcagtccctctagcagtgatgtggaagacgatagctaagagatcaattaggaggctggtgcaattgtttcagtgggcaagaagggatcagggtggtagatatgaggaaaaagagaaggtaagttgtccactttcggcagagaaaactaaccagacttgggaaaggaaagtgaggaaaaggagggaatcaaggatggctccccaggtttctggttttgatgggaccattaaccaagatagggaatgaaatgcagcattgaagcagatgcagcaaagtacggggagtaatactgggatagccaggccagtgtgctgcccagctccagggagcaccagtcacactgctgtgctccaggaaagtcacgtgaaaatggtattccctgaggttgtacaatggggcagccctgggtttcagcaatggatgggaaatcatctgctcgtgcc

SEQ ID NO: 325905 - DNA, 574 bp, Homo Sapiens
agaattttatttatctgccactaatccccatgtgtctcatacccaaatctaggattttcctcttcccacctggagtatccggcgtgcatggtttatccacaattaaagcagactgcaggctgctcccctcaccagaaagccgctcccttaagcagccatagattacatgccctggctctgcctgccagagaaagccggtggatttgattttgttagcaagagctgactgagaccctagcagctgcattctactttacatattaaagagtggaaatacaaataggacagtccttttgccactgcaagagcagggggggttaggtgggtagaaaggcaggattttacttgtggaaatcagtgcctgccttccatccacaaaaaccagatgtcaatatggaggaggcacatgtcagcggcgcctgggaagcctgagttccagctttccctccccacaaccctgctctgtaactgtgggcagagcatgtctgctccaagagcctcagtttacacccctgaaaaatggagttaatgccttacagggattttatgagccacagtaagagattatgtgtga

SEQ ID NO: 325906 - DNA, 463 bp, Homo Sapiens
  misc_feature (33)..(33): n is a, c, g, or t
  misc_feature (446)..(446): n is a, c, g, or t
ttccactgcaaataatgcatccaggcacctccntttattttgctttccatccccccagatcttctgaggaagatgcttcttctggatcactgtctcttcatggtgcactcaatgtaagactccagcaggaagatggtttcgtccacctggatctcactggcatccaacttgttgacattacgtttcagggtctctagctgctgacgttcaggagctgtgatcatctcctctatttcttgtaactgtgcttcctctgcaccagtagcctgcatagatgcaatgatggcttctaccctctgaggatttttctaggtagacgcttattctctttgggtttcaaattgcctcctttctatcaagttgggctatgctcttgtaggcacctgtgcaaccaacattcggggcagctgacagggatgttcacagtatataaataggaaggtccngggtgggggcatggtct

SEQ ID NO: 325907 - DNA, 415 bp, Homo Sapiens
  misc_feature (59)..(59): n is a, c, g, or t
  misc_feature (119)..(119): n is a, c, g, or t
  misc_feature (372)..(372): n is a, c, g, or t
aaaaaaaagggcactctggattaaactgcattaacagcctgcagggacaccttggggcnagcttgggttttactcctagatttcactgtcgtcccaccccacttcttccacactgccanccatatgatctttctaaaacacaagtctgattacatgcctttctcttgaaaaacccttgaaagcgaactttaaaatcccaaagactttggaatgacatataaggccttcccttaatctagcccctacctacctgtcttccaccccaaatctcatttcactaagctttctccaagaactccatattccattctcacccaccactgaccattccaaaacatgcaatgcttactcatcctcccatgatttgctgtncctagaatgtccttcttcctgccttgcatggtcaattcttctt

SEQ ID NO: 325908 - DNA, 331 bp, Homo Sapiens
agtattcattttttaatagatgtaaagtatggataattcataatttattaaacaagtcctgtagggatggactttaggtgatttccaatttgggggccattacaaacaatgccattaagaatagtgtggccaatgcatcacttcagatgtgtagaaatccatctgtagagttcccataagtgctatttcttggtcaaggggcatgtgtagagtatctttagcgacgggaaatttcacgaaggcatcacattttccagtttgctgtagcaggcagctctgcttctgaaattgtagtaggtacagggtgttgaagctcatggtgctagctctc

SEQ ID NO: 325909 - DNA, 502 bp, Homo Sapiens
ttcccttaaaaggactttatttttttctgaactttcccatgacgaatgtctgactgcaaagttcttttctataacatggatttcttcaacaggaaagattcagtacatgacagtagttttcaaatacagtcttccatcttgtattgtcctttcagcatctgttctgccgccactgggtcagcctctatctctggggtcagagagtcatttaagaccctgagactatctgttgaagctgcctgttttagcgtctgttctgcttgttcacggccgtttcgtctcaaactcaagtgcttcctgcaattttctctttgccttcttctccttctttagcctcttttgaactatggctctattcttttgttccatagccaactgcttctcaagtgtttcccttagttctctttcccttaaaaaaatccatcttcagctcagttttttccagttggacctgtttctcttgagctctggcattatctatggcaactttcaacagcccctg

SEQ ID NO: 325910 - DNA, 250 bp, Homo Sapiens
gcatttatttaaaaaaatcccatcatgaccctggaagcctttagaacagttttatcctttgaaacacaggacacatttctcccagtgcgcagaatttcaagtttacgtggttcagcttaagaagtgtatgtttcacgttccttagaggacaacagacccaagttatcactatgaggaaagggaacagctgtcccagcttcaatggggataatccaacaccaccagctaccaggaggaccctctcactcca

SEQ ID NO: 325911 - DNA, 498 bp, Homo Sapiens
  misc_feature (408)..(408): n is a, c, g, or t
cttggatacagcactttaatgccagtgggcctttaggatagggaggagttgggagccaatctccatctccgtactcctaacccaacttccaccacgctggaggagacaccagggttccagctgtgagcctgggtgcttgccttctgctacaagccccatcccgacctccttggagacttctagctcaagctctggaggaaatccaccagcaggtgctcagggaagccaaagtccatctgcagcagcagggaagccatctcgagtgataatctcagggttgatgatgtcgaagaggctcacgcctttgctgttcatgaggggcttttaaacacttacctcgagccgagacattgacctcagggatgcccacagcgggatcattgactgcaggaagctctggatggactncgagctgctctcagtcaagttgggaacagtctttgtgtaatctggaatccaagaggctagaagagcttttctagaatggaggcctggacg

SEQ ID NO: 325912 - DNA, 468 bp, Homo Sapiens
aagaagttctccctgcccctgtatttcgtctcggctgctgatggtaccaatgttgtgaagctcttcaatgatgcaattcgattagctgtgtcttacaaacagaactcccaggacttcatggatgcgatttttcaggagctcgagaacttcagcttggagcaggaagtggtaggacgttccagaccaggaacagatcagcagcatcgagaccccatcagaggaggtggcctctccccacagctgaggggctggggctaggggaatagtttggaccttgttcctcctgtgggaggctgaggactgcaagaggagagctagcagatatgcctgttcacccctctctggtacttgtggcttgctagtatgtttttatgataatctcgggcattgtttgcattgtgtttattaatagggttttgtttttattgtttccttttttacagtaaaggctgaatgacataaacattg

SEQ ID NO: 325913 - DNA, 428 bp, Homo Sapiens
  misc_feature (328)..(328): n is a, c, g, or t
  misc_feature (372)..(372): n is a, c, g, or t
  misc_feature (394)..(394): n is a, c, g, or t
  misc_feature (404)..(404): n is a, c, g, or t
ttcttttttcttgtcttcagactctgatattctttcttccacttggttgattcatcagttgatacttgtgtatgcttcaggaagttctcgtgctgtgtttttcagctccaacatgttgtttatgctcctctctaaactggttattctagttagcaattcctctaaccttttatcaaggttcttagcttctttgcattggggttagaacatggctcctttagatcagtgtagggtttttattacccatattttgaagccctacttctgtcaatttgtcccatctgatcccccctcccaggttctggttaccccgacgggaggaaagggntgaaatcattgggagggacaaagggcactctgacccttgggggntttcaggcaatggtttcaatgnatccttcctngactcgggagggtttgtcagggtt

SEQ ID NO: 325914 - DNA, 374 bp, Homo Sapiens
  misc_feature (107)..(107): n is a, c, g, or t
atgatgcccccatagtttaataaaagcaccctaaacatccaccgagagtgactccccagtttggtcccttatccaaagtattgggctatcctaggtttttggttttncctatataagtttagaatcagtttgtcaatttcctacaaaaaacccctggtgatatttaaattgagattgcattgaatctctagttcagtttggggagaattgacatcttaataaaattgactcagtccatgaacatgatacaactttctatttatttaagtctttggtttctctcagtggacatcattttagatccctgctgtctgctttcccttccctctgccagccttacaaggcaggttcaggagtgtggctgaattgatgga

SEQ ID NO: 325915 - DNA, 496 bp, Homo Sapiens
  misc_feature (55)..(72): n is a, c, g, or t
  misc_feature (353)..(364): n is a, c, g, or t
  misc_feature (389)..(389): n is a, c, g, or t
  misc_feature (402)..(402): n is a, c, g, or t
  misc_feature (451)..(451): n is a, c, g, or t
  misc_feature (474)..(474): n is a, c, g, or t
ttccaagttttatacctcttatctctctttctgccttactgcactgactagaacnnnnnnnnnnnnnnnnnngtagggacgggggtctcactatgttgcccaggccaagtctcaaactcttggcctcaggggatcctcctgcctcagcctcccaatagagctttacatacaaaactgaatagaagtgatgagagcagggtcttgtctctttcctcatctctgggaagaaagctttcaataaggtcaccattaaggcttaatgtccactataaatattttttgtgggatgccctttatcatctttttaaaagtccctttattcccagtttgttagaaatttgttctgtggggcnnnnnnnnnnnngaaactaataaacaggagttaaatntttatcaaatgcntttgttcatctactttggattagatcacattttcccctccatttggganaacttactctggaagggactttnaattcattggaaatcttttgga

SEQ ID NO: 325916 - DNA, 491 bp, Homo Sapiens
  misc_feature (253)..(253): n is a, c, g, or t
  misc_feature (255)..(257): n is a, c, g, or t
  misc_feature (260)..(261): n is a, c, g, or t
  misc_feature (266)..(266): n is a, c, g, or t
ttaatcagctgccacattctctatgctaaagccaaatcatttaccatcacacctactggatgcatagggaatacagaagactatgaaaatcaccttaacacttgctctgaaaagagacatccctaaatttatgtcaattctcatttattagcctgcttatttaaaaaatcaatctagaatgactggctcatcaacagctattaattactgaatttgccctgacaggctagaattgacattggtgttatacaanannnaannaaaangatcaagtccttgctttttgtgtgctttaatttgacaagagagaaactaaagttcctattagatccttctgtttcctgcttaaaatgtatgacagttccccaaggccatcagctatttcttagcagggcatttgaggcctctgcacccagcttcgttcatcctttaaggtaggtctcacatggcatgaactctggatgtagctgccaactcagcttgtcattcaa

SEQ ID NO: 325917 - DNA, 307 bp, Homo Sapiens
tttcgcgtttgtttttctttatttctttatttcacatacacattagccattcaatggagaagccggagagagtcaggcaaagatggtataacagaagcgcagtgacgggggcggggtcagggggaggaaggcagttctgcatcctttcttgctttctgtcctctacttgacagagtccatgtcgcgtgtttctttctgcttggctgctggtgcacagctccaccgagaccccttccaagggctctctgagaactgggctgcttctgggggcccgcgggggtccccgggctgggaggagagaagggct

SEQ ID NO: 325918 - DNA, 337 bp, Homo Sapiens
  misc_feature (115)..(115): n is a, c, g, or t
acattgagaaaattaatttattcccatgatgggggctgaaggagggagggaagggcggagtctggaggggagagcctgagggatctaaacccccatcatctttacaagctggccnctccagggtccctagggcagctccggctgtgtggagggtggggttccccctaggaaggggtgagggtggaggccagggcccttcagaattgtgctggttgctttgtttggggactttgttccttccccagaaggccggggcgggggtcagggggaggaaggcagttctgcatcctttctttgctttctgtcctctacttgacagagtccatgtcgcgtgttt

SEQ ID NO: 325919 - DNA, 462 bp, Homo Sapiens
  misc_feature (48)..(48): n is a, c, g, or t
caagaataaatgtgcgcactgttgggaatgatagtaagaggaatttanaaaacttaggacactgcaatttaaagtataactttatttctatatagctgaagattcttttcactagtacaaaaaggcttttatagtaagtccatgtgtttttaaagaatgaaaattgacaatttttataggtaactaaatttaagaagtttacctttttcctgttttgcttttaataatgtctgattagtatttacctataaatcattcaaatgagatcactgaaaatataaataatacaatatcaacaattttacttttggtgtgtctccagccatctattgatggccattttcagagtcctatttggtgtaagtaccgctgaaggaagaacaagatttgtcatgggacttgtacgtttctttttgctgatccaattttccattgcttccttttcatatgaatagccatcta

SEQ ID NO: 325920 - DNA, 805 bp, Homo Sapiens
ccacatactcgatgtgctagcttaaaatacatgtactacataatattatatttcttggagctaaattttatttcttctgtaatgtttatttttgatgcagggctgcataatgattccatttttaagatacctctaaattataagggattccagcctctacctggaaattaaagctgtgcagataaaatacaaagtcattaataaacatcacaaagataattctaacaagaagcaccatgtaaaagtaaggcaggaatcagaaaaatcatcaattactgacatattaaatcacactttcaaaagaatagggagctggaagcagccgctccctttcaggagggctgtatgacactgaatgaaatgccagggactcctggctggtgagcagcgggaactttgcggtcgagcggcgcggggcagccacagacctgggcgcttcaatctgtcaccagcctgcccgcaaagcccagcgacagcccccaacgcccccccggggacccatctggggggaccgggagcaggacaaaggtctgaaatccaagtcctaggagtaaagaaacaaaatgcgcaggttcaaatttaaagtgcctgcggtaaagtacggggaagtgagggggaaagacaccggcctcccaagaattctcaggcgtttagcacaagcaccagctcattaccaggagatgcgttcggggagtggggacatggagaatgaatcccaacttgtgactccattctccactaactttattctcgctccctggaccaagcgcatcgctggggccagggttgtcatggtgctagctct

SEQ ID NO: 325921 - DNA, 657 bp, Homo Sapiens
gctgctttttctttagtgtcctgcaacttcaaatcccatccacaacgctgcccattaggctaggcactggcacttgaactaaccctgaacgaggctcacaagccctcttgcttctctgttccatgctccttaaaggtggtacttgttaggtctatgaggcctgcatttgaaaatcaattctggcaattcttcttggagaaaggcaacgtaatgtttgctcaagtgacatactccaataataaataaacaccgtgcgtctgttggcagattatttcagtgccttgttagcaacaggtacctaattgcttctcattttcctgagatgattcaattgcactaaaccaggagagacaaattagattcagtggatcaccagcatgttctccaactaagttaaaagctttcctaagaggcaaagaagtttgtggatgtgataggagaaagatgaacaaacctagcacttgggggcctaggccaggggagggggtgccacaattacagtagtagtgaaacgccaggggacgttctttctggagggaccttagtttggagagaaaaacttaaaatgccacaggaaatattctacaaataggggaccaaataattttgagctcatttctcttaaggtctatcaaggtagatcttaattaagcggcc

SEQ ID NO: 325922 - DNA, 361 bp, Homo Sapiens
  misc_feature (62)..(62): n is a, c, g, or t
  misc_feature (270)..(270): n is a, c, g, or t
  misc_feature (321)..(321): n is a, c, g, or t
  misc_feature (332)..(332): n is a, c, g, or t
ttttaattattcagtaattattcataggatccatacaatccagtaaatattcacatatttangtaattattcattgaccaattcatacaaggcattttgctcaaaactgtgtttatatttggacattgtatcttcatcataatccttaaggtaatgctattatctataagtaacagataagaaacctgaagatgagggacagctaatcacgtatttggccatatttccattttttgggtttttgtgatgctgggaaggaatgacccaganggggtcacggggaaggaggtattcattccctggtattattttcccgggggncagagggtgtncccccttcctaggaggtactggggggccc

SEQ ID NO: 325923 - DNA, 443 bp, Homo Sapiens
  misc_feature (310)..(325): n is a, c, g, or t
ttttacaaaatccaaaataattttattcacattttcagatttttgcttccacaaggtgttcagcaaacatgctaaggcgacagaatgtctagttggtcacgacatgcaacgctgaccattcaactgatgacagcagtgaccacgcccacctgagctaccagccccacagcacaaagggggtttgcgggaacacaccaaaccacacagcaaccagcaacctgaggtaggtctctttacagtacaaaaacttctacgccagtgtgagacactgattaggcaagagctgcttaaagttgcagactttgagggnnnnnnnnnnnnnnnnctgtgcgacgactgcggtgagaaaggaaaacagacccacgaaatcctgagccctgccactgaactgtggaggtgtgggaataggcaaatgaaaaagtgccacctcaaaaagcagcagt

SEQ ID NO: 325924 - DNA, 285 bp, Homo Sapiens
  misc_feature (241)..(241): n is a, c, g, or t
  misc_feature (271)..(271): n is a, c, g, or t
gtgtgagccacagtgtccagccaagtttttccatcttaaatttctttcataaatcttcagcttctagtcttatataagcaaatgcaaaatcatggggaaaatgttaataacaacaaaaaagttttttgtggggggagtggggtcagttatagctgtgaggtacccaatgtccctgatttaggccagccagtatgggtgcaggtaggtaaaagggctttggggttcttgggacccagaggcncgggggctttattatcccaatccccacccncttaagggaggcag

SEQ ID NO: 325925 - DNA, 475 bp, Homo Sapiens
  misc_feature (39)..(39): n is a, c, g, or t
aggtttttggaaaaggttaaaaccaataccctgctgganagcccccctaataaaagcccctacctaaactgtaatcctcctcaacagggggttaggctgtctttcccaaaactcctccccctttggttgaaactgacccggatctgattgtcaaaccataaaagtaagtaccctccctcttgatgatagccctatgctcttttaggggatttgggtcctgagaagggatcaacactgggcaaacctacccaaaggccaaaaacctgacattttctttccctgaatttcaaaaattcctttggaattcccagggtagatgcattcaactctagaattccatgtacattcaatattgagttaagcctgattgcacatctgcaactccatgagccaggaaagcacttaccacagtgctccacggagttattaagttcttaagggaaaaacgtatgcagagaagaggaagaaagtctaa

SEQ ID NO: 325926 - DNA, 524 bp, Homo Sapiens
tttggtcgttatgctgcatttattatgagaatcaacagtcaacagttaatgattgactaactcttgttgttcactctggacattaacgaaaaagactggaatagggctacagcgctgcttttatgctacacgggttatgcttggactctgactcccagcagcaggtagattcaggaattcatggcagtgacattcaccatcatgggaaacaccttcccttttcttcaggattctctgtagtggaagagagcacccagtgttgggctgaaaacatctgaaagtagggagaagaacctaaaataatcagtatctcagagggctctaaggtgccaagaagtctcactggacatttaagtgccaacaaaggcatactttcggaatcgccaagtcaaaactttctaacttctgtctctctcagagacaagtgagactcaagagtctactgctttagtggcaactacagaaaactggtgttacccagaaaaacaggagcaattagaaatggttccaatatttcaaagctc

SEQ ID NO: 325927 - DNA, 355 bp, Homo Sapiens
  misc_feature (297)..(297): n is a, c, g, or t
  misc_feature (344)..(344): n is a, c, g, or t
agagtagtcatcctatacatctccttgagatatagagactgagaaggagaacgggtgggtcagagggtacacgatgtttctgctttaatacctgcaatacccgcaccagactgtcttgtaaacaggcagggtccacctgcattcccgtgagtggctcatgcccagagtcacagagctctaggcgcaaggctgagtgtgacacagccatgctgcctggccccctgctccacaggcacagggccatcgcatctgctggttcttctggggccacttgacggagctcaagacgaacaaggntggaagaggggcaggggaagggagagggagcccaccttcttcctcgnagcccacctcc

SEQ ID NO: 325928 - DNA, 406 bp, Homo Sapiens
  misc_feature (376)..(376): n is a, c, g, or t
acatgaaagagaaactttattgaagtggcaaagagtgaaagtgagggactggcctggagtgggagttgccacactgccccaacagtgattccctttcaaagagctgtgcttcctaaacattctggggggttttgccagagtcttccccttgctcatcctcatttccagggacactgtcattttagtggtctgagtcaagtcccgtatacattcaagaacagggcataggcgtgggaaggtctgggaaagttggggtcttttttccccttacatttggggtgactttgattgggcccccctcttcatgattccctcttttgccctcaagttttcccctttggggtaaaattggggggggaaatttttctcccatgtngggaattgggaagacaacattggcccacaa

SEQ ID NO: 325929 - DNA, 693 bp, Homo Sapiens
tcacatgaaagagaaactttattgaagtggcaaagagtgaaagtgagggactggcctggagtgggagttgccacactgccccaacagtgattccctttcaaagagctgtgcttcctaaacattctggggggttttgccagagtcttccccttgctcatcctcatttccaggacactgtcattttagtggtctgagtcaagtcccgtatacattcaagaacagggcataggcgtggaaggtctggaaagttgggtctttttcccttacattgggtgacttgattggccccctctcatgattcctctgtgcctcagtttcctctttggtaaaatggggggaaatgtttctccatgtggaatggaagacagcatggcccacaacgtgggccgagtcctcagagaaatactggaaatcattggtgtggttctggttgttttgttgttttgctggccacgttgttgggctaaggtgccttcaccccaagctgttagtgttccagggcaccccaagctgtcagttagaatctgctcttctggctttggtgtcttgggctttgatttcaggtcaagatggaggggcttctccagttctgagtcacccacgtgaaggtaaagaccctttctatttccagaaagtgtcaggagcacagaaacttgaggaagtacagcctggagccagtgtcccagtgtcctt

SEQ ID NO: 325930 - DNA, 510 bp, Homo Sapiens
tctttttttaagggagtagtaaagctgtctttgccgaatctcccttccccgccccctccgccgttggcccgggtacccccctgcaggcggccagactcagcacgacttcagcacctgttgcaggtggaggcgcacatctgcagccgtttcccagggcaccacgctggcgcggaacgagctgggctcggccttctgggcctcctgaatgaggcggtgcatggggtagccgcggcgcgggaaggccacgtcgccgcccgccagcagccccatggggcagaagtcgttggcgccgtcgcccacgtagaagaggcgctcgaagtgcacgccgtcgtgggcccgctcgcgcaggtagtcgctgagcaccttgtgcttgcacatgttggcggggcagcgcgcgcagctgtgtgtgtggaacggccgcagagccagcagtccccgcgcatccggccccgacgggttgctgaggatgcggcggaacaggctgtggtggccggcggcgcgcagcgagct

SEQ ID NO: 325931 - DNA, 288 bp, Homo Sapiens
  misc_feature (11)..(11): n is a, c, g, or t
  misc_feature (24)..(24): n is a, c, g, or t
  misc_feature (82)..(82): n is a, c, g, or t
gaaattccatnatccatccggagnccctcatttcctggactgatagaagggggataaattaatatccccaccctcaaattangggaaatcaaatggggacaaagctatagtagggttcctgaaatgcattgcctaaaatgtttagggatcattattattaatattgttttgaaatatcaagtcagaagactttactttctactgttaatgtcaactgatccctaatatactgagatcctttcccctggctcttttgtattattttaaaattaaattaaattattaaaa

SEQ ID NO: 325932 - DNA, 625 bp, Homo Sapiens
  misc_feature (550)..(550): n is a, c, g, or t
  misc_feature (612)..(612): n is a, c, g, or t
ttttttgccttgttaaagtgaaggcaacaagctctggactaggcactgtgtgtgacataaaaccctttaaaaagggttcactagaaaggacatgacttgtaggaatctgtaggctgtggggatttgaatgagtggtggtgaaggctcaacagcagacagcaggggcagcaatgagtctgatgagtgcactaaggagcctgggtctgaatgcagagggagataaacacttctgctttcagcttcctactgttggggttcaccctctgaattaaatgttttcctcatgggtaccctacaggccttcagagatgaaaggaaacccaacggctgagaaaggacaacctgtgtcaccatttcaattaggtgattcgagattctacttctcttacctggcttaataaccaggagaggccttttaaagaacagtatttagttacatcctacacctaaaacaggcaagttttgagacactttatgggcaaacagacagctccgtacaagtctgtttgaccaataatgctattcaatcttgtccataaaaggaagaccnggaaaaagatgtttgggggcaagacaggcagattccagatcctcaggttaggtcctttgggnggttccctaaatt

SEQ ID NO: 325933 - DNA, 384 bp, Homo Sapiens
  misc_feature (14)..(14): n is a, c, g, or t
  misc_feature (83)..(83): n is a, c, g, or t
  misc_feature (116)..(116): n is a, c, g, or t
aaacgaaagctgtnaaatgaaaagaggtttccctcttttaaaacctgtcttggtgggcccccccaagaatatccctaaccctnaagggccctccctttttttggcaaaactccctnccccctccccccgagggcaagacccaagccagctgcctaaagctctgcagctccccagtggacagtgtcattgtgcccagagtgctgcaaggtgaggcctgcctggctgcccgcacacctgagtgcaaaaccaagcactgtgggcatggtgtttccctctctggggtagagtacgccctctcgctgggcaaagaggaagtggcacccctcccctcaccacagatgctgagatggtagcatagaaatgatggccgggcgcggtggctca

SEQ ID NO: 325934 - DNA, 929 bp, Homo Sapiens
taaataggaacaacattaagaaaaacaaattggtctgacagagaaaacataaaactctcttaaggaagagtttactatagtagggacacattccctaggggaagggaagggaagcgtctgctgaaaaggattttcttccctgggctagaattacatccttgaggccttcctacatgttccaaggaggccaaatctcttgtggtcctaaactattcctcattccactcctaatcccaacagccatcctgggataggaacactagcctctggagagcagtgaggcctaccaaacctacaccagtcagcccatatgacataattacaggtaacagaatcttggccaagccaatgaaaaattaggcacagtacctatttcagaagaatggatgcaattctatgcttgactggctatgaaagttctaaggagaggaatagggaaacagtcaagctaagccagcagctttgcagagaggaatcccactggagccagcacagtattggcacctattagcacatgctgctgagctcacttggggaaggccaccagtgactggagactcagctacttccagacgttaaaagctgatagaggaagcccagtagtcaggggaagaaaggcaatggggcaacgtcccccatggtacatttctacctccacttttctccttgtgatgccactttcatttaggggctggaatgggatttgagggccctctcttctctctaggctttctgaagtacttcgcaaagggccaggagcccagaagtgaaggggctgtaatagacagataacaacctggtattcaggaacagcccgtctccaaacaggaatttgttgacctgaacttcaaaattaactcttcgcttatttagcagtctaatccacaaaacagaaacataccagagaggagagagttctcgtgccgaaa

SEQ ID NO: 325935 - DNA, 832 bp, Homo Sapiens
cttctcagattttctcctggatgttatctgtgttttaaatagaagtgaattttaagaaatattttggccttgattgaaaaatagttttgaaagtccatattctccagggaagaaaaatgagattaacaatgagaatgaggaagacaagtaaattctggaactatctatgcccaaataagtgaaaaataataaaactctggacttcaataataggacatacactaaaagcttatgtgtacagaggaaagctaataaaatcaaacacagaagcaagaacagatgtatgttctgtgaagagctatgtaagttttagatatttacctcctgtaattactactctactgggcacagtaggtgctcaataaatactggttttgataattattatccaagttttttctctcttattctgagttccttccttgcttatctttgtactagcactgagcctacgggttcttcaatcaatccttgttaaacagaacaagatttgaattttcttcagaacaagcccaagcagtcacaaatggtatttccaaggaatttcacaaggagaaagaggcagtcaggtgctggccaccttctttatgtagctggaatgtggtaggcagatttctgtcctaatatgcaaggtgtggacagagctggccagtggggttcccagccaagctggccccaggatgaactagaacaggctctctttcagaggcaagggcaagggtgatgtttgctcagtttatcacccaggtatattattttccacaacggaaagttgcaggcttttttgccatttcgagagtatgcagactatgaggttaattttgtttctttt

SEQ ID NO: 325936 - DNA, 955 bp, Homo Sapiens
tccttttcatcatcataatcatttattttttgttttcttaaatgaagcataataaacagttaaaattctcagaaaaatcatctatagttgagtgtaaaactcccctaaatcagtcttctagggccacacggagcagaagcagcttcccacccaagcacctctgaactgtgcgtgaggaggcacaattcagggttgtttctcgagaacactcattggaaaacaattcactactgcacgaagagggccaaagatctgcagagaaatgtgaagcaagtgttttgcactttttatccaaaatattgattaggttttaaagcaactcatcacttgctgacagctcagccacgggatgccacgcctggagtctggaaggaggagaagcaccaagtccttacggtatgagatggcactgaatgaggctttatggtggggtttcccacagacgtgaccttcgtttgcttctgtaggtgctccacccattcctgcagatcctgctggttgttgcacgacactaatatccgctcaatcatgctccctgatatttcaaatgcatttctatgattttcactgtcctcaagctttgtgattgtcattcctgtcgttggaagctttccctgatagataaagcccactcatcctaggactggcagacaacattagcaaaacatttgggaagagtaagaagatatctttcattcttttccctcacttccggcacactgaatcaggaccctgggacatgtaagtgacgttgcccagagttttaatgtcatcgccctcccagttccggatggcttccgtcaggatctgcagctcaagctctttcctcttccggacttcttgacattgggctttgaaagattgtttagccattccttcccaagtgcttcaggtttggattttggaaacgtatgtttttgccattggtgtcactgcaaatgttctcatcttccag

SEQ ID NO: 325937 - DNA, 927 bp, Homo Sapiens
  misc_feature (25)..(25): n is a, c, g, or t
  misc_feature (28)..(28): n is a, c, g, or t
  misc_feature (845)..(855): n is a, c, g, or t
aaggattcaagaatggatagtacangtnttaggaggagaggacaaacaaccaacagttgttacaaagtgttttaagaaccatttcattcccctttcagaaacaattcaatagttcagagtagcagtctagcaacatggaagagttaatttacacaaacactctggattgcagggcaacagatggcagacactgttaagcaagcaatctcttgagttaatagaattcttgtgtctaggccaactttaattgctgtgtcaaacctattcagtaatttcggctcaatgaggaatgggaagcaagcagcaaggaggaggaaaatggaagggaggcagcatcactttcctatgttctaggtggcacctaaactgctgtccctttaaattagagtgctgtgtacccgctatctgaaggacagaaattaaggaaaattgttagggaataagggaaatgaaccacctagcatgtgggaggcagaaaatggttccatattttcttcctggtatgcaatgtagtacacattaaaagttttccaaacactccaaatacttaagtccttttgttttcgcctgtattactaagttaaccgggaaagggtgtgggcctgtttgagcctacaggaaaaaagaattaaatttggaaaataagtacagaaaggcctctgtattacagataaagaagataacctataagaaacaaaacaactttgcaattatttttttccaacacagaaacaattattatcacttgtcctacataatgtaaaagtaagatatttttccacaactgaacccataaactaatttctttcaaaaccacacagggcatagctttggagtttcagttnnnnnnnnnnngcgtataaaggcattagcaaaatgtttcctactgttcaagactcagctattcttttattcctgagatgatac

SEQ ID NO: 325938 - DNA, 719 bp, Homo Sapiens
  misc_feature (74)..(324): n is a, c, g, or t
cagtacttggtatgattaatgatgggttggataatttctgttgacttaaataatgaaactaattttatttaatnnnnnnnnnnnnnnnnnnnnnnnnnnnnnnnnnnnnnnnnnnnnnnnnnnnnnnnnnnnnnnnnnnnnnnnnnnnnnnnnnnnnnnnnnnnnnnnnnnnnnnnnnnnnnnnnnnnnnnnnnnnnnnnnnnnnnnnnnnnnnnnnnnnnnnnnnnnnnnnnnnnnnnnnnnnnnnnnnnnnnnnnnnnnnnnnnnnnnnnnnnnnnnnnnnnnnnnnnnnnnnnnnnnnnnnnnnnnnnnnnnnnnnnnnnntactaacattcttaaaagatatttttatttagtgtacaatttatgattctagttattagttggtagttattttccttcagagcacgaagttgagtagtcatctgtaagtgtaactcatcttcctttgaagaaaattttctctttatctggcaaaaattttccatatttcttctaatgtatccttttggaagttattagactttaacctctgatttgatgtcttacaacaggttctgaaaattttccagtgatcaacccttcaactgttgtctctacttcaattttctctctcctccttctacaactacaagtaaaatacatgggatgttttcattctatcctctatgcttcatattctttgtatttttaattttgtgctatatgctatatttggg

SEQ ID NO: 325939 - DNA, 677 bp, Homo Sapiens
  misc_feature (135)..(135): n is a, c, g, or t
  misc_feature (142)..(142): n is a, c, g, or t
aattcggtttatcccccttggttttagaagtaaaatgtccttgcaaagagaaaagtttccataaagaattttgtcagtctagatagaatgactgtaaaaattatcactacacatataatgggaaactccacaaanaaacaanttagaaaaaaagaaatctcatttatttgttcagtacatttttgaatgtgaaaggatccaggaaaaggaggaagaataaaaaatgcattctaaaatcagggaaaatcaatagcctgagaggaagttgtacatacacacacccaggcatttcatcacaggactccctccacacaaccttcccaatgctcaccggcagccaaaccacatttctctgggcagcacagtcagttccagattgaaaggatttctcaaaaggtcagagttgtggacatattgctcaaaacaaacaggagaatgtagaaataagaggaaaagtggataggtgcattagggctgtgtaatgcaggtgcccaggagttatcctaccaggacccacaagcaagtcatagctgcactgctagggagggaataaagggagctgcttaaatgcaagacgcagtgtgtcttccttcaccaccctttgttcggccagagcctgatattcatactcaggatgtcatgaaaatgtaattgatgaggtcgaggagccgggggga

SEQ ID NO: 325940 - DNA, 966 bp, Homo Sapiens
tttttttaaagggagagtgaggctttttattgtgtatgaattcacgtggtatcgacaactccacacaatattaaaacactgcgagaaagtgggtgcggcacacctgggattttaaaaaagtcagaaataaaaacaaccagacatcccaatgcagatggcatagaacctgctagaaccacaggcggcggctggaaacaggagacaggtctttacgaaggttagatgggcagcggttccgtggacagaggaggaggcgcggctggccggtataatggcttctgtgcagagggcctggcctcaggcggtggactttttaataagtgaccccttgaggaagggcgtggtggctccacctccacccggaagcccccccggggtcactcacgggcggacaggtgtgtgacggccctctcctacctgccccagaacttgggcaggacgggctgttaacttggagatggatgcgtggcctggaggcctagcgttgcgcctcggacacggtggccggcccgtcaaagggaccacgcagaaggagggaaacaggagcaccttccgccctggcccagccgccccgtttatgtccccagaggccagaggtcgcagctgagctatctgtgcttggcctggggttacccctggggagggtgggagaggggtgagggttctggctccttcctggagagaggagggcaggggaggcggagctggtccgggaaaggtgccccaggtgggtcacaacagggtcggggcctggcccgctgtggcccttcacctggctactggtgtactcgctcagcagcggggaaggcccgtgggagacccaggctacagaaggagaaacggccttctctctcccacccgacgctgccttgtgtgtgtgcgtgggtgggggtgagtgtccttaactctcgtttcccctggcgtagctgagagaggcttgtccccccaaggctagagctgctgctg

SEQ ID NO: 325941 - DNA, 554 bp, Homo Sapiens
  misc_feature (53)..(66): n is a, c, g, or t
  misc_feature (297)..(297): n is a, c, g, or t
catgtttcgtttgtactatgactcctatttatgttttgtcttttgttgctgannnnnnnnnnnnnnaggttgaccttttgtggaagggtagaatgtccaatcagggaaatgacctagcagaaagctagggagttcctcagcctcatgaattttttattagaagtcattcctaatttttatctttaaatgtacattttcaaggatgtacactagccacctctgattacagtaggcttacagcataaccccttttgcttcttggccccttttgcttcttttcagtgcctcttgggcttnaatgaatagattttatctttcatgctaagcacattcatcatttaaaacatgcctggtatttgctgaagatgaattgaggagaaagttagaattggaattttctttgcctctcagcgctactttaaaagggaggctatacctagtggaatgtgtgagagttgtcttgtgtcaggtggcaattagctaaatatagagtcagggacctgggagggacttgctgaggtcatctgtgccctcctgccagccttccccatctg

SEQ ID NO: 325942 - DNA, 598 bp, Homo Sapiens
  misc_feature (576)..(576): n is a, c, g, or t
agatttctttttgagacagagtcttgggggggaaaaagtgtactttgaaaagaaaatcaaaagttggtcgagtttagcattctgccttctcagaaccttagagttgtggggttggaggccaaggccttcctctgaagactctgaggcagcctcagctgcccacccagtgaattcactcattttatctaagactccatctgaagagggggctgcctccatgcacaaagtgagtctaggaaccactgcactggataatttaaaactcaaactgttttggtagatcacccgtggccaacgcaccctgggatgaattccatcaaacctgcagagctatcaggggacacaccagatacacagcctgcacatggcctatagaatcaggtgtccaaagtgagaaaggaagcgtggaaggaggaaaccagcaggcgtgcagaggagcagctgctttcatccccagcagcgacacttccagcccgcgggcctgacggggacacctgcccacgaaccccctgcaggggacacgagttctccttcctctccgagtccatctttaagatggtaacagagctctgaatnctcgtgccgctcgtgccgaatt

SEQ ID NO: 325943 - DNA, 742 bp, Homo Sapiens
caggtactccattgccctaaaaaatcaccatctgctctcctaagttcttctggaaagagcaccgtaaccatgtcatcctaacagcaatgccatgaagaaagggaggcagctccctccacgtcctggctccagtgcccactcccgtgccccctccatggcccacgcagcctggccacctgggtgacatctggtccctgtgtcactttctgcaagacaaggaccagcctcaaagaggagagcatggtgtcctgaaggagatggcggccaccatcacctgtcctgtggctttcctctgactgcccaggtgggggcccagaggcggcgcctctcagtccagctttgagtggagttacataatttccaggcttccctgcagttctcgcctccccatccctgaactgtttacacagtagctctcaccccacaaagagtccgcatgatggcttttcctctgtttgggaagatgtggatggctgtgtcccaagtttttcctacctaagatccttttcaagtaggggatggatttggtctatctgatgatcaagagttcagggtggcctttgtgatagtgttacaccccctcccaggtccaataaacagtcttctgacaaataatggcccttccttttccttccccacctgtccaccacctggtaatgtgatgtaagcgtggcaaaaatcccacacaccccttccagaaatcccaggactcgtgtgggaaatactgtcataattaaagcct

SEQ ID NO: 325944 - DNA, 463 bp, Homo Sapiens
  misc_feature (26)..(26): n is a, c, g, or t
  misc_feature (37)..(37): n is a, c, g, or t
  misc_feature (45)..(45): n is a, c, g, or t
aatcccgaatctgccctcccctgcanggccgttttantgccaccnagttggaaaaatacaggcaggtttgcagggaacacagttttcaaagtgtaaagctcagtgcaggtgctaggtcatggtgttttttgtcacactgggatcctgcgggagaggtaagtttagctgattggagtggaagatccagcccattcttcgtggtgcctgccgcagagcctgcaagcctgcagaaagacagggagtagccacgtctttctgtagttcacacctgtgtgtctccccacctgataatccctcagcacttctgtttgccttgcatgtaaagcccgacctttgcatggcaggcacacagactgaaactctttcctcctccagcctttcttggactcatccacagaatgacaaagaagtattctgtgaatattggttgaatgaaggaaggcacggctttttaaaaaagatg

SEQ ID NO: 325945 - DNA, 380 bp, Homo Sapiens
  misc_feature (334)..(334): n is a, c, g, or t
aggcaggtttgcagggaacacagttttcaaagtgtaaagctcagtgcaggtgctaggtcatggtgttttttgtcacactgggatcctgcgggagaggtaagtttagctgattggagtggaagatccagcccattcttcgtggtgcctgccgcagagcctgcaagcctgcagaaagacagggagtagccacgtctttctgtagttcacacctgtgtgttctccccacctgataatccctcagcacttctgtttgccttgcatgttaaagcccgaccttttgcatgggcagggcacacaggactggaaactcttttccttccttcccggccttttnttggggacttcattcccacaggaatggacaaagaagtatttttgtt

SEQ ID NO: 325946 - DNA, 528 bp, Homo Sapiens
  misc_feature (382)..(382): n is a, c, g, or t
  misc_feature (469)..(469): n is a, c, g, or t
  misc_feature (493)..(493): n is a, c, g, or t
taaaggttcgacatgcacagactacaaccctaaacctggccagttttttgtcaatgcgtgacatttgggcatgggggtgggtaggggcagacagtacaacagagagttcaaatggattggctttatttccaaaaccagtccttggggaaagatttcaaggcacgtcctgctgaaagtcagcatgcagagattgtcattcctagaacagggctgacccaaagaacaacagtgctacaagcaatcttcacacccaaccctatgacgtagggcatccattatcccccattttacaggatgaaggaaactgagggttaaggcaatttgtcccaccacttactgctgggtggaatgacccgaggcccaaggctttggcaccatactngggttcccctttcccctggccattcccttttttaacccatacttccactcttgccttggggggggacccaggatcccgtggtggggncatgttattatatttaaccagggnaaacaggctcttggatttgggggcctctggatgga

SEQ ID NO: 325947 - DNA, 431 bp, Homo Sapiens
  misc_feature (18)..(18): n is a, c, g, or t
  misc_feature (26)..(26): n is a, c, g, or t
aaagccccggccccttgnaaaaaaancttccccccggtgtttgcctaaacgttgaaggtgtgccagtccttgggtccaatcatccaatcccagtaaacacactgcccccagttaaaagcattgctgaagcagaaacaggaagcaaaaaagcgtgtcccacaggctgccatttaagaagcgcccctggccctgggttgagcagcttgccctccttagaaggaggagaggcagagctcagtaggaaaccccaaggaccttcaagcagtaagagctgagacctggaaggttcttccacactgagaagtcaagacctcttccgtaaggcacccttctccatggaagcctgggtaatccttaaccctaacttgtttgggacactcttgagaagtcagaaagacttgtctgtgcctctcacaggtaactgacacaag

SEQ ID NO: 325948 - DNA, 694 bp, Homo Sapiens
  misc_feature (386)..(386): n is a, c, g, or t
  misc_feature (628)..(628): n is a, c, g, or t
gctaactttacttcctaatatcccattcatgcatcaacccaatgtagagtagcttctattctaactactctaccaaagctgttcttctataccgttccactcctttcactcaaagtaccccatatttttgaagaatggtatcattcatgatacaatgttctctagtaagcagacttggacatggagatatatactagggagtgcccttgaatccaaggcactgtgaaaaggagaagaaggaagctggattgagggaaagggaaaaagctgggctgaaaagaagtcctgggaccacagctttggctcatctcacaggggacttttgaaggataaaatgggcccactggcattccttttcacattggcaatggacatggactgagtcntttatagggccccaagtcccctccccacctcttttcacctgcctccttgcctcacctcaatcagtcattgcatatgcaccacaactgggaacctcaggaccttaggcagggggaagctctgcagctgaggtgacgtctgaaggggctcacaactgagtcctgtctactgacacagctctcagggaggacctaggtgatgcatctctgtgtatatcatatatatgagtaatgatattagaggntttataatttaaccttttttctcctttttatctttaatcttcactgtatttcagtcatggtcttga

SEQ ID NO: 325949 - DNA, 721 bp, Homo Sapiens
  misc_feature (370)..(370): n is a, c, g, or t
gcctcatcagccctgctttaatacctgagcagcaagaggttacaggtggcttctcctccctcccaggggacctcagtaggtagaggagagaggaggcacacagtcaggggaccctgaggccagagccacaccaggggattctgctgccccagtcccttcccacaggcttgtttgtccattgacaggaacagttgcacgtacaaaatcaactttgctttcccatcctctgtaaaatgtagtgcccagcctctttattatgcattttattactcccatttagaattatattgctatcaggaatgggtttcttgagaactgggagcggaagaaaggctgtgtcccacgttatgtgatcctgtctaataaagtnggatgatcagacacaaagccaagttcatcttcccaccttggggccaccacagagccacgtggtaaccccctttttctgaaggaacggcattgaggcccaggccatgtgcatttccccctgggctgcctcctctgaccccaggattccagctcttcctcagaagttgtctccatctctgcgatgaaagaggagagcagggacctttctccctcccctcctctatgtctttctgaccaggtgcccccaggacgcctattgctgatgggcataggcattcccagttccctcctggcccaagctcctggaggtgggaccacacatgacagagcgacacccagcttgtcctctctt

SEQ ID NO: 325950 - DNA, 1114 bp, Homo Sapiens
  misc_feature (438)..(493): n is a, c, g, or t
acagtttcttttagttcaggattaaaagatttaaggagtggccagtgagtagtatgggaggccagagtttgatttaggcaaccctgcatctagattaacaaaagttaaaactctaaataatacgtattctgacctccagtatattacggttgaatgttaggctttttgggtgcctaatgcattggagcaaacccttacttcagttttactggtagggttttgtttctacttattttatagctataagaactttgaattacctgactctaaaagggaaaaaggcttacaagtgctccaaatgttaaaataattttagagctcaagggaattcagatgcctaccaatttgtatagcccgcgaatggtgaggaaataaattcttggcagtggtcaggagcctggagtatggcagattaggaaacaggtgaactgactgccnnnnnnnnnnnnnnnnnnnnnnnnnnnnnnnnnnnnnnnnnnnnnnnnnnnnnnnngttcagtgagctaggtgggacctttatctcttctattctgtggttatgactcacgtcaggcagtcattttattaatgtgacaggaatggcttcaggcaaaaaaatcaaaaggatttcattttcagtatggatctatgcatctatttggcaggccctaactagtagatgatcaaagctctctcttctggccccacatgcattgaggacatgcctgctgttccttaagagcttgggatctgccatccgcttgaaaaaattggctttacctaatgtccatgttttccgggctctgctttattccaatttgaaaaggcattaggaattggcaacggatttgcttattatacctcccagttaacttgttatagctcctaattaacattaactaatagcacccagggtgatgaacattaactagtgtgccttaattaccagaaacaaaaccacccttggaaacatggattacccagcaagtctgtattagggcatggcttgggatagcagtatagatttcctttctggctttacaacaagtgcttcttgaagttttgcaattctcttgtcttagatgctttccacctccacctcccccccattttcccattggaaatattttttgaa

SEQ ID NO: 325951 - DNA, 554 bp, Homo Sapiens
  misc_feature (420)..(452): n is a, c, g, or t
  misc_feature (534)..(534): n is a, c, g, or t
  misc_feature (544)..(544): n is a, c, g, or t
attccaaatcttttcatctcctctctctgtggagtgctctctgttgctcagcgctccatgcccattgctgtggagctgacctggggagtgactgatggctcctgaggctgaaggatggaaatagcaggagggctcctggctgccccgcctgtggcaagagccaaccagcctgccaggtaccgtgaacagcagctgtggctatacaaccctgaatgaagaggctcgagtttcctgagtgggaatggcatggcaatgacatgctgttcctgagttgtctgggatctgacatctctgccagacctgcttccaatggggcctggtgaagcagggttggttggtgctgggagtccccgcgggttggatgatttacactgtcatccagccagggggaacaccatgactgtgtacttcacccagagnnnnnnnnnnnnnnnnnnnnnnnnnnnnnnnnnaacgtgtctgagtgatagcacggggctgctggaagtttatagaagtgagcagaaaagatgatctgagaactttaacttctgnattttcttangctttccctg

SEQ ID NO: 325952 - DNA, 806 bp, Homo Sapiens
  misc_feature (789)..(789): n is a, c, g, or t
ggggatggtacagaggggcctggggctggatcggagggttttggttgggaggaagaaaagaggggaagggcaagaattcttctccaggatgggcattccccccatgctcacttgtgggtttcccctcagtacagtagggcccccccgcaaagcagcagctgcagtaggtagataagatggaagaagcttcttctggtagtttctagaacctgaagacagggcccgtcagggcctttgattggacccaggaattcccagtatgccagggaggtacaagtgcttggttggttaatgaggggtcccagccaatggtcccaggccctggaaggcacagtcaggctgtcttgcaagaagggtagtgctggactaggacagacggactcgcacgatcacactggagttggtcacacgggctccatagtggccagcccagaactgtgtgtcctggccccggtgttcgaaagacacaaagcggacgcccatcttgatgttggagaacacgtgggtgacgtgaaggcaggcattgttgttccactgcgggatgggataaggcacagcagagaatttatctagaacagtctggttggcgtctagaagttggacgaggagtctgtacatacagccgctgtcgtgtcgggctccccaccagtcagagacacaaatctcaatcctgccactatccagcagttctggccacagaccctcctcctctaggtccaagacctgcttcttgcaacaccagctgaatgaagtcacgaagcacgtctgagaaggggccgtgccgaattnctggcccgagggccaat

SEQ ID NO: 325953 - DNA, 426 bp, Homo Sapiens
  misc_feature (311)..(311): n is a, c, g, or t
  misc_feature (318)..(318): n is a, c, g, or t
  misc_feature (336)..(336): n is a, c, g, or t
  misc_feature (356)..(364): n is a, c, g, or t
  misc_feature (380)..(380): n is a, c, g, or t
  misc_feature (394)..(394): n is a, c, g, or t
tttaacgtagactttcagctgcatgacctggtcccagccctgtagctcggaagccccaggaggtgaggttcacacccttagggctgggactctctgagccctaaggatgagattctaagttcagagatgagttgagggcttccctgaagggaccaaggaagtccctgtggcagaaacaataggagacaagaggtcagtggtgcggaggggaggggatggtacagaggggcctggggcttggatccggagggttttggttggggaggagaagagaggggagggcaagaattcttctccagggatgggcattnccccatnctcactttgttgggtttncccctcagtacaagtagggnnnnnnnnngcaaagcagcaacttncagtaaggtagatnagattggaagaacttcttcttggtattttctt

SEQ ID NO: 325954 - DNA, 797 bp, Homo Sapiens
  misc_feature (165)..(165): n is a, c, g, or t
  misc_feature (407)..(663): n is a, c, g, or t
tctaccataccacgagaattcctgcctcccacttctgatgatggctgggtgggcctgctgagacagatgtgctttaatagtgctttccgcactatgcccattgtacatgtaactcctggctatagcgttcagaagctgtctctccaattctgaatcttatccaancatttcatacctctggactgaaaaaactgagcaactgctacttctctatgccaatagggctgacttaatcattcaaaaagctcgtgggcttggctcgtacaggatgcatctcctgggaatgagatgttccctaacaatgctgtccaacagaactataatgtgagcacacaggtgatgtttaattttctagtaatcacattttattttattatttctttatgtcgcatggtaacgtccactannnnnnnnnnnnnnnnnnnnnnnnnnnnnnnnnnnnnnnnnnnnnnnnnnnnnnnnnnnnnnnnnnnnnnnnnnnnnnnnnnnnnnnnnnnnnnnnnnnnnnnnnnnnnnnnnnnnnnnnnnnnnnnnnnnnnnnnnnnnnnnnnnnnnnnnnnnnnnnnnnnnnnnnnnnnnnnnnnnnnnnnnnnnnnnnnnnnnnnnnnnnnnnnnnnnnnnnnnnnnnnnnnnnnnnnnnnnnnnnnnnnnnnnnnnnnnnnnaggtctatcatctcgcctctattcccatccctcctatcatttctttcctttagtggagatgctacgggcaggggcagacagtggggaccaggatcattagaggagactgacacacacctgaagggaaggcccag

SEQ ID NO: 325955 - DNA, 992 bp, Homo Sapiens
atatcactatatcagtaatgttttctgccttcctatttccaaaagttgttagctctctacaaaattctaacagttcattagtgatacaggaacaaagcaaaacctgccatttttaattatgctacaagcttcttaaactatgcgttattcaaattgatgccaattattttgaaatgaaataaaaatgctacttatctatgaataatatataggtaatatattatttttccatccatctaagagtctcaattttatgatttagaagtcatcattgctttttctctagagataaaaccataacttaaaacacatgaacacactttaagatacacaaaaacatccactatcaaatatgagaaacaatattgggacatgttctatttcaaatgtgatataagatttttagattaacttttcagttgcactgggagcctagagctgtcatgtatgaaatctgtgcaccctggtgtcaccatgctctgaggaagcccaagatacatgaggaggctacatgtaggcactctggtggacagccccagctgagctcagccttttagtcatctcagcccagatacagacataagagtaaagaagccttcagaggattttagatttcaatcttttgagtctccctggctattgaagccttggccattcttagctgaggccccagacatcatgatgcagagacccaggcatccctgccataccctgcctaaattcctaaactgcagaatccagaagcataataaaacagtttttgttttatactactgcggctaagctggcttgtttacagaaatagataactgaagcatgctagcaataaagttatggctggatttgatttcatacagagcaatcagaaaataaatgtgccgaagatgtaaagaattaaagttggccgggcatagtggctcacacttgtaattccagccctttgggaggccaaggtcctgcccccttactctatccctttctcctcacctttc

SEQ ID NO: 325956 - DNA, 660 bp, Homo Sapiens
  misc_feature (325)..(325): n is a, c, g, or t
  misc_feature (623)..(623): n is a, c, g, or t
  misc_feature (645)..(645): n is a, c, g, or t
tatcgaggtagttacataaaattattttgtttggcattatttttctcactcgaagaaactatatagggttgtttttcctttagcttgtgctcaagtcctcttgctgtgttttcagaagcactcacatgttctttcttttcctgagtgaaaagcaaaggtcccacggtgtgtgctgtggtgcaccgcctgggctttgggggtcccggaggcaggctgcctaggactcacagcctcgggaccgttgccacggcctgtcttctcgttcaggcctgcctctgacagcacttaccatggagggacattccatccttcaccccctcctctnggcacagggccaccactgcggtgctgtgccttcagatgggaggtgggcgcggtggccgcctccttccctccaggacctgcccgtgtgaagaccccccggagtgctgagcttcagggctgcgtggaaagagtttttactctctttttctagcctgtataccaggcttttccccacattgtcaggtagagcaccagcttccctgaccgctgctgctcgggggagggctggggctggccgggggtcctgtggaggagtacatggaggactccaggtacagcgcaggagtcacggcttttgntttttgacattggccccccggntctaccaatgacagg

SEQ ID NO: 325957 - DNA, 677 bp, Homo Sapiens
  misc_feature (117)..(404): n is a, c, g, or t
aaattaagagatctgaatttgaaccagccctctgagtctgggcttggcaaacactgagcctgagggtcaaaccctgcgtgctatttcccttttacaaataagctaaagggaatctannnnnnnnnnnnnnnnnnnnnnnnnnnnnnnnnnnnnnnnnnnnnnnnnnnnnnnnnnnnnnnnnnnnnnnnnnnnnnnnnnnnnnnnnnnnnnnnnnnnnnnnnnnnnnnnnnnnnnnnnnnnnnnnnnnnnnnnnnnnnnnnnnnnnnnnnnnnnnnnnnnnnnnnnnnnnnnnnnnnnnnnnnnnnnnnnnnnnnnnnnnnnnnnnnnnnnnnnnnnnnnnnnnnnnnnnnnnnnnnnnnnnnnnnnnnnnnnnnnnnnnnnnnnnnnnnnnnnnnnnnnnnnnnctggagtcagcatgcgcattcatttccatagcatctgttgtctgcagttgctttcatgctatctggacagatttgaatagttaccacagagactgtctggcctgcaaagcctctacacaaagatttgcccaacaccactgctgtaggtgattttgggtcatgctaaataaagtttgagaatgactggtatagacagctacttcctccttcttagaggtcaaatggggttccattctatgtatgttccaaagcagaactaagctgtacccattg

SEQ ID NO: 325958 - DNA, 896 bp, Homo Sapiens
acatgtacctggttcctaaactcagcttgatagggaaaggtaaaaggaggagatcatctgatgaagatgctgctggggagcccaaggccaagagaccaaaatatactacagataacaaggagcccattccagatgatgggatttattggcaggccaaccttgacagattccaccaacacttccgtgaccaagccattgtgagcgcagttgctaacaggatggaccagacaagcagcgagattgtgcgaaccatgctccgaatgagtgagattaccacttcctctagtgctccctttcacccagccattgtctttccaatgagatctttcagatcccttacctgttggctataacatctctaagcaagttcttgatcagtatctcactctgctggcagatgatccactagagtttgttggaaagtctggcgacagtggtggaggaatgtatgtcatcaacctccataaggcattagcatccctagccacagccactctggagtccgtcgtacaggagagatttgggtctcgctgtgctagaatattccgtctagttttgcagaagaaacacatagagcagaagcaagtggaagactttgcaatgattcctgcaaaggaggcaaaggatatgctatataagatgctctcagaaaatttcatgtcactccaggaaattcccaaaacaccagaccatgccccatccagggaccttctatttatatactgtgaacatcctgtcagctgcccgaatgttgttgcacaggtgcttacaagagcatagccaactttgataggaaagggagggcaattttgaaaccaaaggggattaaggcgttttacttggagaaatcttcaggaggggtagggaggccttcatttgcttcttttgccgggcta

SEQ ID NO: 325959 - DNA, 413 bp, Homo Sapiens
  misc_feature (349)..(349): n is a, c, g, or t
  misc_feature (397)..(397): n is a, c, g, or t
tccgaatgagtgagattaccacttcctctagtgctcccttcacccagccattgtcttccaatgagatcttcagatccctacctgttggctataacatctctaagcaagttcttgatcagtatctcactctgctggcagatgatccactagagtttgttggaaagtctggcgacagtggtggaggaatgtatgtcatcaacctccataaggcattagcatccctagccacagccactctgggagtccgtcgtacagggagagatttggggtctcgctgtgctaggaatattccgtctagttttggcaggaaggaaacacataggaggcaggaaggcaagtggggaagganttttggcaatggatttcctggcaaagggagggccaaagggatattggntattattaagggttgg

SEQ ID NO: 325960 - DNA, 854 bp, Homo Sapiens
  misc_feature (100)..(210): n is a, c, g, or t
aacctgctgggctcaagcagtcctcctgtctcagcttcctgagtagccgggtctatgctactgggtctacgcatggtgtgtgccaccatcccggctaatnnnnnnnnnnnnnnnnnnnnnnnnnnnnnnnnnnnnnnnnnnnnnnnnnnnnnnnnnnnnnnnnnnnnnnnnnnnnnnnnnnnnnnnnnnnnnnnnnnnnnnnnnnnnnnnaagagccaccatgcctggccttagatggtttttggagctggagttagataaggtttccccatctaaggcaattctctgctatacagattgggggctctacttggcagtttgtgggtcctaggggaggtagaatgcaaggcctggggatgagccatgctattccatggttctctaccagggtctgcactgttggtgacataaccacgcaacagaatcctgcatcaccatggaaaacctagttctggacggaggccttggaaggcttggagggcaacaaccacagaacactagtgctatgggctgaatacttttgtgttccctgctctgccaaagtcatatgctcaaatcccactccctggtttcactgtattagaaggtagagcccttgggaggggattaggtcatgagggtggactccttgtgaatggaataatgtgcttagaagagaccccatagagatccctggtcccttccatcatgtgaggacatagaagctggcagttgggccctcaccagacaccaaatctgctgatgtcttgcttctgaacttccagcctcgagaactgtgaagaatgaatttctgttgtttaaaaggtaatgggagttagttacagcagcctgaaggactgagccactagacaggg

SEQ ID NO: 325961 - DNA, 569 bp, Homo Sapiens
  misc_feature (15)..(15): n is a, c, g, or t
  misc_feature (24)..(24): n is a, c, g, or t
  misc_feature (35)..(35): n is a, c, g, or t
  misc_feature (52)..(52): n is a, c, g, or t
  misc_feature (60)..(60): n is a, c, g, or t
  misc_feature (70)..(70): n is a, c, g, or t
  misc_feature (77)..(77): n is a, c, g, or t
  misc_feature (97)..(97): n is a, c, g, or t
  misc_feature (113)..(113): n is a, c, g, or t
  misc_feature (127)..(127): n is a, c, g, or t
  misc_feature (199)..(199): n is a, c, g, or t
  misc_feature (257)..(257): n is a, c, g, or t
  misc_feature (296)..(296): n is a, c, g, or t
caaagcccccgggangaaacccangcctaaccccnagggtcctccaaccccnggtcctgncactgttggntgaacanaacccaacgcaaaacaaaanccctgccatcaccccngggaaaaaccctanttcctgggaagggaaagcccttgggaaaggccttgggaagggcaaacaaccaacagaaacactaatgcctanggggctgaaatacttttgtgttccccctgctctgcccaaagtccataatgcctcaaantccccactcccctggtttccacctgtattagaaaggtangagcccttgggaggggattaggtccatgaagggtggactcccttgtgaaatggaataatgtgccttagaagagacccccatagagatcccctggtcccttccatcatgtgaggacatagaagctggcagttgggccctcaccagacaccaaatctgctgatgtcttgcttctgaacttccagcctcgagaactgtgaagaatgaatttctgttgtttaaaaggtaatgggagttagttacagcagcctgaatggactgagccactagaccagg

SEQ ID NO: 325962 - DNA, 684 bp, Homo Sapiens
  misc_feature (341)..(341): n is a, c, g, or t
tggggactattggtcatcttttcaacaaaaccagatattaacaatcaatgtcagttaaaggagagttgtagacttaaatagtgtcaattgtcctacattttcatgttgttgataacagcctaccatagaggtgttacagcttccaccattttacacaggaggaaacagagctcagctcagagaggttgagttttccaagaagccaagtcatggggccaagaatagtgcccgggtgccatgagactctgcccactactgccctgctggctgcagagcggcttcagatacggctgtcatccaagccaggggagcctttgagccagtgctgctgaggaaaattngggaaaaagcccactgcccggttcccaggcacatctttcactgtttcctcggggttccctccatgtctgtttcccctctgagtgtagtagattggggacctcagaaccttcctagaacagaagttatggttttgtaaggggaagaaatatggtcaagtgcacatctataatttagagtattaaatttccttgtacccttatgatttattctagaaggtcagcacattgattacaaagctaatgttggctaacattaatccttcaggtatgaggtaagaaataaaaaattactttcatgcttcatttctgcacaaaatttcactctggaaagatatttcatttg

SEQ ID NO: 325963 - DNA, 727 bp, Homo Sapiens
gtgttttactgtatagggctctggtgttttattactctttctctattgtttttcccgtcttgatatattgtttttgtcttggcagcataataggttaacccactggtggttccgtctgtgtccttacctctgttttcaaaaacaacaagtgttccactactaaccagaaaccaacattccaccaaaaaattattccactcgtacaagcttggaaccagttagggagatttatacttaaatacattttacatgtaagaagtgtatttagatttgggtttcggttctcgttgttgttccataccttggtaagcaagtttaaatccttgccggttttgcgaatggtcactataaaagtggatgagggtttcatgcgttgtgctcagcagggccgcggggagatccgtgccgctaaattgtccaatcatggggctggtgtggtaaggtccattttgaatttcaaggaagtcatgattagcttcggtagaaaaattcagaaactgaatatgtgcacctatggaaaaacatgcaaacttaatgaaagttcatatcaaaatgtataaaatcaatgctcataaaaagggactgaagtgttagcagtctccccagacaatccctctctgtgagacagaaccatgccgtggaggacggcattcactgtggatgacagcaaaccctggctccatcttacctctgccactttttgccgcaggtctttttccatgacact

SEQ ID NO: 325964 - DNA, 505 bp, Homo Sapiens
  misc_feature (471)..(471): n is a, c, g, or t
  misc_feature (490)..(490): n is a, c, g, or t
gagtgtcatggaaaaagaccatgcggcaaaaagtggcagaggtaagatggagccagggtttgctgtcatccacagtgaatgccgtcctccacggcatggtctctgtctcacagagagggattgtctggggagactgctaacacttcagtccctttttatgagcattgattttatacattttgatatgaactttcattaagtttgcatgtttttccataggtgcacatattcagtttctgaatttttctaccgaagctaatcatgacttccttgaaattcaaaatggaccttaccacaccagccccatggattgggacaatttaggcgggcacggatctccccgcggccctgcttgaggcacaacggcatggaaaccctcatccacttttattagtggaccctttcggcaaaacccgggcaagggttttaaaccttgctttacccagggtttggggaccaacaacggggganccggaaaccccaatttttnaatttcatttttttg

SEQ ID NO: 325965 - DNA, 412 bp, Homo Sapiens
  misc_feature (31)..(31): n is a, c, g, or t
  misc_feature (57)..(66): n is a, c, g, or t
  misc_feature (94)..(94): n is a, c, g, or t
  misc_feature (106)..(106): n is a, c, g, or t
  misc_feature (176)..(176): n is a, c, g, or t
  misc_feature (315)..(315): n is a, c, g, or t
attcaaaaaaccaaaactccctggccaaaantccaactcaaatgaaaaagcctgggnnnnnnnnnncccctgggaacctgcaaccccgaaggangggcctggttantggaaatcaaggaatcaaaggtggaaatccccagggcccaaggaatcctaacaggttgtcctgagagctnctggccctggcccaaacaagggctgggatgtgggggatggagccaaccatggggaggctgtttagagtccagtgggttccagccccttcttcctcactcctgggcccactggtatggataggtgtgaaggggaaaggtnctggcccacaggtccctgccactccaagctgagcctaccctcgtcacggggccccggctcaccctccaggaggcgggcaaagggctcggggcacggg

SEQ ID NO: 325966 - DNA, 443 bp, Homo Sapiens
  misc_feature (17)..(17): n is a, c, g, or t
  misc_feature (49)..(49): n is a, c, g, or t
  misc_feature (67)..(67): n is a, c, g, or t
  misc_feature (87)..(87): n is a, c, g, or t
ggcccaaaaggcatttncctgccccccatatgtgtaaatgttaaggggnccccatggttgtatatgnggtcctgtccgttgaccccnaaaaccgtctttttggggcacatgacctgtatataaatgccataaaagatgtgactgcaagatgactccctgtgttaatgcccatcccaagattaagcacccctagaataaagagaaattcccagaagtacccttgattggccacataggaccccaagaatgtgatgtgcctactcttcttctccgctagctaggcagatagggtacttgattggcagcaccaccaaaatcacatggttggaatggaggagaagcagttgccctccaggaaaggtggcagtggtgctggggtgttttaacctttgttttttccgttgcagttcagcaagacgcttccagttacttcctgctcttaa

SEQ ID NO: 325967 - DNA, 976 bp, Homo Sapiens
  misc_feature (359)..(359): n is a, c, g, or t
catgtacatgaatttttacagtcagcacagcattcctcacctgcattgccgttgatcggtatttggctgttgtctaccctttgaagttttttttcataaggacaagaagatttgcactcatggtcagcctgtccatctggatattggaaaccatcttcaatgctgtcatgttgtgggaagatgaaacagttgttgaatattgcgatgccgaaaagtctaattttactttatgctatgacaaataccctttagagaaatggcaaatcaacctcaacttgttcaggacgtgtacaggctatgcaattacctttggtcaccatcctgatctgcaaccggaaagtcttaccaaggctgtgcgngcacaattaaaggccacgggaaaacaagggaaaagaagaggattcttaaaactacttgttcagcatcacagtttacttttgtcttatggttttactccctttcctgtgatgttgctgattcgctgcattttagagcatgctgtgaaccttcgaagccccacagcaattctgggaagcgaaccttaccacaatgtatagaatcacggttgccattaaccaagtttaaaattgtgttgcctgatcccaattctgtacctgttttgtaaccgaaacaggaagatatgatatgtggaatatattaaaattctgcactgggaggtgtaatacatcacaaagacaaagaaaacgcatactttctgtgtctacaaaagatactatggaattagaggtccttgagtagaaccaaggatgttttgaagggaagggaagtttaagttatgcattattatatcatcaagattacattttgaaaaggaaatctagcatgtgaggggactaagtgttctcagagtgatgttttaatccagtccaataaaaatatcttaaaactgcattgtacagctccctccctgcggttttattaaatgatgtatattaaacaaagatcaatattttca

SEQ ID NO: 325968 - DNA, 787 bp, Homo Sapiens
  misc_feature (13)..(13): n is a, c, g, or t
cccatccgggaanccacccttttcccactgatatgtgcaacccatggatcaggaggtcccctcgtgagctcacgccaccagggcctcgggtcccaagcacacagctgtgcaggttctcagaggccactcggcaggaggctgcctaagactgctgagttgccagggtgaggagcggccaccatcactgcagctccagtctgcggtttccctctgctggtgccgtggagactgggtggtttggacctaggaggaattccccacagcacagcacagcggttgtggcagaccatggccagactgcctctttaggctgaactcagacccatccctcctcacccaatagggcctccctgtgggaatttcagcaactccagccaggggtttatggacagaactttgatctccctaggactgggatggaacccctggggaaaggggctgccgcagtctccatagatcagcagacttggtctttcccctgctggctctgaggaatctgggcagtccagacaagtgggattcccctcagggcagcacacctcctctgccaaggggcagccagactgccttcgttaagtgggtccctgatcccatgccttgtgactgggtgagaccctccaacagtggtcgctagacactttatacaggagcattctggctggcatcaggtcagtgcctctctgggatggagcccccagaggaaggagcaggcagccatctttgttgttttgcagcctccactgggtgacagctccaggtgtgggacagactcaggcaaatagggttc

SEQ ID NO: 325969 - DNA, 533 bp, Homo Sapiens
  misc_feature (52)..(114): n is a, c, g, or t
  misc_feature (188)..(188): n is a, c, g, or t
  misc_feature (190)..(234): n is a, c, g, or t
  misc_feature (237)..(237): n is a, c, g, or t
  misc_feature (508)..(508): n is a, c, g, or t
gcttctgtcgcccagggtgcagtgcagtggcacgattcatggctcactgcannnnnnnnnnnnnnnnnnnnnnnnnnnnnnnnnnnnnnnnnnnnnnnnnnnnnnnnnnnnnnngtgcatgccatcacgcccagctaggtttttaatttttgcagaggcggtgtctccatatgttgctcaggttggtntnnnnnnnnnnnnnnnnnnnnnnnnnnnnnnnnnnnnnnnnnnnnngtntgagccctgtacctagccaactttttctttaagaccctttctctttcattatttgatcaaaaacaaatctgactttctctgaacttctgaacagaaataaaatgaatctcctactacattggacctaatcaacacacgtctcccgttccctgtcaagacaccatggaggtggatgttgtgtgaaggtaggagcagaggtttgaatttgggaagactgggtctacatcctggctactgggctctgtgacttcacatacaccctcaagctttnctcgtgccgaattactggccgcgta

SEQ ID NO: 325970 - DNA, 781 bp, Homo Sapiens
  misc_feature (429)..(429): n is a, c, g, or t
ccatatttcagggactttttttgaattaaatgggtaataaactgactaacatttctgctcagtgggtaggtgtgctttattctgtttgaaatgggagaacttagttcagagaactttttccatagatgcatgatcctttttggtacatactcgaattaggctgttgtgcagctaattcagctttgctgtatttcttttgaagtaagcatcctgatttaatggcttttccaaggactgcctttagtgtgggccttgctaacctggataggatgtcactttactcaacataggttgcagctcagcctgggctttagaagtttgggattgaaaatgagactgtaagatcccagttggcccaaggaaggcgagtccgtttactcatgattcatcttgaggaagaagagatgctgagacagctggcacctggcnttattccaggggccacattactttccgccagccatggcttccaggcgttagatcctttcatgaatacccaggaaagcagtgatctattaaataactttacccccagctacagttcatgcttctagagttaccattgtgtggatttcccagaacttcttttcctttgacacttatctttatcattgtggaatttatgcccatggcgccacccagcttctcccacacccaaagccatggactctaggaagacactcagtttggcggttaatcccttcccttgggaacttttggaattatcactttatttatctaatcctcttcaaataagagtttgtatacttttcactgcatt

SEQ ID NO: 325971 - DNA, 772 bp, Homo Sapiens
tgcttccaaaaatctactccttttaaagttaaatagaaatcatttacctaaaaactgcagttgtggattagtttttatattcaatgctctgatttagtgtaatgtctgaagtgtcggggccttagttattctactgtaaactctcttgatatttatatacaatctattttgaattaaatattttttaatatttactgcatctgcaaaattatattttagcataaactctctgttgttttctaagctgtagtttctggggaaaaaagtgtgtttctaaacttaatacatttgtaggactcatctccaatataaattccctgatgttgaacaaacttgagcaactgctttaggattttcctccagtacaaaatgtgtgcaataagatctgtgatactagtaaatgtactatgtaactccctttatatttgtaatgcttgtcttcacaataaatactcttcttcactttaaaggcttatacttgcctgaaagttttgacagtaattgcccattttaaatgccttttattaaaaggaagatttttatgttgagttagatgtgagtaggaattaataggttttcccatattccttctatttgtacaatttttctcaaggatactagcttttctgtgagataaggtgtaagaactgattaaaagttttgccacattcttcacacttgtaggagttttgccagtatgaattatccaacctacaatcaagagtggcaaccatataaaggctttgtcacattttatatatttctagggttt

SEQ ID NO: 325972 - DNA, 294 bp, Homo Sapiens
  misc_feature (92)..(93): n is a, c, g, or t
cccccccactctccccatacaatgacctaatcccaaagtcctaaggggggtgggggatgccagccagtggcaagatgttaaacctttttttnnccctttgcagtgagattttagctgacaccttttgaatggtaactagttgagttccttttttatatttttcttgctctttaattgtgagacgtttcaaatagaaagacagaggggggaaaaaaaacagtccaaatttctgaaactgtgagctgagttttcttttcctggacccaaagggatgggtatttccactttgagaat

SEQ ID NO: 325973 - DNA, 940 bp, Homo Sapiens
  misc_feature (586)..(586): n is a, c, g, or t
  misc_feature (874)..(874): n is a, c, g, or t
attttcttcagcaaaggaatttcaaaattgtcagattacaattaatttttaaatgagttcattttctccttctcaaactgtattgtctaatggtgtcagaagagcttggataaggtctgtatgaccttattgctacaatcctaatgatgtgtgttaaaaaatgaaatctgaagacatcacagagctgttgtagatttcaaatgagaaatgtctctgaaaagtatcagaaaatatgggcttcctttataatgatctataacccagttttcacagggagagaaaaaaaatcagcaaaaccctaaccctgaacaaatctcactttttaaaagaaagataccttacttgagggaaccaccatactaattctttgtattcctatttggaactactgctgccccatattttttgaaaaacaacaccatggctgtctattctatcaaatcaaaagaagttttttcacagttggacatattaatttttctacctggctaaagaaaatgtgctttttagtttacttataacaattttgtaatttagatgtggggagggcttgtcttggatattattgcttctttttgtttttgtntctctttcttcttcctagctgttttcaacttcctagctatttccactatgggtgcaatggagatggtgacaggagtgtgggccagagagagggggaagccagtgtgagacggacctctcccagctatacatctgggaaggggagtctataaacagctggggttttgtttttgtttcatttttatgataatttgtttgtattagtgtttaattccataactaacacatagatggactttcctcacaacaaaggacgtcaaaggtcagtgctcgctcggcctgatccccntctcactccttaaggggtggacgggcgccgtatccttccctacctctttctacgcctgtgccgaat

SEQ ID NO: 325974 - DNA, 734 bp, Homo Sapiens
ggccgcttaattaaaaaatttacagcatctgctagattgcaggctgttctagaccctggagttcaagtagtgcaaagttcctgtcttcctggaacttaccaacagtactggagtttcaacgttctataaacaaagatgggtgaggacattagccccgggctaattaaagcgctcaggcccgctccagacctgagaatatcagctgaatctgaatcaactgttctccatttctgtcggttggtggtatcgcggggccacggcgacctccagcggccaccctccgtcttgtggtctgttctgggtccccgggaaggaaagggaggggcgataagccgggtccttgggagcgtccttggtctcccttcgctttacagactaggaggccgcagctagctggcagtctcagatccaggtttcccatctctgggatgagaggagagttcttcactcaggactgccagcgcaatgcaggtcgtgaagaactgcagggtcgtttatcgatacaaagtgagtgttggaggaacccatcaagacacaggaagggggaaatcctagcgccgccagtcggagatgaccaagactgaacctcaggcccagccctcccttctctcttagcctgcaggtttttctcctattctggcgttgggaccggatgacagctgcgaaaccaaaacgggaatggataaactgaggtgccactggggacctgtttcagaagtaccttcctgggcggg

SEQ ID NO: 325975 - DNA, 892 bp, Homo Sapiens
aattcggcacgagcggcacgagtctgagtaaaaataaacctgctttaatacgtagatacttatttttaggtacaaggcttgagggagtgacaactctgaacaccacattccacagcaacaagtctggtgcatgtgggcagccacgccagaggcttccttggagtattccagaaataaccctctcgaactggagtctgtctctgacacatcctcttctccatactgacactgtctctggttataatagaatgcagcttcacctttccacatcactccagactagatgcgtaatcagtccctctgacactgctgctggaatagtaatctgacacctgccgtcagctgagggtccttggctattgactgtgcagagctgtgggagagtggacagcccagagacaaccggagaagcagatctttttactggaataattgcacctttgtgttccaacactgcacagtatttttctcaggagccaaaactggcttctaagattcttggattccaggctcaccattccaggcaaggtgatagggaattgtaataacttcaccttattcccggtatcagattaacatgcatgttggctttgaaagatgtggcatttccatccttagagtctatgaacatgtacggattatttatgggtgtagaggatgccccccaaagtaaagcagttctctcctttattcatcattcctcccacagcactgccaggctttgtcttctttgtctctaattgcagtgctaaagggaaatgtccccaggccagagcaaagaacctttaccttcaaatataccttggatcaaagagagaaagcccctgcatccctccatcagattgatagtgtgagacactttttctcttgattatgggtaccgtggacttga

SEQ ID NO: 325976 - DNA, 591 bp, Homo Sapiens
ttttcaagctggggaaaacacctgttaaatataatgacagaatatgctctcatcaaaacccaggaaactttaagaatacactaaacctcacaaaatgggggcgaaatacaatgatgaccacacgtatgagaaatggtcaatggtagaattgaaagaaatgcaagggaaataaaaggtaaggggtcctttccgagcaaagtggcaacgtcacaacagctcacagtcaggcttggcgggacaagaatgctgggcagtgctggtttgcagggaggggtcaacttttctggaagcagcccagcaaagtgccccagagccatcaattattcctgtgcttcgcagccacagcccacgaatgcaggtgcagccacagaagcgctggcagaggggaggctgagagtggcgctggttgaagatttctcacaggaaacaaaaagcacagcctccacgtggctcatggccatgaaaacccttgactcaaaccattccacgtcgtgaggaagacgcgggtcagctgccctagttgggtgatgatgatgctgtcagggaaagcgtcggtgccttgtcttccataaggcagacttttcatttctg

SEQ ID NO: 325977 - DNA, 260 bp, Homo Sapiens
  misc_feature (126)..(192): n is a, c, g, or t
agctagagccgatttgacatgttgattggtatcggatactaattcctaaaataaaatcgaaattaaaagcctttattacaagacaacagaaacttccataccattattctggggaaacagagtctnnnnnnnnnnnnnnnnnnnnnnnnnnnnnnnnnnnnnnnnnnnnnnnnnnnnnnnnnnnnnnnnnnngggctcaagcactttcagcctccagagtagctggggtctacagacatgcaccacaggggctgggctaa

SEQ ID NO: 325978 - DNA, 336 bp, Homo Sapiens
cgcaaaacttccccccagagagcccacttaattaaatactcccattcggccacaagagaatacaagcaaagcaggccaaagttgccatgtctgatgcaacttcttttagggttgaaccaagcgctgatacctccaggagtctcacagttcaagccactgaagagggcccagtgaggagaaagcccttcctttttgccgccagccttgtatctttcctttgaaatccctgggcctttctttcacttggctggctgctactcatcacacttaaattagaaaaccaaaggagaagggagggtatggaacttttgtgcagaaggacctacaacacttggg

SEQ ID NO: 325979 - DNA, 946 bp, Homo Sapiens
  misc_feature (916)..(916): n is a, c, g, or t
ttaatttcctttttctctttggatgggagaagggaggatctgggaaaatcttatggttctaagatttatctccattaacaacgtttagaagtaaagtacaggagttaaggatgtatgactgttcttaacttataactctacttataaaattctatgaaaagaactgtcaaaatatataatactacgcagatataatactatacagacatcatcaaataaacataatactatacaggactattacaaaaaggctaaccaaccaaatattttacttcttggtatcaaaaccagaagaaaggggcttagattatggagagaataatgtaagttgaacatatggacaggttattcacataaaagacatattaaatgcctactgtgaaacagagcactagatttcgtgaatgcaaagatgagtaagacgttgtccctgtcctcaggaaactcctgtgacaacgcagtaatacagcaaggtataaggagcacacagccggcttgcctagtagctgtgtggcccctctaagcctccttcctcataaagttctgatcaaatgacatgtaatttgcttagaacaagaagcagttgttatttatcaacttctaaatgactagaattaagaagcaatacaacattaccagaagctggagggaagtgactttaagacaaaaaaagtattgaagcacccctaccagagagcacaggaccttagactgctagagagaagaagagtggcaattacctacagaactgaaggctttacaaagtgcttccatatacagactgttctgctcgttcctcacacagtcccatctgaaagatggaaaaactgagtctcaggggatttcatatcgcttggcccctaggtctcctggttggaaatggaatactctttctactccagcgtgagtacttacnggaacatctagtgtgactgtctcactttaa

SEQ ID NO: 325980 - DNA, 782 bp, Homo Sapiens
  misc_feature (182)..(195): n is a, c, g, or t
  misc_feature (215)..(338): n is a, c, g, or t
aacgaggctgatgggcatcggggcataatcccagccaataccaggctccacaccacgctctcagtcagcctggggaatgagacccaaactgctcatacagaattacgcatttccacttctaatggtaagacagtactcacagctggtatttagaggcacctgtgccatcttggagtcattcnnnnnnnnnnnnnngagacagagtcttcctctgnnnnnnnnnnnnnnnnnnnnnnnnnnnnnnnnnnnnnnnnnnnnnnnnnnnnnnnnnnnnnnnnnnnnnnnnnnnnnnnnnnnnnnnnnnnnnnnnnnnnnnnnnnnnnnnnnnnnnnnnnnnntagggtttcaccgtgttagccaagatggtctcgacctcctgacctcgtgatctgcccacctcagcttcccaaagttggagttgttcttaaactgtttttactcttccctgcagacacccatcatccgagcagtattgatttttgcagaaggaatttttacaggtgaaagccacgtggtacatcccagcattcacaacctccccagttccatctgcatccctattgtgcctcccaaagatgtccctgtggatctgcacttgaaggcattcgtgggttacagaagcaggtgaccctttgcaagtcacagttcatttcaggacagcacttagaggagggcaagatgtataaattttccatatgcccagtggattcttgggggcctgagaaaccatttaatggttctgtctacccaaagtttctcatgaccttttatttcctcagttt

SEQ ID NO: 325981 - DNA, 847 bp, Homo Sapiens
  misc_feature (79)..(79): n is a, c, g, or t
  misc_feature (626)..(626): n is a, c, g, or t
caatccattgttaattctggaaaagctgggctggcaggtcctgtggtgaatatgttggggctgtggcctggggttcttntgggaggccaaggcatccatcctcatagccaggcggggctgtcattgccagtacaaagccagctgcagtcgccacttcatctcagaggatgcgcaggagcggcaggacaaggaggtcttccagcagaacatgaagcggcggctggagtcctttaagtccaccaagcacaacatctgcttcaccaagagcaagccacgaccccgcaagactggccgcaggaagggcatgtcttccctcagggactcctcttgggagctggaggctgacagcaagcagttttgagccccctagtgttaggatccagcttagggggaaccccagttgggacagtcctcaggggcttgatgactacagcagtttgggttcccttttagatgttcctggagtcccagaagggtaaggtgagaccttcagagggggagcagcctcttggccatgtggtcacctgctgggaggcagcagggccgcctaccaaagatgaaaaaggcaggagaaaaggagattcctttgaggggcaactccatgagctcctaagtcagcccacgcntgatgcatccagatttcttactggggcatgggtcactcttgcctggttggccaagggatggtagaaccactgggactgacataaattccctcccctgctgggttaggaaaacttgtcctgttgaccccaccagatgacagggttggggtgggaagccggggccagaggctcaggttttctttcttggtcctcagaaggatggtgtggcgaatgctgaggct

SEQ ID NO: 325982 - DNA, 412 bp, Homo Sapiens
ctagactaggtactgataattatagttaactcttcttactaggtaacttgtttttaatactctaaatttcatactatattactcaaaattcagaatgtaagccaaagagagataaagtatattaataaatgttagggtttaaacttgtatgatacatttccaaatagggtattatatatttttaaaatatataatgtccatcttttctgtattggtgcctattacaaccataaccccggaggtactctcatactgtgaaagtcattgctaaattaggtattcactttcttaaacacatttctgagaaaagggtgtctttttagggcagatgacttagaagtgtcttttacgtagccaaggcaaaagattgtctattgaaagcttggaagggctatatgtacatttggagggg

SEQ ID NO: 325983 - DNA, 854 bp, Homo Sapiens
  misc_feature (623)..(623): n is a, c, g, or t
gcttttaaaaagtaaatttattaccacacataataagtccagagagtagagagattccatcatgtcatcaagacccatgataaatctttaaatattttgatttttttgaactttacactctgttactctcaatatatgggtctcatactttggccggttcctctgcagtgcctcaaactctgtcccctgagcagaaagccggggctgtatttacccaagtggctctgcgctgcacttttcataattgtctcacatttaggacaaagctgcaggtagaaacagggagaaaagagcagttgtatatgtcccttggtttcacagctcctcaaagaaacagagaattaattacatggtagatctacactatactggaatgccaagaggggagccatcaccagccctctattattgctggctcctacgtcttggaaccaaagcagcatcctgttctcagacactaacttgggtttggagacctgagtgtttggagacacgatgtctaaataataaagcttggagaatgtgggcatcgatcccactacctcttgcgtgctaagcaagcgctctaccacttgagctaattccccacatcagggcagccattatttattgttagcaggtgngcctggaacacaggtgatttcagggccttcagcaggaaagcagggctcctaagagcagatcttctcattgatgggccagggcaaacagcagtggctactcattgtctgcaaagaaggaggagaaaagggaacaaggagaaagtcacaacgggaaaacttcacgctgccaaaatgccaagtttagagtattccgggacagaaaagggcacgtcctagcaaaggaggacctgc

SEQ ID NO: 325984 - DNA, 816 bp, Homo Sapiens
  misc_feature (416)..(454): n is a, c, g, or t
atggattaatatgggtttctttagaatacctataactataagagcaacatgaaattgaacattttgcttatctactgaatattttcagttttcccagaaatacagagaaattttctcctttatttgaaccgctgtcttctccaaattaccagaatcttgtttgtcaacttcccagcatgtatttcagaacaggtgatgagagggggtgaaatgggagtgtccactaagaaagatacttcaatacaccatgaacaaagtgggttatcaccttgcttttatcctaagagtgcttataatctggtcaagacatgaaatatcatggtttcacctgttgtttttttatcggttaactatatctatttatccctttgagttaccgtcaaagatggtcaatctgtctgattttctttcatgtnnnnnnnnnnnnnnnnnnnnnnnnnnnnnnnnnnnnnnngtgcttgacttttcaaaactcaataaaaacaaatttctaattcatttaaactttatgaggaaaaaataagaacaacggagatggagctggatcagggacagatgctgatgctcaaaaatactaaccgctctgtgagttctaaggacaacatatagtgtgccaggcattttgctcaacttcaaagaacaagaaataaaacatgaagatcaagaaataaaacacacagtgtttgtactttggaaatttcacactctctaagataaatgtgtatgatcgaagatatagtaaatttaatatacaaggtcctgggttgtcacacacccacaaaaaagaaatgatcaggggctgggcgcggtggctca

SEQ ID NO: 325985 - DNA, 553 bp, Homo Sapiens
  misc_feature (315)..(315): n is a, c, g, or t
tccactccctgttctccaaaatgtattgagaaccttacccatcccagatgatgagagtttacaatctgtgacttctgttcttagttgatagtatttctttatgttgcccaaagtaacagattcaacaaaaaatgtactgagatccccatgtaacaggtactgagccaagtgatctcacatacctgagctcattacatcatttatttctcataccaaccctgcgagaggttttattatccccatattatgaatgagaaaactgagcctccactatgttaaatattttgtctagttgcaaggcaggatgcaaggctnaagctttgggtttctttggggatgtaccttaacgaggtaatcaattggtcttgaacatttttacactgggaaattggttttgctgcacagcttgggaatgaagggtatacagaagaaagacataaggctaaatctaggccagaaaaataagacttcccccacagtagatagtgccacttatttagttagtttttctgtctatcatgactgacccagtctttgcctagtagtttatatt

SEQ ID NO: 325986 - DNA, 701 bp, Homo Sapiens
  misc_feature (260)..(260): n is a, c, g, or t
agtcatggcaaatgtccctgttcaactctagctgagaaagggcccagaagtctgcgtggggcaggggtggctgagtctgaccctgtctgtccctcgtgagtgaagcgctctctcttgtacttttctgggaagcccaaaggttccccccagaggcttagcacagactgccctttgcttgtcagaggaaccaggcagctcttctctcacagcaacataaacaaacttgccctttctgctcttttctcctctcctggagaggntcccctgcaccactctctgttgacaacatgccattttctgttccaattcagcatgtttacttctttattgtgattcatgtctgagtttccttttgaatcaaattattgcatctccctggtgagaggtgccatatgactaccttgttagaacaaaatcaaataaaaaacctgcacgtgagctctgctccatctcatccccaccacatggtatgctcttgttcggacatacttctgtcggctacttgatcagtaatgaatccttctggtgtttaggccaattttgagacactgctgtcttgaaaacgataaagaagaattggttgaaacctgttcagcagagagaacatcactacttcaaaaaaattttacaacataaatgactggcttttcctgataatatacagattgaagaagaccagaaaggccgatgggatgattaca

SEQ ID NO: 325987 - DNA, 742 bp, Homo Sapiens
cagttcagttgtgaaatggtatttatatgtcactggcctgattagcgcttagtaaaagaattcttgaaattaaaggtttagcttcttacttttagctactgtcatcttcatatgttttgatttataataagtcagcctcctaattaatataccaattatttaggagctagagaactagatcttgggcttcttttccattgtgctttccttttggccacctgactgattgtaactcctgtttaggttggctggaggaaacggagagaaaatttacatctggtggagcataaagaaaccagctagaggactggccttgtcattatctaactgtgttgtgacgaactggcacttcctcatctctaaaaggcaggggccctgaactagaagaccgccacgtcacatgatggaaaaacactccaaactaacacttcttacccttgtgagcagccctactagcagatttaatgtgggaggaggttcacactacgggataaaaatcaagttttaggattccattttatctaagctgaccaccacaaggcagaggatcaagacttagctaaatatcagccctcaggcaagcttcacttccccatctgtgaagggagaataaatacacatgttaagataaatgagagagctggtcaagtgtttcgagctctttggcagacaagcctgactttccaaaaaaagacaaaccacaacttcggagccagtgctatttcttctgtgcatggtgagg

SEQ ID NO: 325988 - DNA, 657 bp, Homo Sapiens
  misc_feature (418)..(433): n is a, c, g, or t
  misc_feature (595)..(595): n is a, c, g, or t
atctgctggatcttttcaggagacttgaatgtaagctccacagttgggctctgtagctaggtccagatatatccttagaaagtcattaaaaccacccaggctgtatgtaaaaatgttgctctcttgatgatactctgagaaaaactgtaaaagatgtaaagctttgagcttcttgtgaaatattctccttaatgattggagatgatgtatttccttgatttgtgattataatttgggtaacgttccataggcctgtaggtcattttccatgtattgttttgtgtttggaaactggcactttaggcagttgtaggaaccaaagttgtgggaaatggactccttgttaagcccacataaatgtttacaggaactgtatacagactatataacctcttccctcatccttcacttcattcannnnnnnnnnnnnnnncaggccatcatctctcagcaaggtgacatatttgtttttgacctggagacctcagctgtcgctccctttgtttggttggatgtaggaagcatcccagggagatttagtgacaatggtttcctcatgactgagaagacacgaactatattattttacccttgngagcccaccagcaagaatgagttggagcaatcttttcatgtgacctccttaacagatattta

SEQ ID NO: 325989 - DNA, 617 bp, Homo Sapiens
aaatttgtttaattttaactgttgtatattttatatttaaaagcacacaatttggttcatatttgaaaacccagttgataatgtcagtactccagtacctgaagtacttagtccttttatatttattctgcttactgatatattaggtttatctgtcattttactatttgccttccatttcacacattccttttgtcctcctttgtctctttttaaaaattgatcaaatgtttattactccttttcctttaattatacatgttttgctcttaagtggttagcctagagattgcaacttgcatcttcaacctattacacactgaaaatacatattattactttaaatttccattactttccttgaataatgcctaaaacctagcactttatccgtgaatactcatgggaagttgatctcatgttaaccttttggcttcgaaatccttcccctgtgggaagggatgaaagctggagacaaacttatgctgagagaagctgtccactcctctccgctgtccataaattggacttgaccagaaaccaaactgcagctgggctggttggcaaaaatgattttgccttggtgcagctgatgcattaggccaaactaggcattg

SEQ ID NO: 325990 - DNA, 532 bp, Homo Sapiens
  misc_feature (358)..(470): n is a, c, g, or t
aattttgtgaatttcttattatttaaatgtttcactctgacctgtgtcagtatgtttgccatttttagttgcttggttgtttttgttagaaagtaaaatgtattgttgcaccatgcatttgttatgtgtataaaattttttacttcacaaaactgtctataggcaattagcaattagtattaagaagttgtataaattgaaatcactttcatatactaaaaactgtaaaatgagagttattacaaaagatgttgtttattgttttattgtctcaacctttttaacataaaagaccgggtcataattgtgctaaattagggaagtaaaaagagaattgagctagatgcagtggctcatnnnnnnnnnnnnnnnnnnnnnnnnnnnnnnnnnnnnnnnnnnnnnnnnnnnnnnnnnnnnnnnnnnnnnnnnnnnnnnnnnnnnnnnnnnnnnnnnnnnnnnnnnnnnnnnnnttcatggcatgtgcctgtggtctcagttacttgtgaggctgaggtgagatgatcacttgagc

SEQ ID NO: 325991 - DNA, 613 bp, Homo Sapiens
  misc_feature (287)..(287): n is a, c, g, or t
tctccgactaggaatcatccctggtccccttttttgtggatagtatttaggaaataataacttggcagttggtgtgtttactgttactgagctgtgactgcatttatgtcctctcggtagaatgaatcacaaaatatatgtatatgggcacacccaacaatttctctattgttcctatgtatttaaaagatatgagttctattctaatcccacactccagggttttctatgctctcctcattcctatttctacaaataccttctcctaacagggagaaaccttgccnatcatcattctcaacatatttgctcagtggtaccaatctctttaacaatgctgcccatctcctccccctgtcccttccacacctcaccctcagccctcttgggtgccagcagacacatagccacaactcctctcatcccacaatgcaggtctaactcctccactctgggaagggaaggcaaaagagacacataaaaactcaaagaggggaatcaaaagaaagaggaagggaaggccacattgattttttaaaaaataataaatcatcttttgattgccctaataaacatctcttggtgatgatacagtttatggatatgactagac

SEQ ID NO: 325992 - DNA, 645 bp, Homo Sapiens
tttgctcagactctacctaatgacttttgaactgaaacattcgagtttttaaaaattacattgatcatatatttatttcaaaaatttctttctcttttaacaaaaacacattttaatttaattttctgttcttgacacagtttctactcttttcccatttctttaatcaatttaaactcttatatttgcaagtatttttttagaccgctctaccatcttcagttcttggggttcaaaagatcccattagttgcatccactcactgtgcttcaacgtggctcacttctatgtagggcttataatttttttactgtggggtaatttttcaagaggggattgtttaccagagaaatcccagtgtgttgggttgtagactggtccctgtggagtcactcctatagaataattttgtatttgcctcagccaagtatttgtgagttttactgatttggaaagctattctgttagcttctcatgttgagatgtccacacccagggaatatgacccttagaaggacgagtggcacaggcttagcattctgctttacaggtgacttgttttcaccttctgtacgcgcgtggctagtttccttgcagcttttccaggatagcaagcagagcctgcagattagaatgcagaccctt

SEQ ID NO: 325993 - DNA, 858 bp, Homo Sapiens
tgcattccggatataattatgtttaaaacatgattcagcacactttatttcttctgaagtatttctatttccttcttttataaaacctactatttctatcttatttttaaagatcaattgcctgcatgttttcagagccctttcagaaatatctttggttattactcatctgtgaaaaggaaatttaaacaaagtttgagaactgttcatttctcaaaaaagacagtggaattgagtatctgtttcctggggatgttaagtcagcgtcaagaccaaattcatgaggattgttttccaaagaggaagacagggagtaatacgaaagaatgactgaggtttcatgaactgtatcagcttcctggcatgagagcactcgactttatatagtcggatactgtgagtcagttgacattgttcttaagaaaacttgtttttgttagcatctcagaatttgccagagccatattacatttaagtcttgcgttccctcaatcaatttgaccaatgaactttttgaagatcaatgggcaagataatagtaagtagaaggaaaacaccaatgatagttatttctcatttggggtcagcattgccaagctgctcagggtttccatggcatcatttccaaaccctcctattaaattctaaaggagaatggatctttgcctgtggacagtgtaaatttgacaacaaatacagggttgatagactggtggaatagaaaaacacaagaagctacgggatggaagctaggccatcgtcaccaactgccatggggcagaacagaaagaagcatgatgttttgaccccacagaggagacaacactcaaatcctcttcagtgaacggctgtgtttct

SEQ ID NO: 325994 - DNA, 1017 bp, Homo Sapiens
  misc_feature (37)..(37): n is a, c, g, or t
  misc_feature (69)..(69): n is a, c, g, or t
tttttggccctaaaaccccaagttttcggcacgaggnaagaatgctgctgtgaacaggggagtgccctntgcctgtttgggtccctgctttccatttctttgggaggtacgtggagaggagattgcggggtcatgtggtcattctgtttggctcttggaggagcaggcatcctgttttccacagcagctctgccatcaaatggcactttcttagtgacacctcccgtatctctccccataaatgtatctctccccataaacattgcaactcctgggctcaccttccttctcctgtaacttgtcactgtggaactcttcaggtgtggcctgagccgactcgtaggcagcccagggagggccagcagtgaggccccttccccactccgtggtcagtgccttcacacagggagtttggaggtggctgtagtgggaggactcacaccgcagaaatcagccagtgctgcaggtcaggggccgccatcccccagagctgctgtgagacatcgaccagcacatcagtgggctgctttccgctggttttatttgcatgtattttggtctgtttccctacctagaaaataaactccctgtggcagaagttttatctctctgctcccttcttggttcccagctcttggaacagaaccagacttctggccggggctcacgtcagtgcttgcaagatgtttgttggcaccaggctgtgccaggagagcatcattataaactgctgatctactgtttctttgtcaaacgggaggagataacatgagggtcatgagaaatgtttgcagacggagtgaatgccttgaaagtgctgcgaccaggtgctgacacccggaggtctggctgcttgaagtgttagctgacacggaagacacacggactttccatccattccccaaaactccccctccctgactcgtcagctgcataaaaaccctctccctatctctttgtcaaggtgatttgagaaatcttgctgtcttgtcttcttgctttggccaaatggaataa

SEQ ID NO: 325995 - DNA, 721 bp, Homo Sapiens
  misc_feature (707)..(707): n is a, c, g, or t
ctatttatttccctttatctcttcctttatgcttaaaaatatgggtaatcaaatttcaggtggatatatcttttgattcagcaatttcacttttgggaaattatcctgcagaaatattggcatacatatgaaatgatacatgtacaaacttattcactgtagtattatctgtaatagtggacctggaaacaacctaaatgtccaccaatatgggactagtttcaaaaacaatagcatattcatcacaatggaataaacaatactattatgaaaaaaatgagaaagttctcagtatgctaatattaaaagacctctaagatctactgtgaaattaaaaaacaaagtatgtatactacgcttttctctgtaaaatgtgagagaatatcactatatatttgtatttgtttctaagtgtatgtgtgtgtaagacattctggaaatatttttaagaataagtaaaaatatttcatttttaccatttcaagcatgtaaaaaggagaaaaagactgactatctggattaaaacaaaagactcagaaaaaaacaaactactaacaaagttaaccagaaaatcaatgatttgaatgagttcctatgtatcaaatgttcattcaaaattaaggtttttgttcacattatatgaaactaaatatttctttcaatggaccaaggcagaaaaaaattttgttttactatactgtttcttngtttactgatactt

SEQ ID NO: 325996 - DNA, 483 bp, Homo Sapiens
  misc_feature (45)..(45): n is a, c, g, or t
  misc_feature (68)..(126): n is a, c, g, or t
attttgagacagggtcttgcactgtcacccaagctagagcgcagnggcacaatcatgtctcactgcannnnnnnnnnnnnnnnnnnnnnnnnnnnnnnnnnnnnnnnnnnnnnnnnnnnnnnnnnnatataggcacgtgccactgtggttggctatttctttaaatttttttgtagagatggggtctcactgtgctacgttgcccaggctggtcttgaactcctggctcaagcgattctcctgccttagcctctcaaagtgatatttttaaggcaattttttacattttatgggagaaatagcaatccctcatatccaaatccaatctccacccctccctgcctccaaagggtctagttattgaaaacgttttaggcaaaaagaaaacatatgtattgggaaacataaacaggtagaatcagaaataaagacagacctcatgtttataatatggaaagggctttcagtcacaagtcattgttc

SEQ ID NO: 325997 - DNA, 674 bp, Homo Sapiens
  misc_feature (639)..(639): n is a, c, g, or t
gcacttttcccaactgtaattttatatttctttccatctaactcaaatgcctttgacagatgtgtcttggtttggcttatgtttgtcttcgacatctagtcttgtgtttggcacatagtgggcaatcaaatatttgttgagtgaggaatgagaacaaagagttgcagagtggtgacaggagctgtgacaccaatgggccagtggggaaggggaggcactcctgtagaaagatgaccctgctttggaccattgagccgtggtgaggtccttcaggtggccaggcagaggccaaagctggggattcagatgtgacagcttaaatcacaaggtggctgcatgttgcacaggcctcagcacagagggcctgaccttccagaggacccctgcagctggcgggagggtgtgtgatgacacggctgaagagagacagtcagaggtcagagagggaaaagtggtgagagtagactgttaggaagtttcatgaggggagcagtgaccgcgctgaatccattagatcagtgaggagacggaagagaagtcgggtgtgaaagcctttttccatgcttagtgccgggaggtcttccccggagcttacagctaacgctttagggtttgtaggggggtggtccaatctggctnccctgctgtgtgtgcagttcccctcgtgccgaaaa

SEQ ID NO: 325998 - DNA, 1015 bp, Homo Sapiens
  misc_feature (703)..(954): n is a, c, g, or t
agcaatttattattatttggtacaacatgaacctcagtatttgctcaaatgtagaaaaggattccttaatatgctgagaaatatccttagataaatccaactgtgaaaatatagaaaaactccttactgtaattactgggaaccacaaagttaatttttacagggtagaaaaactccacaaaaatggagattcatacttaaaaccttcttttactgatagaacattctttctggtattataaaatgaacaaaagtgtacagatatgggcttggggctagataatatccatagaactcgccattttaagcaataaaaattggcatgtgggtgcatgcctgtaatccctgctacttaggaggccaaggcaggaagactgcttgaacccaggagttcaagactagcctgggcaatgtagtgaggcccactgtcgctcaagggaaaaaaagacatgtttttaaacacacttctaataaaaagaatttttaaaaccaacttttttgcttctagatagtctcaatgccttggatttaaaacatgactccttcttgatacaatgaattataaaagcaaactagttccacatattaattatacgttcaagtctagttcctaaaaagtcatttctctttaaactttcttacctatcaatcaatcattttcatataatctaatgtctaaggactccaaatattggtacggggnnnnnnnnnnnnnnnnnnnnnnnnnnnnnnnnnnnnnnnnnnnnnnnnnnnnnnnnnnnnnnnnnnnnnnnnnnnnnnnnnnnnnnnnnnnnnnnnnnnnnnnnnnnnnnnnnnnnnnnnnnnnnnnnnnnnnnnnnnnnnnnnnnnnnnnnnnnnnnnnnnnnnnnnnnnnnnnnnnnnnnnnnnnnnnnnnnnnnnnnnnnnnnnnnnnnnnnnnnnnnnnnnnnnnnnnnnnnnnnnnnnnnnnnnnnntagtaccatgggagccaatcttccccacctcgtgccgaattactggggcgcgtagggccaa

SEQ ID NO: 325999 - DNA, 1456 bp, Homo Sapiens
  misc_feature (1238)..(1238): n is a, c, g, or t
  misc_feature (1286)..(1286): n is a, c, g, or t
ttttaaaaaattttcccaggaattttattttttgcatccagcatattaaaaacagattatgctttccaactagagatggaactaagaagaaatgaaattgtgtccccatgctttatctagaaacaagagtttatttacacagtgtccttcttcaatatcatggtgtactgggagaagcagggccatctttacagcacggccaaatgaccacctgaagaccccccattctgccttgagtgcttattgcgtattttgggtggaggtataaggcatgagggaaaggtggcctgtcacttttacacattggagaataattttgcacattcaagaaattttccttgagaaatgccatgtttggaatagcttccagagattgattgagaacaaaagcattaaagcaagtgcattacatttagaagcacaatacattggggaaacattctcaaaagctcaaagagcaggctgtttttccactgagctaaataggtaaataaggtgtgcatactgttgcatataggtatatgttcagagctttcaaaagtcacatcctgccacaattaacagctaaatgagcattcttggcccctgacctataaataaacactctaattctgcaacttgctcacagattcttaaggagccactctaaaacaaaaatgcctacaaactggttagaaatctgcaaacccagaaatgcaatacagttatcccttttttaaatgacaacaacagaaatttatattagcttttggaagagtgactaagaagaactgacatccattttcacaattaagaaataattattcacaataccgaagaagccaaatcttcaataagaaaacgtgtggcctctcacaaaagaacacagtagtgctcagctccaaccactgaatgcttcctttttcagtttgtctaggcttgttcgctttttgtcaggtgatatatgtcagagaatattgacaatccttcaagaaaatgattcaaaaggtgatgtacaattggctggtgctatcccgtaatgcctttttgcctctgtcctaattttatggaaacaaagtaagggctttaagcccaggagataaatgtaccactcaaaatatacctggacactcgtgctcaggtcaaacgcctacaagatgtggttaagctgacaaacagaattccttgccctgtctactcgaacactaacaccctgggagttcacatgcttttctaaggacaaaatttaaaactcaggnctgactgcacagttggaacttgctgccccattctgactgtttgactcnaatcctctttgttctccccttcccatgcattcttcctatctttttacctctgacactttttaatgatttcctccagattaatgttttctaagacatgtttcataagttacaacacaaagatcctaaaaggctagagagcattagttaatctcagttaattttggagatct

SEQ ID NO: 326000 - DNA, 814 bp, Homo Sapiens
  misc_feature (36)..(36): n is a, c, g, or t
  misc_feature (489)..(489): n is a, c, g, or t
tctggattttaatggccccgagaaatcaagtcaaancaggcttcccatgctgttgctgacttgccagccattgctgacctaaaaatagaggaaggggccataaaccaatatacataggtggcctctaacagctggaaaaggcaaaagaaatggattctcccctatagtcttcagaaggaatgcaaccagattccgctttggaattctgacctctagaactacaagataaatctgtgctggttaaagccattgagtttgaggtaatttgttacagcaacagaaaattaatacatctccccgatccgggtggctttgttacaacctctgtaactgtttcctcctctgtaatgagaataataaaatgagagtaaaacaagctgtatttccaagggctatggtgaggacccactgagatagcaggcacacagtgccctgggggtagggtactgcaggcatcacatgcatccagcagtgcaagtggattcttcnaccagcccagcccacacaagccatggaagagatcagcaaggctgaaaaggtggtgtcctccagggtcagggaggggaacccaggagaatgaggatgacaatttggacagggccacagccactgcttgagatgcaaagttgtctcaagagcaggaatactgtcattcccagttttctcccaggcagggcagtaatttcagaatctgggtcttctgccactgactggctgtgtgaccacaaacagaccactaaccactctggtcctcagtttgcctacctataaagggacaaggctagatccaagtagtggcaatgttccttctcac

SEQ ID NO: 326001 - DNA, 418 bp, Homo Sapiens
gaatcttgaatattcatgtttattgtccattttttacttcagaatgactggtgtttttaggagtgggtggagcttggaaattgagaaagggaagagaacaaggcagggaccaaacagggacatggccaagacaagacagttgtacagctgactctcaggccttcgtggaaaccatatggcaggaaggctttgggggcatttaccctttgccagctagactccagtcctgcactggattcaacactggatcccatctgatggaaacttggagaagcccatgcatgactcagcgttctccagtggggagactgcccatgttgctgactctgccttgctttgcaggcagaagcaagagactgaagactttttctctagaataaataagcccaattacttgaaaatcaagtagtacaataaa

SEQ ID NO: 326002 - DNA, 599 bp, Homo Sapiens
ctgggtaacaattaactttattatcagtagtaactgtcagtttcaaccagcagcagttatcgctcccaccctttgagggtgggggccccgtggctaatgctgtctttaagaatacacatctgtgtacttcctgtttcttagctgagagaggaggcctcaacaatataaagcgcagggagctggggagcggcaagccagtgggaatgggcacctgggcataagtcagagaaggggaaggagagttactttattctcttctgggtgcccagtaaggaactttatcaaggtactagtgcccatcagctccctgccccaagggcacccaggggccccaggtcagcatgacggatttaagacacattacgttctgggaagacggctaggaaggtaggtccagccccacaggggagaggacactgcatgtccagatgggggcacgcaaaatgatacctccaccctctaagccctggaatctgtgaatgtgacctcacttgataaaagggcctttgcacatgtaattaaactaaggatatcaaaatgagattatcctaggtttcaggcgggtcctaccttcaacgacaatccaacctcttacaaac

SEQ ID NO: 326003 - DNA, 976 bp, Homo Sapiens
tcttgtgttttaagtccttcattagagaccacattataggagcaataaaagctttaccatcctaccctacagattatgcgctacttacaagggaaaaaatgagcacaagattgcaaaaattccagggctgctttctttaggggttctaccaatcctactctatccagagagtgtgtaggatcaaaacgataaaaggaaaatcctatttcacaatattgttcaaggagggtatgaaattaaaaggctcactaaactttctgataaggttactgacaaggagaatctgttgaaacacatgcaaatgctatgtcaacataaggcgctcagagcagtaaagtcatgtgggaggggggaggtcaccacttcctgtttaccaataaggaaaaagtaggacaatttaaaaattcttgaatcacaattgcacagaagatatttactaaaataactaaatgtcttggaaatcaaacagcctaaaaaaaattcctcagctacttatttcatttctcacaaaattttagggcagttcagccaaccaagtcaaccgcctcctattaaccaaacatctattctgtgctcagcaatgaacctgacaaagaggaatataggcatgcaaggcacaggtccttgtgaaaaggacaatcaagtctgagacactaaactcagacccaaaacaatgaggatcccatgcctgctggactgccggcttagtgattccagcatttcccactgctagcccattcagtttgctgtcctccccctttcctgcattcccaacaagctgtcactactgatcagcttatcaaacatgtattcgatggctgcttgtgaacaacactgagctaagcacacaatttattttagcaggaaaaagatgcaaagcccctcttcacttttagcaactggcctcctatcaacctcttcaactctagtataagagaaaatcaaaaagtcaggtctcaataaagggtttatcttt

SEQ ID NO: 326004 - DNA, 700 bp, Homo Sapiens
  misc_feature (33)..(33): n is a, c, g, or t
  misc_feature (278)..(309): n is a, c, g, or t
  misc_feature (677)..(677): n is a, c, g, or t
tggccaatcacagctcactgcagccactaactnctgggctcatgtaatcctcctaccttagtcttccaagtagctgggattataggtaggtacaagccactgcacccaactcgagaatggtttctttttaaagtacagactctgcactaaattgtaaatcttctttccatagtatcatgcacactgtacagaggcttttgggacacaggtttttaaaaccaccaaggagagtcagcgaatataaatgacaattatgtacttaagtaacagaaacttgnnnnnnnnnnnnnnnnnnnnnnnnnnnnnnnncattaaataacctgggtttctgaagtatacacattgaataaaggaatataatggaaaaatattgacccaggagttaggaaacctgagttctcatgcacaaactcatcgttcaaccttgggtaaattagttaacctttatggactttcatattgtcatctgcaaaatgaggctattagagctgataattcgatgattttttttactatttcatctgttatcatacttaccatttcactacatatcatcaagaaacagactttaagctaaataggaatgaaggaacttaataataaatggccttgagctccctgcaagattattctatcagaagaataacttgcattttaaaaaagctaacacttactgnctcgtgccgaattactggggcgc

SEQ ID NO: 326005 - DNA, 392 bp, Homo Sapiens
  misc_feature (37)..(37): n is a, c, g, or t
  misc_feature (348)..(348): n is a, c, g, or t
  misc_feature (355)..(355): n is a, c, g, or t
  misc_feature (365)..(365): n is a, c, g, or t
gatggtgtctcactctgctgcctaaactggaatacangtggcacaatcacagctcactgcagccactaactcctgggctcatgtaatcctcctaccttaagtcttccaagtagctgggattataggtaggtacaagccactgcacccaactcgagaatggtttctttttaaagtacagactctgcactaaattgtaaatcttctttccataggtatcatgcacactgtacagaggcttttggggacacagggttttttaaaaccaccaagggagaggtcaggcggaatataaatgacaattatggtactttaggtaaccgggaactttgattatatatatatattttnctatttnattatatacntttaaataacccgggggttctggaggt

SEQ ID NO: 326006 - DNA, 709 bp, Homo Sapiens
catattttaatacattttaatggtatttattaacactacaataaaaatgtgttaatgtgccttttgatgaagtaattctgtatcttggaaacaagtcagaaatggcgagaaattcagctgtaaagctgctcactgcagtttttattctaactgggaactacctagatgtcctttcatgaggtacttgtataaaatgtctcatcatgccactatgaaaatcggtatttcgtaagaaatggtaatagctttgtttccattgttatgaaaaactgacaagtctgaagaatcacatccataaaaaggattatgtgatgataaaagtcctaaaaatacccacatcccacctcatggaagaagcagcattaaacatgtttacagactgaccgccacacgttcacacatagctacaacagaaggagaaccggcctctgtcaaaagcttgtcaccaaagtcctttcttccatcaccacctcactgatccttgccacagatcagtaactcatcaatcaccagctctcaccttacaggtgaggaggccaaggctggctttgcacttccagagctggccaggaagctaacacgtgcccgacacacctgttacatctcatggccacagcacatcccaacgcaggctcaagcacactgaaactcactatgtcgagccctgttacccggacccataggttactgagatcttgctgtgccgaat

SEQ ID NO: 326007 - DNA, 416 bp, Homo Sapiens
  misc_feature (376)..(376): n is a, c, g, or t
ggctaggggcagttaaactttgccagtagagggtgctggagggatatctaagaagaaaggggtgttttctagctcctgccacactatcagtagttttgttttaatgaacaccttcatacagccctgctgatgaggacccaacacactccaggacttgcacaggtacacacagtgatatcccaactccctctgcataactgcccatcaaccttggctcacctgtacccggaaggttgctttctgctccccagaagaagtgggtgtaccacttttacactcccaccagcagtatatggaaaattccaactggtctacctcctttacaaaacacttgggtacgggtcagttcattctttttaccctttttaggccacantaatagggtatgttaatggattttctcacagtagttttta

SEQ ID NO: 326008 - DNA, 609 bp, Homo Sapiens
ccttcctttcttttttattgatgcatagtagatgtacagtttcaaggtaatgcaataatctaatacattcatataattggtaaagatcaaatcagtatacttggaatatccatcaccttaaatatttgtcttttctttatactagaaccactcgaattcttctcttctaactatagatctaattttaagtgcatagaaagtagaccattggattgatcctgagtagcagggaggtggatgcagggaggtggccaaaagaaaaactggacctcctcaatccaatgatcaagcccttaggcctaattttgagtgtgcaggggataggaaaacaaacatgaagcctaggagaaagtggggagattagggtgggcttgagggcttgggggtctgtgaggagaagaacagaggaacaggattggcggaggcaggaagggaaggggaaggagggaagctgtggtcagtggatgggtctcagaatctgcagagcttatagcgacaaaagggcagggtgtgggcacaggggtggggtctgaagcagaatgacagaatgtgaaaggagctgaaccctaaaaggccagagggtcccagggtccctcaccgacgtggtgc

SEQ ID NO: 326009 - DNA, 782 bp, Homo Sapiens
cactccagcagatagtttgcccctgaccttgactacttttcttactgctggtctttacggctgaatttttactactggcctctattgctgaggcaaacccagtttaggctctcaattgctcctgtgttagtggcacgggaaccaaaagggtttactacccaagtgacctcttcaaggtacatgagggtatttgaggatatctgtaccgctatgctttgttcacaaagccaccagctagaaagcaaaacagtggtcatatgcggtgatcaatcataggctggcaaacaacacgaggtcagtattgtattgtgagtttataagtccaatagttttgtatgctgtccagctttttgtttgacaactgggaagttgagaggaagaaaaacatctgagacagtgtatctgcctctctccatttttacttccactattaccaagacggggtcaagaccaagaaaaagataacttttataaaacttttcatacactgcaatatcctgatgatttttaacaggtcttcaactgactttaaccattttaagaaatgtatcttacagaagcacttcataagtctaagtgttttcacatacagtagtacttatcattttatcttatgttcatgtgtctgtcccagacgtaaactgtgaactcatgtagagaagggctatgatgtttctgggttttgtggtttttaaaatttatttattggtacttaatcccaaatagccaggcacacaaagcagtcaatactgccatttgacgcattaggaaattggagaata

SEQ ID NO: 326010 - DNA, 737 bp, Homo Sapiens
  misc_feature (256)..(256): n is a, c, g, or t
ggaaacaggagagacaaatggaagaaattaataatccaatagctaaccttttacccaacggaacctagtactaggctctaatttccttaatgtgttagttatctattgctccttagtaattatcccaaaactttgtagtataaaacaacaaatatatttatagtaactcacacagtttctgagagtcaggaatttgggaacagcttggcctagtggctccagctcagaggctctcataaagctgcagtgagaaagntgttggctggagctgcattcatctgaaggcttgactggagctggagaatccacttccaacatggtctcactcacatgcttggttagctcgaggggttcaatctctcactttgtggacctctccttgtggttgctggaatttctttgtaatttagtagctgacttcctctagtgcaagtgaccccagaaatggagcaagacagaagtcacagtgtcctttatgacattgtgatagcttcagaagccacataacctcacttcaagccatattctataagacacacagaccaacccgagacatgtggaatgggattactcaagggcataaataccagaggcagagatcattgaggccatcttggatgctggctaaccgtacttaaaatcctgtgttcatcccattcacaaatctagagagggactcttaccctcaattttcagatgtggaaactaaggcacagagaagtaacatattgatgatc

SEQ ID NO: 326011 - DNA, 920 bp, Homo Sapiens
ctgtaggtagcaagtatgaattcctccatgacatctgggctacaagaaatgccaagcttggccactgctcacagtacccgggactcataagaatccatgcatgccttctcccatctaagacatgcgggatccatgccagggaagaatgaggcacatgccagaggatatgggggctgggaggagggcactaacccagagtgatttgaaatgaggtaggcattcaatgggcccctggcaaaaaagagaaagaaggacgaggggagctgaaaaatgtcttcatggagaaaggagggagggaagacagggagggaggggtggtccaactggccctggagcaggggaaaatggaaatgtagcagatatataagctaaactgaaatctcagcacagagctggcctatgaatttctcccagagggaccttctgcctgtggggtaaaagggagcataaacttccagttctgtttgcagagagccctgaggaactgacactgaccacagccagatgagaggccttctcctcagctgccaaattctgctctgcactgcccaacagtgtcttagctagggtagctggctccatcccagggccaacagccaatttcgattacatttaaggaggcagtgtattgggggaccaacaagttttattgtttgataccctgatcttagaacctaaccctcccagaggtgcaaatcacaaccataaacaaatgtattgtaatagagaattaagcttataaagatacatcagtcaggggacagaaactataccaattatttaacagggacaatgtaatacagagaactgttaactaggtttatggttattaactagataactgaaaagtcaaaaaaacaaatctgcagtatcacttaagttagtaactgcaagaggcagctacccactcgggctgagtg

SEQ ID NO: 326012 - DNA, 547 bp, Homo Sapiens
  misc_feature (12)..(12): n is a, c, g, or t
  misc_feature (417)..(417): n is a, c, g, or t
tgaggttcttancatttggtttgtaaatttttacatatttatcccgttttcagtacattattcctgccttagactgtgcttggtgtccccaatccaaagacgctctattttacggtctccagagaataagcctggagtcttccacgggagtgggggaggtgcagtcgtctagctttacagcataggggaggggatccgggaatctgtttcttaaacattgaaccaccttgcaatttttagctccttgttcatttccatttccagaggtccttgttgccaccatttccttttttgaggtcctgtgataaaaatcaggttgtttctttactttctttacggctggtttaggatttggattacccaggtatcactaacctatcttctttttagcttcaaagttttgttgctgtgtcttcntcccactctctgttatagtggatttatgcctttttagaagtcctttaatcttacatcaatagacttaaggaaggcgtggaactaatgttatgtctttagtctgcacctttaactagaaatatgagcattc

SEQ ID NO: 326013 - DNA, 1001 bp, Homo Sapiens
gagttaaaaccattaaaaatatttattaataattgtttttaaatgccacttatttgagacagcagaaaccaaagcattttctttagaattctcacttagcttgtatttcacaaaagtgctttagaactcagatttctaccacctgtgtggagtgtaaagacaaaaggaagcccaacaaaaccaaaggcccaatggtgtctattcccagggccaaggtataaccccaggctaacccacctgccctgggctgagtagctgcacacacctgtgagtgctcaaagtcacacgcatgattgagggggtcaggcaccaaggtgcctttatttattcatttctcaaactcaattcccttcaaatcctgactcgatttaataggccaatggatgctactcatatttatttggtgccaaattattatttttttaaatccttacatctgcaccttgaaagcaaactgcaatatccagcacaacattgtcagagctgctgtatggctatttagctttattactgcctggctaatgcttaatacgcttcatcctttacagctggaagaaggatggtcactgtatttaaccagccatagtgcatttagaggtcaacagcttttatggactatttgtccaagaactttcagtaaactaccaagttgaggcctttattttggtcagtatgtataaatattcatatgcaattatccagaaagaagaaaaactggttaacaagaaacctactgtcatgtcagatgctggaaatcaatctttagctacataatatttacagaaagggttttaagatgcataatccactttttcagtctgtctcttgtatttcattagtcaattggaagtggcacaagtttcatctggaaaaaatattttcaccttttctaattcttttgacaaataagtttttgtctgttaagggatgagaatgctatttggctattacctacttttagaattcaaactaacccttcaaatgtctttatttagatccat

SEQ ID NO: 326014 - DNA, 821 bp, Homo Sapiens
ccgcttaattaattggttagattttgttgtaatatgttctgattgggaacttttaaccagagaataatatgaaacttacaccagagcaagacatgaattttctccatgtaaagtaaaaatgtaaaatgtttaaattttctttctagtaaaggtatttgggaaaaaaaatcaaattcagagatttaaaaacaggcaatccttttgccaattgtacagctgctatggtctgaatgttgcatccccccaaaatgcttattttgaaatagtaactccaaaaatgatgatattgggtggtggggccttttgggaatcattagatcataaaggcagaaccctcatatatgggaataatatccttataaaataggcacagaacttgtttgccccttccacagtgtgaggacacagctggaaggctccatttgagacaggaaccaggccctcaacagacactgaatctgtcagcaccttgatcttggacttcccagcctccaaaactctgagaaataaatttctgttgtttataagctacctagtctatggcattttactataacagcccaatgggactaaggcaacaaaaaatagaatggaactttaaataaaatatttaatagcttattattgaaatctcaataatcataaatatctaaaatgtgtaataacttgacatgataaccaaatatttaaaatgtacccaatacagcaattctgaaacccacacagaatgtttgccattttccagcatactccatacactgactttaatagaatatttaggtttagtgaaactgtgaagcaaacagtacttttttctctgt

SEQ ID NO: 326015 - DNA, 737 bp, Homo Sapiens
  misc_feature (340)..(402): n is a, c, g, or t
  misc_feature (427)..(532): n is a, c, g, or t
  misc_feature (714)..(714): n is a, c, g, or t
aattcgggcagaggggcaattatctccatctgactggtgcgttgatatatctcaggtagttccaaatgtgggagaaggcaaaaagagagtattatttactgttacttccccaagtcctacctataattttttacttttttcagaaagaaacatttaaaaggggcttaaaaacagaagccatatttgtgtcttgggtgagggtaagacaagatggtggatcccctcgccattactactgagacccatggcttataaactatcctacttataattttttatttttatgtatttcctttttgagacagagtcttgttccatcacctgttgaggctcactgaannnnnnnnnnnnnnnnnnnnnnnnnnnnnnnnnnnnnnnnnnnnnnnnnnnnnnnnnnnnnnngtgtgtaccaccacacccagctaannnnnnnnnnnnnnnnnnnnnnnnnnnnnnnnnnnnnnnnnnnnnnnnnnnnnnnnnnnnnnnnnnnnnnnnnnnnnnnnnnnnnnnnnnnnnnnnnnnnnnnnnngtttaagcaactgtcctcagccatcacctataattttttaaatgaacataatcaacatgtgccataacaaagactgtcccattttaatgtcttttcctgactcagtataaaactaccactggagaatttgtttttatttgtaaatgtgtaactttacatataaagtaaattgccactcaaantattccataaattttgatttttt

SEQ ID NO: 326016 - DNA, 507 bp, Homo Sapiens
  misc_feature (451)..(451): n is a, c, g, or t
  misc_feature (464)..(464): n is a, c, g, or t
  misc_feature (470)..(470): n is a, c, g, or t
tataaattattactgtacccatttataagtaagtttttgagataggtaacaaaaccagagctgcattattctcataaaaataaattacaatttttaaaaagtcaaataaggtagaagttttattttacaaacacatagtgcttactatgtgccaagccagtttctaagtgcttcatgaatactaattctttaaagtggatttaatagtgtgaagcaaaactccccctagttacatgaaccacttggggtaaaatatgaaatcagtccagcacagaggctaacattttctgaggtacctactgtgtgctaggagctggtcatatcttaagggctcactcaatcccaaaacaacccggggggttactccatataggttggcctaaatttacggatggggaaatggaaggacggggccacacttttaggggtaggaggggcacacatggactanggggtagggtacngggggnatggaaaaggactggggctaggagagaggtagggggg

SEQ ID NO: 326017 - DNA, 856 bp, Homo Sapiens
  misc_feature (442)..(442): n is a, c, g, or t
ataaattattacgtgtacccatttataagtaagtttttgagataggtaacaaaaccagagctgcattattctcataaaaataaattacaatttttaaaaagtcaaataaggtagaagttttattttacaaacacatagtgcttactatgtgccaagcacagttctaagtgcttcatgaatactaattctttaaagtggatttaatagtgtgaagcaaaactccccctagttacatgaaccacttggggtaaaatatgaaatcagtccagcacagaggctaacattttctgagtacctactgtgtgctagagctgtcatatcttaaggctcactcaatccaaaacaacccaggaatactcatatagttgcctaaatttacgaaggaaatgaaagacggacacacttttaggtaagaggcacacatgactaatggtaagtacantggaaatgaaaaagacattggtctagagagagtaaggaaaccaaacgtgagcgaaatggaaggtggagaagggtagagccataagcacagagagggtaaaaacaaaagaggcaagaatcccagagagcccaggcaaaggagtgtagctatttgcctcgtgggactaccaacaactacgcatccttcttacacggagggaatcagcacaggcatcgggagggctctacctcccataatgaggatgtaagtgggcaaatggtcactttgccagcagcctggcagccagggcaaggggaaataaccacaggtcagctaattcatgcttgggtctaaagggattaatgcaatggccaggaattcattcctgactcctgtagaggaggagagtctagcagtagagcagcaagtatccaa

SEQ ID NO: 326018 - DNA, 820 bp, Homo Sapiens
  misc_feature (547)..(572): n is a, c, g, or t
  misc_feature (730)..(775): n is a, c, g, or t
gtgacttacacatcataaatgactttcaaatgaaatttgaatttcaaaattctgtaaaagtggttgctcaaaagatgtatgatactattttaatcagtttaagagcaaaaatgtctaattgtatttaacaatggtatttgggcagccagaaaatattttaagcgttgctctaaaataatttgaagtagctcatctgttattacatcagatgcttcttgagtgcccaatttatacatggcctgtggtaaataccatgtgagctttgtaggaatacctttaagaatattcctcacctgttcgtaatatggaatgccaatctaaaaactacatgttttgggtggtctttatggaattttttagctataaccatcagaaaacaggcatacctagatgacagatgaaccttcttgatttttgaaacccattgaacaaaaatattttgccaattattgtgtttatgttatttaaaattttatgtaaaccttaattttgtagcagtaaattttgtttaagattttgctatcagctccctatcacctgagcaacnnnnnnnnnnnnnnnnnnnnnnnnnnctattctatttcggaatagagaatttacttaaaatttttattttctccaaaaatgtggaaaatatgtcacctggttccctggtttatggtagcatattctgtttaaattagtgtcacatatttagatgtgtggccagacgcttgatttattagttaannnnnnnnnnnnnnnnnnnnnnnnnnnnnnnnnnnnnnnnnnnnnnagctgaggtctccagcgtgggcgacagagtgagactctatctcaa

SEQ ID NO: 326019 - DNA, 529 bp, Homo Sapiens
  misc_feature (49)..(49): n is a, c, g, or t
  misc_feature (51)..(51): n is a, c, g, or t
  misc_feature (194)..(206): n is a, c, g, or t
  misc_feature (272)..(297): n is a, c, g, or t
  misc_feature (496)..(496): n is a, c, g, or t
  misc_feature (507)..(507): n is a, c, g, or t
ttttttaagagacaaggtctcactctgtcacccaggctggaacgcaggncnacaatcagaattcaccacagccttgacctccaaggctcaagcaatcctcccacctcagcctcccaattagctataccagtcttagtgtaatggtcataaaccttgtgttcaaatttgggtcacaggtgttcactttgttcacnnnnnnnnnnnnnaaagacagagtactccctctatcgccactgcactccaacctggcgacagagtaaaactctgtctcnnnnnnnnnnnnnnnnnnnnnnnnnntcgtgaaccaaatatttagaatcatttacatttttatgctcatcatctagtatttcattatcgacttaattttcttaatgcttcttgtctctaaccgttgatctattgaatgaagtattgaaacaatgagtaagagttaataaaatacatgactaagattaaaacaatatgaaaccttcatgacagaaggattaagctnaattattaacnggttacagcaccactaatttgt

SEQ ID NO: 326020 - DNA, 522 bp, Homo Sapiens
  misc_feature (233)..(258): n is a, c, g, or t
acaaattagtggtgctgtaaccagttaataattcagcttaatccttctgtcatgaaggtttcatattgttttaatcttagtcatgtattttattaactcttactcattgtttcaatacttcattcaatagatcaacggttagagacaagaagcattaagaaaattaagtcgataatgaaatactagatgatgagcataaaaatgtaaatgattctaaatatttggttcacgannnnnnnnnnnnnnnnnnnnnnnnnngagacagagttttactctgtcgccaggttggagtgcagtggcgatagagggagtactctgtctttaaaaaagacaaaagtgaacaaagtgaacacctgtgaccaaatttgaacacaaggtttatgaccattacactaagactggtatagctaattgggaggctgaggtgggaggattgcttgagccttggaggtcaaggctgtggtgaattctgattgtgatcatgcgttccagcctgggtgacagagtgagaccttgtctctt

SEQ ID NO: 326021 - DNA, 672 bp, Homo Sapiens
  misc_feature (419)..(419): n is a, c, g, or t
aacagtgcagatcactttgtatttattacattactgaactttttcaaatgacagaattcaactccaaaataaagtaataaatgcctattaaataattattcacttgtatttttctctcctaaaattttaacacagcaaaacatcttaaagacatgtgaataggttcagtgcactctcagtggctcacaatatgaggcaaatactacatttatccataaaaatataagataaacagatcaatattttaaaatattgctgacataaaaggaaaaaataaaatactacacttttaccacaattattttggtagatgatagtagaacattgtttaaaataatgctcctctacaggacacatgctgtgcttggtatacttggcacattagcagttggtaactggctcagcttccatctggcagntttctctagcaggacccttactcaggcccactttcaaaccctgagctctgatctgcctgcctccacagggactattctggtacccttcttcctccgtctactcttaaggcttttctgtcttcccttatattcccccagattcacacttgctgccatctccattttcagcaaagatgcctggcacaaaactcacaaagctgagcacctcctccatagctcttaccccagatgttgtcccttcacagactaaatt

SEQ ID NO: 326022 - DNA, 719 bp, Homo Sapiens
  misc_feature (463)..(475): n is a, c, g, or t
ttacattctttacaccatttattcagtggttcatcttaaaagggggaaaacctgatcagccgtcaaacaatacactaattggaatctttgtagaattacccgccttttaacgatgaggtatgcagaatgggcaggaataaaagaagggtctgaaaagtgtgtgaaaaggaataacagatggtacttgagtgaaatagaatagaaaaatctgagtaaaggaaggaagaaaacagaaaaggagagattgagcatgcaaagctaaagagccttggcgtctttatcaaggatagttagtccttggaatggctagcttccagctccactaattaccgtctgatggctgaatctggttgctatttttatttaccaagttgagacatttccactcttgcctttggaatgccattctgagttgtggtatctaaatgaattcatgccacacaatcagttgaaagatactacnnnnnnnnnnnnnttaggctggagtgaagtggaagctaaagacaaaacccacagatatttcaatgctgcttttattaattcaagccgagcacttgccagtgaagtactaactagagacctggcacatgaccaaaatctgtgaactgcttggaagcctaggtgcctatggactatgatgcctgttctattattcctgccactggggtagcaattagaccatggcaaccagaatctgtgtaggttagggatccccctaa

SEQ ID NO: 326023 - DNA, 722 bp, Homo Sapiens
aactggcagttattttaatatgccaactttctcagatcttgagcaggaggaagtgagaatgaaaaactataaagatagaaaaaccacaatttttatgtattttaccttatatcaggcctatgtataaatatttttgattgttcagtggtatcaaccagttttatattcttcacatggattggatgctgtaaatcctcatttaaagggttagtaatgaatataacattagtttcccctgaacaaacattcttaaatccaacaaatgttgaacctaaaacataaataatagataagtgattgttttctctaaagaaagtgataaaatcagatttaatgcacattctgccaaacacatctttttgtcactacccttaaacatggggctcttgcctgattatgggtaaataagtctaccactatttgttgtagcctgttgcctcccaatatcaatatccatatcactgggtaatgatctcccatattttctccgggcttggccacgtaacttggtttggccaatgggacaatagcaatcatggcataaacagagatctggagagtgcttgcatactgaagcttgctctttcttagtgttccagggaattctgtgacttccaacatatgagtaagcctgggatacatgtggctctatcactcctatcgccccagctaatggccagcaccaactgtcagcaagcaccaacctccagacatggaagtaa

SEQ ID NO: 326024 - DNA, 514 bp, Homo Sapiens
ggccgcttaattaaaggttaactctcatttaacactttgattcttgcttccacctgttcattggttcactgggctgctatctgtgggctgatgctctaccaagtgctcagcctacagcagtcaggaggcagccatggcccctgcgctgatggagcttgtaatttagccccaaactgatcttcagaaagaggtacaacaaatagttccagcagttagaataaaagcgacacatccaaagaaaaatcagagaagcacatataatttcccatgcagatcaactgtgaaatggatgaactcaggtagcaatttcactgatctttgaagcagagaaatgagactattttagatctttttaggcttttggttttgaacatttgtagatttcatttaccccaaaccataatcccatattaagtagaatttttgctgttaaaaattgaaaactttttttcttcctttataattcagtttttcaaattattcgactatgagtaacttatttaatttaggattc

SEQ ID NO: 326025 - DNA, 1252 bp, Homo Sapiens
aacgccacaacaccacacacaccacatcaacactaccccacgatatctcagtgttcaccctcatactcaccaaatacccaacagaacgtacgcgtccccccaagcaatccttaaacctttcagaagtttcgcgtaataacggtacattcacgttaacgtggtgtacttaactctcccacgggacccattaaccctgcgcattctgtctcgactcaccttcgctgacgacaaagctcctcaacggccgctcaggaccagaatatgttctacttcgctgcaaggaacatgtgcacattggttgagttccagtaatgtacgatcattaacgcaagtgtgccagatgtaagttcgattactggaactcaagggtcaactcactcacaaatcactgaggctctcaagagcatattcgagtggcagaaacaggggttcttcttcagaggcacaggtatgtggtgtgcagacaagatcagctgctgttgaggacaggaacaaagccccacccacttcccctggatccttcctttctatgcagtaaacgccttaagacattgaggggaggggaccgcatcctcccacacacagggcacaggcaaaatccattgctcttatagaaagactagaagcaaaacttatatgcctctggaagaggggtaggaaaactctagccccaaggacacaggagaaaatcctttggtactgtgggaagggtagatgcaaaaatgtcctagttctgagataaactaaagaagctattccaggcccaggatcctataccagtaccaaccagaagtctgctacactgagggaggggagagcaggaatctcctgtccaagaccatcacagatacaaggcagaatttaattgccgtaggaaggaagagcagaattgctgagacagccccaccctaaggtttatatctgtctaagattgaggttgcagcaagacaacaaagaaaaccctatctcacccataagccctagcacagagtaacaagtaaagagagtctatccctgaagaggcgagagtatagatagagtccctctgtggcaaagacatgcaggaatagctaaaaggtaaagggagcattaggaacacagaagaaaaccacccaacaccccagtccccaatctagtacaagatattatagaaacatctcgtatttacagaaacttgaagccttagcagcactgaagatagcaatagcaacaaagtaaacccaaacccagctcagctcctagactagatcga

SEQ ID NO: 326026 - DNA, 790 bp, Homo Sapiens
gttgttttcacacttcactgaggtttaggattgcaaggcatcttctaagttttgtctcattgcccttgattccttgctgtcttataatacaactacaagcctcaaaagaaccaaaacgaagctgttctcttccatcctcactgccttagaatgtgttgtgttcttagcagaaatgagaagaggagccctcttcttctagagtttaggtgtagtcttggagaccctccttactctcctccactgattctgcccttggccctcggtgcctaagtttctcctctatgcccttctctggcatgcaaaacaaggcagacatctctggggtcaccagcattcaccaatttctcaaacagacccacacttagcttaggaccaccccagtgctccacagcctctgcagccaggcacctgcctcataattgggggactatagagtttattgtctaaaccaggacacttttgagagagctaaaatgctaaaccagatggtacttcaggacaaaaggcataaacttaggatgtgtggttaccctacccacgactataatacaatgtgataaatgcaataataaaagtttaaacactttgcaatggagacattttgaatgtaacgcaccatggggtcaaaatttgtttccaatcaaaaacatcactaaattatgttctaatcagcatccatgataaaaaccatggcgttaagcttgggatatttgtattatgctgcacagcagagccctggctctgggaggaaatacttttccagcttcttgggaatgtattttgtagctca

SEQ ID NO: 326027 - DNA, 815 bp, Homo Sapiens
  misc_feature (735)..(735): n is a, c, g, or t
aactggagatctgaactttaaatctgaaattatgataagggcttggctccctaggagactggacaaagtccatctggggatagggatgggagaaaaatgtaactgtttcattttagacccaatcaaatggagactgatcagcaaatgaatcacaccccaaaacaagtcaatttctatttctcagctttttagaatccttttttctagattaatatacaaaatacggtaaggtcttcccctcatccctatgcccagagactgccttcagtccctactgtggcaggtggccactgggccagttgtgttttacacacacacaatgtatttttccttttcctcctaacaaagataacttcatggattgcattcctctgtaccctgataaggatatatatttactttatataattacattgattatttaataggatatcttgacttacgattcccatgagtgcaggaagagattccccattccttgtattaatggttgccagggtagtctatgatactacaaataatgctaagattagcgagaccctgacagatagacacaagtttacatcctaacagtaaagactgaaaacaacctctgatgcaatgaaacacaaggtgtgggtcatccggtgccctgaggtatctgtgtgcaacttcctagatgtggggtgtccagatcagtgtgtacatcttcactttgagaggctgctaaattgccttccttgggggtgtggcatngtacactcctgcccaaatcgacgtgagaccccaccttcctgtaccatcaccaccactgaattaccaaacttttgataagt

SEQ ID NO: 326028 - DNA, 708 bp, Homo Sapiens
  misc_feature (175)..(443): n is a, c, g, or t
ctcttttaatctagcccagtccttctccttgctattgacttgctgaccagtctgggctggtgtcctatagaatgttccaccttttgggtctaattacatcctcatgggtggttcctcgatacacatttcctgtgaactggaggttagatctacacacttgattagagtcacattnnnnnnnnnnnnnnnnnnnnnnnnnnnnnnnnnnnnnnnnnnnnnnnnnnnnnnnnnnnnnnnnnnnnnnnnnnnnnnnnnnnnnnnnnnnnnnnnnnnnnnnnnnnnnnnnnnnnnnnnnnnnnnnnnnnnnnnnnnnnnnnnnnnnnnnnnnnnnnnnnnnnnnnnnnnnnnnnnnnnnnnnnnnnnnnnnnnnnnnnnnnnnnnnnnnnnnnnnnnnnnnnnnnnnnnnnnnnnnnnnnnnnnnnnnnnnnnnnnnnnnnnnnnnncgcaaagcacaaaaaaccacaacattttggaccagactacatcagaggtgatgttttttcatggcagaggacacatgctatctggatgtcccattattagtaactctagcatggaccactggcatggttgaagggggtctgatcccaccattgtaaagtcatgttttcctcctgcagtcggagaatatccagtcccccatcaactccatttgctagtttttgacaattgctaatccttgcctgagtcaataatttagtaattgcc

SEQ ID NO: 326029 - DNA, 437 bp, Homo Sapiens
cccaggtgaccctaacatgtgcagtctggggacatgggaggacatgagcgcagccagagaaaacccatgcagacctgccgagaaggtgtaatctgcacagacagtagccccggcctgggataataagatgacgctgaacgaaagtcgttggaggacctgccattatcagcctgtaggctgaaaacagatgggaatctcagcaatcagactcgctctaacagcccacgctcagaggctccggctgtccatgctctgtcaggctttccctgcctcatcacgcctctccatgaagctcctgagtgaatgaatactgttattcttattccccgttttacagatgaggaagccatagcctgtaagcactgatttgctggaggccacagttgaatccgcacagtgtcatgtaattgttttggggggttgtgttgttgttgttg

SEQ ID NO: 326030 - DNA, 939 bp, Homo Sapiens
  misc_feature (110)..(110): n is a, c, g, or t
  misc_feature (169)..(169): n is a, c, g, or t
  misc_feature (774)..(866): n is a, c, g, or t
aaagatgtttgtatgccaatgaactgttaatttgttcttgcatgactgtatgctggtaataacacaaagagaggaaaataaagtatgaaagagaggacggaattcctggnacttacatatttttaagcattatcaatagggataataaaagcttatgggattcaagggntattatcatctcagtaattgatttgaatgttaatgctggattaagaagatctcttttaggactaactattccttttgtgctctctcaatgtttctttccctcccacaataatcaaaaccctatcttaaatttctttaaattaaaactccactatatcttcataatacgatagggctgtctactaaaagcaaagttcattgttatttcagtatgtaaaagtctattagctccatagagacaacagattatcagaattgtgaaaaaattaaatgccagtttccatgtcctgaaaatggtgttctgttactcacttttaatccagctgcatagcccactggttgtggggcaatattggactgtccagcttcccctacaaccacagctaagccaaagacctcctggaaggcatctcggacagcagcaacttttacttctttatttgaggtcactacaatatccagttcacctccagattctaaaaagaccagaggaaaatttaactttcaaattaaaataatgaaattctcataattactaccataccaggtgctaacatctaatatacataattattaccagtttcataaaaccatgcaagatatagnnnnnnnnnnnnnnnnnnnnnnnnnnnnnnnnnnnnnnnnnnnnnnnnnnnnnnnnnnnnnnnnnnnnnnnnnnnnnnnnnnnnnnnnnnnnnactgacattacatatcacaagccagaaatcacatatctggcttgtgaagtgtaagttacatatttagtatact

SEQ ID NO: 326031 - DNA, 905 bp, Homo Sapiens
gttaggcaatttattactatgcacaaaaggagctggggacataaaaggagaaagaagtaggaaaacgtgttcaatactttttctcttagtcaccactttggagcatttttttgcccagcaccgtgctgagtgccataggacgtaccaaaagttaagataacgttgctgcctttgaaagcacatggctaattggagaagaaaaatgacacctgtgagaagatttgtgcgcagttcagggcttacactggtctgactgaaggacatggagcccggccatgtaggaggggcaccagcagggcttattgtagaaagtaggcctcaaaggcaaagactgttatatgacaagaggaggggccgggaaggtggtgtcaaggaggcgtgcagcagcaaagatgtgggagggacataagcacagttagtagagagccctgcaatcccggcagaaaattatcaattggattgaatgaaaccaggcaggagagcccgaaattcaggcaattgtgcatttataagggcatgagtcagcccagaatcacatcataacctcctcatctataaaatgaagatcatgagggtagcagccctgcagcggcttgtgagaatttcctcctaggatgtgtgcagccctgggaagggtgccttgcatgggagctgcccagtcagtgtcctatttatgtatccatgggatcagaactggtgccttttgttcagtaggaggacactgtgtgtttgtttaataaggttttttagtttggtcttttggtttcgcaggacaggttagaaggggttaacagctggaccagggcagccatcagataagggcctctgttgtccaggtgagacctgatgactaaggacagcctggagagagatgaagaagcccttgaaggctgattttatgcttg

SEQ ID NO: 326032 - DNA, 780 bp, Homo Sapiens
  misc_feature (77)..(104): n is a, c, g, or t
  misc_feature (123)..(171): n is a, c, g, or t
  misc_feature (347)..(347): n is a, c, g, or t
tgacatgagacccttcaaaaccaaatggacttctagaaattagcatttcatctcccagtttaaaattactgtataannnnnnnnnnnnnnnnnnnnnnnnnnnnagagatggagtctacttcnnnnnnnnnnnnnnnnnnnnnnnnnnnnnnnnnnnnnnnnnnnnnnnnntgaattactaggctcaggggatccttctatgtaaccaggattcaggcacaagccactacacctagattgcatatttcttttataacttataaaaatttcagctatattaaaaaacagaatagtacaagtattccatcagtcagcttcaaatttaccaaaatcagagccagttcttngtttcatttgaacccccatccactcaatatgaattattctgaagcaaattccaggcattttatcatttaatccataaatcatagtatcctttaacaggataggtttccaaaaacaacccacggtacccattattccatgccctaaatgaataattcccgcactgtcatacaatatcccagcgtacacatttccctgaagtttctaaaaagatttttaaaattaacttgtttgaatcaggattcaaataaagccttttgccataattagttgaaaagtctcttaaatattttaatctattggtttccccaccagctttgtgtttgcaatttatctgttgaaggtcatttgtcctgtagtttctctcacatttacactttgctgattgtatccttatggtgctgtcttaacatgtttctctgtccctgcattttc

SEQ ID NO: 326033 - DNA, 460 bp, Homo Sapiens
  misc_feature (12)..(12): n is a, c, g, or t
  misc_feature (37)..(37): n is a, c, g, or t
  misc_feature (56)..(56): n is a, c, g, or t
  misc_feature (113)..(113): n is a, c, g, or t
  misc_feature (121)..(121): n is a, c, g, or t
aagaagccattnggtcacaccccttcaaatttcccanacgggtggtgaccccagantcaacacaaggtcacacagaaaatccagggcagagcccagaactagaattcagatcncttgggantctggtgaaggccttttgctttacactatcttctttcccttaattcacataatacttgaacctaacattttactggttttcagggccccagagtattccattttgaacgttattttttaaagtatgcttcatttactcccagttatcaatgaggatttgatctaaatgctcaaagatcctacacacttgtgcaattcccctcaacaactactaatataaaaatgccaaataaaccagttctttggtgttttaacatgagcttacaatgagagtataatttaaaaatgtaagcatacaactaggctttaccaaagagtaactgtttatttcgcttaaata

SEQ ID NO: 326034 - DNA, 328 bp, Homo Sapiens
  misc_feature (55)..(55): n is a, c, g, or t
ttctgattgaaagcaaatttcagtcataaggaacaatcattttttaagttcttcntatacagaatgcaacaacccttttagagcaaggtaatacgtcatgtatgctctaaaaacctaaaacaacaacaaaaactttctaggagattgatatgttcataagattttcatcattaagaattctataggccaggcgcaaggtgtcacgcctgtaatcccagcaccttgcccggccctcttctttcaatttctatactcaaaaaattacaaattaattgatggtttaattttgtaagaaagtctcatcataaggaacttcgcattgaacttt

SEQ ID NO: 326035 - DNA, 959 bp, Homo Sapiens
tttcggcacaggtttttcagacgtttttgaaatatttatgataaatgtttgaagtctgttaaatccaacatttcggctcacttggaatcagtttctgttgactatcattttacctgcagagggtcaagatttcctatttttttcttgtctagtggaaagttggacatatgctgtagtgagtctgaactcttgtgttcttctgaggattattgtgtttttattgtagcagactgttaataaactgcttggtcaaactacacactttgtttttcctgtgatatgcagccgcttgtagctctcctctgctcttaggtctttgcactggtggtggttttagtgtggcaccctgtgagtctcccctgtgtctgcaaaatttgaaagttggctaaggatctgagtagagatggacttttctctgtggttgtctttattctggggattcccctagtttctagcactccaccagctttgagctctgtactctgacatttcaagctttatgccgccctagcttgagcatagttgggaaagagcatcatattcacagatttggctccatgttactcttttttaaaaatattgctttctggtttctgactgctttttcaccttgctgcttgtggtttcctcagcacatatgtagtatgtaagttcaagctgtcagctagggatttcagcatcttatgctctgaatttgagtgtcacctctatattctagtgctgtcagagtgctttaaatttctagctgcttccccaattccagattttgatatctggcacctttagttggtgaggaactggcttttgtttgcccccatgttttgcagcaatagctgtgggagttgagcagtgccttgagccaagatgccacaaactcacaattcttaacccttctagttacagtttttgagatttaactctcttcctggcttttgcaaatactacctttagatcattga

SEQ ID NO: 326036 - DNA, 385 bp, Homo Sapiens
  misc_feature (12)..(12): n is a, c, g, or t
  misc_feature (24)..(24): n is a, c, g, or t
  misc_feature (43)..(43): n is a, c, g, or t
  misc_feature (92)..(92): n is a, c, g, or t
  misc_feature (196)..(196): n is a, c, g, or t
  misc_feature (220)..(220): n is a, c, g, or t
ccccacccacanccctcccccaantcctcctgaagattaacangacatatggcccactatgcccctggcctagtttttaatatttttaagtnaaaagaacggccatttccacccatgttggccccaggcctaagtcctccaaactaactgaatccttaaagcgatcccgccccacccacagccttccccaaagtgnctgggattgcaggcataagcccanccgtgccgagccctagatctttcaactctagcatagcaaaggacaaaaagagaaagatgaggactattcagaaatcaatatatggtcatcacatggtactctgatgtgcataatctgacctacaagaaagagcacagtgctggggttctgaacatttgggttact

SEQ ID NO: 326037 - DNA, 337 bp, Homo Sapiens
  misc_feature (275)..(294): n is a, c, g, or t
  misc_feature (306)..(306): n is a, c, g, or t
  misc_feature (316)..(316): n is a, c, g, or t
atgagcttactcatagttttaaaagtcaaattgtctttcatctgtttcctgtctgcacaaaatagccttctcttccattaatctgcatattcccttaggctttatttgtttttgagacagggtttcactctatcatccagggctggaatatagtgatgtgatcacagcttgcgcagccttcacctcttggggctcaaggggatcatcctacctccatttcctggagtaggctggggactattagtcacggaggccaccatggcctgggcttaaannnnnnnnnnnnnnnnnnnngttggaggatgnaggggtactncactattgtttgacccggggt

SEQ ID NO: 326038 - DNA, 693 bp, Homo Sapiens
ttccaacccaaggttcagggacatctctacagtggggactaggcagctcctctgttagacctaagaaaactcgggttgtctgcccaacatcccacctgataagcaacaggaatcattagaacagggaggaatgtgaaaccttgccattcctggcccgtagcaattccaaaatcccagtaggcagccacctgtggggccacttcacctaggctggcagatgttgcttgtttaggactgggttccattctttaggcaggggtctccccatttccattgtcctctgtggcctctggcttcaccctctgctaggttctttcatttccattatcctccctttccatcctccttttcggccacacccaaaagagacattcaagaatttcttggaggttgtgcagccttctcaatcctcatcctctaggcgattggagacccaaggaatattttaagttttgaacagacacttctggaacctgggcttgtgagtttgttttatttttgtcagaataagcttcaaaaatgtagtaggaattttacctgattgattgcaatcagtaacatgggccagaagccacactcagttcttttttgtgactcagttctcaaatctgctgtatttcttcactcccttacccttatgcctctctagatttaaactttgagtctagatttaaacctgtggggcttctgtgc

SEQ ID NO: 326039 - DNA, 893 bp, Homo Sapiens
gtaatggaatattgcaaatacaaaaaaaagggggcattttttccagacataaaatcttttaacagttacctacttccttcttagtgctctaccttcatcgaggtttttttggttaattacactgattaaattgggaagaaattcttgcggacattcggcaaggaaactgcaccgtcaaaagtccagaggttatcaagtccctggaaatgtgagtactcgaggcattcagtgtgtgaggcacaggaagaagctggagagggcgcaggaacccatcaggctgggctttacagaccaaagaaaggagtcttgaatttggcaactggggagttacagggggtgttagacaggggaacagaacaatggtatctgcatttgctcactctgctcccttttctgaacctctgcttgcagggtagagatctcctagacctctgcatgtaggttctggttatctgggagttagaaaaatgaggtctgaagacaagtttttcagaagaatggataaggtgggataaaaattccagaaaatgtcctcataaggaaagaaaaacagggcaagattattttagctacctggctctacagtggtaaagaaagctaagaaggctgagggccagagcaaagcactcactgccaccatttagaaaccactgactccaaatggacctggtggggaggagccagggcccagttcacatgccatgcttgaaggtctttccagagcctagctatgggacaggtacacttctctgattagccagggcctgcacactggaagaacaaggccagttcataataaccctgaacagagaccacctccagccagcctacattattttactacagcagaaactgagcacagtaagcaaagctagccctataaacaaactgaa

SEQ ID NO: 326040 - DNA, 746 bp, Homo Sapiens
cacggtggtgctcaagaaatgcttactgaataaataagagatagtattaataataattaatgtttattaaacgctcatatactttgtactatatatgtatacataaaataatatttaatattcatattaaccctataaggtattcactaccatgaaatcaaggctcagagagattaaataacttgtcagagttcacataactcttaagtgatatagctgggattcaaatccaagcccacatccttatactctatttgctgcatcctgcacaagcactgcaggaaggtgtcaagagaaggtgacacttgaggggatctcagaggaaaactaagcacctatcaggtacatgagggaaaagccatctcagtaagaggaaccagtatatgtacagtgtacagtgcaagtgaaaaaatggtgtttaggctcaacaagtggcacagaaggagaatcccgcataggaggctcaaaaggtgtcctttggccagactatgaagggttatgctgtgaaactcatgttttgggggtcactgagaaacatctttaatccaacatttcagagctgtgctttagaaatttacattcagcagccccttggaggttgtctggaatgagagccctgatgagacaggcagataggtagaaaaggatgttagccacttgtccagtctttggccaactctgggactctggccatctctacattattttctaagtgatgtcttgaaattgttggccatcagaattgt

SEQ ID NO: 326041 - DNA, 497 bp, Homo Sapiens
aaagtgaccattaatattcactatcacaattaaggcttggtctgggccattctgagaacaagctctggagaccacaattttaaaggattaaataatcataacggtattctttgtcctgacaaaattattaatctgacagtgactgaatttatcttcggactctcccaagccctaaatgaatacagcaaagataaatgtcaagaattcaggaaacaattgcttctgctacggccagtaagctcctaacagaccatgcttctgcagaaaacgattctggacaaatttttaaaagcaacaaactgcatgaagtcacttaaaaaaagaagcccagccttggaagaaagaaaggccacaggctgagtttcttatttttatggcttttacccaaaatgcaagacacagatcggcattgtgcaggacagctaaagttcctttagaaaaccaccatctttctggctggaagagtcaggggtcagaatgcgcgcgggccaccgctg

SEQ ID NO: 326042 - DNA, 944 bp, Homo Sapiens
  misc_feature (99)..(109): n is a, c, g, or t
  misc_feature (216)..(224): n is a, c, g, or t
ttttttctaaaaaagaaagagtgaatggataaaatggagttttctaattcaggtgtttacttttgagagatagaaattaaatccgtagttcttgcaacnnnnnnnnnnnaaacccaaatcctttctacaattagtaattaaagtgaaatgaggaaaaggaaagagtagctttggaatctcactcagttgcttaatgctaaaataatctattaaaannnnnnnnnctatggaaaggggaaaacactagtgacaaataagatgggaagacaggaagaagctagttagcagaagaggcaactcagtgacaagataaactcttgatctctatcttactggtccgatttgtgtgttgtcacgtagaatgaaaatatgtttagacggtataagaaacctctgatggaaaaatctggttgtctccctgcaggttgctaagaaagagtgatgtttcagggaggctgagtcttgaagccgcagcagcagatctgacacttgtccttcacagctcctttcctgtctccccatagtaagggctatgtaaacatttcatgatcagtgctggcacttgcagccgagaatgcggagaatgcttgcagtttccccttttcatgcagcagaatgataacagggacaatcttttgattgtcttattatgttttggcttttgttgcttttaaaattcccagtttgtgttgctgtaagggaggtaacatttctcaccctttctgtaaatgagtttcctgccaaaacctacctgtgagtttcaaatgtttagaccaatcaaccaaccaaagaccttgagataacctaagaaggtataacctaagaagggacagttacacagtaattgggaaaacttctgcaaggacagatgtgcatttctcattttctttaaacctatcaatttactgaaaatgaatatgatttttgttaataatgacagtgcc

SEQ ID NO: 326043 - DNA, 840 bp, Homo Sapiens
  misc_feature (266)..(266): n is a, c, g, or t
gattactggattttgtccagtgtgaaatgtcttcattgtcctctgtatatcctcagtttcctttgacttaatgtaaacaaagactagatgctgtcatgctatgagtcctagctggatttgcagtatgtcttcatctaaagtttccagttgatatcatcgctagcctcacaagataagcctatagttggttaccttttacttcctaaagggaattttaattccttgtcccttaagggatctcaacaatattagggcctgtattaccntggaaaaagtaattttctgttgtttcccccaaaactctgactaaactccgtttggttcacactcctaatgtcttctcttcatgatactattgtccctacagctttacatttcattagggtgtgctttccttccccacataacacattctttaagtctgacctcaaatcttcaacccctccctgacttttgtcatgacttctgtatctcccttccctcgacttcagtttcacctaggggtgataggataaagaagtgactctgattaagtaatctgttattcgatagtgtctatattttgcttgagctgttttgcctcttggatcatagtcctgtaaggaaaggggcatgttatcccttgatgtagtgtgtaacagagagagatatttctttctttctttgattatctgagaagctaggcaggtgaaagaactttcttgtccatccattcagaaataatttacaggcagttacttctaaatatgcatgcctgggccaaatgtggtggctcacacctgtaatcccaaccctgggaagctgaggcaggaggattgcttgcaaccagcctgggtaaca

SEQ ID NO: 326044 - DNA, 507 bp, Homo Sapiens
tgtaaacaggacatgaaaacagaatttcgtaaatgctactgcccataaacatcatctggggagctcagtgaaattcctggacctcatcctcagagactctgatgtgatgttcagaatccagtatttttggtatgtaccaccccccaccaacagacacatatgcacatgcaacaattccaacaaaggtactctgaggaccacacttcgagaaccatttctaaagcctcagtgacactcagtctttcagagcccaggtgagcagtaacatattccctgaggctcgctgaggagcctccactttaaaataaagacttagggagcactgaccaccaggagtcagaaataagttctaaaggcaatggaggaggtgactccatgagtacttcccaaatactcaaggcccttctaccgtgcgcacctttcctttgtcctgccatttttagctcccagcacaaaggacgctgcagtaagacatcaagtataggaggccttgctgttgaacttatg

SEQ ID NO: 326045 - DNA, 594 bp, Homo Sapiens
gccccatgtatgtttctgtgcgctgccttggtggagtgagaggagagagcacccagcagggttacagggtttcaaagtgttcctaaattaagatcttgtgggtaaactcagctctgtatctactgtgataactgagaccatcataaactagcctcatttccattagttccatatccctccctcccaacactgcttcctttaaaatgctctgtagcactgaagctggactccttattacttcatcatcctgaaaaacaagttatcagagatagtaagatgcatgttttctacaaggtgagatgtttttctcataagcctccagtctaacaagtgccagttgtggtcctgcggcatgcctcacacagtgtaatagcaccttatttttctttatcactctatattctgcaaaataccttcacatccttagctcatttgggcataggaaaaggaaagtggtgttatttcgttgtacagatgagtaaactgtggctgtaaggcagacaatggatggaaggtagatgactttaatataggaacctcccaccaggcaccggacacatgtatggaatgaaacttacatgtaattgatagaat

SEQ ID NO: 326046 - DNA, 734 bp, Homo Sapiens
  misc_feature (194)..(204): n is a, c, g, or t
  misc_feature (559)..(559): n is a, c, g, or t
cctataccttttatattttacattcacctctcagaatatttaatggtacccgttaacgatgttataaaaaaagaccaccacctgcttgaaatggctgcaaatttaccatgttctggcattaaagtgatttcaactctttgggacaaattgggtgtaacagtaaggcaccgaggatttcaaattcccagatgagnnnnnnnnnnnttaatcaggaggaaatttatttagtaaaaattcaaagctaaagaaatgtgagaaggaagccaaacccaaaaaactgtaaaaaatacaatcttctctccagaattaggttaaaaaatacagtcaaccccattctaaaccccatatttcttagaaaagtcacccagtcctgaacacagggtccttatacacaaatacatgtagccttgatttgccaaaatcagccctctggggatcgacccttacactggccccccaattagaagttccaaaaacaaaaattaaagttaggtaagtcagacatcctataaatactagtatcccgcatgaatgaaaacacccctggctttggtatggnctacagaaatccatctggaaattattcaaaaggacgtggttcagggaaaagggggtaggcagggcatggggggaggggaacacacaaaacccccaagcagaggtaaaatgaatattggaacacacccgcagcaaacactgtacatagacttgtggcagatgcctctaacacaaca

SEQ ID NO: 326047 - DNA, 1147 bp, Homo Sapiens
  misc_feature (344)..(396): n is a, c, g, or t
  misc_feature (1125)..(1125): n is a, c, g, or t
agaaatggagcaaagcaactatacctcatgggtcagaaaatgattttcatgagttaataaaaaattgtatcttctaaaatttttcaaataacacaaaactagactttcttgcttagggtaaaaggatggattctgataagaaccatctttttgtttcctaatatttaaacatcctcttttgtccctcatgggaattaacaaagaattcttgagtctgtctggtagataaaaacgtcaacagtgaaaacacagtttcaagaaaagtatttctttcttgatggggtgactttcaccccatggaagagcatgctctatgaagttgtctatttcacaaatatgataannnnnnnnnnnnnnnnnnnnnnnnnnnnnnnnnnnnnnnnnnnnnnnnnnnnntgaaatgctcttagcatattactctacataataaagattcaaaacatattctttccaacatttatatttttctttctcagatgtttctggtactcagaaaaatcaggaacatcattttcaatctgaagaattaaataagaaattcaataaagcaggataagaaaatggctggcatgttttcccattacctagaatagctctgtggagaccaaccattccatgaaaacaactgcaaaacaggataatccagtaaaaacatctgctgaaaggcatcagaaaactagcaaggcagcaagactgagaagccaagatagcagaaagaagggtgtgcagagaggtcagctcagtattcggtgccacttttccttgaggcatttgtcaactcctaaacagcagcctaaagatgaaggagctgagcagatattctaagagtttcacggggataaggaataacatgggaagcttaagacccaataagaagcagacaaaatatcccagcatttcagttggaaccctggatgggattcatttcaggagtaatagggaaccagaaacaaaggacggtcatgaagattcaagcccactgagattagactagctgatctgcctctaccctaactttcaaccagaaagaaaataaacccgctaggcagttaacaccatctaggagttttgggatttatctctggaaatttttccacttacccttattcctggttttccatttanaaatttttccggttcttatttt

SEQ ID NO: 326048 - DNA, 658 bp, Homo Sapiens
  misc_feature (269)..(270): n is a, c, g, or t
  misc_feature (318)..(318): n is a, c, g, or t
  misc_feature (459)..(515): n is a, c, g, or t
ggagacagagtctcactcttgtcacccaagatggctgctgcattccaggcatcacatccagactcagacccagagaagctgcccatccctacctgggtgagcctttgtaggaacgagaaaccgcatccagcagcagaaacctcacccagcagcgtcttttccggtctcattcaccagcgccgcccaccgctcaaccaatccctggccaaaagaatgggaccgcctgggaaggtctggaccaaacaggacctgccctctggggttggggnnagaggcccagatgaaggctgcaggacaggatggactcctagacctctntttaccagcagtgacttacctctgtctggggtggttgggaacatgtttgaattttattcttaagtactgtctacaagtttttgcaataaaccttgactcttcttttaataatgcaaaaggaatcgaagtgattgtttgaannnnnnnnnnnnnnnnnnnnnnnnnnnnnnnnnnnnnnnnnnnnnnnnnnnnnnnnngacagagagagtagaatccagccaccggaaaatccagaatagctggctttgcttaatccatgcctggaaataactgctgggtttgcaacaacttctctcccggagacagaccaaggaaactacaaaactgcagggtattgaag

SEQ ID NO: 326049 - DNA, 538 bp, Homo Sapiens
aactgcttctgttgagcatgtgatttattttcaaaaccaaatttgtagtcaatctcgtttcctcatctgtaaaatagtgattatacctatgaccttatacagagttgtcttgaaggttgtacttggcttctagttcaaatgatcaagttttaaatcatgtttagtgcctgagcctagaacctaattcagcaccaagatgtttcccccaaattgcccacactaggtcagtaggcaagacaagtataatctgttttacaatcaagggtgtaagtaagaagttacctgatttgcctgacgccacagagacataagtaaagcaaagactggaccaaaacacatgtatagtgaatgaactgaatgtctcaattcatgccaagaaaagtgtttaactattatcaaagattacagacttcaaaatcaaggtattgtttggcaatacaaagatgacatgcaagtacttttcggtggtcaatgccattgatggactataatcagaaagttctatttgcgttgttcttactgtagtgcaaaggctttc

SEQ ID NO: 326050 - DNA, 706 bp, Homo Sapiens
ttaagagacagggtcttctacgttgctcaggctggttttagctccctggtctcaagctgtcctgcctcagtctcccaaagcactaggattacaggcgtgacacacgtgcccagccaaggttaaatttttgggagactttttgtactgtcttggctagcgtctatccatgacctcttcttgagtttagaagtgcattttaggcattttaaactgtttcagcttgattgatttctgtctgtagaaacttccccaatcacgcagaaaaagtgtgttgtcaaaacctcactgaatataaatctctccataaaattgtttctcaaccagggagtatctaattgggttgtttcattgtccagttatgagaaggataacttaaagcaagaaaaggagatttatttgaataatttttagaagaggattggtttacctgtgtccagacaggtaaaaccaagttgacctcaagctcttagggtattttgggaatgtgctgatgagtatgggttctctgatccatagtagctgttaacaaggagggcagataactgttttgtgttttaaagtgctctactctttatgtgatttcaatcaaagaacccagactttttcattagtaatgttgagtgttcctgccagaatgataagctctctaaggacaggttctggtctctcttactcactgctgtactagcatatagtagacactaca

SEQ ID NO: 326051 - DNA, 738 bp, Homo Sapiens
  misc_feature (326)..(378): n is a, c, g, or t
gtccataaataaagttttattggaacccagccatgctcatccatttacatattgtctatggctgctcttgcagagttgaataggtactaaagggatagtatcatctaacaagccaaaaatatttactagctagtgctttacagaaaaagtttgccaacccctggtctagagacaaacctgggttgtgaaaaatactttttactgatttcatttaatactttatagttttccctggtatattcacacctattactttcattttatcttcactccaagtcagtgagttatatcctgtttagagatgagatcgcaagtttgaaagtggnnnnnnnnnnnnnnnnnnnnnnnnnnnnnnnnnnnnnnnnnnnnnnnnnnnnnttttctgacctatatcccaaggtgttcacaacacacagctgtcttcttggatgcctgctaattgtagctgccgtcttttagacattctctccacatttgatagttcaccttagtgtaaagtccctccttcctaaaataggactgaaaacaaactgcccagccccacttcctgctaggatagagacacacaactgtggacccagtggcttcccaatctggcagaggcagttgtgggagaagcttctcgatggtggcataggcaacagctctcttggcagaccagttctgcagactatcaagaagctccacctgcagcctgtttcttcagcctgtccgacaattctgtgatctatctatata

SEQ ID NO: 326052 - DNA, 440 bp, Homo Sapiens
  misc_feature (406)..(406): n is a, c, g, or t
gaatattccatgacatgtgaaaattatacaaaattcaaatctcagtgtccataaataaagttttgttggaacacagccatgctcatccatttacatattgtctatggctgctcttgcagagttgaataggtactaaagggatagtatcatctaacaagccaaaaatatttactagctagtgctttacagaaaaagtttgccaacccctgggtctagagacaaacctggggttgtgaaaaatactttttactgatttcatttaatactttatagttttccctgggtatattcacacctattactttcattttatcttcactccaagtcagtgaggttatatcctgtttaggaggatgaggatcgcaagttttgaaagtgggacttggcccaagggtcatgcagcagntaagagggcaaggccagggctacacccccagttt

SEQ ID NO: 326053 - DNA, 373 bp, Homo Sapiens
  misc_feature (240)..(240): n is a, c, g, or t
  misc_feature (283)..(283): n is a, c, g, or t
  misc_feature (300)..(300): n is a, c, g, or t
  misc_feature (305)..(305): n is a, c, g, or t
  misc_feature (340)..(340): n is a, c, g, or t
taatttatttacataactacagaatcctttaacatcttatggaaatgggattggattttagaagatagtaatgatggtgggaagttgttctggaaggttttaggaaacactgtagtattataaggatttcttctgaacttgtgttggtctctggtcatcgttgtggagaacagaatccacagagtagctagattaagcacaaaagaatgcattgaggtatatagatagatcacagaattntcggacaggctgaagaaacagggctgcgggtgggagcttcttngatagtctgcagaactngtctnccaagcagagctgtttgcctattgccacccttcgnggaaggctttcttcccacaactgcctctgcccg

SEQ ID NO: 326054 - DNA, 786 bp, Homo Sapiens
  misc_feature (277)..(277): n is a, c, g, or t
ctgttttgctattttggtggagagaaaggaacacataaaggaataacatgagagaaggctatttggggaagtgtagtagttaaggttctggctcaaacaacaactgcagctcataaagttgactttagtggaaggatactggggtatctcatggaatcttgggaactgttgaataaccagggaaactctgggaaactcactggtaggaatccataaactgtcctcctggtgggctgtaaacaactcaccctctatgcatctcacatcaaaattccangtttcttgggaaaacaagtctgtttgcccaatttgggtcatatttccacctccatgttactcaggcatgattcatctgcaagttatgtgtatagatattttgctactgttccacccttacgctgtgctggggagggaggtgtcactgtgagctgtgtcggtgccttaagagatatctgttgtgtcttattacttggttgcttttccccacatgtacaatgacaaaaatgccttcaacctatttgatccagccgttccagtacaactcctatacttgccatctttccaagcccaaaggtacatccagctgatggaaggagcatcttggtgttaatattcttttagtcatggtctctgaaagtaaaatgtctattcttctaattctggcacaatcttatctagctatagttcctcatggtcctgcactccatggactaaattgtaagtataattactaccaatgtactctataaataacttttggggccagggtggcaatagttgctagag

SEQ ID NO: 326055 - DNA, 905 bp, Homo Sapiens
gttaagtattttaaaacaatattttgtctacctttttttccccttattcaccactgatcaggattttgtctaaaaacataaatacagaacattttcttgggtacttatttcagaattacaaatgtataattttagcctcttaaagcaacagctagccacaataaaatggctgagtgcctgggactgggaaacaggctgcccaggttctactcacggcttcccccattttatttgctgttagatatgtgacaggtaatgcaacttaacctctcatagcttcaaactctttgttgtaaaatgaggtccaaatctattccagagtttttgagacagtaaattgcaaactcctatgaaagtactgaacccgacagcaagctttcagtacattagttattttcagcactgaagattacctaaactacttcccaagctgtggtctatgaaccagcagtatcatcatctgagaacttgttagaaatgcaaattctcctgtctaccccagacctactgaatcagaaactctgggggtggggtccagcagtgtgttttaacaagcctgccagtgagtctcacgcatgctcatgtttgagaaccaccaacatagactggaatcctaccaagcactctcttccctctcaaagaaaaatattcccacagcaatccattaaaattcagatacactaagttaactgacaggatgacttgattcttcctatatctgaatagttttccataaaagtgacttattgaaactggtttgccctcatatctcaatcgtgtcttaattacagcttctctgtgctcaatgtctcctttatgaaataaacagccatctctgtccctggaagaaatgtgccaaaagattttaaggagataggcattattcaaaggcaatatattatttt

SEQ ID NO: 326056 - DNA, 383 bp, Homo Sapiens
  misc_feature (58)..(58): n is a, c, g, or t
  misc_feature (99)..(99): n is a, c, g, or t
ccttctaggtaaattctaacacatatacaactctctccagtccatctctgttatacangagcaaaaataaagaaataattcttagcaaccctggtttcnaaacattgtattaactgctcctgcccagaaaacaatatggcagcctgtatccccaaatatgaaacatccttatacttattaaaacacattaattttcatctggaaatctattctaagaaaacaaatacagaaaaagtttcatgcacaaatatgtccatagcagcataatctgtgataatgattcacatgaaacagcctaaatgtccaatgacatggttgtcactaaattatttaatactgtaataataaaaaaatgatgatgataatggcagctgacatatatt

SEQ ID NO: 326057 - DNA, 752 bp, Homo Sapiens
ctgaatgccagtatccccccaaaatttgtattactggagcctgatatccaatttgacagtattaagaggtggggcctttgggggagtgataaagtcatgagagcaccaccctcataaatgggatgagtgcccttataaaagaggttgaagagaactgccttgttccttccaccacgtgaggacatagcaagaaggcgccatcgtggaaggtgagaacagtcctcaccaaatacgggatctgctggcaccttgatcttaaacgacccagcctccagaactctgaacaatacgttcattttctttataaattacactaaggtattttgttatagccgcaggaagaaaccaaggcactgaacaatcagagtacatgccagcctcagggctagagctggaactgaagaagccctgctggccccttgtgaatcatgagaggctggtgggtatccagaaggggcaaaggccactgccaggacagtggccaggcacctggggtacttggggcagcacttaaccatgaagtggcaactcaggaacatatctggctaagtgggagctttaatgggctctgcctcagaagaacgtagtaatagcttggacttcgcaagtaaagtgcttagaagggcctgactcacattacacacggtggccactttcattattacatgcaaatctagccttagatcatatctgtggtttggcatattgaaatgccatcttttttttacaatctacatccttgctctcctgct

SEQ ID NO: 326058 - DNA, 637 bp, Homo Sapiens
  misc_feature (512)..(594): n is a, c, g, or t
ggccgcttaattaaggagaacaatcacatgaagaaaataataagtaaatgataaactatgttgttctgattttaagaatgacagttttaaagggagtgatcactatcagctagaaggattaagaaaaacataaggaaagaggtgaaaaataaagatccatagatataatgagcccagataattgattagtctggattccctgggaacaatcccagctggaaatgttttgtatcattaccttcatggggacgcactgggagtttcaaaatttaacagtgactagtataataattaaggacacaattattcccaaggacttgggaacacaaaattactccaaagacttggaacacaaaaggttatccaatttaaacaaaagcaaccttgcagattttattcctaccttaaagtagtttgctgagcacttacagtaatgttccaggcacggcaaggagcgacctgcgttagccaggcagaatgcccgccttcactgagcttatttctttcatggnnnnnnnnnnnnnnnnnnnnnnnnnnnnnnnnnnnnnnnnnnnnnnnnnnnnnnnnnnnnnnnnnnnnnnnnnnnnnnnnnnngcccccgaccccagggtattgaagctcatggtgctagctctct

SEQ ID NO: 326059 - DNA, 755 bp, Homo Sapiens
  misc_feature (43)..(131): n is a, c, g, or t
gaccaaaatgttttatttgagaataagacatgggggtccattnnnnnnnnnnnnnnnnnnnnnnnnnnnnnnnnnnnnnnnnnnnnnnnnnnnnnnnnnnnnnnnnnnnnnnnnnnnnnnnnnnnnnnnnnaataagacataaaatcacatatgaacagacagttttgaggaactaaggttaactttatggagccaatgcatatgaagccctcccggaaagtctgcctggtacctggattatggagttcccagccttacaggtgagtcaggaaggtgactttctggcaggccaaagaaactcaggatgtttttaggacctcaagaagagaagaacccatctgaatctctaggcattgcagataaggcctggtggtgcttgacttggctttatagcttcaagaactcttgaaagcataatctgagattacttgtaaaaagttccagcaatgcaaacttaaataagcctacctggtcagttgccattcttgctgcaattatgcaaataagtaagtcaaatataatgagacaagacttattttgtaaacaagaataatcttactttggttaatttggatcaaaaaagggggatgactgtagaaagatattttataaaaactatagcaccttcttatgggttattattctggtcctgtacttgtctttcaggttttgttatctacttgtaaattgaacgggatcctgtcatcatgcacagcttgtcagtccttaccaaattctcagttcttctagttcc

SEQ ID NO: 326060 - DNA, 122 bp, Homo Sapiens
taaaataatacatttcttagagtagtaagagattaagccaaatttgccttcactgtgtcctaaatggacactttactgggaaacattttggtattttatttttactgctaggtttaccagtt

SEQ ID NO: 326061 - DNA, 656 bp, Homo Sapiens
gttgaccaaagcatcattatgaggcatatgactatatcttctctgccatcatgcctggagaaaacagattttcatcatctctcaaaccctaaacacttccctggaattattactctgcaaattcatttgaattcacctgaaaggagaaataagactaaaagcttttagagttgggtttatacacacctatactgagcataaactctttccatatggcaaacatcttattgaacgctctagagtagaataaagtctatatcatgcctaccattcaggcatcttggggatgggaaattaggtttgtgtgtacccaacctataaatattcaaggcctgctgtatcaatcaagcccctgtattacaattacttttccatgtaataaattgatatttactgagtatctacagtgctagaggcactaaggaggtcagaacacttgggcaacctttttccctttctatcagtagatacctatttagccttgtatcttcttcatcatgttagtgaaattagaaaaataaacatattttaaatcacaaaataataatgaaagcatggatactgaggcataaaccagagtttgaatcctggctcaaacacttaaatgtacataatcttggtcaagtcccttacttgatttggttaagataggaata

SEQ ID NO: 326062 - DNA, 360 bp, Homo Sapiens
  misc_feature (276)..(276): n is a, c, g, or t
tccagcaagcagtttattgggagttgagttcaccttgccttgtgatgtgaagcaaggtagttccatggcttgtgaaccctgacaccagcacctcccatacacaacagagctggagcgctgcagggtgggtccttttccaagaagagctaagtgctagtcttagcgggaggctaggaaaccagtcctgggagcaggatgcttgtgacatgcactgacgtgaggaaggccggagcatcatcagtgcatatgccgcttgaatatctcagggtaggagtntgcccggaaaacaggggaaagcaagttaggggggagggtaaggaattcttgaggtgtccctacagcttaaggacatgggcagag

SEQ ID NO: 326063 - DNA, 897 bp, Homo Sapiens
cggaggctccagcaagcagtttattcgggagttgagttcaccttgccttgtgatgtgaagcaaggtagttccatggcttgtgaaccctgacaccagcacctcccatacacaacagagctggagcgctgcagggtgggtccttttccaagaagagctaagtgctagtcttagcgggaggctaggaaaccagtcctggagcaggatgcatgtgacatgcactgacgtgagaaggccggagcatcatcagtgcatatgccgctgaatatctcagggtagaatgtgccagaaaacagggaaagcaagttaggggaggtaagaattctgagtgtcctacagctaagacatggcagagtttgtctgtgactccactagcagttttgagattattctgactgtggtggttggtgcagggctggtaaccgcaggagaagtggatgctgtgtggtcaaggggtgtgtgtcccatgatacaggctctgcttcttcagtctctcacctcagagccccctgcggttgccacagagaaattccagatgtgaatgtttaaaacaagtgtcccaaagtgtaggtttgagatgggaaatggagctggagatgacctcaaaacagcccctggaataatgcaatgctgacaatgtctgtgaattaggatgtgcataggcagatcccacttggggaaaaactgtaagatgcgaacctttgtcttagaagtacagcattcccacagtctgacccgaggacactgatggaaacttaaaaggcagattctgggagtcttctcacttctctccagtcatgtgtgagagctggaggcagcactgccctagagggtgtttcctaacttctgactggatgccacaaaaaggcctgctggggcccaagtccttcttccccattc

SEQ ID NO: 326064 - DNA, 716 bp, Homo Sapiens
  misc_feature (372)..(372): n is a, c, g, or t
taaatttgaaacccctaaaattctgaagttgcttggatgatctcctaaattggtatcatcagaaaacattatagttctatacacaacttacacagtttctttaaccattcaagaagaaacttgtatgacacaactttccactgagttaggtcaagaccatgtgaggtcttataggactcagcatcttttagaacgcttaatttttttcatggataacatcccaaggtgacccatgttgacactggctggtagaaaagtcatcgttcacaacttaactttacaatcaaatgaagcactttcatcttcaggattactctctacaaaaattcatttaaattattttccattttcaaataataaacacctcttaantcttttttggaggatagtgttttaagtcacgttgttgccatattactttttaaatttttaagatatatacttacgttaacaaatacagaaaaatgtgatgtcagtgtaatttgcattaagaattaacatttctgaaagctaagaaatactgagaatatttatacaagtaaatatatttgtctgttaaatcagtatcacacttgtgatttatatttcatgctaatcagatctgaataatgaaagaaattcctaatttaacaatggcttacattcttcaaatagattactttccttacactttacctctctaggtagactgattacattgctaatcatgtgtaatg

SEQ ID NO: 326065 - DNA, 770 bp, Homo Sapiens
  misc_feature (343)..(343): n is a, c, g, or t
  misc_feature (352)..(352): n is a, c, g, or t
  misc_feature (687)..(721): n is a, c, g, or t
  misc_feature (730)..(730): n is a, c, g, or t
  misc_feature (750)..(750): n is a, c, g, or t
gactcagcagtttactctttcatcaataatgcactcactctgaagtggcaggctggacactgtggcccagctctgcatgggtgtttatagtttatgccagtaaatgtttctgttgaatctgtcaggagctgcaggcctgatcccttttcaagttggtggtgagagcagtgagtcagcatatttgtaaacttcagaagagtacagaacactgataatttactgtggcactggtaatttcatgaatatggagtgggcccatatgttcatttttagctctgtaaatctcaagaactgttactgccttggtaagctgtatcagtggcattggcacccaggataaagnagaactttnctgcctgtctttgaagttaaatgagggcatcaacccagacttgtgttaggctggcctttgctgtggttttacagtagatgctccagaactgcttagaaagctcttttcagatgggaatgtgggttgccttctggtagcatggcctgtcatcagaggtgtggttcccccagtagccggcctatgacacggcggctccagtttctttatgtaataaggtgagaaagagtgaggaagagttgtacagagcaaatgaattcagggtcgatgtcttatccagtgagcgttgctatggaaaaacctgtttgaaaacaggttcttcccattaagttcatcannnnnnnnnnnnnnnnnnnnnnnnnnnnnnnnnnnagtaccagntccaagtgcaggcagagttnccctaggacttctgactgtg

SEQ ID NO: 326066 - DNA, 824 bp, Homo Sapiens
gctcggcgtggagtggtcgagctgtgccttcttgaataaaaataaggattagaataaatgaatagttcccaaaggtgacatctgagaactggctctggcacctggctctatctgtttagggaagttttagaacatgtgcaggattttcccctagatggtctggttccccttctccacaaatggctcccaaagggttaagccaaaaacctgagtcctgcctgcctcatcttctctcaaagtctttttggcaaattctatcagctttacctcaacatgtatcctgggtccatcaacttctcccccatctcccattctcctgccctgatctaagccaccatctctccatctctcccctggggtgatggacctcctgtatactctcttgcttcccttcaacttttttcccatctgcagccagtgcaatagtttttctactgagaattcgatgaaatcactccattgcttaaaatcctcctatggcttcctattccaaacaataaaatccaagccctccaggagctggaccttgtcaaactttttgacattttcaagagccctatttcccccacaatcattgatttttaggtagtgacctccctttattttcttgaaaatattaagctagcttctacctcaggatttttgcatatgctattcctgtgcctgtagcgctgtgtgtccagatttatcaaggctgttttctttcttgttatttggatttcagctgaaatgtcagctcttcacattggtcttctctgaacccctctaactgctcccttcctcctcacttgtttcttcccacttctagaacagggcttgacaca

SEQ ID NO: 326067 - DNA, 717 bp, Homo Sapiens
cttggtttcaaatattagtaaagtatttttggtattgaattttgggctgtgatccagtaggtggcacttacacatagtggcctgtaggcagccacttaatcaacagtgtggctcctctttatttcctcatgattgcagccatgcttcttctcagtgctttgaaagtatgggttcctctcccacttgagtgctgactgcaaatcttggcttgggactcttgggcagaaggggaagggatcttagcagtggttatggcagagagcctttcacttgcctcttggggttccaacccagagagatgtggacccattattaatcagtgcaattggccctggatggggcacctgtgctttgggctcaagctaggaaggcccgcctggtgatgagagggtgtcagggacaggtaacagggagacagactggcctcttctccctagtgcaagagcagcttgctggaggtgtggttaaagcactcagggtcttcgctgcttctccaattcaaggacagcaaggtcactaccactgcagtggcagtagcagagggccttttggttgacttcaggagctctacctcagaaaaatgtagagccactgctactgggaaaattcagccaggaggtgagacagttgttctactggctctgcttgttgaggagtgggggttcgagtgctcacagggatgagcgaccaggcttctctccatatgggcactgaggt

SEQ ID NO: 326068 - DNA, 477 bp, Homo Sapiens
  misc_feature (124)..(124): n is a, c, g, or t
cctaacttagaattcataaatttggctaagcaaataatatgcaagagtgaattgtgacattgtatttaccctaactatggtgtttccaaatacattttaaaagagcaccttaacagttttcacnttcagacaaatcagataataaggacacccagttgaagtcactaatctatgttactagttaataatggccctagtactagaaccattcaaattactttctttaaatattcaaattaaactaccattctccttaatacactgatgttctcacaaaccagtacagcacaactcagtataatttatgtttctgtagattctttcaaggggccctattacttcaccacaacactgtcttaaccacatgaattagaggtatgaaccctaagagtaagaatgcattcagtctccaatctatactggattagtgctacattataaatttattgaaggtaaagatcattttcttcctagaca

SEQ ID NO: 326069 - DNA, 832 bp, Homo Sapiens
  misc_feature (21)..(21): n is a, c, g, or t
tgttattcccagacttaaaanctgttgttccccagatcattaagaatttgccatattcaatcttattaattgccacacattttgctttgtaagatttccagtttctaaaattcaaacctcagagttgcatacacatagaagtatggaaggggtgatgaggtgaacgcatgtgaacagactcaggggtggcttcccatactacgcagaaaaacctggcatgcctggaatttcactacattacaaagctagtctctcactcagaggggccttgataaagtcattgttcattctggctttggaatttatttttaatggccgtattactaggaaacctatagacaccgatgaatctgaagctggtccttatttagtacacatttttagttctgaagaacttttggaaatataaaggacaaatgtaaggagaaaatgaagcctgagttgagaacctgagacccacagttatgtttttattttaaatatcttaatctgatttctagaagcttaacaagcctcattttacttataatcttacgttaaaatttttataggtacttaaaggaaagcagttcaattttctcttttttactgaaacatatgtttgtttcttggtgaaaacaatacaattctgtttctatcattggaaaaatgacattttcacatgttatgcccagattaaactagataaacttgttaatagtatactattatgctagatgaaaagagtcttttctaaaggcatctgaggatgatgatgactttctttactaagatagggtccgtgtattatttgtctcacatttattattaagctcttccagttttgagctgt

SEQ ID NO: 326070 - DNA, 438 bp, Homo Sapiens
tgattctgatggtacgtgtggttttgttttttcctctaacttggtaaggtaagtttaaaaagttggcactgactttgttgaagccccagatttctctcatagttcagcagagtctagaagactgaaaagcactggagtgcagaatcgagatggctggtgggtgggagtggagaatcagccactgacagagagtcaggggagctgacgctgacgtacctttaactttggagtgcgtcatgtgattgatttctcctaggtaatttgtgatttcagtttttttaggttaaaaataaaatgaatttgccaacagtttaccgttcacccacagtgagaatggagatgccacttagaaatgtagctgctggtttcacatgttattcccagacttaaaaactgttgttccccagatcattaagaatttgccatattcaatcttaa

SEQ ID NO: 326071 - DNA, 587 bp, Homo Sapiens
gagacagagtccccactgttcccatacataggatttctaatgttagaatcatgaggcttttaagaattgcacaagatgtttctcaggtcccaaattccagtgaaatagctgatgccaagcagtctgaagacaaccacagaggaacagaatcagcatgagaatagtttcttcatcttcctgtctcatgactccacactgcactctttaagcagtgatttccacactttaaaacccttaaaaaccctagctccaaactccctgggaggacggatttcattttcatcctacctccttgttctgcagccttacagtaaaccgtctttctttgctgcaacctgctgtattgacatgctgtgctcatggggcaacggacctattacggttataatactggcatgaaaacacacacaatggaagaacagagctcagaaacaaatccaaactcatggtcaactgatctttgacaaaggtgccaacatcacacaatggggaaaggacgatctcttaaataaatgctgttgggaaaactggatatttgcatgcagaagaatgcaactggacccttattttacttcatagagaaaaat

SEQ ID NO: 326072 - DNA, 730 bp, Homo Sapiens
agaaaaagaaataactctcctctttggttttggttcttctaaaatgtagagaggcttgtctttgcaaaaaatattcccatacttttcttttgccatctgacttagtattttcaagtagtattaggcacaatattgagattggtctgcttttgaacagtcatccaccatctcttctgttgcaaacgttttattagaaaggattttgtcatcctatacaacagcaacttggttgagaattgactgatggaataatccttttcttccactccatacttctttgcttttatattatataagagagcccagtcttctagaagggtacttctcttatctctaggctttgtaggaatatgtttagttatacataagaggcactaacacccctctaaaaattctcatttatgatctgtgcttgtagaagtctcattacagaaaacatctcttctctgagagtaatcaagattcaagtaccagtgaactatcttggaccagtaaccagaaaaagaaatccctaaaatcatattccagtagaaagaagacaagaaccagaagtaatttgagaatcttgccagttttccctcccagtagtggcagtggccatgagaaagaccaagctaagcttctatcaccatcagagaaagaaatacccgagcaaaataacaccacatctccaaagacttctgaacaaaaattccaagatagttttgcttttttgactgctgaagattct

SEQ ID NO: 326073 - DNA, 1076 bp, Homo Sapiens
  misc_feature (813)..(872): n is a, c, g, or t
  misc_feature (892)..(904): n is a, c, g, or t
cttttaataacaagactaactgtaccagtgactgataacatcctgaataaagattgcaatacccacattctaaggtacccaaaagccctaatataaacttcagcacacacctgaggataggctatactctacgtttgtaagagatgtcaagaaatagactatgttaggatgttgcttacctgacttcatatcttcaaagactaaaaatacaacatgcagactatgcgtacgccaaccatcttatctaaacatctgacaaagatgccacaattaatgctttaccgaagttcaatgataataactgattgtgcacaaggtcatccactcactcaaaagactgtgtgccaagtgctattctgggcaccgaaatataggagggaataagaccaagttcctgttctaatagaactgacactcaccttctagtatggaataatgtaaagtactgacaaatgctgtgaagagaaataaagaagggtaagaggagagtgatggaagggggggcaccatttgggtggggagggtcaaggaataagcatgacataaatgtagtaagctagcaagctgtgtacattaactatgggtacagaaggggcaaaccacctgattatttgggcgctgaatgttccagacagagatatcagcaaatgcaaaggccctaaggcaaaaacttgaaatgtttaaggaacagtaaggccagtgactaaaaataagaattctaccatacctagtatgtattaattctataggagaacacccaagtcaaacaccgaaagaatgggaggaggctgactcaggagaatcacttgaacnnnnnnnnnnnnnnnnnnnnnnnnnnnnnnnnnnnnnnnnnnnnnnnnnnnnnnnnnnnngagtaagactccatctcagnnnnnnnnnnnnnttgggagcaaagatctgaatacatatatgggaaggctaaaaactttataaagaccttagcctaaaaggtttaatgttatcttgatcacaattccagtggaaaatcttggggaggaaaaacagaaagtaaaaccctacagcttccaacaataatcaatacacggaaagttagt

SEQ ID NO: 326074 - DNA, 395 bp, Homo Sapiens
  misc_feature (119)..(132): n is a, c, g, or t
  misc_feature (268)..(298): n is a, c, g, or t
tagtgaacccaaattactcagatgttttatatttcagtgtgatcctcgcccagatcaaatacttgactccttagaagaataattcctaaagtcaaagtaatcactagtcttctcattgnnnnnnnnnnnnnntgttttttagcagctttaatacacaacatagaaaaatcaatgccaccaagatgtatatatgtatttatacatataccttaagtcataagggtttaatggtagataggagacacacaagtccaaggaactggacagnnnnnnnnnnnnnnnnnnnnnnnnnnnnnnncattcttctaagatgtttccatatcaactcttccacaatctacaattattcttgataagataggagacacacaagtccaaggaaccggacagagttt

SEQ ID NO: 326075 - DNA, 797 bp, Homo Sapiens
ctttgattaatttactctttaattttttctttgattaataacgaggtcaacgattttgtcatatttttattgggtatctaaatttctcttccgaactctctgtacatgacttaaacccatgttactcttaacacggtatgtcaaaacacttttataaccagagaatcctgctgtattaaagagaagcataattccttttcaagtagccatatataagttaaaaaaatccatacagttatcttgcccaattttagataaaatatttatcttcacatttcagaaatatagtttaaaaaatctttaaaaacccattgaaaaaactgattatccaccatttccctctagatcctttctctgttcatcttagtcctgctctgtgctctgggaggccaaactctaccaaacgcatcagctactctcccttgctttctggctcctggctgggtttgaccaaatgagggttatcagtaggtgatcatactgcagaaggaaagaggtggaagtatgtggtcctctatttcttttctgctttcattcggttattggcatggttactgaactgcagcttctgtttaggagtctcactttcatggttccaactctccactgggctcaactactcttgtctcttcctccagaccacttagtctccagaacttggtctccagagctaatgtcttttagtccacaggtgcctctacaatccttgttagttatcttaaatctggttgtatctctgtaaatagtacctcattaaaacatttcttcaaagtatcagcaaatgtacttggtttttg

SEQ ID NO: 326076 - DNA, 238 bp, Homo Sapiens
  misc_feature (14)..(14): n is a, c, g, or t
atgaaattaacatnttcatgttttcttaagccctttggtttagaaacttcttaaaatatcattcaaaaagagcttagagcatgtacagagttcatataaagctctattttaccataattgtatattactgctatctccaggaacatggatatgtttatttagaaaagatagtagggcaaaaaaacaaaacacaaggtccaggtacaaataattccagcccagttatggtggctcacac

SEQ ID NO: 326077 - DNA, 432 bp, Homo Sapiens
gtatccattccccagagcgatactgtgtatccttgaacagacggtttcttgaagtcagagtctatctcctctgtcacttctcccccttcattatctaagactgaggttgtggtttatatgcttagagttgaaagcatggggtccaacgtgttctgtactctgtagttccccagactcttcagggaaactacttagctctcaggtggttcttttctgtttttctcagagcaagttatctaataactgaagaggactcctgccctttggcctgttcctgactttctaactccttttgctggaggaaggggaggttgagcggggtgccctgtggtgtgaaagccccacttgccctctcctctatactttcttccaatgcagacgggagaaagtatcataaatgtagtgactgtgggtcagggtattgagctcatg

SEQ ID NO: 326078 - DNA, 782 bp, Homo Sapiens
  misc_feature (760)..(760): n is a, c, g, or t
aaaatttggatttttatttacattagaactacattgctcctagtagaacattacctttaggggactaattttccatggagaactatttcagcatattgcatgctgctcagaccccaagtcagatatgcccaccaagccagatgaagctacacaaatgtggtatttaaatgcattttgtacagtgacttcagagtatctcacatgacatgggtgtaaactggctggggagaaaatgatgcttgttcacctcttcctccagccgtggttaggtggtcctaggggtagcagagggaagggagggttttgtgcagtcaagatttgcttttccatccttgttcttctggaatgtctaaaatctctgcatctttctgaagtttaacaactgtctccagaggtttgccaggcagcagctctcagaagtttccaaagctttgcagaatcttagatctggaattaaagaattcaagcccgaattgtgagaaccagattttactcaacagaaagctctttctaaggaatctgagctgttcactggtggacagtggtggggcttgagtgctccttgttaataggatgggccatgcaccctctctggatattcaccaaggcctcttcagaatagggtttgttctggctagaagcgtggtctagaagatggttaagctctttgccagctctcatttggagttttattattgcataaaatcttcgctcactctgcaaatcttacgtaatctggcaccttcggcaccaggtgggngcaggggcacttctaagtgggc

SEQ ID NO: 326079 - DNA, 762 bp, Homo Sapiens
cttatcatctcctttattaactggacacatccaatcacctggagactgaagaatagctaccacttcactatggcccctttctcgagctttatctaatggagttttcccatcttcatctctcagatctggatttgcaccatgccgtaacagagtctttgctacttgaggtcttccaaaacatgcagcataatgtaatgatgatgacctttgacctctattaacatctgcacctctctcacaaagaaattctaccatttcctgagttccaaaagcagaggcccagtttaatagagtctgacctacatcatccatgaaaatttacttcaaaggctcctgtgtcaattgcatctataagtgcatcggtatctttacttcgaatacaatctataagctgccgatgtgagcgctccccagaactatctaatctccggagtcctgggattctgcctgtagatccagcactagactttggcaaagcttttcgtccttcaaataatagcaccaagagaaggtcaaccaaacgcatagtatcaagcacacatctttcatcaccctgcaatgcactttcaattgaatctggaagctccgacctcagaagatcatgtgttactaccggagagcctctgcaaagtgttgagagcagacttacaattgttgacacctgattactcaatttggaatctgcagtggtggatggagctcctgtggtgctgcgacctggtttgcatgctgatgatggtcctgaaacagtaccaccagcag

SEQ ID NO: 326080 - DNA, 710 bp, Homo Sapiens
aaattgttaccaaattctttataggaaggagagtgcaaaattatgtaaatgatggtcaggtttactgtgttatattaagcaatttaaagtgataacaaaatgaaaggtagtgcagcaaaataatataactggtgagtagacctactttcagttccatagggtgtttgtggcagaacacagtgcagaacaggaggaatattacattttttttcaaatttagaataattatgtccatcaaatgtttcttactgaatatgtctatcaaatatgtttcttattgaatatttctatcaagtgaatccacaatttaaaagtcactttggttttatatatacacacatctgcagatataattttataaggaacacacaaatattatcctgtccttgcgtactggtttccatgacatagtatcttgttttctttcattgtggtacaatgcaaagtagccacaaattcctcccatcccaagtagcgtctctttgtctactacttgactttgaacttggccacgtgactttctttggccaatggaaattagcaaagagaatcaataagaagcttgagaagtgtgcaaagcctgccttgaagcttaccctctcttgctgctctttgcaaacctgaagaatctcaaattgccctactcgggggtgaggagccaccacatgggagcagtggtgagccagccttgctgaggccccttagaccaa

SEQ ID NO: 326081 - DNA, 411 bp, Homo Sapiens
  misc_feature (40)..(40): n is a, c, g, or t
tgtggtacaatgccaaagtggcccacaaatccctccccanccccaagtagcgtctcctttgtcctacctacttgacctttgaacttggcccacgtgactttctttggcccaatggaaattagcaaagagaatcaataagaagccttgagaagtgtgcaaagcctgccttgaagcttaccctctcttgctgctctttgcaaacctgaagaatctcaaattgccctactcgggggtgaggagccaccacatggagcagtggtgaggccagccttgctgaggccccttagaccaagtagcctgccaattgtcagaattgggagtgaggttttccaagacctctagccccagctgagccagcctagcccagaagagccataccagttattccagctgatttacagaattgtgaga

SEQ ID NO: 326082 - DNA, 846 bp, Homo Sapiens
  misc_feature (495)..(509): n is a, c, g, or t
aaattcctatgttagttgtgaacatttaaataccaagacatttctagcttctctcaaaatgcaggagacccaactacctgaagtctgagttcccatatggcaatgtttctggtgctgaacagtcactgccacctctggactctacaaagcatctcctcctgcccacagttcccactccatccctggctggcccttgtggtcattcgagtttgcaacccttcccaaggaattcataaatacatattctatcactaagagtttaaagaaaaactgtattatgcttgtaggaattctggcttgtaagtgaattgtttgcatacaaattggtcttctgtagaactgctgagtggcagggatgaaaggtcaggtgtgtcagcattttctgagttaatatgccttccccttggaatggcactggctgttcacaggattgagtgaccttgctggataggatagcctgtttagagcaggggtagtttataagctggctctatnnnnnnnnnnnnnnngagaagttatttttgaagatttcattctgagattattttttattgttcttaacagaaaaacagagaaaaagttggtaccttatattgctttatccctggcaaactgagagaacaaagagatcatttatagtgactcactctaacaaagaaagcttctctgcttgaccttactcaagtgtcacaagattttcaaacatctcttaaagaacataagaggagacagactgtattattgttcccgtgtttagcccaacaaagtacaaatggagagttttattgtttttctattgttgttcttattttaagatcacagtttgggaagtatttcatctctgct

SEQ ID NO: 326083 - DNA, 451 bp, Homo Sapiens
  misc_feature (27)..(27): n is a, c, g, or t
  misc_feature (46)..(46): n is a, c, g, or t
  misc_feature (54)..(218): n is a, c, g, or t
attcaggtgaattccccatgccctcancctccccaagtagttgggnagtaacannnnnnnnnnnnnnnnnnnnnnnnnnnnnnnnnnnnnnnnnnnnnnnnnnnnnnnnnnnnnnnnnnnnnnnnnnnnnnnnnnnnnnnnnnnnnnnnnnnnnnnnnnnnnnnnnnnnnnnnnnnnnnnnnnnnnnnnnnnnnnnnnnnnnnnnnnnnnnnnnnnnnaaaatctttattttgtgatttctacaaacctttaatcacgtttagattttaaacatttttccaacctctataagctagaatagatggggatctgttttttaacagaaattttaagctgttttagagaaaaataaacttggctcaaatgacaaatgtgaaattatcaaaattacgaagcataggaggatgtgggaaagggttgtagtgttcacaacacatagcaaagtatttcc

SEQ ID NO: 326084 - DNA, 1017 bp, Homo Sapiens
  misc_feature (169)..(179): n is a, c, g, or t
  misc_feature (204)..(307): n is a, c, g, or t
aagtctacatcatgctttgcttgacatggttttagaaaaggatgtttttcaagttttgtgtgtatgaacctttggaaggtttttaagtgtcttggatcttcattaatatcactaaagaaaatacaataacaaaacatttttatgaattcaggaagtacttttaagtaannnnnnnnnnncccagacagggtctcactctgtcannnnnnnnnnnnnnnnnnnnnnnnnnnnnnnnnnnnnnnnnnnnnnnnnnnnnnnnnnnnnnnnnnnnnnnnnnnnnnnnnnnnnnnnnnnnnnnnnnnnnnnngcatgaaccactgatccagccttaaataattcttcattagtcacaaatccctatatacatctgaaaacaccagtacaaatcagtctgcagataggggttcatctggataatcaaatcccttataacaacttcatatacctctccagcattcgtggcccaaaattagaaaccactggcagagactatgaaatataaaactgcctagttacaagcagaatggctctttaaagtaaatattaggaatcgtaagtgaaaatttattgtgtgtcaggtaccaatgttttcccactataaaactgtatttccaaatttaaaatcaaaattagtcatgaaaatcatttatatatgcacgtttacttcatcacaggcaatttttaagaaatgcagctactcataaaaaggccccaggacatactggaacacagaatgtgccagcttccatttccaccaccaaagagagaaggttggttttggtttgaagctcccactaccccaacccagagtatcctgtaactaaaaccttaatacagttttgaacatatcacaggtcagagctgcctaaaagagagaaaaatatatatgacagcagaaatgtaaaaatacaaatcataaaatagccacctcactgtgaaactagaagggctatggcagtaataaggatgagaaaaagagcagcaaaaacacaaatttagagatttctctaaattaat

SEQ ID NO: 326085 - DNA, 1068 bp, Homo Sapiens
  misc_feature (520)..(520): n is a, c, g, or t
tacaacttttcagaatagatgaacactgaagcttcagtgtttaaacctctcctggtgttttgtgctcaagaagttggtatcgggttgttttaacagtcgtcatctttatcaagtaataccgggaaaaactggggcagagcttttaaagaatgaatgacgatgacacaggcgttttctgcttacagatttcctcacatccttattaggctattaggatcagctctgtcgtgtgctcagttttcatgttttcttcttcatgtgaaggttgtagctcaagaaggattgctgtactctgatattctcatcagagtttcagagtccatctgatttctttcagcagtaaagattgtaactactcattggcttttagctagcatttcatttttaatgggctctaccattttaaaattctccattctttcatggagatcagtttatcccagggatgtgtgtgtacacgtgtgtttataaagaacagtggatgagctgcttcactcaggttttcaacagcagcctgaanctctacttcatacaattttatatcaagtcagcttttctctgtggccagaccctccgtcttagtgtttctttcactggtggctgggaaaggcatcccttcagcggggaaggcactgtgcctcatgtttaaaatgttctgcattctcctacagagtttcttgtgtgggatgatgtattctgtgatccaactctgaccagctgaaatcattttctaattttagcataaagcatacttcctttgactttttcaagaaaggagaaacaaaaccagacactgctttgacgttgttgctagaagggatgtcttacataattttatccatctatacattatttcctatgaaaagatgaccttacagtggcttcatagcatgacctgcatctcacacaattccctcccccatgcagggactagaatgtgatcgttgcaggaagttgatggcttctattcttgaaattgtggcattagctgctgtgtggccgtccctctcagcctgtgttttgaaggtcgcgcacttcctcagaatgccggccccactccgtttccag

SEQ ID NO: 326086 - DNA, 594 bp, Homo Sapiens
ccaatttaatcagatttacgagttgacatgtacaaaaaacacccgaacaatgcagaattcatcgcaagactagggactgaatctggaaggtagagtccccgccccagggaggggcccagcgtgttggagatctcaaggttttttcccactgattctctaagtcttggccttatctaacacatgaaaccaaaccccacaactgaggctaagatttaagagctacccagagctaaattttcccctccccaagcctccctgctctagaagtggaagggaaagaaggggagagactatgaacctaaggagagtgggagcctccagcaccaccggacaggggactgcatagctgtccgacaactgagctcctcctgcctatctgtggccaaatgccctccatgtttgcaggcaggttggccaacaggggacagggagggtggggggaggcagaggggtgccccaaacgccctggagaggccgaagggaggaggggcagcactggaggccccattcggacttgctgccacgggagtcaccactgcagggggccgatgtcagctcccagctcctcttcctttagctgaagggcttcactgg

SEQ ID NO: 326087 - DNA, 823 bp, Homo Sapiens
  misc_feature (696)..(716): n is a, c, g, or t
atgaggagtattcatagcactttatttgtcaactttacaaattacacagtcacattaaaggtacattttgtgtgcagatgaccatggcattctgaggaataattgagtttctcggcatcactaggactattgttttcctactttaaacttggacatgcttcatgcttaggataccagacagtaaaaagtacgggaacactaggcacattacaaaatttttataaaactgtactttactcaccctaaaagcccacatccatgttactttattgaggaaaacatgtccagaaatggccacaaacaggggctgtctcttatgggacagtagtcaactcatcacctatctttcctattttccacttattttcagctttgaattttaataactgcatttcatccgtttctgttttgatttcagctacaaagtgaattacattttttaaattagaaaataaggatttcacattatatttaatgttttaggtacattagcaatctggcttcaaaatgatcctcttgtttggaaacaccctgaaaatatgaaggaaaagacagtcctaaccccctgaatgaagtgtgattttaatggaataatattggttttcagtagacataccagaacttctacgttaaatttagggatcatactgttattctaatgatgctgccactgcttggaagaattttggaatggcnnnnnnnnnnnnnnnnnnnnnggaattgccttcagtggacaattttgaagagagatgaataagaaatagtgttgggctgtgcacggcgatgagcacttgcctaaaaggctccatgtgagccaatgatt

SEQ ID NO: 326088 - DNA, 611 bp, Homo Sapiens
  misc_feature (451)..(451): n is a, c, g, or t
cttgtagtagtttaaatgctctttatattcagaaatccaaactacgatacaccaggtttgagggtctcccttcaacatcacagcttacaggccattcaatctctccagggcctctcctccgttaagtgtgatggctggacttggcgcaccctgcagccactttggattaatattctaggaccccatttccaagcctccaggagttgccacgtgccaccacttctctttacccatcggaacacgagattggggttaggggaggtgtgttccaggactcacccacagtcactcactgggcaggcgcagaggggcacctggaaacccaggtcaccgctgtttccatgacacgggtggcctctggtattagaattaaaaatttataaacaagaaaatgggggaagcagatttcacagaaaagtctgtgctttaagcaaagaaaaaggaatctganacacttcgttaactgggtataactaaccattggagcaacagcaaaaccaaggcagaggctgagggggagatgcactttagcccaggggggtctctggagtctgctctcctgcctctgggtgtgcgttttaacccttccacagccagccaaggcccggcct

SEQ ID NO: 326089 - DNA, 811 bp, Homo Sapiens
  misc_feature (777)..(777): n is a, c, g, or t
  misc_feature (787)..(787): n is a, c, g, or t
tttttctttacctcctggaatatgcacacagtttactacagcacacatattcctgttgcaatgccctacttttgattaaatatctttagcgagcctgtctttgttatttaggttgacaggaacattcaaaattctctcttctagctacttgaaaatacacagtaaattattgttagcaatagtcaccctacagtgccgccaaacactagactcctatcttgctgcaaatttgattccattaaccaactcctccccaccccctgctgcatcctttttctaatgacatgaacatattcagtcatttcatttctttcactggggttggccctgtggcagcccacgggaggccagagtcccctgtgggagactggaccaaccctgaaggccagcctggcttccagccaagtgctgttcttagaagcaggagttctgtggtatgtctggaagagtgacccaattctctccggtcacggatgagagggcaagttgtttagtatggcaatccttacaaaggatccacagagacaagattcactcgcggcctccccagtgggcctccagctcagatttcctggcccacctcaggcccgcccagtccagatctcagggcagggccctgaaggcgcagtgcaggaacctgccatgggtgggacgattcttctcagcaggcaagtttgggaaatgaagatctacaaatccccactcaatcagctcttccaggcttgggaatggcctgggcctcagcccccagtcttctaccccacccactgtgccttncccaggcttncaggcgtcctcttttgaaaggatt

SEQ ID NO: 326090 - DNA, 951 bp, Homo Sapiens
  misc_feature (403)..(416): n is a, c, g, or t
  misc_feature (927)..(927): n is a, c, g, or t
atttaaaaaagaataaagaatcatgtggccagttagctcagttggttagagtgtggagctcataaaaaattaaagaatgaatgtttgaaattacacgtaactaagttcatataattttaacttggatacaaggcattgttatgctaataagtttattataacagtaagtcaacatttattgagaaagttatgtggtaagcactatgctgagagttttcatgtgtatttattatttacaatcagacttggaaaagttaacttacccatgaatacccaccaagtaaggtaatagctggacttgaacccatgtgtgtttattctagagtgcttgctttgaaccactgtgcctgctcatattggggtggaagccaacactacatgactcttaattctcagcgtttcnnnnnnnnnnnnnnaatcctgcatctttaatgatttgaaattacagaggtaattagttgcatacctttatatattgctttatatttgcaatgactaaacctaatagacttgaatccccttattagcttttaataaataattaatgttctgaatcctacttccaatgtagttatttgacatctaaggatggagatgctaattagtactgcacaatatacccactctcataaggcagctgtaccaaaaccgctttagaaaaggtcggaattattgtcaaatgcaatagcctccttccatacccgaggtttccaacttctccacaacatttgaccagtctcccattgaacctctgccctctctgggcttctgtgacctgggccctccttttttccctcctagcttgtttaccactgctgctgcatttgctgctgttccttcctctctgccagcttttacttgttgggattgccaataggtctgaatctttatctctagtctgacctcctcctcagtcccagatccagnttcacagcagtctgctgctgtcct

SEQ ID NO: 326091 - DNA, 806 bp, Homo Sapiens
gctttacaactttattgggatatatttcattttaatgacataggccagtatattttttattttaaaaaaattcagtctttttctttaagtggcatattataagaagcccctttccaacatgtaaaacagaagttgcagtggtggaagtggggtgggaggtctagaacccagctcagagatagaccacggagccccaggcctcctgggcacggctgaagaacctgctgtacatgccaagagagcgtgtaggctgccgagagagcatgtaggctgcccgagagagcatgtagggtgcccgagagagcatgtagggtgcccgagagagcatgtaggctgtggcgtcatcttgggtatgctccttggatctgccagttcttgatgaggacaaagcaatgttggccacggtgggaaggaggatccagacccaaagcctttggaaggacatgtgcaatgcatatggcatgttgggttttggcttggagtatgcagattgagatgcatatcattttagtgtcatgtcggccagcaggagtcaataatgaagtccttcccaatcatttaattagaaaggcatagcaaatgcaggagcaaactaacagagcttttattttcttccttgattctagaaaactcttctttccagactgtacatggtgaaatataactgcttgaattgttttttgcagttaccaggttcctcatcttttctctccctgctcctcctctttccctccttccattccccacttccagaacacaaactgaactgttgacttttgtaataaaatcctaattatgtatttttt

SEQ ID NO: 326092 - DNA, 671 bp, Homo Sapiens
  misc_feature (164)..(164): n is a, c, g, or t
  misc_feature (657)..(657): n is a, c, g, or t
ggcgttggatctcccttaaaactgccttttggattcagtgtttgtgcttgagttcgctttcaaatatgaccataatcgtgtgggtgcaagactgtacagtgatacatatgtagaggtaaagcattcattttaatacttaaagttatataaatcttttcaaaaanagtgttttgttataaaatacgctgtttgtacccataccagcccacctcttctgaggccctgtattcaaatagatgatagtgatctatctttcctgcatgaagtgtaggtggcgagtgggcgaggggcgcagacttctttgaaatcgaagggtacagtcaaatctactgctgatttggttgttttgttgctgtggcagaatatgccatgaaacacatacagacttctccgaacgtgcaccctcatcagccacctcctcccctctttccctgagtgctgtgaacacagcaggacctgcacacttctgcagatccagctcctacagcttggggcactaggctgcctttcctagtcctgtcaacaaccatacagtgcgaattgctggaattagctgctattctatgtgggagtcacattaatctttttcttatctttttctatgggggaaggtatagggtgggtaaggaaaaaatgttggaatgcttttaattttgnttgaaatattagga

SEQ ID NO: 326093 - DNA, 737 bp, Homo Sapiens
  misc_feature (352)..(692): n is a, c, g, or t
gactcatggggcagaagtccaaagtccaaagttaggcagtccagagttaggcagtgggtgccctggtgaccagcccccaataaaaaccctgggcactgagcttctaatgagcttccctggtaggcaacacttaacacttctcacaaaccatggctgcaggaattaagcatattccatgtgacttcactgggagaggactattggaagctttctccaagccagggagaaagccaggtactcactgccttagcatgtatcaaaattctagattcccagaaggaaagcagatgttcaccataaatcacactgtacaacagtttaggcacaatgagccattcttttcagctagggnnnnnnnnnnnnnnnnnnnnnnnnnnnnnnnnnnnnnnnnnnnnnnnnnnnnnnnnnnnnnnnnnnnnnnnnnnnnnnnnnnnnnnnnnnnnnnnnnnnnnnnnnnnnnnnnnnnnnnnnnnnnnnnnnnnnnnnnnnnnnnnnnnnnnnnnnnnnnnnnnnnnnnnnnnnnnnnnnnnnnnnnnnnnnnnnnnnnnnnnnnnnnnnnnnnnnnnnnnnnnnnnnnnnnnnnnnnnnnnnnnnnnnnnnnnnnnnnnnnnnnnnnnnnnnnnnnnnnnnnnnnnnnnnnnnnnnnnnnnnnnnnnnnnnnnnnnnnnnnnnnnnnnnnnnnnnnnnnnnnnagttagggagtgatgggaacactcccaaactcccaggtttctata

SEQ ID NO: 326094 - DNA, 677 bp, Homo Sapiens
  misc_feature (67)..(75): n is a, c, g, or t
ttcgtgttacctgctatttttattccccatttgccatcttctgattgggggttgatgttttacagannnnnnnnncaaaggctttatttcagtttctgaggttaggatgcccctgtgcccctcgctccacacctgggcaggtctaaacttccttccaggatggcctccacacacagcctcccacctggggtcacctggcttcctgggggacccgcaagaggggggcagggagcagcagtccgggtgcggggatcgggggacctcggcgggggcatccacaggggctgcaagacctctggtcagcatggcgtgggtggggagagcgtttctccctggggtcctgagccagtgactcctgttaggacctttgtcccacctccgcctggtggaccggcagggacctggtctagccagtcctgcagcctccattcccccacctgcccctccccgctctgtggtgtggctgcccaggagagaaggggcccagggaagggaggtctccggcaggggtggggagtgacaggccagggcagcagggctgagccggagctgctcacagctgccaggcactggtcatcatggccacgaactcctcatccgtgttcatggaggcactcacgccgctgtagtagtcctggaattccgccagtgtgaccttggggtgggcacggccactg

SEQ ID NO: 326095 - DNA, 813 bp, Homo Sapiens
  misc_feature (772)..(772): n is a, c, g, or t
cagaatcgtggttgtaatgtttgttgaaacgtaatgcatctccagctgtgccattatagttaccaacgtgtaaacgatatttgagaaactcattagccacataaaactgatcatacaaggcatatagttcgacaccattaaagtcttcaagatctattctcagaatcatttccttactcttggtcagaagatgaattttatcgttccccagccaaaattcccttctgaggtttccaaagcctgctttgtagtcttgccatgttctggtgaagttggtgctcccatcgagacgtgcctgcagcactgtccagcctccccccatggtctccatgtcacagtaaacttcaaagctactatttttgggatcaggtgtaactctgtaggtctcactgcttcttttgcctattgcgtagtagtcagagcaatctttatatattagatgttgaaactggacgtgactgtatttgttccttggctgggacactttgaacatttgccatccaaactattgacaacaaatgttagatttgccactttgctgtcaacataattttctatgttgttcatatttacaagattcagcttctccaggcgaccatgaagtacattgatctcctctttggcattctttagctcagaggacagcttgttaacctcactctctaattctctaactctgttatcaccaacctctcccggggctcctgtactgggtaacaacagtccgtttctgcctgggtctccgttgtcattcagcctgcagcttgcagtncttggcaagatttctttagactatttacgctgtgccgaaat

SEQ ID NO: 326096 - DNA, 698 bp, Homo Sapiens
ttcgcagagcactttttattcctgttaattttgaaaaatttcttttggttgaaacagcagatatacaaataggataaatcttaaacataaaatttggcagaaattcacaacaatcccatttcacagtaaattccagacattgcaacaaagtcctgttcttcagttcttcaggattgattaacatctcattgttgaaaagtcagaaacataaatagaaactcccaagtggtctggtagaatgagtggatggaatagcccaggttctatttctttgtctttacaatgactgtgcttccagcctttatttttgggtctggtcttcaagcttaggaacacatcgtaccacaggactcgggggacgagccaccccaaagtgagtgccactgataccgaatcctgtgaacttgctcttgaaacatgggtagctgagtccacgggtgtcagggggctggctttgcaactattaatatgagttatttgaattaacttccatagagaatgtaatgtttatgaaaaggtaattagtctgtgtgaatttgaagcttacatatattattaaaagtcaagaataatgcagcaattgttcagaattagacaaaaggttgttgggggaggtgttggattatgtttaaatcagaatcgccagctcatggtcatggtaaaaagcccatcagtttcagtattgttttaaattcctt

SEQ ID NO: 326097 - DNA, 554 bp, Homo Sapiens
  misc_feature (70)..(70): n is a, c, g, or t
  misc_feature (74)..(166): n is a, c, g, or t
  misc_feature (197)..(198): n is a, c, g, or t
catatttaatggtgaatactttaaagttttcccccatgagatggaggattagtcaggaacatctatttcnttcnnnnnnnnnnnnnnnnnnnnnnnnnnnnnnnnnnnnnnnnnnnnnnnnnnnnnnnnnnnnnnnnnnnnnnnnnnnnnnnnnnnnnnnnnnnnncaagagaaaaactccatctcaaaaaacacannaaaaaaagaattcttaacagttttatttgtaatagtctaacagttaatacaaagatatccattaacagtataatgggtaaatgaatagtaatacaaaaaaaatcatgcaggaataaaaatgaataaagcattgctacatgcaacaacaggagtgaatgtcacaaaaatataacgaaagaagccagacaaaaataatacaaactacatgatttcatcacttacataaagttcaaaaactaatctaaagagaaattaggatagaggtttcacctttatgtagagtacaagagacggttctggtaattatcttttcacctgtatccatactcaactgctcgtgccgctcgtgccgaatt

SEQ ID NO: 326098 - DNA, 872 bp, Homo Sapiens
taaacctctttttaatattgttgttcatactgtgtgttgtttctccttatgaaagcctttcagagctgagagaatatacagagggtctcacggaagccaaggaagacgatgatggggccacagttcccttcagtctggtcagtccgttatctcccctgctgagctcagaagaattaaaaaaactcatcgaggaggtgaaggttctggatgaagcaacattaaaggtaggtttcctttgtaagcatctgcagtaaccaatggcttattatggctgtgtggccaccttagttgggccagaggggaagtagcttgagtagcctgctcacatcagacccaggttgcgtcctgtgatggtgggacactgtagcacttgaccacagtaagaccttccatttgaagagagccttttagcttgtgaaccactttcagtagattgacttcttgcatcttcttttgtcattttataaatgagaaaggtaaggctcaatcaaggttacagaacctgggttttctgtctccaagttcaagttcagtgctgtttccacattccatgtgctgctgtcctggcatgtgtctgttgtgggatgctgtccattgtaaacaatgtgggttacaagagctctcacctggagctttcattatttccactgtgcatggagaggtggctgatcccagggctcacaagtcccccacgcttcagtcaagtcattctgaaagtctcacttcccatatgttttctgagcatgacccaaaggggtgtggggaggaagtggccaggctgagctggggccagcagtcaaatgagctcaggctcatgggtcctgcaccctctaggtgctgccccaggcctccgtaggcttttggcactagaa

SEQ ID NO: 326099 - DNA, 580 bp, Homo Sapiens
  misc_feature (241)..(241): n is a, c, g, or t
catttttagccaaatgacttgaaattactcccagtttaacgttaatcatcatgcaactatctcagactgtttcaatagctagtaatccacctggataactattatccagtcacattctccatcttagccacaaagatatcaacagcaatgcgtgtcttgctggacgcaatgaacaaactatttctagccagtttctctcatgacaaatgctagagacattttatcataggagtacaattgnaggtgaagcctctggggtctatgaaatatgcagctagtacaggttcccagctcatgtgagcagaataagggagtctatttcctgttcaccccttccccttgtacgtacatcgtggactagatgtgttgaacctgtattctctcaggaaagggaactacaaggtgaattcaaccaaatcaaaactcaggaatcacggtgtggtgtgggggtgtgtgcatcgctgtgtacattacctcaatttttcaaattttgttttgttacagacttacagcattattgtgtttgttaaaaaaggctattttggtctaatatttacatcttataacctttaccttttgc

SEQ ID NO: 326100 - DNA, 667 bp, Homo Sapiens
actctccccactttctctcctgtgcatcccatcaaaatcagtccttaatcctccatttcctacctccctctctcccttaatttacttttatgacttccatattacctctatgtgaacggcccttgccttgaagtgttggatactgtctttcctccgtagctagagatgcattaagccagtaaattctaccttaaaacatctctcagatctgcctttaataatgtatataggaataatttttaaaatattaagttaacacatattgagcttttattatatgtacaagcactacacttatgtgctttaactcatttactccttacaaccctttgtaagaagtactattatccccattttaaagattaaaattaaaaaactgacgcaaagagaagttaatttgcccaatgtcacactgtcaataaccaggagatgccaggacttacagccaggcagactagatcagagctaacgttatgtggtattgcacttcatgtataaatataaaagctatacaaaaaaatggtatagtattgcttagttcaggactggattactgctgaagtccctaggtccatttgttcaaaccactgtttgtcaaactatgcccatggaccaaatcaggccaagcacctgtccttgtaagtaaagtttaattggaggccaagtg

SEQ ID NO: 326101 - DNA, 577 bp, Homo Sapiens
  misc_feature (1)..(1): n is a, c, g, or t
  misc_feature (553)..(553): n is a, c, g, or t
nggtgagccactgtgcccggcctgtaattttttatgttgcctattgatagggcaccactgctgctctttaaatgtcaatgaaattattttggagaaactttcttcacctttactaggtttcttcttacggtttaagctcagctacctcttcttttctgcctaaaacttttctcttgatcaaatatcagaatggaatatgatttaaaagtttcattttagacgtctcctgaaagctgagcatttggtatcttaaagcctcttaccagtttggatagatatggatcttcccaaaattaatgagctccttaatatcgacactgtttatcaacataaaggatcaatttaggaagattataaaaactgaagtttccggaacaataaatgggagaattaatcgtaagtacttcctgagttcttcacaggattatagaattttatatatggaagtaattttaaaaataatctggtctagagtttcctaaagtttgttccataaaattacaatcccatggcattgtatagaaaaacgggagtcccagtgatccagtatgtnctggctgtaaacctcccttcctcg

SEQ ID NO: 326102 - DNA, 623 bp, Homo Sapiens
  misc_feature (143)..(160): n is a, c, g, or t
ttgaataaaatcagtattttttatttatcaaactccaattccatttcacaaatgtaagttatcatcagctccccatccactttctcccatcttcttatctctttcccaccctacactttctctcccctacaacccgggttccnnnnnnnnnnnnnnnnnntccctcagctatttgatcttaatatcactgcaaaaatcaaaaccagtgtctcctgcccccaggacagtgggtatccccacctggctgcctcctgtagctcatgcaaaattcaacccataattatagatgcattctcagtttacgctgcacttgagattcaatggtgactaatgtcaagatggagagatttgtgaataaaaataatttcaacagcaaatagaaattagttttgtcttatttgtcattgacatgggtaatgtacagatggtccctaatttatgatggttccactttcaattttttgactttacaatggtgcaaaagtgatatgaattcagtagaaaccatactttgagtactcatacaaccattctgtttttcactttcagtacagtattcaataaattacatgagatattcaatactttattttaaagtaggctttgtgttagatgattttgtc

SEQ ID NO: 326103 - DNA, 303 bp, Homo Sapiens
ggaaagaacctcagttgaatgaaatctacgttgtttattgtcttggaaaccaatgaaattaaagtctaatttgtaaactgaatagcaaatacataattcatcttgcagaatttctttttcaggcctaccccttgctcaggttcaagaagacagtgaagaggctcattccgcatcttctttctttgcagaaatttctcaatatacaagtgggtgagtaacaatccattagttcagtctattgtaataattccatttcttgttcagttgtttggcaacgtaacatttgaatcatttaaattccag

SEQ ID NO: 326104 - DNA, 684 bp, Homo Sapiens
taaggcctttaaacagctgatttgtacaacaagactcacagccttgctgaatgctaatgacagcccagccctcctggggagagtgacacagtttgtctatcgcccctcactcccaagagagccactgagcaccacataagccaggagcttcacagacctgatcctgagttggctgctcacaaaaattcccaacaacctactctcaaatttgtagcccagatagtccatggaagggaaagggagagcagtcacatgttttatagaattgttggtgcctggaaagagagtccacataggcaatcacaacacccactgcatccagaggtgcagaacctgagccagccattaaaggagtatgagaggccctgcaaagaatccagatctgaggttacacagacctaggtcctactcctggctctgccacttggctacctttgtgactttacctaggggtgatattcaaatatgtaataaccaatgcagcatggtcatgtggcagacactgctgtgtgttcactaaaaccaccttcctttcttccagggaaaccaggtagactacatttcccagcttcccttgcagtcagcggctgctacatggctgattctgtgaataaaatgtggtggaaattaggtgctccatgcgagtcctggctcatgggcacctccatgctctttccatgttct

SEQ ID NO: 326105 - DNA, 627 bp, Homo Sapiens
tggatgggtgggggtagcaatctagactcctggactcttggcccatcttagtcatttgtattcttttacccaccagtgatccaggttgcaaggtcaggggaagcctgacttttgagaggttttctacctttcctctgtagccaggagagctctgcattgcatggggtggagggagggctgtcagttaaggtcacagggcttaggtgaaaggtaatgccttgggggagagtctgatgataaagcttgcagataagctcatttgttgagtttcagcctaggttttagctgttgtccctcctctaggagttgctctggtaacagcacgctaccaagggaaaatggttcatcccaggcttggaagccgaggtctttgattaagacactgattattaactcagctgtgggcagttgaaacctgcttcgtgtatccatagcagcttgattcgatgcctggtcaggatctctggaatttaaaaaaatttccccattagcccttttctgcttcttttcttctttcatacatataaaacacaagaaagcattccgggaatttgtacaagtgcctttacttttccttgtagtaacacagttctacttaacatataaccacaacagcaattcttccag

SEQ ID NO: 326106 - DNA, 238 bp, Homo Sapiens
tatcatttttctgggcagttgtgttacagctgaaaatcaagagttctattactaaagaagggtagaatggatattaggggtcagttagcaggctgtgccctaatacttatttaaaatgtgaatgtaaatgtaaatgagcctaaatcttggtgtctctcttatgagaaaacctgattacttgcaagagtctttttaaaataacatttaaaccaattaagccaagcacggtggctcattc

SEQ ID NO: 326107 - DNA, 781 bp, Homo Sapiens
ggaagaagctgagatgaaacatgactctcataaacaggaactttattaaactacatgttacataaaagaacatataaatggaccattaaatacattcagtttattttaaacaaatttacatagatacttatttacatttctccattgtattcttaaattatttttccaagcttactaccgataaaaggtaatacaatgatcatctgctcacacagatgcatagagaagttgtccacagggctaagtaaagcaccacttcccaggaaacacagcttattagatcttccagcaacaactcatgctgaaggtgctctcttctgagcagcccttgaggtgaggcttttgctttagagatgctgggggttggttctgaggagctgacccagggcagagatgggtccttgctgattgacctgacttggactcacagaggtggaaagacctgtggagaccatcatcgaggccatggccccacatctgtgatatgggaaacaggcttgggaagaggtggtgacttcccaaagtcacccagcatccatgatagaggaagggcctgggagcttggtacccagggttcctccaagaggtcccgatccctctgctatccacaaatccacaaacttagaatcacttgcatccattttccaccaccatggaccttatgctttgaactgttttgtctacctgattaaatatataacttcttaggcttcttgagatggtgaaaagcagctcaggattcccataagcaactttgtggagccctggaaatacctactca

SEQ ID NO: 326108 - DNA, 441 bp, Homo Sapiens
  misc_feature (414)..(414): n is a, c, g, or t
ggtcacttattagtgaaacctcattttagatctgacattggtagatagatggatttaggcaaatatgatgcgtttgtggggaatccacgtggttgacgttagaacctcccttctgcagactgttgcctgtcatctaagcgaattggaaatgctgagcttccataagtcagctgagttttaaaggtaaacgttatggctgaagtagtaaagcacctgaccacaaaacctcttgtaaaaacagccctgagtaggtatttccaggggctccacaaagttgcttatggggaatcctgaggctgcttttcaccatctcaaggaaggcctaaggaagttatatatttaatccgggtaggacaaaacagtttcaaaggcttaagggtcccatgcgttggtgggaaaatgggattgcaagtngatttcttaagttttgttgggattttt

SEQ ID NO: 326109 - DNA, 697 bp, Homo Sapiens
  misc_feature (259)..(267): n is a, c, g, or t
ttgttttgttttgtttttctcctcctgccaagggattaacgtatagggtcttaaacaaggggatcccccacttatagctgacagcagcagctgcaaccactgactctcctgcagaatggcagggaatcgaatcaaaaagaaaagcaagtggacaacctttcctccgggagcatgaaacacaataccagcctttcgccaaacccagcagacaccagccctgattggaggttgcctcggaacaaagggaaattggtatttnnnnnnnnntcttctgaaagccaactcagcagatggttttttcctgggctccaggagaagggagggaaggtgggggtaggggaaggatgctgggataacacaactgccaccaggatacagatgactgagaagtgacaaagatgggcaaagagggctgacctctcaccccagaatttcacaaagggcaattaacacccatgtggtgggtatcctggacgcgccccacttcccaacctgcagctgctgtcccatcacaggccacgtctgggggctttattaagagaagaggaggagagaggccagggaataaaaggatattgagggaagtgatggaaaagtttaattagcaacgatagtttgttggaaatctactatacagtagttttaaaaaagaacactttctatttccattgcactgttaacatttcagaactgtttt

SEQ ID NO: 326110 - DNA, 769 bp, Homo Sapiens
  misc_feature (483)..(483): n is a, c, g, or t
ttttttaaagttttgtgacactggtttgaaaagaattgcaaaatcctaaggggagaggcagaaaaaaagtcccagagggggtgtccacagcggggtgtgttccaggtgaccgagaagtctccgtgttgccaccaccttcctctgtgagcctgggaacctgttccatgctgagggccttagctcctctacctgtcaagtgggcaaagcatcccggggtccccctgcaggccacttgcctgctccttcatgtctccaccaagggagcacatggggccagagagagaagaaagagaagtgaaacgaagttggtggcttggtgggataggaagctgaaaccaatggttaagtcaaagttttgttttccttgatttgctatacattaagataatctctgcaatgtgtgtttcccattgtcagctaattcagaggcagatgttgcttccgttatttaaaaatctcagaagcctggcaaaaaggaacgcntatggaaagcaccagagagctgactgtattcttcctgacccatgttccggcatcaatgggtttggaagacaaccgtgccaatacgtgagcagacggaggccgactgagcttccagggaagtggggtgccacagagaatggcaggagtctccaccgcccccacccactagttgctgttagagtagggtcggggcaattagacaattccagggggaagagattttagtattttcatccattcatgtgaaaatcatatgcatgcaaaaattagcagtcttcagggtgtg

SEQ ID NO: 326111 - DNA, 773 bp, Homo Sapiens
  misc_feature (68)..(68): n is a, c, g, or t
  misc_feature (126)..(126): n is a, c, g, or t
tgtattcgcacaggcattttgttgcagctgaactgcattgggttcaaataataaatctaccactgaanccactgcacgaacttgggcaaattacctaagttttaaacttcaggatcccacttggancatacaggataattgtactcttccccgcgtggctgaagacaggtgaggtgtgaaaggtacagccccacacaggcacacagtttattatcacggtatatgactaggttttcagttacaattactttaaatacctcttccaggcaacttcaatagttgtaaactattaaactctccccttctttttacatatttcccacaatgtccagcatggtgcttatcaaaacggggtacttggtaaatgcctgtagccatgttgaaattatttgatcctgatttatttactttcctcatttccatagaaagctaaattagtccacaggaaattagccatgtatttctacaccttccactggaatgttcttcgttctatcaaaaggaaagaaaagctggctcactttctgcagattttttacttttccatttgcgttttaaggactattaaaaaaaataggactttcttttatctttccacatcatgaatcagtgcactcagatgcaaagatcattttccacttttctgatcttttccagttttattatcatctccaaagctaatgagagccactgctccctatctattctctgctacagaagtcagtatgtctagccacataaatgatttcttttaaactcttagtatagccacg

SEQ ID NO: 326112 - DNA, 444 bp, Homo Sapiens
atggaagcctgtccatactttggccttccccccttagggtcctagccttccgtgcgcattaaaaattccacaagccaacctatttttcatcatagcatccaatatcattcctctttccactatagatgctgcctaatacacagctcccaaatagtttctgagttttatgtctatccattagatctcaatctcatcttattccagtatatacaatcccagagaaggaacgtgattggcgttgggaacctacctttgtatcaattcaccatgccaaggccagagatactgtaattggcctagctttaattagatacctgtccttagacctgccatttgtaaccactgagaaagacatgagggaaatagaggtgctcagtttagtagcagaggcaggggaattggcaaacaatgacacagacattcacacacactgcaactttgtat

SEQ ID NO: 326113 - DNA, 588 bp, Homo Sapiens
atgagcacctgagccactgctcccagccagaattagcattaatttacaagctgctattgtcatttagtttatatttaacacttaaatgattatatagacattgtccacagaatcttcacaatctcattcttctgttctcacttgaaaagtgacatttggcagacggtagccagatcattaaagtagtaggtttaacatagtagtatagaaataaggtaatagacgcataaagttaaaataatattagattgagggagattgtttcacttaaaccattaaataaccttttttaaagtttgctgctaggttagggtggttatgcagctatgtgtcatttcctgaaattatctttcatttgttttatgagtaaaactgtctctataagtttaccctaaaaatccataggtattttgggaaattgaattataagtggctagactaaccaacatttgtttttaggcaaacttagattgctctataaatcttaatcaaatcaatcacctatggtaactggggaagggggttcttctgtttattagtcaaagatatgatgaatttatttgtttttattttttgcgacagggtctc

SEQ ID NO: 326114 - DNA, 742 bp, Homo Sapiens
  misc_feature (84)..(95): n is a, c, g, or t
  misc_feature (445)..(445): n is a, c, g, or t
aaacatggtgtggtgggctgaataatgacatctcaaaatgtgtccacgttctaactcttggagtctgaatattaatttaaatgnnnnnnnnnnnngactttgcaggtataattaaattaagaattttgacatatggagcttatcctggattatctagatgggccctaactacaattctatgtatccttgtaacaggaagattccacatggacagaagaggccaacttaatgtgaccagagaagctgagattgcagtgatgtggccacaagccaaaaaacggtagtggtcagcagaagctgaggaaggcaaagaaaaggattctcccctagagcatccagaaggaatgcagccctgctgacatcttgcttctcgcccaatgataccgattttggacttttggcttccagaactgtgagagaatagatttctgatggtttaagtcanccaggcttgtggtagtttgttatagcagcccacaggaaactaatacaaatggtaaccatttcaaaactccattgttcagagcatttgtgaaatcactgaagtctcaggttgaaggcacagtggaaaacaggatgccaaggcttgaagacaaaattctctgtggagatactggagatattaagggcacttataatctacagcaagtagggaactaaaacagggcaaagagagtgcacaagggcattcaacagaagattaaacagattatgaatgtaaatgttctaattttctaatgct

SEQ ID NO: 326115 - DNA, 870 bp, Homo Sapiens
aaggttcatgtttttctgagtaaatgtggtttattagcatgaaatattatgccttttacttaaattattttatgtaaaatagggcactgtttaattatgaaagggggaaaatcattccaaataagagtttaatttttattaattataaaaaactctgtattagtttcctagatgtgctagaacaaattaccacaaactgggtggctttaaacaacagaaatttattctcttaacagttccagagactaaatgtccagactcaccaatgtcccagtgccatgcttcctccttaggccctaggaaagaatacttcctagcctcttcctggcttttggtggttgccagcaatccctgctgttccttaagcctataagtggcttgactccaatctcagttttgttgtcaagtggtcttctaccctgtcttctatgtttgtatccgtgtccaaactctttttctagggagaccagcactggaattagagttcaccatggatccaatatgacctcatcttgactacatccgcaaagaccctgtctccaaataaggtcacatttacagggtaccatgtgtttaggatttgacatatcttttgggggacacaattctacccactacaggcccatatccttatctaggatgttggtggcaagaaggtgaagattactacctcttttgatataactagtttctgaggtatttaaaaatttggttttaaaaatattaagctttttgctcatttgcatgtatacttttctctcaacattgttttggtttatttaggttatttgttaaaacttcagtaaatactaaagttacttgtattagaacataataaaagtagagaattaaactacctaaataaacgca

SEQ ID NO: 326116 - DNA, 483 bp, Homo Sapiens
  misc_feature (167)..(223): n is a, c, g, or t
caacgcctctttctcttggtgattctttctttacctcagaaagttctataagcaaaagaaagtcacttcaaaacaataaatttagactgacagccaaaagcgtgaacagaacagacccatgctttcaccactgtgctttacagtacaagtgacaagcaggaaaagcnnnnnnnnnnnnnnnnnnnnnnnnnnnnnnnnnnnnnnnnnnnnnnnnnnnnnnnnngcattagtgaatttcacaaggtagctcatgctggacatcaacgtatataatgtagtgtataaatgccccgagaattgggaagacagaaggtttttgagagctacagaactggagaggggcttgggatggagggcctgagtgggtcttcgacgggcagagtagggggtgatgacagtcagtgcaagcagaagagatgaaactgggcaaggctgtagaagtcattaacacggagctctcatttgtgatatcaggaaatgctt

SEQ ID NO: 326117 - DNA, 790 bp, Homo Sapiens
  misc_feature (160)..(186): n is a, c, g, or t
  misc_feature (284)..(306): n is a, c, g, or t
  misc_feature (317)..(359): n is a, c, g, or t
  misc_feature (385)..(420): n is a, c, g, or t
  misc_feature (500)..(525): n is a, c, g, or t
  misc_feature (529)..(637): n is a, c, g, or t
atgcctctacttcattccttcatgtgacaactaatgaaaaaacagatggaccctgcttgcaaaaccataggtactaaaaaacaaactccagggccacttcagcctcttgagtagctgggattacaagcacaagccactgcactgggtaagttcatacacnnnnnnnnnnnnnnnnnnnnnnnnnnncagggtctcattctgtggctcaggctggaaagcagtgatgcaattatagctaactgcagcacgagccactgcactggctaagttcatacacacacacnnnnnnnnnnnnnnnnnnnnnnnagattctgtgnnnnnnnnnnnnnnnnnnnnnnnnnnnnnnnnnnnnnnnnnnnatgagccactgcactggctaagttcnnnnnnnnnnnnnnnnnnnnnnnnnnnnnnnnnnnncattctgtggctcaggttggagtgcagtgatgcaattatagctcatggcagcacgagccactgcactaagttcatacacnnnnnnnnnnnnnnnnnnnnnnnnnncatnnnnnnnnnnnnnnnnnnnnnnnnnnnnnnnnnnnnnnnnnnnnnnnnnnnnnnnnnnnnnnnnnnnnnnnnnnnnnnnnnnnnnnnnnnnnnnnnnnnnnnnnnnnnnaatgtcaaagtgtgggactacaggcatgagccctatacccagcctaatttcacacccttttaagcctgttaaaacatcatgtgacattctaaaatttttcaaatataagcaacttattttctttaagtggagaatcataaatgctcagattaa

SEQ ID NO: 326118 - DNA, 512 bp, Homo Sapiens
  misc_feature (44)..(44): n is a, c, g, or t
  misc_feature (301)..(318): n is a, c, g, or t
aagatttaagttccttgagtctccgtctcctcctctgttaagtnaaagcaaatgcttacctcctcgggattgttgaaaggattaaagtgaagtaaacaaatgtaaaaataccttgtggaatgattgccacttagcagccactcaaaaaatatttgcccaaacctctgttgtagagatgttgaaaatcaaatgaggttaattactgtgaatgtgtaacaaaaagtaaagcaccacataaatgcaagataatatcattactcagaccaacctgagcaacatagtgagaccctgtctcaatttnnnnnnnnnnnnnnnnnnggtaatatcattactcataagccaggaagtgtgggagtgggtaggaatggagaagcctgccttttgatcctggccagaccatcacgaaggcctttttacctaatacaagtagagaacaaataaggggagacactggctgggggaacagggcaacagagagagatgcacaggtattgaagcatggtgctagctct

SEQ ID NO: 326119 - DNA, 830 bp, Homo Sapiens
  misc_feature (794)..(794): n is a, c, g, or t
attcggcacaggatttttcaagatttggtttttctatgagtatggccaagaaggaggtaaacggaactgtcagactttttttctttctttagacagataactgtgatgtctgttatacagatccctgccagaagtactgaacatagctttaaaaattgtgactgttggggtttcgttattaattagctttgtttatatagtggttacacattaatgtcttctaacttttagtatatgttaggctgtttgccctgttggtaactggcctccagttatgaatggagtgtaacaaacagaaaagtgaaccactcatagtgtgcagctaaactaccaaccagtcttgttttggtataaattattgctctgtggttctttcccattcagtctctcctgggtgtccatttctttctagctttctgtaatggctccctcattgtatcagatacattgccataattaatacataatgtgtctgggtgaggctacacatctattaaagtttattggtgttgatacagacagtttttttatattcagttgctagccttaatttttttcttcatttctaagttcccacctgcatttcaggtgcctgaatatttaagccttagtatatggtgaaattctaattgaaaaacagtttggttttcttttgattgtttcctctgaaatatttaccttctaggtttaacatatattaatagtacttggtaaattttctttctcaaggtgactggttctgctctctttggtttgctcttatttatatttgcaatttatcgatttttaaaaantttctcctttttagacctttacttggtggggggatg

SEQ ID NO: 326120 - DNA, 978 bp, Homo Sapiens
  misc_feature (129)..(191): n is a, c, g, or t
  misc_feature (810)..(810): n is a, c, g, or t
caagccttgcttaatatagcaaaagcagctaatctgttatcatctgaggtcagaactaacattcagaaagttctcctaagggtttgggtcttcattccaagtcagtcatcctacccaggagaccacacnnnnnnnnnnnnnnnnnnnnnnnnnnnnnnnnnnnnnnnnnnnnnnnnnnnnnnnnnnnnnnnacaaaccctaaaccctaagcagaatgacattaagataataatttgtaattgcaatacacacagcaggcattcaaaaatggaagaagaaaggaaaagctgcagaaaaatctttaagtactccacaaactgcacaagccacagacgattgaataatcaagctgactttcctagggaaaatagcattgctattaaaacaagctgagtcatcaaatattagcagttataaacaaacttctacatcatccagtctagtggtctgcaaacataccctatggaccaagtccaacctgctgcctgtttttgtaaattaactgtcatcaggcataactcacacccatttgtttacctgctatctgtaaacagaagtttcagcgaatagttccctcttttaaaagccagagttgaatagttcctgcagagtagtctctgcaggaatgttttggccccacaaagccaaatacatttatgatgtggccctttacagagaaagtctgctgcacctatctaattcatcaaacccattcaaaggtaaggaaactaaggcccaaagtggtgaacctccaacaggaggcaaagtcagaataagaagctcaggtctctcagtaaacagccctttgtntcgttcggtgcccggctctacaaattatttattgcttgagtatgaagttaatctgaacttcagtttcttcatgtataaaatgagattacaatgctgatcctcttcccagcattaatgaccatttttggagaattcttagagttcggggaaagctcagttctttctgcc

SEQ ID NO: 326121 - DNA, 734 bp, Homo Sapiens
tctgtcagctctccagaccttggcctcccaaattgctacttgccatttactgctttgggcttattctggccacctcattatttctagcagaatttactgctttgggcttattctgtccacctcattatttcatttggaaatacatcattaaatacatcatttcatgttgtcattgtgaacgtatgttcatcacaaagcttaaaaataatatgatgatattttctgcctaggagctaaaagtcagtattttggctcttgccacccaaatcctgactggatgtgatgaagtgttggaaatgctacagcaggtcacaactgccctcataaatagtgacataagcagaccgtgaagcagaggttaaaaaggcttggaaacaagttaactaaggctactatgcttggtcaccttcttccagtgttactgacctccttgatgcatccaaatttacagactctgatcatggcggatgccctgatgcctcagctagtgcagctggtactctatacccagccagacggcgttgctgcttaaaacccagtgtccggtttttgctgaggtgggctgttccccgtgtggtgcaccagaccagaagtgcaggctgttccctgatgagaggtaatgaatgctgcttccttgcaggaacccttttcttgttttctttgggtgaaagcgtagtactccttttatgaaaatgatttttagcaaggattatctagctgtgaaaagaaaaaaa

SEQ ID NO: 326122 - DNA, 1149 bp, Homo Sapiens
  misc_feature (348)..(348): n is a, c, g, or t
ttttgaagagacatacttttatttcatacttgcaggagtgtggtagcatcagtatttagtgcatgaggtcacagaaaacttataaaaagcaattccgaacaaaccaaaattcataacttctcaaggctccccgttaacgcatccaatactggagagaaaaaacccagcagtacaaacaaaacaccaaatacgtatcaggaacctaatactggccaatgtaatttttttaaaaagttatttattcagtttagattatttcagtaataaataagcatcttttttaaaaaaaattaaacataacacaatattgacatcatcaggtaatgtgaacatcccccaagttccccnaatcctcaggactaaaagtaattatatttgcattacttgtgcacattccttgactacagaaataaaagaagctcagtgacatcacagattatgggtcatgctgattatgtgaagatgatctgtcttcaggtccttcagtataactctggtaagcacctactcagcagatcttaatccccagcaccctacacacccctacaactcaccccagagactcaagggcctggggaattcctgacacgagctgttcagctccaggatgccagagacccaatcctcttagcctgcaagcaccctgaggctgagggaacatggatagaggcaaggggagagggaaggggatggaagggtatttgcataacacgggcttctgagacccttcagttcatagaacaaagagaaacagaagaactatttcaggtgactatgggtcaaaccctgattacatcagagctaagagccttccaaataccacatgtcatggaagcaccattccatcagataggctggagaaggaaaacaggtgcaggcaatggtgataatctatatggagatggaagaatctgtggataatctgctctagcttatgcattcgatttttattaactttatgttttcacgcctgccttgtgccaaaaacatttttgttcagcattccaaaagactggataaagaaggcaaatcgcaatggaagaggagaagcgagcacagctttagactgattcccaatcctcacggactctggacatacacagatttaaatgtgccccctcatctcagagaaaaggtaaatgtgcagtt

SEQ ID NO: 326123 - DNA, 455 bp, Homo Sapiens
ttttttagtttaatcaagttgaaatttcttgttaaaaggaataaaagatccaacttcaagcaacccccttgtatataaggataccgtgctattctgcctatagcagcagtcagggcagcaaggtgttttcttttctatcagatttcagcagactaataaaactcaaagcctgaaaaagggagagatgaggtagtctctccaaacatgctcacgtggatggtgccaggaagcccctaggcaagtaaaataacttctttggaagcctcaaatcactttagcctcaaataaaccttgacacccaagtaggggtatcaggcaacccaccaaggccatatatatctccgggttgctgtgggaaaaagaaggacagagtttcctaatccagacattgaaacactaagtggtaccctcccatttgtaaccgatgagtattcacaaggacaggtgggtaatgg

SEQ ID NO: 326124 - DNA, 480 bp, Homo Sapiens
  misc_feature (399)..(399): n is a, c, g, or t
  misc_feature (404)..(404): n is a, c, g, or t
  misc_feature (467)..(467): n is a, c, g, or t
taacgctgttgtatgctttttctggaatgttctctggccccggctgcttgacctgtgctctgtttgtcttctgcctcaccagctctttgcacccctcttctgcccatcaattaaacatcagtgttcttgggagtcaccctgggtccatccttcctgcctgtgctgggccatctcatccactcccatggcttgaaatacactgatgggctttgctgagcacctccatgccgaaaacccccaaatccgtattccagatcagatactaacagtagttattgcctagagactgtccaaaggactttgcattgattttttcacttaattctcacagcagacccatgaggtgggcccccactttaaaaaatgaggaaactgggccggggcacggtgggcttgtgnctgtnaatcccaggcactttgggagatgggaggcaggaggattaattgagggcacaagtttcagggancagtctgtggttt

SEQ ID NO: 326125 - DNA, 870 bp, Homo Sapiens
  misc_feature (247)..(247): n is a, c, g, or t
  misc_feature (462)..(518): n is a, c, g, or t
  misc_feature (845)..(845): n is a, c, g, or t
taagcagcagcagccttcttgtccttggaggaattcagatttaatgaggacagagagatacaacgaaaattacacaacccaatcccacagaatgtgagcagatgaaggccatggctaactgggcctcagaacagagggccaggcctctggtagtcagcgtcccacctggaccactctggaagggacatagtctgggaaggaatcaggaggcccacagctccactcccttctcagtcagtctgtcttnggggggcccaacgttggaggaactttgggccaatcttgaaaaacacttcttttggggtcagagctctcaaaagggtgaccaaccacagatgaaagaaaaggaatcgaaggctaacctggtttccactggaaagaaactcgggtacacagtgtcgacagctactcctaacagctcagtgaggtccgtgctatcaacacagttttcagcaccacttnnnnnnnnnnnnnnnnnnnnnnnnnnnnnnnnnnnnnnnnnnnnnnnnnnnnnnnnnaggggtgccacctgggttccctgcaaagcctgctccctttccgctttcaccccccgggtaaacaggcaggaaccaacgcagccacaggctgcacccacactggggccttcctcttgtttgctcaaagccatctggcagtatgggaaacggaaaagctggtgtccccagagctcacagagctgacaagaggcggaaccgtgcagaaaaaccggtgtgtacaaatgaaaggagaggcagtacctccagagggtcaaggggactccagacaatagcgatcacagtcggccaaaagcctctgtccgctcccactcattcgcccagctcatncttggctcgtgccgaattactgggc

SEQ ID NO: 326126 - DNA, 745 bp, Homo Sapiens
aggaagaggcacttttaatctggaggaagaaataaatggaagactgtaataggaaaaatacaggtctaggaaaaaaataatttttttcctttgatgctggccaaggacccctctacataatacagttctcctgctggaaagcatcagggcaaacagagttattccaaactctgcaacagggaagactgtactttgaccttcttttcctggggaaagggaacaactagtaatctttaaatgtcaaaacttttcttctaaatagtacattcattaaccagtttcttctggtggtgcaaagaacactcaccacagtgagcaataccactattcaatttccccttttggagaggtgacagcgggggtagaatcacctgggagtcagctgctagtctttaactgatgacaaggccttgcaaatccccctgagaccaatttcactcttgagctcacagggaagcagccagtctggtgtgggctcctgtggtgtaaccatcaaatgtggaagacctgatggtgttagtgtgtggggatgccgggctgaaattcaacagccttgcaaaaagaaagggaagatgggatgtgttaatattgtagtggcatgcactttccagctctccatggagctctctttatatatgaggtaattgaatgtcactattctgtgccatacagcaggtattatctagccaaggttataattaccatgaagtgctgtggaatgtagtaggaggcttttcacttgggc

SEQ ID NO: 326127 - DNA, 629 bp, Homo Sapiens
  misc_feature (254)..(334): n is a, c, g, or t
  misc_feature (340)..(361): n is a, c, g, or t
  misc_feature (455)..(499): n is a, c, g, or t
gcacttgtctattaagtaaaggagttaagtgtttcttaaaagggctattccaagcatgacgtcttttaattttatgcttagccagcctccaaatctaaagccatctgtaaagaaggtagtaatcctctcgtgaaaatgcaggggccatagatgtcaaatgcatattgttctgattgattgattgattgattgagaggaggtcttgctctgtcatctaggctggagtgcagtgacccagtcatggcttactgctnnnnnnnnnnnnnnnnnnnnnnnnnnnnnnnnnnnnnnnnnnnnnnnnnnnnnnnnnnnnnnnnnnnnnnnnnnnnnnnnnatatcnnnnnnnnnnnnnnnnnnnnnntggagagatggagactccctctgttactcaggctggtcttgaactactggcctcaagcaattctcccaccttgaagaacaggattttcaagttnnnnnnnnnnnnnnnnnnnnnnnnnnnnnnnnnnnnnnnnnnnnnctgcttaacaaagtccatttaggatcaaatgagataatgtatgtgaaaatactgtgtaaattatgaaaaatgtatacctaatacataaaactctttgcactgcataatttttggaaattaccttgagggg

SEQ ID NO: 326128 - DNA, 511 bp, Homo Sapiens
tgaaaaatcacttttggatttgcagaaaccctggatacaaagtagttcaattaaccataaaacaaggatcagctgatctctacacgccaccacctgtttcatgtacatgggaagagtaaaaaatgaacccgggataaaataaaaccaaaagcaaaccaaaatggctaaatcattggttaattatcccacatccaaataagtctggttctgtggaatatctaaaagtcacagttttatgcctttagctactatacataagggatgactttttaacctcccagggcttatacaacaaaacacacctcagaagcttatataacaatatactactttttccattttatcaacaattcagcctgccttaagctacaaagtaaaataattagacaactgtgatatcaaaacaaagattatgtaagttgagccaaagagtcacataaatgaacttgacatccccaatattcctcattcttctagtttactaagatcatggcaattcatagcatgaatt

SEQ ID NO: 326129 - DNA, 829 bp, Homo Sapiens
ctgctgtttggtctagtgagacacacttggtgtaaatatctgtgccctgtagtacccagattccaagggaccagagagcatgcccgcacccacgggctggggggagcccaggtcctccagggctgctgtggagcatgggcttcttggtgcccagtcctatagctgaacttgggcggcctctggctgttgcccccagggctggtctccctatagttcagaggctagccagctctcagcagcagggagggccttttccatagtatgaacttggccacaccagaccagtcagcagtgtcgggaatcttggccctcaaggtccctgcctagccctggcctggacttcagcactggtcaaaggtccccagagctgcccttggctctgagcaggtgagtgaacttcccagagcacttttgtctgggcctctgtgccagtgtaaactgataatagtgatttccctgccccacctctctgccagctatctaagttttctttgttacataatcaggattaatttaagcagcctaggccatccatttagaaatggttagtgaagaaaggtgaatggggaggggtcagagtcccttagggggccaccaggtgcgagtccccttgctctttggggccttggtttcccttctgtgagttggggcagttgaagggaagggctgctcaggtggtcctgccacatcccagtgttgtgtctagtgagtacaggtgagagtgctcccaaccagggcagatcctgctgctaggcagtgagtcaggaaggaattggtaaaaatgacgtcattgctaagaatgacgtcttttttgctgtttatccaaagg

SEQ ID NO: 326130 - DNA, 749 bp, Homo Sapiens
  misc_feature (666)..(666): n is a, c, g, or t
  misc_feature (669)..(669): n is a, c, g, or t
tctgcttagtgccatattttcccatttttgtgctatttcctagtgattttgctgtttaaaatgcctccctcctccgaagcttggtattgaagtagtgtccagtattcctaagcagaaggctgtgaagtgccttacagagaaaatacgtgtgttagataagctttattcaggtaggagttaaggtgctttagttctgagttcaatggtaatgaatcaataatatattaaataaggtttatttaaacaaacacataaagcaaggttatgtcttgattgatagaaatgttgtgatcgacgtttgcaggaacccaacactgtatttctcctggggatccatggttcagtgttccctaattcagtgtttccattatggttcagtaggaacataactaccaagaatagattgtaacaccttgggtgggtcaaagaaattgattggacacttcagtgtttctcatctttgaagctccgatacttggaattttcttaggtgcaaacgtatttgcaagagcacaccagcaaatcctaggctttagagtgtgacgtttttgtggaataattattctacttgtatgagaagttggcaggctaaacattccatttatttaaacattctgctaaactaataatttggggattatgttctttgatttcatagatatttgntgngtgaaaatgtgctgcatttctcttaaatataatcctagtagaagaatggtttacatacccaatcatatcacctttttact

SEQ ID NO: 326131 - DNA, 313 bp, Homo Sapiens
ttttaggaaaagttttttccatttaatactagactttcaaggattgagatgcaagctttgtatgcaattacatccaatgttaaaattggtaatacataatttacaaagattaacatcaaaacaatcatctatttagatatgcttttgtaaaaaggaaatatattagcagcatttatattttccgcaatcacacagcctacagacatgcagactaactctgtatctatttgcagtgatgtagtgctttgccccgcatttcaaacaccaaaacccgcctggcagctggggggttctttttatttcgttattataa

SEQ ID NO: 326132 - DNA, 575 bp, Homo Sapiens
  misc_feature (419)..(447): n is a, c, g, or t
  misc_feature (468)..(524): n is a, c, g, or t
  misc_feature (538)..(538): n is a, c, g, or t
aatttttaaattttattctagtttcaggggtacatgtgtaggttggttctataaataaattgcgtgtcttggggcttggtatacatattatctcatcacccaggtaataaaaaatacagaaagcttcacaaatttgtgccatccatgtgcagaggccatgctaacctctgtattattcaaattttaatatatgtcctgctgaagtgagtactggatgtggtttttaaaaagaatttgtgtattcttagggagacgcatgttaaaatatttaaggattaagtgtcacgatatcggcaacctactgtgaaatggttcagaaaaataaagataaagctaatctggccaactgttaactggttgaatgtaaggttgcagctatattagtgtttattatggttctttcaacttactggtaaacnnnnnnnnnnnnnnnnnnnnnnnnnnnnngagatacggtctcactctatnnnnnnnnnnnnnnnnnnnnnnnnnnnnnnnnnnnnnnnnnnnnnnnnnnnnnnnnnactcaagtgatccntctccgctgagccctcctaaatagctaggactacagg

SEQ ID NO: 326133 - DNA, 589 bp, Homo Sapiens
  misc_feature (29)..(29): n is a, c, g, or t
  misc_feature (40)..(40): n is a, c, g, or t
  misc_feature (45)..(45): n is a, c, g, or t
  misc_feature (50)..(50): n is a, c, g, or t
  misc_feature (102)..(102): n is a, c, g, or t
  misc_feature (111)..(111): n is a, c, g, or t
  misc_feature (138)..(419): n is a, c, g, or t
  misc_feature (447)..(447): n is a, c, g, or t
  misc_feature (450)..(469): n is a, c, g, or t
ttagggtcacgatatcggcaacctactgngaaatggtccngaaantaagntaagctaatctggccaactgtaactgtgaatgtaggttgcagctatattagngtttattanggttctttcaacttactggtaaacttnnnnnnnnnnnnnnnnnnnnnnnnnnnnnnnnnnnnnnnnnnnnnnnnnnnnnnnnnnnnnnnnnnnnnnnnnnnnnnnnnnnnnnnnnnnnnnnnnnnnnnnnnnnnnnnnnnnnnnnnnnnnnnnnnnnnnnnnnnnnnnnnnnnnnnnnnnnnnnnnnnnnnnnnnnnnnnnnnnnnnnnnnnnnnnnnnnnnnnnnnnnnnnnnnnnnnnnnnnnnnnnnnnnnnnnnnnnnnnnnnnnnnnnnnnnnnnnnnnnnnnnnnnnnnnnnnnnnnnnnnnactttgcctaacccccaaattttccatngtnnnnnnnnnnnnnnnnnnnncttctgaataacttcctcctatcagctattactccatttcctttctccattttgaagcaaaactcttagagctgtccattctccaccctggctaacatggtgaaacccgcctttactgaa

SEQ ID NO: 326134 - DNA, 430 bp, Homo Sapiens
  misc_feature (73)..(73): n is a, c, g, or t
  misc_feature (97)..(190): n is a, c, g, or t
ccccccaggtgcctgggaattaataggccgtgaagcctactgtgcccccagctgattgttccattaatcctgnaatggactccatggaattttaatnnnnnnnnnnnnnnnnnnnnnnnnnnnnnnnnnnnnnnnnnnnnnnnnnnnnnnnnnnnnnnnnnnnnnnnnnnnnnnnnnnnnnnnnnnnnnnttcaaggtaagtttaatattctctgtataaagtaaaagatgaaatcccaggcactattgaaagtacattctcttgtgcccttctcagtgcatggatgggagactaagccgggttaggaaaagacaaaatccagtatcacgggacaaaggcaaaggtcagggtattgaattcaccttattgtgttggaatcctttctccagagcctaactttttcatgccttgaatttaatcgtgccgaat

SEQ ID NO: 326135 - DNA, 824 bp, Homo Sapiens
  misc_feature (436)..(436): n is a, c, g, or t
  misc_feature (474)..(474): n is a, c, g, or t
  misc_feature (694)..(694): n is a, c, g, or t
ctgtgacattttaaaggaaatatttgtttagatttcttaggtacaattctccgaatcactgaaagttttcatctgttagtgatttttctttatcacagttaatctcagctatggattcaggttaactgtgagaaacaggtggagagccatcattgcagtatcatcacctaggtggagagccatcattgcagtatcatcacctaggtggagagccatcactgcagcatcatcacctactatagggatttaatttttgcatttgctctaacagcatgcactgtgctcccgccctctaaccaacacaggcgttgttgttagaagttatttcagcaaagcttgagcttttctttacaggtcttgctgctaagagaaaggcaggagtagatactactacactgtcccagctgcctgtgagatctagcacagagggcatttncctcaagacatttcaggatcgagctttactgccctaanttagttgcaacaattaggcagtccccacaagttgcctccttcttcccaggtctgctgcccaagctacagagttgtatatgggtcttatatcgtcctagtgactttttatattcccctctgcacacgataaattttggattaggcaatccatccctgaattcagtcttatccccatccagagtttcacaaaaattcctcaagaataacattttttgttttntcttcccccaggacaaataaagaatttttcccctaaaaaaaattccaatggtgatttcaatagatagttaaattgggaaacagtttaaaatatgggctgagatctgaggagagcaaaatcacttggtgac

SEQ ID NO: 326136 - DNA, 1098 bp, Homo Sapiens
  misc_feature (287)..(315): n is a, c, g, or t
  misc_feature (466)..(466): n is a, c, g, or t
  misc_feature (580)..(580): n is a, c, g, or t
tctaggttgtattgttaccagtaaaattcacagagaaccaaactggcaatatgtacgatgtggcttaagatattttagaacaatgtatgaaaacatacatcacagtatgaaacagtgaaaacttggaaggtattttatccatacaatgcaaaactctacagccaattttaaatgctgtagaaatcaatctgctaacataggaaggtgttcacaacacattgtttgtagggggaaataacaggttaacaaggaagtgcacgctgtgatactctgtgcaaaactaggcnnnnnnnnnnnnnnnnnnnnnnnnnnnnnaacaaagaaaagagtctagaagaacatacaccaaagtgttcatagtgattttggataaagtaggtagaaagaagaatcttttgatgtatcaatgctccaagacttttttaatgatgcttgtgttaggagaggggaaaaatagtacacagancaaagagcatcttaagggcaatctgatcacatctgtgccaaataatctaacggaaaaatgtgaaacagatcatggatatctggtcaggggtaatcctattaaaccaaaaccccntctctatgagtaccccgatatgggtcactggctgcggaccaatctctcttcttaaagctgtgctatagctctcagaaaaaggtgtgagctgttctaggccccttcgactttggccccagtggcgccaatgggccagtggtggtggggactgtgaatctccctagaagctattttccagtttcagaatataccacagaatcccaagtctgaaaaagaactttgagaagttcagctctgactcaggcttgtactgtatctaaacatccctagtagatcagaggcttcaaaatatcaaaacttggtatttttttattacactatatccttcagctaattatcccaggatttcctctctcaaacagttggtaaaaatacatttactttgaacaacaggatgataggaatagataaggtcagaattagacagaactgtgtctgagtcaatgaaaaacaaaaattgccgagtattttaaaatcaccattactgaagagagtattcctttgatgaagtctgttac

SEQ ID NO: 326137 - DNA, 691 bp, Homo Sapiens
ccctgttgctgtttgaaggctcattagccattttaaaataagtcccaccgcagcttgcaccatggcagagtttacatgaaacttagagtcagtatgatgccaaagtctactgagtctgagttcttacctgtttcacctcaaagtgattttgagtatacctcatagcctgtgtctcaacttagagtatctgaatcattacctgttggtttactgacacttaaagcctgtggtacttgaggagtagagtaataggcaaagagaaatttaattttactatgtagataaagaatggggcaagctgtagtaattcctttatttttaatcgaggatttaagttatataagtacacattaagattctgtttttattgctcttaaaatgattattataaatactcattaatatcgttgctttagagtgccaaaggaattcttaattttagcggtaaaaagaaaatcatgttatgaacatttaaaatattcatacctgtaggtttctattggaagtaaaaaataaaatattcatacctggattttttactcagatacactaatgaattggaacattctggaatgggcatgggcatttttacatgcctagttttaaaaaccattcctgattaagaactattgccttaaagaaaatcaggccgggcatggtgtctcatgcctgtaattctagcattttaaga

SEQ ID NO: 326138 - DNA, 765 bp, Homo Sapiens
  misc_feature (396)..(396): n is a, c, g, or t
atatattctgagttaaaaaaaatgcttttaaagaaggtgtgagcaaagataaaaattatttcttacagctaaagaaaagtagtctcttcatctttatccatgagggaataactcattgacacttataaaagagcgtcctagcccaagatatcatgtggtgggaaatttgattggaagaatctcttccactaacttgtgcatgagaatatttgttccagctccaaagccttagaagctgttagagaaaggtgggagggtatttggctggccttgggaaatggtaacctaacactggaagccccttgcttttgttctccttattgtacataagaagatgagattttatttccagatttcaaaacaccggaccaacttgcaataagaaataaacccccngccaaggtgatgaattatgttgctttttaatttagaaactggccctccgatcagaaagagtaaggatgactttaaataaccagattgatttgcaggttggggcaaagtagagggatctggtggatctcagagactctttcttggctgcctagaacctcatattgaggctccttcagaggctgcttgtgtgagcctctgactaaatccttaaaataactgctgttggaagtcctgtaagtttcaaaatttgttactggagcaaggaaagggtgtgttgggtgtctcactcggcttgaagtaaggacctgaaagcttagcagccaataaaaagagaattaggggaagatgaatattaattttaggaaatac

SEQ ID NO: 326139 - DNA, 615 bp, Homo Sapiens
  misc_feature (213)..(213): n is a, c, g, or t
cagccttgaggattttcttatactgtgtttgaatccacatgactgataatatgcttaatgtttgagaaattataaccttgcaattgaggttaatgatctactaactacctttgtgttgatcagattgtgtacaatctgggaaaagacaacgactaatccaaaggaaatgaaactacaggaatttcagggcattgtaattatacctgtaaggangttaacctagcagagaaaacgtttaactatccctcccatcaccatcaccattcattctatttgacaaacaggaggcatccaaatatttgctaggggaaagtcatccctgatcatccataaatcacactgtaacaatctcttctcaacaaagcctgcagtaactaaacctcagaagttcactgttataaactttttctttcaactttacaggggctgtttagaaatatatggccaaatctgtaacccggaaacagcaaaaaacttcttagcaaaggatcactaagtaccctttggatgtactcttccaaccagacaagagtgccagaaacttggcaagcaattcatcctgtggaagttgcaaatactggctgacctgcttaaaaagattctagagtggccgga

SEQ ID NO: 326140 - DNA, 649 bp, Homo Sapiens
ataagcatcacacccagccttgaggattttcttatactgtgtttgaatccacatgactgataatatgcttaatgtttgagaaattataaccttgcaattgaggttaatgatctactaactacctttgtgttgatcagattgtgtacaatctgggaaaagacaacgacttaatccaaaggaaatgaaactacaggaatttcagggcattgtaattataccctgtaagggaggttaaccctaggcagaggaaaacgttttaactatcccctccccatcacccatcacccatttcattcctatttggacaaacaggaggcatcccaaatatttgcctaggggaaagtcatccctgatcatcccataaatcacactgtaacaatctcttctcaacaaagcctgcagtaactaaacctcagaagttcactgttataaactttttctttcaactttacaggggctgtttagaaatatatggccaaatctgtaacccggaaacagcaaaaaacttcttagcaaaggatcactaagtaccctttggatgtactcttccaaccagacaagagtgccagaaacttggcaagcaattcatcctgtggaagttgcaaatacctggctgacctgcttaaaaagattctagagttggccggac

SEQ ID NO: 326141 - DNA, 588 bp, Homo Sapiens
  misc_feature (227)..(245): n is a, c, g, or t
gaaagttgttggaacctgataaatttgtaaaatttacaaaatttctcattttaaaagctacagttttaaaatttcatgctttttaagcatccattgtaagagtaggagtgtccaaaagcaataagaacaagaaatctttgtaagattggtagtttcagtgtttagccaaaccattatcagaattagaatgactaatgttatgtaggtttggttttcaactccattcnnnnnnnnnnnnnnnnnnnaaaaaattccaaatctctaacctggccttggcgctctgagtcttctgatctctgcccacctcatcactcactttgttctccccattttgtttatttcaattgctgaactggctgagcttttactctccccaccttaggttgttccactcttcatctgtcaagctcctactcatcctgtggactcaaccactgggttagatgaaagaaaagtttgacgtgtccactctttaaaaacattaagtgttttttgttgtttgtttgagactgtcgtccagggctgtagtgcagtgggcgcaatcttgggctcacggcagcctcgacctcctggggcttaaatggatcc

SEQ ID NO: 326142 - DNA, 719 bp, Homo Sapiens
gctaggaagatagttgttacatactgaagtaggttattaaataaagtaatgaaatatctttgaacatatatataaataggacaggcttatattctaactagtttgcggtgttttcagctaactctatcacacctaaccatctgtgtaagacttgatgcattttatatcatttttaggctgggctaggaaacaacaaaatcacagatatcgaaaatgggagtcttgctaacataccacgtgtgagagaaatacatttggaaaacaataaactaaaaaaaatcccttcaggattaccagagttgaaatacctccaggtaaaacattctacttgtgttcagtagatattggtatttttcttcagtttttataacacactttagcacacctcaagcaaagaccaagtaagcagcaagggtgattcaaacataatgactctccaggttgcatgaggtgttttaagaagtaggagagctttaggagaatggtttctacatcgacgtcacaagaaagctcaggatccatttccatcttttggtttctcctgttgaaactgctgaggacattgcggcaaagccgctggcacagttaatttcagattttagggcaggggtggctacgcagaggcaggactggtcaggaggacatgggagcagtgtcacgtgtccttttgatctggaaacatttctcaaggcagagcaagaggattaggctcctggtat

SEQ ID NO: 326143 - DNA, 718 bp, Homo Sapiens
cgtattggtagttatgcatattcttacatatattaacagtattttacatgcttaaaaccttaaaaataattgaaaatgtcaaaattatatgccatatacatttctgtgggcttgaaaatgatacaatataggttgtttctttaaagcagtcactaaaatgtgtaaacttctagatagagtaatcactaaaaaggaaagttcataccaaaagtagtaatactaggaataaaagagggctcaacactgcctttgggagtcctcctcccatgaaacatggctggatttttctccttgtcctgtgtaacctcccttactttatcatagtttactgccttagttactctctcattcctccaaggagagcctcaagaaatttaggtaacaccagagtgtggccccagccagttgccctcagttaccaaggagcaattaggtaggaaatggccactgaaagactgaaaacaagaaaaaaactcaggtccctcacccaaactgggcagtggtggtcaggcttccacacggaaacctttcactgtcaccagagtgtccccagccagagacctgcagttgcctctgtgcttagatgctgtccaccaagggtcccgagttggaaaagggaaaggggggggagttcccctatgtagagcagagggatccccacatggagatagctccagctcatgcctgcaaatgaaggctctctagagagggaaaaggg

SEQ ID NO: 326144 - DNA, 184 bp, Homo Sapiens
  misc_feature (161)..(161): n is a, c, g, or t
ccatatccaagtcattgtgatctggctcagaggaaggaggggaaagaacacttaattctctctcaatcggcaaggttccaccttgtgcctctccacctgtaatgtgctctcacctggagtctggaaagcctgttaaaatgcagattctccttcagttggtnctggggtggggtctgagattctg

SEQ ID NO: 326145 - DNA, 699 bp, Homo Sapiens
  misc_feature (676)..(676): n is a, c, g, or t
gtgaggcgtgcagtcccagccgtcctgagcttagtgggagcctcgagccttcatcatgcagtgtatttgtttctgttgtgatccagctgatccattgatcagtggggttggggacgcttctgttctgctcatttattgctgtgtaacaaaccacctctaagtgagggctttaaaacaagatcgttcatttcttttgcacatgggcattggggtacctgggcgcagctacgcacttctcacctggggcctcatcagtcagatggggccaggttgggttagccccaaggctttcttcgcattggcctaagaggcttcagacaatgagggctttggcggctggggctccccagccacaccctttcaccttcgtgggcctccaggtagcctgtccacctgccaagaacacacacacccagccccacaggtcacccctcacctgctgctgctcctctctctccctgcacgctccaaagtccccagaagcctgagactcccagagcaactgtcccaaagtccccagaagcctgagactcccagagcaactgtcccaagggaaccaaggcagaagccatgtcactttttaacttagcctcccttggaaggcaggcggcatcacttctgccacatcctcctgctggcagtgagtcaccgcggccggccgtcagtcaaagcccgngggagctagacttcacccctcag

SEQ ID NO: 326146 - DNA, 782 bp, Homo Sapiens
atgagcacctcatccggccccactatttatttaaatgggagggtaatgagtaggtgagagggtctggaggaagcctccctactgctggagcctctacttattaccctgcagaatgaagatcacagtagttaccttttggaggctcttgtgaggattcagggagctgactctgtgtctccttgttaggaatgggaagcctcctgaaggtgggatcgtgggcatgctagtgcccagcaccacactttgacacctaagagatgctcacttactgttcccttcatcagtgaaagaacaaagcaaccaacaaatatccagtgagtgctgacctcgcgcctggtttagagacaagctaaagagaagatgaggcaaagcatccaacctccaggccctcacagcccagcaggggcagtgggacgcacactgacaaatcacggagggacagtgcaagatgagtaatggagtgccgagaagtgagcctcagaagggaccagaggccgtcttggcttcacacaggaggaagatgacttcaaattcaaatctatccacttgatggatttgaatttcaatccatacatgtccctgctacgtgggcttaggcaagtgtcttagaccctctgagtgagggcttcctttgctgcgaagtgtggtttctaacgggagtgtctcgttaaatgtggtgatacgcatggggcaccgagcacagggcctagcaatgtgcaaagtggcccaatgaatgtgggctatttagacactcaggaagtgaactgacctgtgccgaaatc

SEQ ID NO: 326147 - DNA, 857 bp, Homo Sapiens
ttttatcaatttacattttcctagtcaactgaaaatccatttctttctcaaatgttcctccaacaaaatgataaggaggaaggggaatctgattccaggataagagatcttacctaggaccatttcaaagattttctaaggtctgcttattacttctctcatggttatccttctcctcagttacagcccatgttctctggcttcttggtggtggcagagcaaccaccactgagtgaaatggcttcccacacaagctccaattgtgctagagctgacaaactactgataccaaagggtttactgagcaccactcagggggaactttttcacagagtagaatttatttttaaaagtggattatgttttatattgtccatctctctctttggaagaacgtgtccttaaattgctcataaagaaaaccacatgggttttccaggaatttctgtttgaatcaaactaaccacttctgtttctgaagcagatataataaaaataatgttgtatttctggttaatacgacagcatggccactataaaaattcatcaaaagaaccatttctataatagatgtatttaatggcatatgaaatgttaacatttgattcagaagttaattgtaaatcaaataatactatttctttgcaagagggtagaccaaaaaagcttaaaagacattaacctaggtgaatttttataccaaatatttacttaatattaaactttttctttaatttgaaaacattctcaaacacaagtaccttttttcatggaagtgaaaactttgctcatttcatatcacatacatatacacatacacatatttctttttaacctcgtgccgctcgtgccgaatt

SEQ ID NO: 326148 - DNA, 765 bp, Homo Sapiens
  misc_feature (478)..(478): n is a, c, g, or t
tttaagccaataaaaaagattttatttaaatattttttttaaataaaaggagccacaagatttctttatactctgcttttggaaaagatgatgacactggtcaaaaaggagagagatgcaatagctataggatcagggatgcatttcttgctggaagcttttagcagctgacagttatatgtgctcaggttcccagttgacctcaactgcaaccagtctcctcttgggtggtagctcatatttataactttaaacagctcatagggagggatcaagacttccttcttgagggagaagtactgtacaggtgcacccaggcaggtgaatatggtaaatagtgtctggttcccaaactcctgtgcctcttctttcaggagggatgtggagaggaattggccaaatcgaatggtggcccctgtgtaggcattaaagtggacatccttcgtcctataatgcacctcatagcacagagtgccanttctccatgatgctgtctttcctcagcagctggattgctgaggtgaggtagtagtgtaaatatttgaagtggaatgaacgttcatactgctgtggagtcctggcaacagaggccatggctctagtaaagtcagaatgaacattgctgttcaatgtataaaacaaaatagccacagcgtgtgtggtagtcatgttctggggtagaacttttccttggttaagccaggctaagtgggctttttgccacatcctaaaataattcttctgggcttctatgtcttttgtgaa

SEQ ID NO: 326149 - DNA, 554 bp, Homo Sapiens
  misc_feature (325)..(325): n is a, c, g, or t
  misc_feature (492)..(492): n is a, c, g, or t
  misc_feature (507)..(507): n is a, c, g, or t
  misc_feature (516)..(516): n is a, c, g, or t
  misc_feature (524)..(524): n is a, c, g, or t
  misc_feature (544)..(544): n is a, c, g, or t
gagaaactaactcaaggggattatttcacaaaagacatagaagcccagaagaattattttaaggatgtggcaaaaagcccacttagcctgagcttaaccaaggaaaagttctaccccagaacatgactaccacacacgctgtggctattttgttttatacattgaacagcaatgttcattctgactttactagagccatggcctctgttgccaggactccacagcagtatgaacgttcattccacttcaaatatttacactactacctcacctcagcaatccagctgctgaggaaagacagcatcatggagaatggcactctgtntatgaggtgcattataggacgaaggatgtccactttaatgcctacacaggggccaccattctatttggccaattcctctccacatccctcctgaaagaagaggcacaggagtttgggaaccagacactatttaccatattcactgcctgggtgcactgtacagtctntcctcaagaaggagnttgatcctncctatgantgttaagttataaatatgantacaccaaga

SEQ ID NO: 326150 - DNA, 779 bp, Homo Sapiens
  misc_feature (118)..(118): n is a, c, g, or t
  misc_feature (385)..(393): n is a, c, g, or t
cattaaaagttatcttaaataaggtttatttttacaattgcctgaaaattatggggtaggtattttaaaaataatccatgaaaaacaatggcttaatttaagaaaaccaataaaatancagcaaaagagagtaaatctgcaccctgggtgacagcatatggaatcgatgagcttctggtcagcctctaccagtgctggtgtgtgccattgatccgctcagtctagccaagtcctcagaatcatcgtcacttattactgctctcctcaatgaccatctccaatgagatgaagcagcttatgaataaaccatgggagaagtatacaggcatattatgttctcctctatcctagatccttttaggaaaaaacaagaaagtaggcctgnnnnnnnnngatttgtataacatcctaaggaataaatcaggtcttattaagagaatgatctaatattctacccttttgcctatttagtcttgacagcctaaatactacgtagatgaaaattccaatagagtaagtctcttcattttataaccaccatgtcaataaaaagtaaaaaaggggatgaggccatcgcaccaatgaatattccacaggagatatgatattagtgaattgggtattataggaatagtaactaaaacttaactgaacacttgaattggaataatcagactatctgaatcccaaaagagattctaaatctgagatattatcaaatgtagtgattttaatagacatttttctcattctcatcttgaagtcggtcctgtgccgaa

SEQ ID NO: 326151 - DNA, 537 bp, Homo Sapiens
  misc_feature (28)..(28): n is a, c, g, or t
  misc_feature (40)..(40): n is a, c, g, or t
  misc_feature (52)..(52): n is a, c, g, or t
  misc_feature (57)..(179): n is a, c, g, or t
gggaactgcaagaggctcccagtcctcnagcttgtgtgtntcttgccccaancccgnnnnnnnnnnnnnnnnnnnnnnnnnnnnnnnnnnnnnnnnnnnnnnnnnnnnnnnnnnnnnnnnnnnnnnnnnnnnnnnnnnnnnnnnnnnnnnnnnnnnnnnnnnnnnnnnnnnnnnnnnnnggcccacattttacacttcactgcactccaggttgctcacctgtaaaagggggataagtatagtcctttcatgaattttcttgtgaaaattaaattagagaatgtgtataacaagcagatagtaagtactcaaaaatgttagtggtgattatttcccatataaccttttacatttgagtgaacttataattttctaagttctttcctatctgctaattcatcagattcaacagcctcaggagagaggttattctagcggtgtagagatgggaaaattaaataaataagggagtcaacctacgctgcactagaattcaagtcttttgattttgagacttattctagaccaagattggtt

SEQ ID NO: 326152 - DNA, 1275 bp, Homo Sapiens
  misc_feature (473)..(473): n is a, c, g, or t
  misc_feature (509)..(509): n is a, c, g, or t
  misc_feature (680)..(680): n is a, c, g, or t
  misc_feature (1112)..(1172): n is a, c, g, or t
  misc_feature (1175)..(1175): n is a, c, g, or t
  misc_feature (1200)..(1200): n is a, c, g, or t
  misc_feature (1209)..(1209): n is a, c, g, or t
  misc_feature (1214)..(1214): n is a, c, g, or t
  misc_feature (1235)..(1235): n is a, c, g, or t
  misc_feature (1240)..(1240): n is a, c, g, or t
  misc_feature (1265)..(1265): n is a, c, g, or t
tccaagtgtccttcctgcggtggtgttttgaagggctgatgaagattcagttcagcagaagaacttataaaatgcctctcgggaacctcaccatcgcggtctcaggagataaaatcctcagtgccatggagctggactcgtaccctctctacgccatctacctcatcgtcattggcctcagcggtggcttcatggtcctgtactacgtgtccttaaggttcatcaaacagaaaccaagtcaagactggtgattcacgccagacgtctgcccgctggtgggggacctgaggcagacccttcaactgcacttccctcctcaggagccccttcctggggaacagtgaggacaatgaaccctacagatgctcagcctacatccggcccccgggtgcctgcagtggcacagacccagccacaggatggcagtagaataaagacagtcgaaagggatttcctgctcactggcaggaganctgcgatgactgggagaaaacctgcactcggtggcnccctacaacgttgctaatttatttccttttgatatgcatttatataggcaactcgatataggatgggagcaaactaggaatgaattgggtagctatactgtgcaggaattgttggaacctggagggaacaataacagtagctagcagatttggcttcatcttccaggggcncccaactccgtggtgagccaccatcaatacagaaagtgacctaagatgtaccagcaagatgccatcccttctttttgtgtggggtcatgggctccaaaagccaacgtgaacaattaaaaatgtattgagcatctactctgtagcaggtcctgtgaaaacactttaggtggacaatcccttgaggtaagtggtatcccattttataggtgtgaaaactgaagcaaaaattcattttcctaagggcacatggatactttgtggtggagtcatatggggatcagaaaagcctttgaggcctttggagttagagggcagaaggcaaggcctgagccgcttgtaagccttaggagtttaggaaggctccagaagacaaatggggtctgtagaggctgttaactcagccaggcttcttagagttgcatttcactaacnnnnnnnnnnnnnnnnnnnnnnnnnnnnnnnnnnnnnnnnnnnnnnnnnnnnnnnnnnnnngtngtcaaggggcgggaccagatggagntaattggantcatnaggggtgggtttctctgtttnctgtntctcctgtgagttgagttgagtttntgatggagat

SEQ ID NO: 326153 - DNA, 391 bp, Homo Sapiens
  misc_feature (63)..(63): n is a, c, g, or t
  misc_feature (84)..(84): n is a, c, g, or t
tggtcctcaaaactcccggccctcaagtgaatcccaccctgcccttggccctccccaaagtgnctgggattccccggcgtgagnctaccgtgccctggctggattattgtatgcaaagcctttaaaatagtgtctgtcacatccattataaatacttgatacatgttaactaatattagttttagtaatactgttattacttatatttttaatgaacatattgaacttatatttatcagcataaaaagttaaacagaatttatggtcacctctctaagatcaaggtgatctaatagataaacatgatctaagatgaagatgaagatgaagtatgcttttgtttgtctcttactgcttaagtaattttggccagttggccgggcgcagtggc

SEQ ID NO: 326154 - DNA, 620 bp, Homo Sapiens
aatgttttaaaaagtcctaccgtgctgaggtggccatgaagccaagcccatggagagacatttcagataatcccagcccttagcatcaactcatcttcagtctttgagtccttccagcccaggtccaagcttgtggaccagagacaagccactccactgtggcctctccaaattcctgacccacacaatacatgtgcttatgacatgtttgtttcaaatccctagattttgaaggaattcagcaaaagatcatgggaacactaggaagcctgagggagcaaaggccatgtgagaaccagagcctgggtctgctaactctagagttagcactgtttcccctttactgcccttctggtgtgactttcacataaagcaaggtgtacctatgccacatacaccaacttgctataccagtaaataaggcaggaactaagacaactttagccaaaaattcatccactgcatagggaatcagcagaggtttccactgcccttcagactgggaaaacctcccaaaagaccagccaagagctaaccctacagtgaccagaaacagcaaaagttgggtatttgggggatccaagcagaaaatatattcactacccaacagtcactgacat

SEQ ID NO: 326155 - DNA, 947 bp, Homo Sapiens
  misc_feature (29)..(29): n is a, c, g, or t
  misc_feature (60)..(60): n is a, c, g, or t
ctattttgtgcagtttttaggggccttgnaaataaaaagctatgatttccaaaaatatancattcccaaaggattgaataatacatacatttaaagatacattttattaaagtttaggagaactgattaaaaaagatactgtctctttaaattagtgtgtaattgtttttctcctcctatctattcggacatgacaataattataaatgtaggtcacactacaactaggtagtctctagggaccatgacctgctgacacaaggccgataacaaagaggcttttccacaaatgaggtgctcccagttatgctcagatatctggggagaggcctaatagacccaggagacagggacccactgtggggctgtgcacacgagctcaacagcttcctccagatgtctgattgtctcatcaatttcattgttgataattgtgagatcgaagtagtgtgcatatgttctctgtaagatgtcagactccttctgcagacgctgaagagattcatcctcatttaaacctggagtaatagttggtgcagcaatgaaaacaacaaaaggagcaaactctgcagttctcaggaccttcagtgcctgaggctccacgtccagtattgcaatcagcccctgctcgtggatcttccggatggtctccagttttgtcccatacatcgcatcctcgtggctgccgtactccaagtactcgttattagagatgtcttgcatcatttggtcatgagatacaaagtaataattctttccattttcttcgtctttctttggaggtctggttgtatgtggaatagggtacgcaaaccggtctgggtgctttgtgatgagagtgttttttatgtgtcttctcccaacaccatgtgcgcctaataagactagtgttttcctcttgaatgctggcagttttactacttcttcatatgtgacaagatctaatt

SEQ ID NO: 326156 - DNA, 897 bp, Homo Sapiens
  misc_feature (47)..(47): n is a, c, g, or t
  misc_feature (553)..(553): n is a, c, g, or t
  misc_feature (694)..(694): n is a, c, g, or t
  misc_feature (700)..(700): n is a, c, g, or t
  misc_feature (743)..(743): n is a, c, g, or t
  misc_feature (777)..(777): n is a, c, g, or t
  misc_feature (792)..(792): n is a, c, g, or t
gcaggagggtggattgttggtctcagtcagtggtgggacagaccagnagctccgaacacttcagttttaaaactagttgtgagtttccaattctgttaatgtcttttttggtccttgtttctgctaaatgaatacatcccctccccttggaacttaatatcaataaataacaagcacagaaatatgcaaaaggaccaggtctacttgaagaatttgtgaggattaaatggtttatgagtagaggagggtcagtcagtaagtattggctacctcatgtgtgtccccattactaaccttgggtttaggacttatctattttttgtgtagtcttcctgttcataaaaattctgtgtaaggaccccatgctagtatcagtgaagattgtgaatccaggtgtgtctgactctacaatagttcttcacaagcattatatttcactgtgtagtgatacttcattttgaaagttgggaaaagcgtctttttcactttagtacagatgggtataaaagttacttaggacactagaaaacagttcattaaaagtaaaacaaangcctggtgcttgggccccaggaattcaaactgttttccagtgtaaatctgaatagcttggtctctgctcattgcccaggactgggaggagtttgggggtcccaggtcccatttctacatcccaattcagtgatactgggancttaanaacctacctgtgaggtgaagttggaaaaggcataggcaagganagttgtcctgagagttttacacttgtgagaaaanactggcagctttgantttaagatgtgaatagatgatcgtggttcatgcctatactccctatactcccagcactttgggaggccaggcttgccaacatggcaaaaccctgtctcttctttt

SEQ ID NO: 326157 - DNA, 816 bp, Homo Sapiens
  misc_feature (480)..(480): n is a, c, g, or t
tatagtgacttgaactagatctttagagatacaaggttgaataaaatacagaccctatcatcaaggataattctagtgacaattatatttcacattatttctgtcaggtcttgataatattttaatcacaggaaccaccatagcagtccagactcattttattatttatcatctctcagtaactgctccgacagtggcaacaaagggtattgaatacttatatttcaaattttaaaatttatgataatttggagggaggtgaaaaaaccttactaggaaagacaaacattcattattctacgtgtgtgtgagctcatgtctcttactcttagcatcctgggaattaagtacagccttctggtgtaggtgttcctttaaagaaaacaactttaatggcattttacctctggcacatttccactgacatgactcctatttgtacagtgttccgagcactgtcaagactgccagagctctggncacaggtcccataggtactccccacggaggcattgccctcagaaagacaagagaaaggaacaaattgcagttgctttgaaatcttacagtggcctataggggttgggatagggcagtaaggagatccagctgaggtattcagggactggtaagcttggataagtgtgtttaaagccttgaaaaccagaagaagagtttagtcttgatgtgaatgtggtcagtggtagagaactataggttcttagcaaaaatgtagtttgaacatagcattttaagaacagtaatggggtaatagatttgattgcaattaggaccggttagaaagtaattccagtt

SEQ ID NO: 326158 - DNA, 1145 bp, Homo Sapiens
ttcagcatgcattcatgttttattaggatcccttccttgtatgtcacacatacctacggaagtgatgataactgtgaaatgagtttcatcttgcctgccggttatgttgttgtaagcacagcacacatagtccattgtcttctgggctactttctcagatgcaacttctaagcgaggcccatgcttaatgatatatgtagtattgtcagtcctcctaatccgggagtagggtgttgggggggatgaggaatcaggcaggaacaatcaaatagggatgggcctctccaagggtcaacaggtaaacacttcccctacttttaggccctttatcagaattcacttgaagtcccataaggtcccataatatatgatgggcataatgatatcactttccatttcactgacagggttcctcaccaggcagctgtaattcccaatgtcttccttggttactggagcaatatgaagggtattgttttggggagaaaaggagtaggtggagctggtgtggacaggtctcccattttttagccattggtaagctagccgagtgcccccttccacatggcatgtcagggtcatgttccccacatactccacagccccagagggaggatgaatctgcaccactggctttgtgacaggatcatcaaccgtgacttgtatcttctgactggcagatagagttccatttccctgaatgttgaccttcacgatgtaattgccttcatcagggaactgcagtgggttgataagcagagatgcattgggtggcatcatggtgaacttgtgttggtattccaagtcaggaaccacagacttattccacagagccccagtaagtaatttgggcattgtgtggggtctctcaaatagccatatgatctggatgtctgatgctggagtgtggaagccatagtggacgggtaggtagagggcctgacctctgacgccatggacagtgtgtgatggcactgtcaccttcagccccgagcaagcacctgttgcaaaggaaaggaaagttgtgaagaccttgagccacatttcacaatctaaaggggcaaatgcagagagaacctgatcaggtgataatccttttcaaagaagagtggcttctaggtactgactattctagtactggttac

SEQ ID NO: 326159 - DNA, 325 bp, Homo Sapiens
  misc_feature (55)..(171): n is a, c, g, or t
  misc_feature (188)..(188): n is a, c, g, or t
gatctgaggcagagtctcgctctttcatccaggctggaaggcagtggcaccatgnnnnnnnnnnnnnnnnnnnnnnnnnnnnnnnnnnnnnnnnnnnnnnnnnnnnnnnnnnnnnnnnnnnnnnnnnnnnnnnnnnnnnnnnnnnnnnnnnnnnnnnnnnnnnnnnnnnnnattacaggcgtgacacncggcggcccagttctagtctgattacttttttcctaccttaaatatcatgatcttaggatcttagattttgttattgcccaagatttaggatgctttgcattgtgtattcagcttattagctttgtgttaattttga

SEQ ID NO: 326160 - DNA, 783 bp, Homo Sapiens
  misc_feature (20)..(20): n is a, c, g, or t
  misc_feature (261)..(276): n is a, c, g, or t
agagagctagcaccatgagncttcataccctgaaaaaaacaaaagtattaataagcttgttttaaaacaactgatttcccagacccacctaacatgcaaagacaagaggaacattcctcactcagtcagaatctacactgaaacttatgtgaatgaacttgacccgggctggcagcaatccagcaatcttcgtcactgaatgacttaacagaacactgtgttcttggcaaaagcacaaaaaatgtgttgaaatccacactnnnnnnnnnnnnnnnntctcagtatagatttaaatcaattttaaaatacaatgataaaagatactaaaatataataagggattttcagtgtttggtacatatttaattcaggtaacatttttaccctcatgccattttggtcactttcaatcttcccttgaacaattgctccaaccctctccccaccacactaaacctacgctctggcctcctcctgtgttacaacttctccaacactgtacctggaaaattccaaagcaacctaagcttgcatattagggagggacagcaagaaaagccagaaacaatgtgttgactcacttccgtggaaagccctagagaaaaatctaggccacagttcagcactctcacgcgttgcagctggagcaggtaagaggcggtgaagttatgtcattctcacacaggtcctgctaattcggccacaagggtaagatgcaaatgagaaggtaagtaaaatacaatctggcgtatatataagtatgcaggcagtctacacactttc

SEQ ID NO: 326161 - DNA, 551 bp, Homo Sapiens
atttttttaagcacgggatcctgtcttcactcctacacactgaacatatccattcggatgctattgaaattaccatctaggccagaagcaggcttagccttcacttccaaagaattatctaagtcttctagcttctggctcagctcactgtcagactcatctgaacaactttctgtgggtagtgaggtttgaacccctgaggtgctgcacaaacttgaggtaaccgttgaaggcaaggaaagggaaggaggagaagaagggggagaagcagctctcctggcagacgcttggaaaaggatattaggccaggacttcatggagaagcaagaaagatgaggataggtgttattagaagaagctgcagactgcgaggtagatgtggtgttaggattaggggagcagactgagtgaggtaataatctaacatgctctttggcatttctcattgcttgtttgattgttttctctttgtgcaagcttgactggaggtgttggctaagtgcttcattcccactgatagccacatcacaggcaagacactgatattttgc

SEQ ID NO: 326162 - DNA, 771 bp, Homo Sapiens
  misc_feature (747)..(747): n is a, c, g, or t
tattattttattttgtttaccataaatgacagagcagagagtaatacaaaatattctaagaacatttttctcatttcaagacaaatgaaagttctttcttccagctggtgggaaaagaagtatcagaagtgatgtgactagagctcttgggggagcttgggaaagggctcccttcactacccccactcccttgagagccctgggagtcaagagggggcagaacaatggaaatctcggaataagaacaattggagggactcacagagcagacaggaccctggcctgactctggtgggtgcagtccctcatccagcttcatcacctgagtggagagtggcaatggctggagaagtctctggagcaggtgaggaccactacccaagaccctgcattcagcttggaggatgaacatgctcaaaaatttcctgtgtggcaggaggaacacagacatggccctggaaaggaatttcttcagcatggaaaagacatagagtggcctgtgcagacactacctgagtgtgaaaggcacaggagactgctaatgaccaaagctcaggtggtttatcaagcagaggacaatgggagccataagccagacaaccctccccacaatgcctctcagcatagacaaaagaggagaaaaggggcaaacattgcaggaactgagtttcaatcttgaagggactatgaaaactctgaaaatgactgagttcaccttgaactgtcaagattcaaattttccacatnctgtggtcatggggaacgtgagag

SEQ ID NO: 326163 - DNA, 703 bp, Homo Sapiens
  misc_feature (189)..(197): n is a, c, g, or t
tggggcagctttttaacccagcacagaatactatactatacggtttgtgaaagcttcactggcaatattagggaatgaagaaagttgaatttaccagaagtcacctcagagaatagtaagtataataaaaggaatatgtaacaagcccctgggggaaattggtagagaaaccctgttcacccactaagnnnnnnnnngcaggctggagtaatagatgattttagaaaggggagacaaatgagcagtggcagggcttcagttaggttcccaggagcacaggcattagaactacctcccaggagactcgttccctgcccttcactagagtagcagaactaagagtgcctgagttggaatctctgggggtcacatgaccacataggaggaggagggtgctggacaatttaaccttctcattgcttttatttcccttatcctgaaaataactgtacattatgaatagaaatgttgagaaggttaaatgtactcatgcagtacatagaacagtacatataatagtacaaataatagaatgttatgatatagtagtaagttacatataatagtatattacgtataatagtacacagaacacagcctggcacaagtagtgctcaattaatgacagatactttaaaattttcaagaatattagtttgaaatagtgccaaattaatctctagccaggaatgcccacaagctt

SEQ ID NO: 326164 - DNA, 871 bp, Homo Sapiens
  misc_feature (76)..(76): n is a, c, g, or t
  misc_feature (574)..(574): n is a, c, g, or t
gggatttgtctgttttattcattgcaaaatgaatatctgaatataaacatgaaggcttagcattcattatatacanaaaaattcttcaatctacatagcatcataaaagccaaatatgaaatacttatgttgcctttcacccaacaaattcagttgatgatatatctttctgaaaataatacatcccccaaaactgcagtacaattttaaagaagaataaaatacatgtttatattagtttcagttttcttgtttgtatttttctgtgttctaaattttttgccaatggaaaatgtgttactttataatcagaaaaaaatactatttttaaagaatgtagtggatgagatcatttgcaaatgtttacctgaggaaattttgaggacatcaagatcaatcaaggtgattgggagttaataccagacagaaatatactgtccttggaaatatgacacttctttcagggactgaattatgtccttccccacacattcatatgttgaagccttaacttccaatgtgatgtatttagatatgaggatttgggaaggcaatttagatttggatgaggtcnatgagggtagggccctcatgctgtgattagagtacccttataagaagagacaccagagagcttgcttgctctctctcggcatcaagtgatgacacatgagtgagagggtgagaatgtggccattggcaagccagggagagagacttcaccagagcccaacaatgctggcatcctgatctcgaacttccaacctttaatagaagtaagtttctgttgtgtaagccacccagtgtatggtatttgttatagcagcccaagctgactaagatagactaagtggactaagatccgaactgt

SEQ ID NO: 326165 - DNA, 584 bp, Homo Sapiens
aatagtttctttagtcactataatctattcagaaattatttctatttcttgaatttttaaaatctccaaatctgaaaacttagatgagtaaatggctttctgggaaaataagaattatcaaaacgaatccccaggagacagaaaatccaagtagataaaataacaaatagcagcctgaggaagccagcaaggggcaacaatccctgcaaaaaaagaacaagcgactttggccagacctgttaaggaccagctgcctccagggctaagttaactgttccacagcctaggaaaaggaggaaagcttccaaattctccatgaagccagcattctattaccaaagcctaaccctgagagcatgatcaaagaaaactacatatccgagtgaaacatcaggaacagactccacagcaagatgccacagacaaggggaatcaacgaaaaaccaggcagtcacgtccatggaagccgaaagcaacgggatgaaacgtcacagccattccagatgtggtctttagaaacagtgaggcactggcaccaccattacttcacatcgctttttaaaaaccagacacaattagacaaa

SEQ ID NO: 326166 - DNA, 779 bp, Homo Sapiens
  misc_feature (161)..(172): n is a, c, g, or t
  misc_feature (403)..(403): n is a, c, g, or t
  misc_feature (422)..(422): n is a, c, g, or t
tctgcaaacgagtatttattgtgcacctgtgatgggccaagcagtattttgggtgccaaggatacaacagggaaaaacatttcctcttttcttggagcttgcattcttgtgggagagacaaatgaataattaatgccaaggagtgggaaatatgagtaagnnnnnnnnnnnngaggggttggagaagggaaggcctcctgaggtgacatttcagccaagacctgaatgatggagcaagccacacgggcctgagggcagcagcaggatggacaggaccaaaggtccgtgcaaaggccctgaggctgagtggtgtttgaggaatgttgagaggccagtgaggaggggaagcgtaagaggaattaagatccagcagctcctgggagatccagaccatgtgggcccnttcacagttaaggcttcangtttacacacctagttaggtgggacactctgcacagtttggatcagcaatccaacacgatctgctcagcttctgaaaaaatctctggctattgagtggagaacaggctacagggagaagaggttgggagcagggttatttagggagcctattgcaatatccagacaagagataatcgcagtagaggaaggggcaaggcactgtcaggataagcctggaggatttgctcatggattagatggtgggtacaagagaaacaggaatcgaggaggattccccagttttcggcctcggaactgaagaaccgagtttgcatttactaggagggaagtctccccaggggagcacatttcacacc

SEQ ID NO: 326167 - DNA, 233 bp, Homo Sapiens
  misc_feature (76)..(127): n is a, c, g, or t
  misc_feature (190)..(190): n is a, c, g, or t
cccagctaattttgtatttctagtagagacagggttttgccatgctggccaggctgttctcgaacttctgacctcnnnnnnnnnnnnnnnnnnnnnnnnnnnnnnnnnnnnnnnnnnnnnnnnnnnnactgcgcctggccacgatatacctttttatcattaccatgcaaagtgtaggcttcatgccctngtttgaacatgaatgaactgaatgctatgcaagacaacccaac

SEQ ID NO: 326168 - DNA, 735 bp, Homo Sapiens
  misc_feature (442)..(442): n is a, c, g, or t
  misc_feature (666)..(679): n is a, c, g, or t
  misc_feature (706)..(706): n is a, c, g, or t
acacagcaaagttaaatttgctttaatggtttaatttagggagaaataattttcacgttgctcattgagctttcaactctgagtttgtcttcctattttgaattgtttttctttacctgtttctttttgcaaaaaaaggggacagggtaatttactctgtggcatatttagcacgcctgagggaatgaatgtgggctgctgtcagaatgtttgttgtacagagagttaaggtggtattgaggagggagattgtaggagttggagtggtgagggaaggccttacagaaaatgcagactatgaagtgggcctcagggaggttagaaaactgggaaaggcccagaatgtgccagattaagggcaaagaagggccttggaggcagggagaggggaggactgcccaagctgttaacacaggaataagccttttcaagttttaggggnccactgaagaggccctttccgtgcagagaaaggccaaggaactacctcaagaatatatgaaatggcgtttgggtgggtcgattgtgctcagttggtgatcagccaagcagttttcactggtttctggaggtcgcaactatcaaagattctcaagcagggtggaaaagctggcgctcacaaacctcttcataagcctgctccagaatctgtcagaattctcatcnnnnnnnnnnnnnnatgctggtctggtggtctttcttgggnaacctttcctttctttccaataggtcact

SEQ ID NO: 326169 - DNA, 629 bp, Homo Sapiens
tggctcagaaatggattacattgcttcccttgtatttcattgttcaaagcaaagcacgtgctcaagcctcacagtgttgggatatgaaggataatcttttgaagagagaggctcagtgaggatgaacagctaagagggtagcaaatattttgacaaatatgacctaccacaggactagactcttctcttgcctagtttgagacatttttatattgtattctacctggattccttctatcttaccccaaaaatgactggatcactgtgaatgtgctgtcagacatcaacaaagaagaagggctcttcattaaaataaatcaaaggtctaacccagtggaacctctggtgccctggaactttatttagagaatcccaaatttgcaggaagaatacagttcccctttagattcagatgtagaagactccagagtgaatatgatcaagttaaaatgctcttttacttacaagtcagtacttccaagaagtaagaactttctagaataatgctggtactatagttgctgcattgcatcttcactctggctgacctttggccaccagggcctgccaagtcctgtactgcgtgggccctcctgatttctggaggcagttatgatttctaccacctg

SEQ ID NO: 326170 - DNA, 467 bp, Homo Sapiens
  misc_feature (265)..(379): n is a, c, g, or t
tgcttgtttggttttctgtatatgtatcactaattcacctccaaacttctactacatgtgtaagtctcaacacatcaggctatctattggttgtttatttcttgacaacacccctttggagccctgtcttcactcaccaatctggactaactggtgaatgcctacacagctattatcccaagatttctctttaagaattcccttcaccttatcctttgctggattccatgtctgggccaagctttcagggagattaagcaaatgnnnnnnnnnnnnnnnnnnnnnnnnnnnnnnnnnnnnnnnnnnnnnnnnnnnnnnnnnnnnnnnnnnnnnnnnnnnnnnnnnnnnnnnnnnnnnnnnnnnnnnnnnnnnnnnnnnnttgtggtaaaattcatggttatatatatgtgtaggcagagatatagacaataaatatgtctaataaataaatacacatagatctactt

SEQ ID NO: 326171 - DNA, 649 bp, Homo Sapiens
tttaatatcactcatttttttctctgttaaagttgtttctattcatctcactttaccactgcccagaccaatcttcctaaattagcagaggcctgcagcaccctgcatggggaaggaaagtgcgggggggcgggaatagacagacagactgtctgcagcaaaactatttaattcgagctggttgccccctctgaaaaatgatgtccacatcagataaggagacgggcagtttaaattgttctatcagaaccgagttgcctgtttttgaagctcattctagacaattgaaaactgttctcttctcctttttctataacgcaattgcccaacttgaaggctgtttgtgattgaagtaggggccacaataatttatacagtaaaagcctctatctagatcaaattgtatattttctacgtaaatatgctgggtaaatagtccctctgttttatctttaatgcagtatctttatgcattctgtcaagctaacactcctttgggaatattttacatgctagaacacaggcaacttgctacttattacatttaatgtggtttggcttttcgcagatgagaatattaagtgttatgtctgccttccttagaagcagtttgccctgtgaatgtgcatttgttgccctaatgggtctt

SEQ ID NO: 326172 - DNA, 650 bp, Homo Sapiens
  misc_feature (122)..(122): n is a, c, g, or t
  misc_feature (125)..(125): n is a, c, g, or t
  misc_feature (283)..(547): n is a, c, g, or t
  misc_feature (556)..(573): n is a, c, g, or t
tttagatatagagatattttctttcaagcacacaacaagcaaaacttggccaatacacaccaatcaaatgcacttcctttttccctgggagctcctgccacatctcagccctgcagggcagntcnttcataagggagacaaaagaagggctatgcactggcactgacagttgggcaggtagtgctcaaataagcctaaacctcaacattccaagggaatcttcaagatcaaggtagacctggtccagtcatctcttaatcttttaaggatcactgactggatnnnnnnnnnnnnnnnnnnnnnnnnnnnnnnnnnnnnnnnnnnnnnnnnnnnnnnnnnnnnnnnnnnnnnnnnnnnnnnnnnnnnnnnnnnnnnnnnnnnnnnnnnnnnnnnnnnnnnnnnnnnnnnnnnnnnnnnnnnnnnnnnnnnnnnnnnnnnnnnnnnnnnnnnnnnnnnnnnnnnnnnnnnnnnnnnnnnnnnnnnnnnnnnnnnnnnnnnnnnnnnnnnnnnnnnnnnnnnnnnnnnnnnnnnnnnnnnnnnnnnnnnntccatctcnnnnnnnnnnnnnnnnnngggatcacagatctctttgaaaatcagtggcccctttagactttctgtgccaaaaaagttatgctttcacctcagca

SEQ ID NO: 326173 - DNA, 838 bp, Homo Sapiens
  misc_feature (345)..(345): n is a, c, g, or t
agctggttatataatgcgcgatgtggctaacaagaaaggcaagctatttttattttgtttaccgtatgctgtgcagtagggactcctccaaactggttctgtccccgaagagattcttagcttccctgcgagatccacaggatacaattagcaaaattagaagaccctattacacccacagaataaaaactaatgccttacagtggctttctccctgcacatcctgtcgtgcatgcacgggaatgtgtgtatgcaaataagttctcctttgggcaatctagtagtcacatcttcaatgacatttgtgttttattaatggcaggctgtttttaatatttaaacatncattgttatattattggcacacagcagtggggtagttacttgggttatttttagggcacagctagttactttttcaacagtgttagctgagacatttctgtttgggttttttaggaggctgcagttcctagaagccccccttaagcccacccttcggtttatttgatgggtaaaggtagtttgatacttgagctttttttggagtgaagcttatgtctgaggaaaccaccagagagaagagaaaatcctgcacaggaactcttggaaagggattgcaccataacggctagcgctgtggcatttaatctcctctgattgccctctcactgtgcatgcatcagtcaatattttagcagctccgcaaataaatggacttgaatgccatcttctacataaagcagagggttgaagggctcccctggaacctcctgggctggcctgtcagtggtgtaggttttcggtggcacttaacttccagtcctggatcactcat

SEQ ID NO: 326174 - DNA, 844 bp, Homo Sapiens
  misc_feature (87)..(87): n is a, c, g, or t
tccatataccaaattcttaatttttgttactttattttgcagttctcaaatttctatatgattattaagtctattcctttgatgaanctcccccatcttaccctctatttcctaaatattttaagcacttattttaattctgtgttgctaatgacaatatctgcatcatctgtgagtcttttcccgttgtcgatctttttatgttgttcctatttgttgtgttattgctatattttgtatatctggtagatttttgttgaatgccagatactgaatataaaaaaccagggatgatgtggattgtgttatagctttcctgagagagtttgccctgtcctctggttggaagctatagtggaggcaaatcactttaatcaagtaaatgagaagaccaaatgctgggtttcagtcttcttaagattggtttcctggagtgctatagcccctaaaggtctcgaatgagagtatgaagtgttctctgttgctcctctcccttagtgagtcatggcctccagttttgtcttctcagcactaaaagatgtttaaaaactctgatttggattttcaacggctgtatgcttggcttcctagcctctcactctaatcagcttacttcagaaaatgcttttataggaaaatgaccttagtattatgcttactttttcacacctctcttctctccaggcttgtactcataaatcctggctgccttcacagcatcaacctataattttttgtccacctcgacttatgaattatcaagagctctcttagattatctgccttttagcaggggctgaggattattaatattccagcctatatttagaacttgcaaatgctc

SEQ ID NO: 326175 - DNA, 909 bp, Homo Sapiens
aaagtaaattcacctggagaaaattaaggccatcattctgagttacagtaaaaagctattcagataataatactataataataattacaccaagaagaatacaataattcagatatatagtaataagtcattcagaccctttaatggttggttgagatcattataatactgagtgtggaaccaatttttaaattttctgttaaaattttatttctaaactgaggagaaaggaaaaatgagaagcagtaccagggcttatttgggaacaagtgagccagaggtgaagttctagggtaagcagattttaaatggacaacaagtagtgggtgagggtactgatacctcagcagtaaaaacaaaacaaaacagggtgccaactgataaaataatgaccaagaggcatataatatagttcaaagttcttctgactttggcctcaatgaactccaaatgccatcttgaggatgcctgagaactcctagaaattttgcctttatgtgtcaaaaggaaacatctatttctatcctcctttcgtgctgaacaaaacgtctgctggctcagagagattaagcaagctgctcaaggttataagactagaaccaggtctcatgatgtcccactttgtacaagtaactgagagttgggggactagtcatcacagtaatcccaggctggaggggaggaggcttgggccagacaggtgtagggcgaatgctgaggaaccaggacaaagctttttcacaacgacatctcagccaggacaaagagtttatttctttaagcctaagatataggggcttttaaatttcttttagggttttgagatttttgaaattagtatgcagcttagaatcaatgttaaaagacaggcagcagaggtgatgtagctctaattgcccatgcatatgc

SEQ ID NO: 326176 - DNA, 353 bp, Homo Sapiens
  misc_feature (238)..(238): n is a, c, g, or t
  misc_feature (331)..(331): n is a, c, g, or t
ataatgctttggtaaaaaacagggtccagtatgcttttgagtaattatacaagtattcagatgcattttattatgaattctactttatattcaaatgtgtagtgtttttgctgtcccttctacattgtcatgtttctctaattttctgaagtgacttttaggcatgatcattgcacactttacacagattgaaatagtcattaaactgtctataactctattacatagtatgtgactncagaggtaaaaattccttttgttttaaattttaatagcatattcacaatagattttgatactgaaatttttttaatcaaagagaaaaaatatnctcgtgccgctcgtgccgaatt

SEQ ID NO: 326177 - DNA, 909 bp, Homo Sapiens
cattatggatatttcttaatttccttagaatatgtttctgtcgttttacttaaagaataccaaggtcctgatgaggcattttcattggctgcgtgttcttagtctccagtataatgaatcatattgagttaatttatctctctttctcttacaccatgtctttttgtgtcgacaaaactgaaaattcactttccctcaccaggttggggcgtcgggataattgattgttaccagtctctgctgttagtagacaggataacaccagtgcctctagagaacaggtgaaaactaaactctgtcccccgaggccaatgaaatagctgtttggtcccttgtgtgaaacttcctaataacttaactgggcagcctctgggtccctggagggtttctccacaagagtattccctctctttgttaagattgcttattaaaaatgattttataatgaagttgcctcaaatagcagctcttttcctggttgtccttgaagctgtggtgaagaaccttagagacaactgtctagggttttcctccttgttaaaaaacttctctcttacccactcttgctcttgatttttaaggagacaaaatcctaactgacacaagtccctctccggctgattatgtcgcttcaaacattgtgcaaggcattattggtagttcaacttgtcattcgggctcaggaatcgaactgatctacgtggagtgaggacagttaagtctgcagtggaaacaaggctgtagggcttccccctgagagcagcagccaaggaatgctgctgtcatgctgtcacaaactctgcccctgactctatcaaaacaatgatttccaattatttcatctctttggtcctagatttcttctatctataaactaaccactttcctgccacaagagactgtcatgaa

SEQ ID NO: 326178 - DNA, 777 bp, Homo Sapiens
tttcggcacagagagtacttccaacagcccagggcaagctttatcaagacgatttgaaggttaatccagctaatgtctcccacttggtttcccctttcacctggcagggacccggtgggcaccttaaggcacctcagtggtccacttcttccctctttccctttcagatccgaaatgtgggcacagggctgtgtgcagacacaaagcacggggccttgggttccccacttaaggctagagggctgcgtccgagggccgtggggaggcttgcctgggaacaacattgcaggtaagggccgcccctcagggactggcagccaggttctctgaaacatctgcagcctggggtgctgacacggccagctgggagggagaggcatgggtcagtgataaatgacaagagtcagccccggggatgagttttaagatcttcctgaacaccgtggaaaggggattccttcacattgcaataaaaccatcagtctggaccattttggttacaaatgatggacactcagcccaaatggccttcaacaaaaagtgcgttattgtctcatgtccctgaaaagccttgatgatgttgctggatctctcaagagagtgcttccctctctgcgggcctcattctcaacctggcccttcctatatagtagcagatgtggccatcagcagccccatggataggcatgccacttccaagagttctggaaaagccctggggctcccatgaattgtgtccctgagctgattatgcaggaagggaaggaagtcctcata

SEQ ID NO: 326179 - DNA, 202 bp, Homo Sapiens
gacaattgatatattccagtataatgttttaaacaacacaatatgattgttaattttattttgattgaaaatgaaagtatctttaatagaaaatgtatcaaaagggaaattagaaaatactgttagatgaataaaactggcccaagaagaaacagtaaatctgaatagatttgtaacacagcgaatagattaaattagtaat

SEQ ID NO: 326180 - DNA, 548 bp, Homo Sapiens
  misc_feature (77)..(204): n is a, c, g, or t
tttaactagttttggtggcaaactagttttgtgagatagctgcagaagtgctcgtttctgtctgttgccacttcacnnnnnnnnnnnnnnnnnnnnnnnnnnnnnnnnnnnnnnnnnnnnnnnnnnnnnnnnnnnnnnnnnnnnnnnnnnnnnnnnnnnnnnnnnnnnnnnnnnnnnnnnnnnnnnnnnnnnnnnnnnnnnnnncactttcatttgttttaaaatttggtgttctgtccacatagttcagaattcaaaactgcttacaggggaaaatttcctcctacctgtgtccccagtgcagccagcattagggcttttgtatttctgcagagattatgtgcatttgtgggcagctgcgcccgtgggcttccaagggggaacttgctgtgacagtgggtccttgccttgcttttctccccttagggtaactaggtgacctccacattagcatattaagaatgtcctttttttccagctacgtagactagaaatgtgaggatgtgcatttgaagtgtttcctctgttaggttgggtgcggtgcctca

SEQ ID NO: 326181 - DNA, 500 bp, Homo Sapiens
  misc_feature (97)..(109): n is a, c, g, or t
aagtaaagtcccaattttattgagcatttgcatttcttcctttgtaaaccgcctgctcttgaccttcgtccatttttgctatcaggctattttgtcnnnnnnnnnnnnncactgatttaaaaaacttccagatattatagatacttattcttcttaaatgtctgcaagtacttcccccactttgttatttctcttttaatatgttcagaaaaaaagaatgacatagcaattaagaatcaccatgtcggcctggcgtcggtgctcacgcccggcccattgtcaatgttttaatgtgtgcccttccagatttcttcctctacaaggcttgcttgcacactttaagcatgcacatgcatgcaaattgttttacaaaaatgagatcacactgaacatgctactttgcaccctgttccctttggttaataaatatgaagaacattcagtgtcaaccattacagacgtaacatcatccttttcagagtcacacagttttatagacc

SEQ ID NO: 326182 - DNA, 582 bp, Homo Sapiens
ctggacaaaccaggatgagttgtcaacctgcatgggggcaatggatttggccatgaacttcatcatttcaaagtattaagttgttggcattctgaatgcccctgaacctattttgcatcgtagagtggacttgttccccagtgacccatgtccacccctagtggactcgatcaactcctgacacacccctactaggaacacgaaaatggttgtagaatgtgtttcattgtcctcatccacagatacagacactttggtgactctgtgttctatctgaatgggggctgagactacaggataccccatcccatttctgtcctctgtccttcatccaaggtgtcaccatttgtatcaggaaggaggctttgcagctaaaatttaaaataataagaagaatatatttccgagccagagattagatgcctacatatctcttttggcctcagcattctgtggtcttctatggagaaaggctaattttctgaaggctttgaatggaatgaaaactgcctgttcaaatggttctgaggatactgagagacgctcagtgtgtggtctttttatttttagtaatagtgttgg

SEQ ID NO: 326183 - DNA, 711 bp, Homo Sapiens
gatgtactgcttttggaaaaatcctgcagtgggaggccagggagccagaagtccataagaggcaatgcacaatctggagatgcaccaggctgcagctctcctctgagctttttagcagaagccatccagctggtgcagcacagctgagcctctgacccagccttggacccctcaagaaatggtcacttatatccccctgcatcctggatccccaaccgcttctgttcagctgacctccaacttcatttctgacttgttccaacttccatgagacctgagttcttgacttcttcttaaaatagcttctcccttaccccttgtacccaaaccttattctacaccataggtacctctcttgggctccaagctgccatttgcctcctggccatcctctttggccagcttaggtaacaacaaagggtcacagggaccctacactgctgtcaggtttgtcccagcctctggtggaagaaccagaaaacgacattctaaaggaactgaccacactcggccttggattttagatacttttatctctaccaccactctgtcagtagggggcagcggggaagagggaagggaagggagaggttgagaggagacagatgagaagaagaaaacggacactgctattggttggtacctactacttcctgctagctcggaaccttacctatacctttcgtttaattcttgcaacaagcctataag

SEQ ID NO: 326184 - DNA, 621 bp, Homo Sapiens
ggccgcttaattaagataatttcttaaaaaggtgttatatcacttaagccactttattgttattttgatgctgcttaacttgcacagtaaaaacatgtttaaaacttttcttgtagacttaaatgtataagatggtagtctaatgagctggggtatgtttgcttttgttcactcttaatggattgtgctaacagtttatacaaatgctagaaacggaggtgtcatttagccgtcattagccatgaacaaacctgaccttttattccatcgtgtgtgtaacgtggtgtgacatggttccctttaggctgaagacagtgggagcagccgagttcagtccttgctctccaactaggcaaggttctctcaactaaaccaagggtataggagtcttgattactttcagtatgtttttttaataacctgatccacatggtctcttcccttcttgcagctgctactaaattttcattcagaatatcaagctatggtcctttttgtaatcttaactcaaaattctaggagtgtaacctctcttttttattaccgcaaaatccagctgtggtaaactgaccattttatcattacatttttttacttgtagcaacagcattttactcctta

SEQ ID NO: 326185 - DNA, 471 bp, Homo Sapiens
  misc_feature (207)..(207): n is a, c, g, or t
aagttcttcctaagtttaatcttttccatgtggtttcattcatttatgaaaaatatgaccacacataccaatattcacccataagactcacatgtattgcaaaagtcagagagaaattttagggcacttctcaccattgctctttttcaggctataggacaactgatcacacatactgtgtgcccctgcatatgcagctctgaggantacaaagtgagtagtagggagcttacgatctctacctaggggagtatctcatcctctgccgcttctccctttttacccacactgacatcgtgtgtctgcttccccaccttgtactcctgtgtagcatcgtccagtggcacaacggtgtgggcccggtgggtgtgggaaattgcacatatcaagcatacagcctcctggtcctcataacagaaaaggctgagggcctcatggtgttgggggcagaggctctcatcccggatcttc

SEQ ID NO: 326186 - DNA, 679 bp, Homo Sapiens
  misc_feature (180)..(180): n is a, c, g, or t
  misc_feature (650)..(650): n is a, c, g, or t
actactgattgattctttcgttacattttcttctagggggtttgctatgttttccaggtttggggattcctgggactgatggctgtccatggggtcattctctttggtctccctttgctggtggtcctcatggggggccagtggagcgggttctgaggctggtgtggtacccacaccacnccctgctgagatacagcacctggtcgctggcactggggaggctctctcctggcaccgaggaactggagctgctctgagagccatcggcctcctcctccctggagtccaggtctggcatatagccctctggctcttcgagatccatttcttcattttttagatcctccgggtcttctacataagcctccaaaactgcagccaggggaacctcatagtgtgggaaatagaagaggtcgtggggaatgaacggaaacctttgagaggggtggggagggcttgaaatccaggccttcttcgctgtgactcccaagggtctccaagctgacacagctgcttggggggctggaagataattcctcgcccacaccctggaggtcatcgtcttctccctcttcctcataatgaggacgggtggactttctcttggccttttcatgcacctctggctttttatccactggtgtctcttnctggggctgaaggacagccttcagcttct

SEQ ID NO: 326187 - DNA, 416 bp, Homo Sapiens
  misc_feature (358)..(358): n is a, c, g, or t
  misc_feature (384)..(384): n is a, c, g, or t
gcatccttaaatacattatccaagagtattaactgggagccatagctacataatggagatgactggtcaccaggggcaactgccgagtccgaccttcttgcaccataggcagaaccccttcctctctccacactgagtggcagcgtcctcgcagtggagaaacagatgaccagcaaagctgtctgttttcggctgagggaagagactccctcccctgaaaaccatggtacaggtgttttctgtggctctcagcttcattgcagcttgaagatagacggcagtgtctgtttgaactgagacacatgagacccgggacaggagtatgatagggaaacgttcctgcctatccaggatgtgnaagctggcgcaaccgcctaccacctnctggagagacctcggcacatttcaccagtttt

SEQ ID NO: 326188 - DNA, 670 bp, Homo Sapiens
  misc_feature (413)..(473): n is a, c, g, or t
  misc_feature (550)..(577): n is a, c, g, or t
aaaactcttattttaagtaaaagttccatcaggtttttacaaaaatagattttaccctagtgctcaagtcaagggggcaatggccttgcgggtttaggatttaggatgaggtgagcaggaagcatgcgtggaagccagctcatgcccctcatgcatattcacgaagggcctgcttctgtgaaacagaccccgactggagtgcctctggatgcccatgctcagctcaggctgggtgaagctccgcctcagccaggagctccaaggagtggcaggtgggtcgggggagagagaaggaggcagagcttggtcctacaacgttcagttgtccctctgtgtgacctatgctgagggttgccagtttgcaaagcaacagtgacctatgctgaggcttgccagtttggacctgaaagtgnnnnnnnnnnnnnnnnnnnnnnnnnnnnnnnnnnnnnnnnnnnnnnnnnnnnnnnnnnnnncatatgaagatccattctctcatccactaacaatacttctggaggctcagcccatgagccacgtgctgtgctggaannnnnnnnnnnnnnnnnnnnnnnnnnnnaggggtgaataagagacagctgctctgcctacttgaagcttgcatctgagtgaagatgaactttcctttcccagccttgagagagggaaggct

SEQ ID NO: 326189 - DNA, 733 bp, Homo Sapiens
  misc_feature (367)..(391): n is a, c, g, or t
  misc_feature (409)..(438): n is a, c, g, or t
cacaaaagtatttacctattttcctgatagtttgggttgtttgcagtttttgtcattggaagctgaggcgcaatgaatattcttgtaatgtgtctcttggtgtaaatatgcatgaagtttgtaactagacgtagaattgtagcagttctcagaacgtggtctctagaggatgcctgggtatcctaaaaacctattcaagggtttaatgaaattaaaatgattttcataataatgccaagatgttaaatgtctttttcattgagttgacatatgcacaaatggtacagaagtaatagtgagttaaacggctggcaccttagcacaaatcaaagcagtaatgctggttgtagttgtgatcattgtattnnnnnnnnnnnnnnnnnnnnnnnnngagacaaggtctcacttnnnnnnnnnnnnnnnnnnnnnnnnnnnnnngcacaatcactgctcactgcggcctcgggtctccctgggctcaagtgatcctattgttttctttctcgtcatgtacttccaggaaaagaaaaaagccaattcgagtcacttattcttttgattctttttcgtagcaaagcatcaatgcattttctaaatgattgaattcatttaaattcgggaaacatttactgagtgcctatggaattctgggatatgagtgtatgtttaaggcagtgtgatttccagttaccatcctttctgttctaaacacgattgtgtcatattaaaatat

SEQ ID NO: 326190 - DNA, 501 bp, Homo Sapiens
gataagagagagattgtgtctggtatcatcattttttttccccttatctttttaaccccaagacttgtagatgtcaggactccgatcattttctctgcctatagcttggatatcttaatctctcccctttgtcatcataatcatatagccaagggactcggaattttggctgcttcaagtcattccaaaacctctcaggcaggcccaggaagcagaggcagggaatgtagagcagctgctgaaggaaaagaatgggagatggctggtgcaacagcctttcccaatctcatatgattacatgaaaacctacattcaatgtgatgtcagttttgtgccctgccaatttgctactgaagtgatgtgctactaaaaccattcctttagggaagtaagatgatggaagagaggagtggccactacagaagagccttagttgctgggacataagaaggtgcctatctggggtttatgcatgtgaatgatttttgcaatgatgattga

SEQ ID NO: 326191 - DNA, 972 bp, Homo Sapiens
ttgggttcagggactacatgtgcttgtttgttatgtgggtagtcacaaggcctttctaatgctgtgaggtttattgtctacatttataatcaaaggtcacactacatattttagctacattagtaataaataataatgttaattttttcctcatccatgttcacagacccctgaattctatccacatactgggggggattaagaacccccattctaagcccaccagaggacacctatgaaggctcaacacaaccacagcgcacccccttcctcccaggtgcactgaggacagcaggctgacggcaggaagggatccaaggatggcagtgagggcccccaccagctccagaggaggcagcaggagctcccctgcagccaggggtgcagggagacacaaggcagatctctgcgatgttcacttggcactgaagcaggcaaagggtatctacagacagcctcgatgggcagccaggacattccggcccatatgagcaatgctcctaggatactgtttgctgaagaaaacatttaaattaagagaagaggggccggacgtggtggctcacgcctgtaatcccagcattttcttgacaggctaactcatatgagttctagggctcttgttttggtcacctcctctcccaggaaggcttcctggattcccccagccacggtccagtgtgcgttcctctgtgctcccggagcacctggtccctcctctatcacggtggtcctcatcctgcctacattcaaagcctatattccgtctgcatcccatcggcccctgagctttggaggagagggccatgtcccagtctccactgtgacccaggactgagggttggcctggcttaactgtgccaaggaatcttctgctgtcttcaggtgctcagtgcagcacagggcaatggggggagcgggtggtccacaaataaatacaggaaggccaacctgggcacactccaggtcagg

SEQ ID NO: 326192 - DNA, 626 bp, Homo Sapiens
  misc_feature (198)..(198): n is a, c, g, or t
gttcgcctctatctaaactaaatcaaattgtaggtgcaattgttcattggcatgctaacaacagtgagatacaaaccaaaactcattgtgagtgccaaaggtccccaggtatccccttcatcaacatacctgctcccaggttcccactgggaattctctggcagagactgaattcagttctgaataacatgctgccangccctatctggaaaagggtgtgcaaaggcgccttctcgcctcttttacaggaagtttaaacctgatcatctcacctttaggtatatataatttgttgtttagcactctgagaacttggtattttatctatctaaagagatcaaaaagggcaaaagatggagcgagctgaggcccagcctagctctggtgcatacgtcaatcgtgcactgcgcgttgccttagaggagcaacctgtgcaggtaaatcttccagcagcattgcatcagatccactcacatcagtctccagggtgaaccaagagatgacacttcagttccctgtctgcaaacttctaattcgccagttcttagcagcttatttttccaagtgttttgtttcaggaaacgtgtatttttctttatacgttttgtggatctaccacaactgct

SEQ ID NO: 326193 - DNA, 556 bp, Homo Sapiens
  misc_feature (30)..(30): n is a, c, g, or t
aaaattttaaaatttggggtctttaagtanttttctccccattagtatcagtcatcttttaaatgttttcaactctaataaacaaactttaagttcatcaagtttaggtgctgatttaatgagaaagtatttggccaagctctccaaatgaattgttggggcccttcctcaaactgcagactggtcttcagaaggccccccaagagccaggccagagccacctgtcagcgtgaatcccctgcctcctccttgctaccacaccctacactcagtgatacagtgagtcagcaatactactgacttctccctggcagggcttctcctttcttgggaagaaacaacagcaagaggcttttcctctgtcttcctatctcaatgaccttatcttttttcttggtcaagaatgtttcgtgaggatgacctggtttgggaacagctttagactaagaacagagagttctataagccaagcgtttattctacactaattgcaatgtataatatcaggatttatcactttaaaaattgacatgaggatgggcacagtggctcatac

SEQ ID NO: 326194 - DNA, 617 bp, Homo Sapiens
aactattcatcaaattatgaaaattaaaatataagctctgatcatataaaccaaagctaaaatagggttgcaaatattgcaccagacatatttatacaaaacattatttgttatttacttgaaattcaaatttaatgaggcatcttgtatttttagttgctaaatctggccaccctaagctgaaagcccagaaaacctgcaggcattcccagcttggagctgaccggtgggtgctcactgctgggatgtgtggacccaggcatgaagaaaggcctcaacaactgctcttagtcattaactcatttaccagtaataaattgaagttaggcccagtgctgctgctcttattctgaaagaataaaacgtagtgcaagcattgcccacagcatctaaatgtttccccactaataatatactacattttcaattgattttaaagctaataattcagagagctataaaactgtttagaacccttagggggccagaatttgtgaagactgattttctcaggcaagaatccaacttgatagaaatctttgtaagtcacatcacttctctggatctgtttacgcatctttaaaataaggaagccacacttacggctttgctcataa

SEQ ID NO: 326195 - DNA, 574 bp, Homo Sapiens
ccctgtgattacagcctaagcctttatacagtcttatctcagagtgatttttattacaaacaccccctccatggctgaagaccaaggcaagtccagaaaaactggtcatgaattaaactttgataaaagattccttctggcctcattttcttgtgttgatttgataccccaatagaagattttcaagtgagcaaaggataactgaggttcgtgcacactcctgacctggcagcagcccctcaggctggctgctgcctacctcagttgacgtcctggcaacacagccactcaggcaagccaggagttccttctgacctctcagaggtttgtggagtaaaaaatgtatctagtgtgagcatgcggcactttgaactacccttgtgtggaaaaattcactaaaacaatgaagaaaataaaaggtatcttttatttggattctgtgaagttggtaacttttaatgcaattggccaaaattgctaactggcaaatttctccgttcttatgtcagccagttcactcatcagaagtctcaaaataaatatttaggtataaatcatttttaattaagcggcc

SEQ ID NO: 326196 - DNA, 1406 bp, Homo Sapiens
  misc_feature (964)..(964): n is a, c, g, or t
gacttaatttgtgacttttatttaactagcatgttcatgtaactagaatgcacctgtacatgaattttaaaatgtcatactgtgctatttttcttaattctgtaagggtaacaagtaactcagtaatgacttaaaacttgctatatattttcaatactaagataaaagttttaaccaaacttacaacaggcacattttggcagttagtgtaaacacaacattaacaagccatatgccagaagatgtttgcttccaaggccttagagaaaatgactgaacaagggcctacatccaaactaatgcttcccccttccccctgatttttgacagttgacagctcatcagttttcttctcacactggcttttttgatttgcccaattggtaggaatttcttccattaacactgctgatagaagtgtcttactgtaggctcaccctttgctctgcccttctgaggtccttctgcagcttatcttttgtcacttctcctttgtcaactgatctctagtttgtccctcaggaataccaaggagcgatctaagtgacttgatccgggctaagcaggcagggaagaacaggtctgtttttccacccactccttaatcagttggtgggagatggctaacttagggggcagccagaatgggaaagtcccattctgttgctgagtataggggccctttctcttcagggctgtggctacctcatcatgactgaaccaggcagctgtctctaattctctcaagttcacctggatttctgtctgccctggtttcacagttgcatggcaagcaatcatgagtgagccactagggaagggccaatgctgggatgcatagtactgcaggctttccacctccaatcccacctcttctgcaacttctcggcggatggtctcttccacactttcacctgtggataatagattatattattggaagggcacacacgcttgctgccangccacgttccttcttggtgggctgccccacttctgcctgcaagaactgaatgagcatcatgcccagcggagaagagcttgagccgtggacagcaaggaggcatcccttgcattgaagttgaaagagtgcctttctcagctcaatgaaagaccccttgagctctgtctccatttcaggtttgtgtaaggaggcacttatggaaaaggagctatccagacctagatccagagcaaaccatgcttcctgctgctcagagcatccaatcagcacagaatcttctattctttgtgcatcctgtccaaatttacccaggagcctttccaactctaacaggctgtgccggggggccaggtattgatgtgctgaagtctgaagcagaggagccagactatgaaagaggtaaaacgctcctgtttgctgggcttttttacatgcatcatca

SEQ ID NO: 326197 - DNA, 684 bp, Homo Sapiens
acctttcaaaatcaatccagtgtgaaatattggttgcctgagaggtccgtcctacagaattgtgtgctttattatttgaaatgttatttgttttcagcctggtgcagaaatccttttccttcagttatattttagaaccactgtgtgagtacattactttttaggttttgggcctcatggacattcttagcaacttgttttcacagccctttctttgatgttcatttgaaccatagcgttgttgatattcagagtattttgacctacaaacataaacattttatatggttcaaactaacagttaatttgcttcagtttaccaggcatggatgagtacagtttcaatgctaatagcaaatattttacttattttactttcctgagcactttacatgttttcactgttttcctcctcacatcaacaaccccaatgaattttatctctcatttataaataaagaaataggtgtaaagagataaagtaatatgcccaagtaagtgggaaactcaggatttgaacccaactcctcttgctccagagtctacacgctggaacaacaatgctattccgccctctacccttgatctagtccccttcttgggccatctgggtaggttttgttaaatttcaagcataggtccttctatgggcctttgaggccctcctttcccggcacagtagag

SEQ ID NO: 326198 - DNA, 504 bp, Homo Sapiens
  misc_feature (200)..(208): n is a, c, g, or t
tttgaagttccacaggtgattttgatgtgtgagccgtggttgaaagccacagctggactgcgttggaagggaaatggaggtcagcttaggccagttggttcacatggaaatcaacaaaaccagcgtggctttgaaggatgtataattctgttactctttgttggacccacacaactcagcagttgaaatttattattagnnnnnnnnnctcctgcgttttcatctcctaatttgggctccccttcatatagagcttttggaagcaagtaagaattcaagttcatcaggcacattttcactacacctggcagaacatattaaggtgttgtgttttataaaatccagccagaaactataggtggtctccagctccacacacttagcaaggcccctgctcaactccccacccaaccccagttttccagtccttcctgcgttcaccagaggcacagtcaggatcaccttagacgctgagttcagaaatggagaaggaatacagttaaa

SEQ ID NO: 326199 - DNA, 988 bp, Homo Sapiens
  misc_feature (495)..(628): n is a, c, g, or t
  misc_feature (947)..(947): n is a, c, g, or t
  misc_feature (957)..(957): n is a, c, g, or t
cattaatccagaaagtttccatatctccctttccaaacaatcgccacatcttacttactctgaggcaaacactgcttctggtttctagtatcatagattaagtccatgtaagtgcattgcttaattgccaaataattggagattttctgtatgttatcaattactaatttaattcatgggtgtagaatatacaccctgtatgattccaattattttaaatttattaagacttccctatatatgttctatcttgataaacatttcacatgcacctgggaaaagactctgtgttatacaattgttggggtagtgtttaggaaaggccaactggggtcaagttgatttggatatgctgtttaaatcttctatagccttcctgattttttgggggggcggggaggtggtgaaggcagaagctacttgcttcatgagaccctgacggatgaatttgtggacttggctatttctctttttagtcaatttttgttgctgcannnnnnnnnnnnnnnnnnnnnnnnnnnnnnnnnnnnnnnnnnnnnnnnnnnnnnnnnnnnnnnnnnnnnnnnnnnnnnnnnnnnnnnnnnnnnnnnnnnnnnnnnnnnnnnnnnnnnnnnnnnnnnnnnnnnnngatacttatacagatacaccagtttttgctatgtttagtgttttgcatagtatctcattttcccatccttttacttttaaccagtgtctttaaagtttctctcttgaaaatatcatatagataaatcctgcttttttaatccagtctgacattaaatggagtggtaactgttgatatagttgggattaactctaccattttaataggttttctacatgccccctttgttccttgttcatgccattatttctccttttctcctttcttagaattaatggagtatttgtatgattccgtttaatcttatctactggctttnctcgtgccgnctcgtgccgctcgtgccgctcgtgccgaatt

SEQ ID NO: 326200 - DNA, 844 bp, Homo Sapiens
  misc_feature (11)..(11): n is a, c, g, or t
  misc_feature (69)..(69): n is a, c, g, or t
  misc_feature (452)..(492): n is a, c, g, or t
atggaagccanaaaaatgccacaaaaataatttggctgtcgtgcaagctgaacttcacacaatatgtanctgtgccacattttaacactgaacacccctaaaactgccttttccagggcctatcccactctcatccctacctccccaactactattctctggagggagtaatgagctaagttggagggtgagggtaggcaatgggtagaacaatcttttatgtatgggaactctaaattgttattatgtatcttagtaatatcataaggctgaaactgtctaccttaggttctaaggaatctgaggatcatttctaacatcttagaaatgagatgttaataagctaaccctcatggggagtaatactggttactgtttattaaacacttagtacgtgtcaggcacctgatacatactctttatggttgtcataataaccttgcaagttgggnnnnnnnnnnnnnnnnnnnnnnnnnnnnnnnnnnnnnnnnnctcaagagtggtgctatcaggtgagacttgaactacaatgaatcagtgtttttcagccttcagactgaagggtttcagagcttggatagcggagaatgatctctgcggatctcaagcccctttcttgtgctgtggtatctcaggataccacaaagccaatagtgggtgattttatttgcatcctaggtagccctgaggccacaggacagtcccattcaattaaggtgataaaaggactttacaaacagaactattgctgcagtttggttatgctccacttcccgcacatggctcttgtgttttattcagagtctggccaaatggtaactccttacatatctccccatcatct

SEQ ID NO: 326201 - DNA, 686 bp, Homo Sapiens
ccttaaaaaacactacctgatgctttccttgttcgtggggattgtggtcacatgaagctctttctgcatcagtattaaggtgtatatttgaatgtcctcccctcccctttcccctccaggctgtgtagctttgaggggctgggcgtttgctcacgaccttgctgtctcgctcagaacatgctccgcaaagttctccgcacacacttcttccccatcaagcccatttccttccccaaccacaaaggtgtttgtgattcctcaccccgggaaaccaaggagctgcaaaggggagtctggttcagccccgtgcagactcacccaggagcttaacgttgtctttcaaacaccctgaggccttcctaaacagccagtgcagacgttctctctgggccactaagcccctcgggtcctccccgtcccctggctccgatgcatacctcagtgcagaaccacagaatctctgcaagcggaaacgcggtgcatctcttgtctgttggcagcgagcacatcgtgctggagacacgagtttctaagcagctggcacgagggctgctgacggcatgggtcgtgcttcagggtggcaatacctcttaggaacttagggcaggaagcaatacttcagcattgaatgtgtgtaaatagttgctttgagttgcaattgctattttcttctcagtcccagctca

SEQ ID NO: 326202 - DNA, 998 bp, Homo Sapiens
  misc_feature (563)..(599): n is a, c, g, or t
  misc_feature (641)..(641): n is a, c, g, or t
tttacttgtaaatacttgtaaatttcatatttattgtaacaaaaattatgacatgtccatttgtgcattctgcttgagtataactctgggtatgtaaatggcctaatggggcactatacaaccatgctgattgtggcagcagtaaggaacacagttaaaagtgtctgtcaaagtgggaaggctgggacaggggaggaaaatgggttcagggcccttgggtgcaggttcttgtccagtggcctaagatccatttcctccggacagaaacactgcagctgctcagcctcctcattcagtgaagtgagggtgagttgtgaggcaggcaggttcctcagaggggacggggaggggaaacgtcagttacttgggctgtgtccttacgccaagactacaaaacatcgtaagcctcactatacaacactgagctatttacaatggaaattctcaatcagctgttctctcagagaaaattagtgaatcccagtgacttaagtcacctgacagagtaaagcaactcctatgagttagtctccatattctacaaatgtctattattttcaagnnnnnnnnnnnnnnnnnnnnnnnnnnnnnnnnnnnnngccttttccccccaaggaaatacagaaattacaatattattnaaatccatttagccaacggcagcctgccctgccttccaaacaaacaacaaaaagccattttaaaaaatattacattatcattaactgtttctctgtaatatattaaaccttttgttctttgtctttacatatctgatatgttagggggagaagttaacaaatgtaaatcatattggtaaagcatcactagaagaaagtggtgattacttaaaaaaataacccaaagaaagagaacctacagattagctgcgatgacaggttgggaacagtgtctgggggaaggatgtggagtaaaacccctggtttaatgtgagcctgggagactcttgcaactcagtcttttgtggttagtttatt

SEQ ID NO: 326203 - DNA, 760 bp, Homo Sapiens
  misc_feature (460)..(460): n is a, c, g, or t
acgtgtggattttatagcccaaggatggggagagaatatttccaactgtcctgagttcagaatggtacccgctccccactgctatgatgcttatcttatagctctgatgtgttcactactttcagcactcaataccctaaaatgtctgcttgccccagtggatacttgattcctatggctcattttaaatatttgccatgattcacatataagtagattcccatacttatctgtgtatcctataaagtaaaacacatcatccttacttagctattttcatcttttgctcaaagactatcagggcaaatgtaaataaactctttaaccgaacagccatccccaacagggtcttaagtaattctctgcaatgggtttgatgcatgaaattcatccaggtaaaattttctcctcattttatcaccctaatcatgatttaagtctattttgtctttatggatgnacagtgtggaatcctatgaaaagccagaataaatatttttataatattgaaatggtagactgcaatattgggaaaaaagaaggtattttaacagagatgaagccaaagtttcatataatccttgtttcatttacttctatcagtagtttcatttctttccatcacttattcactacaaagttattgtgatcatcaatctaacttaagtagggttttttgtctgttccatttacaaaatgctgccaatgctcactaaattgatcacactacatctcaatttattaaagatgggaataatag

SEQ ID NO: 326204 - DNA, 345 bp, Homo Sapiens
ctttcttcctactgaggcaacccgaggttcccctgatgtgagttccctcgctgcaaagagcaagaaaccaaactagactaactacaagtgtgttcctgggtgggctttgggtgaagggctgtggatgccagccttccttggcctgggaaacttccaagtaataacagccaccatttgggcaaggctgcatgtgccagggtcctagcagcaaatgatctattaccttcacagcagctctgtgaagggcaggtgccattgttccattttactgtgacttggagaggctaagtgacaccttaaccttcacaaagtggcagagctgggagatgaatctttgtttatatt

SEQ ID NO: 326205 - DNA, 425 bp, Homo Sapiens
  misc_feature (194)..(243): n is a, c, g, or t
ccatatgtataacaaggcttttgggctgatttccttttgtggtgactcagaacgtctcctcaatcattatattgagaataaaagtaaaaccttctaagattttgctcctcaagaacatttaggtcttagtataatgttcttgtagattgcaggccccccactggttaatgcttaccaacatgttcacacttagnnnnnnnnnnnnnnnnnnnnnnnnnnnnnnnnnnnnnnnnnnnnnnnnnnacttgttctatgaagaggcctaacttgaaaatgtgacatatggcaaatagagaaaattattcttgcaaataaaaatcatccttttaaggaatccctgcatgtgagtatagggcagaagtggcaaacaaggagcccataaaccaaagtaagcttaaaggcagctgttatttgactattgccag

SEQ ID NO: 326206 - DNA, 669 bp, Homo Sapiens
  misc_feature (14)..(14): n is a, c, g, or t
  misc_feature (44)..(44): n is a, c, g, or t
  misc_feature (156)..(156): n is a, c, g, or t
gggacagggcccangaagattgctcatataatggggcccccagnacaggtgcgagcacgcagcccggatcatcaacgacctcctccagagcctcaggagtggtcccccaggtcctccagggggtccaggcatgcccccgtggggcggagtgccganggaagaggccaaggcaattggggttcccctggcggggagatgaccttctccatccccactcacaagtgtgggctggtcatcggccgaggtggcgagaatgtgaaagccataaaccagcagacgggagccttcgtagagatctcccggcagctgccacccaacggggaccccaacttcaagttgttcatcatccggggtttcaccccggcagatttgaccacgccaagcagcttatcgaggaaaagatcgagggtcctctctgcccagttgaccaggcccaggtggcccaggccctgctggcccaatggggcccttcaatcctgggcccttcaaccaggggccacccggggctcccccacatgccggggggccccctcctcaccagtacccaccccagggctggggcaatacctacccccagtggcagccgcctgctcctcatgacccaagcaaagcagctgcagcggccgcggacccccaacgccgcgtgggccgcctactactcactctctc

SEQ ID NO: 326207 - DNA, 655 bp, Homo Sapiens
ttaatatatagcctagactattgagtctctacaattgaggaagaaagaggttgttctcacctgctactcttccaacccctatttgaaaggaagaaggaaaagctacttaaggggtggcacagctactctaacttagataataaggagggggttagtcaagctctttaaaatagaagttttcttcgttgtctgggacgctaatggggtgggagtcatgcttaggacagagacagggtaactgagtccctgccagtggggctcagatgcctttgggagctagaggctacataccaagagtcctggtgagcttcctgtgatacacacaagcacattcaatcaggtcagcaaactttttctgtgaagggccaggtactaaatacaccttgtagcccattcaagttccactgcaagtattcaattctgccacagtagcacaaaaactaccacagattacatgtaaatgaatgagcatggccacattctagtgaactttatttatggacactggaatttgtatttcaaatgattttcctgtgtcatgaagtaatactctcctttcaatttttttcctccaactacattctgagaaatgtgtcattaggcgattttgtcatgcaaacatcatagtgtgcttacacaaacctagatggtatag

SEQ ID NO: 326208 - DNA, 373 bp, Homo Sapiens
  misc_feature (23)..(23): n is a, c, g, or t
  misc_feature (72)..(72): n is a, c, g, or t
ccttccctgtgaatacaacacanccacattccaatcaggtccagccaaactttttcctgtgaaagggccccnggtaactaaatacacccttgtagcccccttccaagttccccactgcaagtattccaattcctgcccacagtagcacaaaaactacccacagattacatgtaaatgaatgagcatggcccacattcctagtgaactttatttatggacactggaatttgtatttcaaatgattttcctgtgtcatgaagtaatactctcctttcaatttttttcctccaactacattctgagaaatgtgtcattaggcgattttgtcatgcaaacatcatagtgtgcttacacaaacctagatggtatagcc

SEQ ID NO: 326209 - DNA, 780 bp, Homo Sapiens
tactacaacctgccttcattttaagtcagtgagatgccatcagtgagatggcagtaaaatgttttccttttgtcaataaaaacagccatttactgccttctcgaaggctccaatctgctattttcctggtttctcattttgagggcaataggaaatgcaacaaactccaggactgctgctcccagtcaatgcccttttaattgaaataaggctgccccaccagctaagccagcttccaacacagcccggccctgccttcctggatttcctggcaaagcccaggccttctcacacgcactcagggtgatctgagcagaccacaggctgttcatcccattgggttaaaaagtacttggagacttagttgcagtaaggtcttaggttttgttggggttttttttgtgggaaagtgaaggcatctgcacctgaaatgaaataccagaaagcctccacagcaagcaaaacaacaggcacttaggtaaattcagcaggaagtaagaaaaccacaggtactcaggaggattcacctccgtccctcccagggcagaactggccttcagcaaaactgccttacaaagtcatgaatggcttcacgtgccaagcttcaacctttcagatgatttccatacttctccatcatctttggcctggaatcatccccacaatggcaggaaagaaaagagctacccgccatagtggtcctctctgccaactaagagttgcagatgattctggtcagtactcctcagtagcaatgacagcaacaatgacacagtaaac

SEQ ID NO: 326210 - DNA, 838 bp, Homo Sapiens
  misc_feature (48)..(117): n is a, c, g, or t
aagacacattccctgttttttatgggctcaccctttcacagtagaagnnnnnnnnnnnnnnnnnnnnnnnnnnnnnnnnnnnnnnnnnnnnnnnnnnnnnnnnnnnnnnnnnnnnnnacgaaagaggggataactacttctgccattacagtctggaagaggtatcatttcagctgatattgtggcaaagtattttacccagcagagggagtatccactcaatgatgttcttaaagtacctaggtaggagtgctaggcagcaaatgattctcttaatgtgtatgtccacacattgttatgtgtaaggtagccttattaatttgggttgtaaataaaaggttgagtaataataaaaatgaaatcaccaaattctacaatttgacctcaaaatatgctgtaagttctgatattattcctactttacctgggaaggcagagcggttacctaggaaggtgaactgtggaagtccgctgtggattggggatacctgatctcatgatgagtcaggcttaacctgactccttctgggtctctctggtggagacagcccttcacctctgcaaagcttatccacgtgtctggtgatttccttatagcatacagagcttttaaggtttacaaacgtatacctatttccccaatgtagaaagcagattcaaaaacaggttcaacaaaacatagcaaggcaataggtgattcctagagaccaacagattgagttcttgtaataaaatctagaaaagagaaaaggtggaaatgtcagccagggcaacagaaatgatatgcaccaggagatccaggaattcatagtaaaggtcagatgagtttcacaggtgt

SEQ ID NO: 326211 - DNA, 971 bp, Homo Sapiens
  misc_feature (119)..(160): n is a, c, g, or t
tagattctaaaacaaatccttgcctataaattaccagtgtccccaaagttaccctgttctgaaagtattgagtgtagcttatgtgtataaggacacctcttttttatgcagtgataagnnnnnnnnnnnnnnnnnnnnnnnnnnnnnnnnnnnnnnnnnnttttaaggctgacatcctgtaatttgacatgctttccttggcaatatggaatcttactaacctgctggagaatcttcttaagtattcttttttctatttttaaaataccagaaaataagtcaataacaaacatcagcaaaagtcccccaccaaattacattataccacttggtttatgttttagagcacgattttaaaataagtgggttcctatttttatttttggaagctgaaatggaagctgtcttatgaagacatatgctcaactctatacttactcaaatcttaggaattctaatcttgttttaaagggaagatgttaatgttatggtgccaccagatgctgttgctactaccactggcaaagtttaagggtaaaatagcataaagtttctgtgtggttctggcttatgtaatggtatgtgccaggcagaaaggcttgcttttctaacactcacaaactcatttatatttgtccttggttgctgccaaggcagtttcttaatggggaatactagcagggtacaggggaattttttttccactttctctcttctatctgccactactatcctgccaaaggtctgccatggaaggcaggtatgtgccccaccaggtattgcaaggcagcccagggaacaggaaggaaaagagagatgtagctcgcatgcttcttagtccttctggaagaggaaggctaaggaaggtcatcttcagcactcattttctcatcttcccagggatgttgattagtttcttctacagtaagtctggcaagacctgcctgtgaatacgaggatattctgagtta

SEQ ID NO: 326212 - DNA, 545 bp, Homo Sapiens
  misc_feature (58)..(58): n is a, c, g, or t
  misc_feature (343)..(343): n is a, c, g, or t
tgtttgcaaaaagggtatgaattcaggcagctataaagaaaaagttaactttttttcnttcattttgataggtttgagaaatttctgtggttcattagctcagagaactatctaattataggtggacgagatcagcaacagaatgaaataattgtgaaaagatacttgacaccaggtaggtaagattaaaattcggaaaaattttctcttgaatgtttggatcagttatctcaatattaggcattgattttcttgttatactcttctgtttgatagatttaactagtagaaagatttgatgcatgatgcttcatggtttgttgcatatgtgttttgatgcttnttagttcttaagtgaatattcctaaaatggtattgctgagctaatctgcagtgttggactttcagtacattacattaacagaataactttcagtcttcaaagttattgtaggtcaaatttttaaaagcttactgtagtggtgttaaagtttgcaatcatttttcacacctagaagtaggacttggccgggcgtggtggctca

SEQ ID NO: 326213 - DNA, 918 bp, Homo Sapiens
  misc_feature (574)..(574): n is a, c, g, or t
acacagttgattgtcagtgtgtaagccacagattctgaaggttaagagcttctgccttttgtgtggtgggaacttgaagaagggtagaggactaactggtctgggatgaatccttggaggaggtggtacttaattctgggatgagtggggtttgcctgtgggactgcagaataccttccaggcaaggagaaggaccccagagtgagtaagctgtgtcctgagagaagggaaggggaaatgagtccttaaagtagagaaaaacttttctaagttggaaatcaaagcagatgcaacatgctccgcctacacttgtgcagcagggaaggtactggcttctttatgccctctgggtctgctgggttgccatggtgagcccagctcacacacagtaggtgactcaggccacctgcccatttccctaaagcggctagggcccaggcacacctctgaggctctgctagtggggaagcaaccacctttgaggcagcagacgcaagagaaagcctctgaaggtggacaggctttgaggatgcagctaggaagccctgactggcctctgctgtttccttggacntgaaggtccctgttctctgttctcactctgcttctaggaatgaaagtatagaatattctaattctagaatgttagagatggaaaaatccttatcatagcttgtaacccccaggcccaaagggaaatggagatgttttgatcaagttctctgtttttccagttgaggcccagagaggaattggccccaggccactcgtgaattaatggcagagtcagtcttcttccctgctctgttaactaactcaggagtccctaggcagtaagacctggacagtggaccgagaggaggggctgtggtttttggcttggatattggtagcattggcaaacctcagttcttccag

SEQ ID NO: 326214 - DNA, 665 bp, Homo Sapiens
  misc_feature (196)..(196): n is a, c, g, or t
ggattttgccaaaagttagaaaggtggagctgtaagccatgtgcttgttgcctttgacagtgacagtgcgcgtcttacaactaattccactaggcatgggaatgtcacctcctttgccactgtaccccatcaagcttactctgaatcaaaggttttgtaaaacttttgaaaatgaacttagactgcaaaatatagnctaaccactttccattggcaaggctttgcaaagtgaagagaggttcgtacttctcataattggtatttagcacaattgtaagatacagttttactgtttgtacatcgtttttttccattaaacttttctagagaagacaaaagcttacactggtgacatggataagtgagatggtgtctaacgagcagtgcaatattaggcggtgcaatagaggccctgttggcaagatgagttttgctggagagctggacagtgttggttagcttcctgcattgattgcccctgggcgttcttcccccttaactgtgaaagcagagtctataaatgaactctttgctcttacaaggtaatttacatattttctttctgttgaaataactgaaaatgttaaatctaccagtttatgtcttgtaaacagagtgtcatatgtatttaagttgtgtatttttataaagtaaagccaagtatc

SEQ ID NO: 326215 - DNA, 993 bp, Homo Sapiens
  misc_feature (13)..(13): n is a, c, g, or t
  misc_feature (27)..(27): n is a, c, g, or t
  misc_feature (175)..(175): n is a, c, g, or t
  misc_feature (229)..(229): n is a, c, g, or t
  misc_feature (232)..(232): n is a, c, g, or t
  misc_feature (236)..(307): n is a, c, g, or t
tgggctaggaagnaaatcccgtatcancaacagtcttggggtattaaggacccggaggttgaaacaaacttggccccagggtcctagggatggaaggagagcctccttgctgagaacctttcccaccatacaccattgtccaaaagatggcctcctaagtcttgggaaggggtantaccaaggaggtatatcagttggaagtgatgccactaacacactaacacttacntgnaaannnnnnnnnnnnnnnnnnnnnnnnnnnnnnnnnnnnnnnnnnnnnnnnnnnnnnnnnnnnnnnnnnnnnnnnagatgggagtgcaatgtggggtagttcctaggcagcatggggagccatctatataagctgagattggaagggtgaatgagggttggccagactaaggaatggcatttcaggagtgtacagtgtgggcctgcagagaggggctggcccgtaagcctggttcttacatgcagtcttgtctggctgggtaaggtagacatctacggtttgctctgccccacatccattctcccttctgggcacagcacctggactttcctttgggtaactagcccatccccaccttcctgcagtattgttcagggatgggcatggggccagcaggccaatgagactcaacctggggacttgtacaagatgatgggaaaaacactctccttccatgggctgctgaggatctccatgagaaaaagcccacctgagagggaagccaactcagatgaaatagggactaggcattgagagagacctagcccgagtgagatgactgagtccctgcatccagcccggccttagggtctaccctggaatttcagttatgtgagcctatcaattctggtttttgcttaaatcagattgactaaggttttggttatctgtaagcaagaatccagactaatgcaatgggataagaggaaaaggggaaaggagagagcagtagggccagctcatgaacctagctggagcta

SEQ ID NO: 326216 - DNA, 1032 bp, Homo Sapiens
attgaatctttgtagttcttaaaagcataaaggtacatcccttaggaagccatgagagagattctgtggccttaggaccaagtcaaatccaaccctctaactagtaatattctaccattatgtaacattaataaataaccttccatgacggccatgaatggagctttgcttcgtggcagaaacactccaatacttcagatgctaccactgggggaaatgtcttgtaaataaagaaaaagcacttaagatagctttttttccaaaaagtctttagttttacaaattttctttaaaacggtaagcaaagcaccacgttctctcttatcagaatatcttctgtcctcataatataattaataaggacaattatattatttatttcaagaaacattatacctttcatttctcccattcttcatattagaagtactaggtttcccagtgtatgtacactagacactggagtaatgaatgaaatataataatttggagggaaataggtaacttataaccaaaacttacccaggattgcatatatgcatatttacaagttagtgtaatagctctgacttggaattacaaagtgcgaaagggaaaattgtccaaatgattgtagtgccagaatagaacgttttttcccctttcccaggaatcatttccactttgtctccaaagtaggaaatcaacagcatcggacatgtggtcttggtggaggcagttctggcggtatctcaggctctggttgtaacgacaggatactattggacaactcattccttaaaatatccagaggcatctttttcagaatgtcatcgacaagtttcaaaaatatctcgtccacattgaagttatccttggcacttgcttcacagaaccgcatcccagtgatctgctgtgcaaacttttccccctgctgcctggtgatttctctgtccgtttcacagtccaacttatttccaactaagagaagctctgcatcttctgaagcatacttatcaatcatcttcatccatttcggcaaatcatcaaatg

SEQ ID NO: 326217 - DNA, 664 bp, Homo Sapiens
  misc_feature (114)..(164): n is a, c, g, or t
  misc_feature (557)..(557): n is a, c, g, or t
aatatatccgttagttttgctcttataagtgaaatcttccacaagggttattggaaaagcccccgtttcaaatcattcactctgctgttggaagagattgcacttccaaagttnnnnnnnnnnnnnnnnnnnnnnnnnnnnnnnnnnnnnnnnnnnnnnnnnnnagcgcattgtatccttaatctaattgttgggagaaaattattggtatctcaaaagtggtttcagaaaggggaagaaaaagacaagacagtctaggagcaagataatgtcgctgaaaagttgtcacgagaggtttctgctcttgctgtggtctcattccaataccattaactgcatgttacttttgcatgttgaaaatggtggcaaataacacagtaaaacctgacaggtctgcctgcgagggtttaaacagttccccaggaaggaggcctttaggcacaaactttctctcacaagagaacgtgaataccaccaacccctcccctacaaatcctgaagcatccagtttgagatacaaaaaggatgtcatctcacaaatgttaaacatactaaanaaatctgaaaaaaaagtatggagaaggtgtgaaaaacgtggcactttacagccctcaaagctttttaaaatagcacaacttttccccctaaaattcttttcagagaa

SEQ ID NO: 326218 - DNA, 390 bp, Homo Sapiens
  misc_feature (337)..(337): n is a, c, g, or t
tttttgtggcaagagcagctaaaacacactcattttgcatgaactccaaatacgaacagtgcacgctgatggcctgcagtcctctgccgtgcttggctctctggacggttcattctacatggctgctgctttgcgtcctctgacctccccattccctatcctgaaccccccaaactcctcttcactcagacggcgggtgctcctgtagagcggcaaggcaaggatggggctctccaggggaccctgccagtcctccatcttctgggtcaccacctgggcccacgtgggtccagcccagcatcctgggagggtgatgggccgcagtgggaggcaaggntgccaaccagcacgatgggtggggtgccctggggaaaccctcctggggggcac

SEQ ID NO: 326219 - DNA, 677 bp, Homo Sapiens
  misc_feature (35)..(35): n is a, c, g, or t
  misc_feature (573)..(573): n is a, c, g, or t
caggaaactaggaggttctcactgcccgagcaganggccctacacccaccgaggcatggggctccctgggctgttctgcttggccgtgctggctgccagcagctttctccaaggcacgggaggaagaaattacccctgtggtctccattgcctacaaagtcctggaagttttccccaaaggccgctgggtgctcataacctgctgtgcaccccagccaccaccgcccatcacctattccctctgtggaaccaagaacatcaaggtggccaagaaggtggtgaagacccacgagccggcctccttcaacctcaacgtcacactcaagtccagtccagacctggttcaccttatttcttgccgggcgttcctccacctcaggtgcccatgtgggacagtgccagggttacagatgcattggggagctgtggtccaagccagtgttttgaggtgcgggccaatttcattttgcaggacagaggggcaggcccagggtggagatgatctgccaggcgtcctcgggcagcccacctatcaccaacagcctgatcgggaaggatgggcaggtccacctncagcagagaccatgccacaggaggcctgccaacttgtccttccttgccgagccagacatcggactggtttttggtgccagggtgcaaacaacgtcaatgtccag

SEQ ID NO: 326220 - DNA, 842 bp, Homo Sapiens
  misc_feature (105)..(128): n is a, c, g, or t
aaggtagacaacctgatatgatgggattcatatagataatatagatagcacaaaggttcctatagcgacgagtttaacatatccaccatctctcatagttacccnnnnnnnnnnnnnnnnnnnnnnnngtggcaagagcagctaaaacacactcattttgcatgaactccaaatacgaacagtgcacgctgatggcctgcagtcctctgccgtgcttggctctctggacggttcattctacatggctgctgctttgcgtcctctgacctccccattccctatcctgaaccccccaaactcctcttcactcagacggcgggtgctcctgtagagcggcaaggcaaggatggggctctccaggggaccctgccagtcctccatcttctggtcaccacctgggggcaccactgtgagggcgctgtgctggacattggcgttgtttgcagcctggcaccagaaccagtccgatgtctggctcggcaggaaggagaagttggcaggctgcctgtggcatggtctctgctgcaggtggacctgcccatccttcccgatcaggctgttggtgataggtgggctgcccgaggacgcctggcagatcatctccaccctgggcctgcccctctgtctggaccacagctcccagtgcatctgtagcctggcactgtccacatgggcacctgaggtggaggacgcccggcagaagtaggtgagcaggtctggactggacttgagtgtgacgttgaggttgaaggaggccggctcgtgggtcttcaccaccttcttggccaccttgatgttcttggttccacagagggaataggtgatgggcggtggtggctggc

SEQ ID NO: 326221 - DNA, 510 bp, Homo Sapiens
  misc_feature (496)..(496): n is a, c, g, or t
ggccgcttaattaaaataactgataaatcagatgtagctttaaatgggattttcaaaattaaaatgtaggagaattatgttaataagctctgcttttaactctatcaagtataggaatgtgttcctttgtgcaatttaaaaccaccatcacctatgccctctagtgcttatgggatgagtttgacaatagaattgtgttctctgtttcctgcttctgccctggttactgctgatattcctggtgtgagagttctcttagtctctctgatcccagcttccctgggcattgggaaaagggtggctttgcctattcctccatgtggtcctgctatggggctgtggtgctggagaaacaataagtgcatctggggcaaacacgggcagactactgggcagtcagctcctgggaagccagggcagtttatggcctaggcactgcccagggtgtaggaatcccgttcccgagggtgttttatctgttaggcaagccaagggncattattagttgac

SEQ ID NO: 326222 - DNA, 512 bp, Homo Sapiens
  misc_feature (79)..(188): n is a, c, g, or t
gagctcaagccatcctcctgcctcctgaatagctgggactacagatatgtgccactgtgcccagctaattattactgtnnnnnnnnnnnnnnnnnnnnnnnnnnnnnnnnnnnnnnnnnnnnnnnnnnnnnnnnnnnnnnnnnnnnnnnnnnnnnnnnnnnnnnnnnnnnnnnnnnnnnnnnnnnnnnatgagccattacacgtggccaaccatcctttattatgctcttatatgttattattaactcacagttactgtgatcaagaagagctaaaatttacaatgggcttcctgtgggccaggtcctattcagagtggcccagagagaggcagtacctgcctggggccgcatggcgaataagcagaacagggatgggagagcaggtgggtggcggaatcctggattccatgccttacccagttattagaacagctcatgtcctgggcacttacttggtgccaggcgccgtgccaacctattacagacacgatctcctttaattaagcggcc

SEQ ID NO: 326223 - DNA, 618 bp, Homo Sapiens
  misc_feature (62)..(70): n is a, c, g, or t
gagtgagccaccacgcccggccaaagggtggctgaaagttggttgcctcctaacttccaccnnnnnnnnnttattcagaacattgttcagaaaacattattcagcacgataactggaacaacatcaaataacctaaaagaatgaaaagtataccattaacaatgaactaatggaggccgtcaaaatatcaattcccaattaccggtccaaggataaacaccgccggatatatgccacataatctttatattcatgaagccttctaaaaggaataaaatctttgttcttggcccatttggaaagtgctgctacctagatctagggaatccaacagtcaacttcttcagaagaacgaatgaatttcaattacaaacccaaactgttgcaacatgaaaaactgttccaccaattagggatatcgtccaattctaaagggagaaattcacagctttcagcatgtctatgtcagccatgaactttgtagtaatggagctgtccacagaactcaaaaagcctgaaaaaactaagtaaaataagagcctggatttttccaccaatttatttagggccactagcaaccaggaatgatttagaacagactatattttaatttagttt

SEQ ID NO: 326224 - DNA, 669 bp, Homo Sapiens
  misc_feature (255)..(255): n is a, c, g, or t
tgtgactgacattcccaggtacctgaaggaggaactgcacatctccaggtgggacctgcagtccttcctggaaacttccatggctccccacacatgcaagttcaaagcctctctcctgaacctaggttcagagccccttctgcagtggtagttccaacctccctcccatgtccccactcacagctaagcttcgggcctggagcacctccaacctgctgatcagggcaagtcccaatgtggcctttcaaggccatntggcacatgttcattgtgacactgttcgctgagcagtcactgtgtgctaggcgtatctgcagcatctggacagacgacactaaatgggtattgaaggattgaatgagggatcaataatgatatccagtttgattcagtggttccagaggtttttctaagtgctttccatttattaactcatctcacattcacaaatgaccccataaagtaagcactattgttatccccattgtactgacagggaagctgaggtccagaggagcttgggtgccttgctcgaggtcacacagcttgtgagtggtggttggagctgaggaaacgtgagaaattgttgttcccaagctgtgaggtgccacatgggggccaagataaaattattctttttctttttagagatagggtctcaccatcatt

SEQ ID NO: 326225 - DNA, 926 bp, Homo Sapiens
  misc_feature (43)..(43): n is a, c, g, or t
  misc_feature (91)..(91): n is a, c, g, or t
  misc_feature (140)..(140): n is a, c, g, or t
  misc_feature (145)..(145): n is a, c, g, or t
  misc_feature (147)..(147): n is a, c, g, or t
ggcggtcaacgcgctttattccgaggggcttcagatacagatnaccccagccctgcatccgcccggaagggtccccttactcccatggggnacctcgataccagctgccctgccctgactcacttctcagcacccatctnacggnantcggccctggctcagacccttgggttcagatcccaggccctcctcctactcactgtgagaccctaggcgagtcccttagctcgggagcctaattccgcttcattaacatgggggtaatttaactacctagctagacggttgcaaagggatcagttcactaattctcaatgttggcagtgcatcacattgcaaactccctgcctctgctccagagctgatcagaatcaataagggtggggcctgaaaatactacatccaaatttccgagaagcacagtgtctagcatacccctatctctccatctggggttactgtcactctcaggaagaaataatcacccattattccttcaaccaggaaaagagatgtccagggcacagcttggggccccagaaagtaaccacggaggtcaagatcacaaacccgtcagtgtccagggcatggcctcgcacacatccgaggttttcaaggaccatgaagtgccatggcaagcatcctggcctgagggttaggagagctggatctcaggctcaactttagcctgaattcggtgcgtcatcttagacaaatctggtgagctctgagggctggggtaaggttgagaaactgtgggctcctcagggtggggggtgcttagagaagatggggcctctgagtcctcagactgggggtcttcatcgggttcagcatcctccccaggcccaagccctgccagcctcttgctggcctcccatagccgatgggctgcccggtcgtctcgggcagctggaggcacctct

SEQ ID NO: 326226 - DNA, 450 bp, Homo Sapiens
  misc_feature (71)..(71): n is a, c, g, or t
  misc_feature (366)..(366): n is a, c, g, or t
ggcggtcaacggactttattccgaggggcttcagatacagatgaccccagccctgcatccgcccggaaggnttccccttactcccatggggcacctcgataccagctgccctgccctgactcacttctcagcacccatcttacggcagtcggccctggctcagacccttgggttcagatcccaggccctcctcctactcactgtgagaccctaggcgagtcccttagctcgggagcctaattccgtttcattaacatgggggtaatttaactacctagctagacggttgcaaagggatcagttcactaattctcaatgttgggcagtgcatcacattgcaaactccctggcctctggttccagggnttgattcaggaattcaattaaggggttgggggcctggaaaatacttacattccaaattttccgaggaaggcacagtgttttagg

SEQ ID NO: 326227 - DNA, 907 bp, Homo Sapiens
tctgcttcttctgtagccgcttttctcccgtgcctggtaagaaaattatttttccattagaacagcttgttagggtaatcttagaaactgggagacttattatggcatatcaactatatttcttataaattataatattcactaagactaataacaagttagaataagtcttttccattgatttcattggtgtctattgatagataaacccgctgtgtcctcacggctatcgttattcccgtttgcagcctggggaacctaagggtctcactgggcagaaagtgggagcagccgggatctgaatgcgggaacctgtgttctttcttagccaggacgccggggcttcccatacacgtggctccttcaaatgacatatttacttatttacgtaccgagtaactgagtaacttcttcaacacaggatgacatcacaacttcaccaaagttaactcaccctcatctcagcatctgtagctctgccatctattttagcaaatccctcaaaaattgttttgtagagaatgttcctgcgtgtgttgctgtcgtctggaggaaggtactccaggatggaagcctggtgctgtctgtacatgtccaaaataattcgaaccgccgtctcgcggacctcatacactctatgctccagggcactcactgaaaacttcatcacgttgtcaatggtgaagcccgagctgccagtgcccaggtctttcagcagccgggccaggaggcccatctgactcattgccaggtgaactgaagagtttgctttcaatggctgcaccaggtaggatggaataatttggagagacttaacttctttaaacaaggccatttcctgaataaaatttgcagctgtgacgcggaggcgggcagaagaatctccagttctggtgagcaaaacggg

SEQ ID NO: 326228 - DNA, 578 bp, Homo Sapiens
atgtgccactgtgcctggccaaaaactttagcttatttgagtgtcccacagactactagccacacaggtatgtaattttcgagtatctggcctgggctaatgcttcgttggaactgttttcttaatactcaactaatttaagatctttcttttcatccagtgttggcactaattgtaccatcacttttgcctccattaccttcttttgcctgataagtttttatctttgataggtgactgatctggaaaaacacaggtgatgctggcagtagagttacatatttacactcaaagttgttcttgttcttgatttgatgtctttgatctggtttcacacttttcctccattgtccctggtataacaaggaattaagaacttggaaggatgaaattcataggccagtaatggaggagactcacatctcagggtatactgatcaatttagttaccatggtaaagcttaaaaaattctccaaaatgctatctataagaaggaaagcaggacagctcctcttttctaaactactttttaaattcttcttagtggatctcttaatgcatgtatagactgtgtcaa

SEQ ID NO: 326229 - DNA, 536 bp, Homo Sapiens
  misc_feature (143)..(143): n is a, c, g, or t
cagggtgtaaaaagtctgattaatatcatgaaatttaaccctttgtcacttctatcctgtttttttccaaatctaaaatgtgtttgtttacttttttatggtatcatttgcccatagaagcttttacttccatgtgtatttcnaatatgtctgacaatttctttttatggcttcttggtttctagtcttggtttaaaaagtctcaagttggaatctttcaaacggattactgatttataatgtcccatttctttttctagaattagaaaatataattaatatgaatattgtcaaatagctctaattgcttttgtgtaactcattgaaatggaaattttagaattttttgaaaatcattattacaccctcagtttctaactgtctttagtttctaacttccttagctagaaaaatgaatattatactcatgaccacagatactgttgaaggtacatagattaggacctgtgtgcagatagcagtttatttgaaaatgggctaactaccgtttatctagcagacttgcctcactatag

SEQ ID NO: 326230 - DNA, 713 bp, Homo Sapiens
  misc_feature (425)..(425): n is a, c, g, or t
  misc_feature (671)..(671): n is a, c, g, or t
gtgagctaacatcttaaaatggaagttagcaaaacattgttagataacactagtataaagttacctaatttgctgtctaaaagtgttggagtaaattaagcaaaagttgaaacaagaagatagcactttagcatcaaactaaatctccaagaggaaggaaaactaaagttcaaggctaaaactctaaattgcatcttaaaggaaatgaaaacaatacattaaatatcacacagtttttaaaaactactgtctctatgtggtggtattacagaaaattagaacaaaaataatcatatgcatttcctaaattgtctgtctagaacatgttatcttgataatggggaaaaatggagctttttaaaaattaaaagaccacgtaataataccatttaaagataatgatatgtttgtccatttaaaacttncgtaagaatgggctccctccatgaaaaattactcataggcctttactgaaagaacctttaaatggtaaggtacgccttttatgtgtttttgggtatgttttcagaatgtttcttaggatcaccagatcagaaggccacaatgaccaaccaccagcttgggcaagaccatgcaaaaccaaacttcagatttcagctaattgtaccccagaaacctcccaaagaaaatgtcaaaagcagctgggcacnggtgcacgcctgtaatcctagcactttaggaggctgaggcaa

SEQ ID NO: 326231 - DNA, 590 bp, Homo Sapiens
tcaagctttctagtaattttattttatcaaaacaccctcccctcccatctttatgacaccatttcattcttgccaaattcggtccacccccacacacacccccccaagctctaccaaatgcctactcaaagagctgttggacccctttgtgcggctatttacatcctccctcctaaaaaatattttcatcgcaaattcagtctgtcttaattctctcgggaaatttcaggcacaataattttttggcctttgctcagaagccactatcccagggaatcaaagaagaggtgcattcccagatgtagagaggggcctttttgtattgagtgggagcacaaaggctccagggctcctaagcttgggatttcctctgagaaagtgaaattggggcttgtggagaagagaagtagaaccaagaagcttattggcgagctcaggattcttcatccatgacatctagaatattgctcagaagaattttgaaagtgggacgctcatctgctttctcatgccaacaactgtacatgatggtatataccttctctgaagccagatgaggcctgtagagacgtaggccttaggcagatgtg

SEQ ID NO: 326232 - DNA, 570 bp, Homo Sapiens
  misc_feature (185)..(201): n is a, c, g, or t
attttcttactgaactgtctctgacagtaccctgtggggatttgaagtgccacatcacagtctggtaggagtgggagtgttggctgcctaccttgcccttggctggtgtaggggagaagtggtgtcacagtgtcttccctgatatttaactggagtagagtggttacaatctaaaagtttgctgnnnnnnnnnnnnnnnnncagctgcccctttaaagcaggcttttctttggggctttttgaattgcctgctttagcagcatgtatttcatgcctagaatatatgaggcaaaaaagaaaacccagaaaactcacctccatgttgttacttgagtcctgacatccctaggtagtctgtcttctttatgcctgtcagagtcaccttatgtttgctttgtatataatttccagagttcttaatatactcagtgggaggaacaaggaaaaatatgcctacttcatcttcccagaatcagaagtttcactcacaaaattttacctccaacctaaatcttttctccatggtccagaaatgagtaccctcattttaatctgcatttgtatgtcaaa

SEQ ID NO: 326233 - DNA, 456 bp, Homo Sapiens
tgtgcccggccaaatacttgaagcttattaatcaaatcactaatttaaacgttttaaattaggtaacatcaattaaaataggatatcatcatagaaaaataagttgcttagaattcatatttttaaaaagacaaattattcaagttatttgaatgccaatgttaaaacaaagctggggcaatctcttttcaaagcaagagacatgatccagtggaaacttatgtattacatggagtgtttttggattaaccaatacatttaataatatcacatgagatgatagaaaagttacgtattaatgttgtcctgctgccttcacctatttcttattatatgctccattcaaccagaatttatagatttgaatatcttaattttaattttgaaggataaaacatgtatttatgaatttgttttaaatggctaaagggtaacattcagcagtatagcactggg

SEQ ID NO: 326234 - DNA, 892 bp, Homo Sapiens
  misc_feature (394)..(414): n is a, c, g, or t
  misc_feature (436)..(582): n is a, c, g, or t
aaagaaacggaggcacggggagattaagagagctacttaagaagacacggtgccaggtttctacccaagccatttggatctagggtctggaggccatgtgagccattttgcattagattaacgctttaattcagttcacagttagacaatatacgttccccatctatatctatacccatctggaaggcaacaaaaagataataaactgatagtgtcatgtgcccatgacccagctaacaaagaggctctgggttccaatgccccagtctttcatgggattccatcgacctcatgccctgctcccctccccaacagagatggaaacattatcctgaattttgtgtttatcatcccttgtttctctctatagtttttccacttatggttgtatgannnnnnnnnnnnnnnnnnnnnagacggcatctcgctctgtcannnnnnnnnnnnnnnnnnnnnnnnnnnnnnnnnnnnnnnnnnnnnnnnnnnnnnnnnnnnnnnnnnnnnnnnnnnnnnnnnnnnnnnnnnnnnnnnnnnnnnnnnnnnnnnnnnnnnnnnnnnnnnnnnnnnnnnnnnnnnnnnnnncttatggttgtatctttaaacaatgtcttgtttagttttgccatgtttttggactgtgaataagtagaattattatgctgtgtgaattcttctgctacttgcatttttgctgcaacgtcatgttcctgaaattcagccaggattcatttattccttttcactgctgtgtgatatcccattgtaggcaaatagtacacaatatttatttattttccagatgggatctcattctgtcacccaggcttgtagtgcagtgaccccatcacgattcactgcagccttgaactcctgggctcaagcaatcctcctg

SEQ ID NO: 326235 - DNA, 656 bp, Homo Sapiens
tttgtactctcaggagactgttttgtgctttccaaatttggaaagcatctataaactgctatatttacttacgagtattcaagaaaagattagaaacttctagaaggcagaaatctgccctgtgaacttggtaaatgtaagtttactaaatatgtatgagagcttcaatttagtaagttcaagcagatgctagcagagcagtaatcaggataaggacacatggattggacaaagcagaaagtgagccctaccacagggattggcaaactactggggtacgcacatggtgacgcgatcatcaaatgtcattctgttcacactcagaaaaagccacatggaagtgatagaaaactgttggatgaggcactgttcagtgcttttcctaatttaccatcttggcattttgttcaaccattgctgattccctatatatttcctttcactgacttagtgaattgaacacatggttttgttgttagacttacactgtcttcgtagatggcaggcttaaatcataaaaaagtagaagacatcggatcaaacttttatttattttctcttttatcccttctgactattttccaaatgcttttgcttaggactcttgtgaaaccctgaacagtgaaacatacagctaactcactgttctattggtt

SEQ ID NO: 326236 - DNA, 1351 bp, Homo Sapiens
ctttttctacttatgggaagttgtctgcttccccctttagagaaaacagtatttttatattttgttaaaatattaactactttatgcctacacactatgctgtagatactgatcataattcttgggtgttcacaaacactcctagtgcctcttttttggcccgttgaaagtgttggtattactactttcactacagagcctttggccctctaataatgctgaggtgggctgatccttcccatttctgtcttcgggtcattctgggtagggtcttctcctccactgtcaagtaagcaatcaggtccgtgacagggattggacatatgaacaaattaagtggatacacacagtgagaaagatacatgcattctatggtaacaactactgtcaataacatctgatgttacatgcacatttatatatatataattttaaaaactgaactatgagaagccatggtataaatgaatattgtggacatcatggacttgatatgatagaaatcaattgtcagcttgagaaagttgtttttaatctgtctaaatagttcatgcattactacagttaaaaatagtttcatttgtcttctatagacttaattttattccggttcagtataatctctgttaacagagtttcagcaaactgattggtcaaggtattaacatagcttctacttcctttacttaaaaagatgtggttttatgtaagttcttgattactgatgatcatcccaaattttgacaacaaaatcatatgtataaatttatttctcccctcttgttcatcatcttttgtaaaggtcccattgtagatcttttctgctaccaaataaaacttttcaaacaatttggtttcaagaccttaaatagacaagttggatactaagattgtgaactgataaggacatataaatttatatttccagcccttccttagagtctttatctgcatcaaaaacccaattctgccattaactgtgcttcgcagtcgcacctctatatgtcactcattttctgcaacaagatgcactaaatcatgtgaacgacagcatgatctctctaagtaatagaaaagtcctggaaactctgtgcacatgacgtgcatgtaccctcagcagcagtgtgcagcattatgtgaaagcccatataggctgctgacattcttcgaatagtttagaaaggctgggatgccgtatatggcggtgtatcttgaagtcaaagccgagctttataacactggtgcgtgcccccgctgctcctatcgtgggggggcgattattgcggcaacagggtgcttgccccacatggtgatgcctcttaggagtatcggcgatcaacagggaatcgta

SEQ ID NO: 326237 - DNA, 443 bp, Homo Sapiens
  misc_feature (18)..(18): n is a, c, g, or t
aaaaaaaggggattaatnaagggtacggggccatcctaggttaccggtaattaaaataaaattacattccacaaagcacttttggcacatagcccaaccccacagtaaacacctattagtaaccttagttcattaactgtttactgtatactctaataaatgtctgatacacacccacacccacctgcacatacacaaatgctcatagtaattatgtaaggcaagtattatctccacatttcagacaggttaacttacacagctattatagtaagtgatagagcagaacttaaaaacccagtatgattcaggtccaaactccttttctttctttatataaccataatatttcaaattaagtaagatttcctatataacgtcctgcctctcatcattatcatcaaaataattccccagaggtgtaggttcttaattaagcggcc

SEQ ID NO: 326238 - DNA, 962 bp, Homo Sapiens
ttttacaaagtgttcatagttttattacttatcacctctatgtattttaacaacttcaaaagtgcagttggattatatgggaaaagatttttcttttgcaaacggcagatggcatcttgtagttcctggaagcattttactattctgtaaaatattcccacttcagagacgacatcatttggggctacttcacaatcaaaggagaaggcagtatcaaattctttcagaaccagaggacttgatggaggctcaaggctaaattcttttttatccctgcttgtcccagctgcatcctgaatctccttagttgcttgctggtgtaaagatgtctgtttactgttagctaaacactggtctgtggattccacgtcagaatcatcagagctggtcgtaatctaccagactttgagaggcccggggggaagacagactagaagcacacatggtgtgagcacccttggacatcacagctttcagtggttcagagggagcatcggaagcccaggagtgccgagcacacacatctctgtgactatgaggagcagtcaaacgatggggtattgtttggttggagctttggtcttggacaagtgaggggacacagccacaaatacttatgtcatatttagattcagttgcatcaaagttattgcaaatggtgaaaaaattatcccagtccttttgcagtaattttaaatatctaacaaaatattcaagaaaacaggtttctgatgaaatcaaaaagtcaagaagaactgtggaatcaaatcctatatttttcaagaagaacaagaaaatacagtgaggattatagccattttcatgagtgtgagggtcccacatttcttttccctgagtcaagctttcagtggcttcacatcctctggtcagtgttaagtagatgcccagtgatgccttggcagcctccagcatgtcatcgctcgtgccgctcgtgccgaatt

SEQ ID NO: 326239 - DNA, 441 bp, Homo Sapiens
  misc_feature (410)..(410): n is a, c, g, or t
  misc_feature (426)..(426): n is a, c, g, or t
aattatttcatttcctttaccttatctcttcccttacaagcaaatatgcttcactcataactgaagagattaaaagccaagtagaattgttggttgtttttaattccctaaacccacaattcctaatcccacttatgacagtaaataccagctgaacatccatttccatactctctcttgggctctaagatcttacatacctgaggtatcctctgttctttatgactatttggggaacaaccttaaagggcatgacatgaaggaaatgtgactctattaaggatatttatctgaatcaaacactggctgtataggcaatggaataaacctcggtcagtttttaggcaaattggctttaacaaatggaacgggtgtggttcccggcactttggggggggctgaggggcggncggggtttacccggangttcgggggtttcaa

SEQ ID NO: 326240 - DNA, 759 bp, Homo Sapiens
  misc_feature (548)..(595): n is a, c, g, or t
ggtatttttagtagagacagggtttcaccatattggccaggctgacctcagatgatctgcctgcctcggcctcgcacccccccagctggtgctatagttttatacattgtattctctgattcctggggaccccaagaaggacaaaagaggatcagcacttgtatatttttggaaaacaaggaaggcagctaagaaaactttttaaaatgcataaaagtggaatcaaaaagagaacttaagaccttggtaaaatggacattccttttagcccaaatcaaacatcattacatgacagagaaattttgctctttcttcgagggtttgtgttctcaatgttctctggaattgccgttattatctggggtgggagggctgcttccagtcctggtttttatacaacccacactgacctttggtggtgcaaacttacttccagactattcagtagtgatgtttctcgcatgcccatttggggagatggaggcagaagggtatatcttcaatgaaaagtcattaaaatcgcttttacatgtttaatattataagtnnnnnnnnnnnnnnnnnnnnnnnnnnnnnnnnnnnnnnnnnnnnnnnntctttttggataaccagattatttgccaaatggctgtcagggacaaacacctcaaaacacaacggagtaaaaggacactaaccattcattatattccaactcggaattaatccaatcagcacactcatcctccaccactggagatcatccgacaaaaggacaag

SEQ ID NO: 326241 - DNA, 761 bp, Homo Sapiens
  misc_feature (56)..(56): n is a, c, g, or t
  misc_feature (125)..(125): n is a, c, g, or t
caagaaaatgggattgtatttggatttggagcttgggtgagtcgacatttaataanccatattcaataagccatattcaataagaagaagttggaagataagaggaagaagaggaccataagaancaaaaaataacagtagaactatcatatctctaaaagaaaataaagtaagaacttttttgttttatataatatctgaaaggttattgtttatccctgtaactcattatctgaagaaagggatgatgaacaggaggagggagtgcagaggaagaacaagacagaaaagcagaatgctgtcgatgatatcatggcctggcctgcctcacacaacagctggaaaaagtggtttccttctacaaacctctttcctccccccaaaacttgaaatttgttcccaataggcccctaattagcaataggcaaaaggaatccctcctcctagttctagataaaactgttttccttgtgtgtcaggggcatagccgtcttgggacaaaaaaggaaataactggcagttggaatggaagacagaaagccatctggccagatgtctagagtttacacggttcccttcaggggtgctgagagactgtggaatgtggtttggcatcactcatgagtgaagaggctgcagccgtcatttgggttttacatttaatggctcttaggaaatatatttaaaagtatatacacctactgaccactcatacctatgggtacccaggaactgggctgtatcagtgcctgtgccgaagt

SEQ ID NO: 326242 - DNA, 341 bp, Homo Sapiens
  misc_feature (167)..(167): n is a, c, g, or t
  misc_feature (310)..(310): n is a, c, g, or t
atcccacatgtgccagtaatctgaaactgtttctctctctcgctctcttttaatgtcctgtcttcaattgacagagtcacatgtcacagagagaggctctgcgcctggtccttccaactaatattgatacataaataagctgtttaatataaacaagtctttctatnctgctgtgcaaatgcacagtgtgaggtagaaatccctcagcctgaccacccaggcgcgcgggggacagcgggtttgccctacacaaggaaagcaaggtggggcttgttccaagaagagcttaacatttcttgaaacgtgattnttttttattttgcctccatccttctcgtgcc

SEQ ID NO: 326243 - DNA, 462 bp, Homo Sapiens
  misc_feature (52)..(107): n is a, c, g, or t
  misc_feature (130)..(143): n is a, c, g, or t
ccgcgattctcctgacccagccttcctgagggtaggagaattccctgaaccnnnnnnnnnnnnnnnnnnnnnnnnnnnnnnnnnnnnnnnnnnnnnnnnnnnnnnnnggacagagcaagattccatctcnnnnnnnnnnnnnntcacctctcatctttctgtttttaggagatcaatgatctgttggttaaggaaaagattatgcaacttgtccagcagagatcacaaatccaaacccttcagaagaaggtagtaaacttggagactgctctgagttacatgaccaaagagtttgagagtgaagttttaaaactgcagcaacacgcaatgatagagaaccaagcaggtcaggtagaaattgacaagctgcagcaccttcttcagatgaaggacagggaaatgaatcgtgtgaagaagctggccaagaacatactggatgagagaacagaagtggaaagattc

SEQ ID NO: 326244 - DNA, 427 bp, Homo Sapiens
atatagcagaaataatgagataccacttccaagattagggttataaaaattcttaggtgtcaccttctctcactcatttgctccagagggaggcagatgccaaactgtggtgccctttggagaggcccatatggcaaagaactgagagaaaagctctggccaacagccagcaacaattgatttcttcagtccaagagccccaggaaactgaaccctgcaagagccacatgaatgagttcagaaacagatcttccaccagtagagcttccagatgtgactgcaaccccaactgacagcttgactaccacctcttttatgagcacaggcacccagctaagctgcacccagatttctaacccacagaaactgtaagataatgtttgttgtcttaagtccttaaattctggtgcaatgtgctatgcaacaa

SEQ ID NO: 326245 - DNA, 784 bp, Homo Sapiens
  misc_feature (62)..(62): n is a, c, g, or t
  misc_feature (89)..(89): n is a, c, g, or t
  misc_feature (712)..(712): n is a, c, g, or t
  misc_feature (745)..(745): n is a, c, g, or t
  misc_feature (770)..(770): n is a, c, g, or t
cctgacagaccagtttttcatttttattgaattctgaattgtgtccgatgtaaagtagtaanctatagggtcaaaacaacagttggaancagcaatacagagagtgattgggtacattgtccttactgctgccactactgagcaattaacaaatgtttgtgttctcacaagagaatataaaataagattgatattgtaaggaacaaaacagaaacagaatatgatcaaatgtacaaaaatcatttttaaaaccttagttttgtttattttgcttctacttaatgtaacaggtttggttaaagtttttagcaccatactagaacaagttacatttaaaattagaggaataaaaaatcccactatttcgatgaaaattacaatccttgagagatatgttttccatgtggcttctggaaaattttcaaagcaggcttctgaggcattgttaccctgagagtgggtagactgaacaaaaacggcgggtgcacttcctccgatcacagttaaccacacgccagtgcaaacaatctttgcatttcttttggttcttagagtctttgacttaaatgggtagacaattgccagaaatcgatctacactaatacaggttaagaacagaatgcttccgtacatgttggtataaaacagcatcacagaaatcttacaaagtaaatctccaaatggccaattccgtgttgtgaagtaaaaaatncctgaagggtaaagtaaaaacaaaaagcaagtnctgacctcgtgccgaattactgggncgcgtagggccaaa

SEQ ID NO: 326246 - DNA, 324 bp, Homo Sapiens
atttttttcaggaaagaacatgatctccccagtctgaggtgaccggaaaatgcttttaaaaattccctgctcctcccccgcatacactcttccatcacagtatttgacagacaaacatcatacaaacgaagtgtacgtcaagacgacctggcaacttctacacggaatttaggggtcgttttcaaagcagcagaaggggagcaatgtttttatgtggtcgtggttcttgaacattaggactgcacgctgttttcaagcatagaatagggacaggggctcttcaaaggcatccatccaattgttacaagaccgactttcagaagg

SEQ ID NO: 326247 - DNA, 435 bp, Homo Sapiens
  misc_feature (34)..(34): n is a, c, g, or t
  misc_feature (53)..(53): n is a, c, g, or t
ctgtaaacatcaaacaccggaactcctcaggttnaatgcccaaggtaaaaggnaccccgcagggtgcctcccattcccttaataacactgtgggcatcctctttttcctcccttactcataatgaatatgagaattaaaccactattgtgtttttcttctaaaatgaagggtagggttgtgccagaagaagagataaggaggttagtaggctctggaattcaatttccaggtgtggttttcacaaatgaacagtctcttaagttagtatctctctgaatataaaaagaataaataccatacactgatgataatgggataaaattattacctagtttaatcaagctgctttcctgaagaaaatttcagcatgagtttatctttaaaggtatactcacccatcatttataatttctgttttggatgatagttctgac

SEQ ID NO: 326248 - DNA, 768 bp, Homo Sapiens
  misc_feature (27)..(27): n is a, c, g, or t
  misc_feature (52)..(52): n is a, c, g, or t
  misc_feature (81)..(281): n is a, c, g, or t
agtcagaaagtttacgtttttgagaancactgccctcattgaatgaaggcancaaaaatattattaattgatttctcacannnnnnnnnnnnnnnnnnnnnnnnnnnnnnnnnnnnnnnnnnnnnnnnnnnnnnnnnnnnnnnnnnnnnnnnnnnnnnnnnnnnnnnnnnnnnnnnnnnnnnnnnnnnnnnnnnnnnnnnnnnnnnnnnnnnnnnnnnnnnnnnnnnnnnnnnnnnnnnnnnnnnnnnnnnnnnnnnnnnnnnnnnnnnnnnnnnnnnnnnctttgggaatatatattggaaattaatttacttaacatattatgaatatgctgcagactgggtaaaatgtgataacgggaatgtatgggcagtttgcaaaatctggctcactgaggaccagagtgcctattttcagaaatgcagctcccaagtgattaaaagaaaagagcagtcagactggatgtctgatatttgggtagttttgaatataataaaatcaacagtgtaagtaagcatctttgaaaaggacgaatgacctttctctttctcctttccccgagttttgtttgtaagctttatttctctccccagtatgctccgctttatgtcttgctgtggaaaggtgattggctcaacagctccattctagggggtcttttctgcacctctctgaaaagaaccaactaggactgggagatttatctcctcgagtcaacagacctttgaagtcagcgagtgttgttgttgttttggttagaacccagtt

SEQ ID NO: 326249 - DNA, 479 bp, Homo Sapiens
ccccaggagacatctggcaacgtctggagacattattggttgtcacaaatggaggatgctactggcatctagtgggtagagaccagagatactgctaaataccctacaatgcacaggacagcccctacaacaagaagtattcggcctcaaatatggcaaggttgagaaactgtgagaaatcaattaataatatttttgttgccttcattcaatgagggcagtgtttctcaaaaacgtaaactttctgactccaaactctttactgactccaacaaacacctccaagaattctgaaaaataggcaaatgtttacttagtccccacattttaaaaataagatactcaaggaacatatatgctggtgaatgttagaattcaaatgttaaatccatctaatccttgcaagctttctcatatatgatctcatacatattttctttaccacagccccagaaaggagaactgttaggcccagtgct

SEQ ID NO: 326250 - DNA, 295 bp, Homo Sapiens
tggctataagtgcataccatagtgtttgcataaagtagtcctttaataaagatttgttaaaccgaactgaatgtgagggggtttaataacccatagccttccagtatacaagaatcagagagaaatttaaaaacagaagaagctgtcaacagagtaaagtaaaaatcaatatgttttctggttttagtgtcctctgctgtgtcaggcaaatagagaaagcatctgttttcacaaacaaaggaggtttgtcagcaaacatacctcatactttaacaaacacaaaggttaaaggtta

SEQ ID NO: 326251 - DNA, 457 bp, Homo Sapiens
  misc_feature (11)..(11): n is a, c, g, or t
agacacggagntttagatgccttagccaaacccagcagaaacctttcacacagccactcatcgtaagaaacgcatgatttttctcttctcatgcttgtctctggttccctgcatttgtagtgacagaactttcactagcaggatataaagaaagtaattatgcttggagtccctctttactgggtttgagttaggtgcataacatggaaaggagtggtgccttcaaatgaatgtgaccactccgtattgtggagtgacttccctagggcatcctatgcatcctaccacagaaggccaagggacagagcaccaacttcagtatccaagaaattagatccacaactcttgattttccacactgaggactgtcgcgagtaagttgtaagtttgccgtcttccttctgggcttagcaggtgctgcagctgttacttctcgactcctgtctgtggagcgtga

SEQ ID NO: 326252 - DNA, 415 bp, Homo Sapiens
  misc_feature (312)..(322): n is a, c, g, or t
cccctgggagaggggtagatactaaaattaggtttataatgtggtgattctcaaatttggaaatggggtcaaagtgatggttatgcggaggatcattcatatatatttcctggactaagcttaggtaagaagcatgtttttctagaaaactggcttctaaatgcttaactgtttttatactgtttgttctcaaagagccatgtctatgaactactgacacatttttcccccttctttaatacagagagaattccctaaattttttacattccgagcaagggataaggtaaggattgatttctttcctatttnnnnnnnnnnnttactttttcttaaaagcccaagagcggcttatctttgccatacgttcttcttgccattcttttttctcttattgaacttgtgcttccagttc

SEQ ID NO: 326253 - DNA, 866 bp, Homo Sapiens
tatgatgataaagtttattatgtacattatattagggtggccaataataatctcaatcataattattccttatcactttactttcagtacatattgtagaggtgaagctttgtaggctaggtttgtagattggcaggaaaagatccccctcccccacatgcacacaccattatggactcctggccaacaaagagactgaatgggaatgaggtggtctcacagagcagggctggatgcagcgtgctggtggacagtttccccctcagtgaggtgtgctggtgacactgaacaattagttgtaagaaactacccatttactctcagctttacatcaacattctggagtaattatgctcacaatctatctgctttcattacaatgaatgtttaggatcctctagttctagaaactcagtatcaatagggccatcctcaaccaggggaaaacaccaaagtcagtgttcaagtgtcccccaaaactcttcaggtctccagtttcccagggtcctagaaaacccatcccccctccaaaagtttagccagaaaatatttgcttttaaaattaggcacataggtgagcaaatgtatatatgataatttttaccatgacagaggaggctgggatatagtttcagttccaggaacaccatgacagggagaattggctcttatccactgtatagaacagcaattaatttaaaaaatcaagctttgttaatggtgctcttgagaccactgacagcctaatgttaccggttttccctctgttttggaaaacacagatctaaacacagtccaattacactttcattttcattacacttcagtcaattaagctatacatttatttatacaatagttatact

SEQ ID NO: 326254 - DNA, 810 bp, Homo Sapiens
  misc_feature (561)..(561): n is a, c, g, or t
  misc_feature (791)..(791): n is a, c, g, or t
cattttccaaattttctgtaatgtttggttcaataaatattgaggtcctactatatacactaggtcttggttctgaagatcttcaaataaaacccattctccccctcctgctctcaaagagcttaaagtcctggggtgggaaaggaagaaagtggggaaggaggcaggcatcacagatgagaggtctctaactcacagtacatggttcagagggctttctaagggaagggaaagcttgaacagcatctgaaagagtagcagtctgcttagggtactctaggcagaggaaatggaatgtgcaaaggcatgggaactagcattgaggaactggcagtgattctacaagtctggaccacaggggtgggaactggcaggaggtgataatggagaaataggttaagaagtttgtaaaagtatgaagtatatgaacaggattgcttttgaggagcccctctaataacgtattagagaagagtgagattctgggtaaaaactgcctatgataatctaggcaagaaataatatggggctgaaccaaacaagtagaagaaggaatggtgnagaatttgtcagactctgctgaccaactgaatgtgaatgcccaggctaaaaaatgtatctaggccgggaatggtggttgaaaaaacatgggttttggacccataaatatctagatatgaatcctacctcctcctcttatgagctgttttacacaaattaacatctctgatcaggcctcagtttccctattggtaaactaaagacaatatgttacatgtaaattgtagagnatgtaagtgtgaacgtatg

SEQ ID NO: 326255 - DNA, 497 bp, Homo Sapiens
aatgttttaggaaccagctctatacaaatttggtgatttatatgaatgcaatttatatattttgtataaaacgtgtaatttatcctgaaagatttaatagctataaacatgtacaactgcagtttaaaaaattatggtaacttgaagtgtatgacaatgttacccttaaaaccaatataaaaatgcagcaaaacatgtatgtatgtaggtgcccacaaaatgtgaatggtacagaaatggagtccagtgcagggagaaggtttagccctgcactcttagatttgcaagcatctgtcattgttttgagtcttctccatatcattgtttccttctcctttggtatttctctaccaaagttgttattaggaagcatatctggccaggcgcagtgcctcgtgcctgtaatcctagcactttgggaggctgaggagggaggattgcttgagaccaagagttcaaggccaatcaagccaacatagtgagacccgtctctttta

SEQ ID NO: 326256 - DNA, 361 bp, Homo Sapiens
  misc_feature (19)..(19): n is a, c, g, or t
  misc_feature (164)..(164): n is a, c, g, or t
ggcaagcctgggtctcccnaaagttctggggattaacaggtttggagcccacccacaccccagcccagaagattcctttaatagcactccccccttatgacaaactgagaaagagaaattaatgtgttttctcttgcacacacacacactttgatgatgtgtcnggctcccaggcagcaggaacatatactatagagtatgctttatacagtttcacacattaggcaaaatcaaatataaagttctccactgaaaaccgaaagactcaaaatctattatcttatttatgattaacttgctaaatattttgggtgagttagttccagccttttcactttcctcctgtaaagtttttaattct

SEQ ID NO: 326257 - DNA, 644 bp, Homo Sapiens
  misc_feature (74)..(160): n is a, c, g, or t
  misc_feature (363)..(372): n is a, c, g, or t
gactgaggaaccgaacttttacatttatttcatcttaatgtctttacatttccatattctaaatttaaacggannnnnnnnnnnnnnnnnnnnnnnnnnnnnnnnnnnnnnnnnnnnnnnnnnnnnnnnnnnnnnnnnnnnnnnnnnnnnnnnnnnnnnnaagatagcaagactccgtctctgcaagaaatgaaacaatcagctgggtgtggtggcatgcacctgtagtcctagctccttgagaggctaagaggattgcttgggtctgggagtttgagactgcagtgagctatgactgcaccacggcactgccagcttgggcaacagagtgagggaagaaagattatggaaacttttctgagnnnnnnnnnngttatgttggacaatgcagggctagaattccagctctttcagaggaaggtattggactcctcctcagtgcctagtaccaccgctgacacagagtaagggtgtggtagagattgactgagtaaggcgcggagcttccacagggcagtggtgaggataatcgcgcggagcttccacagggcagcggtgacgatgatctatcttctcacattcctgtttcttctcaacccagccttcaccggcttcttgcttggttgagggccacatattttcct

SEQ ID NO: 326258 - DNA, 1125 bp, Homo Sapiens
aagaatatggctcttaataaattgattttgagttccagagctaaagtcccttttaaaacatttctgaagctgacttgaagcaggatgaatatcttctgatttggccaaagacatgacaagtatttcatatcacttaaaatttgagggataagtgtatgggggccctttgttgtcaactgttttcagccaaacttgccttgaagtttgttgtagtattgccactcagccagcagagggccctttaaacacctctacattgcttggggagcaaatgcagatgatgcagaaacacagtgttcccccaatatttcgaacagccctgtgatttccttttggaattcacaaaaatatcgaaaatatgcgctatactgtggggtttcatttggaaagttatgagtgtgtgtgaagtcaaacagggaggggcatacacaccgtctgtctgtcgaattgatcttcggctcaacctcttttcccactgcctttctccccttttccagctcacagtggtcctgggccgggcctttttacaaatactacagaaccccgttttcacattgtttggttgagtgtttatctttttcaattctgtatttactcttctgttcaaaagcccggggcaactgaacaaaaggataatgcttcatatctcacttaagagtagaaattacagttcaactatcagaaatgctctgggatggagctgcccccatgggacctgggctgcactgtttccatcctcccaggaagaatcttggggaagtattcaccccctttggttttggcaaactcactacctgaggctatgcagtgaagatgaagttagttgaaatatagttgtttacatctgttttcataaggatgattaagacatcttttctcatggggtctacagcagctgggcatttcttaaaaaggctttagtttctgcaaaagcattatcgttctagatatacaccctgtgtctctttcatttttgtcttttctattgggtccagtttagtgtccataaagttagaaaggattgtgtgtgttgtgctcgcacagtttctagagtaaaaatctttcatcttagagaaatgtgacacttagtaaatacattttttcctatgtgttaatagcctttgt

SEQ ID NO: 326259 - DNA, 662 bp, Homo Sapiens
  misc_feature (21)..(21): n is a, c, g, or t
aggtttttgtaactatcaagncaggtttctgtgcagactcagagagccctttcttatttctgccttttgaggaagtgaagcaggactagaagagccatcaggagccaacggggatgggaagcaaggagcctgcagtcagcattgtcactgggtagccccctctggcattactacctcagggtcggctagacatgcacagcagtttggggcaccagcattcaaataaaaaatcttggatgaaaaaccacaactagtaggcttagcttaagtgtgtttgtgaggtatgcacatgtgtatgtatgcaggtagaagatgggaagctctgaagcatgaaaccagttaggtcaacccatcacactgggttgcttatggccccagtctgagctccttgtatccttggacaaatgccttcctgtgttccctcttccttcatgtaacttgagccgagatgcctattctcacactgtaggaaggaatcacaccaacccaaacctaagtgcttccagcgtcgctgagtgagacgtttattcaaaacaaagattattgttttcatggttaggtgggattcaacaaggtttcatttatccctaattctgataagtcagtcttgagattttccccaaggttgctttttccctcgttggtcacttataccctcagct

SEQ ID NO: 326260 - DNA, 777 bp, Homo Sapiens
  misc_feature (63)..(63): n is a, c, g, or t
  misc_feature (252)..(314): n is a, c, g, or t
  misc_feature (316)..(385): n is a, c, g, or t
  misc_feature (633)..(633): n is a, c, g, or t
tagtaagctacttctccccacctttttttaaccagccattctcagaaaccacagagtcaaaanctctgaccagagggaaattcaagttttgaatcacatctcaggatgttaggtaaccgtagtcctagtcttcccagctgatgaactattaatatttccaaagcataaatagcttatagcagaaatcacactgagaactttgtcattacatacaaaaggcaaagctttccttagatgacaaaattctaaagnnnnnnnnnnnnnnnnnnnnnnnnnnnnnnnnnnnnnnnnnnnnnnnnnnnnnnnnnnnnnnnannnnnnnnnnnnnnnnnnnnnnnnnnnnnnnnnnnnnnnnnnnnnnnnnnnnnnnnnnnnnnnnnnnnnntatcttggagaatctgaaaactgtgccaaatattgtgccaaattttggagcttgtttaaaatggaaggaaaacaaaggcataaagagcccacacagatgtttcctgaaatcatataaagactctccccaacagctgggtctgtgatcccatggcccaaaagaagtagagtagcaaaaacagttgctaaaaaaactgtgtcactatgatttcaaaacaatgacttttatcttggatttgttcagttttnccagtgtatacactgacaggatgcttcaatttaccatttattgaggtcctgtttaccaaggactgtgcacagggataaactttgttcctaaacagatttcaaccttgcaagacacaagacagaataatcaaaatacaataccac

SEQ ID NO: 326261 - DNA, 738 bp, Homo Sapiens
ttcccaaggagtctgggaatcagggggattatcaagatcattgttagaataaattaatcttactgtatatatagcagaagttttcaagcatatgtaaatgctactaataaccaaataattacaccttgtttttctttaaactgtaactctcaagtatgtctctacatagttttttgatggtagtgtctgcatgctcaaaaagcttgaaaacactactggagaagaaggtctcgggagtgtgatgaaatacgtttacatggcagcttcatcatttaattggtgaaagtgactatgtgtcttaaactctctgagcctcagtttgcacatccaaaagcaaggatataattccatgaacctttccacctcaagtccacaaggcagaatagcaagatgttaactgccactctgaggaccaccaaataaaaggacaatttattaggccacttgccagcatggacacaatcgactcttggcatttcttattatccacagaaaaattaaaagtataaatgtagaacaaaattaacgtgttttttttaatagtaacatgtaagatcaatcctttgtctttaaaataccgtgtatctcattcttggaaagcgtcaaaatgaaaatggtatagtaagttttatctacaacttgaattaaaattattcttgaaatatgttctgaatggttagatgaaatggtaattaaatacaaatagagataatcatatactctctctccataaggctc

SEQ ID NO: 326262 - DNA, 601 bp, Homo Sapiens
  misc_feature (123)..(180): n is a, c, g, or t
ttaatgaatttactatttattaagtggaagcggatcaccataaaggtcttcatccttatcatcttcccattgagtagatggagggttggtcctgctgtctcagtaatggcagagcagatagcnnnnnnnnnnnnnnnnnnnnnnnnnnnnnnnnnnnnnnnnnnnnnnnnnnnnnnnnnngtacagtcaaggttatccttctctaaattacatggagatgacgttttatcaaggcttttctcatctgttcaattctcaccttctcagcatgaaaacagaatgcccagcaggtggtcctcatgacccctcaaagagaggttcccccaagcaatcatgattcaaatattttcatcttaagtagcttgaacgttagccttgtcacccaggtgaatttagtctcatgattaggtaactatgtatttcatatgttcatagtctatcttgagctttaaaagagatttatggcatcatattcacagctacgaaggttcataattttggggccacttctacagtcatttcatacaatttatttgtgaaatatagaaaaaaactattcaataatcaaatccagttatttttcttttacatttatttaaaa

SEQ ID NO: 326263 - DNA, 400 bp, Homo Sapiens
  misc_feature (334)..(334): n is a, c, g, or t
tttttaatcattttaaataaatgtaaaagaaaaataactggatttgattattgaatagtttttttctatatttcacaaataaattgtatgaaatgactgtagaagtggccccaaaattatgaaccttcgtagctgtgaatatgatgccataaatctcttttaaagctcaagatagactatgaacatatgaaatacatagttacctaatcatgagactaaattcacctgggtgacaaggctaacgttcaagctacttaagatgaaaatatttgaatcatgattgcttgggggaacctctctttgaggggtcatgaggaccacctgctgggcattnctgtttttcatggctgaggaagggtgaggaattggaaccgatggaggaaaagccttggattaaaac

SEQ ID NO: 326264 - DNA, 715 bp, Homo Sapiens
  misc_feature (30)..(30): n is a, c, g, or t
  misc_feature (495)..(504): n is a, c, g, or t
ggccgcttaattaaagaaatcctcccatantcctaccatccaataatcatcactgttaagaattttgtagttcctttatttatcttgtttcaatgcatgtgcctgaaatctgaaatctaaagacctaattggaggtctggagcctgctttcttcactcatgatatgtcaagagaaatttcctgctattaaaagttctttgaaagtattttcaaagaatgtattatatttgaatacatggaatatcatattccctaatgctcgatatttacttgcttccagtttcctactattaaattgttttcatgttacatatattttgccacaaaagaaaaatttctttaaagtttcaataaacattctatacatcccacatttctggattatcacctcgggctggactctcggaaggaaagcttctggatgagttttttaaagttctcattgcatgttaataaatttcttttctgatgagagtggaggaaggtgggcaacannnnnnnnnnaatgagattgaaacatgtctcaatagaaaaactccaggtgactgcaaagtgcctaattggcgattttcaaatgcatggccatctgggagctgggtaagagggtccagaaaaccgaaaacccacctgcttgcaaactggggtaggtgcttcatccagctgtcacgctttcctgacatctcaatgcaaagtgatctttgaagagagcatgcac

SEQ ID NO: 326265 - DNA, 744 bp, Homo Sapiens
  misc_feature (168)..(208): n is a, c, g, or t
  misc_feature (230)..(283): n is a, c, g, or t
ggaagaaaatttttgtggcttgcccatgaattgcataacattgttctagggggaaatgcattctgacctcaaactcacctaaaactacagatttttgaaacatgacatatatgtttagggcattacatgagaccacactttttctcacacatggtaactatatttccnnnnnnnnnnnnnnnnnnnnnnnnnnnnnnnnnnnnnnnnngagacagagtctcaactctgtnnnnnnnnnnnnnnnnnnnnnnnnnnnnnnnnnnnnnnnnnnnnnnnnnnnnnnggcacagactcaggctgactcacagagcaagactcaaaaaattaataaattatcactaaatagtctttaatatttcttatatttagtacagtaccttcaatattcatcctccttagaactatcttgaaatcccttagctgtatacatttctcattaagagagaaaaaataatttaatttagtaattatttaaaaattttttaaagacatgggaaagttatactgccatcttgtggttaaagtttgattacagaagcaagcacttctggcatttcccattcataaaccaaatccacaacataatatgtatcatacttaaaactttttccttacagaaggagtagggttgaaggaaaaaaatcctgtttagaacttacattcaagaaaaattattattcatacatatacccaatttcttatgttaaaggccactgaattaaaacaagaaatggcatttgagtc

SEQ ID NO: 326266 - DNA, 812 bp, Homo Sapiens
  misc_feature (113)..(125): n is a, c, g, or t
atcagccactacacctagtgtgactattactattttcaaaaaggcatgcttgcaacactggcctttggctaggacctgggaatttgactggtaaagtttcttacactgatttnnnnnnnnnnnnncttcccctacgtgataaaggtggctcactgacctagaacatttaaacacacaatgtggtttatgctgaatacctgctctccttctgggagtatgaaatgttggtacatgtcaggttgaaggtgtctacgtgaccagcccccagtaaaaaccttgggttctgaatctctaatggggttctctagaaacatcacacacatgttatttttcttgctggggaaagcttgtgcacttgtgctcatggcagggagagaacagaaggaagcctacaggattcttctatacctcacctgtgtccttcccttattaactgggtgtatatccttaccgcatcattataatataagtctccgtcatgagtgtatcaacgtgtggagtctgacgagtccttctagtgaatctctgaatgtgagggtggtccttggggactcatgacttagcagtggcagcaatgagattcactagaacaaccctgatgcattagaatatagttaaatattgctggggaaaaagaaagagacgaaaggaaaagataaaactctggtacctaggtggctatggagttacacatagtatgaaacagaaggtggactgctatctgttgtgaggggcaaaagttacctatcaatttttaagataaatccaatcacaagagagttggtttgctaccccagacgctcttggccttg

SEQ ID NO: 326267 - DNA, 394 bp, Homo Sapiens
  misc_feature (375)..(375): n is a, c, g, or t
gcagagacggggtcttgccatgttgcccaggctcctggttcaaagtgatcctcccgcttggccccccaaaatgttgggattacagatgtgagccattgtgcatttttaaggcagataaagggaaagtgatctggaagtggcagtaaggagcaagaaagacttctctttaggccagggaagaggttgtgtatggagagaagatagtcgcacgttgaggggatgccagggagttagtgcctgaaaggaagagccaggctgaagcaagaaagtgaagaggaacccaggggttgaaggcagggttggggaaggtgggagttggtgtcacagtaaaggatggacagagctgcacagtgacagagcccagggtattgaagnctcatggtgctagctctct

SEQ ID NO: 326268 - DNA, 418 bp, Homo Sapiens
  misc_feature (37)..(37): n is a, c, g, or t
gttaagccattattttggtaaaactccctaaaatttnagatttttaattaatagtcctcccattttttaaaatactcccattcctagagaactaccccaccccaaacgacctagactgtgtttatcatgtagttaatcaaaaggtattagtgcatgtatccatacaacaaggaaatatttattatattgaggcacagacatgagaaaacaatcaatggaatttctaatggtaaataagccaagactagcagctaaatgctaggcccaccaggcatgagtaagctgagtatattccatgtatagtacaagtttccaataatttgaagcaataggtttgtttcataacacatcacttacagcttctaagcactgtaatacttagcaagtatttatttagcatttataaatgctatttctg

SEQ ID NO: 326269 - DNA, 498 bp, Homo Sapiens
  misc_feature (320)..(419): n is a, c, g, or t
gggcaacagagcgactgtctcaaaaaagacctgaaagcagcttctctttgagatttctgagttatctgggattgctgtgggctcttgaatttccattccatttacttttccaagatgccaccctgagcacctccagacactccatgacttaggtccctttgagactcaaaccacttaaccagtcccaagagtttaaagattcttaaattcagaattgctttttagatgcaaccagaggtaagatcccactgtaccaaaaagggaaagacattctttgaagctaaattgaactagatggtttcctgaagaatgaagccagnnnnnnnnnnnnnnnnnnnnnnnnnnnnnnnnnnnnnnnnnnnnnnnnnnnnnnnnnnnnnnnnnnnnnnnnnnnnnnnnnnnnnnnnnnnnnnnnnnnngccatctcttctaaaaatacaaaaaaattagctggggatagtggcggccacctgtaatcccagctattcagctcgtgcc

SEQ ID NO: 326270 - DNA, 678 bp, Homo Sapiens
  misc_feature (131)..(204): n is a, c, g, or t
cacatcctgattttattccctcctttttccacatacgtagaagagtacttgtgtttaactttgaatgtttcaagaaacccaaaacttaacaccatgtcttatgacagaggcatttactgctaagtacccannnnnnnnnnnnnnnnnnnnnnnnnnnnnnnnnnnnnnnnnnnnnnnnnnnnnnnnnnnnnnnnnnnnnnnnnntaatttgatcctcataaaattcagcattccaaagaattgggggtaggaaacttgagccccactttgagatggggtggattcctcttgagatactctacagcacacatactcttgaccttttcatgtatctctgtctcctaatttggcaggaaatataggaaaaggaacaagggaaaaacatagtgacagccaggaatattgaatgtcaccttataatctgaaaatatgtggtagaattagtttggatgttttccccactatatagaagaagtgacttgttcaggaagaagaaatcccacatccccttcaaatgtctagttcttggtctacacatgggaacaatacatggtgactggttaataaccaatggtccacacctaggagtctgcccaggacccactagtctggctaaataaggtggttattgtatatcttctggtgaagagttctccagttgggtgtggtggctcacac

SEQ ID NO: 326271 - DNA, 738 bp, Homo Sapiens
  misc_feature (86)..(94): n is a, c, g, or t
tatatctatggtgctttttcccccagattaatagaatatactgcttcaaattcagcaccagtgaacgggtctgaaagttggggggnnnnnnnnngctaatgattctttatgtgaaaatataacagatataaaaataagagtatcctgtgttttctgacttttcaggtataccgttcaattatacttagggccatctgtctggcagtcatcccacagaacataagtcctaaatgtctgaattgtatttacattctattgggaaaatcacacaagcagaaaatctataaatgcagattcaaacttgcaaagtcaatccacgatgacatgttgtccaaaacttgcgacagttccaagagaaagacaagaaaattaacatcataaggcacttaacagcatacatgtgtcaaacacaaatgaatcagtcatgatacaacctccaattaaatttcagcaaaacatcatttgttatatgaatttggtattaatgaaaatttaaataaatgttatagtttatatacaattaacttgtgctgttataactgtaaccacagtctaaaaacaaggactttatacatagctttacgaatggagatatttaagtaccactattttgaaaattcaacattgaggtggtattccttgattttttgtttttcatttaattgagctcaaaagtttacaaaaattataaaagtttaggaaacactgctctaaaatagctatggtgactaagcctac

SEQ ID NO: 326272 - DNA, 541 bp, Homo Sapiens
agataacaagcagtgaaccttttgcagccgaaacaaaagagataatgtgagcaaggacctcgtggccggcaagatctggaacaaaccagtttaagaggcagctcttcagagatgggcatgcgtattagagaggaaaagtatccttaacaaaagcccgtatgataatcagctacttaaggttcatgcatatgggctacatatcatgcatatatttaagattataagatagaggcacaagccacagaggacaaagtaagcaacaaacctatcaataaaagggcagatgctggctatagattaggcagcactgggaacagaaaacatacacacacgcacgcacacacataaaatgactcaaactacagcaagctgacgctgatctcacctcgcagaggtcagtccgctctctcccacccccgagagtgtaatactctgtttactaaacttttgctgctttgctttgctatctgtgtgtgtgtcgtccaatttctaccgggcaccaagagcctggaactgtttggcaccatccggtaaacagaac

SEQ ID NO: 326273 - DNA, 430 bp, Homo Sapiens
  misc_feature (126)..(126): n is a, c, g, or t
  misc_feature (162)..(162): n is a, c, g, or t
  misc_feature (380)..(380): n is a, c, g, or t
agtgtgagctactgcatcccacagtatcttggatttttataaggccagacatttacctctggtaatctcttgagccatgtgtttcatttttattgctcacagaataatttggtgtaatggggcttnatcaacccaaattttcagaactttaaattcatgtantctttttctacactgatgactatactcaaagcatcttactttaattatataaatgtatatactgtctttctcaactggggtttcaagagagaattaagcccaaaataaaataatttgtgtatcttattttctcatttttctctaggatgatacacagctaatacccttctagatgcatagaaaaaagttaatttattatatacaatggataccttaangcaagagttgacaaacttttcctgcaaaggaccagatagtaaatatttta

SEQ ID NO: 326274 - DNA, 534 bp, Homo Sapiens
  misc_feature (12)..(12): n is a, c, g, or t
  misc_feature (293)..(293): n is a, c, g, or t
  misc_feature (310)..(310): n is a, c, g, or t
  misc_feature (321)..(321): n is a, c, g, or t
tgagtatatttnattcgtaggaaaaaaaggaagaaataaccacaaatattgcttaagaaaataaattcagctgacttggctacaagagacggagcttgttactcagggtcttcctccggtgggaccacttccattagcatctgaaggtgcatggtaatcggctttgagattttctgagcccatccaaacttgtagtggacaaacaggaagtaaaataaaaggccgccttaatataaacagcacacagtagaggtactccccgggtgggcttgctgatgattggagccagaacnaaaaacacagagatgantgtcatcaagncgggaatgactacgggcaccttgataggcctttccagctctttccttgtaaatctcatcacgatgagtcctagaatcgtcaggccataaaacagccatgcagcaaagctgaaataattgactaacgagtttatgtcaccagggatgatataaatcgttgctatgataccataaaagatgatggcgggggctggagtgaggcgcctgacgcgat

SEQ ID NO: 326275 - DNA, 661 bp, Homo Sapiens
  misc_feature (307)..(351): n is a, c, g, or t
gtgaagtttgagaagttatgaaagatttatgacaaacatttttttctcctcacggtcttccgtgttatttataattacatgaatcttaaccagaggttttattgatttcataatgaattcaaataaagattgcagctcctcagcgacctttaaaggttagactggctatgcatgtttttttccaaaagtttttgtcgtgatagaatttattttttaccatggaagtattcagacatagtagggtcacttcagactgtaattatcactgcaaggcttatgaaataagtgaaccaacacagtctctatnnnnnnnnnnnnnnnnnnnnnnnnnnnnnnnnnnnnnnnnnnnnnttatatattcagaggacttctttataatagttcttattccaagcaagccatgtaggagaaatgttgtcacttttgtgagggcatataacatgagcaacctataatggatccctttttttggtgtttgccatctcttagagagatttgatttgcaaaggaagcccccaaaacgtgcctgttatccacacgaccctgtatgtctagggcaggccttgatggctgatcaacctgtcttgaagtgaatgagggagaatattttaacgtggaatgccaccttaaagcatgactttaaaaaatatcttgaggctgg

SEQ ID NO: 326276 - DNA, 669 bp, Homo Sapiens
  misc_feature (426)..(426): n is a, c, g, or t
ttcttttatagcaaaaattggcttggaaagaaatcatggttaacttcttattctgtagactgttaaaagacttgaggcccagagaggtgaaatatcctgcctaacatttcccagtgagttagtggcagagctgggactagaaaccagatcttttgaggaattccacacacaaggaaattacttggctgggtcaaagtcacaccctgagtaaagtgggaactgacaggatttcagccaagatctgtctgtctccaaagtctacgctttctaggactctatacactgctgttttaaaattaattaggcattctaattacaaacttacctcaggctaagttatgacagtagagaaagacattagatgaaagctgagtccctctgcctctcaacaatcttactccgtcccacctgctcaaaaaccctctnttcccctttccttagaggtaaatactgtggattgtttttggtatacacttcctgaaattgcatgtatatctttaaaaaagattttatttggaaaaacattgaaacttacaaaaaagttgtaagaaccgtaaaaggaactttttacctggattcactgctgttgacattttgccccatttgctttatcatttcttctctatagctacctatctatatatccatccatctattgattgattatta

SEQ ID NO: 326277 - DNA, 1481 bp, Homo Sapiens
  misc_feature (51)..(95): n is a, c, g, or t
  misc_feature (789)..(789): n is a, c, g, or t
  misc_feature (824)..(824): n is a, c, g, or t
  misc_feature (1148)..(1148): n is a, c, g, or t
  misc_feature (1376)..(1376): n is a, c, g, or t
ttagagaagacagaaagctgtaattctttttaatgtttaacttttctttgnnnnnnnnnnnnnnnnnnnnnnnnnnnnnnnnnnnnnnnnnnnnntctattgctgcacaatttaactgattaaaagatttccagatctcttgactccaagagtcatttctttcatttcttacagatctcacacttccagatttctctttagcaaacatgatctgaaatcatttgtaggtaatcagcacttcaagcatatggaggctctggctgaggcagcagagtcctgggagactgaacactgggagattcaatgtcccccacagaaacctagacctggggctcagccacccactgctaggggtcctgcacaggaccatttgcgggctcctgcacgggatctatgtgggcgaacctgagctcgatcttcgctgtcagtcctcctggtgtctcttgagggccgccgacccgccacagtgtggttctccttccaaaagccagagcttcattccactttgattctcatcagctcccatcttcctcctccacagagtttcagaaccaaggaatgaaacttctcaagggtctgcgattgtcccacattgatgatcagtcttccctggctgctggccgatgcgatagagctcgctctgttctacctctgtctagtgctactggtggttttgaggggcactgctggccttggctgcaggctgaagcctttgggttctttctcctcctcaggccatccttgtgagcacgggtaccttctcaaggctctgcccatgtcccacactgnatgaacgtcatcccccagctgctggccgaatgcgnatagagctcgctctccacttcctctgtcagggcactggtggcttcatcaagcactgcgtacttcggctgcaggtagaagagtcgggcaaaggagagccgttgcatctcccccggggacagaacatcataccagttccagtccacctgctggtccagaccctctgtccttgccaccaagttggacaggcctgccaattccaagaacctcaagatcctctcatcatcggcagaacctgagtcggggtagacctccttcaggggatatatcacctgctcccgaagggtcccgtcagtgaagaatggcttttgtggcaggaataagcnacccatggggcccaaagtccgtcagcatctgcactgagccccgtgtacttcgtccagaggccacctagaacccggagcaaggaggtcttgccagtgcccgtgttgcctgtgatgagcaggctctgtccctcggagatctttaggctcagatccttgattaggggtttgtcagaggagggggcagagatggagacccgctcaaggagaaatgctgtgtctgctgctctncgctggccaccctgggggtgtgtccaagccccacgtcgtctcgcccaggatctcgcagtcctgtgacttcagggacatgtccagaagcgtctcccgaagctgcgc

SEQ ID NO: 326278 - DNA, 775 bp, Homo Sapiens
  misc_feature (446)..(446): n is a, c, g, or t
  misc_feature (538)..(538): n is a, c, g, or t
aataagtagaatgccactaccgtaaatgctgcttatatgtattttattcacatataagttatgatttttctaactaccctctgtagctataaatttttcccttcctgaaaatctctcttccacacctgttctgcttgtccctttgttccctaaagcctgtattttttctttaaggggatctattttcctttgaaacaattgctggaaagccagcctcagaaaggtaataggaatgtttttcctgtattttgaaacaaaaaattttccataggaatatccattcaattatacaacagaaaatccaataggaaattaagggcatggtccaaacaggggtttgccttgaaaacctgtattcctatgaaatgtggaatcctgcccatggtgccacgcaggtataacaaggtgaggacaatgcattcctaggagttttcccagcttcttgncagggtgaggaccatcccacactggcacttgctctggcttttactcctcagacacctgtggccctgcaggagcatcctgtaagccttccaancttcacttcgctttcaagagattctttctttccttccccggaatcttcaggattggaatccttttgagagatacctacttcagcctctggttgctcttcattaacacagttagaattgacatcaagtttgccgtggttttcctcttgtctcttttctttggcagcctccaactgttgcttttcgtaaatgtccttcagattcttacagattttcttatgagtaaaccagtgtgtttt

SEQ ID NO: 326279 - DNA, 666 bp, Homo Sapiens
  misc_feature (369)..(438): n is a, c, g, or t
tccattcgaatcatcttattacttggcagttctgcatggcctacactccacagcaagctcaggaaaaggtgagatcagtcccattgaagacctcaagttctctgcataaaaaggagaggggccaagaaagtgggtgagagtagataccttttaccacaggtaggaatatcagtagaaaaggtaaggcagtactggagaaaatagctgtatattctgtcttccctcagctccaccccttgctttgctggtctttatatgtgctaatgtttgaaatttgcctataagtaataataatacttataaagtccctttaaggaactatatccagagatatctgatgtctttcttctcaaggtggtcatcctcagnnnnnnnnnnnnnnnnnnnnnnnnnnnnnnnnnnnnnnnnnnnnnnnnnnnnnnnnnnnnnnnnnnnnnnagtcaattaacttagagctgagcagacagcgggcagccatcactactgttctcaagagtccccaggtcattctatttttgcagtcagtgctttaagagcagttgtgatgtccacattctctggtgttcccaaaaaggcactgctcttcccacaagtgctgggaagcatgaaatgtgagggggagactatttttcatgggtaggaacaagtttttctgtctcagattct

SEQ ID NO: 326280 - DNA, 497 bp, Homo Sapiens
  misc_feature (461)..(461): n is a, c, g, or t
  misc_feature (484)..(484): n is a, c, g, or t
aatctgcaaatgggctaggtaggttatttccacgtgagcaaatgcatttacaatcctggctttccttataggccgagtggtacattttgaagaatgagatgtaaactcccgaaggcattaagggcgtccaccagaaagagtggtctccttatctcagcatcacacatgtcaacaagatagaatctgagacagaaaaacttgttcctacccatgaaaaatagtctccccctcacatttcatgcttcccagcacttgtggggaagagcagtgcctttttggggaacaccagagaatgtgggacatcacaactgctcttaaaggcactgactgcaaaaataggaatgacctgggggactcttgaggaacagtaggtgatgggctgcccgctgtctgctcaggcttttaaggttaatttgactttgtggattgagggccccggcatccctggttttttaaaaggntttgcgggttccattttaacgtntaggccgggggtt

SEQ ID NO: 326281 - DNA, 478 bp, Homo Sapiens
  misc_feature (19)..(19): n is a, c, g, or t
  misc_feature (34)..(34): n is a, c, g, or t
  misc_feature (41)..(41): n is a, c, g, or t
  misc_feature (47)..(47): n is a, c, g, or t
  misc_feature (64)..(64): n is a, c, g, or t
  misc_feature (87)..(87): n is a, c, g, or t
acttaaaaaaacctcaagnaaggaatcaatgccncccttgnaacccnttctggaatcctctctnaataaaaggccatagaacaaggncaaggctgttaatgaaaatgaatcggggacccaaacagccataacaagggtcagcactggccgatgctggggtgcggagcctctaaaagcctggtcaggctgagctggctggggaccggggacaggggaccggtcctcaggaggacccggatgtggtgagaggagagggccaggtgccatcctcagcagacacaagctcctgcactaatacacttttctctcttgcaggcagcttgcctgagagaagcgggtggaaggggctttggctttctgattcaatctgcactgggctaggctgcagggcagctttgggatggacactcatggccaagaggagtgttcttccctcctcaggagtgctcgggtccctcacacctgcctcatgtaaccg

SEQ ID NO: 326282 - DNA, 927 bp, Homo Sapiens
  misc_feature (236)..(300): n is a, c, g, or t
  misc_feature (916)..(916): n is a, c, g, or t
ttttctaattccagctcattttatttttattaaagtgcttcagtagatgaacagtgttatcaacaatcaacacaaacttcactgaaatattcacaaataaaaatcctctgtaagtcactaaaatgtttttctatgtagtaaaagtaatcaccattggagactggtgaatttgaatttattcctaaccacatacatggtttatatattaactttattatatccttctttgtttttgnnnnnnnnnnnnnnnnnnnnnnnnnnnnnnnnnnnnnnnnnnnnnnnnnnnnnnnnnnnnnnnnncatacatgggttctcaaattggaagattcaacctggttaccttaatatatggggctggctgtcaatacctgaaagctagtcccagcaagtctgtggaaaaaaatgatgtgattggaaactaatcatttatccttagtgcttcagtttctccatctgcactgagaagtaaccttcccttagaaaagggttgtaaataaatacaaaatgttaaagcttagcatacttctgtgcctcaaaaagcattcacgtaccatgcttttaaaagggcaatttctttgttcttgacataaattgaatactatctggctttataataaattgatggatgattactctttccttgaaaattatctttttactcaaatcatattaaaatcatactagcctgactgtagattaatttacaggagttgtgctcagtaaattattttgattgcagtaaggactactgtcctacttaggtaaaatttacaaattattttaaaaagtttcatccattacttaacattctccaagacctatccatagagacagaaatcctggtactttaaagcacaaagaggcaaaatccaaaatttacttgttagattttggtatagctcctttggatactgtnctgtgccgaaa

SEQ ID NO: 326283 - DNA, 698 bp, Homo Sapiens
taagtgagaacagggattcctgttttcgcacccaaatgttgcacttcccaagaccactatggcctgccatgcccccatcccatggccctagaaacctgagaccttagcaggcacagacacaagtggctggacattgagaggagcagagaaagagagtggcagagagtgacaaagagcgggagtggcagggcggcatggcagagaaggaaggaggcgtccgtctaccgagaacagcaggactccaggggaagatcacgttcccactccatcccccacttccggttccgcatccatctctctgagagcctccaccactcaataaaaccttgcactcatccttcaagcccacgtgtcatccgattcttcttgtacacttggcaaggaacttgggatacagaaagcttgttaaacttgccactgcccttgcaaataaggcagagggtctatcgagctgattaacataatccttctgcagacggcaaagctgaaagagccacactgtaagagacgcccactagggattcgggagtcacagacagccatccctagacgctgccgtgaggtcagagcccagaagcgctccccacggcctctgcacctgcccgtctgcatgctcctcctaggggtttgagcaacagggaaaccaaaagagtgagccatacccatgtcgcatgccccgcaagggggataagggaatt

SEQ ID NO: 326284 - DNA, 711 bp, Homo Sapiens
  misc_feature (79)..(79): n is a, c, g, or t
  misc_feature (693)..(693): n is a, c, g, or t
ttgttaatggacttttattttataatcaaaatactcaatacaaacaaattggacataacaaagattcatataaataacntggttataaactttatgaggaaaaatacccgtcagcatggtggctgggctcccaatgcacagggtggagaccaaccaggcggctctgcttttaagcagcaggagcccagaggctgaagggctggctgggtggggctgctctgaatggaaggggtaagtcactccataaataaaacacaaacttgtaaaaacacttaagaaagagcctcattcaggcccaggcatgaggtccaagatgctgccaacagcccaaagcttagcaaaaatcttgtagtggctgactggcccacacgtggcccctgcctggccctggcttccagatctagaggaggcacggctggcccaacaaccagatactaacaagtgtgagatgctccctaaaccaggaggcaagaaaaaccagagggcaaaggtccctcactaaagccccagagaaacaacccaggaaacactaaaagctgtactttaaagctgacttgtactgggtactctgaactttcaaggaggccagagcaggaaagggaaaggaataacccccaccaccaccaacacaagagaggcacaaattagagggctgggcaacaggctgtagccctgggtgagggggtaagcagncttgacagttgctctgtg

SEQ ID NO: 326285 - DNA, 549 bp, Homo Sapiens
cttttccaactcaatgaccaccaattgctggagatgccaccagcaacctattggagaagccgtggccggaaaagtctccgccaggccagaaccccacagaggtgccagggctagcagcacttctccaggtgccgtgcatgtgaaatgcagaccaagagccacccccagttcaaagctgtgaggcgggagagctaagacaaaaactcttggttttacccatacaagtccagccagtttccaagcttagacgttcggtccccagacccttgctggagccctctgggtccttttgtgtcttgcatgtttagtgaagcattagggaagcatgagctgctgtgccttccttatgcagccggctcaccactcaggctccttgctccaggctagtaaacagctattttctagttccacaaaggtcccccaggaagcaagaaggacacagaggggtctgaggaaaacatcacctcaaaggcaagacaccaagcaggaaagtagcaggaaaaacaaaatgggctccaagtctttactgcctgctaacaactcccttct

SEQ ID NO: 326286 - DNA, 194 bp, Homo Sapiens
  misc_feature (12)..(12): n is a, c, g, or t
tttcggcacagnaaaatatacctttttcatatgatattctgagctaatctgataaaatctatgccaatatatactattgcttgtgtactagagaagtacattattgctgtactcctctgtacattactgatccctgatggtatatttctatcctaacagtgtccctttgcagatcaagctttattctgaagaat

SEQ ID NO: 326287 - DNA, 426 bp, Homo Sapiens
  misc_feature (24)..(24): n is a, c, g, or t
tcaccttcccccattgtgggaggnaaaaatccaaaggccactgggtttccttgttccacaggcattctgaagcaccctggagttgtgaacgtccttcccaggagaggtgcccaccaaggagcaggaggtttgtcaaagctctggtcccaccaacaagaacctcccaaagcaaagcagcccccattgaggttccaaggtcgttttgctgaagacgggaacgaaaccaacaccaaagcgacagggggttgacagaggggacaggggctgggcaccggcaacatggagccgttcaagtaaacataaaccaccaaatacttagaaaaggcttgtaaacgagtgatccgaaaggttctctttgcagcatctctgatcagctggctaaagaaaggtgggtgctgaacccgtctttagtgtctctgtgccgaa

SEQ ID NO: 326288 - DNA, 936 bp, Homo Sapiens
aaccatactgtttatactgttcttcaaaatttttcctgctttaaaatgtcttgaaaattcacctatctgtatgtttagatttaatttatctcattcttttcaactgcctcacagtattctgctaatgatgtatcatagcctaaccattcacctactgacacttaggatggttctaatacttgctattgcaagcaatgtagccattaagtgaaaatccttgtacatgtttctttgagcacaaatgaggttatttctctagaacagaaactcagaagtagaacaggagctttcaatgtgtggtcaatactgctgtttggctgaaccaatacctgttcccacctattttcaatcttctcccctcctgcctcccacagcaaaggctggtttaaaagctggaaactcactttcctcactctgtttgcagcaagggggtagccatgtggcctggttctggccaattaaccatcagcaaagttttctgggtggtccctaggaatgtttttgcgtttctgctttccaggtaaaaggaatacacaagactggcactctttttccagccctaaaggtggctgtggtgtttggaagggtggcagccatgctataacatgagggaaaaccaggagaatcactatgatgttggccctggtatcaatgagttgctgaaaaagctatcagcagcctacctcagacagcttattatgtgggaagaataaactcctattggtttaagctgcagtaaatctggttttctgttacttgcagccaaatgtgttcctaattgattcagtattaaattactctctaaaaactctgtactcactttattctctcacaaaagtctattaagtcattttccaaacctttgtctactttgaacattggcagtcatttaaatgtttaaccaagctgatgcatgaaaaggtttcacatgaagta

SEQ ID NO: 326289 - DNA, 847 bp, Homo Sapiens
atgagccacagttcctggcctaggcttctttatcttagcagattcttcatagaatcattgctattacatcattgtcattgttaaaatttcataaaaggaatgatttaacatgtaaatatgcagtacgctgtttggcatgcaaaaattacccaatatagcttaattattactaaaatgattacattattaccatgtatactatcagaatctagaagtttattcttttttcatttcaatactgccttaaaacaaaagaaaatatattaaatatggttatcttccacataaaggggccattctcaatcctccattcagtccccatgtaaaaggagataatgagtttaagtttttatactaaaactcttcttcctagtcagtcttgagcaagtcatttatcttataagtgtttgccaactttagactttaagtggagataaattgcacttacttgttttcatcttatagagacattctaaggttaaatacaccttgtccttttgtatcctcaggtgcaagtgtagtcaagaagtaggatgccatttgctattaggcaatcatttattctcaaggtcttctaacataggtatttggtggtgaagagttaattatactgtattccatctggaatccctggggccttataatattcagaaaacagttcccagtgaaagagattggttagatcattatcttccttcctgagagcacaaacaactctgattcataataaatcttcttgcttgttttgcagtctaaatgaaacatatttcaaaagtaaaacatatatctttgttaaaagtataattttgcatacatgtgtttgtgtatctgtattaatttattttgt

SEQ ID NO: 326290 - DNA, 779 bp, Homo Sapiens
  misc_feature (435)..(435): n is a, c, g, or t
aagtgattttgtatttgaacatgaagggcagtggcatcattgacctaagctagagtttcctcaccctcagcacttttgacattttagttgcataaccctttgcggtgggggcggtcccgtgcactgcagggtggctggcagcatcactggcctccacccagtgtatgctgttagcaaaacctcctttccccagtcttaccccagtcatgacaactaaaaatgtctccagataatgccaaatgacacttggggggcaaaatcacccatgatggagagtcatgacatgcatgatgctgggtggtagatagaaccctggaaagagttagcccacacccttgaggagctcatgacctaggaagcttgttgagaacttttgactagggtagaatatttctagtagttgactgaaaatagctttggttgaggctattagtnaaaaatttgttttaaagaggtttaacatctgttttcaatttctgcttttctgagttgctttgctgctcaattccttttattttagctgtcttcctcttgggacttcaaacatttgagtgtgtcaaaatttccagtctaataggaaatatgttttgttcaaaaagaaataaagatatttataactgttgggctagaatgatggaagtttaacgctggttaagtgagactcaggtaacagacagcaaaggagatactttaatagtgaagggaacttgaagtctggttgtattcaagattcacttcctgttcttgtttatcactggaaagttgcaccttgtgaaaga

SEQ ID NO: 326291 - DNA, 422 bp, Homo Sapiens
  misc_feature (16)..(16): n is a, c, g, or t
  misc_feature (21)..(21): n is a, c, g, or t
  misc_feature (81)..(81): n is a, c, g, or t
ttcggaaaaaagcctngggtngagggcctattaagtaaaaaatttggttttaaaagagggttaaaccatcctgttttccanttcctgccttttcctgaggttgctttgcctgcctcaattcccttttatttttagctgtccttccctcttgggacttcaaacatttgagtgtgtcaaaatttcccagtctaataggaaatatgttttgttcaaaaagaaataaagatatttataactgttgggctagaatgatggaagtttaacgctggttaagtgagactcaggtaacagacagcaaaggagatactttaatagtgaagggaacttgaagtctggttgtattcaagattcacttcctgttcttgtttatcactggaaagttgcaccttgtgaaagattttagatttagatcattgtattga

SEQ ID NO: 326292 - DNA, 436 bp, Homo Sapiens
agtgattttgtatttgaacatgaagggcagtggcatcattgacctaagctagagtttcctcaccctcagcacttttgacattttagttgcataaccctttgcggtgggggcggtcccgtgcactgcagggtggctggcagcatcactggcctccacccagtgtatgctgttagcaaaacctcctttccccagtcttaccccagttcatgacaactaaaaatgtctccagataatgccaaatgacattgtggggggcaaaatcacccatggatgggaggagttcatggacatggcatggatgctggggtgggtaggataggaaccctgggggaaggagtttaggcccacacccttggagggagcttcatggaccttgggaaggtttgtttgaggaacttttttgaattaggggtaggattatttttcttggttagtt

SEQ ID NO: 326293 - DNA, 1123 bp, Homo Sapiens
gccttcacattttaaacttttatttttactagcactttgattggcaatatagtgttctatacaatgccttgtacatcatagatgacgtatttaattgattatttaatgaaagaaatgagttacctattgacttatatatatgtttttacctttatggtaaaattaaaatgaacagaagcctagggtttagtacaatgagtaagatattagaaaacatttggcaatcttaaaaagataattatacaaggtctgtttattagatatcatctttaaaattgttaatgttttatgaaaatagagccctaagcatgttagcacatacagcataaaagtttatttcaggtcttgctttcacacactgggagaacactgtgatctgtgaaagtcagaataagcctgttttagaaaacaggatatgtggcagcattcacactcaaaagccttcggagctcactgagttaagggtgtgatttatagagtcatacagactggtgtttcaatcctggctctgacacaggcaaatgaggttaactttgagtctaagttttctaatgtgtaagatgtataaaacaatagctctgtagaggatggcagggggccataggtaggtgccctggcagtggcagctcaggtgctgtgggtaggaagtgctccagtgggaggcaccataggcaggcagttcttgagtggggatgcctgcaggttaagaagtgtatggcatccctgaactgggattattacccatttttgggatttcctttaggcccatatattacttggaacctaaacatgtgattttacatagtgtatctgcactataattgaaagttgagatttttcactggaatgacatagcaacataaattaatgtagcagcagcaacagcagcagtattgtggtagcagtaaaaaataataatttaacaacttacatcaaaataatatagacactatggctttagtgagaggttgtcatgtaaattcaagaaatgcagagaacccttgtgagatactatgtaagacaaccatccccaagacacacagtcatcagattctccaaggtagatgtgaaagaaaaaatcgtataggtaactagagagaagcggcgggtcacttacaaaggg

SEQ ID NO: 326294 - DNA, 891 bp, Homo Sapiens
ttctggttttgaagacgcagctttatctccacctgccactgggattctcattttgagagctgttttgtcagccttttccagaaaaggccgctcggggttttctgaaccctctatgggcatttttagaatgactgaagaatggctatcatgatgagaaaggagattctgggcagcatatgcatattgtgacttcacattggcttccatgttctccagttgcctcttctgggcagccaattcttctgcatgcttcgcgcggtattctttcagtgacactttagctgatggcacactcttactattctgcttctggggaaataaatgcatttggaaccatcctgtgggtaagggaatgatccaactcctgtaaggtgctaaattctcactaggtccgatggaccctgagtagggttctaggtttgaaagaaggttggggagggacagccaacggttgcccgggcaacatctccacactggttaagttgctggatgactcttcggagactggcagggaaggcactgcacttgtggtagaagttgacatgctcattaaacctgcaatggttgtgtctgaagagctctgggaaatccatattgaggattgtctgcctctgaagtcttttcatctgttcctcggtcatctgcttttgttttcttggcagcctcgcatgccctccaattccaaatgcgtttgagcctgttgggagttttctccaaaatctgtagaaactcatgtgtcagttctacaagtaaaacagaacattcaagaaagactgagagaaacagaagtaatgaaacaagaataacctgaactactaactaactattttcatctgaatcaagtcacctttggccagctatgtgacagatcaacagcaagtgcttttcaag

SEQ ID NO: 326295 - DNA, 536 bp, Homo Sapiens
  misc_feature (391)..(445): n is a, c, g, or t
  misc_feature (511)..(511): n is a, c, g, or t
attatttcatttctttactggatatctttgcttgctaaagtctctgaatctgaggtctgctctttctgacaaacaagggtgagaggtgttaaaaataggctattatcaaagactttctcttgacttaccagaggcattgaaatggtatgaagaagggtcattactttcactacatgactcaatgctacttaatctaccactcatgggtaggaaaatgcttattggggataactctggcttaaataatgttcaaggttgggcttgcttcctcattaaaactgcataattggagacgatggtttgagtcagtgctctctaacctttccccgtagagacatgctttcggctccttgggttttctcattttaactcctaagaaccatgtcaccannnnnnnnnnnnnnnnnnnnnnnnnnnnnnnnnnnnnnnnnnnnnnnnnnnnnnnggacacgaaagcaatgagactacaacatctgcccttcaaagtccataaggtcagaatcgtggtcanattttaagaatttactcgtgccgaa

SEQ ID NO: 326296 - DNA, 652 bp, Homo Sapiens
  misc_feature (20)..(20): n is a, c, g, or t
  misc_feature (32)..(32): n is a, c, g, or t
  misc_feature (45)..(99): n is a, c, g, or t
  misc_feature (376)..(376): n is a, c, g, or t
  misc_feature (418)..(418): n is a, c, g, or t
  misc_feature (441)..(441): n is a, c, g, or t
  misc_feature (549)..(549): n is a, c, g, or t
taaattttatttatttattnctgagacaaganctcttgctgtcannnnnnnnnnnnnnnnnnnnnnnnnnnnnnnnnnnnnnnnnnnnnnnnnnnnnnngctcaagctatccttcagcttccagagctgggattacaggcctgagccaccgcgcctggccaaaatccaagtttattgagatgcaccctggcacatctggaggtagaagctcatgttctctgcagcttgacctcgcaggctctctcctccgcctcctctcacttttcggacaaaccagcccttctgaagtccctggggttcctggggctgttcctgtgaatggcattcgagggcccttccagctctgccgctgaggcagtcacatccccgggtgctncagagcggctctcgggtccctgaagccctgtcctctccctgngagtccgcgtgttctcagctccnagggcgggccgcagtccctggagttggggccctccttttttcgggaccaggagctggtgcttcctattgctgtggggactatggggctcctgactctcaagctgaggnggttggagcctgccggctccaggcagaggattcttcctgcgactgctcccatccccagctcattatcccttcgcctcccgttcccagggttctttcctctctg

SEQ ID NO: 326297 - DNA, 763 bp, Homo Sapiens
  misc_feature (72)..(115): n is a, c, g, or t
  misc_feature (190)..(233): n is a, c, g, or t
  misc_feature (247)..(422): n is a, c, g, or t
  misc_feature (613)..(622): n is a, c, g, or t
agctcttaaacgtgcatatcattttctggctgaggtcagaaagttgcaacatgaaaagtagtccaccccctnnnnnnnnnnnnnnnnnnnnnnnnnnnnnnnnnnnnnnnnnnnnccctatagtttctggaagctgtgaatgagccttgatttctacagcttgcaaaactgtaaataaggccgatagagnnnnnnnnnnnnnnnnnnnnnnnnnnnnnnnnnnnnnnnnnnnnccaataaaccagcnnnnnnnnnnnnnnnnnnnnnnnnnnnnnnnnnnnnnnnnnnnnnnnnnnnnnnnnnnnnnnnnnnnnnnnnnnnnnnnnnnnnnnnnnnnnnnnnnnnnnnnnnnnnnnnnnnnnnnnnnnnnnnnnnnnnnnnnnnnnnnnnnnnnnnnnnnnnnnnnnnnnnnnnnnnnnnnntgtttctagtaaatttttatttgttgcagaacattgttatgttgttgaatgttatgatgtagttttctttctttaaagaatgcttaatttatttggcaggtagttatgttacttgcagagcagactgattcaatgcataattttaaactctttagcctgggcaacatagggacacctggtctctataaagnnnnnnnnnntgatccagttgtggtggcacccacttttggtcccagctactcagtggggaagaccctttgagtccggggatttgagactgcagtgagctgtgatcatgctacttatgcttcagcccgggtgacagaacaagaccctgtcta

SEQ ID NO: 326298 - DNA, 1141 bp, Homo Sapiens
cggcccaatcgctattgctttctgtactttgcatccacagtcctcatccgtgaacattatcttcagattctgagacattcccgcaacagaaaccaaagaaagattagaccacagtcactggattccagttactaagaagcaaagttggacccaagcatcttgaaatgattctcagaaacaaaagttgaaataaggtagtttctgcaactctcaggcaacatgaaaataaaatttaccctcgtacatagccttgttcttcacagtttctggggcattatggaacattggggactgctttttcattcattcattcattcatcagtcaacatttataaatcatctactatgtgccaggagttataattgggacaagggataaagaggtgaaaaaaattcaaacttgtgaacctagcattatctggaacaaagtgtgttgatgtgcaggaacacataaggaaccatttgcagtaaagacaacaaaaaatgccaaactctgcctggacagtggtggaggactccttgcagtagaagtcatgttgaattgaagcctgagggaaaactcaccagaggaacaagggaagggagcccagagaggggcacgagcattccagacttagggaagatccaagcacagagctcgtgcactgctgcatggcccagttagagcaccacatacggccctggggaatgaggggatatgaatcagatactcactaagtacccagcacttgacacaagttaccacttacaacgtgtgtatccattctgcaaggccggtattagtgtgcccattttcagattaggtacctgaggctcaaaagagttcaggaatcaccccaggtggtgtagcttctgagagatggaggtgggattccagttccgggactgtgtgtcacttgcatacctgtgccttggtaccacagggggttgacacagaggtgggagatggggaggaagacttttcactagcgtatccttttctaccttttgaaattggaaccatggggaacagcaggagtctttggggatgataagagtcatggatgtgatctgggtagatatttttatatttggtgtcaaataacaaatgtccaaggagtgactgctgaatccaattttgcagtgatcctgattccattgt

SEQ ID NO: 326299 - DNA, 317 bp, Homo Sapiens
  misc_feature (242)..(242): n is a, c, g, or t
  misc_feature (281)..(281): n is a, c, g, or t
  misc_feature (293)..(293): n is a, c, g, or t
agggttttaagccagcactcttagacttcaaagcctcttaaccattccactgccctgctgtagggcatagggagataggggggataagccatggttgccatcaaagagttaatatatcaataatatgcggatggtgaggatgatggcagctgctaggggtctacaggcgtgtaccaccatgcccagctacaattcttattattcccaaatgctactgtgtccggaattggtgggttcttggncttactgacttcaagaatgaagccgcggaacctcgggtngaggtgttacanctcttaaggtgggtgcgtctggga

SEQ ID NO: 326300 - DNA, 950 bp, Homo Sapiens
  misc_feature (625)..(625): n is a, c, g, or t
  misc_feature (813)..(822): n is a, c, g, or t
ctttctgcatgttctgggccttcctaacagctttctaatttcctcacagaaaatatcaatctcctatgatataagcataattccctgcagttataattaacccgtcataactcatcgtagatgagggtcacaaagtgggggagcgcccagcatttctcactgtgtatcctgtttttgaaaacagaaaatcaaagcccatgttgggaaaggaaattaaaattgatcatcctctttctacagaaaccgttttaaccagaggacctgtctttaacattactaacaggtagtgacagggaaaagaaatgatggggtaaaggcagcctcttgctccctccttctccggaggtgacataggacagcaggaaaaccaatgtcttctggcgagggggcaggaaggaggcagggtgaccggggaaagcggggggaaagtaaagggactcgggagaaggaaacttttctaaaaactacaaattggttggaatttaaatgcctgataaaagtatttggaaggtcaactaaagagaagtacctgcaaaagaacaactggccagagtttgggaaacaactgaggaaaaactgttaaatatggttccagaaataaagaaaattcctccatatgaattgnatcgttacacttagagagtaattctccctaaccttaaagaaattaaacgaggaaaaaagatgtcagtttttcagaaatagtaagagaaaggtaactgaggtaaagtactaaataccaaggtcctacctggctaagagaggggatagttcatttcataatctgggtagtcgcaatctgcttaagacttnnnnnnnnnnttctcttttccagactagagaagtgaaaataaccaaaattttgttttacaactatgaggacatcatcatcgccactaccaccattcccatcacgttctctaccaccataagcacctcgtgccggaatt

SEQ ID NO: 326301 - DNA, 454 bp, Homo Sapiens
  misc_feature (17)..(17): n is a, c, g, or t
  misc_feature (25)..(25): n is a, c, g, or t
  misc_feature (38)..(38): n is a, c, g, or t
  misc_feature (69)..(69): n is a, c, g, or t
aaacttggtaacacccnaggagaanccaagccccacanccactgaaatccttaaaatcctccccatggncctaacattttgggtgccccaatgttgggaaatgccaggccagaaaatccagaagattcccttccaaagtggggcccaattaagccttccaggcccccagaactggggtcttacgcccgagaaaagatggacaaagaaggcctactgttcctattgctgccctctggccaaaatgtacctttcactctcagggaacagctgtcatcatagaatataaatatgattcatttctaactaaaaggttgctataaatgaggaccatgtaccatcttcccaacatgaaacttcctaagccataacttggtcactacagatggaattaagagtccttagggtgagaatgtaagaaattgagcattccttggggtgcctgattcagttcttt

SEQ ID NO: 326302 - DNA, 890 bp, Homo Sapiens
  misc_feature (425)..(612): n is a, c, g, or t
aaagacctgtaggaaattctaagatgaatcagatagattgtacatcctttatgaaaagctaagacaagttcataagcacctgtactttgccatagaatgggttcagggtctcagaagaagaagccaatatttcttgtcggagaaatcagagaaggcttccttgcaaaggaggcatttcatgagttgtttttactggattcaggactactgatacaaatttgggaagtggttatgggagtagatgaactttttgcaaagaaagttgaggttgctgactccatttgtattctccagggtggacctattcttagtgttgcacacaaacatgttttcattaagggaaatgcattaagaatcttctctgtcaaggcaatgtgccacatggaatctatctcacacatacataatttttcacctcatattgnnnnnnnnnnnnnnnnnnnnnnnnnnnnnnnnnnnnnnnnnnnnnnnnnnnnnnnnnnnnnnnnnnnnnnnnnnnnnnnnnnnnnnnnnnnnnnnnnnnnnnnnnnnnnnnnnnnnnnnnnnnnnnnnnnnnnnnnnnnnnnnnnnnnnnnnnnnnnnnnnnnnnnnnnnnnnnnnnnnnnnnnnnnntcctatattcaagaccacctgattaataaatgcacttatgtgaatgccataaatcctaaaagagggcttttctgggagatgagacctatacttctgtgggcctaactatcatttgacttattatttcagcacaatcacaaaattcccagcaccatgtaagaaaccctatcataactaaggatatgtatgtctgatcattttggtagtagttatatagaaagggctttttctctgtttttccacaaaaacttggagagagcttaaatttgattttttaa

SEQ ID NO: 326303 - DNA, 715 bp, Homo Sapiens
  misc_feature (522)..(531): n is a, c, g, or t
acattctttccagatatctaatataacaaactgaaacttataattagttattaaattttcacatattaactttaggataggaaaccactacttaatatattttaacattttactcctggctattaacatttacaacatgggttacaaataggtatcatacctctaaaggaagtaacagaaacaattagtaatctctctctgttctttttcatagagatttcaaaataaatctaaggttatgcataggatgtggggtttttctccgggagtagtattacagaaggtttgtgggtattaggaagggtcatgacacaatgcaagttgcttagtctcaaacacaagcgtaaagctttccttttaaggattattttatattatacccacagatgaaaaatctaacaaaaagagacacggtggtacataaagatatattcaagtgctctctctttcgtaaaaaatcaaacctttttagagacaatttaaaaagcaatctcttgattgtttaaaaggttaaataatgcnnnnnnnnnnccaggctttattatgaaactatgttcaacggtcacagaggcaaccacattaacttgcagcatggatacaaattttaagttctacattgatattttcaacgcacatatgaagcaaaatgtcttaagcaaattattactgcatatgaaattactatagtagaagaaaacccaataatttgagtaaa

SEQ ID NO: 326304 - DNA, 892 bp, Homo Sapiens
  misc_feature (665)..(665): n is a, c, g, or t
  misc_feature (822)..(822): n is a, c, g, or t
tcatgtataaacatgaagattttggtgccattgaccaaagtgtggaaagcatgaggaaaagaaactaggtgtgcagacgaggtcgggcatctagagagggagttagcgtgttcaattggaaatatgaactttgaggtgtgcaggctgtaaggcagctagaaagttgggtgtggcgttttgaagttaggtcagctagagaaacaactgagctttgagatcctgctgatcagagaggtgagcgctaaagatagctaagtgtaataccccaggagcatcaacttttaaggtggcattaatttgatttattagcccacagaaaactttttaatgataatgcatcaacagaatgcatacaagagctcatcatttataatatgtgctgggaggaatgtagaaaacaatatatgatttttctggtaaattaattgctgcaatatgtgaaaaaatggtcttcatatgcatgtttttattttgtaacaaaaccagaaattaccagaatagtaatttagaggaatcttttttttgacgagaagatgtgtcagattttgaaaaaatgcaacatctatcggatgatttaataatctacactcggtgtgcattatttcctttgtgcttagcacatctcatattcgatagacccatatgtgcctgactctaattgagtntttgagctactagtgcgtcaaatggcagctgacatctgtcagcagaagtgtggaagtacggtcgatggaccacgctctatagggctaatcaatgcgttttggagccctctgtgtcgaccaggggtggctttttttgagtacaacttgtcatttacgnacagcgagccatgcgcagctagcaggcttccaggtgcatcgtcggacaactaagcgtggctgagtcagtt

SEQ ID NO: 326305 - DNA, 657 bp, Homo Sapiens
ttctgtgtgtgtgtggcttttattagctctcagtgagattctcaaatgactgttgtaattctgtctgaagttccccttcttgtttcatggcttaatgctttgttgtgtcatttctgaaacactcccccatttccaacgttacaagcagagaacagctcttcactcacttgtgaacaagaagtgttgtaagagaacttaacaaatgaagcaaaagaaatcataatatcaaagcaggttaagaaaggaaaatgagaagtgtctggaggaaagggagcatgaactatcaccgcctaccttccttccatcaagctcagagacgtttttaaacctcacaccaattctttgacagcttttaagaaatgagatgcttccattttgatctgagttatgctgaggtgcctcttcgctctgcctaagcagaaggtaggttaagcttggtagaggtgaaccacagggagccatgcttggaaaactctgctcctgggaagtttatccattcaagtgcaccaaggctttagaactccctacccctagaatgtctgctttttccaaataatcagaacacatttgtttattcccagtacgggtgatgtgtacccaattcttatccatttcctccagcttgggacattttgccactatgcaagtaccagggct

SEQ ID NO: 326306 - DNA, 459 bp, Homo Sapiens
  misc_feature (315)..(341): n is a, c, g, or t
  misc_feature (429)..(429): n is a, c, g, or t
gattcccaatataatttttatatagaactctgaccagatttgtattacacatttcaagataaaagtattcataaaaaaatgaaataagaattagtcaccttagaattcctgtaccattcttaggaatttgggagcaaattatcccctttaagtaatctcagccaccaaagtaagaacacaaatatatcttccttttagaaatagtacctaaattgtaattaactcaaaactttgaaaaactacacattattcatctatcatataaagaatatgaagtatgtgaaatatacaaaatctcataaacaacatttctcnnnnnnnnnnnnnnnnnnnnnnnnnnnaaaagagagagataaaataataatagtcatttagatatttagagaatggcaactctgggtctaggacaagatacaaaccaaacattcnaggggataatctcccttcattaaaagtatc

SEQ ID NO: 326307 - DNA, 875 bp, Homo Sapiens
aaaggaagttttctagccccatttcttttccgcactaaagggttagaccaacccaaaactgcggacccccattgtcgcgaaacaccagcctttttggccccagagaagcaaaccaggccgcccgcaattccggtcgcacacaaccccgatacgctaaggcgccatccattcaggcactgtgaaggaatcgcggctttctataccagtgcaaagggttcctcaggcataagcggtacgcacagcttccaagaccactttaaacgacgcattccacgctaaattaccccactaacggataagcttcggctcttaactaagatctcctctctttctcctttttttgtgactggtacaacctttattgcttctccagcattttccagaagaatggtgtcattagagggccacaggggatgggggagtaaaaaataacataaacgaactgaacagaaatgcaggagggtggcgagaggggccgagattgggtgttcagggcagagaggtggaagaccaggggcagtcagtgcttcttagctttcagccaccagagtggagaattcgtcaaccccaattttgccgtccccatctttgtctccagcagccatcagcatcttggtttctttagcagacaggtctctggcatctggggagaagccttttaggatgaatcccagctcatcctcctcgatgaagccacttttgtccttgtccagcatgtgaaacaccttcttcacatcatccgcactctttttcttcaggccgaccatttggaagaactttttgtggtcgaaggagtcggtagcgctaaaggctcccaccgccttcttgatgtcctcagcgttcagcaagtctgtcatcgacatcctgcaactgtt

SEQ ID NO: 326308 - DNA, 636 bp, Homo Sapiens
  misc_feature (394)..(394): n is a, c, g, or t
  misc_feature (475)..(592): n is a, c, g, or t
tttttttctcttagcagaataaaatatatttatatggctaagaagaatgcataaaaataagataaaaatctatttttggatactaggttacttaatttttaaaaagcgaactataattatcgtggccaaacccaaagaaaacaatttaaagatagtaactttgaagatataatacagtcaattgcatagaataaaaaacttgttaatattcacgataaagaaaaattccagagaaagtaacaacgttaagacttacccagcaggccagatgatctcatggtgaaggacacagatctgatgcatctttcttccgcactctgtacattcaacaaacctggaagagcagagccaattccaaaattaaccccaaaccttaaccaaatgaaaacttgcnatatatttcccatgacttctgacaaagacagccaaggtcatgaccaaagaactgaaaatagttttaataaagtttctattnnnnnnnnnnnnnnnnnnnnnnnnnnnnnnnnnnnnnnnnnnnnnnnnnnnnnnnnnnnnnnnnnnnnnnnnnnnnnnnnnnnnnnnnnnnnnnnnnnnnnnnnnnnnnnnnnnnnnnctaggataggcacatactatcatgcctggctgttttttgttttg

SEQ ID NO: 326309 - DNA, 826 bp, Homo Sapiens
  misc_feature (393)..(401): n is a, c, g, or t
  misc_feature (668)..(678): n is a, c, g, or t
ctgctacccttttcttaagcagttttcggcattcatgtttatcatcttacctggttttatatgctttgtattatttttgactgtttttatcttattttaataagatagttgttgttccatttattatctgcgttccctcccaccatccactgtgcccaacctccgtgtatcctccatgggagcccatttttcttcctgccctgggctcagtgtctggttcacaatctgacatgtaatgactgaatcatcaaatgagtgcaggaattcagggactgcgaatcaagtcatattagaaaaaatggttctccatttggaagaagatctctggtaagtttagaattagaaatattggctttattcttaagattcctggagaaagcaaggcaatcatcnnnnnnnnnatagcaacataaaagaaaaagaaaaagacttcaccatgtttactcttcagctaatcagtatgggggaaaaacttgatcttacacctttctgttatactataaagtagccacatcaagagagtttccttggagggtttctgaagctacaaagatgataacagcttgggtactggagaccattgtagctttcagggtcatcttgccccagtgaccaagtgccatttaaggctttaatacactatctgcttgtgtagttgtagaaatttnnnnnnnnnnntcatttctttgccaggaaccctttccaaatttggggcacttgtaagtcacacagagttttcccaaatgctgggcacacccccagtagagtatgcagtgtctaattttgcttgagttacatccagtttggtttgccccatggagcaaca

SEQ ID NO: 326310 - DNA, 286 bp, Homo Sapiens
gctgttttgctcccttgtggcacacaatctggagacgtgcaactgtgccacattaaaaacaaaacactgctggcctcaaaacacacctgccacctctgacagcatccacttccctcccccttatgactgctgcctttttcaaaatgagagtgtttggaatgatttcctggcagtatccataagtggttgctgagccttctaaagaatgctttgatgccttgctgtatatcagtctttcgatttctttttgagaatgggagccttagtgcaagtaagagacgacctc

SEQ ID NO: 326311 - DNA, 805 bp, Homo Sapiens
  misc_feature (13)..(13): n is a, c, g, or t
actgcagttaatncagcaattcataaagcaagaagaaatgtagtaaaaccatttgtgataattggcatatttctccaatcctatctggggaacaggcttaaaaagtgagcaatagggacaggcgcggtggctcacacctgtaatcccagcacgttgggattacaggcatgagaggagccacagggcagtatttttaatacaagaaaagtagccttaacaaagaaatatttaattcctagtggtagaacctgaagttagcacttaatgtggttaactggaactatatacaatgttgctttgtaaaaaatactaaccaaggaatcctcatactagccttgagaaattggaatgatggaatatctagataataacatggggttacataaactggcagtagttactgaagcagaaaacatttttgaccctaaacaaaatgtaatatattttaaaaggagcctaaagttcatcataccttatggactccaatactttagggaaatttctttaaacaaagtctttccaagagttttccattcatcaaagataaatattcctagaaaggttttgtgtcctcaaatttgtcaatttaattttaaacaattctgaagcagtttgaatgacaaaggaaaatagtcatggtataacagaaaaacatgattcaaaaccatatccagtttgacagaattcttttattcttttgcttttctatgctttccaggtgttttaacattaggacctactagttctgcaatcagaaaaaaagtatatatttatttataatgaaactgctcaagaaggatttcat

SEQ ID NO: 326312 - DNA, 1093 bp, Homo Sapiens
  misc_feature (1003)..(1003): n is a, c, g, or t
  misc_feature (1014)..(1048): n is a, c, g, or t
  misc_feature (1080)..(1080): n is a, c, g, or t
gggatgtgtgcttatcctccaacactgctcctgagtctctaatttgtactattacattttttatttccaagagttcctttctattccttttttaaaaaacaagcattacacttttgtgtcatgaatgcattcacttatttgatttaaggattttacatgtgagtattcatatatacatttttccctctctgcatggtctctgttcctctaaatgtattttttctgatttctttacttgtctctgtacaccacagagttttcccaaatgtcttctcattcttggttgtccccggagacttaaaaggggacactcaagagaacagggagctgagtgcatttgggtgaggcctgctaactatgggactctgtttggcccatagggtgctttggccaagtcattttacccagaaacctcttgggctggtcccaaaagtctccagataagcctcttcaaatatcctgcccagtgggtttaattctgggtgttggcaacatttcgggagtcgagttagggaagaaggctggaggtctcaatatctgcacgtcaagtctccttcttcccgttttcaatatggtgccccaccctcaactgtgcctggtgcccatgtccagagagcctcctttgcaccctccccagagaataagcctgtcacatatcagggctagggaaaggcagatgcctgcagtagggactgagggaggcaatgggagctgaggggagctttaagcggtctctttaaaagatgttcagccagctgtctgtgtttagcctcacttcattcctatttccagggatccctagagtctctggtactattaactcttgagccccaagcaggtgtgggggtgcaaattgggtttcttctcagttttccccagtaccaatttcagattcagctcaccacatctatccacctgcttcagggctgaaaaattcgttgctgtttctcctttctttttaaaagtttcttcactcttgttttagaaggatttgggaggccgnatgtggtggcnnnnnnnnnnnnnnnnnnnnnnnnnnnnnnnnnnnagatctcttgaggttgggagttcaagcaatcntcccacctcagcc

SEQ ID NO: 326313 - DNA, 558 bp, Homo Sapiens
  misc_feature (191)..(273): n is a, c, g, or t
  misc_feature (301)..(301): n is a, c, g, or t
  misc_feature (530)..(530): n is a, c, g, or t
actgcactggctaagaccatcaatacaatctttaatagaagtggttctaaccggcatacttttctacttttttaattttaaagggatgctttcaacattttccaatttaagatgatgcttgctttaagccttttatagatactctatcaggctactcaagaggcaaaggcggaaggatcccttgagcccannnnnnnnnnnnnnnnnnnnnnnnnnnnnnnnnnnnnnnnnnnnnnnnnnnnnnnnnnnnnnnnnnnnnnnnnnnnnnnnnnnaaaaaataaatcaaaattattttttaanatttttaaagaattcagatatagacacccttcatcaggttagggaaatccccttccattcctgatttagaacagtgatttgagaatgttatttttaaatgtcaatacaatatatgaaaatatcatcctttataactacagaatttaaaagctacaataaaaacctttctatttcaacttaaaaacctgagggatcagtttatgtcattttactaggtacttgctaggtncatgcagtgatgtgccacatctcgttta

SEQ ID NO: 326314 - DNA, 804 bp, Homo Sapiens
  misc_feature (738)..(750): n is a, c, g, or t
aaattttactataattttattttgagtagatggggagataatatgctattctttgtcaggttaggaacactccattatgatgggagatgctccgaggatgtcacggagcatgtctggtgttttcagtgcacagaaaaacacatcagagagatcagcaacacccacgttgccaccaagaactaaggtataaaacagggctgtaagggacccctttccttaggcatcagccaaacaaactcagaaacagaaattcagaagccacctgcactgacatactcatcctggtaatcacaggcgtctctacatttggcctgtattttctaaaactctgtttcttttcccaggtcgaatggctgctgaatgcctttggaacaggagctatgaatcaccccgcctccagggctaggaaggagggtgaagaaacttcacagagttagcactaccgcactaccgaggagcctgtcctctgagttatcatgcatgagagacacaacccgcatcaagatcgcccccatatcagttccctttttctgtttctgtttttctgtttatcagttctgagttcaccacaataaaaatctttgaagggctgaatgcttttgagacaaattccctcaccggtacaggctgtgaataggatgaaaaaggatgacagcagaagaacgaatcataaagctgaccctaagtgaagaaaaacaaaaatctaaggagatgcctatcccctgaaaaggcaaagtnnnnnnnnnnnnnaagaaacccaggaaatctattgacttaaaatgacaagagtggggaaaacaggct

SEQ ID NO: 326315 - DNA, 741 bp, Homo Sapiens
tggagacctgcctgctggatgccacgttgaactggaccccagcagtcagctctccaatgtgacagttacttgttggctttgcctaccttttaatgatgaactcctaccttgagatctgaaattttttgagctttgaaaacaattgtctttgggccctgattggggaaatggaaacttaccaggtagtaaaattaatctcccttttcactgagctggaagcagcatgggtggacttattcatctgaactgacgggtttacaaagataggttttaattttccttcttagtgcaggtttgagacgtattctcagcagctgcttgggtttctacaatagactatcccagcctgcccatgggagaaaccctgctacagattgatgttaaggggaacccataatagagggcatgcagtaactgtttgtaaccgggtggtggctgttgtgtaacacaaatagcatttctaatgaggtggtgcggttatacaattttggccagcctgtgtgggttataaaagctgaaattccttcagcacctgagagcgtctcatgctgagtaccaggacaatcgcagggttgcacagacaccggcacagaagtggtgggtgacgcactgattagaggacatttctgtggaagggtggagtttcactttgaaggtgaaagaaggaaatttggctttggtccttggagaatgacatggtctgaagagcagatcacagagagggctggtgagtccgttgag

SEQ ID NO: 326316 - DNA, 726 bp, Homo Sapiens
  misc_feature (111)..(152): n is a, c, g, or t
gaatcaaagccacatgtaatttaaaatgtttttgcccaaagtcttggaaatccaatgtgtattttacacttagaacatgccggtcagacgagttaaattttgggtgcttgnnnnnnnnnnnnnnnnnnnnnnnnnnnnnnnnnnnnnnnnnngttctgcctgaatatcagactgcttagtagtcattgctaagttcttcgtgccactccaagccttccgtccacacagctttatttggacccaatgtgtaacctagccaccagagcccatgttgcgcactagcttttatatttcaagctgtgttttagtcctagatcaggtagctaatttctggatgaagataggtaaatgcctagaatttacatcattaaattagttgggagtaaatgtgttcaaatacatggacctgatgaatcaatggccctgttgccaagtaaaacctccattgcatttaacagtggaaagaaaatctgtcatagtgcttcccacagtctgtttgagaataagaaccaaccacttctaatatttgacacactgcacatctttttagtgtctgttgattcagacaatacacagtgagaaaagacttccattttagtaaacttattaatcataatagcatctgtatatatttgatatattatgtgataatatgtaatatctatttgataaatcatagttatttaataatgatgatattacatattaaatcactgtactggcaat

SEQ ID NO: 326317 - DNA, 798 bp, Homo Sapiens
gggtttttaataaggagaaagaaaacacaaattgtttttcaacaactttattgttgagaaacaatttaaggcaagccacgatgagctccgcaggctgcttctggcccaggatgtatgcctgcttgctgtctactccaaatccttcattttgcccagaaggcagcaaagaccaccaaagcaaggccccacaactgtgcacgcaccactcctgatgggccagcaggaggacccctgcactctgctaatagcactataatgagggcagccagatgcaaatgagggcagcagtaattaaaggtacagccttgcttggcttaattggctccacaggcagggaaacggggtgtttttggaggaattcattccccaaaacagtgagattacgaggacaaaatcagaaacaaagggtaaggggaagctgtgcaagctgaggaattctgggtacagcacgtacctcaaatgcctcccagtgactctaattaagtgcacccaactagggcatcaataggactcaaggtccacctgcctgcctgttccactgcctggcagaaatcttgaactaaaaagaccaggcacccccctctggagcccaggttcctgtgcctacccagtcaccccagtctatgagccccaggtgggtagatatagagtattactcacttctgtatcaggacatcagagatcccagccctgccactccccagctgtgcacctggggcaaagcgcttgatgataacaatctaatacttacatagagtgcatggaggggactttagcccagagagtctggtccccatt

SEQ ID NO: 326318 - DNA, 707 bp, Homo Sapiens
  misc_feature (29)..(29): n is a, c, g, or t
ggacagcattgccaagagccctgactggnctggcttggtaactcactcctgtaatcccacctgcccctagaagtgcagatatactagaaaatacagctgtctttgttccagtgaatatgtataaggggtgacatgccttggtggaaagcagctcagattgtgtggactcctcaatccctgctctaccaagagctctccagttccaaaactgtacactcagtggctatgttctgtgtgcctgctcccaatacagccattatgttgttcatccagatttgagaatttaagcttttcactcctctttgggtagtattatttaagtaagaacttctaggaaaatagtatgagtttggttatttttccctcggcagcaggaattttctgaatatttagcacattcagattgctccaagaacagcattgagcaatgctgtacatgtgctttctcctaaggctgtctcccctgtctcctgggttctggaaagactcattgtccttcagggaagggagcatttttcctcactgccattgctgagccttttctcctgttgtatactatttagcccagcatgaagccatcgccgactgtaaggagtgatggatagaagtgtttacttggtttgtgaggccttgtctctaaagggtaacagtctgacaaggaaaacatttcaaagagccctgaccaggcctggcttggtaactcactc

SEQ ID NO: 326319 - DNA, 488 bp, Homo Sapiens
  misc_feature (399)..(399): n is a, c, g, or t
taaattggcagatggttgtgtaccatcttttaaaataaagattgaatttcacccagtgtgatggttcccattgcttatatttctcctgctgaggccggacctgatatggccctggtctgtgttcccagccttgtttcctcattaccactaaaatctttcccctgtatgcccgcccaatttttctggctctgagtccttgttcatactgttctctccaattctaccttccaaaggcctttcttaacaccttcggattctttctttgagaactttccagattcccatgcctttttggaatcaatctctatcctattgtcatcacatttaagtttctacttccatcatcctcactcctatccctttggtcctgggatgacaggggatgctgtgttttatttnacttcatctttgtgaacttccacataacctaaccccggttcttgcttatgggagatgctgattgtagggtctgtgttagatactgttaa

SEQ ID NO: 326320 - DNA, 402 bp, Homo Sapiens
  misc_feature (11)..(11): n is a, c, g, or t
  misc_feature (68)..(68): n is a, c, g, or t
agaaccccccnaaggccaagaaaagttttggaatggttttaatgggaaataagaaagggaggcccccnatcctggctgtggccattaatgaagtaaaaaggggagagtgaatgaggaaaatgccgttggaaggataagccagatccatgccagtgccccgagagagcctagagatccagtttagagtggaatgggaaggtatagaaaggttttaaataggtgagacataggatttgattttacttttaaaaactctttcaggctgttgtatggagaacagtgtggcaagcagcaggagagatgatggggaagccgttgctgaagctattagtttagacttagatttttatcaacccattaacaattacatctaatttagccttctgagccccttttcaatga

SEQ ID NO: 326321 - DNA, 913 bp, Homo Sapiens
  misc_feature (536)..(536): n is a, c, g, or t
  misc_feature (547)..(547): n is a, c, g, or t
  misc_feature (556)..(556): n is a, c, g, or t
gagactgcatagggctcggcgtggtttcatgcagggaagtgtccagtcaaggaatgatagaagacttttcaggtctattggcttaggtagtgaaccattctgctggattccatcctaactcacagttttcctcctctgactgctataattctccagatgtgctgatgtagtttgatccagctttgccttcctggattaatttatttaataaatatgtatggggccctctatgacattggacatgattataggctttttggaacgtagcagggaagcaagacagcctaaggtccctatgcaggtacagataaacaataaagtagacaactgataagttagttgcaggttgtggtaacagctaggaggggagaaacagtgtgatgtgatgagtgaagcagattgtttttgggagaggatggtcagggatgtctcatctcatcagggcggtgacagttcagctgagatcttcatgccaacagacagccaatcatgagaaggtgaggaacaccattttatgaaaaagggaatgataaatngtgaagatccnagaggcaangaaagttttgattgtttatggaatagaagggaggccaatctggctgtggcattatgagtaaaagggagattgatgaggaaatgcgttggaaggataagcagatcatgcagtgcccgagagagctagagatcagtttagagtggaatgggaaggtatagaaaggttttaaataggtgagacataggatttgattttacttttaaaaactctttcagggctgttgtatggagaacagtgtggcaagcagcaggagagatgatggggaagccgttgctgaagctattagtttagacttagatttttatcaacccattaacaattacatctaatttagccttctgagccccttttcaatga

SEQ ID NO: 326322 - DNA, 511 bp, Homo Sapiens
gtgtgcaaatgagtgtattggaagatgagtggttatattagtcaaggtcttggcaggaaaaagatggcacaccaactgcatcctggcaggaagaagccaggcaaacaatatcctaactatactttcctctcaccctctaaatctcctgcctatgcctctcataggccaaactcaaatgagaagcaaagcctggaaaaggcagtccacgaaggtcagtctccagaggcacagatatagaggggcggagagtgatctggaggaacaaccaaatgaaagtatttcagacagacaacaaagtcctggatctgcaaaagttcatgtagggaaataggtaatagagagggaaagcaatgagaataggtaggtgaagcataaggctagaaggcagaaccatctttataaatagcatgcttagacatttggatactatcctgagggacccaccaaagggttttaagcgggggcatggcataatcatatctgagcttgtagctctgtagacactacctcc

SEQ ID NO: 326323 - DNA, 415 bp, Homo Sapiens
tgagccatggtgcctggccacagcatgttttttaatttttaaattggagggattgtttctttatcaatttattatgatctaatttaaatactccttttaaaatacttggctgattctcaagttgtagtacatcaagtaagcattttaaaatggtcttctaatttgaccattctactcataatctttataattatgatgaaaaacacaagtcacttgttcagtcatatcacagctttcttaagagatgaggaaacaaacttctcaggacaatctctttgaccagcttttctcattggtgaaacaaaatgaaagatttcatttccatttttaataattttgttatttcttttgcaagtgattgaagccaagcaagttgctagacatgttgtcacaaacaagtttctggccattttgt

SEQ ID NO: 326324 - DNA, 609 bp, Homo Sapiens
  misc_feature (228)..(237): n is a, c, g, or t
aggaaggctattagtatataatagtagcctctttataaataatagtatttattaaaataaggcggtctttgtaattcatttttattggttggataatgttcatttctgcattgattatttgtgacagaataaaactttctagagctatttaaggttctaatttttgtcataaggtttcactcacagtttattcctatattatggtcatctgagtgtttagtaatttannnnnnnnnncattgaatagatatggtattagacaacatgatagcttctggccaattagacgagtccatacgagagaatgtcagagaagctcttctgaagagacatcatcatcagaatgagaaaagattcaccagtcggattcctcttgttcgatcttttgcagatataggcaagaaacattctgaccctcacttgcttgaaaggaatggtgagataagttgtggcatccaatttttgctaacacttctactgtaacagctttccagtatgttacgattaacatttggggatatttaaacactcactatacctacctctgaattacttctccttcctgctttgtttcttttcaaggcctcttgtataattaattaagcggcc

SEQ ID NO: 326325 - DNA, 750 bp, Homo Sapiens
  misc_feature (99)..(276): n is a, c, g, or t
ttaatacagggtctcactctgttgtgccagctggagtgtagcagcacaattgtagttaactgcagcttttaactcctgggcttaagaaaaggttaagannnnnnnnnnnnnnnnnnnnnnnnnnnnnnnnnnnnnnnnnnnnnnnnnnnnnnnnnnnnnnnnnnnnnnnnnnnnnnnnnnnnnnnnnnnnnnnnnnnnnnnnnnnnnnnnnnnnnnnnnnnnnnnnnnnnnnnnnnnnnnnnnnnnnnnnnnnnnnnnnnnnnnnnnnnnnnnnnnatgagcacccgtgtctggctccccaatagtaatttcaaatatataactgtatttgctaattaaaccagtgtttttttcacgttataatattcagacttaggagtactgctttctcacagctatgaagctattaacatctcttacatatatcaccaaacctatacatacatggtttggatattagaacatcacttcttaactgggctttcctaggattagaattagattaaaagtggttactctcattagaagttaaaaattttaagtgtgaactctgttgcctaaagcagtattaaattaaagctgtaggaccctgcttacttttcaaagtacagcttctttaaattctagacatatttggatttgatatgatttttatagctagttgacaagaatttattgtgtactaagcactagaccagcatcacactgacaacctataatttgttaacgctattaaatttctgtgccgaa

SEQ ID NO: 326326 - DNA, 521 bp, Homo Sapiens
  misc_feature (253)..(253): n is a, c, g, or t
  misc_feature (262)..(262): n is a, c, g, or t
caaataagctctttttaaaaaaagtgtgctctgatacttttgaatatttgaaagcaaaaccttaaaaatggaatcgattacttaaacgattcttttcccaataatgctggtttcaaacgcaatcactatctccaaagtgctgctttctgtaaaacacataggaagaagaggtaccaaagggctgcgtgccaggctgtcagtgatctcacatcctatttatgcccaagaagcagctattaggaccgtctactangagtcttcngcggggggaacaaagagcagtatattggacagattaggcgggccctggtgcaccaggcagttccaagagggagggatttacaaaaaggaaccagctggcttgaaggcacttattctgcagctgtagtaggattcgggcacatagaaacccacccaaagatagggcgccttcctggctgacctctaggggcattaaaagtaaaagtgtcagaggaatctatcgcaaagcaataaacacataattctattcttattcatct

SEQ ID NO: 326327 - DNA, 673 bp, Homo Sapiens
gcagactttctttacccgtgcagaccatatggaaaactggccattagtgatgtatttttctccccgggctcctgagcccactggtgtcaagttgctccatctgattcttaaattaattttcatcagttgtaaaactctcaagtgtgcacaagaatgagcctgtcttcccgtgtgaatgtgtaagtacagaaagaaggttttaaatgcacatagacacacactcttcaactgccatacgaagcgtctgcttccccagtcatttcaggaaccatcagattattcacggctgggaggccctggagtcttacaaatctcgctattgtggccccggaggttgaaaatttatcctctgtggagtactcctgtccctgcgacagtgactagaggtgaaagtcaccccaaccactcctcgcccgttgcccgtggccagccagccttcctcatagtagcgtctcctgcacacaggcttctccttctcactcttgggacacgtccccttcccaggacaggcacaggatgttggagtcactgcaaagcacaggcccatgttccactgctgcatacatactttcttcaatgaacttttttacttaaaaagtaatgttaatgctgtgaaatttaaaccaatttctttcattggtatatgtgtttttgtggttggcttgcgttgctt

SEQ ID NO: 326328 - DNA, 769 bp, Homo Sapiens
gaaccaagagtttgtttctagtagtagaagtataagtggagagagtgctacatcagagagtgaatttaccttagggggtgacgacagtggtgtgtcaatgaacccagctaggagtgcacttgcactgttggccatggcccaatctggggatgcagtcagtgtcaagattgaagaaggaaaaccaagatttaatgcattttaaccttcaaaaggaaaagagctaaaggaaaagggcaagttaaagaggaagacaacagtaatcagaaacagctgaaaagacctgcccaaggcaaacgccagaatccaaggggaacagatatttacttaccgtatactcctccttcctcagaaagctgccatgatggttatcagcatcaagaaaaaatgagacagaagatcaaagaggtggaggaaaaacaaccagaagtcaaaacaggatttattgcttctttcttagattttctgaaatccgggcccaagcagcagttttccactcttgctgtacgaatgcctaacaggactagacggccagggacccagatggttcgtacattttgtcccccaccacttcccaagccttcatctacaacacccacacctttagtgtctgaaactggcggtaacagtccatcagataaagttgataatgaacttaaaaacttggaacatttatcttcattttcttctgatgaagatgatcctggatatagtcaagatgcttataaaagcgtctctactcccttaactactttggatgctacttctttat

SEQ ID NO: 326329 - DNA, 788 bp, Homo Sapiens
  misc_feature (46)..(94): n is a, c, g, or t
  misc_feature (549)..(697): n is a, c, g, or t
  misc_feature (737)..(737): n is a, c, g, or t
atttggtatcaatacatccactattgtcaatttcaagctaccaacnnnnnnnnnnnnnnnnnnnnnnnnnnnnnnnnnnnnnnnnnnnnnnnnntaatggcactgaacaggaagttgaaaagatgtgcggtagtccctcaatagatagtatttccaccataaggattgaatcggggaaaataacttcaagaggaataaatcgtagtaaacactatggacaataaacagggaaatggaattaggagcatttattatgttttgaggaatataatttgttttttaaaataatagctatgtttaacaaacagatggaaaaattcctgaaaatttaataataagcacttcttagcaaggacaagccagctgcaacacatcaggtttgtgcagtagacatagtcactgacatcatgaagcttatactctagaaatggaggcagagaaataaatgagcatgaatcttataagaagggcccctcagccaaatttgatgctataattgtgataggcagaatgttggctccccatggacttcactctctggtgtttatnnnnnnnnnnnnnnnnnnnnnnnnnnnnnnnnnnnnnnnnnnnnnnnnnnnnnnnnnnnnnnnnnnnnnnnnnnnnnnnnnnnnnnnnnnnnnnnnnnnnnnnnnnnnnnnnnnnnnnnnnnnnnnnnnnnnnnnnnnnnnnnnnnnnnaatcagagtcaaagcacaaggattaccaaggcaccattgntggcttgaagagaaagaggaccatgcagcaaggaaatagggaccacagtcc

SEQ ID NO: 326330 - DNA, 440 bp, Homo Sapiens
  misc_feature (381)..(381): n is a, c, g, or t
actagttgttattagttttctattgctgtgtaacaaattactgtgctgtaaaaatgtagcacttttaaaaagcacaaatttatctcactatttctataggttagaaatctggcacagtgtggttggtttatcttttcagggtctcattaggctaaaatccaggtagtatccaggggctgcagctctcatctgggacgtatggtcttcttccacactcactggggtattggcagaattcagtgcctcatgggttgtggggactgtgggtccctatttcccttgctgcatgggtccctctttctcttcaagcccaacaatgggtgcccttggggtaatcccttggtggctttggactcctggatttcctgcttctgcccttcntgttttaaggggattcatggtggattacataggggcccatctggggataatccaaggat

SEQ ID NO: 326331 - DNA, 584 bp, Homo Sapiens
  misc_feature (201)..(201): n is a, c, g, or t
  misc_feature (298)..(298): n is a, c, g, or t
  misc_feature (413)..(413): n is a, c, g, or t
tttgtctttcttctcttaatttttaaatgcctcttttcttgagcattccatctctctttttgaccctctcaggactgggcttagctgtccagagccctgccggagggtgctgggggctgtccctctgcaggcactgtgttttcctcaggggctgtcctcagaacacccctcctgctccctggggctcctcagggagccatntttcagctgggagtctcaggtctcaaaaacaacttctccaggagggccaaaaaaagactgggttggcttctggtccctcatgatggcttttatcccntcctgggacactttgggtatattcatgggcattgtttcccatctgtcttttctacctgtgccacccctgccctgattccacggctgcctcaggcaggcaggcaaggagctaggcntcggtgcccggccctggcagcaaggggtctttgtgcagttggagatgctgccgttgtggcagagcgtcctgcagccccgcttccatcagcaggctctggggtgggggctttgcaggggatgctctctgatgtttgttccgttgtttaaataaaatgcacttatttttgttt

SEQ ID NO: 326332 - DNA, 416 bp, Homo Sapiens
  misc_feature (338)..(338): n is a, c, g, or t
  misc_feature (379)..(379): n is a, c, g, or t
gctttgctgttgtttgctggcctcatgacccttagtaaatcattaatctctctgagccttagggccactgagagaatgtatttaagggccacataatggcctgtgaaaacagtatttgttgttggtttttattgccaatactactttaagtttaaggtgcctgaagggcattagaagcctgctagcacctgtgacccttgcaggttacttctcgtgtcttgatttccaagcattagtgatgactaccttggaagctattggctgatagaggatgagcttgaatgctgttcccaaagtctcccgtctcccaagtttccagtgccttctcagggcaatgnaaaatagtttgtgggacagctggggggatggtttcagtgtncaaactttgggagtaaaatctttcatgtttttctgaa

SEQ ID NO: 326333 - DNA, 460 bp, Homo Sapiens
  misc_feature (12)..(12): n is a, c, g, or t
  misc_feature (84)..(120): n is a, c, g, or t
  misc_feature (235)..(343): n is a, c, g, or t
  misc_feature (352)..(352): n is a, c, g, or t
  misc_feature (405)..(405): n is a, c, g, or t
  misc_feature (420)..(420): n is a, c, g, or t
  misc_feature (431)..(431): n is a, c, g, or t
  misc_feature (438)..(438): n is a, c, g, or t
ttcggcacagtncattagtaaatatttgttgaacacttactgtatgttttacatatatatttcttacaaactttctaacctcannnnnnnnnnnnnnnnnnnnnnnnnnnnnnnnnnnnnattctctttagttcttgactaggtttttatgcatatgtagaatttggagtattatcactacttaatagtattgaatacttactgtgtattaaacatgatactggatgctcttatnnnnnnnnnnnnnnnnnnnnnnnnnnnnnnnnnnnnnnnnnnnnnnnnnnnnnnnnnnnnnnnnnnnnnnnnnnnnnnnnnnnnnnnnnnnnnnnnnnnnnnnnnnnnnggggcaggnagcattaggacttcttcatagggaggcacgtaacccctattgtggaactgtgncatgcgatgggatcnttgggttgtgncgctccntatggaaaatctaattattaaa

SEQ ID NO: 326334 - DNA, 305 bp, Homo Sapiens
  misc_feature (284)..(284): n is a, c, g, or t
  misc_feature (293)..(293): n is a, c, g, or t
atattgctaactccctcatagaattattgtgagaattaaacacacatatacagcattggtccccaacctttttggcacaagggactagtttcatagaagacaatttttcaatggacctgtagggggtaagaggcggggtgggggtagggggcatggtttcaggatgattcaagtgcattacatttataattaggattttcataagggagcgcacaaccaaggatcccttcgcatgcacagttcacaataggggtttcgtggcttcctattgagagtctaattgntcccgcccntctgacccgggg

SEQ ID NO: 326335 - DNA, 514 bp, Homo Sapiens
  misc_feature (409)..(409): n is a, c, g, or t
  misc_feature (415)..(415): n is a, c, g, or t
  misc_feature (447)..(447): n is a, c, g, or t
  misc_feature (453)..(453): n is a, c, g, or t
  misc_feature (458)..(458): n is a, c, g, or t
  misc_feature (478)..(478): n is a, c, g, or t
  misc_feature (492)..(492): n is a, c, g, or t
ctttagggccattccagtttgaacttgggcatattagagcatcttagttctctatatgtacacattttctcatttattcttgttgccttccttgattcccagaaaaatctgacaggtgttcagctctttactcttcagtgatttcaaggcttggtttctgtttcttgtttcactgtctacagatattttgaggcctactctgctagtcaagatttcctttatttatttatctagtacttaatgtgtttataatatgtgccagggcaccatgcgagggcttgctcactgggtgacaatgggacaaggaaagggcagtcagcttatgcccttgtgtaggcgtataggcctaatgtgtaagggcaggaaaatgaaccacacagttaaagggggtgatattgcaggtgggggnatagcngggtatttgaagctcatgggggccagctctcnccccgngcccnattcttgggccccgagggcnaaattccccatagngaggcgattaattccggattca

SEQ ID NO: 326336 - DNA, 779 bp, Homo Sapiens
  misc_feature (590)..(607): n is a, c, g, or t
ctaagcatttgtcatgcagatccatttaatcctccacagcaatcctataaagtaggtattcttgttatccccatcatacagatgaggacagaagagactccaagcattagaaggataggcccaaggtcacacaggtaggaggtggagaagttggctctgactccaaagcccgtgcactaagcactggccagcaatttcccttcacacccagaacaatctccccatagttctccatgtcctggtcacaggaacaagaccacaagcacggtgtgttcttcatttgagacaggaaaacttccccatgacacaacgacatgaaaattttgcttggcccttagccagcagcaggaaatgcacaatcaccttgctgccgtggaaacaggtggcaagtcagcacagactctcagcctcccgtctcccgcaattacagccaaggattatgtctttaaactttcccattggtggcttaaaataactcctcttgaccgccacagaaaatgtaccgagagacaggaggcagccatagccagagttggccaggtcacaagataaagagaaatgttcaaaccaatacaaagaaagccctacgnnnnnnnnnnnnnnnnnnaagggacacagtcaatatccctgtgctccttcggggctaggaatagacactggccactcttcagtcacacctggtggtcacttaatttatttaactatgcacgtttgtcaaaaaggaaatatttaaattgtgctatcagggaagttccactgcttcatattatacattttaa

SEQ ID NO: 326337 - DNA, 846 bp, Homo Sapiens
tatgcaacttatgagatcaacccaaaggaaattgtgcatcagtgtccataggggtggttcacagagtggcaggagtctctgagcaacaatctaagctgtatatgaatttcttaagaattaatcccattgcacatgtcggtagatgtggcagggacctgacagatgggggaaattgagtatttcctttaggactcaaaagagactcctaagctagagattctcaacctggggatgaagatccaagtcacctgacgaggttttcagtcttcatgccttgggtcccattcagctgggctgcttctggtgcccagctgtgtggagaacaactctcctaagccacttggaatcaaagctcccaagttattgggggaaaagattacccaaggcaaagagccagaatgtgcagtcttaattcagaagatgggaagcagtgggacgcaacagtaaactgagggcgttttctgatgtgatcatccacagactcaggattatagcaagcagtaagtcacgaagagcatgaggcagccttgggctggtgaccatgggccactcaggccaacagaggggattttctcctgcttcagctcagagacagagtatcagcaagggcagcatcacctgagcgatgttaagaggcaaagcaaaacagtagctccttccaggaatcaaggtatcaacatgggagccattttattgaggtgagaaacagaagaagaaatggtagggatcatgagatagaagaaaacagcattcatggccttgttctaacataaatgtgagagatggccttgagatttgcggaactactcagaagagacggggccaggcttatattcactcgtgccg

SEQ ID NO: 326338 - DNA, 907 bp, Homo Sapiens
ttgcaggttggacgagtttgtattaaggcattctgactccttcactctccccagctccctccatgtcaatcccttggcagaaacactgtagacttataaatggatgacagatgcaggctttgagagggaccaaaaggaacactctccactggggtgtggggtcagtcatcctgggaggggctgacattagaggggcaaagctcaagggcttacagccacagccacatatgccatcttctcctgtgcaggctcattatggcatttctgcagcttcctaggagcctccacagaatccaggtcgtgctgggaagctccaccgacagcattctccacacctcagccaggtgcctgttatacggcactggatgacacagaaggaagctgagcactatatctgtgtacttgggtctggatataaataaactcacggtatttatggattttttgggcggactctaggctggctgattatgggtaacctgggcacagataactccccataatttctggcaccttcctcaaattgggactctgtatttttcgcccaaagttaagccagtaattctcctgctgaatcgctggatgccagggatgtttcaggtttttcagggtatcaaatgtagtcattataaactggcagagctcatttgaatcaagaaaaccttcaaagacctgggcaattctgaagggacagttgtagaagcatttagcggcagagctgtggagctccaggaattctcgacattttgtcaatgctcttttcaagttttgctgatctttcttgtcatgagtgatatacttcagcctcagggtgatatgcagcagggagtgaatgccctctgcagcctcctcagccaccttttcctgtgggtccccacagagcagtgccatcagagccactaggtgt

SEQ ID NO: 326339 - DNA, 666 bp, Homo Sapiens
atcacatttatcattgctgtaccatactaactcgttaacatacctgaaaccactaataaaagttgtcttatttatcgttatatgtccaacacagagcacaaatccagacgcagagtggaggctcggtaaaattatttaaagagtaagaaagctggagaatttgagtaataccagtaaaaaggcagttactgaagtggaatgaaaggaagaaagcacagaatttacctttttcatagtttgccttaaagtaaactctggaatgttcttaggcaatgatcaccctcctgggccccaaaatgagaaatcaagttcacccaggaagtagccaattgggaatggcacatacaaggacagtgtccttcacctcccagtcggtccaaagataagccagtggggaaaagggcagctacagggcaatggtttgtcttgaactacaaacctaaagaacaaactatgaccattgggaaactttctagttaaggagcacacagtctggcccagactgagtttgccagattaggagagagagagcactgggcaggagtaaaggtcagaaggcttgggtgcaggtgcctctgctaacctcaccactcctgggtccttggacagtttctttcacttctctaaacctctgtgtccccatatgcaaaatggaaatgcaaaata

SEQ ID NO: 326340 - DNA, 749 bp, Homo Sapiens
  misc_feature (188)..(244): n is a, c, g, or t
  misc_feature (264)..(275): n is a, c, g, or t
aactcttttttcaagtgactttgttaccaggtaccgttgttgcagaggagtgatttgattattctttctctgtagaaatggtgatgatgtggggcaaatctacctcaaactgtaaactatactcactttttccacagatggggtcttgttatgttgcctaggctagacttgaattcctggacccgggnnnnnnnnnnnnnnnnnnnnnnnnnnnnnnnnnnnnnnnnnnnnnnnnnnnnnnnnnacccagctatattcacattnnnnnnnnnnnntcatctgtaattctaagagctccctgtgtggagccttccaagtggcccacctgtgtgggaaagctgccctgcaatatgggcccaaaaattttccttggttttcatgtatctgagcaagttgcttaaaggtgcctggttctgtgtgtttgagattatttattccatttttactaatagtttagagaaccatgattgtgcatacatgcacctgtttgtttagtaaatatttattgagctcctaacatatgtcatgcattgttgtaagtagtatttgaagttacagcatccaaaccaaatagacaaaatctctgcattcgtgaagctttatttaatggggaatatagaaaaaagtataaacacataaatcttaaaagtatttttaaggtgagggatactatttagaaaaagaaaacatgtaaagaagaaatcccccttaccatatttggggaatggtaaaatttttaataaggtggt

SEQ ID NO: 326341 - DNA, 885 bp, Homo Sapiens
  misc_feature (564)..(564): n is a, c, g, or t
  misc_feature (710)..(747): n is a, c, g, or t
  misc_feature (838)..(838): n is a, c, g, or t
tcaacatacaattcactctctgctgctgggaatctgagactgattgtgaagatttcttcccatccacactccccttcctcaaaaagaagcccagaagggaaaaacagtgtaacctactagagctcaagactgagtggccaggcagaagatgtttttcaattgtttccagggaagctcatgtctttcacccaggcagaggctctacataaaaccttctaagtgagcaaatgagcccttgtgcaagaccatggacatgtgaatttctcttcgcaactcagcacagcagctttcctaacacattgggagaagtcccaaccaatgggcaaacagatgggaaaatcagtgcccagttttcacttgaatcacaaccacatccaaacaagctaggaaagctttcagttcttaaacaaacagcagaatcaaaatgaattctgggatcaaagtacagatggttggttagtccagtggtgtgcagaatatcagtcatcaaaacagccctggcttaaagggaggagagccaaaaagatggagatttgcccctttgaaaaagaaaacatttcaccnacgatgtttcaaaaccccggcgtttcagaatagaacacaatgaggtcaaaatatatggcacaagggggtggggcaaagataccagccatgtgagtacaaagatcctgcaaagggaacattaggcagatgaactcagggcaggtctnnnnnnnnnnnnnnnnnnnnnnnnnnnnnnnnnnnnnncatcacaatttcaaaagagcccaagtaagattctttaaacgaacctgttccagtgggcacaaggagtttctaaaactgctgcaaggttagnaaattctacagcacctgagaaccacgtctaaatatttactcccatcc

SEQ ID NO: 326342 - DNA, 813 bp, Homo Sapiens
  misc_feature (201)..(214): n is a, c, g, or t
  misc_feature (562)..(570): n is a, c, g, or t
  misc_feature (756)..(756): n is a, c, g, or t
ggcagaggggagctggaatatttaatgctcttttctgtgtgtttaagtattgcaaatgatcatgaacttaatagaaagttaaagctcttttttgagcagctgaatgacagggtattttggcaacagagcatgtttccatgagcatgtttaccagtgtgctgaaggaaatagattttggacaacaggtccttctttaaattnnnnnnnnnnnnnnttctttatgacagaggtgtcattatgcttctaatagatgcaaggagagttacttgcctttttgaaacaataagaaaggaagaaatagttaatgtttgcagttgcacgaaagagtaaatgtggtaaatttcatgaagttaacacaaaaattatacatgtagaattattaaatttccagaagtcttaaccccaaggaagactagagcaacataatggtagaaagtggggggatgagttgttaatatttatttaagcccttcacaaatatagagtgactcttggtttaggattatgaaactatagtatttctaacttggcttactggctcatttgggaaatcataatgacnnnnnnnnnccccccccaatttcgaaggcttgagttttttggctctcttgtgactcctggtgcttggaaatccggaaggaggtacattccagtttttttccagctccagcactttagattctgagccgtttcagtaaatccagcaataagctccttatttctgttatttcagaatcagtggataccatggctagngtccactccttcgcatttctctgagaaattttcaggaagatagaaatgaacatttat

SEQ ID NO: 326343 - DNA, 707 bp, Homo Sapiens
  misc_feature (315)..(327): n is a, c, g, or t
tatgaaaagtagaacgaaagagaagccagtgtgaagagatgactgcaacttggggaagattgggagaaggtctccgggaagaatcacatctgagcccagtcagaaggacttttggaatctgacagatgagggggaagaggaaagacatttcagacagagagaacagcatatgcataggtacaaagatgagtgaatctagaacacacagttagtggggtgtgtaatgtgtaaagaggagaaatgaggaataggatattattcttaggccaatagactatttatttatttcttttttgagacggatcagtaacattnnnnnnnnnnnnngcaaggatatacaaaaccctaacacaccattatggttcatctaatggacacatattagatattctgagaaggaaatggtgcagacctggaataacaaagacggcagagaaaacaaagtacaccgccagatgtacagagatagcctgtcacgcatgccaacagcaaaattctgtcttctaaagagtccttagataactgaaattgctttctttgttgacccatctaggtgcctgagatcagaatatccttactggcctctttgctagctaccagctaatctgcagcttatctagagaaaataaaattcatggtttccaaactgcaaaaacacttccacttttgcctttgttagatgaggtcaatccattactggatttcac

SEQ ID NO: 326344 - DNA, 345 bp, Homo Sapiens
gtaactaggactacgggcatgtgcattgcaccaggttaattttaaaattaagaatccatatttttaaaaaggttttacaaatacactagaaaaattaatgcaagagaaaaaatgcaatagctagagtcatggatcctatgaacagcttttctgttgtgctgtttctcatctatcaggcacaccaactcgaagctaaaaagctccaaagcctcccaacacttgggaaatatgctaccttaggagtttctatgtttaattggcttctattagaaactgatctttgtagaaacatattgaagaaacataaatccaaaaaacctgccataggctgggcatggtgcttat

SEQ ID NO: 326345 - DNA, 716 bp, Homo Sapiens
gtctttttagacagggtctcactctgccacccacccaggctggggtgcagtggcacaaatcacagctcactgcagccttgaaccctcagactccagggatcctatctcagccaagtagctgagaccacaggtgtgcaccaccatgccttgccaatttttttaaaaattgtatgtaaagatgggatgtcactatgttgctcagactttctttttaaactgtggaaagcagctgtgtcggtacacatggcaagccagtaactaacatgtgctagaatagccttcactcagtaaccctggcaagttgttatataaattctccaggtctcttgccccttaggtgggataattctgaggtatatattttgccaaactccccagagtctccctggggcaccaaactctaattgcccacttaccgtagctggcttaatagtaaacttttcattggctgctttctctttcatacacaatttccccaatttcctactgattactttcacgtgaagcattgttttacgctctgcttctgggagaacccaaactaagataatttaaagctatgagactggatgagatcaccaaataagtgagcacagagaagaaaagaggtgcagactctgagtactaaaacctgtgacattgaggggccagggaaatgaggaggaaacagcaaaggaaacgggatgtgcaggtgttgcagggaggaggcagagctg

SEQ ID NO: 326346 - DNA, 560 bp, Homo Sapiens
  misc_feature (381)..(423): n is a, c, g, or t
aaaaaaatctgggaggggcatttttataggacccataaccattgacagttaatatcagccacaataagggaccttcaggagccgctttctagacccagggtctctgggaagcctcatcccacaccctctcctgctgtccagggccatctgggagctggtctgagtgtccactgagtccgtttatttggcggtctgtctcactgggtttgcacgacagtttggacatctctgtgtggctccctgtggctgaaggcttgtcggattttccgtaagaggctcccccagggctgtctatgggtccgtgtttgatatttgggtggatctttgggaacgcgagtccaggagagggtccattcgtgggaaaaccacccagcattgtgnnnnnnnnnnnnnnnnnnnnnnnnnnnnnnnnnnnnnnnnnnncccatccccagtcactaggagagtccaagtgccagggcagggctcaaaggtggcgcttcatgtgcaaggccaggtggtcagagcgcgaaaaagcacgtgggcagagctggcagcggaaggggcgctgccccgtgtgt

SEQ ID NO: 326347 - DNA, 660 bp, Homo Sapiens
  misc_feature (586)..(619): n is a, c, g, or t
atcgtgttaaccacatttatttgatttaattatcaccaagcatctcttttcatgtaatattttactgtagactttatacataggcagtgtgttgcatcaatatcagtgtagtatgtggaaatcttttacagtagaagtgttttcttttatttggcgcacaatagtccaaatttctttaatccttcttttgcatgtttgtttttcaaccctttctgtttcttccgtctctagaatggctggcttttattgtatagcagtctgtttgttcgtttttaagaagaactcagaagagttgtattgcctcaatttgtaaagcttaaaaatgtttgcctttataatttaagaacaccttggctaggtgacaagtttttacttcttgtgagcggtaggccacaggagtatggtaagagaagcaacaggacaaagagcttgatcttgttctcctttgttgtggagcccttacatgttttaaacatgaactacttagcaacaattccatgtttctttaggggaaaatagcaaccagaacaaaacaccagaaacacacaataatatctttattaccttgaagtacacaaagatcttnnnnnnnnnnnnnnnnnnnnnnnnnnnnnnnnnnttactaccataaaaggggaaaaaatgtggagctgggtaatg

SEQ ID NO: 326348 - DNA, 492 bp, Homo Sapiens
ggatgagcctaaatctcttcctcagtggctgataattgaccaggctggaaacactaactagagatactggtaagaattacttcggtttagtgtgggaagttaaaaaatattatttcacaaactcccccaaagccagtggctgcactcttaccttctacatgaaatacatccccacctgaacaaaggcacacgacaggaggaggggaataggacttcgcaaactggacacggcatcgttcagatctggactctgctaaaataccgacatccccacacagtaggctggtgtcattcctcctaccacttctctgtccccctccagaaagactgccacctctttacaacaacctctgtcttcctttcctttgggcttagagaaagatccatccttccccatcactgtaaggagtccttctgtgcctttcagctatccctgaccataccagggaggccaattcaattcaattgtttctattttttatctattatgtg

SEQ ID NO: 326349 - DNA, 613 bp, Homo Sapiens
atttcacttattatttattttatcttccaatttcctcttgccagactcccatccaaagagtcatagcagccttcttccaccttctacatgaaatacatccccacctgaacaaaggcacacgacaggaggaggggaataggacttcgcaaactggacacggcatcgttcagatctggactctgaggttccgttgttactggtttcacagttacaggcttcggatggtctgcacgtgctgtttcaagactaatggtagtctctattgcttctgttatgtcccttatccaacctgttcagcctgtccctctgactcaaatatggagtaatcaatggtgaaatctgcactaaagtcatcataactgggggtgactgtataataatagaccacctgataatattcatcctctcccagtctttcttcatcctcatattcttgtcccaggataagtggcacagcaaagatggctacaaagaggacatccattctggattctgcactattgcatcaccacccagagttgcctttctctctgaggcttcatcagtctcttttcgtcacagtggaaatgttctgaggaaggggtgagcatttttctagactgaaaagaatccc

SEQ ID NO: 326350 - DNA, 658 bp, Homo Sapiens
ctgtgagagtagctaattttattaattgcattttccgatgagaacactgaagcattatagatcaaataatttgcttaaggccatgaaacttgtaagtggtagggtcagaatttgaatccaggcagtctgactccaaagtcttgccactaaccacactgcaatactgtctctaaatgggaagcatgtgtctgaggccctgggatccctcagatggctaccgtgactctctagcacctagagtaacaccaaggaagcctcttgtagcctcaagccctcctttgttgctgctggtcttaagtggctggttgcatttcatcttctgggaaatgctctggcaacctccccacagtcctatgccttttctctagggtggaaaccacccatttcccagttgagatcatttttccagtaggcatcttacattctaagaactatgaaaatagttttcctgaaaaagacaagggaagcagcagcagcattctcctttccccacacccatatacacgcctgtgccctgtaactgaagtgtgagaggcacagtgtcataaatgggtagatagtaagtggggactaaaactgtcaagggtgatctaattggggtgggctcatagtagtacttctgtgtgaatgctttggtggacccttaaggtactacatg

SEQ ID NO: 326351 - DNA, 356 bp, Homo Sapiens
cagggtcccagagcaagcccaatctccagcctgtgactcctattccacctgtctttcccagatttcagggtggtgattttcccctgtgaccatagtcccctgacaggtccaataaagatattgtttttagtttgttcaggtttttcttaattaggaagggcataatgacttctaagcttgttacatgtcagaggtaaatccagaaggctccaatcaatttttaaatgttctgttgatttcagttctatgccaaacctaaaatatttgcagtagcttccagattctaaggaattatcctaagaaaattcttctaatgagcatttttactgagcctaagactgggtggcaggcagttt

SEQ ID NO: 326352 - DNA, 613 bp, Homo Sapiens
  misc_feature (109)..(109): n is a, c, g, or t
ctttgtgttaatatggcagtttgatgtatttatttgtaggtattagctctgagttccctttccacgtggtcttcctcaggacacccagcaatcccacagcgtcagcatntcaccattcatatcattgcttacctgtagtgattatttcactcagtttctgtgggtcagaaatccatttgtgactcagctgacacctctgggtgtcctgcagagcaatgatcaaattgaccagaattgcagttatctcaaggctaggagaagatccacttcccagctcactcatgtgggcagctggcagatctcaggtcctcgctggatgttggccagagccaccagttcctcaccacgagggtctttccagagggcagctcaaaacatggcagctgacttcccacatactgtgcactgtgcttggtgccaaggttatgaagaatgaagtctaagttcggcctgcaagaagcttgcagtctgcaggcaaactcctttctggctgtgaattccaggatgaaataattacagggatctatattagaagaataaaattatggatagattctttaaacaagattttgcaaatgacatgaaattttattcagatgttaattaagcggcc

SEQ ID NO: 326353 - DNA, 669 bp, Homo Sapiens
ctcggcgtggagacacaaagtgagcccatgtccttggtaaaataataccaacagacttgctctatgcagggtggccacaaaccttcaatttgtaaaaaataatattgtctactgagtataataaagtggagcacattaaaacaaggtgcacctgtactatgtgccaagcaccatgctaaattatcccactaaagatgtctcaaataaaatgagaacattttgagtaggctaattttataaggccttttattttagttgtaccaaaacaagccctccaaaatacaaaagcactaaaggaatagacatctttgtcactttgttccatccttggcacctaaagaaactcctggactgaacataattatttacttcagcaactctgagtctttgacattataatgtacattataaatctctaagaagagatataagtatgcaccataccataaacctatctgacctcagaaccctgttaaccaacgatgccaatttattaatacatagtagttaatgaaaagtttagaaaatattgcattaatgttttcacagattattaaaatgtatgtttaactgtatcattaatagggattatctgaaacaaagttatatgggactaataaggtacccactgaaagaaatcactattgtaatttttttaattaagcggcc

SEQ ID NO: 326354 - DNA, 455 bp, Homo Sapiens
  misc_feature (15)..(15): n is a, c, g, or t
ggcttctcccctccnaaatgcgtccctctggtgtagaaaggagggcctaatccttcctgggaaaaagcctcgccccacaactccctgaacaataacaaaagggccctcctcccccggaagtgaaatccctccttgtgatttagtgaagaagaggatgtaatacctgaaagtgtcgcccacattccctgcacacatacggcttctcccccgagtgcttcctctggtgtatggagagggaggccttctggataaaccgacgcccacactcaggacacaggtatggcttctccccggtgtgtgtcctctggtgcttgataaggtctgatctctgcaaaagcctctcccgcattcagggcacacatgatgcttctggtggctgaacaggcttgactttttgctaagtcccagtctatagtttccacgtatgactgctccagattctgaagtgtctgctc

SEQ ID NO: 326355 - DNA, 376 bp, Homo Sapiens
tttcggcacagctgatggtggagttcccgctggaccctgccctgtccaagatgctcatcgtgtcctgtgacatgggctgcagctccgagatcctgctcatcgtttccatgctctcggtcccagccatcttctacaggcccaagggtcgagaggaggagagtgatcaaatccgggagaagttcgctgttcctgagagcgatcatttgacctacctgaatgtttacctgcagtggaagaacaataattactccaccatctggtgtaacgatcatttcatccatgctaaggccatgcggaaggtccgggaggtgcgagctcaacttcaaggacatcatggtgcagcagcggattgagcctgggccttgtgtgggcactt

SEQ ID NO: 326356 - DNA, 692 bp, Homo Sapiens
ctggtcggcgtagctttgtggacttttaagtttaagcagctttatctataatgtgggagcatggttctgtagactaccttgctaaacttaggactccttttacaaacacattccagtgctcataaagaactggtagtattagctcagtgtaccctctaaagagtatctcccccaccttgaaagagtgtattctcaagattcttcttgggcagttttgtcccccttaagtataaccactcatagaatcctgcctatctgccctctcactctggttggtggagtgtcaccttagcactctatgaactactcaagttcacagggaactctcagccacaacttgtggctccttctcactaagtgtggtcatggaccactctctttgtaaagcaccataatctaagacagagcaggggctgtggcagccccgtggtaccgtggtcagtcacagcagcttggtgtctaccagccacagagaagaccccactgtatggaggctacaattaaccaaacaggatttgggaaagcaaaccaatgagaaatacctatctctggcaccctagagaattacaattagataaaattgtccaaactcaatgttagaactaaaatacaaaacactgccttatcaagagtctgaaacaccttgtgacagtagtggcatcttacagaaactgacaagggcactatgtcag

SEQ ID NO: 326357 - DNA, 493 bp, Homo Sapiens
ctgggcaacaagagcaaaattttgtctccaaaaaaaagtcagagggtatatacaggttggtagctttcactgacttagaagtgctcattccctcacacaaatatctcttgcacatataatctggaagccagtgggatgaggtaatgcacaagttctatattttccaagttgtgaggaggatgccctgagtattatttcatgacctaggacaatgagaatttctttggtctttttgataaaggttacctttcttgttttgtaccaaagacttttcaacaaatacattcctttcagagacctctcgtcacagtaagaactccaaatagatgcaaccagtttacacgctatcaatagtaagttcagctcagctaatcttccatcttaattcatcaaagagtttcatcgttctttaagaagaaatgctaaagcacagacttttacattgtcattggtttcattaaacaaaaaaaagcgtggccagttgcagtctcat

SEQ ID NO: 326358 - DNA, 661 bp, Homo Sapiens
cgtcactgtctggcttgggctttctactgaggatctggcccccacctgcagtgacgagcttaataaggttgtcctttggatggtgtttgaaggttccccacaaatagaagtagcatccatcaaacagctttggcaacagctgttctctgttgagcctgcttctgcgtggaccttcaggaatttcatacttttcttcctgttcacatacttttcttcgtagacatgcttttacccattcaaattttagaatccagcatccattgagaatcccaagcatacacttcaaggtactttgaactgcatcaccaggaacaacaacatgagttactgtactgtcaaactcagtatattttttagccttaagaattactgcaagctcactgagcattttctgttgttctgaagacagcccactgcctataagtacaagaggtccatccctacgctgcccagtgttcattactgagcagtggctagctgaggatgattcattcttctctggtagcagcaatagcgatttcatactttcatcatctgtataatcgacaggccgcagaccaaatatattaacagcatttctggaggctccataggaaagtaacagcttgactatatccacatgcccattcttggctgcatcgtgaagtggtgagtcattttg

SEQ ID NO: 326359 - DNA, 940 bp, Homo Sapiens
cttatgaataatgttagaaatggaacatgatgttttaaatgtatacataaaccttccaattaattatcaggtgatccagtagtagacctgtgacctctgaaggctcctgcttctcatcccttcccttctgctgtgatttgttgtcttccctctgctcattccccttgtgtctgtttcttccatcctctccccatgctccctctgttgtcatttccccttactctccactgcacccagcctctgttcataatttttactgcaattccgatgattgaattataaactgggaagggagcaggggatattgatcttcatgtagtttgacatgtactagactcacggagaacaaggactgggttgtaggcacaatgctgtgtgggttttgggtaaatctaactcacactcaacttgattttgtttccccctggggacttaggatcccaaaatgttctaatgacccacctcactgctgctaatcttcccacagtgccaatttggtggagtcaaccttgcaaagggagaaggagaaagggtgatgactttccccagagcttctgccgctgtcctcccctatgtcttctagccccagtcactactccttttatttaaattccataggggcttctcagtcagtcccctcttaaatgtaaatgagttattcacttcctgtgggcctgaagctgaaccactgtcatttatttttgaccttgttttcccagtttgggcagtgtaagaggaggtcaggaaatggaattgtttggggcaggcgattttgcagaacatgcacagataataggtttcagggagctctcataggctatggagggaggggtgcaggacagtgtcctcatcttggctcttgatattattatggtggactcttatgtggtctccctgcattgtccctacccatgaccaaagtcagagtgatcctttaaac

SEQ ID NO: 326360 - DNA, 780 bp, Homo Sapiens
  misc_feature (705)..(705): n is a, c, g, or t
ttcctttcttccttcctttcccattgaaagcatctattgattgtacttaattcatgcatctagagcaatggagatattcttctcttatttacatgagagctcttcaggtttcttcctcaatctcatcttctccagaacaaatagcctctcttttcagtggctgcctcgtcaggttccagatccctcactgtcctggccttcagttttggaggctgaatatgtgaagtttctatgtttggttcatgaattctgcatgggcacctagtatatgtaggatagtaataaaaatgccttaagttcccagaagggctctgtggttttaatgggtgctttccaatctttcccaacccgggggtaggggagatattttcccatttgactgtgaggaacctgagagcctttctaagaacaaacagacatcatttaattttagagttgggaaggctttgcatgccatgccgacctcacatcacagaagagaaactagaagctcagaagagttaagggacttgcttcaggtcacatggccaaagtttggctgtggcccatgggaattggactccatttttaagtccctttttaacccagaagttgaaccaccacactgtgctgcgtctgtgttgtgcaaaggatgagagaagcataaagcaaataacgggctccttagtgcaaagaacttgcacaggaatagaatgaatgatttgntttgcctttctggttagttcatttaaaaaattccagccgcttacatgataatagggtataagctataggagaaac

SEQ ID NO: 326361 - DNA, 453 bp, Homo Sapiens
  misc_feature (292)..(292): n is a, c, g, or t
  misc_feature (312)..(347): n is a, c, g, or t
  misc_feature (362)..(362): n is a, c, g, or t
  misc_feature (370)..(370): n is a, c, g, or t
  misc_feature (386)..(386): n is a, c, g, or t
  misc_feature (391)..(391): n is a, c, g, or t
  misc_feature (403)..(403): n is a, c, g, or t
  misc_feature (417)..(417): n is a, c, g, or t
gtgtgagccaccatgcccggcccactcttctattcttttctcccacaacctaatgttcttcagagtgtgctctaaactatcctccctgtggaatgtttctcctataggcttataccctattatcatgtaggcgggctggggaatttttttaaatggaacttaaacaggaaggggcaaaaccaaatcatttcattctattcctgtggcaagttctttgcactaagggagcccgttatttgctttatggctttctctcatcctttggcacaacacaggcggcaggcacagtgtngggtggggttcaactttctnnnnnnnnnnnnnnnnnnnnnnnnnnnnnnnnnnnnggtcccaatttcccngggggggncacaggccaaactttnggggncatggtggaccntgaagggcaaggtnccccttaacttcttctgagggcttctaggggtttct

SEQ ID NO: 326362 - DNA, 596 bp, Homo Sapiens
  misc_feature (135)..(135): n is a, c, g, or t
tcatcctcatttttcctttaattataagggcaagaacagaattcacattgttttgcaaatgaggaagcgtgcaggaaagaggacaataacaatggccctggagctctggggaagcaaacctgactcagacaccanctctgttttccatggggcaagccacatcatttgaaggggacgtgcgtcttttttcctgtagaatgcagttcataatgagggtcctccctaggtcatggtgctgctggcaattgtgcaggatatggacattagaaaaacacaccttagaaaatgagcccaaggggaccagaaaaatgaagaaacattttgaggaagcaaacaagaacgaaatcaatatggcatcaactaaatcatttcaggcatcaaggatgactgaaaatggaaatatggaataaagtaggagttgaatttagggctctgaaggaaaacaaagtaaaagttaaacttactttgtaaacagggaaccacccggagagttattatgttaatttctttctcttctttggtggtggcttaaaagaattttgaataaaacatgtaagtatctttcctaatggggggaaaaaagaaaaccctacctt

SEQ ID NO: 326363 - DNA, 1100 bp, Homo Sapiens
ttcggcacagaaaatgtgttatcatacagatctttaggtcagaagtctgaaacaggccctactggactaaaataaagatgtctgcagagctgcattccttctggagctccaggggagaatctgtttccctgccttttccagcttctggaggctgagtgcattccttggctcaaggctgccttccagcaatagcatcattctgatttcttgtgtcctcacatctccctctctggcctgactcttccattttcctcttttccttatgattacattgggcctactcagatattctagggttttcttcccatctgcaaagccttaaaattaattacatcagtgaaattccttttgtcatgtaaggcaaggtattcacagatttcagggattattaggacagggatatctttgactaaacattattctgcttactgcaccaggcgctatttaaatttacttgcatatactaactaatcctcataacaaccctatgagttaggtattattctccccattttacagatgaggaaactgcagcacagagaagttatgtaactttgaacttgcccagagttacatagccagtaagtagtggtgccagaattcaaattttggttggcttcagagtctgttcttaattatgacacatactatctggaggtgcatattgtagtacccttcaaagtgatttttcaaaagccatacttttactatgtagcagcagctgcaataatactttcttcactgcttacttgttggcaggtcctgtgctaaattctttcacagcccagtcccaagcaatggatattagtatcctgcattttgccccatagaaactgaggccccaggattaagttacttccccaagatcacatggccaataagtgcggaaactagtattggaagccagatagcctgaacaggagccaatgcttagccattaagctgaattgcttccacctttatctggtgaaggatgtcattaaagataaaggtaatctttgctcttacatggtgggcacatttgatgacataatcagagtccagaaagaacttgatgtgttggagtgatatgttgaatctaacacaattagatttgaagg

SEQ ID NO: 326364 - DNA, 1079 bp, Homo Sapiens
ttttggaaaagaaatattcctaataattcatttaatcatctggagagtgggttgaagttttgtaaaatttaatttcttcattatagactgtattattttaataaaagcttttctttggtgtcacccattgtgtgcagcactgagctggggccctggagctctcactattgtccatctggccgcaccactgtcagcactgctttcaatgaactgtaacagaatactgatgactcagcatttctgctgctgacaggaagtccttgagcgagtctctttgtaggttcctccaagaaagggatgctcaggcactccttgggtgaacagctgcaggccatggagaggacaaccgggttgcagtagtaagtttgcactgggctatcccagagctagaacaagggaacaggtcagcccctagagtcccagaggttcacagacttgggcaggtccaggcgttaaatgcagctgtgcctttggagctggacatccaggtacctggctgcctgctgggaacaggtgagtatgtatcagccattgtgaagcctcaaaaggctgcagcctgacgtagctgcagatcaggctgtacccaaattgcattgttactgatgaaataattttttaaaaaaccaatggtatctatttgagcattttcctcatggacaccattcaacagaatgctgttcctcggggaacaaatgactcatgcaaatgactattttcctaggtttttcctcatggtcaagcagccatgatctttttatagctttattttattttaactcagtcccaatggttaatttaaatcctttctttctttcatcaatgatacaaagagctcactttactacagtctcatcttgacagagtcaaatgcagaggctgtaaggctgcccacctgaggaggaggaactggaacttaggaaaacagctcagatgcttcatgcaaatgaggaagctcaattggcttctattgaaaatacctcacgcatcattttctcttgtctctacttgccaaaatatttataaaatatctttgccctgccatacctagactaagcctcttggaatttattttttcagtg

SEQ ID NO: 326365 - DNA, 624 bp, Homo Sapiens
  misc_feature (12)..(12): n is a, c, g, or t
  misc_feature (65)..(65): n is a, c, g, or t
  misc_feature (89)..(89): n is a, c, g, or t
  misc_feature (131)..(131): n is a, c, g, or t
  misc_feature (157)..(157): n is a, c, g, or t
  misc_feature (159)..(159): n is a, c, g, or t
  misc_feature (213)..(213): n is a, c, g, or t
  misc_feature (280)..(280): n is a, c, g, or t
  misc_feature (318)..(318): n is a, c, g, or t
  misc_feature (329)..(329): n is a, c, g, or t
gcttcttaaaantaaacatctttaatgtttaatgggaaaatcaggtataatacaataagaaaaancctggagtgacagctatcagttcncaataggagtagcaaaacttaaagctaagccatttgctaaancagtggttcccaaaatgtgttttacncnctcatactaaccatagatactaacttcactgctaactgtaatcgtttatgtcanaggtttcctaacttgaaattaaaagaaaacctttggcaaaaacaactcctggatccaggatcacagncccccacagacttgaatgtttccattcccctccccttnctcgtggtagncccctgaaagggttctctattaacctgcaggcttcggtagcacctttccaaaactactgattgaagagagagtttatagggaagcttgaacatccagacagaatttgttgatgcctggagaatactggacattaatgggcatttaccaatatttatagacattattacacgcataatagaagccaaacaccacagtttgcttctttgcagctatccaagatgacccagatctgcggagcctccaagtttaagaaagtgtacctgtgatgtaattcattaaattgttaagtgttaa

SEQ ID NO: 326366 - DNA, 645 bp, Homo Sapiens
  misc_feature (236)..(236): n is a, c, g, or t
acataacacattctgtcctaactccaatttattgggttgagtagttgcattcggatagccacatgccaatcacgagtaccctgattactcattatgagcctcaggataccatacaactcgctaatgagcacattataatgctggccagtgctaattagatgataatcatgtgcattgctttatttacagtctgctatttaaattaattgggcatttaattgaaccccgtgtgaaangaaattggaaatgggtttagaggttccactgagtttacttttcacctgccgtctcaccatgcaggtgagatccatttacttggatctgtaaatttagagcaaatcccaagtggacacagtgctcattttatgatggtacacatgtatatgtaaatttctctccaagtgtgtttgaaaacaaccaaattcttaattttgtatttcctctaacatccttttgtgccttgattatggagagattttgcatgcataagaaatatttaataaatcaaacccttagttggaaatatgaggtgggatcctaaaccaacatgatgaaactgttctgatattttcttacgataagaaactgatatttaattattgaataaatatatggcaaactatacctaattatgatcctatgtat

SEQ ID NO: 326367 - DNA, 377 bp, Homo Sapiens
  misc_feature (274)..(337): n is a, c, g, or t
  misc_feature (343)..(343): n is a, c, g, or t
  misc_feature (356)..(356): n is a, c, g, or t
gttctttcctgcatcacaaagtttttgactggctgtttcggaagactatgtgatagtttcctttaacagggggagaagagcccttcatgatggcgctgaagaatgatgatgcctgtgtgtgtgcggacctgaccaaattctcaggtttggggttaccctctagataaagattctgatggggagagggagctgtgatttagttaatgcttatctgactgcgccacctaccggctcggcagggaatatgctgcctgcctctgaggttttcaccgannnnnnnnnnnnnnnnnnnnnnnnnnnnnnnnnnnnnnnnnnnnnnnnnnnnnnnnnnnnnnnntgaacntgaaggcaggagnttcaagaacaggctgggcaaa

SEQ ID NO: 326368 - DNA, 475 bp, Homo Sapiens
  misc_feature (88)..(88): n is a, c, g, or t
tcatgccattgaattttaaaggaccaattgaccattcgctagccataatgtggatgaaatacttcagaaatttttgagccattgtcanctcaccaggtacgtaaaccatactatggtaagtactgcctagaaaatgccaaaggaaattttagaattcagagctccatattcattgacccagtcttttatgccttttatatgtattcatgtgctttctaatgaacctgtcaggttggtgtaaggtaacaagccttagactgttaagataatgtcaacatgccaagatcacccagtgaactttttaaagtatttaatcttcggcttcaggcagactttttaaaaaactagtttatactattcaaacatttaagtcatggaactcttctccaagataaatgtggctgactgctgagtgtcttctgtgatacatcttggcattttgaaacttcatgtttcggctggacacggtagctga

SEQ ID NO: 326369 - DNA, 798 bp, Homo Sapiens
  misc_feature (44)..(44): n is a, c, g, or t
tattttagactaattgcatgtggataaagagctgacttccaagnataaaaggctcaatagttctccaaagagtttacaagtgcctttctttgaagactgccctattattttggagcttccaagacctggtcagaaatgcatacattctcaaaaatcaaaatacaatcccaaacctccatcatcagcaaggttgcagtataataaagaggctctattactttcctcaatccttctcaaagtgaatggacatcaattaacaagaaatcttagaatcattagattaccctactatagacaatggtttaaggcaattttaatgtgattctgttgtgtgtgtaagataaatattatatttattttcaaatttcctcctgtgttttactacattttgggggaggaaatgcccttttcatcttcccacaatctctttcatagacaccctttcaatttttgttttggaatacatctcctctaataaatcaaggggttttctaggaagcacacttttgtcctggacagagcacaggaaaattaaataaagggctggctactgatcagtaaagagaaatcgtagagccaggtaacatcactgctgctgtctccaccactgtcttctctgcctttgccccatctctccctttctcctctttacttccttccagccaagcaattggtgccccattcaacctccagtcctgtgaggagtctgaaatgattctggacttgcagtgactgtttcctttattctttattccccaaaccaaggataattatgagacaaacctaggccaggcatgg

SEQ ID NO: 326370 - DNA, 483 bp, Homo Sapiens
  misc_feature (414)..(414): n is a, c, g, or t
gtattttagactaattgcatgtggataaagagctgacttccaagataaaaggctcaatagttctccaaagagtttacaagtgcctttctttgaagactgccctattattttggagcttccaagacctggtcagaaatgcatacattctcaaaaatcaaaatacaatcccaaacctccatcatcagcaaggttgcagtataataaagaggctctattactttcctcaatccttctcaaagtgaatggacatcaattaacaagaaatcttagaatcattagattaccctactatagacaatggtttaaggcaattttaatgtgattctgttgtgtgtgtaagataaatattatatttattttccaaatttcctcctgtgttttactacattttggggggagggaatggcccttttncctcttaccccacaatctcttttcataggacacccttttcaatttttggttttaggattacatctcccc

SEQ ID NO: 326371 - DNA, 1167 bp, Homo Sapiens
cattgataaagaaaagagctttattttggtttatggttctgcaggtggtacaggaagtgtggggctggcatctgcttctggtaagggcttcaggaagcttccaatcatggtggaaggcgaagggggagcaggtgtgtcacatggtgagagcgggagtgagagggagagttgggggagggacgtgccacactcttttaaacaaccacatcttgagtgagctcagcaggaactcactcatcacttccagggagggcaccaagtcattcatgaggcaacttcccccatcacccaatcacctcccatcaggccccacctccaatgctggggatcacatttcaacatgagatttggaggggacaaacatccaaaccatatcacagcttacactgtggatgtgaacacagctgtacacatacacaaaattttattgtaatttatactaaaaaccaatctccctacagctcctcgggggacagctcgccggttttctcatttgctccgttctgggactcggacaaacggggcacaaggcctctttctgctgatacaggtgggtcccaagtctgcatttcctgtctggactcagcatcaccaagggttacatgatagtcttgaaggaatgttgctcagaatttcaggcgactggtctggaggagagaagggggcaagtgctcaccttgaacccgtgcaggtggacagatgtgtggtggaggcatttgagggttacctcagaccacatgctgacccacgcagggccaaagtcgctcattgtgtggaggcattttgcggtggaaacacacctggatgcagggagaagggctggggcctggctcatgcatcagagggtctctctggtaagccttcttcctccgctccgtgggactctggagggtctggagctgtggcctctctcctggtctctggtcaggtggccagctgggaggacagctgcagtcaggccagcaggagagggactgtgactgtgcaggtgagaagggtggtcagtcttcaccctcaagaccaactcagaaggcagccatttcaaagcgtctcaggcagcccaagcttgctggccagtccacaagcttggccagtcatcttcactgtcatggttccctgggcaatgcccgtagcagtcaagagacaaacccaaaagggaactaggta

SEQ ID NO: 326372 - DNA, 672 bp, Homo Sapiens
  misc_feature (144)..(191): n is a, c, g, or t
cacatctttttatattttctccattttccctccccctgggaacctgggcctggattatctcatccatcttcaggattactgacagtcttatgactaatcctaacagatcctactcttacagatacacccacgtattcgttctcnnnnnnnnnnnnnnnnnnnnnnnnnnnnnnnnnnnnnnnnnnnnnnnnatttttgcctttccttagctctatctttgactccctgacacttctcttcctgcctcttttcacgcttatggacctcaggtgcccagagtgagatgaatgacaatcccatgggcagctccttcctggctgtgccaggcatttccatttctaattcagtcgttcatgtgtccattcattctttctgtcattctttcatttcaatacttattcttttatttatggacctcaggtgcacagaattggattaaccataatctgcggttcctggagccttctgcacactggtccgtgtggggctgtcttttgtttgttaatttctccccctggggatttggtgcaggatttatttaactatctcaggaaacccagttttgaattagtcataattcttgctgccttctctcctctttttgtccttgcgtggtccactctcccacatatttatgtctttatttattcattcaatatgtttgtattgctt

SEQ ID NO: 326373 - DNA, 346 bp, Homo Sapiens
  misc_feature (13)..(13): n is a, c, g, or t
  misc_feature (135)..(144): n is a, c, g, or t
  misc_feature (148)..(294): n is a, c, g, or t
attcggcacaggnagccccgcatcaaggccagtgtattgctaaagacagtcaatgttggctcagtcacctccctcacccctcagttgtcactccacctacccatgtctttccataggcatgaagatgggaatttnnnnnnnnnntacnnnnnnnnnnnnnnnnnnnnnnnnnnnnnnnnnnnnnnnnnnnnnnnnnnnnnnnnnnnnnnnnnnnnnnnnnnnnnnnnnnnnnnnnnnnnnnnnnnnnnnnnnnnnnnnnnnnnnnnnnnnnnnnnnnnnnnnnnnnnnnnnnnncctttgcagtgttttaaaaagctagataacaggctgggcacggtgactcaca

SEQ ID NO: 326374 - DNA, 551 bp, Homo Sapiens
  misc_feature (77)..(150): n is a, c, g, or t
tacaggtgtgaaccactgcattccgccctcttcctcaatttaaactgagaagacagttcgagctaatgattcttagnnnnnnnnnnnnnnnnnnnnnnnnnnnnnnnnnnnnnnnnnnnnnnnnnnnnnnnnnnnnnnnnnnnnnnnnnngttagatctctcatatgtcccaagtaatctgttggtttgcacggatgaatgtctacattacaaaagtcagctgaactgacaaacctcttataattggaacaatggttgaaatgttttcccattagacgttaggtgggttcacagctctgctagagtcaagggacatagtttagcgctatggacattttacttatgactcattcaacataaaactgtagtatgtcattatgtccattttctcaaaagagaaatgttaaatgtaatgaaaaaaataatatagataccattgaattattcaaatgaatgatgctagatacaaagaattccaaatttaaaagggggtagttaagagagtgttcaataattgtgtatagagatcagtcagtcattgttagggagtt

SEQ ID NO: 326375 - DNA, 786 bp, Homo Sapiens
agacagatagcacctcttttaggaaatctgccctggatgacagctgcgattcgcagttaatttgtgtctctgccacattcatatctaaacacctttgagtttttgtatctaatgcacgctgtctcttctaaatgagatgatggtctactccgaatggggagtggcacttgctatcctcgttaagactcacagcacgcttaaaaacaaaacggactgagctatgaaagggagagaaaattcatctggattggaagacagtagtgagttaaatgtgtgcccccaacattcatgtcctcccagaacctcagaacatgatcttatttataaaacggggttggacacggtggctcatgcctggaatcccagcactctggggaggctgaggcaggaggatcacctgaagccaggagcccaagaccaatttgagcagcacagaaagactccatctctataaaaaattgaaaaattggctgggtggggtggtgtgcacctgaaaccatcctcccagatgaaacgtctgagccgcgtcaggacaggaattaacaaagtgaaggggttgggcaggcgcagagctccagggggcagccatgcaaaggccccaaggcgccatgcatgcagggggcttcggaggctctggaaggccggtgggggggcagctaacagtcccgtctgcctccagggcaattccaggcttccggttccacgtttaagggaggtgtcgtaggtgtgttggtgtgcagggtactgaatttgcacagtgttctttcagaatggacgtacaggaga

SEQ ID NO: 326376 - DNA, 402 bp, Homo Sapiens
  misc_feature (21)..(21): n is a, c, g, or t
  misc_feature (79)..(79): n is a, c, g, or t
  misc_feature (278)..(278): n is a, c, g, or t
  misc_feature (287)..(287): n is a, c, g, or t
gaggaatcacctgaaaccccngagcccgaaaaccaatttgagcagcacagaaagactcccatctctaataaaaaattgnaaaaattggctgggtggggtggtgtgcacctgaaaccatcctcccagatgaaacgtctgagccgcgtcaggacaggaattaacaaagtgaaggggttgggcaggcgcagagctccagggggcagccatgcaaaggccccaaggcgccatgcatgcagggggcttcggaggctctggaaggccggtgggggggcagccanaagtcccgnctcctccagggcaattccaggcttccggttccacgtttaagggaggtgtcgtaggtgtgttggtgtgcagggtactgaatttgcacagtgttctttcagaatggacgtacaggag

SEQ ID NO: 326377 - DNA, 818 bp, Homo Sapiens
tacatcctgtattttcttcctgaggctatttgtcgtttgtctcgaatgttaattggttattgaagcatttctacaatcgctgctttaaggtccttgtcaaataattctaaactctgtgtcatctctacgttggcatcagtggtcttttcttactgaggttgagattttcctatgagtgattttccattgaaatcctgacatcagactcaggatctgatgtaagtcttctgttagagcaggcctctgccaggtggatgtggacggtgaggtggaagttgagattcccactcagcctccacggacccctgcatgagaaggaaagttcagcctcctgccgaacttccactcccaccaccaaggctgaatcagggctgcctccgtgctgctccctatacagtctcccccacaccacaggggggtggcctcatgaccacagggcagcagtaaagttcctgagttttgcaaggtccctcttatgataccctagcagaaaggaggctgtgctctgtcaccacccagcagaagtaaaaccccaactcctcagccagtcttctctgacagcaaccctgcagagaggagcatctcatcccagcttgtcatgagtgggaatctgaagtacctgctcagcctctgattagcagggtgagggtggtgctgcagggtttcctgtgatatttagctggaggaaagtacttaccgccgaaaagttctctgattagcagggtgagggtggtgctgcagggtttcctgtgatatttagctggaggaaagtacttaccatcgaaaagttctgtgatttgtaggctgcccctttcctg

SEQ ID NO: 326378 - DNA, 454 bp, Homo Sapiens
  misc_feature (294)..(294): n is a, c, g, or t
tgtattttcttcctgaggctatttgtcgtttgtctcgaatgttaattggttattgaagcatttctacaatcgctgctttaaggtccttgtcaaataattctaaactctgtgtcatctctacgttggcatcagtggtcttttcttactgaggttgagattttcctatgagtgattttccattgaaatcctgacatcagactcagggatctgatgtaaggtcttctgttaggagcaggcctctgcaggggtgggatgtgggacgggtgagggtgggaaggttgaggattccccacntcaggccctccacggggaccccctgcatgaggaagggggaaaggttcaagccctccctgcccggaactttcccacttcccacccaccaaggggctggaatcaggggggcttgccctcccgtgcttgctcccctatacaagtcttccccccacacacaggg

SEQ ID NO: 326379 - DNA, 1145 bp, Homo Sapiens
atgcagtggtatgatcatagttcactgcagcctcaaacttttgggctcaagcatctatcttgttttaaaatgaacttgtagtagttttaaaaacagccacaaatcttttgactctctacccattgagagatggggatatagatctccatctctctatctccacctcccttgaatctgtgcaggcttgagatagcatccacaaatccggaacagaagtgatgccatgtaacttcagaggcaaggttatcaaatgtccttgttcttttggaacactggctctctaaatgcttcctctggggaacctctctcttggaacccagccaccacactgtgagaagcccagaccacatggagagtctacatgtaggtgttctggtcattggtcccagctgattccactagccttcaaggcaccccagcccagacatcagatgtggagtagaggagcccccaaatgatcccaacccccagccatcatggaacaaagacaagccacctcccattgtaccctgtccaattcctgagccacagaatccatgagcataataaacggttactgtttaatgtcactaagtttggggtggtttgtttcacagcaatttaactggaacaatagtgctaggcataatctgctaaactgatgtcatgacccattagcaggcagtttgacaaacacgggttcagaggtcactaattccatatttgaagcctggcactcaacagtgctgagtttccactactgaatctgtgcatattcatacaagttgaaatttttgcaactagggatggatgggatgggtgtaagtggggtaaagcagattacagagtgttttgccccatatatatggtcagcatccaaaaaggcgtgagactcactgggaccaaacctgaagctcaaaggtgggccacattgttctggcccgagtctcaaggtgttcctggcttcctaaggataacctgatgtccttgtgccaaagcagacacttaaagactccagtgccttacaaagactttttggtctaaaggtggcctatgtacctctatccacttaaacactgtcagccctcactacagtttcaggtttttctattaatgaataactttcatctaaatataaactcagattaatctgttaaggattagca

SEQ ID NO: 326380 - DNA, 1138 bp, Homo Sapiens
  misc_feature (381)..(381): n is a, c, g, or t
caaagagattgtttggccctctgcttccctgggacaagcttggagaacatctaccagcatgatgctgaccctgataggacagaagcttaaagacttggggatcatgaagaacattaaggaaaataatgccttcaaggctgctcgaaaatactgtcctcatcatgttggccactacctcgggatggatgtccatgacactccagacatgccccgttccctccctctgcagcctgggatggtaatcacaattgagcccggcatttatattccagaggatgacaaagatgccccagagaagtttcggggtcttggtgtacgaattgaggatgatgtagtggtgactcaggactcacctctcatcctttctgcagactgtccccnaaagagatgaatgacattgaaacagatatgcagccaggcttcttgaccttcactgcggccccacatgcacctcaggttcaaaatgggtgtcttctggcagccctgcacgtgtgctttctgagtgtctctgtgtgtgcattaatatatgcattccatttgggagcatagcagctgtgtgaatgtatgtaattgtgtgtggggggttttttgttttaagtagttagaagtctgggaaaatgaatttttgaatagtatgttactgcagctttggtaacattaattctatagaattaatgatcagagcaagtttaatttttaaacataaaggtcttggttacacatgtccatgcattccagttaacacatttaaacatatagaaaattcacttcttctttcaagtccttccctttctatacttttgctgagatcaacccaatatcataagaagtttgtgtgatgcctgtatttttagctaattaccaaggtctctgcctatgcaaaaattcatctttcggtgattgtgggcggccaatacataccttctgtaactcctccctacctattctagatcctgcatatctactggagccatatgagccctcaggggcactggtgtcctgcagtcttactagtcagccacagtccaggttccagcaacactagctacctaccaaacaaaacacttctgagcttttcttgccatttggttgcctgggacctggaaagtgtttagattcttgataaagatggaaatgg

SEQ ID NO: 326381 - DNA, 521 bp, Homo Sapiens
  misc_feature (337)..(347): n is a, c, g, or t
atgagacacagctcccggccagtttttctctcttgtaattcatcctgcatacctttgccaaaacaaacatcctaaagcataattctgattatgtctcctcacatttcagacattccaatggcttctcattatgtctaaataaagttcaactcatataaaggtcaatgtgtttgttgagtgaatcaggtacaaaaattccatatgtaggctttagctatttaatcgaataaagtacaaaagaagagttttgttttgttttgtttccttaggccaacatatgccatatatcctgtttgtggcctcagaaatgtgtgaatcacattgataaatcagctgnnnnnnnnnnngttagtattttacaccttctcttctctagagtcttaaaaactccttcagacttcaactgaatatgcgctttatttctgttctctctattgattcttcttcattaatgtttaatccaaggagctttgaagtacaagatgacaaaatacataatttgtaccaatgttcacaattat

SEQ ID NO: 326382 - DNA, 1039 bp, Homo Sapiens
  misc_feature (21)..(21): n is a, c, g, or t
  misc_feature (98)..(98): n is a, c, g, or t
  misc_feature (128)..(128): n is a, c, g, or t
  misc_feature (136)..(136): n is a, c, g, or t
  misc_feature (142)..(142): n is a, c, g, or t
  misc_feature (151)..(151): n is a, c, g, or t
agggttaacctcagtgcagantttgggttacacccagagccctcctcgggcagatcactccctccctaaagcagtgtagaagggtaaaaatccacacnggaattggtgttgggaagaccccggttcangtttccangtctgnaaagtaganggactttgtgcgaaagtgcagccaacaaatttgttgcacaggtggtcaaataatatgtataaaaatatgttcttcaaactcatgaaacactatacaaaatattagttattactataattataacaacttctcaaaatagtatacccagaaaataagttgtagatgcattatttaatgtatttaatttgcaccttctacaccatgcaaatgacaacattattgccattatcagcagtcaacatttttattttagcttctctgtgaatttcctgttgccttgaatatcaacatcacatttatgttaaaaaaatgaaccccaaattctccatcacagcctaatggcaatctaaaaccacaatttatattccatatcatagtttccacatatttaaggtgtttcttgtagaatgtgaaccacgatattgctatactctcattatttcaaagattttcattatgctgctctacccatctactctgctcaaaggaatttatcatcctgcacacctcctacctcataatgtccttttcaggggcaagctgactccccacttagaatgatctgtgggaaaacataacgcgttccaaatgtgcccactgagggagaagtcttcaaacttggtaaaagctgaccccacaggttctccacacgtttcccaggtcagtggtttgacacttcagtaatgcacatatctatggaagaaaagaaaagagaaggagtcagaaaacttgcaaatattctctcagctaaataatgcaatttcaaactataaatgcatatttaaattgcctcataagaagtatttttcaaactgcaggtaacaacttattaatgaatcctaaagtcaatatagtgggtcaggattaacactttttatactgaagtca

SEQ ID NO: 326383 - DNA, 394 bp, Homo Sapiens
  misc_feature (19)..(19): n is a, c, g, or t
  misc_feature (29)..(29): n is a, c, g, or t
  misc_feature (38)..(38): n is a, c, g, or t
caaaattggttgggcctgnaactttccgncacaaaagnccccctcctacctttccagaccttgaaaaccatggaaccccgggtccttcccaacacccaaatccctgtgtgatttttacccattcctacacctgcctttaggagggagtgatccttgccctgagaagggcctcctaggttgtaacctaaactctgcactgaagttaaccctttgctttctttgaccagatttcaagagatggacgcttgaggagccgaagtggagcccctttgcctgtcttagttatggccctgtatggaagagtgtttgagaaggaccctccacgcttagggcagggatctgggaaattccagtgatctcctttagcagagcccttttaggattagcctggcta

SEQ ID NO: 326384 - DNA, 878 bp, Homo Sapiens
taaggctcagggaggggaggaaagttgcttgagggtccctctgggagctaggactggaacccacatttcctcccccgaccgccactgctgtaagagctccctggccttcagagacaagtggacgggggtgcttttctgcctcgctgcgtacaggagctgagccagttctaggcccaggcttctctttcctgggcccctgactgactgaccctgatcctgtcccatttctcttgtcagccatgtgctctgggcaccttcgcacgggcttccgtagttcacattcccgggcctatccaatgcctgctccagggccagggacacagcttctggatctgaagcttgggctgaggtccagagacagctcagcattgtggtgacagccctggagggtgcggcagccaccctgaggcctgtggctgacctctgaccccagccctctttcttcagccctccctttactccaaccctctcctgcctgctttcctgagatgtcctggtcttccttggtgccagaagagggcacttaccacaggaccctctcaagcttctcaggcaacagcttgaggtccctgaggggagtggcaagccctaatgcaactcaccctcatcctggtgcttaggtggcagagggtgggcagcaggggacagggatgggatggcaaaaccaccaactgcccttggtggcaggtgggtggagatgggatgcgtgccaacctcagatgccaactcaggtcatcaaggccaaggaccagtggcgaaagtgagtcttggggtaccttaggccttggctagtctgcgttcctctccctgcatgctgtgtatcctaactccctacaacagcccctcaaataaatcacatctagtgactggtaccgaac

SEQ ID NO: 326385 - DNA, 743 bp, Homo Sapiens
aattttacaggaattgcccctccctctctgtttgggtgatccttctcttttggtggattttttcatttcaaaatcaggtctcttgccagcttttaactaccattgactcatagtttttaccttcacaaagctgtttgctaccactatcaatcactcagagtttaagaactttctatttccactcctgattattgtctgtgggcctcttatgactgcctgtatctctctagaatcttccagaagcaacttgactcttttagggcctttgctgccagctaaggaaggtgaaggaaaagtcaccactgcaataaaaagagggcactttgtcttacttggcaataaaccaccaccagcagcagcagcaatagcagcacccccacccccaccaaacccaaaacaaacaagaaaagcaaaaggaaacctgtaagcaaagcccaggggagctgtgttgaatgtaggtccagagtggggttgagggctgcagctgggcacagggtgcctgcgctccagcaagagtgcaggctggaagaaagtcattctttatcatctcattggcccttggatggtgtcgagaagatttagaaatatttttatcctctttatttttagtcgttttcagtgagaggattggcatgaagaatccttgggacacaggaatcaatcaagacctttggatgcccctgcctgctctgtctctagaagcctcaagcccagcatccccatgccgacgtgctcatctctag

SEQ ID NO: 326386 - DNA, 833 bp, Homo Sapiens
  misc_feature (319)..(319): n is a, c, g, or t
cttatgtggataatatttatttgtatcttatctatagaacaaatatttacagatacaaacggaatcacagcaaagttgctataaaaccatccagacctctcgatggccacttctgaaaacatccacggtgaagggcagggcaggcctggctgtggagtgggccagctgagtacctgggcgtcacaaggggaaatggttggggattatggcttcagcactctgccggagcacattcctgagcgctgacaacgtggagccctcacccgcccccacctaccccaacctcaatggggaaggaaaggggcctgagctgggcacnggctgcccgggctcactatgtgcctgctccaggagtccctggcccctgtgctggcaggagcatccctgagctggaccgggaggcctctctggcctggggctgctccctgcccggcaggctgctgtttggcagctggaggtggcaagagctgctggtgctgccagggcgtgttggccaggaatgagctcccagggcagccctgaggaaagggtcttaggaagcgcctcccagctcactactaggagctggggactgtcagtgctgagtggggctggggtaacaggaagcacctgcctctcctttctttggcttagaagtggggaaggaagggcccaggaaaagggaccaaagcccgccccagcctttgcccctaggccgcctggggactgtgtgtgtgctgagggggcagtgggaggtgggcagctctggagttccctgcaccctgggatccttgggctgctctcactcccggggtcccagcagggcaaggcctctgcttgggaccagtgctgct

SEQ ID NO: 326387 - DNA, 533 bp, Homo Sapiens
  misc_feature (521)..(521): n is a, c, g, or t
ttttgctggacatcattttatttcatataagagaggttcatcctctacatctgaggtgtgtggtgctgctaaatgctgctctaaacaggaaaccagtgcacacaaggagggcagtgaggaaaaccctctcctgagcctctgattggtgaggctgtctgagtgccctgaggtaggtccttagagcagcctgctgatggcttaggtcccctctgagtcatgtgtggtgccaatcagtaccctgggaatctattactaggtgctctgtcttcctcccagaaagcaagagcagactggaacctctggttacttcgctgagaaacggaactggaggatcctaccagagggaaggacatgcagaatctgtgtcaagggaggtgacgtgctcttaggacaagcctcacacttcaatgttcaataatttcaccacgagcagtttacactggttttctgccccgtttctcagatatgtttcagagatggagtagcagttcactttcacacagcagtcaggaattctactncctggaacatct

SEQ ID NO: 326388 - DNA, 808 bp, Homo Sapiens
gcacatgaaaatgagccgaaggaagatccgttccacagaagcaccttgtctttctgcagtttttgagtatatttctcaaatagccataaaagtttaaaaaatatatttgacagctaactctgggaacaaaacatgttatctaagatccctttttaagtaacacatttcctgcctgccttagcagttcctcttaagctgtaaaaatagctacccatggcagtgagatgaggatccctgggaccttgcctttctgacctctttcccccagggagtccatgactgaccttcaggcagcagcatctctgcaggctccactgagcgctttcagatctccgcagactccactgagcgcttttagatctccgcagactccactgagcgctttcagatctctgcagactccactgagcgctttcagactggggccatgcctccaggggatgggctccccctgtgttggttttgctggtggccacgaatccgaaaggcccatgctgcagcgtgccctgctttgagtttggttgatatgcttaataagaacattagttttctgggagaatttggtagcacccgttcttcccttcactgtgtgggggaaatagtgttgattgaaaggaagaggactccgagattggattggagcaagaaagtgtgggtatcgtgtgttgtgactgtgtcttctccggggtgctgcttcactggaggtctccttcagggtctggccctcatgcctggccccaggtgctcgtgtgcacgtgagcggctcttcctgctgactgactacagctaattgacaaaaggcagtttc

SEQ ID NO: 326389 - DNA, 459 bp, Homo Sapiens
  misc_feature (28)..(28): n is a, c, g, or t
ctgatagaaaggaaatattttgtcaagnagctttcatttaaaagctactacctccacaatcacccccaaacccagaaaatccccactggctcttgccagtctggttttcgtattgcagttattccaattgtatttgatctccctgataacgtattttccatgggtttgggtagaagatgctaatcagattagaagcaggaatagttatttgctgtctgtgaaattgagccttttggtgcggccacgtggtgccagatcaacacttctatccctctgcactgaccacgttgtgaactgggagaccaaatgcaagccatttcatggacatagcaatatacaaccaaactctgttccttggagttatattgtaaactcttgcaggtgggagagcagttcacctccttagctctgtttgccagctcttacagggtaaaataaacctggcaatttatcctcaaa

SEQ ID NO: 326390 - DNA, 409 bp, Homo Sapiens
  misc_feature (362)..(362): n is a, c, g, or t
cttatagaaaggaaatattttgtcaagagctttcatttaaaagctactacctccacaatcacccccaaacccagaaaatccccactggctcttgccagttctggttttcgtattgcagttattccaattgtatttgatctccctgataacgtattttcatgggtttgggtagaagatgctaatcagattaggaagcaggaatagttatttgctgtctgtgaaattgagccttttgggtgcgccacgtgtgtgccagatcaacacttcttatccctctggcactgaccacgttgtggaactggggagacccaaatggcaaggccattttcatggggacataggcaatattacaacccaaactnctgtttccttgggggtttatatttgttaaactctttgcaggttgggg

SEQ ID NO: 326391 - DNA, 750 bp, Homo Sapiens
  misc_feature (13)..(13): n is a, c, g, or t
aaccccccaaagnctggtttcaagccactttcctagtctttgttgaatggtaaatgttccttcaagagttgcaggaagagcatgccttgcttgcgccatggggtggggctgcaccatcttgcttgctgcgtgtgcttgtattgttcatcatacacaattcatggtttcttttcaggaatttttgaagtcgcttgtccattctatgaaggttagtttggttaaaattaaagcattttaactgagtacttacaaactgtagtagacccagataggctgaaagcaaaagtaggatggagggcttggcttcggtgaggaccaagcctcttctgtcagccactcctgtgcgactgttcaggcccaggggatccactcagggaaggtacctgtgttcaacctcaatattaactgttatcaaagcttcctgtctcttttattttagcccagaagcaatacttttaatggattccctcccacgtcccaaatggatcatgtgtacccctcccgggcacccaccggaagactctgggtattgtgtgcgttgtccgcctcagtgacgaggatcttcataactttccttcctgcaaaaaggaacattagttttcagtgtttccaacaattatccagcaataccatctaaacaccattttctgtattctaggagcaagctgaagaggaaaagaagcccaaggatagcacaacccctttgagtcacggtaattatcaccaatatttacagtggtagttcacagt

SEQ ID NO: 326392 - DNA, 455 bp, Homo Sapiens
agggatccttgctttcttcaacctcaattggatatcttttttgagctcactttctccagagtggtgggaaagtactcactgtcaatcaggatttcctcagtcacttcagggctccctcctccttggatgtgcgtctaagttttagattgtttatataaaaccttagggtcagctgaggatgggagtgggtgggggatatctttggttgtcatcatgtagccatactggtatccatggcaacttaccattcatctggtccctggtttgtagtctatggagatcatgtctgcgatctttccaccccaactgtaggtcttctccaggatttgaggctctcagcagcatgctgatgtgtgagcagacttgatgaaggcagcctcatgccgcccgcccaggtgatctgtgtggctgtctctccttctgctcctgcaccacgccgagccctatgcagtctc

SEQ ID NO: 326393 - DNA, 634 bp, Homo Sapiens
aatgagaaaaatgtggcaactgtaataatgaagcactgctggccaagaagctctctagaaatgggaaaataataatccttattttgacaagaaagatcaggcctccactcacataggatatggagctggatcacagtggttttcatcaaccgctgaccctgcaccaccaaagaggcctagcaggagaaatttcagccatcatcttcctccctggcagtaagtagaagccaggcaggctccccagcagggaggtctggggctccctgaagccgaagagtagggctgggtgatgttaatacatgccctgagcaggtcacattaatgtcagtccctgccaatgggtatgattcttttagctccaggattggtggagggaagcctataaggaaaggaaaaggagaaccagacacatttctcaaaactagcagacacttctgcactcttgctgctggtaaaagcccttgggaaggcagacaacaggggaaagattttggataccattgcttcttctgtaaaagctgaagaaagaatgaggtggtttggggattcaagagcttctcttatgcatgcacacatttagctcatgcttcgctgcaaggactgcaagatgtcttttcatcttacagctttcctc

SEQ ID NO: 326394 - DNA, 770 bp, Homo Sapiens
tataatttgatatacaccaaattttgctagaacttcacttaaaaggtaatgcaaaacatgcctgtctgaggaggtagagggagctagctcttgagccaaggatggggcaatggcagatgggaaaacccacgtggtttctcctgacaggacacgtgacacagaattgcaaccaaaaccctgccttttctctaccaccctccttgaaccagaacggggaccacagatagttgcttctccctccctgttgtggatccagtgctgcttttagccctgagcagcggctgcagggctgagaagcacctgccccatctcctctttttcccactcttcctctgcgattaccttagcagcacacggttgatgcagagaattcatcacctgatgtgacagcccaagcaagcctggcactaagaaactctcatttgcaacccagaaatacgctgaggtgccacaaaccggctgatgtcagcacagagtggagctagatctgcatatgggccagatgccattactagagatgccttcagcgtgggtgaggagctgcacgtgctccagcccctcaatcacccattcactgttgggaacggccgggaagaaaaacagagacacggatgcatcctctttccctctctatgcaaacacacacagagccactatatatcagggagacatcagctcacacagcagaggtcacatcctagattcatcactcttctatcaagctagaagaaatatgtcttcctgatatgcttatcactttcccaagatta

SEQ ID NO: 326395 - DNA, 741 bp, Homo Sapiens
  misc_feature (229)..(264): n is a, c, g, or t
gtgctggccgccctgcttctttacaggttaactctgttggcagcgctgcagtgtagggcgtctgctcatctcttatctctgacattttcaatacacgggcatacctgtggcactcaatagatacatgctgaatgaaagaaggcatgagaccaaatggctccagctgggacaacagtcagtcatccatcaggcgcccaccaggcctccttccaggcagaaggctgtgaannnnnnnnnnnnnnnnnnnnnnnnnnnnnnnnnnnncatacaatgcaggctgagggttcatttgtttccacctttcctgactctccaggaaatttgttcgtttttcctgagactcttgcaaaccagagaaagcagcagaaaaggacaataacaaaaatcttacctggcctaaaatggctgaaatgagagaggtttttccacttcccacactgccgcagattccaaccagtttaccctcttggatctcccaagatcgaatgctgtgcaagtgtcctctgtaaagcgcaaggtggccccaggtggatgtgcttgccttcttcctcttcgggactgggccgctcgtcactgtcccaggaggaggtggcctttctgctctgccagcaccgcctgatgctcagtgcgctgcagctgcctcaccttctctttcttgcccctggaagccctcttgtcttttttcattttgggggtcagcttgggcgagttctggatactggagtgggaggagtcccatgc

SEQ ID NO: 326396 - DNA, 403 bp, Homo Sapiens
gtttagttaactagcattcaagtttatgaagatttttgtgtagatgtaatgcttgcttctgccaaggaataagaatgttgtaatccaccatcttttattctggcttttaggcagctgttgaggtaaacaaactaagtttaatgctcgaagatagtgtattcctcagaactaacacatttgattttccataggtttattttccctttacctgttcctaatttaactttttgtaaaatgccacagtccatttttagaaagattaagggatatatcattattatagataagtttctaggtttctttcaaacttgatatacctaatataaaagttcagattatttttccgctttatttttgcactttttattcagccaactgtgatttctaggattttgatttttca

SEQ ID NO: 326397 - DNA, 682 bp, Homo Sapiens
acgagctagaataccctgatgtattgataccaattttataattttgcttaaaagataaaaagttggttttatgtctcattttcatttaattgtgtcattatcaaacccaatgcatgccatactattcttccacaattacataactgaataactctccaaatcaggtaaacctatctgagacacaagagtcacgtaagattaatacagaggccattcaatatggatgatatcttacttatattctcaatgattgagattccttctgtaaattaatgaagtttcttttcatgtccacacgtaagaacaagaaaccatcatcctttcttctctccctctagtatagctggtccccttcaacttcgctctgcttttcaactatattttatttgccttccaaatgctactctgcttcagtgcccacactgacaaacacttatgttggcaagctgccattcaaaagaaggcctttccattttgtgaggactggtcaatcaaacctgcctggcctccaggctgtcgggagcactgcctcagtcccggccagtttgtcaagacccagaggtttctggtttctcttacggcaattattaatttgactcaacttctttgaagaaagaaacaagacttttaagtaagataatattctaaatgttttacaataattcattttaattaagcggcc

SEQ ID NO: 326398 - DNA, 341 bp, Homo Sapiens
agcttttctacttttacatgataattcacattaaattattataagtctaaataagagcctaaagtttactagcactttgttgtgacagttcatgaagagcctttccctaaatgctcatgaatttcttaattttctttccttcactcctgtatcgatttgtgttgtgtaacaaaccacccccaaatttgggagcctaaacaaataacatttattatggttcagtagtctaatgatatgctgggaatgttctgctgggtgccctcaggctcaggcaatagagaccaggctgactcatgtgtctgccttcagctgatgtgtgcactacagtttggctggtctaa

SEQ ID NO: 326399 - DNA, 610 bp, Homo Sapiens
tattttttgttaaaaaaatagcttcttttatattgtatgaacaagttggaagagtccccttgcgagtgctcactggccaggtccccactgtgcacatgggtaatctgcaaattcattcagggtctttagtttctttcttacttctcacatgtctgctttaccactctggtaatgatttgggttaaaacaaccgtttctttagtaaatactatctttctgattcctgggagagtcatcaagacacgactggggtcatatcccacaacttaataaccttgtcagttccagaagtcagtaaccatcctctggttgcatcgaaatgcacatgcacaatgttatgtttactgtcatggaaggtggctgtgggtgcacgttcttcatctgtgatggcctcgtggcagctgtcacagaccctcacttcaaactcgaagcccatcagggggatggaggagcgcttggagctgcacttgccacagacggccttcccacacttgcggcagtggtgctgtcttagaccaattttcttactgtcccacatttgcttgaagttccagaagaaaggctgatcacacttttggcaggaatcactgtccaaccattcaggggtctc

SEQ ID NO: 326400 - DNA, 402 bp, Homo Sapiens
  misc_feature (264)..(264): n is a, c, g, or t
  misc_feature (303)..(303): n is a, c, g, or t
tggactcaagcaatcctccctcctaaatctcctgagtagctgggactacagacacatgccaccatggccggctacccaaggataacctttagaacagtgcctcccatgttcttggtgctcctgtatatttatatgaggccaaagatggaaagcttcttaataagatggcatcttaccttaataaccttgtcagttccagaagtcagtaaccatcctctggttgcatcgaaatgcacatgcacaatgttatgtttactgtcatgnaaggtggctgtgggtgccacgttcttcatctgtgatgcnctcgtggcagctgtcacagaccctcacttcaaactcgaagcccatagggggattggaggagcgcttggagctgcacttgccacagacgggccttccaca

SEQ ID NO: 326401 - DNA, 704 bp, Homo Sapiens
caggccccttcgtcacccaaactaacatggccctaaaagcttccatgaaccatattaaatgtctccttaggatctcatggaaaagggggcatatgtggtcttaacagataatccctctatgtcatggcacaacataagacttgggaaagaacaatttgttttttccaagtgtttctcttctaccaagaaaagaaaggacattggcatgttctggggagaaattctgaattcagattcagtcttgacaagcctccagctgaatgagttatccaatcacctggatcaacattatttctttttgccatcaattaatcctaaatggtaattggcctcacgtctttggtccgtgagctgcccagcttcactcccctgtttccattattagccccatgacatgggtcatgttcttacacatctttcccagcaacacaggaatgctattgaactggcccttcatttagttttatagcttgcagtatatagcagataaaacattcacgtagatcttctcttagagaaatcaaatactttaggcatatgatagtcagagaatggctatcaaattgcaaggcatattggttgatcagttagttagttctgtttgatgagaccactgggctgttgagaccagattcctgggttccaatcttaagtaatctgagagccaacacatgggtcatattattccccaaacttagccacat

SEQ ID NO: 326402 - DNA, 549 bp, Homo Sapiens
  misc_feature (20)..(20): n is a, c, g, or t
gaaaatgtgactctcaaggnattatacacaactaaaactgtgtgaaactgcaatgagtacccgggcaatagggaagtaggaatttctcaccaacccacgtgccaggatccagcctcaacacttgtgaggatccagcctcaacgctctgcacatctccagtgtggaacagcaccatgcgcctaatgagttcttctctgactgattgattgattgattactaaaacactcagcgctcctggcaaagcagttctcactctgttgaacaaattatctttatgcactgcagtctcttgagcttagatgaaggcaagctcactgtaatcttcagatcatttaggcaatgtcttgggaatcactggatatgacaaaatattccagggcatgtgggaatagggaagggggaagaaaagcaggacttggagggactatgctagtggatttcaactctatattttctaatctgaaccaggggcaggcaaactactgccttgtaggccaaatctggccagtggcctgttttattactgattgattgattgacggggtctt

SEQ ID NO: 326403 - DNA, 601 bp, Homo Sapiens
  misc_feature (590)..(590): n is a, c, g, or t
cagtcacatgagaatgaaggcaagaaaagaagggaccagatggcatcaaaagatatgcctttctaggtcactggtggttaagcttgcaatctggttaccaacagggagacttatgggggaaagggtggagagcagcatcattgaaaaggaagaataattttgcccatacaattgctgttctaagaatttgcaggagagaaaaaaaacttagacactgaggagaatcgatttttctgatttaactctttccagtttacagttacagggcatccattgctcttggaagggtacatttacctaagtggcagctaaggacatgtggtaactgtgtgcattatttggatgggactctccctcttggtcagctgctgttcttcaactgccattaaccatttgttattctactctccaaatgcctgtttcatttaaatacaaaaacttaaggaaatgacatgtatcttccacaggtacacctctgtccacaagagcagaggaaataattcactgttcatctttcatattaataccgattttggaggactgtatttacaaaatatgaagaatggcatcactggcctttgtgagatatnctcagggtatt

SEQ ID NO: 326404 - DNA, 804 bp, Homo Sapiens
  misc_feature (532)..(532): n is a, c, g, or t
ttttaaacatatgagttagatgtgtgctgtttattttcttttattgcttacaactaaacttggtagtttatggagtattttctaagactgttatttataaaatgtaataaaaccaaattattcatatatttttatattaaaccctctcagataattctgttaatatgatgagaactggaaatatagacctcttaaacatttttgttttttcttgataggaagaagaaaagaagtcggtcagttatccttctctccttagccacataacttcttctctcatgaatcatccagtcattccaatggcaaataagttctcctcacctacccttgagctgcaaggtgaattctctccattacagtcatctttgccttgtgacattcatctggttaatttgaggaacaatacagtcaaaggtggggcatggggcactccaatgaggcagccttgatcctccacagaaaagggtttgattgtcggttctctagcaaaggcacaggggctggttttggttctactactcaggggaaaggntaaggttgaaaaggttattttttgcttactgttaggtgtgctttggaatcctctttctgcaaaggatcttgacaataagatcatgtttcattgcttctttactgtctcagtttcatcattctgcaaattagtttgaatctccccatctgaaaaatgcactttctcaaaacttcagcctcctttccttgttgacatcaaaaggcatagctggaatttatgcacatttgaaggcaatgctcttggtatttcctaggcctttctatttccagcct

SEQ ID NO: 326405 - DNA, 577 bp, Homo Sapiens
  misc_feature (22)..(22): n is a, c, g, or t
  misc_feature (29)..(29): n is a, c, g, or t
  misc_feature (38)..(38): n is a, c, g, or t
  misc_feature (234)..(234): n is a, c, g, or t
gtgaactggacagaaagagcangaaacangacctatgncaagacccttgcagaaaggggattcaagcaccctaacagtaagcaaaataaccttttcacctaccttccccgagtagtagaacaaaacagcccgtgccttgcctgagacccgacaatcaaccccttcctgggaggatcaggctgccctcatggagtgccccatgccccaccttgaactgtaatgtcctcaaattanccagatgaatgtcaacaaggccaaagatgactgtaatggagagaattcaccttgcagctcaagggtaggtgaggagaacttatttgcccattggaatgactggatgattcatgagagaagaagttatgtggctaaggagagaaggataactgaccgacttcttttcttcttcctatcaagaaaaaacaaaaatgtttaagaggtctatatttccagttctcatcatattaacagaattatctgagagggtttaatataacaatatatgaataatttggttttattacattttataaataacagtcttagaaaatactccataaactaccaagtttagttgtaa

SEQ ID NO: 326406 - DNA, 505 bp, Homo Sapiens
  misc_feature (23)..(24): n is a, c, g, or t
  misc_feature (46)..(46): n is a, c, g, or t
  misc_feature (64)..(64): n is a, c, g, or t
  misc_feature (105)..(105): n is a, c, g, or t
gcaaataagttttcttccactannccttagctgcaagtgaattctnctccatacaagtcatctntgccttgtgacattccatctggttaatttgagaacaatacnagtcaaaggtgggcaatgggcactccaatgaggcagccttgatcctcccacagaaaagggtttgattgtcggttctctagcaaaggcacagggctgttttgttctactactcagggaaagatattggtacagaaacttttaaacaagtttattgtcgaaagtctcacaccttcatcactatccttgatgcattcacctcccggcactcagaatataagtgagatcaacttgagtccaatggaaatcagcacattccgaatccagttgaggtgaacctgactttcacatttggattgagaatcattggcttttatacctttcttggtttgacgtgcaataaagaagcacattattttagcttctggctactgtgagaacatgaattctgtgattctgtggg

SEQ ID NO: 326407 - DNA, 681 bp, Homo Sapiens
acataaggaaacctaagtcctcggggattataggggaaaccaaggcatgaggttacctaacaaggaaccttagaacataatcttacctggctcagtacaagtaggagagaatggtagcaggtgaatgggcagtgagcatggacctgaggagaaatgaatttgcctaactttcttgctaaataaatgtgcttttggatgctgacatcgagagagtggtgtgtgaagtaccataaatatttgctttattgtctgcgcggtgtgactgccattctgctcattttgccaggtgggccaatgggcactccaaatgaggcagccttgatcctccacagaaaaagggtttgattgtccggttctctaagcaaaggcacagggctgttttgttctactactcagggaaagatattggtacagaaacttttaaacaagtttattgtcgaaagtctcacaccttcatcactatccttgatgcattcactcccggcactcagaatataagtgagatcaacttgagtccaatggaaatcagcacattccgaatccagttgaggtgaacctgactttcacatttggattgagaatcattggcttttatacctttcttggtttgacgtgcaataaagaagcacattattttagcttctggctactgtgagaacatgaattctgtgattctgtggg

SEQ ID NO: 326408 - DNA, 593 bp, Homo Sapiens
  misc_feature (15)..(15): n is a, c, g, or t
  misc_feature (97)..(97): n is a, c, g, or t
  misc_feature (107)..(107): n is a, c, g, or t
  misc_feature (114)..(114): n is a, c, g, or t
tatctagggtaaccnccaggaatccaacttataggttggtgtgtgagtggtgtggcattgtaattctgaaccagtttgaatatcagggccattgggnactggaaaangaagggnttaaatatggaatggggagataagaactttatggtattagatttcagttggggatgtcaatatgaactcatgatttttaaacagcatttaggttgaaccacatgaaattgccagtttttatgccacaaatagtccaaatattaacaatttcatgtgattcaacccaacattttctaactctgctagctgaaagggcctggaggcaatgagcatatcttatgccccatcctggtttctaaatgccattcccaccagaaggaatttgggctccttagggaagtcggtaattataaacctggggcagggattgtacagcttgtgagacttgccacagggatatagaggctcacttgaaagggctcccaccagcctaatttgggaaaatttatgtatcaaaaagaatagtagtggtagtcgtggtaatggattataacacagtgaatttttttaaaaaatcaatgaatttgtaatgacactaa

SEQ ID NO: 326409 - DNA, 565 bp, Homo Sapiens
  misc_feature (352)..(352): n is a, c, g, or t
  misc_feature (392)..(392): n is a, c, g, or t
  misc_feature (408)..(408): n is a, c, g, or t
  misc_feature (454)..(454): n is a, c, g, or t
  misc_feature (484)..(484): n is a, c, g, or t
  misc_feature (497)..(497): n is a, c, g, or t
gactcatactgtgtatattgttttataaactgttttttaattcaataacatatcttgaatttccaagtctaccagacttttctacagaatcaatttaaataattatggtctatcataaatatattactcttctcctatagctggacatttaggttgtttccaatgtttacccttataaacaatgccactatgagcaaccttataggtaaatctttctacaaatttttgacattttcctggagatagatttctgggccatagaaattgaggttgatttggggtggggggagttggtaagatttacctgtaaaggttgatttggggggtggggagttggtaagatttacctgtnaatgcattaacttcctcatctcttttcatcttccatctgntccttcccttttctgnattttgcagattattcaaagccaaaagccaacagagcccccatggngaagtggaggatgctcagatactgctatgnagccctgagaagngaaatgggtccaagcccttgcccaggatagagcgctccaagcgcatcctccggggacccttttaatca

SEQ ID NO: 326410 - DNA, 682 bp, Homo Sapiens
  misc_feature (163)..(163): n is a, c, g, or t
gaaggcgccatcctgcctgccacaggaagggccttggactgagaggaccggagctgactggggattattcaaagccaaaagccaacagagcccccatggagaagtggaggatgctcagatactgctatggagccctgagaagtgaaatgggtccaagcccttncccaggatagagcgctccaagcgcttcctccggggacccttttaatcagtgaattgttcacctctcactgtttcttcccagcagagctaagagacttctagagcctcttgtggatggtcagcgatagccctggtatgaccaggaggtggcgatttctgttctaggtccctcagcaaagactaagcaggacaagcctggctactgtgttaggaggagctgtagggaaagggaaggacaagatgggccaccacatgcctgtgtccactgctggccacacccagagtgctaggggtttgtggcagtgactggggccacctagagcagttctagggttcgtagtcattctctctgagtcatggaaaactgcccaggaggcgagtcccacctaagagagtatgtgtagcactggcacggcctgctgccttgcaaatgaccacatttcatgaaagaaagccagggccacagacaggaaccaaaggaaatcagtcacttaggggaagataacgaatccacaaagtg

SEQ ID NO: 326411 - DNA, 764 bp, Homo Sapiens
  misc_feature (562)..(579): n is a, c, g, or t
ggaaaatgtgaaaacaacaatcattactactttagtagcaagccagggatgaacaaaccccagtgtcttcagagtactttttaaaaatgtgtaactttaaagtcagaaaccagaccagaaaatcccttttccatttctgtgcctacagacagttccccagctctgagaatgcaaactgaagtataagaatgttcttttaagttcttgggcttactggcctcaccattactcatccaagaagaatgtgtgaatttacagggctcatttttgtgatgagttaagagatagtttaataaaactttaataaatcttcttgtctttcacaaaaaaaatctgtttagaactaaggaaagattttttaataaaaataaaatttagttttcctaagaaaagaaaaccatgcttactatatcagctttgtccagtagtacttgctgtgatgatagaagtgttctgtatctgcactgtccatacagtaggttagataatcaacataagtcctcgatcagcagagctgagtaattcactcatattacacggaatgtcataatttggaaaaagnnnnnnnnnnnnnnnnnntcattctataccaatataccaatattcaatttttagcttcctaatttagtatttaaggtttcctcataagtggtttctcaacaaagttttggcaatttttattctaaaacatgaacatacttaatctgctgagcagaattcctttggcaatgttcaattttccatctgtgaaacttgggcatagg

SEQ ID NO: 326412 - DNA, 627 bp, Homo Sapiens
  misc_feature (67)..(116): n is a, c, g, or t
  misc_feature (198)..(215): n is a, c, g, or t
gattacaggcatgagccaccgtgccctgccctttattactatttttttagagacagggtttcactcnnnnnnnnnnnnnnnnnnnnnnnnnnnnnnnnnnnnnnnnnnnnnnnnnncgacttcctgggctcaagcaatcctcctgcctccttccccagtagctgggactacaggtgtacaccaccatgcccagataannnnnnnnnnnnnnnnnngtagagatggggtctcgccatgttgcccaggctggcattagccatattttaagtgctcattggccacatgtgatgtgacagcacagatatagaatatttccatcatcacagaaagttctggaaatagtgctcttctgtagtaagttttctataggggagattgtattttgactcttgagtattcttgaaataatggaacatttggatgctgctttctataaattcatctcatacttagactgatacctcattggtcttccacctgatgagcttcttgaatgaagtgggcacatcacattcactgtatgcctggcatctagcatagagttgatagtggcagatgcttatcagtttcttgtggagttgctgctatttctataacttattactcattgcacttgcttggtctttt

SEQ ID NO: 326413 - DNA, 358 bp, Homo Sapiens
ttaatttttaaattaaacaccaacgaaaacctcattttgtctaagcagattgaagagaaaaaatgagctatactgatagaagctgaaaaaagaaattactgtctacacgactaagaaaaagaccaagcaagtgcaatgagtaataagttatagaaatagcagcaactccacaagaaactgataagcatctgccactatcaactctatgctagatgccagggcatacagtgaatgtgatgtgcccacttcattcaagaaggctcatcaggtgggaaggccaatgagggtatcagtttaaggtatgaggatgaattttataggaaagcaggcatcccaaatgttcccttattttccaggg

SEQ ID NO: 326414 - DNA, 586 bp, Homo Sapiens
  misc_feature (203)..(301): n is a, c, g, or t
tgcatttagcccattttcttcaagtctgtgttgaatttaaaaaagtacatctaaggctatattgtaaagaagaaggcaatttatagattgaaagagtttccatttaaattagatacagtgtttgcatccataggaatgagaaagttcagagaactaaccttgacgtgaactacacttgcatttattgatttattgatttaggnnnnnnnnnnnnnnnnnnnnnnnnnnnnnnnnnnnnnnnnnnnnnnnnnnnnnnnnnnnnnnnnnnnnnnnnnnnnnnnnnnnnnnnnnnnnnnnnnnntatacttgcatttattacagttcaccttatagatcttgtgatgacacaagttaaccacttgtgggtatttggatctcagtgttgcaaaggcagaatacagtgtttgaaagacaggtaataatgagaagagggaaaaaatgtatgtgaaaggaaagggcaagagatgaagaaaagcagtgtaacaaggataagtgattctgtctcctctacttttggaatcaattaaatttttctatattcctctatttggatattcagggtattgaagctcatggtgctagctct

SEQ ID NO: 326415 - DNA, 452 bp, Homo Sapiens
  misc_feature (346)..(346): n is a, c, g, or t
  misc_feature (357)..(357): n is a, c, g, or t
  misc_feature (385)..(385): n is a, c, g, or t
ttggagatcaaacaagatttattcaatttggtcaaagcaagaagttgggagagcaagatgtctcaaatccatcttaacaaaaagaggaagcagtgagtttttaggtagctaaggagtaaaggagaggcagtttcagggaagtgagggggaaaagtctgcgtttctttattctcaggtaacatcttgagcaaccagattcctgggtatcagcagctggtcgcaacgtccttcaaggcattcattccttctgcaaattttttcatgaccctcaagtgaccttctcatgtcttctttaggttgggacttggtgagcagttcaggtgattgattctggtgcagtccagtntgtccagctgnggggttcagtcatttgagactgaacttngagctggatgatcttcttcctgcagtctttggtgttccttggcttacagttgcttctctccaatctc

SEQ ID NO: 326416 - DNA, 734 bp, Homo Sapiens
  misc_feature (54)..(54): n is a, c, g, or t
  misc_feature (498)..(506): n is a, c, g, or t
gctcctgttatatccccaatccccagcagcaagatgaagggatgaaaaaggccncatgctgccttcctttgaggagacttcatctcactggccaacactcagtcacatgtacacctaactgcaaggacagctgaggaatgtaatgggcagccgcttttaaagaagtagagtcaataggaagacaaattccagttccagctcagtctgggtatctgcaaagctgcaaaagatctttaaagacaatttcaagagaatatttccttaaagttggcaatttggagatcatacaaaagcatctgcttttgtgatttaatttagctcatctggccactggaagaatccaaacagtctgccttaattttggatgaatgcatgatggaaattcaataatttagaaagttaaagaaaactcagtatgttaggctgaacaaaacattttttagtaacatatggaaagaatctctgaaaattaagcactgtataattttcctcatactnnnnnnnnngtgaagaaccccattcattccatgtaaaattcactgtttaaaggtaaaaacagattgagtttcccactgaaattattacagtttcatttagggctaatcatttgtcctgaatgtacatcagaatttgttttacccactgatgaacaattgaaggtagggtgtctcatttcacaatataaatcttaacactgtgaggtgtgttatactatgtatgtatcttgttttaag

SEQ ID NO: 326417 - DNA, 294 bp, Homo Sapiens
cccaactaatttagttttgatgcactgtcagatagactaatcactgtctaagattttcctgaatctctgcttcatgttatgcttttcaaggagatgataatagcttgttaaccaccattcacagctcttcaactactcacaagccttcaagaactcaccttaaggagcccactgaatattaaatattaaacagctacaaaagagtgctactaagacaattttgctttgatgagctggataaaatcaagtcagaggttcagtataaactctgacaggactttaataattctccag

SEQ ID NO: 326418 - DNA, 565 bp, Homo Sapiens
atacgtaagcatggtcaaaagctggctagaaacagggttgatgatgggtctttagtgctacgaacttcattatgaacagtatcagtagctcaatgaggtttataaagtaatgacatgattaactttgtttttaatgatctaattgagacactggaaggtgatcaagtagaaaaaagaacaattcttggcccccctttagcgaggtatgtactaaaaatgaccagctaatttgaatattaacttttcaaaaattacagataggaagacaaatcttctacagaccaaatcaaccgctactcaacttaatggctttatatcagctgcaccatgaccccctctcattgtcttggacgatgggggagatgaacgcattggtaatgaaatacccatcagtcctcaactacatccctattttaaaactgaatttgcacaatagctttttgaaaggcctgtcactgctgcactgttgcctctgtcgcacttctctgtgggagctgacattttgctgatacttcatcgggctggaccgcctgctgagagccagtattggtaagggaaatgcata

SEQ ID NO: 326419 - DNA, 512 bp, Homo Sapiens
atcgagccttacttttaatttagtgagtgatgcacaaatgggtgaaatatttaaaaagtttgttgccaaggttctgatcttttagaacagcagtgttaactgtactgaaaaaagtgagtgggagttaaagactccagagaagcagctgctagagactcttaagtgcgagtctataccagcttgtacaacagaagagctagtttcaggggtggcttctccatgtcctaaaatgattagtgatgataattggtcattattatcatctgaaaaaggtccatctctgtcttcagggctttcattgccggttcatcctgatgtgttggatgaaagttgtatgtttgaagtgtctactaacctacctttaagtaaagataatgtgtgtagtgtagaaaagagcaagccctgcgtttcttccatacttcttgaagatctagcagtctctttaacagtaccatcgcctctgaagtcagatggtcatctcagttttttaaagcctgatatgtcgtccagtt

SEQ ID NO: 326420 - DNA, 510 bp, Homo Sapiens
  misc_feature (64)..(64): n is a, c, g, or t
gttctttcatccatttaagaaatgtttattgagggccgaaccaggccaggcactgtgctatgcnctcttttaaaatggctttgattttcatcaagaccaagaggcagagaagagcggagggagaagcagagagggaagatgggggctggtcaggtgtgggtcaggagaccccagcctcaggggtctggtcctgtacagaggcctaggaccaggctgctcactctgattataacacccattctacgggcaccttcaacactgcactgctgggaagagggctttccagtttggctgagagttggaaaaggctaaaaggggagaggaccccagagcaattccccaggatgacaggagctggaggcagcatcccgggaccttaggagaggcctcatgagtttcccaagctcctacctgtcttttgaatcctgaactaaagaaggtagaatgccaggcctttgtaagacctgcaaagtccttaagttctgaacacgttgctacgctgtgaactct

SEQ ID NO: 326421 - DNA, 522 bp, Homo Sapiens
cactttaataatttttgccaaattacgttccaaaattatacttctgttaacagtacttaagattgcccatttttctgataacattcattgatgttgttagtgtttccgattttgccctttacttaaagtcagctgctgtattcttatcacagtgctttctgtgacagatgtttcagatgacagtgcttcctgcctgcaggctcatctgtctgcccctggtagctttcaggctctcaggcaccctccctaatggaccgactggggtcaagggctctgaaaatgctgcccaccctggtccaagggcctcctgaacaggtaggctgggggtgggggtgagtccggtggcttagatgacaaatggaggtagaggacgcattctcgcctgttatttcgatttttttctctcctcaccctgaccgtcacgttctcaccttttccacctcaatccccagtcacactagcttcccaggattaaaatggtctctctctcatgaaacttgtttagaaatctagaagcattaa

SEQ ID NO: 326422 - DNA, 709 bp, Homo Sapiens
  misc_feature (269)..(269): n is a, c, g, or t
gtccgtgtgggctgtgcatgtggacagatggtggcaatggaggacaagtcgcttgactaaggggatggcttcactgtgtgttacatgttgcccaaggtttgtcaatactgatttcatacactctgggtgtttgaaatgccaggatgctgttaaataaagttgtgcaaccaagaaatgaattcatttgctaccaaaaaatgttaagctaggtgggtttttctctaacagtttgtgtcttgcttgcacatctgatgcactcttttatgacntaattggttaaaaccatgaagataggatgttgaaagtcagagaggggaaggcagtcctgagttatgctcaacagctgcttcattgttttcatgtccaaaggggcagaagaaagaacttttcaatctttcagttccattcttagatctcacatcattttacattcacatctagaacagaaaagtgctaaaagatgggacctttgtgtgtaagaaaagataatgatcctagtcatcatttgttgttcttaacaattgttcacaacttcaactatgtaaaatgcaataacttgatagcaatttgccactgcagttcacaaaagattaaatttatcaagtaatcaattttaaataagccatctgacacttcttacacacaagtaaggaaaaagtatatacgttatcctgtttaaacttccatctgctacaaaatttgttaatag

SEQ ID NO: 326423 - DNA, 605 bp, Homo Sapiens
  misc_feature (178)..(178): n is a, c, g, or t
  misc_feature (352)..(352): n is a, c, g, or t
  misc_feature (365)..(365): n is a, c, g, or t
gaggaagggctcatgccccttatttatgggaaccatttcattctaacagaataaacccgagaaggaaaccagagctgggactgctgccgtctgtccggtagagtgaagcaagggggctggaatagggcctgttcagcccctgtccctgctgaaacggctgtggggaggctgggccctngggacggcctctcatagcgtccagcgatccagggaaataggagagccgtgacggcctgaatttcagccagcaggaagaagtagcggtccatccggcaattgttgatgttcccaaagtccttggggcagtgcagccagcccccgggcaaggacagcagtgcccactaggctggangcccaacagtgangcccacccccgacaggcaagaagaagatgccccatgatggcgccctgcatggagcgcggggcctctgagtaggcaaactcccaggcctgggatgctggcaaagatctcactgatcccaatgagcaggtactgagggatctgccaccagatggacagtggtgccgcgttgtacaggacctccccaatctgctgggacacggtctcgttgtggtggatgtagtgtaagcgctccatctccag

SEQ ID NO: 326424 - DNA, 762 bp, Homo Sapiens
  misc_feature (422)..(519): n is a, c, g, or t
tgaaggccttagaatccagaggggccgattaggcgacaccaggggataaacaattgaggtcacactgctcggcatgggcagaagcagctcttcaggagctgtccacacttcaggggtgctcagactgactgctcctaagaattctgctgcatatatttttagccccatctcctgccactgctgacagatattgtgacagtaagtagcagacaggactgtggcttcacctcctccgggcacctgggctacagtgatgagtcagttcacctgatgacaaaccaggggtctggcctttgccaaagcacttaagttctcatgacctggaccgcactggaggccctggctaagtcaggatgtcgtagcctcttcttggttttgccccttggccttgaaattcttttttcttgaataactttaaaaannnnnnnnnnnnnnnnnnnnnnnnnnnnnnnnnnnnnnnnnnnnnnnnnnnnnnnnnnnnnnnnnnnnnnnnnnnnnnnnnnnnnnnnnnnnnnnnnngtgtgagctaccatgcccggccttgaaattctttcttcgctatgtctgcatgttttttgtgttctgtatttatttcttctccaaggaaacagcctacattttccatgtgtccatgtttctgaggccgtgggtgacagtgggaattgcactaatgggggccccagcaggcctgggggctggtcttagcgctagaccttgaacaaggcacttcacctgctggtctccaattttctcctctgtaaa

SEQ ID NO: 326425 - DNA, 651 bp, Homo Sapiens
  misc_feature (150)..(159): n is a, c, g, or t
tcctttctgtaaggcagaggaacgcattctcagaagccaaaagtcccaatgttattatctcctccgcttgctggttgtggacctcgggccagctttcagcatctctgggccccaggccctttcatgactctgcacaagatggagagggtnnnnnnnnnngatacagaaaccagtcactgagatgacttttataaagcagtgagtacagagtgtggtcatggccttcacaggatcccagtcggtgcaattcaaaatgcatgaaaggctcaaatgagatagacaatcgtctccaaccttaatgtaaagtcacttggatagcaatggaaaattgcagattcataggctgaaaaatgtgattcaagatacagatgtcctatggacctacattgagaaacagctttagaatctcagaaatgtaccctgggatcagtagagtgacagagctgatcccaatcgcactgcttcagactcctccagagagccttccgatgatcagcccttgaaatcggtggctgtcatgtgtgtggggcagacaggatgcctcggagctgcacttcaagagccatcttcaacagaatttgtgctcatttttatgacccctatttagccattcaccccaatttcttcacttttccctcattttacataagc

SEQ ID NO: 326426 - DNA, 969 bp, Homo Sapiens
aggaaactaaaagtctgttacatttatttctaactgttgaatgaaaaaaatacattatattctattgccagatcttgaatataccttatctcttaataatcccacaggaatcctaaaaaacagatactatcaatctctactttacagttgaaaaaactgtggcagaaaggttaaatgacttgccccacgtggatttcaggcctgtctgacagagcttcttgaccctgtatgtcttctcggccctgtatgtctatcaagaatgttgtacttttaaatgctatttacatagatgaagattctgcaaactttttcttaaaggccatatattaaatatttcaggccttctgggggcataggagtttctgttgcaaccactctaagtgcccaaagcaaccacagggcaatatgtaaaccaaatgggggcatgtgttctcccaataaaacaggggggccagtttgccacctgctgatgtaggacaggggctgataaatcatagctctacaccaaatccagcccaccacctgttttagtaaacaaagctttattcatgatctagatgtagcctatcatctagaccatttctagacaattgaagggtaattcaccaagctataataatgccctagtttcacagaaacattgtggggaacatccagcgctctttattcctcatcttccttcacaaacaatgttctgattcctaatctgtggcctgtgtggtcccagccctcccaggtgggaggggccttgataaacaccctggtgccctattggtgacctctcattgcaaaggaacagagacattcttcgtcatcatcaatcaaccagtgattcagtttctggaagactcagtacccttggggagctggactgtctggtaatcagaagcatcaattccttttacggtcacatctcggaaaactcttggctccagctcctctttggtaagatcacagtgatctcgtgcc

SEQ ID NO: 326427 - DNA, 775 bp, Homo Sapiens
  misc_feature (502)..(538): n is a, c, g, or t
  misc_feature (580)..(580): n is a, c, g, or t
gtgggcagaagaaagtcataatttctgaagataacaaatgcagcacagaagtggaatagggccatgaatacctgaaaacactaacgttcttttttcctgtggatttatgcatggagggcttcgtataatgacttggtactaccactgctattaggaaccattggaattctgtgataattttggattgctttttaattcaccaagactactgtggatgatgtcagccacattatggtgtgagccctaaatttaaggtcaatatcatgtgctaccttcatatctggtgatactagtattacctcaaatggtctgagtacaaatcccccttcccactctgctcttttgtataatgtgtcctagcctaactacccttttaatcaagaggactaagcagagttcctgtttattatttatttgtaggcaagtttgaatttcatttctacacacagagttaattcaaacaagccagttacagctgggtgtggtgtcgcacacctatggnnnnnnnnnnnnnnnnnnnnnnnnnnnnnnnnnnnnngaaacctggaaagttcaggctgcagtgagctgtaattgcacnactacgctccagcaggagtgacagagcgagaccctgtctcaaaaattaaaaacaagccagttgcatcctttcaagggaatcaggggctatcacaccttcttgattcagaaaagcttacataccacagtccctggttgctctctcttatgcatagtgcaacccccatgtggctatctgtggtgagtggtgtcctct

SEQ ID NO: 326428 - DNA, 895 bp, Homo Sapiens
  misc_feature (67)..(67): n is a, c, g, or t
  misc_feature (207)..(321): n is a, c, g, or t
  misc_feature (325)..(337): n is a, c, g, or t
  misc_feature (362)..(464): n is a, c, g, or t
  misc_feature (489)..(504): n is a, c, g, or t
  misc_feature (544)..(544): n is a, c, g, or t
ttttatttttgagggaggagtatagatgtcaatagaaagagacttgaagtgcaatgggcaaaggganttccccgcagaaccagtattattaagaccattgtaaatccaaagaaactagtaagaattccagactagctgaaatagggctacaacagggcagcagggggagatacggttagaaaagagctaccgtttaaaattccatgnnnnnnnnnnnnnnnnnnnnnnnnnnnnnnnnnnnnnnnnnnnnnnnnnnnnnnnnnnnnnnnnnnnnnnnnnnnnnnnnnnnnnnnnnnnnnnnnnnnnnnnnnnnnnnnnnnntgcnnnnnnnnnnnnnttagccaagtatggtgacatgcccnnnnnnnnnnnnnnnnnnnnnnnnnnnnnnnnnnnnnnnnnnnnnnnnnnnnnnnnnnnnnnnnnnnnnnnnnnnnnnnnnnnnnnnnnnnnnnnnnnnnnnntgacaaagtgaaaccccatctctcnnnnnnnnnnnnnnnngattccaacagtaacaataataatagcagctagcatgtanttgaatacctaaatgccacacattattcctacatgccttaaaccactcctacaaggtagacattctcatttcccagaaaataaactctgggtggttaaaaaatttgcttcagatcatggagtcatgcattaatgaaaccattaaacatggtgataattctgttgtaaattatcaggctagtatctgtctctgtaaaacacagtacttcagatgcttctacctcagagatgcttctctgttaactaaacccctatctgttgagaagttacgcacagactattcaatctggctaagaccacctctatttcttccagtttcaagttccccgcccatgtacatatttctttcttt

SEQ ID NO: 326429 - DNA, 845 bp, Homo Sapiens
aaattattgttctttggctcctgctaggtataactacctatataaatttcatgtgttagaaaacattcaaatagaaatataatcttccctttcaccccatgaggtcagtgcccaaagctatgagttcaggagtccctgccagaggctggggagctggatttcatcttggtcccatcaccaacacatagtatgatttggggtaaatcacattccctttctgggcccatttcctcacctttaagatgaaggaagcaggttggattgtctcaaaggtctgaatgataaaagcatctcaacaaatggagaactgggaagcaccaacatacaaatgagctgcctctactatatccttgcctacaatgacatcaggcacaaatctcaccatatgacaatataattggaatgacacaggacagctgaggagcacacaccccaagccagcaaataaccttttactggcaagtacagtccactaagccttttgacaattattcctgaacaataaagctgtcagcccttgttttaaaaagtacttatagataaagggataaaagggggaaggaggagctagtcatgttataagagtgggttagcagagctggggagatattttaatctgccagacaatgttctgagatggtgtggtaagtgggagatcaggttgtgatcaggatgaatggatatccaggtacacagggcatgacatatgtcagagtttaataagtggaacaatgggaaactcaggaaaggggggctgctaaaggagtgtcttgccattatctggagaaatttccgaactatcactaatattccctacacttacatcaaatagacactcttgtctt

SEQ ID NO: 326430 - DNA, 470 bp, Homo Sapiens
ggggaaattttttaaaaaggaaccacacatttcttttattagaaaaaacattggctggcagaagttggccccatagtcaggggatgaaaaacccactacctccacccacaatcctggatccgtcatccccagtggcttttaagggcacaaaatgaggttgttttcaaaaaacagaaagtgcattctccgccccagagctctttccctagccaggaggcggaccgttgataaacatcccaactttgtcacatacctaggagttgctagtgagagggaccgcgatgtattaagttagggaaattatcggatcttaccatctccagtttctgacttaaaagtcacaaacagacaagcagtgggccaggtagcactgaacacctaagaccaataaagttagctctcccaaagctaaatcagaatacgccgaaaagcaagctaaggttaacaccctccagcaggcaaagcggggc

SEQ ID NO: 326431 - DNA, 748 bp, Homo Sapiens
  misc_feature (722)..(722): n is a, c, g, or t
gccaagagtcaggccctggggatttagaaatgggcatgacatggtaactgacctctctgcaagctcacactaatgtaatgtgataagtactttgccagcagtgtgactaaagctctgtgggaccacaggtggcagtgtgtccgctgagttgtgcacacacattagcagtgggttaaaaggaggtttatggaaagacttggtagaagctgtcttgaggttaggcttgagggccacataggtacagaaaggactgccaccttctgaggcctgagagcatgctgagactcttcagaagcttgagcactaattatttgtctcctttcacaaacgtactttccctcaaacactcatatttaatttggaaagatttcataataattctcatttttgtctagtttctacttggttacaaatatggagcacttcagtcatcgagtatgaaaatccctttttatgccagagtcaacctttgcccctgcaggaagtaaattttactattcttttattgaaaaaataatgacaaatggctaccatgaatgcagttaatggtgtttaaaaagtcatatctagattactcctaagagccttatatatatttgaaaatggtaccctggagtaaataaatttggtgagtaactggagaaactaaacactgttataattttgatgagtgatcctttcaaaccttgtctgtccgtttggggtctgctggattagcctgntgcctggttgattcatgaaacattta

SEQ ID NO: 326432 - DNA, 734 bp, Homo Sapiens
  misc_feature (184)..(184): n is a, c, g, or t
ttttttcttgagtataggtcacattttcctattatccagatagacactgcgaataacaggctacagaaactcagacttctgctatgttccaccaaagagaagtgccctccactcctgttttagtgcagttaacttggctatagtcaaactacaaacttctcccatacagtaagcggcagctganaatcccagttcaattctttcagccttagctgggaaatgtggttcaggggtcagccggacttgggggaaggttaaaactgggcccccccgaaccccttccggctctctccctttctaggatttctctttgttgtgggctgccctgaggattgcctattccagctttagctgcccagcatggaaaagactgggaagtgaccaacaggctaaacagccatcagaaataagaaatttccccagtgcaattctcttcttcccaaatgccagcccccacctctctggtctccacctgccctttggttactcttctagtgtcttcaggtagttcttgtatttttgtccacagtttacacatgttatcaatgggaggactgggcccacagtagctactcagttattaattgttgtagctggacatggtggtgtgcacctacagtcccagctacttaggaggttgaggtgggaggactgcttgagcccaggaatcctaggctgcagtgagctagaggcaccactgcactccagccagggcaacagactctgtcccttag

SEQ ID NO: 326433 - DNA, 1056 bp, Homo Sapiens
  misc_feature (357)..(357): n is a, c, g, or t
  misc_feature (389)..(389): n is a, c, g, or t
  misc_feature (491)..(540): n is a, c, g, or t
  misc_feature (775)..(775): n is a, c, g, or t
acagttggaattttgttctaaggatgatggaagccattggaaggttttctttgccaaagtgatgtgatctgatagaaggttttatgaagcccacgttgtctactgtgcagagaatggagtaacaggccaagaggaaccgtagggggaccagttaagaggcagagacagtgaagaggcaaatataatttctgacctacgtaatgatgtatgcacaagaagcctctcttgaatgtattaattcagtaaacagttatggagtccttacaatgtgctagtgggactttgaagatgaatccaaatttggatcctggcctgggaaggcttcaaagcccaatatgggagggtctcactcttatncttcgttcttctccccgcacttcccaccaccnttacttaactcccttggcatgttacatccttgaataaatatgcccaaggcagatgtggtaatgaagattggttgagaattctgaaggcagacgtcccagacnnnnnnnnnnnnnnnnnnnnnnnnnnnnnnnnnnnnnnnnnnnnnnnnnnagctagttaccaccagccccaaccccaatcctcttcccacctcacagaatggggagaggattcagtgggcagtccctggcataggggtcacagaatctacaccaccaaatatcattcatattctaattctgtattctgtgtcccctattgccccaagataagttcatttaaaacaaaaaagcttcctatctcaggtagaaaacccatcatcactgggcattgtcttcccagtgantctgagcagaaacaacggggaacgtatgtcttcattgtgactcagcgagcaaagagatggagtcttttccaagaagaaagtgggagatttgggaccactgacatatttggcccactgattccattcccctagaccaacacgtgttcatcaaattgcatcactcttatggggaacttaatgcaactccggtgcccattgcattagtttttgatgatggaattctctttgtgaacttgaacttgaggggtctggctacccctctgagacttcttttttgagat

SEQ ID NO: 326434 - DNA, 926 bp, Homo Sapiens
  misc_feature (87)..(197): n is a, c, g, or t
tgagctcaagcaatcctcttgccttagcctcctgagcagctgagactacaggcatgcgccactgtgcccaggtattttttaaaattnnnnnnnnnnnnnnnnnnnnnnnnnnnnnnnnnnnnnnnnnnnnnnnnnnnnnnnnnnnnnnnnnnnnnnnnnnnnnnnnnnnnnnnnnnnnnnnnnnnnnnnnnnnnnnncacgtctggcctggaaatttttaaaaaacatattttcaggatcaagttagaaattataatggaattgtaaaaatactaaaaattgggtgataatgacaacatcacataccaaaatttgtggggttcagtaaaagctctatttcaatctaaatttatagtgtaagtgcttgtattaccaaaataataaaggaagaacattaaagttcaactaataaagtagaaaagaaaccacagaataaactaagagaaagcagaagatagtaaactattaaaaattgaagaaagtaaaaataatattagaaaatagtaacaataacagaaaagtcaagtaaacagaaaaaacaaataaaaggctcaaagaaagcaaatttgtttcattgaacagtctaacaaacaatacagaactttggaaagaatagtcaaggaaaacaaaaagtcacatatatatttcttataaatagaaaagtagacctaactatagaaaagcagaattaaaagataaagataaaattattaattagcttatcaataaattagaagaaatggaaaaatttatagaaaagtatatattaattttgattcaagaaggaatacaggactactactattgtccatgataaagtaatagggccagatttaacttcctgccttaaatacagggaggactatagaaaatatatgccctgagagttttcatatattttacaagagacagaacagggtagcctc

SEQ ID NO: 326435 - DNA, 659 bp, Homo Sapiens
  misc_feature (389)..(389): n is a, c, g, or t
  misc_feature (482)..(482): n is a, c, g, or t
atattcatttcctcctcaggtataacgtttacaaatacatttatgtgaattatttgagtgaatctgtctttattcataaaaactgaaatagatttgcaaaaaaaataattttgcgagtaaattatcttctgcttgtgacttgcaataacggggaaagaattcgggcagtatgatttaacagaaatgtgcttagtaggagccatggtttaaaggtatgtgtgcccccaaattcatttgttggaaactaagacccattttgacagtattcagatatggggcctttaggatgtgattaagtcatgaaggcaccattctcatgaattggattggtgaccttttaaaaagggctcggttgggtccctgttgaccttctgccttccgccatgtgnagaatgcagcaacagggtgccatcttagaaacagagagcagccctcactagacaccagaaatctgttggtgacttgatcttggacttctcagncttcgtgaactataattaacaaattttagtcctttataattacactgtccctgtctaaggtgttttggtatagaagcccgagtggaccgggtggtagactaagatctaattaactctgtaaagtcaatataaccgagaatttctctaagatattttcaggtggttgcagtctattgg

SEQ ID NO: 326436 - DNA, 461 bp, Homo Sapiens
tatattgaatcctgggccagatattgagtagatattggggatataaaaagaacaaagtacaaagttccttcttttaaaaaagcatatggtataatagaggagactcatacttgtacaactaactacaataattttaccccctgggagtgatggtgatagttaaggtgtactgaagatggcgtcacagaacgcgtcattgaagtgtacgtttgatctatataagagacacaggggaaagttatttccaggtggaggtaaaaacaaagttaaagagcttaacagtctcagcaatggcttgttgtctaggttaacagtgtgtgtcaacgggtagtcgagggagatagggatagcaattagaggaccaggctgtctcccttttaggtgggtggaagcaacgggatttgaaggctcagtgtatgaaatttgatgataactgactcagcactaacattctagtttag

SEQ ID NO: 326437 - DNA, 800 bp, Homo Sapiens
  misc_feature (57)..(100): n is a, c, g, or t
  misc_feature (102)..(102): n is a, c, g, or t
attcccttatttattttaggtttatgggattgtcctgctccctttgaagagcagggnnnnnnnnnnnnnnnnnnnnnnnnnnnnnnnnnnnnnnnnnnnnancatggggattcagccaatgcggctggtgcttaagctgggatacccaggtacccagggtgtcagtccagagaggtccaaaaaatggtcttggtgatcctgtggattactagacccactcacgaacaagaaccatggaaggtcagggtgagtgggagggaaaacaggtcagaccacgaacagagagattgaggagaaagcagtaacattgtggttccactaaactccagtgcaggcttcagatttaattgggttctggatgtgggctaatgttagagctggggttaagtttggggttagttgaattatgaatgaggttgaggtcagatttgaggttgggattagagttaaggttgggattagggttagaaatacagctagaattgaggctcaggtttatggctgggatttgtgttacggataaggaatagagttttagtttcatttacagctctgcctgggaatacagttagggctaaatcaaaggctgggtttagattgatttagcattgggttagaactaagtttgagattcacattgaaataggctgtggttagggttggaacatggtttaaagacacgtaagcagcgggagttgatggggatcaaagatgaggttttatttctaatatagaaagacttcagcctccatctgctaaatccaggtttggctagaattttcaatccttagtgcggggag

SEQ ID NO: 326438 - DNA, 432 bp, Homo Sapiens
  misc_feature (386)..(386): n is a, c, g, or t
ctcccactcaccctgaccttccatggttcttgttcgtgagtgggtctagtaatccacaggatcaccaagaccattttttggacctctctggactgacaccctgggtacctggtatcccagcttaggcaccagccgcattggctgaatccccatgtttctccaggtctctgtttccccatctgtaaaatggggataatgatccctgctcttcaaagggagcaggacaatcccataaacctaaaaataaataaggaaataaagatattcattgtgtacatctggtaggtctcagagcgccctgttattgttgggagttcaggtgcaacggcttggaatgcagagacgcgtggactccttgtgtttccttaatgttctgacttattttntcccagaggggtgggccctggcagcatccctgaaacgcttgagagg

SEQ ID NO: 326439 - DNA, 600 bp, Homo Sapiens
gggataacagactgattttattatttaccgaacgcagtaggcgctcggcagatcaatttcaatacaacaatggactataaatgccaccagcaatctggcagtagcagtaatcaacaaaacatgttgttctaaatgctgcataataaattgactacaataaactcataattactctactggctacatttcaaagttagcactagaaaaatcaaatcaccaatttggacttggcattaacatcctcggatcactcctgcctctacagctgcagctgggagatgcaggtgccatgtgctgtcccggagggcggaggccacagcatctggggattatgccaggaccctctccggggcagataaagagggtcataaaggagcagtcacttcttctggggtgtgctgagcccacagaggagaaaagctcatggccacgtggctctggcacagggctctccagccacccagaagtgccccctggactgtggggacccactgatgtggcctctgccgtgagactgggttcccatgtcctgtcctccaggcccagccagaatgcgctacagggttaaagagctttagaaaaggtttcagggctgggcac

SEQ ID NO: 326440 - DNA, 536 bp, Homo Sapiens
  misc_feature (149)..(149): n is a, c, g, or t
tgatatcctagcaatcaagtcacatttaaagatcaggaggaaaacaatgtaacagctttttaagtggcagccaggttactcaaaagtgtggatcaattcctgacaaaacctgaattaccatattaacaagatctaaaagccagtagcangaaataacagagagcaagaataaacttctctaggtgaccattcatccccaaatctttactgaattgctaatctttctgcagagctgaagtcgattcctttaaagatccttaatattccggtcctcgccccacctcccatcagaggggtaggtcttaacattatctcatttgctacaaagtagtattcagtgggcttttaaaattttatgaagagcgttgaaatgcactatcgaaaaatttaaagctctatgtattcagaaattgacagtactttaaacaaaaccgaaaaaaaacctagatatcccttcatcttccttaaagatgacctctccgcgctctctccaacaattttccccatcaacgttgccaagacacttatccattgta

SEQ ID NO: 326441 - DNA, 739 bp, Homo Sapiens
ttgagatactcggggttgcccactgcagtgctgtgggggtcctggtagtgtgggtctctgctgggcgcggggttcagaggctgattgtgatagacaggattctgcacagagccagcgggccttttgggaacggactggtttatgtattcaggcactgggaggaaggtgtcgtctatgctgtcctcagtcaaggcgcctgtggggtctgagctgtatcgctgcaagaagctgtcttccttgatgggacactttgcagcccatttctatcaatgcaagccacggtggaattgttgctggttgcactcagagagctcaggaggggagtccgtgacgtggaggggctgctgaagaagccctgctgtgggatgaggtactcgtcggcatccaccacgtcgtccatgtcttcttcatccatcagggcacggtagaagttggagtctgtaggacttggcaaatgcattctttcatccccctgaatgacaaggtagcgctgggggtctcgggccattttggagaattcgatgatcaactcacggaactttgggcgactatctgcgtctatcatccagcacttgaccatgatcatgtagacatcgatggtacatatgggtggctgagggaggcgttctcctttctccaggatggaggagatctcgctggcagggattccgtcatatggcttggatccaaaggtcatcaactcccaaacagtcaccacgtagctccagacatcactctg

SEQ ID NO: 326442 - DNA, 980 bp, Homo Sapiens
  misc_feature (15)..(15): n is a, c, g, or t
  misc_feature (70)..(70): n is a, c, g, or t
  misc_feature (87)..(87): n is a, c, g, or t
  misc_feature (117)..(117): n is a, c, g, or t
  misc_feature (262)..(262): n is a, c, g, or t
  misc_feature (623)..(692): n is a, c, g, or t
ttaattcacttgggnaaccaagccacaaaatgaaaaagcatcgaaatgcagaagaacagtgtaatcacanccccaacccaacatggncccaccctgcacttgtgggaaggtaatccnaaggtacaactatttagcttcccgaatttgcttccaaggctctatagctctagattttggtggtagcaaatttatcgggtggagggattgatcggagagggcagatcctcaggttcaacacaagaactggattggaaaaggtcantgctaggttgatgtgagcatcttgggtacatagcccattgcccttaatgatggtttcttactgtttctctgggttgtttgtcagatagcctttaattttaattatttttccttccctttgctaccttggcccttttaaattcttgtgtttaacctaatgctcagccttggtactccattcccttctccttcccctctttgctactattaaaagtcggagaagtggaattcaaacgttgaaatttccacggggctatagttgtatcttaataatgcccaagtgtcaaaacaaccccattaaaatgccgcctgattaaataatgtgctgctaaatatagtgcacatgaaaacagcaagactgnnnnnnnnnnnnnnnnnnnnnnnnnnnnnnnnnnnnnnnnnnnnnnnnnnnnnnnnnnnnnnnnnnnnnncttttaataaacagtttacttttatttaacttgttgtgcaaaatcacgcttgggggatgtgggagggtggagtcttaataggggggtgggagttttaattactatagattagttgtcatcgcctcttgcccttggtttccaaagcccagacttttgccaaggactggactaggtatctgatgcccatctggacatttttcttgcagttcttggatatgtagatcagagacacctgtactcttcactgtaggttcccttccttggcttggccatatcatcatcttccag

SEQ ID NO: 326443 - DNA, 880 bp, Homo Sapiens
  misc_feature (579)..(605): n is a, c, g, or t
tccatagaagtgttatcttatcataaatcttgagaactcctagagtcacagaccccagctgcttttgtcaaactatttctgtggcaaagatgtattttaaatttcagtttagggttccagaaattcagcttgcctagtgcaggggaggtggcctttcccaaagtcctggaactcatgctgtgagccagtgtagttttccccagctttaactttgggctgcttctgtttcctgaagctagtctttaatagggcatttgcttagaatcagcaggatctaaagacagggtatgcagtgaggagctggagtccaaagcttcccacctgtgtaacctttagggtgggaaggtgtcgtcaatatgtcttccaagtgacccccatgtttctaagggacttcagcctgcctgttttttgaatgtagtgctcattgatcctgggccctgtctactgcagagcttaatgaacagcttctccccattcttccccctctctgaaattttcagctgtgtggttgttgctgttgttttctaaatactagtagccatgaggaaacaggtagatcataaaagtatcaaactcaannnnnnnnnnnnnnnnnnnnnnnnnnnggcattttatcataggatatggtcaagagaccggttgtaaaaactcagatgtgaggaagaaaaccattaggaggtgataaggattcaacaatttaagtaatataacttatgtacttcctatgtcaaactttagggaggcagatgttaacaatacagtcctcaaggagccggttactaacagggagactagtatattaggtggtggcggcaatggttaggagggggaagtttctcgacagcaattgcagggtattgaagctcatggtgctagctct

SEQ ID NO: 326444 - DNA, 1053 bp, Homo Sapiens
  misc_feature (106)..(122): n is a, c, g, or t
atgtttatccatttattaaaatatttaaagaagcaatactttattaacattgaggactggtgttccatttggcggggggagaggaataggcacactttgtggatcnnnnnnnnnnnnnnnnncctgttaccatgtaaataccccagcttcctcccccaaccagcccctggccctgctgcttatttgcaggggcctctgaggaaataaaaaacacagagcagaaaacaacaatggattacagattcactgacaaatagacaaatgcaattccacaaatcatatagccaagcaaggtctcatataggatggaatggtgctaatgggtttggttgctttggtattattttccacctctcgtgaaagaaaaattcttccatttgtgtcctgagggaagatgacgttgaccctgactgtttcttctggcccagttttattaaggtaaaaaatctctttcttattcttaacctgctcttatggacacagcacagggcctttctggagaaggggacccataactgtttacctcctatagtattgacaccagaagcagttggtggcagttcaaatgtatcggctttttcttctccactattcttctggccaggaattgcctacccaaccaattcgtcagaaagtgctaccaaagatacaaccaaaccctagagctttgggtcttaatgatgtctgaacataattgagatggatatttggtgtttggtcccaccacccaagcaattgtattaattactgcaagtggttaacaaagtccttaaaggagctcacactcccagagctaagacaactcccttgaggcatcacttcttgctttgtttccaagtgagcatatgcaagaacaggtgcttggcaagctatcttcctttttgggaaactactggtaacttagcaatttaggaggtaactgagggattgagcaagccacacctgctcctgggccttgtcatctatcaactgtgctccatgagctgactctagccccaaatactagtggtttcagtcaatatcattctgactcagagtgggaggacagggtag

SEQ ID NO: 326445 - DNA, 1270 bp, Homo Sapiens
agtcacaggagacatttgtgcacacaatcgaacatatcttaatgatattgatgaatgattttgacacctattatgttcctttctcattgggcttggccattctgtggctgactatatgggcactgcatttcctaatcttagagagctctaacgccaagacatctgccttgtacatctcaggtggcctcctgtaacctgtgctgtctgtttcttgcagatttggacacctcccacactgagtccccaaccccccatgactcaaattcacaccgccctctactgcaggcgtttataacagatgcaaagctaaatctaccgacaaggacaatgaccagacaagatggggaaactggagatggagccaaagaaaatattgtttacctctaattgtgttgtcatttttccaaacaaaacaaaacactggcacttttgggagaaactttttgtctccattccttatgtatgtgtgattgtctgtgtccaaattgctttaagaataatatttaatatttcctggaagctcatttttttggcatgagtctaattaaattattgaaagccaccctgtttgtataatctttaacttatcaaatctaatttcagatttctggaggagaaactaacttgaataagcaggactattttaaaagttgttttgacgctagagtaaaattccatgtcacattttctacccaatcatctggatttcaagattccttttaagatctcaatgaagcaatttggatttaaagagtggtattcacaaggggtgaactttcacagtcagggcagttgcctcagtgcccacataggcagaggaggatgtgggaaagggcttttctcagctagtttttgtgtgctcatttcttctggggagcatttaaaagtggtgatctgtttacagttcactatttcaactggggcacgtgttgtgattggtcagtcactgaggccggggtacagtccggacttgcttagtacctaagcctaatgctggtggggtttcaagacatggttcagcatcatcttttaacaaggcccagaggcccagagcccgcatcaagtcattttgatgtaaatagtgaactttgttagagccctcacttctatcaatcagctgtcctgtccctgccagcacctggagcaccaactaccactccctggaaagaacccttccctgcagttttttaaggacaaaactgcccactcctcattaagtttgctgcctggatacacttttccacaaaggaaaactggcatatcctgcctt

SEQ ID NO: 326446 - DNA, 457 bp, Homo Sapiens
gtacaagatatttattgacaccaaaatacatacaagtatttccgaacaagatgaaaatatctcctggtttctcacacagagacccatactactcggaaggcaggatatgccagttttcctttgtggaaaagtgtatccaggcagcaaacttaatgaggagtgggcagttttgtccttaaaaaactgcagggaagggttctttccagggagtggtagttggtgctccaggtgctggcagggacaggacagctgattgatagaagtgagggctctaacaaagttcactatttacatcaaaatgacttgatgcgggctctgggcctctgggctttgtttaaaagatgatgctgaaccatgtcttgaaaccccaccagcattagggcttaggtactaagcaagtccggactgtatcccgggcttcagtgactgaccaatcacaacacgtgcccagttggat

SEQ ID NO: 326447 - DNA, 763 bp, Homo Sapiens
  misc_feature (165)..(217): n is a, c, g, or t
cacatttcctttgaaacattctataatcgttcctttgccctacttcagaccaacttaacgcactccccattggtccaaatgagttttgctatacgaagatgctgataataatagcagcagtggattattctgctaaaaccattgcctcgttaatcctcagtcccnnnnnnnnnnnnnnnnnnnnnnnnnnnnnnnnnnnnnnnnnnnnnnnnnnnnntttcacagctggggagggagccagctcatccctctgtccaggcccaagctctctcccgcttgccttcctgcctctgcaacctcagagcatcccccatctggttctactgcctgtgctagtcgtgcaggagccaaaagacacgtctttagtgctaaggactggagaagccatgccctccagcctctgtgaatgggtcatatgtaacatgagcctggagaaattatttgaaaccaaaaggcaagcctctaaaccaggctgctgcttcaatggccgccggtgacggcagaaccaaatttagtgctgtgggcaggtccacacttatcaaatagagaagctcatttttcttccggctcacatcaagcaatgaaaaatgttcacacataccccacacacacacatgctttccggaggggtccatgtggctagaggctggaagatgtggatgagaggagcctggcaggtaagcccagggaagatgacattcagcttcccagacagcatcacactgtagtcatgggggcaggaggcagccgcgggtgaagggag

SEQ ID NO: 326448 - DNA, 854 bp, Homo Sapiens
acgagactggtgaaattctaaggaggaacaagtttctggacagacgttggtaatttgtgatcattattaacaacagccctatttcttgtaggcctcgtgaaagcttgtttgattcggtcagtaaactccctgttgttttctctgtcaagagcttccagtcaaagctctcggtgtggtccattaagaggtgtccctttcagctggctaatcaggaaaaatataattaaatctaactgatgagtaaggttgtcatctaacagggcaggggttaggtgagaataacatgaatttccaagatctcactctataaagaggaaatgaggagccagaaacacagtggctgggaaatttaaagtatccatgcatttaaaggagcaaataatagtgtgctaaaggaagtgcacagagcagattccagtggaacagagtcaggtaggaaagcttagcactgaagaaaagcactgtccaaactgacttgaagggcgggcagccgttgtgtaagtcaacaccctggagtagggagggactggatgcatgccactgaggcccaaactaagaatggtcaaaatcttttgaccattttaaaagagttctttatgtgttctggatctaagtcttttgtgagacatgtatttcaagtattgctctctccatctataacttcccttttaattatttaacagtatcttttgttaaataattttaattcaatgaaatccgatttattgatgttttcctttatggtttatgccttcagtgttctacggaatctgcttaacccaaggttatgaagatgtctttttaggtttatctctagaaattttatagttttagttttgtaaatattttggtca

SEQ ID NO: 326449 - DNA, 693 bp, Homo Sapiens
tcctaatttataaaatggggatattaaaaaaccctgacactagtccttcaatgtaaataaggctaagagagaaaaataaacttaataaaaaccctgacaactgtaggtctatagcatgctcagcatataatagacactctatgaattgtagcaattattttattactgagtcagggattttaattgattgtctcagcatagatggcttgttattaagtagtaagacataaagcagctttctcatccttacttatgaaaagcttcttgaaacaataatgattttggggatttaccataaaattaatttgggtgaaatagtcagccttgagtatagataaggtacgcaggtgaggggagcgcaggctcatgtcagtgactcaaaatgtgtccctaaaacaattgtgaaggagaagtcggtgcctatctacaaatccctttagtaaagttccttcagtcttcagctgaaaaatgaagagactggcctaatgtaaaaaattctcagaagttctttctggttctaataccatgattcactaactgctattctgcagtacatcctgcctgaccgctattgaaagcaagcaagggcaaccctggggcagctggaaccggcccagcaacatcagcaatacacaccctaggcagtgtttctcaaattgtgttgctcagaatagtaataagtgtcccctacta

SEQ ID NO: 326450 - DNA, 740 bp, Homo Sapiens
gagcttttcagacagcagtaaatgtctgaaaaaatatcaaaaacagcataaagacaagattatgtagctctaattatacgtatataattataaaaaacaatgtgcaagggttatattttaaggtcttttaaaatctgattttgatcataccaaatgacataatattttttatgggtagccttttactttcaagacttaattttcaggacttgtacaagttccttcttacattctttccctctcacaccatcctactggagaaagcatacttttatgctaagatcttactttaagctttttatgtgaacaaaagatgttcatatagtaagtattacttccgtagtcctcaaatttactataacttttgtacttagtgtatgttttatatttggaaaacagcactacgcttagttttcctgtagttcctgagtgatgtctgtgtgttccttgcctgcccttttttgtgagcacagattagtctgttatccatggctggcacttcacttatgatcctttctctgctagatttttatgcagctctctatgaagtttcatggcccatagatattcaaaagcaagatattctatacatatgtgtatatgtatatatactccttatgttaatactaaagtgtttatgctgagttgctgcctttccccgtcatgtatccatgtgcatgctcttagagaccttgaatggttgagggtaaagtgatttattagtaattctacttgccttg

SEQ ID NO: 326451 - DNA, 749 bp, Homo Sapiens
  misc_feature (326)..(347): n is a, c, g, or t
agataaaacacaaatttattcttacagttctgtagtttagaagtctgacacaagtttcgctgggctaaaaatcaaggtatcggcaggcctgttttcttctctggagtttctaaaagaaaatccgcttccttgcctcttcgctgctagaagccacctagactcgtcagtctgtgatctctccctccatcttcaatgccagcaatgttgcatctgcctgaccattctcctactcctatctctaacacacttctctctcactcttccatttttaatgggcacttgtgattacattgggcccacccaaaattccaaggtactctccccannnnnnnnnnnnnnnnnnnnnncttctaaatctccctattttaatgtcagctgattagcactcttaattcccctttgccatgtgacatgccaaatttacaggttctgaaggcctgcctgaaagtgacactaacagaagcagcaaagggtgaagagagagaccaaatctcatgactttgttacagcccttcgatttgactgtagcgaaaccagaaatgtctctgggcttttcagttatatgaaccttctcctcttaagtcagtttgagttggggtccccaaacttgcaaatgagagtcttgattgttatatatgacagcatgtgttatgtttgatgttgaatacatttaagttatttttgttttattttaatggcaataagtacatactaaagtaatgatgagtatgggaatatcaagagacaca

SEQ ID NO: 326452 - DNA, 761 bp, Homo Sapiens
ggtgaaataaaagtattttgatttggaggaaggaacttaatactaaaaatagtctcaatggaatagattgcagggatacctgttattatcagtaattctgtgatagcgaaacaaacataattgttactgtgtattgggtgctcactctgttccaggaaagtactataaagtattgtatttacgtaaattattgtatttaatactcatagtgtccctgtgagcggtaataacattaccattttacagatgggaaaactgagactcagagaattaaataccagcctcaaatcacgtagctaataaagaggtgaatctgctcaagctgtaaaccatgaggccagctaggcataggggatgtgttctgggatgaggattcttttacattcttcctcagtgagactcccctcccctcttcttagaagaccagggagctcttgctttactttttacctttcctgccagggtggatgaatattattccttggactttataaggctgtggcctagatgctgagtccctgtcttctggtgtctgggaagtgtggcggccccttggccagtccatttctttagtcgttctgtcactcttcctcaatggatactgccccagtgtagaggaatccagaacataccccaagcagttcctccctgtacagtttcactttattaaaaggattataattagggtttcattggatgttttattattccccatgcttttttcctgatggaaattatttcgttgttgagatccgtctcaa

SEQ ID NO: 326453 - DNA, 778 bp, Homo Sapiens
  misc_feature (57)..(57): n is a, c, g, or t
  misc_feature (333)..(333): n is a, c, g, or t
ggccaaagaagccacgcccggccacaccacccacgcctgcggtgtgaccgtgagagntctccaaacctctctgggccggggcagaggagacccgctacatggcaggaaggggaagtgaggccacacctgacccctctgtaaacaccccctcttcgcttccaggatccacaaggaatgcctcggcctccccatctgctgtcgccagcactgacagctcagcagccacttccaaagccaagcccagcctggcgttccccagtgtgccctgggcccagcatggccccccagggcttctggccgggaggatgactcttctttgcccccggccacttnggagttcaagtttcgagcctgaggactttgccttcccctccacggccccgagcccccaggctggcctcaggggggctctgcgccaagaggcctggtgtgcgctggccttggcctaggtccccaggccagcccatgtcaggggaacagcctggaacagaccacccactgagtcacctccgtgcctgctttgctccagcacagcagagaccagcaggccccccaacccagagactgggtctgctggagtctccacacagtggtggggaggccttctggacagacggcagtcgggccccagagcaagaaggctggtgagggaagggctcagcttcccacccccacgtacagcaagggactccccaggtgcggcccaaggcttccggaccacactggccccctgcggcgggaggccaacgcagggcaccaccaccaccaacttgaattc

SEQ ID NO: 326454 - DNA, 352 bp, Homo Sapiens
tttttttgcaaatagctgccatttattgagcatgcctatgttctggtgtaatcccaaaaagagcctgcacgggaaggcactgttctttgcttcatgtcacagatgaggatgcttccaggtagagaggttgggaagattccctttgcgcctttcctcttgcattttcacaggggagccttccaccccgggggttctgtgcccggctggcttcacagcttgttcagttgcacgtgctcctggcctcctccttgtgagagggcctgggccagggctgcggggaagtcacactctgggttgaaaatgttccaactctgtgtggaagagctatcttaaactgcctcttgcatttcac

SEQ ID NO: 326455 - DNA, 711 bp, Homo Sapiens
gcaagagaaaaggtcatatggattatattttgctgctcacagcttttgacacagtcaaacatctatgacaagtagttgggttcaaaacattcaaaagaaagatcttggcagacaaggtcacccactgtcacttgaaccatgggggggtcacaacacagtgaccggacgaagttgttccaattggttttccaatgcaattcgttcttgatgaacctccttgagctgctgctggagctcactgttcagccgagccagcactgcgtttgcctctttatttttgcggatagcagtttgaatggccttcttctgtttggaagactgcttttggactgttggatgcggtttcatggttgccgcagaagctggcccacttgcagcagtgggaaggctcttggttttctgtagcttggttttctggtctgaatttcctacgaatgggctttgatggtggctgagaatacagtacatccttctttgctggactactttctgcagcctgggatggggctctgctcagctgtgggagtaactcggcctccgacacttgttcagactgtgatggacaaggtcttggagggagcgcaggtggtgggggtaacaatcctgacttggtagctgaaactgcaagcttcactgaagttatcagaagcattttctttccctactgtagattttattacccagactttttactttttggtgttcaccttg

SEQ ID NO: 326456 - DNA, 584 bp, Homo Sapiens
  misc_feature (169)..(236): n is a, c, g, or t
  misc_feature (242)..(256): n is a, c, g, or t
  misc_feature (341)..(386): n is a, c, g, or t
ttttggagaaaatgttgtagtttattatgatttctcatcatcatacatttactgtgtccacaaggaaataatactctgatagtctctacaaaagtttcttttagttatttgtgattcctccctcaaggtatttataacctatttagagaaaacacagacaaatctatgnnnnnnnnnnnnnnnnnnnnnnnnnnnnnnnnnnnnnnnnnnnnnnnnnnnnnnnnnnnnnnnnnnnnacattnnnnnnnnnnnnnnntcagccaggcatggtggcacgtgcctgtggtcccagctacttgggaggcttggggcaggaagatcacttgagcccaagaattcannnnnnnnnnnnnnnnnnnnnnnnnnnnnnnnnnnnnnnnnnnnnnagaaggcaacacctcatttctgaaaaataaatagaacatttttaaaacaattgaatgtttctccttctaaggagatgtaaaagcaagaataataatttgtcttatataacattttgatttgaatattctgtaaaattgtaatcacatttaatattgttggggagtaagtattatatgatgttacttcataactttcct

SEQ ID NO: 326457 - DNA, 693 bp, Homo Sapiens
  misc_feature (11)..(11): n is a, c, g, or t
gaggaatgaanctgctaatactcacctttacaagataaagccaaattatcttccaaaatttttctatcaggttacagtctcaccaaaacataggagttatcattaatctatatatcctaagtatcagtccttaaaattttgactcatttttctagtttttcaaaaaagagtgtatatgagggatgtaatcaaacagcattaagagcataagcttgtagacatttatcgagcatgtggcttgtgtcaggccctatgcaatttgcttttttaataatagtttcactcatcctcatgatatataaaacatactaattaaactgaatgaaataaaatctacaggccagcagggactcttgagaattctctacttagtgccagtacatgcctatggatttgataattatcttaaagaaagaatgagtctttaaatcccagatacctacacacagactttctctgggttccttctaggagcaaggtggccaattgttccagtttgtctaggactgaggggtttcctgaaagctagactttcagtgcaaaaaccaggaaagtcccatataaatgaagatagctggccaaccttctggagtcaggacacatgggttcttgtccttttctgccacttactagcaacgtgatctcaggaataaccacttccctctctaagcctttctagatgtgaagtttagg

SEQ ID NO: 326458 - DNA, 595 bp, Homo Sapiens
ctttcacccaaaaagcgtttttacggtcaggatgtgcccgtagtcaccaacagtaactgctgggagacacgtcagggagaggtagctgtggtcactgccttgtacaacagccaaaagcccaaagcaggagggaccctggccttctcccagcacacaacgagtgggagctctgtgtgctggccggcatttcctgtcacgttcaataggacacgttcactcttcatacttcttcaattctaaatttcagaagtaatttgtcactttagaggagggcgtcattaataaccattatttagaactgtcgagtcttcctctctgtgagtgtctgagttaagcatccccaaaattggccttgttggtggcaagcagtgcccccacactgacagattgagactaccccacccccaccgacgccctcacaacccagttcttccccgtctgcctttaatcaccgcgaggggggcgacagggaatggctacggcatgtcctcctggaattcattagcgttattaccaaagaccgtgttgtaaattgagattttttttaactgctaggaaaaaatttctccttaactatttcattttattgtactta

SEQ ID NO: 326459 - DNA, 755 bp, Homo Sapiens
ttttaaaagcagggccccagaggcatttattgaaaacacagcatccaaaacacgacatctaggccaggcgcgatggttacagtgatgagagggtcactagacaattatccacaattctacgacatgagacagagactcagcaacagtcacagacagaagggtcatgtgttccttcctgggcagggctgggtgtggcaggtgcggcgtggaggctgcgtcctggcggtttgctcccaggcaaggggtacggggggccggcttggcctgggtggggacctcaagtctgagggtgacgatggctgaatctacctcgcttatgtctcagggacggtcacccatacctaggatgaccccagcccagaccctagaaggtctgatggccatcccaaagtccccccgcgaggagaagagttcccttggcaggggtgacacatttcccggtcaacaagccacaacacagtggtgcctgcactctctcagctgttgccacaacacttggtgctggaattttctcccacgtagtgaaacttttaagggacacatgaataatttaaaaagtcacacaaaactctacgaaaggcaggaatcctcactctgctgagagctacctcctgagatgtcgcttccggaccccggcagagggcaggagcgacatcagctcggcaggaggatccttgccagcgcgagggctggctctggttattataaataatctaatttaaatacgcacatacacacagatgtcctgcttctac

SEQ ID NO: 326460 - DNA, 754 bp, Homo Sapiens
gaggccttttagcatttctaagctggactaggcgagagtgtcacacctgcttcccttggcttccatcttgcctcttccagtttatttctcaagctgcagtcaaactgatcttagaaaacacgaatctaatcatgcagcacccctgactaaggtcttccggtggctgttcagagcctcttgggtagcaaacagatggcttctgttgtatacaaagccccttaagagaggtctcctcatctactttttctagcctcttctctcccaactctgtattctcctgtaacactgactgagcactgcaggcttctgccctttgcacatagtaaggcatggcatttctctctgtctgaaatgctctttctgttgttcatctagaagactgttttcccttgaagactcagccctagcatcacctcttctgtgaagtcttctgctactttcccaagcagagtgagtgttccttcccttgtctgagtgccttggccattgatgtgcttatcatgttgtcttacgtatcaaattatttgttgtcatatctgtccccttcaccatactgtgagctccaaagaaaagaagtgatctttatacttcttatgcttagtacacaactagacatatagtgtgtgtgtgagagagagaattttttaatgaaataattgaatacattggaagtgtttcattcaaaatactcatccattattctttggatagtagcataaatttgatgttttatgtacaaaagtaaaaacatttg

SEQ ID NO: 326461 - DNA, 714 bp, Homo Sapiens
tgaacgtccagtttctttttcaccacctcccacctgcccaccgaaagtagccatttcccagcggcgtaagagcacctccttcctggaagcccaaactcaccacttccaacccctgctgaggactgttggccaaagtcttcttccacctggtggcagcccaactaactggacaccagaggccgtagttatgttgggtactacagccagtagagtaactggagagtcatgtgagatacaggtccatcctatgtttgaaccatctcaagtttacagtgactatagacctggactagtacttccagaagaagctcactattttattcctcaggaagcagtgtatgtagctggggtacattaccaggcccgggtggcagaacagtatgagggcattccatacaactcatcagtactgtcaagtcctatgaaacagatacctgaacagaagccagtacaagggggccctacttcaagttctgtctttgaatttccatctggacaggctttcctggtaggacaccttcagaatctaatattagattctggattgggtccgggatctcccctctctagtatttctgcacctatcagtacagatgctacacgtttgaaatttcaccctgtctttgttcctcattctgcgcctgctgtgttaactcataacaatgagagcagaagcaactgtgtatttgaatttcatgttcacacaccaagctc

SEQ ID NO: 326462 - DNA, 500 bp, Homo Sapiens
taatttataaagaaaaatgtttattttggctcatgcttctgcagggcgtacaggaggcatggcactggcatctgcttctggtaagggctcaggaagcttgcagtcatggcagaaggcaaaagggtaatcagcatatcacatggcgagagagaacaaagagctgccaggctttttaaagcaaccagatctcatgtgaacttagagagtgagaatgtaaggttagccgagagaaaggaccagagagagagagccccaagttcaggcaagcctttattaacctgtcggctgcccccttaacagtcaaggaaagcagccccaagcttacagaatagggggtttacattggggcagggagtttgagggagtcctttggtatggctgcatcccggggttgtctgctggttaattctgccacatatcaccttgtgatgtttacggtactggagggtgtaggtaaagtttgtttatgcttcccacaacctccccgtttggtccggatg

SEQ ID NO: 326463 - DNA, 205 bp, Homo Sapiens
cccattcctgtggttaagcaacaaaagacagtataagaaaccagttatctatttggcatggagaggacaaagtagatagggtacagaaatacttttcactgtatctctttttgcactgctttaaatctcttaaccacgtgaatattttccccatctaaaatggcatgcaggggccaggaaaggaaaagaaaaacagactaatatg

SEQ ID NO: 326464 - DNA, 747 bp, Homo Sapiens
  misc_feature (91)..(670): n is a, c, g, or t
tcgggagctgtttcttcctccccgtgaggccgccgaccttcacagtgagccataagctcttacaggtggcgcgtcgggagctgtttcttcnnnnnnnnnnnnnnnnnnnnnnnnnnnnnnnnnnnnnnnnnnnnnnnnnnnnnnnnnnnnnnnnnnnnnnnnnnnnnnnnnnnnnnnnnnnnnnnnnnnnnnnnnnnnnnnnnnnnnnnnnnnnnnnnnnnnnnnnnnnnnnnnnnnnnnnnnnnnnnnnnnnnnnnnnnnnnnnnnnnnnnnnnnnnnnnnnnnnnnnnnnnnnnnnnnnnnnnnnnnnnnnnnnnnnnnnnnnnnnnnnnnnnnnnnnnnnnnnnnnnnnnnnnnnnnnnnnnnnnnnnnnnnnnnnnnnnnnnnnnnnnnnnnnnnnnnnnnnnnnnnnnnnnnnnnnnnnnnnnnnnnnnnnnnnnnnnnnnnnnnnnnnnnnnnnnnnnnnnnnnnnnnnnnnnnnnnnnnnnnnnnnnnnnnnnnnnnnnnnnnnnnnnnnnnnnnnnnnnnnnnnnnnnnnnnnnnnnnnnnnnnnnnnnnnnnnnnnnnnnnnnnnnnnnnnnnnnnnnnnnnnnnnnnnnnnnnnnnnnnnnnnnnnnnnnnnnnnnnnnnnnnnnnnnnnnnnnnnnnnnnnnnnnnnnnnnnnnnnnnnacctctccacaggaccagaacgggaccctcaggcgactccctctgcaaatccgggactgtttatccgaggccctcat

SEQ ID NO: 326465 - DNA, 437 bp, Homo Sapiens
  misc_feature (50)..(50): n is a, c, g, or t
  misc_feature (62)..(137): n is a, c, g, or t
ccattttaattaatttttttaaaatagaaaccggggtcttcactgcccangacagtcttaannnnnnnnnnnnnnnnnnnnnnnnnnnnnnnnnnnnnnnnnnnnnnnnnnnnnnnnnnnnnnnnnnnnnnnnnnnntagactaaagatattttcatattccttagttatgcaaactaaaagattgtgcaactgaaaattcacctactaatgtatatatttgttcttgtttagacaataattactatattatgcaaatggtgttgacactgttaagctttgacaaagagtaaatgggggggatatatctcctgaagagtgagatttgtagcaacagtttgtttctccctcaagagaagagggaaaatagtattaggtgagaaggtagcaaggtaacagcctttattttagattcacctggatggcaactattccttc

SEQ ID NO: 326466 - DNA, 468 bp, Homo Sapiens
  misc_feature (35)..(35): n is a, c, g, or t
  misc_feature (53)..(53): n is a, c, g, or t
  misc_feature (67)..(67): n is a, c, g, or t
  misc_feature (75)..(75): n is a, c, g, or t
taaatcttttacccaaggccaggcagctaatctangaagggaagcccggaatnccagccctgaacangcctcatnccagagctcttgttcttttctgtatactgcactacctacatctcaacagtcgtgagttcaacattaatcaggtctgaaactaatgagatttactataatgccccggagatgactgtaccctacagctggagaatgcatagggaggggcacttccgttacgtatacctgaactatgtttgcgattcacacaaaataaagaattgaccaggaccaaccccagcctatgagaggcaaagttaactgctgcccgctttaccccaccctagagcgggctatgcaccagccttagcctcctcacttggggcagacacagcatgaacatggctggcttggactgaggctcttggcctcaaagacagaacagtaattggattactcacaggttgaacaggt

SEQ ID NO: 326467 - DNA, 424 bp, Homo Sapiens
ttttttttaatatcttgtcattcttggcactgtttgaatattataaattagatggagtggaggataaacaaagttggcacagggaaggcaagaggcatttactgaatgtctatcatatgccctctcaatatttagaatcccctcatgagatactggcagcccattttacacagactaaacagagacttagaaaggataaatcttttacccaaggccatgcagctagtctatgatggagccaggattccagccctgacatgcctcattccagagctcttgttcttttctgtatactggcactacctacatctcaacagtcgtgaggttcaacattaatcagggtctggaactaatggaggttttactataatgccccgggggatgacttgtaccccaacagctgggagaatggcatagggagggg

SEQ ID NO: 326468 - DNA, 599 bp, Homo Sapiens
agcaaggtggtagaatagaagttatcgggcctcattctctgttcccctctctcccagaaattcaactaacaactatcatcaggcaagaataccattgtgaataacccagaacttgagacatccacttgaccacagaactgagaaaagctgtggctgaacaataagcggaacagttttctttgactgtaccacccctcccccaagctgggacagtggcacacacagagaatttccctagacccatggtttctacagggggaaaagtgaattggaggaggatattccatttcctcgccattttgggtccctttgtgggagggagatatgtgaaggacatgaaaaagttcttgtgtggctattttagaaagtacttgagataggttttatctcagacatccacacacgacctctctctctatgtgctttgctggctgcaatttgtttgggattgagaagagtaatttcatcttggtatctgcaacttttatactacaaagtaaaaacctatagtagttgcacaaagtataaaaagaaaggattcaaaacatacaaccacagaaaaccagaaaaaccacaaaggaagacagtacagaggaaaa

SEQ ID NO: 326469 - DNA, 548 bp, Homo Sapiens
  misc_feature (175)..(431): n is a, c, g, or t
  misc_feature (468)..(480): n is a, c, g, or t
caaacactgttctgggcactgcagataaaacaatgacaccaagtccttgccctcaaagtacttacttatctacataaataaaatagtggttctaagggtaactctgtgataacaccatttttctcatttgcactccagttgcttttttgtgtagggataaaaagggatttattgnnnnnnnnnnnnnnnnnnnnnnnnnnnnnnnnnnnnnnnnnnnnnnnnnnnnnnnnnnnnnnnnnnnnnnnnnnnnnnnnnnnnnnnnnnnnnnnnnnnnnnnnnnnnnnnnnnnnnnnnnnnnnnnnnnnnnnnnnnnnnnnnnnnnnnnnnnnnnnnnnnnnnnnnnnnnnnnnnnnnnnnnnnnnnnnnnnnnnnnnnnnnnnnnnnnnnnnnnnnnnnnnnnnnnnnnnnnnnnnnnnnnnnnnnnnnnnnnntgacaagagcgaaactctgccattaaaaaaaaaagcnnnnnnnnnnnnnttattgccaatgcaaatgtcaacttttagtggtcgtgatacaaaagataaaagctgcaagtttaagat

SEQ ID NO: 326470 - DNA, 730 bp, Homo Sapiens
  misc_feature (13)..(13): n is a, c, g, or t
  misc_feature (57)..(57): n is a, c, g, or t
  misc_feature (108)..(108): n is a, c, g, or t
  misc_feature (497)..(630): n is a, c, g, or t
aaaagcatgttancttgccaaaatttcgaaaattttttgacaaaatcccaggaaaancaacttcagctaaccaagagatgaataaagaagctatgacaaaagtactancattgagatctggacccaccattaaactataaaattaaaactaaaacatgaaaattataatcacagaaaagatgttaaatattacaagtatctgacaaacagaaaaactattattaatgaaagttgagactggtggaagaaagaagctaggaaaaaaatttaagtggtataacagtagttcctcctgctacacagcatggggcccaaattgttaataatttaaagtttaaaatataactgaagcaagtatatttaaaggtcaatgataaaaaattaataattaaacattttcttactaataattacaataatagtttacacttttcagcagttattatatgctatttatagcacctaacatgcactagcatttaattctcaaaacttgnnnnnnnnnnnnnnnnnnnnnnnnnnnnnnnnnnnnnnnnnnnnnnnnnnnnnnnnnnnnnnnnnnnnnnnnnnnnnnnnnnnnnnnnnnnnnnnnnnnnnnnnnnnnnnnnnnnnnnnnnnnnnnnnnnnnnnactctcaagtgcctcataactcgaatacaagggcatgtgtgcactcacacaacataacatccctgctccaacccttctagcttttgctgttttccccttc

SEQ ID NO: 326471 - DNA, 1044 bp, Homo Sapiens
  misc_feature (56)..(93): n is a, c, g, or t
  misc_feature (179)..(188): n is a, c, g, or t
  misc_feature (191)..(288): n is a, c, g, or t
  misc_feature (664)..(664): n is a, c, g, or t
  misc_feature (881)..(959): n is a, c, g, or t
  misc_feature (971)..(971): n is a, c, g, or t
  misc_feature (997)..(997): n is a, c, g, or t
  misc_feature (1028)..(1028): n is a, c, g, or t
agtatacttgtaatacatcgtaacagaaatcattgttgtgggttgtggtaaccctnnnnnnnnnnnnnnnnnnnnnnnnnnnnnnnnnnnnnncaggctcaagccatcctcccacctcagcctcctgagcagctgggactgcaggcatgcaccaccacacctggctaatttttgcaccnnnnnnnnnnatnnnnnnnnnnnnnnnnnnnnnnnnnnnnnnnnnnnnnnnnnnnnnnnnnnnnnnnnnnnnnnnnnnnnnnnnnnnnnnnnnnnnnnnnnnnnnnnnnntacaagccactgagtccagcccagttgtagtatcaagcatcacatagtgtgttaaatgaccatgactttcacaagctttttgactttattaaaaatatgttacactaatctcttttgctggttaaaagctcatatgaactagtaagtgtagaaaagtgacggtagtacattcccctttgaaaacaactgtttaatctcttaaggttatgattctgatattttatatgcctatatttcattcaaagtatattattggtgccttttatttaaatcaggcagtgtagtaattgctcaagaatacagtcatgaaaagacttacttcccatgtctttgtggagcctatggtagggtagttaagtagataaaaacatcttangatgtgggagatgttattgcaaggaattgtttagtaaatagtttcaaatatggctgaaaataagagattaaaattaaagttaattgagttcaataactcaaatagtttattgaggcattactatgggttttgcggcagttgttttagggagttatggcaacagaagctatattagtacatcagtaagaggaaagaaggacatcaatatttaatgtannnnnnnnnnnnnnnnnnnnnnnnnnnnnnnnnnnnnnnnnnnnnnnnnnnnnnnnnnnnnnnnnnnnnnnnnnnnnnnccacatataggnaaactcagtcctgactatacatgggntcctcatccttcaaatactgtttttaatccncatttggttggtggca

SEQ ID NO: 326472 - DNA, 964 bp, Homo Sapiens
  misc_feature (417)..(417): n is a, c, g, or t
taatagtacaatgtgcttcttttatttaaaaggtgatctttttctttggtgtttggctgcatttctgagagagaaaagtccctaccaaataaattccagattcatagctcagttgctgtctggagggaattgctggggaatgctttagaaacttgaatgtaactcaacctctgtcaaagtgaaaacttttacactttgctagccgaggtcacaacattctccttcattggagggctgccagggtcaccacaagtgccagagtgctcacctcttagtattattcatgcctttctcacaaaccatgggacggtgttttcttcctttggggccccatgggtacaccccatacctgcttcaaaggaacctggcagctcaacccaggccatggactcatttgcctgtgtgtgtcctcactgnggctgggaaggaactagggttctgggggagagcatcacctctgtgaattgtcagtgactagcatgatgcctggcactcagtaggaacgcacaattgaatgttgattgagtagacgaatgcgtgcaggagtgaatgcgagagtctgactcatttttgcatcctatgcacagtgtttagatatcctaagtgcatgtttgtgtcaacatgttttttccagagcacattgggaagcacttggctcccctaaattaagggaggaattgtgatcaggccctttaggatcctcagtagccatctacatttttgtgagcttgcatgtgctttgtaattctcccttttcttccttttagaaacttggatatcgaagagaagaaagcagatgcccccattctgctacctcttcacaaggcctggggttccgccacagatttacactgagcggctttcctgagcctgtcccaaaggaagggaaactgaggagcagtgaggtgaccttggaggaggctttttgtgaggcagcaatgaaggaaacagcattaacccagcc

SEQ ID NO: 326473 - DNA, 673 bp, Homo Sapiens
aaagctgcatccttttgcatcgaatgaaaccccatcaagggcatctcctaactcttcttccattctcttgtccagggctggtgttttttgtgtgtttgtgactgacaatgcagcatggagaatttggagaagctagttttgccttttctcctacaggaagagggactcgtctgcaaagaaaggggtctgcctttcagtcctttgaagccacctggtctgacaaagacagtttccctgtccctttttggaccttgagctgagcaaaaaattacttagttgctgaaagagggtcagtgtagaggacttcctctactcctgctttgacttcatctgcaagagagctgaagaactgagtgaaggcatttctgccttcttgagacttctccttggtgtggcagggcttcctgtccaggaggggctccattgcctcatgcccctgggtataaacagtcccagagggctttgaaatcagcctgggtcaattctggaggaaaaataaggcctaataagcatggctcttttcccaaaatgtagccacaggggtctaagcagctgattgtggggtccagggccaccaggagtcttggctggcctagcatatcttgatttgttaagaaggtggatatgaattcagtctagagaagataacgtgcctattgtgcagaatgcaggg

SEQ ID NO: 326474 - DNA, 371 bp, Homo Sapiens
  misc_feature (13)..(13): n is a, c, g, or t
  misc_feature (356)..(356): n is a, c, g, or t
gtaatcctttaantaaaaagatggggtttttgtccatgttggcccccaggctggtcctccgaaactccctaatcctcaaagtgaatcctgccccgccttggccctccccaaagtgcctgggatttacaggcatgagcccacccatgccccagtctggtgctgtttttaagtagagtggttaggggcgggcctcgcagaggaggtggcgttagagcaacaacttaagaaccgtgaagatgtgggcagggggtgagggcagtgttcagtgcaagggaagagagcatgtgcagaagccctgaggcagaagccagtacctccctcatttgtgtttaggttgcgtccagttcttcgtgccngaatttctttggcct

SEQ ID NO: 326475 - DNA, 1142 bp, Homo Sapiens
aaagcagggagtaagggagagagaggaaacccaggactctgccctggccactgcagcctgcagaatgagctccccgggggcatcctcccttttaatgccagcagggagaagggaaataggtcaaggcagcagcctgagttttcagctggggctgtccagcatgaggacatcatttttcaggcagcagcaaagagcaattctaatgtgtcagaaaggacaaaggggtcatcgaaaaaggccttagaaatgatcaccaaacccacatacattgcccctgtcctcagaaactgtacctcctacagcctggaactgtgaagacagttaaactatgacactgatctctttaaataataccttatggccctttaagacttcgggtttctccaacacagcagtgaaaacactgctgtgcaggcagcaactggtcagtgagtatgtgctggctagctgccttctggaagaaagtgagaagagacatgaaatcactgttttattcagaacaagggccgcaaaaaggaaagggtggcttgggattgctagatcagtgttttagacaggaatgccaaggcagaaaagaatcacatatccaggaccacataaaaactggagtgtgaaaacctaggagtttacacttttaagccagttatttacccattagctaatgctatctctcactacttctgggggatgctagtaattaggcacaactccccatctgggaaatcacaccagatctttcctgtccttgactgtgtggcagggaactgccttaaagagtcagctgtatgtgggtcaggggtcaccaagtacatgctatccaatgggacatggcactcagctcatagtcacagctacagccaacagataccataatctccatgcagtccagcctcaacggcaggggacaggagagccactttaaattttcagggctattacaagccatttaaacccaattcagcataccatatgcagcagtagtcagcaaactttttggtaaaggaacagatcgtaaatagtttaggctttgcaagccatatagcctctgtcgtaactacacaactcggctgttatagtatgaaagcagttatagacaatacatgaaagaattagcatggccaggccaggcgcggttggctcat

SEQ ID NO: 326476 - DNA, 471 bp, Homo Sapiens
  misc_feature (271)..(300): n is a, c, g, or t
tgaattgactaataatgcttaaaaatcaggataaaaaatttaataagaccatctgaatttcactttctcttgaataatccagcaaactgggaatgcattcccatatggcagtgatcttataaggttgagtggagtcacaccttagatggggccctgtgccttcagtgagctcaccatggcatcacccagcctggtcatctcttggttaactgtcaggcccccggtgacattttaattagtcattcctgaaggcaggcgcggtgcttatgcnnnnnnnnnnnnnnnnnnnnnnnnnnnnnnattatgggtgcgagccaccgtgcccggcctaataaacatttttataaggtgctatttccttgcaaaggattaggttttaattatggtaaaaatgattttctgtcatattggaacaatgaaagggacctaattaaagatttttatccttgtttttatcaatacttatttata

SEQ ID NO: 326477 - DNA, 438 bp, Homo Sapiens
  misc_feature (301)..(301): n is a, c, g, or t
ttgtattttattacaatagcatttgcagataggaaactcgtgcttattattccttttatgaatttattgacttatggaatgcctaatatgtagcaggcactgaggtaggcactgaagacacacaggtaaaaccaatacggcgcctgacctcatcgagcacagatacatgcaagatgtgctatttattgtgtctacagacaatgctcacaggtggatgggagcaccctgtctctgactcctcagaattagcagttgcttccttgcttttagccagcaaacttctgctgtatacattataaancaaacacacaggtcaggaataatacttggttaccagtaatgtgataaagtgtgaacacccaaaatgcccttgacaatgaaagtaactgatacgtgttgatttgtcactctaggtctggaattttatgtctattgttc

SEQ ID NO: 326478 - DNA, 900 bp, Homo Sapiens
  misc_feature (89)..(89): n is a, c, g, or t
gtgaaggagggacgagaagggaagctggacgtgtacctgttcctcttctctgatgtgctccttgtgaccaagccccagcgcaaggcgancaaagccaaggtcatccgaccccctctcatgctggagaagctcgtgtgccaacccctgcgagaccccaacagcttcctgctgatccacctcactgaattccagtgtgtctccagcgccctccttgtgcactgtcccagtcctacagaccgtgcccagtggctggagaagacccagcaggcccagggcgccctacagaagctgaaggcagaggagtatgttcaacagaagagggagctcctgaccctctattcgggaccagggacagggagtcccccagcaccaggccctccacgccttccctggagggctctcagagcagcgcagaggggaggactcctgagttctcgaccattatcccccacctggtggtgacagaagacacagatgaagatgctccccttgtgccagatgatacctcagactctggctacggcactttgatcccaggcacccccacggggtcccgctccccactgagccgtctacgccaaagagcccttcggcgggaccctcgcctcaccttctccaccctggaactccgggacatccctctgcgtccccaccctcccgacccccaagctcctcaacgccgaagcgcccccgaactgccggaaggaatcctaaaaggaggcagtcttccccaggaagacccaccaacctggtctgaggaagaagatggggcctccgagcgagggaatgtggtggtggaaacactccacagggcccggcttcggggccagcttccctcctccccaacccatgctgactctgccggggaaagcccctgggagtcctcaggggaggaggaag

SEQ ID NO: 326479 - DNA, 683 bp, Homo Sapiens
  misc_feature (87)..(87): n is a, c, g, or t
  misc_feature (147)..(147): n is a, c, g, or t
ttagctgttctttatagccaaatgaaaaaacacgttgaagctttgccattatatgaaagagcattaaagatttatgaagatagcctnggtcggatgcatcctcgagttggagaaacactgaaaaatttagctgtgcttagctatganggaggagattttgaaaaagctgctgaattatacaaaagggcaatggaaataaaagaagcagaaacatcactcttgggtggaaaagctccttcacgccattcatcaagtggagacacgtttagcttaaaaacagctcattctcctaatgttttccttcagcaaggacaaaggtaatagcagcagttagaattctttgcaaatgtaccttaagacaaaataattaaacatttggaacatttgaatttgaaactttaaaaaaatgttgtacgaaattttactacgtgtgatttaactgctatttgtatgaagttgtattggattacattaagttggaattgtgattatgtctgttttagttgtttaaaagaattttcctattatatggtatccaaggatgtagacacattagaattataagaagacatgaggagcaaatcatgaagagcggattggtctttgttcaacaagagctggcagagtagttaagacaaggagttcaaaaattccatgaatcttggccaggcatggtggctcat

SEQ ID NO: 326480 - DNA, 722 bp, Homo Sapiens
  misc_feature (19)..(19): n is a, c, g, or t
gagagtagtccagccccanggtgacttccacaacaaagaatgtccactggagataaagggggtccaaatttacaaatatgatgtaaaaatccctaaaaagtgcatgcaccttataacattctcaaatacatgaagcaaaacctgcagagctgagagaaaataatccataattagcatgagagatttcaattctcctcagaagaaagaggaactaagcagtgaaattgctcttcatgcctccccagcacaatggagatactcctgggaaataaagccagtcgctggggctgatctccccagaacgctgagactggcttctctgtaaataaatgactggtatttgctaggagaagtgtccttatctatgaaatgtttttagccaagatgtggttagtttaggattgtgtttggtaaacataccctaaaatcccatggacttatgggacatggctcccctggaaaacgttccctaaggtgtataaactatctgactacaaaacgggaacactgcacatccttaatgctccttgtgcagtgagatgacgacacacctcagtgagaggaccacacgcctcagtgagaggtctcatctcgcaggccgggctcaaagaggatggacctgcgggggttgcacagactctcccacatctctccccactttgcctgagcacacaagtgaggatattacttgtatctttaaagttactaagtaatcagctacg

SEQ ID NO: 326481 - DNA, 834 bp, Homo Sapiens
cctttaaaacacatatatttaatgtacagaattggaaaaaggacttcttgataataaacatatttcatgtaaacacaagctttcaatatctatgaatatttcattgcaaatacaccctaagttacttcttctctacataaaggagaaactccaagttctgctctttaggaagacatggagggcaagcaataccttaggaacaaccattgctatttctcccctttccttgggtgacctaacattttacagggactaacgacataaagaaatattagattccattgagtttaaacacaaatttcccactgagggcattaaatatttgatgcttatgagtgtgaataaataattaaatattaggtataaggcagattccaaaaccaactgaagtatgaaaacaaattggcatagatacctaacagtcagtaaaattaaatttcactactgagtatatgctacatgcttccttttctactccagtgggttctgctttttttgtctaaggtcttctgctggactcctaagacagtcaattacttaacatcacccaggttttttgtcaggggatttattttggaaataaaccaacttcttttttattaaagatcaaggttgtcttttttgctacatgcttctttccactacatattgactccctcatgaaagaaaattcacagggcgagagcaagtactctatgttggctgttccgcagtgtaatgactggttaataaaagagccactcagcctggacaatatagtgaggcctcgtttctgcaaaaaaattagccaagcattgtgacacgcacctgtggtcctagctacttgggaggctg

SEQ ID NO: 326482 - DNA, 843 bp, Homo Sapiens
  misc_feature (202)..(307): n is a, c, g, or t
gtcaatctctacagcagttgttttaatatagccatatgaaccccttgctgttctgcccaaccattttccttctgggttgtctgtgatgcggatgatttcaatttgctctccttgcttgaagctcagttcattctttcctcctttgacatcacaacaagcttttgcaagatggatgacttgaatagggcctgttagtttaaannnnnnnnnnnnnnnnnnnnnnnnnnnnnnnnnnnnnnnnnnnnnnnnnnnnnnnnnnnnnnnnnnnnnnnnnnnnnnnnnnnnnnnnnnnnnnnnnnnnnnnnnngatgcttctatgtcttcatatgtttctccttcactgtcttgttcctcatctagatttccagcaccatcagagtgcgtgacaccatcttgattgtcttcattgacagggctttttaggtcaaacggaggtttaatgtttctgggaggtaggcttgggactggtggttgtgatgggtgagatgctggcaatggtggttggctggccggatgggatggtggaggtggtggcagggaagttgttgagtaagacgtctggcctttgctagtactgtttccagaagaggttttgtggaatttcgtcaggtcaacatttggtggtctgttgggttttggtggaggtggacccaaggtaaacaagggaggcaatggcttctgtttcggggtggctgaattcttgtctcccttttccttttcctgactttggccccatggcccccccactgtcagcttagaaggggcccttagggaacctggcaggaggagtccctgaggccaactcttcctgatttattttgctctggaaggtctagtgccgaa

SEQ ID NO: 326483 - DNA, 648 bp, Homo Sapiens
  misc_feature (26)..(26): n is a, c, g, or t
ggcccagatcctctggactcctcagnatgagcggattcagagagaagcttttgagagcgtgctggcggagacatttttcacaaaagagcccttgcggtgctggtgtccgtggcgtgcctgggaaggcccaccaacgctggccggcctccaagcacccgggcctctgctcatgtacagctcctgaactgccctgcctctgagttactgtggaaaatgagcttatatatgaagaagtcagcgagtggacaaagccaggcgcaatggatagcaaagatgtgggaagtctcctcgattcaagttacaagaaaaccgcagcatggagtctgctctcagctgtttgggggaattaccgatgcctttgactaagtcaagactgacttttccagaatatcacccaagagatagagccgtccctgtccaagttttgcgctagcccttcatggaggtcagagaggaagaaacaaaggcagctgtggcctcggcggtcacagtgtcagaacgcacaagccccataaagaggtttcacgcaggccacccatcccttttcattctccagcagaacaggacagagagcgttctgttctgcggaaggtcttccactctacaaggcaatccctccagctgctttgctgtattgtgctgtctcct

SEQ ID NO: 326484 - DNA, 583 bp, Homo Sapiens
  misc_feature (212)..(212): n is a, c, g, or t
attttgcttttcttggggaaaccagttaattttccttttcacttaacaaactacctacccatcttggctctggtgccagccagtgttttgtggggcttagggggcggggatagtgtggggaaattgaggaagtgctgcagatcatcctctactattcaattttggaggagagataatgtaggagtatgggaaaaggaaaacaaaaacacttntttttttcaagaaaatttagtactttttgggcattattgttagacaaaaatacaagtcttgtctctctggtttattctagtcatcgagaatcaacaaggaaggggccgttatgggtagtcattgcctgccatgtggcataactatttgcattattctttatatattactggctttattggtttctgtacaccttcaagatatgttgtatattaatgtgatttctgtaatgctatttttgaaaataaaaaacataatgtttgctaaaggtcacttctaaaacagctgatgtgaaagtaggaggaataatccaatgtaacaatagaacacatgaatctactgtatattcttacagataaaaatagacttttga

SEQ ID NO: 326485 - DNA, 1028 bp, Homo Sapiens
actttttaatgttaaacattttacaatttttgaagattttaaattatataatttttgaaaaatagcaacaacaaaaagagccatatatggaaatacttcctcaaccaagggattggctcccaactgactctctgtgacacactgcttttgttgaaattgtattggcatttttagggagcactttgcaagtctgttttatgctattgttatgattctttccacaaatacccatcgagtatctaccatttgtcagacacttattctgggcactgcagatacagcagtgaacaaacacagaaatccctgcccgtgtgtaacttagctcactaacagatttaagtggcgatgggaatccctagattgcctccatttcccatacactagaatttgtcacaaagctgcaaatatactaaatttcatacaaaaataatatagtttgtttatatctaatcatttgatctgatcccccattatgggtctccccacctaactcagtggcaaaaagaaggacaatttaattttgtccaacctgatgtgttaatctgatccaaatatttagcagtctctttaggtaaatgatcagtctctttgaataaaattctctgtgtttgagagttcaggctttccctctaagagagcttcagggaatatgggatacatggaggaacaatattcacaatgctaatatttaacaactggtattaaactagaaagagacttttgtccataaattaaccagtatggcccagaccacgtgtatcaagtgaatagcagtcagccgtaagagtgcagtttacgagacctcatggtgactgaaagaaaagggggtcctcagatggactcattgcctctggaccctccctgatatctccgtggcagaatgggtcgtcacttacttggtcctatctggctactagagtgtgtgattctgatcatttgactccagttttgatgttctcaaacgctgcagccgtcggctgacaaggacgatgaagaacaagtcatcttctattgtgccatcttcttct

SEQ ID NO: 326486 - DNA, 480 bp, Homo Sapiens
cctcaaagatgaacccattttccagttaaggtaacattcacaggttctggggattagaacatggacatatctttagaagctatcagactaccaaaataagcaaagacattttaaaatttaccatttattaagtaccatatgccagacacctacatacatttttctcacctcaattaagttttacaataaccctgaaatgtaggtattaatgcctgtattctatagacgagggaaactgaggctcagggagattgagtcacgtgcccaatgtcacgtagctggtaaatgacagaactaggatttgaaaccagatgagctgggctccaaagccaacatgctttttgcctcaccaacagcctctgagcctactccaggccctggcacaggtttcttgcctgaatggatgcagaaaaagaaagataggtagacaagagaacagacgatgaggcccagcatttttagtgatactgcttctagctt

SEQ ID NO: 326487 - DNA, 284 bp, Homo Sapiens
  misc_feature (258)..(258): n is a, c, g, or t
  misc_feature (266)..(266): n is a, c, g, or t
tggagatgaggaaatgggttttaaaatctcaaatgacttgccttaggccacttactaaagagtaataatattttacaacagagcatatgtacctagagctcttaatagaagccatggacaactgtttaacatgagaacccctgaactggtatacaaagttttgaatatctacatttttgagagaagctatagaattcagattgtcaacgggatccacaccctctccaaaaaatgactttaaaaattatttctcaaaanaaatcaantaatttcatatcatataa

SEQ ID NO: 326488 - DNA, 412 bp, Homo Sapiens
  misc_feature (30)..(30): n is a, c, g, or t
cccttaagtaaataataaacattaagggtnaaaaaggtccataggcccccactgaaataataatttatatttacccttttaattaaataattatggcatggcatggaagttaaatatttacagaagcctaatcaagagggaattcaagagagaaaactcagacatgagaatttcgtctttgctatacatagaatgtcttaatcctccactggtagtcattcgggtttgcttaaggagtttaataatacacatttcaactgccacagaatctaaatcccatttggatcagccttgaaaaactttcatcaataccttgagatttcataatatttctcttgagagcctggatctcatgtgccatttctcattttgattgcgggtataatatatgagattacttacatatatcttg

SEQ ID NO: 326489 - DNA, 370 bp, Homo Sapiens
  misc_feature (25)..(25): n is a, c, g, or t
  misc_feature (30)..(30): n is a, c, g, or t
  misc_feature (42)..(42): n is a, c, g, or t
  misc_feature (49)..(49): n is a, c, g, or t
atgcctgggtgccccaaattaaccntttanggaacttggtanccccccngaatgcctaggaaaatgtcacccattagtgcctgaacgtaactgcccagttggtggctctgtcctagtggggttcctgatttgaaagactcattattaatattcccctgtagtgatcctgcaatgctgctcccatcatggcaagtctgtcaggaacggagtttgtgtaggaattttagaaaacagcaataggttgagggctatgtggtaggccccagagcttctcaaactactgtgcacacaaatcacccagagtctcgttgagatgcagattcggaatcatgtcctgagctgaggcttgatacttttcttcttttttgga

SEQ ID NO: 326490 - DNA, 696 bp, Homo Sapiens
ctggatcatatggtaattctttaatttttctgggggaactgctgtcccattttccacagcagctacaccattttatgttcccaccaacggtgtaacaacaatttcaatttctccacatccttgttcttgttaatagtagccaccctaatgtgtatgaggtgccatctcgtggtttggtgtgggctgtgttttaatcagatgttgggacccttaagtgttctgcacctggggagagttaggaaccacttaaggagtgtctgttgcttgccaatcttaaaatttttagtttgcacctgaatcaggggctgtcagagtccagactgctcttggaaataggaaaagactgggtcgttaaaggctggttcgttgagtctttcatcgttgagtgataccacctctgcagatggctcagtggggcagccccgtaccacagcctgcccttgaggttgtgtagtttagataggtcacagagttgctggggcctaccgcaggtctcctgacccctggtgcagttttaccttcaattacaaccaccaaaatagctacagtcaaaaattcccaaagttcctacaccatcaacctccaccccacttccgtccaaagtccacttagaggctctcagttttggatcttagaaacacttagggagctttttaaaaagatcgattctgtatttttagtagagatggggtttca

SEQ ID NO: 326491 - DNA, 623 bp, Homo Sapiens
gccaggacaaaactccatttaatttccctgcccccctcccaactcccccactgccttccacacacccctgaggggggcaaaaaagcaagggtcaatattattctccacctgagttcccttttgcatcaactaattaccagcccaattgccaataaattactagtataaaaagttgtgtgtgtccacaggcagatgtagatagatgtatgtatatatagtcatggagtccagccttttttccttgccctctttcttgtgggcagctccagacaaaaagcttctgtcccctgaagagtttatcgggtcatgggtgccacgtagttggcagggaagaagcccagcttgttgtgcgggcggccggtccaccaggatgggttggagctatccaggacctccaccacctccccgctgtggaaccccagctcgtcatcctccagggcctcaaagtcatacagcgcccgggcccaaccgcactcgctgttgggggaaagcacaagaaagaaggctctgctgagctgtgggctgggcaggcaggggagggtctgctggctcctcccaccacatcccaagtctttgagagcaacattccctgaaggctgacccctctgcagcttaaaaaaact

SEQ ID NO: 326492 - DNA, 409 bp, Homo Sapiens
  misc_feature (18)..(18): n is a, c, g, or t
  misc_feature (44)..(44): n is a, c, g, or t
  misc_feature (230)..(230): n is a, c, g, or t
aagacccttccccttgcnctgccccaagccccacaagctcaagnaagagcctcttctgtgcttcccccccaaacagcgaagtgcgggtgggcccgggcgctgtatgactttgaggcccctggaggatgacgagctggggttcccacagcggggaggtggtggaggtccctggatagctccaacccatccctggtggaccggccgcctgcacaacaagctgggcttcttcncctgccaactacgtggcacccatgacccgataaactcttcaggggacagaagctttttgtctggagctgcccacaagaaagagggcaaggaaaaaaggctggactccatgactatatatacatacatctatctacatctgcctgtgtacacacacaactttttatactagtaatttaca

SEQ ID NO: 326493 - DNA, 442 bp, Homo Sapiens
cagtggggtgaccagtcttctgttgtatgtttctaggaacgccgaggaggcagccttgacataaatgatgggcattgtggcaccggcttgggcagtgaaatgaatgcggccctcatgcatcggagacacacagacccagtgcagctccaggcggcagggcgagtgcggtgggcccgggcgctgtatgactttgaggccctggaggatgacgagctggggttccacagcggggaggtggtggaggtcctggatagctccaacccatcctggtggaccggccgcctgcacaacaagctgggcctcttccctgccaactacgtggcacccatgacccgataaactcttcaggggacagaagctttttgtctggagctgcccacaagaaagagggcaaggaaaaaaggctggactccatgactatatatacatacatctatctaca

SEQ ID NO: 326494 - DNA, 1022 bp, Homo Sapiens
  misc_feature (22)..(22): n is a, c, g, or t
tagcggatttttatgtgaagtntctccattttaagtattcttttctttccccccaaccctccgtgggttaaagcatccatgtttacagaatgaaagatgagggcaggataccacttctcctagggatcatcatcattttgtggggctatagtccagagaggtgaaggacccatcttgtgactgcacagctaccctgtggcatgactgagactataatcttctggattcttcaggaaaccctggtagctgatgaaactgccctagaacgacagcaagacaatagggccatgaaagcataagccctgaagtctgggacactgaggagaattctagggcttgacttctctgtacagccatcttggggagtgctcaaccctttgaattcggatgtctaggatgggactcaggtgttcactgtgcaggtgactcacgcctagaatcctctgcctatcgtgacagggagaagcctgtgtgaccctgtggccatctcagtctctgcagggcatctgtagctttggaggtacctgggcaagagactgcctttcctactagagcttctgccatccctctgtcactatttaaagcattgcctgcaccctcaacctcgttcagtttccacataatacctggggcagggatgtaaataccctgattttatgtgtcaggccttcaggactcagggtgtataagtgacatggctcctcgcacagcagggatggaagaggcaaacccaggttggcctctctgccactcatatagaactcctttatcaccaagattcctttcttcttcagtgccacctgccttattttactcacccagaaggaagccgggtccctctttggccctttgggtgtttgtgaaaagcaagttgtaaacactgaattctataaactgttggagacagattctggagagacactcaggcttagctctagaaagaaacgggtaagacagaggaggttcacaggaactgtgttgccttccttgactggtgcatgggaattccccagcagagagaa

SEQ ID NO: 326495 - DNA, 353 bp, Homo Sapiens
ctaacttttctgcagaagttattattggtgttatactcaaaaataaagcacagtttagccctggcctgtgcatttacaccactgaataaattaccaaaagtgtctgtctagcaagagttcgttctaacaaagtggagaggaagagccagttttatacaaatattgaatcatcccacaactacatttcatgaaactccctgattttttttaaaaagagactcttgctctgtagcccagggtgcaaagctgggagtgcagtggcctgacctcttcagcttcactgcaacctctgtatcccctcaggcctcctggggtaggctagggactacagggcacagggccactggcccccc

SEQ ID NO: 326496 - DNA, 972 bp, Homo Sapiens
tgcctttattctgtcaatcctgtaaggaaaacattcttggagcccttaatctcattctcacccaagactggagtcaactctgatccaggctgtctggagcacccacatcctcgccaggcaatgcttgccccctgctgaaggcttcctgaccttcatggtggaatcctgctggagtcatgcagctaccgcagtatatggggagggagttgaggggaggcagcgagctgaggataaggggcaaaggcttcacaggcatcattctgcttctgctcccaattgtttgaaggttccctgtgcaaataaggagggaggtggtctgggggagggtggtttgttttacttactgtgatggaccatgaaactgggtaataaaggtttagaaaaaaaatcaatggacaaaactgccactaaccttttcagaaggacaaatacttcttctaagagatgaaagaaagtttatatctcggagcaactcatcatttcctttttccaaaactcaggctctgactaaagctgaaaaaaagaatttgcctttcaacctattctctccttaaagggccacatcttgaagcaattacctccatctttaagtgtggaaatatgacccagggtgttaccgaccaaatgacagaggactgccagccagactggcaacctgaaaccagaatgaaagagtgggccatggaaaggcatgaaaggaaaaataagtctctttgccctttgaagtaaaaggccccaggtcttgcagggaagtctctttcatgagtaacactgtgcagagaagaggtgcttgtagtcaactcgagtttgaggccaggctcagtcctcactaactcaatcatctctctgaacctcactcttatctgtaaaatggagttaaagtatctactttgccctgtagtctggattcccaacatcacatgggataagcatgaagaaactcattagctcatagcatcccagagggaattt

SEQ ID NO: 326497 - DNA, 735 bp, Homo Sapiens
  misc_feature (208)..(271): n is a, c, g, or t
tctgttgtaaagcatgtaatctaactgaataaagccctatgaatcccagttctgaaatttgtcagaattgtgtttatagacagttttattacacatcttcttcccatctattaatattccaagattttatgtcatttcacgtataaggaaagcattaacatttactggtcacgtatcatgttccctcataagaatcttctatcaggcnnnnnnnnnnnnnnnnnnnnnnnnnnnnnnnnnnnnnnnnnnnnnnnnnnnnnnnnnnnnnnnntttcagaaatcacaaagtcaaattggcttctggagtctgctgctctatcatgatgcctccgtgtcaccactattaactttgcctgaaggaaccatggacttgcagtttcctaccccacgtggtcagtgaccatgaatacaaatgacccttactcccaggtgattctgaagtttcaggaagatgacagattccccctaaattttgaacagtaatattaattacaagtaataaaatataccaaaacatcactacaaaaatttagcattacttcatcaagaggaataaactgaaactgtcagtttcttggaagggtgagaggatagtttatcctgctttctaatacccaccacctatttgtgactataaacttcccaccacttatttatggttcaagcctagggcaagagctagcattttattttaaaaaagatttgtttaataatttttccatttggacagtggat

SEQ ID NO: 326498 - DNA, 809 bp, Homo Sapiens
tttcaatgcatcttattttaatagtctattatgaagcaagtcactacaaccagcctttacaaaacagcttatgttaaaagttgggatattctgaaaggtagttaaagagtaatttttatttgttctgcacaaaataacctttcctctaatttaaacaatgcaagtgtaaactaacagcataatcccaatatataactctttccaaatccagagaaagaaatgaagtgatgtcttttaaccatctttctgtctctaagaataagagattatagaagatgaaatgtaggagacacagtatgagatcttctcagagagctttagggcccctgctacttgtagataagaatgagctaattagtgggtttgagcaacagggatttgatgatgccacaccaggaagaccctcaatcagtgcccattgcaggaaagagtgccaaggtgttctcatcagcccagctgaaagcacttttcctcaaacattgttcaagacttgagagaggtgcatctccatgaagaattattggcactattttctcttctacttagagtcacaggacagcagagccatatgccacaaacaaaaatcaaaccaaaataacataaaatattaccactgttaagacgagaaaaagaatatgttaagatggggcaggaatgctgaacacacctctttcctttccctgactttttaaaacactgctacgtccttgtcaaattctgtttgagaagttagactcacacgcttcccaaatcttaaagcctaggaatacattttccagtaatacagtaactagcgacaaaggtacttc

SEQ ID NO: 326499 - DNA, 424 bp, Homo Sapiens
  misc_feature (394)..(394): n is a, c, g, or t
agtaattttgtcgctagttactgtattactggaaaatgtattcctaggctttaagatttgggaagcgtgtgagtctaacttctcaaacagaatttgacaaggacgtagcagtgttttaaaaagtcagggaaaggaaagaggtgtgttcagcattcctgccccatcttaacatattctttttctcgtcttaacagtggtaatattttatgttattttggtttgatttttgtttgtggcatatggctctgctgtcctgtgactctaagtagaagagaaaatagtgccaattaattcttcatgggagatgcacctctctgcaagtcttggaaccaatgttttgagggaaaagtgctttcagctggggctgatggaggaacacctttggcactctttncctggcaatggggcactggattgaggggtc

SEQ ID NO: 326500 - DNA, 803 bp, Homo Sapiens
ttatgcttttgaagttttgtatgagaaatccttccccatccctctcccatgatattcgcctacattttttgtcctatttcctttacagtgttaagtagggataagttttgttgtttttttctccatagagtgagccaattatccccccatctactaaacaacctttcataagttctacatattttttgcaaattagatacactggtatgaaacaaacagcatctgaaagaggggagaaagagggtcatatgagtggaagaaaagaaataaaactccagctcctccccactgaatactaacttccttccaaatgcctgcccttctgctacctgtgagtggtgacgtttcccctttcagagcttggggcatagcactcatttgcacaaaagccaactaaaaatcggccaactcttgtatcacactaaactgcaagagtaaagcctgctacttaaggagctgttgtttaaggagaaacggagatgatagttcaggatccttcaacactcagaagaaggcaggagcaaattcagagagatggagtccacaatcaaattctatttagagcctgggatcagcaaaggtggaggcttacaccaaatggccagcatcacttgttcttacttgctgaggtctgctctggacctacagtctaagtctttactcccctttacgcctcaaagatgggtgaatactgagtgtttactgccctccttggttctgtccttagaaatcagctgccatgcttggatggttgcagatgggttcagaagtgaatgaatctcatcttttttttattccccaag

SEQ ID NO: 326501 - DNA, 748 bp, Homo Sapiens
tgatcttctatttacttcaagatgacagaagagtaggtttcttgtgatgaaatcctacaagaatgaagaattaacaaactgttgtgtaattcatcagaaaagcatattaactctgctgaagtaccactgaatgaaacaaaaatgaagctgtgaagtagcaatctgattagcaggctggcttctatgtcccatcactctcgtagtcttctattattatgttttcttccatgtctccttgggctgaaaagggctggggctggctagcaggcagttcactggcactattctgactcaaaggaagagaccaggtttccggcacagtggcttgagtgggttcacccagagattcctctgcagaatgtcctccattaagctgggcttcatctccgctgtcagggtctatcattccatgttccctgtcagtcagggcttccattttcaatcttccaaagtgtcgcttcagagggagccttccaatatcttggataaaagaaatctgagcttgatttctcattggaatggttagtagagcaaggtatggcaatagctgagtttggaggcataaagctggtaggcagaagtcaggaaaaagtgcttttgctgccaggcaattttcccgatactttttatttattagaaaccactgaggtttgtgcaagggtcgaaaacttgatcctcctccttggcaatgagcatatcctcgggctttgttggaatgcatcacacctctcgtagctatagatgtgct

SEQ ID NO: 326502 - DNA, 426 bp, Homo Sapiens
  misc_feature (17)..(17): n is a, c, g, or t
  misc_feature (32)..(32): n is a, c, g, or t
  misc_feature (44)..(44): n is a, c, g, or t
  misc_feature (55)..(55): n is a, c, g, or t
  misc_feature (131)..(131): n is a, c, g, or t
  misc_feature (177)..(177): n is a, c, g, or t
gtccctccccaataaangctggggccttccancctcccgctgtncagggtcctanccaatccccatgttccccctgtccagtccagggccttcccattttccaatccttccccaaagtgtccgccttccangagggagcccttccccaatatccttggaataaaaagaaaatctgangcttgatttcctcattggaatggttagtagagcaaggtatggcaaatagctgagtttggaggcataaagctggtaggcagaagtcaggaaaaagtgcttttgctgccaggcaattttcccgatactttttatttattagaaaccactgaggtttgtgcaagggtcgaaaacttgatcctcctccttggcaatgagcatatcctcgggctttgttggaatgcatcacacctctcgtagctatagatgtgc

SEQ ID NO: 326503 - DNA, 616 bp, Homo Sapiens
  misc_feature (150)..(166): n is a, c, g, or t
aaaattagctaggcatggtggtgtcatcagtaatcccactactcaaaaggctgtgccagaaaattcgcctgaaccggaatgcaaaggtagcagtgagccttgcgccgccgcactccagcctggatacaagagcaagactctgactcaagnnnnnnnnnnnnnnnnntccagtatccttttagacctttggctccaaggggcatccatcccctgataatgaagtatggattattgcaatcctatcagtcccaacataacacccccatttttcctgttaataagccaaacggggaatatagatttgttcaggatcttagggcagttaatgaggcattagttccagtcacccaatagttcctaatctttataaaataataactcaagtccctgaagatgcttattggttcatagtattaaatttaaaagatgttttctttcacacacctttacacctggacacccaatacatttttgcatttgaatggactaatccagacactcatgctgcatctcagcttacctggactgtcctgtccccaaggttttcggacaatccccatctgtttggcaatgcattggcaaaagaggtatgggaactacagttaattaagcggcc

SEQ ID NO: 326504 - DNA, 383 bp, Homo Sapiens
  misc_feature (12)..(12): n is a, c, g, or t
  misc_feature (29)..(29): n is a, c, g, or t
  misc_feature (36)..(36): n is a, c, g, or t
  misc_feature (52)..(52): n is a, c, g, or t
aaatcccaaaantccccctaattcagttnaagggtncaaatggggaaaaaantccccacaaactaagaatggaaccttaagggaatgccccgaattttctccctgaatcctaaaaaaaccatgttttaaaagcccatggtgagctgctgggggtgggacaagggtgtaagggccttgaacacccagtttttggtggaagggttcagaccttggcttgtgattgctgagatgaattggcattggaaacagggcacgggactttgtctgtgtcttgaaaatgtccctggcattccctgggtcctgaggggcctaagcagaaatcctctgtccccacctaaccaggactgtaccccctcctccactgggctgtacccactcaagcg

SEQ ID NO: 326505 - DNA, 412 bp, Homo Sapiens
  misc_feature (368)..(368): n is a, c, g, or t
  misc_feature (385)..(385): n is a, c, g, or t
  misc_feature (395)..(395): n is a, c, g, or t
gagaacattaataaaaggctcgacctcatgcgcctgcaagtgatcacaagacagttactgaagcattcaaagaagcaatgtctttgtcatctgactcattttgaaaacgcatgagaatgctttcccaaggcaatttcttacaaaatacaccgtgggacatttttcctatagtttattgttgttgatgatcatcgagaactttgtacccagagacactctacactgtgagtgtcccctgatattccctcccactcagcctgatcagtggtatctgacctccaactactcgctgcaacaacccgttctctagctgagtgggcctgggactttgaacagaattaacagcctgggaagtggagttctcaatncttcaacaggccccttnacctgcatgncaaattttctttttgga

SEQ ID NO: 326506 - DNA, 1008 bp, Homo Sapiens
  misc_feature (409)..(409): n is a, c, g, or t
atcaatagaaaaaacatttattatatatgcatgcaagaacactacaaagagtagctctctgaacagcaaggggtaagggtttacagatcagctttatggtgtgtgtcttaaggcttcagaatgaaactacaaaaagttctgataaggcttatttacaataccttgggaggtcctagtgctaagtgcccttataagagggaacactcagaggagggttttggcagctgaattctcgggtaagacctgctttactcatcaaagtttagctaaggctttttgtctgcagctgctgtttgttcaggatattctcaaagtaggcttgtgtccatattgagtgggttgttagtccccttcattgcccctatttggaacttggacatggaggtttcactgacagggagctgtgctngattgctgtggagataaggctaggttcagaggttgggagttaagggatctgcgagatttgcgaaagacacgaacatagattaaaacaaagatgaataagcagaaaagaacaattaaaagcacatagccccatgatctgaaccagtctcccacttttgcaaatatgccttgccaatcaagtaacggtacattcttcaggttctcggatgcttcgtggagacgctgtatattagactttatttcttccgaataatttatatagaggcaacactgtttgccaacagttccacaagccgtttgtccgttgggtggtcggtaatatcccaagacatgaatcctttcgggatgccagaggcctaaactgcctaacttttgattggtgtgccttcccaaggtcctgccttagtggcactgaattcctgttccattgctttggaaatgtttagaattgccttttctaaatcataagttcccaaacttggaaaaagggcccttattgttgaattgtccttggggttgcaatacagaggtggattgtctgtgtctccttgggtgcatctatgcggtgttactttatgaatgaaggatctcaggtttgta

SEQ ID NO: 326507 - DNA, 435 bp, Homo Sapiens
attcttatgaagtatttctctgaaagttttattttttaacttacaggcctttaatccatgtggtaattttttgtttacatctagttgattttcttattatggaaaatttagttattccaagacagtttactaactagtctatcacttgccttctagtttatgatgcctttgctctcatacccaggttctcatacaagtagagaattgtatctgtgctttgtagtctgctgcattgacttaaaaaaagttcctgcctagatactaccatgtttttattcatttatttatttttgagacagagtcttgctctgttgcccagggctggagtgggagggaccacaggcacacaccaccacggcccagctaaatttttgtgtaaatttttggtacttttaaataggagggcgggggtttcaccacgttgggccagggtgg

SEQ ID NO: 326508 - DNA, 434 bp, Homo Sapiens
tgagccaccgcgcccggcctgttccttttatttcttaattcaggacactaacccctgactgcaagggatttccttggtaaaaagaaaagattcctcagagtcaaaatgttccttacaactcgggcttgacggcctttgaattatgaatggattgttccctctctctgaagccctattgtcacatgggtttttaatccctggccttgctgctagaaatctgtgcttgaagtcctctctttctgctggtagcctacccagttaaaagtcaagacttggtaactcagtttaccagactctttagcctttgagctaaactgtctgagcaacctcttagatgtgcacacaccactttgtatgaaagggttctctagaacggttctttggagagaaatattttcatgtacgtttgacaggggtgtaaataaagcatgctg

SEQ ID NO: 326509 - DNA, 714 bp, Homo Sapiens
  misc_feature (128)..(284): n is a, c, g, or t
gaaacaaactgctttattagcaagaaaaactatgggtgggattggctgaattctgtcatcacttcaaccattacagaaactggtaaagccaccattttaggctgctaaatatttgcttaaagtaacannnnnnnnnnnnnnnnnnnnnnnnnnnnnnnnnnnnnnnnnnnnnnnnnnnnnnnnnnnnnnnnnnnnnnnnnnnnnnnnnnnnnnnnnnnnnnnnnnnnnnnnnnnnnnnnnnnnnnnnnnnnnnnnnnnnnnnnnnnnnnnnnnnnnnnnnnnnnaccagccaagagcacaggtggcatttgggtccagactggctggctcgggagctgcctgcctgtgcagaagaatgagacccctaggaacgctgtgtgaagcccataaacctgccctggactaaagagcatctcagaggaatctcgtatcaacataacacaaacatacatttaactattaccagtttcagagctttccctcaatcatcttatagaccctcaaaacaatcctctaaggtggctgaacagagattggtctctctgtcttagaggtaaaaacacggaagctcagagaggtcagaggaaaactgggatctcctgcctccaaattgaaaagtactgccacctaaactggggcccttcctcttttctagaaacctcagggcactggtgtgaaaattaagtgaggctgacatgatgtgctcagtgccag

SEQ ID NO: 326510 - DNA, 419 bp, Homo Sapiens
  misc_feature (24)..(24): n is a, c, g, or t
  misc_feature (91)..(91): n is a, c, g, or t
  misc_feature (126)..(126): n is a, c, g, or t
aacgagtgtgaagagacctcatgnaaaatggttaagcaggggaccccctggcacagaacaagagccctagcagaaaaagtaagctgtggtnacctttaaagcaaaatatttaagcagccctaaaanggggggctttacccagtttcctgtaatgggttgaagtgatgacagaattcagccaatccccaccccatagtttttccttgctaataaagcagtttgtttcctaagtgtgttttgatgcgtataattaatacttcctgtccttgatttttggctgaaaaatgtcttctcttcctcgcaccctctgttattcccgtagtgaatattttcattgtggaagagaaattcccattggctcatggttggcattttatttctcctgtccagagacaatatttccacagcctcaaacctaa

SEQ ID NO: 326511 - DNA, 380 bp, Homo Sapiens
  misc_feature (256)..(256): n is a, c, g, or t
accgtgcccggaaattctttcaaggctaaataatatccctttgtatggacataccatattttgtttatccatttatcagttgatgaacatttgggttgttttcacttctgctattataaatatccatgagtacctctatgaacaagtttttgtgggaacatgtgttttcaatcctcctaagaatgaagtagttgagccatatggtaactcagagtttaacttttttgaggaactgttcaaactgtttgtccaaagncagctacactattttacatttccactggcaattgtatgagggctccaattttctccacagcctcaccaacacctattattgtctatctttttttgtttgtttgtttgagacggtgtttcgctct

SEQ ID NO: 326512 - DNA, 456 bp, Homo Sapiens
  misc_feature (22)..(22): n is a, c, g, or t
  misc_feature (27)..(27): n is a, c, g, or t
  misc_feature (34)..(34): n is a, c, g, or t
  misc_feature (65)..(65): n is a, c, g, or t
  misc_feature (93)..(93): n is a, c, g, or t
aatacctccttttggacccccnaatancccctcnaccgggataaaaattccacccacctttgganttataattaccatggtttaattccacangtaacattggagtccctccttaaaataaaacccaccccaaagaaatgccaagaaatctgactgtcactcacattggtacacatgctccttccctaagcatggtgcaaacagaacatgtgaccatgaagaagtcctcaaatcagaacaagtacgtccattctaagtacagagcaaagaagataataacaaaagagaggcattttaactatcaatccttgcttttcacctatcattagttagtcatctaagctatcattatttggagtaaacttatttcatttcctctttaaaaaatgaacaatttcaagcttacaattaaccaagaatttgaacattgtctataattatcctgtctatatcact

SEQ ID NO: 326513 - DNA, 581 bp, Homo Sapiens
  misc_feature (80)..(372): n is a, c, g, or t
caggggctgtttgacatcacacagctttgaacctgtgatcataagctctgaggccaggagggatttgattctgcaatctnnnnnnnnnnnnnnnnnnnnnnnnnnnnnnnnnnnnnnnnnnnnnnnnnnnnnnnnnnnnnnnnnnnnnnnnnnnnnnnnnnnnnnnnnnnnnnnnnnnnnnnnnnnnnnnnnnnnnnnnnnnnnnnnnnnnnnnnnnnnnnnnnnnnnnnnnnnnnnnnnnnnnnnnnnnnnnnnnnnnnnnnnnnnnnnnnnnnnnnnnnnnnnnnnnnnnnnnnnnnnnnnnnnnnnnnnnnnnnnnnnnnnnnnnnnnnnnnnnnnnnnnnnnnnnnnnnnnnnnnnnnnnnnnnnnnntccatggtacttgattggcatgggctgagggaaccagtgtttcgatgtgctgccagaaggaatctcccctggcaaagagcttgacaacttgaaaataatctttttaaactaaaaactcacatctcctacagggcagagaccaccagtgacccagccaaaatccattggtcccttttagaaacaggacccaaattttactcaggatggca

SEQ ID NO: 326514 - DNA, 776 bp, Homo Sapiens
  misc_feature (74)..(74): n is a, c, g, or t
  misc_feature (267)..(267): n is a, c, g, or t
aagagggggaaaatgttttccaagtggcttttaaaggcatccaaatataactgcctcccacatcagtctattancggggcacacttgagacatttccctcttcaaaaggactcttagaaaagcaatgatgtgctctcagcctcctcctttagaagacaaggtttacgagggtcagagacgcagatcggagcccacagaacgccattccctgttaacagcacagatttgggccttgtgcttatgtcaatcggttgctaagggaaatgncccctgcttgaaattccttaaatcatttcttaataaaatctggctgaaaaagtaaagatcagttcacggcaaaggcacaagaatgggcatggaagagcgaggaaacctggaggtgccttaagctgagccccccatgcgctgcagtaactatggcgactctggccacaggtgatgggataatggttgacatcctggagaagtcctggatgagaacctccgggaccttatgttttatgagaagattaaatactttgggaaggtatgggaggaaaagccctagggaagcccttgttgagggttcctgccagtgtcttcccatagaacccagtttcccccaatccgaatttttaccatcccgctttgtgtctccctcaggaaggacagagatcctcctcctttctattctctgccatatccccagagcctagcacagtatgactgctatgagcatgtctaggagtcagctggaccgagctccaccacttactaggtgcgcgacctggacaagt

SEQ ID NO: 326515 - DNA, 784 bp, Homo Sapiens
atgttgttcaagtggcaacagtggtggaggtgggttccaggaaccaggtattaggactggacatggcatcttcaggctcagggtatctgcggtttcagtaaatccaggatccagagtccaaagagtgggtctggccaccttttctgccttatggtgctgactaataccccaatttcacaccctgcagataaactgttgagtctccataatgtcaacatgagctatgcaaattaactagtggaaactttcctggatagatccaagctgcctcagagagtacagtttgttaagaaaatgggtctgcccaaaaaatgctgatccaggaacagtggccaaaatgtctaacaattaaaaagacatcatcaacagagttcatgtagctcttcctgaacatctggggccatgaaaaccatttctgaccaggtgtacatttagaccaataagaacaccaatgtggagatgtctgctgaaaactgctcacctattgtgcagtgtggagatggctgtatgtagggctttccttctcaaaccttagaatttctgaaccaagaaaagcctgttctctctcaggtagcctctatgactcccacgtagcctgaagaccctattctatccaccacgtgagcaccatttcaatatggctctcagctcccatgtgacggaggcagacagacattcccaagttcaaaatttgtaagcctcactacacgccttcctacaaagatgacaagcactacagcaatggttatcacagcaggcttgcccaacccggtgccacaggccg

SEQ ID NO: 326516 - DNA, 706 bp, Homo Sapiens
gtaagtaaacaatggactcagttcttcctaactaaaattaaattccaatcactcttaaaataataccagaaggctaatccaattccaacagggggtgggaatggggttgagggtggcggtgggcggttaataatggcaaatttactgatgctggctgctgcttcacctctgtgcccaacatctgttttcatgactgatgattctaagaactttcctatgcaaaggaaattattatgttacttgtagttagaaagaactggctgaactaaaagccatgtgggcatctttatctgaaaccatttccttttgagtcagtagaattgagttgactgagttatttgggggttggtatttaattttttaagcattttaaaaatgcctaaaaactaaaaggctacgcaaaatgaccagcatatcttcttgctttagaatggcataaaagacttctgctttaagcagtctcagtatatgaaaatctgaattgttgaaaaatcaagagagtaggtgtaatctgttttacaaaatcatttataggagcagtctctggagcagaagctccacacctgcagttataacatgacctatataatagctggacatttgttgaaagtgctgcctctttcaacatccccctcagctcagtcttagcctgtttttcaaggtgtgtcaggaccgcatggaattagtaggacatctattataaatg

SEQ ID NO: 326517 - DNA, 926 bp, Homo Sapiens
  misc_feature (513)..(513): n is a, c, g, or t
ttcggcacagagagttcctcttcttccaaataaggttttacttagagactttcagtcccacttaaaacttcaaagcaataagcttcatttcacagcttcactaaatgaaacctaatggtagacatgcctttgactagacataaagtaagcattctttctagagaaaataaatagaaagagaggtttctttctatttccttatcagcttcacctctttcttaggaaatgattgctcgtctgggacagcatttgtcatgagtttgttttcactttaaaggcatgaaggggagagatgaccaggggagtgatacccatctggctcatcttcaagggattgcgtagggagttggagctgtagaggtttccactggcagaaagccagtattgtcaagaagcatcctgagaacatgtaattaatctctacaaatggtagaatagttacattagtgccataatttgttatatttaagctatttttctaattcacaatcaactaaggccaaagctccccanttgcacagatgagccttctctcccatcatcccacccaccagccccctgtccagccccactttccttcaattcattgatcgcagcacagcatagggaagaacatgatttattgaatcttttccatcctaaagtattaattatcaatagctgcaatataccctgacttcataggaaaacctgcacctcattctaatcaccttgttctgagcgtctcactttccttcttaggtcttgaccttaagatttcaactttactttctagccgctgcctgatcaacgtggagtgaagtgaaatgatttccccctgtatttggaagctgtacttctaaaactctgtcctagaatcacatcactctcttttaccaaccagattattgcattgcattggctcactagtaatgtatttctaccaa

SEQ ID NO: 326518 - DNA, 1043 bp, Homo Sapiens
ggtcatgctctgttgcccaggctggagtatggtggcaatatcataggttcactgtagccttgaactcccgggctcaagtgatcttcctgcctcagccttccaagtagctggcactgtgtctgacaaagttcacaactttgtttgtggtcacaaagcttttcagcaggaggcagctatttttggtaccttgctaagatctagtatatcactatacgagaccctacaaaaacacacaaaaaagcaattcctcatttactatgttcaagaaacgcatgaaataaagtaaattttagcaaaagtatatttctttcctcactaaaataaaacaagagatatggttctctaaggtgggattgggacctgaaagtacgtaaaacaaaaatcatgtctaaaaatagactatccatatagtacaaaaagttttcaacctttcttttttcaaacgtggaactccaataattaaaacaaataaagacagcttctgaggtacatttgcagaatcattaagtccctgcagaactttatttaaaatggaagaaacaatactattctaggaatcttgaattctgggttataatttgtagctcccttattatctaagtgactttggagaagttaattattctagaccgaatacacttcctatatatatcgagggctcaattttgtgattctacaacacatgctataaaagtatctaaaacaaaaacatcactgaaacaaaaattaatttttgtttctgctgtagagatagcatttagccatatttttttctcctggagaggtagctacctaattcttttaatctgacatttatggtactgctctcttcttttctcacactctttcttaacatgaaactcaatgaattattttattatcttcttcatttgatagtaagtatacatacatatccccaaatacaagacagataaccaattcctttggaaaagaaaaaacagagcacatacaatttgctcagttcattggtgttcgtctacatccaaagataagcaagttaggagattagtactcagtacttc

SEQ ID NO: 326519 - DNA, 761 bp, Homo Sapiens
  misc_feature (746)..(746): n is a, c, g, or t
gacagatcctactggctggccagcgctgcgcccctccccatgatgccactctctgaagaggcgatccgcccctatgtcagccgctgtgcggtatgcgaggccccggcccaggcggtggcggtgcacagccaggaccagtccatccccccatgtccgcagacctggaggagcctctggatcgggtattcattcctgatggtgagtcccgtgcccttgaaaaccctggctcattcaccatttcctaacaccttctcccgccatttctctctggattggacagtaattctgagcactctgcgcttaggacataaggtcacggggactgttgcaaaccatagcctgttgggattgcagggccattatcttttaaaaacacttgtgattgattttgatcacattggtagaatttagaaggatgagttttgcttcagccattcggttgaaattggagccaatttgtgtgcatacttaccctgctgagtacgacttcttttcagcgcttgtattttgttctttatgggataatctaaggaaaaatgttaagatcagacccaaacctgggtgtgtccctgattgggtctggggttgtctgtgtgtgtctgagccctaattctctcttgttttctgggtagcacacaggagctggggaccaaggaggagggcaggcccttatgtcacctggcagctgcctggaagatttcagagcagcaccattccttgaatgccagggccggcagggaacttgncacttttttgcaaat

SEQ ID NO: 326520 - DNA, 724 bp, Homo Sapiens
ctaccttttttcccctggagtggaaatatcagcctgtgtttgaatggagacatgaacagcacagcctcgtgctcatgggtagagagtatgggacaaacctgccctagctggttcctggcccagccacttgccagctgtggggtctgtcctgtggataataaatagcagcaccttcctcctgggagcctggcgggatggcagctgtgagacattgagatcgtgactggcacctggtgaggactctgtaaatggaactcatcctcaccttgtccttcttaggcctgggggtgagaagctgagcggccagcatggcaagaccaactgcatttccagctttcttcttttctttgtggacattggcagttgggtttgaactgtggccctagcctgcctttgcgattggaattgcgagggcaagtttggcgttggagcggtttgtctctctaagaaagaaccatccctggctaaagcagtgcagatcaacccggcacacaccgccttgtccttgggcctggaaaagagcccgcagccgcagggatcctcttctgcacggtgcatgccttcaggctgcacgctgcctctgtttctcaacagtccctgttccttctgggcaatgatcaaagcgaggaaataggacagggtcagtttccgtggaaggagcattgttggcaagatgagaacaggtggattcctggggtttgctcattggaatgtgcctattgat

SEQ ID NO: 326521 - DNA, 893 bp, Homo Sapiens
  misc_feature (18)..(18): n is a, c, g, or t
  misc_feature (34)..(34): n is a, c, g, or t
ggcccacatttggggccncgatggagaagtcaantctgaaaaaccttgtaatggaaggaaaccatttttacctaaatgagtaatctaaactagaaatgaccagaatcatattcaatatttatttaaaaagaaaaaagagaagctaaatgtgctggttaattttttgttggcttacttgttggtctgtgatcggtgttgtcaggcagctgcactcccatgctttgtaaaagattggaagcaggtcctgccagtccagcttgggagctataggattccaatatatttgaaaccaggttcaggtctacatctactggtgccataacagattctcccgtaccagaatcttcctcatctgaattgttatcggtagtctgggatacaggttccacttggttcctagtggtgaaacttttgctgatgcaggtgtgtgctagttcctggtccatctgggccatgtatgacttgagattatcaagtgttcctttcagggaagcctcttcgccaggttcgtgtgtttcaaagtccaagtcatcatcactatctaaacattcaaagtcttcatcatccagatcatcagaatctgactcattagccttggccctaaaatcttatcaaaataattaagaaaagaatctgcatcaaaagtgattggagcctcagaaggttctcgaggcagctctgctcccttgtgggttgagactttggatatgaaagctttcatgctctctgagacttcagttaagtcatagttctgctccttctcctccttggaaacagactcggattcttttttgccaacagcttcctgcagcagctggtccagctgatctggtgagagatctaaccactggtcatcatcctctgggggaagattagctgcttctttcttaagg

SEQ ID NO: 326522 - DNA, 746 bp, Homo Sapiens
ttttttgattattttttccacatgttctaaagaatttttttaagttaaatattattatccatattttacagatgagaaaactgatccgtaagaaagttgtggaaaatttaaggctcttgccccaggtcacctcgttaataatgaatgggaaaaagataaacagatttcaatcctggcttgtggatatgctttctttggcacacaaattattttaaaattttagatttaaatgtcaacgtttaaaagttgggaggctttagaaataaatccacattccctatctcttgaaaaactagaagatccagcaatgccacttgtaaattcttgtgtgataatagctagagcttagtaacagctgcttcttaagacaggagaccagcttgccaagggccaggctgggcctgctcccctcattggttttgcccttcccaggccacgagaccttggaatttgtggttcctgccttgtttaatccctcttgtgcttgtgagtgaggatcaggccgccccttcccttactacctgcctctagcggtagggtggggcaagggagtaataagagctttataaatgattgctatcctacctaggaaactttcaaggctttccctttattttagcttctttagaaattaagttcattcagagatcaccactgaaaatagaagaaagcattatatatagacctataatagctgtttacaaaactaggtgaattgctgtctacttttacagctagaaaatcag

SEQ ID NO: 326523 - DNA, 709 bp, Homo Sapiens
actcactgtctaacaaagttttgaaaatttgtctgatatgtaattaggtactttagggttattaggttttcataaaaattctggttagggctcttgccctgctcccaatgaaagcctttccacagggcaaatataaaagagagagtagagggaatccccctgaggtttaaataagtcaaaccagtaagtaatagtgctaagtttgtcagtgcctctctttcttactgtacttaacatctaaaggggcacctcatttattttcaggctaattatgttctttatggggtgactgtccaatcaggggagggtgtgacgatcatgtggagataccttttctaattaatagctgccttgctcctcaagattctgatgaatgttgggaaaggaaaaaagttgaggtgcaaacaatgtgagaaatttaataattgagagatacttaaattttttatctattgctgtataacaaactacccctaaacttagcagcttaaaacaatgaacatttatctattatctcacatagttttgtgcatcagaaatttaggagccacttagcagagttgttctggctcagggattctcataacattgtaggcaagatgttggcaaggctgaagtcatctgaaggcctctttggggtgggaggatggctattgtcaggagactttacttcctctctggcttttggcaggaagccttagttggtaat

SEQ ID NO: 326524 - DNA, 968 bp, Homo Sapiens
  misc_feature (861)..(907): n is a, c, g, or t
tttgagtgtgtttttaatgcattttttttaaagattaaagtaaaatgtctcaattgtaaaaaatacacaccgggcaaatccttacctggataataaatatctacatcacagtacaataaaatttcttctctataaaatttaaatatggattatagtctatcactatcaaaagaaacactatgctaatatttccatattattaaaataacagggaaaaattccgagcttattttagaacctgatgccatagccgttggaaagggcaaagagattcaaatgtcgatcatcactctccatttgaggaggaactgtggcttggttattcacttaaattcagttcatgaaaaaggtttagccttacaaatgctggctacatttcaaaaactgtaagactgatttcataatttatgactcatgcagcaaaaggtcaatatgacacgaataggttagagttccatagaattaaaaggtatcactgacaatgacatgcttcaagggtgctcagcggttccttggaggctgagtctgtggggggcttagtgtcgaggaggggccagggcttgtacccctgttcatggaggagcaacaagaacggcgttgctggcacagagcgaaggcctggcagtccaccccaggcctgcactgcacactgaagagctgtcgcccggggcacaggtgaggggcttcgctgggctgaggcatcaacaggtcaagcgcgtcattgaggaccgaggctctagaaaaagctctgaggcggcacgtggtgttttgagcagaatcataaagaagaaaacatcttacttttttcattgtttctggaaatactggacgtctaaattgagcaaagtacacttgagggtnnnnnnnnnnnnnnnnnnnnnnnnnnnnnnnnnnnnnnnnnnnnnnntcatccctaaaagggaagtgatttataaatacaaatcccctcgtgccgctcgtgccgaatt

SEQ ID NO: 326525 - DNA, 412 bp, Homo Sapiens
ggcacgaggggatttgtatttataaatcacttcccttttagggatgagcggtgtggggcgtgtgtgcgtgtgagtgtatgcgcgtgcgtgtgtgaccctcaagtgtactttgctcaatttagacgtccagtatttccagaaacaatgaaaaaagtaagatgttttcttctttatgattctgctcaaaacaccacgtgccgcctcagagctttttctagagcctcggtcctcaatgacgcgcttgacctgttgatgcctcagcccagcgaagccccttcacctgtggccccgggcgacagttctttcagtgtggcagtgcagggcctgggggtgggattgccagggctttcggttttgttgccagcaaacggcgttttttgtttggttccttccatggaacagggggttacaa

SEQ ID NO: 326526 - DNA, 848 bp, Homo Sapiens
  misc_feature (394)..(394): n is a, c, g, or t
  misc_feature (634)..(681): n is a, c, g, or t
  misc_feature (822)..(822): n is a, c, g, or t
tctttcataagtcaagctgctaagtgctaataaaacacgtaataaaaaggtaaatggcctctgtattaatcttaagtactgctgcctgtaatatgatttttaaagctatattctcaaattacataaaccccatgggactgattgtcaatgtctttcatatataagaaagcctcactgtggctgtcatataacttatgccaaatctgttttcttctccttaaaaaaatatgttttcaaaaactttttctaaatattttcatgaagttagtgctggtcaatggagccacactaaagcactcataacctcagcttaaccacgggaaaagcactttgttatagcattgatcgacctcacatttatttcagaaaatccacagttttcttataaacaagncatctaatgctggtgaaaattgttggcatttacagcaggaagtggacctaggactcctagaaagccactggattttaagggtctggtgatgaccactgggcatgagctggtgagtgattaacattgttagatttgtccgtagtatttaagatgttcagagtgttttacaatcccttttcttagtcacaactcataggcttgtgaaggaggcagctcctgtcattattgctttgctatttnnnnnnnnnnnnnnnnnnnnnnnnnnnnnnnnnnnnnnnnnnnnnnnnagttttcctgacagagcatacttaagcattcattgccgctgacacagggctctagggaaaaggaaacagaggaggcgaggaaaagccctaggctacaatgagaacacaacatcataagcacatcactggggatagtctttnctcatgtgctactaaagaccactatg

SEQ ID NO: 326527 - DNA, 772 bp, Homo Sapiens
aaatatagtattttttagaaatttaaataccagtgtaaaaaaatcctttaatattcctagtctggagaaaacttcttcagattgattttactgtatgactggcattaactgctcataaccaagctaacttccagtaggaatattgtcagctttgctttactgatagctgagactctagtcctgtagaagcagtactcatacagtagacaggttcccctgatcttgcacatccaatcttataattttgccgtggaacaggaagctactgcttatctgtgtgttccaatgcctatcactgtctgtcatgtgtaaggaggcgatgatctccttacagataacgtgaaaaccaaagccacattgggctagaccaccaacattccccccattctgaattagagccaggctgatttaataaaatgttactgtaatggtgacattttaatttacagagccccttttcaagtattcttgaattatttccataacaaccctatgaggcaggttagggttggttttgttatttccatgtaatatacccaagaccagatggagatgcagtgactggtataagggttacacagatagtaagtagcagaagaaattgaatctaggttttctgactctaggctccatgttctttctaatttactgccaaagctgctaaataagggtgattttaaggccatttggaatacttgcacatgagcttacaagttggagaatttctcaaatgttgcttcaaattgaaaggttggccaggtgtggtgctcat

SEQ ID NO: 326528 - DNA, 486 bp, Homo Sapiens
tgagccatcgcgcctggccgtgatagaaactttcagctgaggagtctatatgccatactactctatgtggcatctttaggtctctgtgaaatcatgttgatgtaattgattaacaaaaataatttagaaaatacgtcaggcacagttgatggcttctcaatatctgctttgcatttttaaacaaatcaagaatgtaattttaacttttggcttatggtcattcttgatgactacacggaaagggatgggaatcatacttacttgtcttatacatggactgtttttagttaacaataaccataacctacacaaaggaaaggaaatgtttacattttaaaaaattactgtcaattacatctggtatttttcagattatgcataaaataatatgagtttgactattgtatcagaatattttaatcaaatcctgcaatttatattaacttaaaaaaacatctggtaaagactgggtgtggcagctcacac

SEQ ID NO: 326529 - DNA, 614 bp, Homo Sapiens
  misc_feature (253)..(253): n is a, c, g, or t
  misc_feature (473)..(473): n is a, c, g, or t
cattttaaggagggagagcacccactattgatgaaactgttatggcaacccccaacccagggtgaaccgtatgtaaaccaggctgaactctccacatcgccggcctcaccatcctgggatacaattctgactataaactcagcatcagataaacctagatattaccagcaatgcagcaggaaaaataaaaataacaactgaattcacagtaatcatttaaaatgtaaaatactgctcttaaatcctataaaanggccacgaatgtccagtgcacactaattctataaggaacccccactgtactataaaaatacacaaaacgcacataaaaatacaactttattattatgtaaatttaaccttaaacaaatatgctagctaacacaaacaatatattaaatcaattttgctcaccttcttagaacttaacgagcctcctaggggcaattcagataccccagctcctcacttanaaagctgtctgaggagattcatggtaatgtgtgcagctgggcttttcctggctcctctctccagtcattttcctcgtagccagcacaggcattcagaacaagttacccactgtagaggttggccttcgggtgttgctgtgg

SEQ ID NO: 326530 - DNA, 505 bp, Homo Sapiens
  misc_feature (33)..(33): n is a, c, g, or t
  misc_feature (65)..(77): n is a, c, g, or t
ctctcttatttttataacattcttatttttctnaaacaaaaatcctaaccaaaaagttgtcattnnnnnnnnnnnnnttcaggtagactgaatgtttttctgctctaaccttaaatgttattaggtttggtttttgtttctaagctacttcaagactacctgaggtaataatggtaaactttattattcagaattcgattaaactaacttcagcatttccacagttctattaaacaatgactgatgttcacaatgacaacctacctgagatggctgcaaggccctaatgttccattatacattatagtcttttcagcatagtttagtgttgagtgcaattctaatgcattctacgtttttgaaaatcgataatccatggaaggtccatgggttgatacctcaggtcaaaaatgtgtttactctgttgattgctgtttcactttacttgtatatcagatatataagctatgaacacaagtttgtagtaaaagtatcttctgtctgg

SEQ ID NO: 326531 - DNA, 520 bp, Homo Sapiens
cgcgcctggcggcgcctttcattcttgatccacctggtttcaaactcgcagataaactgtttccacctgtgacaaatgagtcatccaaccttccgtgtggtctggactttgtccctgttacaatattcctgtctcttgtttctggtttttggcgtcccacgtgttgtccctgtaacagtcctgtctcttgtttcctggggtcacccctgtggcgagctgactgtgccacgttcctgaggctggtgaggatgctgtgggcaccttaatcacggctgtgaacaaactggctagagctaggtgccatggagctttgcagtggacagtaagttgtggtacccattctttgatcagtgacggagccaggtgccttattaagtctcggggatttctggaagcacagagcaggcaagcaccttctacactgaaaggaatccttctcacactcatgttggcaacgtgaagtcctgcctttggaaatccctgatttcctaagacactaccctaacattttaaaggactt

SEQ ID NO: 326532 - DNA, 452 bp, Homo Sapiens
aactcttttaaaatgttttattagtgtcttaggaaatcagggatttccagaggcaggacttcacgacaccaacgttgagtgtcaaaaggattcctttcaatgtagaaggtgcatgcctgctctgggcttccacaaatccccgagacttaataagacacctggctccgtcactgatcaaagaatgggtaccacgacttagcatccactgcaaagctccatggtgcctagctttagccagtttgttcacagccgtgattaaggtgtccacagcatcctcaccagcctcaggaacagggcacagtcaactcaccacaggggtgaccccagaaacaagagacacgactgtaacagggacaatgtgcgggacgccaaaaaccagaacaagagacaggaatattataacagggacaaagtcgacacccacatggaagatggatgactcatttgtcaca

SEQ ID NO: 326533 - DNA, 755 bp, Homo Sapiens
  misc_feature (25)..(25): n is a, c, g, or t
  misc_feature (36)..(36): n is a, c, g, or t
  misc_feature (739)..(739): n is a, c, g, or t
aacctaggcccctccctctgggccnacccttgggcnaaaaggcaaaagcatggcctatttgcgacaaacagtgtcctaagctgactctggaaaggctcatgttttacgataaatcagaattacaaagttccttcattcacaggtaacaaaggattattaaataatttcctgaactaagacaacagtctcaccatcaaagaaaattttcttctcatctgagtttttataaatgagattttacaatacccagcttttttagttaatatgaaaccatcggcgtacagagaacatcctcaaagctcaagatgagtaaagctaatattctcagattttccacactctacagagcagcaaatattttatcagaatatccatttaacacagttttaagtccataataaccaactatgtatttttcttattcaaagaagaccatgttttgataagaataatcccagtttgatgagtatcctattccccttgatgttgtacaataaatgtcactgttgagtctctatatccttgactcttccagtcaaaggaaaatcctgtataaagctggaaaactgcaaactccagcggaagcactagtgttagtgctgaagtaaactttaggggaataaccacagtcgcttatcagactgtttacagcattgatagaagccctcctcttcttttatctctattatctctattttatctctaaacattctaatattttaaacatgggggttcactnatatcgataaaggtct

SEQ ID NO: 326534 - DNA, 834 bp, Homo Sapiens
ttacccacaatcttaccatccagctataacaacacccagcattaggatataggtttgaaaatctgaattttcccccaaaatgcattacaatatcctttcctgtcattgaaatttattcaacaaccttaatagtatcctcattaatttaccaaaatattaaatcatcccttgtttttgattatttaagttgctattttctattgttgaaagcaaattttttcaacagaaaaggagggagaggcacaaagccctcaaggaatgtaatagaaagccatggaagcaataaataggtggacccagaaatgggagatgaagcttccaaagataagatacttcaactttacagtttggtttaaggacagctccctatttttaaaacagccccactagggacttttgatggtgaacttccccagatgcccgtgacgtcaggaggtgaaagcaggtgctgcagtgggtggggctggcagctggtgtgctgctcaccgagaagggaggagggaggagccacggagaagcctggagaaggagtaacacaagaaagagactgcgccgtgaccctgtgaggaggcatttatgctttaaacccccatagggagtattcagagggcagaacctcagaagtagctgtgtgggtgtcgaggaggtagagcgttccttgctccttacagacctcactccccttttgcatccaggggccaatgctcctgccatcagccttgcgctctccttttcacttctcttatgggctcaggtggttaaagatgcttatgattttggcctggtgaaaaatccctaaggcaggaaagcacatgaaaggaattaggctatata

SEQ ID NO: 326535 - DNA, 525 bp, Homo Sapiens
  misc_feature (24)..(24): n is a, c, g, or t
  misc_feature (76)..(76): n is a, c, g, or t
  misc_feature (85)..(85): n is a, c, g, or t
ccatcccggtgagcagcacacccngcgcccagcccccaccccactgcagcaccgcctccaccctcccgacgtccangggccatcngggaaagttccacccatccaaaagtcccctagtggggcctgttttaaaaaaataggaagcctgtcccttaaaacccaaaactgttaaagttgaaagtatccttaacctttggaagccttccatcctccccatttcctgggtcccacctatttaattgccttcccatggctttcctattacattccttgagggctttgtgcctctccctccttttctgttgaaaaaatttgctttcaacaatagaaaatagcaacttaaataatcaaaaacaagggatgatttaatattttggtaaattaatgaggatactattaaggttgttgaataaatttcaatgacaggaaaggatattgtaatgcattttgggggaaaattcagattttcaaacctatatcctaatgctgggtgttgttatagctggatggtaagattgtgggtaa

SEQ ID NO: 326536 - DNA, 437 bp, Homo Sapiens
  misc_feature (345)..(384): n is a, c, g, or t
ttcctaaaatctccttccctggccttgcccttcataaaccctgttctgccataactggttaatttgataaccaagaaacaacaagtcttaaaataagtgttagtgaagcaatgatcagtgcatgggtgactgaggggccgacttcggttacctaaaggctgccagaccacccattatctactgaccaccactcgagaccgtttcccaccctccctccgagactgtgcgtggctggggtggcctctcaccatcgccacgtcctaaggtggcaacgagactcaggccaagaacacacagcgcgaccaaaggcactgccatttcccgcaggaatcagaggcgggtgcnnnnnnnnnnnnnnnnnnnnnnnnnnnnnnnnnnnnnnnnaataggagcggagaaatcagaagcaggaaggagcatctgggttttttcctgct

SEQ ID NO: 326537 - DNA, 482 bp, Homo Sapiens
  misc_feature (192)..(216): n is a, c, g, or t
  misc_feature (337)..(337): n is a, c, g, or t
acacactctggattgaataatactgtagcctcattcatatgtagttattcaaattggattaatgtctgtgtgagtttatttgaactagcagaaagtatctgaagatattcaggaataaagtttatacttaaaatagcttatgttaaagaaaatacctgtgattaattcagagggaaataaatgcatggtatnnnnnnnnnnnnnnnnnnnnnnnnntaatactatagcctgagcaacacattaaaactgcacacttgtgcggcgtaagattctctggcttattgggctgaggtgttaagtttattccttttatgaaggatgtcctattacagtcagnctaaggcactaaagctttgcatttatatgtactttgctatgggggaaagaaccttatgattaataagacacatatcaaatgcatagtcaatcattcccacccccatccctggagctgtaacccaaaactgttaaactaagattcc

SEQ ID NO: 326538 - DNA, 633 bp, Homo Sapiens
ttttcaggatgtctaactagggacattggatgtcagttctcctcagaaagaagatcacagttactggtgaatggacaagttatgcatggaaaactgagggaagtgggccaggacccattagagtgcccacagaaagaagttgggttgcagaaaaggaaagcagcaagagtctggcagggatgaacccctgaggaactcagagcctcacggaaggggtagacagaaaaacatctctgctgtcttcacccctgcaacagttggctgactgccaaactgttgagaaacacttctgctcttgtgacccacagcaacactatcaataatgatttggggagttccagaggacaaagaactgggaagccagattgcacaggcatgtctgcactccctgtacacctgaactaagatgacaggtaccatactgcttgtgcagctgtggtggccactgctctgcttgagaatgtgcctttgagtcaccacacccccagatcaccccaaaatgttccctacaacccactctgactttggtaagcacagtggaccagcaggtccctgggaagctgtgggactcctggagatctaagcctcagcataggccatgcttagggaagaggggattgcagctcaccaaat

SEQ ID NO: 326539 - DNA, 796 bp, Homo Sapiens
  misc_feature (138)..(237): n is a, c, g, or t
ttttaaggaaaatagatcagaactggacaacaatctaccttcagctccctgagtgcaaaggcatccttaaccaaaactcaaacttactggattcctctaggcttaaaaaaaataatctgtcccggtgcaggggctcannnnnnnnnnnnnnnnnnnnnnnnnnnnnnnnnnnnnnnnnnnnnnnnnnnnnnnnnnnnnnnnnnnnnnnnnnnnnnnnnnnnnnnnnnnnnnnnnnnntgacagagggtgaccctgtctctctctctgtatataaaaatctaatatttctgttactaaattttaaaggccataaatatggatcctggaaaaccaatgagaatatctttctgtaaattattaattttattcccctcaaataggaaattaactaattgttgaaaccaactaagaattcgagaaaatcagctgaagacaaaattctgtatatgttcagaagggccttaaaggttggatatgtttctgtctcatagatggcagttaatgatggacagggaggtcccttggcttgtcctgaagggtgagtcactccttgggcaagagaaagcccttggcgagttactctctctgttctaactccccaacaggcttctctgtgggtttctgcttaggatcctggatggtcagcctctttcctttccaactcttgccttaatgtttagatctgaccttagaagagacaaaatcagtggttgtgtcagtaatccatgtgacattcttaggacatagctgaaactatgttgagtttcctgctgctctgtggaccacagtgtttggt

SEQ ID NO: 326540 - DNA, 692 bp, Homo Sapiens
  misc_feature (14)..(14): n is a, c, g, or t
  misc_feature (224)..(232): n is a, c, g, or t
cttgactctctagnagggctgattttgaaactgttataatgaaagatggtatttgaaaacttttgatgggggaaattgtcatcatatttatattttgaaaagtgtttccttatttacgcattattgacttcctattgagactcaaaattttaagtacaactggtaaagaattcaatggatcaaattcagtaaatctgaagtcactggaataaaggcccctaagnnnnnnnnntgtgtcaattttaaaggttttcctaactgaagaccattttgtgatagagccaaaggttaataaaatcagtagtgaatgtagcaattttacagataagctattcacaacaagtgtagttacttgaataaaaagctaattcagttctaaaatgccacatgcagtagcagtgaatagctgcttttaggtgctttctggaggaggataaaatacagaatcacggcactcttctcttccagcgtccctggctgcctgtaaattgctgtgaatggggctgtgggctgacaggctctattaagacaaactgcctttctcatcggagagataaaataaatcaggtgtttagtcaaattaaaatacttcagctggagcaggccctggggagcactgatccacctgactaatctgagagaaactcaagacagatgtggtttggggataaagacgaccccatggaacaaaa

SEQ ID NO: 326541 - DNA, 716 bp, Homo Sapiens
tctttttagaaagtttttagggctttcatcttttttctgttttatctaaaatgctcggggaagattctgagcacagggcactgactcctgaattcctttaattatcatttcccttatatctttcatgaatttttagtggactgtgtcgttatcccattgaggatcttgggtcgggaatttctggtctacaatgggaacgttttggctggataggtatttacgttcccaaactctcatagcagtcctgcaaatcaactgccttatatataatactccaatattacctgtaaagttgtcagatgtgtcataccggctcatacaagatcttttgtatcattttataaaacgatacaaaagctgcaaagccaccagcctgcctgcttcccatggagaagttgggacttcctgacaactgcacaaactcacgtgggggatttcaatatcccaaagcatgcagattcctggtgtggctggaattggtgctggggtgctgcgaaagccaggtttgaagcaggaagagaaaaaaaccactcacctgtgtcagcctcgagtgctgaagaacaaccgtgtgtgggccttcaaccctgtctgggtgggttctggacagtgggtggggacccggcgggagaagggaaaggtcgttgagggggcagggcatgaaaactgtcgctggagctgggcaagagggtggaggctgctttggaagctgggcctgg

SEQ ID NO: 326542 - DNA, 1023 bp, Homo Sapiens
  misc_feature (29)..(29): n is a, c, g, or t
  misc_feature (39)..(39): n is a, c, g, or t
  misc_feature (46)..(46): n is a, c, g, or t
  misc_feature (113)..(113): n is a, c, g, or t
caaataacccaaaaactgggggaacctgnctggccccangcccccnaatgctcctgcaagcccaaaacactgaagccaaaacccaaatttccattaacgtgtggtgggaagantttgcccaaaactgcccacactcccacagcccatttccctgcaagaaaatctccaggggccagtggccctggctgcaacctcttggcttttcccacatctccccacctcagggaacagtcccactctgtgtcgaaggctttgggcctgagtggcaggctggaaccaagaccctcatttggtagaaagaaaagccaggtgggctgtaggaggcggtggctaggaactcagggctggatcagtgtggtgggtggctaggaggagtggaaagacactgatgccacctggaatcatagatttcttttcccacaaggatttgcagccctcttccacctcaaagctacctccaagtccagccgctgttcacattggctttggaaagcagcctcattctgggcacctagtaatcctaccccttcctcctgcccctgtccccaagctgaactgggcttggagagcacacagcttttttactcaggggtcctgggggtgggtaggctcccagtagagggagggtgtggtggggttagtctcccagggggatctggcaggggcccaaatccccagtggagaccacacccagcccgccagctctgcaggctccaagagtgaaccaccaggggtcccaaacctgtcattctagctgatgcacagctctcagaatccaatgattattaggaatcttaaccactgagatcttaatcaagagagtcccagaccacctcctgtggggctatctccatgcatccctctcttgcacacctcttttcaaaagtcaccatgtggacttgactttgtcaagggcaaaatctgcatattatctcatgtgtatgaagccccccacccaattccagccgctggagtcttagaggagtggatttgctgagtagtactgtaaacggtctctgctaa

SEQ ID NO: 326543 - DNA, 1069 bp, Homo Sapiens
  misc_feature (373)..(623): n is a, c, g, or t
caaattaatttaagaaataaaatgtttgttgaatacgtatccattggagacagctttcagaatgcttgtggtcaacttataaagttactgctaagttacattgttaaggaggcacaaggcatgaaactcaccttgaatagagttgcaggaattatgaccaagagccaggcatgtatgcacatgagcatggttcttgtatgtatctgaaaatgtgcacggtatatgtttaccaagtaagtcgttaaaaactttggggcatgcacaactattgtagcacaactattgtagcacattagaagccaacaattttccccacatagagggaataatctagacttcttagaaaataataattattattattgagatggannnnnnnnnnnnnnnnnnnnnnnnnnnnnnnnnnnnnnnnnnnnnnnnnnnnnnnnnnnnnnnnnnnnnnnnnnnnnnnnnnnnnnnnnnnnnnnnnnnnnnnnnnnnnnnnnnnnnnnnnnnnnnnnnnnnnnnnnnnnnnnnnnnnnnnnnnnnnnnnnnnnnnnnnnnnnnnnnnnnnnnnnnnnnnnnnnnnnnnnnnnnnnnnnnnnnnnnnnnnnnnnnnnnnnnnnnnnnnnnnnnnnnnnnnngagtgagccactgcgcctggccagaaaattattgataaagacctacaaatccttactttggttccttgttagggttgtaagtgtatggtttcctataaagtggtatgtattcctgcattataagcactcgtagaaagcaaataggaaataagcccatcattacagcccctaaactcccgaatccttgcagtttggtatatttagcaatctgatgtttttgtttgtttgtttaatctacatacaattttgctttttctgagtggtagctatcacaattaacttaaaattgtattttgcctttactacgtaactgaattttcaactgtttaaaagagtcgttactatttgtgtacctattgagcaaaacagtctgaaaacttgtgaatggtttgcagatgtgtcgtatagtgtgctagtcctgaaatttagggaccagaattttttag

SEQ ID NO: 326544 - DNA, 1084 bp, Homo Sapiens
  misc_feature (711)..(711): n is a, c, g, or t
  misc_feature (1073)..(1073): n is a, c, g, or t
ctcataaggtgtttctagtggaaaatggtggagaaccactgcttcaagaatcaaatgatgtccctaattattctagtctacctgtgagtaaagactttctccttggttcagaggaaacatggatttttccctcaaagaatttttaccaggagactaagagaaatgaccaaaacaaaatcatcataataatacaaggatagaagtaaatgagcttaaagaggaaagattcctcaatgtaagtaactagtctaaccacagattgacatggctgaaaccagtactgggccgtcagccctgattcattttccttgcccagatcccatgtggcatcccatgtgggcttcggctccaccagaggtacatttttagcccatgcgagaaccttccagaacccttgaggtataatctttagctgtccactactacttgcagctgcactcactccagcaaatgctaccttttcctagagaggaaactttcccaccttcacccgaaattctatcttcagttatgaagtctcactgtgggagtttttctcaggtatcccagatggtttcatctggattgctcttacccactaaatttcttctacctcattttcatatgtggtttagccttacttagtctcaatatgagttttcaggcttcttgttcttaactttttcattaaatgaccttacccattcttttgtcctcaactatccatatttnatgctaatgaatttcctatagatatatctggcctgaaactctttcaatttccttctcaaatttttactcttggacattcccatgaacatctgtattaaatgcacagatcccaaactccctatcttctcaacgtgcgtaaatcactcattaattccacaactctctgttgaactcttgtcctatgccatgcagggtttccaagtggactacagcagggagactggaaagagacccctgaagtaccgcaggaggaagtgagtcatgccagggtgacagtagtggaggtggagagaaatattaccgatagagctggagtgtgtttagaagtaaagttctgccaatagaataaatgtaagaaaagnacagtttgaag

SEQ ID NO: 326545 - DNA, 361 bp, Homo Sapiens
  misc_feature (23)..(23): n is a, c, g, or t
  misc_feature (34)..(34): n is a, c, g, or t
  misc_feature (39)..(39): n is a, c, g, or t
aattttaaggcctaaatgaaatnacccctaatangatanaatctgggccctgaaaactcctttcaaatttcccttcctccaaatttttactccttggacattcccatgaacatctgtattaaatgcacagatcccaaactccctatcttctcaacgtgcgtaaatcactcattaattccacaactctctgttgaactcttgtcctatgccatgcagggtttccaagtggactacagcagggagactggaaagagacccctgaagtaccgcaggaggaagtgagtcatgccagggtgacagtagtggaggtggagagaaatattaccgatagagctggagtgtgtttagaagtaaagttctg

SEQ ID NO: 326546 - DNA, 723 bp, Homo Sapiens
aactaattgtcaaaatcttaggctcttggctttcaaaatcagtacagacagataagagctttaagtatttcgcatttccccagaggaaaaagtcagcatcataaaccacatgggtcacatgctcacgcacatggtgtcttaaaaacaccttcacttgcagataggcaccaagacttacaccttctatcctcgcccatcctgagaacatgtttgggagctctctgcgctttgtgggtccaagaacaaaccagaaaacccagacatctcacactagtacctctgctacatgtccttaacccagaggctgtagctttaggggaaggggctgctttgaggacaccaaactgctcctgagctcctagagctcgcaagggctgttttgagcaatatactaacttagaaaacaagaaagaacataaatgaatcagctgcaagccccatttcacttgggaggcggaagaggctggggacaggtataaatgaccctctttgaaaaatcaagtatcattttgtttctcactaccaaggtaacagtctgctgtggaaatttcagaaaaccgatgagcaaatggaaaataaaaagcacccagatgtaatcctctgcccaaagataagaaccttgggcttccggtttacatctgtgtcacctttttttcccctcttacatacaaacatattaagttgccttaactctgtgtcttgggggaaggatattactatacc

SEQ ID NO: 326547 - DNA, 746 bp, Homo Sapiens
  misc_feature (23)..(23): n is a, c, g, or t
  misc_feature (375)..(375): n is a, c, g, or t
ctggcagcttctgaaaaaccaancaactcatggtgtggagctcctgattggggaagggacagggattggtctgtacctacattttgttgcaaaagagctcaggacactaacagagaggaaaactagggtggtctaggtggtaataaaatctctatgaaagaagagtatgattgtgtgactggggaatgggcaggtgctggactctggtgcagaggctgcctggcctgcgccaccccacggctggctagcagaccaagctacgttctttcattggctcctatgggacacagcatgggccaatgcctgcctggcctgcaggaaccgccagtgttgtttctagcaaggctccttggaatagatgtgaacacacagtgntaaagactgcatagcaggataaacacttatggagtaggacaagctcacaacccaatgctgaccactactgacaagaccaagtatccaatcataacagatgagactttaacagttttgcataaatacatagtatttgtagactattattaagacactcaattgtaaaacaataattacagtgtaggaaaagagggaggaagcagctatcttctcatgcagcaaggccgacaggaaggacagtggaggactggtgatctgcttatcgggactcctgtctgagacagtgactgaagccgggggcccagcacctatggccaaacaagaagacggcagtctctccagaaccacccagggcggcactggtcacagtt

SEQ ID NO: 326548 - DNA, 542 bp, Homo Sapiens
  misc_feature (504)..(504): n is a, c, g, or t
  misc_feature (523)..(523): n is a, c, g, or t
ttccctaagcactcaggctgaatgcttagtttatttgccttttctctctccctttttaataataaaagcatttaaggctatgagaatagtgccagctgtctcccataggtttgggtatgtggcattctagttttcaatgctttctaaatatttgtcagtacattctttatttcttccttgaaccaatagcaatttaagtgctttaaattttttcaagtggttgggttttagtttgtttaaatttacaatattttggcgaggtttactgcatggtgatcaaaggactccccgactggcacaatttctgttttgggcagaatatgagtttttgcagttggttactggtagctgacagaaatgtttgcaaagcatatgctcacttgtaaagcccatgtgctttttttaaagtttttgtttgccataatgttatgtcaaatgaaaaagaaaaatggatataaagttcaatgtgcttgtaacccatggttaaaaaccagtggaattacntatatgccatggaaaggcngtggagggaagtacccaaa

SEQ ID NO: 326549 - DNA, 808 bp, Homo Sapiens
  misc_feature (431)..(431): n is a, c, g, or t
  misc_feature (440)..(440): n is a, c, g, or t
gttgactctgtgacatcagatgtgctggagactgttagtgcctggagcgtaaaggttttatcacggggacacagtatggtgtattgggttcaaaccctggctctgcctgttactgacctgtcattctttggcgtaatactaacttattaatgcttagagtccttccatgcaaaataaggacaatgttagctatttcacaggtgacatgaaataacctaggaaataaaatcagatatatagggtgcctgataaatgggtagcctctcaatcatttcccggtttcccccttttttggccttcacgttttgtcctgtttaatggtgccttgtacaactggaatgaatgaaatgaccacgatgtttgtcatggacctccttatattacaaacacttagtgagcacttgcctatgtgcccaatgttgtgcctaggntctggggantcctaagactagaggcagaggcttgctcatacaaagattgggtcatagacagtaggcagagggtttcaatagagccagacagtcagaaatgagtagagatggcagctgtcaggagggccgcccactcagtgcagattgcagttggggctcactctcgtatatgatcacatacatcatttcaggtagtcttctcaaccaccccctcggcctagcaaggcaggtgttatcaatctcccctttgtagattaaaaagctgaagatctgaattgtttgatatgttattactcttattaataagatccattcaaaataaaacttgctgtcacaaatgtaattgcagcgaacatgtgcaaagatttagaccaagt

SEQ ID NO: 326550 - DNA, 770 bp, Homo Sapiens
  misc_feature (430)..(430): n is a, c, g, or t
tttgaaagaacttagatcctgatgattaaaatagtgtatttccccccatatttccagaaaaatactgcagagttagtgtaaaaattagtaccatttgctcaatgttgatttgagttttctggagaatgaatacagggaaaggaaaagaaattactatttaaatggaaaaaaattaaacttcatttaaaactatgattaaatgaagtaaaagcttcttcctttttgcccattctttacactgtgataaagtacaataactttatagggttgatacaaagtattatactagaacttcaatttttttggaactgtgcaaagcttaatctcattatagagcagtccatttggtggtttgtttatttagtatggtctctgatgctgtttgctcagtaatgttctttgcttagtgaatagtcttggctaattgttnaaagtaatatattatccgggagtgggaggtgggggcagaaacttatccgaagtagcacctgaaaccatgttttggttataattaaggttcacttaggataataacataccactgccatattcaaatttgtgtttcattccttccaaacattggaagcaaatagtcattctaagttgtttcaaggtattgttaataagatataatgggacagtcaggttcacgcattcatttatttagttagaaaatacctatcaaacctcaattatatactcaacactattctagtgttttcactagaacactgcaaattaaaaaggtgtagttctgccctcatggactt

SEQ ID NO: 326551 - DNA, 696 bp, Homo Sapiens
  misc_feature (679)..(679): n is a, c, g, or t
caaaaaaaaccaaagtaggcacttatgaaactttctcatacccttaggtgatgtaatcagccatataatttatatttgatttcccagggaaggaatcccaaacttttacgaatgtaaactcccttggagaagagggttaggacgctgttgcgctcaagcccccctcagctgtgtgcacactgagccaggacagggtctttgagctttcccactataagaagaacagcaacaaaaggccgtctagaaaaacagaacctgcctctgcttctgctcagggtgtccccgctgggtttccattgtccttttctccaattgctccctcctgtgacagcccatcttgctcatgtaccagccctcatcaccccattccccataaatgggtgtcctcgaggcctctgcctgggggtcagaggtcaccacagggtggccattggcatgtcaacccgctgttaattcagagaagtgggctccacctcattgggagaagtgccatttcagcagaaatttcacacgttagacgtgtgttgctgttaagtaaggggaagagagaggactagcctcagagctctggccatggaaatgacctcctaagactttttcgtggttttaaatattttacctctttccaggtggcatctgagtacatcagatggttttgcaaaatgcaaacaattttttnccttggggatgattttt

SEQ ID NO: 326552 - DNA, 901 bp, Homo Sapiens
ccgaacagacctagcggtgagtatgtggtccaatgccatttctccaccagactccctcccacctgctagacacagcctgacatgtgttgggatgcattttctggtcacaggacaggcattgcaaccaaggcacacagctcaatgcattctttccacccaactctctcctcctttttcaggcaatcttctgttccctccctccttcctttccttccccaggtcacttattcatttggcaactattttgggagcgccaataacgcttaaggacattgtgctgagaagcgtgggggtagaaagttgagcaagagatgggtaagagactgctcctcttccactgctgacatttacaaatttgaggaattacttaatctagcagctgcttgtccccatccatcaacttttgctaaggaactctgggctggcatcagcatcaccacacggtgcctcagaggggtgactttggtcttgtacggcccctcatttggagtgggctgctccaagaccagaatccctgagaatgaggatatcaccttttggcaatgtatctactctaagttccggggacaccttgatggcctctgctcctgggccaggaggggtgtcctcctctctcccacctctgaatggaatgcccagtgtgggtgactgttgtgtgctggaaagacacagagatgggtgggcccctgcacgagacggtgtggaggatgtgctggcggtggctgctgagtgcatcacgtttgaactctcaaactctgtccctttccattgatgttactgtgccagccgttccaaccctggtctaatgtttgttgctggactcccctgaaccgagatctcgggccccagaaaacctcagtggagttaagttcagctacaagaggggaagcagagtgtcctg

SEQ ID NO: 326553 - DNA, 807 bp, Homo Sapiens
  misc_feature (174)..(219): n is a, c, g, or t
gagtgagccaccatgcccagtcacagtatttattccaaatcataaattaggatcgatttgcttgtttactgtcaaggaagaatgtgtttttcgtctgtgggagagtggccaagaggattagtggattaataggtattaatgcagtgacagaaagaaaacaaaggcaaatagaannnnnnnnnnnnnnnnnnnnnnnnnnnnnnnnnnnnnnnnnnnnnnaatggttagctatctaaagggggatagattgagaactgaagttgtcagaaattataatctacatttttcttttcatggaaggcatgcttgggataatgtcgtttaccaattcagtttcaactctgggacccactggccaaaggctgaagctggatggtagatgcatcttctgtctgtccagcagggctactatgctggagcgccttatacagggagagatactgtggtgatcatgctacaggtgtatattttttaacctgaccccattaatttgggggagaaaaccccagccctttcacctcaaaaacatgacccccaccttataactggggaatcaaagaaagcccctcgtttaattcctagctttgcaaacttactaatatctacttaggaaaacattatttttcaatttagactatgagttaaaatcactttgaaaatgaaaatgactgggtttttcactagatttactgaaaataaaaaataaactaggatctctgggtgggggctagctgagagggcttcaagttcatagagagacatataccaggaaacaacaaaacacagtaggttaccggtgctgcaata

SEQ ID NO: 326554 - DNA, 639 bp, Homo Sapiens
ttttgtttctgttccataaacctttattgtgcacagttcctgtgtcaggcactgggctaggggctgggatacaaagacggaggcttacaatctaacagggaagaaagatcacagttacccatcatgtagggcagaatggagcaggtgccagctgaagagtacaaaggaagaagagccaaagggtcagaggaggaagctgtactgggtgggcacagcaacacatctctcacccacagaaacaacccccagatcagccagagagatgaggtatggcttctgagtgcttaaaggactttacgttcctaaaaggcaactggtgctgagaattcacagttgatggcccaggtggcagtgagtgatggctggcatctcccgtccaggccctcacagtgtcctcaaggggtcattgccctcaagctgccgttcttcagagtccgtgaaggggtcgtaggaaggttctgggggagctgaggttgtgctctcatacaaggggttcgagatattctcaggctgctgcttgccaagagctgcaacattaatgtcctcttccgactcaaaatgctggaagccgattgttctccggtttatccgaaagtaggagtaagcaccaagcaacagccccagtcaccaggatgcatg

SEQ ID NO: 326555 - DNA, 497 bp, Homo Sapiens
  misc_feature (40)..(40): n is a, c, g, or t
  misc_feature (60)..(60): n is a, c, g, or t
  misc_feature (73)..(73): n is a, c, g, or t
  misc_feature (108)..(108): n is a, c, g, or t
  misc_feature (115)..(115): n is a, c, g, or t
  misc_feature (120)..(120): n is a, c, g, or t
  misc_feature (173)..(173): n is a, c, g, or t
  misc_feature (201)..(201): n is a, c, g, or t
ctggtgctgagaattcacagttgatggcccaggtggcaantgagtgatggcttgcatctnccgtccaggcccntcacaattgtcctcaaggggtcattgcccttcaangctgccngttcntcagagtccctggaaaaagagagggttgtaagggggcagggcattctgtgtgntgagtcctagttgaatctttctggtgcnactggtctgaggcatgactctccctgagcactgtgaacacgtatgtgctgggcgtgtttgtttgtgctgctgccttgtgttgggaggcaggatgggctgggggtagggccacctgttttagtctctcctgcttgaagctgggtggcccaagacaaatcatcccaactcggctgcagtttcttcatcgtgaaggggtcgtaggaaggttctgggggagctgaggttgtgctctcatacaaggggttcgagatattctcaggctgctgcttgccaagagctgcaacattaatgtcctc

SEQ ID NO: 326556 - DNA, 484 bp, Homo Sapiens
  misc_feature (238)..(238): n is a, c, g, or t
  misc_feature (267)..(267): n is a, c, g, or t
cttagaaacattatcaggtcacagagttgagagaggggctctgacagacgacacgagcttattgccaagtgcagcttctactctaaaagtccaccccacccccccaccaaaataaaagaccccctatgaagggctgaaaaaacatagacggtccagtccgtccttcaggattacgtggaaaataaaatcacagtttgcacttgctgggctgtatttacaggaacagaaggtcttctcnggcctcgggagagtgaccgtgtgaaggcngagggggaccgggtagggggctgtttgcatcggccaaagcagtttctaagacacggcgggactgtgattccgaagggcgctggggcaaaacagtgtctgggaggaaatgaccaggaggacgggggtgggcgatggggtatgaggtctccccagccacaatgaggggcgcccaccacgtaccccctttccggctcagactcacccaacctggagcacc

SEQ ID NO: 326557 - DNA, 690 bp, Homo Sapiens
gatgaaatgcagaattttatagagatattttattatttactattatggttaatgtcattattatctagaataataaccacatccacgacagtgaaggaatttcactcctgcctcgtacctgctggcaaagtaattaagccactgagaccaagactgggagtagatttgccactaggtcatgtggatagtagtggagaagatgaggggatgggaggactcttcggcttgcagtgaagtaaactgggagctccgagtcggcttcctcaagcacatgggctctgtgtgggctctaggaggcaggtctgggaccagtgcgggaaagcttggccccttgtgcaagtacgcctgcccagttgaagctctggatctcgtaggacatcccagggccatgttgcaggttccaatggccatatcctgctttcccaggaagtagaagatttttgccaggcgattcaggatgggaggttggttcttggcaatctcaatggccttgccgaagcagtctagagggtcggtccctgagtacccgcagtcatggacgcccatgggggtggtggagaaggtgtccttccgctccagcagcatcccgaggtagcaccaggccagggctcggtggcgggggtcctcggacttcagcacttgccggagtagggccagcgtgcggttgaaggcaggcagtctcttctgctc

SEQ ID NO: 326558 - DNA, 413 bp, Homo Sapiens
gcttgatgaaatgcagaattttatagagatattttattatttactattatggttaatgtcattattatctagaataataaccacatccacgacaggaaggaatttcactcctgcctcgtacctgctggcaaagtaattaagccactgagaccaagactgggagtagatttgccactaggtcatgtggatagtagtggagaagatgaggggatgggaggactcttcggcttgcagtgaagtaaactgggagctccgagtcggcttcctcaagcacatgggctctgtgtggggctctagggaggcaggtctgggaccagtgcggggaagctagcaggaggcagaactcacctaagtgtgtaacttgcagagctgaatgactatgcagtggactgcatcaagagacagtgagataa

SEQ ID NO: 326559 - DNA, 650 bp, Homo Sapiens
  misc_feature (638)..(638): n is a, c, g, or t
acagcaatatgcagtcctttatttttaacctttacttctttgtggtaggtatgactcttatgtactgcacagggttaaattctgcttcattagcaagcctgaaaattgtctgcttttatgaattaacttttgatataactgaaattgttctcagttctgttcttaccatcctgtcttatttattcaagcttttaacataaataaaccagtggcagattatattttccaaagatgcctgcatcccacatgctcttgtacactgtgaccttgcaatttccccatcgacaggtggaatctaattcccctctcctggaatctgggctagtgctttgggtcatttgtatgccaaaaaatgtgaaagtaatcccgtatgactttcaaggtcagattagaagaggccatgaagcttttgcctggttcttcagtaatgcttgttcagtggaagccagataccatgtaacaagactgttctaaaaccaccatactgcagaggtcacatgatggtgctctgagcccaaacttctagccagtaccaccaacacataagacaaggagagcaaagccaaactgggccctccaaagcagctcatttgccacctaagtcccactaagtgacctcagttgatgccagaaggaanactgtgccgaaa

SEQ ID NO: 326560 - DNA, 794 bp, Homo Sapiens
  misc_feature (730)..(730): n is a, c, g, or t
tccaacttgtttgacacattagaaaaaatccatatccaattacaacagtaaatcgtgtaaagttgtcagggagtgttataatgacacgttttctctccctttctatctagggagcagtaatgaatgcaatggaaacaaacctcgttggaagtgacaaatatgctgcaagatttggggaatctatagttaatcttggcgacattgacaatgatggctttgaaggtaattaaaattatcaaattggtgcttgatttctgcttttaaaatggtttatggaagaaaatatgattaaagttttgtattgttttccttcctatagaagatggagccagaatggcatggctaagttttttcttttgctttagtgtttatatattacttctcctcaattgtcacccattgatctttaccactgttaataatggatgatattcaaaataccttatttcagtgattctaaggcaccattgattagaaactgcattattatttatgtgtccctaaaagctacctattaagctgttacacccaccatttttctgttaaggaagatcctgatttcagaaataataaaatatgggcaggaaatgtgttatcatagactcattggaccacggtatttaactatcagtacaataaagacactgaccaaacccaacagaggctggctgcagagctggagcagggttttggaagcccctgctctgccaggcattccctacagctatgntgtggaggatctggggaattcaagaagagattctgagcaggccactgggaggcctggggacagg

SEQ ID NO: 326561 - DNA, 490 bp, Homo Sapiens
  misc_feature (161)..(185): n is a, c, g, or t
  misc_feature (464)..(464): n is a, c, g, or t
aacgagagaaaaaattctgcataaaggttcatcgaatgtgtgggcaggattaaatataccaaccaatcctgttaaaaatggctgggttttagttttatattttgcattctactgtgtcatggtatgtactggtagtaatcggtagaaacatagaatctatnnnnnnnnnnnnnnnnnnnnnnnnngacatgtgtccatgttttaaagcacttagtaatggcaagagtcctttttatgtatgtaaagatgtgatttctgattacatttaattactcaattttcttgaaaagttaaggatgcttaattgttaacagcagttagttaaaagcagaagatagcattttaagggagcaataataccatggaattgtatcatttgtgattgtacttcttagaagaagagatgcacaaggaaatgagaattttatattgtaattcaggaataaaaagaattgagtgtgtcnaagggccaaagtgatatgaaagtatg

SEQ ID NO: 326562 - DNA, 579 bp, Homo Sapiens
ttttttaaatctcatcactcttagattaacaggaaggttttgcctttctggtgtaggatgcagtaagttttcttggggagagaaatgagttcaggctttggaattattcatagtgaccagggacattgccagcactcccgggtcctgcataatctaagataatgctcctgtaaccatgaagtctccctttacaaaatctgagggggaaaagagatcctggtgtctaggaacactggcctgggcctttcccaaggcagccttgggtctggtgaggagctggaatcccctctggcttttgtagcctgtcatatcagaacattccaagtcagcctgaggaagaaaaggctgctgctgggatttggtggggcctgtagatcaggagaacactggagctttctgtgtatgtcgatcttttcagataaacctggccttctacccaactccagctcaatcggggtctcttagaatgtaatggtaaactttaaacaatctttacgctacaggatagaaaacaaatctgacaagcatccattttctaagtgacttgttggactgtgccttttcttcaaggagaaaatg

SEQ ID NO: 326563 - DNA, 541 bp, Homo Sapiens
taccatttaggttttggtgcttatgtagaagtaagaattaacactttatatcatatatgagctactacattattacatgtatagcctcaaaggtagaagaatgatcttgtattctcatttatgcagaaatatacaattgagaatgacttgtcccctgttgaccttccataccactgaaagaccagtgtatttctccctcctctccagcagcacggagctgctaatagctctccattaatgcatgtttgctttatttcttacccacgtgcttttgttcctgctattctttctgcctccccttcctccaccctaagtagcccttttctgggtccccatgctcatgtgcgcatatctccatcattgtacagaatacagtgtagtagagattttatctctgtttattgccttagtttgtgagctctagcggacctctgagtagatgatgaggtcaggattatatcatattcatttttgtcaccctagcaccctgaactgccaggaggtgctaaactaaaggtcattggtttttttccataatgtt

SEQ ID NO: 326564 - DNA, 408 bp, Homo Sapiens
  misc_feature (114)..(114): n is a, c, g, or t
  misc_feature (239)..(239): n is a, c, g, or t
gggagtttatagaataaggtactggagaagagggaactacatacaggtgaggcctcaaaagagtacgcaaaaagttctctgcgggtctgtggccaagggctgggggtggagggnagatgggtgggctggggattagatacttggtgaaaaagaattggaaacaaatgtatgtaaaatgcttctaatttacttcataagcatatgaagttatatacacaattttaaacaatggcctatanaactgaaaaatattatacttatcaagttatttaacttgggatagagctggctttagaataagtcttcagtgaaatggttcatacttgaataataccaaaaacaaatcttaaagttttaattattattataagtcaaaattaattcagatgcaaatatgcataatcacaa

SEQ ID NO: 326565 - DNA, 786 bp, Homo Sapiens
  misc_feature (277)..(310): n is a, c, g, or t
gtgtgattatgcatatttgcatctgaattaattttgacttataataataattaaaactttaagatttgtttttgggtattattcaagtatgaaccattcactgaagacttattctaaagccagctctatcccaagttaaataacttgataagtataatattttcagtttataggccattgtttaaaattgtgtatataacttcatatgcttatgaagtaaattaggaggcattttacatacatttgtttccaattctttttcaccaggtatcttatnnnnnnnnnnnnnnnnnnnnnnnnnnnnnnnnnnttggccacagacctgcagagaacttttgcgtactcttttgaggcctcacctgtatgtagttccctcttctccagtaccttattctataaactcccaacatgttagcactgtaagactctcagcttagtgacagtgacattgcctcatttctggaggtctctacctctctccgtgtggtcaagaaactgccattgggcagaaaacacaagtgtgtatgagatttgcctccagtgttttcctgttctcaaatatcacagtcctgttctgcctgtgttccaatctctgaaaacagttttctcaaatattctatccagtttcagttttctcgttggtcatggtgggagggcaagtccatcttggctggaagaggaagtccttctgcgtctttttctctttgtccttccacatggttttgcattgtggattttctaaacttgccgtataagtaagcatgtgcctatttgtgaagggaaaga

SEQ ID NO: 326566 - DNA, 221 bp, Homo Sapiens
caggggcccacttcccacggggacgggaagaagcagatgggagtagtccctgggcaggtgggctcatggctgtgtgtgcaccctcagttggctttagtttgctctaagaacaaggtaggaggtggggatgcctggggaagggggtcattcacagagaatggagaagactcaaaattatccatcagcacatgagccttttctacttctaggggaaatatttt

SEQ ID NO: 326567 - DNA, 345 bp, Homo Sapiens
  misc_feature (19)..(19): n is a, c, g, or t
aataataactgcttactanaactctagttacgccaaactttctttaaacatttttggtgagagtaatggtggagaaagaggcaaaatccatttaattcacctggtcacttatacacgcatttctttaaaatatctgattaggtatttatagtttgaaagagatgatgtttccttgactgagcatcttgagaaatcaagatttagttgacaattagacatgaggagaatagagagctagaagaccttgcataaactgattgaccaagagaatagatacactaatcatgtctacaggaacagaaaataaaagagacagagaagagataataaatctgatgggtaaaa

SEQ ID NO: 326568 - DNA, 997 bp, Homo Sapiens
  misc_feature (921)..(921): n is a, c, g, or t
ccaagagcaaccattgcctggatgctgccaaggcctgcaacctgaatgacaactgcaagaagctgcgctcctcctacatctccatctgcaaccgcgagatctcgcccaccgagcgctgcaaccgccgcaagtgccacaaggccctgcgccagttcttcgaccgggtgcccagcgagtacacctaccgcatgctcttctgctcctgccaagatcaggcgtgcgctgagcgccgccggcaaaccatcctgcccagctgctcctatgaggacaaggagaagcccaactgcctggacctgcgtggcgtgtgccggactgaccacctgtgtcggtcccggctggccgacttccatgccaattgtcgagcctcctaccagacggtcaccagctgccctgcggacaattaccaggcgtgtctgggctcttatgctggcatgattgggtttgacatgacacctaactatgtggactccagccccactggcatcgtggtgtccccctggtgcagctgtcgtggcagcgggaacatggaggaggagtgtgagaagttcctcagggacttcaccgagaacccatgcctccggaacgccatccaggcctttggcaacggcacggacgtgaacgtgtccccaaaaggcccctcgttccaggccacccaggcccctcgggtggagaagacgccttctttgccagatgacctcagtgacagtaccagcttggggaccagtgtcatcaccacctgcacgtctgtccaggagcaggggctgaaggccaacaactccaaagagttaagcatgtgcttcacagagctcacgacaaatatcatcccagggagtaacaaggtgatcaaacctaactcaggccccagcagagccagaccgtcggctgccttgaccgtgctgtctgtcctgatgctgaaacagnccttgtaggctgtgggaaccgagtcagaagatttttgaaactacgcagacaagaacagccgcctgacgaaatggaa

SEQ ID NO: 326569 - DNA, 334 bp, Homo Sapiens
tttatcatcttttacttcagtatttccacaaataacttttctaaaaggtcgtaggcaaatgagtgattagtctcactcagaatatttaattggtttaaaatgagaaaatgaatctttttttctctgaagacgtaacttttaaaatcatctgacaactgacacttcactctgatgtccttgggatttgaaaatatcccagtgatggccgcatcttccctatcataaaaaaatctaaacactaaggctattcttacaactggaatataacaagcttcttccctgttaataagccatctcttctaaaaaaattttacacaaatttgatcaaacaagg

SEQ ID NO: 326570 - DNA, 747 bp, Homo Sapiens
  misc_feature (29)..(29): n is a, c, g, or t
  misc_feature (736)..(736): n is a, c, g, or t
ctctccaaccaaatattaaattggacctncaccagcagctctagggaaaggttctcaaatgagtccgtacctatgcccgcatttctgttgggcaggtgacttgccattctgtgactggatgtgtatttcctgggctatcacagtctctttcagaggactggaagccccatggggccaggtcttgtttattgttgcactccccgtactttggatatagcaactgtcaatagatgttgagagaatgaatggagagcacagaagttgatttgtgtgagaagggctcaaatcctggctctacctctccaagcctcagtttcctcctctacaaccataaagttgtgaaggattaactgagacaatgtttagcccgatgcctgcaaggagtcaactctcaaaacggtgtgggccaaattctgggggagatggtgagccctgattttagatgtgatctccaaaaagcagctgagcaagagagtcaagctcagaaaagaaggctcggcctagagacagaactgagagttggcaaacagaaaaaacgggggtcagtgaaccccaagaacacccacatttgaagggacaggaatagggaggaggggaaggagccagtgaaggaagttcagaggcaacaatcacagaaatgagagggaaaccaggagagcatggtgaaagagaagccaagagacactgttgcaaaggggcagggaaggcggtagtgtcaggtggagcgtccacactncctgtgccgaa

SEQ ID NO: 326571 - DNA, 770 bp, Homo Sapiens
  misc_feature (34)..(34): n is a, c, g, or t
agcagtattgtttataattgcaagcaattgggancaatccaaatgtccaccgatagtaaaatgaaaaaataaattggggtatattcatacaaggaaacaccacataacagtgaaaagactaaaactacacccgcaagtatcaccctgtttgaaaaacaaaaagctaaatctaagaagacacagaaaaatgcatacggtccactttcatgtatataaaattaaaaaacaggctaaattaagccacttcatgactacaagaagaggaacagaatgcaacacaattcagggtggttacgtctgatacaggaaaagagaatatgatctgagaggtgcacgtaagggtttgaggggtatggtaatgctctattttacttagtctgaatgctagtttcccgcatggttttattaaactctatataagttgtatcccctgcctatgtacgttacataatcatttaatgagcaacaacaaagaaactttgaatactttcccaatgcatctaaattgagagttcaatgtttttaacacttcctataagcctggttgaacagatccccaggctatttatgacttctctatcattcacactgaagaaaacgggtaaaaccagactacaacgcaggagttaacaattaaaaggtaacacaacctaaacagtaagggctgtgtcgtctaatattttagcatctgacaaacaggaattgataatctttcaaaatgtctttactgacaaactagagctaaggacatgtcggatagctcctttcct

SEQ ID NO: 326572 - DNA, 808 bp, Homo Sapiens
  misc_feature (58)..(58): n is a, c, g, or t
atttgttgaataaatgccatttttggttatttgtttaccttgataagaatttataganttttctgttatatttgggaaaccaaaggtatatatccatatttaatactgtttgctgacaaaaatttgaaataattcagacataaaaacattgatttttatgcatcttaatttatgaacagtgttttcgatgtcagtttttttctccaatggtgagagtgattcttgattcatttcatcagttccaactaatgaaatacatctatgagaagaatgttttgatttgtttttacttctgagatttctagaacctaatattatactgtgtcctgttagagggttttcaatattgctatcaactgcctggtatttgttagggatgtataatttgtcttcttagggagatccctacttatgtttatttcattttgagttttcctttaaaactccctttttttctctttattgagtaaacagaaaactgtattatatttgggtagcagctaattatgtatagcacattctcagtgtttgcgagcttaggatgagacagatactgtcagtccctgctggcagggatgtacattggtcagaccaaaaaaaattgtcagaaatatggacagtgatttctgtataagtgtgttcattgaattaatatttatattagagaataattggaaaccatccagatatctacaaaaaccatttttaatgacttgaaaatatgcttgtaagtgaacaaatgattgtgaaaaatcggtgttgagaatggattccattgtgtatgaactacactaagatattagtaaga

SEQ ID NO: 326573 - DNA, 796 bp, Homo Sapiens
  misc_feature (272)..(282): n is a, c, g, or t
aaggaactgaagattagagtggtaaaggtcagttcagagttagggctgggattttcctgaccaccagcattatctctcttctctcatgaggagaggagaaggtaactctgcgatggctctatttaccatcttgagattttttcctgagctttttttgagaaccttactatcacactcctcaggaaagcattacagtccactctcttcagggatatgttttccagtttgtagatcatttaggcccattttcttttctttcattcctttggaannnnnnnnnnncctttcaactggacccttacctttaagaagacagaagctgaaagaggtaaactttatgcataagacttagctcttgttccaaatagttaaaacacatgaaggaaaagagggaaatgaaatattttcttatggttttatttttattacttcctgaattttggtatgcctcttatttcatagtaactgagttggctgtgcatctggctatgtctcacacccacaatgtttgttgactgtagtgtcggtggtgtgccccagctgttctgtaaatagctgcagcttactgggcaaggtttttggatgagaatgtccaaatttatcccaggcatgtgaccaccaaccaaaaacattggccttctcaatgccatcagcctcttttaaaagtatctagtcaatgtagatgcttaaaccaatcggtgattgacttgatgtaaaatatgacaggactccttttattattgaatgaagtataactcaacagaattttgaacttaaagaatttaattaagcggcc

SEQ ID NO: 326574 - DNA, 742 bp, Homo Sapiens
  misc_feature (699)..(699): n is a, c, g, or t
  misc_feature (729)..(729): n is a, c, g, or t
ttaaacatttctagaagcagttaacacctccaggtccttatttcatgccctggagcaatcacttattaaccacttcccaaatttcacagtttctgaaaattagctccgccagaatagagatttaatgttttcttcaaggattaaagagctcattaggaagtgatttttttctcactttcccattgatttttccgtttctgctgagaccattttgttatgcaggctaagagtaaagacgaagaatcctctctttcattcttaggttgccgcaagacagaagccaggcttgggtgagagttcaacacacatgggagctgaggcgagctgcacccgggttacttgaacagccctgcaggaaatgcagtgtgctaggaccggggagagccccagtttcctctgccagttcttctatgttgtttcttccttagggaaaaactgtagtgttcattcctgtgggtgcccttatatttctaataacctcagtttttttatggtatttcagtgttcatcaagtacactctctttccctctcttggtatctttctcttcatctctccctctgtccatccctcccaaccctgttctatggagaactggcatattgaagttccctgtctcaaaggcagtgattggcacatgtcatctccaaagaaaagatcagtgaaaatcgtgcaagaaacttgctttctctcttcttgnttgctgaactccctaagatgtggaatctgntttgtctatagag

SEQ ID NO: 326575 - DNA, 574 bp, Homo Sapiens
  misc_feature (561)..(561): n is a, c, g, or t
gaaaaattgtctcgctgtgttgcccaggctggaatagagtgagtccacgatgtccacttatcctttcaaagtccagtggggaaggaagctcaatctgagccatttatagtgatttgagtgtatgcaataagagactgttaccccagtttagacttctgctctgaaagagagtttgttgattttccctaagcttctgtgaacatgaagaaaaagcaaggccaggatggagaaaagggggggcaaagaagcaacctgcattcttgcacccctgcagtttgacaaaacaagggtttgtagggtggatgttactcaaggtttaaataaactcataaaaggtaattatatgtgctccactctttttataggtagaggttgagccagagccaaatctcctggtggggaggttctccaaggcttcccaaagaactcacccatggtaaccccaaggtagccagctttgaccgtgaacccacagtgggccttggtggagaatctgcgctcacagagaggggattgcaattcctgccctatcaagtgtgagctcgtgcccaattcttggcntcgagggcaaatt

SEQ ID NO: 326576 - DNA, 705 bp, Homo Sapiens
  misc_feature (406)..(440): n is a, c, g, or t
  misc_feature (449)..(508): n is a, c, g, or t
agtatatacctcatgtcttttaaggccttctcaacacttcgaacttggtcttatagtgaggaaatttttatttattcgttgaataaaaatgtaatgcatacctgttatataccaggcactgtggtaggtatgagatagtcaaaatgaaacagaacatagtttctgccttcaaggagcttcttgttcaaaggaattttacaaaatgcctaataccattaataaataaataaaaattattatatgtttaacaatatgcaaatatttgtaatatatgttgataccctaaattacagtgtaaggaaaatttaaatcatattttattcataaatcttgaatacgcaatatttattttgttcctttaaaatggaaactcttaagaatccatggctgggcacggtggctcatnnnnnnnnnnnnnnnnnnnnnnnnnnnnnnnnnnnaacttaacnnnnnnnnnnnnnnnnnnnnnnnnnnnnnnnnnnnnnnnnnnnnnnnnnnnnnnnnnnnntataccaaagaatgaatgtatagaatatatacttatctatggaaaacatctttttgttacatggtaaatacagcagaagtttctcagagtagtccagttgtaaaccagacacatgaagataaagtgaatgaaacttagaagaatatgacgaacagaatgaaatgaagagggtagtaaagatgtttgtgcagaagttt

SEQ ID NO: 326577 - DNA, 491 bp, Homo Sapiens
  misc_feature (140)..(140): n is a, c, g, or t
  misc_feature (354)..(363): n is a, c, g, or t
  misc_feature (386)..(386): n is a, c, g, or t
  misc_feature (390)..(390): n is a, c, g, or t
tggaacctcttaagaatcccatggcttggccaccggtggctcatgcctgtattccccagcacttttgggagcccaaggccagaacttaccgattttcatatccaatgggaggtactgggaccccattccccccacagttnccaaagaatgactgtatcccaaagaatgaatgttatggaatatatacttatcttatggaaaacatctttttgttacatggtaaatacagcagaagtttctcagagtagtccagttgtaaaccagacacatgaagataaagtgaatgaaacttagaagaatatgacgaacagaatgaaatgaagagggtagtaaagatgtttgtgcagaagtttnnnnnnnnnntggttgaggggggctgaacatgngtgncacgcctgtaatccccgcacattgggagccaaggcaggaggattacttgagcccaggagcttgagacttagcctaggcaatatagcaagagttatctacca

SEQ ID NO: 326578 - DNA, 755 bp, Homo Sapiens
aagcttattacccgatttattagagagatctctaaaaagacggggtgtggcgggggtaggtgggcgaggaacctgggatgcaaacgagtgtttggggccaggagtggctgtatggtttcagaggcgcccaccactctgggtttgagggacacagcaccctcgtctcggcgctttggattgtcacgcaccagaccacggggcggaggaatggagtggcatccctggggggagttaagacacacgaggtttgcagtttcattttgtttcagaatcagtttggccataaaaatgggactgggttggggacaggcggagcgtttgaaccaccggagatgaggaggaggtggcaggcgcctctcctggggtggggactgagggctgtggagacagtaccatggtgaaggaccccatggcaatgggagtattgcactgagccaggtttcgggggaacggggacgtgtcgggatggcgtagggggacagagcctggcaggagacacatggaagtttccgccttgtcagtctcagagcaaacgccttttagtctttacagtacaggaatttggacactgcccacgttctcagtggacagcagccatcagaggtgacccaggaggggaagtgggcattggtcaccaaggtatttacagacttctatcatgggggacagcggggtgggtccagcagcctctctcgcgggggatctgagggagaccgagttcgctaaatattataaataggtcttctgtgccgaat

SEQ ID NO: 326579 - DNA, 786 bp, Homo Sapiens
tgaagactaaataagtaaactcatgtaaattgcttaaaatatgcctgccatgtaagtgttcaatagtaaataaggaccagtacttattatgagaataaatataaactattattacttgataaaaatataaaggcattaataactaaaatctatttttaaaaatatgggccatatattaatgtctgcctccttcgtggggaaacttttgtttttataagttaatgctcccaggtactaaataggactttatttctttagcctacagccttcactctaacccatagttagggggaaggatgtggtgagactgttgaaaaattccaagttacagttagtgatgaaaaagtgggagctcaaactggaatttgaagactgcatgttaagtagttatgccaaaatgggagggaagagccttccaggccaggaagcccacttgcaaagacctagaggcagaaggaacagagcaatataaaaagattgatggagctggagcaatgatgagtgtgctatatgtttgatgggagccaaatcatgccaggcctttgggcatgttaaggagtttgcccttatccttaagggcccatgaagggctttatgccagggtataacataaccacatattttgaaaagatcactctgggtgcagggtgaggaactaacaagcaagaagccagaatgagctcagatagacaaacagcgaggccatggcaaaagtccaggcaagagatgatgatagagataggaatgaataaaagtagatggatttgaggaatatttagaaggtaa

SEQ ID NO: 326580 - DNA, 499 bp, Homo Sapiens
  misc_feature (375)..(375): n is a, c, g, or t
  misc_feature (435)..(435): n is a, c, g, or t
  misc_feature (465)..(465): n is a, c, g, or t
  misc_feature (476)..(476): n is a, c, g, or t
atttattaagaccgatgctttaaattattgaaaagagtggagaaaacgatgtgtttttatcgaggtaaaagttgcgtaacataactgtcacatacgtcacatcagatttcaagtgcaattgagtggcattgggtacattccgtgttgtgcagccatcacctatgttgaagaagagagaaagtggttatttttaaaaagtgatgccggtctggactacagctggctggaattcagcacctattcaggaatgtgtcgataatgggagtgcccacaacagctcacagccagcgataattgtctatccctttgtcttcatttccaaggcgtctggaactggaaaaaaggggaattagctttagctacgctttgtactgnatttccacttaaaaagttatggaacttgaacactgtataatgttcacccaaataaataanaacaatttacttgaaatctgagcaaatcgntaactctttgnggattatggaaattttgctggtg

SEQ ID NO: 326581 - DNA, 456 bp, Homo Sapiens
  misc_feature (17)..(17): n is a, c, g, or t
  misc_feature (26)..(26): n is a, c, g, or t
  misc_feature (33)..(33): n is a, c, g, or t
  misc_feature (53)..(53): n is a, c, g, or t
  misc_feature (58)..(58): n is a, c, g, or t
  misc_feature (64)..(64): n is a, c, g, or t
gacccgaaactccaagngtaaacggnacagaanggctgtaattcccccaattnaacantaactnaccctggggagtacaatcctaaagttgtggtgaaaaattaagggaaaaatgtgttaacaatttacccaacatgtgacttttttgttgttgaaaacatttcattccatgatgccaaggaggtttcttattcaaatatgagtgtgaaacacaactctcaaagtgtgaataaaatgaaactcatatgacaagtgttcaccctggatcttctttctgaatgtcacttgcatttaaatagcttatggaaacatacctagtgttttacacagattacaaacttgccagtgagaaaaaggatgtccctgttctttcttgctgaatttaaaatgtgaggcatgcactataaacttcctcttagacactcgtactttaaatgtgatattgttctctttttt

SEQ ID NO: 326582 - DNA, 465 bp, Homo Sapiens
  misc_feature (21)..(21): n is a, c, g, or t
cccaagcccctggcccccaangactggccattttttaaaagattcactgcctgaaagagttagcccccagttctctcccctcctcctaagccctggccctgtcccaaatacaaacccaaaaaacagccccttccagccttcccattccacaggcagtgaagtcccaccctagtaacaggtaatgtccccaggctaggtcaagaagttccatgggccttttggcccatccttattcttgcctgccctgtgtctgatgtggtgaggggcaggaaacgaaagtccctctccccacactggggtctgaagccctagacttagggaaagacagtgggaggcatccaacttagcagcagaccaaagtgtgatctccaaccaaggaggacgaaaatcaaaactcatacggagaaggagaaaaccttaactggtccagaatgagtagagaaaggtttgattaattaagcggcc

SEQ ID NO: 326583 - DNA, 811 bp, Homo Sapiens
aggattttacagctggatgaaatcttagaaataattcagtttaacctcctcttttttaaaccacctcactgtaaaaatagaaatccaaaggctctaggtgccaggctggcctgcccctgtcctctgctgttccctctgttgacgaattgatgagctgactcaccctgcccctccctggacctcagccctggggcttggccattgtgagcctcatctgttctgtgaagcgtgttcaactccagctgaataccagaaatgcaatgtccctgtttacttccaattcaggtagaattgtatatacttcccttatacagcttcccacactgagctgtctcaccatctctggacagatgagtaattcgtgcctgctctcccttctcagtttgtcttctgtgtgaactgccaacatggtctctcctttttagaaagtcacatactgtgagtgcaactttgtggaagtcaatgtacataaacatgtgaaatgtgcatcccagctactgtagataatgaggcagctgtatatgtaatgttgaggaacaatcaccaagataatttcagtggaaaagccagcacagaagaggctgaggagcacgctgcccatgtatcctacgcatagtgtagctctagcaggattcgcgaggagcaagtgacagcaggtgcctctgcagagaggaactggggacaacagtggggatgaagttaatacgtcgtcattattttattttttagatattctacaatgtgaatttactatttattaaaaaataaataaaattataagcgggcatgttggctcatgcctgtaaactca

SEQ ID NO: 326584 - DNA, 776 bp, Homo Sapiens
  misc_feature (145)..(145): n is a, c, g, or t
  misc_feature (158)..(279): n is a, c, g, or t
  misc_feature (286)..(286): n is a, c, g, or t
  misc_feature (395)..(395): n is a, c, g, or t
gacagggtctcattctgttgcccagggtggagtacactgtacacgagtacagcactgctggagtacacggctcactgcagcctccacctcttgggctcaatccatcctcccaccttagcttctcgagtagctggaaccgcaggtnggtgcccccatgnnnnnnnnnnnnnnnnnnnnnnnnnnnnnnnnnnnnnnnnnnnnnnnnnnnnnnnnnnnnnnnnnnnnnnnnnnnnnnnnnnnnnnnnnnnnnnnnnnnnnnnnnnnnnnnnnnnnnnnnnnatgagcncgcgcgcctggccgagcattatcatttccatgttcacaaagttaggttttcatgaaagcttcaaagaacctcaaaaggttgactgactcccaaggtcaagggtctgggnggagtttcatgcagctgggttagtgtctctgaggactcacggcagggaataaggcaagtggaggggcagagggcagatcacacagtgtcttgtgtgtcaggccaagaagctgtgtatgtgagtgacaggggagcaaggttacccttgagaaacacacaccactttgcatgaggaggaagacactgggatcagggagactggtctcttgcagtaatccaggcaaggcatggtggctgatactggcagacaacttctagagcagtcttatccatgacaactttctgtgagggtaggaatgttctatatcttcttctgtgtttatgctgtgcagtacagcagcctctagcaacatatgactgttgtgcacttcaaatgaggctg

SEQ ID NO: 326585 - DNA, 402 bp, Homo Sapiens
  misc_feature (38)..(38): n is a, c, g, or t
ttgaacctgaaccccccaaggtccaagggtcctggggnaatttccatgcaacctgggttaagtgtcccctgaaggactcacggcagggaataaggccaagtggaggggcagagggcagatcacacagtgtcttgtgtgtcaggccaagaagctgtgtatgtgagtgacagggagcaaggttacccttgagaaacacacaccactttgcatgaggaggaagacactgggatcagggagactggtctcttgcagtaatccaggcaaggcatggtggctgatactggcagacaacttctagagcagtcttatccatgacaactttctgtgagggtaggaatgttctatatcttcttctgtgtttatgctgtgcagtacagcagcctctagcaacatatgactgtt

SEQ ID NO: 326586 - DNA, 970 bp, Homo Sapiens
  misc_feature (149)..(237): n is a, c, g, or t
  misc_feature (400)..(422): n is a, c, g, or t
  misc_feature (720)..(720): n is a, c, g, or t
  misc_feature (741)..(742): n is a, c, g, or t
  misc_feature (744)..(744): n is a, c, g, or t
  misc_feature (748)..(748): n is a, c, g, or t
  misc_feature (776)..(863): n is a, c, g, or t
  misc_feature (869)..(869): n is a, c, g, or t
  misc_feature (879)..(879): n is a, c, g, or t
  misc_feature (885)..(885): n is a, c, g, or t
  misc_feature (959)..(959): n is a, c, g, or t
tgggctcgagcaattgtcccacttcagcctcctgagtagctccacaggtgcctgccaccatgcctggccttattatggactttaaacactttaagaggtctttttgttatcaagatattattaacaagctagatgcagtggctcacacnnnnnnnnnnnnnnnnnnnnnnnnnnnnnnnnnnnnnnnnnnnnnnnnnnnnnnnnnnnnnnnnnnnnnnnnnnnnnnnnnnnnnnnnntctataaaaattcaaaaaattagctgggcatggtggctggagcctgtagtcctagctgcttgggagactgagggaggaggatcacctaagctccggagttcaaggttgcagtgacctatgatcacacactgcactccaggctaggtgagtgaggttctgtctnnnnnnnnnnnnnnnnnnnnnnngacacacccaatgcattgagataaaaaaagaaacaaacaaaagtattgcctattattgttttaggggtagtatgatgtatgattatgcgtaattttctttcctttcttctgtctcttatctatatacagccattccataataattaataaagaccatagataaattataatcattttctttaatgacatatgctaacaaaaacataaacttttcctcctttaaaatctaatgcccccttaaaaaccgctgaatggtaggtacaccttaaacagacgaactctgtgggtatgtgaaagngagctaaggaagatgttattnnanacanactaccagccatgtgcggctggttcatnnnnnnnnnnnnnnnnnnnnnnnnnnnnnnnnnnnnnnnnnnnnnnnnnnnnnnnnnnnnnnnnnnnnnnnnnnnnnnnnnnnnnnnngggggnccccattctntactanaattacaaaatttaggccgggcgtgggtgggcacacgtctgtaattcccaggttactcagggaggcttgagggnagggcgattca

SEQ ID NO: 326587 - DNA, 487 bp, Homo Sapiens
ggcttcctttttctttctttttaaattttgtgtgttaagcaatcaagaggtgactctgttgatttgcaatttgatctaatccattgttccacagggctgtctccccttggatcacaccctttctgggtttgctggggtcacgggatcatgcaggccaagagtgggggcctttgtcctatcctcagtgttatcacatcagggtcacctgctcctagtagctgaatctggtcatgagcatggtttctggaacacagcaggctgggtggccagtggcaaggcactgatttctctgtgcttgggtttcctcttagataggaaggttgaattaatggggcctggcctcctagggtaagtataaggattaaggagttgatgtgtatgaagtgcttaggacagtgccttgggcagagtctgtgctacctaagtattttctgctgtaattactattaaaaaccactccaggccaggtgtggtggcatatgcttat

SEQ ID NO: 326588 - DNA, 1355 bp, Homo Sapiens
  misc_feature (101)..(101): n is a, c, g, or t
  misc_feature (435)..(472): n is a, c, g, or t
  misc_feature (787)..(787): n is a, c, g, or t
  misc_feature (808)..(808): n is a, c, g, or t
gtgctgtttgaccaatggtcatgtggccaagattggggacttcgggctggctagggacatcatgaatgactccaactacattgtcaagggcaatgcccgcnctgcctgtgaagtggatggccccagagagcatctttgactgtgtctacacggttcagagcgacgtctggtcctatggcatcctcctctgggagatcttctcacttgggctgaatccctaccctggcatcctggtgaacagcaagttctataaactggtgaaggatggataccaaatggcccagcctgcatttgccccaaagaatatatacagcatcatgcaggcctgctgggctttggagcccacccacagacccaccttccagcagatctgctccttccttcaggagcaggcccaagaggacaggagagagcgggactataccaatctgccgnnnnnnnnnnnnnnnnnnnnnnnnnnnnnnnnnnnnnntgagctggaggaggagagctctagtgagcacctgacctgctgcgagcaaggggatatcgcccagcccttgctgcagcccaacaactatcagttctgctgaggagttgacgacagggagtaccactctcccctcctccaaacttcaactcctccatggatggggcgacacggggagaacatacaaactctgccttcggtcatttcactcaacagctcggcccagctctgaaacttgggaaggtgagggattcaaggggaggtcagaggatcccacttcctgagcatgggccatcactgccagtcaggggcttgggnctgagccctcaccccccactnccctactgttctcatggtgttggcctcgtgtttgctatgccaactagtagaaccttctttcctaatccccttatcttcatggaaatggactgactttatgcctatgaagtccccaggagctacactgatactgagaaaaaccaggctctttggggctagacagactggcagagagtgagatctccctctctgagaggagcagcagatgctcacagaccacactcagctcaggccccttggagcaggatggctcctctaagaatctcacaggacctcttagtctctgccctatacgccgccttcactccacagcctcacccctcccacccccatactggtactgctgtaatgagccaagtggcagctaaaagttgggggtgttctgcccagtcccgtcattctgggctagaaggcaggggaccttggcatgtggctggccacaccaagcaggaagcacaaactcccccaagctgactcatcctaactaacagtcacgccgtgggatgtctctgtccacattaaactaacagcattgatgcaaaaaaaa

SEQ ID NO: 326589 - DNA, 481 bp, Homo Sapiens
gagactgcatagggctcggcgtggaagatgatgggaatagaaagatcttgaacattgggtggttccaatgttccacgtgaggatgaaagggagccgaaagcaagccttgcctccctcactactgtcttgaagtgactacaatcagagatgacagtcccaattcctaggctatcatttatgaagcatgggagctctgatgggttacctagcaggcacagcaatgtagtccatctttaatgtggagttggcagggaaagtcaacccgcagccccccagagccatcgaccactgggtcgatttgcctagcgaggccatatctaagatccaatagattttaaggtcctcctcttattctcttctgttttttagtcttcttgttttatatgttatattcttgatcattttaaaataaaaatctttttaaagtttttcaagatccctgcctttacttatgtatttgtttattcttaaaatttttcct

SEQ ID NO: 326590 - DNA, 635 bp, Homo Sapiens
gcaaaagactgaaggtttttaattttggataaaaaacatggtatcatccaaacatttgcaaattgtaacacaactgcagtagagggccaatgatctctgtggaactggacaaaacaactggcagtgaacattgtcactgggtcacacatccataccgcagtggtgtaacaggctcaagaaaacacatgacagggaattaaagtcaatcattcacactgttgtaccttggcaagttcagacttgagctgctgtgacagtgtcagtctgtaaaccctggagctaataaaaagtcaggttctcaaagaacctatatggttcaattctgaattatacatcagttgcatgatcttcatgcaggtatgtggctgacattaacatattacagataacactggtcatatacttgaatcttacttttaaagctgcctgataatatatcccagagaaaaggcccaattgcttcactttggtttgtatctctggcttggcatgtcccaaagtactcattaaacttagctagacaatatcaaagtaagaggcttagcactaaaagagtttctaatttctgggacaaatcttcttcatctgaatgcccaaataacctatgagaccagatgctactaaagttctagtaa

SEQ ID NO: 326591 - DNA, 524 bp, Homo Sapiens
tgtctcccaggctggaacaagaccctgcattttaaaaaaatgttttttatttgtaaataatttttcaaatatgtttttagttaaattgggaacatctgaatataatgacattcatttgactatgatgacagtaaggaatgattgtgaattgtgttaggtgtactaatcgttttgtaattacataaggaaatgtcttcatgtcatgtttcacgattttaaaaggcaaataaaacaggaaacaatgtttgtatgaatgccctctaattgtaacaggaatgatccttcaggtaaataatgtccttgcatctgtgaaacttctacctacagacactaagaaacaacagattcctgtttggagtaataatcagttatatcatttgatttaaactgactcagcttaatgtttaataagtaaattgttaaatgtttgagaaggaaacaggtctacttgtacacgtctttctggtctgttctaatgtactctttgctttggctcagatcaaaatgtttgaagaaaaaaaccc

SEQ ID NO: 326592 - DNA, 560 bp, Homo Sapiens
  misc_feature (41)..(49): n is a, c, g, or t
  misc_feature (84)..(99): n is a, c, g, or t
  misc_feature (548)..(548): n is a, c, g, or t
cttgtgattgtcttttttattttagccatttaagtacatcnnnnnnnnnggcaacacttcctcaaagtgaataaaaatggaagnnnnnnnnnnnnnnnntttccataggcctagcagaaacttaacacatgctataatatgttgcctaacaattataccttgcaaatatttgactatttctattttttcaatagtatcttaatggcagtttggaagaaaatacatcaaggtggctagcaaacacaatttcaaattataaagtaataatatttataatttctgagtaatgtacaatttaacatgaaaaatagatatcattatagcataaatccaggctagattttaggactaagtaaaatgtctcattggttttgttttgttttaaaaaaggcataaggttctctcgttatttaggctattaatctatctccacctttttacttccacttgtattctagtcattggttttattaagagttacaactacctgagcaagtactttttcttctattacatattagactattcctctcacttcaaatttttanaattatatattc

SEQ ID NO: 326593 - DNA, 708 bp, Homo Sapiens
  misc_feature (65)..(127): n is a, c, g, or t
  misc_feature (570)..(579): n is a, c, g, or t
  misc_feature (689)..(689): n is a, c, g, or t
ttcatgctcattgctgtttattgaaacaaaagaatcagaagaagatcagaatgaagacaataatnnnnnnnnnnnnnnnnnnnnnnnnnnnnnnnnnnnnnnnnnnnnnnnnnnnnnnnnnnnnnnnaaacttgtagaagtagagggtggagagcgcgaagaggtggagtatgatgggcagtccgatcttttccatctgggctttcagacaatgggatatgtcatggaaggcttctttaaacaccagaagaaattcaggataaagctcaaaaagagcaggcaatcgataggggttgaaaatccactcagtaggccacggaaggacttcaagaaggttgatcgttctgtcgctggatgttgtaggtgtcctacgtgaaggcaatcgacatctggatggctgtgtgtctgctctttgtgttcgctgccttgctggagtatgctgttctgactgttggatttcttcttcttgatcttcattgggtgcattagagttgttgggcttgagttgttgttctccctcactcttttctgttaacctcatttcttctacagtaaagtgatcaccttggnnnnnnnnnngcagactgccaaccaatccagagtcctttcaccagctaagttgcctgtatggatgtcccagcaacaaaaaggctgccattgttactgtagagctattccaggttgactcnagtcccacctcctttcctg

SEQ ID NO: 326594 - DNA, 567 bp, Homo Sapiens
  misc_feature (26)..(26): n is a, c, g, or t
  misc_feature (58)..(58): n is a, c, g, or t
  misc_feature (65)..(65): n is a, c, g, or t
  misc_feature (76)..(76): n is a, c, g, or t
  misc_feature (85)..(85): n is a, c, g, or t
  misc_feature (105)..(105): n is a, c, g, or t
  misc_feature (113)..(113): n is a, c, g, or t
  misc_feature (120)..(120): n is a, c, g, or t
ccctcctcgccaatttaccccactgnccaaaagggggatgtgcctgccaggccgattnagttggntaacccccagntttcccccnttcacgaccttgtaaaaacnacggcccntgcccancctaaaattacccctcacctaaagggaaataaccttcggcccccttaattaaaagtcagtgaatgaagaatgagtaactgaaattagaaatgaattaaaagtaaattaaaattaatcactaaattaagcaggattaggtaaaattagcaactaaagagaattccattgagaatcctttaaatgactacgtgaaaacagcatgcaacattaggtctggttcactgtaggtgctcactggagggatgaatgagtcagataggtagaagcaagggtggatgggtaggtggatgggtgggtggagggaggtaccttctgagctttgctgaactccttatccaagtaggcgaccttctgtcgaagactggtgagttcaacaccattcttgcgtagttcatctgaaagctggtagttgtttgtccggagttccaggagctgagcctgcatccg

SEQ ID NO: 326595 - DNA, 559 bp, Homo Sapiens
  misc_feature (13)..(13): n is a, c, g, or t
  misc_feature (23)..(23): n is a, c, g, or t
  misc_feature (35)..(35): n is a, c, g, or t
  misc_feature (111)..(111): n is a, c, g, or t
aattaaaagtcantgaatgagantgagtaactganaattagaaatgaaattaaaattaaattaaaattaatcactaaattaagcaggattagttaaaattagcaactaaangagaattccattgagaatcctttaaatgactacttgaaaaacagcatgcaacattaggtctggttcactgtaaggtgctcactggagggatgaatgagtcagataggtagaagcaagggtggatgggtaggtggatgggtgggtggagggaggtaccttctgagctttgctgaactccttatccaagtaggcgaaccttctgtcgaagactgggtgagttctggtgtcgggaaagcagggaaactcagcctcagccagtggcaaggaaactgaaaggccttcctgccagggcctctgaggggaaaacctcggacaccattccccaaagccacccccttctaataaggccctcctggctcaccaacaccttttttgcgtagttcatttgaaagttggtagttgtttgtccggagttccaggagctgagcctttgggggaggcaggaagg

SEQ ID NO: 326596 - DNA, 580 bp, Homo Sapiens
  misc_feature (182)..(182): n is a, c, g, or t
caaagaacagaagctatccatctgccccattactggtaacactaactttgatccattgtttaagttagtaacctcagagagttgtttttttacaggtcctagaaaacagtaggtcttcaataaatggcagctattattatggtaaaagttccagactaagaacaagttttgaaatcaggtangacttggattcccagttctcactctccccagtttcctgcccatgtgatcatgggaaaggtttttaacttccctagtcctctttccttccagtgtaccacaaaaacaaagctacctgaaaagttacaaagttttaatcaagttaccataaaggttaaatgaaataacatatgtaaaagtactcagtacctatgttttataagtgctccatgaaatcaatcactgttcttttaagcgagttgtcatgttctgcgaaataatcactatgaactaagataaaggaacctgagatctgattacaaaaaaaaggtgacttaggggcatgctgggagtaggagaggaagatgtcagatgagctaggaaggcatgggagaaccttggccgtgtgacagccaaggca

SEQ ID NO: 326597 - DNA, 720 bp, Homo Sapiens
  misc_feature (17)..(17): n is a, c, g, or t
  misc_feature (259)..(259): n is a, c, g, or t
  misc_feature (315)..(315): n is a, c, g, or t
  misc_feature (695)..(695): n is a, c, g, or t
tctgggcttcagctggnaaaacccgaaggctgcagggtgactagatcttgggtctggaaacatccgagggccccttcactcctaagtctgatgcttgggacagacaactgcacaactaggactgcccatctgagcagcttggggtggcctcttcctgggctccctcacatcacggcagcttcgggctagttggatccttccaccacttcagtgaaaagacagcagccgcatggccttttatgacccaggctcagaagtncacacagctggcctagtctgccacaatccaattaggctaaagtagccagggcctgncccagactccagaaggaaatttcgactcctgctcctgacagaggggtgccaaggtcacactgtagaaaagtatcctcatggccatctttggaaaatgcgatcttctctgggatgttaatggggggttgtagatgatttattgctaaattatattttaaagcactcttttatggccagtcagattttgtctcttttgggggttaatgtccatttttctgtctttgttagtctctttctcgctgtaggcttccctcagacgtgtggtgatctttggttgttcagtcaggtttgggaaggaagcaggctaaagacctgggagccctgtggggctcttggcggagagagctccctgaatatcctgattacactggggcttttcnagtgggcgctaataccacaccagct

SEQ ID NO: 326598 - DNA, 696 bp, Homo Sapiens
  misc_feature (294)..(294): n is a, c, g, or t
cccataagaaattctttcacacacgttttctcatgcgaatgaggttaacaccagattgttccaaaatgttgatttcaacgtcctctggatatctcttaattttgcatgaccttgacttaactaagtctttagaagtaggcagctatcccattttaagagcaagaagaactacttcaagttcagatttgaccacttcatcaagttcatctggtcctagagtttctggctcaccttgtcatcatagtgattctaattcttctgagaaacacatgtcacgagcctctcaaagagaanggagtttcaccacggaatagtcttgaagtcgtaacccctgaagttcttggtgagagtgaccacggaaactgcatcacgtccttacagctgcacccaaaaggctgggccactcttcttcggtgctcaagcaacagtgatgatgaggagtgtacttgtgtctaatgaattccaagaaggagctccagtgcgacctgtctcacctcgctgttctctacgactgactcattacattgaagaagccaatgtaggcaggggttacatcaaagaactttgcttcagccccgatggacgaatgatttcttccccacatggctatgggattcgcttgttgggatttgacaaacagtgcagtgaacttgttgactgcttgcccaaagaagccagtcccctgcgggtgatccg

SEQ ID NO: 326599 - DNA, 484 bp, Homo Sapiens
gcagtgttaacagcacaacatttacaaaacgtattttgtacaatcaagtcttcactgcccttgcacactaggggggctagggaagacctagtccttccaacagctataaacagtcctggataatgggtttatgaaaaacactttttcttccttcagcaagcaaaattatttatgaagctgtatggtttcagcaacagggagcaaaggaaaaaaatcacctcaaagaaagcaacagcttccttcctggtgggatctgtcattttatagatatgaaatattcatgccagaggtcttatattttaagaggaatggattatataccagagctacaacaataaacattttacttattagctaatgaggaattagaagactgtctttggaaaccggttcttgaaaatcttctgctgttttagaacacattctttagaaatctagcaaatatatctcagacttttagaaatctcttctagtttcattttcc

SEQ ID NO: 326600 - DNA, 716 bp, Homo Sapiens
  misc_feature (635)..(644): n is a, c, g, or t
tttgcatttggaaaatatttattaagctcctgttaaatatgcacatacagacacacgttgaaattccatttgaggggctttataggtgaaatatataaaatcctggttatgaattctgcgatcagcacatacagactgctatctagaaagactatgatactgattctagtagagggttctcaagctaccagtcagcacatgccagagaacgggggcagcaaggtggtcattacaaaggtgacctctagttgccccccccttcccagcacccccacctggcacgcgccccagcaaacatgcatgcacaggcgggctggaatgtgctgtttctgggcactgggactgctggaagctggctgcagccctggagagatgacaaacatgtcttttctatcctgggctttatttttctcacggtccctgaaagggctgtgatcaggtgatatgtgtgggactgctccctgtacaggtgcagagcaggtaccgaggggaggagaaaatccaccgtgtgtgtacttactcaaagctcgttcaatagccctcccaggatagctcttggcagggcagctaccacgtctctggcaggctggagggaatctgagtgtgagaaagtcagtcatgcggaggaaaagggnnnnnnnnnngcttcaagtcctcaggcaaaataccttttttcttcttctctagctctctcctttctgtagctttaaaccaaa

SEQ ID NO: 326601 - DNA, 428 bp, Homo Sapiens
  misc_feature (75)..(84): n is a, c, g, or t
  misc_feature (358)..(358): n is a, c, g, or t
  misc_feature (403)..(403): n is a, c, g, or t
ggtttggtttaaagctacagaaaggagagagctagagaagaagaaaaaaggtattttgcctgaggacttgaagcnnnnnnnnnncccttttcctccgcatgactgactttctcacactcagattccctccagcctgccagagacgtggtagctgccctgccaagagctatcctgggagggctattgaacgagctttgagtaagtacacacacggtgggattttctcctcccctcggtacctgctctgcacctgtacagggagcagtcccacacatattcacctgattcacagcccttttcaggggaccgtgaggaaaaataaagcccagggttaggaaaaggacatgttttgttcatnttttccaggggcttgcagccaggctttccaggcagttcccagttncccaggaaacaggcactttcccggg

SEQ ID NO: 326602 - DNA, 703 bp, Homo Sapiens
gaacatacaaaatttctgagtgcagtttaaaacattgagtgtaatttgtaagtttcccttaaaataattgtttaaaatttgcttacatagaatcagatttgtaagttgaactatattcttcagagaaaaacaggaatttgaattttaacttcaatacatcgaatactaatttttaaaatcaataagacaaaacaactcttgaatcttttctgtatacagaaatccctctcaagggtacaaaaaaaatcacactgacagaaaacatattttgctgtttgtaccttgacacggcttaactggtggcaaaatgattcctgtgttctgcctgctactatgtagttgcgtagttatcctctaccaccccccacccccatcccatgccctgcagctggtgtagatacacaggtgtagagcatgctccctatttttaatcccagttacttccgataagagcaggactttgccctttccaccccactccccacctcaagcccctgatgaaggagtttcctttaggtctgtcttctccgaattcctttaggatttaaagtccataccttgcaatttagcacttaatgatatgccctctcttcacagtctctaatactttcaacatgtgtgagtcttgccttcccaagcagactaggaattcttttcttccttattcccacatctttgttccagccagccatctaacagacat

SEQ ID NO: 326603 - DNA, 710 bp, Homo Sapiens
  misc_feature (64)..(64): n is a, c, g, or t
aatgataccaagcagctgagcaaagataatccccaataaagaaaacaggccagaatttcttatncctcgcacccaaatgtccacctcctttatgatatgaatgacaactattttagtagctgttttcaccatgaaatatagtcaagaattttatttttcttactatatagttctgattaaaaaaacttctttatgtgtttcttactttatgtaataaagaactacagacacaggatgaaattttataggtctgcagcaggaataggctctgcaacaaatgccctaagaacataaacaagcagtgcttcaaagggtgccacaacaatgggtgcctggggagtcagtaaccagaggcaaggagggccctaggctgctgcggaatccagaacccacatgcccacgagtctgcagcccagggacacccctgcagtggtagttgtcacaggcactgggaaggtcctgcatctgaggattactgggggcagggatgtgggtgtagactgagacagagctggtaacctcctccagcttaaagcccccttgaggaggtttgccaaacaaaaagtatgagaaaagttttagcaacaataatgtcagaagtgactacaaatcataaggaactgtaagtcaagtagtgctatctgattgttttctacaattccttctttcccaagggctctgaactcagttcctggattcccagtccctag

SEQ ID NO: 326604 - DNA, 1357 bp, Homo Sapiens
  misc_feature (45)..(45): n is a, c, g, or t
  misc_feature (60)..(60): n is a, c, g, or t
  misc_feature (476)..(501): n is a, c, g, or t
  misc_feature (1327)..(1327): n is a, c, g, or t
tcactagttccagtcaacccaaaattttggttctttgggtgaccnggaatgattgccttngaatttccctggaaaccgttatggaagaagctgaccggccaaaatttatttttccccttttaagaggtccttactcaaccaggtccggattccaaaaagatctaaaaggccagataacttgtggtttttgtagtggaataacatgtccagtttactaaaagaagggccattaggaaaaactttgttattaaacactgaaaagaaggctgcaaaatgatctagctagaaattggtgatttgagcaccaacaatataaatatttttctaaaaaccagtataaaaattagtaccctgtcttatttctacaaaacatcaatagaaaaggttgtaaaaatccagattttgtaaactttattgccgaaatatttgtttgaatgctggtgattcagattatcaaattttctaccatttctttnnnnnnnnnnnnnnnnnnnnnnnnnncttctgaaactacaaaagatactgaacagggtcccaagtggaaaagaaaagttaacatactttcatcaaaaccagctccccgatcttcccctaggccgccaagaccgttttttttgggtgaggcagtgggagaggaatccatcagttccattcctggaaagaggctttttaaaaatcccatgagtgatttcctaatggacctttcaggcagaggctggcatgctcaccagtgggctccccgggctctctgcagaggcgattctgttcagcttgccaacctctgcctgccagcctgggatcttcttggtcgtcatgtggcgccgggcatgcttcgtcaggtggtcactgcgcatgaaacgtcggtcacacaccgggcacacaaacttcttctcccctgtgtgagttctgcggtggcgtgacagctcatccgaacgagcaaactttttatcacagccatcccagctgcagttgaaaggcttctcccctgtgaggtgagaaaatacatattaaagagaaaggaaacgctaagcaccttattcaaggggttaattcatgtcattttaaaatccgtgttccatcaaactcagaagaaagtggtatccttattactctggaattggatgatttgggtcaagaaatcctccaaaaggcatttattcctcccacacttaagatgcagctatgttagcacccaaagatttcaagctaatctttcaaaatatatttaaaaataaatcaggcgaagtacaagtacagcggctcaaacctataatcgcagcactttgggaggctggagacaatcagttgagcacaggagttccagacntagcctgggcaacaaagtaaaacccaatct

SEQ ID NO: 326605 - DNA, 487 bp, Homo Sapiens
aagaaaagaaatcaatctgaagtcttcctctgttcaggacttctaactcagagacaaattttcagacaggcagaggcaaatttctctaaattttaggtttctaggattgatgattaagttgaatgtaatgtttaagctgtagaaagtatgcctctttccaaaagcctgtagctggccacagattagttctgggtgaagcttactaatcattaatggatttatgaaattcaaactacttcagagtaagcctcctgacaagtagggaaaaaaatccagttttctcattcagttctttccaccaagctaaaatgaggattcaatctcaaattgatgttccaaactatcagatagttttaaatgattctagaagttgaagtggaaaaatataaatacaacagctgatagtaattcaagactggcttatgtcaaacaattgcatttctaacctgagttaattcaataacgtgaaatttaaataagatttttt

SEQ ID NO: 326606 - DNA, 713 bp, Homo Sapiens
ccagggtgtgaatgccttaaaggcattaaagtgagtactcacttttagacttccttccttctttccagatttaatgatctgagtattacatggaaagattacgctaaaggtaaatatgtagacatattatacagctatatcacacctgtgtctcacaccagagagtgaatgccttaaaggcattaaagtgagaactcacttttatactcacagtgtttagcacagtgcctggtaacagcatatgtttacatttaaggaatgaatacctgaggaatgaactttatcttccagtgttatttaaaaacacagattttcaaactagagttctagttccttatctgtaaccacctaaacatcacctctgcttatactaattgtgttgtaaattaacttatcttttccctcttgtcagctcccccttgacctcactgttctgtcaatggtcctatctttctgccagtcacccagtgacaaggcccaggatttggagagcaccctacataggatgattcaggaagaggataggacccatttcattcaggctatcaaaaaattaagcagaaattaagtaattaagcaagtcattgacatgggtgaaggtgagggaaggactagatgagcatgagaaccctggctgtgaccagtgagcaaagccagacaatgctgggatgttatacaaaagagagccatccaggctgggcagatgttctcag

SEQ ID NO: 326607 - DNA, 787 bp, Homo Sapiens
  misc_feature (388)..(602): n is a, c, g, or t
  misc_feature (630)..(670): n is a, c, g, or t
ttacatttttattgtttggtacaaaacaggctctttaactctttgaataaacacctcacagactcgtgctcctagattacaaaaagtcaaagccaattttctttgacactgggctcttgactctgagattcaagtcactataacagaaactggagttgttttatcttatattctggaaggtgcctcaacaaagacatgttaagaactggttaaaacttctagcatttaaaaagatccatcttgtcttccagtgcctatggataataataaaaagggaatcccagagatctgctattgaattatttagagaagagctactgcaataaagatccactcttttaagttccaaaaggaaacttcaggccagatgtggtggctcacaggtatnnnnnnnnnnnnnnnnnnnnnnnnnnnnnnnnnnnnnnnnnnnnnnnnnnnnnnnnnnnnnnnnnnnnnnnnnnnnnnnnnnnnnnnnnnnnnnnnnnnnnnnnnnnnnnnnnnnnnnnnnnnnnnnnnnnnnnnnnnnnnnnnnnnnnnnnnnnnnnnnnnnnnnnnnnnnnnnnnnnnnnnnnnnnnnnnnnnnnnnnnnnnnnnnnnnnnnncgagccactgtagagagaccctgtctcnnnnnnnnnnnnnnnnnnnnnnnnnnnnnnnnnnnnnnnnncttatagcccagccagaggaggaaaaacaacacccaaaattagcaagtgttcaagacagcccggcacccagctgagactcccgctgacgtgatcaggagttcggggcttgctctttt

SEQ ID NO: 326608 - DNA, 460 bp, Homo Sapiens
  misc_feature (31)..(31): n is a, c, g, or t
  misc_feature (44)..(60): n is a, c, g, or t
  misc_feature (73)..(73): n is a, c, g, or t
  misc_feature (115)..(115): n is a, c, g, or t
aactgcactcccaccccgggcagcagagtgngactctgtcctcnnnnnnnnnnnnnnnnntaagcccacttgnccctggatcacgctgcctaggaaaaagtcaaaccataatttnaatcctaatctgtcacacacaaagacagcattgacaggaataaaacttacttccatgtaggagagatgcaagttgtcaaagagaagcagaatcactttatcatatacagaatcaatgtcatcactgtctgaaaaaagatgctctgaacaattcttccagtttattgattctgaacctgccatgtcttcaaaaatggcattattagtgaagctgctcaacaagtcctctgaaacaaaacagctagcgaaatgggtatttgtatttagtctaaattatacttttaggacttcatcttatagctataccctgaatcgatatgcttaataacattaggattgaagttat

SEQ ID NO: 326609 - DNA, 738 bp, Homo Sapiens
catacactgtgttgattccagcccgacatggggttctcaggtatgtgggtgcttagagggaagtctttgtcatggaatcaggtgtctaagaggtaccaacacgatgatgttcttttctgtgaaaaatctgcatttgtagcaagaggggggcaacaagtagctcccaccgacccgcgctccccatacatcatgccgtctgaagctcccacggcatcctggtcagtcaccaaatgtcccgctgaggccagtgccaaccccatgaagagaaggtaactcggagctcagagaggctaagtgctcggttgcaaggtcatgcagcctgctggagtggagtcaggtttaaagcctgggtctgactgtgtgcaaagttagtttgaaaagtgacatcagagttctggccaccctaatgctttatccttaaatttgattctcttaggctccacgaaacccttctgggtgtgaggtacagagctcagcacgctgctggtccttaaaaaaagaacccacatgagggcaataatccacgagaggactgtggtgcctatgtgaagaagaaatgaaactcatcccatgataatggagacgaaaatcctagttcttaggacggcctcaaactttagaaaacctcacacggactcagggagaagagaggggctaggtgggtgtgcagagtcccccagtggcttgttttcattggaataataacatcttacatttcgatgtggtaatgtcgctgtt

SEQ ID NO: 326610 - DNA, 1013 bp, Homo Sapiens
  misc_feature (658)..(658): n is a, c, g, or t
  misc_feature (988)..(988): n is a, c, g, or t
atgcagcaccatgcccagcttcaaaactaagattatttctacccaactggactgctttaagagccatgttttcaatgattcaaccttatttttacatccactaatgggcaaattctgaaaggaataaaaacccaccctccagggcactggtgtgaatggagggccctttgtggaatcccttcctctaaaaaggcagttgaaggaaactgccagagccacagcagctgtatggaagggaaagctatcaggggagttcgtctttgatcattagacgggaaaaactcatcatcaatactacctttcccttccctactacttttctatattagctaaattccattttgaaaacaaagtatttccaaaatatcaatcttggcctaaggtcaaatagaaacataatacatttttttcttctggggtggggaaaaaagtgaaattttactataataaacccaagcataaagcatcagaaaatgtaacctgtgtataaattcaagaaagcaatctattaattaggaataaaccagcagcagggaattcctttctagtatgtcttatccataagaatggctgtctaaatattatcctaatgttaaaccagagcttttctgaataaaaaatgtggcagaccaaatcaaaaaacagaagatttattggnaagcctatgttggtttgtcctgttgtggcccaaagacttacctaaatccacaagttagctcaaacaagaagagaaaaaagacccaaatagaatcccagaaaaattttaaagtcccaaatttcccatctgaaaaccagactagatgtttttacttaaaatgagataaaagaggcaatttactataaccaggcacccatgaagagtagattctaagtggtcatgggctagacatggcatttcagcacaagccatcagacccaatatctcacaagatctggtatctttcaaataattccccagggcaatagaccaaccaattgagtggtgctnctcgtgccgaattgcttgggccgcg

SEQ ID NO: 326611 - DNA, 378 bp, Homo Sapiens
  misc_feature (347)..(347): n is a, c, g, or t
aaaggataatcttttacaaagcagacagaatttttgtgtataaactgctctgtttgaatgcctcattgatataccatctaaaaactgaagtgttcagcaagattagcaaagccctgagctattgagatgggggaaaacatgagaaccaggctcttctctataggaggcaaaggtgacggaagatgcctttgctttcgcagtagtagcaaaaacagagccactgcccccaccgggccccgatagacctagttgcttgggaaatgaaaggggcacaaagcaagctgcttgaagttgctgaggaaaaggtgaagagtgtggtcgtatgactttctttcctaggaattttnctttaggaaaattgccctggactctacaaac

SEQ ID NO: 326612 - DNA, 680 bp, Homo Sapiens
  misc_feature (73)..(73): n is a, c, g, or t
cctccagaatggctttccattttatttttccaatcgtcaagagtgccatccccaaacaccgttttaaaacctntacgttattttcatctcctcctccttatccactcttcacacacccataaagctgccaaacactgtcaacactgcttctaacatacatttttataagctcaaaagtcagaagaaagcagcaagagacaaagaaaagaaagtaagtgaatccagcccaatccactatgaagcatgtgactgcccccctacagtatcacccaagactctgcttaagcttgtgtgatgaataggaaaaaatactattcatgtgaggcaactcatccctattttccagacaacctgctcataaaatcctgtatacgaggcccgccatttccttttctaatttctcctctcccctctcaaagcttaaagcccaagagtaatcacagtcctcaagtgaggtctgacccaagcccacgacagaactggcccaccaccagcacatctacatttataacatcagaggctggggctggctgctctgcaagctgtctttggttgtgccacgttcctctcagattaatcaacacgttgtgcacctcctacaagccaggcacagagattcgatgttgaataagacataatcactgcacatgagggagttggggggagacggcaatggattt

SEQ ID NO: 326613 - DNA, 720 bp, Homo Sapiens
  misc_feature (131)..(206): n is a, c, g, or t
gctctctgtgccttagggttgcagaaacattccatagcctctgctgggactccgcagagcgatagagctattttagacattgatctaaaatggatcttagagcatggattgtcttacccgctccctgtttnnnnnnnnnnnnnnnnnnnnnnnnnnnnnnnnnnnnnnnnnnnnnnnnnnnnnnnnnnnnnnnnnnnnnnnnnnnnctgtctcccagtgcggggatccctcctgcccatcaatcccatcctgcttctccccagggcccctctctgcagagcactgagctgcccctctggcagcttcttcctggggcccctgtatcccccaggtcccaatcccaccatcagtatagtagtggtcctcagggggccttcgccccgcggctgtttctagtcctcccacagaactaaggactgtttccaagatgccacactctgctcactcagatgtctcaccttccccttccatgaggatcctggagcaccccaaagggtgggagtcctcaaagggaaaggagcaaagatctggtggggcagaaatggggcaaggagaaaccatcaagctgctcagacaaagaatggcttgggaaagacttgccaaggtgtggtcagaggtgcagagtagggcccactgctcattggtcacccctgtgctctcagagaacaaattacaaagtctccgtgaggttggaagtcttgcttccattatacagacgag

SEQ ID NO: 326614 - DNA, 600 bp, Homo Sapiens
  misc_feature (565)..(565): n is a, c, g, or t
atatatgtagcacaacaggaacagaagcgtatttaaagtcatctctagcttaccagaaacacccctaaaactgctggtttagattcattaatcaacctcatggtcctcagatgggttgtgactccctgttgcgtaaacacgaaccatgttacttcctggtcctcctgacctccactagctgatttcagcgaggatcaggagttaggtcgccagctgatctaaagcagcgagtcccaaagttcagccatttgtaaaccacctgcatggttttggaccaactcttgtgtcaccccatagtttctcagattttaatatgcatacaagtggcatgggatatgttgttcaaatgcggattctggttcagtagggagtgagaggggacaaaggttccagtaccttttaacaaatgcccaggtgatgctgatggctctggcccactgatctcactttgaatctcaaaggtatagtccatctgaaacaatcttttcttttaaattgactctgattttaatcttaaatacatatatttaaaaaggaatgtaaaaagtatcactattcaaatgcntataatgacaataatatgacttactaacttctagg

SEQ ID NO: 326615 - DNA, 807 bp, Homo Sapiens
  misc_feature (19)..(19): n is a, c, g, or t
agcattttagtgcaccagnatgggttttccagacaccaggggaggcatcattgctggaatagtgaggtttggtggcagaaagagggcagtgatgtgtagggggaggcaaagtgaagtaagcctgggcagtggtcactaaagtgacactgctgaggcagctgcttccttcagaaggaaatgttttgtgaccctaaaattcatggtagtgctactatccaggggtttgggggctctttggaaatggagtatgtacggaactgggcatgtatagacttatataggccatagaaagaggtgggatagaaacaggtccaccatgggcaatatttttttctggccagtttactaggcattaaaaaaaatactgcttttatgtgcccaagtctcttatggaactagtatgggattaaaggacgttaattggaaaggagggtcagtatataaggaccacagtggcctgttaaggatgacagatgtctctagcagtttgttcactactaaagttaaacaggacaaaatagtctttcctgaccttgctggcataaatattaagaaaattgtttgagaattagatttttttagtatgtatataaaaacagcaccattctttgtataaatcagatagatcttatctgatagatgaagctaagaccctttgagtctacactgggttgactctgagaggtttatatcttattgggtattaagataaaagaagggtcacatgagagcaaagcttagctttgaagccatcacctcccaaatggtgaccaaggaggaaaacttttaagccatagtatagatgct

SEQ ID NO: 326616 - DNA, 921 bp, Homo Sapiens
  misc_feature (902)..(902): n is a, c, g, or t
actgagtttattcagaaggttacgttctcagcctttattccagggcccaattttcaagacaagccttcgcgggacaggaggagtcctctgaagatagcagtgcatgagcagagaaacacacatggcttggtctcgccgcccagcagctgattccgaggaggggctgagaggggccaatttcacccttccctagcaagactcggaggaggttcttcctacacaagaagcccatctgaccaccagggcttcctggcagagagtggtgctagatgtcagccaggaactccccagaccaggtattcttccaggctcaggcataaagaaccaggaggcttttattttctattaatcaacctagttgggaagcagagcccattgtaaaggcagagaggtattgattacaggcttaaagaaggaaaacgctgcttatacaatgtgctgttcagcagaggcctcccctggatacttgaataaaatcctcggtaagggtcgcctgcagtcactgggcactttctattgtactagctcccatacagcaacatttctagcagcagaaaagcaggaaaaaccactctcccagggaagaggttcctgccctgtccctggccccaaattacctggcacccaggctatcacactcccaccaatacttcgctggcctgggttttcaggggtggcacgatgatggttcgggggttccccgtgcagtgattctccaggctccccttggtgtcaaaggcattggcattgttttgcccagcacgctgctgcacggagtaggggctggtgttgctggaggagtcggagtagggggagtcgtggactgtgacacagctgatgacgttttttctttgcttggagacagtgctggtgggggcgtgtttctgttcctcctcctcgtnccgtgtcactgactgaggt

SEQ ID NO: 326617 - DNA, 562 bp, Homo Sapiens
ctctatttaatgttttattttggaagaaagaattgcatgttcagggcatccatgtagaccagttggtcctcggtatgtcggaacaacacagagaaggctggaggttttatcaaaagaaatgtcagtattgctctttgagaaagtttattggcaccaggaagggtgctgggagctggcaactacaactggtgagcaaccgggcaggcaaaattattcctagagcttcagcaagttctctcagcagttatggacaaagctggtcccagcttacagcacgcagtttcaccagctggatgtgcagagaattacattactagattaatgttatgtgcctgaggtgcttttatccctggcttcttgacttttgattgggtgtgataagaatgacttaatttggtgtaatccactttcacagcactgagcatacttagtatgtactgagggttgctgaattaacggtgtgtaccgcaccccaggaaggcttaatgaagtaggattactgcttaagctaagacctttattaaaattttgtcctctggccagtcgtggtggctcatgccta

SEQ ID NO: 326618 - DNA, 696 bp, Homo Sapiens
  misc_feature (660)..(660): n is a, c, g, or t
  misc_feature (682)..(682): n is a, c, g, or t
ataaacttttttgtgtctatgtcatatttcataatgtttttcctaaatgcttaacctaggaaacacatgtgtgcacacccatgccaaacacacaaatgaatttaacagtgtggtttatgaaatgaaagcaataatagtttgactcttcagaacctcttcattgtggcctatgtcaagctctataatcttttctcctcaatggtaggccatggttaagggacagatgataaagtacaaggttttcaattgctaactgccaaattttcataggttatagtattactcaaaaagttgttttgtctcatttcttcaaattttgaaataacttgctttgctgactcatctgactatatttttaaatgaggactggctttaattagcacttttagaaaaaaaagctctgcactcccacactgaaagtcaaatcaaatagatagttaattatttgtagcgtggagtaatgtatgcctcagtctctcctcacaacggagccaaaggtcacaaacatttacagaaaacctacttatgtcccaggtactctgctaggtactttcctaacttgtctaaagtcacagcataggctgggtatggtggctcatgcctgtattccagcactttgacaggacgaggcgggcagatcacctgagcccaggagttcgnctcgtgccgaaaactggggtcntagggccaaaaaaa

SEQ ID NO: 326619 - DNA, 417 bp, Homo Sapiens
gaatactttcaacccacagttgcttgactcaggtgaagaacctgcagaggtacagggccgcctgcacactcacagagtcctcacgtatgcactgacttcaaccctttatgaagagcaatttgggaaatgtctgtcaaattaaaaagtaacctagccttaggatctaggaaactccacttttgtaatttatcctataggtacagtaaaacatacataacagttgaaaataaattaaatatgtattaataaatcactggttaaatagaatatgacacagctatctaatggaatatcatgcaaccattaaaatggacgaggcagttttatgtgtgctaatgtgaacactcggcgataaatcaagatacactgttcagtgtaaaaagcaaggtgcaaacagtgtataccgtgtaatcattt

SEQ ID NO: 326620 - DNA, 689 bp, Homo Sapiens
tagtaaaatcaggaatcccttccactggcttgtgagtacgaggttattttctggttttcacatggcaggcccatcaaataattaacttttctggtataattcattatgagtgggctagtgaaggacaaaatatcagcaaacactttgaataaggcaacttgaatcaggatggatttaaaggtgttccacaatgcatagagtagagatggtttcttgatatgtgcctctttataacaagatacctttactttttgcctctcttgattccttaaaacttcctttctccattgtttttcaaagatgggacacgcagtgcagaaggaatcactttcctttagttcaaaaagatcctctctttccaaaggtctcttatagcctaaaagtaattactctgctaaaccaggaatatgtcactttactgaaaaatgaggcacttttctctggactgcatttctgtgtatcaagcgccccgcggacccgctgataggagccgcccgcgttctgcgtactggagagcatggtccgcggggcgcccggccgctggctgagagcccggctgcggctgtcacttcccttggcagcggacagtcagttcagcgccagcacggtgggaggacacgcactccgccccggcagagtcagctgtcaccttagtcccctgcctttcagctcgtgccgaattacttggg

SEQ ID NO: 326621 - DNA, 521 bp, Homo Sapiens
gtgaccctgggtgccacccctgccccgtgtgtgccccgggtgttctcagtggttgctgaaggcaggtagagggtgctgtccagtatcccccatgtgaaggtcacttcccttctcatggagtcagctgagcatcagctcagcgctgccatgttcccactcaccctcctcgcctcctgtccggccctgggtttctagccgtgcctgaggcatcactctggcccattgacagatgagaggtctgaagccttcctggccacaggcttcactttctcctcctcctgatgccctgccttgtccttgtcgtgttgccatggggttctgagaggctgggagttcacagacctcagacacagctgagtccgacaaccattggggtggggctgcatcagtctccggagtggcccgccacctcctgaagcagggcctggcccacccaaggtgcctggggcaggcgggcaccgtcattcgctgccattggcttctcagatgtatttcaaggactaaagtgggctctaagatct

SEQ ID NO: 326622 - DNA, 383 bp, Homo Sapiens
cccctttttcttcttcatacagagctcgctgcccaaatcattcaagaggaagatctccgttgtctcagctaccaagggggtgccagctggaaacagtgacacagaggggggccagcctggtcggaaacgacgctggggagccagcacagccaccacacagaagaaaccttccatcagtatcaccactgaatcactaaagagcctcatccccgacatcaaacccctggcggggcaggaggctgttgtggatcttcatgctgatgactctcgcatctctgaggatgagacagagcgtaatggcgatgatgggacccatgacaaggggctgaaaatatgccggacagtcactcaggtagtacctgcagagggccaggagaatgggc

SEQ ID NO: 326623 - DNA, 717 bp, Homo Sapiens
gccttctttgagaccagacacaaagtgtcacaccctctttgcatgcacaatctcccgtaggaggaagggaaccaatcctcagggaacacccaggtgcagagcctagagtaaggcacttggcatgtgagctctcttaggacaggggaacttgtttctcctcaaagccactctgaggaagtcacttcaccctcttttcagaggaggaaactgagttcagagatttaagcaaattgaccagagtaacagtgactaaatggcagagtaagatttggtccacctaactccaaaagcccatgggggcttatttatgatgcccacactgcctcctgtccagaccataactccttaagagcagggcctgattctctgtccatctgcaaggccaacaagtgctttgctgtagatagaagcatcccccctttgcctctcctaacataggacaggccccacaaggagtagaataaacatttgtttattgcaatcaagacatgctgtggcaccatggtatgaaggtgagcaggagaaatgaagctctgagctcccaacaactcctaggagccaccagggctttagtgagtcccaatgccactggtgcccaattcctttgcccctgactgaaggctgtgaagcctagaactgcaaaaagcaagtattaaaccaaagaaggtgacacagttgaaagcattaagaatgttattaaactgcactgtaatattc

SEQ ID NO: 326624 - DNA, 732 bp, Homo Sapiens
ctctccccacacttaatgaactcccatgagcaagttacttaaaatctctgcttcagcttcagcatcaacaaatgatatttattgtaacagattgtggtgaggtaaagtgatatatacaaagaacctagcaatactagatgctttgtaaatattaccaggctccctgcttaaccaactccaaagaaggaattgagcaactgagtgagtgtcttaaaaatagaggacatggagctcattaagtttctgacttctcataaacattcatatctggataggtatttgtctctggtatgtcccccaaatttctgcatgtagtaagaattatcaaataacttctagtaatgccaaattttagtttttaattctattaaacatttttcatttaaagggattgctgacttaccctaaagtccacagaaaataaataaaattttaatagtagaaaataggtttcttgacttttagttcccaagcactttttttcaaatataaatatgcatggaggagtttaaggcaattccgtctgaatctattcctccctgtctccctttgctgcatgcttcaataggaggctgtcaaaagtggcctttctcagcccttcccatgtggctcatggtgggtgcagcttgctacagtaagaaactgtcttcttgatgcgaggagaatcagaggagttaaccaagcccagccttaacaagtggaaacccaagactcaacagccaaggagaggaa

SEQ ID NO: 326625 - DNA, 350 bp, Homo Sapiens
aaccaagggctttcacagaagcaaaaataaacaacagctaaaataaaatacaagttgaaacaatattttcacaacaacacatctactttcatgagccaagtgcctaaagaatgtattgaatattatgaggattaatataattgaatgatctctggtccatccatacttgaagagacagcagtgagaaaagaatagaggaccttgaaccacgaagtgaaaggtgaccaccaagggagatcaatcatgaaaataagaggataagaatgaaggtaggtgccttattatgagcccctcactctgacttagatgtttcttcacttcagcagccacttaccttacgcatatttcca

SEQ ID NO: 326626 - DNA, 639 bp, Homo Sapiens
  misc_feature (401)..(460): n is a, c, g, or t
  misc_feature (629)..(629): n is a, c, g, or t
aactatctcgggctgtgcaagtgtggcctgggaaacagcctgaaacatttggtaatttggcaaatatttatgcttaaaaggcagtgctggaaccaattatgacttccttgaggggtttgagaatgctacctatggaatccgactacagggtttgagtgtaacattgccttggtatatctaggaagggtccaggaccatttctgttttcaatgcaaaggggaaaattcctttccaatgacttcaactgaattgtttgacatttcccagcccagactccagacctggtgatcagatgatcccagccccagccttcaaaccactgcaaatagagaagagacaagctatccctgagagagccctgcccaatctacagattaataaagaaaataaatactgttatnnnnnnnnnnnnnnnnnnnnnnnnnnnnnnnnnnnnnnnnnnnnnnnnnnnnnnnnnnnnaacggtaaagcttggagcctctgaatgcccggagtaaatattttagcagtggaggcacatgatgtttgaagtaggactgaacacacttgggcggggcaggggtagactgcacagtctaaatttcaagaagttagtttacatgttaacatcatttaactattaacttcanggctttgcat

SEQ ID NO: 326627 - DNA, 573 bp, Homo Sapiens
tcccttgctgaaaatgcttcagtggctctccatggcccttaaagtcaagtacaaagtctacaagcggaaaagtgatttgcaaagcccttcaggatctgaccccaggtcacttgtctagtcaagggatggctattttttgttgttttgcttttcagttcctcaaatattcaaagctttcttttgcctctgagcatttgttcctactgttccttctgcttctgtatctcttcatcttggtccgattagcccttactcatatccttccagtttcagtctaaatgtcactcgttccagaaaccactactgacccccccaagtctatgtcatgcaccctttcttcttggcatctgacacttcttggcatctgacacttggcgaaacttccctgttttgcagcttttacccactttgccatagctgcctgtttacttgtgtgtattctttcaaatactctgatttttccagagggcaggcagtgactcttcttcaatattgtattctcaatgcccggtggacaatgttggtactagacagtgttttgaacaaatgaataaatgaaggagagaagaaaaa

SEQ ID NO: 326628 - DNA, 748 bp, Homo Sapiens
  misc_feature (357)..(357): n is a, c, g, or t
aacacaaaattcaaaagaaaactctttcttccttgtcactgagactcttggtcagtgtaggctgtgaacttgtactttgtgaagagaagagtactgtgaggaagcttgaaaatactgtaggtttttgttggcatcttcttctggatggtattcatgtactctgcacgccactgaaaatatgctctgtttttcataaaatatgctcattcttttatactgagcactcggaaattggttttcccaaaccatcttagtggagaatggcctgcttttatcagttatgtgaagaagtaaattccaggctcctcagctgcaggatgggctccttgtttcacagctgctgctcttgcctctgtnggaagacgcctgctgctaagagaatctttgtgtgttgtgtataaaatgaactttgtttggaccattccacaagcaacttaaactgcttaggagtccagccagacattcctccccagttgatcatttaaatggaggtcagatttagaacccaacttatattcgtttaaaaatagacattgcctttagaaaactgacctttggtacatttggggcctagggatctgataggctatctcttatgatgcacatcgctctgttttagactctgaaaggcagtatgcctttgaagctagataacgtcagtgtgcttgtaacttgggacccagtctgtgtgctatatgtctgcttcttcagtccacactcattacttccaggaaattcgtgagaagat

SEQ ID NO: 326629 - DNA, 781 bp, Homo Sapiens
ttgaatgagggatgtaaaatatggggcagtcagtatgtgtacaaattactcccagggaaagtctgcagaaacgaattcatcaccagagcaggccaagtaggaaagcatgggaagtacccaatctcacaataaggcacagtaagtcacacaacctcctgccagtaaggatttggaagcctggacttattgctggagcaatctgaagaagaaattgcgaagaacattcatctccctttaaggcttcctgaagtctcacaaactcacttcacacagaatctccaggccaatatgttgttggaacaagactggtacataggaaggcaggtgaagtacagttcctcacatatagcataagagaggtctgtctccccagtctcccttcccgggagagatttacaaggttatacatatctggagaaagctgggaaaaggcatggtgggttttgacccttccatttttgctcactgaggcctcaaatctctttcaagggaaactatagacctggattaatcactagagcaatcccagggaagatgtagggagtgccatccctcccattaacacttgaggaggtttatgcttcatttgctacacgggctcctaggtgcaggcatgatagaagacacaaacacaagaagctgctagaaatgtgcagccaaactgtttccagtgagaagctagagggtatactgatcccaggagatacagctgttggaagtgctcctgcagttcaaccccccacccattctactgttcttcaaggaaatactctagtgccaa

SEQ ID NO: 326630 - DNA, 468 bp, Homo Sapiens
attatattactggatccaactaattcattcatataaaattatttatgaagccatatagtacaaatcaaaatgtttgtgtaaccaaaacaagcaccacattggatgtttggcaggcaaaaaaataaattaatttgattaaattatatgtaatctgataatatttggtctgaaaaacatgctagtgtgtgtgtttataaataatgtaattgcaaagagctgtgatccagccagcctgctagaggtcaactcttctgctgcagcttttgggcatagaagtccctgcatgtttcacagcagcgctgataccaccgcatgtcctgacataggttcttttcacgtatcactcggcagtacactggccactgatctcccaggcacttgaaagtcagagcagccagtctgggtgatgttatggtatttacattaattttctcattgcagggttgaagctcatggtgcagctctccc

SEQ ID NO: 326631 - DNA, 739 bp, Homo Sapiens
  misc_feature (99)..(99): n is a, c, g, or t
ctctgcacaccccctattttgtctccccataccccattcccaaatccagaagtcttccccgctgtgccccttggaattctcagcccatgatcagcaaancctccacatcctgtctcaggatgttcctggacctcactgctccagcgatgtctgtgtctgccagaggatgtggtcccttccaaagtcctcccacatgggggagtttgcacagggaccttgtacccttggcccagaggtggggtggcatcctcactcctcactgtggttctcagacctttctgcctccttccttcctaagcccccaaagctgtcatcagattcaggccccactcccctcattgcagccattccctgtgggccccaggaccgttcctctcagtccctgactcttgtaagttccctggttcaactatcgccctctccagcagtgctgtctccttgatcctcggtgacttcaacatactcagatgtgatgggccgagtaatggttcccaaagacatccaatctcaatcctgggcacccacgagtaggttgcattacatggcaaaagggaaaatactgatgtgatgaagattaaggaccttaaaattgcaagattattttggactatctgtgtgggcccgatcaaatctcacaagccattaaaagcagagaagctgctctggctggagtcagatgctgcagaggaggaaggcagaggagacaccgcagaagggggaggtcagaggttccaagcag

SEQ ID NO: 326632 - DNA, 547 bp, Homo Sapiens
  misc_feature (54)..(54): n is a, c, g, or t
  misc_feature (57)..(73): n is a, c, g, or t
  misc_feature (163)..(171): n is a, c, g, or t
  misc_feature (526)..(526): n is a, c, g, or t
ccagaccgcagacgcgttctgaaaaatacgtgcgctgtgaccgcagacgcgttntgnnnnnnnnnnnnnnnnncctggaaatacttgctgttacttgggctgccggggacaggaggatttgggtggttttcattcctactttacttattaggtgatactatgnnnnnnnnnccaccatgtattactttcagtttttagtgagcagaaaccaactaagaaaagcagctctccacacagggaaagccagcggggccccactgcctggacagacaagccacgtcagagcagccacagacctgatggccacacctgagacggctgccctgccttggcccctggaaccccgggggaggcccagatgacgcctctcccacaccctcaacgactgtcacctggcagagaaccttgtgccgttagacgtggaacctgccgtcgtgatgaacacgcctccaacagttccctgagccatttctgtcacgtatggctccagagccttggggaccagacttctggccattttaaggtnttcggcagagcagctccccga

SEQ ID NO: 326633 - DNA, 926 bp, Homo Sapiens
  misc_feature (11)..(11): n is a, c, g, or t
cagagattttnttttgtgtgtcatcagggagtttaataataaatatatttaattctagatccccattattatgtattgatctgttttaataacctctgtgcaatctgatgcaaatatccctccattgtttcagtctggaagcatgtatgtggttagtttattgaggtcaaaacatccttaggactatgcttctggcttggtcataatgcttctgccatgtcttgggttgtactgtaatcttagatttaaaaggaatgacatattagtacccaggatgctgacctagggagccacagtcaaataagccactcttggtttgccactagttggccattctcctcatctcatcagtcttttagttgcttgtctttgtcccccaattccttggggattcaacttggtatcctaggtcacctctccctcttctaataggagcacccaatgtctggcctgggagagcaaagtagggtgactgaggagaggtattgggatggttcatctgggctgaggaggtagagaagaggtgcagttcctgggggagcagcttagggctcccactcatcatcaccacgagggggctctgcaggtttcacctgctcaaggtgccccatgtaaagagcggagattcatgtcatagacataaattaacctgagacggcacaagtagacaagcaaattctggtgtcctggttgaggatcttgaagctgcaggagagaaccccagctccacaaaccccactgatgaccgcgatgtgaacacaccatcctgtttgtgcacagtggtaccctgacctgacccagctcaggagttcttaggggtcggttccccatcctgcaggactctgaccttggcctggtaccctcatagtgtgtgtgtgggtgattaacgtgcaccgtcttccgtgcccgagggacgtctgagcagg

SEQ ID NO: 326634 - DNA, 414 bp, Homo Sapiens
cctgccacaaacctagaagtggtgaagtaagagggaatcctatgggttggagccatccaaatccttgattcctcagcttcctcaggctggccctctgtttacacagccctcaggtgttacacttcagtgttcccaagatatacgagaaaccgtaggctaaatagggtgcaccttccctggaacatcaacgttttttctgtgttaaactaagttaataatcttaatattaaaaaatatagatatgacattaagtagaatacaaatttgtaaagttctagtctcaggaataggattcaagagagataatatttcaaattttcttttcccaagggtcaacgtgcaggaaggttatttagagcagcttcttggtaatggtcatatgccatttcaggggcctcgtgccgaattactggg

SEQ ID NO: 326635 - DNA, 760 bp, Homo Sapiens
  misc_feature (540)..(558): n is a, c, g, or t
  misc_feature (740)..(740): n is a, c, g, or t
catttttactatgcatggtacccatgagcctaaataagtagcatagtagtaacagttttcaaactgcagtatgagagagtttactcacttatagaactacttcagtcttgattgtctagggataatggacaagaggactgtgaaatgaagattaactatttaatggcctgtgaaaagacggtgttagataattattaagcaaagaacttccactacaagccagacttaaccctcttctgatttattgctcacctattacagttgaattctaattacagtatgaatagctgaagtttgaaagcctgcttttcaagtttgagagtttttaaaagtccagttctttcaggatgaatttagcggaattaacctctctcatgattttacctgattttgtggaacatgcctagttttgctttaaggaaaaatgagtatgaaaaaaggaaacataatcattttccttaatttttattttttataacttgaatttcttagacttctagtagggaatgaaagaaatgaataatttaaatacactattannnnnnnnnnnnnnnnnnnattttcttctttttcccatttctaagtttccctaattaatttttagtatagtgtctttccgtttgaattgatttgtgaaaataataaaagaccagacttctagagcatttattaaactttccttgtccatgacccaggcttttggtggctgtgggccttacttgagcaaatttacccattgntcccatctgctctggttttc

SEQ ID NO: 326636 - DNA, 757 bp, Homo Sapiens
ttatagtattgatatagtttattcttatcaataaacctctgaaatgaggaaaataaatacagtgaacgtttcctcaactttttagatgactatagagttgtatcttcctgctttttgaagaatgactgatcttcctcttagaaaaaatcttacatcttgtacaaatatacgtcttctacaaatacatcttgtacatcttgtacaaatacaggcatatttgttgaattgagtgatagggttccacgtcaacaccaaccatctctatgcattaagcaagtgtctggatgggaggccaggtcctctcaggacaatgcttgctccaagatggacttctttctgcccttttcactaactgcccagggaggccgaccaccagctatcagcagccttcaggtctggccttggctgggtgtctgacccatatggtgaacacaccctggaaagccttgaatatccttcagcttcttcactggtagaatggtggggtcagactagatcagggagatcaacactagagcccctaagaaaaggtaggtggctggtgaccaaagggttctgaggtttgggcatgctgagtcacagtatggaacaggccccttactgcagggcctctctgagttttcaggtgttggtgtgggaagcaggacagaggtagggactgagctgagcccagtcagatcgggctgacattgtggttctggcactcctcagctgtgtgatgtcaggcaaattattccacttccccaagccttagttt

SEQ ID NO: 326637 - DNA, 748 bp, Homo Sapiens
  misc_feature (687)..(687): n is a, c, g, or t
ggttgtgactccaaatttattcctcccggcgcccttgaacatttaaggaaaggctttcatttgacagttatatgattggtgtgtgctcactccccatacaatttctttgagtataaatattttaaaaagaataaagaggaatggcataactctgacgagttaatgggaaagggagtttctaagtggagcccttcactctgactgagagtatctggttggaaagtcactgggacaataagccacctggctgcacagcgtcaagggctctgactggcactaccatgtccgccaagggctctcccgggacaacagaaccatcttcagaaaacatcacttgaaatcctctcccatctatggtggcagacggtgtggggatgaccctgatgaaatgagatggtttctaatttctgagacctgacagcctgagataaccgtggaccacagccgcggcttgggaaagatcttcggggacacgccccagatggaaagaatttgtctgggcctgaatgcagctgcatacagaaactggggatcttcaggggggttcctcgagctcactgttgcctctggagcctctttctattcttcagcaggggctgctcttttaagagtctttggaggaataaaccatttccatcctacttgatccggaagctagctgttggtggctggtggtgcactttgacnccgcagtttgcttctctcttgagaaagacacccctttcctctgtgctccactcttgcctga

SEQ ID NO: 326638 - DNA, 658 bp, Homo Sapiens
  misc_feature (247)..(247): n is a, c, g, or t
agcaatatcagatttttacctaaatcaataatagaaaagcactcactaaagggttatttttgggcagtcactacaactatataaatcaatttcatatttaatggccaatgctataaaaattgccttgtttgttaaaactctggctatacttttgaatactgtaataaatttacaggaacttgctatttcctacatataattttatcataaacttatcacactgatcaaattgaaatatctaattttnttgtttctatcatcttacctacagtgcaatttatatacattgtgatgttctttgggtattgtactacatatgtgatggtgttacatggtgtcaaaaatcagactcacagaactttagaactggagggcctagagagcatttaatccaattcccatattggttaagcaacttgcctctgtcctatctctaactttgccctcaggattcacttatgaattcttttaaaataatcttcatgtgaatggggtaaaaacaaaatggactttagaaacagaattggctaaaccacttactagctatgcgatcttgggcacattatttatcctttgagtctttgaaacagggtaaaagtccttccttatccttctccttttatatattaattttttctaaggtaaatcgcagtatttg

SEQ ID NO: 326639 - DNA, 752 bp, Homo Sapiens
  misc_feature (371)..(371): n is a, c, g, or t
  misc_feature (408)..(408): n is a, c, g, or t
attcactgacagatataaattgtttttctcctgttgaaccagacaaaagagcttgggtatttatcaatgcaagttcttcgtcagctattgaattactttccaaaagagaaatttcattgaattttttaaatggagtcatctgaggagaattcagttcttttttctttatgggtgtttcgtatttggtgccacaactccttggtggctgaaatgccttctgtgcagccggagaaacaaatgtacaaatgggactaacaggtggaggtaaaggcagtctactcaagaaatccaaggctcttctctttttgcagttcttttggtcatcaatctctttctcccctttacaagactttgaagtcatctgggctgangacaggtgtggaaacagacttccttttggccatacanaagtgaataaaggactttgataatataatctcacaattaggagaagacatctgataaaaaaatgaaaacgtagcctatcataattatgtagtaacataaaaaactaaatcaaagtaacttttcattgaaaatatttaagcacgcaaatattacacacagtctccctcccctaactcctaataggttaggtgatttcagttcacattattcctattctagatgaaagtaattttacataagaacatataaaatgacatgaaaaggaaggaagatgaagaataatcacagtaaaagataaaaaaggaggtaggggacgtcacttatgctttaatcttttgtttttt

SEQ ID NO: 326640 - DNA, 925 bp, Homo Sapiens
gcgtaaagatacacacagttagaccaacaaatgtcctctgctgttgaattaaatactcacagttattctttcatctttatcatccagtggagagccatctttcttccatgaaatggtgggctcaggatggcctcgtggaggttggcattccattactgcaggctctcctactgcaaccatgacatccgaaggtttttgtctgaagtcatcccgaagtactgtaggaacaagattaaatcattatacccaaaagtgatagatacagtcctaatctctgaacttcagcaggagacatttattataattataataaactaccactaatagctcttgcaatacagctttaagaatctatatctacttatagacatctgcaatttaataaagatatttgaccttaaacatacacagaagggataatttgatattcttcagaggccagcaggcgcgtgtattccgctgcttagtgccctcacagttagcatttggctcatctttaacttgcatttcttttctgcctgctgcctacatttttctcagccatgtgctaaccaatataactgaatcctccttttatctatatgatgccacaggataatgctttctataattaaatgaattacatatacatgcaaagctaaatattaaaagaaaaaaataagatacttctaagcatgaatttaattgagcaatattttataaatatataaaattaatgtataaggttatataatcatcataatttaaatatgctcaatataaaaactttagacatatctacaaagccattacattgaaactcattgtgtttttccatgattactgagaatgttagaaggcaccaatatggataacagcagtgctaccaacagcatcacttttatgttctatgtttttgttgtttttttgtgtatactatctcatt

SEQ ID NO: 326641 - DNA, 579 bp, Homo Sapiens
gtctttctttataaggtgacagaaatggccaccagaatcatattaagcttggaaaaagggaggtactttttcccagtcagccctaagtatttccagagttaattttcactgggctgccttgtgtcagatgcctactgagggagtgggaagggtaggtctaataggaaatcttggtaacagtatatgttaccattaaagggaagcctgggattccaggcagatcaaaacaacaggtagggctcttgcctgtccaacgcttaacaatacactttgtgttggcacagtgagctttgcacatgaagttagttaaaaataaaatccatagttaactgataaacctttgttcccagccaatgaccttgcttattcccaagaaatattatttattaaatattatgaaattaaatgaaaacagttatgagctcttatgataaagcgtagagacaacccaatttcaagttaattcacaggaagataataggacaatatatggttgtttatgatcttgtttttacactgcttcatattttacatatgtgactttcaaaatcttaagacttgactgggcacagtggctca

SEQ ID NO: 326642 - DNA, 1090 bp, Homo Sapiens
aactgcctcatagtaagtgaatataaatggcatttaaaaagaatattcctggcaatatttattttcgagctatttgaaagtatatttagaaggattattttttttattgttaaaaagatgatagaacaacagtattaaagaagagtttaaaaatagttatccatattatcaatattttaaaataatgtttgtttgcttaatatcttgtaatttcaatttacctgcatgcatattttatgtaactgagatcataattacatagcaagcttgctagggaatgggttgggcatagtggtcacaatatagccacatgggagagggcagagcagtctttcctcagagagaaggagtgctaagcagctggagcaacttcttcaggaagttaaatgcataaggaagaagaactgttttccccttccaaaactgacagacttaaaaacatcagtatataagcactcttgcatagcagtagtgagactgtaaattgaatatttccagagccaatagcagagaaacagaacagttgtttgatctgaacttaactaaaaggataatctcggattgatgtttttatgtatcatgaaatcttcttctgtaaccctagttttcctgtgtagtttatggggcatgcctgccttcatctcttatacttgtttgagatcattactctgacttccctgtcagagatactacaattccttaagttttgaagtttggttgattaatgtgtctacttgaaggatttattatgacacatgtagaataaactccttagttgggtatctcatatcgatggtaggaaggtctgagtaacagcttttgcttatcctggctcccaccattggagaagttgagctgacttatcttttggaggcagttgcaaaaattcattgccagaatggtggtcccagtcctttctccctcccaggtctgagggctcatgccaagtggggttctgattgaactagtgagcatgtattagtagaggccagcctcttgaagccaaacagattggaccatgatttcattttcatcgtcggctttaggtgttggtagaactggactttgagagggcactattccttgagaa

SEQ ID NO: 326643 - DNA, 459 bp, Homo Sapiens
  misc_feature (19)..(19): n is a, c, g, or t
  misc_feature (41)..(41): n is a, c, g, or t
  misc_feature (47)..(47): n is a, c, g, or t
  misc_feature (53)..(53): n is a, c, g, or t
  misc_feature (60)..(60): n is a, c, g, or t
  misc_feature (73)..(73): n is a, c, g, or t
  misc_feature (81)..(81): n is a, c, g, or t
  misc_feature (104)..(104): n is a, c, g, or t
  misc_feature (109)..(109): n is a, c, g, or t
  misc_feature (125)..(125): n is a, c, g, or t
tggggaaggggggaaaaanggtccctccctccccctaaggncatttnaaaccnccccggnaagaaagtgggcncccagccngccttaggcactcccttcctccnctggnggaaaagaccggctcngcccctcctcccccatggggcctatattggtgacccactatgccccaaccccattcccctagcaagccttgcctatgtaattatgatctcagttacataaaatatgcatgccaggtaaattgaaattacaagatattaagcaaacaaacattattttaaaatattgataatatggataactatttttaaactcttctttaatactgttgttctatcatctttttaacaataaaaaaaataatccttctaaatatactttcaaatagctcgaaaataaatattgccaggaatattctttttaaatgccatttatattcacttactatgaggcagt

SEQ ID NO: 326644 - DNA, 869 bp, Homo Sapiens
  misc_feature (374)..(374): n is a, c, g, or t
  misc_feature (541)..(541): n is a, c, g, or t
aaccacaaataatttattactcaggagtgaatatctttaaaattatgtagattgcgattatagtacttagtcttttcctaacaaaaagacaaccattctcaagtatcttattacagttattcattgattaacaattaattgaacagcttctatgttatagtccctaggcatatggcaatgaactagattgttatacaaagtccctgctgccatggagattacattctacaggagtggacatagacaataaatgaataaacaaataaataaatgagataatttcagataatgataaagccttgaagcccaggtgatagacaaaaagtgacaatggatgtgggtgtagtgtttttaaacatttttcttcttaaatnttggtttaacatgtaaacatttaccaaagtgataaatctctgcagtttagtcagatagtaccataagtatttattaatagcatttattccaaaaaaacccagaaatctccatctgcttcttccccttattctcaagagcaggctgttcagaagcaggctctttgaangtgacatttgagcagagaagcgaatgacaaaaaggaactgcttaagtaacatctggataaagagctttccagacaggggcaatggcaagagcagagagcctcagacagcaatgagggtccccagtgttgctagagccagggaacaagggagaaggcctaggaaatgatgcagtatatctttttcatagtagcttccatgaatagactggatcgtgggtgtagagaggggagagtgatagcagagaggaaatatgagattgagggatgatggtggcttggactagggtattagcagtgacaaactccaatgcagtttaagacacacagc

SEQ ID NO: 326645 - DNA, 548 bp, Homo Sapiens
agggtaaatcagtcagacaggcgacaaatcatttattgagaggttctctgtgtcaggcgtatgataggcgctggaggggcacgcttagaaccatgcaccaacaagggcaggagaaaacaaaatggtagccaggtgttcttggtcatgccattgaatttgggtctgttctcagaaactctggaattgaagaagttgcagagcacgaagataaaatggtcgtttggagcagaaacacctgatttctcatcagtgcatacaaccacaggaagacggcccccaacattccttccccagagggttctggggctggtgggatcctcatttccatgttaagctgagaagagatttcagggtaggctcctgcaggaaactactgtcctcaactgtggctccatagcatatttgaaagcaagaaaggactttaacccgtcttggaagcggatggcatggaggacagcaagatccttgaggtctgggactgggagctgggcttcgtcttcccagtgatccacctcttgtattcttctcgtacctggccgttgagcaga

SEQ ID NO: 326646 - DNA, 475 bp, Homo Sapiens
  misc_feature (401)..(401): n is a, c, g, or t
  misc_feature (453)..(453): n is a, c, g, or t
tttagggtaaatcagtcagacaggcgacaaatcatttattgagaggttctctgtgtcaggcgtatgataggcgctggaggggcacgcttagaaccatgcaccaacaagggcaggagaaaacaaaatggtagccaggtgttcttggtcatgccattgaatttgggtctgttctcagaaactctggaattgaagaagttgcagagacgaagataaaatggtcgtttggagcagaaacacctgatttctcatcagtgcatacaaccacaggaagacggcccccaacattcttccccagagggttctggggctgggtggggatccctcatttcccatgttaagctgaggaagagatttcaggggtagggctccctgcagggaaactacttgtcccttcaactgtngggctcccataggccttattttgaaagccaggaagggctttttaaccccttntttgggaagcccgattggcatt

SEQ ID NO: 326647 - DNA, 635 bp, Homo Sapiens
ttttcttttaaagtagttagaaacttaagatcaaattctgtggttttggctgggaggaactgcagttgatgatcaaactgtttaacctttccctaggacacagctagaatatgtttccaagcctccccaacacgtgtgactgtgtataattgagttctaaccacaggaaggtgagcagaagtgaggtgtaaccatttccagatctggctcataagggtctcccacgttctcactgtcctctatgctctttctctgtgcacagcttgatgcagatgagcaggtaaccatggaagtcgtgagctgaggctgcagagtctagagccagagtgtggaataaacttgggtctcaaatcacccctggagcaaagcccccatctaatcaggaacttctactttcaactttacatgcgtgagaaatgaacttctatcatgttagagtgagtatacagtttttgtgtctgtgttttagtagctagtgtcaccataacaaatataattcacaacaggatattcacttttcaaaatcaagttgggtacagtttgaccaattggctacatgattaggaaaatatcttgatcaaatagttttcttctaaacacttacatcactattctgtactcacactgtaaagttt

SEQ ID NO: 326648 - DNA, 812 bp, Homo Sapiens
  misc_feature (185)..(185): n is a, c, g, or t
agctacccttcacccaaaagaggggtgggggtgaacactcagacaatctgagagggggtagtctaatagagccatctggagaagggagtggcagagccagttctgtgctgaccagtctgtgtcccgggacgcatccccacccgtctgtccaaggctttgtcccaccagctgcagccagcagcctncagaacccaaaatgagggtagcatagataagactgctgagccccctttctgtggtctttcctttccatgacctagagaaaagagctttgctggagggagacccccaaaaagaattagggtgctaacatcccaccaaaagcattcatcccacccaaaatgttgctttttcattctatgtcaataatttaaggtgggatttctctcaccctgtggagatgaaagtggcaaaaggttgtcccagcagtgttgggggatggggtgtgcacatcattcttttgggggtagatgacctgctggctggtgggcttttctccaggactactgcaggtagagaccctctgggcttgtgtggagtgggagcagccgtgttgggactatggggaggagctggtctgggtgcaaattaaggccagtgttggggtctgagtgctgtccagaaaggctgtgtgaccaaccctcactagttcctgaggtcagggtctccatgttagggaacagagcaagagacttggaacagctccctacagctgcacttctagaaggtcagcctgtccgattcttgtaaccctggaggtccctccccatctgcagccccctgagctgcaggagcggccccatcagtgcacc

SEQ ID NO: 326649 - DNA, 735 bp, Homo Sapiens
ccagaattcggcacgagcggcacgaggtctttttgtataactaatctcaaatgttatttggagtgagaaagagtttaaacaaatatcactaatgaccctaacttcactttcttgtgaggtgtggcagtccctggaccctgattccctgtgggcaactggatgcgctggagcttctggtcctacagagctgggattaacccagctcttttgatatgttgctcagggttcttggttccacaatcagactaactcaagctgtaagcaggaaaacaaatttattggaaagggaggtcaaatagtttacaagagagctaagaatgctggtgaatgaggcctggtgtatgggaaaaaacacaggaagcaaaatagacccaagatggcatgtgaagtctgtttaagaggctaccattggcattgtcaccatgaccactagctatgatttcaccagccacacctgactctaccctccatcagaggcaccaaccttaatctctaaaggttcactggaaatttgcattgctcagtgaagaatcaaatcctagccagatgttcctagtggcctgagcttccggggaaggaaatgtctaaccctttgggcttgggctttctttattggtatttcctgaaataggagggcagggcaggcaaaatagtcaaaagtccacttcacttggtgaccctgtgaggctctaccagagcagccagccaactcatgtccctgtttattgtcacctc

SEQ ID NO: 326650 - DNA, 564 bp, Homo Sapiens
tttcttttttttccacaaattgacagaacaatgacccacacaaaattgcttcctgctttgctgccaaaacaccaggcaaaaacgggccacatgttcatcatgcctaagggcagctctgactgcactggtactatgtcatatgttagtttcaaaccaagttaatgtcataaactggcaggcactgcatcttgtcaattattagccagttcattattaacattactgagtgaatatcatatatggtataattcattacagtgtaaatagccatttatatcctggggaattcctcaccaagactatatggaatatttttgatcagtggaggagacacattaagtagctttatcccattgcccttaactcttatattgttcattttattaaaggtatcatgcaatgagagttagcaatataatcactgcaaaaattatccttagaggaaaacgtaatctactttttatgaactggaataacaaaatattaagcagaatcacttgttacaaaaaaagcatcacaatcctatcatttgagatataagtttcctcgtgccgaattactggg

SEQ ID NO: 326651 - DNA, 810 bp, Homo Sapiens
aattgactaaggcttccgggatggggcaggcattgtaatgctgctccgtgccaagcaccctgcagccccctcaacctcagctagaaaccgcaggactcccacgctcagcctggggtctgtctctagccttaagccccagcaaatggggggcttccataacagcaatggtgtgtttggagcctgaaggtcccacccatctccttaaaatctcagaagtagggactggcagggtgagaggcggcagactgggagggccatcggtcccctggggggcagtgtgggacggggcgctccaggggacccttgggtggctttgcaagctgttgccgctctggcttcactctgtccccacccattcccaggtgtcccatgactcccagatctgctccctcacacccgccttcctcatgaacagcagcaaaattagctttctttattaaagaaggaccttggaaaaatggagtcatttagaaagcagctggagtggctatggctgagtagggagagcacccagatgtggtaggctggtacttctgaaaaaggggggactctgctgccaagcccccaggaaccacctgctccagaggcgcctggaggggcctcagactgccatggggtttggcctggcccctagatccaacagaatcgttccccacgcctgccttaaatctcaggaatttgtgaaaggggctctggggctaaaagggctgggaacaccacttacctaggccaatttaaaacaacactagagactcagagaaatgtcccgtgctaaatcagggtaggccaatgggctccccttcccaggat

SEQ ID NO: 326652 - DNA, 474 bp, Homo Sapiens
  misc_feature (28)..(28): n is a, c, g, or t
  misc_feature (31)..(31): n is a, c, g, or t
  misc_feature (37)..(37): n is a, c, g, or t
  misc_feature (77)..(125): n is a, c, g, or t
ttttttagacagagatcgcacagtggtnatntcaagngtcactgcaacctccagcctcctgggttcaagtgattctnnnnnnnnnnnnnnnnnnnnnnnnnnnnnnnnnnnnnnnnnnnnnnnnngactgggtttttctctctttgagattaaaacagaaaggatgtatctctaggcaactgctacttaaatcactgcctccaacagcaaggacagaggcagcttccagagctgcttcgcctcaaacttagaaacctgctctaccaggcagcttcctaagcactgcagggaaatttctgggcaaaatctggaaagtgaagcagaggacgaggacaattcactgctcaccacaaggctgaaagagccctaactttcaaagcaaaatcccagaacaaaatgccatgaaaaggggcagcaatcgaggctcagtgaaatccatacagaggaacatatgggtgaaagccagtcaccttg

SEQ ID NO: 326653 - DNA, 906 bp, Homo Sapiens
aacggtccacagagcctctttcaccgctccagaagattctgtctcccacccgcaggcgacaacgcggaggcgccttcaccggagggcgaactttggcctttccaactttgaccggacacaccaacgggacgcccgcaaaaaagtttttctcttaattcgcagctgtcaggaaaccctaaggattctccgaacccagacctcccatcataagcagtcaattctgcgctacccagctctaggcaccacacgtgttccgcatcgaacgctcggaagcagcttggacacgggaaatcatgtgcatcgcaggatcctagccactaatgattgtagacttccacttattttatgatctaggcacacagaagagaattacgacagtgacacatcattgattgtaagagccttcctactgtagatattcaattaagatgtgaaagcgaagaagcacatgttagaactgacggactatggagactgcacgatggtgttgtaagtacaatgtcagagaaaggtgtccatccagggaaccctccaactgcacagagatcagcccaagtgccgagaggcctccacctcccagctttggccgtgggactgccaaatagaaaatgacaactgtctaagcccagggctgctcacttccaggccctgcctaagggctcaggggatcgagctctttttcctcagtcccagcaaggcagcctggagaagatgaggactgaactagggcggcagcagctgtgagggtagaggaggcacagacttggtaataggctggatgtggtggggaggggatactggggagtccaaggggcctccagggtttctgacttcggtgatgatgaccaggattggggctaccaagtgagaagcaggtctggagaaacagatcagttccatttcagc

SEQ ID NO: 326654 - DNA, 694 bp, Homo Sapiens
  misc_feature (588)..(644): n is a, c, g, or t
  misc_feature (652)..(652): n is a, c, g, or t
  misc_feature (662)..(662): n is a, c, g, or t
cagttgtactttcatttagaagtatgaatcatgagcaagtagtcatgcaggaaattgtatcctctgcccacccacccacagaaagggccagtgctggaatggacagaatacagcaggaagtgcatgaaggtggaaaaggggagggagctgggagcttatctccgagagcgtttgggaggataggcgcgtggagtctgttagctggaggcttctacattcctggggcctccagaacccaaacgcctgccgctgccctgccagtgaaaccaaaccggttgcctttttgaacttttccactgaggccaccttggagtcagagccagcgagctcaggtctctcctggtaaccttcacacctagaggtggggggatgggggagcagtattgaaggtgaggaaaaacagcatgaaatggagcattgtcaggatagatggtgactctgtggaaaaacagaatcgggagtcccaagacctgatttaaaaatgctgaactttccagtctgagcaatatagcgagaccctgtcccgtgtatgatggtgtgcacctgtagtcttgggaggctcacgtgggaggaccgcttgagccccannnnnnnnnnnnnnnnnnnnnnnnnnnnnnnnnnnnnnnnnnnnnnnnnnnnnnnnngagtaagnccccgtttcnataaaagaaattctgacctttctgtgccgaaa

SEQ ID NO: 326655 - DNA, 800 bp, Homo Sapiens
tttaatgtagcccagctgagtcagaaaggttgtgacctgaaggcagaagaacccgaatgccacacctcattggagtatagccagtgttggtctgtggcacttgggctgaaaggtgataatggcattgcgtggtagctgacaatgagcaccttcggttccatgtggagcggggtttagctcatgcaaaagacttgcaattgtctccatggggacgatcccagtggggacttgttcagcccacagctcgagtggggttgggatgcttgcctcttttccctaacagttattttcccccgggtccagcttaaagactcgatggaaggaggtagaacctctgctgttactgcttgaacttaacctgggaaaggagaggaagacaccatctccaaagctattaatgtcactccttttgcgagcatgattaggccccggagatttccaagtccccccatctacacttacaaacgattagaagggtttaattttaaagactttctggttacactactccacgaactcctccaaagatccgttattcaaataactgccctagaaaatgtttcccatctcctctaaatccctgtgttctcctctgtggaaatgaaggcagcaagaagcacctgaggccttggttcatgcagtgttctcttttgactaaatcacctaggttcctttaaacatgctacaaagcccaggcatggtggtgcacacctgtactcccagctactcgggtgtactaggctttgggcctagtagttcgagtccagcctgggcagcatagtgtgagaccctgtctctta

SEQ ID NO: 326656 - DNA, 425 bp, Homo Sapiens
gtctgtttgcctcttatatttctatttattctgtggatggactctggtgacagttgacaagcattcaaccagtttgaataagggcctaatccttttatctagtagcttagcgaccataactgagagtcaccgggtgaacgctggccatgccagaaagactaaccatgtgatctggggtagggcatctgcgtcatacagtatcggtcaacctggagactgagttcaaccacctgggcaatcaatcaatcaatcaatcatgactaggtaatggagccccaataaaactctgaacagtgggacacatgttgatatttcatatccatactggaagggtaacatgtcctgattttataggaaaatggacacttcacatttgggactcttctagactcttccctatgcatctcttcttttgtgagatttta

SEQ ID NO: 326657 - DNA, 406 bp, Homo Sapiens
tttctaagccaagtgtgaaatctgaatctgcctctttattcacgcattcattcatgcaccagatatttattgaccaccaactctcccaggtattgttttggggtgctaggggtgcagacttggctacaacaggccaaaataacagaataatccctgccctggtggcaaggctcatgaagagctcactctagtgaggccccattccagaggaggttctgttcagatgcatccaatcattgtggctttgcccacttgaatcagacaatttgtcaagttcaggggtagcacaaacttcatgacttgtgatgttgttttagtttttaaatagtcattgcaaagaactgcctgtggataagaaaagcaggaaaagcagcctatgtaatcttttacctcgtgaaattactcc

SEQ ID NO: 326658 - DNA, 344 bp, Homo Sapiens
atacaaaacctcgctttgttgcccaggctggagtgcagagagagactgagagttgtgcccacactcctcaagttctcataaacacttagcctgggagcaactgaatctgtttcaagtgtttttctgaacttaccacaaatcccagaataatttttaaatgttttaaggcagtgaatgtcgaaataagagaaatgtgctgctgttggggtggtggtacgtttatccaatcaacacccataatactaaaatacatgcatttcattaaataaatcatggtatctttgtatgaaaaaacatcttagagctgttaaaaattaagctgcaaggccaggcgcagtggctca

SEQ ID NO: 326659 - DNA, 681 bp, Homo Sapiens
ataatgtataacttttattcttagattatattacaatgtgtcagtctcaagtataactacaatataactacaatataatttatggcaaactcaaacattttgagcattcatagatctatgaaatttgtaaagaatcctatgtaaacagctttatgatattcatggctatttatttattttcatgaagcaattcttgattgttttcctcaagaagataataacataataaaccacagatatttttaaaaaattgggggccttcatacataggtcctaaacccgaggccaattccctggccatcctaatttagttggcccttctttcagcacttctattaacatttctctgaaatagctatttaggaactgctttatttacatatgcattttattttcactctttttaataaaggctatcaaaactctataaaatcatgctaagtattttgggttgtgatgttcaacaatccagcatttaaaaacagctcacaagtcacccaaatcttttgcaaactaggtaaactatcaaaaagctaaaattaggttctctaattttcatccgaaagatttgtgttcaaacctgtttggggcatggtggctcatgcctgtaaccccagcatgttggcaggtcatgacagtaggaacacttgaagccaggagtttgagactagcctgggcaac

SEQ ID NO: 326660 - DNA, 673 bp, Homo Sapiens
gagactgcatagggctcggcgtggtctcagtgtaaatatttccctgactgactgtgctttcctaccttggaattggaaccttgattcaagaaaggttcaacgctcacctggcttaggaacctggagagatggagagaacaggctttgctgtcagacagacttaggtttggattcatgtagtctccctgatgggtttgctggcctcactcaccagtgcggcctatgaggcaggactctgcaggagcctagaagtagtgaagcaacaccctgggacagcagctttcaacatggggactagaccacagcaggaggcctatgaataaaagtattgattttgggaaagagggactttttgcctttatcatggtggaagccagtatctgtggagtctcaggcatgttgggcttttagtggtccacagaccccctgaggttcctacataggtggcccgggggtccatgaaaagctctgtgccattctgggagagtgatgagattcatctctgtagtccctcctttcaataagagttttagtaacaccccctggagaatcagttctttgggactctcccaagaaaaccatgaccaaatcatgctaaacaaatcacacactgttctgccttagaactctaacttgcatcattgtttagcctggaatgtcctctctacccacc

SEQ ID NO: 326661 - DNA, 678 bp, Homo Sapiens
ggccgcttaattaaaagctttatccaaaaccctatgtgtaaacctcagttaagagtcacctaaattttggggaaacactcttccctcacattttaattagccactttcttacagtaacatagagaagaatggaagcttgtggttgtgccactagttagaaaacaaacatgaacttggccctgagaccatcctgctaacatctaatttccttttggaaaagaagacaagggaaagaattagataaacattggcatatacactactaacagctaatcacaatctttgttttcatttctaccagctagtaactgcacagacccatctgaaagccctttgatagatgtaatgtaagtagaaaaaaaatcttttccacatttaaaaaagtcttttggctttctgacgaatgttaacacatgccataattttgaataaatactttaattctaagtattcatgcttttaacagggatttgagcatggactgtgtgtcagacgctgcgtcagagactgggataccacagggacctgaccagatataaactctgctctctagaagcttgacagtccaagcatcacaaatatttgattcggtatactttttaatcactcatgctcaactgaactatttggtaaaaggtaaaaaagcagaatcactctacatcctcaaaggaactaagt

SEQ ID NO: 326662 - DNA, 601 bp, Homo Sapiens
agaatatttaattttacaaggcagagtcctccttcttcaataaacatggataaaaatgatcctcatgtaatgaagtaagcctttccatactgtggttctttcccagataggcaccacgaaaggtgcttaaggatgcaaaatagccacagatccatagttcaggttgaaagtcacaaacagtagcctttttgagaaacctcaaacaatggaataaaagattttataacctgaaggtaagtagccatttccaaatgtcctttgacctttgaaatatataatgtcttaagttttaccatattggaacgtgtaattattgtgcagtttatccattttaaaagtgaatccaaagaactagagactgagtcactctttgtatgaatcctcacctacagttacagtcttagagtaagagcttcaggatgctcttacacattacatttgtgtggttccatcaaatacgtagattttaatgcctgcaaagctgtgaggcctgaataaagcctctgtcacacacagtacatttatgtgatttctcattattatggactcttggatgtctattaatacttgaactcatgaggagtttgccacagtcattgca

SEQ ID NO: 326663 - DNA, 958 bp, Homo Sapiens
  misc_feature (654)..(654): n is a, c, g, or t
gccatgggtatttcccatttttaagatcataaacatttccctcaaatagataattatttttccagaatcatggataaacacaatagactgagaggctgtttcaagttgtatatataataatttaaaggttctataaaagtatgaaaaacctcttgtaactgaggtaaaacaataatgtccaggctattctaatttctaaaacacttcttttttggttaaaaagcaatgctaaaagcaaaccaataactgcctttaaaggtactaattctccaaaatgttttaactttctatacgtgaatatacaggacccatttcttaatgaagtgaaattactccattctggtaagtttaaattcagacccattggacagtttcccagagagagagagaacagaacatttccatggtcacacataagcagagtggggaatggagacagcttcactttctcgactacaatccaatactgatctctccttgccaatgtgccacaatcctgagctgggccaaggacacacttgccagtagttaggctgcgtctacacttccttaggtgattagttcctcagatgccactggtccacaccaatatcacactgggtaccattggcttggttaagcttcgacatctgaattaaaccccaatggctgagnctcagacagtaaaactggcattccccttcccaggacagattacagctaatgctctgtctgcaatttcacttcaacaaaaatatctattcaaacatgtaaaagcacaatcttactgaaatactgaactttttaatcatcatttccatgtgttatctatgcacttatatctattatatacagttcaagtataggaaatacctcccaaacactcgagaagtacttatatgaattcacctttttcaatttttatgaatttcttaataaaaaacacttaccatgatctattctgctgtgggtacttctg

SEQ ID NO: 326664 - DNA, 717 bp, Homo Sapiens
  misc_feature (704)..(704): n is a, c, g, or t
atcgccttgggaagctgtgactcttttgcttgtggccaggaagagtgtcccaggccacccacccagaggcccagagattcttactttctgaaagtcaccttaggagtattttgagctgcccaattaattgggtaaatagattttctcattgtcacagagatgtgggttgagaattgtttgctacctcccctttcactgagagcactgtgaatttttattagttattgccaattagttttttatttatcatttgatactgacatttggattctgttctcccatttcagactggcataattctccatttaagactactaaataaggtttgaaagagaaagggtctatcagaagttacccttccctctttctaccatccaagtagctaaaaaaacaaatgacttctttcagaggtgagaagtatcctgataacaaaaggatgtgtataggccagggtattaaacttggattgttccagaccactggatcgtcactggaacttttacagagtaatttctgtttaaagaagcacttggcaggcatgttgataggtcacttaccttaacaatcctttgaggacaatgatttttttccactttgttacagatgagcaaactgcagctacaaaaggataatatttagatcttgtctttcacattcaaagatgacaccaataactgagaagttggccttgcaacttaaattgntttgatttaggat

SEQ ID NO: 326665 - DNA, 470 bp, Homo Sapiens
  misc_feature (232)..(394): n is a, c, g, or t
  misc_feature (404)..(404): n is a, c, g, or t
  misc_feature (410)..(410): n is a, c, g, or t
  misc_feature (421)..(421): n is a, c, g, or t
  misc_feature (427)..(427): n is a, c, g, or t
  misc_feature (432)..(432): n is a, c, g, or t
  misc_feature (438)..(438): n is a, c, g, or t
  misc_feature (452)..(452): n is a, c, g, or t
agaatttacaccttaccgtctctgtgattgaagcagacttctcgctttatttcccttaggctcatttttctgtgggctctcccttaaagacacatggccacagacacctccttcgcatatgtaatctgccttcccctgcggccttccgtggtcacagcaacagggactgctcaccccctccagctggggcttttctaacaagcacagtcagaaatgcgcaggcctggggttnnnnnnnnnnnnnnnnnnnnnnnnnnnnnnnnnnnnnnnnnnnnnnnnnnnnnnnnnnnnnnnnnnnnnnnnnnnnnnnnnnnnnnnnnnnnnnnnnnnnnnnnnnnnnnnnnnnnnnnnnnnnnnnnnnnnnnnnnnnnnnnnnnnnnnnnnnnnnnnnnnntagcgaggtnaagggnatcccagttancctcantcagnccattncacattcggtacanggtttccaatatcctagg

SEQ ID NO: 326666 - DNA, 848 bp, Homo Sapiens
ttttgtaaaagcctacctttttggtgatagaggtgaaccaggacccaaaaaaaggaattttattgtgggaaaaagtatttatttttgggaatattatctttattgaaattaaagttttagtaatgatagaggcaaaaaaaattccctctcattactcatgagaatataatttgaaaacaatctttctggagtgagatttttaacaaacagttaaaattgcatggcctttgatatatacattagttttaggaatctatcctaatgatcttaccaaaactttgtttgcttctaatgtgagtaaatatgcagtcctccactcaggttgcagagtgggtactattgcagtctttagcccaagacccaaattaacaggcttactataatttcagggttttgaaatccctaaatgttctctttttgatcatgtgacaatatgctctcagcagcctaagacacagcaacagccacatcagggagagaaaaataggttcccaggatcagctgggcactatggcggggcctctgcaagcagtgggctaaaggggacaggcattagaatcggggtactgcctcagggttggaaaagagagacccactgaagtgagagtcagggggcagaatgaatttggtgaccatctgttaaggaccagtaagagagtgggtatgaagaggactggggacaagtgaaagaaggtggtacaaccgtcaagagggccaaaagcagctgtgtacggggaagagaaggagctcagttctgggccggcagctacagaatcaagccaggcagccttccctgaaccaccttctccatcatcataaagtcagggattgttcatgcacataaagtc

SEQ ID NO: 326667 - DNA, 669 bp, Homo Sapiens
tatattatgtgctgtgcttgcaaaaattttgaagtggttttaggccaatacgcctacctacaataattagaaaagctggacaaaatttaaacatttgttagaaggtatccacattagctgccaaagacaattaagacttgaggggccaagatttcatagagcagaaaattttatgagataaatacattatttgacaccactatccccttaaagtattagctgattttaaaagcagaaacctggaaggctgaaaacctgagtagagctttgggcagtttcactggactgatggggcaaaaattaatttgccaaagcatactggctttgataaacattccagggtttccattggtactgctgaaaagatacaacctacaagtaagagtgaactaaaaatggatcagccctcaccaaaaaattaaatacaacccaaaacctgaatgaaatcagatgatctacctctgcatgcacacaaaccatctgccagtgcaaaaataaatcttctttggaggaagaaggcattatcccatcatcaaattaactataattttccatgcacaacgttcagcacttgattaaaaaataaccaggaaggcaacaatacaataattgatgaaaaacgaggagaaaaatagatagacgaagagttgcacaagagatccatctatt

SEQ ID NO: 326668 - DNA, 379 bp, Homo Sapiens
  misc_feature (363)..(363): n is a, c, g, or t
gtgaatggttaaatgtccaaaattctctaaataatctccaagataaattgaatccttactatatgccagacacagaactactctattaggtactttgctaagtaccttggataacattacttaatttttacaacagcccctatgagatagatattactactgccatcttatgatgagaaaactgaggtccagagtgggttaagttctcataacttgtctttgaaggctaaaagagggcaggatacaaaggccgggctctcccaactccagagggctgtggggttgcccaggcatactctactgcctccattgcactgggtatttaggtgcttttatatagggtgcaaaccaagggctatcagngcatgggggggaaggg

SEQ ID NO: 326669 - DNA, 380 bp, Homo Sapiens
gcctttgaagttttcccattccaagtaataaagaacttttgttgttttgttcagtggagacaagctaaagcgagtgcttgcagggaggttttctatcctgaactataatagtggcattccagactccacaaggtgtgaagtgtggtgcacgctctgaagggcacacagatgttactaataacacctgcagccacacacagcacacctgctacaagccaggtggtttatattgatcactcactacatgccagggtcccctttgaagtgcttgacgttcatccagccactcaatccttacaactctataaagtattcctattgttactccattttacagatgaagcagcggaggtaccaggaatctaagtgccagagcttgt

SEQ ID NO: 326670 - DNA, 893 bp, Homo Sapiens
  misc_feature (60)..(60): n is a, c, g, or t
  misc_feature (69)..(69): n is a, c, g, or t
  misc_feature (85)..(85): n is a, c, g, or t
  misc_feature (759)..(806): n is a, c, g, or t
aagcaaaaggaggagagtgatattgtgtttcagggcatttaatttgaatatatcacttgntagagtgcngacttccctgagttcnataacctgtagtgtaaacacacaataaccaggcaccaaggcgcacccaagccaacaccaagcagccagtgggttttggctgacataaggcctctggtttgtgggggttcatctggctccccttcagctctatcccaacatatgaatgtttctttagttaggatcagtagtctttatatgcctctgttatatcagaaagacctgggtttctggagcagcttataaagattggggtttaggttaaaagcacatcacaggcaaacatgtgttgaacattattctgtgtgtggagactttgaagagcctctcaggtatatgtaggatttggtattatgaggagatgaattggattcaaggtactcaatcttattgccaatcttttcaataagaaaccatctccttggtttgcacatctgtgtttgataatgtgggagaatgtctttgattagactttcagagtaatcattcaaaggcaactttctcctctgctttgccgcatctcataaagttagattttgtacattagtgaggcactgattgcatgaaaataatattggctttatgagagagtataatcttgttcaaattataactctccccgccattctcaaagtactatttttgtgtcagattctcctccactgctgcttttatgagcactttccaaaatagtannnnnnnnnnnnnnnnnnnnnnnnnnnnnnnnnnnnnnnnnnnnnnnncatatttttatggtaccttaatagccgaggcaaagtcacaggtggccttcactaaatcatttctacttttctataatcctaaggcag

SEQ ID NO: 326671 - DNA, 425 bp, Homo Sapiens
  misc_feature (137)..(137): n is a, c, g, or t
  misc_feature (257)..(257): n is a, c, g, or t
atgtacactgccatgcctggctaatttttgaatttttggtagagacagggtctcgctctgttgcccaggccggtctggaactcctgggctcctacctctgcctcccaaagtgttgggattataggcgtgacacctgnctcccggcagaaacctattttttccatagtaacttagaaaactgcttcagtctaacttaaaaggattaggaacaaatgtcctactataggaacttttctaataaaatcccatattgtccnaaatgatccttctgaaatttttcaagtatattcagaatacccaaatatgaatataactactaaatattcctcaatgaacagtagcactttatgcactgatatttaatcaaaactcaaaaagtacatattccgcagggcatggtgctcatgcctgtaatcccagccctt

SEQ ID NO: 326672 - DNA, 648 bp, Homo Sapiens
gaaacaaatgccgctggattccagaataaaaactagtgacttaagaccaggaggagggaagcaggggaggtttgtttttgattttaagggtaagaatctagttccgaacttcgtgactcccggaacactcctgaattgagtctgatacatttcataaatcaatcaagcccttatctagataactcaccatttcatttctgtatcaaattaagtagccctgggtcttttgctatatatttatatcttagaagctaatccaaaggacaaaaattcctctctgcacattactgcaagatttcagctttgctattacatcagaaagcagtaagctcaccaggacaaaaaccacagaaggccctgaaaagacttgcccccaacatacactggccattctaacccgcaaagcggaggctttcttttccttaagggtctgttctccagaaattcccttattcactgcctgcccagttcacactgtgtataccccaccctcaggagtataaacctgacaaatgcttttgagccaaaccagacagagtcccccataaaactcatggaacacaacagatgattctttcagcacaaataccttcagatttggaagcacatcctgatatgtttcttccaagttcatttaattaagcggcc

SEQ ID NO: 326673 - DNA, 716 bp, Homo Sapiens
aaggcaactggtctgatttttcaggtaagaacatatgagaggcaggctgagaccaattttctaccaggccagctaattcatcacaatgacaagctatgggtcatatgctttcaggaaccagacactggaacatgtcgtctgatgtacatcacaccatggcagagaaataaaaaaagaattggaaagccaatgtccaattatttactaaaacagaatccactggagagaaatgcaaaggcaggtaaaaaggcattctcttaacatgaaaactcacaactgtaaaatgagaacctaaactatacagcgacaaactcaggaaaaagtctccagctactgctgtctctcagactctcacagtatgtgtaaccacttcctcctctgcacggaatcaccccagaagatcaactctactagatcatttgaggacaatgaacaaagtctcaagactgaattcccacagaaaacattctcatgaaaccacccaatattctggtgaagttaaagaagggcatgtgttcggagacaaccagaagcagcaatgctcaaaaccacaaaactctggattgccgactctgcacatcctggttcctctagatacagttcagtggcacattcacaaataaacgttttcaaaaactgccctcaggcagttctagagaaatgctttgacttgcctaatggtataatgtcaagaaaggaagaccagcactgatcat

SEQ ID NO: 326674 - DNA, 574 bp, Homo Sapiens
ttttctggaggcagaaggctcaatttattttggttttagtggtggaaagtcctcagccttagctctgactgatgacagagcagccgagtagttagaattctctctccaacgaaagcgatggtcaatagaattctcagtatcaaatgagcaataatttgctgtggctacatgctggataatgaaagatgttagcaggatcaataaaaaatgaaaacacttttacttacatcttgagttactgttttaagagagcgagagatgtaacaaacccaaagccaggttcagagccacccaacacacccctcaaaaccccaaggcacacagttttgtcaccacctgactggcccttccagaatgccaggcctccaccttttccctcaggagagtagattatttacattaaattaaccctgtagagaccagtaataatttaactgccagggtttaaaatttttcttttgtttcctaaagccaggaatacattttaaattgttttccaccaggattaaaggtcacgtaataggttgcagtttaccaaaaaagtgtgcaagtgtcccagagctgatctgtctgt

SEQ ID NO: 326675 - DNA, 491 bp, Homo Sapiens
  misc_feature (22)..(22): n is a, c, g, or t
  misc_feature (344)..(404): n is a, c, g, or t
aaaacagcagacttaaataganaaaagccccaaaaggaaaggaaaacaattgaaaatttaaaagaaaaacacccccacccccaaacatgatctaatcagtcttccttatggagaagttatgaatcatcctacttagcaaataagacaattgaatgtgcaagcccaaacttgaattaaagttattctcaacttcctgtttctcttattaacatgcatttattatttaataagtatttatgtatataattgagatatttaagctctgggtaacttaagtggctgtagagtactacctgaacacacaaggagaaataaactttgaatatgtgcctgtatatttacannnnnnnnnnnnnnnnnnnnnnnnnnnnnnnnnnnnnnnnnnnnnnnnnnnnnnnnnnnnnattttttactttgtggatactggccaccacttgaagagtttcttgggaatctaatcttctcaatggcaggctccagcattgcctttg

SEQ ID NO: 326676 - DNA, 786 bp, Homo Sapiens
  misc_feature (553)..(566): n is a, c, g, or t
  misc_feature (571)..(659): n is a, c, g, or t
gcacttgctatgtacaaagcaggtgtgctatgaactaacactcttattcctagttccaatgaaagacggtctttggccaacgagacccacacccttcaattcaggcatggcttcgttgcagttctgtccaagtgagtactcccaagaggccagcagcggtgtgactccatcgcccagggggcagctttgggctctctctcgtagatggagctggtggtcaggatgaatgtggacactgtccttctgagaggagcctgcttagaacccaggctctgatattgatctctagggtgctaacatttgggtcacagaaaccccactgtggtcatcaaaggaggtgtattgccaactagtcgtgctacaaaagggaattaatatgacgctgtggagggaagaaggcagctgtgggactgggaagtaaggaggggatgagtaaggccatttgagggataattagaaaatgaaccagcccaacgatacagaattcaaatattccacctcaccccaactgcgctacgaccactttatattttgacattcagcttttattccnnnnnnnnnnnnnnaaacnnnnnnnnnnnnnnnnnnnnnnnnnnnnnnnnnnnnnnnnnnnnnnnnnnnnnnnnnnnnnnnnnnnnnnnnnnnnnnnnnnnnnnnnngagtgagaccctgtctccaaaaaagggagaaagactcctcaagggctgacgcatgtcctctcaattgcagaccatccataatgtacgtgaacacaggccaggggctttctcaccacaaagaattcgt

SEQ ID NO: 326677 - DNA, 766 bp, Homo Sapiens
atcatttctccttttattgacatctttatttttcaatatagtttaataatttcctttcacctctattgataaatgagttcctttatcatttgttttcttgtttctgatgtgacagttgtattgccctcataaaattaaaatcttttatacatttttctctactctagagcagaggttggcaaactttctgttaaaggataggaaatatttgcagttttgcgagccatatagtctgtcacagttgtctaaagcagccatagtcaatagctaaacaagtaagcatggctgtggtttgataaaactctatttacaaaaacaagcagcagataggatttggtccatgggctttagtttgataacctctgctccatagcagggatcacacacattttctgtgtaggatcagacagtagatatttgggctctgcaggccacatggtctcctgtcacaactgctcaactctgctgctacagcctggaagcagcacaatccaaggtgtaaatcactgttgtggctgaagcccaacaaaactttatttacagacacccaaaacttaaatttcatataattttcatgttgaaaatattcttttcacttttttcaaccctttaaaatttttttaaattctagatcatggaccatacaaaaacagtcagtgagactgtggccatgagtcatagtttgctgacccctattctggatcagtttacctcacaatgaatggttccttaaaagttttaatacggttcacttataaatgtgatt

SEQ ID NO: 326678 - DNA, 737 bp, Homo Sapiens
gaagcaaacagaagaccccttcctgagttggtacgtgccaagataccatttagtgcctgccttcaggctttctctgaaccagaaaatgttgatgatttctggagcagtgccctacaagcaaagtctgcgggtgtgaaaacatctcgctttgcttcattccctgaatacttggtagtgcagataaagaagttcacttttggtcttgactgggttcccaaaaaatttgatgtttctattgatatgccagacctacttgatatcaaccatctccgagccagggggttacagccagggagagggaaggaacttccaggacatcagcccccccatagtcattcctgatgactcaaaagatcgcctgatgaaccaattgatagacccatcagacatcgatgagtcatcagtgatgcagctggccgagatgggtttcccgctggaagcatgtcgcaaggctgtgtacttcactggaaatatgggcgccgaggtggccttcaactggatcattgttcacatggaagagccagattttgctgagccgctgaccatgcctggttatggaggggcagcttctgctggagcctctgtttttggtgcttctggactggataaccaacctccagaggaaatcgtagctatcatcacctccatgggatttcagcgaaatcaggctattcaggcactacgagcaacgaataataacctggaaagagcactggattggatctttagccaccctg

SEQ ID NO: 326679 - DNA, 775 bp, Homo Sapiens
caccaacccctgtgatggagttggttggcaatgaaatagcctatgaacaacggggaaggttatccagcagaacagttccaaatccttagacgaacattttgatgtagaaacacaaagaaacaacatatgccagctcggtcccagtccagtggtggagtgcccacgtgcaggatttaagttctgagttcaagaactacctggctatgattttgagctgacagcattataggtagctgggatgtagtggttttcaatactgagtatgaggcaccagtggccacctgctccatctagagaggtatgggttcacagaggatgggcagtggaaaagagatgaacattaagacaccccaacaaaacccgcaataaaaatcaatctgtgcaaagaaatctgagaactgtgcagttgtgccactttggtgtcagcctgtgctcagagacatttgtcaggtgagttctctggagagatatatgattaagtatgtcaagggataggatgggcttctcactaatgccaattgagcactttatccccaaggcaagtgatttggtttcaaagggcagccaaggagatgatgtctgaccaaacgcagacatgtgaacatcgtacagccgccctctgcagagggggcatgaagatgtcaggacttggctgggcacctaccaactacgaacttggtgtgtgggttcagagaaggtttttgccagccccagaagcaaaagtgaatcacagaacctttcttgcttattctgaataggccttttcagagacttt

SEQ ID NO: 326680 - DNA, 456 bp, Homo Sapiens
  misc_feature (16)..(16): n is a, c, g, or t
aacaaaccccgcaaanaaaaaccaaccgtgccaaaagaaaacctgaagaactgtgccaattgtgccccactttggtgtccagccctgtgcccccaagagacatttgtccaggtgaagttcctctggaagagatatatgattaagtatgtccaagggataggatgggcttcctcactaatgcccaattgaagcactttatcccccaaggcaagtgatttggtttcaaagggcagcccaaggagatgatgtctgaccaaacgcagacatgtgaacatcgtacagccgccctctgcagagggggcatgaagatgtcaggacttggctgggcacctaccaactacgaacttggtgtgtgggttcagagaaggtttttgccagccccagaagcaaaagtgaatcacagaacctttcttgcttattctgaataggccttttcagagactttctgtgccgaat

SEQ ID NO: 326681 - DNA, 453 bp, Homo Sapiens
tgttttggcagtcttttattactagggctaagtcaattctggaggcccttactactttttcaagttccagaattttctgactcaagttttctgcaagtgaaggtttcttctaggctccataggcccgtgaagggacttcagggatgccagccaacacagaggcaacttcagtcacctgtgtagagaaccgtgcttggtactgtcgccaagagatccttggtacattcaagagtgtagagtgctgactttggaaggcgatggtaccacttctgaggagaagctccgtaagaggtttgaggcaaattggaggagcctcctaagttaaatgtgtatccagacctattgcttaaaaacaaagttcctaggtgcagatgatacacacttgggagaaatcaaagtcttttaaaagcagtatgcaaacgagaacatctcttcacaagaaagaaacattta

SEQ ID NO: 326682 - DNA, 502 bp, Homo Sapiens
  misc_feature (145)..(145): n is a, c, g, or t
cagagactgtctatgtgagtgagatgaacacaaaccccagtacagtgaaacacttttatgaaggctgcctgagaggtaatctactgacttggagagtatgttcaagggatcatataggaaattcatgggctcttccccccacgcnaaccatctcccagagacctaaataaaaagcaaatttaatacgaataagtggacagatgagctgcccagtaggcaggcactgagagactgatcagtgggatactcaagcagagtgagacagagcggaaccttccaagtggtattagtgttgacctggattacatcccataatgagttctggatccagaattacctgagggaaggggtctgttagcagtgccataaagggtcagtggctctgatctcccaggcgtcagggtcccttgcagagatgactgagaaccaagtgcacaaagcacagatgaagctgctacaggctggaaccccaggggccactggaatgtccatttcctgcagc

SEQ ID NO: 326683 - DNA, 475 bp, Homo Sapiens
  misc_feature (320)..(391): n is a, c, g, or t
gtcagtcaagggaatttctatctaagcacttaccagcaatttgagctccttctcttttggtctaggtggctctaaaataacaactaaaggctacagctgatctgaaattcaccagtacttgaaatagactgcagccttcttccttcccaccttcttagaatctttgtcctattcatcttccttacggttccccggggttctctttacttctgggattctaacagtgagttgtgagaagcaacgcggaaaacggaatggagactccagcttgttttaaacgagctgtattaccccgcacagtgcaggagaaaagataattnnnnnnnnnnnnnnnnnnnnnnnnnnnnnnnnnnnnnnnnnnnnnnnnnnnnnnnnnnnnnnnnnnnnnnnnacggtctcggtcttgtcatcttttacatggaatgtcatgaaatatacagtacattgcaggaactgcctcagttcccgcacagca

SEQ ID NO: 326684 - DNA, 577 bp, Homo Sapiens
  misc_feature (395)..(429): n is a, c, g, or t
tctaggtgatgctgttggcctactgggcacaactctgtactgccacagccccagaagtagggatacaaatggcatgctgactgtcatacggggagtccagaggagtcacaatggacataaaagccctctgatgtcaaatgtgatctctcaactatgtctccattctctgccaacctaaaataaaattgggctgttacctacaatttgggcccctatccattggaagtaacttccagccttttcgactgtgtgcgtgacaggccctcccaagctataggctcggatccgaaggcaggtatgagggagacaattccatccccagtgaaggagaagaatgagaagcagcttagcttataaggttcctgggtttctgagagtcacttccctggctgtcnnnnnnnnnnnnnnnnnnnnnnnnnnnnnnnnnnnctcaagatcaagaaaaactgtggaaaccaactatcttttatagtctggcctctctacttgagatgggcctgtagattcagccagatggggtaaaaaccatgaggtgctcaaaagcccagggtctttccttctctgctatcacctcaca

SEQ ID NO: 326685 - DNA, 743 bp, Homo Sapiens
tgcaatgaatggcatattttaaatttttaggtaataaaataatttagaagcagttcatgcagtggtcaaagcaaggaatggcaagttccttcaagaagccctctatctttgacaccaaccggcatcagacacacactaggtaccatggggcacgctagaacaagtctccttcaagagttacttatataaacatcaatatacacacgttgatatccttccttccatagtacaagtacaggtcacaacttctctcaactgtgggagtagtcagtttatacttaaagtgatttaatgtccctcctggagttctacataatatatctctataagaaggtaactaacagaactttctagttttcacaaccttactctgatactttacagagtgccccccatgtcctatgacataaacatccagcaggtaagatttgccaggctgaagacctttaattgtttctgtggtcactgctttctgcaggttttgactgtggaaatatttacagaggaccttttctgacttcttccttatatctggtcctagacattggttttgctctcttttcttctggtcttcattgtagttatcatccacttcttttttgtagatgcaaaacttgttcctttcctgagtgcctagccaagccacggtggccgaggaacaggtacggagcttgtcaaaggctttgattcttgtgtcttcaggaagagagggaaatgactgcttagtaggccttgtggtagct

SEQ ID NO: 326686 - DNA, 594 bp, Homo Sapiens
cattgccccagctgtaggaggggctggactggcagtgtggctggatttgatttcttggatcttttcctgctcagagatctggcaagtctataaccttcccagtatagaaggattcattttgaaaggctaagggagaaatgacgcctatttcaaaaggggtgagtaatagtcaccagtaacaaagtgtagccagcggagggcgggggtgggtcttgccctgtctgccctctcagggcggggtagtggtacagagatgatgcctggcatttgctgactgactggctagcaggctgaatgatgcattaaagcagttctcaaccagaagtcctcaaaatcacccagggatgcctttaaactacagatgctcacaacccacctcagacctactgaatgagaatctgcaggggtgagagtctggaatctgcccttttaatgagcactccctgctgctcctgatccaaatccctattctgaagaatcacttatttctgtatttgtaagtcaatgaggtaaaactttccaaaacgcaatctagaaacccaagaagaagggagcaacaggaatatgcagggttattagtaagccttgcttatt

SEQ ID NO: 326687 - DNA, 448 bp, Homo Sapiens
ggtttcaaaaaatattttattttctggaatagccataatatctcagctctgtctttatgccctctctccacacggaggaggcagaagctatgacaacactgaggtgccacacatcacacctgcaaaacagaataatgggagcgtttaggagactgtagaaaatgctcaccagggtgcatacagacaggatgggggctgggcattgctgggctgctgctgtctgtcaaggacattcagagagatatacatgtccccggggcagggcccgcactccatcttcatctcttctctctcatgtgtcaaatgaagcagaggaaaaacagcagagagtccttcacggctgctggactaggcaatgcaactctcacaagtgatgagattgagaatgtgccttacacatcccgtaggtctggcggtcatgaatgcgagatttgcttctagaaatttc

SEQ ID NO: 326688 - DNA, 655 bp, Homo Sapiens
  misc_feature (459)..(535): n is a, c, g, or t
  misc_feature (560)..(609): n is a, c, g, or t
tcaacagaggagttggtgaaataaattattttgccttttggtcatgtctagaattcagatagtataatggtgtgttattttatgagtcctgatgatgtttaccaataaaaatcaatatccttttattgctaataagacatttggttattttccagatccccctaaggacaatggtggttcagaaatcctcaagtacttgctagagattactgatggaaattctgaaggtgaagtttttggcaattgttttattcaaatccaatagcaagctctgttttctaatatagtaaatgtctttatagtaatagcgagtaatcattaattctaaagataggaattattattacaataaacaaactttagtccacatattggccgtttttctatttcaaacacaggcaccagagatcagagtctacttgaaacttacatttgtgttatttaacaatttttctgtannnnnnnnnnnnnnnnnnnnnnnnnnnnnnnnnnnnnnnnnnnnnnnnnnnnnnnnnnnnnnnnnnnnnnnnnnnnngagatacgatctcactctgtcacannnnnnnnnnnnnnnnnnnnnnnnnnnnnnnnnnnnnnnnnnnnnnnnnntgggcttaagtgactcttctgccacagaagatgaggaagaatacat

SEQ ID NO: 326689 - DNA, 287 bp, Homo Sapiens
ggggctcaaacaatcctcccaccttgggcctcctaaagtccttgggatcacaaggcatgagccaccatgcccaaccttttctagtttttaaattttcatacatatctattagatgtttatagtgtaaggttgaactccattctttgcttctctgttgctggtaaatttttgggtatatttttactaattttgcacattcttttacatattggtaaaggaacagtctgtgatctggatttattcagatccttattcagaattaccaattgttttattaatcattttat

SEQ ID NO: 326690 - DNA, 879 bp, Homo Sapiens
caggatattgtgctagttcagaggtagtaaattagcattttgtaggccatgtttggtcacatacatgattgtttggacaacacagttttgataaatttttaattcattgcaagcatttaaaaatcaagaggttttcacatagaaagcagatttctagcttctcttgaaagccaggcagccatgggcccacattcctgatggcacagtgggctggagctgggagatctcctagaagtggggcctgtagcctccagttccccacaggcccccacctctctgtctccatactgggcctcataggaacctagggcgagtagtgggaagtcctcaaagggtgcaccactgggatgacttggtggagtttgtctctttctagttaccttcagggtcttagtatagaagcgctcctcacagaaggagagaagagaatgaactggtggtaaggacaagttacaggactctaagctatggtgtctcaaccctggtgacagggaccttgtaaaactaccagttcccactttccatccacacccctagaaactcttttaattggtattggcatcgtccagatgccccacatctcctcagatgattcctaatctgacttgacaacccctgatctagcccacctatattacttacaaagaaaagtgaaatgtgtcaaaagagtgatttttttaaatgcatatacatacgtacatacatatattgactcattactctggacattgatgattgaagatgtatgataattttgtctagtggcctaacatttaccttacttatctacagaaaaaaagagttagctaagcaaatgagtattatatgcaagattgctccaaatgctttatagaaagtagatttttttagtgatttaaa

SEQ ID NO: 326691 - DNA, 460 bp, Homo Sapiens
  misc_feature (14)..(14): n is a, c, g, or t
  misc_feature (54)..(54): n is a, c, g, or t
  misc_feature (63)..(63): n is a, c, g, or t
cctgcctcggcccncccaaaagaagctgggaactacaggtgtgaagcccacagncgtctggcncccttttccaaatttttccttgtattctcccaggatttagggtgactctagttcttagatctttcttaaaaatacaatctcaaaattcatcaaaaactggaaactcattgtttctttcatattcaatttgctttgtcagaaattccttacttcttttgtcaattaagttgctagagaatagattgaattcaggaataaaataattctcaagtttttctgtcctgaggcactgaagaaagtatgtcacgcagttatcaaagcagaggcccaggtctttgcggtcccactgactgtcttgagggttctgggtacatacgtgaaagaaggcagttttcacatgataagaagagaatttatccagatgttttttgtctttaaacctttctctgtgccgaat

SEQ ID NO: 326692 - DNA, 751 bp, Homo Sapiens
  misc_feature (566)..(596): n is a, c, g, or t
  misc_feature (702)..(702): n is a, c, g, or t
aatataatatatagtgtgtttgtatgtatactttttaaagacatatgtacaaatgtatgtgcacatacccatccatctgtgcctgtatgcatgtatgatatctgataggtattcacattttctttattccatttaaacctctgatcactactcttcttctagcccccttgcatcatacaaatctacccttttctactcttcaaagttgactttattcctccagttttacagagtatttagaagtcactagacaggagcaccctcacctttccataactgaacctgctagacctacttgtgtctgttactgttctctcctccttctctcctgttaccgtattcttgttaggataggaggggattgttatgtgtccctccaccggggttctctatcctttctctgcctgtattctcagaaatcttaattcctatcattatctgttcccagtcctagatttataaccattgtgcacttctgagtgccttttctcatcatttaaatatgctcaggtcactgttattttaaacatatttacatgtatatacatgcacacacacctgttccnnnnnnnnnnnnnnnnnnnnnnnnnnnnnnnagaaacttattttccagtggggaagtcaaataaaatgctaaaagcaagtagaatatatgatatgccagatgttgataaatcaattgagaaaaattaaataaggagnttggaggaggtgtgttgctattttattttatttatttaattaagcggcc

SEQ ID NO: 326693 - DNA, 589 bp, Homo Sapiens
aactggaagagtttataagcccaaaaggtaaagccccattaatcagaaaggcagaagctatatatcgagtcagacaatacttcctgataagagtaagatgaagtcaagtctctgccagattcaagtggccacacagctcacaagcagccacagtgaaggaaaccacatataaacacagtgccttttcaaatggattttagttgcctagagcttcccagggccatcagaaggcagcccgcctcttattttctccacagtcctcagttggatagatgctttccctgaagatcctaaggatataacccagccttcatcccagaagacacatcagaatagatgtaaagagtacccatactgatgaggtttcaaaactcaacaattgcagtggcatgctttactcttctaacttttgctaaattttctatgggaaaattacaaaaaaggggactgatagctaacctcgactatgggcatgcactatatcacacatgcatgacattcaacccactcaactctaagaggtaggtcttattactatcatctctgttttataaatgaggaaacagaagcttatattaattaagcggcc

SEQ ID NO: 326694 - DNA, 709 bp, Homo Sapiens
  misc_feature (14)..(14): n is a, c, g, or t
  misc_feature (26)..(26): n is a, c, g, or t
  misc_feature (63)..(63): n is a, c, g, or t
  misc_feature (497)..(527): n is a, c, g, or t
attggtgatttttnactgtaaataangatactcctcaaataaaaaatatcctttgggagaaangggtatcccaaatagtgaatagaaaataattccactatttccttgtttaaatttccccaacaaataccccatttattgagcacgcgcttagatcctttattgtgtggtgagaatatattaaaacatcactgtgacaaagttcttattctcaaggaactcacagtttagggttaagctagacatgaaaagggatcattacaatggacgataattgaagtaagaatagagtgccaagggtcaaacacaactgtataaagaggttgcaatcttttttgtctcccctgtgctcctagttgagatgcttagaaggaaatgaagctgaaaatctcacttccttaaactcatgaatgaatacatcaccagaactctgtgtacttaattccatgtgtagctcattacaagagacatgggcaaaaatagaatgaaatgatttnnnnnnnnnnnnnnnnnnnnnnnnnnnnnnntttcaagataacaatagtgtgctatttagtgtgcctccttcaaacacaatcaatgacactgcattccattatataaatcacccatccaggggaaaagtggaaggggataataaggcagagttagctactttaaaaaatgaatattagaaattgtccattactcagataatcttacattttcg

SEQ ID NO: 326695 - DNA, 535 bp, Homo Sapiens
ggccgcttaattaaaataaaatttaaaagataggaaaatcagcttgtatctgtatgctccacagccaaacttgagattaaaaagctctttcagataatctccaaaattctaaagcctcacaaaggcaattaatgaaattggccagtctttctgcaaaacgaccttcatgtattggggctgggagggctgtgacctgaattcctaaggttagtcttgaccttcaatgctttgaggagttcattcttcctctctcatctctaactgctgtgtttggagtttctaattggcctgcttcctttaaaagtaggtttttaccttgaagatgtggactttgttttatggcctcccttcatcctgaacctacttaaaagtggagaagaaaccaatcccttttggccaaagctgctctatgattcactagaacaacagactcccacagggcatctccctcatcagggtttttctttcgtctccttttgtgtcatctgcctcttggcagtgaaaaaggcagtggcttgccgggtgcaatggctca

SEQ ID NO: 326696 - DNA, 409 bp, Homo Sapiens
  misc_feature (255)..(256): n is a, c, g, or t
  misc_feature (272)..(272): n is a, c, g, or t
  misc_feature (285)..(285): n is a, c, g, or t
  misc_feature (289)..(289): n is a, c, g, or t
ataatttttaatagttatacattatgatatgttccacagtccacatgaccaaatccctactggtagatattttacttatttctttttttaaaatactataataaaaaagtgctgtgctaaccttatctacttgtgtcatttttcttcttagctttaattcctagatgtgagtttgctagatcaagggcatgcttattctttgcttattcttctcccgtctcctcccgtttttctccttcctgcctgcctgcctgnncccctttctttttctnttccccttctccncacntttttcctttctccttttaccactctgggagtgcggtggcatgatcacagctcactgtaggccttgatcttctggggctcaagtcatcctcctattttcagcctccagagtaggtgggga

SEQ ID NO: 326697 - DNA, 651 bp, Homo Sapiens
  misc_feature (386)..(427): n is a, c, g, or t
  misc_feature (481)..(481): n is a, c, g, or t
  misc_feature (493)..(493): n is a, c, g, or t
gcgatgtttacccaatcctgtttctccaatgcaacgtccacccactttaccaccaaaaactccagggcctgacggcagcccggtcccccagcactcaccagcagcccagtgttctccaccaagccacagtgtgcatgcctggtatcctccggattcccttccttctgcccgctgagtcactgggcagagaatgatgacatgtgtaggtggtgtggttgggggtggaaaggggaaggggttgatcctcaggactctgagggagcatcgttgaattttcctgttcagtgtgaccaagacccacctgggaaatggaatttggaactggcttcaggagacatcattcctgaacacattgtagggtgaattggtgcatcttccccaccatnnnnnnnnnnnnnnnnnnnnnnnnnnnnnnnnnnnnnnnnnncccaaaccttttcatggggaatgtgtggcaaccttgccaaacagcaccactcanagtgtgactctnactgtgaccttggccttaatgaggaacttcttaggagagtttgaggacaaggccaacatcgtcatctgggctcgctgcgtcccagcacatcaaactctgtccagagacaaggccaactgcaaatgaaagccagggaacattgctaagggtctgtggct

SEQ ID NO: 326698 - DNA, 674 bp, Homo Sapiens
actggcaggtagcctggttttcagaaacaacgatgaatgatgcaaatatctagaattcagtgagtatttatcatagaagcaacagcaagaccactactattgctatatctaagtaatatcccagttaattgtcctagagtggcagatggtctgctagaacaagtattcaatcacaagtgaggagatgcagctcgtttaccagccctttctacctcacagctatggtgagaaaggaatgaagaccatctggactgcaaatgcttggttaaatgtttatcatgcattttgtaaactgttaaagtctacaatgttaattgagtctctagggaaaggagggggaaactaactgaatgacctagaactaaggctaacatttttcacttataataaagagccttatttcactaatttgtaaaaagcacttgtatattatattaactacctccaagtatgggttaagggttaaaaagtagctaaaaagggcactcggggtaaaggggaagaaagtttttttctgcatgtatcatataatgtaggatattagcttgggaaacagggcaagactctgtctctacaaaaattcaaaaaattaaccgggtatggtggcatgtgcctgtggtcccatctacttaggatggctgaggcagaatgactgactgagcctgggaggttgc

SEQ ID NO: 326699 - DNA, 491 bp, Homo Sapiens
aacctcccaggctcagtcagtcattctgcctcagccatcctaagtagatgggaccacaggcacatgccaccatacccggttaattttttgaatttttgtagagacagagtcttgccctgtttcccaagctaatatcctacattatatgatacatgcagaaaaaaactttcttcccctttaccccgagtgccctttttagctactttttatcctttacccatacttggagtagtttatattatatacaagtgctttttacaaattagtgaaataaggctctttattataagtgaaaaatgttaggccttagttctagggtcattcagttagtttcccctcctttcctaggaggactcaatttaacattgtaggacttttaacagttttacaaaatggcatgattaaacattttaacccaggcctttggcggttccggatgggtctttcatttcctttctcaccttggctgtgtgggtgggaaggggttgggt

SEQ ID NO: 326700 - DNA, 474 bp, Homo Sapiens
  misc_feature (29)..(29): n is a, c, g, or t
  misc_feature (36)..(36): n is a, c, g, or t
gctcccccggaatgtttttaatactaaanttgagancctactggtttaaggtacaaaatatgaccttctgtggtttcactgtgggtcctaaaagtatatattaaaattatttgggaagtctagtcaaatgccataatggtctgtaaggtaatctatgattgctgatgtgcttgacagagcattaaatacccttttttcctgccttgaagttatcttttccatcatgtacattaaatgttgatggaaacacatgtaaggagtcccgagttcaagagcaatgtcaacccagtcccagatgcatttcagtggggtttcctcatatccagcaaacatggccgggtttgctaagagtcctcttgcaaccatcacaccatctgtcccagtaatccgccacacattttctgcttcctttaagcttctgatgtctccattagcaattacaggtatagacatattttccttaattattttaat

SEQ ID NO: 326701 - DNA, 877 bp, Homo Sapiens
  misc_feature (256)..(368): n is a, c, g, or t
  misc_feature (517)..(528): n is a, c, g, or t
  misc_feature (666)..(771): n is a, c, g, or t
tggtaataagaacatcaacagttcaaaaggttacacatgaaaataagtctctctgacatctgactacataatctacctaccccaacagcattgttatcagtctcttccacagctttctagagtcactctaagcacacacaacaagcatatataaatacacacatactcatacacactgtattgcatgtgtcctcctttccagtcttctaccccttaagttaaaatagcagccaaccggccaggggcagtggctcannnnnnnnnnnnnnnnnnnnnnnnnnnnnnnnnnnnnnnnnnnnnnnnnnnnnnnnnnnnnnnnnnnnnnnnnnnnnnnnnnnnnnnnnnnnnnnnnnnnnnnnnnnnnnnnnaattagccaagcatggtggcatgagcctgtcccagctactcaggagcctgaggcaggggcatcacttggacccaggaagcggaggtcactgtgagccaagatcaacgccattgcactccagtctgggtcacagaatgagactgtttccnnnnnnnnnnnnccagtattttctgaccctttgtcttttcatttaaaagtatctttgagaaggtcccttattaacaaaaaaatcaaacaccaaatctaaataaatatataaaagaagcattggctgggcacagcagctcacaccaataannnnnnnnnnnnnnnnnnnnnnnnnnnnnnnnnnnnnnnnnnnnnnnnnnnnnnnnnnnnnnnnnnnnnnnnnnnnnnnnnnnnnnnnnnnnnnnnnnnnnnnnnnttggctgggcatggtgctgctcatctgtagtcctacctactcaggaggctgaggtaggaggactgcttaagcccaggagttggagggtaaagtgagccatgttcac

SEQ ID NO: 326702 - DNA, 855 bp, Homo Sapiens
aagagaatctgatgtctctctccaattctattttatttcatctcaaatgtctctctcctttatgcatatagtatactttgacgggtcccactaaattctctccttcactggaattcacatgttaacagaaggtgagtggttctttgcccctgggactcacaaactgtatcatccatctctccttttcaccatatttgcagtggtctgtgataaaacttagcccttgtttagagaagaaagaggcctcagaaagtgcagatctgacatagtgtctggacaccttgagctgcacatgaccagctctagcttcacaggctggccgttcatggattagacctacaaagctgaggggaggagatattctggaccttgatagtacctaggtccacattttggtaatttgcctcggtatagttgccaccttagaaaaccaagactcgttgcctttggacaaatttctatttgttttctgtaatcatttgttttaactttgaactattctgatgaaatcttacataaggttcaaacggtggtattgtatacaaaccataatcatgttaaatgatacaaacaaataatcacttgtttaaactgccttccctttatgggactaatatttaacatgttcctttttcttaactagcttgtgtcagtcacacatgctttttttcaatgtggttcaagtacagtgaaaatggaagctttactcccatcaaaatcaaatcagattcacagcctgtgaaatccactcttggtgttttgcattcagaagcatcactataaatgttccagagtctaagacctccaccatctgctccattaggcactggatttcagtagcactacttgatttag

SEQ ID NO: 326703 - DNA, 608 bp, Homo Sapiens
  misc_feature (95)..(105): n is a, c, g, or t
  misc_feature (219)..(219): n is a, c, g, or t
  misc_feature (553)..(553): n is a, c, g, or t
atgagccactgcacccggcgcatgttttttcttcattcctattgtattcacatgtgaaagcatgtgatcaacttgctgcatcaaagatatgagannnnnnnnnnnattaggtgggcattatttatgaccttttctgtggaagagtaagaacattaaaatgaaagatgcatggatgaaaatctaagtagagaggctcttgtggttaactgataatattgnagtgatgcctgagggtaggtgtttcagagtaatattctgccttatagtgaaaattttttaatattaaaattcaattatatcattttatgaattgtgcttttcataatgcagtacatttcaaaatttttagattatgtatgaacttagatttttaaacatgttttaacatgttaagacttgtgcattcagtgaagcgttattatgccacaaactaacctacctcaccttactcaatggtgtaggtaaaagatgatagcaatatattatttggttacatagtggactaacatttttagtaatctcttttgccagtggctttaaactgcagataagntaaatattcccataggttttacatttatattttttcttatttaaatttattggtc

SEQ ID NO: 326704 - DNA, 685 bp, Homo Sapiens
ataatgcctggcaccctgatgggaactgctggtcgttgtgctcagctaggcccctcccccttgtcatgtggtctcatggcctctgcacgtggtttatctagcatggtagtttgacttatccagagcttaggccttagaagagatgtcccaagagtctcacatggaagctacaaggcttcttacttacttagcctggccagtcagacatctcttctgctgtattctattagtcaagtaagtctctaagggtagcccatattaaagggaggagaattagattccacctctcaatgggagaagtagcaagtaatttgtggtcatctttaatctactacagacactgtatccttgatctcagaatgatgcctctttgtctggaaagggcatttgttttttaagcccaaggttagagagacagacatggagctgtgatggatcaagaagacatcatgttctgactaaccaggtgatcacagggatcactgaagtgacagatgttgcagacatattgtcctcctatctaagtcccagccaatgttacgtgtcaaaattagggaagcagtacgcaaaatggttaggcaggccattctgaaacaaaactgattggtttcaaatctcagctttgccatcaatcagctttgtgaatgtgggcagtataatttacctccctgtgctccacattagt

SEQ ID NO: 326705 - DNA, 774 bp, Homo Sapiens
  misc_feature (331)..(361): n is a, c, g, or t
taaattcaggaattccccttacaaattgggcacagaaattacttgtccaagtttaaatttgcctgtttgcttctgatgtggcattagataatcctggtctaagagtgtgctttataaaagaccaggtcacatttctagagaaaaatcactttgtatttaatactcttacaaagagtcaggtaattttccagttatagctacaaagtttcataattaaacattcagagtgctaatcagggaatcacccaaagatttttcctttgaatccccagataattttcaacaaatttattcctgacttttcaactcataaggaacaaaactgtgatannnnnnnnnnnnnnnnnnnnnnnnnnnnnnnatgagtgtgagtctcggtattttttattttgatatttattaaatagtttgtattttataataaggagctctttgaacttatccagatagtaactcctttataactgaaatcagctttaactattaaaattatatacgaggaaattaggggtgttgcagtacttggttgcaaataacttgccatctggtgttgggtcagaaaatgctatttcatcagtgctgagaaaacagccaaacatgaagcaattcctgagggtatcaaccagtcgtcttgcaatgcgctttcttctcttcagtctgaaaacccagattctacttatcccacagactgcaggttctggtacatctgaacattgccaagccctaggacattccgtagagcttggggattctggaccaattggttcagacagg

SEQ ID NO: 326706 - DNA, 641 bp, Homo Sapiens
  misc_feature (249)..(291): n is a, c, g, or t
  misc_feature (432)..(486): n is a, c, g, or t
aaagaaaacaaataaaaaggtaggtattatttttacattcttactcctggttccttctttttaaaatgaaatttactcttttaagagcctctgcaattatccactacaattactcttaatttaaaatcaacttatctccaagggttaggctgtttgcaagctaccagtccaatatatccagacagaacatagcacacacaaattaacactgacgtcaaaaaattcaggctgggagcagcagctcacacnnnnnnnnnnnnnnnnnnnnnnnnnnnnnnnnnnnnnnnnnnntgagcccaggagtgtgagaccgatctgactaacatagtcagactccatctctacaaaaaacagtaaaactagccaggcatagtgatgcacacctctggtcccagctactggggaggataaggtgggaggatcccctgagcnnnnnnnnnnnnnnnnnnnnnnnnnnnnnnnnnnnnnnnnnnnnnnnnnnnnnnntgacagagtttgctctgtctccaaaaaaataaaataaatttaaaggggaaatgcttctcaaattatttcatgccaaacattttaaaagcctattacttagacaattatatctattatcaatattagtatggacagccaaattaattataaactgt

SEQ ID NO: 326707 - DNA, 462 bp, Homo Sapiens
  misc_feature (429)..(429): n is a, c, g, or t
  misc_feature (443)..(443): n is a, c, g, or t
tgcagtttataattaatttggctgtccatactaatattgataatagatataattgtctaagtaataggcttttaaaatgtttggcatgaaataatttgagaagcatttcccctttaaatttattttatttttttggagacagagcaaactctgtcacccaggctagagtgcagtagccaattactgctcactgtagctggctcctccgaggctcaggggatcctcccaccttatcctccccagtagctgggaccagaggtgtgcatcactatgcctgggctagttttactgttttttgtaggagatgggagtctgactatgttagtcagatcggtctcacactcctggggcttcaagcagttcttctgcctcagccttcccaaagtatttgggggttacaggtttgagctgctgtttcccagccttganttttttgacgtcangtttaatttgtgtgtggcc

SEQ ID NO: 326708 - DNA, 755 bp, Homo Sapiens
ggaagaaagtgttctagctggaatgatgacagtcacacggcttcccaaaagttctgaggagaagcacaacatggagaagtacaggtcaattttgccaatttgaaacgctctgcagccctttgcctgccatgggcctgggtcagagctctcaaatggccccatctctcttatctcagacaacaaatgctctgtgctgctttcctgagtctccatttttctacctggggattaaagagttccaagggcccctttcagctccaaaaaactgggttgcaaatagaacccgagctctagttcatttactaaactgcactgcacatccagaccacttatcctgagcttaaagttttcaacagtccgcgtagggaatccattgactagaaatacttaacagaatgtcagttgaatagagaccttatgttcaatataagtagtctctgatctgcacttttatcattgctactaaatgctcctgaccctagtaaataataaatgaaaaagttttcttactcagttgaaaactaagaaacacttgatttgacgactaaaaagattggattctttgaaaatgtttctaaaggaaaagggacatcatttgtcagccaataatgagaaaaggttaccaatagtatttaaattgagatttacctgtgttaaattaggtttagcctaaagctggtttcttacatattttaaggtcagcctaaaggtttctccatacatagtgaactgtaatctaactggatgcgtacaca

SEQ ID NO: 326709 - DNA, 475 bp, Homo Sapiens
  misc_feature (292)..(326): n is a, c, g, or t
  misc_feature (330)..(346): n is a, c, g, or t
ctctaggttgaaagccgctccaaataaaataaagagacaagtgactgattacaagatgtttgccaggatatataatagtcaaaaggttaatatacttaatatataacattcctggagtcataacattttaagacaaagaaccttaaaatacaggcagataatagaagctaaatgacaagtatctacatgcatgaaaacgaatcaacctctgaattagttagggtaaagctcacctgctctaacaaagaggcctgatgatacagaggctagaagaataaacagatttgtttcnnnnnnnnnnnnnnnnnnnnnnnnnnnnnnnnnnngaannnnnnnnnnnnnnnnntatatatatgataagtatgtgtatatttatctaatatatattatagatctatattagacattacataggctatatatatacacagacacacatgcacacacatttattttaaggaattttgaagaattt

SEQ ID NO: 326710 - DNA, 817 bp, Homo Sapiens
  misc_feature (62)..(70): n is a, c, g, or t
cattctttctgttcataaaacagactcatgacttttaagacaggacaagcaggccagaggcnnnnnnnnnaatcacagatctcatgggaattagtggatgctaaatggcaattaaagcatgattcctatgcttttgagcctgttttatgacaaggtgttactttgtagacctggcccatacatttcttttttgtcaacactgtaaaagaacagtttctgagatcgaaatgggaaggaaaggaagtgagtaatgacaaccaaaactgaattatttaaaaaatattcctttatagttaaatctctccagttggtgttggcttcacattgaaagagcagccatgtgccaccctggccggggtgtgtgcactgcatgcaggttctcccttgcatgcaagatgggtgctggcccactgtgaggcttctgctcggggaagttctgtggagtcactaccagggccaagaggcaggtgggctggctctgggacgagggccaggtgtgagcaaactgccagggtccgctgtgccactgctccccggccacatgcccgcccagctgtcgccttaaccagactgaacagacaggatccttcagggcccttggccccactctcagtgcattctgtcatcagggattaccacctgtaccattttcataaaacaaaaccaaaatcactaccatcaaatggccttgtccctctaaaaagtctgcttaaaattctgtttttaaaacccagtttcctagttttccaggcaaatagttacctccgggaaagttgctgggggggcctgaagcacaatgtagcgcagatgcttcctt

SEQ ID NO: 326711 - DNA, 715 bp, Homo Sapiens
actcacttttctcatttccaatgggcttcaatggtttcgtaatcctcgtggttcatctgaataatatgtttgaaatgtttcaagtatcttatggacttatatttttggattgtgtctcctgaagacaacggtgagcacagccttataaaattctgggtgtgttcatgcttttgtccaaggataagggagaacgtgtagggtgtgggacccatcccgcactgatgctcaaaactgtggtaggatatcgctggtagtggcaggttaagacaagggcttttgttacagcgattgtgacaaccagatacacttcctggttagaaaggacacctcataaatacagccgagatcactttctcaaggcagacggcctcggcaaataccaagatggaaatgaaccagagaaagtaactgcaaagatacagagatcagaagggcttggaagggatctgtgcagccataaacaagtgcgcttcatctgaaaagatggaagctcagaagagcttgaagtcgaaatgagaattagcagaagggctgggtgcactgaaaatgaacttgactcagagtcagtattgctagatggaggaggcattcctgaaagcccaaatagaaaagttggtgaatttagaagaaaaaaaccaggaaattttgtttgacatgctagtcagggaatttgggtcccttattcctttagaagcgacagtttggaaatactaaa

SEQ ID NO: 326712 - DNA, 743 bp, Homo Sapiens
  misc_feature (73)..(180): n is a, c, g, or t
gttcaagcaatcctcccacctcagccaccagagtagctggcagtacaggtgtgtgccaccatgcctggctaannnnnnnnnnnnnnnnnnnnnnnnnnnnnnnnnnnnnnnnnnnnnnnnnnnnnnnnnnnnnnnnnnnnnnnnnnnnnnnnnnnnnnnnnnnnnnnnnnnnnnnnnnnngataggccactgtgaatgtggatgatagccactgtggctggcttcttcctactttttaagtttttgcagactattggaaaacaagttataaatataggttaaatgtcatgctatcattgtaatcaatgtatactaatacttttctttcctgttattgcctggattaaaaaggaaacacttctgtgaataatctcttagggttcttattgccccagcagcaggtaaatccaagatccaaagaccttcagtctttcatacaaagaactaatgagaagaatttattcagacttcagggataagccacagtgttaagtactgtgtagcactcaaagaaatacaaaacaaagtcttgattgtggcagagatgtctggttgttcccccaatattaatttctccctcctgctatataatagatttttagctgggcatacaactgcccagaagaaacacatttccaacccaaatttatagctaggatatgaccaggtgactaaattctgaacaatgggaagtgactggaaataacagacacaacttccagatcaggcattttccccctgct

SEQ ID NO: 326713 - DNA, 573 bp, Homo Sapiens
  misc_feature (307)..(307): n is a, c, g, or t
  misc_feature (366)..(366): n is a, c, g, or t
catcatcttcttttgaaaacagaacagaagggaatgtcttatctgatgtcgacagcagacaattcaatggagacagacttccctccccaatctcagtaaagaggtggttattttacggaaagaaaaaggacaccagaaacagaagaaagacacatctccatttacttgaaaagaaaaaagctgaaaagaacctttgcaataaaaaagtgttataattttaggcatgcaaacctgtgcgttcacacctttccctacggcagccctttctcccaggttccaggagtagagcccagggcgcatgtctgangtttgtctctggatactagtgtcaaacacctgggccacccgtgagcacagctcacggangggaggcagagcaacaggacaaacgggtatctggaagatatcattccaacagcctagaatcacactgggtccttaaaggagaaagccttccagttttcctccggctcagctttttcccaaactttcatgcaccaccctttgtgggttctgccacattcaaagaccaccctaaactatcacctacttcaactctcttcaactttaaat

SEQ ID NO: 326714 - DNA, 542 bp, Homo Sapiens
  misc_feature (500)..(500): n is a, c, g, or t
cagatgttaactatggatctcaagatgagatcaccctggatttagactgggctctaaatcctatgattggtgcccttataagagaaaggagaaggagatttgagacaaagacacacagagaagaaggctatgtgaagacaggcagagattggagtgatgtggccacaagccaaggaaaatggagaattgttggcctccccctagaggcccgaagagggtatggcatggcttcctccctcaggacccatcctgctattataacacccttgatttttaatttctggcctccagaactgagagataataaatatgttgttttaagttactagatttctggtaatttgttatggtagctctaggggattaatataggctataacagttatcactgcactctgggaagcacgaagtattggcatcgtcatcaggtatttacagatttttcattgtttctctcagtccagacacagtttaccaattgggtcagtttttattataanccagcgttgcctaataactggtgacaaaccacttatctgttt

SEQ ID NO: 326715 - DNA, 878 bp, Homo Sapiens
tttttttgatgctgaaagaagactttaatgtgcacaaagaaacctcacattagtgacagggagacagaggaaggagggtggggaggactgaggcccagggaaaccagagctatggagacagaggccttagggaagaggagatggctgggaggaggggctgaggggtgggcgaggcagagaggcccatcccttgctgagaggagagggggtcggggcggtggcagaggcaggctcttgcagagaggagaggggtcggggcggtggcaggggcaggctcttgcctcatcaggctggtcagcatgtggcctcctctggccttgatgcttcgcttcctccagttccctgagcctgttcacttcctgctgaagccaggagccctgggctgccctgaccctgtccctttagatgtctttccaggggctgaaatactgggcctggggctggcaagtgggtcagcagctcctgccaacgggatgtaggtctgggtagccaggtccttgagcaatggtgcggtgcatggcctgggggctctcccggatctgcgtgctgatgtggcggtccaactgcatgcacagcagctgcagctcgccccactggtctggagtgatgtcctggcagctaacaactaccccggccagcatcagcaagctgtggcacaggtagcaggccttgtggtctagctcggcactacctttggctgttgctcctggcagggtggcaagggcacagagtccaggtattgcctgagagatgagtgcctcatgaggcccaggagccggctgagcgaggacagcatgagcaagaccaccatcatcttcattccgcctggcctgtgtcttcagcccctgccttccactccccttcccgctcttttcgcc

SEQ ID NO: 326716 - DNA, 411 bp, Homo Sapiens
  misc_feature (41)..(41): n is a, c, g, or t
gggtttttaaatccattaaaaggggtttaacacccattttnttttttaacatccccattttggcatttgtatgccagttaaaaattatgaaatggcacattgtgggattttgtttagcctaaattcctagaaaaattgaaagataccttttattcgacttaagcctgaggttattcagcacggtgatctctgcatttttgaaaggttgtctcgtcgtttaataaacgtaaataacttaagcacattggaagagctattaaatgagagcaggagattaaaaagacatgatttcttactttatccacctgacaggatagcttgcattggtgattaaccttgcattgttaaattcatttcctaaatatttaggtaagtagttggtttgatcattatttgtaaagtattagtagt

SEQ ID NO: 326717 - DNA, 616 bp, Homo Sapiens
tagcatagggacttgtttacattttattatcattattagtaataaaccaataaaaactgaataacaaaggaaaaagctcaagataaataatttcttccttgtgaattcaaacacatgcacacacacacatcctcctctgtgtgtgttacttcctcctcacattctgtcctacggtacaaatagttacacaaaagtctacaaaacgcgagtagcagaccccagctgtgttaagctcaggctgattctcagtctagatcaccagcttctccacggctaagtgtacttgtggtttcatcctcttcatttgacccaaaatatcctgggaggtccagcatcctctgctcagcctcagtgaggccaaacgacgtattgtcatagaaggcaaactcagggtgagtggggaagctttgacacttgtcttttctacactgagaagggctcagagaactgaccctctggtagttatctttgggggatgtgggagaagactacttccttgagatactcttgtgactgggggacggtccccgaggagctctgtggggctctgttctctcaattcctgccactaatcctgcctggcgatccccaaggtacggtttcctcaaaggctgcc

SEQ ID NO: 326718 - DNA, 665 bp, Homo Sapiens
  misc_feature (267)..(275): n is a, c, g, or t
cttcatccttttcatttatttcatgagctcactctagaattctagcagaattagaaagttacagacaccagggacctcttttagcctagcagatttagataagtgtgaggcatgtttgttgagtgagaaaatgagtgagtgacagaatgacaaagtggactcgctttccagttttccagcttaacatgaaagttctgagaaaatgtcacctctacacatcggagacagaaaattatgacacttgctccgagtttgcactgaaacttnnnnnnnnnccttcctgtttctacatttcaggggtgaagttttaactatggaaaagaaggtcccgaggaatgtgtatcttgggggtacatctactaaagatttggacatgggaaagtggtgggtttcaggcctcttagcccaagcctgcatgggtacatccagatggcctgaggcaaccaaaaactacaaataggtgaaacagccagctcctgtcttaactgattgaccaaccttacaacgttccattatgacttgttactgccctgccccaactgatcgattgatcgacctcgtgacattcttcttctggacaatgagtcttatgatctccctaccatgcaccttgtgaccccctcctctgctgacaatagataacttcctttaactgcaactttcca

SEQ ID NO: 326719 - DNA, 606 bp, Homo Sapiens
  misc_feature (28)..(28): n is a, c, g, or t
  misc_feature (36)..(36): n is a, c, g, or t
  misc_feature (41)..(41): n is a, c, g, or t
  misc_feature (52)..(52): n is a, c, g, or t
  misc_feature (67)..(67): n is a, c, g, or t
  misc_feature (99)..(99): n is a, c, g, or t
  misc_feature (128)..(128): n is a, c, g, or t
  misc_feature (135)..(135): n is a, c, g, or t
  misc_feature (172)..(172): n is a, c, g, or t
ttctgtacctccactcctggttcaaggnttctcctnctcanctctcaagtantggattacagacttncacacacccgctaattttgtgttttagtaganttgagtttcccatgttgccagctgtctcnactcctncttcagtgatctgctcctcgcctcccaaaggctgtgntggtataagcgtgaggcactgcgctcagccaggtttttctttcataacaacaaattctctactttttagggaaaacttcttgggaaatagtctctagagctgagaactcagaaagtttctaaaagaagatgtgatctgaacaagaggaatggtagaatttggaaaagactgagaaagggcattctaggtgggaatggatccatgaagaaagctcaacgactggaatgagaagggcaagtgaagaattgagaaagaatgatgaagtacaacacatttccctgcctttctcagacaaaaaaatgtatcagcaactagcaaaaactacaaagaaaggtttcaaaccccaaatattaacgctgaaagtcaaaacaaagtattgtcttgctcttttaaggctgcaaatgcctctctgaaagccttctgtgatcactgta

SEQ ID NO: 326720 - DNA, 864 bp, Homo Sapiens
  misc_feature (378)..(378): n is a, c, g, or t
  misc_feature (460)..(460): n is a, c, g, or t
  misc_feature (483)..(495): n is a, c, g, or t
  misc_feature (811)..(811): n is a, c, g, or t
tttctctgaggctttgtgtcccttgtccaaagctgcattgaagctgtcttaggagcacttaaaagataccttggcattgttataggtctttttcttggcttcaagaggaggttgaggagtctgctggggggcatgtgctctagcatattaacctcaaaccagcaagaattagcagagctccaaggaggaccagagacccactggcttctgctctcaggaacaggaagtggctctgatgttgcctggacctcccagaatttaaaccaaaccctcttgcttccttaacaaattctggctgacgaaggtccaggtactcttaaaaactggccctgggaaaattttgaatgaaatttcaagggaatttgtcccctctgggtntccacttgaggttgtgccgatgctgctaccacactgtcgagcccaggtaagtcctactgcaggattttgtgctgtggccacntcatgagtgtccctgaaataacnnnnnnnnnnnnnaaatccagttttgggatcacgcaactttcctatttttctcccagtagtcagctcccttagttaacttgtcactttaatttgatatttttattttctctccttttaagtcttagagaccagcagagaatctgtgagagaaagtatttcaggaagttagaaattcaaccgaatctgaggtagtcctaaaaagtgccattttgtttcacttatgggctaaagtaccagcttagtcaggtaagagccctgacccacttcagatggtaacaccacttctcactgccttcagatggaatcacagatttcagttcacgggcgnataacaaattaatccagtgaagtgggcttagggcattttgcaggttaaattag

SEQ ID NO: 326721 - DNA, 689 bp, Homo Sapiens
  misc_feature (63)..(163): n is a, c, g, or t
  misc_feature (186)..(194): n is a, c, g, or t
ctactaaaaatacaaaaaaattagccgggcgtgttggcaggtgcctgtagtcccatctactgnnnnnnnnnnnnnnnnnnnnnnnnnnnnnnnnnnnnnnnnnnnnnnnnnnnnnnnnnnnnnnnnnnnnnnnnnnnnnnnnnnnnnnnnnnnnnnnnnnnnnagacagagccagactccatctcnnnnnnnnngaagatatcgaaatcttattttccaaatatttctcttcagtagtcttaaccactcttcccatgatcatttcatgcctttctagtaaattaatttttctccctagagaaagtaaaaactgatatagcatatatttcactctaaactgtttaaaagactagggttctgctctataaaataaaaggaaacaaacgtaagggggaaaagtacggtatgtaaaaaaacacatgtgaaagaagataggcagaaaatgaatcaaaatattaggagtggttatcagtaggtagcataattataagtgacttatttttcataactttctgcattttccaagctcttcttactgagcccattccatattacaaatattttaaaaaagaacagtgaccaccttacaaaccagaaattccaggcaacaccttattcctttaagtaatccaaactattttctatctcctaaatgcagtcttttcccctgactagatactgtgtgcgtt

SEQ ID NO: 326722 - DNA, 814 bp, Homo Sapiens
  misc_feature (19)..(19): n is a, c, g, or t
  misc_feature (642)..(671): n is a, c, g, or t
ggccgcttaattaagaaanccatcattttgcttatctcagatccccagataagtgtgcaattatggagaagtttatctgtaagaacagataaagggaaattgtctacacatgtgcatgtagaaagaaattatggagatggattcagccctcaaagcaaaagctctatttaatttgaatttttacttaaatcaaaagcagaaaatttaaattgtcactaatcttaactggtcaaggcatgatgcatcagtctcataacctgggcaaaaacctgcccttaaatgatcaggtcagaaacagtaagagtctctatcctgggtcctcggtaatacagagagctcccaaataaaattatatgtattacagagcaattcagccaaatatacagtctctgattttcacatggcctacacaaactttaatgttcattaaacataaggtgcaaatattaaacacaaattttgagttgcaaaccccaattcacattcaaacttttagaacaagcaaaagctgtctaaacaacatatgctatcccagccactgtttgtcactagtctagtgacaaatcatggagatggattcagacctcaaagcaaaagctctatttaatttgagctctatttaattgccactagacttagtcnnnnnnnnnnnnnnnnnnnnnnnnnnnnnngcgtatgccatcaacccaatccatccacccattttagagcaacaatgtgatgtgacaggatttggcatattgtccaaacgctacttgtcctggactggtttgtctcccagaacagatgactgactgcctggtcctaattaagt

SEQ ID NO: 326723 - DNA, 540 bp, Homo Sapiens
  misc_feature (41)..(116): n is a, c, g, or t
tatcattatttagcttataatagagtaacattggtagaacnnnnnnnnnnnnnnnnnnnnnnnnnnnnnnnnnnnnnnnnnnnnnnnnnnnnnnnnnnnnnnnnnnnnnnnnnnnnattatcattgttactatactgagattttggaattttaccttaaaaacaatgtatcacatatgtaaatataaaggtatcttttctatataaaggtatcttttgggtcacatattcctaatgtttattttctcatgattgatagggtaagccaaagtcaaaagtacctgtggggaaggagaaagctagccagtgagcagggagtgaagtaggacccatggggaaatgtgagactttccaaaggctgtggagggaaaggtggctctcagtgccagtcactgtgaacagcagtagaggcatgccagtgttcactggggtctctgcttcagctgctgccatcctgccaggtgatccaacataggatcataagcaacatgggtcatcttttgtttgtttgtttgagacagaggcagaccctatctcaaaa

SEQ ID NO: 326724 - DNA, 801 bp, Homo Sapiens
  misc_feature (790)..(790): n is a, c, g, or t
tttaatctacaaatgcttttaatagatgagatgttaattttaacaataatgcaatcatgtaaattctctccagttgagaaaggtattattcttcaattcagcttgttaaacctccttcaggattctaaaaccttttagactcttaaattgcagccttccatgtcccttgtcctgcctccagcacactcttcagtaaacaaaagtcaacagcaccagggcaaaactaaaggaagtgctggatggtctcagaattcaggatgacagtacccgggaggctcgcatgtgtggggtgcatgccgtggcagggagaaggctgcagatatagggatgaagatgattttaggaacaggagctcaagacctctagttccagccccttttagatcccgtggttgtcccaggccctaaagggcacaaaaagctgactgctcatttgtgggcttgttatccacaccagatggctttcaggggtggatttagatttaattggccggactgaatcagaagaaccatgttaaagaaatccttaggaaacttacatgggtgatccctaaattaccttccgaagagccatgcatgcgtcctctggctgctccaggtgtaaaaaatgcctgtaaaaagatgggactatgggccatatttaccacgtttatccagagagttgattctccttaataccaggaaactaggcaacagctggaaaggaaaatatcagaaggacttggaggggacacaagcaggcaaggtacctctgtccctcggtgctgctcacacacgagtggccccttctnctttgtaaata

SEQ ID NO: 326725 - DNA, 500 bp, Homo Sapiens
  misc_feature (26)..(26): n is a, c, g, or t
  misc_feature (53)..(53): n is a, c, g, or t
  misc_feature (79)..(79): n is a, c, g, or t
  misc_feature (96)..(96): n is a, c, g, or t
  misc_feature (175)..(175): n is a, c, g, or t
ggatcaaagatgaattttgggaaacnggaactcaaaaacctcctagttccccncccccctttaagatccccgtggttgntcccccaaagcctaaanggcaacaaaaaagctgaactgcctcaatttgtgggccttgttaatcccacaccagatggcttttcaaggggtggatttnagatttaattggccggactgaatcaagaagaaccatgttaaagaaatccttaggaaacttacatgggtgatccctaaattaccttccgaagagccatgcatgcgtcctctggctgctccaggtgtaaaaaatgcctgtaaaaagatgggactatgggccatatttaccacgtttatccagagagttgattctccttaataccaggaaactaggcaacagctggaaaggaaaatatcagaaggacttggaggggacacaagcaggcaaggtacctctgtccctcggtgctgctcacacacgagtggccccttctctttgtaaatac

SEQ ID NO: 326726 - DNA, 329 bp, Homo Sapiens
  misc_feature (308)..(308): n is a, c, g, or t
gtttgttttactttatgaggtccaatttatctagttttctttggttgcttatacttgaaggtgtcatattttataatatcatcaagtgctgggtggggacaaagcccataatctgccaaaatctgcaccatccttgcccaggtttgggagttctgtagagtagttaccactgccaggtctgactgccatagctcaggaaaagggtgcagtcatttctcttagcataatcttgagaagatgtctaagagaccagtggcgcctcgctgactccccgggggcagctcttcaacggttcccgcagtcagagncaccaccccgcggtggggtac

SEQ ID NO: 326727 - DNA, 1073 bp, Homo Sapiens
  misc_feature (49)..(49): n is a, c, g, or t
  misc_feature (119)..(119): n is a, c, g, or t
  misc_feature (130)..(130): n is a, c, g, or t
  misc_feature (468)..(468): n is a, c, g, or t
aattcggcacgagcggcacgaggaaaacaggcagggattccccccaagnagtagatcaactaagagcaaacatgttgaatttagtttaacatcataagcctaggaatttttgaagtgangttataacatngaatacaatccccattaattagattgtttggataaaaagagatttgagaatgttagaaatccagctttctgcatggcttgttcttcaccaaggaaccagtttccaccctgttgacacatctctacatttttcatggctgtcctattattacatgacttattcgtggatgtaatctaccaacgtcagcgtgggtgaattacggagcagcagcttaaagtaaacatcatttactcctaaggaagttatttccacccttgggttttctgctgggacatttaaaaaaggaccctgcccccttcccaccttttttaaaaattaatcacctgtcctacatttgnaattagccaaggggctgcgtttcacctcctttcgtctgagtgtgccgtgcgcagtgctatgatttatgacctgcgcatccgacactccccatgcagtaacaagatggccgctgcgtttgaaatatatgccccaaatgaaagtaaacacaatcttatgatatagagccatgtcagcacacaaggaattaaacacatacacgttctaatttttagcttttgtttttgcattgtctttaatagcgaaaacaggtgaagatctgtaagtggacagatttcagatactagataatggctctaaggagaatcctgtcgctgagaaaaaggcgccatggatatttgggcaagaccgtcaacgtggtttcccactagtacatgacagggactcattatgggcttgctgttgcctgtaagctggtttccctaccatcaactcaaggccagaatgtctggttcccaggatcgtcccgccaattgaccgtaaaattgccacgcatttggtgccaagcctgagattttaaaagcaccaccccctcccctgaacacctaaacgcccagttccctctgaaaagctgctcattattcttcctttgcaccctgatctaagg

SEQ ID NO: 326728 - DNA, 601 bp, Homo Sapiens
  misc_feature (299)..(299): n is a, c, g, or t
aaacctttccattttatcttttaaaaccctccccagtaatatatgatctgtattagttacttattgctgcataagagaccacctcaaaacttagtggtttaacaaaagaaccattttgtttgctcagcctggcctgggctgagctggggtgatttttcttctaatctcacttaggactattcatgaggcttcagtcgtctagtggcttgattggaactggatggtctcaagtgacctcatggctagtattggtgccagctgttggctaggcctccttgtccgcaagatctttcattctncaagggagctaccccaggctgcatcaagtgacggcctcaggattccaagagggtgagggtggaacctgcagggcttctcagggcctagatttggaagtcacacattactttcagagtattcattggttaagactgttcaggagactagccaagtattcagagttgtgggaagagaggcagcctattgacagaagagcagcattatctgtcccattccagaagggtgtggttacagagatccaagactgattttgtggacagccttccagatcccaacctctttttgtagtctcatgtctcag

SEQ ID NO: 326729 - DNA, 712 bp, Homo Sapiens
  misc_feature (313)..(313): n is a, c, g, or t
ccccagttaattcggcacgagggacaactacccaggcttttctgggcaggggtccctgcggccttccgcagtggcattgtgtctctggttaatcgagaatggagaatggcgatggcttttaccaagcatactgcctgcaaacatattgttaacaaggcacatcctgcacagccctaaatccattaaaccttgattcaatatagcacatgtttctgggggcacagagttggggctaaatttacagattaacagcatctcaaagcagaacaatttttcttagtacagatcaaaatggagtttcttatgtcttccnttttctacgtagacacaggaacaatctgatctctttttccccacacttcctattatgttaatgtattttaattgtctgttagcttttatgtcttttcaacttgaaataatttcacttacaaaatagctggaaaaatagtaaagataattcctgtattttcttcacccacgtattccaaatgtgtaacactacaatcagcaaaaatcagcacattaatattattacctaatctacagacctcattcacattttgccagttgttctgctggtgtgctgtatgtagtgcaggatccagtctaggcccgtatgttgcattttgctgtcatgtcttcttagtctcctttcatctcagtggtcttttcttttccatgactatgacagaaatgatttgtatccttc

SEQ ID NO: 326730 - DNA, 930 bp, Homo Sapiens
  misc_feature (435)..(435): n is a, c, g, or t
tttcatttcacaaacatttattaagtgcctactaatggcagatactttgctgggcattggatataaagtaattaacaaaatactcatggaactggtcctcatgacattggcattctcatatgagaaatagtggaaacacttctaggctgtttttaaattttcattcaataaatatttcttgaagtagccactattcaaggcactttgctttcatcagtgaacaacagacagctccctgcccttgtggaactcccattctagtaagggagaaaaagacaataaacacaacaaatgtgtcaattacaaggtatatacaaaggagaatggtgtggagaaagagcacaagtgaagccgggtaagggcatcaagagtgctgtgaggagggaggtttgcagggcactaacgaagttttaggtagaggtcatcagctcattngagaagatacctgagcaaaagcttgaaagaggtgaaggagacagtgcctcagatacctggaggaagatctttccaggcagttagaggctactgaggctggggacatgcctatgtgtttgaggacacaagggagacaaatgcagctagagatgagtccacaggtgaaagtaataggaaatgagaccaaggaggaaatgagagcaggtcatggaagaccttagctgccattgaaggacgtaggcttttattctgagaagagcagggagtgaatgaggggttttgagcagaggagtgacatggcttgtcactcctctgtgacaagaggagagacatggcttgacttggcttgtcttttaataagatttttctgcctttgtgttacaacagactgcagggagcaagtgcagacaccgggagacctgtgggaagctgctggagtgaccccggaaaaccacgatgcgggttctgaagaggcaggggcagtggagatagctc

SEQ ID NO: 326731 - DNA, 754 bp, Homo Sapiens
cagggatgtgctttcctttgcccatttagggtttcttctctttccctttctctttgtttagtcttcgttctctttttcagtttccatcagatcttgcccccacacaccactggaatctcagaggttgcttctttctcctttccatctttactcctactttctggagtagccaatacagcatgtcacaatacggcactgttcaaaatgctcctctatcacaattctgagtctggtactggtggtctgctgaactgagtcagttcgttttgaaaaaggtcagcaagcaatgaaaaggtggaagccttaaggccagaagctatgaattccccaagtccatcatcttttctaacaaactggctaggcactggaatgtatagagtctaatttaattctactcagtccttttgtcttcttgcaggacttagcgacatcatcacagtctctaacaccttggaaaatgtttaaaacatatggatgaccttgggaacatatgatgaagaactcatatccagttacccaaggtattcaagaaaaatagtctagaggacggtactgaagttagagatgggatacagactgtgcctctactcaaatcacgtctagagccttgaagtgcagccaaagctcacaagtcccagtctctctgagtatttaaaagtttaaaactactgaagcacactttataaagcaaattgtgtgaaaatacttttaaaagatatgcttatcaaatctcccttacttacttgcattgttt

SEQ ID NO: 326732 - DNA, 727 bp, Homo Sapiens
  misc_feature (49)..(49): n is a, c, g, or t
agcggcttccctggggtcaggtgacctgctgtgccccgcccccccaacntgtggccacctctagcaaagctcagccctagctgtggctggagctgtgtcgtctagaaatggccatctgacataatacatgtccaaataagacccaaagtaggacccatcttctcttcctccccactctgaagattgtgtctgtctttgcttttaaatctatctcacccaccttcaaccttgggctccctgaagggtttgttgggagaatggaaaagagtttctcccggctttcctgtctttacaacatcaaacgagtacatagcccttttcctctcaagagttttgctgccagcctgaaggaggccccgtggcaaggcagggctgggaaactgacggaaacatggggaggtggaagaaccttcccaggttcttaagcctggcctcatgtctggcccgcagctcctgactgcttttctctgtggtacctaaatcccagtgggttctctctccacttcttctgtccagggcagcgttctccccgacttcaggtggccccacctgtcctcagctcaggcccttatttcctgctccaagggcgcaggcaggtggatcagcagatgggagctagtattcatccaggtgccccacgtggttgaatgtagatgcagggcccctgggctgggggaggccctttgactttccatgactggcagaaagcccttcaagctgcttccct

SEQ ID NO: 326733 - DNA, 196 bp, Homo Sapiens
atgagccaccgcgcttggccagaagtggcattcttaaattcaagaaattgggatggggagtattcacacattttataacccagaaattcaagcaattctgggtgactacaaatgcattgttttggagaatagttgtaaggtggaaaaagaattaggaactcgacagatagtgagttttaactttaaataacaattc

SEQ ID NO: 326734 - DNA, 561 bp, Homo Sapiens
aacccccggtctcctacttaaaaatacaaaaaaattaagtcgaaccgtggtccgtgggtgccctgtaatccccagcctacttaggaggctgaaggcaggaaaatcctccttgagcccgggaggcggggttgcagtgagcccaagatcgcgcccattacactcccaacccgggcaacaagagcagaactccgtggtttttattattatggttatgtaagataacattgatgatgctaagcaaagaatactcaggaaacttttgtatattttgtaatctcttgtgaatctagaattatttcaaaacaaattttagaaaaataacatttaaggcatttttgtaaactacataatggtacctagtaacttggataaacacatccaaatatactgaattacatttatcagtaaattgaaaaaaataaatttggggcctataatatgtaagaactaataaataacaccagattggcacagaaaacacctgtgttatatataggattaaaatttaatcagtgataagaacagcccgctttacaattatggaatcattgatctcgtgcc

SEQ ID NO: 326735 - DNA, 148 bp, Homo Sapiens
ggatcttttcacactgctgttttttcctctttggtccttctatcactaaaactcatctcattgagccttacagcataactaattatttgttttcctcactacattgtacatgtgggaattacagataaacggaagccggcctggggtg

SEQ ID NO: 326736 - DNA, 452 bp, Homo Sapiens
  misc_feature (12)..(12): n is a, c, g, or t
  misc_feature (32)..(32): n is a, c, g, or t
  misc_feature (323)..(323): n is a, c, g, or t
tgtaaatatacnacaactgtttttattaaatnactatttttagttatcatgttgtctttatgagcattgagcacacttagtagaaaggctgccacactgtgtttagccttgtcatcctggaacaagatttttcatcttgaatagtctgataccaagactgaacccatctactgcaaagacctgtgttctgggaacgcaaagaatattctgacccccttttccagtattgagctgaaatcacaaagattttgtggtatagtgataagagctgtaagatttgggtttctattcctgggcactaaccttgggagtacggggacttngggagaggtgtggtgtaggggaaacagggcaaggtcagtggctacacagagtgtggatttcttgggatagggcacccttcaaaggggaccacgggagctttggtaggaattacgccttttctagggttt

SEQ ID NO: 326737 - DNA, 612 bp, Homo Sapiens
tcacacacatgcctggctactattttcttttaagatagtaaataaaaggaagttttgaaaagttcaatgagactgtgtcaccaggggcacagtgaaagcctcaaagaaagacaagaagttacaatgaggcaagagttaagattcaaactattcttgaagactgtgggataaaatgtttggggaatcttcaggcataggcatcatctctaaagcttataaaggtttttcaagataggtaaacaaaagggggtttatttaaagacagtaaataaaaggaggttttgaaaagttcaggttacttagaaaacatgattaatccaaagctggacagcaatttattccttctgctttctcatttctcaccaaaagaaaatgttatattccctctcagcggccctaaaacatcatcagccttccttacaaaaaactttttcagggctgccagacaaggtccacaccaattccttcaatcaaacagtatttgcagaactcataaaagcatgctagcctttgtacacacacatccctgaaagccacactgcactctgtccgcagaaacagggaggttcaacaagtcagctaccacaataaagttactaaagatacgaggtg

SEQ ID NO: 326738 - DNA, 246 bp, Homo Sapiens
cctggcgagacaagctctttgtactatagagaatgatgcagtggacatgggtagggaaataaaatgcagtataacttatgatagtgttcttaatctggtttgaaaagcaaggttcagcttgagaaggagactggaacactcagtcataagacgctcttcagtggaacaataattttcaaagtttaggtctggcaacttccattagtcatattcttagatttactgaaattataggctaactttatc

SEQ ID NO: 326739 - DNA, 503 bp, Homo Sapiens
  misc_feature (230)..(343): n is a, c, g, or t
  misc_feature (484)..(484): n is a, c, g, or t
atgagccactgtgctcagcccctgcagcagatttaaattccaactcgttataacttcttaaaagactatgaaaatatcaaaatgtacatgaatcaagttttaagatactgtatgatgggtgaatgaggccgtctactgtaccatttctttctttgaattcttaggcatggtttggcagtgcaagaactttgcaatattaataaattcaataaaaagtaaacatatggttnnnnnnnnnnnnnnnnnnnnnnnnnnnnnnnnnnnnnnnnnnnnnnnnnnnnnnnnnnnnnnnnnnnnnnnnnnnnnnnnnnnnnnnnnnnnnnnnnnnnnnnnnnnnnnnnnnaataaaattttcttaggctatttcctctttgagcacattttaaaaaaataattctgaagtcatagcccaacttaataagaaagaatgttatgaatcaattattccatttgcatcagtgacctcgtgccgctcgtgccgaantctggccgcgagggccaat

SEQ ID NO: 326740 - DNA, 431 bp, Homo Sapiens
  misc_feature (152)..(164): n is a, c, g, or t
tttcgagggagtgaagtgtcttatctctataactttccaaagtggtcctcttctgtgtggtgggtaggttctgtggtattagagtgctgtgtttcagtgatagtgtagcctgctcgatctctaaagtctctgcttagtgttgtttctatatnnnnnnnnnnnnngaaactgtggctaccaaccaacttataaacaagttgattggaggcaatccttatttactgtgaggtaagccatgtaataaaatattttaaagctaatgtagcatatcaatttataaaacaagccatgtgctttatcttattcagtttctcccaatgtcagagtgatggttcacaattgtgaatggtgattgagatctggaatgaattcaccagtatttttcaattgtctttttgttgccgtggcatggttgatgtgctttcaacctg

SEQ ID NO: 326741 - DNA, 427 bp, Homo Sapiens
  misc_feature (337)..(337): n is a, c, g, or t
  misc_feature (381)..(381): n is a, c, g, or t
gtgtgagccactgcacccggccacaaagtgacaattctaagaacaaaagcaaaaccacaccaggaaggccagggaatcccaggcagagagaacctggatttgcagcaaagtcccctggcttcagggcatggcatgagtgcccgcaaacagccaagccagagtccagcaggtttgcacactcctcccaccccgtcctgcccaccactggccttcacggctcagggagttcctcctaacagtgttccctgccaccggccaccttccacgactgtggatggaatgatgtttctagcagggaatgtcattcctttggctctccattacttggggatcaagnttaaatccaggccttacagactgcttctcaattgacacccctgncacaagcatcagagccccccaggacaccctggcccctccacactac

SEQ ID NO: 326742 - DNA, 675 bp, Homo Sapiens
  misc_feature (506)..(506): n is a, c, g, or t
ctacatcgggtaagcaagctgcctttcacttgtcaatctttaattagtggacaaggggctcccatgcaatttgggacacgggcctgctcacaatgaggtctactgatggcacccctggcttctgcagtacataacaagtgcagccttacacagtggctactcttgggggggatgaagcatttatcagtgctacacactgtaggtgttcagtgcaagaaaaaacaaattctgtgattcttcattaagtgtactgaacttaatgttaaaatgtatgtactggactgttaataactcatatcacatataaaggataccctccttcaatatctaaagaagtccttaaatcagtaagaaaaaccaacagccattaggaaaacaggcaaaggcttataaacatacagctcacaggaaaggaaattccaatagcttaggtactggaaataacgctaaacccttctcataagggaaacgcaaattaaaacaaggagattctatttttctgctgntgaaactgacagagatccaaacacctgagttgcactgctgagggtttggggaaggccacttcccacgggagctgctggagatggcaagggcagtgggctgtagaacagctgagctacagctatcaaaattatccccctagacagcaattacacttctgtaagtttttct

SEQ ID NO: 326743 - DNA, 927 bp, Homo Sapiens
  misc_feature (358)..(358): n is a, c, g, or t
  misc_feature (393)..(558): n is a, c, g, or t
  misc_feature (819)..(884): n is a, c, g, or t
aaatgcctattttcatttctgatcttacttacttgtgttttttctctttttaattattcttactagaagtttatcaattttattactctttccaaagaacaagcttttggctttgctaattttctctattatttacttgttttaaaaaatgtattggtttctgctcttatctttattatgtttttcttctacttagtattaatttagtttgttcttttcctagcctcttaaggtagaaacttagataattgattttaagccttcctttactatatgggcacttgaaaagctatacatttccctctgaacactaccttcatttggctacaaacatttggctacattcaacaaatatttngaatgtgtgtgttttaattttcattcatcacaaannnnnnnnnnnnnnnnnnnnnnnnnnnnnnnnnnnnnnnnnnnnnnnnnnnnnnnnnnnnnnnnnnnnnnnnnnnnnnnnnnnnnnnnnnnnnnnnnnnnnnnnnnnnnnnnnnnnnnnnnnnnnnnnnnnnnnnnnnnnnnnnnnnnnnnnnnnnnnnnnnnnnntaaatcattcagttaaaaatattttcttatttcccttgtaatttcttctttgacacatgtattatttaaaagctgttattgattttctgagccatcagggaaattttctagataattttattggtattgacttctactttaattctattgtgatcagaatatgatctctgatatttcagtcttttgaaatgtactgagacttactgtcttagagacttatggactggcacatggtctatttggtcaatgttctatatgcannnnnnnnnnnnnnnnnnnnnnnnnnnnnnnnnnnnnnnnnnnnnnnnnnnnnnnnnnnnnnnnnnataatgtttggatcttctataattttactgattcgtttttgcc

SEQ ID NO: 326744 - DNA, 640 bp, Homo Sapiens
  misc_feature (163)..(175): n is a, c, g, or t
  misc_feature (324)..(453): n is a, c, g, or t
  misc_feature (595)..(595): n is a, c, g, or t
  misc_feature (602)..(602): n is a, c, g, or t
gatgcttaccgcagggtctactttctgaaacccaggtcaaatgccctatccatacaagcttcagagtctgtatcatagatgaagaacggagaaataggttttcttctgttcttgatttatatacaggaaagagacaactaaccccctccctcctgaaaggagnnnnnnnnnnnnnccttttgctccattgacctgttggagaattagagtcagccagatgtgagataattataagaaaaactaccaactttcttgctatttttaaaaaacgatttatgtcctgtttttgtttgtttgttgggtccctcagcaagggtcttgccnnnnnnnnnnnnnnnnnnnnnnnnnnnnnnnnnnnnnnnnnnnnnnnnnnnnnnnnnnnnnnnnnnnnnnnnnnnnnnnnnnnnnnnnnnnnnnnnnnnnnnnnnnnnnnnnnnnnnnnnnnnnnnnnnnaccaactttcttgcttttaaagacaattcccaaatgattttttagtttagaaatgattcaggcaaaaaaggggaaaacatgcttttatatctgcagaagtttttagtttttaaaagtggattatggtatataatagttttgncccctgngttgcaaggaactaagacctcaggttatttctcttttc

SEQ ID NO: 326745 - DNA, 780 bp, Homo Sapiens
  misc_feature (104)..(378): n is a, c, g, or t
tatattacttagataattaaaatccaaaatctacctggggaggaaaaaaattccttaaagtagaggtagaagtggtcatgtgtgaactgagattttttgtttgnnnnnnnnnnnnnnnnnnnnnnnnnnnnnnnnnnnnnnnnnnnnnnnnnnnnnnnnnnnnnnnnnnnnnnnnnnnnnnnnnnnnnnnnnnnnnnnnnnnnnnnnnnnnnnnnnnnnnnnnnnnnnnnnnnnnnnnnnnnnnnnnnnnnnnnnnnnnnnnnnnnnnnnnnnnnnnnnnnnnnnnnnnnnnnnnnnnnnnnnnnnnnnnnnnnnnnnnnnnnnnnnnnnnnnnnnnnnnnnnnnnnnnnnnnnnnnnnnnnnnnnnnnnnnnnnnnngaaggataagaacgagttgtttgaatagatgtttacaatcttttccactgttaattggagtaaaaaaagggttaagtttgagtgaaaggatttccaagcctatgacaaatgatatgttgttaaaagaaccttttataaatcatttaattgtcagagtaagttaatccatagccaaatattaagtattaattatcttatccatccaagttaaatatttaaacatgaatggtaagcacccacatgggtatgtctttcatagatgtagaaattcagaataagtcaggaaattttgaattatcaaaataaagcttgaggaatattctagtaagtatgaatagactaagaaatattggactgttacaatatgtgattgattacatagcataattgctaagttgtgtg

SEQ ID NO: 326746 - DNA, 233 bp, Homo Sapiens
  misc_feature (13)..(13): n is a, c, g, or t
  misc_feature (30)..(30): n is a, c, g, or t
  misc_feature (39)..(39): n is a, c, g, or t
  misc_feature (64)..(64): n is a, c, g, or t
  misc_feature (77)..(77): n is a, c, g, or t
tccccaattcacnacttttaaaaccgaagnccaattccnaacctaaaattaacccctcactaanggaataaccttgngcccccttaattaaaaagaggcatttcccaataatacacacagaggattatggagagagctgggcaggatcccaacattatgaccctgaacctccagaactggattcactagaaggagagagagaaaaacgctcatcaaaactttgttattggcag

SEQ ID NO: 326747 - DNA, 883 bp, Homo Sapiens
  misc_feature (434)..(557): n is a, c, g, or t
  misc_feature (697)..(748): n is a, c, g, or t
  misc_feature (771)..(792): n is a, c, g, or t
acaataaaagctaattctgtgaagctttccatggccacttttggatgcaggccccttctgaaggacacgagagaaatgtgaaagtggtaaggaagcctttctggccaagattggagaaattctctgagcccctcacccagccattaggcttagagggtcttatgtgggtggttgaatcaccagtttgaaccgccaggcttgcccctcccagggcctccttctagggggtgtttttaggaggaaggagacctcatgtactttcctggcattgtttcaagacaggatctcaccaagacatcttgagttgtccagtaaagaaactcaacttagtggggaagcttgactgcccatttggggtcttgggccatctgtggggctggagggagcagaaaagagaatcaagacagcaaataggcctggggtgatggctcatnnnnnnnnnnnnnnnnnnnnnnnnnnnnnnnnnnnnnnnnnnnnnnnnnnnnnnnnnnnnnnnnnnnnnnnnnnnnnnnnnnnnnnnnnnnnnnnnnnnnnnnnnnnnnnnnnnnnnnnnnnnntagccaggtctggtggctgtccagcctgtccttgtgctgtctttttaagttttccttagatggtctgtccttctgtggtggcacctgcctgtagtcacagctactcgggaggtggaggtagaagcattgcttgactccannnnnnnnnnnnnnnnnnnnnnnnnnnnnnnnnnnnnnnnnnnnnnnnnnnntgacagagaaggccctatctctnnnnnnnnnnnnnnnnnnnnnngacagcaaataagcagagagaaggtgggcaggagccacacattacagaaacttctcattattgagatttctatctttctaggctgtttatg

SEQ ID NO: 326748 - DNA, 412 bp, Homo Sapiens
tttaagaatccaggctagttgttttatgccaccttagtttggatttgtttgattgtttcctcatgattaaattcaggttaaccgtgtttgtcaagcatagtacatggattattgcattagaatatgcattcgaatgcatattagtatattgcattagaaggcacatggtgtgaatttgtgcttatcattggtggtagtaagtttgatcacttggttaaggcagtgcttccagatttcccagttgtaaaggtactttgttctttttgtaattaataaggcaatctgtgggaatgatattttgacactgtgacaatccctttttccccgacagtctttcaccataggttgttttaggtattcacctgattcttaccccgaatcaggtaataggtatactataggtgattggtaa

SEQ ID NO: 326749 - DNA, 696 bp, Homo Sapiens
  misc_feature (372)..(372): n is a, c, g, or t
tgcttatgcaattagttaaaactttttttagtcggaaaggacaggctgtgttaggtcattgctgtgtgtagtgcctttttgagtaacttgtatttacttagagtggacttttcaaggaatagaaaggttaaaatgaattttgtgtgctaggatgtatatggggatctgtacacctgtttaaaaaaatttcaaaactaaaatattaaaatatgtagccatttgtctttgacttaactttggtattttgctgttaatcagtagttactctatccctaagttagtagtctttgttactctttaatttgtgttcaaagggtagacagttccctaaatcttttaactagttctagtgtcaattggggaacctgtggntttgcctctttatttccagtggactctgttttagtgagatgatgagatggaaagttgggcacagctttatgggtcttcaagctaaaagttaaagatttggcaactctcagtgttctgaatttgtcttccctgcctagattttggtgacaaatataacatactggtacttattttggttaggcaggaacctacatgagtaagcattcacagcttcagaacatctgattcctgcagtgcagttctagtaaattacacgcaagcctaaaaattcagctttttgggaaaaaatgtttcgcagatgtgacccataaacgtccctcctgt

SEQ ID NO: 326750 - DNA, 175 bp, Homo Sapiens
gtttggacagagtttttgctcttgttgtccagactggaatgcaatggcttgatctcgtgaaccccaatcctatttcagacagccccaatcctatttcggacagcccctttatgattctcaaattagtgctgtgtaaatgggtattttaagaatcaggccgggcgcggtggctcat

SEQ ID NO: 326751 - DNA, 402 bp, Homo Sapiens
  misc_feature (72)..(152): n is a, c, g, or t
ctagtaccttaacatgtacagataggttattgatttaatatctttctcttcttcaatatatgtacttacatnnnnnnnnnnnnnnnnnnnnnnnnnnnnnnnnnnnnnnnnnnnnnnnnnnnnnnnnnnnnnnnnnnnnnnnnnnnnnnnnntagtttcttcttggagatttggggggaaaatgatagacaggaggcaggactagattgcagccctcacccggacagacagcagctcacagagactcgcatcatgaactttggctccagaactactgcaggaatataccaggaaagccaagagaatccacagaccctctgaaggaagcagattgctccttcaggacccaagagacaccctaaatactgtgttggtatcgttggcagagaaacctcaaagtag

SEQ ID NO: 326752 - DNA, 588 bp, Homo Sapiens
  misc_feature (362)..(362): n is a, c, g, or t
  misc_feature (373)..(373): n is a, c, g, or t
  misc_feature (381)..(381): n is a, c, g, or t
tgttgccagtaatattctgctctacattttccttagctatttataggtttcacctattttaatttagtgaaatatttgggaagcctgattcattcgtagaatgatgggggacacattttctaaagcagggtagttttgttcaataaaaaataaatgtcagtgaggataaagaacctgcagttaagcgttaagctttgtggccagtcttgggattaaaatgagcactaaatccgagaaacaaacccatgtgacatcatctagggcagacctgcttttgacttcagtgagtgagctccaggagtgaattctcaggaggcacacacccagagagtctgcacaaatacattacacacccagggttncagcacttctncactggtncagtaagttggagatttggggtttgggatattttatattccacctaggaatatacctttgggaaattaacccttttattaagggttcagcttttataacaaatgtttaataagactcatatttggatttttgagtttttcaaagcctgcttcttgaagctcttggtaataaggacctaaaatatctgaaataaaacttccctttcca

SEQ ID NO: 326753 - DNA, 766 bp, Homo Sapiens
aaaccaataaatctgcagtgagaagtagaattcatcatactaaatatcattttcctaaattcctcctttcaattctgttaaaaaggcctcttattattcgaatttaaattgtcaaaataccgcttcaaaagtagagcagagaaagagagacaagcatcatccagttttatctttcaatctttttgaagctctatatttacctaatcactctcgtgagaagggggttgctttgcaaaaagctttctttggagaaatgcattaaatccttcaagcaatcagggctatttttgtccttctatattagacacaccccaacaagtatagcagtctgctgacatcttcatcagcctgtttcttgcctctttgttatggcagcagagggtgaagcatgttcttctgcacccctgacccgccccagcatcttttaaagtttctaattaaatcatggctgcttatgccccttggatatttgtcatttgccaagggaaacccatggggctgatgtttgtgtagggtattcccatatgtattttgaaatttgggttttttattaacacttgagattaaaataattttaatcccagacatctacctaacctgtggaaataatgcatgctctcccttcttctggactcaactataactaacccagcctgactggcttaagataaccttttctctttctccttcttttactcttctccctttcaaaaatagaccaatatgtgacacaaccgttctcattctcatgttttctatatttttg

SEQ ID NO: 326754 - DNA, 380 bp, Homo Sapiens
cgacacaggatggcgctttgctttttgttagttctccaaccttccaaacccttggggcacatgcaagcactgtggaaaaactccattaaaccaagagtcatcttactccagatcccagactgcttgggaagttggacatgcatattcccaaagagaacagtgttggaaggagacaggagagcagctcgggggttgggggtagagggtaggaaaagagggcaagatggatgactaccacttcgaggccagcctccactgcctgttagggcattaggaacctaagagccggtccaaggcaacacaaaagacagttgaggctaggtcttttctttgcagccaacgatcaagaaagcaactccatcaaatgacactgtcttttt

SEQ ID NO: 326755 - DNA, 537 bp, Homo Sapiens
agaggaatgagtcacctcacccagccttccttttcaaaagggggtattctggttatgtttaagagacaccttatttagaaatagaagctaatgaaacgacgtgacatttggaatttgcttcaaaatgatccagtggagtggggagggaaagaagtgggagtaaaagtgaaacaagattagctatgagtttataatttttggagctgggtgacagatgaatgcaggcttgctatgatactctatttctgtatatatttaaaatttcccacggtaaatgtaaaacaaaacaaacattcatttgtttaaaactctcacttttaaggtctagtagttttctcaagtaggtggcaagtgcatggggtgttgagacaccataaaaaaacaggtacgtggctccagacagacatgaagttaactctcctctcctcgtcactctccacatccaatccataaacaagtcctgtcgacccgactccccaaacacatcccaaatctgctcccacagtcttctgccggctcaaacagcctcctacctag

SEQ ID NO: 326756 - DNA, 407 bp, Homo Sapiens
atgtgcaccacacctggctagcctatatttttgtgtgtgctttgctgggttttattacttgatttgtgctagctttaaaaagaaactatattattcttattcactaaaattaaacacatggtattggagatattttatatatcttaagatcttccagtgaatcaatttacctttatcagaacttgctttctagaaattgccttgtgaccccacttccagtaagatagctgtggactgatttgggtctgacaatatgcatatggaaggcttatttactaaaccccatatcctgagcctaagcacctaaacacaactagaaaaagctgtgggccaggcgccatggctcaacgcctgtaatcccaacactttgggagccaaggcgggtggatcacaaggtcaggagttcg

SEQ ID NO: 326757 - DNA, 779 bp, Homo Sapiens
  misc_feature (310)..(326): n is a, c, g, or t
  misc_feature (535)..(535): n is a, c, g, or t
  misc_feature (551)..(551): n is a, c, g, or t
  misc_feature (584)..(584): n is a, c, g, or t
  misc_feature (590)..(590): n is a, c, g, or t
  misc_feature (623)..(638): n is a, c, g, or t
tctttctttgaaaagataaatgacttgcaaaattatagaagacatccttttttacattagagggaaaggagatggacaaatgaatgaataaataaatcagaagcaattgatttttttctgcttgcttctacagcttattgcatgtgaatagccaaagcaattttcactgggctaaattctgagtctattttttaaatctctttcatctaaaggaaaataggagtttactttaggaaatgctggacacatgcccagagtctggaaagtgctagcatgtgttgctctgaagaaaagaagacatttttctacnnnnnnnnnnnnnnnnnaaattgctgttcttggacttgggatcctttctttcgatggtggggtaggactttcaataatccgttctgagaagctgctcttgttgtttgtgttatacacatctgttctcccagtcctgttgctgggactgtgagggttcctagcctggagggggttttgggagagagagagggcaaggggaggccctagagaatgagaaaccccaacntttcatacctaaaccncgtgagatgggtctggggtgaagcaagttgtcncaaccnccctcctggatttacagactgtggactaagtannnnnnnnnnnnnnnnagtgaaaatacctaactctgcattctgtgaaagggagagagttgaaatgaggcacagctgaagtttcaccactccattattctgccatcaagcatcccttcagctcccatctctcaaaatctgcagccccatcaatggaaa

SEQ ID NO: 326758 - DNA, 383 bp, Homo Sapiens
gaagggagaagtgaaaatatacactttacaaattgattctttacatcttgaagatggatttacaacagtattactttatacaaattcctactttatacaattttttgtttaggcagcttttcagtaacatttctataataagttacacatgaagcctcccaaaagaaagctgagaagcttaaaatagccacatgcaaaggattgatgacagaggggcaaagagggcgaagccatcacactgctgcttcatagtcactaggagttgagggaccctgaccctcatacatagctcaataaaggccgacactgggatcttcattgctttcctcagcttgtcttcccaagaagcaatgtttcatcagaagggattgggttttcgccag

SEQ ID NO: 326759 - DNA, 694 bp, Homo Sapiens
tgaagtgaacactaaaccatctaatagataaaccattcagactattcctgttactgcactcagtagttttagttacaaatgatgacaatcaaagttatgttccatggttgagtgcactttgtcttatttgtatgtgaaaactcacacagtaggaagaagttctgtattgggttaactgagttctcaactggagacagcactgacttccccatttccctttgcgggtaggtggcattccagattatgtggtggtaagcttttccttttgcggggagagaagacagggcagtactcctgatacctaattaactatagagcagacatggttaaacaccctggtaattatcagggccactttccccaactggcagaattggccatctcacgtgcacacacaggacccatgttgagaaaaatgaagaaactgatgccttattctttaaagtagttataagttgaagatgtagacctatcttggcattctaaaattctgtaacaacccttctgaaatgggtgtaataaaatgtcaacaggttaattggttcgtgatcactgtggcttaaaaatctagttaaaatgctaagacttgtgcacagtataggcaaagtcacttagattgtttcaaaaagtatgccttatagaaataaacatttgacatacataaataacccttggtttacacataactcgcatt

SEQ ID NO: 326760 - DNA, 734 bp, Homo Sapiens
  misc_feature (388)..(388): n is a, c, g, or t
  misc_feature (401)..(401): n is a, c, g, or t
cattaactctgttttaagaatgagctgattgtttgagttggttaagataagatcacctcaacatctgttggtgataactttatctcaagtgtatctttaaggaagtccatttcaactgaaacatagttaagtatcttgaactgcacagatatgctttcaactttgagctggaattagcatttttatcttctttgggaactggacacagagaaggaaaagaataaactttgtttactccttccagcccaaaccctccattaaaaatttttcttaaagtacaaaacgtttgaatgccccatggaaaacatctcaaatgattgtgctggggtgtgttaaggcaaggcagggtttttactgttttaaaaacggcacttggggggaaccttgngggagtttggccntttttttaaacccctctgatcttctatgtgaggaaacggaggtccagtgagtgaaagtgattacttctgggcagagccaggcccgtgccaagggcttcctgtttcagtgtctgtctcccgttggggctccctccgtaagacctgcagcctgtttattccgggccgagaggccagggggaagggccattatgaactcactgccattcagggagttattggatgcttattagaggccccagcatctctttagaggcattaatttagtagcactgtttcgctggttgcatagtttgcaacttagtcaaaagtaatgaatttaaccaatcctcagct

SEQ ID NO: 326761 - DNA, 801 bp, Homo Sapiens
ccccacacatatacactttttctgattctgttttaccataatgatgacacaggtgcttaaccagctccgtgagctattggggtggctccttgccttgatttagtcttgtgcccacacactgacccatgcagacttagccatgcatccagcacaaattacgctattttacatgtttggtttaatgtattcgtacctgctagacattgtagccaaaagattgtttgctgcctaatcctagccagctcttagggtgactgcctaagcctgtattgctggcttcacaagtttttttgtttcaggtaaataaaaatcaaagagcgttcgaggcagccgcattgactcaccttgcagacaagcaagcagagccgcagagcaggtgacccgtgcccagcgcctcgcagctagagctggattggaatccccagggctttgcaaggcttccctgcttcactcaatcctctttctgttgcctctggccctcaaggtgttgggcctgggaggaagtagcagattaaattcccatgggcacgaagtccgtagctgacgaatacttaatatgttgcagtttcacagtgaaagttggcaagtccagggtgggaacatgcctcaagcagctgagtcttctggattttacttctgttctttgcctcctcaatttttgattttgttatataaaaagcaaatcagtaactattgcattatattctgcagtgactcaacagcgacacttaattcagccaaccaaggtttactgaactgctcgtggtgccgggaaccgtgctgggataggatacagggacc

SEQ ID NO: 326762 - DNA, 366 bp, Homo Sapiens
  misc_feature (355)..(355): n is a, c, g, or t
tttagctactctatactatattcagatttctgtcatttttaactaattttctttttctgttcctggatcccatcctggatcaggtggtatgcattcttataagtgaaatattaatatatcaaaattactcattttggcaaatcagtatattttctgtatataattatagaaagttcacattgttcttcaaatttacttgtaaaaaattattttccatttggcactaaagtttattctcaaggtgttcaatctatgtcagtttttatttgaagttgtgtgatctctctaaaataaacattagtaattacttacaaaatggctccttaggaatctgcaatctggtgggattgttttnaaagcggcaat

SEQ ID NO: 326763 - DNA, 877 bp, Homo Sapiens
gatggaattatctgtaagcttttgacagcattacatattagaatgttttttcattacacatatttttctcatattctagtcatcactacataaccctaccttgtttaaagaaatagacacaaacacatatgcatacaagtggttaagataaatatgtgtatatctgtgtatgtgtacacattgagcaagtgcatcaataacttgagcctaactctgggatgtataagttaatttgtgtaagggtttctggtgaagaacagaaaactgtgtcttggggaaagcgaggaggagcaaagtgtaagttggagaaactggtccctaatatgaccttgcagacttctgaaggactttatctgtagaaagagggtttacaaggaaaagttgaaagaccagttttctcaagggactctgaggccgttggaaacataaacagaactatttttgtagtcaggtaacagtgtgacagaacacgggggaagataatgcccctcatttctgtacagtacaaggtaagatgggacactgtgctccttggcacctgcaggctttacagctttcgacacaagtgtgtgcacatcagcctgccaggggtgttggtagtgaagcacatacaagtagcttcaaaggcagagcaaaagaaacaagggcgtgtcagatgaggagctaagcccaaggaccactcctgttaattctgcctattaaacagtaggtgttgagcaatagtaactgtattcatgttaggattacattttggctatcagcagacttttgactacctcgactacacgggaaatagctgacaaacttaaaacaaaagcctcttttaacaacatcatgaaataacaaccataaagcccatctcttctacttcaagggg

SEQ ID NO: 326764 - DNA, 833 bp, Homo Sapiens
  misc_feature (528)..(537): n is a, c, g, or t
ccctacgccaagaatttatttatttatttggtaaaagaaaagtataaaattgaggatctttaaattcaaaaacttttaaaagtactttgtcaaaatactaggaagcctctgtgtaataggaaatattcccatggttgccttccaccttataaaaagatgtcactgaaactctggggttatctatacattcactcaactgggtatcttgttgcaatatcttgagagtgaaagaacatgggatgatgccaagtgacgaggccaccatcagcctgtgagtgctgtgggaaatcccatttttcccttggggaacgttgggtgccctatgtacgtaacacataaggctctgctaatggggcacagtgagggtgctggcataagtcggaatatcaaagatgagaaagtttaattcctctctcactgccttaagataaaaacaaagatcaacagaaattcaaatacggtcttcttatattcccaaagaatcatccctgtctacctcactttggagaccacaacttcagaacaatnnnnnnnnnntggaaacaaacaaaatgtccaacaatagaaacttgttaaataaactatggggcagacatctatactatggactactatggagccattaagaagatgatacagacatatgagtgtacggagtgaaaaaatgtaaaacagtattgcggtacagtcccattcttgtaaaaatattatatcacatatgtgcatcagaaaagtctgaagaaatatctctctcaaaataacaacaattggtaggttacatgtgattgttattttcttccttttgtttatcctcgtgccgctcgtgccgaatt

SEQ ID NO: 326765 - DNA, 746 bp, Homo Sapiens
  misc_feature (297)..(297): n is a, c, g, or t
  misc_feature (578)..(586): n is a, c, g, or t
  misc_feature (693)..(693): n is a, c, g, or t
taatggctcaacataatttattttttatgttaaaatgtacagagttcttttgaaagtacttgctagaaaggggaaaaaaaggtattacatacaaggggaggaagggaggccggctggcccagtgagcgcgtgacatggagagatacaaaggcatctaggcaccccttccccttagcttacaagtcaccatgaacaaagtacaaagaggttacaaaacaggaaaagcaaatataaacagacaggatagacgtgggcttcctttgtacatgcggcttttagaggcatctgggagctctntttcacacacgctagagatctctttaaagagaatttatctttcttaaaatagtttttaatattctacaacaaagataaaaaattttaaagatggaatgaaatgaaaaagctcttattttaaaaggcatcaaagtcactaacagtgagtttttaaatttcttttttagaagattacccaagttatcttgctaaaaatacattttttttaaacagaagtgaaaaaatgacaggtaccaatattactgtgttggataatttcttttataatatagaaaagaacnnnnnnnnnctacaatagttctacagtcacaaagaggcttgtggaaaagggagctgcccgattgaattttttataaagaaacaaacaaaaccaaacacaaccgcaaaccaacaganaactgatttcacggccctcatttcaacagcttctccttctgccttgacccacc

SEQ ID NO: 326766 - DNA, 942 bp, Homo Sapiens
ccgctctgggatcttgtgagttacttttttaggctgtggtttggtgaaaggaaccaacacattaacgatttttcccccagaagccactgaataattctttttggtgtatttttgccttcctgttggctgtctggccttggagcaggtcgggagagtagagtacataatcagtgccacacagaggcagggcgtgtctgagagactaatgcctgtcctgcctctggcctgtgtcctgggtgtgtaccatacctgctgggccagtcccacacatttccaccctgcccctggagcagcagctttgataccatgggtgtcccttgagtctgagctagagtgtgtccccgataaactgtgagacctccctgttcttggtgaccccagttgggctttggcccctccagcaaccttgtgtcccagccctgcccttcttcccaccccctcaatctgctagtccctgaagcctttaaccaaacgggagtgggcacagaaagccttctcctggcaacaggacaagggctgcccgcgtgtccagccctgttgctctcctggcgctgagaggtgggtccaagcagagttgatcagtccctgcctgccctgcctaggtctagccaggggaggttgtgtgtgtgggagaagaccccgggatctgctggggtgggatggaggttattaaagatctaagtgaggaggggctggggtttggatgcggggtgaggcccgagcgctcacacttcgtgtagggcgggcaggggcctgacctcttgcagggcagtggccttggtgccctacccctgccctgcgcagtatttattgctaaattattgtccaggaggggcagcacttggcctggccccccgggtatttattgctgtacatagtgtatgtttgtgatatataaggttttctttattttgtatatgatcaataaaccttttaaagaaa

SEQ ID NO: 326767 - DNA, 479 bp, Homo Sapiens
ttaaattaaattaaaatatttgtctgctaattccaccatatagatcatgggtggatttggctctgtttgttttttatcttgattattgatatcctttttcttcctcctatatgcgttataattttaactatatgcatatattgtgtatagtagaaagtacaggtgatactattttcccccagagatggtgcaaacttttccttgttaactagatgtggtaaggtgaaaatcaccacatccaatctggaattgagctaggttggagctgaggtatagttttaatgaaacttagttcacctctgatttatacctgttccttagaggtgacccttctgagctttttgttgaaagactggtaggtccaaagtacttgcctactgtagggaaagcctgaaataccaatggagagtcatctgtccttcagagatttgaacaccatgaaatcacaagacattttactctgcctttccagccagcaa

SEQ ID NO: 326768 - DNA, 393 bp, Homo Sapiens
  misc_feature (166)..(296): n is a, c, g, or t
  misc_feature (302)..(316): n is a, c, g, or t
caaaaattttatttttggcttacagtcctgaaatgttcttttatatttgcattgcctgtgcttttagttactggtatagcttgcgtaaaattgtacccttgctaaaagaaattaaaaaatcaaatcatttattaaaatctttgtttggtgagagagacaaggtctnnnnnnnnnnnnnnnnnnnnnnnnnnnnnnnnnnnnnnnnnnnnnnnnnnnnnnnnnnnnnnnnnnnnnnnnnnnnnnnnnnnnnnnnnnnnnnnnnnnnnnnnnnnnnnnnnnnnnnnnnnnnnnnnnnngttaannnnnnnnnnnnnnnaaagattgagggtgatggccatgttctcactatattgcccaggctagtcttgaactcaagcgatcctctcaatcttt

SEQ ID NO: 326769 - DNA, 638 bp, Homo Sapiens
acacacacacacatgattctttctgtgtgctgagattacaattagtagtaattttatcctttaactttggattttccaaattatcaacaatatacttaccttacattaatgatcagaaataaaaaggtttacattttttaaaatgaagataattttggtattatcagtataactgaacactgctgggccccatcaaatggggaaggcagcctgaacgcagtgacaatataaatactgccctgaaaaagaatcagtctgggatgaaccaaacctgcaagagatttcatgagagaaataaaatatttgagcaaaccatcttgaccttttcaaccctgagggcagatcctcacttccgtcaaacctgaagatggatggccacgaaaggaaaaggcttattgagtgttgatgacagatgactggacatgcattaggtcccttattcccacctccaaccttgtaggtagtcatcagggccaccattttacaaagagggaaactggagctcaaggtcacacaggaggtcaggagcagcattagaatgccaccccatttcttggtgccaagttaaatatcctttcctcatgccacaaaagccctcgactgcatctggtctctccttatccttcttacatctttat

SEQ ID NO: 326770 - DNA, 928 bp, Homo Sapiens
ttggtgctattattaatggcacttttctcaaaattttcaattttcaactgttacagatagattatataaatatgatgaatttttgttacgttgaccttatatctggagaccttgcttaaacacacttattagttctaataactttcctgtagattccctaggattttctatgcaatcatgtgatctgcaaagggagatggtttcatttcttcccctctggcctggatggtttttcatttcttcttgccttctggcactggctttgacctcaagcacaatgatgacagggtggcaagagtagacactcttagcttgttggaggggacattctgatgcttaacacatgacatcctattcccagagtctccagttttggtgatagtgtctcggttcttgagcactttccagaagaaggccctaggagagtcaggagcccatggaagcatggccacagggcgggcagagcagggcccagctaagtcgctctggccgtgcaggagagagggctgcagctgctctgggcccaccccagatgcactaagggccctgctctgctaagaagtccttggggctgggcaggctctttaggccatacatgcccacaaatgggtcatccttgtacacatctgggcattcttacaaagcttggacagagtggcaaggcagcactggtagactcctgagaaatggaaccaggagtccaggtagcatggcttgtgaacagagtttgactcttgtagccagtcactaagctgggggtttaaagttatgtggccgggcacagggaacttgataagcactcaaccagtgcttctcatggccctaaacagacatgcaccctatacaaggagaaactgccctgcagaatggggtccaagcatcaccctctagctctgggtcctctggtgggcttggctgcaaatgtagc

SEQ ID NO: 326771 - DNA, 560 bp, Homo Sapiens
  misc_feature (494)..(494): n is a, c, g, or t
ttcggcacagttcctccgctcgctgcctctcctccgcttccttctctctgcgtagtgggactcttctttggcagcgcatccgtcatgtacatggcccctaagtcccgccatcctgaggagcagcagaaggtcctttttctattttacagttctttcaacccgatgctaaaccccctgatttacaacctgaggaatgtagaggtcaagggtgccctgaggagagcactgtgcaaggaaagtcattcctaagaggtgtgacatttgaactgccagcctcagttgtcacgtggactcttgatgcccaattattgcctcaatccagaaaagtttacttctctttatctgtgctttactgacagaagggcaagtcttctctcgttttttggcagataaaattttagatgtgttggcattcattgggtttctatgagatgtggttttatcagacaattttttcttttatttcacaattactttaatatctgtaaaataangaattattttaattcattttcccagtcccaaaagttaaatacaggccacttacttctttaaccaaa

SEQ ID NO: 326772 - DNA, 711 bp, Homo Sapiens
gatggcccataggagcaaaggcaccagttttcatgcactgcccagtttacccattttggcaaatccttcctcctggcctcctgactatgacaccacccagatgtccatattttctgccaggaaaagcctgctggggacaaagcttcttacttcatgtttatcttctctccatttcagaaaatgtcccgtcttacattgcaacttgttgaaagcaggaaagtgattttatagtaagactaatttacattaaagtgaaaatgacattattttgaggggtaccacttcaagtaatttgtttatattttaataatatattgagagtcttggtggctcaggcctgttttcctggcacataaggaggcaaagctgggtgtttgagaccagcctggacaatataggaaggcctcatctatataacaacaacaacaacaaaaaagaatatgatagagacattcattgagcattacattttttgagcattatatattctgtgtcctgtgtctccatccaaattttagattcaaaatatattattactgtaatgttaaccccaaaagaaaaatatttattggtaataatctaagtactatgatatgtaaagaagacctctccaaatgctcaaatcataccatattgggaattgattactcaaatagctctctctatatacctatatctaaaccaggaccaaagactgaacaggctcggaag

SEQ ID NO: 326773 - DNA, 709 bp, Homo Sapiens
gcctcaagctccacttcccaaggtgctggcattacaggtgtgagccattgtacccagccccaaagtttcaaagccagtcggtggcagagctgggactggggcccaggctgagcctgagggtgctcccaccacagtgtcatgactccgggccaaccaaaagctcctgtgtaggagatgctggaccaagtcgggggatggtcgggtcttcccagcaaggtggttgagctgagggcagaggtggggtccccaacctctctccggccatcagtgcctacaatgattgcctacggtgattacctactcaccaaagtgtgatcttggccaagacacatcccttttcccagcctgtttcctcacctctcctacagagggtgccactatctcagggtgtgactgatggggattctggggcctggtggatggtgggcactttgcacctgtcatagatgtgagctgagatggcttcaccacccctcatctgaaccctcagagttaggcaagtctgggtttgggagaggaagcatgggctataaatgctaagtgagggcaatcctgggtgaggctatggacagcacctgggaacaggaaccaaatacattcgtttttctgccttggaatttgcgaaaactcacactaactgggatgaggagcgaaaaggagggtcgtctggcagggcggtttgtgttctgggccaagatgttcccgtgag

SEQ ID NO: 326774 - DNA, 795 bp, Homo Sapiens
  misc_feature (252)..(252): n is a, c, g, or t
  misc_feature (260)..(260): n is a, c, g, or t
  misc_feature (321)..(321): n is a, c, g, or t
  misc_feature (711)..(711): n is a, c, g, or t
gcgtctttcctcactgactcaaaagccgctgtaccttagggcaacctgaaggataagtgagtgacccttgaccggtgattctctggggacaagtatatacagtctccagtgtctactgtcttttcttatcccacaggtggattgtacacataatgagcatcattgctacccaccatgtttaaacattcttggctcactacatcgtatcattaaacaatttatttcttgagaaatttgcacaaaagctgtatnaatacctnttgatcactccatttttcttcttaaaaaggtttttggtgtgttaccattaaaaatgtcttnttttcatatataacattttaattgccaaagttgtaatcccatcttttataaaatgtacagttaaacctaaaagtgtacttacagaattcttccacgtatcgagaagtttcatcatcatcatctaattattttcttttaaaaacctgccctcaggacaaataaaaacactattttatctgtcagttttctggtactgtttacttctgaaaattacactattttcagtcttttatttctaatatactgtgcttctgttaataaattatgggttaaatggggtataacaactaacttagctaacatttctgatattctattagaatgtttatcccagactagtccattcacatgtgaacttttctttcattttttaaattcaaagatttttgntttgctgtaatacataaaataaaatttaccatttaactttttaaaattatggtaaaatgtaacgtaaatatattatttgaagca

SEQ ID NO: 326775 - DNA, 625 bp, Homo Sapiens
  misc_feature (424)..(424): n is a, c, g, or t
ctgttttataatagtcatctaggaacttaatggctaaagaagaccccaggttggcacttctaatgaatttgtagactgaaaattgagaattctgtataatgaatcagattcatacatcagagttaatactaacaagaatttgaacataataattttcctggaatagtaagtagtttgtctttatatcactaataaataatgatcagatttccatgaaacttgaattacagttaaaaaatcaataagataaaaacgtagaggataatatttgaggctgcttctctatcacaaatcaatgcaaacgccagaacactgctataaagtcaagtgttctattctgaagggtttactttgcctgtattgcaccacaatcaagttatactttttgtatttttctgaactggtctgggttcagtttcctcgnaggaaattaccacctaggctagtttatgtaagaaaggacagcaaattattaaaatgattgcagaattgttgagagcacttgaataatgatcctcaaactttagcattaatcagtatcagtttggaggcccttgaaaacagattgttggccccaccctcaagatttttttactataggggtgcaccaccaacacccggccaa

SEQ ID NO: 326776 - DNA, 1128 bp, Homo Sapiens
tcagatttaggaatttattttccatttaggttttattaagtctaatccaacaatgcaaaaatgaaactgtgagttatatgtgatgaaaaagtatagctttcttgaattcaaataagcaatggcaaagatcacatttagaatttgacagaaagaacacagcatccctgcctcgtcttttttatagatagtaagaaaagggaaagtagtcttatttcaaatatcaaaattctgacttaaatgaataaaatttagtcacgagtaaatacaaaaaacaaggcaaacaataaaaccttcctggatcagcacaggcccaattcttccctgccttttatcaccctgtcagctgggagtatcttttctacctgtggctctctaccaattgttactctcttgttgtctgaacctgctagccaaacttggcaggtcgttttcaaagccagatgagttctgattgttcccttggcaatatccattatttccctcctgggtagaaggaggatctgaggacagcttatctttttggggtacgtggagtagaggtggggactcttatataatacgaaataaaaataagttctttgggctggaagtgtcaaaagattccttagaatttatagccacagggatttcatggtgtgtctgatgtactgattttgtgccacatttgagccagaactggcagcagattcaaagcaacacaggtggctaagtacacatgaggggaaggtatggggagagaaaagtggcataaaacaaggctgtcccccctatgctcatccgagaataggatcttagccctcactgaaggagcttaatgatcagctctaatacattggctggactcctgcaggtactcacggaaagtagagatgctgagctaccttttcttgtcaaagtctagggctggagatgcttcaagaactttggagccataaagtcactgtaatggtcaacttttaaggctagaagaggccatgagacatctcattcatctccttgcctttgggcaagaattgcacacctaagcctcccgaatacatcagacacaatttagggttaaaagcctccagaggggcaaaaaagtaaaaagattttacaactttcttccacaaaccactttaattgtgt

SEQ ID NO: 326777 - DNA, 224 bp, Homo Sapiens
  misc_feature (71)..(82): n is a, c, g, or t
  misc_feature (177)..(177): n is a, c, g, or t
ttttttaaaaaattaagacagaaacctttcggcattgctaacttcaacattaagattttcaaagttgtggnnnnnnnnnnnncccttatttcaggagacattttgcatgaggtatttgaaattcaggaacattttgattcttctcgaagtgcaggaaatagacaggatcccttaaanaaaaaaataagagcctcaccctcagaaactcttagaaaatggaatcc

SEQ ID NO: 326778 - DNA, 297 bp, Homo Sapiens
  misc_feature (92)..(92): n is a, c, g, or t
  misc_feature (98)..(99): n is a, c, g, or t
  misc_feature (217)..(257): n is a, c, g, or t
cccttatttcaggagacattttgcatgaggtatttgaaattcaggaacattttgattcttctcgaagtgcaggaaatagacaggatcccttnaaaaannaaaataagagcctcaccctcagaaactcttagaaaatggaatccagcagacacttcccatgatggtcaggagaaagagccacacgtcaaaggtggtacctgaatatgcaccaattagnnnnnnnnnnnnnnnnnnnnnnnnnnnnnnnnnnnnnnnnngtaacacacaactcaaagggagtcagaactccagtgcagt

SEQ ID NO: 326779 - DNA, 663 bp, Homo Sapiens
  misc_feature (527)..(535): n is a, c, g, or t
ctgagagaaaaagagcacaagctttctgacgtgaatgtgaaaactccgttctgaagataccctggtgcttttaccccaagtggataagcatgaataaagaagcacaaagaaacactgtcatcaatcagaatgctcttgcctacacttagctacaggtggaaagcaagcaggcacgatttgatttacctagattaaaagagcaattttctatcttccttttttccttttaaaaatagccaatcgattttggcctagctattgctgactgtacaggtccattttaatacaccactgattaaacggtatgttcatggctgaaggcactacagcaggaacaaacagaagcagctgaaggaagggggtgggggacaggcgagagctccaaaaaacactccacgaaggccacaactactcggcacttcccccgtagacagttgatatagcacattttaggcttgaaccagctataattctgggagtttgaagcctggaattcatttagctttttaattctgaccttaagaatnnnnnnnnntcaaagctatgttttttaaaaaacacaaatgagggaaatattgtgtcctaaactgcaatgacatctgaaatgaagatgtgcctcagaaagatgcttcttatgaaacacttgaaatttcataagttata

SEQ ID NO: 326780 - DNA, 974 bp, Homo Sapiens
  misc_feature (39)..(39): n is a, c, g, or t
  misc_feature (42)..(42): n is a, c, g, or t
  misc_feature (44)..(98): n is a, c, g, or t
  misc_feature (959)..(959): n is a, c, g, or t
tcagtagagatggggtttcacaagttggccaggatgctncantnnnnnnnnnnnnnnnnnnnnnnnnnnnnnnnnnnnnnnnnnnnnnnnnnnnnnnnatgagccaccacgcccagcctaaagctcaatttttaaaggacagcacctgacttcaaaaatcctaaggttcttctctcagtgccttgagatctgccatcatttaaaacatttgtgttgaagacttttcaatcttattaaaatatttggctatattaaagtcacatgacattagccgatgataaatatttctcctccccagccctgatttatgaggaccagctagtaaatagtctctgattcaaacagtgattaaccattattcatgaagcaaaatgagcctgccatgtcatgtcataaatttaatgtaatctcatcttgtttcactttttttattcacagtttccttccaaatttcatcttctcccatctccctacaaacttcaaaagaggtgtacaaaggaacttaagagccattttctgcttacccacctctttagaaggtggggaggatgactcaggaaaatgcagtaactgactgatgctaatatcagaacacaatcagaagcggtctttaggggaagcctcaagatttgccattgatcgctggtcttgaatcaattcaagactagccattaaaaggcaaaccctggcaatccttggaaagaagaaatttgactgtaatacgggcagtatgtgtttgggagaccaatgatcatttgtaaggctttcaactgcggcgacggtaaatccaggaagtgaatcattcctccgagtgatggctgttaagagagtcatatagtaaatttctccctttaccatggatttccaatcactgaagtcatcaggttggcctgaagacccctcaaaataatgtgttgctattgtgaagggccacctgtgccttacaacaaatcacatcngatcaacatgttcag

SEQ ID NO: 326781 - DNA, 628 bp, Homo Sapiens
  misc_feature (97)..(97): n is a, c, g, or t
  misc_feature (430)..(525): n is a, c, g, or t
atttaataatgaacagaaatttatttagcacagctctggaggctgggaaatcgaagaatgagggggcagcatctggaggacccttgtgctgcatcancccatggtgggaggtggaaaggcaagagagagcaaggggaggccagacctgcccttttataacagtactcctcctgtgataatgaacacatttctgtgataatggcattaacccattaatgagcacataaccctcatgacccaaacacctcttaaagttcccacctcccgacaccttcaaaatggggaattaacttttagtatgagttttgggagtgaacaaaaattcaaactatatcaattcctaatttcattctattgtgtagggagaacataatttatgtattatatccttttaaatttagagaggtttgctttatagcctagcatatgnnnnnnnnnnnnnnnnnnnnnnnnnnnnnnnnnnnnnnnnnnnnnnnnnnnnnnnnnnnnnnnnnnnnnnnnnnnnnnnnnnnnnnnnnnnnnnnntttataatgttatatcttttatttcctagttgattttctgcttggttattcattatagaaagtgagacattgaagtctccaactcttatttctgtcagttgtg

SEQ ID NO: 326782 - DNA, 899 bp, Homo Sapiens
  misc_feature (621)..(621): n is a, c, g, or t
agcagacaagtgaccaggctaggtccaggctgccagttccacctaccttctctgggttctggtaccaatatcaattcagttttcaaagccatttgcagtactcttcagatgggtttcatatgtagactagttctcaaggtctttgatgttttgtttgggatcagatccatgctgcacagtttggaggtgattctgggagtttatacacaaaagtatgggatcactcttatgctctctcctctctacaatctccctcatcagtttttggctctttggggcctccttttccagtctctcagccagaaatctagggactttaatttcccagctctgctatgtacttataactgcatctgtgtctgggggccaagcagcagggaggaacagaagggcagaggggattgggggtgtgaggggtgggagacagaagtaacagggatttccccatgctcttggggtcacggcttttctggtaggggaagttttttctgtctaaggattttagggcatctacttggctaatgctgctatcaccattgccactgcctccattgcaatactacctggcagcttgagtgggagacgatggagaaaaaaacacataaacaggaaaacttcccnacatctgatctttaggagccaccttcctgctcctcaaaccagaaaaggagttctttctattctcttggagctctatctgcccctaccctggtgcactcttccaggttttgggctacatgtgagtcaaggtcaggcaaaactggggggaaaataaatgggaaactcaaccccagttcaatcatacttcaaattcttgtttccttctccaatatattggctactatgcagtttccaagttctcagctagctggcccatgcatcctgtccgtagtttagaa

SEQ ID NO: 326783 - DNA, 713 bp, Homo Sapiens
tttaaagggcaaatgaacaaacaaaacacaccatttgtgtctcaaatgaagttggtgaagaatgctgccttggaggaagcaaatcatacttgtttctccctaaatggatcgcagatattcttggttttcaaaattatctagagtcctggaggctaagatcaataatgttccctctcacaaagaaagaagatggccagagtgcagcataaatacctttgagcatttcccactttgaaggtaggaggagacagcttaaggctgacaaatctttcccaagaaatgatgttgcaatgaatgtgagttctccatttacctggcacgccaggtagagcagaagacaaccccaaccaggaagattccagtttcatacgtgagggacccaagtacaaaaaggccctactactgcacttcatgggagagcagttctggtcttccgaaacaatgctaacatgcgcatgaagcaaggtgcttcctacgagagagtcaggccacggtagggaatgaagagggaaacaacatcacaacttcagggtcctcccattgtgcagccccaggtcccaaacagaaaatcagagccaacaaatcacaaagatcagcactgagacccagaagtcatcaaggtgaataaggcttctttcctcttttcccaggtgggttgtgtgtatgtcagtttttcaatgttaatgtattcattaaggctgcatccacactat

SEQ ID NO: 326784 - DNA, 592 bp, Homo Sapiens
cttctgttctctttgtttgaaacagggaatggggaggccatctgagctgttttatctgatgataggattgtgctgtgttgctttctcaggcgagatgctcttaaagatgcctctcagagcagatctcacacctctcccccaagcatccaaagatggtctgggcactggggcatccaggctgaaagcagcccagctgggagcctggcctgtcttcaccttcatggaaatgcctctctgccctgaaggggtggaaattcttgctcactcaggaggctccatccaggattgacctgtcagtctcaagtgacacctctagttcctccatgggcttctgtggccctgggcaggaagtctgatgggtgggcttgagtgtgcacatcagggagaaaggaacatcagagaaccacgggggcctggtggggacgggctgggctctggagcctcacagccctgggttgaaatcttggctctagagacatatgtgtcttggcaagtcacttaatgtctctgcacccctcaccccatatctgcaacctttggataatagtgtcaacctcacaggcttgctgtgaataagtagtagataaaaaaa

SEQ ID NO: 326785 - DNA, 532 bp, Homo Sapiens
  misc_feature (472)..(472): n is a, c, g, or t
  misc_feature (507)..(507): n is a, c, g, or t
  misc_feature (515)..(515): n is a, c, g, or t
ttggcataattttcatttttaaaaaatgtatggataattctttatggctaggaagtggtcaatcctagagtatattctgtgagcgatgagaagaatttatgttccttagatgatgtgtggtgtatactataaatgtctattagtttcaattgatcaagtgcgaaatcaaactccagaatttctttgttaagtttctgcctagataatctgacaaacactgttattggggagttgcgtttccctactattattgcgtggctacttgagtcttattgtaggtctagcagtacttgttgtataactctatgttccccaaagttgggtgcatctatatttaggatagttaagtcttcttgttgaattgaactctctatcgttatgcaatgcctttctttgttttattttactattaaatggatttaaagtccttttttcttaaaagagaaacattcccgggatggtggctcatgcngcacttttcagactgaggcagtagggttgccgagnccgggggnttgagaccagccgaggc

SEQ ID NO: 326786 - DNA, 773 bp, Homo Sapiens
  misc_feature (35)..(35): n is a, c, g, or t
  misc_feature (48)..(48): n is a, c, g, or t
  misc_feature (491)..(491): n is a, c, g, or t
aaatagcttataggatttctttattccaatcaaancaccaatgtatancttttggaaacctaaagcaagcaaaactgaagaatccctaaatcgcaccacacgatcagtccgtaaaggcaccgctggccttgcttctaggcagaggacaggaaggtatggatatcaagaggctgaagacaattaatacccactacaatgaagacacctggaaacctgtctcttgagaggcaatgtgagctaaccactggagacgtaatttctaatcatacaacactttgccttgtgaggtagtgaccaccccattgccaaaggtctgatgacagcatagaggggacctaagcatatggtaaggttattgatgagacatggatccaagccaactttttcctgcctccaggttgacccttcctctctgggtcttggggtttccttcgtagcacatggagatctggggctcaacagaggggacaagattctgaagagcttttctnagtgggtggggctgggatggccctgcctgagtaatccaaacttcttttagcaagggagaagcatgagacggctgctggagagatcaacagcagaacaaaatacaataagaacagtagacacctaaattatgttgtgaaaaggaatctgtaaaagtcagttttatcacaaattgtaaatattattgaaattgattgcaaatttagatcacatacaaatgagagtctgacattcaactgttttcctatattccaaagtaaacaattcctttcaacctcgtgccg

SEQ ID NO: 326787 - DNA, 461 bp, Homo Sapiens
aattttgccctcgaggcccaagaattcggcacgaggataaaagtttatctgaatgcattgagaggaaaagtcccagacctaggactagttatggcagttggagagaaagaacatcgggatgtttgaaaatatgccattgactatcttaactactgtaattttatcatttccaacgtcatctaactggggactagaacaaactgtgaattcactttcagcaaccagagggcgctaatccacacccacatcgctctgccctgttccacccagcaggggcaacaaggatataacttggggttctcggtattcttcctttagtcctgacacaggcagccttgcactttgtagcagcaggagggcacttgctttaagcatatctttcgaaaggcatccattgagagaataatgcattctccccttgctgtgtatgacatggaacagtatgaccattgcactagcca

SEQ ID NO: 326788 - DNA, 820 bp, Homo Sapiens
ttttcaagtcgattcttggcttttgattcaaacaccaagagaagcagctccctttagaaaattactttataattctctaaagtaaaaacccttatggaggaggtggatagaatcccagactattaaaaatacttaaccaaaatatgctttaacttttcccttgtccacaatctaacaaaatgggaagacaatgaaaataaacactcctgtctacactcagagaggcaaagaaagctcccattcagtagtaagccttattccactggaaaacatactcctgaaaagtaaatccaaaaccacgagctcaaactgcttcatgcagaatttactgaacggcggccaaacgctgaagacactgtcctgaaccacactgaagggtatctacaattctgcatctccacttacaacttgaaacttactacgctttcgccaccactgcagaacccgattttagagactacgatggtcctgccggttcgttaatcgaagaaagccactctgcaccctgacgctcgtagtgtcctttttggtaatactggtttttgactcttatacctgtgaaccggtgcacctttttggacgaccaataaggcggaaagacgttttcacgtcccagaacagaagagcataaggagccctggcacagcgttcagccgcttcggtatggcctgggagtgacgcggatcacctgttagacggcgctgcgcggactcctccacaagcggccgacagcggcgatgcggttccccaacgcttgtcccgaggcggcaggtgaaggcggggaccgcccgtccacacccggagcgcggccaccccgcca

SEQ ID NO: 326789 - DNA, 658 bp, Homo Sapiens
  misc_feature (510)..(510): n is a, c, g, or t
gctgtaacagtgtttattgatgatgagtccaggtactcataggcactggtgagatgcaggcggtagaaaacggggatgaagatgtgtgcaggtatcagcagccccagaaagtagcagcagcccaggaaccaatattgggtcccaaatcggtagatctctgacggcacacccaggatggccacggctgactggaaggtggccagcagggacagtgccaccggaaggcagcccattttgcggtccgccatcagcagctcaccaacagtatgccggccccagccacgacaagcatggtagagcccaatggcaagagagagaaccagcagcaggacgaacaccacatagtccatgatggagaaggtagacatgcccacgcttgtgcccgaggttggggaaagaggggctgaggtgctcacccctacactcatatcctcactgtgtctgtgatcctgcagccagttgctgctccagggctctggggtagggcaggggcggatgtgtggctacaantctggcttccagccacagtctcacagtcttcctccacggagtgatactgtccagggtgagctccgtggttcagtcagagctaggaaggtccctttgtgcttcctgagatcaacatcgctcccttttccctcgttctttctcggtttcc

SEQ ID NO: 326790 - DNA, 353 bp, Homo Sapiens
ttttttctttttagtttcccaaattccttttatgtctttgctcctgttctgttcctgccactgatggacctacccttaaaagagtccgcaaagcctatttggtggcaaaacgatacccagctcactcctggaacaccctatgaggcattatggacatctagtggctgctcaggataatgcctcagggatgcatatcaggttagggagtggtctagccttgggctttactaaggaacccaattatcctggctgggtgggagagtcctgggtcctctagatgaccatttctgtcattttctattggcgacccaaagtcactaggaagtgcagactggtgctattgaagactcgtc

SEQ ID NO: 326791 - DNA, 784 bp, Homo Sapiens
ctctgtttttcttcctccatatgagggaacaagtctttcttgccaacctttgcaagtttccctgtagcctttaattttttccgcatattctgatccctgaagatgtcccttactttcttgttcactaagctaagcatgtaaaattgaggaccaatgtactgagcccccttttatgaagtctggcaattctgtgagcatccagtctgcatcagtgcagcaccctgagttagagctctttgttaggcatcatagaacaggaaggacacaaatagtgtccctggcaacaaagacttcagctcctcccagctcaggaggctttcccaggacatgtcatatagattcggctctgcacagctgttctggaaatctgaaacccctaagttgcactgttaaccccatcatcttgttagccctgcccaggatgtcaaagggggaaaggaaatcaacatttttctgcattaaatggtgacttaaagaaagctacctccatatttgaccctgtaaatcccattaaaaacctgggggcctgccagaaagtgcctttatgcttggctctgtattagctttcgtgactttcctataatgaattgtagcttgcttgagtcattaagaagattctgacagggaatcagctggaatctgctgttctttgaaggactcaatttatctatgattcagtgcttaagcagtcaaaaggcttgaaggggtcagtcagggaacatagctcataactcttataggtgcattgacttttagtatatgcattagataaacttaagacaag

SEQ ID NO: 326792 - DNA, 690 bp, Homo Sapiens
  misc_feature (291)..(291): n is a, c, g, or t
  misc_feature (294)..(319): n is a, c, g, or t
cagagcttttcccttctcagctctcatgctgtatctctgggatctagttgtcagaaatatagcccacacattgggctattttaaagagtgtaaaatatttttatgtggtaagtataaaagggaagtaagttacatataagtaaatttcattttatttggatagcctaggataaatttaaaacataattttcttctaagtagatctaaattaaccacttcttgtagcctgaaaccttgggattgctgaggtatcatggtccctttcctgttttaaggttcagctctcctggntannnnnnnnnnnnnnnnnnnnnnnnnnctcttttcaccccatgatatctagactgtctcctggttattttatttcatgctcccagatccacaaatgaatttggaaagtaggcctttgccacacttcatatgttgtgaacttttaaattactaaatacaattttttctgaggtgaaaataacctgccttttgtggggagtgggggactggaataataaggaggaagaagaaataatttctctatatttaagaggtaaatgagaattccaagattgacctcaaattatttatttttgacatagtttcaaaggcatatcactttctcatatagatgaactcaatattctctagggctttctgaatccgccgtcttaatgggttttaagtgctttcatcaac

SEQ ID NO: 326793 - DNA, 588 bp, Homo Sapiens
  misc_feature (411)..(448): n is a, c, g, or t
aacaacataggtcactttaaatgttctagtagcaacttttaaaaacataaaaagaagcaggtgaaaatgttaataaaagtttatttaatccaacatttgccaaatatttcaacatataaaaatatattagtgagacattttacattctctttttcatactaagctttcgaaatctggtgtgtattttacactttctgcacatctccatttggatgctaatgttcattggacatacttgatctgtatttagatttcatacaacttacagttgaaaacagattctcatatcaagtagctaagacaaaagtttttttcaagaattgaaataagtatcagtttaaaaatttatattaaatttattaaaattaaaatccagttccttgttgcatgggacacagtgcaaatgcttgnnnnnnnnnnnnnnnnnnnnnnnnnnnnnnnnnnnnnnatgggccacctgtttctaacttgagcatcagtcctagctatgcctgaattatttgaccagctgtcaaagagaaacaaggaaatgatagctttgttaatctagcctctttctttgtcccacatatacattctacccctttg

SEQ ID NO: 326794 - DNA, 755 bp, Homo Sapiens
tattcaagagcttggacgacgcagggtcataggaattacacagttgcaaggattaaaatatggacaaagagtagtgggaaagtaatatttagagaaagtgtagatggggaagccatggtttgtgacattataaaaggagacagtaccagcctcataatctaagaaaaccccaacacggcgagggggcactgtcatggagagaagcagggaaggggaagaatcctcataggccctatattcatggttatgctgtaacccaatcacccagtatccactctgaggctgatacctggagtaagcactgtgattttgagcaaaatggttgaaagagaatgtaggtcccagtgaattgctgcatacccctaggatccaggcagtcttcttggccacatctacctcccagtaatgcttaccagaggagaagtgctgggagcccaggacactacagtcataatgcttttccagacaggaaggtccagatactttagctcccacaaacctcacttgtctccggtttttagccaggacaagatttaaattagctgtgtgtggattcagggtcaacgtcaacccaagtagctttggacatctgtcagctctctacacactcgcagcatccttttcagatctggggctcggaacatacttctcagctttgtagggagagcttctggcttcctcagggtccagaactcactcctttctgtgacatcactcacatcctgcagcagctccattgttgacccctgacatcg

SEQ ID NO: 326795 - DNA, 747 bp, Homo Sapiens
  misc_feature (238)..(238): n is a, c, g, or t
  misc_feature (310)..(344): n is a, c, g, or t
tttgtagagatgaggtcttgctatgttgttcagggaacatagtcaggtctgctactcctggcctcaaatgatcctcctatcttggctcccaaagcatatttcatttcttgtaactcatcatgctcccatattctgtctcaccactgggtcttacaaatgcagttccttctgcctaggaatgttcttctccccatcatccattctacagttaccctcaaattgtgtctacttatttccntgcccattctttggaatctctggttaaatgtcacttttttggaaacccttctttatattaatcctatgtacnnnnnnnnnnnnnnnnnnnnnnnnnnnnnnnnnnntgaactgtacatattaacattctataattattttgtgcttatttgattgatgttgagctctatatatgaatatgttacttatagtaggtaaatatttaactagataaatacacaagaaagaaagagaactgaaaagtactcatggaggatgaaggtgattcagaaaagaatagtgatccataaactaagaaaacaactaatttccataaggcaaaagtgtcaagaagaacagaataaactactattaaaacaaacaaaaaaggtcaagtaggatgagtactggaagtaggtcactgggcttggaataaaggagattatagatgtccttattgagaagagctttcatggagtgatgggaaaaaagtccagatgctctaggttaagacctgcatagaatcgtaat

SEQ ID NO: 326796 - DNA, 499 bp, Homo Sapiens
  misc_feature (70)..(82): n is a, c, g, or t
aggtgattttaatctagaacactgaatgtaggtcagtatccaccccattttcagaaatctgggaagatcnnnnnnnnnnnnncagcttctcagaataaatactttctaggatgttacaaacatggatgaagttcaccagaacagatccagggttaaccttttaaagtcattagatatggctccagtaaaaggcatgagaaggcacccgtgagaccctgcagaggaagcctcactcctgggcagccttatggctgacgagctaccttactgagcatattcctgcctctacaccagagactcactctgtggtccggtgtcacctcgattctaaattccctgcttcctggtgaatgatgctatcacactttagaaacctggccaataaatgctttgaaatttaaggatagctatcctgaaaaaatttaatataacctaaattgatagtctaatgacatcagtattcagaagaggcattctatttcagcaagtggttttcaga

SEQ ID NO: 326797 - DNA, 468 bp, Homo Sapiens
  misc_feature (15)..(15): n is a, c, g, or t
  misc_feature (57)..(86): n is a, c, g, or t
  misc_feature (90)..(151): n is a, c, g, or t
  misc_feature (155)..(155): n is a, c, g, or t
  misc_feature (218)..(218): n is a, c, g, or t
catttaaaattaagnaaattttaattggataatgtgggacctatgccataaaatccnnnnnnnnnnnnnnnnnnnnnnnnnnnnnntagnnnnnnnnnnnnnnnnnnnnnnnnnnnnnnnnnnnnnnnnnnnnnnnnnnnnnnnnnnnnnnatcnacctggccctccccaagtgctaggattgtaagcatgagccattgcgcctggccatgaaatacnttttttctagaaacaaccacaagaacctttggagagagaaacttctagaaagaggaaagaaggcattcacttcttgttttatccctttttgtaccatttgaatttattattattgcatatgctatattgctatatttgttaatgaaccctttttggttttctccttggtactaatattaaaaatgaacaaatgacattattactttcatacaaaagcatactttcctacatgacagcacctaatcaattg

SEQ ID NO: 326798 - DNA, 688 bp, Homo Sapiens
  misc_feature (379)..(448): n is a, c, g, or t
  misc_feature (477)..(492): n is a, c, g, or t
  misc_feature (635)..(635): n is a, c, g, or t
tcaaataaagtaagagcctcactatctaagctcacatggtatattggttgcaggattaatacaaggaggcatgattacatgatcacaatccagacacaagtcacctccttcatgacaaaattcatcacaaatgtaggttctttatgtggttcttatatggccctcactagcttttgcatcagggtttgctcagtgtggactttacgaaaatcaggaaggagatgatttagtgagtaaggggattagaaattgtatcctggcaccatttacacaactcgcaacacaatattaaaaaatgactagggagacggaggtggaaggatattttatttaatataaatcttagccatgccccagtgggtacacacctactgtcccnnnnnnnnnnnnnnnnnnnnnnnnnnnnnnnnnnnnnnnnnnnnnnnnnnnnnnnnnnnnnnnnnnnnnnatctggataacagagcaagaccctgtttnnnnnnnnnnnnnnnntcaagtgattttttaaaaatgaagaaaaggacaagtagagaggtagggtggggaattttcccttgaatcctcaaaataataaaactgtatattccactttttatctccttccttcacaacatttgaaattccacagtaatttntccttcggttatttgcctatttcctttttaatggtttccattgttatacccag

SEQ ID NO: 326799 - DNA, 682 bp, Homo Sapiens
tgaatgtgtgctctcttttggggagtctggaattttggtacatgctaggtagagtgtgcccaataaataccttgggtgctgagtctctaattggctctcctgggcagaaatactgtgtacatgttgctgcatttttgttgctgggggaagtgtgtgttctgtagcacttcatgggacggagaaagcataaggaagcctgcacatggatttttccagactctgcctgtgtctttcccgtcatctcgctgtgtatccttaccactgtgatccaaccacatactgatttgtgtgagctctagggttctctgaacatgaaagcaatcttggtaacctttgacacaaagtgatatatttgctgaaaattttccattagggtagaacaaatctactgggaatcattggtctgtattcagcagacattattgagtaactaatatgtactatgtgtacatgcacatagttataaggatgtaaaacaatacagttggtgtacttaaggagatcattgctggaaggggcagatcataatgccatatgttatgtaggcagagtcaagatactatgggagaaaaattaggacatacagcttagggatttcagtgacagttttataggggaggtatcatttgaaccgattttctgaatgttagcagggtattgaggctcatggtgctagctctct

SEQ ID NO: 326800 - DNA, 1095 bp, Homo Sapiens
  misc_feature (17)..(17): n is a, c, g, or t
  misc_feature (356)..(356): n is a, c, g, or t
  misc_feature (399)..(399): n is a, c, g, or t
  misc_feature (451)..(494): n is a, c, g, or t
  misc_feature (507)..(507): n is a, c, g, or t
  misc_feature (667)..(667): n is a, c, g, or t
  misc_feature (692)..(692): n is a, c, g, or t
  misc_feature (723)..(723): n is a, c, g, or t
  misc_feature (1058)..(1058): n is a, c, g, or t
ttaaagctagctgcaanagggaccagattagtggatatcctctttaagggtgaagtctttccaattgctgtcaactttggcaggagtcagagggactcttcttgggtcactaacaatagactgtctgcccagcaccagagagcactgatagtcccctgacggccattgtcccttgcccagctcacccactggcctcccaaggaagcactgttcattgtctgccagactacaatggtgactttctcctgagatagacctccttgaagggacatgatctggatgccaggttaataacactgaaaaattcaccatttctttgggtattataagatataattgatatatagaaataaatntatattttaaggcacaaaggcatgtaggatatctaacacatantataaataatacatgtatatgtctaatacacataccacatatatgtgtgtannnnnnnnnnnnnnnnnnnnnnnnnnnnnnnnnnnnnnnnnnnncatttggtattanacattttttccctctctttcaagatcaccatggatagtgaggacagccacacatttttgagtatttcctatgttagtgcttaagacagtacttcctatctctaaggatttgaaatttatttggagagaccagacatgtacagactgagataaaataatgnaataataatagggacccaacagagngcagatttaattgtgaagctaatgaagctcncagccccagggcccctgaacttgtacaacgcattccttgccgtttttgaatatattgccagggcccacccagcactttcccagggccctggaggagccctagcagtatacgtagctgggccttcatgggatcataactggtaaaattggaagaagattttaagcaatcctttaatgtttttctttctcattctgacttccctgctgtcacatttctgtttgggtttgatgacattggacttgaaagtgcttttgagatatagctagggggaagtcgaattgggtccacattttgtttgggtttagtgggatgtatttatgcagttcacagtcatnctctgtgtcaagttatccctagccacacacatacaca

SEQ ID NO: 326801 - DNA, 562 bp, Homo Sapiens
  misc_feature (453)..(509): n is a, c, g, or t
ttttaaagctagctgcaagcggggaccagattagtggatatcctctttaagggtgaagtctttccaattgctgtcaactttggcaggagtcagagggactcttcttgggtcactaacaatagactgtctgcccagcaccagagagcactgatagtcccctgacggccattgtcccttgcccagctcacccactggcctcccaaggaagcactgttcattgtctgccagactacaatggtgactttctcctgagatagacctccttgaagggacatgatctggatgccagggttaataacactgaaaaattcaccatttctttggtattatagatataattgatatatagaaataaatatatattttagggcacaaaggcatgtagggtatctaacacatatattaaataatacatgtatatgtctaatacacataccacatatatgtgtgtannnnnnnnnnnnnnnnnnnnnnnnnnnnnnnnnnnnnnnnnnnnnnnnnnnnnnnnncattttttccctctctttcaagatcaccatggatagtgaggacagccacacat

SEQ ID NO: 326802 - DNA, 1028 bp, Homo Sapiens
aattcggcacaggagctgcccagactgacgacaacagtggagacttggacccaggagtcttgctgacagctcaaactatcacatctgagaccccaagcagcaccaccacaactcaaattaccaagactgtaaaaggtgggatttcagagacacgtattgaaaagagaattgtgatcacaggagatgctgatattgaccatgatcaggtccttgtacaagccatcaaggaggcaaaggagcagcacccagacatgtcagtgaccaaggtggtcgtccaccaggagaccgagattgctgatgagtgagctcaggaactaacctaccccaactctgcccttctcccatccaagagaaaccagcaaaatgataaagaagctaacctgccatagtcagacttcagactttcaagattattctaaatcaccagaaaattaatttcagtttctattgggagtttataccaagagattcttctagatctcattgatccttttgaagagctttttctatattaggatatcagaattgttcaacttttcactctatagactgttttaagagttttggggtttttttaattgggtggtttctaaccccttcagcctagcctctctgcccatttatttccaaccccaacagacactgacagggtccacggaattcttcgggaaatcctcccaaggactcttgtcagctgtgttggaggccaaagccagcttagtgggacttccgcgtctctccctagtcttatcccctttggatgatggcagaaacttcatgaaccagccctttctcagagccagtgatgtgagtgtatcagaatgccagggagggcaccagccctgatccacagacctcggaaagatgcccctgttcctttgttgcgggtggttttggttaggcagagccctctgctgagaatgtagtattgtttttcccctctccctcctgctttctttttggagcttctttgggtcaaagacatggaagttgcttcagatatctgatactgggaatggttgaacata

SEQ ID NO: 326803 - DNA, 263 bp, Homo Sapiens
  misc_feature (114)..(162): n is a, c, g, or t
cattttcaaaatttcagaactttcaggagggcaagagaatatcaaacaaagatttctggaagtattttgccaaccttctggttgagctgcaagaaaatatttatggtgagaacnnnnnnnnnnnnnnnnnnnnnnnnnnnnnnnnnnnnnnnnnnnnnnnnnactatgctttggtctgtaaaaatatgcaactgaactacattcagaaggaaatattgtctacatagaatattatatgaagttggtacataattctgatgagg

SEQ ID NO: 326804 - DNA, 439 bp, Homo Sapiens
gagcagagcattagaacaagtgtgaggtccttctaagagcagggccctgtgagactgcatgggatgctggcccatgaagccagccctgctgcaggttattcttgcacaagcaagggattgaaggactgttcttggaaactggacaatctagagaaatgacccacatatactgtcatatgggaatttctcaataaaaacatccaattctcatcaaattgtcaatgtgggtactttatgcatttaatggcaattttttgcacacagaaaaattattcagagaccagtttgttctttttaattcatattttacctattgcaatttttaaaacctagttcttccttaaacttttaaattcaatttccagatctgatttggtaggtttataaaatctaccaaaatggcaatattaacttttaaatcatgctcgtggccgaattt

SEQ ID NO: 326805 - DNA, 677 bp, Homo Sapiens
  misc_feature (260)..(395): n is a, c, g, or t
ctttgatcagaaatcaaagtgtgtttatttttagtccataagaccaattgataagcacatatattacagaataattaggtggctatgtgaagcaatacctctgtaaaagaaaagacctagtgctctgggaaaaaaaatcctatcatgttggttaatttctctgattttaataaacatcttattgtcaggatggctttaaattcagagaattaatggctgacatctctcacatatatatataattctattatttacagtannnnnnnnnnnnnnnnnnnnnnnnnnnnnnnnnnnnnnnnnnnnnnnnnnnnnnnnnnnnnnnnnnnnnnnnnnnnnnnnnnnnnnnnnnnnnnnnnnnnnnnnnnnnnnnnnnnnnnnnnnnnnnnnnnnnnnnncattaggtctaaaagaacctatgatcctaactgagtctagggccctgttatggactgaatgtttgtggcacaaaattcgtatgctgaagccctaactcccaatgtgtatttgtagatggggcctctaaggaagtaacaaaggttaaatgaggtcatagggtggggccctgacatgacatggtttgtgcccttttaagaaaagacatcagagagcttctgctccctccacccaccacacactcaaggccatgtgaggacatctgcaagccaggaagtgagcct

SEQ ID NO: 326806 - DNA, 683 bp, Homo Sapiens
  misc_feature (651)..(651): n is a, c, g, or t
ggccaggtggcctgagaggggagctcctacagcaggctcgcggtgtgttggttccgatgaatcccgacacactggaagcctgaggctgaggagggagacacacacctccactcactctcctttgcaccttagggcttttcacagctctaaggttaccagcatggcttagaagccaggcagaacaatacctacgagaccctaggcagggtatctccctgtcctcagcctcagttttctcatctgtaaatgggatgaggacatggcggtactgcgaagcgtaagtgccgtaataccgtagtgtgtgccaggcaccataccgaggacagtacacctgtggtttcacttaagctcttcctggaactcagttttctcatctgtaaaacgggataataacatacccctaagggtttcctgtgatgactcactaagagaggggatgcaaagtgcttagtgcaggcctggcccggagcacaggctcagcaaatgatggcttacacccgaaaaaggactggagtctctgactggtgtgtgcggtggatgtgacacgggtgtgcaatgtgctgtgcttggtggcaggtcacacaccacacatgggaggtactggattctcttgttgcccactgggtggtagagtcaacctctgtccacgangaggcccagatggcccaccccagcgtccttca

SEQ ID NO: 326807 - DNA, 546 bp, Homo Sapiens
  misc_feature (408)..(416): n is a, c, g, or t
ttcctcccagcagttcttagcattccactcaagatggtcaaggatggggaaaagggcctttgctggagttgccagctagaggcattctcaggtagctaggtgtagtgtattttggtgcctctggtctctggggcaatgtcttttgtcctccaactggtatgtatggatactgtgattccaggtctgttttttgacttaagaactgctcccagatttccaaatggaagttttcacactatgacctagaaatgaatagatatacattctgtcttgggtttcctaagccagtctcctataaaacaaaaatttcatcccaggaactcttccatctaagggaacatatatgttttgaaaataattcatccatttctttgctcccataaataccttttgcccaggatttattcnnnnnnnnngaaagattgctacttaatgtttctattccattggagtgagtgatttattcattggaggtctaagtgatgatcatagaaagaaacatagagtactagaactggaaggaactaatctctattttataggact

SEQ ID NO: 326808 - DNA, 717 bp, Homo Sapiens
  misc_feature (323)..(450): n is a, c, g, or t
cctttaatctctttggactttatccttgggcttttctgaaagcactttctgtccagcccttgctgtcacccagccaaacctagctcctcacagcccccagcagctttcctgctctgctcagccaccgcctccacctccatacattgtctccacctccataccctgtccccacctccatactgtcctcacctccacactgtccccaccctctacttttgctccctctacttttgctcctggtctttccatttgcacctcaatgaccccatggatttttgtggttgaaagtttctagtctggtttaaatatactttttaaatttnnnnnnnnnnnnnnnnnnnnnnnnnnnnnnnnnnnnnnnnnnnnnnnnnnnnnnnnnnnnnnnnnnnnnnnnnnnnnnnnnnnnnnnnnnnnnnnnnnnnnnnnnnnnnnnnnnnnnnnnnnnnnnnncgtcttctatatttcatttcttagaggaacaagaaagaaaacataaaggaggggtgggggaacgaagtgaagtcctagaaggtgggtttctttaatgttgaagcaattagcgttctctctcgtttctagattaccaaacaatccaaaaagttgcccaggataaagtgactagtcaagctatggaggctttaaattgcttctagacacaccatcacctctgtttggggattaaatatctatttccagagttctggttaatggtaaaca

SEQ ID NO: 326809 - DNA, 431 bp, Homo Sapiens
aacctttaatctctttggactttatccttgggcttttctgaaagcactttctgtccagcccttgctgtcacccagccaaacctagctcctcacagcccccagcagctttcctgctctgctcagccaccgcctccacctccatacattgtctccacctccataccctgtccccacctccatactgtcctcacctccacactgtccccaccctctacttttgctccctctacttttgctcctgggtctttccatttgcacctcaatgaccccatgggatttttgtgggttgaaagtttctagtctgggtttaaatatactttttaaattttttgtagggaaggagggtctatgtgggcccaggggcagttctcaaactcctgggggctcagggcaatcctccttcccaaagtgctggggattacagggcatgc

SEQ ID NO: 326810 - DNA, 577 bp, Homo Sapiens
tggagggaaaggaaatttgtgtgttttaaatatgcagagtctggagaagttgggcagatgacctaatagagtcaggccctgcctccatggatgtcctataatgccaagctctgctgggctgatgcctgtctcaggctggtagctcagggagtgtgaggaacagttagcatggctatgctgaagttacatttagggtgtgtttagcccttaacagagacacttgaagaagagcttcctctagagattaatttccggctggtgtcaataatgctttgggctcccaaacacctctgcatgcacttttatttccaggaaatgctgttgctttaatcgtgattgctcaaataagcagcctttgcccactaaaatagaatttatatttgagaaactgtatttgatgggggcttcttcctcagatagcaatcagactttcttatttggagaggaataagacagctagcatagttccctcggagtggtaaagaggacaacttatgatggctagtggagttcttcctgacctcctgaatgtagacaaaaccccaattcagaggaggattttcttgagagatcctag

SEQ ID NO: 326811 - DNA, 435 bp, Homo Sapiens
  misc_feature (394)..(394): n is a, c, g, or t
  misc_feature (412)..(412): n is a, c, g, or t
taggatctctcaagaaaatccatcctctgaattggggttttgtctacattcaggaggtcaggaagaactccactagccatcataagttgtcctctttaccactccgagggaactatgctagctgtcttattcctctccaaataagaaagtctgattgctatctgaggaagaagcccccatcaaatacagtttctcaaatataaattctattttagtggggcaaaggctgcttatttgaggcaatcacgattaaaggcaacagcatttcctgggaaataaaagtgcatgcaggagggtgtttggggagcccaaaggcattatttgacaccagccgggaaatttaatctctaggagggaagctctttctttcaagtgttctcctgtttaggggctnaacacacccttaaatgtnactttcgccttggccttgttaac

SEQ ID NO: 326812 - DNA, 553 bp, Homo Sapiens
  misc_feature (158)..(166): n is a, c, g, or t
tcatggggaaaaatattattataaaagtgaactgaaaaagaagtacatgatatccctctactacagggaatccccttcagatgggagggataaggaaaagattccctaagaagccaagaactaatgacattctcctaaaagcaacaatcaggaacagnnnnnnnnnctctaataaccttgtgtggtaattagttattcttggttattccctccaaaatccctctacattaaattcaggtgaccttagtaagacttgtttgactacagaacaaggcttggatcttagaacgtcataaaaagctttatagcttctgctcagattccaactaccctaaaaccgtcatgctggaaagaccatggcgcagacataggcccaactgagcttagccttccagccttcctagccaaatcaccggacgtgtaaataaagctgcttagaatcctccagtcctgcccgcctattagctgaataccattagctgatgatgctacatttaagagaagaattgccaagacttgcccaaattcctgaccttcatgattgagagatata

SEQ ID NO: 326813 - DNA, 890 bp, Homo Sapiens
  misc_feature (71)..(175): n is a, c, g, or t
  misc_feature (195)..(319): n is a, c, g, or t
tgtccaactgtttttcaccttttctaatgaaagtattctccaaagaacaaattggaatgcttccaattatnnnnnnnnnnnnnnnnnnnnnnnnnnnnnnnnnnnnnnnnnnnnnnnnnnnnnnnnnnnnnnnnnnnnnnnnnnnnnnnnnnnnnnnnnnnnnnnnnnnnnnnnnagatctaataaccaagatgnnnnnnnnnnnnnnnnnnnnnnnnnnnnnnnnnnnnnnnnnnnnnnnnnnnnnnnnnnnnnnnnnnnnnnnnnnnnnnnnnnnnnnnnnnnnnnnnnnnnnnnnnnnnnnnnnnnnnnnnnnnnngccaaagtgctgggattacaggcgtgagccaccgcacccggccatgttttttgatattctgaataaaaaggatatagcagttgggataggcttgggttcttgtcctttatgttcttgtcctttcctcatgataatcaaatcataattagaaataagatgctaagaatacaaaggtggctctatgttaatactgtattgataggtcaaaggagaaaaagcatgagatcaattcattagatacctgaaaagtcctttgagggaatttaatgtcctccttgccttcctttattaacagaataggaataaataatagcataggcataaattaaaaataatgtaattttttaaaatctcaaactaaaaatgggaatcatacttaaacattagcattccccaggagagttggagcaagacctctgtgcccactatcactcaacatttcattatttaagtcctagcaagtgcaaaacagaaaagatgcataaatattagagaaggaaagttattttttgcaaatggcgtattttttatctggaaataccagagaatcaagtgagaaactttgaagaat

SEQ ID NO: 326814 - DNA, 749 bp, Homo Sapiens
tgagagactgggctagaggtgggtcccctcccttttccaaagaccccaccccccaatccattccaggcaggccttaatctaggaggcctctagattcctcctctactggcttctattccactgggcctcagtttccccaacacgtcttgacacctgctccgaatcaaatcttgcccaactccctccatgtgggctcccaggcacccgtcctagccctttcctgctggcttagcctgaaatgtcaggggaatcggtatcagcagggccagagatgggtgtagccaatgggaagaaggagaggcaaaacaggaaagctcctcctcaccaaccctgaccacagacaccgtgtttaggggaaagctgaaggcaaatggcaagtgtgcttgaactgggacctccagcaagctaccatccctctctggaactcaacgcctaaacttgcaaattgaatgcgctggatggaatgatcttgaaagtgcttctagctctgagattttatgatttggagcagaggacagaggcagagacaggagaaaggctgagacagttaccccatgcactcttcagaattcagttaattggattcaggcaccacaggcatcaagaacatgcctcctgggaacctccaactggccctgagagaccagggatgcccgatctctgaaaagcccagctccagccctcagcaaacatgcagagcaatctcttgcacacactcacactcacagcccccagtcccacacccacct

SEQ ID NO: 326815 - DNA, 754 bp, Homo Sapiens
  misc_feature (72)..(72): n is a, c, g, or t
  misc_feature (295)..(295): n is a, c, g, or t
  misc_feature (432)..(432): n is a, c, g, or t
agttatctcagtgccgctttgtttcccaccccagtcggtcagcccttcctcagcgccctttaacccttgcangattggatggagaaagctgccagcacgttctagggatgggggcagattggggagcgggagggagtagtctttgtctaactttataccagtaccaaactatgttaatttaatgtagttttataataaatctttaagtcctgtaacttattctcccaagattgttttggcttattctacggcctttgtatttctaggtgaattttggaattagcttgttaaaaanggggggggattttttattggggctcgcattgaatctatagatctgtttggggaaaactagtatcttaacaacaagtccttcaatccatgaatatcattcttcccccaccatttatttaaaggcggtctttaatttcntcctggcaatattttgtaggttgcacatatatctatattttaatgcagctgtgcttggatagattgcagtatagagatcatatatatctttcattagatttattcttgagtatttagtgttttgtatacaatgttaaatggcattttgacttttttatattctactcgtaagaataaacaatattgattttaacatactgaccttatatgcaagcatcttgctaagttcccttgttatttgtaatactctgtagattctttcggaatttctgtgatcaaaatcttgcaatccacgaataaagatggtttaacttctctgtaa

SEQ ID NO: 326816 - DNA, 205 bp, Homo Sapiens
  misc_feature (175)..(175): n is a, c, g, or t
  misc_feature (183)..(183): n is a, c, g, or t
ccttcagcctccaaactgtttggattataggcaagagctacttactacacctggccatggatcttcttgtgtcaactttgagaccaaatttactgcagtgcttaaaatgttttaagaagttatacacatgtgctgggatgtggtagctcacgcctgtaaatcctgtaggcagganaagccgcngacaaatccccttaagacaccc

SEQ ID NO: 326817 - DNA, 769 bp, Homo Sapiens
aaatattgtaaaaccattaaatcaaactctactgagttagaatctgccaataatttgagtgctgtatgcgtggttctttttaagaaaaccaatgcttgtgaaacatatgtaatggaaagtctattgtgagtagtaattattttattgatgtgcatatttatgctgccgggaatttttgttgagctgtttgtacttaagagtgaaaaattactcttagcgagaaacaataaagtatttgattggcttcagggaagggaaatacgggcaactttgggagaagagaactggagagtgggtgctatctttctctttccaagtggcaagtcttctcctaggtagctgattgaggagactaaaatagatataatccttacttgtaaatggaagctataaggattttaaattataagaggagttgtcaaagctagagagttatgttaaaaacctaaagagtatcaacctcaaagcaagtaaataaaaaagaaggagtttctctcttttaagctgttcagagaattgagaaataatcttaagaatcatcctggccatggattaataaaataatattaattcatacataaaaattggtttcttgagactggctacttttttgttgagtgtttatcctgtaagcttcaatttttgtaaatcatcataataaattttttaaaaaggaagaggctgcttaccctctgtaccgacagagtgggacatatgcctacatgactaggcactgctacccccttttggtagcaaacattaattttaa

SEQ ID NO: 326818 - DNA, 706 bp, Homo Sapiens
tcattctatttcacataaatcattaagggtccattcaaatataagacctctcacaaagtttcagtcatgtatgagggcgcttacctttaagaccccatttcaaaaccattttgaaatagtgaaggggggaaaaagtcacactcaaatgtgctactcttaaaagcagtgtttctaagcacagcttgcctttttcaaagagtgaaggtggcctttctgtttagtggttaggtaattgggtgcaataatcaaatcttaaggcaatggcaaggctgatggtggggatttggcacaataaggggaaggaatgatgctgtccagttgtaccttaaaatcctaaaggattactaatgacatgggagggatagctacctgccccacacacaggggctcctggaacaataccgtggctttagaaacaaacctaggttctgagggaatgacactgcaaagtcttacagaaatccttttatgagatagccagtccagaataaagcctttgcggtacttgtcaacaagcaagaagccttctgaagaggtagatgaaagcagtatttcacagcaggtgtgctgcccgacgtgacgaaagacatgcatgcgcctctcagcacagaccagaagatcaactgttgttgaaaacagtccatggtggtgagaagagatgtcggccacattactaggtgcattatttcaattttattgtattaag

SEQ ID NO: 326819 - DNA, 768 bp, Homo Sapiens
  misc_feature (756)..(756): n is a, c, g, or t
cactgagcacttaaaaaatttcattgacattctttgcttgttgtctaagagctctcctgagaaggaacatactccatttttccattcctagcatttaacacaggttaacatggcacatggttaactacccaataaatgtttgttgagaacaaaacaggactgggtccccaatggcaggtctgaaccctggcaatggaacttaatgcaaacagatgcctgaagactatgccagacccaaaaccaccagggatgggggcccaggcatctgtaagtatgaaaagcttcacatttggttttgatattctttggctaagaatgagaatcacaatcaaatgagtggtggtagtttccaactgaggacccaaagatagatttaatcatttttaacagccttatcctaaacaaaaactcttttaacttatttggattgttgcagaaaggatacccaggtagaggttattcgagttgggtcagctttctcatgtagttcacaatagatatttatcctattcgtaattaagatgtgaagttattttaagtgagaaaattctggaaggagtttatttcctctcataaaacagtatattaaaaaaaaggtcactattccaaaataaactgaagctacacttacatataaagtcatcacatccaatggacaaaggattaaaggtcttttttgggtttctatttggcacaaatcaagagactggatttaaaagatgcctctcaggaagggaaagtgtcattaaacacacnctgtgccgaaat

SEQ ID NO: 326820 - DNA, 559 bp, Homo Sapiens
  misc_feature (435)..(435): n is a, c, g, or t
ttcgtatttttaatagagatgggtttcactatgttgcccaggctagtctcgaactgctgggttcaagctatccacccaccttggcctctgaaagtactggaattacaggcatgagctactgtgcccaatctccaatagtctctaaaaaatttctttaatagggtgttcgcatcagaattccagtcatgtatttccattggttgctattattttaaagtcttttaatccataggttctctttgtttaaatacaacttaaaatttttaaaaaattcaaacacaatttatagacaataaaatgcacagaacgaattacagacagggtctcacactgtcacccgggctaggagtgcaatgggaatgtgatccataggctaactgtaggccttgaactcctgggctcaagcaatcctcccaccttggcctttgggagtangctaggacacaggaccccaggtgcttgtggccatgccccacgaaaaatgcactgattttaagtgtaagtccggatggaatttgggtaaatggatacgcctgtggtaaccacctctggtaacagg

SEQ ID NO: 326821 - DNA, 360 bp, Homo Sapiens
gtgtgaaccaccacgcctggcctcaagtttttcttttaactagaataaaagttgcagagatagatgcttgtaaaataaactaggtctccaataaaaaaactatttcagacaataatcattttcttgaaatatcaacaattattcaggatagagatggtctctttttggagtttaaaaacaaggttttactggctaaaaattttaatgtatttgcatttgcattctccattgtttcactatgacatacctcaacaaaataactctgtgaaacctagcactttcacaggcactaagaaagtaaaaggtgagaagttctacattctcttctaccctgctataactctggttattcagtttaat

SEQ ID NO: 326822 - DNA, 775 bp, Homo Sapiens
  misc_feature (749)..(749): n is a, c, g, or t
catcgggaacattcaaaatccatttctactaagtgggagagtgtaaaatcccagggagggtgggatcgactgtctcccactctgtttgaacttacttcccagcttcaccatttccacagcggtataatcctgcattgtggtggtctgccttctttcaggtggaggcaagtcttgtagggctaccctctgtgggtgtggttggtcttcttttatcttggtagtgaccatcagacatgctgagaggatgggaacctctatgggactcatcccagtcctcatcctccctgccactagatctcttcacggggtcccaggacttagggttccaggacaattttagtcatgatagtcctaactccatgtgggcagtcagtgaccctttcaaacaggctatgcaacaaaccagtgtctccattttgtcatcctgttcccacaggtgggacagaaattagcctgagctaatatctccctagttgcagctcatcttgtaagtggtacacccttgcctgtgccacaagctcaaccttgggggctgctctaagcacagtcaggactggccagccaactgcagctgccacagcttgggcatttgactttcccttagttggatccaccccctgcagcagttcttccagaacttttggcattttgggggtatccccatactcacctggtgggccccacccatcaaggatagtggctattgggccccacatacatgtggacaaccagcccaggatttccaccgnggattctcccctgatcccattgtctt

SEQ ID NO: 326823 - DNA, 420 bp, Homo Sapiens
  misc_feature (35)..(35): n is a, c, g, or t
  misc_feature (41)..(41): n is a, c, g, or t
  misc_feature (55)..(55): n is a, c, g, or t
  misc_feature (147)..(147): n is a, c, g, or t
  misc_feature (240)..(273): n is a, c, g, or t
  misc_feature (306)..(339): n is a, c, g, or t
gcttagagctggcttggttattcctttattctctnttagtnctaagtgttctgcntttcatctatcatagaggctattaaactgtgctctaatcattggtttgtctatattctttcctacagtagtttttaaactacaggtcataancccactagtgggttatgaaattaggcaattatcagcatttaaaacaagatgaaataaactagaaaatatcataggctgggcacgatgtctcannnnnnnnnnnnnnnnnnnnnnnnnnnnnnnnnncagcctaggcaacatggcaaaaccctgtctctnnnnnnnnnnnnnnnnnnnnnnnnnnnnnnnnnnagagaaacattagctgaacatggtggcacatgcctgtggtacaagctacttggaaggctgaggcacactaattgctttagc

SEQ ID NO: 326824 - DNA, 945 bp, Homo Sapiens
  misc_feature (52)..(332): n is a, c, g, or t
gcaaaatacatttttcttgcgcgtcctatgttggtggctgagacccctaaannnnnnnnnnnnnnnnnnnnnnnnnnnnnnnnnnnnnnnnnnnnnnnnnnnnnnnnnnnnnnnnnnnnnnnnnnnnnnnnnnnnnnnnnnnnnnnnnnnnnnnnnnnnnnnnnnnnnnnnnnnnnnnnnnnnnnnnnnnnnnnnnnnnnnnnnnnnnnnnnnnnnnnnnnnnnnnnnnnnnnnnnnnnnnnnnnnnnnnnnnnnnnnnnnnnnnnnnnnnnnnnnnnnnnnnnnnnnnnnnnnnnnnnnnnnnnnnnnnnnnnnnnnnnnnnnnnnnnnnnagtgcaaatctcacatgagaatcttacgacctgcttcaggggacgttaggaaattcttcctaggttttacaacctgcttcgtggggagatgtgtgggaaaagtccttcctggtttctgctgttttcctcaaatggatggagggtgccatattttggcagtgagtgtgtgtgtcctgaactatatcagtacgtgttaggagggaacaaaattagatgtgttgtacccaatctgccttcttttcttctttactgtatgctttgaaggctgcaaaatttcctctaaatattccctttacctaaatcttttctaaaaagtttctagtcttttaaaaaatgtttagcttaattacattgtcaaagaatatggtcttgtgtgataccaattgcttgaaatgtgttgaggctactttacagactagtatgagatcatttcttaagtaaatatatgcttttccatgtgttttcttcagttttggggtggagtagtctacatgtctattcattaacataaaactaattttgcttttcaaatatttcatatctatagtgacctttttgtcagcttttctattagttactgagaaggtaggttaaaaactctgaggccagggtg

SEQ ID NO: 326825 - DNA, 778 bp, Homo Sapiens
ctgagaaaactatattaaacagcccagaacttacacattcctattgctattgcatccttttccatagttaccttgggaagctagacactcatgctgcttaagcagatttttctagcaacactttcaacacacaacttctagctttactcagcttctagttactctacttgagcaacagcaatatggagtcaaagctgctttgaggattatcatttctctaatattaaaaatgggtactaaccccttaaacatccctcatttctgacgatgacaatttgttccctgccctttatcttaaaattttttaccttctcattttcccccagttgacatgtataatttgtgcctttttctagtctattaatgtctaggacaggggtgtacacaataatctatattggttaaaaaaaagatattgaataaagcctagatccatctggatctttctcaatccccctggaaagatatgtgaaatatctaaagttgaagaaggtagagaaacggagcaggagagaagattagaggggagtcatgtggagatgacaggaggggaaggaaggagagatgggacaggacaggaagacaggagagaggtccccattaggtctcataactacatctttgcaagtatgtgtactgactctaccctttatgtcatgtctgccccagcaacacaactcatgctgcctccaccccagtcatcttccaaatgaatgatggataatcttgcttactataatttcaacctctagaaaggaagcattttgctccctagcta

SEQ ID NO: 326826 - DNA, 887 bp, Homo Sapiens
tattgtctgaaatggaaatgtttcaacagagccatcagcaagcaggaatgcagcagtgtctcctgtgacttttgtgattgatgtgttcagttctcagttctatgcaatgaaagtaacataacactgggcttttctgtgaatagcctaaacctttatttgcataattcatgaaattgtattacacaaacttggttaaaaaaatcctgttagagaatttctgcagtgtttagtaatcctgtgaatgttcaccagttgacgttttgtcgcatttgtctcttgtactgtcttaatgagccactggatttgctttgtttcattgcatccttaaggattggttgacatgtccaagtagtcatgcctgtttgggggaagggaatggatttagcagttcaccaagaatggatcagtctgtctttaccgtttaagggtcagaggttacctgactcagaataaggggaggacaaccttgaaagaggccagataaggtgatttttataaggaactaactgcaggggaaatacaagttactttccaagcagagatatatgatattacctaaggaatattttgaaaaagttaaatttttttcctttaaaaattcaggattctgtattccctacttgtttttgtcaatttggaaatttagtgttttatgtaattttattcttggtgtaaggctctagtgtctaacaccataattttagtcttggtgtgcagctctatgtaaatgtgttttatggcttgtcttgggatgcaaagtgttaaaaaatacaaagcatacggatttgctgtgataagcatacagattagctgtccacagctgtgattcattactttaaccgtagaaattaaaagtggctgaggggagggtacagcaaatgcaaact

SEQ ID NO: 326827 - DNA, 679 bp, Homo Sapiens
agcttgtgttgctatttacatatgaattactgattattttgaaaagacggtgttatcttgggtgttagtgaggctgatatgtcatgtcaatcgataaaccctactttccaaattatctaaaagattaccatttggggcccttgttttcaagttatctaactgaaatattattaatttttttaagttaatctcattcagtcttctagtaataaatgcttttttaagtacccttctacagtcttcctacctgaggggttcagaggctgctgactcacactgctaactctgttactgacaaaagcaaatcaataactctaaattctggggctggatataaaggaaaaaaacaatattgggtttggatttaatctgggtaaaatcagccttctgagaagggctaagaaacagttcaattaactgtataggtctttcattagaccgagacatcactagaaattctgggcactgctgtttgtggtatttgtctcagagtagcttatgactgttttggttctagctttagattttggattttcaccagtcatgtgttaatttacattagatagtaaagaatggctacactaagactgaattatcttattagtctggcaagcatataaagtatacttgtatgtaatgattgccaaggtaacagaattgctgacatctgtctaaaaag

SEQ ID NO: 326828 - DNA, 377 bp, Homo Sapiens
taaaacttggattgtgttgtcagctttttaaactcttatttcagtattaggtatattcagatgcttacaaagacatttttagacaactgagcatcaggatttatcacataggtcaaaaatttaaataaacaagtggctatattatgtggcccatgtgtggagcagttttgcttttgttcagtaacagatgaattaagagccttgcccaggaatcttggttcaggatgggtggtctacacatggtctgcttgttaagtaccagtccattatgtgccaggtagtgattcctatttcagagatgagaagagaaccatgagaaaaagtaggcctgtgtaagattaaaagtaagactgcaggcctggtgcagtggttcacac

SEQ ID NO: 326829 - DNA, 939 bp, Homo Sapiens
  misc_feature (361)..(361): n is a, c, g, or t
tttctaatggggaaaagcagtaaagtgtccttgttgaagtgatctgtctttaattcattacttctccttttggctgcatcttactgctgataaacccacatgctgagttttaaatttcaataatcacttttatattactagaaggcatatttgcttttaaaacttgctttcttattcttcacagtgtcctatccctttcgaatattttcaagcttatatttgattttctttaaatgtattaaacatattcattttatagcctatctgataattctgttatttgaaatccttgctgatctttttcttgattgcggggttttgtgtattgtatgtttatttttgacaaggggcagtttatttntccttggaatttcatttgtgagaactctttgaggcccagaatgaggtagatccctccagagcctatctgagtttgcagcttccaagtgcgtagggcattagagtctaagagtcctttaaattatgagcctgaggaagtgagcgttcacaatgcaaagccttggagggccagtctgcaggtgaaactttcagtggtggctcctcccagtccctccacttccattcagcaccagaatccttgcaggccctttggtctgtgaggggtaatatgttcttggtggtgtatttaattctagttgacccatggatgaagatgtggcctcttgggggctccagctttgtggcaggggagggtttcctataagatcccttactttggctgggccctggacttcgtcatctcttccctgcactccacagagccatcaacatggaagctcaaggttaccaggttcaagaaattctctcagggtcaaagctggctgcagtgtcgtaatgatctatttgcgtttctgagaattcgtgctttcttgtatccatgctttgaagggaatgcatttcattttatccaggattttt

SEQ ID NO: 326830 - DNA, 501 bp, Homo Sapiens
  misc_feature (40)..(40): n is a, c, g, or t
  misc_feature (78)..(78): n is a, c, g, or t
taatcctaaaaaatccctttaaaattaagaaccctgaagnaaattgaaccgttccaacaaagccaaaacccttggaanggcccaatctggcaggtgaaaactttccaatggtggctccctccccagtcccctcccacttcccattcagcaccagaatcccttgcaggccctttggtctgtgaggggtaatatgttcttggtggtgtatttaattcctagttgacccatggatgaagatgtggcctcttgggggctccagctttgtggcaggggagggtttcctataagatcccttactttggctgggccctggacttcgtcatctcttccctgcactccacagagccatcaacatggaagctcaaggttaccaggttcaagaaattctctcagggtcaaagctggctgcagtgtcgtaatgatctatttgcgtttctgagaattcgtgctttcttgtatccatgctttgaagggaatgcatttcattttatccaggatttt

SEQ ID NO: 326831 - DNA, 528 bp, Homo Sapiens
ttccacttaacttttctaaatgcttaagattatttattttaaaagtcaactataggatgttactaagaatctgtgaagcaattatgataagaatcatttatactaaatgtttcaatcaaacaacccattagataaattggccaaaatgtacatacaaacagctaattcacaaaacaagaaaaattttaataagtgcttaaatatatggaaatacactcagctttactcttaagaagaaaatgcaaatgaaactgtagtggaatattttttaaccttttacatttgcaaagatcaaaaagtttagcgctagtcacgattaaaatgatgattgttattttgtgtgccagctattatgctaggtacttcaaaatatggatatttttaaggctaacgctttattagtgagaagatgtagacactgttgaatatttgggtatgcatcacaaaatgtctaccgagggcaatttgggaatagctgtaacattttttctatcataccttttgacaggagcagttccatttccaggg

SEQ ID NO: 326832 - DNA, 786 bp, Homo Sapiens
  misc_feature (44)..(52): n is a, c, g, or t
  misc_feature (567)..(716): n is a, c, g, or t
acaaatgaaaatgaacccgcatttatttacttcactaaaactgnnnnnnnnncttctcatcaaagatttctctattcatgctactcaacatcccaaaaagaatcagcataaggccacaaactcaacaaaattccttctcctgttcattaaactcctgtcctgactccaagttcacacctaaataaacaggcaagcctgtgctctgcaccctgaggaacagtctcctaggctttgtccttgcagagagcccatttccaaggacaggccgtccatctacccagcttttctcaaggccacatagctcctctctaaagacagccatccccaggggttcagttgatcctgacagctgcgcctacagagaaagaagggaagagagatgggagaggaagatctcccaggagtcaggatgcaaggtgaagccagctgttgatcagcggtcactcagcagctagaccatgcgacactctccttctgaaggctgcaggctgtgagagtgttctgagtggcatttaaggatagctcccatgcagcgtgccagcttcggcagggcctcctatggtaagnnnnnnnnnnnnnnnnnnnnnnnnnnnnnnnnnnnnnnnnnnnnnnnnnnnnnnnnnnnnnnnnnnnnnnnnnnnnnnnnnnnnnnnnnnnnnnnnnnnnnnnnnnnnnnnnnnnnnnnnnnnnnnnnnnnnnnnnnnnnnnnnnnnnnnttaaattgatgctgtagctacttttaaatccatggttacttctgcagatataccttgtgcctctctcctc

SEQ ID NO: 326833 - DNA, 405 bp, Homo Sapiens
  misc_feature (13)..(13): n is a, c, g, or t
  misc_feature (61)..(61): n is a, c, g, or t
  misc_feature (69)..(172): n is a, c, g, or t
ttgagacagggtnttggcctgttgcccaggttggagaatgcagtggatgacacagcgagantccatctnnnnnnnnnnnnnnnnnnnnnnnnnnnnnnnnnnnnnnnnnnnnnnnnnnnnnnnnnnnnnnnnnnnnnnnnnnnnnnnnnnnnnnnnnnnnnnnnnnnnnnnnaaatggaaaaaacaagtcacttacaaatgaggctgagacaaaggatcggcggaaagagccacagaacaccaaaaacagaagcagagcgttgacaaaataagcaaaaccttacagttttgtagtttctgcttttatctaacacaatgacttcgctgtacttcatataccttttgaattatacctgcttatacatacctttaccctacctactacttatacctacctcgtgccga

SEQ ID NO: 326834 - DNA, 585 bp, Homo Sapiens
aattccattttccatgaacttttaaaagtcccctcatacatgtttacggatgtccatagaaacgttattcagatactgaataaacaaccaaaaaaacattgttttatcaatgaggaacctgttaaatctacataatacagctataaaaataattatgtagttctataattaccgacatgaagacatctgaggtaaaaacctatttctgatgttatagaagaacaagtatagtacactcttgaatgtaaatttctctgtgtatgcattcatatatactgtacattcagaatcctggaaaggggcttgcacagatgttaccagtgtatgtctcagagtgacagaaggacatatgagttttccttttcccttatacttctttaaaaacacactgattttttttgcacaatgaatatcaatcatattaacatataaagatttaattttttccccagaagaaaacaaaaagattgagctttgtgtaccatccacggacaaaaatgctatgtgttttgcagactcaggtagtagtccctgcgtgtgctgggggtgagatggggaggagccgctcatttctcagcaggccaa

SEQ ID NO: 326835 - DNA, 500 bp, Homo Sapiens
  misc_feature (48)..(81): n is a, c, g, or t
taatatgggcaattattagataggtaatataatttctatggtgacagnnnnnnnnnnnnnnnnnnnnnnnnnnnnnnnnnnatctctcacaattttactataggagtaaaattagccaagcagcacaaaagtccttagagaaagtgtggtgtaataaaaaagtccctggactgtcctaataggaaactcaaatccccatagttgtttgggtatcagtttccttatcccataaagtgaagttttaaagaatattagtcttatgagaatgtctgaaaaaaagacctccaagaccaagaaagtttgggaaatgctttatttacatgcctattcttcttgaaggttagtaatatagtctagtatattaaaggttctaagaagttctccagtgaaaatacatttaatttcctttaaatagtttcttctcaagcttatttggtcatagaggaatttttaaaacaaaaatattgaaaacaatatgagaaactttggtctggacagat

SEQ ID NO: 326836 - DNA, 266 bp, Homo Sapiens
gtactcctaagatactgtaagtccaaaatatgtccgtaatgaattatgtaaagatctggaaggctgaagtgcttctcgaaatgccaatacctctagagggaaatgcaagaaaatagccattgggtaaaataagttcagatccacaaaaaaacaaaagggaggggggtaaggctatcagctaaactaagggtgggatgaatgcttcctgcacattttaatcctggggagaacagtagtttctaaaacaaaacaggcctgtgccgaat

SEQ ID NO: 326837 - DNA, 1398 bp, Homo Sapiens
  misc_feature (209)..(229): n is a, c, g, or t
  misc_feature (549)..(549): n is a, c, g, or t
agttattcaatatgcatttattgagcacctactacataccaggcactagtaacacagataaagagtacactgataaagcttaattcagattaatctttaaaaatgctttctacttggcccctgggaccattgtatcttctgaagtcatcacagtagataagggagaaattttgccttaaaaaaatgcatccggttacagtgattaaaannnnnnnnnnnnnnnnnnnnnactaacatttgtggggtctaatggaatagtggggaaaagacaggatttggaataaggaaatccagtttaggcctattacttattagctgtgtgcccttaagttaaatttcacttatctggcctaactcttaattggtaaagtgataattggcctacagttgtagcatattagagccaaaaggaacagagatcatctagtcctgtgctttttgaagttcttcgttcaaatgaaaatattatgtagcagccccagttgtagaacgtgatgaacgcagtcactttgacagccccgtgagcatcactcactcccttccctcccntaccctaaagtattcatgaggagattcacagaacaccctgaaagccactcatctagtccaaaccctcactttctaggtgaagaaaccaagactcagaataggagtggctgttttcatgagtacatttggcttccaactagaaagagggaaggagggctaaataaaacgggtttaagaaattcactaaaaacacaatttgtcaagaaggaagtcttccatcttaactccttcaaagtagcccctttatgaaatggagctttgaaattgattgtgtttaaggcagccagccatccagaggctgaaatgaacaactaccaattagcctacctgggccaatggagaaaagtatggcagaaaaccacatgttacttggcatctgaccagggaaaatcctggccccaacagttcaggcactggcagtttcaagagaaatacttggaaaattaggaacaagtatagacaagtgctcagctcccagatccccaaggagaagtcaccatcttgttactcagaaatactaacaagtgagcatgttaactcttaaagtgagcagtgcaaccaaaatcaccagtttaaaatttcttcagaggcatcctcttcacagaggaaagtcctagttcggaatcttgaccactattagccacagcagacttgaaattgaaccaaaaagttaaaatgcatgtcaaatgctggacctagttggtcaaggcggtgatctcttctgatttcatagcatcagacaggaagctgagctcattgcataaggtctcatatcggaatgccatccggatctgagccacatttgtctttcgaatatcatttccttcaggtccttctttataataattt

SEQ ID NO: 326838 - DNA, 706 bp, Homo Sapiens
aggcctaagacatctcacatttatgtgaaatagttgaggcacaagtatgtggttaactacacataaattaccaataaaattaaaagttaactaaaatactacagaagacatttaatattttgcttcagactgttatagtaccttagggttatgaacatcaattacctttgagccttactatatttaaagggaaggggaagctgacatttttatcttttttaatggggtacactctacgttaccttaaaggcttccccggtttaagcaaaaatagaattatgtggtttaaatcatataccttattcttcatacttagctccaagtagattatgacttttcctaaaacttaacatgacagagatttgccttccagggggtctaatttgaagaggaaagtaatttaaatgtataggtttatataatagcattgtatttttctctattttattcattctttcattctcttcgatgactcccagcacctgcgcgtccatcttcattcttagccaatgacctttccttttacttaacagagaaaataacaatcagaagagtcttcataagttcccaccccgtctgcccgctttctacagccaaccccacatgccctgccttctctcctttcactgtggatgaaccgcccgtgccccaagcaaagacaaaccctccacttgaacactcacttgctgaaggatgtggcttaagc

SEQ ID NO: 326839 - DNA, 1196 bp, Homo Sapiens
ttttttgaagtttcaacctttttattcaaagcagcttctcacaatgtataaatactgcatattagcacacatgaaaaatacaacttctaaggcacccagaaatgtgttcatacacgttacaggaccattcacaaagagagtgtacaatttgctctagacagtcaggatttgataaatcagaagattattatccctcagtactgcacccagtctcagtaaatatttacaacatggtgagaaggggtcagctgtaccttctttataattctatgaagtactcagacttacaaatattcagaactagttaaagactctcccatgataatctgggcaaaataaaacaagtagcctaattttgcaaaggtctcggtggattttggtgtatgctacatccatgatcaaatccaaacactcctagggtgggctgggataagtttttggtagcctgcttcattatcggaagtttggtaataagccttaccaatagaatacccacttcttcagcatcaatcatttctcaactggtcaatggatcaatgattccatcatgaatgagaatggagagagaactgaagacaattcttctcacacctaacaggaattagaatgggtcaatgaagaacaaaaggaggcagacatttggaaagtgcaggatcctactgttcaggtatagacatgtctgaaaaattcttaccctggaggttcatattcaagatggaggagtctacactggccagataacctggaggagtaccaggccttccacttttatgatatggatacaggcttgggactacacagtagaaacaccaacctgagatagtgagcttcaattagaaactcatctttcagagccttttcaatatgacaacgaatccctctgtatggccagccagggggagcatgaggttggtggaagtcagcagtttctctgcaccatcaagcatgcacatatctgtctagatgtgcccacaatctatgaaactcaggctttgttagaataatggaattctttggttctcggttttatgaaaggcaatattgtcacaatcctgtcaacatcgacactggcaaatgacttcaagctgggactaatggcacagggacaaattaaatactagatgggaaactctacaccctccaaacttccaagagtcagcttcaagagctccagcatcaggctagatataagagct

SEQ ID NO: 326840 - DNA, 758 bp, Homo Sapiens
  misc_feature (337)..(337): n is a, c, g, or t
  misc_feature (342)..(342): n is a, c, g, or t
cagtactgtaagttatcccatctctagttttagttccaaacttctgatgattgcacatttaccattatttgacaaaaactaaaaagtgttctgcccagattcttctagtgtctcatctttaacaggctcccccttggagaatatggagatatttattttcttccaatgttggcagtttttcaaacctgcaattgttcatttcctgttgaccaaagaattaaccttgtcagccgataattagtgagatgggaagagagggcgtagtgatttgggacccccagtgggttgggcagagtggggtttacaggggaaggaaaccaacagttggggctgtttncattncattgtttgggttggggagccccattgtgggaagagatggggtggttacatgtgattggcagccttccgggacatgtggcttatggcattgtcacctatattagctctctctggggcctttgttgcagaaaatgaaagcttccttgcagggaacttcgaacccaaggagtaaattcaggagggagccacaaaggaagcacttttaagtttgtaagattagaaaatacatttgcacaatttatttcagttcaccattcagttcccaaattggtacagcttgttcacaaatgtgttgaaattttccttcctgcagcatgttgagtaatcgtagatgagtttttcttttacacttgatcttagccaaaaggccaagaagtgatgagtttttattttaataagttcttgtcatacagctt

SEQ ID NO: 326841 - DNA, 571 bp, Homo Sapiens
  misc_feature (53)..(53): n is a, c, g, or t
atattttttccagatctctcactgcaccctcccagattattcccctggggagncgacactgcagcaagacccaagatgtgtcggaagagcctgctgggacaaaggcaggcagacaccaactgtattcatgctcatcttatgcctcttccctctgctgctcctatcagaagcataaggcactggcccaaacagaaaaatgcgaccttacacctaggcttgacaattttcaaactgtaagcatgactctgtgaggctcccagcaaccaaagggaccaggacaagggactcccacaggacagatgggcatgcagagctcaggaaggattgtgacttgctacaagtcacctgcagcttccatgccagtgtttttcccacccctgcatgtggccttgtccagtggagaagaacatctccttgtctcttccacttccactactccttcagtacatcatgggaagtcttgtgaaagaaagcaatattgaaactgttttcctggctgggatgagtaagaatctggagtgtgttactgtaaagccatctctcgttcatcttctcatttaattaagcggcc

SEQ ID NO: 326842 - DNA, 718 bp, Homo Sapiens
  misc_feature (697)..(697): n is a, c, g, or t
ctaactcaagtaagactctcagtctttaacttctcctctaccccttttacaaatcacaaatcacagcagactttgtaaatgtaaacctaatttaacttagtttccctcttttatttaaaaagttttggctcaggtcaattccaaatttaagatactaggctaataaagaatgctattgctagcattctacctctgctataaaataacagttgtattaaaggaaaaaagtgtatttaaataaggaacttaagaatgtctatgctttctctgtaaatgtttacatttcaagttaacatttaatttttttcttgtataatccaaatgtcctatgctatctgctataaataacataaatttgaaagataaagggcaaggattatatcacgtttatcaaaaggcaattttcaagtttctacccatacaatttatgggggtgatttcctttatttcctctttcgtggggaccaaaattgagttgtcttgtgtgagacactttatttaattccatgaccccaaatctcatgcttattaagtacgtttttttaacccaaatagtacctgcttattataaaccaattggaaaacacagataagtagatgataacaaaggaaacacaagcaaaagtcctctaaaatctcataggttaccactgtcaaaatttggtgcctatttttccagagttttaatcttaatagntgatatttaaatttattagat

SEQ ID NO: 326843 - DNA, 792 bp, Homo Sapiens
  misc_feature (12)..(12): n is a, c, g, or t
  misc_feature (68)..(68): n is a, c, g, or t
  misc_feature (74)..(74): n is a, c, g, or t
  misc_feature (95)..(95): n is a, c, g, or t
tttcagcaaccncaaaccagttttcctgtgttgataaagtaaaggatttccaattttcttctggcccntaagtntgcgtcgcatggtgagtttancagagttctttcgctgtgaggttgtggggagacttgcaggctgagcaccactacttcgacttaagccatttcgtctatgcttcttcatcagggggccagaattggactcttctaatgtccttttaaagtttgttggaggggttctttcaatttcttgggctttcatttggccaggagttgacatcttcaaatttttttggtccatgacagtgtttgttgaattagtaggcacaaggccaattggaaggctattattcaaagaatcatgtatccttaaagtcagggctttagcgcaattttcttcaagtggttctggatcttttgagggtatgactacaccttggacattctctcgagctatctcagctgaaacctctaaaaaattctctgagaaggcattgctacgaaccagggcaggtatatggtccttagaattcacccttggccatggatcctcctccagtgacttgactggtggtgtagaacatggggaaggagtcatcacacaggtttcttgactattataggaagggctgtcagtcaggttcaggtataactcatcttcattggtaaagtttccctgattgtccacttctggagagatgcagattactatggcactagtgttatctgctcggagcatacgctgcctccagcggcccaatgctcgattcacaagcattttggcacaagattg

SEQ ID NO: 326844 - DNA, 561 bp, Homo Sapiens
tggaacgggttcccgcggaggtccacgtgagtaagggtgtcaaggcctcggaacaggaatctggggagggtctccagatggttattggccaggcttaggtgtgtaagcgagcgaagtcctctgagggcattcttagagatggagccaatctcattgtcctcgatgaagctaattcagagttgtttcctggtcatttgaaacgtttcttgtctctgacttctgtacacccttcctgggtttctatgagtcagggagagccagaatcaggctctggttatccgggccctttgtagataggtactgccaggtgggacaggccccgcaaatgcatcgtccctcaatcacggagaaggagttggaggtgaagaggagcaggtgcagagacggaattctcaggaagctgccggccttcagctgggtgactcccgtcctgacgagtgagagtgacagcagggtcggagagaagctgacgggcaggtccggggagccctcacacagggcgctgtctttagagcaggagcagcgcaggggacacttttcctttgggggtctcccaggcca

SEQ ID NO: 326845 - DNA, 693 bp, Homo Sapiens
  misc_feature (661)..(661): n is a, c, g, or t
tttcttaattttaatttttttaaggtgagaggtggatcatctattatgatttcacgttgttagaaagaaaaataataataaatgcaactcccagcagagcccattcttccccctctcctccagcagatgctgtttttctttccagtcactgttgttctaaagtctcatcggaacctccaccaagaagacgtggcgattcatcttcttgttttcctttctcgccttggctcagagcaggccagagcagcctgacagaggggccacaaggctcggtgaacccctgcccctcccagcaacttggtcgggaggcagaccgattcttctcctctcctcgatgtccctcacaggggaggggagggagctggggctgggggttgctaattgagttactggccctggctctaggacagggctggggatgctgtgtcagggatcacagagtgatgctaatggcaggagtaggggagagaagaggagtggggagggagggagaaaaagagacacacagggaatgcctccacgtctgggaaagacgacgtgggggtccctttcctttgttttcttaactatatatcagcgtcaggcaggatttgaaacctaaagcctttaaatagctgtttgacaaatcggagattcctcagtatcagatgagggaagaagnctttagagtcctcagtccagtctccctaattt

SEQ ID NO: 326846 - DNA, 352 bp, Homo Sapiens
  misc_feature (236)..(236): n is a, c, g, or t
aaattagggagactggactgaggactctaaagcttcttccctcatctgatactgaggaatctccgatttgtcaaacagctatttaaaggctttaggtttcaaatcctgcctgacgctgatatatagttaagaaaacaaaggaaagggacccccacgtcgtctttcccagacgtggaggcattccctgtgtgtctctttttctccctccctccccactcctcttgtctcccctactnccttgccattagcatcactctgtgattccctggacacaggcattccccagccctgttcctaggaggccaggggggccagttaacttcaatttagggcaacccccaggccccaggtt

SEQ ID NO: 326847 - DNA, 804 bp, Homo Sapiens
  misc_feature (80)..(95): n is a, c, g, or t
  misc_feature (505)..(505): n is a, c, g, or t
gaaggacagaatgtgtcagaaatgatgctgtgtgatttccaaggtgaggttagaaaacatggcaaggtttccacctgctnnnnnnnnnnnnnnnnacttgggacgtgcacctttggagccctgagctgccgtacaagaagtctagctccctgggacaccccataatacagaggccatgtaggaggggtttagaccacataggcaatagaggtgacagtgggaaccccagctgagtaaatgaaccttcacgtgctttgactcccccacctccatgaccccaccccacactcccacttttttgagccatcccagtgaaagccaaatggagcagatatgagcagttcctgcggcgctctgcctaaattgtagagtgatggccaaaataacatcatcgtcgtcttaacccactatatcttggggcactttattatacagccacagtaactggaaaacttaactgccagaacgtctcaaatgaagtgttgggactggtttggggcatgcnagcgaattcatgtgtgccccaacaacacctaaagttacagggctgaaagtttgagaattttaaaaaaatgatgggtaaaattcagagtcagctcttccccactcccttccattccagaatgcttctttgagcaggagagacaggggttgcagccagttcgtgcacccataattttgcctaatcccagcacttgcttggcagaagcggcccttcatctcgtgtgccctggtgggaaagtagtgagtactgacagtttagacccttcaccagcccacacctggatggtgttgccagctttc

SEQ ID NO: 326848 - DNA, 771 bp, Homo Sapiens
tggaaagagatttgttctttatttcccaccacttagagagaaaaatatgcataaaactccagcagaaacttttaacgttaaattgcaataaaaatttcagtaaacaggttttattcatgtcattaagtttcagggtaaactctctcttctgagacaatctggagagacctctatcagtgtagttggtttatggccaaccctgtctagaagcaaaggggaaggatgcaatgctacgtatctttgcaaagttcggtataccaaagaaataataatcctactttcaaaaatccagtcatttaaaacttcagtcttatttttctattactattttcaaccatgccattttcctcatgaaatctgatttgccatcagcttttcagagttcaactgtttccaaggtttctgtcagactgtcctaccatcctcccactcctaactacccagctgccccttgtgttcctagccaaataaatctcttggcaccattgtccttaacacccactgctgcctcccacatcattctcccaccccctgtgtgtggaattgtctcccacttccatctgccatttttctctctcttctctatcatataattgccccaaaagcccacctctcccaggaagccttccttaatcaaggttaaggactcttcagactacaacagacgtcacctaacactgatggctaatgcatcccaacttttcagaacaggagtttcctttcagggataagaggcaatcacttcacaaccaactaggggtgatggtaatg

SEQ ID NO: 326849 - DNA, 705 bp, Homo Sapiens
actgagcagtcagtgaaatcttttaatgccagaaagtcataagcatataatctcagtgatcaaaagtgtagctgaaagagggcacagaattttcagcatggaaagagaaaaaagggagtgatattttaggcagaaggtaaaggttagcaaaggaaaaacaaaacctttgtaggaaagagcacagggaaatttgtgaatgtgagtcagatactataaatctgaattaagcatgctttcaaattcttgggcaaagttcatcattttcccccattcttggatgctagtctactgctccactattctcctgggcttttacattggtcttattctgggccaacatttgcctgagggaattcatggaaaatcagggtgattctggggccaatcagatgattcaggcttcctcaggacagatccaaggatttggtgtttgtaaggattccttcccgcccaaacctcctattggaacccggacagggcatgccatccatgagttggccctagaatgggactgagatggggaagtctggcacacgttagctgtaaaacactccctgagatcctcaatccagcagagatgtgaagtgaaatactaaagagagaacatttaatatataataattgaaatgcatgataggatatgcagttaatcctatatatctatatctatagctatagttgttgttgttgttagacagagtcttg

SEQ ID NO: 326850 - DNA, 975 bp, Homo Sapiens
tgcctgtattagcctaatgttttaatgaagaaacgcatagaaagcacttgctgcacccctggaatctcttgaatccaggaggtggaggctgcccccacccacacacacgaccttgatgccctagtcctcacccaggtcctctgacctcctctcctcttccctcccagtggtcacagcaggcccagctgtgcccaccctccctccaaacggctcagcccaggaaaataaggagccggcccatcctgcaggcaggtgccctctggatctcctgatgcgaagaagaaagaaacccatatggtgagggtccaggaggttcgctgtcattctgttgagtgacttagcttggagccaggaggtggaatgccctcctcccttgtttttcttccccaaggacttcacgtcctcctggccaaaacctcgccaggcatcttctcactcccattttcctggggctctgggcacagcctccatccttgggattggcttcccgggccagtgcaggtgtcggaagtgaagcttcaagggtccaggaccatcccagggtgaggtgaggctaggtgctgggttctatgacaatgagggtggcagtgctgactgcctggcccagcgtgttctcagccacagccttgtactccccgctgttcttcggggatacgctggggatggtgagggagcacacgcccagcaggtcagtgctgtacaccgcggggtttccttccaggctgcggtcattcttgaaccaggtgacgtggggcccggggcgaagccctgcacggcacagctcatgcagcactcgcagccctggggcagcaggtgggaccgcaggcccaccaggaaccggggcttctggctcaggtcgggctcccggtagcacggagccttcactgtgaacctgtcgcgctgccgggggatgcaccagggctggctggtgtccgagggtttgctggcccccagctcattcttgctgtgccgaat

SEQ ID NO: 326851 - DNA, 815 bp, Homo Sapiens
agtttaaagatagtatttctttatatttgtgtagttacaaggctttgagtatgatcaaaacgtttaaccaaaactaaagtatgtgcatactttatggtgttgaaagcaatgctactaaaaatagtacaacattttatgggattaagattgcaaattgctgcctaaattcagcttgcagttaaggcctaccttcagtaaactctcgttgtgtagtcagctccccaccaagcttatctcttgctgtttttccacttggctcctctgttgcagtcagtccaagccctaccagattttaaacaactggaggtcagagactgccctttgtaacctgagtggaactggtaaggcactggggcacccaagattttctaatgtgtttactgactttccacatgtttagtaatcaccttctgagcctatcttccaagcaagttgtaagacttgagaaaggagcagaggtcacagctggcaaggagcacagcatccctggatggttgacagagacaagctatcctccagatgaaatatttccaactacagatgagagtattgaaggccttccattcccctttgatatcagaatggtgagaatgtgggagacaccaccagttaaccctgccttcctgagtacagatacccatgaaaatatttaataagcgcagtgaccagacgagacctgtgctaagtatttgataggcatgctttcaatctcgtaactccctatgaggttatgttttacagatgaaaaagggaaaaggaagatactcatcagtggctagcttcctttcatcaccgaaccctcaagtccctggtcc

SEQ ID NO: 326852 - DNA, 747 bp, Homo Sapiens
ctttttttcctatccatactttgtgtgtttgctctttgtgtaaggaggaaataagtgcatgatttatttggcttctcaaaagcagattgtgaatgctcaggacggaatacaagagtctttccctaggcatatgatgacggtctagaccaagacaaatcctgaatgtgcttctaggaccatggcaggcacctgatgggtataaggttgaagtccttgcaacaggaggaaaaaagatctcccaatagaactggagaggaggaaaaattaaatccaaagaaatgaaatagaagttgtatttttgtcaaaagcaaataaaatttgtaagtacaatgaataaaaaaatagggctttaactagtgagctttgaacactctctcaaaaccatggaaaacttagaattagggaaaatgtggccagattgatgcttgtgcccaccccagctatatgaggaaagtcatgggaaaaaacactctagtgatcctcacctttcagaaatcctttacttttatagggtgtggcaactaagggactggaatacacatttgcttggagtctaatagaattggcttcataggaaaacctcgccccttccagctcctcctcctttgaagcaatctgagcctcaagttcctgtaaataaataagatctgcctggcagcattgttatgaggactaacagataaggtgagtaatgtaaaacagttagcagagggtctgccatgtagctcaagaaatcaaagttattat

SEQ ID NO: 326853 - DNA, 603 bp, Homo Sapiens
  misc_feature (461)..(461): n is a, c, g, or t
ttttcacttaaaacaatcaatttttaggtttattttttacttttaataagccagtactataagagcaccatttcagcacaacacaatcatttgtgaagtaaggggttttagttgagatctgtgaaaatagtttatatgggaaagaggtatgatggctcagagtgctgtcaagaacagctttctttctaaaatgaacctgtaactttccaacaaccttcaaatgcacagaaatcttagttatcattctctagcattagaagtggagctgggagaggctcaggaataccagtggtagccctggggcccagccaggggaagcgagagggtggcctttactatttgaatacagtttataactgtgaaggcaatattgctgtaagagagggaattgggagcattgtaaatctactctgtgcatcttccctttagggagatcttttacttatagggaaaatcagganaaatagccacaagccaaagcccggaaagctaaagactttaagaaaactttcaaagggagatggagactcttgtacaactcgagctttgatgaccttgaatgttcggtcccactgggtcatgatggcatttctggctccttcc

SEQ ID NO: 326854 - DNA, 1105 bp, Homo Sapiens
  misc_feature (22)..(22): n is a, c, g, or t
  misc_feature (72)..(72): n is a, c, g, or t
ccctgtaaactttccccaacancccttccaaaaggccaccagaaaatccttagttaatcaattcccctaacnattaaaaagtggaacctgggaagaggcctccaggaatacccagtggttagccctggggcccagcccagggaagcgaagagggtggccttttactatttgaatacagttttataactgtgaaggcaatattgctgtaagagaggaattggagcattgtaaatctactctgtgcatcttcccatttaggagatcttttacttataggaaaatcagaaaaatagccacaagcaaagccagaaagctaaagactttaagaaaactttcaaagggagatggagactcttgtacaactcgagctttgatgaccttgaatgttcggtcccactgggtcatgatggcatttctggctccttcccattttcctgggccagtcaagcggaactggtatggtgagcatgggccaaagaagacggtcagagccagatgtggatccgttaggagcatagagaacaggttgggttttgcattgatataggtcaggagttcatctatgtatgtgatataatctgattgtaaagccttgcagtagcacaagccaaaccaactgggcttgttttctttccttgcattaatttcctctatcatgacacttggtggtggtaacttatttacacctttcaggactcgaacagcccaccgagcttgtgtttctcctgtaggtatcatggaagcccaagggtttgaatgaaggccaataatggcccagggttggcttttgcagatgtgcagggaagatatacttgtacagtgaggcctggccatcttcaactttcactacagactcatcaaggaaggggaaagcaaatgtgtatccagtggcaaagacaatgatgtcaataggctcttcctttgaagtattgttaaatatgacagagttttcctttacctcttttatgcttggcctgatgaacactttcccagtgatgatgcgtcctgggagctcatcatttagcacaaactctttcagctgagtcctgtcttctggtattaagccgtaatttgcatgattgagccagttgtttatctttcgctc

SEQ ID NO: 326855 - DNA, 1226 bp, Homo Sapiens
  misc_feature (281)..(281): n is a, c, g, or t
  misc_feature (589)..(603): n is a, c, g, or t
  misc_feature (788)..(788): n is a, c, g, or t
  misc_feature (1186)..(1186): n is a, c, g, or t
ttttaagtcaaattactattccagttgtcatgctattggggaatgcaaaaggcaattttttagacacacaattacaacctacccctgtggtccaatgagaacccagccttcaaataaacaagcttctcattgttaacacagggttcaaaggcagggaggttggaggtgttttgcagggtatccagaattctgatcgctgaatactttagggcaaagagtaagatttcccacacctccccctaaatcttacaattccctgatgaggcaggaacatgggaaanaaaagatacaggttaaattacaaagcagaaaaatatgcccagctagaagctaaagacctggtctcaaaacactgaaccgaggagcactgattccagcaatcagactggggtctccacacttccaaccccctgaatgcttcctctctacagcaggcacggcttactactgagttgtgactaattatcccccaccacaaaagtggaatgaggaaggattattcaaaagacaaaggctaagagtggagggttggggagagaagcaaataaagcaagcccctttgctgggagggtccgtcacccagaacatnnnnnnnnnnnnnnngctggaactagggttgaaagagagccggccatatcagatcttcctcccacagagaactcacaagctaaaccaaagggaaaaaatagagttctgctttcatagatgcaaatggtttgaggtgctagaactttccaaacattcaggctgacactgaagtggtaagaagctgggcatttactccgagnaagcaattccgatcagactgtcgttccacaggaagaaatgggtgcatcaccaattgatatggctggaattttccatttggaagactcaacgccaggacaggaaggaggcgtggggaagagagaatgtcctgtcctggggaagagagaatgttccgtggtctgggactgtgacaacgcaaaaggcccaaaaagacagcctcatgtctcgaaccctagtataaggagaagattttaggagagttccacgttaggaggagaggacttaggatgggagctagatagaatggaaaagattatagttcagagttaaattataggggcttggagacgaagaaaggtagttgggtttaaatgagaatattaacacatttagccatctgattttgaaccccgttaanaatttcatttacaccgcatctgtaaagaaagcctgtgaca

SEQ ID NO: 326856 - DNA, 671 bp, Homo Sapiens
  misc_feature (92)..(117): n is a, c, g, or t
tggtttctccaaggaaatacagaccaattctgtatatgtattaagcatgtcattttgaaagtttatgaatttagaaattaaaagtcaaatgnnnnnnnnnnnnnnnnnnnnnnnnnnaaatgaccttaggattttataacagtttagaagctccagatttgaaatctgcagtaagtgtattttggcaatacctaagatagtggaaagcagcacgatagctattcatctggaaagttatgcaggaatataaacgtgtaggggaggttagaccattcctgggaaagaggagagtttagttgagtcagcctcaaagggcggggcaaatttgccatttcataacaaagttgcagatcagaacaacctcgcagaggaaccctgaaaaggctgatgtattagccatctggtggtcaggttgggcattgcagtcattcacttagctgatacccttattaggttttgtttaacttggaatttaaattagttctccatttttgtctaaaaaagcctattcctagttttaacatttttggcatttttgaggggtatggcaggtctggtcactgtaatttattgttgtattgctcatgatgatcctgaaaaaaacttacattagtgaacttggacaaagaagctaaaaagtacttggagagagaaatggagtttgcttttta

SEQ ID NO: 326857 - DNA, 740 bp, Homo Sapiens
tctttagcgttttctttatttttgatttcccttttgaatttattttcatgaaatgggtgaaggtatacagaagttggcttcagagctggtcatctcggataaacctgttgccctctgagtttttcccatagtaaacgtagcgacacttccccaggacaccttggtgactggtgagttccctggaagcagaaggcaagggcgtgtagtggcgctccggggagctggcaacgtcctcactagaagccttgggcttcaccaccttcatgaagactcctctgaccaacgcctcctctcgttcttgtctggttactttctgggcatccagaaatttcaagttgggccagcttgtacagaacaaagcatctgtatctcttgtagtcttcctcatccttttccaagctgaccagctcgttggggacaggccacgttgcccagcagactgaggttctccagagctggtgtcacttctgccaagtgatccagcaggttctccaaatcagtgattcggttcttgttgagggttaaggtatgcagtctgggtaaccctggcaacacaaggtcgtcccccagctgattgttgtccaagatgagttcctccaggctcctgaatgcgctcagtccttccagtgacctcagaaggttaaagctcagatcaagcctctttgcgaaatgtccacagtccctgccaaggtgctctggaatttctctgcagtcctggcctatgtaggacacttgagttc

SEQ ID NO: 326858 - DNA, 716 bp, Homo Sapiens
ggacacacagtgcacaacgatttagttaatacaagcatgtcttgtgtcaggggccacttacggttgtgatagttttagagaagttccctccccacaccctgcccccccaccaagaacataggtaaaaataatctaatttggaaattatttaatgggaggaagtaatagtaatattatcatcatcccactgtatttcgtgaaaagggctaatctcaagtgcctcctttgtgcaaatgagccagactcgaagggtacaatcagaaaacagctttaatctttcctagcttggcccctgagattggctatgtgagaacagtctttctcaggctttttggatgatgtaagaaattaaagctttttggtctctttcaaacagtagagtgacctagctaattctaggcctaaaacagtctcatttcagtaattaatgttcagtcttaggtactgatcaaaattctgttactaatggagatgagagcttctcccctgctctaacccaggcctgtttcaggtaggaatccagcaagtagaacagggtgtggctggacttttctctattcatggctctgttcccagattctgacctttctgggattgaagggggaagtggagggagataagagagttcggggttcgtaatgcagtgatccttgtttctttgagcctaggtttacactgactgctcgttcttcttcctgggaatcttcgagtttttc

SEQ ID NO: 326859 - DNA, 553 bp, Homo Sapiens
  misc_feature (75)..(138): n is a, c, g, or t
  misc_feature (199)..(208): n is a, c, g, or t
  misc_feature (233)..(233): n is a, c, g, or t
  misc_feature (284)..(336): n is a, c, g, or t
  misc_feature (361)..(380): n is a, c, g, or t
tagtacatgtgtagtccatgtatgcatgtgtgaatccaagcaaacattgtataaaaataataatggaaagaacannnnnnnnnnnnnnnnnnnnnnnnnnnnnnnnnnnnnnnnnnnnnnnnnnnnnnnnnnnnnnnnatcacttgaggcctggagtttgaaatcggcctgggagatgtaccaagaccccatctgtacnnnnnnnnnntttagccagatgcgatggtataatncctgtgaggcccagctacccacgaaattgaggtgggagattgcttgagctnnnnnnnnnnnnnnnnnnnnnnnnnnnnnnnnnnnnnnnnnnnnnnnnnnnnnttgacaaaatgagaccccatctctnnnnnnnnnnnnnnnnnnnngaacagtctactaacaaaacgaaaatactggacgaataatcctctctaagttgggagaaggataattagagttacagtgttctgggtctttttattttggggagaggggttaaaatattgcttaacattaggtcttcttatgttgaaattgcattaaaagtgattagccattt

SEQ ID NO: 326860 - DNA, 584 bp, Homo Sapiens
  misc_feature (54)..(76): n is a, c, g, or t
  misc_feature (89)..(121): n is a, c, g, or t
  misc_feature (366)..(488): n is a, c, g, or t
  misc_feature (498)..(536): n is a, c, g, or t
  misc_feature (548)..(548): n is a, c, g, or t
tgagatggagttttgcactccagccggggcaacaagagcaaaactcggtctccnnnnnnnnnnnnnnnnnnnnnnngtacaggctgttnnnnnnnnnnnnnnnnnnnnnnnnnnnnnnnnnaagtgctaggattacaggtgtgagccaccgcgcccagtgactgtaaatgttttctaaacattctttacatttgtttctattataactattttcccctcagagagcaccagaattgcagaattcacagaacaaaataataagaaataaagatttcttatactggatatgacttttaacctgggattctctaaaaaccaacttatactctgctctatatcttaatatgtaaaattaagaaatatcannnnnnnnnnnnnnnnnnnnnnnnnnnnnnnnnnnnnnnnnnnnnnnnnnnnnnnnnnnnnnnnnnnnnnnnnnnnnnnnnnnnnnnnnnnnnnnnnnnnnnnnnnnnnnnnnnnnnnnnnnnaggaaagacnnnnnnnnnnnnnnnnnnnnnnnnnnnnnnnnnnnnnnncagatctaacanttagcaataaagagaatacctatttaaaatacttta

SEQ ID NO: 326861 - DNA, 727 bp, Homo Sapiens
  misc_feature (548)..(599): n is a, c, g, or t
ttttttgaacagcgaaagagagacttttaatcgacagtcttgcaagatcaggtgtctggagtgcaggtacacctgggacagtttcaacaaactatttcttccctagtgtgcaagtcccttccccaattcctcattagctgagtactacggggttatagtcttcctgggcatcacctattggtagttgtattaagacttcaggtatgttctttagggtctttttgctgcattttttgctgcattttgttgcagccacccataatacatggcaactgtctcaagactctgagcatttgacttacggccttaagtgactgcacttaggtgatggcaagctagcccaaactaaattctttggtgaggtggggaggggggtcattgagggggccctgaccagtaggctcctggacactgggtcaaagggaaagcaggaaggaggggattgtggcttagtatattttgcttctttatctctttgtttccatgtggcctgcttaaacatattctaaggcacttatgaaaatgaaccttcttcacatgtaagttannnnnnnnnnnnnnnnnnnnnnnnnnnnnnnnnnnnnnnnnnnnnnnnnnnnacttacatatctttgtttattaactgttctggaagttttttactttcttcattataggaggagaagtttagtttggcttttaataatagtaagtcattctgttgggacattaggggcatttgtttact

SEQ ID NO: 326862 - DNA, 684 bp, Homo Sapiens
  misc_feature (299)..(299): n is a, c, g, or t
  misc_feature (320)..(320): n is a, c, g, or t
ggccgcttaattaaaactgcctctctttgcagatgtcattttaaatgctatcttaatctaaccttatcatctgagctgctaaatctttcaccccaaaaagttaccacatccatctacaatcatttgcagtggcccttcagctccttcccaaccatttctcagtgaatagactcaaatgttgggtgaaactcactgtaaacgaacatggggtatatctgtgacggaacttctgaaagccatttgtctaaataattctgtctttatacacacatgcacaggtgcatgccacagagaggacnagggaaacggggaggctgtcnatggctatgatccaggctgaacaggaaatctataagatgagaaggtgagaaaactgtcaggaaatccacatttcccagaaagccgggcactaatgatgctgcccattcgacttttgtaacagctcctcgatttacgaagtgttttctccatgggagacctggtaataaaacagttggctgatcgctaatgtgtcaggacttgcccacccagcccagcagcagccttctccagccaggaaatggttttccccacccctgcaacgctggacctgggctcctgctgccgacctgctgctctggcagatctgctgggagactcgctaagaaggagccctaaggagctaccacgtggctcaccccccag

SEQ ID NO: 326863 - DNA, 764 bp, Homo Sapiens
  misc_feature (13)..(13): n is a, c, g, or t
  misc_feature (26)..(26): n is a, c, g, or t
  misc_feature (72)..(72): n is a, c, g, or t
  misc_feature (94)..(94): n is a, c, g, or t
  misc_feature (744)..(744): n is a, c, g, or t
  misc_feature (748)..(748): n is a, c, g, or t
gagttattatgtnttagcaagaaaantttaaattaagagttgcaaggaagtgcatttgttattttataggtnaggttgttaggaaagtgaaaancagtggtgatcaatagatacttaattagttacatccaggaatttggatctaataaaatgtcagttcattcagataagggttggggactaacctaatgcttttgttcagttcatcactaaatatgaaggttagtcccatttcaaacttatttttataaactggatgatcttctacctccccaatttccatcttttaaaaaatgtaatgtgagattaatacagaagatgatatgtaacatttgcaagttttgaagtaaaatactataaaaagcacccatgaaactaccacccaacccaagaagcacatcacatcaatgctttgaagtcctaattcggtcctctctcttggccccagtctcatccttcctgcccatccctgaggtcgtcacagtctgagcttggtaattatcagcaccttgctttgtcttctctcagggattttgagtgtgtgtattcccaaacaatacgttgtttagtttggtttatttttctttacaaatatggtatcatgtatcatgccatatgtagtcttttaaaaaatgctaacattgatttaatatggatttaacataagatagcatcatagcatagtacttaaagcagtctattcatgaatccatgtaattctgcagatggcctaacttttatttnaaanatttcaaacttccaga

SEQ ID NO: 326864 - DNA, 617 bp, Homo Sapiens
agttgggagagactaggggtggggcaagttggttttattttggtaggggaatagttgttgtagaatcagtaattcactttacgtgttttaaatttgagatacttcagatacatcccagtggagaaattaaatagccagtttgagttcagaagagagttaaatatcaagtttgatttcagaggagaaactgagttaaaccaattttgacgtcagcatatagatattatttaaagtttcagaaataaatgaggatacttagggagagaagagagttctcgaccaagctcgcaggaattgtatttagagttcaagtagaatttagaattgtatttagaattgtatttagagttcaattcaatgacttgaattgaattatgaaaaaagcttcctaatcaggaagatcatttctacagaagagactatttcaaaaaagagggcattttaaccaagttgaatgctattgagaagctgagtgaaatgaagacataaaaaagtatctattagattgtcagcatgatggtcaccgttaaccttgacaagaacctgtaggttgagtggtaggacctaagattcagcaaatccctttaaagcctgacttggccaggtgcgatggctca

SEQ ID NO: 326865 - DNA, 382 bp, Homo Sapiens
agggggaaaagcccaggcaaggaggagtggactctgtctatggtttcccagtccctgcaccagttgcctatggagggcagggcagctccagccctggggccagtggagggccagccagagccagccagcacagtcagctagtgcaagtagtcatcaactctggcaaaggagcaagaacccaggcctgctcgggccatgagccggagacactcagatgcctggcccagggcgagcatcagagggggctgctttggcaggttctgggactctaaaatggcgctgttgagggcagcacacacaggttccctctggatggggtcaagctgctggccaactgggcagctccaggggtctgagtaatgccagcaggctgaaggcatcc

SEQ ID NO: 326866 - DNA, 383 bp, Homo Sapiens
  misc_feature (13)..(13): n is a, c, g, or t
aggtttattaatnatgcattataggacttaaaattttttgatgcttaattttatgtattttgatatgattaaatgtatgtaaaaacaattttaaagacaaattttcacatcatccataattttaaaatgcctattgtgatcaactttctttgaatccttgacttaatctgtatatcaacatgtattaatcatttatgattttaatatagtttttgtattatatttaatattgcaaacttttgtgttactttatgactgcacattttgttgggatcagtgtaccaatgtttacattaatcctttattagggatttttttctattttagggggtgttgttattcagtaaataggctttgtacacttgggatttttttccctcttt

SEQ ID NO: 326867 - DNA, 938 bp, Homo Sapiens
  misc_feature (355)..(355): n is a, c, g, or t
cctgttttccctagggtgacctggccggggtaacaaacacttgttctctaattccacggtcagccttgacttaattgaggtacttgatttccaacttcctgtcttgctgccacagataatcactgatgaaaccaaacaggcaacaccttttggtggtcctgtggagagcgctgccccgtctgggtcttaggaaggcaattgaatatgaatgttctcccgagtgcttgtggaaaagagatggtgttggccactttttagacgaagagaaatgagtactagtgaacactaatcatagtgactaaacagtaaacggctcccatttgttgttcggctaaagcactggattcttcatttntccatcccagcctgtcctgctctggcctgccctgtgctcaggaagctggcggtccccctcagtggatcttcacccacagggacaacctgctgcagaccgggtaggagggaggcaggggcctcttcccctctccttccttgcctggccccacacccaccagtgttggtttcactctgtggctacgattcttcctgggtgccctttccattgcacaactcctctaggctctacgaacagaacttctccccgcccccaagcctcttagggtgagacatgttgtcggtctgccattgttgctggtccctaaatagcagcaccctttgaaggatccttgaaccatgaccacaccgcaacaaagagtccttcatcaaactcgcttccaaatcccctcccaagaacaccttcagtttcctgcaagaaccctgactgctgaagccggattttgactaagcttctaccttgtaaaccgtgactgtgggattggggtcgaggcgcaatcagaggttgtataaggcactagatcaaggctgcctgtctgtcaggagtgtctgctttattcagtagtaaatgtgaattgtttttc

SEQ ID NO: 326868 - DNA, 621 bp, Homo Sapiens
gtgtgggccatcgtgtctggcctgggcccttttggactctgctctggaatagtaatgcttgcggtgctctaagccgctgggcttgcagtaatctgttactgtggccagaggaaccgatacaggaagcttcaggaagtcagtttgccttgctcctgaggcctgggtggaacaggtccagtgctgagctccggctacacggcctgtgcaaacgaggccccacgcatcagccctggggctgcagacccgaccctggggggctctgggcctccaggtcagacctcccctcctgggaagccacaccgggccaggcctgcgaccacgctatctccggtttacctcatgcccaaggggaacgcttggaaaacgctctggaaattgtctttgggagccttttaataatgtggccagcttatcatgacaagcgtctatgagaaataaaatgcattctgcacatgacagatgatgaactacccgaaatatctcgtgagaagctctggcaggaacagcagggtgtctggattcttaagcacaacacattcagcagccagacccagaaactcaaaggcagcgttgggaagccactgcacgtttgtaaggagtcaggttgtccacacaatggcg

SEQ ID NO: 326869 - DNA, 698 bp, Homo Sapiens
taaatttcctctacattatcaaggctctttttattttgaataccgttttccaaatttcattttttctttgactcataaaatctagtgttttgaaaacttcttatatggagctttcttttgatttttaatatgaaataactactatgtatttgtttgagacctcctgtgtatctcgttctgtactaggatgctatggtagactgaaaggaaatgtgacattttctaccggccctcaaagaattagtcatttaggtggggagaaaaggtagttgatatgatgatagaaaaccaattgtaagtattaagggatattcaatgacagttggatgtctttgatttttttccattcagtcctaatttcatgtattccttcatgctatcatattgtataagttgtgggttcagattcctagttgaaaagatgcagtccctgtcagatgtagaaatttacctgcgggtaagattgtgggtcagtgtggttagggaatatcacagagaatgtacagttttctaggtcatcctttgaaaagtcagctgacttagaaaaggccacgcggagatcaaggaccttgtagacattgtttggctctgtaccaagggctggtttggtgtctggaggggccctgaagttaatgggagaggccactgtctgctagtaaaactagcaaccagatgagaattcttgattctttttcagc

SEQ ID NO: 326870 - DNA, 640 bp, Homo Sapiens
ggggacataagaaaatttattaaaatttaaaggtaaaaacatagtttcaaaagatttagtcatatgaaaggtgtgatagagaatggatgctttcttgaaattcaaaatcacatccaagagtatcactttcagaatgttctagtggactggatttacttttatttgtcttggatgaaacagtcactattctattttctttcttgacagaaacgtattttttcaaagacctacttttaattggttcattaaccaaagaactagtttccctagtttctttgcttttctggttttcaggacagtcagatcaggaatgcaggtcctttccagggtgttgcttatcagagtgttttttggtatattcacctgttttggtctttttctctgaagaagatctgctatttctggacaactcctcttcttttctttgacttccagttccagaagtcgcatctggtgaaggagagcacattctagcaatgaatccttcaaaagactcctgccgctgctcagtagctgggactcctaggttgttgctggaagttcctaagccctctggagtagaaactgggacaggaaaggagtcgagaggcaaaggaattctagcatcacctgtaattttctgaaactggatattttgcat

SEQ ID NO: 326871 - DNA, 882 bp, Homo Sapiens
  misc_feature (154)..(154): n is a, c, g, or t
gaatacgtcaccaatctctaaaaaccaagcggtttctttcatgcataaatctcacttcccacttctcttgagacgtcggaagctctggctgtgcgggtgtttacgtgctgcggcaacaatgggcagaagctgagcaggggccgccccagggtgnaggcctgccgggggtgacgacatctgtcacccgtgctcactgcctctgccttgggtccagccccgtccccccttcccatccctgcggcctcttcacagctgtcctgcctccggtccccacgcccacccctgcctgctccaggccctcccctgctagacatcctgtcttggctcccttctgcctgcagaagaaatccgggcgcctcagcctggtgttcaaaggccttcgccatcgcccctgctctccctttcacagcctctcccctgggctccttttatggccccttcagcctagtcccagtgacaccttctctattcctctccggccccaagaccttggttcacactgtgtcccgacaggagagcctggaagggtgggcacgcaaccaggctcctccaatcagggcattccgtttccttgactgcaatgattgattggttctggggtgggcacgggacccgaccccggccaataagaattgaacctgagacttttgctggagctctggagaaggagccactcttgtgcctcgggagtggctaaactggtgagatgttagcttggagctgctggtggccgtttcaccactgtgaagacagagaacttgcctgagaatgaagcctccacagaggaaagaagagccaggaaagggagataggtcatgggcagcttcttttgagaaccaagactggacccacaggaattcctcatcccctctcccctctaaa

SEQ ID NO: 326872 - DNA, 850 bp, Homo Sapiens
  misc_feature (469)..(589): n is a, c, g, or t
  misc_feature (762)..(762): n is a, c, g, or t
aaataaaacattggggaatctctccaggacattgggagtgggcaaagattttttgtgtaatacctgacaggcaaccaaagcaaaagtggacaagtgggatcacatcaagttaaaaatctgtattgcaaaggaaacaacaaagtgaagagacaacccatagaatgggaaagaatatttgcaaactatccatctgtattaggccattcttgaagtactataaagaaatacgtgagactgggtaatttataaagaagaggtttaattggctcacagttttgcaggctgtacagggaagcatgggtgctaacatctgatcagcttgtagggaggcgtcaggaagcttccaaccattgtggaaggcaaaaggggaataagtatctcacatggccaggagcaagggcaaagagagggggagggaggtgccacacacttaaccagatcttgtgagtactcaggtcttgtgagggtnnnnnnnnnnnnnnnnnnnnnnnnnnnnnnnnnnnnnnnnnnnnnnnnnnnnnnnnnnnnnnnnnnnnnnnnnnnnnnnnnnnnnnnnnnnnnnnnnnnnnnnnnnnnnnnnnnnnnnnnnaataatttcaatgtttgaagactcattattaaaataatagcagtttctataaatttaatatttcaataaaactcccaatatttattcttaacactggaaaaacttttccaaaatgcatatggcagaaatatgggcgttgatgaaaggacagcatcaattaatgagggatcctncccccttgacgaaaataccttccaccaagacccacctttaatgctgaggattacatctcaaaatgagatttgggcagggacaaatatc

SEQ ID NO: 326873 - DNA, 560 bp, Homo Sapiens
  misc_feature (57)..(171): n is a, c, g, or t
  misc_feature (420)..(420): n is a, c, g, or t
  misc_feature (496)..(496): n is a, c, g, or t
  misc_feature (539)..(539): n is a, c, g, or t
tatagaattgttatagttcctgatatagttatagttacagctcctgatatagctagnnnnnnnnnnnnnnnnnnnnnnnnnnnnnnnnnnnnnnnnnnnnnnnnnnnnnnnnnnnnnnnnnnnnnnnnnnnnnnnnnnnnnnnnnnnnnnnnnnnnnnnnnnnnnnnnnnntgatgctgtcctttcatcaacgcccatatttctgccatatgcattttggaaaagtttttccagtgttaagaataaatattgggagttttattgaaatattaaatttatagaaactgctattattttaataatgagtcttcaaacattgaaattatttttaaatttttgtgggtacaaataggtgtatatgtttatgggggtacatgagatattttggatacagtcatggaaatgtatatggaacacatncagggttaaatgggggtatccctggacctcaaggcaacccttcacaagacctgagtacttcacaagatctgggttnaagtgtgtgggcacctccctccccctctctttggcccttgctncccgccctgtgaggtactttt

SEQ ID NO: 326874 - DNA, 672 bp, Homo Sapiens
  misc_feature (123)..(123): n is a, c, g, or t
ctccttaaatgacagaccttttcttagatgccatttctctatgtctgcgcttaagacaagaatttttttcctcctagttgttggttaatgtctgcaaatgtgagagcatgttaacatgacaancaacaaggaatttgaaataaacttaaatgaaacagtgtcttttctccccctactctcccccaccccccatggtggaaatgataatatccttaccatctgcacacttgcaggctgtgagtgggcagaaaaccagctggagatgcagcccatggcagggatacagatcctcagcttctgggaggtcctagaagctcacaatgccacccagctattggactatcatctctcatcatgtatattcaaagggaaaatgtacaacatttcttctaaactattttgtacagagaacatctccactatcatcaaaaagaggctgatgtgtagtagggagaaagtgttctggactaagtgtcaggaaacctcagtgcttcaggttctcttgcaattatgagactggttctgttacttcacctctctggagtttatttttcttatttgtatagtgaaggcctccagctttagcatctcataattttgttgtggaaaataaatacgtgcagaattaagagaataatgaaaagagtttgagggtatctcctctgccttaat

SEQ ID NO: 326875 - DNA, 1070 bp, Homo Sapiens
  misc_feature (159)..(203): n is a, c, g, or t
atagaccatctgtatttcttctgtaaattgccagtttcttgactggattgtttaccttttactcacaggtttgtatattctggaacattctttgtctacctatggcaaatagattctcccagttggccacttttttacgacatcatttgtcacaaagannnnnnnnnnnnnnnnnnnnnnnnnnnnnnnnnnnnnnnnnnnnnctggcatctaaatcttctaagtagcttagaaaggccttccccatctgatggttactaaaaatattattctatgacagtagacacaaattggtttgtttgccctatgtgttatttctcctcttctctcccagggctgactgatccaaacacagtcatacctgactgatactgagccaatcagattctctcccaggattttgaaaactaggaagaagcaggggcttccctagaagggccccaaagccaccaaggtcggctctacctgagacttggtactccaacttaccttctgattctgccagctcctccagtgtcttcccaaatcaatagttctgtttgtttttgcttaatttagttgaggtgacttctcttgcttttaactagaggaccttaactgatttagcaattactatcagagtgggttgtagttgagagactgctaggggaaacgtgggtgatgttactgggttccagatggagggaaagaaactgaacaacccaattgcccaggatgggaaaagagcaagctgcctcacagttccatagctgcacaactactattttagttaattgcttgccaattacctgtgatgtgttcaagctggtggtaaacgagtaggggtgtcccaattaaaaggagaggggaaatgttgaaaccaaggagtaggattacttctgacaatattagagaacaaaacaagaaataacccagctccaatatcaaatgctcaccttgaaatgaaaacccaagactcagggcctttacattactatatatgtattttgctaagtgaaatgttaaggtttccaaattttgcgagttgctgaattttaatgccacagaattcacatctttcctgggttgct

SEQ ID NO: 326876 - DNA, 462 bp, Homo Sapiens
  misc_feature (365)..(365): n is a, c, g, or t
  misc_feature (385)..(385): n is a, c, g, or t
  misc_feature (390)..(390): n is a, c, g, or t
  misc_feature (399)..(399): n is a, c, g, or t
aatttaaaaaagtgagattaatagttatttttggtaaagaagagaattattattagaaaaggcatgtatagctctcttggggtagctgctaaatttctttttcatttttgccttctactgtattaagctatgcatttgttttgtgtggttttctttgctatacttaatcattaaaaaattcttgatacctttgtcaagtaagtaccatgaaattttaaagtaagttataaaagaattgtcactggtcaggtgcagtgggctcatgcctgtgaatcccagcactttggggattagccctggcttggatgactcttgcttatagtccccagttacttcagggagggcctagggcagggagggttgcnttgagctccaggaagttttnagggnttttagttnagggtatgatccctaccccagtggcacttttagcccgggggttgaccagtggccaagaccttg

SEQ ID NO: 326877 - DNA, 143 bp, Homo Sapiens
aagcccatggtctttcttatcagccctgtggactttcttatctcttcttctcactcacaaccaattttccctttttgctggtggcccatcctggcagccagcagagcccaccgccagctgatcagtcagttactggatatctt

SEQ ID NO: 326878 - DNA, 460 bp, Homo Sapiens
atgagccaccgtgcccggccgcttcgcatttttcttttgcaggttgcatgccagccaatattcctctgtgctgggaagggaaagtttgaggatgtatcaagaccatagcagtggatctcactgctcttgcctactcagggctttatctacacattgatagcccctcagaggaaaggcaccagccgaagagtcgacactggctctgggcttggatgctgcctctgataaacgctgggcactctgaccctgaagcccagggagggagtgcttggcagctgcctgggcacactcccctcagtccagttgccaggcgaaattatacagtggatggcagctccacagagatgctaaagtttgaggtctaagtgtcagagagagctgacaatttttatgaggaaagtgaacaacaacaggtgtttatcagtacctgagaattatcatctagtttaattaagcggcc

SEQ ID NO: 326879 - DNA, 790 bp, Homo Sapiens
ctggaagaacactggtatgtcacttctttatactatagtttcttgaggacagagaccatgtcatcatttttctactcttaacacagtgtctagcaatagttggtattccctgagtggctttttagttgaatacacagtgagggcatgtatccgtgaaagaatgaagcagaagctatactgtataatgaaattatgttcattgtaaataatttctgacccactattaacactataggaaggaatacccaaatggacattcttatattccaagaggaactgatcattagtgctgaacttccacttggtctttggaagagagtcatcacacttttccaacctcagcatccagttccctaaggatacattgagcacaaatactaaccaaaagtctgttactcaaaggagaagctttcctggctgccgccccctcatctagtgtatcattgtatttagctttatcaagggcatggtaggatgcattaagcactaaggttttggattgttgatattatgttaatatctgtatagacttcgaccttggagagtgagagcaggaagtcagcacagggttgaccgtatatcccttactatcatgtaacctccataggatgaccaactcatttcagtttgcctggaactttcctggttttagcactgaatgtcccaagtcctggtaactccttcaaactcaggcaaactgagagggtttgtcttaatcctctaccctaagtctgtgcacaggagcaggggaattcaaactagggtttggtagaaatgcaaatattgggta

SEQ ID NO: 326880 - DNA, 961 bp, Homo Sapiens
  misc_feature (768)..(899): n is a, c, g, or t
tctttttgatgattaaaaaacaaactaggtttgggataaaattcaagatgccttccttactccaaatttgttcttagtcaacagagaatagaggccaatgccttgaaaccaaacatatttttatgaaaccaaacatcataaaacatgagtgcgcatacccttacatcactcaggcccgctaagattaatagacatgctgaaagattttgcttcacacttgctcaactgaacaaatacatcttttcacaaaacaagtcaaaatcttggccattcccaaatgtctaaaatccaaggactctttgctttcaaactcctcaatgagaaagcacagaaggagagaattcagatcattaaccaggtgtttaaggttggcaccaggaagagaaggagctagagttgtacattgaggaaccaaaaagataagaaacaaaagaggaggaggaggaagagaaaatacatgaagagaaatattcaaagacactcttttacattatcaattatttatttctttaagaaaaaggacatttattttcatccacacaagatattgttcgttagatgagtagagcaagtttgttttgtttttatgtagcatttattgacttgtttctaagaccaaaggaatatgcttatttcccattgaaaaatagttggaaaatacaatagaaataaaattagaaaatacaaatcacccataacctctctgtatagcaatatggctacattaatattttggtattgggccttctcttttttttatttgatgcnnnnnnnnnnnnnnnnnnnnnnnnnnnnnnnnnnnnnnnnnnnnnnnnnnnnnnnnnnnnnnnnnnnnnnnnnnnnnnnnnnnnnnnnnnnnnnnnnnnnnnnnnnnnnnnnnnnnnnnnnnnnnnnnnnnntatgtattatttttaaactggaataaatgttacaaaccagagacactatttggtagcctcct

SEQ ID NO: 326881 - DNA, 736 bp, Homo Sapiens
  misc_feature (328)..(328): n is a, c, g, or t
atatggtttgctcagatgtcagtacaccctgaggtgtctgcttagatcaaatctgtcatcagagaaacgcctcgttagagcagcaagcatttgctgagttcttgctatatgccaggcactgtactaggcacttttcatgcattagctcgcttagtcctcacaaaccctgaggtagacaccattattcaacagatgaggaaacagtgagtttaagtaatttggcaaagatcaaaaggctagtatgatgaatctgggatctgaggtcaggccttggggcaaggtcaaggcccttaacttgcataaagctgtgctggcctgccctctagtnaagtacttatgggcaatgtctctgcttcttcctgggctgtcatcccctcatccctccgccccactgtcagagaaaaatgctcccatttagtctctttctagccagcctgtcagaaggcagaaatactggcatggttttggaactcaaggcctctgacaatgccaaggccttctatgagctccaaagttcctcctatgaggtttcaacctctgcctcccaagttggcatacccagatctctatctgcttggcaggttggaggtgatctcaagccctgcttctgcattgtacagcttcttctttcttggtcctgggctcaagaacaagggagtcaggttaagggtatttgtttctaattctctttgcccaagaacagaaagtattttaacctggataccaggaggtaaga

SEQ ID NO: 326882 - DNA, 658 bp, Homo Sapiens
  misc_feature (424)..(554): n is a, c, g, or t
aatgattttcacagaaatttgactacatccctaactgaaagtgttgacaggaatataaactatactgaaagaggagtgttctttagtgtaaattcctggaccccggattccatgtcctttatctacaaggctttggaaaggaacataaggacaatgttcataggtggctctcagttgtcacaaaagcacgtctccagccccttagcatcttacttcttgtcatttccttatgcgaggcttggctgggcaatgacctcagctgacctcaaccaggatgggcacggtgacctcgtggtgggcgcaccaggctacagccgccccggccacatccacatcgggcgcgtgtacctcatctacggcaatgacctgggcctgccacctgttgacctggacctggacaaggaggcccacaggatccttgaannnnnnnnnnnnnnnnnnnnnnnnnnnnnnnnnnnnnnnnnnnnnnnnnnnnnnnnnnnnnnnnnnnnnnnnnnnnnnnnnnnnnnnnnnnnnnnnnnnnnnnnnnnnnnnnnnnnnnnnnnnnnnnnnnnccctcaggtcggtttggctcggccttggctgtgttggactttaacgtggacggcgtgcctgacctggccgtgggagctccctcggtgggctccgagcagctcac

SEQ ID NO: 326883 - DNA, 564 bp, Homo Sapiens
actacagtcactgtttaatcatcttttgaaaaactgttaagaactagagatgtaatgaaaataagacttagtttccactctcaaggagactgaagttttagggagcaggggaacatagaaaatagatcatcataaaactaggtgatggaagtatgttgcagagtattcctggaaaaacagacaatacagcaaaatcttggaagataagcaacattaggtcagattaaaggtagagtggtggatgccctgtcacaacacagcctgtgagaaagcatggcaggagaagagtgtgagccagggcgtatgcgacagaggggtggctgtttatttaaactcctgtgctatcctaatgttaagcaggacgcagaagccaggagtcaatggtggcatgtacctcattcatcctcaagtctattattaatcttgtatggtataccgcaaataggaggtaggctataaatatctgatgattgacaaaggtagccatttgaaaaatgattctatacaaatcaacacaccaaatggacacacattatcattttcaggcaagacagcgtggctctt

SEQ ID NO: 326884 - DNA, 430 bp, Homo Sapiens
  misc_feature (336)..(336): n is a, c, g, or t
acactttttttacctgttaaaattatttaagcctgacccaaataatttttaaactttttattctatcatgcctatagacagcttcatatattaaccatttctgctttcgtggtcctttgagaatggtatcttagtatgtaagtgcaataaataaacaacttttaaaggaataaagaaaattgatataaattagtctggaaaatctagtctgtagctgggcagccaggtgcccccagctaaacctcaagggatggttctgttaaagtgaagaaaagaagaatagtgtgtaacagaagcccgctctgtggctcccggttaacagctgtggcccacccnaatctgccttgtgcctccttcttctcacacaggacacactcatcccagccccaagcaagaaagaccaaagtcccttgccaggcgcggtggctca

SEQ ID NO: 326885 - DNA, 538 bp, Homo Sapiens
  misc_feature (164)..(189): n is a, c, g, or t
  misc_feature (458)..(493): n is a, c, g, or t
cttgccaagagaccctcattttgtttgttggggagcaatatgccagacccagatgatgaatcaaggttggttttaagccagtgctcctaaattctgatgtgcataaattagaattagactctctgggggtgaagccagacgttgaagaatccctctggttctgnnnnnnnnnnnnnnnnnnnnnnnnnnatgtgaatgagtcagtgactacaatccttgttccacattcttagcctgccttgcagcgaggagtggccacgtgccccagttctagccgctgaaatataaggggagagtttgcttggggaaggaggatttgaggcaagttttgctttctagacaaaaaggaaatatgtgcctgacactatatttcttcttcctactgtgaacatgggcctgctctctggagcagtagcagccatcttgcaatgccaagtttggtttgattttttgagggnnnnnnnnnnnnnnnnnnnnnnnnnnnnnnnnnnnnagtcagcaaaatcccaatttgttttagttactgtaagttagaatc

SEQ ID NO: 326886 - DNA, 894 bp, Homo Sapiens
  misc_feature (452)..(452): n is a, c, g, or t
  misc_feature (483)..(483): n is a, c, g, or t
  misc_feature (497)..(497): n is a, c, g, or t
  misc_feature (547)..(547): n is a, c, g, or t
tggacccagcctaattggtgtgtttgtctttcctcgttattcccagctggacagagccgtttgaacaacaaatgcaaaaagcctggatctctccaccgcagtgtctatttttgcaaacctgcttggtgcccctgctattagctgcatgcacatgtttcccggctccagccacatgcccgtaagcacttaattgtgggtgcagttagtcaaggcgggcggctctctgcagatttcaggggtgagggaacctaattacacctgcaattgagtgctttagcaggggacaaaagctgcctgttcagctaattgcaggcaccaaaattgcccccacaggacggaatccctggtacaggcttttcgagccaaggctatgagttgtaataaagaatggataactcgaaattataacggtggggggtgcttgttttggcctaaaggattcagctttttgncaatagtcaattacacctctgggttgttttntctcccactgttgngaggccgttctgtggctgggtttgttttttcaattaagcgcctgcgttcnacacagagacatgtcacgttgaaagggaaatttggggttaatcacctcctctcacctatctgctcactgactagagtgattcaccaggctcacccagaacaggcggatggctgccctgtcccctccctgaagtccttagtccagtgtgttcatttagttagtttgctactgagctcccatgtgggcagggcattgctctaggggtcatggcagggaacaaaggagagtccttgccctcgtggggcctgtgacctggtgagaggttagactgtgccgcttctcttgttatgatttcctcttctctgcagacagctgcaggctcgtcttttattttatatcgaagtcag

SEQ ID NO: 326887 - DNA, 611 bp, Homo Sapiens
  misc_feature (235)..(270): n is a, c, g, or t
  misc_feature (302)..(347): n is a, c, g, or t
  misc_feature (380)..(380): n is a, c, g, or t
  misc_feature (451)..(451): n is a, c, g, or t
  misc_feature (459)..(459): n is a, c, g, or t
  misc_feature (472)..(472): n is a, c, g, or t
  misc_feature (494)..(494): n is a, c, g, or t
  misc_feature (499)..(499): n is a, c, g, or t
  misc_feature (505)..(505): n is a, c, g, or t
  misc_feature (513)..(513): n is a, c, g, or t
  misc_feature (523)..(523): n is a, c, g, or t
  misc_feature (543)..(543): n is a, c, g, or t
  misc_feature (569)..(569): n is a, c, g, or t
  misc_feature (578)..(578): n is a, c, g, or t
  misc_feature (587)..(587): n is a, c, g, or t
  misc_feature (601)..(601): n is a, c, g, or t
taagaggagaattagctggcttcttttttcttttctttgaggcagggtcttgctctgtcacccaggctcaatcacagctcactgcagccttgacctcctgggctcaggtgattttcccaccttagcctcctgagtagctgggaccacaggcatgagccaccacacctggctaatttttgtattattttggtagagatgggatttcgccatgttgcccaagctggtcacaaacttnnnnnnnnnnnnnnnnnnnnnnnnnnnnnnnnnnnnatgagccactatgcccaacctcagttggatgnnnnnnnnnnnnnnnnnnnnnnnnnnnnnnnnnnnnnnnnnnnnnngagacagagtctcactctgttcacccagggctngagttcagttgcacaatcacgggcttcactgcagccatgaacctcttgtggctcaggcagtttttcctgcntcagcctnctttagttagctnggaaccacaggtatgttgccancaaanccggtnaatttttntaattttttntagagatggggttttcgtanttttgcccaggttggtttaaattctngggtcaaanattcaccanctttgcctccaaanttttgggatt

SEQ ID NO: 326888 - DNA, 753 bp, Homo Sapiens
  misc_feature (76)..(155): n is a, c, g, or t
ggctatagagctctatttccttcctttaaatgatcgcatcatattctttggtgcagattatcaaaatgtaactcannnnnnnnnnnnnnnnnnnnnnnnnnnnnnnnnnnnnnnnnnnnnnnnnnnnnnnnnnnnnnnnnnnnnnnnnnnnnnnnttacgctttctatgctgataattttgtttccatgggagagattcccaggagtggaattgccagaacaaaacgtatttgtgtctttcaggttttaacacttgttgctagattgctttttttaaggcagtaagagttcatgtttccaaaagagttaatattttaatggagataaaataaaattgtgcttagaaggcagggagtccataatctttctgtgacaatgccaccactctcccgtgagacctgtaaatccaaccagtccttcttccctgttccttcccttggccagcccagccacttccgtgctaaagcttgagactttctagggttccactgatggagttcactataccctgaacttctgcatttatattctaaagcaggctaccataacttttccaaaggaggagttgcatggctttcaccaaatttccacagtggtccgagacccgaaaagcattaggagccacccttctagagtctgatggatgacaagaggattgggatattgtttacgacatgatttaattttgccaaggataacaataagaagaaagttgctttttttggagaagtcttcctgtgtccatgaagcaat

SEQ ID NO: 326889 - DNA, 774 bp, Homo Sapiens
  misc_feature (138)..(138): n is a, c, g, or t
acctggcctcacctgtattttaaattgagttttactgggtaacagccatggtcattcatttacatattgtcaaaggctgctttcaagctacaacagcagaatttaacagtctcaagaccatatggcctgcaaagcctnaaaatatttactgggccctttacagataaagtttgctgacccctaggagaggaagtcatgggcccatggctggcagatggaagcctcaggacctgaagatttctcaaagaaagggacctgctgctgacagcaattaatatatgttcacagcttgcagctgaagcctgatgatggctgtaggagaaaggacatcacccagatgacattttgcctccaaagctctggggaccaattgtggaagaactgcagggatattatgttagaatgttcttgtgtctggataggatgagaactgtcttataacaaagtgcagcccccatgtctgagggcatgtttcctgtgtttaggcacttcccgaaagcagggagcacccttcaaggggcactggccttccccagaaacagtgtttgacctgtgatgatgttcctgggggaggggacctaggaaaagaccttagcctttccataaggcacgattattctcctctatagagcctcaaaagtcaagtcaagtagcaagacactgtgctccagtctgtggccacagacacacacaaggactggagcaaaaccaaacatagtgtatcatcaccgctgaacccccaggagcccccagatgcttttgaacgtgaaagga

SEQ ID NO: 326890 - DNA, 472 bp, Homo Sapiens
cttttaagagcgccatatagatttaaagtccttttgttaatttaggaacataaaaccgtgtgatgtatagtttggtttgctcgtaaaattactaagtgtggcatatttagtgctgtgaaagcttggggtaaaaggaaaaaaatcagtgagaattttcttacaagtctttaggggaaaatgtatttttccggctttttcccacacatgccaggccctccgcagctggggttggcgctggtcgttaccctcagccccaattacagctgtgctggaagctgggagtgggtgctggggctgggggattgcgggagtagggcactggtggggtttgggtaaagccaggtccaggtcttatctccagagggtgatcccaccccattctggagctcagccctgccggaagcccaggccctgaaggatccgggcagctccatcctctgctccctcccacagtgagacagggtattgaagc

SEQ ID NO: 326891 - DNA, 628 bp, Homo Sapiens
cctgcttgctgacaactggaaggtaggtctcatctcctagaggccacctttaggttttagccaatgtggccctctcacatacttcttcaaggcttacaaggagaattcttcttgcaagggttcacttgattaggtcaggccctttcaacagtctcaaagtgagttgtttaggaaccttaactgcatctgccaaattccttcaactttgtcatgtaacataatctaataatggacatatcattatggcagtatcatcaagggatattttatttgtggttaaatgattgctgtgaacacaatcctataaatatatgactaataggattttgtaactggctctataaactttaaattttgtatcattttacaatttacaaagtgcttgtatatattttgcatcatttgattttcatgactacctgtcagagaagcacagcagatattagcccaatgttattagtggctcacagcagctaagtgtatgtccaaagctttacagcaaattagtagtggagtcagctgggcttcagatcagagtgtttccaccctacatacagcccaggctctttttgctaaccctgtaattttcaaactgtgtttggtgatgcttgaaggagatttctcaggg

SEQ ID NO: 326892 - DNA, 721 bp, Homo Sapiens
  misc_feature (413)..(421): n is a, c, g, or t
attatgaatgagttctttcttacctccccaacttcattttattattcagagtctatgcagcacctgcctacacaaaaagaaatcaaccatctttgaaagatgttggccccctcacaatagaatttaaaaacttttgctccttaaatgttttatcttattcagatctaagtggtggggaacaataatggacttcagatgtgagtcttctgatggggtaggctgtactttttttctgtggctcgaaatgacatccctctggacggatcagacttaggaaccagaaaacagaagacctaatgaaagttacatttgaaagagagaaagagaaaataggaaaatatattcaagaagttcacccaccttgacatcttagaataatcaatttctcacctacttgtaaaagtacatctttnnnnnnnnngtactcacaattatactattcagtagtgacatgtactatgaagttggggtttaactttttagacctttataattatgtgaatataaacataaatgtacctttttcctttttccaaaattgtcaatcccttataaataattttatggtttattctgtgtgtatttttgtaagctgtcttaacaaaccttgtttgggacaggataggactaaataaatatgaagtcacattgtagtagaaaagtagctgtggtctgaaatgtgccagtcctttgttgattgtagctgtatctttaaaaagct

SEQ ID NO: 326893 - DNA, 755 bp, Homo Sapiens
tccaaaagtaccaaatcaggccaggcagctgcagagagattacatcataactcagctgtgcctggattacccactccacactggagcattcaaggttagaaaaatcaaatggcagcacaattggtcagcagcttctcttcttctggaatttttccaggttcttgaaacaaacagacaaacaaacaaacaaatgaacataaagctgcaatcactcttgcattgatttcaaaacagtaaactaggcggtttccttggagaagcagagcctgtccagaagacagcagctggaaggcctccagatagcaatcctccacagctctgtagggcttgctgagggggacccataaagcccaccaagggtgttctccgacaggatcagctttaaggcggctgctgaaggcctcaggctgtattcagctccgaggtgttctggctgggcggcaggtgggaatccaggttttctttgcacctttccaggtcctggaagtatgggtgagacagggcactgtaggcagatattcttttggctgggttaaatgtcaaacacttcagaagtaggtctttgcctagttcatcgatatctgttacaaacttctcaattggttgggcagattttgaatgaaaagcctgcctgggaagggcaacatctctaggccagtcttcttctcctgggagtccaatcacgctacaaaagaaccacacatggacataagcattagctactatgcagaagctgttttctcatcaatttccag

SEQ ID NO: 326894 - DNA, 479 bp, Homo Sapiens
  misc_feature (223)..(254): n is a, c, g, or t
agtcttttgatatatagaaggttttttttccttaaagtaataaaataaaccaactttttcctttatgagctgtagttcttgtttaagaaatccctctttactctgaggtcataaagatattgccctgtattttctttaaaaatttttaaagtttaatttcccatctagaattgacttttgcatatactgtaaggtagggatccattttttccatatagctaannnnnnnnnnnnnnnnnnnnnnnnnnnnnnnnatgatatatatttaaatgcagatattaacacaaatgccagtgttgtcttttgtctttaagctttaaaaactgacatgtggattaggccctctccaagaattttcattctaatcataaaggtaagaaattacaaactctttaatttagagatgaggtttactctaccaaagatgaatgtaaatctaagcagatcttacttgttcaaagatttccattataaaacca

SEQ ID NO: 326895 - DNA, 1012 bp, Homo Sapiens
aaagaaagaggacttaaggatgacttgaaagtttctggatggctggggatgttaattattggagaaaaggacttcaggaagaccaggtttgattaagagggtgaacagtgggtgttgctggtggtggtagtgattaggagtttagctttagaacaaggagagtttgggatgcttatttgtaatacaaagaggagatgtccagtaagtactgtagtttggacttcactgggtagggatttcaggctactatgctttttaactcatatttgacatctatgtataggtaaatgtctttattttctctaaacaatgtgaatgcctagcacactgcttgacatgctagaagtgtttaatgttgaatatgttgaattgaattgaaatgtaaatttcagttctgttttctataattatatattttactctaataatagtttctggtgtttgaagtatacattattttctttcaactgaacttgaatataatataattttatgaagtcatgagaaattttggtaaccttccttaaggaataatttttggaaatgtatagacattaaaaaaatagagcctgcacctgaaactggctactgttccctgaagcctgtattcctgaccactgtgaaaagtgccatccttgatcctagggcttcctgtccttaatgggccattggttgctagtgctaaaactgtgtaagaaggtaaatttataatcatcataggttatttgtaaacagaaaaggtgggggggttggtagtaactgtattttggctctgttcagtgggcctataaattcatttgattacatttaaagttcttttgaaacttaccttggtttaagaagtttactgtattagtccatttgggctgccataaccaaataccatagacagggtggcttaaacaacataaatttattttctcacagtcctggaggccagaagtccaagattaaggttctggcctgtatcattttctggtgaaggcctactcctggcctgcagactgctttc

SEQ ID NO: 326896 - DNA, 1111 bp, Homo Sapiens
cattgtcttcccatgaaactataaatggctaattcaggaatctgaattcaggaacactccatcttcctttaagttccaccttcccctgacccgttctctttctcagtgaaagcatttcttagaatgttagccattttcactagaaaactggctttctgagccttttggcaatcacaacataggtacctacaagtgtacatgtagccctgcggttttcagctttgctgtacattatcacaccaaacagagatcagggaaaaggaatcaacaaatgacaaggcaaatgagacatttgccaggaagccaaaagtcaacgatatttcctctgcctgctaaccagaaagagatgtatataggaaattcaaagttcctgctagagtagtaaacccctttgtaggtcacaattaatcacaaaaaccagaatgggatgaagctatcatcctgactttccaaaggaagccaagtctcctctactcctaactgtttaggcataagagcagatttgcatttttatactagctgaatacagatgattgagggttaaggacagcttctattacagggcattacattggagactgttagaaatttgggtttatagagctccaccaggcttctgaatacaatgtgatcatccctacttgtcaggtgctgttaccgtccctgcctccacaaatggagagcagagtgcctggagccaaacctggcatccataacccccaaaccggcaggagtgctggcaaagagcaaaccccactgccaatctttcctaggaatgtgcctgaaggaagtagcaaaggcgctggggaacaagtcctatgatacagaagcatgtccagggctgtgccaggaaagtcagaaacaggatttggccagcatataaaatggagtcaatgtggggtcagtcaggctgactcatccatttgagattttctaacatgtatgtctttttccaaaaggcttaggatatgtttgactttcatggtagctaaagaactgtactttcctcattaacagtgaaatgatggaaattctgaccaatgcagaaagttcatttgctggctgcctgttttaagagatactgtattatcttcatactgatcctgctact

SEQ ID NO: 326897 - DNA, 681 bp, Homo Sapiens
  misc_feature (14)..(14): n is a, c, g, or t
tctaaccctccagnaattttgttgagattctctgctgatgtgtttcctttgtttcctgttctctctatcacttagagtttgttgtatttaatacctttgctatcattttattgtggttttggttgggagaggaaataaaatggccaatccactacctcgaaaataaattagtacatttatttgcctatcttcatctcctaactagtctgtgagctccttaagggtagggaaggttattattcatttttatatacccaaagtacatcagtcacagcccagccagaaaaatagaaaccacaagaaagatttcaccagagggaatttactagaggaattagtttacacatgtattagaggatagaaaggacaaaagggagcactgggctcacctggagatattactgaggaagctgctaccaacctagccctgggggaaccaaacaggggaaactgggattgtcaaaagctctagaacctcagagtaggggacctatgtagtgggagctcaggccactgaggggtgtttatgaccaggttgtagttggacctctagggcccagtgttgatgtcgtagggatctctgagggccagtgatgaggctagatgtgagttgccaaaaatgttcaagcagaagccagctgttgcagctggggctaagtgccactgacaggaacactaagc

SEQ ID NO: 326898 - DNA, 747 bp, Homo Sapiens
cagagcagctgaaataatttattttcattgcatttattcctttgtctctttattaagagtattagctcattatagaccaatggagaaaaaccatgaataaataataaataatattatccttcattcagtaataacttaatatttagcagatttcctttgagaatttattatgcatttatattatcgttaccacttaaaatcatttttaaagtaattcagctagaaatcaaattgttaatagtgggcaaagtaaagaaatggggactgggaaaggagaaacttttactttaaatatttctgtactgtttgaattttttatggaaaaaagtgtttgtaaaagcagatgactgagtagttagtaaatgagtttttagtatttgtgaatcaaccccctaaatgcaaagaacaaagggaatatagtccttgtccttacagccaaaatctggcttttgcactctgtattctgttttacagcaaaacatgctttgcgtactcaatgaacattgattaattctgtctctctaaaagtttacacagttgacaacagcacacactagattatagttttaaagggaccatgctataaacaaaagatctaagtataattttttaaagatcatacacaagaaagtggtgtgggtcaatcacacttgcagaatgaaggaccatttattatttggctacaactttacatagactacttcatttaacatttataactatcgcagtaaagtagttatgagcctc

SEQ ID NO: 326899 - DNA, 211 bp, Homo Sapiens
tgtgattagaaataatactttattttcagtaattaacaaaagtcagatatcctgaaaatcaaataattggcaagtgagtttatattttaacctgataatttccttctcataaatgtttaattgtatgttagacataaatcactcaagaaagcattttatagcggcaccttcttttctggcatctattttcaggtttatagaaaatggctag

SEQ ID NO: 326900 - DNA, 707 bp, Homo Sapiens
ttgtaaattatttaaaattaaacttcgatattgctccaaacaaacatttaaaaggtaatgttttcacatcataaagcagattcctgcctcgttatcaagttactcagctccattcctcttacttacctaccacaagcaaaaggcctttttcctgctcagcaatattggaggtaaaccctagagtctctcctccccttcagtatttcactaaccagggtgtcagaaaaaacctgggtttcacagggtatgctgcaaagaaggatgcattctatccctaggctcctgcctctgccagaccaggcaggatccatgcctttcccttcgggacttcggcgtggagcatgaccaaaaccacgaaagtctgcagctcctaactagagtacctttcctgtaggaggtgttacaaccattcctggtgctggactcttcttcctcatggtcaatgggtacaattaagccatgcaataaaaagtttggtttacactttgggaggctgaggtgggaggactgcttgagtttaggagttagagaccaccctgggcaatatagtgagacctcgcctctacaaaaaataaacaaacttagctgggcatggtggcgtgagccttcagtcccagctacttgggaggctgaggtgggtggactgcttgaggctgggaggtcaaggctgcagtaagatccagcctaggcaacagagaccctatctt

SEQ ID NO: 326901 - DNA, 501 bp, Homo Sapiens
gctgggttcaagcgattctcctggtgaattcattcttcttatataaagcatgacatccttgataagggatttcctgacctcccactgcaggcataacaaatagatattccatctgtcttgtcactgcatctttctattatcaggtcggattgcaggggagagcccacagagctccatgtgttcctagcaacactgactctgtacctccaccttcctgagtaggaggaaagacccttcactcaccctttcccacaaccccaaacgcttacagactaaccaccgtctgcccaacagatatgcaagctttacactcagttcttattttttgcctagaaaacttcctttaggattctgctcaaaagctacttcatcacaatacttccataatattcccaaaacagcaatcatcccctattttgttactctctatccttcttaccctgcttttatttttcgtcacagcaatcatctcgtaacacagttcatatttatatatttttt

SEQ ID NO: 326902 - DNA, 670 bp, Homo Sapiens
gagatgaaatgttttacttctgactgtgggactaatgtgttcctacaggttgcaacataaaacggatttctcactatgaaccttagagaaacagcttgacaatctttgtcctggacagcaagtcttcttagagctggggccaagtgacttctccttgactcctctgagcaaagcccagcgccacccacagcacaggaacctgggcaggcagtccaccctcagggcctgcctgtgaccactgctaacctgtgcggaacaaacatgtgctgaaggatttgagttcttcagaggacttggggaactgacttatagaaaatgctcagcacgtggcctagcacaaggcattctttaaatctgagtctcctccccattccatctctcatcccttttcctgaattctgtctttactgatttatctagtcatccagcaaagaacaaatcactccaaagccatgacaggctacaacacaactagttactccaacactgagagtcctatgactccctccataaaatcaactgagtagaatactgaacagctcttctgaacattttcagacaaatctctattctagaaacctttccactggggaactacctcaaactcttcaattatttactaggagatcaaacataagcacagaagcacaacaggcaaatttcacttaag

SEQ ID NO: 326903 - DNA, 388 bp, Homo Sapiens
gaacctcactctgtaaacaggaaagtaaaaccctgccggattccatgaaaatcaacatgtccttctgtttgaatctgcgaacaagtgactgatgcattgagaaacagctgatgccagtctttcttaaaaccattcctcagtcattggcgtgaatggttgcagccacaagaccctgaagtttcttctttggtaaggccattgagctgctggtaggtcaggtaggtgaccttgagcccattaagtaacctctttctgcttcagtttccccttccgcgagtcaggccccagcgcccctccgccgaacgcccaggtcgtcgggccgtctgcgtccgtctgtcctagcccgtgcccgtcgggccgcgctcaccccaggcctccgctcttgtcc

SEQ ID NO: 326904 - DNA, 789 bp, Homo Sapiens
  misc_feature (295)..(295): n is a, c, g, or t
  misc_feature (310)..(310): n is a, c, g, or t
  misc_feature (325)..(325): n is a, c, g, or t
  misc_feature (500)..(500): n is a, c, g, or t
ttttatttttaagattcaagtttttaataaacttgggaatgttatgctttgaagcataacagataattatcattatttttaagattcaagttttagataaacttgggaatgttatgctttgaagttttcagagctagtagctaaagcgaatagctcaaatgttctccagcctaaggcttaatgtgaatttagattattactgaaacattgggagggggtattactcttgaaatcttatacctccatccacagataagaacactcagtgcagagaattaaagctgcctaagtcaanattcttttttaaatnggcaaagttgttttntttaagagacagaaagtgggggcagaatgtacctctgggcagagaatatcttgagggacaggtactcggagaagaggagatacaaatagggatttttaaaaaagcagaaaaccaccaatttctcctcaagtgaaggggggatgtatcaggtttaactttaagctctcttctgctncaattgctaaactctattttgaaggaaaggacctttggagacccggcagatatgctgtctgcaaacaatccgggggagtaagttcttctgcccccgtctgtccctacacttttcgcattcacaccttccccagatccgtttcccagcgtatctgccttccctctttctccgggtccgtcaacgtctcacccacccgcgagtcaggccccagcgcccctccgccgaacgcccaggtcgtcgggccgtctgcgtccgtctgtcctagcccgtgccggtcgggccgcgctca

SEQ ID NO: 326905 - DNA, 653 bp, Homo Sapiens
aaatgcagcagttattttatgtctgtgtttctggacacctttcttaacaaatcataactgcgtttaatagttacgtggtggtctgtgacttcgttgttcaacaaaatcgtttgtgtgcatttcagagacaacgtgtcctaattttgcctcccaaaagtggttctccacaatagataaaaccaatgggagccaaaaggcaagcattagaattattctgtgtttatcctcaagatgttgttattagcatcatcaagattcagacaaaattctacagattaaattatttaaatctcctggcaacccatcttagacagcttcaaataaaggagacaatttcatcaggtcttatgggcatctgtaaatatagctaagagcattctcttgctcccaggctcttacgagataccaaaataatgttacctttcttttttgcattattcatttattggctccctttctgagagtaaagacttttcctcctttctcctgttgttagttttttacccagaccttgatccctgagttaggagaccatcagattcggcaagaggacttacctgtggagctgacagcaatgtgagactggccagtgcttttccccttcgtccattcccagtcacatgatgttgaggtggataactacaagtttatag

SEQ ID NO: 326906 - DNA, 440 bp, Homo Sapiens
  misc_feature (139)..(139): n is a, c, g, or t
  misc_feature (167)..(167): n is a, c, g, or t
  misc_feature (269)..(277): n is a, c, g, or t
tccatttaatgggctccccttcctgagagtaaaagacttttccctccctttcctccctgttggttaggttttttaccccagaccttggatcccctgagttagggagacccatcagattcgggcaagagggacttacccntgtggagctgaccagcaatgtgagactnggccagtgcttttcccccctcgtccattccccagtcacatgatgttgaggtggataactacaagtttataggactgtcttgtccacatgtgaggaaagatgnnnnnnnnncattaattccaagcttagataggtgaaaataaaaacagtccattccatcattcctcagacagttatatttagaggtattatcttcatgtcatgtttgcaactgatccgtcttcctgagcttgtaaatgtaatccatatccatgttctacatgatcagtcagag

SEQ ID NO: 326907 - DNA, 377 bp, Homo Sapiens
  misc_feature (22)..(22): n is a, c, g, or t
tattaaaaaacacccacaaaanggcccgaagggggcctcaacggtgtgcctcctgaaatgagggtggggtggtgcctgaggggtgcctgtccctcccactggcaaggcggcctcaacccaccctgtaacaaggaagattttgccatactttttagagttctgttcccaagggtaagtgcttcaccccagggtaaggggccattaacagtctctgctgggttaggaaaatggcgtgggattcacaaaggtgttaagctgtaaacggtatcactgtccacttgctgagagcagatttggcaaagggtttttctctgtaggtcttgtgtcagtttgagggtctgctttgcccacttccccttcctcagtgatccttcagc

SEQ ID NO: 326908 - DNA, 761 bp, Homo Sapiens
acctttacagtgggcaagaccatcatgatgcccttaagaagacccccaacatcttcttggggaaaaagttggctcttcagagttgtccccaaggctccctcttttagccctcttgcatagggtcatttgcatgagaacagattcctttgtgtaaagttggcctgcctgttctctgtccacgtttatagtccttcaagtcttcgtgttggggttgctagggcagatatggaccctggcttgcaaataagctcactggcattttaccagcctgtgagaacttcaacttgggtaagtagactgaaaggaatctggtctggacctctgggaagagggtcccgcaagcctgcttttgggggctgactcttcagggcagccatcaaagggggagaatatgtgaagggggcttccatgggaggcttcgatggcccacccacccttccattcttcctcttccagtctctgttccacccaccatgctcccacccaggggcttgtgttctgggcaagtgacttgtatgccactgaagcaatttcttgctttaaaactttaatatctgcttctccaattggccaggaacttcacacactctgccatctagcaacagtgaaccgatggtacaggtagttctgctaggtttattttgtgatttgggttcctcccccgcagcaccccgccaaatttcacagtttgtaggaaggcagggcccttcaaactgggaaacacacacttctgggagaatttaaagatttgccaaggggtt

SEQ ID NO: 326909 - DNA, 978 bp, Homo Sapiens
  misc_feature (923)..(923): n is a, c, g, or t
  misc_feature (957)..(957): n is a, c, g, or t
  misc_feature (964)..(964): n is a, c, g, or t
ataatgagtatgtatttattttctaggtttcttacttccagtcatgacaaaataatggtcatcatcttcctttttctttgcagtaggttttttatctccactatctgcatccttaacagatgagggtggtttcctgattgaagctggggttttgccacttctgggaggccctttagttgaatgctggctcttagcgacagtctgtgctgacttcggtgcagtttgtgttttggtagaagactggggtaggctcacgatggacagtggggtacggccaggagacttcaaggagctgggtcctgtcttctgaaatgcacttttattctgaggctgctttttggtagctgaaactatattcttatcttttgatttctgtgtggcttttacaggagaaactgaggacacagaaactggctgatttaaattcaaggccgatttaagtttctgtgctgggactggctttgcttgtggggctccatcggatggttgagactgtgttcctagacccgtggctatggttttggaactggtttttgtcatttttgcagaggactggaaagaaggtttaggtcttacaggtatatttgctttaggcagcttgggacattttgaggatgaatttgaatgtgcagctaagtgagatactgcattatctctggaagaaatatgattatgtttcaaatacttaggttgaagtttttcctgaacacttatttggcaaaagtgtggactcgggcagatctgctgaattctgggctggaataaccttggccttgggggtattgggggatgaaatacattttctcggtgactcagatatacaaggtgcagttcttggtaaagctggtgaagaagtgtttttacctactggatttaatgaagcaagtgaagatgatgcattgtttgaaggagcctgcggtttncttcgttatgccttttgaagacctggtgccgaanactgggncgcgtagggccaaa

SEQ ID NO: 326910 - DNA, 464 bp, Homo Sapiens
  misc_feature (296)..(304): n is a, c, g, or t
  misc_feature (409)..(409): n is a, c, g, or t
  misc_feature (431)..(431): n is a, c, g, or t
  misc_feature (443)..(443): n is a, c, g, or t
ataattatattgctttaacaatttttatgtattttaatttacactctctgcaattcatacacaagggttcttgacatggtgacaggacaggacagatcaagacagaggctctccaaggcagtgaaaagacccttcctatctcctctggcttaacctgggtttatgctcctttcctggccctgttggtataatcggcaacatctgtgttgttagagggtggagagcgcatggatcatcttagctcaaaggtaggttctaacagcatagaagatggagtagagaaaaataaatagtgnnnnnnnnnctctctgctacttactagagccatgctatctaatatgggcagacacttaaccacatgtgactttttgaggcactttgaatgtggttagttcaaattaaggacggnctgtaaaacatacaccccctgnccccggacttcntattttctttaagggcaacgg

SEQ ID NO: 326911 - DNA, 610 bp, Homo Sapiens
  misc_feature (221)..(415): n is a, c, g, or t
cctgaattggcagcctttcaaacaccctgacccatatatatgtgtactcaattcttcatgaatgcctcccaaacatatagaggaagaaaggtctggatcaggcttagacactagcagagcccactaggccacacagccagggctacagactatgggcttttgcaggaggcttcaaaagaattacctattcctccaatgttgaatgtttatgatattctcannnnnnnnnnnnnnnnnnnnnnnnnnnnnnnnnnnnnnnnnnnnnnnnnnnnnnnnnnnnnnnnnnnnnnnnnnnnnnnnnnnnnnnnnnnnnnnnnnnnnnnnnnnnnnnnnnnnnnnnnnnnnnnnnnnnnnnnnnnnnnnnnnnnnnnnnnnnnnnnnnnnnnnnnnnnnnnnnnnnnnnnnnnnnnnnnnntgattcctcactgtcacccaacccactactgagaaccactgttaaatattttgttattgtcagtgctgttatgatgagaactttccatgccacccaaaaactccaagaaaactcctacgctctaggagggccttttctttacaaggcagagtgaaggtgtccaccgtcccgatggctccctgcatttcactcttg

SEQ ID NO: 326912 - DNA, 453 bp, Homo Sapiens
gtgacagtgaggaatccaattttacccccccaaggggacattggggcaacgtcctagagacctcctttttttgtccaccaatttggagggcagcgttgcctagtggccatcctagtgggtgaaggattttagcatgcacctaagcccttcctacacccacacatgacagaccccccccaacctaagagttatctggccccaaaatatcagttctgcccaaggttgagagacccttgagaatatcataaacattcaacattggaggaataggtaattcttttgaagcctcctgcaaaagcccatagtctgtagccctggctgtgtggcctagtgggctctgctagtgtctaagcctgatccagacctttcttcctctatatgtttgggaggcattcatgaagaattgagtacacatatatatgggtcagggtgtttgaaaggctgccaattcag

SEQ ID NO: 326913 - DNA, 986 bp, Homo Sapiens
  misc_feature (906)..(906): n is a, c, g, or t
  misc_feature (929)..(929): n is a, c, g, or t
  misc_feature (935)..(935): n is a, c, g, or t
  misc_feature (974)..(974): n is a, c, g, or t
ctcataagagtaacagtcatcatttatcatcacaaatggctacatctccaaatatcagtgggctctcttaccagggagatttgctcaatacctggcctcatttaaaacaagacttcagattccccactcagccttttgggaataatagcacatgatttgggctctagaattccagtcccctttctcggggtcaggttctaccctccatgtgagaatatttttcccaggactagagcacaacataatttttatttttggcaaagcagaaaaaagatctttcattttgcacctgcagccaagcaaatgcctgccaaattttagatttaccttgttagaagaggtggccccatattaacaaattgcatttgtgggaaacttaaccacctacaaggagataagaaagcaggtgcaacactcaagtctattgaataatgtagttttgtgatgcattttatagaatgtgtcacactgtggcctgatcagcaggagccaatatcccttactttaaccctttctgggatgcaatactaggaagtaaagtgaagaatttatctctttagttagtgattatatttcacccatctctcaggaatcatctcctttgcagaatgatgcaggttcaggtcccctttcagagatataataagcccaacaagttgaagaagctggcggatctagtgaccagatatatagaaggactgcagccactgattctctcttgtccttcacatcacccatgttgagacctcagcttggcacttcaggtgctggaagggtaatatggactcagccttgcaaatagccagtgcttagttctgacccaaccacagagggatgctgacatcatttgtattatgttccaaggctactacagagaggctgcctgctatgtatttgcaggctggnttatggtcagatttccctctganttggtnaggggtgtggtttagggtcagtaggatgtgattcttagncaaaatggacag

SEQ ID NO: 326914 - DNA, 457 bp, Homo Sapiens
  misc_feature (432)..(432): n is a, c, g, or t
catgagttagtgtttcttccccaaactgaagactgtgttggaagtgcaatttctggtgagtcagtccacaatacaatgccctgtgtggagttggtattcatacaggaaatctgtgtgcacgaggcattgtgtgttgaaagtgtatgtttatagtactgcctgagccatctcatgaccccagcgtccaaaaccgatgctgtagaacagaacatatctgtacacaaatagtgtgtgcaaatagcatttgtacatagaaaagtctcattgtggcagattgagcataaattattcaactgacggtgcaaaaacattacttgcaaagaaaagtttatagtattttcctacactccaccctggggagatggatatttctattcaaatggaatattcagtggcattttaaaatgttattatggaaaacggtgctggccnttttgtggaaggattacccacttgg

SEQ ID NO: 326915 - DNA, 440 bp, Homo Sapiens
cataaatttataatcagtttaactttattttaagcttctattacattgtaattaataataatatactaagttaagccagtttaactgtctagcaaaatgcatttcattttaaaattggatattgggagacttggcaaatgctgtgagattacttagtaaagttaagtatgatgtatatatagaggggaccagctcaccctcataggttagtgctgaaggctcaggaacagtctcaaaggcttagaaatgtggttatatagaccagagcattccattctgattttgcccccagtatacttatcactgttcattttttgctaaggaatcacagtctactgacctaaatcacaccctaggacatatcagaggggaaattctgaccattaaatccggccttggcaaatacctaggcgggcagccttctccgtaggtaggcctgg

SEQ ID NO: 326916 - DNA, 576 bp, Homo Sapiens
tgcaaatataatcagtttaactttattttaagcttctattacattgtaattaataataatatactaagttaagccagtttaactgtctagcaaaatgcatttcattttaaaattggatattgggagacttggcaaatgctgtgagattacttagtaaagttaagtatgatgtatatatagaggggaccagctcaccctcataggttagtgctgaaggctcaggaacagtctcaaaggcttagaaatgtggttatatagaccagagcattccattctgattttgcccccagtatacttatcactgttcattttttgctaagaatcacagtctactgacctaaatcacaccctagacatatcagagggaaattctgaccataaatcagccttgcaaatacatagcaggcagccttctctgtagtagccttggaacataatacaaatgatgtcagcatcctctgtggttgggtcagaactagcactggctatttgcaaggctgagtccatattacccttcagcacctgagtgccagcctgggtctcacatgggttgatgttgaagacaagaagaaatca

SEQ ID NO: 326917 - DNA, 661 bp, Homo Sapiens
  misc_feature (642)..(642): n is a, c, g, or t
tgctgactgtcatgacttagtaaggccatcacaggttgccagaacatctactcaactgttccaagcataacctcctacacaggccttctacataggagtatatttggccaagactcaccactagaagtgatttccactggactttcctacagcaagtggtaaatgatccctcagataggcccaagagctccccttcaagcatagagacacaaccctgtgaaaacatgcattggaaccaggaaggcctgcccccatgacttcacgttgcatacatgcctttgaggacttggcctcttaaaggaatctttcaatatcctatgcttctgagaaagttactatttcatttgcagcaggacaactcaacaagctagctcttcctgcccagcagactcggtggattctgaagagggtctcgggctgactctctacttcatgggtttgaattcaggaatgttgcaagattgcatgagattaagccgctgaaacctttctgaggaagagccagctcaaatttcagtgttggatgttcaccggttctttagggttctaccactcccagtaaatcaagtaataggtttctgttaaaaaccccagtgtgctgatctcagtggcagccatcttgctttgtaagccttctctagnctttatgatgctcccagtt

SEQ ID NO: 326918 - DNA, 466 bp, Homo Sapiens
  misc_feature (371)..(371): n is a, c, g, or t
  misc_feature (419)..(419): n is a, c, g, or t
  misc_feature (453)..(453): n is a, c, g, or t
tcatctgtgggaaggaggggagcatctagttgtctactgctagtgagctaggagttctaggattgtcaggttctaggattgttaggttgggcttagctgctagattttattctgtctgtattccggcattgttacccctttctggctaatcatccagcaccatttccctccatttgaggatttatagtcataattgggctgggggatgggggactccctttttatcaggtgatgctgcccttgaagcctccaatagcttattagtttcaagattctcagaattcttaggcctctcaaattaaattttccagtactacataaaacatttctatacactgcgggggtgaaaaactaccacttcttctataccntaactggaaaccttggctatgggcccaggcacagtgggcttcatggcntgttaatggccaacatttgggcatttcagctttngggagggtgaagt

SEQ ID NO: 326919 - DNA, 439 bp, Homo Sapiens
  misc_feature (387)..(387): n is a, c, g, or t
  misc_feature (412)..(412): n is a, c, g, or t
  misc_feature (426)..(426): n is a, c, g, or t
aaaacaatacatatttactcttttacataggccagacatgtaaaatcagtttcactgggccgagatcaaggttgcaacagggctgggctccctccagaggccctaggagacaatttgtaccttgcctcttctagcttgtggtagctactggcataccttgtcttgtagccacatcactctaatctgcctccatggtcacactgccttcttattttctgtggacaaatctctgtctccctcttataaggatacatgtgattgcacttagtgaccacccagtaatccagggaaaatcttctcaaggatccttaatttaatcacatctttcaaactcctttttgggcacacaagggtagtatttttcaggtttccagaggttagggaacnggggaaatcttttagggaggacccnttatttcaggtttnggaacctctttct

SEQ ID NO: 326920 - DNA, 685 bp, Homo Sapiens
agtgttaagacaacagtaatttatttagctcctgattgtgtgaatgggcaatttgggctgggatctgcttgagtggttcttctggtcttgattggcctcattcatgtgttagctgccatgttggttgggctagtatgacttcagctaggaaagcatgtttctgcttcatgtggtctctcattctccagcatgctcactcaacatgttcatggctgggtaaggttccaacagacatttataaggcctcttgaaacctaggcttggaactggcatacagtcacttcttccacattctattgatcaaatcaagtcacagtgccagcccagattcaaatggtggggaaagagacttcatttatggaagggaggagctgcaaatttcattgccaagaggtgtggatacccagaaagatacatttgacaaaccatctatcaaagttactgtcagaggtatgtttttggaaatatcatttggagtgggatgtgtcctgtatgactggaatcgttttctatttgtaacagagaagcgtgcccactccttgctcccatagataacccaatgccgaaggatatgagagagagagatgtccagtttgtgcctctcccagcttcttgtccagagactccttggtttagattttgatacactacttagaaaaggtggagagtttctttaagatttcct

SEQ ID NO: 326921 - DNA, 714 bp, Homo Sapiens
  misc_feature (405)..(424): n is a, c, g, or t
agaatctagaaccatggctgaccaaagcgagacttccgagtaaggttcgttaacaggcatcctgctgaattagaaggaaacaggaacgaatccaaagcaaacggggctaaacttccctcgaggacatttcctgagctgcaacatgggaagcgacacaccgaagctggtgagctggtgcaactgcacacaccttttctctggtttttagtactcgggtcatcctggggagaccgctcatgggctatgggcagcccatgcctgggattttttggtgaatgagtctgaaaagcagtgaccaggtgtgttgagggcctccccttgcctgcacctttttatctctgagtgactgagggctgccaaggccagacaacgcacatgtgtcctggatcctcccctggcctgggnnnnnnnnnnnnnnnnnnnntgggcttggggtgagtaggctggcttgaggaaggggctgcccacaagcagggctcatttcctgggtcagggcctgtcagactcaaagtcagctcttcagcattctgtttagaaaatgatgatgcagttcagtgagaaagaaagctcaggataaaatatgttttctggaggggaaatactcaagtgttctaagccaggaacagagactctcaagagaggaattctctggcattctctgccttggataaatcatggattaaacatgagcatccttagaataattttattttt

SEQ ID NO: 326922 - DNA, 823 bp, Homo Sapiens
caagggactttttaagtggctttaagatttgtttagttataaaaccaaaatgtaaatacatggaatattatataatagaaaaatagctccaacataacaatagaagaaacattacaaggcactaaatagtttgttgcattttaaaacacaagttttcaagatctgtttctctgtgacctctgctttgtataatatacctacctctttcactagtccaagtaattcagattcatgagccagaatgtcccccatattgaactgttactggtaattaattctcacagcaaaaatctctaggaggcaaaaatacaagacaacagctttcatttcaaccacctatgaaactacaaaaaggtggttgtggtgagcagaataatggcccccaaagacatccatgcgccaatcccccagaacctgtgaatacgtgaggttaccacggcaagggggaattaaggtgcagatggaattaaggttgctcatcagctgacctttaaattgggggatgatcctggattacccaggtgggcccaaggcagtcacagcagagggaggggggcagacggaggcaagagggtcagtgccagcatgatgagatgtgagaaagactcaacagccactgcaggctttaaaggggataaagtggcataagacaaggagggtaaggagcctctaaaaactgcataaggcaaggaatagatcctcccactgcatccagaaatgatccagcactgcaaacaccttgacttcagctcagtgaaagccatttcagacttctgacctagaactagaagatattaaatctttgttgcttgacaccactcaa

SEQ ID NO: 326923 - DNA, 788 bp, Homo Sapiens
tcggcacagaaatatatttgccaaattgtaagaataattttaatgcaaacacttgtgtggctgccacctattcaagaaacagaatcatgccaatctacatgtgcctcctctgtccagtttaggtcccaacggagtctaaactagaaatattttctagaagctcaagtggaatattgactttctctgctctttcaaatcatactcccactaaaagtttttactgagctagagatcttgtataaaagggtcatcattgactaaaaataacaacaatgtattcttccctgaatggcaagagttcaaagacttattgaaaattaatccctttagaagtagtctttggggagcaaatcattgagagaccatgggaaaaatctggggtaaagtacatgtataggagtattttaaaggaattcatacagccaatgtgtaccaattcaaattattaggcaactattgagcatagtattaggattctccagagaaacagaaccaataggaggtacatacatttaagaggagatttattatgggaattggctcacacagctatgtgggccaagaagtgccacaatctgctgtctgcaagctagagaaccaggaaaatcagtggtgtgtgattaagtccaagtctgaaggcctgagaaccacgagtgctgatgccagagggcaagagaagatggatgtcccagctcaaacagaaagagcaaattcatccttctttcaacattttgttccactgggaccttaatggattagaggaggcccacccacactgatgagggcac

SEQ ID NO: 326924 - DNA, 750 bp, Homo Sapiens
  misc_feature (572)..(652): n is a, c, g, or t
catgtgtttttcttgttggaagactttcctgaacacaaattagcagactgaaaaagagatggtaatatttacatttgccatttcttttttaattgaaaaactcaaaggaccatatgacagactgagttgtttaacgatattccagaagggcagcatacttggagtgttttaatatgcattcagccgtctcttcctgactggtggggtggttcctgttactcagatggcctgggcagttgggatgggatgttctcaaggtgcttttttcccctccgacctttgctagtgtgtgtgatgtgatgtgttgaaaaccactgtataaacgataagcaccggctactcatttagagtcatggaatttcagagctgaaaagaatcttagacgttcagtgagttattgactctctttactttagagatgatgagacacagtcagtaataggaaatgccccaccctcagatgagaaatggaactgctgtgtgtttgataatatacagaattgttctcatgcagtaaagccctaccccctcgacttattataggaggcgttattcaaattggataaatgctnnnnnnnnnnnnnnnnnnnnnnnnnnnnnnnnnnnnnnnnnnnnnnnnnnnnnnnnnnnnnnnnnnnnnnnnnnnnnnnnngttttggttattatttctgcatagcaaaccaccccaaaacttgatagaaccattttcttatgatttagcaatctggcctggggttaggtaggccattc

SEQ ID NO: 326925 - DNA, 932 bp, Homo Sapiens
  misc_feature (693)..(693): n is a, c, g, or t
tgttagttggctttgtttgattttgctccagcagatgaagatagtgaggtgccatttcatttcggcaagttgggggtagatgttcaggttccccacttgtcctccatttacactacagatggggcagcttcttgattcccctgggctgggtgggaatcctgactctccactccacctccactgacatgtctctggctgagaagctactgctcccatgtagcctctactaatacccctgggtgctgggggttggggtgcataaggtagaggaaggcttttttactgcttagaagtggtgaaagcattcattctccaataggactcctctgatgccacttagcagggaaggacagaagctcctctttactcccaaataaacgtagaagttttagcttcccacatggtctccagtaacactacaagttggggaaaggctagttaaccattctatgggaattaaagtcccaactctgtacctggcctaatctgacacaattccagtggaggaggtgttagggtgcctcataacagcttggtgaggatggaaatctaggatccctacttggcctttgcagctatgagtgtgaccaatgtttttttctgtggtgtttggttgaagtagaatggttattctcaaaaagttttctgtcttgctatggtgtccctctactagtatttaaaagactgggcttnttgctggcgctttctttgtctgtggccattgcacttctgggttatcagcttctttagctctaattatggaatatatgaggctaaaagaaaaggcagggaactactgcagtgtcattatttgggtcctgagatccctagctcctctgccttattctctccacctttcagagtcttcttgtgttttacgtataatattcagagtttttagttgtactcagcatatagtacaattaattata

SEQ ID NO: 326926 - DNA, 716 bp, Homo Sapiens
  misc_feature (371)..(432): n is a, c, g, or t
gtttagtatttttgagaacccagccacctgggcatgctgtaccagccttgtgctgagtgctggggataaaggaacaaataaaacccagtccaggcttctgtgtgcccagccctgtgccgggtcccagtgggtaacagcatgtccaatcccctcagtgtcccactagaggcttcctttggggctgctggggacatcttgtttctagttgagaattcagatttatgtccaaagacaagaactccctgaggggcagattacaacatggactgggccattacaatcaacaaggacacaaagctaacacagccatcgttatacaccagacatgtgctaaggacttgatttccccattgtttaatcatcaccaactnnnnnnnnnnnnnnnnnnnnnnnnnnnnnnnnnnnnnnnnnnnnnnnnnnnnnnnnnnnnnnaagggcacagagcaagtcagggctacggtgatgtttcaggcccagacctgtttgcctctggagcccagggtttaacacaccccagtgctgctgtgaaagggctctggacagctcaggctggccggccaatgcggggatagccgaacagaggtatggaacagaaaggggcgttgaggatgttgctgtgtgtgtgcggttgggggagtgacaaggcttcagcaatggtactcattctctccaaccagctcccagtgctgctgtcctctgatccaccctccgctata

SEQ ID NO: 326927 - DNA, 533 bp, Homo Sapiens
ttttttttaatgcttagtattaaaagcacagaatttaatcagttcatccgagtgactgaggagggcttaagagttaagagaagaaacgactgtctctggtgtgagggggacaacacacagcccgtgaccggcaggagctcaggggccaccgcactgggctcagaagtgacgtgcggacgtggcgaagcacaaatccaaacacaccaggaagacaccagaaacggccacaaaacccatgcaacctcccgttaagcctaaataactataacgtcgcatcaaaacttcagtaagatgaagaagcgattcctagaataaaattagtgtgaaataaaattttaaaattacccaaaacaatctggaacaaaccctcggatgacttcccaagttttggaagacggagatcaggaactcatcacgaagttatagacgcggataatcccacaaacggacacggaatccaagtttaagggcagccacaagaagaacagaaagagaatgcaaaattcccaaaccattagagcagagaaagaaga

SEQ ID NO: 326928 - DNA, 608 bp, Homo Sapiens
gtataaaccaaggttgctagaattttattttcatccatttcagtccaaccaccttccccttctccaccaagtttcagagtatacagctcctcaaattcaatttctctggagactaaaccactggtcttctgtgggtttggggactgggaaaaggaactttggtggggttggtctaagtgctacatacagtgtttctaccttctgtttttagtacagtaacttatccctgcctaccttggtactactgtacacttctaatttatgaccatctccagggattcttatggaataaaacttgtttctataaccctctctggctggccactccatttatagcttctttcattctgctaaatttaattagcatcatccagaaatgtgttaaaatctctcttcccctgttgtcttctctcttttgtatttttcgtattttattgtcattttaatgagtcagggtggagaagaaatagacacagtgtgctatagttaatcagaagcctcatggttctttttgagatggggtcttgccctgttggctaagcttgtcttggactcctgggctcaagggatcctcacaccttaacatcccaagtagctgggactacagg

SEQ ID NO: 326929 - DNA, 325 bp, Homo Sapiens
  misc_feature (263)..(263): n is a, c, g, or t
aaaggcaagaactttcctaatggagaactgactgaaactgtaagctacctgatgaggtaatgaacttcccagttgtcccaaggtgttaggaagaagttgggcaacagcttagtgggtgtgctggggtagggatgcaatgcatatgtgtggtagcccaggatgaaccccactatggcccttcctatgcttggattctatgagactatgaagtctctaggtagacattcaatcacaggatggaaaaagcggaagtaattcgacangtaagtcatgggtatccctggggaatctaagtctccagtcttagattgtcttgagactctgg

SEQ ID NO: 326930 - DNA, 705 bp, Homo Sapiens
  misc_feature (58)..(190): n is a, c, g, or t
  misc_feature (198)..(222): n is a, c, g, or t
tctgtagcccaggctatttttaaagggaaatcaggaaataggtaaggtaggaacatcnnnnnnnnnnnnnnnnnnnnnnnnnnnnnnnnnnnnnnnnnnnnnnnnnnnnnnnnnnnnnnnnnnnnnnnnnnnnnnnnnnnnnnnnnnnnnnnnnnnnnnnnnnnnnnnnnnnnnnnnnnnnnnnnnnnnngtttaccnnnnnnnnnnnnnnnnnnnnnnnnngaagcagtgtaacccagaaaagggaaaggaactttgcactgctggagaaaaacaaataggaaaatgctgttctcagaacaggaaccaaggctttctgacgaagaagaaaccttggactctgggatgaccgccacaaataccaacaggtttgaggcagcctgggatgtgatccagaggaaagccaccacagtgaatactatgaaaatgactgtgtttccctgcatggctaactggaaactcaggatatttgctggaaaaaacaaaagactctgttgatccttttcattcctgctgactgtgcaacttgtaatctgcagtttgaatgataacagcataagacctgggaaccgcctataataaagcagtgtgccagaaaggggaagaatttgggacataaattggtgtttccgtcattcccaacttgacgctaagaattttaaagagaaaaaaagaatgcagaaagcaagtgggcagccaaatgat

SEQ ID NO: 326931 - DNA, 689 bp, Homo Sapiens
tttattttactttatttttgcagaggcaagatctcaacatgttttccccagagtgggctccaactcctggcctcaagcaatcctcctgcctcagcatcccaaagtgttggttataacaggcatgagccactgcgtgtgacatggcaaatttatttaaactacctgagcctcggtttcataatctcaaagtaagaatattagtaatacctacttcactgaattgttctgaggatgtagtaaattaataaacataaatcagtgccagacacatagtgaacacaaagtactgggcaattgttacaattaacatgatctttcacctcaaattcttcctcaactataaaaaacttagactattttataatatggttttcccacaaaacaatttatccccactaagtcaaatataaaatagatataaattaattatgttagctttatttaaatcacagtatttttcttcctttgggtctgttcagaatttcagtggcaattatgcatatatatataaacacaatttccatagcataagtaccctctctatggcgcttaaaaatcttccaaacatccaggaatgtacttaagcagtttgattagccccttacgtcagataaatgaacagttttataaacaataactgcaacacaggtcattttgaaatgagagattccctgtagtacagtaaatgt

SEQ ID NO: 326932 - DNA, 1059 bp, Homo Sapiens
acttttgaatatatctgatttttattacatatgtatatacacatgcatacacaaacacacatattctgaagtgaaacccttaaaaagaaagactgagtattaaggttaaaattaaactatacaaatccaccatccatctcctaaataagcctaaagaacacaagtagctaaagtatgggtatatatgctaatcatagagagaaaagcaataacaatagaaatgtggtcctgaaaataggcttgtgaagataaatctacttcattctacccaaaccctttaagatacacattcattgtaagaatttaccaagcatctgccatgttttaagcatattaagtacaggatcataattaggtacagttgaatattcaggacaatatctaattcagaatggtatctaacaatcatgaaaaccgaaaattaagaaaaacgcacaaaatcaagacaattatctaatgccagaatctgagaggaactgacactaattagaagctggaatgagaataacctttgggcttccatttttactacctccactactaacttcttgttctaatccaccatgatctgtgcttggaattttgctgttgactcttaagaggtctccatgaatctgtccttggcttccttcagtctgttctcaacagcagccagagtgagcctgtcaaaatacagatcacacccctggatactcaaagctcccactggtttcccatctttttctgtaaaagccagagtcattacaatagcctgtgggccccaaataatctggtagcatgttctctctaagaccgcttctcctcctatactcctacctgatttactgtgctccagccacatgcatccctgttgctttccagacagacacaccaggcatgcaccaccaagacctctttgcgcttgtcaattttttctgcctagagtgcagttcttccttcagattttttcatggctcactgttatttccttgaggtcatggctcaaatgtcaccatcgcacaaggactttcctgctttatttttctccatagaaattattaccatttaatttagtgtgtg

SEQ ID NO: 326933 - DNA, 803 bp, Homo Sapiens
  misc_feature (35)..(35): n is a, c, g, or t
  misc_feature (260)..(300): n is a, c, g, or t
  misc_feature (737)..(747): n is a, c, g, or t
  misc_feature (770)..(770): n is a, c, g, or t
  misc_feature (791)..(791): n is a, c, g, or t
ttgcccaggctggtctcaaactcttcacctcaagncaaaactcccactgcagaaagctttgggattacaggcatgagccaccatgccaagcccatacttattgttaataaagtttcagtgacttgcttactaatcttatgcaaaatttcatgtaatttatgtaatactacataacaatgctacatatggtatgtatacatacactgtatacacacaaaggtctgttctgggtattttatgtatcttatctccatttcagnnnnnnnnnnnnnnnnnnnnnnnnnnnnnnnnnnnnnnnnnttacatataagcccggtttaaagagaggataatatgcaaccaccctagttgaaacagagtgtatcacttctttctcaccctaaatttaatgcctagtttgaaaatcagtagacaataataaagttgataagctttaggttggtaggaaagctatgtaatctatatagtgtactaaatccttatatgtttttggtaaaaaaagactttaatagctaatttggacttcagaaaatgggttaatttcacgagtgcatatcacttttgactatattagtcaagcatattattaaagtttaaaaaactctaaaacttctgtactgtttttttcttaagtgctctcttccttatttctacattactacattcacatttctgctgtcaataagccctaatggagtgataaactttaagctagtagatactgcaccatgtcttgnnnnnnnnnnntttcttaatgaaatggaagctgnacttcctggttggttttaaanacttttgaacag

SEQ ID NO: 326934 - DNA, 591 bp, Homo Sapiens
tcttccaatggcttttgatggcagctggtattcttctcaccctcaggtatacctcagactgagtttcctttgagtcaggaaatactgagcccacattgacattcacattcacattcacaggaaatctcagtgcccacattcaactgagccatgtaatgggcaccccgcttttggactgactgggaattgattgtcctaactctgaccactggtctctgatctgcctggtcttgcttcagttaaactccctctgccacatacctaaattaatcctgcactacgacagtatcctgcttttgtataactagaaatttcagttaataatgccctgaattgacttcctcatagctcttaaaacttctggttatatgtgtcaagatgaatattttgataaaagaataagtaaagcatcatgttcaggaaagtaagtgttgcagaagaaatgagcaatgatatggtctgatgtcctctacatttgatatatactatatatcaatttgatatatagtatgtatctgattgtagttaactccaggagattttccccttatcttagagtttgaaccatatagtgaccatgtattatcgaag

SEQ ID NO: 326935 - DNA, 431 bp, Homo Sapiens
  misc_feature (37)..(37): n is a, c, g, or t
aatggatggcccccaacctccggcccacgggtccccngatcctgccccccggcctggcctccagttaaaacctccccctctggcccacataccccaaattaatccctgcacctacgacagtatccctgcctttgtataacctagaaatttccagttaataatgcccctgaattgaccttccctcatagctcttaaaacttctggttatatgtgtcaagatgaatattttgataaaagaataagtaaagcatcatgttcaggaaagtaagtgttgcagaagaaatgagcaatgatatggtctgatgtcctctacatttgatatatactatatatcaatttgatatatagtatgtatctgattgtagttaactccaggagattttccccttatcttagagtttgaaccatatagtgaccatgtatttttgtcg

SEQ ID NO: 326936 - DNA, 765 bp, Homo Sapiens
  misc_feature (325)..(325): n is a, c, g, or t
gcaaggtttttctgagatactatagatggagagatttccatctggaaaacagatggcagcagaaaagtgatataaattagtatttaggaatagttcttttacatctcaggtcctgatggatattgtcaagggagtcttcactttaactttttctagagaacacatctctttttgtttggatgagtcacaacaatgaagttgtttatttaacacatatttttgaggccctattacgtggcagacacttgttaggtacaggtgagttggtggtgaacaaaatagacctccctggccctcatgggcttttacagcctaatagtgggangtagacattaaaatatataaattttaagccatattaattggattgatggaaagtccaaagggctgttaaagtgtgtaataggggatcttgatcttcgtctgagggagtctgggaaacttccctaaataaatgacatttaaaatgtgatctgaaagataagtaagaattaagtaggcaaagggcatggggaagggtgggagatgggaatagcccactaagcagaagaaagagccaaagcaaaggccctaggacaggaaggagtacggcacactgagacagtgatgtgcacagggagtaaggtggagtgtgctaggaatgtgcctagaggcagagatgagagctaaatcatatttagcctcttcatgggccatatttggattttgcctgtatctgaggcagacatttttccacctgcaaaatgagaggattaagcatcaaag

SEQ ID NO: 326937 - DNA, 754 bp, Homo Sapiens
gagaagaagggagctaaaagttatctctaagccaagaaggcagatgacattatgggtttctgaggttggttggtggcatgtaaataagacttcttgtgactgttaaatacgtgcataaacccaagctcagaaatgctggtgatcctgaacaggaaacacgagaacccattttgtactagtcagagagatagtctttcctgattatgttccatttcccaatgtctcaactagcccttgctttggcaccgcctggctcactctgctatttgtagttgcagagggcgaatcaggtcaccttcgcctaatgtttcaggggggacattggaggctctctggcttcaccattcctgcccttctctcacagacacaacgcttcaattctttgcagtcctttgagaagatcatcccattaaggatggccacacagtctctgcttcttgggctggtgacatctattataatatggaacagttcagaagtgaaaggggttccatccatccacagccaggccttgccactgtcagggcgcaaaagccctgtccaataagagtagaaaaactcagagtagctctgagacgcggcaaattccaggtcttcttgtttgtttatcttcagcatggtagagttttcactaaggcagaaatatttacagtcctcccaacttttgctgtctttatagaactggtagcaattgtctccatgccatttccattgttctgtacaagggctgcacctgtgtgctccagctttgtta

SEQ ID NO: 326938 - DNA, 513 bp, Homo Sapiens
  misc_feature (15)..(15): n is a, c, g, or t
  misc_feature (407)..(407): n is a, c, g, or t
ctgcctccgtttccnaagttacaggtatcagccaccaagcccggcccagtattcgctatttttatgatcattcagcacccatcactacactgaccattaattcatggcggccctgattaggcttgtggtcactaggtatttgtcagacaaacactgactattaggatacattactaagcgtcactgcctcagggtcccaagctatttttatgatcattcagcacccatcactacactgaccattaattcatggcggccctgattaggcttgtggtcactaggtatttgtcagacaaacactgactattaggatacattactaagcgtcactgcctcagggtcccaagctgccattagagagaggagaacagaggtgcacgctggagagacatctattatgatttttnttcttccccttcgggaaggggtggcgggtggtggcagacagaaggggctggttttaaaacaataaagtcaatttggtacggtctgcttcagtgttttgagatcttg

SEQ ID NO: 326939 - DNA, 366 bp, Homo Sapiens
  misc_feature (308)..(308): n is a, c, g, or t
  misc_feature (355)..(355): n is a, c, g, or t
tacaggtatcagccaccaagcccggcccagtattagctatttttatgatcattcagcacccatcactacactgaccattaattcatggcggccctgattaggcttgtggtcactaggtatttgtcagacaaacactgactattaggatacattactaagcgtcactgcctcagggtcccaagctatttttatgatcattcaggcacccatcactacactgaccattaattcatgggcggccctgattaggcttgtgggtcactagggtatttgtcagacaaacaatgactattaggggtacattactnaggcgtcactggcctcagggtccccaagctggccttagggagagggngaccagaggtt

SEQ ID NO: 326940 - DNA, 454 bp, Homo Sapiens
  misc_feature (390)..(390): n is a, c, g, or t
  misc_feature (400)..(400): n is a, c, g, or t
  misc_feature (405)..(405): n is a, c, g, or t
aaagatctcaaaacactgaagcagaccgtaccaaattgactttattgttttaaaaccagccccttctgtctgccaccacccgccaccccttcccgaaggaaggaaaaaaatcataatagatgtctctccagcgtgcacctctgttctcctctctctaatgggcagcttgggaccctgagggcagtgacgcttagtaatgtatcctaatagtcagtgtttgtctgacaaatacctagtgaccacaatcctaattcaggggccgccatggaatttaatgggtcagtgtaggtgatggggtgctggaatggttcatcaaaaataggcttgggggaccctgagggcagttgacggtttagttaatgttattcctaatagttcagtgttttgttntggaccaaantaccntaggtggacccacaaggcctaattcagggggcccgccctggaatttaat

SEQ ID NO: 326941 - DNA, 687 bp, Homo Sapiens
actatggattggtctgtataccacttatctaagccaagtaaggttaaaaatcagtgtgttcacaaaatccttcaatgatactatcataggaacagtttgctatctttgtgacaaataatgaagacctatctagaataccaacttattggtactaaagaaatcagtcaatatttacatgtatgcatagtatattaattcagattgtaatatatgtgtagcctgctagtagcttttcaatggaaaaagtgaaaagagcttcatgttaacttttttaattttaataggttgcttcttcaagtggaagaagtatttgactgggggtcagaagaccctgggttggaatcctagttccatctttctgtaataatgtaggtctgctctgcccatcctctgccctcctccctcagaaaaatctctgcaaacccatgatgtccaacagacatagctcatattggtcacagcttaacggagttaactacctaaccaagttgggcctatctaactggctaagaaaaccaataacttctgggacttggtcaaaatgatgcattgtcttgcaagagtttttaattgagagacacgaggaagttgctagtgggttgtgtatgctacagctgaaatatcccatagggcagcaagattaatgtacagaagaagccagtcatggctaggcatggtggctcacac

SEQ ID NO: 326942 - DNA, 886 bp, Homo Sapiens
  misc_feature (681)..(698): n is a, c, g, or t
tgcgggtgaaacaacaggaatacatggaatagaggaatctgagcaaagactaactcaaagatggtggtgtataacttatagaactcccattctgtgttgggcgcataaatgatctttgtagataccatttcatttactcaaataaccctgcgagccaggcactgttatccctgtgatgaaactgaggctcagagaggttaagacacttgccaaggattacagagctagtaagtggcggaactgggctttaaacccaggaagctagattccaaagtcttgtgttcttaactactaagctacactgttgatcacccttggagtcgtgggttaggagaaaaggaagggaaacaataaggtgggagaagatgaaggacttagggctcaaagctgatgcttcagtgaggtggaaaacctgtgctgtgggggttttcctcagattacacacacgtgcacacgtgttttatatcaggtgcttgaaaaaaaggtgattaatttagatatttacccgggattcttttcagaagcatttttaatgagtcatatttgcactgcacaattctttttgcttcatttttatatagttgaaggcagtaaggaattcttgtacaagtaaacatcttttccttttgtacccctcatcactgcgaatttgatagaacccttagtaaatgaccaggttgnnnnnnnnnnnnnnnnnnctctcccacaacgtaacatgggtttggcaagctttaaaaaatgttagtatgtttgtatccactagtatacctctgaccatttaataggagatccctgccaattagagctagtgatgttttgttctaatttggagagacagggtgtgtctgtctttaaattctctgtcagttttcctttttgtaaaaaa

SEQ ID NO: 326943 - DNA, 900 bp, Homo Sapiens
  misc_feature (186)..(223): n is a, c, g, or t
  misc_feature (727)..(839): n is a, c, g, or t
gcgagtgtgcatttaaagcaaacagtagctcaatgggaaataatatttgcatctctattttatctaaagtctatttttaaaaggcctataaaatcataaaagtcatgtggcattatttttcaactttgtaaatggttgcttggcactcattcaattagacaggatagtttaacagcagtgatactnnnnnnnnnnnnnnnnnnnnnnnnnnnnnnnnnnnnnngaccacatcttcattgaaggcctcatatgagatataggtcactgcatcaggtaatggagtttcaaggaggcataaagtcttgaggatcttatcaagttgggacgtcagagtaactacattcataaggtaaatcataatgcaagcctgcatgtgcttaatgctaaatgactgacagtgatattatggagaaatgggcatccctgaggtcaatgtgatgtactctcagaaatatgagtattgactacatcagagaatcatagactataaaaaccatgaaggcctttagggatgtaggccacctccttcattttacaggtgagtatggcagcttctttcaaaagatttctcctcccctcctcatcttatgtaagaccttctactgaacctgagctgccccatcacttcttcattacccagagaatgtggcagaaatgatgttgtactggttccacggtttaagagaccaaagcctggcagtctcttagaattcacactttagtggannnnnnnnnnnnnnnnnnnnnnnnnnnnnnnnnnnnnnnnnnnnnnnnnnnnnnnnnnnnnnnnnnnnnnnnnnnnnnnnnnnnnnnnnnnnnnnnnnnnnnnnnnnnnnnnncataaactttttaaacagtatgcaaggtgtagtggcgtggtgatgcatgcctatagtctca

SEQ ID NO: 326944 - DNA, 452 bp, Homo Sapiens
aaagggttttttagcccaactaaaaccaactttcctgcaactgggtttccttgcccccccttgccccctgtaacccataaggcaattctggttgcttccagcaaggaaaggctcggctgccatggtaagttgggtggtctctgaagagagctccttttgttttcctgatggacccagggccaatgtgccgcagccctcgtgcaacacaaagtgcaaggctgtggctccaagatggagtgtttctccctctgcctttaagagaacacgggggtcatagatagcattgtacagacgtgtaccttgccagggctgccaggggaatgcaggctcatggggaggattgaggggacagagatgtgtgtgtacagattagtgtgccatagactaagcacagcagaggcaaagaatgccatctaagctcttgtcgctcggagtgtccgaggatcaatcac

SEQ ID NO: 326945 - DNA, 550 bp, Homo Sapiens
acagcatgagaacagatgaatacacactgcaagcttctccttggcttgtagctgccatcttttcctatgtttcttcacatggttttcactctgtctctttctgtatccaaatctctcctttttataaagttatcagtcatattggattggggcccaccctagtgacctcattttaaattgattaactaggtcgtggagacacgtgaaggttggtgcggagttcgtctctgcaagcatggttgtcccggggatggattcctcctgctcttcctctgcggcgggtttgggtgcagtggacccgcagttgcagcattttcattgaggtagagactcaaaagcagcgcttccagcagctgggtgcaccagatgactgaactttgttggggagaagtgcatggacaagcctgggccaaagttggacagtcgggctgaggcctgttttgtgaactgcattgagcgcttcattgatacaagccagttcatcttgaattgactgcaacagacccagaaatccaagccagttttctcagaaagcctttctgactgatct

SEQ ID NO: 326946 - DNA, 643 bp, Homo Sapiens
  misc_feature (363)..(363): n is a, c, g, or t
  misc_feature (603)..(603): n is a, c, g, or t
ttagatccgcacacaaaataacattttaaagctaaatactttggattttatgcatgagggaactacaaactgcacactttccacaagggagggaataaatacttttttctgtgtccttggagtgtgggtgggattcgtggatacatttctctggttcactatttcaatgatatgaaggagcctcatgttgcagcacagaagatttttcatcgttggaagttaaggttagttcaccttcattgattcctccctacactggactaaagcatttaatctagatacacttagggtctctatatagcttgtcataatctctatgcataggaaagggggctttctaggaacctgttcagcatattgtgnaaatatctcctatatcaactgataataagaaatcagaattgcttaattgtggcattaataaagtatcacctagattgaactaagcaggaaaattttagatgagagtttaccatcacaagcaataaacacacaacagtccctgaatcctaaaaaggtggagttcttgatggtattagtgcgtatcttcaaattatttgctctctggaaagatgctgataaaattttgtccactaccatagnatccctgctggatgggaaccatatctttacaatagactct

SEQ ID NO: 326947 - DNA, 503 bp, Homo Sapiens
cctcattccgtttcattcttgactctgcctgtccacctttctcgtgtgtctctgttctttgcatcttccatggaaacacgggatgagaacagggtgaaggctctcagagccagttaaattgtattcctttttggcaactctagtgaaatcctgtctgatgaatttggaactattgattgcgataaagttattaatattaaagtttcttggaacacttgtggatatcacttatccagatagcaggtccccagttaatatagatgattgaatttgggagataaatgcactattctggggggcaggaggtcctgtcgcagaagaaaatgaaaacacgtggaaaggaatcatgtcaagcttaacatccaagttgaaggccaactatacggaacttagattttttaataacctgtaaatggtctcagaggaatggtgaattgctgaagtcttttgagtggagtaagtcacataattaagagattatttgtaacagactcagtcaacta

SEQ ID NO: 326948 - DNA, 756 bp, Homo Sapiens
  misc_feature (44)..(44): n is a, c, g, or t
  misc_feature (152)..(171): n is a, c, g, or t
agaaacagggtctcactctgttgcccacgctggagcgcagtggntgtggtcacagctcactgcagcttccaacaccgtggctctagcaatcctcccaccttagcctccagagtagctggaactacaggcatgtgccaccgcacccagctaannnnnnnnnnnnnnnnnnnngtagagacagggtcttacaatgttgaccaggttggtcttgaacttctggcctcaagtgatgctcctgccttggcgttcccacaggtgtgagccactgcacacagccctttattctttcttagcagtgcataaaacagtggtgtttgctaaccactgatggcatcttagacttaatgaaatactaatagactgatgaaactgtatatttaaataaaaaattatatatatggctataaacatttttcaaattataactactggcccaaatgtttacagcatctttaatcacaggcaaatcccactttggtagaatttgttaacatgtggtttcaaacttaattccttctaaaattatttttcttggttattatactatcaagtaacccaaccagttatttgtcttttctaaattgtaaaatggtctcagattggtataggaagagtgactaaggaggcgactaagaatgaaactatcctcgatctatgaataatattaagccctaacattttataagtgccagggatcacttaatccaaacccttttttatagatacagaaactcaaaccctaagtgtaaagatgtt

SEQ ID NO: 326949 - DNA, 685 bp, Homo Sapiens
  misc_feature (51)..(68): n is a, c, g, or t
  misc_feature (558)..(558): n is a, c, g, or t
catattaggcattccctaggcttaaaaaacccaaaaactccaaaatagggnnnnnnnnnnnnnnnnnnccatgctcagcaaatatattaggataaatatgtatcagaaaaatattcgtttcaggattcctttaaatagtaagtccgcctcatgtctgtgtgtcttcacagatcattaatttcttggcaaagaagttggggtgcagacaccctgtggccacagcactggaactgaaggtcagtgggaacgtgatgagaggggttttgaaaagtctgcgctcctctgaaaacattctgactatgccttttctctctccacggtttcccaaggccactactctatcttcctctgtttgaatccaaacagaagtacaaggagtcagatccacaaatgagtcgttttatcttgccctacctctctgtgcagtcaatggccaaccatcctatggatggacagtcacaggggccaaccaaggtgtcttatacgagcaggcagagggcttgcagtggctttttgtaggtttttggctggagctgaactaactgcaaactaaaaaanaagttcccaacagcagcccttcctgaagctgacggtctgactgtggaagtttagcccgagtatttagggtgctgggaagacatgagaactaacttatgtcctttgttttcttcctaagcaaactggg

SEQ ID NO: 326950 - DNA, 858 bp, Homo Sapiens
  misc_feature (561)..(561): n is a, c, g, or t
  misc_feature (580)..(580): n is a, c, g, or t
taagattcagaaaaagacctttatttttaggttacattatcttacacagcaggcaaataaggtgtgttttgacaaattagtggtattaatgaaaatatgagtctcacaaactatgaactaaggcagaaaagataaacatccttgttttaggcctcaagtggaggtggcggaagggtttatgatattatggtaactgtagaagctttgccagtgctgtccaaggtgccccacttctgtgtggaggcttaagcaatcttggtatccacagtaaatacactgaggggatgaaagctaaacattttagttaaaatgagcaggagtggctacatagatgggcaaactttaccagtgcagatgggatggtgagaagtcagaaataagaaactaggggcctggcttctggttgttggttcaggctaaaaccagtaaagtgaatacaggaggacacccagcagtcttgtgcatggggatacaagagccaggatactccaggactggacacaagctgtgttaccaacagtcactttttcatgagcttgctcacaggggtcctggaaggcngagttgtgaatgcctacangtgtgctaagcactttcacacatctttatactcaggtgaaatgaaccgtattccccccctttatcactgatgatacaggttagattgttaacaaacccatgtctaacttcaaagccgattcaggatcctccctggggctggagtattagtcattaaccctttaagcctagtcaaagaacatgcttttcccacttctctcacatcaccattctaatagaaacttacaggtatcagaaagtgaccttgtgccttagaaagctacacaaataatcaacaat

SEQ ID NO: 326951 - DNA, 782 bp, Homo Sapiens
  misc_feature (190)..(230): n is a, c, g, or t
  misc_feature (233)..(247): n is a, c, g, or t
  misc_feature (260)..(497): n is a, c, g, or t
cttacaggtttttatgtatgaatatatgttttcatttctctggataaggagtggagttgctggctcgtgataactctatgtttagattttgagaaaatgccaaacggttttacagagtggctgcagtaggcacattttttaaaaacagctttattgaggtctatttgatatacaaaaatctgtacattgnnnnnnnnnnnnnnnnnnnnnnnnnnnnnnnnnnnnnnnnngcnnnnnnnnnnnnnnnaagatggtgtgtnnnnnnnnnnnnnnnnnnnnnnnnnnnnnnnnnnnnnnnnnnnnnnnnnnnnnnnnnnnnnnnnnnnnnnnnnnnnnnnnnnnnnnnnnnnnnnnnnnnnnnnnnnnnnnnnnnnnnnnnnnnnnnnnnnnnnnnnnnnnnnnnnnnnnnnnnnnnnnnnnnnnnnnnnnnnnnnnnnnnnnnnnnnnnnnnnnnnnnnnnnnnnnnnnnnnnnnnnnnnnnnnnnnnnnnnnnnnnngtgtgaggcaccgcgcccagcctgagctaccacgcccagcctggtgtattcttaagtcatagtgtaaatggcactaagttttgtcttcagcactctcagcttttcattcttttcaatctctttctccattcaatgatgtctcctctctatgtttaggactctactgtgtttattgtcatgtttggtcaatacactaagaaaaaaagtttttgataaatttatttgacttgaagtatgcatgatcaggatttatgtgaaatctctgttagaactatttgcatttta

SEQ ID NO: 326952 - DNA, 423 bp, Homo Sapiens
aaatccatataatcattttacctattttgtatgtttatgaatttatgtatctaattatatttctgatttacttgtagagatgtaaaattcttatttctgagataaaaaaaattctcctgtaaaacattatagaatgaatccacaagttatatctcccttgataaatgcaatagtatctatatacttaattttcccacacaagcctgagactatttttatgtcaatggaagaaaatcagacaaagttgcccacgaagctaaaacctaacacttcattcatgttgaaagctaatttcagactacatcgaaacatgcatccttcacttcatgttcatagtttgatagtttttaacaatttttttaaatggggtgtcaataaatggagtacagatgctccttgacttactatcttgctgtgccgaat

SEQ ID NO: 326953 - DNA, 888 bp, Homo Sapiens
tctctttctttctttttccctcccttcctccttctcttcttgttattattatcattattattattttgagattgattactttcccataaaagtggaatatactttgctttggttgagtaatgctctaattatctgaggtcttacagtaattgattcagactgatgaccacctgctgcccattccacatgggcaggacacagcaataatgagaattaggttaggctcataggggatggaagccagcagggaagggactaaagctttggagaaagctgaaggtgactactgccctggagcttgaactttctaatggccatggccttctctgaaaatgtaattactatgaccactggttagtgatgtatttttcatttcttaccactctcatccatttaaacactgcatagtaataagggtaacaaacagcgctggaaaaactgagggaaaacaatcatctgacatttgcatgatggtttacagtttatactatgccttacacacaacatataatttaactgtacaatggaaaaagcccttgaatgggactggcagaagacctaagtttccagttctgattttgccacacactgggtgaccttgagcaattcaatttacctttctgtacttctatctgtaaaataaagaggtcagattaggtaactcctaggtcatactctaataatttattatgctaacctttaaaccatcttgtggtttaatgtagtagacaggcgttattatcctcattttacagacaaaatacctgaaattcaagtgtggttaaatgacatggctagacccacagagtcagtgacagaggtaaaaacagaatgtgcatcttctgattttaaattcaaggctgtctcactacaagttttagaaatttt

SEQ ID NO: 326954 - DNA, 730 bp, Homo Sapiens
ctttattgtgcgcagtctgctttgcagagttgtcatctactgtcttacttcgttgtgagcccctttcagataaataacagctcttgtgagggtttagattttgataagattctaggctgccatcagatgatgaagaaagttgctctgattgcaagttgtctgtatcactcaaacttccctcagttacaggtggggtccttatgtattttcttcctaactccgttcccaggacattcgtcaatataactctgggtatcctttcagataaattaaggctttggcgaagaggttctaatttttgacatgtctctaggctgtcaacagatgtcgaaggcaatgagtctgattgcaccttgttggcatcacataaattaggcatcgtttctaggtagggtctttctgaattttcgtcctaaatccgtccataggacattcgtcaacataactttgagttgcctttctggtgatgacttggaagtaacaggacaccctcggatatgttttttatttttatggtctagagagatgactttattccttaggcttctttcccactgcaaagggagagtccagcgttctgagcttctgaatttggacagtggtgattgaacatggacatcctctggttttgcatttaacatctttcttatcggatgaagatggccgtcgcccgagctttctcttgtccatcttctcccgctgctgaaatttcagttgcaggcgctgtcac

SEQ ID NO: 326955 - DNA, 661 bp, Homo Sapiens
aaataaatagattttataaaatttttttaaaaagtgagacaatagtcatgagtaacaagggggtaagtttcctagagccacaaatttcatggcttaaaacaacatcaatttattctcttacagttctggaggccagaaatttgaaatgagtcttatggagctgaaatcaagcacaaaccaaagctgggcttcatctggatgctctatgaaagattcctttgctcgcctcttccaattcctgggtggttgctggcattccttgcattgtagactcgtcatcccaacgtcttcctccttggccccattgccttctcctctcctgtgtggggcatcatcaacttctccctttccctccctcttaaaagggatatggatgtggactgctttaggacctacctggataattcagaataatctccccatctcaagacccttaacataatcacatatgcaaagaacttctcttttctttaatcatatgagttaacatgtacaaatttcagagatgagaacatggatatctttagggtgccattttttcagtccattggaaatggtagatgtggaagaagaggagctaaaattcaatcagactaggggtctgcaatctgtagcctgcaagtcagtgcctgtttttgtaaataaagttttattggagcac

SEQ ID NO: 326956 - DNA, 777 bp, Homo Sapiens
  misc_feature (54)..(54): n is a, c, g, or t
  misc_feature (126)..(238): n is a, c, g, or t
  misc_feature (263)..(374): n is a, c, g, or t
  misc_feature (403)..(411): n is a, c, g, or t
  misc_feature (760)..(760): n is a, c, g, or t
agctaagaaattgtgctttttaattattttttctcactaattaaaatgggatgnaatagaaaaaaattattaatattgtaatgttacatacaaaagttatttgaaggccgggtgcagtggctcatnnnnnnnnnnnnnnnnnnnnnnnnnnnnnnnnnnnnnnnnnnnnnnnnnnnnnnnnnnnnnnnnnnnnnnnnnnnnnnnnnnnnnnnnnnnnnnnnnnnnnnnnnnnnnnnnntttgccggacatggtggcatatgcnnnnnnnnnnnnnnnnnnnnnnnnnnnnnnnnnnnnnnnnnnnnnnnnnnnnnnnnnnnnnnnnnnnnnnnnnnnnnnnnnnnnnnnnnnnnnnnnnnnnnnnnnnnnnnnntagaccttgtccctcccctgagccccacnnnnnnnnngttgtttgaaaaagatggtttggatcctgaatataagtctgtatatataaagtttaataaaacataatcttttgtatttgttgtatttccttttgaaatgcaaaaggtttagaaacaaccactgatttgttcattatattataaaatattaatttaaatacagctgcttttatgggggtatatgcggaaggatttgagtaagaatgtcattttcaattactattcgtttagcaaatatttattaagtacttatgatacttttatgtatgtgtatgtgtgtgcacatacacaggatacacgttctctgccctgtaagagcctaatagttgtgtagacagggtattgaagnctcaggtgctgctctct

SEQ ID NO: 326957 - DNA, 509 bp, Homo Sapiens
cctatgcagagtgtggtcttgctagtgcctggccagcccaagttgggagagagaaaaccagttaaaggtgggtctgcagaaaggcctccgcaggttgcatcggtgtcttctcccattatggtgtcgtagagaaattagaacacacaaaagtgctcatgggactgaggtgaaatgaattctgtctcacagtgaaacctgaaattcgtaaaagagaccagcaacagatcccattatttttggtgtttaaaatacacacaggatttactgtgttacaccataacccagcaaacacaggtgaagcatcaaacaaaagcaggggtggggtggccaggactcctcaatgactgttttaaaattagacccaacctgataagcctgcttgggatgatctgtcagtgagcctaaggggcaggaggaacctcgggcaccagtatttcacgccaatccagggcttcctatgtaactagtcatggagctgactcagtgatctgctttgtatatggtaggac

SEQ ID NO: 326958 - DNA, 766 bp, Homo Sapiens
  misc_feature (33)..(33): n is a, c, g, or t
  misc_feature (228)..(281): n is a, c, g, or t
  misc_feature (474)..(474): n is a, c, g, or t
  misc_feature (487)..(487): n is a, c, g, or t
ttttgggcaggcctcgggccggaatgacccctnacttccaccattccccactccaagtccagcttcggcgtctatgaggcctagcggcttccggaatccggtatgaatcaggggcacggttcggagagccgggtctcgaaagcagctcttcagtgaggcctcctgaggctggtgtaggggggtggaggtgcgtcgtgtaccccagaggctgccagcgcctgctcatannnnnnnnnnnnnnnnnnnnnnnnnnnnnnnnnnnnnnnnnnnnnnnnnnnnnncagagggttcaaaggactcagagggctaatgagcccggcctcttggggacagggctgctggcctcggtgctgtcgccagcgcagataccaaaaggctcccaggccggccaggacaatgagcaggatgccacctgtcagccccacagccaggctggccacatccactcgtccacgccctccctttgccattgtnagatgtagctctncccaaaagcgctccgtgagagtgttgtcctcaaaatactccctggcctcttcccaggaacacctctcttccagacactcccgtctccaggttccctggtgtgagcagctccaggtcccagtggttggctcttggaatccgggtatggctactcaggaagctctgggcctctgggggacccaggaagacttcttggtctgtctcctcactgggtgaagtatccaggcaggtggttaatgccatatatagcagcagcagagaggggtggcccctcatattt

SEQ ID NO: 326959 - DNA, 800 bp, Homo Sapiens
  misc_feature (141)..(151): n is a, c, g, or t
ataataatctgtaatagatctttcacctgaattgataggcagagggtcaaatatctgcaggagtagcaaggaacagatatgtaactaatattgggatatttaggagactttaaggcaatctaatggcatgttgtaaaatgnnnnnnnnnnngaatggcgagaaacatcacacaataaggtgaagaaaaaacaataagctatcaaggttgtctcctgaaaagaatctaaccatgcacttccaaagttattttgactggctcctgctgggggttgctctaaaaactcctgaaaaagctataaatgctgatggatttttggatgagacatgagttcaaagaggtttgcaggggtgtgtctcgctcttgtcttctgaaccaggagagggattcactttatatcaacagcagcaggctgagagcttctggactggtcttcgctctgaaggcagctggtagcgcgtcattgtggaagctggtgccagagttagagactgctagggaagagcaccgagcgatgtttggcagtgttgcaattcagacaaacctcacaggaaagagctcccacagtttgaaaacgggctctgtatttagcctactgagcaaatcagaacctgaatcttcacttttaagaagacagttttacctacagtaattcttcttgatttcctattcaagaggatcattctaagccaggaaaataagtaaagttacattcttgtaattatttgtaattttttcttcgggggagaagagtttcttatgtggccttttattttttgaatctcatttctaccattgttt

SEQ ID NO: 326960 - DNA, 728 bp, Homo Sapiens
  misc_feature (628)..(628): n is a, c, g, or t
  misc_feature (643)..(643): n is a, c, g, or t
acttacatgattcattttaacatctgagaaaagctttgaaccctgggacgtggctagtcataaccttaccagatttttacacatgtatctatgcattttctggacccgttcaacttttcctttgaatcctctctctgtgttacccagtaactcatctgtcaccaagccttggggattcttccatctgattgtgatgtgagttgcacagctatgaaggctgtacactgcacgaatgggaagaggcacctgtcccaggaaaaaggcatcatgggctatctgtgggtagtatgatgggtgtttttagcaggtaggaggcaaatatcttgaaaggggttgtgaagaggtgttttttctaattggcatgaaggtgtcatacagatttgcaaagtttaatggtgccttcatttgggatgctactctagtattccagacctgaagaatcacaataattttctacctggtctctccttgttctgataatgaaaattatgataaggatgataaaagcacttacttcgtgtccgactcttctgagcacctacttacatgcattactgcatgcacttcttacaataattctatgagataggtactattatccccatttcttttttaaatgaagaaaggnagaaaggccgggccnccggtggctcacgcctgtggtcccaaggtgctgagattgcaggtgtgagccaccctgcccagccgtcaaaagagtcttaatatat

SEQ ID NO: 326961 - DNA, 583 bp, Homo Sapiens
atatgtaaaaggccttatatatttttcttaggtgaaggagatgtggatctgatattttaaaggatttcttattttagaattttggtttctgttgaaagcttcagccgacactggggagagagaaaactccatttctatggaagaagaaaatcccaggagaagatagatgcattttaacttagcagaaatggacctgtaaattaattcatttgtcagagttggggagggggactaactgagggagataatttggaaccagctctcctgccttcagtaaccaggttctgctttgctgatgatttaaatttacacactcactccttctagagcgatgattcttcctctggactggttcagtccccacagactcctacttggagggcagaaagttggtgctgtcaaatccaagttttcactctgtgatagtcagtgctctgggagtagaactgatacaggcaactgtcattttctgacaggagagtgacagcgtgagttgtactcacactctcattacgccatttggaaaggcacaatgtctccagagtatgcactcagtggtttattggtcttaatttgatgtttg

SEQ ID NO: 326962 - DNA, 748 bp, Homo Sapiens
ataagtttgtaaaagtaacaatctcaactatcttttactttaaccaaaagagaatttttttcttctagctaaaagaacacttggcaaacaaaaatgtcaagcaagtaagcaatgattgggtctagtttgtagtacccccggcagaatatcaaggtctcaccaatgttccccttcttagaactggtagataatcagtgatgggtacttcgcagtgtggctccaagatggaattcagatgttctgcagcaggcattgcatgcagctccaactcccatcattgatttggtagagtcagtactttagtgtctacagaactaaaaggctatcattccaaatgttccctgacacttttccattgatcagtctcagcatacactgcagtcactattgtaaccaaaagtaagcctggaatgggcagagaaggcaattttgactggattttaggaagccagaggaataaagtcctgtaactgttttctgtcattgttacattgaatcacctacaagcagcccataagagaaaatagagagttaaaaagatcaaggaacagaagtttagaggtagggaactgttgctcaatgggtacaaagatttagttatgcaagaggaataagttctagagatccgttgtacaacatagtacttagttaacaatataatactgcatacttaaaaaagaagatagatttcatgttaaatgttctacctaaacaaaattaaaaccacaagagaacacaaggaaatttt

SEQ ID NO: 326963 - DNA, 699 bp, Homo Sapiens
  misc_feature (74)..(74): n is a, c, g, or t
  misc_feature (95)..(103): n is a, c, g, or t
  misc_feature (379)..(379): n is a, c, g, or t
  misc_feature (416)..(416): n is a, c, g, or t
gctgagcttggccttaggggtatagatatgaatatgggtacaatttaggttgagattccccacaatgttgacancttgaatatatccgatttatnnnnnnnnncataagctgtgtggaactttttaaaaaagcttttagtgtcacctatccaattaagtgttttctcaagaaacatttttaaagctatcaatagctttacaattgatagctttaaaaatgtttccgtagaaaagaaacaacagtcctcaacagctttaaaaatgttcccgtagaaaagaaaaactcaactagtactcaaagagaagcatattatattgtaaaatgatggagaactcttttcataaacccatgggacaccagggggactacaagtatggnccttggttggtggccaaaaagagaaggaaaaaagccncctgcatcgcatgcctcccagggggcgctcttcacaggcattccatataaatggcgtgctccctggagctgtgctctgggacgaggctgaatgaggcaaacctagagaccctgtctctatcacttactatgcgattttagagatgttatttagcctctctataccttaaatttctcacttataaaatgaagataatattaaggacataagtcatcacctgttagcagatgatgttttagagctgcacagtcatgatgagaactgtattgttgtgctatacatt

SEQ ID NO: 326964 - DNA, 278 bp, Homo Sapiens
  misc_feature (23)..(23): n is a, c, g, or t
  misc_feature (102)..(102): n is a, c, g, or t
atgtctgggaaagggcttatcangacaacaaacacttctatgccattacttgtgggctcccccgaatgcagcccaatgtcatctctatatgtggaacgcccnaacccctctattgtggtgaattttttctgatccttcaagagtcagctctagcacccactctgctgtccagtggttaaactcactccttgtgaaatctggcatacacccagtacacaggacctaccacctcatattgagcatcttacttatttgtctgtaaacactctaagaactgt

SEQ ID NO: 326965 - DNA, 1134 bp, Homo Sapiens
  misc_feature (564)..(702): n is a, c, g, or t
  misc_feature (793)..(801): n is a, c, g, or t
  misc_feature (1043)..(1043): n is a, c, g, or t
tgaagtatgatgtggagcatcttttcatgggcttatttgccacctgtatatcttctctggtgagatgtctttcaggttttttgcccattatttaattgggttactcattttcttattgttgaattttaagagttgtttgtatatttcagttgtgttctttatcaaatgtgtcttttgcaagtattttctctcattcagtggcctgtcttctcattttgttttaagctattcttttttaacaccccaagattttcatcgttacttttaaggccactgtgcacacataaaatactaagaagctaaacttaatatctacaggtagaagttttaaattcaagattttaaccaaataacagagttaatgctaaaatctcacttttgaagtttatgttgaatattagcattctaatatttaatatttttctatttttgaaataggaaatggaaaaggatgcagtaggtttttcaaaagggtatcataggtgagcacttcttatagaagaagaaaactaagaggtagtgctatttacctcttcagcactaagtttatctttatttttattnnnnnnnnnnnnnnnnnnnnnnnnnnnnnnnnnnnnnnnnnnnnnnnnnnnnnnnnnnnnnnnnnnnnnnnnnnnnnnnnnnnnnnnnnnnnnnnnnnnnnnnnnnnnnnnnnnnnnnnnnnnnnnnnnnnnnnnnnnnagcttctagaaacaatcagatttccttaagattttgcaattaggtttagaggagctcacttgctttttcaaatatgggttggatatgtccnnnnnnnnngttttgcctctacaatgaaaaatgatttttaccagattatggaaaggaagattcataaaaatgtgcctttaaaaagcttttttaaagtgcaagttcaccaatttgacttttgaaaatacgttcattttaggaattgattttttaaggaaagttgtaaacacagcaaagcacagaattacactggttcagacttgcatcttagcaccaaaatccactatacaaatgcagacagcataaagtancctagtttcgctttaaatttgttgcttattttattctcccttataaatgtcattggtcttttgttagaacataatttactactttattttg

SEQ ID NO: 326966 - DNA, 789 bp, Homo Sapiens
  misc_feature (232)..(242): n is a, c, g, or t
tttttttgtgttcaaaatagttacaagatgtcagcagagagattgacatcattaactatattttatagatgaggaaactgaaattcagagtttctcaaattatactgctagtagagaatggacttgcactgtagaccagggtattcatttgagtccttgaaccttttaggcatcagggaaactccctaggaagtacatggaaatgtttgtgtataagactatgcaggtgcannnnnnnnnnncctgagaaaaggatacaaatcatgtgattttatcagattttcaaaggagtctgtgacctaaaacataacaaaatataaaattttctttccacatgagcgcacaacatggagtggaaatacttttgctggacttgggagtatataactcttacagtacatataagaagcatcagtatgaaagtaaatgatttaacagagagattctaggacttgcccagaatcacaagagttagtgcctaagtaaaaccagaactctagctgtccacaatttcagggaattggttttcctattgaccatgttatgaattgttgggtgtatagttctgtgatagttcctccctgaccagggaggtgggaggtctggttcccaggtctggtaccagtggaggacgtcagatccaaaggaaccttgagcagcaactgaattccagtgctctgctgagacatcaattagcattttgagcataagggcaatttgaataaaattctgtggattgtttgagaattctctaggtggaattaggaagtatggtagaattatcttacc

SEQ ID NO: 326967 - DNA, 428 bp, Homo Sapiens
  misc_feature (15)..(15): n is a, c, g, or t
  misc_feature (22)..(22): n is a, c, g, or t
  misc_feature (175)..(175): n is a, c, g, or t
accaggatatccaangccaggnaaattggggccacccttgaaaaaattaaaggggaaatgggtccagcctagggaatcggagtgccaaagagggatagagtttaagtctgggaggccgaatttggggccacccccctacccccctgaaatcagatcttccagccttaagcaaggnccttcccagggagaaagcatcagaaccctcccaggcaagatcaggtgagggcctgaatgaaggcaaaggtggtcaggacaggggtagatttggagggggaagaaagaacacagatatgaatgactgactgactgggaaggtggaaaaaaaggacagaagaggggagaaagagaggtaggcaggtgtcagtaatagatctggctggacaactgggcagatgatggtgctttttgctgctagggagtgcagagga

SEQ ID NO: 326968 - DNA, 408 bp, Homo Sapiens
  misc_feature (54)..(54): n is a, c, g, or t
  misc_feature (298)..(306): n is a, c, g, or t
tttcttgaaaaattttaagcatttatacttaccataaatattgaataccattangaccatgtgttgcaggaaaaactaaaacaacagttcctggcctctggcttatagtctagggattataaaatatattcataattcactgtaattatgtatagaaatgagaggcagtataataagtggttaaaatctgaattctagtgtcagagtgtttgagtttgaaaaccttctacttgctatctatatgactctaaacagttacttttcttcttcgtgtcctaaacttcttatctgtttgggnnnnnnnnntgagccaagtgtggtggcacatgcctgagttgctaggactacaggcacatcccaccatgcctggctaatttttaaaatatttttggagacccccatctcttg

SEQ ID NO: 326969 - DNA, 802 bp, Homo Sapiens
  misc_feature (386)..(386): n is a, c, g, or t
  misc_feature (464)..(474): n is a, c, g, or t
tgaaaatccaagtaagtctcctgtgtgaaagcgtaacaaaagatattttatttggggattttagattcctccctactattctttccgaccttccacccttactccctgcccgtgggattgtacttttagaggaaaacgacgttatctaaattgatccgctagtcaggttgcaaatgaatgttagaaagaacaattgaccccagttctgtaaaggttccgagtcctgggaggaggtgcagcgactgtgtgcacagcgccccctgggtgatgagacactgggcttttccgcatactaaggagaaggagcgtctccaacagagcggagttttccagttgtattaatgcttttttgaggacagtacctgttttcatcggaaaaagtggcntaattaacacacttttgggagacacttttcagacagagcgtttccagcatcttccctttccacttttaagttaagacnnnnnnnnnnncacctctctcgttacttcagtcattgtaaagctgttacgattagcatatttgaacggcagagccagaatggggctacaaatgaagtgaaaagtatgctttaccgtgtgcaacaattgtgaaagttaatacatacacatatggaacaattaactaaaaacttaaggtaatatgtgttgaaataccaagatatgtgacttaaagtcagttatttgagttctggaaagacagaaaccagtgatggttagaaagcacttgacatatttatttatttatttaataccatcttagcttgtctaggaagcattcaagaccatatacattcaacac

SEQ ID NO: 326970 - DNA, 782 bp, Homo Sapiens
  misc_feature (258)..(258): n is a, c, g, or t
ctgaaaatagataaccagaaagacttgtggggtacaaaatgttcacatactattgttttcagctatttccacttgcactctaagtcccagagaacttgagtaacaaactctttaccaaaaggtagaattctaaaggtcacattttctctgggcttacagacaatgttaacaaattcaagctgattattttaactaataaacttttgaggaaggcaccgtggacaggaaaatctgtaaggaaatgcgcccccattattnttatttccagatactgggacatctctccagggactcatttgcataccatctttcattcattttattgttccatatgttgaaagaattaaaacggacaaagggcatttatttgtcagcagagcagaaaccacttcatttatatgactgtgttcatgcagaaccatcacttactgaaaagatcccaggtgtgtttcctgttattcatgcacaaagtatgtcagagactctgcataactaattaaggctttgtgtgtgtatgtgtgtccttttgtaggctaaaggtaaagaaagacaatggctaagacatcaagctactggagaattagatgatgcccaagatcattgatgggctgactggagaaaaagccatctacaaacgtcggggtgagctggagccacaagtaagtcatggtgaactgctagcctcagctctgcatagtctagccctctttacagaaacttgctttcgtgagttgtgtcaaaatatcacaaatcctgaatatggtaaccaaggaaagcatcag

SEQ ID NO: 326971 - DNA, 609 bp, Homo Sapiens
aacatttgttatatttgaggcaccgtggaggatcaaaatgaaagcctttgcacaatctctgttttgtgcaatgtttttagacaagaactcttgagtattgacagattagtcaagtgggggcaaatttttgtatgtttgaggaaaaagtctccaaggccaaattttggctaattaaggactgatgagttagtgtactatcaggtcacttggatctcgtagtgctttcctattcttgttctctgggaatttcattattcaccagtacatccattcaggaatgagtaatttcaaagcaagaaagtataattcctatcaattaagtttcctttcctgtaacccttgaggaagtacatttcagactaccttacgtgtgtagaaatgtgaggatactgtagtgttaggatggccaaaaaaagtgagatgaagagtaattagcaactatgctgccaaggttttttatccccctcactttcccaaacattcttatgataaatccccatcaccagaaaatatatataaccttttcatgttgaaagactttggtccttgataagcaccccacgtttgacgacttaaaaacttttcattggagatttctccctctctctc

SEQ ID NO: 326972 - DNA, 707 bp, Homo Sapiens
ttgtgtttagatacatttttatttacaaaattcaatggcaggctggatttacccctcaggctgtaatcggctgaccctgtccatattctgaacacactcctgtctcgcaggcttctttacaagcctctatgtaaagcacaggctggtgagggccccaggaagagcagcaccgccctcggcacaggcccctactccaagtcctgtgcaggagcaggtcttgcccagcgcagcagctctgcacctctgtggcaccgctctgccaagagggaaggtgcaggccctgcagcccatcgccttggatctgaagaccagccctgtggggctgcttaagtcatgaaactggcctcatgggagatttcataaagcccctaccagctttcctgcccttcagaaatgcttacatctatatatttatgttatatcttcatatataaagaaaatggaaaaagtcaaaatcagtttgctatcatttacaatgaaaggaaggaagactaaggatgtgtttatgtgtgtgtggagacaggaaaagagacagaaccaacactaattactgcaaaacgaaaaaagagaaaggaaggaagacagggagggagggggcaaaaatctcattccatgctccacacagttctcttaagtctacaggccgaggttgtaggagcctagacaatctcagcaggtaagaagattctaggcccactagacttacc

SEQ ID NO: 326973 - DNA, 383 bp, Homo Sapiens
  misc_feature (347)..(347): n is a, c, g, or t
  misc_feature (360)..(360): n is a, c, g, or t
  misc_feature (371)..(371): n is a, c, g, or t
cttttgatttcctcaggaccttagagggaaaacaaacagtagcagctaatattctcaagtatattgctgcttagaaagatcctcaggaacaattagcagcaataagcaagcctttgaaaagatctgaattctttttcctgaaatatttacgatacacaggtgctttttatctgaaatctgttgtgtcctccttttagggcagtctctgtggggcagagagtgggacttgcgaggtggacagctgtggggatcctgggcaagggagtttcagaaggtgtgggctcaggggctgggtagaaacccccttttgttagggacttgttttttaaaaaagaaagccctagggncaggggcgcagtngcctgatgccngtaatcccagcc

SEQ ID NO: 326974 - DNA, 730 bp, Homo Sapiens
  misc_feature (28)..(28): n is a, c, g, or t
ctccatctgtccagtgtttacaaataanctcgcaaggtctgaccagttcttggtaacaaacatacatgtgtgtgtctgtgtgtatacagcaatgcacagaaaaggctaccaggagcctaatgcctctttcaaacattgggggaaccagtagaaaaaggcagggctccctaatgtccattattacatttccattccgaatgccagatgttaaaagtgcctgaagatggtaacccagctagtgaggaataaataccccaccttgcccagtccacagagaaacaacagtagaaagaaggggcaactctttgctgcagagacaaagtgagtgttttttcgccatggattgcagtccttctccttccagaccagcttcttatttccctcaggggccccaggagaatgttgattcttgctgtaaatgtgggaggggttgagaaagtgcggaaaaaaggagaagaggaagagtgcaaagtagcctccagaagcagccagcctcaacagtggaggagaggacattagtctttaacaatgcttcaaggtcagcagtaactttaggaaaatcctcctcagcagttctcttcagctcctcatgcccgtggtacagttgggggggacttgccagcaatcacaacctccttcccagagttcctttgattgagtgggataaagaatgagaatggtgccaaaccctcattgccaggactgagggggaaagttgttcacctctgct

SEQ ID NO: 326975 - DNA, 494 bp, Homo Sapiens
  misc_feature (20)..(20): n is a, c, g, or t
gaaaaggttactgcccctantcagtgggagttgcccttttcctggccaaagatggacagatttgcccttgtccttatctcccacccccctgctgtgtccccccataatgagcccatagcctacatgtgccaagaccagctggcaagggggaagttcagggttcctggtgccatgggcccagagcaaagccttacccagtcaaccccagagccctggaccctatgacccgatgtcctcattaacaccttgctctaagcaactgagctgcccacaaaaatcaacagtggcttaagcattttgtttacaagtgaaacaaatcaggtcaatctgacaaccaatagttcaagcagccactagaaaattgccaaaaggacacaaaaaccaatagtaagcaggagtgataagggtcttgcagtcctagcttgggaggtagccacacaagcaaggatgagtatggaagggaatgagactgtaataggcaggtctgtttctaa

SEQ ID NO: 326976 - DNA, 796 bp, Homo Sapiens
ctgcctgggtatgttagaaacagacctgcctatttcagtctcattcccttccatactcatccttgcttgtgtggctacctcccaagctaggactgcaagacccttatcactcctgcttactattggtttttgtgtccttttggcaattttctagtggctgcttgaactattggttgtcagattgacctgatttgtttcacttgtaaacaaaatgcttaagccactgttgatttttgtggcagctcagttgcttagagcaaggtgttaatgagacatcggtcataggtccaggctctgggttgactggtaagctttgctctggcccatggccacagaccctgactcccccttgccagctgtcttgcacatgtagctaatggctcattatggggacacagcagggggtggagataagacaaggcaaatctgtcatctctgccagaaaagacaactcctactgaataggtcagtaaccttttcattggaagaacagcacgttagtattagcttctgtagatgtgtctaactgagtctttttcttaaaataactcatgtgattgtatgggttgtctgcagcaagtttagaatactgctcacattttaaagcatgtttgaatataaggatggctttttagtttgtgaagattattgtccttaatcagggattcttaatatcattctctaaagtagaaaagtgagctttagaagtcaaatttgataaagctctagaaaacaactgcaaaattgctgttataaagaaacctgtcaaatttaggaagtgccctccaggagccct

SEQ ID NO: 326977 - DNA, 819 bp, Homo Sapiens
  misc_feature (43)..(43): n is a, c, g, or t
  misc_feature (809)..(809): n is a, c, g, or t
cggaaaaacatttaacattttcaatttattcaacaccaatatnagaatgaaataagttttcaagtactatgtattaaaaataaagctactcctcatgccctccataattggaaaactaagattatcacacatgggctaatacatgaaaaaaatacagttttaacattagaaagtttttaaacggggatacaattgtttaaaatatttacttttcatggtattatgaacacttagaaatccaaaaactccaatggccggaatcataatatgcaaatcataaagcagcctaatttgaaatgtttttctagtcatttcaagccatagtctgattttctatgattagcactgacagtgttttatttttacacactttaaaatgttaaagtctaagggacagaaatataaaaaacaaagaatttaaaagcagaataaaatagcagagatagttttctaaactgctaatcattgttttaaatcaaaaatatggctttgatcaaaggaaacttctcaattttctataaatgccaaaacaaaataaaacttgtcccactgtaccccaacccctcaaaacaacacaaagcaagctgaatgataaaagcctatttctaaagctcatatcttgcctgcaagactggggagggctatgagaactgatggctgaaagagctttggaaaagcccacacattccatggagaataccactacctggtgggggctaggcatagcaaagtgccttcctgccaaagaaagaagaaagaatccgtatttgggatagaacaaaagaccaatattacagtgtgtttcaaancaaatgaagg

SEQ ID NO: 326978 - DNA, 943 bp, Homo Sapiens
  misc_feature (71)..(150): n is a, c, g, or t
  misc_feature (314)..(314): n is a, c, g, or t
  misc_feature (943)..(943): n is a, c, g, or t
tgcaccgtcttgtgcctagtggccagcagacacaagctgtgaaatgagtgtaaaatgaattaaatgaacannnnnnnnnnnnnnnnnnnnnnnnnnnnnnnnnnnnnnnnnnnnnnnnnnnnnnnnnnnnnnnnnnnnnnnnnnnnnnnngactccccgtgccgggttggggggtcgaaatgagataatgcaagtaaagcattcagcccaggacccgactgagagctgaaaggtatcagcacctgccatttctaccggcctgggggaaacacgcttagtttggatgggagtggtaataacagccttggctgagngcggtgggttgtcatcacgccaccgatgggaggactgaccttgtgttcggccccacgctggctcttggtgttcttcgctgtcagcggtgctgtgactgagacatccttggcccatttcacatgtgagcccccaaggctgcaagagagtgagcttcttccagagagggcggcagagccaggattgaaattcacatcttgctccgagctcatgcacacctgggagcctgcatgttcttgctagattttacagccagcaggcctttgttgaaccgtaagcagcagcggccttgatcaggctggtttttctgcccagaggcccctttggcatcgtgactcaaaattttctctgggtattttgccttcttgctgatgcatcgtttgccggatgggaaccagcaggtagaagagtgttggctttcctgcctccggtcagagtcgggaacgtgacttggatacaaactcagcatggagggaggcatgacttgggagggcagaacccggcagcttcattcccatcctctgttggtggggaagagtgagcaactcacaggtagaaccaggacagtagtcagggctgtttaaaaatttagggctcctggctggacgcggtggcttatgcctgtaatccn

SEQ ID NO: 326979 - DNA, 513 bp, Homo Sapiens
  misc_feature (338)..(338): n is a, c, g, or t
aattacataagtaatatataaatacgctgccctttttaaatagaacattatcaaaaaattatgcaaaccgtattacccagactacacactgtgctatgcacattggtggataggaacaggaaacaattttactggtgaagtttgttttctttacaggccagagctattttgtgtttgatttctgaagagggtctagtagccacaaaatgcacatgggacttggccctagggacatggtatagttcatctaggcagacagttcaaaatctgcagtcaatccaaaatactagtaaccctgcgtcctgtctgtgcttgctgcacttgaaacgctgtgggcncacgctggagcggccggaacgccacctctattcctctggggctgtccctgcacggggagagtcagtgcatgctggatctagctgtgaagagccagtgcacatcccagctgtgcccaagggtaggttttaaggaacctggaagatacgatgaagggtacacagcccaagagagctg

SEQ ID NO: 326980 - DNA, 452 bp, Homo Sapiens
aataaaaatgctgtatgattttaactttaaaggaaaaaatctgtaagatgtggttaattaccaaaaggtgtttacctaaggagcacacagactttaataccccaaattaaactttatattatactcaaggagttatcagtggttgcttgctacactgagaagctgctttatgtgttttagactccctagaccatcaacagtctctttttgcccagcagtgccacataaacataatatacgaatgaaaacactgtgcttcttatgaaaatacacgttcaaaacaaattccccagcaggaatattgaaggtgaatgtggtagtaccctgacttaggttacagattttcaaatctgggctacttcttcattagggctcacctgggagagctgtttaaacatggcgggttccccgtgttcccacagaggtctttgtttttcagggttcccaaggga

SEQ ID NO: 326981 - DNA, 651 bp, Homo Sapiens
  misc_feature (307)..(348): n is a, c, g, or t
agattctttgttcacatgttgaagaaatggatcttgagaggctttcaaagaagagttgtctccactttcctcttccagaaaattggtttccaggctgaacagtgactcgtgttttgcatctgtgaactcttcaggggatgtttgtgatgtgcccggtggctcttccccatcttcttttccctcagggtcagcagataaagctacattctctggactttcagtaagactctgcaagccatctcttcttccacactgacatcgctaccaccatcttcatcgttcatttctgcatcatctacaatactgnnnnnnnnnnnnnnnnnnnnnnnnnnnnnnnnnnnnnnnnnngaaacattctttaatgtagcaagtagtctgtggtagccagaaacttgttctggttcactctctgagtcgctttcagaatctgaagaatctgaactctctgacagttgacaaatctgtggctttgcttcctttctggaaaccctgtcatagaagggatgctcctcgccgaaatctcgaagatgtttcttctgctttttagttagggtgttgagtagctggctctggctccggctcccgcgtttgcccatagcgaaaacgtcaagtttgcccacttgcaagagtcgcggttttccaccaggaagt

SEQ ID NO: 326982 - DNA, 647 bp, Homo Sapiens
  misc_feature (594)..(594): n is a, c, g, or t
aagcagtgcatgcttttaaattatacaagcttggcctcatccctgtgtggaccctgaataagccacttcattgctctgaagctgtaaaatagaaatcgaaatccctgcctcttcagttaaggcttaaggtatcccaaagccaagggtcaggggggagaaggatgaaaagttaatattgtagtgtacaaatcatacagtcagtccttgaatacttagtttagctttagaatctgcagtttgttacaactgtgtctgcaaggagaaacttgcagatgtaagtaaaataatataatcaaggcttagcagggtaccaacatctggaaaacactttcaactgaatcctctttctcctcttcattggttctttctacatttcagtctgttcccctgccttttcttccaaattttccaggaataaaattgcctagtctactttagttttatctcctgcagttaagccaagtcattaactttctaatggactttcctgtggagcctcagatcttaaattaggttaaatgtttcagctttttaaaaagtggcattaaataggcaattttgctgttgggaaaaaaagcttgatatgggaagtgnttcctagtctttggtcagcagccagcctgacttttactggtcatcatcacccc

SEQ ID NO: 326983 - DNA, 811 bp, Homo Sapiens
tagaggtgctctgatgctaaagactgtttttcatacagaagtcccatatccccagcttttagccttgaattaagaaacacttgtaaagatgatcggtttgaagcaaaatgaaatctaagtattcaaccactcattcttcagttatttccacttgcattgattgaactgattaagattgcccccgtcattgcacgtaaggaagggtagtgcagagatttcccagcgttgtctttttttcgttttaattgtaataaatatcacttgttcttattactatagtattaccatttttcacagtttatcaacctggaggtcaccctgactgtttaaatccagagtgtcatcaaattaatgaattccatggtaattcacaaaatgatagcgcatctcactcccaaagatgtcttgtatttgatgacataggtatttttaatcctccatccggagaaatgggatctgaaaggccaggaccccccaactaaagaattctgaggaagagagggctggggccagagaagggttccctgcagaggcttaagagaaagtgccacagcagtctcaggccccacaattctgggaaggactctataatcttgttctgtgctgatctagcctggcctgggtttgttgcttgctatgaccctcaaagcctgaatcaccccaaagcagatgagccagcatccttaatgagatttatggaaactccagggcacttgaggtgtgagtctcagtccacctgtagtgtggacctgggcaggtagcttgatctctgccagcctcagtgggctgacccgtagcttagctctcattt

SEQ ID NO: 326984 - DNA, 797 bp, Homo Sapiens
  misc_feature (66)..(66): n is a, c, g, or t
  misc_feature (496)..(496): n is a, c, g, or t
caggaatttgttgaaatttttcttctaaaagtcattctgtagtggagttttctaggaaaaattaancagcttttaataactggcccgctggtgtgagagctaccgtggaataaattagcacaaaaatggaaaaaaagtcttataactgttcactgttacagacataatcaacaaggtcagtcactctcaaaagctcatcttcctcctcttctggtgctcctgcctcctgcccaccacttgtcccattggaggctaggcttgcactggctgtgctgttgtccttgggggtctgagacttctcagtaggcttgccaatcaagttctcaatggctttgccagggctctgtccattggttgaaggtaagtccactaagctatagtccaatgggctccccactttgcctacattttcaaagtcctcttcctcatcactttctatccggtagggcttcttggtgctctcttgttctgagggcaggaccctaggctggctgtncaggggcaggctgatttgcatctccaatgagcattgtcaacaactctcctcctcatccgtctcaaatccggtgtagccgtttgcgggatggtttgccttcctcttcctcctcctcctcatctgcttctgaatactcgtctgtgcttcggccccgctttcgaactgaccgctttgattctttagctagctcatcatcttcagagttcttggacaaatagctctcttcactctctgagctggaaagtcttcgcttgtgtactcgccttatttctttaccacgtcgcaaactcttctgggaacc

SEQ ID NO: 326985 - DNA, 538 bp, Homo Sapiens
ggggatctgacgtatttggaaagagttttgaattattggtgaattttaaggtaggctgtagagttgttttttcttgataaggggtaaacccagtgaagctatcactgtttgtggtaagccatccacttggttccactatcaagggggtcacagatggagaagttggttctgaagagaggatgctaactgtaatggaactgttatcaggagttttcacggtgtcattgacaaagaccaagtgaagttttctgaagacagagcaggtgtagcattgggatgtgctgagatgggcaaaagatcttcatctgctataggtgcattccaaggcactttagaaacaaagctatggatcaagggagggcttgtggaaatggtagatgtgggttttagactgcccaaagaatgctctgctgacgagttactggagaaatctgttattccgtggctgttgttgggtagattcaaaggaggggaatgactcgccttgagatttgaggtggttatattttctttatctgagtttaagtttgcttcactt

SEQ ID NO: 326986 - DNA, 605 bp, Homo Sapiens
cctttagggctcctgtctttgatattaagttacttagaaagggcttccctgccctgatttatacaattatttgctcaccttttctataattttagggagttacttttcttcatcttaaaaaatttatcatgtcaaattaagtataaagaggattgtgaccatttcttattcctctctgttaagaaataagtgagaaagtggtcccacatgtctacaggataagtttaggaggaatattaggatagaatttagtttgaagaatttgttaatctgcctaagtaataaaacaataacatgagaataaaacaataacaaccacaaaactgtctaatagtctgggatggtgtctgtgtgtctttcacacaggttgcatgttgcagtttagtggtgctctcacatacatcatcacattccccaaatgcaggaggcaaagcactagatctggctcacctaaaggatgtttcagcctgatcttgccctgatctggtcattaggcttgcaagagccccatttttaaagatcttaccaagtttggctgacatatgaagaaggaagggaagaaaggaaaaatgaaaacacacggaaacatatttgaggttgtatct

SEQ ID NO: 326987 - DNA, 590 bp, Homo Sapiens
  misc_feature (168)..(168): n is a, c, g, or t
  misc_feature (256)..(256): n is a, c, g, or t
  misc_feature (267)..(267): n is a, c, g, or t
  misc_feature (291)..(291): n is a, c, g, or t
  misc_feature (380)..(462): n is a, c, g, or t
  misc_feature (539)..(539): n is a, c, g, or t
gggtgaaccactgcgcctggctctcttcccataaatattctatagttcaatctctcttttattcaaatctgtgtccccaaaatcacttccagagatgacttaaaccactgtgtgtcctgaccactgtgacttaaacatcacacccaggatttctccagttcactctgnctttatttctccttataattctaatcctttattgacattattttagagattttagagatatatgtatttgtttgcatggatttccccntttcctccatncagactggcagccctatgaggatncagggatttttgtctgtttttagtatatttaaaaaattcctgcttaatacataggagttattcaaaatatttctgaaaatggagtaatnnnnnnnnnnnnnnnnnnnnnnnnnnnnnnnnnnnnnnnnnnnnnnnnnnnnnnnnnnnnnnnnnnnnnnnnnnnnnnnnnnngagtttcttaatgtaaactgaataaacagaaacaaattattaggaaatgtaatttagatttaaaaggcctctgttgnttacaaatgaattctaatcaggtaggtactagcagctcctcagggaggtaa

SEQ ID NO: 326988 - DNA, 721 bp, Homo Sapiens
  misc_feature (307)..(307): n is a, c, g, or t
  misc_feature (342)..(342): n is a, c, g, or t
  misc_feature (700)..(700): n is a, c, g, or t
aatacggcccatactgcaaaagtgctgcaagtacaaactaagcagtctaatcccagctgtgtggtaggaaaagaacgatctcgtttctatggttcatttcagttccttcaggaaatttcctgcaacattgttatttatatcaaatgggtctcaagaacatgagagggctactgagaagaggactgttttccacctagaggaaggtgaatatgtctaactgttcactgctggctgtaaaggcgcctgtggcaaagcagatcgtcctgtctttgcgcttaaatccacctggtgtgccgcccctaccctntgcttacaggactgtactgaatgcccatggcatgnaatggaatgtttgcagaaggggaaaataagcaagcgctggagagacatgcatagaacagccaggtaaaactgcccagatgactatgcccttcacccactcatggaaggccaatatgaagccgtgttcagagtcgtctgcccagagctacagaggaatacagctgagtggcagggctgagtaagaaagtgactacagagtcacagctcagaaacaatcctaaccaaaaaaccatcttacacctctgcatttagctgcctcaaatcctttctgaatgaagagggatttaaattttattttaaaatatttcggacatagtacttttccaaatatttgttatattcgttaggtcatgatttncacattaggcctgtgccgaat

SEQ ID NO: 326989 - DNA, 678 bp, Homo Sapiens
  misc_feature (366)..(426): n is a, c, g, or t
  misc_feature (507)..(622): n is a, c, g, or t
tcttttatgacattgccatttttgagcaatacagacaagtggaatcatctctccgtttaggtttatctgaggtttcctcatgactgcattactgctgaactgatgttgtgttttttaacatatcaggaagcttatgatgttgatttgtcccctctaatgataatgtcaacttgtttcatcctgctgaacccacagttggaatcaccccaaaagccttagcaggggagtttccacaagggagtgccccagaccttttccaggtgggggccagttgggattccaagggaagtagcacttagcactaaaataaacaacagggtgatcagtccaaagcatttatttattcatttagacagggtctcgctnnnnnnnnnnnnnnnnnnnnnnnnnnnnnnnnnnnnnnnnnnnnnnnnnnnnnnnnnnnnnttgggctcaagcgatcctcccacctcagtctcccaggtagctgggactacaggcagacacccccacacccagctaatttcnnnnnnnnnnnnnnnnnnnnnnnnnnnnnnnnnnnnnnnnnnnnnnnnnnnnnnnnnnnnnnnnnnnnnnnnnnnnnnnnnnnnnnnnnnnnnnnnnnnnnnnnnnnnnnnnnnnntgagctgccatggtcagccagtccaaagcatttattaggggaaccttacgtacaga

SEQ ID NO: 326990 - DNA, 718 bp, Homo Sapiens
  misc_feature (467)..(515): n is a, c, g, or t
gtttaacactttacaaaatgtaacctctattacccattttgtgttaatatttgcataagttatgagatttagatcaaggttcattttctgtggactatggctgtccaaatgttccaacaccattttggaaaggtaggcatattgtcaaaactcagctgagtatattttgtgaatctatttcttattgtttactcctccactaataccacactgtgtgactctagtagctgtacagtaactcttaacatcatatagggcaattctttccactttattgatttatattttcagaatggctttagtttttcttgtcccttgcctttccataaaaattcagaataagcttgtaagtgtctacaaacaaacctgccataattttgataagaatttaaagcagaggtgtccaaatcttttgtcttccctgggccacagtggaagaagaagtgtcgtgggccacacataaaatnnnnnnnnnnnnnnnnnnnnnnnnnnnnnnnnnnnnnnnnnnnnnnnnnaatggtctgtgtatagttttcattatatatctaccaccacagataagcaaaaatgtccttgcataataatcctaattatgcactggcccatttcagagggtcttttccaaatcattgaacaggttccaagtttgcaatcactggatacagaaaatggtacatatctagctaaacttcactacttttttgatattttttattat

SEQ ID NO: 326991 - DNA, 480 bp, Homo Sapiens
  misc_feature (34)..(34): n is a, c, g, or t
  misc_feature (60)..(60): n is a, c, g, or t
  misc_feature (73)..(73): n is a, c, g, or t
  misc_feature (88)..(88): n is a, c, g, or t
  misc_feature (140)..(140): n is a, c, g, or t
atgccgtggacagcttttccccagggcccatccnggcgaagacctccttaatgatattcnttaccccctcttnaattttttccttgcntatgcctaacttctttcgcttggcagaataagggctatggttaaagtttcanaatccttagtttttgtgagtaatctgacagcatgttgaatctgttatgtcaaatctgaatctttaaaaaacctgagatcctttagtccacctagtgggtaacttcagcaacatccctaatatccctaatgcaactgtttgttcaaattgtactagtgatctcttttatagagttagtacctgtccgtgttttaatttaacccattcctggaatgctatatgatagaattgctaccgactaaatgaatagggagaaatctgtgcaattgctaatacttcgttgttacccatagatataatgagtatccggcctggctcattctttgatctatttaattttc

SEQ ID NO: 326992 - DNA, 444 bp, Homo Sapiens
ggtaaattttctaacaagatgaactgccttctgatttgaacattctgatcttggtagcataatctgccatgtgtacatatatatattttatgtgattcattattgtaggaataattactgaaatttcctaagttgttatacacttaggattatacacatatgattaaagaccttgttgagacttaatttttaacatctataaactggaaaaatgtgcagacatcttgtttctattaatatattgagaaaagttttcattaatattaatatttcttaggaaatctagctttataaaacatctacatgtttctttcatattttggttggaatggtttagcacctttgtttgcatagcttagtgagaatttagtctttgtggaatccttaaacacttttgacgctacagaaactttagttggctgggcacagtggcacatgctgtaa

SEQ ID NO: 326993 - DNA, 1072 bp, Homo Sapiens
  misc_feature (657)..(657): n is a, c, g, or t
  misc_feature (706)..(706): n is a, c, g, or t
cagttgtggaggccgacctttctgctctttgtattctaaaatggagggtaggctcaactgggaagcactcttctctgaactctccaggagagttaggcactggtcccaatcaagtgttgctcggggccctgttctgcacagctgaatttctggagctgaatttcatgtcttagtatgcactatggtacagtttatattacttgatttcacattttttaatgggaggaaataccttccattaaacattcattttaaactgatacagccttcaaatgtatgctaacgtcttaatttgccaaaacatatttgagagaagcataatcctttctgtctaatggaggcatgggtaaatatgtaaattgatcatgactttagaatgcattttttaaaagcatattgctataaaaagccatgcacgtgaaatgcatttttatactaacactagaatagaatacatctgatggttaggagttaagaatgccaaagatgcatgtatgatctttgttattaatgttaaggctgagcaatattggaaaacttgtctcatacactcaatagggcctctttttccctccacaccatccattcccttatgcccatcctcccaggccctgattctgtgcttcattttcacattgaactgatagttgtccctcncacagtgctgcccagaaaagattctccttaaaaatgccccctctatccntgtgaatagtctgactgagcttaagggacttggtaactactgcagcaaggagcggggaaagcatttgtcacctgtagatcacattcatggaaagtacttccctttacaacccatccagtactggataaatctcagaggacttgatatacataccctttaatgctcttctttaatcttttattttggtacagcgcattctggcttctgcctttttctctcatgccaccttcatctctttctgtacctctacaccccttccctccagtcataaaacactggatgtggtttctgggaagaaatgtgtactcctgcacactgttctgtttagcatatgtgtgccccttgcctttgatcaacagtccccca

SEQ ID NO: 326994 - DNA, 483 bp, Homo Sapiens
gaaatgaatgttttaggcacacgctaagtatctcttagacgattccaaagatatcaattactgtgactgacgacgactcttccccttccctgggtgtgcctgtcctgcttccctagctcacaggtgctcaggactcaaaggcagcccgccacaggccatgggatctggctggctcaaaagggagagtgaggccattggaattttcccaggagtgagtctgaagcttggaatgttttttggtggagggtcctgaagctaggaggcgatgcagacgtgggggctgagacattatttggggccatttgcaaagagggatactcaggcagtgaccccaaggaaagagcaaggggaggagagggcggcacatccacgccccttcaactcctgcccgtccggaggcctacgcactccacacgccggcctccccgcatggatatccttccaataagcaactcatcgtgctcatgtttatttattttaaag

SEQ ID NO: 326995 - DNA, 534 bp, Homo Sapiens
tttttgagagtctattcatcacccaagtacactgtttatgacagaaactcttttacgtctctaacaatcatcatgcagctcagtgacaacatgttcaagccatgtttactgctgctgacgtctgccaagtgaggtcagatgaaggctcaacagaggatgccttgtatcagctcagcagctgggctcttctgtggccgtgcactggggtaaagacatggagaaggaatatggaccttgcataattgaaggagcaaggctgcctttccttctcttgcctgctgacatctcaggctcaaacacatgacctcttgcctcaagccccccagctttgagaagccctctctttgcagcagggaagacaccagtggagggcctagaaacaggatttgctgacgcgcttctgaacacaaggtcaatcagatggatcctgacctacattccaaatgcaaggagaactggtcactgccatgtacagcttttacttttctcttgaaaaggcagtgccacaccattgcatagagaggtcatagagag

SEQ ID NO: 326996 - DNA, 662 bp, Homo Sapiens
  misc_feature (380)..(380): n is a, c, g, or t
taaattactgttttaacaactgtccagctctggttttctttggcagaaccaagtttgtttggaatccatgttaatgctaaaaaaccagtataccaaagaaaagtgaatttcaagtatctggcaaacaaattcaaacctaatacatcaattgagcttaaaaatgacaagatcactcatggaaacaaggtgactgggaaatcatctgtgtgtaaccaaatccctttcttcctggaagagggcagaggttaggaaaggctgtgactgagaaagatgataccctcgaatactaggggccaagaatgaaaagaaaacatggctttctacatcatggctctctactccaaaaaaaagtaacatccatggcttctgtataatagagnatctgatttcatcagattctcaggaaatctgatgtctctaagaacctctccaaagaaccttctcttcaccttcatccccttctagctgatcttttcctcacaatgactaagattcttttcatgtaatatggatgattatgaccctaaaggtatcctttgtggggggctgccaggatagagaagtggaagagtgaagggaagcctggccactaattctccaccactttagggtgcttgctgctctgcagccaggccagactcatgtgaaactactgatttctt

SEQ ID NO: 326997 - DNA, 519 bp, Homo Sapiens
ctgccatctatcaaaggaacaatgcagagcataaaactctgataggggcatcttccttccctcttcccttttccccttctctcccaacaggtgttttgctctgcattctccctttcagtagtatttggtagaatatcctgaaagaaacttgtttcccttgacaagaattttcacttaacattcactcacagcattcaatgactgtgcagaagtcccagcacaaataaatgtctcactcattcctttgtgataaaaacccattctgaagcaaagaaaaactgcaccttttcctaaatgttattttgagatatttaaattaagtgagcttaagttttatttgccttagtcacaagtccacagtacaataaaagcaaaattcaaccgccagatacagtgcaaagtaagttccatactaaaccacattgcaaggttacatctttttcagtggaaaattttggaaagtcacatcattgtggagagaatacagtataaaagcacttaaaaagttggccattttaa

SEQ ID NO: 326998 - DNA, 482 bp, Homo Sapiens
  misc_feature (441)..(441): n is a, c, g, or t
ccagagaacagtgtgttcatggctttatttgctgttagtccgaggcctgaggtcaccctggcagatgggtcacttgcactgcaagcactcatgctggcctcagggacagggatgaggtcactggcacatttcaagaacagcttcctttctttatgcatacaccactttccctggtccttgttaagggtctccttcctcttgcggttcccatctctgcagctgaccccagttctgactgtgtctggggaaatgggttggtgagggcctccttctgggactatctgtccacctgatcagtgatatagacactgtgccgcggagaggagccacatctcccagcgagcatgcttgatttcacagctgtttctaagatggttatggcttacacaccatttcactcattcatttattactgaaatgtttcttgagaaactgcttttncttgagaaactactttttcaggcagctttgcaggcaataag

SEQ ID NO: 326999 - DNA, 631 bp, Homo Sapiens
  misc_feature (596)..(596): n is a, c, g, or t
  misc_feature (605)..(605): n is a, c, g, or t
  misc_feature (616)..(616): n is a, c, g, or t
aagaagactgtaattatatttcctagtctgaaataaggtttaatttttcagtttcaatttaggatttactagagacagttatatgtatctattctctagttttgaatttgtaatattttcattgtcttctattatacaatagttcgtctttgtaaatgttttttctcctgaccacaaaatggagtatggctgagcattaattcctgtaggtttttggagtcattatagctctcaagaaaataagcagttccattactaggattaatcttcagtatctgagacaatgaagccagtatttatcattttaaaatttatgtctgggttttcttcactatttgtgcttacatcacaaagccagtaccatttattaagtgccaagtgtagatgaggcaatgtaatcttaggtgctctaaaactctttgagctaggtggttgtgtcccttatgatgcatgtatgtgtactcttgtgttatgcaacattactttgtaaaattccagcagccaccactttttatgtaaaattatgagttttatatctttcagcaaattggtgtgcatgagaaaattattatgtaaaaaatattcaggccggtggnggggggggntcatgccctgnaatcccaacattttg

SEQ ID NO: 327000 - DNA, 411 bp, Homo Sapiens
tcaaccaacatgggtcctggaacagggcgttgtgctcagtgctttctggtctctcttccttgaatagaaaggtcctgctggcaagttctctcaaggctggggatgaccaggcacaaaaaacagggcagcaatatgttggtgtcactccccttcccaaaactcttcgaagactccctagggaaagaccagcccctcagcctgggcacttggttcatgatgtgggatcttatatccttgccagagtcatatcttttgcccacttttacctgcaatccttgcattcatattcctttggttccagtccttcatttatgagacccataggaatccttccaacagccaaagagttgagtctaactctttcctgcccaaacccattcacggccccctggccttagacaatatatcaca

SEQ ID NO: 327001 - DNA, 980 bp, Homo Sapiens
  misc_feature (135)..(135): n is a, c, g, or t
  misc_feature (177)..(177): n is a, c, g, or t
aaatcttatgtgtatttattggtatctccttatggttttaatttatatttctgataagcaatgtggtagaacacatttttatacattaatgaacatattagatttattgtaatatgcttgtatattttacctgtntttcatttgggttgtctgtcttactgactttaggggagttcnttatatagcgttatagatccttactgaaaacccttggggccaggatgtatttcgatttttaccattttagtaaggtcatatatattcttaccttaacagttccaagtgcaaaagccacaaaggccagatattcacttcttcacatgcccttggcagcctaagagaatgtggatctagggatttaccagtgtggcaagctcctgaagaccatcctcggattcaatgatttgctagaaggattcggagaactcagaaaaagtgttatggctattgtttattacagtgaaaggatacagattaaaatcagcaaaagtaaaaagtgcatagggaaaaattcaggagagaccaggcacgacttttcagttgtactctcccaatggagttgtatggccagtgcttaattcccccaacaatgatgtgtgaaaacatgtatgaaatactgtcaaccagggaagttcacccaagcccttggtgccccagagttgtttttggggttcagtcagataggcatggagcacctgtgtggttgaccttagttattcagtctctagtccatgcagaggttaaactagtatctctcagcccaaggctcacaccacaaatcacactgttagcacaaactatccagtgttggccaaggccacagtaaacaaagacactctgatcaggcaggatacttccaagggcttacagattatctcccaagagctggtcaagagccaaagcattctttgcaaaagacctttttttggaaagcatagggtttgaacattgcagacctgctgagtacaactgtgccgaat

SEQ ID NO: 327002 - DNA, 869 bp, Homo Sapiens
  misc_feature (349)..(349): n is a, c, g, or t
gccttttttttctctgcctttttggtttaagggctataactgttctttcggtttttgtttgagtcattgctttaaggtttataatacaaaattttaatttattatagtctattctcaagtaatacaccactttgcatacagcagtgtactttaatttctcccttcctagaattttggttatggtgatgtcaaaaaacaaaatttcaaaaattgatttttgaagatctaattgacttttattagctattcatgaaccaggcagcatctagtatataaatagacataagccccactggggaatggcagaacagtagatttttgtgaaatcgcttgagcaggaacaaggaancaatatagtagaagcagcagattggttaacatcaagttacttcagattactttcctagtgtgggttaaggcagagggggcttccttatcatgccggttcaggttgcctgggtcccttttgattggttgcatgaatcttttgctttttggaaaactggcctgtttttaagttcaatttgtacgggtgcctagcaccagtaactccattctggtttggtctggtctgttggagcttggtgcaggagctcaatccaaaacaatggcctcccacaaattttatttatagttgaaatacattttatttttacatataagcaccacaatacaatcttattggtttgctttaaatagtcaactacttaataaggatgttttaaaataattttttaaaattttatatttactcacatatttagcatttctagtgctgttcatttcttactgtgaatccagcttccatttgatatcattttccttctgcctggagaacttcctttactatttcttgtagtgtatattga

SEQ ID NO: 327003 - DNA, 381 bp, Homo Sapiens
tgccaatgaagaatgattggtcggaagagctgtgatgttgctggctctgaagacagagaaagggggcccatgagtcaaggaatgtgggcggcctctagaagctggaaaaaacaagacaacactttcttttctgcagcctccagaagggaacactgccctgacgacactgattttagctcagtgagatccattttggacttctgacctccaggattatacaggtaattgatttgtactgttgaagctactaagtttgtatggcagcaatgggaaatgggcacattaaccaaccaaattgaatctggtttgaactgacatggttgtacccagcactgcagcatgcaaagccttcagcctggttgtttcaccttagctcacggg

SEQ ID NO: 327004 - DNA, 774 bp, Homo Sapiens
  misc_feature (15)..(15): n is a, c, g, or t
tccattgctgagtancaaacccacccaaaaacgtagtggccttaaacaataacttattattcctcatgattctgtgggttggctagaactcagctaggtgggttttcttctggtctgtctcgagctcagtcacgcaggtgcattcagcttgagtggagctgaaacatccaagatggcttcaggcctcatacagtggcctctctcttcagcagggtactatgatggctagctccaaagacagagaaagtgaatgctgccagacaaggcctgagcccagaagtcccaggcagttccttccaggctacccatcagtcagtgtaagtcaccaggtcagtccaatctaggattaggaaaacagcctagactgctgatgggtggagcagcatgcacagacagggatgagaagccctgacggtggacagctttgaaaaccatctaccaaaacatggggctcactacacataaagacagacacatcatttcagcatgccaattgtgatagctcattactcaatacaaaagatcaggtaaatgagctcttttgtgttatttcagacctgctgttcaatacttcaatttgctttacatcatacaataaatatatggtgaagaaacttacatgtacaaatctatgtaagaaaatccaaatgaaacattaatctagtttcaattgtcacattaccactttatgcactatattgtaattacctatgtcctcctaagttgtaaccttcactagggcagaaccctccctcgtgccgctcgtgccgaatt

SEQ ID NO: 327005 - DNA, 711 bp, Homo Sapiens
  misc_feature (691)..(691): n is a, c, g, or t
  misc_feature (693)..(693): n is a, c, g, or t
gagtgagccaccgtgtccggctgtattaatgtcttttaaatctctctcgcatattgccttcaaagctttcttaatacctcttgatccaagatgctctcagttccattaccctgctaattatcttcataacagttgtcactatctgaatttatctatttattcacttatttactgtctgtctcccactagaataggaatggcaagacaatttttaatccatatgattttagtcaagccatttagagttttcttacattatgaaagatacattttatttacttaccttagttggaaaaggaaatttggaaggttctgttttgcatggtgtatgaatagccgttaagagggggaggccatgaatgcgtcatctcttttaggatttcatccacacagctcacatcaccagaagctgatgcatccagtggttgggaaggtattttcagcttggtgagatgtgctttgctgctgggcttcagctcagtcatgctgttgccatgggattggctgctgtagtgctcagaggacagctttggttccatggactcctgtccgtccatgggccgcacataggcagtgggtttctgtaacattgaattggactttgacatcaatgagggtgggaaagattgagttgagtgctgcccacttgaaaaaggtacacgggaaggagaatcccagactcgtgccgaantnctgggcccgagggccaat

SEQ ID NO: 327006 - DNA, 776 bp, Homo Sapiens
  misc_feature (472)..(626): n is a, c, g, or t
attcttaatttcttcgtatgcataattttgtctccttgaagcagagacctggctttcccctcctctgtcatccctaggacaccatccaggagggaaaagcgcttgcacaggtgtgatggttaattttatgggtcagcctggatgagccacagtacccagatatttgatctaacactagtttagatgtatgtatgaagggattttctaaatgagattaacatttaaatcagtagactctgaataaagtagattaacctgtatactgtgggtacatacacctcatttaatcagctgaaggcctcgtgagaaaaaaactgggtctctctcaaggaagaaattctgcctccagactgccttcagactcaaactgtaacatcagctctccctaaatctccagcctgcagattttggacttggctagtccccacaatcatgtgggtcaatcctcaaagtaaatctctcaatttctaannnnnnnnnnnnnnnnnnnnnnnnnnnnnnnnnnnnnnnnnnnnnnnnnnnnnnnnnnnnnnnnnnnnnnnnnnnnnnnnnnnnnnnnnnnnnnnnnnnnnnnnnnnnnnnnnnnnnnnnnnnnnnnnnnnnnnnnnnnnnnnnnnnnnnnnnnnagacagataacctctctatgtagccggatatagatgtctctgtctctcctggtttctgtctgctaggacccaaggaaggtcttcaaccaaaggctggtcttacaaacccaagtagactttacacatccctcgtgccgctcgtgccgaatt

SEQ ID NO: 327007 - DNA, 653 bp, Homo Sapiens
agaactttttcatcctcccaaactgaaactctacccaataagcaataactccccactgccccttccacccagctcgtggtaactccaacttcctgtctctatgttttgggctactctagacaccgcctataaatagaattacgtgatatttgtctttttgtgcctggcttctttcacttagcataatgtcttccaggttcatccatgtcgtgccatgtgtaattcctttctatgggcggaatagtattctaatatgtggatatcccatattttgttcatccattcatttgttgatagacacttggggttgttcctacctcttgactattgtggaataatcttgctagggtacaggggtgggacaaatatctgtctggactccccgctttcaactctagaaagctttcttttaaaatcggtctatttaagtttctttaaaaagttaatttaagaaaaatactaaggtaaattgtagaacaggtgatatgtcaatatgaccccaaaaattgtaaagatggaagacgaatgcctgcagtttgggaaaccggatgagaggaaagacctggaagctattgtaaaatctatgctgagggtctggtgactactagaccaagggcatggcagcagagggcagctgaaagacttcaggaagg

SEQ ID NO: 327008 - DNA, 376 bp, Homo Sapiens
  misc_feature (19)..(19): n is a, c, g, or t
  misc_feature (25)..(25): n is a, c, g, or t
  misc_feature (66)..(66): n is a, c, g, or t
atgggaataaccctgcccngtacangggtggacaaatatcctgcctgactccccccgcttcaaacncctagaagccttccttttaaaatcggtcctatttaagtttctttaaaaagttaatttaagaaaaatccctaaggtaaattgtagaaacaggtgatatgtcaatatgaccccccaaaaattgtaaagatggaagacgaatgccctgcagtttgggaaaccggatgagaggaaagcccctggaagctattgtaaaatctatgctgagggtctggtgactactagaccaagggcatggcagcagagggcagctgaaagacttcaggaaggaaagatataagaattaagaaaggggcctggtgcagtggctcat

SEQ ID NO: 327009 - DNA, 557 bp, Homo Sapiens
ggaggtccccatcagcggtgcctttattatcataaacattgggagcaaataaatggtacagaaagggcaacaggcccagttcctcttcaggagaacttcagtgaataagcaagaaatcagggtgaggaagaaaaaggggagccatggcctgagcctggctggctgggcccataagtcaaccacacagcccagctgcagctggcttatccctccaaggcaccactggtccagctctgctaaccaggacacagatggcatcttggtatctctttcttgcctctatatgcttctcacgcctagtacagtgccttgcatgtagtaggtgctcaataaatgaagaaccagaggatacaagtgggccctccaagaaaccatgacagatgtaatttacaaggaagaaaactcttgtttaaggagggaaattgctcaaagggacatagcttggaagccacagaacccggattgaacccaggcacgctaattcctgaactgggttcttaacaagtccgtttggtggctttcccatacctcgatttcttaataagccaaaccccact

SEQ ID NO: 327010 - DNA, 322 bp, Homo Sapiens
cccccggagatctccccaggaaggactgaaaaagtccactgaattcctgttaaagttgttaaagtttcctgtgccagtctttgtatctggaagtcagtttggctggatataaaaatccttggttgacatttccttagatcattgagtatcttaagctattttttcctttggcacaaaaaattctgttgaaaagtctgatgatattcttattttcttttccttataaatgactttaccttttttgcttggatgctcaaaggactttcctgtctttaaaatccagcaattttactaaagtatgtctcagtattggtcattctgt

SEQ ID NO: 327011 - DNA, 696 bp, Homo Sapiens
cagtggggcaagacaggtattttagatagggcagcaagggaagacctcgtgactttggagtgaaaatgtgaaagaagcaaaggaattagtcatgggggtgtctgcagagagagcatttggggggagagaaaaccaccaaacgcaaatatgtcagaagtgagcctggggcattttcaaggggcagcaggaggccacgtggctggagctgatgcccaacagggagagaactaggaggctggtcctggcgtcctcggtcctagttgatcacacagccttgtcagtcatgatggactcctcatgaaaaggagggcaaacttctctgaagctcttataacaacttctcatcaaaggcatctctcacacaagcaatgcgctgccctactttgctattctggaccttgtcatcacatccataagcaggcgatccattatccgtacttactaggctctactggagttccacagccggcacagaaaaaattctgggctgccaccacaaggtccctcctgaatacgaaaaataatactagttacatttcagagaaaggccaatggcacatttttcactaattagaaaagaaattgccatcgtgatacttttctaactaagggccttaactttgtcacttttcatttgggaaagaaatagatttattcaatacaattttctagttgaaatccctgggtcttttaaag

SEQ ID NO: 327012 - DNA, 904 bp, Homo Sapiens
gctttttccctttttattaaaaatagactcaagcactttatgtatcatacaaaagtttcattcgctggtggcagccacgggaaagactggccccgtagcactgattttccacctcccctccagggacttgggtcccaggggcagtgactgggcctcagagaaagcccataaagactgcttactctggaagcagccgactaggggctgttccgcgagcagctgtccccaccccacccaatggcaaaagttagatactcgaaagtgcctcttcagtgccaagataaactaacaagtggagtgaaatggaaaaccctttgattattttactatttcccagggcctgggattttgagttttccctgcactcaagtccttttccctacaaataggggtaggaaacttcatcctcagagactctggtctcctggtgtctgagaccagaatttcactccaacccaagtcttttctcatctgctgttctgtggtccatgatctacttgccctgtgacccaaggtttgtcctctgttcactcaaaaagaggtggagcaaaaacggattcctcccacaatcctctctgcctgagtctatgccctgccatcgcttccatgttcaggatcttgggaacagaaagacccacaaccatccctttcccccagttctgtctctccctgactgctgcccactcctgagccttaacacccctggggtacccccagacccctgttctaaagggtgcctggtagtggatatggtggaggcaggggaggggttggttggagccaggtttcccccaggggtggggcagtactcatgctggtatagactgcttggcagggccgtggggagggaggggcatgcggaggaagggcacaccctgcctgagcccctcagtcccagccgttg

SEQ ID NO: 327013 - DNA, 368 bp, Homo Sapiens
  misc_feature (198)..(198): n is a, c, g, or t
aacggctgggactgaggggctcaggcagggtgtgccttcctccgcatgcccctccctccccacggccctgcaagcagtctataccagcatgagtactgccccacccctggggacaacctggctccaaccaacccctcccctgcctccaccatatccactaccagggcaccctttagaacaggggtctgggggtacccngtggtgttaaggctcaggagtgggcagcagtcagggagagacagaactgggggaaagggatggttgtgggtctttctgttcccaagatcctggaacatgggaagcgatggcagggcattagaattcagggcagagagggtttttggggaggattcctttttttgttccac

SEQ ID NO: 327014 - DNA, 726 bp, Homo Sapiens
  misc_feature (351)..(400): n is a, c, g, or t
  misc_feature (425)..(479): n is a, c, g, or t
  misc_feature (489)..(663): n is a, c, g, or t
  misc_feature (704)..(704): n is a, c, g, or t
tgaaaatgattttaacaaaaccttcaaatttttctaaacataaaggaaatcatactggtaagaaattataaaaatgtgaagaatgtgacaaagcctttaaatggttgtcacacttgattgtaggtaagataattcatactggcagaaactcccagaagtgtgaagaatatggcaaaactttaattcctataccttattgcacaggaaagcatttatacttcagaaaatgttgtactgatataaagaatgtagaaaagccattaatatgtgcttacatcttattcaacattagagagttagtacttaataaaagcattataaatgcaattactgtcaaaactcagcataagnnnnnnnnnnnnnnnnnnnnnnnnnnnnnnnnnnnnnnnnnnnnnnnnnnaaatgagactacgtaatactctctnnnnnnnnnnnnnnnnnnnnnnnnnnnnnnnnnnnnnnnnnnnnnnnnnnnnnnngttcaagcannnnnnnnnnnnnnnnnnnnnnnnnnnnnnnnnnnnnnnnnnnnnnnnnnnnnnnnnnnnnnnnnnnnnnnnnnnnnnnnnnnnnnnnnnnnnnnnnnnnnnnnnnnnnnnnnnnnnnnnnnnnnnnnnnnnnnnnnnnnnnnnnnnnnnnnnnnnnnnnnnnnnnnnnnnnnnngtgtgagccactggttcccagccaatataagcctttaaagnaaaaaaagagtttttattttga

SEQ ID NO: 327015 - DNA, 607 bp, Homo Sapiens
gggataaaggaacttaataaatgtttatttaaaaaatgaatggaaagatgagtgaacaatcaaggactctagaatgtcttagtccttttgaaacatagtgcttatgaactaatacataaaaggaaatagaagagaacagtgaccacaaaaatgaaaatactggaaagtttctcatactaatgacagattgggaccattgcccaggccaaagctgtttgccaaggagaagcaattttcttcccattcagaggatggatatgaataggttcccaggtatttgaagtgtatttgaagagccagttgtcagaagtaaggaagaatgggccattccccccaccatgcaggtagagctggggccagagcttttggtttatatgagctcaactttgctgtctttcccagaaggccttcgaagtgaggaaggagaagggtttagtaaaatctcatttccattttctacttactatgctgtctgccaattatcttggtgggagaggttacatagatgccattcaaccaggtgctccagaggctgacaataatggtatgataggcagcctctaaggtggcaccattgatctctgcctcctggtattcatacctttga

SEQ ID NO: 327016 - DNA, 428 bp, Homo Sapiens
  misc_feature (38)..(38): n is a, c, g, or t
  misc_feature (65)..(65): n is a, c, g, or t
aacagtaggggtttaagccctggtccggagtgggaganattggcccttaaacccccttcattaanttgcccccaccctcctactgaggcacccacagaaaggctgtgcccctaaaaattatagactcatccctaacaaaacctaaaacccaagagctgacaagatctgcaaaagagacagaatttggaagctgagtcctgccaaattagaagggcttgggaaacactttgaacttccttcaaatccttgctattagggcaaaaaaacaagccaacacaagttcactgtaatttgccaataattaaactgcctcctgaggaatcaaaaatcaacactaaacattcttcaatcaagaatcaatagtcaggctgggtgcggtggctcattattgttatttttaatggacctataagtatttacaattcttc

SEQ ID NO: 327017 - DNA, 827 bp, Homo Sapiens
aaggttgggtttttataaatggctgggttttggtagttagcttactttggcccaaacactgtgctgagcattttacacatcatctctaattctcacagcaattccaatcctggggttcctactattatcacccccactttacagctgaggaaacaggctttgagagatacagttacttgtccaggctcatacctgactaagctcaattccagacctgggtactcttaagcactaggcaaagggattccatcctagtcagcatcatctgtgaggaattttaactagggccctgctctgcggaacagcacagaagtcctttgatttcctattcagccaactcacgcagaaacagccagggaaccttataaaggtctcacctgcccaacacacagtcccaaacttggagtgtgcttgtgaagccaggaataggaagaccaaaggccagaggctcctgggtgcgtctccttgtccctggcacacattacttctacctggttcgcgttacccgagctcaggaggggctgacatgtcatcagcatgtgttccggggaggcttttgccctttgtcttagaaccctgtctgaagaatcagtcccctggaaccatctctggtcattcggctcttggcaccacactgggcactctgctgggcttgtgcaaggtgctctctgaataaatgtaccatccctaaagcttacttcacctgatggtaagtgggcaggaaggtgtgtgtgaagggcagtggatgctactgtttctattaatatttaattctaattccaattcagacgcccaccacttctttcagtttaatccaccttaatcaa

SEQ ID NO: 327018 - DNA, 426 bp, Homo Sapiens
  misc_feature (20)..(20): n is a, c, g, or t
gaaaacccaaaaggcaaaangcctctggggtgccgtcctctttgccccctgggcaacacataacttcctacccctggttccgccgttaaccccgaacctcaaggaggggctgaacatgtccatccaagcatgtgttcccggggaaggcttttgcccctttgtccttaagaaccctgtctgaaagaatcagtccccctggaaccatctctggtcattcggctcttggcacccacactgggcactctgctgggcttgtgcaaggtgctctctgaataaatgtaccatccctaaagcttacttcacctgatggtaagtgggcaggaaggtgtgtgtgaagggcagtggatgctactgtttctattaatatttaattctaattccaattcagacgcccaccacttctttcagtttaatccaccttaatca

SEQ ID NO: 327019 - DNA, 695 bp, Homo Sapiens
  misc_feature (355)..(399): n is a, c, g, or t
  misc_feature (514)..(580): n is a, c, g, or t
gaacatggtgctgaggatatagaaacaaataaaacgcattcttgctttcaagatttattattgattaagacagttaaaaacataaatgctggtcctgtttgatcaatgctttccagaagatatgggggaagaaagggcggggaatttttcaaacatgggtttatgaggtgaacaggaggggtgtaaccattttgtaaacaccatgcataaaaacaaaagcctcaaaagtatcaaaagcaacctagatttttaatctgggatatggaagattttccttagcctgatgtaaaacccaaatgctgtaaagcaaaggctcggtaagtttgatgacataagcatttaaaacttatgcagnnnnnnnnnnnnnnnnnnnnnnnnnnnnnnnnnnnnnnnnnnnnnctaagtggggaaagttgcaaccacaagatagtcaaaaacctaatttccttaatataaatagctcctggaaatccataagaagataaatgacctaataggaaaatgtccagagaannnnnnnnnnnnnnnnnnnnnnnnnnnnnnnnnnnnnnnnnnnnnnnnnnnnnnnnnnnnnnnnnnncttcctcacaaccacataataatgatattttcttttggctagaacatagaatgattggcagtctccatacaccattgtgagcatttaaattgggtaacctcttaagcagctaata

SEQ ID NO: 327020 - DNA, 702 bp, Homo Sapiens
  misc_feature (465)..(628): n is a, c, g, or t
  misc_feature (675)..(675): n is a, c, g, or t
  misc_feature (677)..(677): n is a, c, g, or t
caaaagatgaaatgcccagttaaggttatgactgaaaagagcttacacatcttttttttgaaaactcttgacttctcgtcgctttctgcttagatgtgcagttttggaaaacagaactgaagttttggctttgtgtctttactcacatggttatattgctcaacctgatctacagaaattattttgtcaaaagtagctttaagacctttcatttctgtacattttgatacttattttaaagcatcaagcagtgattaggattaggagcaattttgacttcttttcaagttatatctcttacatgtgtcatgccctgtctggatttttaaagggaaattggctctgtccgtttattttataccacctcaattttgttccagtaagtaacagtagaccttctattgtatgcctttgggcaatatatttttttaaaatgcagccaaatgcagtgctcctgcctgtgannnnnnnnnnnnnnnnnnnnnnnnnnnnnnnnnnnnnnnnnnnnnnnnnnnnnnnnnnnnnnnnnnnnnnnnnnnnnnnnnnnnnnnnnnnnnnnnnnnnnnnnnnnnnnnnnnnnnnnnnnnnnnnnnnnnnnnnnnnnnnnnnnnnnnnnnnnnnnnnnnnngcttgagcccaggaatacaaggcttcagtgagccataattgaaaccnangcactgcagtcaggcaacagagcaa

SEQ ID NO: 327021 - DNA, 665 bp, Homo Sapiens
aaagaaagtccaggataaaaattttaaaaagcaggccactgtcagcaaagcctggagaagtggggccggaggctccgcccccatcatgtgcctgccaccccttcccagtcatccctttactcttacagtagcaaataagacccctgtctaatggggggagacaaatgtgtagacccttagccaccttggccagggctgactccttaaatttctggatgatgatgattgttatttaatagccagaggctcatataattggcctctttggaaagaggcctcatggcctccttactctcaccaaagcaatttttccctcaggggggctcccatcttcttacacagagaggcagctgaggcaggacagtggggctaactgtagaccaggcgagggcacgggctgctggggtggccctgcttccccagtgtacatattgtatctgtgtaacattttgtatattccaggggtagggccgccccctgtatcatacctagcagaggttggagctggcacatggggaggaggttctaataattatttggggctgggaaacttatttattgatagcataggacagaggaaggaggcggggatggggtcgtggcgccctggtgatgcgactcctgtttattttgctttttatttcggaataaatggatttagccat

SEQ ID NO: 327022 - DNA, 1008 bp, Homo Sapiens
  misc_feature (14)..(14): n is a, c, g, or t
  misc_feature (661)..(661): n is a, c, g, or t
tccagtagggaatnggggatggaggtttggaaggacccacaaaagaggagtgtgatgaatgctttgtattctagtactagcctacctgtcaccagttctttttatgtcttcatttgtcaagtttctgcttttacacggtagtttaagttataaataatcagggatttctaccacagggttttaacattcttgaaatgtggacaaacttgggagtgagtgctcccgcgcttagtaatggaatacagcctcccacctctatttcagcttcagttcttaggctaggctgcttttctggcagctgtctggcctgagtaatgatggttgtggtttccctgaagttcccagcggagagtcatcccatgatagaaactgccttgcgcttctcactcacgctctcagcccggggaatcccagcggggaggagggagggaggtcgttttcttcagctccccaggtggtctgtgctgggtgtgctgacggtccttttgggaaaacaggtccacctttgccagcgtaattccagaaagagatgtaattttctggagagcacacacctgggcaaggagatcgctttgaagtgagaaaattcgtagtggtaaatgtatttgtagcaaagtaccactgcatatcctgcttgagaggatgaaatttgattatttangtaagttttcatgaacaactccacttcagtgtggggattacgcagatgagcaagagcgtggctctgtcacacaagtccgttgggaaagcctgcaactcattaagaatccgatgagtgccatttagaaatgtggacagggtactggagcttcctcattgtggggagatggcagaagcggaggtgctttactaaagcaccggtggcttttgaggtgtttcttgtgtttttttcagaactacttctgcagtggggccactttatttcttttcagagctacttatgcagattgatgaaggggaactttcccctctgaaatgctgctgtaactttttcagtaccatccagtt

SEQ ID NO: 327023 - DNA, 940 bp, Homo Sapiens
ttcaaagagtagacacatttttaattgtaaatgtttacatattttctgtagtgtttgggttaattccagtaaatatatgttacctttataataaagactatgtacataaagctaaaaagtcacagctgtgggccatcttgcatcaaacatggctagagaaggcctgtttactcttattctgcagaaggacatggggcaaggatggctgcggcccccacactcggtttcagacacagtcaacactcatttcccaggtcccggctctcctctcacttcctggtgcccctgccctttggccactgggatcctggcacacaggtgacagccagctcttctggggctgggcagtccactgggtcatcactgccaaggacactcatatagacactcagcccatcagatagacaagttgaagctggctggggacaaatacagcctggagcctgtacagtgcaagattctcaaatatttgcgcatctcacgtggaagcctggaacctggagcctgggttctggtctcagattcacccctgcctcattctgcaaccttggccttgttgttcaacaactctggcttggaactgctctctctccctttctttcttcctcatcttggttctaacagaccctcccctcaatgcatagcctactggagacactcactcgagaagagagtaaagccccgtccctaacccagctcctgtgtgtgactgatggcactggggcctggagtgtatgcctgccactgagtccaggccctcttcagttccaaggaaccatcacatccaggggacaacacagaacaaagggcaaggatcccagctctgcatcctcagcttggtcaatggcctgatctgggggctgggagacaggctgtggccctgttgtgctcaggcaagttgatccttctctgagcccattttcctgtctttaaaatgggg

SEQ ID NO: 327024 - DNA, 456 bp, Homo Sapiens
ggccgcttaattaatgtgggtaggacccacagacaggtttctccttctttcttttaactggctattttctgggagcagggtcctggattattttatgatagcttacaatcatgttgttttatgactagtcatccatttaactgtttgttttggccagatcctcaggatggcttataggaattggtgcccatggctagcacgttggaggggctggggaaggttaagactactgtttacagagagaggtaccaccttgagaggaaggctgaagggggttgctgggccagaacatggaggagagcctcctgagagtaaagcaggaaggattgggaagggggtgtggaggccttgggaattggctgaagagttttggggactctgggaaggaggaaaaatagttcttaaaaattctagggctggacacagtggttcacgactgtaatcccagcactttgg

SEQ ID NO: 327025 - DNA, 439 bp, Homo Sapiens
  misc_feature (15)..(15): n is a, c, g, or t
  misc_feature (46)..(46): n is a, c, g, or t
ccccccaccttcctnttaaactggccctattttctgggaaccaggncccccggaattattttaatgaatagccttacaaatccatgttgtttttatgaactagtccatcccatttaactgtttgttttggcccagatccctcaggatggccttataggaattggtgcccatggctagcacgttggaggggctggggaaggttaagactactgtttacagagagaggtaccaccttgagaggaaggctgaagggggttgctgggccagaacatggaggagagcctcctgagagtaaagcaggaaggattgggaagggggtgtggaggccttgggaattggctgaagagttttgggactctgggaaggaggaaaaatagttcttaaaaattctaggctggacacagtggttcacgcctgtaatcccagcactttgggagac

SEQ ID NO: 327026 - DNA, 297 bp, Homo Sapiens
  misc_feature (149)..(149): n is a, c, g, or t
  misc_feature (255)..(255): n is a, c, g, or t
  misc_feature (266)..(266): n is a, c, g, or t
tctcctattctattttttgcaaaaacttgagaggaagtggtgttaattctttagatctttagtagaatttatcattgaaagcatcttgtccttagggcttttctttggttgggaagtttttattattatctttactatttactacatcntatttaaatagatccttgtaatcagtactggtcatgtttttctttgtcccttgtaacaaatttgacttaaagtctagtttgcctggtattagtatagccactctgnctcagtatagncactcatggaatatgttttttcatacttcgg

SEQ ID NO: 327027 - DNA, 772 bp, Homo Sapiens
ctgcaacagacatatctttatttacatccagctctattagtgattgcatcctttgattggtagcagctttgagaaaattgtgaggcctacatttgggctgagaaaataataatgccaagatttaataatagtgtctgccaaaggtgcaagatatagggaataccttttgctggtcttgttagtactataccaaaaacctcaagaaggcagttttcaggttggtcacatttctgccatttgctttttcaaatcaagttggcaaaaatagcattatcaaaacagtgaccttctgtaacagcctactgggtaagatcatgtatgaactccagagtcagactcttgtgggttagaacccagacttttgctagttcatcagctctctggctttagagagagctcttcactccccagttaggtttctgtatctataaggtggacatgatagtagcagggcctaccctcataggattgttatgaaggttaaattaggtaacacacaaaaagttctctactcagtgctctcacagaataagcattcaataaatgctattgatgctattgttacattgttgttaagccaaaaaaagtatggcacatctcttattatagtagttataaattaaaatgttcttttagccagtattacagctgtcatttcattttcttcccagtttccattgcttcctctgggtctgtttctatccattcacttaaaaaataaataaaatgaaatattgagcatatcttcttcagttctctcccacgccgagct

SEQ ID NO: 327028 - DNA, 783 bp, Homo Sapiens
tctccagtaatcactattttaatggtggggcagctggtattaaatggggtccaggtactgatccatgtcccctttaaatgtcactaaggaagccaagaggagggtcgtctaattcagtttgaggaaaacaattttgaaagtggcagccattagttaaagggtgaaattggtataccaatgaatcatgcaagatataaagaccaacaaaaatgtaaggtgctacctctataagtttctgtctctttgttataatcacactctccctctccctctcagtggattttcatttggaggatatgtttgggatggagatggcttaaatgacaggtgacgtcatttaataatatgtttgggggttttgaaggataggcagttatagagattgaaaccaaggtcctgaagaatcacataacatatgatgatgcaggcagcagggaaaacaacaatggcttcaaacaagagccccacatcaaaagttacaaggcacatgttcctaaattgtatggggagtagcagcagggatttatttatttaaagatggttaatgattctcctgagcataaccagaaggccagcttgtcaccaatattggtgtcatttcatcctagggtgactgacacctggacagctctcggggtggggggcaggtcacggtgaaagcactgacaagacattctgtaagaactagaggacctcacgcacagagaggctagaagggcaacgtggagaaggtgaacagggtgtcagcagtcacaggcagaaatggagagagaacctggagga

SEQ ID NO: 327029 - DNA, 742 bp, Homo Sapiens
  misc_feature (102)..(115): n is a, c, g, or t
  misc_feature (370)..(370): n is a, c, g, or t
agtcaatacccaccaaaatcccaaaggtgctggatagatgctgctccggccccgaaaataatcaaacacacaaaagttactattaatatttcttgccaaacnnnnnnnnnnnnnntccaactcctgcacatgggaacaaagcgacaatggcagcagctgcaaatacataagcgaagcatcactgaagaaagtctccagcttaatattgctcccgacaccctctgtggtggttcactcatacagcaaagacacgggataaaaaattccacagactgttttcaagataataaaatggcatatgatgatgactcactaacagactaaaaggaaaaaatatccgtcaacagtcataggaagcttacaaagctgncagagatctggcaccactaaagctcctcccacctccccctggctctcacctccagtacacacatgtatgtgggacatacaaagtgtgtgtgttcatgtgcacaccctttagggattaatttgaagccaagttgcaattggctaatggcttactctactgcttaagacagtattttattcttgactggctcaataaacctgctgagaaaaataaacaatggatttcaatcttataaataatctagaacacagaaccgctgcgcaaacaggagagttgatttactgcgcacaataaacagaacaggaaggaccagtgtggcagagtgaaccccaagtcctagtcccattgtcctgggacagtagagttcacagg

SEQ ID NO: 327030 - DNA, 735 bp, Homo Sapiens
  misc_feature (390)..(390): n is a, c, g, or t
  misc_feature (402)..(402): n is a, c, g, or t
  misc_feature (454)..(454): n is a, c, g, or t
tataccattttatttgactattacacatcttagggaagtgatttggatttagagagaaaatattgaggtagggtttttctatcatacaatgtcttggattaccatctgcttacaaacatgattatggacccaaatgctgagaggaactgagcttcaaactcatagaattcttggagttttgcccagatcaaatgtgcttgatgagtttggacactatacatgcttttaacatactaaagctgaatgataaaacctcagtactccgtaaatctgaatactttgtgaacccacaggagttgttcagggtacggtatgacttctattgggacaatctgtgcccaaaaactcctctatgttctggtcaacccatgctttcccaagtgcactganaagggatttgtnttggccacatttggaggtgtattcattttctactgctaggtaatggatgacntacaaattgagcaacatgtaacaacatccatttagctcagttctgtgggtcagaagtccaggcaattcaaggctggattctgctcaggttaacatcagggtgtcagccagctgcgttttcacatggagttgagtgttcttttcctaattcgttgttgtcactgggataatttaggtctttgcagttgtggcatcaaaatccctgttttccctgctggctatcagctgggaccagctctaagctcctagagactactctcacttccttaccaagaggtccct

SEQ ID NO: 327031 - DNA, 992 bp, Homo Sapiens
ctcttaaaaagatttattatcaaaaagtttgctccctttaaatactgagccaattcatcaatgcagctccattctttttaggattattagggcccaaataatttcagactaaaacaagaaataaaaaaactggactataggttcagtaacatattcacagacatgtcagtgtgcactcaggaacactggtttcatttcttgattggaatgcttatcaccataaaatcttctgctagagtcacttcttggagatctaacactgattcagcttgcttttttagttctgcaatgccatctgtttctccttctctggccaaggcaactggtttgtacctctgactgaagtgagtcagaaccagcctctttgcacggcacaactttgcaaatgttgctgccatctgtggtgtgctgtggccatgctcctttgctttgtccatctgggcatcatccagggttgcttcgtggatcaacaggtctgcttcaaagcacagttttactcctccatcacccacaaccccagagcagtcacccaatatgcagatttttcttccaacaataggcttttttaagacatcttgggggagaaattgtaaccccattttccagaacaacagaaattccatttttcagcttcccataggcaggacctggtggaacacctaatgatgaaggcagataacattacatcataggaatggaatttatgacttttcaagagtatattttaacagcattgcaaatagctaatggaaaaggcatccataattgttataaatgttttactacttgtggaaaactggatttatacatttttaaaatttcagtgttgattgatattagcaatgccttagtacttgaaacatttcccatgcatacatgtcagacaagttttagtctcctaagtatcactaggaccttattgtagtcactgtaaaattcttgattctctgctgtgcacagaaacaacagtttttgagagtgctttatttaat

SEQ ID NO: 327032 - DNA, 505 bp, Homo Sapiens
cataaaagcatatgctgttattaatttttgcaaatgtccttaactgagaggcactgagcagaaagaagaacacaattgcatctccattatcttcatctgggccaccagataccagccacccactctctcagacaatggcagaaaggacaagccagcccccagggacccggccctgccagcttacctgttggcacacctcccctgagcactgcagcctcaccaactgtctggggtccctgagactgcctgctcacactcacctctgagccttcctgtctgctgttccctctgcctggaacatcctctccactcccccttagaccccctctagcagctgtcctggctgactgctaattggctttaggattcagggaggcatcctgctttgggtgccttctttgatgggcacagatcaagttaggggtcttctctggctgcttatcctcatagcacctgctcccggatgtgacagacagcttcagttttgtcaccctgtggtccagca

SEQ ID NO: 327033 - DNA, 859 bp, Homo Sapiens
ggcagtcaggccttatcacactctccctaagagaggagctctgagtgagctggaaagacagtacacatgcctctgaagagccgggcagtggtggtcagcactggttaggtctgggagcagttgctgctgcccaaggacagggagagaggttctgaaggaaaatggtatctgggttccaactagcaggtgggcttgtgtgggcagaacaaagctaggaaaaaagggggtctggggcctgcctatcaggtggaagataaaagaaggtgtgtggagatcagtgtttaggacacgtcaatgcactgaaatgcactgacaacagggacttccaagggagacagggaggcagaaaggaaggagagtagggaaggggaaggagacacagaggacgtgggacataaccaaagagtcagggatgtgtttctataaccctttctccagcggctgccactctaaccgctctacctggcgtactctgtagactgtggcctgctgtgctgtgtgagtggccccagcttctctccactgacctagctcagccagccgagcaggtgggcggacagtgccctcacagcgccgactgaggtctaaaccggatgacccctgagatgaagtcaaaggccttgctcacaacgcaacggggggctgagacagggttcatcttacctgtgctgctttgaaagaaccttttccactttccctgtgagcacactccagatatacagagagccctcagcagagcctgccgccacgtaactgccatcagggctacagaagacagtaagaaaagaaaggttgtcaattccccacccccaattcagcatctctgtggcctttttcccaagaaggaatgtttgttctt

SEQ ID NO: 327034 - DNA, 421 bp, Homo Sapiens
gatggttgaagtctttatagcttgtaggagtggaggcttgaggcttttgggggaggtggtgacaagttagaaaggaaaggggaggaactgaatggtaaacaaaagttgccttgttattcagataaagtctctagaagaatggacaacagcctttctgagtgcagtgaggacttccaatctcctctcaggtgaccagtctttcccggctgtttgaagagattcctagggaggaggtcatgccagtcacatttcttttggaagtacatccctcaggcagataagggaatcccagagagatcccctggccaaagatcatgctttggaagtgaaggagagacaggagaaggtcagagagacatgtgagttctgaggccctcttctgaggtctttcaatatcctttgttcaaagcactcaggtttg

SEQ ID NO: 327035 - DNA, 527 bp, Homo Sapiens
  misc_feature (91)..(232): n is a, c, g, or t
  misc_feature (280)..(326): n is a, c, g, or t
gttaacaaataagacaagtagtatttgagctgttaggaatttgtcacactgagatttttgttgtttttgagacagggtctcactctgtcannnnnnnnnnnnnnnnnnnnnnnnnnnnnnnnnnnnnnnnnnnnnnnnnnnnnnnnnnnnnnnnnnnnnnnnnnnnnnnnnnnnnnnnnnnnnnnnnnnnnnnnnnnnnnnnnnnnnnnnnnnnnnnnnnnnnnnnnnnnnntgagttctcaccatgttgcccaggttggtctcaaactcctgagctcannnnnnnnnnnnnnnnnnnnnnnnnnnnnnnnnnnnnnnnnnnnnnntgaaccactgtgctgggcctacactgatttttatactattagaaaaatctctacttaacggtttcattatcttaggtaaaagtattcaatagaatagctgaaataaatgtgaagcttttcttaataggcagtaattagataaaatgaacaacattctcaatcctcctcatgccacataattctctccctgcaagtttgtct

SEQ ID NO: 327036 - DNA, 183 bp, Homo Sapiens
  misc_feature (21)..(21): n is a, c, g, or t
gttactcaggaggctgaggcnggaggatcccctgaagattgaggcttccagtgagcctaaatggatcgcggccactgcactcccagcccgggtgacagagtgagaccctgtctcaaaaacaacaaaaatctcagtgtgacaaattccctaacagctcaaatactacttgtcttatttgttaac

SEQ ID NO: 327037 - DNA, 682 bp, Homo Sapiens
gtttgtttgtttccaaggaattgcttcaatttggaatcttctcttggagatgattcactataatgaaatgatagcaaacaccattcagtcatgaaataaagtgactgattatggttaaaatatgcaaaaggtattttatctctctgcttctgatctccccccttccctaattcacagtaaaggtctctgggtgaaatggcatgatttaaggtgattggaattactttctgattcttgtggagaggttgcaaaacacctctgacaagaattgattgattattcaagtcaacagttgtttcaaagactccttccaatgacaatataataataaagctgttggttaggagatactggatcgtggactcaggcactagggtggggatgtgagggactgggtctgccccctgaaacctcaggaatgctcatcacttcatattccacaaagagtgtctccaaagaggaagattgagaaagtcttaaaatatgttcattgctttagaaattttacccttttcttcgggtttcacatattcacttcagaatgcttgggtatctgtggtcagtctcacaggcagttccttggtgttgaagacaacaggtctgcaggcagtatgggacccctgattcaggcctgcccatagcactcaggaatgctgtctctggaccagccactgaatcttcc

SEQ ID NO: 327038 - DNA, 752 bp, Homo Sapiens
  misc_feature (139)..(139): n is a, c, g, or t
tttggaattcttagatgttcatttattcacccaatcaatatttattgagtaattgtcacatgctgggcatttttctagatataggggataaagtagggaacaacataaatgtatattaaggaatacactttgctgtaanccccaccccgctcccctcagcttaaatgaatgaggagttttgtttttttctaacaaaatatgaagtccaatgcaggcagtttggggctattttggttactccataatgtcaagataaatttggaaattttcagtctttctgatgtaatctccagcaccttcagcattctatctgcattccaagcaggaaggaggggcaaggacaaaggttaagaaaagcatgatagctgagctgcctgtgctccccacactttctaactttcctagaattccatcctatgacttttgcctacacgtaattggtcatgttcacatccattagccacgtcgttgctccttctccaggcaggatcttcttagaaagaaaggggagaaatctgaacaagcatctagcaggccgtgccatgagaaaaaattcttgctcttatgaagttcaaaaattttatagctgatggtcttggatttcaacaactcagcccttggaccccttctctgctttatctccacttatcccattggtggtctcattcagtcttacggctctaagcagttatgctagtaactatcaaattcacatttccagtccagcccactcccctgaacttcaaacgtcc

SEQ ID NO: 327039 - DNA, 701 bp, Homo Sapiens
  misc_feature (26)..(26): n is a, c, g, or t
  misc_feature (83)..(83): n is a, c, g, or t
aatgctaatagcctttggtttttgcntgctcagtgttccttcagttcgcataagcactcttttcattgcaggagtcccccttntacattctcccagtctctgtgattctgatggtgctgagtgaacccgcaactccaggagaagccacactactcaagttcggccaaagagggcaccccattcccagacacagtgattattcgggaatggctagggcccagctaggaaggacacatcctcttggtggtaagattgctggctgcaatgaaaactaacacggcagaaagaggagccaggaaatgaaagccaagttctgaataatataagatcaatgaactctttttgtttaaacagactttgacttaggtttcttgtcactagcaacagagtccccaatgcagacccattatttggtggccctgccttatattgatctgatgaaatattcctgcagcccattctcagccatcctcgtgaatggcttctaggaacacggttgtttatgataaagtgaaagaagcatgatacacattcattaaacagcaagatcttgaatatgtttaaacatcactcccaagaaaacacacccaaaatattagcaaccatgctggttggtgaggttataaatgtcaaactttttattctccacatttcctatacaaatgtcttacaataaatcttaaagaaaaaactgaaaaatt

SEQ ID NO: 327040 - DNA, 762 bp, Homo Sapiens
gaggtcaggttacaagctttgtttatacctatcgtaccccttagctgcggcagacccttctcctgttccttcgtgtggggcttgggttggttagttggtcccatcaaggattcattcatatttgaaatgaagcactcttgtgatttacttagggtctggagcaggtacgagaggcactactgagctgcaggccagccccaaagggtggcctatgctttatgagcttacatgcagtcagaaagaacaaatttatactcggaggagcacttcagccctcccccgaggaactttgggaacccattagttttcccacaggaatcaatccatcaagtgggtatattaagttcacattaatgatgcatttgacccttgtaacctttccacagaaatatcccaaaatacatcactgtattttgaagctaaccaactttataagagaataagcttttcccctcctttccacagtgactctgagacaactggcaattggtgtaaaacagaagcgtcagacttatcagttgtggatgccttatcaagaatcgtgatcagcggcaataatcacaagattgcaccttaaactggtatagtgtggatggctaggctgggattcaaagagctccagttttgcctagggaattatgagatctacataattctctgaaggggaacttcggcttcaggagaagcagtgtgctactgggaaaggaacatgcacgttggagtccgaatctcagcttactagttgtgaaacctagggagggt

SEQ ID NO: 327041 - DNA, 476 bp, Homo Sapiens
  misc_feature (101)..(101): n is a, c, g, or t
  misc_feature (110)..(110): n is a, c, g, or t
  misc_feature (134)..(134): n is a, c, g, or t
ctgcagctcaagtagtgcctctcggacctgctccagacccctaagtaaattcacaagagtgctttcatttccaaatatgaatgaaacccttgatggggccnaactaaccnaaccccaagcccccacacgaaggnaacaggagaagggtctgccgcagctaagggggtacgataggtataaacaaagcttgtaaccctgaccctcttgcaaatcaacagcacagtgcatggctaaagatagacttgctatccccaaacagaaatacacacaacccagaaaacctcactaagtgataacaatttcttgtaccctaaataactgtttacatttggatctcatttggtcattcttctaacccagggaggaaagattccaacagaacttgctgctctagtgtgtttattgaagatcgccttgttctggttctggttctggtttttgttttggttttgttgagacaagagcaagccccattc

SEQ ID NO: 327042 - DNA, 655 bp, Homo Sapiens
cctatactggagaatatttttctatttctataaataagaccttcaggcttttgtggcatcttatttactttgaaaacacacacaaagaaagaggggaacctctgattaaaacacaaaatctagctcattgaaagatttctagcataatgaaagatttaacataactgtggtaaaaacatgaaggctgcatctattatttgagaaacggcagaactgtgtgggttacgggcatgcattaggctcttggttccccaggagaatgcctttgccttggaagaaaaaggtgcattcattctttgaggtctgtagtttcctcagctcatcagagcacaggcacattcttttctacgtgaagagttttgtaaactgaactttgttttcagttccggctccagccatcctcgggtagcttgccaatagatgaatcccactcgtttgacccatgacgctccttcttttcatttctccctctttccccacagcagtgcatgtccaccataccacctgagagtctgtggaatctaattttctgttatacttctttccttacactcattttcctgtctttattatgatagtctaactttttctcctcaaaggtatagctgccttgctttcatgaaaacacactttcctattgtgatttatcagaggc

SEQ ID NO: 327043 - DNA, 521 bp, Homo Sapiens
  misc_feature (103)..(103): n is a, c, g, or t
  misc_feature (113)..(113): n is a, c, g, or t
  misc_feature (163)..(163): n is a, c, g, or t
caaaccctgatattataaacataatgaggttacataccagcaaagtaaaggcaggaggacaggtgaatggtgtacttttatacagtggagagcctaaagttgnacaggttgangacaccatattatttagagctttaaagataactactagaggagcccaaanaatgataatacaatttacagaaattagtaaatggagagaggatgagaaacaagagacagaaagtaataaaagtatcttagattcctcatctttcataatggggagttaacagtattgtctaatgttaaagaaatcacagtatacatatattatttacagcaacaatggtagccagcaaaagcactgtaaacagaaactgctgaaagtggctgtctactggcattttaccctcttttacattgttgaagtttcatttttctgctttgtttcaaaatgtacatatttttcttagtcttcatgtttggatttcagaataggaagctttagatctaggttaacattagctatttataaattt

SEQ ID NO: 327044 - DNA, 304 bp, Homo Sapiens
  misc_feature (171)..(229): n is a, c, g, or t
  misc_feature (251)..(251): n is a, c, g, or t
ccctccaagtagttacctttaaaggctcctaaaataatatgtgtcctcaaccctgtcaacctttagctctcccacctgtataaaaagtacacccattcaccctgtccctcctgccctttactttgctggtatgtaaccctcattatgtttataatatcagggtttgtgggnnnnnnnnnnnnnnnnnnnnnnnnnnnnnnnnnnnnnnnnnnnnnnnnnnnnnnnnnnngcttgagcccaggagtttgagnccagtcagggcaacgtaatgagaccccatctctacaaaatataaaattagttg

SEQ ID NO: 327045 - DNA, 628 bp, Homo Sapiens
aaacacggttcttgttttagttgtttttctcaaagtaatcaggggatcttaacatcttcagacattttctggttcatgggtcctgaaacaatttctcctattgtttagtttgaaataactggctgctgctcccagcagtgtcaccaccaccacgggatacggatggggagacacggatttttgctacccatattgccttctgggattgccatacgttgaatgggtgatctccaccgtgcgtgttgtcgggagttgccataactggagtagccaccgccgccacctcctgcaggcggccgtggcctgggcctgggcgggtagcgtccgtcatcacggtccacatcattgaagtaacctccactgttgccggaattgccaggctggggttgagggcgtggctttggccttgggtagatatttccaccgctgtcgggattcctcgggctgtgggtaagtaaggtggttttggctttgggtagatatctgagtttggcttcttggtgggttcagggtcatcaagggcatctgccaaatcaaagtctctttgacctcgggcgtgcattagaaaacacaggaacgcaagacagggaagtccccaccagctctccatggtttgcttcaggatgca

SEQ ID NO: 327046 - DNA, 796 bp, Homo Sapiens
  misc_feature (742)..(742): n is a, c, g, or t
taggtgggcgggggtctttatttgagtttaggcatgattcgaatgaagaggatcatgctaatgaagatgaagcagacgataatgagcatggcccagagcagccagttgactgacttctgcgtgtgctgctccagacgctctgactccgtcttcagtttctccaggttctggtccgccattttcagtgagtgtgacagggtctggttgtccttcttgatgacactctgggcggccagggtattggtcttgaggctccgggccagtcctagcatctcttccgccagcttttcctggaggttctgatgtcgctgcaggacgaggtctagctcagctgccgactgcttctcactcactggctggggaccctgccactccagttctcttccttacggtccatctcaggctctgcagagtccgtgcctagtagctcactccgcatctcgctggtgtaccgcgcccgtgactgcagatgcaccgtctttgtggcgggcactcgctctctggctgtggttggcacacggccaggggccaggaactggttggccagtgctttctctgaggaggaggtcagcttctcggcttgcagcatccccttcagaaaatccaccttccaggaatattcattgatcacctcagaggccggtttgctcgcgtggaccttcagggcctgcaacatgtcctctagggctccgacgtacttctccaggcgccactcgtccgggtcccgtttctccgctgccantcgcctcgcagcgggatagcagccgcaccaggtttagctccagcctcgacgccg

SEQ ID NO: 327047 - DNA, 916 bp, Homo Sapiens
  misc_feature (46)..(57): n is a, c, g, or t
  misc_feature (308)..(322): n is a, c, g, or t
  misc_feature (463)..(479): n is a, c, g, or t
cattgcactccggcttgggcaacaagagcaaaacttggtgtcaagnnnnnnnnnnnngtacttgatgcaagaaattagacactctaataggaccactgatactcactgtagaaacaaagccaggtttctcaaacaatgggtcatggaaaatccaaggaataaggtctcttaccccttagtgttccctcattgttccaaatgtgtactgtagaagccatggtcaaaatctgaaaacatatgttagtgagttctaggaatgtgataagcccttggcactttaagggctagactaactgtgcagttatgtnnnnnnnnnnnnnnntaccataaaagaatacttacattaacaaatgggaagaaaaaaagccacatataagtatgtacattgggctatcgttttattaaaaaagaatactccaaaatatagtagtgtttatttttggataatgagactacaggtgannnnnnnnnnnnnnnnnggtacttcccatgtttcccaaactttctgtattgagcatgaattactctcttaagttactttacaaacatctcaagtttggtgccaactctgtgttcccatatatggtgttgttgctggacaccacgtatgactccaacgtgtccagaaaccaccggggtcccccaatagggctagtagcaatctagcagcaactccaggcctgtaaggggttagtgctagaacattacccacctcagtggctctgatcagtttgggaaaacctcaataattatccaacttggtaaaatactttaggtgtcccctttgaaccaaaagagatctctgaaaaggcccaaggaactactttatacatcctctacacgtttaagataatctgaacacatagtagagatctgccagactatggacatgggagctgtaatcctcacaagccgg

SEQ ID NO: 327048 - DNA, 640 bp, Homo Sapiens
cccaccttccacaaaaagaaagcccacctgcttggtcttaatctgttgatatataactttattccacacttggacttaatgtgttgatatatgactttttttccacacttattctttcatcacaggtgcaactcctgaagttaataaccactttctcaccacaattcactgacccaactctttttacaggcaggtctgcgtttgaggagttgcatcatcaatttggtttatttcagtagatgaatacattggagtttggggtaaaagttttagcccaataataatgcgtaaccatttggctgctttttaatatatctcactacaacatttgccatggccagtggcaagctgaggatccaggacatccagcgtccaggctacgtgctctcagggacacaactatcaatactgcatctccatgtcttcaactcccaattctatccactacactacccacagaaatttgtattctacccatagtattccaccgaaactgtttttccaaagttattgatggataatctaatagttaaagctatctttcttatttttaccacatcattagaactttgttagttccttgttccttagattttataacactctcttaattgttggagtgtttttctcatcatttttt

SEQ ID NO: 327049 - DNA, 545 bp, Homo Sapiens
tttcctggggtcagagttttaatcctgggaaaaagaatctggccgctgggccatgccctgggactagcccgctggtccctggtgtgtccgaatcagtgctccagtgcccgcctcttctccagcttcttctgtagctctgccgtcatgtctgccagcccggctgtggggaagagaggctgggctgaactgactggcagcttcctgcccaagccaccattaaagactttgggctctggcttgggtccaacgggtggctttggaagcttggcaggaggctttggcaacttctttggcttcaggatgactggccaactagaggaagccacatcttggttctcatagtcaacagctgggccatctccaatgggggtcacgtagttctcttcctggttcggtagtgggggcagtgggggcagcttgtcctggctagacgcaggtgacagcggcttggggccacctgtgcagggtgcaggacctgggcccggagcggagggcgccacccacacattctcgccattctccttatcggcttccacgtagcctag

SEQ ID NO: 327050 - DNA, 543 bp, Homo Sapiens
ctgtaacaaatgctattttatcttcaaaggagaattatatataaccttgaggaggggatgaggtttatcttcatttttttctgtttctcctcctctcctcccttttttgcatttgataattgcttagaataaaggtatggaaagtagatcccaatttcagttccccttcacacgctgtgcaaacgtggacaaacaacctctgaacctgtcacctctcagtggaaaaagtggtgataacgtcccacctcagaattgatgctcaaaatgaagcagtatttgtgaaacgaaaatacacacgctcgtggtacgccagatcggtgtttacgtcctcgtcagtgaacgcgtcgatgtttaataagaagggcagccaatcaacacttttcttgtctttttctcgtctgccttcctccaaggactgtgagggtctcaagatgtgtcccatctcggttgtttgtcaacctagtcctgctatgtcgtggggactgagcaggccgactcctcccccatcgcacgtccaggatgaagagcgctgtttaggtttga

SEQ ID NO: 327051 - DNA, 769 bp, Homo Sapiens
  misc_feature (335)..(335): n is a, c, g, or t
tgagcatggaaatcctacctggactgaggtatcaaaggataccaagagatactagagacaacaaggaacctggaaaaagatagtgttccaacctgtaaataagaaaacagagaaggaggttcattaatatttaagataccagctagtaaattaaaacagcaatgtagttgtctggcttgagtattcagttttatttactacatctttttatcttttctagaagcaaggcattaagtgttgacacttgagtattgaaccaatctgtgatatgacatgaatatgcctttatctttcagaagtttgtctacagacttacaaggaaaccaaaagtagtncgctcttccaatggcttcctaattttctcagcctgagtcttttctgcaacctaaaaatcctatgctagctggcctcccaagtcctacctcacctccacccctctgacctcatttctgctaagcactttgttccagttacacagacctgctccctgcttctgtaacaccaaagcatcttcttgccctgaggcccttacactgtgtatagtttctatctgcaaagatctttccaccaaatacctgcatggctagatcttccacttctgtccaatctttgcttaaaagtcatcttttttcaaagaagcctaccctaatcatctcatttaaaatattgccccttccccagaatcctcccttccttgcttctgtttttttcatagtacttaccttctaaccttctaacatcggcattttctatttttattttctattgc

SEQ ID NO: 327052 - DNA, 957 bp, Homo Sapiens
tagtgactatgctgactggagcattagagaagatatcggaaggttgcatttgacctgagtcatgaagaaacactagggattttctgtgtggaggagtcagggaaggacataccacgtaggggaccagcatgtttaggtgcttggaggctagaaaatgtggtatgtttggagaatagagcataattccaggtggttagagtgtagagtgcatggagggaggataagagagtagaaaaaaagcttgcccaagattaagtggatgatgaggaacagttgaaggtggggctgatattgattaagattgtatgttccttactgtaaagttacaggtatattatctgtttacccaaacccccacatttctagccaatgaacctggtctacccaaatgttctaactccctcctcgcccttgttcataacttcaccctcaaaagagtttttatcttgccttgctttcttaggcgctttttccacctgctccttaatttactgccctggggttagggaagatggagaagataacgaggcatcaagttgacagaggctgggcagaaggtcccaccctcaggctgaattcactttcttcattactacccctgggcatgtttccagatcttccttcccccacttctagctccctttccagtttttagaatttgaagcatcaagtccttatcaggtgaacttcctgcttccagctggggagcaggccaggctgctgctctcacttctcattatgtacccctttccggcagtatacagcagaatgagaaattgaaagcaaaatgaatttctgccatttcagataagtttataatcttcctagtgaaatatgaagaaatatggagtttggaaagacttaatactcaaagccagaatctgggtcagaaatgaaacaatttcacatctgtgtgtgaatgctgtaggtaatgatgggggaaggtgcttatactta

SEQ ID NO: 327053 - DNA, 774 bp, Homo Sapiens
  misc_feature (62)..(62): n is a, c, g, or t
  misc_feature (116)..(164): n is a, c, g, or t
  misc_feature (167)..(167): n is a, c, g, or t
aggtttgaggggtttgctgggcttcagtgcaggcttctgcgggttcccaagccgcaccaggnggcctcacaggtggatgtcaccattgcacactgagctcctggcaggctgtaccnnnnnnnnnnnnnnnnnnnnnnnnnnnnnnnnnnnnnnnnnnnnnnnnnggnattctgctctaaaataggcccataaatgcacagcagatatctcttggaacccacagctttccactggaagaactaagtatttttcttttaaagatgctactaagtctctgaaaagtccagatcctctacctctttccatcccaaactaagacttggaatttatgagagatctagctaacagaaatcccagacacatcattggttcttcccagagtgcagtcctcctaaagaggctcagccctaagcaggcccctgcaccaggagggtgggtctgagacccacatagcacttcccaaggtgcatgctccagagaggcactgaaacagctgagcacaagcctgcaagcctggagaactctcacagtcagaacggagggggcccagtgggactaacataaagagaaaagggaacacagagaaatggatggcaccaacaaccagcaaagccttcatggccaatgaaagcatcagtgacggggccagaaccctcatccccaaagactcttcactgcctttagtgaaaaacaatggctagagagtgaagttatgatcatgtatagagaggtaaagttacatttttatattctgactctgctaatgtgaaattc

SEQ ID NO: 327054 - DNA, 726 bp, Homo Sapiens
  misc_feature (433)..(433): n is a, c, g, or t
  misc_feature (714)..(714): n is a, c, g, or t
gatctttttttcccagtgacattaagaaaatctgaataacctttatgtgtagttatgcttgctataagttaaaacttgtaagttatgcttaggttaaaactgctttaaaaaaatctttactttgtaatgaaccacaccagttaaaataaactatactagttaaaagctgcctaaatatttgtcagaattgcaatttaaatctaaaaaagctattcataaatattctctagttacctatgtatattaaagtagatatttaaaataaaggatctgatctaagttcatattttttagacactgataggattcatattccaatcaaatcttaatgatttctcatcctaacatagcagaggccccatttcagcccacccaccactggaaaataaaggctttagaataactttctgtgcaacaagagggataactttcntgtacttaaaatcagcttactagggaatttcacaagttacaccagggacttccattggcacttggaaaagtaactgtgatggggcatttacagtaagaattttgatgttcaggggccacccagggacagatctctgagtatactcctccattactgcctgttaattgtttctggtattgtaggcactgtactaaaagctcagtacacagaactgcataaaacataagctctactcccaagaatctgaaattagaaaagacatatccatgggttttttaggntaggatcaggct

SEQ ID NO: 327055 - DNA, 530 bp, Homo Sapiens
  misc_feature (77)..(335): n is a, c, g, or t
  misc_feature (356)..(387): n is a, c, g, or t
aacaagtccaaatttaagcaagaaaaaattgttttaataatagaccattttaaaaaaccaatgtatttctggccaannnnnnnnnnnnnnnnnnnnnnnnnnnnnnnnnnnnnnnnnnnnnnnnnnnnnnnnnnnnnnnnnnnnnnnnnnnnnnnnnnnnnnnnnnnnnnnnnnnnnnnnnnnnnnnnnnnnnnnnnnnnnnnnnnnnnnnnnnnnnnnnnnnnnnnnnnnnnnnnnnnnnnnnnnnnnnnnnnnnnnnnnnnnnnnnnnnnnnnnnnnnnnnnnnnnnnnnnnnnnnnnnnnnnnnnnnnnnnnnnnnnnnnnnnnnnnnnnnnagagagcaaggctctatttcnnnnnnnnnnnnnnnnnnnnnnnnnnnnnnnncaatacatttctagcttgtaactagaaggagagacaaaaagaccaacttaaaaatagtaagtgtaatgagagtatgatgtgaaggagctgttaagtgatctcaaattaatggtgctcagaaatgtgaacttctggaattcacg

SEQ ID NO: 327056 - DNA, 1161 bp, Homo Sapiens
cacaccttcgtcttctccttctatttggctgtttctcttgtgcttttaattgggaaatcagatactaagcttgttataatcaagtctaaaatacaagaaagctggcttaaggaaaagcttgaggcactacctaaaattaaaatgttcaagttctagtttaacttccatattcttagtctgagataagggtgtcaaagtatagtggtctatagattgtaaagtgcccctagatttggaaactggccatttcactgtatagaaaatatactctttgatcacgttgtatataaatgtccaagtttgaagcaatatgattattttgatcttgaatcagtaattaaggtggacttcaaactgttgaggttttattttctgagaggaccaaagagtcatgaatgtgccagggaaagtccttatgttctaaaaccagacttaagatctaggcacatagaaaccgctccacacatccatagtgaatcttattgaattaaagacccttggtaaaaatagacacagctaccattagaagggagcttgcaacctgaataacttgtctttcttaacagtggaaatagactttggtttcatgaggctctgcagtgaaggtggccagcttatttgtaaccaaagtgtgctccctcagtcattcattctgcccatgaccagtgacaccaccttggaaaatgcaggtcacaccagtcaccaccatcaaaaacgcatttcaggcttctgtacatttaattttcttcaacattaccttggaaaccacagtaaatcaataacagaatagttaaatacccacaggttctttgtgttttgttttagaaaatattgctcaaggctaagagtgagttctattgatgatttttatttgctgctgggatgcaaaacaatcagaattttcgaagagtttgcttcctttttgtgcatttccttttttaaaaaaggaggggtctgtttcagatggaaaacattggtcgctaatagcagaaacttgagaataattggtaattttcaatcctatagaaaactagactaggtctgatgactttgacctttgttacgctcttcttccaaattttccccagccagctccctgcactcctgaccctcagcagcccattccactgagggtcgggtaactctggaacatcacagctg

SEQ ID NO: 327057 - DNA, 966 bp, Homo Sapiens
atttttgtttcttggaacaagtatttatttaactttttattatggaatatttcaaatacacataaaagtagaaagaatagcataataaacccccatgaacccatcatccagcttcaacaactaacatttttcccgatttaatttcaactattcatcacccccccatcttttgcttgagtattttaaagcaaattcagacatcatatcatttcacttatgtatatcttagtaaatgtctctaccagatgaggttttgctttgtaatttaatcacatgtcaaacctaacaaaattaattctaatcatttaatatgatttaacatctagtctttgttcaaatattctcaattcattgcaatcattttattcaacgaatactgatttaatagttataggttattttaaagcaatttaatggcagaaacgaactgttgattcttttagcatatgcactggaagaggttaaggagaaaggagaccttcaatttctgaattacctagtttccatgattcatttccttcccttttctgctactgcagttttggatctttcttatttgtaggtttatcaaagattgggacaggaaagaaggtatggcaaaggctgcctatttgtcccacaatctctcttttctcctttttccacaagaatagacatactggcacttacagacgacgtttcttagactcacttgcagttagatgtccgtgcaaccctgcaacttttgggagcaaaagtgatgtgtgcaatttttgggtcatgccctcaactggaaagaaatgtgcccttccctctcatcccctctttcctaatggcttaaatgcagacgtggtgtggtaggccatctgccactatgcagatgaggaacaacctcagaagatccacaagccaccagatgaaagagcctcaggccctagatgacctcatgaggaagaactggcctgccaacctccagaccatcgattt

SEQ ID NO: 327058 - DNA, 892 bp, Homo Sapiens
tatgtaacatgaaatccaccatctcaatcattttaaggtgtaccagttcagtggattttagtatattcacaatgctgtgcaacatcatgcttatccaattcactgaaaagaaactatatccatgaagcagtcacttctttttcccaacttcccctacctctagcccctggaaaccatcaaccacctatagatccctataaaaattctgtataaatggaatcatataatatgcagtcttttgtgtctaaattcttttacttggggacaagttttccagggttcatctatggctgaaggtatacaggcaggacttcattcctttttagggacaggaatgtactgattgtaagggatataccatactttgtttatccactacggtgtacttttggagactggcagctataataagagaaagtatgctgagaaccactttaataaaaaatcttggtaataatatttttaataataagagaaagtgtgttgagaatcagttgagagcagtcagtggcctaaggagaagagttttcattgacaaacacaaactaagctatcagagtcaaatcatataaaaggagtcttttaatctcctaatctgtccacttcagagaacctcaaccaaatccattttttttaaattaaaagtctctcataatgaggaagaaatctttcagtgtctcaagggatggtccaaacaataaaccaacctaccaatcacctcagaggaaatgaaactgcctcacagcaggtcctttgctccagatgaagagtacagccactgttcaggatgcaaagaagacacagatctaaactatgtgggggagggggcagggggcaggatccctacaggcttttccctcatctgctgcatttgcttccaagattcctggca

SEQ ID NO: 327059 - DNA, 796 bp, Homo Sapiens
taataatttaggtaagactgttatttatttttaaaaatccttttagttgggtgaaatccaagaagacttcattcaactaaatgcacttggtgctgctctcaactgttgtaccacaacaaaaataggttcttctcccattcatgaaaagtttcatgttgaggaatgatatatcccaagtcaacttgaagtgttctgaaaaccataatgcttttctggaaatgtctcacatgaccagcgtccgggctgagaatgcattcacgtatttacgagcttgactggaagatgtcatctgctcctccatctttccacaggatgcaggttcccaggtactgctacaaggctgcaaggggctcgccagggacctgtttttaggtactgtaaatgctttgagaacattgtcttcatcttctgatgctggtgccattaaaacggagcttgtaagaatattcggtgcatctgccacaggcgaggtctgcgtgaacagttgggtattcagactgtccccttcccagtggtgtgagcagaagaagtttcctgatttatcagttggagattccacctcttgtttgattttcttcagtaagggtggtccattttcttgaaactcagcaacaattccagattcatcagattcctgtttgatcacatcctgcagatcttctactagatgagagggtgtctgaggtagcatcttcaggggaccgtatttaatttcttgagctgcaagtgcatgtttgaatggtgtaggagttcttggagagctttctaagattgaccttttgatagctggggttct

SEQ ID NO: 327060 - DNA, 840 bp, Homo Sapiens
  misc_feature (195)..(237): n is a, c, g, or t
  misc_feature (239)..(335): n is a, c, g, or t
aagtgtattggtcagtcctgataaagagttatgtgtgcatctgtgtgacgtgttaaaattgcttcctgccactgctcgtgtttggtcagatagtaggttaggctgaaggaaagagaggtagtagccacaggacagataagctttgagaagccagagtggttggtaaagtatttggctttcatttagtatctctcnnnnnnnnnnnnnnnnnnnnnnnnnnnnnnnnnnnnnnnnnnngnnnnnnnnnnnnnnnnnnnnnnnnnnnnnnnnnnnnnnnnnnnnnnnnnnnnnnnnnnnnnnnnnnnnnnnnnnnnnnnnnnnnnnnnnnnnnnnnngtgtgagccactgtgccccagcctagtatcatattttatacaagataaattttaccaaaaattctaccatcaaatatagaagttactttagttttttaaaaaataatagttcacatattctgtttcatgtcttctcttgcctctcaaccctgagcacccactgattcatacctgtttatctccccctcctttgcttcttagctcctgtttattcttcaggtctgagttttgggatcatttcatttggaaagcctcagggctgtgcccagggtgctctgcctggcccctgtactcccccgagccatctcttatgcctcactgtaatcccacctgtacttgtcagtggctttgctaccctgtgtgctctgaaagcacagggacgagtcttgtttgctcctgaatcctcatctgtcagggctggtcaggcacatagatgctacatggttagtaaatatttgtgcaatataaaggttggacttctttgttactatcattacagcttctt

SEQ ID NO: 327061 - DNA, 755 bp, Homo Sapiens
  misc_feature (113)..(113): n is a, c, g, or t
  misc_feature (332)..(393): n is a, c, g, or t
  misc_feature (508)..(556): n is a, c, g, or t
  misc_feature (576)..(592): n is a, c, g, or t
  misc_feature (744)..(744): n is a, c, g, or t
catgtccatcaagaaactgatcaagtcatactggaatagttgttccttttgctacctcttcccctgggccatgattcttctggggcagagaacatatgcagctccttcccaanccccccatcctcctcctcagaacctaacaaagttcatgcccacacatgcagagacaagacagagtagtggttaaaagtacagccaaccatcccaaagtttcctttttcaggaactgacacatttctgaatttgtcagtttctgaggatgttatcccatagggttattgtgagaaaaaatgataatagtacctatcaagttattagaataacccccccannnnnnnnnnnnnnnnnnnnnnnnnnnnnnnnnnnnnnnnnnnnnnnnnnnnnnnnnnnnnnattcaaggccagcctgggcaatgtgacgaaacaccatctatacaaaaattagccaggtgtggtggtatgtgcctgtagtcccagccactcaggaggctgaggattgcttgagcannnnnnnnnnnnnnnnnnnnnnnnnnnnnnnnnnnnnnnnnnnnnnnnntgacagagggagactctccnnnnnnnnnnnnnnnnngaagaatccctggtgtgtggtaatgtcaatatatgttaactgatactgtcattagttatcacagagtaatcatttaatgaatagtttatgaattcattaattcactcaaaaaatttttatgaaagatctctcgtgccgctcgtgccgaattnctgggcctcga

SEQ ID NO: 327062 - DNA, 741 bp, Homo Sapiens
  misc_feature (524)..(540): n is a, c, g, or t
gtctgtaaaccatttcttctttgcttttcttaggcggattttcctgcattgggggtagtagttgcggaagtactttttggtagaggaaatccaaagtcctaatccctttggcctctgcatggcttgaattggctcagagatccccttgccatctcgtccaaggcctgacccaggcgtccagcccatattctgaagcattcggtttccaatattattttctaggattggctgggcattttcacctacaaatcctgcagtagtaggtccaggcaaaggtgcagcttttcttctccgtttgatatctcccgtgcataaggatcctaaatgcatgcttgtttgcctgctggctgttctcacagaacaatttttcttgtgtcctctttcagctcgattatctctcagaagctgatgctacacaaagtgttaagacaaagtcatagaaacaaaaatattttcattatattattttgcaagtaggaaaatattctcattcaaagggacactactcatttatttgcacggcnnnnnnnnnnnnnnnnnaactggtttctcttaaagcaaagactgtaagtactactttttctggagttcaatagttcagggagacaagtttttctttttaaaattcattctttattgtcactgttgcaaaattatcagtgagagttagcaatcgagttcttcctggacagctaaactgccctcttagtcagttaagatgtagcctggagatggaagcct

SEQ ID NO: 327063 - DNA, 784 bp, Homo Sapiens
ttgagacacagaaagtaaagcctttgtgcaaagtccatagctactgaatgacagagccaggacttgagctctgcagcctggcttcagagtctgctcttagccatgtgcttgctattctgtctgacaaaaaagccacaggtcactagggctggtgtgacagcgatgctcctgttgccctcaggaactggggctcttgctctctttttaccctgccatgtgtggtttccaattatgcttgtatttgcattgcaatgttctggaatcctaaaatgcccaagttggaaaagacctttcaatttattatggagctctggatcttcctttaggaaatgtgtaggaggagttggggtggttttagtctccatccttccctgtgggtttcacttttttcccaacgacccctattttccataaagagggagctgcctgccctaggatggattagaagtcatgcctcatgaatagggaaagggctctcctcccttgtgcaccgttgtgaggctagtccctggagaagagtctgcctgagcctgtgacccagagcagttctcaaaggaaacagttccttggggcattgtttatggtcatgagagttggaggcaacctgggtatatccatccctgaggaaatggataaagtgtgatggaggcgcaccatgcagcaatgaactagaggtatgtacaggaacacagaccttagaaatgtaacatgaagcaaaaagtcaaaggaagatcctaagccgggttttacagcccaatatcatttaactaaattaattaagcgg

SEQ ID NO: 327064 - DNA, 679 bp, Homo Sapiens
  misc_feature (346)..(346): n is a, c, g, or t
aactggatttcggattctacatttccaagtgaagtcccggctcagacacatcagaaaaagcaacatacgctctgagtaattcaaaccaagcctgcattttaaatccactagcacagagttaggactgaaagtgacagagaccctactgtgtaaactcacgaaatgttttcatcgaggaatcgaaacacacagtttcagtcacggacaattcctgccaccctgaacagatatgttttccattagatggcagtgtaaggtcagatttaaaccttctaaaaaacagctagccccaagccagggagaagacacagggcctgtggactgaggcgaagagacacaaacaggncaagttcttcacacttcagcacttgctttccagtatgaggactctctgcagcaatgacccatgcagcatgcaaatcaatgggactccttctgagacagccccagccaccccacacacagtgaggcctggctgcagcggtgttattccgcgcttgcggcaaagagaacacactttcttgatttggcggatggaagacggaggggggaggccaacagtgaaagtgggcattgctagttctttgtgtgcatgctacacatatctctcgtagctttcaatttttaccaacattgtttacactctgttgtattacgtattataagtttgtttccgttc

SEQ ID NO: 327065 - DNA, 439 bp, Homo Sapiens
tgtcacttctttatcatgttaattttcatctaaaaaaactatcactgaaaacttttttaagtataatcaaatgagttcaactgtcacgttaagatgccttgaattcttttgattttcctagttcccaatttctagctttaatatcttcaaatcacctgcccaagtggtgtgtgtttttacacctctctggccctttagttttctgctgggaaacccagaacgccagtccagacaccgaggagccgaggaaacaggacagcaggcagggggctgcggagagcagcacagtcacggacactgcctccttctccatgccacccgcggtttccacagttaaatactggtccacatgacatgtgaacacatggctcctataatggttaggaggaaggtgattcatgtggtaaataatataacaatgaaacctatttattataca

SEQ ID NO: 327066 - DNA, 386 bp, Homo Sapiens
  misc_feature (313)..(313): n is a, c, g, or t
  misc_feature (354)..(354): n is a, c, g, or t
tgttaaaagcgtcaaccaccacacctggcctgtcacttctttatcatgttaattttcatctaaaaaaactatcactgaaaacttttttaagtataatcaaatgagttcaactgtcacgttaagatgccttgaattcttttgattttctagttccaatttctagctttaatatcttcaaatcacctgccaagtgggtgtgtgtttttacacctctctgggccctttaggttttctgctggggaaacccaggaacggccaggtccaggacaccgagggaggccgagggaaacagggacaggcagggcaggggggntgcgggagagccgaccaggtcacgggacactggcctccttnttccatggccacccgcggttttccacagttaa

SEQ ID NO: 327067 - DNA, 564 bp, Homo Sapiens
  misc_feature (214)..(262): n is a, c, g, or t
aaggatacattctgagaaatgcgtcattaggtaattttgtgttgtgtgaacatcatagagtgtacttacacaattctacactttgcagcctactgcatacccaggctgtaaggcctattgctcctaggctacaaacgtttgctgcatgttattgtactgaatactgttggcaattgtaacacaatggtaaatattcatgtatccaaacataccnnnnnnnnnnnnnnnnnnnnnnnnnnnnnnnnnnnnnnnnnnnnnnnnngcacgcctgtacagggcacttaccatgaatggagcttgcaggactggaagttgctctgggtgagtcagtgagtgggtggtgagtgaatgtgaaggcctaggatgttattgtacaccgctgtggactttataaacagtgtgccacttgggtgataggaatttttccttcccttataatttccatgggacccatgattgtgcagagcatgactgtattacatttggattgtgtcctagataaacatttaataggtatttgagttgtgtcttgtttttagctattacaaataaaatttatgagca

SEQ ID NO: 327068 - DNA, 559 bp, Homo Sapiens
  misc_feature (23)..(23): n is a, c, g, or t
  misc_feature (433)..(433): n is a, c, g, or t
  misc_feature (511)..(511): n is a, c, g, or t
  misc_feature (517)..(517): n is a, c, g, or t
  misc_feature (539)..(539): n is a, c, g, or t
cccgtggctggggaaagctgccnaatgctgctgaaggcctgcggaagggaaaaacacctccctggcgctcgctgaaggtcccatcaagcgtgcctccggggctggggcccgtccttcgggtgggagtcgtctggggaccccagggacccaggtcttgttttggagaaaagacatcaaactcttcaagccgggaccacctcttgctgtccctttggaaagtccatttgccactgatggcacaaggctcatcctcgtctgaatcgttacttcgtttccgatgaggactaatttctagcttcatcactgcacatttgtttaaagtatttagacgcctgcatagagcctcaatggcatctctgtccaaaaaatcatgctctctcttgaccaaggaaatatcgatggggaacaggaaatcttcataaagctgtgcatnactggggggaaaccagttggcccgtaggccaatcacaagcttccttgggctttcaattttcaggcctttttccttctntggaantaccttggattaggccgtagtnttggggtttgggtccagatt

SEQ ID NO: 327069 - DNA, 774 bp, Homo Sapiens
  misc_feature (747)..(747): n is a, c, g, or t
ccttcctactgttaaagttttcacttaagagcataaacttcatcagctttctattaggacttattttgtaattggcttcttaggcatccttctttaaaagagaaatccacgttagctctccttgaggtctcgagttccctcggctggaggcacaggttcagtggagaccaaataatgcaggtgaattaccttcgtggccattactgcctcgaacgaagtttgtttattaagaacagttcttatgtcattcttaaggtaggtagggttaatactctccagcaaatttagtagatactctttgccagaaaagagaggagtatatatagtttgataattattgtgtagttttctgtgtacttaatttttgcagttttgtaacacttcatttgtaagatggtaccattttttcctggcttctgaatcataggatagtttgacccagggcattagccattgtaatggtagccttttaacaaataactgcctaatttaaaggattggaaagcatttgttacatggaaatgaagttggtggcgtacccagttgctgtatctttattttttctacttaattatttctcataaaatggatataaaagcctgttaatccaacccaatgccattatgtaacgccagtttggagatttcgagggcctgggagcagtgcgcaaggtgcgctgaaagcctgcccctggatgagatccttatcctggctgtgatggcagtggcagtgggctgggtcccttgntgagtggaaagggggactgcggtgtcc

SEQ ID NO: 327070 - DNA, 509 bp, Homo Sapiens
  misc_feature (481)..(481): n is a, c, g, or t
gctgcatcagaggtcgtgttcaccattctcacaacatcgtttgccacttattattctagtcataatgatggctctctttcaacgtcagcataatgcctggggctcagtggatccttaacaaataccatgtaaggataaatgaataagtgtgaaatctactttttaaaagaaggcatcaagggattggcttttaaaggcatttcccatatgacagatttttctgaggcatgagtgggttgtccctcctaaaatttgacccaatcaggaagtagaacagagatggagcctggggtagcagttaggaatctgcactagagagacacagtgtcaggtttaccttggtcctaggtcagtttccttccttctcaagaaatagccaactatggatggtatttcccgccccaaccagaaggctcttgcctctcctttgtcagaggcacacagtagcatcaccacagtccacattgaccaggaacttcangtgcagtgatgaggatgagcacagggta

SEQ ID NO: 327071 - DNA, 520 bp, Homo Sapiens
  misc_feature (473)..(473): n is a, c, g, or t
caactttaatccccaggggtggtggttttcatccaggatttgtctctatgactgttctccattgcataatgttagcacgtgaagcaaaggtagggaacaccctgtgctcatcctcatcactgcacgtgaagttcctggtcaatgtggactgtggtgatgctactgtgtgcctctgacaaaggagaggcaagagcttctggttggggcgggaaataccatccatagttggctatttcttgagaaggaaggaaactgacctaggaccaaggtaaacctgacactgtgtctctctagtgcagattcctaactgctaccccagggctccatctctgttctacttcctgattgggtcaaattttagggagggacaacccactcatgcctcaggaaaaatctgttcatatggggaaattgccttttaaaaggccaatcccttggatggccttctttttaaaaaagtaggattttcacanttatttcattttattccttaacatgggtattttgtttagggttccca

SEQ ID NO: 327072 - DNA, 500 bp, Homo Sapiens
ggccgcttaattaatttaatttacaattgtaattaaggtgacattagctctttaatagaggcatcccagaatctcagtgacttaacataaaggatgtttgttacctgctcatagaaagttccatgtatttgtacctagctggccaaagtgggagtggtgagtgggtgtttgggtccatggagtcattcagggatgtaggctgacagaggcactgctgtccttaacacatcagccgcaaggcaaccctgggtctcagcatccagttggcagatgggggaggagggagatttcggaatatagggtgtctttgttagttacctttgggaagtggaacacattagggagaataaaaaccgaggtggaggtaaaggttttgccattgaggaatgtatcagctgcaaacaaacaaacaaatgaacaaaacagtctgtactaatagttaccactttcaaatattttctgaagataatttataagccagggtaatggtgctagctctc

SEQ ID NO: 327073 - DNA, 672 bp, Homo Sapiens
  misc_feature (152)..(181): n is a, c, g, or t
  misc_feature (192)..(326): n is a, c, g, or t
  misc_feature (329)..(357): n is a, c, g, or t
gtgagggctccacccttccctcatgcgtttatctaaccctaattatctctcaaagtctcccaaaggcctcaactccaaatgccagcacagtgagagttaaggcttcaacatataaattcggagggacgcaattcaattcatagcattagtgnnnnnnnnnnnnnnnnnnnnnnnnnnnnnnaagagacaggnnnnnnnnnnnnnnnnnnnnnnnnnnnnnnnnnnnnnnnnnnnnnnnnnnnnnnnnnnnnnnnnnnnnnnnnnnnnnnnnnnnnnnnnnnnnnnnnnnnnnnnnnnnnnnnnnnnnnnnnnnnnnnnnnnnnnnnaannnnnnnnnnnnnnnnnnnnnnnnnnnnngtagagatggagtctcactatgttgcccaggccagcctcaaactcctgacctcaaacaatcctcctgcctcagaccccaaagtgctgggattaacaggtgtaaaccaccatgcctggcctacattagtggttttgaaatgcacctgtttcacttcaatatggccatttattcattcactttagtaaacacttaatgagtttctattgtttccagtgattgtgttgtgccctgagagaaaaagcagagaggcctgaattagcacctgctgccaattattcacagtcaacaatggacaaagggcttactttaaaaca

SEQ ID NO: 327074 - DNA, 787 bp, Homo Sapiens
  misc_feature (338)..(338): n is a, c, g, or t
attcggcacagctgcactccaacaacatcaccaaagtgggtgtcaacgacttctgtcccatgggcttcggggtgaagcgggcctactacaacggcatcagcctcttcaacaaccccgtgccctactgggggttgcagccggccactttccgctgcgtcactgaccgcctggccatccagtttggcaactacaaaaagtagaggcagctgcagccaccgcggggcctcagtgggggtctctggggaacacagccagacatcctgatggggaggcagagccgggaagctaagccagggcccagctgcgtccaacccagccccccaccttcgggttccctngaccccagcttcgatgccccatcaccgcctctccctggctcccaagggtgcaggtgggcgcaaggcccggcccccatcacatgttcccttggcctcagagctgcccctgctctccctccacagccacccagaggcaccccatgaagcttttttctcgttcactcccaaacccaagtgtccaagtctccagtcctaggagaacagtccctgggtcagcagccaggaggcggtccataagaatggggacagtgggctctgccagggctgccgcacctgtccagacacacatgttctgttcctcctcctcatgcatttccagcctttcaaccctccccgactctgcggctcccctcagcccccttgcaagttcatggcctgtccctcccagacccctgctccactggcccttcgaccagtcctcccttctgttctctctttccccgtccttc

SEQ ID NO: 327075 - DNA, 728 bp, Homo Sapiens
catgtgaagagattctttatttgattttcatcacctttcaatgaaagagtgggtcctgtcagcactacataaaatatatatcttaagagcattaatttctttttaaatgaaagacagtgaagaaagtctgtgttagaaaaaggcataatagaagcttggttaaatgtaagcaggtttctatcaagaaagaataaaagtaccattactccattaaaccagtaataaaaacatactattgtgcatgttctcaaaatagttgttcataaaagtgaagcttgttagtccttttcttctttttagtgaccaaatcaacatgctgtgtatctaaccatcctggcaagacatgagtcaagggaatgagaagcatggttgctaactctatgctcaaaggaggttcctgggtaggaataccagccctgttttccagaaggtagagagatacataacagtttcagatacaactaacacaagacctgtgagggtcatggctctggcccattaagtctgggtagctgacataactttagttctcttgggttctttctctggtctcagttcccttagcgctgacgatctggcaggaccgtagtcactgggattgggtattccaaggcattgcagtcatccaacaggaataccaaatctctcctgcagaacgagttcatgatggtgtacagcttccgtgctttgtccttcaaggaatctacctgggccactttccaacacgg

SEQ ID NO: 327076 - DNA, 511 bp, Homo Sapiens
  misc_feature (361)..(459): n is a, c, g, or t
ggccgcttaattaatctgaatggagaatttgaaattgtgttcatgactccttgaaaaatagttaatcctataaaatgggatattaggccaatggatttatatattgaactttgtaattttgtctatttgaaaatgaccataaagatccatgatgtggtaataattagctattttgatgaagttcatattttcctgtgagactataaggctagtgattgagccaggccgaacacctatgtctctctagagattgtgtcattgttctctactcaccatcaatacatgcattaacttacaaagcgaaaggaacttgggtttcattatttaaaaatattcctgtccagcatggtggataacactnnnnnnnnnnnnnnnnnnnnnnnnnnnnnnnnnnnnnnnnnnnnnnnnnnnnnnnnnnnnnnnnnnnnnnnnnnnnnnnnnnnnnnnnnnnnnnnnnnnaaggcctagcatggtggtgcatgcctatggctgaggttggaggatcgcttga

SEQ ID NO: 327077 - DNA, 709 bp, Homo Sapiens
  misc_feature (38)..(38): n is a, c, g, or t
aacctcatggggaaggtatcatgactacccctcatttnacaaataaggaaactgaggcacagagaagtcaagtagtttgtccaaggttgcacagcttcaaaagcacaactacacactttgcccaaggtctgattctgtgtatctgtgcatctgaggagcttttccagaattttctttcaaggggatcaacttaaacaggaccactatttggtctcacatgtagaaatgacccagcatctgcactacccccactcctgcctgacaatctgattggggaggcaaagatcctgacctcaggcgttccctaatcagacaagggacagataccaacaagccagagacaaagacgggtaaataagaggccagtgctcagggaaggcttcccaggggggcagacaggacaaggctgggcctgactcctcccattcccaggatggtaaggacactggggtggccttggcttgcggtcctgggccacgatgaggtcctcggaggcgcttagaaatggagccacgggaagagccatcacatggacagtcctgcatggtgggtttcctttccggtttgtctgaacctggaagtgtgtgcagtgaggagacacttcccatgatagagcagaaccagtactgtgaagtcagactttgaatcttgctcagcctcttcctgtgtgaccttggacaagtcacttaacctccttacatctcagttt

SEQ ID NO: 327078 - DNA, 354 bp, Homo Sapiens
cccaaaagtggagaaaatgaaaagatggaggagactgtctcagcaggtagagcgtgtgtaccccgtcaaaggaggcgaggagatgcagcacagcaaagagccgctcagcaaaaacaaataccacacgggcactggccccaacgaccttgaaggttctgcccttgaaatccgatgcggctacaacgtaagaccccttcccgagagtgggctttgctagaagcaagaagggagtgatccaagagcactgggatcctaaaggaatcaaggtcgccacaaaaaaagaaaatgtgccaaagaaacagaaggctggaaaacagcaaaaataaagtttgccggtaaaaatagaagtaactc

SEQ ID NO: 327079 - DNA, 575 bp, Homo Sapiens
  misc_feature (230)..(230): n is a, c, g, or t
ctttaagaagatgccaggaaataaatgcagatgaaataacagaataggaaaatcaccaatttgtagctctcggtgacataaccgattcaggaagaaatcatcaatggacactgagctcattaagtgaaagaatgatgagtatctggacagttacatagtaccaaactatctctctacgaagttcttgcctatctcaagtataaaatattaactttacaatgaaggaatcnagatgtcactaccttaatccagggatttaccttaatttctagtcactaacagtgaaacagctagacaatacatgccatctgaagtgatacaatataattatgataaagcctttgatattccacaggaaatattggagaggagataaagaaacaagttaagtcaggagtccccaaagcccaggacacggactggtatcagtctatggcctgttaggaaccaggtgcacggcaggcgttgggagggtgagcaagcattaccacctgagctccggctcctgtcagatcaacaatagcattcgattctcataggagtacaaaccctattgtgaaatgcgcatgtgaggg

SEQ ID NO: 327080 - DNA, 857 bp, Homo Sapiens
cagttggctcaggcccatgagagcttcctcactggtgctccacctgtcccaccacagtgtcactccaccttgaggtgacctgcctgcacaaccaccagagtcacagacagatgctcgttcccttcatcctttcctgaagacagctctccttctggttgcagggaccttcacagtctgaaaagacgctgaacacatatccttccagtctgtttgtgcatttacacatacagaaacacacatgacttctgagataggtgagtccttaaagggtacacactccagccatctgtctagcgccggcatcactttgaaagcatctccaatggtcatcgttgtcatctcactgcacttgaatgccccagaatgagcagctgcttctcacaagaaaaactcctttgtttttggacaagttttaatgtgaatttatttgtgcacttattgaacaattcctttactcaacaaaaatgaattgacctgcccatggtttttagacactggaggtgcaatggtgagcaaaaccatcattgccaacatggcttatggtcttcaggggaggcaaaattaactgaacaatcaaacagaactatattaccgacagggaagagtcctgggaggcagcagtgcctgggagggagcaatgagaccatagggtagggaactctgggccagtgaagatggaaggcaggggtcagggaagtccagaaatggcttccttgggaaagtgatgcaggggccaaagaatggagttagctgggcagagcggggttgggtgggaggaagagcattccaggcagaaggaatagattgttaagagattatcttgaagtggcaggaaccacagcaggtttgagaaaggg

SEQ ID NO: 327081 - DNA, 569 bp, Homo Sapiens
cactggtgtttcctctgggacccgaatgcctgtgcttctccccggctctgccacctcttccttgttaacatagcagggagtgagctgacaaccctggaacacagctttctcattcagtgaaatggatactgtgccaacagatacttcactggatggccacagaggagcatacagaccagtgatcacctcctcagtgggcagtacacaggcagaaagcaacctctaccaggttcacggacacattaggccctgtactttccaactgcctgacctgcaagctgtccctacttctttaaagaattctccattttaaaagacagaaatggggcagagatctttatcctagaaagaaatctgtctcttccaagcatgagtggcacgtggagagcccaagaggaaaaacaggagtgggccacgtggtcccattttacgcattactcggagggaaagcccgcggttaggtaggaagtattgaaagtgcttcagttcacttacctttgccatgcctcctgcctgtgcggtgttcagtcccgcgtgaccagtcatttgcggggaaacctgcgttaggg

SEQ ID NO: 327082 - DNA, 1035 bp, Homo Sapiens
  misc_feature (23)..(23): n is a, c, g, or t
  misc_feature (876)..(966): n is a, c, g, or t
tatagctatgggattgggttttntgatttctgactcaaatgagagtatctttgtgtaggagcggctaatctattccagccacacccctttaaaagtagcacaaagtcttgtggttagttgctccactatcttgacactggaacaggattatttgacattctttgaggaatacaaagaggagatatatacaagaggaaactgatgaaagggtcataaatccatgggtgcttagttcttcaaggtcgtgagaatttgaaatgggtgataagacttgtcatttctgatgttttcccttatataggttttattttctgtagcctttcctattatagatgcatcttcactcatcttttccctctgtgtaagaaatttgtctaatggaagttaaactgtataccagatttcattgagatttgataaattctaagacttaggctttttaaaattaagaatactacatctcttctgcattttgtttcaagaattagccaggtgttgaatttggggtctgtctcattaaataatgaagacagaatttattagtctgtctcttttgggctgttgattccgttgagattctgctgcacgcactggacatctgcttagaaaacatagttccacagaattttgcacttaatttgtgatttccagccttcccctaattgagtcaaagctcatcttatggacttcctacattaattcagttgtaaggaagagcaggctgacctgtgaaatgctaaacacttctgtcttaaatcagttttaaatactttcaacaaagacttctttgtggctgttctttgtattgggggtatacatgcagtggtgaaggatcaagacatcttctctgacttgtgccaatgtcgaaaagaaaannnnnnnnnnnnnnnnnnnnnnnnnnnnnnnnnnnnnnnnnnnnnnnnnnnnnnnnnnnnnnnnnnnnnnnnnnnnnnnnnnnnnnnnnnntgcaatgagacatagtaaacatagtagtgtcattgcactccagcctgggtgacagagcaagtctccgtt

SEQ ID NO: 327083 - DNA, 780 bp, Homo Sapiens
taatttgctgttaaataactttaatggttgatgtgggagtcacaagggaggtatgtttgctccaagggttcttcagtgccatcctcaaagctggttagtgcagggaggtagggcagagttggttccagttttcttccaggaagggtttagggaggtcccagcgagccccaggaatgagtccctcggtaccatggcaaccacaatttaagaggggcttctgcccacccctgcagcctaccccaggtccagcagaggaacaggaggccagactggccaacttgctatagacagcgccgtatccagagcccaactgcgcatgggtcattttctcttctggggcagatcctatgccagcacctttctctctcacactggtgactggagccaagtgcgaggttggcctttgctgcagaggcctctggtccgtggggatcgctgaggtgggaggggggcaaccgagcgagccctaggggaagtggtctggggggacagcatccagggaaaaggttcggggtctcccccagggcagggggtgggtccagtctggggctggggccactgaggcaggcgagcaggggttaggcagggcaggctggtctgtaaacattgccagccagggtgggggtgtctccagccttgcgccctccgctgggtcaggatgtctgtcaccgctgcgatgtcatccagcggctcaatagccatctcatggtacaaggacccctgctttgccagtgcttggggtggtttccggggagcaggagtttcaattttcatgattca

SEQ ID NO: 327084 - DNA, 737 bp, Homo Sapiens
  misc_feature (30)..(30): n is a, c, g, or t
  misc_feature (366)..(398): n is a, c, g, or t
  misc_feature (406)..(669): n is a, c, g, or t
attattgcagcattcagaacacttttaatnaagcctaagcattctgtaatgtttttcttttccttttaaatgtaattttcttttgttgcaaaaaatgtttaatggtgaaagtcagatttagggtagttaagttgctcagggatcctgtaagcaaatttctgacctcctacctgcttagactgttgagccctacaggattgtaagagacacacatgacaaattatggaggaaatgagagaaaacagaaagaatcttaggaatgaaaataggagagcaggaatgagaaatatatgtttctatgggtaagccacagaaaagatatgatgatttatggagatatatttgtgctatatccctgagccccannnnnnnnnnnnnnnnnnnnnnnnnnnnnnnnnagacaggnnnnnnnnnnnnnnnnnnnnnnnnnnnnnnnnnnnnnnnnnnnnnnnnnnnnnnnnnnnnnnnnnnnnnnnnnnnnnnnnnnnnnnnnnnnnnnnnnnnnnnnnnnnnnnnnnnnnnnnnnnnnnnnnnnnnnnnnnnnnnnnnnnnnnnnnnnnnnnnnnnnnnnnnnnnnnnnnnnnnnnnnnnnnnnnnnnnnnnnnnnnnnnnnnnnnnnnnnnnnnnnnnnnnnnnnnnnnnnnnnnnnnnnnnnnnnnnnnnnnnnnncccccattttcatatagaaagcacaacatggacatcaggaagcttgccctttgatactaatagaatca

SEQ ID NO: 327085 - DNA, 586 bp, Homo Sapiens
  misc_feature (555)..(555): n is a, c, g, or t
acttttaaaaataaagaggtagaaagtggggaaccttgcttttctgggcattgggtcaagaccacacagagcgtgggagcaatggcagctggctggggctggctaaggccgcactccctttgctctgcctttggccataaccactagaccgcacgtttgcactattttccaaataaccaaaagggaagacttttaaaaccatactagaacataactttgtttttaggatgtgtttacttgttctggtaaaggtcatggggcaggattttggggaacacaactaaaaagaatgcagtaaaactggcatcataagctctctcaatttgaccacatttgagcccagttcagcaaatccaaagatacattttcaaaaatgcatatcctgtttcacacctcaccacaaagcaaacaacctaatttgcagactttctaatactcataatgcctctaggtcctcctgtcaacatgtgtttttaaatatcatctttgatttgatcactaacaaatattaccactttctggtttttggagaataagaaaaagctgcagaaattnacagaaaagccactcgtgccgaattactggg

SEQ ID NO: 327086 - DNA, 662 bp, Homo Sapiens
  misc_feature (376)..(376): n is a, c, g, or t
tcagcttatatcgaccttttgggtaaaagacattattcctttgaaacttagaagcacgagtttgttttctgaaaaacacatgccattgcataccttttaacttgacatatgactgaaacttttgtcttaacaatccattttctacaaagactgcccttatatttattaaagatgacaaaaccaaaaccacttcttctttcatacattttctgctttcatgttctgtcattctagatctttttttctttccctctctctgtcttcttttcccccagttgtcggcagcatccagcccctccagtcacagtcctcacagagcttcaggaaaggaccccctttgcagagctctcttttggaggatttcttataaatcacntttaggtattgctacttgttgtgggagatggggacttaaatacttaaaaacaattaccaaacattaaacacaattcacgcttctctttcatttctttaaaggactctaggctccctctcctcctcctcctcttcctctattctttaggtgcagaatgaaaagataggacataaggaaaaacaacttttggaaaatatctgtaacataattatttaaagtaaactcatccactgctcacgagtaaatggatgagatcggataaagtttgctttttaattaagcgggc

SEQ ID NO: 327087 - DNA, 976 bp, Homo Sapiens
  misc_feature (238)..(238): n is a, c, g, or t
ttttaattttaataatatgttttatttaatctactagatccaaaattactatcattttaacaggtactcaaaattattaatgagatcttttacattcttttagaagtgtttcataacgtctctgcagcagccacattccccatgctcagcagcggctcacagcctggatggcagtgcggtgtagacacttgagctgtgggcaggactcttcccagtcctcatggctgagcacacagtnccgggccaggtggtgcacgctgggggaccatgggccgggctggtcctggctctgcactgtccctgtgaccctcgggatgttcctcagcgtcttttgggcgatggttcctttcctgtaggatgcgaggctgacagcatctgctgctaggagttgtgaggacacgtgagttcatttcagttgggtgcagcgccggcctagtaatctcactgacccttggtcgctcagccagtgactgtgcccacctgccaccatcagaagatggcggacttgggggtcaggagagcccttccaggactgcagaagctggtccttgggggtctcgcagcagatcctgggggcgttcccagtatgggtgcaatgtacatggggggctcaggacgggaggcccatgccagcccctgggcctccagagctggcagaaggcacagccctgcatggccaagggcgctgggctgcgtggagaatgtgcgggttctgttgttctgccagcttaagcagttttccaaaccaaacaaaaaaaaggatatgcaacagggacagcatgtggcccacgaggcctcaaatattgcctctggcccttcacagaacaggtgttctagaaaggaaatcctatgctcgcgggctaggggcttgctgggtggggagaggggttcaaaacgtggtcttgtcacttcctatgagggtgatccgacaggacttcgtggagacggtggcgtttaagtggcctaagaagaactg

SEQ ID NO: 327088 - DNA, 624 bp, Homo Sapiens
ccatattataaaattggccttgtatatatgctctacactggatcaaagtaattcaaggtagagtcaaagtgaagttggtcagaaagtaattgtcactcattcacacacagaacttccatcataatctcaaagtcaaagaaaaatttatagtgtttttaaatgttcactgaagtggcagcagggcaggaaaggaattgtctttttaaagtccttattagaaaggaccttgtgattgttgttgatcagttgacccttattgattaatgatcattgctattattgcatgttactaagcttgaaactaagtggggatgcagtttaaccaacttgtatttactcatagctctacccatgagaaaaaaagcagaaccaatatggctgtgaaacaaggacgattttatttgaggcataatactttgtcagaagatatacccattgtcatcatatttaaggtaaagctgcagctctcttctgaaaattgtaagaattctttctctggtttatttacatatgtaattagagatttggagggtaaggaattcttggaatagaaagatttgtgatgtaagttgtcagtcatatgatgtattttaaattgaaagctggctgggcgtggtgggtcat

SEQ ID NO: 327089 - DNA, 905 bp, Homo Sapiens
  misc_feature (36)..(36): n is a, c, g, or t
  misc_feature (45)..(45): n is a, c, g, or t
aaaaactaggggttcaaaaacacaaccccggtttantcaccctantagccaacgggatgggcacccaacaccccactgccttccagcctgaagctggcccagagagagagagccatccccggaaaagctggaaccctccccagaaggccctgaagacctgcaggtacccacactgtagtcccactgaagaggagggccccaatgtgagggggaaaaaaccactgaggaaacataatatttgtgtatttttaataagatatttaatacgtgttcaggtagaagtaggtacaatgacagaaaataaggtagaggaatgtgctagacaccacagatacgtaatgatggacaataaatgacatgatgtggagagttcacccacacatgcagacttcttatgttcacataaacatttatctgcatgcatcacccagtagagacaaactgcacttacactgtgaagtcaacgaggagataaagtaaaaatcaaatacttatggagagagtcagtctctccatttagtgggaaacccttcagaacacgcacacagcatctcccctcccttctgaataccatccatagcctgcagcagtagatggcaaatcacagcctgggccacccttcccagaatgtcaaaaacatggacatgcagaccacagaattcaccagatacccaagctgggtggtgcgaggctctgaaagacatgcttcaaataagagggactagaaaactccgcaagggagcaacagggatcagggattccaggaggatccaggggcctgtgcgaagagcaagcagtgagcagatgtgtgtgtcagtgattcggtggcatgaactcaacaccatctaatacagcagctcacgtttctttgtgcatcagactcacctggggacttgctgtgccga

SEQ ID NO: 327090 - DNA, 623 bp, Homo Sapiens
  misc_feature (334)..(392): n is a, c, g, or t
catgaaaaatacaagcatttattgagtgctgacccactgtcaggctgtgtgtttggatacaggtgatagaaacaaggttcttgtctttgaagcagtccctgatgttaggaggactgaccaaccatggccattgtaatggggtgggggtggggatacactaggagttaatctagggggctgtgggagcccagaggggcgggctgtttctaagaaagtctcaagatgcagtatgagctgactttttgaagatgagaagccacacctcaaatggatgaataagggtggttgttgcaagaggggaaatagcacatgcaaaggctgagaccatgaagcnnnnnnnnnnnnnnnnnnnnnnnnnnnnnnnnnnnnnnnnnnnnnnnnnnnnnnnnnnngggcagggggcagcctgcctgtggctccagatggctgcagtgcagggagaatgcgggatagagagggagggcaggcagggcaggcagagacgaccacataggttctgtcaaatgctgatacgaccctgcagtctttccagaggggtcctttttccaagcaaggtatgtgctgaggcatcttccatcaggaccgctccatcttctggggtgctcagaccttcgtgccgaata

SEQ ID NO: 327091 - DNA, 370 bp, Homo Sapiens
  misc_feature (204)..(204): n is a, c, g, or t
  misc_feature (351)..(351): n is a, c, g, or t
tttggttggaaaaatacaagcatttattgagtgctgacccacatgtcaggctgtgtgtttggatacaggtgatagaaacaaggttcttgtctttgaagcagtccctgatgttaggaggactgaccaaccatggccattgtaatggggtgggggtggggatacactaggagttaatctagggggctgtgggagcccagagggcgnggctgtttctaagaaagtctcaagatgcagtatgagctgactttttgaagatgagaagccacacctcaaatgggatgaataagggtggtttttgccaagagggggaaatagccccatgccaaaggcctgagacccttgaagcctgtntgtgtgtgtgtatttatgt

SEQ ID NO: 327092 - DNA, 597 bp, Homo Sapiens
  misc_feature (288)..(316): n is a, c, g, or t
cccgagaaactaaatcaacattcacctggggatacctgtactgggtaggcctgtgatgggcaataagaaaagtcacttatgttgttctctcaggaaactctgagcaggtaaaaggttggcagaggctaccggtgcacttccaatattagtgatggagtcctgctcagaatacacaccatgcttctcaggctttcctgcaaccgggcgaagcacagttctggcccatgagatatttgcagaaatgatgtgtgtaacttctggaatgtaccatgatgaggaatggacatnnnnnnnnnnnnnnnnnnnnnnnnnnnnnttccccttccctattacttagcagctgcaatctatacctggtggtaagtggtaatgagtgaccctcaaccactccaatgagcacaatgccttagagataggtgagtaacaatatagaagggtcctgagtccctcgcaccacagacccattattccagttctgtaatgcttatgcttgggcagtcacataactgaaaaacaaactcttgttttattgaagtcacaggtactttgggtcttggtcttaatagcagaatctacttcttaattaattaagcggcc

SEQ ID NO: 327093 - DNA, 729 bp, Homo Sapiens
tctgggcaatcttgtttgcaaatatattgttacataccacaattaataactatgtttactgcaacaacgcccctttattaaagtaggtactactttccttctccactctggggtaatgccgtcccctcacctgcatgtatcagtcttctctggtctcaccttttctttctcctccagacagtgggcagagctgcttgggcggtaaccatgactctgttcttgcctcatcgcttggactggggtccttaaaaggtgtgggttataggtaaatcacaatgtaaacttccctgcccggcatttccatctgggggtattatcagattaaaatgaacatcaaaggagccctaaaagaaggggtcacaaaaggacagactgacggctgggggcagtggtcaggccactgtttgtctggctacttccaggggccttaagaactgaccatgtgcatttgagccttgagtatttcccaggatcagctggatacatttcctgggggacccaaaaccagggacaactggctggttgccagtatggatcagacataagatatctgtttaagagtctctacaaattagggcataacaaaatggtaaaccctaacgaattatgctgctcctaagagttttgaggaattatgttttcataatgactattggttatcagcctagtaatttaataataaaaaccatccccaccagcctgggcaacagagtgagaccccatctctac

SEQ ID NO: 327094 - DNA, 354 bp, Homo Sapiens
  misc_feature (27)..(27): n is a, c, g, or t
  misc_feature (73)..(73): n is a, c, g, or t
  misc_feature (83)..(83): n is a, c, g, or t
tagcccccggggatggggacacctgangctataatagacaaaaaggaactcagactggcccactccccaaccnaattttgttnattttccatcctccatacaatctcaagaatgcctctagcatattttatttacctggtctagatggtcctgaactatcacagccacgactgaacaaatcagaataagcagaaccttggaaaatgttttagcaacgacttttttctctctgaatattcaaaacattgcaatacagtccttaaagagttgagatgatacaaggtttgtaaataatctagttgaatgcttagcacacaatagctaatacacattagtttctccccttcctcattc

SEQ ID NO: 327095 - DNA, 863 bp, Homo Sapiens
  misc_feature (28)..(28): n is a, c, g, or t
tttctatttggattgccagccccaaaantaaccaaccaaaacccccaaagaaaaccaaaccaaaccaggagtgactttggggataaggaaacccatcaaccccacctccaggaccctctggttacaatgtccccattgggtttttccaagtggttggtttagatcatcggtttgccctccgtttgaatgcccagctacattgcagggcaaaggggaaagttttcacttaataaagacaatttcacttctatttcctgggacgaataacccctagaaccctgacttccctttctccccagttatgatgggaagcataattattaaaaagcatccagaacatcctaaagccctgccctgatcttgtggctttgcagtaagatgataacccttttactccctgtcaccccttgatttcccattcttgaagagactcatctaggtgggctgcatagctaacctctgggaatgcagggttgtggggcagagagggactggctggatccttgtccaaggtctctgtagtgagggcagcttggctgggccaaagagataaataaaaacaaaccgaaaaagcatggctcaattttgaatttgaaggccgggccccaaacagcgagtggcacttcccctacagcatgtctccccctagtggtgggcttcttggtgctagctgttgttctcggctgtgagatatttcagggcagcaaagccgtagcggcgggacatgtcctgctgaaactcttccttgagggttttgagacagatgcggtattgcttgttggaacggaacttggtaatgtcgaagctgggggcatgaggcatgtggatcatgtaggcgttgggcagcacaatgaactcatact

SEQ ID NO: 327096 - DNA, 823 bp, Homo Sapiens
  misc_feature (378)..(479): n is a, c, g, or t
  misc_feature (530)..(587): n is a, c, g, or t
  misc_feature (603)..(636): n is a, c, g, or t
ggtagccctcaggggaaggaaggactctgcaaactaaatatatccactgagaaacctcctccaccccatttcaggctgttcttaaggtctaacacaggagtcagctagatgaggtctctgtcacatgttctctttttcccctccaaacaatgctttaaaaatgtaaaaaacatccttagctcccaggcctacaaaaataggccaagggcatttgcattttcaagatgaagtgtcccttacagataactagggcaaagctcccttatttaacagatggggaacctgaaacctgaaggccagtgagaaaaggccgctgggacatgattataccaggatacttgctattaaaatgactagagccaggcgcagtggctcatnnnnnnnnnnnnnnnnnnnnnnnnnnnnnnnnnnnnnnnnnnnnnnnnnnnnnnnnnnnnnnnnnnnnnnnnnnnnnnnnnnnnnnnnnnnnnnnnnnnnnnaattaactgggtgtgatggcgtgagcctgcaggaagatcacctgagcctcnnnnnnnnnnnnnnnnnnnnnnnnnnnnnnnnnnnnnnnnnnnnnnnnnnnnnnnnnngagtgagaccctgtcnnnnnnnnnnnnnnnnnnnnnnnnnnnnnnnnnnacttcaggactcattggcccctgtctatctatgcttattgttaggaagataccactaaagcccagggaaaactagaaaccaagacaggctgctaagcggaagacatggcctattgtctattagtgcaacagcagctccaagaaagaagctggggtgatgaaaatcacaggacgtccagtgtgccgga

SEQ ID NO: 327097 - DNA, 714 bp, Homo Sapiens
  misc_feature (80)..(223): n is a, c, g, or t
  misc_feature (367)..(367): n is a, c, g, or t
ttactttcagtttctgtcacataggtttgggattggcaggatagtttaatgtttaataagagtgtggcagataaacatgnnnnnnnnnnnnnnnnnnnnnnnnnnnnnnnnnnnnnnnnnnnnnnnnnnnnnnnnnnnnnnnnnnnnnnnnnnnnnnnnnnnnnnnnnnnnnnnnnnnnnnnnnnnnnnnnnnnnnnnnnnnnnnnnnnnnnnnnnnnnnnnnataattttggccacacactgtaaaggaagagctcagtgtgcaagaatagttatgcttatttttgccatttttgggatatttcagttctccatttcatagcttcaccagaaagtgatcatggaaagagatacaacaacacatggncattatgtattagataataaaatcagcgttataataatagaagtatttagaaagtaccagggaacacagggatgaaatccaccgatcttatttatgcccttcctcttaccacattgtgtactacccattccaaggggataggaagaaggagacagggatcgactgtagatttaataattattcatcaaaatgattatataatctgacaaatttcactttagtaacatttttcattttgtttcaattgagatcatttcctcccaatttgatggaacagcccgggaaacaacatggtgaagtgttgatttcttaaaatgttattttctcagcagagtgtgtttgttttc

SEQ ID NO: 327098 - DNA, 915 bp, Homo Sapiens
  misc_feature (39)..(39): n is a, c, g, or t
  misc_feature (46)..(46): n is a, c, g, or t
  misc_feature (81)..(81): n is a, c, g, or t
  misc_feature (203)..(203): n is a, c, g, or t
  misc_feature (223)..(223): n is a, c, g, or t
  misc_feature (493)..(493): n is a, c, g, or t
agggggtttatggaaatatttcgggaaaatctttctctnatctccntattcttaaaggagttggtaaccacattttcttcnttccaaattactttctttacttaacttacgcagccctttcaacatttaatctctttcttctttgtaaatatgaggaagaattatgacagaaacgttgcatagcctcaggtaattttaaatcncccctagaatgagaaatacncagtttaccacctattgaatgtatattctgtcccataatagattgtttacctcagcaatgaatttgtgtgttttccaaatgtcaatgatcaagataatcatatctatttttctatctttattcttataaaagctttttaaatggaattttaaacagaattttctaattcctttggtgtatttgtagcacaactctctcctttaatctctacaacaatatctccaacactgctgttttcccatgtaggggccaaatcctttactgctgggnttagtgcatggaagtttgtctctggagatgaagagcactattctggttcaaagctatggtctgaagaacaggactactaccaacatgccaatgctaataaacacttacagaagtggctgaactgcaataatcgtttaaggattatgaagagcatatggagagtgttttacagaataaagactgtgacaaatgcttgactgaggcatctgcaacatatacaagatgatatttatcaatactgaaagatcagtatggtactagtcatctattgacttgatgcattgaatgataggtaaggctgttaagtcagcatgatagattgttagaagatcatcacaggcagctaccagttccactttgcaaatcaggtgtaagtacagaatccctgttggttgactaacatcaggttgggggaaaaaaag

SEQ ID NO: 327099 - DNA, 1344 bp, Homo Sapiens
  misc_feature (956)..(976): n is a, c, g, or t
ctttagacatttttcctctagagtaacttttcaaggccttctcatgaacagccttaagttttattgtcaaaataaatgcacttattttgggaaacagtttgaagtaagtaataagcatttgccactgtacttacaacttctcttgaagttcgctttctatttaggtcactagcttttaaataaagccaaccctggttctgcgttacttactacattttacctatagtcattcccacaaaggatgcaatattatattagaaagaaatattactttaaatttgttgaaaaatagaaggaccaatttagagctctgacctaggttcagtcctggaaatgggtctttcataaattcagatccaattacttccacagttttattactgttcagtttattactaacctgacaagcctaattgggtaacatttcactccctcattgtgttttatacaaaatgctgtaggagaaagttaataaaacactatataaagtattaattttctgtaccttatagttcttagcattaaaggtgttctgttaactctgaacataaacataaagtaatcctattatccaaatatgtagtttggattctatttcattaagcaactgtcatttctactactaaatgctgccaacattcagtgaaaaggcaggtttaaagaagcagctatacttcacttgcttcacacagaggtctcattaggcactcaattggctattcttttttcactgaaagaataaaccttcacttaccctttctctgtgactaccctctttcccagtataattggtcacattattatctgaaaaacttaaataacaaatttacttttttaaagaatgtatattcaataagtttctatttaattcaatctaatctgctccattagaaatttaattctgccacaaaatttttttaaagcaaagtactgaattcccaatccaagattccttnnnnnnnnnnnnnnnnnnnnngcatcctaaattaccatcttttgagatgtataatttcttaaaacatactatgtgcaaagttacttttaaccacaaaacttcaaacaactgctgcctttaaaatcaagcaacatccaatactccagcagctacaagttgccgtgagagccagtccaacccttcatacagtcccataccacttcgagcatcacagccctgaatataccagctacggccacagcataatttatggagactgagtagttcagtgatttcttctactgacagtgctccagcaacatcctgtttgttagcaaaaatcaggagcagagcatctcggagttctttttccgttaacaactttgcaagttcgctgtgtgcttcactta

SEQ ID NO: 327100 - DNA, 840 bp, Homo Sapiens
  misc_feature (33)..(33): n is a, c, g, or t
  misc_feature (43)..(43): n is a, c, g, or t
  misc_feature (69)..(69): n is a, c, g, or t
  misc_feature (116)..(124): n is a, c, g, or t
ggatcctctgggtagccagagtcatgtgtatcntttgataccnccttatactaaaggcttatcactttntccaatacaattatcccccattatctggtggccatttttcacatggnnnnnnnnntcacttcacaaaacttggtatatatatgatgatgaatcaagaataggaccacagggaaatacaaatgtgaggaaccaactagctttgccattagcaaaataattcattcctgtatcactgctatgcacagcacctattttcaaaagtcatgtttcagcaaattacacagatgtttagggtaacctataggaagttgaaactgtgactgttaaatctataatgctaaagatctattgtagctttaaatttctcatttatgtagcatacatcataatgagtccatagttgtaatcctggtgaactaattcgaaaaacactggaaaagaactgttcctctttgaagaattctggaaacttaatatctcctttcaacaaaggaaactgctttctgatatctgcaacatcctttctagggtcttctccaagtgaccgtaagtagtatttctcatcctctgaaacaaagaattctttatgtttctcttcagctgccctctggaccaactggtcaaaaggtaaagtttaatgaagtccatctgtgcaactgcagcaacatgaatctttacttctttcttccctccaacttggcttaggtaatccactgtccatttgcttgtacatggccccaaatcaatcccttccaacacaagaggttttctctgtgggtagaggtgctgcatgaactgctcccgagaaacgccctccagccggggtaccgg

SEQ ID NO: 327101 - DNA, 462 bp, Homo Sapiens
  misc_feature (399)..(399): n is a, c, g, or t
  misc_feature (416)..(416): n is a, c, g, or t
  misc_feature (442)..(442): n is a, c, g, or t
gaagggcgtttctcgggagcagttcatgcagcacctctacccacagagaaaacctcttgtgttggaagggattgatttggggccatgtacaagcaaatggacagtggattacctaagccaagttggagggaagaaagaagtaaagattcatgttgctgcagttgcacagatgggacttcattaaactttaccttttgaccagttggtccagagggcagctgaagagaaacataaagaattctttgttttcagagggtgaggaaatactactttacggtcacttgggaggaaggacccttggaaagggtgttttgcaggattatccaggaaagcattttcccttttgttttggaaagggagatatttaagtttttcccagatttcttttccaaagagggnacagtttctttttcccngtgttttttttccgatttagtttcanccggggggtttaccaccttg

SEQ ID NO: 327102 - DNA, 357 bp, Homo Sapiens
aaggccaggggttttggccccatgttgcccccaggttgggtccctgaaaccccctgggctcaaagcgatctgtcccaccctcaagcctccccaaagtgcctggaactacaggcatgaagcccactgtgcctggttgacttttccctttcccaaatgaacaagtttgggttgagttttcagtcactgagaccaaactggtcccaatgagtacaccagtaatcttagcctcagaggtgtgcatctactcacagaagggctcagtggcttccagtgttcaaggttactggattgcacaggagctgttataggacaagccccgtggatactggtggctcagaggtcttacagatgagccac

SEQ ID NO: 327103 - DNA, 832 bp, Homo Sapiens
  misc_feature (55)..(55): n is a, c, g, or t
  misc_feature (103)..(103): n is a, c, g, or t
ggagtgttttatatttcttaaaatttatctttcagaaattcataaaataatatgnaactcatcattaatgagaaaaatatgtttgaatatttttagtccacanctttactagtcatagcaggggagaggctgtttaaaatcattattctgtgttatattaaagattgttcacaagatttttttcagtgcaaattcaagaaatatagaaaattaagataaaacatctcataatccattttacactggaggtgttatttattcatagaatgtgagtgaagtgtctgattattttactcagaaaggcaactgacactcttggaaattctgttccttcggtcaattgtgtagagtccaatcatctggcatttgaatgatgcaagaaattaacaaatcaactggggagaaatattcatttttgcaagctaggaagacaatgagttgatgttttgggagaagacaaatgtgacttcctcctctgcagcagcagccttcctccagagaatcctcttgtaacaaactattacacccactgggtcaaaacgtgtcccacaaacaaatgcacagggacctacccaccaacacctgccctagaagagagtgccacaggatgtatgtgcatgcatgtgttttcttaaatacagatggagcactttaaaatagagtcccagaaaataaaatctgaacagaaccataatactcagtatgtcttctctaaagtgtgctgggaaacacttcattatattctgttactgggattattacaatcatctaaaattttaaacatgaagctctctgtgcttggaagaagatttatttctctgtttaaattacc

SEQ ID NO: 327104 - DNA, 550 bp, Homo Sapiens
  misc_feature (389)..(389): n is a, c, g, or t
cagccaagtttgattaggcaacttgtttgttccacttttgttcaacccagcagttttaaaagaatgcagagtcttagttcaaaatggttccctttgcttgaaaaatcttaaaaacattggagtgcagttcaggatttaccaaattaaggttcagcttaaagctgatggtgcttctgttggtgtttgttcagaatctgtatttttagtcactttttaaaaaattacttggctcctgtttgtggacccttgtaagccaactgagttacccagatgctaactacatattcacatatggctataacctcctgagagtgtcaggtccataagtctgtgttctctgtatgaaaacaaaagacctgtggggaaagtgggacctgtaattccagtgnaaaagggagctttctttcacaaatgttgctttttagtggctcctatcccagaatcaatggaaagaaaattggaccttttaggtattcatgctgacaggtggtctcataacaaatttctcagctatccaaaggatgaaaaactgtaggtatctatcattttt

SEQ ID NO: 327105 - DNA, 513 bp, Homo Sapiens
cctagggctgagtatggttccctctggattggctgctcactaagcctgatgagtgtgtgtcccatctgccatcttataactggatatgagtcttggttctgtgtcttctgattgccatgcaagtcttgctgccttcaacagctgcaaaggctgctgtggcctacatgacatagcatgtttccttagtctcaatggagaggactctatgtggaagtattctcttggtgaagggcttctcctgagagcattagcaaccttctgcacaatgaagggattggaagtctccaagctggatgaatttcctcattctgggatttcaaacttcaaactcttcctagcaaaaaatattacaggaagttcttcagagagagggactatgctgcaggtcagaaactgggatctttgctgggatccccctcctccatcctgtggcttcgggttgccgaagagcgatgctcggagggcggccggaagtggcgttggccgccattggcctgccggccagccaccttg

SEQ ID NO: 327106 - DNA, 771 bp, Homo Sapiens
  misc_feature (457)..(457): n is a, c, g, or t
aaagacaaaaccttcctgtctttgtatctttaaatttccaaagaaaaacttaatggaaggcagcatctgctattttgcaaaggagagcatttcacacttaatttgttactttaacacataactattttatttcagagttacctgtatacttttaggcaaagtaacttctgttgccctacaatgctggacaagaccttgagcttcttcctgtgctttcaaatgatctgcccaggtaaagggttgagaagaggtgaaaaggagtcgcgttttaatactccagtccacaggtaactcagtactttttgaggacggaatatcaggctcggagaatgatacatgtgaagtctttagaaaacaaagaatgcaaaaattagtcgagtatcaagaaaaaaccttcaacctaaagattttatcagctaacatgatcactgaaaagtaaaaatcatataagctgtantaataaataacatggaaaaatacattacacactgtaaaaaagtctgaaaggagtcacactaaacttttaaccatggttacctatgggaagcgggaatttgttgttgggggtaggggtggtggaggggcagatttcactttttagtttttacagttctttatggtagtatagatgtttgtattgaagtagaaatattccaagtgttaaaacattttggatcttttaagcttctgaaactctgcatccagggctaacaaagcccatatttaagaaacatttcctgacttcaaatatttcccctcaacctgtctgct

SEQ ID NO: 327107 - DNA, 650 bp, Homo Sapiens
  misc_feature (625)..(625): n is a, c, g, or t
tttgtttcccagcatattgtgctggtgttaaatatttatgttttatcttttgaatgattttaatttaaccaagcaatacttttcatggctccaaattcaaactgtgcacagtggaataggcaatgaccggccttcctcccatctcttttccctggccacattttctttcctggaggaaacaggtgttatctgattgtttctcatcttcactgaaacacaccctggctggcctctctcagctcactgttggcctcatcttcaccatacgttcttgctgtctggaatccagtgtcatcgcatgtggttctctgcatgggaattattgtagcctgtctttaaaaaaaacttcattctcatttccacactgagaatcactgtcccgtttattaagtgtcaaaatgaataggaaagagcactcatgttctgtgttgtgaacaaggggagtattagaagaaactggtcaaaggagatgaggagtgagaactcagagcacagcaacaaaatcttctgagacacacaagtcactctctgctgggcagggtaattttgcacgatgggagggtgttggggaagggaagaggccttcagccagaccggtgcacactgcaaacattcactgaaacancaccctgtcggcacttacgagcatt

SEQ ID NO: 327108 - DNA, 780 bp, Homo Sapiens
actctgccaacataaagtgatttagaaatgttaatatattttaccaagccagagtttctagcatatgtattttaagccgtcataaaacatatacctgtcatgttaaggaatgtgcccacggcaagttatcaaagacctgctgtgggaggctgaggagtgtgttttgctatgttgcagggttataacctgacaacctccatgagggcatgagtactggcagggagtggtttataaatattgaagctattttatttattactttaagaattcctacaagtagtagctattcctatttgtacatccaagtgtcttggggctcagggggtaatcctgtgtcggcagatggatgaagagtgtaaatcctagtggatctgcctgagttagggaatcaagttaacaaaacaatcagatgagcaagagatagtctgttgggcttaatggagaacagaacatttggacagaaaagttttctggacatttctggcttctttgaaagacaagtttaatgagcctcccagcaagattgctggctcacggtggagcaataaggccacttttgttgttattttattccttgtgttgtcccatggcaataatgtcatcattttcatttggtgggacatcagggtgtcagtaagtcttgttactataatagtaaattaaattatctgtgatttggttacaggacttttgcatcaagattatgtaaaggaacaagatgatggtagggtggttccccacatctgtctaaatatttggtaaaaaaaggacaaagagttg

SEQ ID NO: 327109 - DNA, 832 bp, Homo Sapiens
  misc_feature (178)..(178): n is a, c, g, or t
  misc_feature (555)..(555): n is a, c, g, or t
  misc_feature (820)..(820): n is a, c, g, or t
taaaaatcttaataggcttttattcatgattctagaattgggcatccctccgaaccacagcttattcaaagaactccaaccagcaacatgatcacgcagtatttgtagatagaaaacagaagtgaggtgtagatacagcttaattgggttacagcatccttaattgaatcacctgggnccacctacattgacagatgctcagctgctgtaactgccccaaaactcagctatttgttaccactttttgcaacttgggagtatactcccaagttaattgcatttgggcatgagtgactccatatttgtttggtctgttgggtccattacaggagcacagtacaaactaatggcctcctacaaattttatttattaattgaaaggggcccaatagttctatgcatctttgatgtcttctctcatttaacctccatccccaccaattgatataggtttatgcctgcagtaaatgggatagttataaagctaatgcttcataccaatgcaactagtgcatgaagtgggtgaggacagctttctgtactgatatgggtatncagccagactggctatgtccccagcactagcccaggctcagggtcaagtacacacagctgtgcatcctctgaagcgctggagggagagaaagaagttcatctggggaagcgggtggagctgaggcaggggaccaccttggggagggtgggttggcccaagcgccgtctctcccagggatcagcaggctgctttccagctgggttagctcattccccacctcatcttgcagaagctccaggttcaggcttctgcacagctttgttncttgtggttgag

SEQ ID NO: 327110 - DNA, 616 bp, Homo Sapiens
  misc_feature (130)..(138): n is a, c, g, or t
  misc_feature (524)..(557): n is a, c, g, or t
ttttagtctattctcttgtagcttttgttacatccaatgatcatttgcctctctccaggcactaccaaactcattactgtggatagtttctgcctttacaggcttagaattgacaaattgagagacacannnnnnnnncaattctcaaaacaactagactctttccagcagatttgctaaggcacactagaagaaatgtaaaaatctcacattcttgttctagttaatacatgggagaatattactaatacatacatttgttttctacatttgtggttgccttatacatctccttcacgtttaattccttaaacacataaatatgagtcatgatatctaaagccagtctcatttaaacaagataagaaatggtttgtggggaattagcacttagaccttggtaatgtttagaaatcatctttagacacttggtgagaatgccctaattttatgtaaagggtcgtcatggtttgaatgggacttagtagtaaagtgtgtgagacagtgcatttaccaaatgatannnnnnnnnnnnnnnnnnnnnnnnnnnnnnnnnnttgaaattcctgttaaattgcattctggacatgacctaaggctagcttgtccaaccctt

SEQ ID NO: 327111 - DNA, 193 bp, Homo Sapiens
  misc_feature (32)..(32): n is a, c, g, or t
  misc_feature (46)..(46): n is a, c, g, or t
  misc_feature (60)..(60): n is a, c, g, or t
  misc_feature (81)..(81): n is a, c, g, or t
aaaaacctggtgaaaagccccaatttaagtanaaggtcgtcaggtntgaaagggacttantaataaaatgtgtgaaaacantgcatttacccaaaggatatttttttgtggatttaatttttggttagttttgcttgaaattcctgttaaattgcattctggacatgacctaaggctagcttgtccaaccctt

SEQ ID NO: 327112 - DNA, 1398 bp, Homo Sapiens
  misc_feature (71)..(71): n is a, c, g, or t
  misc_feature (197)..(197): n is a, c, g, or t
  misc_feature (300)..(300): n is a, c, g, or t
  misc_feature (522)..(592): n is a, c, g, or t
gcggaggagttatcccataatgtactaaccaaacggcacccttggggaaaccccgtttgcgcccaaaaagnacccggagatagctcacaccctttcagggggcccctcccgaatggggcgcgcccttaacccaggggagagggccacaaggtattggaccggttccgaccgtttaacacgcatcagtaattccctcnaagggaaactcggctaataaactttttgtctttatcccttcagaggactgattagagggacttatgaaaacatcagcacaggaaaacatgtgacagtctgtanttactgatgtgaaaagtcccatggaaaaactccagcgtaccacagaccaggtctgaaacacaccatttccacgggcccaggagactgagtatgaagagacagaacccttctctgcctgagttctggctcatctgcaactactgctttctgaacttctagaagcaatagagaacaaactgttctgctcctctacccttgctctccaagtgtggtttgtgaacnnnnnnnnnnnnnnnnnnnnnnnnnnnnnnnnnnnnnnnnnnnnnnnnnnnnnnnnnnnnnnnnnnnnnnnggaagaacgcaaaaaggtctcatgttctgacgagatttcctacttttctactcactccagggaacaagtaagactctggcccttaagcaagccgctctcattctgttctgcatgctatcaggggtcggccaccaggatggaagcacctggcggtcatggtgcaggcctggccctgcctgatgctttgcagagcttggggcaagcaagaaaggccacagcatggtctactggcccagcctaggctctgactgggagctccagctgggatgtctacgctgggatgaggactctcctgcaacacaccaaagaccagctcttggttccaagagtttatggtttggagaaagaccaaactagtgtcctatttggcactggatgttcttgctcctcaagggaccttggcatacgcagccagcaaatctgcccccaacattctctgcagtcttttgtgtcctttcttgctagtttcagtgcaaagcaaagcccaccctgggcttcatcgtatgaaatatctggaccctctggaatgacaaatgtacaaaacttagaaaacttacacttaaaacggagatttggtggggtggtccaatgtatctccatccactgtatttatctgactaaatactccatccagtatttatctgactaaaataaaatcctagactacgtgaaatttcccttcttttccctagccatgtaagcccagttggagctgggcaccagacagacaagcaaatccgtctcttggcaattcagtgactgtttcaacctataattttctaagaatatgagagccaaaaagttca

SEQ ID NO: 327113 - DNA, 650 bp, Homo Sapiens
ttttggactatcatatttgaatatatatatttcattttaatgaagagtgctttcttgtagacattgatgcagtacatagggctggtaaggaagtagtaacagtgcggagggggtaagtatgtcagtctggcatgttttcttctaaattaatattcaaaaaggtgccattcaaggaacacttttggtcataccttgcaaccagtactgagacatgacataaagttaaaactccaggtgcctttttgagataagtgtgaatccacattcacaacctgggttgagaaaggtcacacttctctacttactaaaatggagtccttcaatcttaagtcagcccagcaattcagttgtattgacctgatggaggccatccgaggtttcactgccattaggagcagggcttgttttatgcgctccgtgcatgctgatggtgcagggagtggtggaagatgtgccacctcaaatctggataattcctttaatcccttccttcaatacaacctgctcttaaaactgaacactgattttcattcttttcatgattagtgtttccccacccttatctttgcattcactccctctcataaaggatgcattttcagagtccagatggattaggataactgcttacaaattccatggcaatagtt

SEQ ID NO: 327114 - DNA, 604 bp, Homo Sapiens
caagaggcagaaatggattactcaaattgggaacctgatgccccctcttctcactttaatggagttgtagtagttgagcttcaaagaaaggagcgtcctccagtgaggttcctgccccttcctgggcctctctaccacagcaagagccagggccagctggcagttttcaccaccctgctcatgtttttctggagacaccagcttaaccacagccaccacagatcggagggtgctggccccagcctgctgcctgctggttcttctccttcctccctcccttcctcactcattcctcccaggagctggaatgggccagagtttcaatgacactgaaggaaaacagtcttctgcagccccactctgagctggggtgccatgttgctgcggtctccctggagtccaccttcctgctggctcagctcactgaattttgggggactggggcatccagggagctgtcaggacgtcagcaggttagctgggccatggcaggaacgctaccattgtttgggcctaatgccagtgtagaggaagaaaaacagtttttcttccaactctcctaagctcttagttggaacagacccctgtaacacattaacaggaa

SEQ ID NO: 327115 - DNA, 306 bp, Homo Sapiens
gaactttgttagaaatgccctcaattggcctttcccgttgtagctgctggagactgactgtgtctgaaaggagggtctcttgatgctgacagggaaaagctgatcagcacctctgtgtcctagaaggggaacttccagaaagggggcatagaagaaggtattattagtatttattgaatgctttcatggggccagggtactgtgctgggggctagcaccttcccttgctagtaggtaaaaacccagctgtaattttaaaggaatttgctatgctgaggatacacttttattgaagaccttgcatag

SEQ ID NO: 327116 - DNA, 755 bp, Homo Sapiens
aaagaggaagtattggatttcgaaggagatgaggcttatttgcatgtgatagaataaggcatatttcttattcctatagggaaatctcaaataggagaattgaacacagcacagatatttttgtctttcacctgcagatctaaccagttattctctaaatttgaagtgccgtaagctagtactgtgtcagtctgtttgaccattagagcagaggtcaaggatgctatgtaatcctacttaaagtctatttttacagagagactagttaaaaggaagccttgaggacctttattgtttacacagcctggaagctgtcactgagtccttaaattgaagcatgacattgtgcagtgatgtgctagtggacaaagaagtacagaacagaatcaaggatgtcctttgggaagtccacagagtctgttacaaatgtaatatccaattgcagtgagatggaactgaagacttacaaagcagaggcacacttcctatgagacaggggccttgccacaaacgacacgtctggcttcttgagcagtttcactcagactatttaggagcccatcagaatattcagtggcagaacaaggtcagtaatggcaaacactcagaatgcagcctgtgtaagagctttgaaccaattcttccacaatacagctttactgagcgggatttgtgtggagaatggactacagcaggactcctaggcggccattgaatcgcaagctgaggtgggggaaagcgcaagctgaggaggc

SEQ ID NO: 327117 - DNA, 409 bp, Homo Sapiens
  misc_feature (102)..(184): n is a, c, g, or t
  misc_feature (187)..(187): n is a, c, g, or t
  misc_feature (242)..(242): n is a, c, g, or t
  misc_feature (293)..(293): n is a, c, g, or t
  misc_feature (323)..(323): n is a, c, g, or t
  misc_feature (382)..(382): n is a, c, g, or t
agagtagcaaaatggcatggcagaggagagaagagaaggagcatctgaatgtcaggaggagttcggctgaggacggttggaaagcagataagccggggatgnnnnnnnnnnnnnnnnnnnnnnnnnnnnnnnnnnnnnnnnnnnnnnnnnnnnnnnnnnnnnnnnnnnnnnnnnnnnnnnnnnnctncagtaaaatccccacctttcactattcctttcaggtttgatgtggacctggattntttccttaggatggccaggacaaaggacgggattaccaaggaggaggcagnattttaaaaagggctgttcaccctggattnttcccattgagtgggaattagggccttccaggaaaaggcaactggttaaaggggcattnatttgttaaccacacccttaggatggt

SEQ ID NO: 327118 - DNA, 489 bp, Homo Sapiens
  misc_feature (143)..(164): n is a, c, g, or t
tggcctgtggtttagacggaaattttatttcttgtctagtgtttgcagttagcaaaaacatgcacaatcatttacgaaagcatggaactactaatagcactagaatattgcctatttttataatcatttgtgagaaagggggnnnnnnnnnnnnnnnnnnnnnnaagaaaattgtcccacagctatagcattccaaagggttttctaatttgtagcactttctcaatccatttttatatactatatccactcttaaaatcactggaactgccaactttggatatctttttgaatattcataaggaaacctgtatcatatgaaacacattaaaaggtaaacaataaaagtctgaggtcatgaagttttccacaaaagccaattatgactattaaattttaactgaccttaaagcatttggaaacctggaaagctagaagagaggttttattgcctacattttaagataagaaaatcaaatcaatacatga

SEQ ID NO: 327119 - DNA, 775 bp, Homo Sapiens
aacttctaaattctaagcccacaccagacatcggtgagaccctaagaggtttccaattaaaattaagccagatgataaatggagtaatctgaagtgagtgatcactaaggttttttttggttctaatattttatgacaattgtgaaatttgagacttggccatttctggggaattacattaagtcagcacaaaaaactttaaaagggtaaaaccacatctttcagtgataaaaacagttaccaaaatcacttctgtcccactctgtctccaaactctgggtgacttcactcttacagtttatggttgtaaagtttcatttatttttgtttatctgctgtatatggtctttagcagggccttttctggaccatgggaatcgtgggcactctggagagcaacttggtttcctgcggattaggtgggagggtgtaacccaagccgtcaatccaacccgcaaatagcagagtgaaatgttaggctttggtgcttcagagatgctgagtgcaagatgcatttattccagttttgttggcaaaatagcattcaaaaaacaaatgcttgtatgtgcaatccatcagaagttcagtcaaatatttgcctgactatgcactggaaacttaaagaagcagaaggtatggcggtgaactacacagacaaggaccctgctcacgtggagctttcatgaacttggtgtgggttgcagagtggaaataaaatcaataaatgaaagtgacaaatggaaattatcagttggtaatttccacaatggacaca

SEQ ID NO: 327120 - DNA, 463 bp, Homo Sapiens
  misc_feature (216)..(273): n is a, c, g, or t
  misc_feature (420)..(420): n is a, c, g, or t
  misc_feature (438)..(438): n is a, c, g, or t
  misc_feature (452)..(452): n is a, c, g, or t
attgagcaagaaagaaatctttgctgttttaatttgctgagactttcagattgttaccatagcatacctagcctctctggactgttacagcccttcagtcccaacacgttagcttatattgtattgtgtccattgtggaaattaccaactgataatttccatttgtcactttcatttattgattttatttccactctgcaacccacaccaagttcnnnnnnnnnnnnnnnnnnnnnnnnnnnnnnnnnnnnnnnnnnnnnnnnnnnnnnnnnnttctttaagtttccagtgcataggtcaggcaaatatttgactgaacttctgatgggattgcacatacaagcatttgttttttgaatgctattttgccaacaaaactgggataaaatgcatcttggcacttcaggcatctctggaggnaccaaaggccaacatttncactctggcatttngcggggtgggt

SEQ ID NO: 327121 - DNA, 883 bp, Homo Sapiens
  misc_feature (515)..(515): n is a, c, g, or t
ttctgttttcctatatatcctacagtgaaatttatatttggtaattagaaaaattttttatttttacaggtaggacctaaaaatcttgaactttcccctgagttcaactgaggaatggggcaaaatgtattaacaagggtggtctgtattatggtttttaaaacattttactggatcaaatgcacatcatttttagtgggtttttctgtctttctcttttgtgggtgattaataagagaatcttatgggaaattcagcttaatttttagaactcctgaagagatgtaagtgctatagtcttataacaatgattttggggatgcaaagttttccaataatctaacttattccaatacagtcctctataaaaacaaaggctattgaatctccaattctgaggttttacaagtcagaaatccaaaggctactagcaagttatttcctaatgtatcagtaaggattttacttaatctctttgttttttccccctgtggaattttagagacttctttttnataagttcctacttttactgttggttaatgttttaggtaagaggtttcttgtgtttttctggtggtgctgtttgagcctgatgatgggtccatcaggtaggtcgtctgggtgcttttcactggcagctccaccaatagccaggctgctgctgatctgctttcaacttcagagggatcaggcacccctgccaccaaccgtacctggcagaatttgtctaaagtggaatagccactaaaggtggtacagagagaaaaagaatgtaaactacgtagacaattgcttggaaagttgaagaggagagaggcaaagtttaattgtcaatataggttttgttagcagactttgtaaattatgttcttgagaaatg

SEQ ID NO: 327122 - DNA, 730 bp, Homo Sapiens
  misc_feature (157)..(281): n is a, c, g, or t
attatatcaatgttattatttttattttataattgtgctactgttatacaagagaatacaatattcttgttttaggaaacacatacttaagtatttagagatacaatttcatcctgtttgcaatttattctccaatggttctggaaaaataatttcnnnnnnnnnnnnnnnnnnnnnnnnnnnnnnnnnnnnnnnnnnnnnnnnnnnnnnnnnnnnnnnnnnnnnnnnnnnnnnnnnnnnnnnnnnnnnnnnnnnnnnnnnnnnnnnnnnnnnnnnnnnnnaatgataaagcaaatgtggtaaaatgttaacattttgagaatcttaataaacgtcatatggggccgggcgcggtggtgcaacacctcaagctgcctctagttcccagctaatgcagaggttgaggcaggaggaccacttgggccccaggagttcaaggctacagtgagccatgatcatgccactgcgagaccctcatctcaatgaaaaaacaacaaaaccacagccatgttatttcaagagtcaggtaagtatcaaaccaatgcttatgaacaggaaaattatgccaatctgaaaatatgtggaaaatctgcttggcattttatcttcccctaaagtactaatatttccaagcctgtcaagttccccaaatgaaatgaaaaccctcccttaccatattgacatgtatgatgttatgggacttgacttaatctaagaattctgaaactgc

SEQ ID NO: 327123 - DNA, 355 bp, Homo Sapiens
  misc_feature (34)..(34): n is a, c, g, or t
  misc_feature (40)..(40): n is a, c, g, or t
atggttttaaacctagagaaatgttaaactcccnaacacnacccaagggtgatagccccatccacactcaccctttattggcctacagagaaagttccaggtcattattttttatttaaaaaaataaaggacattgtccttcccattaatcactgatctaaaagatcataaaatcttcatgagacagatttaggatttgcagatactgctatatcttaggaacacaaatatcattaagaatggctggccaagagttgtcaagtcactctccatttaattcagtaagaactaagtaagccttaatatctagtaaggtggtaagcaggaagggatgcgaggctgccatgttatagct

SEQ ID NO: 327124 - DNA, 787 bp, Homo Sapiens
  misc_feature (18)..(18): n is a, c, g, or t
  misc_feature (21)..(21): n is a, c, g, or t
  misc_feature (320)..(328): n is a, c, g, or t
  misc_feature (761)..(761): n is a, c, g, or t
attcaaaaatcccaaatncancaaaaggtcccatgctcaaaagctaacacatgccatatccctcctctaatttcattatttttagggaggatcagccaagtgtaaagaaagaaaactgaggtaatcaagccacactaatatgtaaataattaactgtctcttcctgttaactcctcaaaaagccaactgctttctaatccaaatgtgtgtataattaatggaaagtcaggggctagggatactacacagaagagaggaggaaagaaagaatgcttcctttaaatcttattactcacatggaagactgatttggaaggggnnnnnnnnnctaaacaattaatttcagcttcaaggaacctctatccaactggaaagaaaagaaaatacgtggagtaataagccactctgagctcccttgtgaagaccctttatcttgtagagcccttagggcagctgacaccacagagtacaaaatggcagcgcttgttaagaaccaagacagactggaaaatgatgtccaagggctaattcagctaagagtgagaggcaatccttcctctgcactgcaagttacccagagcagagaatgatgaaaactacaacggagcaggaaagagaaaggaaggagaccaactcaggccaatttctcctaaatctccctttcgcagattacttcaaattctgcattcttcccccgcttccatgatttattcttccctcatcaccatccctctgcgagagaaactgtctacaggggtatnctagggggccacaacacaacttccag

SEQ ID NO: 327125 - DNA, 607 bp, Homo Sapiens
tgagctaccacacccggccactgaactgacattttagtggggctgacaggaatatatatgtcagctggtgataaatactatgaggaaggataaagcagactaagggaatgctatataaaattttgtataaaaataaagcagaggagggagtgctattttagataaagttgtcctgggaaggcttctctgattgccatttgataaaaataactgcaaaaagggctatcacatatatgatcactgtgtgctggggaactgtactatgtacttaacgtgcatttaatcctcagcaactctgcattcagtactattaccatgcccacgatacaggactgaatgaagcttagagagggtaaggctcttggcagaatctgcagtaaggggagcagggccagggttacattgtaagggaagaaactaggacttgaactcagggctgcaacttcaaaccacatgcttttcctcaccacgctgcagccaggctggtggagaaaaggaacctcaaagaggtcaagtgtggctgtggctacaaagtagcaggtccatctggcctccccacacatggctaagagattaacgcaattcaatcttccctaatatcagacga

SEQ ID NO: 327126 - DNA, 756 bp, Homo Sapiens
ctttttgtatctaatgagttgactgctggctggcagcccctaggggctggtcactggaaagacaaatgcatgattagagttgggactttcagtcctcccccaaactcttgggagaagggctgaaggttaagttgatcaccagtgaccagtggtaatcataccttcataatgaagcctccataaaactccagaagaacagattttggagcatttccaggtaactgaacatatggaggtccctagagggtgctgtacctgaagagggtagagggtataggagctccctgtcccttcccacatgccttgctctatccatttcttcatctctatcctttgtactgtcctttataataaaccagtgaacctaagtgtttccctggagttctgtggagctttactagcaaattaaactcaaggaggggtcatggggaaccctgatttataggtttggtcagaagcacaggtaaaaccacctggggtttgaacttggcactggaagtgggcagcagtcttgtgggactgggccctcaatctgtgggatcaaatgccatctctaggggatagcatgggaaactggaggacacctagctggtatctgctgcaaaattgattgcttgcttggtggtggggaaaaaactccacacatttggtcagagaagttttctgtctttattgtggtgtgagagcagaggaaaaaagtttgttttttccgctcagactttgttttaaggaacaggggagaaggggaagttctgg

SEQ ID NO: 327127 - DNA, 304 bp, Homo Sapiens
  misc_feature (124)..(157): n is a, c, g, or t
cattaccataattcctttgtacctcttatgacacattttagttatttgttatagttttttctgcccatattaggattatgaatacttctaggggcagtgtaggtgactttcattatttgttttnnnnnnnnnnnnnnnnnnnnnnnnnnnnnnnnnnaggaaagatggatgagtggtaggtacatttaacatcatcctgtagtttccttgtgtatgaaaggaagggagatgaattttattttaaagaatctgagaataaaagcctcatttttcctcctccattaagatttttaattaagcggcc

SEQ ID NO: 327128 - DNA, 675 bp, Homo Sapiens
  misc_feature (85)..(85): n is a, c, g, or t
tactgcagtttatcacattaagcttttagaggggacaagaaaggcagaaaaggggaaactaagccaatgtaattcaaatttacancttttcaaggattatctgtctaatatttggaaatagaaggcaatatatttatttctagctatttttataaacttctataagaaagtttgggaatgccacatctcagcattgcaaaggacagcacaaagatactgggcctggactcaaagaagcaaaaaagtaggctcacagaccatgccataaaccagaccagtctcatgacaagggctcaagtctatctgagacctagatgtccactgaagcttgaagaatgcgcttaagctaaaagcccattgtctgcttcccaaaatccctagattcccacccatgttcaccttcagcacctgggtagcaatgctcaaagcaggcacttttatctccctggtttgaggtaccttactgacttgggaagccagaaagaacataaaaagacccttcaataggattcacagttctttatctatggaatgaagaaattaagtttgtccacaagatttattagtgagctgagccatcaaatttcctcttggcaccacatagcatgactctccttctggaagagaaatgacaaaagccctattccaaaggtgcattattcaagttctagtaag

SEQ ID NO: 327129 - DNA, 510 bp, Homo Sapiens
tacacaaaattgaaataactacgtttccttagaagacagctttacttctaaggttgttactcagaacaagttttcagtgtgaattataaaacttcatttttttctaatagtaaatgaatcattctagtctttcttcctctatttaatattcacttttacttgttatctaaataatctaatattcatttttacttattatctaaataacaattcatttaaatttccattgggtttccaaaatgaaacatttaatataatttcattaactttaaaaaacagagagggagaaaaaaataaataaataacagtcaatgagcaacacctatggctgagttgtcccaaaacttcacccttagctaaaatgccaaaacaaagccactgcccctggatatttaacatctatatcacacaggaataatacggtttacttaactgtaacttcaactaccccaaaaaatacaattaggttttttaaattaaaatttgaccttagtttgctttgtggtactt

SEQ ID NO: 327130 - DNA, 771 bp, Homo Sapiens
  misc_feature (553)..(553): n is a, c, g, or t
  misc_feature (556)..(556): n is a, c, g, or t
agtccaagcccagaagaaggggatgggaaaggagacgaagatgcgcaaaaaaagcaggatgtggggctgggccctgaggtgcctgccaacaagctcatctgaccagggaggttaagccagaaaaagcagcagatcctgtcctttgaaaccatttccagaaatagacagacctgaatgtaaatcctggtgtgcatcaaacagttcctgacacctctcttctgctttgtatgcccggatggtccagagcccctggagagaagatgacaagtgggaaaacactggactccgagctggggaaacagacagagaaaacagctccagtgaggctgggtgcagaaaaacctgcggcctcccaagctccatggtcacgtatccaccaaacagcacacgcaggcctcctaggaggcttcatgtttcaaggaaaaataaatgttcccaatagcctgaggggaccctgccactggaatctcaagctcctgctcaaaccacacctcacataaggggcctggaaataaacgtcctatttttgaccacattcaaatctagttataantanttctttccttcctaactcagccttccaggtcttcctcctctccatattcttccctgacatctctttgggcagaaatgatatttttctgatttttgagccagtaggattttaaaaaacaattctctgttaagagtactcaccatactgaattacaattagccatctatgtgtctgtccccaccttaaattgctaatttctcaagggtcagctatag

SEQ ID NO: 327131 - DNA, 512 bp, Homo Sapiens
  misc_feature (230)..(388): n is a, c, g, or t
ccaccccataacacttcataggttttcccaaacgagaggcttttcctcctcatctttttcttcgcaaaatatttttctgtcagttattgctgtatattttgttatttcattttaaaatccaatctctgatctaaatctagagtacaaacgtgaaaaaatacctcactaaaaaagaagttcttttggcgccaaaagctcaggaatgttagcttggtggaagagtttgcctnnnnnnnnnnnnnnnnnnnnnnnnnnnnnnnnnnnnnnnnnnnnnnnnnnnnnnnnnnnnnnnnnnnnnnnnnnnnnnnnnnnnnnnnnnnnnnnnnnnnnnnnnnnnnnnnnnnnnnnnnnnnnnnnnnnnnnnnnnnnnnnnnnnnnnnnnnnnnnnttagccttttttcagagtttccacctttctttgcatatgcactctgggaagaaggagatactttccctgggaaagatggtagaaagacttatggcaaggctgggcgcagtggctcatgcctggt

SEQ ID NO: 327132 - DNA, 463 bp, Homo Sapiens
  misc_feature (433)..(433): n is a, c, g, or t
ttcggcacagaagattcctcattaaatgtaatagataattcaactgagtggctggaaggttttttctaaaggcctcaccggatgaagctggtgttatgcctaggaatctatagaatggaagtgctgtacaatgaatctgagactgacttcctctttgatacaggtcaagaaattgaagtttgttacttctgatctctctcagaatacattttgagataaatgtcacaataaaacataactgtcctgacctcagcactaccttttacatttttagacttttacagaagagtttatttctccagggatactaatatacattaaactacacatgtccatttaccctctgtttttttgaagtattaacccacagggacctgggtagaacaaagtattgggggtttcattagggggtgtgtatttggaggccgacatnaaattctggggactgttttgaacacatccg

SEQ ID NO: 327133 - DNA, 834 bp, Homo Sapiens
  misc_feature (50)..(251): n is a, c, g, or t
  misc_feature (272)..(315): n is a, c, g, or t
  misc_feature (343)..(358): n is a, c, g, or t
aaaaaagacagatgtcttctgaaggacaaggtattgggccagcagattannnnnnnnnnnnnnnnnnnnnnnnnnnnnnnnnnnnnnnnnnnnnnnnnnnnnnnnnnnnnnnnnnnnnnnnnnnnnnnnnnnnnnnnnnnnnnnnnnnnnnnnnnnnnnnnnnnnnnnnnnnnnnnnnnnnnnnnnnnnnnnnnnnnnnnnnnnnnnnnnnnnnnnnnnnnnnnnnnnnnnnnnnnnnnnnnnnnnnnnnnttctatctaatccatacctannnnnnnnnnnnnnnnnnnnnnnnnnnnnnnnnnnnnnnnnnnngtttgtgaatatgccactgtaactgaannnnnnnnnnnnnnnncttctccaaatgtatatatatgtatactcaatctttataatttcgggtgcttttcacccagtttttttgatagcattttggcctttctttttaatcaccataaatgtttttcacttcatctttcaaaaactaaattggcggccctcaaacaatttagatagggattagtctatagcccgtatcatcttctggcatgccacaatgcatgttgttttttgcatatcatctttatttttctctttttgatagttattatatgagataaaaagagaaccatttctcagtgatgttacagacgagtgaagggagtatacagataagtaaacccacaattgtaacacaacatgaaatatgtcagggcacatagatgttgcacatttaggatgtaagcatactattagaagggccagaggagacttgcagatggaaatgattcttaggcagatatctgtagggtgagtagtaatatttaaaat

SEQ ID NO: 327134 - DNA, 918 bp, Homo Sapiens
agtcaaaagaacacaattttaatgactttatcaagccttaggacagagatgagagaaacacctttccaatgatgcatcaagttaacgtctaagcaaaagatcagcagagatcagagattgttgggtacacacgtatcttgtgatgtcttctgagaaccaacttattcctctttctctgagaagaacttgacccctcgccccggggctgagtgcttggcagccacatttgtgttgagatcttgattcctgctctaactacacagggctgggatggacacctgctccaagtttggccagtcatttatttttccagtaatttaaagctgtgactaggagacacagcctctgtggggttgtgagggttgagatgatataaactcaggagctgtcgggtggacatgttcactgagaaggacagtcagtccacagagagagaacaccgctaacatgcaggggggtctagagaacacagaccatgtggatccgagagtgttggaggggcagctctagcttctctgggcttttcggatccgagttctgttcctgggaggcctggctaaaatctacccttgggccctgcactcctccccatggctatattgcaaatatcctatactttgcatgtgatcacacaaagagggtttctgttactggcacacaaaaagtttgcctgagatgattctcctccacttccatcagggtcttctggtcattgatttcaacttattctctcttaagaagcccattgagtccccataatctcttggtttctttcttttccaggaccaactgctcacagttcaaaccctcattttgcctctatttacttgtaccttgattggctgatgccctaacagacccaggttcttcagaaagccttcctagtccacctcagaccttggggatccccctttccca

SEQ ID NO: 327135 - DNA, 583 bp, Homo Sapiens
  misc_feature (62)..(163): n is a, c, g, or t
gcctccagagtagatggaattacaggtgcctgctaccatgcccacctaattttaaaaaattnnnnnnnnnnnnnnnnnnnnnnnnnnnnnnnnnnnnnnnnnnnnnnnnnnnnnnnnnnnnnnnnnnnnnnnnnnnnnnnnnnnnnnnnnnnnnnnnnnnnnnttgagccccctcgcccaacctgacacctttcttgaggcttgcagaagcaccaaggtgcctgcctgtgactggccgaaaacattttagcattttgatatgggcaggcatgctaactgagagtccagttctccagttagttcttgctttttgattggaatgttcctgcccattgctgttggaatgctcagaaagggccttggcctcctgaggacatcttcctcacatgcctgctctagcctgtgcctccccggggaaaaggagaggaccagggaagcctgtggacatcccttcctcccacaggctgggacacttttcagagtgggtgaatccactctcttttatctctctcctctttgtggcttacattattcctccccactctccttccctcattaacacacctttttgttgttgttgttg

SEQ ID NO: 327136 - DNA, 394 bp, Homo Sapiens
  misc_feature (32)..(32): n is a, c, g, or t
  misc_feature (40)..(40): n is a, c, g, or t
  misc_feature (54)..(54): n is a, c, g, or t
caaaggccaccaccccttaaaaacagaacccnctttaaanctgtgccctttccnccgtggcctactgttttaattttttccagcatttatttcctcacacgtttttcacattattgacaagtgatgtttctgcatatctgatcatcccatttattcttcagatgtttaccgagcattttctatgtatcatgcactgggttaggccctggataaataatgtgaagaagaaaaaagagacactgctactgggctcctggaatttgcagtttggtgaaaaagatacatgacaaatcctgcttaagatccttcagtggttccttgctgttttcaggaagcccagatgtcttgaccgggttgcctctgtttacctctacagcatcacctctaatcagca

SEQ ID NO: 327137 - DNA, 965 bp, Homo Sapiens
  misc_feature (405)..(405): n is a, c, g, or t
  misc_feature (497)..(497): n is a, c, g, or t
  misc_feature (510)..(510): n is a, c, g, or t
tgggcagacagcaaccttttgcttgccaagactcaaaccttcttagctaacagaacctccccaccttagccgtcagcacattcatgatccaagtaagcccagttactctagccctgtcactgcatcttaaaccagctctgtctgtgagcaagttagttccaaaagtatattgatttttcctgaaaagatggggctgattccagggcttgcttacctcttaggatggtaataatgataataataaacacatagtccttacatcttgcccagggcactgttcacattaggcgcttacagcactctcagtaggtactattaatatatctactttatagtgagaaaactgaatcaaagggagattaactacctctcccaaggtgacatactcaggtgtgctgctctggnagtctgcattcttaacaattatggtaagcaggatcttgataaaataatgaaagctgtgaaaaactacaaagtactatcctaattctttcatncaagccttacccntggaaactggccaagttttttaaattcaaaagccctagtctttgcctacagaagtgttagggtcccttaggggccttaggctgctgtcctgttacccctagtctaacccctggcttgccttggtcattgctcccccactcagtcttgccagctcagggtaggggcacccaagtcctagcagctccctctcccagctcttgcaccccacacctctgggttaagtcactgtccactgaaaaccctttcttctcttccttagtcttcctggctgtccagaagaacaagcctatcagcaagaaggaaatgattcagaggtccaaacggtaagaccaagaaaacaagagtttgtgtacaagtgttaaccaggcaccaagtggtcaggagctctgcttgcacccagaataaaggcattatgctcaaatttaaacattatgagaaaagttgtgagagtcatt

SEQ ID NO: 327138 - DNA, 456 bp, Homo Sapiens
agccctaagtctttgcctaaaagaagtgttaagggtccttaaggggccttagggctgctgtccctggttaccccctaagtctaaccccctggcttgccttgggtccattgctccccccactcaagtcttgcccagctcaggggtaggggcacccaagccctagcagctcccctctccccagctcttgcacccaacaccctctgggttaaagtcactgtcccactgaaaaccctttccttctcttccttagtcttccctggctgtccagaagaacaagcctatcagcaagaaggaaatgattcagaggtccaaacggtaagaccaagaaaacaagagtttgtgtacaagtgttaaccaggccaccaagtggtcaggagctctggcttgcacccagaataaaggcattatgctcaaatttaaacattatgagaaagttgtgagagtcatttctcactc

SEQ ID NO: 327139 - DNA, 444 bp, Homo Sapiens
cttttctctttttctgtacttctggaagctgctcataaatccgtttggacctctgaatcatttccttcttgctgataggcttgttcttctggatagccaggaagactctcttgggcagcgggcacatgcgattctggtggccctgccgttccctgtcaatgttgaatagtgcatcccgctcggtctgtaacatgctctgcagcttcctctcctggactattaacttcaagcgctttatccgctccccagagcgggagatgaagtcaggtctgtgaaattgaagcgattcctgaagggttgctctcacaaatggcctcagtaggtctctgccagcctctctgcctgggtcctgccaggtagccccgaccgtccaggtgctgcccctgacagttctgctcccgcagtggctccctccagggtctggtcttggttattggttcaacc

SEQ ID NO: 327140 - DNA, 686 bp, Homo Sapiens
ccttctgtagcctgctcaaatgcacatcttcctttaagcctcctgtgttgctccttccccttgttagaaacccgttatctgtactcttatggaacttagtgtaatagcaaacccccacccctgctccaagggctattcacagactgtcagagttagggaggagaaatgacttagaggaatcggggtaaggggttttgatagttcccggtctgctcctaatagtgagacccgggcagtcagtcatggctcatctttgtggttcagtttttctcagctgaggaatgagtggtttggattttatttcacatggccaaatgatgtgttggtagtggttccttgaggtgctgtgctgagaaggactctgaggctgcatcctgactcagctaatgatcacttaggaatatcgccatgggagtggagagtgaaagcatacgagaggtatctgagctgcttttggactaggtgatttaaatgtctctttttgttctaccttctggatgctttgatttactgacttgtgaagtgtcttgcccaagatcacgtagcccattaagttttcgaagctgattctctgacacagagatggttaaaagctacacatttgactctcacattcatacacgtaggctggctgtgggagatgaaaagctagaataagaagttctagaagatccatgactttttca

SEQ ID NO: 327141 - DNA, 982 bp, Homo Sapiens
ctggagccatggtgggggacctggaaaaatactatatcaaacatacacaattacgtaggtgctccttaaaacctaaagaaattaattgaaaacataaaatctaaagcctgaatgccagagggctttttctttgtatttcatgtaactttatactctcacctataagccacaagagcaaataatgggcaatagcataaggtaagtaattacttaatattcacacctttattacacttatttatataaccacaaaatttttttcttaaataatatcatttcttgaataagggaagtaaacagatggattctcaagtcactctgttttcatgaagctttccccttacctgatattttatactgcatgcatttccaaaaggaatactttgcagaaaagaaatatagcacttgtttggcaactcttgagaattgactcagaaggcaaccttgacatctcaggcaagatctttcttctttacagcaagatgacgacatttctgatcccaagccaaggtcagtgctagcaggagatgatgcagaaaaaggctgggcatacacaggggcagaaaaacagccccaggctaggaggacctggaaaatgtaactgaaaaactattcttcaaagccagttgtgaacagcagcaaccccatccaggaagactacatggttacacttggcaggctgtgcggaacagatgaggcagtgtgacacagtcaagtcacccacaagaacgtggcatttttgtggtgtttgaaacatttcagctagataagcctaaattggcttcctttatagcaaaactacctgccactcattatattcatgccaatatcaggttcctcatggggcatgctatgacatatttacccccagaccaactcaggatttaaaaggaagatgagatatttataggctaggaattctctaatggacacgctaatgaacaaataaatgtgaaaccatctcctaaagatcaaggatacc

SEQ ID NO: 327142 - DNA, 1059 bp, Homo Sapiens
  misc_feature (379)..(379): n is a, c, g, or t
ccgttccggcgacgggccacagttatcgaaagctcttataattgtttaaagcggaagatgctgccccggctgcaggcggtataaagcgccaggtttctcccccatatgagtgatcccgccctttcagggtcggtaggagcattccccgcattaaatgactccttccaattttgatcagtagcagcatgcggattgcacactcctgaaggtcaagtaagacgatcttctcgacgcactctgtgcatgtgaaatgcacaagtagccaccaagatggcgaaaatcggaccaacaactgtagtagccaggctgcaggtgtagggccaaatggtgcacaccaccacactaaaatgtctgtacagccgcacatttacattcagtntggtgatatttccaacacaggctgggggattgagtttcccccatataaggcaatgacaaggatttcaaatggaccaaacattttatattagtgtcaacagcactaacacagcttcagctggcggaggagagggaaaccaagaatatccacattatttactccagagaaacttcctgacaccatctgttctctgttaccccccacccaccaatgtggccctttcctagtgcacccttgcctagctctgcgaacccctcagttatgtctcttggcccaagaatttcaaaaccccatgttttcctgaataaagagattcggaaagttcatttcaacagagtgactggtaacacagaagatctcttaatgctgcaaagtattattagttgtccagctgcaaagatgatttgttgtatttacctttgttctaggattgaatgtaatgcttttgctatacaatgtggtggctgggggacggtgaggcggaggggacagagggattgagctagattacacagcgtagaaaatcaatgctcttacactctagggtctgagaactggttcagggtcacagaagtgaataagaaagccaactgaactagcaataggaaataggttacacagagcaaagaaaaaacaagtttctgaaacatgtacaaactacatatgatgtctatatttgc

SEQ ID NO: 327143 - DNA, 459 bp, Homo Sapiens
  misc_feature (27)..(27): n is a, c, g, or t
  misc_feature (37)..(37): n is a, c, g, or t
  misc_feature (51)..(51): n is a, c, g, or t
  misc_feature (76)..(76): n is a, c, g, or t
  misc_feature (132)..(183): n is a, c, g, or t
aaattttttggtaagaagaacaggggntcccaaccanggttggccccgggncgggtctcaaaaactccctggcagntccctggaagtggggatatttgggagggaaaaccccagaccttccagtgatcttcnnnnnnnnnnnnnnnnnnnnnnnnnnnnnnnnnnnnnnnnnnnnnnnnnnnnggccttacaattctttcttctacttagaaagttcacaataaaagaatctttgagaacccacctgacggaatcaaattcattcttcctcagaatttctacttgccaaatttaatgtactagctgtaaaagttttaaattcatacatctttaaaaaaattaaccatgaattatttttattaaggtggaagggtttttggtttgtgttcagtctttttgtaggtctatttttgaaaacagattctgcacttccagttctaaacagataccatatggctg

SEQ ID NO: 327144 - DNA, 974 bp, Homo Sapiens
  misc_feature (178)..(223): n is a, c, g, or t
  misc_feature (251)..(259): n is a, c, g, or t
gattgtttaacgttcagacttccttatttcccttacttcactattttcaaaattgtgacgtttaccttgccagttcatgcaggactttacagaagaactcgaaattcaaattctgagctgccaccaagtttttacaattaaaccattttaaaactattgttctgaggtagtggttaannnnnnnnnnnnnnnnnnnnnnnnnnnnnnnnnnnnnnnnnnnnnnatgatttaaaacttactagttagaaacnnnnnnnnngcctcaccagcttcaggaaattttcttttgaattgttagaaaaacaaacaaacaaacacacagacgcacgcacacgcacgtatattcttccaccctgtagtataaagaaaacatttttaaatccgaaaatgaaatatgttacctttttccttccaaaagtagactgtgagtgatgtttgtgtggtgtcctttgcccccatttcttactgtagttttatggtataaaatcctcagtatttgcttaattttttttgtcattgaggaaaactaacagtaaaatgagttaacctgaaaatgcccttttcagttcagcattcagagtgaggaaagaggtatatatgcagttaaggtgagaacggaaccgtagcttccgccggcggacttgtgagcacgtcagaaagcgaatgtgcctcactagaacgcacggtggcggcaggagtggccggcagtgcccggcacgcagtcacgggaggtgggtcgagtcctggtttatgtgagtcctgtgaggtgagagagtgggagaaaacgcctcactcaacttaatgcctttgtttgtttgttttaaccaagagtttacttgtaatttagtattgccggaaaattgttcaggtaaaaagtgcctagtataaataggtacacagtcaggtcagatatgttaattgcatctcacttgatttaatgaaaatttaccatttgttttgaggtcagtaccatt

SEQ ID NO: 327145 - DNA, 659 bp, Homo Sapiens
aaacaacaccccaaaatacgtcttttattgcacccaattttgatttctccaaactaagtgaggacataaagacacttgggaaacagccttcatgcagaatttgctattttaatggcccttgcccaccaaatcttttacatttatttcaggcacacctaattggacaaactttttgtgttggggggtggaaattcagctttgttgaatgcttctaaatcactccactgcgttttcatagaatcagcaactctttttttaacaatcatacttctgaattcagcaaacatggaattacgtttatgtaagcagcacacacaggcttgggaagaaacatggctgactttaggaagtagagcacaactgttgggagcacaagcgcccatttgtgctggtgagtagcagtcattggccatagcactgagtgtgccgtggacatcattcatgtgtttgacagagggaaaaggaaagggttagttgttgggtgatcagggtaagtggtgctccatttagagagcttctactgtactttggaaggaactacctgagtcagacaagtaaagatgtataacataataactggttaagaagaatgtgcattgcattctccatgcactatctttcctccagcctgggtgacagaaacataattcgtctcaaaa

SEQ ID NO: 327146 - DNA, 731 bp, Homo Sapiens
ttaggtttcagggcacagtttattaaaaaattttaagtaactgcaagtcccacccccgattccagtatctgtcccctccatatctcaacagaggggctgtctatcatatgtgggtgggatgggaaaggaagaggtatggtcctactatgcaagttactctccagccttcagcttgtgctgtcccaaacctgagtccctctgaccaaggtaagttgttcagagagcagtggtgccaccctgacagcactttaggacagtgccatctcctgagatcactagtcacattccagtcattgtgaccaatatattagttatcagtggtggtcaaaggtagaccagaggcacaggctgttgagggaagaccctctattaaagaaggttctaagaatgaaacatggaatgctcaacttgttaaagtgctcagctacaacattaaaaaagtgtcgggaaggtgtctattggtgagaaagcaaggtacaatctgaggggctcctggaaagatacaattttaaaagtacacaaaaggacttctgcttaaatcattccagcaatgagagaaaaaagcttagagcttagcctctgaattacttaagctgtaaatcaaatgtatctctaggtggagaccaactccttcaattcctcatggagacggaataaaacatttaccactgtcttttgctctaactcttctctcactaaataattgaaaatctggtttccttaatggacat

SEQ ID NO: 327147 - DNA, 631 bp, Homo Sapiens
  misc_feature (420)..(420): n is a, c, g, or t
  misc_feature (428)..(428): n is a, c, g, or t
  misc_feature (577)..(577): n is a, c, g, or t
aagtagatgggccagcaagggtggagtgaactggtaccagttactggggcccagtgtactggattgagggatggccagtgagttgtgttcatatatgtaccagtccaatgccaatgtaaagaatttctgccattctaccattgcagagtgggcctgaaaaatgttttcagcaatgttcaaatttcttcccactacctgcaaacatgaatttggggatttcagctaacttcttactacctgtagcatatggggatttggagtagggtataattaaaattgatgggtaactctaatctccttttagccttattagccatataaaccctctgacagctacttaaacaaagaaactaggagtcttcttatctctctcttttcttcttaatcttttatctccctataataataagttattactgnactataantaatacctggtaaggcgagtatttactgagactttcttagtgctttacatatattaactactttaatcttcacaacaacacaatgaggcttatccatactagataggtgaacaaactaaggctcagagagattggataacttgcccagngtcatatatctagtaagtagtagagctagaatacagagctacaaactaagggtg

SEQ ID NO: 327148 - DNA, 545 bp, Homo Sapiens
cagaacctcccagtagaacaggaaaatggggagagttggaaacagccttgttgacatggtctcattctctttctcaattcttctgctctatagtttttggacttagaaatcagtaattcacctggtctgtgggttcttcagagatccctgaacactgggtggtataagctgtctgggcagtggaaaaaaggtctttggggtataatgagcaaagctggcactcaatgggcatcaaagggaagcacatcagtgaagatggtgcggatcatcccaccacatcaaaaccctggaacgcgatatccgttaccagaattcagggccagggctttcttcccctgaacaggatgtccttccgttagccccgggagatcgtggtgtcctgcaggaccagctggaccctggaaggccggtgggccctgatgttcatgcggaattctttgatgacaaagtagtagcagaaaacatccaggcagcagttgacattggagaaacacatggacaattgcaagaagaagctgatgctctgcttggctctgcactctacg

SEQ ID NO: 327149 - DNA, 521 bp, Homo Sapiens
  misc_feature (375)..(460): n is a, c, g, or t
cttgaagacagatatgaaaggcaatgtttaaatactgatgggagccagcagagagggaaaaggtgttgatccagcagagaagggacggcagatggggcagagtctccaaggaggagagggtctatgggagcggggtagggagtggcagctgcaggtaccaacagagaaggaacttttgagaactccaggggccaggggctctgggggttttatgtaattattatgcaagtcactcaccatctctgagcctcttttttcccatctccaaaacagtgacacaggattctgtcatagatggaatgagatggctgtaaactgctttacgtggtgggccttccatgagggaagctgtcactcgtaccagcattatcagtnnnnnnnnnnnnnnnnnnnnnnnnnnnnnnnnnnnnnnnnnnnnnnnnnnnnnnnnnnnnnnnnnnnnnnnnnnnnnnnnnnnnnnaagtcagagggatgcaggcatggagccaggctttgatccagccttctcactcctaagctcg

SEQ ID NO: 327150 - DNA, 715 bp, Homo Sapiens
cttagacaacccagagtttttccctggtggagaggggagactttcagccctacctgtttccaggactgtgcacttagttaagggtgtgtggagagtgaggtgaggcctatagatagtggtttgtatactgggtcctgaaaaccctcttggtgctctgtttttcaggagctgaagccaaagaatgccaataataatactttttgagtggttcttttcattattgttaattaggacttatgggtaccttgaattcttaagtttgggcatagcatttctaaaggaaaggattggaattatttgttggataatgtttttaaccccataccgtgtggtttatgattgccaatgccatagatttaaaaacctggcagataatacccctcatcttctctgcttgtcctcagcactactaccacaattaaaaagtactattttcttaaaaaagaaaataaatagaccttaaaattgatattttcattttctacgtattaatctttttaaactatgctagcatttttagtattacattaagtagaattagtcttgggagacaactttgtcttttgtttataaatagaataattctaatacatttcttttaaatgggcaatatggtatatagtatttggtgatgactgtcttcattgcaaacatctagtgaacactctggctacttccacagtaattttgcttttcatgataactacctgtattt

SEQ ID NO: 327151 - DNA, 727 bp, Homo Sapiens
caatttacataatgaggaaaaaatgccaagatcattatataaattaagctaatgtgaaagaggaattgttgttagtaacatgtatgccgactgaattagaaattatgctgcctttgatatacaatagatcaagcagtttttccaaagaataaatggcagcatattcatgaagttaaaataacaacgaacgctaaataactaaagcacatacttgaatgatacattaaattttttcagtgcacatttaaatacctggtgccacacagtaaattgccattttaccttacaatttgtatactatatgcttacactttactcaataccttgcttatttgataaaaatggctcatcgtttgttttacctatatacgaataaaagaggtaactagtttaggagggttaatataaaaattaaaagtgacaaaagcaatgcattctctagatatttaacttttatgaaatattagaaataccaactctttcagataccttaggcgttcatacgtcatgatttatattgtatatttatattgtatataaacagaggtatttaccaagtttgctctgatatcagagtgtttatttgcagactctggcagagaaaatgagaaactaagtcaagcaaatcacagtttagttgcttttaagtgactgccttgtctgactgcactttcaaattttatcaaatgattaaataaatatgaacactaaattcgattaccatcaa

SEQ ID NO: 327152 - DNA, 695 bp, Homo Sapiens
  misc_feature (46)..(46): n is a, c, g, or t
  misc_feature (62)..(62): n is a, c, g, or t
  misc_feature (86)..(187): n is a, c, g, or t
  misc_feature (270)..(324): n is a, c, g, or t
  misc_feature (390)..(390): n is a, c, g, or t
ggccgcttaattaaatttttttcagtctgcactgtcagaaaaatcnccaaaatatacttcanccttggccgggtgtggtggcttannnnnnnnnnnnnnnnnnnnnnnnnnnnnnnnnnnnnnnnnnnnnnnnnnnnnnnnnnnnnnnnnnnnnnnnnnnnnnnnnnnnnnnnnnnnnnnnnnnnnnacatacaaaaattagctgggtgtggtggcacgcgcccgcggtcccagctactcagagggagagatgggcagatggatggagcnnnnnnnnnnnnnnnnnnnnnnnnnnnnnnnnnnnnnnnnnnnnnnnnnnnnnnntgacagagcgaggtcctgtctcaaaaataaaattaaaaatcaaaggtaccttcaacttatgttttnataaaaacctttgggaaactagacaggctcctcaataagaaccaaatttgagagaagagactacagagaggacaggtgtcaactgtaaaagagtaatatcatattaatattgtaggctgcagtatccagtggttttctgcatttcaacaaatgttcatttctgcaaataattttatttcgcaggtttcttcctttggatacaatgttcaaatattgtgcatttactccttttgattcagttaacaaacaagtattgagcacacctacaagcactagtcaatgttaaggttgtatagattcggtag

SEQ ID NO: 327153 - DNA, 506 bp, Homo Sapiens
  misc_feature (254)..(457): n is a, c, g, or t
  misc_feature (479)..(479): n is a, c, g, or t
aagcagttatttggctgggcagaaatctgaaatcacaaacccattctgacttggttagttaattaggatactgccagctgagggatattgaaggctggaggatacagactttagttgtttgtcgaagtctgttggaacattctgtggtttgaccttcagcaggggtaactgcagtcctctcccaatctcccaactccactttagaaagccttagtcttagttacttaattttcttttgttcggttataggtgcnnnnnnnnnnnnnnnnnnnnnnnnnnnnnnnnnnnnnnnnnnnnnnnnnnnnnnnnnnnnnnnnnnnnnnnnnnnnnnnnnnnnnnnnnnnnnnnnnnnnnnnnnnnnnnnnnnnnnnnnnnnnnnnnnnnnnnnnnnnnnnnnnnnnnnnnnnnnnnnnnnnnnnnnnnnnnnnnnnnnnnnnnnnnnnnnnnnnnnnnnnnnacatgctaacacactctcctgncaccttgtgaagaaggtgcctgccttt

SEQ ID NO: 327154 - DNA, 482 bp, Homo Sapiens
atgagctaccttgccttgtcatccctgggtgttttactgttccctgttgttttccatacccttgcccaacctctgtaaatattctttcattaaactgtcttcaatcagtgcttcgtgtgtgccatctctttcctgccaagacactgaaaagtcccaaggagaaccctcctaaagggagagagtctttgctgatgaccatcaagctcataagtaagggctggtgtgcctgaggctgtgtgtccctctggacacaggcaacctgtctttgtgctatgattggacagaatagctgggcacatggatgtggacccagataactctgtttgggcacctctccacaggctgggccacaggacattgtgggtggtcattgatcatgcctggcagaaccagtcctcaacagcaagacctagggggtatgaaaccacactagtggacacaccaaactttgtagttctcttcacttggtgtttgaaagcagg

SEQ ID NO: 327155 - DNA, 738 bp, Homo Sapiens
atgaatctacacagcaaaaaccattttgcatctcccagtcctcatggtttcacatggaaatcatcaggatctaattagtgactcagagaaagaaagcaataatagagtgccgtggcgcgcctgcaaaatttataggtcactaaaagtcacccatagcaacaaggcttcttgtctcaggtctgcagtgtgtcacatgccagactcctcagactcaacaggcagctctgcacatccacaatcaaggagcttgttttccacacttcatggagacttccctcttgtctagtttgacttcctctccatttttagcatcagaaacacaaggaaataaaattcgtggttagattgatgtttcttccccctgctctttcatctcctgctatgccaggaagtagcattaaagttctatcatgcggttgcccaccaggacacaggaacccaggaccttccaacctgatgactagtgagtgcaatacagagagctggagctgaggcttaattacacaggaaggagtagcactgaagtaagatcaggttgctgaatcacgaaggaggacattttgcaacatatagatgatatatatacactcacatttaaaagcattttttctttaccatgacaaaccactcgacaacaggagcataaaaatggagatctaagatgggaaaggggagatctgttctctctgctcttttccacacccttctatatcgaaagaattccccattttccccatt

SEQ ID NO: 327156 - DNA, 528 bp, Homo Sapiens
  misc_feature (38)..(38): n is a, c, g, or t
ggaagacttccccccctgtcctagtttggaactccccnctccccatttttaagccatccagaaaaacaccaagggaaaaataaaaaattccgtgggttaagaattgaatgttttccttcccccccctgcctccttttcatcctccctggctaatgccccaggaaagttagccatttaaagttcctatccatgcggttgccccaacaggacacaggaaccccaggaccttcccaacctgatgactagtgagtgcaatacagagagctggagctgaggcttaattacacaggaaggagtagcactgaagtaagatcaggttgctgaatcacgaaggaggacattttgcaacatatagatgatatatatacactcacatttaaaagcattttttctttaccatgacaaaccactcgacaacaggaacataaaaatggagatctaagatgggaaaggggagatctgttctctctgctcttttccacacccttctatatcgaaagaattccccattttccccattctcgtgcc

SEQ ID NO: 327157 - DNA, 587 bp, Homo Sapiens
  misc_feature (53)..(66): n is a, c, g, or t
  misc_feature (126)..(321): n is a, c, g, or t
  misc_feature (433)..(433): n is a, c, g, or t
aaccaacatagcctagttatttttagttagagatgaatttgctttgatgtgannnnnnnnnnnnnnctgcaatgaagctatgtccaaagaatgtacttttcttttctgtcccctgggttgaagcannnnnnnnnnnnnnnnnnnnnnnnnnnnnnnnnnnnnnnnnnnnnnnnnnnnnnnnnnnnnnnnnnnnnnnnnnnnnnnnnnnnnnnnnnnnnnnnnnnnnnnnnnnnnnnnnnnnnnnnnnnnnnnnnnnnnnnnnnnnnnnnnnnnnnnnnnnnnnnnnnnnnnnnnnnnnnnnnnnnnnnnnnnnnnnnnnnncagaaagtacttttcgagaagtttcatatagattcttttcctgttgcttagaaatagatggcagttattcagagaaccagagaaactaaagtgtgtacatttcccagtcaanaaaaaatacgataaaaatattgactatgagcagatatattgtctggattgtctgttaattatccgtgttcacatgcagtgagtaatatttggcacatttttttctacattccttattttcatccagagtataattaatgtcttaatatacccag

SEQ ID NO: 327158 - DNA, 471 bp, Homo Sapiens
gcttgtataaagcactctaatttttattttaatttaatgttggtctcaacccacaaaattgcttttataacccatgagtgaattgtgcctgcagtttggaaacactgccctggaaagggatctgcctgctcttctccagccccacttcccagaagaaaaaccaaaatgagagcccctgcgtcctggtgaaggtcagtggcgggcaggccaagcagggcctccagagctgctcgagggcctccaagggaggtgagctgcagagggacccaggagggtggaaggatgctggctggaagtcacagagggccaggttcaaatcctgcctccgcttttgattggctcccagaccttggatctatctgtgaattaacctttgagcctcggactcctcgtgcgttagcctggtataatagtctctctctcgcagtgttgccgtatggattcagggtgatttaatgctcgtgccgaatt

SEQ ID NO: 327159 - DNA, 653 bp, Homo Sapiens
aattttttaaaggaaaatgttccctttgcaaacaaggtacgtttattctgcaacttaggagataaaatgagatttctgtggggagtctatgttgtgctttctggtggccttaaaagaaacagacaaatttgtgctaaagataaaaatgaattacattccacaaagccaactctatgagactaaacagagaggattgccttgagacaagatgtgaagttgaacatcagtccgaacttttgaaagaaccctcgaaggtggggctggggaggtaggcaatctcgacgcaagcttcctctactgccttctgtgcaagagggtgtctcctcggagacagaatatgatgtcatcacttgatcatcaagagattagggttcattcaccagactgtacttctttaatggcttacaggtcttaacgcagagctgtcctgtatgctccaaacaagtccgtgcctgggtcgaacgcactgggcgctagcacacgcctcagtgctgcatgtccgtgctggcccctgccaccgaatgacatgcccctgggtatgcgtccaccttgaagggtatttcatatctcagccatcctccttccccgctgcaatgtgttcctatcatgaacagcctgtctgctgatgttccgaggatcaccacactcctttc

SEQ ID NO: 327160 - DNA, 543 bp, Homo Sapiens
  misc_feature (448)..(448): n is a, c, g, or t
  misc_feature (472)..(472): n is a, c, g, or t
  misc_feature (493)..(493): n is a, c, g, or t
  misc_feature (501)..(501): n is a, c, g, or t
  misc_feature (515)..(515): n is a, c, g, or t
  misc_feature (524)..(524): n is a, c, g, or t
ttggatctgtccattttattagaaaaacgacggctctcaagaagccctgccccacagaccccaccctcatctcgtgggccaggactaggccaacagtccctcctaacagcaaggaaggctggagaatcaggtggttttatttaccctatattgctgcccacacaaaactaggcttttgttcacaagggaaaggggagaatggctgctggggaggagatgcggagtgcagggagggtggggaccaagaacccggcttggtccttggagagggcagtggcctgcccctctccaatccacagacatgtggggtgtctggttttctgtggccctcagaggcccacccacagactctttctcatttctctgtttaggatgagttatctgttggtctgttgcacgcccagctaagagaatgagattcatgagccccggccctgacagaggccanttcccccattcccggtgacctctnacgaggtttttggacccagtnatttaccnggctatggggattnggggaaggngtgccaattttcagcctca

SEQ ID NO: 327161 - DNA, 150 bp, Homo Sapiens
  misc_feature (133)..(133): n is a, c, g, or t
aatctaactcttaatagttggattaaaagtgaattgaataactaaggctgctttgtcagtccactaaacaaacatttaccaagggctaccttgctgggaatggggtacttgatgaggaaacaggcatacgttnctgttttttaagaagct

SEQ ID NO: 327162 - DNA, 892 bp, Homo Sapiens
  misc_feature (764)..(764): n is a, c, g, or t
atggtttatgtttatttggaagtcacatatcttatactacctataaatgtcaagaaaacagaaagaaattatccttggccatgttatttaaacacattcagaatggaaaaatctgattccagcattcaatttggattatacttagttttgaaaataaatagacagagatatatgcacaagaagtgtgtgtgcacgctgcagctgtttcaggtgaaggaaggctgggttctgggtctttgcactgagagcagtcaggctggcggctcagaggggtcttacatgggtccaggctctgcacggccctgtgcctctaaggacgctgttttgaatcagctgaagtaatcacaactgggataaaatttccttggacattaaataacaagcagcctctctcttttacttctggttagttaaggcaataaaataaatattagcttagagtcagacctagaaggggacttaatatcagcccttctttcaactgatgaaaaatctgagccaaaagaagtaaagggagttgcccaaaaacctgagtagtgacagagccaaaagccaactgcaggcttttgtgtggcccacctgatgggttcccatgctcttcccactctggtcctaagtgagcttggacacactccactgccaggggcaccatcatttaaacagatccaggaaaatttttaaatgggtaaacagagacaggctcctgtatactttactcaggggcaagacaaacacaagctgctaaatatttattctttttgtanccgctagacagctttgcacaaatcccttggatcacaaaatcattggaatacttccatcagagctcattttcagagttttgaacaatatttaaaccacctcactagcctgtcacgagaggcagtaaaaa

SEQ ID NO: 327163 - DNA, 799 bp, Homo Sapiens
  misc_feature (410)..(410): n is a, c, g, or t
  misc_feature (487)..(487): n is a, c, g, or t
aatgacagttacttcagtaacggtaaaagtagccaaattcttatcaaggttatttatggctagtctctagtatcatccacaatgaaaatggtttatatttattaagctccaaatagggtagggtgggagaagagagaaaaggagggaaaaagttaataataacttaataaaaactctattatgtaactaaagtttgtcactagcattgacaaaactgcaaaatattcttggtagttgaaaatgacacaaacttcatgcaggacacccatctcccaacaaaaaatacatctgtgcttacctctggtaatctgtatgcttttatgcaagggttaaaatgtagaagggcattacaacatagcataaacaaagaggtttttaagtcaggtggtcttaaattccctcattccagnacctaggatctaccctttactttctgtatgtgaccttgcacaagtcattcaaccacttcaaggccccactagactgntcagctccacaggagccaaagaccacttctgcctgactcactactataaaaccgtggcccacagcacggagaaatcagtttcttcctgtataaaaataaaggatattaaacagtatttatctcgaagcgttaactagataaatgggatattatatatataaagtctggcgcagtgcctgattatggtaaatgctcagtaagttaaccgtttgacattaactaccagccatcaaacatgaaagtaatgtttaaagactttcaaacaccaacatgcaaagcctttacccactaagtataaattctgtgccgaat

SEQ ID NO: 327164 - DNA, 740 bp, Homo Sapiens
  misc_feature (47)..(58): n is a, c, g, or t
  misc_feature (89)..(341): n is a, c, g, or t
  misc_feature (349)..(375): n is a, c, g, or t
ttgattgtttacagcctattccaaaataaaaggactgtggaaggttnnnnnnnnnnnntagttaagggccaggagcagtggctcacacnnnnnnnnnnnnnnnnnnnnnnnnnnnnnnnnnnnnnnnnnnnnnnnnnnnnnnnnnnnnnnnnnnnnnnnnnnnnnnnnnnnnnnnnnnnnnnnnnnnnnnnnnnnnnnnnnnnnnnnnnnnnnnnnnnnnnnnnnnnnnnnnnnnnnnnnnnnnnnnnnnnnnnnnnnnnnnnnnnnnnnnnnnnnnnnnnnnnnnnnnnnnnnnnnnnnnnnnnnnnnnnnnnnnnnnnnnnnnnnnnnnnnnnnnnnnnctgtctcnnnnnnnnnnnnnnnnnnnnnnnnnnncaagatggcaaattatattttgtgtatattctaccacaactttttaaaaactcaaatcaaaatctgactgtttgtaaagatcaataaaattgacaagattccagcaaaactaacacacacaaaaaaatgactactatggtttgaatatcatttgtcctcaccaaatctcatgttgaagcttggtctgcaatgtagcagtgttgagaggtggtacctttaagaggtgattaggttgttaagagggattaatgtcgttctgaaaggagttctcactcttggagaagtgaacccacaagagtaggttgttataaagtgaggatgcctctcatgtttggcctctctttgcaaacatgtgcttccccttg

SEQ ID NO: 327165 - DNA, 804 bp, Homo Sapiens
  misc_feature (74)..(74): n is a, c, g, or t
tctataaaaaataattaaaaaataataattccaagaccaatcaagtgttttgtttttgaagagctagaaaggancactccttcctaggagaatacataagtcctgtctgaataatcctaaagaagatacagagtctctgacctaaaagctagctacaaaaagtgatctttggagtggatttagagttagcacaacacttgctgattttacttcaatctactccaaagcatccatgcttagaattcatatcaagataaggaagtcaatgaacacagcccatacctctgaggatgaagtcagcaggagaactattgtgaacaaaagatcccatgtggccattcccactctatggtggccatctagcagccatggcactggagtgggtgaagtcaccgcaggaaccatgagactacagatagctagctactcacccaagaaagaccggaacagtggtgaatagaatctctgtggccattcctcaggggcggtggaggaggagggggtggcccagctggcgtccttgagggtggaggtgggggctttcctcggctcgggggttctgacccatgcattcggtatggtggtgggggagggggagcatccctggcaccatttcggatcacaggtggtgggggtggaggagctgcaattaaaatccaaagtagttaggtttggatgtggagacggcaaggggtagaatgacttgaaacacatgagctaaaagagtaacacaccccacagaggctcacagtgcctggttcccctttgtccttattacttgaaagcatcaccattcttccagtt

SEQ ID NO: 327166 - DNA, 239 bp, Homo Sapiens
  misc_feature (28)..(28): n is a, c, g, or t
  misc_feature (133)..(133): n is a, c, g, or t
ggatgccttgggagtagattggaaagtnaaaatcagcaaagtgttgtgcctaactcctaaatcccactcccaaagatcactttttggtagctagcttttagggtcagagactctgtatcttctttaggattantcagacaggacttatgtattctcctaggaaggagtgttcctttctagctcttcaaaaacaaaacacttgattgttcttggaattattattttttaattatttttta

SEQ ID NO: 327167 - DNA, 570 bp, Homo Sapiens
  misc_feature (287)..(287): n is a, c, g, or t
  misc_feature (552)..(552): n is a, c, g, or t
gtgtaagccactggctgtgagaatatattggtaggtatacacaggtgctgggtggggcccaggttgtcaggatcagggtcaacctatagctttgagtggaagaacatggagtttggaacctgtgactgaggtctcgatctcagctatgcacttactgtctatgtggcattgtgaagatatttaacatctaagcctgtttcctcatctatatgacgtgagaatacttaccttgcaagtggtcgtgtagactaagtaggtaaccacgtaattgggagctgttaggttcntacacttagcaccactaccacccccttttctggctacccaaatgtatatttggtttgggcatcattgtgcaaacccattgcagaggagtctggaatttacaagatcccccagggtatggctggccaagtgaggccctcttggaaacatttttcctatatttttcatatatcattaattatagaattaatatactatatacctttattatttgtatgtgtatatatttatacacgtgtgtgggtgggattgtggaagacagacagnataggatgtaagtcccct

SEQ ID NO: 327168 - DNA, 222 bp, Homo Sapiens
aataggtaattatattaaaaatttgtatctgttattagagatgaagaagagcaaatcaaggataccgatggcaaactggcaatcttcagtgttacttttctctaaaatagttcactttttagttttcataacattataaaaattaaccattttatctaaacggaactctgcgaaagcaaatgaacgaaaggtcctggttaccttttctttcaaaagaacatt

SEQ ID NO: 327169 - DNA, 843 bp, Homo Sapiens
  misc_feature (119)..(119): n is a, c, g, or t
  misc_feature (654)..(654): n is a, c, g, or t
  misc_feature (693)..(710): n is a, c, g, or t
  misc_feature (828)..(828): n is a, c, g, or t
aaagtgaatgccgagactgctaaaaggaaaagcatccggcgcagacatacactaggagggcacagagatgctaccgaaatcagcgttttgaatttttggaaagtgcatgagcagagcgngtgagagagaatctgaactttcagctgtaaaccggttaaaaccaaaatgctcagcccaggacctttccatctcagactggctggccagggaacgcctacgcaccagtacctctgaccttagcagaggagaaatcggagatccccagacagagaacccaagcacacgagaaatagccacgaccgacacacctttgtctcttcattgcaacacaggcagttcttccagcaccttggcttcaacaaacaggccccttctttccataccaccacagtcacctgaccaaataaacggagaaagcttccagaacgtgagcaaaaatgctagttctgcagcgaatgctcaacctcataaactgtctgaaaccccaggcactaaagcagagtttcatccctgtctttaaactgggggtatgtccactctagcaagtaaaaaaactactgttacacgttccagtaactctgtcaatattttcttgtatcagaattgttattatgcagccttcatttggggctggtttcatcattttgcactgtngaaatagctttacagtgcattactacagccagaagaacnnnnnnnnnnnnnnnnnnttaaaaatatatcggatagttgtatacaaatgagcaaggtatttgttgcaacttactacatagcatatacccaaaatcactgaagaaaatcgctggcatcagtgtgcagcaaatttgntcttttggttttcat

SEQ ID NO: 327170 - DNA, 881 bp, Homo Sapiens
  misc_feature (840)..(840): n is a, c, g, or t
ttttttttcaagacagagtctcaaaaaccaacaaacaaacaaaaagaaactcggaagggagctgttcctgaatcaagacacaatggctgaaacatcagaaaataacacaccaggttattttctgacaaaatgtgtttatgacaaccacagctgttttgttttagttatccactgccccacactcccccacctcctgatgaagaggccttcctccttgcctcttttcagttactaatttcttccttgcttccttcctctccctgagcaagcccttcctgtaatctgatccttacggtttccttgccagatttcatccttcctgatgactgggacacatcacccgtgctttgtctaaaacaggtattctcaaaccacaacctgagggatcttcctggctggcccaaaatctgtgcatacaaaacccaggcagttttttaagcttatttttaaagcacacttgactctctgttaagttcgtcatcaacattggttttggttaatcacaactaccttacatgcatacaacgtacattcaatgctattgttttagtccataagccatatccataataaacaggcatttccccaagatcagatctctacaatatgcagccagcgcctcccctgcgtcctgagctcactgattctcaacttggtagaaagatgggatgtaggaaaaatggtttccaagcagtcgaaaataagacattatgccaggcttgggagttgggcagacctgcatttcaacccgaatcaagtctgtaactgctctatgatctcaggcaacgaatttaaccattctgtgactaggtttcctcatctgtaaaatgggaataaaangatctcagtctcctactgtggatgtgaggaagaaatgaggt

SEQ ID NO: 327171 - DNA, 922 bp, Homo Sapiens
  misc_feature (791)..(791): n is a, c, g, or t
  misc_feature (819)..(819): n is a, c, g, or t
  misc_feature (888)..(888): n is a, c, g, or t
aattttgaccttttcttttaagtttctgtgcttagtgtttttaatgtttacttttgccacttacaataatatcaccaaaataatatgcatagagttttggaagaaacatagaaaacatgagcagaatgagacaattccttgggctgtagtttggacccaactgaatcctgagtgctctgtggctgacgctgtctacccgtgggagagacacactcaggagtggccgtttggccagaaaagaaggtcatggcccctggcctggcccccgccctgcagggacacagaagccacaccatttgcaccatccacgccttgctccagaaggcctggccgccttctccctgggggtgattcaaggatttggtctcggaccagacccccctccacagctgcccggccccagacccatctcttggattgagggtgtgtgggctggaaccagtgggtcactgtggcagcttcatctgagccgaaggtgtgggtcctctgtggctgtgcgattgacctcgatgggaaggagcgttctacccattttccttgttttcagtgctgcggtatcagtcagtgatctgaggaaatcctgtaggggaaggcaggctgcagtgaaaacaggagctggtgaaaccgagccctctgcatctgcgaatgtgccctaggtgctgctgctggggacatggatgccaatcggaggcctgcgtggcctcctgagcagcagctgaccgcccgtctcatgctggacgggacccctgggcgggtggacatgagaccactgttggccagggacgccgtgngatggcctaccgtggcctgcctgagcanaagcgtgaccgcccgtctcactgttgggccagggctttgtggcgtgggtgttttccagtctgcctggancagcgataagcagctgtgcagactggtggcggtg

SEQ ID NO: 327172 - DNA, 771 bp, Homo Sapiens
tggctgtgagctcaggttttcctcgcttcatatccacgctggtgagagttaggcatgctgggccctcaggcaaactgcccagtactttactgaaacacgcttaggccccataagttctgtgagaaggtgtttcttcacccataaaccaggctggttctgtaaaactggtgagctcaaccaggagccatgcagacatcccaaggggaagaaaacagagagccagtgagacacttggacaagagctctgcccaaaggcaggggacactgcctggctatgcggcttgcatccatcctctgctgcttcattaaagtccctccttggcatcccagcctggcaggttctgtggtcagccagcaccacatattctctgtgacaataaacatctcatagctgccttgactcttggtggtgcctcagcttcagttcccaagaatgttttcccccttggttggcgaggcagtgaacagatgtccagtgggggagaatgaagggaggagtcagaggaaaggaaaatcctcgggttgggaaagatgagctgaacagcctcaaaggctagatgcggctcctccgtgggcacacaaacattctttacatattctggaaaagggaagaatggctgcaattcatagctgtctaggaacattcttattataacttcatcttgacagtacccccatccagggatttcagcaagcttcgtggaatttcaccttcttagtatttagtgatggtgtccatggttgcagcataggcaccaggcatttcattaa

SEQ ID NO: 327173 - DNA, 514 bp, Homo Sapiens
gctcaccagttttacagaaccagcctggtttatgggtgaagaaacaccttctcacagaacttatggggcctaagcgtgtttcagtaaagtactgggcagtttgcctgagggccccagcatgcctaactctcacccagcgtggatatgaaagcgaggaaaaccctgagctcacagcccaggcagcctcaaggacataggcacaccctcagcagtgtctacaagatgccctggccaccaggcaatccagccatctccctgggtagaatccttcacactgcatgtctgattgcatttttcattttttaattacagccgtagactcatatagactctgactgccaatctaaagcacctagagagtttttttaaattgttaatgttttgctaaattcttaataattatacaaaatcattatgtagaccaatagatattattgaccaagatatagtgatgcttaaaacaaagtcctctgtaatcagtacaacatgttggtagaatttaccctaaatgtta

SEQ ID NO: 327174 - DNA, 977 bp, Homo Sapiens
  misc_feature (205)..(221): n is a, c, g, or t
taattatttagtttgatcaggaagttagatattccacaaaagtgaattttccagataagggaaacctatttttaagtgttatttggtaatgaaaactactaccacatactaaaaaccttctatgttatgtgtgaagtgccatcttggagccggatgtacattgccacattttatctttgtaaaaaccttatgggatagggtatcnnnnnnnnnnnnnnnnnaacaatactaaggctgtacactgttctttctactctttcagattaattttttaggtaacattttctaaaataaatttcagtctccccaaccttatttagtaggatatagtgagtataatttaaccttacagtgctttagtattttcctttttagtatgtttgttagcccctgactgtggcttgtagagcacaactgtccctgtggtgaatggctcagctatgctgtattactgattcttgtcatctcccttgctgtcaggatgtcttatgtctacgtgtctgcctctagccaccctcacctgtcttccaaccttctggcataactaaactcgttaagtgtgtgaattaaaactaaaagccattggactctgaatgaggccctacgtgcccctcctagtaagtaaaattcatgaatttatgtcagctattgcagttctttataggtctttttcattgatttccagttttacaactttacttcagagggttaagtttgaaatagaaatctggccttgctgaatacagccatatataatttaatgtgtgaaaattacaccctagcctaatgtaatatactagtgccttcccttaataaggtttattaaagagtacaatgtgagttggtaaaaaggaataagatggataaaattttttaataaaaataattctgcttgtcactagtggtacttattttaaagttttatcacttagaagatttatcattattaaggctacaggattctatatatttcagaa

SEQ ID NO: 327175 - DNA, 200 bp, Homo Sapiens
tcccaatttttcctaattttagagatggggtctcacccacgttgccccaggctggtctcaagctccctggactcaggtcatcctaccacctaggccttctaaagtgttaggatgagccctgaaccttgtaacatgaacatttattagttatatctggaaaaaaatataaagttatttttatttgggtgatactgccttca

SEQ ID NO: 327176 - DNA, 365 bp, Homo Sapiens
aaatctttgaagattatatagagtagataggataaaatgatctatttttaagtcttgatgacacaggattaagaaaaaggcaagtgtgatagaggggatttgggattattgtagtgttgggctaacggttaaatagatgctaaggtgtccagatttatttctggctgataaatgtatgctgctgcaggtgtttaacaatctaaatagctgtgacaggtttatgccaaaagtacattaaagggtagtgaacaatgtcagggatgcccgtggtataccaggactcttaatagtggggacatgtgggtatatgaacagtacaaaggctaagtgatttctgtgcattaaaacagataaatcacaggttg

SEQ ID NO: 327177 - DNA, 681 bp, Homo Sapiens
  misc_feature (643)..(643): n is a, c, g, or t
  misc_feature (647)..(647): n is a, c, g, or t
  misc_feature (659)..(659): n is a, c, g, or t
gaaggttgtcaggaagcaattttaaatttctaatatgtaaacatcggggctttggcatattttgaaccattttgatgataggaatggaggtggtaggagccaccctgattaagttcttgttgagaataaactggtgcaccagacatttacataggctgaatcaatgttgatggcagccgtgtttttaatccatgggcctaaaacagtgtccctcatacctgtctcttgctgaggcccctgtcgcaggtgagccatgtctgacttccgagccttccatcgactgctcagtccacgtcttcagccctatttcccaagcttacctagtgagtcctccttgactcaggctggttcctccattgtttctgccacctgcaggccattggtgctccttgaataccctgtggtgtcatcgctgactcgtgcctccagggctttcccgctctgacggctctgtgtttcctattgcttcatatagcttgcttctgaattagcatgcgatatgtgacactcatatgttatgtatcttggtttagtttttacagaaagatgaaagactcttaaaagggatcttggagttgttcttgtacatcttttatatctcctaagcctttgatgggcacttgttccaaatgggaaagaaaanaccncccttcaaaaanagatctttaattaagcggccgg

SEQ ID NO: 327178 - DNA, 527 bp, Homo Sapiens
  misc_feature (34)..(34): n is a, c, g, or t
  misc_feature (149)..(149): n is a, c, g, or t
taacccttgaacacggattacattaataataaantattatttaaaataaaagtaatgttaggggctgccaaggtctgaaactgtggtgaacccccccaaaatccatatgttgaaatcctaaccccacaatgtacgggtaataagagggnaaccctttagggggtgattaagttatgaaggctccacccttatgaatggaattagtgcccttctaaaagagggctggatggagctctgtgtgaggatgcaggaagagggtgctgatgccatctttgaagtagagagcaggccctcaccagacactgaatcaaggctacagctttgatccccgacttcccagcttcaagaactgtgggaaaaagtttctgctgtttataaattacccagtctaaggtattttgttatagcaccaggagtggactaagacaggggctttcacttatatttttctatactgttggtttgttacaaccatgaattaccaagcaaacaaaaacatttttttaaagttagtgctgccagccggg

SEQ ID NO: 327179 - DNA, 797 bp, Homo Sapiens
cgatttggtataccaaaaacctggaaatatactatatatccattactggggggaataggtaactgaactgtggtataaatcctatgatgaaatacttttcaactgttaaaatgaataaactaggtccttgtgtagcaatatgaatagatctccaaaacacagcattgaataaaaattctaaaacacataaaatactacattttgtatatggatgcaaacatatacaagaggaaattataaaatcatggaaggacaagatacacaccaaaatcatgattgaagctgcttcttaggaaagggaaatgagactggggatgagaaaaaaataaccttaggtctgttatgattgtttagtatattttaaaagaggagcaaaactgaaaaatgtgaacacttatttatcccaggaggtgagttataacttttatgggttcagaataaatattctctgatgcttgcgtttttcaagtattctattcaacttgcgaaacagtcaactagtcctcttcccatctacccacccccacccaaaatgtgaattaaccgaaaaggaaagacatacaaacaggaaagaacccagaggaaacacccacatcggcaaaaaccgcaaagcaaggtaaagacccttaggcagcctgcttgaaacagttaacagaaatcatgcaggcaaaataaatttttgaattaataacttcatatagttactggacaatgtaagtagctagttaagaagtcaaggccgggcgcggtggctcacggccaatagtggtatttcttagccttataactgcatgtga

SEQ ID NO: 327180 - DNA, 608 bp, Homo Sapiens
acaagcatgttcatagcagttttattcataataaaaatatgaaataacacaaatattcatcatcagtataatggatacagtgtagttcattcagaatactttacagcaggggtccccaacccctaggctgcagactggtaaaattcccacggcctgttaggaaccaggccacacagcaggaggtaagcagcaggcaagggagcgaagcttcatctgtatttacggctgcttcccatcgctcacattaccatcttgaggtccgcctcctgtcgagatcagcggtggcattagattctcatatgagcacaaaccctattgtgaactccgcgtgggagggatctagctgcgcaatccttatgagactctaactaatgcctggtgatctgaggtggaacagtttcatcccgaaaccatcccatccccacctcttccaggaaaccggcccctagtgccaaaaaggttggggactgctgctttacagcagtggggggaaatattgatattcacaacataagtaaatctttaagaataataatatgaaactcaaaagtaggcaaaactgatttcaaataaataatataactgctctgaagggggtcagaataact

SEQ ID NO: 327181 - DNA, 410 bp, Homo Sapiens
tatgcagagaagcaagagttaaaagggcagcaattccactgaaaagtctgtttacagaggtttatgacttgggtctgaattgcccattttggagctgatagagctctggctggattgtttggactagggcagagctctggcatggccgtgggagagggcaggtctctatgatggtgttttaaagtcaagaaagactctttagaggacatggctatgcccagctgcatgtttctttggtgcatccgtgggccccggcagcccacgccggagtctgagttaggctctcacttgtttgagaaggttgtttgatgggacatgtgtgtctacagttccaagtagaatcgcaaccaaactacattccctggaatgaacctgggtggtatttcagaagtacataaactttgcttaaa

SEQ ID NO: 327182 - DNA, 1458 bp, Homo Sapiens
  misc_feature (431)..(439): n is a, c, g, or t
ccactgtgagatatagatatgtcttttctttctctagcagataagtacctgaggctcaaggaggttaagcaacttttgcaaattcactttccaatatagtgtcttttcccagggtgactaatgtatatacttgatgagtgaaccagaaaagtaggaaataatatgttacatatgggatgctctattgggtatagtaaaggatgcgttgctgttataaaattatagtcacttagaaaagagatgtttatttttatttttctctcatcagtcttaaggtaagtgaatggcctagggtagttaggtgactgtgttccatatggtcattcaggggcaaatgctgatgaagcaacacagctgtcttcatctaagactagaactctgcttgttgccatttcccagcaggaaggggttgaaagaaaatttatgtagannnnnnnnnctacccagtagttgcatatatattgtattctcacatcctattgacccaaacttagacatatggccacatctgtcagccagaaagggtgggcaatgttatctatagctgtgttgctacgtgcctattgctaaaaaggctaaaaaggaagaaggggaacatggatgctggtgaacacttggccacctctgacacagataattgctaaagtaataagaagagatggaaattaaatgtgctaagctaggagactttctaaagaaagggtttgtcatgctacgctgtgccattcatgtgtttttttgctcatgctgttccttgtgcctggaaattctccccctaattcccctgagcagtggatgcagtggataccctccccagatcccccccaacttccctgagtgttggctaccaaaagctctgagtgcacccagggagctaagtcctcctgcccacaggcaataaatggactgacacggggtagactaaaagaaataagagggcacatcaattcaattgaaatgtgtggggaccttacctggactctgaattaaacaaactgtaattttttaaagctacaccttttaaacatgattggctatttgaacactaactagatatttgatgatattgaggaattattgtgaatttttagtgtagtaatgatattgtggtttgtataaatatatttagggataatatgatgcctcagatttgctttaaaataacacaggatgaggataagtggtaggactgcaagggaaacaagactggccatgagctgataactgttgaaggtgggtactgggtatataagggctcaccacaccattctcttgatttgtgtctatttcccataataaaaagtttaaagagagagaaccgatgaaggggagggagagagtcaagcacacaataagagtgacaaacagtgccaaatcagcccacagtattaagttttcacatatttacataaatatcacctggaatgcaatattgaaattaatgtatatcactagaat

SEQ ID NO: 327183 - DNA, 1066 bp, Homo Sapiens
  misc_feature (164)..(164): n is a, c, g, or t
  misc_feature (744)..(759): n is a, c, g, or t
  misc_feature (1035)..(1035): n is a, c, g, or t
gtcagtatttgtgcacaaaccttggaggccatttcaagtcctggtttagaattctaaactttaaggagaaaagctctttttggtgttggttctgatcccagaaaaaggagtccactggacatgtgtttttgtggggagggaggctggtataataaaggacatcnttgaggtggacattttacttattgttctccctccatgtggaaggcctcctccgtcttacctgtggacaaggctctggtccagtcacctcttctgggaagccttcttgattgatatctcctcccccaaaaccttcataccagaatggtctttcttttacctccatgactttccaaagcagcacttggcagggtttgttctattacatggtagtcaattacatatgtttcatgtctcccaataggagctcctagaaggtataaatgatactctcttcatctaggtagttcccacaggagccaccacagcctgggatgttggggtgtgcccaggcagtgcttgaaatgggaagatatggtgtcttgggatgccttgggatgattccaaaacagcattacagttcttctttggcattgaaaatggagtttctgctagcttgacaagtgtctgatggagctgggtcccattgccaccttccccttacagaataaacagcagggcacaaagaggtagaatgacttgtttatagaaccagaggcaggctgtgaattgctgtccctgagtattcagcctggggcttannnnnnnnnnnnnnnngttctcattctccattatcttcctcttttttttcaagagacctggaattactccaacagctgcatacaggtcaagagttaaagtcccccagggaagatcaatttctataaaacagaagacaggaacttggagcttctgatcccttggagggcttatatcttggagctctggagggcataaagtctctagaagcttcctgagagaggatgggagaggcattttgcttggaaaacacttatggccttgcaagatgagggagttcagggtgaggctcangggtgaggagtcggggaacggctgcttgggg

SEQ ID NO: 327184 - DNA, 757 bp, Homo Sapiens
  misc_feature (406)..(406): n is a, c, g, or t
acaattagaaggttcacccttctctctgctttccaaaatctagatagaaaaggcaagctgtagaaaaattagtgcattcttacttggaaagatctaacagatagatagaattacctaccatcctaaagatggtatgagaacgactgcttcctttgattcatttttgtttctccataatgcctgctcttttctccctttgtaatccatttcaaagccatttctgatgtatatacaacttcttctgtgagatcagcaacatacacattcctattgacatcttctcgaataattaaaggtttcattttttgagtgccacagagtaaatctgtaatggtttcattgtatatttccatgtaagatacacgtaagagaaattccctatcaggaaacttcttaattttttggnaaaatgtcatgaattgccctgggtataactcccaaatgatcttctgaacccatcatggtatatgtttttcctgaagcagtctgtccataggcaaatatagtaccattgtagccttgtatggcagaatcgatgattggtgctgctatttcttcatacacatttttggtagtttcattaccatgaaagacacgatcaaaattgaaggatttacttccatcaacttgataaatgacattattgtcagttttccagtaaacttgggcagtttctccaagtaattcttctctgctgttcagcggccgcactcgcacgcagacggccacggctccctcgtgccgctcgtgccgaatt

SEQ ID NO: 327185 - DNA, 476 bp, Homo Sapiens
  misc_feature (269)..(289): n is a, c, g, or t
ggactgaagcccagatctttgacacccaaaatgaatgtgtgtcccttctgtctcgcggcttttcagatggatcacacaggaatgggatgaaataatgtacaaatcgctgccaatgtgagctggaaatccattgacacagaatgctcacccagtggtcactcctcaccaggtcccaccctcctcatctaaaacaggttggtgcaaatggcattcattcatttcatgcccactgacacccattttgccctcattattcagtcactctaggnnnnnnnnnnnnnnnnnnnnngcgctttcaagtcctttggctgtttttagcctattgttactgtcacataggatgatctacatcacccttgggaaacaagggattactgtggcaaggaacttttgcggcaagtcacagagaatcaactagtcccagcgtaccatctgacatgcagcttgacatatggaggtggcagcttatatcagct

SEQ ID NO: 327186 - DNA, 761 bp, Homo Sapiens
  misc_feature (741)..(741): n is a, c, g, or t
tttattatgagcaagatgttatagctagtctctaaaatagtgtgttagaataaaatatagttggatattatcaacagaaatcaaatatagagatgaatctctgaacaacacattttatttgagacagtagaattgtaatttgggcatacacacagactgcattgggtctttgggtatgtccaaaggaacaaaggaaaaggattgaggtttttattagagaaatgttatgcattgttttgaaagaaaatgcattggcactagcgaagtttttgggagctggcatgctctgatttgtgagtgactgtggtaggtaaaactagtcttagagttatagcagttcgtttccgcagctactaggtaaaactgatcttaaggttatagcaggtcatttcagcagctggcttgccagataatccctgggcaggtgcttgtgccctaagtgcttttcttttccttttcttcctccctcatctcatgactgtaatttaattgggtatgacaagataattccaatttatataatcaattttcacaatatccaatgcatccaaaattaatttttctttatatttttatgggttacttgagttccatgtacttgttataatgtattgaagtttataattaatctttcgaatgtaaacttaggataattagaatggttgaagatatgatgactatattatagaaatactcattgggctatgcagttaatatgcttcagacgtggtatgtaaatgntgatggaaacaatatttcat

SEQ ID NO: 327187 - DNA, 380 bp, Homo Sapiens
  misc_feature (65)..(65): n is a, c, g, or t
ataataatccaattttccaccaatatccccaatgccatcccaaaattaaattttccctttataanttttaatgggttaaccttgagttcccatgtaccttgttataatgtattgaagtttataattaatctttcgaatgtaaacttaggataattagaatgttgaagatatgatgactatattatagaaatactcattgggctatgcagttaatatgcttcagacgtggtatgtaaatgttgatggaaacaatatttcatgtcggttcagattcagtgttttattttttgaaacattgcagtggaatttttatgtttaattctgttagctggtaacagaacttctggggcaattttgtttcagtttgttgtaactcagaa

SEQ ID NO: 327188 - DNA, 317 bp, Homo Sapiens
taccttgtgtttctctcagcttctcagatgaccaagatggtcatctgagaagctgaggatggagaacccaccaagccccgctaggagccacctagactggatgcagagcatggtgagctccctgcaggttctctgagaaggggtggatggcagcctgctccttgcctttgtgccctccaggccccaaagtcagggaaccaaaagaagaaaggggccgtagctagggcagagctccactgcaatgattgttttaggggtaggagccaggattgccgtctgtggacactgaaatttgaatctcatatacttttgtgacg

SEQ ID NO: 327189 - DNA, 787 bp, Homo Sapiens
  misc_feature (430)..(430): n is a, c, g, or t
  misc_feature (709)..(709): n is a, c, g, or t
  misc_feature (755)..(755): n is a, c, g, or t
  misc_feature (775)..(775): n is a, c, g, or t
gttcggcacagctaaggtccctgacaatcctgagatcttgcatcttgtctatttcaggtcaaaggtgcctacatgctccttctagctttgtttccctgatgttccttgccacctgctactcctctctgagctacttttccaggttccacagggagaggttcagctgtccgtggtagacatgagggtagagaatgaggtggttgggttccacttacctttctatcatcttgcagtatggatgtctcttgactggtaccgtgtagacttttgagggcacacaggagtctgcagagagatactggggacattgaggcagcagcagtggggttgggaggcagaaatgaggacaggaacatttaccttgtgtttctctcagcttctcagatgaccaagatggtgctgcagatggtgctgaggatggagaacccanccaagccccgctaggagccacctagactggatgcagagcatggttcagcgagttctccaaaccagcctcccaggaatgccattcaccatggctgtgaggagaataaagaagagagcctgactcctctcctgaggccccttccccaccctgagccagcaggatccacggagcagaggtcatctgtccccagcttggcccactgagggcagcatggctgggcccaggatgcttgtctctcagctcccatcctgtgtacttccacattggtttaaccagagnaaaccgaaatctacaattgtcataaacacatttaaatgtgcagtanaatcagccatacaaattgtnaacataaaaaaa

SEQ ID NO: 327190 - DNA, 816 bp, Homo Sapiens
  misc_feature (213)..(633): n is a, c, g, or t
gagcttcaataccctgaaatatcattttgcaaagggtgaaaggtggttattaactgacctttaagtgccatctaaccagatctttcattgtctcaatattccctgtcaccatttagcccagaataaatccattcatgtctacaaaaaaaagaagaaatggattcaaagctccatggaaaatatctacatgatccaagtgcaaaatgcaccaannnnnnnnnnnnnnnnnnnnnnnnnnnnnnnnnnnnnnnnnnnnnnnnnnnnnnnnnnnnnnnnnnnnnnnnnnnnnnnnnnnnnnnnnnnnnnnnnnnnnnnnnnnnnnnnnnnnnnnnnnnnnnnnnnnnnnnnnnnnnnnnnnnnnnnnnnnnnnnnnnnnnnnnnnnnnnnnnnnnnnnnnnnnnnnnnnnnnnnnnnnnnnnnnnnnnnnnnnnnnnnnnnnnnnnnnnnnnnnnnnnnnnnnnnnnnnnnnnnnnnnnnnnnnnnnnnnnnnnnnnnnnnnnnnnnnnnnnnnnnnnnnnnnnnnnnnnnnnnnnnnnnnnnnnnnnnnnnnnnnnnnnnnnnnnnnnnnnnnnnnnnnnnnnnnnnnnnnnnnnnnnnnnnnnnnnnnnnnnnnnnnnnnnnnnnnnnnnnnnntgctcctgcctgcagctgtaagttctcttcctagagaaacaagtgtgtgccaatcagtaggtctttgtggaggcctcctagacccctgagatgctcattcgagggccctagggtgagggctggggatgggttttgtcatctccctgtggtcccaacatgcagccgggattgagcaccacaggc

SEQ ID NO: 327191 - DNA, 403 bp, Homo Sapiens
atacgtggtcccagcacagactaaggaatccaactatcattgggcaagccatgctaggtatgcatgcctttggggctctgcaggggatagcgctatgcagggatggttgagagctggttttggggttgagacacgtgggaaatacttggactttgggctgagcctgtggtgctcaatcccggctgcatgttgggaccacagggagatgacaaaaccatccccagccctcaccctagggccctcgaatgagcatctcaggggtctaggaggcctccacaaagacctactgattggcacacacttgtttctctaggaagagaacttacagctgcaggcaggagcatgtcttaatctgctttgggctgccataagtaccacagactgggagggtttaacaacagaa

SEQ ID NO: 327192 - DNA, 848 bp, Homo Sapiens
  misc_feature (397)..(428): n is a, c, g, or t
  misc_feature (529)..(580): n is a, c, g, or t
aaacccaagaagccttctttacccctcccagcgtcaatgggaagaggggtgtttagtggaggttcttttgctttttaataaatttcatctttatcaaaacatgcagtatccacagctgcacttaagcatgcctgtcactggagaatttcattttttggagtaaacttcagaaatgacacagcaagactgccaacatcatcctgtcttcaaaggcatttttggggatatgagatcccgaagctgttatgggaagggaggaatactgacatcagaatttagccctggatgaggaactatgaggagattcttgagcatgagggcatcaagaaaacagaattcccatgaatagcgaaggagaacagagatttctgaaagggtcataggataggtatagacnnnnnnnnnnnnnnnnnnnnnnnnnnnnnnnncaaggacaatagcagctaccgtttatttagcacttagtgcatgccaagctctcagctaagagccccacatgaagctttcattcaattcagtggccttcagnnnnnnnnnnnnnnnnnnnnnnnnnnnnnnnnnnnnnnnnnnnnnnnnnnnnttgaaaggctgaagagatggatgtggggccctaacccaggcatctctgacaccatggcccacagcctcagcaggtggccccttctccctcaaggtgaaggactgacttcccttctccaccttcaactcccacgacagtgaagacggaatattcttgttgcaaaactttcccaagaatggagccaaggagggtgacttgattcctccttctcttggggtcccctcatccagctgagtgtgtcacttatctgtgacatagcacaggaaag

SEQ ID NO: 327193 - DNA, 1043 bp, Homo Sapiens
actgaagataaagtaagtgctgtttgggctaacaggatctcctcttgcagtctgcagcccaggacgctgattccagcagcgcctttaccgcgcagcctgaagattcactatggtgaaaatcgccttcaatacccctaccgccgtgcaaaaggaggaggcgcggcaagacgtggaggccctcctgagccgcacggtcagaactcagatactgaccggcaaggagctccgagttgccacccaggaaaaagagggctcctctgggagatgtatgcttactctcttaggcctttcattcatcttggcaggacttattgttggtggagcctgcatttacaagtacttcatgcccaagagcaccatttaccgtggagagatgtgcttttttgattctgaggatcctgcaaattcccttcgtggaggagagcctaacttcctgcctgtgactgaggaggctgacattcgtgaggatgacaacattgcaatcattgatgtgcctgtccccagtttctctgatagtgaccctgcagcaattattcatgactttgaaaagggaatgactgcttacctggacttgttgctggggaactgctatctgatgcccctcaatacttctattgttatgcctccaaaaaatctggtagagctctttggcaaactggcgagtggcagatatctgcctcaaacttatgtggttcgagaagacctagttgctgtggaggaaattcgtgatgttagtaaccttggcatctttatttaccaactttgcaataacagaaagtccttccgccttcgtcgcagagacctcttgctgggtttcaacaaacgtgccattgataaatgctggaagattagacacttccccaacgaatttattgttgagaccaagatctgtcaagagtaagaggcaacagatagagtgtccttggtaataagaagtcagagatttacaatatgactttaacattaaggtttatgggatactcaagatatttactcatgcatttactctattgcttatgctttaaaaaaatctggtagagctc

SEQ ID NO: 327194 - DNA, 776 bp, Homo Sapiens
ctcagaatccactcccaagggtgatcctgaagggttcactgtcaccctccggggtaagccacctcttttccccaagcgattcattccccacatgaaactcaacagtccttctatcccttcttcttaacctttcaggagtcacccaagagtcctgcctgcctccgcttacccctccaactcacttcctgctcccagggcccaagggccctggcctcactcacagaaactctgtctttttcttctcttctttatccttagtcctcagctttgtcttccagggagagcctggtgatggggagccctcatggtagagaccactcgaatctgccagctctgcctctgggggcagaggaagagaaggtagaagggggttatccaagggaggccagcgaaggcccagaagaaacaagtccagaggccttccaagaaggtccctaggaaaggaggagacccacggagcccctggcacacacagggcccacatgataatattgggaaagggggcaggggatgagactgcctatttagtataaagatagctcatattaacttaaaattaacttaaatttctcatgaaaggaaaccaggtattattttctataatatagaaatttctatttgcccgctgtcaataaaagatcatcacaaaccacaaaaataaatactgtgaaaattaaaaaatgataagaaaccctagatcagtggctctgaaccagggacaattttgcctctgcggggacatatagcaatgtttagagacaatattggttatcaaa

SEQ ID NO: 327195 - DNA, 426 bp, Homo Sapiens
  misc_feature (340)..(340): n is a, c, g, or t
  misc_feature (342)..(342): n is a, c, g, or t
  misc_feature (346)..(346): n is a, c, g, or t
  misc_feature (382)..(382): n is a, c, g, or t
tgtagagacagggtctctctatgtttcccaggctataaaacggggttttatagatgaagaaagagaagcacagagaggacagggaagctggattggaaccataccttaagctcactttactagggtctcagaatccactcccaagggtgatcctgaagggttcactgtcaccctccggggtaaagccacctcttttccccaagcgattcattccccacatgaaactcaacagtccttctatcccttcttcttaacctttcaggagtcacccaagagtcctgcctgcctccgcttacccctccaactcactttcctgctcccgggggcccagggcggggcncntttnacttcacaggaaacttctggtcttttttcttctctnctttatccttaggtcctcagctttgtcttcgggggagagcgggg

SEQ ID NO: 327196 - DNA, 483 bp, Homo Sapiens
  misc_feature (35)..(35): n is a, c, g, or t
  misc_feature (41)..(41): n is a, c, g, or t
  misc_feature (46)..(46): n is a, c, g, or t
  misc_feature (51)..(51): n is a, c, g, or t
  misc_feature (66)..(66): n is a, c, g, or t
  misc_feature (89)..(153): n is a, c, g, or t
  misc_feature (278)..(295): n is a, c, g, or t
ttttttgtaatttttaggttaagaagggggtttcngcccangtttnccccnggctggtctcgaaantccctggaccctcaagtaaaccnnnnnnnnnnnnnnnnnnnnnnnnnnnnnnnnnnnnnnnnnnnnnnnnnnnnnnnnnnnnnnnnncaatgaagcagctctttaaagaaataagacatgaaaataggtctgtcctggtatactacacataattgaaatgagtaacacctggaagaccaatattgttacgctatgttctgttaggatctttnnnnnnnnnnnnnnnnnnctcagatatttagtagtccattcgtgcttaaaatattcatatgcatgagaagcctaaagaaaaaaaacacctctgtacatgatgatcaaaagaaagttataaatttttttgaaattgcactgttatttaaaccactttcctgaagtcagaccctccttgtagctggcacagtttttcaggtcaattgg

SEQ ID NO: 327197 - DNA, 880 bp, Homo Sapiens
  misc_feature (281)..(281): n is a, c, g, or t
  misc_feature (397)..(397): n is a, c, g, or t
aagggagacactctttgaccttcgaagaacgggctcacacctcaggcgatagaagaggggagtacccaggaggcacgatctgcaacatagaggaccaaaaccacaagagacaaccccaaaaaagttttttcttagcgatcagatctgtaagccaattatactactggtcagtattccgcagacacgtctgcagagagttttctgtcatcaatgtgaccagcactcttatggtctggacaagtagcactaataatatgtgagtagtgtgaaatcatctgccnatgagaagctaccaagtacagcaccagaagtacaaataggcctagagcccaggcgttcatgaccccagttagcaacactgctgcggtaatgcaggggccagcatgcagcccctgcnaggtgctcaataaatgcttgttgaaggaatggccgtcccaggaaggtgtctctctcccgggaaggccactatttcactttaaaccagcctaagctccatctgttcaatcctccccatgaatccaaagatttgtgtaggaaaaaaaattaaatctttgctgtctcaacttccaaacgacttccctttccctttccctgttagggtattggggccaggctgcatggatcctgtggaatggccccactagcctgggcctcagggtgggactgaggggtcacacaggtgggactgaggggtcacacaggtggggaaaggacatgagaacagctttcctttacctgaccagtcctgagctccttggggtgggggcctggaacagctgcctgggggcacaagaaccatgtccttactttagggaaaactcagcaagccaaggtgacctggaggaaaggggattcctctgtcatccgcttcctgtgctag

SEQ ID NO: 327198 - DNA, 835 bp, Homo Sapiens
gtaaaagcatgtttttttaacacaagaaacactcgatttttagttagcagtactagtaggttaagaataaactatagaaaatataaatctaaatagaaaagcacagtaggcatgttatttttatctgccaaatgcctgttagaatcttccagtgatctctcaagtatgatttggggaattgctctcctctattcagatcttgtgattctggtgcagttcccaatcacagcaccttgctccacttctggctaatcatcacactctatctgcagaacagtgactaatgcaggtatagatatttggctgaaacagctcagaattgttccttgaaattttttactgcacaactgggaaagacctctgcagctaaagggctgtggtcccagagctgctaatggccatattcctcacaccatgaagagcctaaggaaacaaaaaccatgcagatgccagacaggaaatggagacacagaggctgaagtccatcctggtaagcagggaaaggactagagggagcacagaagggaaggagaaagaataggagagaaagatcagaaagggaaaggaacaagagtgaggggagccagcagaaagaaagggcagagaatgaagcagaaagaaggtgggtagttgttatgggctggatgtggtttgtctccaccaaaatttatgctgaaatttagttggcaatataatgatgctgagaagtggggcctttaagaggtgatgatgttgtgagagtgattagtgcctttctcattggagtagaagtgagttctccctcatgggactgaatttgctaccacgagagtgagttgttataaagtgtggttgc

SEQ ID NO: 327199 - DNA, 468 bp, Homo Sapiens
  misc_feature (24)..(24): n is a, c, g, or t
ggggttttatcaaggtttataaanctgtcttcagtgttcaggttggagaatctcctataaaagtttccttgctgtccttgcacaatatacagttaataaaagaaatacatgtaaatgcttttaatttagtagtatatccccttatatttttaaagcagtttcatcctcaagaagagcatttaagataatgtgaattttagcaaaatttgtctcacttttagatactatttgtatgtattattgctgtatctatttgaactcagcagttaaccacatttctctctctgttttgaagctaaatgttgccagctacctacaaatgatttgcttaactgagaattttagaactgatgtaaaagactttgtaaccttgttaactgcaaatacttgtgatatcagaaaaagtatcctttacttacaattctggattagaagtggaggtggagttttagaagaacgaccattaac

SEQ ID NO: 327200 - DNA, 1099 bp, Homo Sapiens
  misc_feature (75)..(75): n is a, c, g, or t
  misc_feature (169)..(169): n is a, c, g, or t
  misc_feature (187)..(187): n is a, c, g, or t
  misc_feature (738)..(750): n is a, c, g, or t
aaaaccgacgcccccacaccccgctctcaccacccccttcgggtcttcttagttccccgaaatttgtctcaagancgcagcagacttcgaggtctagctgctgacgatagagtgttcaggcatgtaggacaacttgttaacgataagtgaagacatggccattatcgancattatgagtcattatgnagtacatatgaatatgtgtgaagactagaaataagcccagaaaatgacaccagatcatgctgggatccccttggtgattatgagtgagtggacttagtagtgtgtgcctagaaacggatcgctgctgtgggccaggtgagagatgtgagggccaacccaaaaggcaactccaatgtgaatgatgatgagaaaccagtaaagaacttcaggatttggtgactaattagatggagggaatgagaggaagaaacgaagaatgactcataaaaagctataaaatctcattctcctctatcctgggtagttctttctatctagatactaatatactaataattgtttccctccaccttaatctttcccttcccttcccatttatctcaattattctctttcctgttccctaaaagggtcccttttccttcccacccctaaatcatctacttcctctcctttatcccctgcccaaatttctttatgtgtttcagttcccttcccatcttagcacagtacagatttagatatatggtacctcagtttacggatgaagnnnnnnnnnnnnngtctcaatactactgctttcttgctacgtgaccttggacagggcaatgaacctttctctacagctcttcattggcaaaacaggatgatagtgtctcttgcagacggtatgctctgagggtccaaggggatgttgataaagtacttagttgaaatagctgactcatgatttagcaataagcttttgctacagtttttacagatgaagaagttaagtgattggcctaatgtcactacctagttacaagttagttgcagacaagctggtgggctgcagtgcaaaactcctggtgagtaaactattgttcactttattttcctttgctgtctttctgcctgcccagttagctt

SEQ ID NO: 327201 - DNA, 649 bp, Homo Sapiens
ttgcacaagaattatattaaaaatgaaaacctcccttgaccattgttcctcccgctcaccatcactcaatctctctcctcttcagtgaagcatccagaaagagttcctgttccaggtctatactccccttcccattcactctgcttcggataaattctgattttgacaattacataaatgcccacctgggtccagcctcatcttatttctcctcctccctcatcctccccattggcacttcaccctgaaaccacacccccagcaaggagctctacacacatggatcctcctagcctttactcaagccgcatggtaagctcttattgatttttcaacacacaccctaaacggcccttcatggtcaagtgtccctcaacctccgtagggaactggaagctccccctctggacttccaaatgtcacagacttgtctctattgagacacatatcactccaatgaccgtgtttacatgttgttatagatggaagtatgtctcccctaaatctgtatgttggaacctaacccccagggtgactatatttggaaatagggctttaaaggaggtaactaagattaaatgaggtcataatgggagggcactattccaataagcctggtgtctttataagaggaggaggagacatcagg

SEQ ID NO: 327202 - DNA, 481 bp, Homo Sapiens
tgagagtgaggggagaagaatcataaggtaagctctcagagatacgagggtcaaggagaatataatatcttacattccctaacgcacctcttgctcttttgtgtttttgcatgtgacttcatgctggttgtcctctggactgttgtgaccttggcgccctcagtttcctcatcttattggtccctgtacttctaatagtcagtgggctgacagtccacacccctctgcagggctccagacctgggctgtctgactttccagcaggctgtcccctcggtcatgccgcagacttttcacactgtgtccgaagctggagccttggatctgttcctggaacttggctgcccctctttttgtcctcttcccattccactccactgtttgtgctagaaagtggggagatattgttggcaccttccctctcactcctacatattagccaaaggttttatagatttcacacctaagcagtgatgtttca

SEQ ID NO: 327203 - DNA, 782 bp, Homo Sapiens
  misc_feature (46)..(46): n is a, c, g, or t
ctttaataagttataaaagtaaggagtcaaattttacattacagancaaagatgtattggttgttgtatcggtaagccagaattttgtgatttgagttcagcaccttgattcagtatagtggctacctgtcatacaggagggagtggaatcataaactgctttcatctgctaagatgttgctattgagcaccatgtatatactcaaaacaaacagaaaaaccttaaaatacaaatgaaagccttatacatgaaattccatgggttttccaaaaggagtaaatcagagagctgggttccacaaatctaacacgagtctgcccactaaggagaagtgactcagggacactgttgcagattttctagtgcagcggaaggtctgagtctcatcatgcggttaagaaactcagctagaagacatctgtctgcctcctctgggcgcccaggagcccctcagatgcagaagaagctggcttgcgaagatcaggactgttactaagccggttctccaagtggtccccagctcagagatttgcgtcgtttctcagagcccggtgaacgttggcattccttggacagacttttgaggaccatccggctctagaggactcttgatatatggctcaaggattgaggatggcacagagggtcatggctgtcagtcccagagggcaccttgctcccttcagcggaagacaggtgcccagggaatgtcccagctgggcctcttcccaaaggcttccagcctcaagccaggaagccctgtctgctactgtgccgatat

SEQ ID NO: 327204 - DNA, 366 bp, Homo Sapiens
  misc_feature (248)..(248): n is a, c, g, or t
  misc_feature (256)..(256): n is a, c, g, or t
  misc_feature (262)..(262): n is a, c, g, or t
  misc_feature (300)..(300): n is a, c, g, or t
  misc_feature (323)..(323): n is a, c, g, or t
gatttgcaaaaacacagacattttaactttaataagttataaaagtaaggagtcaaattttacattacagaacaaagatgtattggttgttgtatcggtaagccagaattttgtgatttgagttcagcaccttgattcagtatagtggctacctgtcatacaggagggagtgggaatcataaactgcttcatctgctaaggatgttgctattgagcaccatgtatatactcaaaacaaacaggaaaanccttaaantacaantgaaagccttttacatggaaattccatggggttttccnaaaagggggtaaatcagagggcntggggttcccccaaatcttaacacggggtctgccccacttagg

SEQ ID NO: 327205 - DNA, 1186 bp, Homo Sapiens
  misc_feature (1129)..(1129): n is a, c, g, or t
agcacgtgcactgaaaatcaatttaagtatttactcggagttgtcttgaaggcccaatgggaaatgtcagtaagggcacatgagaaaacactttaagaacctattcttccaaagatctttccagtatcttatgacaacacagtaaattatacccactccaactgcaaaagctgaaactactctgctttctcacttacctacacttttgactttccaaatacatttctctcttcggatatgagctgcaaactccttatataaaggctccaactctgcagccctaattattctagttggcccaagaaaaatcctaattgttttatctaaggagacggaattttccaatactgtagaggcatgtgtgtgtgtttgctttaaggaagctgttttggtaataaaaagtcactgaaggtcataaattcatgttaacacatccagtgtacatgaagtaggcaccgagttaaactatttgtctactatatagcatgtcatcttaaaagccttattttttcctcaaaatattaactttatttttctccctgtaaaatcaagacacagttaaaatgtagccttcctcattttctgggaatactttctaacaagatatgcttctttccaattggacttctaaatttctagcaattctaacagtgcataaaagaggcaaccccaaaagtgtagcaggtactgaataacagatttgcagccttgggtatccacattaaaatttgaaatctaagtgaattacttcaagctgatttcttaggtcaaggagagattatggtccttaaatgcctgataaggtccacatacacaattttcaagtgcattattagtaaatccatgtgacagctcctacagctactaacctgcttctgccctcacggtaacgtgcacaatcttcatcgcatgtcctgggtggtggtaggagcagtagaaaccccctgggtcatgtcagatttagaaaatataagcaatggctcatacacgaattttaagttgtaacctacatgtgataagttgctttatcttccaaatgtaataaaaaccagaagttactttgaaataaattgaaggattagcagtggtgactgaggaataaaaattataatttaaaattgtccttaangctggaattcttaacttattgaccttatatcctacatattataggactttgtaaatt

SEQ ID NO: 327206 - DNA, 756 bp, Homo Sapiens
  misc_feature (32)..(32): n is a, c, g, or t
catctctagacatgaaagaacaatcgacaagnatcctctggacacagcagttctgagttatccccagatgcagtggaaaaggcagggatgtcttcaaatcagagcatctcttcacctgtgcttgatgctgtacccagaacaccctcgagagaaagaagtagttctgcatcttctcctgaaatgaaagatggtttacccagaactccatcaaggagaagcaggtctgggtcttctccaggacttagagatgggtctgggactccctcgaggcacagcctgtctgggtcctctcctggaatgaaagatatacctagaacgccatctagagggagaagcgaatgtgattcttccccagaaccgaaagcttttcctcagactcctaggccgagggagtcgttctccatcatccccagagcttcaacaacaagtgtctttaccccccaggagagaaagaagcgggtcagaatcatcagttgatcataaaactgtggctcggactcccctggggcagagaagtcgttcgggatcctctcaagaacttgatgtgaaacccagtgcatcccctcaggaaagaagtgagtcagactcttctccagattctaaagccaagacacgaaccccacttcggcagaggagtcggtctggatcatctccagaggttgacagcaaatctcgactatcccctcggcgcagtaggtctggttcctcccctgaagtgaaagataagccaagagcagcacccagggcacagagtgg

SEQ ID NO: 327207 - DNA, 862 bp, Homo Sapiens
atacctttttttacgttttcttctccatactaaacaattatttcttctggcttaccttccatttcactaactccttcttcatctttttattctgttgttaaaacacctatccggtttttaattttgtttgtaattttcatttctatgatttctagttactgctaagtcatattttatagtttcctactctctaaggaatttcaagattgtcatatttctttggtaatggggcagttattttatagtctctgataattccaaatctcaagtttttgcaggactatttctgttgttcccagtggttcttacccttatgcatggttcttattcccttctatgcctaattatcttaggtgagttagttattttacggtgaaaaaattacttataatcttaaggcctaggggtgaagggcagcttcctccagggtgtccaagagacaacacctgcctagaatcactctaatccaagttcgagacttggttccttggcccacccagtagaggttaaccccgggcccacaagtaaggatgcagactattcctgagtctcctcacccccacaaagcttttaaaactcaaggtcaagtggtgaaatgtttgcccttcaggacaagagtaattctcacttctgtcaattgagttccccataacccagcccttcaaattttctctacttttcaactttctggtgttttcacaaaagttttgttttataattttacaacagtgttggttgttttcagtaagaataactaacctcaccaactctgggaaccataccttccatatcctttattctcaagaacaatttatgaattagccagaactactttagattgcgaggttaccaattcccaatt

SEQ ID NO: 327208 - DNA, 463 bp, Homo Sapiens
  misc_feature (13)..(13): n is a, c, g, or t
  misc_feature (35)..(35): n is a, c, g, or t
  misc_feature (41)..(41): n is a, c, g, or t
  misc_feature (59)..(59): n is a, c, g, or t
  misc_feature (64)..(64): n is a, c, g, or t
  misc_feature (163)..(204): n is a, c, g, or t
  misc_feature (215)..(275): n is a, c, g, or t
tggttaacaggangcaagcccacccataccccganccgacngtaagaaactttctgcangtganggaaaaggatctgtaatctgttctgtacagtatggtagcctactagtcccatgtgattattgagtccatgaaatgtggctggcgttcatgagtaactgnnnnnnnnnnnnnnnnnnnnnnnnnnnnnnnnnnnnnnnnnnagtcacatgtnnnnnnnnnnnnnnnnnnnnnnnnnnnnnnnnnnnnnnnnnnnnnnnnnnnnnnnnnnnnntagtcagttgtgttaggtggttggttcatggcagttttttgaatattaaatatgaatacataaatacaaaagttaaataaaagcctaagcatggaccagtgatgaaagtgtgtcatgaaccaaatattatatccatacatttctcaacagatgaagtccattatgtaaaggtttctgtttctccagtt

SEQ ID NO: 327209 - DNA, 485 bp, Homo Sapiens
  misc_feature (307)..(307): n is a, c, g, or t
  misc_feature (450)..(450): n is a, c, g, or t
aaaactatacctgatttttttcttttccaagaaatatgtattttataaagtaaagtatacaaacaaaacaaaacaattggtttggagctgggcctgcctgacagcctggggccataaaaggaaattccctccagttcggggctgcagattcaaggggcggagcagggggcggtccgtggtctgggccagcagcctccggatgccttagtgttgtggtcacttcctgtgtgcgactctaggcaaggcttggagcttgatcaggggtctggccatccagatgcccgtacagctgaaggggttggggggntgttgccttttaagttaatcattttcctgcacaacttgcttcgcatcttgctaacacagaaatagccaaaagtttttccttgagatgggattatccccaggaagcattacgccccctgtttatcagttggtcttgcctcctanacctttaatttgtgccctgacttatcagcttccag

SEQ ID NO: 327210 - DNA, 1084 bp, Homo Sapiens
  misc_feature (822)..(822): n is a, c, g, or t
ctaaattcaatcattgacagatttaattgtcctaaaaatactttcatgcagaggtgtctaaccaatgtcctgagctgcctgtttaggggctaccgatttcatactgactttggtgataagtttgtgtccgttgccctccacagaaggcctttttgccatcttctattatctccaattccattcttattaaatagggacatctcttcctgcaggttttgcttttacagtattttgtgaatatgaaggattctgttattttcaatcatttctgatctactgatcctggatgtaaagaaagagccaaaggaattgatgtcaataaaactgaggtcaatctagaagtgttcagtgttcatagtacatggtaattgccataaaatcctcagtgctcacaagaatactttaagaaatctccaaattaaaattgaagaaaagatagagactaagttgggaaatattataaaaggcaagatgagagaacttgtgtgcttttgttttgtttatgttaatattacatataaacctaggtagaaaatacagcccctctgagctaggatgaaggcatcaagaacttcccctttcagcagccctcaagggagggacatgaagtggggaggatctgcttggcaggggtaacagttttattactgacactgttagaatggctggtgcatggtcataataaaaaccagacctattttagtgaggtttactgtcattttaaaattatctacagacaatgtacctccttattgcctgtactggggtgtccccactcctccccaacctcccccaccatatgcccactgccccatgtaatgnctagaagaggtcaggacctcaatatcatgtcccatgattacttgagcaagccagtctacatcttctgtataacacaggagaacccaagggtgacacataaacaatgggcccactatgggtgacaaagatatggaattctacaatatttaacatataagttttaaaaacatttagaaataattttccatgagaatttctacagtaaacattctaagatttcagtattttcttctgagtcacactaattattgagtctgcttta

SEQ ID NO: 327211 - DNA, 873 bp, Homo Sapiens
  misc_feature (650)..(650): n is a, c, g, or t
taaataaataaaacagtagccctcattaatgggaataaagtatcatctgagagtcatcccaaagcttactccctcgttgagccgatgggctggactgagactctggaacccacgggtcactggggtgtgttagtgctcactgaggagacagagctgttgcaatactgagttcaagcagcacgactgactcacataatgtgaagtgaaaccagacagagctccgaacttggtaccttgggtagcaaaggcggcttccaatgatgattctataccggtgaacaaagaaaaatttgctttgagaagctgagaaaatcgagctagacggcagtgaagtaaaggcttctcttgcaaaatctgagtgccgatctgtgatgggaaaaataacttccagataaagcaaaagttgatgtggacaccagtacccagtaaattactgtgaaaaaaaggcaacttctcttggtccagtttacctttagataaatgttttaagggtaaaaatatgtgtatttcaagatatgtcttatgtaaacttttttaagttatgaaaatcatccatattgaaaaatagaatggttttctattttgaaactgttttgcattgtcagttacttaagcagccattttacattttggtttttgagaacataatngggacctgtatactccttgtggggccgcattttaagactcctgacagctcatcctgcaaaattaaaatccaaaatctaagtcgcaaaattctcttttctccttcctcagttatttacttagagtgtagaacagacatcctcttagagttttttgtaactatcagttatcgttaacatcatatttttattctaaatccttccatagaaacactgcttgttggaa

SEQ ID NO: 327212 - DNA, 153 bp, Homo Sapiens
cgtagggaagcagtttacttgctagtttttcatgggtaggctcttcagagtttatctccagtatttgaaatgaatttttttaaacctcagatctgaatatattcaaacacccatatttcatcaagtctagggcatatcatatacctttaattt

SEQ ID NO: 327213 - DNA, 423 bp, Homo Sapiens
  misc_feature (151)..(151): n is a, c, g, or t
  misc_feature (396)..(396): n is a, c, g, or t
actactgtccctgttcattaatctatttattcggcaagaaaatattgataacacgcactgtcctgtgtactagagatggacagaatcatggacttttggcttcagggcctcacagttcagttggagagagcaacatggcacccagttgatntccagggcaacacaattagtgacataacagagacagatgaaagggattgcagaagcagagagagcatcctgactaattgaatatgcaaatggtgaagaaggccttccaggggtgatgctgtgagctgaattgtgtattagtaggaatttctcggttcaacacacagagaaataacaagttttctgttgtaaactattccttactaattaaaaacaaagtgggtatattcttgacctgactctgantttaattttttaagaatgtaatcataa

SEQ ID NO: 327214 - DNA, 802 bp, Homo Sapiens
  misc_feature (646)..(655): n is a, c, g, or t
  misc_feature (729)..(729): n is a, c, g, or t
aagaaactcatggaggactctctctcctaacacctggtactttttatattgaaactcttttagggaatagtgtttttaaatataaattttactaagtggaagtatttttaaggaagaccccaattgtggaaaaactgagatgaatcatctttcatcactgattaatatacaataaagtgcagatgtgacttttgttttaaaatatctgttcttattaaagttatgtaaataatttttatgtgtttctatttcacttattctttaatgattggtattaaaattataataaatcattaacatatacccattattattcagaagcattggaataatttcatttactaatgtgctgcttgggttttgtttttattacctccaggtgatcaagcacgtaattttttcctacaatcaggtctgccggcccctgttttagctgaaatatggtaaagtgttttgtagatgaacctaattttctgatagtattttgtttttttgtaatatagtgttaacataaaattgtttttagttgcattcctattggttattaagaatatttctgcccagcactttgggagtctgaggtaggaggattgcttgaggcccaggctgggcaacatagtgagaaccctgtctctacagaaaattnnnnnnnnnnttagctggtgtggtggccacacctctagtcccagctactcagggaggccaagatggaaggattgcttgagcccnggaattcagtgctgcagtgaactatgattgtgtcactgcaccctagcctggatgacagaatgagactctcttt

SEQ ID NO: 327215 - DNA, 669 bp, Homo Sapiens
  misc_feature (171)..(415): n is a, c, g, or t
  misc_feature (450)..(549): n is a, c, g, or t
cagacaaggtttcactctctcacccagcaggaacacagtggcacagtcactactctctgcagcctcgaactgctaggctcaagagatcattctgcctcacctctgcgccagtagctaggactacaggtgtgtccctccaagcccgctaatgggtttttttgagacagaatnnnnnnnnnnnnnnnnnnnnnnnnnnnnnnnnnnnnnnnnnnnnnnnnnnnnnnnnnnnnnnnnnnnnnnnnnnnnnnnnnnnnnnnnnnnnnnnnnnnnnnnnnnnnnnnnnnnnnnnnnnnnnnnnnnnnnnnnnnnnnnnnnnnnnnnnnnnnnnnnnnnnnnnnnnnnnnnnnnnnnnnnnnnnnnnnnnnnnnnnnnnnnnnnnnnnnnnnnnnnnnnnnnnnnnnnnnnnnnnnnnnnnagcatgagccaccatgcctggccccacaaagtgtnnnnnnnnnnnnnnnnnnnnnnnnnnnnnnnnnnnnnnnnnnnnnnnnnnnnnnnnnnnnnnnnnnnnnnnnnnnnnnnnnnnnnnnnnnnnnnnnnnnngtataagccactggcacgggacatagaatttaagggggaaagtcagttattttgttttccctgttctttcattcccagaggtagctcttaactgttcttttgtgttggttctttatttgt

SEQ ID NO: 327216 - DNA, 554 bp, Homo Sapiens
gcaatttcctaacatgggcctctgatattagggagattctggagttacatatcttgataatttaggagtaaatctcccttagcaacagttaattatgccttaatttattttgtgttgctaaagagcaaatgatgaacccattgagttgctgttgaagctttgatttgaatttagtaattcctgattgcctgtatcatgggactttctctagtattagacaatcttccagttcctcaaatgaggcatgttctattaggcagcaactggtgtgtttgagaccatttgtaagtattttaggtgatagacaataatacacatagtgccaatgataaagtcaatccagtcacaggaccacccagaaaatattggaggactctaaccaaaagggggccaccaaatcccaaaccatccttaccaaaaaatggaagaggggacactgaatttgatggatttaaaaattatgagaagatttttgttgggaatattcagatggcagtaacttctaatgtgactaagctatcctgttgcatagtgaaaccagtttgctaagtacc

SEQ ID NO: 327217 - DNA, 631 bp, Homo Sapiens
  misc_feature (417)..(491): n is a, c, g, or t
tgggagctagtgctctataactaatttggtctttctcagaaaccccatcttggaaccttgcagtgacttggactgtcttctgcttttttcagtctcttcagaagtgtccttgtcttcctggcctccaattgctctgctgatgttggtggctgtggctgctacttgtgcatcttgtagctgggttctttttccttttctctctcaaattggtcagagcccagcatctgcccccaggatgatctgatcttgtctctgctcttgctgtatttttgtcatgttctccgatggctttgtccacatgtccacctgaagtgtgtggagtaaagtcttctgatttctgctcctataagtcctggtgcagcaggataatttaggaatcagagagaccaaaggtcgaggaggatatatattatttannnnnnnnnnnnnnnnnnnnnnnnnnnnnnnnnnnnnnnnnnnnnnnnnnnnnnnnnnnnnnnnnnnnnnnnnnntaagtattttgtgggccggggagatctgtgcagggggaagtatattacagaagagagaaacaaagacagttattcaattgagacatgcattacattatttcttactttccaaggaaaaacacgttttatgacttgagttt

SEQ ID NO: 327218 - DNA, 443 bp, Homo Sapiens
  misc_feature (400)..(400): n is a, c, g, or t
  misc_feature (410)..(410): n is a, c, g, or t
  misc_feature (420)..(420): n is a, c, g, or t
  misc_feature (430)..(430): n is a, c, g, or t
ttgggagctagtgctctataactaatttggtctttctcagaaaccccatctgctgaggagcaaaaatttcagtttcaaagcttagtgtgaagtaaaaatataaatacagacagtccctgagttatggtggctcaacttaatgattttttgacataatgatggtgtaaaactgtcacaaattctatgtaatgtacagtattcaataaattatttgagctattcaatgctctattataaaataggcttccgtgttaggtgattttgcccaaatgtaggctgagggaagtgtcctgatcacggttttaaaggtaggctagcctaagctacaatggttcagtggggttaaggctggtaggtaaatgcattttcggccttataagatactttcaacttatggccncatttatccnggatgtaaanccccattggnaagttggaggggc

SEQ ID NO: 327219 - DNA, 765 bp, Homo Sapiens
  misc_feature (336)..(336): n is a, c, g, or t
ctggaacttacttttgaacaacaggtgtatcctacagctgtacatgttctagaaacctatcatcccggagcagtcattagaattctcgcttgttctgcaaatccttattccccaaatccaccagctgaagtaagatgggagattctttggtcagagagacctacgaaggttaatgcttcccaagctcgccagtttaaaccttgtattaagcagataaatttccccacaaatcttatacgactggaagtaaatagttctcttctggaatattacactggattagatgcagttgtgctacatggtgtgaaggacaaggcagtgctttctctcaagacnttcacttattgacatggaatgatatagaagatgatgcctatgcagaaaaggatggttgtggaatggacagtcttaacaaaaagtttagcagtgctgtcctcggggaagggccaaataatgggtattttgataaactaccttatgagcttattcagctgattctgaatcatcttacactaccagacctgtgtagattagcacagacttgcaaactactgagccagcattgctgtgatcctctgcaatacatccacctcaatctgcaaccatactgggcaaaactagatgacacttctctggaatttctacagtctcgctgcactcttgtccagtggcttaatttatcttggactgggcaatagaggcttcatctctgttgcaggatttagcaggtttctggaaggttttgtgggttccgaatttagtacg

SEQ ID NO: 327220 - DNA, 756 bp, Homo Sapiens
aattatgtgtgaatctggcatcccaaggtcatccaaggacattattgattaggttcaggatctcagtgttttgggtcatttgaagaagtaatctcattctgtcaaatgggtaggtcagtctcggggtggggatttgtcaaaggaggagagaggaactagaagaagacagatacccctaaaaggataaaactttcccatgactattttcatctttgccctggtctcacaggctagcaaactagattgattcagactacattcctggactggctttataaaattcctatggaatgaggcaggtataaatagatagaaatacatccttattaaagaaatacccatttgccttagctggaaatattaggttttatttttaacctttacattaatcaaacattattcaaaaaaaatcccaataagctagtcagaatcaaaattttaaaatatcaaattaaccttagaatagaccaattttatctactacccagaaaccatgggaaaacactggtgtctctctccaccctccagaacagactgactgctaccttccagacctaggaaggctctcttagtcatgaggtaagacagggccagcagaaaatgttgggcaggttgcaccctccccaagggtgcccaactaataaggtagagtccaggctgaaattcattcttcagctgttctggtgaggttgcaacagcctacagaaagaaaagttatttttctcattgttccactggaatgggcccttctctaca

SEQ ID NO: 327221 - DNA, 766 bp, Homo Sapiens
  misc_feature (656)..(665): n is a, c, g, or t
ttcggcacaggctcggcgtggtgtctaaggcaaaggactctgccagcttacatatttatttgaaagacacagacataaaaaggatgaatatgtttatataacttaaagcaatggttaagaaataggtaactaggtgaggctctgaagattttgaaagaagtgtgttacttgcttgctgctcctttaagggagataaacaaaacaaaaaacattcccataagcctaggaattctttctgggcccccaaggcaggttctcagctgcatttaactgtctaaagctactgaactcatgagttctagtgagttgtaaaagctctaattgaactccataggcttgggatttacaaaataggaaaatctgggggttagaatgaagcaccggctttacttttctgcaaagattaccttctaatgagatgaaaatcagctttcttcaataccaagatcaccattctttgagaacttccttataaggtcccagatcaaacacttgatcttactcagggagtaactgttttctttagtaaatgcaaagatttttttcttcttctaggcatcaaaggcaaaccagatacaacattaagatgatgggcattaaaaagatgaggtaggggtcaaaatgagcctagaggttgcatatatctacaataaagnnnnnnnnnnccttcctgcatagatggagcagctcattgaaaaacacttttattttttcaaagattcagggtcttgctctgtcacccaggctgaagtgcagaggcaccatt

SEQ ID NO: 327222 - DNA, 675 bp, Homo Sapiens
  misc_feature (52)..(62): n is a, c, g, or t
  misc_feature (400)..(400): n is a, c, g, or t
  misc_feature (557)..(565): n is a, c, g, or t
aaattttattaattttattcaggaaagacattgactgttaagtttttttttnnnnnnnnnnntgatgtcttgctattttttaaaaattatatccagactatgaatttaatatttactacggctaatcaactgctcatgtcagtaatcaaagtcagaaatgagccttatacgtacatctacattaaacacacacacacccctttaaggtgtgctcagtgtagattctaatgtcagtctgtccattcaacccaggcccaaggttgcatcacatcaccaagttgaatcatgaagacagcccagatttgactgacatggcacagcaggctccctcaccacagcccatgcaccagttactatttctgagaggaaggagagggttgtgatgaaaaactcagccccntaaacatttttttaaataatcaaaaaaaattctactacaatatggatatacatttaaccatcttgacaaacaaacatgaaccaggatatagtcaaacaaacaagaaatacaaattgccactacgcatatttaagttaacttgataccaacctaaagnnnnnnnnngctcaactgctgaagctagaatgcctaggttcaaataccagctctgtcacttactagctgggtgatcttaagcaaattacttaaccactctgcctccattttcatcatct

SEQ ID NO: 327223 - DNA, 489 bp, Homo Sapiens
aaaataacgacttgaggtttaattcacatgctacacaattcacatgtctaaagtgtacaattcgatggtttttagtatattcatagatacgtgcaaccatcagcatgaccagcttcaggacattctcatcatctcaaaaggaaactctgtctccatcagcagtcactccccgttttcccccaactcctccagccctgggcaacaaccaatcgactttccttagacaacgttttgagcccttattgggaggaattatagtcgaatgggaaaatccagtttggggacgtgggtgtaaactgggaatttgctttcgtggtttttccttgtgccttggggtggggcactgccattaaggagcattgcatccatccttttcgtcggtactctgcttgcacacggatgggcattttctgcccttgttacagattgagggaaactggaggctcagagacatttaagcaagggggcagagtggggcttgtccatgag

SEQ ID NO: 327224 - DNA, 447 bp, Homo Sapiens
  misc_feature (85)..(85): n is a, c, g, or t
cccacctcagccctccccaaagtgcctgaaattacaggcacaggcccactgtgccccaccctagatttttaaaaaaagaaaattncaaagaaggaggcaaaattacaggcccaataatccacacccttggtatatatggatctccctatttgtttcacttttccattagaaatttcttgagcatattaaaggaaacaaaatgcaagcttcatatgaaggcagggattttttgggtctgtttactggacagatcccttacactattaaaacagttcccaatacaaaggaggtacccaataaaatttgctaaatagaaattttattgtcttatgacaactaagtgtaatgtggtatgacaaatgggatcctagaatataaaaagaacaactggtaaaaactcaagaaatctaaataaaatacgtaatttagttaataatctatcaataa

SEQ ID NO: 327225 - DNA, 956 bp, Homo Sapiens
gttcatgctgcacatatttatcttaatgagtacatggctttttaaatgatagctgtaaaacaaaatagcactatttgcatttcagagtaatcagtaatatccagcttgaattttgtccagaacaaaaatggttctaaagaaaatctgtctcatgctgatcagttcaaaatctgaaataacagctttaaaaatctgctacaaaatgataatgcttcttgcatgtgatattaaaattttagatagacctggtttaatattatgaagacaaaaataagcaatgttaaacttttgaaaagactgcaatctatacaaatttgactacatttaattatcacctaggaactacttaaccccttacaatatgaactttgtcctttccactttattaaaattattcttgcagcatcagcaatataacctaggccaacaaatcagataacctacttttaaatccttaatccacttgttaactgtctccaaaacaaaggagaaaattatcttccaaggaggagccagccagcagtgaacttgtgctggcagcaagagcagctccattaaagagaaaaagttccaaaaatcatcccgggaagatgaggatagatatttcctggagacaagtgcataccccaaactgacattttccaacccatgtcttataccccaataaaaacaaattcgcaaaagtttttaaaaacttagattgctgattaaccctttctttcctgaaattttctcttccataagttttctaaacactgcttcggcataaataccccacccagcttctctgataactcttatttctatatttaaatgaggtattcaccaaagttctttccttatctttcttcctttcttatactctctgccctagtgatctcttttaatctcatcattttaattattatctttgtagatacagttgcaaaaataggtaattactgatacccaccctt

SEQ ID NO: 327226 - DNA, 729 bp, Homo Sapiens
  misc_feature (14)..(14): n is a, c, g, or t
  misc_feature (508)..(671): n is a, c, g, or t
cctggcctgtttanctttttgacctccataatcatgtaagtaatttcccatgataggtctcctcttatatacctgtatatctcctacaggctctgtttctctggagaaccctgactaatacaggctgatacagtaagaaattcaatgaaataacaaagaaggaagataatgaattttgaagacaaccattctgggaggaatatgaatataaagagaaacaaagacagaaatgaaagaaaatattttaattgcaccaatgtttattatttgatctcttgctattaggtttctgtctcctggagtcctgaggagctggtggtggggaagcagctggtgatctttctcccggtgttccattcgaaatagtatagcagtttcttcactgacgaagtttaggagagtcctaaaatgtgccggtcatttccatcttcagcttttctctttgctctgtgtactcttgtgggagatgacctttctcttcatataagcacatctctctcctttttcnnnnnnnnnnnnnnnnnnnnnnnnnnnnnnnnnnnnnnnnnnnnnnnnnnnnnnnnnnnnnnnnnnnnnnnnnnnnnnnnnnnnnnnnnnnnnnnnnnnnnnnnnnnnnnnnnnnnnnnnnnnnnnnnnnnnnnnnnnnnnnnnnnnnnnnnnnnnnnnnnnnnatgctcaagaaaagtctaaatagaagaccaggattgaagctcatggtgctagctctct

SEQ ID NO: 327227 - DNA, 610 bp, Homo Sapiens
agacagggagagacaaggtctcactacgtttcccaggctggacttgaagttagtaaaggcacttcttctatggcctgatgagctgctaaagactattggcacatgcggtggtcctgctaccagcctcaacatccagatttcatgagaaagaagctgatctgcctcatcctcatgctcctgtctcagagtcctctctgcccacctcaatcaggaatccagggagaacgaacacatcgttgctagcaggcaggtagttacccagcctgtgaaaaaactggagagaaaaatgaacagacagggcttcacatccaagcctccgaatgtgagacacagatagcctttgttctggaggtaggaaataatatggaaagaaacatctgcaaaaggataagctagctttggatttctgatcctacaagggaggaggagtgaaagaatggaattggcttagaaaggatgcttggacccatgctgaagtagctacccgggccaacgccacagaaggtccggcttgtaaaatctgtttgttcagttcaataaatgcttatctgcacacctgtgccgagcccaagagattcctcagtaaacaaggacacgtcctgctgtgtta

SEQ ID NO: 327228 - DNA, 388 bp, Homo Sapiens
  misc_feature (269)..(330): n is a, c, g, or t
  misc_feature (354)..(354): n is a, c, g, or t
acagttcacactgaaatgtcaacataaacatttcattttatatttattgtaaaagcaatatacagtaaaaatacagaatagcataaggttacattaagatggaaagtaaaaattttcctccccccaccccaacagtctttcaatgtcacaactataaagtttctttaaaatactacttaatacattctaacaagtcaaaaggctttgtttcttcttggttttattgttgagatacattaaaatattaagcattggcccagtgtgggtgnnnnnnnnnnnnnnnnnnnnnnnnnnnnnnnnnnnnnnnnnnnnnnnnnnnnnnnnnnnnnntcagggagttttgaggaccagccngggccaatatgggcaaaaccccatctctactaaa

SEQ ID NO: 327229 - DNA, 762 bp, Homo Sapiens
  misc_feature (368)..(368): n is a, c, g, or t
  misc_feature (738)..(738): n is a, c, g, or t
tcaatccctgtgacatttttaaacttcttccctatattacagtcatccttgtacatgactaatattccacaatggatcataaattgagggtaaagcctgtgtgtaatttgtatgttaattttccaatgtacctaccatagtgccttacacagagcagatatccagtaggtcttggaataaatacatgaaatatataaaatgcttctatggaaagacaaataaggaacaaaactcaaacttttcaaaacttactatcccaggaaattcacttttttcaagaagttttcagcagtatttcttgccctttcgcttgttttcctgtgcagagatttggggacctctatcttttcctactaacttaccctatnctccctgtgataggtcattaaattatacttgcactttctcttcttttaggactttccaaatcagatgccctactattcaattttctctttcctgtcatcagtagaaataccatgatggtgctatccatttattaacatgcacaccttgtcaatcttcctttcaaaggtagttccggtgaaacaaggtggaaaggagtatagaataatgtaagaaataaagaatttgtgtatctggctatacccagtcctttcatttcaggaaatttctatacttccaagcttctctcttttataaaacccaaattaaatactgttgacctatgaagtatctaaaatttagttcaaaaaagggcattcaataaatggaagntactattacaggacagttaatatt

SEQ ID NO: 327230 - DNA, 364 bp, Homo Sapiens
  misc_feature (211)..(230): n is a, c, g, or t
aggaattaactagaagccccaggagtttgaaggcccagccctgtgccaacatagccaagacccccatccttccataaataaacaaggtttaggcatggtaagccccacacctgtaatccccaacacttacggaggttgaagacaggaagatcccttgagccccaggagttcgagactagcctaggcaacatggggagaacttgtctctacnnnnnnnnnnnnnnnnnnnnttagcagggcatggtggcatacacctgtgtttccagttactcaggaggccgagacagaagtatcacttgagcccggaaggtcaagactgcagtgagctatggtctgcactctagcctgggcaacagagcaagaa

SEQ ID NO: 327231 - DNA, 758 bp, Homo Sapiens
  misc_feature (144)..(163): n is a, c, g, or t
ggagacagggtcttgctctgttgcccaggctagagtgcagaccatagctcactgcagtcttgaccttccgggctcaagtgatacttctgtctcggcctcctgagtaactggaaacacaggtgtatgccaccatgccctgctaannnnnnnnnnnnnnnnnnnngtagagacaagttctccccatgttgcctaggctagtctcgaactcctgggctcaagggatcttcctgtctcaacctccgtaagtgttgggattacaggtgtgggctaccatgcctaaccttgtttatttatgaagatggggtcttgctatgttgcacaggctggcctcaaactcctgggctctagtaatcctctttctctcagtctcctgagtagctaggactacaggcacatgtgctgctgtgcctgaatcatccttgaaatttgtaactgataatttacaggaatatactaaacccaagatacatgaaaatcttggctgaagttacttgtacttgaccaaggacttctggttcactgtgcagactgcttttccagtactgatgagatgttgctgcacttgagaatgggaacaaggtataaaagctgaagagaccgtagatgtaatggcttcactgaactaagataatccttccttacccagttatgtttctaaggaacaggtatattatcaagtgtgagatgtttgggatatacgcaagctgtgcctggaaatcatgacagtgcctctatgctgttgatgtaccagccatgcc

SEQ ID NO: 327232 - DNA, 551 bp, Homo Sapiens
  misc_feature (404)..(404): n is a, c, g, or t
ctgtcctgattagaattaattttcataaagagaacaagaatcttgactggttcacccttcaattccttgtgcccgcaacagtgaccggcacatggaaagcattcagggaataaaagcacaatggaaaattaaaacatactcactgcatgcctgccacctatagaaccaaattaaatcactgccaatatgcatggggaaaaccttcccatttttctggaataatgttacaaaggatggaaaataagtgcacatcacctggatggcatttaataaacgctgtgacccagtagtgtacatttcagtgaatattgccaaaggaagtaggccaacatcaggtaatctgagttaactttcctgtacattcgtgtattcgtttcctgattgatcaaaacttggattaattnagtctacaatgtatctttcctggttagatacgaagattatctggctctatccaatttgtgttttcttagctgagaaatcactgttgaattttaaaagcagcttgcctggtcctcatttcctggtcttctgatggaaatggtttatgg

SEQ ID NO: 327233 - DNA, 306 bp, Homo Sapiens
tttttcagagtgggaaacgtgtttattgtttgatcagtctcaggcctggttggggggtggaaggcaggactggggtcccttccccaacaacagcgcagaagccccaggaagatggcgcagattcctgacgacccacagccaccttttatgaggccagagactttacacaccacactccccacctccatccagtcaaggctctgccatggaacagctgatatctttaggctagaggactccattctgtgtaggggctcattcccatctcagctccagaacacggaggacctgaagattactcaagga

SEQ ID NO: 327234 - DNA, 723 bp, Homo Sapiens
  misc_feature (92)..(223): n is a, c, g, or t
ctacttgaaggcaggactcaatttaatttatttacacagcataaacactttttcctcatcctcaaagatatcaaatgtagctgggcgcagtnnnnnnnnnnnnnnnnnnnnnnnnnnnnnnnnnnnnnnnnnnnnnnnnnnnnnnnnnnnnnnnnnnnnnnnnnnnnnnnnnnnnnnnnnnnnnnnnnnnnnnnnnnnnnnnnnnnnnnnnnnnnnnnnnnnnacatgcctgtagtcctagctacttgggaggctgaggtaggaggaccacttgagcaaaggaggttgaggctgcagtgagcctgtggtaacaccacccacattctaacctgggtggacagactgagaccctgtctcaccaataaaaaaaactttttaaaaagaagataccaaatgttagtattttgacaaatgtcatcaaaacaacagtaaataagatatctttaaacacttattgaaaagatcaaaatattcttagggcaagtccgtacttttgaacctaacagtgtaaaaagccttcccaggaaaatgataaatgctttatttttctgaagggctccattaagtcacttgtacattatatttaaatctttgacctaatgggaactgttagaaacacagccctttttcaagaaccacaaagctaactctgggaaatccttctaattgtggctggaattttataatgaccaataatgaggtttaagaggattctgaaagtaa

SEQ ID NO: 327235 - DNA, 743 bp, Homo Sapiens
  misc_feature (127)..(127): n is a, c, g, or t
  misc_feature (265)..(265): n is a, c, g, or t
cacgagcaacaacccacaaaagtattttccaatcattataatgacctctctactctctctaaggcatagtgctaggtaatgaagtggactctgcctatcaagatggtcagaccctgagcgaagaggngagtgggaaggcctgaggtgtcttcaggctgcctggggaccggggacccaggtcagacagacagcagctccagggctgcggaaaggcccagccctgcgcacacagcgttggcttctgatactcctctgaggagcctgnctggcctctggaccacaccttgtgtgtgtggttcaggaatacccaagttcatctgccaaattcaggatacaaccctgactgttccgggcttttctttctgcctttccctaatctcgtctgggcgtgctctcttaaaggggaagtggtgcgttctgactggccagggccctcatccaggagccaggaaacatctactaccacgagtcgcgttgcccagcgtgtgtcagcctccttatccaaacggcaaggcagcctccccgggatgtgtaagtgtgagcgcagggcacgagggccacacaggacggcgtggggctgggcgcaggtcacggaacagagatcctggcaggcagatcatgctggcagcccacgaggcatttagcaaaatgagtgttagcatagacagtgctctccggctgtgggctggagctggagccgagacagggctgaggcggggagcggggagagtagctgcctcaga

SEQ ID NO: 327236 - DNA, 327 bp, Homo Sapiens
aaaaaggaaaaacaaaagccctaaaatctgagttctagaaccagagagatttgggaaccataagatctagaatcagaaggagttgagggtggtaagatctaaaaccagagaaatgtataaggcaaagtctaaaatcagaagatatttgaaggctgaattctagacccagggtaatttggagtcagatcttgagtgaggaggagctggaaatgatgaagtctagagcatcgtctggttctagaagaactggttattataagataaggacagggtcgggcacggtggcttatgcctgtaatcccagcactttgggactacaggcacgcg

SEQ ID NO: 327237 - DNA, 546 bp, Homo Sapiens
  misc_feature (58)..(58): n is a, c, g, or t
  misc_feature (76)..(120): n is a, c, g, or t
  misc_feature (300)..(308): n is a, c, g, or t
  misc_feature (342)..(440): n is a, c, g, or t
aaaggttgccagtgacctgaagatcgtgccaactgcattcccacccgggcgaacaganccgagaactcccatctcnnnnnnnnnnnnnnnnnnnnnnnnnnnnnnnnnnnnnnnnnnnnngttatctctactattcttactcccttaaaaagagtagagaagttaactgatgaactcagagctcagttgaaaggtattttacatggtctgaaaacaaagtgtttcataatgtaatttaactgagaagcttaagaatgactaatgtcagcctgggcagcatggtgagaccccgtctctacnnnnnnnnnttttgttaattagccaggcatggtggcccatgcnnnnnnnnnnnnnnnnnnnnnnnnnnnnnnnnnnnnnnnnnnnnnnnnnnnnnnnnnnnnnnnnnnnnnnnnnnnnnnnnnnnnnnnnnnnnnnnnnnntgacagtaactgtctcaaaaagtaaaaacaaaaccctaatgtaatattaccaatagaataaaactcaagttttctttaatatcttagtaattaaatatgactgatg

SEQ ID NO: 327238 - DNA, 409 bp, Homo Sapiens
  misc_feature (51)..(51): n is a, c, g, or t
  misc_feature (78)..(78): n is a, c, g, or t
  misc_feature (163)..(171): n is a, c, g, or t
  misc_feature (185)..(185): n is a, c, g, or t
  misc_feature (205)..(303): n is a, c, g, or t
ctttaaaaacagtcacacaagttaaactgatggaactcagagctcagttgnaaaggtattttcacatggtctgaaaanaaagtgtttcataatgtaatttaactgagaagcttaagaatgactaatgtcagcctgggcagcatggtgagaccccgtctctacnnnnnnnnnttttgttaattagnccagcatggtggcccatgcnnnnnnnnnnnnnnnnnnnnnnnnnnnnnnnnnnnnnnnnnnnnnnnnnnnnnnnnnnnnnnnnnnnnnnnnnnnnnnnnnnnnnnnnnnnnnnnnnnntgacagtaactgtctcaaaaagtaaaaacaaaaccctaatgtaatattaccaatagaataaaactcaagttttctttaatatcttagtaattaaatagactgatga

SEQ ID NO: 327239 - DNA, 434 bp, Homo Sapiens
  misc_feature (53)..(103): n is a, c, g, or t
tgtgatgttttaatctttttaaaaaattattatttttacaacagggttgcgcnnnnnnnnnnnnnnnnnnnnnnnnnnnnnnnnnnnnnnnnnnnnnnnnnnncctcctgggctcaagcgatgctcccacctcagcctcccaagtagctgggaccacaggcacatgccaactgcgtcccttcattctctgtttttgatgtctgctgataggaatttcctgaaaacccaagtaccaagaagcaataaaggtagtggtgtgagactgttcccttccacttaacctgcccatgtcttttttttaaaccctctgtaggtgacagtaggaaatgcacaagccccatgccactgcccagcaaataaccacactgcccttgaagcagccatgggagtcagacgggggacagggctgcttcgtcatctgcatagtactgacc

SEQ ID NO: 327240 - DNA, 746 bp, Homo Sapiens
  misc_feature (304)..(334): n is a, c, g, or t
ccaaatgtcaagataacgacctaataatactcactggggatataaatagtgtggtctgggccacatagatccatttaccaccagtttaggaatttaccatcagtttaagaatttaccagttctttctccttaaggggcatctttggacagccttgaattggaagaaatggctgtctggagtctagcccaaagggccgggttggaggaagcagagaaggtggttattaaaatcaacaacattcgcaggagattggatcacttgctttcttcagtaaacagaaagagtagagctttggctgtgaannnnnnnnnnnnnnnnnnnnnnnnnnnnnnnctgccagcccctattgccaatctctctccatgttctttgaaagatcattctttctatccttgcagatcacacggaattactcagcaaggagcagggcagaaaacaggaggttacatgagagtctacacactggccaggaagctgccaagtcccttttccctgcttggcagccagaaccctgaggatgaggcccaacccccagctgtgaagctggagagactgaatggctcaaaagaaaaggtgtccaggaaccaataattgggggatctcccagtgaggcaaccagatctgtacctgttcatttattctttaatttgttcactcaagaaagagcctactatctgccaagcagtcttgatgctgcagatacagcggtaaatagacaccaatccctgacctcaaggcacttata

SEQ ID NO: 327241 - DNA, 717 bp, Homo Sapiens
agccataagctaccttgttgagggttaattagaaatactactcaattctgaccacagggagaatggcctgcaatgaggttttaagcattcatgtattcattcaaaaaatatttattgagcaccaactatgtgataagcagaggtctaaactttttggatacataagtgtacaaaagaaccaaaaattccagccatatttatcagaatatactgtgctttgtgttttagttgaatcagggctttgcccaggtgtcactctctacaagggcactgtggggacaatattgttggaatacccaagacatggaaggcatggtctctgatatcaaagtagcaatttcaccaaagttgtcagatttaggggttagcatcccagcccttgtgacaccagcagtgcttcttctgagggacactgctgagaatggagaaggtggcaggcaagggccttccacagacgcctccctcccctaaagaatgcacaacctcctttgcccttgcttgcttcctgggttgcctttaactggacccatatcccttggcatctgccattcattatttggtttctactatcaccctgtctccagctctgatttggctcttcattactgaactttggcgtgttgtttattctctcactggagtttaactttgggtggtacctgttttctgtttcattagtcccatgactgcattgacaaccagaaggaacactgtcct

SEQ ID NO: 327242 - DNA, 736 bp, Homo Sapiens
  misc_feature (23)..(23): n is a, c, g, or t
atgtaaaatctgaaattttgaancatgaaatctattgttcattagtataatggtgacgaatgaaagattattttgattcagggaaggcaaacagattgcagcaaaaatctcaaaaaaggtgaggggaaaggttgaaaggggcaggcaggtccctgctcacatcaccaggggcagttctttgtcatatgatgcggacctcccagtcagtggcaatgttgagtgagagcttctccaggctcaggatggatgttttggcacaatacgtaaaagccacaggctgatctttaccatcagatgagtgggtagtcaacagaaagatggctccttccctgaagccctaagacccaagatcttctcccaccacacacttgctgggataatgacccctctggtcagcagaactattgatcagaacactggaacagaatgaaaacttcctgtgcaaaaattgcttctggtggaggtattggaatgaatggccatcatcaagatataactcacccactgaagaacccttagtgcttagagcaacccggagtccataggaggattcagtcatccagcctgtggattttcctacagttgtctttattggtatcacacttccacctcgctgaaacactggaatagtgtccaaggctactgggatctttacagtacaccctccttcccaatgagcaaatgtcttatagtcataccagacctcatttgatcctggaagaaacacatcaactgt

SEQ ID NO: 327243 - DNA, 679 bp, Homo Sapiens
gtgggtttcttggtgattttgctgtttaaaatgagccccaaacatcatgccttagtgtcgtctaatgttcttaatcacaacaaggccatgatgtgccttaggaagaagagacgcattggctaagcttcatttaggcatgagatacagtgctcttcgccatgaggtcaatgttaatgaatcaacaatgtatattaaacaaggtatctttaaacagaaacacatgcaaaacaaggctatgtattgatcggttgacagctgacaaaatcgttataaccagaggctcacaggaatctaactctgtattgttcccctaggagcaatggctcagtattcactaattacgtccacagcgactttatagaacataactgccacaaataataacagtggggtgttcttccaaattatcctctatttcccctatttcctgcagtgagcagtttggctatctctggaatatcctatttatataacagaacagctcccaagtcataggtctagacttctttgctatgctcctccttaatgcccttccaaaattttcctctagccttttcaaaggtgcctgcccattctacactggttttttccacctcctctcacagcatctgactaatccgatcttcactcctgggttccttgacattcctaccattgttcgtataggtttgtttgtttg

SEQ ID NO: 327244 - DNA, 827 bp, Homo Sapiens
aacaggggaccttattagctgctaactgctgagatgagaaattgtggtcagaccattcaggtgctcagcctttcagctgaagtcccctcccagggcctgcctctgcctctgcatactcagaattttccagccagttcagtttctgtcaagtaattatttacaaattagattcccagggaatacatgataagagaatgtaagcatggcacccttaaatcacaacaaactattgctcaataaaagacaaaccattaatccaatagccaatgctagaaaactcaggggacctgccacaggtaccagcccacaactgagggcatttattcaccacttaggtcttcctgagtacagctgagaatttatacagggacagtgacagatagaggctctctagtctagggcatcagtacacaatactttttttcaaatcattttctcaattcaaaatacctgagcactcctataaaatatgggaattatttaatctgtggtttcattaaagctatcataattgccttgttttaaagcatgtactattgcctaggaataggttacgtattatgacatatcctgcaaaatatcttcaaatagccagtccctctgcctccctagaacatggcatatgttattcaatgttacggatgttccactggaaagactacatttaccaccctctctctggctgggtgtggccatctgagctctggcaaaggctgtgcaagatgaaatgtatatgtgggggtgaaatggcaaggcgggggctgcctcatgaaagcagaagggaagggagtggcactcttttccctcttcctcttttctgctctctg

SEQ ID NO: 327245 - DNA, 419 bp, Homo Sapiens
  misc_feature (21)..(21): n is a, c, g, or t
  misc_feature (36)..(36): n is a, c, g, or t
  misc_feature (333)..(333): n is a, c, g, or t
  misc_feature (394)..(394): n is a, c, g, or t
ttggccctgcgcggccagtanttcggcacgagcagntattttctgtcttctatgtactgtcttttcacattcttgatgatatacttttcagcccaaatgtttcttaacttgatggaatacaatttattttttcttttgttgcttgtgctttcagtcatactttgtgaaaactttgcttatcccacattacaaagatttactatttctaagtgatttataattttaccacctacctttagggtctctggatccattttgaggttaatttttatgtgcgagggaggggagtctaacttggattcttttacatgtggggatatttaggttgtcccngggggcccatttggttggaattaaggtgccccaggaaccaggtaccatctattatataggngggaaggtagggataggtggggttg

SEQ ID NO: 327246 - DNA, 548 bp, Homo Sapiens
  misc_feature (162)..(217): n is a, c, g, or t
  misc_feature (219)..(481): n is a, c, g, or t
  misc_feature (530)..(530): n is a, c, g, or t
attttaatataatttatatttaaaatatatgctttaatttttaagttcttacagtgaggatgccatatatttaagctgtcaaaacagcttgtatttgtactcttttctagtgttgtgggccataatacatatatactcatgggcagtataacatttgccttnnnnnnnnnnnnnnnnnnnnnnnnnnnnnnnnnnnnnnnnnnnnnnnnnnnnnnnngnnnnnnnnnnnnnnnnnnnnnnnnnnnnnnnnnnnnnnnnnnnnnnnnnnnnnnnnnnnnnnnnnnnnnnnnnnnnnnnnnnnnnnnnnnnnnnnnnnnnnnnnnnnnnnnnnnnnnnnnnnnnnnnnnnnnnnnnnnnnnnnnnnnnnnnnnnnnnnnnnnnnnnnnnnnnnnnnnnnnnnnnnnnnnnnnnnnnnnnnnnnnnnnnnnnnnnnnnnnnnnnnnnnnnnnnnnnnnnnnnnnnnnnnnnnnnnnnnnnnnnntgagccattgcgcctggcccgttgtatttaatttaaaaaatatatttgnaattatttctataaagtc

SEQ ID NO: 327247 - DNA, 494 bp, Homo Sapiens
ggccgcttaattaactaaattaacgaaaaggtctggagttaatgaaaatgttcttagaagtcctacccatcaagaaactttatctgcttggtgttgaagtaggttgctaacctacagatatttctatttcaactattaaggtgggtaataaaaaccagaagttttaagaatctattccaggaattgagaaacaataaacacaacttctgtgtgagctggctgcatgacatgcattttgatgacagtagcaaaacctctaatattctttgagatgacatggaattaattttaaaaaaactttaagcctaggcaacatagcaagaccctgtctctacaaaaataataaaaaattatctgggcatggtggtgcgtgcctgtagtccaagctactgcggaggctgaagtgggaggatgcttgagcccaggagtttgaggctagagtgagctataatctcaccactgcacttcagcttaagtgacagagcaagacgccg

SEQ ID NO: 327248 - DNA, 428 bp, Homo Sapiens
  misc_feature (15)..(15): n is a, c, g, or t
  misc_feature (63)..(63): n is a, c, g, or t
  misc_feature (81)..(95): n is a, c, g, or t
attttcccttttccnaacagggtctcccctttgtcaccccgtctggaatgcaacctggcaacngagcaagactctgtctcnnnnnnnnnnnnnnnggagcaaggagatgactaacaggtactggaagccatgctacaaaaccaagaaaggagaggcagcttttctttccctcagcacagaagaggggaaatgcagttgcatggggctaggggagcggggaatgaaaccgggtagaaggaaaactcccccgaattttatagcatcccacttcacagcagctaaaactttaaacattactcacctcgagatggtaaaaccactttctctgaatggttgcctgccattctccctttggccccaccccacacaagcccatcttgatcactcctgaggggtaatcagttctcaaaggaataaaatcaacataa

SEQ ID NO: 327249 - DNA, 1084 bp, Homo Sapiens
  misc_feature (360)..(360): n is a, c, g, or t
aataccctggctgtggagcactttattcgtaattctatgtgatttacatgtctgagttatttgcatattactttcaggaatgcatttcattcacgatttctgggggaagggtgtctgggcttcggagtctcttggctgactaatctcacgaatttctgtgcaggatttcagtcactgcccccctcccttttctcaggcctgggatggtgcctgtctagcctcttggggaggtttttagcttgaaggaattgttatttgctctccaaggagaataccaggtgaaaatggcccattctgtggtggctaatggcctgattgatgagtcatgctcacagaactgctggggcctgggcttggctngctcacacggacttaccctttgaactccatctaacggaaatgagggcaagccagaaaacgcttcctcacaggtgcggtactggaccttcgaggacagtggggacccactgaccagacagtcttcaagggctcttccagctcagaaaacccttctgagttctgccaccttggtgcttccttctaggttctctggtggactttctgtggcctgggagccgtcaagactgcagaccagacctccagagtcagagaggagaatgagtgagggaaggaaggcagaaaggaagtcatcgcccacacttgctgtggcaatagcgcctcacttagcagctccatccccatgttgacacgttgaatgaggccgggcccttgcccttgcgtgggtgtgagactgtggctctcccatacctgcctcactgggccccagagcaatttccctatttttgtgggcagacttgaccctagtccaaaggccaaggtctcccgaggatttgacgctaatcccgttggatatttctcatacctccctcatgcctcatctggtattgttcctttctggactgaatagatcttgtttcttcctcattacaagtttctgcctgtgtgaagttttagaaagcttcaggacacattccatatttgaggccgaagccacaaaaagttaatatttggagcggtaggataggagaggaagagctacaggcagaaatctggatttgattaa

SEQ ID NO: 327250 - DNA, 472 bp, Homo Sapiens
ctttggagcgttccctttgaagttttctttcataatggacctcaagggctggcagttgacttagggaataagaaaccatattactgaactggaattctgaacaatatttcaaaataaggggaatgatatggtttggatatttgtgccctccaaatttcatgttgaaatgtgatccccaattttggaagtggggcctggtgggaaatgtgtggattaacaagggcagctccctcaataaatggcatggtgtcctttccatggcaatgagtgagttcttctcttcacaggaaatctgattgtttaaaagagtatggtacctcccacctctctctctttctcctgctctatgtgatgcacctgcttcccctttgccttttgcatgactgtaagcttcccgaggccctcaccatgagcagatgctggcctcatgcttcctgtatagcctgcagtactgtgagccaattaaacctct

SEQ ID NO: 327251 - DNA, 871 bp, Homo Sapiens
  misc_feature (68)..(132): n is a, c, g, or t
ttgtagtctggcccatgagggaaattctttatttggatgcttcagtgaccaagagacagagcattagnnnnnnnnnnnnnnnnnnnnnnnnnnnnnnnnnnnnnnnnnnnnnnnnnnnnnnnnnnnnnnnnnatatgcaaagcaaaggcatttcacaggtgaagggatagggagtgggggaaggaggccacgagagcagctaggggcttctttgacacaatgaagagaagcctctgatggtgacactccttggaattctcgtctcaaggttacaaggaaaaatctatccgtgtggactcagtcccaggccataaaacacagcaaagatagagaaatctgggtgtggggcctgggaaacgcctgttcctcactgtagaaacctgcatcagctctctctttctttccctgggacccagaaatcacctggtggatgatggggaaggctagcaccacagcaaactgggcaagtggtccgctgcacaagggggaagagagggctagtagggccgagggtagcaatgaacctcacagctagcgggcatgaggcagtctgcctttaggggcagaaccctcagggagacttgcatgtggggcactttcccgtgtaacctagggtcagagcacctctgatggaggaggggaaaggtcccatccccattggagtgtcctatgatctcagtggacatggaggccgcccccagccccagctcgttgccaactgctgcagatccttagcaccattcaggaactgtggagggggcagcgggggtagcaatgttccgccaagattgtgtcactgctccaggaggatacttcacagttggcagaaacctgcgcaactggccatatctggtctaagactcaggaaagc

SEQ ID NO: 327252 - DNA, 366 bp, Homo Sapiens
ataagccatctcacctggtctcaccccataatgtaactgtttactccaatatcacagtgtaggattccccacaagcatatccttcgctcaatatggtgacccaacccagcttttgcttctttccttcctttctgtttcactttcttcaccattagaaacttatctatgtttaggaaatgcacgagaaatcaagaaatgaatgactaggtaggatagggacagaagctgggtttcaatctgggtcaaaacattcttccaggaaatctttacttaggttaagggggagggaaaaaccatttatggatagttaaaggggaaaggaaaggcactttttaataggctcgggaaattggaaaaggggtcagg

SEQ ID NO: 327253 - DNA, 499 bp, Homo Sapiens
  misc_feature (382)..(382): n is a, c, g, or t
  misc_feature (407)..(407): n is a, c, g, or t
  misc_feature (436)..(436): n is a, c, g, or t
  misc_feature (448)..(448): n is a, c, g, or t
  misc_feature (473)..(473): n is a, c, g, or t
  misc_feature (489)..(489): n is a, c, g, or t
tgttgcaaacgatttttatgggctgctgaagtttaaggagtctggcattttaaattgttcttcactgtctgagaagtaaaaatatgtcttaaaaaatcattgatgttatagtaaaggaaagctccctcccttccctaagttagtgcctttcagaatgtgagcatttgtcaagtggaattctgtctgatcctttttcattttctgagctattataagtgctttcttttcctttaactatcataaatggtttttcttcccttaactaagtaaagatttctgggaaggaatgttttgaccagattgaaaccagcttctgtcctatctactagtccattcatttcttggatttctcgtggcatttcttaaacataggataagtttnccaaatgggtgaaggaaagtggaancaggaagggaagggaaaggaggcaaagcnggggttgggggncaccatattggaggccaagggatanggcttgtggggggaancccacaacgg

SEQ ID NO: 327254 - DNA, 889 bp, Homo Sapiens
  misc_feature (11)..(11): n is a, c, g, or t
  misc_feature (148)..(161): n is a, c, g, or t
tttggccctanaagccccagttttcggcacgagtaactggagttattttcatcagcacactgttgccccagtctcacagtgatgcagtattaccccccaagtacctacctctcatgactgccagagagaaaagagccctcataggacnnnnnnnnnnnnnngcccatgacagggctgtcctgtgctaacgatgtatacaactattgctaaatcctcactcccttcctccttttgctgcctgtccccacccagagggtgtgttgccacttataactgctcaggcaggctggccctggccttgggagctcagagtcacaagctgagccaaagtgccagcagccaggcccacctgggggcctctgggagcctttgtgtgtgatgggtaagcctgtagggcatttccatagcacagtctcctcaggcagccagcaaactgtgaggacagactcctggaggagcaattcttccctaatcagagtagtttactttgtgaggtctaatttgaattggactgttggtgaattgctgctccgatcccttccttcctgggcagctgggcctggacccgttttccaccctggatcgggactcctttggggggacagttcctcttcacccaacctctgcctccccaaagacaacaacaacttaaaaaaacagcttgtgtgtttacttttctggtgaggattcctaaatcgtgtgccctcagaggaataccatgatccagcttcaagggcgagctcagacagaccagggagcaaagcgaatgcacataaagcagcaaggccactgccacaaccacgctgggggcgcttgtcccttctgccccctcctcacacccatgcactgaggccagtcagtaattaacaacgatacggatggctgcatt

SEQ ID NO: 327255 - DNA, 770 bp, Homo Sapiens
  misc_feature (523)..(523): n is a, c, g, or t
  misc_feature (745)..(745): n is a, c, g, or t
tagtaaaccattttctttttggtgtgagagaccctcccattccttagtaaaaacgtatttacttgcatgttattattgtccttacaaacttgtttttccctagagcaattgattttgctttaggtactagctgaaggtctagaggcaatacaatttaggatccttgtctagaaatcaatatgattcaattcttttcaagccaaatgatatctgtagactccagttgtgtgcaagccctgtgtggagcctcaagtcatctgcgttagtccagcttcctattcttggaaatcagctttgcttgattggacctatattggcatgttaatgtttgatggtggcctggcctttataaaagcatacaattttgcagatgactccttctcaggatagagtgtctttgctcaaaggagtggatttattctgtgtgagccagggaggcaggcatgaagaaggggcattctgaaagggcagggaagatcctttgcaccagctgaaaatgccatcacgtggctctcccacctgncctcttttgaagactggctgtggcgaggtggactgtaggtctgaagtggggagatctcttgcattcttcccaatttctctttgttcagtggagaataaagaaaatttaaataaggaggagatttctagaccaagccctaactttagctacctgtgacattggtagcttcattttatttactctgtgaatgaagggtttagaggaaattattctggatccttnctgagccttatattttctgacccta

SEQ ID NO: 327256 - DNA, 600 bp, Homo Sapiens
  misc_feature (295)..(324): n is a, c, g, or t
tggtctcaaacgcctagcctcaaatgatcgtcccccgctgggcctcccaagttactaggattacagacatgagccattgtgccaggtctacctttactcttgtttcaagtagaaattcactgaaaatatttcaccccaactactgaatcctttgagaagttaaaattatttacctgaatcacaagaccaattatgttttttctgaaagtctgagatcagatttcattatttttagtaataaatttccaacaacactttgtattagggttctcttagaggggcagaagtagtaggnnnnnnnnnnnnnnnnnnnnnnnnnnnnnnggagtttattaagtattaacttacatgatcacaaggttccacaataggctttctgcaagctgaggatcaaggagagccagtccaagtcccaaaactgaagaacttgaagtccgacgttcaaaggcaggaagcgtccagcacgggagaaacatgtaaagtgggaggctaggcctgtctctctttttcacgtttttctacctgctttatatttgctggaagctgattagattgtgcccagcagatttagggtggatctgccttccccaactcactgac

SEQ ID NO: 327257 - DNA, 747 bp, Homo Sapiens
tccaataactctgaaaaacatttattcatccatttgaagactatacatccattacatgttaccttaaaaaaatttttaaacctatattttccaaaacaatatatttcatcagtaggagtggcatcgttttacatttttgcagatccttaaagcctggcttaacagaaggctgctgcatcctcatagctgcttccgccttcggtctgttgcagtatggtatcctgactgaagaaaaccacgtggggttgggaaaggaaggaccttgaggaccctcaggggtccttgggaccaccactgccgagggcatggtgtggcagccgactttaacccatacattctagaacagagagagccatgaccaaaccagagggagagacacctgcagatatcctgggttgcgggctggaagaagtattaacagttgatgaagcagcttggcattgcctctcttttctcctagggaagggataaaccactgtctttttgtgaggcatggttgtgttatgtcaggtgggagcctgatttctgaggtgcgcgcatgggaagatgggggtgcatcagatagccaaggaaagtggtgtagtggacttttgtcatctgaacacccttccttttgggaaaatcttttatcgagtgagtttctgcagagtcctgccccctcctcctcgagacaaaggagccagatgctctctcctcgcatgttctggaagctacagaatgaacacatgcctgaggtttgcccaatca

SEQ ID NO: 327258 - DNA, 678 bp, Homo Sapiens
  misc_feature (517)..(546): n is a, c, g, or t
gatgatgcctgtcttgctaggatcacattttgagtagtaaggattaaaatagggagaaaaagagataggctgatcagttatgaagttatttcagtaatatacattactaaaacatatgtatatactactgaaaagtttttctacttatactgtgttactagccatttttaaagtgcattataaaccttaactcatttaatcttcctaatagctatatgaagtaggtgctattactacccccattttgcaggatgaggaaaactgaggggcaactttccaatggatagagttagtaagtgggtatatccccattccaaaccaggcaatgtagttggagttctaatttagttctagttctttgctcttaatgactactctggttgactatagggaatggggaaggcggaataaaagataaaccctgggtttggaggctggctaactaaaaatcagaggaaaatcttaggatgttattacctgtgtttccattaaaagagaaatttttacagaaaagtannnnnnnnnnnnnnnnnnnnnnnnnnnnnnaaagtaaagaaagtgcataaagtggaaaccactaaaccgctaaacatactcagttcaccctaattagatctaatgctgagagttagagggaggacagtattgataaagctgattaatgtcttattggtgatc

SEQ ID NO: 327259 - DNA, 608 bp, Homo Sapiens
  misc_feature (96)..(109): n is a, c, g, or t
ctgcttctttctttactgtgtatttaccatctgccctgcaagtagctaagccattttgtgtttattgcttcaaatgaaagacaagtatgggtcagnnnnnnnnnnnnnntaagtttttctgtcttttaaggtactcgggaaaagcaagaagtcttctagcagatgaaatgattaaataaaataatgacagcaaagttcctcctccaatcctacccatccaaacccacctcccaggctagaaagtctccctctggattgaaaggaaaagagagaaatcaagtgaaggccctaggttggaagagtcaagatctgaaaaggaatcaaacagattaaaaatgaaggagcatttttagtgacgaccatttcttgaatgctcaggaggcccttgggggtgggttcagcatctacagaccataagagcaagcacatggtcagaatcattcctggggctatgtgctgagggcttcccttgggcagtagccactcccttgctgatgacctccctaccttaaggatgcctatccatgcctgaggctttagccagttgccatccagtttttatccatgcctgaagctttagccagttcccatccaatttttatccatgc

SEQ ID NO: 327260 - DNA, 612 bp, Homo Sapiens
aagcacataactatcaactaaaactgttcctaattccctcagtcagtgttgccttcttcaaaattaggtactgccaatggaagatgattggatatggacattaaagggagccaagatcccctttctttagacaaaatcagaaccaaaacaaaaaaatatgggtataaacaattaataaccaggtttatttataaactattatggaccgagctttgcacagggtttatgccaaaaaagacaggtttaggccaaagaagaaaatgccctgtgtcaggagcagtttcaaggacagcagagaactggcactcaggatctcagtgccaacacagagctcatgctaacaggctcctgactcaccccctctacatacacacacatttttagaaaactgcccttgatccacttgtccacttgatgtcatctgggcacatgaccagccaaattgttccaaggacactcacagaagtagcagtacatacagggaagaattaagataactaaaaaataaggggatgattgcataaacatagtacggttaatcagtcatacatctgtaagactttgcaatcaagtacagtaaatgttgcagtcatgaagatatgagggacagga

SEQ ID NO: 327261 - DNA, 478 bp, Homo Sapiens
  misc_feature (437)..(437): n is a, c, g, or t
acctgtccctcatatcttcatgactgcaacatttactgtacttgattgcaaagtcttacagatgtatgactgattaaccgtactatgtttatgcaatcatccccttattttttagttatcttaattcttccctgtatgtactgctacttctgtgagtgtccttggaacaatttggctggtcatgtgcccagatgacatcaagtggacaagtggatcaagggcagttttctaaaaatgtgtgtgtatgtagagggggtgagtcaggagcctgttagcatgagctctgtgttgggcactgagatcctgagtgccagttctctgctgtccttgaaaactgctcctgacacaggggcattttctttctttgggcctaaacctgtcttttttgggcataaaccctgtggcaaagttcgggtccctaattagttttttaaatnaacccggggtatttaattggtttataccccctatttttttt

SEQ ID NO: 327262 - DNA, 128 bp, Homo Sapiens
tctcagcagagaatagatctttattagccacaaattcttctacagaaatcaaatggtcagatcataaaaatcaaattgccagttattgctgccactaatgggaaataacttatcagctgcaaaagaac

SEQ ID NO: 327263 - DNA, 515 bp, Homo Sapiens
atttttataattactgaactctctgttaaacctttcgtgtgtgtgtatgctgtatgttgtcttcatgccaaacggcctttctggttctggccaattttggggtccaggctgtgaccagaggataaaggttagtcagagaatgtgaatgatctgaaaaatccatctcatgccctccccttaagtagaaagtttctcgtctaggtctccttcagaatgggctggctggttagatttgtactaggggccaccacagactgaaaagataagcctgctatggtcctgggatggccggtggtttacctggtggtcttccaacatgggcttgacttaacttgaatttctggggcaccattttggacctaacaggctcttaacctgcacctataaagacaaaaatgaaaccaaacccagctttagttgggaggctgaggtttttagcagctagtcattttttcctaggtgcattttctctctgaaatgatagggactggataacttctaaattccttccagct

SEQ ID NO: 327264 - DNA, 462 bp, Homo Sapiens
  misc_feature (441)..(441): n is a, c, g, or t
ttagctggaaggaatttagaagttatccagtccctatcatttcagagagaaaatgcacctaggaaaaaatgactagctgctaaaaacctcagcctcccaactaaagctgggtttggtttcatttttgtctttataggtgcaggttaagagcctgttaggtccaaaatggtgccccagaaattcaagttaagtcaagcccatgttgggaagaccaccagggtaaaccaccggccatcccagggaccatagcaggcttatcttttcagtctgtgggtggcccctaggtacaaatcttaaccagccagcccattcttgaagggagacctaggacgaggaaactttctactttaagggggaggggcattgaggtgggattttttcagatccatttcacattcttttgacttaaccttttatcctcttgggtcacagcctgggggnccccaaatttgggccaggacc

SEQ ID NO: 327265 - DNA, 584 bp, Homo Sapiens
  misc_feature (211)..(295): n is a, c, g, or t
ttgcatgaattttggataatccttatgttcattaccagacttgaaatcaggcactctgatctaggggttatttaggaaaattaagaggcaggccatgaatctgaactcttaacttagtaatggcttgcaagcatctctaaaacaaagcatccctaattcccttccctacttgcacataaatctctttaagttggtatggagaatattgttnnnnnnnnnnnnnnnnnnnnnnnnnnnnnnnnnnnnnnnnnnnnnnnnnnnnnnnnnnnnnnnnnnnnnnnnnnnnnnnnnnnnnataaatgacgaaacgagtggatacagagccaaaatagtcccatttttctatcaattcaggacatgttgaaagtgtagaaaaggaggatctcaggctcaaaaatcttctcatcctgtctaccaggcccaggtcccgatttgctgtgtgaggcagtgtgtgagcatggtgggagctgtgtttctgcccccaccgatttgaaacgtcatgtacacattttcccactgggaataaaatgtctggttatagttggaatggtatcattacttccatattcagaaatattattagg

SEQ ID NO: 327266 - DNA, 328 bp, Homo Sapiens
  misc_feature (288)..(288): n is a, c, g, or t
ctaataatatttctgaatatggaagtaatgataccattccaactataaccagacattttattcccagtgggaaaatgtgtacatgagtttcaaatcggtgggggcagaaacacagctcccaccatgctcacacactgcctcacacagcaaatcgggacctggggcctgggtagacaggatgagaagatttttgagcctgagatcctccttttctacactttcaacatgtcctgaattgataggaaaaatggggactattttgggctctgtattccacttcgtttcgtncatttattttttctttttctttcttccccctcttccttcc

SEQ ID NO: 327267 - DNA, 703 bp, Homo Sapiens
tttcttaaatggacatttaattgtacatatttatggggtacataatgatgtttcagtacaaataatgtatagtgatgagataaggataattaaatatttttaaatatcagtttcaactcttctagtcctcatgtaccacatccctggagcccgatcccgtgtgtcacctccctcacttctccctcttccaggttaggttcatcatgaaaacagaggacattgggtacgaggtcccctcaacttttcgtgctacctacttgctttcacatttgccagcatccacctttcttctatctcaacagcactgggctttcctcctccataagctcatacccttcacctgagtgttttgaatcccattcccttcctgagtctttaaggagtcctcctcctgtgtcctgtgtcttcagatgggcctctgcacgctctctgccttatagacacttgcttgaacttctcatttaaaacaaaaacattaggaacaaaaccttttcactccctggatcccttcagtcttctagctaccaccctcttctcccctttagaaacaggtttttgaaggaatcatctgcccatactgcctgtcttatcccttgttcacctttagccccatcctaaaccatgccattgcaaggacttgctagttgccaaatccagtggccatgcatctaccctcaacacactaacctctttacagcattgc

SEQ ID NO: 327268 - DNA, 551 bp, Homo Sapiens
aaatagaaaagccctttggggagttaaagaaggaaagggaattaggtccaaaccaatctgtgggctaaccaagtgaatatacagagcggcaacagcagggtcacctagcagcctttgttcagaaagggtgagtatgccccagccagtgtttttaaaacccattaggatataggaagtactatagcttctatagcttctggtcagctcatcactgtcacgtaaaaatgatttctatggactatggaaaaagaatggaagtgacaatagaagggaagaaaagtggagagaggctttgccatgaccagggaatatcaagtaactcggctttgcacctgagctccaaaacagcaaatgagcccacccccataagatcaaagaggctgtgcttcctactgggcatcctgcaggacacaggcccagaagacccatccctgaagaaagcatctatagccaaagtccagggaatgagcttggagtttctctacatcaaacattctcacactttttggtcccttttacacttttaaagattactcattcccccaaatgtg

SEQ ID NO: 327269 - DNA, 488 bp, Homo Sapiens
  misc_feature (25)..(25): n is a, c, g, or t
  misc_feature (303)..(303): n is a, c, g, or t
  misc_feature (398)..(398): n is a, c, g, or t
  misc_feature (407)..(407): n is a, c, g, or t
ttaaatagaaaagccctttggagtntaaagaaggaaagggaattaggtccaaaccaatctgtgggctaaccaagtgaatatacagagcggcaacagcagggtcacctagcagcctttgttcagaaagggtgagtatgccccagccagtgtttttaaaacccattaggatataggaagtactatagcttctatagcttctggtcagctcatcactgtcacgtaaaaatgatttctatggactatggaaaaagaatgggaagtgacaataggaagggaaggaaaagtgggagagagggctttgcnattgacccggggaatatccaagtaactcggctttgcacctgaggcttccaaaacagcaaatggggcccacccccataagtttcaaagggggctgntgctttccnactggggcttcctggaggggcacagggcccggagggcccccccttgagggaggctttttaggcccagttccgggggtttag

SEQ ID NO: 327270 - DNA, 568 bp, Homo Sapiens
tggtattgtgtaggttcaattccatactgtctgaacccaaaggggatgctctaaaccttcaacctgctttttaaattataaactacagtaactaaataagataaagcattattaactagtagtttttctttagcttgactagtatatgaatattgttgcatgctaaggttaaagttttgaaagttgtaaaaatggaatatatccactttggacttggggtagaggctaatttttttgtgtccttttctatttgagtgcttagagataacttaaaactaactcctaccatgtccgtagatataatttttaaatttaggcgtctgatctatattattggtagaatattccctcatctgtaaaatggtgatgataataggacttccctcagaggcttttataggagtaaaaaaagataatggataatgtatgtaaagggcttattactatgcttagtgcatagtaaaaggtcaactaatagtggagggagaatggtaggatattggtagaagaaaatactctcttccaagcaataaataatctgtaaattctcagggtattgaagctcatg

SEQ ID NO: 327271 - DNA, 680 bp, Homo Sapiens
ctgaatggcagcttttaagagagccatcaatacactagagcaaatatttataaatgcagcatggtttaattctactatactacaagatttctttttgcaagaagacataaaaaattttttcagggaaataaagtgaatcgaggaatggttgacagcgttgaatatatttagctacttagggtggaaaagaccatgataggggcatttagaacaaggcaaatcaacaagcaattaacaccagaaggaatactatgagttgtggggcccgagaataccaaccggaacacagtgtattcttaaagcaggggatgataaataagagagtcccacaaaaagtgatgctgatgtttgcagtgataattgtaacatgaattggagtcaggcaagatacctgtaacatggaaagagtctaaatcagttatattgaagagctagtttgagtttgtttctttgctcttgcaagggtttaaaaaaattgtttttgtttcttttttaactggagaaaatgcagttgcggagaaatcatgcgtgattataaataggtattcaataaatgtacaaataacgtgtaagatcctcattatctacctttattgtgcattttgtataatgttagttaagaataacatatagcatgttgcaacaatgtttgagtctaaccaagtgacttttaagccata

SEQ ID NO: 327272 - DNA, 554 bp, Homo Sapiens
  misc_feature (416)..(490): n is a, c, g, or t
ctagttaaattaaaataatatattttcatattttacactatttcaaaaatgaaatgtaattcagttaagtattgatctctcaaaaaatctaatttacaattctgtgtataaaaatataatttgtggacccccatgaagcacgtttgagtttgcacttgctgagaagcaggagatggaagggagggatggcggggacagaggtttgctttctgacagccgggacgagggacatgtagaaaaatagactctgagcaggttgcttggcctcacaaaataatctttcccccgtgagtacagttcacatgatcataataaattatcccaagaaacaaactatttaaggctcttgaaggtccggttcatattatttaaaacatctattcataccaaacaaataaatagccaggagaggaggnnnnnnnnnnnnnnnnnnnnnnnnnnnnnnnnnnnnnnnnnnnnnnnnnnnnnnnnnnnnnnnnnnnnnnnnnnncccggggtccttgtttccttagagtctactttggactgtcctactttattattcttattcttat

SEQ ID NO: 327273 - DNA, 729 bp, Homo Sapiens
  misc_feature (646)..(646): n is a, c, g, or t
gagcggctgctggcgaagtccttgagaaataaactgcacactggatggtgggggtagtgtaggaaaatggaggggaaggaagtaaagtttcaaattaagcctgaacagcaaagttcccctgagaaggccacctggattctatcagaaactcgaatgtccatcttgcaaaacttccttgcccaaaccccacccctggagtcacaacccacccttgaccaatagattcatttcactgagggaggcaaagggctggtcaatagattcatttcactgggagaggcaaagggctgggggccagaggagaagtaaaaagccacacatgaagcagcaatgcaggcatgcttctggctcatctgtgatcaccagggtaactcccagatcttgacactgtagtgcattttcactgctgacaagaaggctgctgccaccagcctgtgaagcaaggttaaggtgagaaggctggaggtgagattctgggcaggtaggtactggaagccgggacaaggtgcagaaaggcagaaagtgcttctgaaagagggattagccccgttgtcttacatagtctgactttgcacctgctctgtgattatgactatcccacagtctcctggttgtctacccatggacctagaggtactttgaaagntttggatatctgggctctgactgtgcaataatgggcaaccccaaagtcaaggcacatggcaagaaggtgctgatctccttcgg

SEQ ID NO: 327274 - DNA, 399 bp, Homo Sapiens
ctaatggaccaagcccctttgcccttccctcagtgaaaaatgaatctattggtccaagggtgggttgtgaactcccaggggtggggtttgggcaaggaagttttggcaagatggacattcgagtttctgatagaatcccaggtggccttctcaggggaactttgctgttcaggcttaatttgaaactttacttccttcccctccattttcctacactacccccaccatccagtgtgcagtttatttctcaaggacttcgccagcagccgctaataacctgaatgctgacaaataggaataagttacaactgaaaaggataagaattacgaatatcttagccatcaattcctggatcaggagttgtgacaatgtaacaacgtgttatcctgttattcatc

SEQ ID NO: 327275 - DNA, 541 bp, Homo Sapiens
  misc_feature (17)..(17): n is a, c, g, or t
  misc_feature (43)..(43): n is a, c, g, or t
  misc_feature (135)..(135): n is a, c, g, or t
  misc_feature (141)..(141): n is a, c, g, or t
  misc_feature (150)..(150): n is a, c, g, or t
cattttagattatatangcaagccctataatgaatagcattcncaaaatttatgaggcaaaaagattaaaattgttcaaaagcctgatttttgctggcaaagtttatccatgagaacatagcaattagccccctncctctncaaaagaanccctacaaccctaaaaccctaaaaccaatcccaaatcatgtaatttagaagaaataggttttcagtgtgtacgactgaagagttccattaaggttttgccagctggaggtttaaaaaatcccacttttcgaaaatatctgacaatcaagggcacagagactagcgtaatgctgattctcactggcgcaaacagcttgtggattgcataggccaccacgaaggtacttgtgcctgctgccatttttgactgtaccagggactctttaaatccgagtttcagcaggattgcaggcatgtccacaccactaggggggaagaagcaaagaaaacaattattacagcaagggattaaatgaagaaattgatttggctataagatttacagtatttt

SEQ ID NO: 327276 - DNA, 737 bp, Homo Sapiens
cgatttatcaggtttataatgcacttcaggagaaagttcaggcagtgtgtgcagatgttgaaaagagtgagcgagttgttgaatcttgtcaggcagaagtgaacaaattaagaagacaaatcactcagaggaaaaatgaaaaggaacaagaaagaagattgcagcaggcagtgttaagcagacagatgccgtctgaaagcttggacccagcgttcagtcctcggatgccgtcctctgggtttgcagctgaaggcagaagtacacttggagatgcagaggcctcggatcctcctcccccttactctgattttcacccaaacaatcaagaaagtactttgagccactctcgcatggaaaggagtgtctttatgcctcgacctcaagctgtggggctcttccaattatggcttccaccagtgccggactgaagtatcctggaagtggggctgaccttcctcctccccaaagagcagctggagacagtggtgaggattcagacgacagtgattatgaaaatttgattgaccctacagagccttctaatagtgaatactcacattcaaaggattctcgacccatggcacatcccgacgaggaccccaggaacactcagacctcccagatttaactaaacaaaagaaactctccacctagcactgtttttcttcattgcttactgagagggtttttgagaacttaatctggggggagaactgctttctcagataccttaactc

SEQ ID NO: 327277 - DNA, 462 bp, Homo Sapiens
tttacaattctctagtttatttgtccgaaataaatacaacctgagaacatccatttcaatgtccccaaacactatttatcccctgaaaaagcagcttaaaatatgggtgcacattttgcagcttatgttctttggttaggctctgaagggtgtttgttctgggctgggctaggctgggcctagctgtagagacacacctaagttccgttctctgtttggaggctgcacccagcctgagtccccaccagtcccctccaagagccctgatgctgcttccggagcagctgtcttcattgcctctcccttctgcagcctgaaaggagggatgttcaggactctgcagctctgtgtccagcccttgcagagagctttgtcctctgacatcagctaccacacaggctcattctcaactgacacagaaagggttacttctgaccctacagcagcttacccagggcaaag

SEQ ID NO: 327278 - DNA, 591 bp, Homo Sapiens
  misc_feature (68)..(68): n is a, c, g, or t
  misc_feature (71)..(71): n is a, c, g, or t
  misc_feature (458)..(495): n is a, c, g, or t
  misc_feature (497)..(497): n is a, c, g, or t
ccacctacctcagcctctcagggtgttgggattacaggcacgagcactgcagccagcatgagtatctnttnaatgtacgccttccatgctagccccagagatggactgcacatgcccaacactcccaacaggcacactgaatatttgtccagtgaattcttattattcccattttataggattaaaggagctgagaccttgggaagaaatgtcactccctcaaagggacaggaactgataaaacaaattgttgcggattccactgtgtgccaaggttcataatccaagggcaccgaggctctaccaagaaatgtgggctaatggctggtgcacaattacactccaagcaatagcatcatttggactatgaaacctgacttcgctcttagctgctttgtgaaactgaggatgtgcattaggtgtggagtcaatctgctctctttgaaatgagattcagnnnnnnnnnnnnnnnnnnnnnnnnnnnnnnnnnnnnnncnaaccaacgaactgcctgggagttcagctatctgcctgtctgatctcaggtctgaaagccagaccatcacccctggctctctctctcccaacaga

SEQ ID NO: 327279 - DNA, 784 bp, Homo Sapiens
cattatctcagtttactttaatttgcttgtttacacacacgatctgtgtgtacataacagtggcaagagccattctctaaatacaatctggtacccagactatgacagatgcacgtggaaaatgaggcgtcagtgaattaatctcaacatagaaaggcaaaataagcatggcagtattctatgatcacagatgcccccagagcctgggggtaaccgacacttttcaacataatacaggacaattttaacaaaagacccagactccaaatggcacccaaaatatattcgtttctctgccttctctagaggagtcagaaagttctaaaggcttactcaagaaaaaggaggcagggagactatggcctgctaagcacagatgctgagcactttacatgcaccatttctcttcatctccacctgacagacgatgaaaacgaggtttgccatgatcacacagctatcaggagtggtggccaagatatgaacccacatctcatgtttgcttgagcccaattcctttcacttatgtcaggctgtttcacataggaatagaaagcatgctcccaaggaagaggcaagggggctaagcatggacaagtggcggaagcctcatcgatacagaaggctctgcaattgacactttccacatacagttaatttagtgctgagcccgcatcagacccacgtgggataaatatctggagatttaagtgtcacaaatgaacttctggggtcaccctgtgcctattcccttttggtgctgaacatgacactttggagagcc

SEQ ID NO: 327280 - DNA, 708 bp, Homo Sapiens
  misc_feature (21)..(21): n is a, c, g, or t
cccaagtaattcggcacgagnctcaatttgggctgcaaatatgaagcctgaattttatgaaattagctttctgattcttatttattaatagattaagttctgaggcagctccgcaggactgtgtgtgaatgtgtatgtatacttacatatgtgtgtgcatgtgccatggggcggggggtatcactatactgtcctcaaatataagccaagggtaatttcagcggatgcgcacacaaccctgcctcccacagttcctcccctaatctggtttctgtgttgagcctggggatggaggagccctaggccaggcctggggattaagagtcccacagtctaggggagatctgagggcatccgacaaggcccatctccttccctcctcaagaagcagaggcctcctctggagtgagaggctccacccactacagcacaggcgggaatagcacagctgccctcccatgctccctacctgtcccctcacagggaggggagcaggggagggaaagaaaccaggcatctggtcaaaccagcagatcaaaaagcacaaagagctggggcagaggcaggaagcaggggccctcctggcagctcctctgagtggggagaggttgggcagtgagtgagggacccctaatgcagggactagaagcctcagtttccccattttacccttccacacaatagcctctgtaggttaggctgccccat

SEQ ID NO: 327281 - DNA, 857 bp, Homo Sapiens
cttttgaggtccctgagtctcgctccactgtacttcctccccatttaacgttttacattaaagaagtcagctgaatgtgttgtaaagttcgaagaatgctgttcgagggtggtagaaatatatgaaaatacatttgtgaattgaacctttgcaatgatgctacatcagtctgagtgatctgtactttgctatagtttttagaaaaaaatagttagaaatagaggtaattttaaaggtagcattgcacgtcttcccatctctgtgcttgcccacagacagaagtggggaatatacctaagcaggttgtggggttgttgttgttgttatgttgcttttttcggcagttgtgttcctgacataacaagacaaacatttctttcaacatctgaggccacacaggttaggacagcgaactgtcacccgggtcaagactatgtgcccatgtggtgaatgaaagtctagctcaaggaatctcctgggtgggttcttcacggggttcagacagcctgttgcaaaggtcagggctgtgttgtggtttacgtgtttccctggtaggaactgcccaggtctttcccagaggtggtatctttctctacgtcactttctgtactgaataaagccttgggcctctcatactgtcttgactatggggtgagtgttaatagggatagtatccataaagttctgagttctttattaattttataatcgcacaaaaaaatatgctaaataatgaagcatgtgaagtacagttcatttcccctcaactgtaaacttttcctgcatttatcttcgtttcctttaactcttatggactgtttatggtgctggtgggagggagagaggaattatcaagg

SEQ ID NO: 327282 - DNA, 819 bp, Homo Sapiens
  misc_feature (438)..(446): n is a, c, g, or t
  misc_feature (595)..(649): n is a, c, g, or t
  misc_feature (749)..(749): n is a, c, g, or t
  misc_feature (795)..(795): n is a, c, g, or t
  misc_feature (803)..(803): n is a, c, g, or t
aaaatatggagctcagaaaaggatgtgaaaaactttgcattttcctttcttcattattacaaaaacacctatgtgatgacataaaatacttgggtgatatcagaacaattatccttaatagtttttataattaaagtttcctaaacttcagtctccaatagtcttttaaggattggaaccacatcactgtcagccccgctgctacaatgcctttgtacaatttttttacataaggcaaataaggcttttgtacaaagcctgaataccttctgttccaatggtgtccaaatggttattatattgtgaaaaacctggccttggtcacaatgcaaacaaaagtacagatgaaagtgctttttggacagtttgcaaattgtgttaaagctacggattttttttaaagtgttcagcatcttaacgtgtattaaagctatggannnnnnnnnaaagtcttcagcatcctaattcaccctttctaacttaagaaaaacatgacttaagacactgcttctaagtttggttgttctttatagtgtggatacccagttatctgtgagcgtatgggggtgggcttgagggtcaggtgaggaaggannnnnnnnnnnnnnnnnnnnnnnnnnnnnnnnnnnnnnnnnnnnnnnnnnnnnnncgtcggaccgcttctaggctactaagtgtcaatggaaaagaaaatgtattcaaaatacttaaatcaaaactagaagatgggggaaaaaaagatttattcnatacaaagccctgtctggaccactttagagagactcctattttttnacccctcnataaatatttgatggc

SEQ ID NO: 327283 - DNA, 464 bp, Homo Sapiens
  misc_feature (287)..(317): n is a, c, g, or t
agaaaattacattactttctttctttgtttcacattacaaaatctttttttctttacacaaatcacattttattgcaggaatatttcaagtgccatcaaatatttatagaagggttaaaaaaatagaagtctctctaaagtggtccagacaaggctttgtatagaataaatctttttttccccatcttctagttttgatttaagtattttgaatacattttcttttccattgacacttagtagcctaagaagcggtccgacgcacacacatcatacacatgcaaatnnnnnnnnnnnnnnnnnnnnnnnnnnnnnnntccttcctcacctgaccctcagcccacccccatacgctcacagataactgggtatccacactataaagaacaaccaaacttagaagcagtgtcttaagtcatgtttttcttaagttagaaagggtgaattaggatgctgaagacttt

SEQ ID NO: 327284 - DNA, 747 bp, Homo Sapiens
  misc_feature (331)..(331): n is a, c, g, or t
  misc_feature (367)..(367): n is a, c, g, or t
  misc_feature (376)..(376): n is a, c, g, or t
  misc_feature (385)..(385): n is a, c, g, or t
  misc_feature (610)..(695): n is a, c, g, or t
ttttgtcttatttcatagttggggattaggcttaaaatcctagagtggatttattcagttaaatttattcacactaagatgtagatgactaatactgtatatttttatgtagaccaaattttaaggtaccactgtgcatatgtataccaactacctgaagaagtatttggttggtacaagagatatagaaaggaatcgctgggtgtaccaaggctaatcagttttataattttgcataattttctaactgcgattatcatttagtttagaacaatttatttctcaaggcccatgtaaatattatttttaaaatatacagtcttaagaattncatgggcatattttatggaaaggaggaattcatgtnctgatgtgncaaatagtncttaacatattttctaatttcagaggcaaaaatatatatgtatgaataaattaactgtaaattgtcagtaggaaccttaagaattcgtggcgtattttatgaaaggaattcatgtctgatgtgcaaatagtcttaacatatttgctaatttcagagcaaaaatatatgtgtattaataaatcaactgtaaattgtcagtaagaaccttaatggctttaaaagttnnnnnnnnnnnnnnnnnnnnnnnnnnnnnnnnnnnnnnnnnnnnnnnnnnnnnnnnnnnnnnnnnnnnnnnnnnnnnnnnnnnnnnccaggtagagggtagaggccagtctgggtaacacagcgagaacccatctctt

SEQ ID NO: 327285 - DNA, 401 bp, Homo Sapiens
  misc_feature (82)..(122): n is a, c, g, or t
  misc_feature (160)..(212): n is a, c, g, or t
  misc_feature (325)..(325): n is a, c, g, or t
  misc_feature (380)..(380): n is a, c, g, or t
  misc_feature (386)..(386): n is a, c, g, or t
tgatatcatctcaacttagtattatacccacacccagtccaattgtttggtatttttaaaacataggtgtattcatgttacnnnnnnnnnnnnnnnnnnnnnnnnnnnnnnnnnnnnnnnnntgagccaccgcatgcatagacttctttgcccatcaggnnnnnnnnnnnnnnnnnnnnnnnnnnnnnnnnnnnnnnnnnnnnnnnnnnnnncaaatcaatgaaatcttgctgaagtaagtgttaaagaataaaacccattattagtggcaggaatggacaattcccactttagtcagtcctatctgcagaatgccaaaaaaganaaatagtattttagggtgtttttatttttctgaaacacaattatttcacttgaancatccnttaagaagtctatgg

SEQ ID NO: 327286 - DNA, 724 bp, Homo Sapiens
gagccaggcccttggttgtttctgagagaatacaagggacaccacagggagctatcttccactccagttctggagcactcaggccattggggagctcccaaaagatggatttgccctcctatgtcactttggcttttctgtcccttttgttttgcactaaccaattttggattgtcagacactgtacaaacaaggcaggataaagattgttcacaacagtagatgtgtaatgagcgaaatgaatcccaggtttcctctttgaaagggtctgcactcaagtttttggatgtttaacctggcacctgtccccctttcgtaccctgggctgacttccttggagtttgtgtcccttgcaccctgaaacaatccacctgtttcctcccacagaatgtcttctcccttcacccattcttttcctttggaacattttttctttctagttagcagttgaagcagtgatgttgcaagaacaccagttccttttacagggtgacctgcctgcgctctgtctcacttggcactgtggttcatttcattacagtgtaaagggccaaggcctgcaggggcctgataatcataaactgtgtgtgttgcaccattcatcccctggcatccaagaaatagaaactcagaatgctggcagttttgccgggaacacacctcctctctaatgaggaaagatttcattgtccattgtttatttaaaacaaaggcatgtgaaagg

SEQ ID NO: 327287 - DNA, 863 bp, Homo Sapiens
  misc_feature (499)..(620): n is a, c, g, or t
gacacttttggggttcaaattctcactttgaaatgtcttagctaagaaaactttggcaagagctctgcaaggtatgtattaccatcttcatttgacatagcagaaactaacgcttggtaaaaactagtgagatagtgtatgtgaagtacttttagtggagtgctggcccacaaaaggcattcagaacttggtcactattattattaggagtaacaacagcagcaatctgtatgttattgactttcttataggagaaagtacaatagaaaatggaagtgtccagtgtttcatcattttgcagatataaatctttattacatgcatacttttcggtccaaaccagtatcctcgctgaagttactacccagggggaaatgatttgtatccacttagggatcctgaattaactcacagaggacctacccttcttgtatttttttcttaccaatcctcaatgcctttaccccttgttaactgacatataattgctacttcctcnnnnnnnnnnnnnnnnnnnnnnnnnnnnnnnnnnnnnnnnnnnnnnnnnnnnnnnnnnnnnnnnnnnnnnnnnnnnnnnnnnnnnnnnnnnnnnnnnnnnnnnnnnnnnnnnnnnnnnnnnntctgtagcctccaccaggatcactgggtgttattcagctggtgtctggaacaatttggagggtccaaaagggtgtgcttacatgcctggctttttgatgggaattgctagaaggttaggctcagctaggcttttctccatcccaggatctcaggatcttcccacacggtctctccatcagtgcagttggacgtcttacatggttgttcagggttccaaggatataaagtaaaagctgccagtt

SEQ ID NO: 327288 - DNA, 452 bp, Homo Sapiens
  misc_feature (314)..(314): n is a, c, g, or t
  misc_feature (352)..(352): n is a, c, g, or t
  misc_feature (408)..(408): n is a, c, g, or t
  misc_feature (439)..(439): n is a, c, g, or t
ttcggcacggaactggcagcttttactttatatccttggaaccctgaacaaccatgtaagacgtccaactgcactgatggagagaccgtgtgggaagatcctgagatcctgggatggagaaaagcctagctgagcctaaccttctagcaattcccatcaaaaagccaggcatgtaagcacacccttttggaccctccaaattgttccagacaccagctgaataacacccagtgatcctggttggaggctacagagagcagaaaatcacccagcttcagcactgtctgggcattcctgattccacaaaattgtgnaggttattattaaaatgtttatttttaaccacttaatntgggggttaatttgttatggcaacatagggtaggccagagggagttggcatttatntgttcgtttaacatggggttaaagggctttngagggttttgtta

SEQ ID NO: 327289 - DNA, 876 bp, Homo Sapiens
catttttattaaatagtttatatataaaaagaaatgtcaaggtgttctacattcatataaacaatcagggtaacatttgaaattgtaaagaaacgcactgaggaaaatatagacttaaagagttacaatgctaagctaagcacaagtgatcatcctagagtatcttttaaatatataaacacaggtttgtgccacttcagaaggcaagcacaggagaaatacactaatgttatctttcttctttactttttcaccataagacaggatggtccagtttggaaaaaccaagatcttttctaagttccaaataggtgccgttgctcacccaagagtcatcgtcggatttcctgaaaaaccgaggctggtgctccacatgattttcttctaagacccgccgcctttctctctgcagttgttcaatcctctgcttttgtatttcagcttcttctaagttcccttcctctagaaacctctggtctggcctaaatcgagtgtcagtaggtggcaataaagactttgatgatggatccatttcatttaattccagcgcaaactgtgtgaagctatagtattgctccgtagcctttcggcatagggatttgctctccatacacaggcagaagaggagccgccgccacagtagatgctttcatgccatttcccaaacagccgatgaaccgcttttccactcctgtcaaacactgtgccttcaatctcatgggcattagtgctccagtattttgcctttataaaattcactttgcagtagcaggaatcatcatgcaggttcttgatgacaatctctccatagtgctcaatccacctctgcccgcttaagatgttatggatgcaagaggtcactttgttccactcaaa

SEQ ID NO: 327290 - DNA, 1063 bp, Homo Sapiens
  misc_feature (657)..(697): n is a, c, g, or t
  misc_feature (912)..(938): n is a, c, g, or t
  misc_feature (1021)..(1021): n is a, c, g, or t
  misc_feature (1033)..(1033): n is a, c, g, or t
ttgcaccccactttcccagcttctgcaaactgtcttgaaatagactttatagaaagataggaaccatttccactaaaatgagtttaatgtagggaaaaaactcaaagtatacactgaaagtagacttctttgagtcatttacagttaaaaattattttaatctaaaggtgtatttgagtgtgtgcacaggtatacacatagaccgccccccaccccatactcattcctgtggcacacttcttgctagttgttggcactgttaaataaaaattacagggggccatcgttttggactaagcttctgcacttggccccaacaaaccagattgaaaatcaaaatgggagtcactcatgctaaaagttccatgttcaccttccaataaatcaggggaggaagataacaatctaattttccaaacagggcagtttcaatcttcaatcagcctgatgaagttctctctgctttaatccttacaacaaaaagtaacctgaaggaacgtgatgttaactagatatttttttctctattgttctgttttcctgttcctggattacaaagaaagtaactatgcaatgaccaattgcttttgttctgtgtttctgctttctctagcccttttctgcttacaaagccaaccatctctgcccactcattgnnnnnnnnnnnnnnnnnnnnnnnnnnnnnnnnnnnnnnnnnaatatttaatggaatgaagtgttgttctattctaaaattgcaaataaagctacttgagctcctgaaagtaaatttgttgtaattttgtcctttgacagatccttttcctcctctttgagtctccttccggttcagcagatgaccttggttatgagtttcatgagaatcccagggtgatctaatagaagctctctcatttatcttctttccatctnnnnnnnnnnnnnnnnnnnnnnnnnnncttgtgtcagagaatcatctacctttgtttcaaagggttctagtcctgctttcaatcccatgacacttgggcctgatggatcntttcgaaagtgnaaattgtgggccccatggatgggcatcatg

SEQ ID NO: 327291 - DNA, 358 bp, Homo Sapiens
tatatttttgagctacacattttttgacaaatatgaattccttccaatctcctgggtttttgttggatctctggaattgccttcaaagctgtattccactcatagaacctaattcaagggaatgccatgagcaaaatggaggcaggaaagcaagagcaggtaaggagagaaagttcaccctcctcgggaaacagtcatcggagggctttcaaatgatgccatcatggggccacaatttcactttcgaaagatccatcaggcccaagtgtatgggattgaaagcaggactaggaaccctttgaaacaaagggtaggatggattctctggacacaaggaaaaacaataaaaattgtaaaa

SEQ ID NO: 327292 - DNA, 528 bp, Homo Sapiens
ggccgcttaattaaataaatacacatttttaaaacaaagaacagatccaaattgagcccagctgggccttgggattcttcagaggggaggctggtttctgaatggtaaagaattccaggagattctgaggttctccctccccagtacaggagatggaccccagaaagaagacaacagcgtgccatgcagattcttctgcagggaagccacccttggggagggggagggctgctggagatcagctgggtggtgcggctgccatctgggcccaggaagcaggaagcagccttacctgccaggacaggtgtgggggaagggaagggtgaggccctaaggcccaggggaggctcagcctagagggaatcccttttccactggagaaagtcctgggcagccacacccatctccctttcttcctgtcactagggtcactatagtgacctggtttcctcaggaagagacccaaatcacaggccagggccagtccctggttctccttacgaagagatccagacccagaaccctcct

SEQ ID NO: 327293 - DNA, 795 bp, Homo Sapiens
  misc_feature (327)..(327): n is a, c, g, or t
  misc_feature (753)..(753): n is a, c, g, or t
gaaattatattttgtaactataaatgatgtttcacagaccttcacaatgtttgggtccatttaaggggaaaaaatccctacaaattccaatattgatttaaattatatttattataatattatttaaatatgtataaacaaaaaccagctataaattcttgtgctcttgcacaattctacagccaaaccaagagagccacaaaatcagtgaaactcaagtaaatgttaatttgggtaggatactgttgttgggggttttaaaaatgtattattactgtactgttaaatatcatggggataacttgttctcccaccaattttcttttnctttctttaatgatgtcccttaggtcatatcccactaactttctatatatttctatatttccaacattaatttttatgatgcattacttgatttgcccagaatgtattatggatatatgttcttatcacctttttttctccattaacctgatgtatttatttagccagatatgctgtttatcaacaaagaaaatatatgtggtttatccttgacctcacctggtctttatttggatgccggtagaatccctttctgagatctatagggagggtgggttatgtgcatagcttttgagccagagtctaatgtttagattctagatactaaaatagattatttttctgtttcacatctgttggactaaactagaatcttctataactgtgggagtacaaagaaagatttcctatcactccattggttgnttggttgattgactaattgattgggagccacgcctccctgga

SEQ ID NO: 327294 - DNA, 522 bp, Homo Sapiens
tttaacctgtggagcacgtgtatatctatacatatgactgaagaattcatctagtaattctgacaaaaatgatagacttaaattaagtcagaagaattgggtacaaaattgggatgggtttgggagaaatttaggtaatgtcagaagctggttaacgactgactagttctgagggtcagcagttgtaaaggtctggggaggtggtgcttaagatgacctccaaggtttaggcttggatgacctgggtggatgatgccattagtcagcatagtgaataagaggtgcagggagggcaggcccactagggtagttagacagaagttcagttttggatgtggacaatgttttctcatatgtctttcatcactatattgtcagctacatgactttagcaaatactaacttacttgacttttgagatttttagcctagcctataattctgcagaacactatcacattattatcattatctccagttacttttgtattaatttcattgcattttatacatacataaaag

SEQ ID NO: 327295 - DNA, 457 bp, Homo Sapiens
  misc_feature (440)..(440): n is a, c, g, or t
ttttatgtatgtataaaatgcaatgagattgatacaaaagtaactggagataatgataataatgtgatagtgttctgcagaattataggctaggctaaaaatctcaaaagtcaagtaagttagtatttgctaaagtcatgtagctgacaatatagtgatgaaagacatatgagaaagcattgtccacatccaaaactgaacttctgtctaactaccctagtgggcctgccctccctgcacctcttattcactatgctgactaatggcatcatccacccaggtcatccaagcctaaaccttggaggtcatcttaagcaccaccctccccaggaccttttacaactgctggcccctcaggaactaagtcagtccgtttaaccagcttctggacattacctaaaatttcttcccaaaccccatccccatttttggtaccccantcttctgaccttaaatt

SEQ ID NO: 327296 - DNA, 578 bp, Homo Sapiens
  misc_feature (516)..(516): n is a, c, g, or t
aaaatagattttgtagatagtttattgcaggttggagaagggagaaaatgaaggaaggggtagagggggcaattatcacgcatcgtttcgctatcgtatttgcaaggggaagaaaatctcaatgcatacatggttcgaaagtgattatttagacagtaagcagtttccccaggaaagctcctcagagggtctcctcgcaggctgcagattctagaaagtctgcggaagagtagttcgcaggtgcatgtgtctgggcgacgcgctgcgtgtggctcagttggtggcagtctctgcctctgtccgcaggtcctggggaatgctctttgcctggtccagccccgacaaacgtggtctgagaacagcggagcgcggaaaccgcggagcatgactcctccgaagctgcgagcgtcgtgtcgccggtcgctgctgctgctgctgagtggttgccctcctccggtgcgctgagaagtggcactccctctgcaacttctttgtcaatttctggaacggctgagnaccctgccggcttagggagggttgatgggggaggcgtggggaagggaaagctaagggcgtcc

SEQ ID NO: 327297 - DNA, 897 bp, Homo Sapiens
  misc_feature (552)..(565): n is a, c, g, or t
cagtatcagaaacctgctcttctcctccatccccacagttctagctcagcacaagccatatttctcaacctcccttgcagcaagatgagtccacgtggctaagcagcagccagtgggatgtgaaaagaaatcaggaatgcaacctgagggccatgcacattttaaaaaattgcttattttttacttctcttttctctttccttggactagaacttgacatagtgttgaggggcaagcctcatcaagaaaatggaacaacactttggaaaggcagaacaagagagaaggaaccaggatccctgagagaccatatgaagcggcgcaccttcccaccctccatcacccaccaactctgaactgtaaggagagaaagaaataaactctgattttatttgagccactgtattttgagggtttctttggtacacccctggagcctctctgtaactaatacatttgcaaatgatctacataaactggctggaaattagttgtatgaatccactatggtgacttcagccaaaagaatataatatccagcctcagcaagtnnnnnnnnnnnnnntgggagaggagagctactgtgtgatgcagttattttttcaagaattctaccagaaaatcatatcaaatatataaacatggaagagaaaaactaaaagaattccacaggacaattagccatgaaaaggcttagtctatcctagaatgtcttgttattaaatataaagaagcagaaaaagggaaattctgtatatatttaagaaacaaaaacaaatcttcctagtgcaataggattaaaactatttttacatgcttattttaaaagactggaaagaaataaacccacattataataattatttgtatggaggtaacggcttacatttattgagt

SEQ ID NO: 327298 - DNA, 357 bp, Homo Sapiens
ttagggccagaagccttatagatctgggtgaaggctgctcccacagcacagtagggagtcctctgggtccagagagctcccaagggctgtagcagcttagggccctgtatcctgcaaggctctatcttatcattaggaaacagctgtccatcgagattttatggggtctgcaaaggaggcaggcactaaatggatgaaaatctgcttatatgagctatttttgttaatgactgggcatggtaaaatttgagttaggtatgagccaagggatcagcaccagtcgacagtgaagaaataaacaaccgaggggccaatacacagaaacaatctttgacttgtttacataacacctctcaa

SEQ ID NO: 327299 - DNA, 284 bp, Homo Sapiens
  misc_feature (35)..(35): n is a, c, g, or t
cctcctgggaatggtcccccctcccctcaactggncaagccctaaggcctgttcctccatgcctggggaaggggccttcccgcctccttaatgtaaacccctgtccccaagtgcctgcctcaatgaaagcttgtatgtcactgcttttttatggtccctatccttttcgttgatcagccctcaaatctctcaacccccccttcttattttaaaactgaggaaattaagacccataaaattggaaaaacttatctaaagtcactaagtgactaaccacagagaac

SEQ ID NO: 327300 - DNA, 267 bp, Homo Sapiens
tggacctgcctgatcacccccaggcaggtccccccgcccctcacaccttggtgaatggtcgccaccccactggtaggcagaggagcctggacacctgcaggaaaggtgggtacctgaggcctccggggagctgcccccgaacccaggaaggaacggcgtggagggtgaataactgccctccttcttggagctacaggagggtgatcagagggttggccctgactcagcaggctcagagccatatagcaacgtgtgcactctcactgt

SEQ ID NO: 327301 - DNA, 978 bp, Homo Sapiens
  misc_feature (485)..(526): n is a, c, g, or t
  misc_feature (850)..(850): n is a, c, g, or t
  misc_feature (888)..(888): n is a, c, g, or t
ccatctgcgtgggtcccttaggctatgtggctgactttaatgctacagatatttttccgtttctggcatgtagcagtgctgggcttagcattgtagagattataaaagagaagacatggcccctgccctccaattgcagagatgagaccatatggaacacaattagccattaaagacaatacatttcagtatttgcatggagtatttgattatatagcacatgcaaattctttggaatgacatacaaggccctgcaagatctgattctaggccactttcccagtttcatctgctactctcccacggatccccccacatcccagacatactgaggtgtgtgcagtcctctgagcccaccatgcttccaatgtcaccatctctttggtaggtgctgtttcttcttcctagaatgcctgtcttgttcctatctgcctggcaacttcttactcatcttttagaacactgtctagtgccagttctttccnnnnnnnnnnnnnnnnnnnnnnnnnnnnnnnnnnnnnnnnnnctgtagtgtgacccttatcacataagtcagttttgtaagtctgctctgcctgttcattgttggagttactttaggtcaaagaatccgtgtctccagtgatggaaaaatgaattgacaaattagaaattggataaatgggaaggaaggagtgatgatctaacatggctgggggtcagtggggaatcacttttcattggccagaatagagagcttaaataaagtggcttaaaggcattagaggttcatttgcatgtggaaaaagcctggaggtggatggttgagtgctggtgtgggtgccacaatgtcatcaggagcccgggcgtntgcgcagcttggccacctttaatgcgaagtttccctcnacagggtaatctcgtggctcaaaatggttgctggagctgcagccatcttatccatttcaggcaagaaggactagagaggtcagctggtac

SEQ ID NO: 327302 - DNA, 771 bp, Homo Sapiens
  misc_feature (302)..(322): n is a, c, g, or t
aagagtgttcctctcataatacgttgtaaagtaaaacattctgtttatggctagtatgtacaattagaaattataaatctaagcctcaaattgatgttactccatctttacctcactggagtgttacaaaagctgctgccaggcaaactattacaaaaggaagcagaaccgcctgcctggcaggatcctttgcagggatggttgcagcatgtttattccatatgctttcgttgttgttgctgtttgtttctttgtttgagacagagtctcactccagcctgggcaacggagactctgtctcnnnnnnnnnnnnnnnnnnnnngatgaatgaaaatatgaaatatataaactagtatccatttatttgcatttattgtgggatttcagatatgaacggtgtaaatttgagaagcacttatgcatacatgtgggtgaaaaaccaatctaattttgtataaataaaaacaggctcctggaaggtgaaaagtagtcatttgttctaaatctatacatattacttgtatctagtgcagaataagctataacatcccattgaggaatcttaaatttcatagacatgtaaagctgaagtaactctaaagagcagatgcttcagaaccatcagaaggttctggtcaacagtcagtattatctcttaaatgtatatgttggtcactaattgcacaaaatctataatttgccagggctttagagattgagtcaatatgtcatttaccatggttttcccactgaaggctttaacttttctga

SEQ ID NO: 327303 - DNA, 717 bp, Homo Sapiens
  misc_feature (700)..(700): n is a, c, g, or t
ttataggacaaatcaagttttatttgacaataatattaaattccactcattagttcctggacatctgttgatcacataataagacaacctgcccatacagcaaaaacatattgaagatacatggcccgccactcttctggagcttagagcaagagcagacattaagacaggggagagacggccaggcaaggtagaagctggctctgtccacgtctctcaagtcatgagtactctgggctggaatttcacgtaaggccttttgggcataatgaattaggaggcggggaagagggactttgtgcaggatacagttcatgcttccgtgggctactttctccacattcagtccagatcctcgtcttgacttctggccctatctctcttagcccatgtttgcttccagcttcttcaaaccatttcaagctgggtgctttgaatttcagactctcgtgtcctatcctaggctgaccatttcccatgcaccagtcccatttcccctgagtcgggcactaagctctgtgaggccagtcactccatcctctgttctgggatcttgcccaggtgccagaagagtgccagtgaacttgcggatatggaagattgtacacgcagagtgagatgggagtgggagggccaatctgatacagaagggggtgaaggggtagggcccctgagcagcccaccccttaccctgacgaangcaatcctcctctggaa

SEQ ID NO: 327304 - DNA, 457 bp, Homo Sapiens
  misc_feature (421)..(421): n is a, c, g, or t
  misc_feature (427)..(427): n is a, c, g, or t
tcatttctccagcactaaaatggagtggagagttggggtggaaataagacatccttaaaaggttaaattgtctgcaaagcacctagcccagtgccgagctcccagtaggtgttcagtaaagcttagtgcctgactttctgaacactgattcctcctgtttggagtcactgggatactctcattgccgttgggatgttcctcactccttcccagttcgtggctgaggcagaacccagactgaagagggaagagacattccagaggaggattgccttcgtcagggtaaggggtgggctgctcaggggccctacccttcacccccttctgtatcagattgggccctcccactcccatcttcactcttgcgtgtaacaatctttccataatccggcaagtttcattgggcatttttctgggcacngggggnaaggttcccaggaacagagggtgggagtga

SEQ ID NO: 327305 - DNA, 672 bp, Homo Sapiens
ttttttttaataacgaaaaagctttactagtgttttaaccgtgtacaaaacactgtagcaataagagaaaggcccgtgctatctgtgtttaaacaaaatgcagtggctgcggggcttccaggcagggctggggaacaggccgggcgcccgccttgggcgcatctccgcctcttaggggtaagaggctcagagcctaccccttaggcctagttggatgcgggtcggtcctgcccaaggccccagtgaggggagccgaggctaggaaggggcaagttttatgtgtttgggagggggtgtctcttcccggcctctgcgtcttccccctggagcgtcagtatggtcaggctctggtgacccagccgctttgcctcccgactttgggaagagtagcaaggagaggtcctggcaagtacaccctgggtgacaaacggctatgagagttcccaggtgatttctcgagcagcttcagtttaccggagcccagccaggagagagaattttagcacaggaaacgcaatcccgtgtccaagctcctagaatacccaggactgagaaccaaagcaacagacttttcccagggagccacactgcctccccacctcttctttaacccctcacttggcagctccaggagttggctgctgaagacagagtacaggagggcatttcgtc

SEQ ID NO: 327306 - DNA, 828 bp, Homo Sapiens
  misc_feature (22)..(22): n is a, c, g, or t
  misc_feature (81)..(81): n is a, c, g, or t
  misc_feature (102)..(102): n is a, c, g, or t
  misc_feature (143)..(143): n is a, c, g, or t
  misc_feature (638)..(652): n is a, c, g, or t
gaccagataaaaatatcacccncaaattcaaactacaatgtccctggttcataaaaccagccaaccctcaaaagtaagcancatttcctagtatatctcaancttctaccatgtgcatataaattacattcagtagttaatanccggaaatttatcttctatggaggaaagacatgccaatacaatggaaagtcctactgctactactaataaaaatactcatggtaaaaatatgaagaaaaaccagctaagttttaagtttcaatatgataggcaacataggcaacagtgtacaattttaaatatttgactggcttcgtgttgggacttccgcagtttccaattttagatatttcaatttactgtttacttacctcaatatacaatagaatacttagcaaataaaatttcatacaaaagccacataaccaggaccactgtttcgtttttacaggccattccaaattaagagtcaggactttaaaatcgaccacactgtgcactgtggtacaagttttggaactcaaggcgcttaacttattttaaacctatactgttgtaggttcagtatccgaacaagcacaagtaagattcacacaactcatttgttgagtgtcttaaatacagacttagaagcnnnnnnnnnnnnnnngtttcttctcatctgggagttagttcatttgttaagttaaagggattattcctgtgaaatcatcttaaaggtttacagtaaagaacacaattctaagctcccaatcataagaagtaataggaacttcactggcatagttactggcataaaggtacagattcaatagttgtaagttt

SEQ ID NO: 327307 - DNA, 718 bp, Homo Sapiens
  misc_feature (351)..(351): n is a, c, g, or t
gcattttgtctataaatcaggcacgacctcataattaactcaaggttgctatataaagtactgtaatttacttacttcaacaccctgtaggataaaaagtgtgtgcccttaagtcaaaacctatttgaaagtgtccagcatctcaaaatgatgccacctgcctccaatggtccaaggtccagaaaccagcgaccatccaagctcctctttcagagtatgaaacggggcttctacaagccagttatggaaagtatctctcttgtgtaaaattcccaaacagttgtcactagagactttggttcacatgaaaaaccagtaaaggaaaaaaattcctggttaagagaaatctgnactggaaatctgaccagagaaatctgtcaagccagtgctatttctggatcacagttttttacagagagagggcctgttggaacgattttgaagtgatgactggaaggtttgactccctctaagggaatcttgctggtgtttggaagtgtccgatctatgttatgcacgtgttctgtctatgaggcgcttctccacccactgtgtccttcaaccttgccatggcagctttggccactggggatattgttgacctggggaaccccacccactctcctaccccctcgaacccaatcccttctctttttacaaatcaaccaaatactttttaatgtgttttatccttaaataaactttgtgttcaagtatt

SEQ ID NO: 327308 - DNA, 417 bp, Homo Sapiens
  misc_feature (354)..(354): n is a, c, g, or t
  misc_feature (366)..(366): n is a, c, g, or t
  misc_feature (384)..(384): n is a, c, g, or t
  misc_feature (390)..(390): n is a, c, g, or t
  misc_feature (401)..(401): n is a, c, g, or t
gtttcctgaattttattatgcattaatagaatggaccaattttagctcaacttttagtttgttagaagcaagtgtaggaactctagcactgtagtttttaattattgcttgtatctattattattaattccaacagagtataatgtatatttattctataaaatatatattatcagagtgcatttgttacaacttaggttcttttcttaccaagtattaagaatctagtaagagaatactaggcaaaggacctagccctgtgaacagattctcgtatgttatatacataaacccactctcaatattttttgagttttattacttttttggattggataaaacactggagggaantctaaaactctnactcacactggtgtggcnggtccnagggagggccnctttttccatattttt

SEQ ID NO: 327309 - DNA, 544 bp, Homo Sapiens
tgagccaccgcgcccggccttcacttttatataatttatatgactcgagagttttgcccatgatcccaccaccccagcacatcagtgttgaaacgcttccaggagttcggtgccctgaccacagcctctccttctctagccctctctattccccacttccctgttctttggcttcatcaggactctcatctgtttcccagtccattcctccctgggttcagcactttacctttcctacgcataattaatgatttgtcttcactcatgactcatcaaatatttgagcgtcagctggggataccatgaggcagacaaggcctcttgtctttttggagcttgcattcaatgcgtagagacgccaacaacatcatcacataggctggtaagatagtaaggccattattatgtgtcaacagtgactcatgcctgtaatccccgtgctttgggaggctggggcaggaggatcatttgggcccggaggtttgaggcttcggtgagttataacagccccattgcactccagcctaggtgacggagcaagacc

SEQ ID NO: 327310 - DNA, 480 bp, Homo Sapiens
ctgcaggaggttggactgcaggtccgggtgtaggcggccgcgggccaggctgtcactcaggttccggttcaaggtcaggacattcagcagaacctgtggtagccaaggtacagaaaaatcagggctgtcccaggggtgatggtccaggattcctcagctctcacccttggtccaggctccttagtcttgagaattcttacaccgggtgtcatctgagcctcctaacagcccctggaaagaacaggcaggcctgtgatgactgtttccatttcacagagagggaaagtgaagtccagcaaggaaaatgacttactccagagtttagaggaagccagggaagatacaccactagaaccaagtctctttaatctagcccggggctcccttcttttctctctggatagggcaaggttaatagctaggagtggtctagggcacaatgtgggtgcttttaacttagtggttaggagtgtgcgtagg

SEQ ID NO: 327311 - DNA, 369 bp, Homo Sapiens
  misc_feature (79)..(79): n is a, c, g, or t
  misc_feature (344)..(344): n is a, c, g, or t
gtaagtcaacgaatatccctccttcaaaaatgtgtaaagcctaacagaaatgttgcctggtcctgggccgtgggaaaanaaggaaatttcacccatcaactgaaaaaattgaaccacgactccccttgttttggccaggagatcttgggcatcttgaaggcagtggacggtgacttgggccctggctggggaaggccgccgacaacctcttggaagatttcctggttggtgttgaagccccaggtctccagcactgccttgaactcgtctcccatcaggctgagcatgaggcggccatcctggaaagctaccttggccagcgagtggaagactcgctcagagangccagaagtacagcatgcgggtaga

SEQ ID NO: 327312 - DNA, 1003 bp, Homo Sapiens
aaagaataaatgtccccagcatctagtttgacaatatttttttgtgaaatgtatatccttccatagatatatataccttttgtagatacatacctttcatcttaaaggaattatgccttgtaaaagggtataattcctttaatatgaaaatcagattcaacttctgtgtgctttttaagggcaaatataagtgagcaaataaatttgtgtggattatttagaaagtgtagatataaataattttcaaatatgctttagaacactctcccactctgggaagaaaattttagaaaaaggataacccctgcatttctttccattagaagtacatgatcaaaagacaaagtccctttttcccttgactgtgacataacatgtccctcatagggcaactgaacagataaaaaatccagacgatgcttagtaatttcctgcttcccctttagtgcacagtgtattatcagtatgttttgccctcttttattttaatatcttgctggatttaaattatctcatcgggtttttaagcacaagcccagcctgctttctggatgacacctgccacgggtcatccttcctggaatttcctaaatagccccagaatattcttcaagccatgccccctggctcatcatcccaacttcagagaatcaactggctagcaccttggagcacctgctgtggtaacgtgagtggctgaacaccagacaaaaggaggctcccaatcactgttgcagatcttgttaaaatcctggctctatccctcagcttagggtgtattcttcttgtactaggataaagcctctctgacctcttcattaaggcctaagtatacagtatggtatatgacaagcaggaccttcctctcctccccctgtatcttcccaaactacaaaaacagaaagcccccaaccttctcacccctgcctcacacaaatccccacagtggactgtttaaaaaataacagtacttggtagatatatattctcacttgctttcatt

SEQ ID NO: 327313 - DNA, 651 bp, Homo Sapiens
aatcttgttttaatttgcatttactttatttcaagtagggttgagcacatattcatattttaattagccatccaggtttttattatgaattcctattcagatcctttgtccattagtattttttaagttgtgttgtcctttttcttattgattcataggaattctttatgaattcaggacattaatctgtttaagatatttgtatactgcaagtatcttctcccagattgacgcttgttatttttattgtgatttttttaatgaagtagtatttgttaccaaaagtaaatatgtcacatacatacatctgttaattacatacatttatcaaattaataatgccataatcatgaaaatgaatagcccacgagttcaactgaagaaccaaggaataccaatattattaaagctaaacatgtactcctcctcgtctctcctgcttctcttaaccactatgctgaatttcgtgttttgtcactcctctgcttttaaaaagaattttgccatctatctctctaaatgagatcttagttttatttttgagctttattaaaatggtaccattctatatacagtcttctgctattagattcttcctctcaactttgtttctaaaattgattcacactgtcacaagtagctgttcgttca

SEQ ID NO: 327314 - DNA, 451 bp, Homo Sapiens
  misc_feature (266)..(369): n is a, c, g, or t
cttcattttccaaaaaaatctttctcttcaacaaagcaggaatagttacattttcacaatggaaaaatctgctgttactgtaacagcctcatctcctggaatatttccaccaatcatgcacagagctgtgctgtacttctgcaaccgcaggtctaaatgggacctgccagtaaatgggggagccacgcctgactacaatcacttcactattaataaatgatcagcacttgaaaacatgtatagcgccaggcagggtggctcgcacnnnnnnnnnnnnnnnnnnnnnnnnnnnnnnnnnnnnnnnnnnnnnnnnnnnnnnnnnnnnnnnnnnnnnnnnnnnnnnnnnnnnnnnnnnnnnnnnnnnnnnnntaaattagccctgagatgccatgcaggcctgtactctcagctacacgggagactgaggtgggaagatcgcttgagtccagga

SEQ ID NO: 327315 - DNA, 425 bp, Homo Sapiens
  misc_feature (28)..(28): n is a, c, g, or t
  misc_feature (55)..(55): n is a, c, g, or t
  misc_feature (240)..(343): n is a, c, g, or t
  misc_feature (359)..(359): n is a, c, g, or t
aaatggttaacattttccacaaaggganaaaatctgctgttaactgttaacagcnctcatctccctggaatatttcccacccaatccattgcacagagctgtgctgtacttctgcaaccgcaggtctaaatgggacctgcccagtaaatgggggagccacgcctgactacaatcacttcactattaataaatgatcagcacttgaaaacatgtataggccaggccagggtggctcgcacnnnnnnnnnnnnnnnnnnnnnnnnnnnnnnnnnnnnnnnnnnnnnnnnnnnnnnnnnnnnnnnnnnnnnnnnnnnnnnnnnnnnnnnnnnnnnnnnnnnnnnnntaaattagccctgaantgccatgcaggcctgtactctcagctacacgggagactgaggtgggaagatcgcttgagtccagga

SEQ ID NO: 327316 - DNA, 514 bp, Homo Sapiens
gatgtgcttttaaatacgtttgaggattgggatgaagttaaatttgggaacagtttgatttttttgattctttctaaacttacttttaagctttatcagagagaccagagaaacctttactctagggttaatttgacatcattgctaaggcagtacctttctgaattttcaacctgatgctccatgtattacaagatttcttgaactattccagccccatatgtgttacaataatttttctgcctccacctctgtggtggttcttttcccagctttgacatatttcctcacacacagcactcagctgaagactccagtgatctctgagtgtatctctgtttgcggtttcttcctttccggtactctgcttgtgagttttagcctccttggcttcctccaatatttaactgtgtctcctcaacctcagagattgccaggctctgttggggttcctccttcctgtgctgcagcctgggactctttaggcattaagccagagtaattacagggtatg

SEQ ID NO: 327317 - DNA, 521 bp, Homo Sapiens
  misc_feature (209)..(241): n is a, c, g, or t
ttagcatttaggaaactttattgcacttatccatttacatgtcctaattttccagtaacataaaagcaagaagcaaatattaccattttagtaagaccaacagttagagaaggaaataaaagtagaaagaataactaaatgagtcaataaattccccagttgtttctctgcttgtctgctggtgcttgatttcacccaattaatagaannnnnnnnnnnnnnnnnnnnnnnnnnnnnnnnnttaaccttgcagaaggtcctcctaaaactttcctggacagacccagcccccaaaagttttctccaagtactgggccacagccagggtcagatgatcattaaagggtccagccacaacctgtatgcctaaagggagtcctttggcattcagtcccagtgggcattgggtcacaggcaaacccagggcactgaagacacctgtgtaagcaaagttgaaaggccgtgttagagggacatgatgcttaggtgccactgtgggatgtgagggatataagaacaca

SEQ ID NO: 327318 - DNA, 943 bp, Homo Sapiens
  misc_feature (872)..(884): n is a, c, g, or t
aaacattcttcagtagaactttaatattactgtcttataaaattctgtcaaatgaacaaaagataacccataattacaccctaatatgactgcttttaacattttactgtatttcagcctttttgctatgtatataattttacagagttgtaatcatacccagtatatgattttatcatgttttcccacttaccattatattataggtatttttaatattgctacatagtcttcatggttgtcattgttaatagctatgctgtaatagttcactgaattgaagtgctttatttacttagctaccctattatctttaaacaatttctaatttctttttataataaacatggacatatttctgacaggggtgttctttttcacatcttgacctacttttcacatagtgttacaattacctgaccaaagaatacaaactttttgtctcttgacgtatctttccaaaagttttttaaaaggtgcattaatttactctgcagctggtgtaaaatgaagaccattttgtcattgttttcttgagagtagagcttccaaaagtagggatatgtggctaggcggaagaaatccagcctggggcaggcattctgtaaagaactccagttctcactggtacactggttttatttttctctgtttcttgcagactgagcaattgataactctgtgggtcctctttgtttttaccattgttggaaactccgttgtgcttttttccacatggaggagaaagaagaagtcaagaatgaccttctttgtgactcagctggccatcacaggtaagtaactatgcaagtgagaggcaggaagctatatgtgaagtccctatggcttcctgcttttaatgaattttatcnnnnnnnnnnnnntgtaacgcatcggtcaatttgggaataatttctgaaagaatataaaacctatatttgaa

SEQ ID NO: 327319 - DNA, 827 bp, Homo Sapiens
cagggaagaaatgaagttcaagaagagtgaggcaatcccggaaacggattgccgcactaaacagcaataaaggaagtggagacactgatggaaacacaaccaaatatatggaggacacattccagaaaatcccagtgattggctcaagaaggagcacatgactcacagacattagctgcagactttctggaacaaagcccaagaaagctatcagaagaaacattctccctggctaacattatgtcgccagctgctaccacggtggaagtcagcccaaagacaaggccacataacaagaaaaccccaagagaaatgaaggcagaacctgagaacaccatgatcctctgagtcaaactgcacccgaagcccaccagaccttcagacttttcagctatgtgaatcactaaattccttttattttaaaaaattcattagaataagttttccattactggcaattgaaagcttcttgatacacttaagaacagctgaaatgaaaaaagcaaaatgttcgtaattctaaaacaatacattgggaaggcaaacaactgaaaaattattcaacaggagaatgtagtaaggtggcttattataaaatggatttatcaaaatccaatatgaaaacaacattttatgtgcagtaggcacaatccaatggccaactcaaaatatactcccaattcccttctcccactgcctccactagagggactgagaaagctgaatgctctctattccacaatttctcctaactaggagtgccatgtaatacggatctggccaatgagacaggaacagaagtctgctttgagcttctgggaaagttt

SEQ ID NO: 327320 - DNA, 639 bp, Homo Sapiens
  misc_feature (604)..(604): n is a, c, g, or t
tgaggatgcttctggttgtcacccattttgggccttccatacatagtacactgtaaatgctttcattgtagtacttgccacaccatattctaattcagagcttgccaacagtttctcaactcagatgtgccaggaaacccattctctttcctgctggagagtggaactgggcctctgtcctacatgggttgaccagggctgtgagcaacttcctttgtgcatcccagtaccataagtgtcatttcagtgtgtggaaatagtgagaattgccctctaatcaatagtacatttgactatttccccagcaagacgactttgaaggcaggctaaattagctgggaaattgaacttgtcacccaggcctctggctcagtgttcttggtcgttttcttacctcactgatctgtggttatgattctctcctgctgatctctccttctgggagtggtctttaaacacagaaatgttctggggctcagcccttggacctcttctctgtcttcactgtctagatgtgtgtttctcaaactgtaatgtaccttcttgtcacctggggattttgttaaaagtcagattctgattagggtaagtctggactggaggntctgcatttccgacaaactctcagatagggctggt

SEQ ID NO: 327321 - DNA, 972 bp, Homo Sapiens
  misc_feature (494)..(494): n is a, c, g, or t
tttaatggttaattcacttatattaataaattgtcatggctattttttagcttctctagttttactgaaaggtagaataaaaatatatgaaaaacaaaggaaaagtcagtttggtcttaatgaacctgagatcttgatactccaatataaagcaggttctttcagtattaccagcagcaaagactattaatacccatgttacagtcaactagaaatagacttcatatgactacacataattaagcaaaaataaagttgatgactacttggcattaatagtttgggacatgaactttagaagtaaaaggtaaaggaggcattataatatcatgtttataaagataactttcttcagctaatattttggggatacaagacgaaacttcgttttgttgtttacgccacttgagtatattctctgccagttcttctgtctcagtcaccaatatatccatctttgctaaagcctggttcattttctttagatttgcagntaaatgaggaatatttctaattgtttcaaggtgggtttctaatctctcaatgaaagtcacagccaactccagcaaatgtaccatatatctgtgataaacagcttcaataggtaagttttcctggcacatgggtttcaacagtctttgcctaagggatctcttctctttcagcactgcttccaaatgattattcatgctttgcagagtatgacacttctgagccaaaaagaaaggatgaacaacatctgctgtatctttttctagtttcaggagttcaatttccaggtttttctggtagatttcagcttgaatatttgtgatctgctgtagtctggtgaagttcacaaaacaagaaactgttttcttagacatgtttaacatctcctgattgaccatccccgaagctatgaagtggcctagcactagcccagcgccgttaggcgcggacgccgggtcccacgggttggcagcggccagg

SEQ ID NO: 327322 - DNA, 372 bp, Homo Sapiens
  misc_feature (27)..(27): n is a, c, g, or t
  misc_feature (332)..(332): n is a, c, g, or t
  misc_feature (337)..(337): n is a, c, g, or t
ggccaacaagggtttttcaaaacaatnctttgcccctaaagggaacctccttcctcctttccagcactgccttcccaaaatgaataattccatgctttgccagagtatgaacacttctgagcccaaaaagaaaggatgaaacaacatctgctgtatctttttcctagtttcaggagttcaatttcccaggtttttctggtagatttcagcttgaatatttgtgatctgctgtagtctggtgaagttcacaaaacaagaaactgttttcttagacatgtttaacatctcctgattgaccatccccgaagctatgaagtggcctagcactagcncgcanccgttagcgcggacgccgggtcccacgggttggca

SEQ ID NO: 327323 - DNA, 510 bp, Homo Sapiens
tctcaacaacaacaaagaaaaagtgtttttgtttactgcttagcttacacacaaatcaattgagcaaagaaccctaggggctgtttacagaaattccaggagaagtttcatgcatggggtaagggccaaatcaacagaaacacagcgcctggtttccctcagcaccaagttgcccttcagtttcagttgcccttggtagctgtatgaacttgaatctccccagatgaatgtttgttaactttaattatgtttgtttttcccaagaagtactactttttctgtctcttatcagtgttaaacatctcctctcagtttgaaaatcagtagatcaacctggttaaagataactttttgccagataaatgagttacacaactctccttaccatccttctgtttctctacatcctcacaatcatttgtactgaatgcaacagaggaaggagtgttattgctttgtgatgactccgtggttgattattaacttcacaggtgatgttgggaggtagca

SEQ ID NO: 327324 - DNA, 754 bp, Homo Sapiens
ccttgggttactgactctttcaattgtaactaagtacaatagcagttaagctcaagctgtaatagtagagctcagtggaagctaaaccaggcacagtaactgacaccatgtaggttgattatattttgcatctccctgcaagtctgttttatgttatttatagcttcctattcgtgtagacaccagcagtaaactggggaatatttgtggcaggaatttctaagaacaacctttagcatcatctcaggccctgatccatttccttttccacaaaattgtttgagattatatcgtatgtgttacagaaagaatgtttttctgtatgctcgaaactgtatactaaagtaaaataataaagttaaccagaattatccatggggaacaattccaattaaaataaaatgccagtatctggtaaaacctggtagtaatgctttttgtggtgatatccaggtaatgattagatgcagtaaacccgggtagtagggaagaagagagatgtggggacaagcagcccgaataccttgctggcatagcagctgcctacctgcacccggagacctgagcagatattactagggtattatttgacagccagcttagcagtcaagaaggacattgatttggggtagcatggcagaccacttcattggggctgaagacctgcatttattgatcacttactacatgccacgtatttcgtttaggatatatatgtgtgcatgtgtataattttaaaatataccccacggta

SEQ ID NO: 327325 - DNA, 571 bp, Homo Sapiens
cacatttaaaaattatttaaattaagtaaaaaaggatacagaacacataaatggaacacaagaaaacaaacaaatgggcattttcaacgcataaatgtttaggagtggagaccgaccaagagccgccttgcaccgcaaatgggccctgaggtccagggctgcaggagcagggtggggagcccggccagatggaggggcagacaccggcacccgctgcctacgtcaccgccctcagtgctgcccacaagcgggtgccccactgggtcccgccaccccaaatcccagtgccggagcggggccccgctctgccacccgctgccacccggtgtggcacccaggccctgctggcacaaggccacggctaatctgctctcagaggaagctgaggaggtgaggaggcagccctgccctcggtgtttcccaagcccccttatcccagcagattcttctcggggaagataagctcccagcttagccagggcgggtgggaagtcagagctgcttccttaattggcattttccagttgagagcacattctctacctttttcacttggatcagctaattgcca

SEQ ID NO: 327326 - DNA, 677 bp, Homo Sapiens
cattacctgggaactcaggtgtggctctggctatggctcctgtggacctggcaggctgagggatctttctcattccctggtgcctgcatgcccctgctgtcttctatgcgtggatgcatttgggaaatgcaagtggacactcatagtcgtttcctcaaatgggatactgttgtagagctgatcttgtgcttctcaccctgtcacagagcccccactctcacttgtggatttttgggagagctgaggatggacactttattgggctgtgagctctgcatgatggcaatcgtgaggtctgggtgggcacagccagagcccaatggagctggcccaaaaggaaagacaggacggaattccctgggaagtccctacagctgcctgtcctacccatagagttcccattgtcttctcctctgcctaggattaaacccagaccgacccaagttcatcctaggacaatcttcctgaccctagagaagtgatgacaggctttaataacacctgtattatacatcagagcaacacctagattagtgtttgattgaataattgagactatgtcctagtcaaggtgacacacaaaatcaattattaccatgattaatattttatattgattaatattttaatactaatattaatcaatgcaatattgatttaatattaattaagcggcc

SEQ ID NO: 327327 - DNA, 725 bp, Homo Sapiens
  misc_feature (62)..(62): n is a, c, g, or t
  misc_feature (73)..(73): n is a, c, g, or t
  misc_feature (163)..(163): n is a, c, g, or t
  misc_feature (175)..(175): n is a, c, g, or t
ccatgtcccttttcctctccggactcagtttcctcatctgtaaaatgggctcaaggggaaanccgtgcaacgnagcttctcgccaaggctgaatatgtccacttcagaagcatgaggaagggccaaggggatgggggtgctagacatcctggttgggattgcncggctcctcccncctccctccccacccagtgcccctcctctggcatcgcggggctacgtggcttcaggccccggggataggaggccgcccccaaaggccgcctcgcggtaatgattggggaacatgttgctgcccacaaggctggcggtgcctccatccccgggggcccggggcctggtacgagtccagtgtcagtggttcagggccgggggtctccccaaccacggccccggcacctccgctgcacacaacagcgctagcgtgtggcggtgccgggggcagcaggtccagcatggtgaagagtgtgggggccgtagggtcgtaggcaaagccatcgtccaggaggtcaggcccgccagggggctcccggccgggcagggaacacggtgcccagagaagaagtcagggtctggcagcagggctgacggcgggaggaacgggcctgagccgtggttgggcaggaagtggtccaggatggccggctttttcttccgccgtttgctctcgatgccatgggggtccagagctgttcagctccccaaggacgttgggcatcccccgt

SEQ ID NO: 327328 - DNA, 589 bp, Homo Sapiens
  misc_feature (14)..(14): n is a, c, g, or t
  misc_feature (101)..(101): n is a, c, g, or t
aggaggagggcgcnctcccctggaggaggagcaggagctgtgagcctcctgagacagccaatgctacctcggtgaaaaaggttaagaccgactagcattcncaaaacagccaaggcataagggctctgcagcttaggaatcaatgcggaactcagatctacatgaattccactcagcaaatgtaagccttttttccccttccctcccacatctctccctgggatgagcccacataggaatcctggagcaggtgatgtcccagggcccagtcagaacctcaccggagggtgagccagaggtgcctttgtgggtgctggggggtgcaacactttcaccctagtaaagcaaacccaagcacgctgcaaatgctgcaaatgccatgcaaggtcctggggccactccggggggggcggagaaacaacattatcttctcttcccctcagaacagaaagtaagaaagggcttaggtaccagaagcctgtaataattaagctacagaaaaaatacttaacttgggaatctgcattggttctaagcccactgctaaagaagaaaatgaggcaccagaccaggatgaagccctgccatc

SEQ ID NO: 327329 - DNA, 997 bp, Homo Sapiens
  misc_feature (106)..(303): n is a, c, g, or t
aaaagcaaattatttgatggaaaattccaaaatacatgagagccatttccattcaatatactttgttacaacaattccatgtacttccaaaatcagatgctttgtnnnnnnnnnnnnnnnnnnnnnnnnnnnnnnnnnnnnnnnnnnnnnnnnnnnnnnnnnnnnnnnnnnnnnnnnnnnnnnnnnnnnnnnnnnnnnnnnnnnnnnnnnnnnnnnnnnnnnnnnnnnnnnnnnnnnnnnnnnnnnnnnnnnnnnnnnnnnnnnnnnnnnnnnnnnnnnnnnnnnnnnnnnnnnnnnnnnnnncaaaacccagcaagaccccagtcttttaacttgtgaagcccctttactcgtctttcagcgcatacagcacatcatcctggctgacgttgagccgcacccgaaggagcagatcgttcctgctgggctccacaagcaggaggcgacaggagcccaggtgagaacacacggccatggtctctgacatggtggggtacggcagtccctccattctgcacagtgccacatgttgactatatatctgttgaaacgtggcttcctccagtcctgatcgacggaactctgcgaggatggctctcaggaagctctgttccagaacagaggaatttttgatggccgtgatgtatgatgatgaaaacatctcatccacagcttccattgagtgggctatggtgaccaggccaggggagtcaggcttctgctgggagaactcacagatctctgtggcacgcctgcagatgtccaggcaccgtcgtgcatctccagacagtgctgctaccttcctggctaccagctggatggcatcatcttcaaaggcctttagatgcttgagccgggaccttaggatctgctgcagctggctatatgtatagggctggaagcacatcctggtaagacccagtcggctggacacccggttcatcatgattcgctctggcaggtccattgtgtttgcaattgccaggaccacaagctc

SEQ ID NO: 327330 - DNA, 447 bp, Homo Sapiens
  misc_feature (21)..(21): n is a, c, g, or t
  misc_feature (27)..(27): n is a, c, g, or t
  misc_feature (36)..(36): n is a, c, g, or t
  misc_feature (41)..(41): n is a, c, g, or t
  misc_feature (50)..(50): n is a, c, g, or t
aatggagacagtgggaggtgntggggnccgaggggnggatnttcaggaanaaattaaaggctatccggttggggtagcatccttcacctaaattaaaaaggataatccagagtctggtaggagtaaattaattccccacaacagtgggctgttaaaaagtctggtttcttcagtttctctcccctactttctctctcaccatctgattcctctgcacctgcccactcccttgccactctccaccatgaatggaagcagcctgagacccttaccagattcagctttccaatcttagactatctagccaccagaatcataagccaagtaaaccccttttctctacaagttacccagactcaagtattctgttatagcaacacaaaacagactaaggcagttaccgattagttaaactaagtagactaaattaattaggactaatcgagt

SEQ ID NO: 327331 - DNA, 281 bp, Homo Sapiens
  misc_feature (81)..(224): n is a, c, g, or t
gagagcagaggcttgcttaatacatttttgcagccaccaaatgactgcgagtaggaggtaaatcaatgctggttactactnnnnnnnnnnnnnnnnnnnnnnnnnnnnnnnnnnnnnnnnnnnnnnnnnnnnnnnnnnnnnnnnnnnnnnnnnnnnnnnnnnnnnnnnnnnnnnnnnnnnnnnnnnnnnnnnnnnnnnnnnnnnnnnnnnnnnnnnnnnnnnnnggtagcatccttcacctaaattaaaaaggataatcagagtctggtaggagtaaatta

SEQ ID NO: 327332 - DNA, 796 bp, Homo Sapiens
  misc_feature (667)..(699): n is a, c, g, or t
  misc_feature (710)..(725): n is a, c, g, or t
atatatttttactggtttattagagcaaagattaaaaaagtgaagaaattacctgtgaaatcatttgtcagaatcagattgatttttatgagactacctaaatatgaaacatttttagcttaatttttgttaaaatttatgttaaaatattcacaaatttgataattgaatatatatttggtggttgtatttatgaaaacttttttgttcagtcaaaggttgggcaagagttgatttgcgatgagttccataaactattatttaggtttgtgttttaatttacaggcttctgtaatgtatcccaatcctgatcccttagaaacacaaacaggcgttcttgacttttatggacaaagatcatggcgacaaggaatactaagtaaataatttttccctctgtcctttcctctcaacctcaaaaggcaacaatagctataatagattttccattggctgcacatgcataagaaattatgttgaagtaaaaatgtgtgctttttaaacattgtttttgtttttagaatgctttgtatgtatcactgcatcttagagtgacttataattaaagttgctgttgtgattaaaacatgtatctgggtgtggtggcacatgcctgtagtcccagctacttgggagactgaggtggaaggatcacacctgtgaacannnnnnnnnnnnnnnnnnnnnnnnnnnnnnnnnacctcatctcnnnnnnnnnnnnnnnntacaacatttggacatctgttgttttaaatgacacatgccactgttgtcttatttaaatattttaattcca

SEQ ID NO: 327333 - DNA, 809 bp, Homo Sapiens
agtgtgagccaccgcacccagccagaaacctgtatttctttatggtcaattattggagatttattttgttcattcagtagggtcacatcttgatttttcaaggttgtgcaatatctcccagtctcacagagctgtgccagttgctatacgatgccctgtatttttccttagagctgtgctctgatagcctgggacacgaaatgcatatttcattactctcctttcctccactagtctcacgtattctccttggggagaagtctaaggggtctgtgctttcttccagtctcacagaaccatgggggccaccataaacctccacacaagcctcctaaaaattctctaccttggctcaagagtatgggagtcacgctgcagacaatggaggtaataagaaagacatccaaggcccctgtgagcttctcaatctccacaggcatcactaaaggtgggtgctagactgaaaggcatgtccatcctcatgggcaatctcaggattctctaagtcctccaaggaggccagcaatggcttatgtgggcctgggtcacccctgccagcagggactagtactaaggatgagatccaccaatggccacagctgagttatgccaaatgagatgtccagacctcatggtgcctaggaagacagatggcagaagctcagccaggccatggagattaaaacagtgctaggggcttaatgtatgtttttaatgggtctgctacatgtcaagtttggatctggagtccagcctataatcctagcaaaaattaaacaccaaatatgatattcaataaagtgtatgtg

SEQ ID NO: 327334 - DNA, 835 bp, Homo Sapiens
  misc_feature (19)..(19): n is a, c, g, or t
  misc_feature (33)..(33): n is a, c, g, or t
  misc_feature (43)..(43): n is a, c, g, or t
  misc_feature (551)..(559): n is a, c, g, or t
  misc_feature (592)..(710): n is a, c, g, or t
tgtagttattttatatttnaatacatatttatncataattttngcttatgtgccaagcatcttcaacctttattataacaacctgtggggtatttataaatatctttatgtaaggaagagaaattgtggctcaaaaagtgaagtgaactgctcaagatgacatacctaaaactaccaaagccagggatttaagacaattctggtttgggtccaaatctcatgccatttccgttgtaccaaatgggcaccatgtgaacataattttccatcatcatctccaagtgttcaataaatatttgctgaatttaattgtgctgaattatttgagggaacaaaaataaacaaatactctgtgagggaccaaaaataaatagatactctgtgagggaccaaaataaataaatactctgtgaactcaactttcattgtgttggctaccttgatcatgtgaaacacgactcttcctaaaccaggactactaagaacagggcactgcaaaatgaggtggatttggaagtgaaatagaattcccaggaactaatgacttgttnnnnnnnnntttaattttctgctgagcatggtggctcatacnnnnnnnnnnnnnnnnnnnnnnnnnnnnnnnnnnnnnnnnnnnnnnnnnnnnnnnnnnnnnnnnnnnnnnnnnnnnnnnnnnnnnnnnnnnnnnnnnnnnnnnnnnnnnnnnnnnnnnntgtggcagcactgcccgtagccctagccactctggagactgaggtgggaggatcacctgaacaggaattcaaagctaatcatgccactgcactccagactgtgtgacagagcaagatatcgactc

SEQ ID NO: 327335 - DNA, 605 bp, Homo Sapiens
aaaaagtttgaaaatttttaaaacaaataagttaggaagacattttttacattacaaaagtcatatatatttattaagtgattttcttaagagttactttaagtaggtgcctccttacatttaaataaaagtctttcattagaagtgctttctgtgttttgctttgttgtgttgtgtttttgggagacaggagctcctgagaaggcaagcatcttaagaggcctccaatgtctcaagtatgctctcccagaatggcttgtgtttacatcccgagtttgcagccttcaagaatcctggtaaaatgcaaggactggcttgcaccccctaaaacccaggacgtatgaagtcttatagtactgggagaatgcaaagggaagttacctatttcaaaattttgcccagggccacaaccacgtaaaagtgagttacagccaaaaataatgaaagaaaagacttagaaccctaagtcccaagcacaagtctcccaaggaagagtttaataaacttcggagacagaccctagagccttttggtggaggcagatgtaggcattattaatatgactcataactgctaaggcagtcactgagcttggctaaatcttc

SEQ ID NO: 327336 - DNA, 731 bp, Homo Sapiens
  misc_feature (295)..(295): n is a, c, g, or t
  misc_feature (467)..(467): n is a, c, g, or t
caattgtgctgaagtctggtgtctgaggagggagggctgacacttcctctcagagcttgagaacggcgtgggcacgggcctttgccattcattgttggcacggggaggtctgcatttggaacccctcgctgcatgtaagcagaccccacctcccacctagaaacagggaccactggctgtgggcacccgctgcctccctgcaggcacgcaggccttctctggagtgactggtcctgagctgcagtgcctcctccgtggggctgcagggcttccatgactgtatccagggggtttnttacctcatttccaccggagttcttttcccattgcgggttaggatgacggcaccatgaagagaggagccctgagccggcagaaggaagagaagagggaagcagaggagccctgagctggtggaaggctgtggcgggtaccttggaggaagagaggagggaagcaaaggcagngaacaaggcagaggccacccccaggtggggccacctcacccaccgcccccggagactgcgtggcggggaaggcggccctagtgtggctggtcggcctgcatgcctgggcagtttgcagcctgtccaggtgtcagagctgttagctctctgatgctggtggctgttcccccagaatggaagcattgattaaatttcaagtttgttatttatacaatgaaacacttcattaatttaaccactttattgctgtataataggtaggct

SEQ ID NO: 327337 - DNA, 878 bp, Homo Sapiens
  misc_feature (611)..(625): n is a, c, g, or t
ccccatctcgaaaacgaaacaaaacaaaaatggataacaaataaaatgtttgtggtttctttcaaaatgatgaaaagaggacacagtggcctctaaaaagttaaagtagttccccaaacttgctgcagaactagaaagaaaattaactagtaaggtgccatgtacccttttttagacatactgcaaatatggtatagaaatctgactgttttacactgaggatactagggaaaggaggtgatgtgtccaacctaacacatgtgtctaattgcacacctttccctacacaaagggtgggtgtggaaacccagggtcgcacgcggtccctgctcagcagcagatggctatttgcccaacctcatcctgatgaaatacatgggtgggaaaactcaaatccaccacatgacctctgctgcctcctcagccactgcagatgccaggagagaaggcaggccccaaagaagcatcccctctattcttccattaaagccacatccacaggggcctgcatgcgcctttccattcgatgtctacacctcttagaaatgatctcttacaccctaagaatacactgctggctggacctaatgacagaatgtattttaaagagnnnnnnnnnnnnnnnaagaaaaactggcaagttgaagaaatagtattagatataaattgccacagagtagttggcacaagcccatctgaagctgaagttagtgcaccaagttttcctgccattccacacgtggaaacattacttctcctgaatttaagcttattcaaataatcactcaaaactattgcaggtgaaggtaaactttcacatgaagcatgtccctacaaacaacacaagacaggaaggaacccagaagacttgactgagt

SEQ ID NO: 327338 - DNA, 502 bp, Homo Sapiens
  misc_feature (404)..(404): n is a, c, g, or t
cagcagcagcaggaaaccaattcgtgctcatggaagaaaagttcctttgccagcagccttgaagtgaatcttacaggagcaatgaaagtattgcattcattagcgtctgccccagagaaggttcagagaaaacttcacttgttttcaaggggatccttgtagatttacgtaattggaatcctgaagaacaggccctactgtctaaaaaatggcttttattcttctaaatacatataaacggatgttttatagatgggaagacatgaccttagaaaggagagagttttcagaggatttgccaggctgtcaggggctctgcttccaggcccagtgtggcagtgtggcctcagggcttccgcctccctgcttgagggctgcatggaggccaactgtcctgggagttnttaaaaatctttttaaggccagaccattttgagggtttttaaaaagtgtctcagtgcctcttatgatttcagaaggttttgctatatgtaatcccaac

SEQ ID NO: 327339 - DNA, 629 bp, Homo Sapiens
  misc_feature (146)..(205): n is a, c, g, or t
ttagtctcagaatagaaaggattttaaaagtaattgagtaaagtcataggaaatgtgaccatataaaggaatggctctaaatgtattaatccagaaggaagcaacaggttaaacagtaagaggtaagaaacaaaaaataaggaacnnnnnnnnnnnnnnnnnnnnnnnnnnnnnnnnnnnnnnnnnnnnnnnnnnnnnnnnnnnnaatcaggaaaacgaggagaaacagaattaaggaggtgatactggaatagtatcagaccattctgaatcaatttaagaattgccatgtctaattcttatatggaagatttgaaatacaaggatattgaaaggaataacaaattataatgaatgcatagaaatccttatgtaatccaaggtcattaatttgaaggaagacatcaagaaaatgtgatctagaaataaaggttgagattgctccatttacaaaattattatgctctataatcttcccatatgcaaatatttcatattccctcttttgtcccatggacatatttcacagcaacaacgaatcaagtgctgacctaaatggggtatctgttaaaacttagtatattgatatccttcaccccactccaggaacgttcgctacgctaggactg

SEQ ID NO: 327340 - DNA, 339 bp, Homo Sapiens
ttcccctattttttggtttcccttaccctcctacctgtttaacccctgttggccttccccttcctggattaaatacatttaggagcccattccctttatagggtccacatttccctatgactttacctcaattaccttttaaaatccctttctattcctgagactaatttttaagaattacaaagctcattcttctgaatctaatatcactaactcctagactttttccgttttctttggatacactttaagtaggaatttatcagaattttcattcaactcgttctttaatgcagatatttactagttataagaccttaaggctgggtgcaagtgtca

SEQ ID NO: 327341 - DNA, 515 bp, Homo Sapiens
  misc_feature (327)..(327): n is a, c, g, or t
tgacacctgcacccagccttaaggtcttataactagtaaatatctgcattaaagaacgagttgaatgaaaattctgataaattcctacttaaagtgtatccaaagaaaacggaaaaagtctaggagttagtgatattagattcagaagaatgagctttgtaattcttaaaaattagtctcagaatagaaaggattttaaaagtaattgagtaaagtcataggaaatgtgaccatatacaaggaatggctctaaatgtattaatcccagaaggaagcaacaggttaaacagtcaagaggtcaagaaacaaaaacataaggaaacgagnggagaagagagtgaccggggagagagagacagcagccggggaaggagagaatgagaaggaaaatcaggaaaacgaggagaaacagaattaaggaggtgatactggaatagtatcagaccattctgaatcaatttaagaattgccatgtctaattcttatatggaagatttgaaatacaaggatattga

SEQ ID NO: 327342 - DNA, 837 bp, Homo Sapiens
  misc_feature (743)..(783): n is a, c, g, or t
aaaaagttatgagcatatggaaaaagcagtaacagtatacacaatttcatttctcagatgtacatctcttctcatgagttttcgtcctgaaaatacagagagatattagtactatcttgttcattatctggagagtccttgccaaaatattgcacacagttccactgattgagcatttctagggttctcagatgacttatataaataagcagctgctggtagccattgtcagctcattgtcttctttgagtctcattgtcttgttttaggcttagaccatctgccaaaaacaaacccaaggggaatagtagtaagttgaagatatcaggttgaaggtatcaggccctagatgtgcatgaatgaaaaactaagagagaacttatttcttatttcccccctgtcataacagggacaacagagatctatttacaagataggtttttcatggtgttaaggttttgtggtgttcaaagataggaaaaggaagttgaggcagtgcagtatatgctgtttgtctcattaggttattaactatttgaggttagggataatgcttttccttaattgacaatgtcatgctctatataatgtcattatttaatatgactgatggaaatataaaatataaaggtacactatgactcactgaatctaagtttcacagttttaatattttagcatttctaaaattggatagaggtcttacaatatatcgtctttggccaggcatggtgggtcatgcnnnnnnnnnnnnnnnnnnnnnnnnnnnnnnnnnnnnnnnnncttgaggccaggagctcgagactagcctggtcaatacagtgagaccttgtctct

SEQ ID NO: 327343 - DNA, 716 bp, Homo Sapiens
gggccgtgcagaccagggaatttttgttgtcttagaaagtcctatggagagtgctgctttgctgtatttgcatgtagttttatcatctccatgcagttaacagaatgttttcaggaggagaattccctaaggtgagaaactggttttctcaggagactatttggacaaatgacaaccatgttatttagtgagagtgaccaccaatgggagccctatacaactgtcactggcactgcctgaagggaatttataaccaggagactattgctgttcttagttgtgtctaaaattgcattgtcatgattcaccaaaggcatgtcatgatgtaccatgtgccttttgagatgggataatacttatctataagatggtatgattatcagattgactccttctcccacaaagaagccctcaatatatttccaaagagtagaaaacctttcctgcatccccagagagcaatgatttttatcattgaacagtggaagtgtttatttcccaaactatttaagtgctgcacatgaccccaaagtttatcttgaaattagttactacactgagacacaattctgtgagaaatggaagtaaattttaagtgatcccatctcaggctaagtagcttgctgagagttgtgagacaaacatctctatactttgatgcttttctgtgaagaaaatcatgattataaatatggactatatataaatatagtaaa

SEQ ID NO: 327344 - DNA, 603 bp, Homo Sapiens
aatacaccaggaaaaaatattttttttaatgtcgtgaaataagcacttgaaaataacaacttcaacattgctgtgatttgctctgtgaggcttatatgggtgggcttccatatgaatatgggctctgaggtccccaagaagctgaatcttccagtggttttcaagatagcagcaagcaacctcctgcctgaatatgtctagacaggcagacctgtttgaaacgagtatgaccagggaggactgttaggctacttctgtggccttcttggtttttgtcgatggaaataaagtctcaagtgctactaagcattgggaaagtaacagcatttaaataccaatgtcgagtcagaacccttcatggccggcccgaatgggttataaatgtggcttgaccctgacttatgggaccagttattaatttaaccagttacttcagaagaggttactacaatgcagtgttggtttggacgtctagtgaaatatattttactgtgagacttctgcctgcccagcctaaaatcaaagtgccacttttgagctctcccaagccccactcacgaatgtgctcccactgtccatctaacttctagaacaacttccaca

SEQ ID NO: 327345 - DNA, 624 bp, Homo Sapiens
catattttttcagcctcaaggtactccttcccagatctagacaaggtccccaaggaagatcaaaacatttttgaggtcaggaactattccaactcacactatctagactacagactaatttaaagactacagacaatcaacaaaagctgctatttaactcaaaggacagaacaactattttcaaatatttgaggagctgtcacatgagagatacttattcagtctcttttgcaagggcagaggcaaacaatgcagggtaatgatggggaaacagacctcaggtcaaaagaagaactgggggtgaggatgatggggggatagagggtggagtgcacaagagttgtatgaagcagcctggacttgacagacacacatccttcattagcactcctgctcagaatgagctgatgaccatgactattataccaaatatcaagtgaaagaattacacaatgggtttgagtttcttctacagaactgagatgtaagaagtatcaaatttttttaccttttcatatcaaattagactggctctgaacctctagtctgtccattccatctccttggagcgtataagaatttcaggtcttacctagtcccaagagacagagaagggcttggtcc

SEQ ID NO: 327346 - DNA, 831 bp, Homo Sapiens
  misc_feature (56)..(56): n is a, c, g, or t
  misc_feature (93)..(93): n is a, c, g, or t
  misc_feature (158)..(158): n is a, c, g, or t
  misc_feature (528)..(536): n is a, c, g, or t
  misc_feature (605)..(657): n is a, c, g, or t
acaactcttagcctgagtccccacatctacaaaaggagactagtatctacctaacngggttcttagaattcttgtaagaattagcaatacatntaaaatttctggaatgtaagagatactcaaatgtgattaataatatttggggggatgcacagganaagtgcaatatatggcaaggagtgcagtagttaagagcaaagccttaagaatgggagcagtagtctgacagacttagatttaaatcttggctcagtcacttagctatgattctgagatattaaattaacctctctaaatctcaatttttccaactatcaaacaaagattaaggtatctgccttacagaattccttacccaaggatgaaataagaggaagagaaaatgactataaaccatttagactgaatctgacacttagctagtacctcataaatggcagctaatattatatatcaagggcaaagaattttgtgatttatgatccggtttaccaacttaaatgactattttcattaagcactcatttnnnnnnnnntcattcttttccaacctctatatcaactgtccaacagaactttctgtgacagtggaaatgctatatacnnnnnnnnnnnnnnnnnnnnnnnnnnnnnnnnnnnnnnnnnnnnnnnnnnnnnatgtggccagtaagctggaggaacttgatttatttaatttgaattattttacatttgaatttaaatggacacatgtagttagtggctactgtttagacagaacagctctaccttataaattctctgtattataaaaaacgttatttgagtaggctgatttttttgtatttttag

SEQ ID NO: 327347 - DNA, 525 bp, Homo Sapiens
gagaatgcaactatgaatagagagatcgaatgtgtctgatgcaaggttgtcgcagttcctgttttctggttaggcctgcattgccttatgaattacagggaatggagaacttttcttgataataatggtcattctatgtagagcaggacttgagatgttatgataaatgtataatttctcaaaagtggtctacttgagaacacagtttcaaggagttcctctccacatttgttcctgggtaaagcagctgttcataaggtaattcagctttcaatttattttaatcggcacttccagctcaggcccagcaatgtcacctatgcccttacagccccggatggtccccgggtgccctcggacattgagacagagaggggtgtaaaatgactgtcactgaggggtaaagtagaatctgatatgagaaaaaaacagagatatgtagaaatcacaaaagaagcatactatatttccagtgcaatgccattttaggtgaatatagaaaataattgcaaaatttcacatagg

SEQ ID NO: 327348 - DNA, 443 bp, Homo Sapiens
  misc_feature (29)..(29): n is a, c, g, or t
  misc_feature (44)..(44): n is a, c, g, or t
  misc_feature (116)..(116): n is a, c, g, or t
  misc_feature (155)..(155): n is a, c, g, or t
  misc_feature (328)..(328): n is a, c, g, or t
aaaaaggcccaaaggaagcaggaaagggnaggggtgccccaggnacccccggaaggtccagggtaaaagaaccggggtttttaatccaaagtggtaaattcccttaaatagcctangaacagtggtctcccctgttttggttccttaaacagtanttagaaaatactgagtgtttcccatattaaaccgtgaatgttggttgttggtttcaaaaagataatttccttattacacccaagaaatgggcctcttttttagactgatgatgacttgtctcaaatatagttatgattgttactttccagcctggtttgtctctgtggtttcnccagctaaccgcctcaatggacatgcttcaacgtgtccttaaagcattttttcctgcctgtcacacttaggcagccatacttcaacaattgcttagtgagctgtgctacatttta

SEQ ID NO: 327349 - DNA, 1141 bp, Homo Sapiens
  misc_feature (106)..(160): n is a, c, g, or t
  misc_feature (877)..(877): n is a, c, g, or t
aggagaaatgatgtcttcatccctgtgtctcccaggtataagttttgtatttttctaagttcaaaacaagcaaggatcatgtttgccttatttatccttaaaatcnnnnnnnnnnnnnnnnnnnnnnnnnnnnnnnnnnnnnnnnnnnnnnnnnnnnnnngtaggtcctacgtatttttaaagtttactcctaggctctttttaataatttttgttcctatcaatctcttttcatcaccattatattttctacctggctactattggcacatagataagaaaatagtttctattcattcattcaatcacttattctttcaacaaacatttgcaaatcaacttctatgtgtcaggcattcttctgagtgctagggatagtgtgtcaatagagtccatgtccttgtggggtgcaaggttagaagaacatacataaaataaataagaacagataaagattattagattataaggatataaggaatgctgcaaaagacactaaaaggaaaaagagaaggaaggacagcccctcctctagatatgaaggtcaggggaaaggctcttgaaagatgagcaagaactggcaagtgaagagctggggaatgtgttcaggaagatggagaggtacatgcaaagaccccaaagcagaaaagagcttggcatagtccagggactgatggccaggtgccaggatttgatataaataacaatcaggggagggagtggcgagagaggcagatggagcaggaaggggaggggtgccatggaccctggaggtcatggtaaagaatctgggttttattcaagtgtaatttcttaatagctatgacagtggtctctctgttttgttcttaacagtattaagaaatactgaagtgtnttccatattaatcgtgatgttggttgttggtttcaaaaagataatttcttattacaccaagaaatgggcctcttttttagactgatgatgacttgtctcaaatatagttatgattgttactttccagcctggtttgtctctgtggtttccccgctaaccgcctcaatggacatgcttcaacgtgtccttaaagcattttttcctgcctgtcacacttaggcagccatacttcaacaattgcttatgagctgtgctacattttac

SEQ ID NO: 327350 - DNA, 796 bp, Homo Sapiens
  misc_feature (161)..(169): n is a, c, g, or t
aaacgcagaagctgccaaatggaatttggagagagcatcatgtcagagaacaggtcacgggaagagctggggaaagtgggcagtcagtctagcttttcgggcagcatggaaatcattgaggtctcctgagaagaaagacacttgtgacttctatagacaannnnnnnnncttgttcacaaaaaaattccctgtaaatctgaaatatatatatgtacatacatatatatttttggaaaatggagctatggtgtaaaagcaacaggtgggatcaacccagttgttactctcttaacatctggcatttgaggagatcagcttaatacttctctcaacaaaaatggaagggcagatgctagaatcccccctagacggaggaaaaccattttattcagtgaattacacatcctcttgttcttaaaaaagcaagtgtctttggtgttggaggacaaaatcccctaccattttcacgttgtgctactaagagatctcaaatattagtctttgtccggacccttccatagtacaccttagcgctgagactgagccagcttgggggtcaggtaggtagaccctgttagggacagagcctagtggtaaatccaagagaaatgatcctatccaaagctgattcacaaacccacgctcacctgacagccgagggacacgagcatcactctgctggacggaccattaggggccttgccaaggtctaccttagagcaaacccagtacctcagacaggaaagtcggggctttgaccactaccatatctggtagcccattttctaggcattg

SEQ ID NO: 327351 - DNA, 520 bp, Homo Sapiens
ttcggcacaggagacctccctgccttttttaccgtacccctctcatgtcctttcttccctccttaagcagctcaaattatcaaatataataattctttcaaaatacccttaactaccatatctgcctgttcctctgttgtacctacctgagatttctgactcatccccagcaccatggccataccagagcagctgcatgcgactggtgggaacccacttcccatgctatcagttctgcctggtgacttggcttcctgctttctgaaaaattagaaacaaagagaagagaactcccttcatccttcctccccagatccgccggcccgcctgcatctgtgcccacacctctgcctcccctccgttgtaagcattccttctcctgcccggccttgaaaacaggttgcagggtttcactcctcaagttatgccctttcttctgaatcatcccgttctcattctttacttaatcattaccatcagcgtacaaacgtgctgtactatctcctatcttttaaatatc

SEQ ID NO: 327352 - DNA, 821 bp, Homo Sapiens
  misc_feature (381)..(731): n is a, c, g, or t
atattttgagaaacctccatactgttttggcatagatagtggctgcacaattttgcattcccacccagcatacaagggttccaattcctccatatcctcaccaacactcttttgtttttttgatagtagtcatcataacaggtgaggtgatattaaggagtacttctgcactgaggcacttgtctcaactatatttttgttgtactttcaggagactaatagatctgtggaaatttatcaaatctttgctcatttttttaacttctgagagctcttctttaatctgagtgttcctttttatgaaattgttgatgaaaaaagccgaacaagtgtaaaatattttaagagatttattctgagccaaatatgagtgaccacagnnnnnnnnnnnnnnnnnnnnnnnnnnnnnnnnnnnnnnnnnnnnnnnnnnnnnnnnnnnnnnnnnnnnnnnnnnnnnnnnnnnnnnnnnnnnnnnnnnnnnnnnnnnnnnnnnnnnnnnnnnnnnnnnnnnnnnnnnnnnnnnnnnnnnnnnnnnnnnnnnnnnnnnnnnnnnnnnnnnnnnnnnnnnnnnnnnnnnnnnnnnnnnnnnnnnnnnnnnnnnnnnnnnnnnnnnnnnnnnnnnnnnnnnnnnnnnnnnnnnnnnnnnnnnnnnnnnnnnnnnnnnnnnnnnnnnnnnnnnnnnnnnnnnnnnnnnnnnnnnnnnnnnnnnnnnnnnnnnnnnnnnnnnnnnnagggtacctgactgttagttgattatctcttggatctggaaaggaaggaaggaaaacaaaggggaaaggggactcattatagaatgtgga

SEQ ID NO: 327353 - DNA, 523 bp, Homo Sapiens
agattttttggtctgttttggctgctataagataatgctatagactcagtgacttataaacaacagaagtttatttctctcagttctggagggtgggaagtccaaggcactggcaaattcgatgtctggtaagggcctgctttgtggttcataggtggctgtcttctagctttgtccttatgtgggtagaaggggtgaaggcgtctctggggtttcttatatgaggtcactaatcccatttgtgatggctctgcccttcataatttaatcacctcccaaaggccgcactttcaaataccgtctcgtggggcggagggcttattggggattttaatacatgaattttagggagatgggaaacattttagtccataacatacaatgataatactaatttatgtgatttaataaaagcttattctcttaaatcttggaaacaagatttgtattaaattattctcctaattgttttatctattttataaaaaaataaactgcaagtatcagaagacttacagtagtt

SEQ ID NO: 327354 - DNA, 805 bp, Homo Sapiens
caggtgtgtgaattcattttccattgctgcgtaataaattaccacaaacttaatagcttcaaacaacacatatctgtcattccacagtttctgtggaggccaggcctggttttcctgagttctctgctcagagtctcacaaatctgtactcagggggtcagcctgattatggtctcacctgaggcttgggatccccttccaaactcactaactgttggtggaattcaattcatgcagggagagcactgaggctgcaagctcatggagaccacccactgtttcctatgtgtggccctctccacaacacagccctttgcttcttcaaaacccaaccaaagaatctctgtcttcaggaacagcctccgaccctctttgaaggggctcacctaattaggccaggcccacagaggaaaagctctcttttgattaacctcagagtcaactgatttagggactttataccctgcaaaatctcttttgcccacacagcataacttaatcaaaggaatgtattcccatcccattcatggatcctgcccatactcaagggaaggccataatacaagcatatggtcattaggggccatcttagtcactactgttcgtggattgttctccagcttcctggaggagaggagagcaggagacagagctaagagtgtttgtaaaatagggcagtgggaaaaggtaggtcttgtgagtagcaggctacttaagatgcctagtgggtctaaatgtcaaatgctattggcagattttccgtgcaaggggtgaccaaaaaataattatttcattaactttgtgc

SEQ ID NO: 327355 - DNA, 796 bp, Homo Sapiens
agtaaaactgctggattcttcttcctcaaatatttggggctaacacttcacagagggtcacagtccatgatctgaccaactaagcttttaaaaatcaactattaccacccagaaaacagtcctacgtgatcatgtggccagggcatgccaggttcctgcaagggtggcgggtggctgaggtcacaccaccactggagtggatgggcagtgccacatggacagccattccccaggctatgaagtgacataggcctcccccacggtgcctgtgtacggagcctgatgacttcactgggagccttctggaatcctgcagagggtcaaggagcagggatgttggatgcccacctgtcaagagttcagatcaaagttgcgctgagagcgtcacaattttggttcagccttgacgcgtttgtccaacagctcattggctccctttgtatgatatcgtggtcttctcacatggtgcccagtcaccaatatttataatgaggtctaactacagcagtagtttttcatatatatctctaaaacattttgttatattgaaaaaagtaatagaaatcaagatgtgttgatgaaataaaatgtgtatctgagtgagaaaacaagtatggtgaggtcactttaatgtttcacagcgatctcagatctaggcctcaggtagaatggaagctgttctgcattcactgattaacgttgctaaactcttggtgaggcacgagctaccagccaattgctcttcatcacagctatctgtcttttagtgccacaaataaaagaaaatcaaatctta

SEQ ID NO: 327356 - DNA, 873 bp, Homo Sapiens
  misc_feature (528)..(528): n is a, c, g, or t
ttttttccaatagtttgactttattaaatcaatagaacgggatctcagtggttaagccgtcttaacagggccaggtctcttgaggtagtttttgggccatcagttaattacatcgactttccaggaaacagactatggagaatgagaggaatcagactgcctgtcacacacctctcatggaaccccctagtgacacctataaggacgttacagatctagttccagactttacagatctagttctattttctcaagttacagatggggaaactgaggccccagcagggggaggggatgtatctaagtcactagtgagttggcggcagtcaggtctcttgattcttttccccatactctcagcccaacttctcagtggagaggggctggcaggcctgctctctggatagaatgtagcaaaaggcccgtggtcaaactgatacggggtggggaaggttggtgggctctcagccatcagccattctcatcttacacgtgaaaaactcagctgagagaagggaagtgacttcnccccctccagggtaacaccccaggactggagcttggatctccctgcttcctcagcctcctagaagcttccacaatggaatacaaaaggaaaggtatatggtggcatggccagtctggagaagggatcaagttaatgactttaaatacaaataatctgaacaaatgactagataaaaattgatttccctaacatgatctcaccctccatgagctgtgctgtttctggagagagcagtccaggaaaggggtgtaggaaaatgcagtgttagaacgaacaccaaggctgcaaatgggggcaggggtgggctggggggatttagacagtctgcactggggtcagtaaag

SEQ ID NO: 327357 - DNA, 416 bp, Homo Sapiens
  misc_feature (195)..(195): n is a, c, g, or t
  misc_feature (366)..(366): n is a, c, g, or t
  misc_feature (382)..(382): n is a, c, g, or t
ttcatgttagggaaatcaatttttatctagtcatttgttcagattatttgtatttaaagtcattaacttgatccctttctccagactggccatgcgccatatacctttccttttgtattccattgtggaagcttctaggaggctgagaagcaggagatccaagctccagtcctggggtgttaccctgaggggggnaagtcacttcccttctctcagctgagtttttcacgtgtaaggatgaggaatgggctgatgggctgaggagcccaccaacctttccccaccccgtatcagttttgaccacggggccttttggctacatttttttccaggggaggcagggccttgcccaggcccctcttccantgaggaagttgggggntgaggagtatgggggggaaaagattcaagagacc

SEQ ID NO: 327358 - DNA, 936 bp, Homo Sapiens
cttccaccagacattaattttaatgaggttactcaagatttcccctttcttcaagcattccaggaatcagatggaggaagatagggtaacatcatctttatcaaatatttgcaaacattatatagatagctggaaaagcctgtgcatggtcgaatggaagagatgtcacataaaaccgaataactgagtctcataatatttaggtcttgaatgaagttaggccttgatctgcttccagccagttgatctcttaattatgtaggctgtgcaacaagtttttggttctgttttatagttttcttctctgcattcctctagatttaatatattcttgatttgttttacagatcactgcttttcctccagaataagccaatgtggataagggagaccaaaggaaattaattatataccaataagaaaagtcttacgtaaaccctgtgtgtaataaatgttcaaataagttggttgtaaggttttggtgtacaatttcaagatattttcacagaacatattgctccccagtcagggttacaagtgaaacgttccatggggataatgcagaggatgatattctttcaaggaaaaagagtattaagctttcctctacctaggcatcttccctcaggcactgagattgcagccatccaacaaatggggaagggcagaaagaggagccttcaaaagtcgcaaatatacttcaatagctactttttagcaagtgtggcaatgagatctttccattctcccctcttctttgtgatgtatgcaggggtgagtagctgcagcagtgattctgtctgttgcctaaagaagttctgacacaaggcctcagtgttacatatcacgtacatcccacagtcatagctgttttgttgggcaggggctttctcttccacaaaggccagtttgtctccttttctgcctaagaaagcc

SEQ ID NO: 327359 - DNA, 381 bp, Homo Sapiens
ccgtgagatatgaatgtccaaagggaactgacatgaagttcgatgctgcctactgaccccaggatgctgcctcctgccagcatccatgaaactgaggcaggttaacttgttagcttacaaatggggtaaaatttcagatctgtcaaagttcttaagaaagtcaataaaatctagaaatgtgccagtttccattttttactgctttttctatcaaaatatctcaacagagacatcataaaagaaaccagtaacagctgctgtctctaaggagaggaatcaagatctggagtgggaagaaaatttactctttactgccaggcagaatattaaacactttccatgaaatacatctcttaatgctctcaagaagcattaaatacc

SEQ ID NO: 327360 - DNA, 562 bp, Homo Sapiens
tatctctccttactgatattctttatttgttgaggcattactctaacattttcttttaattttttcagtttcctttagttcttggtgcacctttataacagcagatttaaagtctttgtttagtaacggataccgtcatgtttctttgttacatatttttttcttgaaaatcagacattttaaaaaataatgtggcaactctgggaaatcagatgtcctgccccacagtgtgggtgttgcttctgctgctgctgttcctttgttcagtgactttcttgggactaattctggtaaagtctgtcttctctttcaggtgtggccattgaagtctcagtgtggttagctaattatcaccgaatggttaggcaccgaattccttacaggcctggaagcaccagactcctacctttgctgagggctgtgtgtgcgctagagcacaggaagcttcagggaccccacggttctccactcggccttctcttcttctcttcccttgtgcagggcctcatggcagccacaggcgagatcagggccttcctgggcatacgcattcctcagtgtg

SEQ ID NO: 327361 - DNA, 787 bp, Homo Sapiens
  misc_feature (12)..(12): n is a, c, g, or t
tattcggcacgnggggagacctcagctgatctgagaatcaacaaaaaatctactggcctgctaaattcaaaagatatgcattaaaatactgtcattaggcaaaataattcatggtttctatcatcaccctcacacacacagaacaatgaaaaccacaagctccactgatccatacatattacatgtcataaattgaaatagtgctgctgttcatgtgaattatgatgacgtctttgggccacatggtatccattcagcctccaacagtccatagactagaggtcagccatgtgggcagtcaaacatagagttccagtaaaatctctgggaaactaaagttctgaggagcctcctcggttgggcaatattctatggcatattgtcacacattgatgtcaggagggtaatgcatcctgaaaataatagaagcctcacatttgaaacacccacacccccacttcattgaactccaccctgtgcacctcttcccttggcagattttattctatattctttctctgtaataaaccataaccatgaatatatcacggctttcagtgagttccctgggtctttctagtgacttgttaaatctgagagtgatcttgggaaacccccaaacatacaactggtattcaaagtgaggatggtcttgagtaccgtgtcttccaacttcacagaaaatatctcacgtttccccttacagatactcctttaatgacattgtacaggacaccaaatgcttgtaaaatcatgcctaacatgaatttttaacatggagtcaaga

SEQ ID NO: 327362 - DNA, 391 bp, Homo Sapiens
  misc_feature (94)..(94): n is a, c, g, or t
ggtaataatttgtacatttatttttttaaggagagttaatctttgaaaatgtaaaaaggtagttctaaggtcacagagttgataatacagtttntttttaactgttatataccagatattttacttattttttgaaaaatacaattatctacaatgctctttaattcagtttttaaaattttttgtatattcttaaaatttttgcggttacatagtaagtgtatatatttatggagtacatgagatgttttgatacaggcatgcaatgtgaaataagtggatcgcagggaatagggtatccatctcccatgacttgattttcataatttcagacagacattggaacttgggatctcagacatcactgaccaaagaacacactggattttgc

SEQ ID NO: 327363 - DNA, 521 bp, Homo Sapiens
cataaaatatctttttaatgtcaggcttttataactttctaagaggatgttttaaatgaaattgtcttacatcctgtattgtacttttaactatttcagctcattttagatgattttcaggtagtttgttcataaggctacaatatccagaataaattctatattccacagttgtggctcttttgtctgatgtccatcaggagaatccagtgcccatattgaccttgttaagaaaacatcacaaggaaatggccactttgtcaatcctgagatttaacttcaggtaccactcttgtctgtgctgctatcttacactgggagactgtgacatactgtctcactcttaatgtctttactagtcaatgatgaatctggtcgagattctgaagtcagtgccagggagcacatgagttccagcagctccctccagtcccgggaggagaagcaagagcctgttgtggtaaggccctatccacaggtgcagatgttgtcgacacaccacgccgagccctatgcagtct

SEQ ID NO: 327364 - DNA, 294 bp, Homo Sapiens
  misc_feature (276)..(276): n is a, c, g, or t
tgtcatacctttttaattgtgcaatagacaagtaaaaagggttaagaagaactgatactcttggaaaaaagaaatatacctttcagtgctaattgggcatttacaaaagttagttatatattaatagaggaaggaactccaaaacgttgaaatactataggctaaattctctaaaatagaataaaactaggaaattaatattaaacatgggaaacaacaaagtctcttaactattctaaaaatttacatatggctaaaaaatcccggggttaaagnggatttcaaacttttagg

SEQ ID NO: 327365 - DNA, 912 bp, Homo Sapiens
  misc_feature (44)..(208): n is a, c, g, or t
  misc_feature (759)..(767): n is a, c, g, or t
cagggtcttactctgtcacccaggctggagtgtatggagtgacnnnnnnnnnnnnnnnnnnnnnnnnnnnnnnnnnnnnnnnnnnnnnnnnnnnnnnnnnnnnnnnnnnnnnnnnnnnnnnnnnnnnnnnnnnnnnnnnnnnnnnnnnnnnnnnnnnnnnnnnnnnnnnnnnnnnnnnnnnnnnnnnnnnnnnnnnnnnnnnnnnnnntgcctgggcctttacttcttattaattcctagaaaaatcacttaaaggcttgtgaatatagaatgctacatacacatacacatttatatatacgtactccaactaggtcatattggtctttttgagacaaaacatcagaactttaatatatcagccttgacccactaggtaggaaccagacccagccatgcaatgaacaggggctgctggtcaacacagtgcgagccaccatgtcccatgtccctcccactgaggtctgcgggtcacagcagaggctgtggtattcctcctgcagctgcccctttggagaacccgctgcgctagttattaattataatatacatatcaatctcaggggagagtgtcattacctaatgcatgagggaaatcggagaagtgcttgtgtggatacaaactgattaaatggctatccgttatctggctttctttttaaaagccacaggtgtcagatgaaggggtgtgtgtgtatatttgtcctgagatacttctgaggtgatcataacagccattcacttctttttgaggtggannnnnnnnnaatttagtcagctcttttaagacaggacagcatggtatttgcaaaggaccagaagctctacaagtcactgccccagtcatatgagtctgtctttaagtgaataaggggcagtcggagaagacaacttaaagcattctttatacag

SEQ ID NO: 327366 - DNA, 567 bp, Homo Sapiens
  misc_feature (423)..(463): n is a, c, g, or t
agtagtagaagtggcagcagttagcatctactgtagttgcaggattcagtaaatggtaagtatgtgctaacacctaattaaggactttagcatgcattattattttttaaattctcacagcagtatcaagatatagaaactattatctcttttacgattgaggaaattgaggccgagcaaagttaatcagcttgcctagacagtggcaaaataaggatatgaactaaaataatctgagtacagacctttgctgttgatcactctgtcatacaaactccttatgtttctctccccctcccccgttaagatccaagcttctcattggacatgtttcatcacagtgtctcagtccggggtccttacatactaggggaacttgtttatattcttttgcagttatctttttaactaaacctctaaacnnnnnnnnnnnnnnnnnnnnnnnnnnnnnnnnnnnnnnnnncttatattgggtcttctcagccttgagtttagtaaatgtttgcctaaattcctgagggcatttgtggatttccttaccaaatccaacagtacttcagtcagaga

SEQ ID NO: 327367 - DNA, 421 bp, Homo Sapiens
  misc_feature (378)..(378): n is a, c, g, or t
  misc_feature (392)..(392): n is a, c, g, or t
ttttagaacattataacatttttccccatataagcaatgtcacgtaaatgtgtaagtcatccctgggttgctacagatgcttatttacctgtggtatttctgaagtgcctaccattattaactaaaacattttgagcaagtagttctataagttcagcgttccagcttagaatgccaagaaatgtaactattccctctccttttggggttagggtggcaaggattccctgggttctaaacctctctgattgttctcttgctattgatagggtttgtgggataaacagtgggaacaggattttgaaggaaccaagatgggaattttgggtgttcatatggggatttttttaggaaagcttttttccagatgggagtctnactctgttcacccngggctaggagtggcagtgggccatggatc

SEQ ID NO: 327368 - DNA, 492 bp, Homo Sapiens
taataccctacagtctcaagcacaggttgagtatattacatgttttgaaattttagaattccctgctgtgttatgtaggcaatggaaacaattttcataatctattactgtaattcatttctggaaaacagacattttcaacaagaagggagtggaagataatttcttccattgctgcttgcctcagtgtgcgcagaggatccccaagggtcctgtgaaccgcatttgtaaggaaaggtgccgtccagggtgtttggttctgacttgccggctggccttctttcctgcctccagcatgttgcctgggattccatcccagttcatgccagagttaacctccgagtacagttatgacgattttcactcagtcacaggcgcagaccggcgttcagatgggcaagaggagggagtgcagggattcaaaggtcacagtctcaggagcaaagccccacagacgtctggcttctggatctgtgaccatatggtcaaaga

SEQ ID NO: 327369 - DNA, 517 bp, Homo Sapiens
  misc_feature (61)..(116): n is a, c, g, or t
  misc_feature (350)..(360): n is a, c, g, or t
acagagatgagttctcactgtgttgcctaggttggcccttgaacacccggactcaatcagnnnnnnnnnnnnnnnnnnnnnnnnnnnnnnnnnnnnnnnnnnnnnnnnnnnnnnnntgatggaggctgagactttttggaatccctccctctctccatgtcctgccaagaacagaagtaaagttttccatcttaaaacatgtgtgtgagtcaatagacctgtgttatcttttcactcaaagctcaaccagtgaacagactgagtcagcttccaggaaacatccacggctgtaagagggggtgtcggctgctctccatagccaagtggctgcaaaaatcatcatactgacnnnnnnnnnnntcgacgcattttgcctgcttgcaacgtcttcctttgctgggggacgtcagggttctcgcacgttgtcgaggaaggatattgtctcggcttcctctgactcaagctctcatttttgtttacaaggcagtttagggatcgtccgtgcgttactgtgaag

SEQ ID NO: 327370 - DNA, 466 bp, Homo Sapiens
  misc_feature (24)..(24): n is a, c, g, or t
  misc_feature (60)..(60): n is a, c, g, or t
  misc_feature (67)..(67): n is a, c, g, or t
  misc_feature (83)..(83): n is a, c, g, or t
  misc_feature (91)..(91): n is a, c, g, or t
  misc_feature (162)..(282): n is a, c, g, or t
ttcccaatggaaattccctatccngtggattaaaaaggggaattaatccattattggttnccccatngccgtgagtgaatccnccaaattnccgaaaaataattggtaattcctttttttactattttaaaatggtgatccactaggcattagtggctcatnnnnnnnnnnnnnnnnnnnnnnnnnnnnnnnnnnnnnnnnnnnnnnnnnnnnnnnnnnnnnnnnnnnnnnnnnnnnnnnnnnnnnnnnnnnnnnnnnnnnnnnnnnnnnnnnnnnnnnnnntagaagtctgataaaagagtacatacgatatgattccatttatataaaactctagaaaatggaaactataataacagtggttgcttggggagagaggtgggaagaaaagattctaaaggggcattttttgggcggtgatgggtatgtccattatcttgattgtggtgatcctttcatggctagc

SEQ ID NO: 327371 - DNA, 680 bp, Homo Sapiens
  misc_feature (277)..(390): n is a, c, g, or t
  misc_feature (415)..(457): n is a, c, g, or t
  misc_feature (466)..(530): n is a, c, g, or t
  misc_feature (544)..(556): n is a, c, g, or t
aagtatggattccaacattgaaagtaatctagtgaaaaatgacctccctaattttgcatcaatagccaaatctaaatggaatttgagacaacaaatttaaaaatgtctgttatgctcaattatgctcaacgtgctgttgaacacattgctggagattactgtgtcatttgtgggcacatgtttctacaggacttaaatcatttttgtagaggtgaataaaatccagaaacttggatatttttaaaaagtatttgtcagccaggcgcggtggctcatnnnnnnnnnnnnnnnnnnnnnnnnnnnnnnnnnnnnnnnnnnnnnnnnnnnnnnnnnnnnnnnnnnnnnnnnnnnnnnnnnnnnnnnnnnnnnnnnnnnnnnnnnnnnnnnnnntttgctgggcgtggtggcacaaggnnnnnnnnnnnnnnnnnnnnnnnnnnnnnnnnnnnnnnnnnnngagcccaannnnnnnnnnnnnnnnnnnnnnnnnnnnnnnnnnnnnnnnnnnnnnnnnnnnnnnnnnnnnnnnntctgcctcaaattnnnnnnnnnnnnngtatttgtcaaacatcattgaacaaaagttacaacaaaagagttattaatcagcaaactcctttaaaatttacacttccaatgcattcttcatattatagttacctataccttcttcattttat

SEQ ID NO: 327372 - DNA, 632 bp, Homo Sapiens
cactattcaacatgtcttcgtattatcttccttcctctcgtatctgatagacaaagaatgatataaaattttggttgaaaaaagccagttgattgggatgactagaaatgttaactttttcagtaaaaagctttcaccgaatcactgggcagttagtaatgcagcttacaaataaataaagctgaggcgagaggtttaaacagcaagaaaagctgcagagcatattgaggaagggaagcagtgaaatggtggttttaatacatcccaaactggaagcaagaaccctaacacaaagaggattggaatactctaccatctgtaaggaagtagctagctacaagccacctcacacaaaacacccactaaggcctttcaccgagatcctcttgttatattctcattatgaatccccagcaggtgcacctcaataaataggtgtggaggatactgctgaggacctctaggtcacctaagcagaaactgctgccatcaaagcagactgccaccatgcatccgcggagaactccctgcctacaaatgaaactggtagcgctcatcccctgtgcccgaggaccgtccacaacggaggtgctttcttgcaagagaagcagcaaatgatgacagcgtgtcca

SEQ ID NO: 327373 - DNA, 742 bp, Homo Sapiens
aattgaagggttattctctttgggtgaaaaaattaggagtggggttgttacgacatgaaatacagagggcccttcccttttttgttttgaaacttagccattattattgtgtgacttacaatatgtattttaaaatttatattattttacagatctcacaaatctatgaggttgagagggcagatatactctatggatgagaaaacttaggctctactcgttcagggtcacactggtgacagctaagtcttttcagttacagcctgtgcccttttgacatgttgcttttttcctctccccttattgtacatgccctagttccaggcctttgccattctgggtgtttgaccatggctcacaaatctcttgctaatatctatccactccagggtaaaaagtctgcctgtcctatatttttatacatgtcattttaaagaaagagttgattagagctccttatgcatgcacattcatttcttggatgtctttccttttttaaaactgaaatcatgttttagttttctctctttttagaatttaattcttgggaatctttcaagtctaacacacatgataaataatgcatatatatgtaactatatgcaacattcccttcattataaatcttgactgttttaaaaaatggtttgaatacagaatatttgcatcagttttttcctttaatttgaaatactagagtagctggtcttattgcttcctttaaaaactacgattgaagtac

SEQ ID NO: 327374 - DNA, 797 bp, Homo Sapiens
aaaattcttttaattacgcatttgaatattggtctttgggtcatttgagggacagtgactggtggcaggaaggtccacggtgacatgtggccttctagcttgattcttggccttctgcagcctctggtgccatccagaggactctctggaagcctcagagcagaggtccaagaggcctcatcaacagcaaccactggagactccagaagatgctacaggaatttcttccaattagagatgccacctgctttccaacaaagtggagaaaaccttccttcaatcaaaaaataaagaggtatttttatttctccacagtctggtcttcttgtgagtcagatgctccagtctctttggttcactgggtatttcaagtaacaggtgagtcaaagcacagagactactgcagaaacatttgctcctggcttctgtggcttgtgttacaggaagagaagagggtgggacagggaggggtggtaggttgagaatttgagattgtaccacaatcccaaactcaggaaacagggttggtcccagagcgggtccaacaggctggtccagagctaatctaaggtaattccatgtctttgattcatgggtgtttatggaaacctgcagcaaatgcattatagttaagtccagtgtagcaggaaacttgatgttcacaacaggatcatatggaggctgaatgaggagaccaggaaaaggacaggtctcttaaggactcgggtcaaatgcagcgtttgtaaaaactccatatgttcctaggtggctgtgaggattcaaggggcatttcccat

SEQ ID NO: 327375 - DNA, 766 bp, Homo Sapiens
  misc_feature (55)..(103): n is a, c, g, or t
  misc_feature (215)..(228): n is a, c, g, or t
agagatcaggtcttgccatgttgcccaggctgaacgtgaactcctgggctcaagnnnnnnnnnnnnnnnnnnnnnnnnnnnnnnnnnnnnnnnnnnnnnnnnntaacatttgctttgtgtttttattgttcttattgttaattcaattctgaactttttgccagttatcgaattctcctcttaagattttcagacacaataggtgttttgtaacnnnnnnnnnnnnnngagaaatctctcccagagccttagcatatactccaatttggaatagctgccatctatgccttgtgtacagctgcttcacctcaaatcaagggattctcttcggctccctcctgtgttgtatctcttgtttgcaatatcccaccttgtcttctttttaagtttactccctcattttggcagagaaagtccctcagctgctttgtcaggaagagtgtgggagaggtacaaatttttgagactttgtatatacaaaaacttcattcctactcttacactagatagtttgcctagagagacagaattctaggccattttcattcaacattctggaggcattattgaattgtcttctggacgctaatgtggctattgagaagtttgaagccactctacttaattctttgtgtgtgactgtttctcctgttctctggaagtttatagaatcttgtttttgttttcagtgctctaaaatgtcacaatgatataacttgctgaaagtctgctttcatccactatgttgtacttaatggacactttc

SEQ ID NO: 327376 - DNA, 751 bp, Homo Sapiens
  misc_feature (410)..(410): n is a, c, g, or t
  misc_feature (740)..(740): n is a, c, g, or t
atgtgccatagaaattttgttcagcattccactcaatgacaaagttaacaaaattgccataaattagagaaaccaaatatattagtctagatctaatttactgttctcccaatgataagagctgcaaacaggaagtcccctgattttccccccttaaatcctcacaaatttgttttctttttatgtaggctcaaattaatctaatatgtatgtaaaagttagggactctcacaatttcctatctcaaaggcacttctacatactgttcactcttcacaggtcagtgactatgcatattagtaaaataatagcaatactggaagttcattttctagtataatattaccaattctacatttcttgagtgtatactctgccttagcaatgtgctgtatagattttgaatattnatacaaagtggtaccttccttgttcctatttactacatgaaatctttgacattaatgaaacatgacacagtactgtattctagtatgaaatttcctctactccaatatacctggtaagacttagtgggggtcaaaaagatcaaaagagtgggaggaaagaatgcctgaaagattaggtttatctttagattttagttcaaattcaattacttgggttatgactttcaaaggtcaattatttttagctaaataagtagaaaattggtcctggtaagcaggcatgtatctcccaggggtgaggatggaggtggggataaggagaaaccattnctgtgccgaat

SEQ ID NO: 327377 - DNA, 438 bp, Homo Sapiens
  misc_feature (374)..(374): n is a, c, g, or t
ataactgcaagtttctgttttaaatgataaactaatgaagaaaactgacttgaaactgatgagtgttctttatttgataatggttaagttatgattttggttaaaactgttgagtacattttcctttgcttatactcccattttctttcagtgggccacagttacatttcatcttcctcatcatgtgttgaagtccattgccagtgccattgtaaatgaactcaagaaaataaatcaaaatgttgctgccttacctgtggcgtcctcacgtgatggacagattgtcttacctcttacctagtgcacgtccagaactcggagtcggggccagggcgttctgttagacaggtatggaaccttggctaacaaaggtngacagtgagatagaattgattagtttttgcattaaacaaggaataactagaaaatctggttatt

SEQ ID NO: 327378 - DNA, 633 bp, Homo Sapiens
gcaagcaagaaatatgctggtccttcatattcagacccttaataaaaataggaggaaaaaactataatcctaagttgtttttctccacatactacaatatagaactagtaaagacaggctaagtggaacagaaggtaaaacttgctagaataagaccatacttctatgagagtaatagaatttcttacgctaggcagagagctttgttggaatcctgccctttctcacatgctagggttgttttccttaagaaactctcacacacactaacccactcggaactgaaaagcctgaaccgcaacgtccatctcctctgcaagagaaggtgtgtggaaagaggtagcatgaacgacgaggctgaaatcatgtgagagatgagaccaacaacaaacccaggcttcctgtgttctgcgagtccccaaagcaggcagattccgttttctgaggtaggataaactaagttgccagcaccttctacaaagactttacctcatgatctcaaggtgtgaccatcagtgtgtttactacacaaagcaactcagtttaggcatctggacaaacagtagattttatagcaacacataacagtaaatggcttttcattacttttaagctatcagatactgtggttcc

SEQ ID NO: 327379 - DNA, 469 bp, Homo Sapiens
aggtcatgctgtgttgcctagacttatttttacatgtaaatcacctttaatagaggccatgtggatctaacccaaataattgcaacttaatttccatctctgattttccccttaataacctacagaatttccatcaactaatttatataatcctacttcattttggctgaatatcctatctatgatagatacttaagactatctggtattagaaatactgtaagcattaacaaaataattaagtaccttaaagctttctcataaaatgtatttaatcttattgaccaaactcaggcacataatgtcaatttatatgatgaatttaacctgagctttatcaaacacacagtcctcaatatttgatagagatcacagcctgcacaactactttgttttcctggtctacacatagtaatcttccctttgacataacttcagtcttgcctgtattaatggtgtcatttctaga

SEQ ID NO: 327380 - DNA, 510 bp, Homo Sapiens
ggtttggtgaggaaattaccagagaactattaaagacttggatgctcttctcggctttgctattaagtaagttggacaagttgtttggcttctttgagcctctgttttctccattctaaaattctaaaatgggagtgttgaattagatcagtggctttcgaactttctgctcctagtagtgagaaatacattttactccactccctggtatgtacacgcattcctgtgttttgtgaaaacctgacaccatgctcctccctcactacatgtaaaacacttttattcattaaaaagaaaactgactggcttggacctacaaattagtttcattatttggttaatgttttgaaagccattaaaagatgaattattaaggtttcttgtatactcaatacttgtagttttgtttgggggaatgagaggatgcccttggtacctttgtgaggcctctccactgagggtcaatcatgacttctgttttaaaccagcccatcccatcttctccagctg

SEQ ID NO: 327381 - DNA, 1025 bp, Homo Sapiens
cctagaaggaatagtgctttagtcttctgagctaagtcctcacattccatgacaggctgtacaagcagcaagatacattcctgaactgcaacccagcaaaacttggttacagggcgaggaggcatatttgtagaagggattcaagcctcctaaaaattcagccattacctccacccatgctaagaggaaatgtcagcctgaacccaaaatatacacaaggaaatgtgtgggggcagctctgcacacggctctcagcctcagccagaatttctagatgtggcctcggattttccctgagggcacacagagtccagttcacacaagccaggtctgcactgctcggacagacgtgtgttccatgagccaaagtgctgacggctggtctcacaagccaaattgtacctgggccaggctctcccaggggccagtgtgctcctggacttgaacttggcctagtcccaatttaaaataagccttcgactaaataggaagcaatgccctgcctgctgtaccttctctggcagaaaaacaactttctctaggagacagtcagatgtccaagtgacatcagggcaaaggtgaaaaataaactatttgatggatcagccgcagtagtgtgagggtttggcagggccaggagtgaggcgcggttacggggttcagttcagcctatgcagtgggcttgatgatgtagatgtcttatgctgcaacaaagaagcatctgagagccgagttggtttgatctgcttctgcaggccttaggccagctgttccgtgttgtgtagaaatacctggcgaactttgaaaatgtactacccccaggctacacccgcatatccattaaaccggaagctctgggggtggcatctaggcatcaatatattttttaagctctgtgggagttttcagtgtgcagccaatgttgagaagagtgccccagaccccttgctacttaaagggtggcccataaactgcccaaaccgacgggtgaagcgtcacacagtaccttgtagtaggcaataccg

SEQ ID NO: 327382 - DNA, 955 bp, Homo Sapiens
  misc_feature (771)..(771): n is a, c, g, or t
  misc_feature (774)..(774): n is a, c, g, or t
  misc_feature (776)..(776): n is a, c, g, or t
  misc_feature (781)..(781): n is a, c, g, or t
  misc_feature (783)..(783): n is a, c, g, or t
  misc_feature (785)..(787): n is a, c, g, or t
  misc_feature (795)..(798): n is a, c, g, or t
  misc_feature (800)..(802): n is a, c, g, or t
  misc_feature (806)..(807): n is a, c, g, or t
agtgcaacttcctgacctctgaaaacaatttctttaggatactggctgtaaatatttgcacggattgttcaatagctggttgtgcaaagggagacaggctttttgtctttaccccggaaaagaattgaaacagactctttctttcaaaagttggcagagatatgttacagaggggtccagctcatttgtagaagcaaacatgttgccgtctaacacagattgatcaccagctgggaagcaagtcattccaccgtaggttcacaataacactggctctctgctgagctgctgaccactggtgacagattgatgtgtagttcgagtggagaagctagctaaagagaacttagggaagctgagcaggttgcaagtgtattattcatgcactctctgcccagaaaaataaagttccccacctttctgacctaagtttggagaaccgttagggactgagtttgctttgtgactttgaaggctgcttacagctttccagagcaacataaaaaatgaatacctattggcactccaatgaaatgccaaaatccacaaagagaacgaccaaggaacatttcttttttccttttcccacttgcgagtgagaaagaagagacatgatatttcatgtcgctgctaaagagtttgtttggtaaaaaacaaatgaaaaggtacagcttgttaacaccgctcagaggtagacagtccagggtctcagaaagaagaattgcttgcccctgggtttcttttagaatgcgaagagtgtttgccggggancgngncatgntncnnnacagtcannnnannntggnnctgagggctcacggaatgaagagctttaaaacaccacgcaagcggggaaggcatatttacttaagaaaactggtacctaagttgtaaatcggaataacagatcaagcaggtaccgtgttttataagtttgagtcattaaattttcgcc

SEQ ID NO: 327383 - DNA, 654 bp, Homo Sapiens
cttggcatttcccccgaaaatgcttttttcctttattatacctatatcaaccaagaacatcagatttatgcattctgttgataatagagttaacatgtttcaggtatctcacataggattaaaatggaaggcaatttcacccacactgatgtatactgggttttcttatttattgcttgacttatgtttcagaaacattaatttcctagctactcattactcaacatcccagaatgtgtaaatgtgggactagtcaacctagctggggtgaaagaaggaaggctaggccccaaccagcttcggcttggactgtactgcacgacactctttggtaaatgtgattggcaggcatatcaagtgtctatgtcacattaaaaaaatacatacatctgcaatggtggcgaactgatagctatgtccaaaaattgaatccactttcaaaagctaaagtcatttggaaacatatgttgaatatagtggtgattaaaatgggtcacgtcatcttttgatcaaaatgaattactgacactattctcttagaggaccagcagagcggctccgaagcagtcgtctcatcttctcacccattttctccaccccgaaataaacaggtgggaaagactgcccaatttattttctctgtgatctcgtgcc

SEQ ID NO: 327384 - DNA, 855 bp, Homo Sapiens
  misc_feature (59)..(59): n is a, c, g, or t
tccccctacctaatccctctgtgttaccccaaataatagctgctccctaaggcggcctnacttacataaataataggttgaaaacatttattactccccctactacataaggataagatgggacgctggcttccacaggttggttacgatttgtaggtggtaggtagaatgagtcaaaaaaatcacctatgctaaatgcctcttagcgttatcaatagtcatggtatgttacacactcccctatgctaaaggcctctcagcatgatcaacagtcatggtatttcatatactccttatatacagatgttcttcatttgagactatcaagtagaatatattttcactatccaattatgttaaagaaacaggatcagagaacctatgtcatacaggagataaatgctttcataaaggcctgaaactagatctccatcctgtaataacaggaaatgataaatatgtccacatccaaatcaaaattaatgcctacgtactcctaatggaactgggctctgtttttaaagagagacactaacgttacagggaggatatcccagaggagcgagcccacaaccataaatggtttctctggaaaccatcataagaagcaaggcttctcaatctatagacaaggtaactggaatcataccgtattgcttagaagaaaaatccagacaaatggatgtttcggggaataggattttatcccaatatgaattctaacagattctctctactaactgaatgggctgctataggcatcgtgcttcagcacagaagtacttgagcagaagctatgccaggaatcttgcacaaggaattcactgggtttataagtctccttattctcctgtg

SEQ ID NO: 327385 - DNA, 755 bp, Homo Sapiens
  misc_feature (27)..(27): n is a, c, g, or t
  misc_feature (134)..(142): n is a, c, g, or t
agccagcgtgggaggccgctgccgtcngcgcgccttggtgagtgccctccacccggcccctgctccctcccccagctctcctcggctacgcggccagccctcggcgtgccagcgcgagaccctttgccacccgnnnnnnnnnaccgtccttttgcgcctgcgcgcgacccccagctaccgcacggttgtccagaggacagaagatccgtcttctcattgggcagcgggactggagggttctggttcggattgaccggctttgtgttccgttctagcgctgcacgccagacaccggcctttcaatatccgtctcttccctgcaggttgacggcgttgcacgctctcgcggggaggctctggctttccaaacgctggcaccgagggttgtagttctgattcgttttctttcctctgtcccccagttgcagttttcaggactacgtgggggagggaatagctttttgttgaacggtttaagacgctgacctgtgcaactggaccacgcctggttcctgtgtctcttaccaaaccgtgaccccggagcccaggactgggtttggtggtcgtgagcagtttgtgacccttgaaggaagacaccaggcctggtcctgtatctcccttcgccagactgtgaccagggagggctgggatcaggtgttgttcccatgtgcctcccaccagactttgacccccgagggctgagaccgggactgtttctaccacatcataatatggcttctaaagggctggaacaa

SEQ ID NO: 327386 - DNA, 756 bp, Homo Sapiens
  misc_feature (13)..(13): n is a, c, g, or t
  misc_feature (42)..(100): n is a, c, g, or t
ctagctttgcgtngaattaccttttctctgttgcaaatgccnnnnnnnnnnnnnnnnnnnnnnnnnnnnnnnnnnnnnnnnnnnnnnnnnnnnnnnnnnncttttatccacccttccagctggatcacgcgccctcttcaatgacatgacacgcagctagagtgtatgagcttgctgccggcaccttccgtcctgggatcgcatagcaaggcctcaatggacagccaggtgcctggtccggtcccacttttttttctgtcctgttctcgtttcctctttgcttggccaaagagggttgggccagggtcctgagtgcaagggcttggcttggtgaattaaagtggcagtagccgtgtggcagagaaaatttgtagatgggtgaaatcctgggcctacacagtgacaaagtgtatatagacagccagcctagttggtggatgtgacaaccccagactcttctagatttgtggatccgtgcacctgccagacctgtctctgagccatctggggaggctgggtaagatttcccccgtcagggcctgagcctcatctccaagctgctggcttcagcccagctgccaccagcgctgtctctgtcttgcgctttccagagagagactgactcattttgagctccaggcctaccaggcagcccaaccgcggcagtaactgcctctcacactgaggatggctcatgctctggtccagccatggcttgaacacctcccaacaagaacaaagccagactcattctcc

SEQ ID NO: 327387 - DNA, 753 bp, Homo Sapiens
  misc_feature (403)..(403): n is a, c, g, or t
  misc_feature (493)..(493): n is a, c, g, or t
tctgagtaagaacaggctttatttgtaaaaccactcgtgactctttacaaagcaggatacacagaagggaaaaaaatacacagtgcaaaatggatgttctgagtgccacaaggatctgctgaaaaaagccaaagatgtaagatggctgggtatatatgagaatgaatatttcactatattctgattcaattaccagtctcagtggcccaggatgagcttttggtgtggtcacatggccaacatttggataacaaatgaggaataatggtaccgcctcactagtgcctgagaacagcatgttctggaaaatgtctctggagttagagatgtgttagctttttcattacagatggagaaatacaatgtttacacaacagtccaggggtggggtcaaaaagttggnaaggtgtcattagacgcagcccaaataaagtgaagacaacccaggtgactggcagccctgacttgtgcgtgggcgaagcccttacagatntcctgggcactctgtgcctgagcttacctgatgttcttgtgaggcgggtggcactatcctccatgtatgtcagtctaacaagacggcctgtaaaaatgtcatctatatgtgctatgtatgtaagcagttgtacccagaataacattaattccttaaagaaccaaaaaaactggacagaaaccctagttcctactgtgaaaatgccggtgcatatcaggacaaagaagccaaagagattttaggactgttcttaacttcct

SEQ ID NO: 327388 - DNA, 732 bp, Homo Sapiens
  misc_feature (121)..(133): n is a, c, g, or t
agaagattacttttatacttagaataaaaaacttttaaagtcagcaatatgtcgaaatatgtattgaatatattatgctatatttatctgagtattttggtttaacaaattaaatgcatannnnnnnnnnnnnaaaaaatgtattgaccatatttatataactacttatctttttatttggtagatttaagtaaaatttattatttatttaacacttttgaatttatattatacttgaagtggtttatttatccttggccagctaccccccttgagactctggctttctattttatagaactattttaatgatagtttaaacatgtatacctgttactggttattttctgttccccttatcttgggagttcagcataatgctgtgcggatcaggataacaaggtcccactgaggtgaaggagggaggctgggaatggctacagcctggagtggaggtgtgatttcagtaggtggaaggttgtcttcctgaaaggaattggcagaagtagattcttactgattcagatacattttccaccaactgaaggaaggaattattaaagccaatggtgaacaaagcatttcaagcattttataggaagtgactagatgaggagatttttttcattccttttttaatcagcaaaaaagaaattagtattattgaattagcagattcttcctattctatattaagaaagatttaatttttgtaccaaggaaggttaggtg

SEQ ID NO: 327389 - DNA, 635 bp, Homo Sapiens
ggccgcttaattaagattgtctttgccttggatgtgccttgtgtctttggcttcttctgggcacattgttctgacataaaggttgcctccttgtgggggagaaggggaggattagtttgttggcttgggcatttgatcataaattatggaggtgctggaccggaggaaccacccaccagcccacggaggctaccgggcattcaggataagggccgccttcttcttcagaataaccatacccactccctctgaaacaaagtggagagtcttaggtctgagtggaaactctaaatcttttaattcttggttcaactttcttcatctgttttcctggttcagactaaaacatctaactcagctggagaagttataacgctttgttgttggacgtggtttctcattaaatacattgcactatgctggtataagcacttggaaattctagtgctgtattgtcatagtaagtagagaatatagaaaaggcaggaaaatcgtgcaagtcggttactactcgtcttcccagagaactcactttaatggacaacaaagcttcccctggagtacagtctgttgtggcaaattaacaaaacttgttcttcagaccttttatttgcattctgcttggtctgtctttc

SEQ ID NO: 327390 - DNA, 552 bp, Homo Sapiens
gaccgcttaattaaaatgcatatttttctggcatatgattatttgtgctagatattttaaagaaatagttgacaggtctttggaatccagctgatcagggatatttaaatgggctaatgctgatttgggcatagttgcttgaatattagagaactgctaatttcttcaaaaccttagtttgttatttagattcagtgattttttgaggcatgtatttgctttttggttcagtactaaaataaagtgggtggaggtttacagtaacaggttttaagtgctgctcaataaaaaatttaaagaagaaaaacagacttgggctaggaagcctcacaaaggtaaacttgtgctgtcttaggagagttctctggtctcaagttcatttctctttgacctgagcttgttatcttttatagcaatgtgtaagtccgtttgtgttgctgttaaggaatacctgaggctgggtaatttataaagagaagatatttattttggttcacggttctgcaggctgtacagggagtatggtgccagcatctgcttctggtgagggtc

SEQ ID NO: 327391 - DNA, 818 bp, Homo Sapiens
  misc_feature (273)..(349): n is a, c, g, or t
tgttcatgggctcatatctcaacagttactggatatttattgaattttatatgcaacacagacacggcatttatctttaagatattttttgcctctcatgttttagctccaagacatctaagtcactttggtagaaagaagccagggcaggcagtgccagcacctcctactcgaggcttcatttctgaactagagcagttacagagaacatcacaggaccctgagtagggcagccagggtaaaataataaaactgaacacagtaacatcttcnnnnnnnnnnnnnnnnnnnnnnnnnnnnnnnnnnnnnnnnnnnnnnnnnnnnnnnnnnnnnnnnnnnnnnnnnnnnntgcagagttttacagtttaaaaagtgctttaaaatgtccctcctttaattctcacaacccccaggggttacgtatcaccttcatcttacagagaggaaacctttgtttccaaggagttgagcggcatgtgtaaaattgcagggccagtgaaggagctcagcctgaacttgggcccagggagcagtcaggacttggagaaggttctctctctcaccctgcaacccaaacaacgagcaggggggaggcatcacataggggaggagatgcaggaagaaaaggaaagctcaggccacgaggacacaacttcctcaaaacccagccctaaagccggacggggtactcacgcctgtaatcccagcactctggaaggcagaggtggagagatgcttgagcccaggagttcaaggctgtagcgggctatgattgaccactgcactccagcctgggtgacagaatgagaccctcttaa

SEQ ID NO: 327392 - DNA, 621 bp, Homo Sapiens
ttcctgtgggctatattttcctgtatgttttgtatttttttgttggaaactgaacattccaagttttacactggggaagctctggaaactgaattattttactcctccaggattgtttatttttaaaattttgctggcttatgataaagggtatttcaaggaaacagataaagggatgtatagggcaaggtatgggggaaggggtgcagagcttccatgccctccgtaggtgcaccactctccaggaacctgcaggtgttcagctatgtggaggctccctgaatgcggtcctcttgggtttttatggaagcttcataatgtcagcattccttcccccaaggtatagggcaagactctctctgggggaaggtcttaggacccacaattcagaaaagtgggcagacatttagagatcctgccttggggcaggtgaaaggagggcaggactaggtcagagaaattgtttttcttgaggcctgctcctgaggcctgacacactcaacattacaacaaaagactgtaacaagggctatggaagttacaagccaggaattgtgggcaaaaacataataccacaggtcatcccctggttttcatacatggatcctttaaatcaaaaga

SEQ ID NO: 327393 - DNA, 712 bp, Homo Sapiens
gacattagactactgaagcaaacatctttttatgtgtctctatgtgcacatgagaaaggtcagacccccagaagttaaattcctgggccacagagtatcttaattttacattttaaaacagatctcccaaactgctttccaaatggctgtgcaattttgcacttccaccaaatgggtagggacattccccactgattcatggccttgccaatatttagcagcatcagccttttttattgatgagcgaattgatcactgatgagtctgagcatcttgcagctgtttatggcttgagggttttctcctctgaaaaggcttttttcatcactttctattttttaaaatatattgaagatattaaagccttggtttcttaacatgttcaaaaaagattttctaatctgttcccatcttttgcaagttttattgtgccttttttcacacgatgtcttagattttggatgtggctaaattaatcactcttttcctttatgacctggcgtttgtgtcccactgaagaaggtcttttattctggttctgagagttcaattaacgctcatcagttaatcagaatctcttgtctctggagggcagctctaccactgagttccaggatcccagcccagggcaccatgctcctcttcctcattcctccattcaactatgcggagctctcaacctctcatgccttactccagactttcatatctg

SEQ ID NO: 327394 - DNA, 806 bp, Homo Sapiens
aaatagagttatttcatttactcccatagaaagaccaaatggctccaggccaagagaaaattgaatcaaagggacccatgtgtcttagttggggtaagttctaattttaaaagagatttttagcacacagtaggtataagaataaagagatgatctggggattcagagaagataattttgcctaaaacaagcgagaagtggataataaggagagactaatctgactcagcaaaataaacggatccatgaatcccaaattgggtaaatccaagaagggtccgaagacagaatgggaacattcagatgcacatgaaattcgatggaatgaatcctcttggttgggttctcttttttctctgcatctgtcattgttggccatagtttgtgtcttaggggccaatagccgaaacaaagtagtatcctaaagcccctctagacagcctggtcctgaaaatgatggagaacacctgtttccgcaaactttaatgtgagctgtttggaaactgagacccctgagcttgtcctctgatttatcgcccaccggtttttgcatgcaaggaccacttaagcaatgcttctccaactttcatatgccccaggaatcagctggaaatcttcttaaactgcagatttggattcactaggtggaagggtccgccagagcatttccatttcttataagggctcatgtgctgctgctgatccaggggtccactttaagaaggaaggctgttgagatgatgtgagaagaaagacgagaggcagaaatggaagagacagagataatgaatgaatgaatgaatgaa

SEQ ID NO: 327395 - DNA, 960 bp, Homo Sapiens
tgccaattagggaagatccactactacaacactgagataacagtttggaggagagcacagaattggaagccaagagtaagtaagagttccttgtaatggtcctaagggggaaaaaaagataaggacctgattaaagtagtggcagtaggaaaatgaacaagaggacaaaaaggatagatatttaagaagaataaatatgatatagtaactacggttgacattgttagttgcctacatgacaggcattctttcaaccagcttccccgctggaagaacctacctcccttgatggtacaggctgaaaatacaaagtaatcgcttccttagctttcctcacaactatggcttgggcattttattctaatcctagtcagtgggaattagtgggaagtctctgtgtgtatgtatgtaacgggctgccttatcctaatacaaaaaacatttgcttctttattctgtcatttgatactaatgagtgaaggtacatactctttaattgggttgctggttcctgtttgttaatattttatcaagagctttgtgttgatatctctaaattaatttagcctgtagtctcctttttggatgctatcaagttttgaaatactatgtatgtaaaaagaatttaataggccttaataaaagaaacttataaagctttaggaaacagataaagcatcaattttgtctttgtagtaaagctttaatagtattcgtgtgaaatgatctgggcctggtgcctatgttaggggttgggggttgcctaagttggggatagaagataaggtacctctttaatatcttatggtatttcttctacatgaattgttctatctatattttcaatttgttttagaatcagtttttgtcatttatataacctaagagtattaccaactttatctatgttttcaagtttatttgtataataaaaatttaaattttcagtctgtgattatt

SEQ ID NO: 327396 - DNA, 853 bp, Homo Sapiens
  misc_feature (472)..(472): n is a, c, g, or t
atagggttctcaatgcagatctcccttttctagttagctatattcttgactgcatccgctaaaaatgttaaagcttcttgagagacagacatgccagattttcttggtatctcccataatacgacctacagtccatggtctacagatgttttaaatagaattgctattctcgatacatacaaagacgtaattgctgacccacaatcagtaacatccatattgggagatttttcaaaggatggtgaccctgcttgtatttatttaccttggtattttttcttgcatccttctgtgattcaaaaaagtaaaatgtgggtttctgaaatgatgggataagggtctacatcttctagaaaaaatacataaaggagtagttaagctctgtaaatgtgccacgagctccaacacgaccatcgtagggtgaagcccacgttttcttccatggcctgaaaggcccctaggacttgcctancctttctggccttacctccctagctacttatcccattctcttgaactttatactcttgtataaatttctgactttcaggaaatgccatactctgttttggcacccacacatgtatatttccccctggtacacttggaagactcttatccatctgtgaaaccctatgttgtcatcacttggtccatgaaatattacctggccaatatcccaccatcacctcaaacccaatcaccccctcctctgtatgctgtcacacctatattattaaacttatcacattgcattgtaattacttcctgacctttgtatctactcttttagtaaactgatgtatatatctgaaaggagagattgtttcattgtgcaatcaataaatgtttg

SEQ ID NO: 327397 - DNA, 971 bp, Homo Sapiens
  misc_feature (682)..(682): n is a, c, g, or t
  misc_feature (748)..(748): n is a, c, g, or t
ttttttctcttctgaactttaaacttttttacaagtatgcattaatttttttaaccagtagaaacagtaaatgtcaatgaatgtgaaactgacatactcctgagctgatatacaagtgtttgtgccctctactaacaagaatattaccatttaccatgaattgagcatttgttgtgtgctgttagccctgagcatgagacagacatttcacttaactccctcttttcatgcccattttacgaatgaggaaacaggatcagagaaatccaatgacttgctcaaagtcccacagctagagccgcaaccagctccatctgctccaaaggccttgcttgcagccagcctactccacagcttctccgcagccaggaaggttcctttctgcttgcttgcttttctacgcggccactgaaagcagctgtgacgatatgtaggtcatactaaccacaaatattaccaagaccatggaactggggtgggcactttggcagcatcttgggttgtgactggtgacttttctcccacagtcaaagaaccaggtcagttcccaggctcacccagcagacagtcttggggcagagacaggggcagcgagccaagaacccaggggaggggctttgctacgcaagaaactaaggaaaacactggtgtgcttggggatagggatcccgcttggcaaatngcggaggcctctggccatattcggtgctgccatacacaatgccacccaaggaggtttcaggtccangaagcgccccaggtcacctcagcaggagtcccaggctatggacctctgaatagatgtcaagggggaccctcctgcccattgccacatccctaccctggttacatgttactggtgtttctcaaaggctgctttgccaagtgggtggcccccactcatacatgcaaaatgggctaagaggagtattcttcaccccttctaggagacacaagcatattcagaccgg

SEQ ID NO: 327398 - DNA, 991 bp, Homo Sapiens
tgggtaaaaagtgaaacaccaatagtttaattgaaatttcagaaaattgaacatatgaacaaggcaaataaatactaagtaagttaaaaacacaaaatatgtccaggaagtatcgatgagaatgttcaagttaaagttctccaatgccattgctacagcaacctcaaaccctaggttctctctgcactattaacacagacatctcaggacatggtttgcttttttttaagacttaaataggaaactaatttttctttctttaaagcaattgcgttcttcagtgaactctttctttaggccagttgatggcttcttagcagtttattgacgagatcctagggtagcttccgaagctgggttgattgcatttgggtgcggatggccaaagtgagtggccctactgcctgtgctgctcagggctcctgggctgatgtggtggcttcttccctttgtgctgctgaacatagggaaagtgaggttcacagtccaccatccaccagccgccgtctgtgagctccaccagcactcgcagcaagtcagtcgggctgagagtgtggttgtagaaaccctggctttgtgccttcccaccttccccagctcaccaaggtgacacctggctgctgctgaaatggcctgagcagtcttgcattagcagggccagccacctgccagcctgctgcatccccagtgcctcttgacgcagaagtgccgagcagctgaccggcagcgaggcctggagttctacacacttgccttggagccttttatttagggcctcaacttgcctggccttggcccttttgtaggtggccacctagtttggctcagctctgcatctcggggaaggtcacacagaccctcagccagaagttgagcgctctgttgaggccgtgcagcccctggaatgctgtacctttgccttgcttttttctgcctctgtacaaaagaccagcccattccctggggctgggtcaatggccggagtctcagg

SEQ ID NO: 327399 - DNA, 679 bp, Homo Sapiens
gcactggaagaagggacaagcagttctgtatgaaggtggaaaaggctatggaaaaagccagctgttggctgaaataaactttctggcacagaaagaagggcatagctacccttcacaggtgctttggaaacccactttattgtgaggtcctatgccaggaccttctctctaaggacgtgttgctctttcatgtcctacaaaaggaggaagaggaaaacagcaagtgggaaaccctctcagccaatgccatgaaatccataatgtatagtatttctcccctgccaactctgagggaaggccaggaactttatgtcttgcacagtcaaggatgatgtgaacttggatacagtacttctcctaccctttttgaaagaaatagcagtaagccaactgggatcaactgagcccagaggaacagttgctggtcaagtgtgctgcaatcattgggtcactccttccatatagatttgctgcagcacctcctggctggctgggataaaaataagctacttcaggtcttgagagctcttgtggatatacatgtgctctgctggtctgacaagagccaagagcttcctgctgagcccatattaatgccttcctctatcgacatcattgatggaaccaaagagaagaagacaaagttagaacagaggaagagttcctagatcaagtgaag

SEQ ID NO: 327400 - DNA, 582 bp, Homo Sapiens
ttgagacggagtgagggggcagggtagttattaattagaagatacgggcaaaacactgggatggcttcctgacaacttaagaggtctccgagttatattctgggttgggaaacactgacccagcccttattccttcaaggactctagtcattggcaaggaggattcatgagccccggtgacacagatgggggccctgctctatattcaactgtccagagaagatctagtcacaacccctcatctcaaatggactttggttcagaaaacagaactaaggaaaagtggtttccttggactcaaccggtctgaatttcccactaaccacaacactgacttcctgagcaagctggctaatcccacgtatacaggcaattacttgtacatcacagggctggggacaacacacaccaaggctgagaaatctctaaaaagccaagtgaagtaaagggagacagagtttaggtacagaggggaacttagcaacggagtggatcagaagatacagccaaggcccacggtctggtctggacctgatgagtggatgtctgaggccagacgctgcctctgctaatgggtcccta

SEQ ID NO: 327401 - DNA, 885 bp, Homo Sapiens
  misc_feature (13)..(13): n is a, c, g, or t
  misc_feature (48)..(48): n is a, c, g, or t
  misc_feature (140)..(140): n is a, c, g, or t
  misc_feature (296)..(414): n is a, c, g, or t
  misc_feature (563)..(572): n is a, c, g, or t
agagttgggttangggttaaagtggggggatccctgttttggatgggnccccaccccagtattttaagaccattatccctattttttccaatatccgtttccaaagaaataaattatacctgaggaaatttaatgtgttncctaaagaatagaaaatatactaaattttatttgagggtcattctctttctaaaataatcataatagctattaaaagttttcatgtgagcatattttctttaatttgtttcataagctgttttgtaggaaagtgttacaaaaacatttgtacttgnnnnnnnnnnnnnnnnnnnnnnnnnnnnnnnnnnnnnnnnnnnnnnnnnnnnnnnnnnnnnnnnnnnnnnnnnnnnnnnnnnnnnnnnnnnnnnnnnnnnnnnnnnnnnnnnnnnnnnntttgtaccaggtaaagttttaggtcctagaaccactagtgatatttatgtgaatatgctcttatttagacctagccaaatagtttaataatatttattatcattagatgtcactttcttagtgtaaaacggttagttctggtgaggacnnnnnnnnnnaaaataggggagcaggcttgatggaatgttaagtgccgctggttgacctaggttaaagtatgattacagagtgacagtgaggatttaattcaacagtttatgtgaagaaattttataacttatgtgatagagaagtatcaattattgatgtgaatcattagtagttagaagagatctataatacaaaccaggaacagtagcacacacatgtagttccagccactctgcagaggctgaggtgggaggattgcttgagcacaggagtttgagtctgcagttaagttattaccacacaactgcactctagcctggg

SEQ ID NO: 327402 - DNA, 327 bp, Homo Sapiens
tatttaataaagaattacttttacctcaaaactatccttctaacatgtcaaaataaaaactatatctagccaagtatttgtataactgaaataaaaaatattattttaaaatatttcctttgcgtcagtttttcattaatatattttttcacagattaatatgggaaaaatatattttaaaaattgaaatattgtaaagagacacaattttaaactctagacgctcctgccaataattactgtttattacttaattcatgtacttagatacaaaataaatccattccacatcccaaatgttaaatgtaaaattatttaaaaattaat

SEQ ID NO: 327403 - DNA, 763 bp, Homo Sapiens
ttaagacttggacatatttttggggggccacaattcaacacgccataaatgctattataaaaaatcaataaaggtaaaagaaaaactaacacagagtttctttctggtagtgggaatggacagaaatgatgtctgaaatatgttagaagcagaatcactggcatttggtgacttcatgcagaagtgagagaaattgggccaagaattcaagcctaagtggcataaagaagagtagtacaataacactaacagcttagggaagttgcagggaaaacggagtaagggaaatggtaagttggcttgaatatagtgtagattggtgaagatgaaaaaaaattgaagtggaaaggagacaaatttatgatgatcatctagctgatcctaaagtatcaaaaacttgattttgaattcagaattttcagaagtcatattttgaatttcatcttgggtctgtatagccaactgtttatccatacacatcacttttattcccaggtaaatggctcttgaaaggacagtttcctagaaaaatccttagccaggtaatggctcttgagagtttctagaaaaatccttagtattttgtttctattagtaggaacaattatgctcccccagtaccataattacctcaaagtgttcaatatcatgtaatgtctttgggataacagtaagaaaatagtaagttaaattctgggttcatatcatgtttattttgtaagagtccaatttcttttaaatgagaaattagagtatagagtct

SEQ ID NO: 327404 - DNA, 747 bp, Homo Sapiens
  misc_feature (491)..(491): n is a, c, g, or t
actgacaggtgtacgaaccctggttgttaatacactcaccaccagcacaggggtttttctcacattcatcaacatcaatacactccccacggaggtccagctggaaccctttgttgcactcacaccggtaactcccaggagttggaatgcagcgtccattttgacagagatagcggaccaactggcagtaatcagtaacgtttactggcagcacccttggtggctcccgagatggatacagatattccactggtggtcgagggaccggaatttgaggtccaggaggaaagccaggaggaacagggagaactggaggaatggggccaaggggtgggggaggatattctggtctcccaggaattaccataggaacagagcacagcttgttgaaaatcctcggttgcctctgatgggaacacatctcaggggcgaacagtgaccccctggagaccagcatcggccggcatcacagcagcactgcattttggttnatggactgtggcagctggttaagagcagcgcccgtttgtcagagctgtgtaacagtatccctgggcgaacatctatgcatctggtaccatctggagaggtgtaaaaaccagggggacatttgcaaaagtaactgctgactgtgtttgtacattcacccccttcacagattccaggaatggtgctgcattcatcaatatcttcacatttttgtgacacttcattaagtttgtgtccagcagggcatttgcactcaaa

SEQ ID NO: 327405 - DNA, 454 bp, Homo Sapiens
  misc_feature (424)..(424): n is a, c, g, or t
gctcacatttcagggggcttaatgtcagggaacactgagtcaggacttcacgcggggcttctcagtacgactgcacctaagaatgcttttggctaacgtgctttagctgatcatcagcctctcttcgtttctgggcctggctagggtgaagcttttctttgagggctcagcaatgtgctatttctctaacactcgtatcagcatgttaaataaacagcatgtgcccaacgaggccaagaaagttaaaggcagtgggattatgtggcagagaaggctcagagaaataaaatatatcaacaatcatcatgtgtttgcttttattaagttcaccttcattaagaaaaatgaaagagattctatcacattaagctggataactgtgggcacctcttggtgcggtgccgcaaggcagtgccgcaaagtnctgaggggctgcacgagaccatttgctgtt

SEQ ID NO: 327406 - DNA, 497 bp, Homo Sapiens
  misc_feature (390)..(390): n is a, c, g, or t
tcactgtttgaaggtactttattaagatcaaagatttttcattacatttatttataaatccttcctagtcaaaataaaataataaaaatctgtatctttagaaagaacatagttttgtaagtctgagaaggttatgtttgtcagtttcaaattattacagtttagatacattcaatcattacacaataccagggaaggtcagccttaaagataccaaggaacttccatattgggtcagttaaaataaggggtaaaaaattaaattttactttcacctttttatgtttggattgactacagtcaataatgggagtacaggatttactttttggtcttgatttttaaatatatgaattttaaaaagtgaacgttcctcttctcttacatagnggctccaacttagggagctggcttctggagggaggagtgctattctccttgctggagaaggaggctgggggaagaaagtacagaattcagggcctttttgctgccgt

SEQ ID NO: 327407 - DNA, 475 bp, Homo Sapiens
  misc_feature (356)..(409): n is a, c, g, or t
aagggcagcggcccactgaaggccatgcacaagctaaggtcctctggttgatggctccaaggctgtttcctcctcccagcctccctataatcctaggcaagggtaagtacagggtcactgagtatgcatggcaggtccaaccttatgcaagctgctttccttggggtaagcagtggaaaacacttccaactaaggactttaatttcaggtcttccattaatgtggccaagtccctgcccctctctggatcccaatttccctatctgtaaagtgaagtaggcgagtttggtaatcttttgctaaaggctcagccagttctgaacctctgaggttctaattagaaagtactgcaaggnnnnnnnnnnnnnnnnnnnnnnnnnnnnnnnnnnnnnnnnnnnnnnnnnnnnnnaatggtgcttgatggccaggggtttgaagacaagcctagacaacatgatgaaatccatctctatta

SEQ ID NO: 327408 - DNA, 950 bp, Homo Sapiens
ttgtagagatggggtcttgctacgttgcccaggctagtctcaaactcctggcctcaagccatcctcccgccttggctcccaaagtgctgggattataggcatgatccaccgtgcctggccagcccttccctttgctgagggggacagcaaagctgagagctgggaagagatttttcagagccacagctctgaaagctccctaggctccagttcttaaccctctgagtgcagtcccagctatgaccagcagggtgggcgagtggaattcggtggaattagtggatttccaggtgactcagcgcctctcaacttctctctcttacttccttctccattactcccgaataaatgcttatcagcaaactggtttttactgagaggcccacagctccccattctccacaagtcaagatcctcacgtggtctccctggggaaggggagagttatggacctagagaagaactttcagagtccctccaagggagacagcagagtggggtcctgttggcctccacccttttggggcacgcagatagtcaatatcttcagcgtccccaaggcctgcaagggtggggccccatatctggaagtccccaggcccagctgggagttggtcaagtctgggctgtgggggcaagggagtgctgggggatggttatccccttttctgccctctctcctggggcaactccaaattttcagccctcattgactttcccaggactgctgtccccaagtcttcactcatgtctctctgtgactccttcccattaggtactcgcagcaacctgaccccccaactttttcagtttccagcctggggacttgtggtggttaagagcatgagctgagttcaaatcccagtcctgtcagttaacagctgtgtgatattgggcaagtcactctctgggtctcagttttctcatctgtcgagtagggtgatactagt

SEQ ID NO: 327409 - DNA, 992 bp, Homo Sapiens
  misc_feature (255)..(255): n is a, c, g, or t
  misc_feature (350)..(350): n is a, c, g, or t
  misc_feature (867)..(867): n is a, c, g, or t
  misc_feature (874)..(944): n is a, c, g, or t
agacttgtgaaaaaaaccactgaaactgcagagatggggaacaggttgctggataggatgtctctagaaacactgactttaattttataaaaaagaatttaaggcacaaaagtatattgcttttcctcatttatctgcttttgggtatcaggaaattgtgagcaccagctctggagaggcagtaggggtagccaccccaaactctgatctcctctaagcagttctgtgagagatttcagtgtgggggtaagaccntggacaaggttcagcagagggtgggatctggggcagaactggggacagaaggtggggccctaggcaatctgctctctatgcccgtaagtattttncagttttgtcttttctaagcctgcccaagagaaatttgattcccagagtttctgtatcttaatctattttagctaattccctattttataacattataacacacaataacaaggaatttaacccaaaacccttatgtttttctagaccaattatattagaagctaattatttattcttagcaaggtaaaaacaacacaaataataacaacaatttctcttctgtcaatgaacagctgatcagatggtggcattaaaactcacaaaacaataaaagggaagtaacacaaattaagcttaagtctccatacagtttctgtctttgtactgaacacacgatgctgaattcaatcatttattcatgtgctctagactgcaagttccttgatgggtaggggaccatgactgctttatgtctttttctaatgatccatatggaaataggaaggcaattaggcttattggatccaggtttgaggtctcccaggattccctccatttttcacccaaagggacccnggaaaannnnnnnnnnnnnnnnnnnnnnnnnnnnnnnnnnnnnnnnnnnnnnnnnnnnnnnnnnnnnnnnnnnnnnnccaacccctgcctgggggccacttatcttccccctgaatggggggggc

SEQ ID NO: 327410 - DNA, 512 bp, Homo Sapiens
  misc_feature (478)..(478): n is a, c, g, or t
gtattcaatattgcttttaatcaagaaacaaatttcacagcaaagaaagtgaggcaatgggcttgtgaccaggtaatcacagtcataccacgtatctcagcaggaggaagcagctggacaaacattagagtgaaacggcctcgtgaagactccgttacagcaccacttgggagacaacttttgggtgctgcccccaaggttctgctttgcatgtgttgtctctcctataaccaggattcacgggtccaggaatcaagggatagaagtaggagtggttcctctcacctgtcccctcaactggagttctactggtttggagggcttggtttttacaggaggaatgcttccggggaacacaagacaacagctcactgaattgtacattgaggctcacctgctgttttgggcccttctgggcactgaaccaacaagcaaataaggggtttactgactcgggtgtattaccaaggggaaacanaatgctgctgcatactaggggcagggagaactgt

SEQ ID NO: 327411 - DNA, 812 bp, Homo Sapiens
  misc_feature (151)..(151): n is a, c, g, or t
  misc_feature (159)..(159): n is a, c, g, or t
ccctgcagggagctcttctaggtacttagctgtttttaaggtctgcactttaccctgcactgtaaatcaaggctggacaaagaggttactaatctggctagctgattctaattaatcagagttaatgaaattggcctctggagaacataanttacaatnctgattatagcacagaaccagagatggcaaactgacgaccccaaaagcagagcaggaaagcccaaagctctggcctttctcagaaggcactggaccatgcttttctctcaatggctcccacagaaggttctgacgaagtgcttttcattccaaattcttcctctcctgtgtttctataaacagtgtcatcgatagagtcatggtctctcttccttgttgcttcattcattctctaaaataatgagtaggcctaggcagatgaaacacaatgaatacagggccttcttgttatcctggcaggccttcctaagcctttgggttctattctgatgttttaggctagcaaccaactatgagagacacctcctggtgccatgtgcatttcagttaaagattcagagctggcagccgcttctgtcctggcccttttaaggtcagcctctattttatgtcctaatacattcttgcatcaaacttgcactggatgaagttgcaaagttcagacaatgcatcctcctttgcaaaattaagccttcagaatccccagggatgttttcaagctttctagttgagtaagatcaaaccaagttcacttcatgagttggtctttcctgattctctctctaataccatcccaatacacagatgagttc

SEQ ID NO: 327412 - DNA, 520 bp, Homo Sapiens
  misc_feature (53)..(345): n is a, c, g, or t
aaacatttgaagaggtatggggcggagggggaaatggaatttgaccgactcannnnnnnnnnnnnnnnnnnnnnnnnnnnnnnnnnnnnnnnnnnnnnnnnnnnnnnnnnnnnnnnnnnnnnnnnnnnnnnnnnnnnnnnnnnnnnnnnnnnnnnnnnnnnnnnnnnnnnnnnnnnnnnnnnnnnnnnnnnnnnnnnnnnnnnnnnnnnnnnnnnnnnnnnnnnnnnnnnnnnnnnnnnnnnnnnnnnnnnnnnnnnnnnnnnnnnnnnnnnnnnnnnnnnnnnnnnnnnnnnnnnnnnnnnnnnnnnnnnnnnnnnnnnnnnnnnnnnnnnnnnnnnnnnnnnngattgcatgatgaaatattttgaatatattgagttaaatagattttctcatttgtttatttgtgctgttttctttttaatgtggctattagaaaatttacaattaactatatgggtcacatttgtgacctccattgtatttctattgggcaatgctgtgctagacctgtgccgaa

SEQ ID NO: 327413 - DNA, 608 bp, Homo Sapiens
  misc_feature (68)..(101): n is a, c, g, or t
  misc_feature (399)..(511): n is a, c, g, or t
taaatggagacagggtcttgctgttgcccaggctggtttctaactcctgggctcaagcagtcctcctnnnnnnnnnnnnnnnnnnnnnnnnnnnnnnnnnngaatgagccactgtgcctggcaggaaatgcacattcttaaaaagaaacaaatattatcaccccaaccagtccgaactccatgagacgcttaactaatgttatgtgttgaattgtgtccctcaaaacgatatgaagtcctataccctggtatctgtgaaatatggccttatttggaaacagggtctttgccgaagtaattaagatgaggttatactggattaaggtgggccccaaatccaatgactcaagtcctcataagaagtaaagatcagactgggcacggtggctcacacttatnnnnnnnnnnnnnnnnnnnnnnnnnnnnnnnnnnnnnnnnnnnnnnnnnnnnnnnnnnnnnnnnnnnnnnnnnnnnnnnnnnnnnnnnnnnnnnnnnnnnnnnnnnnnnnnnncatggtgttgcaacacctgtagtcccagctacttaggaggttgtgatggaaagatcacctaagcctgggaggtcaaggctgcagtgagtgtattgtg

SEQ ID NO: 327414 - DNA, 420 bp, Homo Sapiens
tccctctgactaccatttttgccctagattgtctagttacacacttctgttttatcatggaataaacattttatgtttgagcccctgttatgatgggctatcatatgaaagagaatctgatctaaaatgtattcctatcttctattggactgttcaaatgttctttccctgataaaagtaaagtgtggtataatatgaaatacatttggtctttgtcttgagttcctaaaaccatcggaatttcttaagtgatagaatgtcttttgttactgatcacctctgataacttttgagtttatgctaatgattactaagggtgggtcccctgggtatcctcatgataggaccagtctacagagctacagagggaccaggtgattacagggctggaactttcagccccacctactgacctacaga

SEQ ID NO: 327415 - DNA, 910 bp, Homo Sapiens
ttaaacggggctcctggggattagcaatacaaacagcagcatcaggactgacttggcttcttaaaggggccagtgtcggggacggggagagccgctcagcgaacacctctccttggaaaggaggctgggcaaccactaaatcattcttcagggcttcccctcttccgcctttcccttttggtttaactaaggcagaaagtaacccacgaacagctcgagcaagcaagaaaagacaagaatgtgaaataagcacctacagaaatgcaagtgttcccagtggattttccgcccgtcccaggttcgaggtcccaggtccacggacgccgtgcactgggatgccccggacagcgcggctctgcgggctgcgggctacgggctgcgggccccaggctgcgggctccgggctgcgggctccagggctgcggccgcgctctgcagaggcgatggtggtgcgccagccgggactgcacgggctggggacgcctagagcagagccagggcagctaatcccagagggagggtggctgggagggaccacgcggggccggggctcctctcagtcggctggtggcggaatcccctccctctgcacctttcagaaagcggactcctgcggttaaactgccccccatgtaaagtgccagtagtatcccgaccagagaaagtgctttttcaatggtcaagaacaggatcagagagattattttgccctgggtcaggcacagagaaagaaggcggacttgatttgggggttcaggcttccccctctcagcctccttctagaaagaggcaggaacgcagaggggaagcgggggaggctagtagtttgcccttccgtggagaaaaacttaggctctcctgggcctcagagttccttgaaaatatctgcgttcagaagctgaaaggccta

SEQ ID NO: 327416 - DNA, 840 bp, Homo Sapiens
  misc_feature (256)..(265): n is a, c, g, or t
tatttagcaaaatttaattgaacaaagaacaattttctaatcaagtaaccctcaaaaacgaaagaagttcagagagttctgctcagcaaagtgggcaggcagcacttataaacagcaaatggaaatgaggtccagaagcagcttgagtagttacaggtgagcagttgtcttactgggcataggctgctcagttggccacatgggattggctgtagcttggctgctgtgattggctgagactcacctcgttagtacnnnnnnnnnntactcctaagttaggttgcagtttgttatgtagcgactcaagttacgaggcatcctcagaccaaatttagtttaatttaacattatttataggaaaacaactgcctcacctcttccacaaacacaccttactctttttcttgttagtctttttctcgagttctaacttcttagagttgtgtgagacatctttattggggaagcctctggaccaggacagatgcttctttgtctaggttttcacttgcgactccatccttccccgctaagagtcttgcttctacctctgggctcttgttgttgagaactttccatccctttaggtggccctattggatggcatctaacattaagtgtttcttttcattttaactactactatctagccaactagagaccagccacatgcaggtttagctttatcaggagaagccaggcaccagtctttgtgtctgtaaatttgaggaaacatccaactctctcattatctcctggaagtccccctactaggctgaggtaaggggagtgcacccccgaaacttcatccctttgggagggtggtgacttacagaacca

SEQ ID NO: 327417 - DNA, 969 bp, Homo Sapiens
  misc_feature (207)..(207): n is a, c, g, or t
  misc_feature (238)..(238): n is a, c, g, or t
  misc_feature (332)..(332): n is a, c, g, or t
  misc_feature (523)..(703): n is a, c, g, or t
taatggcccagatccttagaaagaatgaataaatattatgcagaagaactcagactttaatgtttaggtgttcctgtaattgtctgcaagtttctctgtctaatacatatttgatatcttttgtctctggaacaaaaagtagaattttcaaatcatatacgtgagatttaatatctattccaatgtgcagatggattatcttgtctncacagtgtttctgtatttatagcatctattnatgtaaatcatatctccttttataacttgtttcattgcctgtagttttagtctgtgttcttcaacctaaatttttgtaggatttgtaacttgcnggcttaaaggcaattttacagagttcagatgttgaagaaaaagaaatcctgcactttgctgccctccagtggattatccagcatatatactgcctgcaatgaaggatctttgctttatcacatccttttacattcttttataagaattagtgaaggtatctgctttttaaaaaaagatattcttatagacnnnnnnnnnnnnnnnnnnnnnnnnnnnnnnnnnnnnnnnnnnnnnnnnnnnnnnnnnnnnnnnnnnnnnnnnnnnnnnnnnnnnnnnnnnnnnnnnnnnnnnnnnnnnnnnnnnnnnnnnnnnnnnnnnnnnnnnnnnnnnnnnnnnnnnnnnnnnnnnnnnnnnnnnnnnnnnnnnnnnncttaaacagcattttaaatatgctactagttaggtcacctccatttatttctgtaaaaagaattaaaactggttgatgtattgcagattttaaaatcctgagatgcaggtatatcctgcaacaaaaccagatgtacttctgtgtatgtaatgtgtctaaatctgtatatttctttacttaaaagggctgtagttatttggttaacaaacagttttttaacatgtatctttaacatgtatttaacatgtgatagaggagagaatagg

SEQ ID NO: 327418 - DNA, 689 bp, Homo Sapiens
gaataacaaattgagtacttttattagacctaagtggaactttatctgaatctgaattttccaaggggccagtgtagagtgacacaggtgtccgaggccacctttccatcttcagacaccccccccgtctctctgcacagggagttggccttccagtaggtgttgctcttctgtcttgacgtctcctggaaagatttttatctctattttcctgtggtggtgttttccacgagctaattctttctatctttaaactcattggctttggaggagctgaattgttagatgacgatctttgtcccaggagagtggcactctgattcttgtggccagcgtatttgggtattgtctcttcatcagctgacagaggtgaaatttttcccaaaagcaggttccaatgccagagtgtgcgattcttgccccgcgtgtggggacgctgcagatttcttcctggctttccaccgctgcagctgcagagctctcagcttttctcggagctccatgttctgctccctcaaagcatctatatgactccggagttttccatgaacatcagcccacagagacttctgtctcccaagctcttggtggagtctgatgatctgctgctgtaatggctggtccccaacagtcactactgccaggatcagatcatctgggccatgtccccacagttgtccccaagccct

SEQ ID NO: 327419 - DNA, 680 bp, Homo Sapiens
catctgttatgcataaaaatcaatttcttgtaggttaaagattcaatacaaaaggggaaaccctgaaagcttttagaaaaataaagggacattatttaaggcagagaagaatttcttaagactcaaaaaactagccataaaaaatggacaaatttgactacattgaaaatagaaacttttttcattaagccccattaagacactcaaaaggcaaggcaaggaatagaagatacttataacacacactattagttatctattgttgtgtaattaccgaagacttagcagtttgaaataacatttctctcacagttctgtgggtcaggaaactgaggagtgggcttaattggatgtttctggcttagggccttgaggctgtaatcagtcaatggctgcagtcatttgaaggcttgactgctttgtgctccctcatgtggatgtagcaggcctcagagctggctttctagaagggagtaagagaaaacacccaagatggaaaccacagtattttagtcttggaagtggcaccccatcacttctgccatattctttttgttagaagcaaggcaataactccagcttacattcaaggggagtttgtacaaggcaccaccaggagggtgaggatcattgggagccagtttagaggctacctactacaacatgtaaagaatgaactg

SEQ ID NO: 327420 - DNA, 484 bp, Homo Sapiens
  misc_feature (43)..(86): n is a, c, g, or t
ggccgcttaattaaaaactctccactaacccttacagttcagnnnnnnnnnnnnnnnnnnnnnnnnnnnnnnnnnnnnnnnnnnnntataactggcaagtttctctggctccccgcctgcaccactgctcaccagattgcatgaagagggaggcagctgtaacacctcatcccgttgatctcccagggaactcagatacttgtttccacgtccaggaaaccacaaactaagctctttgaagcatcagcaaaccttgctaagtgacacgtgaatgccatttggatacatattctaatctttcaagtagaaaggacagtcagactgcctcatctgtaacatccaagggatctgagaacagacattcagtccaggtgttgaacatcaacatcattataggaaaatggtcaaagagaacaatggcacacgttaagagaacatattaatagggcaagatgtatagtaaactaagttttcaagaagtatt

SEQ ID NO: 327421 - DNA, 724 bp, Homo Sapiens
tagtgacattaattttagtaaaacctactttacgttctctatagataatatgcacataaagtctacataatgttttcttatgtaataaatgctttgggataatgaagggtacttcgagcatcattcctcagctgtttagtaaaccagctctacagagacttgcctttctaattctgcagctacatgggtagaaattaatctacttgaaaatgaattagcaatataaaaatgtaatattttatgattaatattaactaggaaattaagactgaattattcaacttcagtttgccattctttgaaagaagttacattttggggaagttctgtggaagttaggaaaaagtttgaaagtgtgttgcggggaaatagtgggctgactagtgtaatgaattgaaacgttggaatcaagaactctgtgcccaagggacctggctgtccgcaggctgtcatttgagggtaaatgacaagcaggtgcctgagaaatgacaggaaaggccctacttttggtcgttggcatcagtactaataaccttctggctttagaccatgattgaggaatatattttctgtgagcacaattgtgtatcatataaatttcaagtgtgttaactagtagcagaaaactacagtatctaaaattgtttttgctgaccaaatgccttttgaccagaatcccccatttaagagcttgtcattgtgcagtttgaaaatttagctactt

SEQ ID NO: 327422 - DNA, 839 bp, Homo Sapiens
  misc_feature (452)..(452): n is a, c, g, or t
ctccttaatttggcctcttttcctatctgtctttttacttatccactgttttcctttagtggtaaactgatacaactgttttcctattcaagcatagcctctttattttcctataatcccatgtataattttcataatttcctttcctcaaatctttaaaaaaatttggttaaattttcttctttctgtgtgagttacaagtgtttctgtgcttcctttccttaaaatggtaaaatatactactcaattcttaacctagcacttttatgttttctcagcattggctcagagctcccggtgcaggcaggttgtgaatcctgaggggaaagacagtgacagacagacagacatgggacagacaagcgacatctgccttgccttttgtggaccaaacctcagaattcacagtgtcacttcccctatactctattaattgaggcagttacaaatgncccacccccggtcccactgagggagggaagcagccctctttaggtggaatgtcattgtccccctaagaagagcaggtgggatgggatgtagactggtgtggcccatctttgaaaaataacatccggcatgcctctcctccattttaaatatacatttggtcttcccaggaatagaactgtgtataatgcctatataaaacagaggtatacctgtatttcagtattaaagtgtgaattttaaaaaactaattaaatggattgttactgttggcacttctctttacaaatggcagtttcatgaaaatttaatattcagtttaatagccctgcaccagacaattatgacagttcttcaaaatctttttgtttatgggtttcacaatttac

SEQ ID NO: 327423 - DNA, 646 bp, Homo Sapiens
gcgccatgaagagagaagggggtgccgcccacctctgctccgacagcctcccggagtcccagcagcaagacggcaaccacgcacccaacttctccagccacggctcatgccgcctgtcgccagcggcgccgacatgacaaggcgctgcatgcccgctaggccaggtttcccctcatccccagccccggggtcgtcgcccccgcgctgccatctgagacccggtagtaccgcccatgctgcagcgggaaagagaacagagagtcctggggacaggtaccgtgcacgagggcttgagaaggggccgggtcgcgggggcaagggtatgagggtagggctgcagaccgccgctcttccagttcccgccatcctccgcgagctcaggcgttggcatttcggggcctggcaaatccccgccccgcctccgcgtaggggctactgggagttggagtttgcttctctgtagttgggcagctgctcttggtctagtgaccaccagcctggacagctacggagaacccgccttaggtagaaagaaagtgatttttttcctttgcaagagtttgacccgggaccctaactgcttaatgcatatttagatcgttttctgtacgttgtcagttctactgatcctagtggtttagtaata

SEQ ID NO: 327424 - DNA, 337 bp, Homo Sapiens
  misc_feature (44)..(44): n is a, c, g, or t
  misc_feature (47)..(173): n is a, c, g, or t
atcataaataggcaaaaactttttatacagaaaatggataattnaannnnnnnnnnnnnnnnnnnnnnnnnnnnnnnnnnnnnnnnnnnnnnnnnnnnnnnnnnnnnnnnnnnnnnnnnnnnnnnnnnnnnnnnnnnnnnnnnnnnnnnnnnnnnnnnnnnnnnnnnnnnnnnatttaagaaattggctgggcatcgttctgtacgcatatattcccaggacttgggtggctgaggtgggaggattgcttgagcctgggagatggaggcggcagtaggccgtgatcacaccactcactgcattccagccgggcctatagagagagactctgtctcaa

SEQ ID NO: 327425 - DNA, 793 bp, Homo Sapiens
  misc_feature (34)..(34): n is a, c, g, or t
  misc_feature (560)..(560): n is a, c, g, or t
  misc_feature (600)..(600): n is a, c, g, or t
gactcttgcatgggaaaaaagggtgaagaagggncagaagcaaagcttagtctttgtctgattcagtctttgcactccccctgccccctcctctggcaggccatggaggccacacctggcacacctgggcatgttccagatgcttataaaggtccagggaagcagggctgctcagtcattgtgaggatctgggaaattctcagtcctcatgggttctgtgagcagccaaggtgatcagccctgacaggatggtcaggatggcagtgaagaggcttgattgattgacaggtgagcagacgatgggactctcggcagccctaatcagcgagagagttgcttctgagcacagctcagctaatgtcccacgctgttccggagcctcaaggaagaatgggctgacggtggtcccaggcctcctagaccaagtgcagctggcgcagacctctggcgtggttgaactcggaacctgttctgggaacgtgaacttggattcaccttagcaataagtgctcaggaatgtgttggaattgctgccagctccctgggacaggcagaccccnagaacactggaagagatctgaagccctggcacccctaacncagccccatgggctccacattcaatcaagcaggtcatcggttatctctaccttcacatggcctggaagcccagcaggcagggtttgctctgtgatatgacaatgctgctgagtctcctgtcactcaccgcagcacctctgcgtagtaaacggcgtctttcctgggtctatgacagttaccatagctcttccag

SEQ ID NO: 327426 - DNA, 289 bp, Homo Sapiens
aatcaataaatttagcagagaccgaaagctgtcccagcaaaattccttttctcttttctcccatagcacagagctattgctggtcacataaatgccctgtaaggattttgttccccagccctgctttgcagctggcagtggagtatggccatgtgcctatgtccctgctaagggctgggagcaggagtgatatgggccacttttggaccagggccttgagacggcaagttgtgcctcttccatacccatgtttccttctcacgacagcacccagacttggctctttaga

SEQ ID NO: 327427 - DNA, 1090 bp, Homo Sapiens
  misc_feature (14)..(14): n is a, c, g, or t
cagcccctgggcanccccccggcccgccctcctggggacacagaggccatcaagggatgggctacggtggccggtgcccaggccagaccagggccgtgggcgtgctcagttaggatcaactgttggatgacgggatggccgcgcgggtgaatgcagggacgcgaccagcaaggcccccgttcaaatggggcaggggtcggaagctgctcacacacctctcaaaaatgaattccaccctccagcctttgcacctagaactcttcgcatggcccagctagtggctcagctgtggtggtcgagtcctttcattcactcacctggcgaaaccaacatcccacatactctaactgagccccactctgtgccaggctggtgctgggacaccctgaggagacacggggctggtcaagggcaccccgggatggccaggtcaggaactggggagggacaaagagagggcgatattgagagagaggaagacgaggaagaaggcaacagaagcagaaaaagcagggactcaaggagccaggttaaagggctgcccctacactcaagggagcaacgagacccctctgccggtgcctcagaaaagtccagaaacccaagcaggatggggacgtggggagttaacttttgaaagtttttagggctccaggagccttgggcacaaaaccccagagaacctgccgggggccagctgatttcttccgacgccctctccgggctttccaatgtccacaggagctactgcagcactaacagtggctttggggcctgtatgtgaatgactgccatgtgtttgagggtgaggagagtgccatggattcttcattactattgaaaagtcttcctcatttagaaacatcaggcgtgctctatttttctactctcccaacagctacatggcggggaggcccaggttttcgtgtgatctcagcttcagaggtctacacccgagtccacccatagtcagagtggccaactacatcaccgtcactgggaaagtctcgccttggcaaaaggggatgaaagattcctcagcttttgccccaaccggccaatgggagatccttccacattcttcctcgtg

SEQ ID NO: 327428 - DNA, 488 bp, Homo Sapiens
ctacttttagggtttatttactggcagtttcaggtctggaaatacaaaaaggaacatgacatgggttctgcccttgaggtgctcccagtctggtgagggacacaacacctttcaggggacaaccgtggtactgaggatgagtgtgagaacacagaggtctactagatgctataagaaaatgggacaggggaactagggatgcctcatcaaaaaaggtgccacgtgaacggggcttatagatgagtaggaattttctgggcaacaaaatgggggtgaaaggacattccaaacagaaagaacagtgtgttcagagactcaaatttatcaagaggcctgcagtccagggagtaaagagaagcagcgtttgtatgtgcagggaaggggaatgggttaaaggaaggatctcagagactatttacaaagggtctctgtaggcatgtaggaggcaagaggttttaaagcagtgaaatgacacatgtaggttctgt

SEQ ID NO: 327429 - DNA, 612 bp, Homo Sapiens
aattcttaacttctagactatatgggatagagtacttcaaaggtaacttttctttataaattttcagcattttacgataatgctatattttgtttagatgattcaggactaaagactcaagaaattaaagatcctttcaaaacattctgaacttctaagtacagtgatttttgtatgctgcaggccttgtgttaggatattatatactacaggtttttgtacatttataggtaattttcctcagggttactacccataaatttatattgttcattaaatgttcaataatgtatatattttttactatggcaattaagtgcccactctacatcaggcaccatacaaagcctttacccccagagaccagaggttctcaaccagaggcaattctgtccctcaaggaacatttggcaatacctggaggcatgtttggctgtcaaaacaggggcatacttcttgcgtctaaggggtagaggccaggcatgctgctaaatatcctgaaacgcacaagccagcccctcagaatcaagaattatctggccccaaatgccaatagtgtcactttgagaaatcctaaccctagacatctgtaatttgtgtttctaatgcact

SEQ ID NO: 327430 - DNA, 457 bp, Homo Sapiens
  misc_feature (12)..(12): n is a, c, g, or t
  misc_feature (24)..(24): n is a, c, g, or t
  misc_feature (52)..(52): n is a, c, g, or t
  misc_feature (57)..(57): n is a, c, g, or t
  misc_feature (65)..(65): n is a, c, g, or t
  misc_feature (93)..(93): n is a, c, g, or t
cccctgtgttangggataattaanaataacctaacgggtttttggtaaccanttaantagtaaantttcccctccaggttaactaccccatanatttaataatgttccattaaaatgttccaaataatgttatataattttttacctaatgggcaaattaagtgccccactcctacatcaggcacccatacaaagcctttaccccccagagaccagaggttcctcaaccagaggcaattctgtcccctcaaggaacatttggcaataccctggaggcatgtttggctgtcaaaacaggggcatacttcttgcgtctaaggggtagaggccaggcatgctgctaaatatcctgaaacgcacaagccagcccctcagaatcaagaattatctggccccaaatgccaatagtgtcactttgagaaatcctaaccctagacatctgtaatttgtgtttcta

SEQ ID NO: 327431 - DNA, 710 bp, Homo Sapiens
ggataaacacctagaagtggaatgcctatatatgaaaggtatatgctttttttaatgcccatcaattccttgtcttatgtttcagaacatggtaaatgttctgtgtgcacttaaaacaaatgtgtattctgctggggctgggtggaatgatctataagtatcaattacatcaagtttgttgttcaagtgttctgtatcttttgcatcctcatttccactacccccaactttgccaccagataaacaagttcctggtggtctttatgaagttcgctgaggcagaattgctgacaagtgtcaaagatacaaacagtgaggaaatcctgctaatccagtgtgccctccctgtcacccgcaactctcctcccatagtccagaaagtgaacaccatctattccacttggctgttctggtcaggacaacctgggcagagcgagaataccatattccatttattcagattttgggaagtgcctgttttctctctgacactgtgccaggttctaactggattacagagatttccacaaaaatgatacgataagcagaacttacgttctaagtgtcatggtgccatttatctagtggtgcatcttaccatgtgataaatatgaattagaatttgaggagttaacctagaaaataaactattatttataatattgttatagagaaaagggcttcataaatgtaatttaccaacagaggtt

SEQ ID NO: 327432 - DNA, 468 bp, Homo Sapiens
  misc_feature (400)..(400): n is a, c, g, or t
acgtcatttttattggctgtgtaatatttcattgtatgatacagatgaaccttagtttatattaagtaaccttttgttcataatccccagatttcaagtaacctctgttggtaaattgacatttatgaagcccttttctctataacaatattataaataatagtttattttctaggttaactcctcaaattctaattcatatttatcacatggtaagatgcaccactagataaatggcaccatgacacttagaacgtaagttctggcttatcgtatccatttttgtgggatatctctgtaatccagttaggaacctgggcacagttgtcagtgtggaaaacagggcacttccccaaaattctggatttattgggaatatgggtattctccgctctgcccngggttgtcctggaccaggaacagccaagtggggattaggtgggtgtttcactttctgggactatgggg

SEQ ID NO: 327433 - DNA, 800 bp, Homo Sapiens
aagaactgcttgtctatttgttttaggcaccaaggtgtttctcctgtgctccctggagaccaaatgtaactggtcagtgcctttatctcagtgatacacataccaacagctattaagtgacccctaattcttttccccaagttaaacaaccccccaaatccacaaacctttccttaaagggcttattgttcatcctgttaaacatattgttaataagcttttctgtactttttggatttcccacagtctttttccgctaattcaaacacagtggtgtcaaatattaaatagagctgaagcattgcttcccagaccttccacatcattcctagtttaacgcagcttggttatcatgctttcttaaaaataaacaacacaatactcctccagcttgtgatccactacgacttccagatctatctcagctataattgtgccttgccaggtgatggccaataatacaatcaacataatccagtcaagcagattgatgctaaaccattgatgaccactgtcatcacctctcaaaaaagtatttcctagtctggtgtaaaaaaagatcaggtaaccaaacgatgtgtgtcgttcacacaatgtttaataaaatacaaagcatagcattttctaacttttagtttgaagactctttctcctcctggtctatgcctgaaaactaacttctgggtgatttcatatgtgatcacagggtagaacttggagaaaatgaaacagatatttaacctgcttatcccaaacactgccccttttcaggaaacttggaggtaactggggtaacttag

SEQ ID NO: 327434 - DNA, 490 bp, Homo Sapiens
  misc_feature (58)..(118): n is a, c, g, or t
  misc_feature (142)..(272): n is a, c, g, or t
  misc_feature (432)..(444): n is a, c, g, or t
gctttttacatgcagacaggctggaatatagtggcatgaccatatcacacctgcaacnnnnnnnnnnnnnnnnnnnnnnnnnnnnnnnnnnnnnnnnnnnnnnnnnnnnnnnnnnnnngtgtatgccaccacactcagctannnnnnnnnnnnnnnnnnnnnnnnnnnnnnnnnnnnnnnnnnnnnnnnnnnnnnnnnnnnnnnnnnnnnnnnnnnnnnnnnnnnnnnnnnnnnnnnnnnnnnnnnnnnnnnnnnnnnnnnnnnnnnnnnnntgcccatctactttttaaaaactcagtgtatgattttaatatatcttatctgtatgctgctaaagtactaactggtctataagaattaagaatagccaatgatcaactgcaaaaagagtaacaaaacctatccatgcttttactttattccattctttgnnnnnnnnnnnnnctccctatttaaatgtactgagtgataactccttaattaagcggcc

SEQ ID NO: 327435 - DNA, 429 bp, Homo Sapiens
ttttttccaaaaatgaaataagtaatttattgttccagaaggtacattgctttttatacatatttcataaatgatacaggattttacacatgttcaatagtttgctatttgtttaaagaacttttctccatgtcctccctcccttgcttcccacacaccccaaaaagatttgcctcgttgcactgtgctgtttcttcttaaaaaccctatgcacaaacaggataaatgggttaaaaataattcacacaacttaacaaaaataaatgagggaaggagctgacgactgggggtggtggagggagaaggaagtgggcggagggtcaggaagtggagacatgcatcctttcattccgtcatgccaatgaaaggggtgttggcaggagtagcagcagcagcagcaatcctggctggccttcaacctgtgccgaa

SEQ ID NO: 327436 - DNA, 354 bp, Homo Sapiens
  misc_feature (64)..(64): n is a, c, g, or t
aggccctccatgaaattccatccagcccatttcctcggggtgaactaactatttgccccggcangcgtccaggcacccatgcctgggaccctgggaatacagccagtggacccatacaggcccttagcccacccaatacacacagatttgtaaaagtaacagtcagtcttaaaaccagaccttgactgcagatgaaaaagtaggcaaaagagggcaggcaggtcaggaggatgtgtttcctaatcattatgcaaggaagaaaggaaatggcaatttaacccagggaggtgtcctaggcagaaaattaatgacacatgctttcctctccctttgcattaccttttattacctcat

SEQ ID NO: 327437 - DNA, 501 bp, Homo Sapiens
ttaaatgcacaaatttattttttctcaacaaacacacatcttaatgcctttacaacttttatctccccaaatatatcttgcttttctttatacatgctgtatacagagttgttttccttatatttagtagttattgcttttttgtgcccttttgggtcctgaatttacacatcaggcatagatcttgggacaggaaagagctgtgaagcaaattcctggaagatcaaaccccttccagcatggccaggtagcacagctgagccaggggatgatggggccatattgggtttggctctgccttgcagctggcagtccaaacactgaggacatgcatatttctgcaggcctcactatggtcatctgtccaaaccccagaatccagagactcaaaacgaaatacagtcatacagtaagatatgtgcaaggtttcagggagcccagcagccagaccttacacaaatcaagcaagtttaagaaatattccagaattaattcttccag

SEQ ID NO: 327438 - DNA, 777 bp, Homo Sapiens
  misc_feature (401)..(439): n is a, c, g, or t
agaaaagttttaatttgaacaacttatgattaaaaatacattttataaataatttttccatagacttgattgaggattgttgcaaactttacaaaaagatacactgcaccaacagattaaagggaattacaaaaaatatagctatacccctatttaaaaatacaacattatacatcacacagcattttctttgtgcaaaatgtttaagggaatgctgtgttaggcatgtcaagcatacttgcttagagggaagtaaactttaatacagttactttgcataatagtataggcatagctaaaataatggatttttccccctagaagttaatatatcttagagttcaacattttacttttattttgtaggattgaaagctaaacttagctttatacaaatatannnnnnnnnnnnnnnnnnnnnnnnnnnnnnnnnnnnnnngtatgaaaacaactatctgatttcacattgaacaaatccccaacgtatttacagtattttcagagaatgtgttctccaaatcagtctgtgtacattttctctattaaacaactctttagaaaattaaactaagccaacatctgttgattaatggacatcctctgttgagacttccagttttcgctgtgggacaaagagagttcctaaggaggttttactagcaccctcaaaatccatgcaggatgagctggttggcttggtgggtccacctggggtacggaagaaactttcggccactaattgtgaccctttgggtgtcacaggaacaggctgttgtg

SEQ ID NO: 327439 - DNA, 681 bp, Homo Sapiens
  misc_feature (563)..(572): n is a, c, g, or t
acctgctagggttttagaatacacatttcttattttttagctataattcaataaattagtacttttggctaagtgtgaggattggcttagtaggtggcagaacaggaacactagaagagacatgattactgtcacatggagaggggcttcctgaggagctgagactcagcctgtcccaggcctggccctctttagcgttttaaatgtaccacatggcagacatgcactggaaagtcatgtgtctgcatgtcctgacacggataaaggcatatagtcaggtgggtgatagactatcctgaaagattttttggtcaggaatgattggtcagagacagcaatatacccatataacaaatctgcacatgtaccttctgtatctaaaataaaagttgaattgcaaaaaaagaaaatgccacagccacccaatcttcaacagccaccaccctgttcagttagcagccatcaacatcaaagcaagaccctccaccagcaaaaagattacaacttgctgaaggcccagatgatcattagcatttttttaccaacaaaatatttttaaattnnnnnnnnnntgacaatatgacattaactggaagaaaattgaaagtcttgtgcttaaatttaaaaaatccaaaacccagaaatgctagccgtgggagattggccttatagcaatttatg

SEQ ID NO: 327440 - DNA, 806 bp, Homo Sapiens
ttaaacgcacagaacaaccttttgaaggtgccaaatttaaagatggtaaagtaacagagaagtaaactgtaacctaattgctatggcttcagaataacccagtcaaaagactttcaacatgaaaggaaaggaatttaaattagttgcccttgagttcaatatttaaaggttctgtattttttttcctactttagcaagggaacaaatatagtcctagattggtccaggggtgtatctccccttctcaaagtaatttgcaggttggactacaaaggagatatagcaacccaatgaaaacagtagaagcaagacaggttcttggcatctgcttatgctgccgcctgtatttctgcccatgttgggctcaggccaaacagttgcagcatccagtggacggctgagggacctgtgtcctccacacttcgcttcaccagcagggagtcattattactccttcacattggggtacttttgaagcacttgatagaagctcttcttaatggaaatactgaggattaaagaacaattctgagactcaatcattctgtagggaaaaaaacacaaattgtctaagtcaggggaacccatctctgacagatgttctgctaaaagagaagacagctccctcttttctacatgattctcgagggctaaaggctgcagagagatactgctaattaattcctccatgttttcatgaaggaaatatttatcaaacatatctagagccatattttataagtagtgtttagttactgtgtgtatattctaagcattttattatataataatatatactgtggaag

SEQ ID NO: 327441 - DNA, 656 bp, Homo Sapiens
  misc_feature (234)..(250): n is a, c, g, or t
  misc_feature (272)..(446): n is a, c, g, or t
ttcaacacattgctaatccagatattttcccgcagtttttctttgaataacagagcaattaatttacttttactatgaagagtcatcattttagtatgtattttaagcaatccaccaagaactcagtaggcagctgagaggtgctgcccagagaagtggtgattagcttggccttagctcacccacacaaagcacaacaggctttgaactattccctaacagggcatttattcnnnnnnnnnnnnnnnnngggagacggagtctcgctgtcnnnnnnnnnnnnnnnnnnnnnnnnnnnnnnnnnnnnnnnnnnnnnnnnnnnnnnnnnnnnnnnnnnnnnnnnnnnnnnnnnnnnnnnnnnnnnnnnnnnnnnnnnnnnnnnnnnnnnnnnnnnnnnnnnnnnnnnnnnnnnnnnnnnnnnnnnnnnnnnnnnnnnnnnnnnnnnnatagggcatttattcttgaacttgattcagagaggcacacattaccattctctaatcagaatgcaagtagcgcaaggcagtggaaactatggaattcggaggcaggtgatgcattgggcgagtttattaacatctgtgactctctagtttgaaatttatttgtaacagacaaaaatgaattaaacaaacaataaaagtataataaagaaa

SEQ ID NO: 327442 - DNA, 239 bp, Homo Sapiens
tgacaaacccgcgcccggctataacaggttatttcaaaaacctatcaacaaaattaaagttaccagtacttactcttaaacagtatgctacacagtttattacaaagtagtattttagcttattgcctaattatattttctatgtgtagtataaatacatatgccatgtgagaggttttatcttttatacaaactgcaggaagacagaagcaactgtggggtaacttaattaagcggcc

SEQ ID NO: 327443 - DNA, 652 bp, Homo Sapiens
  misc_feature (40)..(40): n is a, c, g, or t
  misc_feature (190)..(199): n is a, c, g, or t
tttttttggtagagtcagggtcttgccatgttgtccaggntggtctcgaaattcctgggctcaaacaatcctttccccttgacctcctaaagtgctgggattactggtgtgagccattgtgcctggctgaaaaatggatactgaggggacaatcagtagtcatatccctgcagcaagctttctaacaggnnnnnnnnnntgggagtaacttgaattgggtaaataattatagtaattcatatgatggaataccatgtagctaatttaaaaagtaaagttaccctacaggtactgctatgaaaatttgcctaagatacaatgataagtaaaaacatgttacagagtaataacgtgttgcataggacaatactgtaaatgtggttcattccatcaacagacactgagccctgcgacgtgcctggctctattctacatctgagggacacaaggtgaacaagaccaggccactgtattcaacatctacatttaatggaaatttttgaaagaagacttgagagatttataaacagtggtcttcagcatcagggagtaggcctagaagaagaggaggtcaagaagtggcttttcttattatcttcttaactcttcaaatttttactatgagcaattattattttttattaaaatttta

SEQ ID NO: 327444 - DNA, 154 bp, Homo Sapiens
ggggggggacagtctcaaaaaacaaacaaacaaaatatttgtaagatattctaacagtaataattctcaatcttatcagaaagcttttccataacacatgaacccaaattttatctcaagctcaacaaataaaatcagctgggcatggtagatc

SEQ ID NO: 327445 - DNA, 692 bp, Homo Sapiens
cacatttaacaaatatttattaacacagaaatgaataaggcttggccccctgttcttagatgctcagtgcagaggggcagacaatcacaaagctacaataaaatcacagtagaataagtactatcaccgaggtatggacaaagtactttggaggcacagtgagaggaataaagaggggaagagaggaacaattttctcatttatacctgcctagagcattcagggaagactccagagaagtcatctgtgagttggggtcttgaaggaggagtaaaagccaccaggtgaatagtcaaagaaggagccctgcaggctgggggcctcagaagatgtaggtaaggcccaggtaagtaaggggttcagggaactaggcatgagtgacaaaaaaaggaaataaagagggaataaagaatgagcagaaggaactgcaagcacaaacccattgctctactgtggaaattaaaggtcttgtttctccttggagggggaagagggaaaaaggaaggtgggaaggcctcagatatgggtccctgccacttcctcaatcaggccatggggctcaaataccaaagccagagcttcacagctgtgatctaacttctctaagccaccaaattatcaagagccccttttcagaagctaagaatttgtatgaataatgcagttctaaatgggaaagtccctaatgtttt

SEQ ID NO: 327446 - DNA, 850 bp, Homo Sapiens
gtcttgtcctcaaaacccacaaagtgaccttctgtggattatcaactgcttgccagggggtaatgccagggtatttctgtgacacccactcactgatcctggcagagggagaggaaggcatgaaagttttcctcagtctttttttatacctgagtcttgtggcctggctcccatacatcttattctggttttttgatctgaaaatcccagccccactgaagtggatattcactggccacatagactgagagtgctaggtagaccaaattgcttttcttagtctgatttattctttactcccctatcaaatgcatattcttccggtggagtaaagcaggcctcattcactccactccactccactttgaggagcctcatgggtgggacttcagacgtacctgaaggctgcccaggtataaatcccacagatcacctagaagtttggggtgtgaaggaaacagtctggtagccagtggctttggtagaaccaggcaactgtaactaagggagggggtcaggtgtcagggaagtgctcaaagatgggggttctactccagccctcaccagtatgggactgattcattctctgttgggaccatgacaccttcccagatgcaggcagggccccagaatacagatgggctcatctactctcaggagaatgaatgccttcctgagcatggtgagaggaggctcttctctccttcccctcttggctttgacaggaaggaacgaccaaggggcaggtatgagaggcctcagcaatgctctgggctttgaatccataaggaagtaagtagctgtctgccactgatttacttcctggaaagtatagcaagaagctgttaac

SEQ ID NO: 327447 - DNA, 777 bp, Homo Sapiens
ggaaggaacccattcaacttgagattactgaaaaaagacatgggactttggtgtgggatactgaggtgaagccagtggatctccagcttgtagctgcatcagcccctcctcctttctcaggagtgaggatgtggcctggatgctgcccaatcttgcctagaactggctgcacctgcttgtgccttaacccttggttaccctaaatccctgttatccagactcattgggactgctctagatcttcactatccaatacgggttactgtggcaacgcaaacctttgaatccccctcctgcgcgctgagcggctcgtaaccatggagaccgaagcaggtttcccgcgtccgccttcctcacacagagactgcagccccggcgcccagaccctttggacaaggagatccaagcgggccccacaatgctcagcgggtaaagagctcctccccactcctctcccgccagcagacgaaggaaacaccccgcagcctgcacatgctcagatggagctctgggcccgcgggttctactgcgcaggccctcacactcagcaaagggacttggacgcgaaagccctggtggcgctcagccggttgggagttgtagctttctggctgctacagcaggagatacaggtggccaatgggtgagctggctggaggtaggaacaaggttaaggaagctgggatcttcgtgcagactggatcgtcactatagcaacaatgaaacatcgggaagggctagttctgctaggcagtctgccattttcattctttcatc

SEQ ID NO: 327448 - DNA, 852 bp, Homo Sapiens
  misc_feature (55)..(136): n is a, c, g, or t
gagtttcgctctgttgtccaggctggagtgcaatggcagttgtttcaccgtaacnnnnnnnnnnnnnnnnnnnnnnnnnnnnnnnnnnnnnnnnnnnnnnnnnnnnnnnnnnnnnnnnnnnnnnnnnnnnnnnnnnccagataggttgatcttaatgtaacaacccaaaaataaatgtcatagtcaagatttggtagataaatttaaaattaaaatattctgcagttgggagtgaaatgtgatagcacatacgttgacattatgcatttagagatgttataaaaatgtataggcagtatacacagcactactcaagaagccaaagaaacacttgtgcagtgctaagtgtcacatgtctgcttccaccagaggctaggaatagtgatcctgctataatgtgagaacccaaatcatgtttataaaataggacgctgggagcagttgcaggccacagtgaagtgtgttgcttctgtcactttatattcttatatttcctttccctcagacagtaaactgttgatactcgtacttgtaaaaaattgtaaggcaatttttagtattgttgtcaaagaaaagccttggattacattaacatttgtattcagtcttttaggtgatacacccagagggggctgggaattgtctctttgttcctataagtagatcttaatgtaaaatagtaaatgtccattgaaaagcaagtaatacagcctgtgctaattgggagcacttgaacaattttgttccattctgagtaacttttgagcaagtaattctaagctttgtcttgtatccttgtgtgaaattgcataatttttaccctatttgatttcttaaataaagatgtttgct

SEQ ID NO: 327449 - DNA, 933 bp, Homo Sapiens
  misc_feature (290)..(290): n is a, c, g, or t
  misc_feature (319)..(319): n is a, c, g, or t
  misc_feature (348)..(348): n is a, c, g, or t
  misc_feature (664)..(664): n is a, c, g, or t
ttttttaaagtgaaatggaagcacccttaaggaaatcagtactgggtctcctacctgcccttcccaacctgatgaaatgcattccagaatcaccaagaggtagaccagcacttctttgagaggccacagggaaataaggtgatggagaacttgtctcctgggatgaggggagagcctttgaagccaaccccaaaggccaatgtgaaggtgaatgttgccctgggcatcaagggttatcttctatttcttgacagcaggacggccttaccggctcttcagagtgagggatnttaactaactagctggcttctgctaagcntcatttctccctcaaactatctgtgggcntaatgacaggttttttctttttaaacatttaatccattatggcctgttatttccagatacaatgaaaataaactagaaatatgatcacacacttgaatgtgtggcaatatcaaatggttctacaagtttccaacacttactctctctcacttgctataatcatgggattacagcccagtccctgcctgtggcccacactttgagtagcactgctcaggttctcacgatcctgagaaataaatgctcaactcatggagaaatcctagataagtcaccctggtgtggacctcagggttagagcccagtcccagtggtntcctacccaaacagaaagcatgccattgaatggcaagacacccacacctcctggggaggctggtcaagagaagagcttataattaggctgggaacaattcatctaaatgcaaagttggacaatctgatgatctggtcaaagatgatcatgttccagcctctagtttttttaagaactagtaatttcaaagtcccatgggactgcttttgcaaccctttaaatatctctcaatattcttgtaattttcaagaatttaggtgcttttcatt

SEQ ID NO: 327450 - DNA, 892 bp, Homo Sapiens
  misc_feature (312)..(312): n is a, c, g, or t
  misc_feature (379)..(379): n is a, c, g, or t
  misc_feature (504)..(728): n is a, c, g, or t
gattagttaatgacaatgagtaaacagtgcttaagtatcatgagtttaaactaaacataacaatttgttatcttatttacattacccaaaagtcgctgttatgagaataacattaagatcttttcaaatgcacccaaatccctcagtggaaaacacaaagccctcattctcaaaatcaacaactaaaacaaaatcatgtttaatcctttatgctttctaaacatctcaaactaatgttattagtggaaacagaaaatgtttttgaagatttttttcagttgctatatttgtaactctaaattcttttagganataccagtattttttcgcagtgctgagggcattataggcaaggtgctttaaaacatatttaggttcntgatttataaaattcactgccccattttaagagcagcctagagaaagggcagcaaaaataatcactacagaacctctcaggtcagagattacttctacaatcaaagtactctgctacgactttgnnnnnnnnnnnnnnnnnnnnnnnnnnnnnnnnnnnnnnnnnnnnnnnnnnnnnnnnnnnnnnnnnnnnnnnnnnnnnnnnnnnnnnnnnnnnnnnnnnnnnnnnnnnnnnnnnnnnnnnnnnnnnnnnnnnnnnnnnnnnnnnnnnnnnnnnnnnnnnnnnnnnnnnnnnnnnnnnnnnnnnnnnnnnnnnnnnnnnnnnnnnnnnnnnnnnnnnnnnnnnnnnnaatttaaagtggaatccccttctaaaatgtctgcttacaatatctgtttgcagcacttctactacttctggaattacagtcccttaatttatattaaatttcctaaactaggtgaaaatggaacaagcatattctcactatacatataattaacacacaattaa

SEQ ID NO: 327451 - DNA, 583 bp, Homo Sapiens
gagcaagccaccatgccctggtctaattttagaaaggcacccaggtgtccctatgcagcagcagaggaagggaattgtctcaaaaacaaaatcccttctttcccattaggaaaaaagggcagcttccatttcccgagcatctaccacatgccaaactgtttactgctaatcccaacacagcactataaggtttctacaataactctcatttgatggagggggaaataagacacagaaagaaaccataactggcctggtgcatggtgagggtgagtcgggccccgttagatggttcgggatactgtgccctctactccacctgtggccccggggccacattccctgaaggaacgctatgtgtccaaaacaactgcgtgggatgggttctctaggaaatgacagctggatgtgcggctggggagcaggctggtggcaagtgaggcctggcatgcaggacaggcaatgtttgggatcttctggacatttccaaagatctttatgcaccagtggcctgaaggctttctctccctggaaatgcaggcaggcccttcagtgaacatgcagatgccatgcctaccctgca

SEQ ID NO: 327452 - DNA, 795 bp, Homo Sapiens
gaaattttgcttcttcccagcttttctcactttcaccctaaacgacacttcctccccagccagcctcactctgtctccggcccgcagcaggagcagccagcagtgcattcaccccacttttgtaaactgctctgcatataaaccaagggcagaatgtttcaccctgatcttatgggaggaatcaaactcccaaaatagtgtgtatatatgtaataaacagcgtcacgtaaatacatatatgcagtgcttgttgtccaaatagaaatgaaaataagtggaagagagaggaagaagtcaaaccatatgaaactgaaaaaatatgacgtacgaaatggacaaaaagctttttctgaaaccaactttttacttccatcatccttttttagcctgttgcttcagagagacacaaagtgaacacactggtgtgaatgtcgctctctgtgtgcttgtgtttgtaatgaaagtctacagccaattttacttgtctaccaccgtgttgtgctcaaagagacactacttgagtgaagatttcttctttcccctgtaccagctgttacagtgttacgttgtgtttaaaatgtgtatggtttattgcaatctgaacagagctatgggtttctaccataagtcaggttgtttgttccctaacctgtctctcgtagcaaagtcacttttataacagtttaccactatgcttgattataatgtgaaaggcggaattctgagtgtgttaagatggtattaatcatgtcggtgtcatgtcactaagtttaatgctgctgtttttaaaaaaaa

SEQ ID NO: 327453 - DNA, 920 bp, Homo Sapiens
  misc_feature (502)..(523): n is a, c, g, or t
ggagtactctacgggtaggtattatcagtagaggccactaaaaataatgccagaattcaagtgagagagaatagaaatggaaagaggaagggaggataatgaaattgggtagtaagtaataacaaacatgagttttaaagtttcctcactaataacacagaattgtatattttggctcaatgccgctgggctgctgaagtgaccaggaagtgagtggaattcatcttaattgccccagttagattcttaactaacccatgatttggatgaggggttgtttccatagactgcttggtaaggggtagctgtgctgtgctaactgcctattcgctttgtttctttcaagaacacttttgaaaggacaagaaaacgtaaaaaggcagcagaacagaacaaagaactcattagactacagagattaacacagcaataatctgccaatagtttaatcatggacatgttacaatcatcttgtttcttgagatagagcatatgggcctannnnnnnnnnnnnnnnnnnnnnttccactattcctggcatattccaaaattttcctcttttgattagaatttttttggacaagtcccatgccgagtctgtcctgaagactctggctgagtgatcgatgaaaggagtattctgacacaggtattttgcatgagaacggctgggggagtgccagctttagtgcagccgagaagagagtgcagtcctgataggctggaaccatttgtatttattcagtagagacagaataccaaaggcctgaagccaacacaatttgtgagtaatgaacattgtcgcccccctttgcagggagcagtcttgcatggtttccggagggcataagtaaacaaacttatctagataaattcctttacactcccttgctacctactgttcgccctcagcctccagg

SEQ ID NO: 327454 - DNA, 674 bp, Homo Sapiens
  misc_feature (19)..(19): n is a, c, g, or t
  misc_feature (77)..(77): n is a, c, g, or t
  misc_feature (246)..(246): n is a, c, g, or t
catgcccttttcagaaaancaggagaattcagcttctctataatgttactctggagccacaggaagctcaggccacntcaggctctgtcccagacacacatggccgagctggggcgagggatctctggatcttcctgctctcctgggctccccccaaccccagcgctgaaaaacatgacacagacctcctctgctgacagttccccacccttattttgggtgtcaactgcccttcctccctccttnccctgggattcagcagcagcacgtgagagcccacaccaggatctgactctgaggagccctctgcctcttgtctagaggaagactttcccccttggtgggaaggaaagggcctaggccaaatgtgccttctaaaccagacttatgccaaaaccttgaaactttagaagttaaaaaataattctaattattttgtttctctttgtgtttctattgcggccttcctttggaagggttatggggaaaacaaagggattgcagggtaactcatacaaggccaaattacaaatgtgaaaggccctatgatctaagaaaaatatggcattctacatcctgtaatccaaaataaaatccgcatttaataaaacagcattgattataaaataaatgtaaagaactccaacaggccgggcgcagtggctcacacctgt

SEQ ID NO: 327455 - DNA, 940 bp, Homo Sapiens
  misc_feature (272)..(280): n is a, c, g, or t
gcagcatgtgtaaaagacatattttggggtctggccaatttccaaggtaaaacctcccccctgttttctgagcactgagctcccacagacagggatgaacctctgatgctttgcttgcacaacgtgtcacggcgatgggaccaaggatggcaccgagtcaacccatcagatgttttcttcaggtgtttcagaaacagggcaaagggagtctggttacgttgggttgttcccttgaacagagatgttgtagacttggaagctatgggatgggnnnnnnnnnccacgtggatagagaggtacaaagcacccatctcttcagctgacaggagagttgcccacatttcagctgcatattcctattctctgcctgtcagtccttaggctctggatgatgatgaaacacatgcctgcaatcagtgccccggctcccaggattccccagccgcaaggagcccgatggcagagcttcctgacagggacagagttgggtctggctccatgggctctgcttctgtgggctgcatgatgggttttggcagcgagatggttacaggctcagagaccagctgtttcttgctgtttgtggctatgcacatgtagttgcccagctgctcacaggacaaccgtcggatgaacagcttctctcccatcccacagggcaccccactgaaggtccagctcagcacaggctcagggtccattgtcaccacccactgcaggatcacagaatagttgagctcactctggatgactccccggatagcagctgggaatgtcttcagtggcattagttggaggaccaagttggctgggaagtcacctccagccgcatccttctctagcatcgggtcagtggtgcgtggtgggtggggaccaggctgggacagggttcctgggaagggggctctgaggttttgctctcattctctcaccgtacaat

SEQ ID NO: 327456 - DNA, 549 bp, Homo Sapiens
atactttaaaaattatatttttaattatagaatattgttagaataatacaaacactaggataactgtgaccaataccataaggaaaactgttctacatattgatttgttcattaattctccacaaccatagaaaacaggcacaaagtgttcacgggatgtgcagaggcagccagggacttgggagcagaaggcatgcaaaaagcattagtgaagggagtctgatgcatgagttctatacaaagttcaacacagcaaacgggcaacaattgggcagaaagaggagacagctggtgtggcccttgtcccttaagtttcccagctagattgttcatgtatggagatagctgggtgcttagaagccttgttttaagcccttcacctccaagaagccaaaagcagcagcaggaactggttggggtggggcaagaacagtagggaaggaaaagggggtgaaatacagttaggtcatggaaatgcggtcatctatggccactcccaagctgatacccatagtggctcacagaagcaacaggagaactttgacattt

SEQ ID NO: 327457 - DNA, 901 bp, Homo Sapiens
  misc_feature (889)..(889): n is a, c, g, or t
ttcctaccaggcacttatttcttcttctcttctaaaatagcatcccaatttccctttcagggaacttgtccccctggctgactatcagccagggatccttgcctcccctcactatggcgtatacatgtaccctgaggttagccagcctctctcctgtgtcctgtattttccaaagccacattattctgctcttcctgtgattctgaagctcttctgtgtccttccaataaattccttttttattgcccatgaacaatgggcacgtggaggaaatacggaaggtaatttagcagattgttggcaagttaagttagcaagataagtggtttctattgttgcaactaaatatctttaaaatatatatcattggaaatagacattgtaatgttctttttatgaataatgaaaccagctaacatttactgattctgtctagacttttactatgtggttatgtttaacacacttctgcgacagtaagcgccattaaccccattttgcagagaagaaaattgaagacttagattcctctgccagcttgtcctgcttgtgtgtccttgagcaagtctctgaacatatccaaggtctctgaacatatgtgaagtggggttggtgacctttcccacgcacagggtggttttggagaatccaagcaagatgatgaacgtataaaagctctttgtaaactatatagttacatgcccatatacgggtaagattgcattatgattctctttgacaaaaggacacattttaactcctgtgacttggtgcctaatttaagccatttgttgttctttctgcataataataataataacaaataaatgatgcatgtttcaaagtgaaagccctagctaacacactccccagaatgagattctttttncttggaagcaac

SEQ ID NO: 327458 - DNA, 760 bp, Homo Sapiens
tgaatactgagaccatggtatagataaaatattcataacagttaagatctgttggagtatagatgagttaaaatctgtagaatataaatcatatataaaacaaagtattcagactatgtatatgtaagggaatagcaaaagctctgagtcatgctagaaataagcttttattattcctcttgactatagtaagtctggtttctcaagtcagaaatgaaaatggactaaaaaacaggtgtgtgttggcatgactttgagaagagggcaatgaaataaatcaggcagacatcacgcttacttctttcttttagatttcatttccttctatcttgtaatgaaggcttttgttttttaaatgcatcctgaggcactggttctaccaccccacaaacagctgaattttaaacaactcctttaatatgaagttattttattttgaattggattttccagagtcgtgtttactgccttggataaacatggcctcagacatgtaataaataggtgagtaaaataaatgattttatttatttatgaggaaaagcacttgaaaatggctaattcttggtatatgcaaagtgggagggcttggaaggaaaggatatctattgaattgaggtattacattcttggtcctgagaactcttaaggcaaacaagcacaatgggtgttttatatgttttctaaaagtcagttttattaaaagtggtttttggctgccaatttcctatccagaatccatccatcttgctcttcctca

SEQ ID NO: 327459 - DNA, 863 bp, Homo Sapiens
tttcggcacagagttagcaattagagtacatttctgttttcctgtagccccaccaaaactggcattgtcatattaattttccttattttacaagttatttccatattttaaaggaagttgtgcttttttttcctgcatgggaatttgttgtattatatttagctaggttacattgcagtaacaagcaaaccccaagtctcagagacttaaactaacacaaatgtctttctcgcttgatctgtgtgtcccttgtaggatggctgggggtgcggttccacagagtccctcaggccagggctgattaaggagacagcactctctggggagctgccacttcgaggcctggctcagtgggacaacacagtagacaggagaggctgggggctttgtgtggacttttcactactgatgtggccaggactaccaacacagtctggcttagcaggtagaacttagtgagcattcctgtctctgcccagccatctcctcttctgtttgttcctctccagcaacttctttgtccagtggaattggatcctctgtcttcatatcagctcttaatgtattttaggtaaataagatttttatcaattgtgtctttttctttctttgctttcccatattgtattgtgcaaaagtttaacgtaagttttggacacattcatgttttcctctgataccttattatcacaaatttcttttctcaaagccagagaataagctgcttttctttgagttgcttaaaatggattttatttggctccttatgacacttgaaattcatcaaaatatataatgtcaggtggttttaatctaagttaattaggtccttggtgatgcctgttctgcaacattaaaacaaa

SEQ ID NO: 327460 - DNA, 488 bp, Homo Sapiens
  misc_feature (244)..(442): n is a, c, g, or t
tgataaatgagaaatggatatttcagttctttttctttctggcctatggtcattaacaggcttttgggacctttcagtagtattttcagaaaaatgaaaatttaaattcttagtaattacagtgagaaaactgtcatctggaggtaagacccctctccaaaggcttcacaaagttttggtgtattaaacctttccggattaaaaaattgtttaaaaggccagatgtggtggctcacacctgtannnnnnnnnnnnnnnnnnnnnnnnnnnnnnnnnnnnnnnnnnnnnnnnnnnnnnnnnnnnnnnnnnnnnnnnnnnnnnnnnnnnnnnnnnnnnnnnnnnnnnnnnnnnnnnnnnnnnnnnnnnnnnnnnnnnnnnnnnnnnnnnnnnnnnnnnnnnnnnnnnnnnnnnnnnnnnnnnnnnnnnnnnnnnnnnnnnnnnncctctgcactttagcctgagtgcagccgacgcaagaccctgtctcc

SEQ ID NO: 327461 - DNA, 779 bp, Homo Sapiens
aaagggagtgattttggctccagatgaagctggctttgaaccctaggcctgaccaattctgggtccctcagtctccaagcaggtgataatcaccaccttgtatgttaccacagttgtttgtgaggatctggtgaagggcaagtgtccaaacaggctgaaacaaggcagactgaggtccatgccagcgtggagatactgctggacactgctgtagcttccagctgatgaatgcatgcgtgcatgaatgcatacagacatgtgaaagagagagggcaggtggttccatcttatgccatctccaggtgattgaactgcctgccttgggatgctatgctcaggcaactttctgagccagaagtaagtgtgttgcaattcattagtcgtgtctcctgtggacttgggacagaagagtggcagaatatttgctattccagttagcaaatggaggtagggagttttttggtgtccttggggcttgtttttatatacagaagataattttgcatttacttcagttttcaaagttaatacagatggtccccgattacaatggttcagcttatgatttttctactttatgatggcacaaaagtgatacacattaagttgaaaccatactttgagtacctgtcacagccatgctgtttttcacttcaatatagtattcactaaatgacatgagatattcagcactttattataaaactggctttgtgttagatgatttgctccactataaagtaatgtaagtgtactaagcacatgtaaggtaggctaag

SEQ ID NO: 327462 - DNA, 670 bp, Homo Sapiens
  misc_feature (56)..(56): n is a, c, g, or t
  misc_feature (137)..(176): n is a, c, g, or t
ctcaattctaatcccagacagattgatttagtcagctttgaggcatagctgcagantgagggttctaccagccagggtttaggaagcacctgtgttaaccaggtcctctctccaggaccttgaactcagtgctttcnnnnnnnnnnnnnnnnnnnnnnnnnnnnnnnnnnnnnnnnggcaatgagcctttctgagtgggaagatcagggatgggacaggagatcacatacatcatgtggcaaatgacagcattatatcagtcagggtggctagcgtatgctgcagtaacaaagagccccgaatgcccacggtcttaacagtatatattcatttctcccccatgctgtgcatccagtggggttagcaggaaggtttttcttgctgtggccaccacgccccccgctgatggagtttgtattgcagcacgtgcttcctcactcaccatggcaagaaaaagcttctgccgggaagtactgcgtcacttcagctcactttgcatttgccacagaggccacgcagcctcccctgacttcaaagggggcagggtaggagagactggagtatttgaggacatgccccaatatgcccacaacagtggacgaggatggaaacattgcagctggtgtcatggtgggcagccttacagtcggccagacctgggtgggaatcc

SEQ ID NO: 327463 - DNA, 709 bp, Homo Sapiens
  misc_feature (523)..(537): n is a, c, g, or t
ctgtaacccactggttgtccctgacatagctgttctaatatgatagtaggagggtcaaacttcatgggcaaggaactacaggctgagactggcaagcaggaagctctgttgtggtgccagcagatccaggctgaaaggcaaggagccgcaggcagtaactgacaccaaaattttcctgggggatgagtaccacttggcatccccacaccatgccactggcagcacagagcaaataggaacggaggcacacccaaaaccctacttcctacagtgtccttccaacaccttctactgactaagctcatccataccagctggaaaaggagatctgacaaagcaatgaaggatggatgtggagctaaaatacaataaactgagaagcagcatagtctttaacaccattatccacaaaaagcaactagggttccttgaagaaatggtagatttcagggcaggagcagaataaattcaagatgagcactgaacatcttgttatgcctaaaaataacaagtgctgaaattnnnnnnnnnnnnnnntaggatgagaggaagttacaaggacacagaatccagcttaaaagggctcctactgatcaaagctgggacaatttgtgaatcaaaataattaaatgtattaatgcattctaaactactagaaaaaaaagatatgtgagtccagatcaattagggatagatggacagattcaat

SEQ ID NO: 327464 - DNA, 809 bp, Homo Sapiens
  misc_feature (712)..(712): n is a, c, g, or t
  misc_feature (716)..(716): n is a, c, g, or t
  misc_feature (787)..(787): n is a, c, g, or t
atatttatttgctaatatatttatccacaaatgtggtctggtcttgtggttttgttctgtcgtgactgtcactcagggtaacaacgtcatctctttctacatcaagagaagtaaattatttatgttatcagaggctaggctccgattcatgaaaggatagggtagagtagagggcttggcaataagaactggtttgtaagcccctaaaagtgtggcttagtgagatcagggaaggagaaagcatgactggattcttaactgtgcttcagtccattattattatactgttcacttcacacattatcatacttcagtgactcagaccttgggcaaatactctgtgcctcgctttttcagtccataaaatgggcctacttaatagttgttgcaggacttacatgagataatagagtgtagaaaatatgttccaaagtggaaagttttattcagtgatagaaaacatccaaacctgtcacagagcccatctgaacacagcatgggaccgccaacaagaagaaagcccgcccggaagcagctcaatcaggaggctgggctggaatgacagcgcagcggggcctgaaactatttatatcccaaagctcctctcagataaacacaaatgactgcgttctgcctgcactcgggctattgcaaggacagagagctggtgctccattggcgtgaagtctccaggggccagaaggggcctttntcgnttcctcacaaggcacaagttccccttctgcttccccgagaaaggtttgggtagggggtgggtggtttagtnccttatagaacaaggcatttcg

SEQ ID NO: 327465 - DNA, 373 bp, Homo Sapiens
  misc_feature (203)..(203): n is a, c, g, or t
  misc_feature (237)..(237): n is a, c, g, or t
tttatgttaagaaatatatttatttgctaatatatttatccacaaatgtggtctggtcttgtggttttgttctgtcgtgactgtcactcagggtaacaacgtcatctctttctacatcaagagaagtaaattatttatgttatcagaggctaggctccgattcatgaaaggatagggtagagtagagggcttggcaataaganctggtttgtaagcccctaaaagtgtgggcttagntgagatcagggaaggagaaagcatgactgggattcttactgtggcttcaggtcattatgtattatactggttcacttcacacattatccatacttcaggtggactcagacctggggcaaatactctgtggcctcgc

SEQ ID NO: 327466 - DNA, 467 bp, Homo Sapiens
  misc_feature (340)..(401): n is a, c, g, or t
caggcactatgttaagaaatatatttatttgctaatatatttatccacaaatgtgttctggtcttgtggttttgttctgtcgtgactgtcactcagggtaacaacgtcatctctttctacatcaagagaagtaaattatttatgttatcagaggctaggctccgattcatgaaaggatagggtagagtagagggcttggcaataagaactggtttgtaagcccctaaaagtgtggcttagtgagatcagggaaggagaaagcatgactggattcttactgtgcttcagtcattattattatactgttcacttcacacattatcatacttcagtgactcannnnnnnnnnnnnnnnnnnnnnnnnnnnnnnnnnnnnnnnnnnnnnnnnnnnnnnnnnnnnntgttgcaggacttacatgagataatagagtgtagaaaatatgttccaaagtggaaagttttattca

SEQ ID NO: 327467 - DNA, 919 bp, Homo Sapiens
acaaaagaaaacattttattgcaatttgattaacaaggagacaggagcccagctcaaatctgtcccattgtacttattttaaagagttattttagtagaaaaggtgtagggagtggattctgtgattagtaggtgattgacagaaagaaaaggaagggctggaaaatcctcgggcatgggcagttacctcttcatgcctcctcatgggtcccatgtgcaaactcagagggagttagtatgaaacatgcggtacaaatttaggctgtgtgtcagcaagctcattctgtacaaactctgggttttatctctttatcttgacacctgaagggtgtggcataatcccatcactccccaaaatatggccctacatgcagaatttaaattcatcctgcctccttgactctgagggccacttcctaccacagctagggtcccttttctgtcagcattctttctggagcttgcttatatcaaacctaagaaaagcaactccaggactccagacaaaacagatctccacccatctggcggccagaaagggaagctctgggcaaagagggagagagaatcaacctcactcactctggatgggcctcctgtgtgttcacagaggacagagcagagtcccccagctcatcctcaatatcagcgtccccagactggcttaggtcctgctagaagaacccaggattttgcctggcagaaagacacaagacctttgccaggatcagcctggtctctcaccaattcatgtcaggtgaagacttatagtggagctgtttaaatccttagaaaaatgattttaaatgccttgaagtccaaatgactttggagtgctaaaatttcataagtttccatgcctagcacatagaaaagggaagctggggtttcatgggcatgtttgtctaataccttccat

SEQ ID NO: 327468 - DNA, 776 bp, Homo Sapiens
  misc_feature (715)..(715): n is a, c, g, or t
agaaacatccttagcagtgtgagtgtgcacagttcctcagctttaaagttttcttttgagaatgaatgctgcttaggtgactgtggagggcagttcatgaacgactctggatgctgtggctccagtttgtacgtacttctaaacccttgaaaatggttttttccttagaaataaaatttatgtaaaaagttatttctgaaattctattttttctctatgtatatatttacaggcaaaataaagtcaagtcacttctcacggagtcctgagctgcaccgtgctccgcagggctctttgtctgagggccaccccccactccacaccaggggtgcctagactagggggaggcctgctctttggtcctgtgacttgttgcccatactgggtgcttcctccatggagggtctgcaaagtcacgtgcaatggaaagttgccctgcagatgctatagccaccagtctccacctcttcatggaaagagacttgggctatgcattgtcacttgatctttgtgattagtcacattcctgtgttatcactgagtgggcgtggatgagcctgatgctttacgttttattcatttcccttccccctgccctttacaaacacggaaaccttgtgcagagggtttctgatgggcggaagaaactcggctcaacatttactcgctacgtgcagcatggctctgctgtaaagtgaaaggtgattgttgctgnttgttttggaagcccactcttgagatctgagcgatttctattatgctttctggatggtcac

SEQ ID NO: 327469 - DNA, 803 bp, Homo Sapiens
  misc_feature (541)..(721): n is a, c, g, or t
  misc_feature (792)..(792): n is a, c, g, or t
atttatttatttatttattttagtcttacatgtcaaaagaattaacaggattgtagcaggtgtttagtaagtagaggttaaaccattctatttcaggaactagcatttaggaagcatagcacttactgtgcaacaagagccctctggccatccctgttttacaggtcttagagaatggagggcagctaggaaggagccaaatgggactcctctcagatctgctggaaggcagagccctgctccccggcacagaccacactgccttcctccctggagtgtgcagttggaagcaccagatgctctagcagcattcagagagatgccatctgtgagggaaacctattcttagagagcagagacagtcggtagcggagttggccaacccccagcagcagtggcgggacttcaggagggcaggcggccaaggtttcaccttcagctgggggcaggacaggctaaaagcagggtgtgctcagtcctcaggggcacacttcctctacatttggatgctcttagaaataacagcatttattggggactnnnnnnnnnnnnnnnnnnnnnnnnnnnnnnnnnnnnnnnnnnnnnnnnnnnnnnnnnnnnnnnnnnnnnnnnnnnnnnnnnnnnnnnnnnnnnnnnnnnnnnnnnnnnnnnnnnnnnnnnnnnnnnnnnnnnnnnnnnnnnnnnnnnnnnnnnnnnnnnnnnnnnnnnnnnnnnnnnnnnnccatgctatattgcctctcaacctgctgtacagaggccagttttagtttgggttcccccaatagcagactnctaagacaagg

SEQ ID NO: 327470 - DNA, 614 bp, Homo Sapiens
  misc_feature (351)..(351): n is a, c, g, or t
  misc_feature (385)..(385): n is a, c, g, or t
  misc_feature (416)..(416): n is a, c, g, or t
acccatcaaatacccaggtaaaataatctcacagaaatatgtgtaagattgttacacagagaatcataaacattgctgagagaaattaaagaagacctaagtcaatagagggacataccatgtttatagattagagactaaatattgtaaagaggaagattcctcctaaattgatctatatatttaaatctaattctgataaaaatcctgcataaaattttgtggaaattaaaaagttgttttttaaaatgtatatgggagatgcaaaggagcaaggatagttcaaacaatcttgaagaaaaaaataagaattgggagacttatactctcagatatcaagatttattgtanggacagaataattatgatagtaggcaaggatgcnaggatgtaggtataaacaattataacagagnccagaaacaaatctaaattgatacttgacctcatgataaatatattagtcagctcaggctgacataaaataccatagactgggtagcttaaacaaccaaaatttattttctcacagttctgaagactggaaatcaagatcagagtgccagcagggtcaatgtctggtgaagtctctctccttggagtgtagatcactg

SEQ ID NO: 327471 - DNA, 351 bp, Homo Sapiens
  misc_feature (196)..(196): n is a, c, g, or t
  misc_feature (214)..(214): n is a, c, g, or t
tcacccataaatggataattaagatttggttattatagacacttaatacttaggtagctaaggtagttttaccaataaattatattaatttaatatttcagtattggcaaaactggatggcatacttcattttacaattttggacatggattggttctgttttgttttatttaaatttggaactttaaagttctcntgcaggaggagatttgtnttaataaattccctgggcctctccaaattaatattttagccatagactcatatttagagcagtgtttctaatgtaatgatacaaggcccagggttattcatagtttcaccgtttctcttattcctcattaaagcatg

SEQ ID NO: 327472 - DNA, 775 bp, Homo Sapiens
  misc_feature (46)..(46): n is a, c, g, or t
  misc_feature (407)..(407): n is a, c, g, or t
  misc_feature (503)..(503): n is a, c, g, or t
  misc_feature (750)..(750): n is a, c, g, or t
  misc_feature (753)..(753): n is a, c, g, or t
gttgttacaataagctaggtcttcagtacccacaaaagtagtcaanctctgcttccttgcacctgagttgagaggttaggactctaagaaaagcaggtgcaagcaggcagaacaagtcaagattctctataactgaatactacacttcttaaaaaataatcagactctatatggtaaccagaaagatttaacctaaaattaacagtaagaaaataatcagacaaatcaagaatgaggaacatttcaaaataactggtctagactccagaaatgtcaagatagattatttttatttttaaagggagggcatgggaactgttttagattaaagaaagatgaagaaacagaacaactaaatgtaacatatgaacttttattagatgctggatcaaagaaaattagaaaantccagttatttggggggacaactgaggaaatttgaaatatgggttaatataattaagaatggcactgaatccaaagtcaaatttccttgggtgtgnataagtagttttggagttatgtcccctattcctcagacgatatatactaaaagtatttaaggctgaatggttccaccaaaaacaaaaattatgtggcacggggctgaagggggcaagagagaacacataaattgaaatttaaaatataacaaataattacatagcagagcactgataccacacataaagagaatctctatacacccattatttagaaatgtttcatgaattctatttttactgtgtnctnctcgtgccgctcgtgccgaatt

SEQ ID NO: 327473 - DNA, 746 bp, Homo Sapiens
ttaccttcaaacagtttaatttacccagttaatcacaaaagattaaaaaattgctaaatcagaaattctctacctgtaactgatgttttcattgatgatgaatattagaaacattaactatatcacatactccctgaggacatagagtggtgacttgcaaatgttttggtttggaattgtggcaccttattgttgtccctaaatggtttacatattgcacacatttttaatttaaaaacaagaaacaaaacaaccactttaatttcacggcaagcccttttgtgataactggcaggacatgagtgtcataggagccagacccctggacttgctgccagtaaaatggaatgtgtctttaaaatttttggcaaacaaatttagttcttaactcttctctgggcttactaaattgtgggatgccttcgtacttcagtttgcggtacttgagctttagaagcgtgcctgaatggtgctcaagacactgctgtgggcctctgctgacaatgcaagctctcacaaaactgaacgtttggcccatttaccataaagaagcaaacagtccccatcctaaggacaggcctagcctaaggttaacagtaagagcaacattttgttgcttcattttcctattaagctctgggttgctgattgaagcagaattccaatgttttgacacaccaccacattgttagcacgatagggaggatttgattatgggagaacaagtccaaaaacggtaaattgac

SEQ ID NO: 327474 - DNA, 468 bp, Homo Sapiens
  misc_feature (268)..(268): n is a, c, g, or t
gtttttggacttgttctcccataatcaaatcctccctatcgtgctaacaatgtggtggtgtgtcaaaacattggaattctgcttcaatcagcaacccagagcttaataggaaaatgaagcaacaaaatgttgctcttactgttaaccttaggctaggcctgtccttaggatggggactgtttgcttctttatggtaaatgggccaaacgttcagttttgtgagagcttgcattgtcagcagaggcccacagcagtgtcttgagcaccnattcaggcacgcttctaaagctcaaggtacccggcaaactgaaggtacggagggcatccccaccaatttaggtaaggcccaggaggaggagtttagggccttaaatttgttttggccaaaaatttttaaagggcaccttcattttactgggcagccagtcagggggtcttggctctttgggcactcctgtctgcagtttt

SEQ ID NO: 327475 - DNA, 711 bp, Homo Sapiens
aatttttcaaatattgacctgccttacacaatatggaagactgatgcaaggatttctgaggaggagttatgtagatgggcctctttagatccagagtgaagatattagtgtcttgtatgaaagttcaccaaagggcattcatggtagacaaggcttccatgtgtcatctcgtgtaagaagaattgtaggtgttttaaccacgtccccagctagggtctcattgccagacgtgagtgagccttctgatgattaatagctcccagtctttgagccctcccagctgatgcagaatgggacagagatgagctgtcccctccagctcctaccctaatggcagacttgtgagtcagataaataatgttccaagctactaagttttggagtggtttgctatgtagtagtgggtgacctgaacacttggctacttgccattgcgattgccaaatctgccattccctgatatggtgtatttcctgaggttacaagccagccacttggtgacaggttaattacgttggaccccttccatcatcaaagggatgccagtttttcctcactggaatagacatgcattctggatatctggatttattaatataatattaatactttccctgtctaatgcttttgctaacacaatcatccgtgaacccagaaacctttattcatggtattccgtgtaacattgcttctggcatacactatcagcct

SEQ ID NO: 327476 - DNA, 461 bp, Homo Sapiens
  misc_feature (14)..(14): n is a, c, g, or t
  misc_feature (29)..(29): n is a, c, g, or t
gttaaatctcctgnctgtcttcccctcanccctccccgggaacacacccaatatggccaggggtaagcagcccagttaacaaaagttttgcctgaacacttgaaggtcctacccccagttgggtccattggatgttaactaccttctttaatttgcctcaagagttcttagaggagcaattgtatcccatgcctcagaattactaagggatataaatagagggcagtctgagcactagccctaatgtctgcagaaagtacagagctgtcccacatgacacagctggctgacatccacttgactaagcagccccaatatctctccttgggtgacacactggcctcaccattctagcaactgcaacaggatggggttccttggggagggtgggaaaggctctgataatacttgcagtcagagctgtgtcttcttctggtacctttggtattttaccctaaatg

SEQ ID NO: 327477 - DNA, 766 bp, Homo Sapiens
catgttgatagacactttattgtggcttgtttgtagtaaaacattcaacccctcaacatgggtatctgttttggtggtgtttttctgttggagactacagcgtggtgttcaaaggcttttagctcatctcatatcagtctagtcagtggttgcctataatttgatagttcaatgagttagaggaaaatgtcaggaaaatctggtcttatcccaaattaagggctgcaagatttgtgacccattagtataaagtgcttatgttcagtgcaaaaaaggcagactcagaagggcaagcagacgccagagaaggacatttcctgggagatggatacgttctatgactcaaggaaggaaaagccaaactttagcccaaatgggtctagtagtttcattacagtctttctcctctctaacaggaccaaaacttctcatctgacagatgtccatgagttgtttattttactactaaaaatcttggttcagagggaaatccacagggtttctgagcaccagagacactgacttcagcttccagtttctgtttgtctcagcatcatggatgggaccaataggctgagctctggccagtgagaggttcagagctgcagagctttctttaggccccacatttgcaaattgaagtcactgagtatgacacaccttttctcaaacattgtcacatcttgcgtgggaagacaagacagtgcatattaaagaagcacttcacctagttttccaccaaccagatgtgacctattcattattc

SEQ ID NO: 327478 - DNA, 406 bp, Homo Sapiens
ttttttatcataaaaacctttttatatcagctcacccacacctccctccgttcctccctgccctttctcgccctggtgatcatcagggatgctggagtctggcccccgcccacgccaccagagctgaagccgacattcaaggtggacgtggcgcgtggagagcaagggaaggcccagctcctctccttcgtccccactctctgtgggctcaggaaacacacgctgaccggaggcagtggccaggagaggcaggctagggtgcaggctcacgccattggtgcagtccttctggggcagaaaactcaacacgggctccggcttcccatcattgacaggcccgtccgtgtcccacacagagacagcccccgctcgtgctgccactcactaggaactgcccggtcctgcg

SEQ ID NO: 327479 - DNA, 737 bp, Homo Sapiens
  misc_feature (38)..(38): n is a, c, g, or t
  misc_feature (296)..(346): n is a, c, g, or t
  misc_feature (663)..(675): n is a, c, g, or t
gaatagatttctggaaataaatacttattggaagactncattataaatgagaataatctggccgaatgaatggatactctccaactctcacctcttcacctacttcccaatccatcatcagtaaatgtgatcaattctgcagtctaggaaaattaaaattattttatatggggatacagcagttagatgtgttgtgatctactctccgtggcatctattggatataaaggcatctggtcttgctcaaatgttcaatcttcttgaccacagtcattttccaccatggcggtgggtgnnnnnnnnnnnnnnnnnnnnnnnnnnnnnnnnnnnnnnnnnnnnnnnnnnntccatttttagttcatgatactcattttctagcaaaaagggagctccaaataaatccctacaggatttacttggctttcctgttaaagatggtttataattgttatgtgaactcctgcccaccatggagaatgagaggaaataaagcattttacctactccttcttttcctgcaaatgctgaaaagggaaagggttgggagccagttattttttccccaggataactgagttgttaacatctgaccagagtcttgctttagccctaaaaccggcccatctttaacagctgtaaatgaacccttccgtatttttcagnnnnnnnnnnnnnttgcgccttattctcatgtagatcctgaaatcaccctcttcaagctggacttgcagtgatta

SEQ ID NO: 327480 - DNA, 540 bp, Homo Sapiens
cttaccacttactgttgattttgctgtcagcacagatcttgtatctcatccctgctgctactctagtccagaccatcctcatctcatacctggattattacagttctctactcactggtccctctgcttttcgttgcaccttctattccatgcactagcaggcagctaggagtaatgaacgtgtcagagcctgacctggcttataagcgttcccactccgtgttcaaagagggacagacttggtgccatggtttacacatccacctctgtgatttgccccctgccagcttcatctacctgaaagaaagaagctgagacaaaattgatttaagtagagagttcaggtgggccaggcttgaggctggcagcctaggggcatagactcaagttgccttgaatcttcacttcaattggcagccattacaggtagatttttaaaggtgaaaagggagacagggagtgggactgatacaaagtggtttgtcaggaattctttttggcttacaaaaataactgattagggattggttgtacattgtg

SEQ ID NO: 327481 - DNA, 555 bp, Homo Sapiens
  misc_feature (155)..(283): n is a, c, g, or t
agacatttttataatatatctgaaaatctggaaaaagtctgtgatttttaataagttgacgacatcagaattaactggaggtgtaaaatcttaatagacctccctccagaataaacttatttaaaaaaataagactggccaggccatgtgtgtcnnnnnnnnnnnnnnnnnnnnnnnnnnnnnnnnnnnnnnnnnnnnnnnnnnnnnnnnnnnnnnnnnnnnnnnnnnnnnnnnnnnnnnnnnnnnnnnnnnnnnnnnnnnnnnnnnnnnnnnnnnnnnnnnnccactgcacactccagactgggtgacagagcgagactctgtcttacaaaataaaaaataaacggttaccaatctgaaaccctgaaaatatgatgagtagtagaaagcacagctgtcaaaaaagcaggaagagattataaaattttttctaatatttccccccaaaatgcagaaaacatactggcaacattatttgaccagaagaagcagtacaataggataaccatcaaatatctgattattaattcaatattccctcttaattaagcggcc

SEQ ID NO: 327482 - DNA, 713 bp, Homo Sapiens
agatacactctcctttttttctgtgggagtagtaactgttttctcaggttgagaattcatgttctcagcattactgtccttctctgtatttcttggcttggcagcttcattgctgggctctgggctgggcctgtctgtctcttccacaggctcttttggtgccacttttttgtcttcagctgttttgctatttaaatgaacagctgaggaggaatttttggagtccttggcttttttgtgcatagaagtttgactgttatgactggaggcgagaggggaagacattttctgggctttgcttccctccgactgttcttttcgaggcggtccccagataaagttctctgaaggcgtgtagtgtttctgggcgaaccgcaggagctttctcctttctcttctgtctctaattgtataaacaaaatactcctagagcactctgccttaatattgggaatagtattcctcccacaagagcttcatgaagaataaattttacaagaggagatttaaaactttcatatcccaagctcaccaaggcttttaagaatacgagtgattcttaaatagttgtgctgggactcattcagatgctgaaatctttcctgccagttaacagcccgagcaacatttccagttttatcagtcagttttattccaaaaaattctagcatcatttttataagcccagggagggaatcttctaattgcttctt

SEQ ID NO: 327483 - DNA, 650 bp, Homo Sapiens
  misc_feature (430)..(430): n is a, c, g, or t
  misc_feature (547)..(558): n is a, c, g, or t
tgaccttctcttatcttcctttcacttgcccaaggcaggactctaatctaattgtaagtctaaagacttttattccagagagttcctgccccatactctggaggaaggaatgctgtacagagaggccaagaaaaatctgaactgaagggtgttggttgatttagatcataccctttttgtccagtcacatttctacatggttgtcaatcttgcctacactatgaagtcttcataaaaggcccaagaggactgggtctccagagagcttctgggatagctgagcatgtggaggtttagggagagtggtgtgcccagggagggcatggaagcaccacgccccttcccccatatctcaccttacacatctcttcatctgtgtgctttgtaatgtcctttacaataaaccgttaaacgttaaagtaggtgtttnccttgagttctgtgagccactccagcaaattaattgaaaccgtgggatcccaacttgaaaccagtctatcagaagttcttggaggtccagatctgtgactggtgtctgaaggggtcnnnnnnnnnnnncagtcttggggactgagccctcaacctgtgggatctgactccatctccaggtagttgtgtagatagtaggaaaatctcctcctcccacgttt

SEQ ID NO: 327484 - DNA, 403 bp, Homo Sapiens
  misc_feature (36)..(36): n is a, c, g, or t
ataatgacccttaataatccttttcctttggtagangacacttttgcctaccattggccccggcctggatcccccgacctccatgggcctcaaatgatcctaccctgccctcagccctcccctaagtgcctgagattgcaagccatgagtccctacaccctgctgatccttatattcatattgttgtaaaacaaccttttgtgaatcagttataaaaagcaacataattaaatggttaattatgtacttataataaatagcaaatatgtacttatggcttggaataaaatttctggtaagcagcacatacaaaattaaaaataattatctctcaatttggacagaacagaagataatatactctggaaatatgtgtaagaaggctcaaaaaaatgggaccggt

SEQ ID NO: 327485 - DNA, 465 bp, Homo Sapiens
  misc_feature (326)..(326): n is a, c, g, or t
  misc_feature (351)..(351): n is a, c, g, or t
  misc_feature (418)..(418): n is a, c, g, or t
  misc_feature (434)..(434): n is a, c, g, or t
  misc_feature (439)..(439): n is a, c, g, or t
agcttcaataccctgtattattgtttaggcatgtgagagctgttcattgtgtggcttgatggaaataaaagtctctaccatcacttatgttgaatgtttgttttccttatatcactcaggcccctctaccacaaaggtggattctatcaactcattaagtggtttttgataatattttctaggtcattgttaatatgttgtaaatcagtagaaaaggagacatataaatttaatcaagattttgtaattattccaaggaatatgaccttatattcttttctttgtagagacacttttgctacattgcccagggtgatctccgactncatggggcttcaaatggatctaccnggcctcaggcctccctaagtggtggaggttgccaagcatgagtccctacaccctgctggtcctatantcctattgttgtaaancaccntttgtgaatccggtattaaaaaggcg

SEQ ID NO: 327486 - DNA, 884 bp, Homo Sapiens
  misc_feature (22)..(22): n is a, c, g, or t
  misc_feature (67)..(67): n is a, c, g, or t
gggttctcagaatgttcaaagnatccacctcacaccccgcgcagaaatcctccctttgcagccaggnttatgactttacagagggaaaaagatatggcagctactagtggccagtgtacaggccccagaagatggcagaagttgttctaatgcttgttgaggatattgtaaggtcaaagaagcaacgccaacaatcccaccgttgtcacacccctgctgcagccccctttaggacaccatagaaattctacacagtaacacgggggatgacaagaggccacatactccatgctggggcattaaagtggggcacgacaatttttcactccttgggtctgaggtaaggcgagctttgtgggccttcaaatcattatgtttgtatgtttgggaggccacgccatctatcctcccacccagggcaggaatttctgctcccacttttgctttcctggaggtgaaataggaagaacaaggacccatgctcaagtccccaaagaatggcaggatgccctcagtggaggcaagactgtatttaaatgcaattcacctctttggggtcctaggaaaagccacccgtaggttcatttgctgggaaacacggtctgcgtgcctgaggcagtggacaccagggttgtggccttgccaagagctgactttctccggaggtctgtctgctgtccggagtggcagccacttcggtgggcaaataggacggtcatctctgggcccaaggacgctgcttcaggctgggacgccttgagggtggctggctgttcaggctttccggaggtgggatgggaggtgtaatgtttggtgggaggagggctgtaattctgaaatctcacggttttgacttgcttttcgatgccatttcttgagttttc

SEQ ID NO: 327487 - DNA, 734 bp, Homo Sapiens
  misc_feature (692)..(692): n is a, c, g, or t
  misc_feature (695)..(695): n is a, c, g, or t
atcttttagtttactaacttgacttaagaagtcctgatcattttttgatgttcatgcataccgtatagatcctacctcatttgactcctacaaaatatttgttaagggtgttctaaaagttactttttgtagttaaactacactttatttacatttgtttgttatggaaataatgcataataatcgttaaaaatccaaacaaaaggggggaacatattaaaagaaaagtaagggtctccctgctactctacctacctacccacctaccttatctgttaccatatcctaggacccaactggcaattaacaatttctggttttagtttttctgggttcttttcattataaccttaaatactgtacatatacatcttgactcaccagctgaaaatccttcaaagggacaaaaacttattcttaactcctaatttaaaaaattgtattacttttagttttgctagaagctttcatgactttaggttgtttacctaaatcattatttataaattttacacactgtatattggctccctactaggagaggtgaggaattggtacattcttactttctcgtcttttctcctccccctcctaattttgttagtttcattctcatttttagtctgtcaagaatttgcattctttttgtaaataaaattacagacatcccttggtatccatggggggattgnttncaggacctctcgtatacaccaaaatccacatacactcaa

SEQ ID NO: 327488 - DNA, 667 bp, Homo Sapiens
  misc_feature (104)..(104): n is a, c, g, or t
  misc_feature (479)..(479): n is a, c, g, or t
atctgcagtaatatatttttatttgcttatttgtgtgttgttttgttcccccaccaacttgtgctgcatgagagcagagattatattcaacctgttttccaagnaatctccagcacattgcaagtgcaaggttcacaatgagtgttgaatagatatttggtcattgaatgaatttaatatcttaattctctatgagttattaaattgaaggggtgaataggtttagaacaatcattccctatagttcttttgtagtttttcacaactatgagtaattcacaaatgcagataaccttgtaattccttcttactttcttgttcatcaggagattcttgtagtagaagaggcttcataagccttcctagataaatgtatgcaaaaatggatattccaaggagccatacagatttgtccttgacttttttggaactccatatcaatgttgaaactttttagaagtttacaactttgggaactntactctagagggatttttggaataacaaggttagcctacgtgtactgggctattaccgggctcattgggagactaggcagattccataaggaagaaagcatgcccaggagaagacaatgaggagtggtgggtagcctggtgagcgaccaacacaagtgttgtcatgcagaaatgcaggatcaattttt

SEQ ID NO: 327489 - DNA, 924 bp, Homo Sapiens
  misc_feature (764)..(764): n is a, c, g, or t
  misc_feature (774)..(774): n is a, c, g, or t
  misc_feature (800)..(800): n is a, c, g, or t
  misc_feature (808)..(808): n is a, c, g, or t
  misc_feature (838)..(839): n is a, c, g, or t
  misc_feature (869)..(869): n is a, c, g, or t
  misc_feature (877)..(877): n is a, c, g, or t
agcattttcagattgagtaatttgatgaataaagaagaagagagaagtgagggggacagggaagccctaagagataatgtcataaccacccccaacacatacagacccccagggctaagtgagggggagctcttactgaactcacaggtagaaagagctgccaggagggctagtggcaggggctgtgtagcagatactgcgagggcctgcccacagccctggctttgaccatttcggcacaccagcctgacttccagctgcaaagacttgcatttctttgcctcagggctttctctagcagcggagctggctttgctcacctacagagcaggccaactgtgctgggaatgaataccaccacaggaacaagactcagccagtgaccggtgggtgctggaacataaatacccctgctccctcaccctggaacataaataccccagctccctcaccctggaacataaataccccagctccctcaccctggaacataaataccccagctctctcaccctggaacataaataccccagctgtctcaccctggaacataaatacgccagctccctcaccctggaacataaataccccagctccctcaccctggaacataaatatcccagctccctcacccctggaacataaataccccagctccctcaccctggaacataaataccccagctccctcaccctggaacataaataccccagctctctcacccttggggtttgatagctttgaggtgcgggttctagactgnatccggaaanctgtgcagcagggttaagctctggtncccacagnggtaattacttgacccagtgagcccctgannggcttctcccctactctgtttcaacctctnactcagtncctggcatttccttggatcatttcccaaataaactacttgcttgaat

SEQ ID NO: 327490 - DNA, 572 bp, Homo Sapiens
  misc_feature (28)..(28): n is a, c, g, or t
  misc_feature (43)..(43): n is a, c, g, or t
  misc_feature (83)..(83): n is a, c, g, or t
  misc_feature (118)..(118): n is a, c, g, or t
  misc_feature (164)..(164): n is a, c, g, or t
taacacaccaagcaatgagaaaaaccgnaaaggcacccggccncagcctcatgaaaatccctttaggtatcaaactcccaaanattacaggaatgaaacatttttgaaaataggaacnggactaaatagactttcttaagtggaaaatctctcgtctttttttncccctggtactttgaaaaacttaaaataaacatcgtttcccagtatttgcatggtttatttaactaactacctgtttggaggaaatgtcatattgtctcagaacaatggaagctctgctcacaagagagcaaggagagggggtggttttcagtagtcagttgggatagacccagtttggctcacattttttgcatctctgagttcagatgaaaaggatagtgagtggcactgcagaaaacccaagaaaactggaaatagaaaatggcaattttgaaactaaagcaattaaactagtgccccatttgaacatgctcagtgacttggcttagaactgttagtcaagaagaatgtattaaatgctgtatttgtaaagacgtcttccctagttgatagattctctgcccttc

SEQ ID NO: 327491 - DNA, 658 bp, Homo Sapiens
ccaaaccacatcactccttcaatttttttctggtagatagtgaaggtcagcacctgtgggaaaggatgaaaaatgggtctgaagaagcaaatggaagaactcagcagagcaggagatgtgaatgctcacagagatacagctagagaccagcatgaatggtggaagtctcttggtagagtcttgcaagttgggaagagaaatcacacatgttccgcccctgagcagtgtccccttgattgcagcaccgtattagattgctgcaggagtgtgggtgtgtgtgaaagagcttgcagaacaccccctaacattcctggccatggtgagggtgcccacgatgcccacccatccaaacgtttcctttgtggagagacaaacttaaatagctcctctcttctcattcttacctccaatctcagcagccaagtacgtgttaaagagggagggaatactggagcctcagcaaataatgatacaagtagaactcttgcttttcacatgagaactcaccctggtaggcctccaatgctccatttcacaccttgctgtcatccatctagaacttgccttctcttggcttgtcctggcacaccaggtacctgccattactctttaattggtctgcttttccttccttattcttccttctgatttcctaatt

SEQ ID NO: 327492 - DNA, 733 bp, Homo Sapiens
  misc_feature (332)..(332): n is a, c, g, or t
acaatttttaaatactgagcacaatttttaaatactgacatcacttcctcttccccctcccaccccagctcagcagcctcaaatctacagagaagaagaattatggcatgaacattcccacagacccaccatctttaagacttgacctctgtaagtttaccaaagggctcctcacaattgtggtgggggttctggttcaaaatttggagcaaacatgaagtttttggaaacgttttctcatttgaagcctccagtatgctgtactattctggaaattaccttcaagagtctcacttcttgtttctgttgtgttttctgtgggcatcatgttncttcacgctttgcagtagaagggtgcttttttcgggtttcccagagtatccaacggcttcaccttttctcaagtgctgggcagtagctatggcactcacgggctggtttggggttcgctggtgcagcagcgcaaatctgttgccttctgaatttttctcacctaatgtgacactggctacaatgaatcttctcttcatcgggctgaatgaaagattcaagaaccatcttcaaggtgcatggtgggaattatcaacctcagggatactcattttaactcaggcgtgtcctgctttgtaacattccattgttgggagagggcaggacaggtgtgttcttctgtgggcaggagtcatgtcactgtcctacatatgtaagagttgggaaggtgacgatttttgac

SEQ ID NO: 327493 - DNA, 728 bp, Homo Sapiens
  misc_feature (426)..(426): n is a, c, g, or t
ataaaagaccaaatctccctatatagaatgatatagaaaaaaatatgcataggtatgtgtatgtatatgtgcttatacaggcacataaaataaaaagatcaatttggacaaatgtataaaaatggacacagaatatgatcagaaaattcacagaaaaagaaatacaaacgaacattcaacatatgaaaagatgtttaccctcacacaaaagaagcaaaaacaatttttcactcatcagattagcaaaactccaaaaatttgataatttactgttcccagcaaggttatggtgaaacaggcactcttattcattgctggcggtagtgcaaattggtacaccagcaattaagtaatgtctttcaaaatcacaattacaagcttgggtgtgctggcacacacctgtaatccctgggtaccttgagaggnctaagaccaggaggacttacttgaggcccagggagttcaaggctgtggtgagctataatagcatctgtaaatagccactgcactcaagtctgggcaacacagtgaaacttcatctcttaaaaaaaattacaattgcataaactattaacctagcaattccacttctggatagcaatcctacagatacacttatcatcatataagatgacgtatgtatagtgttatgcactacagcactgcttgtaatagaaaagttaggaaattacccagatgtccatcaatgggactgatttaaattatag

SEQ ID NO: 327494 - DNA, 494 bp, Homo Sapiens
  misc_feature (264)..(264): n is a, c, g, or t
  misc_feature (423)..(423): n is a, c, g, or t
  misc_feature (428)..(428): n is a, c, g, or t
  misc_feature (462)..(462): n is a, c, g, or t
  misc_feature (476)..(476): n is a, c, g, or t
ctgaacagtttttctgagttaatctcctttcattttgtttgtttattcccacctattttaaacttggtgccctgtcttggttactaagagacatgttggtcatcatcatgtctcttagtaaccaagacatccagcattttaaatactaagaaagaacttttcaggtcatttacttttgagtccagacagcttttaaatttttccattttgaaaaagtatttacatctaggaatttagggctgcaggaccaagaagctttgttgnattcagtctgtaaggggaaatggggttcctttggaggctgagggcagttttctcctctctttgggagggagggaccttcttcaaaaacaaaacttttccaccactgttcagttaccagggagggaccgggggtccagtttgttgtgtttggggaagttnacttngaggacccagtttcccctttccccgaggccaccntaggggttttttgnttttgggggggtgaaggg

SEQ ID NO: 327495 - DNA, 237 bp, Homo Sapiens
cccttcatttatttttcacttaaaatcttcacttctcagattacataaaaacctgccattgtcattgtctaattctcactgtctctcttgctttcctggtcatctgcatggactgatgacatgactgaattatatttcaaataggatgtggatacaatttatcttacccaagacaccagggaattgaatttacaagattttagtcatcttgaccacaggtaagctgcttccttcctt

SEQ ID NO: 327496 - DNA, 707 bp, Homo Sapiens
acacacctataatatactctataatatattactaataattaacatagcatattatccagggggcacccattgatacacagaagagagcatggtctcaaggggccaggccaccaggaaggtactggcagttgggcagtggatatggaggggagatattaggagactccataagaagaaggctagactgtgagcagaaattgtacctgatacactttttaagaaaaggaaatcatttctaatccacagggtaggtgctgtttttacccttaatatacaaaacttgggagcagagaggtgaataattcccccagggtcatataggtggtaaggggcagtgccagactaacccgaggtctctgcagagtccaaccacctgttacactttttaaagccagacattcagaaatggtcacgtgtctttgtgaagaagaattagcagaagctaaatcccctcccgaagctgctttttcaggagatatcaaaaagcctaccaaggcaaatgacagttttgctccctgagtctgggtacagagtcagagaaaaaggaactatgagagcctttaccaatcactgagtctaacctgcattttagataagggacggaggtcatgaggggttgaaccatttatcaagatcacagagctggaccttaggctttatcaccagtccatttggtccagtcagagacttctatgctgccatggtta

SEQ ID NO: 327497 - DNA, 931 bp, Homo Sapiens
  misc_feature (425)..(479): n is a, c, g, or t
  misc_feature (497)..(505): n is a, c, g, or t
  misc_feature (622)..(642): n is a, c, g, or t
aaaattagatacttttattcccacacagtttgcctggtatgtttacttaccattgtttccacagtaccatgtttttcagactcacttgtattcgcttcatttgtctccccaatacaaggtatttatcatgttatatgtttctgcagagccttagcacagtgtttcattcttaacaaataaacaattgtgttgataaacataatatttatcctaatcagattattataaagcatatctgaacgtgggctatttttatgattccattattctggattttctaatatagttgcacaaacacataaaaaggacagctatacatggtgaaaccccatctctacaaaaagtaaaaaggccagacatggtggcgtttgtcagtggtcccagctattggggaggctgaagtgggaggattgcttgagcccaannnnnnnnnnnnnnnnnnnnnnnnnnnnnnnnnnnnnnnnnnnnnnnnnnnnnnngagtgagatcttgtctcnnnnnnnnnggtcaagagttaaacaataaataatattaatcatctagattttgcgatgtttatgtgggttgtcagcttttttaataatttgtcaaatctttcatttgtaataaactttcactctcnnnnnnnnnnnnnnnnnnnnnccaaacggacaattgataaccctgcattttgttttaggtacagtatttgcctttgttaattagcattattaaatacatcctcacaaaattattgtatataaaaaataagaaatatgtatattttattatttatgaaatacaaaggtattaggcacagtatcaagagaacaaaatcaaattgtgccttgaggagtttagaacttaaagacaacctaaagtaaatacaaaccatacacaggtggagtggagggtgcccctgactaaatggcaggggaaataagggaaggtg

SEQ ID NO: 327498 - DNA, 715 bp, Homo Sapiens
  misc_feature (352)..(352): n is a, c, g, or t
  misc_feature (365)..(365): n is a, c, g, or t
  misc_feature (400)..(400): n is a, c, g, or t
  misc_feature (434)..(434): n is a, c, g, or t
cctggccagtaatattctttttaatattaatattctttggctcattaatcctactagaaatctatcctgaggtaacaatcagaaatgcaaacaaatttggttcaaagatatttacttcagcaatatttatgatggcaaaaccagaaatactacatatgtccaataatagagggccagttaaataaataatatacccgttaaatagaacattatacaactgttaaaaatggtgtgtacaaatattaaagaggttaaaacaggctcaatatacagcaggttgagtggggaaaaaagaaaataaaagtatatgtagaataatcttggttttcttaataatagaaaaaaattaagnaaagtattaaaantcataagccatagttatttcctagatggcctaganttatagatttttcctttgtaattttcctgtaatnttccaaaatgagccaaatacatatcctaaaaaaacttagagtggcttgacaatcattattcattgagaagacagaggaacaggcagtatggaatgatggaaccgaaagatcagacctgacttctggcttgagtaccaccacttatctgctaagtgcagttcacgagacagctttgcagttgaatgcagttttggaatcaaattgtctgcattcagaacctggttctcatatttcctagttgagtgtccttgggaatattacttaacacctttcagcacctc

SEQ ID NO: 327499 - DNA, 758 bp, Homo Sapiens
tatatagaagagcaaactgtttatttacaccttggtctgtacagtacagctccccgggaggagcctgccaccaacagcctgttccttttggggcagaagcaggttggaggcaaagagctcagaccctggacagcctcagggcctcacccccactgtcccctccctggggcccacagggcaggtcccaccccagcactaaagctaagcctgtttccagacagagcctcctggggcaaaaaagtcaagttgaatcccacagagtcagaggccatctaacaaacccttgggcatgaggccacatgtgtagttcattccacgtaggcctcagaagacccagccaagaaagtgggaggagctggaagggagcccacagctgtgagtccttggcaatgcaccgtccgctccgtgacatcagttggtatttaatggcactctggtctgagcacctcagcagacaaggaagggctgggcaggtgttcacagcaggcaggggcagcagctagcacctcttccttctgcccaagtggggcccgcagctgttctagacaccagatgtggtggcctcaaggccagcctgtggccgtgcaccaggaaccatggacagggcttcctctgggggcagagacagtgcacggagcggctgcggtcccatgatatcccttggggccaatgccccaggttaaagagtgatgctttgcccgacatcactaacaatgcagggaaagctctgtgggagaagctgctttacacaaagttgc

SEQ ID NO: 327500 - DNA, 608 bp, Homo Sapiens
acaagtgacttcaggcttggccacttagggttctgactcttggtcaaatcagagtgaatcctgagtcatttgtaaactccaaggaaagggcttgctttgttttctgttgaatgcagtgctctgagatagccggaaatgaaactgctctcttgccacactgaaggctagagaagggcctgggccagggaaatgatgccagtgatcaggggtggagctgggaagagggggagtgaggaggcccagacatcttggggagccccaaatttcaccttcaggattttaactttctccgctgctcagccaataaattcctttcttccatgactaatttgagttgagtttttagtttttgcaactaaaacagcactgactaatacacccttaggtaagattagagcaagaatttccaatatctgtgttcttcatcctgaaatttggtgaggatatctaaggttcttttgtcttttaaaagaattctgttgcaatggaaagtatcaatccatatttttccatttctccaaaatgttttagtgtatatctatggggcacaaacttaatctctgtaggccctctgccatagttgctctgtgccacttgataaggggctg

SEQ ID NO: 327501 - DNA, 780 bp, Homo Sapiens
  misc_feature (32)..(32): n is a, c, g, or t
gactaatgctgccttacaaacctattctccanaaatcagctagagcaaaccttttaaatcctaagtagaatgctaccattcctctgctcaaactcctggagaggagatgccacagtctttactatggtcttcaagaccctatgggaggtagccctgtcttacaaccatagcctcctaccactgccccaacatgcacactgagttccgggccacagcatctgcttcctctttattgatctgccaaggacatgaatgactcagaatctcaaacttattcttccctcagaatccactgagcctactccctctttttctcaaatggcaacttctcagagatgccttctctggctaacgtatatgtactaaaacctccatccagcactctatgccatccttactatggtttatttttcttcatagcacctatcagttggtgaaagtattaaaatatgccatttttgtttgtaatgccatctctctcccccgcacccagtatgtgaactcccacccagactggagagcgtgtttattttgttcactgctgtaactccagtgtctagaacagtgcctggcacacaataggtgtttaataatgatttgttaagctaagccaatgaataaatattcttttgcccatgagatgatgttaaaaatttttcaattattcataactgcctgtaaggaatgaatgttagtgaattactgtgataccaatgaaagttaaatgatgcaatgaagattgggtggatcacaaggtcaggagtttgctcgtgccgaatt

SEQ ID NO: 327502 - DNA, 371 bp, Homo Sapiens
cccctccaatagcaccccctaccagtgggtgaaagtattaaaatatgccatttttggtttggtatgccacctcctctcccccgcacccagtatgtgaaactcccacccagactggagagcgtgtttattttgttccactgcctgtaactcccagtgtcctagaacagtgcccgggcacacaatagggtgtttaataatgatttgttaagctaagcccaatgaataaatattcttttgcccatgagatgatgttaaaaatttttcaattattcataactgcctgtaaggaatgaatgttagtgaattactgtgataccaatgaaagttaaatgatgcaatgaagattgggtggatcacaaggtcaggagttt

SEQ ID NO: 327503 - DNA, 650 bp, Homo Sapiens
  misc_feature (36)..(36): n is a, c, g, or t
  misc_feature (63)..(63): n is a, c, g, or t
  misc_feature (99)..(99): n is a, c, g, or t
  misc_feature (142)..(142): n is a, c, g, or t
  misc_feature (259)..(259): n is a, c, g, or t
  misc_feature (266)..(266): n is a, c, g, or t
  misc_feature (615)..(615): n is a, c, g, or t
  misc_feature (632)..(632): n is a, c, g, or t
ggatgtagatgtgtgtatgtgcatcccactcatacncaaaatacccagcatcgcccacatgcntgctgtgtgcgtaagtgtgagcgagtgcacagacancagcgtgcagaaattcaaaccaagctgtgggtacttgttaccnctgggaagggagtcggtcacagagggaaagagaaacaggacatcagcctttgacttcagaactgttcctgccttttcacatcctgtgctgttttcagcatcatcggagcccttaacncacatcncgggagtaagagtgtgtttagagggagcattcggtgggacagatattgccatggcttgtggatagagttcacagtccttaataatccccgagatggcagcccaagagctacgttctcaatcacgcagcttcaccccagaaactgacagaaacccaacaaccaaaaggtgtccattctgacagcctcagcctgtgctggctcagatgagcaaaaatgtacagatattaataatgatgttgatttgaagagcacagaggggggtatgcatgataagggtccaaatttttaccttaaaaaagaatacatttacttctcaatcacctacataacgatcattttttaaaaaacngatcaaatttggtgttncaagggcacgttgcaaat

SEQ ID NO: 327504 - DNA, 664 bp, Homo Sapiens
tttaaagcacctatgtgattgcatttttctattacatttggattttttagtacatttaattttaagaaaacatgggaaatctagcgactttctatggtaaaccacattttataatgtcacaagttcttgctataggaattaacattctagaattttatattgattataaaagagtatttcagaacatattattctgttaaaatgaactcttgcacagttgccgctacagcaaatgtgtctgccaataatcaaaattcatgagcaaacaatcgtttctggctgtaatgtatgttctttttgaaattctgtatgctaaaatcagttgtttcaaaatttcaagaattccactgagtagtgatttttctgagtactaagctatgatctcatcagaatgtgctggtttccagtctggagataagatttcctgaggagcctaatacaagggagagaatgtcccaaagaacactactgtggaaagttcttacgatggaaaattgacatcttttgtatctcattctccagccgtgaaataaaggcagaggttccctgcaaactagtttggttgggataaatccaatatttatatataatgaaaaataaaagtttgcattattagtttatcacaagacccatgtgacaactcagaaaatattctcagcataat

SEQ ID NO: 327505 - DNA, 786 bp, Homo Sapiens
  misc_feature (29)..(29): n is a, c, g, or t
  misc_feature (123)..(243): n is a, c, g, or t
tcaaatttcatagaataaaaataccattncagcttatgctggaactgtattaaattttaggttaatatggacaaaaagtgatattgacgtatttactacattgactcgtttcaccaatgaacnnnnnnnnnnnnnnnnnnnnnnnnnnnnnnnnnnnnnnnnnnnnnnnnnnnnnnnnnnnnnnnnnnnnnnnnnnnnnnnnnnnnnnnnnnnnnnnnnnnnnnnnnnnnnnnnnnnnnnnnntaatttcaactctattcatgcctgtgctaccatatttcattagttctgattatcaattatagatagctgctgtaattgtttccatgctgctataattgtttccgtggaagggtagaatgccttgtggaagaaaggagccaaacgtgactgtttcatttatttaacaaacatgtattgaacacgtaatatgtacccagcactgagaattcaaagagtgataagacaatatcccctgtcctcaagggttcacagtcccagggggcagataaacaagttgcatatagtaacaagcaagttctgtgttagaggagagtacaggagaaaaacacagtctacctccaggagtagagagtattgtcaggaaaaacttctatagagctgactcttggggtgggtcccagtttcccccttgaacaggtgtggtgatgaggaggcacatccagaaactgcattaagtccttcagacttaagaacgtcatcaatacagtgctgagtgcaccctgccttccatgtcacagcatggcagcaaatccctttggcttg

SEQ ID NO: 327506 - DNA, 334 bp, Homo Sapiens
  misc_feature (55)..(55): n is a, c, g, or t
aaattatgggtagccaccgggcctgaatagagttgaaattatcagagtgattatnaaatacataggaataaaccttaacagaaattgggcaagacctttatgaagaactcttccaaacttaactaaggcacataaaagaacacttgaataaatagagaaacatgttcattggtgaaacgagtcaatgtagtaaatacgtcaatatcactttttgtccatattaacctaaaatttaatacagttccagcataagctgtaatgttatttttattctatgaaatttgataaaatacggtaaagttcagaaaaacattgcctgagactagtgaagaat

SEQ ID NO: 327507 - DNA, 455 bp, Homo Sapiens
  misc_feature (230)..(342): n is a, c, g, or t
gaatgatttgaaaaaaatctctatgacaagaaactcctaattgggttttgaaaaagtctaaagaagtaagtaaactgaccactgtgattcttacttaaatggatacagttctttttgctttttaaaaaccaataattcttgtgaattagttatttttgagaaaaagtatcattttaagttggtataagtaacttggttaaatttgtcttatttaaatttataacttgcannnnnnnnnnnnnnnnnnnnnnnnnnnnnnnnnnnnnnnnnnnnnnnnnnnnnnnnnnnnnnnnnnnnnnnnnnnnnnnnnnnnnnnnnnnnnnnnnnnnnnnnnnnnnnnnntaatttataacttaaacactattaattttaggaaagaaattttatagatattagcacttcaatttaattactattaaaataattcctttcttctgcaatatttctcacagggg

SEQ ID NO: 327508 - DNA, 507 bp, Homo Sapiens
  misc_feature (507)..(507): n is a, c, g, or t
aattctaatagatatgtatttcgatgtgtatgagaaaaaataaccattgttttaaggatataactgggatgaggctttttaaaaaagtgattgatttacataaaaacatataggaatagtgcacagagcggacatataagacaaactccaggaaggctataggcaaataaatgaggtttgggaaacactgctttaaatcaagactgttcactcatggaccatcccaacccttataaaaataactagcaggtgaaaactggtagtgtaggtctgtctccaaagtatgccattgggaacaagtggacggttttatagataatcccactaaaagaagagctcccacatacaaatacatacattattatatttacagttaaacaggttttttccccaggtgccttctcagggtcttccatatgtaaatacttacgtgactcttgaaaagagggacatggtgtgcagcatctccaaaatgtaggcaaacccggccaggagcggtggctcatn

SEQ ID NO: 327509 - DNA, 660 bp, Homo Sapiens
cttctaagatttattttataaacatgtaagaaaagttgtagatatttattgtgggtctggttatgcaagaacaatcttcctggacacagtgtgcgattctcagtatcaaaagcattctcttctttcagttcgtaaaagaaaaacatggtttaacttctaatttactgcttattataaggtttaaaagcaattactgtacttatgtatcgaacttatttgtgtagcaactaattcatctgtgaagccatggtttgctgtggcttcacagtaaattttgacttaagtctaaagcgtgtgttagcatctcaccgtaacttaatgcttcgagtgagaagtttgaggaatgctgctttaggcaaaagagccactggaggaatgagctctgctcttttcacctgctctggactgctctcactttcctcaccgacaggaccacaggcttaagaactggctcagcagtccttctttagggtctagcgcctgcctaccagcttcctctacttctatcccgggacagatgaatgcttttctaaaaaatattttggaccatctgcatgattccctagcaaatgctttagagagctggtaagcttcagctccgacatggccagatcatcaaaatttgaagtttactcaggtctatttaatgagatttttttt

SEQ ID NO: 327510 - DNA, 853 bp, Homo Sapiens
cagcactaagattcccttctggagaccttattctccacaattcctagcctcagtgctcctctcctttgcttctcctcctatgaatacccctcctgactactcactcctccaacacagtttattttcatacttaattttagcagaccagaaaaaaataaagtttcagtctcaagccacaaatctcctttgctgtccttaagtgagcatccaacagcgctattctatagtatagatcagtgaatggataaactgtggagtcttatatgaccctataaggcaaattaatcaccaatttgcaatacattgaaaatgaacagaatcaagtcaataatataagctacagattgttgaggacaattattgaaagcacccaacagcattgtgctaagtgggatttttttccttcaaataaaaaaaggttagtgaaataggtactattatagccccattttatagatgaggaaactgaggttttgagaatttaagtagcttgcccaaggtcaccccaagctagtgaatgggcagagtgggatttgaattccaatatagtcatggatccccctactgccctacttgaaaggggcagggatggggtttgggagcagagagaaacaacaacaacaacaaaaaactccacccccaaattgctctttctgccaaagcatctcctgctattgactgccaacctgaacacttagtcacaggacagctctgggtatgtctcttggggctaaatgtctcctttagggctaactgcttctcctgtggggactgtgttaaagtttatcttctgcctcccctcccaggagtttccacacctgctgcagctttaaataggaatcttaatttattt

SEQ ID NO: 327511 - DNA, 433 bp, Homo Sapiens
  misc_feature (359)..(359): n is a, c, g, or t
  misc_feature (368)..(368): n is a, c, g, or t
ggagccagcactaagattcccttctggagaccttattctccacaattcctagcctcagtgctcctctcctttgcttctcctcctatgaatacccctcctgactactcactcctccaacacagtttattttcatacttaattttagcagaccagaaaaaaataaagtttcagtctcaagccacaaatctcctttgctgtccttaagtgaggcatccaacaggcgctatttcttataggtataggatcagtggaatggggttaaactgtgggagtctttttatggaccctattaggggcaaatttaattcacccattttggcattactttggaaatgggaacaggattccaggtccatttnttttagggntacggttgttggggggccatttttttggaagggcaccccaacgggctttgtggcttggtgggggg

SEQ ID NO: 327512 - DNA, 705 bp, Homo Sapiens
tgagacagagtttcaaaataattttgaaatgagcaattcacctatttgactacacagacttccagtatgcttgcataaaaggaaaagtcatgtgagaacatctgaatttagaagtacttgaaagtacaagactgaagacataaaggaaatgtaagcaggatgataaatgtcagttgatttaaactgacaggagctctgttctgctttatagcatattcttgtagggagagctgatcctagctgatggctagctctggagcaggcttgttgaagctgttcataaatgtatttatgtttttaggagacagtatctcacactgtcaccccagactggagtatggtggccatggattatggttccacctgaagcccttgaaccccctgggcctcaagtgaccctccctactttaggctcccaaatagctggcattacagcagtgtgcccacctgttcataaatttagaacaatatttagtgtcaagttagtgatttttctaagggtggaacagggattactacaaggtgaacatgcttctgtaatcgccacacaggtcaggaaataaaacgttatttttattctatatttctttatgtgatgtctagacactatcttcatattccccagaggtaactactgtcctgatttaaaacaccatagattttatgtgatttaaaaatatatggacacagtattatttagcctaa

SEQ ID NO: 327513 - DNA, 741 bp, Homo Sapiens
  misc_feature (27)..(27): n is a, c, g, or t
  misc_feature (62)..(62): n is a, c, g, or t
  misc_feature (103)..(103): n is a, c, g, or t
actccttagagcagacaagggcagagnagttatgaatagtggctcaagggtctaggggcagnaaagctggtctggatggacagagtagagaggcacagtgaanctttctggagccagcttcagatgctggagagaagggtgaagagtaggcagggtccttgggactagggaagtggggagattcccacccccacttccatctccctctctatacccttttacaggcaatgagtttgtgcagcacaatacttggcagttaagccgtgtgtatcccagcggcctgaggacagactcttccaactacaacccccaggaactctggaatgcaggctgccagatgggtgaggaggcagcagggactgggaagagggagtggaggagcagcaggtgggaaataagttctctagtgatggtagggttggggaatgctcaagaaaattgctaggctgagaaatgctatcagtggatattaccagcaggtaccgtgcacccagtacctatcttcttaactccctgaaagaggggctggaaggcctccatggtgaatcttgctcttcttttctcctggggccctcagtggccatgaatatgcagactgcagggcttgaaatggacatctgtgatgggcatttccgccagaatggcggctgtggctatgtgctgaagccagacttcctgcgtgatatccagagttctttccaccctgagaagcccatcagccctttcaaagcccagactcta

SEQ ID NO: 327514 - DNA, 735 bp, Homo Sapiens
  misc_feature (131)..(131): n is a, c, g, or t
ttaagaagacaaaagcaggtttattagggccctggggcgaggaatgcttaagatatgagttaaggccagggcgttgagaaaaggtgactctcctgaggccaaacctttgcatctcagaagccctggctggnagaccttaggagtcagttctgggagggacctggggatacagaggggtctctcctgaccctgggatctttgggcttttgccagggattggggaaatgatctggggggcagggagccttgaatccacagccttcatttcaataacgaccatttaatttgttccttggcagactgaagaacctgggccacactctgttcagtcaagccgccatcatctgccctaaaattcaccttctggatcacttgctgggggtcactctccagaatcacaccgccatccacaatctcgtccagcaccaagaaggctccgtccatgttctccagcaaccagcgcttctccacgttcttccttaacatgtggttcagagactcaaacaggcaggtgagaacagacatgagcatcagctcattctcgtaggatgagcccaccacgtataggaagaggtcaatgctgttcttgtagacgatggtcatacccccaaaaaatgcaatctcactctcagtccggctggtcttgttgaagacatttttctcgaaaaccatctgctccttcatggaggggaatgtgtcatcataatacttggccagcagccggcgcccgtcatt

SEQ ID NO: 327515 - DNA, 809 bp, Homo Sapiens
  misc_feature (11)..(11): n is a, c, g, or t
  misc_feature (45)..(45): n is a, c, g, or t
tgtgcttcttngatgatttatgtagcagggaggggttcggaattntttcccggtgattatagctctcaagtgcaattccatagcttgttcatcatcctggacagctaggatggactgggatgctggacagcagtggccatcaggtcatgtttcatcttctcgagcctgtggagccaaattaattgttcgatcgatttgagaggcagacagcaatggtgctgtggctcaccacagtcactgcccagggcccaccaggaactgatgtccacttccctaacagccggacctgggaccctgatgtgagcatctgctcgactcagcagcttttcaggacaggctgggtgaaaagtcctgtccccagggctgtgtgctgcattcagactgtccatttctttgtggccagagctcctgtcctctgcacctgtctggtagacagaggtaggtcaccaggtccaggagagatgagcttgctgccttcccagacaggcgagtctcctgtgcctcacattccccttaatgtcattttgtaagggaatcaaatgaaatcaaagtgcagcttgctgtctgtgcagacccagctgctcagcctctcacaaatcccccccgcgggctgagccctggcagacagagatgctgtgtatcactggtcccacttcaggcagcgtttactcccttgctgggtggggggcattggtctggtcacgggcagatccagcccatcccctgttagaatgttgagtcaatatgtctgatctttcctaggttgagaggaggataagtgggaagtaaggggtgtattctcttctagg

SEQ ID NO: 327516 - DNA, 373 bp, Homo Sapiens
  misc_feature (91)..(91): n is a, c, g, or t
ccccaggaaaaaatgaagcttgcctgcccttcccccagaacaggcgagtctccctgtgccctcaacattcccccttaaatgtcattttgtnaagggaatcaaatgaaaatcaaagtgcagcttgcctgtctttgcagacccagctgctcagcctctcacaaatcccccccggggctgaagccctggcagacagagatgctgtgtatcactggtcccacttcaggcagcgtttactcccttgctgggtggggggcattggtctggtcacgggcagatccagcccatcccctgttagaatgttgagtcaatatgtctgatctttcctaggttgagaggaggataagtgggaagtaaggggtgtattctcttctag

SEQ ID NO: 327517 - DNA, 689 bp, Homo Sapiens
  misc_feature (645)..(645): n is a, c, g, or t
gtattttttgagagatgacatttcaccatattgcccaggttggtctctaactcctgagctcaagcgatccgcccgccttggctcccaaagtgttgggagtacaggcgtgagtcaccgcgcccagccatattgatatgaattttaaaaatgcatctgctggaatataaattaaaagtaaatagaggaaaatgtgaaaataaggaaatacctacattaaagggtgattgggaaggggttaaggtgaggaaaacatgtaaaagggctcagcacgtgcctgggcccaaggtacactccctttaagtggttcatgttgtgactttcaacatggggagattttgctgccttctgctaccctctctggggggcatcaggagtaggctctcgcgtggttctctcctgcctagctcatctgttctgggttccatggaactccccaggaggcacccatcatcacacagtggtgacaggctccacatttagaaaggcacagaacttcaaatgtcagtgttagaaaggctgggtcagcatttcccagggttcaccctctagaatgctcattcatgggatgttaaggggctcctgggcaaacgagcctaggaagtgcttcgttaaacaaggtcaacaggattctcgatacagcacttnctcagggccttgccaactccaggagggagatttacaggcagttt

SEQ ID NO: 327518 - DNA, 377 bp, Homo Sapiens
caagtccacagaaaaaccgttggtgaagcacacacaggcagttttccacatggtagtcattaaaaatgttaaactagactgcctgccatggaaaggccttattgaaaataatgttaagtaacttttcatgaaattatcgatacacactagggaacatccacaaaaatgtttatatctgccttgttaaggatcaggggaagatgccaagttttatataattggcgatggtttaagttttgtgacatatgcttcctatgaggccattaattcaagctgaaaacttttattgctcagtagaacacaaatacataaaagcatattgaacatatgttcaggttactgaattactattgttattatgtttttttagagacagg

SEQ ID NO: 327519 - DNA, 741 bp, Homo Sapiens
  misc_feature (356)..(356): n is a, c, g, or t
attcggcacagcatgtttttatttaatgatgtaagatagaattaataaactactaaggaaataagccaatgtggttattgtactcaatttcgtttttcttttagaaatgtgtattgacttattaaagccactgacagaaatgttaatcatgacttaagttctaatttaaaaaactattttcctctttcctaaatactatattctaaattggaatatggcaaaatcccaatatataattctatacctagtaaagattgtaaataactaaaacaaaatgataagagctgtgaactgaaattgtattgcttacagaaatcatgaaccgaattttcttctctttttgaaagtgaggcatnaaagacttaagtgtattgttaccagagatatatttagatagaatacatcattttggcaggtaatcttctagaacctttcatgtactgtttccatcaagggagggaaagaaatagaaaatataattttatctatattttccttaaaatatatcaatctgtgcacactctttcagttttttaattactcatgtaatatatgactacattttgcttgtgtgctttttgaaaaccatcttcagtcccaatatcctctgtagaagtaatagttttaactctcctagatcttcttttagagtgtttttatgagtgtttaatgtaggaatgtgtatatattatctacagccacaggaaatgtatagttacgatttttacatacgtgtatgta

SEQ ID NO: 327520 - DNA, 338 bp, Homo Sapiens
gacagtttataaagtttattattaattgttaaagtaaataaatggttgttaactgctagcaaccacctatcaaaagagaatgatttcactcacatcgactatttaggtagaggaagaattgccactaggtcaacaagggagatttaaacaatcccatctatgggctggggaggggtagaagcgctgccagagatggctgcagtaggctgagccttgctctctgcgcatccacgtgtttagaaacaaggccccatcagcaaaaggtgagaatgcattgctactccagcaggtgagtcagtcaatcacacatcacctagtaaagccaacccacagcggtt

SEQ ID NO: 327521 - DNA, 767 bp, Homo Sapiens
  misc_feature (723)..(723): n is a, c, g, or t
aaaataaactttaattttaaattcggaaaaaagaaatgccgtagagaatcagttttcattcaaataaatttccacttatttttaacccctgggagccctctagtgtcctgttcgcaaacagactcagaaatgtcagtctcatgaagttcaaaagatcgagaatgtttgctatcttggtggagcagccgcagccaagcaagtaacttgtaaaatgaggaatgccatcacccctcgagtgtccatcccacataacttggggttagagcacaagcgttcccaggaactactcaccttaccatcttggccgtttcatttgtcttccaccagttctggaaagagaaggcctagaagttcagaaaaaaaggaaaagtgcttttgggagaaaatcacctgttctcctcagaactggttcttacaagtctgtggaagtaacactatgtggccagcctaatcactcatatatgacctcaagagaacaccaaataagcatatttccagcaggaaatgaccagtgctttggttaagaatgcacattatactgcagttctttggggaatgaagccacccttgactgaggtaatcatcagttcaaaggcaactccttgttttatctttgcactaattgcttagagaaataaccagacaatataatttatgacaacaaatctgcatttaactgagttaacgaatttgtaaacaaaaggattcctatctcaggtaggngcttttggcaagatatttaattttgcccagtttcctcatctgaa

SEQ ID NO: 327522 - DNA, 338 bp, Homo Sapiens
gggtgagccaccgctcctggctgattttggctacattttaaagccaacaggatttgctcgcatactggcctgggggaggagagagagttagggagtcaagaatagctccaaggtttttgggctcaataactgtaagggaagaatggaattatttactgaaatgagaaaaactggaggatcttgttgggggttaaagctcaggttttgggacatattagctaagtttgaattactagacattgaaaagaatttgtcaagaagacattcggatatatgagtctagaattcagaggagaggtctgcgctgagtatatacatttgtaagtcctcagtatagg

SEQ ID NO: 327523 - DNA, 611 bp, Homo Sapiens
  misc_feature (502)..(548): n is a, c, g, or t
gggtggcagacttttagaaattgtgacaatgaaaagtttagttttgagatgcaaagatcacaataaataagaaattttgaatatcactaacaatagaaagaaaaatgaacaaataatttttacccttggctgtcatttaaggtaactgaaaaattagcataaggtgtttttttctaactaatttatttgcctgttatttcatttataagcactataatgggacttaacaatcttttttttatagggaaaatattctttaaaaaaatcacattacttgtgtatgtagttcttacgagcgtgtttaattccaaaggtaaaattttctaatacctgacttaaaacaatggcatttatttgtaaataccaataaaagtaaagataatatagtctataatgtatatctctgtctctgattattatgcaaatttctaacaaagaccatctatttgtgaagcatctgcattaaaacacgcaagccagttttattaagaaggtatttaannnnnnnnnnnnnnnnnnnnnnnnnnnnnnnnnnnnnnnnnnnnnnnaggaggattgcttgagtccagaaactcaagaccagattgggtaacatagagagaccctctctc

SEQ ID NO: 327524 - DNA, 780 bp, Homo Sapiens
taacaaatgaattttatttatttcattttattcagttgaattaaatgaagaaaagcacaaagaactaatagagaaaaaggagatggaaatttcagagttaaatgcaaagctaagaagtcaagaaaaagaaaaacaaaatgaaataatcaagctacaactagaagtaagtgtttaagagtctgctaaacttgaggacacatcccttagtctaaactgtactttgattgtttttcatcacagtgagatacattttaggattagaagcaattctgtgagagggcttcacacatgctcattctccaccaaatgattgcagtaatcacataccatacaactgtcatctgcattgcctttcagcacttgacctgaaagtggacccttgagttgttcgaaagttcctggtttttagggaggatattgcttcctctgagaacttttcttctcagtatttcccacttgacatccaacttttccttttaactgcaggcctttctgactgcagcaactttaggcccaacactaggtgagagacaacagcctttcatagactttactaccagttcctgtgtctcatatgctcttttctgtatatgtcattttcttgtttttccctgtctcagggtagatattttcttctaacctattctccaacttactaattctatctttagtgtatctaattggctattaaaccaatagagtgaaactttattttagctattgtatttttagcactcacatttccctgacagaaaactcaagggattatctgcattttat

SEQ ID NO: 327525 - DNA, 554 bp, Homo Sapiens
gagatgggtcagagaagcggattgatcgtcactagttggcctcttcaaatccactctccactctgggaggctgaccaatgtgtacctcatctatgaactgactcttcaattcattcacttatttaatcacagctacttactaagtccctgctacatttaaggcacaagcctgacctccggggctacagtgctaaacaaaagaagccctgacttctgcccctccaagattattatctccttaggaagagataggtccttacatagtccacaggagatgtgggattaaatatatatgctatgatctgaacatttgtgtcccttcaaaattcatatgttgaaattctaaccccaaagttattgccatgaggaggtgggaaatttgggaagtgactaggtcatgagaatggagccctaatgaatgggattagtgcccttaaagaagggacctaagagactgcctagccccttctgccatgtaaggacacagcagtaagacagtcctgtaaaaactaagaagtgggccctcaccagacactgaatctgccttgatattg

SEQ ID NO: 327526 - DNA, 721 bp, Homo Sapiens
  misc_feature (202)..(249): n is a, c, g, or t
gtccaccagcttctcctccagcagggacagccggcaccctctcggtctctaccatctgcagctccagcctcaggtgctcattctcttccaccttctgctgcaactctgcctggggagagaaggggctcagtgctcactttgctggcctctcccagccttccaggtggcaggatcaactactccatctccccgaggctggtgnnnnnnnnnnnnnnnnnnnnnnnnnnnnnnnnnnnnnnnnnnnnnnnntggactgatgtaagagttgtatattttgtttcccactctaaggactccattctcccttctcttctctggttttgtttctttcaaaacaaattaagtttagtgggaagctgcagaagccaatctggttagcttacacaggagaggaaatttatggcaggctagtgggcagatcccagaatggactagcagctggagaacctcaggaatgggacagggttgagacagtgggagtgtcccaagcctcttatccaagagccacagccgagaaagaccctctccagccatccccatcccccagcatggagagccccaggagaggggcgtggttggcccagtcggagtcttgggcccacttcttggccagggggccacctaaaccgtcagttgtacccagtaacactaggatgccaggcagtcacaaagtgttttgtggcccctgccttctaaagcaggcatgccaggcacgaggcat

SEQ ID NO: 327527 - DNA, 627 bp, Homo Sapiens
tggcagacgactaaagcctacagcattttgacggctgcaggcgcttggtaagagaagacagctcgttttctcagaagtttcatacctcttacagtccttccttctgagagggacccactcatagttagcaatgcttaaagagcaccctccacagccacatctgatacaaactgaagtatctcctaagagagccaagtcctgtgcgcgcacatgtcctgatgcctgggagaaatctcagaattgtaagccacggcattagggaaactgtcctgatttccacccacatttaattacctctccttctttctttttactgtagctattatgataaagatcattttaggagatggcccaaggggattttggtcacttatttaacaaaaagtgctccttagtaacctggctgtccaccgaaccaataaagaactcattctagtgaggcttccacgtatttctcagctccaggcccgaaggtctttccaggtgttctgtaaatgttttctctcttcactcaacaaggtggcctgagttggtggaatgatctttttgtttttacatttaaagttgattctgaagtttgacaaatcacccttcttccctttatagctattactctctattctgtgc

SEQ ID NO: 327528 - DNA, 692 bp, Homo Sapiens
  misc_feature (13)..(13): n is a, c, g, or t
  misc_feature (26)..(26): n is a, c, g, or t
  misc_feature (48)..(48): n is a, c, g, or t
  misc_feature (69)..(69): n is a, c, g, or t
  misc_feature (136)..(136): n is a, c, g, or t
  misc_feature (294)..(309): n is a, c, g, or t
  misc_feature (455)..(500): n is a, c, g, or t
  misc_feature (557)..(648): n is a, c, g, or t
aggtgccctcaancctgtatcccccnactttagggagccccaaggccnggcagatccacctgaggtccnggaagttcaagaacccaccctggcccaacatggtggaaactcccatcctcctacctaaaaataacgnaaaatcagccccaggcatggtggtgtgtgccctgtaatccccagcctactcgggaggctgagggaggggaacttgaaccccaggaggcgtaggctgcagtgagcccaagatcgcaccactgtactcccagccctgggcaacaagaagactccatctcnnnnnnnnnnnnnnnngaatgattgacattttagaaccaatgccaaaagagtaacacatcaaagtctctgaactgtggccaaaggtatattcggaagaaaattcacagtcttaaagatgagtttttaaattaatttaggaagatgaattaagcactcaagtnnnnnnnnnnnnnnnnnnnnnnnnnnnnnnnnnnnnnnnnnnnnnntatacagtatggtaattaataagaaagtatgggggaagtcaggtgtggtggttcatnnnnnnnnnnnnnnnnnnnnnnnnnnnnnnnnnnnnnnnnnnnnnnnnnnnnnnnnnnnnnnnnnnnnnnnnnnnnnnnnnnnnnnnnnnnnaaaaaattttaaaaattagccaggtgtggtggtgcatgcctggg

SEQ ID NO: 327529 - DNA, 1018 bp, Homo Sapiens
  misc_feature (144)..(263): n is a, c, g, or t
  misc_feature (293)..(378): n is a, c, g, or t
  misc_feature (922)..(922): n is a, c, g, or t
ttttgagacaggtctccctttgtcatccaggctggagtgcagtggcaccaatctccactcactgcaacctctgtctcccgagttaaagcaatttctctgccttaacctcccgagtagctgggatacaggcatgccccaccacannnnnnnnnnnnnnnnnnnnnnnnnnnnnnnnnnnnnnnnnnnnnnnnnnnnnnnnnnnnnnnnnnnnnnnnnnnnnnnnnnnnnnnnnnnnnnnnnnnnnnnnnnnnnnnnnnnnnnnntgagccactgcgcccagccaaatggtaatnnnnnnnnnnnnnnnnnnnnnnnnnnnnnnnnnnnnnnnnnnnnnnnnnnnnnnnnnnnnnnnnnnnnnnnnnnnnnnnnnnnnnnaactgggagtcagaatagatttttaatattattgtagaggttgataggttcttttctgtttcatcctgcctggaccattcggattgagaaactgacctttagggaaaaaaatcttatcacatacttaccacacaaaaatacatctctatgacattctttatttctacctcagagccaatgctattattatgcaatatttcaactagtgttttagtctgtgtgcaaaggctttgaggctgcagcattacagaacgcaacccaatcttaaatttacacatgagggcaggctcactgtcacttgcctgtgtaaagtatagattgagatagtcccataacttcagatttcactttataaaatcacctgttagtatcttgaatagatcttgcctacttcttccaactctagacataaatttttttgtcatcttagttttcttaagatttcattctgctttcccaatctactgctgctcctgggagtcatcagggcagctgcatcctaaagtccaaagatacatccattacccaggtcattagaattagnaaaaagaaaatcattagcagagatcactggatatggtacagcatgaattaaataaaaatattaaatttacattactaattcaaacaagatttgcaa

SEQ ID NO: 327530 - DNA, 491 bp, Homo Sapiens
  misc_feature (56)..(56): n is a, c, g, or t
gatgctttgcagtccctgtactgaagaaagcagagtaagggcaagacagagcgaangaacttggatgcagctttcccagctgtcttcctgaaattccaacaccagtggatggaattggtattgcacatttcccaaaaccagatccatagtcctttcactgcagtttgttattttacaggtaatatgaaaaggttcttcaaggtttacggtatctggtattgcctccaaagacaacctaacatctccataacctggagccattctttgaagttggctggtctgtaaccttcccctttcacctagatttgttttccatactatatccaattttccaattactgttactcccttaatgatgcctgctttttctgcaaattcattctttggctttaggcagtataagtactggcgtgtatccattggttgcaaatatgctcttgacccaaacgtagacacacattctccagcttggctgactgaatttaattctg

SEQ ID NO: 327531 - DNA, 762 bp, Homo Sapiens
  misc_feature (155)..(341): n is a, c, g, or t
  misc_feature (381)..(395): n is a, c, g, or t
  misc_feature (669)..(669): n is a, c, g, or t
  misc_feature (708)..(721): n is a, c, g, or t
  misc_feature (752)..(752): n is a, c, g, or t
taacctaaagggcaataattaagaaaatcagtttttacttaaccaagcttttaaaattatctctacccatgcagacaacagaaacatatcttgcaacgggacaaattaataaacatgacgggaaaatggaacttagattttaaatgtgtactttnnnnnnnnnnnnnnnnnnnnnnnnnnnnnnnnnnnnnnnnnnnnnnnnnnnnnnnnnnnnnnnnnnnnnnnnnnnnnnnnnnnnnnnnnnnnnnnnnnnnnnnnnnnnnnnnnnnnnnnnnnnnnnnnnnnnnnnnnnnnnnnnnnnnnnnnnnnnnnnnnnnnnnnnnnnnnnnnnnnnnnnnnnntatttgggactacagtcatgagccacgacgcccagctaannnnnnnnnnnnnnngtagatatagggtctcgctatgttgccagtgctgacctgtaacttttgcctttaaatgtaaacttgttcacttgatacgctcaaataaatataatcttgcacctaggacaaaaaacttgcattcataattacatatggttaagtactaaatgttacacaagcaatcctcccaactcagtctcccaaaatgctgaaattacaggtctgaaacaccatgcctagcctattcctacccatttctgtaggaactaaactaggtgggacttaaatttgnttcttggctggcagatggcttaaaaattccccaaagacnnnnnnnnnnnnnnaacctaaagggcaataattaagaaaatcagnttttacttaa

SEQ ID NO: 327532 - DNA, 485 bp, Homo Sapiens
  misc_feature (430)..(430): n is a, c, g, or t
  misc_feature (467)..(467): n is a, c, g, or t
tgcataagagattttaagagagcagatttaagaaagattcagatgacttcacgtgagctactgaccatataaaccttgcatgtgctggccccagggaatatggaagcttcggaaggtattgctctgccctgcctgggtcccttgctcctattgcagccagaagtcccaaaaaacctcagaacagatatttgcttctaggggatatgaggggaaagcaccgggaattaccatgaggtaatggatacggctatgcaggtggcttcttgatgacaataacccatcctcaggaggaagcttttttttgtttcttccacagactcaaaatagctgagagaatctgactctgcccaaatacatgtggtgtgtgtcattggattgaatttcttttttttctttattacatagccacttactaagataataaatttcnttaattaagcggcccaagccttattccccttagtgangggtaaatttagccttgg

SEQ ID NO: 327533 - DNA, 627 bp, Homo Sapiens
aattcttttgaaagtactaaaatcttttatatgcattgcattataacgtcattgcattgaatactgctggcaataagctagaagttagaaaaactttgctttatggtaaaattaagtacaatgagatttgattccttacattcaagccccactgatttgtctcttgaaatttagatgaggagaaaacacaaattaatttatattttcagctaacaagatggctacatgacagctatggccacaagaaaaatttagacagactaatgtttgagtaaccatggcttcaaagccccttgccagtattctaaattactttttcttcttctccaaattacttgtgatttctcagattttttatttaattattgagtgtacagtacatatgctctttttgtaaggaatctcaactccttgtattagaaatgggaaataacagatgaatctaaatgtcttgtttcttccatgagactgcgccttctttcctttccaattcatgtgctcaacacagcaccaaccaatgactcagaacctcctaaactctgtacaccacatggtcaagcattttctttccaggtagccaagtctgcagtgccccttcctccataaagcctccagaaataatgaccc

SEQ ID NO: 327534 - DNA, 648 bp, Homo Sapiens
atctggtaacattaccaaaccctaaagggcaggcagagttctaattcgttcatctaggtgcacatattctttctttattccaaactatgctctttaataaaaattgtttcatttccttctatatattctgctgctgaaacccaacacatttcactcatgtaagactcaaacgggctacttctgatttcttcttttaacgtttaaatttatatgcttaaaaccatgaactcacatacctccttcaagaggatacaactgatggacaaacctaagtatgtatatgtaaagtcaaacagatgcaagctccctcaggacacactggcagcagtgggtcttgctggttgcagacttttcatcagcagtttgaactggccatctttccctgaagtgagcagcacctcgttgaggacgtgtctgaaaacttaataaatatgaaaacatctactttttggtcattctgtaagcaggtatttttaaacagatttttggctttatctttaaagactaacattttcaaacaaaaatgttttaaatccataaaagtaatagaaaacaaattaaaacttgcatggtcaatcccagatgatcagactagtagaccaatcttaagaggaaaataagttcatccttgtctctgcagaaatgttt

SEQ ID NO: 327535 - DNA, 1080 bp, Homo Sapiens
ttttacaagtgtcattctttttattcttagtttggacagatactccattcttctacactggtcccacggtttctgaagcttcctgtaatgatcagtggttaccttgttgcccaagtaactgcaaatccctcctctacaaagtgtgcttgctccaaggcagtgcaaactagaagttgttacaaatggttccagtaacaaatttgtttggcggccttttcccatgaatgagacagtggttatttttgctaaagcagaaaggaaatgtgatactattgggctgtgttttgccctctggagtaatcctgcttggggaaaatggaggcttgttccagaatgcagaaatccctgttaaattaggcagtcttgggctggaggacgtgtgcctgcctccccagtgcctcacaactcacatctctaaaggccactcaggtgggacaccatcaagacattgaaaatcgacagaaggaaggcaggaaggggagaggatcgaacctgtcaaaatagatattcagaaaatctgtgctctaaaataaggcagcccttccctcacagcacacttattcctaatttcaacaggactcctagtcttgccccacagcgtcacagcctacagcaaattagaaactggggtggggggcggatattattccaccagtaatacccttgggacggggcacacaagatgtttgccctcctacctctctgtcaccttcccaagaaagggtcaagatgaaacagtgtgcgtttatggtattgcgagagttaagtgagctgcggtgtattagaaccttagccttgcgcagcgtcagccgtgtggtaagtgttccataaatcttcgtttagaaaaagtggcaaattccaggctgctagtaaacaaaggagggaagacagacaaaacggaacagcaacaacagaaaacccaagaactagatgcccaacaatctgggtctgtatcttgaaggaatgtgcatcctgtcctctgactgcaaacccaggccttctgtggccccacgatgctgcctcctagccctcctaaggtgggaatggagctttacaccttggtggcaaacagacctggct

SEQ ID NO: 327536 - DNA, 512 bp, Homo Sapiens
ttttacaagtgtcattctttttattcttagtttggacagatactccattcttctacactggtcccacggtttctgaagcttcctgtaatgatcagtggttaccttgttgcccaagtaactgcaaatccctcctctacaaagtgtgcttgctccaaggcagtgcaaactagaagttgttacaaatggttccagtaacaaatttgtttggcggccttttcccatgaatgagacagtggttatttttgctaaagcagaaaggaaatgtgatactattggggctgtgttttgccctctgggagtaatcctgcttgggggaaaatgggagggcttgttccaggaatgcaggaaatccctggttaaattagggcagtcttgggggctgggagggacggtgtgccctgccctccccagtgccctcacaacttcacatctctaaagggccactcaggtgggggacaccattcaaggacatttgaaaatcgacagaagggagggcagggagggggagaggt

SEQ ID NO: 327537 - DNA, 547 bp, Homo Sapiens
  misc_feature (304)..(324): n is a, c, g, or t
tttagagcacttgaggaacctaaaagatgactggttcagcattttgtgtggtagataagaaagaaattatcacaaaaaatcagaaatgaacagtgagagaaaaataggaccccagacagtttattaccttccatttgctgttttaaaagtgtgagcctgccaagtcaacaagtatgcctttagcgcacatgtaaatagcctgcacttcctaaatctcgtgtggcctcccatggttacattcttcaaaggttaactgagttgagaggaagattcagcatttaaaagagaagggttgaaaaagatnnnnnnnnnnnnnnnnnnnnnttaattggcccagggttacttaaataaatcataaccattttgccacattctgtaactgtttagctaaggtcaaattaagtttaccctatggattttgtttcatcttttgtttcgtgtatatactgtttgcctttttcataaaaatcttggatttgttatatattgttcctgttatttttgacatctttgctattgtaaataaattactattttgttttaagtt

SEQ ID NO: 327538 - DNA, 733 bp, Homo Sapiens
  misc_feature (295)..(311): n is a, c, g, or t
cacactttcttttgaaatactttatacatttttacaaataaatacccaccaatgtacacatgcacacacatacacacagcacagattggcaagagaaaaattgataccaaatagagattttaaagtcttaatgaacccttaaaactatgaaatatgtatgaaattctacccttataagtgggtatcctttaatcatgcattgtatttttattccaaaaaataagttttcagattattagagatggaaaatatacatctttgcctgctttacatcgttccccttttcccattttgnnnnnnnnnnnnnnnnngcttctgtaagaaacctgaaaataaactagatctttgataaaataaacaaacaaatattactctaactttgcgtgtgtgatagatatgactcccaattgtactgaatacttgccagaacgagagagatactgagaggggaggctgagactgaagagctcctgctaaacccctcagattagtaagtttttcaaagttagtgacaaagcatgagggaaaattcataacctcttgacaaaataattcctcgtctgcaacaagagtaggacatatgggctgctgtaggatctttctctttgtgtggaacaacactaaatgccacagagggtcatgttgaagacctttataaccacaccacacacaaggcagagaagactctgagcgagaatcttgcagcaatatgccgggcgcggtggttcacggc

SEQ ID NO: 327539 - DNA, 1270 bp, Homo Sapiens
  misc_feature (515)..(549): n is a, c, g, or t
  misc_feature (1095)..(1170): n is a, c, g, or t
tttaccctctcatgcctatgtctgcttttgcttccaaagacccttctgagtaaggactgtcctcagactactggagtcatttagtcacaagcttgcctgaggtcagagctggcaatacctgggagtttatgtcaatcccacagcacccagcaaccttgcctgcaaattatttacccatgattgacaggtgcaggtgtatgaaagtccagctccttgacttgaggggtgcctttgtggtgaattagctttgggaaaagggaatccagaggccaactttgtaaaactccagatagataaatggaaagaaatctttgccttgggaagtccagttgagaaagatagtgatttacttcagactgtggaaagagagactaaaatctttactttctcatgggaaagaagcctatggtgaaagagaaacaaagagaatggtgggaaatagggtgggtctactcagtagctttaaaccattctgtcatattataaagccctggtgaggttttaacacaagtgcnnnnnnnnnnnnnnnnnnnnnnnnnnnnnnnnnnncttcccaggtgggtggaagccactagtagtcttaaaaagctcccaagtaattttcacatgtggctagagatgaaaaggaccatctatctattagaatgtcaagtcgccaacatagaagtgtcccaaatgtacagctacctcatagaaaaggcttaacaccacccattgatggaattttccttcctctcgccatggttttgtttgcatagcatggaaaaaagagaagagaaaaagaggtagatggatagattgaacctataatttgcctatgtagagcagtttctcaaacttatctgaccacaagatgcagtgagaaatatacaattctttgtgatcagtttttaaaaaatctttcattatgtgtaatccaaccttcctagtatttaaataaagcctgtagtagcaagcagtccactatattgatttcacaacccataacttgttcagaattgcaattagaaattttttttggccaggcttggtggcttgagcctgtaatcccagcactttgggaggatcacctgaggttgggagtttgagatcagnnnnnnnnnnnnnnnnnnnnnnnnnnnnnnnnnnnnnnnnnnnnnnnnnnnnnnnnnnnnnnnnnnnnnnnnnnnnatacaaggtatacagttatatttgtttcaatgtgcttatctacagattctctcatctgtgtcctttttattgttttttaattctcacctgatgtgtcttt

SEQ ID NO: 327540 - DNA, 747 bp, Homo Sapiens
  misc_feature (652)..(653): n is a, c, g, or t
  misc_feature (719)..(719): n is a, c, g, or t
attcacagaacaatagtaagggattagtaaagatgtgatagagtccataacaagcatattttgcataaacaaaaattagctttcttgaagaggattccacagaatgagaaagtaacatgaaagataaaaatgatgtgaagagaaatggaaaaataaacttctgctttaataagcctctatgattagataacaagatatttatgtgattacacaggacccaaccattaagacattaaattgattcaggatggcagttcttactaaatacttttaaagtaattttcagcttcactttttcagcttcatcagtctcttattttgtattgtgtccattgctttttcaaatctaaggcatatggtttttatccttatatttatctggaggcacacctttttccttttttacagacttcacatttttattgctctacccctataacatacttgagcgattttctttcataataacagcagtaacaataacaatagtatctgccatttgtgtgtttcatttttcctagagggtttgccaagtgctctgtatgatttattctcatttaatctcccaacatcctaatgagaaaactgaggattaggattatgtgatatgtgcaaggtcaaacagagctaaatggtagagccaaaattttannaccagggtctacttgaccagaatctttgctcttaaccattgcatagcacctgccaccactgcaggnttttaaggctatagcacccttggctacg

SEQ ID NO: 327541 - DNA, 538 bp, Homo Sapiens
ttttttagtctacacatgcattttttttcattgctgtgcacttggactcacttgaagatgataacaaaataaggatgggacccaggcagcccttggaagtttgctctgtgaaagaggatcaagtagatattccctggcaggcttgtttactgatggtgtctgctgggccaatgcaattaatttgcagcctggaaacagcaggtctgtagttctcactccaggagcccctgtctactggaagattggctcccttgatgatggcattgccttgactcttctcaaagtcataactttgaccttcagctttatcttatctcatcaattcaaattgcctggcctaagaagtattcttagtagtttcaattgaaagatctcttaccccaaactctaaaagttactttaaataagaactttatggacactttggtcttatatcctttccttagaacaaaccaaaagctatgttcagttcatctagcctatgagctgctcatggtagactggaaccacttcctttctctctagttttctaatttgc

SEQ ID NO: 327542 - DNA, 667 bp, Homo Sapiens
tctctcaggctcagctttccagctgagacagcagtctcgctgctttctgtgggcagcacatggagaaaggacacgatcacatggagattcgtcagcacgggtaaggcttggctgtggctgatccatcattaccccaaaatgaaacaatccgtacattccgacctgtaatcccatcctgctcaaaaaggaagaaggagaagggggctgtgggatttggaacagtgaggaaagccaaagagcttttattaaaagagctgtttaatttcaactggggtctagaccaacatgtagtcaaaattcccagtgtcaacactgtgtcatttgccacagtctcccactgaaattctcgttttgaaaagtccataaatcgaaaccctgtgttctgttctgcgtgcctaattaggcacaaaaggtttctctctccgtgctgactgatggcaaacccagcatggctgagattcatgtcacaccgacaggctcgcattaacgtgcactttttacaattcggcacgcgaatgtttgggaaacactggaccggagatgcctgggctgtggaccccgcagggggtgggggacactgacttgcggatggggcagcgcctcctgctcacactctcagcatcaggagtatcttaggaacaactggctaactcagttttcaccaggg

SEQ ID NO: 327543 - DNA, 506 bp, Homo Sapiens
gcattctaggccaaggggtcacagtccaccctgaactgtgcctcccagcctgaagccagaaagctcagggaggctagcggccctgcccaggcctcagcactgaccctgcacccctaggcccagctggatgacccctaagagcttcctggaatttggatgcagggttattctgtgtgtgctgcctctcagagcatgtcactttgacgtggacatctcgggtctggttctggtgctgtccctgtctcgccacgtgaccctggataagtcatctctccaggccttgatttccccatctgtaaacagaggaacccaaggaacgagtgggctctaactgctgcagcatatggggagatgccagggaggagctggctgttggcaggccatcccagtccatcagacaacttgtagtggatgaagatgcagtgtccatggccagaagaaactcccgtggatgctcaggccaaggctgccagaagcacgaggaggggcagcattgagtgtcatcg

SEQ ID NO: 327544 - DNA, 454 bp, Homo Sapiens
ttgagagatgtttccttttattgacatatttgtttcctggtattgcagttatgtaaaggttaagtaggattttatatgccaatcatccgtggttgatgtagtgaaaaaggtctggactgttaacattctcctaggaacctctgtggagttgaacttaataacttttcagatctgttcaaaattcacattctgtgatcctgtcaagtaaggcatttggttccagagtgaggaggcagtaagaggtgcttgagccctactcgcatgccagggattaccatctgcattgttggtgcattccaaatctatatctccagcccagaactgagttgacatttatatccatttgggtatatttcaggcacgcaatcctgtttccagtaagttcatcctttttcagaaatatagtcctgttactctgttcattgtcatcccattttctgatgctgagcacagt

SEQ ID NO: 327545 - DNA, 714 bp, Homo Sapiens
  misc_feature (353)..(353): n is a, c, g, or t
tgaccgctgatactgagtctctaactggatcctctcagagcagcagtgattggctgaagtctctgaattctgctttgctgactcctacattattgtttctcacttgtctgaattctctgaaagtaatatcacacttagaagatccctaggtgaccaaaagaatgaatatcttgtgtagagatgtagaatcttcagagaaatactagactttgaaaaaaaatcaactgctctttggctcctataaaaaacacaagacaatcaaagccatcgccgaggaggcctgagtagggaggaaggtgtgtcatctttaggcttttcctcttttctggatagtgagtgtgtgggaaggcagngttggcacaagtgccttgggtgcaacccaacgacagtacaaatgttgagttggcatccgagatctgatcccttggggacttgaaaatggcataaagactggaggcagaacaatctcgatgggtttcagagcaaccattctgtcttctggccgaggtcttaagaagtgtgtctgccgttcacgcggtctggagggacaagtgttcttcacaaatgcaggcactgcaggattgggggccagcttgttgggttttctggtctgtgaggaagcccccacttgagcagtatttttctggggaagaggtggttttgttacagtctctgatagattagcactggctttagtttctcgattcaggaact

SEQ ID NO: 327546 - DNA, 587 bp, Homo Sapiens
  misc_feature (177)..(203): n is a, c, g, or t
  misc_feature (555)..(555): n is a, c, g, or t
  misc_feature (561)..(561): n is a, c, g, or t
aaaagaaatttgattttgctacagctttttggccaggagtaagtgaggatgctgtttcgaaagctggtcttgcatcttaagcagtacggtgtgggtcttaggggctggagtgtatcttgcaggaaacacagagtaggcaagaatgtgaggtggtgtaagactagtttgtctggttcnnnnnnnnnnnnnnnnnnnnnnnnnnngtaggaaatctaacccaaagcaatcaatctttgagaagagcccagcacacttcccttccaattgatttgtcctacacccctccatgagcctaagcattagagcagaaatgactgagggtagcatccaagccactgggccaaggggcactggtacgatgaggataccgtgtcccacaattccagggtagtctgggaaaaacaaagcagagttcctgagaagaatgcagtagtggctgacagaaccagaaagggtgttgtagtgatatgtggccatgacatcagaagactaaaatgaggctatggatattccctagcaaatgtcttggggaacagaggccaaagccgtaagctncaagantttaatgggaattgacttacacctca

SEQ ID NO: 327547 - DNA, 639 bp, Homo Sapiens
  misc_feature (536)..(536): n is a, c, g, or t
  misc_feature (562)..(562): n is a, c, g, or t
  misc_feature (588)..(588): n is a, c, g, or t
ttcactcggcacgcactaggcacagaataaatgccattcatccctacttttacttcagggtacattttagagatctaagatttggtgtatctttcccattatccattcttattgcctcaaggctctcctcttataaatctagtggtatgcattactttgggggtaaggacaaatttatccagaacagagaagatttagttcagtctttagttttaaaataagcatttttaagtaatagcagagacaaaagtctgaaagccaacatagttttaatttaaaagaaatttgattttgctacagctttttggccaggagtaagtgaggatgctgtttcgaaagctggtcttgcatcttaagcagtacggtgtgggtcttaggggctggagtgtatcttgcaggaaacacagagtaggcaagaatgtgaggtggtgtaagactagtttgtctggttcaaaaagtaaaaaagaagactgaaaaaagtaggaaatctaacccacagcaatcaatctttcgagacgagcccagcacacttcccntccaattgatttgtcctacacccctncatgagcctaagcattagagcagaantgactgagggtagcatccaagccactgggccaaggggcactggtacgatga

SEQ ID NO: 327548 - DNA, 654 bp, Homo Sapiens
aaatgggaaagagactccagagaaatggggtcagtgttcctacaagcatgtatttttgaggtagtctgtattagattttcctgaattccattcagtaatgctcaagtgtttaatgacctcataatgtgttcactttgaatttaagggtaattgaaagaagccttctttagatttctttccatcttctgtatcttctctgaaatgtttagcctagctgttctttgtcctgcagttagtgacagaattcttagggagcttgtaaaaaacacctactgtgtgtcattgttggtttagagacttaactcataaatcagctgtctctaggctagtttcagaatttaggctttattcagattaggaaataattcttggtttcatgtttcaaaaacatagccaactaagtgtttctcagatgctgatcatgaattctctttagtattcacatgacattcttcacttcctcttccattctgcacgctgcattgcccattgcacctcaaaatggagggagttagaagaaagaaaaagaactgaaactttagctgagtgcaatggtggacgcctgtagtcccagctactctggaggctgaggtaggaggatcgcttgagcccaggagtttaaggctacagtgagctatgattgcagcactgtac

SEQ ID NO: 327549 - DNA, 408 bp, Homo Sapiens
  misc_feature (21)..(21): n is a, c, g, or t
  misc_feature (36)..(36): n is a, c, g, or t
  misc_feature (54)..(54): n is a, c, g, or t
  misc_feature (61)..(61): n is a, c, g, or t
  misc_feature (66)..(66): n is a, c, g, or t
tgggcctgggcaaacccctgntaaacatttggaaanccctcctccaacaaacantatgganaaaantcctggtccttaattggatcccccacccaccctgaaaagtaagaaccccaggaaaactcccctagcaccctatgaaaaggggccatataacataccctttttcaatcagatgtcctttgtatgcaacttcttttttgaattcagcaatttagggaggcatctcatgcagaatccttttgttgctgttccggtgcgggtgggggcattcttctacctattactgctgcagaagtggcaaaggtggggcagggaggcagcagcactttcttccagtgccctgtgtggcagtggagtgtcagcagcttcttccttagtccaattctaaggcatggttttacaaat

SEQ ID NO: 327550 - DNA, 756 bp, Homo Sapiens
  misc_feature (673)..(673): n is a, c, g, or t
  misc_feature (683)..(683): n is a, c, g, or t
tacagttttgagtatatggctgattggttttggtcagctactcaaaactgtgaagagaaaaggggatagaactgagggatgcctcccagtagtttctctcttatttctttcagtcttcagaaggggtcagggataggctgagaaaaaaggtccccggaaatggtggtccatttggttttttttaaaccaaaaggcggcatctccaggttcaaccaagagctggttacattgctataagtcagggagagtatgaccccagggacaattctgaattgttcagtaaattttccttttcctttcctttcacgggtgacggcatataaatcagaccaagaccgaagtttaaattatgtctctttcctcagtctagcttgggaacaggggcctgctgtaccctggcttcatctgtaggagatcagggcccaatgaatcttaaggttacagggagttgaggggcattgaggttcagttggcagaggacattctgggagagaaggatgcaggagagagctgggagcaggatatggaattgctatggggttttctgggttaaaaacatgtttctgaaggcatgatgtaaaagcctcagtggtttgagtgaggtatgaattatttcactgttttttggcgtcttccttaaataagcagaccatcatgcatctgagaattttgntcctttttgntctgggtgtccctttaggtggattaatttggggatatccgaggagccccagagggccattgtaattcaagatc

SEQ ID NO: 327551 - DNA, 747 bp, Homo Sapiens
  misc_feature (12)..(12): n is a, c, g, or t
  misc_feature (347)..(347): n is a, c, g, or t
attcggcacagntgagccactgactccagcctaccataacttattaaatcagtttcccacacttggacagtgaggttttttccaattttatttggtattattaaaagtgctgttttaaacattcttgtgtatacacgtttgtgtacatccctgattacttttttaagaataattccctagaaggagaattctactttttatgccattaccaaatggccctctgaaaagtgattgccccagcttagtcttgccacatcagctttaaaaagtgacattgcacctgggggcagattattttctcactgcctcacttcatcatcaatagctggcatttcaaggggaccggnaaagcttcagctttagctgtgacttttttgtcgtttttctgaaatcaacaaatgaaaaccaggctccactgaaggacctcccagcacgaagcagagagttacctgccctaaggtgagggatcataggatgtcattgttgtcaggaagtagaaggctctatttttcagacctcttcacctgccctcctgtaggtattggtgttcctcagagccaagtacttgcctcttttcttttctgtcctctccctgagtgatctcactcatccttgagtctcacctaaccttataaactgactcccatatccaagtatccggcccagactcctctcaagagccacaggctcagacatcagaccaaatcacctggacctcccgtttggtggcccacagtcaactcaaag

SEQ ID NO: 327552 - DNA, 896 bp, Homo Sapiens
  misc_feature (345)..(578): n is a, c, g, or t
  misc_feature (730)..(730): n is a, c, g, or t
  misc_feature (770)..(770): n is a, c, g, or t
  misc_feature (772)..(773): n is a, c, g, or t
  misc_feature (802)..(802): n is a, c, g, or t
agatttttttcacacacttctcaatgaaactgatgaatcaaacataaaatgattgttaaaaatcaaacaattttttatctttcataaagctagcattctgtttccagtaaatatactttatattcttttccaatacatggaatatttataaaaattgtccatgttttaggccacagagaagtccgaagaaactcctgaatcttcatcacatggactacattctctgatctctcttgccttaaaattacacatcaacaataaagtcttctttaattccatacatttagaaattgaaggaaaatactttttctttttgttttgagacggagtctcactctgtcaccnnnnnnnnnnnnnnnnnnnnnnnnnnnnnnnnnnnnnnnnnnnnnnnnnnnnnnnnnnnnnnnnnnnnnnnnnnnnnnnnnnnnnnnnnnnnnnnnnnnnnnnnnnnnnnnnnnnnnnnnnnnnnnnnnnnnnnnnnnnnnnnnnnnnnnnnnnnnnnnnnnnnnnnnnnnnnnnnnnnnnnnnnnnnnnnnnnnnnnnnnnnnnnnnnnnnnnnnnnnnnnnnnnnnnnnnnnatgagccgccgcgccaagccaggaaaatacttttataaaattcatggggttaagaggcaatacagtaaaaattacacggtagaaactgagttacccagtgcacaccaaaacttgggtagggagaatatacctaaagttgtccttagaagganaattgtagttctgtatatcaacatattaaagatgaaaatnanntttaaaacaatagcacaaaggaagaaganaataataaaagcaggagaacaccttgttctatcatatatggtattctgtggtacatgatattctatggtatagaatgagatgttgcccaaatgt

SEQ ID NO: 327553 - DNA, 1033 bp, Homo Sapiens
  misc_feature (808)..(885): n is a, c, g, or t
caggacccctgggcttctccccagctttttctgagttgagtcagacatgtagagtttgggtcacacaggcaagaggaattttccctcggccttactgacaaggacaccaacctagggtgcaaacagatggactatggttcaaggacactggaattgaggagctgatcaaggctctcttcagccttgctctgtccctgcctcttatcagagcacaggtagacacacgggcatagccagcccactcctactgtcacaggcgccccaccattcaaccttccgggaggtcagggatcttctatatgaggcgagtgggtctcagtctgcttgaatggtgatgagattctgctggatctcagcacgctgcaggtgtcttttgagagcattcagtaggacatggtgatccctatttcagcctctaagatgactggtattctatctgaaatgcagagattaagccaaatacctgatgtattgtgaaagccactgattttaagaatggagagaaagggattttttactgcatccctctgtatgaatatgaaatcagagaccagggcatgatgttgctaggattagagcctctcagtctggcctcttcacccaagtgcaagaactcagtctcttactgttcaaagaaagaatcttaacagttgaattatggagggaaattcccttttgccccaagcgtttctatatttaaagcaatatcccaggagaatatgtcagacttaggatgataccttcagccacttgaagaagaaatagaaggcgctcattccaatatagtctttatttcccattcagatannnnnnnnnnnnnnnnnnnnnnnnnnnnnnnnnnnnnnnnnnnnnnnnnnnnnnnnnnnnnnnnnnnnnnnnnnnnnncatgagtggaaaattccacacctaacaaacacatttgctttcttatggttcaatgtacacaaactgttttatatagaaaatgatttcaaatatcataaaattaccttcaggctatgtgcataaagtatatatcagccataaatgaaaa

SEQ ID NO: 327554 - DNA, 897 bp, Homo Sapiens
gtttgttttttctttttaaatcacttccctataagccctcagcaattatttctagttttgttttggaagaaattttaatgacattcactgcaactcccaagccccatcccacagcttgtgaggggctggattctcatccactggacttggcaccaatgccctgtaagcatgtgccactctacgatctttcagtgggttttctctgctgccaaggggatattcagtgccattttgccacctgcagatcaagagctctcccagactgacagttcccaggacggaaaagccttaatacaggcacagccttggtagaaacagtgagcccttcacatggagatgaagtcttaaaggtttgagcaccatcttctgggtcagtttttggcttctgaggccgactctgctttagaaacttcatttatttcagaatggcagaaccctaattgacaagctcaagtgatctgcgtatcaaaatgtggacaggaccagaagcaggtgtagtcggctgggatgagctgtcccaggctggccggagctggcgctcgctgtggaaaccgtcggggctgcctgcacaaagccggcagatgccagtcagtgggcgtgctggtcagtaaggctgtgccttctgcgcttcaagcagggtgagacctgaccatgtgggagcaataaaagcttccatggtgaccaaacgtgactcctgcctctgtacatggcaatgtgagatgtgcctggaaggaaggggtggccccatctctgccagtgtgggatccaaccaggcactcccctccacagggggtcaaaccacacaaggtggcagacagccctgcctggtgtgtaaacaccgcaccagcagactccaacctttggcatggaaggaaaagaagataaatgctagtcatt

SEQ ID NO: 327555 - DNA, 750 bp, Homo Sapiens
aggaatccagttttttgtgatttgaatagtcccaaaaatattggagggtttcagaagtgataaagaaaattgtaacttgggttgcctaataaatgatcatttttaagctctgctgatggtttggcagttcacaatgattaattagaaaccagtttatctaactagctgtggcatctttcttggtgttgagaatggaaaagacttttcagacctactgggtttggaagatctttggctagtgatccctgaaggcatgccgggtgtgtcagtacatttggcttctatagcatctatgatctaaagtgatggttttctgaatatgttgttgtggtttgaaacactttttccaattaagcctcatagaatagggaatataaagaacagataaaagctgtttgaaaggaaggacaggaccatggccccaggtcttatacctttcccccgcctattttatgaaggtcctttcagtttcccctctgcagataatttaaaaattactctagagaaatctacttcaaggcagtaacagtctcctagaaaagtaactttcccagagagttaattgagtgacaattttttattccaaaaagaagcagcatagtttctggttgtcagtaaatgtttaatacactaatgatacagaaaatagattgatatcatctgttagttattattcaaggacacatttgtcatgcaaattacttttgcccagaaaatgcttcgtctgctattttagtataggtggaactg

SEQ ID NO: 327556 - DNA, 462 bp, Homo Sapiens
  misc_feature (15)..(15): n is a, c, g, or t
caaaagtcccagttnaaagggaggagctttccccagcagccctggggtctctagccccggtccaccatcacagcacccttggagtgagtgtcagggagtgtgggatatttgcccaaatccagccaccacccctgtccgagtagagcccacacagtattggaaagagaaatatagccactgctttcactcctgggagtaggggtgccctggttgctttcaccagcctgcaagagtatagtcagggtgaggtgctggagaacatcaacaacgatctgggttcaaatcccagctttgccacttattagccatgttgctgtgtcaacttctctgagcttcagtttattccactgttgtgtaaagataatgcctcttagggctgttgtgagcattagcacagtgcctggcatatagtaaatactcaatatatggtagccatattataattgtaattgttactaccaa

SEQ ID NO: 327557 - DNA, 711 bp, Homo Sapiens
agcttcttcttattattatttattgctgttgttatcccctctgttcctgctacaggaaattctttccatgtaaaattcattcttgtccccaggcctagttcacagccatactgaatgcaattcagcatgtattcaccatgctctgttagtggtgtccagatgttgcatgacgggggagcacactcacattgtgtctgtgtgactcatgtccctggagttatgcagcgcacagcctacatggctgtacaggggcagatctgattgggatctcctaaggagcagggagtgagctgcccttctttgtacctgcgcctgctctgttgctgccagttgatgggtgcctgtcagctggtgggcagccctggagtgtggatggaagaacaggcatgcacctggttttattgaggccaggggagagctggtgtgggagcctcaggccccagagagccctcgggacctcctgatggacagccagactccaaagctatgagaagtacagaaagcccacagttggtttccggtcctgggactctaacctgtgcttggttgactctgcaggtctctgatgagggggcagctgctccctggtggggctcctctggggacaggcagcttcccaagggtgggcgtgttctctcctccaaattccccttccttccatttcctttccctttcagttccaattccttccatttaggctcgtgccgaatt

SEQ ID NO: 327558 - DNA, 351 bp, Homo Sapiens
  misc_feature (16)..(16): n is a, c, g, or t
cccctggaaatgtggnaatggaaaaaaacaggcatgcaccctggttttaattgaggcccagggaagagctggtgtgggaagcctcaaggccccaaaagagccctcgggacctcctgatggacagccagactcccaaagctatgagaagtacagaaagcccacagttggtttccggtcctgggactctaacctgtgcttggttgactctgcaggtctctgatgagggggcagctgctccctggtggggctcctctggggacaggcagcttcccaagggtgggcgtgttctctcctccaaattccccttccttccatttcctttccctttcagttccaattccttccatttag

SEQ ID NO: 327559 - DNA, 684 bp, Homo Sapiens
  misc_feature (369)..(369): n is a, c, g, or t
tttgattggagccacattttaagcaaggagaatggacttttgtaccactgtattaaaactatatttctgtcgttcataaagtttcttcctgtggcatgcaaaaggccagaaaggggactggtattttgaaactgtggaacaatgcccttctgtttctgcccccttctcgttactgtatgtagtgattaaacaaaaatgtctgctttagtcaagatgggctacagggagagactgctgggcttcttttaaagcttttgaagtccgcagccgtcaggaaatctctgatcccctaattatatcattatcagggcacataggtttcggtatctgtggacttcatgtcaggcctcagtcccctccctgttctgncccgcctttgatagggccaggaggctcccctctgcaagccacaagggctgttatttagggttaattacacccttccttccaaaataaataaatactgtagcacatcatcctcgctgggctagcttttgctttaccctcattgcctgctacattggcaatttaaagagaagtagggggctgcaaagacttaaacttgcttcctactttaaaaaaattatctgttcacagaacagtaggtagatttcacagcagccgggaggagtaggttttgtcagcgtctcactgccactcacctcatattttacaaacaggacc

SEQ ID NO: 327560 - DNA, 423 bp, Homo Sapiens
  misc_feature (26)..(26): n is a, c, g, or t
  misc_feature (45)..(45): n is a, c, g, or t
  misc_feature (53)..(53): n is a, c, g, or t
  misc_feature (110)..(110): n is a, c, g, or t
ggtttaaaaatgaatgaacttgggtncaggtgtggtggctcatgncctgaaancctagaatttggggagagtgaaggcaggcagattgcttgagctccaggagtccgagnagcggcctgggcaacatgatacgaacaagatatcagaaaaatataactgagttgcagaccacatccacaccatctgaacctccatgagaactcagattacaggactttaccatttaatcagtcttctttttaacaacactgcatatctgggatatgtttcccactattaacccagttcctacagtgaatgtgagctttatctcagctatattgacatgacctggaactctgacctggaactctttagccataacaaacatgtgaatcagaaaagttgactagtgtttgttagtgttgacattatttggtctat

SEQ ID NO: 327561 - DNA, 717 bp, Homo Sapiens
  misc_feature (694)..(694): n is a, c, g, or t
  misc_feature (702)..(702): n is a, c, g, or t
aagttctgaaaatctccttccagggccccagctaactaatgccataggtgagattcaaaccttcatccttctgtctccagggcctgatctttaccactgcaggggctgcaggccgttaagtggacaggaagtggccccacatagcccgagcagggtctggaagcatcctgtgctgtgcacacctgctctctcctctctcccaggcaggcagctgcaggcgctctcctccttctctgcctgtttccctcctctcttcctttccaccctggtgtgggttctcctgttctctctgtgctcttgcatttcttctcattccctttttcctctatttgagcagagcctggagtttgagactatggaatccaacctccccattgcacagatggggaaactgaggcttaggaagagaatgaaacttgtggagagcttatacagagcctctgggggaaaaaagagcccttatttgtggggtgagattggggggttggaccagagtgatgtcctctctcagctatcacatcacaagataatgctggctccaaacttcctttctgtgcctcatcatgcaaggatcttttttccctcttacaaaaacaggtaaaaggcctcacccagatgacccccatccctcataccatggagtcatgagctgtctgggaagaatggacgtgctgggaccaactcaagaccttgntttgctgncttcatcatcttacc

SEQ ID NO: 327562 - DNA, 682 bp, Homo Sapiens
  misc_feature (329)..(599): n is a, c, g, or t
  misc_feature (613)..(633): n is a, c, g, or t
atatgaaattatcaacaactgcttttaatattcagatgtcaagaagatgaaaagcagaaatacattttgcaaacatgtagcactccataaatggaaatcatgtatttcctctaatatcccaatttttctatattgggatcttatatggctgtttctatatggctattttgtcccaacttgctgtacaagaattttccccagccaccttagaaaggttggatgtagttcactccaagtttgcagttcactccaagtgtttcagtaccacagaaagctccatggaagcctcaaatgtacgggctaggcaatagaagcagggaggtaggatnnnnnnnnnnnnnnnnnnnnnnnnnnnnnnnnnnnnnnnnnnnnnnnnnnnnnnnnnnnnnnnnnnnnnnnnnnnnnnnnnnnnnnnnnnnnnnnnnnnnnnnnnnnnnnnnnnnnnnnnnnnnnnnnnnnnnnnnnnnnnnnnnnnnnnnnnnnnnnnnnnnnnnnnnnnnnnnnnnnnnnnnnnnnnnnnnnnnnnnnnnnnnnnnnnnnnnnnnnnnnnnnnnnnnnnnnnnnnnnnnnnnnnnnnnnnnnnnnnnnnnnnnnnnnnntcgactgtaagacnnnnnnnnnnnnnnnnnnnnntttaccaatataaaatgctcaaacagctaacaaacatgttcaattccat

SEQ ID NO: 327563 - DNA, 749 bp, Homo Sapiens
  misc_feature (290)..(319): n is a, c, g, or t
  misc_feature (556)..(556): n is a, c, g, or t
cttttggctctcctctgaggagtggggggcctagcagatgtgcccatctggagcccaagccagtgcttctagagcatgcttcaggtaaacaggactatggaattttccagatggctctgagagagattttcctagtaactgcttgaacttctctgggtctgttctcctgaaaggagacagttttactgggtgcgcacagctctgtgttgaaggggtggccaagagggaagctgtttgtgatggggatagggtagggagggttggaacttgtacctatgggccaggatgtnnnnnnnnnnnnnnnnnnnnnnnnnnnnnntagcacatgaggctactggtgtaagacagggttgggggtaggaagagaagagagtagtttgtggctgggatttctatttgtaccgttgcccctgggctccaaaatagttagggggcaaactaacagagatactcttttccagtctttctggtggaattttgctagagattgattgcattgaatttaatagatcaatgtgaaaagaatagctatcttgacaatattgagtctttcaantccatgaatatgaaatgtctttcccatttaggtcttcttcaatttttttcaatgatgttttatagttgtcagttgtaaactcttgtatttcttctgtatttcattctcttcaccgtcattgtgaaggaaatgttttcttaatttccatttatgattgtttattattacatagaaatacaattaatttttgtaa

SEQ ID NO: 327564 - DNA, 726 bp, Homo Sapiens
  misc_feature (170)..(262): n is a, c, g, or t
  misc_feature (433)..(462): n is a, c, g, or t
  misc_feature (475)..(475): n is a, c, g, or t
tcaatagacaaaaattaattgtatttctatgtaataataaacaatcataaatggaaattaagaaaacatttccttcacaatgacggtgaagagaatgaaatacagaagaaatacaagagtttacaactgacaactataaaacatcattgaaaaaaattgaagaagacctnnnnnnnnnnnnnnnnnnnnnnnnnnnnnnnnnnnnnnnnnnnnnnnnnnnnnnnnnnnnnnnnnnnnnnnnnnnnnnnnnnnnnnnnnnnnnaatctctagcaaaattccaccagaaagactggaaaagagtatctctgttagtttgccccctaactattttggagcccaggggcaacggtacaaatagaaatcccagccacaaactactctcttctcttcctacccccaaccctgtcttacaccagtagcctcatgtgctannnnnnnnnnnnnnnnnnnnnnnnnnnnnnacatcctggcccnataggtacaagttccaacccttcctaccctatccccatcacaaacagcttcctcttggccaccccttcaacacagagctgtgcgcaccagtaaaactgtctcctttcaggagaacagacccagagaagttcaagcagttactaggaaaatctctctcagagccatctggaaaattccatagtcctgtttacctgaagcatgctctagaagcactggcttgggctccagatgggcacatctgctaggccccc

SEQ ID NO: 327565 - DNA, 755 bp, Homo Sapiens
catttctcaaatatttattgatgcttcctcaggctgcaaaaacagcttccagtttggtggaaaatgcgagaaaaccaaacagctccagtcctcagtcacctaaccttggttagggagagaagtggaggcatatcacggggacgcaggagcagggattttggagctagtggaggttaggttgggtctgcgtgagtggagttaggatgaggtcggcatggaggtcccagagcccaggcactgggctggacagggctatgttgggccaagtgtttctgagactcagcagcggtggatgaggaagaaaaaactctttggcaatcagctccaggagccagggaggtgagcagcccccaggatacgacatgctgcaatgggcgcggctccagggcactgggcggggtcagcagttgtgccttttctcacagatccagccgtccttctcgctgtcacacggtgcgtcgttccacagccccgtgtgcagcatcatgacacagttctcgcgcccccaagcgtcattgggctctccctggttccagtggctgaagctgagagagactccgtccacccactggtagccctgaaccttgcccagatggcgcacagccctcaggcccagccagtaaccacggccacgcgtgttccgagtgaggaagccctgctcatccaggcccccaacgatcaccaggtgcgcgctggcatctgcgcagtgatcctgcgccgccgcccacgtcgtctttggcacagagaaaaagtag

SEQ ID NO: 327566 - DNA, 689 bp, Homo Sapiens
ttaaagagacttagcacatttattcactcacagaggtgaatgaagggctcagggtttgaactcgatgacactgatggcgatccgggctgcccgctgtaaggcttcggccacttgaggcttttcgtaagtctccacctccatggcacggaaagtgggcacgtgcgtctgcagggccttgcggccttcgggggcttctgccagcatggtaagggccttggtggcattcaggcgcgctatggtcatgggggagtgcagcagctccaggagcaggccgatggcttgtgcctccagggccgcatacttcccttcagtgatcactgtggcgaacatcagggcaaccggcagcgttagacttccacatgctccactgggtctttcagcagatggaccaggatggggatgacgtcaaaatgacacacctgtttcttgccctctcgagatatgctgacattaaggagcgcacgggcggccttgctgcggatgttctggttggcgctgaggagcttctgcttcaggacaagcaccacattgctgcccagggcctcggtggcatcctcctgcaggcagaggaccagtgtgtccaggatgaactcctggaactcctcctcctccgcctccgcctgcagcttccataccagtgaggaaatcagacctttgctgatgatctcttgggcccctctaggcacctg

SEQ ID NO: 327567 - DNA, 768 bp, Homo Sapiens
  misc_feature (32)..(32): n is a, c, g, or t
  misc_feature (35)..(35): n is a, c, g, or t
  misc_feature (43)..(43): n is a, c, g, or t
  misc_feature (49)..(49): n is a, c, g, or t
  misc_feature (96)..(96): n is a, c, g, or t
aagggtaattgtggaatgagaatttccaaatncancatagtanctgaanccctagaaaccaaagtatgtgtctgggatcccctgcttgcagaaaancatttatgaagctagtaaggggcgtcttcaccagcagcaggccaaatgccggcaagtgctctgtaggaggggccacttaggaaagtaccagggctgccttggagtggagaaggaggagtggccaccagagggtatacaagtggttgccctttaaaagaagaggctcaggagcagacatgtctttatgctagcctgaagtcatgcatgtgtggctatacatagcctgtgattcagaagacttttcaactttggttttcataaaaatggcaagcaatgatggattacattttaaaagtgaaagcccttgtagtatgagtaatgattcagttttacttaataaaaggatctccgtattgctcagattttcagagaaacaaaatggtcaactggtgtgttattccttccttgtccctctgataacggtactgacaaactggaaaataatgaaatattagagcaaaagagaaatgtgtaataacacaagagaagtctattaggatataaggaagataagtagacagagcaggcttaaaatgaagcttgaacaagccatctgcagaaacagaaaacagggtagatgggacacccaaacagggtgccacagctttccaacttagatccaggttatgagagaatgagccaagaacacaacctaaaggttttcaatttgag

SEQ ID NO: 327568 - DNA, 359 bp, Homo Sapiens
taagctcaggcaatcctcccacacttcagtgccctccaagtagctggaactacaggcacgtgccaccgcgtccagctaattttgttttgttttgtttgtaaaaatgaggatttgacatgttgcccagggctggtcttgaactcctggggctcaactgatctgcctgccccagccttccaaagcgcttgggattacagggcatgagccaccctgcccaattttacttaatgcaaaaatggggggaacatttggcaaaagggttccttttgcccagtcattaggaggtcactcacttttcccaggcaggccccagcagtatttttaattatccccctacttggggactctgatagggggta

SEQ ID NO: 327569 - DNA, 500 bp, Homo Sapiens
  misc_feature (88)..(196): n is a, c, g, or t
taagctcaggcaatcctcccacacttcagtgccctccaagtagctggaactacaggcacgtgccaccgcgtccagctaattttgtttnnnnnnnnnnnnnnnnnnnnnnnnnnnnnnnnnnnnnnnnnnnnnnnnnnnnnnnnnnnnnnnnnnnnnnnnnnnnnnnnnnnnnnnnnnnnnnnnnnnnnnnnnnnnnatgagcaccctgcccaattttactgaatgcaaaaatgggaaacatttgcaaaaggttcctttgcccagtcattagagtcactcactttcccagcagccccagcagtattttaattatccccctacttggcactctgataaggggtaggtgaaaggtatgtcttccctttaaagaatggtaatcatgaaagagaaggtgtgaaaggaaaaccagcaggtcacctgggccataggcattttctcaggacggtcagtgttagaactgattaacactcaagatctaagaatcggcaattaattcttcc

SEQ ID NO: 327570 - DNA, 479 bp, Homo Sapiens
  misc_feature (430)..(430): n is a, c, g, or t
  misc_feature (448)..(448): n is a, c, g, or t
  misc_feature (453)..(453): n is a, c, g, or t
  misc_feature (468)..(468): n is a, c, g, or t
aggtacttcaattggaattgtcatgaggcagagttttaactggagaaattgaatgggtttcaaatgaaacttagtctttcctattgtttttaaggtctccccaaaccccttcgaagtgacagccgtaatgcaaagggattgctatgggcgatctcatttgtttcccggtatccccgagaggtgggtactgtgattgctctaactccgtcagagcgcaggcttatagaaggcactgtctccgagctgcgcccctctccccgccattctattaattcccaatgaagaaacgtaaggtgttgtgtatttcagcttcaactgaaggaggctggtttaaaaaaggcaggaatcttcagggcccacttcctatctggatttgagttaggaatttggcatttttaaataggacttgtgtggcacttggacgatttgnaggaaggccctagttccngaggnccatttttattctgnccctaggtggg

SEQ ID NO: 327571 - DNA, 458 bp, Homo Sapiens
cgattataagaatttttatgaaatttagtgcacacaaaataatctttagatgtaattccaaaagtagtgtattaagttacattttatttagttagagcactccattttgttcttttaagaggagaacaatatataggttttctttagtgatttgttcctttcactttttataattgacataaggcatatttattgagtcaatttgttcagctaagtactaggggaggcttcattagtcatgagggatgtttttatataaatgtaggcaaacatatattacagttttcactgtgtaatagattatccataataattcataaatattcctgctgaagttagtttgtaacttcaagtcaaagatgaaaaatatcaatggtgaagattgattgttcatatagagaggacattttttttccagactgtaaaactgaatcttgttgaatttaaagagaaattct

SEQ ID NO: 327572 - DNA, 563 bp, Homo Sapiens
  misc_feature (312)..(312): n is a, c, g, or t
agagagaagtaaatgattttactttattaaaaacaaaagaaccaaatgttataaatatttgctgaagtttatacattttaatctgcattaaggtaatggttagttggtcaatgctgcctctgcctcagtctgcagcgagaacattgtgttttcatttggtaaatacagttgagcatctaccggtgtgccaggtggctggtattaggtgctaaggatgcaggggtgaacaaaacaggcccctgcctccatgcaattctcattctctgggtggcacagttttatgcaagttatcacatgtgaaagaatttatangtttttattatgcaagttttcaaataaatccaattgctgttatcttttgtttttcatggaatatctcgcatctcagaacacagtttgggaatcatattttatttagtgttttcagatgctatctattatatctaagatatttcacatttagccattcgttttataaaaaactccaggcaaactcagctggacttttcttgctttaataacagctttattgagatacaattcacatatcacgaaattctttt

SEQ ID NO: 327573 - DNA, 959 bp, Homo Sapiens
  misc_feature (665)..(665): n is a, c, g, or t
  misc_feature (833)..(899): n is a, c, g, or t
ttaaaattttcattctttaatctcaatacattatatagtcacacgtttcagatcatagattgtatcacataacaggaattaaaaactaggataaaaaacagtattaggaagaaaagaaaaaactgaccaaattaggaactttagtgttagttacatgtgaagttctttattatgttgtacagttttacaaatctctacaaagaaaccataagaaaaatattctattctagcccaattacagaaagaaatttaaggtagaaactactgaccagctgattaaaaaatacttctgttgctttaggacagttgggtattcaactgggggaatttttcccccgggggaccatatggccatatctgccatatatttttgatgaccaaactgcagaggaggtggtgatatgtgagctactggcatccagtggatagaggccagggatgctgttacaaatcctacaatgcacaggacagccgtgcataacatagaattatttaaagtatgtcaatagtgctgagggttgagaagttctgttccagggtacaaaacctacaatggaatatctattattttagatacattttccagcttacagggagcatttcattatacaaagttacttttaaatatataatagcatgttttgtaaaagaagacacaaatcagnatgctttgcaattaaaaacatttaaacctcaaagagacaaaaacattttcccaaaacagcaatcaaatgaatttctagctaaagttcttacaggaatatgtttattttaacttttaaactgaaagcctgtatcactaaaaccaaaggcctacagatgttagcatatannnnnnnnnnnnnnnnnnnnnnnnnnnnnnnnnnnnnnnnnnnnnnnnnnnnnnnnnnnnnnnnnnntaaggcagaaacacctactaaaaaaagaagagccccaacagttatttagctgataggttt

SEQ ID NO: 327574 - DNA, 752 bp, Homo Sapiens
  misc_feature (35)..(35): n is a, c, g, or t
  misc_feature (59)..(148): n is a, c, g, or t
  misc_feature (487)..(498): n is a, c, g, or t
tcttcctcctgtaggtttttggtccttgagaccanctagtaaagaccaaagcatgtagnnnnnnnnnnnnnnnnnnnnnnnnnnnnnnnnnnnnnnnnnnnnnnnnnnnnnnnnnnnnnnnnnnnnnnnnnnnnnnnnnnnnnnnnnnctactggtcctgatctctggaggacattaatcaaataagcactaaaaaattatcaactgtaataagcgttatgaaggaagagtacaaggacacatgagatttttaaaacgaagagcgcatagaagggatagaagagctgatagaagtgatgatcccaagccaaggaagcagcatatgcaaagactaggagccggtacagtcacatgatccagagactggtgagaagaggcagtgagccagctggagccagatcatccaggtggcagggcttgcagatcctgtgactagcgtggtctctaccccaaaagtcataataaatcatcaaataattgtgtaggnnnnnnnnnnnnaggagagacaattcttgttcatctatttgcttaaatccctcttccatttctgctcactcaagtgaactttccttattctttgaccttccctataggcccacatcctttactttgcatgtctgtatctttgtcttattcagcaaacagccttcctacaaactgtctcccgtgaatcttaaaacgcctggcttctccctttgcatagctgtctctaatattgctgagtaactgtgggccttcaggccaattcctag

SEQ ID NO: 327575 - DNA, 407 bp, Homo Sapiens
  misc_feature (124)..(124): n is a, c, g, or t
ctggatcatgtgactgtaccggctcctagtctttgcatatgctgcttccttggcttgggatcatcacttctatcagctcttctatcccttctatgcgctcttcgttttaaaaatcctcatgtgntccttgtactcttccttcataacgcttattacagttgataattttttagtgcttatttgattaatgtcctccagagatcaggaccagtagtgttttgctctctcttgcaatctcagtggttggcagggtgcttggcacatagtaaacactaaataaacatttgttgaatgaatcagtgaactacatgctttggtctttactagtttgtctcaaggaccaaaaacctacaggaggaagatgtttgttggactaagagattagcaggaaatatgagagctttgag

SEQ ID NO: 327576 - DNA, 497 bp, Homo Sapiens
atgagctgctgtgcctggccagaagatgaatttaaggagaaaagaagtaatgcattttagatcctggaaggctgatgtctgaaatcatttgaaaagcagcaatagaaggtggcttttgagtcttgcatcctggggcagactgtggccttctgcataactacctggctgcatgttgtagagtcctcaggctaagggcctgtcacctggagtctagaaacatgcatgtggtttggctgggacaactgtgggccaggaattaaactgaggatgtaacgaggcagcctagaggtcgagcaccctgagcaaagcctctgcttgcaggtgaggctgctgtccctcaaaggctctgcgccaagttacaagctaggtaactcggcatgggggaggggacctgcaaatcagcagttgtttcacatgcacacatcactacatccttcttggatgttggaataactatctcaagtttaacaatatattccagaaagctatttacaaga

SEQ ID NO: 327577 - DNA, 512 bp, Homo Sapiens
aaacttagagaaaacaagaagacgtgacaacaccagaaacaagaacatctctctggccagcctgtgctgaccagtacacagtgaatcacacacagaaacgtatgtcattccggtcggtgtctagaagctccaccgcctagaaaacagactgcaaataaataaagtgcatggagaccccatcacgcagcaagggccctgtaggggagagaagaggtggggaggggaggtagagaagcagcaggcggggctaccacttcaggcagcaggggtgaaaaggcagggacaggagcaaatgctgagggcttagccctgctcctccccagtcagcccctctaggccaatatagccacagcagaagccacggggggtgggcggacatggacatccgtgaccctcttatggggtgggttccctgcagtcgggggtctctgagggtagggacccctgcagctccgacacacatttctcccagtagggaagcagcttccagagtcccaggatgagccccttgc

SEQ ID NO: 327578 - DNA, 594 bp, Homo Sapiens
  misc_feature (570)..(570): n is a, c, g, or t
tttagtagagatggggttttgccatgttggtcatactagtctcgaactcctgacctcaagcgatctgcccgcctcaaagtgctgggattacagacgtgagccactgcacctgcccactggggacattttaaataatacagaatggtagattgtatcccgagagattctaatttactttgttgtgttaggcagcctgtgaatctattactaaaaagctaatggtactgattctgattttagcacagccaagtttagaaaccagtggcctaagtcagtggcttttctaaagatgtctcgtgcatgtgcaatgagataaaggtttgagggataaggcggctaagcattgactccatgggacctacttatgctttaattgtcttttatgttcgggttccatgtgtgttttcaaaagaagagctttctgttaacaaatcatgtgataatctcttttctagaatattaagattaatgtttagatgcctaattcatgataactttgagtaaactgtatacatattttccttcatagagttactaatgcagggttttttctgtatgtgtcaagttttncttaggtaccagtttaggtgctag

SEQ ID NO: 327579 - DNA, 382 bp, Homo Sapiens
ctgaatatatggatagaaaattatttgacaaacatttgaaattgaagtcatcaagttcaatacatctggaatcaaacccatcaccttcccctgcctcactccacttctccagccagctcactggatgcccatctcggttcagggcagtctcacagtcctggtcacccagactagaccatgatgtaccaagtggcctcgccctgttctttgccttcagtctctaattcagtagttcccaaacttgtgacatcaggatcactggagggcttattaaagcaccactaggctccacctccagcatgtgcattgctcccaagttcctaagtgttgctgacgggaacatcctttgagaacattgctttactgacatggggggggcggg

SEQ ID NO: 327580 - DNA, 975 bp, Homo Sapiens
  misc_feature (52)..(112): n is a, c, g, or t
tattcataggtgcagttatagtgcactagcctggagttcctgggctcaagcnnnnnnnnnnnnnnnnnnnnnnnnnnnnnnnnnnnnnnnnnnnnnnnnnnnnnnnnnnnnnaaatccaattattttaaattagctggaagaagaaagacattggggttcttcttacttctccttgagaggaccagatttggtccccaatttttagaacaaaaatattcacattgagaaagccaaggatagatcgaagggaatgcagaagcagtcacatactagttacatgcagcaagaaagtcatcctttagatttataaactccttgtcatgttgtttcctctcctggccccttctccacacttttaaacaagcatgttgtggtctcagttgagagcttgacaaggtttttgctatggttgagacatcaatctcttttgtaattgaatctattcaccagggagagtgtgagcaaaccatgttcaagctctttgtctttgtcctaactaggcatttaacatataaacataataagaaacaagcccctgcaagtctttctttttaaccaattatctggctgtttctcttgctgtagtcctgccttcattaaaagctgtccagggggtagggcacaatctttggaagcatatctaagatgccaatttctttggcatttcagtgaaaagtaagtcatcagggtatttgggacatctcttcaagcttttcttgatggtctatatcagcatagccccctcctttccagctttcctcattcctactttagagtccgctattgtgcctttatgccttcaaattggggtatacccatatatccatataaaaaacatttttctttctgtaatcattacaggggagtccagtgtgatttacagaacaaattgaaatcattctatcaagatgtaaaaaaaattaaggggaaggctctgggctggggaatgttaattagcccctaacccacctcta

SEQ ID NO: 327581 - DNA, 726 bp, Homo Sapiens
  misc_feature (283)..(323): n is a, c, g, or t
cttgttgttcctcttctacttctccttcatcagaatattgcccttcctggggaacagaattccgatcaggagaaatgggctcaaagtaatcttctctatgaggagcatcctcttccttgtcaccagacactggcagaggcacaggatcatcttcatcatcatcaggtggagggggtcctggaggagttcttggtccccttggctgtggtcttggagggcttccattaaactgatcttctttctccccatcagcatgttttggattccttttcaaacttggttnnnnnnnnnnnnnnnnnnnnnnnnnnnnnnnnnnnnnnnnngagtctctgtcatgacttatcactctatccactgatccatatattgccagtgtcagacagttataccagcctcttagcaccagaccatcagtattcacctttgagttaggtctaaagatgatggaagtattctcatcatattccaggcttcccaacctatcgaaaacaggggcacttggtttgcttacattgttgaagaataagtctaattgaaatgtatggggagatgtctctccatatgctctattgtctggcagactgctatgggctcttactcctgggggtatgactcggacttcattgatataaaccacacatggaaaacgaaccacatctatatgagaacttttctcagcgctcgggtgtttaaaagtatctaaaaataacagctccatcgccgaga

SEQ ID NO: 327582 - DNA, 622 bp, Homo Sapiens
gttgttcctcttctacttctccttcatcagaatattgcccttcctggggaacagaattccgatcaggagaaatgggctcaaagtaatcttctctatgaggagcatcctcttccttgtcaccagacactggcagaggcacaggatcatcttcatcatcatcaggtggagggggtcctggaggagttcttggtccccttggctgtggtcttggagggcttccattaaactgatcttctttctccccatcagcatgttttggattccttttcaaacttggttgtggctggggaggtggtggcggtggaggtggtggtggtggagagtctctgtcatgacttatcactctatccactgatccatatattgccagtgtcagacagttataccagcctcttagcaccagaccatcagtattcacctttgagttaggtctaaagatgatggaagtattctcatcatattccaggcttcccaacctatcgaaaacaggggcacttggtttgcttacattgttgaagaataagtctaattgaaatgtatggggagatgtctctccatatgctctattgtctggcagactgctatgggctcttactcctgggggtatgactcggacttcatt

SEQ ID NO: 327583 - DNA, 715 bp, Homo Sapiens
  misc_feature (705)..(705): n is a, c, g, or t
agtatctgttgattagaaagtctggtttcaaaatatttttttattcagagaatgggcatttggacataagaaatttcaattcagccctgctgcagatagagaaatgggagcaaggttgtttcaatgaatatctcttgtcattggagaaggagggaagacagggtgtaggagtgggtggcagggagtacaagagccagggtcagtcaagtctggagcagatggggtccttgtgccattgacagctaccatggtttgttccagtctcaatctcggcactaatcggagcagactgcaccaaagtggggagagatcaaaagaccccgttttcagactgaagattccaaacctgtacttggaacaactcttcttgagagatgggtggctagtctgtgtgcctctctgcaactgctgcttatgcttctggatcttaagtgggtctctggcttttcagctccttccactctgtgtcttagcaggtgtgggacaagttggagaggaaggtcacattctaaggacactcatttccttcttgagagtttagggccatgggcttataaaaagtctgaggaggaaagacaagaatgaggaggcataatcacagtggtatctcatatttaaaccactcagctgaatattaaattgaaccgattgttaaacagacactaataaaaaaattaaactactcgtgccgctcgtgccgaattnctggcctcga

SEQ ID NO: 327584 - DNA, 659 bp, Homo Sapiens
  misc_feature (456)..(476): n is a, c, g, or t
ttgacacattagtatgtgtaacactaagcaacaaaccgtggaaaagtcaattagaaaagcagctgaaggcccatttggcaatgtgagatcatctttacagtttgcctggtatctgttgaaaaccagttttccatataaagagcctggtgcacttaaagtcatatagtgtggaggcaaagtttcacgttacaaagcagttctttatcctccattagcgtacagcccctatggatcttattatcactgttttccttttaatctaataattataaagaacaaaaaggcattaaaaaatgctttactgctcccatttgaatttgtctttcctatagtttagtgaattttgccggaaaatatttatatacattgtcttaaataggcccctctctataaagctgtccctctctatttattgggctgaattctcagcgtgtgcgtgcaggcaggcatgcatannnnnnnnnnnnnnnnnnnnnacacatgcgcatacatgtgcacttagagaattgtgacaggggtagggaaaacaggtgtgggagggattgtttttcataatgactcatactatccttttcctaaacaaaagcaggagttaagagtttgagaacgtttgctgttggttggaaatagaccatggttatttcatcttatttttttct

SEQ ID NO: 327585 - DNA, 762 bp, Homo Sapiens
  misc_feature (44)..(44): n is a, c, g, or t
  misc_feature (383)..(383): n is a, c, g, or t
  misc_feature (557)..(557): n is a, c, g, or t
cggcctcagagggcaaagcatagttaagaaaatctaggtgatanccggcagttaccagtggcccataccagtgacttgcgctcacggaagagttctgaaggcctggaatgcgtttgaagatgagttcatgagcagacagaaaggattccactaacagccgagaaacacaaaggtcatgtgtttttagggacctccaagtggtcggtaaggttggggtcagcattagtttctttgcctgtaaaatgggggcaataagaattcctcgtcccttaactattctcaacagcaagaaaccttaaaggtagagaagaaaagataaatctgttttcacagaaagtccttgttagtcacgaaggattgcaggatcgctgcagggcacactncatatgtgcagtaaccagtctcacaaatggtcggagcaaggtgcagctccacctgcttcaccactaggtgcagaagaatgtccacggcagggggttctcaacttgtgaccttgggtctgcgggggtctagatggacttcagctggcgccgtgtcgcatgtgagtttcctgggcntgtagtaaccccaaaagggccgcgtcgtctacagaagtgccactacttggaattcttgtccatggccacgttctcactgctgggagaaacaacagggtcaggtctaacactcctttctcggatgcatgggcgaacagaaatatccctgggcttcacctagccgtggcctaagtacacttccccagggtaaggagtcaccatactg

SEQ ID NO: 327586 - DNA, 467 bp, Homo Sapiens
  misc_feature (444)..(444): n is a, c, g, or t
aaactcatgcatcccacatacaaatatattcctgatcaagcggcaccaggccctaaaatctcaatccatccttacattgagtcacccacagcagtccatacacgcagagaagcaaggtcctttccatactccatggcacccaagcacagagtacagatggctttgtgtggaggcagtttactatcaaagatatgaggagactttgaagtcaggaaaacattggttctggcccagcaccgctacttccaactcctgacaagttgttttatctcccctagtctctcttttcttattggtagagaagagagtacacctactcaaatggtcattgtgagacttccatgagttaatttgggagtttttaagcagtgtctgggtacatatttaagtgtttcaataaaggctactgctattagtcaccatcatccatttaattttttttancttggacgatcagatatcttaat

SEQ ID NO: 327587 - DNA, 457 bp, Homo Sapiens
  misc_feature (50)..(50): n is a, c, g, or t
  misc_feature (63)..(63): n is a, c, g, or t
  misc_feature (71)..(71): n is a, c, g, or t
accaccttcttcttactcccaggactggcatctcttgggcttttcttccnataatccccaaantcaggccnaaactctccttcctctaggattcgcgtggtgggatgccaggcagcgacacccttagagcaggaagtctgactgtagacccagctacaccccaaccagtgagggtctgcattgggcacttgggcctcctcgtgaggcgggggtccagggttctggtgcaattcccaaggcagggccacttctcagccctagctctgggccagcacagtgccccggtttggctgcaccaactcacaggctcttagctggggttctggcaggtggggctcggctagaaacagattagacagtgttgctaattcttcagcaaagtcctggaatacatagaaagatgagggaaaaggcagcatgtaataattctcaatggctcatcctttgtcactaaaga

SEQ ID NO: 327588 - DNA, 683 bp, Homo Sapiens
  misc_feature (625)..(625): n is a, c, g, or t
aataattcttgtttttcaccttccttccccgaagaacttttccgtccttttcacctccttctcctgtgtacatagtgattttatgtccccagaacgcctggaagcatttctgaaaccaagatattattaaaaacctattattgtttttaatcatgagtatgtatctggctgcagggctgtgtattgggatataggtatatagtcttacacttaaacaggtatgcccctgaggttcactgtgacctcaagtcttttgccagaatttttcccctaattcagttcacaagtggtagggtctgcatcagtggcatttccccctgaattccattcagcagcaaggttcaacagtggtgactgccaggcaggagagtcctgcggccaaacctgaagcccaaggctcgtgggccatgcaggaatctcagtgaagctgtcatgggctggcacctttacactgagttgccttgtcccagctggcacatctagggagttcattgcaaaatccccaggatgcaaaaagccacatgacagcctcagagcaaagatggtggcaaatagtcatgatacatctagagaatgaaagaaaactgtaagggaggagaaggaggggaatacattccctattatngggatgttcctactgttaactctgggggaacagatagctccgggggcagcagatgagt

SEQ ID NO: 327589 - DNA, 407 bp, Homo Sapiens
  misc_feature (155)..(155): n is a, c, g, or t
ctgggattattaatcaatctccctaataactcagaggctaggatttttatggataatttggaaggcagggggctagggaatggttgctgctgattgtttgaggatgaaatcataggggtgtggaaaatggtcctcatgcactaagtccatctctngggtgggggtcacaggactggaaatctcaggacctctggccatgtgactcctgagaagcaagagattatagaaaggcaagctgtggggacaatgacttgttatcagtcagctacacctgcattttagcagaattcaggcccctctcataatcttaatcttgtggggctttcatttgtcatacaaagggtagtttccagtcccctgagccaagggaagggggttcctttttagggggagagactttttatcct

SEQ ID NO: 327590 - DNA, 709 bp, Homo Sapiens
  misc_feature (310)..(310): n is a, c, g, or t
  misc_feature (699)..(699): n is a, c, g, or t
aaccagcaccaaagaagaaaaagtaaaaccttttcaaataatgattcactcctaagagatgtaaaaaggcaaattattaatgaaagcttgcacagcccacagagaatatgtgttctcaacatgttttataaggcaaaatatttatataactaaatttgaggaaaatgctctttttgtcaaatgcaaacttcactttccaacagacttcatgtgatcatgcattgctgtcatttaaaactcatcttatttctttgcatgcaaatcatgctcaccacactctcccttcgtccacgactggcacgatcagaangacacaatgcttgcagtgtccatcgttggtaaactatagatattaaatggcagataatgaaaaagatgcaattttgcctatggtgttacctcattataagtacattaaggaaggttttgagatgcatatgaataactatataagcagcataattggtataatatagtgggcaccttatatattaataaaaaagctggtacaaggcataataaactgttattaaaaatcaggagacatttccaaaaagcacaaataaagtaaaaccttatattttatttaagttacattaaagaaagccaggagcggtggctcatgccttttaaaatgtatacttacgcactaacagaatatattgccattaaaaagaatgtgctaatatgaaactaccnctaagagaca

SEQ ID NO: 327591 - DNA, 296 bp, Homo Sapiens
ttaaaaattgcccctttttacatctcttaggagtgaatcattatttgaaaagtttttactttttcttctttgttgctgttttatgcacatacatgtgtgtgcagttcaccaaagacaaatttcttcagcaaaattaatgtttccatattgtataaaactcataactatggattacaaatcatgttaccattaattgctttctatattgttgtatttagatttaaccagtgtttatccacctgttaagacctgtaatccagtcagggtgctcatgcctataatcccagctacttggg

SEQ ID NO: 327592 - DNA, 632 bp, Homo Sapiens
  misc_feature (302)..(346): n is a, c, g, or t
  misc_feature (364)..(420): n is a, c, g, or t
attcggcacaggataattttcaaagaaaaacttatacaaaagcagaattattattaagactatattgaataaatttgtttttgatgattcagaaattttaacagaatctgaccctatcctagtcatcattaggaccactaattttcttgctgataatatattatgtaaaaagcaagggttacaaatagtacgtatagtatgatctgaattttgcaaaaactacatatataaatgtaaaacagaaatcggaaaggtatacattgaaatgtaaataatgattgtgtctaggcgttgggatcatnnnnnnnnnnnnnnnnnnnnnnnnnnnnnnnnnnnnnnnnnnnnngaggcagagtctcactcnnnnnnnnnnnnnnnnnnnnnnnnnnnnnnnnnnnnnnnnnnnnnnnnnnnnnnnnntgggctcaagcagtcctcccacctcagcctcctgagtagctgggaccacagccatgcatgaccacacctggctaatttattttttgtagcaatggggtcttactctactgtccaggccggtctcgaactcctggcctcaagtgatcttcccacctagcctcccacagtgctgggattacaggcatgagccaatgcgcctggccaggatcatg

SEQ ID NO: 327593 - DNA, 741 bp, Homo Sapiens
  misc_feature (23)..(23): n is a, c, g, or t
  misc_feature (35)..(35): n is a, c, g, or t
  misc_feature (45)..(45): n is a, c, g, or t
  misc_feature (61)..(61): n is a, c, g, or t
gcatcggctggggtgcccccatnctgttcgtcgtnccctgggcantggtcaagtgtctgtncgagaacgtccagtgctggaccagcaatgacaacatgggcttctggtggatcctgcggttccccgtcttcctggccatcctgatcaacttcttcatcttcgtccgcatcgttcagctgctcgtggccaagctgcgggcacggcagatgcaccacacagactacaagttccggctggccaagtccacgctgaccctcatccctctgctgggcgtccacgaagtgttctttcgccttcgtgacggacgagcacgcccaggggcacccttgcgctccgccaagctcttcttcgacctcttcctcagctccttccagggcctgctggtggctgtcctctactgcttcctcaacaaggaggtgcagtcggagctgcggcggcgttggcaccgctggcgcctgggcaaagtgctatgggaggagcggaacaccagcaaccacagggcctcatcttcgcccggccacggccctcccagcaaggagctgcagtttgggaggggtggtggcagccaggattcatctgcggagacccccttggctggtggcctccctagattggctgagagccccttctgaaccctgctgggaccccagctagggctggactctggcacccagagggcgtcgctggacaacccagaactggacgcccagctgaggctgggggcgggggagccaacagcag

SEQ ID NO: 327594 - DNA, 674 bp, Homo Sapiens
  misc_feature (208)..(208): n is a, c, g, or t
  misc_feature (327)..(327): n is a, c, g, or t
  misc_feature (436)..(447): n is a, c, g, or t
ttttgagaaaatgtatttaataattattaaaaataaaaacagcaacctgaagatgtatatatagttgcactggtgattcttgaaataaagtctagaactggcagaggatgggacccgtcaatttaaaaagcactgcttctccagaacaccctcagaggggaagcgaggcaaacctggaactagagcacccaaggtgccacagggcctngtacccaagggagacagggacaacccctggggcagggcgttaaaacacaggtgaaggaagcacacctttcaaagcagctgatgactcttgaaatcctgaggaaacacccctgctctctngaacttcaccaggggctctgcaacttcttggatgccatacagaggaaccatgggaatgaagctttctggtggtacagcctcagtagtgcaggcaaagctgcctcttgcnnnnnnnnnnnnctttcctactagagcaaaccattcagaaaatgagtaccaaaggcattcattatgtaccaaatatggaagaaagtactaatatacattgtgcctctgtggacatcacactatgatcagttaaaaataggcacttggcttaaaactttaagaatttcccactgcaaaaggtatcagctctttaattttttttgaaacagtcttccgctgcactccagcctgggagacag

SEQ ID NO: 327595 - DNA, 965 bp, Homo Sapiens
  misc_feature (164)..(179): n is a, c, g, or t
aacccttcagtcctaggcaatcactaatctacttgctatagatttgccttttatgggcatttcatatattaataaatagaatcatatataacccgtcctgcgtggcttctttcacttaatgatttcaagatttatccatgttaaaaactcagtaattgttaggnnnnnnnnnnnnnnnncaccttctgtatcaaaagactaagaacattactgtatattagaaatgtcagagaaaggtatgtttaaggtaatggagaagaaaattttaatgaccaaggaattaggctgttaacatgcagagtagggcttaacattgtctcattattaaaaaataaaagttgatttaaaacaatattgtgtgtgattgtgaagctggtgtctgttgtgtgatcagtggtaaagcacgtgagttgctaggcacaggtgttgagatttcgtgtttgatcagacttctcttttaagtttaagcctggttgaacacaatctctgtccaggtaccgtgggaaatccttaatgtgaaccatttccatgaaaccctcactattgtccagtggtggcgatgctatttattaaccacatttttccaaatggagagaatggggagtttatagggcctaaagatcagatgccatcccccagacgcctgccttgatgccagtttcctgttgccacccccaccccctcctgttccagtctaggccaggtgcccttcatccgtgtttctgtggccccttgtgtttattgcagtcacaatactgaatctcgtttcttgtctgtgtcccgtaccatgctggacataaacttcttgagaggaaggactgtcttatttatctttgagttccctgtgtcagactcaatgcctggcacatggttgtttgagaagagttcatggaacgcatttaagaaatacattaggatctatattaagattctaattaagaccgagttgagtgtttatcgagtta

SEQ ID NO: 327596 - DNA, 635 bp, Homo Sapiens
acctgacaaactcatttaatccttaatctgttttacaaaaacagaagaggtacagaaaagttaaggacttaacgggaggtggtaaagctgtggttggaactggttttctgtactcaactgctagatgcttctagatccaatgtcagaacatggagtagtaaagctgtaggtctggaaataggccccagtcctgtgcatgttcagatgctcatctccacattcacttgggttcagaaactcactgggggcaagtcagaactgtggtgagggcccaaaccctcatctctatccttgactccactgaggggctcttctgtacgaggtgggggatcagcaaagccaactgcgggggtgaggaagttggcttccagtgaagatgtgctggacaccggaggtgtgtactggtactcatggacacttgctggattgatctctgccagtgtctgtacagctgcatctcttgcattcaccagccgcagaaagagctcagcctgacctgcctgaggaatcccattcagctgcccaaggctaaggctggggtccagaggaagggcccgaagtgggaggcgccagcggccacttagcacccgctgatcttggtcaaatagtccaagtgagacccaagccttggctgt

SEQ ID NO: 327597 - DNA, 694 bp, Homo Sapiens
caaaacttgcccaacacccttcagctccagagtgaggaatccagctgatagctctgatagctgtcaagtgcagagcccaaatatttaaccaccagtgtagaacattctatctgtacagcatgggccacactaaatcagcattgctcctacatttttctattttgaccataaactttttttaatttattgaggtaaaatatacatatataatttaccatctttaccatttctatgtatatagttcaggcagtaataaatacatttatattctttattttcttttcatcccctccctccccttcccttcctggtctctggtagccacgaatccactctctgtcttcatgagatccatgtttttagctcttgcatatcagtgagaacttgtgatatttgtccctctacaaccataaactcttgaaagatgatctttgtcttgtttcctatgtcagtcctattgcttataaatatttgtcaaaatgagaaagtcaattgacaaatttcctcatcacttactttttattcaactccctgctgttgagttcctgcccctcctctctgctgaaatcacgagcctaacaattcccaggacccgcagcctgcactaagagtctcgccctaagaaccttgcccttggggggccctttccacccttcccctctcactgtcaactgtgccttctactcaccgagtc

SEQ ID NO: 327598 - DNA, 673 bp, Homo Sapiens
aatgggagccaaaatgtttagagaaagcttctgggtgtgcctttcagattttgaacaagctgccttgtctaaacatcaatttctactactctgtagccttaaaatgtgctctatttagatccacaggacccttctactggtgatatgaaaaacagaatacagaaattaagagaatcactttttactcaacaattaggggaagtaagtcaaagccctcctcttgcgacaggatttttcctgcgggccacctgttcagcgccttgataggggatagggtgatcaaagcactcacgaaaacagttcattcaggtatggaatgtcagaattcctttggccattttctcctgactctttgctaggtcccctggttttccttggcagcacttcttggatggaggacagggtccaccaacttctcaagacattgagtcttgagacacaagaaaccacagacttcaaccctgaagggcctaactctgtccatatgtctgtcctttgaatacttcctgtccctgcctaaaaggaaacccaaattgtttctaggatactggtgaagttgtagtgaggggcttaatgcagttaataatctaaaagccagcagaaaaccaaaatgcctcagccttaaatggttgtttcttttttattttccataatgaatagactcaacaggcaa

SEQ ID NO: 327599 - DNA, 577 bp, Homo Sapiens
  misc_feature (111)..(119): n is a, c, g, or t
tttcagctacttgggtggctgaggtgggaggatcacctgagcctggaaggttgaggttacagggagctatgattgtaccattgccttccagccctaggcaacagagtgtcnnnnnnnnngaaagaaatgataatagtgaaataattttagaatattttcatccaatttacagccatttcttaatattatcagcgaaacagaattaatctagagttagaaatgagatctatagtttctgacactgaaagtattttattcacctataactaaacattgagtggctggtagctgataataaatgacttctaggggtggggagcctgtagaattgtcccaaactataggactcaaagacaatgaacataaatgtaattaagaagtggattagatcaagaggcagtgcatgctcagatcatacattttgcttctgtttggatgtaacagccagccttatgcagaatatattaagaaaaccacacaaaagggaaatgagtcacttacaaaagaccagaaaagcttaggctaaccggctagacaagacttggccatgtctttttctgccttggtttcacttgta

SEQ ID NO: 327600 - DNA, 425 bp, Homo Sapiens
  misc_feature (338)..(379): n is a, c, g, or t
gatattagccataaactgaatgtcagccagctcataacacacattgttcctgaatagttgaactcttactgcctcactctgcctctgtggcagctttgagatcttcagtgctcatttccctcatctggtctatttcagcaatagaattggttctgatcccttctcccttaatccttatttaaatactccactcttcaagacacttgtaagttcaaaaattttcccacctatttccattctctggatacctgaagagttacttcaccccagaggttttaagtgtgatacactctttcatggctctgtgccgactgtggaccctctcctgctgatgttgnnnnnnnnnnnnnnnnnnnnnnnnnnnnnnnnnnnnnnnnnngagatggagtctcactccagcctggcaacagagcaagactctgtct

SEQ ID NO: 327601 - DNA, 652 bp, Homo Sapiens
  misc_feature (86)..(212): n is a, c, g, or t
  misc_feature (638)..(638): n is a, c, g, or t
aatctcgtgcttttcacatgtattcttatttttctcaatatacggtagggcacatggtaatcacatttattcacacgtggattttnnnnnnnnnnnnnnnnnnnnnnnnnnnnnnnnnnnnnnnnnnnnnnnnnnnnnnnnnnnnnnnnnnnnnnnnnnnnnnnnnnnnnnnnnnnnnnnnnnnnnnnnnnnnnnnnnnnnnnnnnnnnnnnagaacacaactatttataattatcactcttgaatttggaaaattgggaaaataaaaactactgatataaacaaagtccacaggggaaaacaactttgtggaaacaattcaattcaggcaagtgttttacatggaatttgggagaaagggacaatactacaaacatatatttaagttgattgcatagagattatagctgaaggtttaggagggctcaagatagactgtaattaaaggcagagcagaagcttcttgaatggccatcctgtgtggaagccctcagagatacaaatagcccattatcacaaaggagcacctattttatgttatcttggttccatcctctggccttgatggtatccaagggtgaagtcaaaaagaagggagaggtttggcggttcccacccctgtctccgctagcgcaggntgccggcagcttct

SEQ ID NO: 327602 - DNA, 930 bp, Homo Sapiens
tcggtaaaagtttattttcgatgattctctaaaatctttccacaaaataagatttctacagcctgagacatattcaggaatgtcttcaccactgtgtgctccaagggctgcccacccccagcagggcagcagcagctgtccacccatctgcccccacgcctaggactgcccccagcaccccacaggtgaggaggagatgtctccaagtatctggacgattcgaagaaaattcgaaggaaactttggtctgctgaaatgtcttcacgtcctgaggacatgtatgagtgagtgacacagggaagtccttctcagaggctgaggcctggagcctggtacagtgggttccatcaggctgggccggcgctcaccgccccacacagccactccaacgcctctcggcagagccagcaccaacaccatggccaacactgccccccagtggacccagggatgtaacacatccccccaactcagccctggcggccagtgactgggggaagttttgtattttaacggctagaggcagctgatgtgggtggtgcagtcagggaagcccaaagccaggctgtgcggctcagcccagtgggacctgcctgggagcagagtgccccactgttgtccacaggctctccctctgccatgggagaagtgggaacacgtgcctccgcacacacctggtcccagctttgcagacctggctccttggctagggccgtggaaggggaccagctttcgtcaggagtgctgtgggacagtccctgtacccctgtgcacttcctcacccaccctgcactggcttcctgcactacaggaggtaggctggaagacgcagtgccgcgtcacacctcagtacttgggtgggtgtacacaatacgtgacctggtccgtggcccgtgtgcaaatgtcaccaaccgtccagataacgcccga

SEQ ID NO: 327603 - DNA, 470 bp, Homo Sapiens
  misc_feature (178)..(178): n is a, c, g, or t
  misc_feature (203)..(203): n is a, c, g, or t
gaggagcaggggctcaggtggaggctcgggcaaggctgcctgtgacactgggaccctgcaggcctgggtcacccctggaaaaagtgtcgtcctgcagcactccacctgaatgagggatccagtgatctcccaggacaaatcagtcttaagggaaaaagaggatggaagtggggccatntgaaccaaggactaggtctgagctntggggcctccggagtgagggtttgccaggaacacccgaaaggttgagcctctgtcactcagcatctccgagctgaggccagaacaggggagcaggcccgttttgggtatgacttggccatgggaggtttcgtttgaggaccccagaaatagctggggctcattcaagggctgctctgaccagctgagacaccctgctcctcattcaagtaggtagggcagaggcagaggtgctgtgagtgatggtcctgttttcttactgtttttat

SEQ ID NO: 327604 - DNA, 608 bp, Homo Sapiens
  misc_feature (417)..(557): n is a, c, g, or t
aacaccagtgttgatttaatgttggcaagattcaacatattttgaggtaagaatacaatactacatgtctattattttcagacatttaggtttatactaattcataaactttaggtttatattaatttattccagcattaacaaaagcttggaagtttgttgggaatgggcattacatagatgactacatgttctaggcatcaagcaccatattagaaatgatacgaaaaaaatagtagttttgaagcacatgaattagtttgtgggaaagagtaggtggaaaggagatcaggcagaggcaacagcagttacaaaggcaggacgcataagaaagtctagccaattatgcttttgtaggaatatgcccgtctaggtgacttctatctttttttccctagctaggatttgaacctatcnnnnnnnnnnnnnnnnnnnnnnnnnnnnnnnnnnnnnnnnnnnnnnnnnnnnnnnnnnnnnnnnnnnnnnnnnnnnnnnnnnnnnnnnnnnnnnnnnnnnnnnnnnnnnnnnnnnnnnnnnnnnnnnnnnnnnnnnnnnnnaagaactcctttagcactaccatttgtgccagtcttcttggcttgtgacat

SEQ ID NO: 327605 - DNA, 543 bp, Homo Sapiens
  misc_feature (311)..(433): n is a, c, g, or t
gctgaacagttgttgtttagtaatactaaaactcattttggcttttaaaatttgtacaatatccttatgttctgtaaatcctagactcacaaatactcactagaggtgttaattattaatgttctttcatgagtaggtgctatggtctaaatgttaatatccccccacaattcatatatgggaacctaaatacccagtgtgatggtattaagaggttgggcctttaggaagtgaagtcacgagggctcttgtgtcatgaatgagatgagtgcccttttgccacgtgaggacactgcaataaggtgccatcnnnnnnnnnnnnnnnnnnnnnnnnnnnnnnnnnnnnnnnnnnnnnnnnnnnnnnnnnnnnnnnnnnnnnnnnnnnnnnnnnnnnnnnnnnnnnnnnnnnnnnnnnnnnnnnnnnnnnnnnnnntaaggaccatctttgaggcaagcccttatcagacattgaatctgctggtgccttgatgctggacttcccagccttcagaactgtaagaagtaaaatttctgttgtttcta

SEQ ID NO: 327606 - DNA, 734 bp, Homo Sapiens
  misc_feature (693)..(693): n is a, c, g, or t
cagccatggtgagtgagggggagaagaagagggggtaagatctgtgagtctgggccacatcacacagggcctggtagggccatgtggaagagcgaatattttatttttagtctaatggaaaacctttaaagagtttaaatcacagtggtgacttcatcactctggcttctttgtggaaaatgggttggaggatgatccaaaagaccaaagagaaagaccagttaatagatcattgaaacatttcaaagggaggatggtggcttgacccagcaggacagaaatggagatggtgggagtgtgcagactcaggatctattttggaggcagaataggtaggagttgctgagagtttggatttgggggtgaagggaaagaggaagccaagtatgatttcctaggttttgggattaaatacctgggtgaatggtgccgccatttactgagatgggaagacagcaactcccaattttcaaggctcagctcagtcctcacttcctccatgaaagctgtcatcaggtccagtctccaaccttctctctttcctctcaaccactcgggaaatcattgtctgcaccactcatcttttcaggagtatgtgctgaactcctcaacctggcgcacattccttgaaggtgagggacccctttcacatccagaaatgccttggatgtagtgctcaatcaaatttgctgncttggggaattaaagacctcgtgccgaattactgggccgcg

SEQ ID NO: 327607 - DNA, 705 bp, Homo Sapiens
  misc_feature (392)..(392): n is a, c, g, or t
  misc_feature (450)..(450): n is a, c, g, or t
  misc_feature (636)..(636): n is a, c, g, or t
cagcaaacatgctaccctgctggcataactgaaaacaaacccgtcacatgggttcaggaggcggttgccaggggagcaacttctcagcacttccttttgccgggtcgctgagtaaactgtggtctgaagccaaaccgcctacaccctgaactgttagagctctgtagattacgttcttaaggaaaagagtaacccccttacggcgtttagattttcgtacacccaagcagtagcatagatgctgtacaacgtaacactgagtcagtctgaactgtggacacggggactgctgggtgtgtgtactagactttcttggctatcattgaaccgcttttatagaaatgttcgagtttgatcttggctcagcagatgcatttactgctcctgtagtncacacagcatttgtttatttaacgagcttgtcgggtgctttctgcaacctcaactctnttaaggtgttgaaatgttaatccaaaagtgagcaccacaagcccctatccttaagcagcttagagtctggtgggaaaacaaaccagtatgtcagtgactccagtgcagtgcagggagcatcctgtttgctttgtggctgacgtttgtcagctgactgctgaccataggcttcagatgctttgctgngttcattccttacagcaataccatgtgtagcttcatttatagatgtggcaactgaatcacaggtgaagt

SEQ ID NO: 327608 - DNA, 773 bp, Homo Sapiens
ttggaatattgtcatatttgtttctagagttattttagaaaagctcatattgtgggatttggatgaaaattcatcattacattcttaatagaccgatttggggggcaaactggagtccttttgtaacactggtttggataagggaatttgaaattacctcaaagaataagcaacagttctaattttcattccatttaggttcagaaaaaggatggaggtagaaagtcctctctcccaaacactatgattgacactgcagagttctgcaactctcgtacgagggagatttcatgatgatctcagtaacggatcagagaatcaacgactgacttcgctgaggcacggtgacgaaaaggtcaaggtggtctggtcttgagtgaagtcacagcaagaacccttgtccagggccattctcacctttggggacagctccttccctgtatggtcctcatgtcactgcactttcctgccttgtttcttgctgaagccattatttcttaattccttagtagatatgcagagcggacatcccaaagaagctagaaaaattgatgagcagggaacagatcaaatcctctccatcagtggaaggcaattcacgagggaagaaggcaagaccatggggtaatttttctgagacttgacaatgtttgccaagtaaataaatctgccatttaacactacgataaaagctgtcatagccagggtattagtgactacttgaggtttgaggacaatgaagacagagtaagataaacatccttactatccag

SEQ ID NO: 327609 - DNA, 393 bp, Homo Sapiens
ctggatagtaaggatgtttatcttactctgtcttcattgtcctcaaacctcaagtagtcactaataccctggctatgacagcttttatcgtagtgttaaatggcagatttatttacttggcaaacattgtcaagtgtcagaaaaattaccccatggtcttgccttcttccctcgtgaattgccttccactgatggagaggatttgatctgttccctgctcatcaatttttctagcttctttggggatgtccgctctgcatatctactaagggaattaaggaaataatgggctttcagcaaggaaacaagggcaggggaaggtgccagtggccatggggggcccttacaggggaagggagcttttcccccaaaggtggaggatgggcccggggg

SEQ ID NO: 327610 - DNA, 807 bp, Homo Sapiens
  misc_feature (30)..(30): n is a, c, g, or t
  misc_feature (332)..(386): n is a, c, g, or t
tctgggtgttggatgtttctgtattccaancattcttgagctttgctgtgggacactatcacgtcacttaacagtttcatccttggggaccttgctttgttaggtaggaaagcagagcattcctcggtggtgaggaaaagtccttctgggtgctctatgccacgccccacgaatgaggaggtgtttgcctctgactgatggctagacgccctattcccagccttgtgtgagctctggggattgttccctctaaccctagcgagtggtcctttctccagctgggctcatgttacggggctgcactgacacaggacatgaacgaggtggtatannnnnnnnnnnnnnnnnnnnnnnnnnnnnnnnnnnnnnnnnnnnnnnnnnnnnnncatgtttccctgataaggggaaggcggatggtccttggggagtgtggtgcagggtgggctgaggccagaggagaaggctgccacagggcgtggagcagagtttgatgggcacacggtgcacagtgacctccaccattgtttaattggattgggtcccagagttctacttggctcatgagccctgatcagccattcacaggctgtaggaccaggaagttttccagatagaacaggaagatgtctccaggcagcagtgattcaggaacagcaggcaccgataatgaccagaaagcagacactcccagcgaaaatgagcccgcctaggccaggcatggtgtcgggtttttgtgtgtgtttcttatgttttgtgtgtttcttatgtatgagcttcttagatttcctcgtgccgaaaactggggtc

SEQ ID NO: 327611 - DNA, 465 bp, Homo Sapiens
  misc_feature (374)..(374): n is a, c, g, or t
  misc_feature (440)..(440): n is a, c, g, or t
  misc_feature (449)..(449): n is a, c, g, or t
aattgaatgccatacattgtgactgttacgtttctgggtgttggatgtttctgtattccaaacattcttgagctttgctgtgggacactatcacgtcacttaacagtttcatccttggggaccttgctttgttaggtaggaaagcagagcattcctcggtggtgaggaaaagtccttctgggtgctctatgccacgccccacgaatgaggaggtgtttgcctctgactgatggctagacgccctattcccagccttgtgtgagctctggggattgttccctctaaccctagcgagtggtcctttctccagctgggctcatgttacgggggctgcacttgacacaggacatgaacgagggtggtataaagtaacnagaagtgttattccctcaagttctggaaggcaaagaagcccaaaatcaacgggcaacgtttccccngataagggnaaggccgaatgggcct

SEQ ID NO: 327612 - DNA, 782 bp, Homo Sapiens
cagattgataaggatgtaatagtcagatatttttcttatgtaaccacaatattgttatcacacctaataaaattaactgtaatgaaccaaagaactgtaatgaactgtaagtaactgtaatgaaaatttcccctcaagctttcctctaatggctcaattgcatgggtcagttatttcactagatatcacaaaatggtttctccagttattcattttttgttttaataaaattcattgctttattagagaaaactggagcatctttccatttgtttattggctgtttggtacttgttttgtgaattgttcatgaccttgcttgatttttctgttgaattcctttatttttcttatccatttttgagagtttgtaatcatagctattaatcttttatctcatttataaattgtaaatattttttccagtttgttactgtcttctgtgtagaagcttttgatttacatagtcagttttttttctttggtggcttttggttttaagtcttaacttaggctttctatattctgagataatgtaggaaaatagttaattatcttccaggctccatttcttacatttgatttttaatgtattccagaatatatttcgtatatagtataagataggaatcaaatttgcttcctgcatttaaataatagtaaattttgttctaaagtagtttattaagtcttctttccactatattgatttgagatgtcacatttatcacaaatttgtatgttctttttctggacttcattattgttcattttaaattaag

SEQ ID NO: 327613 - DNA, 780 bp, Homo Sapiens
  misc_feature (13)..(13): n is a, c, g, or t
  misc_feature (129)..(157): n is a, c, g, or t
  misc_feature (189)..(432): n is a, c, g, or t
  misc_feature (709)..(709): n is a, c, g, or t
  misc_feature (722)..(736): n is a, c, g, or t
tttcggcacagtnaatgatgtatgatgttgaacatgttttcaaatgcttacttgctgtctgtaatgtttgctcaggtcttttgtccattttttaatcaggttgttcatttttttgagttttaagtgtcnnnnnnnnnnnnnnnnnnnnnnnnnnnnnagatacatattttgatacggagtttcgctctnnnnnnnnnnnnnnnnnnnnnnnnnnnnnnnnnnnnnnnnnnnnnnnnnnnnnnnnnnnnnnnnnnnnnnnnnnnnnnnnnnnnnnnnnnnnnnnnnnnnnnnnnnnnnnnnnnnnnnnnnnnnnnnnnnnnnnnnnnnnnnnnnnnnnnnnnnnnnnnnnnnnnnnnnnnnnnnnnnnnnnnnnnnnnnnnnnnnnnnnnnnnnnnnnnnnnnnnnnnnnnnnnnnnnnnnnnnnnnnnnnnnatgagccacagcgcccagccttctttatatatttttggataatagttgattatcaaatgtgttgtcagattttgatcaggattgcattgaatctgtagatcaagttaggcagaactgatatcatgacaatattgaaccttcttatccatgaacatggaatatctcttcatttgtttagttcttctttggggtctgtcatcagagttttatagttttccttatatagatcttgtacatattttgttttatacctaagtatttcattttttggatatgntaatataaataannnnnnnnnnnnnnncaaattccacttgttccttgcaggtatataggaaagcagttgat

SEQ ID NO: 327614 - DNA, 747 bp, Homo Sapiens
  misc_feature (281)..(292): n is a, c, g, or t
  misc_feature (723)..(723): n is a, c, g, or t
actccctgcagtgcaaacaagcatggggcagggatgcagtgatgcagagaaaggctggcttccctggatccatccagtatttaaactccatccagtctttaaacccccaatcatcagtactctggtccctttcatctgagggctaacccaagtcagctgctcatcctcagccctcctccaaagggacggaggaggccagcagcaagccaatggcatatctaagaagcagcccaattttacaggctgaaaaactgaggcaccggtttaggtgtggagaaacnnnnnnnnnnnntgaagccaggcttctacaaatctcaaacctgcatgacgttcttgtcacaaagtggcctagtgtgaggcacttgtgcccacactaggggtgcaggattgttggacaaaccaattatttagagatttctatgtcccaacctgactcaggccaacccatgtccccttctgcaactactctggcccaactggtctttttcccactgcctatccacatttgttctccccaagagacaggccagtgctggcctgcttccatcagcggggtaggctgtagacttgagggtactcccagacaaaccaagtggaaggcctttgcccaccctccattagtttcctctttgtacttcaagtagttccaaaaccaggcaggaagctctcagaatctggcagatgagtggaaagaacactggactgggagttcagggtgcttgngttttaaatatcctatccctgcgt

SEQ ID NO: 327615 - DNA, 460 bp, Homo Sapiens
  misc_feature (119)..(163): n is a, c, g, or t
ctcactctattgcttttcttcctaggcacttagatatcctcatctatctccaagtgccttccttgacaccttgcatctccaatagaacattctgtgacaatggccatgttcttatattnnnnnnnnnnnnnnnnnnnnnnnnnnnnnnnnnnnnnnnnnnnnngccttgaactgtggctagtgcgactgaggaatggaatttaacattgtatcttattgtagtggttaccatattgaatggcatagcttaagacctgtcctgtctccttcctcaacccagttagttagatgtctcttcaagggttgttattctagagctagggcccacctgtagtcccagctacttggagaggctgagtcaggggggttacttgagcctgggagttttgagactgcagtgagtgcctgtgaaatagccactgcacgtccatgctgggcaacagagtgagacctcatattt

SEQ ID NO: 327616 - DNA, 676 bp, Homo Sapiens
  misc_feature (286)..(286): n is a, c, g, or t
tttttttaattattagtaaaatatgcttgtgtccaatggagaagataaggcatgaacctaaataccataaaactcagaacaaagtacctaacgcaatccccggtgctgagcagaaacttggtaaataatttctgaactactgaaagtcaactgactgtaccatagatatggtccaccccactcccgccatcgctcctccctggctttggtgatcacacctgagagcatgtcataaacttatctgtttgctcactgcttatttgccccactagagcaaaagtttggngacagcaggaactttgtcatattctccacactatcccccaaattttgccacagtatctggccaaacggtccagtgcttgtttggtgaaataaatgaatgagtgaatgtcctagcacaacatgcaacagatgtatgtgcctcccacaagtttttgctaatttattattgttggaaggggcttaaccaaagaaaaggtaagtgctgtggaaatccaaagaagtatgactgtttccacaaaggggcagggacagcttcgtggaacagataatgatgaagctgggctttcaaagagggtctgttgtgtacagagaagggaagggcagtgcagagagggaaatctgcaaaaggacaggtttctcaaagaagggtgagcattcagtttcaaggcag

SEQ ID NO: 327617 - DNA, 708 bp, Homo Sapiens
  misc_feature (419)..(481): n is a, c, g, or t
  misc_feature (504)..(534): n is a, c, g, or t
  misc_feature (690)..(690): n is a, c, g, or t
tgtttaaggcccgtgtctgttttctttattgttatattgacagtactttgaacaaagtctggctcttacagttgtttgtcaatatttgctgaatgaattcaaaggggacaaaatgtttaaggtatgggtgtttgacattttctgcctagatccccaataccactcttgtctttattgggtccttattacaaagcaccattggcgaaggtatggaagagaagcagtctcctacaattgtgggtaagagtggatttttaaagctatttggcaatatccgtcaaaacttaaaatgtatataggattttagctccaaatttctcagtttacacccaacagaaataacaggcatagggtgtataggccttgcaggtgttgcttgttgaatcaaaagactggagtggaagcagggacttaagttnnnnnnnnnnnnnnnnnnnnnnnnnnnnnnnnnnnnnnnnnnnnnnnnnnnnnnnnnnnnnnngtgacacagtgagacgctatctnnnnnnnnnnnnnnnnnnnnnnnnnnnnnnnttacacgggcagcatgcgaactcagcgtactcagggaggcagataaaagccgagaccaaagtgaaggagcccagctgcaaattcaactccgaaagaccctggactccgcaaacgtctggccgcggctcttgagctcttctattaagtttcggtttnctgaagcttacgtttagt

SEQ ID NO: 327618 - DNA, 228 bp, Homo Sapiens
  misc_feature (118)..(118): n is a, c, g, or t
  misc_feature (127)..(127): n is a, c, g, or t
  misc_feature (143)..(143): n is a, c, g, or t
  misc_feature (149)..(149): n is a, c, g, or t
  misc_feature (192)..(192): n is a, c, g, or t
  misc_feature (216)..(216): n is a, c, g, or t
gtcaatacaacagaggttcagaaacccatttattaaagaaaataagtgacagaacaatccacagatggaaaagaaatattccaagtgcatataatcaacatggatttcaaatccagantgtgtaggngtgtgtgtgtgttggnggtggngcaaaagtaattgcatttttggaccattaattttaaatcattntaactaggctcaaacacatctttnttaatcaaaata

SEQ ID NO: 327619 - DNA, 791 bp, Homo Sapiens
tagtggcatgatttctgcttttgtagttctcttttgtttctataggaccgtgaatttccatcgctcgctttctctctgtgccacaaacttgtcaaaggatgtcttcccacttctaagttgtctctctccctgccagaagcaatgccttccctaattcctggctgcatgtattttcataccttcccttctgttcagttccttagtagccactgctctgatccactcagacctatcctcattattttcccacttggaatgggactgtcttttgtgggtaacttttatctgtctgacctttctggaaccctcctgccctctccactgcatagtctctgcctgactgtctactctagtgtgggctttggagctggttttgggggttcatttctcttaacttccataagttgaagtgtgtagtattttctgactcctaatgtagtaggcatggattggggtggttttgttgtccttgttgatctgtatagtttttgtgggataggtggaaaagttggaatttgggcagctggcattgttttacaggaaactgctttttgattttatgttttatcttcgaaattctttataaaaatatcttgtttgtattcttcaagaactctttcttgttctctgcttattgttttaattgtaactctgttctcatttcaaggacatactgtcttctctggggacatttattatggctttttaatatgtattccagggagaatattacatctttttaaaaagtatttctcttcccattgcattgacttttacttctacttctttaa

SEQ ID NO: 327620 - DNA, 462 bp, Homo Sapiens
  misc_feature (21)..(21): n is a, c, g, or t
  misc_feature (405)..(405): n is a, c, g, or t
  misc_feature (443)..(443): n is a, c, g, or t
gtagtggcatgatttctgctnttgtagttctcttttgtttctataggaccgtgaatttccatcgctcgctttctctctgtgccacaaacttgtcaaaggatgtcttcccacttctaagttgtctctctccctgccagaagcaatgccttccctaattcctggctgcatgtattttcataccttcccttctgttcagttccttagtagccactgctctgatccactcagacctatcctcattattttcccacttgggaatggggactgtcttttgtggggtaacttttatctgtctggacctttctgggaaccctcctgccctctccactggcatagttctctggcctggactgtctaacttctagtgtgggggttttgggaggctgggtttttggggggtttcantttctctttaaactttccataaaggttggaagtgtgtnaggtatttttctgaactcc

SEQ ID NO: 327621 - DNA, 1048 bp, Homo Sapiens
caaaaacagatagttaatactcctacttatcataaaactgtgttagaattcagcagctggattacataatactattataataagcctttattattgagtaactttacatacataatatttatatgcacaagtatttgagagcttataggtcaagccctgtgctaagtactttgtacccatgatctgatagaacccttataacaccttgatgagatgcagccattttctacacactacacatgatgaaaccagcacagggaatcagataacttgcctgctcttgggccaccacggggtgcctggctgctttgtgttttatgggaaattgcacatggcaaacattcaaccataggcttcctgcctttattattaaagggcaaatatgggtaaggaggatagcatggggcttgatttgttcaatgacctaaaaataaactgatcttattcataccctgccttgttctaggaaaggattctagtggcttctcagcagagggcagggcaaggaacaggtgctcaggaattggagcatctggcacgcaggcccccactgcactctgaggggcttcactctcctcagacacgaagtcatggaaccagagcttatctcctaagtccctcatagttctaaacttttttgacaattaagttaacgtcccctccattgacattttccttaaaacctgggtggtttgcgtaattctacatgtataagatatctgtgcataatgtgacttagaataatataaaaaaggataagccaaaaaataggcttagatgaaagactggaaagatacacgtcaaaacattaattctgacttgtctttggttattattgttttgggaattactacttaaatttgcttacctatattttctaaatactgtgcaatgggtgggaaatgaaaagcaagtgtttaggtataaaaatatatgagacatatccaaatcagagatcctaaaagtaaattcatacaataattgttaaactaaactgaaatacaatatattttaaatgacaaagttaatttttatggtgctttcattt

SEQ ID NO: 327622 - DNA, 592 bp, Homo Sapiens
  misc_feature (576)..(576): n is a, c, g, or t
tccacttccccaatccctcagctctaaatttatctggaaatattttgagtttttcttacagtggagaactatttgacttagggctacacaacaatgcttgccacctccgtattttgaagatcttcctctgtgaatccttcccacattcaaggaggtacgcaggaaaagcctgtggcaggcagtagcccttgatctaggctgctcagggccacgtagatcatctgaagattgtcacctaaatacagctgttactaaacctttgccaagggaaagcagagaagggacaagtcattgccatccctcagcagcagcttcaaggtcattcgtaagtgagagcccggaagttatgcaacactttctctctaggtcctccagacaatgatttttacaacagccagatggtaaattcacgtttgtggctattccactgccttgtcctatcagcatcaggcatgaatgccatgggcctttcacgactggtgtggacacacatagctctacactgatggcacccaagtcacagcagggactcgtgtggcagtttgcatttcttatgataatctttttgttcacccnaagtttttaagagcta

SEQ ID NO: 327623 - DNA, 391 bp, Homo Sapiens
  misc_feature (334)..(334): n is a, c, g, or t
  misc_feature (352)..(352): n is a, c, g, or t
atttattattattatactgaagggtgacttgctttttcaaggtcagcaggggaatctctgactttagtcagctaaattgtgtataaagtaacaatcattatctttgccatatattgtagcctaatcaaaagagtgactatatcatattcaaaagtccttctcacactcaaggggagattattcagagcatgtgtaccagggagcaggaatcttaggagccatctaaaattctacctactatagtcccttaggggtctcataatctagttgggaagacataggacatagggcacaaaggttttaaggcaatgtgagggatagggctatattaggntatggtggccttcttttngggggccccccccaaaggctggcccccgggtagggaggc

SEQ ID NO: 327624 - DNA, 993 bp, Homo Sapiens
  misc_feature (67)..(164): n is a, c, g, or t
gtggggaacaaatctggtcagttggcgttagtttgctacttttacagcctcctggatttaaaattcnnnnnnnnnnnnnnnnnnnnnnnnnnnnnnnnnnnnnnnnnnnnnnnnnnnnnnnnnnnnnnnnnnnnnnnnnnnnnnnnnnnnnnnnnnnnnnnnnnggcattgtgtttacaaattacttccaaagaattcagaaaattgtgtgtgtgggaggcagggtagcaagataaaaagagggaggacagctggggttggtaaaaccaaatgtaaaatgacaacatttggagaaacctgggtgtaatgattacttttgtgtcaatttggctagggcacaataccaatatcctatgtactttaagccagatactttaagtcgaaggagtaacaattaattcaattaaacactattccaggtgttcagctgaaggtattttatacatgtggttaacatctatagtcagctcactttttaaggaaattatcttcaataatctagatggtccttatccaatcagttgaaagccttcaaaactgagcaaaacaggttttcctggggaagaaatcccgcctgtgaactgcagcttcagcagcagcccaaggctttccagcctgcctgcctgccctacaaaatttcaaacctgccagcctccacaatcacgtaagccagttccttaaatctatctatacaaatctctcctgctggttttgttttgctggccctgataaagattttgataccatgaaatggaatgtggctgtaacaaacacctaaaaatgtagaagtggctttggaactgggcaatggtagaagctggaagagttctgagacacatgatagggaaacacctacattgccctgaagagactgttggtagaaatatggatgtcaaatgtagttctggtgaggatccacaaggaagtgcaatgtgtgagagaaagcatctaccatcttagagaagacatgtaggccataaacagattatggta

SEQ ID NO: 327625 - DNA, 495 bp, Homo Sapiens
  misc_feature (29)..(29): n is a, c, g, or t
  misc_feature (67)..(67): n is a, c, g, or t
ccttcaaaaactgagcaaaaacgggtttncccggggaaaaaaacccgccctgtgaaactgccacctncagccagcagccccaaagcttcccaccctgcctgccctgccccctacaaaattttccaaaaccctgcccagccctcccacaatccacgttaagcccagttcccttaaatcctatcctatacaaatcttctccctgcctggttttgttttgctggccctgataaagattttgatacccatgaaatggaatgtggctgtaacaaacacctaaaaatgtagaagtggctttggaactgggcaatggtagaagctggaagagttctgagacacatgatagggaaacacctacattgccctgaagagactgttggtagaaatatggatgtcaaatgtagttctggtgaggatccacaaggaagtgcaatgtgtgagagaaagcatctaccatcttagagaagacatgtatggccatgaaacagattattggta

SEQ ID NO: 327626 - DNA, 441 bp, Homo Sapiens
  misc_feature (47)..(47): n is a, c, g, or t
gggggggaaacaaacaattttcctcagtgcggttaaaattttggctnccccaacttccccagtgaggaacaaaaccacccagggaaatacccttccccgggcccacattcctttccttacccatcccttaacttactatctccttatgttcctttccctttattcctgttacatttggtgtcattaaagggcaggtgaagctgtccctgggaggtagtgagactcctgtcacagaatctgttcaagcagaagctggctggccattgaatgaggataatggagagggaattcacttacagttcgggaagatgggggacctctgccttataactccagaattccaaagggagaaacaatgttgtttttgcagtcttttcccgagtttcccatgaggcaactagagtggtctcattctgtcttagtcatgtgttgtctgaaagc

SEQ ID NO: 327627 - DNA, 638 bp, Homo Sapiens
  misc_feature (288)..(288): n is a, c, g, or t
  misc_feature (308)..(308): n is a, c, g, or t
  misc_feature (313)..(467): n is a, c, g, or t
aacaaaaggaaagaaaaaaactcatgccagacttgtttgtctgagatttatcactgtagggatcccagagacccccatggaagctggctttagtggtggctgcggctggggactggacagaacaggtcagtgtgagcttgaactagactgcgcctgcctcctggtgcacgtactgtgtttgggcatgtgttggctcttaaaatgctgttcatccatcaacatactgaccccttttgcaagtttcattgttctattattgtgactataaaagtggcacttgttacaaanccagtttctgtgatctaganccgtnnnnnnnnnnnnnnnnnnnnnnnnnnnnnnnnnnnnnnnnnnnnnnnnnnnnnnnnnnnnnnnnnnnnnnnnnnnnnnnnnnnnnnnnnnnnnnnnnnnnnnnnnnnnnnnnnnnnnnnnnnnnnnnnnnnnnnnnnnnnnnnnnnnnnnnnnnnatctagaaggtacaaggaaatgaacatcgtcttcagtcttaccactcgggagagaaccactgttaacattttagggtataatgaatatattcatacatatgtggacatatttttaaaaacaatgatagttttgtgctgtacatagcgttgctttttaaaaaaacaaccttc

SEQ ID NO: 327628 - DNA, 410 bp, Homo Sapiens
taacaaaaggaaagaaaaaaactcatgccagacttgtttgtctgagatttatcactgtagggatcccagagacccccatggaagctggctttagtggtggctgcggctggggactggacagaacaggtcagtgtgagcttgaactagactgcgcctgcctcctggtgcacgtactgtgtttgggcatgtgttggctcttaaaatgctgttcatccatcaacatactgaccccttttgcaagtttcattgttctattattgtgactataaaagtggcacttgttacaaaaccagtttctgtgatctaagaaccgtgttctcaaacttgcatctatcagaatcatctgccccacctctagagtgtctgatcagtagctttggggtggggcctgagaatctgcatttctaaca

SEQ ID NO: 327629 - DNA, 891 bp, Homo Sapiens
  misc_feature (292)..(292): n is a, c, g, or t
  misc_feature (306)..(306): n is a, c, g, or t
  misc_feature (807)..(807): n is a, c, g, or t
taagtgaacatttatttatttttaaatttctctctaggcaaacaatggaatgtattggtggtttgctggtgaaccgtttatagagaattcaactccatccatggctgggagagggtctgctgccttccgcagaggtggtctggttctccccacaaatgccccgacagctgaagtgatgctgagatgcacttcttcaggcaggaggatttgctccatgtagcttttcctatacacagggagggcgtttacagctctgcttcatagcagcggatgctggagggtgtatgagggngcttacccttgctngggacaactgaggcacagatgaatgtgtcactgagaaggaattccataacacatgtgactttcaaagtttttattgagtccaaatggactgcagatacagtgaggatgctgctgccttttgtgccaatgaattcaggctccaagatccccaggacacccccattctgtctccatctcttgcatctgctttcctttgcaggttgacctcattttcctaatcccattgcccccatgaagctggaaccatggccagaggtagccttgggaagagaaaatctcatctcctaacctttgagtggaaaatgcctaaggaatggttctgaatggctcagctggaccccatgcctctccttggtctaatcatgggagccaaagggatgggtcacttacagccagcttgtggcatttgccccgttgctgtggccaatgcccttaacagaagggcagaaaagatcatggggtcagcaaagagagcagcctcctcaaagctcagaggagtgntaggcacaggtgccacagagcagcacgagaccatccttgtgctctacaacctagtacaattgagttggggaaggtgttgattga

SEQ ID NO: 327630 - DNA, 665 bp, Homo Sapiens
attaggtcatcaccacagaactggcttttactaacaaaaccaaagaacctcaaacactttttgtggacttcaaattctttccttcagattttaaaatgacattatgcatgtacatatttttaaaatttagacacattttagagaacacaattgtgaacacaaatctaagaaatgaatgagatgttctgaaatctgattcaaacacttatcttaaactgacttctgtcaatcctctgtcctgtgaagtaagtcccgtttctcctttgcctggagggaccgagctggaattactgtcacatgttacagacatgaggcaggggttaatgcagaaccacggaacagcacctctgatgacatctagtggataagtaggaaggtgtcaacccaggtggcttttaaaaaaatctgtaaataaaatctcctcctttattccacagattttaatctttccctcagtgtgttagaaagactaatagtgtttttcaaacgtgtgtggatggactcacctggggagacacccgcatcctaggccacctttgtggcggctctgcagacacctggctgcacccgctgcctcctcgtctgagaggggctgccctggagagcaccgtgctggctgtgttcctactggcttcccttgagaaatggggaggcaggacctctac

SEQ ID NO: 327631 - DNA, 822 bp, Homo Sapiens
atttttgctagctttattcctgttactttatggctgttaatgattaagatcttttcccatcaacattttctcctggattatttttggcatataggaaggaaattgttttttcatgttgatcttttttgcctctattctattatttttacctctcatttttgagtcatattttatcagttactacttctaaaactggaccaaatagtagtattgatgacaagtatttttgtctttttcttgtcattatgggaatgcttctggtgtttccctcttgaattctggatccatttctttattttccatttgggtagttttgttttcgatggccaatcttgttttcttactcctgccttgtgaaagtggccacacacacttaacgcacgcaaatagtggcagcagaaatacgtttgtagtagtccaggaaaagacagtgacaagggctggactgtcttagatttggaaaaaagatgtatggattttggacttgatgatgttttggatttgctgtgcacagggaggaataaaagataaattctaggtgttaggaaacttactgagatgagaaaaacttgtaaagaagcagtttttgccccgtttgggaggagagcaatttatactctgttggagtgtaaatctggaatctgaagattctgctaaagatatctaagtggaaattttaagtaaggaagttatatgatttctcattttgttctttataagggagacatggtggaatgaaaaacatgctttggagataggactaaaaagatgataatcattagcatgcatttatcaatgataataatggccctcatttattaa

SEQ ID NO: 327632 - DNA, 586 bp, Homo Sapiens
  misc_feature (329)..(329): n is a, c, g, or t
  misc_feature (354)..(354): n is a, c, g, or t
ctgatattgaagttatttgtaccaaccttttattttaattagattattttctgtctagtaccatacagttttaataattatgttataccatttgtttaatgattctagtattctttttgtatagaatttcccttcacttttttcatatatttaattcccagatagaaattagaatcactataagtttcagaaaaaaatcatattggaattttaatggtaatgtgctgaatttatagattaatttgtgaaaagttaacaacttgaactgatttaatattcccatccagaaacaggtctgttcatttatcaaaagtgggaaaaaaatttcntttactttccaggtcttgtgtatgnttttaatacactcctagatactttatacttatagttggtatcagaaatgttgttttaaaactcttgtattttctgttagatattataggtatttaggaaaacttatgaatgttatatattttatatttatacaaaatgacattttgagctgaagttactacttggtgtcattcctatattatatattttcatggagaaagagatttccagtttggaaaccagaagtctagta

SEQ ID NO: 327633 - DNA, 882 bp, Homo Sapiens
  misc_feature (516)..(516): n is a, c, g, or t
ccataggtattcttaaaaaatttatttatagaaacagacatattcaaatgcaacactggacaaaaacaaagagaaaaagttggaatgccgatgacaacagagaatctcactttcactttccatttctctgaattagcaccattagttcagaaatcacagatgtaattataattgcttctaatatataaaacaccttataaagatctgtaaactatctaatagcaaagttcttccaaaaacgcatttaaaaatcaatcagaatttaccatttgaaactgatgaaaatggtttaaaaatgaatccagttctacagcttgtcaaagggaatgagccataattagttttattggaagaaagtgcctgaattcatcttctagcctccttctaaccaccaagcaggtacagcaaattgaatattactacaggaataagagtcatctaaaactggtcttagaaaatattttcctaaactataaaaatactaaatggcatacaaaaatttcgggcatatacagncaaatagactacagcagacaaatatttagaacataacttaaaactatcttgtaccacaatcatcataaacatcaagtattcttctaatcagttttctatgattcattctaattcaatgtttatttaccctcaagttttgttctagtgtcagatacagaccaaattctgtgtttctagcagaagttactggaggaaccattgaataattcttggtattcaactcgttctcaaagtgctggaagtgcaattgtagtatagcctattttttagatgaggggtcagcaaactacagcccaggggccaaatctggtcaccatctgttttgtccggcctgggaacccagctacacatattcctttatgtact

SEQ ID NO: 327634 - DNA, 943 bp, Homo Sapiens
  misc_feature (104)..(177): n is a, c, g, or t
tggctcatcattgtattctaagtcagaagttaaaagcaaggctttggatctgactgacttgaatttcctttcttctactttctagccatgatacattgggaatnnnnnnnnnnnnnnnnnnnnnnnnnnnnnnnnnnnnnnnnnnnnnnnnnnnnnnnnnnnnnnnnnnnnnnnnnnaggaagatgttatttgaatgaaataaaaaatgttaaaatatttcaatgcttggtacatactcaataaatgatagctattattgtactgttaagagaatagcattcacagccttccacaggtcattacagcttggcttgcattatagatttcagatctattagatgcttgctaatgtagctcacgcttttatacctccatggatttgggctcatgctgtgttccctacttgttggagagaatgctgtgccacctctcctgtggaacctttctcagttactacagtcagacctaattactctttagggcttccttagacttaatgagagaatatgccactaattattctcgttcttctagcacttagctttggctaagagttgggctcttaagagtcagataaatagcaagatcagtcagtgttagctgctattgttattattatttttattagttgtgtacctgtcttctcttttgacctccaccagactcctgcctcctcaagggcaaaatcatctggttcatttttgttttctcacagtgtctacagcactcccttgtacataatgagtactcagtaaatgtgttgtatttaaagggtggaacttcagcctttctggagctgcctgatagtggaaggaagtgagatgggtaaggtcagaggtgatctgctttgaatgttgtggagtgatctgtagcagttttctgctaggggaatgggagcatggtcctgcatcacctgggctgtgtggcagaattcttccagtt

SEQ ID NO: 327635 - DNA, 597 bp, Homo Sapiens
ccggcccagactttctacctgattatgaggataccaaagcgaacggctgagctgagcctgcctcaaacctccaagaggacgtggacgtccaagagtgactgcggcaccgcagtgatgttctaaactcccactcaaccccagcattgactcagaaaccttcgccagctttcagggcacctgaaggctgacagcgaggaaagccagatccgccggagacaggccctttgctaaccagaccttggccagcagaagggcgggctgtgtgcagctttgaggaacaagagatgaatggaaacacacaaaaataaaggaaatgacagaaaagaaaggcaaaccattgccagagcacattccgggcgcagcgcggggtcctccccaattccctgaagtagcccatatctccgcaccgggggatgagcttgtgtggtgactactcagtgccacatatcctcaaagggcaagaaacgtttctggaagttaccacaccctctttactcagggagaagggaccactggcttttagaaacctcttcacaaggagggtcatgggggaaaagagattttctactttatctgctaccatgctaacatttaacc

SEQ ID NO: 327636 - DNA, 312 bp, Homo Sapiens
  misc_feature (138)..(138): n is a, c, g, or t
  misc_feature (172)..(172): n is a, c, g, or t
  misc_feature (191)..(191): n is a, c, g, or t
  misc_feature (235)..(235): n is a, c, g, or t
  misc_feature (243)..(243): n is a, c, g, or t
  misc_feature (275)..(275): n is a, c, g, or t
  misc_feature (291)..(291): n is a, c, g, or t
  misc_feature (300)..(300): n is a, c, g, or t
gtgtgcaccactgcccctggccccggccagactttctacctgattatgaggataccaaagcgaacggctgagctgagcctgcctcaaacctccaagaggacgtgggacgtccaggagtgactgcggcaccgggtggantgttctaaactcccacttcaaccccagcattgantcaggaaaccttcgccagnttttcaggggcacctgaagggcttgacagcgagggaaagccagntcccgccnggagacagggccctttttgctttaaccaggancttttgggccaagcangaaggggcngggctttttttt

SEQ ID NO: 327637 - DNA, 511 bp, Homo Sapiens
gttgcatctttatatattatctgactgtcctacaatgagcacttacaacatttttctaatcatcatgcccatttcattttctaaaaaaaatgttcataatatggaatatatctttcctgacctttttaattcacttatgaacaaaacagacattttctataagtgtgatcattctgtgcacacttggttaaaacaattgtatatgactttcataatcagaaaaaattaaagtttcttcatgaaattcaactatttgctattcaaggagatgaagtagattggtgatttgctgagtcatctgcttatttcctcactcagaatgcctctggtttttctacttctccctatacattttggaagaattccaaaggtacatcagagaaatggccctggtaagctgagcctgcttccagagtgaccacagtgaggcaaattcaaacacgctccatttcattcagtgggctggtggtcacatattttagccatgaaaggaacaagaattcactcaact

SEQ ID NO: 327638 - DNA, 672 bp, Homo Sapiens
  misc_feature (462)..(462): n is a, c, g, or t
  misc_feature (628)..(628): n is a, c, g, or t
  misc_feature (633)..(633): n is a, c, g, or t
aactaatatataaactcacttttagaaaggctgttaactatcaaagtgtctcataaatggacacatatttatgtgttatatgtaagttactttttcagtgttcatgatcaggattgattttctataatcagtattttcaacatttattaaaagcttctatttatgtatacacatttaactccaaagtattttaatacactttggtagtcttatgacttagtctatcttatattatgttcactgctttggcattcagtcaattttaaaagcatgtttctatttcatgtttctttttggcatattttacaaaaagtaatatgtagaattataaataaaggatgaggcctcggtctgtagagaatttaccttttcttttgttcttgcttgggaaacacattattttacatgggtttatgttgctttgatttcagtagttttatgtcactttaaagtattttaggnttgatatatataagtataggttaaacactcatcattttaattgatccaatgttgaacaaagagagggcattggctatttcaattaagaaaataatatatcaaaaattaagtagcagttaaagttactttcttgcagagactgcctcttttttgctgaatgtaatgnggcangaggtaagaaatatcactcctaagcttctatcatgttta

SEQ ID NO: 327639 - DNA, 451 bp, Homo Sapiens
  misc_feature (393)..(393): n is a, c, g, or t
ttcggcacggagcttttgcacatcaataggtatccctaggagggcctgattcagaagccctcatttttaaactcaattcttagatgaacagtcttattcatctggaatgttccacataatggtcatcataattctaatttatctttagtaagatttcaccatttttgtaagtatttgcagcttctaggccctaacacatgtaaaaggtaaacatagccagaaggtgaaatacacagttctttaaaaatttaagggatgctggccagggcgaggtggcttcacacctgttaatcccaggcactttggggagggctgagggtcgggagggccaggggagttttgaggacccaggccttaggcccaacatggggtggaaacccccgttcttctacnttaaaatttaccaaaatttaggttggggttttgggccgttttgggcccttttattccc

SEQ ID NO: 327640 - DNA, 762 bp, Homo Sapiens
  misc_feature (57)..(57): n is a, c, g, or t
actcctggtagccagtggcagtgccagtgatggctgtggttcctgatgcctcgtganccaaaatggcctgcaaaccgtgcagcttcttttggccactctcatcgtcctgggacaccagctgcatgggcagctcaggctcgatgctggccaacactggcctggtggactcccactggatgctcagagagctgaagttgtcgaaccggcggccctcctggtcgtaagcagccaggtccagccgggggttgcggtggctggacactgggaccacctgcttgttctgctgcagcagcggacaggacatgtccagctgggggctggtgtagacaggcgcgagggtgagcctggacggtggggcgcagacgaacttcaccacggcaggctccaccgcaggaaaggggttggtgaggctgggcttgttccccaccgacagggcgatgacctgctcacccaaggcctgacaggtcacaaggatccagtgttgctgataattccgggaggaatggggggcaaagagagccaggccgatgctgtcagtgtcctcagcggtgacgttctggaagaatttggacggctcgaggatccaaggtctgggacctccttcaaacagcatctcctttgaggagcccagggttaccaaggcaacagaggagggatccacagccttgaggggcaggtaggcagcaatggtgatcttggcactcaggtggacgtggccgtgtctgtagctcacaagaagcgtggtagagccctgggcctcgg

SEQ ID NO: 327641 - DNA, 351 bp, Homo Sapiens
  misc_feature (334)..(334): n is a, c, g, or t
ttttaataggttagagattaaaatgtcatccatctttgatttatctaggcctatatgtatatacacccctaccctgaccaacagacaattgtataattctctctatactttaagtgccacaagagttatttaatgtgtcacttagattaatccacatatttaccctttttgttgtttcttcattccctgaatcttcatgtttcttttacaaacttcaagttttttcttctgcttaaacaaaaactttaggtatttcctttaatgtagggtattctgggtaaggaatgtcccattaaatttggtctacaactgtcccttggtaacctttatcccntggaggggcattttcac

SEQ ID NO: 327642 - DNA, 278 bp, Homo Sapiens
taaacctttaaccccctgaaagggcaattttccaccgggttaatgggaaaatcctaggttgggaagttattttggtttcaagcccctgtgaaagatgtcaattcccattatccttctgtcttcctattgtttctgtggagatggtagctcctcagacaaattgttggttgctcgtttgtacatactccccactcccatcctgccctgggtactctaacattttttcactttgtgtttagtttcagcagttttaagataacatgcctaggtcgggcgcg

SEQ ID NO: 327643 - DNA, 723 bp, Homo Sapiens
tttggctacagctcccaaagtgcgggataacaggcataagcactgaatgttcttatttttattatcatctgtccccccaacccccactagaatgtaagatacaggaggggtttgtttcagtgccttgccacattctcagggcctggaatggtgcctgcaaccaaacaggtgctcaagtatttgttgaatgaataaatgatttatcagtcagtctcttaggagtttagttagcaggacttggttggcaagaatcagagaagtcgggagccagccaagagggggaggcggaactgccctgcacaggtacttcccggagccccagctgcctgctctctttttagcagccacaccaacaatgtatccgtttttaaagcaaatgaggaaataatggttcaacctgggcctcattcaagtgagaatggcgtcatcattaccctgtacctgccctttagcaaaatagagggggaaggccctgctctgtaacctgatggcctagcaacaaggggcaagggttagttgggacaatatagggaggtgactgtccatcctcaccttaatggacatgaggggaggggagggaaggatggggcaagaaagtgcaggcagaaagatggagcaggcaaagatgaggaagcaggccaggctaggggctgtcagggaccttccccagcgtcccctcctccctggtcctgtacccagctgggtcccagacactctccactc

SEQ ID NO: 327644 - DNA, 1413 bp, Homo Sapiens
  misc_feature (1313)..(1313): n is a, c, g, or t
ttaggggcctttgcctgaacatcctaactaacccttggaagagtttgatgttccagtgccataccttattaaaccttaaaaaaaatagcaaatttaattgtaaaagtgcctcccctttgtttccaaaagtgtttgccccggcatcccagactacacgtgtggatttgcagggagccactggagttggtgttacattttttatactttagcagcactgataggcaccctggaatcctcacttggtatccgagggctactaagactctttccttaggttctttcctctgagcaaacactgactggcatcctgctttccagtgcctgccagcctccagaagagccaggtgcctgactagtacatggggagctacagagccaaggtcaatgtgagtcaacatccactagaaatatccatgttgtgtagacctgtgcatacaacatgctaactggaaaagaggaaaaaagaaaagccacagtcctctccacaaaaatacctggtccaaacaagaaaaacaaaaagacaagcaaaactaaagaactgcagtcttctgatctttaatttctgaagagctagcctttaacatacatgtttatatagtttaaatttcttactactgttagatcccaggaattcattaataatcatccttggctttccttttaaaggctattttgaaatggtcttttcactttcattcagtcatcaccccccaaaatgctctgcagcctctctgctctttgagaaagggcacaccatgcgctcggcaaccattcaaatgcaggaattaagcagcaatggctcaggtgtccttctcagttatggaggacatcgtctcattagggaacttttacagttcaaattaatttgcagaagttgccataaatgtttgcataatgacatagctttaagcactacatgattttaatctgctcacattataacagggaccaaatacacaagaggcgttaatcaaatcatctgtaacttcttaattacagtttacctatttctgacatgcagcactgccatctcttccagcaccatcagggttttaatggccctctagaattaccactgagatacactatttgatccatggataaccggtaatgggaaaatgctccgaccctcaatgcagtaaatatttacttgcaggcaactgggttctcatctcttgatttgcttttgtaatcagcaataataaaatagcaggtagatggatgacagttgctcattctgagaaacttcactcttttcacttatgcatcacgaggaaataactaaaatacataccaagagaaaaataccttgncatcggatcatcaacaagtcttctatttacaaacttcaaaaaacacaaaacaacattcatggtttaaatgctttctacttgggggttcaagaagcactag

SEQ ID NO: 327645 - DNA, 456 bp, Homo Sapiens
  misc_feature (387)..(387): n is a, c, g, or t
  misc_feature (435)..(435): n is a, c, g, or t
aagatgccaaagcagttctagaggaagacgaagaggtcacggaggaggcagaaatggagccagaagataagggacattaactgtgagagaagctgtgccgcggagtcgcttacagaacagtttctcattagatgagtgtttctcctgcagcactccaaaacccactctgcactgcagcacagtgaatgatatgcactcaccattagcttcgacacagggactgagggagacaggtggggagcagctgacaggcattagggtctttgctgacatctactaaccttggaagagtttgatgttcagtgcatacttattaacttaaaaaaatagcaaatttattgttaaagtgctccctttgtttccaaagtgtttgccgggcttccagantacacgtgtgggttttgcaggggagccactgggagttgggtgtttacnttttttatacttttagccgca

SEQ ID NO: 327646 - DNA, 455 bp, Homo Sapiens
  misc_feature (415)..(415): n is a, c, g, or t
ttttttttgaattactttgtagtttaatgattactattgagcaaacaaatctttacagtaatataagtcagcaaaagttttttaaaaggtttaaatccctccttccttacatctatttcattgcttttttaggtttgggaagtaaagcaccagaggaagcatgtgtaaatccttgtataatcgcaggctgtaagtctttagcatctcaggaagttactaacttcaaactaagtatataggtagagtttcttactaaatctagtgcttcttgaaccacaagtagaaagcatttaaaacatgaatgttgttttgtgttttttgaagtttgtaaatagaagacttgttgatgatccgatgggcaaggtatttttctcttgggtatgtattttagttatttcctcgtgatgcataagtngaaaagagtgaagtttctcagaatgagcaactgtcatcca

SEQ ID NO: 327647 - DNA, 812 bp, Homo Sapiens
  misc_feature (469)..(499): n is a, c, g, or t
cccagtaattcggcacgagtggcttcctctagactttatgtggaaacatttgacaaataaggtaactgaaaacaaatagtttgatttagagatacttgccatttcctgtgttcagtaaattttgttggtaacaaatgcatattttataaattgtaaatgttttatacataagttgaaatggttgatatatgcttgctaattaaatgctcttgtgcctggtcttggtggcacttgcctcaaggattgcttgagtctgggcattctgggctgtagtgtactaagccgatctggtatccacactaagtttggcatcagtatggtccaggctgcataaggaggggtgaaccggcccataccagaaccagagcaggtcagaactcctgtgctgatcagtagtgggatcgtgcctgtgaataggcactgcatttcagcccaggcaacatatcaagacccctatctgttaaaaaannnnnnnnnnnnnnnnnnnnnnnnnnnnnnnaataaataaatatgttcttctgtagtaaaaaaagaattgaattgtctaactagaaatttgtgttgatttggatcaggagtggttcctgcgttttaaatttgagatgttcttaccagtattttgaggactcagaacggttaatgtctatagtttataactaatcattaaaatagggcgacaaaggctgggcacagtggttcatgcctgtagtcccaccactttggggggctgaggcaggaggattacttgagctcaggagttcaagacccagcctgggcagtatagtgagacctcattgctacaaaaattgtaa

SEQ ID NO: 327648 - DNA, 457 bp, Homo Sapiens
  misc_feature (420)..(420): n is a, c, g, or t
tggcttttctagactttatgtggaaacatttgacaaataaggtaactgaaaacaaatagtttgatttagagatacttgccatttcctgtgttcagtaaattttgttggtaacaaatgcatattttataaattgtaaatgttttatacataagttgaaatggttgatatatgcttgctaattaaatgctcttgtgcctggtcttggtggcacttgcctcaaggattgcttgagtctgggcattctgggctgtagtgtactaagccgatctggtatccacactaagtttgggcatcagtatggtccagggctggcataaggaggggtgaaccgggcccataccagaaccagaggcaggtcaggaactcctgtggctggatccagtagtgggggttccgtggcctgtggaattagggcactgncattttcagccccgggggaaacatattccaggacccc

SEQ ID NO: 327649 - DNA, 672 bp, Homo Sapiens
cttaagccatttttaggaaacaggaggtttagtcacgtgctcaacaaaagcacaacaaatggggagcatttaatggtgtaagggctgtgaggtgtagctgctgaaactgtagctaggagctgccttgctgccttcttgcaggcagattggccagatgagccaggctaaaatacaattaatatctaccattgtggtttaatatgaaatatggatacctggtctttgtctcagttcttgtcatagagttccccaaacctttagaacttcctgagtggtaggaatatctcattagtcataatgagcccctttgattcgataactcctgagtttatgctaatgaggttacttaatgtggggccctagatattcttaggatggggctagttcccggaaagaccaggtcatttgagggttagagggttggaacttttagctctacccactgatctctgggtggggaaggtgctggagatcaagctgcctaaaaactcttgaacaacaagatttgaggagcttccagtaaatgcgtccacaagctgggagggcactgcaccccagtttcactgggacagaagctcttgcacttggaatctttccagacctagcccttcatgctgcttcatctggctgttcatctgtatcctttataataaattggcaaatgtaaaggtt

SEQ ID NO: 327650 - DNA, 613 bp, Homo Sapiens
atatatgcatatttatatttttttaaaagtcttccagaaagaacaattgaaagctattgggagaagaaaaacagacaatgtaaaactttcccagctatcactcaactaggagtctctgttcctggggtttaaaactctgagttaaaagcgccaatataaatcctttgagataatatacctgaccaatgtacatacacacataagatggcacgctgactgtcaagagagcccttcccactggcgcacattcctgagttcacaaaggtgctgtggagagacgacagagcagaagtgctggctaacaaacatgaggcaagccatccagaattcacccaaagcctgggtggagctggggccctcacagcctggccttgctcagaagttttgttgccgtctcttcttagcctctatggcatccaggatgggctgccgcttggactggtacttctgccggatctcttcaatctcctgctccatcatggggtccagggccaagagcctcttctgaaggtcctccactgtccaactcttaagaaactcgtagtctccatcctgtggtattttccaatctgaagaatttttcagtggaccaggtacactcttgccaaagctg

SEQ ID NO: 327651 - DNA, 720 bp, Homo Sapiens
gatgaataatgtttttaatgaaaaatgtctttttcatgatagtataagctatgtctgtctgcctactttttctttctcatattaatatacatgtgaagagaatgctctctggaatgacatttaactaatactaatgaagattagccctattgatagaatttagaataattttaaactctcctctttatacttttccacactgcctacttttaaagaacacaaattaaattttcaaaattaaaaaaatcattattcttaacaataaattaaacttttggcactagcaaaaagataattctaaaagtgaaccacttataatcttaaacaggaattttctttctttctgttagagtacaagctaatctcagggtaacagaaaatatttctgaccaaaatggagaaggatgggatataaaacaggagccggagcagattcaaacaccatgggactcagaaaagaggatggctggtgttttcaggggactgacagagggcaattctcttttcttttttcccagaacatagaaaactggccatgtctcttggggttgcagctcccgaccacccccagaaagcaatattcaataaatttcacataaccacacttaggttattgggctccgacaaaagaaatttgtcttagactgaaatcaatagcaaaactatggtatttataagttctgtggatttccttgaagttggcattctgaaatatgtact

SEQ ID NO: 327652 - DNA, 336 bp, Homo Sapiens
catgttaaacaggcaaaattcattttaataatatattttatttaacccattgtatctaaaatattgtatcagtgtgtaatcagtattttaaaattgtgggttttcacattctttttgtactacatttccaaaatcctgtgtactttacatttaacagcatatctcagttcatacgttttcatcagaaatacttgatctgtatttagatttcataaatttacagttgacaaagtagattcctgtaatacccagattgtttcaaacacacctagggactttccagtaactgcattgagtatctgggctttgcaattaacttttaaattttatttaatt

SEQ ID NO: 327653 - DNA, 623 bp, Homo Sapiens
taaagcaggcgatggagaaagggtggttctcctgccatttggttgtgtgattagaagacagccctttgtcacacagttgtcggcctgcctgtgatattcccggctatggccaagatgtgtgaggtaagccccgggttcctcccacttccgtgtattcctgaggactctgctttcccacactgagttttgcatcttctcacagggaatttctatggcttctctgtactttgctaattatatgcacattaatcatggtgacctggttataggctatggtttcaagagaagataaagttcccaattggtatctgatgggcaaaacaggtacagatggaccccctgggctttgcccttgttgagctcatgatcactactaaccaccccccagatgctgggccactggcactctatcagctgccctatacatgggtctgggctgctagaggtacctggtcttccagtggtcccttcaacagtccctttcctgtggccagtctgccctaaggcaagttttctaacctctagccttgttgcatggactagtagtgggcactgaccgtcactttcaagaccaaacagtatcagtgtttgttgctaatactaagtgtgtctggaggctgggt

SEQ ID NO: 327654 - DNA, 779 bp, Homo Sapiens
  misc_feature (272)..(272): n is a, c, g, or t
acagttcacttgattttttattttgaatggtcccatgtgcttgaactcctctgactattatgttattctctttccagcatcccatccccccatctgctcatccacacttttttggttcctgccacaagcccctgataattgtgcatgtcccataacctgctggttactcctgagctcactttgatagttctgcatgtgctacagtctctgcttgtctcgctgggatcaattcactccatgctggtcctgggtccatctgagaccctcccctnccccagcttctagccattaatgcctacatatggacctacattggagaaattatctgttctttgttcctgaaagatatttccagttcattggctttattggcttattctgtgtatttgaggtatgtatcttatgcttttcccactttctacacactctcagacacagttaattgcccctgctcttttccatttccccccatatattcattggtttatattattgtcttatgatgtgcctcttacatttgacaatttcacatgaaggcatatccaacatctggcctttaagtttatggtccaaatttctacgactaaacttatgaatgcttcagtcatatacttgggaattcatcatcgtttaacattcatttacccccaagtaattttgtttgttcttgttccctgtgaagttttgcgtttttgctaaaaatttacgataatacttcctgctccttctctgtggaattattaaggctcctgtcagaaatattttcctcgtgcctaatt

SEQ ID NO: 327655 - DNA, 806 bp, Homo Sapiens
  misc_feature (56)..(56): n is a, c, g, or t
aggggggtttttggactctggatctggggttcattgggcctttttcctgcaggtgncgggaaatgttttttaaagtgaagaaaccagttggggaagctccagatggaccagccagtgcctacttggccgacaccacccatacctccttgtacatggtgaggccccaaggatgggtgtagaccagcgcagggggtagaaacgatttttagaaacgaaagctttttattacctttcacaggtgggttctaccctgagccctgttccatggctcccttcagaggaatccactctctggagcagtttgtctcctccaggcctggaggccttggtgtctgaactctgtgctgtcctgaagcctcgcctccagccagggtgagtgaggtcatcaccccagggtgtgagaaaagcctgcttagaacatccctggaggagcagcagccagatgggtagttcctaatgaactggccagagtgggattgggaggaccttcctcaaaccagtatgtcctacacaaggccaccaggccactcctttctgtaagccaattcccaggctcctttcctgggataacctctgtccctcccagggctggctctggaggaataatctccagcaggggcatctgtttctgagactgcccttccccttggggaactcactggccatcctgcactttactgccctggccctgaaggacacaactcctcataccagtggcccaggtgtggacgcagatccccacctcagtgccaccacaatgtctctcaataccattcagaccagtcataacgttgaggttttattgg

SEQ ID NO: 327656 - DNA, 690 bp, Homo Sapiens
  misc_feature (23)..(23): n is a, c, g, or t
  misc_feature (63)..(63): n is a, c, g, or t
  misc_feature (157)..(222): n is a, c, g, or t
  misc_feature (318)..(457): n is a, c, g, or t
aggagccaatattattttggggnaaaggggcaagtaaaaataaatactgtgttagaaatcagnaggcttagcttctagtgctggatcagtaaatattgttttaaaaatgaattttatttaggtgttcacgcaatgttcatgttcacacaatggacannnnnnnnnnnnnnnnnnnnnnnnnnnnnnnnnnnnnnnnnnnnnnnnnnnnnnnnnnnnnnnnnnccaaagttccctggaacccttatgtagtcaattctcccatggctacccagatcacaggtcaccactcatccatcattatagggcaattcttgcttnnnnnnnnnnnnnnnnnnnnnnnnnnnnnnnnnnnnnnnnnnnnnnnnnnnnnnnnnnnnnnnnnnnnnnnnnnnnnnnnnnnnnnnnnnnnnnnnnnnnnnnnnnnnnnnnnnnnnnnnnnnnnnnnnnnnnnnnnnnngaattcctgagttgtaagaaattgtcaagtggctatatcattttaagccgtggacagcccaggtaggtaagttcccaactgtccccacaactcacaatctccttttttccttaatggcatttttcaaaaacaaaagagaatacttttgataaaatacaatttataatttttttacagttagtgggttttgtgtcctaagaaatctttgcctcccaagacaacaaggattttat

SEQ ID NO: 327657 - DNA, 667 bp, Homo Sapiens
  misc_feature (445)..(469): n is a, c, g, or t
  misc_feature (492)..(492): n is a, c, g, or t
  misc_feature (563)..(563): n is a, c, g, or t
gtaaataataaaatcaaaaattggatagttttctaaataaccactatgatagtaacatttattgagctttcctatctgccagacagtgttagatgctctgaatatattatttctgttccaggagagagtttgcattttcccatactttttttgttttaaatgctgaaagaaattttagcaatatattgtatagagtacagtagcccacgtggtgtaaaacttggattcctctggttttctgttagggctgataggtaagttgcccttgtcctatgtgtcaacagtagagtgtaaagtgtgaagagtattttgaatacaatagtcatttctgtgaatggctaccgtaacatctgttggttttcctccaacctcagtggccacttctctgcaagttgctttactaattcctcctttgtcttattgtcaggtgctttaccttcttccnnnnnnnnnnnnnnnnnnnnnnnnnggcattaaatgctatttttatgntcattactttcaaatttgtatctttggatgagagttctagcctgaattgcatattcatatattcactttgngtatttacatctcctcctggatttttcataggcatttcagaatttttatgctcaaaataaaacttttgatttcctttctacttctatttcaacttggtcctttc

SEQ ID NO: 327658 - DNA, 1281 bp, Homo Sapiens
  misc_feature (493)..(507): n is a, c, g, or t
cttagctctatgtgttagtttttaaaaaaatctacattgttttgagtgtttggttattaatagtttatggatataactgctgcacagtagtaactccttcatctactggaaggaaggtcaatttttcagtcattagaaataggtagctaaatgagatgcttcttatttttgcttggaggtgccaggtttatttgccaactttccacagttagaaagcactttggatcaccactgtcagatatttagatttctttttgagtctggaggattgtatttcttatcaaaacaaatatccaagtttatgctttaaaaatattttaagtttttattaattgcagaatatgagaataaaggaacgaccaaatgctgtaccatattgcctgactcactctgccactaaatggagccccacttgatcctcacctggctttctagattatttatttcctgtatattcccctacattttagtcatatctaacaacttactgggnnnnnnnnnnnnnnnggaaaattttgtaccctttctggcttctccactctatgcttttctcaccactttaaatgtccattttccatatgtcactgttcaatctcagtgcattaaaataatctttatcctttaaggccctgctcaagtactatacaaaaaaatacaaataaacctctttcttctgcttctttaagccgttagtacttattgagtcttgttgtagttatcttagcttcctctctggagcataagcttctggaaggtgtgaatcatgtcctgtacagatctgtgttttctgtagggcctaggaccattcttgtcagaacttgccatttaaagaatggcagatgactgcttcccagagactacacttgacagggaggtctaggcaggtcctagcagtaagggaatgcccagaacaattgagctgttggtttccaggaaaggtcctaggatgaatgccaggcacacgtctctgcaaggcccacatggtatgaaggaggtccttattgtttgaaataggtaaaggtctaatctgtgaatggtcactgtcaggatattcagggatctagtctgagatgcttggttttgtatctgaattctgaattccaaggtctgaaagatctcagagtggggtgagataggaatcaggactaggaaaaacgagtgtgtcagacatgaacttggtgtgagtggggaggagtgtgtggagaccagacagagactagtttggcaattaagtctaagttagaggctcgagcaacagggtactcatggtgctagctctct

SEQ ID NO: 327659 - DNA, 779 bp, Homo Sapiens
  misc_feature (158)..(398): n is a, c, g, or t
ccactgaatcataaattatcaaatctgcgcccagtaatctgtgttttaacagcactccaggtaattgtgatgaccattaatgttagagaattgctgccctaattaaaccctctaattttacgtataaagaacatggaggccaggttcagtggctcttnnnnnnnnnnnnnnnnnnnnnnnnnnnnnnnnnnnnnnnnnnnnnnnnnnnnnnnnnnnnnnnnnnnnnnnnnnnnnnnnnnnnnnnnnnnnnnnnnnnnnnnnnnnnnnnnnnnnnnnnnnnnnnnnnnnnnnnnnnnnnnnnnnnnnnnnnnnnnnnnnnnnnnnnnnnnnnnnnnnnnnnnnnnnnnnnnnnnnnnnnnnnnnnnnnnnnnnnnnnnnnnnnnnnnnnnnnnnnnnnncagcaagaccgtgtctcgaaaaaaacaaaagtaagcagatggaaacctgaagagataaaataacctgctcaaaaccacaatcatggagactgtttgtttagggtccatttatatgcccaagtaccagggtgaccactttttacattttaacatcaggtcctcacaacacccagctgggccccaattaacagaagaaaaactgaggttcaggtgtgagatggatggagtaatttgtcaaaggcggctgatttttaatgggcaaaattaacattcaaatccaagttgtatgtgatcccaaacccttactgaaaccaggaccactgagtgttctgagggaacgataccaagcacacgcccagctcgtgccgctcgtgccgaatt

SEQ ID NO: 327660 - DNA, 299 bp, Homo Sapiens
  misc_feature (131)..(131): n is a, c, g, or t
  misc_feature (243)..(243): n is a, c, g, or t
  misc_feature (256)..(256): n is a, c, g, or t
  misc_feature (264)..(264): n is a, c, g, or t
  misc_feature (272)..(272): n is a, c, g, or t
  misc_feature (279)..(279): n is a, c, g, or t
tgaccattaatgttagagaattgctgccctaattaaaccctctaattttacgtataaagaacatggaggccagggttcagtgggctcttgcctgcaatcccgacattttggggagggccgaggtggggagnaaccactttgaggtccggggagttttgaggaccacgtaatataggttaggaccctgtcttctggaaaaggaatacaaggatttaggctaggggcatggggtggggcatgtgncccattaggtccnaggcttgntcgggganggttgangggcaggaaggggttcactt

SEQ ID NO: 327661 - DNA, 848 bp, Homo Sapiens
  misc_feature (322)..(322): n is a, c, g, or t
  misc_feature (457)..(457): n is a, c, g, or t
  misc_feature (551)..(603): n is a, c, g, or t
  misc_feature (613)..(613): n is a, c, g, or t
  misc_feature (671)..(774): n is a, c, g, or t
atattccagtaaaactttatttagataaataaggagctagacagattttgcccatggaccatagtttgatcatggccaacctatgatctaaaccaaagtccctaggcaagttgcaatagaaaagttgtgtgagacagtgagattttgcctttgttattcaatggcaagctagcccatgctgacacagaaattggtcccttgttttttaaaatgctaaaatactgaacactggcttaatggttagctggcaggcattcaggaaattgctatcagaacgatggaagaaataacttacacaaagggtaatttatattatggaaanggtgaaactgccccttgagataacctgaaaggcagatcatctaccctttactaaagaaaaagacagaaaaaccaaatatttttgtagttggctgttcactgcacttgacaaaacgtacagaaagagatgaactcnggaaaagactggtcagtttgcaggcaaaaatgaaagggaagagaattcaaattcaagtacttactgggtaggatgaggcaacattttaatatcnnnnnnnnnnnnnnnnnnnnnnnnnnnnnnnnnnnnnnnnnnnnnnnnnnnnncctttagccnaaaaggttgattaaaagccagttttgccgccgggtgcagaggctcacacgtataacannnnnnnnnnnnnnnnnnnnnnnnnnnnnnnnnnnnnnnnnnnnnnnnnnnnnnnnnnnnnnnnnnnnnnnnnnnnnnnnnnnnnnnnnnnnnnnnnnnnnnnnttagctgggtgtactcgtgtatacctgtattcccagctacttaggaggctgcagtgggagaattgcttgagcca

SEQ ID NO: 327662 - DNA, 737 bp, Homo Sapiens
  misc_feature (547)..(600): n is a, c, g, or t
  misc_feature (627)..(627): n is a, c, g, or t
  misc_feature (635)..(635): n is a, c, g, or t
  misc_feature (726)..(726): n is a, c, g, or t
gaaaagcaaagttctttttcaactggacacccaaggtaggggagaacatcctccttacctacaaaggaattcttaacaacttgaggtccaggcccacgtcaggtatttagcaatggttttagacttacagtatgccaatttgcaaaatggagaaggttaactttttgcataagaggttttcttttctgctttgtcaacttttctctacctgaagaatggtatcttacagacagccttgttcctataaccaaacactctcatatgaactaattctagagaaattcatatttgtgttgatttctgtccctctgtactttaaaaaccacaaagaatgtatacagtgggtcaagaacatggctctcaggtgagaaaaggtcttcttccatctagaatggccaacttctgtgagagcaagagctctggtcattcatcatggacatcctcaacatctgccatcatgcctggacacaaattggtttaataaatggtttggtcaaatggaatgaatgggtgcaaatatcaattctaccatgatgatttcattggnnnnnnnnnnnnnnnnnnnnnnnnnnnnnnnnnnnnnnnnnnnnnnnnnnnnnnaagtttctgtggtatagggtatgcaangagcttancacagggcctggcatgcagcactcattccctggtgcctcatgttgctatttttagagcaatccggtctttgaaacattttttgggactcantatgaaaggag

SEQ ID NO: 327663 - DNA, 439 bp, Homo Sapiens
  misc_feature (52)..(52): n is a, c, g, or t
aaattttttaattaacccaggttgtggtggcatgtgcctgtagtccctagcntacttgggaagactacagtgaggatcacttgggcccaggtgtttgagactacaatgagcctatgattgcaccactgcattcccggcctaaatggatggagtgagaccttgtctcccaagggcggggggtggaaatagatgtgatgatatgatggagtaagatcaattacctgccttcctcaccatatcaggtggtctcactactgtaggacagactggaacacctgctgggacaaatgtcacagcagaacaggatagagaagcagtattattggctggtgacctaaaggtggccatagttactctttcttcttgaccataaacccctcagctttcaggggaggcttggtcccttctccaaccctaagacatgaaactcaagataaag

SEQ ID NO: 327664 - DNA, 864 bp, Homo Sapiens
  misc_feature (496)..(511): n is a, c, g, or t
  misc_feature (838)..(838): n is a, c, g, or t
gcgttttgagagagcacacttgtgggtggttgaacatggataaaaataaacgggaaaacaaaaatcaaattcccggccctaggaaataaaatgttacctttacctgatattgataatacatattatatttgaaagcatttgctaatggttgcattttccccccaacactcccatgacatataattcccattttataagtcacgaaacgaagaccctggggtctgaaggaacttggctggggtgaggatcacaagcccttgggtggagctctgagccctggcgcgggtcctcaagggtctgcgacatttgtgctgtggtcagctctgtgcactcttccctccctgctgctgttatcacgaaaaggctggcttggcctttctcataggcgtatttccactctcaggcgcccttttattgtctgggctccattcaagtgataagacatacatttatgctattgtgggaacataatgtaatattctcaacagcattgccnnnnnnnnnnnnnnnngtttagcctccgccctgattttcttaataacttataaagaaaatttggtttgaacatgtcccatgtcgatgttttcaggaaaaagatccgatagcatgcaggccttctcatgctggcctggctcattcatcgtttcccctaatgactgactgaccagaaaaatgcacgacgctcccatggggccactcggcgagcctcaggcttcgggcttcctgattcagtagatatgtgaggcttgatcagtcaccgcagtccacatctccattgcctcgataaggaaccagtcgcagagaggggaggccatctgcagaagctgtggagagtggnagagaggagagtgaggacggcctcat

SEQ ID NO: 327665 - DNA, 442 bp, Homo Sapiens
gacggcaaagctgggcttttataaccagccccctggtgataactgctccactccctgagaacccattagtccatgaatggattagtcctcatgagccaatcacctccccagaatcccatcccagcactgctgcattggagtccaggtttccaacacatgaacttttggggaattcattcaaaccatggtggtgttaaaatcggactttggtgtctttatggtctatttaaagtttttcccatttagggtttcacatttcttttacgcatggggatttttatctttttgttgctgttaaaaatgggtcatctcttccactctgtctttgaactgaaagtatgcacaaagatctctgtgtgctactttaaatcctgctgtttctactgaattctcttagtgtttgtaccatcactttcttgtgctggaaatataacaaagtatt

SEQ ID NO: 327666 - DNA, 596 bp, Homo Sapiens
  misc_feature (16)..(16): n is a, c, g, or t
caagcctaattggccnaacaacaattcctgtgtaaacttcctcctaatccccctcccgttctccctctccccctccatgaagaatggctggaaccccgaataaggccccggctggttcatccccactgtggctcagagcagcttgacacggtgctcagaactgcattgtggcacagttctgatatggacggaggacgtctaacagggacagaagaggcgtagccagcaagatgccctgggctccaaccttgggagtgtgggaggtaggtttaaggcatggaagtcccaggccccctctccaaatgtcacacagctgtcccctttgcttaagtttctctgcagcaaagagggtaaagggggatggagggaagcttgggctgctgctggctggtcctgccgccctcagagcttcttcagacgactgtacatctccctcttgctcttctcccctgcccaggtccggctcttggtgcggaacttcttcaggtcttctttaaagtcctcgtggtgcatgggccggtagctagggggctcacagtaagactggcatttcataaagaactccttgtatccccccttcaggacatacagctcag

SEQ ID NO: 327667 - DNA, 1121 bp, Homo Sapiens
  misc_feature (651)..(661): n is a, c, g, or t
agatgtttaacaaattcattgagctaatgcatataaggtatttaacacagtgactagcacatggtgaatgagcagtaaatattagctattcttaatattacaaaaccatttgcattagcagttatagtcatattagaaagacctttgcattatgttatatttacctaccagatacctaccccagtggtatggtctgaattgtatggaccacttgttggcaaccctgtctagcctgttcctcttgcccttcacctgctaggctgggttgatgagcagcattgccagtgatatccatacactgaaggcagagaagggaaaatgtgtgactgggaggcacaaattatcccctccctccaaggactggtttatgtttaggcctctggtccatttggagatttcatgtttgtgtttggtgtgtggtaggtctctgacatcattttttccaaatggataggcatctagcctaataacacttattgaatagtaattcctttttctccacagatgtaaatcagaaaaaaatggaaaatccacacatgccacatgtataacacattatataaataataattaatttgtttaactttttttggagagagtcactcagtcatcccaagtcagagtatagtggcagagcaagaccctgtgtcnnnnnnnnnnngcccatgtcagacctaaaatatctcagaattcatgaaatttccatattgttcatttatttagagaaaagcattaagcagtccatgaaaaaatgttagggtcttcttagtaagctaatatagtaagctacattagccattagagtcttaagttatatttcagtttacctaacttgagagaatgaaagttttgtttctgcaggtgcattttggttgaaagagcagctgagatttagaaaagatctcagcaaaggtgctgcagggttgaaatggagaaagtggaccatcattcacagtgcgctgcaatcagcctggtgcatcatggccaggggaagggcagaggtatagatgtgtcaggacgtctctaaggggacaagagttattagaggaggtgaagagacaagaaagggcacaaaaatcctgccctttatttatttcacagggcttgcccagtggttgaag

SEQ ID NO: 327668 - DNA, 721 bp, Homo Sapiens
  misc_feature (12)..(12): n is a, c, g, or t
  misc_feature (30)..(30): n is a, c, g, or t
  misc_feature (83)..(83): n is a, c, g, or t
  misc_feature (434)..(450): n is a, c, g, or t
gaacagaaactnttcgggccctaatggctntactttagctaaacaccatggaaaaaaactatgacctcaaccattatccatgncaacaaacaccttgtggggaagcaaaaagattaccttcaccagggtgtaacaaatcaccacaaccttcccaccatatcgtgtcagagaagactgagtagataactaggactttcaaccccactagggtgtaacaagcactcccttactgcactgttacactccctttctctgttggagagatgttagtgaaagcccaggtaagccagaatatttcaaaaagccccacagtctcacagtacaaaattgtaaatgtctgaaaataaaataatgcatctgaagatcagtagaatcttgaaacaaatgaaaaaaataaaaccaatatatgctaatgaagcaggagatgtaaaatnnnnnnnnnnnnnnnnncaagttttctatcctgggctgtctcactctaaggcagggctctgtcagggctttgacagcactattagcagagccgggggggcagaaggaatgggttccaggagcagggatgagaaaaacaagttattcttatcagtttcccccttttgaattctttccccgtactattattctttgttctgctgtcataactattttttaactacttctgtaagtttgtaaggattttgtaagttcctgttttctcatctgtgcagtatgatgaaggtca

SEQ ID NO: 327669 - DNA, 380 bp, Homo Sapiens
tctgtattattatttacaactacatgtgaatctacagttatctcagttttttagaaaaataacttacctagaaaaaaatttttcttgatcgctctttcacatacatttatgtacttctgttttcttgtctttctaactgtttcctcctcctgggacccataaattccacatgtggaattttgagtcaaaattaggatgtttgttaagggcccgcactatgccacaccctgtgacgttagtacttgggaatgaggagcgtgactaacgggggcataactgctgcctgcacattgtttacaatccaggcaagcaagggggcaccgaacagcagctcggggcagcctgtgctgttgggccttgcaggaggaatttcccggggt

SEQ ID NO: 327670 - DNA, 735 bp, Homo Sapiens
gtctgtatatggtaatgagcgtaatctgtaattatgctcattacacacattacaaaacagagtttcagagaggttaggggaactggctttcacaagaaatgagtagcagagacagaattgaatccagatttatcacttttagtgcagagctttcccctttaccaaactggaccaacatatatccccacagctctgctgaagggtaaaagtgctgccatggatgtggaggaattttaataaaatgggcagtcacagttcagtcacttctaaggaaaccagggggctactccatttcacttaggaggtctgttggcatacaaggaaaacctcctcagttataaacggcaatctaccaatggccagaggcagcagcaaagtaagaactttgaaactgaagcaatgagcaagagagctgtcaagctgaccacatcttgggcttttactggtgtgacaatagtgcagcatttttgagctgccaggcccatgaccatcttcaagaaggaagccaagaaaactgacagttctcttagctgacacgaatatccacagctgtcacctcctggaccagctgctgaatctaatcagccatcctctgaggcagctgactttagagccttagtgtatttggctgagaaaccatgtgtgttacgtggctgccaagggccagccttctgcgtgattgccagtgtctctatgtttttatagagggagaggtcacgatgctgccccctggag

SEQ ID NO: 327671 - DNA, 286 bp, Homo Sapiens
tttcaaaaataatataggagaagagagtgggtgaggttatagaggaaacaagattggccatgagttgataaccagtgaggttgggtgaggtattttcatgaggtacatgaaaatttattgcactgctctgtctgtatttgtagagattattaaatttccataacaaatttaaatgtagtaaaaacaagcaagcaaattcctggtttcccacaatatgggtattgaaataaatttaaccctaatcgaaccagtcacagtggctcacacgtgtagtaccagttactca

SEQ ID NO: 327672 - DNA, 695 bp, Homo Sapiens
  misc_feature (421)..(421): n is a, c, g, or t
aacttgcacgtattaatctaaaggtaatgaccttgttatctggaggctatgagctagttgaaagctctagacaagacagctgacaaagatggactggaaaggagtctctgagagagattttataggtcacatgaacggactcactgttaagcagagcctactttagggtcttacccaatcaaatgtgtgaccagtgtagccgattaatacacactcaattaggattaggcaaggagtaacatgctgtttcaaggtaaaaaactttgggttgtggaaattgcagctgtttggagccatttagtagaggcagagggcatgcagcatggtcagtacagggtcctggggagacgctgtaggagagaaggtgcatcccctcagcatgctcctgcagtgcccagcatcctaaagtactcggtggccnagcagcctgctccaagagactctctcaaacggttctgttgtgtgaagtctcccatgaagatacctccccagcacatgggagtacaaataccatgcaagttcgtctggtgacataccacagcaaattctcggccactcagtgagcaccgttgttccctttccaagaaggccagatctcagccctgaggatgagtgagtgggagcctcttcctttggcactctatctcagcaccaaggagagtagctgctccttctatctgtggttcttttgtgct

SEQ ID NO: 327673 - DNA, 642 bp, Homo Sapiens
  misc_feature (399)..(475): n is a, c, g, or t
cttgcaagtgatgaaataaccacagtccggaagaaccttgaatcccgaggagtagaagtagatccaagcttgattaaggatacttggcatcaagtttatagaagacattttttaaaaacagctctaaaccattgtaacctttgtcgaagaggtttttattactaccaaaggcattttgtagattctgagttggaatgcaatgatgtggtcttgttttggcgtatacagcgcatgcttgctatcaccgcaaatactttaaggcaacaacttacaaatactgaagttaggcgattagagaaaaatgttaaagaggtattggaagattttgctgaagatggtgagacgaagattaaatttgcttactggtaaacgcgtttcaactggccggaagacctcaannnnnnnnnnnnnnnnnnnnnnnnnnnnnnnnnnnnnnnnnnnnnnnnnnnnnnnnnnnnnnnnnnnnnnnnnnnnnaaacaagaaatgttctttttccccagctcggactcaacactacacaccaggccaccacatggcgccgcacccagcattgacacttcttttaccttgtctgggctctgacatccgtgccaggttgctcttcgtcatggagtcctttttactgagctctgctctgacgc

SEQ ID NO: 327674 - DNA, 891 bp, Homo Sapiens
  misc_feature (372)..(381): n is a, c, g, or t
  misc_feature (497)..(635): n is a, c, g, or t
ttaatcaactatgcctcattctcagccagcctgtgggtgcccctctggtatctaaacaaagtgagaattgtaccttcatgggtgaggtccttttgcagggccagaaacatgcccagagactttatcctcgttaacagctgctcccagggagccaggaaatttactgatccagtaaatttcagagtcagcctccaatgagggggaaccaagggcccccacaaaaggcacaaaaccagcgctcccggctgctatccactgtggggcgttgcccgggcacccaggttcatagctttaacttaggggtggaggagcaactccggcagcagaaatcattacagagcgaagcaattttgcccaaggcctgaggcctcnnnnnnnnnngtgttattccagagcagattccttttcttccgggtctgtctgctccttctgactctttgcccacaaccaccgtgcctccccattcccaacgccccacctcctgccacatttatttnnnnnnnnnnnnnnnnnnnnnnnnnnnnnnnnnnnnnnnnnnnnnnnnnnnnnnnnnnnnnnnnnnnnnnnnnnnnnnnnnnnnnnnnnnnnnnnnnnnnnnnnnnnnnnnnnnnnnnnnnnnnnnnnnnnnnnnnnnngatttttaaaaagcatattccctctcccttagctttccctaggaaggcctggaaactgaaggaaattcaaatcaaattagttgcacattaaaaaataaacagacaagcaatcagggggtgcccacccaacaaaagacctcacccgttccaaaatatgattaagcctgggagggaagagggggaggggggactagaaaccagcagggatggagagagaaacctgtggatttttggccccagcgttggcccattgcgg

SEQ ID NO: 327675 - DNA, 789 bp, Homo Sapiens
  misc_feature (443)..(463): n is a, c, g, or t
  misc_feature (471)..(608): n is a, c, g, or t
  misc_feature (770)..(770): n is a, c, g, or t
taacaaaatataatcaccatttattttactatcacagcccataaaaggaagaaaacagatgcatttttcctaattccaacagaatctgccaattctttcatacttgttgagttaattacaataagattgattataatgctgatgaagaaattcaaattgaacttcctgtaacaaacaatgaggaaacaaaatttattgaaacaaataagtacaacaggcaccactgtcccaatattaagggttatatgacaataatccattgtagccaaaatatcaaggatatagctgggaaaacttcttaaatgcatttgaaggatatgggtctatggcatttcatttttaaaggaggtacttggggtggggaaatattttgcctttgctctgggcttttctaatcacgggttgtctttgggagacagcttgtcataggccaaggctattcnnnnnnnnnnnnnnnnnnnnngagacagnnnnnnnnnnnnnnnnnnnnnnnnnnnnnnnnnnnnnnnnnnnnnnnnnnnnnnnnnnnnnnnnnnnnnnnnnnnnnnnnnnnnnnnnnnnnnnnnnnnnnnnnnnnnnnnnnnnnnnnnnnnnnnnnnnnnnnnnnncaggccaacgttattcttataggaaagattaattattggtagggtgtttaagaaataagaaatgatatttaaagtcaaccaaagtatttagtcattttatctcaacatgagggtcataaggaaaaacattaagtgattgatttcaaaaatagggttttgagnatagtttaaattacagatg

SEQ ID NO: 327676 - DNA, 670 bp, Homo Sapiens
tcctgcacacaccatttgcccatggatcgcagtacacagtgagttccacagtctagattgcattggaaggtcacaggccaccaacacagcttcaagggctggctaggaaaagaaggtgaccaattgataccgtgcgtgcaataatatgctcacaaagccagaggtcagaactatgacccctctttagatagattgcccagattcggtaaaaagtaacaaccagaaggaaaacaaaagccatatattttcctgctctatccaatctgaaaatgacacttttatcctgtttaaattactcagcttatcttcaaattcagctctaaaacgctgtggttaagaggtactgaaaatgcaaaaatactcttcagtttgttaatttctcggtattttgcctatttcctcggtagtttgcattcattttaaggtaggagaagttcagctttacgtcttgaagaagtttgtctatgtgacagcatgacagttttggctttaggcttcaagttggtggaggaataaatagatttactgtgccctaaggatactgaagccttttgtccaccctcttttcagaactttcctgagactccaatctaaagtcatacatattttcttctttcttttaaaactgcaatacattttttcttattttcatactgtctccgtgccgaaa

SEQ ID NO: 327677 - DNA, 822 bp, Homo Sapiens
gatggatactaagggagtattttactgaaaaaaatagaaaactacatttttacacgaaataaacttatgtctgcaatactcagccttaaattcacccctcacttcagaagaggtcccaggggcaggaataacacgcacagattgtttgttcacgacttccagccggtccaccagacctctggccaggtaatactgtacaaagtgcttccacgtgatttctcttccaggatcacgaaaatagaggtagaaaaatcccatggcaacgcctgtcccccaaaagggccagactgcggaaatcctcgtcatcccaggggaagtccccccttctgcatccgcctccaccaggcaacgttatcctgcttccctcctctcctgcctccgtctcctccagactcagcattctctagttccaccagtctctgagagaaaacaaagtaagacttccacaaagcaattacatatgattttccagagaaagaagattccagaaaacagaaaaacaccttccaacacacaattttaataacaccagtgccttctggaaataaagagacaacaggaaaaggatgaggctggggagatattgctgagaagtagcttcagatacatctaaaatccctaaaatttcacctcgctggcttcatattgagctttaatagtaaacttttttggggtaacagtcccaaaactggctgttattaggggaaagaaagaaaggaagaaaatgttaagacagactggtatgggtggtcccccttctcaagagaaccagggaacacaaaccacctgttctaagcagagtctgcctctcctccaaaagat

SEQ ID NO: 327678 - DNA, 464 bp, Homo Sapiens
  misc_feature (53)..(53): n is a, c, g, or t
  misc_feature (212)..(212): n is a, c, g, or t
ttttctacaaaacagagaatgtttattgtgccagatgctggagagtgtgggtntgggcagctgaggtgacccgggcagcccttctcagtgggtcctgctggccgggtccgggtcccggggtggggacaggggttgtcctcggagcgttggatgatagagtcgatccagtttacaaactgtgccaccggggcaaaggcatcggggtagagccnctgaggcgcagcttccccggacgaaggaggcaattccgtggattagcccgttgcagaccaaggggctgccggagtccccgaaacagacgccggcctgccggcccttcacgagagtgcagacgttgctgcgacggcagagggacgtcaccaccgtcacgttgagctcctgcaggacgttggcgatcccacggttcctgcccagaaggccccagcccttggccaggcactgcaccccgttgcccaggcggcgtc

SEQ ID NO: 327679 - DNA, 850 bp, Homo Sapiens
ttttcaagtttttcaatgttctttaataaaatgacatcaattgctgaaagatttatgacctttgttatgctacataatactgatacaaaatgtgaatagtacaaagttcattatatataaggctttaatatattacatttgtttctacataaacagactataaatatatgtgccatagcatgtcttatagtcattgttcccagcatttcacactatggtaccaaacaaaaaacacattttcttttttgaaaaaaaggacagaacaagggcaaaaatcagtagaaatagctctatatgttaaaagtctaaataatacaatagatgttataatttgggctataaaataattttgaagtctggctaataatcattcagagagtgaacaaacccaatcaggtttactggagtagaggccaaataactaaaatactgatgggttgcggggtgagagtgggttggggacagggggaagaacaaaagggtaaaatccttcctgaaactttgacaccacacacagcttcacattgaacctcccgcattcagtctcagacatatcacatcaggacagatatgagggtattcattccagaagaaaccagaagctggtttgtgcagtcagaactcttcaacacggcagggagccttgagctgaatgtcctttctttgtggtattctgaataaaggatcagctttaaaagttctgcttcctcactggagtacacggtggtgtctgtgtcatcggagtgatatccggactggtagccgcttgtctggtttgagccttcagatgccacagactccctgcttttgctgggcaccattccaccaaaagatggagataatttggttc

SEQ ID NO: 327680 - DNA, 1092 bp, Homo Sapiens
  misc_feature (976)..(976): n is a, c, g, or t
  misc_feature (997)..(997): n is a, c, g, or t
  misc_feature (1018)..(1018): n is a, c, g, or t
  misc_feature (1025)..(1025): n is a, c, g, or t
  misc_feature (1049)..(1049): n is a, c, g, or t
  misc_feature (1055)..(1055): n is a, c, g, or t
  misc_feature (1079)..(1079): n is a, c, g, or t
tagcacagcccagattctccagcctgactcggggaccacactgagctctcctcctgtttaaaaggaagcatccacacccccaactcccggacatcacatgagaggtgctgctcagattttcaagtgttgttctttccaccagcaggaagtagccgcatttgattttcatttcgacaacagaaaaaggacctcggactgcagggagccagtcttctaggcatatcctggaagaggcttgtgacccaagaatgtgtctgtgtcttctcccagtgttgacctgatcctctttttcattcatttaaaaagcatttatcatgccccctgctgcgggtctcaccatgggtttagaacaaagacgttcaagaaatggccccatcctcaaagaagtagcagtacctggggagctgacacttctgtaaaactagaagataaaccaggcaatgtaagtgttcgaggtgttgaagatgggaaggatttgcagggctgagtctatccaagaggctttgtttaggacgtgggtcccaagccaagccttaagtgtggaattccggattgatagaaaggaagactaacgttaccttgctttggaagagtactggagcctgcaaatgcattgtgtttgctctggtggaggtgggcatggggtctgttctgaaatgtaaagggttcagacggggtttctggttttagaaggttgcgtgttcttcgagttgggctaaagtagagttcgttgtgctgtttctgactcctaatgagagttccttccagaccgttacgtgtctcctggccaagccccaggaaggaaatgatgcagctctggctccttgtctcccaggctgatcctttattcagaataccacaaagaaaggacattcagctcaaggctccctgccgtgttgaagagttctgactgcacaaaccagcttctggtttcttctggaatgaataccctcatatctgtcctgatgtgatatgntgagactgaatgcgggaggtnaatgtgaactgtgtgtggtgnaaagttnaggaaggattttaccttttgtctnccctgncccaaccagttcacccgcaaccanagtatttagttat

SEQ ID NO: 327681 - DNA, 356 bp, Homo Sapiens
gtataaaccaccacacccaacccagtttccattcttaaaggggaactcatatatctgatttcatatttccctttctcaaacaggggtcttattttgttgtttcagtagcaggtacttaccatattaggctgaacctgtagattcactgaattacgccttgtatataaaatattttatcttcataatatttacgttgattcatccagacattattaaatagtaatgcactcaatttaataagctaagtaagttttgtcatctgccttaaaaagttccatctaagatgattaacatttttaaaaggaaaaaaatgttaatccttatcttatctacagttcctgtttgcccagtaatgt

SEQ ID NO: 327682 - DNA, 577 bp, Homo Sapiens
  misc_feature (173)..(198): n is a, c, g, or t
caagatataatatttgcatagcccattttaaattgtggtccaaatgttgtatttaagatcgataaaatataaaccaatcctgcaaataaaatatacaaaggacaaatctatgtgtcatttctggtattttccctgccagccagccctggaatcatagaatggcggcaggtgannnnnnnnnnnnnnnnnnnnnnnnnnaacaacccctgctcttgtccacctagtttaagaagtacattgtatgggattacataaaagtaatgtgatcctgattgaaaaacagaaggatggcatcaataagccacattagtcagttccttatctgagtgttgtgccagtaaatttggggaaaaagtactgagaaatgggacaacacaagcacacataaaaaaaattatggctgaaagtgcaatctctttttttaaattaaaaaaatccaaggcctttaacctgaaaaagaaatgatctatgactgaatgattatctgtctctaggcctttatataaagatctattctcttcctcttcaagggattaatcattataaaatgagctaaagatttttagatgttttggtt

SEQ ID NO: 327683 - DNA, 604 bp, Homo Sapiens
tggaataagcgaagaaaccaacaaaccaaccacaaaacaggtatatattgcatagccattttaatgtggtccaaatgtgtattaagatcgtaaactataaccaatctggcaattaaatactaaaaagacaaatctatgtgtcatatctggtattttccctgccagccagccctcgaatcatagaatggcggcaggtgaaggggtgggttggggggtggtggggggaacaaccctgctcttgtcccacctagtttaagaagtacattgtatgggattacataaaagtaatgtgatcctgattgaaaaacagaaggatggcatcaataagccacattagtcagttccttatctgagtgttgtgccagtaaatttggggaaaaagtactgagaaatgggacaacacaagcacacataaaaaaaattatggctgaaagtgcaatctctttttttaaattaaaaaaatccaaggcctttaacctgaaaaagaaatgatctatgactgaatgattatctgtctctaggcctttatataaagatctattctcttcctcttcaagggattaatcattataaaatgagctaaagatttttagatgttttggtt

SEQ ID NO: 327684 - DNA, 779 bp, Homo Sapiens
  misc_feature (345)..(345): n is a, c, g, or t
  misc_feature (757)..(757): n is a, c, g, or t
gtacatgaatttgcccattacattttgctactttgagacattagaagacctctcaagaagtccgaacctttctgttgagacttgttcttagatgagacaaatctgatctctcaaaaagatgaggttctcctaaaaacagtgtgtcagttctctgtgaacttgggaaaaattgtgaaacagagaccttgattccctattcagacctcccatatacagaattcatgagtgtcagctaggatctgtccccagatattgcatgggcttcatctcttgatactatggacaacttttggtagaggaggtagaggataaaagaaaataagagatcatctggcaatcttagtngcagactgttaaggagttcagagaaagtgccagccttcaggaaatgtcaggacaagtgttagctcaattcagtaaccaaattcagttcaattcaattcaactcagcttggatgtttatcaataagtcttaacaataattcttacattaaattattgtcatgaaatttatgaaacttctgctgtgtgcatttgatttgttttattcagcatttcttttttcatgcagtcctaagttgtaaggtggctttcttccattctcataagagttagcacaaagaactctcatccttgttccctgttatctcttatgcatgcttactagcagctggtgagagctgctaagaaaaaatgccattctagagatataatttggaatcaagcagaagtatctgctgcagaactaatcacatgnttggagtaaaggattgaagtgt

SEQ ID NO: 327685 - DNA, 464 bp, Homo Sapiens
aaaaaaccaagacaaattttaggattcataaaacaaaactaaccaaccaaccaaccaaccagtctcagagggcacaaacaaatctgtcctctgcagtgctgagactacacatgtgagttagagaaatggaaaatggtacaaaggaggccttcacaccattctcacatgggccagtgctgttcatgtggttaacccatttgctgtttagactgaacactgacacttggcaagtggctacttctagaacatgtgtggggctgaggtgaaccggggcattatgtgtatgtgtgaagctatccagacatgcctggtcactggacaatcccagcaaccgttccttgctgaagagacaaaaagtagcatgaaactgtgtgagactctcattttatgattctacaggtggaatcttttagcttgtttaggacacactaagccccaattctatgccctctggttaaagaagg

SEQ ID NO: 327686 - DNA, 1054 bp, Homo Sapiens
  misc_feature (876)..(889): n is a, c, g, or t
  misc_feature (1032)..(1032): n is a, c, g, or t
tattttttccactgggcacatttctgcccaccttctttttattttttaaacaatacacttttgttagtgcttattttgtggcaggcaccaggcagtaccagggtgggggcagaaataaatcaaagtccttgtccttgaaaaacaatctcttgctggaaggctggattcagtagactgcttgggcaggcttgggaaggacccaggtgagcacagcatccaccaggctggctggcaggtaggaggcaggcagccagagcagcttggcatcccaacctgggctgtagcgggttcgggggtgtcgagcagtcagggcatgctccaggcatcggctcaccttggttaggtccgggtcacagatcaggttcatgatgcgctgttgcattttcaggtacttggtgaggaaggcccccccatagtgggcctgtgtggcaggaggcagccgtgcccagcaggcctgcagggttttctccagactctccaggttggtcacaggggttcggaagaagccaggctccacgatggacactcgtatcccaaaatgagctacatcccgcctagagtcggggcagagcgaagttgctgggttcttgccctatagggaggggactttgagggacatgggttggggagctgagaaagttaccacagaccagggacaagagttttgacggagatgcctactgccccgggacaagggtcaagtggggtagagggaggaaagtatttttgaggtttgttttctttgatctagagcaggggtcagcacgtttttttcttaaagggccagagagttaatattttaagcatggcaggccaagaaacaaaattaatgatattatcaggtacttatataacagtttacaatgtaaccatttnnnnnnnnnnnnnnccattatcagcttgtaggcagctggccagatctggcttgagtactgagtttgccgattcctgacctagaggaaccccattcccttgctcccaaaacacatggttgagccctgagtgctggatattgaagggtatagtctcgtnctcgtgccgctcgtgccgaatt

SEQ ID NO: 327687 - DNA, 788 bp, Homo Sapiens
  misc_feature (404)..(404): n is a, c, g, or t
attcacaaaaattaaagataaaaagatttatgggtgaaaaaattgtctattttttcaggccgcatttgtcaaaaggaagctgaatagttggcttttaatatgtaatattaaatagggtttatcaactgttgtgttcccatggtctttagaatatgaatatgtagaaaacaaaagttgaaaacttaaatttagttcattatttaatttttttctagaatggtgattttcctagtttgttaactatgttttagccaattttgattttaactattaaaatctttcctttaatggttttaatatgggtgttgatttttggttatacaattttacacaaccagagagtcactttgctttaagagatcctaatgtacatggaaaaataggaaaggccttcatcagttttnattttggagagccggtgggcccctatgctacaggctttccaaaagaactcaaacagatactgcacccccacctgaggagtaatgctgtatacatgtaaatcatttcctatatgccacaatggacatctgggtcttgatgtgaaccaaagcaaaggtcaatctgtggaaaacattaagtttttgctctttttctcctgtttacttttattcttttatttatagtgaagataatactgttctagagagaattattagctttcaccttatcaacacctagattaaatattggaataaaatcgtaagggtgtgatctttcttttctatttagagacaggccctcactatgttgaactcaagcgatcttcccacctcagcctctcgagt

SEQ ID NO: 327688 - DNA, 680 bp, Homo Sapiens
  misc_feature (56)..(56): n is a, c, g, or t
cataaaaccaacaagtgcacttgccaaaaatgtcaaaattaagtttttgtgaaccntaggaattatctaaaattttggaaaaatccaaagagtgtttattcaagaaaagtggctggatctcattaagagcaacatgctttgtgatgttttaatttaaacattcctttctcccctgttctttggtaacctggaaaaccagtagccttgcaattacagcagctgtgaaaaccagcaacctagcaaccactggagggggcacaataagtctgaagctctgcaaatgccccatctccagactgtcactatttgtccctatctgcacagttccctgaaaaagctctattctcagggcttgtcttaaattaatctgatgtagattttactctgtgtgaatagccctatgtctaggacattagtcaaaaaacaaatgatagcaactatttaattttgcagttgaccgacctgggaagagggggtttgagcagatggcaattaaggtaacaagactttaaaagtgtcaaaaggaaaatcaggggaatgagatgttcagacagcactttgaaaacctctgacctattcctagaaatctagaagggcatacacatgtgtagaactctggacatgacctaatgagacatgaggaaaagggcctcctcttttatgtctagctgagccttgag

SEQ ID NO: 327689 - DNA, 479 bp, Homo Sapiens
  misc_feature (292)..(292): n is a, c, g, or t
  misc_feature (322)..(322): n is a, c, g, or t
ccagctcaacatatcttatttgtagaaatgattcagcaaagacaacactggcagcaaaacaaaacacaacaaaatgggccaatgaggaagtaacaaacaaaacagatcataggcactcgagataatagtttcaaatccaagctctaaaacagctataactactatttgcatatagtttaaaagtattggaaattttcgtggagaaaaaatatattactaaaaaattgaataggaggggatgcacttctaaaacagcaggaataaggaacttaaaaggaaaatcagtcttccnttaaaacccacaggtgcacttgcccaaaantggtcaaatttaagtttttgtggaccctggggattatctaaaattttggaaaaatccaaagagtgtttattcaagaaaagtggctggatctcattaaggaacaacatgctttgtgatgttttaatttaaacattcctttctcccctggttctttggg

SEQ ID NO: 327690 - DNA, 545 bp, Homo Sapiens
  misc_feature (64)..(104): n is a, c, g, or t
  misc_feature (446)..(446): n is a, c, g, or t
tgagccaccacgcccggcctaaaaattaatttttaaataataaatacttacaagaattgatagnnnnnnnnnnnnnnnnnnnnnnnnnnnnnnnnnnnnnnnnnattgcctaactcaatttaaacagcaaattttacttgtaacattccatgtctttcttagaataacaaattggattttgctgtctccatttgattcatattcttgttttcatttctgcacataatacccagcctaatctcagtattcagtggccttcctttatgttttaacttttgaaactactcaactcattagggctcaatttttagtcaattgttgtattttggcaactggcagaggatgtgattaaccagcattttgttttcctcttgcttatttcctttttcattttatgtaacgatttagtaaccattaggtaagttaatttgtacttttcttaaaanaaaaactttcacaaaggcgtcctttctttctccctctttttaatatatacgagacccatcttaaaagggtgtacgttctgaatctgagtagggaatctc

SEQ ID NO: 327691 - DNA, 608 bp, Homo Sapiens
  misc_feature (548)..(548): n is a, c, g, or t
  misc_feature (577)..(577): n is a, c, g, or t
  misc_feature (589)..(589): n is a, c, g, or t
agaaaaggatcatcaggataaactttgtggattttctctcactaaccacgctctcctttcaacattgaaattctagactttagacagaagtattgaactgggttacagggaggggatgtgagaggccccctgccattgaggataagtggacatgtctgaattggcctgctacctaaaattaataatctcaatcacttggatggtggtgtccataattttctccactgtttgtgtggcatataataagtaatggttgcacctagcaattcatttacaaatcttacttgattttgaagccatagaacacctcaactgttagcttgaatgactggagtttagtttttatttctcagaacaaaacagtttgaagcctaattaacatcctcggaaggaacttaacactaaaactcctaacagcttcagttttctgaccttgaagaaagggaaaatgaagagaccatggtgccacttccgaagcaaagccttaaagttctgtggctttagaggtggtgttgccatcctatggattgcaggagtctgggcctggnttggtgggaggagcctgtgggataaggcnaagggaaggtcngtttttcattggggggtag

SEQ ID NO: 327692 - DNA, 652 bp, Homo Sapiens
  misc_feature (582)..(582): n is a, c, g, or t
  misc_feature (619)..(619): n is a, c, g, or t
  misc_feature (622)..(622): n is a, c, g, or t
tttatgttatttccagcgcatagtgtctttatttagaaaacagacggaatcaaacaggttggagttattgctttcttgttctgtatattcatattctccacttgaaaaagcacacagtcaaatctatcttcatccattctgttgatgagggtaagcaaaaaagatcactggttacttcaaaagaaccatttagagtcaaaatgcaggaatcttagtcctgtttccatttttgtcccccttgcttcacttggtatgtcatgctctatctcttctcctatgcagactttaagtcagtagccatcaatctgaagaattccttcctctgctgccacctaccagtttagttgtctgcttgagttttcaatgttctggactgcttattgcccaatggctctgaatacattaaaacacgaacacatacgccacctgtaggcagactggggctgtgcctgaatccaaaccggtgcatttaccattcattatacagctgcattattgggggaaggggagtttagaagggcactgaccccgaaagttctcaatacttctcactcatcatcaggaagggggaagaaggaaagntttttctctgggtatttttttggttggttggatttgnttntttggctcctgaaaaggctggtaaagaaca

SEQ ID NO: 327693 - DNA, 452 bp, Homo Sapiens
aaaagggaaccatttcattattgaaatcttatgaatgcatcagttaatttatattaaattataagcaggcctatctgaaaaaacaaggatatagaaatcatatatacacatttttgaaatattagtttagtatttaacatattaacatttcaaaacaaatgcaatgatctagctacctatgacgccagctggtgtcagtggttgtagcgaagatgctgtttctgtttaccatgagcaaacagcatttcttgggtcttaagctaaacaatcacaagttatcaaagtaaagaaaatctaaagacagttcttacttttcatgtgtagaagtgtagtttgggtatccagtcatgccacagtgtgactgtggtcaacacagcccttgtcacaggtgcgtatggtcctaaatagctggcctctgtctttccaacatcttcacttcattgggaattcag

SEQ ID NO: 327694 - DNA, 494 bp, Homo Sapiens
  misc_feature (446)..(454): n is a, c, g, or t
agaaagagaaaagtaactagaataagtttaatagttagggaccttatttttagcttttatttagaattactaaagtacatatattaactacttttagttaaaactaaaaaatttgttttataatatggaatttgatatgtatatcttagtcatgcttttttttaggtaaaaattttgcacactgatttgaagtttaggaagaatttcttgatttgtagctttgagacacgaaggacatcctatttcatatcaaataggatatcaaagggctttttgggggtttatgggatatcagggagaacataatgcatgatttagtttgtagttttaaaatctaggatattattgaaattcaattgatgaatttttgaattcatcatttgagttttgaatgttagatattgggattatcatacaaatttttgttaagttttctgttaaatacnnnnnnnnnagatgaagtctgagagaaagtgagtgatgtgtacatttga

SEQ ID NO: 327695 - DNA, 635 bp, Homo Sapiens
  misc_feature (68)..(68): n is a, c, g, or t
  misc_feature (80)..(80): n is a, c, g, or t
  misc_feature (98)..(98): n is a, c, g, or t
  misc_feature (107)..(140): n is a, c, g, or t
gaagaaggctagttttcatctggagtttgaagatgataatggttttagaatggcagggaagaaaaagnaggtcatattcncagcccctcaggtggcanctggcaagnnnnnnnnnnnnnnnnnnnnnnnnnnnnnnnnnnaagcaggttttgggagtgggggtgagaagcagtgaatttatccagagcaaggcagctgcaggacagtctagggaatgtgaacattatagtccaggtacagaacagcccggaggttcttaagtaaagcagcacctcccaaaagtgtgctggaagacaaagatcctaaggggacaggggagaggcaggagccgagaggctcaaaggctggtgttggaagaaaaatgggaaggggcatctcccatgaagcgcgaaggagcatgtgaggtaagaatgaagaacattcaataggggcccgaaggctgcagcccaagcagcgctgtgatgactttaaaaccccgggatcctagtcctgtcttggccacttcctggtattctgaccttcctcatctctagggagatgacaacacctataagctgcccacttcacagagtgggtgaagggtcatggagatgatctgaacaaaagcacctagaacacgaagcagctgcaccaat

SEQ ID NO: 327696 - DNA, 427 bp, Homo Sapiens
  misc_feature (108)..(136): n is a, c, g, or t
  misc_feature (332)..(332): n is a, c, g, or t
cgaagaaggctagttttcatctggagtttgaagatgataatggttttagaatggcagggaagaaaaaggaggtcatattcacagcccctcaggtggcaactggcaagnnnnnnnnnnnnnnnnnnnnnnnnnnnnncatgtaagcaggttttgggagtgggggtgagaagcagtgaatttatccagagcaaggcagctgcaggacagtctagggaatgtgaacattatagtccaggtacagaacagcccggaggttcttaagtaaagcagcacctcccaaaagtgtgctggaagacaaagatcctaaggggacaggggagaggcaggagcangaccatcaaggctggtgttggaagaaaatgggaaggggcatctcccatgaagcgcgaaggagcatgtgaggtaagaatgaagaacattcaatagg

SEQ ID NO: 327697 - DNA, 371 bp, Homo Sapiens
ggccgcttaattaatttttatttaagagctattaggaaggagtggaacctaaactatggtgacaatttaaaggaccttgattcaaagaatcaattaaggaggctgtcctctttgttttgcttttacttagtagtttaggtggaattcaagcagataatattcaacctctaagttccctgcttacacaacttggaattctaaaggagtctctaaaatgaaaacatcccacaggaagtgatgtagctaaagtatgattatctgtatttttaaaacaaattacttgtccttcaaatgtctttttcagtatggggtcagaatcacatgttccttttgttaaaaatgcaggctcttaggcggggcgcggtggctca

SEQ ID NO: 327698 - DNA, 898 bp, Homo Sapiens
  misc_feature (39)..(39): n is a, c, g, or t
  misc_feature (243)..(255): n is a, c, g, or t
aatttctttatgcaaaccaattaaaaaaaagtacccagnactggtctgatgtgagctaatcttttgtctgtgtgtttctgcaatatcgtgtggtaaaaatcagtgttaaaattgatgattctgaggaataagatctaaagatatcaaagatttgaatgttactaacgagagggaaggaaagtattaatagaattttcagtgaatgacagtgaaaatattgtacttcaagtttatgaaaatccnnnnnnnnnnnnngattattcaggatctgattttcatattcagatcagcaaactattggtctaattctgcctactgatttttgtaaacaaaattttattggaaaacagctgcagtttttcagttacaaacaaactgaaaaagtgtctgttgtttgtggctgtttccacattacaaaggctaagctgagtagttacaacagagaacatacggcctgtagagctgaaaaaatttcccgttttacccttcacataacctgtttgccaaactcttgatctaattaatgatccagctctcttgtgtaaactttttgttttacttctgtccatttaagattgtatcccaaatctctggctgttgctgccattctaatatagtaaccttttatatagaaaattgccagtttaacagtcttatcctccagtaactggcaaattgttgtttagaataaacatgcaaaatctgcaattgtgttaaaaactaatataaaataattagactataaaaatgaatcttagctgggtatggtggcacacacctttagtcccagctactcaggtggctgaggtgggaggatcacttaagcccgggagttcagggttacactgagctatgattttgccactgcacttgatcctggagcaagattctgccgctt

SEQ ID NO: 327699 - DNA, 439 bp, Homo Sapiens
  misc_feature (54)..(54): n is a, c, g, or t
  misc_feature (70)..(70): n is a, c, g, or t
actgtttaacttcctgctgttgccctaagggaactccttcctgcaaaacaacangtggtgggccccgtangggtgtcctatgaagctcctcaaacctatgaaagaggaatgccaggatcctgttcctttcaagagggcccactcccagttgccttgcctatcccagatcagtcagcacattgacggaaggtctcagcggtacttgaggttgacccccagggctctgcgtcatcctctggcttggaactcagacattgcaggggcatgtcgtggtgcagctcctggttcccatttttgtccacagatactaccaagggtgaaggggcgtgccctccaaggacgttttcaatacaagccatgaagaaatttgatcagaatagctttcctgaggtggtggagataacccactgaacaggccagctaggtctggagaaatgac

SEQ ID NO: 327700 - DNA, 657 bp, Homo Sapiens
ggccgcttaattaatgtactagactttatcctcctgcattttgaggatcaccccacttctgacttccctttatttttcctaatctcaatgttctttttgtcttgttttctaatccgtttaatttttatattttctcattacagtgaactgccttaaatgttttctagcataaggcatataaataacgtattaagggtgacagcagcaatatgcataaaataatatggctagtaggcagaaggtcaactacttctaggaaagaaaagaggggatttttgaggtgggtcttgaggaataagtggagtgtcacctgatagaaaaggcaggaaaaggcaacctgtgcagattaagagagaagtccctcattgtctctcacccagggccactgccagaagtagcagacacaggacgccataatagtgaagagcaggaactcggcaggtggtctccctgcctttgaccctctataactactatctgtgcgaccttaggcaagctaacctgtgtctgtttcatctgtaaaatggggataacaattagaataatacctaacagcactacgtaaacgttagtaagtggcgaggaaacttagctcctcattttctcttcctctaatcattctgcacataacagagacagtgtgtatgtgtgtgtgtg

SEQ ID NO: 327701 - DNA, 994 bp, Homo Sapiens
agagattatgtaaatggttctctacaacctcatcctattaggagggtaagaactttccctaaatacctttgccagtagtgaagtgacaggcttcagtgatgggggtaggagtagtagccatgtttcatgagtcaggactgatagaggatttgcacatgggcctgtgcacctgatatgtcaaataatcagacctcagaaataacagtggatcccaaagtcccaaaccagaagggtagcccagaatgtcattaaaacaaagagatctgattcagagatcaaggccagagtgtgaaaccataaatgtaagcgtacgtaaacctaagcatgtgaagattaaatgggagaaggtcccgtctgattaactgaatgggttctgttatttgccacttggagtgctggacttgactcagggttcagaggccatgtgtgccatgggcaaagcccacttttggcataaaaattatttaaatatttaattttagttgattttataggttgcattattgcttatatatttcataaatatattttaaaataatcaaatatttaacaaatttggaaaagcaacaattcctgtttccattctctctctataaaaagtggataaacttgaaaaatccttggtagactattacttggtagctcccgaggattcatgttctatgtagacagaacttttccatgaacagctggcttgcacatgtgtccttgctttggctagcagtacattagaaagtgtgatgcaggcagaggtttgaataagcacttgtgtgctggggcttgttcttgtgggatgttgctggagccctgagccgccattgtcaggagatctgtctaccttattggcaatatcatgtggacagagagatgcttagccagcccacagaaattttagcttcccagctgtgactccagacatgtgaatggagaagtcatattgaatgttccagccaccacattgatcaaatgacctgcccacgccgagccctatgca

SEQ ID NO: 327702 - DNA, 636 bp, Homo Sapiens
ctagcagattccatttattttgcatatgtacacatatgtgtatactgaatgttatttatatatgtgcctttttaggaattcagtaaggtacaattcttggtagcaaacaatcccccagcagctctgataccctcgggacccttgatactttcctcaccttgctgctacagtggctacagctccgccttttgctcttcttcagcttggaatctggacctccttcatggcaggagcaggcacagtccttggccccatctggccattcagtctccttatcatgattttggaccccgatctcttttttcctcttgttctttgaggctgtgggtatcttgggaggctcctcctcttcttccacatcaggcagggccacttcttcaaagccatcaaactcatactccttttccctcagtcccaattgatctcttcaaagtcacccatccggctagactgctgggcgcaagtggtcaaagaagatagaaaactcatcctgcaggtggtcgtggcccttgaggagctgccacatctgtgtcttgagctcggtgatctcctggggaaggcagtctgcacagccttggaggaccttgataatcttctggtggtgtgaggggttcttaatccacaggccagagcttg

SEQ ID NO: 327703 - DNA, 1303 bp, Homo Sapiens
  misc_feature (1021)..(1021): n is a, c, g, or t
  misc_feature (1093)..(1093): n is a, c, g, or t
  misc_feature (1112)..(1113): n is a, c, g, or t
gagcaatttttataagtttagttaaagatgtgaccatcttacttcattacatctccattaagacagtttggtatttcagttacaggtgtatgactgggagttcaattcttttctgtgataagtacgaatgactcaagctaccattcaatattcactttacagatatatgaagcttgtctactcacgttcaaaggttttccttaattcgtcttttatctaaatcagtcaagtctcttctcataaatgagaaatattaaatgagtggcagctctcaagaaataaaaaagtgactagcagaaataatctgcaacttctgtgaataagatttttctcagtgtctaaaataacaaacaccatttatggaccaaagactaggtgccatgagttttagaaattggtccccactccactgttatgtgtaccattatcccagtggcagatacacagaaagccaaggctcagaggcagtaagtcatgggtccgaggcctcttgctgatgacaaaactggaatctgaacccacgtcaggcttacatttacacatacatgtatacaaatgtacacatatacagcttagattccataaaatacagtaatctagtggtggaacaaattatttcctaataaatgttataaaatataaacgcctctctgaatcctttagaaaattaattttgccatgaagtacaaaaaggaaagagatacaacttaagtatgaacaaagttaataggatactacaaacagttggtaatatatactgtctttaaaaatcatttctccttatcgaggcattaagccatattgtttataatgtgaagagctattggcatcttattttcctacccataaccatgaccatcacttattcatcttttcatgcatccaggtgcatggaaaggcagtaagtacaatttttaagaaaatagcatcaaaagcagattttaaatctacctgtttttcttcgtttgttttctccaacagttaaggaaagtaatagtaatttctcattccaaaccaaagncaattatgctcctttgctaaggacacagctgtaagtctctacaagatcagggaagactacaatatttcaganaaaaacactccccagtcannagtttatgcttgaatgggcagctggaaatgcatcgatgtacagggcctcttttcacggcctctaaaagtgcttgcatcatatgcccacactgtgtctatcccctcccccgtgacgtggtctggagtccaatgtgggaaagggaaccggcaagcaataactcgtgcatcatcctcaagttcacgttcaagc

SEQ ID NO: 327704 - DNA, 582 bp, Homo Sapiens
aactgtttttattccaaccacctcacctccttagaatgggaggcgaacagtgaaatagtgcatttatcttaaaagtgaaataattccaggatggtagggcgagaccctgtgatgggtgaatttacctcacttgataccaagggcccttaatactcggggaagtgggactttgtcgacaaagccaggacaatccccctacccccaccccacccagcagtgattaaaaacccgtacggtcactttctatgtgatggctgtctccctctcaccagactgcatagcggttgccagatgaacatttggcacctaggatgggggtcaaggagctggggctgtgattcagggaagatgctgaagggggactgggagtctctgtttgaatcttgaagcaaggggtgaaggtgtggggtgtgtgtaggggagctgacactgaagtctttcaggaagcagatggtaagggtcagggggtgtgtgtctatgctggggtgagggtcctgtggtgttgctggtgatgctgactgccttgcccaccccaagttggactaggagagtcctatcaggctgctgggcagggagggcaaa

SEQ ID NO: 327705 - DNA, 709 bp, Homo Sapiens
  misc_feature (184)..(184): n is a, c, g, or t
  misc_feature (614)..(663): n is a, c, g, or t
tcatgttcttctctaatttaacctgcattcttaaaaattggttatctgccacgtaagattcacaaaaggcaaacctgaagtgtctgtgactgtgtgtgtgcatatctgggggtgtctgcagatgtctgatgtgtatcctgggggtgtgtgtgtgcatgcatgtctgtgtgtctgtctgcccatngcacacatacacttgcccaggagactaagggatgctgaccaggagaaggcagccaccaagctggaggtgaagtcaggtggacaggagctgggacatctaaaccctagatctggcccctgtcccatgtccatagtaaccccctcacccactctccttctcaagtggatcaggggctatttacaaaactccctccccctgtctctctggggtatatgtatgtgcagtttccctcttgctgaaatgcccttcatttcctctctcctccctggaaaatgcctgtctatccttgtgtgagggttcagaggctcagaaaccccttctctgggagggactctcctatctgccaccccttaaccagctcccactgtgcctcttccctcatctggcacattaaattattacttgcaaaataggcacagtggttcatgcnnnnnnnnnnnnnnnnnnnnnnnnnnnnnnnnnnnnnnnnnnnnnnnnnncagaagttcaagaccaccctgggcaatgtagtgagacccccatctt

SEQ ID NO: 327706 - DNA, 337 bp, Homo Sapiens
  misc_feature (323)..(323): n is a, c, g, or t
atgagcaccacatccagcagaaaacataaaattctgtgtgtggcccacgctgtacttctactggccagcactggtacagatcaacttgccttaacaactaaaagaagaggaacagagagataggggcctgggaatgggaaacgtggatcagttcaacacatacaagccacacactctgtgccctggagctgccctggggaaatcaagtcacgtatataaacaaacagttcataccaatttcaggcaattctgggacagtgtgggaaagtattggttttaaaagtaatactaccaaagccagagagccaaatgcccaacaagancagtaacaatccta

SEQ ID NO: 327707 - DNA, 585 bp, Homo Sapiens
aacaacctctgaaaaagagcttttaaaaagtgatgaaagttgcttttttttcttactattttctcaggaatactccagagatgtaaagcctgagagtccatggtgatgctcaagagctttcatctggccaaatattttaactaaagctgttcattataaataagaggtgattataccttttttaaaaaaagttaccattatttctaaagcccctatgggtatggattgtgacctttaacaaaatgcaaaggtatacactggaaaggtactcagcaaaattctctccaaattctgatttatatgaatttcttggactggatagagtactttcaactataccttcctttggaacataccttttaaaaaatgttccctttaaatcctgttattctaatatgtaactctgctcccaacaaacaggtctcctcattgtccttggcatttgacaagttatcccaacttcgaatctcatttcttcctttgctggcagcctccacccttccccacatcagtcggcctaatccaaaccttgaaagcctggccttaagtcctagtatcagtgatggtccccctctaaaacatgat

SEQ ID NO: 327708 - DNA, 641 bp, Homo Sapiens
  misc_feature (66)..(66): n is a, c, g, or t
  misc_feature (79)..(79): n is a, c, g, or t
  misc_feature (92)..(92): n is a, c, g, or t
ggcaaggccaaagaaaggcccatctccttaccctgacccctgtggaagaaacaaaagcccccccanataatgatggggncctgaatgtttcnccttaaaatatccagacaattcccagttaaaattttcatttgacaaacaaagaaagagatgcgcatttttgtttctgaattctactacttcccctttctccattacgctgtgtcctttctcctaacactgggtttggtataacactgactgcatgaaccctcgagtctccataactcattgtacacagtccccaaatgtcctgagtccagtcttcattgcttgagaagtttctttcccagccctggtctcctccttctctgcctcttcctcctccttcttcacccctctgtctacaatcacacgctcactctatacacatcctcagtcccaccttttagttcatagtcccggtaatactgtaaaggagttggaaactttgggtcatcttcacagtttgagaaagctgacagctgtccatcaaacggaatgtatttgatttcaaccaaaacagcacatgccatgcagttgcatatcaacgtctgttgatgggccacagtctctctcgtgctcgtgccgaattctggcctcgagggccaaattccctatag

SEQ ID NO: 327709 - DNA, 799 bp, Homo Sapiens
  misc_feature (384)..(632): n is a, c, g, or t
ctctaaatctatcatcaagttactgtcagtgctatttccataagatgataacttctttcatctgtactgccactaccctctttacctcttacctggaacatgatgatggccgcctcatttctgctggtgtctgcctctattccacttcacccagagcggccaagagtcgtatgtgtctgcttaaaatcttttaatggttttccatagcacttagattccaaactcccccacatggttcacaagggccagaataatctggcttctgcctgcctctctgaccctcctgctgcttttgttcacggccctccagtcacattcacttttttttaggccccagaaggtagcaagctctttcccacctctggaacttttttcgagatggannnnnnnnnnnnnnnnnnnnnnnnnnnnnnnnnnnnnnnnnnnnnnnnnnnnnnnnnnnnnnnnnnnnnnnnnnnnnnnnnnnnnnnnnnnnnnnnnnnnnnnnnnnnnnnnnnnnnnnnnnnnnnnnnnnnnnnnnnnnnnnnnnnnnnnnnnnnnnnnnnnnnnnnnnnnnnnnnnnnnnnnnnnnnnnnnnnnnnnnnnnnnnnnnnnnnnnnnnnnnnnnnnnnnnnnnnnnnnnnnnnnnnnnngtgtgagccaccatctggaacttttttatatactgtttcctgtatccatagcactctggcaagcctagcctttttctcatccttcaggatatttgttgaatgaataagaggcagcaaaggggatggggcaaggaggaatgtatcctgagtgcatccacaaaggtctc

SEQ ID NO: 327710 - DNA, 855 bp, Homo Sapiens
aactagatgctgaatcttctatggcacaacttgaacaaactctaaaactgaataattgctgaaacaatatgtttctatactagccactttaaattagaaaagtctctttaagctacaggtttatggttctaaaaagttccatgcactgcccagagctatttgtaaattaaatcgtttaaaataaagctctttaatactctataattagtcttgtctctctgaacatgactttactgtaaatgctccttcttgactctcctattgtcccaagattcctgagaagaaagcagccaggcgataattcaacattattgctgcttcagtgcactaatcgcttaaagagcagcaaagactctgtgctctctgccccacagttcccgcagactcctggcctgaggcaggcatcgtgacccagcaacatccagatgtcaagaggaatacccagctcctaatgcagcaggcgctccatcccagtatggtcaaacatctgcttcatctgctggcatgcaacctgctgaacatgctcagagtgcatcccagactagggatgggcaaggatagagctccccagctactccaggagactcatcaaaactttgaaactataagacaggcccagaaactctcaaaaaaacagggttctggcattcagcaaaaacatactaaacattttcctaaaggaaagccacggaataagataagacagtttttatcacagtagttctactgctcattaaattctcttaggtttgacgtttattctggatgttaactggaaatttgaaaaatacgtgaactctttgggattctgagaatgtcatactgactttgaaatttttctcttttataatttaa

SEQ ID NO: 327711 - DNA, 787 bp, Homo Sapiens
  misc_feature (181)..(201): n is a, c, g, or t
  misc_feature (219)..(373): n is a, c, g, or t
caaactcttatggcctggaatccttgcgtttctgctgatgactgtcattttagagtacttactaaagacaatggttggggaaatagatattttaaaaataagggaaaaagtgggtagggtaaacccaggcttacttatgtaaactctgagtgctgaagttagaagacaacctttaagattnnnnnnnnnnnnnnnnnnnnngatttctggtagccgccnnnnnnnnnnnnnnnnnnnnnnnnnnnnnnnnnnnnnnnnnnnnnnnnnnnnnnnnnnnnnnnnnnnnnnnnnnnnnnnnnnnnnnnnnnnnnnnnnnnnnnnnnnnnnnnnnnnnnnnnnnnnnnnnnnnnnnnnnnnnnnnnnnnnnnnnnnnccagccccatggcaggcataggtcaagcctggcacagtctggatctcagtccctgactcagaccctggatgctcgctgccttgtacagaaacaacctgctcaaccaaacagggtgaccctgctgaagccgcaaatgtccaacagtcctgccaaccgtggatgcttctgtagcttctcctttagctctccctcctggcatgaaaccagacacagactacccagaagatgaactgagcactctgcaatgggccccagcacgctgctgcatctgagaccatcttctcggccctaacaaccctggcaggctcttctctctggtggggaaattgggcttagggaaaggacatctttaggacagtcatcccaccaagtagaatgactctatgcagcctgaatactgtttccctgggagga

SEQ ID NO: 327712 - DNA, 724 bp, Homo Sapiens
  misc_feature (692)..(692): n is a, c, g, or t
tgagaatgggtggactcccggagaggattcctaccgagagtggatacaggtatgcagcataagatcaagcctatctaggattgaataagtttttgaccatctagagaggttgttgaaagaaagtggtactgtgccaaatggcctccaatgagaagataggttcacggccgtcagtataaatcactgcaagagaagataggttcacggccatcaggtataaatcactgcaaaatgagcccatcgctacacgatcagagaaaagcaggcccaagatgacatccctgaaaacgcatttatcttctcagatacttattatactactctttccgaggatgtggactacaagtgtctcactttgataacagctccaagatctgatttttcccaactacacactgtctgttaatgggcttcctattttgacatgtttttatttcctggatgaaatatatgaatcctgtttatagacgtgtatgaaataattgtttccaataataggtttctgtttgttcagggtaggagaagggaaggaaaggttggagtgtgtttttccatgtaggtctatatagcacacatccaagaagggggtttggttgaaggcactctccattgacgagatatccatgtttaggcatgaaatgtacatatttgtgtcttcattagtgatgctacctctgctttcctcgctttgntctggcattcccttcctgctgtcacttacata

SEQ ID NO: 327713 - DNA, 718 bp, Homo Sapiens
  misc_feature (484)..(484): n is a, c, g, or t
  misc_feature (488)..(488): n is a, c, g, or t
  misc_feature (534)..(534): n is a, c, g, or t
  misc_feature (560)..(560): n is a, c, g, or t
ttttttttctcttagatctccaggttcccttccttaccccgggagcctttcttcatccaccgtcctggggcgttcacagtgcttagaatcgcagaggttgccgtttctgtacatttcatgcagagcaattaaatagggcactgcatttttcttcaagttaatttttatttattaaagtaaaacataatgtaccttagaagccagacagtcctacaagcttattatgttgtacagcggcgttccgtccccctccccagccctctctttctagaggcagccaatttcagctgtctctctctgcttacctacatatttccatgtttcttggttcatcacctggttggcaccttcagtctgggaaacacctgcccttcactttagggggaattggggcccctgttcgttttgataagttttcctaccattttctgatttgttttttctttctggaaaatgtattagtcagatgtaggcttttctggantaanccttcaactttcctttctttctttcccttcctgcctgtctccctgntctttcttacactttctcagggagantcttgactgtattttccaactttgtatcgaccattttacttttcctgccatattttcaatgtttactgatgtttctctgccctttcagtgcatcctgttttatttcatgttagactgaatcatgtgaaattgataacaggttttcagccacacacaca

SEQ ID NO: 327714 - DNA, 753 bp, Homo Sapiens
atctttttgcattttcagctttaatctccattctgggaatgtttagatatataatgtttgggtagatagagaatgtttagaagtctattctaggtcatagaagttcatgctccagaatatacatttttatcctggtgcctggaagattcctgtaggaggcagcatggcactgctactctagttcacacccctcacccccaaggaaaagaaccaccacgagcactaaaataaaatacattctcaatgtgcttaggataaagaaaatgactttttaccatggcctacaaagcactacgtggtgaggcaaagtacagttttactaatggcatctgaagttgccagatccctcttcattccctccccatctttcttgtttctgtcagtcctcaccccaccctcaccacattccctcccatgagagcatccttgcatagaattctgtgccttctgcctggaatgcttttccctctttctccaaagcaactcgtgttcttccttcagacctcaaattgcagaagacctcttagggaggaaccgtcctcacttgttccgtactaaggctagatctgttgcttttgccacatttactatttaatgtttgtttaagggatgatttgtctaagaatttgataagggttcagtaaaaacatagtgaacaggacttgggttcaagtcccaggtcttccatttacaagctatataatcttgagcaaattacttgaaaaacttcaactcagagaaattaagtaatta

SEQ ID NO: 327715 - DNA, 701 bp, Homo Sapiens
tttaatttgtaactacaggattgcaaaaaattttaatagctttaacctctagaaacaggatatgtaaatgctgaaaaacaaagtcccaaccagataagtcctgtgggtggtttcccagtcatgattcatggaaggagaaatgtactgatgagaaatcacatccaaaatattgtctctgcagtggtaatacttacaaagtcgacgcagtctcaaggcggagctcactgaagatggtttccaagcttatatgtacttcacccatcccccaccctccagcccaaaacaaatcccaaacatactgcttagaactcagcctgcgcagcccagaggtacagagaggcaggaagcacccaggtgtccacatacggtgccattgtggacttgtagggcaggattccaggatatgggtgatgggcgtgtggaaccgcggcgccccctgcacagtgtgggctcatttgagccgggatgggggccgtgaaggcatcacccagcctgccccctgggagctggcttctcccttcctggggcggagctcgcccgacagccccacatgcctggttctccctgcagatgagggtgctgtgtggggtcacagggaagaaaccagcagcagcggcagagcttgatccaggcattggaggagggtcctggtacccctggcaggggctggcgggaagctgcacttctgtcattgcccatgg

SEQ ID NO: 327716 - DNA, 549 bp, Homo Sapiens
  misc_feature (182)..(433): n is a, c, g, or t
  misc_feature (442)..(459): n is a, c, g, or t
tccctacattcatagtcaaatgcaattttgaaaatctaagtcatcatctgagggcctgaaattataatagtctcattatcttttattcaaaagggtagaggttactgttattgttgctttaatcaatatggagaactagcaactacaacattagctgtgggcggggcgtggtggctcacacnnnnnnnnnnnnnnnnnnnnnnnnnnnnnnnnnnnnnnnnnnnnnnnnnnnnnnnnnnnnnnnnnnnnnnnnnnnnnnnnnnnnnnnnnnnnnnnnnnnnnnnnnnnnnnnnnnnnnnnnnnnnnnnnnnnnnnnnnnnnnnnnnnnnnnnnnnnnnnnnnnnnnnnnnnnnnnnnnnnnnnnnnnnnnnnnnnnnnnnnnnnnnnnnnnnnnnnnnnnnnnnnnnnnnnnnnnnnnnnnnnnnnnnnnnnntctgtctcnnnnnnnnnnnnnnnnnnttagctatagtcaaaatccacatttcattatgattggatttcaatctaactctgcttttggaaggaaacgaaggaaaaaaacacaacttt

SEQ ID NO: 327717 - DNA, 690 bp, Homo Sapiens
  misc_feature (65)..(74): n is a, c, g, or t
attcggcacaggaaattatgcctctaatattttatgacctgccaattttcattcagggttactgnnnnnnnnnncacgttatagtctaagatttattattaaacaatgaaacaggttaacactaccatttggctttaatgtttgactaccgaaaagctaaccattcatcaaatttgttttttaattgtggttccctgggtcactcacacatatacatcgaaacaatttattagtgtaaagattaattgtggtaattttattgtcttgggattagatgaagagaccttcaaaaactccttttgatgaaacaagtaataaaatgtagaaacagcgagttctgtggttcaatatttatatgtctgtgctaggaagctttaccataaatttggaaaactttttgtagggtttttggcagagtggaaaatttgccaatacttcaggcacacttataagcccctcttgtcttcagtctggttggctacgtccaataaagtttgatttctcctgaaggaccattatggtttattggcttaatgaagcaaattggaaaaagaatttgtgcagcaccttttctgtgctctgggtgctttataaaattgcagagtacggtttcagttttaagcaattcccaatgattagtttatttccagtgtggcaaaacaggacctgagaaaataactatgagtatct

SEQ ID NO: 327718 - DNA, 470 bp, Homo Sapiens
  misc_feature (53)..(62): n is a, c, g, or t
  misc_feature (368)..(368): n is a, c, g, or t
  misc_feature (373)..(373): n is a, c, g, or t
aaattatgcctctaatattttatgacctgccaattttcattcagggttactgnnnnnnnnnncacgttatagtctaagatttattattaaacaatgaaacaggttaacactaccatttggctttaatgtttgactaccgaaaagctaaccattcatcaaatttgttttttaattgtggttccctgggtcactcacacatatacatcgaaacaatttattagtgtaaagattaattgtggtaattttattgtcttgggattagatgaagagaccttcaaaaactccttttgatgaaacaagtaataaaatgtaggaaacagcgagttctgtggttccaatatttatatgtctgtggctaggaagctttnacatnaaatttggaaaaacttttttgtagggtatttggcggagtggaaaattatggcccaatactttcagggcacacttattaggcccctcttgttcttctt

SEQ ID NO: 327719 - DNA, 441 bp, Homo Sapiens
caccagagtggtcactgacttctcagacctgatttctactgaacagacgactcaaagtagtgagggccgtgggcttctgaggacctcgggaggatggggtagttcttctaagaggctggtgaggacaaggcaaatccttactgacttcctcattcatgttgaggtcttgctgtccttacccaccccagccctgatattacctttgctttagcaaagctttgcccagaaaaatcagggaagggctggtctttggaaagaaggtgaaggtaaagccacttgtacagggagaaactgaggcagagtgggtcaatatctcccaacattatattcatgcctgagcagaaagaacacagatttcaggagagatgggtggccctgagttcaaatcctggccccactatttgctaccctggtgatcttggcatagttaattaagcggcc

SEQ ID NO: 327720 - DNA, 440 bp, Homo Sapiens
  misc_feature (44)..(44): n is a, c, g, or t
gggcaggggaaattaacccaaaaggcccatccatttttccagtnttctttccggaaaactcagcttgtcacattaattcatttaaagtccctgcccattcatcattccaacaaattaataatgaatatttttttaagtgttgaaaagatgataatttataaacctactacacaatttcctcccaaatcataattcattcacttatttattcactcaaccaacatttctatgaatgttgattgttagaatcttctgtgtgccagatccataatgtgctgggaatgtaagatcctgtaagacatggccaccgttaaaatctttcagactagattgtaatctctttgagggtggagatttagcaataattaaatactaaaatcgattatgttcatatatgaattattgatagcatagtatatgtgcactgaagcttctatcac

SEQ ID NO: 327721 - DNA, 915 bp, Homo Sapiens
  misc_feature (256)..(256): n is a, c, g, or t
  misc_feature (267)..(267): n is a, c, g, or t
agccgcaccagcaaggcgcaagggtgactcctaaccggaccaagccggactttaactcccttgctagcggaattggtacacagactcatgtgaaaggcttcagaatcttccttgcccgtacaaaaacccgagtgtagactcttacaccccacaaccccaaaccttttttctaccgcataggggattacttatcgcagtagtcccctctctaccgcctgactgcatgctgttactatcccctgcaaaggctactatnctaatcaatcntgactttggtcaaagtaatcgagatgtcctctgagttgcatctgctctagagatcagctttggcaaatcgtttccatttgaaagcctcaatctcctagtctgtggaagggagctagtatagcacctatgcctcagcaagttgctgtcacggttaaattagaaaaggcacaagagcagttagcacgtgcatgacatgcagtagatatataacaaattagtcaccaccaggcacaggtcacttggtggtccaggctcagggagagaaagttctactgcatgacaatctggcacaaaaaccccagtaagaggaggagtggtgtgaggttagcaaaggcttagctaacgaaggttggccaaagtgaagcctgagggcagcagagagggtctggaacatgggacagtggctctgcatgtaagaaaatgactttggtgtactggggatgatgggctggtgaacagggacaatcaatctagcctagagatgatgaaggtctgagttaaggtactggcaatgggaatggaggacgtatcggagatttggagatactttcaaaagtaaaagtcagagctccttgactaacaggacatgggtgggagtgggacagtgagaaaagccgggcttttatatctgtcatttaccaagacatg

SEQ ID NO: 327722 - DNA, 773 bp, Homo Sapiens
  misc_feature (477)..(617): n is a, c, g, or t
cagtaaataagcaaataatgacaaattaaaatctatgaatggagttttctgttcttaccaagaaaaacttaaattaggctccaaaagctgtgaaagcctgcctagtttggcaaaaggggcactaggatggggaatcaggaaatctggaagtcctagcatcatacccctgccactggaaaagtcaacaacagttggctttgagataaagatatctccctattattcccctttctccttccatttaagaaatgtgaagactgaaccaagttttatgctttaaggtttcttatttgtggtaaaaagatcctgatgacaggtaaggtacctagaagaaattaaagcagttaagcaactaatcatttacaaaaagaacttttatagaaaaggacaaattgactccgtatgatgatgacaaatgctcatcaagcacctgactaaattacctagcattatttcctttaagatatacacatgtgnnnnnnnnnnnnnnnnnnnnnnnnnnnnnnnnnnnnnnnnnnnnnnnnnnnnnnnnnnnnnnnnnnnnnnnnnnnnnnnnnnnnnnnnnnnnnnnnnnnnnnnnnnnnnnnnnnnnnnnnnnnnnnnnnnnnnnnnnnnnntgtggttgggcgcctgtaatcccagctacttgggaagttgaggaggagaatagcctgaacccaggaagcagaggttgcactgagacgaaatcgcaccattgcttggggagtaagaccaagactccgtcttaaaaaaaacaacaacaacgagatatg

SEQ ID NO: 327723 - DNA, 752 bp, Homo Sapiens
  misc_feature (128)..(268): n is a, c, g, or t
  misc_feature (416)..(416): n is a, c, g, or t
  misc_feature (692)..(692): n is a, c, g, or t
acggagcttcggtcttactccccaagcaatggtgcgatttcgtctcagtgcaacctctgcttcctgggttcaggctattctcctcctcaacttcccaagtagctgggattacaggcgcccaaccacannnnnnnnnnnnnnnnnnnnnnnnnnnnnnnnnnnnnnnnnnnnnnnnnnnnnnnnnnnnnnnnnnnnnnnnnnnnnnnnnnnnnnnnnnnnnnnnnnnnnnnnnnnnnnnnnnnnnnnnnnnnnnnnnnnnnnnnnnnnncacatgtgtatatcttaaaggaaataatgctaggtaatttagtcaggtgcttgatgagcattttgtcatcatcatacggagtccaatttgtctttttcctataaaaagttctttttgtaaatggattaggttgcttaaactggctttnaatttcttcctaggtaccttacctgtcatcaggatctttttaccacaaataagaaaccttaaagcataaaacttggttcagtcttcacatttcttaaatggaaggagaaagggaataatagggagatatctttatctcaaagccaactgttgttgacttttccagtggcaggggtatgatgctaggacttcagatttcctgattccccatcctagtgccccttttgccaaactaggcaggctttcacagcttttggagcctaatttaagtttttcntgttaagaacagaaaactccattcatagattttaatttgtcattatttgcttatttactg

SEQ ID NO: 327724 - DNA, 964 bp, Homo Sapiens
  misc_feature (764)..(764): n is a, c, g, or t
ttttttgtcataccgaatgcaaaacttttaataatagaaactgttatcttgactttctcacaaccttcggaaacagttcctcatgtgtgagaatttttacatttggacgatgctcaaaagtgaatttttagaaatggagaaaaaaatgaagggtgcatttaaacaatatattccattgtttctgtactgtaagaagatgaaagaatataccttttactcctggaaagaaaatggtccttttgaaattcagctctctcagaagatgaatttttaaatatcaaactctgcctaaccaactggtcctagctttatggatgtgaggggtaaattagaatttcatgcagttatccaatattttaaactaatacccaagcagttacatttgcaacgcttcatgatttcttaacatctattgaccaaattcccaataggtctttcccttttctttctgtgcccaaaatctacatttctatctagcagcaaacccccgagaaggaagttgttgtaggtaggttaagagaccagaaagactgaccaggcaagcagaagacactggtggaaaatgggcccgctgcgcagccatgtggaataggaaggctatgctggacagagcccaaaagagacccagtttgtgtctcacagtccaaatttggttgatgtatttttgaagcttctaaaggttaactcacatgctgtaatacattatagaaagacacgaagccgaattttactgtgccagtcaagaggcttgcttgaatccgccntttttagaactgagagagacagtacaatttacatgtgtgagaatgtgagaataattttaccttctgttgtttttgaaaccaccttgggccatgatttttaaacggagacacaaggagatctgctgggttcccatagcaacattaacttatctaaactgcccttgctgtatgtaatactttcatgactagtttggcttttt

SEQ ID NO: 327725 - DNA, 419 bp, Homo Sapiens
  misc_feature (16)..(16): n is a, c, g, or t
  misc_feature (52)..(52): n is a, c, g, or t
  misc_feature (66)..(66): n is a, c, g, or t
  misc_feature (73)..(73): n is a, c, g, or t
  misc_feature (95)..(95): n is a, c, g, or t
  misc_feature (120)..(120): n is a, c, g, or t
  misc_feature (148)..(148): n is a, c, g, or t
  misc_feature (385)..(385): n is a, c, g, or t
ctccttggaccccctnaccctagggtaaggtgcccctcccctggattccccnataacctgaagggnatccccncctataatacattttacctatncctatattgaagttttggtttaaanccccctcacccacctagtttttaaggtnccctgatagggtggggacctagggtcattcattttccataactctagcattcagcatatagtaagcatccaataaatgcttttagagatgaactgaaggttcttcttggcaacagagctgaagtgagaataaacatgttaatttaagcattactgaaaattttgggggtaagttaggtccgaaaacaagacatgaaacattaatgtcaagaatatagtcttggctgggcacggtgcncatcctgtaccctagcactttagatgccaaggtg

SEQ ID NO: 327726 - DNA, 738 bp, Homo Sapiens
  misc_feature (438)..(465): n is a, c, g, or t
  misc_feature (497)..(548): n is a, c, g, or t
  misc_feature (606)..(682): n is a, c, g, or t
agctttcaactgatgtctatttttggcttaagctctctgtaaccaattatataattttacggtaaactgattttgtgatgtacaaagttcaaatgattcaagtataaattattaccaagcaatttattatgtcactcaataaaccaaaagcatgcacaggaatagatctcccagcataaaggatgtatttaatttatttgcatgtgtaactttttaaaaataaagaattgtggtataattttaaaaaaatagtagatttatgtcaccataaattgatgatttctattaaaagtaatggcaaaaaccgatatcattatttttgcactgacctaaataaaatcaactgggctttctctgctgcccagcaatctttcttaatttgttgtctggctctttccattttctacgactgcttaaaaagcgtaaaccgtctcctannnnnnnnnnnnnnnnnnnnnnnnnnnngctttttaagagataggttatcattctgtgannnnnnnnnnnnnnnnnnnnnnnnnnnnnnnnnnnnnnnnnnnnnnnnnnnnaggactccagttatcctcctgccccagccttctgaatagctaggccatgggcatgcannnnnnnnnnnnnnnnnnnnnnnnnnnnnnnnnnnnnnnnnnnnnnnnnnnnnnnnnnnnnnnnnnnnnnnnnnnnnaggcggtcctcccacctcagtctcccaaagcattgggattacaggcataagcgtct

SEQ ID NO: 327727 - DNA, 723 bp, Homo Sapiens
  misc_feature (377)..(403): n is a, c, g, or t
tccaacattacaaccaattcttcctcttttgaaaagtgggctgcaccttccctccccgccagcccccaaacagtatcttgaagcctgaatagagaacttaacatcaacccactacctcagactaattacaggtgagtagtggacatcatgtatatgttatcacattgcaaacatttccccatattataatctatgcaaagcctaaaacctcacttcaggctttagatttttatataatgattatcaccaccacctaatgaaatgtcttaagtatgtgccccaattttgtaaaatagttaaaaagaaagtttaggattttcctaggtgaggtacaaagcacacattaacaactgcttcacctcaaatacaatgagtgnnnnnnnnnnnnnnnnnnnnnnnnnnncgcgcgcgcgcacatggctagagaaagagtatgtctgtgtccttgatctctcagcatacttcactttgagttaatcaaaaattttcaatctgtactactcaaaatctgtccatcatttatcataaatatagcttgctgaaaatcacagatgtgactcatagagtatcttaaaattaatgactcatgaaaatatatcagctgactgattatctacataaaatctttgtaactgcttgaacatgatgtgtgaacactgatttccaaaacagcaattgtggtccatatcaataatatatttatagtttcaagattcagtagtg

SEQ ID NO: 327728 - DNA, 778 bp, Homo Sapiens
  misc_feature (145)..(368): n is a, c, g, or t
  misc_feature (676)..(685): n is a, c, g, or t
  misc_feature (766)..(766): n is a, c, g, or t
gtaccaccaatctaattcaaaataatttggcattatgtatgtgattgctgtaataaatcacataccatcaacacataccatttatattaaagtgataagaaaacaaatgattttcccattagccaagctattatattattgaaannnnnnnnnnnnnnnnnnnnnnnnnnnnnnnnnnnnnnnnnnnnnnnnnnnnnnnnnnnnnnnnnnnnnnnnnnnnnnnnnnnnnnnnnnnnnnnnnnnnnnnnnnnnnnnnnnnnnnnnnnnnnnnnnnnnnnnnnnnnnnnnnnnnnnnnnnnnnnnnnnnnnnnnnnnnnnnnnnnnnnnnnnnnnnnnnnnnnnnnnnnnnnnnnnnnnnnnnnnnnnnnaagtgtatatttaaactttaataagaaagaggtaagatttttccaccaactaaaaaggagaaaggaaagaaattaacatttatttagtgaataaagtatgcccaggaagtgtaacaagcaagtacttcaactatacattgtctcattaaattttcacatacattctgcaggtaggtgttattaactccctgaattctacgctctgctatagccacaggtcttttgctgtatagctccaggagccagataagtatctgttgattgaatagattcttatttagagatgcgaaaactgaagctcaggattnnnnnnnnnntcttattcaatgtaataatcttactcaatgtaaatcttagtcaatttctaataattactaatatttatggagtacccctcntgccgaaatttc

SEQ ID NO: 327729 - DNA, 441 bp, Homo Sapiens
  misc_feature (90)..(103): n is a, c, g, or t
tttattgtaattaacagaaggctggtgttctgaacctagagaacagtggcatcatgtgcacagtgcactcacactgcgctggccagcacnnnnnnnnnnnnnnaaactggaaactatatgagcacggatgatgtatgctttgttgggtaagaatctgacctaaaaaaattggcttcacttcacagtttaaaatagactttttccttagacagatcaaagatacctaacattcagctatgttcaaaggctgcccagggaacttctgcttgccaacagcaaggacacagggacaggcacttgttgctgtgtgagcgaggcctgggagtgattaaagaggatggacgagcttgtccacagggaagctcagcgtaggtgagtggagtagatgaagtgaaatccacccagagtgctggggctgtgtgtgagaccttggttactttc

SEQ ID NO: 327730 - DNA, 510 bp, Homo Sapiens
  misc_feature (321)..(321): n is a, c, g, or t
ccactgtgaaagtttttaaggtggtcaaaggaatcattcctgtagttccagtgtaatcccagttgcagattaacattgtcaggtatgtcagagatacctgaagtacagtcatcacattcacagtgtgtggatccccatctcgaagggacacaatgctcctaaatcagtctctccattgcagggggtggcatcaagttccacatttccactcgggagccctccttctcctgacggctggggctgtaggttccctgagttgcccttttgttggaggtgacaacagaagcaacaatggccagcaagaggatcagtaacaaggcngacagtcactgagccaatagtggtgaaaatgtcggagatcaagtcatctgccaagtccacctcgcagcgctcgccagcaaaggcaacatcacagaggcactggaatttgttgagtaagtcctggcacagacctccattgacacacggatcagaggcacactcatcaatgtccttttcacaccttcaaac

SEQ ID NO: 327731 - DNA, 551 bp, Homo Sapiens
  misc_feature (17)..(17): n is a, c, g, or t
  misc_feature (27)..(27): n is a, c, g, or t
  misc_feature (39)..(39): n is a, c, g, or t
  misc_feature (73)..(73): n is a, c, g, or t
  misc_feature (80)..(80): n is a, c, g, or t
  misc_feature (155)..(155): n is a, c, g, or t
cagttatgtcagagatncctaagtccngtcatcacattnacagtgtgggatccccattctcgaggggacacantgctccnaaatcagtttctcccattgccaggggttggccttccaagttcccacatttcccactcgggaagcccttcctttcntcttgaacggctggggcttgtaaggttcccctgagttgccctttttgttggaggtgaacaacagaagcaacaatggcccagcaagaggatcagtaacaaggcgacagtcactgagccaatagtggtgaaaatgtcggagatcaagtcatctgccaactggaaagattgaaatcattgggatgcgaattctatagcaaaggcaaataaatattcaggacaatggaactactcaggaatgaagaccaaccagagcaagctggtaccactcagtagtccacctcgcagcgctcgccagcaaaggcaacatcacagaggcactggaatttgttgagtaagtcctggcacagacctccattgacacacggatcagaggcacactcatcaatgtccttttca

SEQ ID NO: 327732 - DNA, 931 bp, Homo Sapiens
  misc_feature (283)..(294): n is a, c, g, or t
  misc_feature (319)..(569): n is a, c, g, or t
tttttcttagaatatatcctgtaatataaattgtttcacatgtgacaaactttaagtcctataatagaaactcttaatatactgaaacttactgtaatatttctggatgtgagttttgaaaacataaactgttgggccctttaagtctgacaattcatatttttggttttggaaattctcagctgttatttgttcagcataccttttctccattctcttgatgctttctggaattcctggatccatgttgaaacttggggatctctttccatgtcttctaacnnnnnnnnnnnnaagatggagtcttgcctctgtcagnnnnnnnnnnnnnnnnnnnnnnnnnnnnnnnnnnnnnnnnnnnnnnnnnnnnnnnnnnnnnnnnnnnnnnnnnnnnnnnnnnnnnnnnnnnnnnnnnnnnnnnnnnnnnnnnnnnnnnnnnnnnnnnnnnnnnnnnnnnnnnnnnnnnnnnnnnnnnnnnnnnnnnnnnnnnnnnnnnnnnnnnnnnnnnnnnnnnnnnnnnnnnnnnnnnnnnnnnnnnnnnnnnnnnnnnnnnnnnnnnnnnnnnnnnnattgcatccagcatgtcttctaactttctaaaaaatacttcttctgtattcatctccccacccccagcacttgggcaagtgccagtgactgtactcatctttgtttttgactttgttctgtgaaaattcctcagtttatcttgcttttcttcctgcatccattctgctttatagtcgtattgaattgtttattcaacagtatccatcttattccttttaataactttgttcttgttttgtgggtacaatttttgctttatctctcggtttattcttacattaaaataattgaattaaataatgaggaatacaaagatgagatgtggctgaaaaggtccagggcaatttacagtcttaagggt

SEQ ID NO: 327733 - DNA, 831 bp, Homo Sapiens
  misc_feature (45)..(45): n is a, c, g, or t
  misc_feature (62)..(62): n is a, c, g, or t
  misc_feature (76)..(76): n is a, c, g, or t
gaaatcaagttgtttattagtcttgtgttcacccatgtcatgcanacgaagattgaagagcngaaaacgctttganattctccactgtaaggcactgtgtgataccccgcttaaaactattcctaccattccaccaagggactttcctttccactgacaagttgaaggaggaattcagagacagtgcttccgtagccaaattgtttcattgttcaagtatattgatagggtggttgcctaagcagaaaatgcagaattaaacgaaggaagcttgttttgagagcaggtctgtcaccctctatggtacatatgacaaggaagtaaacaggaagtgctgaattggcttggtttactccttaatataacattgcctttcctgttgttgcaggcacatcacagttgtcacatcagcaggctagaaaagccatcccattcctgcggtaggcatttgtgaatggggaaagtgggccaatcctgtggctgtagcgtcgaatggcctctctgatgtggcagggctggatggcatcgctgtgagcctcaacaccacaggctgcagtgctctcagcagagttgtgatactgaatgaaggttgcagaaatggcatggctgaaggggtcccctgccttggttaccatgtcttgcctcacaagaagagccagatccactaactgtgccacagtttcatacgctaaatatgctaagatttccattgcgacaacattgggttttatctccatactgctgcagtccaaccagtctcgaaatttggaagcttttttggagaaacttaattgtcgactttcacagaattctgcatattgagctgaatcc

SEQ ID NO: 327734 - DNA, 840 bp, Homo Sapiens
  misc_feature (704)..(719): n is a, c, g, or t
aagtcactagacatcgtggaaaatccattcctagataactcaagaataaaaatatttaccactgtgaaaattaaactagtttctattaatgcttgactacagcaaaaaagaagtgttattaaaaacctttgtctaatcaaactataattgtttcagagattcagataggagacttcaaatgagatctacctattaaacaaaaatgagaggtttgagttagacattcaattcctgatatagatgatctcttatttggtgcatctttttcaggagataaaagcgataccggaaaaacgagagcggtggctacacactgatggggctgtgatgtgctgggctgaacgcaatgacagcatcgaaggcagccagttgccgcagatgtactgagcagatgaagagtggtactgctttgagaacccaccaaaatctgaacagtaaaaccaggacagcgagtgaagaagtgagtacagggctgagtgcaatggacaacaggctcacagtcaatgaatcacatggagcactgtggtaactttcacaaggctaaatgtctaaatcttaaatactgccaagggtctaaaattccagctaccctcaacagtaagtggtctccagacttgcaagttaccggctaatgcgcaaattagcagcaaaataaagttaagtaacgtactaaaaacttttcccaagagatattcttggggggnnnnnnnnnnnnnnnngtagtgcagaattcacagctatgcatgcatatgtgttgtagttaattcacacacagcaatactgaaaagggaggttatatatggatctgtgcaccaagggttcaagaagaacttgaagagt

SEQ ID NO: 327735 - DNA, 820 bp, Homo Sapiens
  misc_feature (311)..(311): n is a, c, g, or t
  misc_feature (411)..(411): n is a, c, g, or t
ggggaggaaggcaaggactgggaaagactcacaacagatatgaccctagtcgtaaagaaatccataattgccagtaacacgacatatttaagaacaggaaaagacagacaagaaaagagggaattttttaaaaaacattactaaagaataggacatagaagagtgaaattgagaaggtaaggaggagggggaaggatgtaaaacctatgacaatacacgagttattcaaagagtagcctttcttctgcatgaggccgccatgcagagtgccacttacatgaggatggctgtgacactgggtactcatgggnaagctgtggggaaataagtttgctcccctggagaagaaatggctgcgaagattctctgaaggggtaagtgaagacctttctggaaagttctggaaatgtnctcctgaagccaactcttctatatggatttgggggaagatgtggattctcattagtgcacacttgggtgtatttctccatcatcttttatagtggcacccccactctctcagtggtttactttgaggcaaacactgtcctacctcagctcccctcctcttttctccaaatgtcatttgaaaatttgaaaaaagaaaatttaaatgaacttttttttggtcagagggcccaaaagaactgaaatagccccaggaaagcccaactacaagagagtccttaggaaaggcagtaggaaagggagtagtttgcttctaaaataacaactgcgccctgtttccaatctcctcagtgctcgacagtgatcaatgctggcttcttgggaatggacggtatttgccgtgaactccccc

SEQ ID NO: 327736 - DNA, 731 bp, Homo Sapiens
  misc_feature (461)..(461): n is a, c, g, or t
gaatctcaggatgacttttcctctccttgaggacactcaccactttctctttggatctcaggactcccagctttccaaaccgaacgtgaaaaggtgaacactgatagctgccatcctgctgctgtaccacgatgacatcaatgcacccagagagggtggcctggttaatgcccttgtagagttccttcacagtgacaatcacctgcccagccagctgtcccacataattcatggtttgagactacaagaaacaaaaattagatgagatgttaacactaaatttgtgatctattgacaaagaaataacagtcgtaacaaaaatgacactactcacttgtatgccagatttcatatcattagcctttttcaacctaacagtctcatgctaccattgtttctacgcatttccacacacggaccacccgagactattctcctttgtatctgagaaggctgctccnagccagggcctgaggcattcccctttccctttctcagcaaccctggatagtactgactgcccattagggactttttccccaaagttcaggatcagcacagaatcaccaaagaaccctgacctcctgcccaagaccctttggaacctgcggctactgcatccactttggccatagcagccaaacagaaaaaacaaacatcatccccgggagaaaccagagattcatcttccaacagaaccaatgtaataaattagtgagagctacattttg

SEQ ID NO: 327737 - DNA, 413 bp, Homo Sapiens
  misc_feature (79)..(79): n is a, c, g, or t
tttgggacctcaggactccccagctttcccaaaccgaacgtgaaaaaggtgaaacactgaataagctgcccatccctgnctgctgtacccacgatgacatcaatgcacccagagagggtggccctggttaatgcccttgtagagttccttcacagtgacaatcacctgccccagccagctgtccccacataattcatggtttgagacaagatacccaggaggggacttgtcatggtaaacatcttgagttttacttaatgagcctttacaaaccacctcatcttccttgtcatcttctaagtaaaacatcttgaaatttaactagcatgtcttttttcagagatgaaggtatataatcaaaacagaaagctgctctcttgacaaactgagtacaaactgcttgcagacacagt

SEQ ID NO: 327738 - DNA, 473 bp, Homo Sapiens
  misc_feature (21)..(21): n is a, c, g, or t
  misc_feature (27)..(27): n is a, c, g, or t
  misc_feature (71)..(71): n is a, c, g, or t
  misc_feature (82)..(82): n is a, c, g, or t
  misc_feature (94)..(94): n is a, c, g, or t
  misc_feature (103)..(103): n is a, c, g, or t
  misc_feature (123)..(123): n is a, c, g, or t
ggaacaaaaaaatgaacaccngccctncgggaatggggtaaaatccctaaaaaattatccccccgtgaaanaaacaaaatgnaacagccccaantaagatcantcctggaagaaatactgaanccagcgccagccagcaaactccgcgggcaaaagactgcctggtccatccagaggaagtccagtgtgaaagtccagccgaaggcaggggcaagggtgcccgtaactgaggtccctagctccttagaaggctgaggcgaaaggactgcttgaagcctgggaggcagaggttgcctcctacactgcactccagactgggtggcagtgagaccaagataccaggaggggacttgtcatggtaaacatcttgagttttacttaatgagcctttacaaaccacctcatcttccttgtcatcttctaagtaaaacatcttgaaatttaactagcatgtcttttttcagagatgaagg

SEQ ID NO: 327739 - DNA, 457 bp, Homo Sapiens
agaactttggagtaaaaattgtctctgtttccaagacgtgtgagatgtctgaactctgagatggtgtttcatctccacccgatttcaccaaaggggtgtcaatatctttaaagaactgatcttcagtaggaattggtgaggtggcaaggtaagcaggaagcttttcatattcttcttcagtctcctcaacaaagaaagcttctccgttatcacccaacttcatgtgaagatccactgcactgccgttgatttctatatcaatcactttctctttgggatctcagggactcccagctttcccaaacccgaacgtggaaaagggtgaacactggataggctgcccatccctgctgctggtacccacggatggaccatcaaatgcacccagagaggggtggcctggggttaatgcccttgtaggagttcccttcacagtggaccaatcaccctgccccag

SEQ ID NO: 327740 - DNA, 616 bp, Homo Sapiens
  misc_feature (370)..(563): n is a, c, g, or t
taaaatgtttaacagcttccctggggcattcaacccactaaacatttcctgaggtgtgctcaatttctctgacaaatgtttataagcatactggccatgaaactgtaccacttcccacgcaaaacaggggacttactttactaatgagagctagctaggagtgacataaaaattctttttagtataagaggaaatgatgattaacccagttatggaaaatgatacttcaccatggaacagactgttcattaacaaagagtacttaactaagccgtaagagcctttggatccacagatatacatccaaaagtcatctgttccccaagactaattaatcacaaacagctggggctgggtgtggtggctcatnnnnnnnnnnnnnnnnnnnnnnnnnnnnnnnnnnnnnnnnnnnnnnnnnnnnnnnnnnnnnnnnnnnnnnnnnnnnnnnnnnnnnnnnnnnnnnnnnnnnnnnnnnnnnnnnnnnnnnnnnnnnnnnnnnnnnnnnnnnnnnnnnnnnnnnnnnnnnnnnnnnnnnnnnnnnnnnnnnnnnnnnnnnnnnnnnncagaggttgcctcctacactgcactccagactgggtggcagtgagaccttgtc

SEQ ID NO: 327741 - DNA, 458 bp, Homo Sapiens
ctttatttggtgtttttagcattgtaatagagtaagtaaatatttggtctttgtcccagttcttggcacagagctctccaaaaacactcggagtttgcagagtgctaggagtgtctttgtcgttcctagtgatccactttggaccacacctgagtttgttcctactgtgaggtgattttggtggggcccctagatagcctcatagttggtttagtcagaaaggccaatcacttgatttgagggttaaaacttgtcagcccacttgccaaccttggggttgcagggccagagattggaactctataaaaaactcctaatttgatgtgcttctggattggtgaacaactcgacatactgggtgggtagcatgcccagagacttgatggaaactctgcagcccctccccaccttgccgtatgcatctcttccatgtggttcctcagttgtatcctttattt

SEQ ID NO: 327742 - DNA, 747 bp, Homo Sapiens
  misc_feature (404)..(404): n is a, c, g, or t
ttcatggatagattttccccaacttacagtttttccttctgatttttgtttaaccccctagttatcgctaatccttgcttaaagaggattaagacaatcatgtaacaaatatgggtgcttcgctacccagaggtgtgggtggggctctgttacagtttgcgcgtccatatttctgggccactgcacaaagaactccaaaccactcagagcaggacaaagaggggctgtggtggagaacccagggccctttaccagggaaggggtgtaaggccaggtctcctgggctcagccacagcccccaatccctctggctggggcagcaacaccccctccaaagctgctccctcggaagggactgccaacagtcaacgccaaacttcaaaattaactgccaccattggggngctgggacggcggtttggttccttttagtccaaggcgctgacagccaggcctgcccctactagctccttctgttgtttcgaggggagtgaggcccggggctgaagttaagtttcactggtgagtggccggcgggcacaaaggaaggaaccgctgggggaggggaggccgcagagctggagggctgggacaaaggggacaagagacaaagggacaggaaaagagagcccgctttatcctcctccgaggaaggaactccccatttagtcaaatatttcactcacacagctctgggcaagaaatgccccactgaacattttccgaggtggcttcaggtgtctccca

SEQ ID NO: 327743 - DNA, 512 bp, Homo Sapiens
gaagggcagatttattagagaaattgtgaaaatatgttgcagtgggcagctcagcagagaaggggctacctgcaaagaggcaagggctggaggaaagttttatagggtcctgctgaagggtgctacgtgtggaatgaggtcattgtgcccgcaggttgtttgtgattagctgtctctaacaattgttcatacaataattgttcattattgttctcaacttggggctcctccccaacctggggacccttcccttattgttgccttacttatcaggtctcccacataaaggtgtggaaacttcattcattcatatcttcaacacaaattgtaggtagcctgttttttaaaacatttattcaacaaatatttagtccaagccactattacttactaccttctctactattgtatggacttttaactatctctgacactattcactattcttccacattctctattatttatacctatggtaaaatttgccagtttgaccatacaactaatactca

SEQ ID NO: 327744 - DNA, 1011 bp, Homo Sapiens
  misc_feature (908)..(947): n is a, c, g, or t
gtatatactttaatgcatgtttatgtgcaatcttgttagtgggtatacaagtttgtgaagaacttctcatttcaataggcagttaatgtaatgcattaaaagcctgggaatttggggctatatttttcctttctgactcaataatcttcaaagaattcataggaaagtcagtacttgcagacaagtggttagcttggctaaaatgtacaaaacacccagaacccacaaaacactcagaggtttaggagaatgttttaatgcttaagaggcaggatcaagtgaagaggttacagaaatcagtgtctctggctgggcagtcaagagagcgggctcaaattctgtgactcacttctctgtgtctcggttggaaatgaatgggtatcctggttcccaccttcccacacgctgtgatacttcaaactccttgggtgaagggcctcttctcagcccaagatcttgattgtgaacattaacaaagagaacagtcatcctccacagaagataactcattaatgacatttgattcagtgaataaatatatcatttaaaaaaatattgtagggggatcatgaaagtagtggaggtaattacaatcaggagagattggtattaaaattgagcaaagtcccaactctcaccagatgacaattatgcatcctgctagatgccccagggctgtcagcctggaactgaaataaatgtgttataagtggtgctggatgcctttttcagttcatttgaaaacatggatttgatcatgtcagctccctttctgctggaaaaaaaagtagtttgcataattggtgttaactactctgttttgattctacagagtaagtaatactcaaatgtggtcttactttaacttcttgcctttgttacccccagaaccatgcagacattgaaannnnnnnnnnnnnnnnnnnnnnnnnnnnnnnnnnnnnnnntcatataacaggaggacaggaaaggtaaggacccagaacaatgaagacttattgaaatgtggta

SEQ ID NO: 327745 - DNA, 556 bp, Homo Sapiens
ctatttattcctttaattattatacattagaaagaaatgacaaggattgcatcctagttttaaaatgctgaacttttaaaaaggcaattttatttttaagactttaaataactcttattagtaattggatttgtggcagattccaagagggtggttttggaaagcacagtggcttccggtggcttcagaccttggtttggaattgcaggcctaccgcacaccgactctggagagtgacttggagcctccaaattccaagcttcctgtgtgcgagtgaggctagcaaaccacattgagtaggacagcctgagggttaagttacaccatggatgaaaagctgatgcatggttctaacttgcccgggcttgatattcaaaagatgtctattccttttccattttctctcttttccaaaaatcctcttgctctgtttctgttaagacccttttgcaacactctgttttaacatggtgcttaatatattgtcagaaaccacattttccagtgcatatggtgcagtttttaatttctaatttagctttttaattaagcggcc

SEQ ID NO: 327746 - DNA, 712 bp, Homo Sapiens
taggaatttaaaactcagcagtttgcctttgcagatagtgggattctttttattgcattaattatttaaccaatgctttcagatgaccaatttagcaattaaatggggttgtcattattagataagctatgatctaacatgatttaaaatagcagctccagcctgtctctactgtggtattaatagacctaaaatgtctttaaagatgcatgagcagtttcttattttttggaactggtaaaatgtctccagctagagagttgaatgttctgttacattggacaagtgcctttttgaaaacaaaaggagctttttttcttaagaaaagttatacttgctgaaaatagttgcagaatgcaataaaaatggaacatagttaaaaagaaatgacaattccatcactcttttcactttggcaataagacaggacttcactcttttttcagaagaggcatttgaaagttcccttctcaacatagcaacgttaggcacccactgggaattctgccactatccagccctcagtctgtaatgaatcagttgaattcagagacagagcagtctaaaaagtggcttaaaacgtgctcagatttgttacctgatcctcaagaggtaggaattaaagagggaaaaaaagcccctagtggcaaattgacttaaaaggctaagaacaattagccatttgtagccagcaggtgttaattaagcggcc

SEQ ID NO: 327747 - DNA, 746 bp, Homo Sapiens
  misc_feature (69)..(69): n is a, c, g, or t
gtcacaaaggaatcgcttttacaaatgcagagagctataagtagtgcctcaagcaatttcaaaatgtgnaggcacagtaagcctcactctgcctgcattctaggtggccttcgtgatccaccccttgaatgagggctttgaggagggggcgggttgcctttgctgctttcagatcctggggagccaaagcctcccctgactcgttggtctgaaattgctttcgtggtctgccagggagaagcctgccaggaagagccaacctacttggggttggggttggctgttccagctgtttaccaattgcctctcacttgtaaagtgtagctttaattatagttttgcccagaattcattttaggaatggcccactaacaatgatttacttggggaaacctgtaagcaactgtgtcaagccacgtgcagtgaaacctgaattaactgaaatctcattaactagaatacatatttcctgctcacctcattaaaaatgggagaacaaagaacataacacatgaactgagttcctattacatgtcagacacttcactacgcactggaactacatacagtgcaaagaatggacaggcattctaggaactgactgtcttcctaaatggaaatctgctgtttaattccagtcaactagcaggggctccaagacttgctgttaagccagacagtaaatcaagtcactgttcttttaagattgtttcctttggcccggtttcatgggccttatgttgcag

SEQ ID NO: 327748 - DNA, 442 bp, Homo Sapiens
  misc_feature (17)..(17): n is a, c, g, or t
  misc_feature (31)..(31): n is a, c, g, or t
  misc_feature (36)..(36): n is a, c, g, or t
  misc_feature (52)..(52): n is a, c, g, or t
aaaaagtttgggccccnaaatccaattttanggaangggcccactaaacaanggattttaccttgggggaaaaccctgtaagccaaactgtgtcaaagcccacgtgccagtgaaaacctgaaattaaactgaaatcctcatttaactagaaatacatatttccctgcctcaccctcattaaaaatgggagaacaaagaacataacacatgaactgagttccctattacatgtcagacacttcactacgcactggaactacatacagtgcaaagaatggacaggcattctaggaactgactgtcttcctaaatggaaatctgctgtttaattccagtcaactagcaggggctccaagacttgctgttaagccagacagtaaatcaagtcactgttcttttaagattgtttcctttggcccggtttcatgggccttatgttgca

SEQ ID NO: 327749 - DNA, 529 bp, Homo Sapiens
  misc_feature (483)..(483): n is a, c, g, or t
ttttaaaagctatacaaatgctcatatcttatttttattctttgtctacttcctaggggaagagtaatctaaaaaacactgcaatggcctatgttctaggtttcatgggaaggctgacgtattttgatgtgtgtatactatccatatactgtgcactcctaaggaccaataatgattgaggtagagtatctgcaacgatgtagggggtcacaaaggaatcgcttttacaaatgcagagagctataagtagtgcctcaagcaatttcaaaatgtggaggcacagtaagcctcactctgcctgcattctagggtggccttcgtgatcccccccttgaatgagggctttgagggaggggggcgggttgcctttgctgctttcagatccccgggggagccaaagcctcccctggactcgttgggtctgaaattgctttcgtgggtcttccaggggagaagcctgcccagaaagagcccacctacttnggggttgggggttggctgttccagctgtttaccaattgcctctcac

SEQ ID NO: 327750 - DNA, 659 bp, Homo Sapiens
gcggcacgagcccagttgctgcagactccttccccaccttctctgccctccccctttgctcactcgtgtgctgtgcatcctgctccgatctccccccaaccccgccgacccccagaggaaaatgcgagggcacatcaggtgggaaaaaactagatttacaagaggaaagaggcgcattgttcaaaatggagattgcattgttgcagtttgcaggccacactcgctctctcttctctcctcccgccaacctcctctttttcctcttcagaatttgtgccagtgtagtgtctccaccgggcaggattgaaactttggcaaacacgtatccattgctttcatttctttccccttgttttggtctggttttctggaatgaaagaagcctcttgttttgcaaacctctttgcatttctaatgtggtttctttcagatttttattagatatgttacttaaaagggaattaagggtttggacagattgtggcacacaaacacacacaaaaacatgtctgttttcacatccctagctgtggttttaaaattgtgttaaggaaatggatcatttgggttagtaggggaattttatctggtcctgtatgtttgcttttattcttcgagtgctaatgggccatgtgcaacagttgctggtaaatggctga

SEQ ID NO: 327751 - DNA, 732 bp, Homo Sapiens
  misc_feature (353)..(365): n is a, c, g, or t
  misc_feature (388)..(631): n is a, c, g, or t
cccctggtaaataaaatattggtaaattagttccactgattatgatagcagaggttaatatagccctatggtcaaagtcttggatatattcatatctggagcagattaaggaattttgctaactgacttcaacttcttagcaatcttaaaatgtaagcttaaatatcttgtaggtgtcagtgaaagaggagtatgttcatcttgtggccacaattcagcaattagtgcagataagaatgatcttgtttgaagagcagtggggaaaagctgggtaaatgaaggaaggtatatgtgggaagttcatgtttcttccatgaattctgtgcgtattgtttaataataatgctgtttcnnnnnnnnnnnnngagatggagttttgctctcatcnnnnnnnnnnnnnnnnnnnnnnnnnnnnnnnnnnnnnnnnnnnnnnnnnnnnnnnnnnnnnnnnnnnnnnnnnnnnnnnnnnnnnnnnnnnnnnnnnnnnnnnnnnnnnnnnnnnnnnnnnnnnnnnnnnnnnnnnnnnnnnnnnnnnnnnnnnnnnnnnnnnnnnnnnnnnnnnnnnnnnnnnnnnnnnnnnnnnnnnnnnnnnnnnnnnnnnnnnnnnnnnnnnnnnnnnnnnnnnnnnnnnatgagccactgcaccggcttaataatgctatttctttagccatctccaaaggcagaaatattcacaatagcttcttaaccaaaaagcactcattgaaattc

SEQ ID NO: 327752 - DNA, 459 bp, Homo Sapiens
  misc_feature (37)..(37): n is a, c, g, or t
  misc_feature (65)..(65): n is a, c, g, or t
  misc_feature (73)..(73): n is a, c, g, or t
cgaaacaccctggccctcaaagcagtccatccctgcnccccagcctccctaagagtgcctggganttaccagncatgaagcccactgcaccctggcctgtcattccctgtttttgtgtatacggtccatgtggtcttaaaacctttcctgaacgtgtctcagttgaatttcccaagaaccttgtgggctgggtttagtggcggatattactaatattttacagataaggggaactactgaaatgcagaaaggtggcaagcatacagctcattattgtggtgccagaatcaaaatacaagtttcaaactccatcactgggaagttgagctttccagtgtctcatgctatgtttggctcagtgggtagacatccttgttcctaaccaatgctgtagaactatcacctgagaaatgatgcaagtttttactgccagccaagagacagtgttgccattccagt

SEQ ID NO: 327753 - DNA, 664 bp, Homo Sapiens
  misc_feature (254)..(254): n is a, c, g, or t
gctcaggtgatcctcccatcagcctcccaagtggcagaggaaaaacaaaggacactgggtgtgagggagaggtgcaaggtcaggaccaagcatccatgggaacacaggggaggatgaaggcactgaggttggggagagagagcagagctatcagtgttgaaggccggaaaggatgagggagtctgcaggctcggcccgatcaactggttccagcttctgtgacctgcctgggaggaagatgaaacaggctcctncatccttattggtaaagataaacccaaatcccatctcacctcccagctctggtctttcccacctttagccattgcccacctcactccatctctccttgccaagcctagactggcttagttttcactgctctgtggtctcacagtgccccgtggctatggctgtagataacttaccacttgttttacagttgtctctccacgtggtcgtatctgtcttgagtctctgcactcccagggcagaggctgggtctcattcatccagcagccccaaggcccagccccactcctagcatgtgtcattgcttagtgttaagtgactgtccattgtgacatgtggacattctcaaggtcacataagcagctatatgatgctaagcgatggggaattatcttgctgcttggtggggggt

SEQ ID NO: 327754 - DNA, 1131 bp, Homo Sapiens
  misc_feature (93)..(299): n is a, c, g, or t
ccatcaacagatatttcttgagtgccgtgtatgtttgaggtcttgttcttgtcagcaagtaatggacagagcccttccattgtggggctcacnnnnnnnnnnnnnnnnnnnnnnnnnnnnnnnnnnnnnnnnnnnnnnnnnnnnnnnnnnnnnnnnnnnnnnnnnnnnnnnnnnnnnnnnnnnnnnnnnnnnnnnnnnnnnnnnnnnnnnnnnnnnnnnnnnnnnnnnnnnnnnnnnnnnnnnnnnnnnnnnnnnnnnnnnnnnnnnnnnnnnnnnnnnnnnnnnnnnnnnnnnnnnnngtatcaaaattcagtaagcaataaagtcagctgtatttgtaatgaagaactctcagttcacctctccaattttatcacatggagggcagtcacttaatagcagaaacaaaaacaaaaactgctctctggatcccacatctttccattgttgagaaacaattgggttattctgttaacatatctgtgtcactcagacttccaattctgtgagtttcaggctttataaaaactggctgctctatttctgtttatttcattgggggtttcctgatacaccctctaggtaggaaatttgctcaccgtttctgtatcatggaggacataaatggggagggaggggctggtcacggcatgccccacaggtagacaaagcaaactccctcctgccccaggtacccaggaaaggagaaatgtgtcccagcatgtacaaaaatgctgagaagtatgcacctgccacgtgctaggaggaccttcccaggggcatgaaaagaccccgggaaagccttggacaaaaagggtccaaactgtctttttaaatcttgatgaactgaaggtagatgcccacctaaaggcttcacaataggcccaggacaggaaagacatcaggagaggcttggctttttaatggcaactcatagtacctataggttaatcatttaactgcaaattcgcctggaaatgactaaatttgagacagtcacagctgcagtgtatgactatacatcaatgactcacacggtgggggatccccctgctattattacgtgaagccaaacaaaatcactatattattgatttattcttttttcattttgaaagattacacatgata

SEQ ID NO: 327755 - DNA, 684 bp, Homo Sapiens
ttcaagcttttatagcccttccaaggtgctctaggggacttagcaaaaccaggtagacagtaagtatggatcaactgagcacaggaaagaatgggatttgggaagatcacattgtttggattttctgctgatactaaagctggatttttactacacaggcagggagaaattactgtcctgtggtggacctggtgagagaggtggcatatgactaagcaagtcagctgacctcaattaaagggctgtgaccatctgtacaatgggaccagtacctcctcccaactgttggtctcagctgagtgagattccccatgtctgaggaggtgatcggggtgatgatgacttttgatggaactgacctcacacaggtttctgggggaaaaaacccaccaaactttattttaagaattctaaaacaattttccaattctgatttgagtagaagtttgatttgaaaagggggacttcatctgcaccttcctctcttgcctttgtttatagatgtcagtaatgcccgtattttaaaaagttgaaatgagttataaattatatcttaaggattttagtttgttttgaagaattgtttaattggctaggatttctccccccttcagtagcttcagatcccaatggctaggcaatatggagataatagtaaacaggattttgtaagagatgttattt

SEQ ID NO: 327756 - DNA, 582 bp, Homo Sapiens
atcatcattcatttatccttttatttagtggcttagatcctagaagatagattccctataaaatcattttagccacgaaatattcataagaaaccaacttcaaatgttaatgaggatactgaagttttttttaacctaaaaaaagtggcaattttaggtaaccataaagctgaggcaaaggcagtttgggttcttggaaagaatcctgcctaccatcttcagtggcctctgggcacaaagcacttatgatcactgcagaggtggagcaaggtaaaggactgtgtcagcagttcatgttgtgacagcagcagcatctgcagaaaacgcaggtcatataccttggcttacacaaggaatgctatgaaaaatgagccaccaggtgggagctttaacataggtaatgattagtgaaagcttcttagaaagtgagaatttgtaatttctttattaaacattacattcagtgtaaaggctttaaccatcataatcaccatgatataatatgtgagtatgtatatgtaaaaaaatacccattgaacataaaattatgttttgaaatctatgcaacatgaaatatagttt

SEQ ID NO: 327757 - DNA, 676 bp, Homo Sapiens
  misc_feature (365)..(365): n is a, c, g, or t
cataagtagtggaaggggtccagccatcctctccattcatcatgccactggggggtccccactgaatgctgccagtgccagggaactccctacctcccagaggtctggagagacccaaatcttgctcacactgaggaacggtgggcagctgagagcaggtcttctccaggcagcttgagtaggaggaggtaaggatgagggtgggcaggtaacataacaagccaacattgaggccaggtgttttcagggatagaagtagtctgggggctgctgggtctccatctccatcctggaggctcctgggggaggcctgcagcctgggtctggctggtgtctggggccgcaggggcaacagatattccctncctggagcctcagtggcgggagagcatcatcacaaactctgcgggagagaagggcagggcttgggtcagtccacgtcagggatcccaggaggtgctgggctcagcctaggccctggaagcacgggagggttttccgggaaggagactcaccgtcaaagtctacggtgccatccccattgaggtccacttctcggagcatctcgtccagctcaggacccgccagcggctccccgagcagagccggtaccgcctcccggcagctccgccaccgtaattcgtccatccctgtccctgtcaaactaaggtccccg

SEQ ID NO: 327758 - DNA, 612 bp, Homo Sapiens
  misc_feature (21)..(21): n is a, c, g, or t
  misc_feature (35)..(35): n is a, c, g, or t
  misc_feature (65)..(65): n is a, c, g, or t
  misc_feature (86)..(86): n is a, c, g, or t
  misc_feature (89)..(89): n is a, c, g, or t
  misc_feature (101)..(101): n is a, c, g, or t
  misc_feature (120)..(120): n is a, c, g, or t
  misc_feature (122)..(122): n is a, c, g, or t
  misc_feature (126)..(126): n is a, c, g, or t
  misc_feature (131)..(173): n is a, c, g, or t
  misc_feature (271)..(271): n is a, c, g, or t
  misc_feature (282)..(282): n is a, c, g, or t
cattaaaaaaatgatatatanctgttcaataaganctgatgttattcagtgaaataaatttaatntatatctcattaatatactcnccncattcctcagcncaatgctaggcgcgcgcgngngcgngcacnnnnnnnnnnnnnnnnnnnnnnnnnnnnnnnnnnnnnnnnnnnttccatttcttttcttcaaatccatcctcattggtcccactacacatagaatttggtgcccctgaattctcaattcaacactagaaaatgagtactcntccaatatcanttaacttttcttgaggaacaagatagttttttatggttaaatctcatagcattcttttactgttgatcaaaccgtaagaattatatgcatctggaaaaaaatcagtaagtggaacaaatatatagcagtaaagaaatgatactcttaagaagtttaatagatattccattgatgtttgttatattgcattctgctctttttattatataattgtacatgtgtgggcacatgtggacaggttgtcaggatttggtgactttttacttacatgatatatgaggaatatccttgcatgatacatgaggaatatccttgcaacttgagttgctt

SEQ ID NO: 327759 - DNA, 490 bp, Homo Sapiens
  misc_feature (291)..(399): n is a, c, g, or t
tgctaatgtaatgagttacactaacggatgttcccattttaaatcatccttgcatttctaagattaaacactacctggtcctggcacatgatgctaactgaccaccaatatctggtctctcttcctttcttgataataaaaccctgatttttaacttcataaggctccacagcagcaggaatggttgtgtgaccaagttctggccaatgagattatacagatgtcatgggaccaagcttctagaaacttaaaaaatatgtatgttttttaggctgggtgcggtggctcatnnnnnnnnnnnnnnnnnnnnnnnnnnnnnnnnnnnnnnnnnnnnnnnnnnnnnnnnnnnnnnnnnnnnnnnnnnnnnnnnnnnnnnnnnnnnnnnnnnnnnnnnnnnnngttagccagatgtggtagtgcgtgcctgtagtcccagctacttgggattagagatgtgagccactgcaccggccaagaaacttctttaaag

SEQ ID NO: 327760 - DNA, 499 bp, Homo Sapiens
gaggcttgcagctctgttttgtttgtggcataaatatatacatacatatatacgcaggtatatatgtatgcaaaaatgcttattgactgtggaaatgacagtttaagtcactctgtatttcttttttccatgagtctaatattgaattacgatgattcaaaggctctcagagtgttgtgctaacatcgtaaatggctaaacatccaaaaaagaaaacaattaaaacacaacgcacacacaattttcttaaagttgtgggaaaattaggtaggcacagttgattgttttgagctggtaggaaaacctgggcagctagcagaggtctggacaaccacggaaagcccacagcaaggaccacaccgtgagcagccaccagagatttgggatggtagacttaccaagagtgtccactggcgggggggcacacggtgagaaagtgcaggatacacaattgacacaaaaaggaaaataataaagtcaaactggtattcaagcagca

SEQ ID NO: 327761 - DNA, 631 bp, Homo Sapiens
ttttcatgtcacatgggtaatgtaccaacgacatgacaagatttaagggaggcacatctcacagacaagcatgaaaacccaatcatcatgcttatgaactaaaaaggaaactggattcttacaatcagaaacaggaatatcaaccaaattgtggtaccctatgagccaggagccacagaccatgcccaccttccactccgcctcttttaactttattatacaaaaatagctgtatccctccccaggatacaggcaagtcactacagccttgagaagccagcaggaagaagaattaaaccagatctccctaagggtgaagtagagctgccttcaaagataggaagttcctgcctctgggagttgtttgtttattatggtacaagaaatcgagcacaattggggtcagaagaacagaagacccttccagcgccaattttctgggaggtggtccaaaggaagtcagtggggccagctctctccctcagacagctaacaggagcaaggcttggtcagccttcctgaagctctgcaagtccaaggcttctgagctatttattctatacttactttgaaaacacaaaattgctccaacaggatggatatgttacggaacaattaggcataataggat

SEQ ID NO: 327762 - DNA, 480 bp, Homo Sapiens
  misc_feature (338)..(415): n is a, c, g, or t
  misc_feature (423)..(423): n is a, c, g, or t
  misc_feature (433)..(433): n is a, c, g, or t
  misc_feature (442)..(442): n is a, c, g, or t
  misc_feature (460)..(460): n is a, c, g, or t
  misc_feature (470)..(470): n is a, c, g, or t
acttgtttatttgcgtctccccactggagtgtaaatttcaagaggacagaagacatgtctgtttgatttgctatcacatcctcagtgtctggctcaggacctagctcagcctggatgctccaaaatgaaacagattttgggtcctgaggcccagatgaaacacctctgcctcagtgctcttatctgttagatgggcagctcatcagggtgacctcctggcaagacgatgctggctgttggcaggaggtctcagttccctaccacatcagcctctccaatatggctgcttgagtgcctcatgacacagcagctgggtttcctctggaagtgagtgaacnnnnnnnnnnnnnnnnnnnnnnnnnnnnnnnnnnnnnnnnnnnnnnnnnnnnnnnnnnnnnnnnnnnnnnnnnnnnnnaggcagangttgaagtgnaccaagatnacaccaatgcaatccagnctgggtgaanagagcgaagg

SEQ ID NO: 327763 - DNA, 418 bp, Homo Sapiens
  misc_feature (294)..(375): n is a, c, g, or t
  misc_feature (401)..(401): n is a, c, g, or t
ggctcggcgtggtattatttttccacctgatttgcaaaccaagagaatgatagcaaatgttggcctcctttcctcctcagcatgaccagtcacccatgtggtaggataatttattgagatattaatgtgttttttgttcttccggaattttacccacccctgttctcagaagatagctgggcctttgtgttccttgcctcagagtgtttttaggatccaggaccaaggggaagtttagacaggtagccaggcttctctcactccttccttggatttttaaaaatgtctaggctnnnnnnnnnnnnnnnnnnnnnnnnnnnnnnnnnnnnnnnnnnnnnnnnnnnnnnnnnnnnnnnnnnnnnnnnnnnnnnnnnnaccatcctggtgaacatggtgaaacnctgtctctactaaaaat

SEQ ID NO: 327764 - DNA, 704 bp, Homo Sapiens
taaatgagcgaatgaaaatgctacataggctccctgagttctttcatgtacgaatcttggttacacatcttagaacagcagagctgcctgagggagggttgtgtttaatgtcgtatgcatgctcagcacagtgctggcatggcccatccatgctttctgttgaactatggacagacttcaggaacttgtgtatggagagggtggaagtcagtcctcgcttctttccctaaacattttgcagtgacagcatatggatctttggttggaaaccccatgacactcttctctacttccccatgggccttccctggtttttgtttttcttttcttaaacaatcctggtaatgacacttccaccacaatgagcttttaaatgtcctttaatgataagccagtgtttccttcagagggcaaaggggagactgctgagtcactgtggccatttttagataaaccttttcctgtttataataacacatgctgattgtaggaaactagaaaatacatgaaagtgcagagaaaagactaaaagtcatctatacttcaggtcgtagaaataaccactctgaacagcacacttctttttacactattgttttacactgttgggattacataaatatatatgtttgtatcccactttgtgaacatcattctatgtgaactagaaatggttcctaaacattaagggctgcatatagctg

SEQ ID NO: 327765 - DNA, 1036 bp, Homo Sapiens
aggaggagaccccacaaaatgtgcctgatgctaagcggactgggatgcagaaggttctctactcaacagccatggaatctatccagggtccagggaaatctggagatgggataatcacagagaacccagacacaatgggaggcattccagctaaaagccataggggagaaaaactacttttatttatgggcattattgacattctgcaatcatataggttaatgaagaagttagaacattcctgggaaagctcttgtttatgatggggacactgtttctgttcatagaccaagcttttatgcagacagatttcttaagttcatgaattccagagttttcaagaaaattcaagctttgaaggcttcaccgtctaagaaacggtgcaattcaatcgccgccctaaaggccacttcacaggagattgtgtcctcaattagccaggaatggaaggatgagaagcgggatttgctgactgaaggacaaagttttagcagccttgatgaagaagccctgggatcccgacacaggccagacctggtccctagcactccatcactgtttgaagctgcttccttggcaaccacaatttcatcttcttccttatacgtcaatgagcactatccacacgacaggcctacactctattcaaacagcaaagggttaccttccagttcaacatttaccttggaagaggggaccatctacttgaccgctgagcccaacactctggaagtgcaggatgacaatgcttctgtgcttgacgtctatttataagtgaaaatggtgatcacctaaggcacatgggatgagacgtgagcacagttatgggcagagaagttttctccgcaccagaattatccacagcaacttggctgagccccactacacacagagaaatcatcaacctgacttaagagttttcaagatgtcaacttcaggctgatcagcagatgggatgtgaaaaatactaccctattctatcatttgctggtgcttgctgaactgtgaagaactgcatgaactatatttaagctgc

SEQ ID NO: 327766 - DNA, 685 bp, Homo Sapiens
  misc_feature (169)..(193): n is a, c, g, or t
ttttcctaagtatgtttgtattcatgtacttttcaagtgtgatgttcaaaaaacaatgcaactttttactaaatttaaagatacttcaggtaatttctcagttttgtacatgatgtattcctgaaggcttttctgaaagtagactctctgaaaattaagcaacaaggtnnnnnnnnnnnnnnnnnnnnnnnnnatgagaaagacagagagacagactattgcctcccggtcactggagcgttctcaatacttcagccatctgtgcatgatgggtacagtaggaattgaattgtgccagttggtaacggcttcagtaagggctgcagagaagatacagaacagaaacgaccaggagcagatcctcacggagccccccggctagtgatgaggatcactgtgccctggacacgcagacacaagcaatcttcgcattgaccttgttctggggctcactctaagctatctctgaagaaaaccattgcctaatctggagctgctactaccagaaataaccatagtcaaggaaaactctacgtccaagtaaactcaagatatcaggaaataagattaaaaaggagtgtggggctgccactgacattttaaaatctcctctttgtattctctattttcagaaaacaatttcaacatcaagcatgaagtttatgatgaatataggaaatagaag

SEQ ID NO: 327767 - DNA, 774 bp, Homo Sapiens
  misc_feature (350)..(350): n is a, c, g, or t
  misc_feature (414)..(414): n is a, c, g, or t
ttagaagtgggacttatttaagatgaacagtaaattctctgagtttgatttgtttcatttttgccacccccacccccaaacctcattgcttgtaagctcagaaagcatgcctatgcatcatttttgaaaggaaaataatgtggatatttaataatgtggatatttaatagtgtggatatttacccataactgtgatacagtaaatgtggcagttttgataatgatgtttggcttttttgttttgtttaatgcctgcaaaattatcctgcctatggctcccagaggcctttcccatgcagcatgttctataattatattactgatctaataaacatctatctcttattgtnaataaactctctttgtggaacagcctcattaatgtgctggaagtaatgtacccgggggtatttnccaacaatttgcattgtaggctgtaaaattagctgccctaacagctctactggtgcaaaaactgccacttcagctccagtgattgagtctcctgtggcgccttgcagatcatgaaggcacacgaagcagagctcacagtaaaggcactttggggcaaccaagtcctatagtgtaaaactatagacaaactcattctaatttaattttggatcagtctctgaataaatgaaccattagtttataaagctgaaactttattttatggaacttatgctaaatgcctagataataaaggcttaactatgtctaagctattttatgtagacaattttctttctttcagttgtaaaaattgcctag

SEQ ID NO: 327768 - DNA, 727 bp, Homo Sapiens
cttgaaatctgagctgttttaatatttctaaataatagctttcctattataccaaaagaatggaagttttagtttgtacaggaagaaaaataattggaactgaattgagcagtaggcgtgagaatgtggcaggaggtaaatggatgctacaagcaaaatgactttccctcccattgcttgagttcctagcaaaataaagtgtgcaaaatgatgccacttgatttttcaggttctcaaattaaggtacatttctcaatggattgatacccagccttctaggggaaaatgttttggttttactaacttgacattaagcaaggtggttttagtaaataaaatagctttgaatgataatattttgttttactacacaatatatttttagtcaatcagaacaagaaacattttagtggtaaagttattgcaactaattttttaatacatgcttactcaaagaatagactattgtgatttctaatcacagtgattcttttctcccaaattaagatttggtttgatttacaggtaaacagtgttgacctcagagctgctagtcatgagcaggcagcagctgcattgaaaaatgctggccaggctgtcacaattgttgcacaatatcgacctgaaggtaataacattcttattgtctatagttattgcttattttagtttttaaaattcttcctctttaatatttaataatgtttaacttccaagctaaacttcc

SEQ ID NO: 327769 - DNA, 907 bp, Homo Sapiens
agcgggtgctgctagcggaggcgccatattggaggggacaaaactccggcgacacgagttgacacaaataaacccctggacccccttgttccctcagctctaagggccgcgatgttgtacctagaagactatctggaaatgattgagcagcttcctatggatctgcgtgaccgcttcacggaaatgcgcgagatggacctgcaggtgcagaatgcaatggatcaactagaacaaagagtcagtgaattctttatgaatgcaaagaaaaataaacctgagtggagggaagagcaaatggcatccatcaaaaaagactactataaagctttgggaagatgcagatgagaaggttcagttgggcaaaccagatatatgactttgccagcacttctaaaagattgaaaacaccaagaagttaggataggattttcactatttctccatattgatgcaattgtggtgctctttttcatttgaaacatcttctcctaaaatatacactttaagaaatagtcatttctgtttttgcattaaagtaaattaaagcagaaaacacatgctcacttttggctaacttcagtgtatagatttcatacttatgttgtctttcctgggtacagatttattactgaacaagtacgtgtaagtaaaatgtcattggtgagcaggacacaagataaaaggtgaacaccacatatggtgtgaattgtaaatgcttataccacaaacttgaaaatgtgtcatgtagagccatggaaaatgtctagttgtttttatgtagtacacacattttaatggtgctaacaacctgggctcttttgttcatagagttattctgaaaaaaatttcataaaagacactgcctaaagataggtagaataggctgtagcttgatttactgtggaat

SEQ ID NO: 327770 - DNA, 387 bp, Homo Sapiens
  misc_feature (321)..(321): n is a, c, g, or t
  misc_feature (363)..(363): n is a, c, g, or t
tgagaaggttcagttggcaaaccagatatatgacttggtagatcgacacttgagaaagctggatcaggaactggctaagtttaaaatggagctggaagtgataatgctggaattacagaaatattagagaggcgatctttggaattagacactccttcacagccagtgaacaatcaccatgcttcatttcacatactccagtgggaaaaaggaaatataatccaacttctcaccatacgacaacagatcatattcctgaaaagaaatttaaatctgaagctcttctatccacccttacgtcagatgcctctaaggaaaatnacactaggttgttcgaaataataattgccacagcctcttctnaacaatggcctacaatgtggaatt

SEQ ID NO: 327771 - DNA, 395 bp, Homo Sapiens
  misc_feature (18)..(18): n is a, c, g, or t
tgccataaaagtaaaatnaaagccagaaaacacagcctcacctttggcctaacttccagtgtaataagatttccatacttaatgttgtccttcccccgggtacagatttattactgaacaagtacgtgtaaagtaaaatgtcattggtgagcaggacacaagataaaaggtgaaacacccacatatggtgtgaattgtaaatgcttataccacaaacttgaaaatgtgtcatgtagagccatggaaaatgtctagttgtttttatgtagtacacacattttaatggtgctaacaacctgggctcttttgttcatagagttattctgaaaaaaatttcataaaagacactgcctaaagataggtagaataggctgtagcttgatttactgtggaat

SEQ ID NO: 327772 - DNA, 641 bp, Homo Sapiens
agcaatttggactccctttgtctcttattgtcctgtgacagttaccatgagtgcattctcccatttttgtttaccagatctgccccaggaactttttaaaagattgatttctttcttttgaaaataaaacaaatatgtgaaacatactgaaaatgctaaaacctacatgagagtattagaaagtaaagaatgtaattctataatcagctacatatggataggcagagagaggggtctgcttcttgtccagctgtagctctgtgctagtggaagcatgtcctgggagttcacgatgtggccaagagaacagatgtagttaggcaatggaggtgggacagagagctgcaaagtgctgcacttgcccctcttactggacccaaaaggctctcaagtgtaacacctttctgtagtgctgtagatcattaatctgggtgtgtgatgaccatctgatctagcacatccagtggcattgtgcatattgggataggaatttgattttgtgaactcaagctattcagcagggcccatgaaaaatcaccagaagggtaggtgggtctttgccactgtctgatgtttcaaagatttcttgtattaaatgctgtgtccaaaattatagaatactctccagtttgtatttatgt

SEQ ID NO: 327773 - DNA, 475 bp, Homo Sapiens
  misc_feature (46)..(101): n is a, c, g, or t
  misc_feature (118)..(127): n is a, c, g, or t
  misc_feature (196)..(196): n is a, c, g, or t
actgcttgtagtggaggttgaggcgggaagatagtttaagcccaannnnnnnnnnnnnnnnnnnnnnnnnnnnnnnnnnnnnnnnnnnnnnnnnnnnnnnncagcaagacactgtctnnnnnnnnnngttatgtatgtgtaatatttttttgtatatattgtatttgccccaaataacaaggtgatgccatacacnaatcgaacacttcccaaaatgacttagcaactatgtcatatatgaagttagagaaaaataatttataaaggaactataacactgttacttccataaactaatctcagtacctctcatgtcacatagcacacaccagttctgtactgtaatttattccacaccctttagaacgttatcatgatcaagagcagaaaggagagccatgacacattctttatctcctcaaggatgtgaggaagaggtggtacaagaataagagtggctgggccaggcattgcg

SEQ ID NO: 327774 - DNA, 708 bp, Homo Sapiens
actcttattgtattttttaattgtcttagagtcctctaaagcaagacatcaagacaaatgctattaaagttttgaatcttgctttttcttgcatgccataccacctctttgatggaaagaaagaaattgctcacattaccccaatttccaacgggcttaggctttaagaagcaacagattctatgtttacaaaaagcccaatatttgggtaaagtctatgtaaatattgaccaagtgcccatccttccttatttccatttcttgccttcccaccaattctcactaaacttggatgacctatttatgtgtccatgtacccccacgggactgagagctgaaggcaaacctaataactgtcaatgaatgatcatggtcctcaatccacttaatacttactaagtggctactatgtacccgacatttgcaagcactagagcttcagcagcgcacaaaaggttttcatgcagctcacattccagtgagcacagaccaaaagcaaatctagcacagggcacgtgctgctatgaggaaatataaagtaggatggagctggtggcaacaaaggcctccatgagcaaagtgagcctctgggaaacgagggctggagaaatgcagacatattggggtttaaatggagagagtttgtaagatcatgttatcagatataaccaactggcccctctttttcactgtcttacactgtcatct

SEQ ID NO: 327775 - DNA, 808 bp, Homo Sapiens
atgagagaggactctcattcattccctagttcctgaatagagagggttttataaagttaaggaggcaagatgaaaaatggggaatgctgggaagaacttcaggctgttgttcagggaatggatatcaccactgtccacgtgagcagcagtaaatgccatgttctcgtggcagtgtttccctgagcatcagcgtggtcaaggctgcctgggaacaggcacactgaactaagagtcaggagccctaggttctggttcagggcttgctactcaccagttatgtcataaagaaaatgggtcacttcactgttccaattttctcttttgtaaaatggggaacactcgataagacacttcctgaggaacgtttctgctccacaggacaggcttattttaagacttaataagcatttactacatatttaccaacgtggtaagggctatacgagagatacatgagaaaaaattaaatccctgatctcaagaagcttacaaccaggaaggtaagtcagccatataaaaccatataagcataagatatacaacacaaaacaatacaaaccataggtagagaataaattaagtgatacatgctgtaactgtgggaattttttttaaaaagtgagttaggtctagggggagaggtaaggttgaagacgtgacacttatatagatgcaggtatgtacttatttgggagaaggtatgtacatgtttgtgtatgtgctctggattaatgtggaggaagacaagagataaagcaaaagggaagaggaagtgcttttcatgatagcgagcaggtggagagctaga

SEQ ID NO: 327776 - DNA, 950 bp, Homo Sapiens
tgggctcaagtgatcctcccacctcagcctccagagtagataagactataggtgtgcattatcatgctggctaatttaaaaaaatatatagagttgggggtcttgctatgttgcctaggctgccaagagggatttctgtccagcacacacaagagctgaactgattgggaggaatgggcaggaggtaggaaggggggaactttcccagaaaaagattgcagcagaaaacagttataatggtgaacacagggagaatttggaagaataatttaccatgggagaaggagaagggaaagagtcagaggggagccaccaagcaaccatctccaccaaactcagccttgtggctcagacctgcatttaagagtcggcagggttgccatcgtctagaacctagtcctccctcctctccattcttctcatatttccatccatccaaatctttcttgctgagatcaacataaatgcccacgctgtggctcctccactcagcccttcagagtcatgtacccctgcagctttagtgagggcctccactcagtgttcatgaaaccctactctgtatttgagaaagatttgtgggagttttcctacttatttttttctccaactagataataaactccttgaaaagcgaagatgtacagacttttgaaatatgtttcaattttgacttcaatactgactaccatatttcattgaatctaagctaatataagatacattattttatataccactaaaaacagaaaaatacttccacttgattgtaagacactgccaattgtaaaaagcatcctgatttcagagatctgagaatgtgaaaagggagcatagaagaactgatggaaggtatgtggtcttagacatgtggtaagcctctctgaacttcagactcgccattcatgaaatgaaaaccatactttttctcgtgccgctcgtgccgaatt

SEQ ID NO: 327777 - DNA, 789 bp, Homo Sapiens
  misc_feature (467)..(467): n is a, c, g, or t
  misc_feature (470)..(470): n is a, c, g, or t
  misc_feature (476)..(476): n is a, c, g, or t
  misc_feature (540)..(540): n is a, c, g, or t
  misc_feature (544)..(544): n is a, c, g, or t
tataaatggtacagaattttatttttaacaaataagtagccagatgtatgactcctaggggggtagaagtggccctctctggaaattcataacatccaggatggatacgatgggattggatatggatatcctgttctggggcgctggagttcaagaaatgtgtttcttgtggttacagattattctgggagtactagatcctcaaataatctatttcctcagatgctccaagtcagaaagcccctttcctccattctggcttctacaaaagaagctcctcctagtgggcaaccctcccccttggctttccatgggtaatgcctttcagaagacacgtccttttttgaccttctcccttcaaccaggaccagccttgggaatgagatctccgagttccattgaaaccctgggctagttcagtactaagggcatgttgtggttgactgagtataagaaatccagatatnccnctgctnttatattcctcttgatccctattccagcaagggcaagagaaaaatgtatgacctttttcctcanctgntaattttgattgtcactgaggccaacctcagattaaaggcacatacgacctacacaagtgttcaatcttgttacatgctatcaggtagacacaatacctaaatgattgactaaaataaaaacaacttttattatgttgttttagagacttagccccacatatatgttatacattaattcccttgcatttgtatagaaccttgtacattaagaaaaatgcttctgctttaatgattctcatacact

SEQ ID NO: 327778 - DNA, 750 bp, Homo Sapiens
aaatggaaacatatttttttaaatgtatgaactgaaaaatactctcccaaaatctcttcaccattctactgagttgaagagggtaagcttactgattaaatgacagtgactctgaagaggaggcatggctgcggtcaggatgaaatgaacaaacagtcaaccttgcaactctctttcccatataatctggaagttgatgtctgcaacctggtctgatttgcccagtctctctgatacgcctctccacacagagcccatacctcacatttcttcaggcattccgggctatctgatggcaaacactgccttattgataaagacattttcctaagaaaataaatctgtgcatttaggtggaaagatttgttcctctctgttattcaagtgaagaaaatggtacctgctgccatgtggtgacaatggctagctcagtgttgctaaacattttattccttttaaatatctatacatgtgaaggaaaggaattttagcgaggaatgctgcttacttacaagaatacaacaccaagcagtgaatcgaatcaggatgtctttggtccgagccttgtaatacaatagtatttttcctgcctggaggagataacacagtgtgaccaaaagaatcgccaaagggatatttttatttcatattaatccactgtcttaactacctgacaaagagattcacttgctgggcacgctactaggtgctgggattacagggaggcgggaaacatcaccgctgtgccga

SEQ ID NO: 327779 - DNA, 782 bp, Homo Sapiens
  misc_feature (45)..(186): n is a, c, g, or t
  misc_feature (188)..(203): n is a, c, g, or t
  misc_feature (366)..(366): n is a, c, g, or t
  misc_feature (646)..(656): n is a, c, g, or t
cagcctcaacttcctgagctcaaacgatctttctaccttagcctnnnnnnnnnnnnnnnnnnnnnnnnnnnnnnnnnnnnnnnnnnnnnnnnnnnnnnnnnnnnnnnnnnnnnnnnnnnnnnnnnnnnnnnnnnnnnnnnnnnnnnnnnnnnnnnnnnnnnnnnnnnnnnnnnnnnnnnnnnnnnntnnnnnnnnnnnnnnnnacccaaagtgctgggaatagatacatcttaatcttcaaaccacctaattcccctcctataccatctctaatttatatgaatacttagcacatactctgccagtaagaaaaagtaaaattccaccctacaccaatttccccccaaatgttgccatttggctttncatcccacgctttccagaaaggcagacatgcatctgcaaaaaatgttagaagctgtccaaaatcagaatgtgttcctagcaaataataagactaaaagctaaaggctaaaagctatgagtattgaaaagataaccttgtttcaagacagacagcagtctgaacagacatatctacttacatttctgcctataatcccttttaaatcactattattagtggcaggtggtattgctactattgttaccattaagtgagtaagaaatccttaactcggctggnnnnnnnnnnngaacactatctgctatccgcagttcagaaatcgaggaattcttataagattaaaaagttaatgagacatagtgactgagaagtctgagaaaacctagcatagatatgcccagtagaggtctctatg

SEQ ID NO: 327780 - DNA, 349 bp, Homo Sapiens
  misc_feature (94)..(94): n is a, c, g, or t
  misc_feature (228)..(279): n is a, c, g, or t
  misc_feature (305)..(305): n is a, c, g, or t
ttaaaatgtatcctattccccagcacctttgggtggtggggatggggggatccaccttgagcccccggagtttgagacctaccccgggcaacanagtgagaccttccctctcctataaaaaaatacaacaacaaaataattagctggacatggtggcgtgaacctgtggtcccaactacttgggaggccgaggtggaaggctaaggtagaaagatcgtttgagctcannnnnnnnnnnnnnnnnnnnnnnnnnnnnnnnnnnnnnnnnnnnnnnnnnnnggacagagtgaaccctgtcttcaaanaaatacataaataaaattacaaaggggtggagacaagggtaagg

SEQ ID NO: 327781 - DNA, 892 bp, Homo Sapiens
  misc_feature (143)..(267): n is a, c, g, or t
  misc_feature (571)..(571): n is a, c, g, or t
gttcattaagtcaacaattatgattttgtatgagtaagggcaaatcatcaccaaaaatgctttaagtttttcttcagatttttctctgttgaaccacatgtatatttacatttttaaaaaacatgaaaattataatgcatcannnnnnnnnnnnnnnnnnnnnnnnnnnnnnnnnnnnnnnnnnnnnnnnnnnnnnnnnnnnnnnnnnnnnnnnnnnnnnnnnnnnnnnnnnnnnnnnnnnnnnnnnnnnnnnnnnnnnnnnnnnnnaaacaattttttttaaaaggtaactggcacattattttaaaagggtatttcaaaactaaatactgatggcattctgggaaatggaaaggttagtaattaagatgtttaggttatcccttgaagatggttaaagagaagttttacaaaagctgccactcataatgatgaaaatgaaaaacaatctggcaagcagttctatttcctttactctctaagactcatgtttttaacagtaggatactactaaaaatattccattcctggacaaaatcttgggctgtaaaaggtgataattaacttaagnaaggacattacaaaactacaacatgcttagagaaaaataacccacattataaagaacaaactaagcaaacccaaagactggggaacttccactgtcggcctgaagaacacaagtgaaggaaagcacactagacccggaattcaaatactaaaaaaaactatcttaagttagattagattttagccatcagattcagagatgaccaagataacaaatacatttaaaggttgagaaactgagaacaagatggaatctggaatacaggatcctctcttcctgattaaagcaatatattggtgatacaatggcacaacattacaa

SEQ ID NO: 327782 - DNA, 809 bp, Homo Sapiens
gtgttatttaataggcccaaataaaaataattgatgtgtttactacattaatttatatataattattttacatttctaagcagccatcctggttcagtgaaagagcagtggagtttgaatcagaagattttgattctaatcctagctgtgccaatagctgtgggaatttggccaggcactaagttctttgagcttaaggttcttcaattttaaaaagggatgataatatataatcctacttacatgaaagggcatttacaaattatacaaattaatattaaatcacaaatgccagtgttttgttgttgttttagaaggaaaatttaacatcaattcttcaacatacagtataagaatcctgccaagaaaccattctcaaaattgactctgatgtctgatttctttgtcatattgagcagattgctataaaaattcacttaaatcatttttactaacaatgaaacattattagttatcctctacatattctttacagaaattaattgagaagatttgtaaaagactgtgtacttgcctgagatgtccaaaaggccactgatggcattgtaactcatgattcctgcatggggctttccgggttgccatgttatgagctgaagcaaaggtaggccaacaaatcccacttctcccacctgatggagatctaggactccgatgagcagcagtgagttcaatattaggatcatcattagttaggacatcagagcaattaaacccagggctacttccaacaattaatgagctcttaatttgtacatttttactggaaattttgtgtgatatagcag

SEQ ID NO: 327783 - DNA, 629 bp, Homo Sapiens
ggggaacaaaactatactgttttgtttaatgtacttttcagtggattcgcaggtatcttttaaaaaaagaaaagagtaaaagttaattattcaagtgctactaaggttagcaaagaaaccatttggcattaattatggtgtgattagggaaatctctaagcaagatggcctgtcaaaatccattttcctgttgagggaagtgacctgggtttaaacacagcctgagaagaggcccccaaacactgcttttctctctttctgcttagtcataggaggaagcaaaaattcaacaacaacaacaaaatgaacgtgagccaacgttacccttgggtgtttgctctcccttgatgactctttgggaggagtgagattatgcacagatcaagatttaaaagtcactgctttagagtgctttatgaacaaacaagctctgttcaggacagggttcactgcctagttagactagacagtccagccccatacagctctcaggttggcaaagtgcctggtgcctgaagcggccctcggtgctcaggaatttcagacacagtggcacatgtcatacctggatgagactatggctgtgctcaagtctcagatactttccacctaaacaggatgtaggtttt

SEQ ID NO: 327784 - DNA, 545 bp, Homo Sapiens
  misc_feature (169)..(219): n is a, c, g, or t
  misc_feature (265)..(285): n is a, c, g, or t
  misc_feature (289)..(384): n is a, c, g, or t
gctcaagcaattatcgtggttcagcctctcgagtagctgggattacaggcctgaaccaccacacccagccactatgaacattctttactaataaataaacactatcttgcattacagctacaaaaattattttttgttcttgtttttgagacggggtctccagccactnnnnnnnnnnnnnnnnnnnnnnnnnnnnnnnnnnnnnnnnnnnnnnnnnnntggggtcagcttcctgagtagctgggaccacccaaacccagctaannnnnnnnnnnnnnnnnnnnnggannnnnnnnnnnnnnnnnnnnnnnnnnnnnnnnnnnnnnnnnnnnnnnnnnnnnnnnnnnnnnnnnnnnnnnnnnnnnnnnnnnnnnnnnnnnnnnnatgagccactgttcctggccttacaaaaattattttgtaggttgtattttagctagcctatcacaattcttccaagtttttaaatggtttctgttgcttataaaatattatttattgatagccaacaaattctaatttgggtattgctaggctatcagtga

SEQ ID NO: 327785 - DNA, 394 bp, Homo Sapiens
aacagaaggatgagcctttaattttatccctgaaatgtctgaaataagaaaaaagcctaggtgtcaatattcctaaagactgacctttgcattttcctgacatgttgatgaagtattcattctgccgcttccatttagtagtaatttatctcccatcccaaagttcctgagtacaaagactatatacgaactaaatttcatttggaaaactacaaactcaaaggtgagctgataaaaagaaacatatatttatttttgcaattattttctattttatctaattgtcaaattctttaatacctccataaactagacagtatagatcctttctaattaacatcacctattaaaactgaactctcagtaagttaagagaatatttttactagctctc

SEQ ID NO: 327786 - DNA, 634 bp, Homo Sapiens
caaaggcagtcacaggagggctgtcaccaagtcccacaaaacccaaacctcacaggacgtagaaccaattgtttaaaaagtaaagccaaggtcagtaaaaggacagagtgaccaggcagggaaagatgaaaagttcacagagaaaagggaactgaggaaaactctgacaaattaagacgcgtggaagaaactggagaatgaatcacattttacaccatttcaagcaacacccaaaaaagagacatatataaaaatataaaatatagaactaatttgcaccaccaaatttaccaaaaaaaggtcaagaaatgcagatagagttggataatacacacatatgccagcaaggggcgcctcaacaccgtttaaacacatcgaatgttttctttggagctgttactttcctttgccttttttctgggggtaatcttatctaataatattttcaatatgtttttattggcagatttcaatctgaatatgaaactatcaggaagttaaatgaaccatgagcttttgttcaacaccacattgccttattagagccctatgtgagatatcaggataacgaaatggtgtctgggttttactttcctggcatcattttttaattttgcattcctttgtatcttaa

SEQ ID NO: 327787 - DNA, 686 bp, Homo Sapiens
  misc_feature (102)..(273): n is a, c, g, or t
tgacccttttctttaagtgtaaaatggtgatcaaaagcagacctattttttcatgtctgatgggggatgggatacagacatcaaataatcccatgtacaatnnnnnnnnnnnnnnnnnnnnnnnnnnnnnnnnnnnnnnnnnnnnnnnnnnnnnnnnnnnnnnnnnnnnnnnnnnnnnnnnnnnnnnnnnnnnnnnnnnnnnnnnnnnnnnnnnnnnnnnnnnnnnnnnnnnnnnnnnnnnnnnnnnnnnnnnnnnnnnnnnnnnnnnnnnnnccaggcaggctgacaccagggtctacgtttgaaccacccactcgactgccttcatgcagtactctatggcatgaatacatttacaaatataagtgccatgaagggaagacaggtggtgctataagaacatataacaagggcatcccacctgtagcaggggacatctagaggttgagtgggtgtcatctaagcaaaaagagggaggaagacagaggtggacacaaaactggtcacagctgaagggtaagtatggaaccattagccacctggatgcaggaattcattgatggactggggagagcagtatgtgtgggaagctatcagggaaggtctcagggaagaggcaaatctggagaaggcaaagtttgaaccctctaaacggtttagagaggagtgatatagtttggatattt

SEQ ID NO: 327788 - DNA, 776 bp, Homo Sapiens
  misc_feature (175)..(175): n is a, c, g, or t
ttttttaaattttaaactatattttaatataattggtttcctatgtatttcattttgtgcatttcatttaaaaacattcctcctaagctttataggtttcaccagactaccaagggctcatgagcataagaggttaagaactccctgacctaaagcatattagctagctcatagncaggattggttacataattttcaagatccaagcaaaatggaaaggtgaggcctcttgttaaaagaactgtaagaattgcaagatggcaacagcagagcattaaaccaagcacagggccgtgctgaacctggggtcctgtgtgatggcacaggttgcatagctatgaagctggccctggctcacagaatttccagaaaggtccaggggccaggctcaggggctacgaagccaggaacaatatgcaaaattgtgctggagaactggcctggtgaaaatcccagtgcctgctcctgctgggtgcagatactgaagcttgtcctcatgccacactgacagtagatgctggaaaccacccttgaatctgctgcccactgatgccatcagcaagctggatggagttgttcccattgcgagtgacttctgctttgatgtatcactagtttccaatttaaagtcttgattatgtgcatttgattggtggtgcctagctcatggtcagccctccagtgtcaaggggctaagccatccagcagctcctcaggaggtcaggaacacaggggacactgcctgatgagacagaggagcagttgctgcgcccaga

SEQ ID NO: 327789 - DNA, 390 bp, Homo Sapiens
aaaagtacatactattttattcatacatacaaaatttagaaaatgaaaactaacgtgtggtaacagcatggaagtggtctcctggggttggggaccagtagggaccagcaggaaggattaccaaggggcttcagaaaatttttatggataatggatacatacgttcatcacgttcatggtctcatgcgtgcacacatacatcaaagcttagcagactgtacatgttacatacatatagtttattgtgcatctgttatacttcaataaaactttttttaataggcattaaaaataagctgggtggtttggcttctctgagctgagctttgttggtcagctggcagctggctggtctaggatggcctcagctgagatgacttaattctgttc

SEQ ID NO: 327790 - DNA, 457 bp, Homo Sapiens
  misc_feature (96)..(96): n is a, c, g, or t
tagcagaataatcttaaccacaggagcaaaagacttgtacaatgaagactacaagacactgctgaaagaacttacagatgcccagtaaatggaaangatacttcatattccatggatggggaagacaatattgtaaagatgcccaatactaccccaatgcagtcctacagattccagtgcaatcctatatcaagatcacaatattttttgaagaaacagaaaaatcccaacctaaactttatgtggggccagacacggtggctcacacctgtaatcccagccctttgggaggccatctgcaccacaggataagctatcctaagagacaggaagagaaaagaaagcagatctagaaggagtgattcttcaccatgtgtgtgcctttgtgggatccccatttgctcatgacctagcagaaaaatcagacgcttcttctggggttatcacatcaccataa

SEQ ID NO: 327791 - DNA, 452 bp, Homo Sapiens
gagactgcatagggctcggcgtggtgggttctgaagccggcaccgcagagccacccggtgaggttccagccaccagcgaggagggcactaggtcaccgacactgggctggggctcgtctaatcttaggttgtgagtctctttgagaagggtacagaggtgaacgcactccagaggggagggagggagaccctgaccgccaaggtgacacacaccagggagggaaatggatggtgcctgtcaaggtgacacacaccagggcgtggaggggggctctgccgctgactgacggtgacctcagacatgtggccccgtagacaccagcctcctgggtgttgggactggcgctagacctgggaatcactcagcaccggcccggcacacagcagatgctccgtgaactcagcctcgctcccagggacacgccccccacacccacggtgcttgcctgagc

SEQ ID NO: 327792 - DNA, 402 bp, Homo Sapiens
  misc_feature (75)..(75): n is a, c, g, or t
  misc_feature (117)..(117): n is a, c, g, or t
  misc_feature (172)..(172): n is a, c, g, or t
  misc_feature (185)..(185): n is a, c, g, or t
tgggctccagcagtcctcttgcctcaggctctcaaagtgatgggattataggcgtacacaagcgcccagccaggncatatcatttacgctctgtcgaaggaagaggaaaaatttttncattatctggggtgaaagtaaggagggcattaaagcctgaagtgcaattttgccnatttttttccttntcctatgtattttgtttttgttgttctcattgttactttagtgcctgttggaaggtggccttgtcctccccttctgcttgcatgatggcccctgttcttatcagctggccatggctgtttcccttgtgtggccttctgtgcatgcaggcaaggagaagggaacactagcaggccttctgaagctgctcatggcagaggcctcaacttagtagtccaa

SEQ ID NO: 327793 - DNA, 959 bp, Homo Sapiens
aatgggtggtgaaggagtggatttattggagcacaaggcagtgaagcagcaaaagtgaaagtacattccacagggtgggagtgggctagagcaagtggctcaagagccctggtagcaaaatcttctggggcttaagtaccctgtagaggtttcttgatggttacaccctatgtaaatgaaagactgactcacagccaattagagactgaggtgaattggctcacagccaatccaagactggtgtggtttgactccttatgcaaatgaatgtcctggaatgaaccagtcattggccagagtgcaggtctggcccatggccattcagaggctgatgtggtttgataccttatgcaaatgaaggtcctggaatggaccaatcacaggccagtgttcagactcttcagtgccagggagtgtgtccaagtcatccttagatccctatctctgtaccctattctcctgcctcagtcttgtgtgagattttgcaccctttgaccatcatcatcatctccccattcccccaatctctccctcaactacttctaaccactattcattaatctcttgtattatttaggtgtaaggaagaacagaaggatccaagtgtgagaaagcccaccctgagtctctcagaggtgattatgaactgtgtgaagcatgggtgaagacaaatcctctgttgttgttggatggcctacttgaagtgccttccctcccattctttcccattgtagaatacttagggagggagagaatattatgacaagttattgatgttgggtgatctctttcactgaaagtttcaggacagcgaaatactatttccattttctgtatgcctcttgcatgcagcctatcacgtcctgtaaggaaaaagaggaattttttcttttcatccaaggttagtttgtggaaagccttccaaaacaactgtatagtaggatgtgatttttggtatc

SEQ ID NO: 327794 - DNA, 471 bp, Homo Sapiens
tgttttcagggtttttaagtgatttcttcctttttgtagccattttgatgatttttggttatttccaattgcaaatgtttgatttaaattgaactcacaattgcctactaacagtaagatttttaaatacaagatctttattatttcactttacttgacaacatggaatcagagggctttttggtcccatcaaacctttgggataagttacaatttgaggggattttctaactataaaacaaggggctttcaacaatcccttccaaagttgaggcaaaattaaccttactcttcaaatgactagggcatttaatgctctccaattttagaaaggattactatcaaagactggaaatgtcccttttctaccagactttcaaggctcttagagtcactgttcattcagtccagtctccttaaccatccaggtctatttcttaagttcctgtaatcatgtgatgcctgagacca

SEQ ID NO: 327795 - DNA, 564 bp, Homo Sapiens
  misc_feature (37)..(37): n is a, c, g, or t
  misc_feature (76)..(76): n is a, c, g, or t
  misc_feature (88)..(88): n is a, c, g, or t
  misc_feature (97)..(97): n is a, c, g, or t
  misc_feature (227)..(296): n is a, c, g, or t
  misc_feature (318)..(410): n is a, c, g, or t
aaaaggctaactgaaaaagggggtgggaagggaccgnaaccccttctgggaaggcccccaggggaaaaaccaattnctggcttttttnaaggtcccnaagagcctgcctgcaatccccctggctcaatgaccggtcttcccggtattcaaaagccgggtgatgggctgggttaaagtctttcaagtcattgcatcactctgcctctgactcaagccacctcactatnnnnnnnnnnnnnnnnnnnnnnnnnnnnnnnnnnnnnnnnnnnnnnnnnnnnnnnnnnnnnnnnnnnnnntaaggtcagcccattagcaacnnnnnnnnnnnnnnnnnnnnnnnnnnnnnnnnnnnnnnnnnnnnnnnnnnnnnnnnnnnnnnnnnnnnnnnnnnnnnnnnnnnnnnnnnnnnngaatgtcttttaaattctctcattctggaaccagtccttacagcagagagagggcgaggttcctaaggagttttgtaatggggcccttgagatttcagcaccccagcattttaattttttcctgagcaattaatacttaaaattttaaagtttt

SEQ ID NO: 327796 - DNA, 690 bp, Homo Sapiens
  misc_feature (351)..(351): n is a, c, g, or t
tatactctgtgatgtttgcacaatgaagcagttgcctaatgacacatttctcagaatgaatcctgttgtcaagtgacacatgactttatttgataatgaatacaagaccatttcatcttgatcccagatagatacattgagatgcattgatgttctctaagtgaacgtgactcatcctgttctttattagttattgactgtttccgtagtcacctctactttttgatcgttcaccaggttttgaaatcactgtgtaggcagcacccactatgcagttcaaaactttatgtaggcctgttttgtactggggctccgggttcagtgctgggcaaataaacaagttccttgttnctcacagaatgtgtatggccttgggtgccaggcaccgttccatgccttaacctacattcgtctcataatacgtttttgcatgcaatcttttcttcaattctgtggtatgctgcaggtgaagaaactgaggcatagatcacgtagcttgtaagtgatggaacagtggcctaaatccaacatgtgcaactttagaacccatgtatttttcctctgtcccatgccctgtctgatgtaagcaggcttctaagttgcaaataccaggtggtgtggtgtgctttgaagctatttattcaacatgtgtttatcaagaagtgtctgtccaggcgcagtagctcatac

SEQ ID NO: 327797 - DNA, 423 bp, Homo Sapiens
caaatattcccagacattgataagattccagttctattataggtttttaccccaaaggaaagaaaatatatgtccatatatatattagactgttttcatactgctataaataactacctgagactgggtaatttatgaggaaaataggtttcattgactcacagtgaaggaagacacatcttcccatggcagagcaggagagagagcgagtgagcaggggggagagtaccacacactcttaaaccaccggatctcataactcactatgatgagaacagcatgggggacatccatcctcatgatgtaatcacctcccaccagggtccctcccccaacactgggaattacaattcaacatgaaatttgggcgaggacagagccaaaccatataaccatacaaagacttgtgcatgtatgctcaca

SEQ ID NO: 327798 - DNA, 466 bp, Homo Sapiens
  misc_feature (400)..(400): n is a, c, g, or t
  misc_feature (423)..(423): n is a, c, g, or t
ggtctgctttgttcttaaatgtatcccatttggcacgtaatagacatcaaaaaatatttactggctaaaaggatgaatgaatatcatcaatgctccaaaaaagggtacttgattaatgaagcgttgtaagagagagcaaccagcttggggtagggggcagagcgcctagctctcctcgtggcaggtaacactagtggggttttcaaggaaggacagaaaacatctcctaagaaaaggaaggacattctacacatcagctggcctgtaattaaaagtgtcagtgtcatgaaagatgaaggaagaatgaagaatgcttctagaatgaaggagactggaaagatatgacagctgggtatgagtgatcctgaaccggatccttttgctataaaggacggttacntgggataactggagaaaactganagggattttatcagtgaaggtttataggagttcttattttaga

SEQ ID NO: 327799 - DNA, 800 bp, Homo Sapiens
catctctagactatttttaatttgagtttgcatattgcatatacctcataactgtatttgatttctgaatttcacttttatttcaatcgtattattttcttacgggaaaaaaatttcaataatttcttacagccaactaagttaaaagtaaacctttctggctagttttcaatgctctctaaataacaggcttactccaagcagatatgccatatggtttggctgtgacccacccaaatctcattttgaattgaagtttctataatccccctatgtgtcgtgggagggacctagtgggaggtaattaaatcatggggacagttaactccatgctgcggttctcttgatagtgagttctcacaagagcttatggttttataaggggctttcccctcttttgctcggcacttctccttcctggcatcatgtgaataaggatgtgcttgcttccccttttgccatgattgtaagtttcctgaggcctcctcagccatatgaaactgtgaatcaattaaacttctttcctttataaattactccatctcaggcaagtacttttatagcagcatgagaacagactaatacagtaaattggcactggtagagtggggtgctgatattaagatacccaaaaatgtgggagtgactttggatctgggtaacaggcagagtaggaacagtttcgagggctcaggcttccgggagagagctcgcccacctggaggacagcgaccaggcacggaagttcctgttcctggctgacgtgctgcagtggcgtgcccacaccactcctgaccacg

SEQ ID NO: 327800 - DNA, 795 bp, Homo Sapiens
  misc_feature (610)..(627): n is a, c, g, or t
ttagaatacaattgatttatgctgtcagatattcagcagtcaattttgagaaaaataaggaactttattaaaattcaaaaagaaattaacatatgttggattaaatggaaaacattttacttgattataattcttaattgtgctgaaaagaaagttccaacagaattatacaacaccatctcctgtgtgaaaatcaagccatggaaatgaactccaccctacaggaaaaaatcatcccacccttcttttcctgctttctctttttctttctctatttcctttcatcggttgctaggctccactgtgactgttatcaatgaagtaattatatgcttgtttctaaaaacaggagtagggagcagccccaggagcatggctgtcacagagctcgtgtctaggctccccaggacaggccagggtgcagtaggcacccttcacaacctgccagccatggcggctagaaaggctctcatatgcaaaggatgctaagcatgttacccctaactctgttaatgcagaaagtctgcaaaagcctgaaatggatggaaataattttcttaccgtactattttgtgaagagtcaccgaagttcagacaggacagacatggnnnnnnnnnnnnnnnnnntcaaatgattttggtcttattaggttactgcaacctcacacctgtattaaaatttcagtaacaggactacaacgttaacagtgtacattcttttattatttttaaaagatcaagtaatattatttctaataagaactttgacttcatggaattagatcttagttttgg

SEQ ID NO: 327801 - DNA, 910 bp, Homo Sapiens
  misc_feature (756)..(756): n is a, c, g, or t
  misc_feature (817)..(817): n is a, c, g, or t
  misc_feature (881)..(881): n is a, c, g, or t
  misc_feature (895)..(895): n is a, c, g, or t
tcctaccagtatatatacctaacagctatcaacacagagcttgcttggctcatattaaaccttcattaaatgaatgaatgtggattatgcaattgttgtagtaaattactctttgaaacaaggtggtgggagatttgttataaggttctagaaagttcaccttggcagggggaactaagggatgggatatctaacttccctttataatatctcttttctcaggctgtgtactctgtaggcaatctcaatttcttacataattttgtgagtttataaaataaattattttttgcttaagccatcttgggatagttttctgtcacttgtagtaaaagttattgagtaacaatgctccttgcttgtattttgttccacttactccaggtatcttccttgtggtgttttcccttcgaattcattatccataaacatctttataaaacataggcggttcctgatggtaaccctttattggctttcagcaccttcaggacgaagtctgggttttttatcacaggcctttagaagtctgcctgatcatgatgtgacccatgcccacctctttattctcccttccattattcttccatgatatgggacttcttatagctcccctgctgccacttagatattgttcagaaggtgctgttgagctgtaagatacattacattgaatattgcctttgtgttgcccattccctttgttagtattaaatataataggaaagataaaacgcaagttttaaaaactcaganaatgagtaaatgataaacaacagctgaggattttaaaaattcaacagatgtctgtagggancaaagagggctctacttgaattaaagtggggtgagtacagcttacaaatgttctatgtcatttnccttagtttttagntattttcacattttt

SEQ ID NO: 327802 - DNA, 598 bp, Homo Sapiens
  misc_feature (287)..(287): n is a, c, g, or t
ataaagagattttaataaaggagttatttgcattaattgtagacagacttaaggagcaaacaaggtggcagggcacccaaaggatagcaatggtgagaatataatactacccctagggataaacagtcaaggaaaaggagcagtgtttccttaggagccctgcatcagaagaggtacagaggagaacagggcgaagggagttatatcctgaaaggacatgatcacggccagcgcacagggccgaagtagggcatgaagaagaaataccctgacttctttctcttccntgccctcccaatatcctgctaaagccttccataggccccaccccaagacaaacacagagagcagagagtcccagtcatgcaaatgacaagggtcagcttcccagagcacacggaagacatggaatagtgttgagtgcatgggggcatggcaaatggagaacaatttgcacagtctgagctagactgtagccttctggaggatggcaatttctgagataccccacatttggagtaagagaacagccgcagacctcactctatgtgccagctttgagcaactttgcttagttagaagctatttccttaccttt

SEQ ID NO: 327803 - DNA, 793 bp, Homo Sapiens
  misc_feature (13)..(13): n is a, c, g, or t
  misc_feature (151)..(398): n is a, c, g, or t
  misc_feature (470)..(661): n is a, c, g, or t
attcggcacaggnagctagcaccatgagcttcaataccctatacgtttctgtccgataaaatcttgctgtaagggacgcaactctcttcaaaacaaaatatatgatctgtcattacagaatttcccccctgccaccctgagacaaaatctnnnnnnnnnnnnnnnnnnnnnnnnnnnnnnnnnnnnnnnnnnnnnnnnnnnnnnnnnnnnnnnnnnnnnnnnnnnnnnnnnnnnnnnnnnnnnnnnnnnnnnnnnnnnnnnnnnnnnnnnnnnnnnnnnnnnnnnnnnnnnnnnnnnnnnnnnnnnnnnnnnnnnnnnnnnnnnnnnnnnnnnnnnnnnnnnnnnnnnnnnnnnnnnnnnnnnnnnnnnnnnnnnnnnnnnnnnnnnnnnnnnnnnnnatgagccaccatgcccgacccgatagaaataaattaagatataagatctcaaaaatgcagctaagttactannnnnnnnnnnnnnnnnnnnnnnnnnnnnnnnnnnnnnnnnnnnnnnnnnnnnnnnnnnnnnnnnnnnnnnnnnnnnnnnnnnnnnnnnnnnnnnnnnnnnnnnnnnnnnnnnnnnnnnnnnnnnnnnnnnnnnnnnnnnnnnnnnnnnnnnnnnnnnnnnnnnnnnnnnnnnnnnnnnnnnnnnnnnnnnngatttcagtttaggatactcaagctctgttttgtatatagaataataccggaatcaattcagctagcaccaatggctatgtcatcatgacaccaaaaactaagtgaaagatgaggaatttaattaagcggcc

SEQ ID NO: 327804 - DNA, 873 bp, Homo Sapiens
  misc_feature (533)..(533): n is a, c, g, or t
  misc_feature (555)..(555): n is a, c, g, or t
gttgaaattctaataaatccattttatttgtggcaccacaatattatcattaagctctctttttacacagtctgcaatttgtatcagctgccccagtgtgactctgcccttactttaggaacaaccttttgctgggtggcgtcctagaaggtctgggcctgggcagcagccactgggaagcccacctgtgctttcccccatctgggtggggcggcagcagagaccctgagaatcagcggttatgggagctgtgtgttagctgtgtgttattggctttggcttcagcatgtcctgcctaggagtctccagcagctgtggtttccttggactggaggctttttctcctgatgacaatcgtgacaggtccatcaggcagtgccttgatgatgttccaggcttcaaaccgtgtgaggccctgcatggcagtgccacccagctgcaagatttcatctccaggctggactgtctcactttgttctgaggctgctcctttgaaaatcctgttaaatggtgaagaggcttgtctccgtgtnagggagcccttccctccttccncggctgaagcccagccctgccgacatcttctccagtgtcaccgtgcagactgtggcctctgctgtagattctacagaaacatcactggctgcagaggctgaggctgcagagtcagtggaggagttgaggtcgggcatggcctctggagtcagctttcttgtgacaatcacagcttgcctgggctctcgagcttggcggaggatggccaaggcatcatggtgcgtggtccccttgagagacttgccgttgatggaaagaacctcattgcccttctgaatagtcccttcctgggaggccagcccctttcctgtgccgaat

SEQ ID NO: 327805 - DNA, 749 bp, Homo Sapiens
  misc_feature (12)..(12): n is a, c, g, or t
gggactcctggnagtcaaagtcctctttgcactgggggcacgcttgcttccgcagcagcagctccaggtgcagcttcaggtgggtctggaagctctcaaagttggagaacttgaggtcgcattgattgcaaggatactccccattggagatggagttggcgcttgctgagagccgctgccgcttcggggaagacacctccacatcggacgagactgggctctgctcggccttggacttcttgctgtgggccagtggaatgttcttgtggttctccttgatgtgcttggtgagtttcaggatggagccaaagatgggggagttggtgcagtaggggcaggaatagacctccatgaaggactgcgtgggctgcaccaccggagactctagtttggcactgcccacactgcagtgggcctgctggatgtgctcggtgagggaggactcagtaaggaaacccatggaatcactggttgcagaagaaagcattattaccgtcaagaggggttggcgttggggccgcagtgggagacgcggatgtgctcctgcaggctattgatgtcggcgaacatctcggggcagtagttgcagtggaaggcagagatgttgccaaactgcatcacagggtaggcatggttcttgtgcagcttgcgaacgtgctcgttgaggttgtagagggtgggcatggagtccaggcagatctgacatgtgtgctctgctggggcttgtccgcgtggatggtcttcaggtg

SEQ ID NO: 327806 - DNA, 666 bp, Homo Sapiens
  misc_feature (564)..(564): n is a, c, g, or t
ttttttggtttttgaaaaccactgtttattttcatcaacaaacatgggatcatgtgacaatgatacgcccagtgtgatcatcgcaccagggtaatagtcaaacactgggcacttccaaagtccattcagttatcaaactgccttcatgaaacagagcacctagttctggcatatgcatggttttcagagcgcacaaagatctcttaaataaggggccttggctggagcaagccactgaaagggaaataggttgtggggacagtcagttccatcctattgagggcggttgaaaggtctactgctcctaaaatttcttgtccggcaatctatagctgacgattccatatcccatcttttcccagccctaagcctaaaattcccaagcatactcttatttaggcaaaacaatgaaaagtagggcatcatacaccaaggatatgatgttaaagttggtagaaggggagcaggggaatttaatttatccattttgaaaggtgcaagtggccctagggaataagatacaggagaaggaagattagttggggaggggaaggagtcctggtnctgcctagaggcaaatgctgagcgggcagggcgcattctacaataggcaatggtgaaattgagcagtaagatacatttaaagaatggcctcttcaatcaagt

SEQ ID NO: 327807 - DNA, 595 bp, Homo Sapiens
ataatctatttctattagattcgaagtattttggaaaatatttcaagtatatctgaactacttataattcttaaaacagaagtagtcagacaatatttgtatcctaagtgagatatggaaaattactctgtatactaaatgtcaggcaatgaaaatgtaagtttttgtgtagaaaacccattaagaagatgtgtttttctttctgaattagtttatttttccatcacataccaaaatataaaaatcagcctcacatttttcagcaagtttagcttatagccttgataaattcctctgtgcttctgagcagcatccttctgcctctgcttagcagctctgcatttggtggattggctgttgtgagtcattcatccagcactgggccttttaagctgaagattcacccagtgtctaaagttgtccttttcttatagctagctttcaagcatctttcctcctaaataaatatgtgacttgagaaaaaggtaataatgattttgtcagaattctttgaatttatatttactagctacttaaccataaactgctgtccgagattgttaatttcatttatatttattttaattaagcggcc

SEQ ID NO: 327808 - DNA, 707 bp, Homo Sapiens
  misc_feature (353)..(353): n is a, c, g, or t
  misc_feature (585)..(660): n is a, c, g, or t
accatatttcattctgcccaataactccttagccattattatttaaaatggactcagagatcatagcaaatatcccattttcatcaccaaatgaaaaaatttcaaaaatgtaattgaaaatactcacaaaactccacagagaatactcgtgtgaggttttgttaaggcaaaggatatggtgcagcaagagaaagaatgcgtgcccatatgctatgtcagacacaaatccaggcagttttccagactcccattcatacactgatatgattcacttccagatcaagccaccaatatctgagagagaaatgctggcttcaggagagctcaagtcagatgatcccatgcagggattnttatacccttctggggtaacacagttgagccagagtgcctacctaatcacgtatgccaaccagaaaccatcagcagtcaaacttgccctccatattgtcatgggatcttccagatgttaaacaataataataaagctcactgcatttaaatgtcaaaatgagatacctaaagtccctacagacaaaactagagcttttccagtccaattttaaactaattccatctcacacnnnnnnnnnnnnnnnnnnnnnnnnnnnnnnnnnnnnnnnnnnnnnnnnnnnnnnnnnnnnnnnnnnnnnnnnnnnntattatacaagaagagagttcacaaataaatgacagttcattttaag

SEQ ID NO: 327809 - DNA, 741 bp, Homo Sapiens
  misc_feature (402)..(402): n is a, c, g, or t
  misc_feature (443)..(451): n is a, c, g, or t
acttgagggttttctcaatttctctttgtttatgataaagaaaaaccctattactactccctttgtttttggttaaaaactgaaaataactgattttgaaatcaaataaaccagtgtaatataaagccatccatgtgttctgctaatcccttacttaaaacctatcagttgcttttgtgtattaaaggtctcctccacatgcttttgtcttcacttttgcctaactaacagatgtgcgagtgccagaggatcacccagagcctccaacttgctacccactgttttgccaccagagtgaatacctatttccttgtttccctcagggcctgggcagaaaagaactgccttgacttgcagtcatatgtcatcccaacatattccactcaaagcagtacaaagttnccattgtttaagtttttcaaaaggcagagtttgactagaannnnnnnnnatcagttataatactatactattctttttttactcttacggttttttcccaaaataatctacttttaaaaacctataattaattatttcagccagtatctgctgcatatcttattccttgctaaacacttacacgtcttcactgggaaagcttgcagtcttactgagagattaaaaataatcatagtgcaaagagattcacagttaaacgctaaaaaaagtggtaaagacataaatactggagaagcttatagaaagatgacctcagaatgagcaagagtggtcatggaa

SEQ ID NO: 327810 - DNA, 395 bp, Homo Sapiens
  misc_feature (12)..(12): n is a, c, g, or t
  misc_feature (29)..(29): n is a, c, g, or t
  misc_feature (46)..(46): n is a, c, g, or t
  misc_feature (125)..(125): n is a, c, g, or t
gaaacctttggnaacctgactttgaagtnggaaataatgttggggnatgaccataatgaactgccagtccaaggccagttccttttcctgcccaggccctgaggggaaacaagggaaataggtanttcactctggtggcaaaacagtgggtagccaagttggaggctctgggtgatcctctggcactcgcacatctgttagttaggcaaaagtgaagaacaaaagcatgtggaggagacctttaatacacaaaagcaactgataggttttaagtaagggattagcagaacacatggatggctttatattacactggtttatttgatttcaaaatcagttattttcagtttttaaccaaaaacaaagggagtagtaatagggtttttctttatcat

SEQ ID NO: 327811 - DNA, 912 bp, Homo Sapiens
  misc_feature (161)..(193): n is a, c, g, or t
  misc_feature (323)..(401): n is a, c, g, or t
  misc_feature (758)..(758): n is a, c, g, or t
caaatttctagagttttatttcctggccctaggatctttgactatactacttaaatttgtgggggaaccttggggatcaagtgataggtttgcgaaggtgctttggaacttcttgaatgtgctgaacatatttagcaatgtgctttctctgattgttctgnnnnnnnnnnnnnnnnnnnnnnnnnnnnnnnnnagtcttattgttagggccccatcacatgttgctagttctgaaaatgcagtcaatctccttttagggagaactttcagataacgagattttctccctgtttcatataagaagttcctttcctctctcccgnnnnnnnnnnnnnnnnnnnnnnnnnnnnnnnnnnnnnnnnnnnnnnnnnnnnnnnnnnnnnnnnnnnnnnnnnnnnnnngggtaggggtttctggtagaaactggaaaacctgctagacaaattctaaaagctatataatgctagaatttttcttatatatcttgtaatttcctaactttggtcctccttttatctttagtattttagtcccaaccttctagaatggggcttagtaaagctctgaagtctaatacctgtattctaatactgttttcatctgaatatgtgtagttagtatggttcttactgagtatggaacaattagaactgtgatattttctgtgctgtacttttttctggagacgagctggctagcagatgtgaaccactggcattggtgtcttaggggccaccactagcctatgcaccatcacntatgagagctttgctctggtcaggtgatggtgtgaagtgggtgctgggtaattgcttggacaggccctgcaggtgtgggtgcaggtaaggaagatgggaataaagcagccactgagccctataaatgtctcccacatggtactctttatctcaa

SEQ ID NO: 327812 - DNA, 457 bp, Homo Sapiens
  misc_feature (143)..(175): n is a, c, g, or t
  misc_feature (288)..(347): n is a, c, g, or t
  misc_feature (363)..(363): n is a, c, g, or t
  misc_feature (365)..(365): n is a, c, g, or t
  misc_feature (377)..(377): n is a, c, g, or t
  misc_feature (429)..(429): n is a, c, g, or t
tcctgggccctaggatctttgactatactacttaaatttgtgggggaaccttgggggatcaagtgataggtttgcgaaggtgctttggaacttcttgaatgtgctgaacatatttagcaatgtgctttctctgattgttctgnnnnnnnnnnnnnnnnnnnnnnnnnnnnnnnnnagtcttattgttagggccccatcacatgttgctagttctgaaaatgcagtcaatctccttttagggagaactttcagataacgagaattttctccctgtttcatataagaagnnnnnnnnnnnnnnnnnnnnnnnnnnnnnnnnnnnnnnnnnnnnnnnnnnnnnnnnnnnntttacattcctttctntnttcctttccgtncttttttgggtaggggtttctggtagaaactggaaaacctgctagacaaatnctaaaagctaatataaatgctagaattt

SEQ ID NO: 327813 - DNA, 722 bp, Homo Sapiens
ttttttttaggtgcaaactggtttattacgttctttggttaaatattgtttctacatcctttcagagcattaggagaacaaagataatatttgatagaaagactgaaaacacatcctttgcttttcagagaaaagactgaatttacactggtactgttagaaattcttataattaggctagacgtataagaagttagggcttttgctgttgcttgtatgttttgaaaaatacattcccctgggctagccaacatcactgtcctgagacccagaccttcaggagtctcttgataaaggctgctccgcacatgggtcagaaaagtcggggtcagctcatcatgtcgagactgcatgggttcagtgttgccatcactgcgcaacgcctctgcccacatctcttctgaatacagacagattttgggtgaacctgtctctgttcttgacggacaggttctgctccactccttccattaggtttctgaagcactgggcaaggacctcctgcttggggaggggctggctgtttatcaaacttgctctcagttcactgaaatacttctcattgagcaggatgagccccaggagaggcctggatactgaccactggttccgacagtcttcaaagacaatggtgttcatgaggacagacatcatctgctgcaggacatctgggttttgctgcataaaatgtaatagtctctgaccagcctgggtagcctctc

SEQ ID NO: 327814 - DNA, 585 bp, Homo Sapiens
  misc_feature (150)..(290): n is a, c, g, or t
  misc_feature (524)..(524): n is a, c, g, or t
  misc_feature (538)..(538): n is a, c, g, or t
  misc_feature (553)..(553): n is a, c, g, or t
  misc_feature (565)..(565): n is a, c, g, or t
ggtgaaagcaaagttagctttattcgagaaaccagcaacctgcaaaaggcagtgcactagcattcaaagaccacctttctcagttgtgcctctagatccagggattttaaggaaaattaggagaaataatgatcaaaacattcttgtggnnnnnnnnnnnnnnnnnnnnnnnnnnnnnnnnnnnnnnnnnnnnnnnnnnnnnnnnnnnnnnnnnnnnnnnnnnnnnnnnnnnnnnnnnnnnnnnnnnnnnnnnnnnnnnnnnnnnnnnnnnnnnnnnnnnnnnnnnnnnntgcggtggcacacgcctgtagtcccagctactcaggaggcagaggctacagcgaaccaacatcactgcactccagcctgggagacagaccaagactgtctcaaaaaacaaaacaaagaaacattcttgtgaatcatgcacagtctcagatgggcagttagtcattactttcttggtcaatgccttgtgactagactgtgcaggggccatcagcctgttcccaaagctgcgggtnctgtgtgttttatnctgttgaagaaggtncctgtttttttnctcgtgccgaattacttggg

SEQ ID NO: 327815 - DNA, 317 bp, Homo Sapiens
aaaggacttagtccttaacgacatttccacggtagggcgatattgtccagccaagctttcactggggttgcctcggcctgcgagcaggggttcaaaccctcccctcatccctagagctctgttcagggtagggtcttcctgttacttacaggttctagggaggatgcctcactggggacacatcactgagtggagtcaggtcttgccctacccataccttcagaccacacccttccctaagctggccctctacccagtagcccgtcagtgccccagacctccagagaactcagcctcggcttaatccaggattcttt

SEQ ID NO: 327816 - DNA, 533 bp, Homo Sapiens
ttttctgtacaatacacatttattgagcactagatatatgccatgctagatgcaggtgacccagagcatcaaggagcaatagtctggtggcagagacacacacaatgtcactgtgatgtattaaagcagtcagcaagagatgcagctcagggcactgtggggatatccagaggcacagtaccttctgcctgtcagtcagggagggagaggagcacaggctgaaggagactggaagacagcagttggcctctgatagtgggactggagagagatttctaagggccacttcttgttttcagggactaggttgggctagatatggggctcaggatggacaaggcttagagccaggttggagaagatgaaagagcattactagaggagtggggaggcctaggctatgctctttactctgccattgactgcgtgatcttgggcaggccatgtaacctctcagggctgtgcactcccttatttgtaaaactagagggctgggccagcatgttttccaagggttcttctagcattgacgg

SEQ ID NO: 327817 - DNA, 573 bp, Homo Sapiens
  misc_feature (111)..(111): n is a, c, g, or t
tagggtcttatcagacctttcttttctctttgaagacaagttctgtgtgttgctgaggaaggtgtggcacaaatgttattctcttcactttcttcacccaaacttagttgncagttttttctgatgaaggcagaagactctttatattttagaactgactgtttatattctgaaactgactccaaagtcaagcgaataccccctcttcacctacagtatatgtaaggtggtaggtaaatagtataagaatttttatttctgtttcttttcatttatctttattttctaatctcactcttctcaaactgtagtgaagaagccatttttatggccaatccatcatggactgataatttccagaaatgtaataaaaatcactagaaaaattaaaaagcaaactacaagccataattttttgttatcagattcaacagatatacaataactgtcagtttgctgtgaaagtttctagatgcttactatacttctgttgtcactgacgggtaactaccagttcatgggtgagccatggtcgcagaccatgacttggggtagtgttggtttcgaatctgc

SEQ ID NO: 327818 - DNA, 275 bp, Homo Sapiens
aaactggttattcctagcatttaaaaaagctacttctttgtatatttattttgcagcctaacctagaaaaaattttagtgcaggtgcaactaactgccatataaataaatcttaataaagcacccacagaatacccagcttggagcagtgagcactccaagaaaaactagctgcaaaatatacactaaggacaactaaacacagtgactttctgtgtaatctttttatttatatatcacctaaaataattataaaaatacatatcagccaggcgt

SEQ ID NO: 327819 - DNA, 494 bp, Homo Sapiens
catggtagctcttttgacaagctgtagacaagatacttcattgtctctaagtagtgcagtgctggcaaatatttctcacgaacaaggacgctttgaagaggtggaattactgtgcaaggagtactttacctccaaatagcctgcaatttagcagtctgaacaatcttctaatcttttactggcacctgtggatttctattaaactcatttatactattttctgtgatgacagaaaataagttaactatttaaaatgaagtgcacagaaagcaaaaaatgcagatatctatgaaatgttattgatagaacattataatgggcaacttaaaaaatcttaaaaaattttctttcacctttttttgaaagataggaaagtatatggaaatcagttaaacctttaaaccggcaagcctatttgctgggtgacaattaagttctagttaattgatagttcactaataaaagaaggtttggctgggcgtggtggctcacac

SEQ ID NO: 327820 - DNA, 730 bp, Homo Sapiens
  misc_feature (16)..(16): n is a, c, g, or t
  misc_feature (60)..(60): n is a, c, g, or t
  misc_feature (626)..(626): n is a, c, g, or t
aaccatagcaaaatanttaggaagagttttgagtatttattatcttggctcttcatatantgtgtttaattgtaagtttatatgatttagtttttataatggctgtgttttacaactggctctcaaaattctcgaaagtttaacaatgagcttttgggagccagtatgagtttggggtgcagagaaagtggggacagtgttagagatgaaggagactgagtccagatggtgccattgtacagaggtggattctaatctaattcctttttagctcctcttctccaacaagctctgcttctatgtacacacggaagcacctgccctctaaaccgaagagcaagggtacaaatatagtaacaattttgacattcttactagatcaggtcactcttgcagagaaacttttagctctccaatctttagtgaatataatccatgtactcagtgctctgaatatggtagattcttctgtgcaatacagaggatgtaattcctaactgccgaataaaggaagaacctagagataaattttctgtccttctgcaaaagcaaattatcccccatccatgcactcaaagtctcctgtctcttagggtccacatactttcaaaagggccacccagcgngaagcatctaaaccaggggctgtgatgactcctgccctagagaagatgtaggggtgagggtggaggtggaggaagcttctcccctcttcaggatttgtgcaatc

SEQ ID NO: 327821 - DNA, 459 bp, Homo Sapiens
  misc_feature (102)..(102): n is a, c, g, or t
gtcacattctggctcttttatggggtgggaaatctttcagcttcaagaagtcctgtctcgcctacatatggccaagcacctcctgctggcccaggggcaggntgggaggtgggggtgagatgaccttagctgctgggtgcaagtcagggtccttgggagtagaagtgcccagtacaaaggggttctgtgtgtgcagggagccatgaaagaggcatctctgccccactccccctcctagttcataagacaataatcactgaaagggagtggggtgggggtgatctggggtccatgctgtacctggactgcaccatttcttccagtacactccaggtcctggaggtaccagtgcccctcaggaaagagctagaggcacaagaatcacatcccaggcttcatgaggagatggctgaatattggaaggcacgctggcaccggactggcagttgcccctctgtg

SEQ ID NO: 327822 - DNA, 540 bp, Homo Sapiens
  misc_feature (316)..(316): n is a, c, g, or t
tattcataggtgctatcccactactgatcagcaagggagttttgacctgctccatttctgacctgggtcacttcatccctccttaggcaacctggtggtcccccactcctgagaggttatcatattgatgctggtttggacacccaattggcatagcacactactgcccagaacccctgggttcaagccatcctcacacctcagcctcctgagtagttgggactacaggcatgaaccaccgtgcctagcgaatttcctccttttataaagacaccaatcatattggatcaaggtccactctactgacctcattttnagcttgattagctctgtagagatcccatctctaaataaggtcacaatctgaggtgctggggattaggacttcaacatatgaatttgaggacagagataattcaatgcacaataatcagaaaatgtgcatatttatgagttcataattatacagaaatgcctactttatcacgtttaatagggggaaagggtgggtatcaatgtatgtatatggtaagacttcta

SEQ ID NO: 327823 - DNA, 937 bp, Homo Sapiens
  misc_feature (899)..(899): n is a, c, g, or t
aaatctctcactccttattctctttgaagggtctggaaatcctgttaatatttaattggcttttaaattattgacacatcaaagtgttcaacctattgttgtcctttgaagagctagcgcctagtggagctcctggcaggtgttccaagttcttgggcttagagcaccattagagaaaggatggtggagagaagtcaggaccactccattttggaagcagaaagccttggaacctagttaattggatcacactttttccatctagtttccaggtgttagatatttaagtcttgtctttttttaagagagtaatattaattagttcattgatcatgctccctgaggaaagggccatagcttgaacttcttgttatctaatagggaatcttgttttcctgtcagaatctgtttcatgcattatggctcagtgagcagctggctgggcctctgcccagggagccacagaagaggaaactaaaaatcattttgccttttacaaaagatgaagtccagagtcggccgttttatgattaataatgacctaggtattcccctttggccccaagatagctagattagccacctgctttgatcaggtgactccacagctgtgcatgtgtgctttgtgctgaagaagccaaaactaagacaggggtccaggggtttctaacagtgaaattacaggcattcaaggagagctacattaaattaattttggtgccatcctatgaaggatgagtttacactcccaaaatgaaccagcctgtttttctgctcattgcttaacggtataactgctgcttggctgtctccccaaatgtgcttttacctcctgttttaatccccacccccatcttctgagtccctcccttttaccccctccagtcactcccactccnccacccccgtgggccagttttaaatgtcagcctttgtt

SEQ ID NO: 327824 - DNA, 882 bp, Homo Sapiens
aacatttaataaacagtagtcattattattatactaccattattataatatttactaaaaacaattattatgtaattattattagagtatggttataatagtatgaggtgagaaggttccctccagaggccaggggaggtgatggcatgaagggaaaccctccagagccatctgaaacctcccaacaggagattgcacaggagatggaggtaggagaagatgtgatgtgctctctgaagggatctctcttggttccacagttctttggcctccttgaagagaattacccagagaccctgaagttcatgctcatcgtgaaaggtatgtgacaaatgacttcacttacttgtgcctctgtttcctcatctgtacgctgagggtgataacactgtctttgtcccaggattgttgtgaggcaggttggtttcttggctgtatgcaaatcacttagaatgcctggcatagagtaagttctcaataaatggtaacttctagggttggccttactgcaagagaaggcagctccagtcccagctctcccagggatcctcccttatttctcctgtccatgatgatctctccctccccagactgcttctggcactggcaactggtgcagccttccctgtttgctgccttttagggatctccagctgttttatttgtgctcatcctgctttactggctgagttttctgctccttgaaccaggggctgtgattctccacttttgttgtagccctcacaggcctgggtccatggtggatgctccataggtatttgggtaattgttgtgggtagatgaaaggatggatggatgtttggtgattggctagttggttgatcagttggttgcttgattggttgttcagctgactggcca

SEQ ID NO: 327825 - DNA, 562 bp, Homo Sapiens
  misc_feature (98)..(151): n is a, c, g, or t
gttttcattggtttccttttacttttttaatggggctaatgaaaaacttgaaactacatacatggctcatatgctatttccatcggatgatgctgatnnnnnnnnnnnnnnnnnnnnnnnnnnnnnnnnnnnnnnnnnnnnnnnnnnnnnnacatctggaaaacagcggcacagccccatctgggtttgtgtggaggggtctgggttgtggacacagaactgtcatcagagagatggtgcccaccatagcatggatagtgttcgggcatggcagtggtgtaggcctggggacaccttcagtttctcatccaacacatatttactgaagcacatactacgtgccatggaaggggagagagcaatgccatcctgcaggagaagtgctttccctacggaagcgaggggcatccagctctgtcttggggtgggggctaccaggggagccctctccttgaaggtgtctgttttcttcccaagtgacaacaataggtgggtgggcattagctaggggaggagaaggctgcaggaagcagcggctactctgggcaaaggaacagcacgt

SEQ ID NO: 327826 - DNA, 739 bp, Homo Sapiens
tgtctgtctttcatctcccaccatcctttcacgtggtcaaaccaggaaccccaaaccacttttccattgatgaaggtttcaaaatactcttcccaggtaccagggtcaggaagcatgtggttcatcctttggaaatggtagtaggaaaccatacagtctttggcatttcgaagctacataaaggaacttgcagttgttttccccagaaagacggtggcagcagctgaagtggaaaggtgagtctttagtatccgtggagagggcattgctttggctttttccacaccagaaggttggggtggccgagcccactcaatgaaaggatggcggtgttggatgatggctcgctggcacttctccacgtccccattctgttcaatcatatccacaatttcctgaatccacgttgtccctgctttagggtaggtgcagatgaggagatcatctggtttggcctcgaagctctggatctggctccagttgtccacagttgcaggctgcaggagggtcccctccacctctttcagttttatctgtttccccaggtctgaggtcagggccatagtgtctcagggttggggtcccttcaagttccagctgaaagtcagcagctcaaaggcccactcaagggtcagtgggcacggaaaggactttcacaggaagcagacggcaattgcagaggctcaaattactactgtgtcagagttacgggggcgctcagcaggtagccagcactttg

SEQ ID NO: 327827 - DNA, 391 bp, Homo Sapiens
  misc_feature (227)..(227): n is a, c, g, or t
ggtagttgatgtccacttagaagcaggtgtgttaacaaaaatggagttaattaatataaatggtcccttgcacagcatgtggtttccatatccaagctggcacctctgcccaaaaaatgaagttgccttaagtaatggtgcagaagtccataagcaccctcgctccctggaacattaaccactctgagatcctcaggggaaaggcagtctataaatacgaagctttnacggttacccttagttacttcacttttcagagcataatgcaatctgtcccaagtcccatgttttatttctgtagtggattctgctgtcctattttatatattgtatatcatgcattatgttgctctagtaatttttttgaagatattgttccactattattttt

SEQ ID NO: 327828 - DNA, 647 bp, Homo Sapiens
aaaacacaccagaatacgatatgtacccacctatgcaatttttaggaatagaaacaactgggaaaacaactgggttgttttctgccatttggtctgtgatcgttcatgaagtgggattttgacaactgtgaagcaagagactgctctataatagtcaagagcaggaaatcgtcagttttgccctccaaacctctgaacgcaaactctcatatggactaatcctaaccattttattattttctatttacagattttgttacccacagaatctagatattaagattcagtccaaatttgttgtctgtcacttaaataattccaaataccccctgaagagggccactggttggggcctgtaagttattttgtacatgactcaaccatatatttctattatttcatcagtgacaacacattccaatctttgtcttaggaaaatgaaataactgccaaaataattgctagaaagtaatgggttaaagaaaggtggaccaaagtatggggaaaaaaatcagcatcaccttcctaaggatgacagaaaagtcttaggcagaattgcagacagattgggaaattaataaaaggtttaaaggaaacataagatgccaaggaagtatatgaaagttctcaaacttcaagaatttaaa

SEQ ID NO: 327829 - DNA, 577 bp, Homo Sapiens
aatgtgcagtcaagtttctctctttttttcttctaggaatgataccatgccagtaaatccctacagaacatttccagtttggcaacaagcagtcagtcgatcattcacatttgtactcaagacagcaggcctgggcaaaactcgcctgaatttcaccctgaaaagtgctccccatcatctgaagaagcagcacctggtaacaggcatggccattcagagggtacttagcattttcatttcacctggggtcttgaagcacttcctgaaaactgattgtgccttgacatttacctgtaaaaagaagtgtaattctacccctttggcagatgtgtaaactaagacggtgcaaggcccacagaagtaaggagaggacccaggaaagctgacagtgaatctcctgctttgtccatcaggtcctaaaagtgtctctcacttgtaattccacagaagtgaataaagcataacttctttgactgggattggctggtaggaatgacaggacttaatgatgaagcagggagctgctttaatggcttttccctctattgcaagtttttccttgaaaggacagtcaaca

SEQ ID NO: 327830 - DNA, 446 bp, Homo Sapiens
  misc_feature (18)..(18): n is a, c, g, or t
  misc_feature (58)..(58): n is a, c, g, or t
aaaaaaaacaattcctcnaccaattgtttaaccttgtgtgtaaccttcccattttttntcttggctccttctttcttcctttgtgcccgtaagtacttgtttgggacaaaatgatataaagccaataaatcaatgaagtacttatcaagagtcttccatgagggcagccacttttcttatttatcagaaaggggttctttgctattgtcaggggctcagttggcctggtggcatctgccaggctgatgcttgtacaatcaagttctcctgtcctagtcagacctgcttcctctgttacctgaataacagttttcttggtggccaccccgtcttcagtcctttccccctcatatccactcctcacagctgtgaaagtgagccctccaaaacacaaatctgaccaagtccgaatcactcttctactttcaatcttcagtagctccctg

SEQ ID NO: 327831 - DNA, 575 bp, Homo Sapiens
gattttcaaatattttatactagttatataataacactattttaaaaactatatagaataaacagcactgaggagagatgaagcaatagaaaggtcaaagttcaaacttgttaaaatatgtttggctttgtttccctaaggttggaattattaaactggtgtgactttagaaggttttcgaggaattggtgtgtgttactgcagaatcactagctcttaatttgtaatttgatggctaaaaacggacaagtcacttaaaggaatatatcgtattaaaaagttactttccttgacatttggccaccagtcagccctgtctcccctagcctctgtctgaagtatggaagacattttagcctgcaggctcatgcctatgcagtaccagagggaatgtggagggcgcttgccatgcaccagcagccctattctcacctgtgtgattatatctaactttagaattgcagccccaagatggttatctgaaatacaaacccacttgtttgcaactttctgcctacctccccatggcatttgtgcagtctttatgactgggatttggcctcaacgtttcctcc

SEQ ID NO: 327832 - DNA, 737 bp, Homo Sapiens
  misc_feature (462)..(545): n is a, c, g, or t
  misc_feature (623)..(632): n is a, c, g, or t
cccttgactttatttatcttcataagtcacaaaatgtgagtgcagagataaatgtctgtgtgcatgtgccctgagcacacagggtggcataactcggcacactcataatgacacagccgttcacccagccacagatagtgacagggcacacatggcgacacccacatgtacggagataaatctcccccaccatgacatgggtagacagaaaacacgccgcagtatactctagtatgtttacacaaacagggagacaggcccgtgcaatgcatgttcaccaacacccacactcagagtgacatctgctggaggtgctcagacacagccacccaccgtgacatgccgagactcacatatgtcacatgacacaggcatgcatgccacattcactgtgactctcagtcctattcattcatcacctttctgggagatacactgaaatgtccaccctttgcaaaatgnnnnnnnnnnnnnnnnnnnnnnnnnnnnnnnnnnnnnnnnnnnnnnnnnnnnnnnnnnnnnnnnnnnnnnnnnnnnnnnnnnnnagcaactccgagacactcattcaccatgactcgaggtttttctatacgtgggacgaggggcaggttcacactaggctnnnnnnnnnntcatttcccgtcttcgttggcaggtgcagccccatcttccaagttgtggctttggctgccacaatgtcctctcatttattgaggtgaggactgtggcattttctg

SEQ ID NO: 327833 - DNA, 917 bp, Homo Sapiens
  misc_feature (514)..(514): n is a, c, g, or t
ttgggtctagcagattggcccaaagtactggccagcctggggagtgggagcaggggcctcacatacactgttggtgtgcctgccccaagaggaaaagcaattccactcttcatgatccatcctccgggggaagcaggtggagggggtgcaggcgaccacagaactcagccagaggaagctgtgtgtgctttggtgctcaaggcttcaggggtccaaggctgctggggtggccaccacgctggtgcttagactcctactggggtctagaggacgatggatcccagatcaagttgcttgttgcctcatttgtcaagttctgcctgtacatcggctgttcttccttacgataaatctgaagatcagaaacacggcggaccaacaagcacgcaggacaagtccatcctgcccataacaccctagagcaggctcaaagcaggaaaacagcatgagtcacattcagcaacagacacacggggaaccctgctctcccctctaccctgaggagaaacaacanacaccttccctgcctggggaaactcctactcatgctatccgtctcagacagcagctcctctgcgaagccatcttccactctctcagaaagagtccattgtttcttcctctgcgttctctcttgcctctattaaggtgttcagcagacagtattgaaacgatctccttgcctatttggtattttccagtatggcagacacatatgggaatcagttctgggagcacagtggtttaaaaggatgcagaccaccaaacatcagaagaagagaagtcagggtagggaaggaccaggaaacctgtgccccatgagcggactgagggttgagttggtcccggacgttgctgtgtctcggtgtgattaccaatagcacccatgttcatactcaaagtgtcctggtttagtc

SEQ ID NO: 327834 - DNA, 523 bp, Homo Sapiens
  misc_feature (284)..(417): n is a, c, g, or t
  misc_feature (444)..(444): n is a, c, g, or t
  misc_feature (460)..(460): n is a, c, g, or t
  misc_feature (477)..(477): n is a, c, g, or t
  misc_feature (480)..(480): n is a, c, g, or t
  misc_feature (500)..(500): n is a, c, g, or t
ttataatttaaaaatttttaataatagatatatggcacttatatatgccagctgttccaaacgctttgcatatgtattaatgcatttggtctccaccagaatcctatgaggcttcgttgtaatgattattatccccattttacagacaggagactccaagtgcagaagaggtaatttatgaagaccactcagtgagtacattcaaaccagaacttactaagtggtgacaccagagttcagaccaagcagtctggctcagaagtctgtgcttcactgtacagttnnnnnnnnnnnnnnnnnnnnnnnnnnnnnnnnnnnnnnnnnnnnnnnnnnnnnnnnnnnnnnnnnnnnnnnnnnnnnnnnnnnnnnnnnnnnnnnnnnnnnnnnnnnnnnnnnnnnnnnnnnnnnnnnnnnnnncgtgacagatccagactccatctgctnctgtggagctccagtnctgatgggggccatatnctnccttgccctcgtgccgaatnaaagggggctagggccaaaaaag

SEQ ID NO: 327835 - DNA, 837 bp, Homo Sapiens
  misc_feature (209)..(219): n is a, c, g, or t
  misc_feature (581)..(581): n is a, c, g, or t
aatttaaaaaaatacatacacatatatattctaccagtgtaatcaagaaatagaagaaaacacaacattagataataaatgatttatcctacccaaattctgcaaataaatttgaaaattggatggaatagatgattttcttggaaaatgtgctagtagattgactctaggaataggaaagaaaactcaaaaagtctctcaaaagtggnnnnnnnnnnngacaactgttatttgtgaccagttgctactgttcttcctggagtccctttgccattgctgttttgcaaagtgttagaagtgaatttctggtgaggaacctcggagtgtgaggcagggtgagcatcctgcttggtgagctctctgcagtcatctggcaaggttggccacacaccagaaaggcaacggcaactattcttggcatcaggacccatcacaaaacacagagccctgagtgttcttcattttttaaataatattttccagatcaatatgctattgaacttttttgctaagaagaaaagattgaaaatgatttataatccatttaatttccacctgtcagtcctcacaaacaactgatntccttatggtaaaagtgttggaaacattatattcaaatagtagtgttaaagattttgcagcaagattgtgggtaaaaaaggctgaaagtgttttgagaggaaaatgaactgcagagtaacaaagaaaaatggtgagcgtcagaattccttagctcttaattattttcatggaaaagtccctagttctcaaatgctggtaactggaacatcctattggttaaaaataaacagcataaagtttcaggaaaccaactaa

SEQ ID NO: 327836 - DNA, 336 bp, Homo Sapiens
tccttcccaacttttacagaagctagaatccactgacaaacttcagtttcttagctttttcatctttaaggttaaattcttaacatggggaagaatgaccgctttttaaaaacataattttaaaatctgccttccaatcctaatgtaacattggaggaaagtaattcaagtcttatctatacccagggcttctggaggtctgtgagatgtctgtgtttaaaagtgtcatgtcggtagaaaatttgcattttttactggtaatttggtgtgataggtgggcaatcctgattagagtctgtcattttgaagcagctgaacatcatcattctccgtctg

SEQ ID NO: 327837 - DNA, 749 bp, Homo Sapiens
ttaaaattattactaagctaagaaccttgctgctattacttgttcaggaaagctccacacaccataggcagtggtgctaaatgcaacagaagccttagtgcgaactggaacttctcccaggagtctatggaattggaaacttaatagctactaaatacagtaacatcatgactggagctatgaaagcaaacatttccatttgaacttcaagtgggcagaagggacaaagttgataccttagactcatcagccctgaaagtgttcctaatcacaatttctttcaggagccagaaagaacacagcgttaattatgttaatccagctgagacgttcactatgaaatgtgtgttaagagaaaagtcctttgaaatttcttatttgcatggtagttctgaaagtttttaacctcctgcagttccctggcacacggagtcagtcactcacttgtcctcaggaagcacaggacagcagcaggttcggaatcacactttatctgtgtgatttcacaactcgggtctttgtccaggtgagattctcactcgggtcagagggcaaaggtatccaatgacaaccctgtccttcagaaccaagtagtgttttcccatcagccgtgcaaatcacagcaaatgtcatgtggctttccagcagcctctttgctgtttgttgaggaaggataagaaaaccatggaggattaaaatcaccacattcaaattactataaagaaaaggaggccaggcgctgtggctca

SEQ ID NO: 327838 - DNA, 539 bp, Homo Sapiens
  misc_feature (29)..(29): n is a, c, g, or t
  misc_feature (40)..(40): n is a, c, g, or t
  misc_feature (90)..(90): n is a, c, g, or t
aaactcctacctaacaaaacaaaccccanttaaaacgttnaattgtcctcagcaaacagttgtttcggaaggaaaactaattaacaggantttcacctgtaaattgggtgaatttgggggaatgattctaagggaagggaggatttggttcctaagaattaagaacgccacgctggaagccccaggaggtccgaaggccgcaagtgggcccatgaatcgcccactgcgctccagcctgggcgactaagcgagaccttgccacaaaaacataaaaaaagattagacgctgtgggaaggaagagggtaattctcagcttatgatcgctgcatgtgacagggtgagctgtgcgttccctgcttagaatcaagaagaggtcttagttcatctcactttgtcgtggtgtctgcgtggcgcttcatgcctcacagaacatgggctggctacgagggtcaaaccaggccacagcaacgcgtcaggggccgcttgctttcttaggagcaacaggtccagaagcttccgctccaagagggactggggc

SEQ ID NO: 327839 - DNA, 354 bp, Homo Sapiens
  misc_feature (231)..(302): n is a, c, g, or t
ggccgcttaattaatcttctaaagattaatttagaagagatagatataaaatgccagattttttctggggaaaagctacaaaatgtatttttggtattccagatattctacaccaaaaagtgtattaatttcagaaaaatatagatggcctattttgtacgtttgaaatgaatccctttttcgtttattattcaaaatacttcattttaaaaaggatacctttagggccannnnnnnnnnnnnnnnnnnnnnnnnnnnnnnnnnnnnnnnnnnnnnnnnnnnnnnnnnnnnnnnnnnnnnnngagttcaagaccatcttggggcaacatcgagagatgaggaccctgtctctac

SEQ ID NO: 327840 - DNA, 478 bp, Homo Sapiens
catagaaactaagaaggtgttcaatcaatagtagctaatagcagcaacatagattttccatcttgtgtgtttgttacaacaccaaacaaccttatctgtaacattcttctaccctccatggtgagccttgcattcccttgtttcctaaacgtcacaggctctttaagtgcaggaatcatcttatccctaccatctaggtttaaatgttgtttaaagcacaagaaatattgaactgaacaagtagtgtatgacagtggattctagtcagcccccaaacgcaaacagccaagctagcaatggtgcagatttaccattccagaggccagagggagtgccactgctcaaacagaaacagagggatcctgcacccactccttgcttcccaggttgaacaccctgatgaaaaagagtttctttggatttctgactgggaacacaagcttgattaccagtgtccctgctgagagcctagacgcta

SEQ ID NO: 327841 - DNA, 386 bp, Homo Sapiens
gtgtgaaccaccgcgcctggctggaattttcttccttctcaatttgtttgcagtgtggctaggcagatgagataatagatagtctctgtttcagtttttctccaattgtatacccaaggtcttgctaaataaatcagctttgattattatctgtcttcttggcttccatctttactgtcataaaatactacctgttggctcgagctgctgggtgggtggtcatacatctcttctttcctaggtctgaaggtaactgtggtgttaattatgaaagtactgtcaattgccgaaagtgccccatgctttcccctccccacctttccctcttgttttacaacagtggttgtgggggtgaacacaaggagtgtagtctgctttacaagatg

SEQ ID NO: 327842 - DNA, 423 bp, Homo Sapiens
tttttccccccaatggtaataccctaaggtccttgcctaaaataaatccagcctttgaattaattaatcctgtccttccttggccttcccatcctttacctgtccataaaatacctaccctgttggctcgagctgcctgggtgggtggtcatacatctcttctttcctaggtctgaaggtaactgtggtgttaattatgaaagtactgtcaattgccgaaagtgccccatgctttcccctccccacctttccctcttgttttacaacagtggttgtggggtgaacacaaggagtgtagtctgctttacaagatgtttagtcaatagttgtagacaaatgtaaataacagcaggtgatcaactatgggacaaatgcataggagagaaattgcagaaattgtgtaacttttattttgatcctgta

SEQ ID NO: 327843 - DNA, 712 bp, Homo Sapiens
  misc_feature (678)..(678): n is a, c, g, or t
aatcctccctttctagaaatatgagggaaaatattcacagaagcaactaatctagagtcacgtaagtagtttcaagttctaccttaaccagactttggctatgtcttttaattatgggaatttgagttaatctttaaacagagattctatggcattctcccctgcatcccactctactgcacactcactggcctccttggctgttccttgagcccatcaagcactcaaaggccttaggacctttgtactggctgctctctgcttgggacttcccatagctctctgcctcaccttcttcaagttggctcaactataatctcattatctaacctgtttaaattgcctttttccacatgcccacctccacctcttgacaatcgattcccctttacactgctttttttctcccattacttaccactttctacatactatagaacttattaattatcactgttcatgtcttgcttctctcactagaatgtaaaccctattggagaggagaatcttacctttgtcctttaacatatcctaaacattgagaatagtacctgatattcaatgaatattcactgaatgaatgaaatcagtaattcctgccctatctgcctcagagttttttgagcatcaaatgcatagcaagtgcttgggaaattataaagcatatacaaaagaagntattattgataataataatatctgcatttaatac

SEQ ID NO: 327844 - DNA, 724 bp, Homo Sapiens
  misc_feature (505)..(513): n is a, c, g, or t
ctaaaccaccaaagtctcagggctcttttcagtattttcccactcaaagtagactttattccttccaggtatgatacctatacggtgttgcctttgatgggccagtaccttgactctgctgtacactacttccagtgcaaaattccccagttctctctgctagtgtgggctctggatccagctctgttggcttaaggtattcatgcagtcataatgcctcctagacttggctaggaatgggtgtttgctgaattttttctctcattgtgattttgtagtactttttgaggatgtaaagggattaaaatatagatagccacttttatcccacagagatgtgggagccctacactcaattataacaaaactgttttgtggttaatttcagaattccattaaaatagtttttgtttctgacctcagtaaactataatatatgactcataccaaagatatttattaattgaggtttgaaaaaatattttaaatatgatagaaacataannnnnnnnngatctgcaagaagtgtgagattttctaggtgctatcaaatggtagtttttttaaagctatattctagatgtcatctattgtgctattttttaaacagagtgagccaactacttatatattgataaggaagatggtgataaatcttttaaaaataaaaattctgtcaaataacattttctgaggcaagacaaataatgtggtagaattatcc

SEQ ID NO: 327845 - DNA, 776 bp, Homo Sapiens
gaaaatacccttgttgctgcttttcctccaggtttcgcagtctagggaatctatagcaaagcgagctttctatcaaagcaggtattgccaggaagagatccagaggactggggcttctgttccccaagccacttagaaatgtgctccaaattggttccgttcctggagccgggtctgctttggggttgattgagcagtgaaagaatttgaggatgtgagaatctcccaaactaatcacagtctcctgctggggactgaaacccacatgcattaccatggcagtgtctgaagacatcatgaacccttgaaaactatttcctgggatgaatattacactaagtcattatcagtcatttgtgcctgggtgtagatgtgactatttaattctgctccatagcaaactgctttacttgttacagcttttaaatgtctgataaagctagtccctatctcactctgattcttctataatttttccagaactttcctgaatattttcatatgcttattttatttcaactgtaggatcagcttgtcaggttatgaagaaaactctgatagcatttcaaatcaaattaattacatcaaatttacaaattaagttagaaaaacatgacatttttggatttttgagttttgctccataagactgaaatatacatttccatgtactaaagtcttcctttatgcccctctggagtttaagaattttctcatatgtgttctgcatatttcccttaagatttatttattgctataattcttttcattggtat

SEQ ID NO: 327846 - DNA, 486 bp, Homo Sapiens
  misc_feature (199)..(199): n is a, c, g, or t
ctgagctgattttcaattcgatgaagtccgtttccataacacttttaatatctgaataacccattcatctttacccaaatttcttcaccttccaggctcccagctgctctgcgctatctggtcaaggttccctacatttcctaataaagatgtgcatgttaggagcagttactgtggctctttaaagtaagagcagacnttcagtgctgtgggaataaaagcaaggtctttggaggggaagatttatggctgaatcaacaagaattaaaaagaggacaaccctgaggagaaaacccaagttctccaaattgactgaattgccttttgtatctcaaggctgagatgattatttgtttttgcaaatagaaatgctatgtatattagactcaaaactgataacatattagagctttcagcaaaataaaaaatgtttaacatgtctagtatagaaccacatatccaaacactgatgaaattcatattact

SEQ ID NO: 327847 - DNA, 389 bp, Homo Sapiens
  misc_feature (343)..(343): n is a, c, g, or t
  misc_feature (366)..(366): n is a, c, g, or t
  misc_feature (371)..(371): n is a, c, g, or t
aaattttctaattaccacattaaaatagtaaaaaccaggtgaaattaattttaagaaaatactgtattttatatatatatctccaaaatattatttcagcatataaccagtgtaaaaactataaatgagatcattgacattttttttcataccacatttttagaaccctgtgtgtgtttacactgacagcacattccacttgagaccagtgctgcgggactggggagtgcaagcgtcagggtcccagccgaagccctttagcttgggacttcacagccacagcctgagtcccagctcacaactccagaccaaattcccctcccaggcttcatgtggctggcgnttcaaggacaggatggccacacngggcnggggatccccaccccctg

SEQ ID NO: 327848 - DNA, 599 bp, Homo Sapiens
ctgagctttgaacctcaaagaccaaaatgccctgcccattttcctgcttatcagctgaggaatctttacccacattgacacattggcttgttctgacccaagtgcatgcaggcttccagagcagattcagaggcctaacttagtcctttagctttcctcccagcacagaactcccaaggttatctgcaagtaggccttgcctagagagactgagttttcaagttgtcagttttccccaaattgtccctcaagccatccttccctctggaatcacccttactgtttagtaaacattcagaggacttgcctacacatctgggcagtctgcattgtaattcatatgtgtttacacatttgtgtcttcatctgctaaagcacctttgaaccatattgtaattcataatatctgaagcaattattatgaattgtagtaattcataatattgaagcgattcataatatctgaagcaatccccagatacgggttaggcatggccctgctctgagcaggatggcaaaagtggcagtccgtgacgcagcccttgttaccccaggctattactaaatggtggtggtggttttatcttaattaagcggcc

SEQ ID NO: 327849 - DNA, 870 bp, Homo Sapiens
atagaaatagctgcaaaattgtcctcttagctgaaaatcatggatgacctcagggagggtacagagattagaagaaaataaagtaggcatgccaaacatttcagagctagagtgatgtaagatggtaatataggccagatcaggaattagaaaaaaaggataaagagcaaaacagtgcctcgtggccagcaaccttatagtcatgtaggactgactcccctttgtagcaaagaaaggtgagactggttctgcaggtggacacctccaacaggagggcaacctgttccagctctaacatttctttcgttctaattactttcctctttccttctgataattccaccccttaatgccttcaaaaactagcttgccctgatggcaaaaatcttaatccctaaaatctctttcctttctaaaatttctcctacgtatattagactgtcactcagaacaagctgttctaattcaaatgttttgcaaacatttttattacatagcttgagtcttgtttcctttatgacaattctagaagagctgtgcctttctttttttgagaatcagcaaagtgtcctgcacaatagatctcaatgtatagctttaatgcactgtctgtaagactcagaacagaagctcctatgataattgccagtatgggtgcaactatgtcggattctcaagtctagtttattaaaagttctatgcctactattaataggttatgctacctaagctcttgaacctcattcattcaagtacacaatggctatttttggacacaaaagtagagtcacagtggctactcacagagtttcccctaatggatggggaaacaaaatgaacctatatgagattagaaagcaggccaggaag

SEQ ID NO: 327850 - DNA, 326 bp, Homo Sapiens
atgagcaccacaagaacaacacatttctataaggttatggggttttacttttttccagtgttaattagtttcacatatctagaatttgtaatttcttattggatactagaattactgtatttatttacctgaacaaattaatgtttccctctacaaactactttagaaagattttcaataaaggtaaatgggatgtaataatctattaagaaaaaatgactcagagtggaacctgtagcaaaatataaatttgctgtatttaagagtaattgaaagcaaaagattccaaaagcttgaaaaaaatggagatgccctaaataaactta

SEQ ID NO: 327851 - DNA, 481 bp, Homo Sapiens
gaaggctcaacaaactttttctataataaaaggccagattataaatattttaggtttcgtgggccacaaaaggtctctcctacaaaaaactcaactcagctagtgcagcacaaaagtagtcagacaatatgtaaatgaattaatgtggctgtgttccaataaaactttattaacactgagatttccatttcatataattttcattcatctatcacaaaacattattttgtttaaactatttttaaatgtaaacaccaatctttgctcatgagccatacaaaaacaggtagatacccaggggctagctatagtttgctaaccctgccctaaggcaataattttactttcagagagggaaatctcaaggcttctccacatagctacaatttacacagcatcccactggctagactagaagcatatgcacctacctgtgtaactactactataatgaccttgacctattgtttcttatttactt

SEQ ID NO: 327852 - DNA, 1213 bp, Homo Sapiens
  misc_feature (406)..(456): n is a, c, g, or t
  misc_feature (1154)..(1154): n is a, c, g, or t
  misc_feature (1186)..(1186): n is a, c, g, or t
  misc_feature (1192)..(1192): n is a, c, g, or t
cgtcgagggcccgaacggattaaccaacgaaggccacgccaggaccacggagaaacccagacgtccccacacttaatgcggttttccaaagatgggcctgcgtggtgaacacacctaccaacaacgaccacccccccgtagtgtggcgcagaaatcctagtgtggcgtgctgtaatggatctgatatccagaataaagagacaccatgagcagtcattagtaaatgactcatctaatatctaatggtagtaaatgagtagagacatgtgttgctccttagaagatttaagcatgccagtggtcgtacatgcatatagccccagctactcagtgggctgaggcaagaggattgcttgagcctagtagtttgaggttacagtgtgccatgactgcacctgtgagtaannnnnnnnnnnnnnnnnnnnnnnnnnnnnnnnnnnnnnnnnnnnnnnnnnntttaagatgtgttaatatccaattacacagagaagctgagataaatcctcagagaaaagaataaattttggaggttcattttagtactacaagcctctactcagtttttcacatacctttacttagaagcccgcctctcagtctgggaaaaagagtattaattctctttttctgtcttatttctcccttattaaataaaaacaattaaaacttggtggtttgttatccacaaatctagtttttttaatggccatataggcgtaaataccagatattttgtaaacatcatggtggtagaaatagctttgtctatgtcttcaagcatagtgttgatcacaattacattaaaacaaaaactttttattcacccagaactgggaatcacaattagtaaagaccataatagaattaacaaacagccctagaacacatatttaaatttgcagtgggtgttaagtaggaaaattatgactccatcaactcttccttggtaggttgatcttgcttttcctgaggcaccagggactcttcactgttatgtaaagaactgttaacctaaaagacataggaacagtgagtgggccacctctaccagctgtgatcaagacctcccgggatccagagggtgggtctaatagttcattaaattgctgtaggggcactaattgtccccttctacaggttgcagccagttgggnttattggcaagcacttgattttctacaaaggnatactnggcaacctcacggtgggggca

SEQ ID NO: 327853 - DNA, 590 bp, Homo Sapiens
  misc_feature (374)..(374): n is a, c, g, or t
aaaaagatgggtaaaacattgggaaatgtatgcatgtacttcactctggtttcatagggttagcaagtgtcttaaaaacatatataaagaagcacagagattgttaggagatatttatgctcccagttttaataattgggatactttgtataccacagaaagaaaaattactaaactcctctttttttagtcaaaattggaaaaaaagtcttaattgacagttactatgcctgtgctacccatagcaagtattcagtggaaaatactttactaagtaagtaatttgaacacagcttaaaatccatagtatgttacaattgctagccttttcacaaagtttgcattgtcttaatgtaggaagggatactgtgatnctaaggatttcacaatttttaaaaagtgggaacctaaatagggtttcctaattgccatgaagttatttgtatcttagatgaattatatttacaacattgtaaatgtcagtgggtgatccaaaataaattgttaaagttattaaaatgtacatttaagtaggtttcagtttgactagaaataattggcaagaaggcaagaactagtcttctagagca

SEQ ID NO: 327854 - DNA, 1036 bp, Homo Sapiens
  misc_feature (20)..(20): n is a, c, g, or t
  misc_feature (75)..(75): n is a, c, g, or t
  misc_feature (89)..(89): n is a, c, g, or t
  misc_feature (779)..(779): n is a, c, g, or t
taattcctactgtatcctanccctaatgtgtgcctccccctgttactgcgtgtgtaaagacgcctccagttccanctgaaatgtttggnatgggaaagtttttgtgttgaacctcccaggcataaccactggaccagccccaggccgctgtggcagaacgggaggggagaatgggagaggcagctggtttttttctgagggtggtctgggccaaacgacaggcagctggacagcaaatggtgctttggggtgtaactccgatggctggttttgttgtacccaacgccgtgggtcaacgggaccacccagcatttacatctcttctcgttcagccaagatagtgtagacacagtcttgatggtgtagacacagcattttaaaatattatttatagtcaccagctactctagtgtgttttagacctggattcaggttgtaaagacttctttgatctttaaaatgtaaagataaaccacatggaccgaaactgagaactttacagaagtccccatttacattgtaccatcacgaacagtttgccttccaaaaatgctgctgttcagggttgtgaattcactgttaggaaagtgcattttcgaactgacttctgagtcctcaactgttttcttaacatgagctttgtgttagtatcttgcagaggcacacttcgcatattaagattacaacatttaaaggtgttgaatatgtgaaattaaatgatatgaatctaatgaaaaattaagatatttacctaatattagccagaaatatatattttnatggggatattaatttgaccttaatacattattccccatttttaaaaagccatatttaagatttaacaactgtatagcaggtggcctttaaggcataacaaaatatatacaaagaaattagggaagatattaatgtcaactatgaaataaattaacatgatttttacaaaatatactgaccattaaattaaaaaatattttaaggcaggaatcttcatttgaaattagcataatcagaaaatatatcaataaaatct

SEQ ID NO: 327855 - DNA, 470 bp, Homo Sapiens
aaatgatcatggttttaattttattttcctgataatggtctatctctccactgatttataagatttgtaagagcaggggtggatcattctggtcactgctgagtccccagcatttagaacaggggctgacacagcacaaaacaacgttagttgggaatgtacaagcaaacccagcacaccttcagaggggtgctcaggaaacagccctcccacctttcttcacccctcacagctgtgggatcttcctaaccatttcggtgtcccaggatagaggatgagtttattcacccctccccagcaggggagttgccaggattaaatgagatcccagaatgccctggtataccctgaaggctctgggacacaggtgagctggtccccagggatttggaaacaggaaaacaaatatgactccaccctgcctcccatccagcctctgcctagaggagttattttattttattttccag

SEQ ID NO: 327856 - DNA, 716 bp, Homo Sapiens
cggggatgcagtatttattcacttcctgaacagtccctagataggtggttctgatagcctgttggggcttaaatgacctgaaaccttatttgtatgtgagtcattattgtgatgaaattgtgtacttcagcaagagttttacctgtaattaatttctctcatgcctgaaagttaggaaagttgggaaggcagttgccccaatgtaacaaatgctttgtgatcttggggtgagcctgttccccatcccattgcaggggaaagctttttagtcctcctcattctctgtatttcccagcgtctgggcatgtaaaaacgttggggactgaatcttccgagggcatcatttctctgcatatgtctgctctctggaatgttctaaagggaaaaaacatgtttgtttcagctgcagaaagattttttttgagacataccagtcagtcctttaccagcgtaatcgtgaatatctgcagggctgcacgggaaggcttttcatttccccatagcaagagccatgctgccctgaccctgccacattccgacagaaggccccctgggatcagctctgggtatgtttgggaagccaactccatgttctgaggcacaccggccctgaggatagggcatggttgaatggtcttagctgttccagaaggactgaaaagcccaagagatttcacagtatggatgcaggcacgggcttcccagtgggctactca

SEQ ID NO: 327857 - DNA, 756 bp, Homo Sapiens
ccagtgttgagtccctaacaacattttccccataagccctgtgatttgtaaagtgcaattctgcatagtgtggtggtttgggggaacacatatgttgcattatggtataagtgtgttccatattgccactccaaagaatcccatgtgtcagagcaactggctagagtttctcaagaagtgatgggtcagctcagtaatgcatttgcagcctttgttttctctctcttgcttcccttctcccttactcttgctgctgtctgggattacacattcttccgcccacctccatctcctccatcccatcaggtgttatgagtgtggtgtcagcctctgttccctgagccagggaacacattcttccgcccacctccatctcctccatcccatcaggtgttatgagtgtggtgtcagcctctgttccctgagccagggaacccgggctcaggtcgagcattgcacacatagggaacagcaaatgcaaaaccataaggtggaaccaggcttggtgtatctgaagaacaagagaaagcctgcatggttgctgcacggcagatgaggggatgtgggaagaaacgagggtggggaggaagggaagggcgagatcttggggggtttggatcgccagagaaaagagtctggacatcaggccaagtgcaatgagaagctctcaggtggttacaatctctgggagtgatgtgatcttctgagtctctgactgcgagctccagctgggatgtctacgctgggatgaggact

SEQ ID NO: 327858 - DNA, 796 bp, Homo Sapiens
  misc_feature (15)..(15): n is a, c, g, or t
cagttatttgaatanccttttgtttgcacatttcaggtaaaagcttgtagatattttaagtatgtagagagctgacttggccttaagaatgacactcaaactatgcccttcttttgtgcatggagtgaagactttacctaagagtttagtgctgggccaatatgggctcacccatctgtgaagggagtggggaagctgcagcataaactctgaaagatacaagcaaactagtccaaggaaacacatctgtactaaaaccacaggaccttgtaaaccaggcaaccttcagtaacgggaaaggacgttttctatagaaaccttcctgttttgagaaaatggagcaacagtccagtcagatttgattttcatttctttacgtgattaataggaaatggctactgtggcttaacaccaattgacagttctggcaatgcctgcgtccaacccactgacaccactagctacagcatgaccttcttcagagaaaggtaacaccaccttagcgagaacagacgggctaacatattaataatggtgattaatgctttgactgaaaaataagcagagacaattctaaaggtatttaaatgaaaaatgtgcaataaacataaccctgcagtagcacactaagaactggtgttcccacagtgctgctggtgcccccagcacctgtattggtgcccttttctcatcctctttgctctacttagcacactctctccccatttctacctgcctaaatccttgtcatggttcaagatccaattctaactcccctttccccatgctgtgccga

SEQ ID NO: 327859 - DNA, 1247 bp, Homo Sapiens
  misc_feature (33)..(33): n is a, c, g, or t
  misc_feature (37)..(37): n is a, c, g, or t
ttgtatgatcccatttataggaaatgcccagancagncaaatccatagagacagaaagcggatccgtggttgccaagggctggcgggagaaggcaacgtgagttcataggagcagggtttcctttctgggtggtaacgttctgggattagaccatggtgatggtcgtcgtacaccttgtgaccactgagtcataaagttcaaatgggcaaacattatgatatgtgaattctctatctataaagttgttttaaattaaacaaaacaacagtcaggctggaagtggtccctgggccatagttttcaaccctgatcttagtttgaacaaagaacacctaagatttagcaggcactttcttcctaagaccgttcatgcaatgtctccatttgtaaatatactaaatctcaagggagaaaaagatttctaagagtctaacaaaaggaaacctgtgcatgaaatcccaaaataacacacatcccatacatttctgaggcccataattacctcagacttcccacctcactttctgtatttttatgcgtcagaatgccaagctcttcttctgaggtgcctctgagtccctggctgtcccccaggcttgcatacggcatcctcggggactcctggggagctcatgagaggcctgggctctggctgacccacatgccctggcaactgctcccacagactaaatgtttataaataggtgttgagattccataaatacatcccaatctgggacattctttggacttgaatccctataattgtcttttttgcaagtggatttccatgttattgaaagattacctttacttctgggtaccattaagttcactgttattacttgtatttttaccctactcacaagagggaaggaaggggcaggaatttcccacattttacaccatgaaaatgtgagagagggaagaagccctgtgtcctggttggcccagccacgaggccacacgttcagacttgagaagaccctgacctggaccaccagtggcttccgcaggtgccggttccgcagcttccggggctttggcaggaagaaatccgactgcatctgtaagggagcagcgtccggcacctgaaggtgcactctccagaccacggggacgctcgcacgcgggcggcccggccccacacactcacactgatggagttcagatgctggcggaaagtcagctctgcttctttactgggagagaagagcttcccgtgtcggctgttgggtctcgtgcc

SEQ ID NO: 327860 - DNA, 856 bp, Homo Sapiens
  misc_feature (35)..(35): n is a, c, g, or t
  misc_feature (95)..(103): n is a, c, g, or t
ggctaaaaaatctgcctacctcagcctcccaaagnactgggattataggtgtgaaccaccgttcccagactaattgtattgttaattttcactgnnnnnnnnnccccaaaatgtttttgatttatggtttgttgactccatgaatgtggaacctgcagataccaagggccaactgtttatccttcctcttctaaacagccatttttgtggggtttggggattgtctgagaaccagatgggcattggagggcaaagatgagaaaaggctaccttacattatgcaagaggtaaatggccagaagtaacagcagaggcctccaaaaacaaactcatctctgtttttggtgagcaaatcctgtctgtgttagatactatgtgaagctggctgccaggaagactgatttacaaacttgtcaagatgtattgacaggttgcaataccacatgggtccctgccaaatccctcttctggaattcttgctagccagggctggttagtgacaacaaactgttcacatcagacctacaacaaaccatgtacttcctgacccggaaccttccttcctacctcagaaaagaggccacaagaaggccttctgtctgagctgggactgtcagcataatgctggtggccaaaaggtcccctcgaatgctttccatccaggcagcagcatggagcatcatcggctcagggctgtgaccttggctactgactgaagaggtccactgccaacagaacaggggccgtacttcctgtctcagatgtgttgctccactatgcctccccatcccaatcctttctgctccccacaaacaggtctaattctaagcctggatttgctttactttgctgtggt

SEQ ID NO: 327861 - DNA, 760 bp, Homo Sapiens
  misc_feature (343)..(343): n is a, c, g, or t
  misc_feature (460)..(460): n is a, c, g, or t
  misc_feature (719)..(719): n is a, c, g, or t
ttcctcctcacagctatatattagaatcatatgagaatgagtgaggaaagccaaaaaaacaaaaggatcatcgagaagcataaaacaaaaagattaggagcggtgagaggcaggacccaggcttggtattgttatgttttaaataattttctaaagttttgaattgtaaaaaaagcatgcatggaactgaccatcatagccatgttaagtgtacagttcagcagtattgagcacctccacattgtcgtgcagcggaactccagaaattctccgtcttgcaaaactcagcctctgggcccgttaaactaggtgtccccacctcccctcccccagggccctggtngaccaccgttctgctttctctgtctgtggatttttgaccactttagatacgtcattttcagtgggattcatcctgtgttcgtttttgtgggcggaatcacgttctgtttgtgtgtantacaccacgtttttcttgtccgttcacctatgatggactcttgggcgtctgccgtaggccgctgtgaatgctggcggcggtgatcgtgtgctgacgtctcctccacgtactgagttcgtgtcttttggatgcgcgcccagaggtggcactgctggatcctgtgctgggtcatacctatgtttaattctctgaggaacctccgtgctgtctccatagcagccgtgtcgtttcacacttgcaccaacagtgcacagggctncggttccccacgtcctcaccggcacttggcactgtctagtg

SEQ ID NO: 327862 - DNA, 410 bp, Homo Sapiens
  misc_feature (20)..(20): n is a, c, g, or t
ccccttttccgcgggccaangcccagcctccgactttccttccccttaactgttaaaggatccaataaagccagaaatataacgttggaaatttacccctggagaagaagttgtcacataatcatttaatcataaggaaaccatgatatcataaaattcaaagtcatctagttcaattcattgttttatcaagatcatattcaaaccactctaaagagacaatatttttacaatatcaagatcaaattaacaatataagactaattttaaaatgggtaaataataaacagatacatagcttttaatcattaaggacatgtaagttgaaccgacaaaataccattttttgatcattaatttggcgaaatttaaaaaggtatcagatatcagcacaagtttgagaaactgaa

SEQ ID NO: 327863 - DNA, 739 bp, Homo Sapiens
  misc_feature (80)..(80): n is a, c, g, or t
caaccatctggctctttttccaaaagtctcaacaaaaggaaacacaatcagttatgagattcacaccaggagaaacatancatttcttaatacagagacctaagagaaattccttatggactcctataaagactaacaaaggagataccacatattatgtgttggttctcaaatgggagaggtacatctcaccaccctccctactcactcccacaccccaaggggccatttgcaaacctagctgggcatttttttctgtcactgtagtggaagatgctagtgacatctagggagtgggaactgagtgggcgaaaacacaatgctttcagtagcctacaccttgggtcaacaaactttttctgtaaaggagatagtactttaagtcttagcaggctatagggtctctgctgcaactactcaattttgtttgtaatgggaaaacaactacaaatactacgttaaaatttaagcatgactgtgcttcaataacattttatttatggacactaaaatttggatttcatataattttctcatgtcacaaaatacaattctgttgatttttttcaactatttaaaaacagacacaagaacaggttgtggacaagatttggcttgtaggagtcagagcttgctgaaccctgtcctatacaatgaagaaatatctcacccccaaatgcaaagagatgagaagacctgtggaactcctgcatagcatttctatatcacccaggtttcc

SEQ ID NO: 327864 - DNA, 759 bp, Homo Sapiens
tctttctgatttaaaaaccattggccctggagctatactgccaaggtccaaattcccgctctgggccatttttacagctgtaaaacagtgggctggtcagatcgtctctccatgcctctctttcctcatctgtgaaatgtacctcataaacttattctgaggattaaaatcagacactgcgtgtgaagctttttacagtctggaacgtggttaagaactcactacatgtccaatttctgcttctcacaggatggcaatcctctaaatagatcattcctacagtctcatacaggctcgaattcctcctggatgttgcaaaacaagcacattttctctccatccaccaaagtattaaatggaagttcccaacttccactaattaaaatagagatgatgtcattcagaaagccagaattgcattcctcttgcccaaatgttcttacatctggtcctaatattcattttcttcccatttttggattggaaaaatagaatgccatgtccacaggttgtcctttagaaatttaaggggtgatcgtgaatgaaatggtgtgaagctggcaaatatagcttcaggtttctaatttcaggaatggagcacaggaaagctgaacatctaaacagggtttacccagtcctcagtgtgttttctttcagagcccagccatacaacactacaagtaaccacatagctgttattgatggtgaattcttactccttctccatagaagacatttctggatcattgctagtgccga

SEQ ID NO: 327865 - DNA, 712 bp, Homo Sapiens
  misc_feature (38)..(38): n is a, c, g, or t
  misc_feature (126)..(126): n is a, c, g, or t
  misc_feature (132)..(132): n is a, c, g, or t
  misc_feature (168)..(168): n is a, c, g, or t
  misc_feature (180)..(180): n is a, c, g, or t
  misc_feature (190)..(190): n is a, c, g, or t
  misc_feature (222)..(222): n is a, c, g, or t
  misc_feature (582)..(582): n is a, c, g, or t
  misc_feature (636)..(636): n is a, c, g, or t
  misc_feature (653)..(653): n is a, c, g, or t
  misc_feature (663)..(663): n is a, c, g, or t
  misc_feature (671)..(671): n is a, c, g, or t
  misc_feature (696)..(696): n is a, c, g, or t
cgaagtttgaatgccctggccctcccatgtttccaccntttgtgccctttcaaaagacggatttccctttgtgagttttgcacactgttggtaaataatagtcaattattcctataaacgtgtttncccagnatttaatatttttaatagatgaaggaggatttgggncttcaaaaatgnaaatatgaanggtcagtttttaaaagatatcgatacctgttnggtcactctttctaattttggcttctgctcctccgtttctttacttagttgaaatgaataagcctgcttctctgataacttttctttaacattatttgccaaatgttctataacatctaatgtattttccatgctctgtagaaaaaatattaacatgtatttttagaatcagaaattgacttttataacttgtcatttatcaagtattcatttaattttaattcatttatttttgtacataatatacattatttctgttgatgtacctcttaatgacatctcggtcaatgatggactgtatatatgatggtggtcccataggattataatggagctgaaaaattcctgttacctaggcgncattgtaatgtgggcacaattacattagtcatgagtttgtgggtgatggccggngtaaacaaacctgcatngccagttctnataagagntctggccgcatacaattatggtacngtggctaatactgggt

SEQ ID NO: 327866 - DNA, 852 bp, Homo Sapiens
  misc_feature (55)..(55): n is a, c, g, or t
  misc_feature (305)..(305): n is a, c, g, or t
ggccgcttaattaaaaaaattatttatattttttaatcaaatgcattacgtaaancagctttccctataaggctgtttcagagtctgagttgacttctctttaatctacctatagaacttttaggtttcaaaaaatactttttaaatgactttttgggtttggaaagtacctttaatacatttaagctagttttcctcctggaaatatttagaatttcttccttaattggcaacctttatagaagtctggtaagatttgtcgcaaagatgtgccacagatggacacaaatttcccattcgggagncaatatcttaccacagtggtggctaaatgctagggacaaaatacaaggccggaactttccttccctcaggataccttgtgctgtgggtgttttgttgccactttctccctctcattttcaattatatgcacaatcttccctttctagagtatgactttggccagatgactcacctgatgccacctaagggcattgcctggccaggtacatttctctggctccagccttggcctaagttgatgacctgaagtcgatctcccacattcatcctacatgaacgtgggggcgttggttttggcggccaggctgtaaaatgtagggcttgtctcagtttgctatttaatcaacatgtggacattttagcagagaaaccccagagcaaataggaatgagaagctacctgattaaaatgatgaaatgatagagaatgttttttggctgggacattttaaccaaagttgcacaactgatgctgattgccttccttgtagtttagtagaatttgtcatttgtttagctccttttcgttccagttgctgtgccgaaa

SEQ ID NO: 327867 - DNA, 1000 bp, Homo Sapiens
  misc_feature (77)..(189): n is a, c, g, or t
ctctaaacttcccttctcacttcatttcattcctttcatcttccatcactgatatcctaccaaacccaaataatttnnnnnnnnnnnnnnnnnnnnnnnnnnnnnnnnnnnnnnnnnnnnnnnnnnnnnnnnnnnnnnnnnnnnnnnnnnnnnnnnnnnnnnnnnnnnnnnnnnnnnnnnnnnnnnnnnatgagccaccacgcccagccaaaataaatcttaatcacattttatgcctaaagtcctgtggaagataagcttcattttctaaacatgtttctttgataagagtaggggttaaggccaaggggaactcataatacctaatattaactgataaatttaagtaagatgcacaaacagttccagttgtaggaattatacaccaaggacagggctagactaaggcttaatagtatttaagccagtatgaacaatgctaagcttaaacaattagttgtatgcccctataactagggactatgccatgtagaagattttggccacatccagtcctaaggtgtcactccataaaattgtggaatatggaatttcagaatggcaatatattttacctgatacaagcattctttctacaagtactctaacctagtggttatctcattcctctttaaacatcactggtgatgggtatctataataattatatctgaggtgattatataattatttgactgctctggctgctggaacattattgtttttattgaccccaagatctgactctttgcatttgcaccactggaccaagctctgctttctggagccacagagtttaatgttaatacatgacagctcttgaaacatttggaaatgattgtcataactcctttaagtcttctcattatcaggctaaacagtacatgtttcccatataatggttttcacattctctgccatcttggttgcccttcactaagcatactctaataactatcctggtgtatccctcttaaaataggaactcagaagttcatca

SEQ ID NO: 327868 - DNA, 679 bp, Homo Sapiens
ccgtagttcctagtcatttcattgttcaggtgtggtttctcagtattaatacagggaggtagggaagaggaaaggaagatgtgggggtgaagggaaagattgtccccctcctcgctcctatttaggaataaatcaggtgggagatgtgcttccgtaaccagctggacagtctgtgtccctgagaggtgcccagagggtcccagtttgcaccaacctctcctgagtcatgctggaaccttctttctagagagctgtgtttggagaacggcacacagagccccttgactcctgggcctccagcatctcccaggaagacctcccaatagtatgtgattaaaactatagacatgcagctccaaataatactctggatgagccacagaacatgtcttccttttcctacagaaaacgtattttcttaacccttgaataagctagggatacaagatccattcaaagtttaaggctcggtaatagatttgaagatacacgaggaggaaaaggttactgatagggcttcaatttccacaaagcaactaactcttaagaaactataacttgctgaattctggtgtagtaaaacagctacacacagaaatagagctaaagaaagaaaaatagttaacattatcttaaaagacttaaaatatcccttccttttcaaactaggttctatata

SEQ ID NO: 327869 - DNA, 638 bp, Homo Sapiens
gttttctgcaggtcactggaggaaggtagccacacttcactgtgaggggatggtgccctacctgtcaccttcaacttctgctatctcacactgttgttggatgtttcagaccattttgcacttgctttgaaacttagctccttcactgaatcacgttgctccttcgttgctgctgcctccagatctccaaaggtgtcccctatcctctcctgtaccagccagataatcattggtctcctaccctgagaatgggctatgagtccactgcaaaaggaatttctctagtttttcaaaatcttgagtcacatggtgaagctcttcaggagcaactctgctatgttgaagagattgggacatgtcaagttaatatctgatgggcctccttccttcagtacgcaccatcacttccaactcttcgtaggcttctgtaggtctcatatgctcacttactttctcctcgggtttttctactttttcaggagacattttcactcatactgatgggaagatgacagcagtaatgccaatacacttaatgtgggcgctagaaataatccttttgggaaaacatctgagatacaacttagctgcagactatattctctgacctagatttgtatacaactgaaacagttctg

SEQ ID NO: 327870 - DNA, 556 bp, Homo Sapiens
tcagcaaaggaaaaggtacagagaattctaaaacaaagttaggcagcaaagatatgaataggtgttcatatctacccactaaagaaacacaaattatagctacatggtgatactatattccatctaatggactggcagatattgaaaaggaatgataatgtctggtattggcatgagaacaatgaatttatataatatatggtgtgagtgcaaatggatacaaactttctaaagggacattttcttaattatttaggcttaattcctggaagcagaattgactgtcaaacagattgcatcaaggcatttgctgctttgaagttgggttgaagggtacattcagactcagatccaattccactccttccatgacatcttacatgattttcttctgctcctgactcttcatatttcttaaagaaacaatttgccataaaggaaaaggcaaggactttgaaatcagacctggggctttccccctacttgggtaagcgatttggttctctgagccttggtttctacacctgtgaaatgggagttcataatacttgcctca

SEQ ID NO: 327871 - DNA, 1045 bp, Homo Sapiens
  misc_feature (483)..(512): n is a, c, g, or t
  misc_feature (675)..(675): n is a, c, g, or t
taccttcttgaagatcctactgagttattttagagtcttttttagagttgctctattattttaattttaactgcagtgatttcatgctgactttgtaggctggctttcctcatgtgattttccttatgaatttttgaaatttgtaggcttatcttgaatagcccatttttttctctctgcactcatctctccatatttaatagttctgtgtgttcttttgccagttcttccagagtccccagttctgaggccaaggatttactgaggataatcttgagggctcatacatcatgggtgatatcaggactatcacagattcagtcatgcatttgggggcagcttggctcagccactggtcataggctgtgccgaatcttctcagacccttaggcctgtagcttcctagaagccacagtcccagggagtgtttggcagtaggtctgtcttagtagctctgtcttagctgtcttccacaagacagannnnnnnnnnnnnnnnnnnnnnnnnnnnnntggttaggcagacagttaggaggggtccttggtaaaactccttcaaacagagaaatagcctgaaaaaatcaaagctacaggcacagatagagcagcctggggaaaaatttagctttagctgccagagataagggagcaaggccctaacaaagaagcctttggnttctttgggataatccagcgggctcccccaggaaaaagtttcctccccttttcagacatgtacatgatgggctccatgggaacttgcacagggagaggggcttacctaaaacatacccacagtttcataaacaagagaagctgtactttgtgcttacctaagacatacctgcagctgcacaggtaaggagagttacacagacagctactacacagttaagggaagttacacaaacagctacagagatgaaaggagttttttcttataaaagcttttggattcaactgtaaaagtggcaaccctctttcagcctcctctttgctgcggagagctttcttctttcaattattaaacttttactccaacctca

SEQ ID NO: 327872 - DNA, 663 bp, Homo Sapiens
gcagcacttttacttccacatccaaactccctgggtcctcacaacagccctgtgaggtaggtagggtaggaaggtttcagagatccccatttatagatgaggatgctgaggcacagagaggtgaagtgacttgtccaaggtcatacaaccagcagtgtagagggctcaaagccagcattcctccacttgaactcctgcgctccggccctctggcagttcccacatcctctctattctctctgtgtcccccaccctctcaactctcctgggtctgcagggaccctaaaggcagcctggcagctgagatttttcaggaatggcaactggggtaggcctggtcaactccagataggaactgaccctgaagagcatgaggccagctttgcttctccccatttcccagttggatggaaggcctagtaggtcccagggcaaggatggagctaggcatgattcatgaacgaatggtgataaaggtaggtgtaagcatatgtgtgtcctgcactaaagacaaaggctcccctaacccaaggccccaaggcagtgtttcaagtgctcacccccatgcctctctcatcccacagagccacagtgagtgtcctcagcagcaaaaggagccatagaaatagcctctctggcaatgagctgctccagtggacagct

SEQ ID NO: 327873 - DNA, 691 bp, Homo Sapiens
tgggatcatataaatagaagaacatttttcatcaagaaataaaaacagtttacagcctaaacagaacaatgtcttcataagcttgtggaaaaccctactgaaatctgaagacttccaatcccatccagtgcatctatagatgaacaacaggcttcaaacttcaatatccacaataagaaatagttttatatagcacacaacacatatttattattgaaaaagacatttcacaaaacaatatttatctttattacatgtgatgtaccattttctctattccattttttcaaatgttccatacctagtaaatttttgtgttctgtgaatcaatttaaacaaaaaggggaaggggggaaaacagacaaggcatactattaggttaagtgagaagcacccaacatgcatagaagaaaatcctacccaaggcaggaaacacaagccttagtcccagctttgcctgagactttgcaagcctggacatatgctcaggtttgtactcttaggaagcacaccacatcaggaaaacagaatgtaaggcaacatctgcacacctccactcctaacacctagtgttgcctgacacaaggggaaattcctgctcaggaaacaggatagtaaggcagacgctgactctgaagtaatctgcctaggttaaaatccaagcatgaccacttaaattcactatacgacc

SEQ ID NO: 327874 - DNA, 737 bp, Homo Sapiens
  misc_feature (56)..(56): n is a, c, g, or t
  misc_feature (267)..(275): n is a, c, g, or t
  misc_feature (366)..(366): n is a, c, g, or t
tctgtcctgctctgaggcccagtttggatctttactttctcattattcaaattcancaaaccatcaaatatgttaggccctatgctccatcctagagatagaaagataattacaaataagtatgtctggtccttcaagctctagtggggaagagaaaaatgaaagatctttaaataacaaatacatatgcattaatatatatgtgaaattatatattaaatgacttgataacttagcaattgagcaattaattggaaaggaagtagnnnnnnnnntcttggaaagatgacatttattctgagccttgaaggattacttagaagtccactagatgaaatggtaacagcacatcctagatagagggangcacatgtgtgagggccacattgtgttaaaaaatacatggtacactcattaaagggcaagtttctacttccccatccaaccaaatggtatggcacttgccctctggctataaacaactagaaaattaaagcatatgaaccaactatttcaggcattagaacaacaggtataggaccatgagctgtgagaaaaggtaagctctccaatcttcctacttggtaacaatttatggacaggggtatagggtaggggaggaacccaagcagaagtggaatgcagcagccatgctaagctgagaagacagactgggagtttggcaaggctaagacagctggaattggcaggtgagtaccagagaggagggagctgca

SEQ ID NO: 327875 - DNA, 485 bp, Homo Sapiens
  misc_feature (56)..(56): n is a, c, g, or t
  misc_feature (474)..(474): n is a, c, g, or t
aataaaataattccaccatataatattaaagccatatgtaatttgttattttaaangatcctttccatttttcctccttcccccactagagccttgaaggacccagacataccttatttgtaattatcctttcctatcctcctaggatggagcatagggccctaacatatttgatggtttgttgaatttgaataatgagaaagtaaagatccaaactgggcctcagagcaggacagaaatggaaatgcctactttagatagaaaaaacagtgtttggtttgaggcgggaagctatgatacagccaaggtgcaggcagctagggaaactcagttactcttagcttctaaacatcagttatatggctctgaataatgttggtcaaaagataatcatctcacaactttccaatgaccactagaaagttgaaattttaaagttctaaatgttttctgtaaaagtagtttttgtaatgnacattttttgt

SEQ ID NO: 327876 - DNA, 714 bp, Homo Sapiens
ggccgcttaattaatgctcatcagaaaaactagctatttcttaatttgaccaatttaccccaaaggaatagagacacttctgcatgaacatgccagccagtggttaggatgaacacaaatgaattaatctctcacccatgcctggcgacgggtgggctttgctgccccacttctctttgatccacctccggtagtcaatcacctcctgagttactttgatgattcttcctaaagtactgcaaagggacattgttggagatcaacagagtacaacaggtgtcagggagctgagaacccctctcgaacagctaccttatacccctaacagatcatctcgctaggtgaaggacagtaggaaaggagctaaaatacgttgacaaatatctctgacttttaatgattcagctcaagcatacccctgggatcgcagtacatctacctacagaagaccactgtgaaatgcagctccaagtaggggagcggggccttcccacccacgatgatcatacagtgctgacatttcacttcccactgcacggacgagaatggagacggtaccgagacgagtgccctacatggggcccagagctccgcctgaaaacaccgagcagacagcggctcaggaacacacagagctccagcaccaccagcacctgcagcggctgctgagccaggcctcgaaacctgtttattccatcatccaccacagaacag

SEQ ID NO: 327877 - DNA, 742 bp, Homo Sapiens
atttcggcacaggattggggtgggggttgggtaagggaatggtcaagactgagaaaggaatgaaatccattcaggaaatatcgacagggctacacgtgatgtccccaaactgctgctattgaagaacttcccaaaacttctttacaaagccctaaaggaaagtttgcatctatgaaaagccaataggtgagacatccaattgctgcatggaaattgatgtacattcaggggacggcaaaaatagctgtaaaatagtgaaaaagagcagtggttgtgctcttttctggccaatgatttacaaaaggaatctacttgactctgtccctggagtgaaatccttagggttggaacttgtgggaacattccaacttgctaagcagggtccactgggagggaagctctatctgggaactcacccccagcgcacacacatctcccccagggtcccaaggccccgcagcttcctcccccgaccaaaccccaagacctggatcccaggagacaacagtctccacagtgagagcaacattaagggcaaagccatggagaaatgtgggagaggccggcctcaaatctttccatttaacaaaccccagtgatgggtatggacagcatgcagggcttttggggcgcttccccccgctcctccatcaccctcagcctccacacttcaaagttcaagttcaaagctgttcaagtttcctaccagcaaagagccctaacttgcctctagagtaggcca

SEQ ID NO: 327878 - DNA, 729 bp, Homo Sapiens
atgggcaatgcagtctgcttgactgccccaggaagaaatccttgcaggctcctagatgtcctgaagactgcttggaaagggaatttgggaatcttttataaacagaatgtgatcccaaaagggatggttcagactctaggtgggcatacccattgcttcaagagatctttgcctctatatgatgggagcagctcagagctaggccccctcttgcccagatctgagttgatactgatgggaagaactacagtccaaaggaacacaatttctgaaactggaaaatgaatggataggaagtaactgacttggcagacacaaaaaggctcaattatcaaacaacagtggggaaagggaagaaccaacctggtttacatgagaaaatccttaagactctggaaattgggaggagggtaattcggttcaggaatttcccagaagtgaggctttcccaataagaaggaagggttgcagagttggttaagaagtgttaagattcctagttcctctttcctactccatacttgtaggaaaacctctcctttcctactgaggaaggcaactaagcttattatctggacagggaaaaaggcttgtggaccaggaggagcctggcaggcatgatcgaaggcagggtgccacactgaaaagatgagagttaaaccaagctatgtctgtggaaagtggagaccccacttgtacctccagtcctctccccccattctgtttcag

SEQ ID NO: 327879 - DNA, 472 bp, Homo Sapiens
  misc_feature (340)..(340): n is a, c, g, or t
  misc_feature (359)..(359): n is a, c, g, or t
  misc_feature (400)..(400): n is a, c, g, or t
  misc_feature (437)..(437): n is a, c, g, or t
  misc_feature (453)..(453): n is a, c, g, or t
tgacagtgcaagttgaaaatttattttactgttgtcaaagctgtgacttgctttgggaagaggtggtggtgcacacacatgagcatcccaaccccagcacgctgcagctcattcccactccttgcagagagtcatttcttggccatccctcaggcttagagtgtacacatggggcaatgcagtctgcttgactgccccgggaaggaaatccttgcaggctcctaggatgtcctgaaggactgcttgggaaaggggaatttgggggaatctttttataaacaggaatgtgatccccaaaaggggatggggttcagactctagggtggggcatacccattgntttcaagagatctttgccnctatatggatggggagcagcctcaggagctagggccccctnttgcccagatctgaggttgatacttatggggaagganctacagtccaaagggncaacaattttcttgaaact

SEQ ID NO: 327880 - DNA, 776 bp, Homo Sapiens
  misc_feature (34)..(34): n is a, c, g, or t
  misc_feature (76)..(101): n is a, c, g, or t
ataattgaagtgaagaggttgctaccatcccttnccagttctgctattctatcatgattctcttctgcctcctgannnnnnnnnnnnnnnnnnnnnnnnnnacaaaatggctgactaaaccttgtgtaaaaattgtcaaccaactgtagtattcatttatttccatgaagcaaataaactatatactcaatgctctatggttaactttatagcagtttctggttctattctgcttactattcaatgtatttactatcaaagagattttccagggaatttggtccagagtcttcaacaattcaaaaagaatggtagttccagaaggtatggacttattttatcacaatttcaaaattaaaaactacattttggtcaacacactctagaatttaatttttcacgaattagtcttaccaataagccttacccaattagcaaggtgttactaaaactttaattggagaaatctttccttactaaaggaaaatcctactcacaacaattttgtaaagatttgggaaagaataataaatatactaccaaatttatatttaatgtttattaaatatggcagagtgttcagttccctgtaactccctgtaatttcctgataccacagatgaagaaaggttagcctgttaccaatattattcaaggacatctttttgatctcagtgcactatacattttcaaaactagtatgacagccctgctatcataactctgtaaccagctttgtctaaccagccttggtttattttcaatctagcattttt

SEQ ID NO: 327881 - DNA, 914 bp, Homo Sapiens
  misc_feature (75)..(75): n is a, c, g, or t
  misc_feature (354)..(354): n is a, c, g, or t
catttaaatattaaagtaactttatttgaaaggaattttagaagcttgtgtgcagagaagttgtgaggacctggnggacaccaattatatgcttaaataaacacttgaacactactgcaaacacatagtatgaatattgtggacctgtgaatggttttttaaatctcacttcccctaaaaatggggatttaatattacttaatattcaagtaatttagcagacaacgatgcctttgataagaatagggaaaaaagccacacatttaatttcatcttcatccagtttgggcctaggggacgccacaaatcttacagggccaggttggatgttcgctttttcatggctccgtcgcntgggctaagcttgaggcagctacaggctctaggactggttgaaaggtcttgtgagtcagggcagagtatgttgcaaccattgctcccttaacaacatgtgacacatcatttctctttggctgattatttggcaactggtctctgtgagttatccatgagtgctttaatatttgttcagcagtataccgctgatgtgggtccatatgaagcatatgggaaagcaaatcctttgctccgtctgaaatattgtcccagtttccaccactcaaagcagaattttccattgcctatacgcagcagtatctcttcaggagtatcattggggccattagcaaatggagtgtagccagccaacattgtgtaaaaaaggactcctaaactcccagatatcacaagcagcatcatatccctgttgcataagaacctcaggtgcaacaaagtttgcagtgtagcatggagttaagagaagtccattttctcctcgaagttgttttgcaaacccaaaatcacatatcctgattgaatctgcactggctgattcatccatgtataaaatatta

SEQ ID NO: 327882 - DNA, 706 bp, Homo Sapiens
  misc_feature (610)..(621): n is a, c, g, or t
tcggcacagagattatttttcaaaaccatcctttctagttaaggggagcataaaggcatcagaaacccacttacagcatttcatttctgatatccctcaacacagaataaacaatgaaactgatttcagtttgaatggtctctgaaatatttcctttatgcttggcagccctatgcaaaaatttccgcctgttgcaaattaaaagtcttcgagttgcaaacccccctgaagaaaggttctgataatagggacgttgtcagacccttaactaaggccacacactgctggggagcctccgggaattaactttaatgtagttgtagggaagggagtcgttggcagggatgaggatccctgcttgactgctctctttcctgacgaggaagaaaaggacagtgatcaagcacagggtctcaaaggaggtcttaaatcaccagggaacatgaagaatgggacgtacacaggctgctggggaagcgggcacaaagcccctgaattgtagagcgacagataattcttgtacgaacacccagatgactgggaaccttttccttatggattaaacaggacccaagtgcactaggctaatgggaaatgctgaaatggagannnnnnnnnnnnggtccctatttttgtgctgtttatgatccgccagcaggaatatttcacggcatcaaagacatggccagaaagcaaaaagatgtat

SEQ ID NO: 327883 - DNA, 747 bp, Homo Sapiens
  misc_feature (133)..(133): n is a, c, g, or t
  misc_feature (305)..(358): n is a, c, g, or t
  misc_feature (558)..(568): n is a, c, g, or t
agcttatgactcatgttttagttgtgaacagaggctactaattagtattaactaactctctgctctattgcttaatatcttaaatgtattgaatgttgtttaatattatcactacggttgtctttatatttgnttttgcctatttatacttttgctttagctttctcttatgaagtgtatctcataagtaatgtgtattttttaatttgatgtaagatatttgatttttaaaatagagcttaaactatttaaattattgtaattgctgacatgtttggtcttgtttcaatcatcttgccctggcnnnnnnnnnnnnnnnnnnnnnnnnnnnnnnnnnnnnnnnnnnnnnnnnnnnnnnctttgttcttttcactttaatgatttgaatgacagaatagtatttcaaactcaaaaaatttaggctggatatggtggctcacgcctgtaatgccagcactttgggaggctgaggtgggtgggttgcttgagctcaggtgttcaggatcagcctgggcaacatggcaaaaccctgtctctattaataaaaaaaattgtgannnnnnnnnnnaaacgtttctaaaatgtaattggataagccatttttgatactcaagttattgatgaatctggaaaataactaactttgtaaccagggaaatgaatgccacttttacattctgttctgcttcccccctctttttttaattgattccagaattttataattttgcatccagttctcgtgcc

SEQ ID NO: 327884 - DNA, 379 bp, Homo Sapiens
  misc_feature (348)..(348): n is a, c, g, or t
atattattttgtgctgaccagttcatttaatctttacaacaaatctgggaggtgagccgcatttcaccagtgacggtaatggaggccctgtgtagctcagaaacttgccaaaagcaagcacaaggacccacacctattgccacaactagagggagctacaatttctagggactactggagtttaaaacagaatcgaggccctgtccgaacccgcggaagaatcactgataagtcagtctcctctgttcatgtttcataggttgaaacgtggataatcacatgcacccactgaggcccgttaagaaaagccgatgagagacaggagaaaatccaagtgccttgaacatncttgaaggccccttttgctcaacacccagtc

SEQ ID NO: 327885 - DNA, 523 bp, Homo Sapiens
actctttctaatacttctaatccagacttctaaacaacattctaatttgtgaaaaacagctttgaaacatgctgtgacaaagcacatggagaacggtagagctccacgtgtgatgccggccagcactgttactaatgctgtgtcctgctcgtgaagtaggaattgttttttcagaagctgcaattactttggtggcaagcagttctgaagggaaggaagaacaagggttcttccccgtgttaagcattgctacaggccaagcatgcactacggggcacttggtgcagtctgttcctaatactcgcagtatcccgcaaggtgtcagtgccctgtgcaatggacgtagaaactgaagcttagagaggtggacaagctgcccaggcatatgtagctagttagtggctaaacgtagattttaagctagatctgcctgagtcttaatgtctacataaaatcacattcttaaagaaagggtagcattattgatagttaaaagccttaccacgttcctaagtgattgcca

SEQ ID NO: 327886 - DNA, 280 bp, Homo Sapiens
ctgagccaccatgcccggccaacactaagcatcttttaaaattgtcttaaattttttattatggacattttcaaacatatattaaagtagagaataataaatggcatgaatccagtttcagcaattgtcaacatgtgagtaatcttgttttgcctatacttctatctgtctccatgctccctctccccacaatggcttattatgaagcaaatctcaaacttcatattatttcatctgtaaatgttactatctttattagttgatttaatcttgcggccgc

SEQ ID NO: 327887 - DNA, 662 bp, Homo Sapiens
ccaaaccctaacgattgtaccttaaggtttttgcttttggttactttaaacaagattgtatgttttcagacagatcacagactatataaaaataactcatttcacaaaaaaatattttaattatactctcacataacctatcttaaatttacaataggcattatttcctttaataaatcctaatggataaaatctctaactctaaactatacacgctatgttacagcaagtcttattttaactagcaaggtttttgggaataaaaaccttcacaatccctgatttctcactttttatattgtatctgcaagtcctttcatacattacttctgaacgagcatttttcaatgaaatccaagatgctaagaaatctagtaattactgaaaaatgctgtgatgccagtaaagcctaatcctaaggtaaacaaacgcacaagttccacatttaacttgctttgtaaaatgcaagttacaaatcatagcatataggttattattagtaaagaaaataattaaatcttaaaatgaaaaactgggaaatttgaattcagtagttcaatgcatatagtaagtaacctgctgtaatcttaagttttttacatgcttagacgcttagatattccaactcacttgcatttgatttttgataatgatcttgaatt

SEQ ID NO: 327888 - DNA, 783 bp, Homo Sapiens
  misc_feature (501)..(533): n is a, c, g, or t
  misc_feature (607)..(663): n is a, c, g, or t
tagatacatgagactttgcatttcatttattcaggactgcaacattttgaatatggatgattttgaactccctatttactatttactaagtgatgatgtacttttcaggcggctagccacctgcgttatgtcccattattaacgtaatccaggaagttgcttagagagcatagaattgtgtaacaagaatttcatctaggcaatagaaaccagtttattcctaacccaaacctagtgaccagaaaaagaggcctgtaactctggcagtccggaccagtagttgctgtttacttttccagtgatgcgagacaaactcttaacatttttatttaacttaaaaactaacattcactttgccagtcttgatagagggccagtgcctttggttgccatagatcctctgtaagcctccaattttgaataaaatacaaaggttttgaaatctgatttgtagtttctctgttgaaagtagaatttgaacttagagacccttgcatgcannnnnnnnnnnnnnnnnnnnnnnnnnnnnnnnnctataaagtctcatctgggtataatttgataatgtaataaccccccctccctttttttgagacagtctcattcnnnnnnnnnnnnnnnnnnnnnnnnnnnnnnnnnnnnnnnnnnnnnnnnnnnnnnnnntgggctcaggtgatcccttccaccacagcctcctgagtagctggtattatgggcacatgtcaccatgcatggctgatttctgtatttttttgtagagggagttttgctgtgttgcccagg

SEQ ID NO: 327889 - DNA, 918 bp, Homo Sapiens
  misc_feature (105)..(165): n is a, c, g, or t
  misc_feature (399)..(774): n is a, c, g, or t
tatgattatcttttgttttgtctcttcaagaactcttttcctacacctgaggctttaaaagatactgatggccaggactcactcagaccaattaaatcaggattnnnnnnnnnnnnnnnnnnnnnnnnnnnnnnnnnnnnnnnnnnnnnnnnnnnnnnnnnnnnngaagactcagactgtgagcttcttgagggtagaaattgtgactgcttgtttatacagctcaggactcaatgctggacaccgtggtgcttcataatcaccgggtgatttttgatgaatttaattcatctctccaagatcatctcaaattccatgttttctaagaatccttcacattattaccaatagtcttattctcagaatattttgccctataagtgtttcttaattgctgtnnnnnnnnnnnnnnnnnnnnnnnnnnnnnnnnnnnnnnnnnnnnnnnnnnnnnnnnnnnnnnnnnnnnnnnnnnnnnnnnnnnnnnnnnnnnnnnnnnnnnnnnnnnnnnnnnnnnnnnnnnnnnnnnnnnnnnnnnnnnnnnnnnnnnnnnnnnnnnnnnnnnnnnnnnnnnnnnnnnnnnnnnnnnnnnnnnnnnnnnnnnnnnnnnnnnnnnnnnnnnnnnnnnnnnnnnnnnnnnnnnnnnnnnnnnnnnnnnnnnnnnnnnnnnnnnnnnnnnnnnnnnnnnnnnnnnnnnnnnnnnnnnnnnnnnnnnnnnnnnnnnnnnnnnnnnnnnnnnnnnnnnnnnnnnnnnnnnnnnnnnnnnnnnnnnnnnnnattgatttaagtatttacaccttctctccccaatcaatttgcaaaactgttaggataaagaatgtttacgggaagcccttattgtctctttctcctgtttctatgaggagatttggctccaatctcggaaggaatattatcttt

SEQ ID NO: 327890 - DNA, 565 bp, Homo Sapiens
  misc_feature (424)..(457): n is a, c, g, or t
atgtggtggctagttgttaggggtagttcatgataactgggtgagcatagttctagaataatggtattattgatttgttggttttgtaagcataggaaacaccaaggtagaacaaattcaggacatctcatcacagggagccattacaattttgggaagtaacaaagcaagtactaacatctatggaatcaaaagttgtccaccctgggacccaaataaaggacaacatttacccttctaggagttttatcctactggtaaaaacccttttctttcatccacagactggtacaggttcacttccttctttggaagatatagaagagacttggatataaagctaaattaaaaaacatatctgacatacactttacatctatgacaaggcaaataacttttgttatttattaggcaatgatacggnnnnnnnnnnnnnnnnnnnnnnnnnnnnnnnnnnctagaatgaaatttcctctatttaaaaaatattgagcccttagataaacttctcttgacaaatattaagaatatacattacctttgccaacaatgggcatgcataatg

SEQ ID NO: 327891 - DNA, 760 bp, Homo Sapiens
  misc_feature (137)..(150): n is a, c, g, or t
  misc_feature (167)..(197): n is a, c, g, or t
  misc_feature (226)..(307): n is a, c, g, or t
tactgatgaaaatctaagagctggtttttctagcaaggacattttctttagaaccctctaaagaaaccccttagtcttcttactggaagactaagatataaagtatgaaaaggacaaaagaaagctgctcctaacannnnnnnnnnnnnnaagagatgggggtttcnnnnnnnnnnnnnnnnnnnnnnnnnnnnnnntattcccaagtgtactcacggtgcactannnnnnnnnnnnnnnnnnnnnnnnnnnnnnnnnnnnnnnnnnnnnnnnnnnnnnnnnnnnnnnnnnnnnnnnnnnnnnnnnncttctttttagctgcctattcacagccctgcagcttctccaggagtcctctgcagggcaccctcccccatgactctgggcagcagcatttgaaaacgactgcagatgatctccttggtgtctgccaccagcagtctccagggctaggccagatggaaaggaccacacagagtgtagaaaggactgagttggggcgcctacgggttatcgatgtcatcccgcagcacgttgagggtgtagtacacacggccccggaagtagaggcggtgaaggtgctcagtgaggtccttcctccagctcacatacagcaggttgcaggtgaactgatcaaagctcttcagctgtgcagtgggggaagcaaggggaagggagagatggcttcctgaaaatctcagctcaaagctcaaggctcgcaagagcctccgctgacccatcccagcccactctgactctg

SEQ ID NO: 327892 - DNA, 752 bp, Homo Sapiens
gaaattttcccggtctgcagggctactgagtaaagcctaaatgcattctgacatggtgtaatatgaaataaaaatgcttaatttaagaagtattatttattcttaacgtggtagctagtctccaagatggccccaacgatccccatctctggtattcatgccctgtaaagcacctttcatactgaatagaagttatttgctcaacaaacagaaaacactgtgtgtaacttttgaggctagattataaatgacattgtggctcagtctttatctctttacccttgttctggaaaaaggaagctgccacgttgtgagggcacttaagtaacaccaaaaacaggtctatgtggcaatggaatgaagcactctgctaaaagccagtgaaacactgaggactcctgcagtggcatgtaagtgagtcatcttagaagcttgtcctcctgctccagtgaagccttcggatcactgcaactataaccaaaatcttaaatatagccttataagagaatctaagatagaatcactcaggtaaattggctcctaaattcttgaacctcagaaactgttaagataaatgttcactgtttaccaccaagtggtaatttgttatacagcaataaatttatacttagctaatataaaaacaatttcataaaatattttggtttatgtttcttaagtattttttatctagataaacttatatattaacttagaaatacagacagttagaaagactacttttatataca

SEQ ID NO: 327893 - DNA, 830 bp, Homo Sapiens
  misc_feature (583)..(603): n is a, c, g, or t
gatgcacagtgtctggagtccctaaaatatttattggatgaattgattaaaacacatctgctcctgtgactccattgctctacaccttctgattgcttccttccctctccagcctccttccttgcctataaaatcaaggcccagcttcccagcatggtattcaaggtattccagggcttccgtcctgggcacccaacctttttttcagccccgatcttcctcacacacaccctcccttaacagccgggagcatgtgtgggaaacagggaggggagctctggggaggggctgggctcccaaagggtgccccgtgcttttgctgttcctggcctgggtggccctttcctaccccatctcccacctgtcagttcctatctttcactcagacatcacttcctccaagaagcattccagggtccttctcaggtccaattaatctctcaccctctctgcatccgtgacagcccttcctgggaatgccctccttgccacgccaccaactcctttagggcaattactcatctctgggcaccgtcctcccctcccccacccagtgtctcatcatgcctgggacatttcaggnnnnnnnnnnnnnnnnnnnnnaacttgagttgaagaaaagcatgtagaatagggagaattctaagaggaaaggttaagccctggggaacgggatgggacaatttcaccctgtcatcaggaagtgctcctaatagaagggcagggacagggtgtgtaaataaaccagttcaaattctcagagctcactgggcctgtggacctctccaagcacaatccatccagctcgtgccgctcgtgccgaattctgg

SEQ ID NO: 327894 - DNA, 748 bp, Homo Sapiens
  misc_feature (480)..(491): n is a, c, g, or t
  misc_feature (602)..(612): n is a, c, g, or t
aatgaatcttttcaaagctgcccgttgtgatactaatgagctcactgttttgtgctgttttctctccacaaggaaagacttgctttatcatctgtgagctaactcctgctgtacttttttcaggaagccatagccactcttgatctatacatctttttcagtctccgttatggaatatatgttttttattccttttattaagtttcgccttctttctctcaaagactctcagcaaccggctaacttcttttgaccccagagttagctcaacacaggacgagtggccaaaccaaaacaatccagaggcatatgacttaagaaagaaagatttcagaaagaattgcaaaaaaagaattgactggcttccagtgtttggggcttatttccaaaatgtttccaaagaggcaggattgaatttttccattattttggaatgtcttgtaggcctaaacttagtaatatttgaaaaacataacttcnnnnnnnnnnnnaaagaaagaactaccccagcaactaacacctatatagtatttactatatgtccaagactgttctgggcagcttacttctctgctgaaagtgccatactagtttaacaatcnnnnnnnnnnngtcccattatcttgtaagcataaaaatccagtatttttagttttgaagtgcttagaattttaaaaagcagggtattaaatttaattttcacctttaaagtttacatacatataattttgggactgttttttgccat

SEQ ID NO: 327895 - DNA, 790 bp, Homo Sapiens
ctctccttttatttttatatggatatcttcttttgaagtatttttatttcactttttctaacagcaatatagaaacaaataatcataaaaaataaaagtataaatcgtccattgattatgtaatagcacttggtattgctacagggtgtgggtcttgaactcggtcaggcatcgtcaagcctgcccaggccctccaggcctctttgatagctactgagcccctgaaggcatcaagacatgaccacgcatggcagtgtcggtggagagtttgcgttttacacccagcgatgcttggggatggcagagagatggatggataatgagtacaactgcaaacagcactgtacacatgtggtgagccaggaggctgggacggaggttaggccaatgttgctgctgactcatagacccacagagagcagggacttcacaaagctgaattaatgtggttagttgtgttcactgtgcaaagtaaggaagccagtcaacactggacgatgtttagaaaacatcgctgtccccctccacttctcatcttgggtcacctcctcatcccataataaagttctcttaggataaaccgagcaaaatagctcagacatttaacttatccccaaacatgtgtcttgatcttagtttccacccagagaatgaagaaagcaagcaagcactgggttacccaagcaactaaatcactcagttgcatccaacttaattggactgactacattcagctaaatctttccattttcgctgaacccaatggtttcgggttactgtaatgactgat

SEQ ID NO: 327896 - DNA, 753 bp, Homo Sapiens
taggttgaatctgtgggttccgactcagagggccagctgtatgtggatttctttttctttggcaactgcatattttaactttctgatgctgatattcagaatttttgacatttaaaaattaccgttgttagtgggaactggagatgtttgaagaatatagaacagaagattattctgttgcatgcagactgagatagcagagtctatcagataccctggttctctgataaaagaagtatcttgatttctggagaactagcagataaccccaccatgccacagagggtcttcatgtcaagttcatggtccgcaacctcagaggagccttgggcgggtcctcagacctctaaacatacacttgctgtgctcttcatttgtttcccacggtgattagtccaaatctctacctctctccccctaccccctacttcatccttatcctttaggcctttccttctcaacagatgatgtcatctcttatttcactgagcaaactgggtatcccaggaggagactccatccacttcctgcccccttgccaaaaatgtatcttgatttttccttcctctttacttcctggctgcctgccttcaaggaagtcaggtccctccctttctccaggattaatttctccagctcattcttgattttgtccctgtctctccagggagcttgcctccatgattagcttcatcctttgttccacttatgacagtgtccgctgtgtcgacttctttcattcagcttataaag

SEQ ID NO: 327897 - DNA, 716 bp, Homo Sapiens
  misc_feature (85)..(85): n is a, c, g, or t
  misc_feature (655)..(655): n is a, c, g, or t
  misc_feature (664)..(664): n is a, c, g, or t
acacttgaagttcctaggacacaagaagttggacgttaatgttgtcatgacaagacttcaaagctccaaggcctgtagagctganactctgcttttggagaagtaactgacagagtgtagcctgtcacagactaagtgttcagaatgtcaaactgttatgtttatatgtattttgaagtccactagttaaggtcagttactcacatggggtctgagaaagtgtaatgtaacattcccaagaggggaaggagttcaccccaagtactcacatatggagtttgtattggcattctccagagggacagaactaatgggatatatgtataagtggaaggaagtttattagggagaattggctcacctgatcacaagttgaagtctcacagtaggccgtctgcacgctgaggaagaaagaagccagtagtggcgcagtacaagtttgaaagtctcaaaaccagaagagccgacagtgctgccttcagtctgtggccaaaggcccaagagccccctggcaaaccactggcgtttaagtccaagtgtccaaatgctgaagaacttggattctgaagtccaagggcaggaggaagcatccaacatggggaaaaagaaggaagccagaaaacccagcaagcaaagttatcctaccttcttctgnctgctttgnttttgccgtgctggcagccaattggatgataccagccgacattgagggtggg

SEQ ID NO: 327898 - DNA, 681 bp, Homo Sapiens
  misc_feature (77)..(88): n is a, c, g, or t
ttttggggtgtgaaaggtctttcatccccaaccctctgaatggctaaaggcaggaagctgagcccatgaacacagannnnnnnnnnnnccctaagactgaaagctgagacccggagaggtaggggctcacaggggacagagagactgctggtgcaagggaggagctggcctttgggggtcagggcagtccgggagctccaggagacagggcccctgctcttgtgtttgcagttgtactgtgtccacctggcttgggggctggctcctggagcagcggctcagtgaataaacaaatgagtgcgtgtgtgccaaatctgggttcatgtctggtggtccccgtgagggaatgcagaggcaggaggacctggtggggtctcaggagctgccgtgctgggggttcctgccccacctctgggctgaagctcccagaaggcgagggaccggctcctccagggagcaactgtacaggtcaaggagtctgttcccagccccttccatggctcctcccagtaggggctacttggggaatttcaggtgtggtggcagccagagggaaggcgtttccgggccttgagaggagagctgttctccagagtgggactaggtctgctaatacagatgcagctcttcctgcaggagcttcctggcctctctcgatgatgtaatctaattagcctttct

SEQ ID NO: 327899 - DNA, 770 bp, Homo Sapiens
  misc_feature (633)..(670): n is a, c, g, or t
cttttttcaatgtaaccctttctaatgttttcttactgttgattgaaggacagataaaaggaaatattggataatattggagattagggaggtatatcaccaacagacatgatataccaaatcaaaagaattgttagatggctctggaaaaagaggaatatagcattcagacagctttctatgaatgtagactgtttcagttattcaaaggcctgtttacctggcctttatattcgtcaggttggctgtggtactagatacagtgttatgggaacttgccgcaaaccttatactgttgccctatacctattttctcttttctgtaccacctgatttcacttttgatcatgactttatttagttgatacatcaatttttcatggaattaagttttaaggcatattaagtatttttaagtcagctgtgcagttccccatgttttcatggtcagtattaagggtaaattaattttagtatttttttaactcagtatatgtagtatattatttaaatataatcataaaaatattgagatattttacattcttttttatatgaagtcatcaaaatctggtatgtattttacactttgcagcacatctgaatttggactagctgcatttcaagtccccnnnnnnnnnnnnnnnnnnnnnnnnnnnnnnnnnnnnnntcccatttctagatggatggtatgatggtgtgtcagaaaggaggaaataggcatcaggggccaggtgcagctgggtccaggttcctgagatagggctgat

SEQ ID NO: 327900 - DNA, 457 bp, Homo Sapiens
  misc_feature (103)..(111): n is a, c, g, or t
  misc_feature (166)..(166): n is a, c, g, or t
  misc_feature (430)..(430): n is a, c, g, or t
tgacacccgtgcctggacaggaacgtttattataacatcaaatttgttaacccccaaaagtttgcttataaaaaatgttaactattctcatgatttctagggnnnnnnnnntcaaactcactctttcagtagaggccaaaagaaatatgaatttcctcaacagacntttggggtctaggagtgcaacagatccgactcgggatcccagcatcatcatttactgcgagaatttcaaaaggtgacttagccactttatagcttcatttagccatatgtaaactagagacaaaaataataatgaaaacctcctagaatcactgtaaatattaagttagatattttatgtaaatgctgtgtccaacacttatcacatagtattcattcatcaataaatgttagttacttgttatacttgtttttactcttattnatttaaacatgatagcagcaattaact

SEQ ID NO: 327901 - DNA, 477 bp, Homo Sapiens
gctaccagagggcaaagacccacaaattctaaacagactgttggcactgagcttcaggacatcatttattctttccataatacaagaaaagaactaaacgtggagtctagcacccatctactctcagcacagccctggcccactacagcattcactgtgccccactctttttccacttattcctcactctctattcacacatcctttctcgggaatactcccaagactgtcacggatctgcttggtcttaacgcccgtagatgatgggattgaccatgggtgggaagagcagatagaaattggcgaggagaatgtggacgtgtggcgcagcacagcgggccacacggtgcatgactgaagagatgactgaaggtgtgtagaaggctaagatggcacctatgtgagagacacatgtcccaaatgctttgtagcgggcctcctgagaggagagttgtagaactgcctgaaggataaaga

SEQ ID NO: 327902 - DNA, 492 bp, Homo Sapiens
  misc_feature (44)..(44): n is a, c, g, or t
  misc_feature (135)..(397): n is a, c, g, or t
tgagaaagggtcttgctttgtcaccaggctggagtgcagtggcncatcttggctcactacagcttctgcctctcaggctcaagtgatcctcccacctcagcctcctaaatagctggtactacatgaacgcacaannnnnnnnnnnnnnnnnnnnnnnnnnnnnnnnnnnnnnnnnnnnnnnnnnnnnnnnnnnnnnnnnnnnnnnnnnnnnnnnnnnnnnnnnnnnnnnnnnnnnnnnnnnnnnnnnnnnnnnnnnnnnnnnnnnnnnnnnnnnnnnnnnnnnnnnnnnnnnnnnnnnnnnnnnnnnnnnnnnnnnnnnnnnnnnnnnnnnnnnnnnnnnnnnnnnnnnnnnnnnnnnnnnnnnnnnnnnnnnnnnnnnnnnnnnnnnnnnnnnnnnccatgagccactgtgcccggctgaaacctgctttttaaaaactcaatactgcacaaagattttgccatgtcagctcatacagatttattccactc

SEQ ID NO: 327903 - DNA, 863 bp, Homo Sapiens
  misc_feature (59)..(321): n is a, c, g, or t
gttcaagtgatcctcccacctcagcctcctaaatagctggtactacatgaacgcacaannnnnnnnnnnnnnnnnnnnnnnnnnnnnnnnnnnnnnnnnnnnnnnnnnnnnnnnnnnnnnnnnnnnnnnnnnnnnnnnnnnnnnnnnnnnnnnnnnnnnnnnnnnnnnnnnnnnnnnnnnnnnnnnnnnnnnnnnnnnnnnnnnnnnnnnnnnnnnnnnnnnnnnnnnnnnnnnnnnnnnnnnnnnnnnnnnnnnnnnnnnnnnnnnnnnnnnnnnnnnnnnnnnnnnnnnnnnnnnnnnnnnnnnnnnnnnnnnnnnnnnccatgagccactgtgcccggctgaaacctgctttttaaaaactcaatactgcacaaagattttgccatgtcagctcatacagatttattccactcttcatgtatggttgcagggagtccacagctcaggaactaccaattttatttaacccattcttttttagggccttaatgttgtcgtagatttttccactatccatattccaatgatacaaaaagattcttgtatacatacaatttccttttcatatgtgtgaatatctttctagggtaggtatctaggagagaagttctagactattagaggttttctgtattttacattttacaggtctcctggcatttaggatttatgtctgttattattactgacaaagataagagcttatgaggactggctggagaggtgatactctggcctagacagtacctgagcaagcccagaaaaccatcagataatctacaaactcactgaaattttattccttccttgtaaaatttaccaaggaaacatcatcatgatattttttagttagcacacat

SEQ ID NO: 327904 - DNA, 551 bp, Homo Sapiens
  misc_feature (463)..(463): n is a, c, g, or t
  misc_feature (480)..(480): n is a, c, g, or t
  misc_feature (487)..(487): n is a, c, g, or t
  misc_feature (506)..(506): n is a, c, g, or t
  misc_feature (513)..(513): n is a, c, g, or t
  misc_feature (522)..(522): n is a, c, g, or t
ttcccctgatccccccagacaggagcttcctctcccaccctacctgcctgcccttaagttgtgtcctattaaactggacacaaatctcaccggcttttagtctaataattgaatcatagctacacacagtgacaccagaatagctacttgtttttttatgttaccagtgagtaacttgtttatccttgtatgtagaaactaatttcaccatgatcacagatctgtgtaacatctctagtttgaatttccacacaattttaaaatgtctactagaaaacttacacctttttgttccaaggtgctcttcatctataaaaccgtgggcatacttcagtgttcttctgaggccaaattttgtgctcgtggggacaattttgtataacatacatttattttgtaaattcattctcccaaatttggaaggctttattaaagggtattctatttccactgggccttcccnttaacttggaattaaantttactncccagtggccgtgggggtncaggccnggctggcantccccagcccttgggggagggcccaggca

SEQ ID NO: 327905 - DNA, 683 bp, Homo Sapiens
ctattttgaggtctctgtgtggtatagtaattgagaaagaaagttgagaatgtactgtgttttataattggtgatcctgatggggcgggcagtgtggcgctccagagctgctgtgctgtggtgggcggaaggaggtttctcttttaatgatatatgctaaataaagaagcaaaggggaagtgctgtacaaatgctgtgattaaataactattagaatggagccagcccctccaccatgtgctggatttcatcgccacttgcccacgcagaagcttttctcctgaaattatcccccttgctctcaggcagcctctgtttttttcctctttactccattcattttccatcagcaagtaatatggccctcccattttttcatttaaaaatatcttcttttgactccatgtccccgtcagtccagtatctcgtttttctgctctatcccaaatgtgctacaaaagatgtatttagtttttacaatatatggtaaaagattatttcatccttcacaggattactttccactgaagcaggtagatgacctaagaaaaaatttaacggagcagatatctgaaactacttttatgaaccagtttgtcattgaggagtaaattggttatttggttgttagcttggctattcactcatattcactaggcagagagggcagattcttacagacc

SEQ ID NO: 327906 - DNA, 322 bp, Homo Sapiens
cacagggattacttccactggaaggatgaaataatcttttacccatatattgtaaaagattatttccatccttccacaggattactttcccactgaagcaggtagatgaccctaagaaaaaatttaacggagcagatatctgaaactacttttatgaaccagtttgtcattgaggagtaaattggttatttggttgttagcttggctattcactcatattcactaggcagagagggcagattcttacagacctgttacatgttagctgtattaaatgttgttcttaatttaggtagttgcatttgtatgagtttaattgttt

SEQ ID NO: 327907 - DNA, 751 bp, Homo Sapiens
gattttccaaagttagtgtttgtcaagcacataattccatccctagtactgttctagatgctgtatgtacattatttctaatcctcctgtagtctctgggaagtaggtattactgagctcattttgcccatgagaaactgagtctgagaaaggttaaatatctagtccgcgtaaccatttatgtatttgtactggttaaacataatcatttatgcatttgtacaaccagtgagtgccttccaagattccaacccaactttgagggaatcccccaaagcatccaccacacaggggccctgtgggcttccaaatctttgctttccatggaactttggattactcagggcacatttggcatggggctcttggcttctgtttgggaatggccctcattcccttggcccgttttcacaggtgcaggactcgtccttcagactttggccaattttcctcactcctgtgttctcacacagcccatctctgcctctttttgctattgactgcatggtgttgaaaacatctgtttctttttctgctccacaccttgaccccagagtgggagcctccatgggccagggccctgctatatctgtcttatctatttccagctcctagacaagtgctcagcatccagtggggtctaggaaactatttgtcagatgaataaatgaaaactttcttttaagggccaacagtagcaatgtgaacattagattaaatgagggaaaaatatttgcagaccacctatctg

SEQ ID NO: 327908 - DNA, 857 bp, Homo Sapiens
  misc_feature (631)..(631): n is a, c, g, or t
taactttggcaaagagttttaatggcaaagttggctgcagcgacaatgccactcggggtggggccggaagccatggtggggaaggaagggtcagcgggcggcagggcagggccgggtccctgaagaagcagcgagcgaggctcagcgggcagtggcgggcaggcaggcgctactacatgatggagcaggcggacagtgggttccgcacgtggcaggtgcacgcggccccacagtactgccggaaggtctggtagcagctgccctcgggctcagccccccactgacccccggatggggccgtcagcgcctcaggcggcaggcggctcaggatggacgtgttgacagccagcgcggccaggccgtagtcggtgaagagcacagtctcacggcggcaggtggggcaggagatgaacttgtacttggggcaggactcgtagagaatctgcaggcactgctcacacacagagtgcaggcaggacagcacgcggggcctccgctgggtgacattgtaggagtgcccacaggtggggcactccaaggggctcgcctgccgccgccgaagaagccgccgaggccgaggggccaggccgaatcacgtactgattcacaatgacctcatcctctggggccnacgcggggaaagccccagctccgaagcctttccttacggggcccgccgtggcagtggcggggtaatggggtgccccttccaaggcaggcatgtcccccccacaggcctggttgacaatgatctctgtgtctgagggccaggcacgcttgggtgccagagttggggtgggccggggagcaggcgggaagcagggggcagccggtagctcagggaacttttcaggatg

SEQ ID NO: 327909 - DNA, 698 bp, Homo Sapiens
ttaagaaaaaactcttaaatttatttttcaaaaatgtgattatggcaacaaataaactaatatgcagtccagttcaccctactcacagtgaaatcatagggtcagtgaaaaagacgcagtcctcatgtataaagaatatttaaaatgtcggttgtatcaagaccttctattattgaacactgtatggcatcttgccttgtaaagagcaaacacagcccttataaatcctttaaaccaatccagcattaacaggagtaaaatttacagtaactacttttgaaagctgtaaaattaaagcacctatttaaattaagatcaggaatctatgaggttattattcataagagctggatgaaactaaatattgcatttctaaggaaaaaattataatcatgcactttatataacttacaaggcaaatgggatactatgaaaaatgcccttcatagcacatttaagcctgaatttaagtaatactcaacgagaaagaaacaggctctgttacggcgctggcggagacataaaaacacaaaggtgtcactgctcagggcagcccttcctgtctatttttagaggtctaagactccagccttaaatagttttgatgataacgcttgtggcataactcagcgtgtaagacatagtctgggaggaaaccggttcttttcctgctgtgtaacctcattcactggtttttc

SEQ ID NO: 327910 - DNA, 655 bp, Homo Sapiens
cagccacatcaatttttaagtagatatatgcctaacggcattccaaggtcaaataaatatctaggattatcttgctgtaccgacaccttgcacttaacattgtgatgaaataatccattgttaattttttgatgccttccttctatccctgcatttcagagtgaaaagataaaacaatttcttactgtgtacatgatgattgagtactgacaggtaacatgacctggggaagaagtcacttgacattagctaacaatgtcagagacagattaagaagtgaagactcccgattgcttcccattaaaaataataattatgaccaggtatggtgacatgtacctgtagtcccagctatgtgggaggctgagctggaaacattgcctagagttccatagttgcagtatactatcattacatgtgtgaatagccactgcactccagcatgagcaacacagcaagatccctctctgccggacccgccactcccaaaatagaagactctatctcttaaaaaataaatattattaggttttatttagaaacttttatttagaaaatcttataatacaaaaacacacttgagaggcatttgagattattgaccatacctccttaaatctattaatccaaactactataatttctactatacttc

SEQ ID NO: 327911 - DNA, 712 bp, Homo Sapiens
  misc_feature (672)..(672): n is a, c, g, or t
aaaatgttggcagtatttctgattaatgtgggaagaaaagctctattcattgactgatttatttgaaatcagatggggtcagttaaaaaatatttaatttgttctcttgaaacactgaacccaaaagaaatgaatctgaacttaaataataatctttgggcaaaaattgcacacaattttgattgctttcctaagtgtcatgtaaacaccaaaacattaagaaagagcttctaatgataggaggattgatttccgattcactaaaacgtcagccttaatatcttgcttctacctctgatgccagatgttcgtacctaattaagtactttaaaatggttaaaatagctcattttctgaagcagataaatattccgtaacattcttgtttatattatttgtattttttttgtagtttaaagataaacttgtaaagtcaagtaatacaactcatacaagttgtaagtcggtgaagtctaaatttaatgatacaaataaatacaaatttgtagaaattatttatatttaagtatttttatcataaaaaaatcacagttattttaagaagcaagcattccttgaatatgtcttctaaaaaaatcctatctgccaagaaacttaaagttaactgtttgttttagtgacaaatggggaaaaaatctgaaatgatggtgntttatttactcataggtgttttaagtctctggaaatgtac

SEQ ID NO: 327912 - DNA, 445 bp, Homo Sapiens
  misc_feature (306)..(306): n is a, c, g, or t
  misc_feature (343)..(343): n is a, c, g, or t
  misc_feature (362)..(362): n is a, c, g, or t
  misc_feature (405)..(405): n is a, c, g, or t
  misc_feature (426)..(426): n is a, c, g, or t
tggctttttgatactattggagatgcctgatggttggtttcctgagaaaggaactcagataagacaaatataactttctcgaatttcaagactaggagagttaatttcgacgtttattccaaagaaatcataaacatcagttctgtggcacagttgagccactttcagaaggatataactcaccatcctccctgtgtattcactatagatcttgggggttagcagcggggccatttactgttgtgcaggcctgtgggattccagccggagaagagtcaggcttcccacaccagcaagttatacaantaattaacattcagcaagtgcccactctgcactaggnacatctccaaggcactttncactgattttcttcatttatccacaacagtccctccaaggatntcttattattattcccctttnacttggtgttgggggcagg

SEQ ID NO: 327913 - DNA, 401 bp, Homo Sapiens
  misc_feature (352)..(352): n is a, c, g, or t
  misc_feature (365)..(365): n is a, c, g, or t
  misc_feature (376)..(376): n is a, c, g, or t
  misc_feature (388)..(388): n is a, c, g, or t
agccacaattaaatattttaatataaaaatttgttaataagtttaaaaagttaaaagtgcaaggacaacactttgaggaacggagagtgtggtttctatatggaaaatacctgactaacccaagtatcacatttttgagagaatatatgcatttcttagtaaagaataaccactgaaataacttatttaggttatccttttttgcggggggcgaccataagctttattgggctggaaagttctagggagccgggtctgctagggactggggtgttcctgggctgatcacccccagggcctaaggctccccggttttcgtctgggcccttctgtagcatgttgtaggttacanccaacctgatcanagtggattttncctgggtgcttngctcagaattttg

SEQ ID NO: 327914 - DNA, 805 bp, Homo Sapiens
  misc_feature (85)..(85): n is a, c, g, or t
  misc_feature (243)..(243): n is a, c, g, or t
  misc_feature (251)..(251): n is a, c, g, or t
tgctgaatggtacgcaaaaaaaccccaaaccaaaccaggaaagcctaagtatgaactaccttctcatctttgctttccctcgaancttaacgacttagacagaaagttggagtctatgtacaatgtgggataacagagttattggatctatgtatcagctttctctgtttgacattcaactgtaaacaacagacaactcacctgatttggattagtttacctaaagcatcaggcaaaatacanccaggttngctgatttctttttcttgggaaattacattggttcttctgaacactttctcgtgacaccacgcagaaagaggcacttataacttaagagagcaaggtacctctcagaccaccaggcctgcagatcgtccagcgcaaagaagggtcaacttactgcaagatgggagagaagatgccttgtggccaggaagccgaaaccctcccaaacacaattctcccagttacacaatccacaaatgatcttaagagctgttgaaagcaaaggaccagtgaacaatcctcctatgatgagtggttcagccacaaaagagaaatgtgttaatcagagagaattttttaaaaaattcgaatgccactgtcagcattcttttcacataaaattctgtcaaagaccacaatttacagaaaagatcaaagagatgtagagaaaacaaatatttaaattatgattgatgagacagaatgatacaaggtaggttaaaacgaggctaagatacaatggaatctaaacatcctaaaggcccggagccctgcagcctcttccccccagttcctg

SEQ ID NO: 327915 - DNA, 778 bp, Homo Sapiens
  misc_feature (175)..(185): n is a, c, g, or t
  misc_feature (714)..(714): n is a, c, g, or t
gttgttgttgttaaagggttcaggggcaggaaaaaacagtagccacctcttgagaatgggtgaagattatattagataacccatataaaaggccaaggccagtgactgtcataatgagtcatctataaaccttagctataggattgttgctaaaatcaaatgagatgtgagagtnnnnnnnnnnntcacacaaattatgaaataaaagccggactaactgtggccagaaacaaagttaaccaccgccccccgctcccaaaacgattcccaccttggagagaagcctccaatttagtaacatccacatggggtctataaatacgatgtctacttttgtaaaaaccactgaccttgaaagcttcctcaccattaagtgagatagaccaagaccataaaaccatctaagaggaaaggaaatgcaaaaaggaccaatccaattacacatttcggttattggaaaagggtttctcccaaactcaaaatctgtgatttttcactaccagggtaaatggatgagatgacatcaaggtcttcaagtctgcgggttgaggtaagagttgtggagagggatctgcttagcacagggaaggaaagctgcagagaaaaccacagagaagctgcagaaaggagaagccctccagtagctctgcatgcccctctgacacgagctatcacaatctcttcaccgctattttaggcccaagaccccctccnccccgcctcccacgtgtgaccagagtagctgcttctccaccccaacagctctggattgggagcc

SEQ ID NO: 327916 - DNA, 449 bp, Homo Sapiens
ataagtacagtgccaccctggggtctcttgggggccatcttaaaattctgcctatcacaataagataatagaacagtaattataattacagcataatacataatttcataattgaaattacataagtaatttcagtgtgatgagtttaaaagtgtttgttaggaattttctagtggcaaatatcagaaacccaacttaagcacctttaggcaaacagggcaaagtatttgaaagatgtcgtgtatttggaaggaagtgtgaataaccacagtgctagaacgagatacttagggatacagaaacaaccaaaccaaggcctagccggtagccatgactcactttctctctctcctatttttttcttatccctcagttttactctttcgtattcttcctgttacatggcacgtacacataaacatgctaacaaactctgtagaacagtttct

SEQ ID NO: 327917 - DNA, 403 bp, Homo Sapiens
aagaaactgttctacagagtttgttagcatgtttatgtgtacgtgccatgtaacaggaagaatacgaaagagtaaaactgagggataagaaaaaaataggagagagagaaagtgagtcatggctaccggctaggccttggtttggttgtttctgtatccctaagtatctcgttctagcactgtggttattcacacttcttccaaatacacgacatctttcaaatactttgccctgtttgcctaaaggtgcttaagttggggtttctgatatttgccactaggaaaattcctaacaaacacttttaaaacttcattcacactggaaatttacttatgttaattttcaattatgggaatttatggtatttatggctgttaattattaatttaccggtttctattt

SEQ ID NO: 327918 - DNA, 791 bp, Homo Sapiens
  misc_feature (89)..(89): n is a, c, g, or t
  misc_feature (435)..(435): n is a, c, g, or t
aaaccattccaaatttttagattgtgcaggccatttttttaaggttacttagatatcgattttattttcttgaccccaaaatgagaaancacggggaattctcaaaagctttttacaggctgctattacgagaagagaagccaaaccaaccatgtattaggtcatgcacttgaagtgcataaataagccctatgaaggtcaccaaacagggtgaaaaccactagttctcgttaccttggccacctctaaattcctgcctgttagacgtgtttggttgaagtggacacagaaagcgggtttccgagcccgtggttgaaagatctcaatttgacttgggtcctcaaggcgtccttgtggtaaagggagataggaaggctgaaattctggtctcctccccatggctccctctcacggttccggaagaaaaagcaggtnactggggccttctccttactcccaaagcagatgtttcctacctggtattcggatatgcggaagtcagaagctttaaatctctattgattggcagcttcctgaaatacagagtcagagagcgtgtccaccacgtcctgagtttggtaccaacccaggtgctgatggaaattccaagtagggagaaaacgtcctcttcggagaggcagggtgtcagcgcaaagaggttattttcttttgtgggtgtgtattatttgcacatatcaggacttttgtttcagggtgttctagaaacattgatctctccagcaaagttctgcgtgtccttcttggttgggaagggagcggagaggaaggag

SEQ ID NO: 327919 - DNA, 855 bp, Homo Sapiens
  misc_feature (593)..(763): n is a, c, g, or t
agcaaataaagttaatgatttatgacatgacactggtcacatctggactccaggtcctaaaaatgagttgaagaccatacaatcacaatacagaaaaagacttgaggatccatctaatcccattgatccttaggtttgattcagtccacaaaaactatcaatccatggcaaaaactgaaaaataaagacaatactataagtttttcccaattaaagaactgtcctttattctgagattatattagaggagagggtggtgtgagaaattaaagataataaagagtagttgttcagaattttttcccctaattgtccattcttaaaattgtttttgaaaagttattggtctgtggaacccaaaagtcttggaacatttgtccatacctccctcattgtttgaatagggtacatatattaatgattcctgataactaggaaaagttatttttatcaggggtaagaggaggggtagaaaatttactttctagtatatcacttttgggatctatggctgttaaaaattgttttcattgttatttattcccattttattttattgaggctttttggaagttactagaaattatggcatnnnnnnnnnnnnnnnnnnnnnnnnnnnnnnnnnnnnnnnnnnnnnnnnnnnnnnnnnnnnnnnnnnnnnnnnnnnnnnnnnnnnnnnnnnnnnnnnnnnnnnnnnnnnnnnnnnnnnnnnnnnnnnnnnnnnnnnnnnnnnnnnnnnnnnnnnnnnnnnnnnnnnnnnnnntgcttgagcctgggaagtcaaggctgcagtgagttgttgagccatgattgcaccattgccctgcagcctaggcaacattgtgaaacctatca

SEQ ID NO: 327920 - DNA, 787 bp, Homo Sapiens
  misc_feature (37)..(37): n is a, c, g, or t
catgcaggttgttattttcccttttctcagctagganccctgcaaaggccccatgataaaagaagctgaggtcaatgaaggcgttttcaagaccttggtcttaaaaatggtgatggcagaagcttcagattgctccactgtccttgtctaactctctgccgttgtctttcagtttccttgtgttctcctcagagtctgtgcattgctacactttcatctttcatccagagccatcatcctggttagaaaggattgtgtggggcagataaaatacctgtgtgccccttcatcttggaccctcagatgatcaccttgcagagggcactcctgctttgtttccatcacaaacatggtattagaactggaaagtatgtgtagcttgttatagaatttatcttaattatgttatattggatgaaattagaattagtaagtgacactagaaatttagttgaggacatatctaagcaaacgtgttgatggtgtgtcttcatttctccctgcttattatagataaagtgagaggagagaggtaaattaaagaggaaactattgaccaatgtggaatcaggtattttaaaaataaaggaggttttcacatcttctggaaaccacattaaattaagcaaattaaggaactttaagacatttttctgcattctagagacagaaaatgaaaattctgcagcagatcattttgccaaataggcagctttaaactggtttgtaatttgacataaatattcaaagaaaaaatcccaggtgcaaataagaaattataaaattt

SEQ ID NO: 327921 - DNA, 773 bp, Homo Sapiens
gctgactgtcccagagttatctttgactttgtcttggctgtttccatctcctttaaatctgtgatttcttccagtttccttccaatagattcctgtttggcttaaagtagtcatgcatggctgctattgcttacaatcaaaagtactttatatatattagtaaccttaaacggtctcctttgagttcttatcaatgaatcattagtctgtatgtgggagtgtatctttgaatatatttgtcaagaaagctaagcaactattaaatatgacatctgtgtattttttaagttccacaggtaattctttctggttttgggaactactgccataaaatgcttaggtatagagtctaggccttttacattaattcactgactttgattaaaatgttttctctgatttcttatcagtttctttagatattcactcattgtagagactgtatgtgtccactgatgtcataaacagaagtatgactcctcttcccaccacctttctcaactactaattaaaaaacttctgaggctgaactgatagccccaaatggaaattacctgctatggttggtttgtccccaccaaagctcatgttaaaatttgatccctggtatggtggtgttgggaggtgaggcctaatgttggggtcatgagggcagatccctcatgaatagattagtgccatcccttgggagtgagtgaattcttgctctgttcctaaaagctggttgtttaaagagcctggcaccttccctccccttcccttttgcttccttt

SEQ ID NO: 327922 - DNA, 457 bp, Homo Sapiens
ccttttaacattaaatcaactgaactttgaattaaaaatgttttcctcctgaatttccttaatccagtttcctttagaatattccactccattgttagagactgtaatgtgtcccactgatgtccataaacagaagtatgactcctcttcccaccacctttctcaactactaattaaaaaacttctgaggctgaactgatagccccaaatggaaattacctgctatggttggtttgtccccaccaaagctcatgttaaaatttgatccctggtatggtggtgttgggaggtgaggcctaatgttggggtcatgagggcagatccctcatgaatagattagtgccatcccttgggagtgagtgaattcttgctctgttcctaaaagctggttgtttaaagagcctggcaccttccctccccttcccttttgcttcctttcttgagatgctgtgccgaa

SEQ ID NO: 327923 - DNA, 482 bp, Homo Sapiens
  misc_feature (23)..(23): n is a, c, g, or t
  misc_feature (36)..(36): n is a, c, g, or t
agggtactaatatatataaagtncttttgattgtangaatagcggccatgcatgcctactttaagccaaacagggaatcctattggagggaaactggaagaaatcacagatttaaaggagatggaaacagcccaagacaaagtccaaagataactctgggacagtcagcagccttgggctccatataccttcaccctaaagttttaatataacttaactcccaccagtcctaggagagagaaatgcccacccaccttccaggtcagccagacttagtaaggatcaaataaagcaaacagttttggagaccctcccctgggtatcatggaatcattctcagagcaaaagcaattttgaggaaggccatcaccataaaaattgtcaactgctagcacagttataagcaaagtatttgttttctaaataatttgcctatacgttgtcttgcatgattagtataagagcaaatcagagcataagaa

SEQ ID NO: 327924 - DNA, 763 bp, Homo Sapiens
tgtaaaactttatctttgtacaaacacccatgaggacatatggattggttgttgtttttttaagagctgtctctgaccagaaatgtgccatccctggtttatctttctaagagcagcttctgcctctggtcgggtaatataagaaacgtaccactcttcatttaattaattctcttcctccgcgggggatgggggccgaggtttgtttggaagtggcaaggggaagtttctgccttcggctctgataggtggtctgttgctagggccttgagagaagtatggtggcagggaggcactctgtggaaaactgctgttactttctgagaatgctccaggcatgtgagaggatgggagagggttcatgggacttggcttagtagatcttgaagggaaagtgttggagctcataggaagtagtgctggctggggcaaaggtctttgatgcacatcatcttcatcattctctcttctgtctggtccccatccatgctttggcacagggtggcttcttccctggcagggggctgctcctttcatgtctttccgtggtcggtggtaaaggaggcttttgaatcttgggtaaatgctccccgagtgaccttcccgctggaatcgagggcttgtcagaaaatggtggtttctttcctagtgtgaagggttctctatcaaacggagctaatgaacgatcttaggggaggtttcgtgcttctgtctattgaaggagcagggagctttgccgttttgtggtttctgcttctgctgc

SEQ ID NO: 327925 - DNA, 1123 bp, Homo Sapiens
  misc_feature (144)..(169): n is a, c, g, or t
  misc_feature (456)..(456): n is a, c, g, or t
  misc_feature (465)..(465): n is a, c, g, or t
  misc_feature (485)..(485): n is a, c, g, or t
  misc_feature (916)..(962): n is a, c, g, or t
ctttttaaatttaaagatgggggtcttggtaggttgcccaggctgaatttgagctcctggggtcaagcaatctttccacttcagcctcctgagtagctgggactataggagtacaagtggacaccactgcaccaggctgaaagnnnnnnnnnnnnnnnnnnnnnnnnnnaactcagagagtatctgccacccttccaatgggtttgatgtgaaattcaaccatttcataatctacctactggggaatctaagagaatccattaggggactctttattagcttgtgattttctgtaggatataaatttccctaccatttgccactcctcgcacttcagttcatgtttgtggtgacggcaaacagggcaaaacaaatttgttaagtaatttttaactccccaataggtgtctcatcttcttttcttagctatgcctcgaaccaattcactagtctttnccgatagtncaaagaaaataagggatgancattatggcaagagtgtaatgaaatcactcaatttttctgtattcacttcatggtaaaatatgaaaactgtctaaataatttacattgcaatttttaaaacttttgattatgggtattttcaaacacacaaaagtaaaaggaatggtataagaaaccatcatctattaatcactttagcttcaacaatgatcattaatttagctattcttttgcaccatactcctcaaacatattttatattttatttgctataatatattaagacaaattcaggacagcatatcaatttcacccatcaatatttcagcaggtatctcaaataaatatttctttattaacataagacaaatactaactcataacaaatattaatccccaaactaacaatgtgtttacacttctttatttgtatatatagttgacattcttnnnnnnnnnnnnnnnnnnnnnnnnnnnnnnnnnnnnnnnnnnnnnnncacgtgtactcctgtcatttttttctgagccccttgattaaatatccaatctggtttacagtttacactttaggccgagccagtagttaaatgtcttttcaggtataatggggttgcccatggataaaatgatctcttctgcttctacagataaaaagtca

SEQ ID NO: 327926 - DNA, 735 bp, Homo Sapiens
  misc_feature (312)..(312): n is a, c, g, or t
  misc_feature (579)..(590): n is a, c, g, or t
catatataacaccattttgttctcattcctcataattttatgttcatatttcatccagttttaatgttgaaagtatgcagaacaagacagcttgttcaacaagtggctgttttcctactttatgcccttctctgaaagaatgtacaactgtgggttattccttgaacttctgtgtctttcagcctattccagagccaaaaggaggtcggcttatccagggttgaaggctactgggattgcggtggggagacaaggagcctacaataggatgaggacgtacattctgacatcttctgtgaagctggaacctgnagaggatatagtccgagttgtctctgcagggtgtgtgggcttttttctcgctgccctgaacttgatacaggcataggcattgatgacattttggtctaacttccttaactttcaaagagctttattcttattcattggccaactgaacaattacttacaaaagtcagtactataactttttcctggtagaaaactttgtttctagttgtgcaactttggagggagcactatggatgcagatgattttatctatctttaaagttatcnnnnnnnnnnnngctgataaataccacagattattcagtaaatggctaaaagttctacttacagtttcttacaaatgttgccagcatagttggaattgctttccttagtattttttgaggaataatgtttacaaagatacttctcagtgtataggaa

SEQ ID NO: 327927 - DNA, 1110 bp, Homo Sapiens
  misc_feature (250)..(250): n is a, c, g, or t
ttgagtaggacggttaaaacaattataaaatttcctacttgagctcaggtcccttagttgggtgggaaatgagaggaaacactgttctcttttacagaacatatcccatgtgaagcttttctgacccctgatgcgaactttgaggcaggaattgtattatgaccttgaaccttctattgctttacactgagagagattcgaggatgcggcccctccccttccggtctgagcagcacttccctttcccgtntgcctaatcagctgggcattttaacccactgcatccacagagacacatatggcatgggaagagaaattactccaataatttcactcatactttccgggcactggcctggaaaagtccagttgaaaaaagcgtgggtaaaaatatctctaccattgtgcagaagtcagacattttggtggtatgaaaatgcactaaaaaagaaaacgattccaccttcctttgccttgctgttgtacgaatcccatgatttcactacttaaattacattgcaaggagaagaaaaagcgtggcccaaagaatttcttttgtcttcagacatgtgttagttgctctgtagagtccccctcagacaaaattaattgcacattcctcagcattcacaaagcattctgttccttccttgattatgtggcttattgcctctgttgtacaatggtgtcattcatccttacactattagactagtcccgggtttccatacagagtaatgactcaacataggtatactgaataaagaaaagagttgaaggaaaaaggaaagttttactctgatcttcctgagggaaggagagagccttagatgattttaatctcctaagaaacaattgaatgtctaaaatcagacattcaatatggaggaatgatctttatttcctcactcttcattcttaaagaaaggctcaaattactgtttaggtaacgtttctgtattccaagagaggggtactttctttttaaaacttggcatttcttttttggtttgcagtaaaacacgctgttggattttagggggctggttcaaatgaggaaagtggtttcttttgactaacccagtttcctgaccttgtggttgtttattc

SEQ ID NO: 327928 - DNA, 730 bp, Homo Sapiens
  misc_feature (311)..(311): n is a, c, g, or t
agcaatttacatcaagaggcttttctttaagtctgatttaagtctttccatctttaatttaaatccatttctttttactctgaccccagtgactgtcgttgagtgtgtatttgcccgacttgccgtgccagattggtaggcagtggtttggaatcttcattttaaaatcctgtttttctctctccaatacccttcactgcttggtaagtttttatacttctcaatgagacccagagtcttgtgacctaccatttgcctccttcatgatgaaacaactcacaagttggtagatagcctccagttggcagaantcctatgtataatgtggtctttaaaacttgaagagtttgaaggtattatacgcctggagcagtaagtttttatggctataccttggtaataagacatttgaataacttggcttagcggctttggtaattaactgtgatttttggaatccacctcccctgctgtcagcttgaatcttcattttagtaacacactattactaacactaaacgcttattacatgtgtgtttcaagacaagcgtgagggagttgctcaccctggggtccaaatgaagcagtcagtggcaacccatgtgtagtggggaatggccagaaatctgccggggccacttggtgggctgccttgctcttgattttcagcaggaagctggtggaagctggggttgggcatctgtctctgctcaacttctcagtcagaaag

SEQ ID NO: 327929 - DNA, 971 bp, Homo Sapiens
ttaggcacacatttccattctttaagttacttcaaaagtctgggagctgtggcttgtccctgggcaagagggaacagaaagaggcaaccagtggctcccaaatgcacccctggatgtgcagaagctgtgtcagctgcttggttgtgattttgacctaacacagagctgcccagaccaggggtgaacaagtgatgtcagaagtttcaagccttgtgttgaatagcactgatgttatttaggtttagtctttaagaaaaaggctccgctggcactcaaaagcccctgttttcaaccacaaaagccctgagtgtcaaaggaaatcatgtgctagccactaacactcaactgtggattttcctgacggctagactatttttatgcatgtagtattggctacagtctttggagccaaaggttttactgccatgcaatttcataagaaagctcaagcatcgatttgacattagttaacagatcatccccagctccctctatggggtgaggccaagggggacccagaggacaaccttgggggtattctactcccaagaggctgcagctgagggtgggggctgcagatggagttagataggcggataatccacagagctggaggtggttaaggcagtttagctgggagaagggagaaggctcaacagtaaagcaccctgggttgaaatccctcctctacagatcctatcactctaagcaaactgctgggtctctcagggaccctacttcctgcctgtagaaggggggtgatggtggctgttgacagatcctggtgagaattatcctaaaaagttatgtaaagcccttaccactgtgcctggcacacacagtagtgctccacagatacttgtatgtatgtaatgaatgttaaaagcagtattagaagtgctggactaaagacacattcactcgtgccgaattcttggcctcgagggccaaattccctatagtgagtcgta

SEQ ID NO: 327930 - DNA, 723 bp, Homo Sapiens
  misc_feature (47)..(328): n is a, c, g, or t
  misc_feature (367)..(398): n is a, c, g, or t
cttatacgaatttgattcccctgtcccctctgaagatctgataaagnnnnnnnnnnnnnnnnnnnnnnnnnnnnnnnnnnnnnnnnnnnnnnnnnnnnnnnnnnnnnnnnnnnnnnnnnnnnnnnnnnnnnnnnnnnnnnnnnnnnnnnnnnnnnnnnnnnnnnnnnnnnnnnnnnnnnnnnnnnnnnnnnnnnnnnnnnnnnnnnnnnnnnnnnnnnnnnnnnnnnnnnnnnnnnnnnnnnnnnnnnnnnnnnnnnnnnnnnnnnnnnnnnnnnnnnnnnnnnnnnnnnnnnnnnnnnnnnnnnnnnnnnnnnnnnnnnnnnnnnnngagggacccctgtgataaaggttatgaataattccttcnnnnnnnnnnnnnnnnnnnnnnnnnnnnnnnnaattctatggactcctgcccccagattaaaatgaccagttataatcattttaaattaaataatttaaaagtatcaagtatccttaaatcatcaaataaactaaagcagtattactgaccctttgtgcctaactctgaagaaaaatatggattaaagtttcctgcctcaactattctgacctttcaagacacaggtactaaataattatgagataattctccagtctctttactatcacagatgtcacctcaggtagactacatccctatggaagaaagttcttcaaaatcagagctgaaggaaccaggaagtaagcatctctagt

SEQ ID NO: 327931 - DNA, 780 bp, Homo Sapiens
gcttttcttagtagcattatttcagctgatgctggatttaacttgggatccaaagtttttattacatttctggctttctccaagtacattttatatctttcctccattgctttcatatcttcatctttcttctgaagagcagcttcaagttcattgatcttttgtacattttgatttatatctggctgaaagatcttccaatgagttcttgtttcttctgtaattctttcatggacctctgtgagtttttccctaagtggtagaaaaagcatggagactggtctctgccatataacatttgtggaccttgggcaagttgctttctgacccttggttcctcatctgtgaaatgggaatactaatctgcatgactgccaggggttgtcatgaggatgtaaacagtcaggcacacggcaggtgccaaaaaggttaaattatttcccttgccacccttgcttcctaagaaagtaaaatattttaataggtttaacattcccatataatctagttgtgatagttaatctgtttttttaaacttttcaaatgatattaacaatggaaagatgtaggagtttggaacgggggtagtagggaggctgaatctttagcatgcttttcacttttgcagcaggtgtatcaattagcatcaggatatttgcttttctagacaaaatccgaaaaggagattaactttagaggcttttacaacccctcccttctcatatttgaaaagaaatatcagttttacttacatatgagcttccaacttctgctttaatt

SEQ ID NO: 327932 - DNA, 790 bp, Homo Sapiens
  misc_feature (309)..(310): n is a, c, g, or t
  misc_feature (313)..(315): n is a, c, g, or t
  misc_feature (318)..(319): n is a, c, g, or t
  misc_feature (323)..(323): n is a, c, g, or t
  misc_feature (325)..(325): n is a, c, g, or t
aattaagttactaatacaactgaaaacatttaactaaaatatacaaggccaatttgaaattataatactctcaaaagacaaatgtttgtttgaaatgtgtgtataactgcatctccaattattcaaatgtgctccctcagagagatggctaattctataatttgtttttaaagtcaactggcaaaattaatttgatgcatgttgattttaaaatacctgatatcccgcatcataaactctttttcaatctggtagttagttgaaaggtacaaaatattttaaggacacttctattttatgtggtttaanngtnnngtnntgtntntttttgcagtttaatcagatgttgtagcagggactttaacagagagatttcttctggtgttggtgatgtgccgttgctgcgctaagaaagaccgcgcaggagtgcacgcaccagtgtcactgcaggcaccaccgccgctcacaagtctagattccatccccagtttctggaatgctagactcttattataccacgcagaaacaatgagtttttcttcataatcacggaattttgctactttgcattcactctccagaatctcaattcttctctctttctctgccaactgctttcttagtagcattatttcagctgatgctgggatttaacttgggatccaaagtttttattacatttctggctttctccaagtacattttatatctttcctccattgctttcatatcttcatctttcttctgaagaggcagcttcaagttcattgatcttttgtacattttgatt

SEQ ID NO: 327933 - DNA, 517 bp, Homo Sapiens
ggattcatcaaaattttattactttccaaaatttacgggtatagattttcatcctcgatggtagtgttttataattgcatgcatgctgtagtcaagaacgtggcctctggaatgaggcaaacctgagttctgctccacttaggagccatatgatccaagcaagttattagattcaaatttttaaggtgccttctcagaattagagacttcagtagagctttagtggttgcatcgtgaaggacacagggaaagttggatagttgtcttgaggtcagaaaaaggcaacatccatgctgaacgcccaatacaggagactaaccagcatcacatctggctccagttctcccacgggggcagaggcatttttcagtttttgggtggcagaaggtttctccttcacagtcacaaagttgatggcaatcatctccaaacatgccaggtgaatatggaacatagcttcttcacaagtttctgctgtattttatcaaccaatgacagtattctcaaaagtagatcc

SEQ ID NO: 327934 - DNA, 410 bp, Homo Sapiens
  misc_feature (28)..(28): n is a, c, g, or t
  misc_feature (38)..(38): n is a, c, g, or t
  misc_feature (52)..(52): n is a, c, g, or t
  misc_feature (57)..(57): n is a, c, g, or t
  misc_feature (73)..(73): n is a, c, g, or t
  misc_feature (82)..(82): n is a, c, g, or t
  misc_feature (89)..(89): n is a, c, g, or t
aaagtaaaaggggggtccccaaacctcntggcccctgnccccaaaagtggtnccctnagaatggaaagccccncccgcgggnaagcctngtaagaacttccactgtcaaccgcaggctgagcctctggggactgcaccccctccttggcactattaccctcccagttgcctgaagaattgttccaggaacgttgaaacttggaaataaaaagggaaaagcaatgtaaatataggaaaaggctgactacgcattttatgaactcatagctaatatgctgcatgttcacagaaaggcagcaagccttgctaacatggaaatctccaaacatttctttgtaattctttgtaaacctttttaacttaatgtattgctaaactttgttaacctttacgacataactaggattcat

SEQ ID NO: 327935 - DNA, 605 bp, Homo Sapiens
tacttagtcagatatagcattgtggggcattcagttacttcaataaacatttatttgtaaatatttataattgcaatcagcaagacaaagatctttgctcttaaggaggtcacacagtatagtggacatttgtcctttgtgggggttgctgtccagcatatgaacccctttatttgggagagggggcttaggaatcttggtgggaagcaggtcccccttgcagtcagaacacaggcacatgaccttggctcacccaatccaaggatccatcccttggactgggagccagcgacccaaagcagtggaaaatctctgattgagacagctacgaaaatgtgcctttcagttctcccagcatggggaatgtaaatgaccttggccctagctagctgctaggttctaaattcagcccaatattcgcagcttttctttgaggccacattgcttccagccagtgactgagcacagcagtgatactaagtcagatccatttccggaagacagaactattccaataggcagctttggctaaaggactcccatcagctagggcaaattttattagaactgctcttcaggccaagactcttccttccgaaacttct

SEQ ID NO: 327936 - DNA, 595 bp, Homo Sapiens
tttttttggcagaggcaacaaccgcaggtaattataggctttacacctaataggatcataaattaattgaaaagctttatacttcccacaactcatctctcctttgactatcagcaagaatctgttagggtggcaacatggtatcaactgagtagttagagacaaatgcagcaagtcagccatcaaattgtctaattggctttgaaaattaaactcttttacagcagagctaaatttagctgcattattaatattgtgacttggcagagaaaaaaataacttatcccatcatctggggaattagtttgtaatttaacacaatgcaataggcagttagaaaacaatatcccaatattctgtgtgtgtagacgtattctcaagtcaccttgggaagacagcctcaaaacatacaggtatatactggatttcagaaaatcacatctttttattggaccaggtaccgccaggtcactgaaagatgccaactcaaagaaagcagcttccccaattggctcccactcagtcactgtaagtggaagacaggcagagagggttgctctcaggggagtacactggtcatggagaagcattcatt

SEQ ID NO: 327937 - DNA, 490 bp, Homo Sapiens
  misc_feature (330)..(330): n is a, c, g, or t
  misc_feature (422)..(422): n is a, c, g, or t
  misc_feature (427)..(427): n is a, c, g, or t
  misc_feature (432)..(432): n is a, c, g, or t
  misc_feature (441)..(441): n is a, c, g, or t
  misc_feature (451)..(451): n is a, c, g, or t
aatgaatgcttctccatgaccagtgtactcccctgagagcaaccctctctgcctgtcttccacttacagtgactgagtgggagccaattggggaagctgctttctttgagttggcatctttcagtgacctggcggtacctggtccaataaaaagatgtgattttctgaaatccagtatatacctgtatgttttgaggctgtcttcccaaggtgacttgagaatacgtctacacacacagaatattggggatattgttttctaactgcctattgcattgtgttaaattacaaactaattccccagatgatggggataagttatttttttcntctggccaagttcacaatattaattaatggcaggctaaatttaggctctggctgttaaaggagttttaatttttcaaggcccattaggacanttggngggcnggacttgcnggcatttgtnctctaaccactccgttggataccctgttggccaccctaa

SEQ ID NO: 327938 - DNA, 640 bp, Homo Sapiens
gacaagtacttgtctgtttatgagtcaggtatcagcatattagttaatacatttacagaaatgaatgccaaacaatagctttgaattaaaagccttcacagttcaattagtatttccttctgagcctcttcaactttctttctgttttcttcattccagggtcattattccaccgtgacttttgagaagcaattttcttaagagagtacaaattgggattatcccctcttactgaattgaaatttttcagggctttccactaatgagatattgtatccacgttaggccagaaaagctagtttgagtcatttagttagcatgtttgaattagaagttattgatgaaaccttcactaataactcaagccaagttgagtctaaaaaggattccacgaggtgctgttaacacagccttgaaaatttgtaaccgatcaaaagcagcaacagcaggaattagaatgagtttgaattagtcacatggtaacatggaaacatttaaccctgtgtcagcgggactgcttgagataaacttgacttgtcttccgggcccagcaaaactgcaggcccaagggaaaggaagctctcctgtgattgtagcgcatcttggtttgataggaagtcatgtctggaacatggaagag

SEQ ID NO: 327939 - DNA, 1044 bp, Homo Sapiens
  misc_feature (1008)..(1008): n is a, c, g, or t
ttcactcagcactacaagggggacattccccacattagcaattcttcaaaaatgtggttttttaaatatctacttagcactccagcatcaggaccaccatcgtttattcaatcaacacttctgtgaagggcgtcaggctgagtgaagggcatcagacctgcgctagacgcccggagctacaaatttgccaaccaccaattaccttccttccgtgctgattaaatgcatttcctcccttctcctaagaaagcccatttcctgtggataagatttgtggtgaaaatggaaccagctacgatgcaggtgcagtgtggtgggctcgtgggctggctggctggcagatgtgtgagccacgtttccctctctccctgcgtctggtgtcagttccaccatcctagggagcacctggcagcccccactgccctggccctgccccctctaaatcaaaggccctttctgtctgtaagcaagacagtgtggataaagttcaagttgcctgcctgtccagctcaatcaccacatcacaagaggagaataagagggcatggcacctggagcctggggcagaggtcttcaattttctgaagggcttaaacatgttctgtgtggtcccaaaacgtaaacctgggaccaagagacagaagccacaggaaacagattttgactcaatataaagaatgctctacatcagccagtacaatgcaaagaatgaatgggtaacctccttacaaggtagtgaattccttgtcactaaaaaaccatcatggcagagactacttggaagggattcgggcagagagggcgatcagaccacatggcgttacagtcccttccactctgagagggagctgtgtgatgtgcacaaatgccctgtacttctcctatgacaactcgcagggccctatcacagggagatcccacagcaacaccatgactgtcaaacagcctcagtttccagacgctcctcagacatgtccagcctggcttcctggaagctacttctgcatncttgtagaagagtctccagggcatttcagaaccaag

SEQ ID NO: 327940 - DNA, 566 bp, Homo Sapiens
ttttgcactaaccactaattctttgagccagaaacaggcattcctcttattaatctaacatttagcattctattggagtgggtagaagttatttcaacaatacaaatcacagcagaggtggttaaaagtaaaaaagcaatcaagaaggcagtttacatcagggagactgaaactgaaacaaaaggccagtgtggccggctaaagtgtgaaagagagtggagaagaaattggggagtgggggttgaattcaaatcctcttctggatttgtgatagctacttcctggtgcttcaagaaaatgactctcccagagagtgagattactatgaacaatgtgatatgaagcaacagggctttttattttccaaagaatcccagtatgaaggtacggccattgtaagcatcaatcccttaccaagctccccatcactgtcaactccaaatgagccagtgcaggccacagcctcacagcatttccactagagagcagcctaaattgcctattaacaacacagctcctagtaagattctcttatcactgttgtgtctatgctactacgaactttt

SEQ ID NO: 327941 - DNA, 729 bp, Homo Sapiens
  misc_feature (22)..(22): n is a, c, g, or t
  misc_feature (367)..(367): n is a, c, g, or t
  misc_feature (402)..(402): n is a, c, g, or t
acccttttacctttaacctctntcctatcttcctaaagtgtgtctcaaatagatggcatgaagttgaatcagacttgtttctgacatctctgccttttatagtattgcttaatccatgcacattgttattttgatataggaagacttatgactgccattttattgtttttgatatgcctcaagctttttgcttctccattccttcttttgcattatttcataatgtgatatttacatttaataatatttttgattttttaaaagttatttcctcagtggtttctctagggcttaccatacacatcttaactaaacagaataggcttcagataaacactaaacttaattcccatgtaacaacccctanttcctatataaaccccatcccccgctttgtggtanttattgttatatatgttattcctatacattacaaacccaacacacattattataattacttaatataattttacatctttaaaagaagctgagagaagagtaagtatatgtttatagtttttttatattaaacttatttcctatttcacgttctctccatttgttcctgtggatttgtcttaccatctggagtcagttctttagtacaagacagttttgcttccactcagcttcttcaacctgttatcggcaaatatattatattttatacgttataggccaaacgatgcaactatatacatattgttttatacaacctgtgccgaa

SEQ ID NO: 327942 - DNA, 592 bp, Homo Sapiens
  misc_feature (514)..(523): n is a, c, g, or t
agaagtgtgccaaccggccagagaacggcagttaccacagaatgtattttgctggtgcccaccattacaatgggatgaaccaaaggttggtgtgccaggaatgttcctataatgttctcacttaatgctcacagcaaccttgtagggtaggtagctcatattcccattttatagacagaaaaattaaggaccaaaacatggagagtaacccatccgaagtcacaatgcaattaactggtgcagctggtatgtgaatctggtctcttaattccaaagctatgttctgggtgtatcacaataaattctgcatgcttgcacatctcctaacactcaaggtatagctgggtcagcaactttccccctctcccctccagccaacatacacgcacactccaggctcattttaaacaagctatccattttcaaagtactgatcaatctgcatctaatgcaaaagcaacactgaagcccaagcagtatattcccacccactaaaaaaaatttttaggcaggnnnnnnnnnnaatgtgcttagcatagaaactgaaggtagggggaagcacaagaatcatttgctatgaaaacaaagttca

SEQ ID NO: 327943 - DNA, 915 bp, Homo Sapiens
  misc_feature (144)..(144): n is a, c, g, or t
gcaattcttactttaacatcattttccagtgagctatgtgataggggctgaagcagcaagaatgaggtgtgtgagccctgtccccagcatcctggaggggcggtctatgctgagagccccaccagcaggaggactgggaggagnagggccaggacctgtagtgctcggggaggggtggtggctgaagcactggtgaagggctgggtcatggatttcctgttgcagaggtacccctcacagcaggagccctggaggtcgatggctgtccaggggctggtggtgccctcggtggtgcaggagggccggtggcaggttctgatgtacacagggactgagaaattgccaactgtcattctgccactgccctggaagcaggcggtctggtcctggtgacactggactcgtcgggacctgccgatagcgcagtcatcctggtggaccccgatacaggcgtagcactcggcgccgctgagcgtcggcgggtcgggtgcttggctcaggttggggagggcgtcatgagtcatgaggtgggcgttgcatttgtcagttgtgcagccgcgcaccaccgagtagtcttgcggcagcgcgtccgggttcgattgcgtcttggcccgcaggaggcccggtccagcagcccttccgcaccagggtcaccggcgcgcgatacccggtgtccagagacaggatagcctcaaagcactcatgaggacaggagatgctgggcagcttcatggccctgaggtcaaaggggccaaagtaggtgtgctcaaagctgtagcactgcagggcttgggaccctgtcaggcagagcgcagccccaaagaggcagagcagaatgactctggggacccccattgccattgctgagctgggccacctgggacagctcctcccgctgtgatgtgctgcctggct

SEQ ID NO: 327944 - DNA, 582 bp, Homo Sapiens
  misc_feature (542)..(542): n is a, c, g, or t
gaatatagccaagtattccatttattaacaaaataagtcttaccaagggagagctctgttcgtcccaaacaggccccgcagcccccgcgctgccgcatcagaccagaaggagggaggagtggggagaagaccccagtcgctggggggtccactctgggggctctgccgggccaggcctaggagagggcgggggctgctgtgatccgagagctccctgacgccccaaccttccccgaacgcagctaacgagctcgtgacatccgctgacatcgccaccggtctgctttggagggatctagcgagagtcacctaccccacccctactgccaggggaggggtcgttgcccccacgagggagagaaaaacaaggactataatgcacttcgcaaaatgtaaggggccggcttcacgccagcggggccttctgggactttgaattcaaccaggtgagcgctccaggtgccccgacaggcgcactgtagccactgggtgttaggggcgggagtctggaaggtgacggtagacggccacttgggcccttnctgggggcgagcctactggtggggtcagggctctccgtgc

SEQ ID NO: 327945 - DNA, 811 bp, Homo Sapiens
  misc_feature (709)..(709): n is a, c, g, or t
  misc_feature (727)..(727): n is a, c, g, or t
ttttggatgattagacttgtacttcttttaggctatttttccacctggtactatttggctttactgactgccctcattccccatacaccaccttgttttgttcagattcccctaagtcttcattctcgtcccacctccccatcactcctgactacttgaaacacgacttctgtcctcagaaggcagcagtgttccctcctcccgttcatttttcattttcccgttgcttaaaaaaatcaagcatatgtttgcagtcatcactgatgttctgcctcctcttctaaagttatagatgagtgccaagttggcaggagcattgtaggaaagatcactgcaggatgtccttgtcgtgttgaccttattgggaggaatttcctatctgtggatgacctgtaaatggaatttaagggaggaatcacacgtgttagcacggggttggcattgcgtggctgttttcaattaacttgaccactatcataacatcaaaggtgtgtgtaccattctatgaccattgaatctccatggacatgttttgggaaatggatttgtcccattacactgctttctttagtgcataagatcttgaagggagggatgcattctatgcaccccaagtttctggtttactcgtggtttcaggagtccctttagacaacatcactgacaactcactatgtaaaaccaaacaaattattagctttcttactgngtggttgcatttggctgngcccagggaaatgggaagtgcattgagggaagaggcccccaagacaagggagaagtcactccaacttttccgggaacacctttt

SEQ ID NO: 327946 - DNA, 155 bp, Homo Sapiens
  misc_feature (140)..(140): n is a, c, g, or t
tgagccactgtgcccagccatgtgtttttataatagaatgatttctattcctttgggtatatatccagtaatgagattggtgggtcaaatagtatttgaataacatcttaaattgaggattatggattttaaaatattantacattaaaagcagc

SEQ ID NO: 327947 - DNA, 776 bp, Homo Sapiens
ttttttaaaaccaaaagaacaactttaataagcttttacggcactgcaattacaggaacatcgacccataacatgcaacaaaaatgattttgccttttggacatatttaacagataaacttgacattacaagtaacagcaacacattcccattctactgaagaaaacaaatgcgatttaactttcaggttagaaaacgtatcttcttactgcaatctcaagtagcatttagaaagtttagttttcccttttctaacctctaaaagatgatatgatttttaatgcaatcatacacaactgttttcacattgggaaataatcacgaggaatcaataggtttaggctaactgactgattggttttatttccattgttaatttcaagagggctcctgcagtattgtggatttcagatggggaaaataatcagaccaggagtaaacggccttggtctttagagtgggggagggaacatgcagcggcacacggggcaggtgcctgacttctgaagccagatggacacacacggcttgtggaaatagtggtggcacggcagctcagttgccacctcccccttcacatattcgctacagcagatggggcagcacatctcctgaccaactgcgccatgatcttcagtgaccaggatctcgggaagagcgtcaatgctctccttgcttgctggtggattggccacctctacatccactgcgagagactccaagtgcgcaagggcagtttccatttcctgggccaggcgttcttccctgtgccgaat

SEQ ID NO: 327948 - DNA, 733 bp, Homo Sapiens
ttcggcacagcttgactcatttttaatatatctgtaagtaagagatggaattcctggggcttaaagtatattatacattttggtaaataatgtcacattgccctatgactgtcataaaggttatgacagtcttaactaatttttgctcttatttaatctgagcatatgttatttgtacttgtctactatttcatacttttggcatattttattccatatattctgccttagcctgtgctcctttttcccctacactatcaggaatacatagtgctttaatagtagatgttcaatacgatatgggttttaggaagaaaaaacctccctactcatttgagaataatgtagtaaccccaagctcagtgcattgtcctgttcatttttgtgggacactgttttgatattccttaaaaatgggtagtaaacatcaggtaggtactaaggttttcattaagagaaagtactcctattcactagacactagtagtgattaatcccacttaaaaaatccacttattcattcagcaaatattttttcaaagcctattctgtgctaagtgctatactaatccaccgaaggttttatatcttactatatatatatgagtttggggtacttgaatagaagttacaaattagtgtatgaataatgcctttgagtggttctgaaaacattttaaattttactgctgtagttggctgtgaatgaagaaactttgcctaggacagactt

SEQ ID NO: 327949 - DNA, 538 bp, Homo Sapiens
  misc_feature (153)..(153): n is a, c, g, or t
atcaaaatgacaaatatttaaaagttttctgatgccaagtattgggtatggtgtagatatctgtgtacttacgatgtgagtgtaaactaatattgtcattctgtaaaccagtcaataattaaatcagaagtgtttaatccctctgacccagcnctcagaggaatttttaaacagatctttgaggatataatctttgtagctgcatagtttgtagtagtggggatttggagatagcctagctaaatatcccatcactggtaaatagagcaaataagaaaaatgaaatgggagtaacaatggtgagatctttaaaactagatgaaactttaaaacatacagttgagagaaagaaacaatgagattcataaatatttaagaaaatagaaaaagcacagtagaaggaaatcggagtagagataataggaggaaagaggaaacaagtttgaggaaatatcacttgctaaatttatttatattatatttctatagatgaagcaaggatgatacatattcttttttctggatgaagcctggcttt

SEQ ID NO: 327950 - DNA, 759 bp, Homo Sapiens
  misc_feature (309)..(309): n is a, c, g, or t
tttgtaacatttgtcttttcctatttgatttaaaatataatctcaattataaacttgtgttgatggtattatataaagatgtaattttgggttatagcaccaaaatggcagaataggaattttctgtaggtgtttcccacataagtatcaattttgacaaccatccatgggcaagagtaccttgtgggagttcaggagttgacagtaaaacttcagcacaccagaggagtaaagaaatctaagaatagattcattggaaagggtataaacagtttcactttacctgcatcaccaacccccaaaagtggncacagctccagtaaacaagagcccattatttcttccacagaggaaaaggagagtataataagtaagtgtccagtttctcaagacatacaggcccctgcccaagagatccactttattttcatctcacccagaatattgaggtgatcagcaaggtggagtggttggggagagggtaaaagcaggaaagagagatggggacctcaaacagcagccccatacttggaactgcccatagatcctacccagttacttcatggactccatcaggaacccacctataagcccacaggggatgcatccctcccatcttgccaacaaaaccccgaatgctccaaatgcctcacccactctttggctggctcccaagtgcgctcctgtgaaaagcgagtgagtatctctgcagatggcttgcaagcacatgttgacagctggctccactctgtagaactg

SEQ ID NO: 327951 - DNA, 217 bp, Homo Sapiens
atgaactttaaaatataaaatcaaattatttctttgcttgttatttccctggcctaggaatgttaagctcctcaaaagatacaagttatcccacaactttagttttcaaacatgatcccagtgaaaaaaaatgtatttaactaataatgtaagagctttgttttctaagacaatctatgtgttcatcttgtttttttcaagaacccaaattttgaac

SEQ ID NO: 327952 - DNA, 771 bp, Homo Sapiens
  misc_feature (40)..(40): n is a, c, g, or t
  misc_feature (122)..(246): n is a, c, g, or t
ctccatctgcagtcagggcctctcccgagctccatgctgnaggcgggattcactgccttccatcctgctccgaaacggcacccaggcctcctgcgcggcatctctccagctctgctcttgannnnnnnnnnnnnnnnnnnnnnnnnnnnnnnnnnnnnnnnnnnnnnnnnnnnnnnnnnnnnnnnnnnnnnnnnnnnnnnnnnnnnnnnnnnnnnnnnnnnnnnnnnnnnnnnnnnnnnnnnnnnnagcaacccggggggtgtgaggggaaggggcagtcatgggggccagaattctgcctaccacaccttcccatctggatacactgagttctatggctacaaatgaatgtcttggcccggtgcggtggaaaatacaaaaaggggcaaggaagaaaccacttaacacacatgcacatacacacagaaagcatgtgccatgggcccctgaagtcactttctgtaactcatctttggacttcacaggacttcataatatcaaatagtgcatgtttccttgcatcgttctaggtttgaaacgttattgtttgttgtttgtatattcttctaattacatttcacagctattttatcttgccccccgactcataattcattaaatttaaataaatttgtggagagtacatgtcttgatttttattacaattcctaactgatacatagtatgctattttaatgtatttattaggtaactgataaacctactaaacataaaaaaactagttctaatgtttgttggtactgttattat

SEQ ID NO: 327953 - DNA, 569 bp, Homo Sapiens
aaagtgttgtcagtgcttatttcttgggctccctcaaaccccacctctagttgtctgtctatgcatttcatcttcctcgctagacaacatgctcattgagggcaagtttgcatatctctccctatggtttgtaaggctcagagcttagcacatacagataccagacaggtacgtgaagagcaaacatgggcagaaaactgaggtccaatctacacctacgccatgccaaacaccacgtgaagcctttatctaccttagttcatgctacccatacacactcctatgagataggatttaacattcccaaattgcaggcaagaatagaaatggtcatcaaatgaagttcagtccatcaaagactataggcaagagcattaaaaaagtgggattgcattgctctttttctacctgctgcctagttttcttgagataatttactgtaagcacatagccggaagtccacatatcccttatatgacagacatgtagttatctagagatgtgttctctgttggaaattgtctaattgatgagatctgacccagacaagtgttttctttcgatgttgt

SEQ ID NO: 327954 - DNA, 816 bp, Homo Sapiens
  misc_feature (705)..(772): n is a, c, g, or t
agcaatttaataccttaatcttcaggttttggaattttgccacaaatttagaaaccaaaaaagttggagatcacttcttaatttaagtcaagacagggttaggagaatattcttcattatgtagcttccaaatttagccttcttttcttcacaagcctgaactctttcttagtttttagtgttccatgactgtatctaccttaagaaagcccaataatgtacatcaaaattcaggtttgtaaaactaaagagaatgatcaatcactttatacaaagccagtgttcctataggaggggcagaagttcctgtggtacattcaatattgatattattcctaaaatatgcttacctataattctttcagggtttcctttttgttacatatcaaagtgtatttggcactgaaatgtctatggatagataagagtacctttagtttgaaagaatagtccactattagttttcaggagaagaaacatgcttatgtttgcatttaaataagacaagtaagcctaaatatttgtatttttcccttttcttttatgtaattttaatatatattggtaaccctaagattaataaggctgttaaaaaaggaaagcccaaacacattgagcattaaaaaatattattaataacaaaatggggaaaatttccttggcttgtgttactttacatacttttacttgttcctttatctgccnnnnnnnnnnnnnnnnnnnnnnnnnnnnnnnnnnnnnnnnnnnnnnnnnnnnnnnnnnnnnnnnnnnnttccttttctcaagaagcttgagagggctgggtgtgatggctca

SEQ ID NO: 327955 - DNA, 721 bp, Homo Sapiens
  misc_feature (167)..(167): n is a, c, g, or t
caatctctcattactgctgccagttctcttgtgtgcaaataccctccttaccatagtaagctctaacaccctgtgccaggatgtcaccctaggtgatctcctccttatcttgtcatacattgattctccattcttggccacccacatccccacctgggtgggcttgntcattttttttagggtctgacactccacaccaggccacccctgtgtgaatgttctatcttgctctgcctaatggtttcaggaagggaacaggaagcttaattactttttaaagatgaattttattaccctttccgttcttcatgagttttacttatgagagtttgcaaagatatgttagacctaaatcagtatctctggcttcaagaatggaaggaaggtacacaaaactggtaaacaaattgatttttgttttaggcacctgtaaagaaaaactgattattttcaagaaggaagtgaatctaagaatccataagaattttagcaatgagtaagaccctatccaggcagctccatattcattcctgacgataaatcaaatgggttatttgaaagaaagacatagtaattttccttgacatcagccagtcattactgccatttagtcagcacatccctgtgtgctaggcattgtgtttaatccttaagtttgtatggtggtttctatttttacctgtgtgttaccgatgaagatacctgctttactttaccaaaa

SEQ ID NO: 327956 - DNA, 690 bp, Homo Sapiens
ctttattaatagaatttttacaatcacattgtattgaaaaggatctgttttgaggcttggaaattgcactgctttgaacaaaactgcatcaaggtgagctttgccagaccccagcagcgacgcagtaattgtgggctcaggcgcacagggccggctactacgacattcccccaacttggccccagccacaccttgccagccttagcggcaatgacttcagtttctcaaactaacttttcatctagctaagctgcagcctgttgctggctaactgcgaggttggtctctaaaaggacccacagtaaccgatttcattgactccttactgcaatgtgcacttccacacctacaaaaccaggtggtttgttttgttctgttgcattccttttgtgcatataattagtgcaatcatgaaagaattagcattagggccctggaggacagggctctctgcagccagtgctggagggaaggggtgtaaactgcctaagtgtgggtaatctggcagttcctacaaattcacaaacacttaagtcccttggcctggcccctctccctataggaatgagtcctgcaaatcggcttccccctgcagataagcttgcacctgtgtcaaacggtgtacgcacaacattcttcaaggaagcaacccaaatatctatcaaaatggaaccaagtatataaaatata

SEQ ID NO: 327957 - DNA, 1004 bp, Homo Sapiens
  misc_feature (17)..(17): n is a, c, g, or t
  misc_feature (28)..(28): n is a, c, g, or t
  misc_feature (39)..(39): n is a, c, g, or t
  misc_feature (53)..(53): n is a, c, g, or t
  misc_feature (58)..(58): n is a, c, g, or t
  misc_feature (67)..(67): n is a, c, g, or t
  misc_feature (72)..(72): n is a, c, g, or t
  misc_feature (79)..(79): n is a, c, g, or t
  misc_feature (85)..(85): n is a, c, g, or t
  misc_feature (119)..(119): n is a, c, g, or t
  misc_feature (142)..(142): n is a, c, g, or t
aaccacagccccccagnaaattgtgttncccccaccccnttgaacgggaaatnaaaanggaaatttnaactnttgcccntttttntgggccccgtaagagacgtaaaaagggtccaganccctttaggaaataaatgagganaaaggagaggaaagagaagatctgggctgtgctggtgcctggtttcctactcatctttcggagggtgtgacttcaagagttaaatcacacttaggccactacaatgattagtactagttatctttttttaagatgataaaaaggaaagtatccaatggacataaaaatggtcaaaggtttttttactgcaggtcaatttttcccccgaccaaaaaatatacaaaatgaacatataattgggagggtaactctgctggacattccacttcactcatctgcgtgtcccccacacgggtaaggggaacaggcgttcggttttattagtcatgttacagcagtaaccagatgtgttaatggcagcttatttacggtccatcgatcctttgaacaagtataggaaagcatggctgtcagtctctgactgctcacatctgagcacattcagcttaccatggaaactacaagggaaggaaaaatatatttattccaagatttactgggagttttaagtgccctttcttccacagagccccagagtggtgacaaggtgctaggggctgctgtgttttccagcatgagctcccatcctctgagggtcctgagaaggatagtggattggtcctggagcccgcatgaaaggagggggtggtcccattgggtggaacatgtgtggcccaaaacctgggggtgggggtggagcaatgccagggggcggtggcagagcaatgttcaccacagctggaggaccacttgggggcaagttgaagtagttggcagaggcttcttcttctgctgcaggaggaggaggaagagctcctggcaatcctggaacaggttctagtttgatcccagagtctgtagc

SEQ ID NO: 327958 - DNA, 879 bp, Homo Sapiens
  misc_feature (141)..(141): n is a, c, g, or t
  misc_feature (151)..(151): n is a, c, g, or t
tacatgaatttgctattgcttataagacgatggtttaacaaaggaaaaatctccctttttgtaaaacaaatatctgtgtttctaacgcgagttctgcagagaaatgtagagggagaacagagcagcaaaagccatctcagnatcagtgagnctctacgggagcagctttacattttgagtcttcccatacaaagcttttcaatctcattgcatataaagattaattgcaaaaataatgcagggataactaaaaacctgtttatagtacactgatactttgtcatatgtaattccaatctgtgactggctgccatgtaccctgatcaaacaatatacacacagacaagacagctgtttactgagacagtcagtatccacagtgattccataaagatgccactctcatttctggaacactctgccatactgtcatttgggaatgaatatcagagtcaacctgcaccattcataagcactttcccccccaaaaatgtgatgtgcaataatggcaaattctgacttcatttggttctcgtatatatgaaaggcatttgttgggtttctcaccaatttgaacatctctggtttggaatacggtgaatccttggacaaaagcgttccctggatccactacatttgttccccatttcttttttgtaggttcctataacatagcactaatgggcgttccaaggctgaaggtccctgagtgttgattatctccacgtttccctactatttggatgcagagatggatgacctagagcttggtggtcccatggtcatttcccatcagtgtgaactctctgagggtgtctcaggggagtgctgtgtgaaaaggcttgtgtatgaatgtacgtttctcatgtgtatgattgg

SEQ ID NO: 327959 - DNA, 554 bp, Homo Sapiens
  misc_feature (358)..(358): n is a, c, g, or t
  misc_feature (368)..(368): n is a, c, g, or t
aagaatttcttaatttccaaatggcagaagctgtagagatgttttgacgctttttagaaaacagtaaagcatataatacttcacatgaaggtttatcttgaactacttttccagtcttccttctttcttgttatatttgactttcagaaattttaggtgagatataaaaagccttataggagcagtattcagcaaagtgtgtttaaccaactttgttacatacaccagttctttgctttaaaagaaatagtgttttgtttttcttaaaagcttttattgagctataatttacatgtcacactattcacacatttaaaagtatacaattcagtggcttttactatgttcatagagttgngtctcatcgnggttttgatttgcattttcctgatctccagatgttcaaatttcttgatcaaatggactagtaaatctgaaatgaaaatatttatacattcatgtggcgtatatgtatatggaaatttgtaattggcataattggctcaatccattttagtgctttgaagaatgttaaagttttctgatttttagca

SEQ ID NO: 327960 - DNA, 764 bp, Homo Sapiens
atgattatgaggcattttaataaggttttacgttctctgaattacagtgtttcaaaataaggcgtaactatgattcaattcacttctaaaacactttggatgacaaaactacgtagtacaaggcaggggccaattcctaaaccaacctcgttctcccacagaccttcctaaggaaactttaagggctgcgaaggcaattgagtctggactttgcgaaaggccttcctgtacggggccctggatttctcatctcatttctgggccagggacgaggagtctttccctctatggattagggctttcgtagatgtaccgcctctgaaacgaagacaagacaaataataatgagttcactcttttcctcccttgtgaagttccgtggagacactcggtcccctgaagtggatgaaagggcgaggggaggaggtcctcaggatttttccctcgcttttccttaagaagcaacaggctcaaaaccaaacggttggccttgcttactcctgaagtcgaagaggcttactcccctggaatccaagtggatgtggagcccatggcgtcctctggcgctctcggtctcttcgacccctttttactgtgttgatgataaatggggcaggattcccctcctgcaccacctgcagcatcctgtccaggatccatctgggagctgagaagaagcaaagtgtcagggatcgggggttctcgggctatgctgagaagcaaggaatgctgaagaaggggcctgagggaagggcttatggtga

SEQ ID NO: 327961 - DNA, 941 bp, Homo Sapiens
  misc_feature (107)..(117): n is a, c, g, or t
  misc_feature (557)..(557): n is a, c, g, or t
aggacactctataatctactgttcatttccttatattataaagttaactggcatctgtgtgaggaccttaagccatttacaagtacgtactgtgggaatataaggcnnnnnnnnnnnaagggtaagaaaactcatgtacactattttaatggtatgatttaaatgtgttcaaaaaccttgtgtttttcaaatcccttttcaaagtagccccaataagctggggagtatgtgtgtagtgggcgtcgccatttgtagctccactaggtaacatgcaaagcacctgggaatccatgagaaacaatcatagaagcatctgcttctgcttctaagacacatcaaaggtggtgagaaaaaagatgtcattgaaggagctctttccttagtgtattttatttgtaggcaggatagaagtatcctgctaaagtcataaaatagaatagtattttagaattagaaggagcttgattagtccagccccttcttgctttacagatgaggaaactgaggtcccaaaatgtggagtgatgtcacattgtgctggggatgtggagaggggntggtttgtcatcacgtggatggccacgtggctggctggggggcctcagaggggaccttctattccctctttatacaggagcccctgtctgtcttaagcacatggcttgcttcttgaaagctttcctggactccccaggcagtatttcctttgtgcattttaaactaaattttgactaaattaaaagcaatgaaatccaggcctcctggaagggtatttagttttcctttttagcagaacagttaagctaatgacagtgttagaagcctcaaccaccccatccagtgattgatatacatgcccccaaatttttgtagtgaaatataaaaacagtctataatctgattttgtaatcaaggtctagccaattacagtacatctcaaa

SEQ ID NO: 327962 - DNA, 593 bp, Homo Sapiens
  misc_feature (583)..(583): n is a, c, g, or t
aagtaatccccccaaagtgttgagattacaggcatgagctgccacacccggccaagatgctgaatttcatcaccctcgcagtgcccctgtggccgtgaaagcttttggagtcgtctttggagggctgttactctatctgcatccttccgctcctctctcctactcccttgttcaaatacccttggcaaggctgtctttttaatttgtctttcatatatgggattatttaatcattagtcctaaaatgaacaaagggctaggggctgggcatctggggttgtgatcttgactgggttgcatgatttggggccatgtgcataacccctgaggctcttttttttcttacctacaaaatcatgggttgtctggctcatttcacagttaaatgtgaagtttccatatccatgtatgagatttcaatcactgctttccactgtctgctttagggattggggagtagggtatttagaggtgaaacaggaagaaaggaattatgtgtatgtgctttacaaattcacatgtgcttgaatgtatttacccttgatgtgctcattttatttcatttctatgatttttgacgtgnttatttttcc

SEQ ID NO: 327963 - DNA, 796 bp, Homo Sapiens
  misc_feature (26)..(26): n is a, c, g, or t
  misc_feature (31)..(31): n is a, c, g, or t
  misc_feature (35)..(35): n is a, c, g, or t
  misc_feature (41)..(41): n is a, c, g, or t
  misc_feature (68)..(68): n is a, c, g, or t
  misc_feature (412)..(474): n is a, c, g, or t
ggtgaagggctttcctggccaccagnagcancggnaggggnaaggggcaggctagggaggggactagnaggggctggaggagactgggaaaggagcccaggtgagggggacagcagggactgggccacagtcatcacagccagtgagaaggcactagccagagaaaggagaggggctgctgtggtggaggggaaggaagaagtggaggggcacggaggaaagaaaggggaactaagagtgacctgagaacaagtgggagagaacgtaggtggagaagtcgtggggagagaactccagggacactgagagagtgggaccggaaactcgggtgtgctggaggagaatggaagtggagagctggtggggtgtggagagggatttgaggagacctgggaagaaatgggggagaatnnnnnnnnnnnnnnnnnnnnnnnnnnnnnnnnnnnnnnnnnnnnnnnnnnnnnnnnnnnnnnngttccaggggaaaatgggtttcccaggagacaaaggagttcccaggagaagatgaggaggtggagaaggctgtccagctcctgtgctccagggaggtgctgctctggagctcttcattggatgggtctgggagggggacgggcagggcaggtaatggtgctggctcctcctgggggcttagggtgtcttcagcagcctccatggggccagtgtctctcttcaacagggtctccactcgctggataatctcccgaatccgtctgagaaatccatctcgctccgaaggcagaatgaactcgttatataccatggcagctgcaat

SEQ ID NO: 327964 - DNA, 609 bp, Homo Sapiens
  misc_feature (66)..(193): n is a, c, g, or t
  misc_feature (246)..(300): n is a, c, g, or t
  misc_feature (304)..(317): n is a, c, g, or t
aatatgcttatgatttatatatgatagctaaaacaaattttggcgttaacacttcatactgttctnnnnnnnnnnnnnnnnnnnnnnnnnnnnnnnnnnnnnnnnnnnnnnnnnnnnnnnnnnnnnnnnnnnnnnnnnnnnnnnnnnnnnnnnnnnnnnnnnnnnnnnnnnnnnnnnnnnnnnnnnnnnnnnngcccaaagaaaacccagctacttggaagtctgaggtaggacagcatgagcccnnnnnnnnnnnnnnnnnnnnnnnnnnnnnnnnnnnnnnnnnnnnnnnnnnnnnnnaaannnnnnnnnnnnnncccctgaacctctggtctttgggtttgagccatttgcctcatggtgtgttgccttccttcactgccatgaattccccagtgggttaaaggaaccgcaatggctgttcacggtgctgaccttgctctcagtccacactgatttgtcttaccttctgacagagcaatgtgatttgacaagactcaataacaacttttagggggcaaaatattttttcagtctttggtgctggcccagaaggtggcccacaaaccaatgttaattctatgcattgtcaaatctttgctctttgaa

SEQ ID NO: 327965 - DNA, 766 bp, Homo Sapiens
aaggaagccctgcgggagagccgtgtttgtcacttctgaagccagcctgaaaaatctctgccagatgtcccaggccgtactggatgaggatctcttcaacttcctgcaggcccactggttcacctgtgaactgctgtggtacatgcatgttaggaagggcctgcttgcgtgtaacacctacatggacagcctagacattgtcaccagcaaggtgtcaagcctctttcgagaacagcagtcgctgctggactgcatcctctgctttgtggattacatagacttctttaataccaaaggcttgaagaacttgcccacacctcctcccaaattaaagagagctcggccggcaagcattgccactgaagttccaagaagggttttgggaatctgtgggagagagccttaccagcttccctgcagaagagaccaaggccgacgcacagcaggtacaggtacagcagcagtcacaagtgccgccctcgcaggttggcatgctggacaccttgcaccagagtggctctgaactagcctacaagctgtgccacaatgagtgggaggtggtacagaactccacccacctggtggacatggctggctcttcagtggacgttcagctgctagaggactctcaccaggttagcaaagatggctgtagctgcagctgttcctttcaacaatggtaccacctgccatgccgacacattttggctctgctgcacaccagccagcagccggttggtgaagccatggtgtgccgccggtggca

SEQ ID NO: 327966 - DNA, 488 bp, Homo Sapiens
  misc_feature (337)..(337): n is a, c, g, or t
  misc_feature (367)..(367): n is a, c, g, or t
  misc_feature (447)..(447): n is a, c, g, or t
gagcaagtcaagcttggtatgttgctgaccggcaaaatcttacaattaagctgattaagtcttaaatcggtccgtttcccactttgatattagggtatttaacaggatataattttataagttgcttctttctaaaggagccttagggtgtgacgaaggaaatccttttgtcaaactaaaaggtgaactcagtgcagctgccttcctatcaacctctgcgcattcctgaaatagggcaggcattgctgctgggctcaagtgtcccaaggtgcagttttatccactcgaaaaccgttatgtgttcagctcaattagattaattaccttcctcaccagnagtcacaatgctttgcagtttatctgcggnaactaaatgttagttttgtaagtaaaaggtactgttattgactctcgaaagggctatagttcctttgaacttacagagangagttccaaacaactatttctaaccaagatgtaatatgggt

SEQ ID NO: 327967 - DNA, 634 bp, Homo Sapiens
acttgaaattatggtatattttcaacttcactaattacaaattatctagatttagaactctatatgtcagcattgacctgggaatgaagtcaggatagagaaattccacttgcctgtgatgggtccttagaagtatcagctaaggagtgaccctgtcctatacacagggctctctattacgttccataccctgggcctacccaaggtgacattcctgctgtttacatggcataggcacctgtgagatcagtgtcacaatttcatcttagaaagaggtaggtatggctgctttgtcggttgaaagttaaggggagccatgatctaccatatttaggaaaaagttatttaaaaaagagcagatggtggaaaaagaatgtaagacccagaatttatccctttgacaatgaatctggcctttttaatagcaggatggaattgattcactagtttttgctaactttcactttcagtaaaggttgaggtgttggtttttgcaatgactgtgtattccattgaggaaaggtttccaatgaaatttcaattactctgacctcttctaatttttggtcttctttatatttacatgtcttacattccacaaaattatttagaaatgctgggcatggtggctcat

SEQ ID NO: 327968 - DNA, 896 bp, Homo Sapiens
  misc_feature (708)..(779): n is a, c, g, or t
ttttctaaacagggactactggcactactggcattttaggctgggtaatttttattgtaggatggtcccgtgccctgtttagaatcacaaacaggttcgttcacagccattgggggtgacccttcccagtctttgcacagaggtcataagaggcagaggtgatgcaggcagggtaaggaaacttagaaggaaccaccccagacctaaggaggtaccagcacctgcaggaagccttccttagacccccgaagcacagactatccatcccttctccgtggggaactaatgtctctcaaacacagtgtacatatggttcactggaatccccttcttggagctctctccttctggaatattagtttctacatggccaccattatagtctttcactctacagaggagagttgcctctccaggtgaggcaacgagatgtgttgaaataaacaggtaagaaacaccctttttctacaagtttaagaagtgccattatgctgggttcacaaaacagcttttaagtcaacaaaataaatgacagagggggctccaagtgcaaagctggcaacggtgctcgcctcttaggtatgaaaggcgattccacaaaatttaggtccggcaatctacactgagctgagctttccttgttctcatgcagtaagacctcagtggctgcctattatcttcacgacacagcctggttttccaggcttnnnnnnnnnnnnnnnnnnnnnnnnnnnnnnnnnnnnnnnnnnnnnnnnnnnnnnnnnnnnnnnnnnnnnnnnctgaaagagaggggaaagccctgctggcctggagctgatgcccagttagggggacaggcagatacctatgtacacttgtaggcagccgtagcctgctgcttgttagcttgcttccta

SEQ ID NO: 327969 - DNA, 417 bp, Homo Sapiens
aaaaagaccaagttagcttgtgaaaaatgaattcaagaatgtggatgagtttcttagttcagaattgctcaggaattgggacattatgtaggtaagattctggaaagggcaaaaggatgaaaaacaagagaaggcctaacccatctgctacttgattatcttaatgaagcaaatctagagatttattaaagtaactcttgcttattgagcaccatatttaacacaaactatttagcttttaaggcaacagttatcatcataatttgcttaaatttttaggagtttactcataaagctttgctttcagtgaggataaggccggatgggcattgtgtaaactaccctgcaaatatatgcggataatttaattggtttcatattacaggaatctagagggccaattactttttcagtaat

SEQ ID NO: 327970 - DNA, 1024 bp, Homo Sapiens
  misc_feature (434)..(442): n is a, c, g, or t
tcagaatgaagccacctacgtatagtcagtcttggctggaaaaaggtgagcgctttcacctttttcagcatccctatctagtctttctgggtaggccaaactttgtaattattaccctcaatattttgtaaagttattctcccatatccaccctcaccccacccatgagtccctgagatcttacactcctgctccaaagtcctgcttctccttttatactttgactttggttgatgaacattttatactgctatcccccacccccgtgtctgggtgtagttttagagtacttccaattattcagtttctccattatcacttgtattatatacaacgtgccaccttatattttctgtcgtagtatattgtatgggctccagaaaggtagcagggtataaattttgccatactatagctcaaaatcactctgaagnnnnnnnnnaaaaaaagctttacaaggtacgatagaacttgataacaataaatcttgctatgaaaacaaactcaatatgacaacagtcaggatcttgatggcagatctcatgagagaacttcaaaaaagtttgcatcccaaacttctgaattatgtctttgggccctctaattttgatgctggagacatagctctgtgaccccctgtggtccctctccaacccctcaagtgctgcaactatgcaggcagaaccaagacgaagcctatctcttggaaagccaccctcttttctccatccctgccaccttctccttggttttgccccttcctatttcttgtcaaaatatacacaactgagattcatgctactattcttgcctctccacctcatcggatcacttttccatatcactcttaactctggcttttgcattatactgagacaacattttaaacatatttcctgccacaattgagggtggtagaatgatttcaggggactgcatcagagcaaatttctgtggcaaattatagtattttagatgacacaggggaataaactgagaagtttctgtgtcatctaccaaaaaa

SEQ ID NO: 327971 - DNA, 711 bp, Homo Sapiens
  misc_feature (140)..(150): n is a, c, g, or t
  misc_feature (405)..(471): n is a, c, g, or t
gagctagcaccatgaacttcaataccctgtggtcttatcagtataatatcgtttcatcttcttacactcaaatctcattcctgatgaaaaatttaaatcctctgtagggtgaaatgctggacctaatccttttatcttcnnnnnnnnnnngtatatgaaaatattaaatattttcaccacttctttaaaaagtaaggcagtactcctaactatgcaatcctgcccattcttgctgagatacgcattgcaatgataaagttcaggattagttcccgaaggctcctcccctgcctagtgatagttcatggttccccattgcctatgaaattccttagcagcccctccaagtctacctacatctggtcttagccactcatgacgggccctttgctgttgctgtcactnnnnnnnnnnnnnnnnnnnnnnnnnnnnnnnnnnnnnnnnnnnnnnnnnnnnnnnnnnnnnnnnnnncatctagccacatcccctttactcatcacccatgcacttaacccacattacctgactttgtctgtgttgctgacttggcctgaatgccctctctgtactttccttttcatctactcctctaagacaaagctctgctaagccttcccctgtcagccagggagagtcacacctcctcagagcaccttccgagacttccatctcagccccaacagaagtgctgggctgagatgaagtgcagag

SEQ ID NO: 327972 - DNA, 693 bp, Homo Sapiens
ctctttcttatatcaccatgcctgtggacagaaatgtcttaagatttaacaaaaatacatttatgtcatgtaagcctaaaatgatggtttgcctaggctgaatgtaatcatattttcaatacagtaagtgtgtgctctgtatatctgaagagcgaacctcttttatacccagtacgtaagatgttaggaaataattttggattttcctcagatcattttatgtataaggaacatttaatagggacatttccatcctggccagggttctcaaatgctaaaagcatgtgatgaagtccacgaggccaggcaataaagcaaaagggacaggaaagaggtagaaggactcgggtagaggaactaacgagaagggcccaggccactctctctcgggaccagtggaaagcacacagattgtgccccttccgcagcctccctatgtgggtgccgctgcttcctgagaaagccagaaggacaggagtatcatcaggggcaggctagctctccatccacaggaaggcagaggggctgttctaggaagcaggtggagaaggtaaaggagttttcttaccaaagaccagtggtttcggcaggcacagcggacaagatgaagagagaacccaacagcaaatgcagataaagtctaaatgagggcgatggggcagctggtcgtaatcatgagtgaaggaaatggag

SEQ ID NO: 327973 - DNA, 746 bp, Homo Sapiens
  misc_feature (618)..(635): n is a, c, g, or t
aaggagggttttaaatgaactacacatgcaaaatacactagaaaagctagatatttttaaaaacgtggtgaattatttggtaaagccaaaatattttaattcataagttactattcccccaatgcatctattttgtaaatgctgtttcacatatgaggtttgtaaaaaagcaaaatatatgtataaaatggcgtacataaagatgttctacaaatatagccagaagttattgttttactgtatgcaaagagtgatggcaatttttaattcaaatgtttttaaatatttcgaactgaaactaaatcttaccaatgtaaaattgccacaaagacggctggaaaagagaaaagttattaaaagctgctttattataaaataccattaaaacaagtatttcaaatgtattattttacatgtctagaaaagatagcacagaaagcaagatggccagctaatcctgtctctatgagcataggaaaaaatccaggacacaaagtaaattctgaacagagcttacctctctgcagcagggcttgacaagcaaagggagagacttgagagggtttttttacttcagttaattggtaggagtgatggaattatggaatattgtgaccnnnnnnnnnnnnnnnnnnagtattctattcctttatatgaaattttttaaagaagtaaatatatacagtatgcttcagctcgttctaaccaagaggagccactctagatcagtttctctagcattcatc

SEQ ID NO: 327974 - DNA, 706 bp, Homo Sapiens
tctacttcactgttatgattgtgttttttatttccttgctcggaaagtcttcattattgataatattagagtacttagcagccaattttcctattttttactttttagagctatagatgtatgtaggctaaaatattttattctgaatttaaccatattctgtaatacattaagaaaaccctagtgatttcttggttagaaattggtcaaaccaggaatcttagtctagaaacttttaaacttatacactgtatgtacattacttaagtactttaaaatctttaaaacatgaagtattctatttctttgacattcagtgggacacataatgaggccatcatagatttgatggtgacctaaatagccactacctctggccttgggttacttggcttccctggcccggcaacaacagattctgttacagacacctaactatctgtaatgctaccgatactaggtgagaacatgtagactttttgagggagggagaggccattcttaggatactgaggtaggaacagctagctaccatttgtattgtggttacaatgataaataaactacttcatcaaagcaattgggatttttttgttagaggatttttcagcctctttttatcctacttcattatatttattgttggggtatagttaggtaagcaaaaaagaaaaagagtatagaacagggtattgaagctcatgtg

SEQ ID NO: 327975 - DNA, 1027 bp, Homo Sapiens
  misc_feature (665)..(723): n is a, c, g, or t
ttgaatggttgataaaatttactgctactatgggcctagagtttttttgttagaaaattttttattacaaattcaatctctgtagtagatatggagttccttaagattttctatttcttcttgtgtcagttttggtaaactgtgtcttttaaagtatttgtcaatttcatcaagttgcggcttgtcaatgaagttttccatacccactttacttttaatatatgtagggtctaaactgatgccctcttttcatttgtgatgtggataatttatgttttcactttttttcttgggtgatatagtttgggatttgcatcccttgccccaaatctcatgttgaattgggggaggggtttggtgggggaccattggatcacaggggccaatttcccccttgctgttcttgtgatagtgagttctcatgagatctgatggtttaaacatgtgtggcatttcccccctcattgtcactctctctcctgccatcatgtgaaaaaggtgcttgcttgcccttcaccttctgccatgactgtaagtttactgaggactcccagtcatgcttcctgttaagcctgtgggcctgtgagtcaattaaatctcttttcttcataaattacccagtctcaggtagttctttacaacagtgtgagaacaggctaatacannnnnnnnnnnnnnnnnnnnnnnnnnnnnnnnnnnnnnnnnnnnnnnnnnnnnnnnnnncacttttaaaatttctccattgtttgtttcctatttcatgaatttcttatttcctacttatttggggttgaatttgttcctcttttctaactcctaaggtgaaaaataaattgtattggctctacatataggataaggagaaaactattatcttaacaatctgattaaataagtgaactgtatgtactggcctaaggattttaacacataccaagggatattacagacctctttcccaaactctggattcaaatatccaacagtcacctcaacatcttaagttgctcgtgccgaattactgggc

SEQ ID NO: 327976 - DNA, 388 bp, Homo Sapiens
taacaacagtgtgaagaacaggcctaatacacttgggtaagtcttgccttggggtttaatccaatttatttaccttttcaaaaggcccaacttttccacttttaaaatttcctcccattgtttgtttccctatttccatgaatttccttatttccctacttatttggggttgaatttgttccctcttttcctaactccctaaggtgaaaaataaattgtattggctctacatataggataaggagaaaactattatcttaacaatctgattaaataaatgaactgtatgtactggcctaaggattttaacacataccaagggatattacagacctctttcccaaactctggattcaaatatccaacagtcacctcaacatcttaagtt

SEQ ID NO: 327977 - DNA, 927 bp, Homo Sapiens
  misc_feature (676)..(686): n is a, c, g, or t
atcagtacaaataaaattataatgaaaagtctatgaagataatttgttctcagatgcccttcacatatagcaattaattcacaaatgatgagtcactcatgtgccttcatgaaggcaggccctcaagagacccgcaacagaaaggaaagccaccgactggagagaacctgcttcctgagccccaccaagttccaaaaaggagaatggggcttcgtcctcaccctcaaggagttgccaaactgggcttggttattattcacacttgaaaagaatgaggaaggtcagccagtcccctccaggtcgctcgggcttcctccaagctcctcttggttcaaatttgctgtgtcctccagccggcatctctcctctgttccgtaactgacagggcagcgaggtagcttccggatgactcctcccgccatggttcttccgtccatcagctcttccttcctcaactctgtggtatgtggctaggggagtttccaactcccaggggacatttcagttccccaaagataacacagctttgcacagtggatgtttacttgctggtggtcttatctaagatcaacattggcagctgtgcccggagaggcctccagggtccaggtaagtggaggcttcatgtctcaggaggtacctggtcaccacagttaggatttttctgtttggggannnnnnnnnnnatgggttggtggctctgaaaaagctgcaagtcttctctgaggactacagacctctctccaccctctccacattcagcctctctgggctccagggccaaaagatgtctacactcaggtggcagacaggcctgtgaagacctcctggtgacatgctcatatgttgctgggactaaaggtgggattttagccaccacagtgggttggtggtgagatgtttaccaacaggaggtactttgtccct

SEQ ID NO: 327978 - DNA, 831 bp, Homo Sapiens
tgccatactttttcatgtataagagttcttttttgttctgtgaacttttttaaaaaactaaaacatggtcttcatttcatggtatattctctggatttttaaaaaatttgttttcttttctctttactgaaggatctctttcctctaggctgccttcccgtttctgtgtgaggctctcctcagatggcctgcccatgtttaagagtgggggacgctgtagggatgggcactgccttctgtgagctgaacctttccttgttggggccttctgaccttagtgctgcgggttggtcctcccgggctattgtcacaagactctccctggtccctgcaggaaggggaggcttgggctggcctgcatcctggagcccagtgagcgaggggctgtagcctaatcagtaacctgattgtcccagggggatctgggctcctctgtcagagaccctgattccaccctctccagagatggagccaccctgtcttctgcccagggtgggacaggagctggaacttgtcctgcttcttagatgtctttgaaaatcagacttcctgtctctgctgcctccacacccattgcagatgctccaggcctggcccagttcttgaccctaagtataaatgggccattccactgcccgcccacgtccgtgccctctccatgtccccatattcacctatcttctttttcctatccagtagcattttggtgcctgttctcccttttccttctccctgtccacgtggattgattccttaaacaagaacaaaaaagaagtcagggaggagggatatggagagaggggcagggaggaaaatagattgcctatattc

SEQ ID NO: 327979 - DNA, 836 bp, Homo Sapiens
tttaaaaaagagcattttattttaataaagaataaaagagatcaatatactgttttaatggatacaaaaataaatattcattcagcatattaaagatatgtgctttgacattcatttgaattggagattcaagcctattgttatcttatgaacacttcagcaaacaggtctgccattcttaaaaatataatgctttgttggacaaaagggacaagccacgtcccctggtcctctcctctattcgcctgtgaactccatccacacgtaaaggacctctgggtctgactgtcccctccacaggcatggtgcctgggaaaaggaaacaggcatatctggcttttcagattttaaaccgggaaactctcacagtcacaaatccaccatgagacttgggagattggatgagctgtctcccaaaccctaacaccttccaccttctcaaaatgaaggctgccctttcactgggaggttctgaatgcgggatggtgctgactcaggctgggcacaaaggagaaaggaggacatggaaaatccgacaattcgaagtacaaatatttcaaacacatgtgaaaaccatttggaaagaagaaaagaggtatctggaatgatttcatgacagaaatgaaaaaaataaatttagttctaatcttcctggcaacaaagccccagaggagaaggtttcattgtctgaagataaaaacacacccgtttgcctggatatgaacacatattcctgcaccaaattctagaaagaatatactttcttctaacaagccaagagtttttcttgtactcattaaagggggctttaatctaaatatttttaaatcttatta

SEQ ID NO: 327980 - DNA, 418 bp, Homo Sapiens
  misc_feature (75)..(83): n is a, c, g, or t
aaattgtaaaggtatcattactgatctctatggcactctactatttttaacattgaaatcagagattgaccttgnnnnnnnnngccccaatctattatctcaatccctaacttttagagctataagggacttttcagcattccaaccctttccttctacatatgagtgccaaggatattaaatcagttgtccagcatcatggttggaagtgttggaattagggttccaaattcctaggacagagtactgtgtagaggaacaaatccttactctgattaaacagaatgcatttgaatgctctttctcttgcccacaaacaacatcttttggcacaaaagatttcccagtaggaaaatagagatatcatcacctgcttcataggatcatgatgagaactaagtaggatagcatatctaag

SEQ ID NO: 327981 - DNA, 672 bp, Homo Sapiens
  misc_feature (237)..(271): n is a, c, g, or t
  misc_feature (493)..(515): n is a, c, g, or t
  misc_feature (541)..(605): n is a, c, g, or t
gctttccttctgaccagaaacacacatttgggggtggctacgtctttagggtgctacttaaaacagcagactgagttgaagcacagctttgccacagggcctttgtctcattgtcactctgtgtgactaacctgtgtaatcattgtgttgtcatcagtacctgtataaaaacaggatctgtttgggattaccagaagcttcttaatgacagtgtcttctcatgaatgtagtgtatannnnnnnnnnnnnnnnnnnnnnnnnnnnnnnnnnnaaaaactttcaaacctgcataaaccttaaaataagaggataattaattccctgaatacctttaccccagaatcgcccagttgcctagccattggctacattctggcactgtattctttccttaatacaagaaatacagaggtgaaagaagcctaggagatagttttattattaaaattagggtgattagcctgagcagcatgatgaggccctgtctctaccnnnnnnnnnnnnnnnnnnnnnnncagaaattagccggttagtacacatnnnnnnnnnnnnnnnnnnnnnnnnnnnnnnnnnnnnnnnnnnnnnnnnnnnnnnnnnnnnnnnnntgcagtgagctgagatcatgccatatcactacactccagcctgggtgacagagacagaccctatctc

SEQ ID NO: 327982 - DNA, 603 bp, Homo Sapiens
  misc_feature (118)..(118): n is a, c, g, or t
  misc_feature (361)..(361): n is a, c, g, or t
taaacccaagttacttcgatgactagatactggaggtctgaaggagaagctttaaaaatacagattgattgcttcagagaaatcctatttataattatgatctgaacttattctatgnattaggcaaatatatcatctgaaaataaaacatgagttctctccccagacttttgtttttcaggatggtgagttttggtctgggaccctcatggcacccattttgataaaaggaaaaagatagtaaaacaggaaataggaagtttccagagatttgggcatctcaggattccatgaaatgctgagactaacccactaaatccaaattttattggctatggtaaatcctaaatctgttcagtgnttctgaacagattttatgagtttatgtctaagagtttatgtctaagagaggtacataattcacaaacactatcatgctggcagctgttttgtccacatcaattcccttgatttaatgctctgatttcaatttagaaagtactgagacatgtaaagtctcaaaataggaaaaacctatcctgtttataagggtgtggtcaataaatagaccacagataatcttagtctattaattaagcggcc

SEQ ID NO: 327983 - DNA, 476 bp, Homo Sapiens
  misc_feature (114)..(153): n is a, c, g, or t
  misc_feature (206)..(241): n is a, c, g, or t
  misc_feature (244)..(421): n is a, c, g, or t
gcctaataacacaacctctaaatgcataaaacaaaaactaacaaaactcaaaggagaaataaacaaattcataaagatagcttatataaaaatataacagcaaattaatctaannnnnnnnnnnnnnnnnnnnnnnnnnnnnnnnnnnnnnnnacttatgtcataaacatagtttatataaaaatataacagcaaattgatctaannnnnnnnnnnnnnnnnnnnnnnnnnnnnnnnnnnnggnnnnnnnnnnnnnnnnnnnnnnnnnnnnnnnnnnnnnnnnnnnnnnnnnnnnnnnnnnnnnnnnnnnnnnnnnnnnnnnnnnnnnnnnnnnnnnnnnnnnnnnnnnnnnnnnnnnnnnnnnnnnnnnnnnnnnnnnnnnnnnnnnnnnnnnnnnnnnnnnnnnnnnnnnnnnnnnnnnaccacgttggtctcaaattcctgagcttagacaatctacctgccttggccttcca

SEQ ID NO: 327984 - DNA, 347 bp, Homo Sapiens
ccattaatcaccaaatactgtatcatttaggagatattggacccatgatttttttccagcttttatcaagttgatttttaacatttgaaaatcttaatattttccattttaatttacagtacatgcagaaaactaaatcaggaacacacacattccagacattttacagaccatttcatcattgttatttaagagctaaattcactgccatcatcatcgtcataatcatccagcaaacttattttgctactcagtcacctttctagatctcaaactctcaacacgcaggaggtctagtgagaggggcaagtaaaaatgctaatgagactgggtgtggtggctcacac

SEQ ID NO: 327985 - DNA, 561 bp, Homo Sapiens
  misc_feature (103)..(103): n is a, c, g, or t
  misc_feature (112)..(112): n is a, c, g, or t
  misc_feature (551)..(551): n is a, c, g, or t
tctcactcactctctggatacccaggcatcctgcctagcacatggggcctaggaacagatcacatttcctccaccaactccagatatgccctaaactatctgnaacatgggnacaagtttattcctgttagcctcgggctaagtccacaaaaatgtttttcgggctccaagagtccctttatagtcccaatacttcacttacaagatgaccacagatgagttgtttttttaaaagcaaaaataaaaatttccctgggttacacctcatcagccacaacactaaaccagcaccaccaagcccaacctacagttgctcttggtggtctggtggctgctgcgttcccaacacagtaacaacatcataactaagtggttcaagtttaattccactaaaatcacatcatggaactggaacattagaaaggattactgacaaacggggaaaagaacatgaatccaggctccacaggcatttgactcacccttgagtcacatccaatattcacatgccaagagtaatgccttttgactcattatcaattaagtgtttnctggagacct

SEQ ID NO: 327986 - DNA, 911 bp, Homo Sapiens
  misc_feature (43)..(43): n is a, c, g, or t
  misc_feature (623)..(623): n is a, c, g, or t
gcatttgtattagttgctattcctaccaccatgtctatacatntatattatatgcaaaagatccacataatttaccatttgtgtatgtttcactattcgaacaggccgcagcaactgtaccagctgcaaaagtaattaaaatattacttgggtattactaattgttctgtagacaaagataaaatctgaagatcattagcaaatacattacctttaagctgagttgctaatatggaacccttacatatatacccaatactaaaataaagctaactctgttttaagattctgggtcatatagcccattctaaacaaaatgttcaataatcaataaatcactcattgataggttaacaaagatattcaatgctgaatgtctgagagttaaagacaacatctgcatagcattcatcatatataaccacttctaattactcatatgggaaactgtcctttaaatgagaaaattctgatgccatgaaggaggtccaaaacagcatttcgagattgctcttttctaattttgaaggtgcttctctgggctttcctaggtttttgctttccctcagaggattctagtttggccattactacattattggttcccaggggcctctggctgncttatcatcaccatcaaagataatgtcttctggatttggaggtggagggcagaattcttcagttggaaagatctcctggaaaagtgtttcagcttgcttgacagcatgctcatttcccaggccacagtcaggcccagagcagacataaacattggaaggcaagccattatacgagcttctgctgattcccgaggaatctctcatattaaaataaagagcccacaagagtcttggctttgtaagttcttcctcgtttatttctgtttcagtatacggagtgaataattt

SEQ ID NO: 327987 - DNA, 607 bp, Homo Sapiens
acaattttaatgagaagttgtcaaaaggtttttagaaattttctatgatgaattttgttctagaaaatattctaaggctgtgctgtgatgcaaacatattgaaaaaatagaaagtgataacaaaacggttggctgctgtgtaatgagatagcagtccctaagcatgaattggaaccatacgatttaagagttacacctacttaatacaaagcttgatttttatggtccttatgtgtttctgtccacagaatttctgtgtgcctgtgtgactagagtatgaatttaaccaagcatacttgttattttgtactttgaagtgtgcttacataggtttatcttcaaattctttcagatttgccagtgaagaaaaagatagggtgagcatacaactgcttaatatagtatccagatggaaataggttaaatatacaattagggtggtatttgatagtttaaagataaagagaaaaataaactgggctgatacacagggacttggaaggtggttggttaagccacgccaggagtgaaccaaggctctcccttgtgttgctgggttcttgtgcgcctctctgagagaattacacattttacagcagggtattga

SEQ ID NO: 327988 - DNA, 1023 bp, Homo Sapiens
  misc_feature (935)..(972): n is a, c, g, or t
  misc_feature (1013)..(1013): n is a, c, g, or t
ttttcaggtttctaacatttaatctccacttagggaattggaggtcagaaatgaataaaataccatgccccagtaggctccagtctagggaagtgggcagcaggcagaaaccaagacacagaaagcaacgacacataacagatatgctatgatacaaatggtgctgcaggagctgcacagttcggaggccatttctggccagaggatgggatgcgtgaaatccaggaaggcttccaggaaggagtagctggcactgggatgggcaggaacagcaatgtctctactgatggtttcattggagaaagctggcaaagttgagaagtttggagactaaccgtgacaaaatttaaacatcaggtatgtgaaggcaagggggaccaactgtgacaaaatgtaaacgtcaagtgtgtgaagtcaaaggggaaccaggaaagtaaaagagtgacaatcagcagtgcttttggcaaaaaggcctctggcagcagtgtagaagagaaacgcagagatcacaggtataagaatgacagtaggagaggggaggagggtacatatttcagaggcatcacaggggggtgtactgataggacgggggcctgcttgtatgaaggtgaaagaggaggagggagagtgtctctgggagatggggtgaatggtagtgttctgagcagagagagcagggaaatcaggaggaggagtggttcagggaagaggcaggggttcagatgccaagttctgcattggccaagctgaagtcagaggtgcctgggagactcccatgtgggtctggggatagaagaaagctctgagttcagcaatgatcatggaaaccaagggagggttgacagcaccctgaggtgggggagacatgggcactgaggagggatcttgaatgattcctacattaaagacatcctgactgggcacagtggctcatnnnnnnnnnnnnnnnnnnnnnnnnnnnnnnnnnnnnnngccaaaatggtgaaacgtctcgtgccgctcgtgccgaattnctggcctcga

SEQ ID NO: 327989 - DNA, 573 bp, Homo Sapiens
  misc_feature (296)..(296): n is a, c, g, or t
  misc_feature (303)..(303): n is a, c, g, or t
ttttcaggtttctaacatttaatctccacttagggaattggaggtcagaaatgaataaaataccatgccccagtaggctccagtctagggaagtgggcagcaggcagaaaccaagacacagaaagcaacgacacataacagatatgctatgatacaaatggtgctgcaggagctgcacagttcggaggccatttctggccagaggatgggatgcgtgaaatccaggaaggcttccaggaaggagtagctggcactgggatgggcaggaacagcaatgtctctacttggatggggtnttttttnccttaaccccccaattggagaaagctggcaaagttgagaagtttggagactaaccgtgacaaaatttaaacatcaggtatgtgaaggcaagggggaccaactgtgacaaaatgtaaacgtcaagtgtgtgaagtcaaaggggaaccaggaaagtaaaagagtgacaatcagcagtgcttttggcaaaaaggcctctggcagcagtgtagaagagaaacgcagagatcacaggtataagaatgacagtaggagaggggaggagggtacata

SEQ ID NO: 327990 - DNA, 490 bp, Homo Sapiens
gaactatttacccaatttcccttgcttatgcatgcttaaattttgtataagcttaaatatcttttccatctaagctgtactctatccccttttataactttaggtggctgtctttattaaaagttttttcttgaaagtcttaaaacaatatagttcttggcaatttgaaagttatttgagaaggggaaatttataatgacaattcaaatgaagcaaactaaaaaataatgaagaaagacagaggaaaaagcagtattcacttgaacacatcccaaacaaagaaaatttcaaatgtaacaaggaaaaagcctgctaaagctcacaatacagaaataactattgatactcaaaatagctttaaagccctgctcaccttttgaatgttgggaattgaccaggaggtgactgtaactgtaagatggttcttccagtaatgaccattttctttttcaagatgatgattattctccaccgtctaagagaccaaagg

SEQ ID NO: 327991 - DNA, 907 bp, Homo Sapiens
  misc_feature (17)..(17): n is a, c, g, or t
  misc_feature (27)..(27): n is a, c, g, or t
tgcagatgtaccttctnaaagtttttncttaaagtttgggaaatattgaaatacgcttgcattccttacatacccaatgactgatggctggaggaagtagctagaagctaagtcacaaaatttacccctttcttacctccccatttcacctttgttccccaagaaaataaagttgcctatagttaaatctccaccaataggctaccttccaagagggactctttgctgaggaggtgaatgggcattggagcatctgaactcataggactcttacctttttcaggcttgccactcttaggtccccacaaaaaccacgctgtagccgttgtaaacgtaggaggccacagaggtcatgcggtccctgctggtggtgtacagggtcaggccctccactggagttgagcctcccaggggctggttgatgtccagtccacagaagttatcatcgatggggacaggctggagggaagcggaaggaattggggtgagtaacagtggaggcatggtgaagtctctacacgacccatatccacaacttcccagccttaggacacccaggcctcaagagaggcagacatgggagttcaggggccctaatacaagctgcagacaaaaacttctcaccagctcacccacaaattccatgttggttcttatgaagccagatgaaagaacaggcagcaaccttccactcagctggcgtcacctgtatctacctttctgccaggagaaccaggatcaatttgtaaagctaagtgcctgaactcattttctatttattttaatgttcctcaggaccatggcattctgtgggatctttctatttcagacaagagttccttcagtggataatcagtctaaaggcaacattacaggatttctaccagcccagaaagggtttcttgtt

SEQ ID NO: 327992 - DNA, 620 bp, Homo Sapiens
ggaatcttttaaaggcaggctaaaagaatcaagaaaaattaattagaaaaatgaggaaacaaagctaatttttaaaatatgtagtaaaatatgtaacattttagctaacattacaagagaagacaaacacaaaataagaattaccaagtattgaataggtaagagtcataaaatattctttgctcaactgtatgcaaacaatttaaaaacttggattaaatggataattttccagggaaggtatagtttgccaaaaaatgacatcaaaagaaatctaatataacaattgtcataggaaggaaatgaagtaagtatttcaattagcatgacagactaaatacttttaaagacccaatgaaaacaaagaaatgcatttggagaattaacagaaactttttgtaacaccaattttttattttacattttaaagcatggaatggaatttattgtaaagacgtgtattttatagaatccaagcaaaagctcaccagccagagataaagtgaggccagctcagggaatgtgagcagtggcgatttattccctctggtgttccatgttagcctgacacagagccccctcttcacattctcaggggctcttgatccaaaacctttttt

SEQ ID NO: 327993 - DNA, 674 bp, Homo Sapiens
  misc_feature (43)..(43): n is a, c, g, or t
  misc_feature (83)..(273): n is a, c, g, or t
ggagaaagtcttgctctgtcacccaggttagagtgcagtggcnaatcacggctcacagaagccttgacttcccgggcttaggnnnnnnnnnnnnnnnnnnnnnnnnnnnnnnnnnnnnnnnnnnnnnnnnnnnnnnnnnnnnnnnnnnnnnnnnnnnnnnnnnnnnnnnnnnnnnnnnnnnnnnnnnnnnnnnnnnnnnnnnnnnnnnnnnnnnnnnnnnnnnnnnnnnnnnnnnnnnnnnnnnnnnnnnnnnnnnnnnnnnnnnnnnnnnnntcactaacccgcatatggccaattttctaaattcttaaatgcgattctttggcagtgttgttttgtgaccaaaaataaaatggttcctagaaataaacacatcacctatttcataataaaaaggaggaataataattcaatttacagaaattttattctcatctaccccaaaaacgagatcattgcatacattaaatagcatctcaggcttctaaaataattaacataaaccctacaatgcctattttatgcttaggaagactatagaggtaaatagtaccagttatactaagattaatacatgatataaagaaagtaaactctgcatgcaacttttgaaaaagagaaaactacacataaggggaaaatacataacttttagaaatgcatattagtccttt

SEQ ID NO: 327994 - DNA, 727 bp, Homo Sapiens
ggccgcttaattaaaaagttttgcattttaattgtattcaaatgatatccaactataaatattcttctataacttactgtgtttgggagacttattcatgtaaatacatgtagctttaatccactgacagttaactgctgcataaacgtgccacaattaatccagtctcctatgacagatgcaggtgttttcaataatctgctgttacaatgctgtaacactctcctacgtgtcgtccatgcacatgtgcgagagtaacaagggtggaaagaaggacagagagaggctatcagtgcttgtgtgagtatatgaaatctgcccgctggctctcacacggtttggaggtgaaatgtgagagaagggcaaacagcagttgtgctccaccgtaggcatccatgggccctccacagagtctagatttagagtcacaagagggccttacagaagggctctattcctccaacccgcattcaggggggcaggttgggctatgtcacagagcacgtcagtggaaaacctgggactaaaactaggtttcccttcttcactgccttctttctcaaatcaagatctgtaggccagcaacatcagtgtcacctagaaacttgttaataatacaggctcttgggtcatattccagacttactgaatcagaatttgcattttaacaagattctgagctacacattcaagttttaaagatggaaaagtactctagagtatgtat

SEQ ID NO: 327995 - DNA, 451 bp, Homo Sapiens
ctccagatacatactctagagtacttttccatctttaaaacttgaatgtgtagctcagaatcttgttaaaatgcaaattctgattcagtaagtctggaatatgacccaagagcctgtattattaacaagtttctaggtgacactgatgttgctggcctacagatcttgatttgagaaagaaggcagtgaagaagggaaacctagttttagtcccaggttttccactgacgtgctctgtgacataggccaagctgcctcctgagtgcgggttggaggatagaggccttctgtaaggcctcttgtgactctaaatctagactctgtggagggccatggatgcctacggtgggagcacaactggctgttttgccctttttctcacattttcacctccaaccgtgttgaggaggccagcgggcaggattttcatatgattcacacaaggcactgg

SEQ ID NO: 327996 - DNA, 735 bp, Homo Sapiens
atcttgttctccagtgtgtacttttggtaaaagacatggtaataataggtctgcaggtgacactattcacctgctcttcctaagggatgctgggtcttgaggaaccggcagtagagacactgaattgcttatagactcacatctggtatcatcaggttggacctgggatactgtctggctaactaacacttcctgggcccccatgactgcagagttccaggttctacatcagtacccggttctctgaaatatgtactcattggggtctcatgaatatgggaattgaaatccattttactgttgtactcacttaggaggggaacatagcctttgtttccttacttaaccatgtgagccacagagtaagaagaaaaccgtctctttaaaagctgctatttaggtagctgccttcatggcagataaatcttttccacaggtttggaaaatatcaaagatgcatctgtttcataattacatggtggctttctatctaatgaatgcctgtgtaggctgctacgttaagcatacaaagaggataggagaagaaagttacttcgtatttatttttcaggcttttcctgtctgtgttcttacttcgttattgtggggtttctgcagactgagtccctgtggaagagaggttgtgtcctgctcattgtggtacagcagtggcttaagggagaactggagccctgacttcacccccaccccactccctttatttgacctgggatt

SEQ ID NO: 327997 - DNA, 903 bp, Homo Sapiens
  misc_feature (634)..(658): n is a, c, g, or t
ggatttttagtagcctatagattatcactcaataaaacaaattaattgtttttaagtgaattgccaaaagtcattttaaaaaggaaactctatggttattatggtttctgctagaaagaattctgacagctcataaaagcaatatgtataatttttcattttttagaagaaaataaatactttcatgtaatggcttgagactctgaattgctccaattcctgaagattatttattaatcatttagtcttttaatatatttgagtgtgggttccctggcagaggagggagttcagaagagaccctgatttcccccccaaaaggaagccacaaatctcttaagagcccctagtgcattggggcagccaggttttaatgggcctttggtgggttatcagcccgtcttggcctctgctctttatctgatagtgaccccatgggccaaccctgttggggtcccctctcaatgcgggtgccctaaagagtcatcgctgagtccatttaggcaaagggttagaatgatttaaaagtaaaatggtctcccaaacccaaatctaagtaaacggagggagggaaaaaagagtcaagcaagccaccacgttccttcgttccttctcctcatttccacccccactnnnnnnnnnnnnnnnnnnnnnnnnntgcttttagaaaagtgagtggaaaaagaggccaatctatagacacagccaactgcaaatttcgttttgttttagaaatcacaatctaagtgtggaaactgtataaagcttaaaaataaccgcaacaatacttttttaaaaagtgaatattcgtcgttgtaataagatcaagacccagctgaggcttggaactataaaaagcttatattaaattaatctccccttaaaggggacaattatttaaac

SEQ ID NO: 327998 - DNA, 784 bp, Homo Sapiens
  misc_feature (761)..(761): n is a, c, g, or t
gatttgagatgatgaactattatgtaaaattataaatgagcaaaatgttgttttttgtattgttaatcaaatcagaaactggtcttaaaagatttacaaaattcacaagggtatgaaaaacagaggttgtatttactgattggtctgtttaatggaaattgtctaatggaattgtctcatattttcaaatgggattttgttttcatggaatttaattagtctgattataatttacaagttcttttaaaaagtacaggagcagctttttaaagtttgagaaacagaaaaaagtaattgactaaagaaatttacaactaacatgcctggtccactattttcctcatagcagtgcctgtatcacaagcatacttatccaccatgaatctgtgtgtgcttttgcaagttgacattattgcttcctgagtgaagctgtagaaaccatttctatctagcaatgccgaattcttgatcttggttccttctgtttgactctcattagttttagcataaacaggtaaatgtgcttttttaaaagtatatttcaaaaaacaactccataaaattacatatctgtcaatctttgttttatttctatgttactgttggaagctagctgttaattttgtttaggttgaaatggttttaccttttaaaaacctacccccgcccttgctccaacagcattgcatgctggaaaaaacactagagtaagaataagaaatgtgggttcttgctccaggctctgccactaactagtttgngactttggataagtaatggaagt

SEQ ID NO: 327999 - DNA, 781 bp, Homo Sapiens
aattggactatctcatctgattgtcaatttatctgattatgagctgccaagaagtgatttgtctacgcttagagagattaagaggcaaatgcaaaccaaaatacaaatgagtttgacatgattgaaatgtattaaaagcaaccatttgattaaccacaggtataaatggttggtctttcaggtgggttcttataaatatgacatataatagccacagatgcaaccaaggtttacctaggtttcatgagcctatttcttttaatagttataagacattaatatgaaaattattttctaatgagtcattcttttgcttcagaaaataaattcctttgtgtaggaaaataagtcatgctcatttatgtagaatttcttacctagtaaaatagtggtatggttatagacattaagtatagagtgctaataactgaaaaatataaaatcaaaatgaagaaataaacatcccaagtatattttcactaaaatataccttttccaataaagaaaaataatattttaatccatttattatttacctacaaacattaatttttttaaagtaacaagatccctacgttctcccagtagcacacagatgcatgtgcctacaaaatatagtatgtaagaataagattttttctttgaaacaaatctccataaagtctatttttaaatataatttttttaccgcttatcctcaagttctaaaataaaaattttaacagaatttcagcctaattggcatgatgctgttaatttaagatttcaaatctttacagag

SEQ ID NO: 328000 - DNA, 676 bp, Homo Sapiens
tttttttaaccactatcatttcttttcagaattgctaataattagcaaaatggaccaatgtaagttccatttccataaataaaagtatgattagggcaacagcttcttattaagggcagaagaaaagagctcctgcttgccatgtgtcaccctctgctcggagttccatattctcacctgacttggtttttcatggcagcatgcagtgctagtaagtagatgatttcatagacgagatgagctgagctggcacaggcacataaccgtgcccagacattttgaagctgggattgggatcctggcctgactgcagagcaaaatacaccatttggtgcatcctggcaccggcccacatgtgtggctctgcagagaggcagcgggcttttctcatctctgcccccgtccgccgcttctcattccacccccacactccctggaagaacaggacccagagtaaccctgcatgtgctcgggctcctagagtggggctgagcagctttctgtcccactgagcctccctttccaggttggggcaggcaagtggattcgacaggctgccagaagactgcaaggtcattgggagttttaatctgtgactgtgtcatgaaggacatttgtactcgaattcatggagtgccactcctgatgggagaggaggcccatgacagtgacagtc

SEQ ID NO: 328001 - DNA, 363 bp, Homo Sapiens
  misc_feature (134)..(152): n is a, c, g, or t
agagtttctttttttgatcacttactttcaaagcacacagtcaaacaaggttatgccaaatttccaggcctttttgaagtattgagaaggggaaggggatttctcacttcaattatagatcataataggaagcnnnnnnnnnnnnnnnnnnngcaaacatatgcacgcacttttcttgttgacaaagcaagaatgtaggtttgctgtgtaggtttggtgctctattgattggtgagtgaccagagcaagtatgaaggtgatgctgccaaagcacaagccagtttcttgggaaaattcaagttacagtggagtatttttttgaagaccatatgcttggaggtagaaacaaaccaacgaccaaaa

SEQ ID NO: 328002 - DNA, 725 bp, Homo Sapiens
aacacatggaataccaacatcctccgtgttctttttagtttgttgcagtgtatttttagattacaaaaaaagcaaagttttatcagtagtctcattaatcagtaaaacatttaaagtagttcgtttaaaagaaattttatttctagaatggaatgatttggatgtgacctgataaatacagtttgttattgtggtctcattaaattaatcagctttttcacactggggtaaagaaacagatgatgatactagggaatggaaacaaaattggaaacctgggttatttggggatttatattgtactctgcacagttgcccttttttttaggcgtgttccctggaaaagagggacggatgaacctggaagtaagtaaaagacattctaggtgtgtagcatcaaggcagttaatatccaagcatcagctttctctttatacatctacactgcatggcctgcaccaaataaggaactgaaccaggggtatgtttttacctccacagctgcctccttccatcagagcaccttgatgaacttaatgtctagtcacacgtcattggcatgttttctccccagcatttaattacaaagctgggaaacaaaagatgatagatacagttttactactgcatacaaacatttcttttttacattcagtattaacttatcaatatagggagatgtgcatactatttcctgagctactgaaggttttttactctctctg

SEQ ID NO: 328003 - DNA, 373 bp, Homo Sapiens
  misc_feature (175)..(289): n is a, c, g, or t
ttttttgccgcttttaaattgactatactattttatatttaataccataaacttacattattttgagaataggccttaaattctttttgagaaatagggaagttatgtaaaataaacatggggttaagaattaaatacagcgaatagaaataaatataatctggtggctcacacnnnnnnnnnnnnnnnnnnnnnnnnnnnnnnnnnnnnnnnnnnnnnnnnnnnnnnnnnnnnnnnnnnnnnnnnnnnnnnnnnnnnnnnnnnnnnnnnnnnnnnnnnnnnnnnnnnncataaatatttaaaaatgtgtttcctgccctccattcggcactgccttaacaccagataccaataacatcaacttgctagaatg

SEQ ID NO: 328004 - DNA, 377 bp, Homo Sapiens
  misc_feature (14)..(14): n is a, c, g, or t
  misc_feature (180)..(294): n is a, c, g, or t
  misc_feature (329)..(329): n is a, c, g, or t
  misc_feature (331)..(332): n is a, c, g, or t
tttgcccgcttttnaaattgaactaatactattttcatatttaaatccccataaacttacattattttgagaataggcccttaaattctttttgagaaatagggaagttatgtaaaataaacatggggttaagaattaaatacagcgaatagaaataaatataatctggtggctcacacnnnnnnnnnnnnnnnnnnnnnnnnnnnnnnnnnnnnnnnnnnnnnnnnnnnnnnnnnnnnnnnnnnnnnnnnnnnnnnnnnnnnnnnnnnnnnnnnnnnnnnnnnnnnnnnnnnncataaatatttaaaaatgtgtttcctgccctccantnngcactgccttaacaccagataccaataacatcaacttgctagaat

SEQ ID NO: 328005 - DNA, 418 bp, Homo Sapiens
attagttttgatttatttcccaaggtgagataaatcccttttaataaaataacctagcctggaaactttgtgattacctttttgactatgcagaccactttttttgtaggtgtgggtaaaactttaggagaacaaaagaaatgataataaaaattttgtatagtttgtctttattgttgtagcaactttgtcctcttacttatatcatacttaaaaacatcttgaagttcattccttattgtatttggttctgtgtttataaaggaagaagagaatttttaatatcatctaaaatgtttgcactgccagattgaaaaatgctttgttatctctgaaaacaaaatgatcaaaatagttcttcagtagaagctataagctgctttttattaaaacatacaggccaggcgcagtggctcgt

SEQ ID NO: 328006 - DNA, 188 bp, Homo Sapiens
gaaatgtaatgtagtctattttactttgaaaggattcctttatttactttgaaaggattcctttttcaagaaatagctttggagaaaacaaacaaagaaaataaccaaaataaactgtccctaactccttttccttgagtattgaattttctgaaggaaaccctccctgaagaatgtttatatatata

SEQ ID NO: 328007 - DNA, 834 bp, Homo Sapiens
  misc_feature (747)..(747): n is a, c, g, or t
  misc_feature (755)..(755): n is a, c, g, or t
  misc_feature (797)..(797): n is a, c, g, or t
tcttttaaaaaataaaatgtacatatggacgtttttgtttcagaattgcttttgttttaaaatgaaaatactttatcttatagactatcttttaaaaagtattctaaggcaatgaaaatctaggaattccacccacacataggttcatcccctcctgtactttcattctttttagtaataccacaggaaatataaataccacagccaatcttaacctgcccctctccatttcttctttatggcctttggttcttcacttggtattacaaagtactgtgtcttttgggaaccttagttatagacaccagaaatggttttgttctaaattgccacttgcacccaaagcaataggaaaccctttctgggagacaaaggaagtctgtgctgagacttttggccactggatgccactgttgatccagcagaggtcggcagatgagcagaggcatcttcagaaaaagtacctctcttctttgtctcagaatatcctttcacttctctacctcaaaaataccttatggctggcagagaaaagcatatatccttgatttagcaagcatctctcggtacatttttgcctccatggatttcagaatctcattttctagaaacgaatggttgtccttcagtgagcggcgaagtactcatggcacacataggcacagcactcagtcttctttcttttcctgcattccttgaataattgtagagaactacacgctgtacttaatgctctttgtaattctnagggcagntctccttttcttcctgctttttcctgcttccctttgggcagngatttgtagtcaggctgcagggctgcttctgatttcc

SEQ ID NO: 328008 - DNA, 804 bp, Homo Sapiens
  misc_feature (368)..(611): n is a, c, g, or t
ctttcttatctttcagtcccccatatgccctcctccaatagaatgtttgaaattacaaaaggttcagacaacaccatagaaggaaagaaattacaaatggaacactattttgtgtatatttgtttttaaaaatttctgaatctgcatttaatgaatttttattgaatgatgtgttgaatatttgttacctataattattgaaattattgataattaatgataattaatgaaaacagaaatcatgatattaaatactataggtaacatattattgttgtattcaggttaggttttacaactgtggcacagtagtagcacctacaattactttctaaatatgtttattgggccgggcgcggtggctcatnnnnnnnnnnnnnnnnnnnnnnnnnnnnnnnnnnnnnnnnnnnnnnnnnnnnnnnnnnnnnnnnnnnnnnnnnnnnnnnnnnnnnnnnnnnnnnnnnnnnnnnnnnnnnnnnnnnnnnnnnnnnnnnnnnnnnnnnnnnnnnnnnnnnnnnnnnnnnnnnnnnnnnnnnnnnnnnnnnnnnnnnnnnnnnnnnnnnnnnnnnnnnnnnnnnnnnnnnnnnnnnnnnnnnnnnnnnnnnnnnnnnagagcggaactccatctctaaagaaataaatatgtttattgtgaaatataattcatataatgtagaaagatatgaattgaaaagtacgtcttgcttctaagactctgcatttagaacagagaaaaatatttaagggccaaaaacttcgcattggtctatgacataaaattacaaattcaaaagctctgcaaat

SEQ ID NO: 328009 - DNA, 560 bp, Homo Sapiens
gtagagacagggtctccctttgttgtccaggtggatcttgagctcctgacttcaagtgatcttcctgcctctgcctccccaagtgttgaacacttctgattactccactccatggaatgagtgactgatctgattggtgggatgggaactggcaggcttctattgggccacactaccagtaggtgaggccactgcactccatcctaagctagactctctctgggatctgtgtggggctaagcggagtgaggtgctctcctctgcctttccctggtttctctgcttgttactgggtggttaagttgaattccaaggtgtgagagaggagacctgcagcattttcctttccaggtttactaggataaaggctgatttcttcatccccatctggctcctagcatctattctcaattggttcaaactctgagcggaggaagggaaatgaatagcaccccaaaacctcaaatattggaggaaaactacacatgcagccttaatctagtgcttgaatttgtcttccagaaaagcttcattattttcctgaaatatataaatgctcg

SEQ ID NO: 328010 - DNA, 551 bp, Homo Sapiens
  misc_feature (256)..(256): n is a, c, g, or t
aaaagtaagcacttttacacaagataaactttctgccctcaagaataaacaatcaagtgaaggaagaaatacaagtttgtggattatagcaatataattcaattttatagtgccaaataatgctatttctccctaatagtattctgcgataagagatccttggagatgttaagaggtgacaagaaaaagttaaataattttacacaatgggaaagcatattctcttctcagagacattcacattgttatattaaanggctctgggaggtttgtcagaaggaacgtatattaaagtttttctaacccaacattttacaagtaatttgagcagagaacgattctctcacaacaagatcaagatgtggtggctcattaaatcagaaataaatgtattaaataatttaatttccactgaaagatgagaatacgcataaagagagaaattcgaattttaagtggacattataaaatggggaatattttgccgtagaggaatgtggatggaaaccaccaaaggtataagaaataccaagattagaaaatgctggtca

SEQ ID NO: 328011 - DNA, 503 bp, Homo Sapiens
  misc_feature (480)..(480): n is a, c, g, or t
tgcaaagttgtgacatcagtacagtgtgttattgtacccgtccaggggccacagccctcaccttcctttcaaaccccattctcaggatagggtctgaaactcctgccctgcagaaaaggcttgtgtgtctcccctcccctggtggaacctgcatttcgctttgttctaatcagaggaaatgaaagctgaaaatcgtgcaaacgtcaggcagttgccctggctgggaatgaagctgcaggccacacccctccctagaagtcctgccgtcctgctggccctggccttggcagaagtgcaggttgttctggttctgcccagcctccttctggttcttttccaggcctggttcttttccaggctctcttcccacctttgaacaatgacagaaagaggcaggggcctcatgctgctgtcgagctagattgtgaaactggccaggaatggggcaaggagaggcaaattccctgagcactttgaatnccatggtgttaggagctcgtgcc

SEQ ID NO: 328012 - DNA, 748 bp, Homo Sapiens
  misc_feature (191)..(221): n is a, c, g, or t
  misc_feature (428)..(428): n is a, c, g, or t
catgtgattcagttagaacatatacatttaaattcatcattgctacaaataaacattttataaacttcctctaggacaatgattttaataaagatgagtcaactactgatttcaacattagcacaattgagaagtaaaaatttaaaatatttccttccactcttcagacacaaactaatttgaataaaaannnnnnnnnnnnnnnnnnnnnnnnnnnnnnngaagcttgctactaaaattctgacagggcaagtccccaaattgccttttacactaaagctcaaacagttgtctgtcactgctattactatgagtaatccttgcagctgtaactgtttgaaatgcagctgtctcgttggcattctctccccacccccagccatgcagcatttctgttcttgcctacaataatcttaaagagcattttnacaggaggcttaagccctggctgagggcactctacggcgtgaccgagagaacatggaaacacgattcattagacacgccctggagtgataacaatggtgctgcttcttactgcctttcatttcgtacatcaggctgagactaatgcattctcgttacacaacaagcacatttatagacaggggaaaactgtaatcacctttgattaagagacagcatatttttcctatatgagctgccagccatactgacatagtaattattttttaactgacaggttaaaatagcaaatgtagcaaaaataacatctgcagagagagag

SEQ ID NO: 328013 - DNA, 805 bp, Homo Sapiens
  misc_feature (166)..(166): n is a, c, g, or t
  misc_feature (601)..(678): n is a, c, g, or t
tattgtattgatctcttattattcgtgagtgaaattgcagggtcataggaagtgagaatgatcatctttaagtgagaacactaacttgttttccaaaatggtcgtacaaccactggggatcctgttgctccacaccttcccaatagttgtattatcaatgtttttnataatttttgccaacgcagtaggtatagaatcatgtctcatcatagtcatgatttgcctttgtctgtggccgagcatctctgcatatgtccactggcctcacacacctcccttctgtgcggtgaccgtgcttctcatgccttgtgcccacttttctgcagttgtttcctcactagtttgtgggctatttttatatattctaggtgctaatcctgtcagttgaatgtcttacaggatatcttcttccagtttatagattgtctttcttctctttaaagtgtcttctgatggacaaaggctttaatattaatgtagccaaacttattgatcttttcttttatgcctgtccttttttctatctttgtaaattcttccctacttcaagctcagaaagatactcacttatatttccttttcaaattctcagagtttgctnnnnnnnnnnnnnnnnnnnnnnnnnnnnnnnnnnnnnnnnnnnnnnnnnnnnnnnnnnnnnnnnnnnnnnnnnnnnnncccccccatggataaacaatttttccagcttttccttttccaggcagttctgtcaaaaatcaaagtttcacagatatatacgtgtttttctaggctcttagaattctgtaccattggtcagtttatc

SEQ ID NO: 328014 - DNA, 594 bp, Homo Sapiens
  misc_feature (241)..(241): n is a, c, g, or t
  misc_feature (312)..(312): n is a, c, g, or t
  misc_feature (370)..(370): n is a, c, g, or t
  misc_feature (549)..(549): n is a, c, g, or t
aaccctcactaccttcctcctgtacaactttgctgacctacgtggccggcagctcaccgcctggatccaggtgccagggcccaatagcaaggcgctcccagggttcgtgctcctccggacctgcctcatccccctcttcgtgctctgtaactaccagccccgtgtccacctgaagactgtggtcttccagtccgatgtgtacccggcactgctcagctccctgctggggctcagcaacggntacctcagcaccctggccctcctctacgggcctaagattgtgcccagggagctggctgaggccacgggagnggtgatgtccttttatgtgtgcttgggcttaacactgggctcagcctgctctaccctnctggagcacctcatctagaagggaggacacaaggacattggtgcttcagagcctttgaagatgagaagagagtgcaggagggctgggggccatggaggaaaggcctaaagtttcacttggggacagagagcagagcacactcgggcctcatccctcccaagatgccagtgagccacgtncatgcccattccgtgcaaggcagatattccagtcatattaacaga

SEQ ID NO: 328015 - DNA, 797 bp, Homo Sapiens
tctctgaagctacagtgggaagttataaggggttgctgttttgacaggtgtgagccctccctcccagccttcctgccctcccctttccctccgtacacggcagagtgaattattccagctaatagcagttccctgtagagcagagcctgctgtgtgcttgagaacaacaggtaggcagagatgagcagcggttaatatcttagttctcttttatcaagttatgattaagtaaggcaaagacccttttgaagccctaccaatcagtttgaggaaagcgtgtttagtatgtagcgagactacttaaaatatatatactacaaattatgtacacacacagagtgtccagaagctgaaaattggtttcccctgttaaattttgctagtcgtcttgcagacccaaaggagtgaattcccaagtcatttgcaaactccatttactaggaatcccaatggtccactgtcagaagacaaaatggaaattattgagatggtgctggatttggtaggaagtattgcaccttgactttaattcctgtattccttcattcaaagaaatacatatttgatgactgctgcgtgccagcctgtgtagtggaagctggtgattcaaatgtttctgcccatgtgaaggctgacatcctagcggggaagaaggatgatacacaagtgaactaataggcaagataatctcaggtcaggaggtagtggtgggggcctggtgtgaagatctgggatgagggaccaggaagagcagaggtcgggaggggaagggctgaggcaggagtgaggcatgatca

SEQ ID NO: 328016 - DNA, 786 bp, Homo Sapiens
  misc_feature (430)..(430): n is a, c, g, or t
gtactcatttgacctggggtctgcatgtaccctgtgccaacccactaagtcaacaaatccagacacgtgaatctgcgaagatagaaaatactcaggttgtaagactgctctgctgcttagaatgtttctaaagtaaccaagaagcctatacaaacatgcctcagaaagctgttcaaaggggtataaaataatctgatcacttcatcatgtccttgggaaaggaatgagtgtttcaaatttgctacctataactaagcaggtaattaaaacttcatatatgttgttcaaagacaaaattacaataaatttaaagaccttaattggcttttatttgtgattctagaattgggcgacatctcattctacaaagtggaatgtgttccagatggaactgaagcagaggaggttggttttgtagacagaaaagggnctgagaaaagcagaatcaaaagacaaaaagcaagttggttatttcccaagctcctttccttgtaaaggttaaaacagaggggatttccttatcatgccagctaaaactggcttgtgtggagatttggctattatctctcactctcctgatttctcagaaggtcaggtagagaacttacttttggcttggtgacatggaacttcagcaggagtgactgcattttggtttggtctgttgaacctagtgcaggggctcaatctaaaccaacgacctcatatgaagtttatttaataatgtaaaatgcaggtttaaatttgataatttccaaagtcctttttgactttttctttaatcat

SEQ ID NO: 328017 - DNA, 462 bp, Homo Sapiens
gacgagcggcttcctcctttctttgttgctctgggctgttctgttttactgtggcagagaggcagctgctggaggcgctcgtaaaccaggagctgtgggaaggaggcctccacgggcttcaccacgaagcgcagcttgccatctgtgagctgctccagcgcgtgcaggcaggagcggaagtgatcgtaggcttcacatgtgacgtccaagtgtctcagtgtgaagttgagcctcttctccaccgacagtatggctgtgcaggcatttttcaatctgtgggcgagtcgggagagcgttttaaacacagcatcagtcaagtcgtcgtcgtaaaacacttcggctgcaaacaggatggtggtgtgatcgtacaggtcagaaatttcctcttgtgaccaactgaaggggaccttgggatctgtgcagaggtcgtccttcagccagtccagttctttgaccctaact

SEQ ID NO: 328018 - DNA, 598 bp, Homo Sapiens
  misc_feature (44)..(44): n is a, c, g, or t
  misc_feature (68)..(181): n is a, c, g, or t
catgaaatccttgcctaagtcaatgtctatgttggagataaatnctcggttcgcaaagtgaaaccagnnnnnnnnnnnnnnnnnnnnnnnnnnnnnnnnnnnnnnnnnnnnnnnnnnnnnnnnnnnnnnnnnnnnnnnnnnnnnnnnnnnnnnnnnnnnnnnnnnnnnnnnnnnnnnnnnntgtggcccctacatctggtgtcaatctcccatgggcggggggtaggcgggtcagactgcacattctaagttgacctgattggctatttgtggatattttcccaaataaggaagggaagggggatgtgagttacagtggtgggacgtgtggtttcgaagggtggaatgggtgcagagttagcaaccaagggaacagatgtgagttattgattagaactgataggaaggttgtttacactaattaggggcaaggaggcatggagaacaagaaagttgagtttgagaacaaagaataaggaagttaacaagctaaacctttgaagagggatttattatatcttatatgtagaagggtttttctgatgttatcttctagaatttttatagtttcaggtcttagatttaaatccttgatcca

SEQ ID NO: 328019 - DNA, 983 bp, Homo Sapiens
  misc_feature (691)..(807): n is a, c, g, or t
  misc_feature (822)..(839): n is a, c, g, or t
tctcaacctaattgttctagaagtgtttttaaccatgaaaatttgaatatagttcaaatttcattacaaccatacttaagggaaagcagagagacactttgtagctctatcttcccttcaataactcaccatgcataaataacacaaagaaagaaacagtccctaagttccaagtaaggtcttacttttattcaaaaacaatttaaacgttcctttaaaattcactatactggaatttgtcctaatatttaggagttgtgaaatgggaaaaagattctaaaacattttacagcttcatacagactggagggaatctgttaatgacatttttcaaaaatttaccaaatttgtaatgtgctctacagatcaaaggctcttatagtcattatctcattgaatatccaaagttctgagaggaacaacccttcccattttataagttagataatcctgtatcttgatggcttaacacagtataggacagcaaactcagcagaaacatacatgatcatcttgcacgcagggaattaagaacaattcataaccatattgagataatataacaccaaaatccatgtgttccaaacgagcttaataaaagaaactgataacctgttttagctaaattaaatgatttattatcttgttttagtttaaaaaattgatctggggtcgggtgtggtagctcatnnnnnnnnnnnnnnnnnnnnnnnnnnnnnnnnnnnnnnnnnnnnnnnnnnnnnnnnnnnnnnnnnnnnnnnnnnnnnnnnnnnnnnnnnnnnnnnnnnnnnnnnnnnnnnnnnnnnnagaccctgtctcttnnnnnnnnnnnnnnnnnntgtggacgtgcatactgggaccatgtgagtctgtaatatgagacacagaatctagactacactgcaagtaacagagaaagttttatcattccaacaattcaaaataattagggcagctacttattagaagctgacacaaagatt

SEQ ID NO: 328020 - DNA, 919 bp, Homo Sapiens
  misc_feature (443)..(451): n is a, c, g, or t
  misc_feature (685)..(707): n is a, c, g, or t
ctttaagttcagtttttaaattcagtaataaactgagggtctaaatttgcaactagatagaggaatttagcaggaagtccagctaaaaacaagacttcatggtttaataagtattgaaagcacatatactatattctgtctctaccggtttggttagttaccgaaacattgttccatatgataaataagtccaaagaagatacagtcaaagatgactatgcaagactgtctaataaaaaggctcccattatagcaatactgcctgtttctacagttaggaaggtgaattatctaatatctgtatttaaggatgggtttgaaaactctgctttgggagtctacatggatacctcagggtctatcaagttagtaaggccctaggcacccaactttttcaataatagcagttctattcttatattttacacacttggcatgcatgnnnnnnnnncccccttccctgagtcggcttgctagggaagcacgtagaattttattccaagaaaggattctgctggggaaaaagtattaaaagcaggctgggcatggtagtatgcacctgcagtcccagatacttggaggctaaggcaggaggactgcttgagcccaggagtttaaggttagagtgagctgtgattgtgccactgtattccagcatgggtgacagagcaagaccctgtctccnnnnnnnnnnnnnnnnnnnnnnntcccacgttaaaagctgcagaccactcttattgagcacagagtttcaaaaggatttccagaatatgagaaataaaatctatagtaagattatacctttacattacctacatattacttaccttctgtacatatatctctatatacttttgaagattatttctatataaatagagcaccaaatcaggacaaagtcaaatcgatcacacacaat

SEQ ID NO: 328021 - DNA, 1028 bp, Homo Sapiens
  misc_feature (687)..(698): n is a, c, g, or t
aaagttctgaagtccttgaccattgaaggattttacctagatctctgacgacctaccttggcttttctttactggagaattgcccatctatggttctttgctccatctgtgcaatttgcccttttcaggacttgaggacaacatggtcgcctttgccttgcttggctgtggtttggggtggcattaacaccatgatttctttcagggcccactgaaggttggtttctgcgctcctgcgcctcctgctgtcaccagctccaagtgcaggctccccagtcgccagccctgggctcccggccccagccagagtccaaacctcagaccaaccagatgttacttaggctgccagatttctgtctgggccttatctgtaccgtcttcactggctcactagatcagaatcccaaatgtccctggatgacttgcctcaagtcacgcagaccctgagctctttggccagaaagaggaagcctgtttgattgggggttgctgaccagtggctcctgccagctttctgaatgtgtggccagtggaggccggcctctccttagcagtgaaaatgcaaatggatttctttagaaatgtcaacagacacttgacacttatcctttaaggtactccccaacgtgtctcctgactgggccaaatttagtttctcccaaattgctcagaaatggaatgtttgcnnnnnnnnnnnnagcactctgggcttttctacaaactcataaaagttggtgattctaaccaagggatcacaagaaagtggggtgctactttttatgaattaaattcagtacccccattattctctgttttaggttgaagatcttttgatgtcagggacttatgcatttgctccctctccatcacacacagcctggcacacagtaggtgcttcacacaatcttgttaaaaggagcagactctatctggtcaaaatcattcttggaagttcttttctatttgtttgttaaaaggaaaaatggccagagttgagactgtgaaagttcattcctgatttcagacca

SEQ ID NO: 328022 - DNA, 844 bp, Homo Sapiens
  misc_feature (180)..(180): n is a, c, g, or t
  misc_feature (183)..(183): n is a, c, g, or t
ttattttttagacacctgtctctgtaacccaggctagagcgagcacagtggtcaaatcctagctcactgcagccttgaactcctgggctcaagtgatcctcagcctcctgagtagctgggactacaggcacatgctactgtgccaggataattttttaattattttatgtagaggcggcngcnttttcttgcccaggctggtcttgaacttctggcttcaaaagatccctagaagatgtttcagaagcagaaataggagagagaagaacgtatttgtaccagaccctctgcccagaacattccttctccaagcaacctccagtttctgcaatgcagaaccacacataggaagggattaggggctaatgtgacaaacaaggcccttgaaagccactttaagtttagcctttatcctgaggacaatgggaagcattacaagttttcaccagaacatgcttgaatttgctgtttagaaaggtcagggtgattgctgtatgagggtggtcggaggaaaacgctgtcccatagtgaaataatccaaagacaagcctgcacggaagacagatgatctagaagctgcatccccaaaaggattatctatttccttagctgtttcctcttctggggccctctacccctttcacttactatcagggaagctcccagcagttcatcagggatgatacattaaatgatgctttatgctgctgtaatgaaattcagacacagatgaagaaaacaccaaagctttatcaaaaacaggcttttttgattagccactagggtaagagcttagggaaaaatgaaacctgctttccagaagccatatagtaagtgctatgag

SEQ ID NO: 328023 - DNA, 710 bp, Homo Sapiens
  misc_feature (444)..(497): n is a, c, g, or t
aaatgagatctaataggaacattcaaaacattgatattagcactgtgtgtgaaagaagtactgctgccctgaaactgtccataaatttgggattgcaaggctgcagtgaactgcagaggacgtgctttgcctcaaaagggctgaaccaagtgtcaccataaggaaatgtggcccaggattgctgcagcttccagattttccaaattgaaaattcaggtttctatgtaaaaccttgccatatttaaatgtgggctcctaactgaactttatcagaagcattctgaagaccaaacacatttcatttgtaggcaggcagagtcacaggtggcaccagtttgatacctctgcctagaattaatcctgggaaatttcctagacatctaattctaccatctaacctctatcccagtccattctggggtgatgagccaaggctggagattnnnnnnnnnnnnnnnnnnnnnnnnnnnnnnnnnnnnnnnnnnnnnnnnnnnnnncagggaacctggcttgactctcatcctgatgtcctggtgtgtgctccttgggaagcctatggagcgaggaggaagaactgtcttctaagcatccttgcacactcagaattatcaaaacaaagtgaagagtgtcctaactgataaccacaattgtgtcctggagagatgtggggaggagaatctggctaaatcacttaagctgcaatatatttt

SEQ ID NO: 328024 - DNA, 587 bp, Homo Sapiens
tgccttacagatttggtcttttccagagttaggaatagataaatttcctgaagttaattcttgaaaatttagaatttagaatattttcccatgttttaggatacttgatgatgatacaattctaaccatattgaggttaatatttgaaatgttagtgttactgcctgatagggtttggctttgtgtccccacccaactctcatgtgaaatcgtaatccgaaagtgttgaaggaggggccctgtgggagatgattggatcctgggggcagtttctgatggtttagcaccatcccactagtgctgtttcaagagtgacttctcacgaagatctgcttgtttaaaaaatatttaccactacccctctctcacctgcccacaatgtgaagaaagtccttgtacccttcgccttccgccataatggtaagtttccgtgagacctcccagtcatgcttcctgttaagcctgcagaactgtgagtcagttaaacctcttttcttcataaattacccagtctccggcagttctttatagcagtgtgaaaaggtacaaatacaccaccacactgaatcagatgaccaagataccag

SEQ ID NO: 328025 - DNA, 418 bp, Homo Sapiens
tttttttcacatgtgcattgtgtgtgaacatcatattaatcatctgattttctggaggtgtctccttggaataaagtactttaaaataaaacacatagaaaaggaaagcttttggtatagaaactattcagatattatttatgactttctttgaacttaacaagagttgatttcatccccacaattgtcttactgagctgcaagaaacctgatgagtttcttaaccttattcaaaatggctttatgtcattgtgtgaattaagttgaggtaacttttacatacagacaaagaggaggaaggatctttgtttaatagtggttctcaactgggtactattttgccctgctcctcgccccttcccgccagcattgtcattacaggacagggtattgaagctctggtagctctcctcgtgcc

SEQ ID NO: 328026 - DNA, 686 bp, Homo Sapiens
  misc_feature (39)..(39): n is a, c, g, or t
  misc_feature (104)..(116): n is a, c, g, or t
cctctacgacggccactttggttttgttacttgggtganggaaaggataattgtctgacagtagagaggggaaagaaaaaaaggcactataagagggttaagcnnnnnnnnnnnnnatctttagcttggtaggaattggtctcggaacaatagcgcatgactttgaagatggcgatgcttttttgactggggtatgatgggtctgcatttttttgttgttgtttggactgcagtcttggtggttagaagcacgagatagggtccttcccaagctggtttgagttttccttctttccagcttctgatgagaacatcatccccaggctgatgctgatgtgctgggaactccaagggtggcatctgtactaaaaagcctttagctttggagggaagagaaagtggaagagagaccaagtacatagctcttgagaaactgacttttagtttcaaacgtaggaatgtcaacagtgaagtgtgagtaaggcagcctatacagcatttcacaaggagataagccaacttctttctgagggacagttcggacctttaataaggcaataggaaggcacttggtccatgataatcgagtttttaaaactaatttggttagatggctttttagggtttggttcattctttctactctttctgatgaaggtgggtgccagggggtatggtattgaatc

SEQ ID NO: 328027 - DNA, 789 bp, Homo Sapiens
agaccagattgaaataatctgggtcaggggatgaaaaccttagattaagatgaagacagagtgatttaaaaacctgaatttttaatgcagattacacttaaaaattgataaaatagaaaagggatatactaggagtgagctctcctgcatattgagaaattaaattgtgtaggaaaatactgctttaggttttttcccagtcgtttcttaggattaaatcagtgtatataaaataaggtttttgggaaagtctttttagcatgtacacatatttaaatttaaaactacttgtctttaaaaaaggattataacctgcaaacaagtttgtggttctatgtattattcagaaatatactccgtttaaaccctgtaatttcatagccagtaaacaactcagagcgtactagtcagtcatgagatacagttgcccctatatgatcctgtcttagtccattcaggctgctgtaacaaaatactgtagactggggggtagcttataaacaccagaaatttatttctcactattcttgaggctggaaagtttaaagatcaaggcaccagcaagcagatttggtgtctggtaaaagacctctttctgattgttagaggtaccttctaactgtagcttcacagagtagaaggggagaatgagctccctcaggcttcttatatactaatcccattcgtgagagttctcatgacctaatcacttcccaaaggccccacttcataattccatcactcaaaataagaattttgaggaggtacaaacattcagacaatcgcaga

SEQ ID NO: 328028 - DNA, 379 bp, Homo Sapiens
ggaacttttaaaggaacctccacctaatgccctaagcccaaggtgaactgggaaaggaaatctggaaggctgtccttgggacttcctcctcctattaagggatatgtcacttcctcagcattgctatcatgcaagatttttcaggttgaattagagcctgcttccttggccagctgctttgttggcagactaatttagttgaaacttccagcctgtttcaagatacgtcgtatttggcagccttatagtaagcacatatcttttggttttcctccaagaatttcatacatatttgggaatacttttttggttcctaagttgttcctaagttgtctcaatttgttcttggacatgtttctttttctgctagccacagcaa

SEQ ID NO: 328029 - DNA, 780 bp, Homo Sapiens
cctttaaaaggttatttttcaaattgagatttgcataagcaagagctaagaataatagctggtaagatgtcactttaaagatcttaccctcagcaggtaaaaaaacagttattataaattgtaatacaggaacaataccaaacagacccttgttagggaaagatgacttctgaagcaaaacaggtgacttctgacaaaccattccttatccccacaagcctcattttgcccttggcaggctcagcgcctgacttttctttcaacttcaagtcccccagtcattcaccttctctcccacacagttccttctgctttgttttacagcattctgccctcctcgggtggcaatgctttaagtcaacaccaacatctgacctctccagcttatccacaggacttatcttcttaagagatggtgtgaggacaaagggtgagccttcctgacttgaattaatgacgacccacaattgaacaagtttctaatgttcatatttacaaagaatatagtctagaatctcagttaaatccatattaaaagtaaccccatgcataacattattcacacatataattgagataaatctcagcacacagataggaaaacaaagacagtcaatttcaaacaactaataaaattatttaaccattacaaaatcccttaaccatgccgaattttgcaaaatatctaagaaattattatgcaagacactgaaagatgtgttattaagtagttaattggtatttttaatagttaggactgttttcctcttctgtcttctc

SEQ ID NO: 328030 - DNA, 387 bp, Homo Sapiens
  misc_feature (344)..(344): n is a, c, g, or t
  misc_feature (350)..(350): n is a, c, g, or t
  misc_feature (360)..(360): n is a, c, g, or t
agaggagaagacagaagaggaaaacagtcctaactattaaaaataccaattaactacttaataacacatctttcagtgtcttgcataataatttcttagatattttgcaaaattcggcatggttaagggattttgtaatggttaaataattttattagttgtttgaaattgactgtctttgttttcctatctgtgtgctgagatttatctcaattatatgtgtgaataatgttatgcatgggggttacttttaatatgggatttaactgaggattctaggactatattctttgtaaatatggaaccattaggaaacttgttccaattgtgggggtcgtccattnaattcnaggtccgggngggctcacccctttgtccctcacaccc

SEQ ID NO: 328031 - DNA, 392 bp, Homo Sapiens
  misc_feature (277)..(277): n is a, c, g, or t
gtttgttttatagttatactgttcataaatcatttttccccatttgtgatcaccaagaatggttaaaacaaagctttggtctaaattagcatgcaattgctagacatttttctttcctcttgtggggagactggaaaatatttttgaagtatatatgggtagctacactttgtctgctccaacattagactaggtctagggtgaagtgcagtaaactgcttcccaaggcagagtgaggcttttaggaatagggaagtcaacatgggctcagcaagtnaattcacatggcaaatggaacctgcctgggaacattttagttaggaaaaaaatatgtaattagccagactgggatgtatccaggatcctagattcggttaccacatatactattt

SEQ ID NO: 328032 - DNA, 392 bp, Homo Sapiens
  misc_feature (15)..(15): n is a, c, g, or t
  misc_feature (21)..(21): n is a, c, g, or t
  misc_feature (59)..(59): n is a, c, g, or t
ccctaataaccccanggaagnaaataccaaatgagtcctaagagtttgaagccaaaaanccctctggggtggatcctaaacaaaactgccaaacttcctatgaagtcctcaacttttccttcccataaagagtcccctggcagcatgtcctactgtacttagagaagcatgcaaagaattaggtggttttttattcctaacaatcacatcccaaagttttttctgcaatttcaattgtacagagtactcttcctcgatgttggctcaaattagagacagaaagcagaatggcgtttgctagggattagggaagaggggaatacagagtaactgcttaatgggtacagtgtttccttttggggtaatgaacacattctggaattagagctggt

SEQ ID NO: 328033 - DNA, 641 bp, Homo Sapiens
  misc_feature (365)..(424): n is a, c, g, or t
aattttttgaacgcaatgaaacttttattgtgtatcattatgaattatgtaaaactattatcaacagcacaataaaaaatgcatgcaagccattaaaataagcaaagcatatcaacaaagattgaggacatgaaatggccttgtgttctcattcagttgaagtaattacaaattttactgggctcttggttaaaaaggaaacatagtcgccacaagtatttactgaaacattacctatttgcctatttatgatgatttcattcttaagattcctcagtggatctaaaggacaatgctgctactaaacaaagccgtccaatacatttattcttattctccaactttaaaaggaagcatcttaaacnnnnnnnnnnnnnnnnnnnnnnnnnnnnnnnnnnnnnnnnnnnnnnnnnnnnnnnnnnnnttctgtaataggacagactccacgggattgagtgatcttgttattgtagtaactaagagaccataaaaatcaggacacaagacattcaactcctgtttatctaggagaggtaacaggggacggccaaaaaacatgggattataaactctacaatggcattttggttggcatttcaatttcttctcatatttgccacattaaatcagaagataaaagg

SEQ ID NO: 328034 - DNA, 754 bp, Homo Sapiens
  misc_feature (340)..(340): n is a, c, g, or t
caaacgtggagagtgttgttagctcggatttattcattctcgaacaaatatctattaaacatcccccaagctgaggaaactgagattcaaggagttgggagacctcacccacagtcacgtggatcctaactggctgagatgagttttgggctcctgctgggctgttgggacccagaggtcggcgacaaggtcacccaggtctcaggtcggtccctgtacctttatctcatccccctcctctgcattcctgaaacccttcccaggacagctcccctgcccaccccgcccttgacctcaccttttccatgagggactccacagcatggcgggttcacccagncagcggcccccggacacctctccctcctggatgatgtcccctctctggctccaggcctcatactcctcctggctcaagtactctacaggtgacattggacggggccatcatagaccagctgtgtgggggtctgggggagtcccatggtaaacacccctgtccccgtgaaccctgccagcactgggagaagctcttcttaggatgtccactttacaaacctgaccctgcacaccccgctctgtgccctgcacctccatcctgaactatctggacacagcagtgcctcctgccaccctgccagcaccgagcccctcttccagcccaccccagtgggggtccaggcccctccctggagcctcaccttgcgggtcacggtgcactgctgagtcatgtcctggatgagggctatgagct

SEQ ID NO: 328035 - DNA, 404 bp, Homo Sapiens
ggagctgcttttcacgcgtttggcctttcaaacgtggagagtgttgttagctcggatttattcattctcgaacaaatatctattaaacatcccccaagctgaggaaactgagattcaaggagttgggagacctcacccacagtcacgtggatcctaactggctgagatgagttttgggctcctgctgggctgttgggacccagaggtcgggcgacaaggtcacccagggtctcaggtcggtccctgtacctttatctcatccccctcctctgcattcctggaaacccttcccagggacagctcccctggcccaccccgcccttggaccttcacctttttccatggaggggacttccacaggcatgggcgggggttcacccaggcagcgggccccccgggacaac

SEQ ID NO: 328036 - DNA, 717 bp, Homo Sapiens
  misc_feature (351)..(351): n is a, c, g, or t
cagtttttaaagacactgtgaatcaatgcccatattacgcttttggaaattctcaagtttcttgtcaaataaaattggctaaaagcaagtctttattatctgactgtgctgggcctaaaaccatgccaatttaagaaagagaaaaatatcctatttgccatctgaaaactgatcacaaaggcactgagtgtttcccgcagaatagaaatgcaatgttgggaaatctcagttacactcctagtgagtatgaggttgtgagtcttgcctgggaaacgggaaggttgttgcctttctcaaagggaagggatggattatcccagccgtgggcaccccatagtacattgcctgagnaggcatccaggcctgggtgtgggaattgcaggcacaccaaccccccttgcctgaaccataatgtgtctttccttcattcagctttttagactcaggatggcaaaactcccgtccggccctttcccttcacctccactgatttcattcattttccctttcttcttctctccccttctcttctgtgtgttttgggaaagataatggctgcataatggctcccaggctgctttttatggggttgggattaaggagaaagtgccatctcttgggttttaggttgataattagcatccttcaggaagttctatgagaaaccccctccagttctggactttctgctaattcaggactgcagtgcttctaaga

SEQ ID NO: 328037 - DNA, 462 bp, Homo Sapiens
ttatcttatgggttatttagaactgtcatttagttactagatacgtgaggattttccagatacccttccgtttttgctttctaattaagtgatgttcagctttgttactttggtgcataaacatttacaattatgtcttgatgaattgaccccttttccattctgaagttaacccactttgtccctcgtaatagtatttgctctggaaatgtactttgggccaatattaggtgtaaccactccagctttgtttcggaataggtgttaggcatggcatccctttactgtatttgtgtctttgtatttgaaatgagttccttataggcagtatgtagttgggttttgtttttctaatcagatatcataatctctgccttttaattgtggtttgtagaccatttgtatttaatgtgattattgacatgatgagttttaaatctaccatcttgcactttgtttcta

SEQ ID NO: 328038 - DNA, 698 bp, Homo Sapiens
tattttttaatcttcatccatttggtaagatgttgtgtatttgactaaaaccatagtgtttagaaaaaccaatatagttagtagtagaaaatatgtcacagcagaagcactgccgaggggagagtgtcgctgtcagtcacggctttctgaccactctgctgtgtccctaagaacttcctgcctccctccttctcctttgtttgtaggctttcattctgctgaaggtttttcctgtatttcctagaactgtggagctctgtcaccacacatgtggcccaggatagaaaaatagtcccgtatccagctgtagggctaatgccacgggctgctgccctgttacacccacaggctcagaggctgcagagtgacttgtcaggccctgaaatgctgcgactgcactgctgtcccatgcgcagatgcctttaactcccttagagtcctaggacttctctcctttatatctggtctgcccttattgctgtgtcttaacctctagagaacagggccttctaatctatcactaagaattttctggccttcacctcataacaccatacaggaatattggttgtattcagttaaaaaaaatgttttatattttgaattatgagtaacatatacctacttttctatcagcttttgatgctcagcataggaaagggatctgttcttgtaatgatttttttaaaggtgatatt

SEQ ID NO: 328039 - DNA, 685 bp, Homo Sapiens
  misc_feature (178)..(187): n is a, c, g, or t
  misc_feature (210)..(442): n is a, c, g, or t
aggcacgtttaatcattcgtttttacggcatatgtactataatacctgtgtgttgcaaatcctggtatttaaaagtctttttgtgtatttgagcatgtaagtttatttggtccaaactgctggtactagtaaagacaagtccagggcataagtaggacttacagcaccaagttcgtcnnnnnnnnnngagacagagtctcagtcggtcannnnnnnnnnnnnnnnnnnnnnnnnnnnnnnnnnnnnnnnnnnnnnnnnnnnnnnnnnnnnnnnnnnnnnnnnnnnnnnnnnnnnnnnnnnnnnnnnnnnnnnnnnnnnnnnnnnnnnnnnnnnnnnnnnnnnnnnnnnnnnnnnnnnnnnnnnnnnnnnnnnnnnnnnnnnnnnnnnnnnnnnnnnnnnnnnnnnnnnnnnnnnnnnnnnnnnnnnnnnnnnnnnnnnnnnntgagccactgcgcctgacctccaagtccatctttcaaaggctctgttgataattgactcttgagagtcattacagtccatcaacagcctgtattctgaatatttgtttttaattctaagacaatgctaaatagccattccaaataaggtgagaactgagactttagggcctgtattatcagctgtacactgacaagctctgaactctattgctttttcaaatcagagaagaaaaatgagtaag

SEQ ID NO: 328040 - DNA, 981 bp, Homo Sapiens
  misc_feature (66)..(66): n is a, c, g, or t
  misc_feature (898)..(898): n is a, c, g, or t
tttgccgataccacggatacctttattgctccctggcattcacatcctaagcccatgctcccaccngtcccatccgctacttcccgaaaactcaatctcccaacattccacgcgggataagaactacaactcccagaaagctttgcgttcaggcgggctcctgtccgtagaagcccgtgacatttcaaggttcgcgcgctcgtttggtattggttctcaaggagacgtggccacgggaggcccatggcgaataattggctggcagctcctgctgctcaagatcccagaggaggcggcggagcctacggagttcacggtgcaaggcatcgtccgtcactggaccagtgaggcgcaggcgcgagctccccagggggaggatgaggggcgggtgcgaggagaagctttcgaagatgtcccctgtgtccacagcctcccgctctgcagggggagggtcccacgcggctggcggcccgcggccagggcccagctgatagtggctgagcagatggtgcagctgggcgggggtcaaggtggggtggtcggttcttaggctgctccatgaagccttgagcagggaagtgcggggcacacagagcaggttcacagccatggagagtttccggaagaactcagtggcaatgtcgcccagcccagctccctgtagccagtccaagacgaggtcccaggttggttcggatttgaacagctcgggaccattgatagaaaggccggccttgacctcgttccatcagcgagttgagaagggatgcgttggagaagaagaacaagtagccaaaagtctgagacacgaggtcagggtgcagctcgcactggctggtcagctccaaggctgcctggaacacgcccagggtaggtctcaatcctggaggcatggccncccagctccgcgccaggccccggcagctctgcaccagctgtgaaagggttactatccaggagagcaggcagcgttgaatagag

SEQ ID NO: 328041 - DNA, 767 bp, Homo Sapiens
  misc_feature (572)..(580): n is a, c, g, or t
tttaggagtgtctcaataatttatttattgactttattataatttcaaacatgcagacaagttaaaaatcatgtacaatataacccacatacccaccacctagatttaacaattgtaaccgtcataataataatgtagagagtaatgatgacattaccaaaatttcctaagtatattattttctgatcccttgaaggtatccaaaacccaccaacagaaatcatccaaaaagtttcttcactatgaacccttcagtgaacttttccccattcataacatgggggcatcgctgagggagaactaccaaggagcacacagggtgagttactcttttccgtaatgacgcctcttggtttcttgacttagggagtcctgggcctgctcacttctattactcatatggcagattctgcttcttccttctttgtacactttccaggttttcaatgaaatagcacagttgcccagatttagctaagaaaaatacaggatgcctagttagcttgaacgtcagataaacaatataaaaatataagtatatcccaaatattgtatgggatatgcttatactnnnnnnnnntttgttgtttatccgaagttcaaatttaactgggcattctgtattttatcttgcaatcctgtgaaatagacaaatttaatgaccttctgaagggggtctagatgactttgacagctgggctctcatgcttctaggtctgaagacaaaatgagagaaaactatagagaaagggagagaatatactttt

SEQ ID NO: 328042 - DNA, 778 bp, Homo Sapiens
  misc_feature (23)..(23): n is a, c, g, or t
  misc_feature (93)..(93): n is a, c, g, or t
  misc_feature (662)..(692): n is a, c, g, or t
aatcaaaggaaatcaaatgcccncaacccatttccgtcagtgcttacaaatgagcttctgcaaaacccagtccacttaaacatttggtcgganctcacgaaaagaaccaaaagcaaggcattccgagtcctggcgggggttgagcggccgggcggacgcctggctatctcttctgggagtcgcgcattcgatcgcattcaggttaaaatttaaagcccctggatcctgctccagtcgccagcctctccattccagagttttctaccttcagccttttccaaatgcggccacgctgaaactgggagccgccgcagtgattgggggaggcaaagtggaacgtaataaaagtgactaaattggatgagaacggtttctggaccttctcggtagcaatttaaaattcagaagtgtttagaagcaatttacaacgaagaatgaaaaacgaagaattctcgccaacttcctgaattccttgccccctcccccgcactgccaggccctgtcccgtcccccaggagccacaagttcacaactcacagttacgtgcagaggaaacaacgcttagctacgaggtctcaccatctctggaaaccatactttacaaggcacctctccaccccagttcaactctgcacaggctcctcttccttccctaactgggnnnnnnnnnnnnnnnnnnnnnnnnnnnnnnncagagcctaaacgctttctaggagaccgaccttcagaaaatcatttacttggatttacctgggcggggggtagggggtggggtcgg

SEQ ID NO: 328043 - DNA, 774 bp, Homo Sapiens
ctttatatggcaccatttacccctggattcatatttgccaatttatttattccctattccttcttgctttccttctaggataatgcttattcctaaagtacatgcttttaaaattccattggtaaataacctctctcagatttggttcatctgaaaatattttcactttgcccttattctttaaggaaggttttgatgatagttacttgatactggctgtaactgttgctattcaaagacctgctacttgctgttcttctgaaggtactgtgttttctccctgcttacctctctgtatttggtattttctacctgtagcttattctgtttgttatacattataaatttcctgtcatgatgggctgaccaccaattctaaatcaatttcagttaccatctcttcagattattgcaattcctccattctttcctactgggattgcaatgggcatgtttgactttctcagtgtcttcaacatctcaagctctcatatgttccatccccttgctcctctgtgtgaaattctgttatttcttcagattcatctttcattaactcttttatagctgttgtttaacattgtttttcaaatctttatggttatttttgatagccttttgttgctcgctattataattccattttaaaaaatatctttgaacattttatatctaattattttacatttgtatctagaaattctaatgctgatttccttagggatctaatttttattgtctctgctttggtgtagtttaattatgtgttctttg

SEQ ID NO: 328044 - DNA, 531 bp, Homo Sapiens
ctcttctctcctaggaaattgttgttcaaggatcccaattctagttcggagatgcattccaaagggtcttatctattgctttttctcccataattaatctcaattgtgtttgtctgtgtgcatttgtctgaggaactgaactgttgttttcataggcaaatgagaaactgagttttctgagctccaaagagaaaggacatttgctctttccagcgaaaggcgtccctgggtgaccaggggcctcgtgggagcgtctggggagttgaccccctgcaacatgcagtggccctgcagggaaatccccagaaaaatttaattttaaaaatgggtcatccaggaaatgcatataagggctgatcacctggcattttgagccctctcagaggacatagacctctggagagagaagctgagatgcataagaggctggaaacaactcagtgatgacacactgtggagtcctgcccacaagcagctcacatcgatccatgcacaaaaaccctaggccacagctcaattcttccttttaag

SEQ ID NO: 328045 - DNA, 868 bp, Homo Sapiens
  misc_feature (320)..(320): n is a, c, g, or t
  misc_feature (326)..(326): n is a, c, g, or t
  misc_feature (814)..(814): n is a, c, g, or t
ttcaataaacacggcaacagagatacaccaaaagtcatcctcgatgtttgcacagtatagcagtgaaggcagctatatgtctacaatttaacatttttcttgagagaaatgtcattcttgaataaatctatttttaaaattgatctgggaatgattcattatgctctagttttctgagtttgagtataaagtttccacttgtctttaatcaaaagaaaacttatttattctttcagagaaaattttcatccatacacagtccattgtgtaggatacggggcaagaggagagagaaaatgttaggaaaggggctgatgagnatcttntggaaacatttttaaatctctgttttgcacacgtatttgagaatcgaatatgaggactttttaaaaaaagttttgagaaataatttctttgttaaatcttatattttaatttcttttgaaaactacatttttttgtaaaagcaattatgttattcatgaggaagctagcataaatgagagaaatcgaacttgataagttcttgcattgagtgactgctaatttgaaagtaacagaaagtaacacatgatgagacagatttcctttctggaacacttgttgtttcttagtattgaaaaaaaggactttcattaaaattataatttatccttaaggattagcaatccttttaaaaagagaagagaagaaaaacgtacttgattggtttccctgagttgtgtttttggcaagcccagagctcaaggaaacctgcttggtgacttcccccagctggcaattcatttaggactgcaaataagtaacagttggnctcatcatggtagcacccttaaagtggaacccggcatttagaacccccaaatct

SEQ ID NO: 328046 - DNA, 491 bp, Homo Sapiens
  misc_feature (60)..(301): n is a, c, g, or t
  misc_feature (320)..(332): n is a, c, g, or t
agtcattctttacaggaacaattattagaatttgttttaggccaggcacggtggctcatnnnnnnnnnnnnnnnnnnnnnnnnnnnnnnnnnnnnnnnnnnnnnnnnnnnnnnnnnnnnnnnnnnnnnnnnnnnnnnnnnnnnnnnnnnnnnnnnnnnnnnnnnnnnnnnnnnnnnnnnnnnnnnnnnnnnnnnnnnnnnnnnnnnnnnnnnnnnnnnnnnnnnnnnnnnnnnnnnnnnnnnnnnnnnnnnnnnnnnnnnnnnnnnnnnnnnnnnnnnnnnnnnnnnnnnnnnnnnnnnnnatagagtgagactgtgtcnnnnnnnnnnnnnggaatttgttttgttttaataaccatagttacactataatatttaaattatttcagtgcttcttagttacttatattattctcaaattttatttctgttcccaaattttaagtttagtttaatctctttatttgaacactgaattttcttcccattttc

SEQ ID NO: 328047 - DNA, 683 bp, Homo Sapiens
cagcacaatattgcattgtgtatttactaaacagcttttctgagtaacaaagaaccctaaaatcttaatgggttgaaacaggtattcatttcccttttcaattactttttggtggctacagaacggctgtggcagagctctgctctaagcgtcttctcgttgggagatccattttgaaataacagttgctcagtgacaagcccttcctgtggtggaagggaagaactggacgctgagccaacctatacagtgcatttaaagctgctggaatgggacatgggccctatttgttcatagtccactggccaaagcaagttacatgggtgtggtcaacatcaatggagtaggaagctttcccttgggaaaccttgggagtaggatatgcagtagatatttgtgaaaagtagtatttttgatactcttgatcacaaatattctttttccacatacaaaatacgtttgtatatagcaatacaacaaccacattccactttcttgatcacgaatactcattcccctccaaaggcagaatatactcaactcctccccaaagaatagttacccagacatagcctatgtcactttctttaagacttttttaatatagatatagatgaacacatatttaagtgtggtcttcttttttacctattaatatactaaaaagatctttaattaagcgg

SEQ ID NO: 328048 - DNA, 755 bp, Homo Sapiens
actagctctatgggatgttgacttacaataatatgtggtgaaaaggttttccagacaaacactgagttcagagttaagcaggtttttttctattgcagagcttgtcagagcctctgatatgcccactagtattgtaagtgtacaagatgaagctttaaaattgggcaaataacagatatttcatacagaatcctggatgtggccaggagtgatgggagatgaaggatcctcttgtcagagtagcactccacagaacacacttggggaaaagttgtcccagggcctgtggcatagtgctctgaattcattttcgcctggctcttaattctggggttcggaaggaactggtcaaacacccacagaagttatctaggatcttattgagtgcttccccctcgtccttccatccgaatcacttggctgatatttgttgctgctattaacagaattcaggaaatcagcccttcttagaggaagaaggacaagtgagaccacaaacaacaaaacataatgaatggatcagagcctgtgtataattggccctgaattaggcaaataggctttccccactcccttaaatgaaaacaaaatggtagtttaaagaaagtaccaaagggactatatctaataataacaatgagattgaaaatgagggcacatggtgtgtttagggacggctgaggccagtgaatgtcaagggcagactgcatctttgacagcctcgcctcactggctcctgaaatcctcacacacaa

SEQ ID NO: 328049 - DNA, 276 bp, Homo Sapiens
  misc_feature (154)..(164): n is a, c, g, or t
aaattatctgggcatagtgtcacatgcctgtagccaagatattctgaaagctgagatgggaagatggcttgagcccagaaattcaagaatgtagtgagctatagttgcaccactgctctccaacctggacaacagcaagaccatgtctcattcnnnnnnnnnnnttctaggcagagaagggaccacacattcaaaagacaaaaccctccaagaaatcattctaaaaaatccccatgaattaaaagacagattttcagactgagctgattcaagagt

SEQ ID NO: 328050 - DNA, 338 bp, Homo Sapiens
tttttaaaaaagaccatcacaagaaataatttccttcataagatataactgctttaagttatatcttatggcatgggaagcccttaagactgatatacctacttactttgttcggtacttataggaaggtaaacaggagaggggaacatcagaagaggagaggactgcctcatgttggtatttcactccttcaaaggaattcttaaggaagtgcagattgtcctaaggggcactgctctctatgctatctgagttttgggctttgaccagaaggggagcatgagaatgaggagaatactaaagagggctaagtaacgagcacttgggtgctagctcgt

SEQ ID NO: 328051 - DNA, 803 bp, Homo Sapiens
  misc_feature (344)..(360): n is a, c, g, or t
  misc_feature (382)..(633): n is a, c, g, or t
  misc_feature (655)..(685): n is a, c, g, or t
  misc_feature (734)..(734): n is a, c, g, or t
aggaatccaaggatgaggaaatgcctgagaactgaggaagttcagattctttttgtacatttaagatgaagtattcatttttaccacataccatgtcttctgtcatatttctgttttcatataacattgcaatagaataatgaaagatagtgacctctctagtctttttaaaatataagattctgcttctgtgtcaaaaaacaacaaaaaatggatattaggaacgttttgttgtttaaaaaaattactttgtttttacactttggtagaaaaaacttaaggaatatttcaaacataatacaaagtgagcagaatagaatagtgagcttttatgtaaccattcnnnnnnnnnnnnnnnnnctgtaaaaagagacaaggtctnnnnnnnnnnnnnnnnnnnnnnnnnnnnnnnnnnnnnnnnnnnnnnnnnnnnnnnnnnnnnnnnnnnnnnnnnnnnnnnnnnnnnnnnnnnnnnnnnnnnnnnnnnnnnnnnnnnnnnnnnnnnnnnnnnnnnnnnnnnnnnnnnnnnnnnnnnnnnnnnnnnnnnnnnnnnnnnnnnnnnnnnnnnnnnnnnnnnnnnnnnnnnnnnnnnnnnnnnnnnnnnnnnnnnnnnnnnnnnnnnnnnnnnnnnnnagccactgtgcccagcccattnnnnnnnnnnnnnnnnnnnnnnnnnnnnnnnggtgaagtttacatatattgaaatgcacaaatcttaactgtacagttgntaataagttttattgagatataatttatatactatagttatatgtacataattcacatgcattctttga

SEQ ID NO: 328052 - DNA, 248 bp, Homo Sapiens
tttaagatttttatttctttttaaaagtaggatcatagtaaacatactgttttattagcctgctgtttttcactttacattatatcttggaaatacctccttgccatcagttactttcacgtaaccttttgatggttctcaccattgattgtaaatatttctttttatgtgtgagacttttgtggctttctcattttcgctgggggaatgtaacaagaagctcagttttcttttcaaaaataaaaatg

SEQ ID NO: 328053 - DNA, 988 bp, Homo Sapiens
  misc_feature (207)..(252): n is a, c, g, or t
  misc_feature (705)..(705): n is a, c, g, or t
aataaaatggtctcacaccaatacaagtacttagtctgtggaaagggagagtagaagataaaaatggagattttcctgtgctacaggcttagtcaagcttatggtctatttaatggttatcaaaggcaattaaatagtgttgagtgttctgcttttacctacatttcatttttcatgtacttagttacaaattgaaccctcttctannnnnnnnnnnnnnnnnnnnnnnnnnnnnnnnnnnnnnnnnnnnnnctgattatcatttaggcatgtaagtgacacccagtagcattgctttaattctgctggtgacagtgccaaagctttactatactctttttgttgtctgttgcttttctcttgctaatttgcttgactagataactaagaattcaggtaagcattagctctttgttcactgagaataatacaacttgcaagataattaatttggattgttctacatgtatttcgtttatttctctttaccttgttcatttattacgacattttgaattatttacatacccatatttcttctttcttttatggctcagctcactatgcttttttttaatactggtagcttcctcaaggttggaaaacaagatctgaatactatagaaaataataactatttttctgtggtcatattaaagatataatggctttggattttggggtgatttttctactgtcagtttnaaaaaaaacttgtctatttgcatttgtgtgttattacttctagttaagagtatttccaaggaaagtttcatgttacttattttgtttccatgtctttttccaaaagaacttattttttatattataataaatatcagtggaaaagtaggtttcgttatatagaaattaactttaggctgggtgcagtgctcaagcctatatttgggaacccgaggcaggaggattgcttgaactcaggagttcgaaactagcgtgggcaatgtaagcgagacctggtctctac

SEQ ID NO: 328054 - DNA, 412 bp, Homo Sapiens
  misc_feature (59)..(59): n is a, c, g, or t
  misc_feature (77)..(77): n is a, c, g, or t
tgtccacccagccagaatttaaagccaatgcttactgggtgtcacttaacatgccctanaatgataatccagggaanaaggaaaactaaaatgaaacagaaacaggagcaggaaaaaaatagaagagggttcaatttgtaactaagtacatgaaaaatgaaatgtaggtaaaagcagaacattcaacactatttaattgcctttgataaccattaaatagaccataagcttgactaagcctgtagcacaggaaaatctccatttttatcttctactctccctttccacaactaagtacttgtattggtgtgaaccattttattcttatgacatagaacatctgacataaggaaaaagacaattataagacaacctgaaagttcagacataacttacagattctcccattaaa

SEQ ID NO: 328055 - DNA, 351 bp, Homo Sapiens
  misc_feature (308)..(308): n is a, c, g, or t
  misc_feature (314)..(314): n is a, c, g, or t
tgggctcaagccatcctcccacctcaggctcccaagtagctgggactacaggcacacaccaccacgtctagctaatttttgtatttttatagagatgaggtttcaccatgttgcccagggatacttttgaacccctgggctcaagtgatgagcccacctcagccttccaaagtgctggggattaaaggcattggccaccatgcccaagccagatttttttctaatatgaaaaataaagatggggatctcatttacgttgtccaggggttagtcttcggaactcccggcctcaaggaatcctttccccntcaggnctcccaaagtgttaggggtttacagatgttgagtcat

SEQ ID NO: 328056 - DNA, 610 bp, Homo Sapiens
gagaataaagatttttccatttggatgttctaatgggggttcccagtacaatctttccaaaatggagagaaaaagcaaggaaaagccaaagacagcaagagtttcccagagcacagagccaggaagaggccaaaatgagctggccccagctgccagcccacagggagggtgtccagaacaccttgtccaaaagctcagcccagataaatggtcaaccccgcgtgggatctgctcaccagctctgaaggcggcccttggctgtggacataatcttctttccatttcttacattacatcagcagaaccactagcaagtagaatagaaatcccaactctcttttttcatgcctccagcctccttcatcactagttccaccaacacccctacaccctgaagtggaagttctaatcacaggttcgacacgaggccaagcaaattagctcggtagtacagacccaaaagtcaggtcaggagaacagcaattgtgtcagctctgaacatgcacatgcgaaggattctttcaggggatgccgccttctctgacggagagcatatgctattccagtcactgagctcttgctctgtgcctggcagtgttttgagtgtttt

SEQ ID NO: 328057 - DNA, 447 bp, Homo Sapiens
aggaacccactggtgtaataataaatttaaggacacaggatccattaataggggtaagggcccagctggtgttaaatggcatgccaggccatatgtgatgcccaaccatgagggctgggaagaaccagaagcccaaagaagaatatgaccgcatctattctaaagctactgtggtggtttctcatgcttcagagtctcgtaagtctcctggttcctggtgctcaggcccgtgtaaacaccatctgatttctcatagctggttatagctgcctttcgcacttggatcttcagtcgacagtagaggagggtgaggacaattccatacagaaacaggatggcatccaggatatagcagagctgaggctctcccagggccgctgcttgttcaaccaaaaggagtaagagcaagaccactgctggaatcatcttgggctggctgtgccgaat

SEQ ID NO: 328058 - DNA, 574 bp, Homo Sapiens
ctccagtccatggcagttttattgggggttctcccttcccatattttagctggagttgggaatggggaagagaagaagggtgggacaagagagtgagactagaatataaatatccgtaaacagcatctgagcattagtctttaacagggaggaggaaccactggtgtatattaatttaggacacaggatcattataggggtagggccagctggtgttaatggcatgcaggcatatgtgatgccaaccatgagggctggaagaaccagaagccaaagaagaatatgaccgcatctattctaaagctactgtggtggtttctcatgcttcagagtctcgtaagtctcctggttcctggtgctcaggcccgtgtaaacaccatctgatttctcatagctggttatagctgcctttcgcacttgggatcttcagtcgacagtagaggagggtgaggacaattccatacagaaacaggatggcatccaggatatagcagagctgaggctctcccagggccgctgcttgttcaaccaaaaggagtaagagcaagaccactgctggaatcatcttgggctg

SEQ ID NO: 328059 - DNA, 659 bp, Homo Sapiens
  misc_feature (62)..(62): n is a, c, g, or t
  misc_feature (350)..(350): n is a, c, g, or t
tctagagacagggtcttgctcaaaattatacatgttaatatattctagtttaatattgcaancatctttagaatttcatcagaaacgtgattttttctaagaaatgcaaaaggattttaggatttttaacacagaggacatgtttaacaaatgaatcctgacagacacctgcagtttagaataaatttgtgaacatccatgcgtataaagtgtcctcttgggacaagacatgttcacactgacttggggaatatgcccccaaggtgagagctgtctttttgaactgtgatctgactctgaaaagtagtgaatgccccaggtgatagactgtaactgtgagtggaattaantgctgcttgcatgccttttaatccaaaaccaaattcttttaaaaaatttttaaataaaatttcacctttgtattctttcattacagatatccatttggggatgaagtctactttgacagctagcaaggcgacatgcaactgttgttgaatgatgacagcaattcaggaaagacttaaatatgaaagcaaattgaacacatcgggtgtttgttatcagaaaagagatgagatgagataagacttgtttattgactagccaatatgtcattaaaattaaggtttatattgtgaagcttttttgaaatttta

SEQ ID NO: 328060 - DNA, 687 bp, Homo Sapiens
  misc_feature (43)..(43): n is a, c, g, or t
  misc_feature (495)..(495): n is a, c, g, or t
ggccgcttaattaaggcggttgctcctgaggcctgagagtctngggaggttgttgcagtttaattactgagagtggagcgtgtggaaattccctctggcactcccttttttgatgtcgctagaggacctgaggtgctaccttgtgtgggactctagcaggagctgcggcaggcctctgccccccgtccccctcgctggctcagagtgactttttacccaggtacttgtatactggagagcaacagggcagagcggttgagaccttgaacaatctgggttccatcctgctccgatgtggactagctggggccatgacaggtgagttatgtcacctctgtgcaccatggcatgcccatttgtaaagccctgtagggacgtgtgtggcgaagactgaatgattcacttacctgagagttgccaatggtgcaaggcacagagtaagtcagagtacgtgtcagctgcttctttaaagcagtgctctcgacctggcaattnttgtcccctacgggacacatggcaacgtcagaagatatattcgattgtcacaactggaggggggctgctactggcatctagtgggtggaggccaggaatgcctctcagcttctgcaatgtgcagacagccctccagcagaaacgcacccagtctgaaatgtcagcggcaccctgctgagaagtgttcccagt

SEQ ID NO: 328061 - DNA, 692 bp, Homo Sapiens
acaggcaacccagagcaagtacttgcaagggtcatatctttttaattatcttttctctctttgattaattattccgtctgacaatagcgtgtttctaatgctattcacctgcctttgatgattgacaacttttctgtctgattcagagcaaacagctgctgccacaatctcctagcaacccgggtgtgatggatgagcccccaagatggatggctgcaataaatcatgtctccagccataaaactgagaaaaggggataagaagaaaagcgaacaaaaaacaaaacaaggtttcttcccatgagtgcactcagttccttaccaattatacctgagatggactttgcacctattaatagcaaagtttttcctaatcagtaaaaatgggatgatggccatttgtatccaaaggtgtttacaattgttcctgcaaattggcacttgtactccaatcaccttcaacactgcccaagtgcaagggcagatgatcaaagttttgccttcttccacgaagtctcagcaaggaacaacatcacctttgtaccactggctacgattccaggcaccaacaaagaataccaatctgattctacccaatttttggcagcagctggacaacaccaaaagtaaattctaagtcatgctgaatgcagtgcaaagtgttaggctgcgaataaagttatttcaaaataa

SEQ ID NO: 328062 - DNA, 731 bp, Homo Sapiens
ttaaaagcacgacaacttggtttcacagtaaacggcaaaaacaaagttacacaattaaataaaaactcacaaagaaacacaccaagaactcacaagagcacaagttaaaaacaaaggcaaaaatggaagtggagagaaggcgggcagtagacaggcagcagtggcgtgttccttggcacagctaatcctctcctgttgggctctcgtaccgccgccgggaagccggctggctgtccgcccctcccgcaggcaccccaagctgaatggctcgggagaaaagtgaaccccttggtgccctgctcggaccttaaaggctatggtggaaactccttttgggacagcctaggaatgttccagtgtcttgcagaaaagagctgaagatgcactaaccaccaaaagataggagtgggctcaaacggctaactcagtggagccagacaggagacatgtgaggcgggtgcccggctctccgtggtgtcctggcagcagcagccccctgcgttcctagtctgctcttggggccctttcttgggggtgtgctgaccattttctgagacacccacccactcacctccttacaggcgtgctgcccgtacgctgctgtgcatccccaaagccctgacctggagtacggctccccagtgtgaggctcccgtggttctcagaaccaggaacaagcagctttagaaacagcttcacaattattataattactataatttagggtgcaa

SEQ ID NO: 328063 - DNA, 764 bp, Homo Sapiens
  misc_feature (414)..(414): n is a, c, g, or t
ctgcttattacttcccacactttgttctcagtattgttagtgcatcatgagtttcctgctagtgtttgaccactgggtactcctgaagatgttttttagtactagggatgcttttcagtattagggatgcttttttcagtactagggatgtactagggagtactgagtactcctgaagatgtttttcagtactagggatgcttttttcagtgttagggatgcttttcagtactagggatgcttttttcagtgctagggatgcttttcagtactagggatgctttccaaaatatcacctctttaacgtttactttttctagtgtgtgtctggaatccaaaggacatgaataagccactcataattaattttgaggaagttttattcaaatgtttatgtttcctaactgcaaaccnttaattttggaaagggcacaatgtttaactcacctatgtttaaccatggctaatttaaaatagtctaagatttggccgtcactaattagtattctcaagaatttcatttttcaattttaagaagaaaagggattttggtcacattttgcttgtaaatgaaaattacatcctcattctttgtgtagtatctacacattgttataagccaaaaaacaaagtctgtctgggaatctttgtacatatttgtatgttgctataattgttatttttattttcattattgtgcaaaatataaatgagcatttgtacattgactgtataagaaaccatgggccaggtcctgtggctca

SEQ ID NO: 328064 - DNA, 721 bp, Homo Sapiens
  misc_feature (542)..(637): n is a, c, g, or t
  misc_feature (648)..(678): n is a, c, g, or t
gcacgcacaaagtcctgggttgagggggcagtggtcagaaagttccctagggtaatatacaaaggagaattaacactggggacactgaggtgggttttggtcctttccacataactgacacctttcaaagcaaggacttgctttctcgtgaggaatgtcagcagtcacaacaccactgggttggatgcaggataattattcagaatcacgagttacctgtttgcaagcaatcacattgcaggtgggataaataagcagacagtctgtggtaggttcccccaccccaaccgcctcccctccccccagggatactgtaattttaagtattgttttggatattggtaattctaaagctccaatcttaactgggttttatgaaagccgttatagggtgtttattacccaataaaacctccttcttatttaataatacagtgcctagccactcctttttccctgcatccgtacatgaagcctgattgcagatctcgaacagtatatttctttgagctaaacagcaagaacagataaggtatcttatnnnnnnnnnnnnnnnnnnnnnnnnnnnnnnnnnnnnnnnnnnnnnnnnnnnnnnnnnnnnnnnnnnnnnnnnnnnnnnnnnnnnnnnnnnnnnnnngcaatgagttnnnnnnnnnnnnnnnnnnnnnnnnnnnnnnngagggagaccctgtctctaataaaacaaaaacattacaccatt

SEQ ID NO: 328065 - DNA, 823 bp, Homo Sapiens
  misc_feature (57)..(87): n is a, c, g, or t
  misc_feature (370)..(370): n is a, c, g, or t
acctgccttggctcccaaggtgctgggattacaggtgtgagctaccgtgcccagccnnnnnnnnnnnnnnnnnnnnnnnnnnnnnnnaccttcaacaaactcacttttactctttacattctttatgtaactctactaccttgtccatctgattgaattgctacagatggtgattgatactaataattttggtgtttgtgttcttgaagatccattttttttctttaaatgtatatgtcacggtgtgagaataatgttttctgccattctttctgttaaatgtggggttcagttttccggaagcagggggaatgtctcttgtaggtatctttgttctagcagtggtgtaggttctgcttagcattccatncattcataggaaccgggacacatagattttggtcattatattattcaccttggcctgccataacagaataccactgactacgtggcttaaacagcagaatattttacagttcttggaggctggaaatccgacataaagatgctggcaggtttggtttctggtgagaatcttttcctggtttgccgacagctgccttcttctggtctcacatggcttttgcgctatgcatgcacattcctggtgtctcttcctcttataaggacaccaattctattggattaggttcccactttatgacttcatttaaccataattgcctccttcaaggccctgtatccaaatacaattacactggggttagggcttcaagatacgagttttaaggggcacaattcagtccataacaattgtatttcctggttataggggtttcattcatttggtcagccagca

SEQ ID NO: 328066 - DNA, 463 bp, Homo Sapiens
ctttagcagcctgccaaaaatattattagaaagctttgttgccgctacataactttaaatctctccttcctcagaaaaagcacccataaaactcagattgatttatgaacagtagcataagggctaccgccaggtacctgccctgttgccgcctgagaagtgggggcttcttggagaactctttcagatccccggggaaagtggcagagtctaccgaaaccatttatagagaagtatccagactgaagttctcagttccaggaactagggagtacccattggttgatcaccacagtgactctccaacagttcaccctcaagagcgtgacagagtgatcctgttttctgaaccaaaattcaccatgcctgcctgaaagaaacaacattcaaaactgacaccatcctgggaaatgcagaatatatggtggctttggctataataattattgtaaagtaataaatt

SEQ ID NO: 328067 - DNA, 768 bp, Homo Sapiens
ttatcaatgaaagaccaaatgaaataatttgaattgatctagagcctgctttcagggctataaaatatgaaaaaaactgatcaccaggggacaaaagggatgacaacctggactgaactgatacatttaagggccactcgcacgtggatcccatgtgtcccaggatctacctcctctagccaactgaaggacaggggcagcattccagatccaggactatgtgatccacatggggagcataggatttcactggttggatgtgcagaatttgtgtcttccatggtttcccatgcacctgctgaagaagagtggcgattcgagtttctgcagattctgcccacctttgccaactgtggcttggtggctggtgacagcaatttttcccctagaatccctggtagctccatttttccattggttggtggtaatttgctgaggatacagccaatgctctttctctactttgctgactccaagagcctgaagattcttccctgggaaagattccacattttggtggatatgcaaaatgcctccagcatcctgccttaacacttggcaggcaatgggccagccttcttcagagctgggaatcagccccaggatcaccctatctgcaatatttgagagcttcagttttctgttatctccaaagtgtatttggcaccgatctgctactccattgatctcaaggttatttctcagagcaactacagcatggggattccactcacaagcatggacgaaggcagcaccagcatgaactag

SEQ ID NO: 328068 - DNA, 833 bp, Homo Sapiens
tgacaagcggccaagtgccagcttttatttttggaacagaagcagaaaggaaatcttgctctgattccatggatgtgaccagggaggtgttggtcgatatttctgtgctgtggcatctttggtaaccaagttaccagagctggcagcggctggaggggttcaagagagcaccacgtgcacagcggaaatacctggcaaaggctggggtgctgctgaggggcccgtggactcggaggtgtggagggctgtgagtgtcgtgagagtcctgggggctgggcttcctacacatcacctgggcatagcttcgaaagaagatctgctgggggctgaggtcccaggctgggcaggacagtctccccatggtgccgtaacagcctcttgctgtatgcctgcagcgcgatggctagccccccaacgtctgcagcattctctaagaatgtgagggagtcattgaaggaggttctgctaggtaatggaaaggcagcataatggcgcttcaggcacaggtgagcttcctggagggcatggttgtcacaggcgaggcagcccccaggcagtaagagctggtagaagatgtgcaacagctcgtgggccatgattctgccagcagcgccaaagttcacggctctgggatagccagggtggaagaatgggggttggaggagtccagctggaaagactaccacatggtcagataccgaatagtaagcattgacgtcccaaggggacaccttccacctgtgttgggggtgaggctgcaagaagctctggacaattctagctcggagggaccggacacagctcaggacagactgcaggaagctcgatcccaa

SEQ ID NO: 328069 - DNA, 558 bp, Homo Sapiens
  misc_feature (37)..(37): n is a, c, g, or t
  misc_feature (133)..(133): n is a, c, g, or t
  misc_feature (374)..(374): n is a, c, g, or t
  misc_feature (404)..(404): n is a, c, g, or t
  misc_feature (538)..(538): n is a, c, g, or t
cttcaccccagagctcctgcgctagaccctgcctctntgtcattgataaatggtatcattacacagcccaggccctcctcctggactcctattgccagattaaatgaactatacatttcaaatgctccatgtngcccttggggactttgatcccctggttccccctctttgtctgctgtccctgaatcaccccttgttcaccgggtcagcttttgtcctgtggaccctcccccttcaatgacctctcttcctgctcaggtgatgtgtaggaagcccagccccccaggactctcacgacactcacagccctccacacctccgagtccacgggcccctcagcagcaccccagcctttgcccaggtatttccgctgntgacgtggtgctctcttgaacccctccagncgctgccagctctggtaacttggttaccaaagatgccacagcacagaaatatcgaccaacacctccctggtcacatccatggaatcagagcaagatttcctttctgcttctgttccaaaaataaaagctggcanctgtgcttccgcttgtctct

SEQ ID NO: 328070 - DNA, 195 bp, Homo Sapiens
aatgaaaagaaaaaacaagaaagttatgtttcataatttcttacaacatgagccagtaaccctttaggaactctctatggagaacaggcctggtgggaaaggctttgggggctgcccccttaggaggaggctagtgctaagagggaaggcccaggtttgagagagccagaggcagagcccagagccttgtttggc

SEQ ID NO: 328071 - DNA, 296 bp, Homo Sapiens
  misc_feature (296)..(296): n is a, c, g, or t
attcggcacagtaacttcattcctcatgttgttcctggataagtcatttcatctttcttagccttaaatttcccaactgtaaatgtggaaataatgtccatctcctagggttgatatgaagggttaataagatattttaaaagcctaatacttagaaagtgctctgtaaatgttagtataaatgttagcttgatccttggacagttaaatctggaggtgagattggagtagatgatttctagaagttccatgtttgctttagaagccttagtttagaccaggtgcagtggcttatn

SEQ ID NO: 328072 - DNA, 797 bp, Homo Sapiens
agaggttttgagtgggagtagtacaagtgagaaagcgatgagcttcctgtctttgctgtggcaataatggaagaacattgttatgtacttatataagacactgccatgttttttttccagtgcaaattgatagctccttaatttaatagcaataaatctattttgatctgcataatctttggggaaaagtgggaggtattgttttccatttctcatctgattttagtatgatttttattacaaaaaaatttaaaattactatgccttattttgtagcattatgtattagataaatgtagtatgtgtttttcactaaatttattttgagaaatgatagttatttgaaatgagctattcaacttttatgtcttattaatacaatgggtattattttatggttcctacttgttatttggtacccaattatgtattatacagaatagttttatattcactttacatatatgtcaatagaatctttattaaatcagtacaaagtctgtttatatagataaatagatcttgtctcatatttcgaagacgaaaaataagctgcttccagattctgaactttgtaacgtagtaactgtggtcctttttcctttttgtgatcacccaaaattctgatttagaactccatagagaattgtagcatatctcaatgtccttgaaagaatagagaggaaaaatcaaattcaaaggtaatgtgagttcagatttatgaattaaatacagcttccaggcagaaagcagaactgtcaagagtcttctttgggccgggcctggtggctcatacc

SEQ ID NO: 328073 - DNA, 818 bp, Homo Sapiens
  misc_feature (67)..(67): n is a, c, g, or t
  misc_feature (368)..(606): n is a, c, g, or t
  misc_feature (608)..(654): n is a, c, g, or t
aaatgttaacacttatttattctctgtgatgggtacacataaatctttaatatgactctacattttnctgtatgtttgacacatttcataattaaaactacaaattcaaaccaaagaaaaaggtagttgtaataaaatcctttaaaccaccagaagccaatttatgtacaataacttactgaacaaatagatgatactttgctatagagaaactaagtggcaaaaagtttatgcaactgaagaggattttaaaatattttattttcacatcatttagcagctaacaacaacaacaaaaaattactgaatttaaagttagaaggctggcttaaaataccagccctgttggccaggtacagtggctcatnnnnnnnnnnnnnnnnnnnnnnnnnnnnnnnnnnnnnnnnnnnnnnnnnnnnnnnnnnnnnnnnnnnnnnnnnnnnnnnnnnnnnnnnnnnnnnnnnnnnnnnnnnnnnnnnnnnnnnnnnnnnnnnnnnnnnnnnnnnnnnnnnnnnnnnnnnnnnnnnnnnnnnnnnnnnnnnnnnnnnnnnnnnnnnnnnnnnnnnnnnnnnnnnnnnnnnnnnnnnnnnnnnnnnnnnnnnnnnncnnnnnnnnnnnnnnnnnnnnnnnnnnnnnnnnnnnnnnnnnnnnnnnccacccctgtcatcaagcatgtgatttgagaaaatttcacttcacttctaagaacctgtgtcagtttttcagtcaaatgaagagttgaatcataattttgaagattcttgtaggtctaatagattaaataattatgttaatgtctgttttacataggaataaga

SEQ ID NO: 328074 - DNA, 969 bp, Homo Sapiens
  misc_feature (524)..(532): n is a, c, g, or t
  misc_feature (881)..(911): n is a, c, g, or t
tgctctggtgactacagcaggtcaattattggagccaagagtagtattgtaaagttggagggtcttagaaggtcaggaaagaaatgagtggcccatggaagtgtcccttaaatgataacagccaaaagcacagccacctatggaatattcctttgttttgctggactggtagaaagtgcagggcttgcaagagtagaaagttagagccagtctcatccaatgtcctgtgaaattctagtgtttctgttaagtgcttgccggggtcttcttgaacccctccagctggggaacttggtagaaacagccccactgattctgttttttaataaagtcctttttagttgtacaagcaaactggtagctctttaatgacgtaaaaattcaaacaagacagataaagcttaaatatgcctaaaactactatttactctggatcctagccatctctcttaggagtaattactgggattagtttgttggtatcttttacccacttcaatacgtgtatgtacaaaagtctgtgnnnnnnnnnatgtaaacagatcacattaagtgccttctgcatcttacattcttttttatctttgcagtaagtacatcctagagatgttttagtacacgtagatttactgcagttttcttactgctccatgataatcccgtggtacagatgcactattcccctgttggtggacatttaggttctttctttctatttttgccattatctgtcccctgagtttttttagacagctctagactttaggaaatttgcaccttcatccctcagaaacagattctggcttccacgaaagtgctgcagaacccatttgtggagagcccacgtgtcttgtccagtccttgtgttgtatggacgaggnnnnnnnnnnnnnnnnnnnnnnnnnnnnnnnttatttattgtgacttcttttgctggccactgtgctaaacacagttatctttttcctc

SEQ ID NO: 328075 - DNA, 765 bp, Homo Sapiens
  misc_feature (365)..(365): n is a, c, g, or t
  misc_feature (624)..(624): n is a, c, g, or t
  misc_feature (746)..(746): n is a, c, g, or t
cttaattttccctctgattttagtataccctcttttctcagctccccatcagcccagagccattgataaattatcacatcactggtctttcagaattatttttttgaagtatagaatcacttatttcaaacaaaattgagtatacaaaacagataaatatgggtgggttttctaattaaagttggagtgggaggctagtgacctgcctgctctaaacccctttacctcctactcaggtccctgaaacacaaggaaaatgccaaaattaaagaaatgcttttttcaaatgaaatatcgggcaatagaaaatgagagacaaaatgcctaacttaggtcttttgtcttgtgaatcccagagaaatttncattttatttattatgatagtaattgaggtggttaaggataaattaaataaaaagtacaagatacatggggggatgttgactcctgatgtaattattcccactccaatgtgatttactctgtgctagatatatgtatatgatggaatttctagcccaaggtttagttaggtgataaataggaaggaaataatatacctcatttccagttggaaagtgcctgtcaaggtatataaagatggatagttgattgtctaaagntaaagattcttcttggctttataccttttagtgtaagcaaagttgtaaatgtcatctttgacaatggcaaatctccaaagaaacatttaattcaatttcctcctctactggttttctctggnggacaggtggtagagaaaa

SEQ ID NO: 328076 - DNA, 1106 bp, Homo Sapiens
  misc_feature (873)..(873): n is a, c, g, or t
ttttctatatataagtggctcattaggtgtttattttgttctatttaagaatttgttttattaaattaatataaaaatctttgtaaatctctatatacatctggtcattggaggttccagttataaacccatcttagttccacccctttcccctcaaagggggagcaggggtcaagtgacccaacccatcctgccagggcaggcctatcttcctgcctctggaagacttgttgcaggtgggtagtgggtcagattccaggtaggatgaactgggagaagctggcaccccaggtctggagggggctggggtgcagcctccagctgtagctgcctcctgccttccgaagcagaaggaatgaaagatgcacattctgggctgacgggcatggctagcaccatcctaggccacccacgaggggctcattggcatttgtcgtcgctgtcggaagggctgccctcccgggggaggccatgacgggaatgggggccccagagtgcatgcacctcagtggtctccgtgtcactgctgctggtggcactgtctcggaagctggcgaggggcggccggactttcacaccctgtgctgtgacagagccctcgatggccttccggagctcctttagagtaacgattccaatgagtctgccaatactggtgacataagcatggtccactcccagcagtgagaagatagtgtgagtcttgtgcaaaagaggtcccgctccaccagctggaagggagcaggatcaattttgcagtcactgaagttgacaggttcatctagttgctgctcctcccactccagaatctcttcagggctcatctcgccttccaggtccgcgtcacttgccagggagattcggacgacgctntcagcttgcgcttctcacaggattccaacttctccgaagcagcctcagggggtggactgccacagaagaggctccggagggcgatgcctgccgactctgcggctccctgtgggactctctccgaggttcctggtgacactgggccccctcttgagtgcaggctttaggggcttgtgggtcttcccccgggctgctgggaaggctgagtcttctgtgttcacctggaagcgagc

SEQ ID NO: 328077 - DNA, 649 bp, Homo Sapiens
agcacctggtatttccagaactagaaggtaaagaaattatttgtgcttgaacttgcagaaaactgccttttcccttcttctcttgcatcttaacctggagcttcccttttcttgagcctcagtgtgcttcccaactcaatttataattgacttcctgcagtttctccttaggacagggctttgttttgggggtggttaatttgtagggttcataggaaacagaccactcacagcactgctttttgccaccctcactctcagctatgagttgaggcccaggaagccttctgccagcctcagctgctgttctcagattaatctgctgagttctttttgcctggtaagaatctctgaatttaggaacacagatgttagcacttgtatttctaggttttccagttcccagggccattaaacatttttttcctttcctttccttcttccaaaaaaattggtgattcccctgggtccctgtggtttaacctcacaaaacgtccatgatgacaccctgttacattgttttgtcgtagttaataccttgttatcccagttgctcagtcagtttttgtgagagattcagggatcttaataaaactgtgctgctactgctactaacatcttgcataaaagcccgattaattaagcggcc

SEQ ID NO: 328078 - DNA, 682 bp, Homo Sapiens
ttcagttttgtgcattttgtattaactttcataagcaagttctataatttgcaacctcatgaagacaacaaaaagttgaggctgattatgtctactaaatagttaccttgggcatacttctatagttaatgtccagtgagattttagtattaacttactatggcttccatattcctcagcatacattaaactatgctgcagtaacacatcaacccctaattccaaggatatggtaggttaaataatgatatctgatatgacgtggatgtttgtcccctccaaatttcatgttgaagtttgacccccagtgttggaggtgggcctagtgggagatgttcaggtcatgggagctgatacctcaggaatggcttggtgttgtcttcatggtagtgaatgagttctcactctacgagttcacgtgatgtactggctacctctttgccttccaccatgactgtaagcttcctgaggcctcaccacaagccaaacagatgcacgtgccatgcttgcacaacctgctctcagctgggctcactcatgcatctgctatcagctggctggttaactgtagttagttcatcttgatggcatcattggggaaactcagctctctttcactggacttctcttatatttctccagcaaactggaaagggtgtgttctcgtggcaggggcaggagt

SEQ ID NO: 328079 - DNA, 536 bp, Homo Sapiens
atgagcaactgcccagcccaggattattgtatgtatttttgctaggggattccctggaatgctgcttagttcaagatatttgtccatttcctctgaagaagctagggtgtacaggtgaggaaatatgacaggattattttcttttttaaaaatctcttgtaaaaagacataagggtctgctaaagaaagttgacagactcttgttttctggaggttaaccttgtctctggtccaaattaggagtcaggcatttagggatgaggtctgatgatggttcataggattttgtccacaatctgttatggaaccctggactggttgagccttgttatctgtgggccaacctagggaattttaatcttatggaattgaaaaaacaaggaacaatgtttgtgagggatttattaatttcttcccagatttttctttttctcccctgttgtctctcatagtttttccagccctcctagtcacaatccccagaggcagctacttcaattcttctggctacctagttttactttactctgttgttt

SEQ ID NO: 328080 - DNA, 404 bp, Homo Sapiens
tttttaaaaaaaccccctggtaaaaaagaccataagggtccgcctaaagaaagttggccagaccccttgttttcctggaggttaacccttgtcctctggtcccaaattagagtcaggcatttaggatgaggtcctgatgatggttcatagaattttgtcccacaatctgttatgaaccctggactggtgagccttgttatctgtggccaacctagggaattttaatcttatggaattgaaaaaacaaggaacaatgtttgtgagggatttattaatttcttcccagatttttctttttctcccctgttgtctctcatagtttttccagccctcctagtcacaatccccagaggcagctacttcaattcttctggctacctagttttactttactctgttgttta

SEQ ID NO: 328081 - DNA, 470 bp, Homo Sapiens
  misc_feature (383)..(383): n is a, c, g, or t
tttctaatcagagtaaaatctatctctcaatatagatacatgtttgcatttactcccaattgagttgtgctttgatggagcaggatctgctactttaagacaaaattttattgcccttgagccaaaggattaattacatccattgatagacaaaattccagtcatcagagattctgcctgctgtacagttgctctatttttccttgattgaagttgaggcagatgtcttttgcctttcaagcagagtattcaaacgaggctctattagcagaggaactaaaagctctgcatctcaaaacttgaaggcagaatgggtttcatgccagttctttctgaaagagagagttgtgtatttcagcatctgagcccttctccaagggatngacactttttcaggaagagtgcaacgtgcctggcttgtttttatctctgtgttttccaaatgaatggaatgaagccaccagcttcag

SEQ ID NO: 328082 - DNA, 716 bp, Homo Sapiens
ggccgcttaattaagccacaggtttgtaacatgggtagaacattttacagatttacactaagaaattttactgatagaaaactgaggctgagcatgtaagtgatgcgttcagatgaagcagtctgtaagcagccatatctgtctgatgccaatgcaaactctttctagcacgtcaagctgtctcttggtgttaatattttgtatttgtgaattactttatagtttactaagcacttccacatcttttattccatttaaaccttctgacgatgcttacacaaatattatctatcttttagattgtgaaattgaatttcagagagttcctactactggtagtaataatgatgataaaattaatgataactatcttctacttttgatgaactgacttgctcaaggcaacagagctcagcacgggcagatgtgaggctcagactcaagtcttctgatgccaagtccagagtttcttccacccttgaaagatgggtctctccaatatgaccatagcatgattagtctagccgcgggagaggagagaggtttacagcatcagcttggcattcagttggcgtggcttttaaagtggctcaacatctgccatcaattagacttcctgttgctatggtgatagtttattattgctaggctgataagacggcccatgacaagaagactatcttcctctttttccctcccactctacagcaaagttt

SEQ ID NO: 328083 - DNA, 696 bp, Homo Sapiens
ggacagagctgctagaacctcccagcaattaaagagtgtcatgcataaaaatcatatatacacacaaagctaagacttactaactatagtgaatatcccgttaccttaagagtctcaaattatatgcatattttaaaagatatcgtctttttaaagttaaattttttaagtttcacctaggactgactttttttaacaaaataacctagaagtgatcctatgatatagtttaagggtagtagtttatggagactcaccatattagatatttataaggtgtctgccagccttacaatgtctctctgctgtctgtctctctgtctgctgcctccctacccctttttctatcttcccacctacttttcggaggtgagcagaggcagacagatatgtgcagcatgtctccgctcctggccacagctgactagtccagggatagacatctaacccaagcctagcccaagtcttagagaatttagaattgagatggaaagacaggctttccatttggctagaacttggctgcatagtttagggctgtgggaggccaccctctaccgacagagtggcagagaaagccagttagtaagaaagatgagtaaaagctttgcagaaagaaagacataaacagaaaggaccctcaggattgctgatggctttccaattcctgggaccagttcttccagaagcctgagt

SEQ ID NO: 328084 - DNA, 671 bp, Homo Sapiens
  misc_feature (54)..(266): n is a, c, g, or t
ggagacagaatcttgctctgtcacctcgccccgggtggggtgtgggtggcacannnnnnnnnnnnnnnnnnnnnnnnnnnnnnnnnnnnnnnnnnnnnnnnnnnnnnnnnnnnnnnnnnnnnnnnnnnnnnnnnnnnnnnnnnnnnnnnnnnnnnnnnnnnnnnnnnnnnnnnnnnnnnnnnnnnnnnnnnnnnnnnnnnnnnnnnnnnnnnnnnnnnnnnnnnnnnnnnnnnnnnnnnnnnnnnnnnnnnnnnnnnnnnnnnnnnatgagccaccacatctgggcattattattaaattttattgacaatacacatcagtcaagttatggaatgggagatgttataaaaggtgttcccataaggaaagaaactgaaatgcattgatttgactctgccatgacactctaatgaaatagaggcctgagcccatgcctaggaaaaatggagtttctaggaggcaaacaaaccatgtaggggttgagagtcaggaggcagacacaggggcagatgcccacatttaaacccaaggccatcagggaaacacagatctgagaaatatatacgaggcacaacgtgacagcaagcatcccttactctaaacttttttctaagcttgacccagtcccaatttaaattactatgtatagtatgctatttaattaagcggcc

SEQ ID NO: 328085 - DNA, 681 bp, Homo Sapiens
  misc_feature (415)..(547): n is a, c, g, or t
caaattttattccactttattctttagaagctcacgggcggcaggcagaaccttccttttagtgagttgtaaagtcagagagaagctgaaaaattagagtgagaccacttattatttaatgatttttaagagcagggtcacctttaaaccagaattggcttgaaaatggagactgtgatatgcacggctaaaataagggaaatgtccatttgaactgagactagaaagcatgactttgcattgcagctggctctgttgataaaaatccctcatccctttgaatgttaaattgaaagactaagaaagcatttccaaggcgaagtgcttcatgtctgtctctcagggttcccacagctgggtcccgggcatgcctgtctgatgctctcattcgaggaaaactgcctttcaccattgnnnnnnnnnnnnnnnnnnnnnnnnnnnnnnnnnnnnnnnnnnnnnnnnnnnnnnnnnnnnnnnnnnnnnnnnnnnnnnnnnnnnnnnnnnnnnnnnnnnnnnnnnnnnnnnnnnnnnnnnnnnnnnnnnnnnngcatccatcgcctcactgaaccttattttccacacctgcaagttcacagacaggaccaagtgccagggtcaacccttctggctgactgggtccatctctatccctccctgcagctcagtcaaaggcccacggtg

SEQ ID NO: 328086 - DNA, 815 bp, Homo Sapiens
gcttggaattgatttattaagcacatcccttgccaccctcccaccttaaaagttttcagtatcaaaagaagctagcgcaggccacccgagtccctgaggttggagtcctagcatagctcccctccctcaaagagggacaaggggtcaggggcagagcaaaaatccagtctgcttcaaccacggagactgcctttgggatggaaagtttctggagctccctccattctattcctgtggggcaggaacatgcaagggctgctggtaaatggcaggggtcacctttaccaggggcgcaggcatagtgtgggcccctggcctggccctggggccaccctgggaacaggtaagaccctctgggaaaggggaagaaaccagacccagccataagctttctccccttctccctcaaatcgccccttcctcctccccaaaatcaggctatggcaaaggggctggcagcaggggaatggaggttttggaggggaaggccagccatgcgaaggcaaggagaaaaggaggatggagagagccccagccatccccattttccttcctctgcctccgaggggctgcttctggagggcactgttgtgtggggaccctgtgaggtttgcaggaggcgggcaaaggggcaccagacagggaacatgcacacaggcagcctggccatggagagctcctgctgtccgcccaggtggcgccttgggtcaagtggcgctccacaagtgattattgatggtgacaggattccctcatcctgctccaacctctcaactgtggacacattcaccggcagtcactcatctcacatgccc

SEQ ID NO: 328087 - DNA, 449 bp, Homo Sapiens
  misc_feature (262)..(380): n is a, c, g, or t
  misc_feature (383)..(383): n is a, c, g, or t
  misc_feature (393)..(393): n is a, c, g, or t
  misc_feature (410)..(410): n is a, c, g, or t
  misc_feature (435)..(435): n is a, c, g, or t
ggacagacgcatactcaggtttattttacctgctgagcttctgccttagaagttttcagaattgtgattacattgaataggaaaaaagtctgaactatcagaagcagtgccgcaactttgacaaacaactgattatataataatctgcctctagcatgagactatattaattattatttagctctggtgacttcataagcagccagtgacaacagaaagttaagataataaaatgaaggaatgttacaatttgttatcatcnnnnnnnnnnnnnnnnnnnnnnnnnnnnnnnnnnnnnnnnnnnnnnnnnnnnnnnnnnnnnnnnnnnnnnnnnnnnnnnnnnnnnnnnnnnnnnnnnnnnnnnnnnnnnnnnnnnnnnntanataaataaanagggttttgtttgttantccacttcaggggcttctttattgnccacatttgtccac

SEQ ID NO: 328088 - DNA, 611 bp, Homo Sapiens
cctatgtggctatactggcaccatagtgcagagtacactattgcaacaacctactgccaaagttgaacttcacattcaaaaatacaattttgcaaaggtttaaatactaaaattgcttaaagtatatgttaagtttgaaaattaagacatttccattataaaaatgacattttacacggccataaaaacaaagaattttcacttattttttgtgaaagtttataaagcttttatgggtgcttcttgatctttgatacaactttgattttaaagtatcccagaaaatttgctatctttacagtaatttaataatattaccatattgtctcaggtgaaaatctaggttgagaaaaatttagttaaggcactggcaccattctacttttgttgctcatggccaaggactataaatggcacaagaagcaagaaacagacagagctagcaaaatgctcactgccccaactcctcccaatttgtgggaaaggcatagtggggtcaggcatgactggatgcatcatgggttgtgctatagaagaggcaccccaattctctgccactctacctatttttagaggagttgggaggagatactgagatcagaagactggcc

SEQ ID NO: 328089 - DNA, 610 bp, Homo Sapiens
  misc_feature (329)..(329): n is a, c, g, or t
caatgccaatccagtctctgtggagagggaagaggcctctcactgatcctccttgtctacctcaacactgtggcccgcgtcccacggaccccaggggaggctatcctacagagctggagcagccgagaggtgctgtgtgtgcctctgaaggatgggctggaggctgtggcaaagccctgagagacctatttctttggccaccccaacgtggaatcctggggtcactgggaaatactagggctttctctgtgagattgggaaagacttctaggatggtctggaacgctgaatggctgaggtctggtccttaaaattttacacgtcatttnctagagagacgtgaagcctacgaattccagagtgaacccagggcctggggtgaaatgtcttggaacctgagggaacatctggatgctcagatagaaacctcttatctgagcatccagataagaccagagctcatctggaatcaagtgtacatgactataaagagtccaccgggatgtcaggcttcttagagaggtgcttgtagagagagacatgtaggaatgtggacatggccacactgacgctgtttgtcacagattttcattctaatttcttgttgttt

SEQ ID NO: 328090 - DNA, 739 bp, Homo Sapiens
tttttcaggtgcttgacaataaatttaattcaggtgaaggctcttcccttcgtgcaggcaccaggggtgtatatgagatgcagcatgcctcatagtgatggtgcaaggcatggcatcaaagccaggctgaggccctccggatgtcagtggagctaacaaacacatgagtgccaaggcccaaggaacagcactttcagcatgtaggaagaaactggattctggaagcttgaattctggcacctagaagctgcaaacccgaagcactgaaagtgaattgcaaagacaggaaggagtgggttggaggcttctgataccaagtgggtgtcgcaaatgagccatacccgaagatcacaagccccacaggagcagggcctaatgggtgggcgggttgggggcttagagctgaagccttttacggccaacccccaccaatccccagtgctagggagtcgccaaggtggacatggagctataggctgtgccatcctaggaaccaacaaaggttaagaaccactcctgctgagtaccagcaacatggaagacagtggagtgactgcctgcttactcatgcttttgtttttccaatctagaaagtctacagaaactcctgggagcagacccgggctggcagttatgacttcaggctggatgccatccccttccagactgcccgggcatctagggagatcgccagtgatgtaagacccccatgttctcttctgcggtcactgatgagttt

SEQ ID NO: 328091 - DNA, 459 bp, Homo Sapiens
cctaggtccagaatgtgcttgtcaggaagggtgtgcagcccagggttctctccgtgttcactgcctctttcctttgtcatcttcattctgccgttgagcctatctagtgggtttttacaatttcagttactgtatgtttagttcgaagttttccatttggttctcctttataccttctgtttctttcctgagacttctcatcattccctttatgttaagaatacccctccttacttcttggagtgttttttataatagctgctgtggagtctgtcagctaattccaatgtctctgttagctcagataagctgttgatcatcttttcccatgcgagttgaggatattcaccttctttgtatgctgagtggttctggattggtcctgaacattctgaatattacgttaggaagctgtggttcctgattcagtcctctggagagttgttggtagcttggttg

SEQ ID NO: 328092 - DNA, 410 bp, Homo Sapiens
  misc_feature (15)..(15): n is a, c, g, or t
tgggtgaagggtaanaagagaggaaaaaggggaggacggtggaggattttaacctatttttaaattggaaattatacaactagacaagtaaaagaaagtaaattctttaacaagaaactttatccataaagttcactgagacgaattgtttttaggctgggattatcccaggtaatggctttggttttgccacaagaatttctaagggtggaaacagctgttgcataattgccacctttttgtgggtttatgtgattctttggttctaaaacactttccattttatcttcctttatttttaagtctgaaacaattctaatggccagtggtcagatacttggggtatcaaacctaactggacacttggacagtaacaacagttgtaccacttcactaacccaggaaagtct

SEQ ID NO: 328093 - DNA, 761 bp, Homo Sapiens
  misc_feature (25)..(25): n is a, c, g, or t
ctaatcatccacgtgccagcacatnggaagaaactgttcttttttctcatttgaagaggtatatttttcaactgccttttggtagcttctggaagctttggaaaaggtgtgttctacatggacgatgaagtctcaagttttctctcagtgctatcttactttctgcagctcctgtctcagccaggatggcagaggctgacccagtttgtgcagcagctttgagagttccacgttgtgatctcgatagtagcttgacagaaatgtcctgctatcagaatccattggagggtattttcttcctttgctctttccaaggcattttgttttaccttcttccagtaactgacaccagaaacctttatgagaatcaaacgttaaagcttctgagtaattataatgagggcaagactcctagaaacttctgtacttcatccatcactgtagcagggatcagttcttagttgttgcccatcaataattagcaactgaaatggggggaaataaacaagccatctctcgatgtggctggcataccaccccgggaccaaacatctcttctgcaaggctctgagctccgagggtgcacggggccctgctgagatcacttcgtagaagctaaacttcagagctgcagggtcttcatgtgatcgctgatgctggtaccaggagtatgctcggtctgaagggtcaatgagaatggtgataatcttggctttgggaaccagagaagcagctcttttaggggcttcctctgagtggaa

SEQ ID NO: 328094 - DNA, 589 bp, Homo Sapiens
  misc_feature (534)..(534): n is a, c, g, or t
ttttcacagttaaataccatgtttaatcatcccacaatggacagtagtgcagtagtagaaattataagtgtctctttaaaaagtcactcccccaaagtttccattccccaatacccagataaccatggtggaacagggccagggtgagggggactcaggaagtcttggttccaaggagatgaaagtctttccaagtcaaatttgccttgtgagcagccaagagcccaatgagttgatgcatacgcgctcactctaacacgcacacatgcaagggacacagaacacatacagatggagggacagagaggggaccacagcggggccatcgcacacatgcgctctcatgccacaacattccagtccatctggggctatctcctctggggacagggagcggtggcctaagcccgaagcagcaggtgccggtcagatggagaggagggaggccgtctgtccagcctggctgctctgacaagggccctggcagcgagagaggccacccgccatccctgacacagtcaatcctccctaatnctcgggccggatgggagaagggagtggggctccagtgttaagggggggccagata

SEQ ID NO: 328095 - DNA, 742 bp, Homo Sapiens
  misc_feature (658)..(658): n is a, c, g, or t
  misc_feature (668)..(668): n is a, c, g, or t
  misc_feature (717)..(717): n is a, c, g, or t
ggaaaaacaaagatccccaaagtccatttcgctccgaggtcagtggacacagctctgtgactgtcctgtgctgtgtgggtctgtagaagggccagtcatgggccatcgagctactcacagccaactgcacccaagtccaagcctggctctgttcccatacacagagacaggatgggggctgttgatctggcctgaagccttgctctgggcactgaaaacgggggctatttccttacctgaagatctggaagcagcatgttgacaaaagcaccaactgctctgccatcacgtcccactgggtgtcagtgggaaggcctaaccaaggcctgcctccagtggctattcaggcagacgggccagcagttcccctccagggagcaagggacccttgttacccttttgatcacatttccttttcttaaaggggcattgctgttgggaaggggtcatgccttggatcctacagtcatggactgtgggtaaaacaggggctcttgactcttcacttcctagccataactctgcccattggaccacccaccctccctgctgctggtctcctggctcacccatcaaatccaactgctttatctagaaaatacttttctccattctcatttccctttgctttcccactcacctctgtttttggttctgntttattttgntccagacacccttgtcagggaagtagatcagggaggcccaagagattangcctgggtgggctgctatcgcttaa

SEQ ID NO: 328096 - DNA, 666 bp, Homo Sapiens
  misc_feature (645)..(645): n is a, c, g, or t
gataggcacgagccactgtgcccggccatgtgggtgtttttgaataataaatgtaaaggaactccaaatcaagcattacttttatattcatgacattgagatttgtgtataaaagaaaacagttatagattatcatacagatatttgtttcccatttctccttaattggggatctcaggtcattatgattcaaaattcaaaacatgggaaaaacagacagacttatccttagaagttaaattgatctacttaattgtagaaaagtgaagactttccctctctaccctctgagagttcaataactcagcctctgaaacatactaacaacaggcaaattaataagagaaaaggtatataaattgaattacatgtgtggtggcatcacaggaagaaaagtacctgaaaaaccgggagatttaggagcttatataccctctacatagacgagaaggaagcccagggatgtagccaatttcaggcagagtaaatgattttgggaaaagatgaatggcccttagaagaacagatgatcgtttgtgacatttgtctaagtgtggtgtgggcttctagtctcttctcttgtgattgagataagcttcactggtggatgaaactcctggaagagtttcactgaggaaaattganacaaattgagttcctttgcgg

SEQ ID NO: 328097 - DNA, 1005 bp, Homo Sapiens
  misc_feature (189)..(189): n is a, c, g, or t
  misc_feature (199)..(199): n is a, c, g, or t
  misc_feature (228)..(228): n is a, c, g, or t
  misc_feature (748)..(790): n is a, c, g, or t
taaagggcaaaagtgacatttttcggggttgtgactaacttgcactttagcaactagtaaagaaaagaaaatcaactaaagtttcccctctccctcccccactccaaactcccacattcttccaaaatagaaagttgaattccagaatgaattgccagaatacatttatttagagttgaggacaacacnggagctcacnaggctttgggtgctgaaccgtctctctgngccctcagaaggcgagacgtggtacctggcgtccctgcaaggtagatcttctgaagtggcctatttcccatagcggagacagaacaaccaaggtgtaggagaggactgtgtacaactgctccactgtagagtcctctgtaagagtagctagtcaggggcctggcagctcagggccatgtggccacctaggagtagactgaggtcaggagcccatttggttgggccattggaactgagaactggacgtaagccaaattctgtcccatccacgtgtgtaacttttaagctccagcacccaaccttgaaaccatcctgttcctttcccgccttctcaacttcctttcctcttttttaaccccaacatacacaaaagagaagattttaataggttcctcctcacccataattgatttcaaatgttccctgaagttgcccagctgagtaaccacctgcagctccaagttgcaggagactgagtcactaagtccatggcagaattggagcctgagcccaggtttcnnnnnnnnnnnnnnnnnnnnnnnnnnnnnnnnnnnnnnnnnnngctaaggtcctgtggggagcacaaagatgtctaagaaactgtccctgacatgaagactagttttcctcctcttaggatccgagcattagagtatatgcttgtgtagaacttgggaggcaggccaacctggcaacagattccatctctgacgcttatcagggctgtggtcttcagcgatccattgagcttttctatgccttcatttcctcaaatgg

SEQ ID NO: 328098 - DNA, 640 bp, Homo Sapiens
  misc_feature (349)..(349): n is a, c, g, or t
ctgggcagggcagcataagtactgggtgaggggaaaacgcaatcatcggctaacctttaaagagaataggagggctggtctgagacaccttcccagacctaagcaagcagagtcaaaaaagattaaagcccttttggtgctgtcactgaatatttactttcacatcatgctgcaaatacggtgaccctcacagagggcaacaggactcctgctcacctagagaggcagtctagtgtggggacaaaggtctgggctttggattttccagacttcaggtatgtcagatgtgtgtaaccccagaacaaattagtccaaaccgtctgagcctgttgtcctcacgggaatttcnagcaacatgcctccaacccccacagagacagaatagatttatcatagccacctattaggtttgctcttcaaattaaatggcatgaccagctaagacagcatctggtatactgtttttgcccaattaaatgtagctggtattaaaactgttgtggttttctccgaacatccaacatccagtgttaatcacccatacatgttcagtaaatgtttaatgactaaataaaagatttggtacaactactcatttgacagaagaggaaatcaagcgtgcaggaggtacgtgataagt

SEQ ID NO: 328099 - DNA, 457 bp, Homo Sapiens
  misc_feature (17)..(17): n is a, c, g, or t
  misc_feature (30)..(30): n is a, c, g, or t
attaaattggaaagagnaaaacccctaaanaggtggcctatgaataaaatcctaatcctgtcccctgtggggggttggaaggcaatggttgcctgaaaattcccccgtgaggaaaacaggcctcaagacgggtttgggataatttgttcctggggttacacacatcctgacataccctgaaagtctgggaaaatcccaaagccccagacctttgtcccccacactagactgcctctctaggtgagcaggagtcctgttgccctctgtgagggtcaccgtatttgcagcatgatgtgaaagtaaatattcagtgacagcaccaaaagggctttaatcttttttgactctgcttgcttaggtctgggaaggtgtctcagaccagccctcctattctctttaaaggttagccgatgattgcgttttcccctcacccagtacttatgctgccctgcccaga

SEQ ID NO: 328100 - DNA, 558 bp, Homo Sapiens
  misc_feature (69)..(170): n is a, c, g, or t
gagatgaggtctcacaccctgttgcccagggtggacagcagtatcagctcactgcaggccgacattttnnnnnnnnnnnnnnnnnnnnnnnnnnnnnnnnnnnnnnnnnnnnnnnnnnnnnnnnnnnnnnnnnnnnnnnnnnnnnnnnnnnnnnnnnnnnnnnnnnnnnnaatgctaatatctaaaggatgagaaaagcaaggcagaaacaatagaaaccccagggaataagtcacacagtgtggctgcagtgtagtgcacatgtagtaaggacagctcaagaggaatctggagaagtagctgggatcatgttactgatagactttaacgccaagttgatgaatttgtccttaaaaagattaggaatggagcgctaccgagtgaagcaggtaagatgctcatcactgggtgaaagcaaatggactagttacataagaaattacaaattaaagaaaacaaaattattaatagttctgtaagctatttgcataacaatacacaaatgattttctctactttgtggagaaaactccactgctcttgtacaatcactgaatc

SEQ ID NO: 328101 - DNA, 738 bp, Homo Sapiens
  misc_feature (366)..(366): n is a, c, g, or t
  misc_feature (385)..(385): n is a, c, g, or t
  misc_feature (718)..(718): n is a, c, g, or t
ctgaaattctcttacatggttgtttatttgtcatcccctttagagtataagctccaggaactttgattattcaccatcattttggcaacttgcatagcctctggcacatagagaggtgccaatatttgttaaatatttgtgaactaaataaatgcgctaattaagcctcttaccaagggcctggcagaccccatgctaagcactccagaaaacatgatcgtgttaattcctgggcaacatcctctgacggtagatattagtggttctgttttccagaccaagacacaggctcagagtatttaaatgacttggccaaggtcctgtggcttagaggcactaggacccatatttgcaccaggtctgctnggatgggcagaggccagtnttttgaaccacggggcatcactgctttgtggccctgtgccctgtgccagttcacagtggggacatacattttctgcaggaggggcagggtgtttgctatcggatctcaaataataaagtcagggtgatctttctgaaactcagatctgatcttgtcacacccctgtttaagataaatcagaggcagttaggatggagcctctctgcgtccacccctcggctcctcggaccgcagtctgcagcacccttcttccctccctctcggctccccttcaaaggcactgtgctcccgcctgctacagggtttggcacaagggatcaggctatgcggagntctgtcttggtgtcttggaa

SEQ ID NO: 328102 - DNA, 1003 bp, Homo Sapiens
  misc_feature (126)..(126): n is a, c, g, or t
ataatcagggaaatgcaaaataagaaaaggttctttttcgcccaacagataaaaactatcaagtgtaggtatggttatatggggaaatgaacattctccatacacttggtgaaaatacagttatgnaaggcctttggggaagactgcaaggtggacagagaacaaaccctttgatcccaaaaatcccaccttactggactcccagactaaagaaatattcacacacatgcacaaagacatctgaataggatgtttactttggcaatgtaatagcgagaggaaaaaaattaagggaataaataatggcattttcatagtatttaatcatattcaaccattaaagaaatttaaagacctgttatctttttttgagaccaaaattttaaaaagctacagaatatgagatcctatttatgtaaaaagtgtttttatgtgtatgtatattcgtacggaaaggtgacctagaggatgtatgttaaactgtggtaagtggaatgtgattggtagcattggagaaaagggtctctctattcaaagaactgtgttttttatacaatgagaaggtagtcattagactttcataattaaaaaaaggaaaatgggcaaaagcaattcataataggaaatgcaaatggccaagaaacatgaaaagatgttcctcctcattaatattccaaagaaaagaaagaaattttgcctaccagattggcaaaaatttttaaggattccagggttggcagactataggcaaacaggcattcttactaatgatggagttgtaaattggtgaaatctttttggtagtagttttcaaaactgcaaatgtgaaacctgatccaataaatttctagttattcatcctacagaaatacccacaaaagtagcaaaatacatgtacaggaatgttaattacacttctatctataatgaacctaattatcaatccataggggattaaataaattacagaatattcatgcaatggaatagtatatagttatga

SEQ ID NO: 328103 - DNA, 746 bp, Homo Sapiens
  misc_feature (575)..(656): n is a, c, g, or t
attggccctcgaggcccagtgtctttttaatataaaaggtgttaacagctatgtattgttctgcaaatttgttagtctgtgtgtcctgcaggctctttatatcagggcatatatacttacattattaattttaatagctatatgttatccagtagacttagaataaaatcccaaattcttacttgatggcatctatggagtatggccacctcatctctcattgcatcctcctccttacccactcctttctgctcacactgggctgtgtcttgatgtttctgggaacacgtgggaacacaaacccacctgtctccttggactgaggaggctccagtccttcaatattttcttggcctcatttccttactttattccaggtctctactcaaatacagcctcatcagaagttccttgatgttcctctccaattcctatatcctcccattcattctccctctctgtttccccttaacttgttttatttttctttatatttatcactacctgacatgtaatagatttatttcttcattgtctgtcttcctcccctagaatgaaaggtttattttcggaannnnnnnnnnnnnnnnnnnnnnnnnnnnnnnnnnnnnnnnnnnnnnnnnnnnnnnnnnnnnnnnnnnnnnnnnnnnnnnnnncaagtatgaaactttagtttgttaaaccattttctttctgatggacatttgtttccaagttacactatgacaatgccacagtgaacatct

SEQ ID NO: 328104 - DNA, 268 bp, Homo Sapiens
tattaaaattttaaatgtgcatacacattgatccaaaaatttttcttatccaaatccaccctggagatatatatgtatgcatgtagacatataagaagatgttcactgtggcattgtcatagtgtaacttggaaacaaatgtccatcagaaagaaaatggtttaacaaactaaagtttcatacttgtcactcattcacaaatatttattgaacaccaattatgtgcccttcactgttctagggccttggggggatgtattaggcaaac

SEQ ID NO: 328105 - DNA, 1011 bp, Homo Sapiens
ccaaatacttctgaaaggtccattcatttattgaatggtttcctcttcgtttctgggatttactttctaagcttccagcctaggctatatattaaaaaattttaaattacattttatccagcagttgtatatgtttagagttagaagaagcagataagatgttttcattcctgttccatgacatggagagcctttccatgtcagcttgatccatgatattctcctgaggcattagattgttttctggatttgcctaggtctggtgtcttcaaattggattcactttttatacatacagacactcccttggctctttaaccatatatattttattttttatctcccttgttaataatccttaatttagtaactctgtatgcatggcgcttatttggggtctcacagcacagacacatgagaggggtaggatagtctcctggcatgaccccagaacgtccggatcttcaggccactcagacagctgctctggggttaagtcagataactcatcacaggtgacatcctattccagtgtcagtggagactctcctagcgtctgtgtgacaaagctcttttcctaagtgactctgacttggttatagtaaattctctacaatgaaggcttctctctggcaaacacatcttctaattcctaactacttaacagtcattctttgcagtaaaaatgtatctgctcattgctgtttgcgggagtgaaagggaagaggtaaaacatgctgagctgtagctgagtttgtcacagctttcctggttaaacagcaatcattattcagtttcttttctccctgtccgcaaccaaccggaccaagtgtaaaaaaaccacacacctgaagtcctaaatcatgggccagagccacataggccagggcaggatcttggaggaagagagagggggagagtttggatagacttacttccttctgggcctatgatccacttgccaaatagctacagatgggaccctcagttccttcttccagctgtgccgaa

SEQ ID NO: 328106 - DNA, 395 bp, Homo Sapiens
ttttttcttataaagtgactcctttcataaaaacacctgacacaaattctgaatgcatttgtttttaggtggataggtgatgtgtaggtttcagtgtggaataagcagaaacatcataaccagattggacccgtgactctcagctcacaagcaatgtgattccaggcaccaacatctggctgttttaagccctggttttccttatttgtagaatggggataatgatttcacagaattgcttgaaaagatattcacatcaagtggagttgtttgtaacaggagatgctcaatcatgttaattctcctcccttttggttttattctggtttcacttaagtatctcattagccataatactattatctgacaatgtagaacccaaagcagaatatatt

SEQ ID NO: 328107 - DNA, 359 bp, Homo Sapiens
cgaacaaaaaggaatggcttccgttaaaatggcgccttcaaggtccccgcggccgcaagccctgctcgcccccaggtaacttgaaaaacgcgctgcatgtactcgttgtaaaagccctcgcggtaaggtggctcgcaggctctccgggaaccgctggccccggcggcgcgcacgatcgaatcgtcgctgttttcgtccacgatagtctcgtcgaagtcgaaggtcaggaggaaagcggcggcccctgcgcggccatcctgccgtccctagataggcagcggaggccagaaactggaaaacagccactcattgtcggtgcattaccgtgagcaccacctgtagggactctgttggcctcc

SEQ ID NO: 328108 - DNA, 742 bp, Homo Sapiens
caggaagaaagggatggagatgagccagccgcctagatcttcagtccaaggctagatttccccattgcaagggatgtggaatcagccccttccagatggcgctgccaatgctttcatcacgggaaagctttatcctcctggtgcaaggaaacacaggcagccgtcagccatcccagcgggagggagaacaagatctaggggtgctagaaattccctttgttccctgatggaatgtttcctgtttgcagtgcgtccccccactgtcttggccctcctaagtcacaggaggtgggtgtggggcaccccaaggagcctccaccctggcactaaaggatgtttttcaggctcaaacttgcagggctggtaagagtgggacctgccctcgggttgagtcatggggctttctcaccttctcaccagggtttcttcttgctcagctgtgcagctgcagaaagggctgagggcactgaagctgacaatgggagccgctctgcaagtggccccagctgcctactactaactccctaatcacctcagcctggggccccagcgctgaatgataaagcatttgaagatcgcttcattgtattggtataccgatgcttatctattaggtgtacagatggattaagcaggaaggttttcttaggatttctcttctagcccaccagattgattagcaaagtccagcctgtggggagtcatagagatgtactgcttttaagtcttaaagacacttgga

SEQ ID NO: 328109 - DNA, 824 bp, Homo Sapiens
tttaacagaatacatgacatacatgatggggattcagctgaaaaattttcagacatctctattcttttatcttctcggagggggggcccttttgcctctctcttgagtctttggcgaactctggagaaagtaaaagccaaacctgcctgctctctcccgttctcctgaaggctgcacacctgcccctcccgccccgagactggggagctcccgggtccagtgattgcatagcacggacgccgctggaaacaccttcgagaattcattaggattgcacaacaagattttagtcgaggaagagatcagttccctcaggtcactggaatggatcgttaaagtagggcaacaagtgttctgccgcatgacactttttcaaaaatgcgagttggtgagaaagaattcaggagatacctttgtagcgaatggcaccaaccgcagtgagggtctgtggctgttaaacactccgaacaggatttatgtttattgcagtttgcaacacgaattctcctcacctctttcccagctgttagataaatgtagatattcttcacaggatcaggaacgagtttgtagaaaacaggtgtctcttctttaatttcatagataacctctggacaatttgaagtcaaattctcaccaagaataaccttaagtaactggccatctccagtccccaagaataaaacagtcctgttcattaccacggtgccataaacggatgtcaggtcggaatggatcaaggtagatgatgcgattggttggactctttcaggttgatccccttctttctggttcagcccgagggtggtgactctgagtcccgc

SEQ ID NO: 328110 - DNA, 781 bp, Homo Sapiens
  misc_feature (366)..(366): n is a, c, g, or t
  misc_feature (393)..(393): n is a, c, g, or t
aatgttttgattacacatcagtattaggaaaacatgtttgaagcattgtctaagtctgtttgtgctgatgtaacagaataccatagactgggtagtttataaagagagaaattattggcttacagttgtggaggctggaaagtctagtatcagcgtactgggatttggcaagggccttcttggtgcatgatagtatggtggaaggtatcacacggcaggcagaaaggcagagagagaacaaaagggggcgaacccactcccttgatgagaacctaaatacctcttaaaagtcctaactctcaatgctgtttacaatggcaaccaaatttaaacaaggagttttgtaggggaacaaacacttcaatncaaaaccataggcaagtatgtaccctngactgtatgtgtatttattaaattactttcatatatttctacagcaatatatatgaggtacatttaagcatgtaaaaataggaatttttaaaaataggacagttgtaataatttctttgtacattccactttggagactgtttttatatggagcttgttttatcaccaaaaggcattttaattttgcacactttagaattcttacaatgtgtaattgactgctagttgctgaacaaaggacagataaagtgtttcctgcacctgagcagcctaaaggtgagtgtaatacagatgcacaagtgactggttgataatggaatgagaccccttataagaaagacatacagagcacggcagaggagcaagaacaacacagaggcaatgacat

SEQ ID NO: 328111 - DNA, 708 bp, Homo Sapiens
cgcaatgttaatttcttcattgagtggcgcattgccagcagatgttttgtcacttgctaggaatcctggatccaaatgacctggtatctctgcagtgattgtcttgctgctccctgaaacctcttcatcatcatctgatgagctcgtgcttgagtcacaagtcaggtcactatcactggtactactgtcctgcagcaggttatatttcttccttgcagcagcctcccgtttctgcctcagtagcctgatcctctccttgtgcttttggctccgatgacctttaaccttggcgactcggccattctgtttatcactggattgccggtttttcttggcagccatagtggaagtttcactttcagatcgggaccgcctagacttgcgcccaactgtggcaccagacactcctgaagggtctccttctaccgccgtttctgcctgagagggttcattctcttctgcggaagacaacgtatctgaatcagcccaggtgaccactagaggaaggggaaagcatgcagtgattagaggagtcactctcataaactcggccagttgtaggcttgtcactctctgtggatgctaactgagactcagaagagtcccttctcagttccatcaacaagcagggcattgaagaaataactgtagaatccgctacaccatctttctgaacttgagattccagttctacagatccatcttcct

SEQ ID NO: 328112 - DNA, 923 bp, Homo Sapiens
  misc_feature (517)..(517): n is a, c, g, or t
  misc_feature (520)..(520): n is a, c, g, or t
agcattcttatcttcccatttgcaagatctgtccaccattgtgaggaaagcagagagatacagccttcccatagtgaacctcaagggccaagtactttttaataattgggactcaattttttctggccacggaggtcagttcaatatgcatattccaatatactcctttgatggtcgagacataatgacagatccttcttggccccagaaagtcatttggcatggctccagccccatggcatccgccttgtggataactactgtgaagcatggcgaaccgcggacacagcggtcacgggacttgccttcccgctgagcacggggaagattctggaccagaaagcatacagctgtgctaatcggctaattgtcctatgtatcgaaaacagtttcatgacagacgctaggaagtaatggccttctgatgattcttaaagagttttcaattttttcttatgtgaagagttgacactgaaatctaaaatgtttaattgttgtaaatattacaggttttttnttnactacatattctttacaacagcaaccaaagaaaacatacctcaatacactcaaaactgaagacatagaggactcagatcaaaagacaaaatctggatccatatattggtgctagattctgcaggaaaccccagcagtgtgaacgcatcccaacataggttaagagcaaattgaaaacaaaggccatggcattctgccactgcatccttcagacagttatatcctccttttaaaccattgttgttgagtgtaagatgtccttcatgttttcttataaagtcagtgtttagaaatgttaccctttctaagttatatacagatcaaatgcttttttctttcacgtacatccatcatttgcaactgctgttcgtacacagaaacaggactgctcaaatgatcctatt

SEQ ID NO: 328113 - DNA, 711 bp, Homo Sapiens
aatcacctaaggaagacatttctaccacttagagctgttcagagagctgaaacaggctgcttgggagaccatagctctccttccccggaaatggtcaggcagagactgtaattccaatgtcagggagggattgaataaaatgacctccaacgtgccttccagcctaagaagtctggaatctttgcaggaatgtgagatggttctgggggctggagtttgcctttgattctgactgctctcttttgtctcacatttttcagctgcatttggctgctctgaacatgccattttctggggacattcgagctgattttcagtgcttcaagcaggccagagctgcaggactgttgtccacctaccgagcattcttatcttcccatttgcaagatctgtccaccattgtgaaggaaagcagagagatacagccttcccatagtgaacctcaaggtaaaaataaatatggttcccattgccttctgcatgcattggtcgctacagggcctggaggcagttttcattcctgacatcaacagaagactgttgacttaagcctgctctctcccttactggctatgtcactttgggtgggttctttgccttccctgaacctcagttttctttatgcttgtgtgacccttgaagcatgcaggaggagagatagtgataacttctttcattgatacagggtattaagctcatggtgctagctct

SEQ ID NO: 328114 - DNA, 933 bp, Homo Sapiens
  misc_feature (372)..(372): n is a, c, g, or t
  misc_feature (436)..(436): n is a, c, g, or t
ctttaagtgtgtcttcctttcctcaattcctgggacattggcttagtggcagtgatgctactggtgacactgctttgcaagagatctttgtagaacaatttctgtgtgtaaagaactaagccagtttactttcaagtttctctgcagcccttcgttgggcctctgttaccctggagattctgggatgtggtcttggcattactattttaccacttaatgagaaataggaaattgaactggctcttgaatgcttctagtaaacattgctattttagccctttgcaagagcagttttacctttatttgtacttttgatttactttgtctgacatttgatattaatttggggatcaccaatgggagaaaaaaacntaattagacatttgatattaatttggggatcacaaaggtaggaggaagaactatgcctgggaanagggtagaataaaccacagttgttttgcctccttttagaactaaggcagcaaacagaaaacacaattacaaaagagaatcattaaccatttcatgccatagagctccctgcatctccacctccattgtgaagacctctgtccattcagaatggccctggaactaggtcacaggagccattgcaggatggcagagctcgttgtccccgtcctagaatttagtaggtatttattaggtgatccccaaagagccattgcttgtaatcacatcatttttagaaaagtttaaagataacaagattaaaaaaaatttaaaagtacataatcactgtccccaaacatagttgttttcatttttgtatattaatttctaaatatgcagtatttctttctcatagctacaataatagtgtatatgctagttaaacatcagatcttaaatattttccatgtttatacatagtcgtcacaattattagatgcataatattctctcata

SEQ ID NO: 328115 - DNA, 616 bp, Homo Sapiens
  misc_feature (171)..(286): n is a, c, g, or t
  misc_feature (312)..(418): n is a, c, g, or t
  misc_feature (435)..(448): n is a, c, g, or t
tcaacaacagtttattagttacacattccctcagacaagaagaggaaagtagtgtaagctatgcaggcccacacagggattgcacttgggagcaaagagaacaaacaggggactgaggaaggttttgtagtatcaagaaggtgagatacgcttggtgtggtggctcacacnnnnnnnnnnnnnnnnnnnnnnnnnnnnnnnnnnnnnnnnnnnnnnnnnnnnnnnnnnnnnnnnnnnnnnnnnnnnnnnnnnnnnnnnnnnnnnnnnnnnnnnnnnnnnnnnnnnnttaggcatggtggtgcacacccgtcnnnnnnnnnnnnnnnnnnnnnnnnnnnnnnnnnnnnnnnnnnnnnnnnnnnnnnnnnnnnnnnnnnnnnnnnnnnnnnnnnnnnnnnnnnnnnnnnnnnnnnnnnnngagagtcttttaggagnnnnnnnnnnnnnngaaagtgagatgtgccttgaatttcaaaacaaaattttattggttcatctgaataattctgtgggctggcagggaactaaaacacattatactcccaactgttaagactgcaataatatactataatgctacaatgccataatctactatatacaatagtacttaata

SEQ ID NO: 328116 - DNA, 277 bp, Homo Sapiens
  misc_feature (140)..(140): n is a, c, g, or t
  misc_feature (267)..(267): n is a, c, g, or t
gtgtgagccaccgtgcttggccaacccacccaaattgtgtaccctacaccatcctagtgcttgggagccaacacccactcacaggaggctaagggcaagtttaggtaactcttaacaccacgaattagttgcctgctggncaaactttcaaactccaaggcctggaatttctgggttgggagttcaccttcccagatgggacttcaggggatttcatttcaccccccttcattccagtggttcacgggagccttttgttgaggggtngcagggctgg

SEQ ID NO: 328117 - DNA, 544 bp, Homo Sapiens
  misc_feature (465)..(465): n is a, c, g, or t
  misc_feature (489)..(489): n is a, c, g, or t
  misc_feature (498)..(498): n is a, c, g, or t
  misc_feature (507)..(507): n is a, c, g, or t
  misc_feature (517)..(517): n is a, c, g, or t
ttcaacagtccacccggccaagtcagggcatcctattccagtgaaagcagagaggggtgtctcagggtgggcatcccagctagggtggagctggcttggtctggaaatctgtgatcttgaccatgtacagcccccacagacttgggcttgtttcatgcatactcggtccctgcgggctttcctactctctgaacccaggggtacggaaggatccctttcagaaggcagagtgagtttgggaagcactgaggagggattaggggggccttttatcccgcataattgaggtcccctcgatccagagggttgggggtgcttcaccagccttgccttgcccttttgcttgagggccacaggggctcctctccagggggcttgcaccttcacagagggcttccgtgagcacttgggatgagggggggtgaattgaattcccttgaggtccattttggggagggtgacttnccaaccagaaatttttcaggtttnggagttttnaagtttttnccagcagggnacttaatttcgttgggtttttaaggag

SEQ ID NO: 328118 - DNA, 735 bp, Homo Sapiens
  misc_feature (720)..(720): n is a, c, g, or t
caaaaacaaagtttgagtaaaattaacaaggttggcaaatttaccactacaaaggtctttcatgggagacaggttatacctttccaatctttaaaataattctaaggttctgtagttcaatagtgaaacaagtacaatatcctggcataaaactatctttcagacaaaatccacctgctgtgtattaaaaaatgtaatacttgaaaacttcctgccttgggagagactaaacccgattcataatacaaaaaacactcaatctacaaatgctttcaacagtaaagttgggactaaatattaaagggggaaattctgacctcctttgggtgctaggactgtagtcatagctaagcagaaggtgatattattatctcatatttaaaattacatttcagacttatgtgatacagtcacctaagaaaacgatggacccacctgacccacaatagtatttggcctccatgacctagactaggaaagatttagaaattacccattatggagaaagaaagagcagtcttccttgccaagatgaaaactacatactaaatgagtcttctatgtgagaattacatttctatctgtaaagaagttacactaacatgtgctcccttcatgtccttgccttccgttcagtactgagttcttttaaaatactgacagactatgcggccttcatatttctgtcccaacatctagctaattaaaattaacaaatgngataccatttttact

SEQ ID NO: 328119 - DNA, 803 bp, Homo Sapiens
  misc_feature (122)..(266): n is a, c, g, or t
  misc_feature (480)..(480): n is a, c, g, or t
caagaaaaatatgcttacattttccatctgaattctgatgttacctccttaaagtggtaacatcttatttattcaaaatagttatcacaatatatagttatcttgttaatttacttacatgnnnnnnnnnnnnnnnnnnnnnnnnnnnnnnnnnnnnnnnnnnnnnnnnnnnnnnnnnnnnnnnnnnnnnnnnnnnnnnnnnnnnnnnnnnnnnnnnnnnnnnnnnnnnnnnnnnnnnnnnnnnnnnnnnnnnnnnnnnnnnnnnntaatttataaaatttttgaaaacttgacatcaaaataaagctgtacttcttactaaagggagttgaccacttaaatatcagtatttcctgtcttcctataaccacaagaagaagtcattatccttttattattattaatgggttatgaatagtatccaaaaacctttaaattagcttactcctttcttttccctttatgcctcctattcttctncaaccgtttttccttaagtccattattaatattgttcttttggacttgacttctgtgagaaaatacagttccaaactcagtgcgaataaaatctaaggtcccacacatttgtaaatcaggagtcaacttttgttcatatactgagcaaggttaaagaatcagaataggtttataatgttcataagaaaactgtaaagaggggatacccccaaattgaggcaagtttcaaaagtgcatggcgtggaatgaaaggaatcacttagtactaaataataaagatagcaaggtatgatttatgaaattaaatgaaaaatctgatgaac

SEQ ID NO: 328120 - DNA, 808 bp, Homo Sapiens
  misc_feature (458)..(563): n is a, c, g, or t
aagttccaaaatagcaaacataattttattccacttttgttaaagaatgtacataaatatagaaacccccattaatggtggttagattaaagggagtaaggacttgcaatacatactttcttctttatacttttatttcctaaacttttcggcaataagcatgagttactcttctaaacaaacaaataaaccaacaaaatacatgaacctagtgtatgaatagcaatattccaattagaaaataataaattttatgaattacctaatcaggactgtttgttatggatggaaaatttccaccaaaactgcagaaccagaaaggcaacactactatttaaaacactaaaaggtggtgatggagaaacaaaatctgctctatgcattataccttggatgattgacaagagagaatataaatttattattcaggtgtactcaataagtcaagattttataannnnnnnnnnnnnnnnnnnnnnnnnnnnnnnnnnnnnnnnnnnnnnnnnnnnnnnnnnnnnnnnnnnnnnnnnnnnnnnnnnnnnnnnnnnnnnnnnnnnnnnnnnagatgaaaaatattctaatagaaaaagatatccaaaaaagaaattggctgacttgtgaaatagatcaataccaagagatgtttcaatattcttgcataggtcaaataattaggtaactttcagtcacaatacattccaactctaaaacatagagtgggtagaaacatgaaaatagatgacaaagattagtttgagtaaaataacatggttccgttacatctctgcctacctgtcctccatctttt

SEQ ID NO: 328121 - DNA, 546 bp, Homo Sapiens
  misc_feature (33)..(33): n is a, c, g, or t
ttttatactcctctcttcaagaggcggagcttnaatgtctttcctcttgtgtgtgagctgaacttagtgattcacttctaatgaataaggcagtgacagtgggggacttcatggactaggtcataagaagacactgggacttccattttgcccacactctctcagatcactcactttggaggaggccagatgccacactgtgaacaggcccatggagaaacccatagtgaggaactgagggctcctacagcagctaagtaagtgggcttggaggtggattctccactttcagtcaagtcccagctgacataccacttgcaacttcatgagagaccctgagtcagaaccatccagctaaactgcttgcaaaattcctacagaaactatgacataataaatgtgcgttgttgtaagtaaatcaatttggggtaattttttgtgcagcaataattaactaatatgagtgtctaaagcagtcttttaaaacacaaacagattatttcccttctccgcttaatacatctcagtgacctctcatttcatctg

SEQ ID NO: 328122 - DNA, 477 bp, Homo Sapiens
  misc_feature (45)..(45): n is a, c, g, or t
  misc_feature (52)..(216): n is a, c, g, or t
  misc_feature (256)..(304): n is a, c, g, or t
ggagaagggaaataatctgtttgtgttttaaaagactgctttagncactcannnnnnnnnnnnnnnnnnnnnnnnnnnnnnnnnnnnnnnnnnnnnnnnnnnnnnnnnnnnnnnnnnnnnnnnnnnnnnnnnnnnnnnnnnnnnnnnnnnnnnnnnnnnnnnnnnnnnnnnnnnnnnnnnnnnnnnnnnnnnnnnnnnnnnnnnnnnnnnnnnnnntgactgaaagtggagaatccacctccaagcccacttactnnnnnnnnnnnnnnnnnnnnnnnnnnnnnnnnnnnnnnnnnnnnnnnnnctgttcacagtgtggcatctggcctcctccaaagtgagtgatctgagagagtgtggccaaaatggaagtcccagtgtcttcttatgacctagtccatgaagtcccccactgtcactgccttattcattagaagtgaatcactaagttcagctcacacacaagaggaaagacat

SEQ ID NO: 328123 - DNA, 437 bp, Homo Sapiens
  misc_feature (68)..(68): n is a, c, g, or t
  misc_feature (165)..(186): n is a, c, g, or t
aaccattagcccggccatggttggcatccaccttgtaatcccagctaccttgggaggctgaagcaggngaatcggcttgaacccaggaggcagagggttgcagtaagccaagatcgcaccatttgcttctccagcctgggtgacaagagtgaaactctgtctccnnnnnnnnnnnnnnnnnnnnnntcagttatagaaaggagtgaagtactaacacatgccacgtggaagaacctcaaaaatatggtacatgaaagatgccagtgacaaaagaccacaaatgattccagttacatgaaatgtctgggacaggcaaacccatggtggctgcctagggctgtgaggtggtaagaatattctaaaattcattgtgatgatgattatacaactctgtgcatatactaaaaaccactgaactgtccaggcttggtgagttg

SEQ ID NO: 328124 - DNA, 706 bp, Homo Sapiens
acattatacttagtcggacaatccaagacaatgactgaattagattgattcaccctcaaattaatattttatattctcccagacccttatcttgaatattacacctgagtatcatttaagcctggatttctgggacaatcataacaatttctaagggcatggggagaatgtgctgcagcaatttctcaactggcttgtccctctttgatcagaatctgtcttcgttgggcaaatagtgaagtgaaggaaggagctggtgagcctccagcagtagatatctgttgtattaggaagttaggatgtttcagtttctaacctcagtgaaaaagcacaaactttgaaagaagcaaacttccttcagggaaatgaaaccttcagattaatcttctattgaaaggattagtgactaaattctgctgatcaaaaaggcatgaggcaccaattcatccaattcactcccttattgtgttactatgatcttgcccagtctctgaaactcagagctcagttttaagtttattttaaaaaagtgatcaaaccaccctttaaacccattgtttgcataaacatacttttaaaaaggaatgttatttttctcctgagaatttgttgaaggaagtgggggtttttgttataacaaacctagctcattacagaactggtgtcttaaccttcaagactgaatagtgatgtttatattcttcat

SEQ ID NO: 328125 - DNA, 672 bp, Homo Sapiens
cagcaatactcacaaaactgttgtatttcttgtttacattaagcagttagaaagaattaattagcttgctcttcaaaggtactattactggaaataaagggtatatctgctttaataaagacatttagtttttaatcacttcaggagaaaggggattagagcaaaaggctaatattaatagatttaaactcaatgtaaaagaccaacaataaaggagatatttattgttgtatagtatttccagctttgaaaattaatattcaaactacctagttactatatacatccaaacataatcgtttcttttgaaaattctaggtcaagtttctaataaatattaatagtatggcgttgcctttgaaaatggacatattaaaggcaccagaattatacttcttacaaaatggaaagttttgctagtctgttttttaaatgaagatatatggatttaggcttagtaaactgctggctcatgcccagtcacggggacattctaccaaatgatgtgtggtccagcgtccctgccaggagctgggaggtggaggaaggcccagggaagagcaaggagcccagtcacatagattggggcttgtgtttcactggaagtttcttcacttctgtgccatcagtacctttgtctgcaccaaggagacctatactgcctctttcttt

SEQ ID NO: 328126 - DNA, 449 bp, Homo Sapiens
gttcaagcaattctgcttcagcgtctccaacagctggaattacaggaacgcgccatcacgacccgctaatttttgtatttttagtagagacggggttttccgtatgttgcccaggttggtctcgaactcctggcctgaagtgatctgcccacctcagcccccaaagtgctgggattacaggtgtgaatcactgcacccagccaaatgttttgttatttctttgacattattctttccccaactactgcttaagttgagtgctcaaataattgacttttaattttcacatatggtataggttcccgtgtgttaagagggacggttaatatcctaataatcctcacaaaggaggaaaaaaaccaaacacatcatcctaaaagatctgaaagttatgcatcttcatgaagtaaatgcagataatactgctccctaatattaattaagcggcc

SEQ ID NO: 328127 - DNA, 519 bp, Homo Sapiens
  misc_feature (22)..(22): n is a, c, g, or t
  misc_feature (49)..(49): n is a, c, g, or t
  misc_feature (60)..(60): n is a, c, g, or t
  misc_feature (96)..(96): n is a, c, g, or t
  misc_feature (445)..(470): n is a, c, g, or t
  misc_feature (473)..(473): n is a, c, g, or t
cagcattcacctaagcatatgnccctgggacaagtgatttaaagtttcntttaaaacagngaatagtaataccctaccctcatattattattgtcnagtgtatccatccttaccaatcacagtctttctccttagggctgggctcagtgggtggattgacactgcagaaatggccagatctaaaggatcaacatttacgtagctgggaaatgtagctgggacttcagtttcactgcccctggtgatttttcctaccactaagcagctcagtccatacccctacgagacccacaagcttatgagatactgttcttccaggaaagcagtggggccagggccaccttttaattgtgtttcttggcctggtcccatctttctcacaatacatagcaacagttatttacttgctgattttctaatgcacatcacacatagtcatattaannnnnnnnnnnnnnnnnnnnnnnnnnccncacccctcaagaaacattttctgaggcgtgatttcctgatttcatc

SEQ ID NO: 328128 - DNA, 471 bp, Homo Sapiens
  misc_feature (63)..(110): n is a, c, g, or t
  misc_feature (445)..(445): n is a, c, g, or t
  misc_feature (450)..(450): n is a, c, g, or t
tgagtatgaattctggtgtcagcattcactaagcatatgaccttggacaagtgatttaagttnnnnnnnnnnnnnnnnnnnnnnnnnnnnnnnnnnnnnnnnnnnnnnnntgtatcatcttacaatcacagtctttctcttagggctgggctcagtgggtggattgacactgcagaaatggccagatctaaaggatcaacatttacgtagctgggaaatgtagctgggacttcagtttcactgccctggtgatttttcctaccactaagcagctcagtccatacccctacgagacccacaagcttatgagatactgttcttccagggatagcagtggggccaggggcaccttttaatttgtgttttcttgggcctgggtcccctcttttcttcacaattacattaggccaacagtttattttacttggcttgatttttctaatgncaacntcacacatagttcattttaaa

SEQ ID NO: 328129 - DNA, 972 bp, Homo Sapiens
aagagattcagaatttaattggttaagagattatacataagtagctgctagaaatcattactttcaacaatgcaacccaaaacaattttcctaaattgaaagcaaaaaccgattttgtttttaaggagactggaattgaacaaaattctctcaggctgctgaagtctgttgcttcatttattttagactcagtcttcttttcatcgctgatttggaaatagtgaaaggccacccgtaaacaatacctcacataggaatagccttcaggaggcctcagagccttccatgtctttaaaaattgtatctttaaaattagaatatgaggtaattgctcttatgcaaatttcagagacaacatgagcgagctccctggcaggcagaagctggacgtcctggtttcctaactgctcccacaaatgccctctgtaccctgctgggttccatctggccacactccagtgcctctcccagaggaaggcatgccaaattcctgacacgtggcgtttgaaaataccatggaacgtttccactcgtggatttgaccatgttctccagtgaatattttagcaagctaaaaatgtgaactcctcggtcatgagaacactaagtcccatatgaattcgaaaagagcaataatgctggaactttgatccaattatcagcaagtcctcttccaggagattaaatgtcttatagtattttataatttgcttagcaggtatttatcctttagtgaaaaccaatggtcttagaagagagcagcaaaagatgctgacaaatcatttaaatggctaagtggtcattcttgctggcctaataaaagtccatttctaggaagacgaaacctcagcttcttataaatcatcaattatcccagataatggtaacaatatagatatttatactctgagtttttatttccgcgtccttgtgtttcaacttcacatcactcgtgccgactcgtgccgaatt

SEQ ID NO: 328130 - DNA, 749 bp, Homo Sapiens
  misc_feature (82)..(82): n is a, c, g, or t
  misc_feature (468)..(468): n is a, c, g, or t
gttttaccattttggtaaattttgtcacgtacgtctataaatgtcaatttatagaatattgacatttatttatatgcaatancaaattgtgtgtgcaccatgacctgttccaatcacatttctgtttcattagtgtcttaatttagtaggaatattattgttaccatgacgctggactccaccacaatttgtgttttatcctcacaaaaatgcaatgactttatttccaatgtggaaaatttaaacaacttaaatagcattcacaaaaagtcagttgtttcactttgccagaatgaatgtcccaaagccctgcttggcttccatgagctgaatgaaagaatgaattgtgattggaattaacaggtttttctgtctgaagagtccgaggatactggtgttgagctggcaccattttgctttctgtgatgttcttcttatggagccaacacacagtcagcaatcacttcncactgttgcacgtgcacaagaaaagctgattcctcttctattccgagtgagctgacccacatatgccctcctttcttctttttcagccggccttaagcaggtggcttatcaaaatcctttcgaggtcttgcaaaaaccaatcccacactcgagaagaacgtgctggccggtgaaatcggacaacattgctcacgggatgtaattcaatggtagactgcagccacagcctgagaactcagacacctgatttatgagacgcacataagtaacgtttaccgaag

SEQ ID NO: 328131 - DNA, 542 bp, Homo Sapiens
cttttgtaaatttcctgttaattttataggaatttgccaagatcttttacaaggtcttaaaagatatttttgataacaagtgttctgtgatcaaataaacttggaaaacactgatttatacaaaattaacagcattactagagttatgctgctataatttgcaaaaacatcccttaagaatattaactttcccttgttctatgcttaccaaaaacctaatttgcattttaatattctgaatagacacatgtaagtagtttggttctcaggcagtattttatttggtgtgagatatgtaaattttaccgaagtgaatgcaccttcaaggcttgccccccttcccctcttctgatattcctctgcctcctacccccaccaacgaataaattgagatgtttctaaacctgcattcccaaggaccagaccctcaaccatgagacttaaccaatgtctgacctcccagtgaggcctcccttttgagagccagatagacgtgttttattgcatctgtgaaactgttctaggcatgatgctcaagaatt

SEQ ID NO: 328132 - DNA, 488 bp, Homo Sapiens
  misc_feature (22)..(22): n is a, c, g, or t
  misc_feature (43)..(43): n is a, c, g, or t
  misc_feature (49)..(49): n is a, c, g, or t
  misc_feature (55)..(55): n is a, c, g, or t
  misc_feature (144)..(144): n is a, c, g, or t
tgaatccaaattaaaacttggnaaaaacacctggatttatacnaaaatnaaccangccattaacttagagttaatgctggcttattaattttgccaaaaaaaccatccccttaaggaatattaaactttccccttgttctatgncttaccaaaaaccctaatttggcattttaaatattcgtgaatagacacatgtaagtagtttggttctcaggcagtattttatttggtgtgagatatgtaaattttaccgaagtgaatgcaccttcaaggcttgccccccttcccctcttctgatattcctctgcctcctacccccaccaacgaataaattgagatgtttctaaacctgcattcccaaggaccagaccctcaaccatgagacttaaccaatgtctgacctcccagtgaggcctcccttttgagagccagatagacgtgttttattgcatctgtgaaactgttctaggcatgatgctcaagaattc

SEQ ID NO: 328133 - DNA, 741 bp, Homo Sapiens
  misc_feature (252)..(252): n is a, c, g, or t
attattggtctttggaagtctccaatggaagatgacaatgaaagaccaactggttgctcgattgaacaagcctggtgcctctacaccccggtgattcatctggcccagttccttacatcagctgtgctaataggattaggctatccagtctgcaatcttatgtcctatactctatattcaaaaattctagggaccaaaacctcagggtgtatacatggggctggttaacagcatctgggaagtgggagcccnggattcttggggcctatgttcatcagccaagtgtatgctcactggggaccacgatgggcattcagcctggtgtgtggaataatagtgctcaccatcaccctcctgggagtggtttacaaaagacctcattggctctttcctgtaagatatgggaggatttcaggaataaactagcctaagactgtgatggaaactacttgctgtgtggcacttccctggtctaaagctctgctagacaattgcggtgagccagtctccaagaatcagactacagatattgcagattttgaagaacaagaacatatgttgaataacagagagaattctacatgtcattgtgaatagtaggttatataaaaacatactagatgataatttccttacctcagaaatgaaatattattcttataatacctttttgtggttgcatgaactaatgagtgaatggacaatgatgaataaatgtgaagctgtattcttaatacccac

SEQ ID NO: 328134 - DNA, 1263 bp, Homo Sapiens
gcttaagttcctcggggttgttcagaatgactatccgggtttcttccattgcagccaactcctgagatctctgttcttcacttataccctctggggtctttggtaggatacttagataagaggactcgctggaagctttcggaaaggtggaggatggtggtggaggagtccgggtgaggtcactgagtagttcatcattcctggtgctcctgggggtaaagaagctggcactgctctgactgagactcccacagcttgccaagtctgcatcagggagggagtctttccggtggcacctgtatcttgtgtcagggctcatgagggcttcctcaaacacagactcctcatcagagagctgcagcttctcaagctccttgttgattttctgcacatcttccacggtggtcccagtagataagcgactgtcaggctttgtgtattcagcacagagactgaggatggtcttcagacgctgtctctccaatcgctccttttcctgcttcctgagtcttttctccctctgccgccggtgataatccatcaggtcatcacgtcctgaaatggagctaatactgcttttccgttcccgaagggcaggcttgggggttcctgaggcctttctgaggctttcccaaatctgcctcatcaaattccacagatccacaagagaagttcctcctggtcgcaaaaactctgtctgactctccagcaagaagtgaatgactcgggtttgtccccacatatgaagcctgatcaaagtcatcagaggcacaggaggaggtggaggccagaagcatcttccgaagccactcgtggactggcagggacactgagggtagaacttacataaggattgccttcagaagcagaggttttatagggtaaagcccctgagctcaaagaagaaaaattaaggtaattgtcattgtctattacgctatgaggtagatccttttccccaagttttgttcgtttggaattgcccagagagtttcttggaggcaagctgagaggtgtcagctggttctctgtggctctgtacaacctgggaagtgatcggctgtaggctcccatgtgactcaggctgctgctggagtacttcctagttctcaaattgatgttttcagatgcaagctccttgtgtctagttaacttgggttgaagcgccaggctgtcctgaatgctcattttcctggcttgctttgggcttgaaggcatgcttgcggctcccgatctgctgataggaggcgggccctcgtgccc

SEQ ID NO: 328135 - DNA, 621 bp, Homo Sapiens
aagcttacatagacttgatttctaattctggaggtcgactaaggaatctgtaattccctactttcccagtgtgtctcaactctgggctctcgactatccagtttcttcttcctggaatgtcctcccacattctcactctgcccttacaagtcttgctttccactatgagttccctgttgctgacctccttccctcctccaatcctactactcagggtcagttgctctttccacagtgctctcacagtagagcaagttccatgggcttaaggaactgaggtcaaccaattcggtgcagcagtcttgagaggtaggtggaatatttctactttgaatatcaggaaactaaacttagtatgtcgtgatacaagtactcaccacagttgatttgtcactatccaccttacctagatttgtttaagaattaaatgacctagtgaatgggaaaactctgggaaacagatgagaagccggacaataaaaaaattactttggggaccaggcacagtggctcgcacctataatcccagtactctgagaggcggaagcagggatggacagatcacttaagcccaggagtccgagatcagccttggcaacatggcaaaaccttgtctctgcc

SEQ ID NO: 328136 - DNA, 770 bp, Homo Sapiens
cacatacacacacacatacatagtgattttaacagacaactcaatagcacacattctttccttttctaagctgtagtagttttgactttttgggaaagatacctgcttactgaggccaaagcaatttttcttcagtgactgtaatttgcctgtgtgactcgggtacagctctgaacataatttttacaaagtctgtgcccacaaaataggacttaaaatcatttaaaaatgcaaaagaccaaaaatggaacaggtgacctggtgccttttagggtgtcggaaatgttctctctcttgcacagagataggaagcccgtttgggaccattttttgctttggtcctagtcttcctttgctatctgcttagccagcagctgacatggtgagacaggtttgccactgtaaatatgatgcaaacttctggggcagctcttggcaaacagaagcatcagctgtgtcaaaacaatactttggctgagttgtgcccataagctgtggagccgttagggctgtttcatgtaaatagaggaaaaatggtcctgtaaatacattaattgcactgaagctgaatttagtattgtattaagtcatatccagaatgtttttttacccagtatggttctcagaagtcttaaccatccctgaaaccagctaaagagcagattaagtgaagtgacatggttaatacctgttgacatttctaagagtcaagggtttcaatggctggggtcgtgtctgcaggtgtaacactaactatataatcactatac

SEQ ID NO: 328137 - DNA, 599 bp, Homo Sapiens
  misc_feature (266)..(266): n is a, c, g, or t
gagatcattgaactcctgattttgtcaggagctcgtgtaaatgccaaggacaacatgtggctgactccactgcaccgggctgttgcttccagaagcgaagaagcagtacaggttttgattaagcactcagctgatgtcaatgcaagggacaagaactggcagacccctcttcatgtggcagcagccaacaaggctgtcaaatgtgcagaagtgatcattcccctgctgagcagtgtcaatgtctccgaccgaggggggcgcacagnctctgcaccatgcggctctgaacggccacgtggaagatggtcaatttactctttggccaaaggggcaaaatatcaatgcatttgacaagaaggaccggcgtgctctgcactggggcagcatacatggggcacttggatgttgtagcattgctcattaaccatggcgcagaagtgacctgtaaggattaagaagggttatacccctctgcatgctgcagctctccaatggacagattaatgttgtcaagcatctcctgaacctgtgggtggagattgatgaaatcaatgtctatggaaatacagcgcttcacatcgcctgctacaatggacagg

SEQ ID NO: 328138 - DNA, 317 bp, Homo Sapiens
  misc_feature (43)..(43): n is a, c, g, or t
gtctctgtgttttgccgtctgtagcagacactgttggctgtcntaccagcggccactctctttttcgcttgccaacagaatcctgatttgtttgggcagctaaggacccagtcctggcagatgatgcaagactggccaaagccaaccagcgccaaccacagcaagcctgtccctttttcaccaggaattggtttgaggatggaccagctcaggtcaatgagacccaagggagtatgtgttagggccatcttggaaagattttcctttccaaataagcagccgggcgcagtggctcacaactgtaatcccctcgtgcc

SEQ ID NO: 328139 - DNA, 572 bp, Homo Sapiens
cagtggagtagcatgaatgactccatgtgacagtctcctttaatgattgatattatttttgagtcaggcataggattgcttttggttattcacaccacttctctattatcttcacacagataataaaacattgattcagatagctgctttaaactataaaattctaggcccatggcttgggcatgtcttgtagtcctagcacctaggacagggcctgacttccagtgggttttcggtcatgtttgttggctgggaacagaaccaccctaagatgatatgttattggttaagagcctacaagtggactgcttaatttttaagctgggttaatatgatctaaacaatattttttttggcatgcatgtaatgtaagaaaaaagattgttattattttgaaaacaaactgaaaactgaaaaccattaaacagatgtagttttgctccagacacattgccaaaaataatgtaaatagtgtaaattgtgctgaaatgggaaggaaaggaaacaaaatctaaagggagagaaacattacagctagaaagcaaagttattttttagaactattatttctg

SEQ ID NO: 328140 - DNA, 740 bp, Homo Sapiens
  misc_feature (42)..(88): n is a, c, g, or t
  misc_feature (106)..(106): n is a, c, g, or t
actcacttctttccactcaccatcaaccctatgtgttacacnnnnnnnnnnnnnnnnnnnnnnnnnnnnnnnnnnnnnnnnnnnnnnntggagaaaaccatacaancttttgtgcttctcacctccagatattaattcagtgtatctgggaaaggtgtcacagaatctgaattttgacatgtggtccacatgattctgaccacattttagaaattctactccagttccagcagagtggaaccactaactttgcgcctttacaaatgctgttccctttaccaagaatatctttcttctaccttgtctttttcgtgcctaaaaacttgccaaaaatactcgccccatgaagtctcttccatctttctccctaggtagaatggatggactttgtgcaacataatgtgacagttaaggctgtggaatttagagtcagaaagacctgaggtccaagccccagctctgctattttctactatgtgatcaaaggacattttcctaactcttcaaagcttccatgtccttgatctgatggaattaggaatactatctataccgtagagggcagttctgaggactaaaagcatgcaaagccgttagcacagagcctgtgaatattcaataaatgttatgcaccatcagtaacaaaatctcattaattattaattacaaaacattcaccccttcaagactcagctcaaatacatcctgtgacgtctgctgaccggttagccattccctcc

SEQ ID NO: 328141 - DNA, 656 bp, Homo Sapiens
aagaatttgcttttcactctgaaaaggcattctttttaacccagtaaaattcaaaatgcgaactgtatttttaaaatattagcaagcaatattttataatagattatgagcagttgtatttcttgtgcccttggtaatgtatttcaaagctgggtctcttttaatactatttctacaaaatctttttacatagggatgacacatagaaagtgaaaattaaattatgcatatgcccatgcttctcattcttacctccaagaaagcatcgctgaaaccttgccactaactcaaggtattctgtcttttgaattctgtcgtgactggggctaaacaactgtcattggcaagtgacaagaggcacagacagcaggggaaagaaaaagagagaaaagaagtaggcgtaggagaaaataaaagcctaagagatggggaggaaaaatacccagtatcttccaggagggtaaggatgctggaagcaactgtctcgggtgccagtttgttggtgctcaagcaacgatctgcctactcctgctatatccagatgcttttaatgtcttttttggaatctagaaagtactaagaaatgtctcaaagtacagactgatgttatcattacatttaaatttgcctaaagaattctgccagttctccaatta

SEQ ID NO: 328142 - DNA, 579 bp, Homo Sapiens
taaagagccctcaccctgcctgccacacactggtagtgtcagataacattgaagggtgttagtttaaaggcttcatggactctataatgtcaacaaaagtgctgttaactttcttctgggtctcaggctcctgatgtagagtcagtggagcaaccctgccatctgctgttatgctgttgatgttgctgccacacttactaacctaaacctttgattctggctgtggccttctccagaaggtgtttactcatttgtccattttatcttttaggaaacagccagcccgtagatcattaaggctggctattggacagggggctggggcctgcctgacagaggaaggaagggcagacatctggttcttcctctacccctacaagagactccagcctgacacagagtggtactcctaggatgtagcagcagcatatgagcttgaatgtgccttaatcctgctctttactttgagaagagagaactaaggacccacagatgtttcacagcttctataggaggcagaggtagaaaaatggagagagatgaggccagagatagataactgatattaattaagcggcc

SEQ ID NO: 328143 - DNA, 688 bp, Homo Sapiens
  misc_feature (570)..(582): n is a, c, g, or t
tagtcccaatgaaactaatctttgtggcacttaggactttcaagtctttctaaatagtgaattcctctagtctaggatatgcctggcatggcaggactccagagttgctgctttcttgtttattgataatcctattggtaactactgctaataaattttaaatgcaattgaatatttctatataataatatctagctttttacatttcacactcctctacagaaatactcctaattttaggccagaatgaactcatggtgggcgtgggagtgggagtgtggttggactggcagggagagctggtaagtctgaggaatatacccggaaggcagccccaggggaggagtgaaatctcttgaaagtctaggttatcttttaaaaaaaacacaatgctcaaagcacttttcatttcactttttactgtgtgtgaatttaaaaataaaacagtattttaaattactctagattaaatgcaggcattatgtctctcctgtgtattcttaagtcctaggcacaccactgcctatgtttaaaaaggtacatttggaaagcatgtctctagcttagagnnnnnnnnnnnnnaaaccccaaatttgggccatatattggtaggtatttcttcttgtgatgcttaaagtatatgcggatacttctcttcgcttcgcttcttttctcctctcttctcttc

SEQ ID NO: 328144 - DNA, 399 bp, Homo Sapiens
  misc_feature (74)..(111): n is a, c, g, or t
tttttgatttcaccgaaataaatgtttaattataaaaacccagtaatctctctaggcctactatggctcacaannnnnnnnnnnnnnnnnnnnnnnnnnnnnnnnnnnnnngcccctccctggtgttttgtagcaattcgtcgtgagttgtttaacacgcttcatagcaccgagtcgcctctacattcttgtaaaacattagtgttaacaccttcagagattgtactgaattaaaaagatcaggcatacacttaccccatggacaagataaactgtcttgttgtgtacaggctgtagtgtggtcatatttgaggttgtctggaaaaaaaacagcgagttgaagtgacaacaaaatactcccttcaagagtggaaaatcctggccgggcatggtggctca

SEQ ID NO: 328145 - DNA, 772 bp, Homo Sapiens
  misc_feature (131)..(142): n is a, c, g, or t
  misc_feature (584)..(584): n is a, c, g, or t
ggcttttgctcttatacacatgttaaagcctgatctatgatgtctagataacataggaaattgggtgtcttggactcacaaatacattttcagaattcagatgtatgataaagtggagtgatggtaacaannnnnnnnnnnnaacggctttttggttttctcttcctgactcttgtcaaagaatttcttgctcttgagggaaagccatgggagagtgaaacaaagaaaattagtagaaggcactgaatgccaaaaatgtcttcttacatataattataatcaattatttcccattattgtcaatatccttccctagggatgtatcttgactgggggaaaaaagtaacttgggaagagctaaagcagtatagatttgccatgctgattattttaaatgtaaccagaatggcttttgggaatgccaaatttttataaggcgcagtagacagatagaacccaaggataaaaactttcacatggttctttcagatttgatgtgcattcattaataaagttgtcagaacccattgtatcaaaccataacatgaaacatttattcaattttattcaattcttgtcttagnctattttctgttgctgtaacaagacaccggactggataatttattttaaaaaagaaacattcggctcatggttctggagattgggaagtccaagagcctgacattggaatttgctcaacatctggtgagggccttcttgctgcctcaaattgtgatagaagggtggaagggcaaaaagtgcatttcaa

SEQ ID NO: 328146 - DNA, 773 bp, Homo Sapiens
  misc_feature (12)..(12): n is a, c, g, or t
  misc_feature (34)..(34): n is a, c, g, or t
  misc_feature (49)..(50): n is a, c, g, or t
  misc_feature (94)..(94): n is a, c, g, or t
  misc_feature (100)..(100): n is a, c, g, or t
  misc_feature (143)..(143): n is a, c, g, or t
caaataagtcancagcaaaaattttatgagttcncttccttcaagggannttagagagcgggattttattgctgtgaattctggtcaccctttntacccntcagcatctgtttgaaatatgtagtagacaattgcttttttgnctgtgactcaggtggtggaaacacaggacaaacagactactgtatataagctttcctccagcactgaaaaattttattaactctcttgcatagcaaacgtggcggctgctcagtgcccaatctctgcagcattatcaaggaatttggctaattatgaatcgtgctggccaagcaagaggtgaccatgttgaaacttgtcaactcgatattttctcacatttcagaacaagcagggaaacaacaacaacaacaaacccttatattctgtttagttcatcattcctatgtgtaaaattccaagttaaatattacatgtgagcttgctacataaatatgtcagtcttgccaccgaggccagccaaaacaaacagtttcaagcagtcccacagtttagagcggtagagttttcatagaagccatgcacttgcccccttttaatcagttttttaaatttttctcccatgacaatagaaaagttagaaagtagtccacagagagtgtggagaaagggcttgctctccttcacaatggcgactgtgagaagatcaagggctgaatgtctgcctggcagaacatgagtctgtctgtaaaattctgcacagacgaaagctcaatcccatgccatccagg

SEQ ID NO: 328147 - DNA, 1166 bp, Homo Sapiens
  misc_feature (59)..(59): n is a, c, g, or t
  misc_feature (119)..(119): n is a, c, g, or t
  misc_feature (130)..(130): n is a, c, g, or t
  misc_feature (863)..(863): n is a, c, g, or t
aaaaggcatgaaggtggcttaacaggcccttaacagcaaccacagggccccaggccttnggtaagaagatgggcaagtacctggggggcccaagtgtcaagccttaaaccaacttcccnaaaattccccntaccgttgcccccagccaccaccataaagccaccagcttggtccttcggctgctcctgtgcctcccagactggagccccgtttctttttcccttttccagatgcgttgcggtttcgagtctgaataccatccttcccgcatggtcagtggccggttcacctggtgtagcttgtagtagaggccgcaggcattgcacacgggatccccactggcatttctccgccacagtgtcgtggtggtcgtctggcagttggtgcactgagtacctgcccgtttactgacaatcaggcgcttcttgggccggatgaggggcctgttctgcccattcatcttgtgatagaggccgcaggcgttgcataggtagtggcctgtcctgtccctccgccacagtggagtggctgttgctccgcagttcacacactccctggcctcacagggaggcagggggagagttccacgaagcttgggagaggaataggctgctgaattgagggggctcccggtgggagaaaagaaggtactggaaaagtcagggcccccataagcactattggggacagggagtgatgaaggcagtgcaggtcccagggtcaggaaggtctgggctcagccgctctgtcttcaaagtctcccaggaagctggtgctgccttttccatccagatcttccacggccctggggaggagagtcctcgcgggtgggacacacagttgaggcagggtagagccccgtncttgccgtaggcccagccggcatatggtgagccccctgggatcccctccatacagttgagcaatgggtacacctgaaagactggggagtgtctgtaggcctcagcgtccctgtagtaggccagtgccgcagctgcagcggtggctgtgctcggggcagtggaggaagctgctgcatccaagccctcaggcccagaggggaagaaaacccctgattctggtgtggaggacaccagagcaggatccacaaactgggggaggggctctgaagccccagggaccccaggccagggaactccaatgca

SEQ ID NO: 328148 - DNA, 422 bp, Homo Sapiens
cttcccgaccaatacatgtctttttatttatttgtcaaaaaacttcatcctccagtaggtgcagccttagactatttctttcacaccttgtgccttggggaggctgtctctgacatgcacaggcacttatacgtgttgtggactagctgttaatgagtcgagctaggaaagcccctacataacggccaggctccgtgtcgatagtcgggtggcggcagcgcagtggggcggggggcaagttctcattcattgtttctttgtccctgcccccttaacttcccactagagtggcttaatatgtttatctcttaccttaaaatggaaatttatgctaaatttaatataaacttaaatttgtatcttgtgaggaggatgtagctgcattagaatatctggaatatctcttctgtactaaatatcca

SEQ ID NO: 328149 - DNA, 438 bp, Homo Sapiens
  misc_feature (350)..(350): n is a, c, g, or t
  misc_feature (377)..(377): n is a, c, g, or t
  misc_feature (397)..(397): n is a, c, g, or t
  misc_feature (413)..(413): n is a, c, g, or t
aagacacattatttatttaccttagtttgtgtcaagcatagacagttgtggttttacagatagggaagccaaaccaaacttcctagcctacttttctttttctaatctagtggattttatactgacttacaagattttactgtgagcagcaatgcaacataacccaatatatctaatctttcagatttagtgaacatttagatttttaaaattataattaaagctataacatttagtcttcattttctctgcagaccacaaaggacttctggacattctaaggttttttttaaaaaattaattcagtaggttgttatccataatttttactaggactattatttaaaatntttatttcaggaattcatatggttggngaggtatccgcggttccccnggtatggtggagggcnccctttcaccattaccccggggtta

SEQ ID NO: 328150 - DNA, 729 bp, Homo Sapiens
  misc_feature (362)..(386): n is a, c, g, or t
acagtagacaaaagtggtttgtcctttccattttatgttactaaagaggtatgatgcaatgtattggggggaaaaaagctcttatttgctcgaagaaagcaatctgactacagaggccaaatctacagacattaaatgatttaaaccacaggataacccagtgactaccaaacattatctgacccctttcttcacgtactatatttttcctgaagctcaaattcagggctagccaggaccagtacacacccccagagctatttcattccattggctggctggccatccgcagcctacaacctgtaaatttactgtcaggacgccaggtgtttatttgtcagagatattacattgcttgtgannnnnnnnnnnnnnnnnnnnnnnnnggtataaaacagaacttgtcagaatgggaaaattacttaattgaaacgattaacgcgtgattagtaaattcctttggttaataaaactgtctagatttcaaacttagaagccaagtcattttctatgttcggatatcatctgtcactattggaacaggagtgaacaaataccagaaaataatttgacagcttgcatttaggggagactcacaaaagcccaagaacactgacgaggcattatcacacgggcaggtcattccctttcctagaagtgcatttcggcaggacccgccgtgtgtgacacagacaccgggaccaaaaggagaccggtgcagcgtctact

SEQ ID NO: 328151 - DNA, 1120 bp, Homo Sapiens
cttgatcattctttttatttttacaaagcatggcaaaatgaggaaaccactgacaggtgaagaatttgcacaatggaaaaccaccttgaccatctcatgactttatacaggaatcggaggtaagtgttcctttaaagtgattttgtcatgaaagagtcatctgaaatgactctcgtgatggaggaaaggaaagtaatgaaatcaacattcatggttatttaaaatgccttaaaagctaagcataatatacatagtaactccttttcctaggtataaaaatagtgccagaaactatatttgttcaaatatattgaaaaggtataagaatacaaatagatattaacagtggctagtgatgcctcataaggttttcttaaactgtaatataaatttatattttcaactatttacattgctttcaacaacattcattaagacatgtttacacaggcttttagtaagtatatgggaatggttaagtgagctttaatactttcttcttcactctctgtagtagagcagaaggggtccaaaaccatgcacaatttaacagtccagaagaactgtgtaatctttacctggctagcacatggaataaataaactatatacaagaatacaaaactcctaaagtgttcttcaactatcagcaggttaagtgattcatacttgcaaaaagacaggatgtttgtttactggtagattcttagtaagtttcaggtaaagaaggtgcataaaacatatgttattgatgaaaatggaaatgatgcagtatacccccatgttctcacattaaattggcagtatcagaagctaagtctcttctctagcacctccttcagggaccgtgagctccttggggtcactgctctgtctccacagcagagcacggtacctaacatgtggcaggactcaataaaaggtgggtcagtgtatttctgatacaaaacaattaaattgtgccaccttattttgactacagttgttcataagagaggataacgatgacattttgtatcctctcatattaaatcaatcttgtaaacaaaagacaattgcttgtgatggcctgttaagttttaggagtacaatctggtgaaaaacacagaaaaaaattgtag

SEQ ID NO: 328152 - DNA, 487 bp, Homo Sapiens
  misc_feature (227)..(245): n is a, c, g, or t
aaaaagcatgccttatttctagtgaattcctaaaacatagaaagctgttaaatacttttgggcaatgacatacacttttgatgcctcaaactctgaaactgtaaacaaaccagattccaccccacttccaacaaaccatgtcccagttgatttccctctttctatctgatgtgctccttcaagattcaagcctcttgctgggggaggggaggagagtggtgacagcnnnnnnnnnnnnnnnnnnncgaaggggagagattggtcaatgggtctgaagctacagatggaaaggaggagtaaactctggtgttctattgcacagtagggtgattgtggttaacaatattgcattatgtatttcaaaatactagaagattttgaatgttctcatcacaaagaaattatgtttttgaagtgatacataagctaattatcctaatttgatcattacacaatatgtaaatgtattaaaatgtcacactgtatc

SEQ ID NO: 328153 - DNA, 745 bp, Homo Sapiens
aaaaaatgtgtccaggtcgatggcattttaatgctttattaaacaggggttttacagcagtctgtctgttcagtctctgggcccatgcctgcactttgtgtgcagggatttttatctttcctgctggccgaaaatattttccgaattccctataaaagttttcgagatttcctaagacaaatagagctccaccagctctaaaatgaccttgatgccgtcggaattatattcagacacaggctttctcccctgtttacacaaagaactgaacctcacttgtactcatgaactgccgttatgaggacaccaaatttgctccacaaatgtgctggtgcataaaaacacaactgtacctgggatggctcaccagagtcccatactttactggtttcttccatcctctcagatggccgccttggctttgaaggcagcatcaataaagcctgtccctggatgcagtttccataagagtgggcagcagctcccagctgagggagcagccaggcctgtagtgggaacatggctgtcgtgaagaccacagaacccaccccttttgtttacttgcaagtgtttaaacctttgtgaaaatgaagtcttttcagaaagaagctggatttagaaaatattaccataagccacaagtcaggctacttagtgttatggaaaaaacctagaacagacatgggttcaaatctcctttctgacatgctgtagggtgtgatcttgggcaaaataaaaataaaaa

SEQ ID NO: 328154 - DNA, 457 bp, Homo Sapiens
  misc_feature (67)..(67): n is a, c, g, or t
aatcaacttttaatccctcccaacacctttccccagcaccccacccagacacccatgcctaagattntcctttccttaaaaaatcctcatttttcctacccttgcccatggggcctgaatttgtatcccaaaagtaatgctgccgtgtcctaggactgaatgatggttaacaggatgatcctaattgggatggtgagatggtcaaaagcataaacttgggggttgggtagacctggctggctgaccttgggaaaaacctctccacgcctcggtctccccctttgcaaaactgagctaagatctactgtgtggtgtctgggcagatgaaagtacactgcttagtgtgatgcttagcatggggcagatgcttggtaaattgtaatcacttttgttgtcagttaaatggatatttcactgttgcctcttaaacgcttacgataatatatactaattatac

SEQ ID NO: 328155 - DNA, 416 bp, Homo Sapiens
ccattccagtcccctagaacacgccagccattaacttttgggaataacaaaatccaagcccccctggccaaggtaagaaaaaatgaagatttttaaagaaaaggaaaatcctatgccatggtgtcctggtgggtgctggaaagtgtaagaagaataaaagtgatgtcccctggagctacactggatatttcccagaaaatcccagttacacagaagttgtcagacaccactcttggcttctctgtataaagtaggaaatgctggaaagaatccccaggcacagtgcaaactgagggagggtcttctgcgtgcttgggggagcacagagccagggtccttttagagagagctcttgggtgaggtcgaacgtggacggtctccaagttcgtccagtgaacattctacaaggctctacc

SEQ ID NO: 328156 - DNA, 892 bp, Homo Sapiens
ctctataggtttggaagttccacatactagttcttttattttggtggttactttaaatgtttaacatgtgtatcagtaatggattgtgttatagtcatggttgccataatcttttaaataacctttctatatttgggatacttttctgattataggtcctacctacccaggatagaattgcgaactcaaatttcctgcctctcttgcggttagaatgcaggcctgtgacattggctctacttactagatgtacccatggaaatgtaaggaatgtgaggatacaagctctgcagacagctactactcttctggctacaagatcaagttccagacacagaattgacactgatcctgggagcaggagcaaatgaagaaaagtcgagctcctgatatttggagcttgatgggaacagcatgccagttagttctgccatggttttgggcatttttctagaagtttagcccaggattgtttttccagctctctcaataattttgttataaatttttaaaattcctgcatggattctgttgtttacaacaaagaactttaaccagtataacttgtcaaagtctaaggtgaaggaatatttcattgcctttgaataaaataactccagaatattttagctcagaactccctcctaccatcatctaccatattttaatagatattttaatttcaccctggttttaaaattctaaaatactagcacttaaaaacatactactgattcatattaaccaagatacttgctaatttgtttatttttttcttcaggtttcagcttttttcttgttggagtatatttcctaggacttctttgaatgagtatgtgtgcatcctaaattttgaaaatgtgtttattttgtcctttctcttgaaagaatg

SEQ ID NO: 328157 - DNA, 720 bp, Homo Sapiens
tttcttttggaaatggctacctctctcaggctcctaagcccagcaagaaaacctatagtagggcccaagctggtcagcagcagaaagcccccaggggacatggaggccagctggggttggagaagacagagatgagtcctgaggccacctgtccagggacagacacctttccctcttgctgtccagttcagggtcaaggggacaggaggccaggagacccagaggctgcctggacggggtactgggtggacacagaagcgctctgctggccagacttggggcagaagggatattttttgagaaactgccggggtgctcctttgggtctgtgtctcagaggcagccacagttcctcttcagagccgagaaatgagaacttcctgcaggcaggcgctgctggggggagggggcagcctgggcacagggagactcccaccgactgcccctcaaaccagcccatgctttgggtaacaaagttcggtccgaaaatgctgctctacctatttaaattctgcccatcctctgaggtccagcccaagtccatctccttgggaggctctccctgacctctcccctcttccttttccacagcactcgctctgtgtctaccaccttgacacttcattcatcatgatctctgtggtgccctgtggaagccatgcccatctgcaccaaacacctcgcagggcacgtggcaggctctgttagtagctgacaaat

SEQ ID NO: 328158 - DNA, 712 bp, Homo Sapiens
  misc_feature (68)..(68): n is a, c, g, or t
  misc_feature (664)..(664): n is a, c, g, or t
  misc_feature (702)..(702): n is a, c, g, or t
aggaaatctcggagatcacaggtggctccattaacgagaccctcaagctcctcctcagcagcagcgangtgggtgcagtcggagaagctggtgcgggcgctgcagactccgctgatgaggctgtgcgcctggtacctgtatggagagaagcaccgcggctacgcgttgaaaccccgtgggccaacttccacctgcagaacggggcggtgctgtggcgcatcaactggatggcggatgtgagcctcagaggcatcaccggctcctgcggcctgatggccaactaccgctacttcctggaggagacgggccccaacagcacctcctacctcggctccaagatcatcaaagcctctgagcaggtcctcagcctagtggcccagtttcaaaagaacagcaagctctgacagtaaacctctcctaaagcacagggccccggctaagaaaacgatcattttcaggaggggccgggagttatgtatctgaagcagctttccaagcaaagccaaagttgactgtgttcttgtcccgcagccggtccacactgtgaggccaggcctcaacttccctcaccctgggcgtgacatgcacccagtgcaagacggttgtgggtgcgggtgcacacaaatgagtgggttgctgtgctgtctccggaagattctgtcgntgcccttggcctggctccctgcccggggctggtgctgnggtacctaca

SEQ ID NO: 328159 - DNA, 887 bp, Homo Sapiens
  misc_feature (140)..(140): n is a, c, g, or t
tgtttcatgaatttaattctattaaggtaaggcttactacgttcaaaactccaaccccctcccttttttcttgccctttaacaaggcaccatccggttttctttactaacaaaatgtcagtgttcaagttcagtcttggngcaagatcgatggcagatgtcaggggctggccgggatggcttacattgatatcatcgtacgtaggtccttctcatagatgtcagggatgttacctaccggcgagttgatcatgcgcacggtgttgttattaaacagcttgaattcgtaattgatgagctgttcccaaaagccgttgttgggccggatgatggggcggcgcgactttgggtccatgtatgggcgtccagcagccgacatggagtggtatttcatgaggtacgcaaggcacagtgaggcggaacggctcattcccagccatgcagttcagcagcgtacggccctgcctcatatcgatggtgtggataagatcagcaatggggtcaaaaaagtcgtagagacgcgagtcacgagcatcggtaacaggcacctttatgtactgaatgccctcgaagaatacgttgaccacttcccaccgaggcattgacaatggcggtgatgcgattgctggacagaaggagtttgtcgttggcggccacaccattgctgagaaacaagcttctggttatttgggagaagctgtagatggagggctgctggacaccctgagatgatgaaaaggaggacgcggatgctgtcatcaaggcggctggtccgaggtctctctacgctggttcgggacacaacacttaccaagctagttcaggatagcagccgcgccgccaagtctcaggctaggtgttggagaaagaggaccagctatcggccac

SEQ ID NO: 328160 - DNA, 762 bp, Homo Sapiens
tttaatgttaacattgagagtcattacggctaaagctttgccttcatcacatagctaaaaagaaggttgagctggaacttaggatactttaaagcatttcctgtttaggtattaggctgatagagaatcatgtgtaactggggtcagcattcctataattttttgagccaaagacagaatacacactttaccctgacaggtttcttccagaatttaggacagctgatgaaatgaaaagacacacacccaagccaagagtgcaaaaggatgtagtagcatgattccgccaaccaaatgcctcataccctcagacgtcccaaatccagtggtgagcaggtaaatttttaacaacaatctttctttgtgaggaaaaaagttcctgatttccataatgtaaatactttcactgactggtttgaagccatcaacacgtcaactaacaattggttcctgcatgtctataagctggctttagcacaccactgcaaacctacttattacttatattttcagatacattacagcacttatcaattctaacattgtgaaaaactgctgtgctttaggcatcttgtccaaacttgctccttcagctaaatttgactcatgtttaacatggaattgcacttcttgaataatatgttctttggactttgggccagtctggtaaaacataagacaacaataacatcattatggttatatacatttacaaataactcactaagtgctgttgtaaacattttacagagattaaagcct

SEQ ID NO: 328161 - DNA, 485 bp, Homo Sapiens
  misc_feature (286)..(429): n is a, c, g, or t
cccgacctcttttcttgtccctagaagatgccagccatgctcccaagttagggcctctgcactggctgtgccctctgccttgtacatgtttcccccagatatctgcattgccaactctctcacctcctttggtcaaaagttacctcattgaagcctatcttgaccttttaaaaatcacagcccattcttaactctcacagtacacccaaagcccctttaccccgctttctgttttactatagcacttctgacatactatatgatttacttatgtgttgtgtttatnnnnnnnnnnnnnnnnnnnnnnnnnnnnnnnnnnnnnnnnnnnnnnnnnnnnnnnnnnnnnnnnnnnnnnnnnnnnnnnnnnnnnnnnnnnnnnnnnnnnnnnnnnnnnnnnnnnnnnnnnnnnnnnnnnnnnnnnnnnnnnnncaaggtgtttgtgcttctatccatagaagtgaaaactaggattaggtttgacccaa

SEQ ID NO: 328162 - DNA, 776 bp, Homo Sapiens
  misc_feature (90)..(110): n is a, c, g, or t
  misc_feature (550)..(550): n is a, c, g, or t
  misc_feature (587)..(587): n is a, c, g, or t
  misc_feature (635)..(635): n is a, c, g, or t
gtatttccattccacttacccctcaatattttaatataatattttaagctggagagtcttttattgatcaacctatcatatttccctacnnnnnnnnnnnnnnnnnnnnnttcttgactgagtctgataagcttaaaaagctcattttgattgtataattttaatatctaattgatctaaacaacataaaatattacatattttggtatctattaaaattaaaggatatttttgctgaatgaaatagaattgggtcaaacctaatcctagttttcacttctatggatagaagcacaaacaccttgttcattcattcaacaaatatttattgagcacctcctacgtgtcaatagctactctaggcacttgggatacactggtaaacactacagataaatccttgccctcatggagcttacattctagcggggggtaataggcaataaacaataaacacaacacataagtaaatcatatagtatgtcagaagtgctatagtaaaacagaaagcggggtaaaggggctttgggtgtactgtgagagttaagantgggctgtgatttttaaaaggtcaagataggcttcantgaggtaacttttgaccaaaggaggtgagagagttggcaatgcagatntctgggggaaacatgtacaaggcagagggcacagcagtgcaggaggccctaacttggggagcatggctgggcatcttctaggggacaagaaaagaggtcgggaaggttaggacatttttgggaggattgactgatagggat

SEQ ID NO: 328163 - DNA, 763 bp, Homo Sapiens
  misc_feature (647)..(647): n is a, c, g, or t
  misc_feature (693)..(693): n is a, c, g, or t
aacttccagtttttttagcttcgtaaatatagtatacatttcatgcaaatttttgcttgcctgtggatatattaaatttttcctctttggtaaacatgtaaacttgtttctagagcactgattttcaaacctagtaattgtcatttgactgacctcccccatgaattagtgtatgaattgatactgcatttaattttaaagaggaattagtaagaagcctcagatgaatcatagatttattattactatcttaaaacataattattagttcatattagttcataatgtcactgaaggaaaaaatctgttgcctttccatacagtttgactaggattaactctagtactctagcagtacttccgggtgtttaggagagccatgttgctgttagattgcatcatacttagcttatataagaagtcaacttagagtaagaataattcttctgaaaatgtctttgactgagacttgacagttttcatttactgatgttgagcatgttgctactcaaaattcagttctctttttaataggccttcttgaccattggatttaaagattggtgactagttttaagacctgtcacttatacttaaagttgacatatttacttgcaatttcttgtcagctgtccattaaaacttgntttagtttcatgaaccaagttaccaaataatattttctttttttgntgggggctgggggggtaaatcggaattcctaatatatttaaaggaaaagcttatttaaataggtcagtta

SEQ ID NO: 328164 - DNA, 915 bp, Homo Sapiens
aaatgataacggctaccatttatttctaagtacccactccataagaaggtcctacgtacatagttttctcacttaattctgtgaggaatcgattatgctcgtgttaccagtagggattccagggcccagagaagttaaatcacttgtgcaaaagtcacatagctagcaagcagcagaactgaggcccgtacccatgtctgtctggctcaaggcatatactgattgactgtaacatcatttgccttcaaggatttgccaaaaacccttgtccccagatcttaagtaaatttagaatgctgagtcagattggggatgcaggaatcaaagaataattgggttatataatgctatgattttatgctaatcttggcactaaagagagattgtctcgcagtctggaagactgtaactgcctatctggtctctagccactgggcctccagtctggcctccctccaatccattctcctcactgtagccacagagaacattctcctgcttctctcagtggttcccagctgccctcaggattatatccaaacccactggggccagggcttggcctgttcttagtaggccctaccccgtttttaaaatcaaatgcattaaaatatacccgtatcgcttactaaatatgaattctatcatgtaaaatttttgaaacaattcgtgatttgaattttggaattattaatttaaaagttcacttttcctatgtaggtgtcaactaagtttttttcaggtctcaaatacttgggaccttcaggaagcccatagccccaagtactgtgcttataacgtctaacggtgaaacagccccgtgtgcaggccccgtccccctgccctgtatgccaggctttctgtaaatcatttttcctctgcctagaactttgtttctgcactgtacactgcccc

SEQ ID NO: 328165 - DNA, 417 bp, Homo Sapiens
  misc_feature (25)..(25): n is a, c, g, or t
aaaaaaaatttttctttaatagaanacgaggtccctgcctaataatttcccccaggcctggttttgaaaccccctgggttccaaagtgaaccctcccttcccttggccctccccaaagtgcctaggattaataggcatgagcccactgtgcccagccagattaagaagtctttatgctgtttcagccaccctcatgctaaaaggctcaagaactttatgataagggatatttcccattttactgatggggaaaacaaaagcgtcaaaaatagatggagctaggataagtatggtaatcacttgccactgctgtctctagacatgtctgtgagctggacagtaaacaaataaagcttatggaagcagcagtaccctgaaaagtcacaccttatttgctcgaaaggtgctgacagaacc

SEQ ID NO: 328166 - DNA, 765 bp, Homo Sapiens
  misc_feature (42)..(42): n is a, c, g, or t
cctatgtttgactagaaattttttagattagtgtttcttaancttgagtaatatgcatagtccttttaaaggacaaaagtcatggaggaccctcagcattggctttttattatttataacataatcaaaataatttttgatacaaagatacttaaatatatacaaacttaaaacggtacaatcttatgcttatgatttttgtataattaaactcaaaacaaatttataaaataaattcaaaatgttacaaaatcaatataattcgaattttaagctctttattaaatttccatttttaatttctttataaagaactcactttagagaaactctggtctaaatgaactgcagagcccattttacgtctgatattctttgattttctttattaagtatcagaatttttagtaaaaataagttgcaagtatgtctctaagcaatctatactacaatatcttaataggagagttatttgatcaaggttgttctttctattaactgcaggttgtcaatgagagctattcactttagtaatcacaaattttttagtttttgaaactataattgtagaatattagagttcaatcgaatgttcaataatatccatggatttttgtgggcaatgtactacagataaaatcatactcatatttctcaatttctttctaatagtaattttcatagcaaacaagtattttcaattatctccaaatattttcacattagtacaactttattttccaataagaatggaaaatggacatg

SEQ ID NO: 328167 - DNA, 768 bp, Homo Sapiens
gtaatacttctgtagtttttctgccctggtgaagcctgcttataactcaaaatccagggtgtttactggggtctggtcatgtaggcacctctgcctgtgtgcctaaccacagtcacctgaattccagacccagaaggaaagtaggtgttcaccacaaatcatgttatttttgcagtttacgcaagctggccccgcagtttgtgtcccaggcaggcagagcaatgtaacatgccaaaagtcaagttctcagacaccagccaagggccagcctcataagcagacccttctaaagatagcagcatcagacctgctatcccttacctttatttactaatacattgtaaggcaaagaatccagtttcttgcccccacaaaggagcagaaacagcaagatactctctaagcaacccatctccctcacttatttcagatacttgtaaagatatatgttgaaatgacagcaattctaacatatagaacttttttattgataaagctagataacactaacatactaatagtatcttagttcatttcctgttgcttatgatagaaatcttctgggtaattaataaaagaaatgcattttttacagttacggaggctgggaaatccaaggttgaagggccacaatggtacaagccttcttgctggcaaggactctgcagagtcccgagctggcacaggaaatcacatgatgagaaggctaagctcaggcttctcttcctcttcttataaagccaccagtccccactgacctgataacct

SEQ ID NO: 328168 - DNA, 769 bp, Homo Sapiens
  misc_feature (381)..(381): n is a, c, g, or t
atcctcatgctcgccaggcacctgccagtgaacttggtcctcgtagcgctgggagtctgggggggagtccagaaagggtagcttcagcaggagccctggtggtggtaggggaggatctgcgaggcttctctgccccccaccatggaggagggtgccacccagtgccacagggcacaggggtctccaaggcccccgcccacagaggcaaacatcagtgtgacaaacagcccgaagagctggtgcatggcctgtgacgtggcactgcgctggccctcggctatgagtggaaacacactctccaggctgcagggagaccagatagaggaaaggcaggggtagggagagagagggatgcagcccggggccagggctgctcatggncactggaaactcacactggggaaacaggaagtggccaagagggtctcgagggtgcatgcccaggctgagtctcacctcccaggccactgctcaagccaggcccacagccctggaacaccttcccacccttgtaggccagcagacacctaggcaccttttaagactccatttgcgggttgcttttgcccacccttgatgtgcaaaaatagatcctaaaggtcattatctcttactgacccttcagtaacaagtaacactcttgaagtcatttgttccatgaccttctgctgcacttgatagaggaccaggaaggagtttctgggttggttttgttaactccaatttcctttgctcccagaatatggatgaatgaatgaattcattcttt

SEQ ID NO: 328169 - DNA, 319 bp, Homo Sapiens
aagctttaaaagtcccagcataaggaagggaattgggaaaagaggcaggggacagggggcaggggatcagggaactaatcttatctacaatcaccattttaccaaaaaacacactggttcaaccacatgagaagtggaggattaacctgcctacatagcccagcagatgttgacagcaaatgccaaggcagacaggtctagggttgatgtcacgactggctaaagagtttttaaagggaatcttattccacaaggactggtctgtcatcaacctgggttcataacagactaagttcctttgcatttgcatcagtaaggc

SEQ ID NO: 328170 - DNA, 713 bp, Homo Sapiens
  misc_feature (50)..(143): n is a, c, g, or t
  misc_feature (587)..(647): n is a, c, g, or t
  misc_feature (656)..(656): n is a, c, g, or t
ttttgtattttaggtagatatggggtcccaccgtgttagccaggatggtnnnnnnnnnnnnnnnnnnnnnnnnnnnnnnnnnnnnnnnnnnnnnnnnnnnnnnnnnnnnnnnnnnnnnnnnnnnnnnnnnnnnnnnnnnnnnntaaatctacctgtcccactgggagcagccatgttggacactgccttctcaggtcctatttctgctcttagggttcatgtgtgacttaaggcatagaaatgtgcctctatctttctgctgtggaaagaaaattgtttgacaaatgtccttccttaggagataaatgacaaaataaaatgatcattcctgggcccttaatacttctttccaaaacttgagaaataccagttaataggggttctcagacatggtaataaggatgaagaggttgaaacaaacgtagaaagccttgttttcaaagcctggcattgatgccatcattgacttgacttgtcataattaatatgtgtccccattcataatcaacttgttaaaaggcaacataagccaagcatttttttatgccaaagtcatatatcttcttgatctgcctgacacaatatgnnnnnnnnnnnnnnnnnnnnnnnnnnnnnnnnnnnnnnnnnnnnnnnnnnnnnnnnnnnnnataaattcnctttgcacagaaccaattatttttgttcactgactgttcaatattataggactgggg

SEQ ID NO: 328171 - DNA, 790 bp, Homo Sapiens
  misc_feature (743)..(743): n is a, c, g, or t
tattattaaatgtatatttttaataaagccaatagttattttacttataggagctttaaaagatacaaaatgtagagttccagtttggaagcattgtaactatacacacaatgtcctgctgatgccctagcaaggcacccacgcccaaccatgcaaaggacacacacgttcacacatgcacacacatgcgctttggcgagacccctctgccaagcgcacacctggaattaccagtgttcagagcaaggcggtgcggggaacacagcacctacatggagaccacacaaacggcttcacacagtctcacagccccatggagatgcaattagaaaatgtcttccttaatagagaaaaacaaactggaaagtgacaattagtgacgtcacctgtgctggagcatcaaggattgacctctgtccaaggtgaggcctttggagaggcactattaaaacatgagtacttcagtataatggaactcgaaatacagggtactgtggacacattactgaaggaaatagaaaactatcttacaagtagaacagccatagacaactttaacagagattagtgtgcacaccgtgacagctaacacagacaagagccacgcagggtttgtgcaaagcacgtgcctgaaaatgtctatatacaaaacagttctttgtaaacatggtgaggtgaatgctcagaaccacggcaaaagatcataaatacaggcagcaatgcatccccacacaggacaaaanacaacacctgaggcctgggaagagcctgacgacacagtactaaaaac

SEQ ID NO: 328172 - DNA, 412 bp, Homo Sapiens
ggagaaccacttgaggccagttcagtctagcctgggtaacatagcaggaccctgtccctaaaataataaaaaatttaaaaaccacaataatgtgagttacaaaaaagtgtaacttatgaaaagtcgtatttatattgacctttgtaagagctcaattatttcaggaagcaaggaatatcaccattctgagtaatacaatttcaactaatctttatttcttctacttgaagtcagtgcctatctaccacaaacattcctatatcagtgtgcaaattaatttggagacaataggctttttacgacaatgaattggttaacttttaaaagttgttttttatctcacattttataatacgataaataaatgtacagcagatctttaagaacattgtttaactataatgttgatggc

SEQ ID NO: 328173 - DNA, 729 bp, Homo Sapiens
gaccttaaagaactggtagaaaagctggaaaagaatgagaggaagctcaaaaagcaactgaagatttacatgaagaaagcccaggacctagaagctgcccaggcattggcccagagtgagaggaagcgccatgagctcaacaggcaggtcacggtccagcggaaagagaaggatttccagggcatgctggagtaccacaaagaggacgaggccctcctcatccggaacctgggtgacagacttgaagccccagatgctgttcgggcacagtgccctgtcttccccgccttacatcctcttacatgttgcatccggcacgcgggattacaccaacgacgatctcaaggtgcactccctgctgacctccaccatcaacggcattaagaaagtcctgaaaaagcacaatgatgactttgagatgacgtcattctggttatccaacacctgccgccttcttcactgtctgaagcagtacagcggggatgagggcttcatgactcagaacactgcaaagcagaatgaacactgtcttaagaattttgacctcaccgaataccgtcaggtgctgagtgacctttccattcagatctaccagcagctcattaaaattgccgagggcgtgttacagcagatggggataactcatactgcctggaagctatcatccgccagatgaatgcctttcatacagtcatgtgtgaccagggcttggacccctgagatcatcct

SEQ ID NO: 328174 - DNA, 547 bp, Homo Sapiens
  misc_feature (40)..(40): n is a, c, g, or t
  misc_feature (46)..(46): n is a, c, g, or t
  misc_feature (61)..(61): n is a, c, g, or t
  misc_feature (197)..(197): n is a, c, g, or t
ccctgtaccgaaggccctccaaaggcctaccctacacccnaccccngggaattcggaagangccagagggaacatctgggctcagctatttccatgctgtcggccccatacacttcccaagtgggaggtgatggcagtttggtccagctgtttgcccaaccccaggagttgggtaaaaggttggtaaagagatgttnattaagttttagcaccatttccttcccaatagtctcattttaatacaatacaggttagtagtgaccagaaaatattgctactgaattgaaggatgactatacaaggacttatatcagattatttgttgcttttagtttctagtgtcccataaagtatagaaatggaaattgctgacaagagagtacctttggtaggcacagttccttttctccccccactggagaggacgctacaaccttgctatagagtgtcctgtgactgcccagtgatgtagattatgctcctaccccaggaggggcagcttgagaacagaaaagcaacagctggaagacatttatattacctctgt

SEQ ID NO: 328175 - DNA, 687 bp, Homo Sapiens
gttctatttttccttccaaatttaacctgccttccactaacagttttttctacttacactattaccttttcttctttctcactctccttgcttgctattttttcccatccccttgggttctcaatttattctattattttctttatgattcctctgtagtttgacttttctttgtcctacttacacctcctccgcctttccctctttctgaactgcctcccagtgtgggtcccctttaaggcattcctgtccagcaggagcttggggccagctgcagagagcaatgggtagggacttaccttggctggcaaatggactatagtcaaatgtcagccactgggtgaggatcaaattgcaagggcaatttttaaaccgtcatgaggcccaaatcaacagaacagtttgctgcctaccacttaccatgcatggttttcctgctttacagagtccctttaattagtaacctataaatagatgttccccttgcgtagattaactaaaggagcttcatttttattcattcttactagtcactgaactcacatgttgaaaatttactagttatgaggtctttgtatatatagcatattgtgtcaggagtataatttcatgttaaatagtgtatttcccttcacaagcagaattgctacacacattcacagttttaatagactaactagtctttgt

SEQ ID NO: 328176 - DNA, 921 bp, Homo Sapiens
  misc_feature (357)..(798): n is a, c, g, or t
atataacatgctgttgttgtttttttacaggactgtcattccatttttattatttttcctatcagtggacctagttatttccagttttttgctataagtatttttacttgtgtttctttatggacatatgtgaagtttgtaaaatattaatatttacctaggtgtaaaattatgaggtcttcttagagtattggatccatacgctgataggtaataacaaactttccacaagatgattctatcaatttagccttccaaggagtatatgagtttctgttattccatatcttgaccaataattgggcattgtgagactttatatttttgcctaaatgtaccttgttgtggttttatttnnnnnnnnnnnnnnnnnnnnnnnnnnnnnnnnnnnnnnnnnnnnnnnnnnnnnnnnnnnnnnnnnnnnnnnnnnnnnnnnnnnnnnnnnnnnnnnnnnnnnnnnnnnnnnnnnnnnnnnnnnnnnnnnnnnnnnnnnnnnnnnnnnnnnnnnnnnnnnnnnnnnnnnnnnnnnnnnnnnnnnnnnnnnnnnnnnnnnnnnnnnnnnnnnnnnnnnnnnnnnnnnnnnnnnnnnnnnnnnnnnnnnnnnnnnnnnnnnnnnnnnnnnnnnnnnnnnnnnnnnnnnnnnnnnnnnnnnnnnnnnnnnnnnnnnnnnnnnnnnnnnnnnnnnnnnnnnnnnnnnnnnnnnnnnnnnnnnnnnnnnnnnnnnnnnnnnnnnnnnnnnnnnnnnnnnnnnnnnnnnnnnnnnnnnnnnnnnnnnnnnnnnnnnnnnnnnnnnnnnnnaacatacagaatatatgcaggaccccttaaaattaatgggggttctgtatactgtatgttaattatctcttggttattatgaatgatgtatggttgtgggagacttactgaatcttgaatgtt

SEQ ID NO: 328177 - DNA, 671 bp, Homo Sapiens
ggtgtactcctaggtgaatttttgacagttgatgttggttgtgtggatggattatgaacagttatttgttttctagaagggatctggacagatgatgattgttgagtaaaagtatagacaaatgactttggtggttgtgtggtagaagtacgggcagatggtagttgtctggcagaggtgaacacggcttgctgggaggaggtgttggctattggtgttggttgtttggtgttgtaggcaagtggttgtccagcagaagtatgtgcttctggtttttcagaagaggtatagacagctggtgttggttgtccagcagtgactttggcaggtgatattgattgtccagaaaaagtgtcgctgaattgtgttggttgacccaaaggattccctgttgtgttttgagaattagccaatacctgtgacattgatgatgtgaataaggtaggctgtgactgcttctctgttgtaattgtctctgtctttgaaaaaaatgtattgttcaggtgtccacaaaacaaaattaagatgaaatatttgggatccatttcagaatatttcctcgttatctcagctgttaacttcttttgcagaatgctaaattcttgttctaactggacattttggtgatttggctaagaaaggaaaatgggtggttcaattcagatttaaaa

SEQ ID NO: 328178 - DNA, 654 bp, Homo Sapiens
  misc_feature (89)..(89): n is a, c, g, or t
gataactgattatcacaattttattaaatgctcatcatttaaccagatggcaccagaaaataaatggcacactcagaatatttaactcnaagaaccaattaataaaggcactattttataaatatgtgttcacaattaaagaccacccaaccagtgggttggggaagcacccagtagtagttaagtctgaagatcatggagagggaattggtgtcaacttgaaaccgagagatctacagccatagatggggcttcccaaaggaagctgttatccttacgggaacacagaagctaccatggtccaggcaggaggaagggaacggtaataaataactttttctcctccccacctctggtatctccccactgttcaaacctatgaagaaaccccagtctctagaagacagcctcaggggggagcagagcagaaaatgggggaaaagggatcaaagaaatagggaatactcagcacacatgcagatccacaatacatacaatttctgtcatgtgcctgctacaaattcaagctaccccgagccctgaaggaataggcttctaactcagatgatgcagtctactcaactatatttaaaaattcacacttaagtgttatcgtcatcacactttacttctaaataaactccaaatacgtta

SEQ ID NO: 328179 - DNA, 1013 bp, Homo Sapiens
  misc_feature (521)..(628): n is a, c, g, or t
  misc_feature (786)..(816): n is a, c, g, or t
  misc_feature (831)..(839): n is a, c, g, or t
aacaatccaggggagtacccttttctccatctttctagcaacaatgagtgtcattacctttgaaatgtttgcctttctaaagagtgtaaactatctgatagttttgaattttattcctttatttcatgagattgagcatcttttaaaaaatgtgtattgttaatttctataaattattgattttaaggactctacctaaactaagaaattagacccttgtctgtgatttgtgttacaactttttcccctgtgtaatttatgtttagatttcactaatggcattttttggccatacataagttttcaaatattatgtgggtaaaatataatcagtgttttctttgagaacttctggttttgtgttctgcttcaaaataccttttctcttccaagattataaataaatttacttatgatattatctaaaactttaatgtttaatagtttatacataaatctttgattgactcagtgttacttttggtataaagaataagtcagggctgggtgtgtgtctcatnnnnnnnnnnnnnnnnnnnnnnnnnnnnnnnnnnnnnnnnnnnnnnnnnnnnnnnnnnnnnnnnnnnnnnnnnnnnnnnnnnnnnnnnnnnnnnnnnnnnnnnnnnnnttttaaaaattagctggactgggtggtgtgcacgtgcagtcttagctacttgggagactgaggtgggaggatcacctgagcccagaagtttaaagttgtagtaagctctgatagcactatactccagtctggaccacagagtgagactcttgtcaccnnnnnnnnnnnnnnnnnnnnnnnnnnnnnnngaatacatttgggannnnnnnnnccttccaaatacataccacaactacatttgaaattcagttcagacaaagtgaagtttcacatgttatgttgggaccagtatgcagaggactatgaatgctacaataaggagtttgaattttatcctgtggacaacacgaatcttttgaaagtttctaaagcaaatgagaaacat

SEQ ID NO: 328180 - DNA, 547 bp, Homo Sapiens
gcttagattttatatctgaacccaaacaggaaaactctggacacctgatgctcctaattttagtgtgagccagtaatattttcatgcagtattgattaatgagaacaggtcttcatttgagcaggacatgcgatggaatcctatctgtaactataatgattactagttctgaagattatacctacttcagtattcatgaaagtgattcactgaatttaaaagcccatatcaatcaaactgcagaacattttttaaaacctcaaagccataaaatacagaggtttccttgctttgtgttgtacaagaagaaacaacattcttggcaaactgtcctgacacttctttgtcactaatgccagtatccaggaatttgttctcaagaatagcagtcggctcttaggaggcatcaactggggaagaggaagggggtaactaacatgtcatttagctgaatgctgtttattagaatgcagtttagtgttgcaaaagctacctatatttgtaagtgctaagttgaaaaggatccagtgtagcaaagcatttcatt

SEQ ID NO: 328181 - DNA, 647 bp, Homo Sapiens
  misc_feature (362)..(375): n is a, c, g, or t
attgcaggcatgagcgcctagccaggaagctatcttttcttgagttatgaaactttgcaacagttgttcaaattggtgtttgtccttcctatagctttcatattttcaaattaattctgtatggctatataatttatgttttaaaagggaattctcttgactttggaaatatggaagtctctcctttaacctattcttgttcccattcccagtctcatttgaaatcattccttttattgttagtgtgtgtatttttgttggtgtgcttttaatgcatccaagtatgcatcattttggataaaaaatacatccaaattaagatgttttaacacataggacaaacttgtgcactttttatgccnnnnnnnnnnnnnnttgggttttccttcatgggatttctagaaacactgcctacactttatgaaaactacatagtattcacctgtgacaggtagagtttatcactattaattttatgaggctatttattactttccaatgcatccacttagaacaagctaagagtaaggctgctaactttaattccttgcctgattttattgtacagtgtgcacaagcacaatggtatgcttgtatatagaaactaaaaatactatgaagtacataagttccctatggcttatgga

SEQ ID NO: 328182 - DNA, 556 bp, Homo Sapiens
gagtggtgctgggattatgcaggctgaggctctccacacattttcatgaagtggttgctcaccctctaagtgagacgtaaagactgcagtgttcggagccctttgggaaataaatgtggtgaaaagaaaggagggacgaggtttaaaggaaggggaaatggaggttaaggaaaaatggctagaaggtgtgttctggaacaatcagaaacctgaggcaacttgaaatgggggaaaaaggcaagaatggagagatgttaccagaaccgaaatctagtttgagcagagaaaaagactggctttctagtaggcttgtaaaatgctttcctgcagcaagctacttgtgtccatagatcttctctgggagggttaaggtagccttttgtaaaccaaaggaatcctataatatctatatttggaaataattaatgagttggaaaagccacccagcgtagaagagtcaatccaagctttaattctgccatctcagaatggtgataaaccatttctcccccatcatctaaatgggaatatattgtgcttatagatattttccttt

SEQ ID NO: 328183 - DNA, 696 bp, Homo Sapiens
  misc_feature (181)..(181): n is a, c, g, or t
atgatcgcttatgtaatttgagggcgacatgggtaatgggagataccccacaggacctgtaaatatttaaataatatttaacagctgatcagaggctaaattacaactgacattttgatgcagtttcgttagggaattaagacaatgcagccaatgaaatgtctctaggcagactgatttnttttttaatgcaataggataattgtctttgcgctgtgtgttttcacaagcactagttttgtgttttgtttctgtttttaaggggaatgacaatctctgtttggatatttatgaaaatggtttacatatcaaagacttaaaaagacccaggacatgaaagggaatgatttttttgaagtttccacttgtactgctgcaaaaataatgatgaatatatatataaatcttctgcagtgtgaaagtaagcaagggacaaattttaaggtcaggaaagactctcgaatctaagcatagtgtgtgtagtctggaaggcatctgaacgtgtcctatcctgaggctgcaatctcaagcctgcagctatcaggaaagacccacggtgcaggaagcagggctgcactgggtcctgtggccagcatgctctctctgagataaaatgtcctctggggctccacattgatttcctgctgaggaaggagggctgcaggtgcctctcatgcttacgccctctttagagtc

SEQ ID NO: 328184 - DNA, 1044 bp, Homo Sapiens
  misc_feature (542)..(574): n is a, c, g, or t
  misc_feature (636)..(636): n is a, c, g, or t
aactttttttgtaaaggagtaaattttttaggctttgtgggccatgtaagttctctgttacgtatccttatgctcatggactatataaaaacactctcctatcccaagttggcccacagaccatggtttgcagactcctgattaaagcctaatcaatagcaaataaaacaaaataaagatacctattctagagaattagataatcctcaggtgagtcagttaaacagtgtttcatcatgtcattcaatggacatgtgttcttttggccatttgcaggttttgaatatgggagatacatatttatatatttttgagggcagggtttcattgtcacccgggttgggagcgcagtggtgcaaacatgggctcactgtagccttgagctcctgagctcaaacaatcttccttctttcagcctcccatgtaggctgaaaccaaaggcatgcaacaccatgtccagcttttaaaaaatgttttgtagagatggggcgtcacctttgtggcccgggctggtctcgaactcctgggctcaagcgatactnnnnnnnnnnnnnnnnnnnnnnnnnnnnnnnnngcataagccactgtgcccagctatattatttttttcctaacaaagatgcctgctggagggangctggaggggaaacagtgagggagaatgtgaaggaatttgaagaggtagggccttgtgggtgggatagcccacacctaacctcttttcctaggggctgcccctggtttactggtataaaaattaatcactctcttttcactctcagagtgtcccagtttggatgatacatgataaatgggtcatgttaagaagtttgctcctcaacataaaattaataggaagggttgacaaattttaaactagtcaagtgtgatataatcagatttgcattttgaaaggatgactgccttgttggtaatggatttgaggcaaagacacaggggatgttaaatggttgtttaccaggaaatttgtctttcaggttaaacaatttgttaaactttctcaatagcaagttaattttgtat

SEQ ID NO: 328185 - DNA, 665 bp, Homo Sapiens
tgttttcattgtactcattaatcccctcctcaatttttaacagaattataaaagcaaagtcaaaaggtccttcaggatgactgggaggcttcctaggctaacttttgcatttgaaaatggaaaaaataaattacttgatatttgtgataagactaagatttcttaaaagtctgcacatcaatatattacctggcttaggagggtgagggcacagtatccatctgcaccctctcctcgtattttttaaaaacaggcaaaatatgtaagaaaaggctggtgcacgttggaagacagagcgtgcctgtctatgccagtgctgctgtgccctgcagcctgggcaggatgggagtcggatgctggggcctcatgcccacttagggccaataacatactcaagactctacagccctttcaccagcaaagtatgccctgaggggcaccactgggtgttgggagttgaaggcacacaaagcaggggctaaagggcaattggggtttcacggtgcagcgacatgaagacagaactggtgtgggcgccaaaggcaacctgcagggctcacataaaaggaaaataggacagaaagccacgagttccacaagcagaatcatttctggtcttacatctgagggcatttgtagagaaaagtccaaggcaatgtccccta

SEQ ID NO: 328186 - DNA, 691 bp, Homo Sapiens
tcgagttcaacattttattcaagtaatacattttataatattgcaagaagtgacttggaaaatttttgcataccaaagaacttctttttaccaaaaggccaactgaataaactgtgtatgtccaatggtactgatctcataccatcaagaaaagtatttcacattaggaaatcgctccacatgtgggtaattagaaaattctgtgacaatcagtctcaaatatattctttatttgtgttgcaaactgaagctaaagagaattcaagcttttcatgaagaccaaaaatgaaaccatgaacctgtaaggtcagcattttagttgctgtgaaatgatggcacatgctgtgcccggcactcagcaacactgggctgttgccttcacacttacatccgctttcctgtatctcatctacaggccaagagtccagatcactagatgggttacaatttgttttaaattaagtgatggccctcaatcttgtccctactgataaaatgcatgtgctttagcatagggactatgtgacatttttgggctgttctcagtattcaaaatcacacattccaaagtttctaccatctagaaaggaaagcatgacacgattatttttccagtactgaagcctgggagtcatgagataatggcgctggttgccccagttagctgtgtgactctgggggaagtcaccgc

SEQ ID NO: 328187 - DNA, 510 bp, Homo Sapiens
ttcacagatctcagattgggaaagacttgtctacagcacacatgcatggttaggaaattatttttcaataaaagcaattacattgttattaaggacaatgacactgaccacactgagctaagtcaaagtttaagtaaatcaaacttgtcattagaaaagcagcttagaggtttattgcaaaagccttctccagaaactttcccggcccggggaatctgcctgtgatgggaatgtgctgatactctccagacccctgttttagggctgggaagattgaggcctagaaaaggaagtgcccgtggcagaagttactgctaggaacccttccctaaaacatggggtcctacccctttcccaggtcagggcgccctcacctccttccctttcattggcccctgacgaggcactaagtcaaccaacaacctaaagagccacttagtgaagaggtagagagtgaatatacctagcgttttattccacaaagttccagaaacccagtgactgggcatt

SEQ ID NO: 328188 - DNA, 391 bp, Homo Sapiens
  misc_feature (46)..(46): n is a, c, g, or t
  misc_feature (267)..(289): n is a, c, g, or t
atccggagacggagtggaaagtactatataaaccctagagttatgnaacatccaaaaaacatggatatagcaataaaataatttaatgttgacttaaggagtcataaatcagatattttattcaacgaactctgatttttaattataacataagaattataaattagtatctaaaaatcattgtttcttaataaataatgagttgacaaaaataatagttgaaaaataaaattatgtaggatggttatattgtgaaaatttccattnnnnnnnnnnnnnnnnnnnnnnncacctttggaaactacttttatttaaaatatcaggaatccagaaaattgcaacttttcttgatctacataatcatttttacatgaaattttctgtgccgaat

SEQ ID NO: 328189 - DNA, 559 bp, Homo Sapiens
  misc_feature (70)..(123): n is a, c, g, or t
gatggggtctcactctgttgcctaaactaaagggcagtgacacaatcatagcttactacagccttgaaannnnnnnnnnnnnnnnnnnnnnnnnnnnnnnnnnnnnnnnnnnnnnnnnnnnnngtgtaagccaccatgcccaaccaaatgaagattctgattctgtaggtctggggtagaactgagaatctgtacttttaaccagcatccagtgtggcctgcaagggttcagaagcaaccctcattcacattttctcctggccttggggagagaagttaggcaagttcctcagaagggcctgggatggaagggagtcggggtttttgaagttaagaggcatgcaaatggactaaaatgcaaaaaatccatggctagagtggggagggggctggagggaaaatctgagatctcattctacagagagagcctcagaagctctgaaaactcacaatcagtgagctcctcagctgctggcctcttgtttgctcctgtctttcccactgcctggagagccccagctctggactgataatgcagaagcccctgggcctctggcca

SEQ ID NO: 328190 - DNA, 968 bp, Homo Sapiens
  misc_feature (56)..(71): n is a, c, g, or t
tccttaacgaaaatgtgggctagcatatgatatttaggcacatggtttactaaacnnnnnnnnnnnnnnnnaaaaaatgattgtctttttgactgaagaacttaagaaactgtcatcgtgaatcaatgaaacttactaagaatgggatccatttgcagcatcctatagcttctctaaaattctgcccctagggacccatgatattattgagatttattattagtgagatcactttgtgggcatatcattttatctttgcggtagctagttccccttggatggtacctggaataagcatatttgatagtaaattctttaagtaaagtcaaatgagatcaacatgtcactaaatactttcattgtatattgtgctttaagatacatctttcctttgtagcagctcagtacctatttattagacgtgaagctttatatttctttctttagattagtaatctttttatacatattgataggccttctctaattccaagttcagatacaacctattgacagtgtttagagttgctttattcagcagtacacattgcgaagctgctccctgctataatacagtgtcattgttgaatgtaagcactttcaaggggttcttttttgtgtttatacaggcatgccagaatcactcttgtactgctccctgcacgatccagtcagcccctgcccggctggttatgtaacaaacaaggtgtgttttcagaagggtctccaaggctgcagctttgtcccaggaagtcagcctatggtgtatccctcagatgctcagatcccactgtctgggatgatcccttataccttttccttatttcgataattatagtgggatgggatggtttataagacttagagtagggctgcctaaggatgaggttaagatgaagaacactgtatcctcagcattttcattgttgcaaaaaaatttgagggtagaggagggtcaaatacatgcc

SEQ ID NO: 328191 - DNA, 946 bp, Homo Sapiens
aatagtaaacagttttactagtttacggatggtatatagatgaggggacaataccattataaatgaatcaaatagtattaaatacagtcgaatgattctgactatagccaagctggtgaggatgaaatcagctgatgagaccttccaactcttggcccactcaatgcagtttaccagtccaatgagcccgtttcccagcattcctaagacaagtcctcttgttgccaccaccagaaagaaaatattaattccaacgaacatttctatgaaaatatttccgatattctacttcactgacagctttatagtcaaacagttgcagatgggcatgcatttatgatgctttctatctatgttttcatcacaatttcagaaggcatagccaaaattcaggtatatgttcagaggtcttcatgaaaaaaatagtttgttctatttatattgtaactccgggtactaaaccaaattgttaagagatacaaagcttcatgaatacctttcttaccactttcagtcagctactatataatttctagaacaaacactaatgatgtctatttatcttcagcatcagccacaattttccattcatggtaatgactaaagaagcgaagtcgagtatgtaaacatgccaaaaatgagagatcatttttcactaatttgcattttcatctcccctgagccataccacttgaatacaaatatcttaaattttgaatagaaattgttagaaataacatttatttcagtaattatttgtctctcttccagtaacatccttctacataccaagcatttttgttgatgcaatatgatttatagaaataagtccctaaaattattcataattcaagaatttcacccaagtcctaaagactattaatataaataatttgtatgcaatgttacaggagctaaaaagaataagacaaaatataccagaatt

SEQ ID NO: 328192 - DNA, 740 bp, Homo Sapiens
  misc_feature (48)..(116): n is a, c, g, or t
gggttttaccatgttgcccaggctggtgttgaacttctggactcaagnnnnnnnnnnnnnnnnnnnnnnnnnnnnnnnnnnnnnnnnnnnnnnnnnnnnnnnnnnnnnnnnnnnnntctttaaaagtaataacgaagttctatttatttttatttttctgtatctccagagcctcaaaatgtacatttccaattctggtattttcctataccagtgaatggaaatagatgactatagagagtaaattttaccaattcagtaaataatattctgaatagttttggaaaattctatggaaacatttagaaattaccatattttttgtgagagaccaggaccctaacattaggacctacacttgcctgttggatttgaatttcatcttatagatacctcatactgaggtctaaatctaaatttctcttcattcaaattagtttctttctgaggcttggtatttcatattcctcttagctttttctctcctatttctgggtgctagttaaggtggatggaatactataatatatcttgctctgtcctctttgattcccattgttgtcttcctcttccacgtcatcattggctcatgcctgcactagtggaatattcttttaattggtttgtcttcctgcagtctcttcttttggctgaacaacctaaaaaccctaatttgatggacatactttcttggtcaaaaatctaaaatactatttattgctttccttaattaagcggcc

SEQ ID NO: 328193 - DNA, 977 bp, Homo Sapiens
tttttttccactattcaggtatcatgaaatcactctagagatgatcaatcaacatcatatttatacttttggttaattatatactactcagggaaaaaatgaacaaaaataactactcatccttcaatttcattttcttgaaacagtaagagtataatttggtatgcctcagctgtcaccattttataagtggctcattctgttcttaaagtaagtatttttattggaactcagggtaattgggggaatttatttagcttctaaaatatccggcaggatagagaagatttatttggcttcaaaaatgtcgggtgaccacttctcttattagccactactgcccatttgcttcaaaaatatatttattggtctccaccatgtgtgacacacacaggatttccaaacataccacttttgagaaaaatgtgcagtaaaaaggaggtttctagaaagtgacagtaactcacatttaagcactagctgacctaggaggagacctggatcttcattctggttctgcctttcatgagacttaagacttggaggagccacctgtcctgtagaccccaagttcctcagccataagcaaacgggttaatcctaagagttcaggacccagttgggtgtcgtgaacggagccattagcaaggtctgtaggattcaaggacttgggcacattcacagtccacactattgtcatggtcattgacttactacttgagctcaaagccctgacatttcaaaaggttgtcatgataacaggtgaaacctctgaatcccttaaatcagaaggcatggcaacatactttttctactggcaatagctcttacaatgagtgtttcataatgaaatagtctctgctaagaaaacatgttttccttttgctctctctgctttgttggtttctgtgctgtgtggaattggaggagatatatgctctgaaatattttatacagattactgactactggacagg

SEQ ID NO: 328194 - DNA, 856 bp, Homo Sapiens
  misc_feature (25)..(25): n is a, c, g, or t
  misc_feature (100)..(174): n is a, c, g, or t
  misc_feature (241)..(293): n is a, c, g, or t
  misc_feature (440)..(440): n is a, c, g, or t
  misc_feature (462)..(462): n is a, c, g, or t
ggccgcttaattaccattttaatcnctttaatccatgttttaccacttaataattattttaatcatgtttcttccaatttgtactgaaaaaggataatcnnnnnnnnnnnnnnnnnnnnnnnnnnnnnnnnnnnnnnnnnnnnnnnnnnnnnnnnnnnnnnnnnnnnnnnnnnnaactccaaagcagatgagactacaggtgcacatcacccataaccacctagggacagagtctcactannnnnnnnnnnnnnnnnnnnnnnnnnnnnnnnnnnnnnnnnnnnnnnnnnnnntcggccaaggataatcttagttattaagatgtttcacaagttttatctctcagccataaagacaaacctgaagttcacaatataataagtaaataagatttttgttattttcctatgtgcaaaattacaattaatttagtgtttganacagtacccttagatataggtnagtcaaagagacctgagataacgtgggtaggacctaagcagacaaatactctgtgtgtacagttggacatgttcatgcacagcccatgaacgtccttggtagttggccacactgtttgcataaactagaataaactgaccaaaggtctgacttggttcaacaaaaccaatatttgccatatggctaattatttcacttccatggttttccaacattttgccaaagatggaatgtagccaagaaaagacgttgaaaaaccaggcatgtgaaatattcagtttttttccaaccaggacccattaaaccaaaacaaaactgattttggttttattacaatgtctggtctacagaaaaacccacctaattaacttatgctttagatcagatcctacgg

SEQ ID NO: 328195 - DNA, 396 bp, Homo Sapiens
  misc_feature (380)..(380): n is a, c, g, or t
gtaccaacccaacaccctggccttaattttaatttaattttggtgaagaatggaattcttgcccataattgccccaggctgtcaacaggatttattaataaactgaatgtgaagcatgagagagaggaaattaaggaggactctaatatttggtctcagtaaccggacaaatagagctgccacctactgagacggggaagatgtgggaagagcaggtttgggagtaggaaatcagaagtttatttttgaacacataagacttccaatgcctgttagacagcagtagcagcaaattgggtgcctcagccatattccttgcctgtgccacatcagtgtgctatggacagcctgatctccaactgccaggacctccattttcntcgtgccgatttttgg

SEQ ID NO: 328196 - DNA, 787 bp, Homo Sapiens
gcttatggtttagttgcagagagacaacacaatgggctttgtccttgcaccctctaatgatataaggagttttgatgtctgtaagcaccccacattcagaaggggactgctttcaccttccacaggagggtggtagtgaggctgtggcaccctgcccctgccttacaggctgtgaagttagagtggctttgtgacagcagaggaggggtgtgtgttgcaaagttggaatccctgctacctccaagaatggggtcgaaggggtggtggatttagtagatagcctactactgcccactttacagagatgcttactgcggtctggggaggagggaggttagctcagggccacaacctcagaaatggcccatgaactgacttctgctctaggcagtgctttttttcaccttccacagacaattattaatcaggaaaatccactcctagtttgaaattttaatttgcagctctagttaatactttggattgaggttgctttgggagtaaaaagaaaggtttgtattaagaggagttaggactgacactaaaggaaatgatttgaaatttgaatgttcagctcttctggaaagtctcattattttgaccagaaaaaaggaacaacttgtctctaaatgtaataattattatgatgatgattatttggtatcctggaatctcctatagagctagcagattgagcctgtgtataaacagatgaaggcgttagagccttgtgcagtggcctctccagaagtcatgattgcagaatctccctctcacatcttggcaa

SEQ ID NO: 328197 - DNA, 406 bp, Homo Sapiens
  misc_feature (27)..(27): n is a, c, g, or t
  misc_feature (39)..(39): n is a, c, g, or t
  misc_feature (49)..(49): n is a, c, g, or t
  misc_feature (72)..(72): n is a, c, g, or t
  misc_feature (83)..(136): n is a, c, g, or t
aaggtagaagaccagggttttcacccnatgttgggcccnggagggtccncgatcctgcctgacccttgtgancccacccgccnnnnnnnnnnnnnnnnnnnnnnnnnnnnnnnnnnnnnnnnnnnnnnnnnnnnnncaaacagttctttaaaattctccatcctatgattaaaaagcagcatgttgtctttctttagattcaggaaacagaagtgaagtctttgaaataaatattttgctgctttttacatacttcacctttggatacatctagacttataggattataaacattgttaaaaagtgctgattagttttcagaattataaaggagcacaatagtcaaaagcggggtgaatgggaagacaggccacgaattttgaggttaccagttaattaagcggcc

SEQ ID NO: 328198 - DNA, 833 bp, Homo Sapiens
  misc_feature (42)..(42): n is a, c, g, or t
  misc_feature (51)..(88): n is a, c, g, or t
  misc_feature (241)..(543): n is a, c, g, or t
acttaggttctcattttttaaattaaatccagatatatatgnaaattcggnnnnnnnnnnnnnnnnnnnnnnnnnnnnnnnnnnnnnngtgaaggaattttaagagtagttatctttatacagtgaagctaaatataattttcagtttcttctttacacttttaaattgttaacagaaaataggtaatattttgcaatcagaaaaaacattactataattttgaaaaatgtaattaactgnnnnnnnnnnnnnnnnnnnnnnnnnnnnnnnnnnnnnnnnnnnnnnnnnnnnnnnnnnnnnnnnnnnnnnnnnnnnnnnnnnnnnnnnnnnnnnnnnnnnnnnnnnnnnnnnnnnnnnnnnnnnnnnnnnnnnnnnnnnnnnnnnnnnnnnnnnnnnnnnnnnnnnnnnnnnnnnnnnnnnnnnnnnnnnnnnnnnnnnnnnnnnnnnnnnnnnnnnnnnnnnnnnnnnnnnnnnnnnnnnnnnnnnnnnnnnnnnnnnnnnnnnnnnnnnnnnnnnnnnnnnnnnnnnnnnnnnnnnnnnnnattattcacatttacttaaattttacattgcccatctaaaatgactcctgacacctaaaatattcatgcttacaaggtatgttatcataagaagaaaattctattaataacctaaatgaaatgattaaatatatgggttatgaaaaaacttcaaaatgaattctgaagagaaatattaaagacttggcagttagactgaagtgaaattttgttagtttttgtgaatttaagatttgggcctgagaacacaactgcttacacaaactcttaactataattctttctcccta

SEQ ID NO: 328199 - DNA, 782 bp, Homo Sapiens
  misc_feature (643)..(734): n is a, c, g, or t
tttacaaataatgtaatttattttccatatttaaaatacatggtgtcaactcagctaagcacccagaagtacactgtcgccctcatctgagatgtgtaggactgtaagggaatgtgtttgggggtttaggaagtcacttatagacacatgaaggtggagatgcctgtttgatgtcccagcagagagctgcggagacaactgcacacaggattgtagagctccggggcgaggcctgcaggggacacggagccatgtaggtgggtcaaagccgtgagatgataaggttcaaggtgatttgagtctaatcctgtttttcggaggactggaatcctttaaagttcaaattacagctaagcacctccctgtcctacaggaaaagccacacactccattgtgcccatcatttcaggggtcagtgtcactctgactgagcttttctggtcttctccctcacctgtatattacaggtgggctcactgaggttcacagcgggggacgtttcaccaagttatcctgagaagctccgagttttgtaagaaggaagagtcgctgattttcatgtgatggccaggaagggtcaacaggctgcgttggccatccttctacaaaatgccaggactggctacgtgtggtggctcactcnnnnnnnnnnnnnnnnnnnnnnnnnnnnnnnnnnnnnnnnnnnnnnnnnnnnnnnnnnnnnnnnnnnnnnnnnnnnnnnnnnnnnnnnnnnnctggatagaggagaatcggcctcacaaagtgctgggatacaggcatag

SEQ ID NO: 328200 - DNA, 962 bp, Homo Sapiens
  misc_feature (55)..(80): n is a, c, g, or t
  misc_feature (411)..(515): n is a, c, g, or t
  misc_feature (529)..(649): n is a, c, g, or t
  misc_feature (783)..(784): n is a, c, g, or t
aggtttgacttcctctttgtttttataaatcctggaggatgctccttacagattnnnnnnnnnnnnnnnnnnnnnnnnnncaacaacagaaaggcaaaaacaggtacaggcactgtgatatgcaagggagtttgtaacacttaaaaaatatatggctgggattacaggcgttagccaccgtgccctgccggtaggaataaattataactcaaaatatgaccattaagtgtaaggtagccccgacaggcatcactccactaaacacagtaaaagaatggacattcatagggaattaatttatcaacaaagtaaataagtattaagaatattctaagaaagcaggaacatttttataaagcagttagaattttttaaagttgttttgttttcttgagacagagtctctgtctnnnnnnnnnnnnnnnnnnnnnnnnnnnnnnnnnnnnnnnnnnnnnnnnnnnnnnnnnnnnnnnnnnnnnnnnnnnnnnnnnnnnnnnnnnnnnnnnnnnnnnnnnacatgccatggtannnnnnnnnnnnnnnnnnnnnnnnnnnnnnnnnnnnnnnnnnnnnnnnnnnnnnnnnnnnnnnnnnnnnnnnnnnnnnnnnnnnnnnnnnnnnnnnnnnnnnnnnnnnnnnnnnnnnnnnngtatgagccaccacacctggcaaaaagtttttattcttaacatttagtcacttggaaaactcactgacttagaattttatataacaataaatgaggtatttttgtatttggctttgctactccgtttgcccacnntccaagctacgacttgagcactaaatgctaacgataattcaagagtacagtatgatgaagtgaacatgctgggatagtttttctttaatgaggggagttggctaacacatccagctagttatttgacatacaaatactaatcaataaatatttctcaagtataagctgtcgtaactca

SEQ ID NO: 328201 - DNA, 498 bp, Homo Sapiens
  misc_feature (308)..(308): n is a, c, g, or t
aaaatacccaagctccttcctgtctaggagagtttgactctagcacagccaatgctaagaaccacttcaccaatccaaattcacaaatatcagccaggtacaatattttgatactaaaacctgcctatgcctactatatagagcatatataggcagcagctccaggccctggggtacaagccagtgtcatgctggctggagacccgcagaaactgtccagagtctgccagccctcagatttttagggaccaaagaccatgcaactcctggggaacacagtgtctgtggtcttggggtgatttgatctntcactgctaagctccagtgaccagcccgagtgaatctcccccctctgttgaaaattctgtatcttcccagcctgaggcaggtttggttgaaagagttttaggtgtggtaggggaacagactgaacctcctacacagctctgctgccaggaaaccaaaccgtctcatgcccatggtgggtggtagcagcag

SEQ ID NO: 328202 - DNA, 501 bp, Homo Sapiens
ggtgttggcatactttattagatacaaacccacactcaacattttatatattattgatctctcaggtaaaaataagttttctttaaaaagtatgacttcatagctaatcatcaaaagctggtagaatgacctgattttaaactgctcttttaaaaaattcacaactaaagtgtagcgatgtcaagtatttacaacactaaaaaggaaagcagtgaaagttggtccagtgtcaactctggaaaggggcatcgtcagtgtagagacgagcaacgcaggggacaggcacgctcacccctgtgccagcagccgggccctgcagctctcgcggagcttggcgacggtggccatggataagcttccaggttctgaaaatattttctgcataaacgtgtgacactccatcacgaaactccctttggttatctgcttaaacttatcgcaaatgtctggaacgctggtggcttccaaaatcaactcctggtgctgcttaattaagcggcc

SEQ ID NO: 328203 - DNA, 419 bp, Homo Sapiens
tacaggtgttggcatactttattagatacaaacccacactcaacattttatatattattgatctctcaggtaaaaataagttttctttaaaaagtatgacttcatagctaatcatcaaaagctggtagaatgacctgattttaaactgctcttttaaaaaattcacaactaaagtgtagcgatgtcaagtatttacaacactaaaaaggaaagcagtgaaagttggtccagtgtcaactctggaaaggggcatcgtcagtgtagagacgagcaacgcaggggacaggcacgctcacccctgtgccagcagccgggccctgcagtctctcgcgggactttgggcgacgggtgggccatgggattaagcttccagggtttcttgaaaatttttttctggcattaaacgtgtggacactcca

SEQ ID NO: 328204 - DNA, 608 bp, Homo Sapiens
  misc_feature (41)..(42): n is a, c, g, or t
  misc_feature (154)..(154): n is a, c, g, or t
  misc_feature (156)..(158): n is a, c, g, or t
  misc_feature (449)..(449): n is a, c, g, or t
ccaccagtttgattcatttaacatttctgagcagcaaagcnnagctcctaggccccagggaggagtgagatggtgacaatctgtgggtcacccagaagcccttggatgtggactgctcctccctcacctcacacgaggcctgtctgtctgcctntnnnagtctgggagagctaacgtagaaatgggttgttgggtttgttttcaaactaactgtttgccttccagaaaatattttcggaacctggaggcttatcccatggcccaccgtcgccaaggtccgcggagagctgcagggcccggctgctggcacaggggtgagcgtgcctgtcccctgcgttgctcgtctctacactgacgatgcccctttccagagttgacactggaccaactttcactggctttcctttttagtgttgttaatacttgacatcactacactttagttgtgnaattttttaaaagagcagtttaaaatcaggtcattctaccgagcttttgatgattagctatgaagtcatacttttttaagaaaacttatttttacctgagagatcaataatatataaaatgtgagtgtgggtttgtatctaataaagtatgccaacacc

SEQ ID NO: 328205 - DNA, 810 bp, Homo Sapiens
  misc_feature (62)..(62): n is a, c, g, or t
  misc_feature (159)..(159): n is a, c, g, or t
  misc_feature (284)..(284): n is a, c, g, or t
  misc_feature (545)..(545): n is a, c, g, or t
caaaatacagatttatatctgttcatctgtatgggaacgcatctgcagggatacacggtagngaacttcagcaacttttccttctggttcttgtttgtaatttctaatttcactataatgggcatgtattaaactgatcatttaaaaaagagaaaaaancggatcgagtaattttaagggcagaaaaggattttcacactcagatacttccaacataaataaagggatttgttcaaactttatcactctccaactgagaagaggcatgaagactgcagccttancaagagggaaaatcccacgcattttaaggctttgcattggaggagaggagcttaaaaatgcaagtgtctccagctatcctcctgcatccttctccatggctccgtcccacggaaaccaactggaaaatcagcaacaaaccagataggaaacatgccttcctctcagataatgctaaatcagagtatctggatgacaacagatttttcttttttctggcaaagagacccttgcctgctgagatgagaaaatttgggggcacnaaatcagctctctgtaaggagagacattttaacaggatcagccggagttcggggaaaactgcaaagtctaagcattcttggtgtcataactttgtcagctgtgttaaagttgacaagatgcttacccagcacctctacacatgtaccaaagggaagtggttaaatgtgtaagccataacagccatcagggattctctagcaagcacgtgctgagcagcctaagccacgctgtcaagtgatgcccagatgtcgctactgcttccct

SEQ ID NO: 328206 - DNA, 408 bp, Homo Sapiens
atgaggtcagagtgggaggtgcggccagatcattctgggtattataggccatggtcaagagtttgtattttatttcacataaaatatattttggggaggtattggagagttttcagcaagagaatgacctatctttgggggttgaatcacaagcctaccgataatgtaaactgccacagtcagttcctgccctgacagaccaagctctcttccttgatggtgggcaaatttggggttgctccctattttaaaaccattgccacccgtagtccccactgtagaatttccttaggtggccatattatatactacgtgaactctggcttccttggttttatacctcatgggctgagttgttaagattcctactcttttccggcattggggttgggggtgttagggaacagg

SEQ ID NO: 328207 - DNA, 524 bp, Homo Sapiens
  misc_feature (29)..(29): n is a, c, g, or t
ccggaaggtttttggaccaatttaatttncctgggccacctactatgtgtcccggtactacgcccaggcagtgggagaatgaagaaaattattagacaatctctgacttcaagggatttattagctagtaacaaaactgaaatgacatggttaggccacaacctcaaatcctatggccaacgaggcagagctaagagcaactgtttcaaaggcccaggcacgctgccaatgctgaggcccagcacatccactccagctgatgctaccgatggacacgatcaccagtgtgtccaggtgtgttgtttaactcaagtgaaaatggaaatcctgctttttatgtgtaattaaccagttctccaatgttggcattaaattcaagatttgtatttttaaaactatctatctgtgggccaatccccacccacctataggtcacattcagctcctgaggacattgtgagaccatggatctgaaacagcaacaacaaaaccagctagcgggatggtgtggtgcttgtgcctgt

SEQ ID NO: 328208 - DNA, 451 bp, Homo Sapiens
  misc_feature (422)..(422): n is a, c, g, or t
tgtctgtcttattttagagaaccaatctttaagttctgggattcgttccaatgtgttgggttagagcgtactcctttagctcagtgaagtttgctactacccaccctctgaagcctacttctgtcaattcatccatctcaacctccacccaggactgtgcccttgctgtagaggtgttgtgatcatttggagtaaacaagccactctggccttttgagttgtgaggggtttttcattcctttctcatcttcatgagtttgtctcattttgatctttgaggctgctgacctttagatgaggttttcgtggggactttttggttgatgttgttgttgctttctgtttttctttccgacagtcaggtacctcttctgtagggctgctgtggtttgctggggattcacttcaagccctatttaacnggggcccctcccacacctgaaagatgtca

SEQ ID NO: 328209 - DNA, 675 bp, Homo Sapiens
ctatttcagtgaagaatgttattggtattttgatagggattgcattgagtctgtagattgctttaggtagtgtgaacattttaacaatattaatttttctaatgtatgaacatggaatttctttccattttttggtgccctcttcaatttctttcatcagtggtttatagttttcattgtagaaatccttctcttctttgggttaagttaattttgagggtactttattttatttgtggcaattggaaatggaattcctttcctgatttctttttcagattgttttctgttggcatatagaaatgctactgatttttgtatgttgatttgtatcctgcaactttactgaatttgttgatcagttctaatagttttctggtggagtctaggtttttccaaatataagatcacgttatctgcaaacaagggtactttgacttcctcctttccaacttggatgccctttatttgtttctcttgtctgactgctctttttttgtactcattattagtgccatgttgaataacagtggtgaaaagtaggcatccttgtcatgttccagatcttggaggaaaggctttcagtttttcctagagacaccaaggaatgcagcaagagcaaactttcatctctgtgatcccttgccaagtaattagaaaaatcagtattctaac

SEQ ID NO: 328210 - DNA, 516 bp, Homo Sapiens
agcaccatgagcaccctgcaacctgtttttagaaagaggaggctgcaggccgggcgcggtggctcacattttttctcattataaagcatatatactcaatatatataatttaatacattctgagtctttccatgttaaaattcatctgcaacaccattttaagtgctgaatattatactgtaaggacgtaccataataataagcagcacttttattatgtgccacacgttttatctcactcaattctcacagcaaccccatgaggtaggcattattatcaccttcattttgcctcagaaaaactgagggctacagtgattaagcaacttgtccaaggggttatgcagtcattgctagaactggaattcaaatacacgtaacgaaggctctttcgattgacctattccctattgttagacattcaggctgttgccatattttttgctagctcttataaataatgttgtaataatatcttttaagctaatgtttgtgcacatccttaattaagcggcc

SEQ ID NO: 328211 - DNA, 489 bp, Homo Sapiens
  misc_feature (422)..(444): n is a, c, g, or t
  misc_feature (457)..(457): n is a, c, g, or t
tcttcagagaaaactcaaactttattgagagaattttcaaattttcagtcacattttcaatgtgacatcagccatgtgtgtagcttcagcttgtcttctttttaacttatggctgcccatctcctaaaatataaacataacagttgagttcattacttagcagaactttactgagatgacactaaaagcacacaaagaacactagttttggtttcttaagatgaaattaaaaccagaacgctaaccactgcatacgacttctatgctaatgtacattttcaggcatatgtgtactaatttttaaaatgcctcactctagtggtacaaggaaacaaagacttctcaagccagaacagattaaatgctatgagcccatttaaagatcattttaagtagagggcaaaaacagccactgatttcannnnnnnnnnnnnnnnnnnnnnnaatcaaacaaaangtccaagaagcaaaaaacaagcaagcaaacac

SEQ ID NO: 328212 - DNA, 161 bp, Homo Sapiens
  misc_feature (12)..(12): n is a, c, g, or t
  misc_feature (31)..(31): n is a, c, g, or t
  misc_feature (44)..(44): n is a, c, g, or t
acccctatgtanaagagtggttgggaagacntctaatttttttncctgtccattcatctctcttacaagatacattattttgttgtagccttaagattcatattaatgcttggaaataaatttgagacaatagaagtgaccaaatatttatttccccacca

SEQ ID NO: 328213 - DNA, 457 bp, Homo Sapiens
  misc_feature (395)..(395): n is a, c, g, or t
  misc_feature (423)..(423): n is a, c, g, or t
  misc_feature (432)..(432): n is a, c, g, or t
tattccatggtgttatgtttacaagcaattacttgacttgcaaaatctgcttgatatgaagtgtgttgtaatggttttctgctgctactcctctgaagtcctgagtgtttccaccatccagggggaaacagctaatatctatctgcctgttctaaaacattacgtgcaagtacatacacacataatccctttccatcttctgagatttagcaaacgattacatgttgaacaatttagcagtctattgagtgacttttcatttgctattaaagtacgcaggatatatgggtcctagggaatgcgcatgggctttcgttgtatatcttggggacctacaattttctgggcatgttagggcaagttacttaactctgagggttctatattttggaacngttaaagtggaaaatggtggatagtccntggagttgncaggggaaggatttttaatggaagt

SEQ ID NO: 328214 - DNA, 866 bp, Homo Sapiens
  misc_feature (842)..(842): n is a, c, g, or t
cttcaccaattctccacctataaattcaaatgtgagcaatggcaacaaaaatggggggtatgggcttattctttactgctgaatcagcacaaaatcccacttaaggggaaaaggctggactattcagtcatagtcacataaaaatgacctttctaatgaaggcctgggttctctggcaggtaagcaatggcagaccccatgcctgcctcctgagtaaggaatgcaggcagtggctaccgctccctgtatccctgaacttcaaaggaattcaagtgacctagaccagctggctgccaaagaaaacagtgtccaaggactccctggccagagataagtgcaggcacagcagtccttcaacgcatggggcttctatttcctgcccctctcatgttgaaactgcaatatcaggagacagcaaaagcctgccaggcaagccctccaagttcagggtcagttcagctcgctccaggaaagctcagggaggctgctgattcccaaaagccccatttgctcaagctcataagtgcgaccctctggcctcctggcaggcaggctgcataagcccttgcacccaggcaagctcctgctcaggttacagaaactcatattttaaatcggtgaagttctctctggggtgcttaggaagaattcttgcagcccatgtcattccctacttcagggagtgtactaagattagctataaatgactcaatggttcaccaggggcccctttcatggcctcccccatggaagatgcagccaggaggggaatcttgatatctgaatgctttttgtaccactcctgggttctgagctggctctactggccacaaacctgcttncttggagcccatttcaagaagatg

SEQ ID NO: 328215 - DNA, 783 bp, Homo Sapiens
caatgactgtcttgggtaaattattttactacctgcaacaccagccccagccagtcgtacccacaacagaaaggaattcaaagataggagcctaaaagaagtttctgtgactattttagtaaaatatgaaaccaaactatttttgtaacatcaagtaattaccatccattcaaatattttaaataaattaataaaactgctttccactgattaggattagcataatattttggacaggggatgaagttaggggggtagagactggaaacaaaggaaaaaagtgggtaattttggagcatttaagggccagtaaaatgaggctctgggcctcaaggccgggttactaggattatgaaaaagggtaagatggtagaagggtatcaaggacaaatttcaccaacttaaaaactaccagtcctgtatgtgcataaactgtggcttccacacaaacctgtagtctctatcatacaagctgtcccaaaagtacatgttcaagtaagcctttgtatatataaattctgtcaacatgaaatacattaatttttaaaataatgaatatataccaaaatatttttaaacgttagcttttatttaacctttttggggtccatgggctcctttgagtatctgacaaaagcctatggaccacctcccaagaaaattgtgcatattcacattccaaaattaagaatgcatacaatttaaagagacccaagactctggattaagaattccctttacaggccgggcgtggtggctcacgcttgtaatcctagcactttg

SEQ ID NO: 328216 - DNA, 698 bp, Homo Sapiens
aagtaccacacttgcatttctgtgttgtgatgtcagtagcagaaacccttagttagagcttgcaatttagctcccttttctcctgaagaggaatcaagttactaccctgtagagatacttcattcttctatttggtttatttagaaatcacctattctgactgatctttaagaatgaatgctataaagagctaccaaattttctttcaaattcataaaactgttcacacttttttgaaacaggagttaatgccgagaatccatcagaagtatctactgtttagaaggaaatggagcagcaccaaatgggtctaattcgactggttgggactgttgggactgatgtggagtgatgctttgcaccacaagttctgtaaagggcacggcaccaaaatcatccattttcaatacatctgcactatggaatgacccatgtagtgaattttgtcttggccgccctggcaggacagtattgtgatcagcacggatgtcgctcaggccctgatgtggagggtgccatgacaggtctggagaatggaagggcttggcaccgaaggggtccaacaggctctcctcaggttgtaagacattccccctatctttcccatcagtcagtgcaacactaatgttctccttggagtctgagatggttaaaaattcattgctactttgagagtctcggcggcccacttttttgtg

SEQ ID NO: 328217 - DNA, 572 bp, Homo Sapiens
caatagataagttattagaaggcaaatattgcttcttgattttttgttttccgtctatgtaagcttgaattttatgtgcacgtaaggtagatgtgaaattcatgggcatcaaatatgggtgggtaaaatataattttgttttctataattaaaattattctatatctagatccttgttgcattggggtacacatgattaattcaggggtttctcagacaattcatgcttgtctccctttccttttctccccgggtagtgtctaaattcccagggtgcttataaaagcgcttgtcaaagcattgtggggaaggtacttggtctttggtcatcatttaactttccttcatgactctcatttgcaccatcatcagcacctgtccccactgatatctgctgatcctcggtgtgtctgtctgtctgtccttcaggttgttttgatccacggcgggtacactgtgccttacacatttcaaacacgatgtctcttcaggcttgatggcttctctcagttaatctgtttcccagtctctagccagtatgacatgtagggacccaggaccttgttcgtact

SEQ ID NO: 328218 - DNA, 770 bp, Homo Sapiens
  misc_feature (286)..(286): n is a, c, g, or t
  misc_feature (731)..(731): n is a, c, g, or t
cttttcaaaaataattttctgattagttcctgccccacctggtggttgtgggaactagacgagcgtccgtgcgaagggcatgctcttctccagggtcacttctgaatcaggctggagcctggcatgccccatcaggcagagtagggaagggccctcttggattccagtgcaaggcgtcctcagtgtgtgcagtgcccatctaggtggtatttcccagcgtgtgagctgagtaagatgagcccgcagccatttcccccttttgcaggctctccaccagcatctcctntttaccatctgttttgcctcctgattaagggaaacaaggccatttctgcccacatttaagctttgaggttggcccagtgcactccgggtggctgccgacatcctgggcattcacggttccgttacctccccttccacatcctcccagcattggtcttcctcctgttggctttttggccccctaccccatcccaccagggctctcagcatcaacttttgctggcatgcttaggctgagggtgatgtccctctgttgttcctgaacctctttgtgttggaatggtcctgtttgcagattcagctcccaaatcatcatccttccctgagtgctcggcctgtgctccctcgcctgcctgcctgctgattggctcttgctctcatgtgcacacatgctgtgttacacttaccctaccactgttacccaccagctttccacagcttccctncatcaccacgtgcagcataacccaggccagcctgaggag

SEQ ID NO: 328219 - DNA, 764 bp, Homo Sapiens
  misc_feature (80)..(80): n is a, c, g, or t
  misc_feature (487)..(487): n is a, c, g, or t
  misc_feature (498)..(498): n is a, c, g, or t
  misc_feature (502)..(502): n is a, c, g, or t
  misc_feature (506)..(506): n is a, c, g, or t
  misc_feature (523)..(523): n is a, c, g, or t
ccctactactgctggctcacccctgggttgtgtttttgaagttccatcctccctaagggagaataacctgattggccccnactcaccccttctcacagttgctgccatcccagtagagtggttgccctcgtcacaggcaccacctttagtccagtcaactatggcagaggtggagggactttcacattcagagaggctatgcattcagcaggggctatgggtgaattcttttagttaaaaagtggtcttgagtgcagacaccatgactgaaatatctggaactatgcatccactatgtgccaaataccagattagagataaataagatatgaagttcgcaatgactggggaactccacaaagcaacactatcaacatgaaagcttcctgacctcctacgttgtcctagcggcctccttatgtatttctatcctggcaacttttcccctttattgctcatttttctgcatatctacttcattctactnggaacccgaancccntggngtttaagggaattgccnaaggtcagtgtcctaagtcctggactccccattctgtgtgtatggcatcccatcacaccaatcactcagtatctgcagtgccctaagacagtgattatcaatgggagatggagggttgcaggaggcggggtgggagtgtaattttgccccacaggagatgtttggcaattccaaaatatttttgtttgtcatgatttgtgtggtggtgattctatcaacaatcaatagcccacaatcaagg

SEQ ID NO: 328220 - DNA, 563 bp, Homo Sapiens
  misc_feature (247)..(247): n is a, c, g, or t
  misc_feature (368)..(368): n is a, c, g, or t
ataaaatagattttatatagaagtagacaacaacctagacattgataattatattattggactctgagttggtataacttgggtctggataactccaaagtctttgctcttaattgctatttttatacgcagtagcctaagtatgcaacgtcttcactaaattttgttcctttcttagtgagtttctgaaaataaccagtactcatggttaggttttcactcagtttaataggaaccagtctattanaatttacatatattttagtagaaaacactgtaagacatatctgacaaacttataaatatgtaagactctcaaacacagtatcaccttaagagcacaatatttagagcgatttaaaaagtcntaagcaaaaaccttactctgtggtctttttttagtctatcagctgaattataacaatgcttttacaaatattttcttttcattctttaccacaagtgttattctaattataatgcagttttatagcaatttttatagatccccaatagtcacatgctagataataaacattcttggaagcagtaggtctaaaggg

SEQ ID NO: 328221 - DNA, 640 bp, Homo Sapiens
  misc_feature (61)..(61): n is a, c, g, or t
  misc_feature (93)..(93): n is a, c, g, or t
ataaaaaaatgacaacatccaatggctagcaagggtatgaagaaaccagattattcggacnttgctggtaggaatgtaaaacagtatggacanctctggggaaaagcttggcagtaccttttaaactaaaaatgaacttaccaaatcacccagcaagtgtactcttgggcagtgatccaagagagatggaaacttatgttcatgtagaaacttgtacatgaatgttcatagcagctttattcataaaagccaaaaactggaaattacccaaatgttcttcaacaggtgactagtttaaccaactgtgacacatctataccaaggaattctatttagcaataaaatgaactatcaaatgtcaggtgcaaactcaagggcattatgctgagtgaaaaaaagataaactcaaaaggttacatattgtataattccatttacataacattcttgaaatgacaaaatcatagggagggagaacagattcctggaaattcaaatacattcatggttgccaggggtcagggtgcagctacacacagcagcatgaaggagcccggcagtgactgtgcagttgtatatacacacaaatgcacatgtggttttacctgagaaatttgcgcaagttctagggattgtatcc

SEQ ID NO: 328222 - DNA, 820 bp, Homo Sapiens
  misc_feature (773)..(773): n is a, c, g, or t
gattcggcacagcatgagcttcaataccctgtgaaaagatttcatcgtgagaatgcatttccagttaaataccactgcttaaaaccttttgggggttcccagcacccacacgcagcccaagcttcttaccttgcaaacacggcctctctatgttagcctttcttatcttgtctttcctttgtttaagtctaagaaataataccaaacttcttccagtgtcctgcacactccatactgtttcttgccttgatgcctctgctcatgtctttttcaagtggaatatcctcctttaacgcattacttcctattgatcctttaaagcattttctgcaggcatcagttctagggaagcagttccgatcctgcccctgccccggggcaacttgggtgcccctctggagtgttctcataataacctgtgtatatctggatatggcccttaccaacacattttctatgatcctctgtttttccatctccccacctgagcatgagcttcttgagaacaggacccccaggcttaagtcatcgttgtataaccagcactttgcacaacactcaacacacaataggtgcttaataaacacttactggctgatctcaagagtctgtgaagaactgagcgttgtcttctaatgcacccttagcatccatctccttacctgtcctaaagatggccctttcactgggcaggctacatccagtgaagttcacagccatcacccacacttgatagcatcggtcaggttccagattcaaaaatgcagtagctntctttcactgtcagtctgtattcttctaccaactctagcataagaca

SEQ ID NO: 328223 - DNA, 782 bp, Homo Sapiens
  misc_feature (31)..(31): n is a, c, g, or t
  misc_feature (44)..(56): n is a, c, g, or t
ttctgatttccttgatctaaatatttttccntcttgtagcttcnnnnnnnnnnnnntgctagcaaatgcacagtccatgtccttggtattcaaagtgtgctccctgaatcagcagcagcagaatcacctgggagtgtgacggaaatgcagtgtcctggggacccatctgtgctggacttgctgaatcagaacctacatttgacaggatcccaagcaattcccatgcacattggagtttgggaagtgccgttctatgctgtgagtttaaaagacagcaaatgattttttaaaacattactagtcttaatgcactttttgttttgtacgaaaataatgaaactgtcctctgattctctgttcttatctacaaaaagaaatgactgtctattctccccaggttattgtaagagttaacgctcaatgcctagctcaaagccctggaacgttaaagctgcccaaacttccatttatttaccctccaaacatcacttccttcctctagctctttcttcctataagtaaagttctttcttgcttttagggtttaaaaaggtaagagaaggtaaaggaatagcatttcagagaaaaggaagaaagcaataaatacagggaacagagtcaaatgacaggaaactctagatcaccttagagaataaactcttaaagtcagcagtctgtacacagagaagctctggtttggtcatccttcaggtagcaggtgcaacagttagttgtagaaacatggatgtggttatctaattctgagaagacctgtgccgaat

SEQ ID NO: 328224 - DNA, 752 bp, Homo Sapiens
  misc_feature (25)..(25): n is a, c, g, or t
  misc_feature (51)..(51): n is a, c, g, or t
  misc_feature (54)..(106): n is a, c, g, or t
ctctcagaagggtgcagggaatggnaagaagagctacaaatcttaatttancannnnnnnnnnnnnnnnnnnnnnnnnnnnnnnnnnnnnnnnnnnnnnnnnnnnnttaagcccaggtgtttcaggtttttgtgtgttaaatgatcatgctggtggagagccactgcactctagcttggacaacaatgtttaatgcctattttatactggcttcagatgattattttcattcactacatcaaatttaaacacagtgacaaatttatgtaagggtcccactatggcactgacttggttgggggaaataaatgagtccctctaaattttgttcattttgttaaatccaccggaaatctttaaaataggctctcaacaaactgaggggccagaacaaaaaacaacccagcttccaagtcttttagagaattagaatcattgaatagatagcttgaaaaatcagataatgttgacatctttccctgcaaaactgaggaactgaacaaatcaaacaatgtatgcaccaacagtacacaagcctgtaactgtgctttaaatatttcaatttgtgggaaagctctttcaatggagctgctatttttattgggtaagtttgtattctgtagcagcatggaataaaattgaaatttcgagaaacactgaaaaagaaaagagactacataaagtgtttttgtcttattaaaaaagaattgagactttgtcccatttaacaggatttgctctaagcttttaag

SEQ ID NO: 328225 - DNA, 716 bp, Homo Sapiens
  misc_feature (265)..(625): n is a, c, g, or t
cagaagcaagatggagtcaattatgtccaatttatcttactgtcataatttttcaaaggcagtttcaaggttactattctcatgattcaacacatcctcaaggagtgagattcagtctgtgtaagtgtatcatgactttctataacacgccttgtcatgcactcttctaccctgctagaattggagtctggcctcagctggttcctaccagcagtactgccatcacctcatcctcatctgccccatctgttgttttcgaaccacnnnnnnnnnnnnnnnnnnnnnnnnnnnnnnnnnnnnnnnnnnnnnnnnnnnnnnnnnnnnnnnnnnnnnnnnnnnnnnnnnnnnnnnnnnnnnnnnnnnnnnnnnnnnnnnnnnnnnnnnnnnnnnnnnnnnnnnnnnnnnnnnnnnnnnnnnnnnnnnnnnnnnnnnnnnnnnnnnnnnnnnnnnnnnnnnnnnnnnnnnnnnnnnnnnnnnnnnnnnnnnnnnnnnnnnnnnnnnnnnnnnnnnnnnnnnnnnnnnnnnnnnnnnnnnnnnnnnnnnnnnnnnnnnnnnnnnnnnnnnnnnnnnnnnnnnnnnnnnnnnnnnnnnnnnnnnnnnnnnnnnnnnnnnnnnnnnnnnnnnngtcaccaacccagggtgaaaatgggacattcccaactctagctcttaggccaagcttatttgtaatagattcttggtttcaaaggatatag

SEQ ID NO: 328226 - DNA, 969 bp, Homo Sapiens
  misc_feature (302)..(311): n is a, c, g, or t
  misc_feature (485)..(495): n is a, c, g, or t
tcagcctaaatttttttattgttgtgcaacatacaaataataaaatgaacaaataaaaatacagctttatgaatttttacatatacacctatgtaatcaccacccagataaaaatgtagaacatttccagcaccctcttaagatgactcgtcttacgacgctttatttcctgttgctacctactaggaaagctgactgcctacatttttgaacacatgtctaatactgggccgcatgatgttggtttctgggcttttgggtgccaccatatggtaagcctgctgtactgcaattgatttccnnnnnnnnnngtaataatacagattctgatgtggttaacaatgaaaacagaggacctaatatttctactaaaaaagaaaaagacttatcttccaaaaggataatttaagatcatgtacataatgacattacatgtttacagttaaattgattctataattttctacttgtatatttagcacatnnnnnnnnnnntgattgcagcctggcattgacatgagaatactgatagaggcaggaggcagagaactctcctaggcagataggggagggtccctggagaacccccgactcgccaagctcattgtgcacagaaggcttgcccaaacatgcccgcaatgaaaaattccgtcccttaacacatgcgcagtaaggaaataaatcaatgtggagtggctcagactaaggacccgcacgcgcactggaaagatggggtggagccaaccaagaattgatgccctatgcaaatagggaacccagccccatcagcggatatagaagcccttgtgttcaactatgaaggaagacaaccagcaacctgctttcaggaccgctctttttgctgagatcattccttttcgcttaataaattctattccactcactctttgatgttcccgtgcctaatttttcctggtcatgagacaataactcggatctagctgagct

SEQ ID NO: 328227 - DNA, 671 bp, Homo Sapiens
  misc_feature (532)..(543): n is a, c, g, or t
ggccgcttaattaattttgcatttactacctcagagctcagaagaaactccgaagtcagcatttgctttactctttctttatgattgcatctgaccgcaccaaggtgggccatgcgttgtttggtcttatacctgatgaagaaatggcaacagctgacagaaatgggtacagctcatcaaaaatgtgcagcaccggcagagggaagatacggggcaaatgtgcttcctgatgcttccatggggatgtgccctggtgtgcatctgcttgtcaggaagagtcacattgctgcttaacatgctggattgccctagtcttcagaatggtcctgagaaaacatcactacttcgatgttctactttgctttccaaggagcaaaaataactttggagccttctgggaagtgtgcctgggattcttcagtggtttcaggcagatagttgagactggggctttgatattcaaggtctttggcaagattcccagggtttgacccactggtaccaggtcaaagatttttgtattcttgtgaannnnnnnnnnnngtccctattgcccagggatgtcattgtaaatatatgtgcatttataaataatttttgtattcattgaccatatgtgttggctgcaatgtaaatatttttgatatgccagaattatatgtaatatccag

SEQ ID NO: 328228 - DNA, 775 bp, Homo Sapiens
gttttcataaatctaactaactcctatttgaaagagatgactgcatttatgcttggtggtcttcatgttacaatgaacatgtctttagtttcttatgatttgtatatgccacttgtttacaagatagcctagggttttccatctatttttttatccagaggacctcagcttacatctctctattaacatctatgcctaatgagagaaggttgcttccctgtgacttatacaaaatcagtgaccagctgtggcattaatgggaaggaggggccaggaatgcatctcgggtaatatatcagtgttctttttcttgttaacttagtttttaaatttctcgcccatgtatacctttcgagggatctccaaaagcccatgtatatactccttccaagtttctctcactggccatagaccattaacgcatcaagaatggaaaatgaaggtagccataggccaaaaaatacctactccctgagtgctctgcattctgatccagggatagcaatgatctcaatcaaaagcaaatccctcgcaacttctctaagatctcctctcccttcctgtacaatataggactattcagctcttaacttgatggagaagaaaaaatgagggctttggtgatgagttgaatcctcactacagtttgttaactgtgtgaaccttgatcatatcaccacctctgcatttgtttctgtatctataaaacatgcatgataacccatgtagagccattgcaaggattaaaaacattataagtaggtcgagtgcaagt

SEQ ID NO: 328229 - DNA, 688 bp, Homo Sapiens
  misc_feature (12)..(12): n is a, c, g, or t
  misc_feature (398)..(398): n is a, c, g, or t
caggaacacaancatctttttaaaagcatgaaatatttccatccatagaactaaaatggatttttctcccgatttgtaacaaaaaagcttttgggatcaaaactgtataacccagagcaatgttttagagcagaatcataagcccctgaaaaataggagtttataacaaagacataaagccacaccaatcatcataacaaagactatgcctgtggagtacacatgtaacatttcttttgatgaataatgtatgtttctagtagatgtatcattacgtacaatttgtgttagacttgtaccatccctttagcatactaggattttgaattcactttacccaaacattactcaattttcaatacttcaactactttgaaaaagtaacagccacggtggcnactgaacacctccatccccatccatggaaagaaacatcgagaaatgaaggcccaatcttcaaatattggatctcttcaattgctgccggcagatatgagctagtgaatgatagtagtggttctcaacaaagatctcaacgagtctcaagaagacaggcaaaagacttacatcactggccattgagatcagtggcaaagaaatgtggtcctgccagcaggatcagcacacatggcaggggaaatttgggatgatgaaaggaaaggcaggacttgacacctcagctagtctg

SEQ ID NO: 328230 - DNA, 723 bp, Homo Sapiens
  misc_feature (427)..(427): n is a, c, g, or t
cttcctttcttccagataaatcttctgggcggttcttaatttttatccatcagtcttgttttataagcaaaatggttacactttgggatttctgaattctgttttccatgtaatggaacttcgcttaattttttccagcttgagtactcacttgtgtaaactgtcatcacaaaatttctcccgaagagagataggccaggcttgctcagtgtggtgtggtcccatgtgatggcaactgggaacagtgagtgggtgggtgtttcctctctcacccactcctgttagcctttctggtgtctctgtgcccacccacacatgatttctgactgctgcaggacaatatggaaggcaccttgtaacacttttattattgttctgggttaaagaaatacctggaaggtcatagtgttgtgcccagtcaatgtgnctaccttctaataaatgtgtgtttgtaattagagaccagaactgcaagggttttaataagattagctttcccttttctgccttagtttctggtattagcagtgaggactttaagcagtgatttgtattttttacttcctctctcaaagatattacagatagtgcagtttttatcagctgcagaaggcagctgttgaagaaagctaatgtgattgttgagagcagagaattggatgatggtaatgaccagaatagttaacctttcggagcatactgattgcttttcctcgtattaag

SEQ ID NO: 328231 - DNA, 424 bp, Homo Sapiens
  misc_feature (328)..(328): n is a, c, g, or t
aatcctttttaacaaggcatagatatttgtatgtatatcctaatcagagacatatggcagcttccgtggacccatagtataatgagaggattatggctttatctttataagattatgtcataagcaataaactctaaagaaaaagacaacctcttcctttcttccagataaatcttctgggcggttcttaatttttatccatcagtcttgttttataagcaaaatggttacactttgggatttctgaattctgttttccgtgtaatgggaacttcgcttaattttttcccgcttgaggtactcacttgtggtaaactggtcaatcacnaaaatttctcccgaggggaggatagggccgggcttgctcaggtgtgggtgtggggtcccatggtggatgggcaactgggggacagtggagttgggt

SEQ ID NO: 328232 - DNA, 463 bp, Homo Sapiens
tctgatctgagatgtcagtgcttttttttgttgctactaatgttatgcacataaggtttgtaacttcttagcccaagccaaagttctatggcagctttggtggacagttctcatatggtttgaggtctttctacctcaagttcctgagtttctctgcctgaatctcttctctggccagagaagcatgttcagcctgagtatgggatgggctggagtgccagggaggtaattctccaagtaaaaccctcaagcaacaaagggcagtaattgggagacagacatcccagtttccttgatcctgcatgggacaattctaaggtgtgtttcatgggctctgagagggtcccagcaggactgagtgcagttgcccacaggagtaactttttcaataatatccttccttattgacttttctcatccttatgtcttacctgcccctaatttccgaggtcaattcccaaat

SEQ ID NO: 328233 - DNA, 641 bp, Homo Sapiens
  misc_feature (302)..(302): n is a, c, g, or t
  misc_feature (631)..(631): n is a, c, g, or t
attatttcaaaaaagtttattattcagcagacataattccaaaaacctttacagaaggatctcttcacttcctgcccacagacattcatacagtttccttattttaatgtcctgggaagaggtagaaacatcttgtcaaaagtcactctttcagtggtgggcatctgcgctctaccatctggctgctcaaatgaaaatcgaaccttgcggaaaatttcctccacatcacagggacaggcatattcttgcatatgttcaatgagtcttccaataaaaacagagccccttgtgggatgtctccnaagaaaacattatctggtgtggaagagcagaaagcgataaaatccttctctatgtgggctttcttaatagcatcatcctcaaactcttctgtagttggtaaagataggtttccagaaactcctactgaatctttaaaccacaccacaccagggctgtcaccacggcaggcctggatgatgatcaccttcggtttgtccttcaaacttgggcagttcttggtattcaacatgttaaagattgcattgagttgtaatatatctgggacttgctcagagtgtttcttcccacaaatgccttcccgaataccatgagacctcgtgccgaaaanaggggtttag

SEQ ID NO: 328234 - DNA, 549 bp, Homo Sapiens
gcaaatgaaaatcttagaaccataagaacgtagtattccaaaataaaaatggatgggctggatagcagaaggtagctcatcactcactgtaaccttgaactcctgggctccagtaatcctcccgcttcagcctcctgattagctgggactgcaggggtataccaccatgcctggctaatcttgggttattttattatagctgctttacaatctgataattccaacaactgtgtcatcttgggcattggcatctgttgattgtctttttccatatggaattgaggttttcctggttctttgtattgccaagtaatttagaattatatcgtggacatttgtttattatgttatgggactctggtcttgtttaaatcctatgaagaatgttgatttttgttttgttttcgaaagcaatcaacctggctgggttcaagtgagaagttctggtcagtcttctgtgggttgaaggttcaatatcaattctgtttcaaagcctttgtgatgctatttgaatctttgcctcggtatatgccacccagtggtaagtct

SEQ ID NO: 328235 - DNA, 768 bp, Homo Sapiens
tggcttttgtacatccattactgatatgtctcccagggtcaggcagaaggaaccagaatgactgtcacacaactgctaattgtcgagacctgagacggactcacccatgagtgctcctgcatgccaggtactgcttgtcgactcgtgcacactggactcaaagacttttgaaaactgctcttgcccctgaaacctaaaactccacggcctgtccttcagaatcactgtaaatctttccaatgatggacggatgaatgccttcaatgattagttaatccccatacacttggatagtacgtgtccgtcattcccaacctggcctgagggggccccggaacagactggtcagaggcagggcagtcatgtgggtgcggctcccagaggagggcccaagtgcagaaatatcttcaacttttaatatcatcagaaaatatcttcaacttttaaccccaggacaagaagtcagttgcgaagtgcacaaaagaaacacactgtggctctcccctccccccagcagtatggagcaaagacatagaaaatcagcagtgacctagacagaatatgtggcaatgcttagggcaatctgttacccaacactgaacatctttaaattccattctggggagtctaagatgtgtttgatatcagacataaaaatttacgtgataagtaggagtcacttcaagttctaggttcataggtaccaaagtgtgtagcaaagaaaaagaacttttatttcttcagtagtttctaatgcagacaaatgtg

SEQ ID NO: 328236 - DNA, 726 bp, Homo Sapiens
taatatcttccaaatatatctgaacttgtttcctacttggacttatttaattttccctgatgtacttcacagatgtgagttgtgcttgggaacacgactcagagactgcgtggctctgacacaggcatcaggcgtgtgcagctcccccgcagtttcccacagcttcaccgtcatccactctcatgtcccttcagagtgctgcccacttcccgcccagcaaaggactgcattactcagcacacagcgacccctgactcagtcgatgtgggaggagatcgtcatcaaggctgatgtgagtctaagaaacatcctgactggcctaagaagaccatcgggacttgccaagtggccccagctcatggggttcattccttcttctcttattgtgtttaaaagtggtataattagcaacttgttgaaaatgctggcttacttcccgttaccagggctcagcacgccatactcccaatcattggtccaagcagacatgtttactaagtgagtgggggatgagaaagagaaaggacagatgtgagggaaatagacagagctgaatagcacctcacaatgaaacacacgaactcctgggaaattctcattttaacacaactgtagttcccatgcgttggaacctaatgtttaccttcataacggctccatcagaaaggcactgtcatcatatgagaaaaccaagggtgaaagattaggtaatttgcccaaggtctc

SEQ ID NO: 328237 - DNA, 557 bp, Homo Sapiens
caggaaagattacaggcatgagccaccatgcccagccttattttacaattttactattgcatttctaataaatgacaaccctgataactgaattggcagtacctttctgtgtttacagtgcaatacaatattgtattcagcacatgagaaagaattctagtaattaatatctagcatataattgttttttaaaacttagccgtttaatacatccacatttatgttcccttaggcaaagacattggttctgaaatgtctgcttacaactaggtaaagtctacacataagaaaaaaaagactggaggccgggtgtagttataaggactgaaagaggattagataaaatctcacacactgaggcaaccaagatttggccccttaagttgtaaataaggattattacagttttatccaggcctcagaaagaggaataaaaactccctgcctctcagattctgacctgtgggcagtgataaaaagtaatcgtgaagcataaacgcactcagaacattccccaaaatgacagttagaaatacggtagcgatgggtgactaacc

SEQ ID NO: 328238 - DNA, 265 bp, Homo Sapiens
tccccttaggccaaagacattggttctgaaatgtctgcttacaactaggtaaagtctacacataagaaaaaaaagactggaggccggttgcagtgcctcaacacttgtaatcccagcactttggttggcttgaggcaggtggactgcttgagtgcaggagttcgagacctggcccaacatggcaaaaccccagccttgccaacatggcaaaacccccatttccattaaaaatacaaaaaaattggccgggtgcagtgctcatgcc

SEQ ID NO: 328239 - DNA, 557 bp, Homo Sapiens
tttttgtatcagaacgttatttattttttatctgaaattcaaatgtattgggtatcctgtatttcctctgggaaccctctgggaaccctgggggatgagaaatctcccttgcagggaggggtcactcccagtgtctgcctcacaagaagagggggtcctccccagctacaggggactgggcagctggccctggtatcagggtcactccacttggctctgctttcttgggtcttcagggctttgggacagcctgggggtgggagagtggcttctgcttcactggtactggccagaaggtgggcagggcatggaggagggggtgttaatatctggttcatttccaccctgctggctgtaaacctttagtcaagtgaggggacgcattctgacctaacatctgctgggctgtgagctgcaaagggaagggcctggcccgtgcgtgaggctggtgggaagtggcagtggggagggaggtgggtcccagggaacgtgggttaactttggggacacttctctttccccgtctctccccttactggtggggagccataatgtct

SEQ ID NO: 328240 - DNA, 449 bp, Homo Sapiens
  misc_feature (48)..(48): n is a, c, g, or t
  misc_feature (60)..(60): n is a, c, g, or t
  misc_feature (69)..(69): n is a, c, g, or t
  misc_feature (143)..(143): n is a, c, g, or t
  misc_feature (163)..(163): n is a, c, g, or t
aagggttccctccccccaactaaacaagggaaactgggccaaactggnccccctggtaantcaaggtcnaactccccaacttggctcctgcctttccttggggtccttccagggcctttggggaaacaagcctgggggtgggnaaaagtggcttcctgccttncactggtaactggcccaagaaggtgggcagggccatggaggagggggtgttaaatatctggttcatttcccaccctgctggctgtaaacctttaagtcaagtgaggggacgcattctgacctaacatctgctgggctgtgagctgcaaagggtaaggcctggcccgtgcgtgaggctggtgggaagtggcagtggggagggaggtgggtcccagggaacgtgggttaactttggggacacttctctttccccgtctctccccttctggtggggagccataatgtct

SEQ ID NO: 328241 - DNA, 450 bp, Homo Sapiens
aaagccgcaagtgctctcttcaaaggcacaggacccagcgggcaggtcgagggcaccggcgagctgcagggcttgcaacgccaggaggacgccccttaacagcatggtcgcgtttcagggaggatgactaggaaggggtgcaagttgccagcccgctgggactggctgctcctagtgaaagggatcgtgggaagcgggggcgccggggacccaaggagggagaagtcgagaggcaaaattgcgctctgagctgcccaactttgcagaaggctcccggagccgagcggtatgctggaaggtgctcgaatggagaaaccgtcagcccggcgctgagcagcagcctcaggtcagaccgcgcccagctggtcctgggcgacgatggggctggacagggaggagacaactgcacactttgaaacgcggccacgactggctgggagaggagaggta

SEQ ID NO: 328242 - DNA, 873 bp, Homo Sapiens
gtcataaaatcctgtgcatatgggatttctgaccatttgccctgcctcttgcaaaataggtctaatggcaggatggtgtcataattaaggctaccaagactgcccattgttccaggctgggcagttcataatgggggcagacaatagtgcaaaaaaaattttacattttatctttagagtgtcagggtcaaattgatttccatggttgaggatgtagccaagtgtggaatcaggtggaataggtggagagttgcccatagtggtttggaaaagagaagaggactttgaaaagtggagggctcattaggtgacccaaattttacctggggcatcccccctttagggccccaacttagtctgtcagacatctctgaccttagatgggtgctggcaccactttggaatggttccctccatcactgaggacctgacttaaagtttttctatctcacttaaaacaaccctttaacgctctcaacttaggcaataataaattccttttcatgaattccctccaccaccatgcaccacacagaccacatgcccggaccctctgacttgtgtaacccttttgtgcatagctaggtgggttttctgtcctttgcccagttgggtgggagaagggaagaatttagcataaataaaagcagcataagtcacctgaaacctgtgagtttgccctggacgagctgctgctgctaactgcatcacacatagggatcagggattataactgaaaaggacagaaatgagtcttttccctttctgggcagggcagccatccctgttcactccttggccttcagaggataccagagagtggccccagtcagttcccctcaattaccaacgagctactaggaaacggccgct

SEQ ID NO: 328243 - DNA, 683 bp, Homo Sapiens
  misc_feature (307)..(307): n is a, c, g, or t
agttatagggttttctctaccttgatagtcagtcaactagaaaacccttctgttgaatatctttctaaaaagtgccccttcttcctgtctcaggaagagttcattgcacatatttgactctttatttgataaatttagggtcttacaaaatgttagaatcccattttgacatccattctcattataggtggtttgaaaaatggtaactttctgtgagatgtgccattgcaaacaggaatgttttcatgcaggtcacacagtctatttatattgtacctttggaattaggaaagagggcacactcagnaacgtaaggacttaggaattaaagggcctcccccactgggccataggcggcacccctagcttcacaaccagttgaaggtggttttggtgtgaacactaagatgccccttcctggttgaattggggctggttcagcccccacctccctcccggccaggtgccattttgctcgtaaccccctgtaacagccctgcaagacacagataacattttatttttttaaaaagttgttagtcccctaaaccaaagagcaacatatactgcagaaataaaaagttagtcatagcaaaggagaagtaacagtatctggttttaataatagctcatatattccattggtacatatttacaaagggccaaactcaactaatttatct

SEQ ID NO: 328244 - DNA, 440 bp, Homo Sapiens
  misc_feature (95)..(95): n is a, c, g, or t
  misc_feature (122)..(122): n is a, c, g, or t
  misc_feature (421)..(421): n is a, c, g, or t
ccacttcccacaggcaccaggtcccttggcacgctccgtagttttgctagttaaggcctgggatggcagtgaatcactgggtcacgtgctaccancttggcaagggaccgccaccctcactnccacgctcacatgagggttgagtgtaagtctacaactctaaagccatagggaatgcctcaaagggcctcttcagggttggccttgctaagggactcccagccataatgccaaggctggctgtcatccctttccagggcccttgtggaatgagaaggccagccataggatttgtaaaggccacgtgggatactaagcttgggaccttcctatgtccaggaggaacagaggctacatgctaggcccctgtccaccaggtcacagtcctgtcccaggtactctctgcttgcccagatcttgnctcctggtcagcttccttt

SEQ ID NO: 328245 - DNA, 979 bp, Homo Sapiens
  misc_feature (661)..(895): n is a, c, g, or t
  misc_feature (908)..(918): n is a, c, g, or t
ttttttttaacactgcagaaaataacagctttattgctacagatgtgagagcatttacaaaatgccaaggaaaaccattccgttttgagtctctggagcctgaactctcaccatgtaccagaaaagaatgcccctctttcgaactttcaaacagttgggattatttttgtttcttatcatcccaattatttgctcaagtttgcctccattgggccccgttcagagtttcttgggctgcttgtactagtcacagctccacttccatctcttctcaggaagaggtgggcacaagacacatctgagccccttagtattgtgatggtggccaggaaatgatcaaagggtagcatttaaggaaatcagcaaactaaagcctcaaatcaaaggtgggacaaatgcattctcaactcaaacaggttgggtaatgctttcataagatacattatgtttttggtgtacacagcacacaaattttattatgtctacaaacagattcaggaaagacctccaggctatttccccaaatgattgacaaagtgcaaaacaaaacaaaaaagaggagagcacaaatgaatagcccacttagaagctgaatagaaagaatgggaagccatttcgtttcataaaatcttttaatttttggccaggcatggtggcttannnnnnnnnnnnnnnnnnnnnnnnnnnnnnnnnnnnnnnnnnnnnnnnnnnnnnnnnnnnnnnnnnnnnnnnnnnnnnnnnnnnnnnnnnnnnnnnnnnnnnnnnnnnnnnnnnnnnnnnnnnnnnnnnnnnnnnnnnnnnnnnnnnnnnnnnnnnnnnnnnnnnnnnnnnnnnnnnnnnnnnnnnnnnnnnnnnnnnnnnnnnnnnnnnnnnnnnnnnnnnnnnnnnnnnnnnnatattccatctcnnnnnnnnnnntcttttaatttttataattaacttttatcatgcagcccaacatgtcatcttttcataaaat

SEQ ID NO: 328246 - DNA, 428 bp, Homo Sapiens
  misc_feature (62)..(72): n is a, c, g, or t
  misc_feature (85)..(319): n is a, c, g, or t
attttatgaaaagatgacatgttgggctgcatgataaaagttaattataaaaattaaaagannnnnnnnnnngagatggaatatnnnnnnnnnnnnnnnnnnnnnnnnnnnnnnnnnnnnnnnnnnnnnnnnnnnnnnnnnnnnnnnnnnnnnnnnnnnnnnnnnnnnnnnnnnnnnnnnnnnnnnnnnnnnnnnnnnnnnnnnnnnnnnnnnnnnnnnnnnnnnnnnnnnnnnnnnnnnnnnnnnnnnnnnnnnnnnnnnnnnnnnnnnnnnnnnnnnnnnnnnnnnnnnnnnnnnnnnnnnnnnnnnnnnnnnnnnntaacacgcatggcctggccaaaaattaaaagattttatgaaacgaaatgggcttcccattctttctatttcagcttcttaagtggggctatttcatttgtgctctcctc

SEQ ID NO: 328247 - DNA, 459 bp, Homo Sapiens
  misc_feature (111)..(200): n is a, c, g, or t
ttctgtgagacgtgctagcaaattatagaacctgagtagagagtcatgggaattcccaaactttgtagtccaagtgggacggaaggtgtgggtaaccttggaaacctgctnnnnnnnnnnnnnnnnnnnnnnnnnnnnnnnnnnnnnnnnnnnnnnnnnnnnnnnnnnnnnnnnnnnnnnnnnnnnnnnnnnnnnnnnnnatcagaattgaaatgaattctaggacactcagttggtactggaaaattggttggtgtggagggagtccctccaccctccgcatttggtgtcagaagtgctgggagtgaaaaaccgttcagaagggtgatggcaaaagtgtaggaaaacatggagcattccaagaacagggcaaccaaactgacctgaggaaagtgaaagaagagattaacatttactaagtctggtactgtagtaccagaaattttagtttaccttatt

SEQ ID NO: 328248 - DNA, 656 bp, Homo Sapiens
  misc_feature (615)..(615): n is a, c, g, or t
aagaaaattacttacttatttttgcatgagaccctggccttttaggatacaagtgaaccacaatgcaatacagaagggtcacggcatgtaaaactgcacattgttcctgtctgagtcgtgatgaatggttttggacagtatttattggcatttttaatttctactagaaaaacattcggaaacatatagtcatgtgtatcacctttagttaataattggctttttaagctgtcactaagaggtcaatgaaaagggaatcactgatattttcttattcccagtttctgcctttaactttccagagacactggagactgttgattatcttcccaacagaaataaatattttaacaacccttggtgaaagaaaaaatcctgagttctagatagtttaagtttgttttcctaagccctctaaaaagctcaatttttttggcctcctctcttgcctttgtatgtgcaaaatgaagattctagaagaaactttctaagtaattatgttataaaatctaggtcatggttttttttctgtattaaagggtacaaaatttgttcattttttaacacttctgttttattaatagctttatccaaataaggtattctactttttgntccccatctttccttctccttcattccctttcagagtccca

SEQ ID NO: 328249 - DNA, 955 bp, Homo Sapiens
  misc_feature (877)..(877): n is a, c, g, or t
gcacatcattattagggtttatttagcccagtgtgtaatggtagaagaaccagtgggggaagttagggtgcaggggaggtcttccccaagacatctcagtcatgtctgagcgtcactttccctagtaaagttaggacattggattagatcttaaagtccctggttgctcagatatcctaaggatcctagggcatgagctggctggatggatgcacagaacccctagggatggtcctcatgagtttaaagtgtgatgagcagcttagctggatggagtctgattgttaggtggattctgggctggcccacacgaggtccctccacccttgttccctcccgggaagattactgtggcatatgtcacaggcttggagcagaccaggaccttaggaggtagagggggcaatgaggatggagctgggagtgaaggttttcctgatggggaatcaagaggtaggctggtgtaggtggtattgtcaaatgaaggtggtgagtcaagcctaatgtgtggtacatccaaaggcaattcagcagccggtccagagtcactgacgtggtggaccactgaggagggattcatgcctgaaactctgctgctcaggaatcggccacagacaccaagcctgttcccttgtttccctcttggcccatcacagcaaaacagcaccaccgctgcccaccagcagacctacccaggagcacagcaccccagatcaaggggatgctcttcctcatccctggctgggttcccaaagggttggcactgcctgccagggtctgagaatgcgttctcagccagactgccaatcttatgggtctcttcttcttcctctgtcaggccaggaatggagtcagaaggaaacatttaatgagtgcnatgcccatatgggcaggcttcaatatcctgttgaggtctgagggactggaggagtggagccaaggaaggagaggaccc

SEQ ID NO: 328250 - DNA, 946 bp, Homo Sapiens
  misc_feature (666)..(666): n is a, c, g, or t
tcatcaaatagaatttattatacatttacttttgaatcacattgggctgggtattacttaaaacatggcgaatagaaatagttcatacctcttagaagcttatagattaaatggatagtggtaaacacgcatatgtaaaaatcatgcacacataatacatacttagtagtacatgtctaaacaacatgaatacatgctaaactaaattacttctagtgcttttagcataatataatggaaaaatagtttttaagtgtgtttagccatctgattagctgagacacaaactctccctggaagcctacagctgaggtttgagggggaagagggaaagctttcagcctatacaggttgggggattggaacagagaccctcacataacactgggacctccaaattgcaaagagttcttacctttagagatacacagatgaaactataggatgtctggcattttcttcaaaataatccaggggtgggaggaatgggtagagattacagatgcaaaaaagattgactatgagtccataattatagaagctgggtatggctacatggaggcttattagaatattctattttgtatgcttgaaattttctaagataaaaagttttatttaagaaccattaaaagaaaaaccaaaaattgtgtaatggaattgaancaaagctgacacaagatgagaatccaaaatgtctaaagaacttctagaaatcaataagagaaagacaaagaaacccattgaaagatggtttaaacaaacaaataaaccgacattttatgaaataaaaaaatgcccagaccaaacgtcagaagatgtgcagtctcattagtaagcaggaaaaagcaaattaaaaccacaatgagatattctgtatgttatgatatgctaggtaatattgttgccaccaacacccaagaatcataccaacaaaattttactt

SEQ ID NO: 328251 - DNA, 798 bp, Homo Sapiens
  misc_feature (135)..(144): n is a, c, g, or t
gacgattaaaggaggttatttatgtaccatcaaatgcttgtgtatcctgtacacatcagtttagaattctctcatcaacccaaccttgtggcaacttccaaacccctccatcatggccttctaacttttcaaacnnnnnnnnnngtaagccacttctctttccagacctctctgtagtggttcctaacgtcttccctttaaaccttctaacttgtgtttgctatttttatgacttcctcctcccagtgcctggcttccccagctggggattcaccttgctttggtggccactgttttgctcttctcgccttccctctctccatgggcctgccaggcttagggaaggccgcaggtgcttagaccttgtccaatgcggtgctcattgaacacgccaggttctcaaacaaatgttagggacagctggttagacgggaatctgggcctcccctgcttgctttccgcaacatttcttgagcattgctgggtgtccaaggcagggcgagatcccagagcagtcacgaccggatgtatgattggtgctcactgcacagtgctggggacgcacagggaggatgcccactgatggtgtagggggtggggacttggcagagggagcagcatgtgtcgaggtctactggttctccaagtttggtcccagagcaaaggcatcagcatcacctgggaacctgctgaaaattctaatgcttaggcctcactaccgacctaccaaagcagacactctgggggagggaggaggggcactaaaaatctgttttatcaagacctccaagagactcc

SEQ ID NO: 328252 - DNA, 693 bp, Homo Sapiens
  misc_feature (643)..(651): n is a, c, g, or t
ggggcggctctgtgggccattgctcccctccacctctcaaaagaccttacagtatttcacagtatctctacccgcacgcgagtattacagtatctagctggaatatccccctacagccccccaggaccctatgaggaagggaaggagccagggagagtgaagtaaggtctgggactggggaggtgggatctgaatgaactcatttgcatatcatttgcatcctccgcttggcagccgctttctacaaactcattcactgggagtctgggtcccaatcagccgggtccaggactcctctcacacagacacatctccggaggctgggcctcctgaaaagtgtttgcttggggtgtctgtgtaacaacccctccctattcatatttcttggggaccccctacccagccagccagggtgatctgaaaggtatactttgctagctcagtgagctagttcactcaccatgttggtgagcagagagccacacctttccccattttaccctgggaaactcactccaccatctttgccatctcttgaaagtcccttctgcaatctgacctcaatcttttgtgctgcagtttgtccagaggggacacagatgtggggtcagggatgaggattattgaaaaacccatcatctcnnnnnnnnnccccgtctccctattagccaatccgatctcagagtctctgag

SEQ ID NO: 328253 - DNA, 900 bp, Homo Sapiens
ccatagggctcggcgtgggaatgaggttgctttcagagcctatacgaggaggaatactgagggaatactagacatttctttgtaggtattttgtggggaatgaaaagataagattcccaagccctaagagcctttccctaaattctctaggtgtgtgtattttcagggaagaggaaaattttaaatcagcagcctacttcagcattctcatgaaactgaattgcaactagcatttcaactaggttaggattccttttggtatgtggagggggaaagatctgtacaaagagaagcagcaaaatatgaaaaaaggccagagctgtattctccccagtggctagcctaaccaaccccggagtgtccagacctaggaaaagaaaaggctaacggtcctggggctcacccggcacaagtgcgagcctcaagggcacgaaacagcttacaaaaggccatttggcactatgtctggtgctggtattcttgtagactcattcttgatcatataattgaaaaaagacctctgcaagtgatgggggagaaaaaacaaacccacattctagggaaaggtgagttggtgactcagcagctcctgtctagtgtgacacttctggagaagagtagggggccatggtcagggactgtgtacggcatcaagccccacatgatgtccccgtgcaacagggagcatggaagagacaggaggaagagcgggagggagagaacatggacttgagtgccggggagatgctcacactggcacagcagaacagtggggaagactcagggcaacggcaacggcgggagtgggcagctgccgagtaaggggtgtgagaggagcgtacagacacgtgtcccgtgctccagtagctttagaatgtcgtgaatagtactccattcacg

SEQ ID NO: 328254 - DNA, 746 bp, Homo Sapiens
ccaatgaatatttttctgagtgtacaccagcccttaaataacctgtggttacctttaagaaaaacgaaaccaatggaattgtataatgcattaaaaccattagaaccaatttaccttcatggaaggggtcaaatatcccgggtgaggattgaaagagaaagaccgattccggtggggacatgggcactggggaatgctgcgtagtggaaatcttctctcttcctaggaaaaccaatacaactgagtctaaatgagcctaaccacacagcactgggtttgacttgaaggaagatggctgtgagggcagaatagagaaggaaaggtccaggggaggaaggggaagtcagtgggaataaagctgccaggcactgaagcttttgaggaagcacctttgctttttttatgtccccagcccctcttgtaaagaaaagggcaagctgatgccttaggaaattgaaaattcaactgttcttagcatgtgaaggtaacctaatgcagaaagttagtaattaaggcaaagaaagaaaacccccaggtatgcaaaggattttgccgcctttcttcctctgtcttgtttgacatttgtgttgcctaacatatacaaacatagggagagtaatgaaatccatccccactttacctataataactatatggccgatcttgtttgtgtgtatcattttccacttttttctctcctgctgtattattactaaattccagttattacataatttttctctgta

SEQ ID NO: 328255 - DNA, 395 bp, Homo Sapiens
  misc_feature (265)..(335): n is a, c, g, or t
  misc_feature (343)..(343): n is a, c, g, or t
  misc_feature (380)..(380): n is a, c, g, or t
taaaacaggcttactttcaacatccatttacaaacatttgttgaaaaatattttaggagtatttgtttaaacattattccgaatttactgctccataaagcctagtgaatatttaaattcttgaatatgttgccagaaaaagaagcagagatccaaaaacaagtatatgaccagagttagagctgaaataatagcttgttgaagaagagaaaattgtaataaattgctttatcaaacttgctttcaaaacctgttttttaagttnnnnnnnnnnnnnnnnnnnnnnnnnnnnnnnnnnnnnnnnnnnnnnnnnnnnnnnnnnnnnnnnnnnnnnnctcagggngttcaaggacccagcttggggcaacataggccaaggncttccatcctcaaaa

SEQ ID NO: 328256 - DNA, 418 bp, Homo Sapiens
  misc_feature (387)..(387): n is a, c, g, or t
  misc_feature (390)..(390): n is a, c, g, or t
ttttgctctcatccctggaggtgtaacagccttttcccattcagtactttatttttccagatagttcatatggagtagaaggaacatactatatctgtttctgtactgatggatcgtgttcagttgtgtacatttatctctgaggcctgctaatgccatctgagtttctaaaatccttatttttgcaaatccatttgtgtcctggggtttagctcctgattttagggattagcacagattacagggtctgtctgatgccttctccaagctttgtatcagatttatgggctatggaattgaggaaggcttgcacataggataggcgtgggaaactaggagggcaggatacggagcttgatgggggaggaaaaaaggcaaaagggagcntcnttgttaaaggaattggggagttaggttt

SEQ ID NO: 328257 - DNA, 483 bp, Homo Sapiens
cacacattagtcattttaaaactatgtattctttctttggagttaaaagtcagttgttgacacttaaaactgaagatgcttgtggagggctggcaggagccctcagcagggagcgttatgcatattctataactctgcttctgaaatctgcaccagggcttctgcaatttatgtctcccttcagctcaaccaggtgccttgtacccaacacagggcaattcctgagagttaattgtgccttgttatttcagcaggacttaggatgaaggtgattaccagctgtagttattcagtgacatttcaattctcctctctcagactcccccttacaaagcttttctgccagcagcccaagacaccttgacttccaccaccccaacacccatggaataacttctaattgtctgcctttcaaagaagtgaactccatagctgtcaacatttgctgtactaattgtttgtacatttggagttagctgaaag

SEQ ID NO: 328258 - DNA, 584 bp, Homo Sapiens
taaatgtaaaatttattttatatcaaaggcaagtgtttagctctggttttcaagagaagccagttggttccatcaggaaaaaacaaagatgtctaccttgcatgctgctgccggactctgacagccacacaacagcagccacccgatggcatcctccagagaaccagagaatcgtggaggtaagagggaccttcaggagcctccacttgcagcatcatgacaatgggctctttcttatccaggatcttattgaatacttcctgtgatggggagctcacctccacatgaggcagccagtctattggctggcaatgctcatcattaaaagtatatgtgagaatgaataggcattcctcttcctgttgatcacttattgaacacacacagaatgagtggctggtctgacagcaggtacttggctttgctcactgttgtatcctcagcaactagcatggtacccagcacagaataagcactcagggattatctgtggaatgaatgattgagtaaatgaatggatgaatgaataagtagtatttatcagacactttaggctctgatgattcagcgctgagcccctgaca

SEQ ID NO: 328259 - DNA, 880 bp, Homo Sapiens
  misc_feature (867)..(867): n is a, c, g, or t
ttgaatttttatttatgttatctgtgaaaccaacagggcatctggcacacattttagatttttcccatagacatgaacatatattgcatatttagttctttttgaattttgctcgagctatatggaaaagcaaaacagagcaaggagaatgatgccaattgccatcgtaaggccagttacatgctggagatggactacaggccactcaggcacaaagaagactctgcctcaagttttagttccttagtcctaatataagagaaaagtttatgaatgctaaggagagctctcccctagcagtgggtgtttccatttatttttcctcattgtgatttctcaccttgctcctagatgacctgagcacgaagttgtgcgttataaatcacattgttagttttttagtggtgggaattggatctaaaccacaatgactatgaaaaagtgagctggggtcctgactacttgctatattgcacggtactatactttgtgattcgacttcgagctgtgctaggggaggcggacccaatggtttggttaaagtgatggtcagaggaactcctcatgtggccaatgctggctgtccctcccaagctgctcaggccaatgccaccaccacttatgccagctccactcagggcaccactccccagcacccatgctggtgccaacccaggccactgctgcctatgccactgctgatcccagtggtgccactaattccagttacgccagcaccagaaacaaccctctctgtcacaatgacattgtgggcattggctaactcggggtgcatgctcagactacctatcatgccggaagttggttggattactctttctgtcactaccacatttgaagactctnctaggatgatgga

SEQ ID NO: 328260 - DNA, 270 bp, Homo Sapiens
taacctaaagagagcaggatacagacaaaaatgggggagtttggccacagtcattggcaacttgggctcccagtggagaggggctggtatggccccagcggggagggagggacaccgcaacgccattgctcagagctggttctagatgatttacacgtaatcactcaaaatagagccaatcacaggccaggtgtggtggctcactcctgagtgagctgaaattcgcgccactggcactccagcctgggcgacagagcaagactctgtctc

SEQ ID NO: 328261 - DNA, 480 bp, Homo Sapiens
  misc_feature (49)..(58): n is a, c, g, or t
gggggtctagaatccagcagaaaggctattcaatctttctgctgccatnnnnnnnnnncatgctgggtctatcaccagatggcctctgaatgggctaggacactgctgagactggcctagctatgaacactgttgtgttctacaccccacaaggtctttcccagacaagtgtgccaagtaactagagaaagaggaaaacatgcacaggtgcctttgaatcatgtaaactgccgaatactaaggtacctgatcctttacaagaatggacattcacaatgttttagctcctgagcagcctctcaggcctctcgtgcctggagacgagggcaggtgaagacaaccctaacccaagacactggctccctgtggtctgtctctgcaaataaagctggtggaaacatcacagatgacgagtcgtgggagaaaaggcgaggggcacagctgagatccatttcaatatctgagtaatactcttgccta

SEQ ID NO: 328262 - DNA, 1006 bp, Homo Sapiens
  misc_feature (395)..(407): n is a, c, g, or t
  misc_feature (421)..(475): n is a, c, g, or t
  misc_feature (920)..(962): n is a, c, g, or t
  misc_feature (985)..(985): n is a, c, g, or t
gagggctacaaacatgaggaaacaagtttacaagctaaagctggtggaaaggaaagctagggaaaaagtaggagtctgacagcattactacacagttgaactactgccagcaaccactcacctctagacctcttgctaggtaagaaaaataactccaggttacttaacctctgccaggtttctttcacctgtagccaaaaacattccaatgcagacacaaaactttccctagttcataataaaattagaaaaataagtaaggtaataaaattttcatagatctggattcattaaatttaaaggactaatctttgttctgaaattatgttattcccacttttaaaaaattaaaatatcctttcttttatgaaatgacggtatttgtagattgtaannnnnnnnnnnnnagtgtctttggtannnnnnnnnnnnnnnnnnnnnnnnnnnnnnnnnnnnnnnnnnnnnnnnnnnnnnnatttcagaaagtctttctctaatttttaaaaattcttttacttagcttgtgaaactcaaaagtctgtgatgagaagaatgctagctaaacttgctttgaagggctagaaccagtggtgtgtgctggagctgctggcagcagttaccgagagcagatggttaaatttccaggaagctacttggcatcacctggatggtttgaaatcccaatgtggcgggagtatttgcatccatggaaatctgcaaatgctataaatcaaaccacctccccttccccagctggtcgtttaccagcacaccactgtctccagcctgcctcttgcaagtagccagagggtaagcatgcaaggtacagctcacaccaactaaaactcacatgggattgaggtaaacttcatttactagtttatacatttacaatggaaaatattcttggcctggtcggnnnnnnnnnnnnnnnnnnnnnnnnnnnnnnnnnnnnnnnnnnnttagcccaggagttcaagaccancctaggcaacatagggagacc

SEQ ID NO: 328263 - DNA, 416 bp, Homo Sapiens
ttttattcaacctgtcagttcaacccatgacagggatgatttttgagattctgagctccccttgcttcaactgctaccctcttctaaagtgaccattgaggcacctcgaccgagccttaggactgcccatcctgaacactgaaaaccactgggccagtgccgtctccccatattgctggatcaggagaatcatctaaggtctttcttatacacagaatccctgagccccaccccaatctactgaatcagaatcttgcagtctgtgtttctatcaagtgctggagggcagtcatgatagactagtcaagttcataatgaacgctgtgctaggagcagagggccattttgggaaactgggacttgaaaagggcaggtttattaggggatgtttgattttcagggctgaggggttcatt

SEQ ID NO: 328264 - DNA, 1006 bp, Homo Sapiens
ttcagggtctttctcggttgatagtaactttttcccagatttcatgacagactgttaaagatgtaacttcttcatctttatgctgcttgccattagcattaactgatattctgattcttctgggggctgtaataattccatggtcatgggaatatttttaagctcctttggcaaatccaatgctccagctgtattcttctgcaccatcttgtccatctacttggcaatgggaaccaccttgtccaatgtggctctggcaggtcttccccacacccagccagctggaggtgagaagtgtgtaaaactgaggtggaaaggatggcaagaaacaagcctcagtggtcctgacaggctgagccaggctcttcctcacaaaccaagcccacaggggcaacctgatttacatgtttaaaagatcactctgactgttgtgtgaagaaaggacggatagggaggaacatggagaaaccagttaaggaggctgctacagcagtctaggccagaaaatcacagcctacactagcagctgaagctgtagccagctgagatgtccaacaagccaatcctactttgaatgcattttggaatagaacaaacagaacttattaatgggctgcatgttgctttgggagagtgttacttactgagataaagaaggttaggtgaaaaagcaggtttggggaagaaaatcaggaattctcttttggacttgttaaaccaagtagaatgcctttttgtataacagctttcactcttataatcagtaatatttcacgttctcccaataaataatcaaaatcaatcaacatgtgtgcagaatccaaaatgaaatataagcactaataaataagcatagctgtattacaaatgaatgaggaaaccacactaaatggattgaggaagaaaatatattaactatactatagtaacctagctttggagaacagtgttttgactagatacgataaggctaaaaacaaaaagaactataggcaagtactgtact

SEQ ID NO: 328265 - DNA, 344 bp, Homo Sapiens
tttttcggagggcagaacaaattcagactttattgtcagggagaggaaaaaggggaggaccgtgggtggggggcctgggttgctacattgtcaagcagaaagagttgatgggaaggggaagaccagtgtaggccagacccctcccgggtcggcggctgaagggttgacgatacggaaaccacggagtcgggggtgggggagaggtgtcacacccccgcccgagttgtgcagtggaggtgactggtgggaggggacagccatgaggtctaggaacttggatcggggaggctacagactcggcgaatcctgcgaaagggaagggcgggggcgaggcttctattgct

SEQ ID NO: 328266 - DNA, 423 bp, Homo Sapiens
aagatgacaaagagcatttttgaatttatttttgcagactgccgaggctggattcaaagagtggacaccctgtccagtccacagtccacaggcctctccctccttacaagctgttgcatgcccactcccagctatcctccaactcccccaaatgttaagtgattgctgggaaagagattggagcaaatggataaacgcaggtccctgaggcatgtcctgggcttttcaacaaattcaactgcagtagatttttatctctaccacttcgacctgttttccaaactttctggtacactcaccaacgctgggcctggttaaccatcaaaggcacctgaaccttctacttcttagttgaaaaatgcaactccacagccaggtctggcaatctgtggctccaacacacttcttgcatgcttgtggcct

SEQ ID NO: 328267 - DNA, 428 bp, Homo Sapiens
  misc_feature (55)..(107): n is a, c, g, or t
  misc_feature (213)..(275): n is a, c, g, or t
attataaatttatttttatttgtttattttgtagagacagggtctcactccatcnnnnnnnnnnnnnnnnnnnnnnnnnnnnnnnnnnnnnnnnnnnnnnnnnnnnntgggctcaagtgatccctccacctcaccctcccaggcagctaagactacaggcatgtaccaccatgcccagttgatctttaacatttcttttttttagagaccacnnnnnnnnnnnnnnnnnnnnnnnnnnnnnnnnnnnnnnnnnnnnnnnnnnnnnnnnnnnnnnngtatgagccaccttgcctggtggttcctggcctgatccaagataatttttaaaagaagcagtaggctcgagaggctgagacaggaagatcacttgaggtcaggccaagagttcgagaccagcttgagcaacatagtgatacacactgtctgtt

SEQ ID NO: 328268 - DNA, 722 bp, Homo Sapiens
aatgctgtgagtttccttttggttccaagcagaaggaggtctgcatcaatccctaccactataagagagtagaaagccctgtacttcctcctgtgctggttccaagacacagcgaatataatcctcagcacagcctcttagctcagttccgtaacttaggacaaaatgagcctcacatgccactcaacgccacttttccagattctttccaggcaacccaacagccacccgtttcctcactctcccaatagcagttacccaaactctcctgggagcagcagcagcacctaccctcactctcccaccagctcagacccaggaagccctttccagatgccagctgatacgcccccacctgcttacctgcctcctgaagaccccatgacccaggatggctctcagccgatggacacaaacatgatggcgcctcccctgccctcagaaatcaacagaggagatgttcaggcggttgcttatgaggaaccaaaacactggtgctctattgtctactatgagctcaacaatcgtgtgggtgaagcgttccatgcctcctccacaagtgtgttggtggatggtttcactgatccttccaacaataagaaccgtttctgccttgggctgctctccaatgttaaccggaattccactattgaaaacaccaggcggcatattggaaaaaggagttcatctttattatgttggaggggaggtgtatgccgaat

SEQ ID NO: 328269 - DNA, 830 bp, Homo Sapiens
  misc_feature (66)..(66): n is a, c, g, or t
  misc_feature (78)..(79): n is a, c, g, or t
  misc_feature (81)..(81): n is a, c, g, or t
  misc_feature (83)..(83): n is a, c, g, or t
tcatgcactttaatgaggtccagcactcaggaggattagcgcccaccaccagctgcctgggagggngagggccggagnntngncaggcgtcaggcttaggacagggaagggggctcaggatggggaagggtcctcaggccaggggaaggggctcagaagagagcagggggcttaggacaggaaggggcactcaggacggggcagggaaggtttggggggcagtcgccacctgggtaggaagcagtggtgttttggacagcaggggttggtcctccagtgacccaggtggccaacccaggcctgactcacggctttttggggacatagtggtggatccagtccaagtagtaggtgacacgggtgtagatgccaggccggttgggctgggcacagccctcgccccagctgaccacgcccgcctgcagccaggtgccattcaccttgcacaccaggggccctccggagtcgccctggcatgagtccctccgggtgttccccggcaacacagcatgtcgtccacggacgaatgcggacgtcgtctccccgtgtaaggcgcccaaggtggtattttgcgtcacaaatgtggttttcccattatggggaccttcacctgcttcagaggaaatggcggtgggaggcgctcatcattgtccacatcgccccagccagtgacccagcacggcaatccccggggggaaggtctctgaggcagggggcagggtgaccgtgtggacgtggctggagaccttcaccggctcctccagctccagcagggcgatgtccgctccgatctgggcggtgtagaactgtgggtgcacgatgatcctgct

SEQ ID NO: 328270 - DNA, 697 bp, Homo Sapiens
  misc_feature (420)..(478): n is a, c, g, or t
  misc_feature (503)..(528): n is a, c, g, or t
atgtgttaaatgtagaaaagaatctttaccttataggctgatgaggggttacatgggatagtgcactggcttacgcacctagcctatgcttggcacatagcagaaaaccaccaaagctgaggtttttcagaggtctctagagggcaaataccatgtcctcatgggtatccttcccacctacccatccactcaaaactgacacagatcagtggacatacaatcaattattgtgatcgcctttcattgagttccataggtgtaaggacctatcatttgtcaaatttcattacccagggataaacatgtttgacagggtagtacatatttttatgtatctggtattattttcatattcttttatattctttttaccatgaacaatgtatcttggcaatattttacattagacatgttagatannnnnnnnnnnnnnnnnnnnnnnnnnnnnnnnnnnnnnnnnnnnnnnnnnnnnnnnnnnggctatagatgaacattttggttgnnnnnnnnnnnnnnnnnnnnnnnnnnaaagtaagcttgcttttcaccaacaaagctcgtgcaaagatcaggtactcaatatatttttgccaccttataccactgtattttaggatcttcccctattagttccttaggtaaatccttagatgtgctagatttgctttcagaattataacatcattttctaccccca

SEQ ID NO: 328271 - DNA, 578 bp, Homo Sapiens
atgagcaccgcacccgaccaagatcacagtaaattaatacattcacttaagtttgcgcacacttcttaatgtcacatggtatatttatttgttcacattgttatgccccttagtagtattttaaagttctttcctaatagttctgaacctttaaggtttcttccacaatactttatctttttactgctattgtaaatattagttttcttcaactatgtattctaactgaatatttgtaaattgagaaggctatttatttgtagatattaacttggtacccaattactttatttaactttttgtaatttaaaactatgtcaatgacgacagcgggggcggggtgatttccttagaaaacgcatctttggagacgtcagtagcattctccattacttcacaaaatccatacaacctgagaacgcctcgactcattaaggaattaagacacctaggatttagtccagactcatagataaacactgcaacaattaagctttcttcaaaaaatgaggataactgtgcctaacctaaaaccgttgactccctcatcctgggcgccgttatatgggattgcttct

SEQ ID NO: 328272 - DNA, 321 bp, Homo Sapiens
  misc_feature (269)..(269): n is a, c, g, or t
  misc_feature (294)..(294): n is a, c, g, or t
aagggactgacaatagtttattaaacagtcccctacggacagacatctggactatttctaatccacattttgctattacaaacaatgttgtaatgaataacctgaaacatgagtttttttcatatgcatttcttgaagggggtttgctgagtcaaatgcatctgcagtcttagcggttattgcaacttctctttcattggggttgaatcatgttgcgttcccccacggcatcaccaaaagagggtgtcatccaaccgctgaaggttttnccaatctgtgtccatgggttctcantggttcaactcccacttatggggtggg

SEQ ID NO: 328273 - DNA, 628 bp, Homo Sapiens
cagtgaacaaaattatttttttaaagcacataatccctagtatagtcagatatatttatcacatagagcaactaggttgcaaatatagttcagtgacatttctagagaaactttttctactcccataggctcttcaaagcatggaacttttatacaacagaaatgttgacagaaattgctgtagtttagggttgaagtactgtatgatgggcagcaatcatgtattaacttagaaggggaaattgaaatataggaccgaatttggttttatcagtttccagagtactgctgccaacctagacactgatttttcagagtttgaaatgtaaatttcttcccgggacttgattgcacatgaagctggactgcgttagtcatcctgtcccaaagcgctgtgggggccagggtggaggtctcaaggcatcctttatgacctggccattggatgtaaaagaaaacatattccatgctgtggttcttgtatcttgtttcattcctcaccattgaaagagaaagtccatgtattgtctccagcacatccttaaaatgttatactgggatggattactgatgcccatcggtagttgagccccagaagagggtagtagcatctctgcctcaggtgatg

SEQ ID NO: 328274 - DNA, 724 bp, Homo Sapiens
  misc_feature (650)..(650): n is a, c, g, or t
gagtgtctaccacatgccaggaatgttcatctgtgctattttatcttcccaaatagataagatggttgagatgattgtctcattaatatctgaagacacaggctaagagaagttaagcaatttgtccaaagactcacagctgggtaatggtggagccacgactccaaacccacccctgcctcctagcatccagtctcttatgtcccatggggcttctcagtcagggactcctcctcctctcccttcttgaaagacaccttcttgaatccctggaccaaagatgcttccagaaatggtagttgaggtttcttggccccctttgaggagaggattaggcggctctttcacctgctgccttaagtacctgctctgggcatgtggatggacctgcttgaggtaatagggcgacagcaagagtggaaaccacgcacattcactgagccatggggcctggatattccttcatgcccatgatcaagaaccagaaggagggacaagaggagatagactgtctccacgtacgcatagctggggagctaggacagaagtgccacccccagcgcagccctcatgtttcctcactgcctgctagagaaacacagagctgaaagtgtcagttcagccaccgcagtgtcactcaaccaaagcantggtgagcctttgcccaggaagcagcaggctgggctgctctttgagcagggtaggcacgttccctgcatggggc

SEQ ID NO: 328275 - DNA, 920 bp, Homo Sapiens
  misc_feature (815)..(815): n is a, c, g, or t
aattttaattatgccagaatccctgagctgcaaaaagttgccttcttggggagtcaaagcttttaaacaaatgaactggaacctcagcgcccactgagctatgcagaagagtcctagaagccagcgctccatgcttgccactcattgtcctgtgaaacttgggccacaggatattttccacaccagtggaaaagacatgtatcataccgaattgtgccctttgatatcctgccgaaaaggccaagatgcaatagtccgtgtgacagcttatccctgagtcctgtacataaatcgggcataatcagcaaagacgttccttagtgtttatgaatgccgcgagctgtcagggctgggtatttgtgaagccttgttcaattggctggagcatgactgaggttgaaacttcacaggtcagctgtggcctgagcgctagccttcatgtcttgtgggggaggggaagaaaaggtactggtaagagtctccaaagcactgatagtggactgaatctgcttgatgacccaccttgatccagggcccctttactccagtgggagaccttatacatttttagtgtctagagatttaagttgccactcttcttagtgtttgaaaactacctttttaattgcaagagggaatataaacatacaccaacaaaagacagcacaatgggaagggcagcccagaggcagtcctgctcattgctgacttcagttcaaaatattttgcatgcctggaattttcaccatctcagaggtttcctctatgagcaattaaagaacagcctatggatcccagagtttccataaaatagntcttatttaacttgcaacatttggtcaggcactctcctgttaaattctttaaatacatctttgttatttaaagaacaaaacaaaacaccgggcacttgtgctcat

SEQ ID NO: 328276 - DNA, 652 bp, Homo Sapiens
cctccaggacttgtgtgttttgttctgcgcacacaccgccaactgttcccccacagtcagcagcaggttgggcctgaccattgggacttgattgtcaagtcactggaggtcttgacttttttatctcagttcatgttctcttccataattggaaaggacctttgtctgtttttcctcttgggtgccttccagaacgcatctcatgtccctggtgagggaattggtgagggcctgctgtgagctgctgtggctgcgatggtcacccagctgggcaaatcactggagtgacaatttgacctgtcacctgagaaggatggtccctcagactgctgggtagagggcctggggcaggctggagagagaaagtgggcagagggtgaaagggatcacaggggtcttggaaggtggcagtagtttggacgggggtggggagtatgtgggagaaaaaaacagactgaaggtagaatccttgggaacctttgaggagcggcacattctggcaggcacgttttctgtgagcctgaagttaggaggagacattctggaggtcaatttcctacatcctcttacaggcggagaccttgaagtggggccaggaaggaaggttggcaaaacctttgaccagaactgtccttcatttacagaaactgac

SEQ ID NO: 328277 - DNA, 949 bp, Homo Sapiens
  misc_feature (52)..(52): n is a, c, g, or t
ttattcacttgggtgttagtgggctgaatcggaaaagggagtcagcccggangtgttgagggagagcagtctttacagggcaaagtggcgggtggaaaattacaacatggttttgggacttgttgactcaagaagttgatcaaccagttggaacagaaacccattgttcttcttttgtggtttttggttgttgcaggttttctggttccaggaagtctggaggcatatgtgccggtcacagagttcttaatggcccaccgtcaataatggcctgctggcaataatgcagccatatttgtgggatatgacattcctgtctttttgttttaataagaaaagaagtggacggggtgatgtttctcagggattcttcgagcgggacttggggcggcatggactcctaattgggagagagatcttggggtgggggtgacattgaggggcagttaggagtagcatttgtcgcatagattgattggtaatagcttgaatgagattttgtaggaactgagaggctagacggaagaggcagggtccaaataggagaaggagaatgatggaaatgaggggcccagctatagggagaagccacaacgcccagctccaaagattggtgttaaaagtctgaaagacattgtcagattttagaagccttttcatttaactgcgaggcagcatctcgtactagtccagactggttggtggaaaaacaatcttcccctaaaaaggtgcatagcccacctttttcgacggttaggaggtctaagccacggtggttctgcagagttactgctgctaaggagtctatttgggattggagagtaagggtggattttgctatgtcttgtaggctgtctgagagatcctttaagagtgtatgatagtaggacagggaaggggacaaacctgctattccagttcctgtggcattggtaactcctagtcctat

SEQ ID NO: 328278 - DNA, 415 bp, Homo Sapiens
taggactaggagttaccaatgccacaggaactggaatagcaggtttgtccccttccctgtcctactatcatacactcttaaaggatctctcagacagcctacaagacatagcaaaatccacccttactctccaatcccaaatagactccttagcagcagtaactctgcagaaccaccgtgggcttagacctcctaaccgtcgaaaaaggtgggctatgcacctttttaggggaagattgtttttccaccaaccagtctgggactagtacgagatgctgcctcgcgtttaaatggaaaagggttcttaaaattcttgacaatgtctttttcaggactttttaacaccattctttgggagctggggctttgtgggctttttccctttaggtgggggccctcattttccatcattttt

SEQ ID NO: 328279 - DNA, 945 bp, Homo Sapiens
gaatgagccactgtgcctggctgattttaaaaatagtattcagtggaacaacatactttcagaaatgctagctcaggccaatagaagaatactgcagaaatagatttattattttcctctgactcaagagggaaaagctaatcttcaacttatttggccaaaccttatattttaaataatacgaagcattacgtttttatcaaaagaacataggatttggaaccaggagatgagctctcttctaactagctgtgtgaccttgggcaaggatcgctttaatcttttctaatctaatttctttcctacagctacaaaagcagaaatcccctggctagagttctttgtggtagatgaattgaagtccatttgaataacatataattaaagagaatacaaatgttggaatggaaatccccagactgtccagtgagaaaatcccttaaattttcctggttcttgttttttgagtgctgaccacattttggtgttgggcttggttcaagtgtcaccaaaggcagggtcagattaaaggtgcacacttgctgaggcaaatcgggaaagtcaatgaagggcccactctgtaggcctgcgcctatggctgtgctcactcagatagccccttctcaaccaggcttatggcggtagttgtgggaaaaaaagaagcagggagggatctttaaaagacccaaaaagttataaaaatccagaataatctagattattaatcctagggggagaatctgaaaaaaagtcagaatcagtgagagtacttgccccaaaatatctctcatcacctttttttccattttatcttgttacagtaaattccactaattagagattcatgtaatctaaactaatttggaaaactggaagcatctctaggaagattaaatagccgttagacatccatgtggagagtaaagttgctcaatcagaccacct

SEQ ID NO: 328280 - DNA, 425 bp, Homo Sapiens
  misc_feature (36)..(36): n is a, c, g, or t
  misc_feature (70)..(70): n is a, c, g, or t
gaggcaaatcggggaaaagtccaatgaaagggcccnaccctgtaagccctggcccctatggctgtgcctnacctcagatagccccccttcctcaacccaggcttatggcgggtagttgtgggaaaaaaagaaagccagggagggatctttaaaagaccccaaaaagttataaaaatcccagaataatcctagattattaatccctagggggagaatctgaaaaaaagtcagaatcagtgagagtacttgccccaaaatatctctcatcacctttttttccattttatcttgttacagtaaattccactaattagagattcatgtaatctaaactaatttggaaaactggaagcatctctaggaagattaaatagccgttagacatccatgtggagagtaaagttgctcaatcagaccaccttcct

SEQ ID NO: 328281 - DNA, 965 bp, Homo Sapiens
  misc_feature (19)..(19): n is a, c, g, or t
  misc_feature (558)..(558): n is a, c, g, or t
  misc_feature (622)..(622): n is a, c, g, or t
gtgcaaagaattttttttnaatgagtgaatttatgtgaaaaacttgacaaagatatacaatttaaatcacatttaactggtacatttagcaattcatctccattccaatgaataaaataacaaccatctgagctattccagaaaaaccctgcaaggcagcctgctcctctgcgtgcggggacgtctgctttccattaggttgaggatagatccagctccccctgctgatgcacttccaaggaaaaggcagacgaagggagaggctgccaggctggcagaagggcacatgtacaggatggccatgtgcaaatccacccaagtggaccagccatattccctgcaatctctgatgcagccaagtccagctgagacattaaacagagtccgtggtgacaggaagctgaggctgcctagagccaatgcgtctggtgtaattgaaaaggtctttggccagtggcactgggggcaacaagtgccgtcctctgagatggctgaggccattcctccacccccttcctctgcggtcttggcaactgcacttgctccagcacaaagaanacgctgaagctgcaggacggttagtgacccaaaagaaagaagggtaccgtcaaattccttctcnagcttcccatcaggacagaggcatcggaagccacttggctatgggttcccatccattgttgtaaccatcaaacatgagcacactccctccaagccaggaactgggcaacgtgctgtgtgcataacccagctatgtgctggtgatgccaagaaaaaccccaggctgccctttcataaggtcagcacccaagacccgggcgaagaaggaaggagagcaaggagtctcccaaaaccagcaatcacttctcgctggttggaccggacagtgctgggagtggaaacaagacacatcctctccactctcaggaattcagtctagtgaggaagccaaggaaggaatgcaa

SEQ ID NO: 328282 - DNA, 428 bp, Homo Sapiens
  misc_feature (18)..(18): n is a, c, g, or t
  misc_feature (51)..(51): n is a, c, g, or t
  misc_feature (62)..(62): n is a, c, g, or t
  misc_feature (88)..(88): n is a, c, g, or t
  misc_feature (119)..(119): n is a, c, g, or t
  misc_feature (173)..(173): n is a, c, g, or t
aaaaaagctgaaacttgnaggaaggttaattgaccccaaaaagaaaagaangggtaacggtnaaattcctttcttcagcttccccatncaggaacagaggcatcgaaaaccactggctnatgggttccccatcccattgttgtaacccatcaaacatgagcacactccctccnaagcccaggaactgggcaacgtgctgtgtgcataaccccagctatgtgctggtgatgccaagaaaaacccccaggctgccctttcataaggtcagcacccaagacccgggcgaagaaggaaggagagcaaggagtctcccaaaaccagcaatcacttctcgctggttggaccggacagtgctgggagtggaaacaagacacatcctctccactctcaggaattcagtctagtgaggaagccaaggaaggaatgca

SEQ ID NO: 328283 - DNA, 294 bp, Homo Sapiens
  misc_feature (262)..(262): n is a, c, g, or t
gaattcccacatttatttaattttctttgggtgtgagttttctgatgttctatgatggaagtgacaggtgttttctgacattaattacactacattaaaaattacctagtactgagccagatgtgaactccacataaaggcttatctttatcccttacactcaaggctttctaaccagtatgaattctgtagtgttcaatgagttgtgagccaagaataaatgcctgcccacactctctacattcgtaagggtttgataccngggggtggaattctctgatgttcgggtaaggt

SEQ ID NO: 328284 - DNA, 1041 bp, Homo Sapiens
aagaagtcccacatttatttaattttctttgggtgtgagttttctgatgttctatgatggaagtgacaggtgttttctgacattaattacactacattaaaaattacctagtactgagccagatgtgaactccacataaaggcttatctttatcccttacactcaaggctttctaaccagtatgaattctgtagtgttcaatgagttgtgagccaagaataaatgcctgcccacactctctacattcgtaaggtttgataccaggatgaattctctgatgttcggtaagttgtgaactacgaataaaggccattccacactccctgcattcatagggtttctcacaagtgtgaattcgctgatgatgagtcagttgtgaaacacgaataaaggccttcccacattccttacattcgtagggtttgtcacctgtatgaattctttgatgttgaatgaggtatgagctacgactaaatgccttcccgcagtccttacattcatagggtctgtcgccagtatggactctctgatgtcgtgtgaagctgtgcgtgctgtctgaaggccttcccacatttcttacactcatagggtttctccccagaatgaattctttgatgtcgagtaacttctgagctgtgaataaagccctttccgcattccttacactcgtagggtttctcaaccagtgtggattcgcctggtgtaacagtcagctgtgagtgctgtcctaaaggctttccccgcattcctttaacactccatagggtctggcccctgtgtggattctccgatgcacagtgagttgggagccacgaatgaaagccttgccacagtctttacatacgtagggtttctcgcctgtgtgagttctttgatgcagaatcagctgtgaatgctgcctaaaggtcttcccacattctttacattcataaggtttgacaccagtatgaagtctctgatgtagaataagttctgatgtacgaccaaaggccttcccacagtccttacagtcataaggtttctcacccgtgtgaattctct

SEQ ID NO: 328285 - DNA, 717 bp, Homo Sapiens
  misc_feature (222)..(222): n is a, c, g, or t
acactagcaaagccttttggagagcaaatcctggcctcactgagttgaggaaaagggagctcagggccatgcggaaattacaacattacagaattactggggttaccattgctgtcaggacataacaggttaggatactgaacccaggtatttaattgggctccccttggggctgttggccactggtctgctttgatgctataggctgagggaaatactccnaaccaatggggaaaatgatttcttgttgttccacaaattaagtggcatcaggtgatgcccagtgggttcaattagaggaagaagtgcgggttgaagaaattaatatccctgatccctggaagcccttggcagaagccccaaggagggaggaaatgagagggcctagtcaagaaatgtaggcccagaaacttgtccaagcattccctcccggtgtgctgccaaccctcgaagaagcatgttcaaggccaagcctagtaaggaggagtgagaagttggaaaaagaggtacactgaagggaggcctgcatagctaccaaaacactctgccagacaggatattttagcctgggtgctgggcaccaggacccttgccaaagaggcttacgtagttaggtcatgtgctgaacagtggtggccagtcccgagccccggccctctccccagatcaggctcatccttgacttataatacaagctcgtgccgctcgtgccgaatt

SEQ ID NO: 328286 - DNA, 576 bp, Homo Sapiens
tagactccatctttatttcattttctccctccccctcttctccttccacacatattcctggcatcctaaaaaaccatgtgtaggcctcagggtatatacatcatgctaaggaaacaagacttaagaataaatgacttctctcagaaatactctgcagagtgattggcacatattaagtgctctagaaatgttagtttgttgtcatttgggttgtttgttttgattttcaagataaggctatagtccccgttcccctttcaggaactcctacaaagcctgtaccctactaggaagagactgcagccaacatctaatgccaaagtctgctctcaagactggatcttctttataccagcctcaaaagctcaggtatcaactctgatttgtttgatgtcatgagctctgacctgctgggaaggccctgaaccaagctcatgggaaggtccaggccttcataatccccaagggacaaaattagcctgacatgtcatctgtacctacagaaagcagggactcattaaaccccagtcttttcttgcatggatatttagaacactcctgggaaatacagtttat

SEQ ID NO: 328287 - DNA, 667 bp, Homo Sapiens
  misc_feature (244)..(244): n is a, c, g, or t
  misc_feature (271)..(387): n is a, c, g, or t
  misc_feature (389)..(425): n is a, c, g, or t
cccactttcatggaatgagacatgctctatggtgctgggaacagcagttgaccaggacaatgctggctctgcctcatggagctcccagtgcataaaggacacagatccatcgcccatgatgacccagggtcctcagggatgggatgacagagctcaaaagggggtgcctgacccagccagggaaagtcagtgagggcttcctgaaggaggtgccaactgaactaaggctgggaaggaatgaggntgcagctgattaagggaaggagggggnnnnnnnnnnnnnnnnnnnnnnnnnnnnnnnnnnnnnnnnnnnnnnnnnnnnnnnnnnnnnnnnnnnnnnnnnnnnnnnnnnnnnnnnnnnnnnnnnnnnnnnnnnnnnnnnnnnnntnnnnnnnnnnnnnnnnnnnnnnnnnnnnnnnnnnnnnggcagagggaacaacgtaggcaaaggcctaaaggggggaagcctaggagttcctagaaatttccagcagccggtcaggccagaaagggtggaaacagaagggcctacaaactaaaaaagcaaaactgccaaacactaagggggacatgcctctcaccctcttctcccagctatgaccttaagagttgaaggcctccattcctagagagccggctgtgggacgcgggctcccagaggtaccga

SEQ ID NO: 328288 - DNA, 927 bp, Homo Sapiens
  misc_feature (404)..(417): n is a, c, g, or t
  misc_feature (522)..(530): n is a, c, g, or t
catggtcaaacaatttatttcactgtaaactttagactttgctcgggaaaacaactgaagctgctcctcaaatccctgcctaaaataccccgtgtgagcaaataagaggagtgggggaagagtccatgttcacagctgaaaggtccgagatactcaaaatcctcaagtccaagggtgtaggaaggaaaatctccttcagatacaaattaccagcagcaatatattacccctaatacttgaatagtgaggtagatacatggaaaagtcatgaaaatatagcagactcaggtcctctaggactaaagctctttagacataaacttacaaattccatgcaaagaggaactgaactgtccaaataacaaataatcactcaaataagttttctctctttttacagcttnnnnnnnnnnnnnnggcagaaggatgcccttccttctgcatatctctatacaattttacaattttattctaagtttattaccctcaagttaaatagtctgtttagtgttctgttgggcnnnnnnnnntctttaaaagtagaaaaactgctttatagccagtgagtcatttgtactacaattcctcccttgtgaatcaatgttatcgctaggcacagtaccttgatggcccacaaagtcttccgtgcctgggaggtcttcacacagcagtttattttctttctcctgttccacgtgatatccactctgctcccctgtgttgccgttgctggagtagccatttccataggccttcaaagaagacctgcgcaggcacagaagctcctggaaggcaatcctgaaatctgggctccggcagtagataaggggattgaaaccagaattgacatagcctatccaatttaggaggatgtaaaccttcttacggatgaggttatcctggatcacatgcacaatgttaacgatg

SEQ ID NO: 328289 - DNA, 709 bp, Homo Sapiens
  misc_feature (173)..(173): n is a, c, g, or t
tatgtaaggttatggaagattctgctctttgaaaaccatccatgaccccaagcctcaggctgatatgttcttcagagatcctggggcattagctttccagtatacctcttctggatgccattctccatggcactattccttcatctactgtgaagtgaagttggcgcacctgnaagaaactacctaggagaactaatagacacaggagtgacagggactttgttatcagaaccagattcctgccggcttctttgaaaacaggtcatattgtgctcttctgtttacaagaggaaacaagatggaataaaagaaattgggatcttgggttggagggacagtgaagcttagagcacatgaactcaaggttagtgactctgcaggacttcacagagagagctgtgcccatcattcagtccaagtgctttctctgcccagacagcacagaactccagccccgcttacttacatggatcatcgagtttccaccttaaaatatgattctatttattttgagttcactgtttaccaaattaggaacttaaaacaaagttacataaaaagttattgtgactccacttaattttagtgacgtatttttgtatatataggccaacctataccacatccaaaattatgtatctattacagcccctagaagctttataaatacagtgtgtcttcttttattcacaaaatttttgaaatcgtg

SEQ ID NO: 328290 - DNA, 614 bp, Homo Sapiens
ttttgagtctctgacagaaacagagctctacaaactttctggcgacctcccaggaaaacagaaggaagctgtatcctgtacttcccctgggatctaatgaaatatacagcctctgggcttctttcaatttggactttcagatcgctaagccagtgaaaaggggatcctagctgtcacaaacgtcacatggtcagggtcacctgctgctcgggggttctcatgccagttgttgacataataagccccccttacactttaattacaattcacagtgtgcaaactatgcaatctgctttaaggcagactgtcttttaaatcaacactaaaattctactactaatatgggcaatgcaatgtagcagaggaagggtgtgtccacatggactaacttatatgcagatatctgccgtttgggagacagtgggtagcatttgccaaaatataaaatggtgttgctgaccccaattctgggagatggtacttgaatcttactgtgctctgagacttctttccataggccacaaaaaggtaatgcaatatacttcatgtgtagcattttacatttgtataactactattttttttcacatggctccataactgttctatgtact

SEQ ID NO: 328291 - DNA, 681 bp, Homo Sapiens
atgctcagaaagactagaaaacatccaaaatgataatggtacttacatataggtagtttgactaaagtgatttttccttcttactatctttctgtattttgaaaatttgctataataaacagatagtattttcaaaaggataaaaagcctaaattccagttttctggcctacgtcatacgaccacacatcccataatctgccccttctgctccaacacctgctctgctgaatatgcctaaagggaaattacacaacacacatttggttcctccacacattctccatctcccagggctcatgtaccctgggaatctcgtttccttactaaactttctcttccattaggcctaagtgggtacatcaaagcttctcctaactcttccctcaaatcccctagatttcacttcaacaatcactctccctctcctagagcctgaacctctttctcctgcatagctcctcacgttcacattctaaggactcttccagctcctgatccctctccttcccttccctttcccagccaagggtcttctaaaagtcttatgcctattgtctccaacatcttgcctcctagtcaatcctcattccaaagttaatcggcaatcattccacttaaaaagctctagctgaggtcaccaatgacctcatccaactgacattttccggtattcacctta

SEQ ID NO: 328292 - DNA, 660 bp, Homo Sapiens
tcatttgttcattcatttatttactttaaattgacagataaaattttatgcctttactttgtacaacatattgttttgaagtatatatgcattgtggaatgactaaatatagcaaattaacacatgcattacctcacatcgttttcatttgtatggtgagaacactttacatccattctcctagcatttttcaaaaatacaatatattgctaactacagtcaccagattgtaaaatagagctcttgaacttatccctcctattcaaccaaattttatgtcctttgaccaacatttccccaaccccctgtcaaccaccccagcccctggtaaccatggattcttttcaagtattttatggcatttttaaaattgggatttttgtccattttattattgaaagcattctttaagaattctggatacaagtctcttgtgagacatatgtgtcgtggatattttctcccagttttatagctgtttatggtgagaaggaaagttcatttccagttactctgtcatggcgggaatcagagatcctcctcacattatctatgtagtgactctctccagaacttccaccctttaaagacgggcaaaatgaagaaagggccctgcatggcttgtatagcgatattagcaccatcaccccacgtgccacc

SEQ ID NO: 328293 - DNA, 440 bp, Homo Sapiens
taaccaggcatcccttagcatcccagaagaaatgaacagttacagtgcttatgaagctgcccatgtttgaaatcccaaagcaaaggagaaacaccttaaaacccccagggttgaacatgggatgaagactccacataaaagtgctgacagattccgaagggaggcaaagggaagtactgcccgccgtaacaggccacctgggctgccagtgctgcatgtggcccagctgctcgtggctgtgaggagtggcccccacttgtgaggctggttgccttcctcctccctcctttgcccccctcacgccaaccctgctgccttagttgagagagaactctgggttagatgagagcaaggcattttagacaagggtgtgagacacatgcaagaaacagagatgctgagaaacttcaccagctcagccaccatgtttcttacatctc

SEQ ID NO: 328294 - DNA, 742 bp, Homo Sapiens
taccccaggtcaatctcatccatccccgtgcccagcacttccctcggcccttaagcagtctgttcacatcagtctccatttgttctgcttcagaagacacaagtagttacttgccacttgtcactatatgcatcccctgcattcataatcagaagagcacaaaggaggatgctctgtattcctggactgagaaagccaaagctgagtctggagctacctgaggtgcaagaccttcgtcccacctgaagtcagagacctcagtggtgcccactgagcacaggtaaggaacatggggcaaattcatcagcaggtgaaacagaagatcagagaccaagaaaaccacctctgtgtcctgtctttgtaggcagctgctgcactatagctagaacttgtatctctgaccttttgggatggaaaacagccataactctttccctttactgcttaacgaaatctagtgatttacatttgcagttttgctgcaagaaatactagaatgttcttgctgttccaagccagcaccatcagggagaggctgctttgcactggtcaagaaagtatgagtccgggggtttcgtcttaactctgacacttactaggtaaacaacctattgcagttacttatcaggtccttcatgtgtgaaatcagagatgtgaccaaatcaatgcaagaaaacctggattttaaaaatctaaaagctcattcctgtatgtgttctcaggactattactaacataggtg

SEQ ID NO: 328295 - DNA, 1227 bp, Homo Sapiens
  misc_feature (724)..(772): n is a, c, g, or t
  misc_feature (1199)..(1199): n is a, c, g, or t
ttttaaaatgctgaactttgtaatgaatgattaaagccaagaactccaaacccacccagcagtcttaacattaccaatagagaggcaccagcattatctgcctcctgacaggatgcaacaagaagtacccagcaccacctaggaagtatttttgccacaaaatcagacctccagatctaactaccattttataggaaagataagttcagagaaccatgtcaaatgacacctcgggatttcaaccagcaacgttcaaatgtgctaaactctgtagatggaaagagacttacagacatttcaaataaatgcaatatatgggccttgcttgaatcctaatacaaacaatccaactacaaaaacagccaaacatttgtgggacaatgggagatgcttgaattccgattgtatatttaaggatgttagaaatatttatggacaaaatgatgtaatgctcggaatttgcttcagaatgatccaggtacagcatgtggagctggagagaggagtgggcagcagtgtagataaacaggcctggccgtgtgtggatgggttgtcagggctgagtggagttgcaaagggatttattataccatgatctctgcttgtgcatatgtttggagattttcataatcaaatgtgaaaatttttgattttcataatcaaaaatcaatacaaaatatgaatgtataacgtaattcctccatcatgacggtggtgggagtgnnnnnnnnnnnnnnnnnnnnnnnnnnnnnnnnnnnnnnnnnnnnnnnnnatgctcatgttctgtttggtcttaattcaagttgcaaccctggaaacagctacattctctggaaaaataactttttgtaggtgttaaagaatgcccccagcctaacatattcaaggtctgtccagacaggcaggcacagacacaaggcccctccttaggggactgctggggccagtcccacacggttattcccacggtcaaagactgagtaaaactgtcgaatgaagacatcccccaggatccagaggggcccagctggagggtggatgtcaagtccttgaaagccactgctgcagaactgcattccatccacgaagtccagtagggtgtaggcagttgggctgagggtataggggactccgttaatggtgaaggtgacatccggcatgacgttaaggttggcacactccacagcatattctccatnccacgggggctgccccaatggcgttttg

SEQ ID NO: 328296 - DNA, 807 bp, Homo Sapiens
  misc_feature (241)..(241): n is a, c, g, or t
  misc_feature (774)..(774): n is a, c, g, or t
  misc_feature (797)..(797): n is a, c, g, or t
aaacagtcctatgactttgtttccaaacttttctttggcagcgctgtgctttccagaaagggtgggcaagaatgcgagggggtaaatcagaagaagtttcatattaagaagcctaagtgtgcccaaatgtgagtgggtcacacgagatgcactaagcgtctcagtcagctaataacaatcagctcgtggcccacctggccctgctgtcgccccgaccttccagctgtgagcctacggcagnctggggcaatggtgtacccaacctgctccttgctcacctctggcatggctgggtccgagctccagaacatggcatctctcctccctgcaccaccttccctgaggggtggggcctgcccagggctttgggactcatcctgacctgaggtattgttcaaggagtttgatcccagaatcctcatcacctagtccagtcttgaccttgagtctcagttctttctgttgattgtccagactggtaaccaggttcctaccttgtttttgagccttaaactgctgtcttgtttccctggctgagaaccctggaaacgagggtcctgtgcttagccattccccatccactcaggagagcctgcttcttaatacctgccccacaggtggggtcctgcttgccccagcagacggtctgcctgtcacctttcgatgtctgcaccattgcattcctggatgacccattttcgtgggttcggtcatcatgtccaggctattctattttctgacttcatactacgttttgcctgcactaccacttgnatttttgctaccctaccttttgngcttctggct

SEQ ID NO: 328297 - DNA, 501 bp, Homo Sapiens
  misc_feature (347)..(347): n is a, c, g, or t
agtgggtatctgagttagtcagttttaccatttataaaatgtttggtggaggaaattgaaactaattgctaaattgttagtaaccagtgcattaactaggaccctactgagtggactgaaagaatcgaaaatgtttaactggttgagaggcaatgatgttgcaaatggggtattcttcaaagctccttctttttttaaatcttcaaaggcaattattctgaatgtaaactacagaccaaattgcagtcttctgtaagcatttcagagattacctcaaatattttttgattaaaaaactcttccgtggtcttttgtgcttcagaactacccagtacaacagggtcttncagcctgctcaggatctctgaaagagagctaggcacacagtcagccaactttggctgcttcaactcctaggaacaagaaatgatgctgagataatttgtctggcaggtattatcagcccacaatgactgctgtcatttagcctcaaaatgttta

SEQ ID NO: 328298 - DNA, 733 bp, Homo Sapiens
aattcggcacgagcggcacgagccagttatagctttagctttactctagtattccctccgtctagataagattctttaataaaatcaatccagagcaaagccctgctcctttaagccctcactcaagtcagctaacacaagtccaatgctgataagccctttctgatacttctcactgagatgtactatggttccccatggtgtatattttccttaattgcaatgagcagtaaacccagcttgttcaactagagttggttcctgtggtccttgacttaagagcattgacaggacagtgggtcatcctcagagtcactctgatgggcagatgttatcccctccactcccatgatacatatgccatgatatctagattactaagaaagcccattgtggcactgccaaaagcctagatagaaagcatatagttggttttattcttggtggtctcatagaagtaatgaagttattttctagaaaatcaagctgatttctaatgttaccatggtatcttctcatttccacccttctcctctacagggctttggctgaacaggaacccgctctacagtttagtgccacagtcggggtcaatgcctctgtcaccactcatctctccttcctgccccagggagaacagcgccgaacccaccctgtggcctgttctttctgccctgagttctcccatcacgttgagttcacatgtaacttggtgactcagcactgtagtgga

SEQ ID NO: 328299 - DNA, 651 bp, Homo Sapiens
ggccgcttaattaaatcactgaaaaatcatatccgcaaagggggaacacaacataggactggttattcttggttttgaaaaattatgttgccacttcctattgttttaaaaatgatcatttaacctctttgaactacagcctgaatcccccactgaaatatttaagcctgtattcggtgacagtcacctatattaaaggcattgaaggaagctggtgcccctaattcagggtgcccatttagagtaggggaagcaggaaaatgccaccaaggacgagcagaatcggggcagttatctgggcatctgattgccagggtaactgtttctcactttgctttgccctttagcagaggacttggggggctgctacacaagggatgggggaaggtcgtgcagccattgctgttgactgtgggactgctactgatgacctatttgaggatgaagccagggaggtgggagcactctgaagaaaaaagtttctttagtcaggtggtttggtggcttagaattgggacctcaaatgagacaaaaagtcaagtcaggaattgggaagccagactcaaaatgctgagagagtcaaacatcaacccgttacttttctctctgtcttaaatattgtagaccaaattacagggggtaggggtttgg

SEQ ID NO: 328300 - DNA, 929 bp, Homo Sapiens
ttaggattaataaacgggcctttattataaacatccaactctgcaggaggtttacaaagcagggctcaggagataaaagccggcttccccaggtggcggctgcagggtgcggcaggcagcccaggggtgccagggtggcggggcaggggaaccgtaggaggggggagaggggcacccagaaaacctctcctgggagaacatggaagactctgcccacttcaaatccctgcctggggaaggacacatgggaatggggccgggggaaaaggcgggccacctcgggccttcgtcacctgtgtcagctcctagggattgtctcctcctggtcacttggagagaacaggcgtgctggacacgtccacatctctgggcccggggtgtatgaatgacacgcttgctctggagtttccacctgggagcttgtcaccgaggacgtgcatccacagctgtgcgtctgtgcctgggagcggggtctccacttggtgggtctctgcatgctgaccagttaacccgcctttccgggctgtggagggcgtgggtcctgtccggcccggagatgctccgcggggtgtgtgtgtgatcgtggccctgtagcggggtggtgttccctggagggtggacccctggagcctggctgtgtgtggctcgtgtctcagcatgaattccgtgacccaggagcacgttttcaggcagggattaggggcagctgggtgtgggaggcaggcacttggtataccaccgaatggagacagaaaatcccaactctgcaggccggcttgctgggaagggggtgtctcgccagaagtcccgcccgccctgcagccgtttcctggaagcagtcgctgtgggtattctgttccttgtcagcactgtgcttgcaaagaaagcagacactgtgctccttgtcctttagggagccccgctccatc

SEQ ID NO: 328301 - DNA, 915 bp, Homo Sapiens
agggatgttcttgcagtttttctatagcgttgctttttcccccctctctttggaaatgaaaccaagggattagaaagttgcactgcttgagaaacatctcaggtttcattttctctctaagaatgtaaaatcacttttaaaacctaaggaaggaatttttgtgtttggaacgtaaacacctaacaatctcctagggtccccagagtgtcctaatgttatagaaatggctttcttgtaagtacttggaagcactgcctgtctcttgtgtgactgacttgattttccccatactgaaatgttaaggcatttttatgactgagcaaggcaaaatttactgcttttatgaatccggtgactgttgacatctgtgagaggagagctggctttcctgctgtgtttatttcagtgtccccctgccacgtcatgcagttgtcttgcttctgtgtctggaacatcccaagttgcaccattctaagaaaattaagtgcaatgaaatatgttaattcaacattatggcttaagaattatatttcctggacctcacgtgtacttaaaagttgaatcgatcaaattttattgcttccttttcccttagagcagcacgttgagagtgatggttttttctgcaatcataactcagtggccttggtgacttttgtcttgtgttaatacttaaaagtagatccatttcctctggggccatgcatattcaaaggggctgaggctgtagtcatcccgagagctgctcttgacacttcttgagttcatagcgctctgtcacacagcctctgttgtaactacagagaccgtttttactcttcagcattgatcatgaagagaagagataaggggtttttattcatagccgtcataccagtaacttctgtgactgaactctccacctgtctgcatcag

SEQ ID NO: 328302 - DNA, 698 bp, Homo Sapiens
  misc_feature (675)..(675): n is a, c, g, or t
tagttccagttccggtggtgaaagttcagaaactagctcagatttatttgaaggcagtaatgaaggaagctcatcatcaggctcatcaggtgccaggcgagagggtcgacatagggccccagtcacatttgatgaaagtggctctttgcccttccttagcctggctcagtttttcctctttaaatgaggatgatgatgaccaacctaggaggacttcaccaaagaacagattgacaacttggcaatgagaagttttggtgaaaatgatgcattaaaaacctgtagtgtttgcattacagaatatacagaaggcaacaaacttcgtaaactaccttgttcccatgagtaccatgtccactgcatcgatcgctggttatctgagaattctacctgtcctatttgtcgcagagcagtcttagcttctggtaacagagaaagtgttgtgtaattaagatctgaactctcagctatgtagctgatatagtgatgggcaaacaggaatcacttgcttttatgtccactttttgagtggtacttaaatgtaaagtaacaacctgaattgagtcattgctttctgaaggaatcattgtcctttctccagtttttgttccagaataaaaggaaatattttaaaagccacgttataggacctaaaaatctgatttccgtaccagntaaattggtagcatcactgttac

SEQ ID NO: 328303 - DNA, 740 bp, Homo Sapiens
  misc_feature (167)..(406): n is a, c, g, or t
cctagcctattttctattttctacatcttgatggtgactatactattatatacaattatcaaaatttattaaacaatatatttaaaatttatgaactatattgtatgtaaagaataactccatagaaaagaaaaaacctttcatttagaaagggcatcatgctacannnnnnnnnnnnnnnnnnnnnnnnnnnnnnnnnnnnnnnnnnnnnnnnnnnnnnnnnnnnnnnnnnnnnnnnnnnnnnnnnnnnnnnnnnnnnnnnnnnnnnnnnnnnnnnnnnnnnnnnnnnnnnnnnnnnnnnnnnnnnnnnnnnnnnnnnnnnnnnnnnnnnnnnnnnnnnnnnnnnnnnnnnnnnnnnnnnnnnnnnnnnnnnnnnnnnnnnnnnnnnnnnnnnnnnnnnnnnnnntctctaggatttatccccagtattggattaactgggttatagggtagctgaatgttcaattacagcagataaactgttttcccaaagtaagttctctgcttttccttatctaggtctgccctgtcccccaattagatgatgactctagaggcaggggaccctctcattttgaattaccactgcttagcattcaattagcactaggctggatatccaggagtccaagggcagaagcccaggcacctgaggcctcttagcctcagcgaatactaagtactatacagagcgaacagcatgcagggaccatatgccacgcacggaggcggttacggtc

SEQ ID NO: 328304 - DNA, 938 bp, Homo Sapiens
acactcctttcctgttgtttccattcatgccttaatgaatgaggcctgtgtttatttcattttgagagccttctatgtttcaggcataatgctaggcgtggagaccatgatagacaaaacaccctgctcttgaggagctcccatcagtccccaaagccagcgtaagtgtggatctgtcagattggttggttggattgcttcggtcccagcttcaggcctcctcccttggtttcaggttaaaactattcctttctcagccacctgtctcccaagaactgtggccactgaaaatccttggacttgccttggttctcacaagcacttttctcagtctgagtctgcacagagtatggctttttacccttttgtaaagccagagaaccagagaagagagcacggtattgtagaacttttaaaagcagggaaggtgtgggtttctaagcactgctatttattagttaggcaaggtactcagcatcttcgagctttcacttatttttaaagtggagatgcatgcagcatattcatggactgtcttctgagtgccaggcatcatgctgtgcactttggtaaacgaagtagacatggttgctcccctcagagaacgttagtgcccctgggttgttgtatgtaaggattagataacactgtgtatgtaaagcacctaatacaatgtttagctcagagtcattgcttgttaaatgctggggtttcctcaggggactttgtcatacccccaatttcctccccactctacatgccatccacctggggttacagtgcagtggcgtccaattcgtcatcaggaatcaccactttctggggtgtacacatctagaccccttcaggacaaattgtaaacatagctaatagcataatactgctagacagttcatatgatgcgctgtctccagtttataaactcattgactcaggcc

SEQ ID NO: 328305 - DNA, 521 bp, Homo Sapiens
  misc_feature (418)..(418): n is a, c, g, or t
gtaagagccaccacgcacagcccagcactttcaatttccttcaagaactttacctttgcattcacaatgtgactaagtgtttagcacaagagacctagccttcagccagtcttgcattttgacatgccttcctcactaagctcaatcatttctagcttttgatttaaagtgagacatgcgactcctccttactcttgaacactcagaggccactggagggttattattggtgtaacttgaatatttttgtgtcttaggagatgggggggccgaacagagggagagagactggaaaacagccagttggtggagcagtcagaacacacgtaacacttatcaattaagtctgttgtcttattatgggcgcagtttgtggtgccctaaaataattacattagttaacatcaaaggtcactgnttcacagatcaccataacagatataacaataatttacaaagcttgaaatattgcaagaactaccaaagtgtgatatagaggcaagaagtgagcacatgctgtt

SEQ ID NO: 328306 - DNA, 530 bp, Homo Sapiens
  misc_feature (81)..(101): n is a, c, g, or t
  misc_feature (420)..(480): n is a, c, g, or t
ttgggctcaagcagtcgtcctccctcagccttccaagtagctgggattataagtgcaagccacaacaccaggctgataggnnnnnnnnnnnnnnnnnnnnncagatgtaatttacaaccatacagtttacctgctttgggtttacaactcaagatttttgtaaattcacagttgtgtggccatcaccacagtccaattttagaaaattttcaacgcccgagagaaattcctcatgctcatatgcagtcactataaaagtttttattaatgattgatgcatgtaattttcagtaataaaatcaagtattaataatacattttaatatgactcttttctagccaaagcatgtttcataccaaaagtagttaatttctcactcatttaaaaaatggctgggtgcagcagctcatgcctgtaannnnnnnnnnnnnnnnnnnnnnnnnnnnnnnnnnnnnnnnnnnnnnnnnnnnnnnnnnnnntaatattgatgatactctgtagcacataaactgaaatatattgtaataca

SEQ ID NO: 328307 - DNA, 606 bp, Homo Sapiens
tcttgtcatgcctcaggggtcttgtcatttgtcagctgttccctgtcggtcatgtcctcctgaggaggtctggctctgtcaaagaatccacacttccataaagctaaggttaaaatggcgagaaccaacaatccaagaagtattgctagtattattacccataatgggattgagaaggaaacattcggagttgcccaaataactgatgtcttaattgctatgcttccttctgggagttttgctggctgatctgtataaggcatcttcttaacttcaaaggacaccagggatgcaagagcatagggatcattttttctctggaggaaggtgtgggcccataatcgtgacctgactttcaggactgcgctttctcctccttcgagtcgtcccactgcacaggagatttgtaaacactcgatatttgtacaattcagtatttttgcagggctctgtctgtggaattcgaccacatgtacatccctcttcctgacaagatgaggaatagtagagtttcgcaaaaaggcgctgagctcaggggtgtcctctggggaggcagcaggctttatatcctgtggattgatattaggatttggttggcactgcagg

SEQ ID NO: 328308 - DNA, 429 bp, Homo Sapiens
aaaaaatcctccctgtgccagggggacgactccgaaggagggagaaaaagccgcaagtccctgaaaagtccagggtcacggattaatggggccccacacccttccctcccagagaaaaaatggatcccctatgctcttgcatcccctggtgtcctttgaagttaagaagatgcccttatacagatcagcccagcaaaactcccagaaggaagcatagcaattaagacatcagttatttgggcaactccgaatgtttccttctcaatcccattatgggtaataatactagcaatacttcttggattgttggttctcgccattttaaccttagctttatggaagtgtggattctttgacagagccagacctcctcaggaggacatgaccgacagggaacagctgacaaatgacaagacccctgaggcatga

SEQ ID NO: 328309 - DNA, 985 bp, Homo Sapiens
ttaaagttacatgcacgaatttattcattcatacaagcatttcctgagtacaaactaggggacaggtatttcacaaaaacaaatagagcagagttcctgccctcggtgtgcggggggagagagggagggattcagcatttggtggagtatgttaattccctcaagttaattccttcaagagagagacctcttttgaatagtaggtacttaagttattaatcaaattgagagatggaaaggactctggaggctaccctgttcaaacctttcattttaaggtgggggatgtcagcccagcggggaaagaggcctccccccaacctcatggaaccctccaaatcatggcccaaatattttcgtgggtgtttgataactccctgggctcaagaagtcccaagagctctcactgttcactcaagggtcctagaagcccctaggcttccgcccccacccctactcccatgtaatcaagaagaggacgctgtagaagaccagaaatgtccttaagctaaagtacacttgataggtgataggtgggggacacttccccacaaccgcctgggcccggggccaagtcagtaggctgtgcccctgggtaggaaacacctttgggtggaaggggactcccaaaacaaggctgcctttaattggcctgagagggagtggcaggaaggcagatcagggaatgctcccagctggacaggaagaactggtttagtatagcaagcccagccaaacagaggagaggacagctgggtactgagcctgggttcccttccaaaatatgggggtggtaaggggaatgatggaacagtcgggggaacaccacccacaatgggagggctactagtcagagatcctggggtcctggatgccctctactaacccaaagtagtaccattttacctctcacatttgggaagtgggcataatagaatccccatgtgacaggtctttttgtgaggacaaaatgcctgtgccgaat

SEQ ID NO: 328310 - DNA, 553 bp, Homo Sapiens
ctaatttgagaagtccatgtttaactttggtaacttcatttgacttcaagtcaaagtggaaaacacagtgagtactgatgatgacaggttatgagtttcatcctccaggacgtacggaaaaaaggaaaactcaagcattctactggaaaactggagctaaaagcagcccatccatggagaattatgggaccagaagatgaaggtgggatgtgtgtggcacacgcctgacagctgaaccaaacagggcacacgggctctccctaagagtccctacttccgacagcctttccctccacaaactcagggcaggggaagtgtgcatattttatacaggagcccttcatggctactttactgggaggtgattctttcttggagcagaatacatccccttttgaaagctctcgggaccaggagacacatgtggaaagaactttctgtccctggcagacagggaaccaaaccccttctccttgaacttggacagtcttccctctcttggaagcctctctcatcctttggttttggataacttggcggcattctcacgaag

SEQ ID NO: 328311 - DNA, 453 bp, Homo Sapiens
  misc_feature (322)..(322): n is a, c, g, or t
  misc_feature (368)..(368): n is a, c, g, or t
  misc_feature (401)..(401): n is a, c, g, or t
  misc_feature (423)..(423): n is a, c, g, or t
  misc_feature (433)..(433): n is a, c, g, or t
ttcgtgagaatgccgccaagttatccaaaaccaaaggatgagagaggcttccaagagagggaagactgtccaagttcaaggagaaggggtttggttccctgtctgccagggacagaaagttctttccacatgtgtctcctggtcccgagagctttcaaaaggggatgtattctgctccaagaaagaatcacctcccagtaaagtagccatgaagggctcctgtataaaatatgcacacttcccctgccctgagtttgtggagggaaaggctgtcggaagtaggggactctttagggagagcccgtgttgccctgtttggttncagctgttcaggcgttgttgccacacacattcccacctcatctttntggttcccattaattcttccatgggatgggggntgctttttagctgccagttttnccattaggantgctttcagtttttcctttt

SEQ ID NO: 328312 - DNA, 717 bp, Homo Sapiens
ttatatattaaactatgtatatatttaacacacacatcttaaaaatagctccagatgacagaacagtattgcatacacaggtccatacatgggaccctccaagtcccaggcacccttccctgatcactgtgtcctagaaatgatttcctgtgtcagtgacacagaggaactgtccaagcaagcctccagtcccaagcaagcctccaggccctgagtgttctgatgcctgaagggtagtcataggtcccgaggtggagtcgggggtggagtgctggggtcccataggatgtcctcatatgggcttagaactgggcccgacagccatccttgagccccagtctgctccagcagggctttgagcaagcccacagtgagagggggctctgctccaggctcagggaatggggttgggggccccacctcatctgggaggtatgtcctcagtagaagcaggagctcagctggagccagttctggtgggcacaggcggcaaaggagggggaggtgagcatcaagccggcggtgctgggcaaactcggccagcagcagtttgaagatttcacttcgaagcaggggactggaggggccgagggccaggccagcatccagagcccgatcccattgttccttttgcaccagctgcccgacagcttggagcacagctttaggccgcccactgctcaagagcagctctagctccagagcctcaggcctggt

SEQ ID NO: 328313 - DNA, 419 bp, Homo Sapiens
ttcgatgttgatggacacttgcattcttttttatttttctctgttataaacaaggcgcatggacatctctatgtattttggggtacatatggaaatgtttctctggattagattccccaaaatagttggttcagaaggtatgtacttataaagtgttgatgagtactatcaaaatgacctccaatagttatatagtaagatgttataagagattttgaagactttttgctatatttaagcaatttctacacaatatttaaagccatctctttgcccctctggtaattgtgaaagattgaatatttgtatctttcttttaggaactataggatttagcttattgtggacattctgtacagagacttgaagggaagggtctttgaagggactttgtggccttgaaaggcccttctttcaac

SEQ ID NO: 328314 - DNA, 712 bp, Homo Sapiens
tacaggcctaacctgtatttttttaatagatgtaagtataggtatgtacttctttgctaatttccacaaatgtttcatggaataatatgaataatgacgccaactgtaatttacataagtagaatgaggatagatagaactgactgctttagggcagcctcacaaatcatagcaatttattctatttatacagggtagacagttgttcatcctgacagtgaaacactgctgataagttactttatttcctctatacctcttgataggaaagaggctgctttttgagagttcaggaagttgtagatttggtgcgtatttcatagttcctctaaaagtagtaaaatgactgaggacaagtgtatacctaactagggcagctatatgtccaaacgtatgtccatgtttaaagagggacagcttttcttctttttctaacgtggaatctagccacctttggaatatccttaattcagattggcattggcctgtttccagggatttggattagcctgggattttctgtagtttcagattgtacaagttctgatagatttccttcttaccttttagggtttatgcgattcattgggcccaggctacccttaacctttccatttcagatcaggtcactgttgctatagaaaaccagacagaattcctgcttgggacaagagtaggaagaggcaagactgaatgagtggtcctctgcatg

SEQ ID NO: 328315 - DNA, 976 bp, Homo Sapiens
  misc_feature (19)..(19): n is a, c, g, or t
  misc_feature (117)..(118): n is a, c, g, or t
  misc_feature (147)..(194): n is a, c, g, or t
  misc_feature (198)..(198): n is a, c, g, or t
ctctaaaagcttcaccacntgataagcatctcacttagatggctcataattgctcccagcatcccccaattgttgccgctgtgtttaccactaattccatacaaaggcagcaatgcnnaaattgcaggacacagcaaattgcatcannnnnnnnnnnnnnnnnnnnnnnnnnnnnnnnnnnnnnnnnnnnnnnncttnttgctggttttctttctggccaatttaaaatttgtcaaagtcggtcttcttctggatcactgccctttgatatttcgcgcactccatttgccacaaacaagccgcagggcggcagttcatgctgactctagcagaagcagagagagctccatttatcttacactgcctgctgaattcctactcattaactggggggttcactgcctctttttaaccccccaatggctggttatcatcccttcagagtaactgggtggtagggagagggatcctttctccttttgcagaaggactggatggtgaggggtgtggggataaagcttctttctcttcaaggaaagtgatgtcgctcccaccttcaaccagcaccttttaacttttgaagcacatgaaggggagagggaggagactcccaagtgatagccgtttaatcatttgttacaaatcatctcattatcaatttcctatccgcattggagaaaaccatatttatttaaccttgaccaaaatggcacttgaaaaaggacccttagtctgctaaatgtgaagcaggctctggcctagggcagcttgggaacatgagcagtggacttggaataagaataacgaactacgagtcttgtaaattatttaacttctccgaacatcagtttttttccaaccataaagtggagatcacacctctgcctagctaatatgaggagcagatgagcatgcatttacttcattgcatcattatctttctgtcttaatcattagaaaaagcagatggccatgt

SEQ ID NO: 328316 - DNA, 492 bp, Homo Sapiens
  misc_feature (21)..(21): n is a, c, g, or t
  misc_feature (49)..(49): n is a, c, g, or t
  misc_feature (55)..(55): n is a, c, g, or t
  misc_feature (117)..(117): n is a, c, g, or t
tgtggggaaaaaagcctcctntccccctacaaggaaaagtgaatgtcgnctcccnaccttcaacccagacaccttttaaccttttgaaagccacatgaaaggggaagagggaggagnactccccaagtgaatagcccgtttaatccatttgttacaaatcatcctcattatcaattccctatccgccattggagaaaaccatatttatttaaccttgaccaaaatggcacttgaaaaaggacccttagtctgctaaatgtgaagcaggctctggcctagggcagcttgggaacatgagcagtggacttggaataagaataacgaactacgagtcttgtaaattatttaacttctccgaacatcagtttttttccaaccataaagtggagatcacacctctgcctagctaatatgaggagcagatgagcatgcatttacttcattgcatcattatctttctgtcttaatcattagaaaaagcagatggccatg

SEQ ID NO: 328317 - DNA, 480 bp, Homo Sapiens
agtggggtccaggtatcagggcactggagcttccatttgattccagtgtacagcctgtcctgagaaccactgtgacaaggccttgagagagtagccactatggccacaagccctggtcaaggaaactctcacagagctccctgcataaaaccagcagcccagaagacacatatcttgaaaacaggctcagagtatctctgctcactggcctggggacaagaaacaaaaagaaacatgaagcttgtaagagtggggtcccaaagatattcctccatggagtgaggaattaacttaaaaatggcccagcatccatgaaaggcccagcaaagaaaatatagatgactgcataaggttgccttaaagaccctatgtaggaatactagagaaaatcactgttactaaagatgaacctattgttgaaataataaaacacacaagaaaaaaacagtcatgaaagagcctacatgaacaagatatggg

SEQ ID NO: 328318 - DNA, 794 bp, Homo Sapiens
  misc_feature (282)..(282): n is a, c, g, or t
  misc_feature (654)..(702): n is a, c, g, or t
ggtcacaatatgcatttattaatgaatgtatttatacacaatacaaacgtgcggggacaccgtccctttcacagcccagaacccagggtcagaagatgagggatccagcctcagaggggagatatgcgacttcccaagagcagttcttggcctgggaggggccatgagagtgcaagacacggggccgtggcgggggcggggctacgggagcggggcgtggccggcccctgaggttactataggggaatgggccccggccaggtccccttttctttggggcanttgggaagacagcggggcccacgggccagagctgctacacgtaggcgtttctgccgtatttgccaaagctgctgtcgccttcttggtccgaggtggcgacgggcatcacggacacgggagcctggtagggccgccgggcgctggcggctgggtcctcgtcagagccgcagcagcaggcggagcagaggcagaggccacccaggatggagatcagtgaggcgctccaccccaggtagagggcggggcccagctcgtacttggttccggggtacaaggggtcgaagaagtcccgggtgatgttgaaggcgtaccaggagatggccaccatcccgcagatacctggggaccggaggacgaccccagtccagtccnnnnnnnnnnnnnnnnnnnnnnnnnnnnnnnnnnnnnnnnnnnnnnnnnctgcccagagtaggacgggggcaccaagtcccagagcagcaatttcactcaattcctttctcccaaccccagtttataagccttcctccttc

SEQ ID NO: 328319 - DNA, 654 bp, Homo Sapiens
  misc_feature (193)..(201): n is a, c, g, or t
acagcatccacctaatcataaggagattctgtgggagggagctgagcaggtattgtaggaaaagatgtcaagggaacaattcagagtgcaggaacccacaagagtcacagcaccttgtgcctgtggggtgtgtaaggacaggggaggctgctcctgctgactgagtaaacgcctcaggatcatgagcatggtnnnnnnnnntggattaatatatttgttttttactttgaagcttatggattccttcccttccaagagaagaaaatcctctttctcatttatgtcaattataatttaacctttaggtgtgtggtcccaagcagcacattattggcaaaagacagctcagctcatcatttagaaccggacagctcttttagattttccgtcattcacattagctatgttgtgaacaaagtgatgcataaggcgaaaaagaagcttgagacagaactaaagagaacaagttcccagtgtcctctctgacttgtagctgctggctgatggaaattggaaatgaatttgatcccataagacatttatttcaggctctcactggtatgtagcaaatgaaagcctaaaggggtgcgttacaagtacagacttctcaggaaagcgctctccgacagtcggcttgcagagacaactctccct

SEQ ID NO: 328320 - DNA, 696 bp, Homo Sapiens
aaagggaggttggttcctgcatttccactctttgaccataggaacgcctggctacaaaaggggctgtaattggctgctgcctataggggccccaggtccttcctccaattgcaaggcagcaactccgaagttctaagtcccatggaaagtggcagtggttgggctggactgtggctggaggatcaccgggcctcggttctcaagcaccatctgtctggctgcagctgggcccttcagctgggggccagtgttgctttccagctgcccccaccgggtcagatcatctctggcaaggaagagctgctggcatctcttactgtccttctcgcaggccttcctccaccttgggtgcctcctgacgcctgccccggaagtcttcatctgaaaaggagagggaagctgcctcatcctctaccctgcagggcctcgctcaggcacggcccctagactgggcaagagagctgacccgactctctctgcccccttcatttgggacccatgcagatccccccaggtagacgatgcatgggtccagggagagaggcagcaggacactcaggtgctggccagggtccaccactgagctctgagaccttggacaagttctcccctcgtctttgggcctcaaatttcctcatctataaaatgggatggaaaagctggactatctagatgacctctgaggcccttccagtc

SEQ ID NO: 328321 - DNA, 624 bp, Homo Sapiens
atacagacagccatatgttagaagtaaacaaaaccactcctaacccgtctacttcttaaaagccggtacttaacatttgaagcgtatttcttttcatcgctttgttttaaggtttttgtggaatatttttcatcatttctatttagagggtccctttttcttcacttaacatcaataccctaagcatttcttcctgttgctaagttcacgtgcaccccttccctaactgcataatactgggtcatatgggggtatcataattgacataaccaatgcccaaatatgggaacatttaggattgctctctctcttcaatttttcattttaggactgcattaccatctactttcccgagcacggacttttgttcctgttccagattgtttctctagggtccaattcctaggagtgggttgcttggattctcagggtgatacatatgccaaatagtataccagagtattgaaggtacttgtttctaggaatcccactttgacatatcgacgatgagaataattaatattcaaatagcctgacctatgtcaggcactgtgtcccacaaactagcttacaatggggctacactgttgtgccaccgggttttacatgtgaagaaaccatggt

SEQ ID NO: 328322 - DNA, 561 bp, Homo Sapiens
  misc_feature (36)..(36): n is a, c, g, or t
  misc_feature (143)..(143): n is a, c, g, or t
  misc_feature (165)..(165): n is a, c, g, or t
  misc_feature (274)..(274): n is a, c, g, or t
  misc_feature (400)..(400): n is a, c, g, or t
  misc_feature (433)..(433): n is a, c, g, or t
  misc_feature (511)..(511): n is a, c, g, or t
  misc_feature (522)..(522): n is a, c, g, or t
aaggatgaagtttttgctctgttgcccaggctggangtgcaatggcgcaatcttggctcactgcaaaccatggtttcttcacatgtaaaacccggtggcacaacagtgtagccccattgtaagctagtttgtggtacacagtngcctgacataggtcagttattnttgaatattaattattctcatcgtcgatatgtcaaagtgggattcctaggaaacaagtaccttcaatactctgggtatactatttgggcatatgtatcaccctgaggantcaaggcaatccacttctagggaattgatccctaggaggaaaccaatctggggaacagggaaccaaaagtcccgtgctcggggaaagtaggatgggtaatggcagtcttaaaatggaaaaatttgnaggaggaggaggagccaatcttaaatgtttccntatttgggggcattgggtttatggtccaatttatggataccccccatatggacccagtatttatggcagttagggggnaggggggtgcncgtggaccttaggccaccaggggaggaatgcttacgggt

SEQ ID NO: 328323 - DNA, 770 bp, Homo Sapiens
  misc_feature (128)..(171): n is a, c, g, or t
  misc_feature (402)..(402): n is a, c, g, or t
  misc_feature (681)..(730): n is a, c, g, or t
attatagttgtaagagttctttatattctagatacaaatccattctcagatacatgtttgcaaaaattttctcccattctgtggttgtgtatttactttcttgatagtataatttgtagcacagaagnnnnnnnnnnnnnnnnnnnnnnnnnnnnnnnnnnnnnnnnnnnngtatctaagattatgcctaatccaaggtcaatacagtttatgcttatgttttcttctaagagttttctagttttagcaggtaaacttaggtctttgatctattttgaattaattttgtatatggtgtgaggcagaggtcaaacctgaggtagacatcaaacttcaatattttgcatgctaatatctaattgtctgaggaccacttgttgaaacgactattctttccccgcntgaattgtctcagcaacacagttaacatttaaaaaataatttcaaactagaaacaaaactattttgaaaatagtaaagatagccatccccatgccacccccttatccttcaacgccctcccacacacaaaacacaactgaaggaaattatttgcagttgcatggaagatagtgcatattgatccagatttactggaatcccccataatcccatcctaattaaatactaacttctaaaaaccactaattagtatcaatatatttcagaaagtagaatttnnnnnnnnnnnnnnnnnnnnnnnnnnnnnnnnnnnnnnnnnnnnnnnnnnttaaaagggatgtaaaaaggccaggcatggtggctcacac

SEQ ID NO: 328324 - DNA, 561 bp, Homo Sapiens
atttattactattatttttattgttagttttttagttataccttctgggatgggagacagttttaaaagttaacaattgtcttggatgttgctgtttttaactcagtaagtacatctgttctgccagtgctgccctgagcactggaactgggagagcaggtagcaagctagcactggacacagcataaacagcgacatatttctcttccccttcaaactggctggccctgtaaccaataaaatgtggcccatgtgacactgggtgacttctgaggctagccctccagagatctagcttatgtggtcctttatttgggaatgctccttctcgtaatccatctgccatgctatgaggaagtccaagcagccatatggagagccgcaggtgcaggagaactaaggccccagctaggagcctgcaccgcattgctggctgagcaagtcaggccagtttggacttttcagccattccagggctccatccaataccatctaaagcagaactggctggtcaatccatagaaggaagggggaaaaacagttgtctggggcaaatagttg

SEQ ID NO: 328325 - DNA, 491 bp, Homo Sapiens
tagtagagaagtggttttgccatgttggcatgctggtcttgaactcctgacctcaggttaaaatctataaaattttgttccaaaattaagatgtcacaaaaagatggatttttttataatgtgccagttcaagaaataagcttaatgaaacaatcctacattaaacagtatttacatttagagctaaaattcaaatctatctaaaagttttacactagcagtctagaggataaactcagctcttgaatgctgtttttaaaaattctaaggatttaatatgaaaacccacttaaaaaaatactatttgattattaggggcccagattctcacctgaaaacaaccagctggaagagtctagtcttctgttaagacacagagaaggtaacatatgtcaaagttttgcatgagacaatctgggtttgtatctggtgaatgagtttgtatctggtgaatcagtattactacctgaacaaagagcatgctggctctt

SEQ ID NO: 328326 - DNA, 801 bp, Homo Sapiens
ctcatagtgaaaacttggtagagcttcagtttttaaggcaaagatgattaatatcatctgaggaaaaggtatttgtgtgtagccagcgtggttcgttgatagcatctcccctgaatggtgggtgacaaaaaacatgaccaccatttgatgggggtggtgaggcaggtagttaggaaaagtaggaactggcaggctaacatttcctaagattcctacttgtctcaacggccaacagctggtttctactttgtgtctaacaaaaagaatcctatggatgactgactacacagctgcaattggtaacgaagtaattacaataggtgaaattggctcttgcagaacagaaatagagtttcagtttactattttcctctaataccgagattctatatgcgaaaggaccaacaatatttaactatttgttatgaacatcccagcatatatgccatttttgccagtgacatttgctccaagtattacagtcaagattctgctatgctgtgtgttcaaggtgttctggactaagctgtagaatgatccctttccaaacacagatgcttttctagacggtcccacccactcagtgattcaccttgctgatgcaaccttaccatgcatctttcacaacatcacccccacagatttattatttataaagtggtgaatctggcttggtgcctgcctttaccaaccactgcaaattaattataatcaagtgaagcttcttctggtttttgttattcccgctccactactttgacattcctaataaaagcttcctactctgtattcaagtctctt

SEQ ID NO: 328327 - DNA, 775 bp, Homo Sapiens
  misc_feature (329)..(329): n is a, c, g, or t
  misc_feature (392)..(392): n is a, c, g, or t
  misc_feature (414)..(414): n is a, c, g, or t
cagtcacagtggaggttttgtctcttcctagtcttgtttggtgacccgccccccaacctgatagtaggttttagtcattgttattcttctaactaatcaaccaaatgcaccacttcccccttctctaatttccaccaaaggcctctgacatcattttctgaccagccttgctaggttctaatattctcagcatgcgtaatttcacttggcacttaaaacaatattcttgaaaggaaatgaaatatctcactgaaatctgcttttccttcacactgagacagggaaaatgtgcattttcagatgcagaagactgatcccaactgacccanttttaaaacagaatagatgagaaagggacataggaaaaggcagcgtgtgcaaacaccaagagnaagaacaagatcaatgcaggancattccttgttgggataaaaatagtcttttagaatgggaactttctggagacagataaattttcttgtaaaattacagccatcttccacacgtttgataaatatgtgcaatctatccatgatctcccagatgtgacagctccatcaaggaaaatgaaaaatcaaaaacggtaccaggtgccactcttggggcttgtccaaaggcagccaggggaagagtctattttattacgctctccccacagtaaataataatcaacatcagagaaggagagcatttggatttgaacagatggcatccaacatctaacaagcgaagcaacactttcaagcattagatcctaaatgtctgctgtgccgaa

SEQ ID NO: 328328 - DNA, 651 bp, Homo Sapiens
  misc_feature (391)..(431): n is a, c, g, or t
  misc_feature (617)..(617): n is a, c, g, or t
tatttagtagcaaaatatactttaatggaaaaatcattttaagtaactgaataaaaatgtgtaccaggaactttcccaatagacagcagaatatgtacattttgtgagggtagagcagcatctatttaatataatttttatatagaaaatacaggcatatttaaaaatggaaacatgtaagaaagtatgtcacaaggaataacaaaatatatcacaaaataaaaaaagtaaccccaagtaacaagtttactaaacaagacccagcaccatgttggactttctttgcataagttccagggatgcccaggcactaccgaggagagatgatcctgcttttggggagagccagatggtcgtgcagtggttaaaacccagtcctccttttcctggnnnnnnnnnnnnnnnnnnnnnnnnnnnnnnnnnnnnnnnnnttgaactgaagagctaacatctctttaggagttgatgaaaacaggattgaaagtcccagatacctgggcattatctgtgatgtttatacggatgggggtcattctttgagataactaagaggcatgggaaacaagtgctaacttatggaaagatctgagaagcatcagacctgagttttactcttnattctgccactagttttctatctatcttacaatt

SEQ ID NO: 328329 - DNA, 752 bp, Homo Sapiens
  misc_feature (112)..(112): n is a, c, g, or t
  misc_feature (139)..(139): n is a, c, g, or t
  misc_feature (179)..(179): n is a, c, g, or t
  misc_feature (495)..(495): n is a, c, g, or t
  misc_feature (499)..(499): n is a, c, g, or t
  misc_feature (506)..(506): n is a, c, g, or t
  misc_feature (509)..(510): n is a, c, g, or t
tacattttgtagcagcatctatttaatataatttttatatagaaaatacaggcatatttaaaaatggaaacatgtaagaaagtatgtcacaaggaataacaagagatatcanaaagtaaaaaaagtaaccccaagtatnaagtttactaaacaagacccagcaccatgttggactttcnttgcataagttccaggatgcccaggcactaccgaggagagatgatcctgcttttgggagagccagatggtcgtgcagtggttaaaacccagtcctccttttcctggaacagttatgtcccgtccaagaagaaagacagtgacatcggtttggtcttacacattttccaccatttaagcagggagactggcaaacagctgtatgacagcgagaccccgtccagccaggcgggcagtcacactgataaggggccacacagcgacctccgttcagacagggaagaatgcagattggttcttcacagaggcgccccatcnagcnctcttgncannaggaacaagcatttgggcgttggcagatgcccccattctgacatggaaatcggacagacagctctgcaaataggaggtgatgtccatgttccattttctaaacaaacactcctcaggaaaccctccaacatgtatccactgtaacatgagtaggtgatcatgtctccatattgataatgtacgcctcgagcaattgcattttctacgtgagctggtggaccacatgagattttttcacattt

SEQ ID NO: 328330 - DNA, 800 bp, Homo Sapiens
  misc_feature (73)..(73): n is a, c, g, or t
  misc_feature (98)..(98): n is a, c, g, or t
  misc_feature (781)..(781): n is a, c, g, or t
aaaaaaacccctttcttgccactttcatttcccttagcattttatttatatccacaatgttgttcttgaaaancagataggtaaccaaaaaggaaaancagagctgcaaggtcagggttgagctcagaatgcggctgtacaagtgtcatgaaggcagctgatggaacgctggaatcaaaacaagatagtattggagacccattttccacagctctgtccaactctgtcctggcccggcaccgccaataggaagtgagaccggctctgaaatcacagctgcatgtgtgtgaagagcccctggtttcagggcccaaggacaggcagagggcggtcattagatcccggccctagctcaggctctgctagctctccctccctctgctcacagtgagaggaggaagacagatccagcctcccaaaggaagaggagtccacttgcgaacaaccagaaacgaccaggacgcctgaagggactgcctgccaccgtgtggccaacgttttctgctttcgggagatggtttcccgcctgcccaggagcctgtgcactgggccctaaatcttctgccagtcccaaaccgtgtcacagcgtggcatatgagggatggaggccttctccgtgtgctggaaggaggggggcgccatgccagggcctctgggctccctctgcccaggctcatctgtgtaaacacacaccctgcctcggtcagaagtgggatctgctgcgccgccagggcacgcacacacgcgtctttgaaaacctgaacagaatctcaagtgcttnctcggaatctgtgttctgt

SEQ ID NO: 328331 - DNA, 646 bp, Homo Sapiens
  misc_feature (335)..(335): n is a, c, g, or t
atatataaagtatttatttttaatgcacatatttacctacaaaatttacagaaaataaaacaaagcagaatatatagaataccctcttaagacttcttaggagctgagggttttattgctgcagttcaaagaatcaaattttatacaagtgaaagctaagatgaacacatttaagttaaatggcagccttgttaaaaagcttttttatcctgttattgaattttcagctttatgttaaatgaaatttaaaagattgctcatgaaataatttaaaccttttcaaaatctaataaacaggtaaaaggcacctccagtacttttaaaatatttacagncaatcccaatagtttaattttaagggctattatagtacatgcggctattatgcatacacagtatgtcattaacactctctaaacagtgagaattgtagactctagtttctggcaccactcccaagttattctggtgaaggcataggatgaccaattacacctgtgcaacactagtgtcacagcctgtctaccacagcgtaaaatccagttatctaaaacaatgactatcaaattcccccagacaatacataatttatcagtagacttgtatattcacaagcctttagggtattttaaaaattattaaagag

SEQ ID NO: 328332 - DNA, 445 bp, Homo Sapiens
  misc_feature (228)..(228): n is a, c, g, or t
  misc_feature (230)..(230): n is a, c, g, or t
  misc_feature (232)..(232): n is a, c, g, or t
  misc_feature (236)..(362): n is a, c, g, or t
tttccctgcttttctaagtagacttttctgctgcttgaacatacatgtaaccattgttcattggcttaagctctttattatgaacatcagctattttataataccttaatatagaaaacctctcaggagctgtttaagtataaagccaagattttccttaggctaatggtctgacttctgtgctttcaaattaaagtacttaaagcactgaaggattggccaggtgtngngngcannnnnnnnnnnnnnnnnnnnnnnnnnnnnnnnnnnnnnnnnnnnnnnnnnnnnnnnnnnnnnnnnnnnnnnnnnnnnnnnnnnnnnnnnnnnnnnnnnnnnnnnnnnnnnnnnnnnnnnnnnnnnnngtgctcatgcctgtaatcccagctactcaggtggcagaggcacaagaatagactgaaagtaaaaaaataggcacaaatagacc

SEQ ID NO: 328333 - DNA, 740 bp, Homo Sapiens
  misc_feature (353)..(353): n is a, c, g, or t
  misc_feature (614)..(626): n is a, c, g, or t
ggaaattggtggtttcttttgtttgaattttttccaaagtatttttctttaagagtttatacactgcagtcatccagcttttccctgcctcgtgctttataggaacctttaaagaaatctgcacaagaataatctcttttttaatcgcattataaacctgttcatacgcaagtatgggaaatgtgaggatgttatcggagttgaatgggtcatctgttgaatatcatgtgcttgtttcacacaaggcatacacatgttgggaattttgcaatcggcctgggaaaaacctggatgagggcatattctgtggggattccctttactccccgaggtaggagggtccccaaaggaangaacaaaataaagagtgactgaaatgctaatctctgcctccccccgatggaggaatggtgttcagttgatgtctattcagttgctaaatgtgccctggaagggaggtgttttcattgtgaaagtggtctttcatattaaatcgagttacatttaaaagaaatgaataagcacttggctgactgctactaggctaaatctgctttcgtcgcgtagataagatttctggtgctaagcgaaaaccaagtatgagaatgttgggnnnnnnnnnnnnngccatcaattttagagagtaattaatctgacacacacttattaccctcataagaaagaggcaaaggtaagttgtctatgggaaaatgccacatattttctacctctcttacaac

SEQ ID NO: 328334 - DNA, 1125 bp, Homo Sapiens
ttaaaaacatttaatgtttggtaactaaagggtagatgcgattagtgtactctaggtcgtttgattttatttttttctgtaggagctttcctcttttgtgataatccagtcccaagttccttattattctgaataaatgaaatagcttctggtagacagtaattttctacatgaggaggtgattcctgcatgagataatcagcaatgtattctgttctcaagcagtacacgttctgggcagcagcttctgctatattaactcctgagtcatctggtttcagtttattcaagtcagaaaaaagatgtgtggcctctttaaataaaggtacagaatgaccaggtagcacctttgctcctcctgactgaagaaggcgtttgaagcctgcttctcgagactgatccacatgtaaaataaccttccacccactaaatgctccctcaacaatgccagattcttgtctttgctggattttttttctccatctcattgctgcaagtgctagtcttcgttgctgtacattgattccagtcagaacatcaagtatggaactacttccccattcatagtcttcttcctgcacgaagtgtccagcagtcctgcaggcttcaaggtaggagcgatgaagcacccacttcccagctgccactgaggctaaatacttctcgtttcgaagtggatgtcccacaacaatgtgtgtacaggtgggatcaaagcactgcttttctatcaccaatccacctagtttctcaatcagatgacaatagtcaatacgttcttgaggattcagagatgataactgaaatatgtactgtttttttaattcttcatgagtctcctctatcgttataatcttttctctagggtgcggagccacaggggggttggcgagtggaaaggcaatactgggggcttgaggcgtagggatcaggtggctgtcttttatgggagtttccagttcttcagagattgggtgtttgggagcttcagtcacacgtatgtttccaggatcacagacagctgaggacaataaaatgctgcagtgtgacaggatccaaataagactaaaaacaaattctaggaaatattctcatctgtcttagtcaagatgaagtcaagcacaaact

SEQ ID NO: 328335 - DNA, 705 bp, Homo Sapiens
acgaggagactgaaggtcatgaattctacgaaacttgttaaaggttgcacatctagtgaattgtgggatggagaacaagactgaggtctaagaccaaagatattttctcctctctagtcctctaatccgtcctcagaaatagtctttctatcctggcttctacgcccttcccaggctcatttaaccaacctcccctttgccctctccctcattctctgcataacttccatggcttacccgcaaagccagatgagaccagccccaagatttatgttaaacatttatgttatttgtatcaaaaattaattattggatctattaattcataacttcataaaattataactcatggcaaacatttgaataggattactaatgtcatgatattttgtatttaaatatcttgctttataaagtatgatgactaggtcatgctttcagaacagacttaaggtaattctaatactttcagttgtgtgattttaagtcacatgttatttctcagagttatattccttatgaaacttggggttcaactttacctattgcttatagtttcttagatggaaacaaaaggttctttaaatgaaagataaagctatatctggagggcttgaaattgcagttctaaagcttttgcaggtaaatcttgggttgatagcctgttatttctcccccatagaacaccaggctcacagatgggtg

SEQ ID NO: 328336 - DNA, 767 bp, Homo Sapiens
cattctctaactaaacacaataataaattaggagtccctatctttgtagaagtggtgcaggttctgggcttctcccttcttttcatcagcctctttttcctcttgtttaactcttcccaacttatcctcttccccccaaaatgaactaggcagtcttaatgactctgccttaatctcctccccaagtctttcttcctttctgcagttacgccttagacatgcgcactgaggggctcctgagctggcctcagccttagagagcctgcttgggtcctcctctgaccacatacatgtctaccaccgcaagtagtctgcagaagcaaggcaagagcctgtgttcccacctctagaccattctttggatacccggagccccagattctctgcttagagaatttcaagtctgttttcccaggtccgtcttctggaaggtggccacacagctgtgtgcacctctaggcccaaagaatggccaaggggcatgcaggtggaccttggaggtatggccaggaatgtcccacaaatgtaggaagctcctgaggtacaacacagagccagggatggaaagggaattgggtggtccagggaacccaacctgcagaacccccaggaggcagggattctacatcaaactggccttcccagtggccacgaaggtatacttgtcaagatcagctgataggacatattgtacttaattgtttgttagcttgaagtataacaattaaggatgaggcctgtggtacatctgcactcttgccttgggc

SEQ ID NO: 328337 - DNA, 782 bp, Homo Sapiens
  misc_feature (483)..(566): n is a, c, g, or t
agctggagcagaccactcctgtcacagaatgctgagtgggtcccagctttattcaaggttcatttcattcatttcacatgccatctcctcccagaagctctctctcactgccccagccaaaccccaaacccgagacacggaaaacctggatataattttcctttttctataccccatagcattttgtttttcttactgcacatttcacactgcacattttccctgtcatttttaatagattacagagcccttgtcagcataggctttatcttgtacatcttttcatcctcattttagtataatattttctacttaggaagatactttttaaaaggtatttattgaaatatagggacttcattggaaaatgaggtatacattaaaacaatatggactttgttttaaaaggtagtatctcttgtagaaattttgggaactactgataagtaaaatgaagaaatgataatggcaaaaataagtatnnnnnnnnnnnnnnnnnnnnnnnnnnnnnnnnnnnnnnnnnnnnnnnnnnnnnnnnnnnnnnnnnnnnnnnnnnnnnnnnnnnnagttggtgggtatcattatcatccccagttttcagatgtagtgggagaaaaatgaccctaatctcattcacctagagaaaactactacagtactgataatttggtgtggtcttactatggatatattctttttccctcattaatgtagaaactgttagatggaccactttttcagttaaatacaaatgagcattcaggacattaattcttccagtt

SEQ ID NO: 328338 - DNA, 789 bp, Homo Sapiens
  misc_feature (35)..(35): n is a, c, g, or t
  misc_feature (66)..(66): n is a, c, g, or t
tggctggctatcagtcaaggttgctcctcagtttncttccccatgttggcctctccctctgtaatnccagcaatggtacatttaaaccctcttatgctttgacatctaatgtcctcccctacaaccagccagagaaattctgtctttaaagggcttgtgtgttacctccagttccccaggataatttctctaccacccagaataatttctctatcttaaagttaactctgccatattaaataatgaatcatattcagcctggaaattatgaaaggcatgcatactaggaaaggtgggggaggggaaaaccttggaggattggaaaatattttagaattctgcttactatacctgcaacatctaaaatatttactatttggatctttatagaaaaagtttgctctaatgtataaaatgtgcagtctacttccaataaaagtcactactttatgaatagtcaaagtgccttatgacagcatccttccgttctcccccattctgtgatgtcttatattttgcttttaaatattttataaacctcacaacctattttattatctttgtttaaataggcatttttatttaaagagacttcaaattatttaaaaagtcttgtatttgaatatgtatcatctctaacatttttcattattttatttagatcccaaatttcccaggtggtatcattttccctctgcttgaagacattacctttaacatctaatatgttacagctctgcaggcactcagttctcttgtttgtctgaaaaattattttattctttattt

SEQ ID NO: 328339 - DNA, 549 bp, Homo Sapiens
gatggctataagcatttacactaaaaaagtagaaagatctcaggctgggattacaggcgtgagccacacgcgcccggccatagatagcattttcaatgattatcaacctgtcactgttaaatgaatatttaaaactcccctaaagaaatcctaaatcaagatgtgtgggaacaattacaggatcacagaacccattgaatttttagagatggaagtattttagagacaatcctatttcctagttccttattttacacagaatctgaagctgaagtttcttgtccccaagttacccagatgactagtagcttaaatcctaggtgtccaaagttttcattgggtactcagtcccccacacaatccagatagcagtgagggagaatgagtggctttagaagcatcataatgtgcatccacactgccaactcatacagagagaaaacgtgacacatctcttcacagaacacttggtacttcaaatgactttcctatacattatctcctttagtctgtagagggttcactatggactaaattaattaagcggcc

SEQ ID NO: 328340 - DNA, 708 bp, Homo Sapiens
  misc_feature (197)..(197): n is a, c, g, or t
aaagcaataatgggtcttacagttgaaggcatcctagaatcaagaatatatgcaaaacagtacaccttaatgaaattcaggtatgactgggtatacaggttggaaaataaaagttcccaaggacatcagaggtatcttcaagatacaatttagaagggtcaagttgcgcagaggaggataagagtgtacactaaganaataaactctttttattccttctccacacatttatcttaagaattcatccttaaaagttttttaaactatgatattaatcaactcagaacctgttttatatatgtataagccctcttgaatttcttctggataagcagaacatagtgaattaaaattaaattatagtaaaagtaatgctagagttaacagaagtgggaaaatagatggtagaaaagaggcaaaaagcaatacagagctaagaatttctgtatcttatacatatggagtcaatacaaaatgtctaaacttgatagaacaagaaatagaaatttaagcatgttattcaagttacaaatgtaactgacagaggctagtctgaaggtagtgagttacctcagttgactgttcagttagttgcagatcaaactccttgttctactctttcccctctttccactactgcatatgtgactagtctaaaaaatgcttttaatcgaaataaattttttttaggccaggcacagtggctca

SEQ ID NO: 328341 - DNA, 787 bp, Homo Sapiens
ggagaaatataatatttattcatggctttatggacttgatcgatctttgagaacctactaggtgtcagtctctgtggttggtactggtgttcagaacagtcttctctcacttgagggcacagtgagcgccgtgaccatatcatttgtggtaaattacacgggaagttagcttacccttgcagaggacgggagacagttgttgctagcatttgtacattcattagcctcccccttctccctgttggaaatgtaactgtcccagctacacagcaaatgtgtattctagtaacctgtgatgcctgaactgttcaagatgatcaagttaaaatatgaatgtgctgaattaaatgctttattcagcttatctgcatctaggctctctgaattacgcacccacttaaaacattctgtcaccttttctcttggaataattaaattattttaatgtaattcagatttctttttatcctagcccagcattacctgggagagaatgactcaggattaatcataataaaatcatattaaattatattccactaattcagaattggggataatttggcaattaaaggcggaagtgtgtcattcctctcctgtaagaaatgaacagtaatgatgggctcacagagatcatattgcttgttgcttaaaaaagagatcaagcagttttcagactctggaattgttggcttatttgccaataaataattgagaattattcttaatgtcccttcccccaactccactttccagagtttagatggaataactgtgtataacatcc

SEQ ID NO: 328342 - DNA, 654 bp, Homo Sapiens
ctgtctctgacccgaggcagcagagttttgggggagggagaaacaagcaaggagcagggaggacaaggacacaagatccctttgctggtggtgacttactcacttcccccaccagagggcctgggactcccgaaactcccgtaactggaaagctccctggctcagctccactggggggtgaggagggcggctccctcagccccagcctagcggcctccaaccctgtgcctgagaacatgagcagcggtctaaagcatcccctagtcccatttcacttcacagaccgatttggttgcacagccctagaattcaacagacaacaaaaatggctgaaattcccttagaatacgcagagggaggaggtgactcaccaaggtggctaaaacattttatttaaaatatatattgttaaattaagtctgctgtctggacaatgactgtttgttttgttttcttgtagtggagtttaaaagagactattattttactctgatatattattattaaaaaggcattttaactttgtacttgaaaactaaatgagcgatttcatgtgttttagctgaggcattgaagtagcgggtgcttacttatttgtgggaaatcatgtattcatactgaagaataaactccgtagctgatttggtaataaaa

SEQ ID NO: 328343 - DNA, 724 bp, Homo Sapiens
  misc_feature (80)..(80): n is a, c, g, or t
ctagagggtatccaagtaaaagtcagtccaaactttagtacaatacttgcttgtaaagcaggctggcattcctcatcccnctggatacacacatttaccctatgggtgtcaggatgataatcccaggatacccaacgctccagagagtccagtggggtttaggaacagccctggactcgaagctggaaatggtttctagctccagctctgctgcctacttgctgtgccactttgggcaagccccatccactctctgggcctttgtttttcatctctagagcaaagaggacaggctgcctgattgcttggagtctaaccatttactggtttgctccacaccctgggtgggcgggtggtagaggtgtctggtccctctttctcgtacccccccacagcctctccagggctaggcaattaacctgcacacaaatgcaaaacagatcccactttttaaacctatcaggatgattttcagatcctgaaagacactgaaagccagattaagatgtttaggttcccttctaaaggcagtaagagaaactaaaagaaatttcagcatcaaagtgatgcaggcaggactaaatggataggagggagcaagccagaggcactgagggtgtctggaagtccaaattccacttccctgagaatcaagatgcctcagatggagattacgccactttgcccaaggtgaccgctaattaattagcagtcaggtcccctg

SEQ ID NO: 328344 - DNA, 975 bp, Homo Sapiens
  misc_feature (335)..(335): n is a, c, g, or t
aaaacatataatgcgatggttttggtatttacagagttgtgcaatatcactacaatctaactttagaacattttccttaacccctaaataaacctcatcctcatcagcagtcacttcccatccatcccaccccaactccaaggcccaaggatccactttctgtctctgtggatgtgcctacggaatctgtttctcaacacacttctgggtgattctgctcctgcaggtccacggtcgagcattcaggaaccagtggaccagactgttccaagatcctttcctagtctaagctttcatagccggaacaatgaataccgacggagtagcaggtgctntgcttggtgctggggttgtaaaagaaatatggtacaccctactcttgagaacctacagtcagtgggaaaaatggaatcataaatgactaactttaatacaatgtgagaagcgctctaacagcatgtgcattcaaaagaggcccaggatgcagatgaggtgattaatttgcagccaggagaagttggagggggaagggaatgctgtgttaactgctttccatgcatttcatgtactgctcatcacaattctgtgagctggatattaataccactatcatcctcaagtcagaaaaaaggagacagaggcctagagggcaaagtggggagtggcagagttgggtgtgagcatgaagtagtcaggaccctaagactgtgtccccactccctatgctagcctacacaatggcccaggggacctcttagagtaggggctgctgaatatcccaatcttagcacacagtaggcactcagtacatttttgcttgatttggactgaaaagggcctcccaagtaaagccaaagccatggaagcaggaagacgtttgtcaccttcgggagtcagcagaggagcaatgcgagtgacgccaagaggcttccggagctgttgactcttatgtgaatcatgagcccactgtccatt

SEQ ID NO: 328345 - DNA, 719 bp, Homo Sapiens
tttctttataacagttttaattcaagaaaattgttaaacatctgtgatactctaggtattgtgctaagcaggagagatataaaattaagtacaatagaattcttgatctcatggaactcactggcatgaaacacaaattttacgagtgaatataattgaaatgagacaagcactatattaggggtatggacaaactgctctgaaagtattgagaaaggaatgcccagcctcctccctctgtgaggcaggaatggcttcactaaagacatttgaaagaaatccttgataaggcttagccctttcaaatcatcctttctcttctttctctcacatcacacatccaaggtctcaacaaaagctgttatctctacttttaaatatatctgaaatcctggcctcaccacctccactgcttccaatctacagtagcttaacatctctcatagctgcagtctcatcactggtcttcctgcttctccccttgcccagcatggtccattctcaacacagcagccagatgactctgatgactctgctaatggatgtcaggtcatgagttcctatgcaatgcgcacgattcgcgttccggctctttgtggtacccgctgagctccaggccacacactggcaccagtaatcttcaggtccaaagagttcttccgacttgtggcgcgaaatctcaatgctcacttcccggacaatgagaccggaagtttcat

SEQ ID NO: 328346 - DNA, 388 bp, Homo Sapiens
  misc_feature (377)..(377): n is a, c, g, or t
ccttctgtggggaaaataatattcattacagttgacaatggaggcccttcgactcagttatcctactaccgattatttgtacctgagcaaatgtgcacacacataagtgtatatttactgcaaatctcagctaaagtcaatattagctaaaggtctttcattaggcttagtgttgctatccacatttcacatagtataaatactgaccattcattaataagaagttaatgctgctaaaaattgtttttgcatcttaggttaggcatgtgcaggaattcaatggctacaggtaacatgtcattagtctggctttagctatatgatgagggaaactaggaagtccattctaagatatgtcgtgtttggtaaggacattnctaaggaaatt

SEQ ID NO: 328347 - DNA, 952 bp, Homo Sapiens
  misc_feature (12)..(12): n is a, c, g, or t
  misc_feature (42)..(42): n is a, c, g, or t
  misc_feature (186)..(195): n is a, c, g, or t
  misc_feature (730)..(730): n is a, c, g, or t
aaattcggccangaggaactaatttgcattcccaccaacagnagtataagtgttcccttttctctgcatccttgccaacgtctattattttatgactttcataataatagccattctgactggtatgagatggtatctcattgtagttttaatttgcatttctctgatgactagtgatgtggagcnnnnnnnnnnaaagtttgctgggcacttttgtgtcttcccaaagcatttttaaatctctagaatgatctcacgtaattgcagtgctatattatttgggagtagaaatttctaaaggcgaataatgctccttgggacttaaagaatgtttgctcttaaattaggacagtatattaaaaccgaaaatggctttcctgttccaaaagcctggaaacactataatctccatgcaccatgaagatatctttacacatttcttctcgggggctctggtttttgttctgatgtttgccattacaggtgaagcagcactgtgtaacaacaatttcctcagcgctataaaatggtaagccacacggcagtttgcttgtcataggagagtttagaaaagatctgctgggaaatttccacatcttcacagttctgtcctcctctgcaattatttattttcttttaatgtatcctaattgtatataatcattgctgtccaggcaaacttctctgttgtgtcccttctttcctttgtgtgtgtgtgtaatttagttanttcatgcctaagggaggctcccctaaactcccacctctttaaattaatagggatttttcctcatcttaattctcatggttagaagatatgaatcaatataattctttcctaatacttacatgccttcgaaagagaagatttgacagttgcatgaagtgattggttttacacacgtaataccttgatgaagagagtttcttggttggtcgcagtggctcacac

SEQ ID NO: 328348 - DNA, 799 bp, Homo Sapiens
  misc_feature (427)..(489): n is a, c, g, or t
  misc_feature (785)..(785): n is a, c, g, or t
tgcactagatgtcatgttttatggccattaaaatgacaagtgtgaagaatgtagcagcaacatgaaagtatacttgtgatgtaatgttaggagaaagagtatgatataaaattatgtagcagatcatctttatgaaaaaaaatcttgcatgaggacaatgattagaagggaatatatggacacaaaatgaaaattgctgttttttggaggcttgggttgggagtgctttttatattttccacccttcctgaaatgctactatttcctgttgccatcaaacaagagtcaagagataaggtgaaacccattagcaaatctgagtgtggaaaagaattaattaggaccaagggattctcaggcagtgcttcttaaactttaacgtgcacataaaccacctagcgaatcttgctaatatacattctgtacnnnnnnnnnnnnnnnnnnnnnnnnnnnnnnnnnnnnnnnnnnnnnnnnnnnnnnnnnnnnnnntttgtccttcaaccacagtttaagttgcactgccctggagcaccctctttttcaacccctgagggttcctaaagtgtgtcggggaaggtctggaagaccttttctttttccctggggtctgttattagctgactgggagttggttctagtttgcattgtaaataaatgctgatgagcttttcacagaaaagcctggcttctcaaggtaggcttcagagtgagggctgctgctgctgaacctgaggcaatgcacaaaaggcttttgctttagatcctccccatcatacagggccttnccctgcatcttggg

SEQ ID NO: 328349 - DNA, 1303 bp, Homo Sapiens
  misc_feature (826)..(826): n is a, c, g, or t
tggatatttataaaagctgttatttcaggaaaagatctaaagaagctcattccaactcctttgtataaactagggaacacacaattactttaagtagaattaagttttttcttaattgcactccgattacatcaaaggtaaaacatttagtgatcttaagaatttaacctcctcaaattttcaatggattgcctttcagaatgatttttctaattaacatgagaggaaatctagctaataaaaggccaaactcttagattcttttcaagagttgaatgaatttttatgtatcaacacagatggattccagtattcattcactaagcagaaaggaataattaatttttatcatccaagtaccatacaaatatgaagttaaaatataattttcattgatggtcagtactgtagattccatgttatgatgaattccaagatcatcaatttctgcatctttagtagaaagtgtacttttcagtgttacgatgtcttcaaagagtcttcggtttgtctttatcttgctctttttgactgcaaagtgcaaaagattcctgaacaaactgcctgcacattgggcactgctgaaaatacttcacacagccatcacacaggcatgtgtgtctgcatggtaagagtacccagttcacagtcccattctggcaaacaacacagtccttgctgttctcttccgatggctcaacttcactttcagagagtcccaccttttccaacaaacttctgtctgtgtttttttcttctgaagaggaattgttggagggagtgaaattattatttgcagacatgaaaagttgcttaagatcatganattgaccttgagcccagagtaaatattgatacaatattctgcaggatagtttataagtcctatcaggaatatgaatcactgacaccatggaaataatatcataaattttccggtcatcctcatcagcttaggtcaatagcgctaccaatggatagcgagatctgggtactgtaccaaagtcgttcaattttagtatctcttggtaacgtggcaatatatttcttctttgctatcctttttaataaaatactgttcctgatagagatattcactatacagagcatcttctaatgcttggggagtgcttattctgaagcaataaacatgcttctgcagagcttcatataatttttgaacactgcacccccagtagcatgtaaggaggctatcttcaaggcaatctgttgtcaaggttatgccagttgtaattgaagctgaagatggattagtgatctctaagccaaaaggattctttga

SEQ ID NO: 328350 - DNA, 480 bp, Homo Sapiens
  misc_feature (13)..(13): n is a, c, g, or t
  misc_feature (50)..(50): n is a, c, g, or t
  misc_feature (56)..(56): n is a, c, g, or t
  misc_feature (102)..(102): n is a, c, g, or t
ggtaagaagaacnggggtttggcccaactttgcccccagaacgggtcctnaaaacnccccgggacctccaagcaaatcctgcccggccctgggccctccccnaaagtggcctatgaattaatagtgtcaggccacccacaccccagccctatatttgtattcttaaaaaggtcatctaactttatatattctaatgcagattagcatatggattttaccccctctactgtatttgggagtttactatgatcttaaatatatgtatataagaaaactttaaaaatgcaattcaaatcatgacatggtaatacttttgaaaaggggactgattaaaaaagatccaaaccggcagcataaaaaaaactggaagaatattaggtttcagctatttattatctctccattacacataatcaacgataatctggtactaaggaatatacaaatggcaattaattttcctcagttatcttatatttt

SEQ ID NO: 328351 - DNA, 483 bp, Homo Sapiens
aaatataaaaaaagatttaattcatatttatgccaagaacactacaatttacaaaagtttcatccaaactcttaccctatgtctacccacaccagagggaggaacatgtctttgtggagaggatttctttgagactctaaatatgctttgttcaggaaaggggaagatacaaaaatatagaacaaaaaagaatattggctcattgtacacaagagaggccagccattaagaattgttatcaatacaataaaagggaatacttggccagagatcctctagataagtagctaaaatgtgatcaaaaggagaaagaggaagaagcaaatacacaaacgttttatgggtattaataaaaataaagacatctctgaacaaatgataaaatcccttccctgaaaaatttcaaatgagattcacagaaatgcagaagcagaagaaactttagatttagaaacatctcatttgggctgggtgcaagtgtca

SEQ ID NO: 328352 - DNA, 725 bp, Homo Sapiens
ctcaaatgtctggtgatgttccccagcctgtgggaggcagatgagattgaaaccagggtgtacatgagtgacctggagcccataagtaacagtaacacagagcagagagcgctagatgaggtggagctcagaggagcatgggaagttgaatgagacagtaaggagcattctggaagctataatgggtagttaggagaatgccagagtgattctgatgcagtccttccaaatgccggcagagccaagctgtgaccagtgacgcagactggaagtcccgtttactgggagagaagaggttaaggaacacccaggtgaacaattaggtcctccacaattgaagacaggtaatgtggaggaaagagagcttgtcatggttcttgctcaagtaccaactctatggacccaggacaggtttgtcccatgacctgctgtgaacagtgtgttgtctgatagaagattcggttggcaaaccatctctctattgccttacagagcaagcaaagaagatggatcgattgaagagccatctgactgtgtgctttctaccttctgtgccctttttaatcctagtatccactctagccaccgctaagagtgtgactaacagcactttaaatggcactaacgtggtcttgggctctgtgcccgtaatcattgccagaactgaccatatcatagtcaaggaagggaacagtgccttgattaactgtagtggttatggcatc

SEQ ID NO: 328353 - DNA, 478 bp, Homo Sapiens
ttaaagtcagaaactttaatttccaaatatattgatcaaaaatatacaacttcaacagcaactctttatcctaaggagagatcccgcagtatatctagggaaagggccataaaagtgagggggtagaggactttggggtatatcccaaacttcccctgcaactaaacagagtttgttctctgcattaacaacacagcgatttcctcatttcctcctacatgtttggagaggctgaaggctctgcagttcttcctggaatgacagcctgggtccattcctctctaggagatgtccaggggaaggaggacatctgcttactactcctacagtgtttctggccagatcctacaccccattttagaggcttcctgataggcatgaagggaagtcatccacatccatggtatctgagaaggaatttatgcctcagtcgtggcttgtgctgaggtgaagaccacactctttcggttttccagcc

SEQ ID NO: 328354 - DNA, 519 bp, Homo Sapiens
gagggggcacagaaatgttgcaagcaaatactatttgtaaaggtggacttaaaaagatctgcttatcctatatatccacataactctagtgttacataaaatatttagcaagtttctgtgacaggtgctcagtaaacactttgactccttttttggtataataaggaaatacagcaatcgtgggcttttttgaaacctgaaattccttacaagctctcattttgtggttttgagagagttgcaggactaggctgtatcctatttctatacctgcctgtgtatgctaatgtgtgttgatttgtgggcatctgataggatgttggtcatgaagcccccttaaagtggcacttgaatttttctcctttctatatttctttcaccaaattttattttactgttatttaatcttaagatttatgaaaccttaatatatctgtgccctgaattttgtcccactagaaataacactgaagcatcagtgcagtcctttgaggatgctgttaagtttaattatgtctg

SEQ ID NO: 328355 - DNA, 736 bp, Homo Sapiens
  misc_feature (362)..(416): n is a, c, g, or t
aacattatttaattactattagtgaaaggatgaattaataaataaacaaatgtagaagtaatggagaagaggagggccagtcttcagtcaatgatgactctgcctctgttgaaaataccataccctatagacagatttaagaatacacaaggctcatgttcttggtttttgcattaatggattttgattctattattataaatagatcaatgaaagaatcaataaagcaatagaaacacacatgagtaatgaaatcatcgtacaattatgaaactatgtagggaaacgagaagccatttatatatatatggaaaaagtctgttaagaaataaatgtttcaaatgtgttacctctagctaagnnnnnnnnnnnnnnnnnnnnnnnnnnnnnnnnnnnnnnnnnnnnnnnnnnnnnnntaaataaatctgaataagtgaagtactgtccaattacaaaaattgtatgagtagataaaagaaactattcatatatattgaaaacaatagagtctattatgaaatagtcaatatacaaagaaacgctcttgatttgtgtcagtgtcaagatcaatgttgtttgttttcttaaaaaattaataaatattaagtgaaaattttaaatgtctaaatgattggctaaatgaaaggtgacatgcatagatcgaggaaaataatgtctccatttttattttctttatctgcactgctttgtacttacaggccttctgctgtgatcg

SEQ ID NO: 328356 - DNA, 390 bp, Homo Sapiens
tttggttttaaaaaaatgaattcttttattgcatattacctttgatgtgccatacattcttttaagtattatgcaaagtgtttcacaaatttctccgaccagggaacactttttcacagagcatcttcctggaccagtgttctttgggaaatcctgggtctgatgacttgccattgctgccatgtgtctccattctctggtttcttggcttcctaggttctgccactgtggccatcacctggttggtttctgccatttgagtagagagaggcatcagagtgacaggccatcactctttgtgttcctcttgaggtatgacagagaggaaaaacaaaccattctggaggatgagaagttcaatatcaagttgctggcatctggcaagggcct

SEQ ID NO: 328357 - DNA, 467 bp, Homo Sapiens
  misc_feature (450)..(450): n is a, c, g, or t
ggggtttaaaaaaatgaattcttttattgcatattacctttgatgtgccatacattcttttaagtattatgcaaagtgtttcacaaatttctccgaccagggaacactttttcacagagcatcttcctggaccagtgttctttgggaaatcctgggtctgatgacttgccattgctgccatgtgtctccattctctggtttcttcttggcttcctaggttctgccactgtggccatcaccattctggaggatgagaagttcaatatcaagttgctggcatctggcaagggccttcttgctgcatcatcccatgaaagaagggcaaaaagagaatgagggagagaaagaggcaaaaggaggctgaactcatccttttgtaagggaacctactcctggcaataacaagcccacttccacggtaatagcattgatctattcatgaggggaagnaccaccctcggtgccga

SEQ ID NO: 328358 - DNA, 528 bp, Homo Sapiens
ggttttaaaaaaatgaattcttttattgcatattacctttgatgtgccatacattcttttaagtattatgcaaagtgtttcacaaatttctccgaccagggaacactttttcacagagcatcttcctggaccagtgttctttgggaaatcctgggtctgatgacttgccattgctgccatgtgtctccattctctggtttcttcttggcttcctaggttctgccactgtggccatcacctgctgaacatcagctcagagtagatgggatatagccacgttacagagggctttgaactcgattccatggataacatgtcatctattgaggtgttaggtatgaatgtattctggatgctgcagttccttgacggggtatgaggaagcaggttctttgtactaggaggagtggaagatgccattcccagaataatgctattagaacagcttagaccttgaagaaagaagtcccttttcttctcctggctttctttctttagtatcttctattgacagaacctaacattctg

SEQ ID NO: 328359 - DNA, 719 bp, Homo Sapiens
  misc_feature (63)..(203): n is a, c, g, or t
ctctgatgacattgatatttttgaatgataaagtccctcctccatccttcttttagtttttcnnnnnnnnnnnnnnnnnnnnnnnnnnnnnnnnnnnnnnnnnnnnnnnnnnnnnnnnnnnnnnnnnnnnnnnnnnnnnnnnnnnnnnnnnnnnnnnnnnnnnnnnnnnnnnnnnnnnnnnnnnnnnnnnnnnnnnnnnnnnnaaaaatatggaacacttcacaaatttgcatgtcatccttgcacaggggccatgctaatcttctctgtatccttccgattttagcatacatgctgccaaagcaagctctctatttttcaaatattctgtgatcggtatgccatttgttttcctaacactgaaaggcaggtagaagaagtggcctaagaacaagtggcaatcagacagtcctggactcaaacccctggcttcttcattagcccatgtgacccatgtgaacccagtctatgtagtctatatggagctgactctctccctagctccaaaagtgagcacataattcaggcataatccaactgggttatgcagtgccatggccacatgatcaaagttaagccaatgagaattagttctaggaccctcatcagcacacttagtgatttcttttcactggactagaagctatgaatatgacagcctggagctgtggcacccaccacaaggagaaagcccacctgacattgagctctgtgccgaa

SEQ ID NO: 328360 - DNA, 496 bp, Homo Sapiens
  misc_feature (422)..(422): n is a, c, g, or t
ttctctgatgacattgatatttttgaatgataaagtccctcctccatccttcttttagtttttcttcaacttttattttaagttcaggggtacctgtgcaggatatgcaggtttattatataggtaaacgtgtgccctgggtgatttgctgcacagatcatcccatcacctaggtatttagcccagcatccattcattatctattcaaaaatatggaacacttcacaaatttgcatgtcatccttgcacaggggccatgctaatcttctctggtatccttccgattttaggcatacatgctggcccaaggcaaggctctctatttttcaaatattctgtgatcggtatgcatttgttttctaacactgaaggcaggtagagaagtgggctaagaacaagtgggcaatcagacagtcctgggnctcaaaccctgggcttcttcattagccatgtgacccatgtgaacccagtctatgtaggtctatatgggagctga

SEQ ID NO: 328361 - DNA, 755 bp, Homo Sapiens
  misc_feature (464)..(497): n is a, c, g, or t
cgggtttcgtgaggaggcttaaagagccatgagaaagggaggacccagcagtgactccctggctaggggtggggctttgtgttgggcatcagggccctaatgccctgtttacccagtggcccgccagcctgatcctcacagccaaggagcatcctgacctacagtacagcatcagtgtgagcttttgtgtattgaagatcttccttggttcaggcgctttctgcaagtcactcgaacaccgcttcatctgaccacacccgcttcccaatttaaagaagatcgttggatacactgttagccctataactctggcctttttcttttaaaccactctctacaagagatgattatcacttgcatgtgagtttctgcatttctgccatctctccttctctactggaagctctgggagggccgtgtcagtcttatccacctcgaatacccagttcctggtgggtgatcannnnnnnnnnnnnnnnnnnnnnnnnnnnnnnnnnggggaagggcctgagagagtggacagagagacacaggcaagggagagggaggaaacaaaggggagggagaaaaacagccaaaagagttcatttaacttgagtttctctgtccaagaggaatgagccattgggaatatactggataccattgaatacttccagctgcaaaggatttatcagtgaggagctctcagctgctagtggcagagacctgatttaaaatcaggcttggctgggcatgatggctcacccctagac

SEQ ID NO: 328362 - DNA, 582 bp, Homo Sapiens
  misc_feature (182)..(182): n is a, c, g, or t
  misc_feature (428)..(428): n is a, c, g, or t
  misc_feature (453)..(453): n is a, c, g, or t
  misc_feature (484)..(484): n is a, c, g, or t
  misc_feature (528)..(528): n is a, c, g, or t
  misc_feature (571)..(571): n is a, c, g, or t
tatacacttcattgatgagacactgaggctgaaagaggcttatgaaggctcctaagtggcagaactaggccaggaattcatttcttttgactcctgttgaatatactaagggccctatctctaccaccttgtccttttggaaagcaacagtcaggatgacaatggcctgtatgtgcatggcnccttgggcaaagcagaagagggaggtgaataaatgatgctgggaagccagtttgagttgctttgttcacttgttaattcagccatccagcatttcttgagtgttgattatgtgttgggccatgggtgctagggtgttagggattttgtgggatgaatacggacaacaagtcctgccctgtttccccaggaggacttcacaatactgctttaaggggaggaaataccctcatggtacttcaataatnaatacctatggatctaggcaacttngacaggggggtaatcatataggaccgggggnacagtctaagggcactgggttctgactctaggggccatcagganccacttgaggggggcttggggtaaaagctggcctgttgggggncccagctctgg

SEQ ID NO: 328363 - DNA, 495 bp, Homo Sapiens
ttcggagcatggaggagacactgaggctgaaagaggcttatgaaggctcctaagtggcagaactaggccaggaattcatttcttttgactcctgttgaatatactaagggccctatctctaccaccttgtccttttggaaagcaacagtcaggatgacaatggcctgtatgtgcatggcacctgggcaaagcagaagagggaggtgaataaatgatgctgggaagcccagcttgagttgctttgttcacttgttaattcagccatccagcatttcttgagtgttgaattatgtgttggcccatggtgcctaggtgttaggattttgtggatgaaatacgacacaagtcctgccctgttccccaagagactcacaatactgctgtaagggagaaataccctcatgtactcaataataatacctatgatctagcaacttgacaggggtaatcatatagacccaggcacagtctaaggcactggttctgactctaggc

SEQ ID NO: 328364 - DNA, 750 bp, Homo Sapiens
tctttttgtctaattgttcccaatttccttctttccccacctttctcttcctttttgcatcttctctcctccacacacttagcttacacacacaattagttgatttcccaagggaactgagaggagccggggagaaatataaaagcttgtttaactagaaagtagatcttagcagctctcctttagttgcagcaaacattttcaacaacagtcactttcttctgacagtcaacggagaaaagctccactgcctctcctggctgccaggagcacatgacagggaaagcccaggacaaaaagaccaaatttacaaggacaattaagccaagaaaataatgggctcatgaaatccagagggaggagcacagctcggtctaaagaggtaatttctgagatccaatcaaaacaaataatacccaattatccagactgccacggtggggaaaagccaggtccaggtgggaaagtaagcaccgtagaaaggaaacacgcccactactagggaacttagaatcaagtgtgagcccacgattcctaattttcaggccaaagtagtggtatatatagacacctaaactaaggttttatgcaccaaagcttgagaataggaatggagctggtacaaaacggatacagaaaagattgtgggttaaacccttaaaaggaaaagagaccctgacaaatattttggaggtctaacccccttaagcagggaagaaaaatcctgcctagaaagactacttactgaga

SEQ ID NO: 328365 - DNA, 726 bp, Homo Sapiens
  misc_feature (120)..(369): n is a, c, g, or t
tcctgaaaaatactgaactgtaatgaataggcatgttgcaacgtttagggaaaattgtacgatgtctgcaattgactaaaaatatattaaaaatgcattaatggctggctgggcacggtnnnnnnnnnnnnnnnnnnnnnnnnnnnnnnnnnnnnnnnnnnnnnnnnnnnnnnnnnnnnnnnnnnnnnnnnnnnnnnnnnnnnnnnnnnnnnnnnnnnnnnnnnnnnnnnnnnnnnnnnnnnnnnnnnnnnnnnnnnnnnnnnnnnnnnnnnnnnnnnnnnnnnnnnnnnnnnnnnnnnnnnnnnnnnnnnnnnnnnnnnnnnnnnnnnnnnnnnnnnnnnnnnnnnnnnnnnnnnnnnnnnnnnnnnnaaagaaactctgtctcaaaaaaataataattaaaaatgtattaataggatgcacagatatgtgatagtggcaaaatctaggtggtgagtattaattctttccaacatgccctatatgtttaaaatttttaataaaatgttgggaagttatccaatactatagttatcagaagccaataaattactccgcaactctgggtgcacagcaattccaagggctgtcaccgggaacagagaattccttccaatgtgccctctgcctggccctaagcaagccactaacctcctttctgacacaaacctagacccacaagttctctgtactttcatcatcttgtcctgctgggcagaggtaatg

SEQ ID NO: 328366 - DNA, 812 bp, Homo Sapiens
  misc_feature (53)..(114): n is a, c, g, or t
  misc_feature (155)..(405): n is a, c, g, or t
tttttttgtatttttagtagagacagggtttcaccatcttggccaggcaggtnnnnnnnnnnnnnnnnnnnnnnnnnnnnnnnnnnnnnnnnnnnnnnnnnnnnnnnnnnnnnntgagccaccgcacccgggttctctcttacaaacggggtctnnnnnnnnnnnnnnnnnnnnnnnnnnnnnnnnnnnnnnnnnnnnnnnnnnnnnnnnnnnnnnnnnnnnnnnnnnnnnnnnnnnnnnnnnnnnnnnnnnnnnnnnnnnnnnnnnnnnnnnnnnnnnnnnnnnnnnnnnnnnnnnnnnnnnnnnnnnnnnnnnnnnnnnnnnnnnnnnnnnnnnnnnnnnnnnnnnnnnnnnnnnnnnnnnnnnnnnnnnnnnnnnnnnnnnnnnnnnnnnnnnnnnnnnnnntgagccaccagccctactcccctctgaatccttacaaccatacgcccgtgttttcttcctgcctgtcaccacgatttggaattgtctgtgtttaaatggcaatgttcagggtctcccgctagaaaaccagctcccaggggcaagggagatgcccacgggtcacttctgtgttcttgattcccccggcccagtgcccgacactcatgactgctcagcaaacgttggctcagtgtgtgacccggtccacgtgcctggcacataagaagcatcagataggtgtttgtgatttctgtggctgtcactgcctgagcgggcattttgagtgtaggagaaatagcagtgcctggatggtagaagcccagaggtcttgtcctagcttggcttcttcctcctgataattgaatgac

SEQ ID NO: 328367 - DNA, 1029 bp, Homo Sapiens
  misc_feature (46)..(90): n is a, c, g, or t
  misc_feature (363)..(363): n is a, c, g, or t
taaagagactcactcactcacttttttttaaggtctcactctgtgnnnnnnnnnnnnnnnnnnnnnnnnnnnnnnnnnnnnnnnnnnnnntgaggtcctgggctcaagcaatcatccctcctgaacttcctgagtagctaggactacaggtgtgcaccaccacatccccagctccttctatttatttatataatatatttaaagaagtatatttaaataagtgcatttaaggaaataagtatatttacttagtctctgtaattctgttgtcttctcttttttattatctccttcattaagcttctattggaaaatggaggccctcttggggggtttatgggggatttagcaggtagattcttnttccttaaataactcatcaatccttaagcctgtacccgagagactcaagacaattagaaactctacaaattaaggaacatgaacaaacctctcatgaagttacaataattaaaaataaaatttagaatgtttaatatcaaacccaacaggtaaaaattcaaattgtttcatttccttaaaattggctaagacaaactcattcataatatttagtaatgtgaatttttggtataagatgaagaagaaggatttgtaacaaaatctacacaagcacaaaattaagtaaaatgctactgaaatgtcaccttgttctttccttaagacatgtatgctacactttaaaatactaacaaaagctgaaaaaagctatctcctacaaaattgtggggaaaaattaaacattaactttaaaagagttgggtgtaccccaacaatattaaaacaactgttattttaaaatagttttccttcctaattcccaatatttccttatgagaaattcaaatgtttttgggtatttttatcctagcagtgagtgcatttaacagacagtaaatcagaaccagacctatgtaaggtaatttagtgtatgagaaaaataacgcgatgagaaatgtgatgtacttacactgacgccattttttctttcctaattattttgttgct

SEQ ID NO: 328368 - DNA, 517 bp, Homo Sapiens
atgagccaccaaaagtggctgagacttagaatctttatgtacaaatagcaacacaagaaagggagttggctattttagatagctcacctatctaccagctatagcttgttctgcctttattttgtgcacaattttacctggctgctctcaatctgggcacatccctcattctgagttcttgccatatgttactttggataggtctttccatgttttttagtcctcacatttctcatttctacattaacataacccagtctccaaagtcattgctcataaagagatgtttgtgtactacccctttgcctttctagttcagattccagtgcgtgaaggcttaccttgggtagaccaatagactccatcgctcttaaccactggacggtattatctgtgtgtcgaaaatgaaggccagacttctaaagtgacgataggagggaaaaagggagagaaggaaccacacaaaaagtgagtcatttgcaataacttttttcatgtacaggatgcttttcaattg

SEQ ID NO: 328369 - DNA, 732 bp, Homo Sapiens
  misc_feature (536)..(536): n is a, c, g, or t
gatattggagtgattttaaaaaatataattaggcatttcccaaatacaagattatataaacagtacaatgcatcataatagaagctggaaggctgtgtatgtgacaacagcctgctcaatgataagctccaatcctcaggacccatggctctccagggacaggaaaacctgggcagcttcctcctctcacttcagatctccccagttgggggcctttgggcactgacaggtaagggggttctctatattgaaaggagctttcaaacaccatttctatgattcaaggagaaagagagattgtataaaatactcatggttatagtccaacaccccattttcaactcttttgtcttgactctgaagatcttccaactgtccctaaaaatttgatgtattggtttaactcatggtgatacggtttggatatgtgtcctctccaaatctcatactgaaatgtgaacctccagtgctggaagatggggcttactgggagatattgggtcatgggcacagacccctcatgaatgggttggtgnccatccccatggtaatgagtcagttcttgccctggtagttcccatgagatctggttgtttaaggagcctggcacctcaccccttccctcaccatgtgatgcctgctctctgtcttccgctatgattggaaacttcctgaggcctccccagaagctaagcagatgccaacaccatgctttgtgtacagcctgcagga

SEQ ID NO: 328370 - DNA, 832 bp, Homo Sapiens
cttccaatagaggtgatagtcaatggttatgtgtttaaccagtaatattaataagaaaaataaagttgtgtttaacaagctatattaataaggaaaataagaagtacagaggattccataagatgactatagccaaaaacattaatattcttatttttctattaggttcaaatagctattctaagtacataatcaatctaatccaaacctttattttaaatgttgttttaaattatttaaaatttattaaagttttaatttaattagacaacatattttgaaaaatcaatgtaactaacatagtctataatttttatagagtataccttaattgaaactgtactttgttagctttcattgtcgagcgtttactgtaccgggtactatgctaagccatttataaacattatttcctttaattcttacaactcccttatatgagacatgtatcataattatttacagatgaggaagctgagaatgaggtaaaggaacttgctcaaggttacagagttgaagagatgggattccaacccaagccttttaactcttaattaccactttacagtgttatacatgatctaaatgaagttacttcctagtcctcaatcaatttcatctgtaaaggtgttagttctcagaaacataattattctaaagttattaaaccaataaaatacaaacaagaagataatcctggagtcttcaaattaccctgccacatatctttaagaaatacctaatctgacagaacccaaagagattaagaaaaaataaaagtatatcaaggaataagattaaggtgaggtttgttaagcccccttccccctca

SEQ ID NO: 328371 - DNA, 653 bp, Homo Sapiens
  misc_feature (637)..(637): n is a, c, g, or t
ggttggtataagtagctctcagacttttacccacatgagtttccattaaaattgtacaagctttgactttaaatcagctgatgaatagaaggagttgatgtgtgatcagctggtgctattgggaaaactgatgataagcagtggagcaggtaagaacgtattgttcctgaaccattggaggaactagcagcagtgacctctgaggagccctgggaacaccctgggagctcctgagcaacacgttgcttgtgatcactgacctgggatatcatgactgtgtgagcaacaccccccacacctcagtagcaaaaacagagaacagtggccagcacatcgtgggctgactgcagttggattctggctctcttacatgagaatgccaagtcatacaagaaagtgcctgccatgctgagcttctctttaccttcttgggttttaatggcattgcaagttatcagtataaaaactcatattagttatactaaatagttggaccaagttaagatattaggttgttatgtagtgtgcattttaaagtaaaacaaatgatagagcttttagaagcatctattatgaaaatgttccttcaagtctgtgccttatgaatctaataagcttttgcttttatatcaggttnctggtgctagctctct

SEQ ID NO: 328372 - DNA, 1112 bp, Homo Sapiens
gcgctttctctacatggttgttcatgtagaactttgggcaactcactgtgccctcaagttatgagtccaataacctgttgctccagatgcttgatttcctcaactccagtgcccttcaggtgaggtccacctcactttgctgatagtggcagaggcagtcaaatgcctaggccgatggggcgggtccccaatgaaaccccccttcaaaccaaagacagttcaaagcctgaaatccaagctacaagtcttgggataaatccatgggaccaaattgaggaacctctcttttcgtttgggcatgctttcctctgattaatccccacctttccacctatttttacatatacctactcttccctaagtggtttcttgcactgtgtttcttacctacctttgagtgggtgcctttgttttagcctttcttgcatactcataaaccaatcagcatgcactccccgattctgagcccagaaaagtcctggactcagccacacttggtggggactgcctgccttcaggtcaggggagctacccaacttcaggtagggggctgccttctctgggtccgctctctgctgagagctgtcactcagtaaaactctctgctgtgctcaccctttggctgtagcataacttcattcttcttggaacatggaaacaagaacttgagacccaccgaatgtgggccatgaaaaaggctatagcaatcccctttggggcttcagggtcactggcatcccttttcaagtgccaccacattccccttgttgggatgccaacgcacagggcggaggcaggtcaaggcacccccagcctggcccagctgtgggctgagtgtggatcctgtggtgaacacggggtccagttagagtacaagccaggtgtggcctggctcatcgaatggccagggtgcctcctgttgtgacccagggctgagtgaggctcaggtatgtgttttgccagctgtggatatatccagctggccaagcagcactgaaaaaatcctgcgtcactgccacttgcttgcagggtcataatggaaatcagagagtgcatcttttaagggagctcaggtaaagcatgtcctccagtgccagccaagtttcagtcag

SEQ ID NO: 328373 - DNA, 417 bp, Homo Sapiens
  misc_feature (236)..(236): n is a, c, g, or t
  misc_feature (307)..(307): n is a, c, g, or t
  misc_feature (334)..(334): n is a, c, g, or t
  misc_feature (347)..(347): n is a, c, g, or t
  misc_feature (399)..(399): n is a, c, g, or t
aaacttggctggcactggaggacatgctttacctgagctcccttaaaagatgcactctctgatttccattatgaccctgcaagcaagtggcagtgacgcaggattttttcagtgctgcttggccagctggatatatccacagctggcaaaacacatacctgagcctcactcagccctgggttcacaacaggaggcaccctgggccattcgatgagccagggccacacctgggtttngtactctaactgggaccccgtgtttcaccacagggatcccacacttcagcccacagcttgggccagggctnggggggtgcctttgaccttgcctccgncctgttgcgtttnggcatcccaacaaagggggaattttgggtgggcactttgaaaaaggggattnccaattgacccttgaaag

SEQ ID NO: 328374 - DNA, 1096 bp, Homo Sapiens
  misc_feature (767)..(767): n is a, c, g, or t
  misc_feature (998)..(1050): n is a, c, g, or t
tatgaatttagaatagcacactttttccattcagatttcatacatttgagccaaattcttatactccatgttttaattttaaaaggataattttaatccaagatttaaatctttgaaaatatctttcttatagaaaactttaatgcagtttttaaacttactgatttctgtggaaaacctttcttttctatagaaatactgtagtgccctttcttcccatcttgattttgtacatgtaaagacaaatgatgattcagtttcaatattgcatgaacaattgccactttgtaaattatatggacagaatgtgttctaaggaaattcgttagtaaatttgtgaaaaacatgtgagattgttcgagacctattaggctattcttcagttttgatgctcagttttacaacttaaatgattttctccaggacacggagctcagaataataaagcttttattaatggtctagtgaagatctagttgaacatggaaacattgtaatttacaaatgtctcagaaatttctcacttttatttgctaagacctgaatttaatatttgatattcaaaaacaagttattttgaagagacaatgggtctctttgagcttaagaaagctatggactatctttccttcaaatgcacatcacatgtctgtgaacactcaaaatgctcatagaatttccagggccctcagacggccagcttcccaccccctgttccccctcaggggctaatgaaccccaagtcaaaaggctgctctaaagttgtntctgataatgtgttttgaaatgaggaagtgattaggccctcccactagagatacttttgagatgatgccttacccaccttctgaccctggaatcatttttataacttaaagactttatgtaatttagtagcaggttagggaatagaaaccacactaatctgaaggaataacaagatgatcaacactgaatcttcatgacagtaagattttctttccttggaggtatgaggnnnnnnnnnnnnnnnnnnnnnnnnnnnnnnnnnnnnnnnnnnnnnnnnnnnnncctggcggttatttgggggcaaggtaccagattatttgcagtgagc

SEQ ID NO: 328375 - DNA, 337 bp, Homo Sapiens
  misc_feature (256)..(256): n is a, c, g, or t
tcttttttcacttctaggattttatctgaaattttaaaatcaggcgtggatcaagacatatgcacaaaggtgctcgcttcagcatcactttaaaaaccacaggcaccgcggaattttccacagttggtaaatagattatgacgtgagcagtggaggattttgtgtatcttcagagaatagcaaagctccgttccaaagtgtccttaatgatccaaggcatgacggccaatgagggaaagctcagcctcccaaagtnctggggattccggggcgtgccacccacgcctgggggctatttaagaagttttgaatgtctctcgtgcccgatttctttggc

SEQ ID NO: 328376 - DNA, 672 bp, Homo Sapiens
ataggtaaatttatttatttataaattattttcatgtaccacaattggctagtgtctcaaggcataatatgtgcttaaggtgatgcttaccattaaggatagtaaacaaattcattttcaaattatattcttggtcatcctgggctttatggctggcttcatatcatatccgattatgtgaaaacaaagtgtgacctcgtaggatggtgacattgcgaaggatttctccatgctgtgtgtccactgccttcatctcctccacgatcatggagaggttccggacgttgaggtccagccgggcactgagcaggctgaagcgctcccggagcaggtctgtggtgcccagcatgatggagacagacttgttcaggtagtagagctcctcggcatgggtgtggaagcccagcgtgcaggagagccgcacgtcatccaggtacttgagcatgctgtgcacgtggttgtcggtggcattgatgttggtgaagatggtgccaatttcaatctcgtgagaagccatgcgtccttccagagactcaaacctctccacagtgcggttctgggcgtagtgggtatggtactgaagatcatgcatgttctcttcgtggtcatccaggaaggacgagatgttatccagctgcagctgcaagcccatgacctggagtaccaggtcgt

SEQ ID NO: 328377 - DNA, 781 bp, Homo Sapiens
  misc_feature (558)..(558): n is a, c, g, or t
  misc_feature (781)..(781): n is a, c, g, or t
tgaggaacccagcctggctgtaacacggcatcacactgtgagttatgtttacctgttccctacctcgacccacccagatctgacaccctcttggcattggaatgcagaaatggatggagaccctgtccctgccctcccagtatgcacgagacacatacgccccgtgaagggaaagatggtgtctgtcttgcttattacagcatcccagagccatacacacagtaggtgcataataaatcttgtaggaaagaaaaaatgcaacggagggggcgggggattagggtgactgtcgctttatcacagcagggagagggaacagtacatgcaaatgtgttgaatcactcgggctatgttcagagaactataaacagttcagagttgatgaagggcaaagtacaggatgagaggaatagaagattagaccagaggagagacagggaacccaggggcttggactttacccccacagcagaagccaaagaaagatgtccggccagaaagaacacccatcggattccacatttgggggtcatttttctggcttaatggtaagatggnatgaggaaagttgaagaggccagaggaaaacagaaaaagaagaggctggcttctgaagccatcggggaggtggaggtgtcaggacttacctgctggatgacgccccaactttccaccttgggcaactggatacaactcacgagagaaacagcaaaccaaaaagacaggtgctcacatgtggacaatctgggtttgaggtgtggagttcaagatatagaggctn

SEQ ID NO: 328378 - DNA, 399 bp, Homo Sapiens
  misc_feature (144)..(246): n is a, c, g, or t
  misc_feature (250)..(250): n is a, c, g, or t
ggtcttactctgttaactcagtctggagtaaaggatgcaatcacgactcactgtagcctggacctcctgggttcaagtgatccttccacctcagccaactgagtagctggcctgcaggacaagtcaccatgcctacctaagttnnnnnnnnnnnnnnnnnnnnnnnnnnnnnnnnnnnnnnnnnnnnnnnnnnnnnnnnnnnnnnnnnnnnnnnnnnnnnnnnnnnnnnnnnnnnnnnnnnnnnnntgcncctgttgcctggcctgaaaccactgatgttaaggcaaaagcttgcgtgcatctaattcattttttaatagtttgtaattaaggatgtccagaggaggtgatgtttgccaggtctaccaccatatattattctataaattcttgccagtt

SEQ ID NO: 328379 - DNA, 787 bp, Homo Sapiens
tttttggtggttgggggatactacagagccactggcatcaaaaatgcagcccataatttcttaatttctaaatggaattatttataccatacagatagcaaccaagcctaagcaacatgtaacttagggggcaacttgggaatttaaacctttgaaactagattttatgtttaaagacgctcagagacttcccaacggattatcccaacctagcaggcgaaggagaaacaaaaacttccaaacaaagaaaggcttcctggccctccccgactttagcatccccgatggcagagcagcacgcggctaggaagcggacctaacgtcactgcagccaagaaagtccattcaagggcaccaaagaaacagcaacttagtttcatccagttttatccagcaggtcccagcccttggagaccccagagggctctgcagagcgtagagcgtatctaaaaagaagtctaatttgtattgatctctatgcccaactttgcaattctcaggatgtgtgctgttttaaaatgagcacatttcacaggaaattctgggtgggaaatggtggctgtgttgtgggagtgagtggtggccataccgagtaccccttatgtctgtcttttgagatactatgaatgtagcttctaaaaggtgtctaacagcaacccgcttcgaaggccacagaggtcggtctcttgtgagcttgctgcccaggagagttccagggacctgaacagagatagacacagtttagaagctgcttggacctgaaggatacacacggctcagtacctgt

SEQ ID NO: 328380 - DNA, 523 bp, Homo Sapiens
  misc_feature (371)..(404): n is a, c, g, or t
atggctaatggtgacacactttattaatttaaaaacacgcccttcccacatagtgcgtgaggcatgtgcacattttcctagaaggacatgaatagtgatgtggaggtacggtggaggtcaggcatctacagggtcattcgaggaggaacagattcaagctttcggacgatcagtgttttgtaaatagcagcatcatcagatctaagacaacattggacctgggcagggctttttctttgggtggcattaattactccagattcagaccagggccatcctctcccggcccagggatctgcctctccctcctctgtccccacacctagacatgaaagccataacccttgggcccctcagagggaaaacacaannnnnnnnnnnnnnnnnnnnnnnnnnnnnnnnnncattgttgagcagtcctctcacggctgggagcctctgctgcttccagttaactgcctttctggaaagcgattctattacatgatggaggcagcggaatgaaacattgaattacacggca

SEQ ID NO: 328381 - DNA, 798 bp, Homo Sapiens
  misc_feature (48)..(48): n is a, c, g, or t
  misc_feature (476)..(476): n is a, c, g, or t
  misc_feature (514)..(560): n is a, c, g, or t
  misc_feature (591)..(662): n is a, c, g, or t
cttttgtccatttctgtacctagaaaatcagactgggaggaaaccccncaaaccagtaccagtggctatctccggggaggtaggactacagacaacttatttttcctattgaattttttctataatttacacattttccatgaggaattatttaactaccagaagagttatttttaaaaagtctatcccctccgattagacacattgtgctaacagtctgtagaatcactgagacctgcaaatgttcccatcgcgttaagaaataaaagctaagaagtgatcaaatgcaaagcagggagaaagaagaaacaggaaagccttggttaaaatgctttgattaacatgatctacctctggtggccaggctaaaatatggcttcccctcttagactatcagccagtcctatagaatataaacacactttttttagaacaggcgctactagtgcaaaaaataaaaagattgaaggaagatnatcccaaacagtaaaaaataattttaataaaaggggcnnnnnnnnnnnnnnnnnnnnnnnnnnnnnnnnnnnnnnnnnnnnnnnccaagacagtgtcctcaatccttacaactannnnnnnnnnnnnnnnnnnnnnnnnnnnnnnnnnnnnnnnnnnnnnnnnnnnnnnnnnnnnnnnnnnnnnnntctggagaaaatattgaaatcccaattctttctactatatccactccctcaaaaggaaaaaaatgacagcagtataatttaaacccagatcttaggctggactctgtggataagccacataaccagatatccatat

SEQ ID NO: 328382 - DNA, 429 bp, Homo Sapiens
  misc_feature (395)..(395): n is a, c, g, or t
  misc_feature (401)..(401): n is a, c, g, or t
gagagcctccaacaaggtaattttaaaatagaggctgtcatttccttccagtgtgggttgatcttagatatatacttataacgaatcggcaaagtgacactgtgatttctgagttagaaaaaggtaatattccttcagcctagggttctgtctttctctcctgggacatgtgtctttgacaccctgagccaccatgtaagaagtccagctaccatgaagccgtcatgcagaagagaccatgtagagacatcacacagagatagagggaggcacccaggagccccagctgtttcagactccagatatttggatcatcctgtggcgggtaccaggacatgtggaatggaagaagctcgtggagatggactggcagtttccagctaccatcggaactngcaacntcacggggacaccccaacccagaaccac

SEQ ID NO: 328383 - DNA, 959 bp, Homo Sapiens
  misc_feature (665)..(665): n is a, c, g, or t
aaaataatcagagtaatggtaggcattgacatactagtttgaatttaaaagaataatcttcctcaaaattatcaaataattcacccacttgttaaaagtacaaaaagtgaaccaaaagccagggagaaaagtaagtttcttcatctcttcaaagattagggtccctgggcctctttggaaattgctttctgtttaagtatcatttcattttaatattactatgtcataatctctaatagctatatagaaatcacaaacaaatatttctacatcctagcagacttatcttaaaatatagggaaagtgtgtgcataaggtggaaggttagcagagagaatgacgggaaaatataagagtaatagaaagaaaaagtataggagaatcaaacattttgattaagctagcaattaatttaattcaatatgaattctaaataactgttcctggattgacttactattttatcaatgtaaccatactgattgattaaatcatatgcaaacacaccctgaaacgtgcattttacacccttgtgtctacagcatacattttggccgtctctgtgcgaggggctgagtatgacttggccatggaaacacccgcggctgaataggctttcctcaaggaatagggatagtttctcctcaggtcccaacatctttaanaaagatataagcagcaggtcagaacagctccagccaaaaagcaacccagagaccccagccattccgagccaacaggaccaaccaaatttatattggataccaagaaatatattgtgcaaaaccaaagtagaacgttccacatacacatcaacagcataccacacagagccaatgattcctggggtacctgctattagtaacgtggctccagcaacaaagcagatgcggactttaatgtacggctcatcagggaggaatttcacgcagtcaagaccaaggagcagggtgagaaat

SEQ ID NO: 328384 - DNA, 840 bp, Homo Sapiens
ctgtatttgtatagagcagaaaatggatagtcagataaagaagcagactttcacaatatcatatgttaattttgtaatgagatagttgtttagactagtaaatagatcagggttaaaggctttgattgaatcagattatgaaaggtgccaaacacaaaggaccgtccaagtctaacacttacagattcagctggtaaagaaataatgaactaattttagattcagccagattattacttatatacatagtgaagaaaagagaagctaaaggtgtcagccctatgagtccttatcccaaaccaaaaggatggcactgaaacaaaaggggtcagatggcttcagcaaggagttgtgatacaccctattgctggccagtcaattccagactggcagctaaatggctatagagctgcagttctgccctacgggagcctaggggttaagttgggagtctcatgttcctctggaacctgggagttatatcagaaaaccgcctcatggcagcatccccacaagatagaggcagatgagaaaacaacctcgcgaagccttctctgaagatttcctcccttgccatgttcctaggaggatcacagggcattccacccagatttaggtcatatggcagtccaagctttgcctgtgcatcccatgtagacacatgtagagtctctagggctccatggtagagccactcccttggaaatggtcttaagtgctatgccaaaggatttagattctacccttaaatgaatccgggagctactggaagtttaaagtagaagagtaatttgacttttgagttttgcagagatcagtctgacaatattgtagagacta

SEQ ID NO: 328385 - DNA, 716 bp, Homo Sapiens
  misc_feature (385)..(385): n is a, c, g, or t
aaaagatgtttaaatcaactaggaaatttttcattaggaaaagctgttgaacattgctgtgtgattaatatgcaagaaagcagagaggcctcagtaacactgcatgttgatcaaggatgctgttacccagaaatcagagcccctggatctccagaaggataattatacttaaaagcaagacaagctcaaactataccagctgtcagattttttttacaatgagtgtatgtatatttaaatcgtagctattcattgcaggatttgtgatcccaaacagaaggacagcatgaacagagcccaaaccaagtaacaacaaatgggatgggaaaatgacaggccttttcataggctccatagttcagtggtctgataacataggttttcntgaaatgcaaagcgtaggtcagcagagaacttttcaaacttgccacaaacattttacttccaaccaccacgaggctaagcaaaaatctcccatgcaaactccaacatgcagtcagccatgctttaagaaatcccctaggcagccattggactgcactgtgaaaaatgtgccaggaagcgcacaaacagccgcaggacgttagtcaatggcattgctgagattcaaggggatactgatatttcccttaaaggtttttcttcgtggaattatgagtagggaaagaaaatccatcaattctattaaaaatgctctttgacttgcctaattctag

SEQ ID NO: 328386 - DNA, 511 bp, Homo Sapiens
  misc_feature (424)..(466): n is a, c, g, or t
cacaccagctgtgtcagtctataagctctacgacctcttgagaggcagttagtgtagctgttaagagcggactttggggttagtctgcttggtacttatcttggttatttcactaaaattaaactaatattacttgtgggacagtacagcacagtggttaaaaatactaactctggaagtcaataccacctgggtttgaaattctcacttaaccacttacatagatgcctacatgcacatggaaagttactgtgcttctgcatctcatcttccccatctataaaatggggaaaggatagaagtcagaaccatggtccatcaggtccactgatgggtggtaccacagaaatcacaaacacacgtcaccctctcctgtggtctctgcaggcaccctgaagtgactatcccaattactctgcattcnnnnnnnnnnnnnnnnnnnnnnnnnnnnnnnnnnnnnnnnnnnaacaactggtgattatatggttgttatcatcggtttagtttactt

SEQ ID NO: 328387 - DNA, 496 bp, Homo Sapiens
tcagattgtactgtcactggctatgtacccatattctctaagacagggtagcatttgtctttcaaactgcatggtttgaaatcagtttttgtgggtgattgcaattttttaatgaaatgcattagaacatctaagcacgtcacctacagttttgtgatggtgcatttttgcattgcagtatagatctgtgcatagatatatgcattaagtgtagcaaatcgtgatgtaaattttttactgctggtcatggtcaaaaagtaagatacgctaggaaattgagtcactaggagcatggatgtataaggcaggttttatagaaccatttagattcaacattaatggtagagtggcattttaccaaaaaaatgggtgtatttgatttgggtgctgtaaggcaatttgctaggacatgggataatcagattacacaaaatctaggcagtgaacaagtcttcatcctggcccaggaaatagcctattaaaaaatgctgtccag

SEQ ID NO: 328388 - DNA, 684 bp, Homo Sapiens
  misc_feature (186)..(198): n is a, c, g, or t
  misc_feature (325)..(325): n is a, c, g, or t
ggccgcttaattaaaagtatatagttaaaaatacttagagaaacagcttagaatagtctttagagtcagacaaactgaaaatgtctgtattcatgtgaacctggaagtgtcattggccctctctgagccttggatgcatctgtaggatgaggaatgtagtacctacctcgctgggttattttgagnnnnnnnnnnnnntatccttgcacacagtaagtactcaaatggaatgaaaataaaagatagtaagggctccctgtttccaaatcctgtcctgtaaacatagcatttgaatccttccctactgtaaaataattggcatttnatccatcaacatccccacagtgatgtgtctcatgctgtcctcactgttgtgaaaccacaaaaatcagctgaaaagtcctaagaagagtaggtcctgatcattgtttcattaacgtatgagctttgggaagggcagacaacccacaaatttacaaatagtatatggattttcacaaaacaagcagatttgttcagatttagatttcaaccaatttcatgaaagcagacacaggagatgcaaactgcttttgtggattccgttctaggggcggaagcagctctcaaggtgtgtttaagtgtgcatgctttggcgtccctgttcttttgcagatattagggggagggagggtatggtctttg

SEQ ID NO: 328389 - DNA, 673 bp, Homo Sapiens
  misc_feature (366)..(366): n is a, c, g, or t
tattctctgtgaggctgccaggcatttttggacctatttgctctccctgttcaaaaaccattaggtgtaaatatcttcacacttccccatcataatccagctccaatctctctccacctcttgcaactctcagtatcctccactcctgcctcaccagtcttttctccattccccataactcttcacatctccctgcctttgcttacgctggttcctctgccccggtgctgcccttcctccagctgcctggcaaactcctattcctctagacacccagtgtctaatgttacctttcattctgaatttttccttaatctgccccactgcttccaatgaaataactggctacctcttcctatgtttttnggcactttggcacagatttcctattcccatgtatttatggagtatttacttctgccattctgtcctccaagactgtgaccaacagcacctaggttggtttctgtccctcagatatttactgaattgaaatacattgtgtttgatattaataaaagagaaaccatgtttgatgtaagcctggtcaaataaacaaagacaagtttacttttatggtctgaatcgctcagattcaagaaagccccctccaaccctcaaattccttctgcactgtctcacttgtgcctcaaatccatccctaacgtctcaa

SEQ ID NO: 328390 - DNA, 578 bp, Homo Sapiens
cagcccagaatgtccttaacattttctgaaattcctgcttgaggacagagctaccctcttttgagaaccactggtctcaaatatccctttgccctctttctaccctgccacactccctcacactgcgaccccagcagcctcttaatcatcctccaggactgtagctttttcagaattactttattaagccgctaatttggggttagatacccgtctccttgctcacctaccacttaacacactgttttgtagttgcaagttggtctgcatctccctatttagactacattctgtaggcaaggaatgcccatcttggtcacctttgcatctctaatgctggcatggttccacactcaaaagttggagcctaaaaaatggttgaatacatgaagaggaaaacagagaaataaaataaatcaataaaatggattgaaaataagcccttgactttgtgtctatagttggtaaataaaagaaaatataagaaggccctgtttatatgaagctgtatgcatttttattaactcacaacataaaccaagactgaagcctgattggatgccatgcccaaaccataa

SEQ ID NO: 328391 - DNA, 862 bp, Homo Sapiens
  misc_feature (852)..(852): n is a, c, g, or t
cttttgctgctaatggagtatttgcaaaactctgcacactgctgaaaaaacaatgccatttgtggtattaccataaagccatattctgaaattgcaccagtcttgagtatgacagtcacatctgatatacatgaaaatgtcagtatgcccctgttatgcaaattgaacaaagaagcactcaattactcaatacacactcacaaaatgcagattttacatgtgaaaatagtagtaaaagtgcactgtgatagaatctgacataatattcttgaaggggaacccaaggcttctcattgtgtaaaccagaaatgtatattctctacttccactctcccatcagccatcgattactttggaggcatgcagctctcatagagaccacctttgacattggtttggtctattccagaatggcatggccacaggtcaaatggatcacagtaaaaagtgctattggatcaggggtctgcctctgcaaatctgctgtcttagctaaatgccctcttgcctggcaaggcatctgcttgtcctgtcacagattccaagcttagcaggcaaatttccctatcaagctaacatcaatgccaagagctctgtttttctattctggcatgctcaaatgatggacacagacctctgtaggtgtaatgggaggttcatgtttggttcacagggagaaatcagagtgcagtagattgagctgtttaagtctttgctcagttgctcatgagtcatatgaccttgatcaagtcacttaacctctttgagcctcagtttactcatctataaatagggtcctattcaacctcaggcttataagaaggatagagtaaattaatgtatggcaaagtnattgacagat

SEQ ID NO: 328392 - DNA, 560 bp, Homo Sapiens
  misc_feature (50)..(50): n is a, c, g, or t
ggctcggcgtggtggcaggcatctgtagtcccagtgatggtccaaaaaangaaaaacctagattttttcctttcccagcttacaaatcattccatctacaggccctcccctcccacaacagcctcgctaacaacctaccaaaacagggaggctgcattgctcttgaactctgagtatctctggggcactaatcttatactgaagtactccattataaaggtgtcaggcgagcttgctctaccacatgaatcatgataaaaagggtaaaaactgctaataagtactaaatagtctttgaagcctgtctctattctatggagggtctgacaagccactctgcaccatggggtgggggcgggtgcagactcccgtcattcattcccaacaaaaagggtggaaggttatgggtaccgctctcgccataacctgaacgctgaccacaaactccattacactgcacgccacagactacgtccggtcttgggtcatttttaggcttactatctgttatgcctcaggcatttcctgatattctaggaaggtgagttaattaagcggcc

SEQ ID NO: 328393 - DNA, 801 bp, Homo Sapiens
  misc_feature (757)..(757): n is a, c, g, or t
  misc_feature (760)..(760): n is a, c, g, or t
gaaatacaagaatggatgccttctcttacttctcttgcaaatcagtgcctagcaaacttctaaaaggtgaattgttgatagattatatgacttatttttcttcaagctttttaatatgacaagggaattccagccagtatttttacctcttctttcttttcagagtcatgaagtattagagcacatggatgtcttatagatgatcttgtccaagtcattcattttagaagagctgatggaacttcagagaggttaaattcacctgttgcaggtcacctatctccttagtgacaagtttgagattacagcccaacttcaagtcacactggactcttgtgattataagtgaaatcatacttgggccactcattcctgagcaagatgcctgtttctgaaattagtctctagagtaccaacttttcaggagaaaagatggtaccttacttaccttcaagagcaaagcctttcccatgtttcataagtgtttcttggcagcctaactgactcagtgactgattaaaggaaagactgaaggacatgaaaggcattgacttgctccctcctaagtgagttcctcctcagtttacctctgatgaccccaaaccccacctgtcctgccatgatcccaacctcaggtgtttggtgcacctgtcagctttgtagacttgtgccagataaactcctacccttcagcctccttctaaggtgcaattgggaaattttcattttacagctaaaggaacctaatactggctgntgntattggcatgttggagggaggagggaatgggagaaggcata

SEQ ID NO: 328394 - DNA, 635 bp, Homo Sapiens
tgagtggtagcaaggtttacagtgaagagcaaaagaacaaagcttccacagcgtgaaggcgtgacccaagcagggttgcccatgattcttaagaactgggtgagtagggattagagacatcatggaatcataaccacatttcagacactgtgagaacttgatacaaaagtgtgctaatactataaccttatcatctcaatgcagacttcccagtgttttggagatggggtgtgggttagaagtgagattcggaagaggctgaaatgaggggagacaagaggaagaaaagataggaagggcacatcgggatagaaaccacctcattcagaaacttggaataaaatcagaaccagccacagagaaccagagaagtgcctgtggatcatacgtgatggccatgtccccacacagatctccaacagccagttagtgtcgcccactgaaaaacattccatccatgagaatacgcccatgaaactggaaatccagcatctctaaggagaccgtactactgctaatatcagagacattttgtgagtagttgctgtcacaactgatggaagttccttcatggaagttccgtgatttcctcaatgttccagtgttagagagttcgcagagaggaacctcgtgcc

SEQ ID NO: 328395 - DNA, 595 bp, Homo Sapiens
atatcttcatctaatattcccttttttgattcattaactaatagcacatcctggttcaatttcatggatgagttgtcagtatctgaaacacctgaaaagtccttcatggcaaatgttttttctaaatgtgaaagccactcctgtaaaaccattctcagagactcggattcaaataaaaccagagggtcctgtagcttggtcattgcttctgctgttgctactttaagctcctggaacctgtcttcttctggaggtggactagttacctctttttcctcctcagtgtcttcctcctttgggcaggtatctgaactcacatcctcttcacatgattgctcatcacccctgagctctggtctcactttcagatcagggctcgtgtgaagggtgccaatcttctcagtagttttacgcacaaagctagaaacactttctttgacagcctgaagagacacaagaggagatggagaacgaaatggtaatggaatgccgaacgggagaaaagtttcattcttatctgtctcaaacatcactggagcatgagaaacattgtcttcatttccgtgtgagccacaacactgatctggcaggtcct

SEQ ID NO: 328396 - DNA, 742 bp, Homo Sapiens
  misc_feature (305)..(305): n is a, c, g, or t
ggttcccttttctccacatccttgccagcatttgaagtccacatgaaagaaaattatatcttctgttcagttttgagaaaaaaggtatgtaactttttctcacaagtggtagcttagcatatgcttgctgctatctttagtaacaaagaaaatattgttttaaaaaatgtactggtaattagaaaagaacaactttctcagaataaaattaattatgccaaaacatgtactcagtaagcagatgtccccatagctaagaaattgatacaatctatttcctactaactttaatctctaggtttagnaattagctgggatctaatgatttaagtttgatggatagttaaaaatatcacgtagctgtagatgtttaaattttgacaccatgatatggatcttttgccagggtttactttaaagttctgacatgcatctataatgcctgtattatttataaattgacaaaaaaggaacttaaagctatagtaatgctaccgctgtctctgaccttaaaatggaaatgcacatgttataagtggcagaaggatatagatgaaaggtgtagcaagaagcagcagctctagttcatgttactcctttttaaaaaatagtttatctaaaatcaattattacaacgttaagagagtattccaccctaaaaccaaaagtgtatataacactgaagagacaaacactgtatagttatcctcccagataatttcataagattgatagcacctta

SEQ ID NO: 328397 - DNA, 368 bp, Homo Sapiens
ttttgtttctatcattttgttcagctaacacttttaactaagattaatattaatatgccaactcatattgttcaagtgagggggtggtgccaatagtcccatatttcaaggaacataataaaactagaagtattttcaaatgactgtactcatttccttttacagatgagaaaactgatacccaaggaaatgaagtgagtctcccaacatcaaaatacagcttggaggtaaatacagaactagaatccaattatcttatttcccaatctagtcattggacattccaaggtttctattttacaagtaatctaactactgctgtgccagggcatcttcttaacaagcagaggacacactgtgacccaaca

SEQ ID NO: 328398 - DNA, 585 bp, Homo Sapiens
ggggaagtattatttgttcattaaatctgccacttactgactagcttttagcaagttacttagtctgttcctcagtttcctcaggtgtaaaaacagggatgattaatagttccctcataggcctgttgtgagaattaaatgcatttctagttaacaagctcttagatagatgcttggcatatactaaagactgtataaaaaatcattgccctagttagcatgagctaatgtagttgtgtaaggtaatcatatggtaataatatcactttttattaatgttttgttgaggagacaaattaaacacatgatggggaaagaactgacagtccaactttatattgtctgtatggtacagaacgccaaatgatggaactatctgtttaggggaaggctttatgaagatgcacttttggttggtaggggatgaggaaattccagatgggtaagcagtggttttacaggtgagaaggaccaagcagttcttcacctgtgtagagctgggattatatattagtggtatagtgggctttaaggttggaaagatcagataaaagctattattaataggcctgacgtggtggctca

SEQ ID NO: 328399 - DNA, 771 bp, Homo Sapiens
  misc_feature (138)..(168): n is a, c, g, or t
  misc_feature (413)..(422): n is a, c, g, or t
  misc_feature (606)..(648): n is a, c, g, or t
cagtgggactatcaatttgcaaagcatgagtagtagcttttcagttaaaacctattgctgcagggagggtgtgaaactgcagcgtggtggtgttctgtcacatgcttcctgccctgcacccaccccatccagtcctgnnnnnnnnnnnnnnnnnnnnnnnnnnnnnnntctactctgtctctcaaatcgtattaacggatggttctgagtcaaaacactattaaattactttgtcaaccatgacaggatttatggatacataaacctgtatttctgctctctgtcaaatgaaagtgcaaacaatgttcaggaagcatgtttaattctatgttgcagagagtgcctgcctggacatttacttttttcacagctgagcataagctaagattatagaagcaccagaaaaaggaagnnnnnnnnnncaactttgtatcagtttctggatgaggccgaaagaaactgcagtcgtatgagtcagataaactatttaatctacgctttgtctgaaaggacataaagattttatcctgggcttattccagcagtaatctcaacagcctcttctggagtaggtgttggttttctgtctcctggcatcgttatttnnnnnnnnnnnnnnnnnnnnnnnnnnnnnnnnnnnnnnnnnnnttattgaagtggtaggttagaggcatatatactctgaggaagcaatctgagccccaaacaccctggggattactgacactataacaaacgcaaaagagagaaggcaaataaagacgaccttgt

SEQ ID NO: 328400 - DNA, 513 bp, Homo Sapiens
aaacaaaaacattttatttcaaagggcagataagtattttgctagacacaactgaaaaaaacagccagagaacaattggaggttgtcttaataaataacaaaatgccatttatgtctcttaaacttcatatgacacaatacacatcttaaataaataacccagtctgttgctatgtattaaaaacagtcccgggtgtggtgtgtgttgtggagcgaagccggttgctgggcttggacccgccaatcccagtgccggtggggagaccgcttcccaaacctctgctgtgcccctgtgcctgagctgaacagcagcgccatggcaccggagggcggcaggaaggccaggggctgggatgacggtgacttcggggcgctctgtggctggcaagcctgggtgcctccaaccggaggtgcttcctgcctcctcacccttggcttctcgacaattagtttttaggtcagtccggaacatcatgggtgctggaaaagcctctggggcgatgtggtgggtct

SEQ ID NO: 328401 - DNA, 1054 bp, Homo Sapiens
  misc_feature (173)..(173): n is a, c, g, or t
  misc_feature (442)..(563): n is a, c, g, or t
ttacaggttcacttcttggtttatgcagaatcttacaccagataaagggtaaaacaaactctacgatttcatgaaaaggtttgggtaggaattgggaatatagaaaatatcaaactgtgctgcattccatgatttgatggccctaaacagagaggcacttgggaccacgtggnagaacagtgatgcatttggggtcattctgactgaaacatgtcaggtgtgttagactttaaaggcaaacaacaacaaacaaaggcaaagctctgattgagaagagttatttcctcttagcactctgggtataagtaggtggaaactcatctttacaactgtttctctcacttcattctttgcagctgctttacagatcatgatgggttttggggatgatttgtgttatatagttcacacataaatcacataatgttggccagtcacagtnnnnnnnnnnnnnnnnnnnnnnnnnnnnnnnnnnnnnnnnnnnnnnnnnnnnnnnnnnnnnnnnnnnnnnnnnnnnnnnnnnnnnnnnnnnnnnnnnnnnnnnnnnnnnnnnnnnnnnnnnnacaattcccactgccagtgatgccacacctgtagtcccagttacttggaaggctgaggtgggggaggatcgcttaagcccaatagtcgaaggagctatggtggcaccactgcactccaccctaggtgacagagtgagaccccgtctcaattttaagagcaacaacaaaaacacataatgtcagaactgaaacagcctcacaaaagtccagaaaaaggcaagttgggagtcgtgggctaatatcagctggaattcagccgttccagatgctgccagtggccctggatggaggtgaagtcaggtggagatgcctttactcctttcctagctctctcttccccagaagcaaccttcccagtgcccccttcacctctctgtttctgagggtgtagatgagaggattgaggaggggggtgacaatgttgtagaagagcgtgaggaacttgccctggtcctgggaagaactggctcctggctgcatgtacatgtaga

SEQ ID NO: 328402 - DNA, 1140 bp, Homo Sapiens
  misc_feature (982)..(982): n is a, c, g, or t
tttcattgacattttaagtagcttagcctgacctttttagagtagcatgttccccctttgaacttctttcccttcagtagtaccgtgtagctaggacaatagtcttagtgtttagtgggcttctagttcgctctgtttgggggagctttgtctctgctttcttccctcctctgctccctgcccttgacggtgcatgtcttcctctcgtcctgtagaaattccttgtttaaaaggctcagtagctaaagttgagcagccctgttgggggctgtttattgagtttgcggctggcttctggcacatcatttaaaaccacagtgattggaaatgggtcttggggtcaggcctccaagcatctgcctggatggcagaggatgtttgtctttatatgtatgggagtgtatctgtgtatgtcccagcacgaggctgtgcgtgcacgtgctgggtggctgagagaagcccagggtagggaacatggcatacttcatctggattctgcagctacaagaggttaccttggcctcctgactattattcccgttgctgggacatccttgctgcccggtgcatttttagatagcataagccttgatcaagaagaaatccagggacccgtaggagaccctccagtgccagcttcatctagaccgtggggctcagaccgaagagccacatctaaattcccacaattgcctcaggaggttgaaacaccgagagatcaaataaagccaacagggttcaccccaacatagacccctgcaagccccgcactcccttcccttatctggctccatgtgtatgcaatcacctgggacccccccaatgcttcaccctcgggcctggggctgtgatgctgctgacttcatgttttgacaaaagtctggagttaaaaaggccatgctaacctgcagagcctttggagaacagctggaattaagccagctcccggccaaggtgcctgctctgtcaagaggccgtcccnaagtgcctcctgcctgtggcacggggctgaccactccgccatgatctctgccaggagcagtgggccagcccagccatgctcagttctactcaagacaaccccaggggagccactgtgtcgatgcacggccaacagggagctcaaccctgcttctcaag

SEQ ID NO: 328403 - DNA, 657 bp, Homo Sapiens
  misc_feature (315)..(416): n is a, c, g, or t
  misc_feature (424)..(436): n is a, c, g, or t
  misc_feature (572)..(615): n is a, c, g, or t
  misc_feature (641)..(641): n is a, c, g, or t
gcatatttgttgtttttaatctgcatcctcatcattcgtgttcaggaaaggttagaagattggtggtgtaaaaggggacttgggtggccacagtactgggtaccttcatctcctcctcctttctgccactgtagtgaatctgacaccccacccattcacctatatctcctgactccactaggaaatccctcaccatgggaatcctggcagcagatgggatgagacagaaggagacaggtatgaggtttggacccactcctcctttctttctgctgtgctcatcctaaccatttcagaataagaagactatcctcnnnnnnnnnnnnnnnnnnnnnnnnnnnnnnnnnnnnnnnnnnnnnnnnnnnnnnnnnnnnnnnnnnnnnnnnnnnnnnnnnnnnnnnnnnnnnnnnnnnnnnccgtctcnnnnnnnnnnnnnttaaaccaaaggagactatcctcatttctcatctgggccacagtaaagcccccaactgatctcgctgcttccactctcaccacagcagctgaagagatctttgaaaaacataaatcagctgggcacagtggctcannnnnnnnnnnnnnnnnnnnnnnnnnnnnnnnnnnnnnnnnnnnagaggtcatgagttcaagacaagtcngaccaatatggtgaaa

SEQ ID NO: 328404 - DNA, 805 bp, Homo Sapiens
  misc_feature (147)..(158): n is a, c, g, or t
  misc_feature (166)..(420): n is a, c, g, or t
ctaggattacaggcatgggccactacacccagccagtaattctttttgtaagtattattctactttatgcgtactacttatggaccagaatttcagaagggcaagtacccctgcagcatatctaattaatcttccttgatagtgtannnnnnnnnnnngagatagnnnnnnnnnnnnnnnnnnnnnnnnnnnnnnnnnnnnnnnnnnnnnnnnnnnnnnnnnnnnnnnnnnnnnnnnnnnnnnnnnnnnnnnnnnnnnnnnnnnnnnnnnnnnnnnnnnnnnnnnnnnnnnnnnnnnnnnnnnnnnnnnnnnnnnnnnnnnnnnnnnnnnnnnnnnnnnnnnnnnnnnnnnnnnnnnnnnnnnnnnnnnnnnnnnnnnnnnnnnnnnnnnnnnnnnnnnnnnnnnnnnnnnnnnnnnnnngagccaccgcgcccagcccctgatagggtatattttacaatataggcttggaccaatcagttctgaagacccaaagaaatcccccacccaattactaataattccctcagttatcccctatagttggagaatgagatagtcctaagtaattatttccttcaccaacaacttgagatggaatataataatgtatcctttaaaagtatctgaattatagaattctaggtccaaaagaaacttcatgagacatctaggataagatagccctaagttagagcataaggagagcaagtctttctttaaaatattcagaaaaggagcttccccagccttcctccctcctttcaattgttttacctggctcatggcaacaacctataaggac

SEQ ID NO: 328405 - DNA, 973 bp, Homo Sapiens
  misc_feature (782)..(812): n is a, c, g, or t
tccatacttttgggatttatctttctgaaccccaaatctcgattgcctgttcaaaagtctaaacttcttgttctatacaagacttgtaccagaccattgctttccttttctgacatctttactcagcactctgctctgcactggcccctgaaccacttgcacttgcctgaatgccctgtgcagttccatgttttcaagtcaacaactcatagggtacctcacagctatgtgccaggcatgttgtaggcaattttcatgcatttgttcatgctatttccagtgcatgggaatgtcctgcccaaaatctgtttcctgggaaaatatccacccatctttcaagtgttgggtacatggtttgtataaatttggtcatatctgtctgtctcactttctgttccttcagtcagtcagctttatgcaaatgtcaactgcagaaagtcctaatacaattatgtctactgggccataaactctgaggaacaggtccatgcctcattcatcatttcatccctaacacctgcctagtatctgacacttacattaattcatcttagccccaattagtcctattcttctttcatctgtgacaaagaataaaataagcatgaaaaaacttcatcagacactactaggttatcatttcagaaatcagaatagaaatacataaatataagaaacttgcaggagcataaggatgaatcttaatggatgaagcccagagaattcatgaacttcctcaagttacgagacacattaatggctcagggtttcttcttctttcnnnnnnnnnnnnnnnnnnnnnnnnnnnnnnngagatggagggagtgagagacacagaaagattttgagcatctttggaaagctggatgaattcggtagtatatttgaccttttccttatatatcatctgaagagtttttgccagtgtatataattgttaggagaattagactcgtgccgctcgtgccgaatt

SEQ ID NO: 328406 - DNA, 602 bp, Homo Sapiens
  misc_feature (486)..(486): n is a, c, g, or t
  misc_feature (564)..(564): n is a, c, g, or t
tttaatttttaactcaacaaatacagcgttcctataaggtggtctgtacagtatattggtttgtataattcacacattaagtgaaaggaaagaaagagatgaggagtggaaacacttatctcatactcttgtctagttgaatattgttttttccatctttgacatttgaattttgtagtacagtgcagtatgaggtgtttaaagcctataaactgttatttaactaatactgttttctaaaatactttccatgatctaagaaaataatttctagtttcttgggctatgtattaactgggcattctaaaacgtcacttctcatcactcccatgatagtacaatttcctgcttccctcctaaatcgctagtgctccaccagtctcctttgccagctcccttcctttgcctgctccttcttctttggccaccaatgtttccggtttcaggaagtggaaccatattctggccaggtttccagccaagagncttgacatttgtagcagacattgcagggatcccaccaaatctcccttggcacttattttcatacacatgaacttaagncctctgtctgatgcaagtttttgcctgcaggctttctc

SEQ ID NO: 328407 - DNA, 807 bp, Homo Sapiens
agggacgctaattcgggtacccattccccaagtaaccagagagcacagagaaatgctggtgaaactggccaaacagaacaccaacaaggccaaagactctttacggaaggttcgcaccaactcaatgaacaagctgaagaaatccaaggatacagtctcagaggacaccattaggctaatagagaaacagatcagccaaatggccgatgacacagtggcagaactggacaggcatctggcagtgaagaccaaagaactccttggatgaaagtccactggggccagcaatactccagagcccagtttctgctggatcccatgggtggcacattgggacttctctccctcccccatctacacagaagactgtcaccatgctgacagaagcctgtccttgtaaggcccagccttccaggggaacactcagacatgttcattctcttcctgctttctgctctggggccggtgggtggctctcagaaaatatttgctgctgggcaaaagggctgttattcaggcatttgctttgacttgatgttgccaagggactgaggccattggcaggcttagtaccacctgctcctcatcttaggagtctccttttcaaataattaggctctgttcccattttaaaactctgatattggccttcacctgtgactggacactttactagaggcccattttcactaaacaataaaatctaaataaattggaaggaataacaaccacaaaggaaagaatagagttggtctggattgatgatcactgaggatctgtatgtgaggcacccataacagtagtttt

SEQ ID NO: 328408 - DNA, 391 bp, Homo Sapiens
gttattccttccaatttatttagattttattgtttagtgaaaatgggcctctagtaaagtgtccagtcacaggtgaaggccaatatcagagttttaaaatgggaacagagcctaattatttgaaaaggagactcctaagatgaggagcaggtggtactaagcctgccaatggcctcagtcccttgggcaacatcaagtcaaaggcaaatgcctgagtacaggccttttgccagcagcaaggtattttctgagagccacccaccggcccagaggcaggaagcagggaaggaggattgaacatgtcttgaggtgttcccctgggggagggctgggggctttaccaagggccaggcttctgttcagcatgggtgacagtctttctgtgtaggtg

SEQ ID NO: 328409 - DNA, 479 bp, Homo Sapiens
  misc_feature (39)..(39): n is a, c, g, or t
ctcagatcactcctaccaactccctgctttaagcagatngaccctacttactttcttgagaaaaataaaatcctcagaacagagtctacttttctacccaataaaaatctcacacactcttcttcctttctcttataatagaagacctgtttttcccttctgaagtcagtccttccatctgtgctttgaagccattctcctcctaccttctgatgaacattgtactatcaataattcatttttcttgaatatttatcctttccctctcaaataatatttttaaataagcttgtctctccaaacgtttaaataaccttgcctcaaaatctccaggcttcatgccattttggctcgccttcacaaatttcctggaggagttgtctataaactcttgatctccattccttacctcttggttcaatccataaccacttggatctggttttattcttcattacttgataagatcaacaatgacc

SEQ ID NO: 328410 - DNA, 403 bp, Homo Sapiens
  misc_feature (16)..(16): n is a, c, g, or t
  misc_feature (81)..(81): n is a, c, g, or t
  misc_feature (366)..(366): n is a, c, g, or t
accaagagtttaatanaacaactccctccccggaaattgtgaaaggcgagcaaaatggccatgaacccctggagattttgnaggccaaggttatttaacctttggagagacccagccttttttaaaaatattatttgagagggaaaggattaatattccaggaaaatgaattattgatagtacaatgttcatcagaaggtaggaggagaatggcttcaaagcacagatggaaggactgacttcagaagggaaaaacaggtcttctattattagaggaaggaagaagagtgtgtgagatttttattgggtagaaaagtagactctgttctgatgattttatttttctcaagaaagtaagtatggtcnatcgcttaaagcagggagttggtaggagtgatctgag

SEQ ID NO: 328411 - DNA, 481 bp, Homo Sapiens
  misc_feature (121)..(121): n is a, c, g, or t
ctttattttcttgaaggtgccaagctcgctcctgtctcgggcattttgttcgtgctgttctactcattcccagaaacctccttcccttgctcctcttaacagccggtctctcatcttcccnactttcaacggaggtagcacatcctcgcaagagtttcctccgatgccccaggccaaggtattctccatcacctcatcctgctcttggcctggtcaccgttggtcataaaaattatgcaaaagtgttcatttgttcatgacctgcgtgttcttaagtcctttgtggggagagtccagggttgattcactcaccaccatgtggaacagagtaaataagaaatattcgctggacgaatcaatttgtttggtgccacagggccacaggaaggggtgccagccccaagagaacagtggaggctttgtgcggcagaggcctggatccttcttccccaggagttggggactggaggcctttagcaag

SEQ ID NO: 328412 - DNA, 718 bp, Homo Sapiens
  misc_feature (374)..(382): n is a, c, g, or t
ttaaattttttaaatttatttctttattattttaattgacaaagaattcgcttcttgagtacctgctgtaggtgaggcactgtgccagatagaggaaaaggggctgggggtggaggctgcctgcttctttattcctgctctaacaacctgactttctttcaagagttacctacttttgtttcggtcaacaagcaggaccagatggcttctcttaggtgatagtggtccaattagcaagccacatggctacccagatttcacactaaagctttctcgtcaattcacccactgctttgtgaggctccctcttgctccccacctcccatgtgttggctaaatcaccagagtgtttacaaatacactgcaatgtgccnnnnnnnnntctgcacagtcaaaacatatacttcctttcaatttgaagaacagtttctcattgcaacgtattttattctgattcctctgccttattttcacacttagcctgacgtatattttgccacctcaccttattctgcaacctctacattagatacagtgtaatttgccatcttttgcacatcttccaagagttttttgtagtcaatgggagagacagccaaaaattacaagagtacttgaggaagtattaatagcaaaaaacctgttctaaccaaaccctcaggggcctggtttcttctcttttgctcttttgctggaacgtagaaggggacacagagtg

SEQ ID NO: 328413 - DNA, 548 bp, Homo Sapiens
aagtagacccctttctaccattctgtgccctaaaatattggcttttttccttggtactaatggcagaaaaaatgactattacaattaaattcaagaaaccccaagagattcattaacatttgattcccaaaccccagctaagtgtggcattcaaacaggaaaggaaaaaatatcaaaggaacacacaacgattttcacttgctcagcctctctaagctagattaatgcctcaaaaaagaaatactgccagaatacccctcttctaaccaaagaggcactctgtccccagtcgacgtccaggaatcctggtacaataattagacgtgtgggccagaggcccaaactcactggcacagggcagattttcgagatgagaaacagagaagctccaaatcctactcacataaagggcttattgacattatctgctgaaaagaatacagatttcaagagagacagccaggcagagagggaaggcagaattttggccatggaggaagtaggtggagggaagggtggacttctcacctagctcggagtccctaagt

SEQ ID NO: 328414 - DNA, 649 bp, Homo Sapiens
tcatgttctatcagtatatctagaaagggaatagccctataaattattttccttttattatttctctgtatgttgtatttgatcctatttaaaggaaaaaagcaagcttataagctttcatgaagtgttcttaccagtttttgataaattttttaaattataggatagaattgtcattttatgcaggagatatttatactacgagggttgtttggatggagtcagattaaattttttcagtgaaattcctattattttaaaactttccatattttcactacgcttggacatttaactaggcattcttttcttacatctctatatgaagatacctgtgtccaaaatttttgaagatatatattgtatgtgtttattcttcatatggtactttaccatatttatatattgttttatacctgtaggtttacacacaagtaaatcttttttttcttgaatttaatctgggcactttgcactgccacagggtgtgacgatggaactatgtatatagttaggatgttttgatttcggtaaaaaatatatgtccctcgtttggctatcaccagtacctctcagcttactcttcaggggatatgaaacaatctgtagattggtttccatacagggaagttctctgtcctatgcaatg

SEQ ID NO: 328415 - DNA, 765 bp, Homo Sapiens
gagacattctttggtaattgggtagcttatgtagattttaataggattccattgtaaatgaaagttaatcttaggaattaaatgaatccttagggaaatttgtactctatctttacaaaataatatcctttagaaatgtctcaacatagggtagtctaggcttccaagagattaaaattaatgaaagtttctgtaatgtatgtctgccagtaatctgtggtagtctagaaagtagggattataaaaatttgttgtttgcatacacgcataaaaactttcctattattttttgtatttctcttatgctttcagatatgcaagaactgtacaggttgctttgatcgacacatcccatgtgtttctctgaactgcccagtacttttcaaactctcccgagtaaatagagaattgtccaaggcaccatatctccggcagttattagaccagttttaaattgtcaatatcacagtattacaggtgctatttttttcagtgcttaccactaaactgttgtgcatggtgctttttaactttcatcgagttaaggatgttcactgtctgttatctgaagactatgaagacttctatgctaaccgaattaaaatgtacttgttgatctctgaatagctcacttcttacaatgtacaaattcctcattctgtcaccttttaaacattgttttataatgcaggtgttggatttgctccagtatgtgtaccatcttgtaaattcatttgagtagatcatgtttacttcccagtggaa

SEQ ID NO: 328416 - DNA, 852 bp, Homo Sapiens
  misc_feature (46)..(260): n is a, c, g, or t
  misc_feature (328)..(328): n is a, c, g, or t
  misc_feature (473)..(473): n is a, c, g, or t
aagatggagtctcactctattccaggctggaatgcagcggcacaannnnnnnnnnnnnnnnnnnnnnnnnnnnnnnnnnnnnnnnnnnnnnnnnnnnnnnnnnnnnnnnnnnnnnnnnnnnnnnnnnnnnnnnnnnnnnnnnnnnnnnnnnnnnnnnnnnnnnnnnnnnnnnnnnnnnnnnnnnnnnnnnnnnnnnnnnnnnnnnnnnnnnnnnnnnnnnnnnnnnnnnnnnnnnnnnnnnnnnnnnnnnnnnnnnnnnntgcatgagcaaccacgcttggcctaccatactatttttgaagtaaacattctccattacctattactngtagataatacacttacaaaaacaatttatgaccactaataatcttacgaaagctttttccctctaggaaacttataaataacatgttgtatgaaatatcatgagtttatctccacgctaaggttcaccttatggactcacttgntccacgggccccaagttaagaatgcattttggcagattatcccatggctttattagtacctgtttatccgctaattagaacgacaatcttaatctaggccacaatattttctgaagctcaagaaaataatttaggggaggaagagaggaagatggaaatagacaaattttcactacaaggcactgtgatctaactatttttacctgttctcccttctatcagcacaattaagagtatgcacaattaagagtataacattccacttttattactacgagctaacaactgttcatacttactgacaggtgaacaaaattacaaattattcaatgttctccagcttagctttcatactttagcttacatcttttaatttata

SEQ ID NO: 328417 - DNA, 607 bp, Homo Sapiens
  misc_feature (49)..(59): n is a, c, g, or t
taagttctttattttttcaacttggctgttctctccccacccctaaagnnnnnnnnnnnttgatcaggaataaagaccagatattcatagttattttcttaacaaagacctaaggaaggtctgagtagcttgaaattttaaaaatatgaaacatcttttattttttcttactggagatattattcttcattcttccttgcccccctcctcacccaccctcacacataattgttggaagtaactggttactttttaagtagtgttacttcttgctgtggtactgggagaaatttaagctgccctggaatttcttttcccctgcttgggatccccagttgctctgcaaagtgatcgagcttgatggagcctgcacctgtgtcccgggaaggaagccgttgtaggcagctgtggaatgtctagttcccttcttccccaatgtaactgagagctgcttcaacatctgcacggttcagcaagtttgtcaagtttgtgccaacggctacagaggggatttttctagtaaaggccctaaaggtgtctcagagttagaggttttgtttgattaaatgtctgaaactaggaaggtaacttttttaattaagcggcc

SEQ ID NO: 328418 - DNA, 703 bp, Homo Sapiens
gttcttaagttttgattactacatgggacacacaggtaacagaaaaacaaaacaaaactggcatctgggaggctcagggaaagggaaaaaataataatgatctttatttttcagacctgctcctaaaagctttctcctcctcctaaaaaaccaaacacaagaggtcctcttgctgcctttccatggactgtggcggctgtggacttggaccgtctgctgagcccacacctcggcttcctcacggtgctgacgaggagaggcagaggactgccttggctcctgggctctgtgcagaactcctccagagactgtccacacttgataaggtgggactaacaaactcatgtcatggataaacagaatggtttggaactcagtcccaggcaggccctctgaagtcaaggcctaaacccaatgatccagactggacagaggcccgacgatgggaagccaccttggatccctgttaacctcacaacctgaggcgtgcgtgcccggctggggcacctgaccttgtgaattcgttgtttctaggggaccacgtgtgccctctgggattgcactcaggacctgtctcagcctggaagacattcaggtcacgttcagtttcctggccagtgttctgctgtgcctgaattgatcctcaggccaggtaaagaagattcacacagattcttctgtctctccagtgggctgtggggcg

SEQ ID NO: 328419 - DNA, 1328 bp, Homo Sapiens
  misc_feature (300)..(352): n is a, c, g, or t
attcaataaactcttttattctagtccacagatttttccattacaataataatgaaaatagcactagtaatttgtaacactgaggcccaaagggaaacccctcctcaaattataaggtaaatgacacaaagttgaacatagggtcagtgttgggcaaaaagcatttaaaatatagataacggggtcaagattttgtgtgtgtgcaaacactggggttttgtttttcaggatgacaccattttaggaaagtgcatgattttgaaaactatatgtgtaattgtgacaaaactaaactgtagnnnnnnnnnnnnnnnnnnnnnnnnnnnnnnnnnnnnnnnnnnnnnnnnnnnnntcaaatacaaggggcggatatgcaaacctccggtcctttggccctggaatggcaagtgagtgggcttcatagaaattctctgtagaaaggaatgtgtgggccagtgtggccatggccctggcctgacatcgctgagtctccaagtcttgtctcctcacagaggaaaagaagttgcttgtccgacacatctgctgggggtctgcccgagatggggccttcgttcccaatccctttgagaacagtctcaaatcctgaaaaggcaaggcatccctgcggcggccccagggcggcggcaggagatggggtcagtgtctgccccaggctctgccggagctgtctgagtggttcaccgggagtgggtgggcctcggtgttgaacacccagtcttccagggagagcaagtcatcttcagagaacagaagatagagatactttagtgtctccgctagaaagaagctctgctgcttgttgtcgtggttgggggtgctactgtacacgtcttggatcccagagaaaccggcttctgtccgacagtatttctccaaggccagcaccacctcccagccccaattccctgtagatggggttgtgggtctgtcgcccacaggtacatgtagctctccaccacctctggccggaggatgtaagtagctcttcgctcagctgggtggccacggcctctctgccggagttaaaccagaaggcctcaggcccaagtttggtgtctgagcgggcgtatgactcgtgacacgtcttggtgatctgggctgcgagctctcggtagtgggccctcttttcttccttggcatcctcggggccaagggcgatcatgcccccggagaaacaggccaggtgccccatcttgtggtccagaatcccccctcgccactcggcaatgtaggtcagccccccgggagagacattcagcaagtaggtctctattgcctccaaggcttcgtagtaccctgtgccgaat

SEQ ID NO: 328420 - DNA, 764 bp, Homo Sapiens
  misc_feature (296)..(329): n is a, c, g, or t
attgataaattttattctattaaaactcagaattgatatttattaaaagattccataaagaaagcaaaaatcaagctacaaacattttaacatacataatcaaaaaattatttgcatacaaaatatgttctaattctttaaaccatttatgtgtgttatatacactattctgaaaacaaaaaccagcacccaagacagacaaagcgtgtggagctagtgtggctaagttgaggcgggaaattaatgctggcaacaaagttactgactgtctccaacctgttttgtggtgttacacnnnnnnnnnnnnnnnnnnnnnnnnnnnnnnnnnnctcggagctataaaccacagtgtgtctaaaataccttgcccagggtctggcgcatggcaagagctcaaccaatggtgaatggttggaactataaataaataatcgtgtcagagccgagtgggaatcaaactcagctccttaagtcctccatgacctagacaggattattccagaccatgtggcagaagttaaggggccttggcgatgaaggcaagaatgcccacactgtttctcctgttcctccctctttctgtccctgaggcagtagctgtttactccaaactgagtctcccacacatatccagcagggctcagcctcagggaatccataggattctgggggtggacctttgggaggagaaaccatctcaactaagacactttcctctctcgtcagcaaagatattcagagatggatagccgacttacattttt

SEQ ID NO: 328421 - DNA, 620 bp, Homo Sapiens
gatagcatgatcaagtgggaacgtatgaaaggatatttgtgtacccacagaattgacagagttgagagcctggcctagagataagcaggaactgaggaggatccagaaggccaggagcaggcagctcagtcgatcagtgtgcttccctgataactgttcctgtcatccttgtgtcacctgttcgaggttcaaagatccagaagtgtttatcagatttggttgagcttaggccgcatgcccaccctcagggctggaggaagcagaatctggccacttcacaatcttccatggtggggagcaggtgcctggatttataccccattaaggctgcatccatgggaataagtaattccccaaaagaaatgagatgccatcaggaaggaggaatggatgttgagtagccaaagaaatgccacatgttcactacaggcctgccttcaacagcatcaaattcacactatcgtgttaatagctttgggaggatgaaaggaaactggcctggacctatagggtgagcaaggaaagagaatttgacatcaacaataaaggcctagccaatttgctcaccgcttctcaaatggacttgaataagatgacactgcgtgacacaaaatttcttc

SEQ ID NO: 328422 - DNA, 705 bp, Homo Sapiens
cttgattagattctcctttagtctgttgaaagcagagaactgaaatccacctgatttaccatggctttgccagccagtcattagcaccatttacttttactatcgctgacattttcctttgttcagtggccctgaggttcttacactctagggggcagtgcaccacaggaagatagatcaatgagggaggattgcgagggggaaggggaggaagcagagctggcaggccttagctacaggctctctctcaggcagatcccttttaagatacatacaccatgccccacacatcccctggagagaagaccaatgctttagtagattacagaacagctatgaaaagtcccatgaatgaagatccacaaaaaggaaggctttcttatttcatactgtattcttcagggtggtaaaatttctgcttttggcaaaaacataacagacggttccaaacatcagcataaagatcactcatccaataccacccacaggtagggaggaaggatgctgtagtatatgaaaacaaaagttttcacctgagctgagagcatttagcatatcgtggttctgtaacaatatcaaggaccagtgcagaatctggctttcttttctgataggctaccagtgtgtgtttatgtgtgctcattttgtggttctaatcataatggtacatataattagggaaggatatggaagccactttagaat

SEQ ID NO: 328423 - DNA, 784 bp, Homo Sapiens
  misc_feature (47)..(47): n is a, c, g, or t
  misc_feature (566)..(589): n is a, c, g, or t
tcccaggctacatctttctcccgtgctggatacttcctgcccttgancatcagacctcgagttcttcagctttgggacttggactggcttccttgctcctcagcctgcagacggcctgttgtggaaacctgtgattgcgtgagttaatattccttaataaactccccctatatatgtaccatctatcctattagttctgtccctctagagacccctgactaagaccagaggtatagtcacaaaatcctccaccgaacaacagtctcccagtaaccagactgtgtggaaggggccagggtggggaggagggattcaaagctgctgtctttttacaatttggttttctaaaccacatgtgtatgttgcttcaattaaaataaaaattgatgttaaaacagccttttacaatgttttaaaattgatttaactgtatggctatttggataatacggggcatgctcttaacaggcttcagaataatttcaggcaagtaaaaggagatccattattaagctctataacagccttcactttgaaagatttcaaagcagtaatattgcttttgnnnnnnnnnnnnnnnnnnnnnnnngtgtttccctgggcccctgctaagaaatctgttagatccctttgtaagaagcatttcaatacctggaatgaagacagggtaataggtatttttcctttacaatgggacttgagagcaagagtggcctgtaattattcctgagtcacaaatgtaacctaagttattggaaacaggtgctatctgttggttagtgaa

SEQ ID NO: 328424 - DNA, 576 bp, Homo Sapiens
cctctcaagcgtttcagggagttaacaaaaatgttgtatttcttgattttgtgatgtttgtggtacagtcaattttgaacaatttgtaatttgtttttatttctttttgcattctaaataaattttcacatttgtacctaatttggaatgtgtaactttgtatgttttttccttagagagagaccctaaccctcacccaagtggtataagcttcaaaggtggacccacacaactcagacccacctctgtacagagcttcactgcactacattcctacatttcaaaaatgtcttaaatcacaggtcccagaggcaaggggaatccaggattacaaagtttcattttccactttgcttagcacggcacaatcaaatgtatttaatgacaggacaagaataaagagagaataagactttgaaatttttgaaattcttttcttctcttaaggcaggtttgactcaattaaaatatttatatatggaaatgaatcacagtacaactagattagaatcgatgaaatgacttttaagctatatttacacacacaaaaaagctatttttttaaaggcagggtat

SEQ ID NO: 328425 - DNA, 747 bp, Homo Sapiens
  misc_feature (686)..(686): n is a, c, g, or t
agttcttgcaacaaattctgcatggtccagcgctccagctagctgcctcatcaaaaacactgaataaccaaggactgctgagtttttcttcatggggggtcagctggtctcaaaactggccactgcctcagccaccaagctttttcctaccactaccttataaacctgcctggccctggaggggttctgggacgactttgtctctagcccattaatacaatacatcctatgctttctgtgcagactggtgcttccgcagaaaggagatgccaattctgctatcacagaactccaccagcaactccacccgaccccagcagtggtgcaggacagctgccagcacccacctgggccctcctcctttttccacagccacttactgggggccaccaaaacccaggagatgggcaggtgtgtgggacagactggaggatgaggacaaaccaaagcctttgttctttcttattgtggagcgtccccttccatcaagcagcctgccctcaagccaaggatcatcccctggaacccagtatgcacccagaggggactcaacttcaaagctgctccaccatgctgggtcccaggcagctttcctctgaaaagcaacctctcctgccacccagatcccatctcaagagctcgcccatgttacgagcatgtaaaggactgacttcctagtaactggntgcagtttacaacctgccctccaggggacacgtctccatggttttttctacacatgaatgc

SEQ ID NO: 328426 - DNA, 636 bp, Homo Sapiens
  misc_feature (94)..(107): n is a, c, g, or t
ggccgcttaattaatttattttttaaataaattcccgggctgaatttatttaaaattctgactctggcctgggtgacagagcgagacttcattnnnnnnnnnnnnnnggccatggtcgttatctcattgattttgatgaaagaaaaaccaataaagaaatggaactgtcagtgaattgactgtttgggttttcagtaggctcagtcacatctagattgtcagtgtgagtgaaattaatttattggttcatacatgtgccttcataatgacctggaaattctgtgtagggatataaaggcttggttttaataaactaggtgcaatgtgggaacttaattgggagccatgaataggctttaggggatgaatcccatgaaattttctgcaaaatctgcacatgcatggagaggattccgtagcttctgttaggttttgagagggattcagatctcaaagctgttaaggagccttgtgaaatgctcagaatacctcactgtggctgggttggtccctgacttgggcctcagtgccctgactggagctgttactatgcaagaggaatgcttcttgaacgtttcaggtgaggtggcatacaaggtcaaaagaaaatggtaggagatttcggaaaggagagag

SEQ ID NO: 328427 - DNA, 141 bp, Homo Sapiens
gtgtcacttaaaacaaaaaacacccaaaccctgcaaaatctttttcccttgggagtcgctcagacagaggtgggggtagaggtgggagggtgaagagtgctgagaagtcagcacagaggctcaagaattttctttcctcct

SEQ ID NO: 328428 - DNA, 613 bp, Homo Sapiens
  misc_feature (128)..(156): n is a, c, g, or t
  misc_feature (613)..(613): n is a, c, g, or t
atagagactggttctcaccatgttgccctggttggtctcaaacccctggcctcaagcaatccccccacctccgcctcccaaagcactgtgattacaggcatgagccaccatgcctggactaaaataannnnnnnnnnnnnnnnnnnnnnnnnnnnnctacaactgagcccatatatattttttaagctctaagattttcaccataatttgcatgatcagcaataaggtgaggcagggcaactggctatatttactatttgaaaataaaactttcactaattcaaaattgctcataatctaggcaagaattgggatacatggtctttgcaaagggaattccttacacaacgaacagtgtagaaaagaatacttgctatatgtgactttgccatacaaaagcaggaccatcactaggcaaaacatgataggtgaacgagggaaaaacttagggcccttccatcaacaaatctgtagtgaaatttcactcatcgcatcttggctttggcattttttgcaggaatagtactagctttcatatctgcactcagaattatgtatattcagtaaagtctacaataaaaataggtcctggccaggtgcagtggttcacacn

SEQ ID NO: 328429 - DNA, 638 bp, Homo Sapiens
ttaaataccaagcaggtataaaacaggcagctaatttgattaaggaattgaaatgaagcagtcacattaaaaaagatggtaaatctaatttttcggatgaataataatgtcttaaatttgatttccagtgtttctatgtattatataaaactaattctagttaacaaagttgaatttgctgcatatagaaatgaattaagaatattttcatacgtggatcaaaacttcacaaacccagagggcttttcctacactctgtttggagtcttttctgactgctcatattccacacagtactttgatacatgtaaagtgcaaggcaccttgctagagagcataggagctatactaagatatagagtcctgccacaaatacacacaaaataacatgaatacaaagtgtcctaaaagtcatgccaaataaaacagagcatataactgggcagagggatggagagtcacatgctggaggaggtgagcgttgacatggtcttatgggatatgaacttgagatgttgaagtagaactgagacatttctggaaaactagatgtatgaacagaagcaggaggaataggagatggtttggaaaacagcaagcagctcagtttcttgggtgatccaggagaagaagctcaa

SEQ ID NO: 328430 - DNA, 744 bp, Homo Sapiens
cactgtctgccctgtctacacggctgtgacaaaagtgccacaagcctgaagcaagacgccgatgacatgtgcatgatatgtttcaccgaagcgctctcggcagcaccagccattcagctggattgtagtcacatattccacttacagtgctgtcggcgagtattagaaaatcgatggcttggcccaaggataacatttggatttatatcttgtcccatttgcaagaacaaaattaatcacatagtactaaaagacctacttgatccaataaaagaactctatgaggatgtcagaagaaaagccttaatgagattggaatatgaaggtctgcataagagtgaagctatcacaactcctggtgtgaggttttataatgacccagctggctatgcaatgaatagatatgcatattatgtgtgctacaaatgcagaaaggcatattttggtggtgaagctcgctgcgatgctgaggctggacggggagatgattatgatcccagagagctcatttgtggtgcctgttctgatgtttccagggctcagatgtgtcccaaacatggcacagactttttggaatataaatgtcgctactgctgttcagtggctgtttttttctgttttggaacaacacatttttgtaatgcttgtcatgatgattttcaaagaatgactagcattcctaaggaagaactaccacactgtcctgcaggtcccaaaggcaagcagttagaaggaactgaatgt

SEQ ID NO: 328431 - DNA, 807 bp, Homo Sapiens
  misc_feature (11)..(11): n is a, c, g, or t
  misc_feature (27)..(27): n is a, c, g, or t
  misc_feature (85)..(101): n is a, c, g, or t
  misc_feature (481)..(492): n is a, c, g, or t
tcgagacggantttgctctgccttggnctcccaaagtgttggattacaggcatgagacaccgtgcccagtctaaaataaagaacnnnnnnnnnnnnnnnnngagacagagttttgctcttgttgcccaggctccgcttttgactagtcgtgtgtgtgtttgtatgtatgtctctgcacgtgtgtgctcacgtccacctgtgctgtgtatagaattcgttgtctggggaagatggtgtattaatagtattctttagttaaacaaactatatggaagaggaattactttttgtcattctaaagaaaaggaaaattgagccaggaaagtagtctttaagaaattggccagggtggggcatgggggtgggtacaagccgatgagcaatgaaatattttggaaaagattgttagtcaagatgagtcacatattctgaggaaagtcgatttgcctagaatttacagtgatccaactactaattaagnnnnnnnnnnnncaactttccaatagagaggactggtgaccccaaagcactcgggaattctagtggtctgattccagcgaagaccatctcccttgctgcccttcatcagagggcaacacaacacggggctgagataacttgctgggtttaaatactgtatgtaactagctgaatgtccttcagcagctactcaaattttcttggtctcagtttcctcatctgcaaaaagagataaaatattattcatctccttaggattattaagtcaggattaaatgaatctccacatgggacccatttagaacagggcctagcgctcacattgat

SEQ ID NO: 328432 - DNA, 751 bp, Homo Sapiens
taatttcttcgatggctgccccaccccagcctatcatcccaggagcagagcaggtttgatgcggatctgaatgagacagtgccctgttcccagggctctggagagaggatggcaacctgtagtatgcccagctggtcgggcggggatgcggggatgcaggagagagcccatagcttctactcccagctcgcggccctgcccatggtttcctcttttgtttccaagaaaagccaaatggaaacattctggttttgctgggaaaagctcctttgctatctgggccaaaaaatggttccatccctttgagagggccgagaggaaaagggtcattttttccccattgttttactgggaaatttcttcgtttcttcactggtgctaggccctgagaaaaacatgagccaaacctcaactgagcacagtctacaaaatacttgcctagcacttctctccaaactgtcaaggtcatggaaaacaaggaaagacagaaactgtcacagcccagagaagactgagggggcatgacaactgtcctgtggtgtcctggataggaccctggaacagaaataggacgttacatgaaaaactagtgaaatccgactaagtccagagctcagttaacagaatgtaccaacggtggtttcctagttgtgacaaatgaaacacagtaatatgagatggtacaataggggaaactggggaggaggatgagggaattctctacactatctctgcaacttttctgtagatc

SEQ ID NO: 328433 - DNA, 612 bp, Homo Sapiens
  misc_feature (151)..(367): n is a, c, g, or t
  misc_feature (376)..(392): n is a, c, g, or t
gaaaggagtgagccaccacacccagctgtcaaagcacacttaaatatctgcatgtttagagagagttgagtaagtgagcatgaaaataaaaacacattcaaaaatgaagagaaggctgggtgcagtggctcacacctatacccagcactcnnnnnnnnnnnnnnnnnnnnnnnnnnnnnnnnnnnnnnnnnnnnnnnnnnnnnnnnnnnnnnnnnnnnnnnnnnnnnnnnnnnnnnnnnnnnnnnnnnnnnnnnnnnnnnnnnnnnnnnnnnnnnnnnnnnnnnnnnnnnnnnnnnnnnnnnnnnnnnnnnnnnnnnnnnnnnnnnnnnnnnnnnnnnnnnnnnnnnnnnnnnnnnnnnnnnnnnnntctgtctcnnnnnnnnnnnnnnnnntgaagagaaaagcaacaaacattcaaggaatgagaggctcgtgttgttttctttagaaattccttgatgtactcctaaagcaggcttgctgcaggaaggattatattatcaggatatctcttcagctttctcctttttaccctaatcaccctgaacatcaacaatacattcagactaaaggcatgtttcatgctatatattttataccgctgtgccgaaa

SEQ ID NO: 328434 - DNA, 578 bp, Homo Sapiens
  misc_feature (384)..(384): n is a, c, g, or t
  misc_feature (554)..(554): n is a, c, g, or t
caagccagatttctgaaactttttttaaaaattaaaatcccatgcacacacaagttacaggcaagcttgaatgtacactggaaacgcagacctctgttgctttattactaatggtgacaactttcctacatccttttaccagcttctagaacaaggcacccatgaagagggcaacacacatcatgccccactgctccctgtgcaccggaagaagggcctgatcatcagggacaggccgcctttcaagcctgacaatgatgtctgtccttgtaccattttcacatcctttgttatggcagacccgcaaaggaaggtttaatacctaaatcccctaatgacttcctcagtcccaagaaagtttctgtgtaaaaaagcagcagcttntcctgcggtgaaggggaaggtcaaagagtcaccaacacataaaggatttcaaaaaggaaaatttacaatttctcatgcacactctacagccctgctggtgccctgggccaagtgctgtgctggaggcacttctaaaaggcaggattcccacatgatgaagtgccaggctnctggagccagacagcctgggttca
